United States Patent Application Publication US 2009/0311680 A1 - sequence listing, part 8

SEQ ID NO: 81608 - DNA, 2130 bp, Saccharomyces pastorianus
atgcctatacataaaaaattgccgaagagtgaaggtaaggcgagggctaaacaaaaggttaacagggctgatccttctgatttagatgtggagaacatttacgaaacttccggggagtttgttagagagtatccgacagatattttgattgataggtttcacaaatggaagaaaatcttgaaaagtttgatcgcttacttcagagaagctgcctactctcaggaacaaattgcaaggatcaactaccagatgaaaaatgccgtaaaatttgcttttcttactgatttggaagatgaaacaaacaaactggttgatccaagtatatctaagttgcctactaagaaacctcagcctgtcccattggccgctcaaaaattggacagcaagtacgacacagatgtggaacagccgcagtcaatccaatcagtaccttcggaagaggtagcttcagcttcttctggcttcatgaaatttgggtcaggatctattcaagatattcaagtgattttgaagaagtaccatttatctttgggtagtcaacaatataagatctctaaggaaatcttggcatatattatacccaaattgaccgacttgcgtaaggatttgactacaaagatgaaagaaattaaagaattaaatggagatttcaagactaacataggcgagcatatcaaaataacaagcaggcttctgaataaatatattgcttcagtgaagttattagatgaagcatccacttcgggcgataagcaaggtgaaaaattaaaaccaaaacacgatccataccttttgaaattacaactagatttgcagctgaaaagacaattactcgaagaaaactatcttcgagaagcttttctgaatttacaatcagcagcactacaactggagaaaatagtatattctaaaattcaatccgcattacagcgctactcagcgttaattgattcagaagcacgattaatgatcaaaaatttgtgccatgaattgcagcaaggtattctatctagaccaccggctgtagagtgggataattttgtctctcatcatcctacctgtctgatgaatttaaaatcgacagacccgccaccgcaacccagaagattatctgatattgtttatcctaacatgaaatcgccgctggccaaatgcattagagtaggatatctactgaagaaaacagagtcttctaaaagttttactaaaggttattttgtgttgactacaaattatcttcacgaattcaaaagcagcgatttctttctagacagcaagtctccccgttcaaaaaataaacctgttgttgaacaatcagacattagccgtgtgaataaggatgggactaacgctggcagtcacccatcgagcaaagggacacaggatccgaaactgacgaagagaagaaagggtttgagttcttcgaatctatatcctatctctagtttgtctttaaatgattgctcattaaaggatagtactgactcaacttttgttttacaagggtatgctagttatcattcaccagaggacacatgtacaaaagaatcaagcacgacctcaaatttggcatgtccaacaaagacgcttgcttcaaataagggcaaacatcaacgtacgccttcagctctctcgatggtgtccgttccgaaatttctaaagagttcttccgtgcccaaggaacaaaaaaaggctaaagaagaagctaacatcaataagaagtcaatttgcgagaagcgcgttgaatggacgtttaaaatattttccgcaagtcttgaaccaactccagaggaatcaaaaaatttcaagaaatgggttcaggacataaaagcgcttacaagtttcaattctactcaggagaggtcgaacttcattgaagaaaagattctgaaaagtagaaaccataataatggaaagagctctcaaagtttcaaaaacagtacatatatcactccagtagacagttttgttaacctttctgaaaaagtaacgccatcttcctctgttaccacgttaaacactaggaagagggcaaatcgtcctcgttatatagacatcccaaaaagcgcaaatatgaatgcaggcgctatgaataccgtatacaggtcacaagtcatacaccagccattg

SEQ ID NO: 81609 - DNA, 2916 bp, Saccharomyces pastorianus
atggcatatcttgaagacgagccatcacgtcctattacgcctcaagatgtggaatacttgcgcgaatcagattggtatgattatgaggattatatagacttgaatcaagtgccgcttggttcctcacttccattaaaattagaagcaataccattgctatactctcctagaatatcctactttagaaaaataaatgatgatggttacgtactagcttacccatttggtaccgaagaatctcacaattgtctgattggcaagaatcatccagaattgacgcaggagaaattagcaactgaaagaaaacgagaaatagaagaacaactaaaattattacatattacgttaagcgaattgcaatcaaacaaaggcggaggttcggtaagtggaaattcggagcgctatgcacgcgaattaaaagcagaggtagctgaattaaaccacagattgcacacagtcaacaccatcttgagcgatttaaaaatctcggagactattcctggaggaaatactgatggtgatagctccagctcactctccgatactgatgtaaatttggaaaatgcaccgccaattcaaaatagaatatcgctattgaggaccaataccgtggagtcttttgtatcaatgagaaaagcctctactatgcaggttgagtccacctatgataaccgtttcatggtccataatatcgagttaaaaatcgataataaaatcaggcatcaccttttggaatacgcttccagtgctttcgaaagtatatctatgaggtttgctgtgacttataaatccgtaactattttaaaagaattactgggaaatgtgttgactggggtcagaacatctgtagaagattatggttcaatacttgaggacgatttagccagtaattcagaatttattgagcactttgagaaactcatcagagaagttccgagtgatgactttgattatgttgataattatctttttagactaatctcccctcaggttcagatcaaatcggacgttgaaaggaacgcagcagttattttagctgctagggatatagaaatgggaataattgatatagttcaagtgtatggaaaatcaggaaaaagaattcccgttgacgtcgatactattgttgaaactcgctattccactgtttcaaaggacattcagttgtgtacattgttcaaaaaggatttagagggtcctgaaggtagatttttccataaaaatggatatggttccgacaaagagtcagatatatggcccccatggattcctcttgaaatgtgctttgacgggtctttattagataagcatgtttttctaaaacggagatcaatgtttttgacctacgtcgctcccaatcccctattttttagtgcaaatgatacgtctgcattctcttatgattcgagatttcgtattgcatttccaggattggttctgacctcggactgtcaacaatactgcgctgtatatgcaatcgcagaagatttactttcctttggatcatcattggatgaaaaagttgagaaactttccaggatattatttactgatgaggtcagaaataacctggaaaatcttgatgtctctgttgtcacagcattacaagaaagaataaaggaactctattatacgcgagcatacctcaaacttcacgagccaagattgtttatgaaatcaggacaagagctaaccttcgatattcaaactagtacgttgaagttgacgttacttatgacggcaatcaagaaaacttacgacaggatggggagtggtaatagagtaatacagaaaagattgaggtggcaagttggaacagatgaattgatatgggaattgtacgatgagagtaaaactcctttcgtgactatcggattggggccctctacatttattcgttcagaaacttccgatggcactaatagtaataaagtatccatttcttccttacaatgtttcaaccagcaagaaaatcccgtttacactgaattgctggcccccttttatgaaaattcatcctataataagaacgcgccaatggtagaaattttttggatcctggggccatcagttggaggtatttcagatctgcaagatttgattgtttctctacagccattgattttcaagatggatcacaaaacatcggaaaaactaatgaattatctatttccaaagatagaacaaacttccatagaacccaattctccagaacttgtaccacgttcttccactagttccttcttttcatcgtctccagttttacggcacagtctttctaacggttctttatctgtgtacgacgcgaaagacgttgactcttgggacttgcgtagtatccagagcaaagaaggtatcaaaaagcataagggtgatcatagaaaattgtcagcatcactttttgtgcaacctgattataacatcaatgaaatggtcaaaagatcagggacatttttcaatgtaaaatctattataatccgaaaaactctaatgtccgtgtgttataagggttcacacagccttttgaccgatgttaataacctgattgttagagtccctgttttaaagtaccataacaaactgtggtcgagggaagaattttttactgctttgaaaagagacgtcgtaagaatagttttacaacatttgggaaatattattggtaacaaatttttgcctcataaaaaagagaataagaaaaaaacttctatggaaatacatcgattactaagtccagattctcaaaatcgtgataattcacatatccttgaagtcgaagggcataattcattttatagctccacgcactcttcagatatcagatcaataaactcagatgaaacgtataatgaaaatgatggaaatggagtaaagccattttaccctgttacgagtgagttttcaaaaaataaatga

SEQ ID NO: 81610 - DNA, 3258 bp, Saccharomyces pastorianus
atgtcgaattttatttcaaggctgcatatatcagatgaggagaatgtgacgtttaaggtcttcagcacacatgctctctttagccgtaacaacttgtctatgactcctaaaaagggacaagtaatgcaaatacgtccggattggccatttgcgaagacagccctagtatctgatcaattatctaactatattaaaattgtgggtacatcactctcttacctgagaattccaacagagcaggacgctaacccagtgtctataccagtctgtggctttgaaagattagacacatttctggatgaattttcaaattctaaattgatcgttcagtctacactaagacattcgtacgttagtcttgagaacattgaagttttgcatactttaagtcgcgcctttgacaaaatttacttgctaatatctagcagaacaaaaaggaatgcggctcataaagcgaatggtggaaaattgggggacctaaatgaagccaagaaaacttttaactggtcattgaaacttagaatgaaggatatttcatgttcgttactggtcgctgggtttcttccgaaaaacttggatcctgtggaagctgagaattttaacttatctgacgtaactagaggcgccaaagttgtttttacagaatcaatattgttagcggacagccaggagaaaaacttcactattattgatgcatccgtatatcgtttcatggatggcactacgtataagccctctcctgaggttattattcaatttaccaatttgttattgagttttaacgactcagatgaaattcatttttcacttcccaagattaaatttaagatggatgtaaatattatctggttgtggttttatattcggagtatatggataaaatttcgtcctaattcaaaattgagccgaaatccagtgagcagtgtaaaatctgtcaatgttctcgatagattaagagtagatataggaaagatgattatagagctaacgcttcctcataatacggaggtactcctaatattcgagaggattggactttcaagttccactaaaaatcttacaattgcatctttgtcagcgtacgtggtatcggtttatgtgaagcatattaaggtttatgtttccttgctaaatattaatgactttgagctagacactgaagagttgatctgcaagaaatccgctgttataaacacctcattgattcattttcatgccgaatatcattttagattttacatgataacggataacatagtcacgttgtataaatcgtttaagcaaattaaattggcattttccaatttgaatgaatttaagcgattataccctcagcaacagtttccgaaaaaagttccaaatttacatatttgttgccaggattttctaattgatattgaagaagatccttttgagcaggagttaggattaattttgaaagttggcgttttggaacaacgtgagaggttaaagaagcttgaagagttcaaggaaaagctatcaacatatgaggacatgaatgtacgtttaaggtcgctctatgatacctcccgtggacaaagttttttcccagagttttatgcgaatgatcaagaatatgagcaaaaggcctatctcaggttgttagaaaacttttcaacgtcatggattgccagatacaggaaagcaaaactttctttttatggtatgccttatcgggttatcagccgtgaagagcttggtacgaaataccacttgtttactagacagaaaaccagtactgttgctaacctcgtcgtaaaagatttggattttaaactaggcagtccttccttccctttagacaattatatggattttgtttaccagtatggaaaaaaagttccaaaatctacggagtacactttgctaattattcttggcctcaaaatcaaaagcgcgttatgggagttgcgtctgagagattatccaatacctgctatatcatttcccgacacatttacaacaggtgatgttgtatttgctgaaaagatgccagcaccttgcgcgcttcatactgtttatgttccttttgtcagctctgcccaaagaagcccctataatgacgccaatacaatatatggttcgcacatcattcgtacaattaattcagtcaaaacatatttcaatattaggtcaatggttacatcttcttcatctgccagaataacatgggggaaatctctgcaacccggttatgagtctttgatgctttggtttgattttttaaccaaacctctcatcgatccatccaaaaagctaggattttgggacaaattcagatatttagtgcatgggaagtggatatacgagttttcagaggaaagtgagatccacttaaatattaaaggttcacatgatccttataagattacagatgatggtgcgggtctggcgttctgctggtctggtggcaccacaatttacgttcataactccacggatcctaaagagtttttaaaaattgaatcccaaaggtttcagttggcagtgccagactttgccaaagttagtaaatttgataaagtctttatgaagctcgatggaagagtaatttggacattaggtttattttttgaacaaggcgatatatctaaggctggtgacgaagagaggttccttccaaataggccacattatgaaatacagctgatgaatccagatggagtcgcagatttggatcaccatgatacatacaaaggatttagaacatcttttatccacatgtcatttggtgtctattcttctgagcacggatccataaatagtctttatctcgcaccttacgctttaacacatttctttaagtggtggaatttatttcatacatatacatctggtcctattaggcaaggacagttatttacggatgtacttcaaaacaagacaaagtttggtcgctcattatttacaatagcttatcagctacatttaaaacggctaatggttacgcatatttatcggcatattactactcaatatgatcttgaaaaagaccgcaaaataacttttactggattgaaagggaggtttgattcactgaaaattgatttgcatcaaaaaagagttaaactgacccatacgaaccaaaaattaaataagtcaaaacctgtatggaagtttaagatgtctaggggtgagattgattgtgcagaagcagatattaggatattatcaactctgtttgatcaggaagcagttaaggaaattcttacttctggactcgatggcatatcttga

SEQ ID NO: 81611 - DNA, 1068 bp, Saccharomyces pastorianus
atgtctatgttaccgtggtctcaaataagggatgtgtctaaactattattaggctttatgctttttattatatcaattcagaaaatcgctagtattctcatgtcatggatattgatgctgcgccattccacaatacgaaaaatttcatttggatacttttttggtacgtcaataagacgagcgtttatcttaactgattttgctcaaatatatattggcaagataaccttgcgaataggttggaaacccggaattgtgtttcataatgttgatttgaagttatttgggaaggacagccatatcactgcacattcaactaaagactccagaacatatttcaatccgcgggatcaaacttttacctttgtaattaacaggcgagtcctatcaattttgaaacttgtgttctcattttccactttctttcatactttagctcttacagtgcctaatggaaaacaatataaattaaatatcggatccataacgatatcacacccacacgatgataccataaagttagaggcatttttgcatgattttacccatcctgaaacgaaagatactttgaaccatactggtttttttatggtctgtaaaattggaaaggaagatgatacaggcagcaactgcacaaaagttatactaaaaaattggaaatcaagtctcaaaataagtgatgtttgttggcatcttccagagaagaaagggaagaatttgcattcggagcctgttgagcctttttctgctggtgatgatgcggaaatgctcacttcatatcgtaagatgctaaagccttttcactacccactgaaaactttgaacattctggaccttaaggtagaaaatgtaaagttgatttacaaaaaaaagtttacaattcgcatatcaagtgttcaactttacttggaatcaatctccattctaaataatgtctccgctttggaacttttacccttaaataagcccacatggggcgattttgaactatcactttctgcaaatgctgttgtagtagatatcgatggtaatacagcagttagattccatttggaaatgtcatactga

SEQ ID NO: 81612 - DNA, 153 bp, Saccharomyces pastorianus
atgataatggattatctagtgagtccaattgttcatgatgaatttcatagaaaatatcaatctagaagatttatgaaagcttctataatttccgtccaatgggctttaaaggttagaaaaaacggctatgatataatgaccttgcatgaatga

SEQ ID NO: 81613 - DNA, 1047 bp, Saccharomyces pastorianus
atgtccaacccaatagaaaacacagaaaactcacagaaaactagttcatcaaggtttttgaggaatgtacaaaggttggccttaaacaatgtaacaaatacgacatttcaaaagagtaatgcgaataatccagccctaacaaatttcaaatctacactaaactcagtaaagaaggagggaagtcggattcctcaatttactagagaaagcgtatcaagatcaacagccgcacaagaggagaaaagaaccctgaaagaaaatggtatccaactccccaaaaacaatcttttagatgataaagaaaaccaagacccaagtagtcagcaatttggtgcgctaacttctataaaggaggggagagctgagctgcctgcaaatataagtttacaagaatcctcctcagcgaaggagataatccagcatgatcccctaaaaggcgttggatcaagcactgaggtagtccataactcggtagaaaacgaaaaacttcatccagctagaagtcaacttcaagttagaaataccgaaagtgaaactgatagtggaaaaaaaagaccaatttctacaattgttgaacaagaactgcccaaaaagtttaaagtgtgcgatgaaaatggcaaagaagaatatgaatgggaagacctagatgcagaagatgtaaatgatccattcatggtcagcgagtacgtcaatgatatattcgaatatctccaccaactagaggttattactcttccaaagaaggaagatctctatccgcatagaaatattcatcaaaatcgagatatcctagttaattggttggttaaaatccataataaattcggcttattaccggagactttgtatcttgccattaacataatggacaggtttttaggtaaagagctagttcaactggataagttacaattggttggcacatcatgccttttcattgcctctaaatatgaagaggtctattctcctagtataaaacatttcgcatcagagacagacggtgcatgtacggaagatgaaatcaaagaaggggagaaatcattttaa

SEQ ID NO: 81614 - DNA, 156 bp, Saccharomyces pastorianus
atgaatcttaagcagagatacggctctatattagggttttcttcccaagatggtgaaggacaagaaatagaaaaattttggaacaacgacacaagtccgattgttcctcttcaggagcttcctgaaccaaactttttccgcaaggccgcattttga

SEQ ID NO: 81615 - DNA, 279 bp, Saccharomyces pastorianus
  modified_base (247)..(247): a, c, g, t, unknown, or other
atgtccttgagagaagtaactaattatgaagtctcgttttacatcccgttgtcttacagcagcaggactcataaagtttgtaaactgccaaacggaattttagcattaataatatcggatccaacagatacttcaagctcatgctcactgactgtttgcacaggttcccataacgatccaaaggatattgccggtttggcgcacctttgtgagcacatgattctttctgccggttcccaaaaaatanccctgatccctggtttgattcccacacactag

SEQ ID NO: 81616 - DNA, 2472 bp, Saccharomyces pastorianus
atgtgttttcaacaatttcctgaatgcaattcgatatttatcaattcaaataaggtacctataatgagacttctctttcctgttagcgataaaaacactcggtttacaaaggatgacattaaaatatacagtcatctttggtgtgaacttttcggcgatgagtctccaggatctttgagctattacttagcttcaaaaggctggctcacaggctgttttgcctttacctcagaattcgctattggtgacataggattaattttggaattagaactgacaaacagtggctgggaaaatattaagagaattacgacaatagtacttaatagactcttgccttccttttacgtaatgaacatcgattacttaatcacttttttgaaagaacagaatttgatcgacctcgttagctttctgtaccaaagttcagaggatcttccaatggaagagtgctcaaaattaagcggtattcttcaggacgatttagaatgtttaaccccccctaatatattcaaaggatttaaatctcttatagaaatagatgatcccaacatcgaaaaatatgaaaacacaaaggccaatatacaatggtggacagggcaagctattaagttccaaaattttttaaaatctttcatgaatcatgacaacatgcgccttttactcttagggaatataaaatctggtaatatatttgataaaatgaaaaataaaagtgatatatgcaccgattttttctatgaatttgagtattatacggcaaacgttcatctagcaagtgataataaatttcattcaaacagctcgtatgaatttaattttcccacaggtaatctttttttaccagattgcgtcagcgatcctttaaaactacaacagctcttcttagaatgctcgttaaaatcgaaatttgctacgcttagacctcaaatttatagtgagcccactaggacaaagcctcaattagtcagtgagaaccagaattatgagatgtggatcttaaaagaagacccaaattttgcctcagacaataaatccgtcgtatcatttgaagttttggggttaggcatcaaacctagtccggaggcaacaatccacctggaagtactagcacaggcattatttatcatcacctcttcattcctttatcccgctctgagaattggttacacatatgagattgcctcatctagtaagggcaacgtaacactgcgatttactatttctggattccctgagggtgttttcacaatagtaaagacgttcgtggatacgctaaaacttattgcaacagatccaacgtttctttctaaagataccttgagaaaggcaaggattttagttagaaataaatacaagaacgcgtcatcggacaactgcgtgaagctagctagcgttggattgctgattgttttagagaaatatatatggactttagaggatagaattaatgcattagagcttaccgagttggaatccttcgaaaaattttgttttttattctggaggaatcctaaacatttggtcttgttcatgcagggaagccttgaatatgctgacgcaatcaaccgttacttaaataacaattttacgcagcacctaaaaatcagcaatgaagggagcaaaccgaccatacgtctctaccctcctcccagtacaaaagatctagatcaaggcacaaatgcctttatatcatataatggtcaccaggatgatcccaacaatagtattgtgtattttattcagactgcacaaagagatgacatcaaaaatctgacactaacctttcttaccgaatatctattttcactaacgctagtgcctgatctaagaaataaaaagcaaattgggtacattgttttgggaggactcagggttttaacagacactgttgggattcatataaccgtaatgtctggcagctcggggcacaatctggaaactaggatcaatgagtacttatcttacttgcagctgcaggtgctaaatagattcaccgagtttgattttcgaaggatacttctagagccgttcttaaatcttttaaaacagaacagtacgaaacagtttgaagggtcggctggtcctgtagacctattaaatgagatagtggcaaatgtgcaaaatggtgataattacactctcaacaataaacaaatgagacaacataggaaggtaagaaataaaattgcggaaggaaggcttaattttcaagaagatcatgaaatgattgatatctcatttttgcaaaagttaactctaaagaaatatttagcattcttcgagtccaaaatctctatatattccgctcaaagaagtaagctatcaataatgatcacaagtccaatggcagagaaggaaattgcaagcaggaaaatgttccttcagctagaggcctttctgaaaataaacggattcgccataaaaaatgaagacttgaagaaaattgtcgaacattcaaagggaatccta

SEQ ID NO: 81617 - DNA, 330 bp, Saccharomyces pastorianus
atgctcatcgatgacatgctcgataatatcgttttgctggcactagacatcgcatccatgctcatcgatgccatgctcgatgctattgtcttgctggcgctggacattgcgtccatgctcatcgacgccatactcgatgctattgtcttgctggcgctggacattgcgtccatgctcatcgacgccatactcgatgctactgtcttggatgcactagacatggcgtccatattcatgctgctacccatattcataccttccattttgaatgtcaaatataatacacttttttttattttctattcgattcttccaacaaatgtaatttga

SEQ ID NO: 81618 - DNA, 525 bp, Saccharomyces pastorianus
atggatctctttcatgacattataagggcgttcttagtattcacctctacgatgattatttatatgttgatgcttgctaccatgtcttttgttttaacatacgtttttgctgtaattactgggttagctttatcggaagtcttcttcaatagatgcaaaatagccatgctaaagaggtgggacatccaaagagaaattcagaaagcgaagagctgtcctggcttcggtaactgccaatgtggtagacatcccgaacccagccctgatccaattgctgttgccgataccacttccggaagtgatcaaagtactcgcctggaaaagaacaacgaatctaaagttgcgatttccgaaaataatcaaaagaaaacacctacacaagaagaggaatgtaattgtgccacagactcaggaaagaatcaagcaaacatagagcgcgacatccttgagaattccaagttgcaggaacagtccgggaatatggatcaaaacttacttccggccgaaaaattcactcataactaa

SEQ ID NO: 81619 - DNA, 300 bp, Saccharomyces pastorianus
atggaaggtatgaatatgggtagcagcatgaatatggacgccatgtctagtgcatccaagacagtagcatcgagtatggcgtcgatgagcatggacgcaatgtccagcgccagcaagacaatagcatcgagtatggcgtcgatgagcatggacgcaatgtccagcgccagcaagacaatagcatcgagcatggcatcgatgagcatggatgcgatgtctagtgccagcaaaacgatattatcgagcatgtcatcgatgagcatggaagcgatgtccagtgcgagcaaaacgttgggcgtc

SEQ ID NO: 81620 - DNA, 171 bp, Saccharomyces pastorianus
actcccacatatctaactatcagttttgttcaccatttgcatgcaaacaatagtgctaaggctttcggtattttcttattatttgttgtgtctgctgtcgtctacaaattactgcttttcgttagttggtgccttgaagtcactggtttaaaaaatgggacagcaaaataa

SEQ ID NO: 81621 - DNA, 804 bp, Saccharomyces pastorianus
atgtctgaaatcataaagaataacaagtcccattttaaacctaataatatttccgaggaacaaaaagctttgtttaacaggttctacacacatgtccgtgctacaggagtgccggagtctcgtcaacagctaatcgaagtagctagattattcactgatgatactgtattggataatgtgacaagaccttacttgattgcattagcgaagtatatgaatttgcaaccattcggcactgatgtgatgctacgttaccgtatcagatacaaaatgcttgaattgaaaaaagatgatctatctatatattacgaggatgcagaacaactctccctctctgaattgaaaacagcatgcgcctccagaggtattagaagtgtagacgtagagcctagcgtgttatattcgaatctaagattgtggctgaacatgaggctcaaggataagatcccatccacgctgttaatcatggctactgcctataactacggtaatgtgcaatcaaaggagtcattgtacgacgcattatgtgacgttttaatcggtatccctgatgaactataccatgaggttaaagtaaacgtcgttaaggaagatgaggcatccgctaagcaaaaattgaaacaattgagggagcaagaagaaattatgaaggaagaagagcagcaagaagagaacgccattgtgagcgtcaaggatgagttgagcttggacgaccaagacaagaacatagatgcggctgctccagacgtaaaaccgcatgacaccaagcctatcggagaagccgctgccatcaaagagaagtaa

SEQ ID NO: 81622 - DNA, 507 bp, Saccharomyces pastorianus
atgctgaaatacaggtctttgccaatcaagagagcaatccatcatccggcaccaggaattactccaatttctccccgtattatggtaagcaggttgagagtaataccatcttttaatttgaagttcaatcgttggaactcttcggtgccagaaagctcgaaaaaggagttaaaaacgacagacggaaaccaagaaagtgcgagtaaggtctctccagtaaaagagaaggaaaaagtaccctttaaggttaagatgcaaaaagcccttcgtcattattgggatggttccaaacttttggggttggagataaaaatttctaccaaattgctcatgaagagtgcagcaggctacccattgacgagacgagaacctttacaactgaaaagaactactcaagatatcgttcggttggttccatttgctgctttcctcattataccctttgctgaacttcttcttccatttgcattaaagttattccccaatttacttcctttctacttatga

SEQ ID NO: 81623 - DNA, 807 bp, Saccharomyces pastorianus
atgataaacatattcaaagaaaagggtattttgggtctgtatcaaggtatgacagtcactacggtggccacatttgtccagaattttgtttatttcttttggtacacatttatcagaaagtcctacatgaaacataagctgttaggactgcaatcactgaaaaaccgcgatggtcctatcacaccttctacgattgaagaattggtacttggggtagcagctgccagtatatcgcaactttttactagtcccatggctgtggtagctacaagacaacaaacagtccattctgcagagtctgccaaatttaccaacgttattaaggacatttaccgtgaaaataatggggacataactgctttttggaaaggtttaagaacaggtttagcattgacgataaatccttccatcacatatgcctcttttcaaagacttaaagaagtttttttccatgaccattccaacgatgctggcagtttgtcagcagtgcaaaatttcatcccgggtgtcctttccaagatgatttcgactctagttacgcaacccttgattgtcgctaaagcaatgcttcaaagcgctggctctaaattcactactttccaagaagcgctactatacttgtacaaaaatgaagggttaaaatctctttggaagggagttcttcctcaattgacaaagggtgtcattgtgcaaggtctgttgtttgctttcagaggagaattgacaaaatctttaaagaggctaatattcttgtactcttcttttttcctaaagcacaacggacaacgcaagctggcttccacttga

SEQ ID NO: 81624 - DNA, 756 bp, Saccharomyces pastorianus
atgtatgggtgtttggagatgttcggatgttactttatgcatgtcctttttattaatattaatgttgaagcaatatctaatgaagtatatatagttcacaatattgcttatgtgaaagatagtggaacattgagaatattcaaggaaagagacaggaggattcgagaaatgacaacaattcagccttttgaacctgtcgatttattcaaaactaacaatgtcaaccttgatatcttaacagaaaacttccctttagagttttattttgaatacatgataatatggccagaccttttttttaaaagttcagaaatgactgttgatcctacgtttaagcataatatctctggttacatgatggcaaaaacagaaggcaagaccacggagtggcacactcatataactgcagtgacagtagctccaagattccgccgaatatcgctagcttcgaagttatgtaatactttggagaccatgaccgatgtcatgccccatgaagtcaactttatcgatcttttcgtcaagtgcaataaccaattggccatcaaactttacgaaaaattgggatacagtgtctacaggagagtggtgggatattataactcagctgaagatgggtatccagataccctgaaaaaagtagatgacaataaagatgcttttgatatgagaaaagctatggctagggacaggaacagaagcgtacggccggatggaagaagccataaatgctatccacatgatgtaagattttaa

SEQ ID NO: 81625 - DNA, 810 bp, Saccharomyces pastorianus
atgagtttaccaaacattaattctgatatgaaaaaagacgcaaatcttgactactacaattttaatccgatgggcatcaaaagtttgttcttttcaagctacggagatccatgcatttttgggtccgataacacgcttctattgttatcaaagtggagatcaccagaagaaagtaaatggctccctattcttgatagcaacatggaaatatggaagatgtcaggagggaaggaaacgacagatatacatgtctggcccttggctttggcgtatgacacattgaattgtatcttagttaagggcaagcatatatggcccgagtttccccttccgttgccatccgaaatggatattagaatgccagtatttgttaagagtaaattactagaggaaaacaaagctatatcaaataaaaagaacgaaattggagctgacaccgaagtggaagaaggggaagaagacaaagaaatacagattcctgtttctatggcggcggaagaagagtatctgcgcagcaaggttttgtcagagctattgacagatacactggaaaatgacggtgaaatgtacggcaacgaaaatgaggtattggcagcattgaacggtgcatatgataaggctttgttacgtttatttgcgtctgcatgctcagaccaaaatgttgaaaaggctctttcgcttgctcatgaattaaaacaagatagagcacttactgcagccgttaagatatcagaaagagctgagctgccctctctcgttaaaaaaattaacaatataagggaagctagatatgaacagcaattgaaataa

SEQ ID NO: 81626 - DNA, 606 bp, Saccharomyces pastorianus
atggattctatgatggtcaaggaattcaacaaaaaattagaaacattaataaaccaagatttcaagaaggtccatgacctgcgcaaaaaagtggaagaatcaagactcaaatttgatacaatgcgttatgaaatcaaagcaaaagaagcagagttagaggcgaaaaaagctgaagccacaggagaagcacatagcaaggatgttagcgcaaaggacattagcgcaaacactaccacctcttttgacgaaacgccttctaccgaggatgaaaagccaaaatcagagggtgccgaagaagaatcaaagaaagaagcgaatgagcctactgttgatgacgttgctgatagaaaagaagatttaaagagtaacaaagtaaatgatgagccaccgattgaagaatccgaggaaaataaattactggaaaaactggaggatgaatttgtctccaatactacagcagcagtggaaacaatggaagaaatcactgacagttctgaaattctgggcttaataaagctgttccagaatttccagttggtttactttagacaatgtgtccaagaagtggaggcaaaccttaaagttctaaatggtttggaaatttag

SEQ ID NO: 81627 - DNA, 498 bp, Saccharomyces pastorianus
atgtctggttatttttcagggttttctctaaacaagatcaccgattcaattgctaccgctgctcacaagacccaagacactttgaacaatgcattagcaaatgcaaatgtaaacttaaatgaccctcaaacaaggctatcaattaaatcgcgaactagatttgttcaggaatcattgggtactgtatcagatataagtaaattaccaccacagtaccaattcttggagagaaaaagtgattccttagagaaggtatgtaaaaggattctactggtgtccaaaacgttcgaagtagagggctacgactatccaccaaatttaacggagagtatttcggattggtggtctctcaataaagatggctggtttggctctaaaaaatccgaaaattccactaaaaaaagggatgtaaccatgacgatgcctttttgccaagatcttttgctcaagccatctcaaaagccgctgttgactgcgaatgtgaatttcaaaatttag

SEQ ID NO: 81628 - DNA, 462 bp, Saccharomyces pastorianus
atgctgcaggtctttgctttgtgtgtcaaccgcatttgcagtgccttgtcaaacggcttcaactttctcatcatatatgggggcacgtttttccattcaggaaaatattccatacccatactggacgtagaccaccaattgaatggcaacagctcattgggtacggtgggattgtacttccatgtaccgttcacgccacctgacattataccaccagtgccacgttcaccaaacaatatgttcttgtgctttttctcatcgatcgtcttcgcctctgcgtttgttttctcgttcattgttaataacgtttgcaaggactttctcttcttatctctgaatagcgggttttccttcactgggtacattactggcctgtatccgctatacagaatatcgcgggtgagctccctagcttccaaatactgtgtagtaggtactttgggcagcgatctaaagtcatag

SEQ ID NO: 81629 - DNA, 120 bp, Saccharomyces pastorianus
atgggtgataattgtggtgtcctactctatagaatcagaccaaaatggctgagaggaattctaagatttctaatgtggagaggtatactctgttctcttatggaatttttcaccaattga

SEQ ID NO: 81630 - DNA, 972 bp, Saccharomyces pastorianus
atgcattgcgtactagcgcgaatattgttatggttcttaatagtagatctaagcgtcatacgggcgcttgtccttccaccattgaaagattatgatccgttagagcctttgatgaaaagagacatggccatgggtcaacggaacagattcaaagtcgacggccaattgccgcccatactaaatcccacagatgtgacagatgatcagagaagtctgcatacgcctggagagattccaccttatgtcatcaatcattgtcccttagtgcacttgtatagcgaagagaaatattggccatcggacattgctgagtacgttcaaaacttccaaattaaagataaaaacggcaattctatatccactcatgaaaatttgacactgcatgacttgaaggcggaataccacgtagatttatttgacaacaaaacggaaacgcatatccccagtagcgaggtatttttaaccagtttggacgatttcgacaaggaccctaaatggttgctcggtcatctacccgaatacggaacaggctacaactctaaggcgcctgctattctgatcgtagtcgacaaggggaacgggtgggttgatgcgttctggtttttcttctacccattcaatcatggcccttttattatgggccatggaccctggggcaatcacgtcggtgactgggaacactctttggttcggttttataaaggtattccaaaatatctttggatgagtgcgcattccagtggaacaggctacagatacgaagctgttgagaaatttaagaaactacggaaaagaaaacagcaagatagtgacgatggtggggatactatactggaaagaccgttgatttttagtgctagaggcacgcatgctaattatgcatccgctgggcagcatgctcatgacattcctttttttttcatgcctttgagtgatttaccgatcgtggtcccctgtgggatccatctttga

SEQ ID NO: 81631 - DNA, 174 bp, Saccharomyces pastorianus
atgatggatatacgagacaaaagatcaacatccttggggaattttttggccacatcttgcaagaagaaccagttgatatcatatataatttccaaatgtctgggtagcaaatggccaaagaggccgacgggccatttttccagggcctcttgcataacagtgtggttagtataa

SEQ ID NO: 81632 - DNA, 522 bp, Saccharomyces pastorianus
atggtttctcggacaatggatgttccaactacaaaagcaagtgattcaattccacttcctccaaacccagcaacgactcttccgctaatcagagtcgccattgaattcgaaagagcagaaatcaaagaccctatttcaaatacaataacagaaatcattaagcactcctttgtaccaagtatttcggccaagcgaccccataataacatgaaaacagcattagaaagagcatatccagtaactaaccaaccaatattgccgaagtcatggaacttaatgccaattgtatcatataaagtaaccactataacaatatccaaggccgccagaaaaagggttaatagaagcgatataacacataaagttaaactcaaagtactcttcattgcatatatgtctgacggtgaagcttatgtgttgtacaaacagatgagcatgatcatgagatttaaacttctatttaaagtagttccaagatgtcatttctttttacgaagcgcagccgtttatcaaccattctaa

SEQ ID NO: 81633 - DNA, 1236 bp, Saccharomyces pastorianus
atgataacggcactcgctatatcgtatgtcattgcagagggagtcgggccttttattggtggtgcatttaatgaacatttgtcttggagatggtgcttttatataaatcttccaatcggtgcgtttgcgttcataatattggcattttgtaatacatctggagaaccacatcaaaaaatgtggctaccatcaaaaatcaaaaaaattatgaactatgactatggcgaattattgaaagcaagtttttggaagaatacatttgaagtacttgtatttaaactagacatggttgggattattttatcttcagcaggctttacactactgatgttaggtctttcatttggtggaaacaacttcccatggaattcaggtatcattatttgcttttttaccgtgggccctatcttattgttactattttgtgcttacgactttcattttctgccattattggggcttcactatgacaacaagcggatcaaaccgttactgacatggaatattgcctcaaattgtggcatatttacaagctccataacaggattcctttcttgctttgcttatgaattacagtctgcttatttagtccagctttatcaactagtatttaaaaaaaagcctacattagcgagtatacatctttgggaactatcaattccagctatgattgcaactatggccatagcatatctaaattcaaaatatgggatcatcaaaccggcaattgtttttggtgtgctttgtgggattgttggatctggtttatttacgctaatcaatggagaactctctcagtcaataggttattcaattctccctggaatagcttttggtagtattttccaagcaacgttattaagctcccaggtgcagataacatcagacgatccagactttcaaaacaagtttattgaagtcacagctttcaactcgttcgccaaatccttgggctttgcgtttggagggaatatgggggcaatgatattcactgcatcactcaaaaaccagatgcgctcttcccaattaaacataccacaatttacgtctgtagaaacacttttagcgtatagcacagaacattatgatggcccccaatcttcactatcaaagttcataaacacagctatccatgacgttttttactgcgccttaggatgctatgctctttcattcttctttggaatattcacttcgagtaagaaaacaacaatatcagccaaaaagcaacaatga

SEQ ID NO: 81634 - DNA, 399 bp, Saccharomyces pastorianus
atgaagagtactttgagtttaactttatgtgttatatcgcttctattaaccctttttctggcggccttggatattgttatagtggttactttatatgatacaattggcattaagttccatgacttcggcaatattggttggttagttactggatatgctctttctaatgctgttttcatgttattatggggtcgcttggccgaaatacttggtacaaaggagtgcttaatgatttctgttattgtatttgaaatagggtctttgatttctgctctttcgaattcaatggcgactctgattagcggaagagtcgttgctgggtttggaggaagtggaattgaatcacttgcttttgtagttggaacatccattgtccgagaaaccatagaggaattatga

SEQ ID NO: 81635 - DNA, 210 bp, Saccharomyces pastorianus
atgaaacccttttccgtgcctgtgaagtttccgctttcggtcataaagaatatccgaattttagatttggacccttgttcagaagcttattgtctaagcctaaattcagtctgctttaaacggcttccgcggaagaaatatttccatctcttgaaatccgtacaagatattagacgtgtgttgggagtcgtatactgttggggtctgtaa

SEQ ID NO: 81636 - DNA, 2610 bp, Saccharomyces pastorianus
atgtctccggcacattactgtttactattagccatcgtcacattgctgggactagctaatgttgtctctgcgactacagcggcatgcctgccagcaaactcaaggaagaatggtatgaatgtaaatttttaccagtattcattgatggattcttccacgtattccaatgcagcatatatggcttaccaatatgcagacaaagtcaaattgggctctgttagcgggcaaacggatatatctatcaactataatcttccttgtgttacaacttcagggacatatcagtgccctcaagaagatgcatatggtaattggggatgcagaggtaaggggagatgctccaacagtcaagccgtttcatactggagtacagatctatttggcttttataccaccccaacaaacatcaccttagaaatgacaggttactttttaccaccacagacaggttcttacacgttttcttttgcaacagtagatgattccgcaattttatcggttggtggtagcattgcgttcgaatgttgtgcacaagaacaacctcccatcacgtcgactaacttcacaatcaatggtatcaagccatggcatggaagtctccctgacaatatcgcagggactgtctacatgtatgctggattccactacccaatgaagattgtttactcaaatgccgtttcctggggtacacttccaattagtgtgacactaccagatggcactaccgttagtgatgactttgaagggtacgtatatacctttgacaacaatctcagccagtcgaattgtaccattccagacccttcaaattatactgccagtactacaataactacaaccgagccatggaccggtactttcacctctacgtctactgagatgactactattactggcaccaacggtgtaccaactgacgaaactatcattgttgtcaaaactccaattactgccatctcatccagtttgtcatcatcttcaggacaaatcaccagctctatcacgtcgtcgcgtccaattattaccccattctatcctagcaatggaacttctgtgatttcttcctcagtcatttcttcttcagtcacttcttctctagtcacttcttctctagtcacttcttcagtcatttcttcttcagtcatttcttcttcagtcatttcttcctctgtcatttcttcctctgtcatttcttcctctgtcatttcttcttctgtcatttcttcttctacaacaacctccgcttctatattctctgaatcatctacatcatccgtcattccaaccagtagttccacctctggttcttctgagagcaaaacgagttcagctagttcttcatcttcttcctcttctatctcttctgaatcaccaaagtctacatattcgtcttcatcattaccacctgttaccagtgtaacaacaagtcaggaaataacttcatcattaccacctgttaccagtgcgacaacaagccaggaaactgcttcttcattaccacctgttaccagtgcgacaacaagccaggaaactgcttcttcattaccacctgttaccagtgcgacaacaagccaagaaactgcttcatcattaccgcctgttaccagtgcggcaacaagtcaggaaataacttcatcattaccacctgttaccagtgcgacaacaagccaggaaactgcttcttcattaccacctgctaccactacaaaaacgagcgaacaaaccactttggttaccgtgacatcctgcgaatctcatgtgtgtactgaatccatctcctctgcgattgtttccacggccaccgttactgttagcggcgtcacaacagagtataccacatggtgccctatttctaccacagagataacaaagcaaactacggagacaacaaagcaaaccaaggggacaacagagcaaaccacagaaacaacaaaacaaaccacagtagttacaatttcttcttgtgaatctgacatatgctctaagactgcttctccagccattgtgtctacaagcactgctactattaacgacgttaccacagaatacacaacatggtgtcctatttccaccacagaatcgaagcaacaaactacgctagttactgttacttcctgcgaatctggtgtgtgttccgaaactacttcacctgccattgtttcgacggccacggctactgtgaatgatgttgttacggtctatcctacatggaggccacagactacgaatgaacagtctgtcagctctaaaatgaacagtgctaccagtgagacaactaccaatactggggctgctgagacaaaaacagcagtcacctcttcactttcaagattcaatcacgctgaaacacagacggcttccgcgaccgatgtgattggtcacagcagtagtgttgtttctgtatccgaaactggcaacaccaagggtctaataacttccgagctaagtactatgtcgcaacagcctcgtagcacaccagcaagtaccatggtaggatcaagtactgcctctttagaaatctcaacctacgttggtattgccaatggtctgttgaccaataatggcataagtgtctttatttccaccgtattgctggcaatcgtgtggtaa

SEQ ID NO: 81637 - DNA, 2643 bp, Saccharomyces pastorianus
atgaaaatttccagttcaccatggaacgacggtggatacagcgcctatgagagaaacagagtcgctgtatcaccattttcatcagcgttggaaggcgaagaacgaatagaaacctctcgatctttgggtgatcattgctttgaacctttgccatacgtgacgaattatctttctattttcgcgctttttggtaaagagatatttggtgacaagggaaatgtgagctcaagaaatgaatatttgctaaaaaaatactactctttgaaaaagccatttgtattgcgacataatgggcatgcgttgaagaatcccgacatgccactccagaggaatgacatattgcaaaccaatttcatggttgacaaatttctgaatcgtactgtgcggtcagtgaattttaataatttcaagataatatcagatatgcaaagtaaaagcggtcgaggaacaaagtcaggcacaaatcagaatcaaagtgccgacgctattcaaaatatttgtctaccatctataccgtcggcgttgtcttatttccaatattataggaagctattgacagttaataccaaagaatgggatattttaaaactgcacagtttatgggtaccaaagctaaggaaggattttaaagatttttcgttgcatggtgataaaaactctccaaagccgatcgatagtcactatgatgaggataataccatgaaaaaaaatttattttttgaaagatctccaagtcgacagactctagatggtaaagggtgtgcctctaaggggtatgacatttcttccggtaatatgattatcctatccctattttctgaagataagctgccggctttaacttatcattgttccgtagaattaaatggaaacatttacatatttgggggattgatgccatgctacagctatgaggaggatgcgccgatgctgaacgatttttttgtagacggaataaagaacttacctccgcctttattacctcaagtgattaataatccatcaatggtcaataatcctcatctttatgtcgcttctataccatcatgccggtttagcaaacctaaaatggggggttatataccgcctccattgctatgtgttcaaggatccaaattaacagaccgatatattttcttttatggtggatttgaaatcaggacagaaacccgtggtgatgaaaatgggaagtatcatctcaagaaaagattatatgtgaataacactggttacatactcgatattatgtcgttcaagttcactaaaatagatatcatagtacaaccttccaaatataatgcgtatccgaccatgtcatcgaggtttggtcacttacaaatttctattgataatccaaataggagagctagcgttcattcttcaagcatgaacgaaattcataaaatggggagtgcttccatgaaacaaggtagcagcatcacttccgggcggcttgaaaaagcagcagtactttcatcattacctcataatactgtgcacacggttataatatttggtggttacagacaaaccggtgatgatcgttacgaagcaatgaatgatttgtggaagatagagatacccgtgatacgtcgcggtaagaaaggctattgtaagttttcagagacagctaacgcgatacgactgacgccaagggaaaaggacaaatcggattggcccgaagaaagagccttttctgccttttctgttcatgggacttcgttaatggataggagttctcttgacatgagactattgaacaacttaaaaaaccattttgttttaaaaccgtcatatatatcacaggatcgcgttgttagtcctaaaccggttttccccatgatggttcatggcacgcatcaagatcttttcaatagtggctctgcggcacaagaatcgcccaaagctggtgcctcggccagcagcgcaagtgctgcgagctttgatcccgatatggacgataatttggaaaattatatagtcaatccagggagaaaatcgtcatctattccaatgactgcgatagggagacagagattaattttaagccaagagaagccagtaggtaaaactgttgtattgcatggtgggtctaacggtctcaacgttcttgatgatatgtggttgatggacttagagtgtgagacatggactccaatagagacatttgcaaaggcagattcgagcgaagacggtgatgaaaaattggatagtgtgaacgtgggtctcgttggccacagaatggaaagtattggacgaatatgtgtatgtataggtggtatggtacaagaggatgttgaccaattttactcggagaatgatgatgagtctcctcgaaaacgcaaggtcgatacattaccgttgggtggtaattttttgaacacaattgatttaagcacgcagtgttgggaagaacataaaattactctgtccaagaaggaagacgatgaggacagacaagatagcgaaaatgaagacacgaattcaaatatagtagttggtgtcggtggcacttctttgcaatgtgacaaaagtattattttaattggcggattgatatctagacggagcaatgtaaaagaaatatatttacatggtaccataacgaaaagtatttttcctagtgtaaatcctagtgcataa

SEQ ID NO: 81638 - DNA, 4044 bp, Saccharomyces pastorianus
atgatacagaattattctagtaagcgtaaagatgagctggagccgcacctttttgccatagcagaggaggcgtacaggttcatggtccatgaaaaggctaaccagactgttgtagtcagtggtgaatccggtgctggtaagaccgtctctgctaaatacattatgagatactttgcctcagtccaagaaagcaacaatcgtgaaggggaagtggaaatgtctcaaatcgagagccaaattttagctactaacccgatcatggaagccttcggtaacgccaaaactaccagaaatgataattcctctcgtttcggcaaatatctgcaaattttatttgatgagaatactaccatcagggggtccaaaattagaacctatctcttggaaaaatccaggttagtttatcagccagagacagaaagaaattaccatattttttaccaaattttggaaggattgacagaaccggtaaaacaagaactgcatttgtcatctcccaaggactaccattatactaaccaaggtggacagccgaacatagctggtatagatgaagctcgagaatacaagataaccactgatgccctgtcattagtaggtataaaccacgagactcagcttggaattttcaaaattcttgcaggcttgctacatataggtaatatcgagatgaaaatgactagaaacgacgcatcactatcatcggaagagcaaaacctgcaaatcgcatgtgaattattgggtattgatcccttcaattttgcaaaatggattgtcaagaaacaaatcgtcacaaggtctgaaaaaattgtcactaatttgaattacaatcaagcgctaattgctagggactctgtggcgaaatttatttattccacgctttttgattggctagtagacaacattaacaagacattatacgatcctgagctggatcaacaagatcatgtcttttcctttattggtattttagatatctacgggtttgagcattttgagaaaaactcattcgaacaattctgtataaactatgcgaatgaaaaattacaacaagagttcaaccagcacgttttcaaattggagcaagaagaatatgtaaaggaggaaattgagtggtctttcattgagttcagcgacaaccaaccttgcatagacttgattgagaataaacttggaatactttctctattagatgaagaaagtagattaccatcaggctcagatgaatcatggacctcaaaactatattctgcctttaataaaccgccctcaaatgaagttttttcgaagccaagattcggacaaacgaagtttatagtaagccattatgctgttgatgtagaatatgaagttgaagggtttattgaaaagaatagagacagcgtttccctaggtcatctggatgttttcaaagcaacgacaaatccaattttcaaacaaattttagacaacagagaacttaggagtgacgatgctcctgaagagcaaaatactgaaaaaaagataatgatcccagcaagattaagtcaaaagaaaccaaccctgggatctatgttcaaaaaatcgctaggggaattgatggccatcataaattctactaatgttcattatattcgttgcataaaaccaaattctgaaaaaaagccatgggagttcgataatttgatggtcttatcgcaattaagagcttgtggtgtgctggaaacaatcaggatttcatgtgcaggctttccatcaagatggacttttgacgaattcgttcaaagatatttcctcctgacggactacagcttatggagtggaattctttataatccagacctcccaaaagaggcaatcgtcaacttctgtcaatctattctagatgctactatctctgattcagcaaaataccaaattggtaataccaaaattttctttaaagcaggaatgcttgcatttttggaaaagctaaggactaataaaatgaatgaaatatgcatcataatacagaaaaagataagggcaagatactataggcttcagtatttgcagaccatggaatcaataaagaagtgccaaagccaaattagaagtttgttggttcgtacaagggtcgatcatgagctcaagacaagagctgccatattactacaaacgaacattagagcattatggaaacgggaatactatagagctgccattgggcaaataataaaactacaatgtacctgtaaaagaaaattgattttagatagtgttaacaggaaattcatgctcatggcggcagtaattatccaaagctacatcagatcatatggtcacaaaacagattacagaacattgaaaaggagctccattcttgtacaaagcgccatgagaatgcagttagctagacgaaggtatatagttctgcaaaaagaagttgaagaacggaatattagggctagttacgggattggattactggaggaagctatcgaatttaagaactctttcattttgaatctagagatgttaaatgactcatatacaagattaacacagttgttgcagggagatttgtcaaatattccatctaagcaaaggcaagagtacgaaacgatagtaaatggttataatgataagatttccaagctgaagacgttacaagttgaaatcatgaatactttaaacaagaagaatgccttgaaggagagaaaaaagaagcaatcttctttaatacagtcacatatgcaaagtttggctgctataaaaggtaacaaaccttcaagattaagtgatgaagtcaaatcaatgaagcaagaactagcgtttattgaaaacgtaatagcacaagatttcaccaccacatattctgctaataagaatgataaagtgaaaggtttgggaatcgcaggacaacaagtaaaaccgaagctagtcaatgtaattcgtagagaatcaggaaatcctgatcttctagaattactaatggacctgaattgttacacattagaagtcacagaaggttacttgaaaaaagtaaatgttactgaggtgaatggagacaatgttctgggtcctatacacgtcattactacagtggtaagtagcttagtgagaaatgggttattgattcaaagtagcaaattcatctcgaaagtcctattgactgtagaaagcattgttatgagtctaccaaaggacgaaacaatgcttggtggtatcttttggttaagtaatctttccagacttcccgcatttgctgcaaatcaaaaaacattatatgaagggaatggcggtgatgaaaaagataagttaacactgatatatttgaatgatttggagaatgaaactttaaaagtattcgacaagatttattccacttggttagtgaaattcatgaagcatgcttcagcccacatcgagatcttcgatatggttttaaacgagaagctatttaaaaattctggtgatgagaagttcgctaaattattcacattcttaaatgaatttgatgctgtcttgtgtaaatttcaagttgttgactcaatgcatacaaaaatttttaacgacaccctgaagtatctgaacgtaatgctatttaatgacctaataaccaaatgtcccgcgttaaattggaagtatgggtacgaagtggatagaaatatcgagcggttggtgagctggtttgaaccaagaattgaagacgttcgtcccaatttgattcaaataattcaggctgtcaagatattacagttgaagataagcaacttgaacgagttcaagttactattcgatttctggtatgccttgaatccagcccaaatacaagcaattctgttgaaatacaagcctgctaacaagggcgaagctggagtaccgaacgaaatcttgaattatttagctaacgtgatcaaaagagaaaacctgtctttgccagggaagatggaaattatgctttctgcccaatttgactctgctaaaaaccatctgcgttatgacactagtgcaataacacagaacagcaatacagagggcttagctactgtcagtaaaattataaaattaggcagaacataa

SEQ ID NO: 81639 - DNA, 795 bp, Saccharomyces pastorianus
atgtcatttgaagtaggaactaagtgttggtaccctcacaaagaacaaggctggataggcggcgaagtcaccaagaatgacttctttgaaggaacgttccacttagagttgaaattggaggatggagaaactgtatccattgaaacaaatagcttggaaaatgatgatgatcatcccacgctacctgtactacgaaacccacctattttagagtctactgatgacttaaccaccctatcatatctgaacgaaccggcagtgctgcatgccataaaaaaaagatacatgaatggacagatatatacttactctggtattgtccttattgccgcaaatccctttgataaagtcgaccatttgtactctcgcgagatgatacagaattattctagtaagcgtaaagatgagctggagccgcacctttttgccatagcagaggaggcgtacaggttcatggtgcatgaaaaggctaaccagacggttgtagtcagtggtgaatccggtgctggtaagaccgtctctgctaaatacattatgagatactttgcctcagtccaagaaagcaacaatcgtgaaggggaagtggaaatgtctcaaatcgagagtcaaattttagctactaacccgatcatggaagcctttggtaacgccaaaaccaccagaaatgataattcctctcgtttcggcaaatatctgcaaattttatttgatgagaatactaccatcagggggtccaaaattagaacctatctcttggaaaaagacctgcagcatgcagctgcactgccgtcttta

SEQ ID NO: 81640 - DNA, 1206 bp, Saccharomyces pastorianus
atggttaaaatgagaagaataacacctacacgcctcctattcacatgcagatttatttcaaacaatgcttctccaccagtgcagcccttgaatgtgcttttctttggtagcgacactttcagtaatttctcattgcaagcactcaatgagttgcgtcaaaataatggaagcagtggtatagtggacaatattcaagtagtaactaggtcgccgaagtggtgcggtagacagaagtctattttgaaatacccgccgatcttcgatatggcagagaagcttcaattgccacgcccaattacatgcgacaccaagcaggaaatgttggcgctaagcaaactgacacccagtcgccaagaaaatccggagaacgacggctccggtgctccgttcaacgcgatcattgcggtttcttttgggaagctcattccgggtgacttgatccgcgcggtgccattggcgctaaacgtccatccttcgctacttcccagacataaaggcagtgcacctatccagcgagctctgctggagggtgacacttacaccggtgtaactatacagacactgcatccggatcggtttgaccatggtgcaattgtagcgcagacggagccactggcgatcgcaacaatgctgtcaaaagggagagtcaatgattcgacggcagatttcaattctgagggccttcctcggaggactgccatactgatggaccagttgggcgcccttggcgcccaacttttgggccaaacgcttcgtgagaggttatatctaccacagaaccgtgtgcaagcgccaacagcttacaaacccagttacgcccaccgtataacaacagaagataaacgcattcattgggcgcgcgattctgccgccgaactacttaacaaactcgaaacgctcggtcctctgcacgcgttcaaagaagcgacagcggcaagaaaggacgctcaaaattcagtattaaaacgaatattgtttcatgagtgtaaagtgatgagagacgcacgtctagataatggcagtaaaccgggcatgttcaaatatgatgatattaaagattgtattttggtcacctgtcgcggcaacttactactatgtgtgagccgcctccagttcgaaggtttcgccgtagaacgtgctggccagttcatggcgcgcctgcggaaaagatgcggcgccctgagtgaaaagttagttttcctgtaa

SEQ ID NO: 81641 - DNA, 105 bp, Saccharomyces pastorianus
atgaagggtaaggttaaaggttataaactgatatcaattaatgaaatcagtcaagagctagtggattattttagctcaaatatctcgatgaagacggaagcttag

SEQ ID NO: 81642 - DNA, 138 bp, Saccharomyces pastorianus
atgtcgtatattcaaacacgcaatagagaagacattgaaggtatatacgagaattattttacacactacatccaatgcgacttagccacgttccgaacgaaatgtttatatgtccaagttataacaaaaagcaattga

SEQ ID NO: 81643 - DNA, 726 bp, Saccharomyces pastorianus
atggactatggctacttttttcccgcacaacgtattgaagaaacaaatggtgtggatttttggatagacagtaatgctgaatttacacagtctaaaagacctgactcttcaacatccactctttcgagggttttaacggacaccacgaatgtatccaataatagtggatcactcaaaagaaaaaccatcaagaacaaaatattcccacaaaggaaaatattcaacgatagcgaatattttgactttggtaaagccaacactgattgtaagcatgtgtttaaaagtatttctaagcaactgatttttcttccaaggtgtttccaacatcacagtatccgaggctggatgaaagacagatactccgaatttggttataaaataaaaagaaatcaaaattgtcccccctcagcatgtgtacaggcactatacagtactagtagatccaataccgaagagtcaaaccccaacagtctggattctctgataatctataaatacatgcgatactctgaaaagaaaaaggaattgatgtgcagattttgccaggggaataattggattctagctgaaaactacctaaaacatttattctttgcgcacggcattttgtctgaatttaagcctcacactttataccatttcgagtctaagctgttaaaaatccagggaaaacttaatttcaaaattcaagtattaaaagagccagagtttagcaaaaaattttga

SEQ ID NO: 81644 - DNA, 153 bp, Saccharomyces pastorianus
atgtatccaataatagtggatcactcaaaagaaaaaccatcaagaacaaaatattcccacaaaggaaaatattcaacgatagcgaatattttgactttggtaaagccaacactgattgtaagcatgtgtttaaaagtatttctaagcaactga

SEQ ID NO: 81645 - DNA, 117 bp, Saccharomyces pastorianus
atggagagggcctattcgggagatatttctgctgctgacgataacttaaatccttttgaaagatacaaacgaaatgttgttcctcaagaagatgacagactgcataaattaaaataa

SEQ ID NO: 81646 - DNA, 192 bp, Saccharomyces pastorianus
cgagccgtaaaggactctagccctgttccctcagatctagatgaaaaatatgtgtctgcatcgggatctattactccaccaaggcctccaccttctaggtctagtccaaagaaagtgccgcctgttgtcccaaaaaagaatgataacctgaagaaaaagccacagtggtcccaaagaaaaagccattactaa

SEQ ID NO: 81647 - DNA, 366 bp, Saccharomyces pastorianus
atgcactcaaacctggcacctacggagacgcaagacgtatcatggtctgaaatcgatacactggatgatgtgaagaagatggcgaaagaacctatcgtcaacgacgggttcccacgagattttgagagcaatctcacgcaaatgcgcaagtcgcacgctcaactactgcgattaatgagggaaagaaatcagcgactaaagtatgccaagctgaggagctctcctcataaggatcagcataattctgccacgaataaagatcaagaaccagacgaggtattgcatgacccggaaatcgcacttgacggtgagaagtacgtgagccaagttgtcgatactattaaagatgttcaccgatgcttatga

SEQ ID NO: 81648 - DNA, 534 bp, Saccharomyces pastorianus
atggacatggacaacacggatatctccccaaccaaccatcatgaaatgctacaaaatctacaaaccgtagtcaatgagttatacagagaggatgtggactatgtagcggacaagatactgacgagacagaccgtcatgcaagaatcaattgccagattccatgaaataatcgccatcgacaagaaccatttacgagccgttgagcaggctattgagcagaccatgcactcgctaaacgcacagatagacgtcctgaccgcaaatagggccaaagtccaacagtttagctcaacttcgcatgtggatgacgaggacgtgaactccatagcagtggccaaaacagatggactcaatcaactatacaacctcgttgccaaggactacgctctcacggacaccattgagtgcttatctaggatgctgcaccgtggcaccattcccctcgatacttttgtcaagcaaggtcgtgaattagcacgccagcaattccttgtgcgatggcacatccaacgaatcacctcaccgttatcgtga

SEQ ID NO: 81649 - DNA, 255 bp, Saccharomyces pastorianus
atgataatgctaggcgacaaaactggaaaaatagtgagtggcagagatagtaatattttaatgcaccatattgattttaaagtagataaaaacttaatcaatactggagtcggaattctgatcgcgtttttgatatttacagttttgataccatcaaacgactggaaaattgacaagaagattagtattgcacttcttacgttgtatatagttgtcacatgtattagtgtttttttagaagttcaccaagcgtaa

SEQ ID NO: 81650 - DNA, 1122 bp, Saccharomyces pastorianus
atgactttattagcattggggaatgcacttcctgatattactagtacttaccagtcgatgaaatctggcgtgacttccttggccattggtgagttatttggtggcatattttttctgttaaccgttgtgattggactaatgggctgcgtagccactatccaatttcaacatgacaagtctattgaaacttacacagaagaaagctttgaccaaaatttatcgtatgatagaagccattatatattggatgtcggaatattcacttttatgctcttagtttcgggcacttttctagcagatggaagactgtacttttgggagtgtattgtcatggttttaacctactgctgttgtgctgtctatttaataaaaagctacaaatatccctgcgaaatcaatgatgctttagaaagagaggtagaaataaaaaaaactgtacttgcaaataatcatatcactgttccaaatcgatttacattaacgactaccagtgacattacatccacagacgatggaataagatatgtaaggcctttgggggatacacagattgatgaggacaacgctattaatttagatccaactcgtttaccaagtaaatccctggataacatttcgagatttaatcaaggtatacctgaaagaagggatttaataagacgtagaatacggggatatttacggtcgcattatcatggctgggtaagaatgacgttacaagatcttttgaatatatgggagaagcagaatctttttaacaatacagtaaaatcgttgtctttaccctccgatgatactcatttatttactaaagcttctttagatgaagaagggaggcctttaataagaaaaaggatgaattcattacaacctaaggatttttacaaatatttgtccctacggaatggggaaaactcaaattcgctggatactgcaatctctgctccccaaaacgagtatcaaacttactataatgaacccacaagtttgtttttgactgtgccacaaaaaaaaacctccaagaaatcattaagctgcgatcgcattccaaacttggtccggagtaataatattatattaaatgacgaggctacacgtacacaggaatctaccatgccttga

SEQ ID NO: 81651 - DNA, 141 bp, Saccharomyces pastorianus
atgaatcgccacagattgttgtggatgatgaaagtacatccaagcatgaatagtgccatgaatgagatcaaacttgtacttaactcttacaaaaaaaatgagatggttgtccatgagacgcagtgctttacacattattaa

SEQ ID NO: 81652 - DNA, 1716 bp, Saccharomyces pastorianus
atggagggctcatatctatctgcacaagaaaaccaacccataccggagcgattgatacctaggtcgaactcaacttcgaatttgtttgctttgtctagtacattctctaaactcaatgttaggaatgatgctgattacaattattcgaacccgaataagaagagacacatttataatagcgagatagactgcaggtctgtgacagcagctagaaaatttccagtaaggtcctgttcaatgacagccgcccagcaaagaaagagaactgcgctattcacagttagggaaagaaactcttaccatgaggggttcaataatgatcaagattatgtgaaccaataccagaagccacagtacactttcggagtatataaagaattaacaccttatcagctgcagcgctctaaaatgaaaacaagctttcaatttcccaatggcgaaatatacaagccaaaaattgatggaaaatgcacccacagcttgaaaaagcctgaattaaattcaagagattcttctttattcaaattcagcgagaagaaaggtcgccatttatcaaaagattttgtgggacctcataatgggacatcagtcatacatattcctcccaatgatacaggctacggtgtaaatagcttggagctgaacacttcagttccttcaacaataaaaagttcggtttcatcaacctctccgatatctgcagttaataccctaaccagcttgccagaaagtcaaaccgatgatgatgacggttatgaaaataaaactgtaactatatcttattgcttcgaaaatacggtaaatgaaaaacatggtagccatatagaaaaattggatttatcaactaaggaaaaaactaagccaacaactaattcaggcctatttgatagaaggaaaaagactattccgggcactgagaaatatagatgtataaagtcacaatcgaagttgaaactgggttctgttttgaagaaattatggcgtacttctggaaactcgaatacaaagcatggaaaaaaggatacaaaaagaaggaaaattcctatcgatgatatagtcacgcattctgatggaaattctgaagctgagagtgatattgaattaatggatgcaaatctggacggcattgaatttgacgacgacgaaactctaatggatacagattcaatttttgatgatctgttgtccaaggaaaatgataaatacgatttgaggcgaaggcaattagaaatacgacaaaagctccacgagacctcgcacaacgacgatggcaaggtttcttttcgagagaccgaaaagcataatgtcaatgaaggtttgatcgacaagaccataatcgaagaattttcaaagctcggtgaatatataagcgacacgagaaatcaaccaccaccaagatcgtccaagaggccttcattagacgacaatgaatctgcacgatacttctacaacatatcgacagatttgcgacagtctctgtcaggtccaataagcttaccaatgcatgttgggaacgacatggtaaataggttgagaaatgactgggagtatatcagattcgaagatagaaggaattcgctgccagattcctcatttgataaagtcgaaacacctccgaaaccaataaaaaaagatgtccggtttgcgaaagaagtatgtttagcaagtacttggtcatcgaatgcatatgagagagctaatccggaattcatatga

SEQ ID NO: 81653 - DNA, 600 bp, Saccharomyces pastorianus
atggagtacccagtaataccaagaaccacttttctaatagactcagtacaactaccagtcgatttccaagtcccaatgatagaatattatatcggcaaaataagttcttcagcagaattcaatcataccttatcttggtcacaatttctttatcttttcaaagaatatattttcaaacaatacaagtacaattactatattaaatacggtaaaaataaggtcacttttgaagatgcgttcgccgtggaaaaatggccaattacgttagacacagactctccagtttggtttaattttgcatggtatggatccttactctcgatgatcattttcatgtgcgtgcaatgtaagagaatgatatcttggaatccgtggacaactgctgaaccttccttttctatcaaatgggaggtctacaatgaatttggctgggagtgtattgtcggttggtttttacatttttacatcttcacaatgagtccacacttcaacttggggaaaaaactgtacttccaaagttttttctttagtgtattgtgtcttttagaatcgttagatttccttgcaaagcaactcgtagaaagattttctccattatga

SEQ ID NO: 81654 - DNA, 99 bp, Saccharomyces pastorianus
gatatttcgtatccatcagatgttgacgaacagttagtagcgttatcatttgaagatgtcgcgtcagactatgaatggttaatagaacatccgacatga

SEQ ID NO: 81655 - DNA, 2055 bp, Saccharomyces pastorianus
atgttaaaatgtatatgccgtgtctattcccagcctttggctcaaatggtcacttcaccgctgtttaaacatatgggtagcgcagggacatacacaattctacctattacaaatctgcgccatttatctacgaaaaactgtccattgaaaattaaatcaaatcgttcagaacctttgcagtttggcgattttgaacgacaggtgccatgttctaggaagagcggatcttcgaaaaatgttcagaagcgtttatacgagctccgacaattgaaaactgtattaagtgagacttttggagtaactgaatacgcctctttttttgaatctctacgaaatgccctgcatataaataattgctcagaaaatgaaaagaagaaacttttatatgatatcattttgcatcaacacgagttatacccagaggtggcaagaaaaattggattttatctaccaggtgaggtccacagatggttctggtatcatattccaaaatcagaatcttttaatcactatctttttcttttgaaaagtgatgttcttctctttacttctaactactgtacgagatttaccaataggctgataaaaggaactgagatggagaggcagttagccacgttccaaatatttttgcatgatgagacaaacataaaatttataatggaaaaagttctgaagttgcatacatttgacagcttaatcgctctagtaaatggccttgttaaggcgaaaaattttaggttcattaaagtatttattcaagctctactacagaagttggaacagcactgttattctggtaaagatggagcaaagcaaaagaacctgcgttatgtcaagttcaacaataccttactttattaccttttgaaaagtggaaatgttgagttattcatcaaaacctttcaagaggaactgaaattcattgtaagctcaggattgcttaatcacattgatggaaacgaacacatattgaattttcccattgaccactacttgaatctgctccgaatatctaataggcaggaggagcttttcaatgtaatttcctgcttacaaagcagcccactgatgaaatataaattgttcaaggagtttttaatgggtgaattaattgcatcttttcaagcctttcgtgacccgaaattggtgtgtaaatatctcctctcatcatacagctcaaaggcgtctgctaatattctgaatgccctagggatttgggggtggctctatcattcaaaatcaacgactttgacagctcctacgttagcaagagagctgaagaacaaaaataatattctaccgaacacaatgcgaatagggtcaccagtgactgttccaattttaactgaactgtatagaagccttttatcttcgagttctgtttcactggaaagtggtcaattcaagaattgtcttcttgatttatattacaagtacaagagttttctttccgaggaagctcataaatacaggtattggagaaatgataccggaatcctcaatgttttcctaaattatattagattccaagctcgtgaaccaaggctggcctacaatgttcttctggatttttattctcaacctttcgccaaaaaagtggttttaactaccacgctatgtcccttttccatagtagcctataaaaatcatacattaacgcaggctgaactatcagaattgctacaggtgatgcataaaaatggggtgcctttaacgtttaaattttgttctgcaatggtaatgcattatgtcaaaatgagagacgaaaaaggagcacgctcctggtacaataagatactcttcgggggctttgaaatcaggcatatggctttgatacagataataaaagaccaaggctggccgtttcccaaaaactttgacgaaactttactgacggaattggtggaaaataataacattaaagaacctactgatagcaccctgtttactgacgaagatatgttcgaagaagatggcaagcctagatttaatgatgatgatgttaataaatgtacaaatattataagagagacattgaaaagtctaaattaa

SEQ ID NO: 81656 - DNA, 210 bp, Saccharomyces pastorianus
atgaagccttcttgcacttttcttgcctcatcttcgtcttcatcaatatcttcgtcttcctcagaggagtcaaagacatcttctccttcttcttcatcactaggcgctttagtttcatcgttgtcatttactatttcttcctcgtccctagggaccagcttcgaatctcccgtctcttccataaaaggcaaattttatgtccttgtgtaa

SEQ ID NO: 81657 - DNA, 387 bp, Saccharomyces pastorianus
atgtcatacatctcgtcaatcttatccgacgatagaccagtaatctgtgtaggttgtttgatggattgttctcttaaaagcttcttttcttggatcctcctttgtctggtttcgtcgtcctcatcagaaaattcatcatcttcaatgaagtcatccaattcgtccaagattccacctttgtcagctgttctgttcctattttcatggtcttcttcatcacgcccatattcattgttcctaccgttgcgtaaaccagattcttcttcttcttcatcttcagaaaagaaatcttccaatttagacgtagaatctgccttgatgcagcgacgttgtcactttctgattctgcagcgtttccttcatctcctactctctttaatcttttaa

SEQ ID NO: 81658 - DNA, 702 bp, Saccharomyces pastorianus
atggctaaattacagaggaagagaagcaaggctcttgggtcatctctagagatgtcccagataatggatgcaggaacaaacaaaattaaaagaagaataagagatttagagaggttattaaaaaagaagaaagatatacttccatccacagtaataatagaaaaggaaagaaatttgcaagctttacggttggaattgcagaataatgaactcaagaataagattaaagccaacgctaaaaaatatcatatggtgagattctttgaaaaaaaaaaagcattgagaaaatataacagattattgaagaaaataaaagaatctggcgcagatgataaagatttacaacaaaagttgagagccactaaaattgaattatgttacgtgataaattttcccaaaactgaaaagtatattgcactatatccgaatgatacaccatctacagacccaaagggcgtagaattgacaaatcttagaagagaacaatttcttaaattagtagctgaaagaatggatgcgaacaccttaaacgtatctttcgaagagatattgaagggaaagaaattggatgaagattccatcggattaacattatcacctgataaagatcatgaggatggatcacaagtatcacctacacaggatagaaaagaattggatcaagttgtgggagaagatgaaaaggatgatttttttgagtaa

SEQ ID NO: 81659 - DNA, 1710 bp, Saccharomyces pastorianus
atgaatactgctggtttcaactcaccaaaaaaatccattgtcgaggagggaatggttgacaaccattcatcaactggaaattattctaacctatcaacaccctctattgagaaaaataagacaaataatgctgataatgaggaagaagtacgggagattgccatcccagagaagccagcttcagcatatgtcactgtttctatcatgtgtttatgcgttgcttttggtggatttatctccggctgggatacaggtacaatttccggctttgtaaaccaaactgatttcttaagaagatttggtacttacagtgcttccggagataaatactacttatcagacgtcagaaccgggttaatggtgtccatcttcaatgttgggagcgccgttggctgtcttttcctgtctaaacttggtgacatatatgggcgctgtgtaggtttgatgattgttgttgtcatctatatggttggaattgtgattcagattgcctctattgataaatggtatcaatatcttattgggagaattattgctggtattggtgctggtggtatcagcgtccttgctccaatgcttatatcggagaccgcaccaaagcagattagaggtacattgcttgcttgttggcaattaatggtcacatttgcaatttttcttggttactgtaccaactatggtaccaaaagatactcgaactctatccaatggcgtgttcctctaggtctatgtttcgcttgggccatttttatgataattggtatgactttggttccggaatcacctcggttcttagtcaaagttgggaaatttgaacaagccaagcattcttttgccaaatcgaacaaacttagcgttgatgatcctgctgtgattgcggaaattgatcttcttattgctggcgtggaagccgaagaagcaatgggaacagcgtcttggaaggaattattttctaggaaaactaaagtgtttcaacgtttgacaatgacagtggtagtcaattcgttgcaacaacttactggtgacaactacttcttctactacggcactactattttccaatcggttggtatgaaagactcctttgagacttctattgttttgggaatcgtaaattttgcatccaccttcttttcactatattctattgataagcttggacgtcgtaagtgtcttttactgggagctgcgaccatgacggtatgtatgctcatctatgcctctgttggtgttacaagtctatatccacatggcaaagatcaaccatcatctaaaggcgctggtaattgtatgattgtgttcacttgtttttatcttttcttttttgcctgcacctggggtccagtatgttatgttgttgtttctgaaacatttcctctgagagttaaatcaaagtgtatgtctattgcaacatctgctaatttgctatggggttttttaattgggtttttcacgccgtttatcacttcagcaatagacttctattacggttatgttttcatgggctgcctagtgttttcgtatttttatgtgttcctgtttatcccagaaacaaaagggcttacattggaggaagttgacgaaatgtgggtggatggtgttctgccttggaaatctaactcttgggttccctcttctagaaggggtgctgattatgataacgagaagatacttcttgacgacagaccttggtataagaaaatgatctga

SEQ ID NO: 81660 - DNA, 864 bp, Saccharomyces pastorianus
atgcattacaagaaagcatttctagcatctctattaagtagtattgcgctaaccgcgtacgctccacctgaaccctgggcaactttaactccaagctctaaaatggatggtggcacaacagagtaccggacctcattcggtctcgctgttatacctttcaccgttactgaaagtaaggtcaaaagaaacgtcatttcacaaattaatgacggtcaagtgcaagtaacgacacaaaaattacctcatccagtttcgcaaattggagacggccaaatacaagttacaacgcagaaggtgcctccagtagtgtcacatattgtgtcacaaataggcgatggtcaattacaaataactacagctaaaaatgttgtcacaaagtccacaattgctgttccaagtaaaactgtaactgcgacagcaacttcaaccgcaactgctgtttctcagattcatgatggtcaagtgcaagttactatttcttcagccagtagtagttctgtgctttccaagagtaagttagagccaacaaagaaaccaaataatgaaaaagtgatcaaggtgcaagcctgtaaaagttctggcaccttggcaataacgttacaaggaggtgttcttattgactccagtggtagaattggatcgatagtagcaaacagacagttccaatttgatggtccacctccacaggcgggcgctatttacgctggcggctggtcgataacgaagcatggcactttagctattggtgataatgacgtgttttaccaatgtctgtcgggcactttctataacctttacgatcagtctatcgggggccagtgcaatcccgttcatttacaaacagttggtctcgtcgattgttga

SEQ ID NO: 81661 - DNA, 969 bp, Saccharomyces pastorianus
atgaaaagaaatagtagcctcacgtctgcctatagacttgccccaaagccgttatttgctccctcttcgaatggcgatgctaaatttcaaaagtggggcaagacactggaaagaagtgatagaggaagcagtaccagcaattctattacggacccagaatcaaactatctaaattcaaatgacttgttgtttgatccagatagaagatatttgaaacatctggtgattaaaaataataagaacttaaatgtcattaaccataatgatgatgaagcaagcaaagttaaattagtgacgtttacaacagaatcagcttcaaaagatgaccaagcctcatcaagcattgctgcttcaaaattaactgaaaaagcacattctcctcagactgacctaaaagatgaccatgatgaaagcactcctgatcctcaatcgaaagctccaaacggttccacctctataccaatgattgagaatgaaaagattagcagcaaagttcccggcctattgagcaacgacgttacctttttcaagaataactactacatttcaccttccatagaaacgcttggcaataagtcattaattgaacttcgtaaaataaacaacctagtcattggtcacagacattatggtaaagtcgagtttctggagcccgttgatttgttgaatactcctttggatactttatgcggggatcttgtcacctttggaccaaaatcatgttcaatatatgaaaactgttccataaagccagaaaagggcgaaggcattaatgtacgttgtagagtgactttatattcctgttttcctattgacaaagaaacaaggaaacctataaagaatataacacatcctctactgaaaagaagtatagccaaactaaaagaaaacccagtgtacaagtttgaaagctacgaccccgtaacaggcacctatagttacaccatagatcatccagttttaccttaa

SEQ ID NO: 81662 - DNA, 156 bp, Saccharomyces pastorianus
atgctgaggaatcccactgcaaaccagtcagggagtggaaacagtctatttggaactaaacctgcctccactaccggctcattatttggaaacaacacagttctactgacagtacctatccagcgaatggggttgtttggggtaacacacgcttaa

SEQ ID NO: 81663 - DNA, 1761 bp, Saccharomyces pastorianus
atgtttggcaacaatagaccaatgtttggagggagcaacctttcctttggatcaaatacgtcatccttcggtgggcaacaatcgcaacaaccaaactctctttttggaaatagcaataacaacaataattccaccagtaacaatgcccaatcaggatttggtggattcacttctaccgctggcagtaatagtaacagtttatttggaaataacaatactcaaaataatggggcatttggccagtcaatgggtgccacccaaaactcaccatttgggtcgttaaactcctcaaatgccagtaatgggaatacttttggaggatccagttcaatgggttcttttggtggtaataccaataatgcatttaataacaataataataacagaaacagtaccaattccccgtttggtttcaataaaccgaatacaggagggaccttgtttggttcgcagaataataatagtgcaggtacttctagtttatttggcggccaaagtacaaataccactggaacattcggaaacaccggaagtagtttcggaacaggcttaaatggcaacggctctaacatatttggggcagggaacaactcacaaagcaatactacaggcagcttatttggcaaccaacaatcttcagcgtttgggacaaataatcaacaaggaagtctgtttggacagcaatctcaaaacaccaataatgtgtttggtaatcaaaatcagctggggggcagttccttcggatcaaaaccagttggttcagggtcgctgtttggccagagcaacaacactttaggtaatacaaccaataatagaaatggattgtttggtcaaacgaatcccagtaaccaaggcagttctaacagtggattgtttggacaaaactcaatgaacagcagcactcaaggggtatttggacaaaacaataatcaaatgcaaattaatggcaataacaacaacagtttatttggaaaggcaaacaccgttagtagtttcggtcagcaaccgaacaacaactctgggtctttattcggaaacaagccagcaagtggcgggttatttggtcaacagggcacttctacaaacaccttttcaaattccgcatcaggaggtttatttggccaaaataatcaacagcaagggtccgggctgtttggtcaaaattctcagacaagcggtagtagtggacttttcgggcagaatgatcagcaacagccgaatgcttttacccaatctaatacaggaacaggtctttttggacagaacaacaaccagcaacaacaatctacaggtttgtttggagccaaaccagcaggtaccacaggttctcttttcggtggtaattcttcaacccagcctaactctcttttcggtactgccaatgtacctacgtctaatacacagtcacaacaaggaagtagtctttttggtgccacgaagccgaccaacatgccctttggaggaaatcccactgcaaaccagtcagggagtggaaacagtctatttggaactaaacctgcctccactaccggctcattatttggaaacaacacagcttctacgacagtaccttccacgaatgggttgtttggtaacaacgctaacaattcaactagcactacgaatacgggacttttcggtgcaaagcctaattctcaggccaaacctgcattagggggagggttattcggcagacctgcaggcatgcaagcttgcactgccgtcgttacaacgaaagaagaaggaagtagggtgaagtaa

SEQ ID NO: 81664 - DNA, 759 bp, Saccharomyces pastorianus
atgctaacgataggtgcattacaagaaataaagtctgcagatataatactggcagataaactggtaccgcaagccattttagatttaatacctccaagaactgaaacctttatagccaagaaatttcccggtaatgcagaacgagcacaacaggaattactagctaaaggtttagaatcgttggataatggattgaaagtagtccgtttgaagcaaggtgatccgtatatttttggccgtggtggcgaggaatttaatttcttcaaagatcacggatatattcctgtggttttaccgggcataagctcatccctagcttgtactgtattggctcagatacccgctactcaacgtgatatagcagaccaagtgctcatatgtactgggactgggagaaagggcgctctgcctataattcctgaatttgttgaaagcagaaccaccgtctttctaatggcactgcatcgcgccaacgttctgatcacggaattattgaagcatggctgggatggtgatgtccccgctgcaattgtcgagagaggatcgtgcccagaccagcgtgttactagaactcttcttaaatgggtaccagaagtcgtggaggagattggttcaaggccccccggtgtcttggttgtaggcaaggctgtgaatgcattggttgaaaaagatctgataaattttgacgaatcaagaaaatttgtcattgatgaaggttttagagaatttgaggttgatgtagatagtctatttaagtaa

SEQ ID NO: 81665 - DNA, 1071 bp, Saccharomyces pastorianus
atgaaatttgatgtcaaatcttgctatgattccataccaaggatggaatgtatgaggatactcaaggatgcgctaaaaaatgaaaatgggtttttcgttagatctcaatatttcttcaataccaatacaggtgtattgaagttatttaatgttgttaacgctagcagagtaccaaaaccttatgagctatacatagataatgtgaggacggttcatttatcaaatcaggatgttataaacgttgtagagatggaaatatttaaaacagctttgtgggttgaagataagtgctacattagagaagatggtctttttcagggctctagtttatctgctccgatcgttgatttggtgtatgacgatcttctggagttttatagcgagtttaaagccagtcctagccaggacacattaattttaaaactggctgacgatttccttataatatcaacagaccaacagcaagtgatcaatatcaaaaagcttgccatgggcggatttcaaaaatataatgcgaaagccaatagagacaaaattttagccgtaagctcccaatcagatgatgatacggttattcaattttgtgcaatgcacatatttgttaaagaattggaagtttgtaaacattcaagcacaatgaataatttccatatccgttcgaaatctagtaaagggatatttcgaagtttaatagcgctgtttaacactagaatctcttataaaacaattgacacaaatttaaattcaacaaacaccgttctcatgcaaattgatcatgttgtaaagaacatttcggaatgttataaatctgcttttaaggatctatcaattaatgttacgcaaaatatgcaatttcattcgttcttacaacgcatcattgaaatgacagtcagcggttgtccaattacgaaatgtgatcctttaatcgagtatgaggtacgattcaccatattgaatggatttttggaaagcctatcttcaaacacatcaaaatttaaagataatatcattcttttgagaaaggaaattcaacacttgcaagcatatatatatatatatacatatagttaa

SEQ ID NO: 81666 - DNA, 729 bp, Saccharomyces pastorianus
atggtcgataatgaggctatttacgacatgtgcaaaagaaacttggatatcccaagaccaagctttgcaaacttaaacaacctaattgctcaagtggtatcatctgtgacagcatcattgagattcgacggttcattaaatgtagatttgaacgagtttcaaaccaatttggttccatatccaagaattcatttccccttagtttcatattctccagtcttatccaaatcaaaggcattccatgagtccaactctgtgtcagaaattacaaacgcttgttttgaacctggtaaccagatggtcaagtgtgatccaagagatggtaaatacatggctacttgtctgttatacaggggtgatgtggtaacaagagatgttcaaagagctgtcgagcaggtgaaaaacaagaagaccgtccaattggttgattggtgtccaactggtttcaagatcggtatttgctacgaacctccaactgccacaccaaactcacaattggccactgtggatagggccgtctgtatgttgtcaaataccacatccattgctgaggcttggaagagaatcgatagaaaattcgatttaatgtatgccaaacgtgctttcgtccactggtatgtcggtgaaggtatggaagaaggtgaattcaccgaagctagagaagatttggctgctttagaaagagattatatcgaagttggtgccgattcttatgccgaagagttttaa

SEQ ID NO: 81667 - DNA, 1644 bp, Saccharomyces pastorianus
atggaaagatatctagatatgtccagtatgaaacacatcttttatctctggttgaaagtgaaatgtggtgatgagcaatcctcttcaactaaccttccctcgttcaaaaccctcgcgataatacacagaatgttattacgtttttctaatacagatgagctaaacgattttttaaccaatcccgttgttttaagtacgggatatacatcaagtgtgcaattcgagttgattgaattttgtcattctctgtattccatcaaaggagacagaacaaaaagcattgatgactcaatattgatggaaagagttgataaatttattacaagacttaataataatatttcaacacgaaaagagctatatatgtcagtggttcaagcgtacgtctctactaacaatttcgagaatttaaaagtaatcttggaaaaaatccagagagataatgatattagcatagacggttcgtttcatttgtgcatttctaggtattttgtcaacaccaatcaattcgaaggacttttcaaatattatcgcagtgtagttaaaaccactgatggcaaaacgcgattacggcccgcatttattcaacaattatggtcatgtgccgtaaatgtttatccaatgctggcaaaagaaattacaaatgacctacttgtgactctaaaaaggagccaatacagcaaatgtctcacttgggtgtacacatttttacaagaaaatgcccatatccatacgagaaagatcaatggaggagaagactcttcgttatctggtttcaacgcggttgattttgaaaggtttgaagagttcaagaaaaaagtttctcacaatgatgtatatggagcagaattggtgatttcgaatagtttgaaggagggcattgcgcctcaattttcatttttgtattccgttttggcattatgcttgagaaactctttaactggtttggcacgtgtagttgatgtgatattaaggactagattccgctatatcccactaaaagtcgatatattatggttgaaatgggagatcatttctaattatagatcttttgaaaagttgtctgctgaacatttaaaagaactggaattcaaactgaaggaatttgaacgagtacatcaaaaggagctttcagttcaaaactatttacaacttactcaaatatgtttccacacccgtgatttcaaatatgcatgttacctaatttcacaagctagaaaaaatttggatacttctaataacaaacagtggatgatgtattacatgacatctttaaagttggcgtcaagaatgcatgaaagcgaacggtttagtaggattttaaaagactggaattgtaatcatagggcaagcctgattactccaggttgcattagacaaatcaaaggctttatgaaatattttgagaaaaggcctgcttacatttcaactgctgcttccattgataacaaggagataaaggatcgcattgacgagttagtacttagatatgtggactataaataccaggggcttgagaatatgagaaagttaacacttttcttaaaagaatggtttgatgaagagatttcactattaaagttggagcaaaatgaaaggaaaaggaagctttttgaagagaataaaaaggaggaggaggagtaa

SEQ ID NO: 81668 - DNA, 330 bp, Saccharomyces pastorianus
agaggatccccaataccagcactagaattctgcaaaaccgcaaaatacaggaatctcaactcggggaaaggtttattgcaaaaacttaactttgttaaaaaacggaaatctttcaaacagccttcaggcgtcatttgtagccattataacagcaatgttcaaaaccgtttgaaaaggacaaaacagtcatcaacaaagatagcctcttcatcatctgtggagacacaaatatcttcatcctcatcgccattacccaataaagcgatcggtaaaaatgaaaacagcgttgaaaacggctttaaaaagctaaatttgcatgatatcagttaa

SEQ ID NO: 81669 - DNA, 216 bp, Saccharomyces pastorianus
atggggtgggaaagtgactccgagcgagattctaaaggcgacaagacacagagtcgaaacaaggacgtttcaaatgtttcacagatacatcctgatggactgggaattggtgccaagttaaataaggcaataaacgtggaggaggcttcatttatgcccgtcgtaaaaatcgataaaatgacgggcaccaaagttgatgacgacaaaaaaaaataa

SEQ ID NO: 81670 - DNA, 1260 bp, Saccharomyces pastorianus
atgaatcaggaagacaacacgggcggagggggcatttttggtcttttcaaatggactaaggatgcgctgtttggtacggacatatcaccttcaatgaaatataaagatcaggaagaacgaagagaccgatctaggtatgcccaagacgacacaaatttttctatgaagtttggaaatgactccaacaggaggagtacaaacttatcgaggtcaaattcgtggtctggtctggattcaacgctccataggaagtacgagttactcccagagtacaacgagaacggctttaactcaattgttaacggtgaccaccacagcaaagagagaatacgatctttacgaagtcctgctccgatagtaccgagagaaccacttcgtaacgaacctacggatacatttggtcacagactacacacaaaaaggagaactataaatgagctttccaattcgcagataccctttataccacctcaggaagacgaccctttgctctcgaaattatttaacaaggatggagttaatgaggttagaagatcgccctataagttatcggttaaagatataccaggcaaatttccatctcccttaacaaaacgtgatgaaatagacaattactatgtccgggacgaagatgcttgccacaagaatagagagtataaaaaggcatattttgatctttttgcacaaatggacttgaacagtagagacctggaagatttgtgtgaggatgttagagagcagcgtgagcaattccacaggaatgagcaaacttataagcaagcatacgaggaaatgagagcagaactggtcaacgagttgaagaaatctaagacactctttgaaaattattattcattaggtcagaagtacaagagtttgaaaaaggtccttgatcaaacgatcagtcatgaggctgaactggccacttctagggaacggctgtatcaggaggaggatttgaaaaactttgaaatacaaacattgaagcaaagactatccgatttagagctgaaatataccaatttgcaaatagaaaaggacatgcagcgggacaattatgaatccgaaatacatgatttattattacagcttagccttcgtaataacgagagaaaagatacttctgctggttcgaatattttttcaacaggacaatacgacaggactccattccacaatggaaataacagttacgactctaattcgcattcatgggacactgattacttaaaaaatatagacggattcatagaacgctga

SEQ ID NO: 81671 - DNA, 357 bp, Saccharomyces pastorianus
atgttatctcttataaatagaagtattcttcattcaataccaattactcgtcacattcttccaatccgattaatattggttaaaatgaaccatgtgcaaatcagaaacataaaattatatcactttatttcatatggtttcatgcttacaaagcttactgtctttctctttaacttattttctacaggctacgaattctttgcaggcttactttactcatatcattattacctatacaaatatatattaaagaaatccaaacaaaaatgcttgaaaagcatacagcttccgatacatcatgtatatagaaaatcacagtacaaaagttttgaatttatgtataaccgtttcgcctga

SEQ ID NO: 81672 - DNA, 291 bp, Saccharomyces pastorianus
atgacaagcgaaccagagtttcagcaggcttacgatgagatcgtttcttctgtggaggattccaaaatctttgaaaaattcccacagtataaaaaagtgttacctatggtttctgtcccggagaggatcattcaattcaggctcacgtgggacaatgatcatggcgagcaagaagtggctccaggatatagggtgcagttccattcagccaatggcccttacaagggtggcctacgcttcctaccatcagtgaatctgtctatcctaaaatttcgagtttcgaccaaatcc

SEQ ID NO: 81673 - DNA, 111 bp, Saccharomyces pastorianus
atgagagccttagagtatttcggtaaaggtaacatcagattcaccaagcatttaaaggagccacgtatcgtggcgcccgatgagcttgtgattgatatcgcatggtgtggt

SEQ ID NO: 81674 - DNA, 1422 bp, Saccharomyces pastorianus
atgatcttcctaaacaccttcgcaaggtgccttttaacgtgtttcgtactgtgcagcggtacagcacgttcctctgacacaaacgacactactccggcgtctgcaaagcatttgcagaccacttctttattaacgtgtatggacaattcgcaattaacggcatcattctttgatgtgaaattttaccccgataataatactgttatctttgatattgacgctacgacgacgcttaatgggaacgtcactgtgaaggctgagctgcttacttacggactgaaagtcctggataagacttttgatttatgttccttgggccaagtatcgctttgccccctaagtgctgggcgtattgatgtcatgtccacacaggtgatcgaatcatccattaccaagcaatttcccggcattgcttacaccattccagatttggacgcacaagtacgtgtggtggcatacgctcagaatgacacggatttcgaaactccgctggcttgtgtccaggctatcttgagtaacgggaagacagtgcaaacaaagtatgcggcctggcccattgccgcgatctcaggtgtcggtgtacttacctcagggtttgtgtctgtgatcggttactcagccactgctgctcacattgcgtccaactccatctcattgttcatatacttccaaaatctagctatcactgcaatgatgggtgtctcaagggttccacccattgctgccgcgtggacgcagaatttccaatggtccatgggtatcatcaatacaaacttcatgcaaaagatttttgattggtacgtacaggccactaatggtgtctcgaatgttgtggtagctaacaaggacgtcttgtccattagtgtgcaaaaacgtgctatctctatggcatcgtctagtgattacaattttgacaccattttagacgattcgaatctatacaccacctctgagaaggatccaagcaattactcagccaagattctcgtgttaaggggtatagaaagagttgcgtatttggctaatattgagctatctaatttctttttgaccggtattgtgtttttcctattcttcctatttgtagttgtcgtctctttgattttctttaaggcgctattggaagttcttacaagagcaagaatcttgaaagagacttccaatttcttccaatataggaagaactgggggagtattatcaaaggcacccttttcagattatctatcatcgccttccctcaagtttctcttctggcgatttgggaatttactcaggtcaactctccagcgattgttgttgatgcggtggtaatattactgatcatcacgggacttctggtttatggaactataagggttttcatcaagggaagagagtctctcagattatacaagaatcctgcgctacctactttacagtga

SEQ ID NO: 81675 - DNA, 810 bp, Saccharomyces pastorianus
atgatcatctttgtcattgaactagcttacttcgtttgtctctgttggataagaccgtatttggacaagagaactaatgttttcaatattgctattcatttggtgaatttgatcaatgcatttttctttttgtttttcagtaatttgttcaagcaaccagcagtggtttcgtcagtgatggcggttattctgttcgttctgaacgcggtgtttgctctattcctattactgttcactattgtcacctgtacactggcattactacacagaaacccagatgtccgttaccaaccaatgaaagatgaccgtgtgtcattcattcctaagattcaaaatgatttcgatggcaaaaacaaaaatgattctgaactgtttgaattgagaaaagctgttatggacaccaatgaaaatgaggaagaaaaaatgttccgtgatgacactttcggcaagaacctgaatgcaaacacaaatacagcaagactctttgatgatgagactagttcatcctcttttaagcaaaattcctctcccttcgatgcctcggaagtaacggagcaacctgtgcaaccaacctccgctgtcatgggtacgggtggcagcttcttgtctccacagtaccaacgtgcgtcatctgcttctcgtactaatctagccccgaataatacaagcacctccagtttaatgaagcctgaatcaagtctctacctggggaattccaataaatcatattcgcatttaacaacaacggcagcaacgaaaacgcccgcaacaacaacccatatttgtaatccaatatatactcacatgtaa

SEQ ID NO: 81676 - DNA, 3144 bp, Saccharomyces pastorianus
atggtcgaaaatagtacgcagaaggccccacatgccggaaatgatgataatagctctaccaagccatattcggaggcgtttttcttagggttcaataacccaacgcctggattagaagctgagcactcaagcacatcgcctgcccccgagaactccgaaacacataataggaaaagaaatagaatatcgtttgtctgccaggcttgtaggaagtcaaaaacaaagtgtgatagagaaaaacctgaatgtggccgatgcgtcaagcatgggttaaaatgtgtttatgacgtatcaaaacagccagcaccacgaattccgagtaaagatgccattatatcaaggttggaaaaagatatgttttattggaaagataaagctatgaagctactaacagagagagaggtgaatgaatcaggcaagagatcagcaagtccgatcaatacaaacaatgctagcggggacagtcctgataccaagaagcagcataaaatggaacctatatatgaacaaagtggtaacggggatataaacaatggtactagaaatgatactgaaatcaacttgtatagaagtcatccaaccatgatcatgagtaaagtcatgaaaagagaagttaagccgttatctgaaaattatattataattcaggactgttttctaaaaatcctggtcacttcagtgttccttgacacttcaaagaacacgatgataccggcattgacggcaaacgcgaatattacaagagcccagcctagcgtagcaaataaccttttgaaattgaaggaaatgctaatcagacagtgtcaaaccgaagatgaaaaaaatcgtgtaaacgaatttactgatagaatactacaaaatacaaattcaaatagaaacttgaaaatcggtatgctattatcaatgctttacaattctgtcggttaccaatatctggaggatcattgccctcaaggtggcgaatattcggattcattgagaaatttgatcaatgaatgtgaagctattttgccatcttacgaaatcattgaacgctacaagaaccacttttatgagtacgtttatccaagtctacctttcatcgaattagaaatttttgaagaatcattaagtcaaacaatttttccggacccaaacaacccctccaaggtgcaaatacgtatgggtagcacacatttgagagctaaggtggaaaacttgagtcttctattggttatcttgaaactctcatacatgtcaataaggtttttagatcatagtacagcagactcgagtttttatctttcaaaggaaataattgataaatatccaataccgaacgattttattttattgagtcaaagatgtctagcatcggaaaattggtgtgcatgcgctaatgaaaacatcatatcatgtttactatatatctggtctttttttgctttttctcctgaagagggtgatttctttctcgagcatcccaccgatgttatcagtagtttgataatgatgctttccacctcgattggtctccacagagatccttcagatttccctcaattgatttccccgtccacctcagataaaagaaccttgaatcacagaagaatactctggttgagtatcgttaccgtttgttcgtttgaagcaagtctcaagggtagacattctgtctcaccgatatctttaatggccttattcctaaatattaaggatcctgattctctgacggtatatatgaaccgagttaggggcgatctaagcgatatcaataatcacaaacttttgagaattcatgaatttacatttaagagagcccagcttgcgttactcctgtcagacttagataacttgacgatgacatactatggtagtttccatttgcactcaattgaattcataagagaaaaaattgagatttttgtggaggaaaactttcccatagtaccattgaaaagtgtcgcacaggataagtcagaccttgatgacatgaatgtgatttcagaaatgaatatattatcttcagaaaattcttcttcatttcacaatcgaataatgaataaactattgatgttgagaacttcaatggccgtattcttgcattttgaaacactaattactaaggataaaagtatcttcccattctacaagaaatactttatggttagctgtatggatgcgttgtcactgataaattatttcaataagtttttcaacggagaatatcgacacgcaatatcttctttaaccagttttaatgttacaaaatttattcagttagcactatccagcacgatcttcagcctattagggattatactaagaataggtttagccatccatatgttatcttctgaagtacaaaagttatcgggaacgacagatccaagaataaaggagttaaataccaaagtcgaaaaatttagtaccctgcaaagagatctcgagtctgctttagaaggtatatattgctctgcttcggaacatttaagattcacatacttccccgtttttaagatgttggctttattcgatgtcattgtacaaagaatgagaaagggtgaattatggcacggcatatttacgatgattcaaatggaacaaatgcattctaggataatcaagacattaagcattaccttaggagtcaaactggacaaaaaggataggctattagaggaattgatggcatgcgatcacgttgcgaattttagcgttgaagatatagatgagctgaaccgcaatatcaaaaaagagattcaaatttcttcaggactgaagccgcctgtaaacacaattgacttaaccaacggcgaaccattcggcaatgctgttcctaccttcacaaagacatggagttcatccttagataatttagaaaaactatcgtcggccgctgcagttggtcagagcttggactacaacagtggtttacgtcagggtcctttggcgggtggtggttcaaaagagcaaacgccaatagccgggatgaataacttgaacaattcaatcaatgctacaccaattgtcgataactcatctggatcacaacttcctaatggtttcgatagaggccaagcgaataatactccttttccaggttattttggaggtttggatttatttgattatgactttttgtttggcaatgattttgcttaa

SEQ ID NO: 81677 - DNA, 444 bp, Saccharomyces pastorianus
atgggttggttttgggcagatcaaaaaactacgggcaaagatattggtggggcagcagtatcatccatgtcagggtgcccagtcatgcacgagtcgtcgtcgtcgtcgccaccatcctctgagtgccccgttatgcagggagataacgatagaataaacccgctgaacaatatgccggagttggcagcatccaaacagcctggccaaaagatggacttgcccgttgatcggaccatctccagcatccccaagagtccagacagtaacgagttctgggagtatccttctccacaacagatgtacaatgctatggttagaaagggcaagattggcggtagcggcgaagtcgccgaagatgcagtggagtccatggtgcaggtccacaactttctaaatgaagggtgctgcaggaagtgctcgaaggggaaaaaccgcacgggatcc

SEQ ID NO: 81678 - DNA, 1521 bp, Saccharomyces pastorianus
atgtctagattagaaagattgacctcattaaacgttgttgctggttctgacttgagaagaacctccatcattggtaccatcggtccaaagaccaacaacccagaaaccttggttgctttgagaaaggctggtttgaacattgtccgtatgaacttctctcacggttcttacgaataccacaagtctgtcattgacaacgccagaaagtccgaagaattgtacccaggtagaccattggccattgctttggacaccaagggtccagaaatcagaactggtaccaccaccaacgatgttgactacccaatcccaccaaaccacgaaatgatcttcaccactgatgacaagtacgctaaggcttgtgacgacaagatcatgtacgttgactacaagaacatcaccaaggtcatctccgctggtagaatcatctacgttgatgatggtgttttgtctttccaagttttggaagtcgttgacgacaagactttgaaggtcaaggctttgaacgccggtaagatctgttcccacaagggtgtcaacttaccaggtaccgatgtcgatttgccagctttgtctgaaaaggacaaggaagatttgagattcggtgtcaagaacggtgtccacatggtcttcgcttctttcatcagaaccgccaacgatgttttgaccatcagagaagtcttgggtgaacaaggtaaggacgtcaagatcattgtcaagattgaaaaccaacaaggtgttaacaacttcgacgaaatcttgaaggtcactgacggtgttatggttgccagaggtgacttgggtattgaaatcccagccccagaagtcttggctgtccaaaagaaattgattgctaagtctaacttggctggtaagccagttatctgtgctacccaaatgttggaatccatgacttacaacccaagaccaaccagagctgaagtttccgatgtcggtaacgctatcttggatggtgctgactgtgttatgttgtctggtgaaaccgccaagggtaactacccaatcaacgccgttaccactatggctgaaaccgctgtcattgctgaacaagctatcgcttacttgccaaactacgatgacatgagaaactgtactccaaagccaacctccaccaccgaaaccgtcgctgcctccgctgtcgctgctgttttcgaacaaaaggccaaggctatcattgtcttgtccacttccggtaccaccccaagattggtttccaagtacagaccaaactgtccaatcatcttggttaccagatgcccaagagctgctagattctctcacttgtacagaggtgtcttcccattcgttttcgaaaaggaacctgtctctgactggactgatgatgttgaagcccgtatcaacttcggtattgaaaaggctaaggaattcggtatcttgaagaagggtgacacttacgtttccatccaaggtttcaaggccggtgcttggtcactccaacactttgcaagtctctaccgtttaaaaaaagatcatgattga

SEQ ID NO: 81679 - DNA, 882 bp, Saccharomyces pastorianus
  modified_base (810)..(810): a, c, g, t, unknown, or other
atgtctactacagttgaaaaaatcaaagctatcgaagatgaaatggcccgtacccaaaagaacaaggccacatctttccatttgggtcaactgaaggccaagctggccaaactgagaagagaattgttgaccagtgcttcatccggcagcggtggtggtgctggtattggttttgatgtggctagaactggtgtggccagtgtggggtttgtcgggttcccgtcggtggggaaatctacattactgtccaagttgactggtactgagtctgaagcagctgagtacgagtttaccaccctggttaccgtccccggtgtcattcgttataaaggtgccaagatccaaatgttggatttacctggtattatcgatggtgctaaggatggtagaggtagaggtaagcaagttattgccgtggcaagaacctgtaacctgttatttatcatcctagatgtgaacaaacccttgcatcataagcaaatcattgagaaggaactggaaggtgtggggattcgtttgaataaaactccgccagatatcttgatcaaaaaaaaagagaaaggtggtatttccatcacaaacacagtcccattgacccatctggggaatgacgaaatcagagccgttatgagcgagtacagaataaatagcgctgagattgccttcaggtgtgatgccactgtggatgatttgattgatgttttggaagcttcgtcaagaagatacatgcctgccatctatgtgttaaacaagattgattctctgtcaatagaggaattggaattactttaccgaattcctaatgccgtngcctatttcgtctggttcaagattgcgaacttcggacgagcgtgttgcaagttcatgttgggaacagactaa

SEQ ID NO: 81680 - DNA, 831 bp, Saccharomyces pastorianus
atgttgcaagcccagcagcacccagcccatcgccattacaaagacaacgacaagtacggtcttaaatcaccttcccggtccttcgtgaaggacaagaaaaggttggttcaccggtttttgaaatccatggagccttcttcgtctgggcaatctaaggattcgtctacactggcgccggctttcgatccaatattgcccaatgttatatctaagccttccaagcgacccacacatcattcgcattcatcagacgggagttctagcacgcagacagatatatcgttacagagcttgctttaccatgatcttgaaagctcaccaaagaaacatgtttcgccctcaagaccgccctctgtagcttccgaatcctctcctgccgttgctaatcccattgggctttcgccaaaagacgcctgcaatgcatcgttttcgcagtcgtcctcatcttcgttgtcttcttcttcatcgtcttcatcatcgacgtcattctcacagtcagtggctgttgatcctcttgaacctcctggaaatatcacatatagtagttcgaatctttcgctaaattcagatgaattagactactatcagcgtcatatcggattgcagttacagcagacagaagctttactaaagcacagtttgaaagatgaggttctgaaagatgaaaatgaccttgttaaaaacattgcaaattttgaccagatcgtcaaagagctaagggacttaagatccaggaccattggatggaaagagcttgttgaagaggatcatttaatgaattcgaaccaggattttgacacgaaaaacccgaatcatttgacgcacgtttga

SEQ ID NO: 81681 - DNA, 414 bp, Saccharomyces pastorianus
atgcaaaatgctcaaataaagagctcttctaaagacagcgggatagatggtacagatcgcaatagcaaagatggtgtagaaaagagacccctggaagatgtaaagcaaatgattgacgctggaacaccagatgttggccacaaatctactgttgaaactaagccaaacgttggatggcaagcctctcacagtaatttcgctgcattacacgaaaaagagcagaaatatgaaatggagcaccatcatgctcgtcataaactgcatcgtcaagttattccggattacacgtctgcctcgaccgcaatgttcagcgattgtatgttcaacgcagcaccagataaagtacgaagtctcagtacgatgaagtcttctggactctcgccaaaacacccatttaacgtatgccacctttaa

SEQ ID NO: 81682 - DNA, 819 bp, Saccharomyces pastorianus
atggcaccaagtatagcaacggtaaagatagctagggacatggttttgccattacgtatatttgtcaatagaaagcagatccttcaaaccaatgataagactagcaataagtcgaatgccactatatttgaagcaccattattatcaaataactccataatctgcttaaaatcaccaaatacaagaatatatttatcgcaacaagataagaagaatctttgtgacgaggtcaaggaggacctgttattgattgtttacgaactagcgtccccggaaatcatcagttccgtactcagcaaaataagagttggtcattctactgatttccaaatcaacgttctgcccaaactttttgcaggtgccgatacggataatgcggtaacttctcacatccagtctgtgacaaggctggctaaattcaaatacaagttgcactacaaacataagtgggagctcgacatattcatcaacagcattaagaagatcgccaatttaaggcactacttgatgtttcaaacattaacattaaacggtttctcattaaatgcaggtcccaaaacgttattagctaggaaaatagaaaaacagccccaggtacctaatttgttaatagaaaatggggacgctgatgacctggatacaccggtggaagaggatataaaacctgtaatagaatttatgtacaagcctgttattaatttaggtgaaattattgatgtacatgtgttgcataggcctagaagacataaggtacgtacccagtcgaagcaaccccggaggaatgaaaaaccgataacaagtgatggcttaatattataa

SEQ ID NO: 81683 - DNA, 237 bp, Saccharomyces pastorianus
atgatactactcaaaagagaggtaagtacggtgaattacaagatgcttcggcgaacccctttaatgacaataatgtactgggaagtaacgactttgaaagtgcagaaccgttcattgaaaatccatttgctgatggtaatcaaaattcaaatagattcagttcttcgagagatgatatttcatttgatatatgaggcacagacacgaagagcagaagacaaatacaatataatataa

SEQ ID NO: 81684 - DNA, 342 bp, Saccharomyces pastorianus
atgcacctgccgcagtgcttgcgcactatccagttctccccgtctgttatctccacatcctaccagattcccgtcatttgtcagcatcacgctgtggttcccaccgcacgctatcttcctgactattgctccatcatctcctggcacagacctctgtggggtatccatatcctcatcgtgccccagtcccagttgcctttgcccattggacccaaacgcatacacacaactcatcgatacaagcctgttatagcctttaatgatcacatttcatcacttgcgctttggatctgcctgcattatcaaggctcaaacggctgcgttaccccgtcgccgcgatag

SEQ ID NO: 81685 - DNA, 108 bp, Saccharomyces pastorianus
atgttgctcagtgaactcgtagcaaccgcctcctctctgccatacacggccatcagcatccacaataactgtcgtgtcccagccgcacgccacatccaccacgggtga

SEQ ID NO: 81686 - DNA, 336 bp, Saccharomyces pastorianus
atggtatctagttttttcatggcttctaccctattagcaatatcatcatgttttaactcatccataagcagagccaagggatataatgactcgttagagtctgagtccttagagtttgacgttgttgatgttgttgatgttgttgctgccgagggcacggcacctgccgttgttgatcttgctccagacatatttcgctcctttctgaccactcaattattcttcgataatcagataccagttgttatagtcgtcgaaataagttccacgttagtattgttgctatctgccttccttcggacctgcaggcatgcaagcttgcactgccgtcgttta

SEQ ID NO: 81687 - DNA, 1686 bp, Saccharomyces pastorianus
atgtctggagcaagatcaacaacggcaggtgccgtgccctcggcagcaacaacatcaacaacatcaacaacgtcaaactctaaggactcagactctaacgagtcattatatcccttggctctgcttatggatgagttaaaacatgatgatattgctaatagggtagaagccatgaaaaaactagataccatcgcgttggcactcggtcccgaaagaacaagaaacgagttgattccctttttaacggaagttgcacaagatgatgaagatgaggtgtttgccgttttagccgaacagttaggaaaatttgtcccctacattggcggtcctcaatacgccacaatcctattaccagttttggaaattttggcatctgcagaagaaactttggttagagaaaaggccgtagattctctgaataacgtggcccaagaactttctcaagaacaattatttagtgacttcgtccctttaattgaacatttagctactgcagattggttttcttcaaaagtttctgcttgtggtcttttcaagtctgttattgttagaatcaaagatgattcattgagaaagaatatcctggctttatacttacaactcgctcaagatgatactccaatggtgaaaagggccgtcggtaaaaacctgcccatcttgatcgatctgttgactcaaaatttgggattatctacagacgaagattgggattacatttctaacattttccagaaaatcattaacgataatcaagattctgtcaagtttctggcagttgattgtttaatttccatcttgaaattttttaacgctaaaggtgatgagtctcacactcaagatttattgaactctgctgtcaaattaattggtgacgaagcgtggagggtacgttacatggctgccgatagattttcagatttagcctcgcaattcagttccaaccaagcatatatcgatgaattagtacaaccatttttgaacctttgtgaggacaacgagggagatgttagggaagctgtggctaaacaagtttctgggtttgccaagttcctaaatgatccttcaattatattgaataagatcttacctgctgtgcagaatttgagtatggacgaaagtgaaacagtgagatctgctttggcttctaagattacaaatattgtattactgttgaataaagatcaagtcattaacaattttcttccgattttactgaatatgctaagagatgagttccctgacgttcgtttaaatatcattgccagcttgaaggttgtcaatgacgtaataggaattgagctgctatcagactctttgttacctgccataacagaattagccaaggacgtgaattggagagttagaatggctataattgagtacatacctatcttggcagaacaattaggtatgcaattttttgaccaacagttaagcgatttatgtctttcatggttgtgggatactgtttattctatcagagaagccgcagtgaataatttaaaaaggttaacggaaatatttggctctgattggtgtcgtgatgaaattatttcaagactgctcaaatttgatctacaattactggaaaattttgtctcgaggttcacaatactctctgctctaaccactttgtgccacccgggtaacaggtatgccctaagaagcaatgaaatgaatgcttag

SEQ ID NO: 81688 - DNA, 330 bp, Saccharomyces pastorianus
atgcaaaagatcagtaaatactcatctatggcaattctgaggaaaagaccgctggtaaagactgaaactgggccagaatcagaactcctaccggagaaaaggaccaaaatcaaacaagaagaggttgtccctcaacccgtggatatcgactgggttaaatcgctgccaaataagcagtacttcgaatggattgtggttagaaacggcaatgtgcccaacaggtgggccacaccattggacccctcgatccttgtcactccggcctcgacgaaagtcccttacaagtttcaagaaacatacgctagaatgcgagtactgagatccctatag

SEQ ID NO: 81689 - DNA, 714 bp, Saccharomyces pastorianus
atgccctcccccatcgaaatggaggaacagaggatgactgcgctgaaggaaatcaccgacatcgagtacaagttcgcgcaattgcgccaaaaactatatgacaatcaattggtgcggttgcaaacggagctgcagatgtgtctggaagggtcacacccggaattgcaggtctaccactcgaagattgccgcgatccgtgactacaagctacaccgagcgtaccagcgacagaagtacgagctttcatgcatcaacacagaaacaatcgctaccaggacattcattcaccaggacttccacaagaaggtcaccgacctgcgagccaggctgctgaacagaaccacgcagacctggtacgatatcaacaaggagcgccgcgatatggatatagtcatcccagatgtcaattaccacgtccccatcaaacttgataacaagacgctgagctgtatcacgggctacgccagcgcagcacagctgcgctatcccggcgagcccgtggcagaggacctcgcttgtgaaagcatcgagtaccgctacagagccaacccggtggacaaactcgaagtcattgtggaccgaatgaggttcaataacgagattagcgacctcgaaggcctgcgcaaatatttccactccttcccgggtgctccggagttgaacccgcttagagactccgaaatcaacgacgacttccaccagtgggcccagtga

SEQ ID NO: 81690 - DNA, 333 bp, Saccharomyces pastorianus
atgagtcagcaaacaccacaggaaagtgaacagaccacagcgaaagaacaggaccttgatcaagagagcgtgttgagcaacattgacttcaatacggatttgaatcacaatttgaatttatcggaatactgtatatccagtgacgcaggaacagagaagatggatagcgacgaggagaagtcgttggccaatctgccggagttgaagtacgctcccaagctatccagcctggtgaagcaagagacgcccaccgagagcttgaaaagatcacacgaagatgagaaagaggcgatagatgaggccaagaagatgaaagtgccgggagaagaacga

SEQ ID NO: 81691 - DNA, 2394 bp, Saccharomyces pastorianus
atggaagagaaagaggatgctgtaaagaatgaagttcttcttaatcgattttatccacttcaaaatcagacttatgacattgcagataagtctggccttaaaggaatttcaactatggatgttgtaaatcgaattaccggaaaagaatttcagcgagcttttaccaaatcaagcgaatattatttagaaagtgtggataagcaaaaagaaaatacaggggggtataggctttttcgcatatacgattttgagggaaagaagaagttttttaggctgttcacagctcagaactttcaaaagttaacaaatgcggaagacgaaatatccgttccaaaagggtttgatgagctaggcaaatctcataccgatttgaaaactctcaacgaggataatttcgtcgcactcaacaacactgttagatttacaacggacagcgatggacaggatatattcttctggcacggtgaattaaaaattcccccaaactcaaaaaaaactccgaataaaaacaaacggaagaggcaggttaaaaacagtactaatgcttctgttgcaggaaacatttcgaatcccaaaaggattaagctagagcagcatgtcagcactgcacaggagccgaaatctgctgaagatagtccaagttcaaacggaggcactgttgtcaaagacaaggtggttaacttcggcggcttttctgcccgctctttgcgttcactacagagacagagagccattttgaaagttatgaatacgattggtggggtagcatacctgagagaacaattttacgaaagcgtttctaaatatatgggctccacaacgacattggataaaaagactgtccgtggtgatgttgatttgatggtagaaagcgaaaaattaggagccagaacagagcctgtatcaggaagaaaaattatttttttgcccactgttggagaggacgctatccaaaggtacatcctgaaagaaaaagatagtaaaaaagcaacctttactgatgttatacatgatacggaaatatacttctttgaccaaacggaaaaaaataggtttcacagaggaaagaaatcagttgaaagaattcgtaagtttcagaaccgccaaaagaatgctaagatcaaagcttcagatgacgctatctctaagaagagtacgtcggtcaacgtatcagatggaaagatcaaaaggagagacaaaaaagtgtctgctggtaggacaacggtggtcgtggaaaatactaaagaaaacaaaactgtctatcatgcaggcactaaagatggtgttcaggctttaatcagagctgttgtagttaccaaaagtattaaaaatgaaataatgtgggacaaaataacaaaattatttcctaataattctttagataacctaaaaaagaaatggacggcacggcgagtaagaatgggtcatagtggttggagggcatatgtcgataagtggaaaaaaatgctcgttctagccattaaaagtgaaaagatttcactgagggatgttgaagaactagatcttatcaaattgcttgatatttggacctcttttgatgaaaaggaaataaaaaggccgctctttctttataagaactacgaagagaatagaaaaaaatttactctggtacgtgatgacacacttacacattctggcaacgatctggccatgtcttctatgattcaaagagagatctcttctttaaaaaaaacttacactagaaagatttccgcttctactaaggacttatcgaagagtcaaagcgacgattatattcgcacagtgatccggtccatattaatagaaagtccttcgaccactagaaatgaaatagaggcgttgaagaacgttggaaacgaatcaatagataacgtcatcatggatatggctaaggaaaagcaaatttatctccatggctcaaaacttgaatgtactgatactttaccagacattttggaaaatagaggaaattataaagattttggtgtagcttttcagtatagatgtaaggttaatgaattattggaggccggaaacgctattgttatcaatcaagagccgtccgatatatcctcttgggttttaattgatttgatttcgggagagctattgaatatggatgtaattccaatggtgagaaatgttcgacctttaacgtatacttcaaggagatttgaaatacgaacattaactccccctctgattatatatgccaattctcagacaaaattgaatacagcaaggaagtctgctgtcaaagttccactgggcaaaccattttctcgtttatgggtgaatggatctggttccattaggccaaacatatggaagcaggtagttactatggtcgttaacgaaataatatttcatccagggaataacattgagtag

SEQ ID NO: 81692 - DNA, 75 bp, Saccharomyces pastorianus
atgagcagtgttcaactttcgaagggcgattttcatagcatcttcaccaataagcaaaggtacgatatcccggtc

SEQ ID NO: 81693 - DNA, 240 bp, Saccharomyces pastorianus
atggctgaagaaggtggtacgcgcatagctattaacatatatgcaaaaagaacggcaaaaggcgaggaggtttttatgccaccgctagtatttgacatagatcacatcaaacttctaaggaaatggggtatttgtggtgtgttatctggaactttgcctactgcagcacagcaaaatgtatttttgtcggtacctttgaggcttatgttagaagatgtgctgtggctgcatttgaacaat

SEQ ID NO: 81694 - DNA, 243 bp, Saccharomyces pastorianus
atgtcaattacgaagactgaactggacggtatattgccattggtggctagaggtaaagttagagacatatatgaggtagacgctggtacgttgctgtttgtcgctacggatcgtatctctgcatatgacgttattatggaaaacagcattcctgaaaaggggatcctattgaccaaactgtcagagttctggttcaagttcctgtcgacctgcaggcatgcaagcttgcactgccgtcgttta

SEQ ID NO: 81695 - DNA, 333 bp, Saccharomyces pastorianus
atgtttattaatggctttgtaaactaccccgtaagaacccctcccaatgacctgcttcaagtggtattgcacggatttctcagatgccctctggatgggagtcaagttgactctatcggtatcggccatactgttcatggtatagtcttaccaggaaaatgggtagtgcttatgtgtgttttgtccttcctcgagcctccaagtagaagatataccttttgtgaggcagatctcccgtatacaaaaataacagcaagaaaagcggaaagaccatcgcaaggtggaaaggattataatggcacagcaaagaccgcacagaggactacagtatag

SEQ ID NO: 81696 - DNA, 459 bp, Saccharomyces pastorianus
atgcaaacatcttcagaaaataccaacgccaagtcggattctctcgacgaacccagtgcatatttaatcgaggaaaatgtggctcttcctaaggacatattccattcgtacttgagttattggatatatgaagttactcgtcataaagcggcagtaattttgctcgtacttattgtgacttcaattttattattagtgtttttttataatacggaattttgcgttgcctttgagatactattgttttccttttgctttgcaggaacatgcatggttgtaattgcatttagtgaaccgatcggtgatcgggaatttaaagttaagcttctgatggaaattatcacacgtaaaccggcggtaaaggggaaagaatggaggacaattacatataatatgaatcggtacatatttgatcatgggctatgggacctgcagcatgcagctgcatgccgtcgttta

SEQ ID NO: 81697 - DNA, 735 bp, Saccharomyces pastorianus
atgtcgcctcaataccatttttattttgtatcattccggaacttagtattgaatgaaaaatgcctccgaagtaaaaagcaggtgatgaaaagtttcaattggtataagacagatcgctattttgatccgcataacatccttcaacaccatagcagagctatagagaagacaagatataaactgggcatgcaaacatcttcagaaagtaccgacgccaagtcggattttctcgacgaacccagtgcatatttaattgagaaaaatgtggctcttcccaaggacatattcggttcgtacttaagttattggatatatgaagttactcgtcataaagcggcagtaattttgctcgtacttattgtgacttcaattttattattagtgtttttttataatacggaattttgcgttgcctttgagatactattgttttccttttgctttccaggaacatgcatggttgtaattgcatttagtgaaccgatcggtgatcgggaatttaaagttaagcttctgatggaaattatcacacgtaaaccggcggtaaaggggaaagaatggaggacaattacatacaagatgaaccagtatttatttgatcatgggctatgggatactccctactacttttaccgtgatgaagattgccaccgttattttctaagtcttattaagggaagaactttcaagaagcaaaaggaatcgtcagccagcaatgtgatggacgcacaatga

SEQ ID NO: 81698 - DNA, 153 bp, Saccharomyces pastorianus
atgcaatcgcaaccacaaaataaaaatattagactggatgtgttgagtggagatggtgccaatttagttgagggaaatgtggtccttcccaaagacatgttcaattcgtacttaagttattcactttacgtgttacgagggggctcattgtaa

SEQ ID NO: 81699 - DNA, 561 bp, Saccharomyces pastorianus
atgcagacccctccagaaagtaccgacgtaaagttagatacacttaacgaacctagtgcacatttaattgagaaaaatgtggctcttcctaaggacatattccgttcgtacttgagttattggatctatgaaatcgctcgctatacaccagtcatgattttgtccctggtaataggggttttggttttattaattatattttttaatgacaacgaagcttgtgttttcaattctgcatactacgcttatctttctcttgtaggtttgttaataatattaggtgatggtaatccaaagctagtcagtcgtcgaaattttaggaccgagcttttagtggatgtcatcacacgtaaaccggcagtagaagggaaagaatggaggatcatcacatacaacatgaaccaatatttgtttaatcatgggcaatggcatactccgtattacttttacagcgatgaggattgctaccgttattttctacgccttgttgagggagtaacccccaagaagcaaacagccacgtcaattggcaattctccggtcaccgctaaaactgaagat

SEQ ID NO: 81700 - DNA, 126 bp, Saccharomyces pastorianus
atgtgccatatgtctcatgcctctaggaacgtcaaacttaccttttgtaataaatgggacgcaatcacgcgatccaatgcagacagaagactctcaagatggtgcaaatcgcgaactcgtaagtag

SEQ ID NO: 81701 - DNA, 3249 bp, Saccharomyces pastorianus
atgcagaagactaatgcgctacacatcatactttacggcgatgatatatttcaagatagcataagctctatggttattctgatgttactggtagtcgtaagtgcagtatcacgaacgtatagaagaataaacatgggtctcatcaaaaaagtgacccattggtcatatgataatttgattgattatctttcagtgaaccctacaagagatgaagtgacccactataaagtggatccggaaaatgaatctgatgaatcaattattaaattacacactgtgaaagacttcggcagtatcacctgcttagactattcagaatcagaaattggtatgattggagttggtgaaaagaatggatatttaaggatttttaatatctctggacaaaattcctcatcgccagcgagccatgcgccagtgggcttaaatgccaataacgagacttctatgacaaatgccagcggtggtaaggcagctcaggcggaaaatatagttggatctgtctcaaatttaaaggatacccaagggtaccctgtttcagaaaccaattatgatatacgtgtacgagcaaagaagcagcggtgtataaactctctgggaataaatacgaatggtcttatagcaatgggtcttgacagaaataagcatgattcatctttacaaatttgggacatgaattatcatgatgattcgcatgaaactatcaacccaatgtttagttattgcacaaatgaaagcatagtatccctaaagttcctcaacgataccagtgtattggctgcaagtacgaaatttttgaaagaaattgacgtcagatcccccaacccaatttatcaacatccgacacgattgacgtatgatatcaaactgaacccgtttaacgattggcaatttagtacttatggggatgatgggaccttagctatttgggataggagaaaattatctgaccaagcttcacttggtgatttaaatgtagcttcccctttattaacttttgaaaaattggttggatccggtgcagcgtcaaggaaatacatgaactcttgctttaggtggtcatgtgtgaggaacaatgaatttgccaccttacatagaggtgataccatcaaaagatggaggttaggctattactgcgatagcaatcgtgatattgcggcagatgacgataacgagatgaatattgagaatttgtttgtttcttccgtgcatgacacaaatacgatgtacgatagagttgctacatttgattatattccaagaagtaataatggaacaagtctaatctgtatgagacaatcgggaacaatatacagaatgccaatttcagaggtatgctccaaggctatactcaataataggaactctctcttattgtcaaattttgaaaatactgagatagatgaaattagagtcaacaatgagcatgaaaagtccaacttagagaatgtaaaaacagtcctaaagaatctatcgtttgaggatttagatgttagcgaagattactttccgtctggacatgatgaacctaataatgaaattgagtactccgagttgagtgaagaggaaaatgacgggagtaatgatgttcttgacagtaagcgtggatttgaactgttctggaagccagaaaaacttctggaaaaagatataagtgtaataatgaggacgcgagcttcattgggatatggtttggatccaatgaacacggtagagatgattgattcttctaaaaatctacaaaacaatgcttatataaggaacacatggaggtggatcgcgattgcaaaggcttctgttgacgatggtacgatggtttctggtgatcttgacttaggttacgaaggtgtgataggtatttggaatggtataaacggaatatcgaaccaagacagatatagacaagagacaattctttctgataaacaactaaataaagaaatggaaaaaatcatcaaactaagaaggaaaaatagggatcggaacagtcctattgccaatgccgctggttcaccaaagtacgttcagagaagactctgtttaattatctcaggatgggacctttccagatctgattatgaagacaagtacaacataattatgaaaaacggccattatgaaaaagctgccgcttgggcggtattttttggtaatatcccaaaggctgtagaaatattgggatctgcaaaaaaggaaagattgagactaattgccaccgctattgcaggttacttggcgtataaggatctgccaggtaacaatgcatggaggcagcaatgcagaaaaatgtcctccgaattagatgatccttacttgagagttattttcgcctttatcgcagacaatgattggtgggatattctttatgaacctgccatatctttgagagaacgattaggggtagctctaaggtttttgaatgatacagacctaaccactttcttagatagaacttcatctacagttattgaaaacggcgaattagaaggtttaattctcaccggaataacacctaatggtatcgatctactgcaatcatacgttaataaaaccagcgatgttcagagtgccgcactgatatcaattttcggctcccctagatatttccgcgaccaacgagtagatgaatggatacaaacttatagagatatgcttaaatcgtgggaattattctccatgcgagccaggttcgatgttttaagatcaaaattatcgagaactaaaactggtgtattaactgcagacataaagccccggcaaatatatatccaatgtcaaaactgtaaacagaacatcaacactccgcgcacatcctcaccttctagcgccgtctctactagtgctggaaattacaaaaatggtgaagcctatagaagaaataacgctgactacaagaaatttaatactggaagttctgaagcacaagcagctgatgaaaagccaagacataagtattgttgcccacactgtgggtcttcatttccaagatgtgccatatgtctcatgcctctaggaacgtcaaacttaccttttgtaataaatgggacgcaatcacgcgatccaatgcagacagaagactctcaagatggtgcaaatcgcgaactcgtaagtagaaaactgaagttgaacgagtggttcagcttctgtttgagttgcaaccatggtatgcatgccggtcacgctgaagaatggtttgacagacataatgtttgtcccactccaggttgcacctgccagtgtaataagtag

SEQ ID NO: 81702 - DNA, 303 bp, Saccharomyces pastorianus
atgttgttcaaaccaaaaacacgagcaataccatcaccgactgcaagaactctaccagtttcgttcaaattggcctcgtcggacacacccttaattctttcctctaagatggaggaaacttctgtgggttgtgccttggtggaagccaatcttctggtggaagccaaagcagcagcggcaggtcttgcggccttggtagagttaattagagttctcgatagagaacgaatagcagcagtacgagccaacattattatatgtgcgtgtttttttttatttattttgttactgttcttgcgatag

SEQ ID NO: 81703 - DNA, 261 bp, Saccharomyces pastorianus
atgtcaaccctctgcagctccataggttggcggctcttggtcgcactaatcaactccgctggcgtttgcggatcattcaatgatagaacaccggcatcatcgggccacgcctttacaaacgcaccaactcctaacgtaaaacctgccgtaggtaaaattactgccctgttgactaatttaaatagaaatggaatagttctggacatattggaactcaccctcgatctatcctgtcatttggtcattgtctataaaaaataa

SEQ ID NO: 81704 - DNA, 405 bp, Saccharomyces pastorianus
atgatattattgaaatctgagcatggaggaaaaagaaaagagatgcgacaagatgatttaatgggtccaaatcattttagcctacgtatcatgtataaaataatcatatacacctacccagtatccttatatgcagtaaaagagctcaacctgagcaaaacgttttccatcagtgcacttggaattttgaatagtaattccaaccagagtccagcgaagaagcaaaccttcttttctgcttgcgttgctccagtcatatggctctttctttatttctatttgtattctcgatctaacctctcatctttaggcagcagcggcaataggctccgggggttgtatgcctgcctcttcgtagtactcagccaagtcttctttatcgaaaactacatcgatcatcagtga

SEQ ID NO: 81705 - DNA, 3474 bp, Saccharomyces pastorianus
atggctctgcgtatacgcattctcgtcatggtgaaggataatcgagattctgaccaagaccaagattttagttctgctcacatgaaaagacaaccggagcagcaacagttgcaacagcaccagttcccaagtaagaaacaacgaatatctcaccatgatgacagtcatcaaatcaaccatagaccagttacctcatgtacacattgtagacagcacaaaatcaaatgcgatgctagtcaaaatttccctcatccttgctccagatgcgaaaaaattggtctccactgtgaaattaatcctcaattcaggcctaagaagggctcacagttgcaactactgagacaagatgtggatgaaatcaaatctaaactcgatactcttctagcgaatgacagcgttttcgttcatcttttacaacagattcccatgggcaatagccttttgaataagctcaatctgcatccaactccaactccgggtactattatccctaacccagattcttctccttcctcaggttctccaacttcttccgcggctcaacgagattctaaggtttcagttcaaacttatttgtccagggaaccccaactcttacaagcaaatcagggcagcaatacgaataaatttaaagcaaataatgaagcatcttctcacatgacgttgcgcgcatcttctctagcgcaagattcgaaaggcttggttgcaacagagccaaataagctgcccccgctgctaaatgactcagcattgcctaataattcaaaagaatctttacctcctgctttgcaaatggctttttataagaataactctgcaggtaacactccgaacggccccttctctccaattcaaaaaacatattcccctcatactacgtcgaccaccgttacaacgacaacaaatcaaccaccgtttgcagcaacaagccacgtagcaacaaataacaatgcaaataggacgaagacgccggtagtagccaccaccacgactatgccattattgccttcgccgcatgcaaatgtagatgagtttgtactgggcgatattagtatttccattgaaaaagcgaatagattacaccatattttcgtgactaggtatctgccgtattttcctattatgtattccaataacgccaccgaattatactcccaatctcagttgcttttctggaccgtgatgttgacggcatgtctgtctgatcctgaaccgacgatgtattgcaagctaagctctttgatcaagcaacttgccatagagacctgctggataagaacacctagatccacacatatttcgcaagctttgttaatattgtgcatttggcctttgcctaaccaaaaagtcctagatgattgttcttaccgttttgtaggattagcaaagtcactgtcttatcaattaggtttgcacagaggtgaattcatttctgaattcacaagaactcaaacatcaatgccaaatgcagaaaagtggagaactaggacttggctgggaatattttttgccgaactttgttgggcgagtatccttggtttgccaccaacttcacagacagactatttattagaaaaagccttatcctgtggtgacgaagaatcagaagaagataacaatgacagtattgacaataacaacaatgataaaaggaacaagaaagacgagccgcacgttgaaagtaaatacaaactaccgggcagttttagaagattgctcagcctggcgaatttccaagcaaaattgtctcatatcattggttcttccacttccagtcctgatggtttattggaaccaaagtatcgtgctgagacactgtccatcttgggaaaagagttagatttattagcaaaaactttaaatttccagagtgacgatactgtcaacatttattttctttatgttaaattaactgtctgttgttttgcattcctacccgaaacacctcctaccgatcaaattccatatgtcacagaggcctatctaacagctactaaaattgtcactctattgaataatcttttagaaacacaccaattaattgaactgcctatttatattagacaagctgctacattttctgcactgattctctttaaattgcagttgactcctttacttcctgacaaatattttgattcagcaaggcaatccgtggtcactatccatagactttatagaaatcaattaactgcgtgggccactagtgttgagaatgatatttcgagaactgcaagtatgttagaaaaactgaacttcgtactgatcatgcatccagaagtttttgtggaagaagacggtattatttctaggatgagatcacatttaacagggtctttattctatgatttggtttggtgtgttcacgaggcgagaagaagggaaatggatcccgaatataacaagcaagccttagagaaagccgctaagaaaaggaaattttcctcaaatggtatctacaatggcacttcgtctacgggtggcataacggacagaaaactatatccattgccactatataaccatatctccagggatgactttgaaactgtgacaaaaacaacaccaagtggaaccactgttaccactttagttcctactaagaatgccttgaagcaggcagaaaagctagccaagacaaataacggagattctgacggttctataatggagattaacgggatacctctttccatgctcggggaaacaggcagcgtaaaatttcaaagtttattcgctaatacctcgaatagtaacgattataataataataggacgttattggatgcgtctaatggcatgtcaattccctctaattcaatttatccagtggcttctgtccccgcttcgaataacaatccacaaagtactaaggtagactattatagtaacggacctagtgtaattcctgatctctccatgaaaagatcagtaagcactcccgttaatcattttcctgcgtccgttccagggttaaggaaccaccccgttggcaacttatctaataatgttacattgggaataggccaccctattccaagggagcacagtaatttacaaaatgtcaccatgaactataataatcaattcagcaacgccaacgcgattggaagatcacaaagtagtatgtcccattcacgtacaccgattgcttcgaagtcaaataatatgacagatttgcattccgtcgtttccgaccccggctcctctaaaagcacggcatatccacctctgagcttgttttccaaaagtaatgatatcaatagcaacaaaacgaaccaacgattttctacgggcactaacactgtaacttcttctaacttccaaaccatcgataatgaaaacaacgtgaaaactcctggaaacaaactaacggatttttttcagcaacaaagtgcaggctggattgaaggcaactctagtaatgatgacttttttggttggttcgatatgaacatggaacaaggtttttaa

SEQ ID NO: 81706 - DNA, 231 bp, Saccharomyces pastorianus
atggttgatttgatgactgtcatcatggtgagatattcgttgtttcttacttgggaactggtgctgttgcaactgttgctgctccggttgtcttttcatgtgagcagaactaaaatcttggtcttggtcagaatctcgattatccttcaccatgacgagaatgcgtatacgcagagccatataatctgtatacggacctttgacagtaaggtttctgcggggatcctctag

SEQ ID NO: 81707 - DNA, 915 bp, Saccharomyces pastorianus
atgtggggcatcttattgaaatcctcgaacaaaagttgttctaggctctggaaaccaattttgacacaatattatagcatgacatcaactgccacggattctccgctgaaatactatgatatagggttaaatctgacagatcctatgtttcacggtatttacaatggtaagcagtaccatccagcagattatgtaaaattattagagcgtgctgctcagaggcacgtgaaaaatgcccttgttacaggatcatccatagcggagtctcaaagtgccattgagttggtaagcagcgtcaaagatcttagcccattaaagctgtatcacacaataggtgttcacccatgttgcgttaacgagtttgcggatgctagtcaaggggacaaggctagcgcttctattgataacccttccatggatgaagcatataatgagtctctatatgctaaagttattagtaatccatcttttgcacagggtaaactgaaagagctttatgatttgatgaatcagcaagcaaaacctcatgatacaagtttcaggtcaattggtgagatcgggttggactacgacagatttcactatagttctaaagagatgcaaaaggttttttttgaagagcaactgaaaataagttgtttgaacgataaactcagcagctatccattgtttctgcatatgagaagcgcatgtgacgattttgttcaaatattggaaagatttgttgtcgggttcactgatgagaaggatacctttcagctacaaaagttaggtgcatcgtcgtctagcggattttacaaatttcatccagatagaaaactagtggtccattcattcactggttctgcgatagatttgcagaaattactgaacttatcacccaacatcttcataggagtaaacggttgctcgtga

SEQ ID NO: 81708 - DNA, 465 bp, Saccharomyces pastorianus
atggcatctattacttttagaactccattatcctctcaggaacaagccttttataatcagaaatttcaccaattggatacggaagatctcggggtggtcactggcgaggcagtcagaccgctcttcgcgtcttctggtcttccagggcaattactatcgcaagtgtgggctaccgtcgatatagacaataaagggtttttgaacttgaacgagttttcggctgctttgagaatgatcgctcaattgcaaaatgctcctaaccaaccaatttccgctgccctatatgagagcacacctactcaactggcttctttttctataaatcagaacccagctcctatgcaaagcggtagtgcaaccggcaatacaaacaacactgatattcctgccttatcctcaaatgatattgctaaattttcacaactgtttgatagacagcaaggtgctcaaactgttgctgggtga

SEQ ID NO: 81709 - DNA, 210 bp, Saccharomyces pastorianus
atggtcagcttgcacggaagctttaagggtttcccttgtttcggcattagaagaggcatttcgcacgttttaccgggtcagaaacttcgaggaagctgtgacaattggaaaaaaaaggcaaaactaaatgcaatgtatccggttgcccatgcattatttgtgatgttttcggatgtagttcgctgcgctccgcggcgatatatcctctag

SEQ ID NO: 81710 - DNA, 483 bp, Saccharomyces pastorianus
atgttaacgaattctgctcaccctgctattgaagatcaatacgcgttggccagtacggcccgctctaaattggcgagatgtgtaagtgctactacaagaaataaagattataatttaagggtgttagtgggccacgctaacctgctagataaaataaccgcaaacgtggaagcgcacaatgctgccgtcgacgccctttccacagacctgttcgataaaggtaacgataacctgtctattgagcatatcgaactgtctaatgctaggagagacgccggcgttaacgaggagcgcgccgacaagacagaccatggcaactactacgatttctactctagtgacgaagaccgtgatgttgacactctatcttccaccgacagtgaagacgatgacgattatgaggagtacgacttcgactgcgacagctccttcggcgagcacaacaagaaaatcgacacgtacttcagttccgggatcctctag

SEQ ID NO: 81711 - DNA, 1803 bp, Saccharomyces pastorianus
atgccggtatctgattctggattcgataattcttcaaaaacaatgaaggacgacactataccgacggaggattacgaagaaatcacgaaagagtccgagatgggtgatgcgactaaaattacttctaaggttgatgctaatgtcattgaaaaaaaagataccgattcagaaaacaatataaccattgctcaggatgacggaaaggtgtcttggctgcaaagagttgtcgagttttttgaagttaagaatgactctaccgatttggccgatcataagcccgaaaatccaattaggacatttaaagatttacaggagtccctccgttcgacgtacttgtacaacacagatctgcggcccgtggaggcaaaaagaagaacgtggacatggaagcagtacattttcttttggatttctgggtcctttaacgtcaatacatggcaaatctcagccactgggctacagttagggcttaactggtggcagacttggatctgtatttgggttggatacacgtttgtcgcatttttcttgatactgggttccaaagtggggaacaattaccatatctctttccccatttcctcaagagtatcatttggtatctacttctccatctggattgtcatcaaccgtgtcgtcatggcatgtgtctggaattctactttggcttatatcggtagtcaatgtgttcagttgatgctaaaggctatcttcggtactaatttgaatactagaatcaaagacaccataaagaaccccaatttgacgaacttcgagttcatgtgcttcatggtcttctgggtcgcatgtttaccgttcctatggtttccacctgacaaattgcgtcatatatttgcactcaaatccgccatcactccatttgcggccttcggttttttgatttggactctttgtaaggccaaaggtcatttggcattgggttccctaaatgacaatggtggcgcaatcagaaagacggttttagcatggtctgtcattagagctattatgagtgctctggataacttctctactttaatcctaaacgctcctgacttcactagattcggtaagacctacaagtcatctgtttactcgcaattgattgcgctacccgtctgctatgccattatttccttaatcggaatattgtctgtctccgcagcttatacattgtacggcgtaaattattggagtcccctagacattctgaacaggtacttggataactatacttcggggaacagagccggtgtattcttaatatctttcatttttgcgtttgaccagctgggtgccaaattgtctggtaactcgatccctgcaggtaccgatctgactgcattattgcctaaattcatcaatatcagacgcggttcttatatttgtgctctaatatcgttggcgatttgcccctgggatttactatcatcatcgtcaaagtttactacggcactagcggcatatgcagttttcttaagtgctattgcgggtgtaatatcagccgattacttcattgtcagaaaaggttacgttaatattttccattgctacaccgacaagccaggatcgtactacatgtacaataaatatggtacgaactggagggcggtggtagcttatatatttggtattgctcctaattttgcaggctttttaggttcagtgggagtttctgtgcctattggcgctatgaaagtttactacctaaactatttcgttggttatctcattgcagcattgagttactgcatgttagtgtattttacccaattaagggtattccaggcgatgccaagataa

SEQ ID NO: 81712 - DNA, 315 bp, Saccharomyces pastorianus
atggccactattgcatcagaatactcttcggaggcgtcaaatacacccattgaacatcaattcaatccttacggtgataatggtggtacaatcctgggcattgcaggtgaagatttcgcagtgttagcaggcgatacaagaaatatcaccgattactcaattaattctcgttatgaacccaaggtttttgattgtggtgataacatagtcatgtcggcgaatggatttgcagcagacggcgacgctttagtaaaaagattcaaaaatagtgtaaaatggtaccatttcgacacaacgacaaaaaatatctataac

SEQ ID NO: 81713 - DNA, 1194 bp, Saccharomyces pastorianus
atgtcacagttcttcgaagctgctactcccgttgcaattcccacaaacaataccaacggcggctccagtgatgccggcagcgccgccactggcggcgcccccgttgttggcaccaccgctcaacccaccatcaatcacaggcttttgctgtcattgaaagaggctgccaagatcattggcactaagggctccaccatctcacgcataagagctgcaaacgccgtcaagatcggtatttctgaaaaggtgaccggttgctctgacaggatcctgtcctgtgctgggaacgtaatcaatgtggccaatgccattggtgatattgttgacgtgcttaacaaacggaatcccgaaaatgaggacgcagctgagggcgaagcggaagagcactactacttccactttttgaaccatattttaccagctccctcaaaggacgagatcagagatctgcagcaactggaggacatcggttatgtgaggctcattgtggccaattcccatatctcatcgattatcgggaaagcaggcgccaccatcaagtccctgatcaataagcacggcgttaagatcgtggcttccaaggacttcttacctgctagcgacgagagaattatcgagatccaggggttcccaggatccatcaccaatgtacttatcgaaattagcgagatcatcttgagtgacgttgacgtcagattcagcacagaaagatcttatttccctcatctgaaaaagtcctccggtgagccaacttccccttctacctcatctaacactaggatcgaattgaagattccagaactgtatgtaggcgccattattggccgtggaatgaacagaattaagaatttgaaaactttcacaaaaaccaatattgtcgtagaaaggaaggatgacgatgataaagacgaaaattttagaaaattcataatcacaagtaaatttcctaagaatgtcaaacttgctgagtccatgcttttgaagaacctgaatactgaaattgagaaacgtgaaaactacaagagaaaattggaagctgccgaaggagatgccactgttgttactgaacgctctgattctgcttctttcttggaagagaaggagaactccaagaatctgattacgagaggacgtcgtataatactgtggtcccgtccaacgacaaaagttcctcacgatagttgtccacagtaa

SEQ ID NO: 81714 - DNA, 861 bp, Saccharomyces pastorianus
atgctaagaacaagaaccacaaagacccttagcacagtggcgaggaccacaagagctatccaatattaccgatctatcgctaagactgctgcagtttctcaaagaaggttcgcatcgaccttgaccgtgcgtgacgtagagaatatcaaacctagccatattattaagagtccaacatggcaagagttccagcatcaattgaaggatccaaggtacatggaacactttgcacaacttgatgagcagtttgctcggcatttcatggctacaaacagcggcaaaagtgttctggcgaaagatgatagtacatctcagaaaaaggatgaagatgtcaagatagtacctgatgaaaaagatacagacaatgatgttgagcccacgcgagatgatgaaattgttaataaggaccaagaaggtgaagcttcgaaaaactccagaagctccgcttctggaggtggacagtcatcatccagtcgatcggattctggagatggaagttcgaaacaaaagcctccaaaggatgtaccagaagtatacccgcaaatgctagcattaccaatagccagacggcccttatttccagggttctacaaggcggttgtgatatcggacgaaagagttatgaaggcaatcaaggaaatgttagaccgccagcaaccctacattggcgctttcatgttgaagaactcggaagaagatactgatgtaatcacagataaaaatgatgtatacgatgttggtgttctggctcaaataactagcgctttcccgagtaaagacgaaaagacgggcactgaaacaatgactgctcttttatatcctcacaggagaataaaattgatgacttattccaccaaacga

SEQ ID NO: 81715 - DNA, 261 bp, Saccharomyces pastorianus
atgcggagccgcaacaaagatcaccggtccctgttgcggtaccttgaaactgccccggcctctgatttctctaaagaagcagtggaagatgttgtacaacagccatgtggcgatggagtaaagtatcttcttggtagcgctaggctcttggtagatgtatgcctgatcagccgacgtcttgacgcttttggcctcgatggaactgtaattcgtagttttctgtgtgctcttggaagaggcagatttctccgtgagttttga

SEQ ID NO: 81716 - DNA, 150 bp, Saccharomyces pastorianus
atgtgtgattggaagggtagagacaattgtcctgcgccggcaagaaaaacatcgtgtgtctctagagcagctttgcattctaacgtgcggtggaaatggtgcgaaaagtcgacacttgacagggcttccaactgctggcgtggcacataa

SEQ ID NO: 81717 - DNA, 2415 bp, Saccharomyces pastorianus
atggctaaacaaagacaaactactaaatcgtctaagcgatatagatattcttccttcaaggctaggattgacgatttgaagattgaaccggctagaaatttggaaaaaagggtacatgattatgtcgagtcgtcgcattttctcgcttcctttgatcagtggaaagaaattaatttaagtgccaaatttacggagtttgcagcggaaattgagcatgatgttcaaacattaccccaaatactataccatgataaaaagatttttaattctttggtttcattcattaactttcacgatgagttttctttgcaaccgcttctggacctcttggctcaattttgtcatgatttaggtccagattttcttaaattttatgaagaagctatcaaaactttaataaatctgttagacgctgctatagaatttgagtcatctaatgtttttgagtggggtttcaactgtttggcttacattttcaagtatctctcgaaatttttggttaaaaaactggtgctcacatgtgatcttttaattccactattgtctcattctaaggaatatctttcaagattttcagcagaagcattatcttttttagtaagaaagtgtcctgttcctaacttgcgcgagtttgttagatcagtttttgaaaagttagagggagatgatgagcaaactaacctctacgaagggcttctgatattattcacagaatccatgacgtcaacgcaagaaactctgcattcgaaagctaaagctatcatgagcgttcttttgcatgaagctttgaccaaatcatccccggaaagatctgtttcattgctctcagatatttggatgaacattagtaagtacgcctcaatcgaaagtttacttccagtctatgaagttatgtatcaggattttaacgattctctcgatgccaccaatatcgatagaatattaaaagtattgacaacaattgtcttctcggaaagtggtagaaaaattcctgattggaataaaattattatcctaattgaaagaataatgagtcaaagtgaaaattgtgcttcgctttcacaggataaagtggctttcctatttgctttatttattcgtaacagtgacgtgaaaactttaacattattccaccaaaaactttttaactacgctttaacaaatatatctgactgtttccttgaattctttcaatttgctttaaggctaagctatgaaagagtattttcattcaatggattaaaattcctacagttatttttaaagaaaaattggcaatcacaaggaaaaaaaattgcacttttttttctagaagtagatgataagcctgaactgcacaaagtacgggaagtaaatttgccagaagaatttattttatctatcagagatttttttgtcacagcagaaattaatgattcgaatgaccttttcgaaatatattggcgagctataatttttaaatattcgaaattacagaatacagaaattattatcccattgcttgaacgtatcttttcaatttttgcatcaccagataattttacgaaagatatggtcggtacactcttaaaaatatatcgtaaagaagacgacgcttcagggaataatctattaaagactattctggataattacgaaaactataaagaaagtttaaactttttaagaggatggaacaagttagtgagtaatcttcatccttcagaaagcttaaaaggactaatgtcacactatccaagtctactccttagcttgacagataattttatgttgcctgatgggaagattcgttatgaaactttagaattaatgaagacattaatgattttgcagggtatgcaagtacctgacctcctttcttcatgtatggttatcgaggaaatacctcttacactacaaaatgccagagatttaaccattagaatcaagaatgttggtgccgaattcggaaaaaccaaaacagacaagctagtatcctctttctttctcaaatacttatttggccttcttaccgttagattctctccagtttggactggtgtttttgacactcttcctaatgtttacacaaaagatgaagccctcgtttggaaacttgtgctatcattcattaaacttcctgatgaaaatcaaaatttggattactaccagcctcttcttgaagatggtgcaaacaaagttctgtgggattcgagtgtagtgaggttaagggacactattgatacgttctcacatatttggtcaaagtattctactcaaaatacgagcattatatctactactattgaaagaagggggaacaccacctacccaattttaattagaaatcaggctctaaaagttatgctatcgattcctcaagttgctgaaaatcacttcgtcgacatcgcaccttttgtttttaatgacttcaga

SEQ ID NO: 81718 - DNA, 522 bp, Saccharomyces pastorianus
atgatatatcccttattcaggatatgtatcctaggtgcatttctgttgggcagctatgcatgtcttgaaaatagtacgcaaaagggtattgaaggggtaactctctctcataatagtgtacaaattaataatactttggcaaaatctgcgccattttgtgagtcagacgctctttcaatgaattattcaactgaaaatatgttaagtaataatgcatgcgattatacgaaaaattcttcgtatccatatattattaccattattactaaggcctttgataatgcccttgaaaattcacttaatttacaagcaaacaggaagctttatcacagagtggggacgtgtatacagaatattttttatcaactgttgttaactgtgaattactttaacatgaacaagctcaaagtaagccagaacaattacctacaaagaagtaatttctataaattcgaaagaaacggcactgaatgggaatatatatttgcatcaaattcagcttgtcttgtttatcatcaataa

SEQ ID NO: 81719 - DNA, 2010 bp, Saccharomyces pastorianus
atgtctcccatacaggttgttgtctttgccttgtcaaggattttcctgctattattcagacttatcaagctaattataacccctatccagaaatcactgggttatctatttggcaattattttgatgaattagaccgtaaatatagatacaaggaggattggtatattattccttactttttgaaaagcgtgttttgttatatcattgatgtgagaagacataggtttcaaaactggtacttatttattaaacaggtccaacaaaatggtgaccatttagcgattagttacacccgtcccatggccgaaaagggagaatttcaactcgaaacctttacgtatattgaaacttataacatagtgttgagattgtctcatattttgcattttgattataacgttcaggccggtgactacgtggcaatcgattgtactaataaacctcttttcgtatttttatggctttctttgtggaacattggggctattccagcttttttaaactataatactaaaggcactccgctggttcactccctaaagatttccaatattacgctggtatttattgaccctgatgccagtaatccgatcagagaatcggaagaagaaatcaaaaacgcacttcctgatgttaaattaaactatcttgaagaacaagacttaatgcatgaacttttaaattcgcaatcaccggaattcttacaacaagacaacgttaggacaccactaggcttgaccgattttaaaccctctatgttaatttatacatctggaaccactggtttgcctaaatccgctattatgtcttggagaaaatcctccgtaggttgtcaagtttttggtcatgttttacatatgactaatgaaagcactgtgttcacagccatgccattgttccattcaactgctgccttattaggtgcgtgcgccattctatctcacggtggttgccttgcgttatcgcataaattttctgccagtacattttggaagcaagtttatttaacaggagccacgcacatccaatatgtcggagaagtctgtagatacctgttacatacgccaatttctaagtatgaaaagatgcataaggtgaaggttgcttatggtaacgggctgagacctgacatctggcaggacttcaggaagaggttcaacatagaagttattggtgaattctatgccgcaactgaagctccttttgctacaactaccttccagaaaggtgactttggaattggcgcatgtaggaactatggtactataattcaatggtttttgtcattccaacaaacattggtaaggatggacccaaatgacgattccgttatatatagaaattccaagggtttctgcgaagtggcccctgttggcgaaccaggagaaatgttaatgagaatctttttccctaaaaaaccagaaacatcttttcaaggttatcttggtaatgccaaggaaacaaagtccaaagttgtgagggatgtcttcagacgtggcgatgcttggtatagatgtggagatttattaaaagcggacgaatatggattatggtatttccttgatagaatgggtgatactttcagatggaaatctgaaaatgtttccactactgaagtagaagatcagttgacggccagtaacaaagaacaatatgcacaagttctagttgttggtattaaagtacctaaatatgaaggtagagctggttttgcagttattaaactaactgacaactctcttgacatcactgcaaagaccaaattattaaatgattccttgagccggttaaatctaccgtcttatgctatgcccctatttgttaaatttgttgatgaaattaaaatgacagataatcataaaattttgaagaaggtttatagagagcaaaaattaccaaagggtttggatggaaatgacaccattttttggctcaagaattacaagcgctatgaagtcttgaccgctgctgattgggaagccatcgatgcacaaacaattaaattatga

SEQ ID NO: 81720 - DNA, 1473 bp, Saccharomyces pastorianus
atgcaagcccaaggttcacaatcgaatgtagggtctttgaggagtaattgctctgacaattcactaccgaacaatcatgttatgatgcactgcgatgaaagcagcggcagcccgcacagcgagcacaacgattatagttacgaaaagaccaatctggaaagtacggcatcaaatagtcgtgaacacagagacaaccagctaagtaggttgaagagtgaggaatacgttgttccaaagaatcaacgtaggggactattgcctcaactcgccattataccggagttcaaggatgccagagattatccaccgatgatgaaaaagatgattgtcttcttgattgcgttttcctccatgatgggccccatgggcacatctatcatttttccagcgatcaactcaatcacaacagaatttaaaacatcagtgattatggtaaacgtttcaattggtgtgtaccttttaagtcttggtgttttcccattgtggtggtcttctctatccgagctagagggcagaagaactacttacataacttcatttgcattattgtttgcatttaatatcgggtctgctctagctcctgatatcaactcatttattgccttgagaatgctctgtggggctgcttctgccagtgttcaaagtgtaggtgctggaacagtggctgatttatatattagcgaagatagaggtaaaaatttgagttattactatttgggtccactactggcgccgctactatctccaatttttggatctttattagtgaatcgctggccctggagatccactcaatggtttatggttattttatccggatgtaatgtcattcttttgacagtgttactacctgaaacattaagaaaacaagattctaaaggcgctatcgctcaaattttggctgaaagacgtattcaagtagacaataacgaacgtggagagatacaagaagattatcagaggggagaagatgagacggatcgaattgaaaaccaagttgccacattatctactgagaagcataactacgttggagaggtaagggatcaagactcgctagatttagaaagtcactccagccccaatacttatgatggtcgagctggagaaacccaattgcaacggatttatacagaggcgagtagaagcctgtatgaatatcagctagatgatagcggtatcgatgcaacaacagcacaagttacgagaataagatcaacagatccaaagttagcgagatcgattcgagaaaatagtctgagaaaattacaaaccaacctggaagagcaagtcaaaaaagtgctatccagtaatggaggtgaaatcgctcctaaagaggtatcagcggtgaggaaggtctgggacaccttttttgtttattttatcaagcctttaaaatcattgcacttcctagaatatccacccgtggcacttgcaataacattttccgcaatttccttttccacggtatga

SEQ ID NO: 81721 - DNA, 1920 bp, Saccharomyces pastorianus
atggaaactattttgcagccaaaggctagaccatttgagtctttgaaaagaaaacgttttagagaatggttgaggccgtcgactgcgcatggatccctgttgcattctgatacattagatttgcgtgactttgcaaaacctaatcccgctgacacattttctaatcttgattctggtcattgtcctttggtcacaactccaataaaatatgagtgcccagatggaaagagttcttttttccgaggagacactaaatttgaaaccctgttcagtaatagaaaattctatgagttcaaagataatttgaaaaggggattgaagaaaatacgtcatgggagaaacggacatcaaagcgaaaagagatgtccagttgttgaagaaacaaaaaagtctgtgtcagataatctggacaaaccagacaataatacgccctgtttcaacagattccacacaaattcgaaagaatttgaaacgcaatttgatcattcaaataggagccaaaattccgataaggcttatctagacaatgaatcctgttggaacctaagtgagaaatttattccttttaataatttaaaatatgaagatttgaaacattttgaagagaatttgcaaagcttagcgcctgcaacttttactccaattgaatcaaatgaatcgcttgataggtcagattcgacacgtggcacaaaacgaagcattcgcaatgattccagtgatacaacatctgaaaagaggctatgcttaaaacaatactcagatgaacctgaatcggatcattcgatggaaagtacaccatccatttacattaccaaagaagttcaagaaagaattgaagcattaagctccacggattcgtttttaattgaaaaagtagattttccctctaacaaaattggttccagtgcctccgattatgaaagtgataacgaatacagaaatatggatgaggattcaataaacgatgttaccactgagaaagagggaaatgtggtcataccagactctaatactagcacggtggacgcaatggaaaaaccaattgaagtgagctcggccttaaaagatgatacattggataaagacatagatgatgcgagcagtagctattcggatgatgtagagaccacattcgagccagttgaatctgaggaactttccgatttatctgatacaagctcaagcggaagtagtaaaatttatactatccccacatttcgcggccttactaataggaccaatatatcacaaattctttcaaaagttggtaaagctgatttaagccaagataacttaacgcatttgatcaaaagtcatcaaaaaaagaaaagatgcgtgaattttagaaataaaagattctatgatgctttcaatccatatgttgataacgaagaagatgcagagttatctgacagcgaaaacatttcagaaatggatacagatctttgtataaaggatcggagtacctcaagtgttaggtttgatgaaaactcacgtcttttaatctacaaaaaatctaaaaagttaaacaaagatgagactcaaagtggttattcgactactgaaacgaggtcaattctaaagacaaagatgaattcacagcatgatgaggagtctcagagagcttcgaagtgtgacacagtaggtgtagcccaatttttacattattttcaatatacagagtataaaaggcagagaaatgaagcagaaaattatagactgagaggagagcaactaagcaagtactattctgaagaatatcctttggattttgcggctgttgaatgcgaagattccgttaatgataaatctgatatcatacttagtatgagagctacggaaagaaacattggtaggcaactgaaaggtataagtagtcaaggggcacaaattatatcgcttgatgaggatgttttttga

SEQ ID NO: 81722 - DNA, 201 bp, Saccharomyces pastorianus
  modified_base (147)..(183): a, c, g, t, unknown, or other
ccagtccacgtctccccagctttccgtgtccaagttggtgacattgttaccgttggtcaatgtagaccaatctccaagactgttagattcaacgtcgtcaaggtctctgctgctgccggtaaggccaacaagcaatttgctaaattnnnnnnnnnnnnnnnnnnnnnnnnnnnnnnnnnnnnngtggaggataaaacgtag

SEQ ID NO: 81723 - DNA, 942 bp, Saccharomyces pastorianus
atgactttgagtaattgcgactctttggataacttattccaggaccctccagaggaagaagaaagtagtaaattcgttgaggcggtcagaactttgatgaatagaaacgatatgggatatcctcccgccgctgcaaatggtacgtattgcttaaaaaaaatcaagtctttgaatgccaaacagtggaaaataaacaagaaaagaatgtgcatgttgccagcagtaaagaagaaaaatttcgactttcacgagcaaagaagtttaatcttgaatttaaatttatggaaattcatcaagtttattaattgtagtagtaaaaacaattacaataaaaataataagcatgtgagaagctcgaacaacactgtaaaaaatgaaaatgttttaccgttacaaaaacacaagaaagtggacaatgatcaaagattggagaaccttttttggagaagctggtttaaggcacgcaaaaggagagatataatgggcaagccacgagagaggcatatcaaatttaacgataacgttgaacagtgtattataactgatgagcatttcatacaaaggcttccttctacacggttgaattcgactgatgaacagcgcccttgttcaaagtctgaactagatccctgcattggcaacgcagcaagtaagcgaagtttctatgattataacagcgtttacgtcgcgagtgacgcaattattacgactgccgctgccactgccattatcagtagtaatagtggagactatcagcgtgggcacgatgttcgcgatgttccaagaaatgttttgttacaggcaggagaaacagatttcagtagtgtgctttgggttgactccgatctcaagttatccaacataagtcatcattcccccgtaaaaccttcgtcaacttcaagtcattcgaccttcattttcgagtcggaaactgaccactga

SEQ ID NO: 81724 - DNA, 990 bp, Saccharomyces pastorianus
atggaggaactaggtttaaaaagcacttttccatatgaatatggctcagactttacaatgataagaacggaaatgttaaatactacgaagaacgaaacaaatattttattttccaatataaagagcattttggtcattatttggaaatactcatttacatttttaagatctttttccgattccatcaaacttattattgacgatgttgtcactattggctcccgaaattttgcagagagattacagattgaagcgaaaaaaaacaatgaccaagaagatatctgggcatccacaataattctgggtgtgattatcgggtatttaatctcttctattaagagaaagaacacttttccagtaatgcctacgagctcacctaaaacagatgattgtaggttcaagactggtgaaaccatatccattgtaataaactttaatgaagactgcctcaataatcgaagtgacgttaccgaagagagaaattatgaggaatccacagttttacattcaaaggagtcagttctcagcattggtaggcaaaatatggtaactttgaaccaaagcgatgaaaatttcacctatgacaattttgatgagcacgacttattaactaaagattatacaacagaggtcttaacgcgatcacctggctcaaatcccgagtttaaagcagtggtaaatggtacattacttgatagcgcgaatgaaacgccgtttaaaggtattgaaaaaagtattaacgaaacaatggttaaggttcctatgggatgcgatgtatctctctcccattatggcagacaatacgcgcctggaaatatttcaattatgagaagcttcactgctcgagataatactaaatctgtgagtagagaaattcgtgatatctgtaaatcgtttttgattataaaaagccaatttggtgacgaacttttcctgactatgttcatggaaaaaccagttttctttgataacacatcccaattaaaataa

SEQ ID NO: 81725 - DNA, 1944 bp, Saccharomyces pastorianus
atggacgatagtgtcagtttcattgccaaagaggccagtccagcacaatattcgcacagtttgcatgaaagaacacacagtgaaaaacaaaagagagactttacaataacagaaaaacaagatgaggtatctggacaaacagcggagcctcgaagggcggacagcaaatccatattacagaggaaatgcaaagaattcttcgactcttttaaaaggcagctgccaccagaccgtaattccgaactagagtcccaagaaaaaaacaacctaacaaagtcgatcaaatctcgtcacttagtcatgatcagtctcggtaccggtataggtactggtttactggtcggtaatggtcaggtgctgggaacagctggtcctgccgggttagtccttggttacggaatagcatcgatcatgctttactgtatcatccaagcggcaggcgagttaggtctctgttatgcaggactaaccggcaattacaccagatatccttctattttagtcgacccttcgttgggttttgcagtttctgtggtttacaccattcaatggctaactattctgcctttacaattggtcactgcggcaatgacagttaagtactggacgagtgcaaatacagacatttttgttgccgtggttttcgtttttgtaattgtcatcaatctctttgggtccagaggctatgctgaagccgaattcattttcaattcctgtaagatattgatggtaatcggattcgtcattctggcgattatcatcaattgtggtggtgcgggtgacagaagatacatcggtgctgagtactggcgcaatcctggtccatttgcccacggtttcaaaggcgtatgtacggttttctgttatgctgcattcagctacggtggaattgaagttctacttctatctgccgctgagcaggaaaacccaacaaaatctattcccaatgcctgcaaaaaagtggtataccgtattctgctgatttacatgctcaccaccattttggtttgctttcttgttccatacaacagtgacgaattattagggtctagtgactcctctggatcccatgcctccccatttgtcattgctgttgcatcacatggtgtcaaagttgtgcctcactttataaatgctgttattttgatttctgtcatttctgttgcaaactcttcgttatattctgggccaagattgttattatcattggcagaacaaggcgtcttacctaaatgcttagcatatgttgatagaaacggcaggcctttactttgtttttttgtttcccttgtctttggatgcattgggtttgtagccactagtgacgctgaagaacaggttttcacctggttattggcaatttctagtctttcgcaattatttatctggatgtcaatgtccttgtcacatataagatttagagatgccatggcaaagcaaggtcgttcgatgaacgaagttggatacaaagcacaaactggctattggggttcatggcttgcagttttaattgcaatattcttccttgtgtgccaattctgggtagccatcgcacctgttaatgaacatggaaaacttaacgtcaaagtgtttttccaaaattatttggcaatgcccatcgttttgtttgcctattttggtcacaagatatacttcaaatcatggagcttttggattccagccgaaaaaattgatttggactcacatagaaacatatttgtgtctccatcacttacagagatcgacaaagttgacgataacgatgatcttaaagagtatgaaaattcagaatcgtcggaaaatccaaacagctcgcgttcaagaaagttttttaagaggatgaccatttctggtgctaacagcaattccattcattttccgcttggcttcatcgggctttcgttgccactcttcaggataacaaaatatataattgttttttag

SEQ ID NO: 81726 - DNA, 156 bp, Saccharomyces pastorianus
atgcatatattaacgcgatcgagtaaaaatgcctttcccagaagtagaagtaggcaagacatccatatttcaagccacatccatagagatacctcccaacagcgcgttgttaaagattttggtaattacaagaacgaggttaaattccttcgttaa

SEQ ID NO: 81727 - DNA, 123 bp, Saccharomyces pastorianus
atggtacccgcacctgggtcacgtgcattcccctcacccgtttttttaggtggtgtcttttttgtttttttttttaggtggcgcggcaactataaagtacagcaagtgaggttgaggcaatag

SEQ ID NO: 81728 - DNA, 2037 bp, Saccharomyces pastorianus
atgcgggttttaataactaacgatgatggtcccttaagtgatcagttttcaccatacattagaccttttattcagcacattaaaagaaattatcctgaatggaaaatcacggtttgtgtacctcatgtccagaaatcatggctgggtaaggctcatcttgctggtaaaaatttgacagctcaattcatatattctaaagttgacgctgaagacaatactttttggggcccatttatccagccacaaattaggtcagaaaactctaaattaccttatgttctcaatgctgaaattccgaaagatacaattgagtggatattaatcgatggaactccagcatcgtgtgcaaacatcgggctgcacctattgtctaatgaaccgtttgatctagtactgtcgggtccaaatgttggtagaaatacatctgctgcttatattacctcttctggtaccgtaggaggcgcaatggaatctgttattactggaaatacaaaggccattgctatttcttgggcctattttaatggattgaaaaacgtctccccacttttaatggagaaggcctctaagagatctttagatgttatcaaacatcttgttaagaattgggacccaaaaacagatctatatagtatcaatattcctttagtggagagtttaagtgatgataccaaggtttactatgcaccaatttgggaaaatagatggattccaatattcaacggccctcacattaacctagagaatagctttgctgagatcgaagacggtaatgaatcatcatcgatttcctttaattgggctccaaaatttggggcacataaggattctattcactatatggacgaatacaaggacaggactgttttaactgatgctgaagttattgaatccgaaatgatcagtgtcactcccatgaaagccactttcaagggtgtgaaccaccttcttggagagttgaaactgactgaggaagaaaataatttatcaaaaacaaataacctcatcgtggtaagtatagacccaatggaatatatatacaaacctctaacccacgccctgaaaaaatatctgccacaagtggagattgtatcaaacttgccagaatttgacaatggagggtgtgaaaaagaaatgaaggtttttcattacggtgattacgaacagctagatatggacaaactaatggaactgcccaataattacttcacaaactcttatatatataggaaggcattgataagaaaacactttctttcgcataccatacagacttatactgcgaagaacccagagtccattttaaagaaggcatatttggaatcattcactattgatttagattatgctgaatttctagacgacgcattagatgaaaattgggaattacgccaagagttggagaatgaaagccaagataaatggtggatcgtgaaaccgagtatgagcgataaaggtcaaggtatcagggtatttaagactattgaagatttacaggctattttcgattcctttgacgatgaagacagcgaagcagaagagagtggaaataacgacgatgctgatgatgtaaatggcgaattcatggataataacaaggttaacatttcccaattgcgccactttattatacaagaatatttaaccaatccgttactattggcatctatggataatagaaagttccacataagatgttacgtcgtctgtaggggagatttgcaagtttttgtttatgatagaatgctagcgctctttgctgccaagccatttgttcctctagatccatatgcgtattccgtaactgatttgaaagatttagaatgccacttgactaacacatgtctgcagagcaaaaagaaggataaagattcttctgttttggagtttgactccatagaggaaattccaaatgagagaaagtccaatattaaggagcaaatccatagcataacgaacgacgttttcttagctgctgtaaatgtaaatagattaaacttccaccgttacccaacgcatttggaacatatggcgtag

SEQ ID NO: 81729 - DNA, 1446 bp, Saccharomyces pastorianus
atgagtataacaagtgaagaactaaactacttgatatggaggtattgtcaagagatgggacacgaggtgagtgcattagcattgcaggatgaaacaagagtattggaatttgatgagaagtataaagaacacattcctttgggtacactggtgaatctagtacaaagaggaatcttgtatacagaaagtgagttaatggttgatagtaaaggtgatatcagcgctttaaatgaacatcatctttctgaagatttcaatttggttcaggcgctgcaaatagataaagaaaaatttcctgagatctcttctgaaggaaggttcactttggaaaccaattccgagagtaataaagcaggtgaagatggcgctagtactgttgaaagagaaacccaagaggacgatactaattctattgacagtagtgataacctagacggatttgtcaaaatactgaaggagatagtaaaattagataatattgtttcctccacttggaatccattggatgaatctatactcgcatacggtgaaaaaaattctgttgcaagactagcgaggatagtagaaaccgatcaagaagggaaaaaatactggaaactcacgataatagcggagttgagacatccttttgctctgagtgcaagtagtggtaaaacgacgaatcaagtcacatgtcttgcttggtcacacgatggtaattcaattgtcacgggtgtagaaaatggtgagctaagactatggaataagacgggggcacttctaaatgttttaaattttcatagagcacctatagtatcctttaaatggaacaaagatggaacacatatcatatccatggacgtggaaaatgtcactatactctggaatgttataagcgggaccgtcatgcagcactttgaattaaaagaaaccggtggctcatccaccaacgcagagaaccatagtggcgatggttcacttggggttgacgttgaatgggtagacgatgacaaatttgtcattcctggccctaaaggtgctatatttgtataccaaattacagaaaaaacgcccactggtaaacttattggacaccatggacctatcagcgttttggagttcaatgacaccaataaacttctacttagtgcctcagacgatggtactctaagaatatggcatggcggtaacggcaattctcagaattgcttctacggacactcacaaagcatagtatcggcatcatgggtcggtgatgataaggtaatatcctgctcgatggatggctccgttcgcctatggtcgctgaagcagaatacgctattggctctatcaatcgtggatggtgtcccaatttttgctggaagaatatcacaagatggacagaagtactcatttgctttcatggatgggcaggtaaacgtctacgagtttaaaaatactgaacagcaagtcacgaagtcttaa

SEQ ID NO: 81730 - DNA, 2529 bp, Saccharomyces pastorianus
atgggattttgggagaacaacaaagattccatcacttcagggctgaagagcgccggtaaatacggttaccaaggaacaaagtacgttgccaagacagggtataaggcaagtaagaagcactataacaacagcaaagcgcgtagggaaaggaagagtggtaagaaaaattcaagtgatgaggagtatgaaagcgaagatgagatggagtatgaaagaaagccgaccgatataagaagtttaaaagacccaaagtcctttcctcccccacctttgaaacctggacaaaaaacttatacaggacaacagcaacagcaaatgccaaatggtcaggccagttatgcttttcagggtgcataccaaggccaacctggcgcaggatcgatggaacagtcacaatacgcacaaccacagtataatcagtatccacaacagcagctgcaacaaggtgtagtgccacagcaacagcagctgcaacaaggtgtagtgccacagcaacagcagctgcaacaaggtgtagtgccacagcagccgcctatatatggagagcaagtaccaccgtatgggtcaaattctaatgcaaccagctaccagtcgctgccgcaacaaaatcaaccccaatatgcaattccaagtcaggtatctctgaactctgcttctcagcaaagcacagggtttgtctcgcaaaatctgcaatatggtacccaatcaagtaatccggcaccatcaccgtctttccagaacggtcttcagtgtcatcagcagccgcaatacgtatcacatggctcaaccaatctcggacaatcccaatttccatcgggccaacagcagcagcccacgacacagtttggccagcaagttttaccatcacctgcacaaccacatccacaaacacaacagcaacaacaagggcaaccattaccgcccccgcgcggtcaagtgatcttgccagcgcccggagagcctctgtcaaatggctttgggcaacagcaacagcaacagcaacagcaacagcaacagcaacagcagcctctgaaccaaaacaacgctttgttgccacaaatgaacgtggaaggagtttctgggatggctgcggttcagcctgtctatggccaagccatgtcaagtactacaaacatgcaagattcgaaccctagctatggagcttcacccatgcaaggtcagcctccagtcggtggacaaccgcctgtgcctgtaagaatgcagccgcagccaccgcaaccaatgcaacagggaaacatctatccgattgagccttctcttgattctactagctcaaccccacattttgaagttactccatttgacccagacgcacctgctccgaagcccaaaatcgatattcccacggtagacgttagtagccttccaccacctcccactcatagggatagaggagcagttctacaccaggaacctgcgccaagtgggaaaatacagcctaacacgacctcttcagcggcttcattgccagcgaagcattcaagaactactactgcagacaatgaaaggaactctggaaacaaagaaaacgatgaaagtacctccaagtcttccattttaggacattatgatgtagatgtcaacatcatgccacctccaaaacctttcagacatggacttgattctgtaccttctgagcacaccaggaagaacgcatcagaacgggcagtgccaattctacctcctcggaacaatgttgagcctcctcctcccccatcacgaggcaattttgagaggacagagtcggtgttgtcaacgaatgccgctaatgtacaggaggatcccatttctaattttttacctccaccgaagccatttagacatactgaaactaaacaaaatcagaatagtaaagcatcgcctgtagaaattaaggatgaagttttgccagggcacccctctgaggaagatagaaacgttgaaccatcgttgctacctcaatcgaaatcgcaatcgcaatcgcaatctcaattcagaagagctcatatggaaacacagcctattcaaaacttccagccaccaccaaaaccatttaggcgttcacaatcgtccaattctagtgatagttcttatactatcgacggacctgaggcaaatcatgggcgtgggcgtgggcgtatagctaagcaccatgatggtgatgaatacaaccccaagagtgagaattctacagaaaacggtcgtttgggtgatgcccccaacagctttattagaaaaagagcaccaacccctccagccccatccagatctgagaagttacatgagggtgctataacatccgaagttgatagttcaaaagatgctaataaatatgaaaagtcgatacctcctgtaacttcgtctattcaagcgcaacagtctacgaagaaggcgcctcctcctgttgtaaagccaaaacctagaaatttttctttaaaggccaatgaatatcccaaagaacttactagggaagcaactggacaagatgaagttttaaactccattaccaatgagttgtcgcatatctaa

SEQ ID NO: 81731 - DNA, 243 bp, Saccharomyces pastorianus
atgtctcaaactgggtggaaaagagggtgcttgaattcattaggccatatggttgatgttctcaggttctacttatgtttcctttgtcgatttttgcatgctttgactgtgactttcctgtctgatatctttgtatggcttgttgctaaaacaaggtcaatccaagcagtgatcatcttgcacgttgcctcaatagaacgcgcatatagcaatcatcaagttaattggtcatatatcttttaa

SEQ ID NO: 81732 - DNA, 1419 bp, Saccharomyces pastorianus
atggtacaacaacagcatcctgctcaacaaacgcctattaactcttctgcaacaatgtacagtaatggagcttcccctcaattacaagctcaagctcaagctcaagcacaagcacaagcacaagcacaagcacaagcacaagcacaagcacaagcacaagcacaagcgcaagcacaagctcaagcacaggcgcaagcacaggcacaagcacaagcacaagcacaagcacatgcacaagcgcaagcacaagcacaagcacaggcacaagcacaagcacaggcgcaggcacaacaacaacaacaacaacagcagcaacaacaacaacaacaacaacaacaacaacaacaacaacaacaacaacaacaacaacaacaacaacagcagcagcaattacagcctctaccaagacaacagctgcagcaaaagggagtttctgtgcaaatgttaaatcctcaacaagggcaaccatatatcacacagccaacagtcatacaagctcaccaactgcaaccattttctacacaagctatggaacatccgcaaagctctcaactgccacctcaacagcaacaactacaatctgttcaacatccacaacaacttcaaggccagcctcaagcccaagctccccaacctttaatccagcataacgtggaacagaacgttttacctcaaaagagatacatggaaggtgcaatccacactttagtagatgccgccgtatccagtagcacccacacagagaataacacaaagtctcctcgtcaaccaacccatgccattccaacgcaagctcccgcaacaggaataacgaacgctgaaccacaggtaaagaagcaaaagttgaactctccaaattcaaacatcaacaaattagtaaatactgctacctccattgaagaaaatgcaaaatctgaggtgagcaaccaatcgccagcagtagtggagtctaataccaataatacttcacaagaagaaaaacctgtaaaagcaaactcaataccttcagtaattggcgcacaggaacctccacaggaagctagtcttgctgaagaagctaccaaagcagcttctgtttctccttctacaaaaccgcttaatacggaaccagagtcatctagtgtccaaccaacggtatcatcagaaagttcaacaacaaaagcaaatgaccaaagcactgctgagaccatagaactttctactgctactgttcctgcagaagcaagccctgtagaagacgaagtaagacagcattctaaagaggaaaacggcacaactgaagcatctgcaccttctactgaagaggcggagccagcagcttccagagatgctgaaaaacaacaagatgaaaccgctgctacaacgataactgtaatcaaacctacttcggaaacaatggaaacaagtgaaagaggaggc

SEQ ID NO: 81733 - DNA, 1191 bp, Saccharomyces pastorianus
atggcatatgacgccactttacagttcaatccctcatctgcaaaggctttaacatctttggctcacttgtaccgttccagagacatgttccaaagagctgcagaattatatgaaagagcacttttggtaaatcccgaactatcagatgtgtgggctactttaggtcattgttatctgatgctggatgatctgcaaagagcttacaatgcctatcaacaggctctctaccacctcagtaatcccaacgtaccgaaattatggcatggaatcggcattctttatgacagatatggttcgctcgactatgccgaagaagcttttgccaaagttttggaattggaccctcattttgaaaaggcaaacgaaatttacttcagactaggtattatttataaacatcagggtaaatggtctcaggctttggaatgcttcagatacattctccctcaacctcctgctcccttgcaggagtgggacatatggtttcagttgggtagtgttttggagagtatgggagagtggcaaggtgcgaaggaagcctacgagcatgtcttggctcaaaatcaacatcatgccaaagtattacaacaattaggttgtctttacggtatgagtaacgtacaattttatgaccctcaaaaggcattggattatcttctaaagtcgttagaagcagatccctccgatgccactacatggtaccatctcggtagagtgcatatgattagaacagattatactgccgcatatgatgctttccaacaagctgttaatagagattcaagaaaccctatcttttggtgctcaatcggtgttttatattaccaaatttctcaatacagagacgccttagacgcgtacacaagagccataagattaaatccttatattagtgaagtttggtatgatctaggtaccctttacgaaacttgtaacaaccaattatctgacgcccttgatgcgtataagcaagctgcaagactggacgtaaataatgttcacataagagaaagattagaagctttaacaaagcagttagaaaacccaggcaatataaacaaatcgaacggtgcgccaacgaatgcctctcctgctccacctcctgtgattttacaacctaccttacaacctaatgatcaaggaaatcctttgaacactagaatttcagcccaatctgccaatgtctactga

SEQ ID NO: 81734 - DNA, 183 bp, Saccharomyces pastorianus
atgaatccgggcggtgaacaaacaataatggaacaacccgctcaacagcaacaacaacagcaacaacaacagcagcgacagcaacagcaggcagcagttcctcagcagccactggacccattaacacaatcaactgcggaaacttggctctctattgcttctttgtgcagaaacccttggtga

SEQ ID NO: 81735 - DNA, 198 bp, Saccharomyces pastorianus
atgggtccagtggctgctgaggaactgctgcctgctgttgctgtcgctgctgttgttgttgctgttgttgttgctgttgagcgggttgttccattattgtttgttcaccgcccggattcatttttcctaaattttttcctccagtcgtgttttgtttgttgttgttgctggggatcctctagagtcacctgcagcatc

SEQ ID NO: 81736 - DNA, 153 bp, Saccharomyces pastorianus
atgattaaagcctggtttgacaccaacaaatacgttgctatgcatatgcaaactgaaccctttgtatatataaaaattatatgtataaaagaagaggaacgtccgcacaattccacacacacacacacacacgctttcacacacgcaatttga

SEQ ID NO: 81737 - DNA, 1482 bp, Saccharomyces pastorianus
atgaagtatctaaacttagttttcgtgcttcagcttcttattagcatcaaatacgcctcattcggccgagccttttctctttttgaagatgataccacttttgccaatttggataaacagctaaagcttccacagaatacacagcaaacccttaaattggaccgtttgaatcacgatgatccgctgtttacaacttttatttcttctatggataaggattactgtttgagacttagaacagtagatccttctaaactaggaattgacaccgtcaaacaatggtcgggttacatggactataaggattccaaacactttttttattggtttttcgaaagtaggaacgatcctgctaacgacccaattattctttggttaaatggtggacctggttgttcctcgtttactgggttgctatttgaactaggcccctcatcaattggcgccgatatgaaaccaatccacaatccctattcttggaataataacgcttcaatgatcttcttagaacagccactcggagtcggcttttcctatggtgatgaaaaagtctcctctacaaaattagcaggcaaagatgcgtacattttcctggaattgttttttgaagcttttcctcatttacgctccaacgatttccacattgcaggcgaatcctatgcaggacattatatccctcggattgcacatgagatcgttgtcaagaaccctgaaagaacgttcaatttaacttcagttatgattggtaatggtatcacagaccctttgattcaagcagattattatgaaccaatggcatgcgggaaagggggctatcaccctgttctctcatcagaagaatgtgagaaaatgagtaaagctgcaggtcgttgtcgtaggttgaacaagttatgttatgcttctaaatcaagtttaccatgcatagtcgccactgcttactgtgactctgcacttttggaaccgtacattaacacaggactcaacgtctatgacattagagggccctgtgaagataatagtactgatggtatgtgttatacaggtctccgctatgtcgaccagtatatgaattttcctgaagttcaagaaacgctagggtccgacgtgcataattatcctggctgtgataatgacgtgttcaccggatttttgtttacgggcgatggaagtaaaccatttcaacaatatattgctgaattattaaatcacaacattccggtattaatatatgcgggtgataaggattatatttgtaattggctgggaaaccatgcttggtccaatgagttggaatggatcaataaacgtaggtatcagagaaggatgttaagaccatgggtcagtaaagaaacaggtgaagagttgggacaagtcaagaactatggccctttcacctttttgagaatatacgatgccggtcatatggtgccctatgatcaaccggaggcaagtttggaaatgtcaacgttggatttccggtaa

SEQ ID NO: 81738 - DNA, 228 bp, Saccharomyces pastorianus
atgatatattcaaaaggtgcaatgtcagagaacatatattgcgcccctgtcctgtgtatcagtcatttttcgcgggacttgaatggcgcaccattatcctatacagaaaacattaaattttctgcaaaattttgggcaaatgcttggatacactatgaatccgtcatgaagatactacttgtaaaaaggtatatacatccttctttttcatgtgctagtaagaattag

SEQ ID NO: 81739 - DNA, 213 bp, Saccharomyces pastorianus
atgctttttgactcatccttccgcgaaaggagaactttttacaatgccgccggctctgttagcgtacccttctacaagcagatagcagaacaaacacatgatatattcaaaaggtgcaatgtcagagaacatatattgcgcccctgtcctgtgtatcagtcatttttcgcgggacttgaatggcgcaccattatcctatacagaaaacattaa

SEQ ID NO: 81740 - DNA, 1053 bp, Saccharomyces pastorianus
atgtcttcttcagtagcctcaaccgaaaacatagtcgaaaatatgttgcatccaaagactacagaaatatacttttcactcaacaatggtgttcgtatcccagcactgggtttggggacagcaaatcctcacgaaaagttagctgaaacaaaacaagccgtaaaagctgcaatcaaagctggatacaggcacattgatacagcttgggcctacgagacagagccattcgtaggtgaagccatcaaggagttattagaagatggatctatcaaaagggaggatcttttcataaccacaaaagtgtggccgattctatgggacgaagtggacagatcattgaatgaatctttgaaagctttaggcttggaatacgtcgacttgctcttgcaacattggccgctatgttttgaaaagattaaggaccctaaggggatcagcggactggtgaagactccggttgatgattctggaaaaacaatgtatgctgccgacggtgactatttagaaacttacaagcaattggaaaaaatttaccttgatcctaacgatcatcgtgtgagagccattggtgtctcaaatttttccattgagtatttggaacgtctcattaaggaatgcagagttaagccaacggtgaaccaagtggaaactcaccctcacttaccacaaatggaactaagaaagttctgctttatgcacgacattctgttaacagcatactcaccattaggttcacatggcgcaccaaacttgaaaatcccactagtgaaaaagcttgccgaaaagtacaatgtcacaggaaatgacttgctaatttcttaccatattagacaaggcactatcgtaattccaagatccttgaatccagttaggatttcctcgagtattgaattcgcatctttgacaaaggatgaattacaagagttgaacgacttcggtgaaaaatacccagtgagattcatcgatgagccatttgcagccatccttccagagtttactggtaacggaccaaacttggacaatttaaataagacaacgactgggatcctatag

SEQ ID NO: 81741 - DNA, 588 bp, Saccharomyces pastorianus
  modified_base (376)..(454): a, c, g, t, unknown, or other
atggaaaagttcaatctgacaagtaaatacgcaaaattctatgcctttgattcaaattattatgagggtgttctcaataggttagttaagcatacgagagaatcaaaagatgatatggtcgagctcttgaaaacttcgttcataaataaagagaagatggctgcatttggtagtttcgttacagaggaccaagaaaaaatggaagtgtccttcaatattttcaatgaaataacaatccaggatttgaacttcttgcaattttcaagcattccgaaattgtgggaaaataaactcttgagccaggcgaggaatatcatcatagtaatggtaccaatactgataataacgagactactggcgctgatgatactgacgnnnnnnnnnnnnnnnnnnnnnnnnnnnnnnnnnnnnnnnnnnnnnnnnnnnnnnnnnnnnnnnnnnnnnnnnnnnnnnntgacaatgacaacaatatcaaagatgatgatgatgatgatgatgatgacaatgatgatgattatagtaataatggtgctgacgatgatgaagaagacgatgactatgacagatctttattcccaacaggtttag

SEQ ID NO: 81742 - DNA, 2505 bp, Saccharomyces pastorianus
atgaatatggattctggttttacaagtagtcatgaaagcatggataagacacaaaagcaaagttctgagtgggcagctaaccagaaacataatcaaagagtcgaaaatacaagagttttaatgggccccgctgtccctgcgatgcctccagtaccatcaaattttccgcctgttccaactggtacaataatgtcatctcagttgagcccttttcccgatcaccgtttaagacatcacccattagctcatatgatgcctgctgataagaattttctcgcatataacatggagtctttcaaaagtagagtgactaaagcatgtgattattgtcggaagaggaagattagatgtacggaaattgagccgatttctggtaaatgtagaaactgtatcaagtataataaagattgcacgtttcatttccatgaagaactgaaaagaaggcgagaagaagctttgaataacaagggaaatgggaagtcggttaagaagccgaagttggataaggagaataagttcaaggatgaaaattttgatatcgccgtgcgatcaagaaatacttcttctacagacagctcgccgaaattacacaccaacttatcacaagaatatattggagtttctgccggcaaaagtgcaagcgataaagaagatacttggcctgactttgttcctattgacaggacagtgcttgaaaaaattgaactcaaccatacgaaggttgctgggaaagtttttgttttggaagagatttgtaaaaacatgaagggaacaatagagaagctagctgaaaaaagcaaaattgacgtcattgataaagaatacatgaaaaggcctaaaagaaagcaatattcaaaggccttgttaacaaaacaaaaaatgtttcattttcgacaaaatgttttgtcacatttaactgacgaagaatttctttcgcccatcaatgaaatgtttactactactttcaaatattctattttacagaccaagctggtcctagacttctctttccgatccgcatcatcaccatctagtgataatattttgtatcctctgccccgtttagcaattgcaaagcgtttgctcaaaaatataaaatgtccatcattagcctctcttctccacatagtagatgtagatcaatgtttgcaatttgccgacgtgcactttgatcctgctaaaggaagattgacaccatcacaggtatttttgctaaatatctgcctctgtcttggggccaccgttacgaattttgaggagaagcaggagctagttgatgaagataatcatgaaacctattattttgagaagttcgaattatggagactcagatctttcacttttctcaattctgtctattactatcataaactgtctgtagcacgcgcagatatgacggcactaaaggcattactgttactggcaaagttcgcccaacagaaaataagtgcttcatcagcggtcaaagtactatccgttgctatcaaggtggctttagatttacggctcaatttacattccacctatgaggatctagaacttgatgaaatcattaaaagaagacgcttgtggtgttattgtttttcaacagacaaatttttttctgtggtgttgtcaagaccgccctttctcaaggaggaaaacactgatgtattaacagatgaaagctatgttgaactattcagagataaaattctgcccaatctttctataaaatacgatgattcaaaactagaaggggtgaaagatattgtatccgttgtaaacttactcgcgaatcaccttgaatatgtaccatacattcaatcatattttttgtcgagattatctctcatagagtctcaaatatattactcatgtttttccatcagaacaactttagacgatacactagatgaaattattgaaaatgtactggaaaatcaaaaggcgttagatagaatgcaagacgatttgcctaccatattatcattagaaaattacaaggaaaacatgaggattttatctctggagtcttcgaagttagattttgaagtgagttgttgtactactattctattgcatctcagatggtaccatcaaaagataaccttgagtttatttgtcatatccatcattggagataacttagatcaacgggaaagttcccggcatgatatagctgaaattattagaaggtcaagattggatttcaagcgaaattgcatcgaggtacttaatattttgaaagattttgaatactaccctactgttcagaatgagtttctgtatttttctctcacaacggttttttccatgtttctgtatttgtcagagattatggttaatgacgaacatgccatggagactggttatataattggattattgagggatacacatacccgtatgcttggatctgaagaacgctgtctttcagtacacaatctgaagtggcaaacatctcttttttttttacactttttttctacggagtacgatggaaaagttcaatctgacaagtaa

SEQ ID NO: 81743 - DNA, 768 bp, Saccharomyces pastorianus
atgggcaaatttgagcaaaaagaaagagaaagaataagcacatttagttttcctactacgggcagtcaatctagtacatccattaaatcacttggcagcccactctatggacgtttcagctctctctcttcaacagaatctcagttcgatagcagcaaacaaccccatgagtacgaaaagagcttttattttgaagagtctcaaggcgaagctctgttcaacaagctgaagacctactctttccctggagacaaggatggtgtgaaaacgaggagaaattcctccatatgtccaagaaagcctaatgcggtatcacctttaagggtagaaagtaatgaattatcatcacattcgcattcacgttcattatcacacgaacttacaaagccctcagggcgaaggaaaagttaccacagaaaaagtcatgcaatctcattcagcaggtcttgtaagccaaatttcattgacgggtacgattctaattcaagcataggcgtcaattcaagaaaaacttcattggcaagttctttcttggacaaagaatatcattcttcaccggatacttcatatacccaccaaatgtccccgaaaaacacaatcatgaataccaatgaacaattaagaagaaacgcaagcggtagattcgggagtttgaaagaattcgctgaaaaaaatcagataaatattgagggcaaaatttttgctcataaagtggaaactggagacatattgcaaccactaattgacttagatattgacaataaatga

SEQ ID NO: 81744 - DNA, 402 bp, Saccharomyces pastorianus
atgaatatcgtcccacaagatacctttaaatctcaagtctctacagatcaagacaaaagtgttctttcatctgcagtgccctccttgccagacacattacgccagcaagaaggcggtgcagtacctctttccacacaattgaatgacagacatccattagaatcaacattgaagaactgggaaaccacacagcgccaaagacaaatggaacagtatcgacaaatatttggcattgccgaaccaatgaaaaggacgatggaaatggaaatcgtcaatcgtaccgacttcaaccccctttcaacaaacggtagtatacaccgtgacatactactgaacaaagagtgcagcattgattgggaggacgtctacctggtactggcctacaagccagcaccatggtag

SEQ ID NO: 81745 - DNA, 339 bp, Saccharomyces pastorianus
atggaaccattttcaccgacaatatgcgaaactgtaccattgtatccccaatggaatgggttaattgctggccatttggaaacttctgacatatcggaaacttttatgagctttgttttttacgcaactactatcaatgtaataatagaatttaaaaaactgctcatattaataataaacggaggaaatactcgaggagctattacttccagggacatccgatatctgacgccttttaaaatctccacatgcgcaagatttaaaaaaaaaaaggatctcggaaccggaacgagattgctcatttttcgttccgtttccgcaggttttgcaaatcattaa

SEQ ID NO: 81746 - DNA, 450 bp, Saccharomyces pastorianus
  modified_base (440)..(440): a, c, g, t, unknown, or other
atgggaaatatgataaagaaggcatctttaatagccctcctaccgctgctcactgccgcagctactgcagctactgatgcggagacatctatggaatctgggagttcttcacatttgaagtcttttttaatgtccgtttctatgattgggctttctgaaattggtgacaaaaccttcttgatcgcagccttgatggcaatgcgtcacaaaagacttctggtattctcagcagcagctatctccctcgctattatgaccatcctttctggtgtggtgggtcattcagccgttgcttttctttctgaacgctatacagcattttttgcaggtattttattcttagtgttcggttacaaattgactatggaaggtttggagatgtctaaggatgcaggtgttgaggaggaaatggctgaagtggaggaagaaattgccattanaagacatgaa

SEQ ID NO: 81747 - DNA, 327 bp, Saccharomyces pastorianus
atgccctctctgcgagatttatcactagaaagggaccaagaattaaatcagttacgagcccgtatcaaccagctgggcaaaacaggcaaaaaagaagccaatgattttgttggttcaaatatttcaagtgaacctgtatatgacacggtgattcaaacaggacagagctctaacgcaacgaatagttttgtgcaagaaactattcagaagacgaaacaaaaagagagtggtcagccatatatcatcccccaaaaaaacgaacatcagcgtaacatcgataagatttgcgaaaccagcgatcctttagtgagggttaatgcggccgcg

SEQ ID NO: 81748 - DNA, 183 bp, Saccharomyces pastorianus
atgggagtgaagcaaaccccaccagtccaggtgaaagtaagcgacgcggattccaccaacagaaggaaatctagtagccaggaaggaaaccctcagctggttcacttaaaggcaaagagcgacaaagataaaagaaagggatcttcagattccactgcttctataatgggcagttccaacgca

SEQ ID NO: 81749 - DNA, 5493 bp, Saccharomyces pastorianus
atgacagttagttccgatacaactgctgaaatatcgttaggttggtcaatccaagactggattgatttccacaagtcatcaagctcccaggcttcactaaggcttcttgaatcactactagactctcaaaatgttgcgccagtcgataatgcgtggatatcactaatttcaaaggaaaatttactgcaccaattccaaattttaaagagcagagaaaataaagaaactctacctctctacggtgtccctattgctgttaaggacaacatcgacgttagaggtctacgcaccaccgctgcatgtccatcctttgcatatgagccttccaaagactctaaagtagtagaactactaagaaatgcaggtgcaataatcgtgggtaagacaaacttggaccaatttgccacaggattagtcggcacacggtctccatatgggaaaacaccttgcgcttttagcaaagagcatgtatctggtggttcctccgctgggtcagcatcggtggtcgccagaggtatcgtaccaattgcattgggtactgatacagcaggttctggtagagtcccagccgccttgaacaacctgattggcctaaagccaacaaagggcgtcttttcctgtcaaggtgtagttcccgcttgtaaatctttagactgcgtctccatctttgcattaaacctaagtgatgctgaacgctgcttccgcatcatgtgccagccagatcctgataatgatgaatattccagaccctatgtttccaaccctttgaaaaaatttccaagcaatgtaacgattgctattcctaaaaatatcccatggtatggtgaaaccaagaatcctgtactgttttccaatgctgtcgaaaatctatcaagaacgggcgctaacgtcatagaaattgattttgaacctcttttagagttagctcgctgtttatacgaaggtacttgggtggccgagcgttatcaagctattcaatcgtttttggacagtaaaccaccaaaggaatctttggaccctactgttatttcaattatagaaggggccaagaaatacagtgcagtagactgcttcagttttgaatacaaaagacaaggcatcttgcaaaaagtgagacgacttctcgaatcagtcgatgtcttgtgtgtgcccacatgtcctttaaatcctactatgcaacaagttgcggatgaaccagtcctagtcaattcaagacaaggcacatggactaattttgtcaacttggcagatttggcagcccttgctgttcccgcagggttccgagacgatggtttgccaaatggtattactttaatcggtaaaaaattcacagattacgcactattagagttggctaaccgctatttccaaaatatgttccccaacggttccagaacatacggtacttttacctcttcttcagtaaagccagcaaacgatcaattagtgggaccagactatgacccatctacgtccataaaattggctgttgtcggtgcacatcttaagggtctgcctctacattggcaattggaaaaggtcaatgcaacatatttatgtacaacaaaaacatcaaaagcttaccagctttttgctttgcccaaaaatggaccagttttaaaacctggtttgagaagagttcaagatagcaatggctctcaaatcgaattagaagtgtacagtgttccaaaagaactgttcggtgcttttatttccatggttcctgaaccattaggaataggttcagtggagttagaatctggtgaatggatcaaatcctttatttgtgaagaatctggttacaaagccaaaggtacagttgatatcacaaagtatggtggatttagagcatattttgaaatgttgaagaaaaaagagtcccaaaagaagaagttatttgataccgtgttaattgccaatagaggtgaaattgccgttcgtattatcaagacattaaaaaaattgggtattagatcagttgcagtttattccgaccctgataaatattctcaacacgttactgatgcagatgtttctgtaccccttcatggcacaaccgcagcccaaacttatttagacatgaataagatcatagatgccgctaagcaaactaatgcacaggccattattcctggttatggtttcttgtcggaaaatgcggatttttctgatgcgtgcaccagtgctggcattacctttgttggtccttcgggagatattatcagaggtttagggttaaaacattctgctagacagattgcacagaaggctggcgttcctctagtgccaggctctttgcttatcacatcagttgaagaggctaagaaagtcgcagcggaattggaatacccagttatggtgaagtcaactgctggtggtggtggtattggtttgcagaaagtcgattctgaagaggatatcgagcatatttttgagactgtgaaacatcaaggtgaaacattttttggtgacgctggtgtatttctggaacggtttatcgaaaatgccagacatgttgaagtccaacttatgggagatggttttggtaaggccattgctttgggcgaacgtgattgttctttacagcgtcgtaaccaaaaagttatcgaagaaactcctgcaccaaatttgccagaaaagacgaggttggcgttaagaaaggcagctgaaagtttgggatctttattgaattacaagtgtgctggtacggttgaatttatttacgatgagaaaaaggacgagttttactttttagaagttaatacaagattacaagttgaacacccaataacagaaatggttacagggttagacttggtcgagtggatgatcaggattgccgctaatgatgcacctgattttgattctacaaaagtagaagtcaatggggtttcaatggaggcacgtttatatgctgaaaatccattgaaaaatttcagaccttctccaggtttacttgtcgatgtgaaatttcctgattgggcaagagtcgatacttgggttaagaaaggtactaatatttctcccgaatatgatccaacattggccaaaattatcgttcatgggaaagaccgtgatgatgcaatttccaagttaaatcaagcgttagaagaaacaaaagtttacggatgtattactaacattgactacctgaagtctatcattaccagtgatttctttgctaaagcaaaagtttctacaaacattttgaactcttatcaatatgagcctaccgccatcgaaattactttgcccggtgcacacactagtattcaggattaccccggtagagttgggtactggagaattggtgttccgccctctggtccaatggacgcatattcgtttagattggcgaacagaattgttggtaatgactacaggactcctgccattgaagtaacgttgactggtccatccatcgttttccattgtgaaactgtcattgccattactggtggtaccgctctatgtacattagacggccaagaaatcccccaacacaaaccggtcgaagttaagaggggatctactttatccattggcaagttgacaagcggctgtagagcatacttaggtatcaggagtggcattgatgtgcctaaatacttgggctcttattctactttcactctaggaaatgtcggtggatacaatggaagggtgctaaaacttggagacgtactattcttaccaagcaatgaagaaaataaatcagttgagtgccttccacagaatattcctcaatcattaattcctcaaatttccgaaactaaggaatggagaattggtgtaacatgtggtccccatgggtctccagatttttttaaacctgagtccatcgaagaatttttcagtgagaagtggaaggttcattacaactccaatagatttggtgtccgtttgattggacctaaacctaagtgggcaagaagtaatggtggtgaaggtggtatgcatccttcaaacactcacgattacgtttattctctgggtgcaattaatttcacgggtgatgagccagttattattacttgcgatggtccttccttaggtggttttgtgtgtcaagctgttgtcccagaagcagaactgtggaaggttggacaggttaaacccggtgactccattcagtttgtgccactttcttacgaaagctcgagatccttaaaggaatctcaggatgttgcaattaaatcattggatggtactaagttaagacgcttagactctgtttcaattttaccatcattcgaaacgcctattcttgcacaaatggaaaaagtgaatgagctttcaccaaaggttgtatacagacaagcaggtgatcgttatgttttggtggaatacggtgataatgaaatgaattttaatatttcctatagaattgaatgcctgatctcccttgtgaaaaataataagactgttggtattgttgaaatgtcccaaggtgttagatctgtattgatagaatttgatggttacaaagtcactcaaaaagaattgcttaaagtattggtggcatatgaaacagaaatccagtttgatgaaaattggaacataacttctaatataataagattaccgatggctttcgaagactcgaagactttggcatgtgttcaaaggtatcaagaaacaattcgttcgtctgctccatggttgccaaataacgttgatttcattgccaatgtaaatggaatttcaaggaatgaagtttatgatatgttgtattctgccagatttatggttttaggtttaggtgatgtcttcctagggtcgccttgtgctgttccattagatcctcgtcacagatttttgggaagcaagtacaacccaagtaggacatatacagaaagaggtgcagtcggtattggcggtatgtatatgtgcatatatgctgctaacagtcctggtgggtaccaattagtgggtagaacaataccaatttgggacaaactatgtctggccgcatcttctgaggttccgtggttgatgaacccatttgaccaagtcgaattttacccagtttctgaagaagatttggataaaatgactgaagattgtgataatggtgtttataaagtcaatatcgaaaagagtgtttttgatcatcaagaatacttgagatggatcaacgcaaacaaagattccatcacagcattccaggagggccagcttggtgaaagagcagaggaatttgccaaattgattcagaatgcaaactctgaactaaaagaaagtgtcacagtcaaacctgacgaggaagaagacttcccagaaggtgcagaaattgtatattctgagtattctgggcgtttttggaaatccatagcatctgttggagatgttattgaagcaggtcaagggctactaattattgaagccatgaaagcggaaatgattatatccgctcctaaatcgggtaagattatcaagatttgccatggcaatggtgatatggttgattctggtgacatagtgccgtcatag

SEQ ID NO: 81750 - DNA, 123 bp, Saccharomyces pastorianus
atgaacgcatattggtttcattatagagcgtcaatcaagaaagaggcaccaaactataaacgcacatttctcggtagggctaggaacgctttcctgcttatcttatctgaagcttatttatga

SEQ ID NO: 81751 - DNA, 1302 bp, Saccharomyces pastorianus
  modified_base (1150)..(1194): a, c, g, t, unknown, or other
atgtcattttccaattctaaagacaagtccgttgttgccgtctacaagctggtcaaagcgccaatctactctcattgcttttctcaagataaatctattttagccgttacatgcgaaacagattgtcttgtctatagagtttcaaacaacacacctcccgttttattcgcaacgttgaaagatcatgataaaaccattactgctgtggacatttccatacatggtcgtattgtgacttgctcccaagaccgtaatgcttacgtttgggagccattgagtgatgggacatacaagcccacgttagtacttcttcgtattaacagagcagctacttcagttacatgggcaccaaatggttataagtttgctgttgggtccagtgctagaatcatcgctgtttgttattacgaacacgagaataattggtgggtatccaagcacatcaagaaacccatcaaatctaccatcaattgcctgtcttggcatgcaaatggagtcctattagctgctggtggtactgatgggtttatgcgtgtgttcagcgggtttatcaagggtttggattccaaggaatccgtcgccggatcaccctggggccagaaattcccttttggttgtttaatcagggagtggtatcagggttcttatatccatgatgtggaatggagaagtcagatggaaagaattgcttatgtagcgcatgatggtactttgaatgttgtcgattaccaatctccagtgcaatctgtcaatgctccggaaggtttaccttacaggtccttagtatggataaacgaccacgagattgtttgtggaggatactcttgtcatccggtattgttcagcgaagcctctgaaggctggaaatttgcgaagaatctagacaaatcagacaataacaagtcttctgccttaactgcatctggtaatacagacgagctgagtggtaataatgatgaaagttcaactttcggtatttccgcattgagaaagtttaaagaattagacttgaaaggtaaagttagcacagatgtccaagaaagtgcacatgaaaacgccattgtggaattaagaccttttgcggaatccaacggccaaatcacaaaagtctcttcctgtgggttagacggtaagattgtcatttatacannnnnnnnnnnnnnnnnnnnnnnnnnnnnnnnnnnnnnnnnnnnnccctacctcataatacaccttgagtttgtattgtttttttcttcacttggcatatacagactatattattacaactcacagcacaatgtagtgtaccgtaaaaaataa

SEQ ID NO: 81752 - DNA, 1236 bp, Saccharomyces pastorianus
atgtgcactccagatgaaaacgattacaaaacatcaactgacccagatacatctgcaaatacaaaccatactctcgaaaaaaagaagagaaaaaagagaaaaaacacaaacgtggcatgcgtgaactgttcgagattgcatgtgtcatgtgaggccaaaaggccatgcttacgatgtatcagcaagggcctcacggctacatgcgttgacgctccaagaaagaaaagcaagtacttggctggaataccgaatagagagctcccaatgagcatacaaccggaccttccaccccgcaagatcatgatacccatttataacaactccagcaatagtagcctcaacgtaaatacatgggagacagcaaaattcaccagcccacagcatatagttcacaaagctaaattcctatcgaatgctgcagattccgagtactctattctgtcgaatatcatctatcaagacacattgtctgacaagatccctattgacatcctgtactccaacaccaattccacatccaactccacaataggcaatagcagtaacaatagccctacgggtacaaatacaagccctgaagaaacagaaatggagaaaattcgccagttgtacagcgaacagcgagcaaacatgcccccacatccgtatccatcttccaatcaaaacgtttattctattctactgggaccaaattcagccaagattgtagcttcgcaagttaatcttttcgcgaaccatttccccttagtgcccgttgattcagctgataattccttaaactttaaaagattattgccacgggacccatctgaaaagagctcccaaattaattgggactcaagcataaaccaatattacttgaacagcgaaacggtaacatttcccgagttggctatccccttaaagcggaggaaaaaccatttggtctctgtatccctggaaagctgttcaccagacgctgccaacatcaagagcaatgtaggatgggaacattcattacgttattctactccaatggaaatatacacctccataaatgcccccttttcgcatacacctggattccaccatcttttggtgtacctaaagcatcgattcaaccagcaggatctggtgaagatgtgtcggtccattgccgaattccggcccattttcattgcgtgttctgtaactttaaccgaggaggacatgatttttatggagcaatgctaccaaagaactctattagatatgtaa

SEQ ID NO: 81753 - DNA, 417 bp, Saccharomyces pastorianus
atgttgtgcgccatcaaaagcacaggttatcggtatcctcgcacgggagccttaaatctactacgtggacgaccatttaatatggccacccgaaaaataactactgaaaggatccccggccctcccaagctgccaagagaagagcaggaagagttcgaaagacttcagaggattgccacatcgcaagaggcaatagatcagtataatgcgcaggccaccggcgatcgtacaaaggagagtttgaattcaccgcttttaaccaaaaacgatattgggtcattctcgcctgaattttccaagaccatacctgaattcgaaggtgatgttaaccccaagactggtgaagttgggggtcccaagcaggacccgttgagacacggcgattattcgtttaacggaagagtaacggatttctag

SEQ ID NO: 81754 - DNA, 288 bp, Saccharomyces pastorianus
atgaagttcccagccgattaccattatacgtcgccgtttcgttcatgtaaatattcaaatatactacacttcatatctttgcttcttatattttcgcgcgtaggtttgcctaattacatttttatattcctcatcaataaagccgccaacaaagagcacagggtagaaactctgctgtctgggaactcggctaacgcttgtaagctatttaatattctcaaatcatttcaacacctcttttttttttttttcaaatatgtactattttctctatttccattaagttag

SEQ ID NO: 81755 - DNA, 1737 bp, Saccharomyces pastorianus
atgaccggttccgcatttaacatcatctggggtcaaattccggctctcatgggatacaactcattagtgaataccagagaagcaacgtataaggttgtaattaacactctgaaacatttaccaaacacaaagttagacgccgtttttggcttgattccgttggtaatcctctatgtatggaaatggtggtgtggtacatttggtataactttggcagatagatattatcgaaatcaaccaaaggtagcaaatagactgaaatccttctatttctatgcacaagctatgagaaatgccgtcgtcatagtagtttttactgccatatcgtggagcataacaagaaacaaatcttcaaaagaccgtccaatcagtattctgggtacagttccctcgggcttaaatgaggtgggagttatgaaaatcccagacggtctgctatctaatatgagttcagaaatacctgcttcaattatcgttctggtgttagaacacatcgctatttcaaaatcctttggtagaattaacgactacaaggttgtccctgaccaagaacttattgcgattggtgtgacaaatttgatagggacattttttcactcatatccagcaactgggtcattttccagatctgctttgaaagcaaaatgtaacgtgcgcactccgttttctggggtattcactggcggttgcgttctattagcactttattgtttaactgacgccttctttttcattcctaaagcgacactatcggcggttattattcatgctgtttctgatttgctgacttcttacaaaaccacctggaccttctggaagaccaacccgttagattgtatctcatttatcgttacagtgttcatcacagtattttcatccattgaaaatggtatatattttgcaatgtgttggtcatgtgcaatgttactattgaaacaggctttccctgctggtaaattccttggtcgtgttgaggtggcagaagtattgaacccaacagtacaagaggatattgatgctgtgatatcatctaatgaattacctaatgaactgaataaacaggttaagtctactgttgaggttttaccagccccagagtataagtttagcgtaaagtgggttccgttcgatcatggatactcaagagaattgaatatcaataccacagttcggcctcctccaccaggtgtcatagtctatcgtttgggtgatagctttacttacgtgaactgctcaaggcattatgacattatatttgatcgtattaaggaagaaacaaggcgaggccaacttataaccttaaggaaaaagtcagaccgtccatggaatgatcctggtgaatggaaaatgccagattctttgaaatcactatttaaatttaaacgtcattcagcaacaacgaatagtgacccaccgatatcgaatggaagcagtaacggagaaacatatgaaaagccgctactgaaagtcgtctgcctggatttttcccaagttgctcaagtggattcaaccgctgttcaaagcctggttgatctgagaaaagctgtgaataggtatgcggatagacaagtcgaattccattttgccggaattatatctccatggatcaaaagaagtcttttgagtgttaaattcggaactacaaatgaggaatatagtgacgactctattatcgctggccattctagttttcacgttgcaaaagttttgaagggggatcctctagagtcgacctgc

SEQ ID NO: 81756 - DNA, 552 bp, Saccharomyces pastorianus
atgtcacgtaagagctcgactgaatatgtgcataatcaggaggatgctgatatcgaagtatttgaatcagaataccgcacatatagggaatctgaggcggcagaaaacagagacggacttcacaatggtgatgaggaaaattggaaggttaatagtagtaagcagaaatttggggtaacgaaaaatgagctatcagatgtcctgtacgattccattccagcgtatgaagagagcacagtcactttgaaggagtactatgatcattctatcaaaaacaatctaactgcgaaatcggcaggaagttacctcgtatctctttttcctattataaaatggtttcctcattataactttacgtggggctatgctgatttagtggcaggaattacagttggctgcgtactcgtgccccaatctatgtcatacgcacaaatcgctagtttatctcctgaatatggtttgtattcctcctttattggtgcgtttatatattctttgtttgccacatcgaaagatgtttgtattggtccggtcgctgtaatgtcactataa

SEQ ID NO: 81757 - DNA, 192 bp, Saccharomyces pastorianus
atggaactttttataccttgcccagagcgcctcaagaaaattatgctgaaagaagaattgaggaaggaactactcatcttacgttgtttgtatcatcccacgatccaaatcatgttacctacgttaggtacgctaggaactaaaaaaaagaaaagaaaagtatgcgttatcactcttcgagccaattcttaa

SEQ ID NO: 81758 - DNA, 204 bp, Saccharomyces pastorianus
atgaataggtacttgtttgagaaaaaagtctggaataatgaagagtttttctacgatgggattgactgtgaatggttttttagccacttcttctaccgcgttctatctgcgaagaaatctatgcgggctctatcattgaatgtggaactatggccatacattaaagaagcgcaattatcctgcagtgaggagtccttagcgtaa

SEQ ID NO: 81759 - DNA, 2340 bp, Saccharomyces pastorianus
atggatgatgccttgcatgctttgtcctcgttgactgcaaagaagagaactaccacctacaaaaaagttgctgttcccatactagatgagaacgataatactaatggaaatgggcccaatgacatagacaatccgccagagttgactgggaacgggtttttatttgccaatgccacattaaatcgtgttaagaacagattagaaggcaagaaagcacccgaacagaatcacaataatggaaaagataggagtgagaattcgttaccaactcaattaatctctaatctttacgatggtggtgaagagctggagaaatccgaagttaaagataatagttacagtgagaaaaatgtctcttcttcattcacgcagacgcaaagaatacctgtcagcatccaacaagacaaggtgtttaacgtacctatccattccgttaatgacgggaaacccacccaattaatcaaagaagatggtctcgtcaacgaaacttctcaagcgctgaaaacacctctcacgacaggacggccaggggctacacagcgtatagatagcagcggtgcaacctcacaaactcagcctataaaatcaattgaaccacaatcccaaataattacgacttccagcaatcattctaatgctctgtcgccgaaaattcctataattccaacggaacttattggaactagtcctttatttcagtccattcaaaatcgtggtcctgacacccaaatggatgtaccaccacagactgcgcatgatgaggataagacacaagcaattggtattccacaggctacgcatcaggaacagaaaacccaaatagatacagtcgcacaaacacttcaagatgaagtaccacacacattaaaaattcgggaaatacaaagcgaattggcttcagaagattctaaaagggaaaaagctagaaatgtcgaatacaagaaaccgcaaaagccaataccaaccaaaaaatttttttctaaagagtcttttcttgctgattttaacgattcgtcctcaaatgaggacgatgatataaagctggaaaatgcacatccaaaaccagtacagaatgacgatgaactgcatgaaaacaaaagtgttgaattaaatctaactgatgagacaagaataaatgagaaaagggttccactattgagctcctatgctaataatttgaaacgggaaattgactcctcgaaatgcataacactggacctcgacagcgacagtgacgaatatggagatgatgatatggatagcattaaattatccaaagatgaaagcgttttgccaatctctcagttatcaaaggcgactatattaaacctgaaggcaagactctctaaacaaaatcaaaagttgtctcaaaggccgaataaaagtaaagacccaaaagttgatcataatgtactattaaataccttaaggaaagctagcaggaaacaaattctggatcatcagaaagaagtgattgaaacgaaaggtctgaagctggaggatatggccaaagaaaaggaaatagtagagaacttgctagaacaagaaattcttagaaataaaagaatcagacaaaaagagaagagaagggaaaaacttgaagaaaatgactttcaattgaacgcccatgattccggttctgactcagggtcagagtcttctggatttgcattgagtggtaatgaaattgccgattatgaatcatctggtagtgaaaatgacaatcgtagagaatccgatagtgaaaaggaagatgatgaaattattctaaagcaaaaaaaatcccaccacgtgaaacatatcattaacgaatcagactctgataccgaagtcgaagccaaacccaaagagaaagctgatgaaagtctaccgaaaaggatcgccattaatctgggccattacggtgataatatcggagaggataccgacaaatttcaagaaaccaatgttctagatacacaaaacattgaagaggtgatggccgaaagaaatacaatcgaaaatgaagtcaaagatgatgtatacgtcaatgaagaagctgatgaagcaattcgccgtcagctgattgacaaagagaaattgcaactaaaacagaaagaaaaggagcacgaggctaagataaaagagttgaagaaaagaggtgtcacaaacttctttgaagtggaagccgaagaatccgaggatgaatggcatggtatcggtggtgcagatggagaaggatctgacgactatgattctgacctagaaaaaatgatcgatgattattccaagaacaatttcaatcctcatgaaatcagagaaatgctgccgcagaaaataaggaaatggatatcaaaatga

SEQ ID NO: 81760 - DNA, 276 bp, Saccharomyces pastorianus
atggatatcaaaatgataaacaaaattctttatgacattaaaaatggaggatttcgtaataaaagagcaaaaaatagcttagagctagaactaagtgatgatgatgaagacgacgtactacaacaatatcgtctcaaaaggagagaattgatgagaaaaaggagattagaaattggcgatgatgcaaagcttgttaaaaacccaaagtcgagcgcattttttgaaagtatggtggaagatattatcgatataaaaaccccttcggggctgaagagg

SEQ ID NO: 81761 - DNA, 306 bp, Saccharomyces pastorianus
atgaagttttctgctggtgccgtcctgtcatggtcctccctgctgctcgcctcctctgttttcgcccaacaagaggctgtggcccctgaagactccgctgtcgttcagttggccaccgactctttccatgaataccttcagtcgcacgacttggtgcttgcggagttattagctccatggtgtggccactgtcagaacatggctcctgaatacgttaaagccgccgagactttagttgagaaaaacattaccttggcccgatcgactgtacttgcaaccaggatctgtgtatggaacacaacattc

SEQ ID NO: 81762 - DNA, 1065 bp, Saccharomyces pastorianus
atgagctatggaactataaatgatatgaatgaatcggtaacgaactatcgaataaaaaaagcccaaaacaatatcaagggatggtacgcttactcattttctagcgaaccatttgtcgtttctgcggtttcaacgtatattcccttactactgcagcaatttgcgagtataaatggtgtaaaagttcacgatcactccataccctgcctgtcagaaacgggtagtgattcagataagtgtgttcttggtttgttcaacaatcggatcttcgtagatacttcaagttttgcattatatgccttttcccttagcgttttgttccaaactataatagtcatttccgtttcagggatagtagatctctgggggagcgttaaattcaaaggcagaattctggtttggtttggtattgtgggcgcattgtcgactgttgcgatttcaaaattgaatgatacccagatttattctctggctgggctttatatagtggccaatggttgttttggcgttatcaatgttgttgggaattctcttctgcccatttttgtcaaggattctttgaaatgtcaaagtcaaggagcttatgaacctgataaggtagactcgttaactactgttattagcggtagaggtgcatctttaggttattcaagtgccctcattgttcagatcgtatctatgttcttagtcgcatctaaaaagggcagtaagcaggatgttcaagtggctgttcttttcgttgggatttggtggtttgtgtggcaactgcccatgatctggttgattgacgatgtgacaataccgataagagctgacgattctacatccgcccgcagtccgtatcccggtgagcaagacgccttgggtcaactaaactggaagaattacctttcatatggttgggtttcgcttttcgaatcgtttaaacatgccagactattgaaagatgtgatgatttttcttattgcgtggtttattattagtgattccattacaactataaattctacagcggttttgttctccaaggcagaactgcacatgagtaccctcaatgaatcatga

SEQ ID NO: 81763 - DNA, 99 bp, Saccharomyces pastorianus
atgataagtgttttgaccgttgtaaatgcaatgctgggtgcctttatgattccactatttcttgccacaaagtttcgtggacttctagtcaaactttga

SEQ ID NO: 81764 - DNA, 2172 bp, Saccharomyces pastorianus
atggttttgccgattctaccgttaattgatgagctggcctcatggaatagtaagaaggaatacgtttcacttgttggtcaggtacttttggatggctcgagcctgagtaatgaagagattctccagttctccaaagaggaagaagttccattggtggctttgtccttgccaagtggtaaattcagcgatgatgaaatcattgccttcttgaacaacggagtttcttctctgttcattgctagccaagatgctaaaacagccgaccatttggttgagcaattgaatgtgccaaaggagcgtgttgttgtggaagagaacggtgttttctccaatcaattcatggtaaaacaaaaattctcgcaagataaaattgtgtccataaagaaattaagcaaggatatgttgaccaaagaagtgcttggtgaagtacgtacagaccgtcctgacgggttatataccacactagttgtcgaccaatacgagcgttgtttagggttggtgtattcttcgaaggaatctatagcaaaggccatcgatttgggtcgtggcgtttattattctcgttctagaaatgaaatctggatcaagggtgaaacttctggcaatggccaaaagcttttacaaatctctactgactgtgattcggatgccttaaagtttatcgtcgaacaagaaaacgttggattttgccacttggagaccatgtcttgctttggtgaattcaagcatggtttggtggggctagaatctttactaaaacaaaggctacaggacgctccagaggaatcttatactagaagactattcaacgactctgcattgttagatgccaagatcaaggaagaagctgaagaactgactgaggcaaagggtaagaaggagctttcttgggaggctgccgatttgttctactttgcactggccaaattagtggccaacgatgtttcattgaaggacgtcgagaataatctgaatatgaagcatctgaaggttacaagacggaaaggtgatgctaagccaaagtttgttggacaaccaaaggctgaagaagaaaaattgaccggtccaattcacttggacgtggtgaaggcttccgacaaagttggtgtgcagaaggctttgagcagaccaatccaaaagacttctgaaattatgcatttagtcaatccgatcatcgaaaacgttagagacaaaggtaactctgcccttttggagtacacagaaaagtttgatggtgtaaaattatccaatcctgttctcaatgctccattcccagaagaatactttgaaggtttaaccgaggaaatgaaggaagctttggacctttcaattgaaaacgtccgcaaattccatgctgctcaattgccaacagagactcttgaagttgaaacccaacctggtgtcttgtgttccagattccctcgtccaattgaaaaagttggtttgtatatccctggtggcactgccattttaccaagtactgcattaatgcttggtgttccagcacaagttgcccaatgtaaggagattgtgtttgcatctccaccaagaaaatctgatggtaaagtttcacccgaagttgtttatgtcgcagaaaaagttggcgcttccaagattgttctagctggtggtgcccaagccgttgctgctatggcttacgggacagaaactattcctaaagtggataagatcttgggtccaggtaatcaatttgtgactgccgccaaaatgtatgttcaaaatgacactcaagctctatgttccattgatatgccagctggcccaagtgaagttttggtcattgccgatgaagatgctgatgtggattttgttgcaagtgatttgctgtcacaagccgaacacggtattgactcccaagttatccttgttggtgttaacttgagcgaaaagaaaattcaagagattcaagatgctgtccacaatcaagctttacaactgccacgtgtggatattgttcgtaaatgtattgctcacagtacgatcgttctttgtgacggttacgaagaagcccttgaaatgtccaaccaatatgcaccagaacatttgattctacaaatcgccaatgctaacgattatgttaaattggttgacaatgcagggtccgtatttgtgggtgcttacactccagaatcgtgcggtgactatgactta

SEQ ID NO: 81765 - DNA, 1353 bp, Saccharomyces pastorianus
atggtagcaacaataatgcagacgacaacaactgtgctgacgacagtcgccgcaatgtctactaccttagcatcaaattacatatcttcgcaagctagttcctcgacgagtgtaacaacagtaacgacaatagcgacatcaatacgctctacaccgtctaatctactcttttctaatgtggcggctcagccaaaatcatcttcagcaagcacaattgggctttcaatcggacttcccatcggaatattctgtttcggattacttatccttttgtgttatttctaccttaaaaggaattcggtgtccatttcaaatccacccatgtcagctacgattccaagggaagaggaatattgtcgccgcactaattggttctcacggttattttggcagagtaagtgtgaggatcagaattcatattctaatcgtgatattgagaagtataacgacacccagtggacctcgggtgataacatgtcttcaaaaatacagtacaaaatttccaaacccataataccgcagcatatactgacacctaagaaaacggtgaagaacccatatgcttggtctggtaaaaacatttcgttagaccccaaagtgaacgaaatggaggaagagaaagttgtggatgcattcctgtatactaaaccaccgaatattgtccatattgaatccagcatgccctcgtataatgatttaccttctcaaaaaacggtgtcctcaaagaaaactgcgttaaaaacgagtgagaaatggagttacgaatctccactatctcgatggttcttgaggggttctacatactttaaggattatggcttatcaaagacctctttaaagaccccaactggggctccacaactgaagcaaatgaaaatgctctcccggataagtaagggttacttcaatgagtcagatataatgcctgacgaacgatcgcccatcttggagtataataacacgcctctggatgcaaatgacagcgtgaataacttgggtaataccacgccagattcacaaatcacatcttatcgcaacaataacatcgatctaatcacggcaagaccccattcagtgatatacggtactactgcacaacaaactttggaaaccaacttcaatgatcatcatgactgcaataaaagcactgagaaacacgagttgataatacccaccccatcaaaaccactaaagaaaaggaaaaaaagaagacaaagtaaaatgtatcagcatttacaacatttgtcacgttctaaaccattgccgcttactccaaactccaaatataatggggaggctagcgtccaattagggaagacatatacagttattcaggattacgagcctagatga

SEQ ID NO: 81766 - DNA, 1902 bp, Saccharomyces pastorianus
atgtcgtcgtcgaagtctctatacgaactgaaagacttgaaaaatagctccactgaaatacatgccacggagcaggataatgaaattgaatatttcgaaacaggctccaatgaccgtccatcctcacaacctcatttaggttacgaacagcataacacttctgccgtgcgtaggtttttcgactcctttaaaagagcggatcagggtccacaggatgaagtagaagcaacacaaatgaacgatcttacgtcggctatctcaccttcttctagacgggctcaagaactagaaaaaaatgaaagttcggacaacataggcgctaacacaggtcataagtcggactcgctgaagaaaaccattcagcctagacatgttctgatgattgcgttgggtacgggtatcggtactgggttactggtcggtaacggtaccgcgttggttcatgcgggtccagctggactacttattggttacgctattatgggttctatcttgtactgtattattcaagcatgtggtgaaatggcgctagtgtatagtaacttgactggtggctacaatgcataccctagtttccttgtggatgatggttttgggtttgcggtcgcttgggtttattgtttgcaatggctgtgtgtgtgtcctctggaattggtgaccgcatccatgactatcaaatattggacgacatctgtgaacccggatgtgttcgtcattattttctatgttttggtgattactattaatattttcggtgctcgtggttatgcagaagctgagttcttcttcaactgttgcaaaattttgatgatgactgggttcttcattcttggtattatcatcgatgttggtggcgctggtaatgatggttttattggtggtaaatactggcacgatccgggcgctttcaatggtaaacatgccattgacagatttaaaggtgttgttgcaacattagtgactgctgcttttgcctttggtggttcagagtttattgccatcaccactgcagaacaatctaatccaagaaaggccattccaggtgcggccaaacaaatgatctacagaatcttattcctattcttggctaccattattctactgggtttcttggtgccatacaattccgatcaattattgggttctaccggtggtggtactaaagcctcgccatatgtcattgctgttgcatcccacggtgtccgtgtcgtcccacacttcattaacgccgttattctactttccgtgctgtccatggctaactcctccttctactccagtgctcgtttatttttaactctatccgagcaaggttacgctcctaaggttttctcctacatcgacagagccggtagaccattgattgccatgggtgtttctgcattgtttgccgttattgccttctgtgctgcatctcccaaggaagaacaagttttcacttggttattggccatttctggtttgtctcagcttttcacatggactgccatttgtttatcccatcttagatttagaagagccatgaaagtccaagggagatctcttggagaattgggtttccaatctcaaactggtgtttggggatctgcctacgcttgcattatgatgattttaattcttattgcccaattttgggtcgctatcgcccccattggtgaaggtaagctggatgcacaagcctttttcgaaaactacttggctatgccaatcttgattgcactttatgtcggctacaaggtctggcacaaggattggaaactgttcatcagggccgacaagatcgacctagattctcatagacaaatctttgatgaagaattaatcaagcaagaagacgaagaatatagggaacgtttgaggaacggaccttattggaaaagggtcgttgccttctggtgttaa

SEQ ID NO: 81767 - DNA, 483 bp, Saccharomyces pastorianus
atgactgtagtgaataccgagacccattctgctgctaaaccatcgagtactataggcccatggaagcttggtgaaacactgggctttggtagcaccggcaaggtccaacttgcgcaacatgagcgcacgggccatagaacagccgtcaaagtaatctcaaagtccattttcaacaacaacggaaaccacagtaacgacgattcagtgctgccatacaacatcgagcgtgagattgttattatgaaacttttgagccacccaaacgttctgagtctttacgacgtttgggaaaccaacagtaacctgtaccttatcctggaatacgccgaaaagggagaactgttcaacttgcttgtggaccacggtcccttgcccgagcgtgaggccatcaattgcttcagacagataattataggcatttcatactgccatgcgctaggaatagtacatcgggatttagccagaaaatcttttgctcgatag

SEQ ID NO: 81768 - DNA, 1161 bp, Saccharomyces pastorianus
atgacctcagaaaagaaatcctcccctaaaagggcagtcgtttcatctcccaaaattaaaaagaaaagtgcttctttttccacaaaagaatcacaaactgctaaatcttctcttcgagcagttgaattcaaatctgatgacttgatcggaaaaccacctgatgttggaaatggcgcacatcctcaagaaaataccagaatatcttcagtagtaagggacacaaaatatgtctcctacaatccctctcagcatgtgacagaaaatgccagtaacgaaaaaaatgtcgaaccaaaagcggatcaatccacaaagcaggataacatttccaattttgcagatgtagaggtatctgcgtcttcttatcctgaaaaacttgatgcagaaacagatgatcaaataattgggaaggcgacgaattcgtcatcagttcatggaaataaagagctgtcagaccttgctgaggtgactacagcaaatagggtttctacaacatcggctggggaccaacgtattgatacccaaagcgaatttttacgcgcagctgatgttgaaaacttaagtgatgacgatgaacacagacagaatgaaagtagagtttttaatgatgacctctttggtgattttattcctaagcattaccgtaataaacaggagaacattaacagctcgagtaatttgtttccagagggaaaggtgccccaagaaaagggtgtatcaaatgaaaacactaacatatctctcaaaactaatgaagatgcatctacattgacgcagaaactctctccacaagcgagtaaagtgctgacagaaaattctaatgaattaaaagataccaacaatgaagggaaggacgcaaaggacataaaattaggagatgattacagtgataaagaaacagcgaaagaaataactaaaccaaaaaattttgttgaaggaataactgaacggaaagaaatattccccactattcctaggttagcgccgccagcttcaaaaattaactttcaaaggtcaccatcctatattgagctctttcaaggaatgagggtggttttagataagcatgatgcccattataactggaaacgcttggctagtcaagtctccttaagtgagggactgaaagtcaatactgaggaagatgcggcagatatgatttaa

SEQ ID NO: 81769 - DNA, 231 bp, Saccharomyces pastorianus
atggccaaagatttactctgtgtaaatgagaatttgataaaaaacttagaacatcaattggaagaggtcaagcacccttcaacagacgaacatagggctgttaatagcaaactttccggtgcatctgatttcgatgctactcacgagaagaaaagatcatacggcaccataacaacatttagaagctataaaagcgacttgaaggacagtccatcaggcgataatagtaat

SEQ ID NO: 81770 - DNA, 1695 bp, Saccharomyces pastorianus
atgcatttgctgtcatctgttacagcgctatccattactttcaccatcagacttatcacaaatatgtccaataaatcggaaaattgcgactatgaccccccttatgctggagatttggctagtagttgccagttaataacagcagttcctccagaagatctggggaagcgcttctttacatcaggacttctgcaaaatagatttgtcagctctaccctgttagatgttatttatgaaaacaatgaaaccaccatcgaactaaataataggttggtattccatctgggtgaacaacttgaacaactttttaacccagtcacagaatactcaccggaacagacagaatatggttataaggcgccagaggacgaattacccacagaatcggatgatgatcttgtcaaggccatttgcaacgagttattacaactacaaacaaattttactttcaatttggtagaatttttgcaaaaattcctgatcgccttgagagtcagagtactcaatgaagaaattaatgggttatccacaaccaaattaaatcgactcttcccacctacaatagatgaagtcacaagaatcaattgtatttttctagactcgctaaagacagcaatcccttacggttccctcgaagtactgaaggcatgcagcattactattccttatttctacaaagcatatacaagacacgaggcggccacaaagaacttcagcaaagatattaaattgtttattaggcatttcagcaatgtaattccagaaagagaggtctacacggaaatgaaaatcgagagtataattaagggacctcaggaaaaactactgaagctaaagttaattatagggagattgtggaagtcgaaaaaatggagaccgaaaaatcaagaaatggcaaaaaaatgctacaacaatatcattgatgtcattgattcgtttggaaaattagattccccacttcattcttatagtaccagagtatttactccatcgggaaaaatccttacagaattagccaaatgctggcccgtggaactgcaatacaaatggctgaagagaagggtagtcggtgtgtatgatgtagtggatttgaatgatgaaaataagagaaatttattagtcatattcagtgattatgtggttttcatcaatatactggaggcagaaagttactacacttcagatggatcaaacaggcccttaatctcagatattttaatgaactcattgatcaacgaagttccgttgccctccaagatccctaagttgaaagtggagcgtcattgctatatagatgaggttctagtttctatattagacaaaagcactctacgttttgatcgattgaagggaaaagattctttctcaatggtatgtaaattatcctctgcatttatctcttcttcgtcagttgctgacttgattacgaaggctagaattttggaaaaagacactgcatttcatttatttaaagctagtagaagccattttacattatattctactgctcacgagctttgcgcttatgattccgaaaaaataaaatcaaaatttgccttattcctgaacataccaccatccaaggagatattggaggtcaacaaccttcatttggctttttttgcaagattttgcagtaacgacggtagagataacatcgtaatcttagacgtcttaaccaaacatgacgattaa

SEQ ID NO: 81771 - DNA, 324 bp, Saccharomyces pastorianus
atggagaaagacctgtcgtctctttactctgaaaagaaagacaaagagaacgatgaaaccttatttaacatcaaactatccaaatctgttgtcgagaccacaccgctaaatggtcattcattgtttgatgatgataaatcactttcagactggacggataatgtgttcactcaatcagtattctatcacgggtcagatgacttgatatgggggaagttctttgtctgcgtgtacaagtcccccaacagcaataagttgaacgctataatattcgacaaattaggaacatcatgcttcgaatccgtcgatatatctccaactcgc

SEQ ID NO: 81772 - DNA, 651 bp, Saccharomyces pastorianus
atgctgagatcgttattgcaaagcggccaccgcagggtggttgcttcttcatgtgctaccatggtgcgttgcagttcctcgtcgacctccgcgttggcgtacaagcagatgcacagacacgcaacaagacctcccttgcccacactagacactccttcctggaatgccaacagtgccgtttcatccatcatttacgaaacaccagcgccttctcgtcaaccaagaaaacagcatgtcttgaactgtttggtgcaaaacgaacccggtgtcttgtccagagtctcgggtacgttagctgccagaggctttaacattgattcgttggtcgtgtgcaacaccgaggtcaaagacctaagtagaatgaccattgttttgcaagggcaagatggcgtaatcgaacaagcacgcagacaaatcgaagacttggtccccgtctacgccgtcctagactataccaattctgagatcatcaaaagagagctagtgatggccagaatctctttattgggtactgaatacttcgaagacctactattgcaccaccacacttccaccaatgctggcgccgctgactcccaagaattggtcgccgaaatcagagaaaagcaattccaccctgccaactgcccgccagtgaggtattacggttga

SEQ ID NO: 81773 - DNA, 423 bp, Saccharomyces pastorianus
atgtctgcaaacggcaagatctctgttcccgaggcggtggtcaattggctgttcaaagtcattcaacccatttataacgacggaagaacaactttccacgattctttagcgctgctggacaattttcacagtttaaggccaagaacaagggtatttacgcactctgacggcactccacaactactgttgtccatatatggtaccattagtactggtgaggatggttcatctcctcacagtattcctgtgatcatgtgggtacccagtatgtacccggtaaaacctccttttataagtataaacttggaaaatttcgacatgaacaccatcagtagttacttgcccatacaagaatacatcgactcacatgggtggattgcgctgaccatactccactgctgggatcctgccgcgaagaacctt

SEQ ID NO: 81774 - DNA, 396 bp, Saccharomyces pastorianus
atggagctggcaaaggaacgtaatggcccacatcaaaaacatcatggccaatgtcaaaatcactgtacttctccaaacactgtacgacaaaacaaaacaaacaaactcttgttagtaaaaaagaaagggaaactagtaatatggagacacatcgtacaaaaaatgttgcacatacgcttggttgttctttggagccattatccagaacagcacggacatggcactaaccactatgaatacaccaacaacagtatagctaaattggacgcgcagagagttagtagaagaagaaggaagaagagggaggcggagagaagagattatgacacatacaaatactcattactctttgttctttattattcgttggacctttgtttcttaaagtatagataa

SEQ ID NO: 81775 - DNA, 495 bp, Saccharomyces pastorianus
atgatggttttaaggcagttatactattataggtcaactaaacatatttatcagggcatttccattacttccataataattataagtgtgttccttgtattaggcatatttacatatggctgttccatctctaatttaccgttgaaaaattcaggtaaatttggcgttttctatttggaacacataaattatttgtgggtaatggcaaatctgcttaaatgtttcaagtatgtgcctcaaatgagtataaactggatgggatgctcaacagtaggtttatcatcaaagtttgcattgatatcatttttggctgaatctatcgatttattaggtagactggtaataccgaccaatgcattgttttacgaaataccatttaattcaacgcccttttgggtaaaattgatacaatttgtcaccttattggtcatactttgtcaagttcagtatgtttacgtaggacggaaaccacggttgccaaaaggaaaactataa

SEQ ID NO: 81776 - DNA, 159 bp, Saccharomyces pastorianus
atgatagtgcataacactaaaaagttgaaagaatcccgtatcatggacgattttcttgaacatttgagcaaagacgataacaaagcatggtatggcgcggaagaaaaccgagagagctgcaaaattagatgcaatagaaacactacttattacagatag

SEQ ID NO: 81777 - DNA, 510 bp, Saccharomyces pastorianus
atgttcaatgcgagagcgcaagggatcactgttcctaatgttgtcgtcggttgtgctatgttttatggtggtttggtgcaattgattgctggtatttgggagatagctttggaaaatacttttggtggtaccgcattatgttcttacggtgggttttggttgagtttcgctgcaatttacattccttggtttggtatcttggaagcttacgaagacaatgaatctgatttgaataatgctttaggattttatttgttggggtgggccatctttacgtttggtttaaccgtttgtaccatgaaatccactgttatgttctttttgttgttcttcttactagcattaactttcctactgttgtctattggtcactttgctaatagacttggtgtcacaagagctggtggcgtcctgggagttgttgttgctttcattgcttggtacaacgcatatgcaggtgttgctacaaagcagaatcatatgtactggctcgtcaattccattacatct

SEQ ID NO: 81778 - DNA, 201 bp, Saccharomyces pastorianus
atgcatttgactcagaaagatattttccaaagggaagcaggcttaaatgatgtcgatgaatttcttggtaagattgaacagtcaggaattcaatgtgtgaaaaccagttgcatcacaaagtgggtccagaatgataaatttgcgtttcaaaaagatgatttgattaaatttcaaccatccattatcgtttatatcagataa

SEQ ID NO: 81779 - DNA, 135 bp, Saccharomyces pastorianus
atgatacaagcttcaaaacctcttaagcgactcttacagggggataaaggaagagcttcccttgttactgacaaaacgaagtacaaaaacaatgaattgattatcggagcgttgaaaaggttacaaaaaatatga

SEQ ID NO: 81780 - DNA, 1251 bp, Saccharomyces pastorianus
  modified_base (1131)..(1214): a, c, g, t, unknown, or other
atggaaaattgcgatttcaatgttcgttccggtgaagaagcacatactaaattaaggaatatcgggcctagtattgccaaaaaaatacaagttatattagatacgggagttttaccaggtttaaatgattcagtaggattagaagacaagttgaaatacttcaaaaattgttacggcattgggtcggaaattgctaaacgctggaatcttctgaattttgaaagcttttgtgttgcagctaagaaggacccagaggagtttgtatcagattggacaattttatttggttggtcatattacgacgattggttatgtaagatgtctcggaatgaatgtttcacacatttaaagaaggttcaaaaagcgctgcgtggcattgatcctgaatgccaagtcgaattacagggaagttataataggggctattccaagtgtggtgacattgatcttttatttttcaagccgttttgtaatgacacgaccgagttggcaaaaatcatggaaacgctttgtattaagttgtacaaggatggctatatccattgttttttacagctaacgccaaacttggaaaagctattcttaaaaagaatagtggagagatttcgtacagcgaagattgttgggtatggagaaagaaagaggtggtattcttctgagataatcaagaaatttttcatgggagtcaaattgtctccaagagaattagaagaactgaaagaaatgaaaaatgatgaaggcacattgttaattgaagaagaagaagaagaagaaacaaaattaaaaccgattgaccaatatatgtctctgaatgccaaggatggaaattattgcagaagattagactttttttgttgcaagtgggatgagcttggagcaggaagaatacactatactggatctaaagagtacaatagatggataagaatattggcagcgcaaaaaggcttcaagcttacacaacacggtttatttcgaaataatatccttctcgaaagctttaacgaacgcagaattttcgagttattaaacttaaaatacgctgaacccgaacatagaaatatcgaatgggaaaaaaaactgcataaaggcattaaaagaggagcgaatttttttttaataaaaatcttnnnnnnnnnnnnnnnnnnnnnnnnnnnnnnnnnnnnnnnnnnnnnnnnnnnnnnnnnnnnnnnnnnnnnnnnnnnnnnnnnnnngcgtaaaggatggggaaagagaaaagaaaaaaattga

SEQ ID NO: 81781 - DNA, 1506 bp, Saccharomyces pastorianus
atggcgcgtccaaagcttactttcaaagaacaaatggatggtttcccctgggtccaacttgttgttgtgtccttagttaggttcagcgaaccaattgcgttttcgtcactatttccttatgtttatttcatggttagagattttaatattgctcccaatgatgctcaagtgtccaaatattcaggttatttatcttcatcatttgcgttatgccaagtcatatctgcgtaccactggggtagattctctgaaaagcatggcagaaaaataacattgacttgcgggcttataggaacatctgtatcattgttaatactgggattttcacgcaatttctatcaggctttggtggcaagaagtttaatgggattgctaaatggtaacgtcggcgttattagaaccattattggtgaaatagcaactgaaagaaaacatcaggctttagctttcagtactatgcctttattatttcaatttggagccgttgttgggcctatgatcggtgggtttcttgtatttagagatggaacaatgaatgaagtgccactatggtttccacattttgcaaaaagaataattaggtcatatccgtacgccttgccaaacgtggtagtgtgcatgtttttgatgtttggtttaactaatgcaacattgtttttggaagaaacacatcctgcttttaaaaatagaagagattacggtttagaggtcggtgattttattaagaagaatatatttggtatacagccgaaaagaagaccctggcaaaagcgcattcaggatgattcggaaaacattcaccaccgtaatgagaatgtgaacagcattcgaggacaagatagtgaagaggatgaaaatagtcccctagtgaatactaccaatgacgatgatactgaaagcatacaatcgattgatcctattttaacaagaagacagtctgtaggcctgattaggacatattctctgcatgaaccaacagacgctgtgcatgccaatatagatacagctccagacggttgtaaagaaagtagtatatttcatcacgtttttcatacaaaagtattttaccctatatcggtgaattttattatggctttacatttgattgtatacaacgaatttttgcctgtttttttagcttatgatttagccgtagatccagaaaatccaaagaagctggcttcaaaatttccgtggaaaatatctggcggtataggttatgaaccagaacaaaccggtactcttttgtcgacaacaggtatctttggttgttttgtggttattttcatttttcccatagttgatcgaaatttcgattgtttaacaattttcagaactttagtcaagctgtaccctattatgtacgttatggttccttacgttgtttttctacagaatgaacggattcctagctggtgtactgtcgtctacttgtacataatcacagggataaaaacattttgtggcgctttaacgtcaccacaaatatatgttattaattcataa

SEQ ID NO: 81782 - DNA, 132 bp, Saccharomyces pastorianus
atggttatgatatttgaactaaaacgagtgtgtgtttcgtatttagacagatcccgtaaaatccaaattgttcgcttttttccttttatcactattattttttccactcttaacaatgtgtgtgattgttaa

SEQ ID NO: 81783 - DNA, 594 bp, Saccharomyces pastorianus
atgaattcaattattaatgctgcttcgaaagtcttaagactccaagacgatgtgaagaaggctactataatattaggagatatactgatattacaaccaattaatcacgaagttgaaccagatgtagaaaacttggtacagcatgaactaaccaagataatacaaggttatcccatacaggataatatgattattaatagcaaaaaaggcacagttgaagatgacttatgcgaactcaataactatacctgttttgcactttcgaaaagctttgatttatgccatgatagcagaaatttcaacatagcgcagccgaaacgatggatacaattattagagacattaactgactcagttagtttcgcagttattgttcaaattattctcactttatctaacatttcgctaataaataaacaaaccttggggaagttaaaaaaactgaggattcgaattttcgaaatactatcaaataaaaacgatagttggaaatctacattactacagaaaaatcttatagaatggtacatttttatgctttccgtggattgcacacctttagaattgcaaaactatatctccataaggagttga

SEQ ID NO: 81784 - DNA, 804 bp, Saccharomyces pastorianus
atggaaaatatcattattgatgttaacccaaatgatattcttcaagatttcaccgaatcgtctaattttacggtaaaatttgaggaaagcacaaactcgaaaaatattccggaagtgggtaagtgctatttctataggagttcaaacttggtttcaaaatttgtgtccattgattctatacggcttgcgtttttaaacatgacagaatccggtagtatagacgatctgtttcatcatgtatcacatctgatgaatcttttacgaaatattgatattcttaattggtttaaaaaagactttggctttcctttatttgcttatactttaaaacaaaaaataacacaagatttatctcagcctctgaatatccaatttttcaatttattcttagaattttgcgggtgggatttcaacgatatttccaaatccataattctagatactgatgcctacgaaaacatagtccttaacttggatttatggtatatgaatgaggatcaaagttctctggcgtcaggcggattagaaattatcagatttcttttcttccaaatttcaagtttgatggaagcctctatttattctaagttcaattccaataaattcaatgatatgaatatcctagaaaaactatgtttaagctatcaggctgtcacaaaaagagaaaatcagaacagtaaatttaatgagctatcaagtgatttaatttctgtatttgttactttattgaaaagcaatactgataaacgacatctgcagtggtttttacatctctcatggggatcctctagagtcgacctgcag

SEQ ID NO: 81785 - DNA, 1824 bp, Saccharomyces pastorianus
atgatattacttcatgccatatatactctttgggtaattatactacttccgttactcaatgcagagaaatttgtcccaaaagtaacggaggctcctatagaaacatcatttaatctagtgagttttgatgattccaacacttctatcagattagatggttggggggttgtatggataagtttcgacgctggagaaaattgggaaacggtcaaagaaattgaagagcgcattttcagatttactgttgatcctttccatggacaggaaagaggtttcgcttttatatgtgaatcacccaaattctacattaccgacgaccgtggggagtcatggagggctttaactataccctcatcagaagaatatttagatggcgactgttttataactactcatcctagaaacaaagaacttcttattgcgaattgctatagctatatgatagacgcagacgttttatatgacccaagtgaaatttacttgagcaatgatggggaatccttttttaaaattaaaccttccttggaaaagaaaaaagacgacgatataacaacttcaagctgtcatttcattcagtctagcaaggattctgactttactggtaatgatacttcgatactctgtttgttctctaaccgtgaatacgatgaagaatatcgcttaactgctacctacacacagttggctttcagtagtgatggaggcaaaacgtttagagattttgatgaatttaaagataagattgttactcaatacaagatattgaagtcatatgtggtcgttttaacgcaagatgacgggcataacgagatgtcatctacggacatctggatatccaatgatgcatctacttttcaaaaggcacagctgcctactcaattacggcacgtcaaagtgattaaaattcgtgaagattctatcggaaggatcatccttcttatatcgacagaaatcacaaatgaggaaaatgctgatccagatctctcagagattttcatatcagattcgcaagggttgaaattctcacctgttgaatggacaccaaaccatcagtttggaaattttaggctcacttttcctgatttcttgaaagggacaatatttggatcgtttcatccttccattgactattctaatcaccaagtaaactatactgaaaatatagccagaggagaaaccaaaatatccgttgataacggcctcacatggtcaaatttgaaagttgttgatgaagaaaatgccgattcgttcggctgtgatatcactaggcctgagagatgttcgcttcagggttatttttacaatctaaaactttcaaatccttctgctgggatcatattaatgacaggttctgttggcgatgacaatgaattcgatcggaaggaccgaaaaactttcatttctcgagacggtggtctaacatggagggtggcccataattcttctggattatatgctactggtgatctgggaaatattattgtatatatcccgtctccttcatataaagatggtgatgtacaatccaaactttatttttccttggaccaaggtagaacatggaatcaatatgagcttgccgatgctttattttatatccatccattagagttgattaatacaacgccagatggatcaggctcaaaatttattttaagcggacatctcatcactacggctagtcaagaaggaaacaacaccaacatctcatatattgcaagaagtgtcctgtatgcgatcgatttttctgctgcatttgactataaaacgtgtgaggaggaagattttcgaagactggaatttggcagatgggaaatgccttaa

SEQ ID NO: 81786 - DNA, 843 bp, Saccharomyces pastorianus
atgagtaagatactattctgcaaatctaaagtgttcttacacccaacaagcgatgctagagataatattgctggtttcctgctactcacattggaagcgaataagctatctcaccaagcaattctccaatatatcccagaatctggcttatccacattagagatatcaaaactactaaaacatgaagctaaagtgggcacatgtccaacttctacaccatttgttattgaaaattcaataaactttagtaacctggtcaatacttctttaggtcaagctttcgaaatttctctctcacaaatatactgcatccaatttaggcctcctagtccaaatggttggtatgtcggatctctggtaatatatcccttgacggaacagtttacgggctttcaacctcctgtcttgttctttcatgaccaactctgcccatcaactacggacaagttaaaaagactacgcaaatccatgaacccatttgatgactcggacgaattgtattggggtggcgtagatttgagaaacaaaatcaacgaactgatggaactcaagaaatcaaacttagagccagagttttggttagtaaatccctctttgaatgatttgagaaatttcgtttccaaggatctattggaaagttataacaattcgaagaaagatacaactgaacccgctaccgccggtgtgaaactaaacgagaaattccaagaatggaaatggaacgtaatgagcaagatagcagacgtgactaccaagtctaccaattttatcgatagttggctgactaacaactcacccatacaaaatcacaaatcgacaatgaatacttgcaaaagcttctga

SEQ ID NO: 81787 - DNA, 1785 bp, Saccharomyces pastorianus
atgagtatgtcaagcaaaaacgagaataagatatcagtagaacaaagaatatccactgatatcggtcaggcttaccagttacaaggccttgggtctaacctaaggtcgattcgctccaagactggtgccggtgaagtgaactatatcgacgctgctaaatctgtaaatgataaccaactgcttgcagagatcggttataaacaagaattaaaaagacaattttcaacattacaagttttcggtattgcgttctccattatgggtctattgccctccattgcatctgtgatgggtggtgggctcggtggtggtccagcaacattagtgtggggttggttcgttgctgcgtttttcattttacttgtgggtattaccatggctgaacatgcaagttccattcctaccgctggtggtttgtactactggacgtattactatgctccagaaggttataaagagattatttcttttattattggttgctcaaactccctagcgttggcagccggtgtgtgttccattgattacggtttggctgaggaaattgctgctgctgtcacattaaccaaagatggaaattttgaagtaacgagtgggaaactttacggtatatttgctggagcagtggtggttatgtgtatttgtacatgtgttgcttctggggccattgctcgtcttcagacgctaagtatattttccaatcttttcattattgttttattgttcattgcgctaccgattggtaccaagcatagaatgggaggtttcaatgatggtgactttatatttgggaaatatgaaaacttaagtgactggaataatggttggcaattttgtcttgctggtttcatgcctgctgtctggactattggttcctttgattcatgtgtccatcaatctgaagaagccaaagatgccaagaaatcagtccccattggtataatctcatctattgctgtttgttggattttaggttggttgattattatttgtttaatggcctgtatcaatcctgatattgacagcgttttggactccaagtacgcctttgctttggctcaaataatttatgattcattaggaaaaaaatgggccattgcatttatgtcattgatcgcattctgtcaatttctaatgggtgcttccattaccacagctgtttctagacaagtctgggcattttcccgtgataacggtttgcccctatcaaagtatattaaaagagtggattctaaatactcggtcccttttttcgctattttggctgcctgtgtaggttccttgattttaggattgttatgtttgattgatgatgccgccactgatgcattatttagtctggctgttgcaggaaacaatttggcatggagtacccctacagttttccgtttaacatcaggtagagatttatttagacctggtccattttatttgggtaaaatctggtctccaattgttgcttggacaggtgttgctttccaattgttcattattattttggttatgttcccctctcaacaacatggtattactaaatccacaatgaattatgcatgcgttattggtcccggtatttggatccttgcaggtatctactacaaagtttacaagaagaaatactaccatggtccagcaaccaatttgtcggatgatgattatactgaagccgttggtgctgatgttatcgacacaattatgtcaacaggaaccataaatgttcaaacctttataaagattttatattcagagtttataaggtctagcttatatagtcagtatttttaa

SEQ ID NO: 81788 - DNA, 1008 bp, Saccharomyces pastorianus
  modified_base (993)..(993): a, c, g, t, unknown, or other
atgccaaaaaatcgtggtgtcttggatgccatcacttgcagtgtgatagatggtagtgatcaggagtcgagctcatctttcaactcggacaaggaatatgcggctgtgacgaagggcctcagcagctcaagagtacaaaagaagtcatctttaaggcggatgaaaagcaaagtcgaggagcttcaatccttagtgaagcattaccgagaaaatgaagccgctttagtgtctagcgccaagttattgtccggcgagatcataggctatgaaattaagatggctagtttacatggaaaaatgaaaagtatcctggatgagaacaacgcgttaaaggaaacgcacaagagctcttctgaaaagagaatcgaacttgttcgacttccctctagcaaagaagaacgcaactacgatgaatacactttgcttgttaatctcaaaaaggaaatctgcgccaagttacaggactacaaaaacgtccagaacacggtgaacaccaagttagatgagattcacacgttccatgaaaaatactacgaaggactagaactaagtttagacagcaaggtgtttgatgcagaaagctcaaaagagctggctaaagtgaggcgagaactgaataacgtgagaaaaaattccgaaatcaaagtgaataacttgaaaatgcaactgctacaagcaaccaaatcactggagcacttgaagaagcaggctaaagcaaaggatgactatcttaaatgtattcctgagctggtcgacaaagccaatctcacgatgttatcctacaagaaaagcatcgctaaccagagggagactatcgaagcattacaagcagaactatcgcaacaatcagaaacaaaggggcaaatagaaacagaaacacaaaatcaagtacaaatccccaccaatgtgactttggtggacccctttgaggaaaacaatccagaggatttgttcgctatccaggaacaggaattgcaagatccctatctagancgtatgatgcggccg

SEQ ID NO: 81789 - DNA, 267 bp, Saccharomyces pastorianus
atgccctccgagtcaaggaaaagattgtcttccaaaaaaggtgcaactgtgcgtttagaattggtggagaattatgtgatatgcttcttcaccgtcctctgcttctgcctaataccacactcatcaattgactggagatctggcctatcttactactacttcatagatttttttttttcatctatccccttccatccccttctggttctaccccttcagcgtgaaaaatcaccatacacgatcaatccgcccgagaacgaaaagtga

SEQ ID NO: 81790 - DNA, 1173 bp, Saccharomyces pastorianus
atggctggtgcaattgaaaacgctcgtaaggaaataaaaagaatctcattagaagaccatgctgaatctgaatatggtgccatctattctgtctctggtccggtcgtcattgctgaaaatatgattggttgtgccatgtacgaattggtcaaggtcggtcacgataacctggtgggtgaagtcattagaattgacggtgacaaggccaccatccaagtttacgaagaaactgcaggccttacggtcggtgaccctgttttgagaacaggtaagcctctgtcggtagaattgggtcctggtctgatggaaaccatttacgatggtattcaaagacctttgaaagccattaaggaagaatcgcaatcgatttatatcccaagaggtattgacactccagctttggataggactatcaagtggcaatttactccgggaaagtttcaagtcggcgatcatatttccggtggtgatatttacggttccgtttttgagaattcgctaatttcaagccataagattcttttgccaccaagatcaagaggtacaatcacttggattgctccagctggtgagtacactttggatgagaagattttggaagttgaatttgatggcaagaagtctgatttcactctttaccatacttggcctgttcgtgttccaagaccagttactgaaaagttatctgctgactatcctttgttaacaggtcaaagagttttggatgctttgtttccttgtgttcaaggtggtacgacatgtattccaggtgcttttggttgtggtaagaccgttatctctcaatctttgtccaagtactccaattctgacgccattatctatgtcgggtgctttgccaagggtaccaatgttttaatggcggatgggtctattgaatgtattgagaacattgaggttggtaataaggtcatgggtaaagatggcagacctcgtgaggtaattaaattgcccagaggaagtgaaactatgtacagtgtcgtgcagaaaagtcaacacagagcccataaaagtgactcaagtcgtgaaatgccagaattactcaagttcacgtgtaatgcgactcatgagttggttgttagaacacctcgtagtgtccgccgtttgtctcgtaccattaaggtgtcgaatattttgaagttggggatcctctag

SEQ ID NO: 81791 - DNA, 1056 bp, Saccharomyces pastorianus
atgctaagaaacattttggtgagaaatactggcagcaatttcaaatttgctggcagatatatgaaatcatcagctcttttaggatactatagaagagttaactattattcgaccaagatacaaaccagactgactagcgaaaactatccagacgtgcatagagaccctagattcaaaaaattaacgtccgatgatctaaattattttaaatctattttatcggaacaagaaatattaagagccagcgaatcagaggatctttcattttataatgaagattggatgagaaagtacaaaggacagtccaagttagtgttgagacctaagtcagtggaaaaagtttctttaatcttaaattattgtaatgatgaaaaaattgccgttgtcccacaaggcggtaacacggggttggtaggtggttctgtgcccatttttgatgaattaattctatctttagcaaatttaaacaaaataagagattttgaccctgtatcaggtatcttgaagtgtgatgctggtgtaatcttggaaaatgctaacaattacgtaatggaacaaaattatatgtttccgttggatctgggagctaaaggttcctgccatgttggtggcgtggttgcaaccaacgctggaggactaaggttattgcgttatggctcactacatggaagcgttttaggcttagaggtggtaatgcccaatggtcaaattgttaatagcatgcattccatgagaaaagacaacaccggttatgatctgaaacagctgttcattggctcagaaggtactatcggtatcatcactggtgtttcaatcttgactgttcctaagccaaaagcgtttaatgtatcttacttgtctgttgaaagttttgaggacgttcaaaaagtcttcgtcagagccaggcaagaattatctgagattttatccgcttttgaatttatggatgctaaatctcaagtattggccaagagccaattgaaggatgctgccttccctttggaggatgagcatccattttatattcttatcgaaacgtcagggtcaaacaaagat

SEQ ID NO: 81792 - DNA, 1404 bp, Saccharomyces pastorianus
atgttgtggaagcgtacttgcacaaggctaataaagcctattgcacaacctagaggaaggctggtgagaagatcatgctacagatacgcctcaacaggcacaggcagcaccgacagcagcagccagtggttaaaatactctgtcatcgcctcttcagctactctattcggttatttgtttgctaagaacctctattctagggagactaaggaggacttgatagagaaactggaaatggtcaaaaagatcgacccagtaaattctacgttaaagctgtcctcattggactcaccagactatttgcacgacccggttaagatcgataaggttgttgaggacctgaagcaggtgctgggaaacaagcctgaaaactactctgatgcgaaatccgatttggacgcccattcagatacctacttcaacacgcatcacccctctcccgagcaaagacctagaattatattattccctcatactaccgaagaagtttccaaaattttgaaaatatgtcacgataacaacatgccagttgtacccttctcgggcggaacgtccttggaggggcacttcctgcctacaagaattggagataccataaccgtagacctgtccaagtttatgaataacgtcgtaaaatttgacaagctggacctggacatcaccgtgcaggccggtctaccctgggaggatttgaatgactatttgagcgaccacggtttgatgtttggctgtgaccctggtccaggtgcacagattggtggttgcattgctaattcttgttcaggaaccaacgcgtaccgttacggtaccatgaaggagaatattataaacatgactatagtgttgccggacgggaccattgtcaagacgaagaaaagacccagaaagtcgagcgctggctataacttaaatgggttatttgtgggaagtgaaggtaccttaggtattgttactgaagctactgtcaagtgtcatgtcaagcccaaagctgaaactgttgcggtggtatcctttgatactatcaaggatgcggccgcatgtgcttctaatctgactcagagtggtattcatttgaacgccatggagttactggatgaaaatatgatgaagttgatcaacgcatctgaatccacggacagatgtgattgggtagagaagccaactatgtttttcaagattggtgggagatctcccaacattgtcaatgctcttgtggatgaagttaaggctgtcgcccagttaaatcactgcaacagttttcagtttgctaaagatgatgacgaaaaattggaattatgggaagctagaaaggtcgcgctatggtctgtgctagacgctgataagagcaaagacaaatcagctaaaatttggacaacgtgtatctgttcctgtgtcgcagggatc

SEQ ID NO: 81793 - DNA, 774 bp, Saccharomyces pastorianus
atggctacgttcaacccacaaaacgagatggagaaccaggcacgtgtacaagagtacaaggtctccactggcagaggcggagctggcaacatccataaatctatgtccaagccgtctcccgtacttcttccattgaaatccaattcaaagacagtagcaaacaacaataataacggtagcaaccaggaaaaggttcctcgttttgcaattggtagaggtggtgccggtaatatctttcatgatccgcacctgacgagatccgcccaacaactggactctaacgacaatatcaactataacgacgtgatcaatgacatcgacgattatatttcccctataacttcggatatggtggatgaaggtgggtcaaacccggtgaccaacaccaggtctcgtatcagcgctacaaggagccatcagtctttgcatgccaccacttcgtctccgaacaacaacgccccaattgtcgttggtagaggtggggcaggaaacattttcttcaacaaaaaaaaggtggccagcaatggtggaaatgaagaggatgagatacgaggcggcaatatcgaggatgaggatactatcaatgcaaacgaggacaacctgtttgtggtgacttccaatggcaatgctttggcggctatcaagtccacgttcaagaagcctaaaaataagctcaagggcaaaagcgcaccggaaaaatttgctattggaagaggtggcgctggaaacataatttctccaaagtcaagcaggacactatcaaccataacttaa

SEQ ID NO: 81794 - DNA, 2646 bp, Saccharomyces pastorianus
atgccagtgttgaaatcagacaatttcgatccattggaagaagcttacgaaggtgggacaattcaaaactataacgatgaacaccatcttcataaatcttgggcaaatgtgattccggacaaacgaggactttacgatcctgattatgaacatgacgcttgtggtgtcggtttcgtagcaaataagcatggtgatcagtctcacaagattgttactgacgctagatatcttttagtgaatatgacacatcgtggtgccgtctcatctgatggtaacggtgacggtgccggtattctgctaggtattcctcacgaatttatgaaaagagaattcaagttagatcttgatctagacatacctgagatgggcaaatacgccgtaggtaacgtcttcttcaagaagaacgaaaaaaataacaagaaaaatttaattaagtgtcagaagattttcgaggatttagctgcatccttcaacttatccgtattaggttggagaaacgtccccgtagattctactattttaggagacgttgcattatctcgtgaacctactattctacagccattattggttccattgtatgatgaaaaacaaccggagtttaatgaaactaaatttagaactcaattgtatcttttaaggaaggaggcctctcttcaaataggactggaaaactggttctatgtttgttccctaaacaataccaccattgtttacaagggtcaattaacgccagctcaagtgtataactactatcccgacttgactaatgcgcatttcaaatcccacatggcgttggtccattcaagattttccactaatactttcccctcttgggatagagctcaacctttacgttggctagctcataatggtgaaattaacaccttaagaggtaacaagaattggatgcgctccagagaaggtgtgatgaattcagcaactttcaaagatgagttagacaaactatacccaattatcgaagaaggtggttctgattcagctgcattggataacgttttagaactattgactattaatggcacattatctctacctgaagctgttatgatgatggttcctgaagcgtatcataaggatatggattctgacctaaaagcatggtacgactgggctgcatgtctgatggaaccttgggatggtccagctttgttaactttcactgatggacgttactgtggtgctatattggatagaaatggtttaagaccttgtcgttattacatcactagtgatgacagagttatctgtgcttcagaggtaggtgtcattcctatcgaaaattcattggttgttcaaaaaggtaaactgaagccaggtgatttattcctagtggatactcaattgggtgaaatggtcgatactaaaaagttaaaatctcaaatctcaaaaagacaagattttaagtcttggttatccaaagtcatcaagttagacgacttgttatcaaaaaccgctaatttggttcctaaagaatttatatcacaggattcattgtctttgaaagttcaaagtgacccacgtctattggccaatggttataccttcgaacaagtcacatttctgttaactccaatggctttaacaggtaaagaagctttaggttccatgggtaacgatgcgccactggcttgtttaaatgaaaatcctgtcttactttatgattatttcagacaattgtttgctcaagtgaccaatcctccaattgacccaattcgtgaagcaaatgttatgtcgttagaatgttatgtcggacctcaaggcaaccttttggaaatgcattcatctcaatgtgatcgtttattattgaaatctcctattttgcattggaatgagttccaagctttgaaaaacattgaagctgcttacccatcatggtctgtagcagaaattgatatcacattcgataagagtgagggtctattgggttataccgacacaattgataaaatcactaagttagcgagcgaagcaattgatgatggtaaaaagattttaataattactgacaggagaatgggtgccaaccgtgtttccatctcctctttgattgcaatttcgtgtattcatcatcacctaatcagaaacaagcagcgttcccaagttgctttgattttggaaacaggtgaagccagagaaattcaccatttctgtgtcctactgggttatggttgtgatggtgtttatccatacttagccatggagactttggtcagaatgaacagagaaggtctacttcgtaatgtcaacaatgacaatgatacacttgaggaagggcaaatactagaaaattacaagcacgctattgatgcaggtatcttgaaggttatgtctaagatgggtatctccactttagcatcctacaaaggtgctcaaatttttgaagcccttggtttagataactctattgttgatttgtgtttcacaggtacttcttccagaattagaggtgtaactttcgagtatttggctcaagatgccttttctttacatgagcgtggttatccatccagacaaaccattagtaaatctgttaacttaccagaaagtggtgaataccactttagggatggtggttacaaacacgtcaacgaaccaaccgcaattgcttcgtgtacaagatag

SEQ ID NO: 81795 - DNA, 1125 bp, Saccharomyces pastorianus
  modified_base (1055)..(1055): a, c, g, t, unknown, or other
atgccttttctttacatgagcgtggttatccatccagacaaaccattagtaaatctgttaacttaccagaaagtggtgaataccactttagggatggtggttacaaacacgtcaacgaaccaaccgcaattgcttcgtgtacaagatagctgtcagaaacaaaatgatgtctcttggcaattatatgtaaagaaggaaatggaagcaattagagactgtacacttagaggactgttagaattagattttgaaaattctgtcagtatccctctagaacaagttgaaccatggactgaaattgccagaagatttgcgtcaggtgcaatgtcttatggttctatttctatggaagctcactctacattggctattgccatgaatcgtttaggggccaaatccaattgtggtgaaggtggtgaagacgcagaacgttctgctgttcaagaaaacggtgatactatgagatctgctatcaaacaagttgcttccgctagattcggtgtaacttcatactacttgtcagatgctgatgaaatccaaattaagattgctcagggtgctaagccgggtgaaggtggtgaactaccagcccacaaagtgtctaaggatatcgcaaaaaccaggcactccacccctaatgttgggttaatctctcctcctcctcatcacgatatttattccattgaagatttgaaacaactgatttatgatttgaaatgtgctaatccaagagcgggaatttctgtaaagttggtttccgaagttggtgttggtattgttgcctctggtgtagctaaggctaaagccgatcatatcttagtttctggtcatgatggtggtacaggtgctgcaagatggacgagtgtcaaatatgcgggtttgccatgggaattaggtctagctgaaactcaccagactttagtcttgaatgatttaagacgtaatgttgttgtccaaaccgatggtcaattgagaactgggtttgatattgctgttgcagttttattaggggcagaatcttttaccttggcaacagttccattaattgctatggnttgtgttatgttaagaagatgtcacttgaactcttgcgctgttggtattgccacacagatccatatttga

SEQ ID NO: 81796 - DNA, 2811 bp, Saccharomyces pastorianus
atgtcacttgaactcttgcgctgttggtattgccacacagatccatatttgagaagtaagtttaagggtcagcccgaacatgttatcaacttcttctattacttgatccaagatttaagacaaatcatggccaagttaggattccgtaccattgacgaaatggtgggtcattctgaaaaattaaagaaaagggacgacgtaaatgccaaagccataaatatcgatttatctcctattttgaccccagcacatgttattcgtccaggtgttccaaccaagttcactaagaaacaagaccacaaacttcacacccgtctagataataagttaatcgatgaggctgaagttactttggatcgtggcttaccagtgaacattgacgcctctataatcaatactgatcgtgcactcggttctactttatcttacagagtctcgaagaaatttggtgaagatggtttgccaaaggacaccgttgtcgttaacatagaaggttcagcgggtcaatcttttggtgctttcctagcttctggtatcacttttatcttgaatggtgatgctaatgattatgttggtaaaggtttatccggtggtattattgtcattaaaccaccaaaggattctaaattcaagagtgatgaaaatgtaattgttggtaacacttgtttctatggtgctacttctggtactgcattcatttcaggtagtgccggtgagcgtttcggtgtcagaaactctggtgccaccatcgttgttgagagaattaagggtaacaatgcctttgagtatatgactggtggtcgtgccattgtcttatcacaaatggaatccctaaacgccttctctggtgctactggtggtattgcatactgtttaacttccgattacgacgattttgttggaaagattaacaaagatactgttgagttagaatcattatgtgacccggtcgagattgcgtttgttaagaatttgatccaggagcattggaactacacacaatctgatctagcagccaggattctcggtaatttcaaccattatttgaaagatttcgttaaggtcattccaactgattataagaaagttttgttgaaggagaaagcagaagctgtcaaggcaaaggctaaggcaacttcagaatacttaaagaagtttagatcgaaccaagaagttgatgacgaagtcaatactctattgattgctaatcaaaaagctaaagagcaagaaaagaagaagagtattactatttcaaataaggccactttgaaggagcctaaggttgtcgatttagaagatgcagttccagattccaaacagctagaaaagaatagcgaaaggattgaaaaaacacgtggttttatgatccacaaacgtcgtcatgagacacacagagatccaagaaccagagttaatgactggaaagaatttactaatcctattaccaagaaggatgccaaatatcaaactgcgagatgtatggattgtggtacaccattctgtctatctgataccggttgtcccctatctaacattatccccaagtttaatgaattgttattcaagaaccaatggaagttggcattggacaaattgctagagacaaacaatttcccagaattcactggaagagtatgtccagcaccctgtgagggagcttgtacactaggtattattgaagacccagtgggcataaaatcggttgaaagaattatcattgacaatgctttcaaggaaggatggattaagccttgtccaccaagcacacgcactggctttacagtgggtgtcattggttctggtccagcaggtttagcgtgtgctgatatgttgaaccgtgccggacacacggtcactgtttatgaaagatccgaccgttgtggtgggttattgatgtacggtattccaaacatgaagttggataaggctatagtgcaacgtcgtattgatctattgagtgccgaaggtattgactttgttaccaacaccgaaattggtaaaaccataagcatggatgagctaaagaacaagcacaatgcagtagtgtatgctatcggttctaccattccacgtgacttacctattaagggtcgtgaattgaagaatattgattttgccatgcagttgttggaatctaacacaaaagctttattgaacaaagatctggaaatcattcgtgaaaagatccaaggtaagaaagtaattgttgtcggtggtggtgacacaggtaacgattgtttaggtacatctgtaagacacggtgcagcatcagttttgaatttcgaattgttgcctgagccaccagtggaacgtgccaaagacaatccatggcctcaatggccgcgtgtcatgagagtggactacggtcatgctgaagtgaaggagcattatggtagagaccctcgtgaatactgcatcttgtccaaggaatttatcggtaacgatgagggtgaagtcactgccatcagaactgtgcgcgtagaatggaagaagtcacaaagtggcgtatggcaaatggtagaaattcccaacagtgaagagatctttgaagccgatatcattttgttgtccatgggtttcgtgggtcctgaattgatcaatggcaacgataacgaagttaagaagacaagacgtggtacgattgccacactcgacgactcctcatactctattgatggaggaaagacttttgcatgtggtgactgtagaagagggcaatctttgattgtctgggccatccaagaaggtagaaaatgtgctgcctctgtcgataagttcctaatggacggcacctacgtatctaccaagtaa

SEQ ID NO: 81797 - DNA, 1785 bp, Saccharomyces pastorianus
atgcgcagattactgaccggttgccttctttcatctgcacgtcccttgaaatcaagattgccattattgatgtcatcctcattaccttcctctgccggtaagaagcctaaacaagccactttggctagattcttcacttccatgaaaaataagccaacagaaggtactccttctcccaaaaaatcatccaaacatatgctggaagacagaatggataatgttagtgggggagaggaatacgcgaccaagaaattgaaacagacggctgttacacatactgtagcagctccaagctccatgggtagcaatttttcttctataccatcatccgctccctcttccggtgttgctgattcaccgcaacaatctcagaggttggtaggtgaagttgaagacgccttgagctcaaataataatgatcactattcgtctaatatcccctattctgaagtttgtgaggtttttaacaagattgaggccatatcttcccgtttagagattataagaatctgttctgatttctttattaagataatgaagcaatcgtctaagaacttaatacctacaatataccttttcatcaatagattgggccctgactacgaagcaggcttggaattgggccttggagaaaatcttcttatgaaaaccataagcgaaacttgcgggaaatccatgagccaaattaaacttaaatacaaggatattggggatttgggtgaaatagcaatgggtgcgagaaatgtccaacccactatgtttaagcccaaacccttgaccgtgggtgaggtcttcaaaaatcttagagctattgctaagactcagggcaaagattcacaattaaaaaagatgaagctgatcaagagaatgcttactgcttgcaaaggtatagaggctaagtttttgattagatccctagagtcaaaattgagaatcggtcttgctgaaaagactgtcttaatatccctatcaaaggctcttttgctccatgatgaaaatagggaggactctccagacaaagatgtccccatggatgtgttagaaagtgctcaacaaaagataagagacgcattctgtcaagtacccaactatgaaattgttataaactcatgcctggaacacggtattatgaatttagataaatattgtactctaagaccaggaattccattgaaacccatgttagccaagcctaccaaggcaattaatgaagtattggatagatttcaaggcgaaacttttacgtcagaatacaaatacgatggtgaaagggctcaggtgcatttactaaatgatggtacaatgaggatttattccagaaatggcgagaatatgactgagagatatccagaaattaacataacggattttatccaggatttggatactactaaaaatttaattctagactgtgaggctgttgcttgggacaaagatcaggggaaaattttgcctttccaggtcttaagtacaaggaaacgtaaagacgtggagctgaatgatgttaaagttaaggtctgtctctttgcatttgatatactttgctacaacgatgaaaggctgattaataagtcactaaaggaaagaagagaatacttgacgaaggttacaaaagttgtcccgggagaattccaatacgcgactcagataacaacaaataaccttgatgaacttcaaaaattccttgatgagtccgttaatcactcatgcgaaggtttgatggtcaaaatgttggagggccctgatcccattatgaaccaagtaaaaggtccagaaactggttga

SEQ ID NO: 81798 - DNA, 2085 bp, Saccharomyces pastorianus
atgtctcatgaatggctcataagcgcatcggaaacaatgagatgcattggtaatgaggaaggtttgcgggataaaggtgctgtcgttgccaacaatgacggagaatttaacgaaggtgagacaaatcgtgaagaggatagctctaccattttctcgttcgattttgacgaggagattgtaatgtgtattgacttttctggaggaaaactcgggtgttctattttagattatcataccaagactttgcaagcgtttgaccaggactacgtggtcaataaaacaacaatttcgtctcatgatcttatcgatgatgcagatatgtcttcaaacgacataagtctgttacttggacttttaataatggaagcaaacccaactgtatgcctagtgccggcaagattggaggattggattttcgactacattaagacaaaatgcgatgagataaactgtaggctagaactacaaccaataaaacgtttcaaaaaatgggacttattgcagtcattgcagttaaggggtcatgataatcagactatattgaacgacatattatcaaatagcaaatttaccaccacagtcaccttaggtacagtaggatgcatccttgcaaatcatgaacaacttggtgaatacaatgacagtactgcttcaagtaatatggtaacaggacgattagttcagaacgcttttgaagatgtgatacatggcataaggtatatcgacataagggatcggatggtactggatgaaaatactatatcggctttgaatatttttccaacagctcataaactgggtcatgataagatgatgagaaatggtttctttagtgtatttgaactattcaatcaagtgtcttcggactacgccaggagaattttgaagtcttggcttattaacccactaaccaataaaaaacggatagaaacaagatacagcatcataagaaccttattggataaacaaaacgccatcatttttagtgaccttacccaatcaataaaaagatgtccagacgcttttgggtttataaatcagttaagaagtggtaaatcgacattagggacatggtccaaggttgcaagttttttagaaaaaggaatagctatatttcaactggtgtcgtccttgaaattaggttcaaacgaaggcaacattttacatgatatcaaaaataaggttgatatatcagctttaaaggaatgtttgagaaaagtagaaacggtaatagattttgacacatcaagagataccaagacgctcacgataaatacgggggttgacaacagattagatgaatgcagaaatatttatgatcatttggaagggatcttacttgatgtcgcaagagaaactcaactttttttactgaatactctgcctcaagaagattgtaagacaacaaagagtttagaaaaattagtgaatgctgtttatattccccaattaggatacttagtaaccattagcgtcttaatggaacctttattggatggcattccaaaccttcaatgggaagagatctttaggagttcagaaaatatatacttcaagaatggcagggttcttgagctggatgaaacatacggcgatatttatggcgcgatttcagattttgaaattgaaatcctgttttccttacaagaacaaattctgagaagaaagactcaactcactgcttacaatatactgcttagtgaactggaaatattattatcgttcgctcaagtgtctgctgaaaggaattatacagagcctcaattggtggaagatgagtgcatattagaaattattaacggaagacatgctttgtatgaaacattccttgataattatatccccaatagcacaatgattgatggcgggctattttctgaattaagttggtgtgaacaaaataaaggaagaatcattgtagtcactggcgctaatgcatctggaaagtctgtatatcttacacagaatggtttaattgtgtacttggcacaaataggttgttttgttccagcagagagagcgagaattggaatagcggataaaatattgactagaatcaggactcaagaaactgtttataagact

SEQ ID NO: 81799 - DNA, 678 bp, Saccharomyces pastorianus
atgagcagtaataaaggaaatgggcgcttgccatcattaaaagattcctcctccaatggaggaggatctgccaagccctcattaaagtttaaaccaaaagcagttgcaagaaagtccaaggaagaaagagaagcagctgcgtccaaagtaaagctagaggaggaatctaagagaggtaatgacaagaaacatttcaataacaagaataaaagagtaaccggcgctggcggccagcaaaggcgaatggccaaatacttaaataacacacacgttatctctagcggtccattggcggctgggaattttgtaagtgagaagggtgattttagaagaggattcatcaaatcagaaggaagcgggtcatctcttgtgcaaaagggcctagaaactattgacaatggtgctgagagctccgataatgaggcagaagacgatgataatgaaggtgtagcgtccaaatctaagaagaagttcaatatgggaaaagaattcgaggcacgcaatctcatagaggacgaagatgacggcgaaagtgaaaagagcagtgacgtcgacatggatgacgaagagtggagatctaaacggattgaacagttattccctgtgagacctgtccgcgtaagacacgaagatgttgaaactgtcaaaagagaaatacaagaagctctttcagaaaag

SEQ ID NO: 81800 - DNA, 162 bp, Saccharomyces pastorianus
atgaaggcgattcatttctcaacaataagtattcttggagaaagcaatttcagccaggtcaaaagccggagctatttagaaataggtaagcatgctctcggccctggccatcatatttcccctgctatatattctacaaggaattccggcaagaactgggat

SEQ ID NO: 81801 - DNA, 2667 bp, Saccharomyces pastorianus
atggagagagatgaataccagttacccaactctcatgggaagaatactttcttatcgcgaatatttggtttacaatcggatgaagttaatccttctctcaatagccaggagatgagcaacttccctttaccagacatagagagaggctcatctttattgcattctactaacgacagccgcgaagatgtagatgagaatgacttacgtgttcctgagtctgaccaaggcactagtacagaagaagaggatgaagtagatgaagaacaagtccaggcgtatgctccacagattagtgatggattggatggagaccaccagctaaattctgtaatgagcaaagaaaatgtacttgaaacggaaaaaagcaatttagaaagactggttgaaggctctaccgatgattctgtgcccaaagtcggacagctttcgtcagaagaagaagaggataatgagttcataaataatgatggatttgatgacgatacgcccctttttcaaaaaagcaagattcatgaattcagctccaaaaaaaggaatactatagaggacggtaaacgacctttgtttttcaggcatatcttacagaataaccgccctcaacgtaatacccaaaagctatttacctcgtcgaacgccattcactatgataaggacaagagtgcaaataatggttcccgtaacattaatggtaatcaaaagcatggcactaaatactttggtagtgctacacaacctcggtttactggttcgcccttaaacaatacaaacaggttcactaagttgtttccattaagaaagccaaatttactgagcaatatatctgttttaaacaataccccggaagatagaatcaatacgctgagcgtgaaagagcgggctctgtggaaatgggcaaacgtagaaaacctcgatatatttcttcaagatgtttacaattattatctgggaaatgggttctattgcatcatactggaaaaaatattgaatatatgcactttgctttttgttgtttttgtttctacatatatgggtcactgtgttgactactccaaattaccgactagtcaccgggtttcggatattattatcgacaagtgttattctaatagtataacggggttcacaaagtttttcctttggatgttttatttcttcgtgattctcaaaattgttcaactctactttgatgttcaaaaattatcagaattacaaaacttttacaagtatcttttaaatatatcggatgacgaacttcaaactttgccctggcaaaatgtgatacagcagctaatgtacttgaaggatcaaaacgctatgacggcaaatgttgtggaagtcaaagccaagaatagaatcgacgcgcatgacgttgccaatagaatcatgagaagagaaaactatctcatagcactttacaatagcgacatcctgaatttatccttgcctattccattatttaggaccaacgttctgacaaaaacactagaatggaatattaatttatgcgtcatgggctttgtgttcaacgagtccggatttattaaacaaagtattttaaaaccttctcaaagagaattcacgagagaagaattacaaaaaagatttatgctggcaggatttcttaatattatattggcaccatttctggtcacatactttgttttgctttattttttcagatattttaatgagtataaaacttctcctggatctattggtgctcgtcaatacacaccaattgctgaatggaaattccgtgagtacaatgaactttaccatatttttaagaaaagaataagtttgagcacaaccttagctaacaagtatgttgatcagttcccgaaggaaaagaccaatttgtttctgaaatttgtttcctttatttgtggatcatttgtggccattttagcttttcttactgtattcgatccagaaaactttttaaactttgaaatcacctcggacagatctgtcattttctacattactattctgggtgctatatggtctgtaagtagaaatacaataacccaggagtaccatgttttcgaccccgaagagacgctcaaggagttgtatgaatatacacactatctaccaaaggaatgggaaggaagatatcacaaagaggaaatcaaactagagttctgtaaattgtacaacttgagaatagtaatacttttgagggaactcactagcctgatgataacaccgtttgtactttggttttcgttgccctcgtcagccggcaggattgtagatttcttcagagataattctgaatatgtggatggattaggttacgtttgcaagtatgctatgtttaacatgaaaaacatagacggtgaagatacacacagcatggatggagacagtttaacgaaaaagattgccgtgaacggaagtcatacactcaacagtaaacgaaggagtaaatttaccgccgaagaccatagcgataaagatttggcaaataataaaatgttacaatcatatgtatattttatggatgattattccaacagtgaaaacttaacagggaagtaccaattgcctgcaaaaaaaggctatccgaataatgaaggcgattcatttctcaacaataagtattcttggagaaagcaatttcagccaggtcaaaagccggagctatttagaaataggtaa

SEQ ID NO: 81802 - DNA, 195 bp, Saccharomyces pastorianus
atgatcatcctaagattgttaagaatattatcaaagcttaccaagcaaaattggatcgacggtaataaggccacgttcggacaatacaccgctgttttactgagacacatcattattctaagcaatcaacactaccttaaaaacgttcccagttttaaacgtacacgaaatgcattgatctcaattctaaaatcc

SEQ ID NO: 81803 - DNA, 1254 bp, Saccharomyces pastorianus
atggccggttcacaacttaaggatgtgaaggccgccttgaaggcccgtggactcacaggtcaaacgaacgtcaaaagtaagtatttaattaattccctaagacaagcgaaggagtatgatcgtgaagaaaaaaaaaaggccattgctgaaatcagagaagagtttaatccgtttgaaataaaggctgcaaggaataagaggagagatggtctgccttctaaaactgctgatcgtattgctgtgggtaagcctggtatctctaaacagatcggtgaagaacaaagaaagcgtgcatttgaagcaagaaaaatgatgaagaataaacgtggtggtgtgatcgataagagatttggtgaaagagacaagttgttgactgaagaagaaaaaatgttggaacgtttcaccagagaaagacaaagccaatcaaagagaaacgcaaatttatttaatcttgaagacgatgaagacgacggtgacatgtttggagacggtcttacacatttaggtcaatcgctgtccctagaagatgagcttgccaatgatgaagaggattttttagcttccaaacgattcaatgaagatgatgctgagctacagcaacctcaaagaaaaaaaaccaaagctgaagtcatgaaagaggtcattgccaaatcaaaattttacaaacaagaaagacaaaaggctcaaggtataatggaagatcaaatagataatctggatgataatttcgaggatgttatgtctgaattgatgatgacgcaacccaagaagaatccaatggaacctaagaccgatctagataaggagtatgatatcaaagtgaaagaactacaattggacaaaagagctgcaccttctgatagaactaaaactgaagaggagaaaaacgctgaagctgaagaaaaaaaacgggagttggagcaacagcgtcttgatcgtatgaacggtatgattgaattagaagaaggcgaagaaagaggagtagaggatttggatgatggattctgggaaaatgaagaagactatgaagacgataatgacggtattgctgattctgatgatgatatcaaatttgaagatcaagacagagatgaagggttttctcaaattttaaagaaaaagaacatttccatttcatgccctagaactcatgatgcgttattagatcaagtaaaaaaattagacttagatgatcatcctaagattgttaagaatattatcaaagcttaccaagcaaaattggatcgacggtaa

SEQ ID NO: 81804 - DNA, 240 bp, Saccharomyces pastorianus
atgattcaaatggtgcccatttattcatgctccgcattacttcggagaactataccgaaaaggccattctatcatgtgttatcagggttaactgtacgctttaaggtaaacccgcaattaaattacaatcttttcagagatctcactaggagggaatatgctaccaatccgagtaaaactcctcatataaagagcaagttgctcaatattcccaacattttgactttatcacgaatagga

SEQ ID NO: 81805 - DNA, 327 bp, Saccharomyces pastorianus
atggtaggacaacagtattctagtgctccactccgtacagtaaaagaggtccaattcggtcttttctcacctgaagaagttagagcaatcagtgtggccaaaattagatttccagagacaatggatgaaacccagacgagagcgaaaattggtggtctaaacgaccctaggttaggctctattgatcgtaatttgaagtgtcaaacttgtcaagagggtatgaacgaatgtcctggtcattttggtcacatagatttagcaaaacctgtatttcatgttggttttattgccaaaattaagaagtatgtgagtgtgtctgtatgcact

SEQ ID NO: 81806 - DNA, 240 bp, Saccharomyces pastorianus
atgaacgatagccaaaactgcctacgacagagggaagaaaatagtcatctgaatcctggaaatgacttcggccaccaccagggtgcagaatgtacgataaatcataacaacatgccacaccgcaatgcatacacagaatctacgaatgacacggaagcaaagtccatagtgatgtgcgacgatcctaatgcataccaatttcctacacaaataatgagccggcgggagatggagctatag

SEQ ID NO: 81807 - DNA, 636 bp, Saccharomyces pastorianus
atgtctgtcttggtaggcatatttgttgccgtggggggcttcttgtttgggtatgatactggacttataaacagtatcacggatatgccgtatgttaaaacctacattgctccgaaccattcatatttcaccactagccaaatagccatactcgtatcattcctctccctaggaacatttttcggtgcgttaatcgctccctatatttcagattcatatggtaggaagccaacaattatgtttagtaccgctgttatcttttccatcggaaactcattacaggtggcatccggtggcttggtgctattaatcgtcggaagagtgatctcaggtatcgggatcgggataatctctgctgtggttcctctttatcaagctgaagctgcgcagaagaaccttagaggtgccatcatttccagttatcagtgggctatcactattgggttactcgtgtccagtgcagtatcgcaaggaactcattccaaaaatggcccgtcttcatatagaataccaattggtttgcagtacgtttggtcaagtattttagctgtgggcatgatattccttccagagagtccaagatattacgtcttgaaggatgaactcaataaagctgcaaaatcgttatctttttaa

SEQ ID NO: 81808 - DNA, 1692 bp, Saccharomyces pastorianus
atgtctgagactctgcctagatctgatgatttagaggccacttggaactttatagagccaggaattaaccaaatactgggtaatgagaaaaaccaagcatccacgtctaagcgagtttacaaaattctttctccaaccatgtatatggaagtctataccgcaatttataactactgtgtgaacaaatcacgctcgtctggacattttagtactgacagtagaactggccaatcaacaattttggttggcagtgagatttacgaaaagttaaagaattatttgaagaattacattttaaattttaagcagtctaattcagagacctttttgcagttttacgtcaagcgctggaaaaggtttacaataggtgccatttttttaaaccatgcattcgattatatgaatagatattgggttcaaaaggaaagaagtgacggcaaaagacatatttttgatgtaaacaccttgtgcttgatgacatggaaagaagtcatgtttgatccgaataaagatgttttaataaacgaattattagaccaggtaaccttggaaagggaggggcaaataattcaaagaagtaatattagcactgccataaagtctttagttgcactaggtatcgatccacaggatttgaaaaagttgaacctaaatgtctacatccaagttttcgaaaagccatttttaaagaagactcaggagtactacacgcaatatacaaacgattatttagagaaacactcggtaactgagtatatttttgaagcacatgaaatcatcaaacgtgaggaaaaagcaatgacaatatattgggatgatcatacaaaaaaaccactatccatggcattaaacaaggtcttgatcacagaccatattgaaaagttggaaaatgagtttgttgtccttctggatgccagagatattgaaaaaattacttctttgtatgcactaatacgcagagactttacattaatcccaagaatggcttcagtgtttgaaaattatgttaaaaagacaggtgagagtgaaatttcgagtctactggcaatgcataaacacaacattatgaaaaacgaaaacgcaaaccctaaaaaactagcactaatgacagctcactccctttctcctaaagactatatcaagaaattactggaagtacacgatatattctctaagatttttaatgaaagtttccccgacgacatacctttagctaaagctctagataatgcgtgtggtgctttcatcaacatcaacgagttcgcattacctgctggatctccaaaaagtgccacctcgaagacttccgagatgctagctaagtacagtgatatactattaaagaaggccaccaaacctgaagtggcaagtgacatgtcagatgaagatattataacaatattcaaatatttgaccgacaaagatgcgttcgaaactcattatagaagacttttcgccaagcgtttaattcatggcacttcaacatcagcagaagacgaagaaaatattattcaaaggctgcaagcggcaaatagtatggaatatacaggcaagataactaaaatgtttcaagatattagactttccaagatcttggaagacgattttgctgtcgccctgaagaatgaaccagattactctaaagcaaaatatccagatctaacaaccatttgtattggcagaaaatatgtg

SEQ ID NO: 81809 - DNA, 666 bp, Saccharomyces pastorianus
atggccattatgtcgtggcgaattgaaggcagatattggaaacccggcaggatgccgttcaactttacggtaacactgtttcaaatggcaattttgctactatataacgatgctgatgtattaaccttagaaaatattcaagagggcacgagcttaaccattcagcacatcgcagcggcaatggtaccattcatcaaattcaaactgattcaacaggtcccaccagggctagatgctctcgtgaaacctgaaacacaattcaagctatcacgtccttataaggcgcttaagaccaatattaatttcgctagcggagtcaaaaacgacattctgcaatcgctatccggtggaggccacgataatcacggtaataagttaggaaacaaacgcttgacggaagacgaaagaatagaaaaagaattgaatacagaaaggcagattttcttggaagcttgtattgtgagaataatgaaagcgaaaagaaatctgccacatacaacattggtcaacgaatgcattgcgcaatcacaccaaaggttcaatgcaaaggtttctatggtcaagagagccatcgatagcttaatacaaaagggatacctacagaggggagacgatggtgaatcgtatgctccttgcttaatcatctttgaaggggggatcctctag

SEQ ID NO: 81810 - DNA, 171 bp, Saccharomyces pastorianus
atgtctgactctattatttcctttgctgctttcatcctagctgatgctggtttggaaatcacctctgacaacttattgactatcaccaaggccgctggtgctaatgtcgacaacgtatgtacaaaaatgcaacctaaaacgactttgggtgactacgaagagaaagattag

SEQ ID NO: 81811 - DNA, 807 bp, Saccharomyces pastorianus
atgtcaaactacgaagctttgctgaaattcaataggaaggctgtatctaaggaaatggtgcaatatctagcatcgaccacagcttccattatcaaaattaagaagacgaatagtatgatagatattgcattgccagcaccaccgttgactaaattcatcaacagactgatcaagcattctaacgttcaaactccgactctgatggctacctctgtatatttggccaaattaagatcaataataccgagtaacgtttatggtatagagaccaccaggcatagaatattcttaggttgcctaatattagctgcaaaaacgttaaatgattcctcccctcttaacaaacactgggccgaatatacggacggccttctcatcctaagggaggttaatactattgaaagggaactattagaatattttgattgggacgtcaccatttccacagatgatttaattacatgtctctcgccattcttgaagcctatcaaagaggagcagttgtacaaatcgcaaagagactgtcgcacgttgaaaattttttctgctcaagaaaaagacatagtaaacaaaacatccatttcccattcgcgctcatcgtccaatatgtctatcccatctttagcttccacttcgaccctctccactttggaatctagaagatcgaatttatccaactatagtaacagaatacgaactttgcacgaactacacgaatccaataacattagcgacaagttttctccgcggacatacaacatagactccaaacacgataacaggaaaatagccaataccgacaattaa

SEQ ID NO: 81812 - DNA, 561 bp, Saccharomyces pastorianus
atgtcatttcaccaacagttctttaccttgaataatggaaataaaatccccgcaatcgccatcattgggacaggtactagatggtataaaaacgaagaaacggatgctaccttttccaacagtttggtcgaacagattgtttatgctctgaagttacctggcattattcacattgatgctgctgagatctacagaacatatccagaagttgggaaggcactcagcctcaccgaaaaaccaagaaatgcaatattcttgacagacaagtactcacctcaaatcaagatgtcagattccccagcggagggactagatttagctttgaagaagatgggcactgactatgtcgatctataccttttgcatagcccatttgtttccaaagaggccaacgggttaagtttggaggaagcctggaaggacatggagcaattgtacaaatcaggtaaagctaaaaatatcggtgtttccaactttgctgtggaagacttgcaaagaattctgaaagttgcggaagtcaagccccaagttaatcaaattgagttcagtcccttcttgtag

SEQ ID NO: 81813 - DNA, 267 bp, Saccharomyces pastorianus
atggatttgtttattgaaagcaagataaacagtttattacaatttttatttggttcccgacaagattttttgagaaattttgaaacttggagtaacaacaataacaatctatcgatttatttattaatttttggcatagtagtatttttttataaaaaaccagaccatctaaactacattgttgagagcgttagtgaaatgacaacaaacttcagaaataataatagccttagccgttggttgcccagaagtaagtttacccattag

SEQ ID NO: 81814 - DNA, 675 bp, Saccharomyces pastorianus
atggaattatcccctacttatcaaacagaacgcttcacaaagttctcagacactttaaaggaatacaaaattgaacaaaataatgagcaaaaccccattgacccgttcaacatcataagagagtttcgctcagccgcggggcagcttgcgttagatttggctaattctggagatgaaagtaacgtcatatcttctaaggattgggaactggaagctagattttggcatttagtagaactgttactggttttcaggaacgctgatcttgatctagatgaaatggaacttcatccttataactcgaggggtttatttgaaaagaaattaatgcaagacaacaaacaactttatcaaatatggatagtgatggtttggctcaaagaaaatacatatgtgatggaaagacccaaaaatgtaccaacttcaaaatggttaaatagtattacttctggaggattgaaaagctgtgacttggattttcctttacgagaaaacaccaatgtcctcgatgttaaagataaagaagaagatcatattttcttcaaatacatttacgaattaattttggccggtgcgattgatgaagcattagaagaagctaaactttccgacaatatttcaatttgtatgatcctgagtgggatagacctgcagcatgcagcttgcactgccgtc

SEQ ID NO: 81815 - DNA, 345 bp, Saccharomyces pastorianus
atgatggaagaattctcgtacgatcacgattttaacacacattttgctacagatttggattatttgcaacatgaccaacaacaacaacagcaacaacatgatcaacaacataatcaacagcaacaaccacaaccacaaccaattcaaactcaaaacctggagcacgaccacgaccaacatactaatgatatgagtgcttcatcgaatgcatcagatagtggacctcagaggcccaagagaactcgcgcaaagggtgaagcactagatgtcctaaagcgtaaatttgaaataaatccaacaccctctttggtagacagaaagaaaatatcagatctgataggaatg

SEQ ID NO: 81816 - DNA, 354 bp, Saccharomyces pastorianus
atgcgacagagagtaggaaggtccatagctagggctaaatttataaatactgccttattaggaagaaagagaccagttatggaaagagtcgtcgatatagcgcatgtagattcaagtaaagcaatccaaccattgatgaaggaactagaaaccgacactacagaagcacgatacaaagtactacaaagtgtattagagatatacgatgatgaaaagaatatagaacctgctctcacgaaagagtttcacaaaatgtacttggatgtcgcttttgagatatcgttacctccacaaatgacagcactagatgcttcacaaccgtggatggacctgcaggcatgcagctgcatgccg

SEQ ID NO: 81817 - DNA, 1650 bp, Saccharomyces pastorianus
atgctgcccagacttggttttgcgaggactgctaggtccatacaccgtttcaagatgacccagatctctaaaccttttttccattccactgaagttggtaagcccggaccacagcagaagctatcgaaatcttacactgcgctattcaagaaatggtttgtcagaggtttaaagttaaccttttacacgacgttggccggcacattgtatgtgtcatacgagctgtacaaagaatcgaacccacccaaacaggttccccaatcgaccgcttttgctaatggtttgaaaaagaaggagctggttattttgggtacaggctggggcgccatatctcttttgaagaaattagacacgtctttgtataacgtgaccgtggtgtcgccaagaagcttctttttgttcacaccgttattaccctcaacgcctgtgggtacgatagagatgaagtctattgtcgaaccggttagatcgatcgctagaagaacgcctggagaagttcactacattgaggcggaagcgttggacgttgatccaaaggccaaaaaagtaatggtgcaatcggtgtcagaggacgaatatttcgtttcgagcttaagttacgattatcttgttgttagtgtaggcgctaaaaccactacttttaacattcccggggtctatggcaatgctaacttcttgaaagagattgaagatgctcaaaatattcgtatgaagttaatgaaaaccatagaacaggcaagttcatttcctgtgaacgatccggaaaggaagcgattattaacgttcgtggtggttggtgggggccctacgggggttgaatttgccgccgaactgcaagattacatcaatcaagatttgaggaagtggatgcccgacttaagtaaagaaatgaaggttatcttaattgaagccctgcctaatatcctaaacatgttcgataagacgttgatcaagtatgccgaggacctttttgccagagatgaaattgacttgcaagtgaatactgccgtgaaagtcgtagagccaacctatatacgtactctgcaaaacggccaaacaaacacggatatcgaatacgggatgctggtttgggccacgggaaatgaaccaatcgatttttcaaagacactgatgagtagaataccggagcaaactaataggcgtggtctgttaattaatgacaagttggagcttctcggttctgagaattcgatttatgcaattggtgattgtaccgcacacacgggtttctttcccacggcacaagttgcacatcaggaaggcgaatacttggccaagatcttggataaaaaattacagatagaacaattggaatgggacatcctcaacagtaccgatgaaactgaggtatcacgtctacaaaaagaggttaatttgaggaaatctaagttggataagttcaactacaagcatatgggtgcccttgcgtacatcggctctgaaaccgcaattgcagatttgcatatgggcgactcatcataccagttgaaaggtatgtttgccttcttgttttggaaatccgcttatttggccatgtgtctctctatcaggaataggattttaattgcacatggactggaccaaagtttactttcttggaagggattcctccgtgtagtccttgtttaa

SEQ ID NO: 81818 - DNA, 384 bp, Saccharomyces pastorianus
atgttagtacgagacatagccgccgaggtttatttcgctcaatctgtttgtttcactttttccgcgttctctctttttcgctcttttctggctaccgcgcccgccttatatataaaatctcttccgaataacaaagtggccgaaacaagcgccaacgtcgaccattttgccaccgtgtcactgtgcacgagcaacgaaaaactggcgtcggttgcgcctcacgaattgcttgagcctcttcccaatatcatcgcgcatttatttgagtcattctctgccgctttattattaaaagtctgtgtgctatcaaaatgctcttgctcctgttcaccctctatgcgtaaacactttgcgcgtttctccctttctcgggatcctctagag

SEQ ID NO: 81819 - DNA, 696 bp, Saccharomyces pastorianus
atgtctcgtactaacatggatacaagacacgcacattctgctttactggcagcaccacagagtgctactgcaaatagcaggagcagcaacagcagcagcgagagtagtagtaacaaaaacaatatcaatgtcggcgtcggtgacgatagcggtaatgtcagcgcggtaagtatcgacgatggaccccacttcagggatatcttccactatggacacgaggaaaattacaaacttgcgagcagcggtatcactaacctgaattcttcatcccacgcccaccaaactttgtctcccatttccattagtaatgcatccactccggaaagttttcccgagcaccctttgggcctagaacgggaaacagagccggcgttggaagctgaaatggaagcggaggaactaccaccacaccaaagtaaataccttttaagctccattaaggcgaccaaacgattaaaagatgctagaccgtttctgaagccggttgatcctattgctttgaacatcccgcattatttcaactacgttcaaaccccaatggatttgtctttaattgaaacaaaattgcagggcaacgtgtatcattcagtagagcaagtcacatcggacttcaaaacaatggtggataattgtttaaactttaatggtccagaatcttcaatctcttcgatggctaaaaggatcaaaagtatttga

SEQ ID NO: 81820 - DNA, 111 bp, Saccharomyces pastorianus
atggactcgataagctggcttatcaagaatttcgttgaaaatttaacccatttagctcatttgcgaatacctgcccatttgccgaaggaaatgggatacttccagctctaa

SEQ ID NO: 81821 - DNA, 192 bp, Saccharomyces pastorianus
atgcttacaataacatttacgaatttcaatcagtttaatataatgaacaaaaacttcaattacattcataacttagatcgagctcgagtagtgaacatggactcgataagctggcttatcaagaattcgttgaaaattaacctattagctcatttgcgaatacctgccaatttgccgaaggaaatgggataa

SEQ ID NO: 81822 - DNA, 354 bp, Saccharomyces pastorianus
atgaatctcgacatgttaaggacaaaagtgtttgcaactactgttgctcgaatatctgggattcgcaggaatattcccatcagaactataaacacggtgacgaaaaagaatattagtaagatagaaaaactgtgtgaagtccttgaagttaatcctgacggatataaaggaaaggaacgcataccgactaaagaactaactaaactgctatataccacaagcaggaatatgttggtacgagtaccaatgactggagacttgagcacaggaaatacatttgaaacaagaaacgaaactttacaaaaattgggtgaacagctcattcacttggaaataataagatgcttacaataa

SEQ ID NO: 81823 - DNA, 1251 bp, Saccharomyces pastorianus
atgagtatgttatctagaagattattttccacctctcgccttgctgctttcagtaagattaaggtcaaacaacccgttgtcgagttggacggtgatgaaatgacccgtatcatttgggataagatcaagaagaaattgattctaccctacttggacgtagatttgaagtactacgacttatctgtcgaatctcgtgacgccacctccgacaagattactcaggatgctgctgaggcgatcaagaagtatggtgttggtatcaaatgtgccaccatcactcctgatgaagctcgtgtgaaggaattcaacctgcacaagatgtggaaatctcctaatggtaccatcagaaacattctcgccggtacagtgttcagagagcccattgtgattcctagaattcctagactggtcccacgttgggaaaaaccaatcattattggaagacacgcccacggtgatcaatataaagctacggacacactgatcccaggcccaggctctttggaactggtctacaagccatccgaccctacgactgctcaaccacaaactttgaaggtgtatgactacaagggtagtggtgtggccatggcaatgtacaatactgacgaatccatcgaagggtttgctcattcgtcttttaagctggccattgacaaaaagctaaatcttttcttgtcaaccaagaatactattttgaagaaatatgacggtcggttcaaagacattttccaagaagtttatgaagctcaatataaatccaaattcgaacaactagggatccactatgaacaccgtttaattgatgatatggtcgctcaaatgataaaatctaaaggtggctttatcatggcgctaaagaactatgacggtgatgtccaatctgacatcgtcgctcaaggatttggctccttaggtttgatgacttctatcttagttacaccagacggtaaaactttcgaaagtgaagctgctcatggtaccgtgacaagacattatagaaagtaccaaaagggtgaagaaacttctacaaactccattgcatccattttcgcgtggtcgagaggtctattgaagagaggtgaattggacaatactcctgctttgtgtaaatttgccaacattttggaatccgccactttgaacacagttcagcaagacggtatcatgacgaaggacttggctttggcttgcggtaacaacgacagatctgcttatgttaccacagaagaaattttggatggccgctga

SEQ ID NO: 81824 - DNA, 153 bp, Saccharomyces pastorianus
atgatgaaaaagctagagagtacgattgagagcaatgaaacggagttgaaatcctcaatggaaaccataaggaaatcagatgaaaaattagacagtcgaaaaaaagtgctgaggaggatattaaaaacttgcaacatgagaagtcagatttga

SEQ ID NO: 81825 - DNA, 216 bp, Saccharomyces pastorianus
atgttgcttgaaactaaatacaacgatttggtgaataaagagcaagcatggaaaagggatgaagatactgttaaaaagaccaccgattctcagagacaagaaattgaaaagttggctaaagaactggataacttgaaggcagagaactctaagttgaaggaggctaacgaagatcgttcggaaattgatgacttgatgctcttggtactgacctag

SEQ ID NO: 81826 - DNA, 1305 bp, Saccharomyces pastorianus
atggacatcattcaaggactgatacagcaaccaaaaattcaatctgtggatgaaaccattccgacgttgtgcgatcgagttgagaactccactttgattagtgacaggagatccgctgtgctgggattaaaggcatttagccggcagtatagagaatcagtgattgcatccgggctaaaaccgttgctcaatactttgaaacgtgattatatggatgaagattcggtaaaggctatattagaaacaattttgattcttttcatcagaggcgatggccatgacgacttaactagaggttggatttctcaacaatcgcggttgcagaatggcaagtatccctcaccattggtgatgaagcaagaaaaggaacaagtagatcagttctcgttatggattgctgatgctttgacgcagtctgaagatttaattcacctacttgttgaattctgggaaatcgataatttccatattagattgtacacaattcaattactagaggcagtgatggccacgaggccgttgaaggcgagaagtgctttgatttcacttccaacgagcatatccacaatggtctcactcctagatgacatgcatgagcccatcagggatgaagctattttattattaatggcagtagtgaacgattcacctcacgttcaaaaattggttgcttttgaaaacatttttgaaaggctattttctatcatcgaagaagaaggtgggttaagaggctctctcgtcgtcaatgattgtttatcgttgatcaataacatcctgaagtataacacttctaatcaaactttattccttgaaacaggaaacttgccaaaactggcacaccttttgagtgaaccaatatctcaagacgaagcttttttttggaatgatcaaagaatagttaatatcaatacagctttagatatcgtcagcctaacagtagagccaggaaatactgtcaccactaagcaccaaaatgcgttgcttgactcaagcgtattaatggttgtgttgcgacttgcattctttcataatatcccaaaaaaagttagaccggttgctcttttgactgccgcaaacatgattagaagtaatgaacatgcacagctagagtttagtaagatcgatgttccatatttcgatccttcattacctgtaaactctactgcaaacggtggtccaattaaattaattcctgtagtcagcatcttgataaattggatgctctatgccaactccgttcacacgtttgatacaagagttgcgtgtcctagactattacaggcttatttcatggataatttcgat

SEQ ID NO: 81827 - DNA, 2025 bp, Saccharomyces pastorianus
atggataattttgatcttcaaagagattttttactaaaacaagtccaattgtgtaataattcaacaaataatgtcggcgacaatgctaaagaaaatggtggttccaacaaatctgataaagaaggtgattcagataaagataccgacgggaaggatggcactgaatatgaaggttctttcaaggcaaatctattcgaagtcctgttaaattatgacgcagaattgaatctgaacccttttaaattattcttcacaactgatatttttatgttttttttccaacaggatcacaaatatagcgaagaactacgtgaaataacaagaaatgttaccaccggtaacgatctcgaagacgaagaacccttaaaggcaattcaaacaataagtgaattgctaactacttcccttactgctgctgacataagaattcctatttcctacttaacgttcctaatatattggctctttggcgactttaaggccacgaacgattttctttcggataaatccgtgattaaatccttgctttccttctcttaccaaattcaagatgaagacgttactatcaaatgccttgtaacaatgttactaggtgtggcatacgagttttcctcgaaagaatctccattcccaagaaaggaatacttcgaattcatcactaaaagtttaggaaaagacaattatgcttctcgaatcaaacaatttaaaaaagattcatatttctcaaaagttgatatgaatgaagacagtatactaactccggagcttgatgaaactggtttaccaaaagtttatttcagcacttacttcatacagttatttaatgaaaacatatacaggatcagaactgcattgtctcacgaccctgacgaagaaccaatcaataaaatatcttttgaagaagtcgaaaaattacaaaggcaatgtacaaaattgaagggtgagataacttctttgcaaacagaaacggaaagcacccatgagaacctcaccgaaaaattgattgcgttgactaatgaacacaaagagttggatgagaaataccaaattttgaattcctcacattcttcgttgaaagaaaacttttccattttggaaactgaattgaagaacgtcagagattccttggatgaaatgacgcaactgagagatgtactggaaactaaggacaaagaaaatcaaactgctttactggagtacaaaagcacaatccacaaacaagaagactctatcaaaactttagaaaaaggacttgaaactattttgtctcaaaagaaaaaggcagaagatggtataaacaaaatgggtaaagatttattcgctctgagtagagagatgcaagcagttgaggagaattgtaaaaatttacagaaggaaaaagataaaagcaatgtcaaccatcagaaagagactaaatcactaaaagaagatattgcggcaaaaattactgaaataaaagctatcaatgaaaatctggaaaaaatgaaaattcaatgtaataatttatcaaaagaaaaggaacatatttcgaaggagcttgttgagtacaaatcccgctttcagagtcatgacaatctagtagcgaaactaacagaaaaattgaaatccttagcaaataactataaggatatgcaagctgaaaatgagtctctaataaaagctgtagaagagtcaaaaaacgaaagcagcatacaattgtctaatttacaaaataaaattgattctatgtcacaggaaaaagaaaattttcaaatagaaagaggcagtatagaaaaaaatatcgaacaactaaaaaaaaccatctctgacttagaacaaacgaaagaggaaattatctctaaatccgattcttcaaaagatgaatatgagtcccagattagtctcttgaaagaaaaattagaaacggcgacaacagcaaacgatgaaaacgtgaataaaatctcagaattgactaaaactagggaagagctggaagccgagttagcagcttataaaaatctcaaaaatgaacttgaaaacaaatag

SEQ ID NO: 81828 - DNA, 75 bp, Saccharomyces pastorianus
atgctaccgccggcccctatgccggctgataatggcggttggtataatccacgcaagagactctctctgactgca

SEQ ID NO: 81829 - DNA, 648 bp, Saccharomyces pastorianus
atgctgatagtattattcttaacattattttgttcggtagtgttccgaacagcttattgtgatgtggccattgtggctccagaacccaactcagtttatgatttatctggtacaagtcaggctgttgtcaaagtaaagtggatgcatacagataacacaccacaggaaaaggattttgtcagatacacgtttactctgtgttcgggtaccaatgccatgatagaagcaatggctactcttcaaacactcagtgcgagtgatctgacagacaacgagttcaatgcgataatagaaaacaccgttgggacggacggtgtttacttcatacaagtctttgcgcaaacagctatcggttacaccattcattacactaacagatttaaactaaaagggatgattggtacaaaagccgctaatccgagtatgataaccattgcaccggaggcacaaacaagaattaccacaggagatgtgggtgccacgattgattctaagagtttcaccgttccctacaacttacaaacaggtgttgtgaaatatgctcccatgcaactccaaccggctactaaggtaacagcaaagacatggaaaaggaagtacgcgaccagtgaggtaacgtattactacactttaagaaactccgtttga

SEQ ID NO: 81830 - DNA, 150 bp, Saccharomyces pastorianus
atggacaataataacgatggagtagatgagttgaataaaaagtgtacattttgggatgctatatcaaactttattacgttcaatttttctttaaacaagccgaacaagaacaagccgatgtatgacagtattatttttgggcaacgttaa

SEQ ID NO: 81831 - DNA, 159 bp, Saccharomyces pastorianus
  modified_base (17)..(17): a, c, g, t, unknown, or other
  modified_base (154)..(154): a, c, g, t, unknown, or other
gtaaaaacatggtttantgtgttaaggcgtggtatcagtatagagaaaagttctctagggagagaaggccaaacaactcatgatttccgacaaccacaaaagataattgaagctaagccatctttaaagaataacggtacgatccctgtttgtnaatag

SEQ ID NO: 81832 - DNA, 330 bp, Saccharomyces pastorianus
atgaactatttagaaggcgttgggtcaaagaaaggaggtggtggtatagcctcagaatctcagtttaacgtacaacgaaggaaagaagtcgaatcattacttagtaaaggcgaaaatgtcccgtacactttccaagatgaaaaggacgaccaagtaaggtccaatccgtacatttacaagaatcattccggtaaactggtttgtaaactatgtaatacaatgcacatgtcgtggtccagcgttgaaaggcatttgggtggtaaaaaacatggtttaaatgtgttaaggcgtggtatcagtatagagaaaagttctctggggatcctctag

SEQ ID NO: 81833 - DNA, 165 bp, Saccharomyces pastorianus
atgattggccccttgggcgtctctggtttcaaaacgtcattggacattgacactactgaagctgctgacactgccaagggatccatgtcattagttggtttgagctccatcgatgccacttctccgagcgcagatttagtgtgcccaagtggatctgttgtgtag

SEQ ID NO: 81834 - DNA, 1041 bp, Saccharomyces pastorianus
atgtctaggaaaagaagtactaagcccaagccagcagctaaaatagctttgaaaaaagaaaatgaccagttcctcgaggcattgaaactatacgaagggaagcaatacaaaaaatctctcaagctgctagacgcaattttgaaaaaagacggtagtcacgttgattccttggctttaaagggtcttgatttatattctgtaggtgagaaagatgacgctgcttcctacgtggctaatgccatcagaaaaattgaaggcgcttcagcatcaccaatctgctgtcatgtattaggtatctacatgagaaacaccaaagagtacaaagaatctattaaatggttcacggcagctttgaacaatgggtccactaacaagcaaatatatagagacttagcaactttgcaatcacaaattggcgatttcaaaaatgctttagtgtccaggaaaaaatattgggaagcattccttggttaccgtgctaactggacatcattggctgtggcacaagatgtgaacggtgagaggcaacaagctattaacactttatctcagtttgaaaaactcgctgagggaaaaatatctgattccgagaaatatgaacacagcgagtgtttgatgtacaaaaacgacgttatgtataaagctgccagtgataaccaagacaagttacaaaatgtattgaaacatttgaatgatatcgagccatgcgtctttgataaatttggtttattagagagaaaagcaactatttacatgaaattgggtcaattgaaagacgcgtccattgtttatagaactctgatcaagagaaatccagataattttaagtactacaaattactggaagtatccttgggaatccaaggtgacaataaattgaagaaggctttgtatggaaaacttgaacaattttatccaagatgcgaaccacaaatttattccattaactttccttcaagacaaagaagagctcagcaaaaaattgagagaatatgtttgcctcaattggagcgcggtgttccagcaacttttccaacgtga

SEQ ID NO: 81835 - DNA, 1449 bp, Saccharomyces pastorianus
atggaaaacttgaacaattttatccaagatgcgaaccacaaatttattccattaactttccttcaagacaaagaagagctcagcaaaaaattgagagaatatgtttgcctcaattggagcgcggtgttccagcaacttttccaacgtgaaacccctttaccaaagaaggaagtccaaggtttcaccactattgagaaaatagtcctggattatatgtccggattagatcctacgcaggatccaattccttttatttggaccaattattacttgtctcaacatttccttttccttaaggattttccgaaagcccaagaatatattgatgctgcccttgaccacaccccaactttagttgagttttacatcctcaaggcacgtatcctgaagcacttaggcctaatggacacagcggctggaattttggaggaaggtaggcaacttgatttgcaggatagatttatcaactgtaaaacggttaagtactttttaagggctaacaatatcgacaaggcggtggaagtcgcgtcccttttcaccaaaaacgatgattctgttaatggtattaaggacttacaccttgtggaagcttcttggttcatcgtagaacaggcagaagcctattatagactatacctggatagaaaaaagaaattagacgatttagcatcgctaaaaaaagaggttgaaagtgataaaagcgaacaaattgcgaatgatatcaaagaaaaccattggcttgttcgcaaatataaaggtttggcgctgaaaagattcaacgctattccaaagttttataaacaattcgaagatgaccagttggatttccattcatactgtatgagaaaaggtacgccaagagcctatctggagatgttagaatggggaaaggcactttataccaaacccatgtatgttcgcgcaatgaaggaagcatcaaagctttactttcaaatgcatgatgatcgcttaaaaagaaagtccgattctttagatgaaaattcagatgaaatccaaaataatggccaaaatagtagcagccaaaagaaaaaagctaagaaggaagcagccgctatgaacaaacggaaagaaactgaagccaagagtgttgctgcttatccgagtgatcaagataacgatgtattcggcgaaaagttgattgaaacctccactccaatggaggacttcgctaccgaattttataataactactccatgcaagtcagagaagacgaaagggattatattttggactttgaatttaactacagaattggaaagttagctttgtgctttgcttctctaaacaaattcgctaagagatttggcaccacgagcggtttatttggtagtatggccattgttttgttacatgccacaagaaacgacaccccctttgatcccattttgaagaaagtagtcacgaagagccttgaaaaagagtatctg

SEQ ID NO: 81836 - DNA, 1743 bp, Saccharomyces pastorianus
atgtatcgtacaagaagctctgacgaggtaaccacatcaacagatctaactagctcaagtgacgttgctacttcagttgacccaactacttctgttatcagttcaacttcagcagacccaactacttcagcagactcaactacctcgaccgttcaaactacttcagctgatccaactacctcgaccgttcaaactacttctgttgatccaactacttctgtagtcagttcaactttagctgactcaactacttcaaccgttcaaaccacctcagctgatctaagtatctctgttatcagttctacttcagttgacccaactagttcaagcgctgtgactacttcgaccgttcaaaccacttcagctgatccaactagttctgtagtcagttccgctccagttgatccggctagttctgttgtcagtttaacttcatcttacccaactagctcaagcactgtgactatttctgctaattcaaacggttcagctactttaacagctcaaactacttcaattgatccagttagctccatcgttagttcaagcggtgcaactactatcatcagtagcgcctcaattgatccagctagttctgtagttagttcaacttcatctgaaccaaccagttttattgtcagttcaacctcagtttattcaactagaccaagtggtccaactacttcaacagatccagctactttctctgacacaatcattctaagggtttcaaccacttcaaccagccaagatacccaaacagtatcatctagtctaactgatatggtttcctcaactggttcagctgatttgagcgtctcatccattcaaagatctcaagtagacccaagcactttcgctgtctcgaatagcccagtatatccaacagcttcgaccggatcaacttccacgggcattccaattgcgtcggaaagtctaagcctttctagacagcaaggaatttcggccacttcaagttcttcgattgtaactttaaccccagttgattcggcttcctcgagtaggtcaagcgcaacaagtataatcaagcctaatatgccagttagcagcaatgattcgaagacccaaagttctgtttctgtagttgacgcattccaatcaactaaatcttcatatcctagcataacttcagcagacccaacgactctagccagtgaaaatggtttagtcggctcatcttcctcagctcatccaatcacattagatagaacttatgcatcagctcacgcaagcgtcaccgatattgtcagtagagttactgactcgactcgccatacaacactagtaacttcaaacattaacattcagtctgaggttgggaacccaaattactcgggtcccaaagacactaccatcaccaaacaatctgcatttatgacttctcctgcatcaacgtctactataagtaacgttcaatcaactgcttccgtaatgaatcacagtattgaggacaatatttctgcagctgcctctctagaaagtgtttctggtacctcaactaaagattattctagtcaatccagtgccattcattatacaaattccttcacgaccaccactactaacgcatttatcacatcaaagcattccattgctgctgtatcaacaggagccattacatcatctgccagcatttcattaatcatggaaggcagcgcaaacattgaagcagtaggaaaattggtgtggctcgctgccgctcttcctctagctttcatttag

SEQ ID NO: 81837 - DNA, 363 bp, Saccharomyces pastorianus
atgagatcatgtctgaagacttttcgtctcttatccattttagaaaggaagaacattccgaggcaaccggcaataagggacacggcagacgcagttatagctattattcttaactgcaacagttgcggagccgtgaatgtagaggtcatccccggcaaccccagcagctggttaaccgtggtagtgttaagctgtcggagagaatcaactctcttttctagtaaggatgaccctttcaacgcgtttaaattcgggggaaatccctcagttatcattttgagttggagagtttgctttattcgtcacacttcggatcacttgtttgtcgtttttttttttggtgactcttactgctttttatag

SEQ ID NO: 81838 - DNA, 1458 bp, Saccharomyces pastorianus
atgaatttacttgaaacaaggaggtccttgttggaggagatggagattattgaaaatgccatagcagaaagaattcagcggaatccagagttatattaccactatatacaagaatcgagcaaggtgtttcctgatactaaactgcctagatcatcgttgattgcagagaataaaatatacaagtttaaaaaggttaagaggaagagaaaacagataattttgcagcaacatgagataaatatttttcttcgagactaccaagagaaacaacaaacttttaataaaatcaatcgtccagaagagacacaggaggatgacaaggatttgcctaatttcgaaagaaaactacaacagctagagaaggaactgaaaaatgaagatgagaactttaaattggatatcaactctaaaaaagacaaatacgctttattctcatcttcttctgatccatcgaggcgcacaaatatattgtctgacagagctcgagacctagacttaaatgaaatatttactagagatgagcaatatggtgaatatatggagctggaacaatttcattctttatggttgaatgtaattaaacggggcgattgttcactgcttcaatttctcgacatcctagaattatttttggacgacgagaaatatttgctaaccccaccgatggatcgcaagaatgatagatacatggcctttttgctaaagttgagcaaatatgtagaaacttttttcttcaaaagttatgctttgcttgacgctgcggcagttgaaaatctaatcaaatctgacttcgaacattcatactgtaggggatctcttcggtccgaggcaaaaggtatctattgccctttttgttcgaggtggttcaagacatcttccgttttcgaaagccatttagtagggaaaattcataagaaaaatgaatctaaaagaagaaattttgtgtactctgaatataaactgcatcggtatttgaaatatttaaaggatgaattttctcgaacgagaagttttgttgaaagaaaactggcatttactgcaaatgaaagaatggcagaaatggatatcttaacacagaagtatgaagcacctgcatatgattcgacggaaaaagagggggccgaacaagtgggtggtgagcagagagatggtcaactgcaggaagagcacctctctggtaaatcgtttgacatgccactgggtccggatggattgcctatgccatactggctatacaaactgcatgggcttgacagagagtatcgctgcgaaatttgttcgaataaagtttataatgggcgacgcacttttgaaagacatttcaatgaagaaagacatctttatcacttgcgatgccttggtatcgaaccctcttcagtattcaatggcataaccaaaattagggaggcacaagagctctggaaaaatatgcaggggcagtcacagttgacatctatt

SEQ ID NO: 81839 - DNA, 756 bp, Saccharomyces pastorianus
atgtcaacaaactcattccatgattatgtggatttaaaatcgagaactaatacacgacagttttcagatgacgaagagttcactacgcctccaaaactaagcaatttcggatcagctttactttcccacacagaaaaaacttcagcatcagagatattatcaagtcataataatgacaagatcgcaaatcgattagaagaaatggacaggagttcatcaaggagtcaccctccaccgtcaatgggcaatttgacatccggtcatactagtacctcatcgcattcaaccttgttcggacgatatctgagaaataatcaccagactagcatgacgacgatgaacactagtgacatagagataaatgttggaaatagtcttgataagagttttgaaaggataaggaatttgcgacaaaatatgaaagaagatattacgtcaaagtatgctgaaaggagaagtaagagatttttaatatccaataggacaacgaagctgggtcctgcaaagagagcgatgactttgacaaatatctttgatgaggatgtgcctaactctccaaaccagccaataaatgcaagggagacagtggaattaccacttgaggattctcaccaaacaaactttaaagagacgaagagaaatacggattatgattcaattgattttggagatttgaatcctatccagtatattaaaaaacataatcttcccacaagtgaccttccactaatatctcaaatctacttgataaactaa

SEQ ID NO: 81840 - DNA, 108 bp, Saccharomyces pastorianus
cccgtacaattgtcggcaaccaccttggctataggagtaccccagttaccagatccaatcacagttaccttgaaaggcttttcggcagccttcaaagaaacagaatga

SEQ ID NO: 81841 - DNA, 288 bp, Saccharomyces pastorianus
atggccgacaaactatcatcaaccgatgctatgggctgttggagtcccaccttctgttttatttcattaatttcttcgtctacttcagagctccccttattcgtggtagaagtcggcatagcagcatattccctggaagatcctgcagccatattgtccatattagtactaaatgctttagaagtttcctcttttatctctaccgtcaagaagttcgcattttgcgctacgaaaaacactaacaacaataatagcgttgtaacgcttaaaattctagcatttctctga

SEQ ID NO: 81842 - DNA, 627 bp, Saccharomyces pastorianus
atgataccttccaataagagaaatgctagaattttaagcgttacaacgctattattgttgttagtgtttttcgtagcgcaaaatgcgaacttcttgacggtagagataaaagaggaaacttctaaagcatttagtactaatatggacaatatggctgcaggatcttccagggaatatgctgctatgccgacttctaccacgaataaggggagctctgaagtagacgaagaaattaatgaaataaaacagaaggtgggactccaacagcccatagcatcggttgatgatagtttgtcggccattaaaaacgataaagggtcgcgaataaccaaagcttttaatgttcaaaaagaatactccctcatactagacttgtctccgattataatatttagtaaaagcacctgttcatatagcaagggcatgaaggaactgcttgaaaatgagtatcagtttatcccaaattactatattatagaacttgacaaacatggacatggggaagagctgcaagaatatatcaagttggtgaccggtagaggaactgttccaaaccttttggttaatggagtatcaagaggaggtaatgaagaaatcaagaaactgcacactcaagggaacttttag

SEQ ID NO: 81843 - DNA, 219 bp, Saccharomyces pastorianus
atgaaggcattaagcgttttatgttttcacaacccttttaagagatgtcttggacaaaaaagcttcttcgttgatgatagcttctttagtccaactccgaaatgccttgtgctaggaaaactacgcctttccaactacactgcatttcacgacctaatcattcacgacctctttatttatatatttattcttattttttttcttctttcctttttgtaa

SEQ ID NO: 81844 - DNA, 456 bp, Saccharomyces pastorianus
atgttacgttcaattattggaaagagtgcatcaagatcattgaatttcgtcgctaagcgttcatatgcagaagctgctgccgcatcatcaggtttgaagttacaatttgctctaccacacgaaactttatatagtggctccgaagttactcaagtgaacctgcctgctaagtcaggacgtattggtgtactggccaaccatgttcccaccgttgaacaattactaccaggtgtcgttgaagttatggaaggctctaactctaaaaaattctttatatcaggtggatttgcaacagttcaaccagactcgcagttatgtgtaactgcaattgaagcttttccattggaatccttttcacaagaaaatataacaaatttgttggcagaagctaagaagaacgttagttcatctgatgccagggaagccgcagaagctgcaattcaagtagaagtttag

SEQ ID NO: 81845 - DNA, 2115 bp, Saccharomyces pastorianus
atggaccagccaaggacccattcaggacccacgacggccagcaatcctgcccccagctccaccaactcgtcatctgctcccagcgcgactaattcaaagcaggaaagatcctcttcgtcactgtccaaaccttcgtcagtggttccttcaaaggattcaccagatggtgacgctattgctaagactcaagcagccgctttaaaaaacgacatgaaatctggtgataccagtacattagatgggtcatctcaaaatataattccaaacagagcctcaatgcaaaaatatattgaccagtcatcagatctgctgtcgaggagctccggcgtaataacgccctccatgtctttgaatgcaagcactaacgccactaacaacgatagcagtggcaattcagctaatagtagtgatttgaagatccctatagacagggacaatactatattcaagacgttcgacaccaagactggtcaattcttgaaaaacgatgataatgaagaagaaataaggaggaacaataaagttgattcgatacccccaaagaatatttatactaatatcaacaatccatctccctccccaccaccgtcgtcaaagcaaccaccgtctgcatccgcgccgcaattgccaccagcaacggaaccacacaaagaacaagcagcacaacaacagccaccaggaaatgcttctaactttttaaggatcttttcaaataaaaaaatgaggtcgcattccgtacccactattttgcattcttctttaagaaaattatcatcccacaatcaatactatcgtaatcaaaatattcttttaaatcatccaactccttccggcatatcaaagaaaaaattttctagaaaccatcatcaaccatatttgcattctaataatcctctcagttcaaaccctctttcattaaagcgcgcaatttttttaaatcaacaaatatcaggtaacgcaagcactaacgctaataatgacaacattaataattccactgccacttcaatgacaaatcaaagcttcctatcaagctcaaactttgacttaactttggaagatagaataaactacataaaggctactccaacgcctgttccatttcctcctataaatttgcagggcttaaaagagattgacttacaggaaattctgaaaaacccacaactaagacatgatataatattcgacccgctactacaattcaggccaaatcttgatggcgaaagagggaataaaaaaagacaattggcgaatatctattggaatgatgttcaaaatgaaatttatgtttactctaagaggcctgaaatattccaatataacaggtcaagactagtcccactttttgacactttaagggatgtattgttaacgatagtcccacaaaaagagtctccgatgataaataatgtactggacacagaattgaacattcaagaactattgaaaggttctctgataatgtctaacttgtcaggctggttggctgatttatttaaacatcattgtgcccccatgagggacccatgggtggataaaatgagcaacaaatttaaagaagctgaaagagactcttctttaacaaggttaatagaaggtttaaggttggtttttcaaattttggaaacaatgaaattggatattgccaatcatcaaataagaatactaaggccagctctgttaagtaatgctgtagaatttgagaaacagtatttcaacactcttatagcctctaaaagggtgaatttaaatacttccctactttggtttgataaaaaattcaacgtaaatgttaccgctggccttgttagaaatccaagttctatcactatccctgatgtctacaatatttgcattagaagtataattaacctattgtcatgtaggaagatggtgagagagtacccaactctgctttcttttgatcatgcaagattgattcttttgcgtgccgatatacgtcaaattgtttgtattttagtttgccgtttacttttccaacaattggtggccaacgatccttcaatggataaagctacaaaggaatatgttattcatacatactcaactaaaaggctgaagaatgaaattatcagcattataaccagatga

SEQ ID NO: 81846 - DNA, 111 bp, Saccharomyces pastorianus
atgttgcagtcttttggaaatacgagtcttttaataactggcaaaccgaggaactcttggtattcttgccacgactcatctccatgcagttggacgatatcaatgccgtaa

SEQ ID NO: 81847 - DNA, 354 bp, Saccharomyces pastorianus
atgtgcgcggaaccagacgactgggaaaggatcgaaaggcatccgcggaaacttaaaatagctccgcggatgctagatttctacgagtcatacatagtctggcgtgaaggtaatttttttttatgtctccgttcttttccaaatggggtgatccgtggagggcggtgcttctttcgcgccacttccttgccgtggaaaaatgtgtacggttaccatggtcacataacctctgtgtgcggagccactctgactcgcatcaaccgggctatggttgcatcggatgctggaatgggttctattggccctaagagtcgcagtagcgcctattggactcaccaacttgtttctttatag

SEQ ID NO: 81848 - DNA, 690 bp, Saccharomyces pastorianus
atgatgaaacgatataaagcagatgttatttacaatggtgagttggatgttcatttcccttatttaacagttaagcaaactttggatttcgctattgcctgcaaaacgcctgctctcagagtcaataatgtttccaaaaaggaatacattgcatccagaagagatttatatgcaaccattttcggtctaaggcatacctataataccaaagttggtaacgatttcgttagaggtgtatctggtggtgaacgtaagcgtgtttccattgccgaggctttggcagccaaaggttccatttactgttgggataatgccactagaggtttggatgcgtctacggccttagaatacgcaaaagccatccgtattatgacaaacttattgaaatcaaccgcttttgttacaatttatcaggcaagtgaaaacatttacgaaacatttgataaagtcactgtcctttattctggtaagcaaatttattttggtttgatccacgaggcaaaaccttatttcgcaaaaatgggttatttgtgtcctccaaggcaagcaacagctgaatttttaaccgcgttgactgatccaaatggattccatctgatcaagccaggttatgaaaataaagtaccaagaaccgctgaggaattcgaaacatattggttaaattcttctgagtttgctcgaatgaaatga

SEQ ID NO: 81849 - DNA, 96 bp, Saccharomyces pastorianus
atgagacagatcataagcaatgtcaatgccctggcagaagcgggtgaaatgattttggttcttggaaggcctggtgctggttgtcctcctttttaa

SEQ ID NO: 81850 - DNA, 396 bp, Saccharomyces pastorianus
atgagcaatatcaaaagcacgcaagatagctctcataatgctgtcgctagaagctcaagcgcttcttttgcagcttcagaagaatcatttacgggcataacccatgacaaagatgagcagagcgataccccggcggataaactgacaaaaatgctgacaggacctgcaagagacactgcgagccagattagtgccactgtgtctgaaatggcgccagatgtcgtatctaaagtggagtcatttgcagatgcgctatcccgtcatacaacgagaagcggtgcctttaatatggattcagatagtgacgatgggttcgatgcccatgccatctttgaaagttttgtaagagacgctgatgagcaggcatccatatccgcaggctggtgttaccataga

SEQ ID NO: 81851 - DNA, 198 bp, Saccharomyces pastorianus
atgatggctagtacatccaatgatgaagaaaagttgatatcaaccactgacaaatacttcatcgagcaaaggaatatagtattgcaggagatcaatgatactatgaattcaatcttgaatggtctgaatggtctcaatatatcattggagagctcgatagctgtgggaagagaattccagtcagtttctgatttgtga

SEQ ID NO: 81852 - DNA, 912 bp, Saccharomyces pastorianus
atgaagcattcccaaaaataccgtcggtatggaatttatgaaaagactggtaatccctttataaaagggttgcaaaggctgcttatcgcttgcttgttcatttcaggctcgctgagtattgtcgtctttcagatctgtctacaggtgcttctcccttggagcaagattagatttcaaaatggtataaatcaaagtaagaaggcttttatcgttttattatgcatgatcttgaacatggtggctccctcttctttgaatgtcacttttgaaacatcgcggccattgaagaactcttctaacgccaagccatgctttcgatttaaagacagggctataataattgcaaatcatcaaatgtacgcagactggatttatctctggtggctttcctttgtttcaaatttgggtggtaacgtttatatcatcctgaagaaagctttacagtacataccattactgggatttggcatgcgaaattttaagtttatatttttaagtaggaactggcaaaaggatgaggaagctttaacaaatagtttggtttctatggacttaaacgcgaggtgcaaggggccccttacaaattataagagttgttattccaagacaaatgaatccattgccgcttataatttaatcatgttccctgagggtacaaatctaagcctcaagacaagagaaaaaagcgaagcattctgccaaagagcacatttggaccatgtccgattaagacatttgttactaccgcactctaaaggcttgaagtttgcagtagaaaaactagctcctagtttagatgctatctacgatgtcactattggatattctcccgccttgagaacggaatacgtcggcaccaaattcaccttgaagaaaatattcttaatgggtgtctatccgcgcacacggtag

SEQ ID NO: 81853 - DNA, 195 bp, Saccharomyces pastorianus
atgttggacatcaaccaatttatcgaagataagggcggtaacccagagttaatcagacaatctcagaaagcaagaaatgccagtgttgaaatcgtcgatgaaattatttccgcctaccaagattgggtcaaaacgagattcgaattagatgaattgacaagcaattcaacaagcttcacaaggatattggtttga

SEQ ID NO: 81854 - DNA, 801 bp, Saccharomyces pastorianus
atgagcgagcttaaggagctagcacagaatatcaagaccattgacgcagagaatataagaaaaaaaatttcacatttagaaatgatttttaagaggaagaatgtagagaaactagaacagggattattacaggcgaagttagtgctgaacaaaacagatgagtgtaagtcaatgtatgaggagaacaagttggataactgcttagagctgataaaatccatcgattatctgattaagggggatgattcaataaacgaagatgttcagagttggactaggtgttggccctataaattaagcaatttgaggacgataccagctttgtcagcaacgagagagtttttaaccaatatgaagattgaaataggaggaaagttcagcctacaattatcgattttactaatagatgatttaagatccttttgcaaatcaatcaaaccaaaggaaacactacataggatacaaacgggatctaatgataaaaagcaaactatatttactgataatttttcttcaaagataaccgaattaatagtcagattgaatagatgcgaagaattaacgagtgcctttgacctatacagggaaaaatctatcactgagcttaaatctatcataaaaatttatttgccaacagagaatgcacacgctgacaataaccacgatgaaaaacatcttaacaatggctctactagtgggtctaaactttcaagattaataaaggagcaaactcctgcagaatttcagtccatgctagtaaacatattcacgcacgcgctagaagctcttcgaagactttag

SEQ ID NO: 81855 - DNA, 264 bp, Saccharomyces pastorianus
atgcatgaggagtcgtttgaagcaaatctgaggcaaggggatgccgagctaataaatagtatacctgacttgtacttttcagacaaatttcaagtaggtaaccctcgaacttttcataaagtgttggacgctatcgatttatttgtaacgaaactagacatgaagagacaagcggaaagggatgaggctttttttgagttgagggacaggctaaacgattttttggatatcgtagaaacattactggttacagagatatcctga

SEQ ID NO: 81856 - DNA, 576 bp, Saccharomyces pastorianus
atgtcaataagcgaaacatctcataataaaagccagggactgcaaaaagcggctggtcgtcctaaaattgttgttcctgagggatcgccttctcgtaatagtgatagtggctcttttactatagagggtgatacttcccttaatgacgacttgttaagtatatctggcagtgtcacaccaagagcgagaagatcttcgagattaagtctggattcaataacgccgcgaagaagttttgattctaggacactttctgttgcaaatagtagatcattcggttttgaaaatgaaacacatagtgggtccatggacttttcgccattgggaaataactccatctatgaaattgtgatgaacacaaggaggaaaaactggctcaattaccccactgttgctgatattccacaagttagcctaagcaaaaatgatctggatgaccattggaaaactcatgttatcgaatacgtcaaaaacattaaaagtgattaccaaatatttcaaagcacaaataatataagaaacatgaatcagatggaacagttaaaagaactgcgagaaggggaaaattgcatgagg

SEQ ID NO: 81857 - DNA, 543 bp, Saccharomyces pastorianus
atgttcgaatctgtcaatttggatgaaaattctccagaggatagagaactggctaaggttttgtccccaccgggtagttatctttctccagcttcactagacagtggttcatcgttcacaaatagtgggacttcaactagttgctttgaaccaaaaaacaatctaccctccttatcgtttttaaatgctagagcgggatctttaggtggcatttttaatcataaacagatgacctcgccgtcaaattcgaatataggaggcgaaaatgtaggatcgaccacaagtagtaatgacggcagtaatgaaaatgcaggtcatcccactacttcagagcaagatcaaaatgcagatcaccccactatttcacaggcagatgataatggacactcatcgttgacccctaatcctgctgtaacttcaactgttacggataagaagggaaatacagtaaaacggaagtactccagaaatgggtgctccgagtgtaagagacgaagaatgaaatgtgatgaaactaaaccgactgttggcagtgcgcaagat

SEQ ID NO: 81858 - DNA, 2085 bp, Saccharomyces pastorianus
atgacctcgccgtcaaattcgaatataggaggcgaaaatgtagaatcgaccacaagtagtaatgacagcagtaatgaaaatgcaggtcatcccactacttcagagcaagatgaaaatgcagatcaccccactatttcacaggcagatgataatggacactcatctttaacccctaatcctgctgtaacttcaactgttacggataagaagggaaatacagtaaaacggaagtactccagaaatgggtgctccgagtgtaagagacgaagaatgaaatgtgatgaaactaaaccgacttgttggcagtgcgcaagattgaatcgtcagtgcgtttacgttttaaacccaaaaaataagaaaagaagaacctcaaatgctcaaagagtaaaagaatttaggaagcacagtactagcctcgataatgatcataataatgctcgcaagcgtcagcattcgtcatgcaaggctgggaagaagaaaaaagtacgacaaaatttaagtgaagacaccacggaccctaaaccgattacagataacggcaagaatgtacctttggatgaaatagaatccctagagattccaaatttggaccttaccaccacaatgaatggatatgacgttaatttactaatgcagaacttgaatgatatggttaatatgaaacttcatgactcttacttattgaatgaagaactgaaaggattagatttgcccgatttggacatacctgaacttttgcccgcttcgaatgtaaacagtagcgtaccaatatcctttctggtgaataatgtaataactttcaacacaaaactaagctcgttcaaactaggtggaatccacgataagtatctaaagatattttactacgattgcttagattctattgcgccctttttccaaaatcaagggaacccgttaagagatatcttactttcatttgcgaaaaacgaggcctatcttttatcttccatattagctacgggagcatctatagcatatagaaagtctaataacttggaagatgaacgaaactattgtgcttatttgtcacattgcctgagcctgttgggtgaacaattcaagaatgagtcaaacgttttaaataggatagagcctatcatcctgacggtcatcatgcttgcatgggattgtatttattcaatgaattctcaatggaggtctcacttaaaaggtgtaactgacctttttaaaaaaatcaatgccgggaattcctccaaagtacttaacgttgcaaaatgttggtttaaaattatggaaacattcgccagtataagtacggtatttggcggatctttaattgataataatgaccttgatgcaatttttgatccatatgattaccaatatgttgactcgttaaaatttttaaatattatgactccactaaatgagtttaatcttttaagaggacataaagaagatttcgatcttgttattaaagaagttttcaaatcactcaatacaattaggtcaactgaaaaaaattacttttctaaagaagaaggtttgttcactaagaaattagactatctgcttttatcatcccaaacttcgtccgaaaagtccaaagaccagatatcatatttcaatacgcagaaaattctagtggaaattgacaagcaattagattacgaatttattgacaaatctggaattataccctcagacaatcagtcacaccctagaattagtaatattcatgataatgccatcgatatggtgacattaaagaacggtgaagaagttgccatcagctggtatgatatttctcatcagacacaagttttatctttcttattaattgtattattaaaacttttaggtatgccaaaagagtcaagtaccattcaacaagtggtcaagaaaattatgtctttcttcaaattcttagacagtgactcgccgccacaaaattcaaggacttgttatagtaattttgctgtattgattgcaggtttgaatgcaatggacgaggaaacaagagcgattgttaaaagatattataaaatcaatggtggaaaatttcaaaggctccctgcacattattataatatatgtggataa

SEQ ID NO: 81859 - DNA, 735 bp, Saccharomyces pastorianus
atgttcattaaaaacgatcacgccggtgacaggaaacgcttggaagactggagaatcaaaggttatgatccattaacccctccagatctgcttcaacatgaatttccaatttcagccaaaggtgaggaaaacattatcaaggcaagagactccgtctgtgatattttgaatggtaaagatgatcgtttagttatcgtgatcgggccatgttccctacatgaccccaaagccgcttacgattacgctgacagattggctaaaatttcagaaaagttgtcaaaagacttattgattattatgagagcgtatttagaaaaaccaaggactactgttggctggaaagggttgattaacgaccctgatatgaataactcttttcaaatcaataaaggtctacggatttcgagagaaatgttcataaaactggttgaaaaattacccattgctggtgagatgttggataccatttctccgcagtttttgagtgattgtttctccttgggtgccatcggcgccagaactactgaatcccaactgcacagagaattagcatccggtctatctttccctattggatttaagaacggtactgatggtggtttgcaagtcgccatcgacgctatgagagccgctgcacatgaacattactcctttctgtcacaaagccaggtgtcactgctatcgtgggcactgaaggtaacaagataccttcctgatcttgagagtgacctgcag

SEQ ID NO: 81860 - DNA, 576 bp, Saccharomyces pastorianus
atggacggtatcaccatgggtggcggcgttggtctatccattcacacgccctttagaattgctacagaaaacaccaaatgggccatgcccgagatggacattggtttttttccagatgtaggctcaacttttgctctccctagaatcgtgacattggctaactcaaactcacaaatggccctgtatctatgtcttacaggagaagtagtcacaggagcagacgcttatatgctcggcttagcgtctcattacgtcagtagtgaaaatttagatgctttgcagaaaagattaggtgaaattagccccccttttaataacgatccacagtctgcatacttcttcgggatggttaacgaatccatcgacgaattcgtatcaccattaccaaaagattatgttttcaagtattctaacgagaaattaaacgttattgaagcctgttttaacttgtctaaaaatggtactattgaagacataatgaataacttacgtcaatatgaagttctgcggaaggtaaggctttcgcacaagaatcaaaacgaaattgtaaccagtcaccatcctctcttcaatcgc

SEQ ID NO: 81861 - DNA, 165 bp, Saccharomyces pastorianus
  modified_base (35)..(35): a, c, g, t, unknown, or other
  modified_base (41)..(41): a, c, g, t, unknown, or other
  modified_base (45)..(45): a, c, g, t, unknown, or other
  modified_base (50)..(50): a, c, g, t, unknown, or other
  modified_base (52)..(52): a, c, g, t, unknown, or other
  modified_base (55)..(56): a, c, g, t, unknown, or other
  modified_base (58)..(59): a, c, g, t, unknown, or other
  modified_base (64)..(64): a, c, g, t, unknown, or other
  modified_base (67)..(67): a, c, g, t, unknown, or other
actacaaacttattcattttaaattcatccaaccnaccacnttcnttctntnctnntnntaatntanctactgtggcaatattcaattttaacaaagaatttgccaattccatcaaattttttactgatgaatattctttgaattttcaaatagcacttacttga

SEQ ID NO: 81862 - DNA, 306 bp, Saccharomyces pastorianus
atgctcagaaatacgctaaaatgtgcccaattgtcgtctaaatacggatttaaaactaccacacgtacattcatgactactcaaccccagctaaatgtcaccgacgcaccacctgtgctatttaccgttcaagatacagctagagttatcacgctaaataggcccaaaaagctcaatgctttgaacgccgaaatgtcagaatccatgttcaagactttgaacgagtatgcaaagagcgatactacaaacttagtcatattaaagtcatccaaccgagcacgttcgttctgtgctggtggtgaatag

SEQ ID NO: 81863 - DNA, 759 bp, Saccharomyces pastorianus
atgatcgaagctttacaccgtaggaagaagttctgcgcaatgacaggtgacggtgttaacgattctccatctctaaaaatggccaatgttggtattgcaatgggtattaatggttcagatgtttccaaagaagcgtctgatattgttctaagcgatgacaattttgcttctattttgaatgctgtcgaagaaggtcgtaggatgacggataacattcagaagtttgtcctacaattattggcagaaaatgttgctcaggctttgtatttgatcattggtttagtattcagagacgagaacggaaaatcagtatttcccttatcaccagtggaagtattgtggattattgtcgtcacctcttgttttcctgctatggggctaggtctagaaaaggctgctccagatttgatggatagacctcctaatgattcagaggttggtattttcacatgggaggttattatagatacatttgcatatgggattataatgacagggtcctgtatggcttcatttactggatcactgtatggaataaatagtggtagattggggcacgattgtgatggcacctataacagcagttgtcgtgatgtttatagatcacgttctgcggctttcgcaactatgacgtggtgcgctttgattctggcttgggaagtggttgacatgagaagatcctttttcagaatgcatccagacactgacagcccagtcaaggaagacctgcaggcatgcaagcttgcactgccgtcgttt

SEQ ID NO: 81864 - DNA, 102 bp, Saccharomyces pastorianus
atggtcatgaccggatctcagtttgacggactaagtgaggaggaagtggacgatttgcccgtcttacctttagattattgcacgttgctctccgaagactaa

SEQ ID NO: 81865 - DNA, 2136 bp, Saccharomyces pastorianus
atgggcgaaggaactactaaggaaaacaataatgcagaattcaatgcttatcacacgctgactgcagaagaagccgctgaattcataggcacaagtctaactgaaggtttgacccaagatgagttcgtccacagattgaaaacagtgggtgagaacacattgggtgatgacactaaaattgattacaaggcaatggtcctccatcaggtatgtaatgccatgatcatggtccttctaatatccatgataatctcgtttgccatgcatgattggattactggtggtgttatttcctttgtcgtgggtgttaacgtcggtattggccttgttcaagaatataaggctacaaagacaatgaactctttgaaaaacttgagctctcccaatgctcatgttattaggaacgggaaaagtgagactataaactcaaaagatgtggttccaggtgatatttgtctggtgaaggtcggtgatactattcctgctgatttgcgtttaattgaaactaagaattttgatactgatgaatcactactgaccggtgaatctttgcctgtctccaaagacgccaacttagtgtttggaaaagaagaagaaacctccgtgggtgatcgtttgaatttagcattctcttcgtctaccgttgtcaaaggaagggcgaagggtattgtcatcaagacagctttgaacagtgaaattggtaaaattgcaaaatctttacaaggtgatgcaggtcttatttcgcacgatcccaataaatcatggttacagaacacatggatatcgacaaaaaaaatcactggtgcatttttaggtacaaatgtcggtacgcccctgcacaggaaactgtctaagttggcggtattgcttttctggattgccgtactttttgctatcatcgtcatggcctctcaaaagtttgacgtagataaaagggtagctatctatgccatttgtgtggccctatccatgattccctcttcattagtcgttgtcttgaccatcaccatgtctgttggggctgctgttatggtttctagaaacgttattgtaagaaaattagattctctggaagctttaggtgccgttaacgatatctgttctgacaagaccggtactcttacacagggtaaaatgttagcgaggcaaatttggatccctcgctttggtaccataactatctcgaattctgatgacccctttaatcccaatgagggcaacgtgagtttgattccaaggttttcaccttacgaatattctcataatgaggatggtgacgttggtattctccagaatttcaaggatcgcctatacgaaaaagatttaccagaagatattgacatggatctatttcaaaaatggctcgaaaccgccactttggctaacattgctactgttttcaaagatgacgcaactgactgttggaaagctcatggtgacccaacagaaattgcgattcaagtgtttgctactaagatggacttgcctcgcaatgcccttaccggtgagaaatcgactaatcaaagtaatgagaatgatcaatcctctctttcacaacacaatgagaagcctggcagtgcacaattcgaacatattgctgaattcccattcgactcaactgtgaagagaatgtcatctgtctactacaacaatcacaacgaaacatgtaatatttatggcaagggtgctttcgaaagcatcatcagttgttgcagttcttggtatggtaaggatggtgtaaaaatcacaccattgaccgattgtgatgtcgaaatgataaggaaaaatgtttacagtctatcaaatgagggtttaagagtcttgggttttgcctccaaatctttcactaaagatcaagtgaatgacgatcaattgaaaaacattacttcaaacagggccaccgcagaaagtgatttagttttcctagggttgattggtatttacgatccacccagaaatgagactgccggtgcagtcaagaagtttcaccaagctggtattaacgttcatatgttaactggggactttgtgggtacagcaaagctatcgctcaggaggtggcatcttacccaccaatttgtaccattactcccaagagattgtagacagtatggtcatgaccggatctcagtttga

SEQ ID NO: 81866 - DNA, 462 bp, Saccharomyces pastorianus
atggagcaaatattatataatcaaagccttaaaatttctaccctttctacttttcaaggtttaaagtttctaaaggtcctcattttttctattttccaacaactattttataacccagttatacaattatttggaacgaaagcctcaataatggaatctgattccactactctgctcgaaagtagttggagtactgagcgaaactttctcaatatgaatccagattccatatctgctaccaagaatgtttttatattattttttaccattttcagattagcggagtatattgtatacaaactctctgaccagaagtatcggttacacacatccctgaatgtccaacatttcaggtggattcgaagaagaatacaaacagaaaaaggacactttcctttagcaaagcttacttaccaagaacaaatatataccgatttttgtagccgatggactaaaaataga

SEQ ID NO: 81867 - DNA, 543 bp, Saccharomyces pastorianus
atgtcagatcctatagtaacgtcttccaaaatggaaaaaagtgcagagtttgaagtaacagactctgctttatataataacttcaatacatcaacaacagcttcactaactccggagattaaggaacattctgaggaatctcgcaatgggttagttcacagattcgtcgactcattcagaagagccgaaagccaacgtttagaagaagacaatgacttggaggatggtaccaaatcgatgaaatctaataaccacttaaaaaagtcaatgaaatctagacatgttgtaatgatgtctttaggtacagggataggaacaggtcttctagttgccaacgccaaaggtttgagtcttgcaggcccggggtctttagtcatcggttacgttatggtgtccttcgtcacgtattttatggtccaagcggctggtgagatgggtgtcacttatccgacgcttccaggtaacttcaatgcatacaattcaatctttatttcaaagtcgtttgggttcgcgaccacttggttattttgcattcagtggtaa

SEQ ID NO: 81868 - DNA, 204 bp, Saccharomyces pastorianus
atggctagaactttctttgtcggtggtaactttaaattaaacggttccaaacaatccattaaggaaattgttgaaagattgaacactgcttctatcccagaaaatgtcgaagttgttatctgtcctccagctacctacttagactactctgtctctttggttaagaagccacaagtcagacctgcaggcatgcaagctggcact

SEQ ID NO: 81869 - DNA, 636 bp, Saccharomyces pastorianus
atgagtagtcgcaaaagcaccgcttctagcttactgttacggcaatatagagaacttactgatcctaagaaagctattccctcatttcatatagaactagaggatgattcaaatattttcacttggaacataggtgttatggtgctaaatgaggattccatttatcatggagggtttttcaaagctcaaatgagatttccggaagactttcccttttctccaccacagtttcgatttacgccggctatctaccatccaaacgtttacagggatggcaggctttgtatttctattttacatcaaagtggggatcctatgaccgacgaacctgatgctgaaacgtggtcccccgtgcagaccgtggaaagtgtgttgatctctatagtatctctattagaggaccccaatatcaactcgccagcaaatgtcgatgccgctgttgattacagaaagaaccctgaacaatacaagcaaagagtcaaaatggaagtggaaagatcgaaacaagatatccctaaaggtttcataatgcccacttctgaatcggcgtacatatctcaaagtaaactagatgaaccagaatcgataaggatatggacctgcaggcatgcagcttgcactgccgtcgtttacacc

SEQ ID NO: 81870 - DNA, 162 bp, Saccharomyces pastorianus
atgagtttttggtgttataattccagcatcaacattcatgaaagaaatttcattgaaaactttaactctgaaatcgaagttgacgatctggatataaaggataaagtttccctggattaccgtgcgatatattgcaaggacagccacagaatcaaaagatga

SEQ ID NO: 81871 - DNA, 108 bp, Saccharomyces pastorianus
atgcactgtacgaatggtgaattgataatatctctcgtggtagcatgtatgagaaagttttcatattggagtacggtatccatactaaatgagtttttggtgttataa

SEQ ID NO: 81872 - DNA, 300 bp, Saccharomyces pastorianus
atgacactagtgactccgttacaattttcgaccgtacagccaaatttatatagaggatcttacccacgagaaatcaatctcccattcctgagaacccttagattgaaatacatattatctttgacaccagaacctttgagcactgatcctctaatggtaaagttttgtgaagaaaataacattaagacaattcatataaaatgtcaaagtgaaagaaaggcagacaagaccaaaccccagattaaaaggaacaagaaaacagttcctattgaatacgaagttgtagtacgatgcgtctaa

SEQ ID NO: 81873 - DNA, 1977 bp, Saccharomyces pastorianus
atgaacatttacaacactttgctggaaaccttattaaaagatgaaaacattgcaaaaataaaaagtttcattaagtcttccataaaacaaacaaaattgaaccatgagcaagaagaatgtaacctgatgagaacgggttcctatatcacttccaatcaattaaactccctaataagttcatcagcaaattctgcttcctcccaaatggagatactactgatagatatacgatcaaggttggaattcaacaagtcacatattgatacaaaaaatattatatgcctggagcctatttcttttaaaatgtcatattcagatcatgatttggagaaaaaatcattaattacttctcctaatagtgagattaaaatgtttcaaagtagaaatcttttcaagtttatcattctctatacagacgcaaacgaatacaatgttaaacagcagtctgtcctgttggacattctggtgaatcattcctttgaaaaaccaatatccgatgactttaccaaaattttcattctggaatctggttttccaggttggcttaagtcaaattatgggaggcaagtatcatcatcttttccatcaaataacaatattaaagatgatagtgtttatattaatggtaacacttctggcctaagtttacaacatttacctaagatgtctcccagtataagacattcaatggacgactctatgaaagaaatgctagttgcgcctactccattaaatcatcttcaacaacagcaacaacagcaatcagacaatgatcatgtgctaaaaagatcttcaagtttcaaaaaattattctcaaattatacgtctcctaatccgaagaattcaaactcaaacttatattctatatcttcgttgtccatatctagttcaccatcgcctttacctctacattcgcctgacccagttaagggcaattcattgccaatcaattatccggaaacgccacatctttggaaaaacagtgagacagattttatgacaaatcaaagagaacagttgaatcacaattcttttgctcacatagctcctatcaacacgaaggccatcacttctccatcaagaactgccacaccgaagttacaacgcttcccgcaaacaattagtatgaaccttaatatgaactccaatggacacagttctgccacctctaccattcaaccttcgtgtctatccttgtctaataatgactctttagatcatacagatgttacaccaacttcttctcataattatgaccttgatttcgcggttggtttggaaaatctaggaaattcgtgttacatgaactgtatcattcagtgtatcttaggtacacacgaattaacccaaatctttttggacgattcatatgctaaacacatcaatattaatagtaagttgggatcgaaaggtattctggcaaaatattttgcaaggttggttcatatgatgtataaggaacaggttgatggttcaaagaaaatttccatatcaccgataaaatttaaattggcatgtggatctgttaactcattatttaagactgcatcccaacaggactgccaagagttttgccaattccttctagatggtcttcatgaagacttgaaccaatgcggttcaaacccacctttgaaggagctttctcaagaagctgaggcgagaagagaaaaactgtctttgcgaattgcctcgtcaattgagtgggaacgattcttgactactgatttcagtgttattgtcgacttattccagggacaatacgcctcactactaaaatgtaaagtctgtagtcatacctcgacaatataccaaccttttacggtgctgtcaatccctattcctaaaaaaaatcccgaaataatattaccattgaagattgtttcagagagttcaccaaatgtgagaacttggaggtggatgagcaatggttgtgcccacattgtgaaaaaaggcagccctccacgaaacaattga

SEQ ID NO: 81874 - DNA, 1014 bp, Saccharomyces pastorianus
atgaatgtcatattttctttggcgagtttcgtcaaaaacatgtataatgcaagtttgaaccaacgtaatctaataagcctgccgttcaacttcatgcttaattttgcgccagtgtttatttggctgtctatattcaagcacgctggtctgatacccacaaggctcagacctgacattcatagcaagtttgctttttttgctgatcaattcctcttcggggactattggcatgaacttactgtacaattgcccgataatacttcgaagctatttttctggtcattcatatcatcttctgcatttctcttagtatttctgatatgcattccctttgccatttggtactacatctattacattaagcacgttaactataatctgttagagtggttcgcaaatatttttcattacccctgcaagcgcaagcagcggccgatccaaaagaggttccggacaattttcataccgtttgccttgcccctgtttacatttgttatactcaacattgatcatttctttgcttaccagtcggatgcaaactttactaagaccaaggatttactggcttggttctcctatgtcatcctgcacttgacagctccaattttaacagctgtatacttatacgtcttccaaccaccggggactttaaaatgctttagttttgccctaggattacaaaatatagcgggggtccttacccatctgcttgttccaatggcctccccatggtttactcatctgtacggtattgatgacaccgaacatgttaattacacccaggaagggtttgctgccggtttgataagagtagatagccatttgggtactcatttgaacactaaaggatttcacatgtctcctattgtgtttggtgctgttccttcactacactccgccattgcatttcaatgtttcttgtttttggtttcaaggtccaccagcttaaaacacagattttccaatgctggaggtttcacaatgcacaataatgatccttccactttcaagtga

SEQ ID NO: 81875 - DNA, 1236 bp, Saccharomyces pastorianus
atgcgtatattgtatatatattatatcaaacaaataaggacgttaacgaaattttatatggctttatttaacgtagaaggttggtctattaagaccaaaaccgtcgcttttgataacaagactaataagtcttcaaaagataaaaaaaaaaataagagaaaaaatggcaaacttacaagagaacagaagttgaaagaagagacagaggctgagttgaaggaacaagtggaagacattgcttccgaaggatcagtagccaaagacatcccaaaaaaaaatcaagagaaaagtgatcaaaatgaaacgaacaagaaacgcaagcacgatgaagaagcccctctgatgcaagtaaaagaaaatattgaaaaacctacaaagaagcaactaacccctttacaacaaaagatgatggctaaactgactggttctagatttagatggatcaatgaacaactgtatacaattagctctgatgaagctttgaaattaataaaagaacaaccacaattatttgacgaatatcatgatggttttagatcacaagtgcaagcatggccagaaaatccagttgatgtttttgttgaccaaattcgttatagatgcatgaaacctgtgaatgctccaggtgggttaccaggtcttaaggatagtaaagaaatagttattgctgatatggggtgtggtgaagctcaattagcattagaaatcaacaattttttcaaaaattacaataagaaagcgaagaaatatttgaaaagacgccataaagtccacagttttgatttgaagaaagctaacgaaagaataactgttgcagatattagaaatgtgccgctaccagatgagtcctgtactatagtggtcttctgcctggctctaatgggtacaaatttcctcgatttcataaaagaagcttataggattttagcgccaaggggtgaattatggatcgcagaaattaaatcaaggtttagtgacggcaaaggtaatgaatttgtagacgctttgaagctgatgggattttttcacaaaaagaccttcgacgagaataagatgtttacaagattcgaatttttcaagccacctgcggagattattgaagagagaaggcagaaattggaaagaagacaaaagtttattgaagttgaaactgagaaggaagaattagaaaagaaaagacggaaaattgccgaaggaaaatggctcttgaagccctgtatttataaaagaagataa

SEQ ID NO: 81876 - DNA, 384 bp, Saccharomyces pastorianus
atgcattctctattacgggctttgaaaagcgatctcgctcgttataacgaactgaacttggataatgaattccatgaagattctggctggaaattgggccatggtgacgtatttagaaccccatctaagtcgatgctgctatccattcttgtgggatccggtatgcagttatttttgatggtcatgtgtagcattttttttgccgcagtaggtcttgtgtcacctgtttccagaggatccctgccaactgtaatgtttgttctttatgcattatttggatttgtaggatcctacgcctcaatgggtgtctacaaattttttcgtggaccctattggaaggcgaatatggacctgcagcagcaagcttgcactgccgtcgtttac

SEQ ID NO: 81877 - DNA, 879 bp, Saccharomyces pastorianus
atgaaacgaagtgtttggttgctgatttattgctatgcaactttaactaaaggattttccttgccaggcctatctcccacaacatatcactcaggcgatgaaatcccgctattggtgaaccgcttgactccatcaatttactttcagcatcaagatgaggaaggtaacgatgtttcaggcgataaagaacattttctttactcctatgattactataataagaggtttcatttttgtagaccagagcacgttgagaaacagccggagtcgttaggttcagtcatatttggtgacagaatttacaattccccattccaattgaacatgttagaggagaaagagtgtgttgcactttgtaaaagcacgattccgggaaaagatgccaaatttatcaacacgcttattaaaagtggatttttccaaaactggctcgtggatggattgccagcagcaagaaaggcttatgatagcagaacaaaaacaaactattacggcacaggatttgagttaggttttacagatgttaagcaaaccgttgacggtaaagcagttcccagtacgatggaagagcttacttcagaggcctcaaatgaggatgttatattggatgctcgacagcccaagaatgttaagcctaatttagttaaaacggtagaattaccttactttgtaaatcattttgacattgaagtggaatttcacgatcgtggtaacgataattaccgagttgttggtgtcattgtaaaccctgtatctatcgaaagatcgtcacctggcgcatgttctacaacgggaaaacctctgatactagacgaggataaggataacgaggtttacttcacttattctgttaaatttgttgcctctgatacagtgtag

SEQ ID NO: 81878 - DNA, 330 bp, Saccharomyces pastorianus
atgaaaacattcttcttgattgaggctggcagagccttgcaaatagtgacattccgtcctgtgattactactgttctattccaacgtttctcagtgagtttctccggtagttatttcacttgttgtacctcacggcttctatgggaaaattggcttttcaaattccttacagctttcgatcacgtgatccgagcttcaaatgacctttcgacgatgcgtttcatgattatgtatatatatgtatatatatatatatatctatacagtcttctggaagcgcttaagttgttaaatgctaatactttagggttgaatttattttacggataa

SEQ ID NO: 81879 - DNA, 213 bp, Saccharomyces pastorianus
atgtcactatttgcaaggctctgccagcctcaatcaagaagaatgttttcatctatatcttctttctctgctctatctgtgttacgcccacaaaccggtatgctcttaaacagttcaccattgaagaccccgtccttcacaccgttgggatttggcttaataggtcaaagaagatggaaatcaaggggtacacctatcaacctagtacattga

SEQ ID NO: 81880 - DNA, 105 bp, Saccharomyces pastorianus
atgcaccgcgaaggtatcggtggatggaagaagcgcatccctagtgtttccaaaagaaaaacgaaatgtttgacacatagacagatgacgagtagctttttttag

SEQ ID NO: 81881 - DNA, 2277 bp, Saccharomyces pastorianus
  modified_base (41)..(41): a, c, g, t, unknown, or other
atggggaagaaggatagacagcgcaagaaactgcgtgagtntgctaaattgaaaaacaggcagcgaaacttgagaaagagcgtgcaaacattgaagaatgaggttcaacgagaggctaaagtcccaggaacttcgaatcaaattgctttaggaaacgacaaaatcgaagagattaacgaaaatagtccgttattatcagctcctaataaaaaagaggaggtatcaattccgaaagcggttgatattggtaccattgatgcacagcctcttcacgaaggcccaaaaattgataactcgccccaaaatgaggtcaatagcattaaaggaaaacctgcggacaaggctaatgaagacgatcttaagccgccttcacaaaatgaaacatgtggaaattcagctttgcaaagctctattactgattttagtgatagatcagtatcaccattgcaaagtattaccagcggcaatactccgatgagtgagcacgagctaccagtatcttcctcaaattcgtttgaaagagctgatgatatgcctgtagtgcaggcagataaccagacgtcaagtagtaaatctttgcacattgttgcaccacctcctgaagtaccagtcagtggagatgaaatcacttcatatggatatggctctataccccagagcatcggggatgtagagaacggattgaatcctccttatgtcgaaaatacatcatctgatgaacttgtacatgatctgacgagaagacggatattttcatcctgtatgtgtacttatttattctttattgcaatggacagttctataatcctagtaattgcgtccaaaattgcttcggagtttcatgagttatggagattatccttagtcatctcagcatacctattgagtaatgctattgggcaactggtatttttgaagctatctttaatatccagtgtaaaattgttgttgtgtattgctcaattcagttttatccttggtggctatctatcttggagttctgcccatttttggacgtttatctttgcccgttgtgtcacaggatttgggggcggttccttaatagcgctcaaaagtactattatgaaccggttttctcaaaagaacgacagtcggtactcattgagtgcctctatgataacatttgctatgggtgtggtaattgggccctttatggtgaacttgtttgattcttctcatggtagcgggtggagaaatgccttcttaataccagttcctttttgccttgtgaatgcctcgattatgctggcagatatgtattctgttaagagcactttacatggaggcccaacgcctacattatggaaaagattcaagaatactctattaagtcctgatttatacgaaatattgacacttacgctattcctactttgtttcgttcaagtgacctcattggatttaacagggttaaagaataatacgatgattcaagcgctactattttctgtaattatcgtttgtggcattttatttttcttgatagagacaagcgatacttacatgaactctgtaatttcaatgtccttacaaggtgacaagcgtttaatatggacaatgatcggaatttcattttgctttgcagcattaatgtgcatcatcccattcggtacaacgtacttcatcattgttttaaatttaagcactttacaacttgcagagagattgtccccattctttttctccattgtactgggttactttagtgtttcttatttttggaagtcgaaaggacagaattttttgctaaaatttgttttaagcggagccaccctgttactatatgtggcacttatgggggtaagtttgaatttaccagtatggaagcaatatatatgtttgtctctgccatttttgggctcctctatgatattgaccttactgtcaaatctttatcatgagtatcatgaacaaagaaagtcacctatcagtggttctatcgtatattgtttcggtgccgtgggagggacggttggtatttccttgggtggttatgtcttccacaaaacattaataaaaattatgcatgagaaggtgatgccatttagcaagcaaggttatcttaaaaaggaccttttgaaaattatcaagcacgctacggaatcttcagattgggtacacgaatcagccccaaagtttgtttttcaaactttgattgagtgttatttacaagcatgtcgaaacgtattcaaactctctacccttttttttacgattactgtcgtagcaatattcattttcaacagaatccattga

SEQ ID NO: 81882 - DNA, 1182 bp, Saccharomyces pastorianus
atgtcaaattctccaacagtagcaactttgtcacaagaatatttcgatccgaatattcctcaaatactcccacacgagaaaatgtataagattcaggtggggaaatcattattcaaaatcagcggtgcttctttaagctcggatggtcctagtttcttcaccgaatatttttctaagaagcgctctccttccaataacgatgacagtaataacgatagcatggaatctaataaaaatgaggtcctattcatagacagatcagccgaagtttttgaatggatctatcaacatttgcaaggatatataattgagattaaggatgaagtacaatataccatgcttttcgcagatgcgatgtactacaatttaccgcgattgcgatctttactgaaagaaacggactattattttaccaacattggtggacaatcattcaagatagccaaaaatttatttagaagagaaggagattccccaaattatttcgaaatatatgcggctacagtttatatcgatgtggaagagctgataatatctaaaaaactattaaggcctccacctcattctgctccttacattccaagatcttctgagtacttcaaagatttgctgacgttactgggaggagcatccatcgatctagatgataataaaagaaatgccttgataaaagagtgccgttattacaggcttttaaatctcgaacagcggctaatcaaatctcatattagctataacccaataacaaggaaagaagagatttgcctcctattgaaggatttgtcaaaaaaaggcatcacttttccagcttcttctgcattttcaacctcgccctactttgaagacgatttctgtagcataaatgaatgcgactcgctatcaaaaacccgtgaacagccagcaaataaaaaggttaaacttgacatgactgaaaaatataacgattcctggaatatgctttgttataagagaccttttttagataagcatccgagagagttgatatttcaaataaattcgactgattgtacgataatcctcaataaggaaagccaaagtatccatgtagacataactggagaatccgcctataagtttgaggccttatttggaagtcatttgccaaatacaccctctggtgcgcctaagttgaaaaataccaggggatcctctagagtcgac

SEQ ID NO: 81883 - DNA, 3243 bp, Saccharomyces pastorianus
atggctggtaatcttgtttcatgggcctgcaagctctgtagatctcctgaagggtttggacctatatccttttacggtgactttactcaatgcttcatcgacggtgtgatcctaaatctatcagcaattttcatgataaccttcggtatcagagatttagttaacctttgcaagaaaaaacactctggcatcaaatataggcggaattggattattgtctctaggatggcactagttctgttggagatagcgtttgtttcacttgcgtctttaaatatttctaaagaagaagcggaaaactttaccattgtaagtcaatatgcttctacaatgttatctttatttgttgctttagccttacactggatagaatacgatagatcagttgtagccaatacggtacttttattctattggctttttgaaacattcggtaattttgctaaactaataaatattctaattagacacacctacgaaggcatttggtattccggacaaacgggtttcatactaacgttattccaagtaataacatgtgccagtatcctgttacttgaagctcttccaaagaagccgctaatgccacatcaacacatacatcaaactttaacaagaagaaaaccaaatccatacgatagcgcaaacatattttccaggattaccttctcttggatgtcaggtttgatgaaaactggctatgaaaaatacttagtggaagcagatttatataaattaccgaggaactttagtagtgaagaactctctcaaaaattggagaaaaactgggaaaatgagttgaagcaaaaatcaaatccttcattatcatgggctatatgcagaacttttggatctaaaatgcttttagccgcattctttaaagcaattcatgatgttctagcatttactcaaccacaactactaaggattttaatcaagttcgtcacagactataacagtgagagacaggatgaccattcttctcttcaagggtttgaaaataaccacccacaaaaattacccattgtaagagggtttttgattgcgtttgctatgtttctggtgggctttactcagacatctgtcctgcatcaatatttcctgaatgtcttcaacacaggcatgtatattaagagcgccctaacggctttgatatatcaaaaatccttagtgctatctaatgaggcttctggactttcctctaccggtgacattgtcaatctcatgagtgtggatgttcaaaaattacaagatttaacacaatggctaaatttaatatggtcagggccttttcaaatcattatttgcttatattctctgtataagttgttgggaaattccatgtgggttggcgtgattatactagttattatgatgccattgaactcatttttgatgaggatacaaaagaagttgcaaaaatcccagatgaagtacaaagatgaaaggacccgtgttataagtgaaatactaaacaatattaaatctttgaagttatatgcatgggagaagccttatagggaaaagctagaagaagtaagaaataacaaagagttaaaaaatcttacaaaactaggatgttatatggctgtgacaagttttcagttcaatatagtaccattccttgtttcatgttgtacctttgctgtatttgtttatactgaggatagagcattgactactgacttagttttccctgctttgactctgttcaacctgctctcattcccactaatgattattcctatggttttaaattcttttatcgaagcttctgtttctattggtagattatttacattctttaccaatgaagagctacaaccagattcggttcagcgtttaccaaaagtaaaaaatattggcgatgtagccattaacattggagatgatgctacctttttatggcaacggaaaccggaatacaaagtagccttaaagaatattaatttccaagctaaaaaaggaaatttgacctgtattgttggtaaagttggcagtggtaaaacagctctattgtcatgcatgttaggtgatctattcagggttaaaggtttcgccaccgttcatggttctgttgcttatgtttcgcaagttccatggataatgaatggtactgtaaaggaaaacattttatttgggcatagatacgacgcggaattttacgaaaaaacgatcaaggcctgtgcgttaactattgatcttgcaattttgatggatggagataagacattagttggcgagaaagggatctccttatctggaggacaaaaagctcgtttgtctttagcaagagcagtttatgcaagagctgacacttatttacttgatgatcctttggcagctgttgatgagcacgttgccaggcacttgatcgaacatgtgttgggtccaaatggtttattacatacaaaaacgaaggtattagccactaataaggtgagcgcgttatccatcgcagattctattgcattattagataatggagaaatcacacagcagggtacatatgatgagattacgaaggacgctgattcgccattatggaaattgctcaacaactatggtaaaaaaaataacggtaagtcgaatgaattcggtgactcctctgaaagctcagttcgagaaagtagtatacctgtagaaggagagctggaacaactgcagaaattaaatgatttggattttggcaactctgacgccataagtttaaggagggccagtgatgcaactttgggaagcatcgattttggtgacgatgaaaatattgctaaaagagagcatcgtgaacagggaaaagtaaagtggaacatttacctagagtacgctaaagcttgcaacccgaaaagcgtttgtgtattcatattgtttattgttatatcgatgttcctctctgttatgggtaacgtttggttgaaacattggtctgaagttaatagccgctatggatctaatccaaatgccgcgcgttacttggccatttatttcgcacttggtattggttcagcactggcaacattaatccagacaatcgttctctgggttttttgtaccattcatgcctccaaatatttacacaacttgatgacaaactctgtgttgagagccccaatgacgttttttgaaacaacaccaatcggtagaattctaaacagattctcaaatgacatatacaaagtggatgctttattaggaagaacatttctcagttttcgtcatgcagtgaagtcacattcactatac

SEQ ID NO: 81884 - DNA, 1107 bp, Saccharomyces pastorianus
atgagtgcgttctatccctctatcaatgctaaccgttggctagcatataggttggaacttattggttcaattatcattctaggtgctgcaactttatccgtttttagactaaaacaaggcacattaacggcaggtatggtgggtttatcattaagctatgctttacaaatcactcaaacgttaaattggattgttagaatgactgtggaagttgaaacgaatattgtttcagtggaaagaataaaggaatatgctgatttgaagagtgaggcacctttaatagttgaaggccacagaccacccaaagaatggccgagccagggtgatataaagtttaataattattccactcgttataggccggagcttgatcttgttctgaagcacattaatatacacattaaaccaaatgaaaaagttggtatcgtgggtagaacgggtgcgggaaaatcctcattaacgctagcattattcaggatgattgaggctagcgagggaaacatcgtaatcgacaacattgccatcaacgagattgggttatatgatttgagacataaattgtcaatcatacctcaggattctcaagtttttgagggcactgttcgtgagaacattgatcccattaaccaatacactgatgaagctatttggagggcattggaactttctcatttgaaagaacacgtgctatcaatgagcaatgacggattagatgcccaactaaccgaaggtggtggcaacttaagtgttggacaaagacaattattatgtcttgcaagagcaatgttggttccatcaaagattttggtgcttgatgaagccacggccgcagtcgacgtggagacagataaagtcgtccaagagacgattcgtactgctttcaaggacagaactatcttgaccatcgcgcatagactgaacacgataatggacagtgatagaatcatagtgttggacaatggtaaagtagccgagtttgactctccgggccagttattaagtgataacaaatcattgttctattcactgtgcatggaggctggtttggtcaatgaaaattacactgtgaaactaataaaaacctgtcccgcacaatctggtacgtag

SEQ ID NO: 81885 - DNA, 636 bp, Saccharomyces pastorianus
atgtatcgattctgtgcgcacgcatatcttcttttaaagtatgaaaaatatcacaatcaaaatcaacaactcaagaaattatgggctagctttcgctgtttgtttcgactggcagcctttgcattgccccgtaggtatcaaagcttctttgaagctgaattgatcttgaaaaatagcactttggagacgcgccttacgctttataggagacttcggagtagacttcgattaaaaaataaaaattacacaagaagttcaagtattatgtttaatattcaaacaacgtttccacctcacggagaaatgaagacttttatcgttctccgtgaggtggatttactgttattgtcgttagagttcatgaatgtttctcttgcgcgagcagatctactggtcaggaatctacattactttgcaatccatagtacgcttgttatgctgcatcaatacgaatatatatatctaatgctaacatctggtttctgtagatatcttggcgtgtgtttcttttatgataatacaaaaatatgtaactcctggtgtgatgcttgggcggtggaaggttacggcttagtaattacgaaattgatgaaaaaagttagcagctgctataaaaggtgcgataacctcttgtga

SEQ ID NO: 81886 - DNA, 231 bp, Saccharomyces pastorianus
atgtctcttttctcagaaagcggttctaggggaagaacaaggtatcttataatcgaacggacgcttaatgatatcaacacgatacctagtataaaaaccttacctcttcttttaataccacagacgcttgtattttctgaaatttctttagaaccaggtgaagtaagaacattctattttaaatccacaagctgccaaagatatatgcccagtatcatcgtcaaagtggca

SEQ ID NO: 81887 - DNA, 375 bp, Saccharomyces pastorianus
atggaaaatcaaacctggtccctaaaatcattactaggtgccttcaaaagaacaggcgaacctgaagagagtgtggatgtggataacatgaaaatgctaaatgagagtaagatgttaagagaaaaaatacagaagcaaatgtattttcatcaacctgtaacgttaatatccggttatgttcaaatatcgggggtctttcaatacgattcagaggtaatttcagagtcaaaatttaaacaagatgaagtaaaaatggtaggactagatattgtacctggacatacgacaaattctgttcttgcattggaagatggagaacatttcaaaggtaaaagaaatttaaccaactacctcaactcagattatacaatgtga

SEQ ID NO: 81888 - DNA, 210 bp, Saccharomyces pastorianus
atgattgttaaagtgaagacactgactgggaaggagatctctgttgagctgaaggaatcagatctcgtatatcacatcaaggaacttttggaggaaaaagaagggattccaccatctcaacaaagacttatattccagggaaaacaaatgtatgttcattcagtggttaattatcttttaagtttatttacgtttttgagaccttactaa

SEQ ID NO: 81889 - DNA, 603 bp, Saccharomyces pastorianus
atgaacacatcatttggctcagtagtgccttccactaatttcaattttttcaaagggcatggaaataatgataacactagtgccaatagtactgttaacaacagcaatttctttttaaatagcaatgaaacgaaaccttcgaaaaatgtcttcatggtgcactctacctctcaaaagaagtcgcaacaaccgttacaaaatctctcacactcaccttcctacacggaaaataaaccagataaaaagaaaaaatatatgataaacgatgccaagaccattcaacttgtaggtccactgatttcctctcctgataatttgggatttcagaagagatcgcacaaagcaagagaattaccaaggtttttgattaatcaagaacctcaattggagaaaagagcttttgtacaagatccctgggacaaggctaatcaagaaaaaatgatctcattggaagaatccatagatgatctcaatgaattgtatgaaacactaaaaaaaatgagaaatactgagcgatcgataatggaagaaaaagggctagtggataaagctgactcagcaaaggatctttacgatgctatagtatttcaaggacctgtttag

SEQ ID NO: 81890 - DNA, 834 bp, Saccharomyces pastorianus
atggccattgattactctaagtgggataaaattgaactatcagatgattctgatgtcgaggtgcatcctaatgtggacaagaaatcgttcattaaatggaaacaacagagtatccatgaacagcgattcaaaaggaaccaagatatcaaaaatttggagacacaagtggatatgtattctcatttgaacaaacgagtggacagaattttgagtaatttacctgaaagttctcttactgatttgccagccgttaccaaattcttgaatgcaaattttgataagatggagaaaagtaaaggggaaaatgttgatcctgagattgcaacatacaatgaaatggttgaagatctttttgaacaattagcaaaagatttagacaaagagggcaaagactcgaagagcccatctctcataagggatgctattttgaaacatagggctaagatcgattcagtaactgtagaggctaagaagaaattagatgaattatacaaggagaaaaatgcacacatttcatctgaagacattcatacaggctttgatagtagctttatgaacaagcaaaaggggggggctaaaccactggaagcaactccttcagaagctctttcgagcgctgcagagtctaatattcttaataaactagcaaaatcatcagttccgcaaactttcatcgattttaaagatgatcctatgaaactggccaaggaaactgaagaattcggtaaaatatccattaatgagtactcaaaatctcagaaattcttactggagcacttacctattatttcagacagacctgcaggcatgcaagcttggcactgccgtcgttta

SEQ ID NO: 81891 - DNA, 279 bp, Saccharomyces pastorianus
atgatgagaatgtctctaaaacaaatgcagtcacagagattttctgcgacttctcgagtgagaatgttgcttattggtgctagtggcttgagatcttcgtcaagcaaattggaatgcccccagattctcaaacaagcacggcagaaactgaaatacggccaaaattatgaacccttttgtgggatctttgtagaaataggacctcaggatagtatgatgaagaatgttggcatgctatacaatactacagtcatttgcatgaattggctgcttgtatag

SEQ ID NO: 81892 - DNA, 714 bp, Saccharomyces pastorianus
atgtcggattcaaaccaaggcaacaatcagcaaaactaccagcaatacagccagaacggtaaccaacaacaaggtaacaacagataccaaggttatcaagcttacaatgctcaagcccaacctgcaggtgggtactaccaaaattaccaaggttattctgggtaccaacaaggtggctatcaacagtacaatcccgatgccggttaccagcaacagtataatcctcaaggaggctatcaacagtacaatcctcaaggcggttatcagcagcaattcaatccacaaggtggccgtggaaattacaaaaacttcaactacaataacaatttgcaaggatatcaagctggtttccaaccacagtctcaaggtatgtctttgaacgactttcaaaagcaacaaaagcaggccgctcccaaaccaaagaagactttgaagcttgtctccagttccggtatcaagttggccaatgctaccaagaaggttgacacaaaacctgccgaatctgaaaagaaagaggaagagaagtctgctgaaaccaaagaaccaactaaagaggcaacaaaggtcgaagaaccagttaaaaaggaggagaaaccagtccagactgaagaaaagaaggaggaaaaatcggaacttccaaaggtagaagacctcaaaatctctgaatcacacataataccaacaatgccaatgttaccagtgctgatgccttga

SEQ ID NO: 81893 - DNA, 780 bp, Saccharomyces pastorianus
  modified_base (767)..(767): a, c, g, t, unknown, or other
atgtttggtggtaaagatcacgtttctttaattttcatgggtcatgttgatgccggtaaatctactatgggtggtaatctactatacttgactggctctgtggataagagaactattgagaaatatgaaagagaagccaaggatgcaggcagacaaggttggtacttgtcatgggtcatggataccaacaaagaagaaagaaatgatggtaagactatcgaagttggtaaggcctactttgaaactgaaaaaaggcgttataccatattggatgctcctggtcataaaatgtacgtttccgagatgatcggtggtgcttctcaagctgatgttggtgttttggtcatttccgccagaaagggtgagtacgaaaccggttttgagagaggtggtcaaactcgtgaacacgccctattggccaagacccaaggtgttaataagatggttgtcgtcgtaaataagatggatgacccaaccgttaactggtctaaggaacgttacgaccaatgtgtgagtaatgtcagcaatttcttgagagcaattggttacaacattaagacagacgttgtatttatgccagtatccggctacagtggtgcaaatttgaaagatcacgtagatccaaaagaatgcccatggtacaccggcccaactctgttagaatatctggataccatgaaccacgtcgaccgtcacatccatgctccattcatgttgcctattgccgctaagatgaaggatctagggtacatcgttgaaggtaaatngaatccggtccta

SEQ ID NO: 81894 - DNA, 1020 bp, Saccharomyces pastorianus
  modified_base (1005)..(1005): a, c, g, t, unknown, or other
atggatacggtaaacaattatagggttttagagcataaagctgctggccacgacggtactctaacagacggtgatggattgctcatctttaaaccggcctttccgcaggaactggaattctacaaagccatacaagtgagagatgtgagtcgaagaaagtcttcggctgatggagatgctcccttgtgctcttggatgcccacgtatcttggagtcttgaatgaaggggcaaaaatcgagcaaagtggcgatgctgcgcttctgaagatagatgagcggttaagtgattccactgataatcttgattcaatacctgtaaagtctgagaagtccaagcaatacctcgttttagaaaatctactatatggatttagtaaacctaatatacttgatataaaattaggcaaaactttgtatgattcgaaggcatcattggaaaaaagagagagaatgaaaagagtcagtgagacgacgacttcaggatctttgggtttcaggatatgtggcatgaaaatacagaaaaatccctctgtgctgaatcagctttcgctcgaatattacgaagaagaagcagacagtgattatatctttataaacaaactgtatggtcgttcaagaaccgatcaaaatgtttcagatgcaattgaactttattttaacaatcctcatctgtcggatgcgagaaagcatcaactgaagaaaacatttttgaaaagattgcagttgttttataatactatgctagaagaagaagttagaatgatatcaagtagtcttttgtttatttacgaaggagacccggagcgatgggaattactaaacgatgttgacaaacttatgcgagatgattttatagacgatgatgacgacgatgatgataatgatgataatgatgatgatgatgatgatgccgagggaagcagcgaaggaccaaagaacaaaaaaacaactggttctttgagttccatgtcactaatagattttgcacattctgaaataacgccnggggaagggttatga

SEQ ID NO: 81895 - DNA, 513 bp, Saccharomyces pastorianus
atgatgttgccaagatccatgaaatttatgactggaaggagaattttccatactgccacagtaagggccttccagtctaccgctaagaagagcttaactatcccatttttgcccgtattaccccagaaaccaggtggtgttaggggcactcccaatgatgcctacgtccccccccctgagaataaattagagggctcataccactggtatatggaaaaaatctttgccttgtccgtcgttccattggctacgacggctatgctgacaaccggtccgttatccactgcagctgattctttcttttctgtcatgcttttgggatattgttacatggaatttaactcttgtatcaccgattatatttctgaaagagtttatggtgtttggcacaagtacgccatgtatatgttgggacttggttctgcggtctccctttttggaatctataaactagaaaccgagaatgatggtgttgttggtttagtaaaaagtctatgggattcttccgagtaa

SEQ ID NO: 81896 - DNA, 138 bp, Saccharomyces pastorianus
atggacactgtcggtacggacgcagcagccgcgagcattaatgagcgtcgctttgcccagtccacttcaccaaaagttagtgtgaagtcacaggactcgctgtttctgatccgtatagtgagtcgtattatgcggccg

SEQ ID NO: 81897 - DNA, 1728 bp, Saccharomyces pastorianus
  modified_base (1637)..(1672): a, c, g, t, unknown, or other
atgtcattgcaattgctgaatccgaaggctgaatcgttgagaagggatgcggctttgaaggttaacgtcacatctgctgagggcttacaatccgtcctagagaccaacttgggccctaagggcacgctaaagatgctggtggatggtgctggtaacatcaagctgaccaaggacggtaaagtgttgctgaccgagatgcagatccagtcgcctacagcggtactgattgctagggcagctgccgcgcaggatgaaatcacgggcgatgggaccacgacggttgtgtgtcttgtgggtgaattgcttagacaagcgcaccgtttcattcaagagggcgtgcatccgcggatcatcactgatgggtttgagattgcgcggaaggagtccatgaaatttttggacgaattcaagatcagtaagacgaacctttccaatgatagagagttccttctgcaagtggcccggtcgtcgctgctaaccaaggtggacgctgacttgacggaggtcttgacgcccattgtaacggatgcggtgctaagcgtgtacgacgcgcaggctgacaatttggatttacacatggttgagatcatgcagatgcagcacttgtctcctaaagataccacttttattaagggtttggtattggaccacggtggtaggcatcctgacatgcccacccgtgtgaagaacgcgtatgttttgattttgaacgtatctttggaatacgagaagactgaagttaactctgggttcttttacagttctgcggaccaaagggacaagttggccgctagtgagaggaagtttgtggatgccaagttgaagaagatcatcgacttgaaaaacgaagtttgcggcatggatccagacaagggttttgttatcattaaccaaaaaggcattgaccccatgtctttagacgtgtttgccaaacacaacatcttggctttgagaagggccaagagacgtaacatggaaagattgcaattggtcactggcggtgaagctcagaactctgtggaagacttgtcgcctcagattcttgggttttctggcttggtctaccaagaaaccataggcgaggaaaaattcacatacgttacagaaaacactgaccccaagtcttgcaccatcttaatcaagggctccacacattatgccctcgctcaaacaaaggatgcggtgagagatggtctcagagctgtggcaaacgttctcaaggacaaaaacatcattccaggcgctggtgcgttctacatcgccctttcgagatacctaagatctgccaacatgaacaagttgggtgccaagggtaaaacaaagacaggtattgaggcgttcgcagaagcattgctggtaattccaaagactttggtgaagaactcaggattcgacccattggacgtgctcgcaatggtggaggacgagttggatgacgctcaggattctgacgaaacgagatatgttggtgtggacttgaacataggtgattcttgcgaccctaccatcgagggtatttgggattcctaccgtgtactaagaaatgctattaccggtgctacaggtattgccagcaacttgttattatgcgatgaattgttaagggcaggtagatccactttgaaagaaacaccacnnnnnnnnnnnnnnnnnnnnnnnnnnnnnnnnnnnngaacaagaacacgaatactagtagtaacagtaatcagatacaaaaattctatgtaa

SEQ ID NO: 81898 - DNA, 1965 bp, Saccharomyces pastorianus
atggctgtggaggaaattgcgtcccgcaaggacattagtttaagagatatgcaaatctctgccatattaaaaatgctgtttttaaataaggatttgaacaacaacgacaacatcaccaccatcacagacgatatttttaaccagcaggagatcatctggaaggtgttgatactggacatcaagagcactgctaccatatcttctgttctcagagtcaatgacctgctgaaagctggtatcaccgttcattccctgattaaacaagacagatctcccttgccagatgtccctgccatatatttcgtctcccccacaaaggaaaacattgacattatagtcaatgacttgaaaagcgacaagtattctgaattttacatcaactttacctcatctctgcccagaaacctcctggaagatttggctcaacaagtctccatcacgggtaaatctgataaaatcaaacaagtttacgaccaatacctggacttcattgtaactgaaccggaactgttctcactagaaatttcaaacgcatacttgacattaaatgacccgaaaaccacagaagaggaaatcacgggcttatgcgccaacatcgcggacggtttattcaacactgtcttaacgaccaattctatccccattataagagctgctaagggtgggcctgctgagatcatcgctgagaaactgggcacaaaattacgtgatttcgtcatcaataccaattcctcctccacttccactttgcagggaaatgattctctggaaagaggagtgttgattattttggatagaaacatagattttgcctccatgttttcacattcgtggatttatcagtgcatggtctttgatattttcaaattatcaagaaacaccgttactattccacttgaaagtaaggaaaacggaactgacaataccaccgcaaaaccattagccacgaagaaatatgatatagagccaaacgattttttttggatggaaaactctcatttgccattcccagaagctgcagagaacgttgaagcggcattgaatacgtacaaggaggaagccgcagaaattactaggaaaactggtgttaccaacatatcagatttggacccaaactcgaataatgatacggttcaaattcaggaagtcgtaaagaaactgccagagttaacagctaagaaaaatactattgatacacatatgaatatttttgctgcattgttgtcacaattggaaagtaaaagtcttgatactttctttgaagttgaacaagaccctggaagcaccaaaacaagatctaggtttttggatatactaaaagatggtaagacaaacaatcttgaggacaaactgagatcgtttattgttctttacttgacatcaacgacaggcttaccaaaggattttgtccaaaatgtggaaaactatttcaaggaaaacgattacgatatcaatgctttaaaatatgtttataagctaagagagttcatgcaattatcaaatatgtcgttacaaaataaatctttggaagatggatccgattccgctttcaaaccaagcaacttaacattatccggtatctatggcttaactgaaggcaaattacaaggaggtgtaggaagtttaatatcaggtattaagaagttactgcctgaaaagaaaaccatcccgataacaaatgttgttgatgcgataatggaccctttaaacagctctcaaaaaaatttggagactactgacagttacctatacatcgacccaaaaattacaaggggttcccataccagaaagccaaaaagacaatcttataataagtcactagtgtttgtagttggtggcggtaactacctagaatatcaaaacctccaagaatgggcacattcccagttgcataatcccaaaaaagtcatgtatggtagcacagccattagacctgcaggcatgcaagcttgcactgccgtcttt

SEQ ID NO: 81899 - DNA, 669 bp, Saccharomyces pastorianus
atggtcgctatcagtgaagtcaaagaaaatcctggcgtaaacagcagtaattctggtgcagttacgagaactgcggcacatacacatattaaaggtttaggtctggatgaaagtggtgtggccaagagggttgaaggagggtttgttggacaaatagaagctcgtgaagcgtgcggtgtaattgtagatttaatcaaggctaaaaaaatgtcaggtagagctatcctattagctggtggcccttctacaggtaagacggcattggctctcgccatttcacaagagttaggcccaaaagttccattctgtcctcttgttggtaccgaattatattccgtggaggtcaaaaaaacagaaaccctaatggaaaattttagaagagcaattgggttaagaatcaaagaaactaaggaagtttatgagggtgaagtgacagaactaacccctgaagacgcagagaatccgttgggcggatatggtaaaactatctcacatgtaattgtcgggctcaagtctgccaagggtaccaagacactaagattagacccaacgatatatgaaagtattcaaagagaaaaggttagtattggtgatgtcatttatatagaggccaacaccggtgcagttaagcgagttggcagttcctttagtgaggttaatgcggccgcg

SEQ ID NO: 81900 - DNA, 1008 bp, Saccharomyces pastorianus
atgtcaagctcaatacctagagtttactctctagggaactcagccatgacgtacttactagcattgagaattgcacaactcccgagtcaaccaaaggttccatcagttgttcttcttttaaacgaccagaagaaactgaatagattcctcaataatgactctaaaattattgttaaatcgagtaataacaataaagaaatttatcatagacagtttatggcatcttgtgtcccgcccattctaagcaatggtgaaattgcaccaattgaaaatttaattgtctcagatccctcttcgaaatttatcactgcccaactttctaaatacaataaatctttgagacccgaaaccaacattctgtttttgaatccaagcttaaatctattggaacatttgcatagatatcgatggcgctttgatgaggcaagaccaaacttgttcatgggctttacaacaccagttgacgttgggaccatacatcaagaatttcaactgtctctcaaagtgaaaggaaggatacaatttcatattgcaaagattgatggttttcctcgaatgagtagtgctggtaaaagtgcgagtctttctttaagaggtgacaggcagaaaaatgaaaaagaaaataatacgttttataagttgtttagggaaatttccaggctacgatctggaataggttccgatctagttagttttgatttgcatgttcatggtttccaggatttgttcttcactgaactggagaaattgatattggagagttgtaccgagccattattggcagtatatgattgcgtatataaaaaggaacttttgaaaatccccggagcacaagatataataaaaaagttgattagtgagcagctgtcaattatcgatcgatcctacccctcactaaacaccaacccaaactattctgtaatctttgacaaggagagaatatttagcttggtgatgagagatctagaagtaatgggcacaagcgcgctaagttggcccaatctttaa

SEQ ID NO: 81901 - DNA, 1416 bp, Saccharomyces pastorianus
atggaaggaaaggtcgatgtcttgctaacatggctgaaaaaatcagataagttttatatagcaccaaacatcagcatctgtgaatcgccagaaactggcagagggatcgtcctcagtcacggttcgataagaaaaaacgatatcattgtatcagtaccgagctccaagcaactaaattttcacactatcctctatcatatttcaaagtttaataaagagctgaatattcctggtatcacaatcgatagaaagccaatcaattatgaggacaatattattgaagcggaaaataaagcctgggccgatcctagatatggattatattccgaattatcgaaagagtttttgttaagtttatcatcatttcaattggtatcattttatatattggttgaaaattttctattgccaaaatggactcacaatgaaatctactcagattggaaaccattctttgatgtatggccctcaatggaggagctgcgatcaatcccagccatttggaactgtgatcccaattcacggtaccattcactgattgaatatctccctgctgcctcacgaaagcatatggcaagaattagtggccttgtcagagaagattgggaaaccatttcagaggtggttttgaaatggaatgaaatttacggctccttaagctgtacgaaaaattctgataaatttactaatgatgagttattctccctttttgtacatgtttattttattataaactcaagatgtctttatgcgaagattccgttgaaaatagaggactcctcaagcaatttcactttagtgccgtatgtcgatttcatgaaccacatttgtgagtcggatttgcactgctatcctcagttaagtcctcagttgaggtcagaaggagaaaacatcattggaattggacaatttaccattagatgcggcgatcacctctatgacaacattaacgaggagctctttttgaattatggtgcacactcaaatgattttttactgaacgagtatggatttgtggtagacggaaacaaatggaactacttagacatatctgacgaaattattgaattaatagacgacgacaaaaaggaggtaaaaacgtttctattggaacatgattattggggagattacactatcaatgagactgatatcagttataggatattcgtagcattaaactattatgtgacgagggatgaaaggagggttcgaaaattcattgaaggttacatatcagaagattacttcaagccaaaaatctcttcagttttaaaagaattattggtctccttaactgcaaaatatacaaagacgcttagcgagttgacagaaaaagtatctaatattgaggataacctctgcttacaacttaattaccagggatcctctagagtctacctgcagcatgcaagc

SEQ ID NO: 81902 - DNA, 678 bp, Saccharomyces pastorianus
atgagtgttgatttgtttccaaatgatagatttggtgcagaagataaatacgacaactttaaggatgccgtaaaagaatgctcctggctcatcgaagaaatcgtcaaaccgcaattacccaacattattgacaacttttctaaatgcctagagatgctagagagtgaccaaatattcaaaatgcctgtatctaatggtattcccaacgaaagtaacaaacaaaacgactctccgacggtaaagggtgttatcacaagacaaggccaatacattgttgactttcacattgttgtcagattcccacaatttcaaaggggtaaacaagtgatgttccgaatgaatacgggactgaatttcttacttattcaattcagtaagataatgacgcacttgaaaaatattttggaaatactgaatcaacttcaagtagctacagatgtcagcgaattcgtatccaaatttggcgtggccatggaacttttgaaccattctctaatacttttacaaaatcctcctagagacctggtattcccagaagataacaactttgctatgaaggaaatgttccaggattgttactcagtctgcgaatccacagctcacatcctaggactggaacttacgctttgtaggaatgagctttgcctagaactacgaaatctaattacaggtgactaa

SEQ ID NO: 81903 - DNA, 546 bp, Saccharomyces pastorianus
atgttaaggttatctttactgagatcaacagctactttgccagtgaaatgccaacgtcgtgggctaatattacctgcggcggcaatgtacaccttaggctcattaatatttggtaaggaagcaaggttggcggatgccatggaacgtggtgagttacataacaagaacgttgattatgcgaaagaagctgaagagcgtaccgagttacgtattagggccctggctaatactcggccaatggaacctcggtacaacggccatgttccccttcatcggtacgagaaattgctgctgtttgcaatttccggttggaattcatttttccatcctgaagatggttataatattgtacaattgggtgaggcaactgcattgccggtcttcttggagaatttgaagcaaacaatgttaagtgattcctctgggaggcgcattttgaaggaacaacccaatatcacaacagagatcttgcatatggaccaactagctaaattgccacataacacgtttgggtatgatatgaccatggtggaaagagaaacgttc

SEQ ID NO: 81904 - DNA, 1905 bp, Saccharomyces pastorianus
atggctggaaaaaagggacaaaagaaaagtggacaaggcaaccatggaaagaactctgatatggatgttgaagatcgtctccaggccgttgtcttgacagactcttatgaaactaggtttatgccactgacagctgtcaagccaaggtgtttgctgccactggctaacgtacctctcattgaatacaccttagaatttttggctaaggctggcgtacatgaagttttcttaatttgctcttctcatgccaaccaaattaatgactatattgagaattctaagtggaacttgccttggtctccatttaaaattaccaccattatgtctccagaagctagatgtacgggtgatgttatgagagatctagataatagaggtatcattactggagattttattttagtcagtggtgatgtattgactaacatcgatttcagcaaaatgctagaatttcacaaaaaaatgcatttgcaagataaagatcacatctcgacaatgtgtttgagcaaagcgagtacctatccaaaaacaagaactattgagcctgccgcatttgtcttagacaaatccaccagtaggtgtatttattaccaagatttaccattaccaagctctagagagaagacttccattcagattgacccagaattgttggataatgtcgatgaatttgtcataagaaatgacctcatcgattgtagaattgacatttgtacatctcatgtacctttgatatttcaagaaaattttgactaccaatcattaaggacagactttgttaaaggtgtcatttcaagcgatatattgggaaagcatatatatgcctatttgacggacgaatatgctgtaagagttgaaagttggcaaacttacgacaccatttctcaagactttttaggtagatggtgttatcccttggtcttagactctaacatacaggacgatcaaacgtattcttatgaatcaagacatatatacaaggaaaaagacgttgttttggcccaatcctgtaaaattggtaagtgcactgcaattggatcaggaacaaaaatcggagagggtacgaaaattgagaattccgtgattggaaggaactgccaaatcggtgaaaatattagaatcaagaacagtttcatttgggatgactgtatcatcggaaataacagtataattgaccattcgttaattgcctctaatgccacgttagggagtaatgtacgcctaaatgatggctgtataattggtttcaacgttaaaattgatgataatatggatttagatagaaacacaaaaatatctgccagtccattaaaaaatgccggctcaagaatgtatgataatgaaagcaatgagcagtttgaccaagaccttgatgatcagacactagccgtttctattgttggagataagggtgttggttatatttacgaaagcgaggtgtctgacgatgaagatagttctacagaagcctgcaaagaaataaacactttgagtaaccaattagatgagttatacttaagtgacgattcaatttcttccgccactaaaaagacaaagaaaagaagaacgatgtctgtcaatagtatatacacggatagagaagaaattgattctgaatttgaggacgaagattttgagaaagaaggtattgccaccgtggagcgtgctatggaaaacaatcatgatcttgacacagcattattagaattgaacaccttgagaatgagtatgaacgtgacatatcatgaggtgagaatagcaacaataactgcattattgagaagagtttaccactttattgcaactcaaacattaggtcccaaggacgctgtggtgaaggttttaatcagtggggactgttgttcaagagacaagcctttgatgaagaagagtatattgatttga

SEQ ID NO: 81905 - DNA, 1122 bp, Saccharomyces pastorianus
atgtcccaattattcaataactcgcgctcagatacccttttcctaggaggtgaaaaaataagtggtgatgatattcgtaatcagaatgttttggctactatggctgtggctaacgtcgtcaagtcatctttaggccccgttggactggacaaaatgcttgttgatgacattggtgattttaccgtcaccaacgatggtgccactattttgtctttgttagatgttcaacatccagctggaaaaattttagtagaattggctcaacaacaggacagagaaattggtgacggtactactagtgttgttattattgcttctgagttgttgaaaagagctaatgagttagtcaaaaataagattcatccaactaccatcataactggtttcagggttgcattaagagaggctattcgttttataaatgaagttctttccacaagtgttgacactttagggaaagagacgttaattaatatagccaagactagtatgtcctctaagatcattggtgctgactctgattttttcagcaatatggttgtagatgctcttttggctgttaagacgcaaaattccaaaggagaaatcaagtatcccgtaaaggctgtcaatgtgttgaaagctcatggtaaatctgccactgaatcactgttggtgccaggttatgctttgaattgtacagttgcttctcaagcaatgcctaaacgtatcgccggtggcaatgtgaaaatcgcatgtttggatttgaacttgcagaaagctcgtatggcaatgggtgttcaaatcaacattgatgatccggaacaattggagcaaatccgtaaacgtgaagctggtattgttttggaaagagtgaagaagatcattgatgctggtgctcaagttgtgttaaccaccaaaggtattgatgatttatgcttaaaggagttcgttgaagctaagataatgggtgtaagacgctgtaagaaggaagatttgagaagaattgcacgcgctacaggcgccactttggttagttctatgtctaacttagaaggtgaggaaactttcgaaagcagttatttaggtctttgtgatgaagtagttcaagccaaattttctgatgatgagtgtatctattaa

SEQ ID NO: 81906 - DNA, 933 bp, Saccharomyces pastorianus
atgttcccaatgaaagatcactcagctcttgaacaacatactctcagcagagatgagttaagacgtcgcaagggttacaagaaagggctgcagttgtcaattttgttacttggagaaaaaggcagcggcaaatcaacgtttttaaacaatctgtgcggtcaggatatatcgctttctgatggggattatgatgatgatgatgataaagtgacaaataatgtaacaccagaaaatggaaacgccatcgaagatatagatcctggatataaaacagcccatttgagtcctgggctgaagcttgtcaccagaagagtgtatttgaacgatgaactaggcgtacccataacattagatatcatattgtttccaggctgcggtgacaatgtcgacaattcacaaagctctgttgttataaaaaactacttagaccaacagtttgcaaatgttttaaaagaagaggtcagaataaagagaaacacaaaagaaactgatgggaggcctcatgtttgtttatactttctgaagattactccaagaggagtcaaaaaatttgatattgagttaatgaaaacgatttgtgataaagttaatttaattcccattattccaaaagccgatggtctcacagaaactgaattaaatttacacaaagacattgtgcgccaagaaatctctcagaacaatatacgtgtttttgattttaaaagtgacaccctaggcgaaacattagctctgtacgatatggacatcgattccagttcagcaaaatccaaatacgataatgacacgaagatcaaggaaatatcgccatttgccattgtttgcagcaaaactttaataaaaattcggaaaatagggttgagcatatcagaacgtacgaatggggtagctaggtggtcgaagaccaaagcacctccgattttatatacttaa

SEQ ID NO: 81907 - DNA, 333 bp, Saccharomyces pastorianus
atgacattattttcttgtagtgtacagatgccgctggaggaaaggtccctgacaaacttaccattaaacctattgttccgaatattgtctcacctggatatgaatgatttacaaaacatagggaaaacttgcaccttgctgaggatgctggcgaatgagaacattgtttacagaaatgctgttatcggctcaaacgggaatatgtggtggacaaaaaatgttcttgttgatgtctttgatgttttgaattttaatagaaaggcaatgaaaaccttaaatagtcacaacatatccctggtcgcatcattaagaaatgttcagcggaaagtataa

SEQ ID NO: 81908 - DNA, 933 bp, Saccharomyces pastorianus
atgttcagcggaaagtataaactaggcgttattgatccggctagaaagacaataagttatagaacaaatgaagttgagagcaaagaaaagggctctgtgaaagatttaaatatggatttgaacgaacctacagaaataacaagggagcaaatcgctcatactgcaatactacaaggaatgaatcaattcatcgaactcaatgataaagcatttaggacccattcagcggattctgatgatacatacatagaggagaataatggagaaatacattctctccacggattggaaaaaaatacaacatttgaagaagacttagtcaaaaagccaccttttatcccttctccgacattttctaattattctagaagttcaacaaattctgtattttcaagttcatcgcccaaactactggacgatgattggaataatattacaatggatttcactaagtcacgagatcctgattataaagagatgacgcctacatctactgaatcgtctgactcaatcacaagattgagaaaatctaataaagtcaaggataaagccgaactttttgagaagttaatttttagagatagcagaccattaaaaacaaagaaaaaggacaatccaagattgaaattatccagttcgttaagtgctaatgacgaagattttaggaaaatcataagtcccccttctgacatactaccgaaagtaggcagaaggagcgtctcaagaggttatttcgaggagattgaaaggcattatcccgattttaacggtgaaacaactaatcctctagcaattaaaagagatcacagtaccaagatagcaaattatgaacaattaattataaaagaacatagctcgaactgtaaaggaataacagagacaaatgatgaaaagaaatttcaaagaagtcacacttcccccgtaatcgaatta

SEQ ID NO: 81909 - DNA, 1977 bp, Saccharomyces pastorianus
atggtgagcatgttctcattatttctgctattaattgagcaatcgccgcttgtagcgtcattgcaacaaagtcaacggcatatagtgggtgttccctgggaaaagcagcacttgtatgactcgaatgaaccagatttgactaaatggcactgtttgaaccacgaagatatcgtattggatataagccagataaatgatggggtttgtgattgtcctgatggttcagatgagcccggcagcgccgcctgcgtggaagatatattcaaaagcgttgcagagggaggtggtaaagtgaataagtatttttattgtgataacaaggggtttattccaagatatatacgaaaatcggaagtcgcagatggtatttgtgactgttgtgactgttctgacgagctactttctggatatgagctctttgatgctggatctaattgttctcagtttaagaatgaatttgacattatggcctctaaagagttatcaagttaccgggaagggaaagaggccctagatgaactggaaagaaaatacggtacaaaggaagaggctatcacccgtggtaattgcttagaagaagataaggaaaaggcttctgccgagataaaagtactctccaacaggctctcagaaaatcgagccaaattagagcagttgagaggcgagtactttaaccaattaagccatgatcccattttgtatcaatttgaacaattaaacagtactcgtttgggatcggacatccttacatcgttcactatggtttcaagagtaagtaaaggttaccaggacatattcaagattttaagtgatttatcagaggcctatactccctcgctaaatgataaagttgtcaatgataatattaaaaaattcagaaaagttagaagacgggctgaaaaggctaaaattaatgcagatagcaaaattgatgatgagcaggcagataatctttacttgtactttacagaagaagtacctcaaatttttttgaaaagagaatctgagaacacgttgaggtacgtcataggaaaatccaattttgttcaagcgctagtggagggtaaaattaactataccaacgatatcttggagtatatcagagaattccgtttgattatggatgatatttctcagaattacaatgtcaactttcaagatgcaggggtcaaaagtactgtcgattcgtataaaaactacctaggtgaatacggcgaactggctgaattagaaccagttcacccgtcagagagccttttgagatcgttgagcgaagtaacatcatttgtgaacgagaatgcaccaaaggtattgccaccggacgctgttgagtcagaacaagatacgaacagcgatcatatcggtacttctggagatttgcgcaataaactcaaagagattctatctaagctgaatattttttcatctagaaaagatttggtctcattagagaagagattccgctcttgtgaaagtcaagtcagtctcctggagaatgaattaaagcaaaaaatggactataagaaattattagatgaaactgaagatgaaggaactaattctactgcaggaaatctgactgagcttttagaactaatgggatcacaatcctattgtcttgacgacatactggacaactatgtgtacactatatgctttcaacgtccaatgaccgaaggtgtcatatatcaagctgaggataaggttgacggtaaaaaagttttgatcggtcgttttaagacatcaggttttaatgttgacttaaacatggaaaaatacgcagaacatttaaaggccacatatgatgagaagagtgatttgatttcaaacttagcagctatacaggacgatgacggtaacatgcaacattacgtattcgggaacttaaacgaactgaataatggtctggtactagaatacgaaatggagaccagtgctggaatggtccgcgcagatcggcttgtatttgttcggtga

SEQ ID NO: 81910 - DNA, 1656 bp, Saccharomyces pastorianus
atgacaataagacacccaataggtccagcactcccaaatttactaaaaaaccagttaaccccgaatgataaaattcctgaaagagaagaaaaatccaatgaagtgaagacacctaaaattccattattcacgtttgccaaaagcaaaaactattcaaggccgtcaaccgcaattcatacctcacctcatcaaccaagtgatgtaaaaccgacttcccataaacagttgcaacagccaaaatcctcaccactgaaaagaaataactataattcttttcctcactcaaatctggaaaaaataagcaacagcaaactactctcccttcttcggtccaaaacgtcagcaggaagaattgaatcaaacaatccttcacatgatgctagcaggtctctagcaagttttgaacaaacagcattttcccggcatgcgcagcaacaaacttctaccttcaattcaaagcctgtacgtaccatagtaccgatatcaacatcacaaaccaataactcatttttatcaggagtaaaaagcttactaagtgaagagaaaataagggattactctaaagagattctaggcataaacttggcaaacgaacagcctgttttagagaagccacttaaaaaaggatcagcagacatcggcgcctctgtgatttctttgaccaaggacaaatctatcaggaaagataccgtagaagaaaaaaaagaagaaaagttgaatataggtaaaaactttgcccattctgattcactatcagttccgaaggttagtgccggtgacagtggtatatcaccggaggagagcaaggcaagaagtcctggaattgcaaaaccgaatgccatacaaacagaagtgtatggaataaatgaggaatctactaacgagcgtttagaaataaatcaagaaaaaccagtaaaattagatgagaatagtgcaaatagtacggtcgcatcggccttagataccaatgggacgtcagccacgacagaaactctaacatcaaagaagatcgttccatctccaaaaaaattcgccattgatcaagataaaataacactgcacgatgagaaaacacttgcaccttcgaagcatcagcctataacatctgaacaaaaaatgaaggaagacgccgacctcaagaggatggaaatcttaaagtcacctcatttgtcgaaaagtccagctgacagacctcaagggcgtagaaacagccgaaatttttccactagagatgaagaaactacaaaacttgcttttcttgttgaatatgaaggccaagaaaacaactataactctacttctcgaagcacagaaaagaaaaatgatatgaacacttctgcaaagaataaaaatggtgaaaacaagaaaattggtaagaggccgcctgaaatcatgagcactgaagctcacgtaaacaaagtaaccgaagaaaccacaaagcagatacagagtgtacgaatagatggtcgaaaagtgcttcaaaaagtacaaggagaatcccacattgattcgagaaacaataccctgaatgttacaccatcaaagaggccccagctaggagaaataccgaatcctatgaaaaaacataagcctaatgaagggcgaactccaaatatctcaatacggtacaataacatccaaaatattagagcctaa

SEQ ID NO: 81911 - DNA, 75 bp, Saccharomyces pastorianus
atgccaaatgacaataagacacccaataggtccagcactcccaaatttactaaaaaaccagttaaccccgaatga

SEQ ID NO: 81912 - DNA, 897 bp, Saccharomyces pastorianus
atgctacgatcaaccacacttactcgttcgttccacagttctagggcctggttgaaaggtcagaacctaactgaaaaaattgttcagtcgtatgcggtcaaccttcccgagggtaaagttgtgcattctggtgactatgtatcgatcaagccggcacactgtatgtcccacgataattcgtggcctatagctttgaaattcatggggcttggcgctaccaagatcaagaatccttcacagattgtgaacactctggaccacgatattcagaacaaatcagagaaaaatttgaccaagtacaagaacatcgaaaattttgctaagaaacaccatatagaccactaccctgccggtagaggtattggtcatcaaattatgattgaggagggctatgctttccccttgaacatgactgtcgcatctgactcgcattcaaacacctacggtggtctggggtcgctgggcactccaatagtgagaacagacgctgcagccatatgggccacgggacagacgtggtggcagatcccaccagtggctcaggttgagttgaaaggtcaattgcctcagggtgtttccggaaaagatatcattgtcgcattatgtgggcttttcaacaatgatcaagttctaaatcacgccattgaattcacgggtgactctttgaatgcattgcctatcgatcacagactcactattgctaacatgaccaccgagtggggggctctttctggtttgttccccgtggacaaaactttgatcgactggtataaaaaccgtttgcaaaagctgggcaccaataatcatccaaggattaatccaaagactatccgcgcactagaagaaaaggcgaagattctgaaagcagacaggatgcacattatgccaagaaactga

SEQ ID NO: 81913 - DNA, 417 bp, Saccharomyces pastorianus
  modified_base (371)..(371): a, c, g, t, unknown, or other
atgggttccaaggatgcattggcttacttagcttcccctgctgtagtcgccgcttctgccgtgctgggtaagattagttctcctgctgaggtattgtccacaagcgaaattccattcagcggcgttaagactgagataattgagaatcccgtggttgaagaggaagttaacgctcaaacagaggctccaaaacaatccgttgagatattagaaggtttcccaagagagttttctggtgaattagttttatgtgatgccgataacatcaataccgatggtatatatcctggtaagtacacttatcaggatgatgtgcctaaagaaaagatggggcgcagttgtatggaaaattatgatgccgagttcagaancaagggtcatccaggtgatatagtggtcagtgggttcatttcggta

SEQ ID NO: 81914 - DNA, 183 bp, Saccharomyces pastorianus
atgacttcactttcttcacagccagcgtacacgttggttttcgatccttctccgagtatggagacttactcgagtaccgattttcagaaagctcttgaaaagggatctgatgaacaaaaaattgacacgatgaaatcacttttagttacaatgctggaaggaaatccatgcctgaattgctga

SEQ ID NO: 81915 - DNA, 663 bp, Saccharomyces pastorianus
atggccatcgaaacaatacttgtaataaacaaatcaggcggactaatctatcagcggaattttaccaacgacgaacagaaattgaacagcaatgaatacttaattcttgctagtacactgcacggtgtattcgccatcgcgagccagctgactccgaaggcattacagctaactcaacaaacgaacaccgaaaataccatcccatatataccttacgtgggcatgtccagcaataggagcgacacaagaaatggaggtggcaataacaacaaacacactaataatgaaaaactgggcagttttaaaggagatgattttttcaaagaaccatttacgaactggaacaagagcggattgagacaactatgcacggatcagttcacgatgttcatatatcagaccctaaccggcctgaagtttgtcgctatcagctccagcgtcatgccccagagacagccaactatagccaccaccgacaagcctgaccgacccaagagtacatccaatttggccatccaaatagccgacaacttcctaaggaaggtttactgtttgtatagtgactacgtcatgaaagacccatcttactcaatggaaatgcctataagatctaacctgttcgacgaaagacctgcaggcagcaagctggcactgccgtcttta

SEQ ID NO: 81916 - DNA, 252 bp, Saccharomyces pastorianus
atgatgatgttccataattgcagaattaataactacttaataacttctcaaattggcgaaggcgcgtacggaatagtataccgtgccttagatattcgtaccgatagacaatacgctatcaaagcggttgttcaaagttacggtgttagcaaggaggctgatatgggcaatgataaaatacacaaaaatagcgtgaaattgcaaaagaagctcgctaaactgttcaaagtaatcgaaaaacgtgtcagggtg

SEQ ID NO: 81917 - DNA, 93 bp, Saccharomyces pastorianus
atgacagagaaacacaaaacgatggggaaatttaaggttattgtattggcaggtactgcaggtacaggaaaatcaaccattgcaggtgactaa

SEQ ID NO: 81918 - DNA, 849 bp, Saccharomyces pastorianus
atgggttatattttgacaggatattctagccgtcatgataagagaaagaaacatgcacttcctttgcatcggtatgcatcgtcttcgataaacttgcagcaccatgtgcatctcttagagacccgggtttcatccaagaggccaatatcggaagatcaaaggactatcaggcttcctgcgaagaaacttaggcatcatcaaaagctaactttgcaagatttacctgtagagattattcaacatattttcgttttcacaaagggtgaaccgtcgatggtcaccttgaacaggttcttctatagttgcttgaagccatctttttcattattatcgaagatcatgtgggaaaaatatcttttcgatcccctggagtttggcgtaagtaatataaaagcttattcaagaaatattgtgatccctacattatttgagcatgaaactttttttagactactactagatcatcatcctatcctgtttaaaaatatttctcattttcttcccagaaagcactatcaagatatgcagaatggcgattttgatacatctaaagagctagacttgtgttcaatgaacactgaagatacatcgaaagaagacttccctaaaaacttttacaacaatatgcatatttttttaacacgtagggaatgtgtgaagtctctaggtaatcattttactttgaagaatccatatgatgtgatatccccttttatagaatggttttttcaaggtattgatatgcaaggaactgacctaagccctaagtttacctttgtttctctatttgaatcaatagactttaatcctatacgtctctggatctacagtgcaaaaactagcgtctag

SEQ ID NO: 81919 - DNA, 213 bp, Saccharomyces pastorianus
atgatattcaatctacctgttagtgtgctgctttatttttctttgatatgggcaatggagcctagtttcgtaagaggtaagaacgtcgtcaacttaattactttcacagattcaaatggcaagctgcacaagaggttagcaccagaggaaataccgccccggctacataattctcaagtaaattcttatccatcaggatatcagggaatgcgt

SEQ ID NO: 81920 - DNA, 204 bp, Saccharomyces pastorianus
  modified_base (183)..(184): a, c, g, t, unknown, or other
atgggaatacctggcttactgcctcaattaaagagaattcaaaaacaggtgtccctgaaaaaatacatgtatcaaacattagccattgatggttatgcgtggctacacagggcttcttgtgcgtgtgcttttgaacttgtgatgaataagccaacgaacaaatacttgcaatttttcatttannaaacgggctgcagctcctaa

SEQ ID NO: 81921 - DNA, 396 bp, Saccharomyces pastorianus
atgattgcaaagaaattgtggtcagccggcaacagatataatgcaatggaatattttcaaaaaagtgttgacatcacaccagaaatggcgaaatgtattattgattattgcaagctacattcaattccctacattgttgcaccatttgaagcagatccgcaaatggtttacttggaaaaaatgggccttatacagggtatcatatcagaagattctgatttgttggtctttggttgtaaaacactcataacaaagttaaatgatcagggaaaagctttagaaatctcaaaagacgatttttcagctttacctgaaaatttccctctaggagaattaagtggcggaacgcatcgccagtggcgatctgcgacaggcacagaccagcacccgtcgtga

SEQ ID NO: 81922 - DNA, 774 bp, Saccharomyces pastorianus
atggcgtctatcaatctgattaagtctttgaaactttacaaggaaaagatatggtcttttgacttttctcaaggtatattagcaacaggttcaactgatcgaaaaattaagctagttagcgtgaaatatgacgattttacgttaattgatgtgctagatgagactgctcataaaaaggcgattcgatctgtggcgtggagacctcacacttcgctgttagcggctggctcttttgattccactgtatctatctgggctaaggaagaatctgctgacagaactttcgagatggacctgctagctattatcgaaggtcacgaaaatgaagtaaaaggtgtagcgtggtcgaatgatggatattacctagcaacctgttccagagataaaagcgtgtggatatgggaaacagatgaaagtggcgaggaatatgagtgtattagtgttttgcaagaacattcacaagacgttaaacatgttatatggcatccatctgaagcattactggcttcaagttcttatgatgacaccgtcaggatatggaaagactatgacgatgactgggaatgtgttgctgtcttaaatggccatgaaggaactgtttggtcttctgattttgacaagactgagggcgtgtttagactgtgcagtggaagcgacgattccactgtacgggtatggaaatacatgggtgacgacgaggatgatcaacaagaatgggtttgtgaagctatctcccgggactgtacacaaaagacagtatacgggatcctctag

SEQ ID NO: 81923 - DNA, 525 bp, Saccharomyces pastorianus
atgttttttttcccgaagcttagaaaacttataggttcaactgtgatcgatcacgataccaagaactcatcaggaaaggaagagatcatgtcaaatagccgattagcacttgttattatcaaccacgcctttgataaggtactatctttgacgtggcactgcgggatattatccgaaataagatcaggactgatgttaatgtttggcattttccagttgatgtgctctttgggtgtcatcgtattgctgttgcctattatcatactggacgcgatcgatctattcctctacatgggcaggttgcttgattacggttgcaagttattccactacaatagatcatcattaccggtggcagatggaaaagaaaagaccagtggtcccataagcggaaaggaggaaatagttattgatgaggagataattaatatgctaaatgaatcctcagaatcattgatcaatcatactacagctggtctggaatatgatattagttcaggtagtgttaaaaaagtaggcgtttga

SEQ ID NO: 81924 - DNA, 315 bp, Saccharomyces pastorianus
atgtttgtttcaccaccaccagcaacttcgaaaaaccaagttttacaacgacgtccattagaatcgactaacagtaatcatgggtttgcaagctccctacaggccattccggaaaacacgatgagtggcagtgataatgcttcttttcaaagtttgccactatcaatgagtagctctcaatccacgacttcttcgagaagagagaactttgtgaatgctcctccggagtacactgatagagctagagatgagattaaaaaaagattattggcctcctcacctagcagaaggtcacatcatttgaagagtgggtga

SEQ ID NO: 81925 - DNA, 1125 bp, Saccharomyces pastorianus
atgcctttctcttctgagcaattcacaaccaaattaaatacgttggaagattcccaagaatctatttccagtgcctcaaagtggttgcttctacagtatagagatgctcccaaagtggcagaaacgtggaaagaatacatgttaaggcctagtgtaaacacaagaaggaagttattgggtctttacttaatgaatcatgttgttcaacaggctaaaggtcaaaaaattattcaatttcaagattcctttggaaaggtggcagcagaagtattgggaagaattaatcaagagtttccgagggacctaaaaaagaagttgtcaagagttgtgaatatactaaaagaaagaaatatattttccaagcaggtagtcaatgacatagaaagaaggcttaaaaccgagagctcaccagtggaagcgttggtgttaccccagaaattgaaagattttgctaaggactatgaaaaattagtgaaaatgcaccataatgtttgcgcgatgaaaatgagatttgacaaatcatcagatgaattggatccatccagctcagtttacgaggaaaattttaaaacaataagtaagattgggaacatggctaaagatataataaatgaatcaattctaaaaagagaaagcggtatccataaactgcaaagcacactggacgatgaaaaaaggcatctagatgaggaacagaatatgttaagtgaaatagaattcgttttatctgctaaagacccatccagattaaataaaaacgttgatgaagacaatattattcctacgtatgaagtgggggatggagatgacgatgacgatgatggtgataatgatgatgatgatgatgatgatgatgacaaaaattacgatgatagatccaatgacagcaattatggcgttactaatattagcaccacagataagaagaatgaagttgtagaaaagacagatagcgaacataaaaactctactcataatcctagtgacaatcaatttggtatgaaacgaacacatgatatgataggtcatgatgacgctatgacataccggaaaaaaaggttcatcttgattcgaagacgagtgaagatggtactttcaacagtgaggatggacattatgagttag

SEQ ID NO: 81926 - DNA, 1947 bp, Saccharomyces pastorianus
atgcaacgctcatggtctgcaagtgatagattttctcaaataaagataccaacatatactacggaggaaatgaaaaagatgatttctaaaagggaagctctctttaaatccagactacgggaatttatcctggaaaaggaaaaggctaaccttgacccattttctgagttaacaaatctagcgcagaaatatattccaagggagagagattatgaggatcctattgaggcaatgatgaaggcgaagcaagaaagtaatgagatgagcattcccaattatgccaataattcagtaataacaacaattcctcaaatgattgagaaattgaaaagtactgaattctacgcttctcagataaagcattgttttacaataccgtcaagaacagcgaagtataaaggtctctgttttgagcttgcaccggaagtatatcagggtatggaacacgaaaatttctacagccatcaagcagatgcgataaacagtcttcatcaaggcgaaaacgtcattattacaacatcgacctcttcaggtaaatcccttatttaccaactagcagctatcgatcttcttttaaaggatcctgaatcaacgtttatgtatatatttccaacaaaggccctggcacaagatcaaaaaagagcattcaaggtaatactttcaaagatccccgagctaaagaatgccgtggttgatacgtatgacggcgatacggagccagaggaaagagcttatattcgtaaaaatgctagagttatttttaccaatcctgacatgatacataccagcattttgcctaatcatgcaaattggagacattttttgtaccatctaaagttagtggtggtcgatgaattgcatatatataagggtttatttggatcgcacgtggcattagtgatgagacgtttactaagactgtgccactgtttttacgaaaacagtggtttacaatttatttcatgttctgcaactttaaagtctccagtacaacatatgaaggacatgtttggaattaatgaggttacgctaatacacgaggatggctcacctacaggtgctaagcatctagtggtgtggaatcctccaattttacctcaacacgaacgtaaacgagaaaatttcattagagagagtgcaaagatattggtacaattgatattgaacaacgtaagaaccatagcattttgctacgttcgtcgtgtttgtgaattgttgatgaaagaagttcgcaatatttttattgaaactgggcgtgaggatctggttacagaagtcatgtcttacaggggtggttattctgcttccgacagacgtaaaatagaacgtgagatgtttcacggaaatttaaaggctgtcatatctaccaatgctctagaacttggtattgatatcggtggactagacgcagtcttgatgtgcggtttcccactatcaatggcgaattttcatcaacaaagtggtagagctggaagaagaaataatgattctttaaccctcgtggttgcaagtgactcgcctgttgatcaacattatgttgctcatccagaatccttgctggaggttaataatttcgaatcttatcaagatttggttcttgatttcaataacattttgatactggaaggacacatacaatgcgctgctttcgaactgccaataaattttgaacgtgacaagcaatactttactgaatctcatcttcgcaaaatctgtgttgaacgcttacatcacaatcaagatgggtaccacgccagtaatagatttttaccatggccgtccaagtgtgtatctttgagaggcggagaagaagatcaatttgccgtagtggatataacaaatggaagaaatataataattgaggaaatagaagcatccaggactagttttactttatatgatggcggtatttcattcaccaaggctatcctacttgtgaggagttaa

SEQ ID NO: 81927 - DNA, 375 bp, Saccharomyces pastorianus
  modified_base (331)..(331): a, c, g, t, unknown, or other
atggaggaaggacctataaaaaagaaactgaagtcagcaggtcaagggagtggaaagaccgatgcctttagaaattttgaacaattttttttccgccttaatactctttacacctttttgatttgcagaaagcatgttgtgcctacatttaaaacactttgtggacctatagaaactgctttgaaaagaactgtgacgaaagaagacctagccatggttatggcgctaatgccaagagaatgtgttttcaagtatattgatgagaaccaaatttatactgaaactaagattttgacttcaataatggcggctttcagcagaaggaaatgcntattgaatgaaggacgtgatgaccaattcgacccaaatcactcg

SEQ ID NO: 81928 - DNA, 1455 bp, Saccharomyces pastorianus
atgagtggagtatcaaataaaacagtatcaattaatggttggtatggcatgccaattcatttactaagggaagaaggcgactttgcccagtttatgattctaaccatcaacgaattaaaaatagccatacatggttacctcagaaataccccatggtacaacatgttgaaggattatttgtttgtgatcttttgttacaagctaataagtaattttttttatctgttgaaagtttatgggccggtgaggttagcagtgagaacatacgagcatagttccagaagattgtttcgttggttattggactcaccatttttgaggggtaccgtagaaaaggaagtcacaaaggtcaaacaatcgatcgaagacgaactaattagatcggactctcagttaatgaatttcccacagttgccatccaatgggataccccaggatgatgttattgaagagttaaataaattgaacgacttgataccacatacccaatggaaggaaggaaaggtctctggtgccgtttaccacggtggtgatgatttgatccacttacaaacaatcgcatacgaaaaatattgcgttgccaatcaattacatcccgatgtctttcctgccgtacgtaaaatggaatccgaagtggtttctatggttttaagaatgtttaatgccccttctgatacaggttgtggtaccacaacttcaggtggtacagaatccttgcttttagcatgtctgagcgctaaaatgtatgcccttcatcatcgtggaatcaccgaaccagaaataattgctcccgtaactgcacatgctgggtttgacaaagctgcttattactttggcatgaagctacgccacgtggagctagatccaacgacatatcaagtggacctgggaaaagtgaaaaaattcatcaataagaacacagttttactggtcggttccgctccaaactttcctcatggtattgccgatgatattgaaggattgggtaaaatagcacaaaaatataaacttcctttacacgtcgacagttgtctaggttcctttattgtttcatttatggaaaaggctggttacaaacatctgccattacttgactttagagtcccgggagtcacctcaatatcatgtgacactcataaatatggatttgcaccaaaaggctcgtcagttataatgtatagaaacagcgacttacgaatgcatcagtattacgtaaatcctgcttggactggcgggttatatggctctcctacattagcagggtccaggcctggtgctattgtcgtaggttgttgggccactatggtcaacatgggtgaaaatgggtacattgagtcgtgccaagaaatagtcggtgcagcaatgaagtttaaaaaatacatccaggaaaacattccagacctgaatataatgggcaaccctagatattcagtcatttcattttcttcaaagacc

SEQ ID NO: 81929 - DNA, 1032 bp, Saccharomyces pastorianus
atgaacgtaacatcgaatgcaactgcagccggttcctttccactagcatttggtctcaagacctcatttgggtttatgcactatgccaaggcccctgccattaatttacgccccaaggaatccttgctgccggaaatgagtgatggtgtgctggccttggttgcgccggttgttgcctactgggcgttgtctggtatattccatgtaatagacactttccatctggctgagaagtacagaattcatccgagcgaagaggttgccaagaggaacaaggcgtcgagaatgcatgttttccttgaagtgattctacaacatatcatacagaccattgttggccttatctttatgcacttcgagccgatctacatgactgggtttgaagaaaatgccatgtggaagcttcgtgcagaccttcctcggattattccagatgccactatttattacggctatatgtacggaatgtccgctttgaagatctttgcaggctttttattcgttgatacatggcaatactttttgcatagattgatgcatatgaataagaccttatacaaatggttccactctgttcatcatgaactatacgtgccatatgcttacggtgctcttttcaacaatcctgttgagggcttcttgttagatactttgggaaccggtattgccatgacgttaactcatttgactcacagagagcaaatcattctttttacctttgccaccatgaagactgtcgatgaccactgtgggtatgctttgccacttgacccattccaatggcttttccctaataacgctgtctatcacgatatccaccaccagcaatttggtatcaagacgaactttgctcaaccatttttcactttctgggacaatttgttccaaactaactttaaagggtttgaagaatatcaaaagaagcaaagacgtgtcaccatcgacaagtacaaagagtttttgcaaaagagagaattggaaaagaaggagaaactcacaaacttcaaagctatgaatgctgctgacacatga

SEQ ID NO: 81930 - DNA, 183 bp, Saccharomyces pastorianus
atgatcctctacgacctctgcgacaatgtgaccactcaatggagagagtggatgtttccccataacgtaacactgccggcattgggtcaggacggcattaacgaagacaatctgaatgaaaccatcgacaacatgttaatttttgacttccttgatgacggttcagaaaacaaccaggtctaa

SEQ ID NO: 81931 - DNA, 1164 bp, Saccharomyces pastorianus
atgagttatagtgtcaacacgtttacagattacgttttattgtttggatcatctagtttagtaggaaaaggtactttagagaacctgttggacataaatttatatattaaaaatgtttcggacctacaaggcaagctggatagcttaagtgaaataaagggaaatgtcgttctcaataaacatgtcttttgtgttaatagaaggtgcatcaatgaggagaaatcatttatgaagaccattgattatataaatatgagatcagttacttggcaaggtggcagatattacttgagaagcaggaaagaaaaagacactgaaaaagtaccgtctagtcctaatactttttgttatgataattttgaagaaggatttattaaaaatacgcctgaagagaggggaaaagatggttattcttttgtttataatcagaaacagttcagttacacactacattatgcatgcggaaaggaaaaaggtattgagatcatttataattttactgtaacgcaattgatcatccccagatctgaaacttggccaaaattgcttccacggatattctcaggaacacaaaagctggaaaagtttgacattgacaacaaaaattacgtgcccggtagaagtttgcctagtctgtgtgatattagcactatggtgtgctctttgggctccacctcagctagagtgcggagaactcaggtaccaagttcctttgctgactattacttaccttttaatttagcacaagaattcacgaatacaattaacaaaaagttggtggttacaactgcctttaataatgattttcttagtaaaactttcgagtattttagaataaaagctaaattagaaaatgacttggatgaagctttgccaaataagctaaaggagctagttatcttgaggccaggtccgatgtgtggacagcacggaaatcctataaacgttgaattgggtaaagaaaactctactttcttggaaaaaattttttattatcctcactatcttttagtttataaaaagaaatatatcagtgaggccagaaggattggcttaagaacaaagttaagcgaaataattgcttccagtatatataggatgccaggatctgcattattaggatacgctgtcccagtttcaaaggtttcttatgttgcctcttga

SEQ ID NO: 81932 - DNA, 156 bp, Saccharomyces pastorianus
atgttatgctttcttctcctaaactcacttcttttcctccctatctgcttttgtttattacagttgaaggctacttgtgccgttcgtgtgaaaaaatactcgatgaaaaaaaaaaaaaagatgatgacgatgactttgttgaagaaatgtgtttga

SEQ ID NO: 81933 - DNA, 1014 bp, Saccharomyces pastorianus
atgaccagtcaggaaaggatgatagtgcatagatgcagatttgtggatttcactcctgccacaatcacatctctagcattttcacataaatcaaatataaataagctaactccgtccgatttgagattagctattggtagatctaatggtaacatagaaatctggaatcctagaaacaattggtttcaggaaatggttatcgaaggtggcaaagacagatcaattgaaggcctttgctggagcaacgttaacggcgagtctctaaggctattttctattggcggctcgactgtggtaacagaatgggatttagcaacaggtttaccattaagaaactatgattgcaattcaggtgtgatatggtctatttccatcaacgattcacaagacaagctgtctgtgggttgcgataatgggacggtggtcctcatagatatctctggcgggcctggtgtcttggaacacgatactattttgatgagacaagaagccagagtattgactttggcttggaaaaaggatgacttcgtgattggtggttgttctgatggtagaataaggatttggtctgcacaaaaaaatgacgaaaacatgggtcgtctattacacactatgaaggtcgacaaggccaaaaaagaatcaactctagtttggtcagttatatatttaccaagaactgatcagattgcctctggtgattctacaggctccattaaattctgggatttccagtttgccacgctaaaccagtcatttaaggcgcacgatgcagacgtactgtgtctaactaccgatactgataataattatgtttttagtgctggtgtggacagaaaaatctttcaattttctcaaaacactaacaaatctcaaaagaacaacagatgggtaaattcttctaataggttgcttcatggaaacgacattagagcaatatgtgcataccaatctaaaggtgcagattttctagtttcaggaggtgttgaaaaaacactagtcatcaactcacttaca

SEQ ID NO: 81934 - DNA, 195 bp, Saccharomyces pastorianus
atgagggatgaagctactcgcaaaaaaaggtcatttagtgatggtcattttttcaagaaactgaaattgatgtcaaggaaaaagcaacctgttatggaaagaagtaagaccactcgtacaaggaaagaatctaccaataccgcagcaaaatcatccctatcattccgaagggccaacaagggcagaaagaccatc

SEQ ID NO: 81935 - DNA, 423 bp, Saccharomyces pastorianus
caggtgactctagaggatcccgacgtagaaataggggttgctgttattgatagattcacctattactgtttggatttcctagaacaaatcgataaaaattccacgttaactttgcaggacctcttcgattcattcaccttcgaaaagattcactctcatgtgggtgtcaggactgatctgtttgataggaatccgtcagaagtattgattactgatttttttgcgaatgtgcaaaacgtaattcctgatgattcaaaacctctttccgtaagtcattatcatcattacaaagatcatatcgatactgctcagtatgagcttaacaataatgtgctggatttggccttggagacttaccgcaaaaacaatcaatcctccaagattgaaaaaaaaatcaaagacatcaagtctactagtgtatag

SEQ ID NO: 81936 - DNA, 531 bp, Saccharomyces pastorianus
atgcgtatagcgatgcatctgccgctgttgcttttatacatattcttactacccctttcaggtgcaaataacacagatgctgcacacgaagttatagcaacgaacacaaataattgggccgtattagtatccacgtcgcggttctggttcaattacaggcacatggctaatgtccttagtatgtataggactgtaaagaggttaggtataccggattcacaaataatattgatgctgagtgatgatgtggcctgcaattcaaggaatctatttcctggaagtgtttttaacaataaggatcacgctattgacctttacggagactctgtagaggttgactacagaggttacgaagttaccgtggaaaactttataaggctgttaacggatagatggacagaagaccatcctaaatctaaacggttgttgacggatgaaaattcaaatatattcatctatatgacaggacatggtggcgatgattttttaaagttgacctgcaggcatgcaagcttgcactgccgtcgttta

SEQ ID NO: 81937 - DNA, 1749 bp, Saccharomyces pastorianus
atggattccacaggcgcttctcagattgttagcgcactagatgttatttactcccccaagtctaacaattctcaacgacaagaagctcagaaatttttagatgaagtgaaattatgttcagaatcgcccttttggggctacgaaattgcattgcaaaaccccactaattctatattgaaatactttggactaggattactagaccatgcagtgaagaaaaactggaatgattatgacgaggggaaaagagtggccctgagaaaatgggtcatggaacttaattttggggtgcaagattatgataccagatatattaaggaaaaattagccactttatgggtagaggtggcaaaaagaacatggggtgaggctcttaagcagacaaaccctacggaagaacagttactcacatcttgggtggacatggacaataaccttttcgaactttggaacataaatcaatcgtcaagagaactagcattaataattttcagaatcctttttgaagatgttttcttgttggacgacctaattgttttgaagaggatgacggttatccaacccttatgtgtaatgattgtttgccctattgaagttttcgcaataaaatacaaattcagtgataaatggaccaaatttaaagctaatgaagagggctggttttctgtttggattccagagttgaataatgcattactacagaataattctgaatacatcataaggcttttagaaactctgaagacgtgtttaaactggccattaacagaggtcattgtaagaaatgacgtgttatcctccttattgacttgtttatccagcaatatcccaagggcgcagtcaatggcattagactcgatacatatcctgttgacccgtccctatagtaatgaaagccattaccaaatgaccatagatcgagtttttgataatatggacttattagatagcgtttatgaaagcttgttgtttgatcctacagatgatatagatgaaacgaaatatcctataattaaaaagttcgtggatatgatcagttgtctctatgtttgtgtcccaaagattaaggagacaaatggccagattcaaaaatattttaagcttgtattaaagacaacttataacccaagcttaatcgttagcggattaacattagacctatggtgtacctgtcttcgaaacgatgaatacttacccaagctggagaaatatgtcattcctgatctactacagtttgccgcggatgctttagtctattatgaacagattgatggtcatatttccaaaaaatttgcggagattgattttcaatccaagtccgaatttcaaacattttgttccacttataggaaaagaataagagacatcattaggttgatttcttgcgtcgaattagaccttacttatgattggttgaacaacagattaaacaattatttcagctctccatttggtcagcaggtcttaagttccacatttttggaccataaattagagccttatttaggtgccctctcccaatacatgattgttgaatgtttcatcaatggttgtataagatggaagatctggtatccaacaggagatgattatgacgaaaaactagattccatattacaaaaactggaaattttgtcaaaccagttaattgcattaaatttaagagaaccattgttattgaagaaacaaatccaaaatttcgcactttttttgacaatgttaaaagataatgtgcttcacatcttttag

SEQ ID NO: 81938 - DNA, 798 bp, Saccharomyces pastorianus
atgaattcaactccagatttaatatctccacaaaagtcaagtgagaattcgaatgctgacctgccttcgaatagctctcaggtaatgaacatgcctgaagaaaaaggtgttcaagatgatttccaagctgaggccgaccaagtacttaccaacccaaatacaggtaaaggtgcatatgtcactgtgtctatctgttgtgttatggttgctttcggtggttttgttttcggttgggatactggtaccatttctggttttgttgctcaaactgattttatcagaagatttggtatgaagcaccacgatggtacttattatttgtctaaggttagaactggtttgattgtctccattttcaacattggttgtgccattggtggtattattctttccaaattgggtgatatgtacggtcgtaagatgggtttgattgtcgttgttgtcatctacatcatcggtattattattcaaattgcatccatcaacaaatggtaccaatacttcatcggtagaattatttccggtttgggtgttggtggtattgccgttttatctcctatgttgatttctgaagtcgctcctaaggaaatgagaggtactttagtctcctgttaccaactgatgattaccttgggtattttcttgggttactgtaccaacttcggtactaagaactactccaactctgcaatggagagttccattaggtttgtgttttgcctgggctttgtttatgatcggtggtatgactttcgttccagaatccccacgttatttggtagaagctggtcaaattga

SEQ ID NO: 81939 - DNA, 603 bp, Saccharomyces pastorianus
  modified_base (514)..(514): a, c, g, t, unknown, or other
atgatcggtggtatgactttcgttccagaatccccacgttatttggtagaagctggtcaaattgacgaagcaagagcatctctttccaaagttaacaaggttgccccagaccatccattcattcaacaagagttggaagttattgaagctagtgttgaagaagctagagctgctggttcagcatcatggggtgaattgttcactggtaagccggccatgtttaagcgtactatgatgggtatcatgatccaatctctacaacaattgtctggtgataactatttcttctactatggtactaccgtttttaaggctgttggtatgagtgattctttcgaaacttctattgttttcggtgtcgtcaactttttctctacttgttgttctttgtacactgtcgatcgttttggacgtcgtaactgtttgttatatggtgccattggtatggtctgctgttatgtagtttacgcttctgttggtgtcaccagactatggccaaatggtcaagaccaancatcttccaagggtgctggtaactgtatgattgtctttgcctgtttctatattttctgtttggctaccacttgggctccaattgcttat

SEQ ID NO: 81940 - DNA, 594 bp, Saccharomyces pastorianus
  modified_base (535)..(535): a, c, g, t, unknown, or other
atggttcacaacaaagttactatcattggttcaggtccagctgcacacaccgccgccatctatttggccagggcagaaatcaagccaatcctatatgaaggtatgatggcgaacggtattgctgccggtggccagctaaccaccactacagaaattgaaaacttcccaggtttcccagatggtctaacaggtagcgaactgatggacagaatgagagaacaatccacgaagtttggcactgaaattatcacggaaacagtttccaaagttgatctgtcttccaaaccattcaagctatggaccgaatttaacgaagacgcagaacctgtgacgactgacgctataatcttggccacaggcgcttctgctaagagaatgcatttgccgggcgaggaaacctactggcaaaaaggtatttctgcctgtgccgtgtgtgatggtgccgtccccattttcagaaacaagccattggccgtcattggtggtggtgactctgcatgtgaagaagctcagttcttgaccaagtacggctcanaagtgtttatgcttgtcagaaaagaccatttgcgtgcttctaccattatgcaaaagcgt

SEQ ID NO: 81941 - DNA, 435 bp, Saccharomyces pastorianus
atgggagtcgcagctgtatgtaggagcttcggcagtgacgcctcgtcaaaccttataccccttcgtatatcgtttttctttaaaaatgcatctatttccttccgaagtttgttttcatctgttaactctagcagctggttcaagcgggatacgcagtatagttcggtcagttttctatctctttcatcaattaagtcatctgccttaggaaatttacttctatcactgctctggtcctcactgagtgatgccgaattaggcactgctgaacttggacgtgaggacatctttgaggcggaaattgtacttttgattatgatgtctctaaataatctttatattctatctgttcggcggctaacgcctacgggtaatagctggcctttgaaaatttcgcggctgcagcaagtacgcaaaaatccttatcccttctaa

SEQ ID NO: 81942 - DNA, 105 bp, Saccharomyces pastorianus
atggcagtaataccggcaaagaaaagaggaagacctagaaaatctgtggtagcagaagttccctatgatagcttggcagcccagtatctgaaactcaggcagtaa

SEQ ID NO: 81943 - DNA, 741 bp, Saccharomyces pastorianus
atggctggagagaacccaaagaaggaaggtgtagatgctaggtttgccgggatctacagcgatcctaaatttaagaacacgaaaaccaaagatcataagatcaagttagattctaggttcagtaagaaggatctggaggtccagcataaatctaaggttgacaagtatggtagaaagatcaaaaatgcgcagaataacagggaattggaagatttcgacaaatatttcgagaaggaagcagaaaatgatgaagattcagaagttaatgcgaaaacagtagtggaccgtgcccgtggtgaagttcctgatgattatgttagctcttctgatgaattcacttcttctgattctgaatcgtccggagaaagtgaagttgaaagcgaagaagaaaatgaagtagaaattgaaaatgccaaaccagaatctggtgacatctctaagaatttggccgtcgtaaatttagattgggaccatgttaaatctgaggatttgatgattaccttttccagtttcgttcctaaaggtggtaaaattgaaagagttgctatttatccaagtgaatttggtaaagaaagaatgcaacgcgaggaagttgaaggacctccaaaggaacttttccaaaagaaaaataagaacaaaacctccaaaaagaagaaaactgatgactctgattctgatatggacatcggtataaggatctttatgaagagggagatgctgacaaggacgtggattccagag

SEQ ID NO: 81944 - DNA, 288 bp, Saccharomyces pastorianus
atgccaaataagcaacgtcgcagcaacccattcaataatgcacaagacgccatattaacgagaaaatatggcattgcacagtataagcaaaacaagcagagattattagtgatgtccggaaaagcttctacagagggtagcgttactacggagtttctctctgatatcattggtaagacagtgaacgtcaaacttgcctcgggtttactctacagcggaagattggaatccattgatggttttatgatatgttgcactatcgagtgccactgtacactacgagagtaa

SEQ ID NO: 81945 - DNA, 351 bp, Saccharomyces pastorianus
atggaactctcatcaaacttaaaagacctatatattgaatggttacaagaattagttgacggattaacccctaaacaagaacaactcaaaatagcctatgaaaaagcaaaaaggaatttacaaaatgctgaaggttcattttattatcctacagatctaaagaaagttaagggaattggcaatacaataataaagagattagatacgaaattacggaactattgcaaaattcaccacatatctcccgttgaggctccttccttaactcagacaagtagcaccagaccaccaaagaggactactacagctttgcgtagcatagtaaactcatgcgaaaatgataagatgaag

SEQ ID NO: 81946 - DNA, 900 bp, Saccharomyces pastorianus
atgactactatggtcatgtcaatgaataaagttccattaatcgagtccttagctcccgtggtcaagtttgttgtacttcatgcacaaatttcttttattacggaagctgtcgacttactggatgctttaactatttcttcgcatctgctttataaccaaattgcaccaccaatatgggagttgttacatgatatattggattctttccaaacttatgccatggactattttgaggcctacagtattttttttgaaaccatcgtgatgaccggcttcccacaagatcaaacttatgttcaacctctgctagaaattctctctgctaaactggaaagtgaagttgactacgacatcgagcatgttatgcaaattctaatgtacttcgcactgtccatgagagacattccattattcagcaaagccatcaaagtatccactaatgatgagctaggattggactctaaatgcatcgttaaactgggactggccaatttgtttgctaaaccaatcgaaactttacaaataatggaaaatgaaggttttactataaatttctttaccaattggtttaatgaaaagttctacagtgtcttcgccatcaaattacaagtcctggtcattttaacccttttgaagatgcctgaagttcctaatagtgtcagcccactactaaataacctgaccaataaactggtggaattgacattatcattgccaaaggcaattagaaaccgtgatgctgttaccgagggcaaatccttagaaggagacctgaccccagaagaagaagaagaatactttatcgaatgtgatgatgatctgaaggagacagtgttagaccaaattaatgtttccaggcagtacataccttttcaagatttgcaaacgaagatccggtaa

SEQ ID NO: 81947 - DNA, 1851 bp, Saccharomyces pastorianus
atggtacaagaacaggcaattttgagctgcattgagcagactatggttgctgatgcaaaaattatcaaagaggcagaacagcagttatttgagttccagaagcaacctgggtttacttcttttctgcttaatatagtgtctgatgataattttgcgctaaatgttcgtctttcttctgctatttatttgaagaataagattcacagatcatgggatactaagagagaagatggtataaaagctgacgaaaagctttcgatcaaggaaaggttaatcgagactttagttaaaaactgtgaaaataaccacattaggcctatcctgactgaaaccataaatgggatacttgttggtcaggaagattgggatttagcacctgttatcaagaatttattatcgagcggtgacgcatcgtacatttatcccgggttactactactgttccaactttgtaaagctcataggtgggacatggttgggtcgagagattatattgattctgttatcgaagaacttttccctattgtggaagggatagcttctaatatcggtagtcaaacggattacagatctaatgaaatattgtacctcattttgaagtcattcaagtatgcatgtttgaacaacttgcctcaatacttcagccaacctgaaagaattatgtcatgggtgcaactacatttgtatttatgttccaaaccattaccagtcgaagtaatggaactggatcccgcagataggtccctagacaaaagggttaaagtgaacaaatgggggttcggtaacttaaacagattcctgcaaagatacaacaaaattacaaaggccatcaccaaggaatttatcgactatatcttcaatactattgttcctataattcttcgagaattttttaaggatattgaagcttggggtaataattcactatggttatccgattcctctttgtatttcttaatttcattcctagagaaatgtgttacaatagatcaactttatcctttaattgagccacatttacaaattatttttgagaacgtcatcttcccatgtttgtgtgctaatgaacaatccatcgaattattagaagatgaccaagaggaatataccaggcgttattttgacattaacagagaaggctctacgccagatgctgcttcagcagatttcatattcttgattgggtccaaacgtcctgagaaactgaacaatattttaccgttcattaatgatatttttactagattcgatgccaattccagtgatattaacatggcatttaaagaagagggtgctttgagaacattgtctaacttgttttcgtttatagatgagccatccgttctggagaatatttttggacacttcatcgtgccattgttatcgcaggataagtacatgtttttggttgcaagaagtttggaaacgatagcgctgtattcggaagaatttaaagatatgaacatattgtcacaattatttgagttaacatataccaacttcttaaacagtaacgttttaccagtccaaattgaggccgcagatgccattaaatgtttaattgtatccaatcctcaaatccacccagcggtctctgctcatgttccaggtatgatggaaaagctattgaaattgtctaaaatctttgaaatcgatatcttatctgaagtcatggaagcattggtggagagattttcagatgaactatccccatttgctaaagatttagcttcaaacctagtcgaacaatttttacgtattgctcaagcattggtagaaaatccatcggaaacctacagcgcaagtgaccaagagcaggaaatccaggccagtggattgttacaaacatga

SEQ ID NO: 81948 - DNA, 402 bp, Saccharomyces pastorianus
atgatcttagcgaccgtacaaaagatgatatctgaaatactggaccaggatttgatgtttaccaaggatgcaagagaaatcatcatcaactccggcatagaattcataatgatcctgtcctcgatggcttccgaaatggcggacaacgaggctaagaaaaccatagcgcccgagcacgtgatcaaagcgctagaagagttggagtataatgagtttataccattcttagaggaaatattattgaattttaagggttcccagaaggtgaaagaaactagggattccaagttcaagaagtcaggtctctcggaagaagagctgctacgacaacaagaggagttgtctagccgtcaagtcccgattccccacatatgtatcgatccggtaatccgagatcttctg

SEQ ID NO: 81949 - DNA, 591 bp, Saccharomyces pastorianus
atgtcatcagatatcagagacgtagaggaacgaaattcgcggagctcgagctcaagctcgagctcgaactctgccgcccaatccattggacagcatccatactgcggtttcgacagcgaagccgcggaaagggtgcatgagttggctagaacactcacatcgcagagtttactatacactactaactcaaacaatagctcttccagcaaccataatgcgcacaatgcggactcgagatccgtattttctacggacatggaaggtgtgaacccggtgttcactaacccggacaccccgggatacaatcccaaattggaccctaacagtgatcaattctccagtacggcgtgggtacagaacatggcaaatatttgtacttcggacccggatttctataaaccatactcactcggttgtgtatggaagaatctaagcgcctccggagactccgccgatgtgtcataccagtcaactttcgctaacatcgtaccaaagctgcttacgaaagggctcagattactgaagcccagtaaagaagaggacacttttcagatcctgaaacccatggatggttgtcttaatccccggtga

SEQ ID NO: 81950 - DNA, 384 bp, Saccharomyces pastorianus
atgaaaacgccgcaaaatcgtatcaagggtgttgatagagaagcgtacgccaatcacgtgacagaagttgtaatggccacatatggtctttcgcatacaagggacaccaaggtcggaaacgatctagtcagaggtgtttctggtggtgaaagaaagcgtgtatccattgcggaagtcgcaatctgcggcgccagatttcaatgttgggataatgccaccagaggtttggactctgctactgctttagaattcatccgtgctttaaaaacccaggctgacattggaaagaccgcggctactgtggccatctatcaatgttctcaggatgcttatgatctttttgataaggtctgtgtcctggatgatggttccagctttatttgg

SEQ ID NO: 81951 - DNA, 252 bp, Saccharomyces pastorianus
actctagaggatccccatatttccaatacattgggctacgtattgtctcccagacagaccactgcagattttgtaagcttcaagttacaagtcctagctgacatagaagttattagcaaagaatttatcgataaaggtactagcagtgcctcagagcgccaaaggatatggccagaatatcggctacaatcagaaaactacaaaaatttaattaaggatatagactctacattagagaaaaacacagattaa

SEQ ID NO: 81952 - DNA, 759 bp, Saccharomyces pastorianus
atgcaagtcaaatacttgttgattagaaatttctggagaatgaagcaaagtgctagtgttactttgtggcaagtcatcggtaactctgtcatggctttcatcttgggttctatgttttataaagtgatgaagaaaaacgatacttccactttctatttccgtggtgctgcaatgttttttgctattttatttaatgcattttcgtgtcttttggaaatctttagtttgtatgaaacaagacctataactgaaaaacacagaacttattccttgtatcatccaagcgctgacgcatttgcgtctgttttgtcagaaatgccgccaaaattgatcactgctgtctgcttcaacatcatcttttatttcctagttgatttcaggagaaacggtggcgtctttttcttttattttttaattaatgtcattgccacattcactttatcccatttatttagatgcgtgggctccttgaccaaaacattacaggaggccatggtccccgcttcaatgttattattggcaatttctatgtatacagggtttgccatccctaaaacgaagattttaggttggtccatttggatttggtatatcaacccgctagcctacctgtttgaatctttaatgatcaatgaattccatgaccgtagattcccttgtgcccaatacatccctgctggccctgcttatcagaacatcacaggtactcaacgcgtctgttccgcagttaggtgctatgcaggtaacggggatcctcta

SEQ ID NO: 81953 - DNA, 720 bp, Saccharomyces pastorianus
atgataaatttagaggattactgggaagatgaaacgcctgggcctgatagggaaccgactaatgaactaagaaacgaggtggaggaaaccatcactctgatggaactgctgaaagtgtccgaattgaaggatatttgcaggtctgtatctttcccggtttccggtcgcaaggccgttctacaggaccttatcaggaatttcttgcagaacgctttagtagtaggcaagtctgatccttatagagttcaagccgttaaatttctgatagaacggatcagaaagaatgaacctttgcctgtttataaagatctttggaacgctttaagaaagggtaccccattgagtgctatcacagtacgttctatggaggggcctcccacggtgcagcagcaatcaccttccgttattaggcagtctcccactcaacggcggaaaacgtctaccacatcttccacatctcgtgcaccaccacctacaaatccagatgcctcttcttcttcatcatcttttgctgtaccgacaattcattttaaagagtctccattttacaaaatacaaaggctaatccctgaattagtgatgaacgtggaagtcacaggcggaagaggtatgtgctctgcgaaatttaaattgtccaaagcagactacaatctattaagtaacccgaatagcaaacacaggctatacttattttctgggatgattaatccattaggatga

SEQ ID NO: 81954 - DNA, 1455 bp, Saccharomyces pastorianus
  modified_base (490)..(626): a, c, g, t, unknown, or other
atgggcttgactaccacatctactatcatgagtctgcaatgtccaatttcgtacacaagaatgaaatacccttcaaaatcaataaattgtaagcatctgcaatgttttgatgcattatggttcctacactcccaactacaaattcctacgtggcaatgcccagtatgtcaaattgatatagctttggaaaatttagcaatttccgaatttgttgatgacattttacagaactgtcaaaaaaacgttgaacaggtagaacttacttctgatggtaagtggacagccatattggaagacgatgatgacagcgacagtgacagcaatgatggtagtagaagcccagaaaaaggtacttcagtatcggatcatcattgttcttcttcacatccaagtgaaccgattatcataaatctcgatagtgatgatgacgaaccaaatggaaataatcctcatgttactaataatcatgatgatagcaacaggcatagtnnnnnnnnnnnnnnnnnnnnnnnnnnnnnnnnnnnnnnnnnnnnnnnnnnnnnnnnnnnnnnnnnnnnnnnnnnnnnnnnnnnnnnnnnnnnnnnnnnnnnnnnnnnnnnnnnnnnnnnnnnnnnnnnnnnnnnnnnacatgatcatggtagtcgcagtaatactcccagtcataatcatactaaaaatttaatgaacgataatgatgacgatgatgatgatcgacttatggcggaaataactagcaatcaccttaaaagtactaatacagatattctaactgaaaaaggttcaagtgcaccctcgagaaccctggatccaaaaagttataacatagttgcttcagaaactactactccggtgacaaacagggttattcctgagtacctcggaaacagttccagttatattggtaaacaattgccgaacattctgggaaaaacgcctttaaatgtgactgctgttgataattcatcccacttaatctctccagatgttagcgtatcatccccaacgccaagaaacaccgcttcaaatgcaagttcgagcgctctcagtacccctcccttaataagaatgagttcattagatcccaggggatccactgttcccgataaaacaataaggcctcccataaattccaacagttatactgcatcgatatcagattcatttgtccagcctcaagaatcttcagtttttccaccacgtgaacagaatatggatatgtcctttccttccactgtgaactcaagatttaatgatccacgtttgaataccacaagattccctgattcaacattgcgtggggcaactattttgtcgaataatgggcttgatcaaaggaataactctctaacaacaacagaagcaatcacgaggaatgacgtcgggcgacaaaattctacgcctgtacttcccacgttgtcccagaaagttcccattcgtacaaactctaacaagttt

SEQ ID NO: 81955 - DNA, 2142 bp, Saccharomyces pastorianus
atggcaatccaaagtatagtctctcagcaaatttctacaagctcaactttaaatgacgaaatacattcaagcgcgctttccgttttcaacccttcagcttcgaatttggttgaaacttctctgataatttcatcgacccaagcaagcataacaagccccaaaaactcagctaaaattagttcactacagagccagctgtctagcagtacaaaaaatccatacgatacggcgaacaagaatactgagaccagtggcagatccacaattgtttcgaatttcctatacacatcttccgcggcgaaaccagacaatgaaaagttttccgctactcctacagagataactacaatttcaagtagctcgcacgcatattctttatctattccaagttctcataattctgtgactggactatcacataactttgtcgattcgtcaaaaagtgcaacctcatttggctactcatcctcatcaatatcttcaataaaactttcaaaagaaacaatacctgcaagtaaatctgtttcaaacacacaagaaagaatcacaagctttacatcaacattacgagcaaatagtcagtctgaaaaatccgaagggaggaattctgtaggttctttacaaagttcacatatttcatctaacccatcgctttccacaaatacaaaggttgattcgaaaagtttatccaggaaagtatcgaaaaccatgggcgaaaatggcgaggaaaccggcttaaccacaacaaagacgcaatacaaaagttcttctgaaaccagtgggtcatattctcggtcttttacaaaaatctcaattggacctgctacgactgcagttcaaactcaggcaagcactaattcagtattcacagcacctgccttgtctacctatcctactactccgtacccctctccaaatagttacgcatggttacctaccgctattatagtggaatcatccgaaacgggccccactaccgcatcattcaatccgtcaatcactggttcacttcccaatgcaattgaaccggccgtcgctgtatcggaacccattaaccacactttaattaccatcggattcacggccgctttgaattatgtatttttggttcaaaatccattatcttcggctcaaatcttcaactttttacctctcgttttgaagtatcccttttcaaacacctcatcagaactggacaatagtattggggaattatccacttttattctttcataccggtctgggagcagcacaactaccctttccccaaaatccatatcatcattatcagttgtcaagaaaaaaaaaaaccagcagaaaaaaaatgccacgaagtcaaccgaggacttacatcctccacaagtcgacacatcctcaatagcggtgaaaaagattgttcccatggtagactcttctaaggcatacattatatcagttgcagaggtatattttccaacagaagccgtaacatatcttcagcaattaatccttgatgaaaattcgactctttatagcaatcctcaaaccccactgcgaagtttagctggtctaatagatagtgggatcccattagggggattgacgttatatggctctggagatggtggttatgtccctagtttaacctcatcaagcgtcttggattcttcaaaaggaaattcccaaaacatagatggaacttacaagtatggagctttggatgactttatcaattcattcacagattctgcatctgcaggaaagtatgctgtaaaaataatcatctttttgattgttttaactattggcgtactcttgtggttattcgttgcattttttgctttccgtcatagaaatatattattgaaaagacacccaaggaactgcatagagaaaagcctcaataatgagagggaacttgaaagtaccgagctttcccgctcttcttctagaaaccaagtttataatgaaaagccgccagaatctgaaaatgaaagtgtttactctgcggtagatgatcattatattgtgactggcgaaaacacagtctataatactattcacagattacattataccattaatgatgacggtgatctattgtacagggacgcaatccccctcgattttgatcaaccaatggggatgatggttcgggaatag

SEQ ID NO: 81956 - DNA, 1650 bp, Saccharomyces pastorianus
atggtctcattgaaaataaaaaaaattttactcctggtgtcattgttaaatgcaatcgaggcctatagtaacgatacaatatattcaacttcatacaataatggaatagaaagcacaccctcatattcaacatccgcgatatccagtaccggatctagcaacaaagagaatgcaataacatcaagctctgaaaccaccacaatggctggccaatatggtgaaagtggaagcacaacaataattgatgaacaagaaactggtacgtccagccagtatattagtgtgacgacgacaacgcaaacttctgacacgatgtcatcagtaaaaaagtctacggaaatagcgacaccaagtagtagcattgtacccaccactttgcagtcctatagcgatgaatcacaaatatcacaaacgcttagtcacaatccgaagtccgtggcggagtcagatagcgatacaacctcctcggaatcctcaagtagcgtaataatatccacatccgatagttcagcggtaccgagggaaataagtccaataataaccacagattctcaaatttccaaagaagaaggcacattggctcaaacttccagtatcagtgaaacaacgagaattgcacaaatggtaaccagagtttcacaaatctccagcataacggcagcttcaacaatagatggctttagtagtgaatcaacacaaacagatttttccaacactgtatcgtttgaaaattcagtcgaagaagaatatgccatgagcaaatcccagctctctgaaagttacagttcaagttcaaccgtctattctggaggggagtcgactgcagacaagacatctagctcccccattaccagcttttcatcttcttatagccaaacaacgtcaactgaaacctctgagagcagccgagtggctgttggagtatcccggccctctagcataacgcaaactacatcaattgatagttttagtatgagtgaagtagagctttccacatattatgacttaagtgctggcaactatcctgaccaagaactgattgtcgatcgcccggccacttcttccactgccgaaacatcttcagaggcaagtcaaggtgtaagccgtgaatctaacactttcgcagtatcttcgatttccacgacaaactttatagttagcagtgcttcggatactgttgtttcaacttcaagcaccaatacagtgccatacagctctgtccattcaacctttgttcatgcgacttcctcgtcgacttatatttcttcttccctttattcttccccatccttatctgcatccgtttcctctcactttggcgttgctccttttccatctgcttacatatctttctcatcagtacccgttgcagtatcctcgacgtacacgtcttcaccatcggcttctgttgtagtaccttctgcctatgcgtcttcaccatcagtacctgttgcagtatcctcgacgtacacgtcttcaccatcagcacctgctgtaatatcctcaacgcacacgtcttcaccatcggcacctgttgcagtatcctcgacgtacacgtcttcaccttcagcacctgttgcagtatcctcgacgtacacgtcttcaccttcagcacctgttgcagtatcctcgacaacactctccaccacc

SEQ ID NO: 81957 - DNA, 423 bp, Saccharomyces pastorianus
  modified_base (343)..(343): a, c, g, t, unknown, or other
atggactacaacatatttgaggcggtacatgaacaacaaagcagcacatctgacatggatctctcagaagaagataataatccattcgtcggcactcatcacctatatgcttctggaattgggactactatcggcgaagctcgcccagagaacgaaaattcgcccccttcttcatcgtctttgccatctagcccggcacattcctcttctgctggctcttccagagcatctacgtcatcttcaacctcttctcatgccgtagtggaagcagatgcggaaactgaaccttttgtttccttgtcgatgtctactactgctactattagcaaaatttactccccangatatgaatgggacacagcagatccaatcattgatgccggcgattccaagatccatggggaacacgctatcggtacgtga

SEQ ID NO: 81958 - DNA, 2418 bp, Saccharomyces pastorianus
atgttgcggtttcagcgatttgcgtcctcgtatgcccaagcacaggccgttagaaaatatccagttggaggtatattccatggttatgaagtgagaagaattctaccggttccggagctgagactcactgcggtagatttggtgcactcccagacaggagccgagcatttgcatattgatagagacgacaagaataatgtgttcagcattgcttttaaaaccaaccctccagattccactggggtccctcatattctagagcatacaacgttgtgtgggtctgttaaatatccagttagggacccttttttcaaaatgctaaataaatctctagctaatttcatgaacgctatgacaggtccagattatacattttttcccttttccactacgaaccctcaagatttcgctaatttaagaggtgtttatttagactccaccttgaatccgctacttaaacaagaagattttgatcaggagggttggaggttggagcagaaaaacatcacagacccggagagtaacattgttttcaaaggtgttgtctataacgaaatgaaaggtcaaatatcaaatgccaattactatttctggagtaaatttcaacagtctatttatccttccctgaataactccggcggagatcctatgaaaattacagacttgagatacggcgatctcttggatttccatcacaaaaattaccatccctccaatgcaaaaactttcacgtacggtaacttgccattggtggatacgttaaagcaattaaatgagcagttcagtggttacgggaagagagctcgaaaggataagttgttaatgcctattgatttaaaaaaagacatagatgtcaagttactgggtcaaatagatactatgcttccaccggagaagcagacaaaagcctcaatgacgtggatttgtggagcgccacaggacacatatgatacctttttgttaaaagtactggggaatttattaatggatggccattcttctgtaatgtatcaaaaattaatagaatcaggaattggtttggagttctccgtaaattcaggtgttgaaccaactacagcagtaaatttgctaactgttggtatacagggcgtgagtgatattgaaatatttaaagacactgtaaataatatttttcaaaacctgttggaaacagaacatccttttgaccgcaagcgtatcgatgccataattgaacaattggaattatctaagaaggatcaaaaggctgactttggacttcaattactctattctatactacctggttggacaaacaaaatcgatccttttgagagcttgttgtttgaggacgttttgcaaagatttagaggtgacttagaaacgaaaggtgatactttattccaagatttaatccgtaaatatatcgttcataaaccttgtttcacgttttccattcagggatctgaagagttctctaaatctttggatgatgaagaacaaacaagactgagagaaaaaattactgccttggatgaacaagacaagaaaaacatctttaaacgtggtatactgttacaggagaaacaaaatgaaaaagaagatttatcctgtttacctaccttacaaataaaagacatcccaagagctggtgataaatattcaatcgaacagaagaataatacaatgtctaggattactgataccaatggtatcacatatgtcagaggtaaacgtttactaaatgacataataccctttgaactcttcccatacttacctttatttgctgaatcgttaactaacctagggacaacaacagaatccttcagtgaaatagaagatcagataaaattacatacgggtggtatatcaacacatgtagaggttacatctgaccctaacaccacagagcctcgcctgattttcgggtttgacggatggtctttaaattcgaagaccgaccacatttttgaattctggtctaagatcttactagaaactgatttccataaaaacagcgataaattgaaagttcttatccgcttattagcatcttcaaacacatcttctgtagcagatgccggtcatgcatttgcaaggggctattctgccgcacattatagatcaagtggagctataaatgagaccctcaatggtattgagcaactacaatttataaatagattgcacagcttgttagacaatgaagaaactttccaaagagaagttgtcgacaagctaactgaattgcaaaagtacattgttgataccaataacatgaattttcttatcacctcagactctgatgttcaagcgaaaacagtagaaagccaaatttcaaaattcatggagagattacctcatggcagctgcttgcccaatggaccaaagacttcagattatcctcgtattggatccagatgtaacttactttga

SEQ ID NO: 81959 - DNA, 309 bp, Saccharomyces pastorianus
atggaatatacctccaactggatattttctaacggcctgtgcttgggcatacgaggacgcaaatcgctgaaaccgcaacatatataccgcagtatattttatagtaactttattcttttgagtagccttctaattggtggcttattgattacaattgcttgttatcatatctgtcaatgcttgttcaacaattcaatgatttactactacctttatcatagagcccctccgtatatttatcactgtaaacgaagggccaaatttttacatgcttttttttcgccacccaaagggatctacgacgcctga

SEQ ID NO: 81960 - DNA, 1734 bp, Saccharomyces pastorianus
atgggcggtcaagaaagtatatcaaataataactcagactcattcattatgtcgtcccccaacttagactctcaggaatcttcaatatcacctattgatgagaagaaaggcaccgatatgcaaaccaagtcgctttcaagctattctaaaggtacgcttctctctaagcaagtacaaaatttattagaagaagctaataaatacgatccaatatatgggtcatctttacctcgaggatttttaagagatagaaacaccaagggtaaggataatgggttggttccgctggtggagaaggttatacctcccattcacaagaaaaccaataatagaaacacaaggaagaagtcatctaccaccacgaagaaggatgtaaagaagccaaaagctgcaaaagtaaaaggaaaaaatggcaggactaaccataaacataccccaatttcaaagcaagaaatagatactgcacgagaaaaaaagccattgaaaaaaggtcgggcaaacaagaagaatgatcgcgatagtccttcatcaacatttgttgattggaatggcccgtgtctacggttacaatatccattatttgacatagagtacttaagatcacatgaaatatattctggaactcctatacaatccattagtttaagaacaaattctccacagccaacgagcttgacatcagataacgacacttcctcagtaacgacagcaaagttgcagagtattttattttcaaattatatggaagagtacaaagtcgacttcaaaaggtcaacagccatttataatccaatgagtgaaattggtaaattaattgaatacagctgcctggtctttttaccttcaccttatgctgaacaattgaaggaaactatactaccggacctaaatgcatcatttgataactctgacacgaaaggtttcgtgaatgctataaatttatacaacaaaatgattcgtgaaattcctaggcaaagaataattgaccatttagaaacaattgataaaattcctcgttcattcattcatgacttcttgcatatcgtctataccaggagtatccatccgcaggcgaataaattgaaacattacaaagcattcagcaattatgtttatggagaacttttgcccaatttcctatctgatgtatatcaacaatgccagttgaagaagggtgacactttcatggatctcggttcgggagtaggtaattgcgtagtacaagctgcgttggaatgtggatgtgcattaagcttcggatgtgaaatcatggatgatgctagcgatttaactatactgcagtacgaggaactaaagaagaggtgtaagttatatgggatgcgtttgaacaacgtggagttttcattgaagaaaagctttgtggacaataacagggtcgctgaactaattcctcagtgcgatgttatcctcgtaaataattttttatttgatgaagatttgaataaaaaagtcgaaaagatactacaaacggcaaaagttggatgtaagatcataagtttgaaaagtttaagaagcctcacttatcagatcaacttctacaatgttgagaacatcttcaatagattaaaggtgcaaaggtatgatcttaaggaggatagtgtttcatggacgcatagtggcggagagtattatatatcaacagtgatggaggatgtggacgacagtttattcagcctgctgcaagaggtaggaggaacagaggtacgccggtga

SEQ ID NO: 81961 - DNA, 618 bp, Saccharomyces pastorianus
atgtctatttctgaatcttacgcaaaggaaataaaaactgcatttaggcagttcactgactttcccatagagggtgagcaatttgaggattttttacctattattggcaaccccacactattccaaaagttggtacacacgttcaagacgcatttagaagaaaagttcggcaaagaaaagatcgactttattgcaggtatagaagctagaggccttctatttgggccatccctagcactggcattgggagttggatttgttccaataaggagagttggaaaattgccgggtgagtgtgcttctataacattcacaaaattagaccatgaagaaatttttgaaatgcaggttgaagccattccctttgattccaacgtggttgtcgtggatgatgttctcgccaccggtggaacggcatatgctgcgggcgaccttatcagacaagtgggtgctcatattctggaatatgactttgtgctagtgttagatagtctacatggtgaggaaaattatctgtctatttttcatatgcctctgattaattgtcttgctctcttcatatttccttctcgctttgtatttagtgacttttgtatttacggtttatttaggacggcc

SEQ ID NO: 81962 - DNA, 135 bp, Saccharomyces pastorianus
atgtttaatgtcctattacttccaaaaataagtagtttttccaacgaaatagccttgttggcgcaatcggtagcgcgtatgactcttaatcataaggttaggggttcgagccccctacagggctatcttttttaa

SEQ ID NO: 81963 - DNA, 540 bp, Saccharomyces pastorianus
atgtcgaagacaagatactatttggaacaatgtattcctgaaatggatgacttggtggagaaaggactattcactaaaaatgaagtttcattaattatgaagaaaagaactgattttgagcatagattaaattccagagggtctagcataaatgactatataaaatacattaactatgaaagtaacgtcaataaattacgtgccaagcggtgtaagagaatcttacaggttaaaaagacgaacagtctatctgattggtctattcaacaaagaataggttttatttatcaaagaggaacgaacaaatttccacaagatttaaagttttgggcaatgtatttgaactacatgaaagcgagaggtaaccaaacatcatacaaaaaaattcacaacatttataatcagcttctaaagttgcacccaacgaatgtggacatttggattagttgtgcgaaatacgaatatgaagttcatgctaacttcaagagttgtagaaatatttttcagaatgggttgaggtttaagcctgatgtgcctaag

SEQ ID NO: 81964 - DNA, 426 bp, Saccharomyces pastorianus
atggttgtagtgggtaagagtgaagtgcgcaatgtaagcatgagtaggccgaagaagaaatcattgattgccatcctgtcgacctgtgttttgtttttcctcgtgtttataattggtgctaaatttcaatatgtttccgttttctccaaattcttagatgacaggggggacaacgagtcacttcaattgctcaatgacatagaatttacaaagctaggactgacacctagggagccagtaattatcaaagacgtaaagacagggaaggagagaaaattacatggacggttccttcatattaccgatattcatcctgacccttattatgtggaaggaagctctattgatgcagtttgtcacacaggaaaaccaagcaaaaaaaaaggatgtggcacccaagtttgggaaggcaatgtctggatgtga

SEQ ID NO: 81965 - DNA, 189 bp, Saccharomyces pastorianus
atggacggttccttcatattaccgatattcatcctgacccttattatgtggaaggaagctctattgatgcagtttgtcacacaggaaaaccaagcaaaaaaaaaggatgtggcacccaagtttgggaaggcaatgtctggatgtgattctcccgttattgtaatggaagaaactctgagatggattaaa

SEQ ID NO: 81966 - DNA, 1461 bp, Saccharomyces pastorianus
atgttatctatcttaattttcgccataccgggcaccttcatatctgctgtggttattggaatcatattgtatatctggacctttttaggactagagagtattgacatttcattcgcagatgcaatgtctgttggtgctacattatctgctaccgaccctgttacaattctttcaattttcaatgcgtataaagtggatcctaagctatataccatcatttttggagaatcactgttaaatgatgccatctctattgttatgtttgaaacctgtcaaaaatttcatggtcaacctgcaacattttcgtcggtttttgaaggggcaggcctctttttgatgactttctccgtttcgttgttgataggcgttcttataggaattcttgttgctcttctgttgaaacacactcacataaggcgctatcctcaaattgagagttgtttgatcttgttgattgcttatgaatcctattttttctccaacggttgccatatgtccggtatcgtctccttgttattttgcggaattactttaaaacattacgcctattataacatgtcaagaagatcacagatcaccattaagtatattttccaactattggcaagattatcagagaatttcatctttatctatctaggtttagaactttttactgaagtagaactagtctataagccactgctaattattgtggcagctatttctatatgtgttgctcgttggtgtgctgtgttcccattgtcgcaatttgttaactggatatatagagtaaagacaatcagatctatgagcggcataaccggagaaaatatttctgttcccgatgaaataccctacaattaccaaatgatgacattttgggcaggtttacgtggtgctgttggtgtcgccttggcgttgggaattcaaggtgagtataagttcactttattggcaacggtccttgttgttgttgttttaacagttatcatttttgggggcactactgcaggaatgttagaagttttaaatattaagactggttgcataagtgaagaagatacatctgatgacgagtttgatatagaggctccaagggcgataaatttattgaacggtagttctattcagacagatttgggcccatattctgacaacaattctccagatatttcaattgaccaattcgcggtcagcagtaacaagaatctccccaataacatatccacaactggtggtaatacttttggaggccttaatgaaactgagaatactagccctaacccggcaaggtcttctatggataagcgtaatttgagagataaactgggaacaatctttaattccgactcacaatggtttcaaaattttgatgaacaggtattgaagccagtattcttggacaacgtttctccatccttacaagattcggctacgcaatcacctgcagattctcttcccaaaaccactagactttaa

SEQ ID NO: 81967 - DNA, 363 bp, Saccharomyces pastorianus
atgctatccaaggtattgctgaatatagctttcaaggtgctgttaaccaccgccaagagagcagttgatcctgacgatgatgatgaacttctaccttccccagatctcccgggtagcgatgaccctattgcaggtgatcctgatgtagacttaaaccctgttacagaagaaatgttctcttcatgggcattgttcattatgttgctcctattgatctctgcattgtggtctagttactatttaactcagaaacgaattagggcagtgcatgaaactgtgctttctattttttatggtatggttattggcttgataataaggatgtccccccgggcattatattcaagatacggttacttttaa

SEQ ID NO: 81968 - DNA, 1167 bp, Saccharomyces pastorianus
atggtgctttttactcggtgtgaaaaggcaagaaaggagaaactcgccgctggttataagcccttagttgattatttgattgattgtgatactcccacatttttagaaagaattgaggcaatccaagagtgggaccgatccagagatgatctttatgtttggattcccattctagacagaatggacgggctgttgttaaaagtggcagagaaatataaatacaagcaagaccccaagaaggagtgtgaagtcaaattggtggaaatggaagcgcatgatgttgattattgtttgaaaatgctaaagtttactcgtcgactacttctaaatacagaaaacaggtttgtttattcatctggagatgttttaatgtatctactgaattgtccgaattttacaataaaactagcggtcatgcgaattttagccattttaggggaaaggtttgtgattgcgagagaaaaaatagttgcacataacatatttggagatcacaacctcaggaaaaaaactctcaaactagctttatctctgtcatcttccgtcatggatgaagacggagagcacttttctcttgtcgatctatattttgataagaaaaaagtgcctcaaaaatggagaaagttgagatttacacattatacttcaaacgactttaaaaagtcaagccagcaaaaaaataacattaatgaaacccaaacttccattaagaaggtaactatgacgacccaagaactgtgtgaacactcactacagcaaatatttgataagggtatggcccttttacccgcagaaagttggtttgatttctcaataaaagcttcggtggcgaaggccttcagtgatgattcaggtgaaaatatagatttcagaaatataattattgaaacaaaactgaatgctattgcatttgttaacaccattttctcggctcctcaagtaagctcgaagttatttgaattagatccgtatgcttttaatagtctaactgatttgatatcgttgtctgaaaccaaaataccaagagagctaagaacggatgctttattcacattggaatgtatatccttgaagcatgtctggtgctcagacattatcagaaatctcggtggtaacatatcgcatggtctgttgggatcctctagagtcgacctgcagcatgcaagc

SEQ ID NO: 81969 - DNA, 507 bp, Saccharomyces pastorianus
atggtggtacgtgatcaagatgaggcgttgagaaattcttataaatatgttaagctgtatgtcaggcaggaccagctggaggatacggtggacatactcgctaagcaggacgaggacaagtccaacaatgatgacaggcgcagtctagcctcgatattggactcgagcagttccgtcgaaaagaaggggaaaggcagcaacgaaaagtacctaccatgcgtatctttcaacacagttcccagatcaaaggtatcttcgcccttagatgaagagaaaagagaatttcctggcatgcagatccctgcagattatacaatggaggaatattatgacgacgaaagtggctttacctcggacaacaatgccgactacttctccgggaatagctattcgagtaggcgagagggcagtgctagtcccggcaggtattcttctccacctcctgcctctaaaagaaacatcaaaataggtaagatgtttaagatttctgaagatgtaaaattgtaa

SEQ ID NO: 81970 - DNA, 852 bp, Saccharomyces pastorianus
atggagcgattgaagcaactggaggaaaaaaggagacaattgaaagagctgcgtgagaggcgaaaacaagccagcttgttccctgggagcgagacgatgggccaccatcccacagaggtgcacgctaaggcaaccatggtcagcgtttcagtgcagaccgacatggaggaaggctcaaagattcaagagccccaatctgcatatcttcgacgtaaggaggttataacatacgacaaaggcattcaaacagatcaaattgaggaagaacaactgcaagaaaatgaaaatcacaccactactgatgctgtcgccattgaaaccactgctgccgacgaaaataataaagacaaagctgaaaacgaccagccaaggttagaactagccaaaccttttcttgttgaagaggcggcggcaacgctgagcaacgctagttttgcgcggctggagacagaggtttctgcgtcaggccagcaggcgccatcgaacatgcaacaggataaagacaacctcatgcaatggaacatggtcagtgagaatttacaatcagagacagactgcgattgtatcgctcaggagtatgacccaggaaaaggcgtcttggttgtggtttatctacgattgccgccggcagacctacagtatgctagcagcgaagcggcgtggtctgtggtgaatgtagtcaagtgcgataatgccagcggacgcaacggcctcttgatagatatggtagagttccgtggtacgcggatcatgacagccacgatcctccgtcggtatcatccggaaagcaatgtaatatcaatcttgttggcgaccttcacgggcaagatcatatgtacgagcttagattga

SEQ ID NO: 81971 - DNA, 312 bp, Saccharomyces pastorianus
atgatgttcaccttcatattccatattttcaatggttttttccactgttttttcaaaatattctacttcattttccggttctatagagccaatttctttttcctttggttgtatttccttcatctcgtaatgggaaacatcgtcaaggtcgttaccattcatattcatattagagcttccttcattattccgcccatggcgtctattaccaagcgtcataatgtgcaatatttgatattatataagctacttgagaaagcgatagttttttttttcttacacaaaaaaaaaaaaaacataaagcacctataa

SEQ ID NO: 81972 - DNA, 1512 bp, Saccharomyces pastorianus
  modified_base (1453)..(1506): a, c, g, t, unknown, or other
atggaaagcaaagaaatatcaattaggtcaagaacccctccatcgaagctatattccatccaatcatgtattggcagaggtaactttggtgatgtgtataaagcagtggatagagttacgcaagaaattgtggcaattaaggtggtcaacctggagcattccgacgaagacattgaactgttagcacaggaaattttttttctggcggaattgaaatctcctcttattacgaactatattgcaacaatgttagaagatgtctctatgtggattgtcatggaatattgcggcggtggatcatgttcagatttactgaagcgaagttacgtcaacggtttgcctgaagaaaaagtttccttcattattcatgaagtcaccttgggtttgaaatacctgcatgagcaaaggaaaattcatcgtgatatcaaagcagctaatattttactaaatgaagaaggtatggttaagttgggtgatttcggagtaagtggccacattcgttccactttgataagggacacttttgtaggaacgccgtattggatggctccggaagttgtttgctgcgaagttgatgggtataatgagaaagcagatatatggtccttgggtatcaccacctatgagttactcaagggcttacccccattatctaaatatgatcctatgaaagttatgactaacttaccaaaaaggaagcctccaaaattacaaggtcccttttcggatgcagcaaaggatttcgtagctggttgtcttgttaaaacacctgctgatcggccatcggcatataacttgttatcatttgaatttgttaagaatatcaccataacgaacttgaaaagtgatgttgatctaatcaaacagaaaaaagttcaggagagatatacaaaagttcccaaataccctcttcaaaatcgcttgtatagaaacagcaacacagtgaggggaaaggaattttggaattttgaatcgacaagactaagcacaacacaaatttccaaagaggaattatctcccattacacaagactctccaacatcatctttaaatatggaaagtccttatttacttcatgggcaaactgtaacgccgataaccaacccaagttcttcatcatttagaaaatgtacgcaaccagttttcgagcttgattcaggaatggatatagattcaggctgcccaaatgctcaagcagagaccgaaatagttcctctctctaatcacaataagaagcataaaaagaacgatattcaggcgttgaagatagaaaagtttgactacttgaaaaacattgtatctcatattctcaaccgaatgtatgatcgtgcgcgcgacgatgaaacaagaaaatacgtaaatgaaatgttaaagcaattcattaaaactgaggcaaacgttcctggatttaatgaggtttttatagaagagatctcactaagaattgaagcannnnnnnnnnnnnnnnnnnnnnnnnnnnnnnnnnnnnnnnnnnnnnnnnnnnnngcttga

SEQ ID NO: 81973 - DNA, 207 bp, Saccharomyces pastorianus
atgacaaaatcagacgaaacaacagctaccagcttgaatgccaaaactctaaagagttttgaatccactcttccaataccaacttacccaagagaaggtgttaaacaaggtattgttcatctgggagtaggtgcattccaccgttcccatttagctgttttcatgcaccgtctgatgcaggagcaccatttacaggattggtccata

SEQ ID NO: 81974 - DNA, 1167 bp, Saccharomyces pastorianus
atgttcaaagttcttgaagaacaaaatcaattgctatccaaatcggaaagagatccagttttcttcgatttgaaggtgttggaaaactccacaacaacaccctccattgcaggtccttcatccacgccaaatcctagtagtaacaccacaccaactcatcctacatccgaaaaggatacaaaggatatgagaagcagcagatacagtgaccttatcaaggatttgggccttccgcaatccgcattttccatacaagatttattgatgagaattttccaagacctgaataactattccgaatgcctcataccaattgatgagggaaatgcagtagacataaagatttttccgctgttgagaccaccgacaacttgtgtctcattagaagatgtgcccctgtcgtctgtaaatttgaagaagattattgatgtcaactgggatccaaccatgatgagtatagtcccttacattgatggcttaaacagcattgccaaaatttctaaactaagcaacagtgatcctggcctagtgatagagtgcatacgtcacttaatatactataagtgtgttacattatcagatattttccaattttctaacatatacgctccttcttcattaattaggaattttttgactgatccactaatggctagtgactgtcaatcttatgttacgttcccagaagtgtctaaaatatcgaacttgcccttaaacaaaagtctgggttcaggtgaccaagactcaccatcattttctgtacgaagaaaatccaaatcatctagcataccgtcaaacccggattctagaactacatcttttagttctaccagtagagtttctcaaaactcctccttaaattcctctttttcatcaatttataaagactggaggcaatcacaaacctcctgctcgagttcaaatattcatgtcatcaacaatcataaccgattcctaccaacaagatcatgcctatttgacctttataggtcactttcacaaggtcaaacgctgaaaacatggtatgagtcgaaatatatgattttaaaagaaaataacattgatataagaaggttcataacgtttggcctggaaaaacgtatcatttacaggtgctactcttttcctgtaatgataaatgcaggttcacgtgaaccaaagaaatga

SEQ ID NO: 81975 - DNA, 117 bp, Saccharomyces pastorianus
  modified_base (97)..(97): a, c, g, t, unknown, or other
atggtcagatcatcaggccaacggcaaatgctaagctatttccaagggtttgtgcccatacacacaatattttattccgtgttccatcctacagaangttctcagattaatatgagt

SEQ ID NO: 81976 - DNA, 132 bp, Saccharomyces pastorianus
atgttaccactgtgcttgacgtttttgtccttctttctgtctcttggtggttccttcaaagcagtaatgaccaaagaggaagcagatgggacaacagaggcagcagcttgtctgttttggatctttaattga

SEQ ID NO: 81977 - DNA, 1776 bp, Saccharomyces pastorianus
atggataaattaacacccttggagcttttgaactttgatagagcaatttttaaacaagttggcccaagtattgtcagtactttattcaacatttacgtagttgcatctgatgaccatatctctaccagaatgataacaagtttggacaaatgttcctatatttctgcattttttgacttcaaagatctctttaatgatatactaaactccattgctaagggcactactttgattaattcaagccatgacgatgaactttcaactttagcttttgaatatggcccaatgccactggtacaaattaaattcgaagacactaacactgagatcccggttagtacagatgctgttagatttggtagatcatttaagggtcaactaaatacagttgtttttttccggattattcgcaggaacaaagatcctaaaattttctccaaggaattatggttaaacattgttaatattatactaacattgtacgaagacttgattttgtctcctgatattttccctgatttacaaaaaagactgaaattaagcaacttgcctaagccatctcctgaaatttctattaacaagagcaaagaaagcaaaggtctcttatcaacatttgcttcttatttaaaaggtgatgaagaacccacagaagaggaaatcaaatcctcaaaaaaagcgatggagtgcataaagtcgagtaatattgccgcctctgtctttggaaatgaatcaaatataacagcggatttaataaaaactttactagactccgccaaaactgagaaaaacgcagataattccaggtattttgaagcagaacttttatttatcatcgaattgactattgcattatttctattttgcaaagaggagaaagaattaggaaagttcatacttcaaaaagttttccaactttctcacacgaagggcctcacgaaaaggactgttcgtagaatgctaacatacaaaattttgttaatttcgttatgtgcggatcagacggagtacttgtccaaattaataaacgatgagctgttaaaaaagggggatatttttacccaaaaattctttgcaactaatcaaggtaaggaatttttgaagagactattttcattgaccgaatcagagttttatagaggatttttactaggaaatgagaatttttggaaatttttaagaaaagttacagcaatgaaagagcagagcgagagcatttttgaatatctaaatgaatcaatcaagacagacagcaatattttgacaaatgagaacttcatgtgggtcctaggattattagatgaaatttcatcaatgggtgccgttggaaatcactgggaaatagaatacaagaaattgacagaaagtggtcataaaattgataaggagaatccatacaagaaatcgatcgaattatcattgaaatccattcaactaacatcacacttgctggaagataataacgatctgcgtaaaaacgagatattcgctattattcaagctttggcacatcaatgcatcaatccgtgtaagcagataagtgaatttgcagtggtaacgctagagcagacgctcatcaataaaatcgaaattccaactaatgagatggaatcggtagaagaattaattgagggcggattactaccgttgctaaattcgagtgaaacacaggaagaccagaaaatcctcatttcatccatattaacaataatttcaaatgtttatttgcattatttgaaactaggcaagacaagcaacgaaacgttttggaaaatttag

SEQ ID NO: 81978 - DNA, 2223 bp, Saccharomyces pastorianus
atgtactctatatttacctctcaatctggagtggccgctttgctggggggaggaagtgtgatatttagcaatcaagatgactacttggctcacacattcaacgatttgaatactaacaagcacgatgatccatttttatctggattcattcagttaagacttatgttgaataaactgaaaaatctagataatatagattcactaaccatattgcagccatttttattaattgtgagtacaagttccatttctggttacatcacttccctggccctggattctttgcagaaattctttaccttgaatatcatcaatgaatcatcgcaaaactatattggtgcacacagggcgacggtaaatgctctaacacattgtaggtttgaaggatctcaacaactttctgatgattcagttcttttgaaagtcgtgtttttactgcgttcaatcgtcgactcaccttacggagatttattatcaaactctatcatatatgacgtattgcaaacgattctttcattggcttgtaataacagaaggagcgaagtccttaggaatgctgcacaatcaacaatgatagccgttactgtaaagattttctcaaaactaaagactattgagcctgttaatgtgaatcaaatatacatcaatgatgaaagttacacaaatgatgtattgaaggccgatacaattggcacaaatgtagaatccaaagaggaaggaagtcaagaagatcccatcggcatgaaagtgaataatgaggaagctattagcgaggacgatggcattgaagaagagcatattcattcagagaagagcacaaatggcgccgaacaactagatattgtgcaaaaaacaacaagatcaaattccaggatccaagcgtatgctgatgataactatggattgcccgtggttaggcaatatttaaacttcttactatcattgattgcgccagaaaatgagttaaaacattcatactccactagaatatttggcctagagttaattcaaacggcattagaaatttcaggtgatcgattgcagctatacccacggctttttacactgatatcagatcctattttcaaaagcattttgtttatcatacagaacactacaaaattatcactacttcaagctacattgcagctatttactactctagttgttatattgggcaacaacttacaattacagatcgagctcactctaacaagaatattttctattcttttagatgatggtaccgcaaataactcgagttctgaaaataagaacaagccatcaataataaaggaacttctaattgagcaaatatccatcttatggactaggtcgccatctttttttacttctacttttatcaatttcgattgtaatctcgatagggcagacgtttccataaactttttgaaggctttgactaaattggccttaccagaatccgccttaactaccacagaaagtgtaccacccatttgccttgagggattggtctccctagtcgatgatatgttcgatcacatgaaggacattgacagagaagaatttggcaggcaaaagaatgaaatggaaattttaaaaaagagggaccgtaaaacagagtttattgaatgtaccaatgcattcaatgaaaagcccaaaaaaggtattccgatgttaatagaaaaaggttttattgcttccgactccgataaagatattgcggagtttcttttcaataataacaaccgtatgaataaaaaaacaatcggtttgctactttgccatccggacaaagtaagcttgttgaatgaatatattcgtttgtttgatttttcagggttaagggtcgatgaagctattagaattttgttgacgaaatttaggttgcctggtgaatcgcaacaaattgaaagaatcatcgaagccttctcgtctgcgtattgtgaaaatcaagattacgatccatccaagatcagtgacaacgcggaggatgacatttctactgttcaaccagacgctgattctgttttcattttaagttattcaattattatgttgaacactgacctacataaccctcaagtgaaggaacacatgtcatttgaagattactctggtaacttaaagggatgctgtaatcacaaagacttcccattctggtatttggatagaatttactgttcaatcagagataaagaaattgttatgcctgaagagcaccacggcaacgaaaagtga

SEQ ID NO: 81979 - DNA, 96 bp, Saccharomyces pastorianus
atgagtgataaggaattcgtcacggtagatcccgtcactatcataatcaaagaatgcattaatttatcgacagcgatgcggaatactctaattacc

SEQ ID NO: 81980 - DNA, 1737 bp, Saccharomyces pastorianus
  modified_base (1678)..(1715): a, c, g, t, unknown, or other
atgaccacgaccgctacccaacacttcgctcaacttttacaaaaatatggcatcgacacagtctttggaattgtgggcatccctattgttcaactagcggatacgatggttgccaacggtatcaaattcattccatgcaggaacgaacaggctgcctcatatgcagcctctgcttatggttatattagtgataagcccggcgtgttacttattgtcggcgggcccggtttaatccacgcactggctggtatatacaactcaatgagtaataggtggcctcttctagtaattgcagggagttcttctcaaagtgatatacataaaggcgggtttcaagagttggatcaagttagtcttttgtccccatttttgaagtttaccggaaagttaacccctgacaatattgacatgattactcagaaggctttgaattactgtatacaaggcactgcaggggtttcttacatagacgtccctgcagattttattgagtatgaaaaacccttagaaggaaacgaccgtacaggaaatgaattaccgatgatattaactccaaacttatgtggccctgatccgtcgaagatcaaaaaagttgtacagcttattttgcaacataaaaataaaaacattctgattgttattggaaagggtgcggtaaaaaactcacacgaaatccgcagactagtaaatacgttcaatctaccatttttacccaccccaatggctaagggaattgtcccagactcttctccactgaacgtttcatctgcaagatctcaagcgttgaaaatagcggatattgttcttgttctcggggcaagattaaactggatattgcattttggtgcttcacccaaatggaactcagaatccatattcctccagttcgacttcaatcccgaaactttgggggataacaacgtctcacctggtgctgacctttccatatggggagatataggcttaagcgtaaccgctttagttgaggaattgactcgccaagattcctgctggaagtatagtggtgttaagcaagaaatacgagagaaaattcaactgaatcaaactcgtctattgaggaaagagaagactagagggacacaattgaattacaaccaggtttatggaactttgaggcctcttatcgatgattacaggacaatacttgtgacggagggagcaaatactatggatattgcgcgtatttcattccctacagacgctccaaggcgccgtttagacgcagggaccaacgcgactatggggattgggctcggatatgctcttgcatgcaaggcatctcatccggaactcgatgtggtgctgattcagggtgattccgcatttggattctctgccatggaaattgaaacggcagtaaggtgtcagctggcattggtcatcgttgtgatgaacaatagcggtatttaccatggagaaaaggatatagagggtgatttacctccaacggcactaagcaagaactgccgttacgatctcgtaggcaaaggactgggtgccaatgatttttttgtcaacacaataagcgaactgagtagatgcttccaacaagccgtgcagctttctcggactaaaagagaaacaagtgtcatcaacgttatcattgagcctggcgaacaaaagcaaattgcctttgcctggcagaataaaccgcgtnnnnnnnnnnnnnnnnnnnnnnnnnnnnnnnnnnnnnntatatgttcatctctcttatag

SEQ ID NO: 81981 - DNA, 240 bp, Saccharomyces pastorianus
atgaacaccttacttaaaaaatatagaaaacaacgttatgcctggctttggttccttctgttttccaaaattgaaggttctctgccaattgccctcagaattttattgagtttgcaaccattctgctgtaacatttacaggaaatattatcaagaaaataagaaagtgaagagcacgtccggaaacacagcacttaaaataatagaaaagctcgaagcctcgtctctaacctccgtttga

SEQ ID NO: 81982 - DNA, 1275 bp, Saccharomyces pastorianus
atgcggaccaattggaattttttcttttgtatccttctgcaggccattttcgttgtgggcacacaaacttcaagaacgcttgttctttacgaccaatctacggaacctttagaggagtactcggtctatttaaaagatctagaacaaaggaattacaaacttgaatatttagatattaacagtacttccactactgtggatttgtatgacaaagagcaaagattgtttgataacatcatcgtttttcctaccaaaggaggcaagaatttagcgagacaaatcccagttaagcagttgattaaattttttgaaaatgaaggtaacattttatgcatgagttctccaggtgctgttccgaataccattcgtttatttttgaatgaattaggtatctatccaagtccaaaaggacacgttattcgtgactatttttcgccctcctcagaagagctagtggtttcttctaaccatcttctgaacaaatatgtgtacaacgccagaaaaagcgaggattttgtttttggggaaagttcagctgctttattagaaaatcgtgaacaaatcgtcccaattttaaacgctccaagaacatcctttactgagtccaaaggcaaatgcaactcttggaccagcggatctcaaggctttcttgtagttggtttccagaacttaaacaatgctcgtttagtatggatcggcagtagtgatttcttaaagaacaaaaatcaggactctaatcaggagtttgcaaaagaattactaaaatggacatttaatgaaaaatctgtaatcaaaagtgtgcatgcggttcattcacatgcggatggtactagttatgacgaagagccctacaaaatcaaggacaaagttatttattctgtaggcttttcggaatggaatggagaagaatggctaccacatatcgctgatgatatccaatttgaactaagacaagtggatccgtactaccgtctaacattgtcgccaagcggaaacgattctgaaactcagtattacaccaccggtgaattcatccttccagaccgccatggagtgtttacattcctcactgactatcgtaagattggcctgtcgttcactactgacaaagacgttaaagctatccgtcaccttgctaatgatgaatacccaagaagttgggaaatcagcaattcttgggtttatattagcgccatttgtggcgtcattgttgcgtggatatttttgtgtttctttcgtcggggatcctctagagtcgacctgcagcatgcaagc

SEQ ID NO: 81983 - DNA, 1410 bp, Saccharomyces pastorianus
atgttggcactccggagatttatattaaaccgaaggtctttgagatcgtgtaccataccgattctagtcggagccttgatcattattctcgtgctattccaactagttacccaccgaaatgatgcgcttatacgatcaagcaatgtaaacagtacaaacaagaaaacattgaaagatgcagatcctaaggttcttattgaagccttcggctctcctgaggtcgacccagtggatacaattccagtatcgccactagaattagttccattttatgaccagtctatagatgctaaaaggagttctagttggctaatcaataaaaagagctattataagcatttcaacgaattaagcttaactgatagatgtaacttttatttccggacactgtatacgctagacgatgaatggactaatagtgtgaagaaactggagtacagcataaatgataatgaaggagttgacgaagttaaagatgcgaatggaaatccaatggatgagaaatccgagagattgtatcgccggaaatatgatatgttccaggcatttgagagaataagagcctatgatagatgttttatgcaggccaatccagttaatattcaagaaatttttccgaaaagtgataagatgtcgaaagagagggttcaatcaaaattaatcaaaaccttaaatgctactttccctaattatgatccagacaattttaagaaatacgatcaattcgaattcgagcacaaaatgtttccgtttataaataactttaccacagagacttttcatgagatggttccaaaaatcacatcaccttttggaaaagtattagagcaaggcttcttacccaagttcgatcataaaactggtaaagtggaggagtatttcaaatatgaatacgatccatcaaaaaccttctgggccaattggagggatatgagcgccaaagtagccggtcgtggtattgtattgagtttaggttccaaccaatttccattagctgtcaaatttattgctactttgagatttgaagggaatactttaccgatccaagtggtctatagaggcgatgagctgtcgcaagaactagtggacaaacttatatatgctgctagaagtcctgatttcaaaccagtagaaaataattacgataattctaccaatgttccacaagaaatttggttcctagatgtttctaataccatccaccctaagtggcgaggtgacttcggtagttataaaagtaaatggctagtggttctactcaatcttttgcaagaatttgtctttttagatattgatgctattagttatgaaaaaattgataactacttcaagaccactgaataccagaagacagactgtattttacagggaggggatcctctagagtcgacctgcagcatgcaagctgcc

SEQ ID NO: 81984 - DNA, 366 bp, Saccharomyces pastorianus
atgcttgctgctatgattcatttggccaaaaatacagcccactgcacacatggtgataaagagaatttctggttagggttcttggccgcaggtcacacttatgcactgcagggagtgtattccggagctattggtgattatgtaaagaaaaccgacttgaacggaaagaggcaagaagctgcagtcgaaatatgttccgggcaaatagcacatatgtctactgataagaaaactttactttgggttaacggtggaggtaccttttgtaaacacgataatgctgctaaagatgattggaaaaaagatggcgactttaagaaattcaaagatcaattcaagacttttgaagaaatggaaaaatattag

SEQ ID NO: 81985 - DNA, 114 bp, Saccharomyces pastorianus
atggctagcactgcagtaatgatggacgtggattcctctggggtcaatgacttgcaccattctgagaagaaatatgcggaagaagatcaggttcaggaactattgaaagtttag

SEQ ID NO: 81986 - DNA, 939 bp, Saccharomyces pastorianus
atggtaaacaaacaacaaacgagcccaaacataacaacagtagaattgacgcctaggaacaacaatacaacatacttacagcaagactactacctaattagtgcaattagattgcgctgggatagatctgaagctttttttccgattatgagcctccctgttacacctgtcaagagcaaagtgtgcagtacattatcgatacaacatgagatggaccatgatcaatgccgtgatgtgttgtgcccacgcgaaaacttactagccattaatagaactaataatatagagagtgttgctataccgcgacagagatcgagcaagaacaagaaaccccatgagcatacacaatcgcaggttcgattttccattccagatccaaatgaaatatcacaggactccccactgaaaattgtattccccaagagtggaaatgaaaccgaaagaagaatgtctacttcatcattacttatgaatagccatggtcatttagtcgacatgcactctaaaatactggtcgatgtccctaaagaagtttggaagtttcatcataacaggagaaaaaaatgtgaaagcaggcaccgtaaaactcgttctgatgttaggtccaacacaagtagtagtggaaaagaaccaaaccattctagatcaaaatcattacagtcgatcattgtggatacaatgaacacatatcgtgcaaccgaggttgagaccagtattaatgagaatactagtaatattagccaagtatctccgctgaatttatcatttgacaggcctcctcccttaactcccgaaaagaatttatatctcactcctgaatcgccattgaacagatattatttaccagttccattagaaatatctctgccgccctacttatctccgcaaaacaaggatccaaagaggagtagcttggtttaccgatggggatggctatag

SEQ ID NO: 81987 - DNA, 1653 bp, Saccharomyces pastorianus
atgcatttagaaagagtcaaaaaattggtccgagaagagcctgctcccaggaatgatatgccgtcatccaaaacatacactaatcatagctcatctttcacaaggtctactgaaccacctcctgtattccaaatggttcccggaagaatgatgaaaacattaagaaatagaaatgcatgcggctataaaaccgcatactccaacccctcactatcatcatatggtaacagcacatcgataaaacgcggagaagatgcggagaacattagagtaaattttgtaccttctaagcctttatccaacaatgcaagcagacagcacaagaaccctattgagcacaatgatcctgcacttaagaaggaaactgaactgtactcagataaatatatctcagagccaatattgatagattcgactaatgacgaggatgatcacgatgtcggcattttaaaaggacacaacgtttttgatgaagaagaaagtgatggtttcgagtttgatgtgtccgattactatgataatttctccgaagtcgacgtagaagaagaagaagaagaaatagaggaaagacgacgtataaaaacgttagaagcaattcaacagcaaatgtgtgacttgtctgttacttcttctacgtccagtaataagagtgtaagttcttcagaaaatgttcccggatcatgcatacagtccctgccgactaccgcccctgctcttccttcattacctccacctcctttattaaatgacgatagagcgtccagcactggcgctctaaagccacatagtttagaaacttctactactatggattcatcaaagattaggaatcctcaaatatcaaaattaatgaagaataatcacgtaccatacttaaagggtaccaaatcaacgcccactcttatcactaaatcaacgccaacatttattacaagatcaaaaagtaatacaaaaccaatcatcaaatccaatgcatcgtctccgacctcttctctgactgttccaaattcagtaattcaaaaacccaaaacggctgcaatggctgctaagagagttctgaacagcaaaaaggttgcgagtaaccccgcattaaacactacgaagaagagtcaccccattttgaaatccaaaacggcgaaagtcccaaattccagttcgaagaaaacgagtatccatccttccagacctgtaagtaactcaaaaccatactcgcatggtgcatcccagaataagaagccatcgaaaaatcaaaccacgtctatgagtaaaatgaatcgaaaaataccagcacaaaaaaaaatcggttctccaaaaatagaagatgttggaacagaagatgccactgaacatgccacttccctaaatgagcaaagagaagagcctgaaatagacaagaaagtcctgagggagattttagaagatgaaattattgatagtttacaaggtgtagataggcaagctgcaaagcaaatttttgccgaaatcgtagtgcacggagatgaagttcattgggatgatattgctggtttagaaagtgcaaaatattctttgaaagaagcagttgtctatccgtttttgagaccagacttattcaggcggttacgtgagccagtcagggggatgctccttatttggaccaccaggtacaggtaa

SEQ ID NO: 81988 - DNA, 207 bp, Saccharomyces pastorianus
  modified_base (194)..(194): a, c, g, t, unknown, or other
atggagtcacaaagaagccatcatattttaacgagattaaccaagatacggagaagacctcaacaaccgttaaccgactttacagaactttacagtagaattgccaatgagacaatatattacttgaacctagaagagaaaaaacgatataaagaagcttggggatcctctagagtcgacctgcagcagcagcntggcactgccgtt

SEQ ID NO: 81989 - DNA, 771 bp, Saccharomyces pastorianus
atgttggaagagggaaataatgtttacgaaatccaagacttggagaagagatctcctgtaatagggtcaagcttggaaaacgaaaagaaggtagccgcttctgaaactttcacagcaacttccgaagatgaccaacagtatatcgttgaatcatcagaggccacaaaattatcgtggttccataagttctttgccagtttgaatgcagaaacaaagggtgttgaaccagttacagaggatgaaaaaacggacgattccatactgaatgctgcgtccatgtggttttcagctaatatggtcattgcatcatatgctttgggtgccttaggacccatggtgttcggtctaaattttggtcaaagtgttttagttatcatatttttcaatataatggggttgatatttgttgcgttcttttctgtctttggtgcagaactgggtttaagacagatgattttatcaagatatctggttggtaatgtaacggcaagaattttctctcttattaacgttattgcttgtgtcggttggggtattgtgaatacctcagtatccgcacaactgctgaatatggtgaatgaaggctctgggcacaactgtcctatttgggccggttgtctgatcattattggtggtaccgtgcttgtgactttttttggttacagtgtcattcatgcatacgagaaatggtcatgggtacccaattttgccgtctttttggttattattgcccaactatcgagatcaggaaagtttaaaggtggtgaatga

SEQ ID NO: 81990 - DNA, 102 bp, Saccharomyces pastorianus
atggtactgtttggactaggtagactattttacgtcattttattattgattaatgccgttgcagtactgagcgaagaaaggttcttaagaagaagtatgtaa

SEQ ID NO: 81991 - DNA, 99 bp, Saccharomyces pastorianus
atgacctcaggatactataccgtctcatttttttatgcgatcttattgttatgcgcatgcacacgtgctgagatctacctgacgggcggtgaaagccag

SEQ ID NO: 81992 - DNA, 426 bp, Saccharomyces pastorianus
atgtatttgtatgtaagttttttaattaatagtcttcttctttcttatcagtcgtgctcttctttccaaattaataggtttgaatcttatcggaatcacctggaattcgttctcattacatggccgcccaccatgcacctttacatttcgtatttctttcctctctgcgctatatctttgggaaagatttgcaatcaaggcaaacacccgcttgtcccctttcaattcttgtgttatttcaaaaaccatcctttcataatatatttgtatttctttcgccctggactctaccagttcatatttagaaccttccacacatcgtccaattctgcagcccacatctttttccaccacgatacgggaaacagaatgagtccttggattctcgctaaacagtctctctattcccctgttcaaaacccttaa

SEQ ID NO: 81993 - DNA, 666 bp, Saccharomyces pastorianus
atgtccatttcaaccagtttgaactcagcttccattcatttgagcagcatggacacccatcctcagctacactcactcactcgtcagccacactcgtcgtcaacagctatgtccaagaacgaagcccaggaatcttcgccctctctgccagcttcctcttcatcgtcgacttcggcatcggcatctgcgtcttccaagaattcgagcaagaacccttcctcttgggaccctcaagatgatctgctgctacgtcatttaaaggaggtcaagaaaatgggctggaaggatatttcgcaatacttcccaagcaggactcctaacgcgtgtcagttcagatggagaaggttgaagtctggtaacttgaagtcgaacaagactgctttgatcgacatcaacacctatacgggcccactcaagatcacccacggcgatgaaactaccaacgttcagcaaaagcccagcaagaaggtagaagaaaacgtattaacggaagatactgctgagttcactacaacgtcatccatcccgattcctccagaaagactcgttgccttcgtttcatgcatcgatgtcttttctcatctccgccaatgtgatccactacgatgctcaacgcgttctccagccgtggtctccaggtgcgcgaatcctatatctaataactaa

SEQ ID NO: 81994 - DNA, 225 bp, Saccharomyces pastorianus
atgacccggcttcctcccatcccgagaatgacagtaacactgaccacaaggccggccgttcccacttgcaatgaaggatcttccatccttcattatatatacatacctatatacgaaccgaacgaacagaaagagaagagaagacacaagacaccaccagaaccaagagcatacaccactaccaccaccatcgctccaacagcagggtatccggatgcagtttga

SEQ ID NO: 81995 - DNA, 711 bp, Saccharomyces pastorianus
atgtcggatccaagttctattaacggtggtatcgtcgttgcgatgacaggtaaagactgtgtagccattgcctgtgatttgcgtctcggaagccagtcactaggtgtgtcgaacaagtttgaaaaaatcttccactatgggcatgtgttcttagggattaccggtctggctaccgacgtgactactctgaacgagatgttccgctacaagacgaacctatataagttgaaggaagaaagggccattgagcctgaaacgtttacccaattagtgtcaagttcactttatgaaagaagattcggtccatactttgtggggccggtggtagcaggtattaattccaagtccgggaagccctttattgcgggattcgacctaatcggctgtatcgacgaggccaaggattttatcgttagcggtactgcatccgaccaactgttcggtatgtgtgagtccctgtacgaacctaatctagagccagaagatcttttcgaaactataagtcaggccctactgaatgctgctgaccgtgacgctctatcaggctggggagctgtagtatacattatcaagaaggatgaagtggtgaagagatacttgaagatgagacaagaattgatcggttcatggcaatctcatggtcccaaaaaaaaccccaacacaaaatatcagcggaacgtcaagaattttccacatccaactcatctttaa

SEQ ID NO: 81996 - DNA, 180 bp, Saccharomyces pastorianus
atgcggtttttaccccggaaatcgcgtttattaatgtcaatgcgcgatttctattatgggttgaaaaagttgcacttctgttcctttccaaacgatatgacgccccccccacaagaaaacgtttctcttgcattcaataaggtccatcgaagctgtatttggaacttccgattttattaa

SEQ ID NO: 81997 - DNA, 369 bp, Saccharomyces pastorianus
atgggtatttctcgtgattctcgtcacaaaagatcagccactggtgctaaacgtgctcaattcagaaagaagagaaagttcgaattaggtcgtcaaccagccaacacaaaaattggtgctaagagaatccactctgtcagaactagaggtggtaacaagaaatacagagctctaagaattgaaaccggtaacttttcttgggcttctgaaggtatctccaagaagaccagaattgctggtgttgtttaccatccatccaacaatgaattggttagaactaacactttgaccaaggctgccattgtccaaattgatgctactccattcagacaatggttcgaagctcactacggtcaaaccttgggtaag

SEQ ID NO: 81998 - DNA, 1461 bp, Saccharomyces pastorianus
atgtcaaaagctgttggtattgatttaggtacaacctattcatgtgttgctcattttgcaaacgatagggttgaaattatcgctaacgatcaaggtaatagaacgacgccttcttatgtggcttttactgacacagaaaggctaattggtgacgctgcgaagaatcaagctgcgatgaacccacataatacagtattcgatgctaagcgtctgatcggacgtaaattcgatgatccagaagtgacgaacgatgctaagcattacccattcaaagtgattgacaagggaggtaaaccggtagtgcaagtggaatataaaggcgagacaaagacatttactccagaagaaatttcctcaatgatcttgacaaagatgaaggagactgctgagaactttttaggaacagaagtgaaagatgctgtagtaacggttccagcctatttcaacgattcacaaaggcaagcaacaaaagatgccggtacaatcgcgggtttgaacgttcttcgtatcattaatgaacctacagctgccgctattgcgtatgggctggacaagaaatcgcagaaggagcacaacgtcttgatctttgatttaggtggtggtacttttgatgtctctctgctatccatagatgaaggtgtctttgaggttaaggctactgctggtgacactcacttgggtggtgaagatttcgatagtaggctggttaactttctagccgaggagttcaaaagaaaaaataaaaaggatctaacaactaaccaaaggtccctaaggaggttaaggaccgccgctgaaagggccaagagaactctgtcttcgtctgctcagacatctatagaaatagattcattatttgagggtatcgatttctatacttccattacaagggcaagatttgaagaattatgtgctgatttgtttagatctacattggagccagtggaaaaagttttggctgattcaaaattagataagtcacaaattgatgaaattgtacttgttggtggttcaacaagaattccaaaagtacaaaaactggtttctgattttttcaatggtaaagaaccaaaccgttcgattaaccctgatgaggccgtcgcttatggtgctgccgtacaggctgccatcttaacgggtgaccagtcgtcgacgacccaagatttactgttgctggatgttgcaccattatctctaggtattgaaactgcaggtggtattatgacaaagttgatcccaagaaattcgactatcccaacaaaaaaatcggaagtgttttccacctacgctgacaaccaacctggtgtgttgatacaagtttttgagggtgaaaggacaaggacaaaagacaacaatctactgggtaaatttgagttgagcggtattccacccgctccaagaggcgtaccacaaattgaagttacatttgatatcgatgcaaatggtattctgaacgtatct

SEQ ID NO: 81999 - DNA, 906 bp, Saccharomyces pastorianus
atgagggaaaaaagaacaatttcaaataaagacacaaactatctcaaattcccaaataaactccaaagatattcccgattcttgagcaggaagatatccaataccagcccagaaaagcaaccgaagaagaacataaaagaacactgtttatcgagttatcacaaagaacactcggtaaaaccaaagcaaaactccggtaatgttgcagcaaaagaagacaaagatacgcagcatttacaaaataatgtcgctaataaagaagcaacggaatgtctaacaagaagtaatttgaaaaagttacaagagaaaattttcgatagagaacttaatgatattgcctgtgatcattgtctttgtagcacagaaaatagaagagatatcaagtattcacgactttggttcctttttgagttggaaatgagtgaaaactggaatgaaaatctccgccttagttgctataataaatatgtgtattccgcaattgatgagtcgtggaaaatggagaatattctacttaaagaacaagagaagcattatgaatattttccaataggacaattactgatacccaataatattgactacactaataaacagaaaaggaaggaaaacattgaagacttaacaattgaaattgatagtattatagagacaaaccatcaaaagaaaagatttttgccgcaaagtgtcctgataaaaagggaggatgaaattgcatttgacgactttcatttggatgcacgaaaggttctaaacgatttgagcgccacttctgaaaatccattcagctcttcaccaaatacaaaaaaaattaaatcaaagtggaaaaaccttggaaagtggttcccaagaaagaaaaacaaaaagatcataggtgcttttggaaagaaagctacatatagatga

SEQ ID NO: 82000 - DNA, 2235 bp, Saccharomyces pastorianus
atgccatttgatgttttgatatcaaaccaaaaagataataccaatcaccagaacatcacgccaatatcaaaatcagttcttttggcgcctcattcaaaccatccagtgattgaaatagctacgtattcagaaaccgatgtatacgaatgctatatacgtgggtttgaaactaaaatagtgatgagaagaactaaagatgattggattaatattacccaggttttcaaaatagctcaattttcgaagacgaaaagaactaaaatactggaaaaggaatcaaatgatatgcaacatgaaaaagttcaaggtgggtatggtaggtttcaaggtacttggatcccactggattcagcgaagtttttagtcaataagtacgaaataattgaccctgtggtcaactccatcttaacttttcaattcgatccaaataaccctccaccaaagagaagcaaaaatagtatattgaggaagacttcgccgggaacgaagataacttctccatcgagctacaataaaacaccaagaaaaaagaacagtagttcatcaacatcggctacaactacagctgcgaataagaaaggcaagaaaaatgcatcgatcaaccagccgaatccaagtcctttacaaaaccttgttttccaaactcctcaacagttccaagtaaattcatcaatgaatataatgaacaataatgataaccacaccacgatgaatttcaacaatgacacaagacacaatttaataaataatattagtaacaacagcaatcaatctactattattcaacaacaaaaatccattcatgaaaactctttcaataataattattcggcaactcagaaacctcttcaattttttccaattccgacaaatttacaaaacaagaacgttgctctgaataaccctaataataatgacagtaatagttacagccataacatcgacaatgtcattaacagcagtaataacaataataatggcaataataataacttgatcatagttccagacggacctatgcaaagccaacaacaacaacatcatcatcatcatgaatatttgacgaataacttcaatcattccatgatggactccattacaaatggcaatagtaaaaaaaggaggaaaaagctgaatcaatctaatgaacaacaattttacaaccagcaagaaaaaatacaaaggcatttcaaattaatgaagcaacccttattatggcaatcctttcaaaatccaaatgatcaccataatgagtactgtgacagtaacggcagcaacaataacaacaacactgtagcatccaatggctcctccattgaagtattttcatcaaatgaaaatgataacagtatgaatatgtcttcacgatctatgacaccgttcagcgcaggaaatacttcatctcaaaacaagttggaaaacaaaatgacagatcaagaatacaagcagacgatattaacaatactatcatcggaaaggtcttctgatgtagatcaagcgttgttggctactttatatccggcgcccaaaaattttaacataaattttgaaattgatgatcaaggtcacactccactccattgggctacagctatggcgaatattcctttgataaaaatgctaattaccttaaatgctaatgcattacagtgtaataagctcggttttaattgcatcacaaaatcaattttctacaacaattgctacaaggagaatgctttcgatgaaataatatccatcttaaaaatatgtcttataactcccgacgtaaatggaagattgccatttcattatttaattgaattgagcgttaataagtccaaaaatccaatgataataaaatcttatatggattcgataatattgagcttgggtcagcaggactacaatttgttgaagatatgtttgaactaccaagataatatagggaacactccactgcatttatctgctttaaacttgaacttcgaggtttacaacagactggtatatcttggtgcgtcaacagatatattgaatctagataacgaatcgcctgcgtcaataatgaataagtttaatactccggctggcgggtcaaacagcagaaacaacaacaccaaggcagatcgaaagttagctcgaaaccttcctcaaaagaattattaccaacaacagcaacagcaacagcaaccacaaaacaatgtcaaaattccaaaaattataaaaactcaacatcctgaggatcacgactaa

SEQ ID NO: 82001 - DNA, 456 bp, Saccharomyces pastorianus
atggctgtttctaatatatggcaatcgtactcttcctccaatttacattggatttatcctctgtataccaataactgttcacaaaatgtaaagtcatcatttacagcagaaatattattgaaaagaagatgtaatgatattcaagatatacttaatgacaggatgattgaattgttgctacagggcgcgtgtgacccaaataagcagcagaattaccttcaggggatgagtccaagtaggaagaagaaaacccacgttaagaaatttttgaaaaagcaaaaaaaatcaaggaaaccaatcactctggagcatggttgcttgtcaggacccgtgactctacgtttcggaaattttgcaggaatcagagatttgagaggtaccaggtgcccgctccacggcataaaacatggtgtccatcgacctgcaggcatgcaagctggcactgccgtcgtttac

SEQ ID NO: 82002 - DNA, 735 bp, Saccharomyces pastorianus
atggcaagaagacctgataaccaaaatccagataatgaaaatctacgaatcaaaagggtaagactagagtcggtcaggcagaacgatgaggaggaagaaaatgaagtatcgagaacacaaaatatcgtcacagataactgccatgacagcccagaggccgtagtcgaaatcattggagagcgaactcttgagaatacttctgaggaagatggtgatgatgatttatctctctttagagcacttgaagaagatccaggtagcgaccataacaccagtaacaacgattctgggaatcatgacagggaaacaatgcataccgaagagccagaagcaagttctggtaacaatatcacattaacaaataatgttgaagaattgcacacaatagacgttctttcacaaacagcaaacactccgagtgcttccccgatgcttgacgcagcaccgccgacaacgaaccctggaacaaatagtaaggaacaaactgttgatttaactgcagatgccatagacttagacgctgaagagcaacaagtgttgcaaatatcagatgacgactttcaggaggaaaccaaagaagcacccaaagagtatggtgcagccaaggactatcgctgcccgatttgttttgaacctccagagacagccctcatgacgttatgtgggcacgtcttttgttgtccatgcttatttcaaatggttaatagctcaagaacatgtagacaattcggccat

SEQ ID NO: 82003 - DNA, 609 bp, Saccharomyces pastorianus
atggtagctagtattagatcaggtgtgctgacacttttacacacggcgtgcggtgctggtatcctggccatgccgtacgcattcaagccgtttggattaattcctggagtgataatgatagtgctgtgtggggcgtgcgctatgcaaagcttgttcatacaagctcgtgtagctaaatacgtaccacaggggagggcctcgttcagtgctctgacgcggttgattaacccaaatctaggtattgtgtttgacctagcgatcgctatcaagtgttttggtgtgggcgtctcttatatgattgtagttggggatctgatgccccaaataatgtctgtgtggaccagaaatgcttggctgttgagcaggaacgtgcaaatttcactgatcatgctttttttcgtggccccgctgtcttttctgaagaagttgaattcgttgaggtacgcttccatggtggccatctcttctgtagcgtacttgtgtgttttggtgttgttgcactatgtagcaccatcagatgagattcttcgcttgaaaggccggatctcctacctcctgccaccacattcgcatgatttgaacgtgctaaacactcttccattttgtctt

SEQ ID NO: 82004 - DNA, 1362 bp, Saccharomyces pastorianus
atgtctttataccctttacaaagatttgaatcaaatgacacggttttcagttacactttgaattctaagactgagctgtttaacgaaagtcgcaataacgacaagcaacaatttacccttcaactcataccaaatgccaacgccaatgccaaggaaattgacaataataatgtagaaattatcaacgatctgacaggcaatactattgtcgacaattgtggaactacagctacttcatcaaatcagttggagagaaggctttcgatatccgactatcgtaccgaaaacggtaactactacgaatacgagttttttggtaggagggaacttaacgaaccattatttaataacgacatcgtagaaaatgatgatgacatcgatctaaataatgaaagtgatgtattgatggttagcgacgacgagttagaggtaaatgaaagattttcttttctcaagcaacagcctcttgacgggctgaacaggatttccagtactaataacttgaaaaatctggagatacatgaatttataatagatccaacggaaaacattgacgatgagcttgaagactcttttaccactgtgccccaatctaaaaaaaaagttagggactatttcaaattaaacatattcggcagtagtagcagtagtaataataacagtaatagccttggttgtgaacccattcagaccgaaaactcttcctcgcagaaaatgttcaaaaatagattcttcagaagtaggaaaagcactctaatcaagtctcttcctcttgagcaagaaaatgaagtgcttataaattcagggtttgacgtttcctctaatgaagaaagtgatgagagtgaccacgcgataataaatccgttaaagctggtgggaaataacaaggatatctctactcaaagcattgctaagacaacgaatccatttaagtctggcagtgattttaagatgattgagccagtttcaaaattcagcaatgattcgagaaaggacttattggctgccatatcagaaccatccacttctccttctccttctgcaccatcaccttcagtacaatcttcctcttcttctcatggcttagtggtgaggaagaagacaggaagcatgcagaagacacgcggaaggaagccctctttaattccggacgcttccaagcaatttggttgtgaattttgcgatagaagatttaaaagacaagagcatttgaagaggcatgtcagatctttacatatgtgcgaaaaaccatttacatgccatatctgtaataagaacttcagcagaagcgataatttgaatcagcacgttaaaactcacgcttccttatggaattttaaagatacggaaattgcaaattga

SEQ ID NO: 82005 - DNA, 321 bp, Saccharomyces pastorianus
atgatctctattccattccgcagtaccatgtcaagaacactagtattcattatacttcccacagtgctttcatgcaatcccagtagtaggttaatgaatttctccaattctttcaacttatgctcgtactcaacttgtaattgtgatccatctttttgctttgaaatgatcaacttagccaggacatccatagcttgtgacaatctgactatatcattttctgttggaataaaaatcaactatcatctactaactagtatttatgttactagtatattatcatatacggtgttagaagatgacgcaaatgatgagaaatag

SEQ ID NO: 82006 - DNA, 252 bp, Saccharomyces pastorianus
atgaatgaagacctgcccaaggaatattttgaactaataaggaaggctcttaacgagaaagaggcagaaaaagcgcccctgagtagaagaagaagagtcagaaggaagaaccagcccctaccagatgccaagaagaagtttaaaacagggttgaatgaattgccacgagaaagcgttgttactgtaaacttagattcttcagatgatggcgtcgttacggtaccgacggatgatagtgtagagagatccagt

SEQ ID NO: 82007 - DNA, 252 bp, Saccharomyces pastorianus
atgaaatgggttttcacctcagagagtaaatttaatttgaattcctcactgttcatcataaaggccgcaattggctgtttaccagaggtgggtgatagcatagaggacatacctaaatttgattgggactcctgccctactatcggatgtatttgcagaactaaggaggctctttttcaacttgagtctcgaaaagatatacatatatgccctcaattatttttaggggaaacccggaccgccacattatga

SEQ ID NO: 82008 - DNA, 180 bp, Saccharomyces pastorianus
atgctgtggcatcctaatggttacgagcctcgagtaaaggctacagaagaagaaacctacgctaacaaagacaggaaggatgttccggataagtttaaatttgataccgtaacgaaaactggaatggtcaagcttcgtgttttcaaagacgacctaatattcaaatcacaacgtctataa

SEQ ID NO: 82009 - DNA, 1053 bp, Saccharomyces pastorianus
atgaatagatcatacacagacgacatgaatagcagctctccaaattacctgacaacaaggacgtttagaatctttagattgtttgcaataatttttgcactgcttttgatagcgtactctttatttctgagcactctaaaaacaggctctatacctgatcgtgccaacactgttactttaatgcgccgtgccaggtggtcatttgggactggattaggactaggaggatttgtaattgctgcagccgcttatgctactccttactgggtcgcagcaatctgtctcgcaactgctagcgaggtgtgtgcacctatagctggtgctgttttggcgacagcagcggttattgtcgcagcagttttagtgggaaagagttcgggctcggcaacaaagcgagggttaactaagactattagcgtactgaatcataccataacattcaccgatcatatactcaatggtcagacgttgtctaatggtactggtagtaattttgttacaataggattcagcgggtatgcagtacatgacactatcaaacgtgacagcactactgatatcaatttcgtgggatataccacagagcatggaacccacattagcacgagtagcgtacataatgtgagcagtctcatcgataaaattgtggcagcggtaccaggggtccctgatacaggtggtaatgcttctgctctatcgtttcagaaacgcagtcaggagttcgctacctcatggatatcaatgacatatgatcagagttatggtgaccttgcgcaaacgtggcaaaatgacgaaggcggagcaggaaattttgattcttatgcggaagaggagttacagaatttcttttcaggtaatagagactggaagtactgctttgctgctgaggacacgaagagtggtgagccaattgattacgatgacatacctggtgacggtccaggcacgggttcggcattcaaatcggagatatatttcaacacttacggtggtatagataattattgtaatgacgagcatatcggtgctcagaacactggagatggtcgataa

SEQ ID NO: 82010 - DNA, 471 bp, Saccharomyces pastorianus
atgatgcctacctacctaggaaagttaacgtggatatgcttttttaccaccttaggactagcttgtgcttacaacgtaacagagcaaatggagtttgatcagttcaaatcaggttaccttgcctgtctcgcaccagaacacagaaacattgtagtcgatttggctagtaatggattcataacaatttcaccgatggcgaatgcaacaattgactttgaggatgtaactagtgattattttaactgcactgacgtcaatactaacgtacaagttacgatcgcgtcattttacaatgaatacggttttgggcctgatgataacggctattatcacgctacagaaggaccttcagaatttgaacggcatggtatggatgttaggctttacagaccatactatccaggtgagtttgtcatgggaaaacgttcaaacgcacttggagtggcttatcttagtgagatttcttattaa

SEQ ID NO: 82011 - DNA, 216 bp, Saccharomyces pastorianus
atgaaagtttccgataagcgtaaatttgaaaaagcaaactttgaggagtttgagttggctctaaataacaaaaacgacttggtacattgccactcaataactttatttgaatcgatgcgcacggaagtgcgatcattctacgaagacgaaaagtctggtctaatcaaagtggtaaaattcagaactggtgcaatcgataggaaaagatccctatag

SEQ ID NO: 82012 - DNA, 516 bp, Saccharomyces pastorianus
atgacagcaatgaaagctattgtctggagacttcccaagatgccgaaaatcaaaattacaaaaacttatgaagttacgaaaattacggcgatattgacactagtaggatttataatgggccttgaggtgccgtcattggcaacttttctcacaaacaaaacgtttaatgagtacttcaagtatccaactcctttacaacaaggtttactcatggggtccacccccctgggtggtatcatgggatgttttatttactgcataatgaatgatagattcagtagaatatatcaatttcaatcgggaataataatatggaatattgttacgttattgaacttttgtatttgggatatattaggtttactaatttgccggatgatcaagggtatgatccttgggaacttttcaattttagtagcatcctacgcaaatgaagttatcccccgcagcaagcgtggaagtacgatgagctatattcaattgtgtttaaccattgaattctgtatgcatattgtg

SEQ ID NO: 82013 - DNA, 3873 bp, Saccharomyces pastorianus
atggatgccgtgttgaggttggataacgcaatgacctattctttaaagattaaaaacgaggtcaacaactatgtggtacaactgatccgcgagcaaattgaaataaataagcatgcaatcctaactcacccgatgaatttaaggtcttcttccatatttcattccccactgccgcaaattcactctcaacaaccagaagccgagaatctcatatattcctcctctactcccctgcaagtccaacaggaccaatgtgcgtcctttgaagcaccctccaagtctcatctggagcctattcctttcccggtttcttccattgaagaaacaccaactgcaaatgatatcaggcatccttctcctttgccccgtagttgtagcaacaccgttatgaaactaccgacacctcgaaggaaacttgactcaaacggattattctctgatgcctatttaaacgctgacatcattccgaacccaagtatcgaatccacgatatctattgatagagataataacactaatagtaggggtagtagtatgaaacagtatggtattggtgacgcctccgactctcggattagtaactcggaaagaccttcttcctcttcgtcaaggctggggataagatcaagatccataacaccaagacaaaagatagaatactcacatgtagataatgatgaccgcaccaacgaaatgctgtctagagataaagattctcttcaacctcaaccttccgtagataccaccataacatcctctactcaggcgaccaccacgggtaccaagactaatagtaacaattccacaaactcagtattaccaaaactaatgacaagtatttccttgaccccaaggcgtggttcaccatcatttggtaatctcgcaagccattctatgcagcagtcaaacagttttaaactgattcatgataaatcgccgatatcttcacctttcacattctccaaggattttttaaccccagagcagcacccttccaatattgccagaacagatagtatcaataatgcaatgtttacttcaccgaatatgccattatcaccccttttattggccacaaaccaaactgttaaatctccaacgcctagcataaaagattacgatatcttgaaaccaatcagcaaaggtgcttatggtagtgtttatctagcacggaaaaaactcacaggagattattttgctataaaagttctaagaaaatcagatatgattgctaaaaatcaagtaacaaatgtcaaatccgagagagcaatcatgatggttcaaagtgataagccctatgttgcgagactatttgctagtttccaaaataaagataaccttttcttagtgatggaatatttaccaggtggagatttggccactttaatcaagatgatggggtatctgcccgatcaatgggccaagcaatacctaaccgaaatcgttgtcggtgtgaatgatatgcatcaaaatgggatcattcatcatgacttaaagcctgaaaatctactaattgataatgcaggtcatgtgaaattaacagatttcggtttatcaagagctggtctgattcgccgtcacaagtttgtcccacataagtcgtcgctaagtatcagttccactttaccaatcgataacccagcaaacaattttaccatgaacaataacaatagtaatcattctcaattatcaaccccagatagcttcacatcagatcataagcagtataatagaagcaagaagtcatcactaggtcagcaatacgaacactcagaatactcaagtacttccaattcccactcaatgacgccaacgcccagtacgaacactgttgtttatccttcatattaccgtgggaaggacagatcacacggaagttcgaacatcgatctcccagcgtcccttagaagaagtgaatctcaattatcattttccctccttgatatttctcgttctagtactcctcccttagcaaatcccacaaattcgaacgctaataatattatgagaaggaaatcactcactgagaataaatccttttctaatgacctattatcttcagatgctatcgcagctaccaacacgaatattaactcgaataataacatttccctttcgccagcaccttcggatttagctttgttttatcctgacgatagcaagcaaaataagaaattttttgggactcccgattatctcgctccagagactattgaaggaaagggtgaagataacaagcaatgcgactggtggtcagttggttgtatattttttgaattacttttagggtatcctccattccatgcagaaacaccagatgctgtttttaagaaaattttatcgggagtcattcaatggccagagtttaaaaatgaagaagaagagcgagaattcctaacaccagaggcaaaagatttgatagaaaaattgttggttgtggatcctgcgaaaagactgggtgcgaaaggaattcaagaaattaaagatcacccttatttcaagaatgtggattgggatcatgtttatgatgaggaagcttcttttgtccctacaatagacaatccagaagatactgattattttgacctaaggggtgcagagctccaagattttggagacgatatcgaaaacgataatgccaatattttgtttggtaaacatggcattaacaccgatgtttctgaattatctgcagctaatctctctccaccattgaatcataaaaatattttatcccgtaaactatcgatgagtaataccactaataggagctcaaataattccaacagtagcgtgcatgactttggtgcacatactccggttaataaattaagtattgcttctgtattagagtcggtacctcaagaaataggatatattacaccaaacgggaccggtacaactactacaagtgccaaaaactcacccaatctgaagaatttgtcactggctatacctccacatatgagggatcgcagatcaagtaaattgaatgattcacaaacggaatttggttcttttaatttcaggaatttatcggctcttgataaagctaataaagatgctataaatagactgaaaagtgaacatttttctgaacaacctggagttcacagaagaacctcttctgcgtcactaatggggtcatcctcagatggatcagtgtcaactccagggagtaacgcttcaaacactacatctggtggcaagttgaaaatacataagcctaccatatccggttctccttcaacatttggcacatttcccaaaacatttttgaggtctgattcattctccacaagatcatattctcctgaacgaagtattagtatcgactcgtcaacattgtcaaggaagggtagtataatcggggataaccaacaaacgacagcaaatagctcggattcacctacgatgactaaattcaagtcgccactatcacctgctaataccaccaccgtgagctcatatttttcaagacagagggttctatcaaagagtttttcgcaacggaccaattccagtgatctctcggcagaggaaagcgaccgactacaggctatatcaagagttaactctttaagaaacaggaggcgtagtggccgaaagagctcgagcacttctgagattggataccacatggatgttcttgtttgtgagcctataccgattcatagatatcgggttactaaagacttagaaaatttgggctgtaccgtcgtcagtgttggtgccggtgatgaactagttagtagagccactagtggtgtaagttttgacttaattatgacagccttgaagcttccaaaacttggtgctattgacattgttcaactactaaagccaacaaatggtgctaattcgacaacacca

SEQ ID NO: 82014 - DNA, 603 bp, Saccharomyces pastorianus
atgcacgttttctttcctttgcttttccgcccttcccctgttctgttcatcgcatgtgcatatatatatatagatatatatatacattgtacacggtgcacggtagtgaacataactatgagcacgaacagagtcccgaacctcgacccggacttgaatttaaacaaagaaatctgggacctgtactcgagcgcccagaaaatattgcccgattctaaccgtattttgaacctttcttggcgtttgcataaccgcacgtctttccatcgaattaaccgcataatgcaacattctaactctattatggacttctccgcctcgccctttgccagcggcgtgaacgccgctggcccaggcaacaacgacctcgatgacaccgatactgataaccagcaattcttcctttcagacatgaacctcaacggatcttctgtttttgaaaatgtgtttgacgacgatgacgatgatgatgacgtggagacgcactccattgtgcactcagacctgctcaacgacatggacagtgcttcccagcgcgcttcacataatgcttctggtttccctaattttcttggacacttcctgctcgtcctccttcgatga

SEQ ID NO: 82015 - DNA, 780 bp, Saccharomyces pastorianus
atgtgtttgacgacgatgacgatgatgatgacgtggagacgcactccattgtgcactcagacctgctcaacgacatggacagtgcttcccagcgcgcttcacataatgcttctggtttccctaattttcttggacacttcctgctcgtcctccttcgatgaccactttattttcaccaataacttaccatttttaaataataatagcattaataataatcatagtcataatagtagtcataataataacagtcccagcatcgccaataatacaaacgcaaacacaaacacaaacacaagtgcaagtgcaagtacagacaccaatagtcctttactgagaagaaacccctccccatctatagtgaagcctggctcgcgaagaaattcctccgtgaggaagaaaaaacctgctttaaagaagatcaagtcttctacttctgtgcaatcttcggctactccgccttcgaacacctcatccaatccggatataaaatgctccaactgcacaacctccaccactccgctgtggaggaaggaccccaagggtcttcccctgtgcaatgcttgcggcctcttcctcaagctccacggtgtcacaaggcctctgtcgttgaagactgacatcattaagaagagacagaggtcgtctaccaagataaacaacaatataacgcccctccatcgtcgtctctcaatccgggaccagcagggaaaaagaaaaactatacagcaagtgtgcagcgtccaagaggaagactcactgaacattgtcgcacctttg

SEQ ID NO: 82016 - DNA, 372 bp, Saccharomyces pastorianus
  modified_base (229)..(265): a, c, g, t, unknown, or other
atggtttctacccctgaactgaagaaatatatggacaagaagatattgctgaatataaatggatctaggaaagtggcaggaattttgcgaggctacgatattttcttaaacgtcgttcttgatgacgcaatggagataaatggtgaagaccctgccaataaccacccgctaggcttgcagaccgtcattaggggcaactccataatatccctagaggctctagatgccnnnnnnnnnnnnnnnnnnnnnnnnnnnnnnnnnnnnncctctatgtactatacagcaatactattttctaatttgcatttccacgcctgcgttgctaaacccacatttttcatagaatttgacatttttctcatcgcaatctaa

SEQ ID NO: 82017 - DNA, 450 bp, Saccharomyces pastorianus
atgcttgcgtatacctttccttctttcaatttctacgtcaatgggtttttttccttccttttccttttccttttcccctctttactacgtttctatgttattttgtgccgccccctgcaagttgcaacatatccccttaacagatgccagcaatattctagtcttgctatttttaccgcctctggcttttggcttctagtccttgtcccaagagccaagggcccgtcaacacgtcgtcattgctaccgccagctggcacccacacgtcaccgaccctttttttccattttcggctgggccgttagtgggatccgcccgctcccggagattttcacttggatttgcgcgtcccctttttttcttcattctctgaccccccctaccttctcccacttttctgtgtatcaagaggaaaagaaggagaaaaggagaactccgaaaaatacctaa

SEQ ID NO: 82018 - DNA, 228 bp, Saccharomyces pastorianus
atgatgggttttttatcttttaattgctttctatgtagtataatggaccgatctttgcaagtatatatctgtatgtatccatatttagatggcagcaagcaatatagatttgatgagcttatatcattttatcgtccttgcccaaaaagtcttgataacattaaaagtcaccaccgtcaaatccatcatcaaatccgccgtcgaacccaccagcatcatcacccgtaa

SEQ ID NO: 82019 - DNA, 354 bp, Saccharomyces pastorianus
atggctcaaagtaaaagtaatcctcctcaagtgccttctggctggaaggctgtttttgatgatgaataccagacttggtattatgtagatttatctacgaacagctctcagtgggaaccaccaaggggaacaacatggccaagacccaaaggtcctccaccaggtgttaacaatgagaagagttctcgtcaacaggcagaccaggctcctccaccttattcttctcaatcaacaccgcaagtgcaagcacgggcccaagcacagcaacctcgttactatcagcctcaacagcctcagtaccctcaataccctcaacagcagcgttctatccgcacaagccctatgcagcagcag

SEQ ID NO: 82020 - DNA, 2364 bp, Saccharomyces pastorianus
atggggtcgtttcccttagctgagtttccattacgtgatattcctgttccttatagctaccgtgtgtctggcggtatagcttcctcaggtagtgttactgcgcttgttactgccgctggcactcatcgaaactcgtccacggctaagacagttgagacagaagacggcgaagaagatatcgatgagtatcagaggaaaagagcagctggttctggcgaatccactcctgaacgcagtgatttcaaaagggtaaaacatgataatcacaaaaccctccatccagttaacttacagaacaccggtgcagcgtctgtggataatgacggtctgcacaatttaacagatatatccaacgatgcagaaaaacttttgatgtctgtggatgatggttctgccgcaccttctacattgagtgtaaacatgggagtggcatctcataatgttgctgctcccactaccgtcaatgcggcaacaataactggcagtgatgttagtaacaatgttaatagtgctaccattaacaatcctatggaggaaggagcgctgccgttatcacccactgcttcctctccaggtaccacaactcctttagctaaaactacgaaaactatcaacaacaataataatatcgccgatttgatagaatccaaagattctataatctcccctgaatacctttctgatgagattttcaccgcaataaacaataatctccctcacgcatacttcaaaaatttattatttagattagttgccaacatggataggagtgaactatccgacttggggactttaatcaaggataatttaaagagggacctaataacgtctttgccttttgaaataagtttgaaaattttcaattatttgcaattcgaggatattataaattcccttggggtctcccaaaattggaacaaaataattagaaaatctacatcgttgtggaaaaaacttctgatatcggaaaattttgtgagcccaaagggttttaattctctcaatctcaaactctcccaaaaatacccaaaactctcacaacaagatcgccttagattatcttttctggagaatatattcattttaaaaaattggtacaatcccaagtttgtaccacaaaggaccacgttaagaggccatatgacgagtgttattacgtgcttgcaatttgaagataattatgtcattacgggggctgatgacaaaatgatcagagtttatgattcgataaacaagaaatttcttctacaactatcaggtcatgatggtggggtttgggcattgaagtatgcccatggcggtattttagtcagcggttctacagacagaacggtgcgagtttgggatattaagaaaggttgttgtacccatgtgtttaaaggtcataactctacggtgaggtgcctagatatagtagaatataaaaatatcaagtacattgttactggttcgagagataacactttgcacgtttggaaattgcccaaggagtcctccgttcctgatcatggggaagaacatgattatccattagtctttcatacccctgaggagaacccatattttgttggtgttttaagaggacatatggcatctgtaagaactgtctcaggccacggtaatattgtcgttagtggctcctatgataatacactgattgtgtgggatgttgcgcaaatgaaatgtttgtatattttaagtggacatacggatcgtatttattcgacaatctacgatcatgaaagaaaaaggtgcatctctgccagtatggataccactattagaatttgggatttggaaaatatatggaataatggagaatgttcctacgcaacaaattcagcatcgccatgcgccaaaatacttggtgctatgtacactttgcagggtcatacagctttggtcggtttattaagattatccgacaaatttttggtcagtgccgctgcagatggttcaataaggggttgggacgcaaacgactactctagaaaattttcctaccatcataccaatttgagtgcaattaccacattttatgtatcggataatattttggtgagtggatcggaaaatcagttcaacatctataatctacggagtgggaaattggtccacgcaaatattctaaaagatgctgatcagatttggtcggttaattttaagggcaaaacacttgttgcagcagttgaaaaagatgggcagagctttttagaaattctggatttcagcaaagcttcaaaaattaactacgttagcaatcccgtaaactcctcgtccgtcgtctttggaatccatttctacttctttgggtctaacgaggacaactataataccatgaccttcccagagaacaagcattga

SEQ ID NO: 82021 - DNA, 6432 bp, Saccharomyces pastorianus
atgaccgctaacaatgacgatgatatcaaatcacccattcccattactaacaagaccttatcccaattgaagcgctttgagagaagtccaggaaggcccagttcttctcagggcgagataaaacgtaaaaagtctaggctatatgccgcagacggaagaccacattctccgctaagagcaaggtctgctaccccaacgctacaggaccaaaaactgttcaatggcatggattccacttcccttttgaatgaaaggctacagcattatacgctggattatgttagtgacagggcccggcatatgaagaatatatatgacccatcatctcgctggttcagcagatcagtgaggcctgaatttcctattgaagagttcttaccatataagactgaaagtcatgaagatcaagcgaaatacttgtgccatgtcttagttaatctttatattgcgatcagctcattagatatacaaggtttgatttctatttccagtaaagatctggctgatttaaagaaagaagtggatgatttagctcttaaaaccgatcttttcaggttatctaacaacacagcggagaatgacttacttggtaacgatattgctgattatgacgatgcggaaggcctggaggacgaattggatgaatacttcgacttagcaggccccgactttaatgctaccggaaaaatcacagctaaatcagctactattgtgaatgtaaaccattggactaatgagctcaaaaattgtctacattttgattttccagtagctctaagaaagtcgctagcgatagtttattattatttgtctcttgttcagggccaaaaggtgtatagacaaatgcatgtcgatatgttcgaaagattagtaagccttgacgatgataggacaaatttcactgaactgttgcaaaaacaaggtcttttgctagatcatcaaatcatgctcaatttcctgtgcgaatttctaccttatccagatcccgactatgctcgttatgaattatcatcaaaggaagatttacagttatttagattacttttgaagcatgcacataatgcaaaaccatttttcgataagtcaaaggaaagtttgttagttgatacgatgaattttctgttgtctagtcttgcaccatctactatgatggctgtcatgcctatcgttacatccgttgtgccctatcattatcatatccattctaagatcatcgattatttcccgttttgctatagcatctggagctcagtcagcgcaaacgtggccatcgacactcacatgtatgattttgttgggtcaatttccaaagacgttcataataagattttgagtagcgagcatgaaaaggatgtagttggagtggagtttggagaattcgggatttttactgatgatcaaatgacttttatgttcaataggttacaaggccatcttagaacagacggtcaaatacattcgtattcccgcacagtgaagccttttgtttatgctataaacggatcaaaaaaagataggttttttgaaaaacttgtaagtttagccaaagcaatcgaaacatttatccatccctctaataatgggttttggaccaagccaaatgctaaattcgttcatgcatttataaagtcttaccacggaagggtcaaatatgaagaagatatttgtgctaggggcgtcacaaatgggatatgtttaacttctttttgtcacgaagagatagttgaaatattcttaaatattatcagtctgggttcacagaataaaaatcctgatattgcgaactattacatctcttgtttcgcatatctgttagagctggatccttcaaatgcatatttaatttatgacaaaatactgatagatttgtacgatacgctggctgaccaatttatcaattcgagacacagaatcatttcctctttgaaacaatttacaagagtaattcggtttattgtgatggataagctatatcgcgtgcacataacaaacgtcctttcgatgctggtctccaaacttgatatgaacgatactaatttgacaagcaacctcatcaacggtattgtatctatagccgctttcattcctatccaagacctcactggggaggacgattatatatcgtttgaatcggatactcttcctttagttcaacaacatttttatcatattaagtgtggcgaaaattcaaagaccttccgagttgatgatgaactgttaaataacgctttcaaagcttccactacagtttttcaaagtatgctaaaagtatacgtagaaaaaattttccaattggttgatgtagacttagaggactctttggttactaaaataaaccaaacaactatgattttacaagagtctatggacgataaaatatttaattattttgcttctttattacagagaaacttctggagtaatgactccttcaaggaaaaggatccaaactatgaattagttactatcccactagcggctttagtaagaaggaataatggtttgagtaaagagttggtcagaactcttttattccatatcaaagaacaaatcaaaagaggcgccgggtctgtaagaagtacttcagagattcaacagagggatgttaagttagttttatacttaactgcactaaatgatgtcttaaggcaatgtcatgaatctctattggagtatagcgatgagttgataacattcatgaaatatttatacgacaacgtcactaacccgccattggatgttatcacatctattgttattcacagtgctttagcaactctatgtacaaccgaaataactgattgtcgtctattcccagaggactctaagattccggaaaaagacagatggggaggactacagttcgatcctcgaagatttgataaacagcatttgagttttcagtggcacgtaccttctagtgacgagataactttatccataagcattctagaaagcctttccgaatactgtattaacaacgtagaagaactgatgaaagctccaagacatgattccgaatatggcgatatgatacaaaaatatgttttagttatgacacatacgctttccgggtcaagtttactttttgatccagattttaacaaatataggacgcaatcaaacttatcatacagagagaaactgattttattaaagaatatacgcgaaaataattgtgaccctcaagaactggatattgatattgaacaaattcgttctggcaaggatgatgaagactatattgagagtaaggacattgaagcagggctgaatgcaggagtttccgatgttgtgcagttaagagatgagtttccggatgaattaattgttgatgaagaagtagtgtctgagatgccatctggtgtaaatacccctatcgcggggacgcatggcacggacaattcagctatgagttcggatctagctttcagggatttagatatttacacctgtaattattacttcggaaataccactgaggagaagttacaaaacccacaatatttacaagtccacagagttagagcgcgcattggacatttctttcacaaactctatgtttttttatctacaaacttcgaaaacaacaccaacatgttccaaattctattgcacggattaaaagtttggttcacagatctgggacaagaaacagtcttcaatgaagacccaaatgccttcattgacgttgatttcctagaaaacgttcaatctctctcacacgtaaatgagcccttcacgagaaccaattttgcaatcagagcaaacagtttgcaccagagtagagttctattacattcaacaaatagaaaagcttccaagctggaaaacctattgttagttgacatcatacagttagcgacatccctttatcctgatatttataaaccagcacagggaactttggtacactgtatgaaacaattagttgggtcatatggcgtagtcatcaataaaattattccatcattagagaaagcgattaaggatcatgattatatgaaaatccaagttattttaaatgttttgttaattaagaaaatccataggaagcttatgacggattataaagacatcggcagattgatatttctgcttattgaatgttgtcgtgtgaatgaattagagattggtatgtatgcagataaaatcttaactgacatagtgattgggatcaagattccttctagtgtatgtgtcatttccgatcaagctttcttacctttagcacctcctgatggtactattaatttgcaagttgaagcggtaaagcttgccaaaaagaaaaagcgtgagtactacctctctctgttagtggatttgcaggacaaacttttagacaaattagataatgaaaaagatatggggtggaagataagaatgttcattttacgttttgttacacaaatccaatcgaacctcgaaagcaaacccgataaaagagcagtattttcaataatctcccaaatctccacaaaacatcccgaaatcatacatttggttgtaaagtcattgttgtcgacgtgcaacaagataatatctctctctgactatgaatatgacatcaccagggcctataagaatgaattcaatccatcatttgtggaaatactggacacttcgaccacaagcttccctaaaacgtttactgaagaaatgaataactttgataaccccaagtattttatcgattcgagggcgtatgtagggtggctatgttggggaaggcttatgtacgtcatgtcgccgaaagctttaaagctcaatttacgtgagaatgaactggaagtcctcaagacagctggtcatctattgacaagagaattcctgagagatgttacaatgaatttagtccaagataatgaaactaggggtgtttttagtagtggtaacgtgtcatttttctctttagtaatccttttgatatcatctggtttctgcgaactgaatatgtcggatctctttgagctatgtgaatcctactataacaaagacgataaggcttcgatgatcatgtctgtcgagatagtggctggcttagtttgcgggagtaagtttatgtcagtctctgacttggacaaacgtgacgcttttatcgaaaacttcctagccaaatgtttagattatgagttgaaccatgacgcatttgaaatttggagcaccttggcatggtggttgcctgcagtcgttgatttaagaaggtctaaaacttttttttgccattttatcaacgccgatggcatgtttgaccgtgaatctgatgcagccacacatcaaacctccaaaatttacatgctaagaagtatcttgatgagcatggaatttagagccccagatgttggtaagctatttgatgagttggtatttgatcacccatacgatcaggttcgccaggctgtcgctaaactattgacgaccttagttcaaaatcaaagtaatccgtcaatttcagatccaaccacattattagaagcagaacggaatgatccagatggattagggttaccattaaaaagcgtcccagaaaaggtggatgcctatattaagaagcagtttgagatcattaaaaatctggaatattccgttgtcggcttgaatcctcaacaatttattaagacagactatttttacaggacatccacaatattttactggatcaaagaaatggcgagagggcctaataaagttttgttagttccatatttagtcgattatgttttaccatttctgatcggattagtgaaacataaagatgtttgtgctcttgccaatttagatcctgttcgattgtatgccggcttgggctatatgccgatcagaaagaaccatgttgccgccattgttgactatgtttgttcgtcaaatgtagcactatcttcaaaccaaacgaaactacagctagctttcatccaacactttttatcagcggaactgcttcaacttactgaggaagaaaagaacaaaattttggaatttgttgtcagcaatttgtataacgaacagtttgtagaggtgagagttcgtgcggcatccattttgtctgatatcgtccataactggaaagaggaacagccgttgttgagtttaatcgagagatttgcaaagggtctcgacgtcaacaaatacacgtcgaaagaaagacaaaagttatccaaaacggatatcaagattcatggtaacgttttggggttgggagctattatatcagcgttcccctatgtttttcccctaccgccatggatacccaagcaactaagcaacttatcctcgtgggccaggactagtggtatgactggacaagctgccaaaaatactattagtgagttcaagaaggtgagggccgacacttggaagttcgatagagcatctttcaatacggaggaactggaagacctggagggtgtcctatggagaagttactatgcctga

SEQ ID NO: 82022 - DNA, 75 bp, Saccharomyces pastorianus
atgctgtttggagtgaagttggctaatgaggtttatcctccttggaagggttcttatatcaattatgagggcttg

SEQ ID NO: 82023 - DNA, 1659 bp, Saccharomyces pastorianus
atggagagattgtcccatctggagaaacaaacagatacggaagcagccataaaggccttggacgctgatgcattccaacgtgtattggaggaactgttaagcgagtctaccgaattagacaattttaagagattgaactttactgggtttgctaagattgttaagaaacatgacaagctatatccaaagtatccatctgttaaatctttgttggaggttagattaaaggaattgccttcccattcggaagaatattccccattgttgtatcgtatttcatttttgtacaacattttgagaagtaattttaacactgcatctgaacccttagccagcgcttctaagttttctagcattgtcagcaatgacatagacatgaatttcagaagctttaaattttgggttcataatgacaacttaatggaggtcaaaacaagaatcttgagacatcttcccgtgttggtctacgccaatgttccctccgaaaacgatgacctggtcaatagattcgaatcagatatatcaaataatgatgaaattgtgggtagttcgagctccactagtagcgtagaacatggcttgggagcgcgctccttcgatccattaatcaacacgctatattttgacaatgagcattttgaattatataacgacaagttattaaagttaaattcagcacctactttaagattaaggtggactggccagttatctgataagccggatattttcttggaaaagaaaactcttattgaagacgaagccactgggaagtctgaatttgatctaactaaattgcaattgaaacaaaaattcattaacgggtttattttcgaaggtgataagaaatttaaagaacaaactttgaaaaagttaaaagaaagtggtacggcagggagagacctggaaaggttagaagaagatttctctgagattcaaaactttattatcaagaatgaattgcaaccagtttttagaactgtttacaccagaactgctttccagattcccggcgatgacaagataagagtaaccattgactctaatattgtattcatcaaggaggattcattcgacagagagcgtccaattagagaccctaatacctggcatagaactgatattgatgccaatgttgcaaatcccttgaaattcctgagaggaggcgagtatgctaagtttccttattcagtaatggaaattaaagtgaaaagttcattggattcttcgatgtctgccagttctatgatttctaatgtaaaactgcctaaaaagcatggtcaatggctgaacgatttgacaaattctcatttggtcaaagaaattccaaagttttctatctttgtgcaaggtgtggcatcattgtatggagatgatgaaaaattagatatcttaccattttggttaccagatttggaaacagatattagacaggatcctaagcaagcatatgaggaggaaaagaaaaaactgttgaaacaaaaagagatacaaaagaaaattgatggaatgagaaggctttccaacttaaaagagcctcaacatcaagcagcagtaccggtatctcacgaggaaaatgagcgtattacctctcaaggtgatttggaggcagacggttcatccgatgaggaaactgagcaagaaactcatccgaaaaga

SEQ ID NO: 82024 - DNA, 1809 bp, Saccharomyces pastorianus
atgctggagacgttgcgcggaaataagctgcattctggcacctcaaaaggcgccaacaaaaagttgaatgaactcttggaatcgtccgacaatctaccatcagcatcctctgaattaggttcaattcaagtaagcattaatgaattgagaagacgtgtttttcaattgagaagcaagaacaaagctagcaaggactatactaaagcccactatttattggctaacagtggcctaagctttgaagatgttgatgctttcatcaaagacttgcagacgaatcaatttttggaaccaaatccaccaaaaataattgaaagtgaggaattagaattctatataagaactaaaaaggaagaaaacattttgatgtctatcgaacagcttttaaatggcgctacaaaagattttgataatattattaatcataacttaaatctcgattgggctcagcataaaaatgaagtcatgaaaaattttggcatccttatacaagataagaaaactgtagatcacaaaaaatccatcagttctctagaccctaagcttccaagctggggtaataagggcaataacattttaaatagcaacgaatccagattgaatgtcaacgaaaataatatccttagggaaaagtttgaaaattatgccagaattgtgtttcaatttaacaatagtagacaagcaaatggaaattttgatatagccaacgaattcatctcaatattatcttctgcgaacggaacaagaaacgctcaattgctagagagctggaagattctcgaatcgatgaaaagtaaggatattaatattgttgaagtcgggaaacagtacctggagcaacagtttttacaatataccgacaatttatataagaaaaacatgaatgaaggattggccacaaatgtcaataaaatcaagtcattcattgatacgaagttgaagaaagcagacaaatcatggaagatttctaatttaactgttatcaatggtgttccaatatgggccttaatattttatcttttaagagcaggtctaatcaaggaagcattgcaagttctagtggagaataaggcgaatatcaaaaaagtagaacaatcattccttacttatttcaaagcatatgcttcttcaaaggaccacggcctaccagtggaatattccaccaagcttcatacagaatacaaccaacacataaaaagttcactagatggtgatccttatcgtctagctgtctacaagttgatcggaagatgcgacttgagtagaaagaacattcctgcagttactttaagcattgaagattggttgtggatgcatctcatgttgatcaaagaaaaggacgcggagaatgatcctgtttatgaaagatattccttagaagacttccagaatataataatatcgtatggaccatctcgcttctcaaactattacttacagacccttttgttaagtgggctctatggattggctattgactatacttatacatttagtgaaatggatgcggtgcatttggcaatagggctagcaagcttgaagctatttaagattgatagctcaacgcgcttgaccaaaaaacccaaaagggatatcaggttcgcaaacatactagctaattataccaagtcctttaggtattcagatcctagagttgctgtcgaatatttggttttaataactctaaatgaaggacctaccgatgtcgagttatgccatgaggcgttgagggagctagtattggaaactaaggaatttactgttcttttgggtaaaatgacgcgtatggagctagaattccgggggtga

SEQ ID NO: 82025 - DNA, 270 bp, Saccharomyces pastorianus
atgagtgtggaagaggttcccgcagttttgcagcttcgagcaactcaagatcctccaagaagccaggaggcaatgcctacaaggcacaatgtaagatgggaagaaaatgtgattgacaatgaaaacatgaataaaaaaaagaccaagatatgctgcatttttcatccacaaaatgaggatgaagaagagtgcaaccatcattcagatgatgatggatcctcttcttccggatcctcttcttcagaatctgagaatgagaaggatcttgac

SEQ ID NO: 82026 - DNA, 1395 bp, Saccharomyces pastorianus
atggaggttgataacaaaaggagacattcagaagatgagttaaaacaggaggcagtaaaaaagataaagtctcaggaaccaaactatgcctatcttgagactgtagtaagagaaaaactagatttcgattctgagaaaatttgctgcattactctgtcccctttgaatgtatattgttgcctcgtgtgtggaaattattatcaggggagacatgaaaagagtcctgctttcatacattcaattgatgaaaaccatcacgtcttcttgaatttgacaagtttgaagttttacatgttgccgcaaaatgtccaaattttacatgacggtgaggttcaattgttgaacagcataaaatttgcagcttatccgacttattgtccaaaagatctagaagattttccgagacagtgttttgatttgagcaatcgcacatatctgaatggatttatagggttcaccaatgcggcaacttatgactatgcgcatagtgtattgcttttgatatcgcacatggttccagtgcgggaccacttcctattgaatcattttgataatcaaggggaatttatcaaaaggttatccatatgtgtaaagaaaatttggtcccctaaactattcaaacatcatctttccgttgacgattttttatcctatttgaaagttagagaaggtttaaatttaaatcctatagacccacgtctcttccttttgtggctattcaataaaatttgcttgtcctcgaacgaattaaagtcaattttaaaccattcttgtaaaggcaaagtaaagatagcaaaagttgaaagtaagcctgaggccagtgagtctgttacaggcaaagtcattgtcaaaccattttgggttctgactctcgatttgccggaattttcaccctttgaagatggcaacagcgttgatgatctcccacaaataaatatcactaaattattgactaaatttactaagtcaagaagctcctctactagcaccgtttttgaactaacgcgattaccgcagtttttaatattccatttcaataggtttgaccgtaacagtgatcatcctgtcaaaaatagaaaccaaacgttggtggaattttccagtgaacttgaaattttgcacgtcaagtatcgcttaaaagcaaatgtggtccatgtggtcattaaacaaccatccacagatggaaacgcatttaatggtgatgaaaaaagccattggattactcagctgtatgataacaaaagtgaaaaatggatagaaatagatggcataaatacgacagagagagaagccgagcttttattttctgaaggaaacgtttatacaagtatgggaaaagcaagagtgaaagaaaagaaagtaaaaaaaaaaaattggcactgggactaccagtag

SEQ ID NO: 82027 - DNA, 690 bp, Saccharomyces pastorianus
atgggaatgaagtacgtattgcctttgcgactaattggtctagcgtacctgttgatgctatttcgggtgcatagggtaactgggtgggagttgtcatatgagcagtaccatgcagcgcatctgaacgaagctatcaacctagacagcggttggaacaaaagtaccaagaacctgctgttgccttttaacagaacgcgcgtacccggatcggaaggctcgcgcgagatccagcgcttcatcatcgagcacttcaacaatacgctggcgggagaatgggccgttgagacgcaagcctttgaggagaacggttaccgcttcaataaccttgttatgacattacaaaacaatgcgagcgagtacttagtgctcgctgctcattatgataccaagatagcgcccacggggatggtgggcgctatcgacagtgccgcctcgtgtgccgcgctgctatatacggcccagttcctaacgcacatcgcgtgccacgagcgcacgaaagagtacaatgacttagagtcgaacactgtagtatcgaattctaccttgggtgtaaagatcgtattctttgatggagaggaggccattgaagagtggggccccgaggactcgatttatggagcacgccgattagccgcccaatggcttgctgacggcacgatgacaagattcgcctattatttcttctggatc

SEQ ID NO: 82028 - DNA, 1350 bp, Saccharomyces pastorianus
atggaagaattaaattacacgaaggttaatggtaaagaaattaggattatgccatcattgaggaatacaacgtttagaaagaatttcggcactaatgtctttttctctaatctacctctaaataatccattattaacaacaagagtattctatgatacgttttctagatatggtaaaattctatcatgcaaattagactctaggaaagatataggatttgtttactttgaggacgaaaaaactgcaagaaatgtgatcaaaatgtacaataataccagtttttttggtaagaaaattctatgtggaatacattttgataaagaggtcagaagtgttccaaattttgaaacacaaaaatcacgattagatgcggaaacaattattgaaaaagagcaatctttgaatgagaaacactccaaggggaatgataaggaatctaaaaatatttactcttcatcccaaaattctatattcatcaaaaaccttccaacaataactacaagggatgatattttaaatttcttcagtgaagtgggtccaattaagtcaatttatctatccaatgccactaaagttaaatatctttgggcatttgttacatataaaaatagcagtgactcagaaaaggcaattaaacgctacaataatttttatttcagaggtaaaaagcttttagtaaccagggcacaggataaagaagaaagagccaaatttatagaatctcaaaaaatatctacacttttcctggaaaatttaagcgctgtctgcaataaggaatttcttaaatatttatgtcaccaagaaaatattagaccgttcaagattcagatagatggatatgacgaaaattcttctacatattctgggttcatcaaattcaggaattttgaagatgctacgagaatatttaactttttgaataaccgtttagtaggaggaagcatcgtcacgacatcttgggaaagacaaaataatgcacctaaatatcatgatggttatggaatgcgcaatatacacacctcttctcatccacaaattaccccatattaccagtactcacatgcgaatagtttgaactccccacacatgagagatctttcgtcaatgaatagcagcacaagatcactaataaagaataaaaatttcaataagaaagttttggaaacattcgaaaagcaagtaagaagaggtatagatttcatgagatttccaagtgccactagagacgaaaatgtgcacggaatagctgagtatatattcgacacttattggaatcgcgatgtgttaatattggacaaatttttatcgttgctaaatagtagtccatatcatgaaggtgtattgcaataa

SEQ ID NO: 82029 - DNA, 108 bp, Saccharomyces pastorianus
atggttcccctgaatattttgaacgaccaggatttgacagtacaaaaagatcacgagaagaaactctcattcacccccgttagttctcctattaggccagacgactac

SEQ ID NO: 82030 - DNA, 519 bp, Saccharomyces pastorianus
atggcaggtgctggtgccggtgggatggttggtatagaattgactgattttgttttcattttaaatactcaggatgctgttaagtcgttttctgaatttgggaccatcacgctgggtggtaacgtctccgtttctgctgggcctcttggtagaagtgcagaagcagctgcatcagcctccgccggtggtgtggctgcagtttttgcctattctaagagtaaaggtctatttgcaggggtttctgtggaaggttcggctattatagaaagaagagaggctaacagaaaattttatggtgacaattgtaccgcgaaaatgattttgtctggtaggataagaccgcctccagcagttgatccattgtttcgtgttttagagtccagggcgtttaattacagaccctccaacggtggtcgtggcagtttcgatgacgacgaagacgattactatgacgacgacgattactataatgacattcctagttcattcagttctacagatgcttcctccactagacct

SEQ ID NO: 82031 - DNA, 387 bp, Saccharomyces pastorianus
atgacgccctatgcagtagcaattaccgtggccttactaattgtaacagtgagcgcactccaggtcaacaattcatgtgtcgcttttccgccatcaaatctcagaggcaaaaatggagacggtactaatgaacagtatgcaactgcactactttctattccctggaatggacctcctgagtcattgagggatattaatcttattgaactcgaaccgcaagttgcactctatttgctcgaaaattatattaaccattactacaacaccacgagagacaataagtgccctaataaccactacctaatggggggggggcagttgagtagctcatcaagggcaatcaaggttccaatcttgccggtttcatacatgttgataagccaatga

SEQ ID NO: 82032 - DNA, 1905 bp, Saccharomyces pastorianus
  modified_base (1651)..(1717): a, c, g, t, unknown, or other
atgcgtaggagtgtatacctcgacaacacgatcgagttcctgcgaggcagagtatatctcggtgcatatgattacacgccggaagatactgatgagctggtgttttttaccgtggaggacgcaatcttttacaacagtttccatttggatttcggtcccatgaacattggacatctatatcgttttgccgttattttccatgaaatcttgaatgacccagaaaatgccaataaagccgttgttttctattcatctgcatcgaccagacaacgtgctaacgccgcatgtatgctttgctgttatatgatcctcgttcaggcatggactccgcatcaagtgcttcagccgttggcgcaagtagaccctcccttcatgccatttagagatgccggttattctaatgcggatttcgaaatcacaattcaagatgtggtttatggcgtttggagggctaaggaaaaaggccttattgatttgcattccttcaatttggagagttacgagaaatacgaacacgtggagtttggagacttcaatgtactcaccccagattttattgcatttgcgtcaccacaagaggaccatccaaagggctatctcgctaccaaatcttcacatttgaaccagccgtttaagtcagttctgaattttttcgccaacaataacgtccaattagtggtaaggttgaattctcatttatataataaaaagcattttgaagacattggcattcaacatttggatctaattttcgaagatggtacatgtcctgatctttccattgtaaaaaactttgttggtgctgctgaaacgataattaaaaggggaggtaaaattgctgtgcactgtaaggctgggctaggtagaactggttgtttaattggtgctcacttaatatacacgtatggatttaccgctaacgagtgtattggcttcttaaggtttataaggccgggaatggtcgttggccctcaacagcattggttatatttacaccagaatgattttagagaatggaagtacacaaccagaatttctttgaagcctagtgaggccattggcggcttatatcccttaataagtttagaagaataccgcttacaaaaaaagaaacttaaagacgacaagagggttgcgcaaaataacattgaaggtgaattaagagatttaaccatgacgccgccatccaacggtcatggggcgcttagtgccagaaattcgagccaaccttctacggcgaataatggaagtaattcattcaagagctcagccgtcccacagacttcgcctggtcagccgagaaagggccaaaacggttctaatactatagaagatatcaacaataatcgtaatccaacttcccatgcgaataggaaggtagtaatagaaagcaacaactcggatgacgaatccatgcaggataccaacggcacaagtaatcattatcccaaagtttcgcgcaagaaaaatgatatctcctctgcttcatcgtcccgaatggaagataacgaacccagcgcaacgaacatcaataatgccgcagatgataccatactaagacaactattgcccaagaataggagagtaacgtcagggagaaggactacaagcgccgccggtggtataagaaaaataagtggcaccatcaagnnnnnnnnnnnnnnnnnnnnnnnnnnnnnnnnnnnnnnnnnnnnnnnnnnnnnnnnnnnnnnnnnnnccttgaaaagttttatgccatttttccagtgtcccttctcgctgtcttttcgaaagagtcatatgtataccggcaatagtaacttgcctgatttatgcataatgccgttgtatttgctagccagttttccaccgctgtctgtgggttgcgaccatgctacctggtacctaggaataacttcaccgtaa

SEQ ID NO: 82033 - DNA, 1926 bp, Saccharomyces pastorianus
atgagcagatgctcaaacgcggcgctgatgactgttgttgaggatgctgttggggccagggtggctgcaaggacgagaaacatgagcaatggcgtcaattaccgggagaaggaagtcaatgacctaacggctgacatctcggattcggattcagatttggattcagaggacaataaacatggcaaaggtgacaatgacactgccccgatatggttacaagatgatgtgcattcagacgaagatattcagctggactcagaggacgattccgatacagaagctgttcaagcccaagtggtggataaattggcaaaagacacgaaatcagagcaaaaatccttggatgatgagctctccgagatggataccaagacggtctctttaaaacttaagaaactaaacgagtttgtgaggcagagtcaagtatattccagtataatcgccgatactttactacaacgatctaatgaagtggctaacgctaatacaaaagataacagcaactctaatgatgaagaacattcttcaaaaaaacgtaaaacaaaaaaaaaatcaataacagatttcttcagaaaacagaaaaagaacgaagatacaaccacccaaaacggcgcaccagacgatgcagcaataaagcaacctcgcctattgaaaaactgtattttaaaaccttaccaactagaaggtcttaactggctgatcactctttatgaaaatggcctgaacggaattcttgccgatgaaatgggccttggtaagactgttcaaagtattgctcttttggcgttcatatatgaaatggacacaaagggtccctttctagtgactgcaccattaagcaccctagataattggatgaacgaatttgcaaaattcgctcctgatctaccagttctaaaatattatgggaccaatggttataaggaacgttctgccaagttgaaaaatttctttaaacaacacggcggcacggggatcgtcatcacatcatatgaaattattttaagagataccgacttaatcatgagtcaaaattggaaatttttaattgttgatgaaggccaccgtctgaaaaatataaattgtagattgattaaagagttaaaaaaaatcaatacttccaatagactgctactaacagggacgcctttacaaaataacctagctgaattatggtcacttttgaatttcataatgcccgatatctttgctgatttcgagatattcaataaatggtttgacttcgatagcttaaatttaggctccggttccaactctgaagcattgaataagttaatcaacgatgaactacagaaaaatttgatttccaatttacacacaattctgaaaccattccttttgagaagattgaaaaaagttgttttggctaatattctgccgccaaagagagaatatatcataaattgtccgatgacgtctgcacaggaaaaattctataaggctggattgaatggaaagttgaaaaaaaccatgttcaaagaattaatcaaagattttttcacattgaacgatgaatatatcggccacgtttctaatcggtccatacgagatttcatcaattataaactatctggtaatgaaacttcaaatacggacaatagaatcaatccaaccttgttgcaaatggacaaactatataagaagaacctgcaaatggaaatttcaaataagaaattgcaaaatataatgatgcaattaagacaaatcattgactcaacttttttgttttatttcccatatttacacccagaagacttgactttggaaactcttttaaagacgtctgggaaattacaaatcttacaaaaattaatccccccattaatatctgaggggcacaaagtgcttatttattctcagtttgttaacatgctcgacttgatccctatagtgagtcgtattatg

SEQ ID NO: 82034 - DNA, 672 bp, Saccharomyces pastorianus
atgctcgacttgatcgaagattggtgtgatttaaattcgttcgcgacatttcgaattgatggttcagtaaacaacgaaacaagaaaggatcaactcgagaagtttaatagctcgaaagataagcataacattttcctattgtccacaagggcggcaggactgggtattaatctagtcggggcagatacagttgtcttgtttgatagtgattggaatccacaggtggatttacaagccatggacaggtgtcaccgtattggccaagaatcaccggttatagtatataggttgtgttgtgataacaccattgaacatgttatattgaccagagcggccaataagcgaaatttggaaagaatggttatccaaatgggaaaattcaataacctgaaaaaattggcgttaaatgaaggttcttttttgaaggcaaacaaagcgggtgtcaatgtcactaataaggacttagtccaggagttatctatgcttttaatgagcgatgaatccagtataggctttgaaaatgggggacagaaagaaaataaggctactgagggccaactgactgataaggaggttgaagaattgaccaacagatctcttgaagcgtacaaggccaacagagtcgtagatctaccgcacgtcaagctatttgaaacaacctccggtctttaa

SEQ ID NO: 82035 - DNA, 1203 bp, Saccharomyces pastorianus
atgattgatcgtaccgagttatcgaagtttggtattactacgcaactgtctgttattggacgtaatccagatgaacaaagtggctttgttaatccacctttgtataaggggtcaaccatcattcttaaaaaacttagtgatttagaacaaaggaaaggaagattttacgggacagcaggttctccaactattgacaatttagaaaatgcctggacgcatttaaccggcggtgctgggacagtgctatcagcttctgggcttggttctatctctttggcgctattggccctttcgaaagctggtgatcatatcttgatgactgatagtgtctacgtgccaacacgtatgctatgtgatggtttattggccaagttcggtgttgaaacggattattatgacccatcaatagggaaggatatagaaaaactagttaagccaaatacaaccgtcattttcctcgaaagcccgggttctgggaccatggaagtacaggatattccagctttggtctctgttgccaaaaagcatgggataaagacaattctagacaacgcatgggcaacgccactcttttttgatgctcatgcgcatggtatcgatatttcggtagaagctgggacaaaatatttgggtggtcattcagatcttcttattggtctggcctccgcaaatgaagaatgttggccgctattacggtcaacttatgatgcaatggcaatgttaccaggtgccgaggactgtcaattagcattgcgaggaatgcgtacattgcacttaagattgaaagaggtagaaagaaaagccctggatttggctgcttggctcggaaatcgagatgaggttgaaaaagtgcttcaccccgcctttgaagattgtcccggacatgaatactgggttcgtgactacaaaggttcttcaggcttattttccattgtccttaaaaatgggttcacaagagctggtctggagaaaatggtagaagggatgaaagttttgcaattgggattttcatggggtggctacgactccttgattacccctgtaaatccttgtaataatagaaaagcttcaacatggccttacaaaggttttgcactaagaatacaagtgggtctcgaagaatttgaagatttaaaaagggattttgagttaggctttgaacgtctcgcagaagaaatttctttgaatcctttacaaatctga

SEQ ID NO: 82036 - DNA, 93 bp, Saccharomyces pastorianus
atgatatttggacctactagtgtctatagtaagtgctcggccaagtcaagcggtatcattaaagacgccgccagcttccaatatcacgagtaa

SEQ ID NO: 82037 - DNA, 231 bp, Saccharomyces pastorianus
atggtcaaattaacttcaatcgccgctggtgtcgctgccatcgctgctactgcttccgcaaccaccactctagctcaatctgacgaaagagtcaacttggttgaattgggtgtctacgtctctgatatcagagctcacttggcccaatactacatgttccaagccgcccacccaacggaaacctacccagttgaagttgctgaagccgttttcaactacggtggactctag

SEQ ID NO: 82038 - DNA, 138 bp, Saccharomyces pastorianus
atggagatgctcttgtttctgaacgaatcatacatctttcatagacttcgtatgtggagtattgttttatggcactcatgtgtattcgtatgcgcagaatgtgagaatgccaattataggggtgccgaggtgccttga

SEQ ID NO: 82039 - DNA, 318 bp, Saccharomyces pastorianus
atgagaattctaatggcatttgaaagacaaggaaagattgaaaagaagatatcgtattccttatttttgaatggacctaatgtacactttgggagcatcttattcggtgcagtcgataaaagtaagtacgcagaacagctctgcacacatcctatgcgtcaagcctacaatacccttgattcaaactcaagaataattatcacagcacagagtgttgcaattttggacggcaacttgtatggtaaaagtgttgtagatattcagtttccagtgctattagattccggtacatattctatttacctacaaaatttgtaa

SEQ ID NO: 82040 - DNA, 369 bp, Saccharomyces pastorianus
atgaaatttttgaagaacaaagcacctgctaatctggtggataacggcaggtttgtggaagcaataacgtgcaataaagttaaaccgaatccatcttgcgtctccaactgcctcaaatttctttccgaagttttagcggtagaagcaataactgattcggccagaaatttagctacggtttccaaatcggacatcctactattttctcttctacaattgagtagcaataaacagagcgggtcctctttgccactttttgatcttgtgtttatactactttcaacttttttttattccataatccctgcaattgaagtgaaaaaaaaaaaagcaaaaggcagggtaatagcaaggaagaaaatatcataa

SEQ ID NO: 82041 - DNA, 2010 bp, Saccharomyces pastorianus
atgctgcgtgtaacaaccttggcgtcttcgtgtacttcatttcccttacaggtcctcaggaggcggttgaccatatcttctttgacaagcttccaacccacaaccaagacacaggtcgtggtcatcggtgctggacatgcaggctgcgaagctgcagctgcgccatctaggactggtgcgcatactactctcattacaccatcgttaacagatattggtaagtgttcgtgcaacccctctattggtggagtgggtaagggcatccttgtaaaggaaatcgacgctctcgatgggctgatgggcaaagtaactgatctcgctggagtgcaattcaaaatgctgaacagaagcaagggtcctgctgtgtgggggcccagagcccagatagacagagagttatataagaaatacatgcaaagggaactttccgacaagaaagcacaccccaacttgtctctgctgcagaacaaagttgctgacttgatcttgtatgaccccggatgtggccacaaggtcatcaaaggtgtggttctggatgacggtacccaggttggggcagatcaggtcataatcactacaggtacgtttctcagtgcagaaattcacatcggcgacaagcgtattgcagcaggaagaattggcgaacagccaacatatgggatcagcaatactctacaaaatgaggtgggttttcagttagggcgtttgaaaacaggcactccggctaggctggccaaggaatccattgatttcagcgctctggaggtccagaaaggagataagttgcctgtccctatgagttttctgaatgaaaccgtgtcagtcgaacccacgaagcaactggattgctttggcacacatactacacctcaaatgcacgactttttgcgcaataacttgcatcaatccattcatatccaggacacgaccatcaaaggcccccgctattgtccctccatcgaagctaagattctacggttccctgatagatcttcccataagatatggttggaaccagaaggtttcaactccgacgtcatttatccgaacgggatatccaattctatgcctgaggatgtccagttacaaatgatgaggctcatcccgggcatggcaaacgttgagatcttgcagccggcatacggcgtggaatacgactacgtagacccacggcaattaaagcctagcttggaaacaaaattggtggatggactattcttggccggacaaataaacggtactacaggctacgaggaagccgctgcacaggggatcattgcaggtatcaatgcaggattactatcgcgccaagaacgggagcaattggtcttgaaaaggtcccaagcgtacattggtgtgctcattgacgatctaatcaataatggcgtcatagaaccatatagaatgtttacttccagatcagaattcagaatcagcgtaagagccgataacgcagacttcagactgacgccgattggtgctcaactagggattatatctcctgtccgtttaagtcaatattcaagagacaagcacctatatgatgaaacaatacgggcgcttcaaaatttcaagctaagctctcaaaaatggtctagcttactacaggctaatatcgcgccacaggctgaaaacagatctgcttgggaaatattcagattcaaagatatggatctacataaactctacgagtgcattcccgatttacccattaatttgctggacatcccaatgcatgttgtcaccaaaattaacattcaaggtaaatacgaaccttacattgtcaaacagaaccagtttgtgaaggcatttcaggcagacgaaaatatgctgttgccgcaagattacgattaccgtcagttacccacgctttccactgaatgcaaactactcttgaaccgcgtacagccattgaccataggccaagcaagacggattcaaggtatcactgcggcagccctatttgaactctaccgtgtggcacggaagccaagccaaccagtcatgtaa

SEQ ID NO: 82042 - DNA, 1218 bp, Saccharomyces pastorianus
atggatgaagtcttaccattgtttcgcgattctcatattccacagattaaagattatcaattggagttacagaacgatttgactaaaaccaatgaggccttccaaaagaatttgctaaagaactataacaagatcttaagcttgaccgattctgttaatgacttgtcgctcaatttgaaaaatgttgatcaagattttaaatccctgtgtttcaatgatgaaaaatttcagttgaataagttagctccactaccataccaaaccactacccatatatcaccacctcgtgacgaagaaaaagtcagcataccatcgcaaaacattttagtaatttcaaattggaccatctccatcaacaacttctgtaatcgtatagttacttccactactccgtcgcggatattcgacgagctactgttgaatttccacgaattatctttgataccagttccttccaaatttgaagcgcttgtcaaggacaaatgttgtcgactacagaagttcttggtggactctatgaagacattaaacttaactttactacagtgggtaaaactatacaatttactaaacacggagttttcctcgaagtgggacgatgatttactttctatattcaatgaatccctattcgagacactatttaacgataacgttcaagcgttactgatatcaagtgccaacagcaaagatcatcaatatcactccaatcagcaatataaggacgcgattgttgtcgattttgtgaattcgtccacctttagagaccatctcattcggagaaccgtgaaagaaataaacacacatttggatacactctctactttgagagccaagcttaaggagcctgaaactcttcataaattagatatcttccatgataatgatacgaacctcaatgatggcactgtatctccacttgatgatgatgcattgaaacaatatattgatacagcggtattctattcaaaaggtttaaccaatgataccacgttgcaaatttatcaaacggtgcagcctacgattgaaatcctacaaaacttagaattgtataaatgccctcaagagacactgacagatttgagaaataaattgattactcaattgcaagagtttaagactcagatctcatcccgcttaccttcaccactggaaaactcaacgagtgttgtggatgattttataacttcgtacaacaatcacatctcttgcaattag

SEQ ID NO: 82043 - DNA, 1095 bp, Saccharomyces pastorianus
atgaacgtgcctgaaacaagacaatcctccatagtcgtagctataagagtaaggccctttacgtcaatggaaaaaacaagattggtcaatgaagctagtggtgcagaagctaactttcccggtttgggggattcgtcgttaatattacccatgagtaataactccgactccgatatagacatagacgctgaagaaggttctacgcggagcaaaagaaatagcttgctgaggagaaaagtaattagaccggagggtatacgtaaaattgtggattgtgtggatgatagaatgctcatattcgacccagctgatagaaacccattgaacaaagtgagtgatcaggtcctgaactcgatgcgtgcaagggccactaaggccactgcgtcctctatcaataacagcaatgctacgaacaaattttcttcgcaacgtcgaaggcacggtggcgaaatcaagtttgtatttgataaattgtttgatgaaacctcttcccaagcccgtgtatacaaagagaccaccagcccgctcctagattctgttttagatggattcaacagtaccgtatttgcttacggtgctactggttgtggcaagacatatactgtgagtggcacaccttcacagccggggatcatatttctagccatggaggaactattcaataaaattacagacctgaaggacgaaaaagacttcgagatttcactgtcttacttggaaatatacaatgaaagaatcagagaccttttgaaaccagagacaccatctaaaagattggtcattagagaagatacgcagaaccacatcaaagtggcgaatttgtcgtatcaccacccaaatacggtagaagatgtgatggacttagttgtccagggaaacataaacaggactacgtcaccgacggaagcaaacgaagtatcttcacgatctcatgcagtgctgcaaatacacatcatgcagacaaataagcttgtagacttgacctcgcaacatacatttgctacactttcaataatcgatctagctgggagcgaaagagccgacgaaacaagaaaccgtggtatacgattacacgaaggtgcgacatataaatag

SEQ ID NO: 82044 - DNA, 1080 bp, Saccharomyces pastorianus
atgtcgtttactgctccttcagatcccgtcaataaaccgacaaaagtgaaggtatcacagttgtgtgaactatgtcattcaagaaaggctctcattagaagacccaaaaacctgtctaaactttgcaaacaatgcttctgcctcgtgttcgagacggagatccataacactattgtagcaaataacttgtttcagaggggagaaaaagtagccgtgggggcctctggtggtaaagactccacggtgttagcgcatatgctgaagcttctgaatgaccgttacgattacggcattgagattgtactgttgagtattgacgaaggaatcatcggatacagagatgattccttggccacggtgaaaaggaatcagcagcagtacggccttcctttggagattttttcctttaaggacctctatgattggacaatggatgagattgtatccgttgctggtataaggaacagttgcacgtattgtggtgtttttagaagacaatcattggaccgtggtgctgcaaagctgggcatatctcacgttgtcaccggccacaatgcagacgatatggcagagacagtactaatgaatatcctacgtggtgacgtagcaagattggaaaaatcgactgcgattatcacacaaagtagcggctctcccatcaagagatcaaaaccatttaaatattcttaccaaaaggaaattgtcctgtatgcgcactacatgaagctggattatttttccactgagtgtacctatgccccagaagcgtttaggggcactgcgagagaatacatgaagaatctggaagcagtgaggcccagttgcattatagacatcatccaaagtggcgaaaatttggcattaaaggctaaaaaatctaacgctggaaagagagtcgtcaaatttgttgacggcaatagatgcgctagatgtggatatctgtcgtcaaataacatttgcaaggcgtgcatgttgctggaaggactggagaaaagtagagcccaagtggcaatcgagaatgacacttctgccgatggtgcagccttgaagctgagagctcttgagaaactcagcttttga

SEQ ID NO: 82045 - DNA, 708 bp, Saccharomyces pastorianus
atgtcatacggaagagaagacactacgattgagcccgacttcatagaaccagatgcacctttggctgcttccgggggtgttgctgacaacataggcggaactatgcagaattcaggcagcagaggtacgctcgacgagactgtgctgcaaacactaaagcgagatgtggtggagattaattccagactgaaacaagtggtatacccgcatttcccctcattttttagcccctctgatgacgggataggggcggctgataacgacatttcagccaattgcgacctgtgggcgccccttgcgtttatcatattgtattctctatttgtatcgcatgcgcggtcgctgttctcgagcctatttgtgtctagttggttcattttgctggtgatggcattgcatctgagactcaccaagccacaccagagggtgtcgctgatttcgtacatctccatttccgggtattgcttattcccacaagtgctgaatgccttagtctcgcagatactacttccattggcctaccatattggaaagcaaaatcgctggattgtgagggtcctgtcgctcatgaaactggtggtcatggcgctgtgcctgatgtggtctgtggccgctgtttcgtgggttaccaagagcaagaccattatcgagatataccctctggcactctgtctttttggcatggcctggttgtcaactattttataa

SEQ ID NO: 82046 - DNA, 1287 bp, Saccharomyces pastorianus
atgagcgatgttctatctcaatataaagggtgctcagtcagagatttacccacacccaatttcgttattaatgaagaaaaatttgataagaattgtacgacaatgttgaacaacgttgaaaagctcagccaggaatgtggcgtaccaatcaaatttcgtgcacacgtaaaaacgcataagacagcaaagggaactttgaaacaattgggccacggacttccattggctaaacgcactacaagagccatattagtatcaactttgaaagaagcagaagaacttcttaattatcaagatagacaatgttcggattatattgacgatataacatatagtttaccctgttgcgttccagagtttattcctcttttgagcaatttgtcaagaagggtgaataattttcaggtttttgttgataacattgaacacttggagaatttaaagaatttcggtaggcctgcttccggcaagaaatggtcggtttttatcaaagttgatatggggactaagagggcaggtcttgctttcgactctccagaatttttgagtcttttaaaaaaactgacttcctcagaaattaaagaagtaattgagccatatgggttttatgctcatgccggacacagctactcttcaacctcgatcaacgacactcagaatcttttgatggaggaagtgaaagcagtcaattctgccgctaaagttttgtgctctgtggatcctcagtttgatccttctaaattaacactttctgtgggcgctactccgacttccaattccttgaaactcgataataaaagtacccttgttaaattcgttactactcaattagttagtacgcttgaaatccactgtggtaattactgcatgtatgacctgcaacaggtggcaacaggctgtgtccaagatcacgaattgtctggttttgtattaggaacagtactatcatcttacccttctagaggtgaattgttgagtaatacaggagtgatgtgtctaacgcgagaagcatcctcaataaaagggtttggaatatgtgccgatttggaacatgtgttaaaatccgagagcttcagtagggaatggtatgtagcaagggtctctcaagaacacgggatactgaggccaataagaaactggaacgaaactactgcgttaaaattaggcagcaaaattgccgtccttcctcaacacgcttgtatcacaatgggacaatttccatattatttcgtggtaaacagccaaggcattgtcaacgatgtttggttaccttttcagaaatggtaa

SEQ ID NO: 82047 - DNA, 243 bp, Saccharomyces pastorianus
atgaattcaagtctgaatgccaattcttatttttttcgaaaacccccaatgttaacttatatggtccgttttctttactgttatccatctccctttcctatagctccagcggttaccgatcttccagaatgccggggagatctttctctttctttgtttataacaagtttcacaagcacgaaagaaagcaatactgtacgccaaaagccgcctaaagacacatattcccgtcaatttatgtga

SEQ ID NO: 82048 - DNA, 381 bp, Saccharomyces pastorianus
atgattaacgataaactagtacattttctgatccagaattatgatgacatcctaagagcaccgctttctggacagctcaaagatgtgtattcactgtacatcagtggcggatacgatgatgagatgcagaagttgagaaacgataaagacgaggtcttacagtttgaacagttttggaatgatcttcaggatattatatttgcaacgccgcagtccattcaatttgaccagaatctgttagtggcagataggccagaaaaaatcgtttacctggacgttttatccttgaaaattctctataacaagttccatgccttctactatacattaagatcgtccagtcttcatgtgaagaaaaagtgtcgagttaacaacaaaacg

SEQ ID NO: 82049 - DNA, 1410 bp, Saccharomyces pastorianus
atgattggtttaaatatgcagtatgcatcgcattctctcactgaaggtcatcactcacatagttctgctaacgtaaaatcactcaattttccacacaggatacagataggagtattagcaaattgtattttattggtaactcaagaaggatgttttcatagtaaattagtatttgcaacaaacaagggctatgtcgcaggattttcatccctggataattttcctgaagaaaatttctttacggggttttccatggctgaattaaatcctatgttgaaatataagtccgagccaactgatgtgttcaaaacaatgaaacttgagagaacagttgccatcaaggaagggccgagccattatttttatcacaacgttaataccagatctaacgtgcatacttttgccatctttatacaagacttttcttccttaaaactgctcaaaattcgtcaggtcaaactcaaagaaaattgccaagtccatgattctcttgttgttggagacacgttgattattaccgtaaattatcgttgtcatttttatgatttgattccagaaacctttccaaatccctatatcttttctccagccaaaagctcaagaaaacataaaagtaggagtgacattacttccctatcattttgtctacaagaagatgctttatcacctttaaaaaaaacgaacactggtgtgttttatttaggttatagaaatggtgattcaatggcaatagtcttcactaatattacaaacatgacattacagtactccaagaccaacggtatggcatcagaaagtcgaaatcaaccgatcagaaattccccaaaatctgttgtttccataaaagcattgaataataaaggcctaatgcttatatctggaatggcagacaaagaggatgtgcaacaattggttatagcagatacgttcctggaggacattctgaccgaaatcccggttgtatcttttaaaactaagttcttaaacgtgactaaggatacagaaatactcgagatatcggatgacgggcgctacttcatttatggttcaactagtgctagggacggaaagggtgattttgaagtattttgtaccactttatctggaaatcttgactacgaaaaatccgaaggtggaaatattaccctctatccaataggaggtatgaagaactactgtaggttagaaaacttccagtttgaatctatccacctacattcggctttcatacccccaaggtacgtaaaactgtttgatgctgtggaacctctaggtgaagagagcagtacttcaccttacgatatacctgaagaaggactttctcaaaaaatatgcatcttaattcggagagaagatgatcctacaatggggccaatatcattcaaggacatcagctatgacctagtttag

SEQ ID NO: 82050 - DNA, 204 bp, Saccharomyces pastorianus
atgacacctaacttaccagggttttattatgatagagaacgtcgacgttattttcgcatatctgaaaatcaaagcatttctaccacgggaacgacgaaccagtacagaaaagataatataaagcgacaatgtgttgaggaaaattacgataaaaaattttatatgattaaaaaaaaaacgtcagcaaacattacaaaagtataa

SEQ ID NO: 82051 - DNA, 693 bp, Saccharomyces pastorianus
atgggtattccaaaatttttcaggtacatctcagaaagatggcccatgattttacagcttattgagggaacacagattcctgagttcgataacttatacctggatatgaattcgattttacataattgtacgcatggtaacgacgatgatgtaaccaagcgattaactgaagaagaggtttttgcaaaaatctgtacgtatattgatcacctttttcaaacaatcaagcccaagaagattttctacatggctattgatggtgtggcccctcgtgccaagatgaatcaacaaagagctcgtagattcagaaccgctatggatgcagaaaaagccttgaagaaggctattgagaatggtgacgagattcctaagggtgagccatttgattcgaattctattactccaggtacggagtttatggccaaattgaccaaaaacttacaatattttattcacgacaagatttctaacgattccaaatggagggaagtgcaaatcatattttctggccatgaagttccaggtgaaggtgaacacaagatcatgaactttataaggcatttaaaatcccaaaaggatttcaaccagaatacgagacattgtatttacggtcttgacgcagatttgattatgctgggtttgtctactcatgggccacattttgcgttattgagagaagaagtgacattgtag

SEQ ID NO: 82052 - DNA, 936 bp, Saccharomyces pastorianus
atggcaaccaagattctcaaccctgtcgacaataagtgtacagtttatgttaaaggtgcatttgaaagaattcttgagtactccacaagttatttgaaatcaaagggtaaaaaaactgaaaagttgactgaagcccaaaaagctacgataaatgagtgcgcaaattctatggcatctgaaggtttgcgtgtccttggatttgctaaactaactttgtctgattcatcaactcctctaaccgaagacctaatcaaagatttaacctttactggtttaatcggtatgaatgacccaccaagaccgaacgttaaatttgcaatcgaacaattactacaaggtggtgtccatattattatgatcactggtgattctgagaataccgcagtaaacattgcaaaacaaattggtattccagttattgatccaaagctttccgttttatccggtgataaattagatgaaatgtcagatgatcaactggccaatgtcatcgaccacgttaatatttttgctcgtgctacgcctgagcataagttaaacattgttcgtgcattaagaaagaggggtgatgtggtagcaatgactggtgatggtgttaacgacgctcctgcgttgaaactttcagatattggtgtttctatgggtagaattggtacagatgtagccaaagaagcctcagatatggtcttaactgatgatgacttcagtactattttaactgctattgaagagggtaaaggtatctttaataatattcagaatttcctgacttttcaattgtctacttctgttgccgcactatcattagttgcactatccacagcgtttaaactacccaatccactgaacgcaatgcaaattctttggataaatattctaatggatgggccaccagctcaatccttaggtgtggaacctgtgatcatgaagttatga

SEQ ID NO: 82053 - DNA, 1449 bp, Saccharomyces pastorianus
atgagtgacaatccatttaatgcgagtcttcttgacgaggactcaaaccgtgagagagaaatactagatgccacagcagaggccctttcgaaaccaagcccttctttagagtattgtactttatccgtggacgaaactctagaaaaactggacactgacaaaaacggtggtttacgatcatctaacgaggccaacaataggagatcactttatggccccaatgaaataaccgtagaagatgatgaaagtcttttcaagaagttcttgtcaaatttcattgaggatcgaatgattctacttttaataggatccgcagtggtctctctttttatgggtaacattgatgatgctgttagtatcacactggccattttcatagttgtcactgtcggttttgtccaagaatataggtctgaaaaatctctagaagccttgaataaattggttcctgctgaatgtcacttaatgagatgtggtcaagagagtcatgtactggcttccaccttggttcctggtgatttagtgcacttcagaataggtgacagaatccccgcagaccttagaattattgaagcaatcgatttatccatcgatgaaagtaatttaactggtgaaaatgaaccggtacataaaacctcacaaacgatcgaaaaatcttcctttaacgatcagcctaattcaattgtaccgatttctgagagatcttgtatagcttatatgggtacattagtcaaggaaggtcatggtaagggtatcgtcgtaggaacaggtacaaacacatcctttggtgccgtttttgaaatgatgaataatattgaaaaaccgaagactccattgcagttaacaatggacaaattgggaaaggacttgtcactggttagcttcatagttattggtatgatttgtttagttggtatcatacaaggtagatcttggttagaaatgttccaaatatcggtatccttagcggttgctgctattccagaagggttaccaattattgtcactgttactttggcattgggtgttctgagaatggccaagcgtaaagccatcgtgagaaggttaccaagtgtcgaaactttaggctctgtcaacgttatctgctccgacaaaacaggtacactaacctcaaaccacatgaccgtatctaaactttggtgcttggacagtatgtccaataagctaaacgtcctctcattagacaaaaataagaagactaaaaattctaatggaaatatgaaaaactatttgactgaagacgttagggaaactctaactatcggtaatctctgtaataatgcatctttctctcaagaacatgccatatttctgggaaatcctactgatgtagctcttttagagcaattggcaaactttgaaatgcctgatatcagaaacaccgttcaaaaagttcaggaacttccatttaactcgaaagaaaattaa

SEQ ID NO: 82054 - DNA, 501 bp, Saccharomyces pastorianus
atgccgtccaataatagcagttttttagatattgacgatgatctcgagggtgtagatgattttggcaacgagcccaacccatttgatgatgccaccgtacctgatagcccaaacatgaataactcgactgctggaaagggtagcgaattttataacacaacgggcagtaaggcagaatccgcaccattacagggtcaaatggacccaccagcgtacgaccaagtgataggacagaatgacaacgacggccttgggcgtaacggattgaggccaggattgataaactactattctaaatacttccagatcgatttgacgcagttcaaaaagagattgtccgcggtactgacgtttagaaacgatcataattccgaaagtaacgaagataacactgatttatacggtgctgtatggatcactgccacggtggtaatgatcaattttaccatgagcagggggttaaattttattagacctgcaggcatgcaagcttggcactgc

SEQ ID NO: 82055 - DNA, 1065 bp, Saccharomyces pastorianus
atgaacaattccataattactgatgatgaggttagagagttttacttaaactgctcttctcaaacaattattgaatctcttctcagcttgcacgagtcattgagattatattctcaaaaccatgagatactgctcaataggatgttcaaaaaattggatgaaaccaatgcagactctaacatatcccatatattcatgcctgttgtgagcaaggatttttcaggaataaaaattctagtgaataacaacaacaaaaattttcaaggtgtgataaatgttattgagcctgaaacaggaaaattaatcggatgttttgaggctaaacaaattaccgctataagaactgcccttgcatcgtgtatcggtttatataagcaactctcatgttcccatgataagttctttagatttgaaaatggcacttgctatttaacatgttttggtaccggtctccaagcattttggcacatatacatagctattaaactaatcatgtcagggattgttggcgaatctttgaagttagttgaaataaacatactatatcacaataacatgatgagtttggatcgtttgaaatcattgaaaaacttatttggaagtaatataaagatagagcttaatcagtatcaaataaacgacatcagttcagaaggtaatggcgctgtttctaacagtgatattatctttggttgtctacctactctagagcccaacttgtttttgaggcagttgctaaacagtaaagcttctgtggagcagaaacatacttatatctcattaattggaagttacaaaccagtgatgcacgaatgcgataaggagttgattgataagttcaaatctgataatgaaagcgcttgcattttggtagattcaagggaacatactttattggaatctggagaattaatcgattccaatatcgctccacataatctcatcgaaattggtgaattagatactttgaaagacacagttttgaatttgaacgaaaagggctgcaaaagaactatcaccttgtgtacactgtggtctagcggttatggacgtggcgcttgctaa

SEQ ID NO: 82056 - DNA, 444 bp, Saccharomyces pastorianus
atgaccactgataccactgttttcgtttctggcgcaaccggtttcattgctctacacattgtgaacgatctgttgaaagctggctatacagtcatcggctcaggtagatctcaagaaaaaaatgatggcttgctcaaaaaatttaataacaatcccaaactatcgatggaaattgtggaagatattgctgctccaaacgcctttgatgaagttttcaaaaaacatggtaaggaaattaagattgtgctacacactgcctccccattccattttgaaactaccaattttgaaaaggatttactaacccctgcagtgaacggtacacaatctatcttggaagcgattaaaaaatatgctgcagacactgttgaaaaagttattgttacttcgtctactgctgctctggtgacacctacagacctgaacgaagacgattcggtgatc

SEQ ID NO: 82057 - DNA, 801 bp, Saccharomyces pastorianus
atgtggctttcaaagttccagttcccctcgaggtccatctttaagggtgtttttttgggtcacaagttgccgttactagtgcgactgacatcaacaacgactaactctaagagcaacggcagcatcccaacacaatacacagaactctctccgttacttgttaagcaagcggaaaagtatgaagctgaactaaaagatcttgacaaagacctttcttgcggcattcattttgacgtgaataagcagaaacattatgctaaattatcagcgctcactgatacatttattgagtataaggaaaaactaaatgaattgaaaagtttacaagaaatgattgtatctgatccatcattaagggcggaggctgaacaagaatatgcagaactggtcccccaatatgaaacgacctcctcaagattggtaaataaacttcttccaccgcatccgttcgcagataaacctagcttactagagcttcgaccgggtgtaggtggtattgaagccatgatttttacccagaatctattggatatgtatattggctatgccaactatagaaaatggaaatatcgaattatatcgaaaaatgaaaacgaaagtgggtcaggcattatcgatgccattctgagcattgaagaagccggatcttacgatcgtttgaggtttgaagcaggcgttcacagggtgcagagaattcctagtacggagactaaaggaagaacgcacacatctactgctgccgtggttgtgttacctcaaattggtgacgaatctgctaaatctattgacgcttatgaagaa

SEQ ID NO: 82058 - DNA, 441 bp, Saccharomyces pastorianus
atgtcgcttaaatcaaagttgactaagattcagaagttatggctgtattatttcccctgtgacagaatcctcgcgaagagaatatgtaaatcgactgttaatactacggtagctttcatattttgcttgatacctaagataactgcgcatttgggagcagctcctgcgatgctgccaatgatttctgttattgttcatcctggaagaagggtcgggggtactatccatggtgctatctattgcataactggattgatatttggcctagcttacgcaatcttcggccggttccttgcgcagcgatgtttagggagttcttggcatgagctaacagaggcacagcagcacgtattgcactataaaagatatgaagcgggattagcaattttggctgttttcgaagtaatatgcttttttttcatgttggggggatcctctaga

SEQ ID NO: 82059 - DNA, 198 bp, Saccharomyces pastorianus
atggccgcgcaaaatccattggcagatattcaggtatataaacgttacaaagccaagaggagaatggaaggccaacaaaaaattcttgtacaattgcatatattgattcattacaatattactgccgtcgtcctctcagtcataaatcatgttttccctttccctctcagcatgctttttctcggcctcttccattaa

SEQ ID NO: 82060 - DNA, 351 bp, Saccharomyces pastorianus
atgtccgatctcgttaccaagttcgaatcgcttattatttcaaagtatccagtttctctcaccaaagaacaatctgctcaagctgcccaatgggaatcggttctaaaatctggtcaaatccaaccacacttagatcaattgaatttggtgttaagagacaacaccttcattgtgtccattttgtacccaacatctaccgacgttcacgtcttcgaagtcgccttaccattgattaaggatttagtggcaagctccaaggatgtcaagtcaatttataccacatacagacatattttgaaatggatcgattacatgcaaaacttgttggaaagtgtcagcaatgacaattta

SEQ ID NO: 82061 - DNA, 732 bp, Saccharomyces pastorianus
atgggtactagcatagtaaatctaaaccaaaaaattgaactgcccccaatccaggtcttattcgagtcacttaaccgagaaaatgaaacaaaaccccacttcgaggaacgcaggttatatcaacctaatccttcatttgttcctagaacaaatatagcagttggtagcccagttaacccggttccagtatcatcccctgtttttttcattggtccttctccacagagaggcattcagaatcacaacgctattatgactcaaaacatacgtcagtatccagttatatataataataaccgagaagttatatctacgggtgagagaaattacataataactgtaggggggcctccggtaacttcttcgcagcccgagtatgagcatatctcaactcccaatttctatcaagagcagagactggcacaacctcatccggtaaatgagagtatgatggtaggtggttatacaaatcctcagcctattagcatttcccgaggtaaaatgctatccggcaacataagtacgaactcggtccgcggatctagtaatggatattccgcaaaagaaaaaaaacataaggcacatggtaagaggtccaatttaccaaaggccaccgtttcaattctaaacaaatggttacatgagcacgtaaacaacccttacccaaccgtgcaggaaaaaagagaactgctcgcgaaaactggtctaactaaacttcaaatttccaattga

SEQ ID NO: 82062 - DNA, 183 bp, Saccharomyces pastorianus
atgcatgaggttacccgcacttattatttttttctctttttttttcttagctataaaaggcagatcaatgcagcatccattgctttattcgactttccttcactatttatttactttccatttcttattttagtgttattttataacagtaacgcaaatttaacagccattcgtaacacgtaa

SEQ ID NO: 82063 - DNA, 510 bp, Saccharomyces pastorianus
atggtgaccggaatatcggaggaaaatgatgatgaagagactttttcggctgttcattcttcaacacccagtattaattctcaatcctacgcgattcctataacagaggaaatgtccagctctttccatgattcgatcagcaccactagcaactcaagtggtagcttcgatagtgatggaagtaacgtttcagatgttgtggagcaaaatgaaatggacaatgaatctaacgttgacgaagatttgttcctagataacgatatccctcagtcaagcaatttgctacccacggatgcccaggatcctggtccaatatttgacgtttctagatatatttttgattctctaaaacaatctattgattctgctgatttctcagaggcactttctctacagaccaaaacctccgctgttataaattcgaaaagcctagagcttaaacaatatattgatgaaatgaagagcaggctcactcaactgcaagagaagtttgaaaatgggggatcctct

SEQ ID NO: 82064 - DNA, 141 bp, Saccharomyces pastorianus
atgctaacaaaaatattttattatttgtattattacagaaaaatcttgaccccagaatctcagttgaagaagtctaaggctcaacaaaagactgctgaacaagtcgctgctgaaagagctgctcgtaaggctgtatgttaa

SEQ ID NO: 82065 - DNA, 294 bp, Saccharomyces pastorianus
atgaataatgctgcaaatacagggacgaccaatgagtcaaacgtgagcgatgctccccgtattgagcctttaccaagcttgaatgatgatgacattgaaaaaatcttacaaccgaacgatatctttacgaccgatcgtaccgatgcaagtactacatcttccacagccattgaagatattattaacccctcgttggatccgcagtcagcagcatcgccggttccttcttcctcttttttacatgactcaaggaaagcttccactagtacacatcgtagtaaggagaggtactcc

SEQ ID NO: 82066 - DNA, 672 bp, Saccharomyces pastorianus
atgctcttaggttactgtggcagcggatactatggaatgcaatacaacccaccacacaagacgattgaaggtgagattctcaccaagctcttcgacgtaggagccatttccgaagaaaattcattggcaccgaagaaaaattcctttatggcagcggcaagaacagacaagggtgtacacgctatgttgaatctactgtcgctaaagatcacattgcgagaggacacagtagcgaagttgaacgccgcactaccgcccgaaatacgcgtgtggggtatccagcctgtcaataaaaagtttaatgctagatccgcgtgcgattcccgatggtaccaataccttatcccagaatttacactcattggtccaccccggagttctcttttgcatcgaaacgtggggggatgctaccgcgaagacggctcgcaagaggtgtgggatacgttcctggaacagacgcgtgggagatttagcggggatgagctgtgccgtttgcaggacactgcacagaaactaagcgagagcgatcctttggtacaagaatacgtggggctattgagcggtacccttagcggctactgcttgccgccctcgaagctggacgcgtttgaggcagccatgcaggagtacgtgggaagacctgcaggcatgcaagcttgcactgccgtcgtt

SEQ ID NO: 82067 - DNA, 561 bp, Saccharomyces pastorianus
atgagtgagcaaagccaattagatgattcgactatagacaaactgattccacagattttcaatgagatgagatctaacctcaataacacgaccaataaatttccaaaaagcacaggaggtggagcaagcgataatatttcggctaacagcaattctataagatcgtttaattcaatcacaacgcaatccttactcaaagaatcagaatcgttagataaaataacagcaatgataaaaaatgttacggccgcattaaaaaataacttgccagtatacgttaatcaagtacatgaggtatgtaaatctacgaattccattttagattcatggatcaacattcattctcaagctggttatattcataaattgatgagcgatcaaacctatttaaagctaattaatgatagactgcacaatgaaaatgtaaacacaaatgatgaagatgggagtactttacacaacgtgatagcgttgaaaaagaaggagatcttggatttgagacaaaaattagaaaataggaagggtgaaaggatgctgcaccagcaagccgggatcctctag

SEQ ID NO: 82068 - DNA, 726 bp, Saccharomyces pastorianus
atgcaagccccttcggaaaataccgacgtcaaattggatacatccaacgaacctagtgcacatttgatcgaggaaaatgtggctcttcctgatgaaatatttcattcgtacttgagttatatactttatgaaatggttcattatataccgatagtgattatcttcctgcttaacgtgtgtttagttctattatttctattttttcatgatggccccggtaccattttgttttatgtattttcattgttctgttcccttcccatgttggttgcatctgtaggcgagttcattatgaaaccgatccgaaatcaagattttaagattaatcttcttgtcgaagtcatcaaacgtaaacctgctgtaaaagggaaggaatggaggactatcacatacaacatgaaccaatatctatttgatcatagactatggaacactccctactgcttttatgatgacgaagattgccaccattattttctacgccttattgagggaaaaactttcaagaagcaaggggattcaccaaccagcaatgttacagacgcacaatcaaatgaggcaaccactagcccaccaattggagccactgaatcttttacttttcactccggcccaaattaccaaaagtacctttccaaggcagctgagatcgaacaacaatctcaagataattactggcaagggcgacatcccgatatcgatgcgcttcttaaaaagacggaatag

SEQ ID NO: 82069 - DNA, 162 bp, Saccharomyces pastorianus
atggatagtaaggaagtactggtacatgttaagaatctagaaaagaacaaaagtaatgatgctgcagttctagaaatcttacatgtcttggataaagaattcgtccccactgaaaagttactgagagaaacaaaagttggtgtggaagtacaacaagtttaa

SEQ ID NO: 82070 - DNA, 354 bp, Saccharomyces pastorianus
atggccaaagacgctcttgactctgtaactaaagaacctgaaaatgaagatctcctaacaatcattgaaaacgaagaaaacgagttgaaaaagattgaatcaaaattacaaagtctacaggatgattgggatccagcaaatgatgagattgtcaagcggataatgtctgaagatacgctgctacaaaaagaaatcacgaagagatcaaagatttgcaaaaacctaattgctacaataaaggactcagtgtgcccgaaaaatatgaatgaatttttggtatgtattttgaacattttcgaaaccttttcttttgaatatactaacgaaatctttacaggaagaaattggatttga

SEQ ID NO: 82071 - DNA, 162 bp, Saccharomyces pastorianus
atggcgccgagcgaaattttaaagagaacaacagaaacagtcaccaagacttcttcaattaggcagcgcaaaacggacacaacagcagtaaagacaaccggaatggactcgattataccggcaggcgttcagctagatgatttacaagtgatatcggctaag

SEQ ID NO: 82072 - DNA, 465 bp, Saccharomyces pastorianus
  modified_base (306)..(337): a, c, g, t, unknown, or other
atgtttgccattatctgtatgaattcattgaactgcaatcgcaacggcagaatttcatcgcgtgcttcgttgatctgcttacacactttgtccctggtttcattctcgttcttagccaatatcacttgtaaatcatctagcttgacgcctgccggtataatcgagtccattccggttgtctttactgctgttgtgtccgttttgcgctgcctaattgaagaagtcttggtgactgtttctgttgttctctttaaaatttcgctcggcgccataccgaaaatcctcaggaaagtgttagtgttatannnnnnnnnnnnnnnnnnnnnnnnnnnnnnnntttattgtatacataatggtcatacatcaatagtgtacatcctctcttcgcttgtctcgcaaaaaatgttcatcagaaatactccaattccgacctgcaggcatgcaagcttgcactgccgtcgttta

SEQ ID NO: 82073 - DNA, 708 bp, Saccharomyces pastorianus
atgggatccgaccggtcgtgtgttttgtctgtgtttcagaccatcctcaagctcgtcatcttcgtggcgatttttggggctgccatatcatcacgtttgtttgcagtcatcaaatttgagtctattatccatgaattcgacccctggttcaattatagggctaccaaatatctcgtcaacaattcgttttacaagtttttgaactggtttgacgaccgtacctggtaccccctcggaagggttactggagggactttatatcctggtttgatgacgactagtgcgttcatctggcacgccctgcgcaactggttgggcttgcccattgacatcagaaacgtttgtgtgctatttgcgccactattttctggggtcaccgcctgggcgacttacgaatttacgaaagagattaaagatgccagcgctgggcttttggctgctggttttatagccattgtccccggttatatatctagatcagtggcggggtcctacgataatgaggccattgccattacactattaatggtcactttcatgttttggattaaggcccaaaagactggctctatcatgcacgcaacgtgtgcagctttattctacttctacatggtgtcggcttggggtggatacgtgttcatcaccaacttgatcccactccatgtctttttgctgattttgatgggcagatattcgtcaaactgtatt

SEQ ID NO: 82074 - DNA, 1257 bp, Saccharomyces pastorianus
atgactgatacatcatcctcttcatcatcctcttcagcatcttctgtttcagctcatcagccaactcaagaaaagcctgctaagacttacgatgacgctgcatctgaatcttctgacgatgacgatatcgatgctttaatcgaagaactacaatctaatcacggtgtcgacgacgaagacagtgataacgatggtccagttgccgccggtgaagctagaccagttccagaagaatatttacaaaccgacccatcttacggtttaacttccgatgaagttttgaaaagaagaaagaagtacggtttgaatcaaatggctgacgaaaaagaatctttagtcgttaagttccttatgtttttcgtcggtccaattcaattcgttatggaagccgctgctattttggctgccggtttgtccgattgggtcgatttcggtgttatctgtggtttgttactgttaaacgctggtgttggtttcgttcaagaattccaagctggttctattgtcgatgaattgaaaaagactttggctaacactgctgttgttatcagagacggtcaattggttgaaattccagccaacgaagtcgtcccaggtgatattttgcaattggaagatggtactgttatcccaactgatggtcgtattgtcactgaagactgtttcttgcaaatcgatcaatctgctattactggtgaatctttggctgtcgacaaacattacggtgaccaaactttctcttcttccactgttaagagaggtgaaggtttcatggttgttaccgctaccggtgacaacactttcgttggtagagctgctgctttggttaacaaagccgctggtggtcaaggtcatttcactgaagttttgaacggtattggtattatcttattggttttggtcattgccactttgttgttggtctggactgcttgtttctacagaaccaacggtattgttagaatcttgagatacactctaggtattactattattggtgtcccagtcggtttgccagctgtcgttaccaccactatggccgtcggtgctgcttacttggctaagaaacaagccattgttcaaaagttgtctgctattgaatccttggctggtgtcgaaatcttgtgttccgacaaaaccggtactttgaccaagaacaagttgtccttgcacgaaccatacactgttgaaggtgtttctccagacgacttgatgttgactgcgtgtttggctgcttccagaaagaagaaggtttga

SEQ ID NO: 82075 - DNA, 447 bp, Saccharomyces pastorianus
atgtccattcccgtcaaaagattgctaaagccctcgagaccgggaagtgccgcattgggaaacacagttgcgatgcgcgcgagtttgagaaattctcgcataggtttttccggccgggtgcggctggttctgggtcgtagtgtgggctgtgggtgtgcccatgcggcaattattgccagatctccgtatcgagaactgagttgttggccaattaccggaagcggccgactagacccgtcgtggggtgtgggtgctctgccgatgtactgtttacatttgcccgcttcgggcaaatgtattttcgttttttccccgttggccggcggtgacgtaaacgacttttgcacagcgctggtgccggaaaaactctcggccgtttcccgagccgtcgggtttacgcaagaaaaacgaaaatgtcgtaccatacccgagaagtatccgaactga

SEQ ID NO: 82076 - DNA, 2268 bp, Saccharomyces pastorianus
atgtctagacaagacgaaaattctgctttactagcgaataatgaaaataacaaaccatcgtatacgggaaatgagaacggagcctacgataatttcaaattatcaaaaagtcaactttcggatcttcataaccctaaatcaataagatcatttgtcagattatttggatatgagtctaacagcctcttcaaatacttgaaaacagataaaaatgcaggcatttctcttccagaaatatcaaattatcgaaagacaaaccggtataaaaattatggcgataattcacttcctgaaagaataccaaagtcttttttacaattagtatgggctgcttttaatgacaaaacaatgcaattactgacagtcgccgctgttgtttcctttgttttaggtctatacgaactatggatgcaacctccacagtatgatcctgaaggaaataaaattaagcaagttgactggattgaaggcgttgctatcatgattgcggtctttgtggtagttctagtgagtgccgctaacgattaccagaaggagttgcaatttgcaaagctaaataaaaagaaggaaaaccgtaaaattatagtcataagaaatgatcaggaaatattaatttccattcaccacgttttagtcggtgatgtcatttcattacaaaccggtgatgttgtccctgctgattgtgttatgatatcagggaagtgtgaggcagatgaatcatccatcactggtgaatctaacacaatacagaaatttccggtggataactcattaagagatttcaaaaaatttaattctatcgatagtcataaccatagcaaaccattagatataggtgacgttaacgaagacggtaacaagattgctgattgtatgttgatttcaggttccagaattctttctggcttgggcaggggtgtcatcacgtccgtgggtataaactcagtttacggtcaaaccatgacttcattaaatgccgaacctgaaagtactccattacagttacatttgagccaattggctgataatatatccgtttacggttgcgtgtctgctataattcttttcttggtccttttcactaggtacttattttacataatacctgaggatggcaggttccatgatctagatcctgctcaaaagggttctaaatttatgaacatttttatcacatctatcacggttattgtagtggctgttccggaaggtttaccattagctgtaactttggccttagcgtttgcaacaacaagaatgacaaaagacggtaatttagtacgggttttaagaagctgtgaaacgatgggatctgctactgcagtgtgctctgataagactggcactttgacagaaaatgtcatgactgtcgttcgtggcttcctgggcaattctaaatttgatgataataaatcgttgcccgttagcgaacaaaggaagctgaattctaagaaagtttttgaagaaaattgttcgtcatccttgagaaatgatttattagccaatattgtcctgaattctaccgccttcgaaaacagagattataagaaaaacgataaaaatacaaatggtagtaaaaatatgtcaaaaaatttgagttttttagataagtgtaaatctagattatcgttttttaaaaaaggcaacagggaagatgacgaggatcaattattcaaaaatgtcaacaagggtaggcaagaaccctttattggctctaaaacggaaacagccttactcagtttggcaagattatcattaggattacaaccgggagaattgcaatatttgagagatcaaccgatggaaaagtttaatatcgaaaaagttgttcaaacaattccgtttgaaagttctcgtaaatgggccggcttagtggtaaagtacaaagaaggcaaaaataaaaaaccattttacaggtttttcattaaaggtgcagcagaaattgtttccaagaattgttcgtacaagaggaattcagatgatactttggaagaaatcaatgaggacaataaagaaaaaactgatgatgaaatcaaaaatcttgcgtccgatgctctcagagccataagtgttgcccacaaagatttctgcgaatgtgatagctggccccctgaacagctgcgtgataaagactcaccaaatatagctgctcttgacttgctatttaacagtcacaagggcttaattctagatggtttacttgggatccagaccctttacgtgcaggcgttagggagtcagtacaacagtgccaacgtgctggtgtaa

SEQ ID NO: 82077 - DNA, 1023 bp, Saccharomyces pastorianus
atgagcagtggttcagcaggggcaccagcactttctaataattccacgaactctgtcgcgaaggagaaatcaggtaacatttccggtgatgagtatctttcgcaagaggaggaagtttttgacggtaatgatattgagaataatgaaaccaaagtttatgaagaatccttagatttggacttggaacgtagtaatagacaggtctggttagttagattgcccatgtttctagcagagaaatggagggacagaaacaacttgcatggccaagaactgggtaaaattaggataaacaaggatgggagtaaaatcacacttctattgaatgaaaatgataacgattctataccgcacgaatatgatttagaacttacaaagaaagtagtagaaaatgaatatgttttcacagaacaaaatttaaagaaatatcaacaacgtaaaaaggagttggaagcagatcctgaaaagcaaaggcaagcttacctgaagaagcaagaacgtgaagaggaacttaagaagaagcagcagcagcaaaaacgtagaaataatagaaaaaagtttaatcacagagttatgacagatagggatggtagagatagatatataccatatgtgaagacgattcccaaaaaaaccgccattgtgggtacagtttgccacgaatgtcaggttatgccatcaatgaatgatcctaattatcacaagattgttgaacagagaagaaatattgtcaagcttaataataaggaaaggatcacaactttggatgaaaccgttggtgttacgatgagccatagcgaaaacagtgattatatgatggatacgcaggtagaagatgactatgatgaggatggccatgtacagggtgagtactcttattatcctgatgaagatgaagatgaacatatgctttctagcgtcggaagttttgaggcagatgatggtgaagatgacgataacgattaccatcatgaagatgattctggacttttatatggatatcatagactcgggatcctctag

SEQ ID NO: 82078 - DNA, 756 bp, Saccharomyces pastorianus
atggacctagatctagccagtatcttaaaaggtgaaatttctaagaagaagaaagagctggccaactctaaaggtgttcagccaccatgcactgagaaattccagccacatgaatccgcaaacatagacgaaacaccgcgacaggtagaacaagaaagtacagatgaagaaaacctgtcagacaatcagagtgacgatattaggaccaccattagcaaattagaaaatcggccagaaaggatacaagaagcgatagctcaagacaaaaccatctctgtaatcattgatccatcacaaattggttctactgaaggaaaacctcttttgtcaatgaaatgtaatttatatattcacgaaatattatctcgttggaaggcgtctttggaagcttatcatccggagctgttcttagacactaaaaaagcactctttccactcctactgcaactacgaaggaaccagcttgccccggatttatttatttcccttgcgaccgttctctatcatttacaacaacctaaagaaataaatttagccgttcagtcctatatgaaactcagtatcggcaatgtggcctggcctattggtgttactagcgtaggcattcatgctcgtagtgcacattcgaaaattcaaggaggccggaatgctgctaacataatgattgatgaaagaacgcgattatggattaccagtattaaaagattaataacttttgaagaatggtataccagcaaccacgatagcttagcctaa

SEQ ID NO: 82079 - DNA, 480 bp, Saccharomyces pastorianus
atgacggtaaacttagatccggataaagtttggatagacggctgctttgatttcacacatcatgggcatgcgggagccattttgcaggctcgtcgaacagtttcaaaagaaaatggtaaactattctgtggtgtgcataccgatgaagatattcagcataacaaaggatcaccagtaatgaactcttcagaaagatatgagcatactagatcaaataggtggtgttcggaagtggttgaagcggcgccatatgttacagatcccaattggatggataaatatcagtgccaatatgttgttcatggtgatgatatcaccttagatgctaatggagaggactgctataagttggtgaaagagatggggcgcttcaaggtagttaaaagaacatatggcgtaagtactaccgagattatcctggaatatggcgaacaaatctttgccaccgatcatcttgattatatcccagaaccaggaatc

SEQ ID NO: 82080 - DNA, 357 bp, Saccharomyces pastorianus
atgttgctatatttatatattttatatattgctctcaaaactgtatctcatctttttttctgcaatccttgctttcgtaatctaagtgtgggtgacatgctaaatccgcggctttccttaagctttttcacaaaccatctattatgtccagaagctccgctgattatccgtggaaaagggtcttattctgccgtaggaacttcttctcgagaaaaaagtgagttcacccgcggcgctctcgtaaaacccgagggccgattctttccctccgtggaacaatcggccccgcggcgtcagagggtattatctccgcaagtgatagaactcacatttattctacgttctgcatggttttga

SEQ ID NO: 82081 - DNA, 234 bp, Saccharomyces pastorianus
atgaagctgcatttttgttctcaggcagcatcatcgttcccttcacctaacccttctaacttccttttacctgttgcaagctgtctcatacccgcgctgaaaaggctgagaactgggtattgtcccaatattacgctcggcttttcttttcaaaaactttgtattccagatacttccatgtgcaatttccctagtgctcctgtaccaagccatcggagaggagatgccttctag

SEQ ID NO: 82082 - DNA, 324 bp, Saccharomyces pastorianus
atgaaatcgttttcagtagcatcatgtttgccactctctcctaatttcctaaagagagattcaaactgtaataagattctcctgcccccattagatataaaagccattgaacctatctcaacgagtaattacacctacgtgaactcggcccctaagcaacaagagaaggaacaaccattgttaagggcaacaggaaacaatatcaatttagtccaaacaatagtggtcccaccccaggtaaacatggaatcacaagaattctcagcttcttcaactgacaataaacaaagtaaaaacattgaaatttttagccaaataaaataa

SEQ ID NO: 82083 - DNA, 1920 bp, Saccharomyces pastorianus
atggctgcgggtcaaaaaaaatatatatgttccttttgtttgaagcctttctcgagatccgagcacaagataaggcatgaaaggtctcatgcgggcgtgaagcctttccagtgccaagtctgtaaacactcttttgttagacgcgatctcttacagcgacacatcaggactgtccacagaaccttcctcttatccagttacgcgtcaatgacaggcgataaggctgatatccctgtatcacttggcgttggtgacgttgattcgacttcacccagagatatcaaaatggaaacactcgttaattcgatgattaaggtcaacagcggccttatcaatattcactaccatagtagtaatgttgaaaaaatggataagcagcaacgttgtgtgattgggaaggagtcctctagtttaaagaaagggaaaagccgctttaagcaggttaaaagccggttggagtcctccatcagtgtaaaaattttgcaagaatattcattagattttattagctcaagagatattctaactttcttcagaatgggtgtaagccacttggtagaaaataagatcttccaaaatttctttccagacctgttctcatcactacaaaatgacgagctggtggaaagtttttggattaacaagccttttggtctcataatagcttgtctgggtatgtccatttcgttaaatcaagattctcaaaaactatggtttatctgttgtacgaatttgtatgctagctcatctaaacatgacaatgactttgacactgaggacattttgtcacagacagagcaacatgatgtttttgccttgattctattttattctcttctagtaatgttggagaataacattcctgtttctaattccattaaaaagttcgatgtgttttcaatgcttcaagatattctgaagccattcaccgtggcatcctccagttaccattatttgaatagtaaggaaaatgcatggttcatattcgatctatgggtcaatatcttgcgcgattcaaacaacttcaacaacgattctttactaatatttggttggttcgtcaatcaagagtttatttcgtctaatccacttaaggacttcatatacaagggaccgtcaatgtccactactgacttaactttaaagcatatcaatattttggcagattccgcgtacgtgtattttataataaagaagacttatccgcaagagctgccatctgattttagagtgcatgatttgctggtttacttgaatgaatgtttcgtaatgcagcagccgatcaaacctgaaactagtgcaaacccctctttatttgcgaacgttatgaacgccaggattacggactgcaaatcgaaaagtaactggttattgtgggaaactatttggttcgaattcatcaacaacttgactttgagaaatgggaccacaaggaacatatggttcattgataactttccacaggtatcgacctcgtgcttacttcatcattcttcctcatttgttgatgaaaccttgatcaccacgaacttatcaatcatatcaatgcttcttaatttgaagtctttcacgctggcatctttaaacccaaggaatattcagttaattaccgacattgtcagcttccaactaaaattgttttcatcggagttaattgcaagctcggatgtttcaccatcacaagtatctcaattactagtaaaccccaatgttcacctaatgttatatttctggttcgataccatttatgtacaacgtcagagctacctttcatcaacagagaaagaggaatttgagaaggttgaagtgtttgtgaatgactacattataacacaccaaaagaacttggtgacagacttacactccattttgttcgatttttgtagattccttcattgcttaccatatactactggggat

SEQ ID NO: 82084 - DNA, 171 bp, Saccharomyces pastorianus
atggtcttgcttcaccctattctcgccgagagctgtacaagatattttttacttttgccatcttatactcatcctaatcatctgtttcattttccttctatttcttttttttttttttttttttttttttttttttcagttttcgaagaaactgcctttttagaattgtaa

SEQ ID NO: 82085 - DNA, 1581 bp, Saccharomyces pastorianus
  modified_base (1165)..(1165): a, c, g, t, unknown, or other
atggtactagagaatagaaacagtcataattttactttccatagcgggagtgtgagggagataaagtaccatacttgcatagtatctgaattacttcattgttttttacagccgttgtttaatgttcctactgaatcaatgctgtcttccttttctgtggccaaagaaaatcattcaggaggctctttgttagactcattaatagatttttcccatattgatttatcatctactattctcggcaaaatatgctgtttgatagaagaagttaacttaaacgactccctaaaatcggatttcctattatactgccaaaattatacacaacctaactgcaatgaacttacttcaatcctttcctgtaactgcgatagattttcagctttgaagagtatcttagaaaaatttgcaaacttagttcctttcttcaagtctatcaactctcatttagaaaatgaatcacttagtgaatccgattttcgtctaataaacacggtagaagagacgttaagaactttcgagcaatcaattgagtactttgcttcttccgctccattgaaatttacccataccttggtttttatcattaagtttgagttatatttgacagagattatacgaagcttcaaattcaccaaatctaaaaagccctttgaaaaaatcctagcaaggcttctaaaagttaaagacctttatttacttgatgatgtaaacttgattggtgctttcctgtatccatcaatcttccaaagtaaaagccttctaaatgaaatctttggcacaacatcggtaaataaaatagttcataacatgaccaaaattgttctaaggtatcttaaaaactttatcaatataactaattttcgttcctctaatagtggtggggagagcggtcggaattccggtaataatcttctttctgactacgaggccatttttatgaaagaatcacgggacgtagagcttttatgtaacaccaagttaaccgcaccactaacagaagattcattacttgtccaaatcattcgggatgatctattacgctatgtcaacagaattgcgcatgagctgcctaatgcataccatgactacttaaatgataatgatattagcttcgatggatctcactttacaaaacatgagttatctgaggaaaacgactctnactcgggggaatggtgcctaaatcccatggaagagacatttgatattcatattcctatctcggattcaatttggaataattacataagcagtaaaaacaagattgaagtaatcgatattttacttcagttgctttcagtaaattcgacatcttcaatacggtcagaattatcttctctaacagctaatcaagacttcagtaccaagttgagtgaggaaacaattaaaatcaaacttttgaattcacagtttaatctcgaaaaaattaattttcactctggatcaattttcgatgcttgcctagtgacattatattccaaaggaaaggacaatatactttcaagactttattttctaggacaaaattcttgtccattgtattatattttcttaatggcacccatatatttcaggtaa

SEQ ID NO: 82086 - DNA, 897 bp, Saccharomyces pastorianus
atgaacactgcattggatgatttacatggggatttggtgactttagaagataacgaaatcatcaataattctgatcattcatcttctcactctactagtcatgaggaggaagacgaggaagaagacgatactgaggatatagaacttatagaaaaagacggcaataaacccctatcaagtagaattcatccggaagacgaaatcataaatgatgggttaaatatatggattccggttcaaatgctcaagaagaatatagcgaagttctggtcccattttctagcaattgaaaagaaattaacgaaagttaaatgtaaacattgtggagagatactaacaagaagcgatgcaagtttgacaaaaacctttagatttcacttgaaaacaaagcataatataagtaccaataaaaacttctattccatgaatttcacagtgggagactccaatctcaaaaacaatacttccagcacagaaattacacgtagacacggctatgattcgttaaccttcaattccgaccaaagtttcaaatgctttgacataggaaaattacagagcagtaattacctttctatttcccaattagtagccatagtcatagcctcagaaaatttaccgctgaacttctttgagaatgtgtcctttaaatctcttttatcaaaatttcataagatccctcctttaactaccaatataatagaggagtcaattatagggttgtcaaaatcaattgatgagttgatcagaaggtctatatcaaggaatgatacacaattaccctttactatccatttacccgatagtaaggaatcaaatcaacctctttacttgaaatattctagggaaattcgggcacaattgtctaacttggacttatcccatcttatttctgta

SEQ ID NO: 82087 - DNA, 402 bp, Saccharomyces pastorianus
atgaagttggttaactttttaaaaaagctgcgcaatgagcaggttaccatagaactaaaaaacggtaccaccgtttggggcacactgcagtcagtatcaccacaaatgaatgctatcttaactgacgtgaagttgaccctaccacaacctcgactaaataaattgaacagtaatggtattgcgatggctagtctgtacttgactggaggacagcaacctactgcaagtgacaacatagcaagtttgcaatacataaacattagaggcaataccataagacagataatcttacctgattccttgaacctggattcacttttggttgaccaaaagcaacttaattccctaagaagatcgggtcaaattgcaaatgaccccagcaaaaagagaagcgcgattttg

SEQ ID NO: 82088 - DNA, 309 bp, Saccharomyces pastorianus
atggacacactgttcaactccacggaaaagaatgccagaggcataccgcaggctccattcatcgaaaatgtcaacgaaataattaaggacccaagcgacttcgaattgtgcttcaataagttccaagaacggctttctaagtacaaatttatgcaggaatctaaattggctacgataaagcagctgaagactagaatcccggacttggaaaacacattaaaaatatgccaaagtctgcgcaatcacagcgacgagggcgatgcgagcgatgaacctatcctgttgcactaccaatatgaacgaaacgct

SEQ ID NO: 82089 - DNA, 558 bp, Saccharomyces pastorianus
atgagcgtccaagcagaaatagggatattagatcatgtagatggttcatctgaattcgtatcacaagacaccaaggttatttgttctgtaacaggccctattgaaccaaaagcaagacaagaactgcctacacaattagcattagaaattattgtacgtcccgcgaaaggggtggccacaacaagagagaaggtactcgaagataaattacgggcagttctgaccccactcatcactcgtcattgttacccaagacagctctgccagataacttgtcaaattctggaatctggtgaagatgaagccgaattctccctgagagagctaagttgttgtataaatgcggcatgtttggctttagttgatgcaggaattgccttaaatagtatgtgcgcaagcatccctattgcaataatcaaagacactagtgatatcattgtcgatcccactgccgagcaattgaagatttcgctctctgtccacactttagctctggagttcgtcaatggcggtaaagtcgtgaaaaacgttttattgttagcagcaatggtgatttaa

SEQ ID NO: 82090 - DNA, 102 bp, Saccharomyces pastorianus
atgaaccagttaagatgcataaaatatctctgcatatatggtaataacaaggagcccaataccaagaatagattacattctgctgaaaaaaaaaaaaaatga

SEQ ID NO: 82091 - DNA, 702 bp, Saccharomyces pastorianus
  modified_base (419)..(452): a, c, g, t, unknown, or other
atgggtatggcgccggattgggttttttcatcaagaattttgaggatattccactattggataacgagtggtgcatacatgccatcgatttgcctgggtatggtttcttcaagacctaagtttccattcgagtatccgagagataatattcacagcgttcaagattggtttcacgaaagaatacacacatggtttagtaaaagaaatcttgtgaaccgacctgagaaaaacattgttatggcacattctttagggtcttacttgatggctttatatttgcaaaaatataaggaatctccatcttttaaaaagctgatcctttgttccccagcaggcgtgtcttatagagatttcaacaatactgcttcagaggttgaaaaatggaaaccgcctccttggtggtatgtcaagctttgggnnnnnnnnnnnnnnnnnnnnnnnnnnnnnnnnnnttttcgccagttaggttcgaagattacaagtggatggtcatatcggcgctttaagcacattttgaatggtgatccagaacagtcaaaacggtttgaagccttgcatagatacgcatatgctattttcaataagcgtggttcaggtgaatacttattaagctttgctttgaaatgtggtggtgaaccaagactttcattggagcgcagctattcgatggcaaaaggggatcctctagagtcacctgcagca

SEQ ID NO: 82092 - DNA, 558 bp, Saccharomyces pastorianus
atgttcaagtcaactttaaactccataataagaagacccttgaaaggttttcaacttcttagaggggctgacccatcgaatacacggccacagtcccctagagcctccgcaagagatgttacagagaaacagatattaagaactccgtcagcaccaactgcaataccattaagggagattatctatagagtcccaagcttgtttcctcgccctttagaagattctgttaaggacttccgagattttatcaagaacgaggatgcattccagactgaacttttgaaaacgctgccattctaccccactccttcggaatcaaaaacagcaagacttataagaactgttgttgatgatgagggcaattacatcaatgaattttgcatacgccctcgaaaaacctcagtgcctgaggctgacttaaaacatctggttttcattcatgggtatggcgccggattgggttttttcatcaagaattttgaggatattccactattggataacgagtggtgcatacatgccatcgatttgcctgggtatggtttcttcaagacctaa

SEQ ID NO: 82093 - DNA, 114 bp, Saccharomyces pastorianus
atgggtaaaggtaagccaagaggtttgaactctgctagaaagctacgtgtccacagaagaaacaagtatgttgactatttcaaaattaaaaaaactatcaaccccctattgtga

SEQ ID NO: 82094 - DNA, 126 bp, Saccharomyces pastorianus
atgtcaagacacaagtacaagttatggatgtgcatcgcaaagggaaaaaggggagtgggggaaagaaatacgtttgtccctaagtgctcttatgctcccttttgtgcttcagaggttcttgatcaa

SEQ ID NO: 82095 - DNA, 2481 bp, Saccharomyces pastorianus
atgctattcaatatcaaccgtcaagaagacgacccctttacgcaattgatcaatcaatcttcggcaaatacgcaaaatcagcaagcgcatcagcaggaaagcccttatcagtttttgcaaaaggttgtgtccaatgagccaaaaggtaaggaagagtgggtctcgccatttagacaagatgccctcgccaataggcaaaacaaccgggcatatggggaagacgcaaaaaacagaaagtttcctaccgtaagtgctacttctgcctattcaaaacagcaacctaaggatttagggtacaaaaacataccaaaaaatgctaagagagccaaagatattagatttccaacttatctaactcaaaatgaagaaagacaatatcagttactaactgagttggaactaaaggagaaacatttgaaatatttgaagaagtgccagaaaattactgacttaactaaggatgaaaaagatgacactgacactactacttcttcgtccacttctacatcatcatcgtcatcgtcatcgtcatcgtcatcgtcttcatcagatgaaggggacgttacttctactaccacatctgaggccactgaagcaactgctgacactgcaactacgacaaccactaccaccagtacttctactaccacatctgaggccactgaagcaactgctgacactgcaactacgacaaccactaccaccagtacttctactaccagcacttctactactaatgctgtcgaaaatagtgctgatgaagcaacttccgtggaggaagaacatgaagacaaagtgagtgagtctacttcaattggcaaaggcactgctgattcagctcaaattaatgtagcggaaccaatctcatccgagaatggggtgttggaaccacgcactacagatcaaagtggcggttcaaagtcaggtgtcgtgccaacagacgaacaaaaggaggaaaaatctgatgtaaaaaaagtcaatcctcccagtggggaagaaaaaaaggaaatggaagcggaaggggatgcagaagaggaaaccgaacaatcgtctgcagaggaatcagccgagagaacgtctactccagaaacctcggaaccggaatccgaagaagatgaaagcccaatcgatccaagcaaggctcccaaggtcccttttcaggaaccttctcgaaaggaaagaaccggaattttcgctttatggaaaagccctacttcttcatctacccaaaaaagtaagaccgccgctccatccaatccagtggccactccagaaaatcctgaattaattgtaaagacaaaagaacatggttatctatcaaaggcagtttatgataaaatcaattatgatgaaaaagttcatcaagcatggttagctgatcttcgagcaaaggaaaaggataaatatgatgctaaaaataaagaatacaaagacaagctacaagatttacaaaatcagattgacgaaattgaaaattcaatgaaggccatgagagaagagacttctgagaaaattgaagttagtaaaaaccggttggtcaaaaaaatcattgacgttaatgccgagcataataataagaaactaatgatattaaaagacactgaaaatatgaaaaaccaaaagttgcaggagaaaaatgaggtcttggacaaacaaaccaacgttaagtcagaaatcgatgatttgaacaatgagaaaacgaatgtccaaaaggagttcaatgactggaccacgaacttaagtaacttatctcaacagttggatgctcagatctttaagattaaccagattaatttgaaacaaggcaaagttcaaaacgaaatcgataatctagaaaagaaaaaggaggatttggttacccaaactgaagaaaataagaagctgcatgaaaaaaatgtacaagttttggaaagtgtagagaacaaggaatatcttccacaaattaatgatattgataatcaaatatcaagcttattgaacgaaatgaccataatcaagcaggaaaacgccaatgaaaaaactcaactatcggcaattaccaaaagactcgaagatgagcgccgcgctcatgaagaacagttgaagctagaagctgaagaaagaaaacgcaaagaagagaacttattggaaaaacagcgccaagagctggaggaacaagcgcatcaggctcaattagatcatgagcagcaaattactcaagtcaagcaaacctataatgaccaattgactgaactacaggataagctggcagccgaagagaaagaactggaggcagtcaagagggaaagaacgcgattacaagctgaaaaggctattgaggaacaaacgcgccagaaaaacgctgatgaggccttgaagcaagaaatattgagtaggcagcacaaacaagctgaaggtatacacgcggctgaaaaccacaaaataccaaatgaccgttcacaaaagatacgagcgtccttccaaggacgattccttgtatga

SEQ ID NO: 82096 - DNA, 750 bp, Saccharomyces pastorianus
atgtccagttgtaaaaccactttgtctgaaatggttggttctgtgacaaaagataggggcactatcaacgtcaaagccagaacacgttcgagtaatgtaactttcaaaccgcctgtaacccacgatatggtgcgttcgcttttcgatccaactttgaagaaatctctgctggaaaaatgcatcgcgctagctattatatcgaattttttcatttgttattgggtcttccaaaggtttggcttacagtttaccaaatacttttttctggtacagtatttattttggagaattgcttataatttaggtattggactggttctgcattaccagtcacattatgaaacactaacgaattgtgctaaaactcatgcgattttcagcaaaataccacagaataaagatgctaattcgaatttctcaacaaattccaattccttttcagaaaaattttggaattttattaggaagttctgtcaatatgagattaggtctaaaatgccaaaggagtatgatttatttgcctatccagaagagatcaacgtctggttgatatttcgccagtttgtcgatttaatcttgatgcaagattttgtgacttacattatttacgtttacctttctattccatatagctgggttcaaatcttcaactggagatctttgctaggtgttattttgattttatttaacatctgggtcaagttagatgcgcatcgcgtggttaaagattatgcttggtatctggggtga

SEQ ID NO: 82097 - DNA, 384 bp, Saccharomyces pastorianus
atgatcgctacctccagagccgtaaacatgaataaagaatcaaaacacaagaaggctgttgccaaaccatgcagagagagacaaacttcagttacaagagccatgacaccagctgtagcacgtgatccttgcagactttcgacgtcgtcgtctccttcttcgtcaccaatgtcagcacagagaaggctttcgagggaagaaataataaacgaaatggaaaaggagcaagacgctattgtagtaagacttctacgggaaattgaaactttaaaagaagaaaactctaggttaaaaaatcaactgcaccatccggtcccggctagaaggtcgtctccatttttcgaaggcgagtctgccatcctagatgatgatgactgcaattat

SEQ ID NO: 82098 - DNA, 1077 bp, Saccharomyces pastorianus
atgcccatgtgggatggtttctacaacgatgatgaaaaacaagcttatattgacgatgatgttttagaggctttgaaggagaacggtagttgtggatctaggaaagtatttgtatcctgtaatcatcacatccatcataactgcttcaagaggtacgttcaaaaaaagagattttcatcaaacgcgtttatatgtcctttatgccaaacattttcaaattgtactttacctctttgtcaaacctcaaaggcaaatactggtttgtcgctagatatgtttttggaatcagaactttctttggatacattgtcaaggctcttcaaaccttttactgaggaaaattatcgtacaataaactctatattttcgttgatgatatctcagtgtcaaggttttgataaagcggtaaggaagcgggccaacttttcgcataaggacgtttctttaatattaagtgtgcactgggcaaataccatttcaatgttagaaattgcttctaggttagaaaagccatacagtatttcatttttcagaagcagggaacagaaatataaaactttaaaaaatatcttagtctgcatcatgctgttcacctttgtcataggcaagccaagtatggagtttgaaccgtacccgcagcagcccgatactgtttggaaccaaaatcaactcttccaatatattgttcgaagcgctttattttctccagtttcacttcgtcagactgttacagaggcgttaacaacgttctctagacagtttctaagagattttcttcagggtctctctgatgcagaacaggttaccaaattgtatgctaaagcgtccaaaattggggatgttcttaaagtaagtgagcagatgctcttcgccctaaggaccatatctgatgtacgaatggagggattggactcggaaagtattatttatgatctagcttataccttcctgttgaagagtcttcttcctacgataagaaggtgcttagtctttatcaaagtgctacacgaattagtgaaagattctgaaaatgaaacgctggttatcaacgtcatgaggttgaagaagaactggatt

SEQ ID NO: 82099 - DNA, 3411 bp, Saccharomyces pastorianus
atgtccgttgctgatgatgatttaggatctttacaaggtcacattaggagaacactgaggtctattcataacctcccctattttaggtatacgagaggtcctactgaaagggctgacatgagcagagcccttaaagagttcatttacagatatctatactttgtcatttctaacagcggagagaacttacctactttattcaatgctcatccaaaacaaaaattatctaacccagagcttactgtttttcctgacagtttagaagatgctgtggatattgataagataacatctcaacaaactattccgttttataagatagatgaatccagaataggagacgcccataaacataccggaagaaattgtgggaggaaattcaaaataggggaacccttgtataggtgtcatgagtgtggttgcgatgatacttgtgtgctttgtattcattgttttaatccaaaagatcatgtgaatcatcatgtttgtaccgatatatgtactgaattcactagtggaatttgtgactgtggagatgaagaagcttggaattctccacttcattgcaaagctgaagaacaagaaaacgatatatcggaagaccccgccacaaatgccgacataaaggaagaagatgtatggaatgattcagtgaatatagcattagtggagttggttcttgcagaagtgtttgactattttatcgatgtttttaaccagaatatcgaacctctacccacaatacagaaagatatcactatcaaattaagagagatgacacaacagggaaaaatgtatgaaagagcgcagtttttgaacgatttaaaatatgaaaacgattatatgtttgacggaacaacaacagcaaagacgagcccctctaatagccctgaggcatctccatcgcttgcgaaaatcgatcccgaaaattacacggtaataatatataacgatgaatatcataactattcgcaggctacgactgccttgagacagggggttccagataacgtacacattgatctattaacatccaggattgacggagaaggtcgagcaatgttgaaatgttcacaagatttatcatctgtcttaggtggtttttttgctgttcaaacgaatggattaagtgccactttaacatcgtggtcggaatatcttcatcaagaaacatgcaagtatatcatcctttggattacatactgtttaaacataccaaactcctccttccaaaccacttttaggaacatgatgggtaaaaccctgtgttcagaatacttaaatgcaacagaatgtcgtgatatgacaccggtggtggagaaatatttcagcaacaagttcgataagaatgatccctacagatacatcgatttatctatccttgcagatggcaatcaaattcctttgggtcatcacaaaattctacccgaatcaagcacccattcactttcaccattgataaatgatgtagaaactccaacatcaagaacatattctaatacaagattacaacatattctttattttgataacagatattggaaaagactgagaaaagatattcagaatgtgatcattccaacgttggcctcttcaaatttatacaagcccattttctgtcgacaggtagtcgaaatattcaaccacatcacaagatctgtggcatatatggatagagaacctcagctaacagctataagagagtgtgtcgtacagttatttacatgccctacgaatgccaaaaatattttcgaaaaccaaagttttttggatattgtgtggtcaattatagacatttttaaggagttttgtaaggtggaaggtggtgtattgatctggcagagagttcaaaaaagcaatttaacaaagagttacagtatatcattcaagcaagggttgtatacggttgaaactttattgagtaaggtacatgatcctaatattccattgagacctaaggaaattatatctctattaactctttgcaagctcttcaatggagcgtggaagataaagcgtaaagaaggtgaacatgttcttcacgaagatcaaaatttcatctcctatttagaatataccacctccatttacagtattattcaaacagcggaaaaagttagcgaaaaatcaaaagattccattgattcaaagctttttttaaatgcaataagaattatcagttcatttctaggcaatagatcactaacatacaagttaatatatgattctcatgaagtcattaagtttagcgtaagccacgaaagagttgcatttatgaatcctttacaaacaatgctttcattccttatcgaaaaagtgtctttaaaggatgcatacgaagcgttagaagactgttcagattttctgaaaatatcggatttctctttgagatcagttgtattgtgctctcaaattgacgtcgggttttgggtaagaaatggtatgtctgtgttacatcaagcatcgtattataaaaacaatcccgaattacgttcctattccagagatatacatttgaatcagttagctatcctttgggaacgtgatgacattccgagaataatatacaatattcttgatagatgggaattactagactggtttacaggtgaagttgactatcaacacactgtctatgaagataaaatttcattcatcattcaacaattcattgcctttatttatcaaatattgactgaaagacaatattttaaaactttctcttctctaaaggatagaagaatggatcaaatcaaaaattcaatcatttataacctttacatgaaacctctttcgtattcaaagctactaagatcagttcctgactacctaactgaagatactaccgagtttgacgaagcacttgaagaagtctctgttttcgtcgagcctaagggccttgccgacaatggtgtttttaaattaaaagcaagcttgtatgcaaaggttgatccgttaaagttgctgaatttggaaaacgaattcgaaagtagtgcaactattattaaatcacatttggctaaggataaggatgaaatagcaaaagttgtactaatacctcaagtctcaataaaacagttagataaagacgctctcaatctgggtgcttttacaaggaatacggtatttgccaaagtggtctataaactactccaggtatgtctggatatggaggatagcactttcctgaatgagctactacatctagttcatggtatattcagggatgatgaattgataaatggtaaggactctataccagaagcttatttgtcaaagcctatatgcaatttactcttgagcatagccaatgctaaatcagacgtattttccgagagtattgtccgtaaagccgactatttgttagagaagatgataatgaaaaaaccaaatgactttttgagtcattaa

SEQ ID NO: 82100 - DNA, 186 bp, Saccharomyces pastorianus
atgtccagacgcaatccaccaggcagtagaaacgggggaggtccgacgaatgcctctcccttcattaaaagagacagaatgagaagaaatttcctgaggatgagaatgggtcaaaacggcagcaattctagttccccagcgtaccaaatggagacaacagcagggggatcctctagagtcgacctg

SEQ ID NO: 82101 - DNA, 186 bp, Saccharomyces pastorianus
atgaatttagatttaggttctactatacgaggctatgaatcagataaagacacatttccgcaatcgaaaggcgttagctcatctcaaaaagagcagcatagtcaactgaatcagacaaaaatagcttatgaacagagacttctaaatgattttgaggatatggatgatcctttagcttgtttttag

SEQ ID NO: 82102 - DNA, 1212 bp, Saccharomyces pastorianus
atgaaagtgcttgacctactaacggtactcagtgcctcttcattattatctacattcgcggctgccgaaagtactgctactgcagacagtacaactgcagcttctagcactgcttcgtgtaacccgttaaaaactacaggttgtacgccggatacagctttggcaactagttttagcgaagatttctcatcttcatccaaatggtttaccgacttgaagcacgcaggtgaaatcaagtacggttcagacggtttgtcaatgacactggcgaaaagatacgataatccaagtttgaagtctaacttttatatcatgtatggtaaattggaagttatcttaaaagctgccaatggtaccggtattgtttcatcattctatttacaaagtgatgatttggatgaaattgatattgaatgggtgggtggtgacaacactcagttccaatctaacttcttttctaaaggtgataccacaacatacgacagaggcgaatttcacggtgtcgacactcctaccgacaaatttcataactacactttagattgggcgatggacaagacgacttggtacctcgatggagagtctgtcagagtattatcaaacacatcaagtgagggttacccacaatctcctatgtacctaatgatgggtatctgggccggtggtgacccagacaatgctgctggtaccattgaatgggctggtggtgaaaccaactacaatgacgctccgttcactatgtacattgaaaaggtcattgtaactgattattctaccggtaaaaagtacacatatggtgaccaatctggttcttgggaatctattgaagctgacggtggttctatttacggcaggtatgaccaagcccaagaagatttcgcagttttagccaacggtggtagtatttccagcagctctacatcctcttctactgtatcttcctcggcgtcttccactgtatcttcctcggtttcttccactgtatcttcctcggcgtcttccactgtatcttcctcggtttcttccactgtatcttcttcgtcttctgtatcttcctcttcatccacatctccatcttcttcgaccgctacttcatctaaaacacttgcttcctcatcagccaccacatctagttccattagttcactcgaaaagcaatcctcctcttcatccaagaaaacagtggcttcctcttctacaagtgagtccatt

SEQ ID NO: 82103 - DNA, 420 bp, Saccharomyces pastorianus
atggttagagttgctattaacggtttcggtagaatcggtagattggtcatgagaattgctttgtctagaccaaacgtcgaagttgttgctttgaacgacccattcatcaccaacgactacgctgcttacatgttcaagtacgactccactcacggtagatacgctggtgaagtttcccacgatgacaagcacatcattgtcgatggtaagaagattgctacttaccaagaaagagacccagctaacttgccatggggttcttccaacgttgacatcgccattgactccactggtgttttcaaggaattggacaccgctcaaaagcacattgacgctggtgccaagaaggttgtcatcactgtccatcttccaccgccccaatgttcgtcatgggtgttaacgaagaacaatacacttctg

SEQ ID NO: 82104 - DNA, 516 bp, Saccharomyces pastorianus
atgcaaccatttcccacgtattcatcccttttaatagccgcacctttaaacgacaccaccccttataaaagcctagatgtagcagtgcgaagcgaactcgatacttgctcatcattgatttcggcatccttgtgtagaaaactacaaatgtctgacggaacactgtttactgatttgaaggagagaaagttgattaggaccattgtgccaagaggcttagtgcgttccttgaagctggacgttaagcttgctgatccaagtgacgcccagcaactttacgaaaaggagtttcccttacgtaagtatccaactttcgttggaccgcatgacgagtggacgcttacagaggcaatggctattgactactacttgatccatctgtcgagcgacaaggaagctgtgcgccagttgttgggtcccgaaggtgacttcaaaactcgtgcagatattttaagatgggaatcgctttccaacagtgatttcttgaatgaggttgtgaggtgtttttccctctaa

SEQ ID NO: 82105 - DNA, 372 bp, Saccharomyces pastorianus
atgtgtgataagtcaaaaacggtattggactacacgatagaattcttggataaatatatacctgaatggtttgagacgggaaataaatgccccttgttcattttcttctcgggcccacaaggctcaggcaaaagttttacaagtatccaaatctataaccatttgatggaaaaatatgggggtgaaaaatctatcggttacgcctcaattgatgatttttatttaactcacgaggaccaattgaaactcaatgagcaattcaagaacaataagctgttacaaggacgtggtttaccaggtactcatgatatgaaattgttgcaagaggtattgacaccgacctgcaggcatgcagcttgcactgccgtcgtt

SEQ ID NO: 82106 - DNA, 669 bp, Saccharomyces pastorianus
atgtctgcaaaacagcaactacgtatattggttccggtgaaaagggtagttgatttccagatcaagcctagagtaaataagaccttaactgggattgcaaccagtggaatcaaattcagtatcaaccctttcgatgatattgctgtcgaagaagccatcagaattaaagaaaagaacaagagtttagtagaatctacgcatgcagtttctattggctccgccaaagctcaggatattctaagaaattgcctcgctaagggaatagacacctgtagtttaattgactctgtgggtaaagaaaacatagagcccttagcaattgctaaaatcttaaaagctgttgttgaaaagaagggttctaatctggttttgatgggaaagcaagccattgatgatgactgtaacaataccggtcagatgttggcaggtttattaaattggccacaggcaacaaatgcggcaaaggtggaattccttgataatggtaaagttcaagtaacaagagaaattgacgatggagaagaagtaattgaagcctccttaccaatggttattactacagatttgagattgaacactccgcgttacgtaggactgcccaaagtaatggaggcgaagaaaaagctattgaaaattggatatagcaaagatttcctgaaattattttga

SEQ ID NO: 82107 - DNA, 1797 bp, Saccharomyces pastorianus
atgcaggggagaaaaaggacgcttacggaaccatttgagccaaataccaatccatttggggacaatgcagcagtaatgacggaaaatgttgaggataacagcgaaacagatggtaaccgtctagaatcaaaaccacaagctttggtcccaccagctttaaatatcgtgccaccagagagcagcatccacagtactgaagaaaaaaaaggtgacgagtacaatggaaatgataaagatagctccttaatctccaacatatttcgtactcgtgtcggaaggagtagtcatgaaaacttgagcaggcctaaactctcacttaaaacagcatcatttggtgccgctgaatcttcccggcgtaatgtttcaccctctacaaaatctgccaagtctagttcgcagtatattgatttaaatgatgaaaggctacgcaggcgtagcttcagtagttatagccgatcatctagtaggcgtgtttctaattcaccaagctcaacggataggcctccacggtcggcaaaggttttatcgctaattgccgctgatgatatggatgattttgaagatttgcaaaagggatttaaaagtgcaatagacgaagagggcctgacatggctaccccaattaaaatcagaaaaaagccgttctgtatcagacgttggagaagatagaggagaaggagaacaagaatctatacctgacgttcatacacccaatgtaggagcaagcgctactccaggatcaattcatctaacacccgaacccgcgcagaatggttcggtatctgagggtctagaaggctctattaataattcaagaaagaaacccagtccaaagttttttcatcatttatcaccgcaaaaagaagataaagaccaaacagaagttattgagtatgctgaagacattctagattttgaaacccttcaaagaaaactggaatcaaggccctttgtgctttatggacattctcttggggttttctcgcctacgaatccgctaagaataaaaattgctcgttttttgttgcataggcggtattcgttactttacaacactttgttaacattttatgccattctcctggcgataaggacatataaccctcacaatgtggtttttttataccgtttctctaactggaccgactatttcatttttattttatcagcttgctttacaggcaatgatattgctaaaataattgcgtttggattttgggacgattctgaaatgtttaaagcctatggacgtgagtataaatcaatcttacagagatctggaattatgaaactatacatatatctgagagaaaagtatggtagaaagctaatagatttcattattccatttaggatcatatcgccgggagaagagacaaaatatcaacgaagttcgttgagtacttccctgacgaaaccttatggggcaaaggaaaatcagaggccttttggcaccccaagagcctttgcgagatcatcgtggaatagaatagatctggtatcttctgtcagtttttggctaggtatgtttttatccataagaagttatgatacaaaaacaggcataagaatattcaagccccttgctatattaaggattcttcgacttgtaaacgtggatactggtatgccctcaattctaaggggattgaaatatggtatcccacagttggtaaatgttagttcaatgctagtttacttttggattttctttgggattttgggagtacagatttttcagggctcttttcgaacacaatgtgtatggtttaacctgaagatccgaccgatactacca

SEQ ID NO: 82108 - DNA, 1230 bp, Saccharomyces pastorianus
atggctactccccatttatattacagatataactccaaaagctctaacaaaaatatcaattctagcggaaattctacagaggttgaccgtttcattccaaaatcagtttcgagaaatgcttataagtctattccaatgttaaatgggtttgacataagttactcagaactttgcgagaaatctccttcacctgagcggctatcatcccctgaattctttaacgaactgcgaaacaccgggcattacgaatcaatcagtacaacaaatgagttttccatgtcaagtatctctagctcttctgagagtcaagttaccagaagtggaagtgcaagagcttcaagaaacgattattcaaaattaactaaagagcaaaaggaccatagaaagaatattgcacattctcttggttttcaattgcccgaccgtgtctttacgtttgagaccacaagtgctgaaattctggaaaagaataaagccatcaaaaattgctttggaccaggaagttgcgccgaaataagatcaacctttgactttagtacactctcgcccgatgttgcccgttattatatcgctaattctaacgcaagatcagcttccccacaaagacaaatccaaagacctgctaaacgagtaaagtcacatattccataccgtgtattggatgcaccttgcctgagaaatgatttttattcgaacttaatttcttggtcaagaaccacaaacaacgttttggtgggactgggttgctccgtatacatctggtctgagaaagaaggagcggtatctatattggaccatcaatacttaagtgaaaagagagatttagtgacatgtgtctcattctgtccttacaatacttattttattgttggtacaaaatttggccgtattcttctttatgatcaaaaagaattttttcattccagcaacacaaacgaaaaggaaccagtatttgttttccaaactgaatccttcaaaggaatatgttgcctagaatggttcaaaccaggtgaaatttgcaaattttatgttggagaggaaaatggcaatgtgagcctcttcgaaataaagagtttgcatttccccataaaaaactggagtaaaagacaaaaactcgaagatgaaaatttaataggattgaaacttcattccacttatcaagctcaggcacagcaagtctgtggtacgttattaagagcttatgctttcacatacccttttttgatatag

SEQ ID NO: 82109 - DNA, 1461 bp, Saccharomyces pastorianus
atggatctattcaaaagaaaagttaaagaatgggtatactccctcagcactgacgaccattatgcagagtataaccccgatgaaacgcctacttttaacatgggtaaacgtttaaacagcaacaatggtcaggtaaatccctctcaaatgcatttgaatagtgtagatgaggaaatgagcatgggatttcaaaatggcgtgccatctaatgaagacataaatattgatgaatttacgtccacggagtcaaacgatggtgtctctgaaaccctcttagcttggagacacatcgatttttggaccagtgaacataatccagatttaaatgcaactttgagtgatccttgcacccaaaacgatatcactcacgcagaggaagacttggaagttagctttcccaacccagtaaaagcgtctttcaaaattcatgatggccaagaagatttagaatcgatgaccggtacttctggcttgttttatggcttccaactaatgacactagatcaggttgtagctatgactcaggcctggagaaacgtcgcaaagaacataaacaaaagatctcaacaaggtttatcccatgttacatctactggctcttcttcatctatggaaagactaaatggtaacaagttcaaactgccaaatatcccagatcaaaaatctattcctccaaatgcagtgcaaccggtatatgcacatcctgcttggattcctttaataacggacaatgccggtaaccatatcggtgttgacttggcgcctggtccaaatggtaaatatgctcaaattataacatttgggagggacttcgatacgaaatttgtcattgctgaaaattggggtgaatttctgttatcgtttgccaacgatttggaagctggtaattggtatttagtagatgacaatgacgactactttagcggtgatggtgaattggtcttcagggataagaaatctaatggtcctatacaagattatttcgaagttttaaaaagaagaacgtggatcaagtatcaagaaaacttgagatcacaacagcaaaaatctcaacctgacacatccttgcaggagcagaaatacgtgcctgccttgcaaaagaaagtggcagctgaacagccttctaccctcaacgcagaatccataaagggcgaagatagtggtagtgcagatgtacaatctgttcaagatcacgaatctgtcaaaattgtgaaaacagaacctagcgaagcggagactacaactgtaaatacagaaagccttggacaagcagagcatgaaatcaaagctgataatgtagacattaaacaagaaagcgagaggaaagaagacgaacagcaaccaaaggttgaagaaaaagaacacgttgaaaacgaacatgtcacagaatcagcaaaaaaagacgatgatgtaaataagcaaacagaagaaatgaacaaaaaaggaagaaaatcgaaataa

SEQ ID NO: 82110 - DNA, 933 bp, Saccharomyces pastorianus
atgaatagatcacctggtgagttccaaaggtacgcaaaggcgttccaaaaacaattgtccaaggtacagcaaaccggaggcagaggtcaagtgccttcaccaaggggggcatttgcaggcttgggaggtttgcttttactcggaggtggtgcactgttcattaacaatgcactgttcaatgtagatggtggtcatagagccattgtttattccagaatacatggtgtttcctctaggatatttaatgaaggtactcacttcattttcccttggcttgacacaccaattatttatgatgtgagagcaaaacctcgtaatgttgcttctttaacaggtaccaaagacttacaaatggtgaatatcacctgtagagtactttcaagaccggatgtggtgcaattgcccaccatatacagaaccttaggtcaggattacgatgaaagagtgttgccttccattgttaatgaagttttaaaggctgtagtggcccaatttaatgcgtcacaattaatcactcaaagagaaaaagtttccaggttgattcgcgagaatttggttcgtcgtgcaagcaaattcaatatcctactggatgatgtttctattacgtacatgactttttcgccagagtttacgaacgctgtagaagcaaagcaaattgcccaacaagatgctcaaagggctgcatttgtagttgataaagccagacaagaaaaacaaggtatggtagtgagggcacaaggtgaagccaaatccgccgaactgattggtgaagccatcaagaaatcaagagactacgtggaattgaaaagattagatacagccagggacattgcaaagatcttggctagctctccaaatagagtcatcttggataatgaagcattgttgctaaataccgtagtggatgcaagaatcgatggaaggggcaaataa

SEQ ID NO: 82111 - DNA, 288 bp, Saccharomyces pastorianus
atgaagttagattcaggaatatactcagaggcacaaagagttgtgagaactccaaagtttagatatattatgttagggctggtgggcgctgctgtggtaccgaccgcatacatgaggagaggctatacggttcctgcacatagcttagacaacatcaacggcgtagacacaactaaggcgtctgttatgggtacagaacagagagtagctatgacgaagggtaagagtttacaagagatgatggatgatgatgaagtaacgtatttgatgttctcttcaatcatgtaa

SEQ ID NO: 82112 - DNA, 1980 bp, Saccharomyces pastorianus
atgggtagaagaagtagagcagctatgctcccaacaaatatcattcttttacagaatttggtaaagcgtgacccagagtcctatcaagaggagtttcttcaacaatatgcacattatgaatcgctaagggacatttttatgttaaatgggcttgctggaggtgattctgcagctgccactaatgggctcgatgtaggaaatggatcttctacaatggcaggtactaacggtaccaccatgagcacttcaacttcgcaacttattgaattggttggcttcgtatctcaagtctgctcatgttttcctcgtgaaactgcaaacttcccgtctgaattaaagcagcttttgctggaacaccataagtccttgccatttgaattgaaagaaaaaatcttaagttgtttgacgatgttaaggaataaggacgtcattactgctgaggaattaattcaaagcttatttcctttattggttgcttactcttcccatggtaattcactcggcgttaattcacacgccaaggaattgaggaaaatcatttatacaaatttaatttctttattaaaaagttgtaatactaatggtaaaaaccaaaaattgaacaaatctacgcaggccgtttgctttaatttgctagatcaaccagattctcagggaatctgggccacaaaattaaccagagaactttggagacgtggtatttgggatgattcaagaacagtagaaattatgacccaagcagcattacatcaggatgttaagattgtcatgtctggtgtgatgttttttttggatgctgacagagaacgtgaagaaaattttgaagaaaattccgaggatgaggatgggtttgatttagatgcattaaggcataagatgcaagtcaataaaaaaacgggtagacgtggtaagaagctggagaatgccataaaaactgtgaagaagaagaagaagaacggaccgggtgctccccaagggtatttaaacttcagtgctatccaccttttgagagatccacaaggatttgccgaaaaattgtttaaggaacatctttcaggcaaaacgaaaaacaaatttgacatggaacaaaaaatatctttgatgcagctgttatcaaggttgattggtacccataagttaattgttttaggaatttacactttttttttaaagtacttaactccgaaacaaagagatgttacaagaattatgtccgcatgtgcccaagcatgtcatgatcttgtccctcctgaagttataaatgtcatggtgagaaagattgcagacgagtttgtatcagacggtgttgccaatgaagtcgctgctgcaggcattaataccattagagaaatatgctctcgtgcacctttggctatcgatgagattctactacaggatctggtagaatataaggggtctaaagctaaaggtgtcaatatggctgccaagtcattgatagcgttgtatagagacgtggcaccagaaatgctaaagaagaaggatcgtggtaagaatgccgccatggaagtacaagaagccaagaaaggaggtaaagattcaaaaagaccgcaatttggtgccgacaacagtgttcaagggattgctggtatcgaactgttagccaaatggaagaaagaacatggtgaagagagtgaaaatgaagacgttgatgccaactgggaagtagatgtcgatagcgaagaagacgatgtcgacggtgagtgggtcaccatggatagtgataaagaatatgacgttgatatggaagatagtgacgatgaaaaagacaatgctaagggcaaggaatcagattccgatttggaactaagcgatgatgacgatgaaaaagaggtgaaggatgagcaagaagatgcagatatagatcccgaagctgccttccgtgaaattgcttctacacgtattttaactccggcagatttcgctaaactacagaattgcgtaatgaggaagcgttgctaa

SEQ ID NO: 82113 - DNA, 903 bp, Saccharomyces pastorianus
atgtcaaactttgaatttgatggtgttgaatacacattcaaagagagacccagtgtcgtagaggaaaatgaaggtaaaattgagtttagggtggtgaataatgataatactaaagaccacatgatggtcctaacggggttaaaaaacatttttcaaaagcaattaccaaaaatgcccaaagaatacattgccaggttagtctatgatcgaagtcatctttccatggctgtcattaggaagccattgactgtcgtaggtggcataacatatcgacctttcgataagagagaattcgcagaaattgttttctgtgccatcagttcgacggaacaggtacgcggttatggtgcgcatctaatgaatcacttaaaagactatgttagaaatacctcgaacataaaatattttttgacatatgcagataattacgctattggatactttaaaaagcaaggcttcactaaagaaatcacgttggataaaagtatatggatgggatatattaaagattatgaaggtggtacgctgatgcaatgttctatgttaccaagaatacgatatttggacgcaggtaagattttattattacaagaagcggccctgcgaagaaaaataagaacgatttcgaaatcgcatattgtgaggcctggtttagagcaattcaaagacttaaacaatatcaaaccgattgatccaatgactattcctggcttgaaagaagccggctggactcccgagatggatgcgttggcgcaacgtcccaagcgtggtccacacgatgcagcaatacagaatatactcacagagctacaaaatcatgcagcagcttggcccttcttacaacccgttaataaagaggaggtccccgactattatgatttatcaaagagccaatggacttga

SEQ ID NO: 82114 - DNA, 183 bp, Saccharomyces pastorianus
atggtcacaaaacatcagattgaagaggatcacttggatggagctacgacggatcccgaagttaaacgggtaaaattagaaaacaacgttgaagaaatacaacctgagcaggctgagaccaataaacagagggcaccgataaagagaataaaggaaagttcgagaaagaaactgagagaatag

SEQ ID NO: 82115 - DNA, 1629 bp, Saccharomyces pastorianus
atggtagattcaattcaccgtattgcatcggcgttggatacggccaaagtaataacgagggaagctgccgcggtagccacctctaagctgggtgaatcctcctatacttattattctcaaaacatcaatcctcaacagttagtcaccttgttaaattctaggaactctagagaagttagagatgcaatgaagagaataatatctataatggcttccgatgatgactctattgacgttcaattatactttgctgatgttgtaaagaatatcaccactaatgacaccaaagtgaaaagacttattcacctgtatttacttagatttgcagaaaatgacccaaacctgaccctgttatctattaattctcttcaaaaatcattgtctgattcgaattccgaactgagatgctttgctttgagtgccctttctgacatgaaaatgtcatcattagcacctataattttgcatactgtcaagaaattggttacagatccatctgcaatggttcgtggtgaagtcgccttggccattatcaaattatatagggctggaaagaatgactatcatgaagaattgttggatattctgaaagaattaatggcagatacagatcctaaggtgatatcctgtgctgtcctagcttacaaagaatgttatgcggatcacttggagctattgcatggacattttcgcagatattgtagaataattaagcaactagattcgtggtcacaatcatatttaattgagctgctaatcaagtactgtaagcagtatttaccaaaaccaactgtggtcgataaatcatcagaaggttccccaaggagttgtcctttaccagataaatacaacgagattgaatacccatcttacgaggtggtaaatgaccctgatttagatttatttctacagagtttgaattgcttaatttatagttccaaccctacagtgattttatcgtgttgcaatgcgctatatcagttagcttcaccattgcagatgaaaaatactaaatttattgaagcattggttagaacggtaaccatgacagaaaaccaaggtaacaaagaaatgcttttacaagcaattcacttcttatcgatcttagaccagacactatttttaccctacaccaagaaattttacgttttccccaaagatcctattgtggcatcaatttggaagatccaaattttgtccacgttaataaatgaatcaaacgttaaagaaatattcaaagaattgaaatattatgttgccagtgctcatttcccagaaaatgttgttattatggcggttaagtcattatctcgatgtggccaattgtcaacgagttgggaatcacatgtaatgaagtggttaattgatcatatggaatcccacaacctctctgcttctgtcctagatgcatacgtgaatgttatcaggatgctggtgcaaaaaaatcctacaaaacatcttcgcataatcttcaagcttgcagatttattaacagttcaaacgagtttggctgataatgctcgtgcaggtattgtttggttatttggtgaaattgcctcgattgaatttaagatatgtccggacgttttgaggaggctaatccagaattttccaaatgagggtcctgag

SEQ ID NO: 82116 - DNA, 777 bp, Saccharomyces pastorianus
atgcataacatccaattagtgcaagagatagaaagacatgaaaccccgttaaacattagacctacctctccatacactttaaaccctcctgtcgagagagatgggttttcttggccaagtgtgggtacaagacaacgtgcagaggaaactgaagaggaggaaaaggaacgaattcaacgcatttcaggcgctatcaagacaattttgaccgaactgggtgaagatgtcaacagagaaggtctactagatactccacaaagatacgctaaagccatgctttatttcactaaaggttaccaaacgaacattatggacgatgtcattaagaatgctgtctttgaagaagatcatgatgaaatggttattgttcgtgatattgaaatttactcgttatgtgaacatcatttggtgccatttttcggcaaggttcatatcgggtatataccaaataaaaaagtcatcgggttaagtaagttggccagattggcagaaatgtatgcgagaaggctccaagttcaagaaagacttacaaagcaaattgcaatggccctaagtgatattctaaaaccattaggtgtagccgttgttatggaagcttctcatatgtgcatggtttcaagaggcattcaaaaaacgggatcttctacggtaacttcttgtatgcttggagggtttagggctcataaaaccagagaagagtttttaactcttttaggaagaagaagtatttggaaaaaaaaaataaaagcgacgatatatcgtgtatgtattaactaa

SEQ ID NO: 82117 - DNA, 507 bp, Saccharomyces pastorianus
atgaaattatcgactagtttattaatgaacaaggcgataaaacctaatgttggaaagaaagagctacgtcagcaagagatagagaaaatggacccacagacgctcattactaaggccaataaggtttcttactatggcaaccctacgagtaaggaatcatggaggtatgattggtaccaaccatctaaggtgagctccaatgtgcagcaaccacaacaacagctaggggacatggagaataacttggagaaatatccattcaggtataaaacatggttgaggaaccaggaagatgagaaaaatctacagagggagagctgtgaggatatattagatttgaaagaatttgatagaagaatactgaaaaagtcgttgatgacatcgcacactaagggtgatacaagtaaggccaacggtgctccttctgctaaccaaggagatgaagctcttagtgtggatgatataagaggcgctgtcggtaatagtgaagcatcctgggtatctgcg

SEQ ID NO: 82118 - DNA, 840 bp, Saccharomyces pastorianus
atgcaagtagaagggcctgacactaacttcgtgagtgatttggctttgggatcaaagaaaagaaggttatccaagacttctgtacaagaggatgatcatacaaatgtggtatcggaagtgaataagaataagaagaaaaaaaaggcaaagcctatgacatgcacattgctaaagtctgtggttgaaaaaggtattggtataaaggatgtaagagacatgactcaatacttgttgcaggctgaaaacaactctcccaaatggattgatatttgtaacaggtcaagtttacagaaaatgatagttctgttcattccaggtttacaaccagatgattttgagaacggcaaaaatacctttaatgaaatcagtgatgataacttcaaatatattcctggagaaattgcctccacgtttcatacatttcccgtgatggcgcctggttccaagatgacgctcttttcgccctacaattcatttattaatgttggattgtccaaaatggagaaaataaataaattgaaagagttacaaaagaagaagaaaattactattaacgatttggttctatccgaacaacagttagtggcaaacgattacccactggattctggagacaccaattttgatacagactgggtacaaactgttgactttacccatggtggctcccacatctttgcactagactgtgaaatgtgtctttccgaacaaggtttagttctaactaggatttctctagtgaattttgacaatgaagttatctatgaagagttggtgaaacctgatgtccccatagtggactatttgacacgttacagtggtataactgaagagaactaa

SEQ ID NO: 82119 - DNA, 1776 bp, Saccharomyces pastorianus
atgtctaccgctaccatacaggatgaagacattaaatttcagagagagaactgggaaatgataaggtcacacgtttcacccataatatccaatttaacaatggacaacttacaggaatcgcacagagacttatttcaagtcaatatacttattggccgcaacataatttgtaaaaatgttgtggattttactctgaacaaacagaatggcaggctaatccctgctttatccgctttgattgccttgctaaattctgatattccagatattggagaaactttagcaaaagaactaatgttaatgttcgtgcagcaattcaatcgcaaagattacgtgtcctgcggaaatatccttcaatgtctgtccattttatttctttatgatgtaattcatgaaatcgtgatcttacagattctattgctactccttgaaaagaattctttacgactggtcattgccgtgatgaaaatatgtggctggaaacttgcacttgtcagtaagaaaacccatgatatgatttgggagaagttaagatatattttgcaaacacaggagttatctagtacactacgtgagtcgttagagactctgtttgaaataaggcaaaaagattataaatctgggtctcaaggtctgtttatattggacccaactagttacacagttcatacgcactcctatattgttagtgatgaggatgaagccaacaaagaactgggaaattttgaaaagtgtgaaaatttcaatgaactaaccatggcgtttgatacgctacgacagaagctgctgataaataatacgtccgacacaaatgaaggtagtaacagtcaattacaaatctatgacatgacatctaccaatgatgtcgagtttaaaaagaagatttatttggttctgaaaagttcattatcaggtgacgaagcggctcacaaattgctaaaattaaagattgcgaacaatttgaaaaaaagcgtggtagatataatcatcaaatctagtttgcaggaatctacattctctaaattttattctattttgtccgaacgtatgataacgttccacaggagttggcagacagcttacaatgaaacttttgagcagaattatacacaagatatcgaaggttatgaaactgaccaactgcgaatcttaggtaagttttggggacacttaatatcttatgaatttcttccaatggactgtcttaagataattaagttaactgaggaagaatcgtgtcctcaaggaagaattttcatcaaatttttatttcaagagctcgtaaatgagctcggattagatgagctgcaattaaggctaaactccagcaagcttgacggaatgtttccgctggaaggagacgacgaacatataagatactccataaatttctttactgccataggattgggcctgctcacagaggatatgagaagccggttgacaattattcaagaagttgaggatgcagaggaagaagaaaaaaaattgagagaagaggaggaacttgaaaagttacggaagaaggccagagagtcacaaccaacccaagggccaaaaattcacgaatccaggttatttttacagaaggacaccagagaaaatagtagatcaagatcgccatttacagtggaaacaagaaaacgtgctagatccagaactccaccaagaggatcgagaaaccatcgtaacagatccaggactccgccaagaagaccgaaaaaccatcgcaacagatccaggactccacctgcaagaaggcaacggcatagatga

SEQ ID NO: 82120 - DNA, 1218 bp, Saccharomyces pastorianus
atggagggccgcaaaagtgaagatgaaaagaacgaagccgctttagtctgtgatgtctttgaatcctccaatgccaaactaccaaagaatgtattcagaagttcctttacttggtattgctatgaagttatcaataggtcagcattccatatttggttattgttatgtttaacgctcattgttggttggaaggttttttcaggcatcggtggtagaagaccatctgactcaaacatggacggcccccaaaccaaacataaacggaatccaggttttttgaggcgtcattcggccatcgttatcttagttatatctttagcagtgtctttctcatgggaagctttcaaaatgtatcgtgaacgcaccttcgggaaacaaatcactcagtttgccaaagaaattattaaaagtgcgccaagcacagatatggaaagctgggaccgtgttgcagcggattttaactcttatatgtacgaaaataaactttggaacacagaatactttttttttgatggttctagctgccatgtagcatttaggagaacccttctatggatttcctcaagaattgacggcgactataaaatagaatattttaggaaacacccttatattgaagaagcccttaaagtatattttgcagaagtggatagaaagtggaatttaaatacttctcagcaattgttaagcaatatttcggttggaaatatcaaacttcctggtcaatcatgtcgtttcaaattatttcatattttcaagaaagtcatgaaacagcgtttttctcaagtagcaactgttatattcttcgtcatgagtatccgttctccaagaaatctcggctttttttttactcttgccctttttgtcgtacttgtttgctcccaggaatggttctcctttgaaatgaatagatcttgttcaatgaaagtggaacatagaatgcaatttttgtcaactataatcagtgaacatcagaaatcggatgtgaattgttgggaccaaatcgcaaagaagatgaatgtatacttatttgagcagaaagtttccggctcagacgtgtttttcttagatggagcagattgtgagcgctttttcgaacgtaatttcctccgttatctaccctcaagaaagtcttcccatcctgacctaccaattgctgaattgttgccgtatatcagaaaagccgacattgcctgtgctggtaagcaattgatttaa

SEQ ID NO: 82121 - DNA, 342 bp, Saccharomyces pastorianus
atgtactcgtcagcatcccctataggagctggcgcgtccgttgtggaattagcaatatcgttcttcacgctgaataacaagtttagtctgttgcgctcttgctggatggaggacctgatattgcggaagctcttccagtggtcttgtaagatctccttgtggcgctgcagttgggaaagctttgaggcggagattgccgggttagaatcgcagatttgtgttaatgaatcgattacatcctgtctctggcctaagattccctccaactgcttgtctatcttcttttcttggccagtttgttctgaactgggatcctctagagtcgacctgcagcatgcaagc

SEQ ID NO: 82122 - DNA, 1341 bp, Saccharomyces pastorianus
atggatagaacgtggctattactgacgtggctgttgctactctgtggggtagttcaagggaaccaagaaagcataaatcaaaaatatcacgatgtctgttcagggatgtattccaaggaggatttcaatggaaaagttgacccctatatatcgtttacgttggaggaattgtcacttgctgatgaagacgatgatggcgagggggttagtgttgctgtgtttgatttgaaagattatgagcatattggtgtgcggttaccaaatggagaaattcagtatatttgcgatgactacgcattggatttgggcctctgtgaggattcgtcggaggggcaatttatcattcaagagacagccatcgatccgttcaccagtaaggaacataagctaacgagtcagattttgactttcactcaacaagaattgggcactaacgacaaggtatactcaattaacaaaactggttactattgtgtgaccacgtcatctttcatttcttccagttccaagtttaaggctactgtgaattttaggaacgcttacggtcaattggacgcttcagaggcgtacaagatgcctatttatgcctttttggccgtagcttatgccgtctgtacattagtgtactcttggctatgctggaagcatagacatgagttactgcctttacaaaggtacattttggtattttgtattttcctaacagctgatactattttcgtctggatgtactatattattgagaaccagaagggaaactccaacgtcgctcttcatgtctatatggttttcatatcgatctttagcgccggtaagatgactttcacgcttctcctcgccttgctgatatctcttggatatggtatagtatatccaaaactggaccgtacattgctaagaagatgtcaaatatttgcgatatttacgtttgcagtgtgcgttgcattcctggtccaaaaatattcccagaattctgagtctttatccaatttgattttgattactgctatccccttagtattatgtctattcgctttctattatttgacactgtcttcaatgaacaaaacaatgacttatttgagggaacaaaaccaagtggtgaaattaaacatgtacagaaaactgatcatattgtgttatatttcgttgtttatactcttcttaggcttactagtctccacttttgcatacgtcggtatggacactgttgacatgatagaacaatattggaaaacagaattcctcatcacagatacttggcctagtttcgtttacttcttggtcttcgtcattttcgcatccttctggagacctacaagtacatcatatttactagcg

SEQ ID NO: 82123 - DNA, 1218 bp, Saccharomyces pastorianus
atgcagagacacgtttttgcgaggaatttcagacgtctttccttattgaggaacccttcccttaccaaaaggtttcagtcgtcagcatccggtgcggccaacacccctaacaataacgatgaggtgatgctgttgcaacagaaacttttgtatgatgaaattagatcagaattgaagtctctatctcaggtaccagaagatgaaatattacctgagttgaaaaagtcattagagcaagacaaactctctgacaaagaacagcagctggaggctgaattgagtgactttttcagaaattatgctctgttgaacaagttgtttgacagcaagacattagatggacaatcttctacaacgacagcagcagccacgccaaccaagccttaccctaaccttataccttcggccaatgacaaaccatattcctctcaagaacttttcttgcgtcaactaaaccattccatgcgtaccgctaaattgggtgccactatttcgaaggtttactatcctcataaggacattttctatccgcccctcccagaaaacattactgttgagagcttaatgtctgctggtgttcacttgggccagtctacctcactttggaggtcttccacacaatcctacatatacggtgaatataaaggtattcacataatagatctaaaccaaactttgtcctatttgaagagagccgccaaggtagtagagggcgtttcggaatccggtggcattatcctatttctgggtacaagacaaggccagaaaagagggctcgaggaagctgctaagaagacacatggttattatgtgtctaccagatggatcccgggtactttgacgaattctacagaaatttcaggtatctgggagaagcaggaaatcgactctaatgacaatcccaccgaaagagcgttatcaccgaatgaaacatcaaagcaggttaagcctgacttgctggtcgtattaaatcccacagaaaatagaaacgctttgttagaagcaattaaatcaagggtcccaactatcgcaatcatcgatactgactccgaaccttctttggtgacctaccctatcccaggtaacgatgattcattgagatctgtcaatttcttactaggagtcttggcgagagctggccaaagaggcttgcaaaatcgcttggccagaaataacggaaaaatgacacttttattttcttttggcttgttaacctaa

SEQ ID NO: 82124 - DNA, 138 bp, Saccharomyces pastorianus
atgtccactgattctattgttaaagcctccaactggagattagtcgaagtcggccgtgtcgttttgatcaaaaagggtcaatccgcaggtaaattggctgctatcgttgaaattatcgaccaaaagaaggtatgttga

SEQ ID NO: 82125 - DNA, 1329 bp, Saccharomyces pastorianus
atggggtgtacagtgagtacgcaaacaataggagacgaaagtgatccttttctacagaacaaaagagccaatgatgtcatcgagcaatcgttgcagctggagaaacaacgtgacaagaatgaaataaaactgttactattaggtgccggtgagtcaggtaaatcaacggttttaaaacaattaaaattattacatcaaggcggtttctcccatcaagaaaggttacagtatgctcaagtgatatgggcagatgccatacaatcaatgaaaattttgattattcaggccagaaaactaggtattcaacttgactgtgatgatccgatcaacaataaagatttgtttgcatgtaagagaatactgctaaaggctaaagctttagattatatcaacgccagtgttgccggtggttctgattttctaaatgattatgtactgaagtactcagaaaggtatgaaactaggaggcgtgttcagagtaccggacgagcaaaagctgctttcgatgaagacggaaatatttctaatgtcaaaagtgacactgacagagatgctgaaacggtgacgcaaaatgaggatgttgatagaaacaacagtagtagaattaacctacaggatatttgcaaggacttgaaccaagaaggcgatgaccagatgtttgttagaaaaacatcaaaggaaattcaaggacaaaatagacgaaatcttattcacgaagacattgctaaggcaataaagcaactttggaataacgacaaaggtataaagcagtgctttgcacgttctaatgagtttcaattggagggctcagctgcatactactttgataacattgagaaatttgctagtccgaattatgtctgtacggatgaagacattttgaagggccgtataaagactacaggcattacagaaaccgaatttaacatcggctcgtccaaattcaaggttctcgacgctggtgggcagcgttctgaacgtaagaagtggattcattgtttcgaaggaattacagcagttttatttgttttagcaatgagtgaatacgaccagatgttgtttgaggatgaaagagtgaacagaatgcatgaatcaataatgctatttgacacgttattgaactctaagtggttcaaagatacaccgtttattttgtttttaaataaaattgatttgttcgaggaaaaggtaaaaagcatgcccataagaaagtactttcctgattaccagggacgtgtcggcgatgcagaagcgggtctaaaatattttgagaagatatttttgagcttggacctgcaggcatgcaagcttgcactgccgtcgtttaca

SEQ ID NO: 82126 - DNA, 144 bp, Saccharomyces pastorianus
atgcatcgtaaaaaaagaaaaaaagaaaagaaaagaaccgaaaaagacaatacaaccaaccttcctccactttttctttttccttgttctctctcgcttcctacgttacttgcgcctgtgcactacattcctttcccagattaa

SEQ ID NO: 82127 - DNA, 1500 bp, Saccharomyces pastorianus
atgggtgaagattttatgcacccaccgtttcaaacgtacccttcaaagaacagcgaagggaaaaaacatattgtcattgtaggtggcggtatcatcggttgctgtactgcttactacttgacccagcatccaagtttcagcccttcgacgcatcatattaccatcattgaatcgaggcgcattgctggaggggcttctggtaaagcaggtggcttacttgcatcttgggctttccctcatcaaatcgtacctttaagtttccagctacatcaggagttgagtgatgaatatgatggagaaaacaactgggactacagaagattgacaactgtgtccttagaagcagatgttcgcgaagaagtcattgaaaactacgaaagactgagcaagaaggcatataatctgaacgtccctcctccaaagaagagaccaggctacatatccaacaagtttaacatcggggactctaattcatctttgagttcttcgggctcttctttgaaaaacgactccgctagtaacgaggaagaaggatcagacgttcatgtttctagctcagtacccagtttacattctctaacaaatgagcgcatgaggagccacacaaatagcgcatctgatcttgactctgtaagtcccgcggagcaactgagagagactaatatccataatcctttgcctgctgatttagattggataagaagagaattggttaatgattggtcatcactaggtggtactgataccacagcgcagcttcatccctataaattcactcatttcatcttatcgaaggcaatggaaacaggtgctgtcgatcttctcctaggtaaggtagttgggctaaagtgtgacgagatggattgtgttcattctcttaagtaccttccatctgtcgtcaagaatcgcagaaatagcagagggcatgcagaaaattcagacattaagctgggtacaatcttcaacgatgagaacgcaaagcccattgaaatcaatgacatccagcagattgttttgagtatgggaccctggacttccaagattctaaaagattgtccaatttctggattgagagcccactctgtcaccattaagcctagtgaaaagacagtttcaccttacgctattcttgctgaactaaaagttaacgaccgtgaatttttctcccctgaaatgtatgctagaaaagatgaagtttatgtgtgcggcgaaggcgacactttggtcaatatacctgaaagttcggacgatgtggaggtagtttcggagaagtgtgatgaattgtaccattacgtatccaaattatcgccaactctatcaaagggccatctcttgcggaaacaagcctgttttttgccagttttaaacgttcctacaagttctggtcccttaattggtgagacaaatgtcaaggatctttatattgcaagtggacattcttgttggggtattaacaatgcgccagcaacaggtaaattaatggctgagattctcccttga

SEQ ID NO: 82128 - DNA, 1203 bp, Saccharomyces pastorianus
atgtcagacggcactcaaaaactatggggtgggagattcactggtgaaaccgatcctttgatgcatctttacaatgcctctcttccgtatgattataagatgtataaggcagatttagaaggaactaaagtatacacagcgggcttgcagaagttgggtcttctaacggagacagaattggcaaagatccatgaaggtttggctgaaatcaaaaaagaatgggacgctgacaaatttgtccgtcatccaaacgacgaggatatccatactgcgaatgaaagacgtcttggtgaactaattggccgcgatattgctggtaaagtccacaccggtagatcccgtaatgatcaagttgttaccgatttgagaatatactgtcgtgacattgtcaatgacaccctctttccagctctaaagggcttggttgaagttctaattaagagggccgaaggtgagatagatgtcttaatgccaggctacacacatttacaaagggcgcaacctattagatggtctcattggttgagctcttatgcaacatacttcaccgaagattacaagagactgggtcaaatactacacagattgaatcaatcaccactgggtgcaggcgctcttgctggtcatccttacggcattgatagagaatttttggctgaaggtttgggtttcaatagtgtaattggtaactccttggttgctgtttctgatagagatttcatcgtggagttgatgttttggggaactttgttcatgaaccatatttctcgttttgctgaagatttgattatatattgtacagcagaatttggtttcatacagttgagcgacgcctattcaacaggttcttctttaatgcctcagaagaagaatgcagactcgttagagttgttaagaggtaaatccggtagagtatttggtgatctgacaggattcttgatgagtttgaagggtatcccatctacttatgataaagacatgcaagaagacaaagagccattatttgattgcttaacaactgtagagcactccatgctgattgccacaggtgttatttctaccttaactgtaaataaggaaaagatggaagctgctctcacgatggatatgctagctaccgacttggcagattacttggtcagaaagggtgttccattcagagagactcatcacatatctggtgagtgtgtcgctactagctga

SEQ ID NO: 82129 - DNA, 312 bp, Saccharomyces pastorianus
atgcctgtttcggaagcgtttgccaagttgtgtgtgaatgagaagcctcctgctgaatctgccgttgcggtgaagtctttggtcttcaaaccaaagactccaaagtccgccacccctgttcctatcgttgtggtggctttgcaatctactactactccttctgcgttgattgccaacgctacgtccagtaaggatccaagattggctcgcgatgatttggtcaagcaagcgttccaatctgaatccgctagagctttcatcttgggggatttggctaacgccacttccaatttcactgcgattatcctttag

SEQ ID NO: 82130 - DNA, 675 bp, Saccharomyces pastorianus
atgagtgctcgcttatcatacggcgcaagccttgcgtcaatcccaagatgtttcgacttgaaatcttcgaagattactgtaatgggggatgatcattatggaaaaacttctctagttcgcaattggctaggtagttcatttcaaatatcagatgctaatcgttgtagggtttcggacctctaccacaagacaatccaatttgacactttcgtaaaatactatcgtacctttggcgtaaaaggacagttgccgaattatgtggatcttaaagctaaaaactctggcacaatttataaaagttgtggcaatttcctagaagagcgcctgatcaatgccaataaatcgactgctcaaagacgcaccagtattgatgttcaagttttcgataccaatcgaatggaggtttcgtacctttcggagctaactactcttcaaattaagcagtctgatgcaattatattatgtttcgattctactaatgacagctcttttgccagcttagagtcttatatttgtattattcaccacgtacgtttggaatgtgaattggttattccaattattatagcgtgtacgaaatgtgatcttgattcggaaagaacaattactcatgaaaaggttttaacatttatccaagagttgggtttctcgccaggcaattttagactattttga

SEQ ID NO: 82131 - DNA, 534 bp, Saccharomyces pastorianus
atgcgcagtatcaagtatccaaaaagtggtacgccaaatcctcatgcagagctatgggtttacagtatgaaagatggaacatcgttccatccaagaataagtggaaataaaaaagatggaagtctgttaattactgaagttacatgggtaggaaatggaaacgttttagttaaaactaccgatcgatcctcggacatattgactgtgtttttgatagatacaattgcaaagacttcaaacgtggtaaggaacgaaagttctaacggaggatggtgggagattactcataatactctgtttattccggcaaatgaaacatttgataggcctcataatggttatgttgatattcttccgattggtggttacaatcatctggcttatttcgaaaatagtaatagttcacactataaaacattgacagaggggaaatgggaagtggtgaatggcccacttgcctttgattcaatggaaaatcgtctttacttcatttctacagacctgcaggcacgcaagctggcactgccgtcgttt

SEQ ID NO: 82132 - DNA, 780 bp, Saccharomyces pastorianus
atggaaggtggcgaagaagaagttgagcgcattcctgatgaacttttcgatacaaaaaagaagcatttgttagataagctcataagggtcggaataatccttgtactcctgatatggggcactgttttgttgctaaaaagtatacctcaccattcaaacacaccagattatcaagaacccaactctaattacaccaatgatgggaaattaaaggtgtcgttttctgttgtaagaaacaatacatttcaacccaaatatcacgagctgcaatggattagtgacaataaaattgaaagcaacgatctaggtctttatgttacatttatgaacgatagttatgttgttaaatctgtctacgatgactcatataatagcgttttattagagggaaaaactttcattcataacggtcaaaacctcactgtggagtcaataactgcgtcgcccgacctgaagcggttattaattagaacaaatagcgtacaaaattggaggcactcaacgtttggttcttattttgtctacgataagagtagctcgtcctttgaggagattggaaacgaggtggctctagcaatatggtcccctaattctaatgatattgcatacgtccaagataacaatatatatatttattctgccatttccaaaaagaccatacgggctgtgaccaacgacggaagctcctttcttttaacggtaagccagattgggtttacgaggaagaagtttttgaagacgacaaggctgcgtggtggtcaccaactggtgattacctag

SEQ ID NO: 82133 - DNA, 630 bp, Saccharomyces pastorianus
atggaaggtggcgaagaagaaattgagcgcattcctgatgaacttttcgatacaaaaaagaagcatttgttagataagctcataagggtcggaataatccttgtactcctgatatggggcactgttttgttgctaaaaagtatacctcaccattcaagcacaccagattatcaagaacccaactctaattacaccaatgatgggaaattaaaggtgtcgttttctgttgtaagaaacaatacatttcaacccaaatatcacgagctgcaatggattagtgacaataaaattgaaagcaacgatctaggtctttatgttacatttatgaacgatagttacgttgttaaatctgtctacgatgactcatatagtagcgttttattagagggaaaaactttcattcataacggtcaaaacctcactgtggagtcaataactgcgtctcccgacctgaagcggttattaattagaacaaatagcgtacaaaattggaggcactcaacgtttggttcttattttgtctacgataagagtagctcgtcctttgaggagattggaaacgaggtggctctagcaatatggtcccctaattcgacctgcaggcatgcaagcttgcactgccgtcgttta

SEQ ID NO: 82134 - DNA, 102 bp, Saccharomyces pastorianus
atgagcttatctaacaaatgcttcttttttgtatcgaaaagttcatcaggaatgcgctcaacttcttcttcgccaccttccatgagtaatttggcttattga

SEQ ID NO: 82135 - DNA, 264 bp, Saccharomyces pastorianus
atgagcttatctaacaaatgcttcttttttgtatcgaaaagttcatcaggaatgcgctcaatttcttcttcgccaccttccatgagtaatttggcttattggtatgttgcaaaaatactctctgaaagaatacttcgaatttcggcacttcttatgtacactttgatggaagctttcttgataaggaattccccgtctatttcctacataccgccttcggcgttattaaaggagaaaaatctgggcgggagcatattattgtaa

SEQ ID NO: 82136 - DNA, 396 bp, Saccharomyces pastorianus
atgattttaaccacagctagattaaattgtagaccagttaccgttcctcgtctattaaatcgttcttttagtcaatctttcataattttgaagaaaaaaagttctacccctactgagaaagtcgaagaagatgaaattgacgtgaatgaactgctgaaaaaggcagaaactcaattcaaaaaaactttagaagttcaaaaacagaaaatgaatgagataaaacagggaaattttaatcctaaggtattcaatagtttagtgttcaaaaataacagaaagtttacagatattgctaccacatccttgaagggtaaaaatgcacttttaataacagttttcgaccccaaagatgtgaaaactgtgatcagtggggtgcttgctgcgaacctgaattaa

SEQ ID NO: 82137 - DNA, 231 bp, Saccharomyces pastorianus
atgaccattgatctagcttctatcgagaaattcctctgtgaactggctactgaaaaagtaggaccaatcatcaaatccaagtccggcactcaaaaggattatgacttgaagactggctccaggagcgttgatattgtaactgctatcgataaacaggtcgaaaagttaatttgggaatcggtaaaaacccaatatccactttcaagtttattggagaggaaagttatgtga

SEQ ID NO: 82138 - DNA, 126 bp, Saccharomyces pastorianus
atgactagaagcaaaaggagactgattctgaaatttaatatgatttcttttttttctgccgtttctcttctgcattattttcttccttcgagaaagagtataagtatgtttaaaaggtcttcgtaa

SEQ ID NO: 82139 - DNA, 435 bp, Saccharomyces pastorianus
atgaacattactactaacggtactactattctgacgaggagcagtattattattggtgttattattctggtagctagcggccttggtccactgcatcgcggtatccacagaggggttgaaagagaagttggatgcctctatcgacgtttgcataatcggatactgcgtttgaatcattacgtttttctgatttacaccatttccctgactaaaatggttggaaccttggccattgccgtgcgtggacatcccggacgcagagggcacagcgaccatcttaccaggtccatctggataaaaacagtccggcttgttatacttgacgcaattcccacatatcggttttgccctgtcgcacccgatctttctcttcctgcattgggtgcaagcaggcggcttcctcacttttctcacttgcatgtccatcatgattaa

SEQ ID NO: 82140 - DNA, 909 bp, Saccharomyces pastorianus
  modified_base (898)..(898): a, c, g, t, unknown, or other
atgaacgtgacaccgttggatgaattgcaatggaaatctccagaatggattcaagtttttggtttgagaactgagaatgttcttgattactttgcagaatcaccatttttcgataagacgtcgaataatcaggtaattaaaatgcaaaggcagttttcccagttaaatgatcctaatgctgccgtgaatatgacacaaaacataatgaccttaccagatgggaagaatggaaacttggaagaggagtttgcctatgtggatccggcaagaagacaaatccttttcaagtatcctatgtatatgcaactggaggaggaattaatgaagttagatggtactgaatacgtattgagcagcgtaagagagcctgacttctgggttatcaggaagcaaagacgaacaaacaattctggtgtgggaagcgctaagggaccagagattattccattgcaagactactacataattggtgcaaacgtttaccaatcgccaacaatttttaaaattgtgcaaagtaggctgatgtccacgagctaccatctaaatagcacattggagagcttgtatgacttgattgagtttcaaccttcccaaggagtacactataaagtacctacggacactagcacgactgcaacggctgccaccaacgggaacaacgctggagggggcagtaacaagagcagtgtacgacctaccggcggtgccaatatggcgactgttccctcaaccacaaatgtcaacatgacagtcaacactatgggtacaggaggacaaactatagacaacggtaccggtcgtactggcaacggtaacatgggtataactacagagatgttggacaaattaaacctgcaggcatgcaagcttgcactgcgtcgtttacaccccacccccnttttttttttt

SEQ ID NO: 82141 - DNA, 813 bp, Saccharomyces pastorianus
atgctgcaggtgactctagaggatcccgtcttatctagtcaccgaaccaaagcgtttgatagtttactttgtaggagactccctgtatcaaaggcaacgaagcatcttcaactgggagaacatttcctgttcttcccaccatcattcgaaaaattggatagagatggttattttaactatcaaaatcctggaagtttgctaggaaaccctgatttacgctaccgtagaaggatttggggacaaggagaacttgttcagtatttaccagtcaccttagaccaggagtatacatgccacgaatcaatcaaatacgtaaagaaaatacgagatgaacatgttgtctgtattgaaagaacccttttacaagaaaggcccgaaaatgtgtcgagtccaatggacatttgcttattcgagagaagggtattaatgtacaccaatgcacccgcaaacaagactgcagtcaagatgcccgtcggagaggagaactataagatcttaaaaaattttactgttactgatatggatattgtagcttatggtcagatgtctttgaatccgcaccgaattcattgggacaaagagtacagtcgctatgttgaaggctacgacgatattatcatgcaaggacccttctcggtccaattactacagaaatgcatccaaccttttctcgaacaaccaatcagacagttgcgataccgtaatttgaattatatatatccaaacactactttgagcatatgtcagtctttaagctcttcgagcggaatgtacacattcaaattagggacctccagaaaagcacttagtcta

SEQ ID NO: 82142 - DNA, 333 bp, Saccharomyces pastorianus
atggattcgtgtagcagcacacctttcgtgactggggtattattaccatctgcagtctttagtttcttgttctgtacacttgtcagttcgtcctttggcttggatgagtttaacttaacaacgtgcgggatacggggaattctcaagatgcaattcttgaagtttttagaaaacacactgatatttttgggttcggggaactttactgcacacattggtatcttggtgatgaaaaatgacctgtccaattctcgcatttggcgattcacgggtgggttgtatgggaacactcctgacatcttgcacgaactgatcaaactattaaatttttga

SEQ ID NO: 82143 - DNA, 960 bp, Saccharomyces pastorianus
atgaaaatcgcactgccagtatttcaaaaatttaatagtttgatcagttcgtgcaagatgtcaggagtgttcccatacaacccacccgtgaatcgccaaatgcgagaattggacaggtcatttttcatcaccaagataccaatgtgtgcagtaaagttccccgaacccaaaaatatcagtgtgttttctaaaaacttcaagaattgcatcttgagaattccccgtatcccgcacgttgttaagttaaactcatccaagccaaaggacgaactgacaagtgtacagaacaagaaactaaagactgcagatggtaataataccccagtcacgaaaggtgtgctgctacacgaatccatccacagcgtggaggatgcgtatggaaaattgcctgaggacgccttggcgtttcttaaggaaaacagtgcggaaattgtaccacacgaatacgtgctcgattatgatttctggaaagctgaggagattcttcgagccgtgctgcccgagcaattcctggaagaggttccaacgggttttacaatcacaggccacattgcccacttgaacttgcgcaccgagttcaaaccattcgactcgctcatcggacaagtcatccttgacaagaacaacaaaatcgaatgtgtcgtggacaaagtcagctccattgccacacagttcaggacttttcctatgaaagtcattgctgggaaaagcgatagtctagtggtagagcagaaggaatccaactgcactttcaaattcgactttagcaaggtgtactggaactcccgattgcacacagagcatgaaagactcgtcaaacagtacttccagcctggccaagtagtctgcgatgttttcgccggcgtggggccctttgctgtacctgcgggcaagaaggatgtcatcgttttggctaacgacttgaatcctgagagttacaaatacttgaaggagacatcg

SEQ ID NO: 82144 - DNA, 924 bp, Saccharomyces pastorianus
atggaagttcattcaggttcccatgccagtaaaaggatattggacacatttccggtacaaacatatgctgcgcagactgacaaggacgaggccgttgcattagaaatacagcggaggtcctacacattcacagaacgcggtggtggaagctctgagttgactgtggaggggacgtacaagctaggtgtttacaacgtttttttggaggcaaatacaggggcggcattggccacagatccatggtgtctgtttgttcagcttgcgctgtgtcaaaagaatggtctagtcttacccacgcactcgcaggaacaaaccccatcgcatacctgtaaccatgaaatgctcgttctgtcccgtctttctaaccccgatgaggccctacctattctagttgagggttacaagaagagaattataagatccaccgtggcaatcagcgaaattatgaggtctcggatacttgatgatgctgagcagttgatgtactatacgttgctggataccgtgctgtacgattgttggatcacgcaaatacttttctgtgcctctgatgcgcaattcatggaattgtactcttgccagaagttaagtgattcgatagtcactccattggacgtagaaaactctttattacagaagttgtccgcaaagagtttgaagatatccctaacaaagcggaacaagttccagttccgccatcgagaaatcgtcaagagtatgcaaggagtttatcacaaccatcacaactccgttaatcaagagcaggtcttgaacgttttgttcgagaatagcaagcaagttcttttaggtttaaaagatatgttgaaaagcgacgggcaacccacttacttacatctgaaaattgcagttacattcttttgtataacgaacgttaaggaacggggatcctctagagtcgacctg

SEQ ID NO: 82145 - DNA, 141 bp, Saccharomyces pastorianus
atggggccccatggaaaaaaaactgctcggggaaatatcttcttctccacagaaagagacgcaggccaggaaaaatgtggaatattatataaacattgtttttccattttgtacggattttttttggaagaaagcggataa

SEQ ID NO: 82146 - DNA, 381 bp, Saccharomyces pastorianus
atgaatattctttttctcatatatctgaaagacaaaagatcggcacggcaatgccctgcagcatttcttcctagtttttccgaatttccattacgtattggatcttgtgcgcatatttgtcagtccttcacggaaaaaaaaaaagagcactgggtcacttcggaaaaacttttgactcaatgcaacagtgtcataatcctttgcgctgtctctttgaagaaaaatcaggagtgcaagatatcgattaattccttggaagttatgatggttagtcttagtttaactctcttgaagaagggttttttcagttggccaacactctttagaggtaaaaaaaaaaaaaaaaaaaaaaaagagaattcttcatgtgatttaccatga

SEQ ID NO: 82147 - DNA, 1104 bp, Saccharomyces pastorianus
atggaattactgaattctcctgaggattaccattttttcttacaagctgtgatacctttacttctaaaccagctaaaggaagttcctatttcatatgatgcgcattcaccggaacaaaagttgagaaactctatgcttgatattttcaacaggtgtctcatgaaccaaacctttcaaccctacgcaatggaagtgctcgagtttttactttcagtactaccaaaggaaaacgaagaaaatgggatattatgtatgaaagtgctgacgacacttttcaaatcattcaaatcaatactacaggacaaactcgactccttcatacgaataattattcagatttataaaaatacaccaaaccttataaaccagacgttttatgaagccgggaaagcagaacggggtgatttggattcaccaaaagaaccacaggcagatgaacttctcgatgaattctccaaaaatgatgaagaaaaggactttccatcgaaacaatcatccacggagccaaggtttgaaaactctacctcatcaaacgggttgaggtcatctatgttttcctttaaaatcctttctgaatgccctattacaatggtcactttatattcgtcttacaagcagttgactagcacctcgcttccggaattcactcctcttattatgaatctattgaatatacaaattaaacaacaacaggaagcgagagaacaggcggaatcacggggagaacatttcacttctatatcgacggagattatcaacagaccggcttactgtgattttatattagcccagatcaaggccacgtctttcttggcttacgtattcattagaggatacgctcctgaatttttgcaggattatgtgaattttgttcctgatttaatcataaggcttttacaagactgcccttctgaactatcatctgctaggaaggaacttttgcatgccactagacacattctatctacaaactacaaaaagctctttttacccaaattggactatctgtttgacgaacgtatacttattggtaacggttttactatgcatgaaacattaaggcccctggcttatagtactgtggcagatccattcataatctag

SEQ ID NO: 82148 - DNA, 162 bp, Saccharomyces pastorianus
atgcaaactgtgttgaaatatttgttgcttattatgtgtggaagcttttgtgcttcggaggaattgcaaaaccagaccaatgttcctgcgatattcttctcttacaaactgtatgtagaacaagaaacattaatctttagtaactttcatttttcttactaa

SEQ ID NO: 82149 - DNA, 819 bp, Saccharomyces pastorianus
atgtttgtatttttggatagaactcccggtattttaaagtatcaagaggattatgatagggctgtgactttaccaagagacacctttattgaagcggctgagaaattcttaggtgtatgtaatgctgacacttatgtgtttattaatcaaccaggcctgaggaaattggacttcttggaatttgaaacagagtttgtttcgttacagagatatataagacggagttcaaccgcgattaagttcgaaaaggtagacctattgcctcaagatttatactatgatcttgcagagtttgtaaaggagtattgtaacgtagaccaggtgttgaacttacgaggtaacaatacagaagatttccagccctttattgatagcgaaaaaagagtgattataatagagtaccctaagttaccagaggacactaatgaacgtaaagaagcattccgccattatgacaagtatttgaggactatactggcgcagattccgtcgccagaacaaaatgtcatttacacctcgttaaacccaggaactacgctggctcacgagtcgatcatccctatccaaatatttccagatatctttgacataaaatccagagtgggtgaagtggaacaaaataatagagttttggatgtgcctcgtctgtcgtttaatgactatactccacgattttcagagccaccttcggagtatgtctcaatatttgattcacaattaattgagaataacagaggtttattacagctgattttcacaattttggttgggtatattcttattcagtttttttttcacaaaaaaaactattgtagatga

SEQ ID NO: 82150 - DNA, 96 bp, Saccharomyces pastorianus
atgtggatcatggatatgatagtagtcaactattcccagagctactattatagccccatctacgaagatgtgtttgttaacaaggattgggaatag

SEQ ID NO: 82151 - DNA, 2235 bp, Saccharomyces pastorianus
atgacctcgattcaggagcgaggcacaagcgctcatctgcattcgcttaaagaaggtgaggctagtgatcgttccagcgagatgcttcctaaacaaagaagtatcataggatcccacgtgcaacgtccaccgtctcaaacaactttaggaaggtcaagggctggaagcaatacaatgaataaagtttcaggcttagatattgctcgaagaccaagtgagaatttattatcaaacatgaactgtagcgacaacggcaatgggggaaatatgctaaattcattcgttaactcggctttaccaccgccaaaagtcaaccctgctcaaacaagacgtgaacgtcccgcttcaaatagctcaataggtaccaagactaccgaggtattttcatccacttctgcatcttcctccttgggagataccagcgatgagggagaaggcagtgatgccgacaaatctaaaataaatacttttcccagcatattgatggaaaaggctactcaaggtagaggcgctaatggaaatggaatgagaagcgcaagcaataataccattgtggaagcaactacggacggttccaaaatggcactgcaaaaaagcatgtcgtttgatgatacagccgcagagaaaactatgaataaatctagacattcttaccaagaacagttctcctcgaagaaaagccagtcatctttactgaacagcaagcaaagatcacgtgctaaatcgcaaacatgctcgtctacgggttataacaacagcagcattctgaaaacgtttggcataagctccaaaatttctaattcaagtgatcggatagaggcttcgtcattagaatttaacgttccatctcagaaacctttgaattgcaagccattaactccgtctcagaaatacagacttcgtaaagagcaatcggagatgaatttaagaaatacaatcaaaagaaaagagaaattttatgatagtcaagaacaaattcttgagttacaagagggagacgttgatgattcgttgatttggaacgttcctatggcatcattatctactaattcatttctagcgtctgctaagcccgatgatatgaataacttggctggcaagattgacttatcagaatataccggaggtttggtaaatgataactctgaaatttcttatacaaaacaaaatcataggtactctaacatctcttttgcgagtacaacatcaaacgcctcattattggactttaatgagatgcctacgtctccgattccaggtttgaacaaagtaactgattttcagttcattcaagacacaaccaagagtctagcctctgtttatttgcattcttccaataggctttcaagatctaagctgtccgaaagaacaaagtcttccgatttcttgccaattgaactaaaagaagctcaaaatcaaggcatggaagatttgatacttgtctcggagaacaaactagatgtggtcagccattcaagaccgagttggttaccacccaaggatcgccaggaaaaaaagcttcatgaaaggcaaattaacaaaagcatgagtgttgcttcccttgaccaactaggaaaaaataaagacagagaagaaaagttgattagagatgaaacaaataggcaaaaatatgtgttattattggacagaaatataactagaaactcctcgttacaaagcctaagtaaaatggtttgggacactccatttagtgacgaaactaggtcaacaatttacagcgaaattttacagagcaagactaggtttattaccaaaaactatattcaaccatttcatgagctacaggagcttttaacaaaaatgggagactttcctaaaaacaaggaaattgaaatatcgcagctaatcgaaacaagtttgaggcgaaaagtgagcggtttacatgatatatgtcctgatttgatgcttttattgaagataaaatctatctcatcacagggtatagtcaccggtgatgaactccttttccatcatttcttggtgagtgaatcatttcagaacctggggctaaacgagatttggaatattgttaatttagtacaaatgacgtgttttaatgatctttgtaaagaaaagttcgatgcaaaggttttagaacgtaagggtgtcgtagccggttatttatcgcaaaacgaggagttcaaggatgaatttaatacggagtgtataaactctacacctggtggacatcctagaacgggggatcctctagag

SEQ ID NO: 82152 - DNA, 225 bp, Saccharomyces pastorianus
atgaagacagaaggaataaaaagcccatcggcaaaataccatgatatggcgggctcccagagaatccctcacaagaacccgcacattcaaaaagtggctgttttgcaaagtaagcccaataaggaagatgcgctaaatttactaaaggaaatcgcacataaagtttcctatctaatgaaggaaaatcacttcaaagtgccaatgggtggagtttacccacgtgat

SEQ ID NO: 82153 - DNA, 771 bp, Saccharomyces pastorianus
  modified_base (742)..(742): a, c, g, t, unknown, or other
atgtccatgcccatagcaagtaccactctagcagttaacaacctcaccaatataaacggaaacgcaaattttaacgtacaagcaaacaaacaactccaccaccaggctgtcgactcgcccgcaagatcttcgatgaccgccacgaccgccgccaactccaacagcaactcttccagagatgactctactattgtcggcctacattacaagatcggcaaaaaaataggggaaggttcctttggtgtgttatttgaaggtactaatatgatcaatggcgtacccgtcgcgatcaaattcgagcccagaaaaacggaggcccctcaattaagagatgaatataaaacatataaaattctgaatggcactcccaatatcccctacgcgtactacttcggccaagaaggtttgcacaatatcttggtcattgatcttttgggtccctctttggaagatttatttgattggtgtggaagaaaattttctgtcaaaacggttgtgcaagttgctgtccaaatgattactttgattgaagacttgcacgcacatgacttgatataccgtgatatcaaaccagacaatttcttgattggaaggcccggccaacctgacgcaaacaacatccatttgatcgacttcggtatggctaaacagtatcgtgatccgaaaactaaacagcacatcccatatagagagaaaaaatcactcagcggcactgccagatatatgtccattaatactcacncttggaagagagcagtccagaagagatga

SEQ ID NO: 82154 - DNA, 201 bp, Saccharomyces pastorianus
atgagtagtgaactcatgttcaactatacttttagctggcctgctggtccaaaagatgttattttaacaggaacgtttgatgactggaggggcactttacccctcgtgaagaccgccaagggaaatttcgaaattactatgcccgtgaagctagccaacaaggatgatacgtttcagtttaagttattgtggatggcgtag

SEQ ID NO: 82155 - DNA, 603 bp, Saccharomyces pastorianus
atgacgaaatattacatggggtattcgataaagatgggaattatattaagacagttaatcgccacagaaaatgatcaacaagataatgaggaatggatgaatgatgtcataaatacagaggaggtaaatcgcttagaaaaggaacaaagtgtcaaaacgcagaattcgagacattatatggtccacgaagcattaaatcttttgaaattttttcttgttgatgagaatgaaacagtactggaatccttgggcaggttaaacaagctgcgaaaaattgccatttcaaaaaagaacaaatcattgaaatatgttattcacggaatcgagctattatctgatttgatcaatatactagaaaaaaagggattcagtgaaatatatgaatataaccgcttagaagttcaggatgctatagaagaggaatttttcgatgactcctccagaatagttaaccataaaacaaagttatggggcttcaagtggttgaacaaattagatgaatatcacggcctgtacacgaactatgaaatgtcttattggcaaaaatcctacttcaaaaacagtgttatagtaaaatttcacagcgaacccagatcgagatga

SEQ ID NO: 82156 - DNA, 459 bp, Saccharomyces pastorianus
atgaaatatacgcaatacccgaacagctcaaaactgaaaagaaatagtgatcgacgtgaacacgacgaaaagcttagcgatgagttacataatcaaagtacgatatatgaagatgaagagctaagcagggcagaatatgattctgattctgattctagcgttgaagattctacagataatgaaaatagtgggaaagaaatggatgaaaaatcctatgaaaaaaatgaagatcacgttgaagaccatagaaagcgaaagaaatctaaaattcagcttttggatattgcagagttcaagaaagaaaacttagccgacttagattatcagatcggtaattcagagagcaaggtagaaaaaggtgtgaatatagagccatttaatatagatgacgaaatattacatggggtattcgataaagatgggaattatattaagacagttaatcgccacagaaaatga

SEQ ID NO: 82157 - DNA, 477 bp, Saccharomyces pastorianus
  modified_base (454)..(454): a, c, g, t, unknown, or other
  modified_base (459)..(459): a, c, g, t, unknown, or other
  modified_base (464)..(464): a, c, g, t, unknown, or other
  modified_base (469)..(469): a, c, g, t, unknown, or other
atgaatgacgacagccaggataaaataatacatgatatacgtattcagctacgaaaggctgccacagaattatcacgatggaagctatacggctcctcaaagtgggcagcagaggcgctagcaggtcttgcagaagctattgatgttgatcaaacacactctttagccgatgaatcgccactaagaaataaacaaggtgtaccgaaacagatgtttgaaataccacaaaacgggtttggcctatcagagactgagtatgacctgtacctccttggttctacgttgtttgatgctaaagagtttgatcgatgcgttttttttctaaaagatgtcactaatccataccttaagtttttaaaattatacagtaaatttctatcgtgggataagaaaagccaggaaagtatggaaaatatcttaactacagggaagtttacggacctgcagcataacncgctnggcantgccngtcgttta

SEQ ID NO: 82158 - DNA, 222 bp, Saccharomyces pastorianus
  modified_base (159)..(159): a, c, g, t, unknown, or other
atgtcgatagcttggtctagcgttttcaaaagagaattacggcttgaaagatttttaccaagagtatattcgacgaaagttcctgataatgcaccaagagcggctgacaatgaacaatggctagaaaccctaagacctataactcacccagaacagaanaagtccgaccatgatgtcagttacacaagacacctaaatgttcctctgggcgaagtcacttct

SEQ ID NO: 82159 - DNA, 1119 bp, Saccharomyces pastorianus
atgaagaccacatataccgctgaagacggagaagcaggtgctgccaggcaactggatggcatgcgaggaagagatgttttaatacaagttcctgtgggtactgttgtaaaatggtgcttaccaccccaaaaagttcgagagctcgtggaaagagaaatgcgcaaagacaataatgctacattaaggtctatacttggctcaacagccgtcaacttaagcgtttcttctgattctcatcggaaaaaaatacaactatacagacatgaaatggcggagagttggctcttcaaggacaaggccaaggaataccatgagaataaggactggttcaaagatttacataagaaaatggaggcatacgaccactcgttagaacaatctgaactgtttaatgatcagtttccactggctggtcttgacttaaatcagccaatgacgaaaccagtatgtctgctgaaaggtggccaaggtggactcggtaacatgcactttttaacaaatttgattagaaatccaagattttccaaacccggcaggaatgggttggaacagcattttttattcgaattgaaaagcattgctgatcttggactcattggtttgcctaacgctggaaaatcaactatactaaacaaaatctcaaatgcaaaaccgaaaatagggcactggcaattcaccacactgagccctacgattggcacagtttccttgggttttgggcaagacgtcttcactgtggccgatatacctggaataatacagggagcatcattagacaaagggatgggtcttgagtttctaaggcatatagaacgttccaatggttgggtatttgtccttgacctctctaataaaaaccctttgaatgacttacaattactgatagaggaagttggtactttagagaaagtcaagaccaaaaacatactaattgtatgtaataaagtcgatattgatgccgagaaatccgaatcttttgccaagtacctacaggttgagaaattttccaaaagtcagggatgggactgtgttccgataagcgccctcagagaggaaaacatagatgtgttaaagaaaaagatgtttaagtgtgctcgtcagtctgaatttgacaagtag

SEQ ID NO: 82160 - DNA, 1299 bp, Saccharomyces pastorianus
atgacagtgaatgacaaaaaaagattggcaatcataggtggggggccaggagggttggcagctgcaagagttttctcgcaaagtcttccaaattttgaaatagaaatatttgtaaaggattacgatattggcggtgtctggcattatccagaacaaaaaagtgatgggagggtcatgtatgaccatttggaaaccaatatatcaaagaagttaatgcagtttagcggctttcccttcgaggaaaacgtccctttatatccgtctcgaagaaacatttgggaatacttgaaagcctattacaaaacgttcattgccaacaaagatgctatcagcatccatttcagcaccgaagttacctacttaaagaagaagaactctcaatgggagataacatctaaagacgaactaaggactactaaatcggattttgacttcgttattgttgcgtctggtcactacagtgtccctaaactaccaactaatatcgcaggtctcgatctatggttcgacaataagggcgcctttcattctaaggatttcaaaaactgcgagtttgcccgtgaaaaagtcgttattgtggtgggaaacggcagttccggccaagatattgccaaccaactaactaccgttgcaaagaaagtatataatagtaaaaaagagcctgcgagcaatcaactgaaggccaagttaatcgagactgtccaaacaatagacagtgccgattggaaaaatcgttcagtcactttatctgatggaagagtacttcagaatatagactacattattttcgccacaggctattattacagctttccatttatagagccctccgttagactggaagtgctaggtgagggtgttactggcgacaagcactcgtctgtcaatctgcacaatttgtgggagcacatgatctatgtaaaagatcctacgctgtcctttatcttgaccccgcagttggtcatcccgttcccgttgtcggaactacaggcggctattatggtcgaagtattctgtaaaagcttaccgataactacaactttcgactctaatgcctgcggaacgcacaacttcccaaagggaaaggacctggaatactatgcagaactacaggaactactgaatagcattccacgtagggtcggtcatttcgaaccagttgtatgggatgatagactgatcgatctaagaaacagtagttatacagacaaagaagaaagaaatgtgcttctagcggaacacgcacaagccctaaagaaaaaaaaagcaccatacttccttccggcgccacatacttaa

SEQ ID NO: 82161 - DNA, 396 bp, Saccharomyces pastorianus
atgattttctgtaatacatacaatactctcccgcaacaacctactgcagcaccttatgaacggcgtggcgtgtcgccttcagtgatatattcctccaatacattgagcccaataccataccaaaatatcgatccatactcttcgaggtcgggtcctgaatgcaatcactctaaggcgcctatcgccccaacaatgatgcccccagtacaccatatacttgtgcatgattaccgacaaccaaaaccagtcacagattctattaatcctccaaatgtaaacataaccacctccacaaccaacaagaacctagatggcatttatattttgccagctcctcgtatgaatcccccggctcaaacacaataccaaatgattcatgcgccagacagcatgtaa

SEQ ID NO: 82162 - DNA, 879 bp, Saccharomyces pastorianus
atgatggatatcagccctacctgttatgggtacatcgacgacgagcaagatctagcccttgttttccagggcgtattcaatggaaatttgagatgcatcgaacggaggccatatgatgcagaaaaggttgaattagtcaaccccggaaacatttttgttttcaacgaagagaaatccggcatcaaaagatggacagatggtttttcttggtctccttcaagaatttcaggcaaatttctcgtatatagagagtataataggctgggttccacgcacgatctaccgctgcataatgtacctgagtataatatcttcgagagggctcataggaagtatttttatactggactactgaaaaaaacattttctctaaaattcaatatggatcccaccgacagcactaagctggaaacatttcatcttattgcgtactatacggaaaaggatattcatcaaggaagtttgaggagaccttcagaaaatcctttcttccataaatttcgaccttcacagaaactattagatgctttacaaaaagttgctgtaggaaatggcagatctaacccgtctaaaaataatgagagaggcagaaccaaagctcataattataaaacgtgcaggtctttatcatcttctccgagctattgtgatctcttgagcaattataacaaccatcctggaaatattccagttaggaccgcagttcagttacctttaaccaccttcaataacgctcctcgagaaatgcaccaacagcagcaccgacaacagcaacaatatctcttacccatagatgaacagaataaattacctctcccgtatatgcagcaccagccacaaccaattggtgttacaatcctaactatcagcctggattga

SEQ ID NO: 82163 - DNA, 882 bp, Saccharomyces pastorianus
atgtggttacagagttcaaatatggaagaccctgatacaatattattaatacatgaaattgaaaaaatatttgaagaggatatccattttgaacaaaacgtgtcggattgcttaaaagaaatctcaaataatttcgaatatatctgcatgcgagaaacccaattgataaacgaaggaaacatactaaaaaataacttaaaaaagtacgcaaaagcaagggaacataaaggcgaaaagcatgaagatactgaagtcttgagggaaaaagtaatatcatcacaaaaatcgtttgatgttacaaagaggcactataagcatgcaatttcaataacgacaagacagctatttatgaatttggcgtttgagtactacgaaaattgttcagatatgaaggatatttcgagaaaatacctacaagaatctttgtccactttacaaactatcgacacattgagtttttcggaagaattagaaaaaattagaaagagaagatttgataagttttgggcaaaagctaatcctgatccaacaaacaatattcaaaagtttgttaatatgagaacaggagtagcaggttttaatgattccttaatgaatcacttgtacgggaaactaagtttcggggtagcgccagttgaagaagaattacaaaactcacagccggagcacactgatgtgcctgaaaatgtttggaatgaggttctctctgattataattcaatggatggtaatccaattacttcaaataaattcctttctgcgaaagaacttgagcccgatcaattagttgaacttctcgctcaggaaaaagaagagaaagaggcaaaaaatatcagctcctcaactgcagaagttccctcgatatcgcaacctgaaatatag

SEQ ID NO: 82164 - DNA, 684 bp, Saccharomyces pastorianus
atgaatcaaggttacacacagctttccgcaccggaactgaaggagactaaaacatcgaagctaaataaaatgaacaactttcgaagctctccgattgctgagataattaataagataccaccagattgcgggaagatacagaatacaacatttcctgagttcaatccagcgttaagaagacgacaacacgaacagtggcctgcatacgaaaaaccaataagagttactgacagtatgtcaccacagctttcttcaatcaattgtttgccaaatttgtatccccacggtacgctaccattaccaaacccttatttatcctatttaaatcacattgaaaaagttaattgccaagatgtcaagtttagtaactggagtgttttacataattcgaataatggatttgaaattccgacatatttcagtccacggacaacacaaaacatgccttgttccgaaaaagttgaaagctggcttgaaagattaccaatttttgtggggttcgacggttatttatttacaaactgctttgattatgaatatatgttggattgggaagagacagaatttacattcgagaaaacatcatgtatggagacggattattctaaagctttaaccgatactgatattatatatattcaagagaaaaaaagacctgcaggcatgcaagcgtgcactgccgtc

SEQ ID NO: 82165 - DNA, 630 bp, Saccharomyces pastorianus
atgatcctcacactggcctatttcatgctgggcactctactgctgggtgtgttcgcagaagacacggtgtcgcagattggtataaatgacagtttatggtatccgtacgacgaagcactggtgttgaagccgctgcccaacaatgatctgctactctcatttgcattccaactgcaatcggaaccgtttgacccggccgtatcatccatgtcatatgatgcgtatgagcactacacgactttcccacgggccatcccaccattgttggaatctactgccacgcgtcagtttcatttaagatttaccagaggattctgggatgccctgtcgtggggacagttgccacatgctggaaaagaggcaggtgcctcaggtgtggaattgtggtcgcaagtgcaggccatggatcaggaacaggcgttccataattggaaaaaactggccaattcattgagcggattgttttgttcttctttaaattttatcgacgagtcaaggacgacctttccccggcggtcatatgcttctgatataggagctccccttttcaatagcaccgagaaactgtacctgatgcgagcatcgttgccaatgaacccatctgtaccgagacttaacgccgttcataaa

SEQ ID NO: 82166 - DNA, 1014 bp, Saccharomyces pastorianus
atgaacgatgtcctttgtacactgtaccagccaaacgggttcaggccattccaggtgagtatatttaattgcgatctaccgcaattgagaaaacattggttgttctacgatatcttgaatgcgaacaatatcaatgggacctacgacaattcaatgttcactatccacaagaagttcagaaccgatgatcagcatcaggaccccacgctgttatggaagcaaatgacaaggtttagggtagacaatctcgacatcgatcacctgaacgccggtatcgaaggaccctttggatggatcaacgaaggtcgcgtgaacatgattggcgacgttcttttaccagatgacgatgccgcatctgactcgctgcaactgacagaaatcctcacagagatcggtgaccgcttaatcaaaaaagcgaaaaggtacacttcatcccttcctctggttgggccaggattctccccggccgttgatgaaattgacccgaacgactactttattatggacttttctttaagactatacaatgtcaaagccgaagtgcctctgttcacttctggcttaacatatatcaatagtgcattgataaggcctattgtcgggtacatcaattctcacaggacatacatcccaatcaaatgccgcattgtaaagaaaaagtctgattttgagggctcctggaccatatatgattcataccttatgcgggatctaagtgcggaagcgtacgatgccttcgccgactacgtcgctgacgatgaaaagaggacattacgcttgagaagggtgggcttatggtcacctgcaacttatactccaggtgattttgatgagtctcggtgctatcgcgtgaggaatacctactcctgtcactttctgtacatatgcatttacatagcatcgttctttctatcagtttatctaatttgtgacgcatctttcttctttctacactgcggaaaatcctatttgaaaaaaaatagacgaaaaatatcaggacccacccccttatga

SEQ ID NO: 82167 - DNA, 564 bp, Saccharomyces pastorianus
atgactgttgatctttggaaaggatgtcacacctctgttgtgatttgcgcctataatccactggtcttatcgactcatggaggtcaattgcttgctgccatttattccagattggaacagaagacgggtttctattcttcggttatttcttcatcacatggaaagcagctattcaatacccttatttcttctgtagcgattatcattgatttaatgaagaataaacctacgttatcgagagaagcactggttcccaaattaaaggctatcattccaacgttaattacattgtctcaatacgagcccgaacttgttctaccagtactacagaggatattgaagagaaacactacaacatttaagccatttaccaacaaattccgcactgtgttaatcaatttaatcatatcagactatgcttctttaggcactaagacgcagaggcttgtttgcgaaaactttgcttatttgcatttgctgaaaattcaggttagtgatactagcgatgacgaaactcaagcacatcacaaaatatatgctgattctaattggagaacaggataa

SEQ ID NO: 82168 - DNA, 135 bp, Saccharomyces pastorianus
atgtcagaggaatttatcgcagtttctactttggctagaaacctggaaattgccaagggtaatgagtttcataccattttggcgactttgagatcaccagtttatatcaatgaacagctgctaaatctgaattga

SEQ ID NO: 82169 - DNA, 537 bp, Saccharomyces pastorianus
atgttcgctggaacagtgattgatgaccaagtcagtgataaatttcataccgagcttatgtgtcttttcgatcaaggcaaagcagtcctcgttcgtaccgtaggttggccagaccttttcgtagttggcaatatcgtaacccatatcatcttgtggcgagtcgtaaaatggcgagatccaaatggcatcggcgccaagctccttgatgtactccaacttggaggcgatacccttcatatcaccccaaccatcgttgttggagtctttgaaacttgcgggataaatttgatagattgtggcctctttccaccacttgggttctgtttctggatgtgcagaagaaatagtcattgtacgttgctttcttttctttatgaaaaaactttcacttttgtttgtgtgtttggattggtgaatggaacatatattctactacagctaattcctcgagtgaagaagtcttccttacttatatatgtcttttacgtgcctatggacgtcttacgaatgatcgaaaataagaaaagaacaaagtaa

SEQ ID NO: 82170 - DNA, 3219 bp, Saccharomyces pastorianus
atgttcaatcgtttaaacaaattccaagctgctttagctttggccctttactctcaaagtgcattgggtcagtactatagcaatagcacctcaatttcaagcaacagctcatccacctctgtggtatcaagttcctctggatccgtttcgatcagtagttctattgctgagacatcctcgtccgctaccgatatcttaagttctatcacacaatcagcttcatccacttctggtgtctcaagctctgtcggtccatcctcttcatccgtttctgatgtctcaagctctgtcagtcaatcttcttcctcagcatctgatgtctcaagctctgtcggtccatcagcttcctctacttctgatgtctcaagctctgtcggtccatcagcttcctctacttctgatgtctcaagctctgtcagtcaatcagcttcctctacttctgatgtctcaagctctgtcggtccatcctcttcatccgtttctgatgtctcaagctctgtcagtcaatcagcttcctctacttctgatgtctcaagctctgtcggtccatcagcttcctcagcttctgatgtctcaagctctgtcagtcaatcttcttcctcagcttctgatgtctcaagctctgtcagtcaatcagcttcctctacttctgatgtctcaagctctgtcggtccatcctcttcatccgtttctgatgtctcaagctctgtcagccaatcagcctcatccgcttctgatagctcaagctcattccctcaatcagcttcctctacttctggtgtctcaagctctggcagccaatcagtctcatccgcttctggtagctcaagctcattccctcaatcagcttcatccacttctggtgtctcaagctctgtcggtccatcctcttcctctgttgtctcaagctcattccctcaatcagcttcatccgcttctactgcctccggttcttccacttccaattccttgagttccattacttcttcagcatctagtgcaagtgcaactgcttccaactccctttcttccagcgatggtactatctatctaccaactactacaatcagtggtgatctaactcttactggtaaagtaattgcaacagaaggtgttgtggtcgcagctggtgccaaattgactctacttgacggtgacaaatattccttctcagctgacctaaaagtctacggtgacttgcttgtgaaaaagtccaaagaaacctatccaggtaccgaattcgacatctccggtgaaaactttgacgtgaccggtaacttcaacgctgaagaatccgctgccacctctgcatccatctactccttcactccaagttcttttgacaacagtggtgacatttccttaagtctatcaaagtccaagaagggtgaagtcactttctctccatactccaattctggtgccttctctttctcgaacactattctcaacggtggttctgtttccggtctacaacgtagagacgacactgaaggttcagtaaacaacggtgaaattaacctagacaatggaggtacctatgttattgtcgaaccagtttctggaaaaggtacagtcaacatcatttccggtaacctatacttacactaccctgacacatttactggccaaactgttgtattcaagggtgaaggtgtccttgctgttgacccaaccgaaaccaatgccactcctattcctgttgttggctacactggtaagaaccaaattgccattaccgctgacatcactgctctttcttatgacggtactaccggtgttctaactgcaacccaaggtaacagacaattctcttttgctattggtaccggattctccagctctgacttcagcgtctctgaaggaatctttgcaggtgcttacgcttactacctaaactacaatggtgttgtcgctactagtgccgcttcttcatccactgcatctggtgcttccgcttccgttaccggttcaactgcttccacttcatttggtgcttctgtgacaggttcaacatctgtttacactacaacactagactatgtaaatgccacaagcacagtcgtagtttcttgttcagagacaactgactccaatggtaacgtctataccattaccgcaaccgttccatgctcatccactaccgccactattacttcttgtgatgaaactggatgtcacgttagtacatcaactggtgctgttgtaactgaaaccgtttcttccaaatcatacacaactgccactgtaacccactgtgacgataatggctgtaacaccaagactgtcacttctgaatgttccaaagaaacatcagcaactactgtttcttctcaatcgtacaccactgccaccgtcacccactgtgatgacaatggatgtaagaccaagactgtcacttctgaagctcctgaagctaccaccacaactactgtttcttctcaatcgtacaccactgccaccgtcacccactgtgatgacaatggatgtaagaccaagactgtcacttctgaagctcctgaagctaccaccacaactactgtttcttctcaatcgtacaccactgccaccgtcacccactgtgatgacaatggatgtaagaccaagactgtcacttctgaagctcctgaagctaccaccacaactactgtttctccaaagacatacactaccgctactgttactcagtgcgatgacaatggatgtaagaccaagactgtcacttctgaagctcctgaagctaccaccacaactactgtttctccaaagacatacactaccgctactgttactcagtgcgatgacaatggatgtagcaccaagactgtcacttctgaagctcctaaagaaacttcagaaacttcagaaaccagtgctgcccctaagacatacactactgccactgttactcaatgtgatgacaatggttgtaacgtcaagataatcacctctcaaatacctgaagctacttcaaccgtcaccgcaactagtgcttctccaaagtcatacactactgtcacttctgagggttctaaagcaacctcattgactactgccatttccaaggcttctagtgcaatttccacatactccaaatctgcagctccaataaagacctctactggtatcattgtccagtccgagggtattgccgcaggtttgaatgccaatactttgaatgcattggtcggtattttcgttcttgctttctttaactaa

SEQ ID NO: 82171 - DNA, 1704 bp, Saccharomyces pastorianus
atggcaggagcaacatcaagtataattcgggaaaatgattttgaggacgagcttgcggagagtatgcagtcatataatagagaaactgcagacaaattggctttgactaggaccgagagtgtaaagccagaaccggagataaccgctccgcctcactcacgcttttcccgttctttcaagacagtgttaatagctcagtgcgctttcactgggtttttctccacaatagcaggtgccatctactatccagttctgagcgttatagaaagaaaattcgatattgacgaggaattggtgaacgtcactgttgtagtatattttgtatttcagggtcttgcccccacattcatgggcgggtttgccgattcactaggcaggagaccggtggtgcttgtcgcaatcgtcatttattttggtgcctgcatcggtcttgcttgtgctcaaacgtatgctcagatcattgtgctaagatgtctacaagccgccggtatttcacccgtgattgcgattaacagcggaataatgggagatgttactactagagccgagcgcggcgggtacgttggatatgttgctggatttcaagttctaggttctgcgttcggagcccttatcggtgccggattatcatctagatggggatggagagccatcttttggttcttagcaattggatctggcatttgcttcctagcctcgtttttaattttgccagaaacaaagaggaacatatcggggaatggttctgtcaccccaaaatcatacttaaatagagctcccattcttgttttgccaacagtaagaaaatcattgcatttggataatccagattacgaaacattggaactgcccacgcaactaaatttactggcgcccttcaagattttgaaagcttatgaaatttgtatacttatgctagtcgctggattacaatttgccatgtatactacgcaccttacggcgttatccacagctttgagtaaacaatatcacttgactgttgcaaaggtaggattatgctaccttccctccggtatctgcacattatgtagtattgtcattgctggaagatatttgaattggaattacaggcgcagattaaaatattatcaaaattggttgggtaagaagagatcaaagcttttagaagaacacgacaacgaccttaatttggtgcaacgtatcatagaaaatgatcccaaatacacctttaatatcttcaaggcgaggttgcaacccgcatttgttaccttgcttttaagcagtagcggattttgtgcgtacggatggtgcattactgtcaaagcccctttagcggccgttctttgcatgagtggatttgcgtcgctgttttccaattgcattttgactttttcaacaactctaatagttgatctttttcccacgaagacatctacggctacaggatgtttaaaccttttcagatgcattctgtctgctgtgtttatagctgcattgagtaaaatggtagaaaaaatgaaattcggaggtgtttttacatttttgggggctttaacctcctcgtcatcgatcctcttatttattctcttgagaaaaggtaaagaattagcctttaagaggaaaaagcaagaactgggagtaaaccaagaagtaaagcttcttgaatcaaaggaaaatgttccttttgatcgctccactaccgagaaagaggaattggtgtga

SEQ ID NO: 82172 - DNA, 240 bp, Saccharomyces pastorianus
atgccttctaacttgatatcactgctggtcaagcctatttttattctggtttctcaggcaaacccaaatgatattgtcaaatttttcactgagtttgccaagcatatttccatggacttttgtatggaaaccgtgatgagaaatccgggatttctcatcgaggaaagaagtgactcgagcctcttaaggcttagattaaacttttttctttttatcgctgcgtataagcaatacacctaa

SEQ ID NO: 82173 - DNA, 96 bp, Saccharomyces pastorianus
atgaacaaaattataaaagagtctaccaacttcgccagatatctacgaactagcggtgtactcaacagtcttcggaccacatctaagtttgtttaa

SEQ ID NO: 82174 - DNA, 417 bp, Saccharomyces pastorianus
atgaccaaagtagatttttggccaactcttaaggacgcatacgaaccactctatccgcagcagctggagattctgcgccagcaagtcgtctccgagggggggcccaccgctaccatacagtcaaggtttaactacgcatgggggctgatcaaatccactgacgtgaatgacgaaaggcttggtgtgaaaatcctcacagacatttacaaagaggccgagtcccgtagacgagaatgcctatattatctgaccataggttgctacaaactcggtgaatactctatggcgaagagatatgtagacactttatttgagcatgagcgtaataacaagcaggtgggcgctttgaagagtatggtagaggataagatccagaaggaacactcaagggtgttgtcgtcgctggaggcgtactag

SEQ ID NO: 82175 - DNA, 1356 bp, Saccharomyces pastorianus
atgcctaaccctccttcatttaagtcacataagcagaatttattcaactccaacaataatcagcacgcaaacagtgtagattcctttgacttacatctcgacgattcatttgacgctgctttagacagtttacaaattaataataacccagaactacttagtaagcataacactgttggagatagggaaagttttgaaatgagaacagtagatgatttagacaatttttctaaccattcttcggattcgcatcgtaagtcttcaaacacagatacccatcctttgatgtatgataatcgcctctcgcaggatgataatttcaaatttactaatattgcttcgtcaccaccgtcgtcttcaaacaatatcttttcaaaagccctctcatatttaaaagtatctaacacaaaaaactggtccaagtttggttcacccatagaactcagtgatcaacacatcgaaagagaaatacatccagacacgactcctgtgtacgataggaatagatacgtttcgaatgaactatctaatgccaaatataatgccgttacttttgtgccaaccctattatatgaacagttcaaattcttttacaatttatactttttagtagttgcattatcgcaggccgttcctgcactaagaatagggtatttatcatcgtatattgtacctttagcatttgtgctgacagtaaccatggcaaaggaagctatagatgatattcagagaaggagacgtgatagagagtcaaacaatgaactgtatcatgtaataacgagaaatcgttccataccaagcaaagacttaaaagttggagatctcataaaagtccataaaggtgatcgtattcccgctgatttggttcttttacaatcaagtgaaccatcaggggagtcatttatcaaaactgaccaactagatggggagactgactggaaactacgtgttgcctgtcccttgacccaaaatctatcggaaaatgacttaattaacagaattagtataacagcctctgctcctgagaaatctattcataaatttctaggtaaagttacctataaggattccacttcaaaccctttgtctgtagataatactctatgggcgaatactgttctagcttccagtggattttgtattgcttgtgtcgtctacactggcagagatactaggcaagctatgaatacaactacagctaaggttaaaactggcttattagagctagaaattaacagtatttccaagattctttgtgcatgtgtttttgccctgtcaattcttttagttgcatttgccggtttccacaatgacgactggtacattgacattttaaggtatctgatatgtttctac

SEQ ID NO: 82176 - DNA, 363 bp, Saccharomyces pastorianus
  modified_base (337)..(337): a, c, g, t, unknown, or other
atgaacatgttgccaatgttcacctattcagggttaccggtgacgctcctctgccttatccaattgcgcaggtcggtgatgattctatggatagtagtgatttgggttcaaaagccttttcatcacttaacgacatacctatcacgccttcacatgacaataatcctcacagttttgccgaacctatgcccgcttaccgtgggactttcagaagaaggtcctccgtgtttgagaacatttcgagatccattccttgggcacatgcaactgatttccaaagaccaactgtcaataccgtggatgataggttctcccgagaacagtatagtgaaagtgncaatgtggaaagatattaatgtgtaa

SEQ ID NO: 82177 - DNA, 2712 bp, Saccharomyces pastorianus
  modified_base (2693)..(2693): a, c, g, t, unknown, or other
atgaagtttgctgaccatctaaccgagtctgccatcccggaatggagggacaaatatatcgattataaggtcggcaagaagaagcttcgccgctacaaggagaagctggatgccgaagaagagcaatccagctcctaccggagctggatgccctctgtgtcggtataccagactgcatttcagcagagagagcccggcaaaagtcgcagcgacggagactatcgctccggacctgcgttcaagaaggactattctgctttgcagagggagttcgttgctgacttcattgaagactggttgatctcgttccagttgagtaagtgtaacgagttttacctttggttgctaaaggagtgcgacaagaagtttgaggttttacagtcgcaactgcactattactcgctgcagaagaattatgaacgcgacaacttgaaccggtctagttcgaatgttgacatgtccacgagtctatatgcggcagggcttgctggtcgttctgactccagggtcaatagcatcgacagcgataaccggtccgttatgtatgggtcaatgccctgcaccaaagaggccaagaagccgcgtttgtcgctgctagcgtactgtcagaaagttcttaaggacaataggctgctgccatcgtggcccaaacgtggattttctctgctacaggacttgagacaggatgcgtcctcaagaggccgcgagacgtttgcttttggcgcttcttttctggagactatgacgacaacccaggctagaaacttgttaagcaacgctataatcgagtactatctgtacttgcaattggtcaaatcgttccgggatatcaacgtcaccgggttccgtaaaatggtcaagaaattcgacaaaacgtgtcacacaagagaactgaccacgttcatgtcgtacgccaggacccactacacccttttcaagcacgcggatgccaacgtgcagttggtggcacagaagatgcaacaaataaccagttcgcaaccaacacccacttcggagctctcttccgcccaaagagacaaagagcccatcacttggttggaaacgcagatcaccgagtggttcaccactgcgttgaccaattcacccaaggacaggaagcacaatactcataagttgaagaaattgaccattcagtactctatctccgaacaaatggttcatagaaacaacagatcgattgtgcagatgctggttgtcgggctgggcataggtgtgtcaatgactttgatcacttacactttgtatttgggcattagctctgaagaaacgtcatttacgcacaagattctgttcccactgtggggtggttggtacatggttttgttgatcgcgtttctctttcttgttaattgttttatctggcatagaaccgggattaattatagatttattatgctgggtgagattcaatccaagaatggtacgcaatttttcaacaatgattttgccacgagtaaaattccgctcaagttgtatttcttgacattcttcatagtaccttgtgcggtctgttccatgttaagtttcgctttggagaagctcacacccttaggctttttatatattggtattgtgtctttcttatttttatgtccctctggtctaattccatattgggacaaagttgtacacactagaaaatggctggtggttactcttattagactgatgatgtctggttttttccctgttgagtttggtgatttctttttgggagatattatttgttcgttgacgtattctattgccgatattgccatgttcttctgtgtttactctcatacgcccaacaatctatgtggctcttcacattccagagcaatgggtgttttatcatgtttaccaagttattggagattcatgcaatgtttacgaagatttgctgattccggtgattggttccctcatcttttgaacgcggcgaaatacactttgggtatagcgtataatgccacactttgtgcttacagattgtcaggccgttctgaacaaaggagaaccccttttatagtgtgcgctacgttgaattcgatccttacttccgcctgggatttagttatggattggtccgttgctcacaatactacttcttacaattggttgctaagagacgacttgtatttagctggtaaaaaaaattgggaaaacggcagttattcattcagtaggaagttagtttattactttgctatgatttgggatatcctcattagatttgagtggattgtatacgcaattgctcctcaaacaattcagcagagtgctgtgacgtcgtttatattggcccttttggaagttttaagaagattcgtttggatcatcttcagagtcgaaaatgaacatgttgccaatgttcacctattcagggttaccggtgacgctcctctgccttatccaattgcgcaggtcggtgatgattctatggatagtagtgatttgggttcaaaagccttttcatcacttaacgacatacctatcacgccttcacatgacaataatcctcacagttttgccgaacctatgcccgcttaccgtgggactttcagaagaaggtcctccgtgtttgagaacatttcgagatccattccttgggcacatgcaactgatttccaaagaccaactgtcaataccgtggatgataggttctcccgagaacagtatagtgaaagtgncaatgtggaaagatattaa

SEQ ID NO: 82178 - DNA, 234 bp, Saccharomyces pastorianus
atgatgtggcatttagtagtccaactaggggtattccaagaaccagcgcgacaagcaagggatcaaatgcacaacttctctctaattatggagatgaaaataaccagtctcaagattctgtttgggatgagggcagagataatcctatactcttggaagatgaagacccttgaaagcactcgcacgcatagttttatattttttattcttttcctctttatttttattttttaa

SEQ ID NO: 82179 - DNA, 141 bp, Saccharomyces pastorianus
atggatgttgattctgacgttaatgtctccaggttaagagatgaactgcataaggtggcaaacgaggaaacagataccgccactttcaatgatgatgcgccatccggcgctacgtccgtattttcgtggagaagctactga

SEQ ID NO: 82180 - DNA, 558 bp, Saccharomyces pastorianus
atgcatgaatcctgtctgttggaatgggtagcttcaaaaaatatagacatttcaaaaccaggcgcggatgttaaatgtgacatctgtcactatcccattcaattcaaaacgatatatgcggaaaacatgcccgaaaagatacctttttctttactactatccaagagcatcttgacatttttcgaaaaagctcgtttggctttaacgattggtttggccgctgtactatatattatcggtgttcctttggtatggaacatgtttggaaaattatacaccatgatgctagatggatcatccccttatcctggtgatttcctaaagagtttgatttatggttatgatcagtcagcaactccagaattaaccacgagagcaattttttaccaacttttacaaaaccattcgtttacgtctttacaatttattatgatagtgatactacatatagcattgtactttcaatacgatatgatagtaagagaggatgttttcagtaaaatggttttccacaagatgtccaagattatctcccaaggacttgaatcgggatcctct

SEQ ID NO: 82181 - DNA, 519 bp, Saccharomyces pastorianus
atgagtgaagaaggtcctcaagttaaaataagagaagctagtaaagataacgtcgactttatactatctaatgtggatttggctatggccaattctctccgtagagtcatgatagcagagattcccactttagccattgattcagtcgaagtcgaaacaaatactacggttttggccgatgaatttattgcacacagattaggtttaatacctctacaaagtatggatatcgaacaactagaatacagtcgtgattgtttttgtgaggaccactgtgataagtgttcagtggtgttaacattgcaagcgttcggcgaaagcgaaagtactacaaacgtctacagcaaggacttggtaattgtgtctaatctcatgggccgtaatattgggcatcctattatacaagataaagaaggtaacggtgttcttatttgtaaattgagaaaaggtcaagaattgaaactgacatgcattgcgataaagggtatagccataagagcacagccaagtgggtccagc

SEQ ID NO: 82182 - DNA, 357 bp, Saccharomyces pastorianus
atgtttgagcttattccaaggatcatactcgaactctatggctgctgctggaccccacttggcgtgctctttggctataccctttttcgcaacgcatgtcagtttcaattcttgaccttttctcaatttacaaataagaacaccgttaccttctttatcttgtataataggatgcccaatattacggcccatgagattagacacaattaccaagtccttgctgtagacgttgtagtatttcactttcgcgctttcagccgaacgcttgcaaatgggttaacaaccaacttggaacactttattcacaagtgggtccctcaacaaaaaaacaaatccaacgaactgggtatttcctaa

SEQ ID NO: 82183 - DNA, 876 bp, Saccharomyces pastorianus
  modified_base (862)..(862): a, c, g, t, unknown, or other
atgacccttgatgatgacgactatataaaacaaatggagcttcaaagaaaagcttttgaaagtcagttcggatctttagagtccatggggttcgaagataaaacaaaaaatatacgaactgaagtagataccagagacagttcaggtgatgaaattgacaattccgatcatggtagtgatttcaaggatggtactatagaaagttctaattcttctgatgaagatagcggtaacgaaaccgcggaagaaaataatcaagattccaaaccgaaaactcgaccaaaggtcattagattcaacgggcctagtgacgtttatgttcctccaagtaagaagacacagaaacttttgagaagcggcaaaactttaactcaaataaacaaaaaattggagagtactgaagccaaggaagaaaaagaagatgagactttggaggcggaaaatttacaaaacgacctggagttgcagcaatttctgagagagtctcacttattgagcgctttcaataacggtggaagtggttctacaaacagtggtgtatcgttgactctacagagtatgggtggtggaaatgatgatggcatagtataccaggatgatcaagttattgggaaggccagatcgcgtacactcgaaatgagactgaatagactctcaagggtgaatggtcatcaggacaaaataaataagctggaaaaagtacccatgcatattagaagaggaatgatcgacaagcacgtcaagagaatcaaaaaatacgaacaagaagctgcagaaggtggaattgttctatccaaagtgaaaaagggacaattcagaaaaattgaatctacatacaagaaagatatcgagaggcgtatcngggggaagcattaa

SEQ ID NO: 82184 - DNA, 156 bp, Saccharomyces pastorianus
atgcataaaggggcgtcacagtggaaaataacgacaggagaatctcggtgtgtaagttggaatgtgtattgcaccacttccatgattgggctttttcctggcgcaaaatgttgcttttcaacattttcttattacgcaagagagaatcgccaatag

SEQ ID NO: 82185 - DNA, 297 bp, Saccharomyces pastorianus
atgcataaaggggcgtcacagtggaaaataacgacaggagaatctcggtgtgtaagttggaatgtgtattgcaccacttccatgattgggcttttttcctggcgcaaaatgttgctttttcaacatttttcttatacgcagagagagaatcgtcagataggtggtaaaacttggagcctaattagctcattatttcatttgaacgagacattggcttctgccctacatcacccatacgagacattggccttatacgaggcgtacttcgccttgcgggaaaaaaaatttcctttgtaa

SEQ ID NO: 82186 - DNA, 2229 bp, Saccharomyces pastorianus
atgaaaatgaatctgaaaaggctcgtagttaccttcttctcatgcatcaccttcctgctgaaattcactatagccgccgctgaaccaccagagggctttccagagcccttaaatccaacaaacttcaaagaagagctatctaaggggctgcatattattgacttctatagtccatactgcccgcactgcaaacatttagcatctgtttggatggaaacatgggaggagtttaaagaggagagcaaaacactgaacataacattttcacaggttaactgcatcgagagcgccgatttgtgtagagatgaaaatattgaatacttccctgaaattagactttataacccctcaggatacatcaaatcgttcactgaaacaccgaggaccaaagaatcattaattgcatttgcacgcagggagtctatggacccaaataacctcgatactgatctggattctgctataagtgagagccagtatctcgaaggctttgattttctcgagctgatcgctggtaaggcgactaggccacatttggtttccttctggccaacaaaagatatgaaaaatagcgatgattcactagaattcaaaaactgtgacaaatgccatgaattccaaaggacttggaagatcatttcaagacagttagccgtggatgatatcaacacgggccacgttaattgcgaatctaatccaacaatctgtgaagaactgggctttggcgacttggtgaaaataaccaaccacagagccgatagagaacccaaggtagcattagtcctacccaataaaacctcaaataatttgttcgactatcccaatggctactcagcgaagtcagatggctatgtagattttgccaggaggacttttacaaacagtaaatttcccaatataacagaaggggagctcgaaaaaaaagcaaacagagacattgattttctgcaagaaaggggacgagtaactaataatgatatccatttagttttttcatatgaccccgaaactgttgttattgaagattttgacattttggagtatttaatcgagcctttgtcaaaaattccaaacatatatttgcaccaaattgacaagaatctaataaatttgtcacgtaatctttttggaagaatgtatgaaaagatcaactacgacgccagccaaactcaaaaggtttttaacaaagaatactttactatgaatacggttacgcaactcccaacttttttcatgtttaaagatggtgatcccatatcctatgttttccccggatactccacaacagaaatgagaaatattgatgccattatggattgggtaaaaaagtattctaatcccttagttaccgaagttgactcttctaatttgaaaaaattaatttccttccaaaccaagagctacagtgatttagcaattcagttaataagtagcactgaccacaaacatatcaaaggaagcaacaagcttattaaaaacttgctcctcgcaagttgggagtatgaacatattcggatggaaaataacttcgaagaaattaatgagagaagggcaaggaaagcagacgggatcaagaaattaaaggaaaaaaaggctccggctaacaaaattgttgataaaatgcgtgaagagattccccatatggatcaaaaaaaattgttattaggatatttagatatttcaaaggagaagaatttttttagaaaatatggtattactggagaatataaaattggtgatgtgattatcattgataaatcaaataattactactacaataaagataattttggcaactccttgacttctaacaaccctcaattgctgagagaagcattcgtgtccttaaatattccatcaaaagctctatacagctctaagttgaaggggagattgataaattctccattccataatgtcctcagtttcctagacataatccacgggaacggcatgcccggttacttaattgttattgttttgtttatcgcaatactcaaaggtccatctatttacaaaagatacaaagtaaggaaacactatagggcgaaaaggaacgctgtcggtatcctaggaaatatggagaaaaaaaaaatcaagattaaacgcttaagtagttataaaaataaaagaatgctgatatcttatgatgctatcataactatcctttatttcacgtatcaatatctacaatcatctaacaaacgtcgctcttattttgtcacttag

SEQ ID NO: 82187 - DNA, 726 bp, Saccharomyces pastorianus
atgtctccgaagaatataacaaggtcggtgatcccggctatagatttgtattgccgcaaagcaaattttaaaactctaaaatcattgtcgatgatcctaggtagtaaaaaagaatggtatgacactaaaaagacgccattgagaaactttttggtctctcgatgtggcattttcgagcagttgaggggtcgtctcgttgaagatggcaaagtcaacttgtttagtgttttcctgacaaacgactcattttcttattgcaagatgaccgttgatgataagtttaacactagcttggtcgattggcaaaaaataccctttgacagtacatttgcaactgaaagaagacagaatattagtttactacctgttgatacactttttgcaactgaaaagatcatatcgattcttggtgtatctcctaatatgacgaatcttgtttctatagaaagagagcgatcagatctggtggattttaattgtaaactgcaatcaaacatcctagaacacctactatacgcgaaatgccaaggagtgtacgtaacttctaccaatgaaaaagctcgtttgcttgcagctgtctgcaatcctgaattcattgacaccttctggtgcgaattgactcccataagagtctcattaaaggaaaacccttccatttctgtacctcgagaatatcagatgtacgatccggtggtacgtgccactataaaggaggttgtcacaagc

SEQ ID NO: 82188 - DNA, 258 bp, Saccharomyces pastorianus
atgaatctaagatttgaattgcagaaactattgaacgtttgctttttgtttgcatctgcttacatgttctggcaaggcttagccattgctactaatagcgcttctccgatcgtggtggtgctttcaggctccatggaaccagctttccaaaggggtgatatccttttcctatggaatagaaatactttcaaccaagtaggtgatgtcgtggtgtatgaggtcgaagggaaacaaatccccattgtgcatagagtttga

SEQ ID NO: 82189 - DNA, 777 bp, Saccharomyces pastorianus
atgggatcttgcaatcaatgtagattaaagaaaacaaagtgcaactattttcccgacctaggcaactgcctcgaatgtgaaacgtcaagaactaaatgcaccttcagtattgctccaaattatttgaaaagaacgtcctctggggcaaacaataacatgccaacctcttcaaactccaaacgaatgaaaaattttgaagactattcgaatcgcttacccagtagcatgctctatagacatcaacagcagcagcagcagcaacagcaacaacagcgtatacaataccccagatcttcttttttcgtcggtccggcctcagttttcgatttgaacttgaccaagcatgtaagactagataatgttgaccaaatacagctatcaaaaactttatcattaagaaaggtgtctcctaccgcacagtttattcttcaggacgattttgacacgacccttcatagtaagcaagaatacgaagttgatttggtcgaaaatctggtacatccgcacggtcaccttttagtagagattttcttcaaattgattcatccttttcttccaattttacacgaacgtgtatttttggaaaaatattctagatcttatagagaactcactgcgcctttactcgcatccatttactcactggcatcacaatattgggattttcatcctgcactttgggggttcctaagaccgatgcactgcccactaaacaataccgatgggaccatttatgctcgattggaaggcaaattgagcttatacaacaggccttga

SEQ ID NO: 82190 - DNA, 390 bp, Saccharomyces pastorianus
atgactatttcttctgcacatccagaaacagaacccaagtggtggaaagaggccacaatctctcaaatttatcccgcaagtttcaaagactccaacaacgatggttggagtgatatgaagggtatcgcctccaagttggagtacatcaaggagcttggcgccgatgccatttggatctcgccattttacgactcgccacaagatgatatgggttacgatattgccaactacgaaaaggtctggccaacctacggtacgaacgaggactgctttgccttgatcgaaaagacacataagctcgatatgaatttatcactgacttggtcatcaatcactgttccagcgaacatgaatgacctgcaggcatgcaagcttgcactgccgtcgttt

SEQ ID NO: 82191 - DNA, 375 bp, Saccharomyces pastorianus
atgcagaaagaactcaccagttttttcgtcatatctccaagcagatccaccaaagaaagatctccaattgttgggaggaattggattacctttctcatcgaaaccctttggaggtctccagaaaaaccagtcacgctttggattggtcttggaagatttactctccttgaaccattcatgctcttcagaacagtggttgataaccaggtcaacaataaccttgatacctctcttatgagcttcttctatcatttggaaacaatcctcattggtaccgtaacgtggccaaaccttctcatagttggcaatatcgtaacccatatcttcttgaggagagtcataaaatgggcacacccatatcgcatcgacacctaa

SEQ ID NO: 82192 - DNA, 261 bp, Saccharomyces pastorianus
atggttagcgatgatattccgtcgtccaaaagattacgaccatgccagttcatattattttacttaagagttcatgcctttcatgcgaagaagcgttcggaaattacaaaacgtcttagagttcaggaacaggcccggtcacggaattattctcgggataattccagccgcttggcaggtaggctaaattacacatttcaagaaatttctccggctttttctgtgagatacgtttataagttgctgcagcagatgctctag

SEQ ID NO: 82193 - DNA, 324 bp, Saccharomyces pastorianus
atggcaagatacggtgctacttcaaccaacccagctaaatctgcgtcagctcgtggttcttatttgcgtgtttctttcaagaacaccagagaaactgctcaagccattaatggttgggaattgactaaggctcaaaaatacttggaccaagttttggaccaccaaagagccatcccattcagaagatttaactcctctattggtagaactgcccaaggtaaggaatttggtgtcaccaaggctagatggccagctaaatctgttaagttcgttcaaggtttgttgcaaaacgccgctgccaatgctgaagtatgtttaaaatga

SEQ ID NO: 82194 - DNA, 258 bp, Saccharomyces pastorianus
atggagaatacactgggtgaggggtccacggtaaacgcttccgtggacgtggaccaacatggcaatgacaacaatagtgatagcaacgctaatgcagctgtggcaggggttgccaatacagatactgctggtgaagaatcgcagcaacaagatgagtctctgaaggatgaagcaactgttccgaacacacgcgatgcagaaagcgaggcgataacggtaacggcaaagcagcgccgactatgcaagcgaataagctag

SEQ ID NO: 82195 - DNA, 1746 bp, Saccharomyces pastorianus
atgtcacaggtaatagaaccacaattagatagaacaacctattattccatattaggcttgacatcaaatgcgacttcctccgaagtgcataaatcatatctaaaactggccagattacttcacccagataaaacaaaatctgataagtctgaggaattattcaaagctgtggtgcatgcacattcaattttaactgatgaagatcaaaaacttcgatatgatcgagatttgaaaatcaaaggtttacacacttaccagccgaagaaaaactgtcatattttcaagaccaaggcaaaggaatcacaaggggctagtcccacacttggtcaatcagaagcttatcacaggcaaaataaaccttatgagcaacagccctatggtttcggtgtaggcaaaaaaatgacttcaagctctaagagtaaggttccgatattcaagtccttcaatttaaaaagctaccaacgaaaccactattattcatccaaaaaggaaaggaaacatggaagtcctgatattgattctttgttccatgaaaccaatggagcctcaaaagtaagaatgactgatgccggtaaaatggatacgaactctcagttccaagaaatatgggaaatattgggtaaaaatgcgtacacacataaatcttactctgaagatccaaattcatgtttgggatcagcactaagcgatcatgaagaagaagaagaagcaggaaaacaacagcagcaacagcagcaacagcagcagaattatggaatgacgtcgaagtctagcagtcctgatgaagaacaaaaagataataaagaaccgaaaagggaaagcagagtctctccagaggaaaatggtgaagaagaagaaacgggacacaaacaatttaaattgcccaagaccagtactttttctagtggatcccatgattcaaatttgcaatctcctttttacaatcatgagtatcgacattacgcaagaagtaaattcgaatgcaagaatcaatttagaaagtcagtttctcccattaaagagatacctgcaacaactagtaccaatgaaggatggaacattttgagagacattattgaaaaactcaatataagcaatgtagacgatcgaaataaagacttgctgtttcgtcgggatgaaataggtgataaaaatcacagcgactcaatcgacatagaaaatttatctatcaaagaacctaaagggatgaaaaggagaaagaaagatgatatatctttagaagaattgttccaatctttaccaagagaaaaagattattttatgatggatgcaattaatgactcgttagaatcaatcaatctttttaaaaagccgaagaccactcagagtcacgaacaaggtggaacttttgcccaagcagaaagtaatcgtgcaaaattcaaaccgttactagaacagtgtggaattacacccgagatcttagatttggaaataccagagattccggaatttgatgcagtggctgaccttgaaacattgaagcttaacgtgcagctgtttaataaccaatgtaacaaacttaaagaaacaatacatcaagtatcattacagcgcctgagagcagatacgcagttcagtgatatgttaacccaaaagcaaagtattatggtttggaaaacatacctagaatttgataaaagtttaatggacaaattgaacatcttacaagaaagacagatgcaggtcattaaaattttttccgaaagatgtgacggtaaagtataa

SEQ ID NO: 82196 - DNA, 645 bp, Saccharomyces pastorianus
atgcaatacaaaaagactttggttgcctctgctttggccgctactacattggccgcctatgctccatctgagccttggtccactttgactccaacagccacttacagcggtggtgttaccgactacgcttccaccttcggtattgccgttcaaccaatctccactacatccagcgcatcatctgcagccaccacagcctcatctaaggccaagagagctgcttcccaaattggtgatggtcaagtccaagctgctaccactactgcttctgtctctaccaagagtaccgctgccgccgtttctcaaatcggtgatggtcaaatccaagctactactaagactaccgctgctgctgtctctcaaattggtgatggtcaaattcaagctaccaccaagactacctctgctaagactaccgctgctgctgtctctcaaatcggtgatggtcaaatccaagctaccaccaagactacctctgctaagactaccgccgctgctgtctctcaaatcggtgatggtcaaatccaagctaccaccactactttagccccaaagagcaccgctgctgccgtttctcaaatcggtgatggtcaagttcaagctactactaagacataccgctgctgctgtctctcaaattggtga

SEQ ID NO: 82197 - DNA, 1542 bp, Saccharomyces pastorianus
atgacagaagataatattgctccaatcacctccgttaaagtagttaccgacaagtgcacgtacaaggacaacgagctgctcaccaagtacagctacgaaaatgctgtagttacgaagacagctagtggccgcttcgatgtcacgcccactgttcaagactacgtgttcaaacttgacttaaaaaagccggaaaaactaggaattatgctcattgggttaggtggcaacaatggctccactttagtggcctcggtattggcgaataagcacaatgtggagtttcaaactaaggaaggcgttaagcaaccaaactacttcggctccatgactcaatgttctaccttgaaactgggtgtcgatgcggaggggaatgacgtttatgctccttttaactctctgttgcccatggttagcccaaacgactttgtcgtctctggttgggacatcaataacgcagatctatacgaagctatgcagagaagtcaggttctcgaatatgatctgcaacaacgcttgaaggcgaagatgtccttggtgaagcctcttccttccatttactaccctgatttcattgcagctaatcaagatgagagagccaataactgcatcaatttggatgaaaaaggcaacgtaaccacgaggggtaagtggacccatctgcaacgcatcagacgcgatatccagaatttcaaagaagaaaacgcccttgataaagtaatcgttctttggactgcaaatactgagaggtacgtagaagtatctcctggcgttaatgacaccatggaaaacctcttgcagtctattaagaatgaccatgaagagattgctccttccacgatctttgcagcagcatctatcttggaaggtgtcccctatattaatggttcaccgcagaacacttttgttcccggcttggttcagctggctgagcatgagggtacattcattgcgggagacgatctcaagtcgggacaaaccaagttgaagtctgttctggcccagttcttagtggatgcaggtattaaaccggtctccattgcatcctataaccatttaggcaataatgacggttataacttatctgctccaaaacaatttaggtctaaggagatttccaaaagttctgtcatagatgacatcatcgcgtctaatgatatcttgtacaatgataaactgggtaaaaaagttgaccactgcattgtcatcaaatatatgaagcccgtcggggactcaaaagtggcaatggacgagtattacagtgagttgatgttaggtggccataaccggatttccattcacaatgtttgcgaagattctttactggctacgcccttgatcatcgatcttttagtcatgactgagttttgtacaagagtgtcctataagaaggtggacccagttaaagaagatgctggcaaatttgagaacttttatccagttttaaccttcttgagttactggttaaaagctccattaacaagaccaggatttcacccggtgaatggcttaaacaagcaaagaaccgccttagaaattttttaa

SEQ ID NO: 82198 - DNA, 567 bp, Saccharomyces pastorianus
atgccgcatttagccgccgaaacgcatacttggcctccgcatatttcacattcaacactttcgattccgcatccaaccccggaacaccggcacgtatttcataaaaaggacgtgaagaacaaaaggaacgaagaaaaaggcaataatttactctatgtgttatttagaactacggtgataaagagctcgttccgatcactaagtacggccggaagagagctgttgtttgttgtccatcaagggcacatcggcaccggcctcatcgtcttcatcatatgctggaggctgtgcttgagattcctctgcagggtgagcttccagtcacggtctacgtcgggcgcagtcgcattgtctgccgtagaaagatccgtacgaaacgttcacctactcggtttcactataccaacggtagcaaagcgtggaatgatttgctgggaaagaataaccagtaggggaagaagaagtacggttccaatagtggtatcccttgttgaaattattacccttaacgcttcccagaacggcccacttggggggaatggaaaaacccgccaaaaaaccatttaa

SEQ ID NO: 82199 - DNA, 261 bp, Saccharomyces pastorianus
atgacgatgcaaaaggccagcaaagtgaatatggaagtgcgaaggactctagtaacaatacaggccacaactatgtctataatcctagctctgccactggtggtgctgatagcgtcgacattggtgctatcagtaaaaggaaggagaatatatctggcgacatctccaataattttgctgttactcattctgttcaagaagggccaacaagcgcgttcaataaacttcacattgtcgaagaataaatcgttatttgtctga

SEQ ID NO: 82200 - DNA, 1059 bp, Saccharomyces pastorianus
atggtagatggactgaatacctcgaacattaggaaaagagccaggactctctctaaccccaatgactttcaagagcctaattacttgctggatcccggtaatcatccctcagatcattttcgaactcgaatgtccaaatttcggtttaatattagagagaagctgttagtgtttaccaacaatcaatcattcacattaagccgctggcaaaagaagtaccgttctgcgtttaatgatctctactttacttatacttccttaatgggatcgcataccttctatgttctgtgtttacctatgcccgtgtggtttggatattttgaaacaacaaaagatatggtttatatcttgggatattctatctacttgagtggtttttttaaagattactggtgcttgcccaggcctagagcacctccattacatcgaattacgttaagtgaatatacaacgaaggaatatggtgctccaagctcccatacagcaaatgcaacaggagtgagtctcttgtttctctacaacatctggaggatgcaagaatcttctgtcatggtccaactattgttgtcatgtgtggttttattttattatatgactttggttttcggtagaatatactgtgggatgcatggcatattagatttagtaagcggtgggctcattggaatagtgtgtttcattgttaggatgtatttcaagtacaggtttccgggtttacgcattgaggagcattggtggtttcctttgtttagtgtgggatggggtcttcttcttttgtttaaacatgttaagcccgtagacgaatgtccttgcttccaagatagtgttgcgttcatgggcgttgtgtcaggtattgaatgctgtgattggttgggcaaagtggttggagtcaccctggtgtacaatttggaacctaactgtggctggcggttaaccttagccaggctgctggtgggcctaccgtgcgttgttatctggaagtacgtgatcagcaaaccgatgatctacacgttattgatcaaagttttccatctgaagatgaggggatcctctagatag

SEQ ID NO: 82201 - DNA, 393 bp, Saccharomyces pastorianus
atggtagaaaactcgtcgagtaataattcaacaaggccaattccagcaatacctatggatctacccgattatgaggcgctccccacccacgcgccattgtaccatcaacttatagcgggtgcatttgctggtataatggaacattcagtgatgttcccgatagatgcccttaagacgcgaatacaatcagccaacgcgaaatcgctgtctgccaagaatatgctttcgcaaatatctcacatctctacttccgaaggaactctagccctatggaagggtgttcagtctgtcatactaggtgcgggacctgcacatgcagtgtattttggtacgtatgagttctgcaaaaaaaaccttatcgattcgagttatgcaaactcaccaaccaattaa

SEQ ID NO: 82202 - DNA, 477 bp, Saccharomyces pastorianus
atgccttctaaaaactccatcaacagacctaagctgacttcaaatttgcaccacaaggtgcactctttaaataagaaaagagctcaaagagaaagagctggtctcttgaagccagctagatccagcgtaaattcgaaatctggggaaataaaatcagtagcgttggacctatacttccaaaacaagaagaacgaaagtcagaattccactgctgtgacattacaaaatgcttcatcttctccggcctccatcaccacgaggacactttccaaaaagagagctaagaaaatcgagagaaacttaaaatatgctacacagagaaaattattggttgacgcaagcgctaagctagaagacgaaatggagattgatctagatggcggtaagaaagtgaaagagaatgaaaagaagagttctttgactttggttaaggaagccttatggagtgtcattgacgatactgcatcccagggatga

SEQ ID NO: 82203 - DNA, 141 bp, Saccharomyces pastorianus
atgaaccacttgacaacggtcttagccgcacgtaaaacctgtgtggtgcgagaagcaacgaatctgtatacagttgatacagaacgtcggatcaacaaaatggggcgtgatgaagaaaaaaagtggcggggatcctctaga

SEQ ID NO: 82204 - DNA, 141 bp, Saccharomyces pastorianus
atggcttcaacgactgctactcgtgccaataatgaaactgaaaagcatgaagccatcactgtttttttcgtggtctttctatatataaacaaagcctctgtaaagttttttttttttcgcataacaaacgcgcttatctga

SEQ ID NO: 82205 - DNA, 99 bp, Saccharomyces pastorianus
atgtcaattgtttcactgttaggcatcaaagtcttaaacaacccggcaaagttcactgatccatatgagtttgaatcacttttgatgcttagatcttaa

SEQ ID NO: 82206 - DNA, 1809 bp, Saccharomyces pastorianus
atgaaggatttaatttcttctggcaatgttggactaggtcccattgagattgttcacatgtcctacttaaacaaacatgaaaaagaagagtttggtgaatatttctacgttacagggatcgaagtttccggtcctgcaatgcccgtagagtttcttgaagtgctaaaatcgagtaagcggatttccaaaaatatatcgaataatatcatattgacttattgctgttttaattttttcagcaatctagacatccgtattagatacgatgctgacgatactttccagacaacggcaattgactgtaacaaggaaaccactgacctgaccatgacagaaaaaatgtgggaagaaacgttcgcaagttctgtcatccgagcgataataacaaatactaatccagagttaaaacctcccggtttagtagagtgtccattctacgttggaaaagatactatctcctcttgcaaaaagatcatagaattactatgccgattcttaccacggtcactgaattgcgggtgggattctaccaagagtatgcaagccaccattgtcaataactatttaatgtatagtttaaaaagttttattgcaatcacgccaagcctagtggattttacaatcgactacctgaaaggacttaccaagaaagatccaatccatgacatatactacaagacggctatgatcacaattctagatcacatagaaacaaaggagttagacatgataactattttaaatgagacgctcgacccccttttatctctgctaaatgatttaccgcctcgcgatgctgattcagcacgattaatgaattgcatgagtgacttgctgaacattcaaacaaattttttgttaaacaggggtgattacgaactagcattaggcgtctctaacacatcaaccgaactagccttagactcttttgaatcttggtacaacctagcgagatgccacatcaaaaaagaggagtatgaaaaggctctcttcgcaataaattcaatgcctcgtttgcgcaaaaataatggacacctggaaacaatgtacagtaggtttcttacctccaattattataaaaagccattgaatggtacctgcgaacactacgacttgactgcaatggaattcacgaatctctcgggaacgttgaggaattggaaagaggatgagttaaaacggcaaatttttggaagaatcgcaatgataaacgaaaaaaaaatcggttatacaaaggaaatctgggatgatattgcgataaagttgggtccgatttgtggtccacaatctgtgaatctgattaattatgtctcccctcaagaggtcaaaaacataaaaaatatcaatttaatagcaaggaatacgatcggcaaacaattgggatggattagtggtaaaatatatgggttattaatggaaattgtgaacaaaattggttggaatggcttattaaacatccgaacagaagctttcatgatggaaactgaattctatcaagcttctaacaacattatcgatgaaaacggtcatataccgatggaatcccgaaagaaaaggttttgtgaagggtggctagatgatttatttttagatttatatcaagacttgaaattgagcaagattagcctaagcaataaagatgaaaaacacagcggattagagtgggaacttttgggtttgatcatgctgcgtacctggcattgggaagatgccgtagcttgtctaagaacaagcatagtagctcgattcgaccccgtaagttgccagcagctgctaaaaatatacctgcaacctccaaaaaatatttaa

SEQ ID NO: 82207 - DNA, 1560 bp, Saccharomyces pastorianus
  modified_base (1510)..(1510): a, c, g, t, unknown, or other
  modified_base (1542)..(1542): a, c, g, t, unknown, or other
atgcatttccccaaaaaaaagcattccggaaatctctccgtggtggaattgccgaaggaagctctccaagattctttaactgctgctcagattactttcaagagatatgcccaccccaatggcaatgccggtagcgcagagaggccgagacatctaaaggtggaatctgcgcctgtcgtgaaatctgagccttctttgccgaggatgagacaaccggaaccgagaaatataaatcatcaatactctagggaaacgcttccaggccattctgaagccttttccgtaccgacgactcctctgcagacaatccattatgatgtaaggaataaagcgtcaaattcgccaagtagtatagcagctgcagagacagctgcatacctagcccacacaaattcatttagtaacagatcatccggtgtcggcagccgggatccagttatggatactgaaacaaaaccgccacgtgctccttcagccttgaaaaatgagctgcaattgaacagaatgaggatacctccgccgtcatatgataataatgttcgttcacgatctatttcgccacaagtatcctactctacctcgctgtcatcatcgtgttccataagttccgatggagaagaaacttcttatagagaaaaaagcaccgatgaggcatttcctcctgaaccttccatgtcttcttatagtcttgcgtccaaagcctcagcaaaggcttctctaacggacccctcacagcggcagcaagagtcagactatacggcaatgaataaactcaatggaggaaatataatatataaaggcactttacccgacctaataccgcgaagccaaaggaagacaagtaaacccaggttcaagcacaagcttttacgatcacctgagcagcagcaagaaaacttatcacatgtgtattcggaccaaacgcagaatggtagggcaatcataaacacgcagcaaaatgtaaagttaaagacaactatgaggcgcgggaagtacgcaattacagacaatgatgaaacttttccctacgacagaaagtctgtaccatcagactcagacacagatgaagattctaatgtgatggaaatcaaggacaagaagaagaaaagtcgtcgctctaagataaagaaggggttgaaaacaacagcagctgtagttgggagtagtacctctgtccttccgttccctcatcaccatcatcatcaccatcagctccataacccgaattctcatcacttacacacgcaccatcatacaagttctcacaaattcaatgaagataaaccgtggaaatctcatagagatctcgggtttattaccgaacaagaaagaaaaagatacgagtctatgtgggtatcaaacagatactcgtatttgcgcttgctgccgtggtggccctctctcgcgaatgaagacgacgagtctcacttacagcccttaaatttaccgcaagacggcctgatgcttaacttagtcgtaaaagatatatggtatcgatcaaacctacccnagggatcttctagacctgcaggcatgcaagcntggcactgccgtccgttt

SEQ ID NO: 82208 - DNA, 219 bp, Saccharomyces pastorianus
atgtcggtgcctaataatgggcccaaagacatttctttacattctttgaaaggcagtgttgttccagtgaaagactcaaatataatcaataaagaagttgatgaagaaagaaacgacaaaagagatagtcaaaaaaagtcagccgtgagtgaatcttcagtaacaaatagcaaaataagtgaacaaatggcgaaaagcttttatccgaactcatactag

SEQ ID NO: 82209 - DNA, 207 bp, Saccharomyces pastorianus
atgaagctactaaggtggcaattaatccagctacagcaagcatcgtcttttcctgttgttggtggggctccttctgttgctaatgtagcaactacctctgtcaatgaagaaggaaatcgtaatcaggttaaaacaaaggccaagtatgagtctgcgcagattgataggcagcagaaggagaccacttgtagggttgcagatttgtaa

SEQ ID NO: 82210 - DNA, 261 bp, Saccharomyces pastorianus
atggatgcagaatccaatgaaagcccaaacggtaaagatagtgaaattatgtatacaggtgtttcaatttctgtttccttcaattctaaacaaaacgaacaactgcatgttgaacagctctcaggtggtcagaagactgtatgtgccattgctttgattctggcaatccaaatggttgaccctgcttccttctatctgtttgatgaaattgatgctgcactcgacaagcagtatagaacgtgcagttgctacacttcttaa

SEQ ID NO: 82211 - DNA, 312 bp, Saccharomyces pastorianus
atgtgccataattctgttaggagcggaaataaggctggttttttggggatcaagttcggaagtgctcttctctcaattgccacaggtgccattgctatcgcattgctatgcaagttccacgaccacgaagcggtactgatagttattgtatgctcgacattgttatatggaataccgtcactgatatcgtttatcacagagactgtttttgcgcctagcaagtttcacattggatacttttacaacgttcttaattttgcattgccactgatcaccatgggctgcacagtggactattttcattatactttg

SEQ ID NO: 82212 - DNA, 2949 bp, Saccharomyces pastorianus
  modified_base (2896)..(2897): a, c, g, t, unknown, or other
  modified_base (2899)..(2899): a, c, g, t, unknown, or other
  modified_base (2922)..(2923): a, c, g, t, unknown, or other
  modified_base (2933)..(2934): a, c, g, t, unknown, or other
  modified_base (2943)..(2944): a, c, g, t, unknown, or other
  modified_base (2946)..(2946): a, c, g, t, unknown, or other
atggattctactgatctgttcgatgttttcgaggaagcacctgttgagcttcctacagatagtaatggagaaaaaaatgctgatacaaacgtaggagatactccagatcatacccaggataagaagcatggccttgaagaagaaaaagaagagcatgaggaaaacaacagtgaaaataaaaaaatcaaatccaataagagcaaaacggaagataaaaacaaaaaagttgtagtaccagtgttggcagattcgttcgaacaagaagcctctagagaagtggatgcatcgaaaggactgacaaattcagaaaccttacaagttgagcaagacggtaaagtcagattatcgcatcaggtccgccaccaggttgcactaccaccgaactatgattatacgcctatcgctgagcataagagggtaaatgaggctcgtacatatccattcacattagaccctttccaggacactgcaatctcatgtatagatagaggcgaatctgtgttggtttctgcgcacacatcggctggtaaaacagttgtggctgaatatgccatcgcacaatctttaaaaaataagcaaagagtcatttatacctctccaattaaggctctatcaaaccaaaaatacagagaacttttagcagaatttggagatgtcggtttgatgactggtgatatcacgatcaatccggatgcaggctgtttggtcatgaccactgagattttgagaagtatgttatatagaggcagtgaagttatgagagaagttgcctgggtcatctttgatgaagtgcattacatgagggataaagaaagaggtgttgtgtgggaagaaacgattattttactgccagataaggtccgttacgtgtttttatcggccaccattccgaatgcaatggagtttgctgaatggatatgcaagattcattctcagccatgtcatattgtctacacaaatttccgtccaactcctttacaacattacctgtttccagcccatggagatggtatttatctggtggttgacgaaaaaagtaccttcagagaggaaaatttccaaaaagcaatggcgtccataagtaaccagataggtgatgatccaaattccactggttcaagaggtaaaaagggtcaaacctataaaggtggctccgctaagggtgacgcaaaaggtgacatttataagatagtgaaaatgatttggaagaaaaagtacaatccagtgattgtattttcgttcagtaaacgtgattgtgaagaattagcattgaagatgtctaaattagattttaattctgatgatgaaaaggaggctttgacgaagatttttaacaatgccattgcactattaccagagacagacagagagctaccccaaattaaacacattttaccactattaagaagaggtatcggtattcatcattccggtttactgcccattttgaaggaagtcattgaaattctgtttcaagagggatttttgaaggtgttgtttgcaacagaaacattttcgattggattaaacatgcctgctaaaactgttgtctttacatcggtcagaaagtgggatggtcaacaattccgctgggtttcaggtggagaatatatacaaatgtctggtcgtgcaggtcgtcgtggtttagatgatcgtggtattgttattatgatgattgatgaaaaaatggaacctcaagttgctaaaggaatggttaagggccaagcagataggctagactcggcttttcacttaggatataatatgattttgaacttaatgagagttgaaggtatctctccggagtttatgttggagcattctttcttccaatttcaaaacgttatttcagtaccagttatggaaaagaaacttgctgaactgaaaaaagactttgatggcatcgaagtcgaagatgaagaaaatgttaaagaatactatgagattgagcaggctatcaaaggttaccgtgaagatgttcgtcaagttgtcacccatccggcaaacgccttaagtttcctacaaccaggcagattagttgaaatctctgtcaatggtaaggataactatggctggggtgctgttgtcgattttgctaaaagaattaacaaacgcaacccaagtgctgtctatacagaccatgaatcctatattgtcaatgtggtcgtcaataccatgtatatagactctccagtcaacttgttgaaacccttcaaccctaccttcccagaagggattcgcccagcggaagaaggtgaaaaaagcatatgtgctgttattcccataactttggattcaatcaagtcgattggtaatttgagactatatatgcccaaagatattagagccagcggtcaaaaagaaactgttgggaagtctttaagggaggttaatcggaggttcccggatggtattcccgtgctggatcctgttaaaaacatgaagatcgaagatgaggactttttaaagctaatgaagaagattgacgttttaaacacaaagttatcctccaatcccttaaccaattccatgagactagatgaactatatggtaaatatagtagaaaacacgatttacatgaagatatgaaacaattgaaacgcaaaatttcagaatcacaagccgtaatccaactggacgatcttcgtcgccgtaaaagagttttgcgccgtttaggattttgtactcctaatgacattattgaactgaaaggtagagttgcatgtgaaatatctagtggtgatgaactgttactaacagaattgatcttcaatggtaatttcaatgagttgaaaccggaacaagcagcagcattattatcatgctttgcattccaagaacgctgtaaagaagcgcctagattgaaaccagagcattgccggaaccgtttgaagnngnctatgagaaagaaagttgcagcnnaaagatctgnnctaagatannantga

SEQ ID NO: 82213 - DNA, 969 bp, Saccharomyces pastorianus
  modified_base (875)..(944): a, c, g, t, unknown, or other
atggaggcttcatctattacagatttagtattcacaaggaacgaatttgtgaccacagaaagtttgcagtcgttcttttcaacctatgatgaagaaacgaaaaacgtgttcctgcactttatagagaattataagcacataatagtttcaaaagacaatgttatcaaagtcattgccgctgaagtagaagacattactagcaggttctccaaaggcatcacagaaaatgaccttcgaattgctagtgttaaagtgggtattataaacatcaacaaacaaattacaaggctaagaaaagaaattaatgaatctaacattaaactgagaggaccagagtttaatgagctgccgaagagaataaggattgaatataaacaggcgagattactatctgaaaaacatctttctaggttactaaagtttcaaaataacctcgctcaagtaagaactcaaatagacaccagtgctactaatgcggttttaattcaaactttaagtgaatccaacgaaataattaagtcaattaatggatatattggttctaccgaaaaagtagaagacttactagatgagattaaagagggtcatgaccgtaccgaagaggtcaatgatttattagctcattataataaaggtcaagacgaagaagcagaagaagaaattgaaagagaattagaacaattagaacttgatgaaaagaataataataaggaagaaaataagaaccaggatttgcacgagccaaaagaaagcagtagcgaggatctattaaagagattgaataatctgaagataaatacaaatgaaggacctgtgcaagataatgaaaaccacgataatgagataagaaaaatcatgatggaagaacaaccacnnnnnnnnnnnnnnnnnnnnnnnnnnnnnnnnnnnnnnnnnnnnnnnnnnnnnnnnnnnnnnnnnnnnnngacggaagaaagaaaatatgtgtga

SEQ ID NO: 82214 - DNA, 255 bp, Saccharomyces pastorianus
tgccaagcttgcattgccttgcaggtctactacttttctacttacttggcacgaggccgcgcaagccagatccaagcacgccagaaagtgcggtgtactggtgcaaccttttatcgatttctcatcatatcactatcgcaacgggcatgggcgacgaaaagccaatctaaagcgttgtctccctcgttcctcgcgcacgcgattttgcgttctgcacaggaagccgaagtcgaacaagaagcaggcaaagtttag

SEQ ID NO: 82215 - DNA, 1686 bp, Saccharomyces pastorianus
  modified_base (1678)..(1678): a, c, g, t, unknown, or other
atgggcattttggactcgctgaaaaaacctgttaatatcaagagttcgctccccaaattctcccgcagtgctaccagcatcaatttaagtagccacccagtaagttcacggtccttcctcgaattaccaccagagcttttcagcatcactaaacctatatttaagcttctgcaagcacacgcaaataagatttacttccaatcttccgacgctgaggctgtatggaatgttaaggatgcttctggacatgtttttgaagcagagtcaatttctttgctcggctctcatataattattacaaattcctctgtacaagtcgcagacgtggccatcatagattccccttccaacataaaccaatgtgaaatttcaagcgttggagagttcctgcaattcaataatggccagctatctatcacatgtaacgattttggtttactggagaagttcaaaaggttgtgtatgatttctatttttgagttcatttctatatataaggccttgacaggcacagtgatttcctcttatgggctgagaatgtctgatatgcatatcattttgaactcgccgttcaattttaaggattggtgtgaagtttatcttgatggtcaaggttgggtgaaagtgtggtgtcatattgataaagtgtctaaaaccaataattctaaaagtagtagtgacaatgatgctaaaggaaagtatcaaatacggttttatagagatgacaaatccacatctagcaagaactgcgttttttttattcctgacaatgagtacgttcaagatattttcttttataacatcaatgcggcagaaccttctaaaaatatgaacgacttttttcaagggttgcaaatgataaagctcgttggtaatgtacgcttttgcagtgatacggactttaatgatgtggtggatagtggatccatctatagtagtgcaaacaacggcagtggtgacagcagctcgacagcattgaataatgaaagtcctaacactacaccaaaaagtagaactttcttttcacctaaagggcacagaagaaatagctcccatgtaagttcgttaacttctagatcaacaaaaaagcctataactaacttcactacacgtacaaatgggcttttgattaggccattgccccatcatggcgtacatcacctggaagcaatgatcaggttcattattcctttgatggattgtgcaagactttatgggcgtccagttcaattcaagacagaaagaaccgatataaattcgttaatgtttggattacctaaattgccctcagtggattattttgctgaagaggagattgcccatttgatgacccaggaatttaatcctttgaaagaaaaagatactgacgatactatggctttaactatgtcaagattttctagctacctgcaagaaagaatgacaaaagtctccaagagaaacacagaactcaacttcaggacctttagtgatgtaatgggcatgtataatactacgagggatcactctaaacttaattgcatgagtgacaaggataattctgtgaaggaattttcattgagtgataaaagcaatgttagttctgaaacgactaatatgatgaatcaattgcaagtaaacgcccatgaatacaaagttctatgtgcgaacgtcctatcgtcgcaagtacttcgcccanttgcatag

SEQ ID NO: 82216 - DNA, 267 bp, Saccharomyces pastorianus
atgatacagcctagcaagtttgaaaacttgattgcaatttatgacattatattctgctgtttgcaggtatatctactttgtaagtttaaagatgcaaacaaatcagtcttcttggtcccagttacctggccttgggccttgaggtgctcttggaccacccgccttctttgccatgataatttggtcaatggaaagcacagtagttgcagcttctgtagcgacgttaatagcaaactttttcggggatcctctagagtcgacctgcag

SEQ ID NO: 82217 - DNA, 990 bp, Saccharomyces pastorianus
atgatgctgctaaatatgtatacgaaggcaaatcaccttatgcaagggatacatatcgttacacaccggctactaggttggctgctagtgcctaatcattattttggatggtttcatttggggaaggtcatatttgttattttcgatttggttactgggctcattataatgaagcttttgaaccaggccatctccagaaaaagagctttaatattagaaagcatttggctattgaatccgatggttatcaccatcagtacaaggggaaacgctgaaagcgtgctttgctgtttaatcatgttcacgcttttttttctacaaaagagtagatacaccctagctggaatcttatatggtctttctatccatttcaaaatatatccaatcatatattgtatcccaatagcaatttttatatactacaataaaagaaaccagggtccacgaacacaacttacatcgctactcaatatcggtttgggtactctaacaactttgcttggatgtggttgggcaatgtacaagatatacggatacgagtttctggatcaggcatacttgtaccacttatacagaacggatcacagacacaatttttcagtgtggaacatgctattgtatttagattctgcaaataaggaaaatggtgagtccaatctctcaaggtacgcatttgtgcctcaattgctgcttgttttagtaactggatgtcttgaatggtggaatcccacattcgataacctattgagggttttatttgtgcagacgttcgcatttgtgacatataataaagtgtgcacatcgcaatattttgtttggtacctgatctttctaccattttacctctcaagaacgcacattggttggaagaaggggcttttaatggccacgctttgggtaggaacgcagggaattcggttaagccaaggttactatttggaattcgaaggacagaatgtattctatcctggactatttattgcaagcgta

SEQ ID NO: 82218 - DNA, 606 bp, Saccharomyces pastorianus
atgacttcatctctagatgatatagaaccaacagcatataataatatggaagcggacgaggaatattgcagacgcaacgatatacatgacctttccagcgtggtcggtgatgctgtctcacaaggtgtgccagacatggatggtcaaacaacggattcttcgaaggaccctgagccaaattccgaggataagaaagcgtttcctccttcgagtggctcatttttttctcctaatctacagggtcaaaggaagaaagttcttttaaagtttgttttcacaaattgcttactggccataatttgctttacaatgtttgtgttgttctggggggctctttacgacaccagtaagtatctacacaaagtcaagcttctggttgttatccaggaaccccctgtggtaattttggataataacagttccatggtagtgccctccatatcgtatgccttgcctacttttatcaataaaataccatgtgattgggatatttataacagttctaccttccaggccaagttcgacgtaaatacgccgcagcaagtcaatgacaaggttgtcgatttggttacgacgaaaaatactacctgcagcatgcaagctgcc

SEQ ID NO: 82219 - DNA, 225 bp, Saccharomyces pastorianus
atgtttaatactacaccaattaatatcgacaaatggttgaaggagaacgaaggccttttgaaaccaccggtgaataattattgcttacataaagggggattcactgtgatgattgtcggtgggcctaatgaaagaaccgattatcacaatcaatccaactcccgaatggttctatcaaaaaaaaaggatctatgcttttaccggttgtggatgagacagacgctg

SEQ ID NO: 82220 - DNA, 2523 bp, Saccharomyces pastorianus
atggaattatttaacaaggaagaagcgagcttcgagactctgttaaaacgattactcgttgtcagtgagtcccatagcaggtaccatggttcgagcttggacccaatggttaaagttggtcatgaaatgagaaaaattagcggttacttgagatgcattttgagaaagcatgctgcaaatcatgatggcatgtctctaacacaatccatagtgaattcttacaagagtttattcaaagatgcgcaaatactcgatttgtatcataatcttttatttggatgtatgcatttgcttctcgatgcgaacatgtcatactttaggatggattcacaaaagctttttgcggtattactattcaaggtttattataagttgagggacattttctatgtcacaaatgaagtacgactaggctccctaatcagtgcgtttgtatacaaatttaaaagttgctatgactttataagctgtaactcactgaaatacggaagcgttcgtgacgttatatcaggcgaagtttccctgattaatcttccgccaatcgattccaataaggttataaatagagcatattacagactagatgtaaagaagttggcgatcaataataaactagttgaaatccttgaattagataatggggagatagctatatttgaggttctttctgaaaaaatgccatacacattacaaaccattgataacttgttccaatcccttgcgttaggaaaccatgacttaatgaatgttgggaggtcgctgctatttcgaccatttaggtccggcgatcttgatctcatcagacttgatgatagtggagcaaaactaaaggtaccgataaataatagcattgtattgaggttaacttgcaaagatcctattcaatggcaagagtattggaaacatgttattagaaagcttttcgactcaacagctacaaaagaatacaagcgatctggaagtaaaatttctcaacaggtttatgttaggagtaacaaacctgattatacttctcctaaaagaaatgacgatatgcctattagctctgtaaagatatcagatacaatacacaatggtcgcacactgcatagatcaattcctttgccgggaagtctgtcttccttaatagagacctctaatgaataccctgacgaggagtcactgtcaatcatgagtgagagggcaacagttagcgaagactcagatcttgacacctctctgaaagatattgaatccctaagttgtgaaaagctaattgaattggataagagcattcaagtacctctctcgcctaaatatatggacacacctaccttaaaaaacattagaacagcttctcaaactttcagcctggagagtgtctctcccgaactaatagagagtgttgcgtctgaaattgacgattctgagagtataatttctgaagatggaaaggataaacgagataaagatttattcgatccagatatcgatttctataagccaacgctttatcggcgtaaatcttcatctttactaagcatcttctcaaaaaacaaaaagaatctaactatcgatattcccaaaaatcattcaagatcattgtttagtttgccaggcaatcaacaatcagttaccccgatatcagcaagcccccatgacgataacgttgatgaaacgtatgtatcgtttccgttaagcataaacacatctggaggagcagtatatttcgaaaacgattcggtaaaagtttccctttggaacggcaagtcatgggtgcctttgagtaaggacatgctgtgtttgtctttaattttatccggagacaacgagaccttactaattatatataaagacttcgaaagggagaagtgtaaattggttgtgaaattggaacccacctggaagtacaatagatcaacggcacaagatgttcaacttcggattccttcctctgatttcaaagctagtgtatttggaacactccacgatctcacgctgtctatacgctgtgcgcaagctgctaagttggtgaatgtgttacaatatcagttacaaagtagccaggcatcatccctttcaccctcaaccaccacaggaactttatcaacggtatcttcgtcttcatgcttcagtcgtaatgtaactagatcatctactgaaaattcagaattggctaatatgaaagactcatcagaatatataagttcttcacttctgttatcttctgttaaagtaaggcaacatgttaaaacgaaagctgatgtttggaagccgtctcgagtaggctataccgacatattttcccaggaatataaaggaattgttgttgcgataaagtttgtgatctgttctgatgctgaaggaaccttgtacccgagagagtataactcccgtctccatgatataaaaagacttgggagaacaggactgtcattcacagataaaaaggaggcgtatttactcgaatttaaaaaccaggacgttgtagatcatgttcataagttaatcttgccttttaacacatcttggcaatctagctag

SEQ ID NO: 82221 - DNA, 1098 bp, Saccharomyces pastorianus
atggctattggtcatcctgagcagcaaaagatggttagatttatcagtaatgatttcactgtaccgaggtggagaacggcagcactcaaaaatgcttttgttctgctaagtaagcatagatatatggatgcagcagttttctttctcttaactgactctctaaaagattgtgtcaacgttctttgcaagcaagtgcatgatatggatttggcaatcggtgtatgtcgtgtttatgaaggtgataatggacccgtgttgggagagctattgacagcgcaaatgctacctgaaacaataaaggagaatgatagatggaaagcaagtttcatttactggaaattgagaaagcaggaagtggctattaaagctttgctgactgctccgattgatttagaaaacaactcaagcattgttgataaggaagtctgtgttaacagatcattccttgttgaagaccctgctttgctctatctatacaatcacctgagaaacagaaacttgacgtatttcattggatctctaaatgttgaagcaaaaatcgagtgtactctgatcttaagagttactgatattctttgccgaatgggttgcaattacctggcggtttcacttgtgaagaattggaagttcatcgaaagaaattccataccaattcagaagctattaaagagccccaccaaggatagagcatattctgctattggcgccatggcgtctgaaccaatttctactgctaggatgaggcccagtctttttgataagtttggctcgccaagtgcttcagatatagagtcacctaatccaaagttaccgaatagcttattagacgacttcttgcaaccaccaccaaatagcacttcttcaaattccctcgctcaaagttcttcttctgcacctagaagtatactggatgagttcgtctctccttcatattctcagcataaagagaatttaactccaaaagcgccaaacgactctgtgggtgaaacagacaactcagaaaagaggaaagataaactctctaaggacatattagatgatctttcatcacaaaagccacagaagccaaaaaaatctgctattaccaagacttactag

SEQ ID NO: 82222 - DNA, 135 bp, Saccharomyces pastorianus
atgagggatgtgtcttgggcattgcactcagacaataaagaaatattattatcttctattgaccgccacataacctcatggaatcgcgctcgagaatatagaataacctattggattaaggagcagacttggtga

SEQ ID NO: 82223 - DNA, 195 bp, Saccharomyces pastorianus
atggatccattaaagtactttattgctaaagatagagactatccggtcgaatctttccctgatccatacccctgtttcaataagacagtgtctctagcacttactgagcaactaacgaaaacaactttgccttatctaacccgccaccagcagatcacgcttatcacagtcattcaagcagtggatgaatcacca

SEQ ID NO: 82224 - DNA, 2181 bp, Saccharomyces pastorianus
atgtcattgaactttcttccaggacgccccaatgctacccctcagacagcttgtcaagcaacatggcaaaatcataccatctttgcatattgttcagggaataatttaatcatacttaccaacaaattcactaggttacagaccatatatacacaatcagactgtactgcggtcgatattaacagccagaatggattcattgccctttccttccacaatagggtgctcatctacaagcccattcatcaaattatgcagaatcccaagtggacccaatgttgccagttgttccatgatgacacgccagtaaactgcctaagatggtcttctgataatgagttagccattggatctgattttctttctttttggaaaattaaggataattttggtgtgtatcaacctattttgcagtggaaccagaaacagcctaaacctgtttataatgtgattatatcacaagattcgcagctgatagtcagtattgggaagtacgactgtaatgctaaactatggaagcgtgtttcaatagtcggagaacaagccatctttaaccttactatgttgcctcatccgaaacctataactgcaatgcggtggaaaaaagagccagaccaggtgagtaaaaacaacactgcctctcatgctctttatacgctgtgtgaagataaagttctgagaatgtggtcttgttttgaaatggagaaaaaccatactgtgcaaatatggggtgaagtgcctctttcccccacgcagaagttctgcgtgataatagacaattggatcattaggcaaactctcagtgtgaaagacccggaaatctttgatatatctgactcagacattgttattctgggttcaatgactggggaaatggaagttttggctttgaataatctttcccaagatcccccaaaaccaatgactaaaaagaccatttcccataaaaaagtcaagaaagcaactatgctaaacgatacaagatatttgtacttccccgaaatacaaccctatgacaatgtgaagggcaaactttcttttctcgtccacgatttacaaggtgtaatcagacatttactaatcgacattctgcagcttataaacaataaaaccgacgatctgagtgccgctttagagcacaaatttacgggacataacaaatctgtgcagaagttggtaagaagcagcgacggcgaagctttattaaccacttcgagattctcagaaaatggcgtttggtacccacaaaagttaaaccatggggtttcactgcggttacaaaatacaatacaaacagaatctcccataaaatttgcagttgtacatgagttgggtaaacaggtcatctgtcttctcgaaaatggggctttacaagcctgggaatgtccaacgaatcgtaaggaggacagtgaacagaagcaatcatatttacgtgtggaaacgagactgaaagaggagaaaaaaatccatccaatagttatgttaaatacacctgagccaaagcatggtcatgagcgtcatttcaccgcgttaatattctctgatggttcaatcaaagcttttgaagtctctttaacacgtggtatttttgaagtaaagtctgattcattagatatcgatggtgacgacatatacaagatctccattattgaccctgtacatcaaacttttgtgagtaacaggcctttgatttctttgattactaaaaaaggtcttaccagaacgtataaagccatcgttaattataatgataggcatgtccaatggatcaaggcatgtgaaattaacagcggaataatgaattgtacatgtattagaggatcatctacagataagttatgtattgttaattctactggtaaagtaatgtcactatgggacctgaacaggggagttcttgaatacgaagaaacatttcataatcctatcgaggatatagattggacaagcacggaatatggccaaagcattgtctctatcggatttacaggatacgctttactttatactcaattaaggtatgattacacgaacaacacacctagttacctacctattgaaaaaattgatatcacagcacatacagctcataatataggcgactccgtatggatgaaaaatggcacgtttgttgttgcttccggaaatcaattttacatcaaggataaatctctggattga

SEQ ID NO: 82225 - DNA, 945 bp, Saccharomyces pastorianus
atggaagataaagagcagcaagacaatgcgaaacttgaaaacaatgagtcactaaaagatctgggagttaacgtgctttcccaaagcagtttggaggaaaaaatagctaatgatgtaactaactttagcaacctacaatcgctgcagcaagaagagactcgtctagaacggagtaagaccgctctgcaacgttatgtcaataagaagaatcatctcacaaggaagttgaacaataccactaggatatctgttaagcagaatctccgagaccagatcaagaacttacaatcagacgatattgaacgagttctgaaggacatagacgatatccaatcaaggattaaagagttgaaagagcaggtagatcaaggtgctgaaaataaaggttccaaagaggggctgcagagacccggtgaaactgagaaggagtttttaatcaggactggtaagatcactgcatttggacacaaggctggtttcagcttggacactgcaaacagagagtatgccaagaatgacgaacaaaaagatgaggattttgaaatggcaacagaacaaatggtagaaaatttaacggatgaggatgacaatctcagcgatcaagactatcaaatgagtggtaaagagagtgaagatgacgaagaagaagaaaatgacgataaaattctcaaagaactggaagacctgcggttcagaggccaacctggtgaggcgaaggatgatggggacgagttgtattatcaagaaaggttaaaaaaatgggtgaaacaacgttcttgcggtagtcaaaggtcatcggacttgccagaatggcgaagacctcatccgaatattcccgacgcaaaacttaatagccagttcaaaatacccggtgaaatatactcgctgttatttaattaccaaaagacgtgcgttcagtggctctatgagctttaccagcagaac

SEQ ID NO: 82226 - DNA, 1425 bp, Saccharomyces pastorianus
atggtcatctattatgtagccaatattagaagaaatggccgtggagcgttgtcaattcaaagcttttacaatataacgctagacttcatagattataaacaagatttcgatcattggagaggagtagctcaaaagacaaaaatgaatcaactgattgaagagtggggaaattcgacgacaaaaaaatgtttttcattctgtaagtatccatttatattgtcactcggcatcaaaatctctattatggagtatgaaattcgcagaatcatggaacatgaagctgaacaggcttttttaatttcactggataaaggcaaatccgtagacgtttatttcaaaatcaaagtacggcgtgacgttatttctcatgattcattgagatgtatcaaggaacatcaaggcgatttattaaaatcgctgagaatagagtttgttaatgaacctggaattgatgcgggagggttgagaaaagaatggtttttcttattaacaaaatcgctgtttaatccgatgaatggcttatttatttacataaaagaaagctcacgttcatggtttgccattgaccctccaaattttgacaaatcaaaaggaaaaaactcacaactggaattatattacttgtttggagttgtcatggggttggcgattttcaacagtaccatattagatttacaatttccaaaggcgctttataaaaaactatgctcagagcctctgagttttgaagattactcggaattgtttccggagacaagtaggaacttaataaaaatgctcaattacacagaggataatttcgaagacgtcttttctttaacatttgagactacgtatcgaaataacaactggattttaaatgacagtaaatcgagcaaagagtatgtaacggtagaattatgtgaaaatggcagaaatgtgccaataacccaaagtaacaagcatgagtttgtcatgaaatgggtagaattttatctggaaaagtccattgagccacaatacaataaatttgtttcaggttttaaaagggtcttcgcagaatgcaattctataaaattatttaattctgaagagctggagagattagtgtgtggtgatgaggaacaaactaaatttgatttcaaatcgttaagatccgtgacaaagtatgtaggtggcttctccgatgattccagagcggtttgctggttttgggaaattattgaaagttgggactatccattgcagaagaaattattacaattcgtaacggcatctgatcgtatacctgcaacgggtatctctactatcccattcaaaattagcttgctagggtcgcatgatagtgatgatttgccattggctcatacatgttttaatgaaatatgtttatggaattattcctcgaaaaagacctgcagcagcaagctgcatgccgtcgtttac

SEQ ID NO: 82227 - DNA, 1227 bp, Saccharomyces pastorianus
atggtttctttatttgataagcttaatgcaaaaaaagacggtagagatggatctgtgtcgaaggagttgctatcacattctgtagcccatactaagaacaggttacccaaatcaggaaggcgcacgtcggaacggtccttagccgctagtgtaaaggacggaagttgctcaaatagcaaaagcaataagcggaactcttcggcatccgtgtcaggggaagaagataaatcctgtctaatttcacttaattgcctatgttgtggtgtcccactacggtttccagcctccataacgaaatttcgatgcagcgcatgccaagtaacagttattgtaaaggagccggaaattaacagtaatttggaatctagtacgcatatttcgtgcacattagagggtttgcagatggtagtaaggcggtgccatgatgatttgcagcggcttaagaagactgggattctggataaagaaagaaaggggttgatattccaaccggtaataacgtatttactggacagatttcatgatgttagcattttaaacaggtcgttcttggtacatgatggtggaaagaatataaagatgctgaattatgaagttttacaaagattttacagtatattatcaaatcttcctacaaggaaaccgtattatagtatgctgtgttgctgtaacgatctactgaagagaataacaatcaataaaggggaaaatttgcaaatattacagtatcgttggttgctgattatattaaatatacctacaatacgaacctgccttattagagatcggaagagcaaaaatgtgtttgagacccaacaaataagggcggtgtcttatgagttggccaaacgatgtattggctacttgtctaacctatcaacaaaaacatctcaacaattgattcaatcattacggcgaacgcctacggataatttttcataccaggtagagattttaaatttatacatcaatttccaattttccagattactgtcgaacgaattatcaaatagaaccgcaaaaaataacgtgaagcctgaagatgagatgcgatctcgtcttcgtcggcatcacactactggccatgaattcctgagtactagaccaataagtgcacaatcaaatgataaacagggaagtggtttcacgcatcccgtcaataataagatgaaatttaaattttttcaatatgaggaagactggcatattcactctgcagcaaattga

SEQ ID NO: 82228 - DNA, 342 bp, Saccharomyces pastorianus
atggaggctggaaaccgtagtgggacaccacaacataggcaattaagtgaaattagacaggatttatcttcttcccctgacacggatgccgaagagttccgcttattgcttttgctatttgagcaacttccgtcctttacactagcggctaaggaccgttccgacgtgcgccttcctgatttgggtaacctgttcttagtatgggctacagaatgtgatagcaactccttcgacacagatccatctctaccgtctttttttgcattaagcttatcaaataaagaaaccatttcctattttactttacctatcagccgcagtattcgagagatatacctgtaa

SEQ ID NO: 82229 - DNA, 468 bp, Saccharomyces pastorianus
atgaaggagaatgacatgaataatggcgtagataaatgggtaaatgaggaagatggtcgaaatgatcatcataacaacaataataacttgatgaagaaggccatgatgaacaatgagcaaattgatagaactcaggatatcgacaacgccaaagaaatgttgaggaaaatatcaagtgaaagcagctcgcgcagaagctccctgttgaataaagattcatctctcgtgaacggcaatgcaaacagtggcggtggtacgagcattaacggaacaagaggaagttctaagagtagtaatacacactttcagtatgcctccacggcgtatggtgtaagaatgttgagtaaagatatatctaataccaaagtggaattggatgtggaaaatttgatgattgttacgaaactcaacgatgtctcactgtatttcttaacaagagagttggtagaatggttttggtacatttga

SEQ ID NO: 82230 - DNA, 624 bp, Saccharomyces pastorianus
atggagcaaatgcattcattggaatcaagtttacctccagagcaacctcctacaaagcaagcgattgagagtcttaatttggaactttctcaagagttcaagctagccgccaatgcggtgacaagactttaccgggtggctaatgagaaaaactctttaaccaaacatcagggctacctcacctgtttggatgacatactatgtgcattagactcaaatgtgactgctgacgagttaagggcttggtgctataaacgaagaaatgatatcctttcaaactcgcaggataaatctttaaatccggtgaaagaaagggaaagaaagcttaataagttcagtgaaaaccaacaccgcgaaaatgaagctcataaagaaccttttgaaaaagatagcgcagtcaagtataatttcagtttcaacgaatcaaatggggacctctcaaatattaatgaaaatatagcacctaaatttagactttctatgccgcctttaagtgtcgaacatcctcctaggaatggtagtcgtataaaatcctggaaagcacgaacaatcaatcacggaagaggggacacgagaaaactaaatgacataacgggacttggacatgagcgtgagcgtgatcgt

SEQ ID NO: 82231 - DNA, 216 bp, Saccharomyces pastorianus
atgtattcgatggccttcttggcttcctctggcttagtggcaaattcttcagcaacagtctttaagttgaacagagctctaaatctgttggccaaaactgttttgccagacttgttgactaagatgtcccttagttgctctagagtgcattcatcgacgttttcttggaaatgtttttcaaagttagtagacatgttttattttattacttcctag

SEQ ID NO: 82232 - DNA, 927 bp, Saccharomyces pastorianus
atgagtcccagcacaatcatatgtattggtatggccggatccggtaaaacaactttcatgcaaaggttaaactcccacttgcgagcagagaaaacgccaccatacgtaatcaatcttgatcctgcagtattgagagtcccctatggtgcaaacatcgatatcagagactcaatcaaatacaagaaagtgatggagaattaccagctaggtccgaatggtgccattgtcaccagtttgaatttgttcagcaccaagattgatcaagttattgggttggtggaacagaagaaggacaagttccaaaactgcatcatcgacactccaggccaaatcgaatgttttgtgtggagtgcgtcgggtgccattatcacggaatcttttgcctccagctttcccacagtgattgcatatatcgtggatacgcctagaaactcatccccaactacattcatgagtaacatgctgtacgcctgttccattctgtataagaccaaacttcccatgattgtcgttttcaacaagaccgacgtgtgcaaggcagattttgctaaggaatggatgacggattttgagagtttccaagcagcaatcaaggaagatcaagacttgaatggtgacaatgggctgggctccgggtacatgagctcattggtcaattctatgtcactgatgcttgaagaattctattcccagctagacgtcgtgggcgtttccagttttaccggagacggattcgacgaatttatgcaatgcgtagacaagaaagttgatgaatacgaccaatactataagcaagaacgtgaaaaagcattgaacctaaaaaagaaaaaggaagagatgagaaagcagaaatcattgaatggcctgatgaaggatctagggttaaacgagaagagcagcgctgcagccagcgacacgacagcatag

SEQ ID NO: 82233 - DNA, 162 bp, Saccharomyces pastorianus
atggccaaaacaacaaaaagagcctccagtttcaggaggttgatgatattcgcgataatagccctcatctcattagcatttggagttagatatctatttcacaattctaatgctactgatttacaaaaaattctgcagaacttgcccaaagagattcccaaa

SEQ ID NO: 82234 - DNA, 660 bp, Saccharomyces pastorianus
atgtccggaataattgacgcatcttctgcattaagaaaaagaaagcatttaaaaagaggtataaccttcactgtgatgatcgtgggccagtccggatctggtagatcgacttttataaatactttgtgcggtcagcaggttgtagacacttcgacgacaatcttgttacccacagatacgtccacagaaatagacttacaattgagagaggagacggtcgaattagaagatgatgaaggtgtcaagattcaacttaatatcatcgatactccgggattcggtgattctctcgacaattctccatctttcgaaatcatttccgactacattcgccaccaatatgatgaaatcttattggaagaaagtcgtgtgagaagaaatccaagatttaaggacggcagagttcattgttgtctttatttaatcaacccaactggccacggtttaaaagagattgatgtggaattcatcagacagttgggatccttagttaacatcattcctgtgatcagcaaatcagattccttgacaagagatgaactgaaactgaataaaaaatgtggatcatggaggatgatcgacagatggaactggccaagtgttgataatttccctttcgatgaagatgaaaatcagtcgaagattacgaaaccagggatc

SEQ ID NO: 82235 - DNA, 1305 bp, Saccharomyces pastorianus
atgaacaacacttccataaccggaccacaagtactacatagaacaaaaatgagaccactaccagtgctagaaaaatactgtatctcgccacatcatgggtttttggacgaccggttacccttgaccagactgagcagcaagaaatatatgaaatgggaagaaatcgttgctgacctgccctctcttttgcaagaggataacaaggtgcggagcgtcatcgatgggctggatgtcttggacttggatgagacgatcttgggcgacgtcagggagctcagaagagcatattccattttggggtttatggcgcacgcttatatttgggccagcggaactccccgggatgtattaccggagtgtattgcaaggccactgttggagacagcacatattttgggtgtgccaccgttagctacgtactcctcgttggtgttatggaacttcaaagtgaccgacgagtgcaagaaaacggaaaccgggtgtttggacttggaaaatattacaacgataaacacatttacgggaaccgttgacgaaagttggttttatctggtcagcgtgcggtttgaaaaaatcggcagcgcttgtttaaaccatgggttgcagatattgagagccattagaagcggtgataaaggagacgctaacgtgatagacgggttggagggcttggctgcaacgatcgaaaggttatcgaaagccttgatggaaatggagcttaagtgtgaacccaatgtattttatttcaagataagaccatttttggccgggtggacgaatatgtcgcatatggggttaccacagggtgttaggtatggagcggaaggacagtatcggatcttttctggcgggtccaatgcgcaaagctcgttgatacagacactggacatccttttgggcgtgaaacacactgcgaatgctgcgcattcttcccaaggagacagcaagatcaattatctggacgaaatgaaaaaatacatgccaagagaacatcgtgaatttctttaccatttggaatcggtatgtaatattcgcgaatacgtttctcgtaacgcttctaaccgtgcattgcaagaggcctatggacgttgcatttccatgctgaaaatatttagagataaccacattcaaattgttaccaagtacattattttgccctccaattcaaagcaacacggctccaataagccgaacgtactaagtccaatcgagcccaataccaaagcaagtggttgtttagggcataaagttgcctcatctaagactatcggaaccggtggtacaagattaatgcccttcttaaag

SEQ ID NO: 82236 - DNA, 195 bp, Saccharomyces pastorianus
atggttgatgcagaagcctcgcaacttaaagcttttcagttgtttcttctcggtcatattttttatacatatatacatacatatatgcatgtgctgtgtactacatgctgcctttcttcaatttttatgtatagacaaggaggccagaaagatattataaacaatgttttttatgtgaacttcgaagtactttga

SEQ ID NO: 82237 - DNA, 516 bp, Saccharomyces pastorianus
  modified_base (513)..(513): a, c, g, t, unknown, or other
atgcaagcggatatgcatggaaaacttcacgctgccttagaagatggtttcttcctctttccttttgaacagcaacaacaacctaacatttattatgacacaaccaccgatcaagaagaccgtccttgtttttcttttggatctacaatttcccctagaagttggcattttgaaaagtctgacaaaattgcctcatctcagctgcagaacttggttcatacacaaccaattcatttaattaatcctcaaatattgttcaatgaagagtttctgaatttggaaaatattgattctcagcctgattctcagcctatttccaaggaaacgaaaactacgaaggactgcacaatggcaactggtcctgaaagaggaaaaaagagctctgaaagtaccagatcctcttcattatcatctcttttttctaatgatgaatccgcatctacgttccactcatcattcaataaccatgataactttcaaaagagcaacagaaatggagatgatatcgatatntag

SEQ ID NO: 82238 - DNA, 1737 bp, Saccharomyces pastorianus
atgaaatacgttgttgtttctggtggtgttatctcaggtattggtaagggtgttttagcgtcctctacagggatgctactgaaaaccctcggcctaaaggtcacttccatcaagattgacccatatatgaatattgacgccgggacgatgtctcccttggaacatggtgagtgttttgtacttgatgatggtggggaaacggacttggatctcggtaattacgagcggtacctcggtattaccttaagcagggaccacaacatcaccaccggtaagatatactcccacgtaatttccagagaaaggagaggtgattatttaggtaagacagttcaaattgttcctcatttgactaacgcaattcaggattggattcaacgtgtttcaaaaattccagtggatgacacaggattagaaccagacgtctgtatcatcgagttaggtggtacggtcggtgacattgagagtgcgcccttcgtggaagcattacgacaatttcagttcgaagttggaagagagaatttcgccctgatccatgtttcacttgtgcccgtcattcatggtgaacagaagacgaaacccacccaagcagcaatcaaagatttaaggtcattagggcttattcccgatatgattgcctgcagatgcagcgaagaacttaacaggagcactattgacaagattgccatgttttgccatgtggggccggagcaagtggtcaacgttcatgatgttaactccacgtaccacgttcccttattgctgctaaagcaacatatgatcgactacctccattcaaggttgaaattaggtgaagtgcctctaaccttggaagacaaggaaagagggtctcaattattgactaactgggaaaacatgaccaaaaacctagatgattctgatgatgttgtcaagattgctcttgtgggaaaatacactaatttgaaggattcctacctatctgtgaccaaatccttagaacacgcaagcatgaagtgccgtcgtcagctagaaatcctctgggtagaggcaagtaacctagagcccgaaactcaagaggtggacaagaacaagttccacgattcatggaataagctcagttccgccgacggaattttggttcctggtggatttggcacgagaggtattgaaggtatgattcttgctgccaaatgggcccgtgaatccggtgttccctttcttggtgtctgtcttggattacaagttgccgctatcgagttcgcccgcaatgtgataggccgcccaaacagcagttctacagaatttttggacgagacactactagctcctgaagaccaagtagtcatatacatgcccgagatcgacaaggaacacatgggtggcacgatgagattgggtttgaggcctaccattttccaaccgaactcggaatggagcaacataaggaagctttatggtgaagttaatgaggtgcatgagagacatcgtcatcgctatgagataaacccgaaaatagtgaatgatatggagtctcgtggctttatttttgttggtaaggacgagacgggccagcgttgcgaaatattcgaattgaaaggccatccatactacgtgggcactcaataccatccagagtatacatcgaaggtgttggaaccatcaagaccgttttgggggcttgtggccgcagcctccggcacacttggtgaagtgatcaaggacataaacctaagcgagggaaatgaaaatgaatga

SEQ ID NO: 82239 - DNA, 303 bp, Saccharomyces pastorianus
atgctgcattgtgcgaggaggtatatgttagtcaggccacgtctcctgtggcaaagtgggacatgtgttgctcgcttccagtcgtcagtacgaacaccagctagcgaaccatcggcagagaaaggggtcgacgagtggcttgaagcgatcaacgagctaagggaagagttctctgcaaaagaatacctgccagagacctcgctggctccaccgggccagtccaaagtagacctcttacagggttcgcaggcgggctccaagataaccaactgcagagcagttggcacaatgggaggcactgaa

SEQ ID NO: 82240 - DNA, 447 bp, Saccharomyces pastorianus
atgggttatacagacattagtattgctaacgttctactgtatttcaataaaaatacagccgtgatcaaggggatgcatggtcagttgacgactattattcgtctcttgaaggcctctcgtttaaatttgcccctagagtccctatgccagccgcctattgagagtgatcatattatggaatatgaaaacagtcctcatatgttttcaaaaataagagagcaatacaacgcgccgaatcaaatgaacaaaaactaccaatattttgtattggcgcagtcacgtatcaggacttgccatgcggtattacttatatctaacttattttcttcactggtaggtgctgattgctgttttcattcagtcgatttaaaatgtggtgttccatgctataaagaagaattatatcagtgccgaaatccgatgaatggtcggacctattatgtcaat

SEQ ID NO: 82241 - DNA, 738 bp, Saccharomyces pastorianus
atgaaaagcttctttatcacctcgcttaaacttgagtttgaatggaagcacagatttaccaagtacaccacaaaacaactaaaggagccttcctattctgaccctatttcccatagttctcataagaggcgtcgtgatagcgtcatgatggactacgatctatccaattttttcagctcaaggcaattggatatttccaaggtattaaacgggacagagcaaaataattctcatgtgaacgacgatgttctcactttgtctttccccggcgaaactgattctaatgcaacacagaaacagctgcctgttcttactccttcggatttgttatctccgttttctgtcccttcagtatctcaagtgctttttaccaatgagctaaggagtatgatgctagccgacaataatatcgattcaggagccttccccacaactagtcaattgaacgattatgtgacttactataaggaagaattccatccatttttttcatttattcatcttccttctatcatacctaatatggacagttatcccttgttattatctatctccatggtcggagcattgtatgggtttcattcgacgcatgcaaaagtgttagctaatgcagctagcacccaaattaggaaaagcttgaaagttagtgagaaaaacccggagacgacagagttatgggttatacagacattagtattgctaacgttctactgtatttcaataaaaatacagccgtga

SEQ ID NO: 82242 - DNA, 1962 bp, Saccharomyces pastorianus
atggaaccgttcgcatttggacgaggggcgcctgcattatgcatacgaaccgcggccgctcgaataaatctggacaattttgttccgtgttgctgggcacttttccgtctgtctttctttttcccgcttgaccctgcatatattagaaacgaaaacaaagaaacaaggacttcttggatttccatagagttttttttcttcgttaaacattgcctctctcaacacacgtttttctcgaagactcttgcaccaaaaagaaactttagggcgaagaagctaaaagacattggcgatactagaatagatagggcagataaagattttttattagtgccggagccaagtatgtttgtgaacggtaatcaatctaatttcgctaagcccgctggtcaaggtattctgcccattcctaaaaaatctcgaattattaagactgataagccaagaccgttcttgtgtcccacatgcactaggggttttgtcaggcaggagcatttgaagagacatcagcattcgcatacccgtgagaaaccgtatctttgtatcttttgcggtaggtgttttgctcgtagagatttagcgctcaggcatcagcaaaaacttcatgctgctcttgtaggtacgggggatccacggcgaatgacgccagcaccaaattcgacttcttcttttgcctccaagcggcgccattccgtggcggcggatgatccaaccgaccttcatatcattaaaatagccggaaataaagagactattctacccaccctgaagaatcttgctggtaagacatctgaagagttgaaagaggccgtggttgccttggccaaatcaaataatgtagaacttcccgtctcggccccagtaatgaacgataagcgagagaaaactcctcctagtaaggcaggctccctaggatttcgagagttcaagttcagcacgaaaggcgtgccagttcactctgcatcaagcgatgctgttatcgacagggcgaacactccctcttccatgcataagacgaaaagacatgcgtctttctctgcatccagtgcaatgacttacatgtctagtagcaatagcccccaccattcaattaccaatttcgagctcgttgaagacgctccgcatcaagtcggcttttctactccacaaatgaccgcgaagcagctcatggaaagcgtgtcagaattggatttacctccgttaaccctggacgaaccaccgcaagctatcaagtttaacttaaatctatttaacaatgacccctccggacagcaacaacaacaacaacaacaacaacaacagcaaaattccacctctagtaccatagtgaacagcaacaatggaagtacagttgctacacctggagtgtatctcttaagtagcggtccatctttaaccgatcttttgacaatgaactctgcacatgcaggtgcgggagggtacatgtctagccaccattcgccatttgatttgggctgcttcagtcatgataaaccgacagtttctgaatttaaccttccgtcaagcttcccgaatactataccgtctaattctactacggcttctaatagttacagtaatttggcaaatcaaacttataggcaaatgagcaatgagcagccgcttatgtcactatctcctaaaaacccaccaacaactgtttcagattcctcttccacgatcaatttcaatccaggcacaaataatttactggaaccatcaatggagcccaatgataaggatagtaatatcgatcctgctgccatagatgacaagtggttatcagagtttattaacaactctgatccaaaatctaccttcaagatcaacttcaatcatttcaatgacattgggtttatttattctccaccttcatcaaggtcatctataccaagcaagtcacctccaaaccattctgctacctcattaaatcatgaaaagcttctttatcacctcgcttaa

SEQ ID NO: 82243 - DNA, 354 bp, Saccharomyces pastorianus
atgcagggtcaagcgggaaaaagaaagacagacggaaaagtgcccagcaacacggaacaaaattgtccagatttattcgagcggccgcggttcgtatgcataatgcaggcgcccctcgtccaaatgcgaacggttccatccgaaacaggccatttcccaaaggttatttctcttaatggaagttgctcgcgtagttacctattgtcgatgccgcatatacgcagttaccttatccgttgccctacggagaatttccgcgatgcagcaccgtgcggcgagatcacaattttccttgtacactctactctgcccctggagtggttcacccccgtctgtgcgtatgttcgtgtatga

SEQ ID NO: 82244 - DNA, 105 bp, Saccharomyces pastorianus
atgatatctaggaccattggtgaatctattccgcccaacacaaaacatgctgtttccgtgtgtttgcccacatgggaagctacagtaggctatgaagagggtgaa

SEQ ID NO: 82245 - DNA, 2568 bp, Saccharomyces pastorianus
atggatattacagaattgttacagtgctttgcctgtactttggaccataacgctgccgtaagaactaatgcagaaacacatcttaaaaatgcaagtaaagtaccgggattcttaggcgcatgcctggatatcattgctgctgatgaagtaccagaaaacatcaaattatcagcttccttatatttcaagaataagattacatacggatggtctgctggtgccagacagggttcaaatgagttattagattcacatgttgatccggatgaaaaaccagtagtaaaagatatgttaattaaaacaatggtcagtgtgtccaagacctccccgcgttgtatcagagtgctaaaatctgcccttactgtaattatttcagaagattaccctagcaaaaaatggggcaatttgttaccaaattccttagaattactcgcaaacgaagacatcacagtaacatatgtcggacttctgtgtcttgctgagatttttaggacctataggtggaagaataatgatgaaagacaggacttagaagagttgattttaaattatttccctgctttattaaactatggcgcaaatgtccttttccaagatggtaaatatatgaataacgagcaaattggcgaattggtaaaattaatcattaaaatttataagttcgtttcataccatgacctaccatttacattacaacgctcagaatcgtttaccccatgggcatgtttttttgtcagcatcattcagcagccattgcctcaggaagttttggctatatcagatattgaggtcagaagtaaaaatccatgggtcaaatgtaagaaatgggctcttgcaaacctttatagacttttccagagatacgcatcaacgtcattaacaaggaagtttcagtacgatgagtttaaacagatgtactgtgaagagtttttgactcagtttttgcaagtcgtcttcgatcaaatcgagaaatggggaactggacagttgtggttaagtgacgaatgcttatactacatattgaactttgttgagcagtgtgttgtgcagaaaacaacttggaaacttgttgggccccactacaatgtaatacttcaacatgtcattttcccactactaaagcccactgcagagactttggaggcctttgacaatgaccctcaagaatatatcaaccggaatatggacttttgggatgtcggctattccccagatcttgccgcactggctttgctaacgacatgcgtgacgaaacgcggtaaaacgaccttacaaccgaccttagaatttatggtctcaaccttacaaaatgccgttggtgattacaacaatattatgttggataatgccttgcaaattgagtcctgtttgagaatattctccagcattattgaccgtttgataactaaagactctccatttgccagtgagatggaaaagtttatattgacatacgttttacctttttttaagtctcagtatgggtttctgcaaagtcgtgtttgcgatatttgttcgaagttgggttctatggatttcaaagacccgataataacctctactatctacgaaggtgttatgaattgtctgaataactcttctaattcattacctgtagaattgacagctgcattggcattgcaaacttttatcagtgatgagcagtttaatatgaagttatccgaacacgttgttcctactatgcagaaattactaagtttgtctaatgattttgaatctgatgtcatttcaggcgttatgcaagattttgtggagcagtttgctgagcaattacaaccttttggtgttgaattaatgaacactttggtccaacagtttttgaaattagctattgatctgcatgaaacatccaatttggatccagattccttcacgaacgttgatagcatacccgatgaatctgacaagcaaatggcggcgctaggtattttgtcgactacgatatctattctgttgtcttttgagaattcacctgaaattttgaaaaacttggaacagtcattttatccagctgcagagtttattttgaaaaacgacatcgaagatttctatcgcgaatgttgcgaatttgtagagaactctacattcctactgagagatatcacacccatcagctggaaaattttagagctgattggagaatgtaatagaaaaccagatagtatggtatcttattatttaagtgatttcatgctagccttaaataatatcctcatttatggaaggaacgaattaaagaagaacgagttttacacaaaaatcatattcgaaatatatcaaaaggctgttactgcagaagataattcgttagacgatcttagagtggtttttgatttatcccaagggttggttcttgcattggatgacagtttacctcaacaatacagagagcgcctactggcggatgttgtcggctctattctaacgcaaaagaatgaattgaaaactaatgttgtatttagtgtgactgcttttaatgtcgtaatctcaaatatgataacagagcctttgatcacgcttcagtacctgaaacagcaggttgtctga

SEQ ID NO: 82246 - DNA, 870 bp, Saccharomyces pastorianus
atgacggccgtaactgatatcatcgatgaattgaatgattcgagtctttcttctacaaggcttcgagagttgtgtctccagttacgaaagaagacagatactggatgtgcaattacggtgtccgatgaggtcaaccttattgaatctctctcatatcactccatatctccaggagtagacatacaaatcaacacagatgttttgcagactatagattactactttcagcgtaacaaaagtgaacatgacgaaattatgtgcgtccttatttctaagttacagccactacttttaaaacgcaaaagcaacttcgaactcaaagagcaacgtaatcttggtctcaaacccacgcttggaatgtctttgaaagaagataacctaatgcaggcgtgggtaagtcagggtggcttgaaaggcattccgttattctacgtaattctgttacatttgaaaaggagagacatatctacgaatctttcttggattattccaggaattctaaacatactagatgataccactgatataagaagaattaaacttcgtggtgttctgctcctacagacgctattaaatcatacctttatgaacgaaaccaatgactcaaaatggatacagttctctagtactggtttatttccactgttcgaaaagacgctaatcaatatgtgctattttctccctccctcatacaatgctgatgaaacaatagccatatggcgggtcgttttcccaacgatacagtcgttatataaagtagaatttttggacaattacacaaagtatcaatatcacctggaaaagttcatgtcagagataatcgtgcaaaacataattcctagggctacgacttgcatacagaaaatatga

SEQ ID NO: 82247 - DNA, 522 bp, Saccharomyces pastorianus
atgtctgtgcccaaaaaacgtaaccatgggaagttaccaccttccactaaggacgtagacgatccttcgttgaagtacacgaaggccgcgcctaaatgtgaacaagttgctgaacattggctcttgcagccactaccggaaccggaatcacgttatagcttttgggtaacaattgttaccttattagcgtttgctgctagattttataaggtctggtatccaaaagaagttgtttttgatgaggtacatttcgggaaatttgcatcgtattacttagaaaggtcttatttctttgacgttcatcccccttttgctaagatgatgattgccttcattggttggttatgtggctatgatggttcctttaagtttgatgagattgggtattcttatgaaactcatccagctccatatatcgcgtaccgttctttcaacgcgatattgggcacattgactgtaccaattatgttcaacactttgaaggaactgaatttcagggctattacaatgtgcgttgcatct

SEQ ID NO: 82248 - DNA, 198 bp, Saccharomyces pastorianus
atggagatgctcttgtttctgaacgaatcatacatctttcataggtttcgtatgtggagtactgttttatggcactcatgtgtattcgtatgcgcagaatgtgggaatgccaattataggggtgccggggtgccttatgaaacccttttccgtgcctgtgatttccgttttcggtcaaaaagaatatccgaattttag

SEQ ID NO: 82249 - DNA, 1779 bp, Saccharomyces pastorianus
atgcattggacgtccatcttgagcgctattttgcttttctgcctgtcaggagcaagagcatcacctgcaaagacagttattcgtaacaaggtgcccttgcttgtcactaatgcctgcacgaggatttttcaaaaagttacttgggagtataccagcaagtctaagcgttcatcaccagtatgttcttacgaaccagcgtttcaatcaatgctgtattgtatctatgaaacgttggatgaaaaaggttattcgaataagaccttagaaaaaacatttagtaccatcaaaaaaaactgtgcaagttatagtgatgctcttcagaacatgactaattctgagttttatgacgttctaaacaacggaacgaggcatatgacaccctatgtcaaaggcagtgcaaacctaacatatccagttgaaatggatacacagttaagaaaagcctactatcatgcattgcatggcttctatgctaacttagatgtcggaaacatatatggtggcattatatgtgcttattttgtcgctatcatggcttttgcaggcgttcttcattgcatgaattacactccctttaaaactgttctattgaagcaaaagcttgtgggatatgtaaggggatacctcactctacctaccattggaagcaaacatgcgtcagatttctcttattttaaaatattcacgggatatttacctacaagattagagggtatcattattcttggatatctcgtgcttcataccgtttttttggcatacggttatgaatacgatcctgaaaatataatattcaagtctcgtagagttcaagttgctcgatatgtggcagatagaagtggtgtactcgcattcgcacactttccattaatagttcttttcgcgggaagaaacaactttctcgagtatatttctggggttaaatatacttccttcattatgtttcacaaatggttgggaagaatgatgtttttggatgctatgattcatggctctgcatatactagttatacggtagcgaataaaacttgggcaacaagtaaaaaccgattatattggcaattcggggtggcagcactttgtttagctggcacaatggttttcttttcctttgcagtattcaggaagtatttttatgaagcctttctttttcttcatatcgtccttggtgcaatgttcttttatgcatgttgggagcatgttgttagtttaagtggcattgagtggatatacactgctattgcgatttggatcgttgaccggattattagaattatcaaagcttcttattttggtttccccaaagcttccttacaactaatcggggatgatctcattcgtttaacagttaaaaaaccggcaaggccatggagggccaaacctgggcaatatgttttcgtttcgtttttacatccactgtacttctggcagtcacatccatttactgttttggattcagtaagcaagaatggtgaactggttattatcctgaaagaaaaaaagggagtaacaagacttgtcaaaaagtatgtgtgtcgcaatggaggtaagacatctatgagactagctatagaaggtccatatggttcttcatctccggtcaataattacaataatgtattgttactcactggaggtaccggtttgcctggacctattgcacatgcaattaaacttggaaagacgtcagcggctgctggaaaacaatctgtaaaattagtgattgcagttagaggattcgacgtactcgaggcttataagccggagttgatgtgttga

SEQ ID NO: 82250 - DNA, 849 bp, Saccharomyces pastorianus
atgacgattaaccagcatttacaacaacttctcttcaacagaatagacaaaacaacaagcagtattcaacaagctagggcgccgcagatgttattagatgaccagctgaagtattgggtcctgttacctatttcgattgtcatggttttgacgggtgtactcaaacagtacatcatgacacttataacgggaagcagtgcaaatgaagcacaaccaagggtaaagttaactgaatggcaatatctacaatgggcacaattattgattggaaacggtgggaacctgtcttccgatgcatttgctgcgaagaaggaatttctagttaaggatctcactgaggaaaggcacctagccaaggccaagcagcaggatggttcgcaagctggagaggttcctaatcccttcaacgatccaagtatgtctaatgctatgatgaacatggctaagggtaatatggccagtttcatccctcaaactattattatgtggtgggtgaaccatttttttgctggatttattcttatgcaactacctttccctttgactgccaaattcaaagagatgttacagaccggtattatctgtcaggacctggatgtgagatgggttagctccatttcatggtattttatttctgtgctcgggctaaatccagtctacaacctgattgggttaaacgatcaagacatgggtattcaggctgggataggtggccctcagggcccccaaggccctccacaatcacaggttgacaaagcaatgcatgcgatggctaacgatttgactatcattcagcatgagacttgtcttgataacgttgagcaaagggttttgaaacagtatatgtaa

SEQ ID NO: 82251 - DNA, 1983 bp, Saccharomyces pastorianus
atgacagtctcacacaatcattctacgaagatatcccaacaaccaatctcctcggtatcagcatttaagttcttcggaaagaagctgttaagttcaagccatgggaacaagttgaagaaaaaggcgtctctacctccagacttccactctacaagtactaatgacagcgaatcctccagcccaaaactgccgaattcgttgaaaacctctcgccgtgcaaactctttcgctcacacaaccaacagcaagagatctttatcttccgcctcaaccaagatcctacctccggccggctccagcacgtccatctcaagaggaaacagacattcgtccacttcgcgtaatctctcaaactccaagttcagtagcgaacgattagtgtacaatccatacggcgtctcaaccccaagcacgtcactctcgtccgtctctacctccatgaagaaagaccctgatctgggcttctaccttcacgatggggattccaaaatccgcatgctgccgatcccaattgtggacccaaacgagtatctgcccgacgagatgaaggaggcaagcgtccagttgagcgataacttcgtctttgatgatgagaataagaccatcggatggggcggttcgtgcgaagtgcgcaagatccgctccaagtaccgcaagaaggacgtatttgctctaaagaagctcaatatgatctataatgaaacgcccgagaaattctacaagcgctgttcaaaggagtttatcatcgcaaagcagctaagtcatcatgttcacatcacaaatactttccttctaatcaaggtacccaccaccgtctacaccactcgcgggtgggggttcgtcatggagctaggtctacgagatttgttcgcgatgatacaaaaatcgggctggcgcagcgtggccctagcagaaaagttttgtatattcaaacaggtggcgtgtggtgtcaagttttgccacgatcagggcatcgcccaccgtgatttgaaaccggaaaatgtactgctatccccggacggcgtgtgcaagctgacagattttggtatctcagactggtaccacacagatccacacgacctgtccagccctgtcaagaagtgcgcagggatgatcggctcgccgccgtatgcgcccccggaggtcatgtactacgactccaagaagcactacgatacggaattgcaacagccgtatgacccacgcgctctagactgttatggcctcggtattatcctcatgaccctcgtcgacaacgtcattccatttttggaatcctgcagctttgacactggtttccgcgattactgtgacgcttatgaaaactttatccgtcttcacgatcgcgcattccgcaatcgtggcaattaccgcccggggccgggaatggagtatcgcttggctagaaatttcaagaatggacatgcatctcgcgtggcatggcggctcgctgacccagaagccgccacccgctacaccatcgacgacctcttcgaagacccatggttccaaggaattgagacttgtgtggatgccaacgacaaatatgtgtgtaagaaacctattatcaaaaccactacgtacgagaatccgcggggtttccatatcgctacagatgttgctgcaaccacacccacctcgaacccattccttaagagccgagtccccatcaggtcaatggtagatatagccgcccatccttccccaacggccacggttttagcgtcgtcgcctccgccgcctcctccggcgcactcatgtgccagcggcgaggccctatttacacttagggaaaccccgccgccccagctagcaaccctcacgcttagcgaagaacctcccgcaattcccgcaacacccgcaccttccgctcgcgttcgtggccactccccgcacagggtagtgcatcaccatctaaacattgtcaacagcttggtccatagttctagcgcggcgtcttctcaggttccggcttcgacctag

SEQ ID NO: 82252 - DNA, 345 bp, Saccharomyces pastorianus
atggctagatacggtgctacttccactaaccctgctaaatccgcttctgctcgtggttcctacttgcgtgtttctttcaagaacaccagagaaactgctcaagctattaacggttgggaattgaccaaggctcaaaaatacttggaacaagttttggaccaccaaagagctattcctttcagaagatttaactcttccatcggtagaactgctcaaggtaaggaatttggtgtcaccaaggctagatggccagctaagtctgttaagttcgttcaaggtttgttgcaaaacgccgctgccaacgctgaagtatgtcaagaatattatatgtttagtaccagatga

SEQ ID NO: 82253 - DNA, 387 bp, Saccharomyces pastorianus
atgatatttctaaaatctgtcatcaaggtaatcgacaattcaggtgcacaattagcagaatgtattaaagtaataaggaaagggtcccccaagagtcctgcaatggttggagacagaatagtctgtgttatacagaaagcaaagcccttgactcaaaacattacgggaacagccaacaccaaccgtgtcaaaaaaggtgatatttgtcacgcaattgtcgtaaggtctaaacagcgtaacatgtgcagaaaggatggctccaccgttgcattcggagatactgcttgcgttttgattaataaaaataccggtgaacctctggggacaagaattatggctaatgatggttgtgtagatagaacacttgaaagacaagggatacaataa

SEQ ID NO: 82254 - DNA, 2151 bp, Saccharomyces pastorianus
atgatggactcaaaaacatttacagcatcaatggtaatgcaggaggagaagaagcggcaacaacctgtgacaagaagagtaaggtcattttctgagtcctttaaaaaccttttcaggccgcctcgttcaagagattcaagtcctattaatgtcacccgaattccttatcgatcgtcttctacctcacccaagagaagctctgagccaccaagacgatcaaccgtatccgcacaaattttaggtccaaaaaattctccaatacgccggcgtagttatacattgaagtgttgcaccccgggcctgtcacatccatttagacagacaggaagtggtgctagtaatagtcctaccagacatcgctctatatctggggaagaacaggaaattgttaacagtttaccagaatacaaaagatctgcttctcatagttttcatggcatacggcgtccacgttcaagaagttcatctgtttcgtcatgtgacagttcaaatggaacgacaagttcatcagacagtcaatgggctatggattctttactagatgattcagacaatgacctcacaccttatcgtggctcgaacaaagatatactgaaaagtaaagaccgggcgccgtataattacatagatgactacaataagaaggctttacgcagagcaacatcatatccaaatcctctcccctccaagcaattctataatgaaaggttatacaccaggaggtcacatccagatgaagaaagtttggagagcttgcctcggtttgcaggagcagatgtgcaatgtataattgagcaaaatggcttcaaagtttacgaagacggaagtcatgaacataatataaagttatcaggggtaattgcgaaattagagaaaggtaactccttaccggcacatcgacagggatcattatctagaccaagattaggtattactctttctggtctattcaaacatcataaaaatgaatgcgatattgaaaacgctttatctcttctgccaaacgtagaaaaatctcagacaaaccatgagaaaagaaccggtcaaagtcctaacgatagcaaccgcagctcgcccacgcaaggaagggaagattatctaaaaatagtgaatcccgacgcatcattgggcagtgatgagttgaagttgattaattcattatcaagcagaattcataaaagtttacaaaattatttgcaagaaaaaaatctaaaaccggctgagtgtatcggcgagcaagcacctacttttcaagataattatggccatcctgttggtctcgttggcgctggagcttacggtgaagttaagctgtgtgccaggctacggaatgaaaaggactcccccccatttgaaacatatcatgatagcaaatacatatactatgctgtgaaagaattgaaacccaaaccagacagtgatttagagaagttctgtacaaagatcacctctgagtttattattgggcattccttgagccactaccacaaaaatggtaaaaaaccagcccccaatattctaaacgtatttgatattctagaagacagttcttcgtttattgaagtaatggaattttgccctgctggtgacctttatggtatgctggtcggtaagtcgaaattaaagggccgattacatccgttagaagccgattgtttcatgaagcaactgcttcatggtgttaagttcatgcatgatcatggtatcgctcattgtgatttaaaacctgaaaatattctcttttatccgcatggtctattgaaaatatgtgacttcggtacaagttctgtatttcaaaccgcttgggaaaggagggttcatgctcaaaagggtataattggatcagagccttacgtagctccagaagagtttgttgatggggagtattacgatccaagactgattgactgttggagttgtggcgttgtttatataacaatgatattggggcattatctttggaaagtagcttcgagagaaaaagatatgtcttatgatgaattttacaaggaaatgcagcgtaaaaaccagtttagggtattcgaagaattaaagcacgtaaactcagagttggccacaaatagaaaaatcgcgttatatcgcatctttcaatgggaaccagaaaaaggatttctgttggcaaacttttag

SEQ ID NO: 82255 - DNA, 1515 bp, Saccharomyces pastorianus
atggcgactgacaccgagaggtgtattttccgtgcattcggtcaagattttatcctaaataaacattttcatttgacaggtaagattggtcggggctcacacagccttatttgttcttcaacttacacagaatcgaacgaggaaactcacgtggctatcagaaaaataccaaacgcgtttggcaataaactatcttgcaagagaactcttcgtgaattgaagctactaagacatttaagagggcacccaaatatagtgtggctcttcgatactgatatagtattttacccaaatggggcactaaatggcgtttatttatatgaagaactaatggaatgtgacctttctcaaattataaggtccgaacaacgcctggaagatgcacactttcaaagcttcatatatcagatactgtgtgctctgaaatacatacattctgcaaatgttttacattgtgacctgaaaccaaaaaacttacttgttaatagtgattgccaactaaaaatttgtaattttgggctatcgtgtagttattcagaaaaccacaaggttaacgacggcttcattaagggttatataacctcgatatggtataaagcaccagaaattttgctgaattatcaagaatgcacaaaagctgtcgatatttggtcaacaggctgtatcttggccgaactacttggtaggaaaccaatgtttgaagggaaggattatgtagatcatttgaatcatattctacaaatacttggaacaccacctgaggaaacattgcaggaaattgcctctcaaaaggtgtataattatatctttcagttcggtaatatcccgggaagatcgtttgaaagcatactacctggtgctaatccagaagcgcttgaattgctaaagaaaatgctagaatttgatcctaaaaaaaggattactgtagaggatgcactagagcatccatatttgtcaatgtggcatgatatagatgaggaattctcatgtcaaaagacctttagattcgaattcgagcatatcgaaagtatggcggaattaggaaacgaagttataaaggaagtatttgatttcaggaaagttgttagaaaacatcctattagcggtgattccccatcatcatcactatctttagaggatgccattcctcaagaagttgtacaggtccatccttctaggaaagttttacccagttatagtcctgaattttcctatgtaagccaacttccatcactaactacaacccagccatatcaaaaccttatgggaataagctctaattcatttcagggtgttaacgaaaaggaaaacaccttcaaacaagatactaagcatgaaaatagcgaactactgaacggacctactgagccaaatataacaaaaatgggcccagtttcatcgtctcccccaggtcacgatataaatgtcaatgatggtacaaaccaaaatacaaatgaggatgacagcgattttttcttcgacctagaaaaagaacttgaattatttagacgataa

SEQ ID NO: 82256 - DNA, 1587 bp, Saccharomyces pastorianus
atgtcatggtattcatgtaatgagtttcaaccagaatggaaagtttgggaacagtatgttactgataccttacaacatgcattaggccttgactctttaaggtcctctcatccgatcgaagtacctgtaataaaagctgacgaaattaatcaaatctttgatgccatctcttactcaaagggtgcttctttattaaggatgatttcgaaatggttaggtgaagaaacctttattaaaggtgtatcccaatacctgaataaatttaaatacggtaatgcgaagactgaagacctatgggatgctttagcggacgcctccggtaaagacgttcgttctgtgatgaacatctggactaaaaaagttggtttcccagtcatttcagttagcgaagatggtaacggtaaaataacatttcgccaaaaccgttacttaagcacagctgatgtcaagcccgacgaggacaaaaccatctatcctgtatttttggctttgaagactaaaaatggagttgacagttccgttgtattgagtgaaagaagcaaaactattgaattagaggatcctacctttttcaaagttaacagcgaacaatccggaatttatataacatcctacaccgatgaaagatgggcaaaactgggtcaacaagctgacttattgtctgttgaggaccgtgtcggtctggttgctgatgtcaagacactatctgcttctggctacacttcaactactaattttttgaacttagtctccaaatggaataatgaaaagtcatttgtcgtctgggaccaaataatcaacagcatatcttcaatgaaatctacttggttattcgaaccaaaggaaacccaggatgcgcttgataacttcacgaagcaactaataagcggtatgacacaccacttgggttgggaattcaaatcttctgattcgttctccactcaacgtttgaaagtgaccatgtttggtgctgcttgtgccgcaagggacgcagacgttgaaaaagctgctctaaaaatgtttactgattattgcagcggtaataaggaagccatcccagcattgattaaaccaattgtatttaacactgtggcaagagttggtggtgcagaaaactacgaaaaagtttacaaaatctacttagatccaatctctaacgatgaaaaattagccgcattaagatctttaggcagatttaaagaacctaaattattagaaagaaccttaggatatttgtttgatggcactgtcttaaaccaagacatttatattccaatgcaaggaatgagagctcatcaagaaggtgtagaggctttgtggaattgggttaaaaagaactgggacgaactcgtaaagagactacctcctggtctttcaatgctaggctccgtcgtcacattaggtacctctggctttacatcaatgcaaaaaatagatgagattaagaaattctttgccactaaatccacgaaaggtttcgatcaaagtttggctcaatcactggacactattacttcgaaagcgcagtgggttaacagagaccgtgatgtcgtcaacaagtatttgaaggaaaatggttacttttaa

SEQ ID NO: 82257 - DNA, 171 bp, Saccharomyces pastorianus
atggaaaattggggtttagtcacttatagagtgcttgatctactactagtcaaagagaactctacagtagatcgtattcaaagagtgactgagattgttctacatgaattagctcaccaatggtttggtaacttagttactatgcgactggtgggaaggcggatcggctaa

SEQ ID NO: 82258 - DNA, 792 bp, Saccharomyces pastorianus
atgaccagtaaaaccccaaaacgtgaaattcttcctgataatgtcgttcctttacactacgatttaaccgtggaacctgatttcaaaacattcaaatttgaaggctcagtcaaaattgagctaaaaattaataatcctgctattgatacggtaacattgaacaccgtcgatatcgacatccattctgcaaaaatcggtgatgtcacatcttccgagattatctctgaagaggagcaacaagtcaccacatttgcgtttcctaaagggaccatgtcttctttcaagggtaatgcatttttggatataaaatttactggtattttaaatgataatatggctggcttttacagagccaaatatgaggacaagttaacaggtgagacaaaatacatggctactactcagatggaacctactgatgctagaagggccttcccatgttttgatgagcctaacttgaaagcctcttttgctattactttagtttcagacccatctttgacacacctatccaatatggacgtcaagaacgaatacgtaaaggatggaaaaaaggtcactttgttcaatacgacccctaaaatgtcaacttaccttgttgcttttattgttgctgaattgaagtacgttgaatccaaaaactttcgtattcctgtcagagtttacgccaccccaggtaacgaaaaacatggtcagtttgccgctgatttgactgccaagactttggcattttttgaaaaaacttttggcatccaatatcctctacctaaaatggacaatgttgctgtacac

SEQ ID NO: 82259 - DNA, 399 bp, Saccharomyces pastorianus
atgtctccgccttgcaattgtaggctgttactcgggtttcttatcaagtggcgtgccacggcatctaccacatgtggctcagggttatttatgctcacttcaagcgtgccattgttacaggaagtgtgcgacgcgtcgggtacgctagcatgcaccgcttcattgttcacaagcagcggcggcttttttagcaaaccacctgtagttccactagattttctacttctgcttctacttctactattaccgttgctattgccaccgttgccgtccgttaaaggtgagccagacgcatgcgagattcctgtactgcctccgttgttattttttttgttgttgttgctctgcgttcttccagagccacttgaaacctcttttccattcatatccgcgatgtaa

SEQ ID NO: 82260 - DNA, 1533 bp, Saccharomyces pastorianus
atgtcctacaataatggcaatacttattcaaagagttatagcagaaataataagagacccttgttcggaaagaggtcgccaaatcctcagtccctagcgagaccaccgccaccaaagagaatacggactgatagtggttaccagtcgaatatggacaatatatcttctcatagggtaaattcaaatgaccaaccaggccacacgaaaagtcgtggtaacaataatttatctcgctataacgatacatcctttcaaacaagttccagatatcaaggttcaagatacaacaataataatacgtcgtatgaaaataggcctaaaagcataaaaagggatgaaacaaaggctgaattcctgtctcatttgccaaaggggcccaaatctgttgagaaatcaagatataataattcatccaatactagtaatgatataaaaaatggctatcatgcttcaaaatactataaccacaaaggccaggaagggcggtctgtcatagctaagaaagttccagtttcggttctaacgcagcaaaggagcacgtcagtttacctaaggataatgcaagtcggagaaggaacatatggtaaagtttacaaggcaaaaaacacgaatacagagaagttagtagcgctgaaaaaattgagattacaaggagagagggaaggctttcccataacctctatacgagagattaaactactacaaagttttgatcatccaaatgtctctactataaaagaaataatggtcgaatctcaaaaaactgtatatatgatatttgaatatgctgacaacgacttaagtggattactattaaataaggaagtccaaatttctcactcacaatgcaaacatctcttcaaacaattgctattaggaatggaatatttacatgataataagattttacaccgtgatgttaaaggctcaaacatcttaatcgataaccaggggaatctaaaaataacagattttggactagcgaggaaaatgaattcgccagctgattacactaaccgtgtcattacgttgtggtacagaccaccagaactattgttgggaactacaaattatggaacagaagttgacatgtggggttgtggctgcctcctggtggaattattcaataagactgcaattttccagggctctaatgaattagagcaaatagaatcaattttcaagattatgggaactcctacaataaatagctggccaacgctttacgatatgccgtggttttttatgattatgccacagcaaactaccaagtatgtcaacaatttttctgagaaatttaaaagcgttttaccatcttcaaaatgtctgcaattggcaattaatttgttatgttatgatcagacgaaaaggtttagtgcaaccgaagctttacaaagcgactatttcaaggaagaaccaaagcctgaacctttagttcttgatggattggtaagttgccacgaatatgaagtcaattggcaagaaaacaaaagcgtcctaacatactatccaccaacacaaaacataacggta

SEQ ID NO: 82261 - DNA, 255 bp, Saccharomyces pastorianus
atggagcaaaacaaagatccgcagatgatctcgaaacatagttctaggctacctatatgggtgctaagtcctcgcgaagaacaacaggctcgcaagaacttgaagacggaaacatacaaaaaatgtgcaaattttgttcaagcaatggcagattgtgctaaggcaaatggaatgaaagtttttcccacttgtgataagcaacgagatgaaatgaaatcgtgcctcctgttttatcaaacagatgagaaatattag

SEQ ID NO: 82262 - DNA, 1410 bp, Saccharomyces pastorianus
atgatggcttttgagaatacaagtaaacgaccaccccaggactttgtagctcctatagatcaaaaaaaaaggaaggtccagttttccgatagtactggcctggtaacccttcaaccagaggagataaaagatgaagtgttttcagcggccatgtatagcaggttcgtgaaatctgccctagatgatctggataagaatgattcaacccagatcggcataattgccaatcaagtagcgcttccgagcaagaatcctgaaagaattaatgataagaatctcaatattcttttggatatcttatctagtaatatcaacaggatagaatcctccaggggaactttcctcatacaatctatcataaactttgagaagtggtgggaattgcctccacaaactctaagtaaatatatatatttcatcaaaatcctttgctcgagtatacccaaatggtggcaagacgtttcgatgatactggtatcttgttttattttaccaatcaaacagacagtgtgtcatcatgatatgcttaaatatttcttaaggatgattccctcctcgatgggattcatagatacatatttggccaaatttttcccaaataaaaatgatactcggagaaagttggttaattacacttcaaatttgctgaaattgagaggctactgctctgagctaggattccaaatttggtccttactgatagaaaagattatttcgattgatgtcgagttacaaaatgaattagatgaattagatgatgatgtagatgacgatgatctagaggaagttgatctagaggatgacgacgatttagatgatgattcaggagacgatgatgatgaaaattgtgggaacagtaatgaagagttaaggtctggagcagccgacggtagtcaaagtgatagtgaagatatggacatcattgaaggtatggacggaactgaagaatataatgtggagttgacgcagggaatcaaagaactttccaccaaattggactctatcttaactttggtaagcacgcatgtggaagagcaagtgacgccggagagtttagaaagcggcgaaggcgtaggagtcttcaacactctaacaacattatttaaaacgcatgttctacccacgtactataccaggtcgattcaatatatcatgttccatgtttcacaacaacaattagaactaatggattcatttttagtaacactgatagatatttcatttgccgtcaacgaagccgcggagaagaaaattaagtcattacaatatttggggtcgtacattgcgagggccaagaaactatccagaactcaaattattttcgttgcaagctatttaacgtcctggttgaatagatacgttatcgaaagagaagacctgcaggcatgcaagcttgcactgccgtcgttt

SEQ ID NO: 82263 - DNA, 753 bp, Saccharomyces pastorianus
atggctaaacttgtacatgatgttcagaaaaagcagcatagagaacgttctcagctaactagccgttccagatatgggtttttagaaaagcataaagactatgtgaaacgtgctcaagacttccacaggaagcagtccactttgaaagtcctcagagaaaaagcaaaagagagaaatccagatgaatactaccatgctatgcattcaaggaagacagatgcaaaaggactgctgatcagctcacgtcacggtgacgaagaagacgaatcgctttccatggatcaagttaaattactcaaaacgcaagatagtaattatgtgaggacgctgaggcaaatagagctgaaaaagctggagaaaggagcgaaacagttgatgttcaaaagcagtgggaatcatacaatattcgtcgattcccgagagaagatgaacgaattcaccccagagaagtttttcaataccacctccgagatggtgaatagatctgaaaatagattaactaaggaccaattagcccaagatatttcaaacaataggaacgcttcatcaataatgccaaaggaatcattagacaaaaagaaattgaaaaagttcaagcaagtcaagcagcacttacagagggaaactcaattgaaacaggtccaacaaagaatggatgctcaaagagaattgttgaagaagggttccaagaaaaaaatcgtagactcttcaggaaaaatttcatttaaatggaagaaacaacggaaacgttag

SEQ ID NO: 82264 - DNA, 1473 bp, Saccharomyces pastorianus
  modified_base (1299)..(1384): a, c, g, t, unknown, or other
atgagtaattcacttgaggagcgccttcgtgctaattcaagcgccttcgatggtttattggctttaattcctgcaaaatactattatgacgaaaaaagtcaagagcaatggaaggccaagaagaaaaccaaagaacagagtaaaaatgataaactgaaaaaattagacccggagcaacgtgatgatgaaacatctagtacattagaagtaatgaagaagaaggagaaagacgcaaagccggtggtcctacctggtgaaaaattcaagcacatgaaaatgcaaaagcaaaaggaagcaacatcaaaagtggaaggagactccgacctgaacgtagaagtaaacgatcctatgataatagcaccagacgaagatgaagaagaggaagaggatattaaggtgatctttgatgatgagggaaatgaaataccattagaatctaaaaaagatactacagagcccgatagatctgtcgaaaagaagtctattacagaggaagagaaactacaaagaaagaaaaacttggaagcactacgttccaagttacaagcgaaaatttcagatatgaagagtaaaaggaaagcacccggttctagagaggctattcttgctcaaaggaaacgcaaggaagagttgaaaaaaagaaagcgtctagaaagtgaacaggaacaggatcaggatgaaattgcgtctgattccgatatggaagacatcgatagtgatttagaaaacaattcgaaaaaaagattcaaaaaaggcaagaaggactcagaaattaacgcagatggtgtaatgtttcaaaatatcatattcgatgatggtgcaagggccacttcagatttacaaaggttaagaaaagctggtagaacgaagggtccggctaagaatgatgtaaaatcacacttaaagttattagaagccaagaagaataagatggagacgaaagacgaactagaacaaatcaagcagaaggaaaaggaaaaatggcaaaaggctatgttacaagcagaaggaattaagattagagatgacgaaaaactacttcgcaaagctataaagagaaaggaagcacaaaagagaaagtctgcgattgaatggagcgaacgtaagagggttgtggaagacacgatatctgaaagacaaaagagaagagaagagaacctgaggattaggaaagacaacaagggtaaaaagagaaataagcaagaaaagatgaaaagaaagtatgtcggtagtgccgtaccaaagaaaagagccggatttgagggtagattaaaaacaggtaaaaagaagggaggaccnnnnnnnnnnnnnnnnnnnnnnnnnnnnnnnnnnnnnnnnnnnnnnnnnnnnnnnnnnnnnnnnnnnnnnnnnnnnnnnnnnnnnntatatataccatcgcattttttccttaacgagaagagcacagcagagcttaagatggcatgcatttatagaacaacactcaacagatag

SEQ ID NO: 82265 - DNA, 1302 bp, Saccharomyces pastorianus
  modified_base (1169)..(1230): a, c, g, t, unknown, or other
atggctactgcgttatatactgcaaacgatttcatattaatctcgttgcctcaaaatgctcaacctgttaccgcccctggctccaaaactgattcatggttcaatgagaccttaatcgggggtagggcatttgtttctgatttcaaaattcccgaattcaaaattggctctttagacacattgatagttgaatcggaagaactgtctaaagtggataaccaaattggggcttctattggcaaaatcattgaaattcttcaaggcctcaacgagaccagcaccaatgcttacaggactttacctatcaataatatgccagttcctgaatacttggaaaattttcaatggcaaactagaaagttcaagttagataagtctatcaaagatttgataacattgatttctaatgaatcttctcaattagacgccgacgtcagagctacttatgcaaattacaacagcgctaaaactaacttggctgctgctgagagaaagaagacgggtgacctttctgtcagatccttgcatgatattgtcaagcccgaagacttcgttcttaattctgaacatttaactactgttctagtagcagttcccaaaagtttaaaatccgatttcgaaaaatcgtacgaaactttatccaagaacgttgtaccagcatctgccagcgtgattgcagaggatgctgagtatgttttgttcaatgttcatttgttcaagaaaaacgttcaagaattcacaacagctgctagagagaagaaattcattcctcgtgaatttaactactcggaggaattaattgaccagttgaaaaaagagcatgactctgctgccagtttagaacaatctttgcgcgtccagttggtaagattggccaagacagcttatgtcgatgtttttataaattggttccacatcaaggccttgagagtttacgtggaatctgttttgcgttacgggttgccacctcactttaacatcaagattatagctgtcccaccaaagaatctctctaaatgcaagtctgaattaattgatgcttttggatttcttggtggcaatgccttcatgaaggataaaaaagggaaaattaacaagcaagatacttctcttcaccaatatgcttctcttgtcgacacagagtatgaaccatttgtgatgtatataannnnnnnnnnnnnnnnnnnnnnnnnnnnnnnnnnnnnnnnnnnnnnnnnnnnnnnnnnnnnngaattttcaacttttttattcatagagataatacactgtgattgtgaatgtttgaatagtaatggaacataa

SEQ ID NO: 82266 - DNA, 1458 bp, Saccharomyces pastorianus
atgcactggaatataatttcgaaagagcaaagtagctcttctgtatcgttaccaactctagacagcagtgaaccctgtcacatcgaagttatcctcagggcgatacccgaaaaaggattacaaaacaatgagtcgaccttcaaaatagacccatatgaaaatactgtgctatttcgcacaaacaatccgttacatgagacaaccaaggagacccattcaacatttcaattcgataaggtattcgatgctaacgccactcaagaagatgttcagaaatttctggtgcatccaataataaatgatgttttgaatggttataacggtactgtcataacatatggaccaagtttcagcggaaagtcctattcccttattggatcaaaagaaagcgaaggaattctaccgaacatatgcaagaccttgtttgatacgctagaaaaaaatgtagaaacaaagggagatagttttagcgtaagtgttttggcattcgaaatatatatggagaaaacgtatgacttattggtacctttacctgaaagaaaaccattaaagcttcaccgttcttcaagcaaaatggacttagaaatcaaagatatttgtccggcacatgtcggatcgtatgaagacttaagaagctacattcaggcagtccaaaacgtcggcaataggatgggaagtggcgacaagacagagagatcaagatcacacctagtttttcaattacacgtagaacaaaggaatagaaaagatgatatattaaaaaatagttctttatatttggttgatttacacggggcagagaagttcgataaaagaactgaaagtacgctatcacaagatgcgttaaaaaaagtaaaccaatctattgaggcgttgaaaaacactgtgcggtccttgtcaatgaaagagcgtgattcagcctacagcgcaataggatcacatagttctgcttaccgtgaatcgcaattaactgaagtgttaaaagattcccttgggggaaataggaaaacaaaggtgatattgacatgtttcttaagtaatgttccaactaccctatcaacactagaatttggtgacagtattagacagatcaataacaaggttacagataataccacaggtttaaatctgaaaaaaaaaatggatctatttattcaggacatgaaaattaaggatgataattatgttgcccaaattaatatactaaaggctgaaatagactctttaaaaagtcttcacaataaatctcttcccgaagacgacgagaaaaaaatgttagaaaatacaaagaaagaaaatatcaaactaaagcttcaattagatagtataacccaattatggagtagttctaccagtgaagatcctaacaatcgtatggacaaagaagtttctgaaatattaccgaagagatgcgaacagatggctcagcttgagttatcttttgatcgacagatgaat

SEQ ID NO: 82267 - DNA, 312 bp, Saccharomyces pastorianus
atgagatttcacgatagtatacttatcttcttttctttggcatcgctttatcaacatgttcatggtgcaagacaagtcgttcgtccaaaggagaaaatgactacttcagaagaagttaaaccttggttacgtacggtttatggaagccaaaaagaattagtcactcctacggtcattgccggtgtcactttttctgaaaaaccagaagaaacaccaaatccattgaaaccttgggtatctttagagcatgatggtaggccaaaaaccattaaaccagaaatcaacaaaggtcgaaccagaagggagacctga

SEQ ID NO: 82268 - DNA, 2883 bp, Saccharomyces pastorianus
atgtcactaatatctgcgttgcaaaccaccgatgtggaatctgtccagacgtcccctgagcaaattactgaaagaaaggcggttagagtatccactttgcaagaatcgctacattcttctgaaatgcatcgcgctgctccagaaacacctcgctcaatttcaaatagcgttcacaaactgaaaactgtatattctacttaccagcagagtggacaaccattgagtaaagaggcgatattccgtgcgaaacagaagtatggcattttgaatactccggctaattacaaaacacttggtttaggagactccaagagtgagtcagttgatcttgcggcccgtttagctagtaagagaacgaaagtctcgcctgatgactgtgtcgaaacagcaatcgagcaaaaggccagaggtgaggctttcaaagtaaccttttccaagattccattgaccccgcctgaagacgtcccaataacggtcaatttaggtctgaagggaaggcgtgattttttaacaagattagctgcacaaaaagcattggctttcagtccttctttagacaattccatgaagggcacctccgacagttccagtgttaaaaaaaagaggttttctggtgcccctattggtaatgagtttgatgcaaacttagttaatccacagcaccctgcaggtttcaaatccctcgatttatctaaggtattggatggagcggaaagaagggcgattagcagagttaatgacaggttgtatccccaaaaggtaaactttaaaaatggattacaaagcagcgatcaaagtggtgtatcaaaagctaacaaagaagtttttaagaaaggaactttggaaaaacttgaacattccgcagagcagttcttagagtctcatgctggtaatgaaagacaaaggctaagtgatcaacaatatatgtgtgcaaagggtgcagctgatgcagttaaagatcttgacccgaagacattggaagacccagattttgctgcaagagaggcacaaaagaaactgtacataaagcaggtagcatctccggtagtgctaaatgaagctcaaaagcttgcgaataggaaattgcaggatattgactcgcgcgatagttacatgcttttatttggtaaccaagcttacaataagcttgctgttaacatagctctacagcactattctgttaaacaagaagaaaaaaagaaaatatatttgggtggtggtttgtggatgactccagaagaggttaacgcagtcgccaaaaagttgatatcaccagtggtgaacgaaattgatgaacgagccagcagacaacgtgatgttgataaagatattgagagaaggtcaagagttcttgatcaggaatatgaggattggaattttatggaacgtgcaaaagagcaaaacgacgggcaattattgttagcgatggcttcaaaacaacaacaggagaaagaagctaaaaaggccgaggagggacaacggtatgatcagttcgtacaaaagatgaatatcaaattacagcagaaggaaaaagaacttgaaaatgctagggaaaatcgtgaaaatctaagaaacgaactacaggaaaggttgtccaagaacctgtcaggagagaatgatgaattggatgattggaacgatgcatgtgaaagagatctcaaaaattcgagcattgaacactattatgccgtcagatcacactttgacaatttgggaaattcggaaagagggtatgatgagcttttggaggagcgcagcaaaatacaggtagaaatcgaaagacttgtcgcttccattgctgaacataaaactgcaatccatggttttagggaaacagcagatgctggtagagctataccagctgtacagaaacagaaaattccaacaaggaaggaccttcttgatgctaccgtgaatgatcctttggttatttctgcagaaatggcaaaagaagaagcagaaatggctacagaagaatatatgttgaaagaattacaggtagatgaaatgattataatcaggaacattatgctgcgggagtgtgaaaagaagctcgaagaggagaaggaaacggctaagaggtctagaaggggcactgaggggtcaaagaataattctaatttttctcgagatgttatcatgaatacacctgataacaatgaaaaagtgactcctatagggaagagtgcatctccaaaagatgttgttaaaagccgtttcctttctacttataatacaggaaaggatattgatagttctgccagtgctaggtcaatcactggtgttagcggcgtgttggatgatgggcctaaaacaccaacctccaataaggagaatgaattaattgacgatgaagtgaagtcatataaagtgcaccaagcagtagatggcaccggtgaagattccattgcaaacaagagggataaatcttcaagaccagcggcgaacagtggaggctccataacgatagaacaatttttatttaataagaatgccgataaacaaggactatccaaaacagagtctgtaactatgaagagggagcctgtggtggatcaaatggactcaaaaaaggggcacgattttacccattgtaacgacaacggccgccggtcttttagtggcttttctcaaggttcgatagaaaacgattatagtaatgaagttacagatgatcaagacgatcaagagggatcggagataagagttcgcgattccaacgattccaatacctctcctaaggaaagttttttcaaagaggttatctcactttctatcaatcgtttgatgataaccggtgccgctactcgctgtaatatataccttaatgttggttttgttatattttttttcattacttttattttttttttatttttctga

SEQ ID NO: 82269 - DNA, 1572 bp, Saccharomyces pastorianus
atgagagtatatcagtttttccgacctttccaattattcacctgcttcttatgctaccttctagtgttcgtaaaagctaacaaggaaaagataagtcaaaagaattatcaagtatgcgcaggtatgtattccaaagaagattggaagggcaaaatagacccgtttatatcattcaatcttaaaaaaataagtggattgagtgatgagtctgatccaggcttagtcgttgcaatctatgatttccaagactttgagcacttaggtgtgcaattgccggatgaagaaatgtattatatttgtgatgattatgcaattgatatcgggatttgtgaagaggagaatcgtgatgagtttattgttcaagatgttgtatatgatccatatacttccacaaatagatctttggccaatccaatcatgacgttttctcaaaatgaggtcggccttcatgatactagatacccaataaaagaaaccggattttattgtgttactgcgttcagatcatcgacgtctaccaagttcaacgctgtggtgaatttcaggaatgcttatggtcagcttgcgggcaccgagatcaacaaattgccactatatggtcttttggcggtcgcatacgttgtggcgatggcgttatattccttcgccttctggaagcacaagcatgaattgttaccattacaaaagtatttgctggccttttttgtatttttaaccgcagaaaccatatttgtatgggcttactatgatttgaaaaatgaaaaaggtgatactgcgggaataaaagtttatatggtgttcttgtcgatattgacggctggtaaagttacattttcatttttcctattattgattatcgctttgggctacggtatcgtgtaccctaagttgaataaaacgttgatgaggcgttgccaaatgtatggtgcgttaacttatgcaatttgcattggatttttgatccaaagttatttgaccgacatggaggcaccatctccactaatcttgatcaccttgattcctatggcgcttgcattaatcatattttactacatgattattagatccatgacaaaaacagttatctatttgaaagagcaaaggcagatcgtaaaattgaacatgtacaagaagctactatacatcatttatgcgtcctttttgagtgtactagctggtagtatagtttcgtcatttatttacgttggcatgaacactattgatatgattgagaagaactggaggtcaaggttcttcgttactgatttctggcctacgttagtgtatttcattgttttcgttaccatcgcgttcttatggagaccaacagatacttcatacatgctagccgcatcccaacaactacccacagacccagaaaatgtcgcggactttgacttgggcgatttgcaatcgtttgacgatcaagatgacgcaagtatcatcactggtgagcgtggcatagacgaggatgacctcaatttgaattttactgatgatgaagaaggacacgataatgtaaataaccatagccaaggccacgggccagtgtctccctctccaacaaaataa

SEQ ID NO: 82270 - DNA, 117 bp, Saccharomyces pastorianus
atgacacatcctgtagcagtgaaggcatgtctatttgacatggatggtcttctcatcaacacagaggatatttatactgaaactttaaatgaaactctcgcagaatttggtcaggga

SEQ ID NO: 82271 - DNA, 1341 bp, Saccharomyces pastorianus
atgaattcagacacgaatgcatttaaggacataagaatttcatgtgttgaactttctaggatcgcttttttacccaccgaatcatttgatccaaattcattaacgctattggcatgtttaaaaaaagttgaagagaagttatcagcatacgaagacgattcactttcgccaaaatttgcagattatgtttttgttcctatcgcgagtttattgaaacagccagctctcggcgagtctcaaacagaatacgtcctactaattatatttcatctcttacggacatgttggtcatctaatggtaaattctccgagcaattgggacaacaactgttccccttgatcacatttttagtcagttctgataaagataatcaaaaattaattactagatcagacgagttcaagtacgctggttgtttagtcttgcatcagtttttcaaatcagtaagatcgcaaaggtaccataaagagttcttttcgaactcaaaacctaatttacttcccgctctaggacattctgttaccattctgttgaaaattctggagcaatcgccccaaaataatgagcttcaattcaaagctttggcatccttagaagtactatttcaggacataatatctgatggtgaaatgctttcctttattcttccggggaacgtttctgttttcgctaagatacttactaaaccaggccgtcaaatacattataaggtgtgtgttcgcacgctagaggttctggcaaaattattggttttggtttacgatgattttagtttggatatcaaagtaaataagttaacagatattcgagagttgagcgatacaaagttaaaacacgagataaatcaatcatttatgtttaatggacctattgttttgttacgcacagatgggaagacgcatagagatacaagttggttgacggcaacttctgggcaaatcaatattgctttggaggcctttatacccaaactattaaaacgtaataatgaatcaattgatgaggcattagcgacatttgtatcaatccttttaactagatgtgaaaattccttaaataattgtgagaaagtgttggtatccactttagtacatttggagcgtgatccgatgtccaaattaccatcgcatttggtaaaattaaaggaagttgtcaatgaagacctgcacaagctaagtgacattattcggtttgaaaatgcagataggttattatctttatcatttgcaatcactattctagagaaaaataacgaaagagatacgatgatcaatgaggtagttagatgtttatttgaatcgcttaaggatctattgagccaccaagttgatcaatcataa

SEQ ID NO: 82272 - DNA, 165 bp, Saccharomyces pastorianus
atgtcagaacaagttgattctccaagtacgcagaagatagttgcgctgtggttaagcaccaatgttataaaggctatggtaaagcaaccgaaggaggaagaagtctatctactatttgaatctgattccaactattcctcttccatggttgaagaagtgtgttag

SEQ ID NO: 82273 - DNA, 1257 bp, Saccharomyces pastorianus
atggagattgaaggtaaaggcataaaaaaaagtgatgagtttgccgtatgtacagttttattctctattgaaacgatttgtgcggtaatgagagaagaatttcaaccagaattgattgactatatatacacagtagttgacgccttggcatcaccgtccgaagccattaggtatgtgggccaatcctgtgcattgaggatagcagataccctatatcatgggtctatcccaaacatgatcttaagcaacgtagattatcttgtagaatctatttcctcaagattgaattctgggatgactgaacgagtgagccaaatattaatggtgatttgccaattggctggctatgaaaccattgaaaattttaaagatgttattgaaacgatatttaaactactggattattatcatggatatagtgacctctgtcttcaatttttccaactatttaaaatcatcattttggagatgaagaaaaaatatatcaatgatgatgagatgattttgaaaatagctaatcaacacatttcacaaagtactttttcgccctggggtatgaccgattttcagcaagtactcaatataatagataaagagacacaggttaaagatgacataacagacgagaacgacgtcgattttttgaaggatgataatgagcccagtaattttcaagaatatttcgactccaaattaagagagccagatagcgacgacgatgaagaagaaagagaagaagaggtggaaggaagttctaacgaatatactgaccagtggacgtcacctataccatcagattcatacaaaatactattgcaaattttgggttatggggaaagattattaacccatccatcaaaacaattaagagtgcaaattcttattgttatgaggcttatatttcccttgctatcaacacagcataatctgttgataagggaggttgctagtacatgggactccatcatacagtgcgtcctatgctctgattattcgatcgttcagcccgcatgttcatgcgtggagcagatgataaaatattctggtgattttgtcgccaagagattcattgaactttggcagaaactgtgtcaggattcttttatattgaaagaactgaggattgatccaacggtgcacaaccatgagaaaaaatcgattagtaagcatgtcaaattcccaccagtaactgaaaaatgcgctagtatccgaatgtacgatggtgcctggaaggggtcaaaaatacagagtatttaa

SEQ ID NO: 82274 - DNA, 186 bp, Saccharomyces pastorianus
atgcagtacgattacggtacagaggataacgaagtaaaccacatttacagcgagaacgagagacagaaggagagagagaacgaatgcgccgggccgtgtctatacttggctccaccagctgatgtgtgcatttttttttggttcccattcgttctctcaccaaggggaggtggaaaagaaacgtag

SEQ ID NO: 82275 - DNA, 846 bp, Saccharomyces pastorianus
atggaccaaattcagccaatcattgattctttgaaaaagatagatgattcaagaatagaggagaatactttcgaaattgcattggctcgcttgataccacctcaaaatcaatcacatgcagcatacacgtacaatccaaagaaaggcagcaccatgttcagaccgggagattctgctccattgccaaatcttatgggtactgctcttggtaacgacagtagtagacgtgccggtgctaactctcaagccacattacacatcaacattaccacggcaagtgatgaagtgtctcaaagggaattgcaagagagacaggctgaagagaaaagaaaactaaacgctgtccctgaatggcataaacagagtaccatcggtaaaactgctcttggtagactggataatgaagaggagttcgatcctgtagttactgcatctgccatggattctataaatcctggtaatgaacctgcacaggaaacatcctatcaaaataacagaactctgaccgagcaagaaatggaagaaagagagaatgaaaagacgttgaatgattactacgctgctttggctaaaaagcaagcaaagctcaataaagaagaagaggaggaggaagaagaagaagaggatgaggaagaagaagaggaagaagagatggaagatgttatggatgataacgatgaaactgctagagaaaatgcattggaagatgaatttgaagacgtaacggatacagctggcaccgcaaagacagaatcaaacgcctccaatggcgtaaaacaagaatcggttaatgataagactgaagaagctgtaaatgctactgccactgcttcacgtccgagtgca

SEQ ID NO: 82276 - DNA, 165 bp, Saccharomyces pastorianus
atgcaagaattttattctttttcaccaatagatgaaaacggaaatccattccccttcaactccctgcgtaacacagtggttttgatagtcaatgtagcatctcattgtgcgttcacactcaatacaggaatagagtacttgtacgaaaattcaatcaatggctag

SEQ ID NO: 82277 - DNA, 744 bp, Saccharomyces pastorianus
  modified_base (609)..(707): a, c, g, t, unknown, or other
atgacagctgctactacatcacagccagctttctcgcctgaccaagtttccgtgatcttcgttctaggaggacccggtgcaggcaagggtactcagtgtgaaaaactagttaaggactattcatttgtccatttgtcagccggagaccttctacgtgctgagcagggcagagcaggttcccaatatggggaattgatcaagaactgcatcaaagagggccagattgtccctcaagagattactttggcgcttttacgcaacgctatttccgataacgtcaaggcgaacaagcataagttcttaattgacggatttcctaggaagatggatcaagccatttcctttgaaagagacatcgttgaaagcaaattcatcctgttctttgactgccctgaagatatcatgttagagagactattggagcgtggcaagaccagtggtagaagcgatgacaacattgagtccattaagaagagatttaacactttcaaggagactagtatgcccgttatcgagtactttgaaaccaaatcgaaagtcgtccgtgttcgttgcgacagatccgtcgaagatgtgtacaaagacgtccaagacgctatccgtgatagnnnnnnnnnnnnnnnnnnnnnnnnnnnnnnnnnnnnnnnnnnnnnnnnnnnnnnnnnnnnnnnnnnnnnnnnnnnnnnnnnnnnnnnnnnnnnnnnnnntatgccctcccctacacatcagaccattacagggtaa

SEQ ID NO: 82278 - DNA, 2079 bp, Saccharomyces pastorianus
atgaagttttgtctttattgctgtcattgttatatcgttatttgtggaaaggctacacattattacaagtcatcaaaagccacatcaaatttgaaatcgtcaaacagggtacttatgagaaaccccatgtcgccttcggagcaacattcacaacataattctacattggccgcctcgccatttgtttctaacgtatctgcagcaagaacacaacagagtttaccaaccgatgctcagaatgatcgtttacagcaaccctggaacagaaccaatacggctacgagtccctaccagtcgttagcaaatagccctttaatacagaagttgcaagcgaatattatgactccgcaccagccatctgctaattctaattctaattctaattctaattccaattccattacgggcaatgttgtgaacgacaataatttgttagcttctatgtctaagaatagtatgttcggttctaccataccgtctacattaaggaaggtgagcttacagcgtgaatataaggattcagttgatggtgtgcttcgtgatgaagataatgatgaggatgttcataacaatggcgatgcagctgcgaatgctaataatgatcgggagagtaaactagggcataatgggccattgacgacaacaacattaacgacaacaactacagcaactcaactagatgtttctgaattgtcagctatagaaagattgagactttggaggttcgacgcattgatgcagcatatgtataggaccgcagaatatattgctgataaagtgtataacatatcaaatgatcctgatgatgccttctggctcggccaagtatattacaataataatcagtacgtaagggctgtagaacttattaccaggaacaacttggatggcgttaatatcctgtgtcgatatctgttgggactctcctttgttaaattacagagatttgatgacgctctagatgttataggcgaatataatccattcagcgaggacccatctacgacggcagcaaacaccatgagcaataatggcaataacagcaatacgtcacagccagttactgacggcggtataaaaatggagtcatcattatgttttctgagagggaaaatatattttgcacaaaataattttaacaaggcaagggatgcatttcgtgaagcgattttggtagatataaaaaattttgaagctttcgaaatgctcctgtccaagaacctgctaactccacaagaggaatgggacctgtttgactctttggatttcaaagaatttggggaagataaagagattatgaagaatctttataagatcaacctatctaaatacatcaacacggaagatataacgaagtccaatgagattttagcgaaagattataaattagctgacaatgtagatgtcgtaagaagtaaggtggatatctgctatacgcaatgcaaattcaacgaatgtttagagttatgcgagaccgttttggaaaacgatgaatttaatacgaatatcttgccagcatacattggatgtctatatgaactatcaaataaaaataagcttttccttctgtcgcatcgattagcggaaactttcccgaagtctgcgataacgtggtttagcgttgcgacctattatatgagcttggacagaattagtgaagcacagaaatactattccaaatcctcaatactggacccaagctttgctgccgcatggctgggatttgcacacacgtataccctagaaggtgaacaagaccaagcattaacagcatactctacagcctccagattctttcctggaatgcacttaccaaaactgtttctcgggatgcagtttatggcgatgaattcattaaatttagcagaatcgtattttgttctggcatatgacatttgtccaaacgatccattagtactcaatgaaatgggtgtaatgtattttaagaagaacgaatttgtcaaagccaagaaatacctgaagaaggcgttggaagtggtgaaagatcttgatccaagttcaagaaacgacaatatcaattcaattaaatctaggacacacttacagaaaggtaaatga

SEQ ID NO: 82279 - DNA, 288 bp, Saccharomyces pastorianus
atgttgggaatgataaggtgggtagtagaggggacgttggtagctatgctcctatcggcaataagaagggagacgggaatgatattcttttacaaccagtatcagttgggcggctggatacatagatatctgtcatggggagagatgtgctacacaaggacgctgaggatggttaaacgttctaaatttttcagaaagcagttgaacgaggacgggtttggacgcatcaatgatagcggtccaaacgaaggggaagagatcaatctcatacagcacgtaggtttgtag

SEQ ID NO: 82280 - DNA, 1356 bp, Saccharomyces pastorianus
atgaacaaagaattggcttctaagtttttatcaagcatcaagcatgaacgtgaacaagacattcaaacaacttctaggctattaacaacgctatctatccaacaattggtgcaaaatggcttggcaataaacaacatccatctagaaaacataagatccggtctcattggcaaactatatatggaactgggacctaacttggcggttaacgacaaaattcaaaggggtgatattaaggttggtgatattgttttggtacgccctgcaaaaaccaaagtaaataccaagactaagcccaaagtcaaaaaggtgtctgaagactccaatggcgagcaagcggaatgttcaggcgttgtctacaaaatgagtgatactcaaatcaccatagctctagaagaatctcaagatgttattgctaccacattttattcttatagcaaactttacattttaaagactaccaatgtcgtcacgtataatagaatggaatcaacaatgagaaaactgtctgaaattagttcacccatacaagacaaaattatacaatacttggtaaacgaacgccccttcatccccaatacaaacagctttcaaaacattaaatcttttttaaacccgaatctgaatgactcccagaaaactgccattaattttgccattaacaatgacttgaccattatacatggtcctcctggtacgggtaaaacattcacattaattgaattgatccagcaattgctaattaaaaatcccgaggagagaatcttaatttgtgggccttccaatatttctgtggatacgattctggagaggctaacgcctcttgtgccgaataatttattattaagaatcggtcatcctgctaggctattagactctaataagagacactctcttgatatacttagtaaaaagaatactattgtgaaggacatttcccaggagattgacaaattaattcaggagaataaaaaactaaaaaactataagcaacgtaaagaaaactggaacgaaattaaactgctgcgcaaagatttaaagaaaagagagttcaaaaccattaaggacttaataatacaatcgagaatagtcgtcaccactttacacggttcatcatcgagagaactatgctccctttatagagatgatccaaatttccagcttttcgatactttgatcattgatgaagtctcacaggccatggaaccacaatgctggatcccactaattgcacatcaaaatcagttccacaaactagtccttgctggtgacaataaacaactgccacccacaatcaaaacagaagacgacaaaaatgtcattcacaatttggaaccacactatttgacagaatga

SEQ ID NO: 82281 - DNA, 1836 bp, Saccharomyces pastorianus
atgaaaaaatcaaggttcatgtgcaatttaatcggtgcagtatgctttgaaacaggccatcaattagtggaattccgagaaataattcaaaaagtggtgtttagtggtgaaaatgtcgaagagtatgccaactataatgagttgtatcggaaagaagacgtaaatgctttcttaacaagtgttagtgagtatttaagtacttcagctttaacttcgctactcatgtgtagcaccaaactagagtccacaagaaacattctccaaaaattattcaacgaaggaaaaactataaaaatatcccttgtacagaatatactgaacaaagctgcaaatgaagatcctgcttcaattaaggaagtaaacatctctttggctaaattttttgaagaaaacaaagtttgtgttgatgcttcatctgatcctatgggtaagctatccctttcagaaactacttctctgataaatagttttgtgtctagtgatttgaattatctagtactgaaagctttttacagatgggaacatttttctttcccatctttcataccaagtatctggaggatcaaggattcacctttactaagtattgtaacaacggctgctttgttcaagcacatgcaggataaagattttagcgcatttgcgcatgaaaccatttccaagtatggtaatgaaattgcgaaaagtacttacactacctcgaaaagtgagatttttgacgaaatattaaatatgattaccacttatattgatttctatgacgaaacgaaacgaaatgaaattttgaaatgtgttttatcacagagcgaccataaatatcatgctgctacagtaagatacatagctgcacacaataattttacttatccaggggtagaaacatggttaaataaaactcttctttaccttacaaagtacctttcagaaagaaaagttatctccaattctttttttgagttactaagagcgatggctgagctcttaaaacttgaagaggtaccaaataagttgaatgtcaaaatcattaattctcaattagaggctattctaggcagtgagtggatcaaacaaattaaggttcttgaatacgttaatgtattaattttttgtgtgagcaaaaagtcaattcaatcgcaaagaatggttcaacttttattaagcaatgacagttactcatcaataatgattaaagacaatgatgaagattcatcgtatcgaaagttcttaagcacaatgatattattctctttattcagcatcgacccggtcgtaaattcgacgccaatagttcaagagaaattattgactttttactccggtactatttccagtaacgacaagttgatactgaaaattctagaaactatcgaatctcacaccgctacttcatggacaaacatgattttttcttgggaatttatcaaagacgaagaggaagaaatcttggaagccattggagacacgaggctgattaccaaagaaagggaggggttgatactaacactacaaaaaaacatgatcaaaaagtccattgacaggtacgtattggaaaggcctcaagtccctgaattatataccgattctaatacaaacaattatgatgctactacaaggtgtgacctagtcaaaaagtactacgatgataccgaacgatctggtgttgatatgtacgatccattatttttactgctattaataatccataacaaagagctggtaaaaatgatcaaagatgacgagggcaatgtaacatacagatatgaatttgaaaatttccttgattgcaaaatatctcagtttattatttgctcattaagcgattgcataccgttccaa

SEQ ID NO: 82282 - DNA, 177 bp, Saccharomyces pastorianus
atgcggcaggaatcctttttagagttcagttcattggtagaagacgattctgttgtatatgacaattggttcgaagcaactgcctgtgagctaactggcaagattgctagctacatggtaacagacacagaattccctattgtcaaagttttggaaaggtatataaatttcgcttta

SEQ ID NO: 82283 - DNA, 2436 bp, Saccharomyces pastorianus
atgagtaatcatagcgaagcctatggatctcgcgaccagagaagggagaagtacacccaagggaaagagttcgaagacggtacattagaaacactagaaagtataatcagtgcagtcgaagatgaaactctctcaaaagattaccaacctctaatagtgttcttccaaagaggatttggtgctcaattggtacagacttggtcatattatgctcaagtaaataaccatgggaaattctcgaaaactacctcattactgactaaaaccttacgagttttgtcatctgatactagtacagtgactattgggagcggtctaattagattgatattgaccgattacacaaaagttctctatagagggttgaacaatatgcgtgcgcaattaactaatccaattcttcgtctactcaaacaaatagtcaatttcaacaatgggcaacttatagaggaattagtttcatatttcgatttttcattacctattttaccaagactgttggtaccaagcaagtccgagttagccaatgggaattcatctgctgattcatccaaacatgactcaataagatttacatttatcaagttttggttgacattgatctcaaatgcttccccattcgtgagaaaagaacttttgacagaaaactttaagattatgagcaacctatttaaattcatgaataaggctgattctgacaagttatctgagcacatactatcggtattcataaacgacattttaaaggagaaatccttcaagagaactactaaaaccaaaattttaaatgaactagcggcttcaaagattcatcacttttattattcatcaaacaagaatttggttaagaaggcaaatgagtttttcttaacttttggagcttcccgtgactttagcgtagcatttcctgataattgcgtttggttcaaaaattcagttgctgatggagcttctcatggagctccgataaccgtcaaccaagtggaatttcaaattcataataaacttttgttcaacaccttacgccttttcaaaccttgggaagataccctgcaattaggtacgttgatcaaaatattggagaacgttcccgaacttgttgctccttacagcgtctttttaacgacgaatggtaactatgaccctaagatgacttcgtattggtttggtataacattactgattaacaagattattaatcttaagataccgcaatttatggagaaagttgatagcaatattccacctgccacttcattagttatagaaaacattctgccatctttgctcaccaaatcctcgttggttaaatccctacaatttgaaacacccatcataagacaattagcctgtcaatcaatagttctagcgctaaaaaaattggaaaaagtttccatattttatgatcaaaaaggctggagaaatgaaaaaactattttactcaacgagtttcataccagaattcctgatttgccaatcttcgtatctactttgagcaattctttgacttccaataaggataatagaattttaccgctgtccatatccatcatattcaactactatagtaaaatgttccccaacctcttctcaattaacctaccatcatcaaatatttatacagatatcatgcaaaaatccaagatttctggcatagaatttgctattctggataactacttacaatttcaagaatttaactctactcaaaccaggtggtggaatccaagttctggtggaaattctttattcaccctactattaaagctagcatcctccaaaaatgcttctaacgtgataactacaagaatatccaacttgctcgatgagctgacgagaacaaacgttatcttcaacatatctttaatttcaccagtgatggctttagtgaatagtcttcaagggctttcccttcaagtttctgaaattgacaacatggaacaagtctggaagtggtttgacgaaactatatctcgtgtcgtaaaaacaccatacaagtacgtcgatatggcaaaagagtataactacatttctcccttcataatgtgcctttcagagcaatggaaatacgttgacaagagtggaaacccagagtttttaattaaatggcttatactttttcttagacacatgattttcattggtgaagaccatataggcatagataaacttgttaaaaatgtctttcctgaggtctctgatcatgatgttaatatatacctgaaacttgactcatttgaagaaaacataaagaaaactaatagctctaattctttaatttcttcaatgaagagctcatcttttttccagtatatttcggcgcttccatctaaaaatctaatgaatatttctagattaccagtgaacaaattagatgcggcaggaatcctttttagagttcagttcattggtagaagacgattctgttgtatatga

SEQ ID NO: 82284 - DNA, 1563 bp, Saccharomyces pastorianus
atgtctatttggaaggaagctaaagatgcaagtggaaggatatattattacaatactttgacaaagaaatctacgtgggagaagcccaaggaactaatttctcaggaggagctacttcttcgagaaaatggctggaaggcggccaagacggcagacggcaaagtatactattataatccaacaacaagagaaaccagctggactattccggccttcgagaagaaagtagaacccatcgcagaacaaaaacatgatacagtatcccatgcacaggttaatggaaatagaatagcccttacggctggagaaaaacaagagccgggacgaactataaacgaggaggaaagccaatatgctaataactctaaactgcttaatgtcaggagaaggactaaagaagaagcagagaaggaatttattaccatgctgaaggaaaatcaagtagactctacttggtcattcagtagaattatttcagaactggggaccagagatccaaggtattggatggtcgatgatgaccccttatggaagaaagaaatgtttgagaaatatctttccaatagatcagccgatcaacttcttaaggaacacaatgaaacaagcaaattcaaagaagcctttcagaaaatgttgcaaaacaattctgatataaaatattacacccgttggcctaccgcaaagagactaattgccgacgaaccaatatacaaacactccgtggtcaatgaaaagacaaagagacagacctttcaagattatatagataccctcatcgacgctcagaaagaatcaaaaaaaaaattgaaaacacaggccctaaaagaactaagagagtatttaaacggtattataacaacatcatcctctgaaactttcatagcctggcagcagcttttaaatcactatgtttttgataagagtaagagatatatggcgaaccggcacttcaaagtcttaacccacgaagatgttttaaacgagtatctgaaaatagtaaatacgattgaaaacgatcttcaaaacaaactaaatgagctccgactgcgcaattataccagagaccgtattgctagagataactttaaaaacttattaagagaggtgccaatcaaaatcaaagcaaatactagatggtcagatatttatcctcatataaagtctgatccgcgctttttacatatgcttggaaggaatggctcgtcctgccttgatttatttttagattttgttgatgaacaaaggatgtacatctttgcacaaagatcaatagcccaacagacgttgatagatcaaaattttgaatggaatgatgccgatagcgacgagatcaccaagcaaaacatagaaaaagttctggaaaatgaccggaaatttgacaaggtggataaagaagacatcagtttgattgttgatggtttgataaagcaaagaaacgaaaagatacacagaaactccaaaatgagcgtaggatattggagcaaaagaagcactatttttggttacttttgcaaaggacatatacaaaaaccggtaagcccaagcctagtacgtgggatttag

SEQ ID NO: 82285 - DNA, 564 bp, Saccharomyces pastorianus
atgtctgaaaataattcgcacaaccttgatgaacatgagtcccatagcgaaaacagtgattatatgatggatacgcaggtagaagatgactatgatgaggatggccatgtacagggtgagtactcttattatcctgatgaagatgaagatgaacatatgctttctagcgtcggaagttttgaggcagatgatggtgaagatgacgataacgattaccatcatgaagatgattctggacttttatatggatatcatagaactcagaatggcagtgacgaagacggaaatgaagaagaagatggacttgaacgttctcacgataataatgaatttggcagcaaccccctacatttacctgacattttggaaacattcgcacaaagactagaacaaagaagacaaacaagtgaaggacttgggcaacatccggttggaagaacactacccgagattttatcgatgattggaggaaggatggagaggagcgcagagagttcggcaaggaatgagcggatttctaaattgatagagaatactgggaatgcctccgaggatccttatatt

SEQ ID NO: 82286 - DNA, 261 bp, Saccharomyces pastorianus
atgtctagtagtaaattcgaagaggtcatcaacaagatcatcaatgacagccctccaggagaattaagggaagtatacgacgatctaatcaagatcacaagtgaaaactccaaaaatactattttggatgctattgagaattacaacgtgcggaattgcatccctatagaagtcaacgggaactctgtaattatttccaaatacaacaaggaaggagcaaagttttttgatcccgtaaattccgtaatatttttcagttaa

SEQ ID NO: 82287 - DNA, 138 bp, Saccharomyces pastorianus
atgtccaccgattctattgtcaaggcttctaactggagattagtcgaagttggccgtgtggttttgatcaagaagggtcaatccgcaggtaaattggccgctatcgtcgaaattattgaccaaaagaaggtatgttaa

SEQ ID NO: 82288 - DNA, 441 bp, Saccharomyces pastorianus
atgaaagctcaacttcaggcgatatcattgagaatacaggccgttcgaagtagtgaccaaatgacacgttctatgagcgaggccactggtcttttggctggaatgaacagaacaatgaatctacctcagttgcaaaggatatcgatggagtttgaaaagcagagtgatttgatgggtcaacgacaggaattcatggacgaagctattgataacgtcatgggtgatgaggtggatgaagacgaagaagctgacgaaattgtaaataaagttcttgatgagattggagtggatttgaattcacagttgcaaagcacgcctcaaaatctggtttctaatgcgccgatcgcagaaacagcgatggggattgctgaacctattggcgccggatcagaatttcacggtaatcctgacgatgacttgcaagctcggttgacactttga

SEQ ID NO: 82289 - DNA, 606 bp, Saccharomyces pastorianus
atggatgagcatttaatttctactattaacaagcttcaggacgctttggcgcccttaggaggaggatctcaatctcctattgatttaccacagatcactgttgtcggttcccagtcgtcaggaaagtcgtccgttttggagaacattgttggtagggatttcttgccaagaggtactggtattgtcaccaggagacctttagtgttacaattgattaataggagaccaaaaaagtcagaacatgctaaagtaaaccaaactgctaatgaattgattgacttgaacatcaacgatgatgacaagaaaaaggatgaatcaggaaagcaccagaacgagggacaatctgaagacaataaagaggaatggggtgaatttttgcatttacctggtaagaagttttataattttgacgaaattagacaggaaatcgtcaaagaaactgacaaagtgacaggtgccaattcaggtatttcttctgtgcccattaacttgagaatttattctccgcatgttcttactttgacgttagtggatttgcctgggttgacgaaggttcccgtaggtgaccaacctcctgatattgaaagacaaattaaggacatgtag

SEQ ID NO: 82290 - DNA, 1002 bp, Saccharomyces pastorianus
atggattcagctagttcggttgttttgagcatgattactgatttttccaatgaatatgccggtatcttggacggtgaggcgaaggagctttccagtcaggaactttctggtggtgctagaatttcttacgtattccatgaaactttcaaaaatggtgtagactctttggatccattcgaccagatcaaagattctgatatcagaaccattatgtacaatagttcaggttctgccccatctttgtttgtcggtaccgaagcttttgaagttttagttaaacagcaaattagaagatttgaagaaccatctctacgtttagttactctggtgtttgatgaacttgttcgtatgctaaaacagattatttcacaaccaaagtactcaaggtatcctgctctaagagaagcgatttctaatcagttcattcagttcttaaaggatgctactattcctacgaatgagtttgttgtcgatatcatcaaagctgaacaaacttacatcaatacagcccatcccgacctcttgaagggttctcaagcaatggttatggtggaagaaaaattacatcctcgccaagtcgctgttgacccaaagacgggtaaaccattaccaacccaaccatcgtctagtaaggcgccagttatggaagagaaatcaggattttttggtgggttcttctccactaaaaacaagaagaaattggcagctttggaatcaccacctcctgttttaaaagctactggccaaatgacagagagggaaacaatggaaacagaagtaatcaagttgttgattagtagttatttctctattgtcaaaagaaccattgccgatattataccaaaggctttgatgcttaaattgattgtgaaaagtaaaactgatattcagaaagttttactcgaaaaactttacggaaagcaagatattgaagaattaacgaaagaaaacgacataaccattcaagaagaaaagaatgtaagaagatggtcgagatattga

SEQ ID NO: 82291 - DNA, 1596 bp, Saccharomyces pastorianus
atggtagttaagaagcgtaagttggcaactgaggccggtggcagtgatgaaaggcctaaatacttgccgggaaaacatcctaaaaaccaagagaaaactccgcatgtggattataacgccccattaaaccctaaatctgaactttttctagatgactggcatatacctaaatttaatcgatttattagtttcactttggatgttcttatcgacaaatacaaagatattttcaaagatttcatcaaactaccaagtaggaagtttcatccacagtattattacaagatccagcagccaatgtctattaatgaaatcaagtcaagagattatgaatacgaagatggtccaagtaattttcttttggatgttgagctactgacaaagaattgtcaagcttacaatgaatatgacagtttgattgtaaaaaactccatgcaagtagtaatgttgattgaatttgaagtattgaaggcaaaaaatttgaaaagaaattacttaattaacagcgaggtcaaagccaaattactgcactatcttaataagctagttgacgccacggaaaagaaaatcaaccaggctctgctgggtgcgtcatctcctaaaaacttagacgacaaagtcaagctaagtgaaccgtttatggaattagtcgataaagatgaacttcctgaatattatgaaatagtgcatagccccatggctttatcgatcgtaaagcagaacctcgaaattggtcagtattccaagatatatgatttcatcattgatatgcttttagtttttcagaatgctcatatattcaatgatccaagcgctttgatttacaaagacgcaacaactttaacaaattattttaactacttaatacaaaaggaattcttcccagagttacaggatttaaatgaacgtggcgaaattaatttagaatttgacaaattcgaattcgaaaactacttagctattggtggtggtggtccagccgcagcaggtgcgttagctatatctgctcttgataatgatattgagccagaatctaaccgtgaagatcttattgatcaagcagattatgatttcaatcatttcgaaggtctcggcaatggttataatcgttctctcctaactgaagattatttactgaacccaaacaacttcaaaaagttaatagccaaaccggaaacagcgcaatccgaagtcaaaaatgaaagatcaacgacatctgatattgagaagacaaactccttagagagcgaacatttaaaaatccccaagtacaatgttataaaatccatgcaaaaagaaatgcaatcactctcagagcaacacaccatggagtataagccctataaattaatacaacaaatttacattttttcttctaaaaatttgtattcgcaggcaactaagcctttaccgggttcaaggccatcatgcaatcaaaattgggtagagtatattttcaatggtaatgaattgagtcaaaatgaaaacgctttctccttcatgttacaacaccatgacaaacttattttaacaattacagtcctcatttcgacctcactcattaaacggatacagaagactttatataaccattaa

SEQ ID NO: 82292 - DNA, 405 bp, Saccharomyces pastorianus
atgaaagatgaggaatggtttgctgtcctgaaagtccaccttttttccacattttcattgtcaaaagcagtatggccaatatttaccaaacaaaagtctggatttattatcaatactacttctacctcaggaatttatggtaattttggacaggccaattatgccgctgcaaaagccgccattttaggattcagtaaaactattgcactggaaggtgccaagagaggaattattgttaatgttatcgctcctcatgcagaaacggctatgacaaagactatattctcggagaaggaattatcaaaccactttgatgcatctcaagtctccccacttgttgttttgttggcatctgaagaactacaaaagtattctggaagaagggtattggccaattattcgaag

SEQ ID NO: 82293 - DNA, 96 bp, Saccharomyces pastorianus
atgacagaaaacgttttaccaccacatatcttgaaacagttaggaccggttaatattgttcccttagtactctatttgacacacgtaagtacgtaa

SEQ ID NO: 82294 - DNA, 189 bp, Saccharomyces pastorianus
atgacagaacgtgagtttgcatctgtggtagatgttcatttgacaggtggctataagctatcgcgtgctgcttggccttatatgcgctctcagaaatttggtagaatcattaacaccgcttcccctgccggtctatttggaaattttggtcaagctaattattcagcagctaaaatggggatcctctag

SEQ ID NO: 82295 - DNA, 267 bp, Saccharomyces pastorianus
atgcctggaaatttatccttcaaagataaagttgttgtaatcacgggcgctggagggggcttaggtaaggtgtatgcactagcttacgcaagcagaggtgcaaaagtggtcgtcaatgatctaggtggcactttgggtggttcaggacataactccaaagctgcagacttagtggtggatgagataaaaaaagccggaggtatagctgtggcaaattacgactctgttaatgaaaatggagagaaaataattgaaacggctatataa

SEQ ID NO: 82296 - DNA, 441 bp, Saccharomyces pastorianus
  modified_base (407)..(407): a, c, g, t, unknown, or other
atgctaagaactactgcctcacgaaaaattgtgctaaggaggggtctagccagcataaacacagggactaccgttgcatcaaaaaaggcttcgcacaaatttcgcaataccttttggactattgctttgtcagcgacagctttctacgctggaggtatcatatattcgcaaaaaaatgacaaatttggtgactttttctctaataacgttccttttgccgaggatttactagaaacatatgaacactatcacgataggccaacattgtttttagaagattcttgggacggcttgaaggcaaagagcaatgatttattatctggattaactggtagttcacaaacgcgcagatctaatagggaaaatattgaagtaaaaaaaatcttatcattagaaccactaaatantgaaacgacctgcaggcatgcaagcttgcactgc

SEQ ID NO: 82297 - DNA, 105 bp, Saccharomyces pastorianus
atggcgatcaagaaaagaaataaaattaggttaccaagtggttctcctgaggaggttggaattgatggttctgcgcataagccaatgcagcaattaagcccctag

SEQ ID NO: 82298 - DNA, 1353 bp, Saccharomyces pastorianus
atgacaagaaagcaggctattgactatgcaatcaaacaagttccgcaaatattgcctttggaagagtctgatgtaaaagcgctgtgcgaacaagtactgagtacatcatctgatgatccagaacaaattgcttcaaaatttttggagttcctaggtcatgaagatctatcgtttgaatttgtaatgaagttcaatgaattattgaatcagaatgataaaaaagaggaaaaaaaaacgaaaaatgtgcatcttgaacatactgcccccacttcatggaaaaatgaatcaaaacagcccactaataactatatcaataagaagggagatgaaaaaccaaaaaaattaaaggatgagaagaaaagctcgacaacgaggcctaccgttcaaccatcaaatcaatctacgcaatcaaaccccataaaggagaaaaaagagcacaaatcaaaggggaaattacaatcgttacaagaaatagacgaagcaatcaagatgctagagcttcgagatagcggttcttctaaaaattgtaattgtcaaggtacaaggcatccagttttcgacatcgcgccaaactgtcttcactgtggtaaagtggtttgtgttatagagggattgaataaaggtaaatgcggtcattgccatgaacagttgatttctgataacgaaagaacccaaatggtagaaattttaaatcaggaaaaaaacgaactaaacggttcatcatcgtccttatccaatgcgtcaaatggagctaatgtcccaaagaagaagactaaaacctacaaaataacttccggtatgggtaaaaatttatttgctgaacaggacaaattatttgatttcatcgaaaggaaaagagaaagagaaagaaagcgtaatgaagtgttgaaattgcaggaggaaaaagaagagagcgaagcaaaggaaagacaagcgagcgagcatgaccataaagctgaggaaaacccggagttgttagcagcacaagaacgattagatagacttttatatttccaagacacttcggcagaaagaacaaaaattattgataatgctagcgattttgacatgaatcaggaggtgggtttatggggcagcgcaagagaaagagctcttgcgttgaagaagcaacaacgtaatttgagaaagtgggaaaaagtagaaaaggaacggaatggcaggcgcgagaagtacgttgttagcatgaatataggttcaaacggtaaagttactatgacagaagtccctaaggatacagagaacgtaattgcaggttcagatgatgacatcagtgatataagtgacgaagaagatatcagcgaccttaaacatatacacgctctgaaaaagtga

SEQ ID NO: 82299 - DNA, 1113 bp, Saccharomyces pastorianus
atgagcgatgaagattctatgctgttaaacttcactaccaatgaggacactgcaggaagttcctataagcaagctgccaaggtgacaggcggtagatggaaggatagaagaagaatgaaaatgaagcttgagggaaagacagtctcgaggaaaagaaaggcgaacactacaggggacgaagggataattccgggtagaggcgagaattctattaaaaaattgcataaggagagttcctatagttctgaagagcaggaaaaatataagggtagaaatgctcataacactcaagggagaactctaccagccgattctcagtttgtttcatccctgtttacatctaacagagagattacaactgcggtaaacactaatattcatgatgaaaacgttgccatcaatccgtctaacgcgcccttgaaaggtgatcagtttgcgtctttaggtgtcactagtcttcttgtttctcatctggagcaaaaaatgcgtattaaaaagcctacgagcatccagaagcaggccatacctcaaataataggtaacgcggggaagaacgattttttcattcacgcccaaacaggctcaggtaagactttatcgtatcttttacctataatatctactattttgaacatggatactcatgttgatcgtacttctggtgcattcgcattggttattgctcctacacgagaactagcatcacaaatatatcatgtttgttccacgcttgtgtcatgttgtcactacttggtcccatgtttattgattggtggagaacgtaagaaatcagaaaaagctagattgcgtaagggttgcaatttcataatcggtacaccaggtcgtgttttggatcatttacaaaatacaaaagttatcaaggagcaattgagtcaatctctaaggtatatcgtattggatgaaggagataagttaatggaattgggttttgatgagacgatcagtgaaattattaaaattgttcacgatattcccatcaactccgaaaaatttcccaagctaccgcataagttagtgcacatgttatgtagtgctacacttactgatggtgttaataggttaagaaacgtggcgttgaaagattacaaatag

SEQ ID NO: 82300 - DNA, 726 bp, Saccharomyces pastorianus
  modified_base (690)..(691): a, c, g, t, unknown, or other
  modified_base (701)..(701): a, c, g, t, unknown, or other
  modified_base (715)..(715): a, c, g, t, unknown, or other
atgagtattgacaacaagttgtttgttactgaagaggatgaggaagacaggacgcaggaccgtgctgatgttgaggatgaatctaacgacattgatatgatagcggatgagaacggaacaaacagcgctatagctaatgagcaagaggaaaaatccgaagaagtaaaagctgaagatgatactggtgaagaagaagaggatgacccagtgatcgaagagtttccattgaagatctccggagaagaggagtcactgcacgtgtttcagtatgctaatagaccaaggctagtaggacgcaaacctgctgagcatccgtttatctctgcagcaagatataaacccaagtcgcacctatgggaaatagatattcctttggatgagcaggccttctataacaaggataaggctgagagcgagtggaatggggttaatgtccaaacattaaaaggcgtgggtgtggaaaacaatggccaatatgcagcatttgtcaaagatatgcaggtttatttggtacctattgagagggtagcacaattgaagccatttttcaaatatatcgacgacgcaaatgtaacaagaaagcaagaggacgccagaaggaaccctaatccttcatcacaacgcgctcaagtggttaccatgtctgtaaagagcgtcaacgacccccttcgcacaaacacgactcactgnngctccctcgnctggcacactaaangtcgccgatga

SEQ ID NO: 82301 - DNA, 282 bp, Saccharomyces pastorianus
atgatcgaatggataacgagatatcaagcgatgaagaagactccgaagatgaagatgaagagaatgatatgggccatgaggagggctactcattatataggtcaagaagtaaagaagctttttgaactaaaacattcacattgtcacattttcaccctttattcatcaattttttattgctccacttttttcgcatataggtcatttataattcatcaaatatatacttttttaattgaggcttgtattaatagtaaccgaatatatctgggatcctcgtag

SEQ ID NO: 82302 - DNA, 3102 bp, Saccharomyces pastorianus
atgtcaggttctttctggaagtttggtcaggattactcgatagagtcaccggtttctaagattctaaatagtgcctttattaaaatcaataaggaccaagatgacgacgtacctaccggcacatgtgaagaaaatattgctgatgacgaagataactcttcacatgactacgctgcttctgaagataatgtagttaacgagaacgaagagaaggaagaagaaaatactctgcccactacagaatcggaatatgaaaattatagacctaatttggacgtcttagacgatttgctggatgatgacgaactgtatacggaattaatgtgttcaaatttcaagctactaatattcttgaagtatcctgaagttttatcaaaattgatagaatatgttaccaacgagaagattctcgacgaagaaacagatagcgctaaaaagccagagattattgaaggtgtaaacgatcatcctattttgatagaaagagacagaaaggataaaaaggaggacgctgaagaaggaggcgactcagaagaaactacaaatgatagcgatcatgactctggggacgaaagaagtgttgattctgaagagacaagcattactttgccaccggaatctgaggaacaagtggagactagaagggcaaggatagctgctgaaattttatcggctgatgtatggcctatatccgcagcaataatgcaaaataaggatcttcttggtagattgtggtcgatactagatcacccagctcccttaccgataccagcttccacctacttcatgaaaataaatgaaagacttctcgatatggatataacggggatgttagagtttatattaagccgagacagcttggttgcaaggttcttgacacatgttgacaatccgtctttgatggacttccttttgaaagttatctcgacggataaacctgactctcccacgggtgtcataaagatactaaaatcacaggaattaatacctaaacttttagatcatcttaatccagaatacggtatttccactcagtctgcggcaggcgattttattaaggcattcgtcacgttaagcactaactcaagcaatgaacttgcttcgggaataggtcctaatgaattgacaaggcaattagtatcagaagaaatgatagaaaagttgattaagataatgctaaagggcggtacatccttaagtaatggtgttggaattatcatagagttgatcaggaagaataactcagattatgatttcatccaactagtctacactaccctagaaagtcaccctcccactgatcgagatccaattcacttgatacatttagtcaaactttttgctaagcatatgcctgattttgctgatatgctggataaaaccaagttgccactaatggaaatgccattcggtaatattgaacctctgggatttgagaggtttaaaatctgtgaacttattgcagaactattgcactgttctaatatgacgctgctaaatgagcccaatggtgagatgattgcccaagaacgtgatatagaaagggccaaagaattagaaacttcaaccgaaaaggaaaatataacagctattgtggacaataaatcatcatattatgataaggattgcgtagagaaggatatcacagaaaatttaggcgctcttcaaataaataatcaaggaagtgaagaagatgaattaaatgatactggggtatcaagtgtaaaactggatgtgaaatcagacgcaaaggtagttgaggggctagaaaatgatgcttctggagtagagttgtatgatgaaaccttgtctgacacagaatccgtgagagaatgcctaagggaaaaaccgctagttggagacaggctgaagattgctctagaagacactaagatactgattagtatccttgatatgttcactgagttcccttggaataattttttgcataatgtaatttttgatattgcccagcaaatattcaatggtcccctcaaaactggttataataggttcctcttgaaagattatttggttgatgcatacctaactaaaaagatagtagatgcggataaggcatgtcaagactatgaaaaaaagaccggtttacgttatggttatatgggtcatttgacattagttgccgaagaaatatcgaagttcaaagagtatattgatgaaatgaagctaactttttgcaataccgctgtttcagatcgacttgaggaaccattttggaaagaatatagtgaaacgatcttggctgatacaagagagaagtataacaccgttttgggagattttggcaatgaccaagaaagcgatgacgatgttattaggaattctgattctgaggatataattggtgatacagagggcaacgaaaactacggaaatggagaaaacgatgaacttcttagtaacgggcatgattctgggaacatggatttatattataacttcaataataacgagaatgaagaaaatgaagaagattacgcagagtatagtgatgtggataataaaaattactataataacgtcgagactaacgacgatgattatgatagtgatgatggtaaatccaaaagtgccgaatcagagtttaccgataaaatatctgaacatagggatggcaatagtctctataatgaggacaatgatgaaaacgggagtgacaaatggacatcgggtacttcattgttccctccagaccattttcctagtaggtcacaaccttcagatcctaaactgcaagaccagaatatttttcaccatcagtttgactttgaaggtgttggcgatgacgatgactatatggatcctaatgatgatggccagtcatatgccagacctggtaatccattgtatactaccccgaaaacaccaccaagaccgaagactattcttttcaattctttatccgcattggataataatggcgaagacgaagaagtggcactaggcaccagtgttgatgatcgaatggataacgagatatcaagcgatgaagaagactccgaagatgaagatgaagagaatgatatgggccatgaggagggctactcattatataggtcaagaagtaaagaagctttttga

SEQ ID NO: 82303 - DNA, 1653 bp, Saccharomyces pastorianus
atgtcagtacctaattccaaagagcagtcgctcctagatgatgcatccacattgttattgttttcaaaagggaaaaaaagagctgaagaagcttcaaaaataggctctaaaacagatactattgagcatgatgagtctcatgagagagaaaaaaaaggagcaatagaaatggcagcagcagcactggctacagcatccacagtttctttacctttaaagaaagctactgagcaatcggcggcagaagcagcaacatccacggcagcaaaagaagagaccgaaaatcaacctcaaaagcaacctcaatggccggtacctgattcgtatatagtcgatcctgacgcgggtataattacatgtatatgtgatttaaatgatgatgatggattcactatccaatgtgaccactgcaacagatggcagcatgctatttgctatggcatcaaagatattgggatggcacctgatgattacctttgcaactcatgtgatccaagagaggtagacattaacttggctaggaaaatacagcaggaacgcataaacgtaaaaacagtagaaccttcttcatcaaacaatagtgctagtaataagaataacggtcgggacagagcatcgagtacaactattagtgacgttggcgatagcttttcaacggatcaggacaatactaaccacagggacaaaagaaggaaaagaaacccatcaaataatagtatagactccaaaaacgaaagcgcttctgtcaattcttccgatggattgacttctatgcccaagaaaaaagagcatttcctgagtgcaaaagacgcatatggtgcaatatacttgcccttgaaagacaatgtgtttaaaagtgatctgatcgaaccgttcttaaataaacatatggatgataattgggtcatacaatatcctcataagacctttaaatctgtgtcaattgaagtcaaaccgtatgctgacattgcatattccaggacttacccaggcttcacgaaattaggagtttatctcaaaaaggactgcataaaaggtgatttcattcaagaaattttaggcgaattggacttctataaaaattatctcactgacccacgaaaccattacaggatatggggtacagctaaaagaagggtcattttccattcccattggccgatatatatagatgcacgcttatcaggcaattcaactaggtatttgagaagaagttgccagccgaatgttgaattagtaactataaaactgcaagatacagacaataggaatgacaaaagcagtggaagaaaatcaagtagaataaaatttgttttaagagctttgagagatatttcagaggatgaggagttatacatcaaatggcagtgggattcaaaacatcctatattaaaattaataaagggcatgacaatagactctttagatgaccttgaaaggtatgggctgataaattcggtagaaacaattttgagtaacggcgaatgcggctgtggaaataattctaaagattgttatttattgaaagtgaagagatacgcgcaaagtctttataaatctgtgaaatccagaggaaaaatgaacaacagatataaattaaatgaaattctcaaccaatataattgcaaaaagagacgtgagccaccaatttag

SEQ ID NO: 82304 - DNA, 180 bp, Saccharomyces pastorianus
atggacccgctcaccataaacttttccagaatagaaaccttcggattattcgtaggtaatgaaccaccaccagttgtaagcagtctcttctttctcttgaatattttatttgggtcgttagaatgggtattggcattagtgttcacattggttgttattcagctttttcctatttcttga

SEQ ID NO: 82305 - DNA, 108 bp, Saccharomyces pastorianus
atgtcacgtaattctgcagcaggtttggaaaacactcttttccaactaaagtttacatcaaaacaattacaaaagcagccaataaagcctcaaaggaagaaaaacagg

SEQ ID NO: 82306 - DNA, 1347 bp, Saccharomyces pastorianus
atgagtaatacttcttcgtacgagaagaataatccggataatctgaaacacaatggtattaccatagattctgagtttctaactcaggagccaataaccattccctcaaatggctccgctgtttctattgacgaaacaggttcagggtccaaatggcaagactttaaagattctttcaaaagggtaaaacctattgaagttgatcctaatctttcagaagctgaaaaagtggctatcatcactgcccaaactccattgaagcaccacttgaagaatagacatttgcaaatgattgccatcggtggtgccatcggtactggtctgttcgttgggtcaggtactgcactaagaacaggtggtcccgcttcgctactgattggatgggggtctacaggtaccatgatttacgctatggttatggctctgggtgagttggctgttatcttccctatttcgggtgggttcaccacgtacgctaccagatttattgatgagtcctttggttacgctaataatttcaattatatgttactatggttggttgtgctaccattggaaattgtcgctgcatctattactgtaaatttctggggtacagatccaaagtatagagatgggtttgttgcgttgttttggcttgcaattgttatcatcaatatgtttggtgtcaaaggttatggtgaagcagaattcgtcttttcatttatcaaggtcatcactgttgttgggttcatcatcttaggtatcattctaaactgtggtggtggtccaacaggtggttacattgggggcaagtactggcatgatcctggtgcctttgctggtgacactccaggtgctaaattcaaaggtgtttgttctgtcttcgtcaccgctgccttttcttttaacggttcagaattggttggtcttgctgccagtgaatccgtagagcctagaaagtccgttcctaaggctgctaaacaagttttctggagaatcaccctattttatattctgtcgctattaatgattggtcttttagtcccatacaacgataaaagtttgattggtgcctcctctgtggatgctgctgcttcgcccttcgtcattgccattaagactcacggtatcaagggtttgccaagtgttgtcaacgtcgttatcttgattgccgtgttatctgtcggtaactctgccatttatgcatgttccagaacaatggttgccctagctgaacagagatttctgccagaaatcttttcctacgttgaccgtaagggtagaccattggtgggaattgctgtcacatctgcattcggtcttattgcgtttgttgccgcctccaaaaaggaaggtggaagtttt

SEQ ID NO: 82307 - DNA, 174 bp, Saccharomyces pastorianus
  modified_base (167)..(167): a, c, g, t, unknown, or other
atggtgccaagggaaagtcctagcatgtcaaacagtcatcatacatcccagggaagaagaaacaaactttcagtgtgggttaaaaaaataataaacaccactaccacaactaacgcatcggtctcgagcagtaaaccaagacgcggcactagggctggccccacaangagttaa

SEQ ID NO: 82308 - DNA, 372 bp, Saccharomyces pastorianus
atgtcgttttggaaaacattgcagagacagccacgtaccatctcgttgtttaccaatgacatcgcgtccaatatcaagtcgcagaaatgcctgcagttactgaagggagacgtctctcatcgattcgacgtggaaatcgccaaccgctttcccacgtgggaccagctgcaatacatgagaacttcgtgcccgcaaggcccagtttcgttgcaaaggcagattccaaagctggattcagtgctcaaatacaagcacacagacccgacgttcgggatggacctgcagaagtgtgtccagaggggactttggaatcacaaaggaggcgctttgggtccgactgggaaaactagattggtgggaaatgagcccgca

SEQ ID NO: 82309 - DNA, 993 bp, Saccharomyces pastorianus
atgccaacagctaagaggacgtcatccagggcttcgttggcactgcccttccagttacggttggtgcacaaaaaatcatggggccatcggctaagagacttcatttccgggttcttaaaatcatgcagacccattgctaaatacgttttccccaacttcatcgtggtgcactatatctacctgatcacgctgtcgattatcgggtccattctgttatatcggtgcaagaacacggcgttcatcgatgtgctatttctggctgctggagcgtctacacagggcgggctggccaccaagagcactaacgatttcaacctgtaccagcagatagtggtgtacgtcattacattgctgtccacgcctatacttattcatgggtttttggcctttgtcaggctgtattggtttgaaaggtacttcgacaacattagggatatctccaaacagaattttaaactaagacggaccatgacgttgcaacaaagggaactatcgggcagcagtggcaatgccgctcgaagtaggagtttcaaggacaacctgttccgtgggaagtttgtttccagagaagacccacgacaatccgcttcagatgtgccgatggactctcctgacacgtccgcattgtcctcaatctcaccgttgaatgtttcctcctctaaggaggaatccagtgacacgcaaagctcgcctccaaacttctcaagtaagcgccaaccctcagacgttgacccaagagacatttacaaatcgataatgatgctacaaaaacaacaagagaagagcaacgcaaactccacggattctttttcgagcgagaccaatggacccgctttcattgtgcaggaacgtcatgagagaagagccccccactgctcactgaaacgccattctgtcctgccatcttctcaggaattgaacaagctagcccagacgaaaagtttccggaaattgcttggcttgcggagagatgaaggtgaccatgactactga

SEQ ID NO: 82310 - DNA, 834 bp, Saccharomyces pastorianus
atgtctgaaggtattactgatattgaagaatcccaaattcaaaccaactatgacaaggtcgtctacaagttcgatgatatggaattggacgaaaacttgttaagaggtgttttcggttacggtttcgaagaaccatctgccattcaacaacgtgccatcatgcctattattgaaggtcacgatgtcttggctcaagctcaatctggtactggtaagaccggtactttctccattgctgctttgcaaagaattgacacctctgtcaaggctcctcaagctttgatgttggctccaactagagaattggctttgcaaatccaaaaggttgtcatggctttggctttccacatggacatcaaggtccacgcttgtatcggtggtacttcctttgttgaagacgctgaaggtttgagagatgctcaaatcgtcgttggtactccaggtcgtgtttttgacaacatccaaagacgtagattcagaactgacaagatcaagatgttcatcttagatgaagctgatgaaatgttgtcttctggtttcaaggaacaaatctaccaaattttcaccttacttccaccaaccactcaagttgttctattgtccgccaccatgccaaatgatgtcttggaagtcaccaccaaatttatgagaaacccagttagaattttggttaagaaggatgaattgactttggaaggtatcaaacaattctacgttaatgttgaagaagaagaatacaaatacgagtgtttgaccgatttatacgactctatctccgttactcaagctgtcatcttctgtaacaccagaagaaggtcgaagaatgaccactaa

SEQ ID NO: 82311 - DNA, 345 bp, Saccharomyces pastorianus
atgataccaccacgaatcgttccatggagggattttgctgaactagaggagctgaaactttggttttacccgaaaagcaaaggaaccattgaagataagcgacagcgtgcagtgcaaagagtacagagctaccgactaaagggttcccaatatttacctcacgtggtggactctacagcacaaataacatgtgcggtattgctagacgaaaaggaaacgtgtttaggagtacatcaggattctattcctatccggttatcgtatgtaatggctttgattcggtttgtcaatggcttattgatccaacgcaacaatctcagttcgctattcccttacatacattag

SEQ ID NO: 82312 - DNA, 1035 bp, Saccharomyces pastorianus
atgtgcggtattgctagacgaaaaggaaacgtgtttaggagtacatcaggattctattcctatccggttatcgtatgtaatggctttgattcggtttgtcaatggcttattgatccaacgcaacaatctcagttcgctattcccttacatacattagctgctaaaattggactgccgtcctggtttgttgatttgagacactggggtacacatgagagagatttacctggattagaaatgctccgttgggccgccaatgaagcgttatcttggctatatgatcactactggaacgatgaggaattagaagatgacaggaatgatgatgacgatgatgatgataccggttacggatacagaagaaatgataaactggagaaatatatggagtcattaactaaaacacttgataaatggaagcgacttagaaacgagtttctggaatacaaatgggtgtgggagaatgcaaacgatagtttaattacaagtagtaacttttctggggataatttggtgaactatgatgccgaaaagaggaaaagttcacacgcaagttcatcagaaactatgatcagggaaaatttgcgtcaatggcaagaactttggaaattatccatttatcacaatgtggttcttgagaaattttttaacaattatgacccacttttactcaaagttttaatgcttaatttgaacaattttgattggaaggtcattgagtgggtagctaggaattacagaacccaacaagatgatagtaatataacgacaattttaaaaaggaaattcaatgcctggaaagaactacaaaaaaggctgttagatgttattataaataaccttaacaataaaaattttaaaaataaatggcaaaattgggagaaacttattgatgaaaatgcgtcatacttgatattgtatttttgccaatctatgctggccaaactagagactgaaaaaattactggtaactcatggagaaacaaaaaacggagaaacaaattgatagcacagtggatatcgaggccaaactga

SEQ ID NO: 82313 - DNA, 282 bp, Saccharomyces pastorianus
  modified_base (184)..(184): a, c, g, t, unknown, or other
atggagaaacaaaaaacggagaaacaaattgatagcacagtggatatcgaggccaaactgaaagaatacatagaccatttatcattgaggtttaatgaaggtgaaataaagctgtatgattttattcctgcggaaaaagattccgttccattgaagaaggaagtgagtcgcggcattaaaggcntgatacgcaatgatatacttaggcgatgttggcgttctttgaaactagagaatgagccagtttgcggaacacgtaaggtaaataaaaataaacaatga

SEQ ID NO: 82314 - DNA, 648 bp, Saccharomyces pastorianus
  modified_base (634)..(634): a, c, g, t, unknown, or other
atgtcacaatacaaaactggtttacttttaatacatccggcggtgactacaacgccagagctagtagagaacactaaggctcaagctgcatcaaagaaagtcaagttcgtggaccagtttttaatcaacaaactaaacgatgggtccataactttggaaaacgcaaaatatgaaacagtacactatttgacgccagaagcccagactgatattaagtttcctaaaaagttaatttctgtcttagctgactcattgaaaccaaatggctcactaattggtttaagtgatatttataaagtagatgcattaatcaatgggtttgaaataattaacgaaccagattattgctggattaaaatggattcctctaaactcaaccaaactgtttctataccactgaaaaaaaagaaaacgaacaatactaagctacagagtggtagtaaactaccaacttttaaaaaagctagttcttcaacctctaatttaccctcattcaaaaaagcagatcacagtaggcaacctatagctaaggaaacagacagcttcaaaccacctagtttcaaaatggccactgaaccaaaagtctaccgagtcgtagacgacctgatgaggatagcgatgatgatgatttctnctagtgactcttcc

SEQ ID NO: 82315 - DNA, 1476 bp, Saccharomyces pastorianus
atgcaaattggatatggactagtcaatgaccacaagaaggtttacatctggaatattcactccactcaaaaggatacgccctatataactgtaccatttcgttctgatgataatgatgaaatagcagtcgcgcccaggtgcatactaactttccctgctacaatggatgagtctccattagcactgaatcctaatgatcaggacgaaaccggagggcttatcattatcaaaggtagcaaagcgatatattatgaggatatcaactccataaataatttgaactttaagttatctgaaaaattctctcacgagttagaattacccatcaactcttcgggcggagagaagtgtgacctaatgttaaactgcgaacctgctggtatagtgctttctacaaatatgggcagaatattttttataaccattagaaattccatgggtaaacctcaactgaagttaggcaaactattaaataaacctttcaaattgggtatctggtccaaaattttcaatacaaacagttcagttgtctcattacgaaatggacctatcctcggtaaggggacaaggttagtatatattactactaacaaaggaatttttcaaacatggcagttgtctgccacgaattcccatccaacaaaattgattgatgtaaacatttacgaagccattttagagtcgctccaggatttgtatccatttgctcatggtacgttgaagatttgggactctcatccattacaagatgaaagttcacaacttttcctgtcatctatttacgacagttcatgcaatgaaacatattatattctttccacgattatcttcgattcttcttctaatagttttactattttttccacttatagattgaacacttttatggagtcaataaccgacacaaagtttaagcctaagatatttatacctcagatggagaatgctaacgataccaatgaggtaacttccattttggtaatgttccccaatgctgttgtcattactcaggtgaactcaaaattggactctagctattcaatgagaagaaagtgggaagatattgttagccttagaaatgacattgagataattggttctggttacgactcaaaatctttgtatgttttaacgaaacaaatgggggtgctacagttttttgtgaaagagaatgaggaaacaaattctaaaccggaagttgggtttgtcaaatctcatgttgatcaagctgtttatttctccaaaataaatgcaaatcccatagatttcaatttacctccagaaatttcactagatcaagaatctatagagcatgatttaaaattaaccagcgaggagatttttcattccaacggcaagtacataccccctatgctaaatacgttggggcaacatctctctgtccgtaaagaattttttcaaaatttcctgacatttgttgctaagaacttcaactataaatatcacccgaactga

SEQ ID NO: 82316 - DNA, 105 bp, Saccharomyces pastorianus
atgagtgaaaaaaaagtacatcttcgtttgcggaaggaacttagcgtacccattgcggtggttgaaaacgaatccctggcgcagttgtcttatgaagaggaaagc

SEQ ID NO: 82317 - DNA, 921 bp, Saccharomyces pastorianus
atggcttccaagaaaattaaagttgacgaagtgccaaaattaagtgttaaggagaaggagattgaagagaaatcttcttcttcttcctcttcctcctcctcctcctcctcctcttcttcttcatcttcctcgtccagttctagcggcgaatcttcaagcagcagcagcagcagcagtgacagcagtgactctgaatctagctcatcttcttcttcttcttcttcttctagctcaagctcaagttctagcgactctgaatcttctagtgaatccgactctagttccagtggatcttcttcttcctctagctctagttctgacgaatcttcctcggaatccgaatcagaagatgaaaccaagaaaagagcaagagaatcagacaacgaagatgctaaggagactaaaaaggctaaaactgaaccagaaagctcttcctcatcggagtcaagctctagcgggtcatcgtcatcttcggaatcagaatcaggttcggaatctgattctgactcaagttctagctcaagcagttcttctgattccgaatcagattctgaatcagattctcaatcaagttctagctccagctctagcgactcttcgtctgactccgactccagctccagcgactcttcatctgactccgactctagctccagctctagctccagctctagcagctcttcctcggattcagattcggattcagattcggattccgactcaagctcgtctgattcaagttccgacgaatctacatcttcttctgattcctccgattcggattccgactcagactctggttctagctctgaattggaaacaaaagaagcaactgcagacgaatccaggccgaagaaacgcctgcctcatctaacgaatcaactccatctgcttccagttcatcagcgggggatcctctag

SEQ ID NO: 82318 - DNA, 1560 bp, Saccharomyces pastorianus
atgtcggatcatgatactccaatggaaagcatacaaaatggtgaaaattcagacgaaagattgaacgccattgcgtcttttttcggttgctctttagagcaggttaaatcatttgacggtgatgtggtaaaacaccttaacgataaacttttacagtttaatgaacttaaatcggagaatctaaaggttaccgtctcattcgatgaattgaaggctagttctttaaagaaaattgatggtttgaagacagaaatggaaaacgttataagagaaaatgataaaatccgaaaagagaggaatgatacttttgttaagttcgaatctgtagaaaatgaaaagatgaaattatcaagtgagctagagtttgtgaaaaggaagctcgatgatttaactgaggagaaaaaggaaacccagagtaatcaacagcgaaccctgaaaatactggatgaaagactaaaagaaatagaattggtcagggttgagaataatcgctccaatagtgaatgtaagaaactacgctctacaataatggatttagaaacaaaacaacagggctatattactaatgacctgaattctagaactgaactggaaagaaaaacacaagaattgactttattgcagtcaaataatgattggctagaaaaggagctacgttcaaaaaatgaacagtatctctcctacagacaaaaaaccgacaaagtaattctagatatcaggaatgaattaaatcgtttaaggaatgattttcaaatggaaagaacgaataatgatgttttgaagcaaaaaaataacgaattgtcaaaatctttacaagaaaaactactggaaatcaagggtctatccgactccctaaattccgaaaagcaagaattttctgcagaaatgtccctaaagcaacgtttagtggaccttttagaatcacaattgaacgctgtaaaagaagaattgaacagtataagagagttgaacactgcaaaggtaatagcagatgattcaaaaaaacaaactcccgaaaatgaagacttacttaaggaattgcagttaacgaaagaaaaattagcacaatgtgaaaaagaatgtctacgtttatcctctataactgacgaagcagatgaagataataaaaatttatctgcaaaatctagttctgattttatattactgaagaaacaattaattaaagaaaggcgtaccaaggaacatcttcaaaatcaaattgaaacattcatcgtagagttagaacataaagtgcccattataaactctttcaaagaaagaactgacatgttggaaaacgaattgaataacgctgcattgttactagagcatacatcgaacgagaagaatgcaaaggttaaggaattaaatgccaaaaaccaaaagctagtggaatgtgaaaatgatcttcaaactttaaccaaacaacgtctcgatctatgccgtcaaatacaataccttttaattaccaattctgtttctaatgactcgaagggacccttacgtaaggaagaaattcaatttattcaaaacattatgcaggagacgatagtactatca

SEQ ID NO: 82319 - DNA, 1194 bp, Saccharomyces pastorianus
atgtccccttctaaaatgaatgctacagtaggatctacttccgaagttgaacaaaaaatcagacaagaattggctcttagtgacgaagtcaccaccatcagacgcaatgctccagctgccgttttgtatgaagatggtctaaaagaaaataaaactgtcatttcatcaagcggtgcattgatcgcttattccggtgttaaaaccggaagatctccaaaggacaaacgtattgttgaagaacctacctcgaaagacgaaatttggtggggcccggtcaataaaccatgttctgaaagaacatggtctatcaaccgtgaaagagctgcagattacttgagaacaagagaccacatttatattgtcgatgcattcgctggatgggatccaaaatacagaatcaaagtccgtgttgtttgtgccagggcttaccacgctttattcatgacaaatatgcttattagacctacagaagaagaattagcccattttggagaacctgattttactgtctggaacgctggtcagttcccagccaatttacacacccaggatatgtcttcaaagagtactatagaaattaacttcaaagcaatggaaatgatcattttaggtaccgaatacgccggtgaaatgaaaaaaggtattttcacagttatgttttacttgatgcctgtgcaccataacgttttaactttgcactcttccgccaaccagggtattcaaaacggtgacgttactttattctttggcctaagtggtaccgggaaaaccactttatccgcagacccacatagattgttgatcggcgatgatgaacattgttggtccgaccatggtgtcttcaatatcgaaggtggttgttacgccaagtgtattaatctatctgctgaaaaggagcctgaaattttcgacgctatcaagtttggttctgtattagaaaacgttatctatgacgagaagtcgcacgtagtcgactatgacgactcttctattactgaaaatactagatgtgcctacccaattgactacattccaagtgccaagattccatgtttggcggactctcatccaaagaacattatcctgctaacttgtgatgcttcgggtgttttaccaccagtatctagattgactcctgaacaagtcatgtaccatttcatctctggttacacttctaaatggacctgcaggcat

SEQ ID NO: 82320 - DNA, 1068 bp, Saccharomyces pastorianus
atgactgccagcacatcagttgcggtgggttgtgcggtgggtatacccgtcggtgtaggtgttataatagcagtatgtttctggtttaacctacaaaaaagatacaagagggaggaacaagacgatagagaattggaaagggctatttatgatgaaagtggtttcgtgtcctttgacaattttggacccttaagagacagtaaagatgaagcagcactagccagctccgagctaaaaaatcctgatcacacttctggttcatcggaaggatctgctcatccagaagaaaaagatggaaaatcgcgagatcaagagaaaccgttagggaaaaagaatagtaaatactatgtgccagcataccgtaggaaaataaatttacttcaagtacgaaataataactacggcaataatgccaggcagaagtccgttgtggatttaccaagtataaataacagctccaatgtttccttatcatcttcccaacggcatataacaaagagacagatcagcgtttatgatcagatggtccctgttatttctgatgaaggaccaaagtttttcgcagatccttccagtgatactaatactagcaatgaccaaaacaaagcttcgatgatagaacttaaacataatactcgccaatctagtaatgaaaatctgataagaaatttgcagaatcaggactttggttcgtattacccaaggagagcttcatcctcgtttttaaatggtaacatttcaaacgcgtccttccatacaaggaattcctctataacatcggtaaataagcgcgatgccctagaggatgtgtttgcaacacccaaaagtgcggctcaatcacagttaccaaacacttttgataaagataatgaaggaatagatgctgaccactcggtaaaggatagcaggtctgcaataacagataaagataaggatatatacaaattacagaataactatgatgtgggcaatatcggggaaattgctgaggaagatcaatacgaaaacgaatttaccaactactcacagagtaagagagagttcatagaaagtctaaggcctaaatag

SEQ ID NO: 82321 - DNA, 1527 bp, Saccharomyces pastorianus
atggatgaatttgaatctaccaaactttcgaaggttcaattttccactagcgtgttaagtacgccttcgaatgaaggaaataatctaatacacagattcaagaactctttcaagcgaaatgattcaccagccatccaagaaggtttgctgtactcggagctttcagaggaagaaaaaatacaatgggacttagctaaccaaccgtataaaaaggtcctagatcaaaggcacctgaccatgatagccattggaggtactctagggacgggtcttttcattggtttaggggaatcgctagcgtccggacctgcttctttactaattggtttcttgttggtcggcgcatctatgctctgtgttgttcagtgtggggctgaactttcatgtcagtaccctgtttccggctcctatgcgctgcacgccagtagatttatagacccatcagtcggcttcagtataggaattaactacttattgatgtggctcatatcttaccctagcgagttggtaggatgttcgcttaccatctcttattgggcaccatcggtcaatcctgctgcctgggttgcaatcgcgttcgttttaagcatgctattgaatctttttggggcaagaggctttgcagaatcagagttttatatgtcaattttcaaaattgtggctctattcatttttataattattggtattgttctcattgcaggtggtgggcctgattctactggatacatcggcacgaagtattggcacgatccaggctccttcgctgttcctgttttcaaaaacctctgcaatacttttgtttcggcagcatactcctttagtggtacagaaatggttgttttaaccagcactgaagcaaggagtgtttcctcagtctctcgggcagcgaaaggtacgttctggagaattatcatcttttatattgttacagtgattataattggttgcctggtcccttataatgatcctcgtctgattagcggttcatccagtgaggatattactgcttccccgtttgttattgccttgagcaatactggtgctatgggaacaagagtgtctcattttatgaatgcggtcatcttgatagccgtattttctgtttgcaattcctgcgtttatgcatcctctagattgattcaaggtttggcgacagcaggccaacttccaaagatctgcgcttacatggacaggaatggtcggcctttagttggcatggctatatgtggcgcatttgggttgttaggctttttggttgtttccaagaaccagggtacggttttcacatggttgtttgcgttgtgttccatttcatttttcacaacttggttctgtatttgcttctgtcaagtcagatttaggatggcaatgaaagctcaaggaaggtcaaaggatgacattatctatagatcgacattagggatatacggaggaattttcggctgtatcttaaatgttctgttggtaattggagaaatatatgtatcggctgcacccgtgggtagtcccagattctgctgctaa

SEQ ID NO: 82322 - DNA, 153 bp, Saccharomyces pastorianus
atgtatcggctgcacccgtgggtagtcccagattctgctgctaatttcttagactattgtatgagtattcccataatgattgctgtatatattggccatagagttaaccgcagagactggagacactggtacatcaaagcggatggatattga

SEQ ID NO: 82323 - DNA, 93 bp, Saccharomyces pastorianus
atggatattgaccttgatagcggacattccttagaggacttcgaagccacaacgcttgagagggatgaggatacgaaaatacgtttcctctaa

SEQ ID NO: 82324 - DNA, 360 bp, Saccharomyces pastorianus
atgtgcatgtgtgtggtgttggtatattttagtatacttcttgataaaggtaccaaagtactgtatacacatgataattactggttagtcatcctggtgttttacttcttggcattcggctcgatcatgaggatttcgggccgaacctgctccgaagaaatctttcggccaggcatcatatcacaatgggttgcagaatttctcgaaggaatcacctgtaggagtgaacctcgaaaaaaagaaaacacatatttcatactgcatcatccttgcaacacaacgcttcctgcagaagttttcgaacaaaaggcttggcaatcctcacttacaccccactcgcgaatccacattttcacgtga

SEQ ID NO: 82325 - DNA, 996 bp, Saccharomyces pastorianus
atgaaagtatttgtaactggagcttctggcttcattggttctgccgtattatccgaactaatatcctcgggtcatgaagttgttggcttggcaaggtcagacgaggctgctgcaaagattaagtcgattgatcctgctgcaaaaatccttcgcggtgatctcaaggatctggaaattttgaaaaaaggtgccactgaatctgatggcgttattcatttaggatttgtgcatgattttaaaaattttgaacagtgctgcgaaattgaccgtcaggccactgtagctatgctagagtcacttaaaggttctaacaagcctttcttatatacgaatggtacactttctttgcgaccaaacaaagttgctaacgaacaggatggtattgatgaagattccaaaattttgcgtgctgtcactgaacaggttgccttgagttacaaagacaaaggtgtttcagcaagaattgtcagactcccattctcggttcatggcaagggggacaaggcttttgtaccaatattaatgaatattgccaaagctgccggaaaatctggctatgtcggacaaggcacaaacgcttgggcggctgtacatcgtttggatacggctcctctgttcagacttgttttagagaaaggaaaaacaggacaagtgtatcattgcgttggtgaacaaggtataccattcaaagatattgcgcgtgtgattggagaaattttgaatgttcccgtggcctctatccctgttgatgacgcggaaagtcattttggcttcctcacttgttttgtcactagagatggcccagtttcaagcgaaggtaccagaaaagagctgggatggcagccacaacaaatcggtcttctgaagatatccgtgcgaactatcgctcaaactgacttgaagcttatattatgcgttttttctaagagcgccatagcatgtaacgttttttacatactagttagctttatctatatagtctactgtgcagcttaa

SEQ ID NO: 82326 - DNA, 2340 bp, Saccharomyces pastorianus
atgagcatcgcatcccagaaaaaggttaagccatcgtttgtttgcttgcggtgtaagcaaaggaaaatcaaatgtgataaactttggcctacttgctccaaatgcaaggcctcatcctcgatttgtagctacgaagtggagccaggacggattaacaaatctcccactatcgaaaatgcctcacatagagacattagaaacattactcctgcatcgatgtccgcaagtggttcctttacttccatacttaatccaagtaccaaagactgggaaatgaaaaattttgccatgaatttatcgaatgcacacgacaagcttgttgtaatgaataacacaaccatcgttgatagtccttttgccttccatagcattcttcaacatgatttgtatgcgaaggccttgaccacctgcatacatgggaggatactgattgatgtcgaacgccatcgtgaaaacgtttctgccaacaataaaaaaagagaacttaacttaacaatcggtgatattggacctttgttttttattgataaagctgcacttaaatttattgaaaatacctcaaaaacaagcaaattgtatcctccaatagattttctgtataacacgtatgattatgaacaagcgcatcctgaagaaaataatgataaaatttccataaacatccttttggaagagttatccaaatatttcctcaataagaatgaggttgatggcttaatcgtggacttttacaaaacaatatatccggtctatccgttactggaaatatcattattcgaagataacataagggagctgttgcaattgaatgaatttaatgggtataacattgtatttgcgggcaaagactctagaagaaaattggagacaataacactgctaactatcatattggctttttcttacagacgtttgagtctaagtactagtcattcatttaaagaatcttttggtgtaaaatcgaataatttaacgctactcgctcataaacttcttgctctcatgaacgtttttcaatatgttgatgaacatacactttgttgtctgctctattttttcatattgcggtatttgaatccagatcaagctgacatgtatcctactcacagtgacatactaaacctaaaatttttggagaatgtagcaataaagctaggactgaatgaagaacccttccaatacactcgatacgtcagcgaatcggacgattatccaagattattcaatttaagaaggaaattatggcttggcgtgcaatttttgaagtttggaatattgattccagaaggagattctgacattctaagtttggaatatttaagatcctttatgaaaactgacgaatctctaccagaactatttgagagaaattacgcttctactaataatctagacttatcgttgatggctacagcagagaatatctatcatttacatttatctttacaggtattactgacttcttgttttccaataaatggcccttcgtacttgaaggaagtattggataacatcgacaagacaaaagattttttaaatcagaaattccctctcattttaagttctcttggagaaccaaggatgaagagcttacatatcaatgttccctcttccttagcaaatgaagaatcttttgactttagcacttttgaggaaaatgaaacattcatagctaatgtgattagctacacttgtacaatgaacatctatgatagcttatctttgcattttgaaaatcaatgtttcaaaaacgctttggagtacaaaacatattatcaccgctttacttttaccgctatacaagattatttaacgttgctaaaattaatctcggaatactttaatggatctcttctgcatttacgggaaccttttgggtttgccactcagaaagttgttcgcttttcgatacatcgattactcatattccaggccaccttgctcgtgagattattttataagaaggatacatgcgacagatcctctgcagccatgggaatgttgaatgatagaaacggaagacttagtcgagtcattgaaaaaatgatcaagttgatgtcacatcatatgaaattacttgtagaaattgttacctcgaaactggaaaagagctatctcggttcgttcatttctgtctctattttcaggtatatcatttatttggtggatactgacgcgctgtctgcgtttatatccgactactggaagagtgacgccgttatggatgaaagatattcaagaatccataggatagtcggtttaaaatggggtatgggaagggataggtccttttcgtacacatcaaacattaaacaatccacaattcttgggaagtcttga

SEQ ID NO: 82327 - DNA, 1080 bp, Saccharomyces pastorianus
atgcatcacgtactcaattcaacgagacctggccatcggttttggttttacgatgacgtaactcagtacggcagaacaaagtacctcaattattatactcccttagtgcttttaatattcacggtgttgttcataacttataacatatggaaacattattactactatgacgttctacacttgaagcaaaaaaatccaattgatgaacttttatactcatctaccgacgaagacgaacagagtccgttgataaataataacaccatcacaactaattacgtggacaataattgtacaaaagacgcactaaaaaatagacacttttctctggaaaagctgaaatcagttaaggtaaatggagaacctcatggtacacctgaaatagttagaagaggcttcattgaaaaatcaagaattatccttgaattttttttggtactttctcaagttataatacattcttttatactattacactatgtcaataaaaacccagagttcacccaacaaggtacgattactggtttggtagaatggtgtgcattgtttatcattgtctctttacgtttagcaaatgtcaaccaaaatttcaaattcataaacaaatatcccggaaatctatggtcggtatcgttcataaactatttggccttgtttatctctatgattttaccctttcgttccattttcattcaccatataaacagtcctatttcgagaaagtattacatttcacaaatatcgattaaccttgcccttttcttgctactcttttttgcgaggataagaaataattttgccatcatctataaaactgacagctggattactccatctccagaaccagtcacttctattgctggattcatatgctgggcttggttagacagttttgtttggaaagcacacaaagttagtatcaaagttaaggatatttggggattgatgatgcaagattattctttctttgtggtgaaaaaattcagatattttgttgaccataaggttaaaaggaagcgtattttttcactaccttttctttttcttttcgaattgggatcctctagagtcgacctgcag

SEQ ID NO: 82328 - DNA, 2016 bp, Saccharomyces pastorianus
atggctattgacgctttcaaggtttctgaaatttgtggttaccttcattcatttttggaggcttttgttatgactgttgtcgcactggcgctgttataccgtctgctgggttttgctgcaattgtgggtgttttaatcatcgtcgctatgcttccactgaattataagcttgccaagtacatcggcgatttgcaaaagaaaaacttggctgtcacagataatcgtattcaaaagttgaatgaagcttttcaagctatcagaatcatcaaatacttttcatgggaggagaattttgaaaaagatatcaatactatcagagaaaatgaattatctctactgctaatgagatctattgtttggtctatcagttcctttctttggtttgttaccccaactattgtaacagccgcctcatttgcttactacatttacgttcaaggcggggtattaaccactccggttgcctttactgcactttctttattcacgttattaagagatcctttggatcgtttgtctgatatgttaagttttgtcgttcaatcaaaggtctcgttagatagagttcaggatttcttaaatgaaaatgatacaaagaaatacgatcaactgaccatagatccaaatggaaacagatttgcctttgagaattccaccatctcttgggataaggacaatcaagatttcaaattgaaagacttgaacattgaattcaaaactggtaaactaaatgtcgttattggccccactggttctggtaagacatccctactaatggcattattaggtgaaatgtatctactcaatggtaaggttgtcgtcccagctctagaaccaaggcaggaactaatagtagatgcgaatggaaccactaactctatcgcttattgttctcaggccgcttggcttctaaatgatactgtaaaaaacaacattttattcaatagtccattcaatgaggcaagatataaagctgttgtcgaagcatgcggattgaaacgtgattttgagatcttgaaagccggtgacctaacagaaatcggtgagaagggtattactttatctggtggtcaaaagcagagagtctcccttgctagagccttgtattccaatgctaggcatgtccttttggatgattgtttaagtgcagttgattcacatactgcatcttggatttacgataattgtattactggaccattaatggaagataggacatgtattttggtttcacacaacatcgccttgaccttgagaaatgctgaattggtagtcttactagaagatggtagggttaaagaccaaggtgatccaatagacatgctacagaagggtttgtttggtgaagacgagttagtgaaaagtagtatcttatcgcgtgcaaactcttctgctaacttagccgcaaaaagtagcacaagcttaagtaacctacccgctgtcaaagaacaacaagttagcatgaacaacaactcctcccaatttgaagccaagaaacttcaaaaaccattgagaacagaagctgaacgcactgaagatggtaaattaataaaagaggaaacaaaagaagaaggtgtggttggtctggatgtctataaatggtatttgaaaatttttggtggttggaagattgtttcatttttagcttccttgttcttgatagcccaacttttgtatatcggacaatcatggtgggttcgtgcctgggcatcacacaatgtcattgctaaaattattcccagagcacaacgcgttattgcatttatctccaagaaggctagtcatctaattgattggaggggctcgtcccaaatcagtatggcgtcagctgaaaaccaaccttccagtggacactctacaatgtattatctggttttgtacctaatcattggttttgctcaggctttattgggaactggtaaaactattttaaatttcgttgctggtatcaacgcgtcaagaaagatatttaatatgattctaaacaaggttttacactccaagataagattttga

SEQ ID NO: 82329 - DNA, 99 bp, Saccharomyces pastorianus
atgctaatagaagagatagagttttataacgtcaacggaaaaaaaacaacaacagttgttcctgaaaatacaaaaataaaaaaaaagagtactaaatga

SEQ ID NO: 82330 - DNA, 501 bp, Saccharomyces pastorianus
atgctaaagaaaaagccactcaagaaaccgttgaaaaggtttgcatttatagaatttcaagagggtgtgaatctgaaaaaagtgaaagagaagatgaacggtaaaatttttatgaatgaaaaaattgttattgaaaacatcttaacaaaagaggaaaaaagttttgaaaaaaaccagaaatcaaacaaaaaaactgctcctgatctcaagccactatccacaaatactctctatgtgaaaaacattcccatgaaatcgacaaatgaagaccttgccaaaatctttggtgttgaccctaaaaatataaactttgtaagaagagaattggtggatttgagaacaaacaaagttttcttttccgacgagtttcacaccggcgaagccttcatcaagtttgacaacctggggactggagatagtattcaaaagaaatgtcgagaatttaaaggtcggaaggcaagtaatggtagagtattgttggttaagatagcctctgcctag

SEQ ID NO: 82331 - DNA, 408 bp, Saccharomyces pastorianus
  modified_base (320)..(320): a, c, g, t, unknown, or other
atggtggaaaccaacttagccaaagcagcttcgtcttcggctctgacttcggtcaaagcggcaacagcagaagtcttttggttaaccaaagtacccaatctagccttacccttgataatggcgtatggaacacccatcttcttacacaaagctggtaggaaaacaaccaattcaattgggtcgacgtcgttagcaatcaaaaccaacttggccttcttgttttcaatcaaagagacaacatggttcaaaccgtacttaacagcgtatggctttggagaagcgtcttgcttagacttaccttcagcgatagcggcagcttnccttggtcaatctttccttcttttcagcagcggtttctggtctgtacttgttgaacaacttgaaggtttcagcagcggtgtttctgtc

SEQ ID NO: 82332 - DNA, 135 bp, Saccharomyces pastorianus
  modified_base (81)..(81): a, c, g, t, unknown, or other
atggttcaaaccgtacttaacagcgtatggctttggagaagcgtcttgcttagacttaccttcagcgatagcggcagcttnccttggtcaatctttccttcttttcagcagcggtttctggtctgtacttgttga

SEQ ID NO: 82333 - DNA, 369 bp, Saccharomyces pastorianus
atggttcaaaccgtacttaacagcgtatggctttggagaagcgtcttgcttagacttaccttcagcgatagcggcagcttccttggtcaatctttccttcttttcagcagcggtttctggtctgtacttgttgaacaacttgaaggtttcagcagcggtgtttctgtccaaagtgtattggaattgagcaatggttggaggaaccttcaatctgatggacaagatcttcttttgtctttgcaatctgacgtattctggccatttgacgtatctggacaagtttctctttggttggacagcttgaccaataccgaagttctttggagtagagtgagtcaatgggtttctagtcttgttagacttggttga

SEQ ID NO: 82334 - DNA, 2448 bp, Saccharomyces pastorianus
atggataacttcaaaatttacagtacagttatcacaactgcttttttacaagttccacacttatacacgacaaatagattatggaagcccatagaagcaccttttttagttgaatttcttcaaaaaagaataagctccaaagaaattaaaaacacaaaaacaatctgtcatatagatccctcatgggtcaatctaaatgcttcattcattagagatgacatgatctcaataaaagctaccacagatgatatggacctcgatgctatttgcaggatttctttgcccttacctatgaacacaaatgatctaacagcagaattggaaaaaatgaaacgtatactattggacttgagtgaaaaattcaatttagaactaatcatcaccaaagaaccagcttacttcacaccagaacagacaggcgagagcaaggaattatgtatttacgtgcatgcattaggattccgatctaatttaatggaatgcgaaccccagttattggcatttgtcgatttaataaagaagaatggtatgactttgcctccacaacactacattatcgaacctatggaactgaactcatactctgtgcttcccttatatatgggtgtagatatggaaaacttcaaacatatatccagagcttttaaaaccagcatttacgcaccttccctcattacgctgtctagggattttaaggcaaatccacaaatcttcttctcaggcgctgtccattcactaagtttactggctaggaaaactctacgtgagtccataagcgtgaattcaaagagttttttttatcgtcgattgactaatattaccccaggaaaactactgtttatccaaaaatactaccaacaaaaggtaaaccagttaattttgaaataccaatcgcttattagagttactaacgaatacattgaatttcaatcgatttccacgaacttattagaaatggttattaagaacttcactattcaagtattacatgaaattgtagaagtacagatttcactcaatgaaaactgcgcaatgtccccggaattaataatcgacagctttttcggacacactggaaaccaaattgtagtaataactcccaaagaggattccttcaaccaattaatagtagttggtaaccaatcttccacagatgaggcgtccgatacttccatattgcattacttatctgattttattatcggctcaaatcaagtgattaatccaaacttaagacagatgaaagccattttcgagatgcatcctgattttgaagacttcatatcaggcaagaaaaatggtaaattaacacgtataatggaactatctgcttgcttaattcaactggaaatggaagaggaagatgataacctttatttaaatttggttagtgactctttccctgatttcaaggaatcatttaagaatgttataaatgaatttcctgccgaagaatctttcttcattcctgaagtttgtcacagaccgattataggtacaggtggttccttaattcaagccacaatgagaaagcataacgtcttcattcagttttccaatagtttcaatcttccacaaaataaaatttctatgatcaggtatgataatgtgataattaggtgccccaggaaaaacaaagctaatatatgcctagccaagaaggatttaaaacaaattgttcaagaatatgatagtttacaatcgaagacgctcattagattttctagtgggcaatatagacatattttgcatgttaacggccaaaagaatattataggacaaatcgaaaagaacgaaaatgtttacataatgataccgttaaaagagcccttggatggaacatctcaattgagtatacaaggaaatgatgagaatacatcaagagccgctaacgaattggtcaatagtgcgtttggttatgaatacgagttcaaaatagatcaagagatagatcccaataaagaatacgaattttgtaacctaattgttgttccatttttgcaaattatgaacataattgtaacttttgagaaggaccttatcacttttacttttgaaaaggatactaatgagaatactctaacaaaagcaatcgaattactatccgattatttggaaacacaaaagacgaaaataatatttaaaaaaataattaaaaaatttgttctagggtctgcctccagcaagagtaacaccagtaatagcaataccaatggcaatttcagatcgatgaataatgccaaaagtcgtacgaccatcgataataccagccaatcaggagcctcaccacaacgccacaaaatgcctgttataacgacggtaggaggagcccaagccatcaaaggatatataccaaacacttattacaacggatatgggtatggatacggatatacatacgagtacgattataattatgccaactctaataagagctcaaaccaataa

SEQ ID NO: 82335 - DNA, 753 bp, Saccharomyces pastorianus
atgataaacacaggaagaagcaggaattcagtactgctggcacacagattcctttcaactggaggattttggcgaggcggtacgaatggcacaatgtctcgcacaatcaacaacgtaaatcctttcaaattaaaattcataccgaagacagtgcccgcagctgcagactctgtctctccagatagtcaacgtccaggtaagaagcccttcaaattcatagtttccaatcagagcaagagtagcaaggcttctaaaagcccgaagtggtcgagctacgcattcccctcgcgtgagaccatcaaatctcatgaggaggccatcaagaagcagaataaagctatagacgagcaaatagctgctgcagtatccaagaatgaccgctcttgcacagaacctcccaagaaaagaaagaggaaattgagaccaagaaaggcgctgatcaccctgagtccgaaggcaatcaagcatttaagggcactgctagctcagccggaacctaaattgattagagttagcgctagaaaccgtggatgttcaggactaacgtacgatctacaatatatcaccgagccggggaaattcgatgaggtagtagaacaagatggcgttaaaattgtcatcgattcaaaggcgttattcagcatcattggtagtgaaatggactgggtcgacgacaagttggcctctaagtttgtcttcaagaatccaaactccaaggcacatgcggttgtggcgagagtttcatggttttaa

SEQ ID NO: 82336 - DNA, 210 bp, Saccharomyces pastorianus
atggtcaaattaacttcaattgctgctggtgtcgccgctattgccgctggtgtcgccgctgcaccagctaccaccactttatctccatctgacgaaagagttaacctggttgaattaggtgtctacgtctctgatatcagagctcatttggctgaatactatatgttccaagccggtcatcaaatgaaacttacccagttgaaattgtga

SEQ ID NO: 82337 - DNA, 588 bp, Saccharomyces pastorianus
atgtctaaagctgtcggtattgatttaggtactacctactcctgtgttgctcacttttctaatgatcgtgttgacattattgccaacgaccaaggtaacagaaccactccatctttcgttggtttcactgatactgaaagattgattggtgacgctgctaagaaccaagctgctatgaacccagctaacactgttttcgacgctaagcgtttgatcggtagaaacttcaatgacccagaggtccaaggtgatatgaagcacttcccattcaagttgatcgatgttgacggtaagccacaaattcaagttgaattcaagggtgaaaccaagaactttaccccagaacaaatctcctctatggtcttgggtaagatgaaagaaactgccgaatcttacttgggtgccaaggtcaatgacgctgtcgtcactgtcccagcttacttcaacgattctcaaagacaagctaccaaggatgctggtaccattgctggtttgaatgtcttgcgtattattaacgaacctaccgccgctgccattgcttacggtttggacaagaagggtaaggaagaacacgtcttgattttcgac

SEQ ID NO: 82338 - DNA, 711 bp, Saccharomyces pastorianus
atgagtcgcactgcgtcatatgccggcatgacaactccggtgaaagataaggaaggccacgggattccatgcttacaacctatcgatgtagtggaatgtacctatcaatattttacaaaatcgcagaataaactgtctttaagggtaggcgatttgatttacgtactcactaaaggttctaatggctggtgggatggtgttcttatcagacacagcgctaataataataataattcgttgatactagacagaggttggttccccccttcttttacacggtccattctaaacgaactacacggggtgcctgaaatcggtaatgaattggaaatatttcaagcgggtcttaatcttaaactggaattatcaagcaacccagtgatcttatcattggaagactttttagactgctgtcgcgatattgaattcaaggaacaactggcttggtcacctattcccgtccacgagaggaaaggctgctgtaagctgctgtactacaaccaggatttagatgtttattgtcgcacgttaccatatttaccacaaaatcaagttgaaaccgtgaacgactattcgtcttttcctgcaatatcgaagatagctggtaaaaagatgcctataacgtcaagccccgatctgttctatctcaatgattgtgatgtcgtctattggtatgacctcactcgcttagtgtgtctttatgttaattaa

SEQ ID NO: 82339 - DNA, 1722 bp, Saccharomyces pastorianus
atgttgaattttgaaatgaacttcaaaacctacgaagaagtaagcggaacaattcctataattgatattctggaaaacctagatttaactatttatctaaacttgagagagttgggagatgagaatagagtttttgacgaagatgtcgctattgatgatgaagataaagagtttttgaaacattctttatcatccctatcgtatatcttatccgactattttaatatgaagcaatattttcatgatgtagtagtgaaatttataattgtcgcccagcatttgacattagaggatcctttcgttttctcgccaatgcaaaacgacttgcctaccggttattacgaaccaatgaaaccttcatccttgaatttagataatgccaaggataagaagaatgggagccaaaatactgatatccaagaggaggaagatgaatatgagccagacccggatagtcttattctcttccacaaccttatcaatcaagattctgatttcaatgatctaaagttttttaatctcacccacgtttgtaaaaaatcctgtgatgactattttgatgtgcttaaactatccattgagttcgtgaatcaattaattctagaaagagagaatttgttaaattatgctgctagaatgatgaaaaacaatatcacggaattgctattgcgcggggaagaaggctatgggtcctatgacggcggtgaaactgccgaaaaaagtgacacgaatgctgtttatgcagattcagatactaaagacaatgacgaatggcgtgacagccaagtcaagttaccgaggtatttgcagcgcgagtatgatagtgaactgatttggagctctaacaataggattaaaggtggttctaaacacgcactgatctcttacttgacagataatgaaaagaaggacttatttttcaatattacttttttaatcactttcagaagcatctttactacaacggagtttttaagctacttgatctcgcaatataatttggatccaccagaggatttgtgctttgaagaatataatgaatgggtgacgaaaaagcttataccggttaaatgtagggtggttgagattatgacaacctttttcaagcaatattggttcccgggctatgatgagcccgatcttgcgaccctaaatctggattattttgcgcaagtagcaatcaaggaaaatataacaggatctgtggaattactaaaggaggtcaatcagaagtttaaacatggtaatatgcaagaagcgactgcaccaatgaaaacgttagatcaacagatctgccaggagcattactggggcactttatactctaccacggaatccattttggccgtcgatccagttttatttgccacccaattaacgatactagagcatgaaatttattgtgagataaccatttttgattgtttacaaaaaatttggaagaacaagtatacaaaatcgtatggggcttcaccgggtttgaacgagtttatcagttttgccaataaactgacaaatttcatatcctactctattgtaaaggaggctgataaaagtaagcgcgccaagctactctctcattttatttttatcgcagaatattgtaggaaattcaataacttttcttccatgactgcaattatttcagcattatattcttcaccaatttatcgttcagagaaaacctggcaggcagttattcctcaaacgagagatctatag

SEQ ID NO: 82340 - DNA, 855 bp, Saccharomyces pastorianus
atgcctataacgtcaagccccgatctgttctatctcaatgattgtgatgtcgtctattggtatgacctcactcgcttagtgtgtcattatgttaatttaacagagcgcgacctattggcaaatgaacgggaaaagtttctaacttccttggatttattaacagctcaaataacctatgtttatatgcttttcaggaatctccgtttagttgaagatagttttaaaaaaaccctcaaaaaactaatttacaccttgtctaggttttcaataaatgcaaatatttggtttcattccacatcgtttgaagaaagagaagccatagcctcccagaaggatccagaaagaagatcccctcttctacagtcaatcctaggaaccttccaaaaatttcattttctactgcgtctactacatttcctctcaaatcctaacgaacttacaatactgcctcaattgactcctcgatttttcaaggattctttcaatacaatttcatggaataacccgtttttgcgtaagcgtctcaaccagcatatgtcccatgacctaccgagacagatgattaaagccgttgctggtgcttcaggaattgttgcggaaaatattgatgaaattccagcttccaaacagggcacttcatgctcgtcagaaacgtctcaccattcaccatcagccccgtttcaaagaaggagaagaggtaccattttctctaatgtgtcaggaagttccgatgagtctgacaccatatggtccaaaaggaaaaaaccatacccgctaaatgaagaaactctaagccttgtaagggccaggaagaagcagcttgatggtaaactaaaacaaatgatcaagtgctaa

SEQ ID NO: 82341 - DNA, 882 bp, Saccharomyces pastorianus
atggaaatgaacatggatatggatatggatatggaactcgcatccatagtttcttctttaagcgccctgtccaatagtaacaacaacggcggtcaggccgccgcggccggcattgtgaacggcggtgctgctggatcacagcaaattggcggcttcagaaggtcgagtttcaccacggcaaatgaagtagattcagagatcttgctgcttcacggttccagtgaatcttcaccgatcttcaagaaaaccgccctatcagttggtactgctccgccattctccacgaactcgaagaagttttttggtaacggcggcaattattaccagtacagatcaaccgacactgcctccctgtcatccgcatcgtacaataactatcatactcatcatactgcggctaatctcgggaaaaacaacaaggtcaaccatcttctgggccagtattcagcttccattgctggtcccgtttactacaatggcaatcacaacaacaactgtggtggggaagggttttttgagaagttcggaaaatctttgattgacggtacaagggaactggaatctcaagatagacccgacgctgtcaatactcagtcccaattcatatcaaaaagcgtctctaacgccagcttagacacacagaataccttcgagcaaaatgtcgagtctgacaaaaacttcaacaaattgaataggaacaccactaacagtggttcgctttaccgctccagttcaaattcaggctcatctgcgtctttagagtccgaaaatgctcattaccccaagagaaatatctggaacgtagccaacacaccagtatttagacctagtaacaatccagccgctgttggggccacaatgtcgcgcttcctaccaacaaga

SEQ ID NO: 82342 - DNA, 1215 bp, Saccharomyces pastorianus
atgaagatcaagaccattaaaagaagtgctgatgactatgtccctgttaaaagtacgcaggaatctcaaatgcccaggaatttgaaccctgaattgcatccttttgaaagggcacgtgaatatactaaagctttgaatgccaccaaattggaaagaatgtttgctaaaccctttgtgggtcagttaggatacggtcatagagatggtgtttatgctattgccaaaaattatggtagtctgaataaattggctactggttctgcagatggtgtgattaaatactggaacatgtctactagagaagaatttgtttcctttaaggcgcattatggactcgttactggtctttgtgtgacacagcctcgttttcatgacaagaagccagatttgaagagccaaaattttatgttatcttgcagtgatgacaaaactgtcaagctatggtcaataaatgttgatgattactccaataaaaactccagtgataacgactccgttactaacgaggaaggtttgattcgtacttttgacggtgaatctgcatttcaaggtatcgattcgcacagagaaaactccacgtttgccacaggtggggccaagatccatctttgggacgttaacagattgaagccagtttccgatctatcatggggagcagacaacattactagtttaaaattcaatcaaaatgaaacagatatcttggccagtactggtagtgataattctattgttctttacgacttgagaaccaactcccccacacaaaagattgttcaaacaatgaggacgaatgctatttgctggaatccaatggaggccttcaactttgtaactgccaatgaagatcataacgcctactattatgatatgaggaatttatcacgttcattgaatgtattcaaagatcacgtcagcgcagtaatggatgttgacttttctcctacgggggatgagattgttactggttcgtacgataagagtatcagaatatataagacgaatcacggacattcgagagaaatttatcatacgaagagaatgcagcatgttttccaggttaaatattccatggattctaaatatattatcagtggatctgatgatgggaatgttaggctatggagaagtaaagcttgggagaggtctaatgtcaaaactactcgtgaaaagaataaattagaatatgacgaaaaaattaaaagaaagatttag

SEQ ID NO: 82343 - DNA, 243 bp, Saccharomyces pastorianus
atgacgaaaaaattaaaagaaagatttagacatatgccggagatcaaaagaatcagtagacatagacacgtgccacaagtcatcaaaaaggctcaggaaattaagaacattgagttgagttctattaagagaagagaagctaatgaaaggcgtactagaaaggatatgccatacatttccgaaaggaagaaacaaatcgttggtaccgtgcacaaatatgaagattcaggaagagggaccgag

SEQ ID NO: 82344 - DNA, 1026 bp, Saccharomyces pastorianus
atgggtttcatatcgtcaatactgtgctgctcttccgagacgacacaatccaattccaattctgcttatcgccaacaacagagcagttctctcaataaaaacagaagcgttaaacattccaacacgaaaagccgaacccgtggcgtacatcagacaaactctcctccttctaagacaaattcagccgctactttcagttccactgaaccatccaccggtaaatctgggataagcacgaacgataatgaaaaaaagaagccatcgtcgccgactgcagccgtcaccgccactactactaataatatgacaaaagtagagaagcgaattagtaaagatgatctttacgaggaaaaatacgaggttgacgaagatgaagagatcgacgatgaagataaccgtcgcagccgtggcattgtacaggaaaaaggagatgctgtgaaagatacttccaggcagaaaaaacaacagcagcaacaacaacaacagtcacagtcacagtcacagtcacagtcacagtcacagtcgcagtcgcagcagcgagggcctactgtacaagtatcgtctgaccatcttatccaagatatgaatttgagtagggtaagtagcagctctcaagccagtgaaacttccaacgatgccgacgacgaagacgatgaagatgaagaatatattgatctaacgcttttgcagcagggccagtatcatgcgccaggttacaacactctgctccccccacaagatgaaagtacaaagggcaagaaatgcctaatactggaccaggatgaaaccttggtacactcttctttcaaatacttacgatctgcggattttgttttgcctgtggaaatagatgaccaagtacacaatgtctatgtcattaaaagacctggtgtggaagaatttttggaaagagtcggaaaattattcgaggttgtagtcttcacggctagtgtctctcgatacggtgatcctttgcttgatatattagacacagataaagtcattcatcacagattattcagaggg

SEQ ID NO: 82345 - DNA, 1449 bp, Saccharomyces pastorianus
atgaacatggcaatccaaacaattaaatacattttttggctactgccgatattagggcttacacaagcacttctacaaaacccaggggacgattttccatttagcacagtaatagatatcctctcagaaaatgttgaattctcaacttttttaaggattattcagaaaactggtcacgtacagtacttaaatgagctgcagaactttacactttttgctccgattaattcagcatttattaagggggaccaaaccacagaccaatttgaggagcatttccatattgaagatttccttattcatgatagggtattgcaagtgagagaccttgaaaacggtacctacctggagaaaagagctgcaaaagcacctttattgctgagaaagcatgagcgccattgctttgtcaatgaaattgctgttgtcgaacccgatttgctgcctagtttccagaatgcttcattacaaggtattaacaatcttttactaattcaacctcaaataaatgagttgctggtacaactagacgaagaaacccaagatttaaagatatttagtgattttatcagcagtttttcaaactataatgcatatacaaactcatccacagttttagtgcccttagatgttaattttcgaaaattcttcaatacaatcgaaataaactatctacttgacaaatataataaattgggtaaatctaatacaatttctcaggccaaatgggccgcagatagaacttcccttcttcaagaactcattattgatgacgtgtatggtggtattttacccaaggaactaattttagaaaataaaaacagtcgaaaactttttatgaagagtaattcagaaggtacatcagtaagtgtaaataattcagattactcacccatatcaaacagaatttttgaaataggcgtcgtgcatggattttctgacttagactttttacgaacgcatatacagtttgatgctgaaaagtacttgcacggtttgaactgctcagaattcgtaaaggagttatacttcagagaccttgaaaaattcattcaaaacggaaggaaaatcaccatatttgtaccacaagcctcttttaatgaggatcgtgggtacacaaaaccatcacttctgtaccattttgtagaaggtaaaattgaccttgaacaggaattttcctcattgcgcccgattcaatacgcacctacccaaatttatgactccgccttttgctcttcagctaaaagactaggtggacactgccaaaagttcaaaatcacaaggtctaataaaggttattacatcaatggtcgcttcaagattttaaacacaaaaccttatgagattggtaatacgtccatttattctatggacgatgatcttcaattaccgggcgacttagtgttgtcgttagcaccagaaaaccactgttctatttccctaatgctctga

SEQ ID NO: 82346 - DNA, 543 bp, Saccharomyces pastorianus
atgtttcacagacgcaaaagaccttataacaccagaaattatggccatgatgacaagaaattcaaatcgcagtacatcgatattatgccagacttcagcccttccggtctgttagagctggagtcgaataacaaagaaggtatagctttaaaacatgtggagccgcaggacgctatttctccagataactacatggatatgctaggactggaggcgcgagataggactatgtatgaactagtgatatacagaaagaatgacaaggataaaggaccgtggaaaagatacgatttgaacggcaggagctgttatttagtcggtcgtgaactggtccacagtctggatacagatctcgacgatagaacggagatcgttgtcgcagacattggtatacccgaagaaacatcctcaaagcagcactgcgtcatccagttcaggaacgttcgtggcattttgaaatgttatgtaatggatttggattcgtccaatgggacatgtttgaacacgttgtattcctggagcgagatatatagagctacgtag

SEQ ID NO: 82347 - DNA, 606 bp, Saccharomyces pastorianus
atggaagattctgacctgtctataaccaatataagagattttcttaccgagctccccaaactcgcgaaatgcgaatatagcgaaaccactagttatttactatggaaaaccttaaatctacgccttaagcatagtgataacgatataaactggcgctctctcgtttcaatactcaattctgaagcctgggaaaacgaaaagtacagagacatactaaatggaagaaagtggaggaccctggagttcgagaatgaccaccactctgtgggtaatatgcatattggaacagcgtgtacgcgtttatgcttcccctctgagacaatttattactgttttacgtgctccacaaatccattgtatgaaatatgtgagctttgtttcgataaagaaaaacatgtaaatcattcttatgttgctaaagtggtaatgcgcccagaaggcagaatatgccattgtggtgacccctttgcctttaatgacccaagcgacgcgttcaagtgcaagaacgaattaaataatattcctatttctaacgacaatagtaacgtaaccgatgatgaaaacgtaatctccctattgaattatgttctggattttttaaattga

SEQ ID NO: 82348 - DNA, 183 bp, Saccharomyces pastorianus
atgcatcctaatcaaaacagcattactgatgatataatggaaaaacacgaatgtgaaccattggtcaatgatggaaatttgttttctttgataacaattggtccaatacgagaaaagaagcacatatggagtgggctattcaaatcgaagaagaagagtgtaacgtacactacatggatttag

SEQ ID NO: 82349 - DNA, 1947 bp, Saccharomyces pastorianus
atggagtgggctattcaaatcgaagaagaagagtgtaacgtacactacatggatttagcatctacaataacaagaattttgaatacaccggttgaatatgcaatctcaataacaaaggctttagaagattcacacgatgtagtgactgtgctacaaagtgagaattttttcgaaatagatcaaatagccaaggagtttcaagaggaaaacatagtagttcatgtaagaaaagcggatgatatattcaagagaaagttaacagatgatttaacagattggttatattctctgtgctttaaggcggccacgtctttgcaaaataaatatgctcttagaatttccatgctagatgtttggtattcccatttttctaaaatgagagtatctcccacaaataccaatcctgacttttctaagattaacttattaggtggattcttaatatctaacgaagatagtgatgaatcatggtttaaaccttggtcattagagaactttgaagacgaaagagtttcaaaaatactcactaattacaatgaaaggttgatcagagcccattcgccgaacacagtaagccatttctacaatttctatggatctagattccaatatattatcatcaattctattaatatcctctcaaaaaaatctaaattcaaaatgttaaagatcatggcgtcattattctcgttaagggatgaaagcagaaagtttcttgccgcacaatatattgatgtttatctatcggtcttgtatgatgcagttgcatcagatgctaaagaatgtcaggtaactcttatgagtatattagggcaatacactttccaagaccccagcatagcaaatatgactataagctcgggattcattgaacgaactattagatttgcttttactctcatggcattcaatccagaagacttgatgtcatatttgcccatctctttatacaatggctttaagttgcccaccgaaacaatacgaaatcgaaggacaattatttgctttaaagacctttgtacgataatgtcagcgaacactgttccggaagaactactttcaaatgaggcaatttttaacgcaataattgagtccttctctgaattcagtaacgtgctgccattgaaaagggaaactaaagaacacgtggaggttgaaaactttgatttttctgcattttatttttttttctcatcaatactaataatgacagatggatacacacgtagtatatctttggtcaaagatgcggctttccgtaagcaaatcgtccttaaactacttgatgttgctcaaaccagggaatttgaatcactaaccaattctagaaaagctatatcacctgataacgcatcaacgaatgaaaatgattcgaacaaagcgactttgtctacagtcagagagacgatatgcaattatgtcgcagagactattaatttccaggtaggtgtaaatacacagtattttttcaatccaatgtcatatttgttcaaatttgttattcaatggagtcaatgtggtagatatgagccaatgcctgcttctttgacaaactacattaatctcttcgaagtttttcaagataagcagaaggctttatatatatcagaatctgctttgtcaaccctagtcctaatcgggcaaataaacgtcggtttctgggtaagaaacggaactccaattactcaccaggcccggatgtatacaaaatacagtatgcgagaatttacttatattagtgacattttcaatgtgcaatttagtatggcaatgtgcaatcctgatgaactgatggttacttacctctcaaggtggggtttgaagcactgggcaaatggtgtacctatgtatgattatcctgatacagaaacaactgtagccgttgttaatgaatgcattctgtcatcgattcaattgcttactgaagtgagatcattggtcatgaaa

SEQ ID NO: 82350 - DNA, 1251 bp, Saccharomyces pastorianus
atgaacaaaagaacacaggaatacaagaacacaagagcgataatgtctgccactctgttcaataacatcgaattgctgccccctgatgccctttttggtattaagcaaaggtacgggcaagatcaacgtgctaccaaggtcgacttgggtatcggggcctacagagacgacaacggtaaaccatgggtcttgccaagtgttaaagccgccgaaaagctaattcataacgacagctcctacaaccatgaatacctcggtattaccggtctgccaagtttgacatctaacgccgccaagatcatcttcggtacgcaatccgatgccttgcaggaagacagagtaatctcagtacaatcactgtctggtacgggtgctcttcatatatttgcgaagtttttttcaaaattcttcccagataaactggtctatttgtctaagcctacttgggccaaccacatggccatttttgagaatcaaggcttgaaaacggcgacttacccttactgggccaacgaaactaagtctttggacctaaacggctttctaaatgctattcaaaaagctccagagggctccattttcgttctgcactcttgcgcccataacccaactggtctggaccctactagtgaacaatgggttcaaatcgttgatgctatcgcctcaaaaaaccacatcgccttatttgacaccgcctaccaagggtttgccactggagatttggacaaggatgcctatgctgtgcgtctaggtgtggagaagctttcgacggtctctcccgtctttgtctgtcagtcctttgccaagaacgccggtatgtacggtgagcgtgtaggttgtttccatctagcacttacaaaacaagctcaaaacaaaactataaagcctgctgttacatctcaattggccaaaatcattcgtagtgaagtgtccaacccaccggcctacggcgctaagattgtcgctaaactgttggaaacgccagaattaacggaacagtggcacaaggatatggttaccatgtcctccagaattacgaaaatgaggcacgcattaagagaccatttagtcaagttgggcactcctggcaactgggatcatatagtaaatcaatgcgggatgttctcctttacaggattgactcctcaaatggttaaacgacttgaagaaacccacgcagtttacttggttgcctcaggtagagcttctattgctggattgaatcaaggaaacgtggaatacgtggcttaa

SEQ ID NO: 82351 - DNA, 207 bp, Saccharomyces pastorianus
atggtcaaactaacttcaattgttgctggtgtcgctgctattgctgctggtgtcgctgctgccccagccaccactactttatctccctctgacgaaagagttaacctggtcgaattaggtgtctacgtctcagatatcagagctcatttggctgaatactatatgttccaagctgctcatccaactgaaacttacccagttgaaatt

SEQ ID NO: 82352 - DNA, 1551 bp, Saccharomyces pastorianus
atggtgatggcacatttttgcattaacctagctgtcctcgttgaacataggaaaaaaaatatatataaacaaggctctttcactctccttgcaatcagatttgggtttgttccctttattttcatatttcttgtcatattcctttctcaattattattttctactcataacctcacgcaaaataacacagtcaaatcaatcaaaatgtctgaaattactttgggtaaatatttgttcgaaagattaaagcaagtcaacgttaacaccgttttcggtttgccaggtgacttcaacttgtccttgttggacaagatctacgaagttgaaggtatgagatgggctggtaacgccaacgaattgaacgctgcttacgccgctgatggttacgctcgtatcaagggtatgtcttgtatcatcaccaccttcggtgtcggtgaattgtctgctttgaacggtattgccggttcttacgctgaacacgtcggtgttttgcacgttgttggtgtcccatccatctctgctcaagctaagcaattgttgttgcaccacaccttgggtaacggtgacttcactgttttccacagaatgtctgccaacatttctgaaaccactgctatgatcactgacattgctaccgccccagctgaaattgacagatgtatcagaaccacttacgtcacccaaagaccagtctacttaggtttgccagctaacttggtcgacttgaacgtcccagctaagttgttgcaaactccaattgacatgtctttgaagccaaacgatgctgaatccgaaaaggaagtcattgacaccatcttggctttggtcaaggatgctaagaacccagttatcttggctgatgcttgttgttccagacacgacgtcaaggctgaaactaagaagttgattgacttgactcaattcccagctttcgtcaccccaatgggtaagggttccattgacgaacaacacccaagatacggtggtgtttacgtcggtaccttgtccaagccagaagttaaggaagccgttgaatctgctgacttgattttgtctgtcggtgctttgttgtctgatttcaacaccggttctttctcttactcttacaagaccaagaacattgtcgaattccactccgaccacatgaagatcagaaacgccactttcccaggtgtccaaatgaaattcgttttgcaaaagttgttgaccactattgctgacgccgctaagggttacaagccagttgctgtcccagctagaactccagctaacgctgctgtcccagcttctaccccattgaagcaagaatggatgtggaaccaattgggtaacttcttgcaagaaggtgatgttgtcattgctgaaaccggtacctccgctttcggtatcaaccaaaccactttcccaaacaacacctacggtatctctcaagtcttatggggttccattggtttcaccactggtgctaccttgggtgctgctttcgctgctgaagaaattgatccaaagaagagagttatcttattcattggtgacggttctttgcattga

SEQ ID NO: 82353 - DNA, 606 bp, Saccharomyces pastorianus
atgtcaggagaagaagaagtagattatacaacgttacccctagaagagcgattaacgtacaagttatggaaggcacgtttagaagcttataaggagttaaaccagctttttagaaactccgttggcgacatcagtagggatgacaacatacaaatttactggagggatcctacattatttgcacaatatataactgattctaatgtggtcgctcaagaacaagccattgttgccttgaatagtttaatagatgcctttgcgtcatcgtctttgaaaaatgcacataatattactttaatatcaacatggacaccattgcttgtggaaaagggcttaacgtcctcaagggctacaacgaagacgcagtcgatgagctgtatactctcactatgtggtcttgatacatctattacgcaatcggtggaattggtaataccctttttcgagaaaaaactgccaaaattaattgctgcggcagtcaattgtgtttatgggttgatggctgcattcgggctcactaatgtgaacgttcaaacgtttctaccagaattattaaagactctagagatccccggtaccgagctcgaattcgtaatcatgtcatag

SEQ ID NO: 82354 - DNA, 114 bp, Saccharomyces pastorianus
atgtcactacattcacaggctgtagacatcgcgtcacagtcacaaagcttgccaaaggatgcttgtagattaaaggacttcaaagccaaggtcgacgaaggctctgatgtttag

SEQ ID NO: 82355 - DNA, 654 bp, Saccharomyces pastorianus
atgccttacactctatccgacgctcatcataagttgatcacctctcatttggtggacaccgaccctgaagtggactccattatcaaggatgaaattgaaagacaaaagcactccatcgatttgattgcttctgaaaatttcacctcaacctccgttttcgatgcccttggaactccattgtccaacaaatattctgaaggttatccaggtgctcgttactacggtggtaatgaacacattgacagaatggaaattctatgtcaacaaagagctttgaaagctttccatgttactccagacaaatggggtgttaacgtccaaactttatctggttctcctgctaacttgcaagtttatcaagctattatgaagcctcatgaaagattgatgggtctatacctaccagatggtggtcatttgtctcacggttacgctactgaaaacagaaaaatttctgctgtttccacatacttcgaatctttcccatacagagttaacccagaaaccggtattatcgactacgatactttagaaaagaacgccatcctatatagaccaaaggttcttgttgctggtacttcagcatactgtcgtttaattgactacaagagaatgagagaaatcgccaacagaatctggtgcttacgtgagtag

SEQ ID NO: 82356 - DNA, 891 bp, Saccharomyces pastorianus
  modified_base (792)..(827): a, c, g, t, unknown, or other
atgaagtggttgttgtttccggcaagaatcgtagctcgcactcgcccaaacttcttctcgctgtacagaagatccgtttcacagtacttacgtcctcgaaccatccaaaacctgcaatcaatggcgcaaacacccgaacttaaaaccaagctgttcaaacccttggtctggatcgactgcgagatgaccggtttagaccacgtgaatgacagaattatcgagatttgctgcatcatcaccgatggacacctggcacccgtcaaagcggccgatggccaaggagactcgcattatgagagcgtcatccattatggtcccgaggtgatgaacaaaatgaacgagtggtgtatcgagcaccacggtaatagcggtctcaccgccaaagttttggcaagtgagaagactttggcccaggtagaagatgagctgctcgagtacatccagcgctacatcccagacaagaacgttggcgtcttggcaggcaatagtgtacatatggaccgcttgttcatggtccgcgagtttcccaaggtcattgatcatctcttttacagaatagttgacgtcagtagcatcatggaagttgcccgcagacacaatcccgctttacaagcacgtaatccaaaaaaagaagctgcccacactgcttatagtgatatcaaagagagcatagctcaattgcaatggtacatggacaactacttgaagccaccacaggaaacagagtcggtcgagtcaatcggatctgaacagccggagtcaccatcttcatctacctcatctttgaaaagnnnnnnnnnnnnnnnnnnnnnnnnnnnnnnnnnnnnagaaaaaagaagtgaaatttttcaaatatttcacacacgaaacatgactcctggtgagaaatga

SEQ ID NO: 82357 - DNA, 81 bp, Saccharomyces pastorianus
atgaaaaggtgtgctcctgccgtattaagaaattataattataagaagggtatatggagtacggcgtacctgatcatataa

SEQ ID NO: 82358 - DNA, 669 bp, Saccharomyces pastorianus
atggagtacggcgtacctgatcatataaggaagctgcttcgagataaatcgacgtcaccattatgctcacaggatgagagaaacctggtctcatattttatggcgcgcggaaatgttcctctaaagtcggttggcagtggattaacaaagaaagcaacaacatcaataacaagtaattcagctaccacaacatttgaacgacagtaccttataaagtatctttatcggcaccaggcctatgggaacgttataaaaattgcacagaagtttctttataccactattggttcacaaagattgttaaaacaggatgcctcattacctgaattgaaaaagttccttctctctttattgattttacaaagaggtattcaattagatcaggcaatctctgatatcatacaacggtttctattaacacaaaagacaatggtgatagacctcattaactcgattttctctaggatggttataatgaatatgcatgaagaagctgtatataaatgggtcaaatggatgaaactagtgaatggacattgtgaatttacgaattatatggagaacaagatagttttgagaaactttttatcattcatgaggcaatcaaatgttcgccccgattatttatcttatttgaaagcaattcagctaacgcagggcccgcaatag

SEQ ID NO: 82359 - DNA, 549 bp, Saccharomyces pastorianus
atgtatactatggccagaattggtgaattggatagtgtcaataaactatatacacagttattgaggagaggtatgataccgacatacgccgttttacaatctttactatatgcacattataaagtcggagatttcgcagcctgttttagccacttcgaactattcaagaaatacgacataacgccttcaacagcaacgcataccataatgcttaaagtgtatcgtggtttaaatgaccttgatggtgcgtttaggatattaaaaagactaagcgaggatcctagcgtggaaatcacggaggggcactttgctttattgatacaaatgtgttgcaaaactacgaaccatttaatcgctcaagaattattcaaccttatgactgaacattataatatccaacacactggaaaaagtatctctgcattgatggatgtatatattgagagtaacaggccaacagaggcaatagcattatttgaaaaacattcaaagaatttatcttggagagatggtctaatttcagtgtataaccaagccatcaaagcttat

SEQ ID NO: 82360 - DNA, 624 bp, Saccharomyces pastorianus
atggcatggccaatgagaatgattgtgaaacatgatagcccacagcgggctttagagttatacaaccggtacaatgagcttttcttcaaaaagcatgattggatatcaaataataataaatttgtgatgatgagatcattgttggtattactagctcaaattgaacaatggaaagatttcgaaacacttttcgctaaatacatggatcgtattgaaaacattgaaaacttgccatcatctacaacgccaaatattaaactaagaagcatattcagcggattgttcccttataaagtaagtcagttgattgcaatgaataaaatcgatgagctgccattactgtggaagaaattgcgagaaaaaggttttattttagataatatatcgtggaacagcgctgtagaagcgttatttaaggatccaagaaccctttcgtatggtatgaaaatcgttgatgacacactaattcatgggtataatttgatccataaatttagactattaacgaaactatccgaggataagacgcagtccagtgataaatcttggccaacattaaaaatgaaggaaaaagagcccaatcaatttcagcccagactatacttcaaaagcgatacatataca

SEQ ID NO: 82361 - DNA, 990 bp, Saccharomyces pastorianus
atgactaccacgataggatccccacaaatgctggctaatgaggagagactttctaacgagatgcacgcactgaagaaccggtccgagcagaatgggcaagagcaacagggtcccgttaagaacactcaactgcatagcccttctgcaaccgtcccggaaactacggccacccaaaaagaatctctagaaatggtaccgaaagatacaagtgcagcgactatgacaagtgcgcctccgccagcgttgccgcatgttgagattaatcaagtcagtctggcattagtaataaggaacttgacggtatttacaatgaaggaacttgctcagtacatgaaaactaatgttcacacccaggcaaatgagcctaactccgcaaagaaaatacgtttcttacagctgattatattcctaaggacacaatttttgaaactttacgtgcttgtgaaatggacccgtactataaaacaaaacaactttcacgtactaatcgatctgttgaactggtttagaacgactaacatgaatgtcaacaattgtatttgggctttgaaaagcagtctaaactctatgaccaatgctaaattgcccaacgtggatttggtcaccgctttggaagttttgagtcttgggaggccaaatctacctacacacaactttaaattaagcggtgtcagtaactctatggatatggtagatggaatggccaaagttcccattggattgattttacagagattaaaagatttgaacttgactgtctcaataaaaattgcattaatgaacattcctaaaccattaaacagctatcatatcaaaaacggtagaatctactttactgtccctaatgaatttgaaatccagttatcgactgttaatagacagtcccctctgttttttgtggatttaaaattgttgtttaacacggaagctgacaaactgtttcagcagttacaggacctgcaggcatgcaagcttgcactgccgtcgttt

SEQ ID NO: 82362 - DNA, 537 bp, Saccharomyces pastorianus
atggctagaagaccagctagatgttacagataccaaaagaacaagccttacccaaagtctagatacaacagagctgttccagactccaagatcagaatctacgatttgggtaagaagaaggctaccgtcgatgaattcccattgtgtgtccatttggtttccaacgaattggaacaattgtcttctgaagctttggaagctgctcgtatctgtgccaacaagtacatgactactgtctccggtagagatgctttccacttaagagtcagagtccatcctttccatgtcttgagaatcaacaagatgttgtcttgtgccggtgcggatagattgcaacaaggtatgagaggtgcttggggtaagccacacggtttggccgctcgtgtcgacattggtcaaattatcttctctgtcagaaccaaggacagcaacaaggatgttgtcgttgaaggtttgagaagagccagatacaagttcccaggtcaacaacagattattttgtctaagaagtggggtttcaccaacttgcacagacca

SEQ ID NO: 82363 - DNA, 177 bp, Saccharomyces pastorianus
atgtttgaaaagaacttaagcttgagcagcaaagtattctgggaattctctgatgttgttttccaaagaacccttcttggacaagaacttaacgaaagcaccgtcgtccttgacttcaccagcttctctcttcttcaagtattctggtctgtccaagttggtgaaccccacttctag

SEQ ID NO: 82364 - DNA, 1122 bp, Saccharomyces pastorianus
atgagtgaaaagtctctagagaagaaccgaacaaataaattattagaggtagcagctttagcaaaggtaaaaactgtcagagtgactgttaaccagaagaaaaatccagacttgtctgaagatcgtccccctgcactgtcgctagggattgagggtttcgaagtatggtcttctacagaagatagacaagttaactcattaaacttaacgtcatcagatattaccatagacgaatctcaaatggaatggctgtttgagtactgtagtgaccagggaaatcttattcaagaggtttgcacttcttttaattctattcagaacactagaagtaattcaaaaacagaactcatttcaaagctcacagccgcaagcgaatattatcaaattagtcatgatccttacgtcataacaaaacctgcctttattatgagactctccaaagggcatgtacgtgagaatcgtagttggaaaattattacgcgtctgagacatattttaacgtaccttcctgatgattggcaaagcaacatcgacgaagtgctaaaagaaaagaaatatacctctgctaaagatgcaaaaaatatcttcatgtctgtgttttcgacttggagaaattgggagttctcagatgttgcaaggtcgtatatatatggcaaattattcacggcagaaaatgagaaacataaacaaaatttgattaaaaaattgttgaagtgtaccatgggatcattttaccttactgtttatggtgagggatatgaggttgagcataattttgttgttgcggatgccaatctggtaatggatttgacgcctccggtgacaagcttaccttcaaatcgagaagagaccattgaaattacgggaagagtaggctcagtaaaaggaaaattcagtgataggttacttaaattgcaagatcttattccactcattgcagcagtgggcgaagatgacaaaagtgatccaaaaaaggagttatcaaagcaattcaaaatgaacaccgttttattagtggataaaagtgaactgcaactggtcatggaccaaacgaagctgatgagtagaacagttgggggtagagttagtttactatgggaaaatctaaaagattcaactagt

SEQ ID NO: 82365 - DNA, 2868 bp, Saccharomyces pastorianus
atgctgctactttctctgaccaatacgaataacggtatgttaccagaagaaaccaaggttacgggacagttttccatcgaaaacatcctatttctaataaaggagcggtcactacccattggtctttccaaattactcgacttttccataaaaatatcaaccctacaaggaacggttgatacggagcagtcattccaagtggaaagttctcatttcagggtctgcttatctcctgattctctattaagattaatgtggggtgcgcataaattgctagacttgagccattactattcaagacgccatgcccctaatatttggaacactaagatgttcaccggtaaaagtgataagtcaaaagaaatgcccataaatttccgttcaatacacatcctgtcctataaattttgtattgggtggatattccagtatggagcaggctccaatcctgggttaatgttaggttataacagattgttttcagcatatgaaaaggattttgggaaattcacagttgtggacgcttttttctctgttgcgaatggtaatacctcaagcacttttttctctgaaggaaacgagaaagacaaatataatagaagtttcttgccaaacatgcaaatatcctactggttcaaaagatgtggtgagttgaaagattggttttttagatttcatggtgaagcactggatgtaaactttgtcccgtcattcatggatgtcattgagtctactttacaatccatgcgagcatttcaagagctgaaaaagaacattctggatgtgtccgagagtttgcgtgcggaaaatgataattcttatgctagtaccagtgtcgaaagtgcttcgagtagtttggctccctttctcgataacattagatcagttaactcaaacttcaagtatgacggtggtgtatttagggtttacacgtacgaagatattgaaaccaagagtgagccatcttttgaaataaaaagtccagtagtcactataaactgtacatataaacatgatgaagataaagttaagccacataaattcagaacattaatcactgtcgacccaacgcataatactttgtatgcaggatgtgctcctttattaatggaattttctgaaagtctgcaaaagatgataaagaaacatagcaccgacgaaaaaccaaactttacaaaaccttcttcgcagaatgttgattataagcgacttttggatcaatttgatgtggctgtaaaactaacatcagccaagcaacagttaagtttgagctgtgaaccaaaagctaaggttcaggcagatgttggatttgaatcgtttttgttcagtatggctaccaatgagttcgactctgaacagcctttggagttttctttaactctagaacgcacaaaagcgtccattaagcacatattttcaagagaagtaagtacgtcctttgaagttggtttcatggacttgacgcttttatttacacatcctgatgtaatcagtatgtatggaacggggttagtttctgatctaagcgtcttcttcaatgtaaagcagatccagaacctgtatttatttttggacatatggaggttcagtagcattttacacacacggccagtgcaaagaactgttaataaggaaattgaaatgagttcattaacatcaaccaactatgccgatgcaggtacggaaataccctggtgctttacattaatttttacaaatgttagcggagacgttgatttgggtccttctctcggtatgatttcattaaggacacaaagaacatggctggccacagatcattataacgagaagcggcagttactgcatgctttcactgacggtattagcttgacatcagaaggtagactgagtggtttatttgaagttgcgaatgcaagttggttatcagaagtaaaatggccacctgaaaaaagcaaaaatactcatccattagtttccacctccctgaatattgatgatatagcggtaaaggctgcttttgattatcatatgttcttaatcggcactataagtaacatacacttccatcttcataatgaaaaggatgccaagggggttctacctgatttgctgcaggtctctttttcatcagatgaaattatcctcagctctactgcattagttgtagcaaatatactggatatctacaacaccattgtacgtatgaggcaggataataaaatatcgtatatggagacgttgagagattccaatcctggtgaatctaggcaaccaatattatacaaagacattttaagatcgctgaaattactcagaactgatctctcagtgaatatctcctcttcaaaggtccagatttcgccaatatctttattcgatgtggaagtgttagtaataagaattgacaaagtctctatacgttccgaaacacattcggggaaaaaattaaagacagatttgcaactacaagttttagatgtttctgcagcgctttctacttccaaagaagaattagatgaggaagttggagcttccattgctattgatgattacatgcattatgcttccaagatcgtcggtggtactatcattgatattccaaaacttgctgttcatatgacaactttacaagaagaaaagacaaataatttagaatatctatttgcttgctctttttcagacaaaatatctgtaaggtggaatctagggcctgtagacttcataaaggaaatgtggactacacatgtcaaagcactggcagttcgtcgatcccaggtagcaaatatttcctttggacaaactgaggaagaacttgaagaatcaattaaaaaggaagaagccgcttcaaagtttaattatattgcactagtaggaccgcaggattga

SEQ ID NO: 82366 - DNA, 2607 bp, Saccharomyces pastorianus
atggaagctatttcacaattacgtggtgttccattgacacaccaaaaggactttagctgggtctttttagtagattggattctcacggtggtagtatgtttgacaatgatattctacatgggaagaatctatgcataccttgtaagttttatattagaatggctactatggaaacgagcgaaaatcaagataaatgttgagacacttcgtatctccttactaggtggtcgaatacattttaaaaacctttccgtaatacacaaagattatacgatttcggtattagagggtagtttaacatggaaatactggcttttaaattgcagaaaagcagaattgatagagaatgacaagtcttcttctggcaaaaaagcaaagcttccgtgtaaaatttccgtagaatgtgaaggtctagaaatttttatttacaacagaacagtggcgtacgataatgttataaacttactatcaaaagatgaacgcgataaatttgaaaaataccttaatgagcattcttttcctgaaccttttagcgatggaagtagtgctgataaattagatgaagatctaagcgaatctgcatacacaacgaactctgatgcatcaattgttaatgacagggactaccaagaaacagatatcggcaaacatccaaagctactgatgtttttaccaattgagcttaaatttagccgcggttccctactgttaggaaacaaattcacgccatctgttatgattctaagttatgaaagtggaaaaggcataatagatgttttacctccaaaagagcgattagatttatacagaaataaaacacagatggaattcaaaaacttcgaaatttctatcaaacaaaatattggttacgatgatgctattggattgaagtttaaaatagatagagggaaagtgtcaaagttatggaaaacgtttgtacgagtctttcagatagtaaccaagcctgttgtaccgaaaaagactaaaaaaagcgcaggcacatcagatgacaatttctatcataaatggaaaggtttatctctttataaggcttctgcgggcgacgctaaagcaagtgatttagatgatgttgagttcgatttgacgaaccatgaatatgctaaatttacatcaattttaaaatgcccaaaggtcacaattgcatatgacgtggatgttccgggcgttgtgccacatggtgcacatccgacaatacctgatattgatggaccagatgtgggcaataacggagcacctccagattttgctttagatgttcaaattcacggaggatccatctgttacggaccttgggctcaaagacaagtcagtcatctccaaagagttctatcaccggtagtttcaaggacagccaaacctataaaaaaactcccgccaggttctagaagaatatatacacttttcaggatgaatatatcaataatggaagatactacttggcgtataccgacgagggaaagtagcaaagaccccgaatttttgaaacactacaaagaaactaatgaagaatataggccatttggatggatggatctccgattttgtaaggacacctatgcaaatttcaatataagtgtttgtcctacagtgcaaggttttcagaataatttccatgttcatttcctggaaaccgaaattaggtcaagtgttaatcacgatattttgttaaaaagcaaggtattcgatattgatggggatattggatatccattgggttggaatagcaaagctatatggataattaacatgaagtcagaacaattagaggcgtttctgctacgtgagcatataactttagttgcagatacgctttcagacttttccgctggcgatcctacgccttacgaactttttagaccattcgtatacaaagtcaattgggaaatggaaggatattccatttacttaaacgtcaatgatcacaatattgttaacaatccgttagattttaacgaaaactgttatttatcccttcatggtgataagctttcaattgatgtcacggtaccccgtgagagtattttggggacatacacagatatgtcctacgagatctcaactccaatgttcagaatgatgttaaatacccccccttggaatacattgaacgaattcatgaaacataaagaagtggggagagcatacgactttacaattaaaggttcttaccttctccattctgagttagatattgataatgtcgatacgctagtcatagagtgtaacagcaagagtacagtacttcactgctatgggtttgtcatgaggtatttaacaaacgtaaagatgaattacttcggtgaattttttaattttgtgacgtcagaagagtacacgggtgtccttggcgctagggaagtcggagatgtcactacgaaaagctcggtggcggatttggcatctactgtagattcagggtaccaaaatagcagtctaaagaacgaatctgaggataaaggtcctatgaaaaggtcagatttgaaaaggactaccaacgaaactgatatttggttcacattttcggtttgggatggtgctctgatattacagaaagattacagtttgatcatgcatgactacatttgc

SEQ ID NO: 82367 - DNA, 1131 bp, Saccharomyces pastorianus
atgctgctggacgtgaacacaaatcacacactaatgcacgatgctcatgtgcatgaacattgcctcatcaaaagcatacgtgatgatggcgcattgcactcatggagcgactcatcaaaggtattttatcccaagtcattttacgctaccgctactaataagaagaataacaagttagccagcgccagcatgaacaagaccgccacaagtaataggacggtgagcgatgagatttatttccactccaccgagccgcagttcgatggtcaaggaagcgctgaacgtactagaacactaaccaagaggaatagcttcaagaggactagaatactgaaggctcgagacgattccgaactgctgaacgaaaatcgctcatctttgatgaccccgtccttaagctcggtcatgtcgcaagttaggaaaacaaattccgccaagacgttatcgggcgaatgccccatacatgagggccacttaacacagagcataaagaggaagttctccgaggaagctcaaagcgactgttcttcattgagctcctctaaacttcatcccttgacagatgatattgctgacgctgtcgatttgcagacccccgcgattagcgatgaggtactggctgagccggtcgtgcccaaaatgaaaataataaacataaatgatctcgatttgttcgacgactgggaggttaaggatttagtcgatatcttccctcccgtatacgaacggcgtccgcgatcgtcctctgccctttcactggtttctgcatcgtccgatgccaaacttcgtccgacctctgtggacttccaaatcatcgacaagaaaggcggcaagacttcaagaaggaagagtaggagcaaatcgactacagaaaacatgatttacgaaaatgacctggtagaattagaacaatggccatctgcatcaccatcgcccgagaccgacggttcgattgcatctagcgagctcttgcccaataaaagaataagacaaaaaagtttgaataccaatttcctaaagttatactctattgaaacatcatgtaaaaggaagagtattttacccgaagttgaagtagatgaccatctgttgaagacctgcaggcatgcaagcttgcactgccgtcgttta

SEQ ID NO: 82368 - DNA, 939 bp, Saccharomyces pastorianus
atgaacaggaaagtagctatcgtaacgggtactaatagtaatcttggtctgaacattgtgttccgtctgattgaaactgaggacaccaatgtcagattgaccattgtggtgacttcgagaacgcttcctcgagtgcaggaggtgattaaccagattaaagatttctacaacaaatcaggccgtgtagaggatttggaaatagactttgattatctgttggtggacttcaccaacatggtgagtgtcttgaacgcatattacgacatcaacaaaaagtacagggcgataaactaccttttcgtgaatgctgcgcaaggtatctttgacggtatagattggatcggagcggtcaaggaggttttcaccaatccattggaggcggtgacaaatccgacatacaagatacaactggtgggcgtcaagtctaaagatgacatggggcttattttccaggccaatgtgtttggtccgtactactttatcagtaaaattctgcctcaattgaccagaggaaaggcttatattgtttggatttcgagtattatgtccgatcctaagtatctttcgttgaacgatattgaactactaaagacaaatgcctcttatgagggctccaagcgtttagttgatttactgcacttggccacctacaaagacttgaaaaagctgggcataaatcagtatgtagttcaaccgggtatatttacaagccattccttctccaaatatttgaattttttcacctatttcggcatgctatgcttgttctatttggccaggctgttggggtctccatggcacaatattgatggttataaagctgccaatgccccagtatacgtaactagattggccaatccaaactttgagaaacaagacgtaaatacggttctgctacctctagggatgtatgccatattatcaagacgcaggaaatag

SEQ ID NO: 82369 - DNA, 141 bp, Saccharomyces pastorianus
atgccttttttgcttcacgtgtatatatatcagttgatatgcgttttctatacagacatacatgtatatacacacatatatatatatacatatgtacgcagagatatattaaatgggggtcctagtttccaaacaatttga

SEQ ID NO: 82370 - DNA, 1557 bp, Saccharomyces pastorianus
atgtattatggaatcagccagtttagcgaagcctacaacaaaatcttaaggaattcatcgtctcattcatcatgtcaattggtcattttcgtttcttgtcttaacatcgatgcgctgtgtgcgacgaagatgttgtcactattattcaaaaaacaattggtacaatctcagatagtaccgatatttgggtactctgaattacgacgccactattctcaattggatgacaatataaatagtctgctattagtagggtttggaggcgttattgatctggaggctttcttagaaatcgatccccaagagtatgttatcgatacagatgaaaagtcgggggaacaaagtttcaggagagacatctacgtgttggatgctcatagaccgtggaatctcgacaatatatttggatcacaaatcatccaatgttttgacgacggtacggtggatgacacattaggcgaacaaaaagaagcatactataaattgcttgaactggacgaggagagtggtgacgatgagctctcgggtgacgagaacgataatagtgggggtgaggatgaggcaactgatgccgatgaagtcacagacgaggacgaagaagacgaagataatgagacaatatctaataaaagaggtaattcttcaatagaatcgaatggtctctcaaaaagaaagcaacgaaagaagcaaatccacgaatatgaaggtgttttggaggaatactattctcaaggcacgacggtggttaactcgatatctgcacaaatctattcattattgtctgctatcggggaaacaaatctttcaaacctgtggttgaatatacttggtacgacctcgttggatatagcatatgctcaagtttacaatcgattataccccttattgcaagatgaagtgaaacgtctcacaccaagcagtagaaactcagtaaagacccctgatacattgacgttaaacatccaaccggattactaccttttcttactgaggcattcttcattgtacgacagtttttattattctaactatgtcaatgccaaactatccttatggaatgaaaatgggaaaaagagattgcataaaatgtttgctaggatgggtataccattaagtactgcacaagaaacatggttatacatggatcattctattaagagagaacttgggataatatttgacaaaaatttggatcgttatgggttgcaagatataattagagatgggtttgttagaactctcggatatcgtgggtccataagtgccagtgaatttgtcgaagcactaacagctcttttggaagtaggtaattcaactgataaggatagtgtgaaaataaataatgacaataatgacgatacagatggagaggaagaagaagataacagcgctcaaaaattgacgaatttgagaaaaagatgggtttcgaatttttggctcagttgggatgctctagatgacagaaaggtagaactattaaaccgtggaattcaactagcacaagacttacagagagcaatttttaataccggggttgctatattggagaagaaataa

SEQ ID NO: 82371 - DNA, 2412 bp, Saccharomyces pastorianus
atgcactacatacgaaatactaagaactacatgataaagatgagagggactgacgagaatgaagatgatgcagttgagatggagggcgatatggctggtgaattggaagatttgtctaatggtgaagaaaatgatgatgaagatactgatagcgaagaagaagaattagatgaagaaattgatgacctgaatgaagatgaccccaacgctattgatgataaaatgtgggatgataaggcaagtgataattcaaaagaaaaagatacagaccagaatttagatggaaaaaatcaagaggaagatgtacaagctgctgaaaatgacgaacaacagcgggataacaaggaaagaggggatgaggacccaaatgcacctgaagatggcgatgaggaaattgaaaacgatgaaaatgcagaagaggaaaacgacgttggtgaacaggaggacgaagttaaagatgaagaaggcgaggatttggaggccaatgttcctgaaatcgaaaccctagaccttcctgaagatatgaatttagattcagagcatgaagaatcagacgaagatgttgatatgtcagatggaatgcctgatgatttaaacaaggaagaggttggaaacgaagacgaagaagtcaaacaagaatccggtatcgaaagtgataatgaaaacgacgaacctggtcctgaggaagatgccggcgagacagaaacagctcttgacgaagaagaaggtgctgaagatgatgtggatatgactaatgatgagggaaaggaagacgaagaaaatggcccagaagagcaagccatgtctgatgaagaagagttaaagcaagatgctgctatggaagaaaacaaagagaaaggaggtgagcagaatacagaaggtcttgatggcgttgaggaaaaggctgatactgaagacatcgatcaagaagctgccgttcaacaagattctggatccaaaggtgctggtgctgatgctacggacacacaagaacaggacgatgttggaggttcaggaacgactcagaatacctatgaagaagatcaagaagatgtgacaaagaataatgaagaatcacgcgaagaggctacggctgctttaaagcaactaggtgatagcatgaaagaatatcatagacgtcgtcaagatataaaagaagcacaaactaatggcgaagaggacgaaaatttggaaaaaaacaatgaacgtcccgatgaatttgaacatgttgagggtgcaaatactgaaacagatacgcaagctttaggttctgcaacacaggatcaattacaaaccattgatgaagacatggccattgatgatgatagggaggagcaagaagtggaccagaaagagttagtagaagacgccgatgatgaaaaaatggatattgatgaagaagagatgctatctgatatcgacgcgcatgacgctaacaatgacgttgacagcaaaaagtcaggattcatcggtgaaagaaagagtgaggaagattttgagaacgaactttcaaatgaacacttctcggctgatcaagaggatgacagtgaaatacaatctttaattgaaaacattgaggataatccacctgatgcaagtgctagtttgacaccggaaagatcgttagaagaatcccgtgaattgtggcataaaagtgaaatttcgaccgccgatttagtatcacgtcttggagaacaattaagactgatcttggaacctaccttggctacaaagctgaagggtgattacaaaacaggtaagagactgaatatgaaacggatcattccatatattgcctcacaattccgtaaagataaaatctggttgagaagaactaaaccaagcaaacgtcagtatcaaataatgattgcgcttgatgattctaagtctatgagcgaatccaaatgcgttaaactcgcttttgatagtttatgcttggtctccaagacgttaactcagctagaggctggagggttatctattgtcaaattcggtgaaaatattaaagaagttcactcatttgaccaacaatttagtaacgaatctggcgcaagagcttttcaatggtttggtttccaagaaactaaaacagacgttaagaaacttgtggctgaatctactaaaatttttgaacgtgctcgcgctatggtacataatgaccaatggcaactagaaattgtaatctctgatggtatttgcgaagaccatgaaacaatacaaaaactggtccgccgtgctagagaaaacaaaattatgctggtttttgtcatcatagatggtattacttctaatgaatccatcttagacatgagccaagtgaactacattccagatcagtatggcaatccacaattaaagattaccaaatacttggacacatttccttttcgaattttatgttgttgtacacga

SEQ ID NO: 82372 - DNA, 198 bp, Saccharomyces pastorianus
atgtctgacttagttaacaagaaattcccagctggcgactacaaattccaatacatgctatcagccaaagtgatgctgacagtgaaatcttgtaagatgccacaaacagttgaatggtccaaattaatttctgaaaacaagaacgttactcattacggtgctccagctgctttactccccaaactgtactgtcagcca

SEQ ID NO: 82373 - DNA, 2268 bp, Saccharomyces pastorianus
atggatgaacacgaggaagcagtcatcttcggtatctgccttgtggactttcatcacaaaagaggccctgaaatagaatactggtatggcttacctgagggcacccaaagtgcagaactatggccaaatttacccttccaggcccttcctgatggttctcactcgtttgaagaaacatttacttatttcacattactatatgatgaaagaagacaaaggagccctcccaacggggcaactgatctcagtgatgatagcatcaatgacaacacgactttgtttgccatatcttgctcgagacagataaagagtgatgaattggtcactaaagataaggacgtaacacgatctactgtacagaaggcaattgtagtcatctcaaggcaaccaatcttcggtcaaatcaaggacaaacttagtattgtgactaatgcttttttcttgcagcatgattttggggacaggaagataatccagtctttatacgaaaacctgaagtcgatttacacgcctgcatcattggtcagaaatgccgaaaatcgtctttatattgggttatgtctgagaaagatactacatgattttaagagaaacgctttagtcttattgaaagcaattatgcttgaaaaaaaaattatagtttacggcaacgatgtggaagctttgtgtaatttacagttcggtctgatcagcttaattccggacttgatgtcaaatttgcaggattctggcagtcctcagttatttcaggatatttcgaaattaaatgttgtggactcgtttaaatcaagcaatcgagaatcagtgttgagattcttaggttttccattaccgattttcgaaaaaggtggactattttcaccctatactccactgcagcaaatgaatgacatacggtcagaacgtactttgttttttatgattggaagttccaatacattgcttgctgaacaaaaggaggaactgtgccacatatttgtcaatacagacaattccactgtagatattctggacaaaactttgaaccccgtcctccaattgtcaagtcatgataaaaaatggattgaatctatatctggaattgtatcagacacatggaacgaaaatgatgatgaaactccaaaaaactctcaatttgaaggcagtgaggatttcattaggtggcaattcgaggactatttaacggggttactttccagtgttaaattaagtgattatttggacctacataaagagaatgatcaagctttgaagactatacctgaagatatgctaaattccaatcccgttcatttattcaatttgaattgggttcagagttggaaagagactcaaaattttctgatattcaactcaagaacagatgatagattgttcgacttgtttcctccgaagcatatatataacggtgccgacactctgtctttattacagcaacgatttttggccacatttcataatttaaaaagaagctctagcaactcttcaagcaataaaaatggtcatcaaagcgaagaggatatcaaagaccaggaaagcattgagtcaaaaaagtctgtttcccaaatttctgtaaatcctggaaagaatacagacaagccagcagccaacttatggaattcatggaaggaatatttcaataaaccaaagaatactgctaatgacgatgttactgaatccacggaagatctcaaaaacagaagtaaaacatcgaacgcgatacagaaagctatgatgggcttgggtttacattataaacctgatgcggagacagatcaacaaagtgaagaggtgggaaatggtgaggacaatgaagatgatgataccgatgaggactctgaggatgatgacggtaacactgaggatgatgatgatgatagtgaggacggtgacgatgacgatgacggtgaggacgatgatagtgaggacgatgatagtgaggacgatgacgatgacgatgacggtgagggcgacgaaaatggcgataaggaagacagtcaagatttagcaatggttttacagacgttacgaacattaacactgatcatgataaagaaaatgaacagaattttgagggtaatgcagaaaactttaatgaggacgaaaccgttgcagatgaagatattgaaggtggtcctgagagcgataaaaattgcgacagtaaaactgatatttatgaaaacgatagaaatgttgaagactcatctaaaacgagaaatacagttaaaaaatccgatgaggagggcggtgcgaatgacgctgctatag

SEQ ID NO: 82374 - DNA, 468 bp, Saccharomyces pastorianus
atgaatggacttagagttgcagcaaaaattcagccagcacgccaaactatcatattcttgcatggattaggtgatacaggttcgggatggggatttttagctcagtatttacaacagagagaccctgccgctttccagcatactaattttgtttttcctaatgctccagagcttcatgtgacagcaaacggcggtgcattgatgcctgcttggtttgacatcttggaatgggatcctagtttttccaaagttgacagtgacggttttatgaattctttgaattccatagaaaagacggttaagcaagaaattgataaaggaattaaaccggagcagattattatcggaggtttctctcagggtgccgcattagctctcgcaacatcagttactttaccatggaaaatcggtggtatagtagctctgtcgggatgtgtgtgccatcccagggattctgtgacgacataa

SEQ ID NO: 82375 - DNA, 114 bp, Saccharomyces pastorianus
atgcttttcctcttgaaatcgcgcaaagaaggaaaggaaaaagtgtctatatatagtgtctattgtttttttttacgaaaagaaaacggagaggatgagttaggaggggactag

SEQ ID NO: 82376 - DNA, 960 bp, Saccharomyces pastorianus
atgaaacttcaattggcggcagtggctacattagcagtcttaactagtccggcattcggtagagtacttcccgatgggaaatacgtcaagattcccttcacaaaaaaaaagaacggcgacaatggtgaactcagcaagagatcgaacggccatgaaaaatttgtactagctaacgagcaaagcttttattctgttgagctagccattggtacaccttcacaaaacctcactgtgctgttagacacaggctcagctgacttatgggttcctggcaagggaaacccctactgcggttctgtgatggactgtgaccagtatggcgtgttcgacaagaccaagtcgtccacgttcaaagccaacaagtcctcgcctttttatgccgcttacggtgacggaacctatgcagaaggtgcatttggtcaagataaattaaagtacaacgaattagacctcagtggtctatcgtttgccgtggccaacgaatctaactcaacctttggtgtgctcgggatcggcctttccacgcttgaagtcacctattctggaaaagtcgctattatggacaagagaagctacgagtatgataactttcccctgttcctaaaacattctggagccatcgatgcaaccgcatactctcttttcctaaatgacgagtcacagtcctccggcagcatcctcttcggcgctgtagatcacagcaagtacgagggccaactgtacactatcccgttggttaatctttataagtcgcagggttatcagcacccggtggcgttcgatgtcactttacagggcttaggactgcaaaccgacaagcgcaacatcacattgaccaccaccaagctcccagccctactcgattcaggcacaacgctaacatatctgccctcccaggcagtggctttgctagcaaagagcttgaatgcctcgtattccaagacattgggttatttatga

SEQ ID NO: 82377 - DNA, 453 bp, Saccharomyces pastorianus
atgcagaccagtgtggggacctgtgtcttggcaataattccacaagcgggcaacgccaccgctatccttggtgattccttcttgagaaacgcctatgtggtctacgatttggataactacgagatttccctagctcaagccaagtatggcacggggaaagagaacgtcgaagtcatcaaatctaccgttcccagtgcaataagggcccccagttacaacaacacttggtctaactacgcctccgccacgtccggtggtaatatttttaccaccgtgcgaactttcaatggcactagtactgccaccactacgaggtcaagtaccaccaagaaaacaagctctaccactactgcaaagtcgactcatgaaagcaagagggcactccagagggctgctaccaactccgcttccagtatacgctccaccttgggtttactgctagtcccctcctaa

SEQ ID NO: 82378 - DNA, 327 bp, Saccharomyces pastorianus
atgaatcatctatatcataactgcatgtttctctacgtctacacagatgtttgcgtccgtttgtgcgcttcgattttttacataatgctggaagcaaagattgctctcagaattcctacccttcggcccaattacacgtggggacaatggcgctctttcatacagtcttcattctatggccgcacttttgtggcattctctggacggtccatgaaaaattatataactatttgctttctattgaagtctattgaagttagcgtggatagaacggcgttacatggcacatcagctgaagctagcgcaagtaattttcaacgcatttaa

SEQ ID NO: 82379 - DNA, 1242 bp, Saccharomyces pastorianus
atggttgatcttatagcgagggatgactccgtagatacttgccaagcttctaacgactacaatgggcacgcaggtcttagaattctggcagtattcattatactgatatcgtcaggattgggagtttatttcccaattttgtcatcacggtattcgtttataagactaccaaattggtgctttttcatagcgaagttcttcggttctggtgtcattgttgccacagcgttcgttcatcttctacagcccgcagccgaagctctgggagatgaatgtcttggtggcacatttgccgaatatccatgggcttttgggatctgtttaatgtcgcttttcttacttttcttcactgaaatcatcacgcattattttgtagcgaaaacgctgggacacaatcatggggaccatggggaagttaccagtattgatgttgatgctcccagttcgggatttgtcatcagaaatatggactcggatcctgtatctttcaataacgaagctgcctactccatccataatgacaaaactccgtacactactagaaatgaagagattgtcgctactcctataaaggaaaaagaacccgactcaaatgttactaattatgatctggaaccaggaaaaacagagtcactagctaatgaactagttccaaccagttcccatgcgacaaatctcgcttctgtacctggaaaagatcattattctcacgaaaatgaccatcaagatgtctcccagttggctacacgtatcgaggaggaagataaagagcagtatctcaatcagatactagctgtttttattctagaatttggcattatctttcactctgtatttgtgggtctttcgctatctgtcgcgggtgaagaattcgaaaccttatttatcgttttaactttccaccaaatgttcgaaggtttgggtctaggcacaagagttgccgaaacgaattggccagaaagtaagaagtacacgccttggttaatgggattagccttcacgttaacgtcacctatagcagtcgcggtaggtattggtgtcagacactcttggatacctggctccagaagagcattaattgctaatggtgtttttgactcgatatcatcaggaattcttatttatactgggctagtcgaattaatggctcatgaattcttatactctaatcaattcaaaggacctgatggcctcaaaaaaatgcttagtgcatatctcatcatgtgttgtggagctgcttaa

SEQ ID NO: 82380 - DNA, 1245 bp, Saccharomyces pastorianus
atgtctgaaataaccttaggtaaatatttatttgaaagattgagccaagtcaactgtaacaccgtcttcggtttgccaggtgactttaacttgtctcttttggataagctttatgaagtcaaaggtatgagatgggctggtaacgctaacgaattgaacgctgcctatgctgctgatggttacgctcgtatcaagggtatgtcctgtattattaccaccttcggtgtcggtgaattgtctgctttgaatggtattgccggttcttacgctgaacatgtcggtgttttgcacgttgttggtgttccatccatctcttctcaagctaagcaattgttgttgcatcataccttgggtaacggtgacttcactgttttccacagaatgtctgccaacatttctgaaaccactgccatgatcactgatattgctaacgctccagctgaaattgacagatgtatcagaaccacctacactacccaaagaccagtctacttgggtttgccagctaacttggttgacttgaacgtcccagccaagttattggaaactccaattgacttgtctttgaagccaaacgacgctgaagctgaagctgaagttgttagaactgttgttgaattgatcaaggatgctaagaacccagttatcttggctgatgcttgtgcttctagacatgatgtcaaggctgaaactaagaagttgatggacttgactcaattcccagtttacgtcaccccaatgggtaagggtgctattgacgaacaacacccaagatacggtggtgtttacgttggtaccttgtctagaccagaagttaagaaggctgtagaatctgctgatttgatattgtctatcggtgctttgttgtctgatttcaacaccggttctttctcttactcctacaagaccaagaacattgtcgaattccactctgaccacatcaagatcagaaacgccaccttcccaggtgttcaaatgaaatttgccttgcaaaaattgttggatgctattccagaagtcgtcaaggactacaaaccagttgctgtcccagctagagttccaattaccaagtctactccagctaacactccaatgaagcaagaatggatgtggaaccaattgggtaacttcttgagagaaggtgatattgttattgctgaaaccggtacttccgccttcggtataaccaaactactttcccaacagatgtatacgctatcgtccaagtcttgtggggtaccatag

SEQ ID NO: 82381 - DNA, 2628 bp, Saccharomyces pastorianus
atggctatctgggagcaactagaagtctcaaaggcgcacgttgcctatgcatgtgttggtgtcttttcatctatcttctctttagtgtcactttatgtcaaggagaagctttatattggtgagtccaccgtagcaggtatatttgggctaattgtgggtcctgtttgcttgaactggtttaatcctctgaaatgggggaattcagacagtataacattagagataacgagaatagtattatgtttgcaaatttttgccgttgccgtggaactgccacggaaatatatgttgaagcattgggtatctgtgacgatgctattattgccagtgatgacagctggatggcttattattggtctcttcgtttggattcttatacctggcttgaatttttctgctagtttgttgatatctgcgtgcattaccgcaacagatcctattctggcgcagtcggtcgtctccggtaagtttgcccaaagagtacctggtcacttaagaaatctactgtctgcagagtcaggctgcaatgatggtatggcctttccttttttatttctttctatgaatttaatcctacatcccggtaatggaagagaaattgtcaaagattggatttgcgttactatcctgtatgagtgtttgtttggatgcttgctaggttgcttcattggttatgtaggcagaatcaccatcaggtttgccgaaaagaaaaacattatcgatcgtgagtcgttcttagcattttacgttgtcctggcgttcatgtgtgctgggttcggctccattttgggtgtggatgacctattggtatcatttgcagccggtgcgactttcgcttgggatgggtggttttctcaaaagacacaagaaagtaatgtttctaccgtgattgatttgctactaaactatgcgtattttatctattttggtgccattataccttggagtcaattcaacaacggtgaaattggcacaaacgtctggcgtttaattatactttcgatagtggtcatctttttacgtaggatccctgcagtcatgatattaagacctcttatacctgatataaaatcgtggcgtgaggcactttttgtgggccattttggtcctattggtgtaggtgcaatttttgccgctatactagctcgtggagaattagagtctacctttagtgacgaacccactcctttaaatgttgtaccatcaaaagaggaaagtaaacattggcagctgatagcctgtatatggccaataacttgttttttcattgttacttctatcatagttcatggttcttcagttgcaatcataactctaggtcgtcatttgaacacgataacgttaaccaaaacattcactacacacaccaccaatggtgataatgggaaaagttcatggatgcaaaggttgccatcgttggataaagctggacgatcattttcattgcatcgtatggatactcaaatgactttatcaggggatgaaggtgaagcagaagaaggaggaggtcgtaagggactagcaggaggtgaagatgaagaaggattaaacaatgatcaaattggtagcgtcgcaacgagcggaattcctgcaagacccgctggtggtatgccaaggaggaggaaattgtcaagaaaagagaaaagattgaacagaagacagaaactgagaaacaaaggtagagaaatattttcatcaagatctaaaaatgaaatgtatgatgacgatgagttgaatgatctgggacgagaaaggttgcaaaaagaaaaggaagcacgcgccgccacatttgcattgagcacagccgtcaatacacaacgtaatgaggagattggaatgggtggagatgaagaagaagatgagtacacaccggaaaaggaatatagcgataattacaataacacaccaagttttgagtcgtctgaaagatcttcatctctccgaggaagaacttacgtaccaagaaaccgttacgatggagaagagacagaaagcgagattgaaagcgaagacgagatggaaaatgaaagtgaaagatcaatggccagtagtgaagagaggagaattcgaaaaatgaaagaggaagaaatgaaacctggtactgcttatttagatggtaatagaatgattattgaaaataagcaaggtgacatcttgaatcaagtagatatcgaggatcgcaatgaggcgagagatgacgaagttagtgttgatagtacagcccactcaagtttaaccaccacaatgaccaatctatccagtagtagtgggggaaggttaaagagaattttaactcccacatctttaggaaagatacattcattggttgataaaggaaaggataaaaataaaaacagcaagtatcatgcatttaaaatagacaatctgttaatcatcgagaatgaggacggtgatgttataaaaagatataagataaatcctcataaatctgatgatgataaaagtaaaaaccgcccaagaaacgatagtgttgtatcaagagctttaacagcagtaggactaaagagcaaagcgaacagcggcgtaccgcctccagtagatgaagaaaaagccatcgaaggaccctccaggaagggcccagggatgttaaagaaaaggactttaaca

SEQ ID NO: 82382 - DNA, 1824 bp, Saccharomyces pastorianus
  modified_base (1780)..(1780): a, c, g, t, unknown, or other
atggtgagtcaattaaataacgacgtagtgtttcatgaaactataccgagacaccagttgactggctccaacactgatagtaatgagaaatttttaggcctagtaagagattcggtgaaagaaacgttttggtgtttctcaaacatcaacgtctttgaaattattatcgaaaatgagcctaattcggtatggaatttattagttcgggataacaaatttgacaaggccctatcgttgaaaggcttgacggtgagggaaatagaatctgtaaaactttcaaaggcaatgtaccttttccacactgctaaagattttcattccgcggctcaaactttgggaagcatgaaggacttgtcacactttggggaaatcgcattgaattttctccaaataaaagattacaacgatttgaacgtaatattgataaaacagttggataacgttccctggaaatcaactcaagtcgtcttgtcgagttggattatttggaattttatgaaacaattgaatgatattgaattaaagataaacacaactaaaccagcttctactgatgaagacaatttgctaaactggaacctgaatctcaaggagaaatcgaatgaactaacgaaatttttggaaagccatctagaaaaacttgataatgaaaccgtttatcaaataatgtccaaacaaaaccggcaaaacgaattattgatttttgctagtctaatcaacgatatgaagtttttattatcattttggattgaccaaggaaattggtatgagtccttgaaaattctgcttacaataaataaccatgacctagtctataagtactctttgattctcttattgaattcaccagaggctactgtgtcaacgtggatgaaaatcaaagacttggatccaaataagttaattccaacaattttaaaatttttcacaaattggcaaaataattctaaactgattactaacatatcagaatatcctgaaaattactcactgacatatttgaaatggtgcgttagagaagtcccaaaaatgtgtaatccaatagtgtacaattctatcctttacatgatgattactgatccgagaaacgatatgatactagaaaatgatataatcaaattcatgaaatcaaacgaaaacaaatatgatcttaatttccagttacggttgtctttaaaattcaagaaaactaagacctcgattttccttttaacacgtttaaacttattcgaggatgccattgacttggcattgaaaaataacttgattgatgattgtaaggtaattgtgaatgacgagattcttatagaggattataaattaaggaaaagattatggctgaaaattgcaaaacacttattactttcaatgaaagacatagatataaagcaattaattcgaacgattttaaatgattccaacgaaattttaacgattaaggatcttttgccattttttaatgagtatactacaattgctaacttgaaagaagaactgatcaagtttttagagaatcacaacatgaaaatgaatgagatttcagaagacataataaactccaagaatttgaaggtggaaataaacacagaaatttctaaatttaatgagatttacaggatactagagccaggtaagtcttgtgatgaatgtggtaaatttctacagatcaaaaagttcattgttttcccctgtggccactgttttcactggaactgtataatcagggtaatactgaactcaaatgattataacttgaggcagaagacggaaaacttcttanaggccaaaagtcagcataatttgaatgatttagaaaatatcctt

SEQ ID NO: 82383 - DNA, 885 bp, Saccharomyces pastorianus
atgataaaaacacgtatagaggaagttcagttacaattcctcacagggaataccgaacttacgcatttgaaagtctccaatgatcaacttatagtaacgacacaacggacaatttacagaataaatttacaagatccggccatcgtcaatcactttgactgtccattaagcaaggaactagaaactataatgaatgttcatgtttcaccaatgggtagtgtcattcttattcgaaccaactttggccggtatatgttgctaaaggatggcgaattcactcaattgaacaaaataaaaaatctcgacctcagctcgctacattggatcaacgaaaccacctttctgatgggaatcaagaagacgcccaagttgtaccgagttgaattgacaggaaaggatataaccacgaagctatggtatgaaaacaagaaactctctggtggaattgatggcattgcgtattgggagggctctctgctattaactataaaagacaacattttatactggagagacgtgacaaatatgaaatttcctttagtattaccagatgaatctgagcaatttgaaaggttaaaacatcatgcgataaagaaattcgattcgtacaatggactctttgcttgggtcacatccaatggaattgtctttggtgatttaaaagaaaagcaaatggaaaaagatcctgcttctaataattttggaaaattcctatcttcgtcgaaggttctactcaatttcgaactgcctgactaccagaatgataaagatcacctcatcaaggatatagttttgactgctttccacatcctgcttttgagaaaaaatacggtaacaatggtgagtcaattaaataacgacgtagtgtttcatgggatcctctaa

SEQ ID NO: 82384 - DNA, 1779 bp, Saccharomyces pastorianus
atgaccattgatggcacggggcaatctaaggaggcgctgcaagatgaacggttaaatactggctctgataaggtttaccataactatatgatgcctgctttagaactctacgatgccaaggtctccataaaccattggcagttgcgggattgtatcaaaccgggctccatgaaccagagtaaactgtattatatttacgatcattcgataagagtactagatacggattcttccgtattgaggtctccagtaaggcgacataattctattcaaccgagtaacagtggtaaaaactctactgaaaaaacgtctacaaaaggttctaggacaacgggctcgtatatctccaaaaatttacatgttccttccgagaaactggtagagttcaactttaagccgagatgtttcacggaattaaatgggttgactgtttgtggtggtctaatcggttctgatgataagggattcccttctaattggaaccgtttagctcaagatgcaaatatttcgttgccgccaccttcccaaccgattaatatttccaaaaatattagtttccctataaattcacattattcaaatcctaatatctggaagggcatcgtggagttttataatcaagaaacggacacaatgatgacttttacgttgggccagttcatcaataattgtgtcacactttatgacagggccagtatgcagtttgatctttttgcatgcaacaatgatggtcatctttaccaatgcgatgtaagtaatagagatgtaacactagtgaagcgttatgcggatttaaagtttcctttgaataacgcttctttgtcacatgatggtcaaacgatggtagtgtctggcgattctaataaatttgctgtttacaatcaaaatgaattaaccaaccaattctccttacattacgataatcatccttcctggggtagttctgtcaatcgtgttagacggataccacggtttgcgttacctgatgaatcagaatatatcgaaaacatatatgaagctccaaattcagaccatgggttttataactgtttttccgaaaacgacttgcaatttgcgacggtatttcaaaatggtacttgcgcaatttatgatatcagaaacatggctactcccatggcagaaattagttcgactagaccacattcccacaacggtgcatttagagtctgtaggttcagttatggcctagatgatttattattcatttctgaacatcagggcagagtacacgttgtagatacaagaaactacgttaaccaccaagttattgtaattcctgataaagttaatatggaatatatatacgaacggaagcataatacaaatcataatttcaccacaaataataacaacgaaaacgaaagtaatgatagcaaaaatgaattacaaggggcggattatcggtctttatcaagaagaagattttcgctgccctctatgccaaatgtaaccacagaaccatggataactatggctcaaagaatcccaaaaaagtatttggagccgcaaattctaccttttccgaaagttatggataaaattagtaacgaatcggttctgttttctacgaaaggtagttcatcaagtgacgtagctcatccatacaagagacgatgttcattcagggtaaggagagtatcgacttcggcaccaaccgccgattattctaataacaatgttaacgcaagtcttggcacacctgctgctgattctatcgcaacttcgtcgtcaaattccgcacctcaaaatttaatgtga

SEQ ID NO: 82385 - DNA, 714 bp, Saccharomyces pastorianus
atgtccaacccatttgatttgttaggtaacgacgtcgaagacgctgacgttgtcgttttgccaccaaaggaaatcgtcaagagcaacacttcctccaagaaggctgacgtcccacctccatccgctgacccatccaaggctagaaagaacagaccaagaccttctggtaacgagggtgctatcagagacaagaccgctggtagaagaaacaacagatcaaaggaagtcactgactctgccaccaccaagaagtccaacaccagaagggccactgaccgccactctagaactggtaagactgacaccaagaagaaggttaaccaaggttggggtgatgacaagaaggaattgagtgctgaaaaggaagctcaagccgatgctgctgctgaaattgctgaagacgctgcagaagctgaagacgctggtaagccaaagaccgctcaattgtctttgcaagactacttgaaccaacaagctaacaaccagttcaacaaggtcccagaagctaagaaggttgaattagacgctgaaagaattgaaactgctgaaaaggaagcttacgttccagcaaccaaggtcaagaacgtcaaatctaagcaattgaagaccaaggagtacttggaatttgatgccacttttgttgaatctaacactagaaagaacttcggtgacagagacctgcaggcatgcaagctggactgccgtcgtttacaa

SEQ ID NO: 82386 - DNA, 810 bp, Saccharomyces pastorianus
atgacaatcaaggaacataaagtagttcatgaagctcacaacgtaaaggctcttaaggctcctcaacatttttacaacagccaacccggcaagggttacgttactgatatgcaacattatcaagaaatgtatcaacaatctatcaatgagccagaaaaattctttgataagatggctaaggaatacttgcattgggatgctccatacaccaaagttcaatctggttcattgaacaatggtgatgttgcatggtttttgaacggtaaattgaatgcatcatacaattgtgttgacagacatgcctttgctaatcccgacaagccagctttgatctatgaagctgatgacgaatccgacaacaaaatcatcacatttggtgaattactcagaaaagtttcccaaatcgctggtgtcttaaaaagctggggcgttaagaaaggtgacacagtggctatctatttgccaatgattccagaagcggtcattgctatgttggctgtggctcgtattggtgctattcactctgttgtctttgcagggttctccgctggttcgttgaaagatcgtgtcgttgatgctaattctaaagtggtcatcacttgtgatgaaggtaaaagaggtggtaagaccatcaacactaaaaaaattgttgacgaaggtttgaacggagtcgatttggtttcccgtatcttggttttccaaagaactggtactgaaggtattccaatgaaggccggtagagattactggtggcatgaggaggccgctaagcagagaacttacctacctcctgtttcatgtgacgcttga

SEQ ID NO: 82387 - DNA, 519 bp, Saccharomyces pastorianus
atgtcatcgactaagtttttgaaaccactctgcaggataagggcttttcatacttcaattgccagatcctttaccattccttttctgccaaagattccacagaaacctggaggtgtgagtgggaccgcaaatgattcctcttatatgccgcccgaaagcagagctcagggttcgtaccattggattgtcgagcgcggactgtccttagcggttcttccgctgatcgcagttcccttggtcactacaggccctatttccacttttaccgacacatttctttccttggtcctgctaggtcattgtcatatcggatttcagtcttgcattatagactatatttctgaaagagtctatggaaaggtacatcattacgcgatgtatttattgagcttgggctcctttttatcgttcgtcggtatatataaattagagagccaagaagctggtcttattgcctctttaaaatcattatgggataacaaacctgtggaaaaaaaagaggcagtaatcatcaattaa

SEQ ID NO: 82388 - DNA, 273 bp, Saccharomyces pastorianus
atgggaaaatcagatattgttgaacaattaaggctgtctaaaaactggaaattaaacttaaagtccgtgaaattaatgaagaatctattgatattatcatccaaactagagacaagttcagtaccaaaaacaataaacacaaagctggttattgaaaagtactctgaaatgatggaaaatgagctgttagagaattttaattctgcatatagagagaataattttactaaattaagacctgcaggcatgcaagctggcactgccgtcgtttac

SEQ ID NO: 82389 - DNA, 918 bp, Saccharomyces pastorianus
atgcacactaactcacccttacgagcggataaccaagatctagaaactcaaccactgttgagaccaaacactgaagaaagccaactcctcaatgatgaagtgagaatcaatgttgcaaatgagacccttattaaatctcgttggcggagtataaagtgcttaattatatatctgctaggtattattttattaagtttctttggcatcagcatagtgcagtatattaggggacatgtgccgcccacagatgtgatagaaaagaatctagttcaagtaacaaatttcaaactggtggagtttcagcttgatggttggaaagataatatgggctctgacctgaacaatgatacaggtaagtatttgcaggtgtctatacactctcaaatttggttcgattatgacaaatggccaggaacggaaaatgactcggacgccagaagccaacgtgactggatacggtacatcaatgaaaatgttcttaaaaccatttgtatagatctgaataacgtgaccacattcgatggagatctagtgtttaagaataaactgggagatgttgttggcatggaacccatttgttttaatttggctcaccgacagattaataacctacagttcaaaattttagttaaaccgtctatttggaaaatcgtaaaagttttgaagaaattttggaatagggattttgaatccttaaatataaaatcgaatttagatatgactatcttcaagagaaaatttggcacgaggtttaatttattgaaacttaatggcgaaatcttaaattggaaagatattatcgattgggaaaaaatatcggcaacgccccttcggatgattcaaaatatgatcgatgcaatatctcttcaaggattacattacgggactccaattctgatggattcatgcccgatatga

SEQ ID NO: 82390 - DNA, 1107 bp, Saccharomyces pastorianus
atgcctcgtatccgagtacacaataacgatcccatatcgcccctatcgtctccattgccctcttcaccttcgccgcaggtacctaacgtttcatcgccgttctcattaaatagaaaaagtctttctcgaactgggtcgcccgttaaacagagtagtaatgacaaccctaacgaaccagaactcgaatcacagcatccaaacgaaacagaagcaaataaactagattcgctgccaccagcggcaaataaccctaccggaacactgtcttcagatgaattaactttcactcatgatttaattgaaaaagttttcaattgtaatgacaagctatcagataactataatacccaaatattatcgaacacagaacatccgcttttgacatcatataagttagacttcccaaaaattcccgcaggtgtactccccacagacactgattcggatgttatatcatccttggagtcattatatcatatccattgcaactccgtttatgaatgcatcaagtttctgaagagtgataatatatcaaatgcattattcttctctaactctaactctatatcgcccacgatgtttaatctattcatttctgagccattgattgattgggtaactaaatgtgacttaatcacctatacagggttaatcaaatttttttcacaatttataattcattctaatgagatcagtgactcaatcattcaaaaactggaaagtatgatcaaactattgcccgaacaaattaataaggctgttttagaattaccaaaagcgctagtgcaaaggaagttatcaattattaataattttaccaaattagtgaaaaaactaataaagttattaaaattcattctaaacttcttgaaaagttttcctatatttaaaagtggcatgaataatgactggaagaatattgtaaatttagacgatattttggaaatgatgattaatgaagacgatacaaattcagagacaaacacaataatgcaacatttacaagggttctgtcaagttttcgtaacaaagttcttaaattcctctatgagcgttagcaatgatccctctgtgtctatcgaatgcaagtcgttaaatgaaatgatt

SEQ ID NO: 82391 - DNA, 795 bp, Saccharomyces pastorianus
atgtccggtgataataacattgaacctactagtcggggctcgaacgacaatagcaacggtccaagtaacggatcttcggtaaacagtaatcggtacagtttaaacgcacccaagtacagcagccaaccaccgccagcatcacacacttatttgccccccatgtcagtgaatatcccgcccatagcgagcaaatcatcgtcaatatacagcctgctacaccaaagttccccccgcccggagacgccaaatccaatattaccgccacttatcggtagtggtcccggctcccataaaccatctcctacccctacacagcgtcctgcacaacccgcaacacaacggcaacctgccacatactcagtgtatccagcgtctatcagcctgaatagatcgaattcatctgcttacccactttctttcaagtcagaggaaaccttaaacaataatcctcctactgctgccaaacgtactaataccttcccctcaattccaagcagtactaaaaaacagaaaacaagccaagagaaacgaatctcttccatttcaaggagaaacacgcaagaaataattgctaagcaaattgcagaaaataacaaatctaaaaccatcgaggagtatgcgcagatcgtgaagcatgcagaaatcaaagtcctgagcatggactcacagaacacgtcaaaggcagctttgcagctggcggaacaaaacagagaaagagaaagacaagtgtttgcgttactttggttaatgaaaaattgtaaatctcagcatgatagttacgtaccaaggggctaa

SEQ ID NO: 82392 - DNA, 312 bp, Saccharomyces pastorianus
  modified_base (11)..(11): a, c, g, t, unknown, or other
atgagttatcncgggagaaacgtggatgttatgaatttacaacatattttgacaaatcacctggcttttgcgaacgttcaacaaacaccattattccaattacaacaggttaactcgcaaatttctgaattgtcaagagacgaattgcgtacgatcttgagcgacgcgaaatgcgttggtgtcatttatcgtcacggtaaagatgccgctggtaaaccattagacgaagaatatttctacgagttagaataccatgatgattacgagagaagatacttggtgagttcattaaaaggtggaggacaggcttaa

SEQ ID NO: 82393 - DNA, 864 bp, Saccharomyces pastorianus
atgagaaagctggtaaaactgcgtcagaatcaattggaaatttcgggaaaggagattatcaactcatttccttcttccagtataggaagggtttcgtctcccgttaggtcgaataaggttgacgccatcccttcctctccagcttttcctggccagttggcagaaacgtcacccaagttttcttccaaactttcttctccttcaaggcatactagagtcatcaatgctgaactagatcctagcaagatcagcaccattactgtagggcgcaatggttcgcaatgtgatgttgcgctctgtaagaataagttcatatccagagtacacgctagtataacttatttaccacaaacaaatgaagtgaagattcactgcttcagtatgaacggattaatcgttacctatcgtaagcaatttgattgttatcaattaaaggataccatgaataacaataatagggcatataggcttgttcccagattctctaacgaaaaatgtgttaaagaaattcaagatgagggaggattcattaattttactctggaagagggagacaccgtttatatgacatattacaagggtatcatgttggattttaggcaggttttacttcgcatttcgttaaaagaaaaaaactctccttcagagccgttaagattcgagaagaaagctgaatttgaaagtgaaagtgaaacgaaacatatgggtagtataaggaagcatccattgatttttactgacacttcgatggacagacccaaaaaaatactaaaggatagcaacaaaatctcaattggtagtgattatggcgttgcagaaaggatgctaaaccactgcctaaattctaaatcgtccccactttgg

SEQ ID NO: 82394 - DNA, 201 bp, Saccharomyces pastorianus
atgagctcgcaatttccttcgtccccctacaggacagtggatccgtactctccaccaaattacaaacagcagcctaattgtccctcatccaattatgagaaagctggtaaaactgcgtcagaatcaattggaaatttcgggaaaggagattatcaactcatttccttcttccagtataggaagggtttcgtctcccgttag

SEQ ID NO: 82395 - DNA, 153 bp, Saccharomyces pastorianus
atgaaagtagagaaagagtttccattgatgaattttagtttacgtcgactgccgctgttcattctcatcaaaacacgaaagcaaaccatagagatgaacttaagaaaaaagggccacgggatttttttttcgcgttttggcgttttcatataa

SEQ ID NO: 82396 - DNA, 585 bp, Saccharomyces pastorianus
atgtcatccacagcagtaccacgacctaaaccttgggagaccagtgcttcgttagaggagccacagcgtaatgctcagtctttaagtgcgatgatgacctcgaatcagcaggattccaggccaactgaagaaagcaataacagtaatagtgcaagtgagtctgctcccgaagttttgccgcggcctgcggcacttaactcctctggtacctacggcgaatcgaatacaataccgggaatatacggtaatagcaattatgggataccctatgataataatccgtatagtatgaactctatatacggaaacagcatagggaggtatggctatggaggatcgtactatggcaacaattatggatcgttttatggaggagggtacggtgcaggagcgggatatggaatgaataatggaagtggactaggtgagtcgacgaaggccacctttcagttaatagaaagtttgataggcgctgttactggatttgcacaaatgctggaatctacttatatggccacacacaactcgttattcaccatgatatccgtcgcagaacagtttggtaattggaaggaaatgctaggt

SEQ ID NO: 82397 - DNA, 174 bp, Saccharomyces pastorianus
atggttcttttacacaaaagcacacatatatttcctaccgattttgcctctgtttcacgcgccttttttaatagataccccaatccatactccccccatgtactatccatagacacaatatcaaggaacgttgatcaagaaggaatttgcgcacaacgaggctgggatcctcta

SEQ ID NO: 82398 - DNA, 1131 bp, Saccharomyces pastorianus
atgtcagaagaggataaagcgaaaaaattagagaatttattgaagttattacagttgaataatggcgatacttcaaaattcactcaagaacagaaaaaagctatgaaagaccacaaattctggagaacgcaaccggtcaaagatttcgatgaaaaggtggtggaagaaggccccattgataagccaaagacaccggaagatatacctgacaagccactacctttattgtctagcttcgaatggtgtagtattgatgtggacaacaaaaaacagcttgaagatgttttcgttctactaaatgaaaactacgtggaagaccgcgatgcaggcttcagatttaactataccaaagaattcttcaattgggctttaaagagtccaggttggaagaaggattggcatattggtgttcgcgttaaagaaacacagaaattagttgcctttatctcagccataccagtaacacttggtgttagaggtaaacaagtgcctagtgtagaaatcaatttcctgtgcgttcacaaacagctaagatcgaagagattaacacctgttctaattaaagaaattacgagacgagtgaacaaatgtgacatctggcatgcattgtacacggcaggtattgttttgccagcacctgtgagtacgtgtcgttatactcatcgtcccttgaattggaagaaactttatgaagtagatttcacagggttaccagatgggcacacagaggaggatatgattgctgagaatgcgttaccggccaaaacaaagacagcgggattgagaaaattaaagaaggaagatattgaccaagtttttgagttgttcaaaagatatcaatccaggttcgaactaattcaaattttcacaaaagaagaattcgaacataatttcattggtgaagaatcgttaccattggataaacaagtaattttctcatatgtagtcgaacagcccgatggaaaaattacagacttcttctcattttactcattgccattcacaatcctaaataacacaaaatataaggacctaggcatcgggtacttgtattattatgccaccgatgcagatttccaattcaaagacaggttagatccacaagctactcaggctttgagaacaagatag

SEQ ID NO: 82399 - DNA, 1047 bp, Saccharomyces pastorianus
atgaccgtgctatatgctccttcgggtgctactcagctatatttccatctgctaaggaagtcgccacacaacaggctagttgtctctcaccaaacacgtcgtcacctcatggggttcgttaggaacgcccttggattggatcctcctccttctccagaagatcctactccggagaacagattccatccatgggatcagtctccctcagtggacttgcgtgaaagggccgccaagattagaacgctagcacactgccctgttaccggcaaagatattaactacacttgtcctctgtcaggaattccgactcatcactcacgagaggcttgggagatggataaagcatatcacgattctaaaaaatatgaaatcctgaaaaaagttaatatttatgagcatgacttaagaagcggtagacccttcccggagtttggttttccccaacagcaaggctacgacaaggccgttaacctaacaaactgggatttgtttttctacacaagatcattctattccatggatacagagttccaattagccgcagtcacaaagatgctaagctatccaattacgattgggtctttgctgcacaaattttccccgtattcattgaacccaaaggggcctatcaccttagaaggtctaaaatctctggctgctctcaggtatactttatatccgttggagaatagatctttaccaaccacaactaagaaccgtgctatgagaattttcatcctaggtgcacgtgctgaagctcaattgccgggccacgtttggaaacagctccagtttcttttcccagagcagagttttgaaatacatttcattggacccgaatgcctgtataaaagggataaacaggagtacgtcaagtctactacgccggtagtacaaagagtagacgagactctgaaattcatttatcgtacaaactttttcgaagtattccatgaggctcaagattttttcccatacgatccatacatggatgtcttttttactttccatccaggctacgcatctccagaatctcacggttcatga

SEQ ID NO: 82400 - DNA, 1032 bp, Saccharomyces pastorianus
atgatgcttgaagggtatacggtacaacctccacagtccactttgataggtgacattgaaatccaggacgaaaatgcaaaccaagaagttaagaacgtactttaccaaggagttcaaaagggtataaaaaggctagaaaaaagacaaaggagggttgcattaggtgatgtaacctctcaaaaggcaaacaaaatacacaatgctatacataataaattccatcagacgaagaacaattttgaaatagagaacatacgctcatcggccttggtaaaagaacaacaacgagacgtaagggatgaagatagcgactattttttaattgatagttctgaaggctcttctactgatgacgaacaagttaatgaagatgctattgatgatttgttaagtcgaagagtaaatgatcagcagattcaagccgatgaagtgtatgaagatttcgatggagaaatgcaagatgtcattgaagaggatgttgatagtcaaattgaaccactatcaccaataaacaacgatgaaattcagactgagctggacagggcgtttgaaaaatattttcggtcggttcccaatccgctggatgatgatacccatgatgttgtgatggttgtggagtacgcttccgacatattctattacttgagagaacttgaagtgaaatataggcctaatccctactatatgcaaaatcaagtagagcttacatggccgttcagacgaactatgatagattggctagttcaactgcattttagatttcaacttttaccagaaacgctatacctgacgattaatatagtggatagatttctgtcaaagaagaccgttactttgaacaggtttcaattggttggtgtatcggctttatttattgctgccaagtttgaagagattaactggcccactttggatgatctagtttacatgctggaaaatacatacactagagatgaccttattagagcggaacagtattttatagatactctgcaatctgaaataggttggcaaggaccatgccatttttaa

SEQ ID NO: 82401 - DNA, 1248 bp, Saccharomyces pastorianus
atggttagaacccgtgtattattctgcttatttatatctttttttgctacggttcaatcgagtgctacacttattagcacttcatgtatttcccaagctgcgctataccaatttggatgttctagtaaatctaaaagttgctactgtaaaaacatcaattggctgggttcagtgacagcatgtgcctatgagaattccaaatctaacaaaacactagacagcgccttaatgaagttagcatcccaatgttcaagcatcaaagtttatactttagaggacatgaagaatatttatttaaatgcgtcaaattatttgagagcacctgagaaaagtgataaaaaaaccgtggtcagtcaaccgctcatggcgaacgagacagcgtatcattattattatgaggaaaattatggtatccatcttaacctaatgcgctctcaatggtgcgcttggggtctcgtcttcttctgggtggctgtgcttactgcagccactatcttgaacattctgaaaagggtgtttggtaagaacatcatggcaaactccgtcaaaaaatcacttatttatccttctgtttacaaagattataatgaacgaactttttatttatggaagcgtctaccatttaattttacaactcgaggcaagggtctcgtcgtattaatttttgttattttgactatattatctctcagttttggtcataatattaaacttccacacccatatgataggcccagatggagaagaagtatggcctttgtgagtcgtagagcagacttgatggccattgcacttttcccagtagtctatctattcggaataagaaataatcccttcatccctaacaggctttccttttctacatttaatttctatcataaatggtctgcctacgtttgtttcatgttggccgttgtacactcaattgtcatgaccgcctcgggagtgaaaagaggtgtgtttcaaagtttggttaggaaattttactttaggtggggtatagtggcaacgatattaatgtctattattattttccaaagtgaaaaagtatttagaaatagagggtatgagatattccttcttattcataaagcgatgaatattatgttcattattgccatgtactaccattgtcacaccctgggctggatgggttggattcggtcaatggctggtattttatgctttgatagattctgcaggattgttagcataatcatgaatggtggcttgaaaactgctacttag

SEQ ID NO: 82402 - DNA, 123 bp, Saccharomyces pastorianus
atgactagacctaaaactttttttgatatttctattggaggtaaaccccaaggccgtatagtttttgagttgtacaatgacatagtgcctaaaacggctgaaaattttttggaagttgtgtga

SEQ ID NO: 82403 - DNA, 168 bp, Saccharomyces pastorianus
atgtttaacagtgaaattatcatcctcgaattttacaccgtatatgctctcaccgccagtaccattaaaattggtaaaatcaccaaattgacacatgaagtctttgatcactctgtggagaatggaacccttgtacgacaatggtacatcagggttagtctttgccat

SEQ ID NO: 82404 - DNA, 201 bp, Saccharomyces pastorianus
atgagctattttgcatttttttatggttactacaatcaaatcacctttcgtttacaatatcatcatcagtatgtgactttgccttattctactctgaattttgctttatcgttggttgaaaagaattacatgttatttttttacttatatatgcatatttttatagaaaaacacaatcaatatttttttttactggtataa

SEQ ID NO: 82405 - DNA, 2199 bp, Saccharomyces pastorianus
atgtacaaacatgaaattggactgtgtttacagccctattcagccaagaagaagaaggattcttcgtcgtcaaaatttgcatcagcggtccacgatagggtaggcaagaaaaatctgagtgacaatgccatcatgttacaacaacaacaacagcaacttcatcatcaacaagaacagcaatttcgtcaacaacagcaagttcagttacagcagcaactgttgccacatgttggtactgatgaacaaagcaattcccctaatagcgttcctccatccgtatccaataatatggagaatcttttgttaccgcacctattagcgagtttagtgaataacaccagtaacagtaccaacagcagtgcaaatggagctgaagcgcataataatataacacaaacagctcccagttcaatgataaacaacaaccacccaaacatggccctaccagggaattcgccattgagtataccgataacacctagttttcaatcaacggccatgaatttatcaagtagccttaacggcttactctcgcctggtaggctaaattcggtgacgaatggattgcagcagccacaacttcaacaacaaaatcagcaaattccacaacaacaaggaacacagtcccccttcagcaatattcccttcgaccagctagcgcaattgaacaagatgggcttgaacttcaatatgaagagcttcaatacattatttccatacggtgctgcaaatggaatggcctctgagtttcaagagttatttggcctcggaaagtttgctacatccaataacagagcaatcaaagttagcacagcagaggaggcactcgcaaatatgcaacaggaacaggaggacaaaaacaagcaatttacgaagaacccattggataatactaagacggatgctgttaattcgggcaataacccccttaacggaaacgaaaataaagttactgcttctgatatactatctcataacaaaaacttgataatcgacaataccggtctcacaatcagtcccccacacacgttgtccaaaccttccatagatcaaaacattgcgtccccttcaacgggagtatccaatgtaacctctacaaagtcattgttatctataccggacaacaggaccgctttgggaaattctcctactttgaagacgtccccaatgggtgacctgttatccaactcggaggcattgtctccacgttcatcaaattctcacactcaacaacaatcttctccccattcaaacgcttcatcagcctcacgactagtccctgaattagtcgggctgtctagaaaatcaaatttgaatttgatagatctaaaactttttcatcactattgtactgacgtatggcataccataaccgaagcaggcatttctggtcctgaagtatggagcacttatattccggatttggcttttcattctcccttcttgatgcatacaattttggcttttagcgccactcatttgtccagaactgaagccggcttggataactacgtgtctagtcatcgtttagaagcgttgagactgttaagagaggctgtgctcgaaatttcagatgataacacagatgctttggtggctagtgctctaatattaatcctagattcattggcaaatgcttcaagcagctcaccaacggcatggattttccatgttaaaggcgccgtaactatactaactgctgtatggcccctgtcggagacatccaagttttataacttaatttctgttgacttgagtgatttggatgaggctgtaatcaaccaaagtaatcataataatgataatgacaatagcaataatggtgatggaaataacaataatacgatatcggaactcgtatgctttgacgaaagtatagcagatttatatcccgtagaaattgattcaccgtacttgataactttagcatatttggacaaactgcatcgcgaaaaaaatcaattagattttatgttgagagtcttctcatttcctgctcttttggataggacttttttagcattattaatgacaggcgacctaggggccatgagaataatgaggtcttactatacattattgagaggttataccacagaaataaaggacaagtgtggttcttggatagcgtatcacaggttttaccacaggatgttgatgagtataatggaggtggtggtatgcatggggatcctctag

SEQ ID NO: 82406 - DNA, 291 bp, Saccharomyces pastorianus
atgacatccgatgatgggaatgctggacaagaaagagagaagaatgctgaactgattgaggttgggggcaagaaagtgagcaagacttcgacagggaaacggaagtatcataacaagtccaagaccggttgcgacaattgtaaaagaagaagagtaaaatgtgatgaaggcaaaccattttgcaagaaatgtacaaacatgaaattggactgtgtttacagccctattcagccaagaagaagaaggattcttcgtcgtcaaaatttgcatcagcggtccacgatagggtag

SEQ ID NO: 82407 - DNA, 537 bp, Saccharomyces pastorianus
atgaaggactatgtccacttatttaaaacgttcatgaaaaaatttcatgcacaaagtcacaatttaagatttgtcgaaagcttcagccccatgtcgaggtgtattcgccagtccgtatgcacaaacttcaatgtctgtaggcgacaatgctttagcacttatgcctctgctctcaaggaaatgacacatcctataaaaccatcagcgcaaacgctcagacatctacaattcactcaaagaataccttttcaaaaaggattggaaatacaggagacattagttagggcaaatttggacatcaaagacattcaatcgaagattgagagaaaattaatacaattggatgaagaatataagggcactgcaacaataaatgataacgaaaaaagaatattagacaaggttatggcaatgaaacctaatccgataatattaacgtttgagtttgagccaacttatacaggtgggaagaggattaagaaaactatgacgccagatcaggacctgcaggcatgcaagcttgcactgccgtcgttt

SEQ ID NO: 82408 - DNA, 99 bp, Saccharomyces pastorianus
atgacatcatatatcgaaaggctcaagtcggcagcatcgtatcttgatacagttccagatgagcatcacgatttcagaaacccaccgccaaggttgtaa

SEQ ID NO: 82409 - DNA, 4308 bp, Saccharomyces pastorianus
atgtctgcagtaggtgcgctattagcaagggagtacaatgtgactgccgaaaaatgcgactttttcctagaaaatggttcttttgattcagtgatagcagcattgccagcgctaaatcaggaacaagagactgtaactcaaaaagttagcaagaacggaaaagaattaatcaacgttgcctcggtaaatattgaaataccagagcgaataagtctttccaacaacggcaggcagttatttaaatttattgttgatatagagatcttaccttgtgaaaatgataacgaggcaacacttgttgtgtcgtcagattccgtatccttatttcaaattggatttaaaatggagaacaattcaaaaatcgctgttgacaaacaacttccgctgatcttggatatatgtgctcataaaaaccaagaaagggccctacgaaatcagttagaaaatcgtaaatctttagaacgcaaaccatcaagaaagagaagaaaaaaaaattcaaatgttaacgatcctgaaaaattactaaaaagtcgtatacacgaattatctttgtcctacaaagattttgaatgctctccagtcgtattccgatacaatgattcctctttaacatgggttttatcttttaatttaaagttgaagtttttaaataataaattcaaccggttttccgtggaggctaaccaaatactggacttgacgttctctaatagggacgagaacgaatttgagcgatatcacaagcacggccatatccattcaaacttcattcaaaaacaatttatttctcaaatcttggaatatagtgataggctatcaaagatcaaaccgttcttaccccaatctataccagacctaaaagttaacctcttaccatttcaaagagagagcgttgagtggatgctaattaaagaagggcatggtaattctcttagtgatacacctacagtcatcgacgaagtagggcttagagattttatgaacgagtactatgcatacggttacgagctcattgcacgcagccctgacgaggtagggccatcattgttatggaacaaattaacaggatatattctaactacagaagatgctgcacatttgtacaaccaatataggaaggaaaggttaagcggcgactacccagtttgtgcaaagggggtgttagcagaagagatggggttgggcaaaactattgaaattttatcactaatactcttaaatagaaggaaattgaaggactcagaggcaacatttattgacgatgaaaatagaacaatcacgaagacaaagacgactttgattatctgtcccaatgctatcttaaaacaatggctcgaagaaatcgaattacacgcaaattccttaaaatggtatacctatagaggatataatgagataatgaaagattgcaaaactgtggacgaagctgttcaacaattgtgccaatacgatattatagttacatcatataacattattgccacggaggtccatcatgctgagtttaaccgtagtatcagatcgagaaggttgaaaagcccaaagtatgactattcttcaccgttagctttgatgcagttttatagaatcattctggatgaagttcaaatgctacgtagttcatcaacatattctgcaaaatgcacgagtttacttcatagaatacacacttggggtgtttccgggactccaatacagaacatttacaactttaggatgatcatgtcttatttaaagctgcatccattttgtgatgaggtagactttattcggacacttcaagaagaaattaaactaagaaatgaggctaaggattacactagtactgattttgtatgccaattaaagggcgttcggttttctatcaaggattgtatgaacattttttacaggtatgatctttgcataaggcattcgaaagccaatgttgcgtctcagattcatattccgcggcaacacaacttcatcattcccctggagtttgcgcctatcgagtgggacaactatttaaatctttggaacaattttttagagttgagtggctataattcggatggcagtggatcaccccgtgtaagcaatgcctttttaaacgaatggttgtctaggctgcgatatatatgttgccatgcattatttccagaaattttaagtacccgacagaagcgccttcatgggcacttgtcaagaatttcaaatatagacgatatcttaatatccatgcgaatggatgcatttgacagtttaattggctattacagagagagattccatttatcgatcaagcaggcacagtatgaacttgaaatttccaatactccggccaaagcccttgaatcatttatcaaaatcagagatgatttgatgatacacatacgccaaaaattcaacgtcgaggatccgtttgataagtcgttaaacctcagtgaagatggggacgaacatatggacgagaggtttggtgagaaggaaacatcttcaagcgacgaaagcgatagagaaataaatggtgctaaaaaccatgataatcacaacaatgacggaatgttatccaaccacctgaagaagaaaggattacgtgctatgatgaatttactgcatgattgctacttcttcctcggttctgtttactataacttgggcactcgtaagctagaagaggcggacgacaagcatcgaaaagagaagactgaagaagtggtgtattctgatgtttttccaaaaaatgagttagaggaaattgaagagaatagacttttagaacaagaaaattatgcgaatgcggaaattttgaggaagtcgatcctctcctctgaggctagaaaagttgatatgactattaaaatggccagaactaagtttgctcctatgacgagcaatatacctttgcgattaatcaatattgaatttgaccacaaaaatgactactcatctaatttagcagtatctcgttgtttcaagtctttgagtaagttgatagaagggttgaatgaacaaactaaaaacttcaacgagttattggatgagttactcattactatctatgaacctgtccacaggacagaggacgatgatagcactaataaaattatcggtaatgaagaatattcaacatcgattgacagtcaagataagatattcagtcttcttggttgcttggagataattttacagaatagggacaatattttaacttcagaatcagaagttaaaattccgaagcatttggtaccggaaggttcaataatttcaaaatatcaaaagcagttattgaacagcttgcgcttgatttcaggaacacctttacgaactgtttttgatgaactgaagaacagcaggatagtaagacggatatcctcaagcaatgaaagtgaatccaccattcaaaattttgaggactacttacttcagtacgaagttgaaagtaaaagcctgttcaagtacaataaacaggtaagagaatctttgaaaatcctgggatcgatttataatgccaagacggaatattatagtcaattacagaggatttccgattcattggtgtccttgcactctttgagtgctccacaactcagccatctaataagaactatcaataagtcattgggcggtacactagatgcaaaaatcaataacattgaatcacggctgatatatttaagaaatttgtccagattgaaagacacattaaacgataatcaaatattgagctgctctatctgtttgggagaagttgaaataggtgctatcattaagtgtggacattatttttgcaagagttgtatccttacgtggctacgagcccatagtaaatgccctatatgcaaaggtttctgtagtatatcggaagtctataactttaagttcaagaactcaacggagaagagggaaaaagaaattcaagagccacaaagagagggcgccgattcgtctcaagataattcaaatgaaaactcgattatatccaatatgagtgaagtagaaaaattattcggaaataaatacgagcaattccatcaaattaatgaagtccatcaaattcacataaaggaaagttttggtgctaagattgatttcgtcatcaagttaatatcttacctgaggctaaaaagtgagcaggaaaacgctgatccgccacaagttattctatactctcaaaagacagaatatttaaaggtcattggtaaggtattaaagttgtatcacattgaacacttggcatgtctatctaatacagccaatgttggcgaaactataaataacttcatacgccagccttccgtcacttgcctacttttgaatgtgtaa

SEQ ID NO: 82410 - DNA, 651 bp, Saccharomyces pastorianus
atgaggtttttgaggggatttgtattttctttggctttcactctatataaagtaactgccacggcagaaataggatctgaaattaatgtggaaaatgaggcaccacctgatggtttatcctgggaggagtggcatatggaccatgagcatcagctaaaagattacactccagagactttcttcgcgttacatgatatcaagaagaaaggatttttagatgaaaacgatattctatctctctacgggttgaaccgtgaagaaattgtgggggctggtgatggtatgggacaacacgatgaatctgagaaaattgacaatgaaatggctaagcgtgttgttagccttattatgaggttattggatgttgatgataataccaaaatcaccaaggaggaatatctacaatttgctaagagaggaaacaagttccctgaccttggcgttggtgtaggtcaccactccgattttgaactagaatatgaaattcatcactggaataagtttcataaggacaaagatccagacgttaaagtcgttcacaaagaagacatagaacatgaattgcttcatcatgaacatgaaattgaacatgaagaagaaatcaaagaggcgcttctagagctatgtaatactgatgacaatagagtctaa

SEQ ID NO: 82411 - DNA, 1617 bp, Saccharomyces pastorianus
atgtcgcataccccttataattcatctgtgccttccattgcatccatgacccagtcttcggtctcaagaaatcctaacatgcatacagcaactacgcctggtgccaacaccagctctaactctccacccttgcacatgtcttcagattcgtccaagatcaagaggaagcgtaacagaattccgctcagttgcaccatttgtcggaaaaggaaagtcaaatgtgacaaactcagaccacactgccagcagtgcactaaaactggggtagcccatctctgccactacatggagcagacctgggcagaagaggcagagaaagaattgctgaaggacaacgaattaaagaagcttagggagcgcgtaaaatctttagaaaagactctttctaaggtgcactcttctccttcgtctaactctttgaaaagttacaacactcccgagagcagcaacctgtttatgggtaacgatgaacacaccacccttgttaatgcaaatacaggctctgcttcctctgcctcgcatatgcatcagcaacaacagcaacagcagcaacaggaacaacaacaagacttttccagaagtgcgaacgccaacgcgaattcttcgtccctttctatctcaaataaatatgacaacgatgagctggacttaactaaggactttgatcttttgcatatcaagagtaacggaaccatccacttaggtgccacccactggttgtctatcatgaaaggtgacccgtacctaaaacttttgtggggtcatatcttcgctatgagggaaaagttaaatgaatggtactaccaaaaaaattcgtactctaagctgaagtcaagcaaatgtcccatcaatcacgcgcaagcgccgccttctgccgctgccgccgctaccagaaaatgtcctgttgatcactccgcgttttcgtctggcatggtggccccaaaggaggagactccccttcctaggaaatgtccagttgaccacaccatgttctcttcgggaatgattcctcccagagaggacacttcgtcccagaagaggtgtcccgttgaccacaccatgtattccgcaggaatgatgccgcccaaggacgagacgccttccccattttccactaaagctatgatagaccataacaagcatacaatgaatccgcctcagtcaaaatgtcctgtggaccatagaaactatatgaaggattatccctctgacatggcaaattcttcttcgaacccggcaagtcgttgccccattgaccattcaagcatgaaaaatacagcggccttaccagcttcaacgcacaataccatcccacaccaccaaccacagtccggatcccatgctcgttcgcatcccgcacaaaacaggaaacacgattcctacatgacagaatctgaagtcctcgcaacactttgtgagatgttgccaccaaagcgcgttatcgcattattcatcgagaaattcttcaaacatttataccctgccattccaatcttagatgaacagaatttcaaaaatcacgtgaatcaaatgctttcattgtcttcgatgaatcccacagttaacaactttggtatgagcatgccatcttcatctacacggggatcctctagagtc

SEQ ID NO: 82412 - DNA, 1746 bp, Saccharomyces pastorianus
atgactttgaaaccttcaaagagacgtaaaggcaggtctcgccattccaggaagaagcaaataacgtcagcgatactgactgaggaaggaataatgatcaaggcaaaaccatcaagtccttacacatacgcaagtagaatggcagataaacgaagtcgcagcagcattgacaacatcagtagaactagctttcaaagcaacagtgataacaacagtatatttgaaacggcttcactaattagctgtgttacctgtttaagcgatactgatacaatagacagatcggaaacatcgacaacggatacaagtaaagatgatctttctgctaatccaaaacttcattatccttcggtgaatggtcaattgccagcaaacaccgttatcccctatggacgaattctggatgccagatacattgaaaaggaacctctgcattattatgatgccaattcatcacccagttcacctttaagcagctcaatgagtaacattagtgaaaagtgtgatcttgatgaattagagtcctcccaaaaaaaagaaaggaagggcaactcgctatcgcgaggaagtaacagtagtagtagcctcctgacttccagatctccttttacgaaactagtagaggttatatttgctaggccaagacggcatgacgttgtacccaaaagggtttcattgtatattgactataaaccccattcatcttctcacttaaaagaagaagatgacttggttgaggagattttaaagagaagctacaaaaacactagaaggaacaaatccatatttgtgatcattaatccgtttggtggtaaaggtaaggcgaaaaaactgtttatgacaaaggcaaagccgttactattagcaagtcggtgttccatagaagtggtttatacaaaataccctggtcatgctatagagatcgcgcgggaaatggatattgacaaatatgacactattgcttgcgcttcgggagatggcattcctcatgaggtgatcaatgggttataccaaaggcctgatcatgtcaaagcattcaacaatatcgccattacagaaattccgtgcggatcaggtaacgcaatgagcgtatcctgccactggacaaacaatccttcgtactcaactttatgcttaattaaatcgatagagactagaattgatttgatgtgttgttcgcagccttcttatgcaagagagcacccaaagttatcatttttaagtcaaacatatggtctcattgcagaaactgacataaacactgaatttattagatggatgggacctgcaaggtttgaattgggtgtagccttcaatatcatacaaaaaaaaaaatatccttgtgagatatatgtaaagtatgctgccaaatcaaaaaacgagttaaaaaatcattacctggaacacaaaaataaagggtcgttagaattccagcatattactatgaacaaagataacgaggattgtgataattacaattacgaaaatgaatacgaaaccgaaaacgaagatgaagatgaagatgcggatgcggatgacgaagactcccacttgatatctcgtgatctggcagattctagtgctgatcaaattaaagaggaagatttcaaaataaaatatccattagatgaaggtatccctagtgactgggaaagattggatcctaatatttcgaacaacctaagtatcttctatacgggtaaaatgcgacctgcaggcatgcaagctggcactgccgtctttaca

SEQ ID NO: 82413 - DNA, 153 bp, Saccharomyces pastorianus
atgaaagaggtgatgaaaatgttatattgtgcattgttggtaacaaaagtgatttatcagatgaaaggcaaatctcaaccgaagagggagagaaaaaagcaaaactattgggtgctaaaatctttatggaaacgtccacaaggcaggctataa

SEQ ID NO: 82414 - DNA, 522 bp, Saccharomyces pastorianus
  modified_base (509)..(509): a, c, g, t, unknown, or other
atgagcagatccgggaaatcattgacaaagtacaaaattgtttttttgggagaacagggtgttggaaaaacatcgctgatcactagatttatgtatgatacgttcgatgatcattaccaagccacgattggtatagattttctttccaagaccatgtatttggatgataagacaattagattacagttatgggatacagcaggtcaggaaagatttagatcattaataccttcatatatcagagattcgagagttgctattatcgtttacgacattacgaagagaaaatcatttgaatatattgataaatggatagaagacgttaaaaatgaaagaggtgatgaaaatgttatattgtgcattgttggtaacaaaagtgatttatcagatgaaaggcaaatctcaaccgaagagggagagaaaaaagcaaaactattgggtgctaaaatctttatggaaacgtccacaaggcaggctataatgtcaagctttattcaaaaagatgccanggggatcctctag

SEQ ID NO: 82415 - DNA, 1905 bp, Saccharomyces pastorianus
atgccttacagccatggtaagaagcttaaaccgtctttgaaactcgcaaaaacaatctccacttcttcttttgtttcctcaacaacctctaattcattttcaccactagaagactctacatctgcatcttcgtcgacatcatcttcatcatcagggaaatcggtaaggtttgctgcacatttatacacagtcaaaaagttcaacacaaaattggcgcctatctcgatatcagaaaaagccgcttcaaatcttacaagaaatttacataacaatgccattccactaacgttccccttcattggaggtgaagatcatcgttatagtttagacattttagattacagtgatttagaatatgacaataaggatgttgagtatgacaacgagagtgacgtagaggataatgcaatgcttatgcatgatcgtagcatgttcatggaaaaggagattctctgctttggtgaagaggagacattcgatatggcagattggaaactggtcagtaataatttgaatccattcaaaagtgactgtaaagtggacgttactgagttagaagacaagattttcaaatacttaaatggacaaaatataaaggttcattcattagaactatctgatcctgtaagctacgaggatatttgtagcaataattttggtaactgtcaaatctggggccttatatttgtcaataatttgaacttcgagaaaaaaatagagataaaatttactttaaataactgggcagacattcattatattaatgcacactaccacaagtctgtcacccctcatgttgacgaattcaaatttattattgatatatctgcgttgaagttaaatctaatatcaaaaaacttgatttacgctaacttttttgaaaggaaaactacttgtctcctgaatttgcagttctgttgtcgttatgatgtaaatggtttcgaatatagatcattttacgataataatgactataaaaactatgaaataacgatctctttgtcagcaataaatttaaatcgtgcggtttcgaattcatcgatatttaattccaatcttgggccttccaaaatgagggctagcaatgcagaggttactatgtcgaaaaataataaaaattctaaaaagcctctcagaaaattcattaaagatacagattactacaacgactccccgttaaagcacaaattttatcaatcgtttgaaacaaaagcggcttgtaaaaccgaacctgtaccccaaactttcaaagctgaaacaattgattgtgaaattgaaccatttaattatttctttgaaccgcctgattctcaaactaatgaggacatgtccgatagctcatatgacttatcgctacaagattttaactattgggaatttagtaaccacggactagggaaagcgctggctgactcagatatcttacaatttaaaaattatccgaaaccagagccttttagcaggcctcccataatagatgacacattcacattaaataccgacgataggaccttaggtttaaaaacagaaaagcttgaagataatttggccaaagagtggaaaagcgctaagacaaggaccacgttaaacgagacgccattacacgatgatgagcatagaacttccttcacctacaccacttggaataattctaccgatacattgatgaaaaaacaagaggagcgaccagtagaatcagcctcttgctctcagttatccattgcaaccataaaggcggaagaagatttactataccaagattatatcaacagcgggagggaaagctcatctccggaaatttctcccttgaataacacaacctcattaccattttttccaggtgataatatgagtgacagctcaggagaatatgaggagagatctctcttagccctaataaaattc

SEQ ID NO: 82416 - DNA, 171 bp, Saccharomyces pastorianus
atgcgattcaggtctcaacgtgcagtgtgcaggagcaggaactattcaatgtattgttgttccagggtttttgttcgcaacccacgtcttgaccgacggtacccgcaggtgaaaattttagcaaagttacactttttttttcattttttttttcttttctcctccatctaa

SEQ ID NO: 82417 - DNA, 222 bp, Saccharomyces pastorianus
atgtgccatcatcatgttcgatgtacttccagaattacttacaagaacgttccaaactggcacagggatttagtccgtgtttgtgaaaacatcccaattgtcttgtgtggtaacaaggtcgatgtcaaagaaagacaggtcaaggccaagactatcactttccacagaaagaaaaacttgcaattactacgatatttctgccaagtccaactactactttga

SEQ ID NO: 82418 - DNA, 330 bp, Saccharomyces pastorianus
atgtctgccccagctgctaacggtgaagttccaacattcaaactagttcttgtcggtgatggtggtactggtaagaccacttttgtcaagagacatttgaccggtgaattcgaaaagaagtacatcgccaccattggtgtcgaagtgcatcctttatccttttacaccaactttggtgaaattaaatttgatgtctgggatactgccggccaagaaaaattcggtggtttaagagacggttactacattaacgcccaatgtgccatcatcatgttcgatgtacttccagaattacttacaagaacgttccaaactggcacagggatttag

SEQ ID NO: 82419 - DNA, 246 bp, Saccharomyces pastorianus
atgggcagttctcgcgttattcgtcatcaggcaagtaattatgcccaatcagcttaccaatgtcacataaaggaaccactattatccctttttggtaatgaaaaacaacactcttccggtacgacagccgctgcggcaattacttttccccaaaagctcataatcgatcaattaacgcgtaaacgaaaaacaaaaaaaaaattacgtaaattaggtcttcatacgagcgtttttttttttgtttga

SEQ ID NO: 82420 - DNA, 1542 bp, Saccharomyces pastorianus
atgctgttgtgtaatagaaaagtccccaagactttaaatacctgttttatactgcatatattcactctgttaacactgggtgtgttagtgtcgggaatgccgtcaaaaatggtatcattcgcctctcaggagactttgcagagaataaataatctccttcgagggtctgccaatcgagatgttgacattattgcagaatatttgaaaaaagacgacgatgatgatggcggcgataaggatcaccataacatcgatattgaccctttacctcgccgtcctagtttaacgcctgataggcaacttctaaaagtcggtttgcatggtgctataagttcagatttagaagtctgtagtaatttgactataaatgaggtactcctaaaatttcccggttctaacgctgcagacgctgcagtaacacaagctctttgtaagggtatggtgaatttttttaatagtgggattggaggtggtggctacgtagttttttctggcaaagacgatgaagatcgtctatccattgattttagagaaaaagcacccatggattcacataagttcatgttcgaaaactgctctctatgctcaaaaatagggggtcttgctgtcggtgttccaggtgaattgatgggtctctatcgcctctttaaagaaagaggtagcggccaagttgattggcgtgatctaattgaaccagtcgcaaagctgggaagcgtgggttggcaaataggcgaagcactcggtgccactttagaactttatgaggatgttttcctgacgttgaaggaagattggtcgtttgtattgaattctacccatgacggtgttttgaaagaaggcgattggatcaagaggcgggcactatctaacatgctaatggaactggctaaaaatggttccgtggccccattttatgaccccgatcactggattgcaaaatccatgattgatactgtcgcaaaatacaatggaataatgaacttgcaggatgtttcatcgtatgatgttcatgttactaaaccactatccatgaaaatcaggaagggcgccaatttcatccctgataacgatatgaccgtattaacaagtagcggctcaagttccggggctgcactacttgcggcgttaaggataatggataatttccagaatcaagaagggggcgattatgaaaaagaaactacctatcatttgcttgaaagcatgaaatggatggcaagcgcaagaagcaggttaggcgattttgaaggcgaagcattgcctaagcatatagaagaggtattggatccagaatgggctttgaaagcagtgaaatcaatcaaaagaaactctcaagacggaaattttaaaactttagaaagctggacgctttatgatccggcatatgatatcaataacccgcatggaactgaccacttcagtatagtagattcacatgggaatgctgtttccttgacaaccaccatcaacctgttgttcggttccttagtccacgacccaaaaaccggggtgatcttcactaatgaaatggacgatttcgct

SEQ ID NO: 82421 - DNA, 354 bp, Saccharomyces pastorianus
atggggggtaatagaattgtatctatgtatctgacgaccctgtattacacgaaggaaatagtagatgaaaagacaagagagcaagaaaaaggaaaaactttctttctaacagacgctttacttaaccttatatatatcttatttttttcatcgagcgtgttcaattggacaaggtgccaccttttcgacacttcggttattatgttacacagttttcatgaggatggcgccttgactaacttaattagtcatttgccaaccaccacagttccccaatatcgacagcttcacgtgccatttgccatttgcgatcatgtgaccgaaagagaaaaagcaaaaaataatgagagctaa

SEQ ID NO: 82422 - DNA, 84 bp, Saccharomyces pastorianus
atgccatctcatttcgatactgttcaactacacgccggccaagagaacactggtgacaatgctcacagatacagagctgtacca

SEQ ID NO: 82423 - DNA, 1695 bp, Saccharomyces pastorianus
atgtccgatactaacacgtctattcccaatacaagttctgcaagggaggcaggcaatgcttcacaaactccatcgatcagctcttcatctaacacttccactaccactaacacagaatcatcctcagcttctctttcttcttccccctcgacaagtgagttgaccagcattcgtccaattggaatagtagtcgctgcttatgactttaattatcccattaaaaaagacagttcttcgcaacttttgtctgtacaacaaggggaaaccatttatatacttaacaaaaactcatctgggtggtgggatggattagttattgacgacagtaatgggaaagttaacagaggctggtttcctcaaaacttcggtagacctttaagagacagtcatctcagaaagcacagtcatccgatgaaaaaatatagttccagtaagagctcaaggcgcagcagcttaaatagcttgggcaatagtgcatatttacatgtgcctagaaatccgagcaagagcaggagggggagttctactttatcagcgtctttatcaaatgcccacaatgcagaaacaagttccggccacaataacaccgtatcgatgaataattctcccttttcagcgccaaacgatgcttcccacataacccctcaatcttcgaactttaattccaatgctagtctatcccaggatatgacaaagagtgcagatggctcatctgagatgaatacaaacgcaattatgaataacaatgaaacaaatttacaaacttctggtgagaaagcaggtcccccactagtagcagaagaaacaattaagatattaccgttggaagagatagaaatgattattaatggtatacattcgaacattgcttcgacttggtcccccataccactgataacgaaaacatccgattacaagttggtatactataacaaagaccttgatatatactgttcagaattacccttgatttctaactcaattatggaatccgatgacatttgtgacagcgaaccaaaattcccgcccaatgatcatcttgttaacctatacactagagatctgaggaaaaatgcgaatattgaggacagttctacgagatcgaagcaatcggaaagtgaacaaaatagatcaagccttctaatggaaaaacaggattcaaaagaaactgatggaaataataacagtattaatgatgatgataataataacgaaaataacaaaaacgaattcaatgaggctggtccttcatcattaaattctttatctgctccagatttaacgcagaatattcaatcaagggtagttgccccaagtcgctcttctatactggccaagagtgacatcttttatcactattcaagagatataaaattgtggacagaattacaagacctaacagtttattatactaaaacggctcacaagatgttccttaaaaagaatcgtctcaatttcacgaaatactttgatttgatatcagattcaatagtcttcacacagttaggctgcaggctaatgcaacatgaaattaaagccaaaagttgcagcaaggagattaagaagattttcaaaggtctaatctcttcattgtcaaggataagtatcaattctcatttatatttcgattcagcttttcacagaaaaaacatggatactatgaatgacgaggataacgataatcaggaaaataat

SEQ ID NO: 82424 - DNA, 1740 bp, Saccharomyces pastorianus
atgagatcatcattcagtacagtcaatgagaacgatatggaaaatttctcagtcttaggtccaagaaatagtgttaattctgtcgtaacaccaaggacttcaatacaaaattctactttggaagatttttcaccgtccaacaaaaattttaagtcagctaaatcgatttacgaaatggttgatgtggaattctcgaaatttttaaggcatgttcagttactttattttgtgttacagagctcagtcttctcagatgataatactttaccacagttgctcccaagattttttaaaggttcatttagcggtggttcttggacaaatccattttcgacttttattacggatgaatttggtaatgcgacaaagaacaaagctgtcacatctaatgaagtgaccgcttcgtcgtccaaaaattcctcaatatcaaggattccaccaaagatggcagatgctattgcctctgcgtcaggatatagcgctaattcagaaacaaattcccaaattgatttaaaagcaagcagtgccgcgtctggttcagtttttacacctttcaaccgtccttctcataacagaaccttttcaagagcaagagtttcaaaaaggaagaaaaaatatccattaactgtagacactttgaatacaatgaagaagaaatcctcgcaaatttttgaaaaattaaataatgctacaggtgaacacttaaaaattataagtaaacccaaaagcagaattaggaatttggaaataaattcaagcacatacgaacaaataaatcagaatgttttactattggagatactggagaatttagatctgtcaattttcatcaatttgaaaaacctgattaagacacccagtattttgttggatttggaaagcgaggaatttttagttcacgccatgtcttcggtctcctcagtactaacagagttttttgatataaagcaggcttttcatgacatcgtcatcagattaataatgacaacgcaacaaacgaccttagacgacccgtatttgttttcctcaatgaggtccaatttccctgtcggacatcatgaacctttcaagaatatctctaatacacctttggtcaagggccccttccataaaaaaaatgaacaattggcactctccttatttcacgtattggtgagtcaagatgtggagttcaataaccttgaatttttaaacaactccgacgattttaaagatgcttgtgaaaagtatgtcgagatttctaatcttgcgtgtattattgttgatcaattgattgaagaaagagaaaatttgctgaactacgcagcaagaatgatgaagaataatttgactgcagaactattgaaaggtgagcaagaaaaatggtttgatatttattccgaggactatagtgatgacgattcagaaaatgatgaagctatcatcgatgacgaattaggatctgaggactatattgaacgcaaagctgcgaacatagagaaaaaccttccatggtttttaacttcagattatgaaactagtcttgtctatgactcaagaggaaaaattcgtggcgggacaaaagaggcactgattgaacatttaaccagtcatgaacttgttgatgcggctttcaatgttacaatgttaataactttcagaagtatattaaccacaagagagtttttttatgccctgatttacaggtactacttgtatcctcctgaagggctgagttacgatgattacatatttggatag

SEQ ID NO: 82425 - DNA, 1059 bp, Saccharomyces pastorianus
atgaaaccgttgaagattattgaaaaagtgaaaaatgagaaaaacggtaaggatatatcatctctgggtgatagcggtagtactgctgttagttttccatcctctggtaagcccattacgaaaaaatcggacgtgccagtggttgtagcatcgccatcaatttccatcatagaaaaatctgaatcttctactcgagagagtgggaaggtacgaaataatacatctggagaagcgaacttaacgtttgtgtcgccgttaaaaaacactaagaattcttcaagaattacgagtgagccatctccgcgagaaagtttgcctctgaaagttgtctcgaactcgagaagtccaagtcctcaaggtaacacattgccgctaattggtaaatttcggcaggattatcaggcatcacctccgaagaaagttatcactaaaccagtggcagaaacggcgaagccgtatgcaaatattccgccagctgcagacgtactttactcgccaaccgtgaccaaaatgaggaaattcagagagaaagtgcagaaatttgctctcaactctggtcttggattaagaatatctacttcagaagaaaacttgaataattctgatgtcaactcaaccacgcacaacgctaacataaataacctcgtcgaatttgttgagagtaaatcaatggttgttcttcctatggcacagggcattttgaatgatgttcaagcctctaaatcaaaattgtacaagtccgcaagatcagtttcgagattatgtcaaaattccatcgagattattcctattttggaatcggtgattgatatgactaccaaagcaatggtccaaaaaagttttaaactggatttaggcgagcactgtaaagaaattattgaaaggctcacagattgctcgcaaaagttatcggaattgtgtacttatggatgcgattccacaaagcttgggaagaaacgattctatcaaaaattagcagatatcctgatggaagtaaccaagcgcaccagggaattggttgaatgtgtgaagatggcgaacaggcagactctttcatag

SEQ ID NO: 82426 - DNA, 570 bp, Saccharomyces pastorianus
atgattagctcagaattaacgaatgatcaaatcatagaccttatatcggattataagaatttcaaaagaattatagaggcctctgtaccagaagaagatagaagaaggaatcaaaaccgccaaaatagaaataaagacctgacaaaattgtcgaatgtacaattttggcaactgacgactgatgtcaacgatgaattgatgaaaagattgacagattcgggtgcggatgcatcactaaatgatcttgatctgaaaagaggtaaagcacaatctaaactgtctcgattgaaggacgcgaagttccataaattgattcttgatattttcacggaaattgaaaggagaaacttacatcatttggatatggggacgcataacaatgggttagacgagggtgatctaaatttctatttaaatgacacattatttgaatcattcaaaataaacgatgattttatgggcgtgaatggtattatatccattgaagtcttccgagaattaaaaactcaatttacactttattttcaaaacacgctccatcgaattgatcctgtggataccaccaccaca

SEQ ID NO: 82427 - DNA, 219 bp, Saccharomyces pastorianus
atgaaaatcttattcgagttcattcaagacaagcttgacattgatctacagaccaacagtacttacaaagaaaatttaaaatgtggtcacttcaatggcctcgatgaaattctaactacgtgtttcgcactaccaaattcaagaaaaatagcataccatgccttcctggtgactgaagccacaaagcagtcattgatcactgcatcatttacctgttga

SEQ ID NO: 82428 - DNA, 312 bp, Saccharomyces pastorianus
atgttccacagtttggtcggtacatacgcattcgttgatttattgatcaattatacagtaattcaatttaatgggcagtttttcactcaaatcgtgggtaacagatgtaacgaacctcatctgccgcccaaatgggctcaacgatcatcctcatcatccgcaactgctgcgcaaatcaaacaacttacagaacccgtgacacatcaacaatacttacacaagctcaatataaatccctctccttatcttccttatagcaagatcctccctccaccatcatctatcaaaaagctcactgacctgagagaagct

SEQ ID NO: 82429 - DNA, 261 bp, Saccharomyces pastorianus
atgagacactgcattatctttatagtgtgtatcagcattgttgaaattagaaccgttcatattgaattcatcaaagagatcgttgtcatattccgcatagttgaccactttagcccttttatgctgccttgtttgttgagccattgtaaagatggggataccatcatcttcgtttgtcaatctgttgtgaaagttagaaatataagcttgtggaataagctggttttggtgcgacattgtgtgctgctatggcctttcttc

SEQ ID NO: 82430 - DNA, 732 bp, Saccharomyces pastorianus
atgaacagagtatccttgaagtcagatattttgctctcccccatggttaaccttggaacgcaagatattcaacggcttctatatactacggtcatattatctccaatatacgtgatgataacctggctacttttaccaccgagaagcttgatgctgatggtgggcatgttccttttaacgtatcactcaccatggtctaaagtagcaagaaggcttttatggaagtttaagattgtcaggctgcttgttttctacgtcacgggtttagaccttggtggaataaataaggaccagggtatttttgctacagtgcagaagcaagtgaaaaagttggcatcaacagaaaacagtaatggcgtattatccgattccaagcctatccgttttacttatgttttgtacgagaaccagcgtcgttggttaggtattggatggaagcccagtatgttgagttatgagaggactccatggaccgatgaatttttgaatgaggctccctctcctgaaaactttcatctacctgaagagactaacactatggtttggagatgggtcgacaagacatggaggctagacatgactaatgacggtgccattcaagtgcccaattcaaaggcgagaacttcggcagatccctcccctgacgagggatttatatattacgacaatacctggaaaaaaccaagtaaagaagattccttttctaaatatacagaagaagaagatgggtaa

SEQ ID NO: 82431 - DNA, 498 bp, Saccharomyces pastorianus
atggatcccacaagagctccggatttcaaaccgccatctgcagacgaggaattgattcctccacccgacccggaatctaaaattcccaaatctattccaattattccatacgtcttagccgatgcaaattcctctatagatgcaccttttaataataagaggaagaaaaagcatcctaagcatcatcatcaccatcatcacagtcgtaaagaaggcaatgataaaaaacatcagcatattccattgaaccaagacgactttcaaccactttccgcagaagtgtcttccgaagatgatgacgcggattttagatctaaggagagatacggttcagattcaaccacagaatcagaaactagaggtgttcagaaatatcagattgctgatttagaagaagtccacatggaatcgttcgtcaagcaagaaccttggaagactacgaattcccctcacacagattatcgaaaaaattactggatccaaataaactgccgttag

SEQ ID NO: 82432 - DNA, 576 bp, Saccharomyces pastorianus
atggtacctctggcaatcttggttgggacacccaaagcttggaagaaagaagtcttacctggttccataccagtgttgacggctctaacccagatgtcttctggagcaacggcaccagctctggctggagcagcaactctgttagagacaataacgttcttgatttcagtcaatggttcgttagtgaaaacgaaaccaacgttacctttgacaaaaggcaacaacttttcgaagtctggcaagtcggataagaaacctctgatggctcttctaaccatggtgttcttacccatcaagacgacagctctgcctctcaattcctttctgacttcgtgcatttgttgggaagaaacattgtcaacaccaacaacgaacaaagacttgtattcttccaagtattctcttaatttagcaaagtattcagctttcttttcacgaatgcctcccatttcaaacttattatacgtatttattagactgtttgcaggatgtctaaaggtattccggttatgtatcttatgcgtgaagctgaaaaagaatcggaatagatttgtaatcttcattacttatacttga

SEQ ID NO: 82433 - DNA, 819 bp, Saccharomyces pastorianus
atgaacactgatcaacaaccttatcagggccaaacggactatacccagggaccaggtaacgggcaaagtcaggaacaagactatgaccaatatggccagcctttgtatccttcacaagctgatggttactacgatccaaatgtcgctgctggtactgaagctgatatgtatggtcaacaaccaccaaacgagtcttacgaccaagactacacaaacggtgaatactatggtcaaccgccaaatatggctgctcaagacggtgaaaacttctcggattttagcagttacggccctcctggaacacctggatatgatagctatggtggtcagtataccccttctcaaatgagttatggagaaccaaattcgtcgggtacctcgactccaatttacggtaattatgacccaaatgctattgctatggccttgccaaatgaaccttatcccgcttggactgctgactctcaatctcccgtttcgatcgagcaaatcgaagatatctttattgatttgaccaacagactcgggttccaaagagactccatgagaaatatgtttgatcattttatggttctcttggactctaggtcctcgagaatgtctcctgatcaagctttactatctttacatgccgactacattggtggcgatactgctaactataaaaaatggtattttgctgctcagttagatatggatgatgaaattggttttagaaatatgagtcttggaaactctcaaggaaggcaagaaaagctaagaagaaaaacaagaaagcaatggaagaggccaatcccgaagacactgaagaaactttaa

SEQ ID NO: 82434 - DNA, 2490 bp, Saccharomyces pastorianus
atggaagaggccaatcccgaagacactgaagaaactttaaacaaaattgaaggcgacaactccctagaggctgctgattttagatggaaggccaagatgaaccagttgtctcccctggaaagagttcgtcatatcgccttatatctgttatgttggggtgaagctaatcaagtcagattcactgctgaatgtttatgttttatctacaagtgtgctcttgactacttggattcccctctttgccaacaacgccaagaacctatgccagaaggtgatttcttgaatagaatcattacgccaatttatcatttcatcagaaatcaagtttatgaaattgttgatggtcgttttgtcaagcgtgaaagagatcataacaaaattgtcggttatgatgatttaaaccaattgttctggtatccagaaggtattgcaaagattgttcttgaagatggaacaaaattgatagaactcccattggaagaacgttatttaagattaggcgatgtcgtctgggatgatgtatttttcaaaacatataaagagacccgtacttggttacatttggtcaccaacttcaaccgtatttgggttatgcatatctccattttttggatgtactttgcatataattcaccaacattttacactcataactatcaacaattggtcgacaaccaacctttggctgcttacaagtgggcatcttgcgcattaggtggtactgtcgcaagtttgattcaaattgtcgctactttgtgtgaatggtcattcgttccaagaaaatgggctggtgctcaacatctatctcgtagattctggtttttatgcatcatctttggtattaatttgggtcctattatttttgtttttgcttacgacaaagatacagtctactccactgctgcacacgttgttgctgctgttatgttctttgttgcggttgctaccatcatattcttctccattatgccattgggggggttgtttacgtcatatatgaaaaaatctacaaggcgttatgttgcatctcaaacattcactgctgcatttgcccctctacatgggttagatagatggatgtcctatttagtttgggttactgtttttgctgccaaatattcagaatcgtactactttttagttttatctttgagagatccaattagaattttgtccaccactgcaatgaggtgtacaggtgaatactggtggggtgcggtactttgtaaagtgcaacccaagattgtcttaggtttggttatcgctaccgacttcattcttttcttcttggatacctacttatggtacattattgtgaataccattttctctgttgggaaatctttctatttaggtatttctatcttaacaccatggagaaatatcttcacaagattgccaaaaagaatatactccaagattttggctactactgatatggaaattaaatacaaaccaaaggttttgatttctcaagtatggaatgccatcattatttcaatgtacagagaacatctcttagccatcgaccatgtacaaaaattactatatcatcaagttccatctgaaatcgaaggtaaaagaactttgagagctcctaccttctttgtttctcaagatgacaataattttgagactgaatttttccctagggattcagaggctgagcgtcgtatttctttctttgctcaatctttgtctactccaattcccgaaccacttccagttgataacatgccaacgttcacagtattgactcctcactacgcggaaagaattctgctgtcattaagagaaattattcgtgaagatgaccaattttctagagttactcttttagaatatctaaaacaattacatcccgttgaatgggaatgttttgttaaggatactaagattttggctgaagaaaccgctgcctatgaaggaaatgaaaatgaagctgaaaaggaagatgctttgaaatctcaaatcgatgatttgccattttattgtattggttttaaatctgctgctccagaatatacacttcgtacgagaatttgggcttctttgaggtcgcagactctatatcgtaccatttcagggttcatgaattattcaagagctatcaaattactgtatcgtgtggaaaatcctgaaattgttcaaatgtttggtggtaatgctgaaggcttagaaagagagctagaaaagatggcaagaagaaagtttaaatttttggtctctatgcagagattggctaaattcaaaccacatgaactggaaaatgctgagtttttgttgagagcttacccagacttacaaattgcctacttggatgaagagccacctttgactgaaggtgaggagccaagaatctattccgctttgattgatggacattgtgaaattctagataatggtcgtagacgtcccaagtttagagttcaattatctggtaacccattcttggtgacggtaaatctgataaccaaaaccatgctttga

SEQ ID NO: 82435 - DNA, 486 bp, Saccharomyces pastorianus
atgaccactagaggtggtgtttccaaagcacaaaagggtttgcatttaaacgaagatatttatgctggtatgaatgctatgcttcgtggtggtcgtatcaagcattgtgagtattatcaatgtggtaaaggtagagatttgggtttcggtacaattctaaatttcactactaagattggtgctggtatgggtgaacaaatgttatctcgtgaatattattatctgggtacccaattaccagtggaccgtttcctaacattctattatgcccatcctggtttccatttgaacaacttgttcattcaattatctttgcaaatgtttatgttgactttggtgaatttatcttccttggcccatgaatctattatgtgtatttacgataggaacaaaccaaaaacagatgttttggttccaattgggtgttacaacttccaacctgcggttgaatgggtgagacgttatacattgtctattttcattggt

SEQ ID NO: 82436 - DNA, 1410 bp, Saccharomyces pastorianus
atgttcgaagtgtctgcgggccaaatctactcttctgcgttattaaatgatttagcaattggtggtgctcgttatatatccaccggtcgtggttttgcaacttctcgtataccattttcaattttgtattcaagatttgcaggatctgatatctacatgggtgcaagatcaatgttaatgttgctgttcggtactgtcgcacattggcaagctccactactgtggttttgggcctctctatcttcattaatttttgcgcctttcgttttcaatccacatcagtttgcttgggaagatttctttttggattacagggattatatcagatggttatcaagaggtaataatcaatatcatagaaactcgtggattggttacgtgaggatgtctagggcacgtattactgggtttaaacgtaaactggttggcgatgaatctgagaaagctgctggtgacgcaagcagggctcatagaaccaatttgatcatggctgaaatcataccctgtgcaatttatgcagctggttgttttattgccttcacgtttattaatgctcaaaccggtgtcaagactactgatgatgatagggtgaattctgttttacgtatcatcatttgtaccttggcgccaatcgccgttaacctaggtgttctattcttctgtatgggtatgtcatgctgctctggtcccttatttggtatgtgttgtaagaagacaggttctgtaatggctggaattgcccacggtgttgctgttattgtccacattgtctttttcattgtcatgtgggttttggagagcttcaactttgttagaatgttaatcggagtcgttacttgtatccaatgtcaaagactcatttttcattgcatgacagcgttaatgttgactcgtgaatttaaaaacgatcatgccaatacagccttctggactggtaagtggtatggtaaaggtatgggttacatggcttggacccagccaagtagagaattaaccgccaaggtaattgagctttcagaatttgcagctgattttgttctaggtcatgtgattttaatctgtcaactgccactcattataatcccaaaaatagataaattccactcgattatgctattctggctaaagccctctcgtcaaattcgtcccccaatttactctctgaagcaaactcgtttgcgtaagcgtatggtcaagaagtactgctctttgtactttttagtattggctatttttgcaggatgcattattggtcctgctgtagcctctgctaagatccacaaacacattggagattcattggatggcgttgttcacaatctattccaaccaataaatacaaccaataatgacactggttcccaaatttcaacttatcaagtccctaatatactcatacgcctccattaa

SEQ ID NO: 82437 - DNA, 339 bp, Saccharomyces pastorianus
atgctaggagtgaacacactgcgtgtttatgcaatagatccgacaaaatcacatgatatatgtatggaagctctatctgccgaaggaatgtacgtcctattagatctttcagagcctgatatttcaataaatagagaaaatccatcttgggatgtacatatttttgaaaggtacaaatctgtaattgatgcaatgtcatcctttccaaatttgttggggtattttgcagggaatgaagtgacgaatgaccatacaaatacctttgcatcacccttcgtgaaggccgcaatccgagatgccgaggagtatatctcgcatgctaatcatagaaaaaccctg

SEQ ID NO: 82438 - DNA, 249 bp, Saccharomyces pastorianus
atgaacaagaaacaaaatttttacgcagccattattgtggctatttttctttatttgcaattgtctcatggctcttcaggtgtcagctttgaaaaaacccctgctattaaaattgtaggacacaaattctttgactctgagagtggggaacagtcttcatcaagggcattgcttaccaattgcagagaagtgaagaggagcttagcaatgcaaatggggcttttgagacaagttatattgatgccttag

SEQ ID NO: 82439 - DNA, 507 bp, Saccharomyces pastorianus
atgtccaccgctgaatttgctcaactattggagaacagtatcttaagtcccgaccaaaacattcggttgactagtgaaacgcaattaaagaaattatctaatgacaacttcttacaatttgcaggtctttcttcgcaagtgcttatcgatgaaaatacaaagctagaagggcgtattctagcggcgctaactttgaagaacgagctggtgtccaaggactcagtcaagacgcagcaatttgcacaacgttggattacacaggttagtccagaagctaaaaaccaaattaaaactaacgcgctgaccgcattggtctccatagaaccgcgtatagcaaatgcagcagctcaattgattgcggctatagcagatattgagttgccccatggcgcatggccagagttgatgaaaattatggttgacaatacaggtgcggaacaaccagaaaatgtcaagagagcctctttattggccttgggtatatgtgtgaaagtgcagaccctcaaa

SEQ ID NO: 82440 - DNA, 600 bp, Saccharomyces pastorianus
  modified_base (416)..(458): a, c, g, t, unknown, or other
atggcaccactgaacatggagcaaggtaaaagatacgccatgttagtcaattgctcgcgtgggatcacattctctttcaacaagtcgtatgcaccgaatctcaccgtcgtgtatgtacattgcctcaacacagcagcgctcaggccggaatataaccccaccaaaccttcattcgccaagatactctccaacatcctgaagagtgtgggcttgggcataggagccgcctgcagtctgaccttggccaagtcaagaggatgtgtcaccatggtagcaaagatacccgctgcacctccgtaccaccatggatacttgatattcttaccggcagactcttttgcgttggttgacatgccgtccagctgttgcgttatcttttcaacactttcagagcaagaggaacgaacctctacacnnnnnnnnnnnnnnnnnnnnnnnnnnnnnnnnnnnnnnnnnnncactacaagccgaccgcccgaccgtttcctgcccccaacattgcagcgtaatcgcttgccaaagaccacaccttgcagcccttttatacaaacatgtctacgacgtacagtggagagggccctttccttggcactcaactga

SEQ ID NO: 82441 - DNA, 1488 bp, Saccharomyces pastorianus
atgatacaatcagacgaagataatttggactcttctgaaacgacagcatcaacttcatatagtggtacttcctctgtatcatccagactacaactaagaacatccttgttttttgaaaatcttaatggagcacatgggaaccccgatgcggagacagagatggctactgttgcctatgaaaccacaagtagaggtcaaggatttgctgtatacatcaacaatgaaaggttttctcaaataatgggagcatccacaagctctagctctagtagcaactcgtcctctattacacaatttcacgatacccaagataataatataccaagcaacactactgtaaggccaacttcacttcgacgagacaacgaggataccgtaccgttaaggaacgtaactccttcacaaaacgcggcggtatggccagaaagagcaatgaattcaccatcttcgcagagattaagttgcgcactgacaatatcaacttcagttcttatgggagaagatgttgaaggaagccctatagagcaagagcatagtagggtcgtatcttcattatactcatctttggcgaatcgcgggaacgacgagtcaaagaatggaacacctccacgtcctacctcaattgaacctaatgaaacaacggaacactcatttttctcatgccattacgatgacaccttagaaccagatgttgaagaggcagtgaggctaacgaagaataaaacttctaatgttaattttataagctcaactggcagtaaaggtgaaggcgagaccgaggatgaagtcatagatcaatacgaacctgtgaatgaatcaaaatttataccgcacaaactaaaaatcccagagaaggctggatcaataaagtcgtcgacaagtgatgattcgcattcgccaggtgcgccaggtacgtcggcaaggaagattaaaattcctcagagtccatcgttaattggtaacatattgattccttcacacaatagtgacagtagtaacgaaagttctcctaaagaccatatagggcataataatgaagaaaaattcaattcaaaatctatgcgcaagccctccacatccctagaagaagaaggtccaccaattggactaccttcaattcccgtattaagaagtgtgtccggacctagcaaatggacaaagacacctttacgcttagaatctggaaattcaactaagtctgatccattttcacgctatgaaggacacaagacgccctctccattgaccaagatgaacaagaaaaataaaacgttgccagaacatggacaacccctcgtgctagctccaattaaatctcaaagctcggagtcagacacaggacagaactctattatagaaaagccacctcgaagcatacgacgaaagcaacaagaaaaaactgataataggaaagaagacaggcacgatgctgaaaacatagacctggaggcgagaatgccaattcgggatcctctagagtcgacctgc

SEQ ID NO: 82442 - DNA, 294 bp, Saccharomyces pastorianus
atggatgtatccatcacattcgagcctattaacatagaactattgcagaaaaggagctacataagcgatattaacattctctttggtgttgattgcatccagccgatagcaaattggactcttcaaaaagaatttcccttagtaaaataccgctacagcgaacctgcttatttgacttacaaattcgttggtactcgtcctgtagacacaggagctcaacggctgcaagaaactgatgaaggaaagttcaaattgttcagttggcggatctccactgggtgtgggggagtctga

SEQ ID NO: 82443 - DNA, 162 bp, Saccharomyces pastorianus
atgactcgctcttccgttttagctgatgctttgaatgccattaataacgccgaaaagaccggtaaacgtcaggttctattgagaccttcttccaaggttatcatcaagtttttacaagttatgcaaagcatggtatgttccaactatttttcaatatttcac

SEQ ID NO: 82444 - DNA, 1113 bp, Saccharomyces pastorianus
  modified_base (755)..(788): a, c, g, t, unknown, or other
atgagcgaaaccaacgttgacagcttaggggacagaaatgacatatactcccaaatatttggtgtagaaaggaggccagattccttcgctacttttgatagtgactcgcacggagacataagttctcagctgctgcctaatagaatcgaaaatatccagaatctaaatgttctgctttctgaagacattgctaatgacatcattattgccaagcagaggagacgttctggagttgaagccgccatcgatgattctgatataccaaataacgaaatgaaggggaaaagctcaaattacattttatcgcagcagactaatattaaggaagttccagatacacaaagtttgtctagtgctgataatacacctgtgagcagtccaaagaaggcaagagatgccacatcttcccatcccattgttcatgctaaatcgatgtcccatatatattcaacgagtaatagtgctagtagacaagccaagcactataatgaccaccctttgcctccaatgtctccaagaaatgaagtctaccagaagaataaaagtactacagcttttgtgcctaagaggaaaccttcactcccgcaactagcccttgctggtcttaagaagcaaactagcttctcaaatgggagtggttcgactacccctacacaggcaagaaagtcgcctttgcaaggctttagtttcttttccaggccaagttccaaagacctgcacgaacaacaactacatcagcagcagcagcatattcnnnnnnnnnnnnnnnnnnnnnnnnnnnnnnnnnncaacaataatactaataataacggtacccatcatcaagtgggcaataacaataataactacccacaacattcacattcactatcatctagatcgatgtcattaaactcttctactctcaaaaatattgcatcatcttgtcagtccaagacttccaacggtagaagagtccctcaaaaatatgaaatgtcttccaaaccattcgcagattctcaccactaccatcacacttcaaatagtcacagtaacctcaacaatggtcacagttccatgaagtccttcaacaccatgagtgcatcgtctgctataggaaagggtctcaagacg

SEQ ID NO: 82445 - DNA, 2202 bp, Saccharomyces pastorianus
atgagagcgatggacacacaggtacagagtgctgaaagaggattggtgttgcctcccatgaattcaactgtatcgtcggcgacggcggctacgacggccacaaatacggatacagatacagatggagatagagatgaggaaagggagtcgttagcagaggatggtagcgaatgggtgcccgcatatatgcttaccagagacaggtcacgctacttgggccattttctgggtgtagacaagatgctggaggcagtaaaatgcaagtactgcggtgtgataataagacggcaagaaaacagcataagcatggcggaagcctcgcaaactcatttgtggagcacgcataagatagacccgaatgccaattactatagcggatggacgggcgtagaagcaggttctacttttatggtcagaccacctttgaagaaccatcaaggcggtagcgccacaacgaacagcattgctaacctgctggaaatagacgaggactttttgaagagaactagggaaaaagaaatggccttgcctcttgtgcagtcgcttgcgatcataattgcatcagaaaacttgcctctgtcgttcgtagacaacactgccgtacgccttttgatcaatcagaacgccaactcactaagcttcattgaccatgacttaattctgaatgctatcaggtccatcgcatataatctcgatagaatcattcaaaggacagctttgcgtaacaattccgacttgtcgttgattatcgacaaaaactacttactaatggacccaaccgatagatctaatcagttatcaaacaggttgaagaaccaattatttgaaatgcaaaaaatcaattttttctctctaagccactccgtttggaataacacgatatctatattgagtattcagtactatgatgattttcattcccaagtaaagactttaccccttatcatccaaaacttacatgaatataacaatgaccccaaactatctattccagctcaactgctcaaaatctcacaagaattacctggtttacaaaatactgtgatttctatcactctaccaagatctcaaatagtagatctactaaacgtaatggatagccaaccctttttcccgaatacgtatacgaatgctaaaaactattatcacaattgtattatttccataataaattctgcgatattgccattgttcggtacgcctaaatccgccgatattacgcatccgagacaaacatcattctccaaagaacctttgactttattggactctctaattgatttgtcaaatatagatatttcgaataccattttttccagaatcaattcttttttggatgatttacaatctaattcgtggcagttagataaattccgttcattgtgtgaaaaatttggcttcgaattcgtttgttcgaaattcgatttatcccgttactctaccgccaccgtttcactgcaaacttttttgaaccttcgtcccataatagaagaatatcaatcttctatccaaattgaaaaattcaacgaaatcgactttcaaataatagactatttattaattactttgaattccatcaatagaatactaaagttctttacttcttccaaaagcttaaactttacctatgttttgttcgccataatgtctattgaaaagcatctgttgtccaccttgggcagcctacaatttcaacggttaattgcaccatttgaaacatttttgtctaaaattcaagaattcaaaaccattttattttcagacgatatgaaccttttagcaatgttcttgtgtcctgcgattttattcgaaagagaagtcctggaatattcttttcataccatttcactttctgaaatagtcgacaaactttctacatcaattttcagtttattgaaaaggtttttgaatttacacacaataggcaacgttaacaacagtcataatacttccaatcatagcaacatgaacattcacactgataatcagacgaacaacatcaacaatagaagcggcaacaacagcgacaataatgataacgaacatgataacgacaacgacaaccactcgaattcaaatacgcccgcatcaagaatagatatagatcctactggtggagacaagtctgtattaacggcactaccaccaccgaatagctataagaacatatcattgggttatcatagcgatacccatcagtta

SEQ ID NO: 82446 - DNA, 1002 bp, Saccharomyces pastorianus
atgagtaatgcaaacaatagtgctatgaaccacatcacgttgcctcccatctcgtcatttgacaaccttatcaaggcagccgagagacaatataatggcgaggcttcgtccgcctcgacacatccgacactgcctaatatgaacattagtaacggcagtggcagtgcgggcgcatcatcgtcgatgctgagctatcagttgcttccgcactccaatgatgtgtcccggtcgaactccagctcgagcttccttccctccgtgcagcagcctacggaaggttccgcttctgcatcggaaacttcttcatctgcatcaccttcacgttccatttcaccaattttaaaagtggctggtccttcatctgttggcggtgccggggtgagtaccccccatagcaccaaaatcaataagccaaggaaaaagaagcaatgtccaatttgtcgtaatttttatgccaatctgaccacgcacaaggcaacgcacctgacgccagaggatcggcctcacaagtgtcccatctgccaccgcgggttcgccaggaacaatgacttattgaggcataagaaaagacattggaaggatgagatactgtcccaatcgggagtactttcgaaccataatgatggtaagggaggatccgtttctcccaatgatgatgatgcccatgaaaaaatgacaccgatgaattctgtcacagattatgcacaattgaaatcgttgcatcaaatcaagggcacattcaagtgcccattcaactccaccttaatacaattggacatggatatgtacccgtataaactgaaacctttaaattttgagacttccaattgtcaccagacgggggtgttctcacgttgcgacaccttcaaaaaccatttaaaggctttgcattttgaatacccgccaggcacgaagaaaaaggatagaaatgttgttcctggtagatgtaagcattgcggcctgaagttcgagacgttgacgtttggctcaacgaacacgtag

SEQ ID NO: 82447 - DNA, 312 bp, Saccharomyces pastorianus
atgatgggcgaaacacccaattccagtaaagtaccacggttggaggccagcatggcacgtagccagtacagagggtcggaagtctcactggacacgatcccgtacagcggaatctggcccagaatcaaaaagatcagtagagaaacgcctgtccagataagtttctggttgtatggaaccttcctttctggagcaatcacttccggcaggaaagattcatatggcttaaacaagtctagaacacggttggaggacattttcaaagtaaagcgtgaaccagtgtcagttttttctacttgctactatatttaa

SEQ ID NO: 82448 - DNA, 543 bp, Saccharomyces pastorianus
atgttcctaactttgttgaagtcattatcaaatagagactcggtgctaatcgagaaagctttaagtctcttacagagtttatgttctgactcaaatgataattatttacgtcagtttcttcaagatttattaactttattcaagagagataccaaattggtgaaaactagagcaaactttatcatgagacagatatcttcccgtttatcaccagaacgtgtttataaagtaatttcttcgatattggacaattataacgacacaacgtttgtgaaaatgatgattcagattttaagtacaaacttaataacttcaccggagatgtcgtcgttaagaaacaaacttagaacttgtgaagacggtatgtttttcaatagtttattcaaatcttggtgtcccaaccccgtgtccgtgatatccttatgttttgtagcagaaaattatgagttagcttacacagtgttacaaacttacgcgaactacgagttgaagttaaatgatctagtgcagttggatattggattcagttgttcgaatcacccg

SEQ ID NO: 82449 - DNA, 1389 bp, Saccharomyces pastorianus
atggaaaaatcgattgccaaaggtttaagcgacaaactatacgaaaaacggaaggctgccgccttggagttggaaaagttggtcaaacaatgcgttctagaaggggactatgatcgtattgacaagataatagacgaactatgcagagactatgcatacgctttgcatcagcccatggctagaaatgcaggattaatgggcttggctgccacagcaattgctttaggaataaacgatgttggccgttacttgaggaatattcttcctccagttctcgcatgttttggcgaccagaatgaccaagtaagattttatgcgtgtgagagtttgtacaatattgcaaagattgcgaagggtgaaatactggtctatttcaatgaaatatttgacgtactctgtaaaattagtgctgatacagaaaactcggtccgaggagcagctgaactattagatcggttgataaaagatattgttgctgaaagagcatccaattacataagcattgtaaataatggatcgcatggtttgcttccagccataaaaacggatccaatcagcggggatgtctaccaagaagaatatgagcaagataatcaattggcgttctctttaccaaaatttattcctttattaacagagagaatttacgccattaaccctgatacgcgtgtttttttagttgactggcttaaagtcttgctcaataccccaggactagagctcatatcgtatctaccatcatttcttggcgggttattcacgttcttgggcgattctcataaagatgtcagaacagttacacacacccttatggactcactactccacgaagtcgaccgcatttcaaaattacaaactgaaattaaaatgaagagactggaaagactgaaaatgctggaagataaatacaataacagttctactccaacgaaaaaggccgatggtgcacttattgctgaaaagaagaaaactttaatgactgcattaggtgggttatccaaacctctgagtatggagactgatgataccaaattatctaatactaatgagacagatgatgaaagacacttgacaagccaggagcagctgctagatagcgaggcaactagccaagaacctcttcgcgatggcgaagaatatatacctggtcaagatatcaacctcaatttcccagaggttattaccgttcttgtgaacaatttggcatcatctgaggcagagattcaattgattgcattacactggattcaggttatattatccatttctccaaatgtgtttatccccttcctttcaaaaattctttctgtgcttttaaagctattgagcgattcggatccgcatattactgaaattgctcagctggtgaacggtcattactctcattgt

SEQ ID NO: 82450 - DNA, 189 bp, Saccharomyces pastorianus
atgggcgtatctcttttagcttcttcttctgcatttgtaactaaaccactcctcactcaattggttcacctctcacctatcagtctcaatttcaccgtaagacgcttcaagccattcacgtgcttatcacgctattacacaacaaatccttataatatgacatccaattttaagacattcaatctggac

SEQ ID NO: 82451 - DNA, 2709 bp, Saccharomyces pastorianus
atgggctctgagaaatttccagacgaaaacgaatactcgagctatttaagcaagcacggtggttcatccaatgcctacacagcatcgcaaaacacaaattatttttttgaggttaatcaccaacatttatttggtgcgctagacaggttttcagggtttttctcttgtcctcttttcaacaaggactctactgataaagagatcaacgccgttaacagcgaaaacaaaaagaacttacagaatgatatttggagaatttaccaattagacaagtctttgaccaatacaaaacatccatatcacaaattttctacaggaaacatcgaaactttgggcacattgccaaaggaaaatggactaaatgttagagatgaactgttaaaattccataagaatttttactccgctaacctaatgaagctatgtattcttggtagagaagaccttgatactctctctaattggacttatgatcttttcaaggatgtagccaataacggtcgtgaagtacccctttatgcggaacctattatgcagcctgagcatttgcaaaaaataattcaagtccgtcctgtgaaagatttgaaaaaactagaaatctctttcactgtccctgatatggaggaacattgggagtccaagccaccgaggatattaagtcatttaatcggccatgaagggtccggttcattactagcacatttgaaaaaattgggctgggccaatgagctatctgctggtgggcatactgtgtccaaaggaaatgctttttttgctgtcgatatagatttaacagacaacgggttgacacactatcgcgatgttattgtcttgatcttccagtatattgaaatgttgaaaaactcactacctcaaaaatggatattcaatgaactgcaagatatctctaatgctaccttcaagtttaagcaagctggtagcccatcttccacagtttcatcattggcaaaatgcatggaaaaggattacattcctgttagcagaattttagccatgggtttgttaacgaaatatgaacctgatttgcttacccaatatacggacgctctggtcccggaaaattctcgtgttactctgatctcaagaagtttagaaacagattctgctgaaaaatggtatggtactgcgtataaagtggtagattatccggcagatttaataaaaaacatgaaatcgccaggtttgaaccctgctctgactttgccacgtccaaatgaattcgtttcaacaaatttcaaggtcgataaaattgacggtataaaaccattagatgaacctgttttgttattatccgatgacgtcagcaaattatggtacaagaaggacgaccgattctggcaaccacgaggctacatttacttgtcttttaaacttccacacacgcatgcaagcatcattaatagtatgctttctacgctatacactcagctggccaacgatgccttgaaagatctacaatatgatgctgcttgtgccgatcttcgtatatcattcaataaaactaatcaaggcctcgccattaccgcgtctgggttcaacgaaaaattgatcattttattaacaaggtttttacaaggcgttaattcattcgaacctaagaaggatcgttttgagattttgaaagataagaccatacgtcacttgaaaaaccttttatatgaagttccttattcacaaatgtcgaattactacaatgctataataaatgaacgttcttggtcaactgcagaaaaattacaagtctttgaaaaattgacctttgaacaattgatcaacttcatacccaccatttacgaaggcgtttattttgaaactttaatccacggaaacataaaacatgaagaagcattggaggtggattctctgatcaagtctttgattccaaacaacattcataatctgcaggtttctaacaaccggttgagatcctacttacttcctaaaggcaaaactttcagatatgaaactgctttgaaagactcccggaatgttaactcatgtattcaacatgtcacccagctagatgtctattcagaagacctatctgccctcagcggattatttgcgcaattgattcacgagccatgttttgataccttaagaacaaaagagcaattgggctacgttgtttttagttcgagtttgaacaatcacggcacagcgaacattaggatcttgattcagtcagaacataccacgccatatctagaatggagaataaacaatttttatgaaacttttggccaggttttgagggatatgccagaagaggactttgaaaaacacaaagaggcgttatgcaacagtctattgcaaaaattcaagaatatggccgaggaaagcgccagatacacagcagcaatttacttaggtgattacaatttcacacatcgtcaaaaaaaggctaagctcgttgctaacattacaaagcagcaaatgatagatttttatgagaattatataatgagcgagaacgcatcgaagttgattctacatttgaaatctcaagtggaaaacaaagagctcaatgaagatgaattggacaccgctaagtatccaactggccagttgatcgaagatgtcggggcattcaagtcgacgctgtttgtagctcccgttcgtcaaccaatgaaagacttcgagatttccgcgcctcctaagctgaataatagttctgaatcagagtga

SEQ ID NO: 82452 - DNA, 237 bp, Saccharomyces pastorianus
atgcgtgccaccactttattatcttcagtcgtttctttggcattgttgtcgaaggaagtcttagcaacacctccagcttgtttattggcctgtgttgcgcaagtcggcaaatcctcttccacatgtgactctttgaatcaagtcacctgttactgtgaacacgaaaactccgccgtcaagaaatgtctagactccatctgcccaaacaatgacctgcaggcatgcaagcttggcact

SEQ ID NO: 82453 - DNA, 1017 bp, Saccharomyces pastorianus
atggacttgattatcttggaaaggaataccgatcctataacgccattgttgacacaacttacgtatgcaggaatactagatgatctatatgaattcaattctggaataaagataaaggagaaagacatgaacttcaattataaggaagataaaatatggaatgatttgaaatttttaaattttgggtcgattgggccgcagttaaataaattggcaaaggaactacaaacgcaatatgatacaaggcataaagccgagagcgtacatgaaatcaaagaattcgttgattccttaggttctttgcaacaaaggcaagcttttttgaaaaatcacacaaccttatcatccgacgttttgaaagtggtagagactgaagagtacggatctttcaataaaatcttagagttagagctggaaattttgatgggaaatacacttaataacgacattgaagatattatactcgagttgcagtaccagtacgaggttgatcaaaagaagattctcagattaatctgtttattgtctctttgtaaaaattcacttcgagaaaaggattatgaatatctaagaacctttatgatcgactcttggggcattgaaaaatgctttcaacttgaatcattggctgagttaggatttttcactagcaaaacgggaaaaactgatttgcatattacaacaagtaagtcaacaagattacagaaagaataccgttatatttcacaatggttcaatacagtacccatagaagacgagcatgctgccgataaaatcacaaatgagaacgatgacttctcggaagccacttttgcttacagtggtgtagtacccttgacaatgagactggttcagatgttatatgataggtctatcttgttccataattattcctcgcagcagcctttatactgtcaagagaacctagagtttctcaaacggaggattaaattgaacagtctatatggagactcacatgcgatcgacatcagagtagatgggtcccgggaaccatta

SEQ ID NO: 82454 - DNA, 657 bp, Saccharomyces pastorianus
atgaatagattttggaatactaagaaattttcattaacaaatgccgatggactatgtgctaccttaaatgagatatctcaaaatgatgaagttcttgtggttcaaccaagtgtattgccagtactcaatagtttgctaactttccaagatttgactcaatcaactcctgtaaggaaaattacgttactcgatgatcagctaagtgacgatttaccgagtgccttaggcagcgttccgcaaatggatcttatttttcttattgatgtcagaacatctctccgactccctccacaactgcttgatgctgctcaaaagcacaatttatcatctttgcatataatatactgtcgatggaaaccgtctttcccaaatactttggaggatacagaacaatggcaaaaggatggtttcgatttgaattcaaaaaaaacacatttccctaacgtcattgaatctcagttaaaggagctatcgaacgaatataccctttacccttgggatctcttgcccttcccacagattgatgaaaatgttctattgactcattccctttataacatggaaaatgtaaacatgtattatcccaacttacgttctttgcagagtgccacagagtcaatactggttgatgatatggtcattcgttgcagagtttga

SEQ ID NO: 82455 - DNA, 198 bp, Saccharomyces pastorianus
atgaactttccagacaccctagtttgcgaaaggccttttttcagaggcgacttgcgagattcaaatcactgcgcgttttctaaatccacctgtatttacctgctatgtgagccactcaggtacagttgcatcaggttgatagttatgttcatttgtttcgatgataacctgtccgggggatcctctagagtcgacctg

SEQ ID NO: 82456 - DNA, 147 bp, Saccharomyces pastorianus
atgatacaaaaaccgattttattatcctcgtttctgtttctctacatccgtgcattattacatagtatacatccgtacatccgtacatctgtacatctgtacacaaaaaaaaatcacctcatacaattttttaggagtgccgtttaa

SEQ ID NO: 82457 - DNA, 96 bp, Saccharomyces pastorianus
atgttccttacattctcaatgtgtgtgaactggataatcgtaaaaatgccaaacaggtctgaagaactgaccgatactcgacaaatatcactctcc

SEQ ID NO: 82458 - DNA, 1038 bp, Saccharomyces pastorianus
  modified_base (1022)..(1022): a, c, g, t, unknown, or other
atgcatctattcaccaatattggaggtttcagtcttaagacgtcagctagcgaatatatgtctttgaaattgccacctcccggtattcaagatgatcacagtgaagagaatctcaccgtgcatgatactctgcaaagaaccataagcactgcactaggaaacggatacaacaccaatacagttacgacttccggtttaaaaaaggcagacagtgaatcaaagtcagaagctgatcctgaggggctcagcaattctaacatagtcaatgatgcagataacataaattccatctccaagaccggatcgccccatttacctcaaggaacaatggacgctgagcagactaacatgggaactaactctgtacctacttcatcagcttcttcacgcaaatcctcgactagtcatcccaaacctaggctacccaaggtagggaagattggggtatgtgcaatggatgcaaaggtcctttcaaagccaatgagacacattttgaatcgtttaattgaacatggtgaatttgaaactgtcatttttggagataaggtgattctagatgaaagaatagagaattggccaacttgcgactttttgatatctttcttttcttcaggatttcccctagataaagcaattaaatacgtcaagttacgcaagcctttcattatcaatgatttaataatgcaaaagattttgtgggacaggagattatgtctacaagtattagaagcctacaacgttccaacacctcctagactggaaatcagtagagatggtggtccccgtgccaacgaagaattaagggcaaaattacgtgagcatggcgtagaagttaaacccgttgaagaaccggaatggaaaatggttgatgatgatactttagaagttgatgggaaaaccatgactaagccctttgttgaaaagcccgttgatggtgaagaccacaacatttatatatactatcattctaagaacggaggaggcggtcgtcgtctattccgtaaagttggtaacaagtcttntgagtttgatccctag

SEQ ID NO: 82459 - DNA, 96 bp, Saccharomyces pastorianus
atgaaacatgtgaaaccctttttcctcttcgttgatcctaaaaaaagcgcgtctggaaaacaggggaagcttcctcacatggaaaaggcttcttaa

SEQ ID NO: 82460 - DNA, 147 bp, Saccharomyces pastorianus
atggagtactggcattatgtggaaactacttcatcgggccaacctcttcttcgaaaaggtgaaaaagatatctttatcgatcagtccgtaggtctttaccatggcaaatctaagattctacagcgacagaggggcagaatcttttaa

SEQ ID NO: 82461 - DNA, 474 bp, Saccharomyces pastorianus
atggtttcgaacgaaacgcagggggaattcactaaagatactctacctacacccatttgtatcaattgcggtgtgccagcggactatgagctcaccaagtcgtctataaattgttctaatgcaatcgacccgaacgccaacccacggaatcagttcggagtgaactctgagaacatttgccccgcctgtacttttgctaatcatcctcaaataggaaattgcgagatttgcggccacagattgcctaatgcatccaaagtacgatcaaagctgaacaggctaaactttcatgattctagggtccatattaagctagaaaaaaattcactggctagaaacaagagctcgcattcaggcattatcagtcctcagtcctcgacaggatcatcgacagaattcgtgcaattgagtttccgcaaatctgatggcgtatgttttcacaagaccagggatcctctagagtcacctgcagca

SEQ ID NO: 82462 - DNA, 1224 bp, Saccharomyces pastorianus
atgtacgcttgcgagctgctgaatgacgacggatctattatcgtttttttgcctggtgtgggagagattaataagtgctgcaatttgctagctaataaatcaaatgaagcagattttatggttctacccttgcactccgctctaactcctgaagaccaaaaaagggtgttcaaaaaatatcatgggaaaaggaaagttgttgtatccactaatattgctgaaacatctattactatagatgactgtgttgcaactattgacacaggccgtgccaaatcgatgttctataatccaaaggataatactacaaaactaattgagtcgtttatttcaaaagctgaagttaaacaacgtagaggtcgtgctggtagagtacgtgaaggtttatcttacaaattattttctaaaaatttatacgaaaacgacatgatatcaatgccaattccagaaatcaaaagaatcccgttggaatccctttatttatctgttaaggctatgggtataaaggacgttaaagcgtttttgagcacagctttggatgcccctcctttaccagctctgcaaaaggcagaaagaatattaacaacgataggacttgttgatgagtccgacaagtcactcacacagctaggtcaatttattagcctgatgcctgtcatggatagtaagcatggtaaattactaatatacggcattctgtttggctgtacggacatttctgttttacttgtctcgatactcggtattggagttttgcctttcatcggaggttttgaaaatagggaaaagataaaaaaactgctatgtaaatatgaaagtcgtggggatttatttgcagtattggaaattgtcagagattacttcaaaatcaaagattcgagcatcaaaaggaaatatttgagagacaatttactttcctataataaaattaatgaaattaagtcatcaacagcccaatattattctattttgaaagatgtaggctttctaccaatggactataaagttggaagcatttctgatttgaataggaacgagcgaaattttgatatcctaagggccattctcacgggtgcgttttatccacacatagccagggtgcaactaccagatgtaaagtatctatcaacaagttccggtgctgttgaaaaagatcctgaagccaaaatgatcaaatactggattgacctgcaggcatgcaagcttgcactgccgtcgtttaca

SEQ ID NO: 82463 - DNA, 1605 bp, Saccharomyces pastorianus
atgctttataaagatccattgtctttcttattgtttaacttaccggaggatgatttaccaccattttttcataaaaagaaaggtgatacaaaaaacaaggttgaaataacaaacctaccgttatcaactagaatgatcgttgagcgtttaacagaaattggtgtctcttcagatgaagccttattggctttacaacaaaacgatatgaatgaaaatgaagcggccgggttcttgacgagggaaattttaccaactttaaatagcaatacgaatgaacctgtatcagaaactgaatctatagaatgttggaaccaagagctagagagcctagagagcatttatgagggctgcgtgatggacgccaaggaagattcacactacacgctcaatttaattgaaaaactcaaaataaaattgaaagtatatagaaccaaaaattatcctgcatcattacctggtattgtagtttcaacctttgataaaaattacaagctacctgattatattaagaaacaaatattaaccaggttactgcattatctccaggaaggaaatctaataggcgatatgttagtatatcatatttatgaatggttgaaagagaatatatctaagataattgacaaccctggcccattaatttcagattcagattcgaaaggtgcaataaacaaaagaaacatttcaaacggtaagagaagtataaataattctagttcgagaaaatttacaaaaaccaccatttctgaagacacactctctgtcctaagggaagagtacacaaaaaggatcaaaagttctgaatacaaaagtatgcagttagttcgagaacaactgcctgcctggaagaagcaaaaggttattatagatatcatcaataaaaacgaagttgtattgattactggtgaaacaggttcgggtaaatccactcaggtcgttcagtttatactagatttcttacagaaggaaaaaggagatttcggtaagactaaaatcgtatgtacgcaacccagaagaatctcggctattgggcttgctgaacgtgtttctgatgaacgctgtgtaacttgtggggaagaggtaggttacgtaataagaggtgtcaataaaaccaaagcttccacacgtatcaagttcatgaccacaggtgttcttgttaggttgttacagaatgctagaactatgttagaaaacacaattgttgttattgatgaagttcatgaacgttctattgatactgacttgatagtgacattgatgaaaaatctcttacatagagttcgcggcatgaaaactgttttaatgagtgctactgttaacgttgacttgttcaaaacattctttccggggctagcaacatgtcacatagaaggacgcactttccccatcactgattacttcttggaagacattcttagtgaccttgacttcaagatcaagagagagaaggctttgtcttatgatgatgatagcgttgatgaaagaaataatgacgaccaatatttgaagccgagagcagattctaagttttttacatctgggcaaatcaattatgatttgctttgtcaagacctgcaggcatgcaagcttgcactgccgtcttta

SEQ ID NO: 82464 - DNA, 732 bp, Saccharomyces pastorianus
atggccaaaaaaacgaaaaataactcaaaaagttcaactccagtgaatgatgtaccaacaactgctggcaaaaagaaagcaaaaggaaaaaagggacaagaaccagagccagaagatgacaaaagggccaagcaacaaagtaatagagcaaaagtgacatccacagcaagctggacaggtaaattgcctcatacagtcttacacgaaacatgtcagaaacgaaaatggaataaggtagagtatgatatgaagaaaatcggtgataaaggtttcattgcaattgcagttttgtcattcactgacccaaagacaaaagaaacattgactgcaagaatgaacgatccaacctatgacaaagcttcaggaaaaggccttgtaattcttcaagaaactccaattgaagctagacacatggcctccactattgcgctatatcgcattgcatacaacaccaacctgcacatgatgcttccgccaaaccatagaaaaacatggtatgccctcgacgattttcgaaaagataacctgaaaacagacgaaaagcgtataaacaaactatttgatcttgatcccttcaagacaatggtggaagacagaaagctcaaagcccaacgtgaaaaagaacaagtagcccagaataatcaagcacagaaagaacaagttgcacgaactattttatctagccatggtggaattcttcttctggaaaggacaggcaagagagaaaagtag

SEQ ID NO: 82465 - DNA, 3657 bp, Saccharomyces pastorianus
atgtcgcaacaggattcacagcgctggctgcccacggatcggctaatatatggtgtgctagtcaaatctttccttcccttacaaaggtatcctgagctggtatatgaaaacagcaattatgcgaacgtttatgtgggtgcagaagtttacgtcttcgaagaatctgtggataagaaatggtgtagagcgtaccaatgtttacgaccctttcctgaagaattcatatcgaatatgaactcggcgaatgatgtactgccagccgtgaaaccgaaagtagtgatatttcccagaaaatatgttcattttgaagcagaaaaagctgtcagcacaatgccatttttcaaagcacctagtgctgaggattttaaaccattgataagtaaagaatgtgagtcccgctccttttgtgacagcctatatgttagctctactgatgatatatcaactggtaaaccaagaaagacaccgagacctccgttcccctttttcagataccaaaagaggtcctttaaggacgaaatgggtcctatattatctcttatttcctcgcatgtttactctatgtattcaattggcgagttttctatatataggaaaatgataaaactttattatgatttggacactatacgatttagattgtctatgaatttaaccacagaggctgagaaaataaatctgataagagcagcaacatccctaagaactaaaatcgcaaaatttttgtcctccacatacaggaagaataaactaattgctaactctactccaagaaacccagatccttatggtttcgaaggaatttttgccagggatattgatactggcgaattgctctcatacgagatcgacaaattaagaactttagtgtcatcgtcaatgctttgtggtttaactaataattttcctactgtacctgtggtagagtccgatgatcagtcctcgtctaacggactattcggcacagttagatcgagcattttggttaacttgaaagatctggcatgggatccctctatatcagatcctaaatatcaagatctttctatttgtgtatacttgagaaccaaagacgaagatttaacagagtcttttaccatgacgaagtcgtccaatatggaatcagctctagatgaaattcctgcaatgttattcaagaatattttagaaacgatagtgcataaaaataaagtatacttagtagtagtgctgaaggaaacaatagcaattacaacagaaactgctccggaaatttcaacttacaatatatctaccgaagagtcaagttcacattccccattttctccatttaattcatcgactgagaataagattgaccacgtaaaaaagggcttagctgccggagttattgacatatctccggtattcaagttttataacggcccatcagttgtgaataaagctcagaggtttaatctttatctttatagctccgattcctcggattcgcaaaacttcaactcttcaaaagatgcggatttaggttggggcgggttaataaataagataataaaagattcttctgaaggcgtttctgtgaaccctagggctgtttctttatcggtaactgtaaaggaaattataggcaaacaagaggcggaaaaagtgctctccacatctttagtaccgataagatctattcccacatacttttatgataccatgtttagccaagcagaaagaatttatctgaacttaggtagggtgtcgctttatggacttcctgcagctgatacaaatatagaaaatgttaccgttcaaatatcctgcaggaataaggccgtaaaattttgcaaaaataagctcgaagagagatctggggactggaagtttgtttcagttcgtccaaatgagagcataggcgaatcgattagaatagaaggggtagagaacatgaacgaagacgagacattaagagtattggtatatttgaatggatttttgatggcaaaatcaaatatacatatcaagaaaaagaacgaaatcatagaatatagaaagggtaccgtatttcaaataatgtcatccaaatcagtacccctaattcatttagagcttgaagcatcatattttggtcggagatataatatcaaccctgccattacaaatttcttagttcttcaaaccaaaaatgttgaattcgaccagcaacttaaagagcactattcagttacattgaagcagctgaataacgtttcttttaaagatttactaaagcattttgacacaattttagcacactatttgttacttcttgaatcggtgaatgaagctactgataaaaaaggcctttcttcaagtttacccaatattgtattcagtgaattcgtcaagtttttaaatttaatgttaacacaccaagaaaactctagatattggtttaatagactgtacaaaaaagtcatgtcaaaggaactagaatgtcccaatgttgcaccgatactaataaaacatatgacaacgatctttgataggagtcattcttcttggactagaacaggaactgcaatctgccgaaccatcctgtacatagttgtgttggcaatcggttcgtctcattctgatgaaatgcctaatttcagtcattttttcagaagcttgcacaaatttttaatgcttgctgatgagccaataatggcggatcaaattttgttaatagaaagtattccctctatgctggagacaatgaccaatcactgtaaggtggaagacttagttcgttttgtgatcggactgtttgaatgttgccaggaaaaagaaatgaatcaaaaaatgtacaccaggccactctcagttcgagaagaagaatatttgaatacaaagtttaattgcctgttgaagttaattaacaagaaggttttgcaaaattatttaaccaatacggaatccgtagataaactgaggttacagtttttatctaaaacccttgagtggttacttacgccgtatactccaggcgatgacaaatgttttcacgtagaatccttacgcttggttaattctgttttcattacaataatcgaagattacaaatttgacatgctacaaaggaacttgataaggttactaccatatttgtgtaagtccttcgtccatttaagaaggtactgtaagaaagcacgtttaatgaggcctcgaagagtttttaccatgctttttcccagagaaattccatgcaactacataccggttgattcaatagtgaatgatgaagtagtcgtagaagttcttctagagcttgccatcataatttgtgaaataacgaaaattgcatcaagcagatttccatcatatcaatctttcagcgaaatcataaacttgtgcgataaagacactctttttcaatcaaatttttattcacgacaaatcacgaatgaaaatgtctatacaataaccaaaacagtttttttgttttttaaacaagattggttcccaggaatgaagtggcttggcgtatcagcgttattaggaagatcgtctctaatattgcttagtttatgtaaggattttatcatagaaaataattcaccttctccatcaaaggagtctgaaaagagggttgacatgcgactttgggcagaatatgtaaaagtcatactactagtttcaaaccataaaagtgcatccttgatctaa

SEQ ID NO: 82466 - DNA, 672 bp, Saccharomyces pastorianus
atggtgatgtcaagaatacgagatacaatagccaggccattccagaaccttacagcccttgagaaagtggtacagtggctaagattagggacgacattactcataatctctttcgggttggcgttgactgtcggacccctttcttcgccaagaacattgtacatgtcacgactggatacttactctgctgatattacgacgggtttatttaccgtgttgagagagtctatggagcagtcgacatctacagaagaaaataacggtgtaggcctaacaacatccgaactgtatatattgactgcttacactgaaagtcagataaagaatgttcctcagtacatcacagtgtcgctttatgggaggtgcgattcaacatataccatggtggaagtattcgactctgaaggaaatatgcatagcgtaaagaattcgactactaagagtacctgcagtagcataggaacggactatctttttgattatcgtgaggttttagaaagcttgggtttagatatcattttagattatgcatacaacaaaatcggttcacaacaggcagaaagttctgcatacacgacctacatgaggagtttaaaacataaaaaggccaacgtgttacatttactctatgcagttattagtttccaggtgtgtatgttattgttggaataa

SEQ ID NO: 82467 - DNA, 168 bp, Saccharomyces pastorianus
atgatgggtgaaagaattcaaaactgtaatgctgacgaaggcttgataaccctttgcatactttcttcactgtcgttgcttgaccggaatcttatgtcctgcaattcgaattcctctctagtagcaaatggttcgtgtttgccgccattgcttatatttgcggtgtga

SEQ ID NO: 82468 - DNA, 912 bp, Saccharomyces pastorianus
atgtcacttcccttaaaaacgatagtacatttggtaaagccctttgcttgcactgctaggtttagtgcgagatacccaatccacgtcattgttgttgctgttttattgagtgccgctgcttatctatccgtgacacaatcttaccttaacgaatggaagctggactctaatcagtattctgcatacttaagcatcaagccggatgagttgtttgaaaaatgcacacactattataggtctcccgtgtctgatacatggaagttactcagctctaaagaagccgccgatatttataccccttttcattattatttgtctaccataagttttcaaagtaaggacaattcaacgactttgccttcccttgatgacgttatttacagtgttgaccataccaggtacttattaagtgaagagccaaagataccaactgaactagtgtctgaaaacggaacgaaatggagattgagaaacaacagcaattttattttggacctgcataatatttaccgaaatatggtgaagcaattttctaacaaaacgagcgaatttgatcagttcgatttgtttatcatcctagctgcttaccttactcttttttatactctctgttgcctgtttaatgacatgaggaaaatcggatcaaagttttggttaagcttttctgctctttcaaactctgcatgcgcattatatttatcgctgtacacaactcacagtttattgaagaaacccgcttccttattaagtttggtcattggactaccatttatcgtagtaattattggcttcaagcataaagttcgacttgcggcattctcgctacaaaaattccacagaattagtattgacaagaaaataacggtaagcaacattatttatgaggctatgtttcaagaggtgcctacttaa

SEQ ID NO: 82469 - DNA, 171 bp, Saccharomyces pastorianus
atggcagacacaccctctgtggcagtacaggccccaccgggctatggtaagacggagttatttcatctccccttgatagcactggcgtctaagggcgacgtgaaatatgtgtcgtttctgtttgtaccgtacacagtgttgcttgctaattgcatgatcaggttgggccga

SEQ ID NO: 82470 - DNA, 1140 bp, Saccharomyces pastorianus
atgaaagagaatgaacttaaaaatgagaagagtgtagatgtattatccttcaaacagctcgaatcccaaaagattgttctacctcaagatcttttcagaagcagctttacctggttttgttatgaaatttacaagtccttagcgtttcgcatctggatgctattatggctaccacttagcgtctggtggaaactttccaacaattgtatttacccacttatagtttcacttctggtcctgtttctgggaccaatatttgtccttgttatttgtggactttctcgtaagcgttccttatcgaaacaactcattcagttttgcaaagaggttactgaaaacacaccaagttctgatcctcatgattgggaagttgttgcagcaaatctaaattcgtacttatatgaaaataaggcttggaatactaggtactttttcttcaatgccatgggctgccaagaagcgttcagaacaacccttctcgaacccttctctttgaaaaaagacgaagctgccaaggttaagtcatttaaggattccgtcccttacattgaagaagcattgggagtttattttacagaagttgaaaaacaatggaagttgtttaatactgaaaaatcatggagccctgttggcctggaagatgctaaacttcccaaggaagcttaccgatttaagcttacttggtttttaaagaggatttccaatatttttatgttgataccattccttaattttttgtgctgcatatatgtgtcacggggaatgtgccttctattacgcaccttgtatctcgggtggattcttttcatgttggtacaaggtttccaaaatataagggttttgattatgagcatggaacacaagatgcagttcttgtcgactattataaatgagcaagaaagtggtgcgaatggatgggacgaaattgcaaggaaaatgaataggtacttgtttgagaaaaaagtctggaagaatgaagagtttttcttcgacgggattgactgtgaatggttttttagccacttcttctaccgcgttctatctgcgaagaaatctatgcgggctctatcattgaatgtggaactatggccatacattaaagaagcgcaattatcctgcagtgaggagtccttagcgtaa

SEQ ID NO: 82471 - DNA, 1515 bp, Saccharomyces pastorianus
atggatagccaagtagaaggcaaaatatccccctcacagaaggagtcctcctccacctcaggcctcgtttcacctagtgaagatggcccagcacatcaaaaaatacacagagaccaattaagtgtggatcaaatcaagaaaatcagagaagaacgtgctcagaagagacaagtacgtaggaactctctaatatcccaagggaaggaccctgacttcccaacgcctgacttacaattcattgaaagaccattcctccctatcaaccatgataattcgaaaggtcttacaccagcgaccatacaagtcacccaagattcattggacgttaaaataatgacctataatactctagcacaaaccttgattaggagagattttttcccagaaagtggaccagcgttaaagtggcataagagatcaaaagttttggtccacgaattgaaaaagtacaggcctgatgtagtatcgttgcaggaggtcgattacaatgaactcaacttctggcaggagaatttccataagttagggtttgatatgattttcaaaaggcatgaagggaaaactcatggactactagttgcatggaacaataaaaaattccagttagataatgattggatgctggactacgataatatattggcgggaaatgtcatttcagcaagaacaaggactaaaaatattgcccttattatatcgctatatttcaagggtataacagattcatcatcaagaggaattatcgtcgcaaatacacacctattttggcatccctttggggtatttgaaagattaaggcaatcttacttggttttacaaaagatccaggaaattaaagcatgttccaaatataatggctggcatagcctactgatgggtgatttcaataccgaacctgaagaaccaccttacttggccataacgaaaagaccactgatattaaaaggcccaataagagctatggtggaatgctcactagcgtatcggtattcaaaaaaaaggaatggtgaagaaagtgaccaggatgatgaagagtgtgatgaaaagtctaggggcgaaggccattcagatcaaccacaaaacccaaaaccagagagctttacagccacaaaggaagaaaaggctctggtgaatcaattagttgcgttgcataattcactacatgtgaaaggagtatctttgtatgggattggctacggtaaagtgcatcctgaaaatgctaacggaagccacggcgaaccgggactctcaaactgggccaatacatggtgtggattattagactacatattttatatcgagggtgatcataatcaggacacgcgtcagaaagagcctctgaatgcctttgaaggaaataacaacgtaaaaataatcggatatctgaggatgccgtgtgcacaagaaatgcccaaacactcccaacctttcgagggagaatatgctagtgatcacatttccctaatgtgccaaatacgcttgttttttgtggggggggggggggaaagtacatag

SEQ ID NO: 82472 - DNA, 465 bp, Saccharomyces pastorianus
atggactctcttgaagctagattacaattcattcaggtcctgaagaacctgcaaaagacgctgcacaagaccagagactctatcacatcatcgtcgaccaccacaccaccgtcatcgcaacaaaagctgaacaatgaccctatacagttctacttgagaaactacagacatcattacgaggacttccaccagtgtttgttcgatacaaccatgaagatggacccactagatagactggacgtagtgatatactatgttagaataataagaaacttatatccgcatagccattccaatgccaatgttgcaaaagtgttaaacgaagtgctactcatggacatagacttggtttttgagctttgtctgccctgccaggactggaaatccctcacgaatcaagccacctgtaaagagctattccttgacttatccaaactaatccattacgacgccaccagcgtcacg

SEQ ID NO: 82473 - DNA, 306 bp, Saccharomyces pastorianus
  modified_base (197)..(242): a, c, g, t, unknown, or other
atggaagcagacagggaactgcacaagaggtcgaaagagacaagttggtacatcgaaaggccctccaacgatatactggatgaatccgaatttaaaagcttgtggacgcattttgaaactactgattccggatttgataaggacgattacaaaaatatcaaggctttaaatgacattgcgaaggcatcttacatgtnnnnnnnnnnnnnnnnnnnnnnnnnnnnnnnnnnnnnnnnnnnnnntgtgaagagaatccgtatctgtattatatatatgtatatacgtatcaatgcgcgtacaaaatga

SEQ ID NO: 82474 - DNA, 3378 bp, Saccharomyces pastorianus
  modified_base (3362)..(3362): a, c, g, t, unknown, or other
atgcctaagtttccacagtttcgattgattttagttttgttttacttaatatcaatgatacaatggtcggtaatcactttttcgctggggttctttctaaaggtctgcatctttgcgtacttcgtattcttcaaatccttgcctgatttaccgaaacctcagccaagatttgttgatatcgtaccggaaagttcgaatactgtggatgttgataaagaattgaagtctgtcaagggtttaatacaagatgggaacgcgcaaattgggaaagaattagagagtattgttaatttaattattaaagattttgttcagccttggttcacaaaaatcgataagaatagtgacgcagagttcctcaaagtaataaagtggagattattacaaacgctcctagtggtgaaggacaagttgatgaagaatgatagtgccagcttgattgttctgaagctgttgcctatatttaacaaacatttcagcactttttgtgatgccagagaagctgtgctaagcgatttgactcttgaaaggcataaatcagccaacatcgatctacaaattgccgttgagtttaataaaaattacaaaatacataaatcattatcattgaagccgaatgctcttcagaaagaaattgaaaaatccataaggaaaactgtaatcgggctccttcctcacctttttgataatgatgagttagattcattgcttgttttcacattaatgacggaagttctcactacgtgcattatttctccattaattttcaaatttactgatccagatagttggaatttaagaattgtaagcctttcacaaaattatttcgaggaaaagcacaaagttcacaagataagaagaatgttgagtaaagagttacaagatcatagaaaagtgatgaatgacgtagcgaacaaagatgttggagaaccctcaagtgaaaaattggagcttaatgctgaatatactggaaaacaattcgagcattatctcaaccagttggactccttgttggatttaagtgatatcaaatatgttgcgtattcattggccctcaaaatataccaattgaaagaaaatgaacatttgaccaaggaaaatttgaagtataagaaacgattactgctttccttaaatttgattgaatcaaagttatcgttccctggctcggaaattgatacggcaagcaaaaagcttgcaagagaggctaattatcccgatttaaatatggataatggaatagtattgaaggaaatggcttcatttcttacctccatcacattgaaggacattgtagacgatagcgagtttcttcctttttttgaatcatttttaggcagtgttcctgaaacacagggttcaacatttttagagtattcgcaaacaattgaatcattcaaaaatcccttggaagatgctacatctgaagatataatttctggttattcaggaattagcacaatgcaactgcaagagatttcttcaaagttttttcataacaataacttgcaaaatatgaaattgctggatgaaggtttagtgaaaaatataatacttttcagaaattcatttcaaatcaacaacgatgaagacacatttatcctagctcggaaaagcgttttactactacagacagaggctataaagtatctcgatgatagatttttacctcttttcaagaaaacaccttcatttctcaaaatgctttcaacgtcccacatcatttcgactgatatatatgctcactttctgagtagaatcggtggtgttaacaatccagaacaaaacaaaataataaaagataatgtgaagactgattttatgaatcctgtcagaatattcgcaaaccccggcatcacagatgctttagataatatagtgaatggatcgggatccaagccgcataaatcaagaataagctcaaatccccgttattctcagctctttggttcagaaaatgacaacattttcaaagataaactcttcgacgatgaaaacgataatacctcagaaatttctgttgtcgaggatcagttggatcacccacgtaatatggagaaagtaagtgtttccagcgggaattcaggcctaaatcctagccaattttatgggtcaaacaactttagggataatatagcatccttgactatttcaattgatcagattgagaaagagcttgaacttttaaggcatttgattttgaaggcagatctgaccaacaatcaaatgcagttgaaaattttaaaaaagtcacaaagaaccctattaaaggaactagaaatgaaggaactgttgaaacagcaatatatggtacaagaaaatggtaatagtttgttcagaaaaactaagatatacattaggtcgtacttcagtgagaattctagtaatggcctaaaagaaataacttattatatcatcaatatccatcattttaacaatgggcaggtaagttcttgggatatggcaaggagatataatgaattttttgaattaaatacatatttgaaaaagaattttagggatctgatgaggcagttgcaagatttgttcccgtcaaaagtgaaaatgtcattgaaatatcatgttacaaaaacattgctttatgaggaacgaaagcaaaaacttgaaaagtacttgcgagaactattatctatttctgaaatatgcgaagataacattttcagaagatttttgacagatcctaccccattcaaactgaacaaggaatatatgcatgatgatattctggaggagccacttcatgaacctattggtagtagtaatagcacaagtaatagcagttctgttgttgatttacaaagctctgaagacggcggtgaattgaatttctatgaagatgaaagacattttttcaccgattctggctatcctttttattcgcaaaataaatcttttgttaaacagatatgtgacttatttatttcgctctttgctttaaataaggccaacgcgggttggttaagaggaagggctataattaccgttttacaacagcttcttgggagcactattgaaaagtatataaaggtcagcattcaaaaattgagatcagaggatcaagtatttgaagcaatagttacattcaagaatatgctatggggtgataacggtctgttcgaaagaaaaagaaatgaaacggcagaggcaacaagaagcgaaggtgaaaggttacggacggaacaactcgctttaaccagtttgcaaagactcttcgcagacacttgtggtcgtgtagttggtctaagagattctcatgaagctgctggccgggtccatgccatgctacagaatccgtatttaaatgccagcttactgttggaagctcttgatgcaattttatntggacataatatgtaa

SEQ ID NO: 82475 - DNA, 213 bp, Saccharomyces pastorianus
atgtataaatgtgtcccgagttattgttctaaagcgggcaccattgtagtaacttattgcgaaatttctgctcttctcgtctcgctcaaaaatcgcgttcagggtaaaaggggcgaaacagagggccagatagaaatttcgagaaaagcgggtcacccccgcccctgcattttgatatggcgtatttgggattgcttgctcgaaagtgtctaa

SEQ ID NO: 82476 - DNA, 210 bp, Saccharomyces pastorianus
atgaacagcgaaaatagtaagataaccttcaagcccaatattctaagtaaaggcgtttatatatttgtactttatggtatgtgcatatgtattgtaaagaattatttcaagacacagttcttccagctactggctccggctattcatgaaaaatccaaaaataacatatttatgatagcatcagattcatttcccaatctttataaatag

SEQ ID NO: 82477 - DNA, 384 bp, Saccharomyces pastorianus
atgtttaaacgttccatcattcaacagtcccgcttattctccaattctgcttctagactaggtaaaaaagtgttctttgatcctgcggtcaatggaaccaaaatcggcagaatagaatttgaattatatgataatgtggttcctaaaactgctgaaaatttcagagccttatgtaccggcgaaaagggctggggctataaaggtgtccctttccacagaatcatcccagacttcatgatccaaggtggtgacactgatttgactaacggtttcgggggcaaatccatttacggtcccaagttcgctgacgaaaatttggtcaaaaagcatgacaaggcaggtgtgttatctatggcaaatgctggacaaacactaacggtctca

SEQ ID NO: 82478 - DNA, 4374 bp, Saccharomyces pastorianus
atgactggcatcaaagctcaagtccatcccccacctgatagtaccctatttcatgaggaggagaagaagaaagtaggaggcaatttacctcaaaaggtcataaatcaacaagaaaggggttctgatcacgctccatcgggtcaccatcaataccaccaactgattaaccatgacgcaaatgacacaaagacctcaaattcagtttctgatgtgtctaaaggtcagaaaactgctgactccaacccggaaggtaagaaacagtcatcaaaagacatatttgttgcctccagcgctcaaaaaaccaatcaattgcccggtcccaacccacagggaagcataggagccgtgccattggaagatttacgtccgaaggaattcagatcagcaccatctaggaagccaaataaattcgacacttcgattactaagcctggcgtcttagacgacttaggcaaacttgatgaaaaggatattaaggaaaaatttcacccagattccgacgacaagttatttccatggcaaaatgttggtgagttccatgcttcaggaaagggttcgccaaatacaaagatgtccagggttataaaagcttacattctggaaaatttttataacgattggtactgtaatatagccaccgttcttggaacttgtttcttctcatggttatttgcttacattgggttttcatggtggtctatgatatttatcttcttgggaactgcgaccgtttacaacgcagaatatacaagattcaacagaaatatcagagatgacttgaaaagagttacagtcgaagaaaccttgtcggatcgcgttgaatccactacgtggttgaattcatttttatcaaaattttgggtgatttacatgccagttttatctcaacaagtcaaagataacgttaaccctcaactggcaggtgttgctccaggttacggtatcgatgcgttagctatcgatgaattcactctgggctctaaagctcccaccataaaaggtattaaatcgtacactaagactggtaaaaacactgttgaaatggattggtcatttgcattcaccccaagcgatgtctcggatatgacagctactgaagctagggagaagatcaatccaaaaatatctctgggtgtcacgttaggaaaaagttttgtctctaaaacaatgcctattttggttgaagacattaacgttgctggtaaaatgcgtattaaagttgaatttggtaaagctttcccaaatatcaaaattgtttctttacaacttttagaaccacctttgattgatttcgcactgaaaccaattggtggtgatactttaggtcttgatgttatgtcattcttgcctggtttgaagagttttgttaaaaacattatcaactccaatatagggcctatgctattccctccgaaccatttggatattaatgttgaagacattatggctgctcaatcaaaagaagctattggtgtccttgccgtaaccattgcttctgccgactctttgaaaggctcagatttcattaccaatactgtcgatccttatattgttatgactaccgaagatgctgtgcctggtacagatgaagaagtgcgtacatctatcaaatcaaatgttaaaaatccacgttggaacgaaaccaaatatctattattaaacaccttagagcaaaagttaaacttaaagtgctttgacttcaatgatgtaagaaaagataccgtaattggtgatcttcaacttgacttggcagatttactacaaaaccctgttttggataatcaaactgctgaattaagatccggtacaaaatcaaaaggtattttacattattccttacactggttccctgtgaaagaagataaatcagaggaaaaagcagttgagcgtgccgaagctaaggccaagggcaagaaagaagatgaaaacgaggacactactgaaaaagaagaagacgagaatgaagaaagttctcaaactgatgtcgggattgccaagatcactttacaaaaggtcaaatatctggatacaaccagttctatgaccggtagcttgagcccatgtgctgaattattcattgatggacaaaaagtaaagagctatagaactttgagacgtatcaatgagccatcttggaatgagaccatcgaagttttggttccatcaaaatctaactctaagtttgtcctaaaaatattcgatgacagaatgaatagtaaggcgctgatctgtgagtattcatcttctttagatgatataatgactactttagacgctgctcaagagtttgttaaaggctcaccacaaggtgacatttatttggatgtttcttggaaatcaattgaaatgaccggagcttttgccgctgcaaactctgtaagcgaacctattggttgtattaagctagacgttaaggatgccattatcaagggtgacttatccggtgtaggggatgttgatccatattacaccgtatcgttgaatagacgtgttctttacaagtccatatatcattctgatacggatcatcccatttttgacaacagcacctacgttcctatcttctctccaaatcaaattttgactctcgaatttcatgattatcaaaagatcggcaaagaccgtttcattggctctgtacaaattcctacatcaaatgttttcaaaaaagatcctaaatcaggaaaatatgttgggaataatgacaaagaagaaatttcaaaactaaaattaaaagaccacaaacacaaagttaccgaaagcattgtcaatgtttcaacaacatttatcccaatcaatctggtgtattcccctgaggagttggtgaatgttgagaaactagaaaaggagttgaaggaaaagaagaaaaaattcgaagctacccaagaagaaaacgagcaagagatggaaaaaaatccaaaggaatgggaagttgccgagatcgaagacccatttgacagcgatgaaaaaaaaataaacaggaaggccaagttatctttaaacgagttgatcaagcaaaaatctggtattttgtctatgcaaatattggaagggactttgagcccatcctctgcttacctagaaatcttagcggatgacatttcgtaccctgtattcatttgcatgaaaccatctcaaggtaaactaaactcggagatggcaaatattttcattagagatttgaattacagtaaactacattttagagtatcgaagaaacatattgccaaagattcagatgatgtcatatccgaaacttcctatagtacattgaagctactaaagcaagcttacgaagagcccatgtggttaaacttcaatgggtctaaaatgaaggtaagatttttgtacacgcccactagcgtgaaactgcctagcagtgaaagtgttgaagacactggttatttgaatataaagcttatttccggacacggtctgaagtccgcagataggaatggctattcagatccatttgttcacatctttgtcaatggtaaaaaagttttcaaatcgaacattaaaaagaaaacattggatcccgtatggaacgaagatgctaaaataccaatcctttcaagaagtaagaatcaagtcatatttaatgttcttgattgggatcgtgcaggtgataatgacgacttaggccaagcttcacttgacgtttcctcattagaagttggtaaaacttacaactggaatttgaatttaaacacacaaggaagtatcaaattacaaggttcattcaacccagaatatatcaagccaagttttgatatcgtgaaaggcggtatcactgataagccgatgaaaatagccagtggtgcagcccatgcaactgttggcatagctggtactggtataggagcagcaacaggagttgccactggtggtttaaagaaaggtggtcaccttctaaaatctctaggtggcaatccaatgaaaagaagcaagagcagcaatggaaatgagtccaacggtgcaaaaaaatcatcagagaaaaaatcttttgataggagatccccaagtaatttgaatagcactagtgtaacaccaagagcttcactagactatgatccatcagtacctaacacaagttacgcgcccgttcaaagcgcatctcctgcagtcaagccaactgacaacacttctagctcaagcaacaaaaaagatacccctagtagcaactctagaggacattctcgtgcaagcagttttgcgcgtactttagctcctcatggcacttacaatggttttattaccgtggttgctgcggaaaacgttgccaagcatgttcaaattaagatctctttaactcaaggtggtagactaaaacacatatacgaaacgaccagccaacaagccaataatgatggt

SEQ ID NO: 82479 - DNA, 1608 bp, Saccharomyces pastorianus
atgtccgctaaatcgtttgaagtcacagatccagtcaattcaagtctcaaagggtttgcccttgctaacccctccattacgctggtccctgaagaaaaaattctcttcagaaagaccgattccgacaagatcgcattaatttctggtggtggtagtggacatgaacctacacacgccggtttcattggtaagggtatgttgagtggcgccgtggttggcgaaatttttgcatccccttcaacaaaacagattttaaatgcaatccgtttagtcaatgaaaatgcgtctggcgttttattgattgtgaagaactacacaggtgatgttttgcattttggtctgtccgctgagagagcaagagccttgggtattaactgccgcgtcgctgtcataggtgatgatgttgcagttggcagagaaaagggtggtatggttggtagaagagcattggcaggtaccgttttggttcataagattgtaggtgccttcgcagaagaatattctagtaagtatggcttagacggtacagctaaagtggctaaaattatcaacgacaatttggtgaccattggatcttctttagaccattgtaaagttcctggcaggaaattcgaaagtgaattaaacgaaaaacaaatggaattgggtatgggtattcataacgaacctggtgtgaaagttttagaccctattccttctaccgaagacttgatctccaagtatatgctaccaaaactattggatccaaacgataaggatagagcttttgtaaagtttgatgaagatgatgaagttgtcttgttagttaacaatctcggcggtgtttctaattttgttattagttctatcacttccaaaactacggatttcttaaaggaaaattacaacataaccccggttcaaacaattgctggcacattgatgacctccttcaatggtaatgggttcagtatcacattactaaacgccactaaggctacaaaggctttgcaatctgattttgaggagatcaaatcagtactagacttgttgaacgcatttacgaacgcaccgggctggccaattgcagattttgaaaagacttctgccccatctgttaacgatgacttgttacataatgaagtaacagcaaaggccgtcggtacttatgactttgacaagtttgctgagtggatgaagagtggtgctgaacaagttatcaagagcgaaccgcacattacggaactagacaatcaagttggtgatggtgattgtggttacactttagtggcaggagttaaaggcatcaccgaaaaccttgacaagctgtcgaaggactcattatctcaggcggttgcccaaatttcagatttcattgaaggctcaatgggaggtacttctggtggtttatattctattcttttgtcgggtttttcacacggattaattcaggtttgtaaatcaaaggatgaacccgtcactaaggaaattgtggctaagtcactcggaattgcattggatactttatacaaatatacaaaggcaaggaagggatcatccaccatgattgatgctttagaaccattcgttaaagaattactgcatctaaggatttcaataaggcggtaa

SEQ ID NO: 82480 - DNA, 351 bp, Saccharomyces pastorianus
  modified_base (9)..(75): a, c, g, t, unknown, or other
atggttttnnnnnnnnnnnnnnnnnnnnnnnnnnnnnnnnnnnnnnnnnnnnnnnnnnnnnnnnnnnnnnnnnnncgatttacttttaatgcatttttgcagtcaaaaaaagcttcgtttacatttatatgtatttatgtttgtatttctgggggaaatatgcctttatgggcgtatatactctttcgtacgtttctacatccgagtagcagtagtaactcggtattgtgctttcgtcgccataatcaggactatcataatcgaattttttttgcgttttgttgtcaccacatatggtcccttcttcctcatcatctatcaatattcccattcgtagacagttctacttaa

SEQ ID NO: 82481 - DNA, 1680 bp, Saccharomyces pastorianus
atgccagatgaaacaaattttacaatagaagatattgagcctaggcctgatgcccttcgaggtttggacacccagttccttcaagacaacacagcattagtacaagcatatcgtggtttagactggtcagatatttcttcgttgacccaaatggtagatgttatagagcaaacagtggttaaatatggcaatccaaatgattcaatcaaattggccttggaaactattttatggcaaatattgcgtaagtaccctttattgtttggattttggaagaggtttgctactattgagtaccagttatttggtctcaagaaatcgattgctgttctggccacctcggtcaaatggttcccaacttctctggagttatggtgtgattatttgaatgtgttgtgtgttaataacccgaacgaaacggattttattaggaataattttgaaattgcaaaggatcttattggcaagcagtttctatcacaccctttttgggacaagtttatagaatttgaagttgggcagaagaattggcataacgttcaaagaatatacgagtacattattgaagttcctctacatcagtatgcgcggtttttcacatcttacaagaagtttttaaatgaaaaaaatttgaagacaacaaggaatattgatatagttttacgaaaaacacaaacaacagtaaatgaaatttggcagttcgaatcgaaaatcaaacagcccttcttcaacctgggccaagtgttaaatgatgatttggaaaattggtcgcgatatttaaaatttgtgacggatccttcaaaatccttggataaagaattcgtaatgtccgtttttgacagatgtttgattccttgtctttaccatgaaaatacgtggatgatgtatattaagtggctaacaaagaaaaatatatccgatgaagtggtagtggatatataccaaaaagccaatacgttcttaccactggatttcaaaactttgaggtatgattttcttaggtttttgaaaagaaaatatcggtcaaataataccttattcaataacatattcaatgagacagtatcgcgttatttaaagatttggcccaacgacatattacttatgacggagtacctttgtatgttgaaaagacattcttttaagaattccttagatcaatcgccaaaggaaattctagagaaacaaacatcgtttactaaaatcctagagacatcaatcaccaactacatcaataatcaaattgatgccaaggtgcatttacagaccttaataaatgataaaaacttaagcatagtcgtggtagaattgataaaaactacatggcttgtacttaaaaataatatgcaaacaaggaaatatttcaacctttatcaaaaaaacatcctcattaaaaattctgtaccgttctggttaacttactacaaatttgaaaagagtaatgtaaattttaccaagctgaataaattcattagggagcttggggtagaaatatacttgccgactacagtaatgaatgatattttgacggattataagactttctatttaactcattcaaatatcgtcacgtatgaatcctccattatagattcaaatacatttgaccctatcttgtatcctgagctgaaaatgtcgaatccaggggatcctctagagtcgacctgcagcatgcaagct

SEQ ID NO: 82482 - DNA, 432 bp, Saccharomyces pastorianus
atgccagtagtcaatcatgaggatagtgaatttcacctttcgcacacagaagaggacaagttaaatgagttccaggtcatcacgaatttccccccagaagacttgccagatgtggtgagactgttgaggaaccatggttggcagttagaaccagcattgagccgatatttcgatggagagtggaaaggcgaaccagaccagatgggagagtccactcaaacgtctacacccatggctgagaccttggttcctcccgtgttgggacctagaccgttgttatttacagcctcattgcccgtggtcagaccattgccagcgaacttccgcaatgatttcagaacaattgggctaaatggacgctctaacactgtgtggtccatgtttgaatcttttagttatgatggtaacccctttctttttattttactgttg

SEQ ID NO: 82483 - DNA, 555 bp, Saccharomyces pastorianus
atgcaggtgttacagttatggttgacaactttgatctctttggtggtggcagtgcagggattacatttcgacattgcagcatctacagatccagaacaggtttgtattcgtgattttgtcactgaaggtcaattggttgtcgtggatattcactcagatggttctgttggtgatggacagaaactaaacctcttcgtgcgtgattcagttggaaacgagtatcgtagaaagagggactttgcaggcgacgttcgtgttgcgtttactgctccatcctccacggcattcgacgtttgttttgaaaatcaggctcagtatcgtggccgttctttaagcagggccattgaattggacattgagagtggtgctgaagctcgtgactggaacaagatcagtgccaacgaaaaattgaaacctatagaagtggagttgcgtagagtggaggaaattaccgacgaaattgtcgacgaattgacttacttgaaaaacagagaggagagattacgagacaccaatgaatctaccaacagaagggtaagaaatttctcaatttag

SEQ ID NO: 82484 - DNA, 576 bp, Saccharomyces pastorianus
atgagcaaatccactaacgttagttatgaaagagtagagctattcgagaacccgaaagtacctatcgaagttgaagatgaaattctggaaaaatatgcggaatccagtctggaccatgatatgaccgttaatgaactaccaaggttcttcaaggatttgcaactagagcccacaatttggaaactggtgagaaatgaagacgtcattatagaaggaactgacgtaatagatttcacgaaactggtacaatgcacatgccagttactgatactgatgaataatttaacagtaatagatgatttatggtcgatgcttattagaaactgtggcagagacgtggatttcccgcaagtggccttaagagatcatgtattaagcgtaaaagaccttcaaaaaatctccaatctcatcggggctgaccaaagttctgggaccattgaaatgattagttgtgctactgatggcaagaggcttttcatgacatacttggactttggttgcgtattgggaaaactaggttatcttaaagatgtgaagcgaacaaatccatattcaagacctgcagcatgcagctgc

SEQ ID NO: 82485 - DNA, 798 bp, Saccharomyces pastorianus
atgggtaagaaaaaactgaaaattttatccattttccaaagggataattacacaggaagaatctatatcgaagcccctaagcaatccgttattgaaaaattttgtaatggtgttccagatatttatatttctcaaaaattgctaattcctgtccaagaattacctctattactaaaaccaaacaaatctgatgatgttgctttggaagaaggtagttacgttcgtattaagagagggatctataagggtgacttagctatggtcgaccaaattagtgagaataatttagaagttatgctgaaaattgttcctcgtctggattatggtaaattcgacgaaattgatccaacaacacagcaacgtaaatccagaagaccaacttttgctcatagagcaccaccgcaattatttaatccaacaatggctctaagattagaccaagctaacctgtacaaaagggatgatcgccactttacttataagaatgaagattatatcgatggttatctgtataagtccttcagaattcaacatgtggaaaccaaaaatattcagccaactgtggaggaattggcaagattcggttccaaagagggcgcggtagatctaacatcagtttcacaatcaatcaagaaggctcaagctgcaaaggtcactttccagccaggtgatcgtatcgaagttctaaatggtgaacaacgtggttccaagggtattgtaagcagaaccagcgaaagatattgctactatcaaactaaatggctttacacgcctctagattggggatcctctagagtc

SEQ ID NO: 82486 - DNA, 138 bp, Saccharomyces pastorianus
atgagtgacaactcggacacaaacgtgagcatgcaggaccatgatcaacatgttgctgatcccgtagtggttccgcagtcaactgacactaaagatgaaaatactagtgacaagatactgttgatagtggcaatgtga

SEQ ID NO: 82487 - DNA, 1407 bp, Saccharomyces pastorianus
  modified_base (1387)..(1387): a, c, g, t, unknown, or other
atgagtgacgaaaccatgcctgtagaatttttagttagtgataaaagactgttgaaaaccataaaagttaaactggaaaccaacggcctttttgttactcctatctattccgacaatgataacaaagttataaaatcttctattgaggatctcaatcatccattggctgtcgaaattaacaatatagccggtgtgaaggcacgattccatgaaagtagtaacttggaacgtagtgaaggacgtttgaaacaccaaagtaacagcattacggaatttacgaagagctttttaaaagatcatgggcttgctaatgacaagatgtttttatctcatttattagatcatttacctctaaaatacacaatatatccaccagttgtattgttcaataattctacagtgagatcgtttaatcacccaatctggcaaaaagcattccaactgaaactcttcgatccaaatgagtattatcgtgagctgctatgtttcctttcgcccggcaaaccaagtaaaggcacgagtcttcatcctaacaatcgactactgactcatctggccataaataaccctatcacagaggcagatgtattgcgaagaccattcaatatccaaccgctttatggcaaattgattgatgacagtattttggatgataacgataatacgttatgggaaaatcccagtcaagaacaactaaactcaagcatatggtgtaaggtcatacaaaatggtgtaacacaaatctggtcacccgtttttaccatgtttagtagagggaatatcaaggagaagaaaagagttttgactactttcccagatatttgcaataatgatgtggtcgatttatacgcaggaataggttacttcacttttagctacttaacaaagggcgctaggacactttttgcatttgaactaaacccttggagtgtagaagggttaaagcgcggcttaaaggcaaacggattcagtaaatctgggaactgccacgttttccaagaatcaaatgaaatgtgcgttcaaaggcttactgaattcttatctcagaatcccggatttcggttacgtattaggcatattaatttaggtctcctgccttcaagcaaacaagggtggccattggccatcaaattaatttacttagaaggagcttctttggaaaaagtgacaatgcatatacatgaaaatgtacacatagatgcaattgaggatggaagtttcgaaaagaatgtcattgtagaactcgacgctattaatgagtcaattgcattaattagaaaccgtggcatcaaacttcagtttgtgagatctaagcttgaacgcataaaaacttttgcaccagatatttggcatgtatgcgttgatgtcgacgttatagtaagtactntaaatacaaaatataaataa

SEQ ID NO: 82488 - DNA, 159 bp, Saccharomyces pastorianus
atgctaatcgaagttatactgttacgaagtaaaggatatgaacacaacaaagcaaaaatgcaaaacaaatttatgcaaaatttaaaaaatgctctcatcgcttcaaaacattttgattcacttgatctaataatggttctcataatacagaatcgttaa

SEQ ID NO: 82489 - DNA, 765 bp, Saccharomyces pastorianus
atgcatatgctgtcatccgtaccacaaacatatcaattcctaaaatcaaacatctacataacagaacgggacccatataaaataggatgtgtactaatggacaacggttccaatttgaacgaagtagtaatggcctttgaagcagccatttcacaagatccaagccatataaatgcatggttgaagttaggtatagttaattttgaaaatgaaagcgaaagcaatggagagcttgctttgcgaaattgcttaaatttggatccaaataatacaattgcattggaaaacttagcaattcaccatataaatcaacaaaatgaatcagagtcattgaaactttttcacaaatggattctttcaaaattttcgaaggttttccaaccttctgcgggggaaaacaaagatagcattaataaaattccgaaaaaggcccatttggtgcatattctagaatccctgttgaatatgggtatagaaaaaaaagatcagtatgatatatattcagtattatcaatcttatattattcggatcagaaaataaagcaatctcagaaatgcttagagtttttactactggaaaagcccaataatggaacaatatggaatagatatggtgctattttggccaatactaagtcgtatcactctgcgataaatgcgtacaataaatgcaaacaactaagaccgaattttacaagggttcgttataatttagcgatcgcctacatgaataagggtgactatgtaaaagcaagcaaatgctaa

SEQ ID NO: 82490 - DNA, 138 bp, Saccharomyces pastorianus
atgggtaagatagatttacgggccgcactaccggcagataaatctcaacatagtggtgtcagcgaaaaagaattttcaagccttgaaaaccaggggtcaaaggaattctctagtttccccaagaataacaatgctgat

SEQ ID NO: 82491 - DNA, 1566 bp, Saccharomyces pastorianus
atgggacccaaagttgtacgtaacaactcaataacttctactacttctataacttcaaaagaatctcagacgaagagaaagtccaaagaatctccaggggccgccgcatcgaaagcttattcgatgacaatggaaactacaagtttaagctctcaaacaaatagcaggtcatattctatcacctccgccagctctgtgttaagcggcgcgagtggcagtttcaacagtactgttaatcctaaaccaaagactttgaatttggagaaagtcttagtgggtgctgaaaaaaaggcagaatctcgtattaaggaaagatgggaaccggaaaagacgaacttccaatacggcgtcaagactgatgagcatggtaatttaaatcaattcagtttctccaatgaaatgatgaataacattatggcgaaagttgatgctccaaaagcacaagatttacaaaaggtcaaaaaagtttctgctgagaaagaagccaagtcgatgaaatttgcattaggagctgctaatgctgtgaaagacatgcatcctggtgaggatatcgacaaaagtatagctcttaaggcgcagaagagggaaacctatctgagccaattaacttctcagcaagttttgactttggcaagagccaatgttgacagacaattggatatcattgaaaaaagcgatatgcataaaaagctattcactaatatggaatacaacaaagctgctgtcgctgtcgcacagtctaatcatcagaaaaagacagaattccataacaagattaacatgggtggtggcctgtttttatcaccagaagatatcactaaaatcgcatccggattgatttctcctgtacttggtgaagtgagtgagagggcggaggcgcaacgtgctatggatgaagaaattgcagaaagaactgaggcctataataaatcattaaatgaatgggaaacgatggaacgttctatcatttctaatgacgccaaagtattgactactacggctaataggcatcaaaccgaaaaaaagacctcccaggaaaagattaaagccagctttgatgcacttgtggccagaatggataccaaagtcgctgaaagggaaactctgcttgaagataccaagaacaaagagattgaatttaaaaagcaaatgcagcaagagttaaaggacgaaaaagctcgtctagatcaagatttggaggaatggggtaagaaatgtgaacaagatatcactgaagcgcgcaaagagcaagaagaactattgaaaccttaccatgacgatctggcaaatgcagaagcggaacataaaactttagtggaagagcgcgatgcaattaacgcagaaatctcaagattgcaggatgctatagttgaccataaaagaaagatctctggttacggaaatgatcttgacgcccagaagaatagaaatatcagagaggatgacaaattgctggaactaggtcaaactaaagaaagcttggaatcccatttgaatgatgacgttattattcttgctaataaggctaaagagcaggctgagtatcaaccaaggaggcccgtctga

SEQ ID NO: 82492 - DNA, 279 bp, Saccharomyces pastorianus
atgtctttaatttcagctgtagaagatagagacatacacaatataggaaagacttctggtggagggagcaggacttcgtctataacttcgtcgaaaaagtcgctgaaacacggctctaaatctttgagaaaaccaaaggtataccagacaacgggcgaaccattaagcagggaggctttatataaggcgaagttgaagtacggggtttaccagtcacctgcccaaagttactcaattggcgtcagcgacgctcaatgcagcttccgacaaggcagctaa

SEQ ID NO: 82493 - DNA, 381 bp, Saccharomyces pastorianus
atgagctacagttatgaagcttgtttttgggacccaaacgacaatggtgtgaacatccttctgggtcacatttctcagggaataaaatcttgcgactcaatgatacatttctttaagcagcgtagtgagcttgagaaggactatgccaggcggcttggagccatcacgggaaaactagacaaagacattggaacaaacatggattatggaaagttgaatgaaacatttaatgtggtgctcagtgttgagaaagctcgagcacaatcgcattccaaacaaagtgagattcttttcagacagatttacacggatactaaggcatttgccgctaacttgcaagcaagatatactacattgggggatcctctagagtcgacctgc

SEQ ID NO: 82494 - DNA, 201 bp, Saccharomyces pastorianus
atgtatatcaattttactagttttctgataaaagaaaaaaagtataatgtcagatttttgttaaatagaaatagaaagatatacgctgccgtgggagaaggacacctctccggatttgtaactaaaaatcataaaatatcacatctttccttcatattttcaaaaaaaaaaaaattttctttaccatttttgacacaataa

SEQ ID NO: 82495 - DNA, 450 bp, Saccharomyces pastorianus
atgaagactcaatactctctaatacgaaaaatttgggcacatccagtaacagaatttctgaaatcccagtggtttttcatctgtttggctattttaatcgttattgcaagatttgctccgaattttgcaagagacggagggttaattaaaggccaatatagtattgggtacggctgcgtcgcctggatttttctccaaagtggcctgggaatgaaatcaaggtcactaatggcaaatatgttaaactggagagctcatgccactattctggttctgagtttccttattacctcgtccatagtatatggattttgttgcgcggtaaaggctgctaatgatccgaaaatagatgactgggtacttatcggtctaattttgactgccacttgtccaacaaccgtggcttcaaacgttatcgacctgcaggcatgcaagcttgcactgccgtcg

SEQ ID NO: 82496 - DNA, 894 bp, Saccharomyces pastorianus
atggatcaagattttgacagtttattactaggtttcaatgactccgatagtgtccaaaaagacccaactgtaccaaatggcttggatggttcagtagttgatcctaccattgcggatccaaccgcaattacagctagaaagagaaggcctcaagtaaaattaacagccgaaaaactactcagtgataaaggtttaccatatgttttgaaaaatgcacataaaaggatacgaatttcctcaaaaaaaaactcatatgacaacttatcaaatattattcagttttaccagctttgggcacatgaattgtttcccaaggcaaaatttaaggattttatgaagatctgtcagacagtaggtaaaacagatccagttcttagagaatatagagtcagcctttttagggacgagatgggcatgagtttcgatgttggcacacgggagactgggcaagacctggaaagacaatcacctatggttgaagaacatgtcacttccgcggaagagaggcctattgtcgcagatagttccgcgcaagacaaaaggaatgtcgattacgataatgacgaagatgacgatatctatcacctttcttatcgcaacagaagaggacgagttttggacgaacgtgggaataatgaaacggtacctaacaatgttgtgccgcctaaggaaaatttggatgcattattgaagacattcagggtacaagggcccgttggccttgaagaaaatgagaagaagctcttattaggatggctagatgcgcatagaacaatggaaaaaggctctatgaccgaagaagacgttcaactgattcaaaatttggaagagtgggaaatgaatgatatagaggcacaacatactcattatgatcttattgccaggaggagatga

SEQ ID NO: 82497 - DNA, 2391 bp, Saccharomyces pastorianus
atgatggctaagaacaacaaaactaccgaggcaaagatgtcgaaaaagagagcagctagcgaagaatctgatgtcgaggaagatgaggacaagcttttatccgttgacggtttgatcgatgcggaagcaagtgagagtgacgaggatgatgacgaatacgagtctgccgttgaagaaaaggaatcatcttctgataaagaagcccaagatgattctgatgatgactccgatgctgaattaaacaaactgcttgccgaagaagaaggtgatgaggaagaggactatgacagttccgagttttcagacgacacaacttccttaacagacagattatcgggtgtgaaattgcaaacgatcgttgatccgaatatttactcaaaatatgcagatggcagtgatagaattatcaaacctgaaattaatccagtttatgatagcgatgatagtgatgccgaaacgcaaaataccattggtaatattccactttctgcatacgatgaaatgccacacattggatacgatatcaacggtaaaaggattatgagacctgccaagggttctgctttagatcaactgttggattctatcgagctacctgaaggctggactggtttactggacaagaattccggttcaagtttgaacttaaccaaagaggaattagaacttatttccaaaatccaaaggaacgaacaaactgatgatggcataaatccatacgaaccgttaatcgattggttcacgagacacgaagaagtgatgccattaactgctgttccggagccaaaaagaagatttgttccatccaaaaacgaagccaagagagttatgaaaattgtaagagctatcagagagggccgtattattcctcctaaaaaattaaaggaaatgaaagaaaaggaaaaaactgaaaactatcaatacgatttatggggtgattctacggaaacaaatgatcatgtaatgcatctaagggcaccaaaattacctccaccaactaatgaagagagttataatccaccagaagagtatcttttgtctcctgaagaaaaagaggcctgggaaaatactgaatatagtgaaagagaaagaaacttcgtacctcaaaagtattctgccttaagaaaggtccctggttacggtgaatctattagggaaagatttgaaagatctttggatttatatttagctcctcgtgtccgtaaaaacaaattgaatattgatcctaattctctaattccagaacttccctctcccaaggatttaagacccttccctattcgttgctcaacaatatacgctggtcacaaaggaaaagtacgcacattatccattgatccttctggattatggctagcaacaggatctgatgacggaacagtcagggtatgggaaattttaactggtagagaagtttatagaactactttaatcgatgacgaggaaaacccagatgaccacattgaatgcattgagtggaatcctgatgctaataatggtattctcgccgttgctgttggtgaaaacattcatttaatagtaccaccaatattcggctacgatattgaaaataacggcaaaactaagattgaagatggttttggctacgatacttttgggactgttaaaaaatctaacctagaagtgaacgagaatggtgatggcgatgaagatggagagaatgaatctgctaagaatgctgtaaaaaaacaagtagcccaatggaacaagccttctcaaaagcaactagaaaaggatatttgtatcactatttcttgcaaaaaaacagtaaaaaagctttcatggcatagaaaaggtgattactttgtcactgttcaacctgactctggtaacacttctgttttgattcaccaagtttccaagcatttaacccaatccccattcaaaaaatcgaagggcattattatggatgcgaagttccatccttttaaacctcaattatttgtctgttcccaaagatatgtcagaatttatgatttatctcaacaaatattggtcaagaaactgttgcctggtgcccgttggttatcgaaaatcgatattcacccaagaggtgataatttaattgcgtcatcgtttgacaagagagttttatggcacgacctggatttggctagcacaccttacaagacactaagatatcatgaaaaagccgtcagaagtgtaaatttccacaaaaagttacctctattcagctctgccgctgatgacggtaccatacatgttttccatgccactgtttatgacgacatgatgaaaaatccgatgattgtgccactaaagaaactaaccggtcataaagtaatcaatagtctgggtgtcttgatgctatttggcatccgagggaagcttgctgttttctgccgtgcc

SEQ ID NO: 82498 - DNA, 153 bp, Saccharomyces pastorianus
atgatactgtggggtggttcaggtggttatttggtaataattctttacacaataatgccagtgaagacgatagaggaatacgagtatgatttttttcggtttatcctaattttttttttcaaaagggatctaaacatttatccgttgttataa

SEQ ID NO: 82499 - DNA, 1938 bp, Saccharomyces pastorianus
atggctaaaggtgctgttactaaactgaagtttaactcacctataatatctacctccgatcagctgatatcaacaaatgaactattagatcgtttaaaagctttacatgaggaattagcctctctggatcaagacaatacagatttaacgggattagataaatatagggacgcactagttagcagaaaattattaaaacataaagacgtggggatccgcgctttcaccgcttgttgtctaagcgatatcctgagattatatgctccagatgcgccttatacggatgctcaactaacggacattttcaagcttgtgctctcacaatttgaacaattaggtgaccaagaaaacggctatcacatccaacaaacttatttgatcactaagctactagaatacagatcaatcgtattattagccgatttacctagttcaaacaatttacttatcgaactattccatattttttacgatcctaacaagagcttccccgcaaggctcttcaatgtaataggcggtattctcggtgaagtcatctctgagttcgattctgttcccctagaagtactaagattaatttttaataagtttttgacctataacccaaatgaaattcctgaaggtttgaacgttacttctgactgtggctacgaagttagtctaattttgtgtgatacttattccaatagaatgagtagacatctaactaaatactattccgagattattcatgaagcaactaatgatgacaataattcaagacttctcactgtggtagtgaaattacataaactggtattgagactttgggaaacagtacccgaactgatcaatgcagtaatcggatttatataccacgaattatcttcggaaaacgagcttttcagaaaagaagctacaaaattaattggtcaaatacttacctcatattcggatttaaattttgtttctacacattccgatacgttcaaggcatggatttccaaaattgctgatattagtcccgatgttagagtagaatggacagaatcaattcctcaaatcattaccacgagagaagacatatccaaagaactgaatcaggcactggcaaaaacctttattgattctgatcctcgtgtacgcaggacttctgttatgatttttaataaagttcccgttactgaaatttggaaaaatataaccaataaagccatttatacatctttacttcatttggcccgagaaaaacataaggaggttagggaactctgcattaacactatggccaagttttactcaaattcattgaatgagatcgaaaggacataccaaaataaagaaatttgggaaatcatagacaccataccatccactttatacaatctctattatatcaatgatttaaacatcaatgaacaagtcgacagcgtaattttcgaatacctactaccgtttgaaccagataacgataaaagagtccacagactgctaacggttttgtcacattttgataagaaggcattcacttcatttttcgctttcaatgcaagacaaatcaaaatatccttcgctatatccaaatatattgattttagtaaatttttgaacaatcaagaaagtatgagctcgtctcaaggtcctattgtaatgaacaagtacaaccaaactctccagtggttagcttctggcctttctgactctacgaaagcaatcgacaccctcgaaacaataaaacaatttaacgacgaaagaatcttttatttattaaatgcctgtgtcaccaacgatattccgtttcttacttttaaaaattgttacaatgaattggtcagtaagttacagacgccaggactatttaaaaaatataatatatctactggtgcttccattatgccacgtgatatcgccaaggtaatacaaattttgctttttagagcctcaccaaataatttataa

SEQ ID NO: 82500 - DNA, 1059 bp, Saccharomyces pastorianus
atggaaatatttaaaaaattccctcacgtcctaaatgatgattccactgatatcatatcatacctaattaaagaagttctattatcaaaccaggtcgttggtgattcaaaaaaagaaattgactggatagaagattctctattaagtgacacgaaatattctgcaataggtaataaggtgtttactttaaagctgttcactaacaaattgagatcaattgctccggatgttccacgagatgaattggtagaaagtttcaccgaaaaaactatgaagttattcttttacttgattgcaagtggtggtgagctgatttccgagtttaacaaggagttttatcccacccccagtaattatcaaacaaaattgaggtgtgtggcaggaattcaagttttaaaactagccaggatttctaatttgaacaactttatcaaaccttcggacattattaaattaattaatttggttgaagatgaatcgctgccagtaagaaaaacatttttggaacaactgaaagattatgtggctaatgaactgatttccataaagttcctaccactagtattttttactgcttatgaaccagatatcgaacttaaaaccacaacgaagatatggataaactttacatttggcttaaaatcatttaaaaaagggacgatatttgaaagagctttgcctaggttgatacatgcgattgcacatcaccctgatattgtggaaggtttagattccgaaggagacgcatatctaaatgctttaacaacagcgattgattatttgctgttttactttgactctattgccgcccaagagaacttcagtttgctctattatttatcagaaagggtaaaaaactatcaagataaattagttgaggatgaaattgatgaagaagaaggaccacaaaaagaagaagcgccaaagaagcatagaccttacggtcagaaaatgtatatcataggtgagctgtcgcaaatgattctattgaatttaaaagagaagaacaatcggcaacattcagcatatccaggtaaattaacttaccatcagattgtt

SEQ ID NO: 82501 - DNA, 231 bp, Saccharomyces pastorianus
  modified_base (161)..(161): a, c, g, t, unknown, or other
  modified_base (182)..(182): a, c, g, t, unknown, or other
atgttgagaacgtcaacattgttcaccaggcgtgtccaaccaagcctattttctagaaacattcttagattgcaatccacagctgcaatccctaagactcaaaaaggtgtcatcttttatgagaataaggggaagctgcattacaaagatatccctgtccncgagcctaaaccaaatgaaantttaatcaacgttaaatattctggtgtatgtcacaccgatttacatgct

SEQ ID NO: 82502 - DNA, 1365 bp, Saccharomyces pastorianus
atgcgacgagtttcttttgacaaatacggcttccaaccactatatgggaagctttctgatataacaggggcggaagtcagcattattaaccgctcaattttttttggccttgggtgcttattaacatgttttgccagaaacgtcacggaattctcaatagcaagagccatatgtggtattggtgcaggaggattgaacgctattagtagcattgctgttagtgacatatgtacagcaagagaaaggggcgtttaccagggatatgcgaatattgttttcgggtttggtcaattactaggtgctccgttgggtggtgtatttatagaaaccattggatggagggctctttttggtatccaagtacccgtgataatgttgtgctcggtattagcaatcaaaaacattaatattaagctattccatgttcctcctatgaaagaaagatataccttaaagaatctgtcacggatagatatatttggctcattaagtctggtggcgaccattagtggagttttatttttgtgctctagccagttgaacaagttgtatttagcattgtttaccattggtagttttattgtttttatcctggttgaacgttattacgcgactgagaaaattttaccattcgaactattgactcgttcattctgtttgagctcagcggtaacggttatatcttcatttgttgtatttggtgaaatctttaggtcgccaatctatttacaattgcttcaaaatattagtgtaacaaagactggtctctttttgattttcccctctatatcagttgcagtcggatcattggtaacaggatgggtattgcggaatacgaaaattaacctagcacactgtgcatatcaaatcatttttggtggtatgataatgcagctattgggtttggggttgggctatttgctactttcacatttgaatcctgactacaccatatatgatatgcttgagtctattacattcagatctaactcaatatggtggaaattgatttatgtgtttgcatcagtccttgtgtcctttggttacgcttgtctattagtggccacgttagtaagcatcgtattcaccgtcgaaaaatcacagcaaggaaccatgactggtgttttctatttgtggagatccattggtaacgttcttggtgcctctttaactttagtgtcctatgagaatagcctgtcgtccatgttatggaattatatgttcaaaaccaagcgtgatgacgaatatcacttcaccaaaaagcagtactactcccttatcaatgattcgagttacttgagagggcccaattttccaacggatatatttgttcgcattcttgatgtctacaaaaggcattcctga

SEQ ID NO: 82503 - DNA, 306 bp, Saccharomyces pastorianus
atgcaaacactagacgagacttcaaatctactccctccacctgaggaagctgaagcccctcccttggaacaaaaatttcatgaatacaatttggctttacctaagtttcccattttgttttcgctatggttgggtagttttttgagttccttggatagcactattgtcgcaaatataatgaatagagttgctgaggaattctctgaatcaagtaaaaagcaatggattgcgacgagttttcttttgacaaatacggatttccaaccactatatgggaagctctctgatataacagggcggaagtca

SEQ ID NO: 82504 - DNA, 1716 bp, Saccharomyces pastorianus
atgaataaattctgtctactacctttccatggcaagaggataggcgtggccaatattccttttaccatattattcaaaaagggcccttgttttcttcatagtcacatcacagcagtttattactcgacaaagggcaaaaatgacagtcatgaacaaagtcgtgtatccaaaaagtctacttttacccctctggaaacaccttggtacctcaggattgttgacaatgaaaaggaactaatggaaggtaagaaaaataaccaccacacgatgaacaaagaattggagatacctaaaacctctccaaactcattaagaaaaatagcagacctcctaactggtaaacttggtctggatgacttcctggttttcgatttacggaagaaaagcccaaactctgtttcagccgttaataagttgggtgacttcatggtcatatgtacagcaagatctaccaaacattgtcataaaagtttcttagagttgaacaagtttttgaagcacgaattctgtagtagtgcatacgttgaaggaaactttaatgagcgacaagaaagtagaagaaaaagaagattagcaagaaaatccaaccttagtaaactattaggtagaagctctgaatgctctgcaaaagacttaaatagtgaggcttggtatatgattgattgtcgtgtcgatggtatttttgtaaatattttgacacagagaaggcgtaatgaattgaatttagaagagctgtatgcacctgaaaatgagaaatctaagttccaaaatatagattcaggtaatgtccctactatttcaggggtaaatgaaatttcaagcaacaataatattcttttaggcctaagaagactggcccagcaaaggagaaggtattcaactatcaacccaaacgggctaagtaatttaagatactttctacaaaaggaagacttcaaaggagccaataagataattcagagtagtagtggtactgaaactcacaatatacgtactttggagcatgttaaaaatactttaaaggatttggtaggacaagagaggaaagtagatgttgttcaatggaagtccttatttgacgaacattcaacttttttaaccataaatcaatcggctgcatattggccactacgactagaatatgcgatacttctaaacaaagcagacccacaattttattcagatcgtgttttcctcaaggattatctacttttaaaaaaatcgttggggcaagagttaataaaggaagatctaatcgctcttttagaaatggttttgaaaacgcagcattctagtcattcatactttaacctagtaaagcaaaatagggtgattatcagagctttgaacctatttaaaggtctacaaacagaggacgatggctcagttgtttacgatgaagaggtaatatcccttcttttaaattccatggtcgcggatgaacgggtaaaattgagatcactctacgagacaatagaccacattttccaaacatttggagataagttgacttcaggcatgattgtctcaatattgcaaaacttggccaaaatcaaagactggaataagctacttcaagtctgggaagctatcacaccaacggaaggggaaggtcaggacaaaaggccctggaatgaatttataaatgttatcaatcaaagcggtgatagtcacgttatatcgaaaatcgctaatcatggtcatttgctatggatc

SEQ ID NO: 82505 - DNA, 2931 bp, Saccharomyces pastorianus
atggctatcttaaaaagaggagctagaaaaaaggtacatcaggagccagctaaacgctctgcgaatatcaagaaagctacttttgattcctcgaagaagaaagaagttggtgtgtctgatctgacgcttctttctaaaatctccgacgaagccataaatgaaaacttaaagaagagatttttgaatgctacaatctacacttatataggtcatgtgttaattagtgtcaatccattccgagacctcggaatctatactgatgctgttatgaatgaatacaaaggtaagaatagattggaagttccaccccatgtatttgcaattgcagagtctatgtactacaacatgaaatcatataatgaaaatcagtgtgttattatttcaggtgaatcaggtgccggtaaaactgaagcagctaaaagaattatgcaatatattgcggctgcttctagcacacatacggagtcaattggaaagattaaagacatggttttagccactaatccattgttggaatcttttggctgtgcaaagactctaagaaataacaactcttctagacatgggaaatatctagaaataaaattcaacaaccagtttgaaccatgtgctggtaatatcacaaactatttattggagaagcagagagttgtgagtcaaattaagaatgaaagaaatttccatatattctatcagttcacgaaaggtgcttccgatgcttataggcaaacatttggggtccaaaaaccggaacaatatgtgtacacagctgctgcgggttgcatatctgctgagacaattgatgacttgcaagattatcaagagacattaaaagctatgagagttattggtctcggtcaagaagaacaagaccaaatttttaggatgttagctgcaattctttggattggtaatgtttcctttatagaaaatgaggaggggaatgcgcaagttagggacacctcagtaaccgattttgttgcttatttgttacaaatagatagccaattgctgattaagtcacttgtggaaagaattatggaaactaatcatggtatgaaaagagggtcagtgtatcatgttccattgaatattgtccaagcagatgcggttagagatgctttggcgaaggctatttacaataacttatttgactggattgtgagtagggttaacaaatctctgcaggcttttccaggcgctgaaaagtccattggtattcttgatatttacggctttgaaatctttgaacataactcttttgagcagatttgtatcaattatgttaatgaaaagttacaacaaatctttattcaattgacattgaaatctgagcaagaaacttacgagagagaaaaaatccaatggaccccaattaaatactttgataacaaggttgtgtgtgatttgattgaggcaagaagaccacctggtatatttgcagcaatgaatgattctgttgcaactgcacacgcggattcaaatgctgctgatcaggcttttgctcagcgtttgaacttgttcacaacaaatccacattttgacttgagatctaacaagtttgttattaagcattatgccggtgatgtcacatacgatattgacggtattacagataaaaataaggatcaattacaaaaggatctggtagaattaattggtaccactaccaatacatttttagccaccattttcccggatactgtagacagagaatcaaaaagaaggccacctacagcaggcgacaaaattataaagagtgcaaatgatttggttgaaactttatcaaaagcacaaccttcatatatcagaacaattaaaccaaacgaaaccaaatctcctaacgattatgacgatcggcaagttctacaccagattaagtatctaggtctgcaagaaaacgtgcgtatcagaagagcaggttttgcatatagacaagtgtttgagaagttcgtggaaagattttatttattatctccacactgttcttacgctggtgactatacatggcaaggtgataccttagatgctgttaagtatatattgcaagattcctctatcccacagcaggagtaccaattgggtgtcacaagtgttttcatcaaaacacctgaaacattatttgctttggagcatatgagagatagatactggcacaatatggctgccagaatccaacgtgcttggaggagatttttgcaaagaagaattgatgcggccactaagatccagcgcaccatcagggagaggaaggaaggtaataagtatgagaagctccgggattatggtacgaaggttttgggtggaagaaaagaaagaaggtctatgtccttattaggttacagagccttcatgggtgattatctatcatgcaacgagtccaaatcgaagggcgcttatatcaaaagacaagtgagcattaaagagaaggtcatcttttccatacatggtgaggccttgcatacaaaatttggccgttctgcacaaagattgaaaaaaactttcctattaactccaactacattgtacattgttggtcagactttggtccaaaatgctatgacctatactcaggattataaaatcgatgtgcgaaacattcaagcggttagtttaaccaatttacaggatgattgggtcgccattaagttggctagctcaggtcaacctgaccccttaatcaacacatatttcaaaacagaactcataacgcatctgaaaaggcttaacgacaaaattcaaattaaaataggctcggcgatagagtaccaaaagaaacctggaaagttgcattcagtgaaatgtcaaatcaatgaatctgcaccaaaatatggcgacatatataaatccagtacaatatcagttcgtcgtggtaacccacctaattctcaagtgcacaaaaaaccgagaaaaaagagttcaatctcttag

SEQ ID NO: 82506 - DNA, 339 bp, Saccharomyces pastorianus
atgaaattagcatactctaagatcgttaatggtcaaactttttcatatgtagactccagcttgcaaccagaatattttgagtctcctttgcagtcaagcaaatccaaacaaagttttactcaaggagaactaaacgatttgaaatggggaagaaaccaacctgttaatattaatttagactcttccattacccaggacggcaaatttgcatataaaattgataaaataactgatggtctgggaaatgtcgtggattttacatctctccctgaagaattaaaaaagcgctatgatctatcttataatttcaatgttcatgggttccacgtgcagcgctag

SEQ ID NO: 82507 - DNA, 342 bp, Saccharomyces pastorianus
atgtttaatcctcttcatgaatcatattgtttgcccatggataccaatctttttaaaattaactcaattgacgtacccatcagaataaactcaactgaagagattgaatatatcgagttggaatatagagatctttacacaaattcggtagagttacggtctttgagtaagaaagacttcaaaatcatcgataaccccaaatcctttttaaaaaaagatcagtcagttctaaagtcacattcaaacgattttgaagaaggcagtacaattcgttatttggctgtaactcttcaagatattggcttttatcaaatcaaaaaaattgttattccaaaaaactga

SEQ ID NO: 82508 - DNA, 165 bp, Saccharomyces pastorianus
atgctactattgaacattttcatatcaagcgatcacgagttcgttttgatttcattaattatgaccacatggagaaaactttatacgaaagaattaagtgtaacaggttcagccattaaccatcatcgtatttttgattcttccgctcatttaagggtgctctaa

SEQ ID NO: 82509 - DNA, 492 bp, Saccharomyces pastorianus
atggagcacagatataacgtgtttaatgatactccacgagggaaccattggatgggcagttctgtgtcaggatcaccacgtccatcttatagcagtcgtcctaatgtaaacacaacacgacgcttccaatatagtgacgatgagcccgctgagaaaatccgacctttacgctcgaggagctttaaaagtactgaaagtaacataagcgatgaaaaatcaaggatatctgaacgtgacagcaaagaccgctacattaatggtgataaaaaggtagacatttattcactgcctctaatatcaaccgatgttttagaaatttccaaacaaaggacatttgcggtgatattgtttttaataattcaatgttataaaatatatgacctggtaatacttaaatcggggttaccgatttcgggtttactgtttaagaactatcgatttaatttcatatccaagtatttcattatagattccttcttcctgtatgggtga

SEQ ID NO: 82510 - DNA, 1308 bp, Saccharomyces pastorianus
atgtacgagtactgctcagttgtaataaagaaatactccaagtatacaattccctccttcgctccaaatggttttcaatcaatgcttgagcctcctcagatagacaagtggcaacacctttccgctaactgcactctccaatttcgggttcttctaatggactctagacaaattctgatcaatgtggttctcaataattcaacacttctcgaaaatattcgcctgccgctgggagataatcaagatttaatacaattttcatgtaaaagccccataatctcttgtaaatatatctccgaagaattcggacccagaatgttaaggaggtttcagatgaatttgccaaatgacgttgagttcaacaggactgtagtttctttaaagaaccttaattttgttttaaggacagctaggacatcaatagcccagagtacaataacaagccaggtgcaaggcaataataacggtacaaaggtctgtttcacagaaggtccaaaagttagtagctacacaaatccgaacacgcaatttcaaactcaaaacatgattatggatttcagtcaacgttatcaggaagaatctgaaagagagtcaaataatcgttcaaatataactttaccacacgacagcattcaaatagctcaacaaatatggccaaacacggatttaaatgtagtacactcttcacaagacctcaacactccaatggctatgcaaactgttttgggtcgtcctgagtcgctaattgtacagccattggaggtttctcaatctctaccaaacactaccaactgccttcctaatgcagaaaacaaaaagaaaaaagtcgacaccacttctgattttacttcaagaaaggagattgctctgtgtaaaactggtttattagaaactattcatataccaaaggaaagggaaagtcagatgcaaagcgtcactggtttagatgcaacaccaacgattatatggagccccgggaaagacaacacggcgaagaaaaataccagtaataagaaaaatattgatgataaactaacaaacccccaaaaatctggaaatacacatacccctgatagaaataaagaagtgctacctaacggcacacttaatgaaacgaggaaagaagcatcgccaagcgaaggattaacgataagagttaaaaacgttaatcggaatgcgtcaagaaaaatatctaagcggctaatcaaggaaaagttgaaagacgaagaattcatgaaatgggtatgtatgcatttgcaagaaactgagctgtttccccctcttatccactcattttctctgacttga

SEQ ID NO: 82511 - DNA, 204 bp, Saccharomyces pastorianus
atggcagaatacttggccacctgctccttccattcttccttcgtgaagcacttctttccatacgtaaagtctttcccaccattcttgccttggccgctgcaagatccgctcttcgtggtctcgttactaagagtagatatagtcatttctatttgttaccacacacaaatatatcttaatccggctgatattcgtctctactga

SEQ ID NO: 82512 - DNA, 405 bp, Saccharomyces pastorianus
atgatttgcaatcaccagcacagccccagcaatcatctcaacagcagatccagcagcctcagcatcaaccccagcatcaaccgcaacagcaaccgcaacagcaacaagaacaacagcaacaacagcagcaacaacaacagcagcaacaacagcaacagcagcaacagcaacagacaccgtatcctattgtcaacccacaaatggtccctcatattccatcggaaaattctcattcaaccggacttatgccttcagtgcctcctacaaatcaacaatttaatgcacaaacccaatcttcaatgttttcagaccagcagcgcttctttcaatatcaattacaccaccaaaatcaaggacaggcgccatcttttcagcaaagccaatctggtaggtttgatgacatga

SEQ ID NO: 82513 - DNA, 2178 bp, Saccharomyces pastorianus
atgtctggaatgggtattgcgattctttgcatcgtacgtacaaagatttataggataaccatcagcttcgattattctacactgatgagccctttcttcttattcttaatgatgcccactacattaaaggatgggtacaggatgaatagtcaagtaaatgaagatgctataggtatcaatcttgacctctcactgcccactcacatttcgcctacgactggttcagagagcgccagtggcagtaacgccagtacacttcgcaacgatggaaatgcactagatggaggtcttttgaggacttcagcagcgatttcagcacccacaggtaccagtcaaccaacagaaactattggtgaaaaactgagtaatgaagagcgggtgaactcgaatgtttccgcttcgaactcgacaacggcgggtacagggcgtatgttaagccaatccttgactaatgattcaccgtcgaacgaaatatcgacggatcagttgaagatttttcaaagaatggacgaaatgagtgcccgaatgattgagatggaggaaagcttcaacaagttatctaataagatcgcggaacagaatacaatggttttaaacctaaaacaagataactataaagttctgaacaaattgaatatattacttaagttggttgcgcagccaagcgcgcgcccaagcacaaacaatgcccaaaataagtttgctatcgaattgctaaattcgatatcagccgttagtagtgcttacttgcagaaaatgcagaataatggctctggtagacagcatactgctgattcatgtacaggagattccaacacccattttggtatcaacaagcatcggactacgaatggaaccatagatgtgaatacgaatactgcacagctaaacaaccaattttctaacgcactgaatactatcttacctgatcagcagcataatcgaaataatgtttcccaaaatataaaccaatcgctccctaaccgacaacttggtcctgttataaacacacaagccaatcagaaccagtcgcaggttttaattcataacacaaatacacatcagcaggtaaatcgctcgcctattagtttcccgaacgcttcaactgacaagccattcaagttgaacccaaatgggattaaacggcgcagaagaaatacgcaaagtaacaacaatgcgagcacaaatgaccatgctagtgctgcacaaaagcccatatcagccctatctccattaacgaattctcataattctacaactagcatgaattataccaattcttccattcattcaggcgtcaccagtgcttcaaattcatttcatgacttaaattcattgaataactttggcacgacaacagctttaagtttgcccagcttagccctagataacgcttcttttcccccaaatcaaaatgttataccccctattataaataatacccagcagcctctatcattttcccaattgatcaatcaggatagcacgacatctgaattgttaccgagtggtaagtcaggggtgaacacgaatattgtaaatagaaacagagcttctactctaccgtcgtactcaaaaccaatgacagtgaaaagtaatgtcgacgatgatggctatctagaggatgatgatgatgacggtgatgacgaaggtgatggaagggataatgaagaagacagcactgctgaggaagatgaagtagatgatgaaatcgaaacagatatgaagaacgcttcgattaacaagcggaggaggagcttgcatcataaaaaaagtaactctttaaacggtagaagaaagcttcacggcgagtcggctactaagcccaacataaactctgatttacattataggatattgaaggctcccactgatgtaaagactatatgggaagagtatgatactggaataagaggaaagccatcgatcaagcatcttgaggccaagtatggtaacaagtggaggctcaataaaaataagaagaccttttcaaggcgaaaaagattgtacaagttcattctgaacggtatggagagagggaaaacggcacaagagatgatagaaaccttagagaacaaaaggctatataaagatgatgaggatggcgaaataaaagaaaagaaccattggctggttgcaagagaacctttctgggaaaaaggcccgtacgatagttaa

SEQ ID NO: 82514 - DNA, 939 bp, Saccharomyces pastorianus
atgagcaacgctaatccttatgagaataacaatccgtacgccgaaaactatgaaatgcaagaggacttgaacaatgctcctactggtcactcagatggtagcgacgatttcgtagcttttatgaacaagatcaactcaataaatgctaacttgtccaggtacgaaaacattatcaaccaaattgatgcgcaacacaaagacctacttactcaagtgagtgaggaacaggagatggaattgagacgttctttggacgattacatctctcaggccacagatttgcagtatcaattgaaagcggatatcaaagatgcccagagagacggattgcacgactctaataaacaggcacaagctgaaaattgcagacagaaattcttaaaattaattcaagactacagaattatcgattctaactacaaagaagaaagcaaagagcaggcgaagagacagtacacaattatccaaccggaagccactgacgaagaagtggaagccgccatcaacgatgtcaatggccagcagatcttttcccaagcgttgctaaacgccaatagacgtggtgaggccaagacagcattggccgaagtacaggctagacatcaagagttgttgaagttggaaaaaacaatggctgaacttacccaattgttcaatgacatggaagagttggtcatcgaacaacaagaaaatgtggatgtcattgacaaaaacgtcgaagacgctcagcaagatgtagagcaaggtgtgggtcacaccaacaaggccgttaagagtgccagaaaagcaagaaaaaacaaaataagatgtttgatcatctgctttattatctttgctattgttgttgtcgttgtggttgttccatccgttgtggaacaagaaagtaatagagcacatgcgcctccctcccgccagccccccaattcctattatgtgtaa

SEQ ID NO: 82515 - DNA, 300 bp, Saccharomyces pastorianus
atggctggtgaaacttttgaatttcaagctgaaatcactcagttgatgagtttgatcatcaacactgtctattctaacaaggaaattttcttgagagaactgatctctaacgcctccgatgctttagacaaaattagataccaagctttgtctgatccaaagcaattggaaaccgaaccagatttgttcattagaatcaccccaaaaccagaagaaaaagttttggaaatcagagattctggtattggtatgaccaaggctgaattgattaacaatttgggtaccattgctaagatctag

SEQ ID NO: 82516 - DNA, 162 bp, Saccharomyces pastorianus
atgacccaattggcagtacttgcgaagaaaagagaattcaagaagtcatcacgagaccattctgaattcgttgcttaccctatccaacttctagtcaccaaggaagttgaaaaggaagtaccaataccagaagaagaaaagaaagacgaggaaaagaaggat

SEQ ID NO: 82517 - DNA, 3516 bp, Saccharomyces pastorianus
atggtgacgaagccgtcacataacttaagaagggagcacaaatggttaaaggaaacggcgactttacaggaagacaaagatttcgtattccaggctatccaaaagcacatcgcgaacaaaaggcctaagacaaattcgccaccaacaacgccatccagagatgaatgtggaccaggaacaacaaactttataaccagcaatcctgcatctggaccaactaatactgctacgaaacaacatgaagtcatgcaaactttgtcgaacgatacagaatggctctcgtaccctgccacatcgaatcaatatgctgacgtacccatggttgatataccagccagcacaagtgttgtatcgaacccgaggacgcccaatggctcgaaaactcacaatttcaatacttttcgaccgcacatggctagttctcttgtcgaaaatgacagtagcagaaatctaggtagtagaaataacaataaaagcgtaatcgataattcaagtataggcaaacagctcgaaaatgatataaaattagaggtgatccgccttcaaggctccctaattatggcattgaaagagcaatcgaaattattgctacagaagtgtagtattatcgaatccacatcattgtcagaggacgctaaaaggctacagttaagtagggatatacggcctcagttatcaaatatgtcgatacgaatagatagtctggaaaaggagatcataaaagccaaaaaagatggaatgtcaaaagatcaaagtaaaggtcgcagtcaagtttcttcacaagatgataatatcatatcaagcattctgcccagccccttggaatacaatacatcttccaggaattcaaacctgacaagtactactgcgactaccgtcactaaggcattagccatcactggtgcgaagcaaaatattactaataacaccggtaagaatagcaataatgatagtaataacgatgatttgattcaagtcctggatgatgaggatgatatagactgtgaccctcctgtaatattgaaggagggggctccacattctcccgcattcccgcatctccacatgacgtcagaagaacaagatgaacttacaagaaggagaaatatgcgttcaagagaaccagtcaactacagaatacctgatagggatgatccttttgactatgttatgggtaaatctttgagggacgattatccggatgtcgaaagagaagaagatgagttaacaatggaggcagaagatgatgcccattccagctacatgactactagagatgaagaaaaagaagaaaacgaattactaaatcaaagcgattttgattttgtggtaaacgacgacctagacccaactcaagacacagattatcatgataatatggatgttagtgcaaatattcaggaaagtactcaagaaggtgacactaggtccacaattaccttgtcgcaaaataaaaatgttcaagttattttatcatctcccacagcacaaaccgttccctcaaatggccaaaatcaaataggcgtggagcatattgacttgttggaagatgatctggaaaaggacgcaattttggatgatagcatgagtttctcctttggtcgtcaacacatgcccatgtctcattctgatctagagttgatagacagcgaaaaagaaaatgaggattttgaagaagataataacaataacggtatcgagtacctatcagatagcgatttagaaagatttgacgaagaaagagagaatagaacccaagtagcagatatccaggaactagacaatgacctgaaaataataacagaaaggaagcttacaggtgacaatgaacacccaccaccatcttggtctcccaaaataaaaagggagaaaaccagtgttagtcaaaaggatgaggaagacgattttgatgacgatttttcattaagtgatatagtgagtaaatcccatttatcttctaagacgaatggtccaacctatccttggtctgatgaagttttatatcgtttacatgaagtctttaaactgcctggttttagacctaaccaactagaggctgtaaatgcaactttgcaaggtaaggatgtttttgttcttatgccaacagggggtggtaaatctctttgctatcaacttcctgcagtggtgaaatcgggtaaaacacatggtactactattgtcatctctccgctaatttccctgatgcaagatcaagtggaacatttattgaataaaaatattaaggcgagcatgttcagttcgaggggtactgccgagcaaagacgacaaactttcaatttatttattaatggattattggatttagtttacatatctcctgagatgatcagtgcctcagaacaatgcaagagagctatcagtagattatatgcagacggtaagttggctcgtattgttgtagatgaagcacattgtgtttctaactggggccacgatttcaggcctgattataaagaattaaaatttttcaaaagagaataccctgatattccaatgattgctttaactgcaactgcaagtgaacaagtcagaatggacatcattcacaatttagaactaaaggaacctgttttcctaaaacaaagttttaatagaacaaatttgtattacgaagtaaacaagaagaccaaaaataccatttttgaaatctgtgatgcggttaaatctaggttcaaaaatcaaacgggtataatatattgccactccaagaaatcatgcgagcaaacatcagcccaaatgcaaagaaatggcatcaagtgtgcatattaccatgcaggcatggagcctgatgaaagattaagtgtacagaaggcatggcaggcggatgagatacaagtcatttgtgctactgttgctttcggaatgggtattgataaacctgatgtgagatttgtttaccactttaccgttccccgaacattagaaggctattatcaagaaaccggccgtgctggaagagatgggaactattcatattgtattacctacttttcattcagggacattagaaccatgcagacaatgatccaaaaggataagaacttagacagagagaataaggaaaaacatctgaataaattacagcaagtaatggcatactgtgacaacgttactgactgcagaagaaagttagttttatcttatttcaatgaggattttgactccaaacagtgtcataaaaactgtgataattgtagaaatagcgccaacgtgataaacgaggaaagggatgttacagaacctgccaagaagattgtaaaattagtggaaagtatccaaaatgaaagagtcacaataatttattgccaagatgtctttaaaggttcgagaagctccaaaattgttcaggctaaccatgacaccttagaggagcatggtattggtaaatccatgcaaaaatcagaaatcgaaaggattttcttccatttgattacgatccgagttttacaagagtattcaataatgaacaatagcgttttgcttcaagctatgtga

SEQ ID NO: 82518 - DNA, 5547 bp, Saccharomyces pastorianus
atgagatctataagaaaatgggcgtacgagacgttcaatgatgaaaaaatcattcaattcgtggtaatggcgacacctgatgatttacacgcaaattcggagtatattagaatggcagaccaatatgtgcaggtaccagggggtaccaacaacaacaattacgccaacatagacttaatactggacgtggcggagcaaacggatgtggatgcggtctgggctggatggggtcatgcttctgaaaatccgtgtcttcctgagctgttagctagttcacaaaggaaaatactattcattggtcctcctggacgcgctatgagatcattgggtgacaagatttcttccactattgtagcacaaagcgctaaaatcccgtgtatcccttggtctggttcacatatagacactatccatatcgataacaagacgaactttgtatctgtgccggatgatgtatatgtaaggggatgttgttcctcacctgaagatgctttagaaaaggctaaattaataggatttcctgtaatgattaaggcatccgaaggtggtggaggtaagggcattaggcgagtagataatgaggatgattttattgcattatatcgccaagcagtgaatgagacacctgggtcgcctatgtttgttatgaaagttgtcactgatgctcgtcacttagaggtacagttattagctgaccaatatggcactaacattacattgtttgggagagactgttccatacaaaggcggcaccaaaagattatagaagaggcaccagtgacaataaccaagcctgaaacgtttcaaaggatggaacgcgcagcaattcgtctaggtgaattggtaggttatgtttctgcgggcactgtcgaatacttatattcaccaaaagatgataaattttactttttagaactgaatccaagactacaagtagagcatccaacgacagaaatgatatctggcgtaaaccttcctgccactcaactgcaaatcgccatgggtattcctatgcacatgataagtgatatcagaaaactttatggtttagatccaacgggaacttcgtatattgattttaaaaatttaaagagaccctcgccaaaaggccattgtatttcatgcaggatcacttcagaagatcctaatgaaggtttcaagccctccactgggaaaatacatgagctcaattttcgttcttcttccaatgtttggggttacttctcagtaggaaataatggtgctattcactcattttcagattcccaatttgggcacatttttgctgtaggaaacgataggcaagatgcaaagcaaaacatggttttagctctaaaagatttttccatccgaggagaattcaaaacccccatagagtacctgatagagctattagaaactcgggactttgagagtaataacatatcgactggttggttagatgatttgattttgaaaaatttatcttccgatagcaaactagatccaacgctcgctattatctgtggtgccgcaatgaaagcatacgttttcacagaaaaggtgaggaataagtatttggaattattgcggaggggccaagttccacctaaagattttcttaaaacgaagtttcctgttgacttcattttcgataataatagatacttgttcaatgttgctcaatcatctgaagaacaatttattctttctatcaataagtctcaatgtgaagttaatgttcaaaaattgtccagtgactgcttgttgatctccgttgacggtaaatgccatacagtttattggaaggacgatatcagaggtacaagactttcgatagactccaataccatatttttagaagctgaactcaatcccactcaagtgatctctccaactccggggaaattggtgaaatatttggtccgaagtggtgatcacgtttttgctggacagcaatatgcagaaatagaaataatgaaaatgcagatgccactagtagcgaaaagtgatggtgtaattgagttactaagacagcccggttccataattgaggctggtgatgtcatcgcaaaattgactttggattcgccgtccaaagctaacgaatcgtctttataccgcggagaattacctgttttaggtccaccgctaatagagggtagccgaccaaaccataagctcagagtcttaataaataggttagaaaatattctcaatggatatcatgaaaactctggaatagaaactactctaaaagagttgataaaaatattgagagatggtaggcttccttattcagaatgggattcccaaatttctacggtacgcaatagactaccaaggcaattgaatgaggggctgggaaatctagtcaagaaatctgtttcttttcctgcaaaggaactgcacaaattaatgaagcgctacttggaagaaaatacaaatgatcatgtagtttatgttgccttacagccacttcttaaaattagtgaaaggtatagcgaaggtttagctaatcacgaatgtgaaatttttttaaagttgattaaaaagtactatgctgttgagaaaatttttgaaaatcatgatatacatgaagaaagaaacttactaaatctgcggaggaaagaccttacaaacttcaaagaaattttgtgcataagtttatcgcatgctaacatagtcgcaaagaacaagttagtaactgcaatattgcatgaatacgagccattgtgccaggattcctctaagatgtctttaaaattcagggctgttatacatgatttggcaagtttggaatctaagtgggctaaggaggttgctgtaaaggcaagatcagtgctactcagagggattttccctcccataaagaaaagaaaagagcatattaaaactctcctgcaattgaacataaaggatactggtgccgaaaacattcacagcaggaacatatattcctgtatgagggattttggtaatttaatacattcaaatctgatacaacttcaggatttgttctttttttttggccatcaagatacggctctttccagtatagcatctgaaatttatgcaaggtatgcctacggcaattatcaattaaaaagtattaagattcataaaggagcgcctgatttactaatgtcatggcaattcagctcattaagaaattatttagtcaatcctgatggtgagagtgatgggtttacaaaactttctaaacctccctcaacatcaggtaagagctcagcaaatagttttggtcttcttgtcaacatgcgtgcgcttgaatctctggaaaagacattagacgaggtatacgaacaaattcatattcctgaggaaagactttccagcggagagaactctcttattgttaatattttatctcctattcgttacagaagtgaaaatgatctaattaaaactttaaaaattaaacttcatgaaaatgagagaggtctatccaagctcaaggttaatcgtattacatttgcatttatcgccgcgaatgcgcccgctgttaaattttactcctttgatggaactacgtacgatgaaatctctcaaataagaaatatggatccatcctatgaagcaccgttagagttaggaaaaatgtcgaactataaaatcagatcactacctacatacgatagtagtatacgcatttttgaaggtattagcaaatttacgccgctagataaaaggttctttgtcaggaaaatcataaattccttcatgtataatgatcaaaaaacaaccgaagaaaacttgaaagcggaaatcaatgctcaagtggtttatatgttagaacatctaggagcagttgacatctcaaattcagacttgaatcatatttttttaagtttcaatacagttcttaacataccagtacatcgtctcgaggaaattgtgagtacaattctaaagactcacgaaaccagattgtttcaagaaagaatcacagatgtagaaatttgcatctctgttgagtgcctagaaacaaagaagccagccccgcttagattacttatttctaataaatctgggtatgtggtaaaaattgagacatattacgaaaagatagggaaaaatgggaatctgattttggaaccgtgttgtgagcagagccattatagccagaaatctctctctcttccttactcggtcaaggattggctacaacctaaaaggtacaaagctcaattcatgggtacaacatatgtgtacgatttcccaggtctgtttcatcaagctgcaatccaacagtggaaaaggtattttccaaaacataagctgaatgacagtttttttagttgggttgaattgatagaacaaaacggtaatttaataaaagtaaacagggagccaggccttaataatatagggatggttgcttttgagattatggttcagacacctgaatatcctgaagggcgtaacatgatcgtgatttctaatgatattacctacaatattggatcttttggaccgagagaagatttgttttttgatagggtcacaaattatgcaagagagagagggatcccgaggatatacttggcggcgaattcaggagctaaattgggtatagccgaagagctgatccctctatttcgtgtagcatggaatgacccctctgatccaacaaagggtttccagtacttatacttagctccaaaagacatgcagctactgaaagattctgggaaaggaaattcggttgttgttgaacacaagatggtatacggtgaagagagatatattattaaagcaatagtcggattcgaagagggtttaggtgttgaatgtttacagggctcgggtttaattgctggtgccacttcgaaagcgtatagagacattttcactattactgctgttacttgtcggtccgttggtataggttcctatctggtcagactaggacaacgtactattcaggtggaggataagcctatcatactgacgggtgcatcggcgattaataaagttttgggtaccgatatctatacatctaacctacaaattggcggaacccaaatcatgtataaaaacggaatagcgcatttaacagccagtaatgatatgaaagccatcgaaaaaataatgacatggtcatcatatgtcccggcgaaaagagatatgagtcctccacttcttgaaactatcgatagatgggatagggatgtagacttcaaacctgccaagaaagtgccatatgaggcaaggtggttgatagagggtaaatgggactcaaataacaacttccagtcaggcctatttgataaggattcgttttttgagacattatctggatgggccaaaggtgtaatagttggaagagcacgtcttggaggtattcccgtaggtgttattgcggtagaaactaagactatcgaagaaataatccccgctgacccagctaatctggattcttcagagttttccgttaaagaagcgggacaggtgtggtatccaaattccgcgttcaaaacagctcaaactataaatgatattaatcatatgggagccaggggatcctctagagtcgacctgcag

SEQ ID NO: 82519 - DNA, 1161 bp, Saccharomyces pastorianus
atggcaaggcaagggaacttctacgcggttagtaaaggcagggaaactgggatctataatacatggaatgaatgtaaaaaccaagttgatggttatggtggtgcaatttataaaatatttaacagctacgagcaagcgaaatctttcctaggtcaaccaaatactacatcaaactatggaagttcaacgcatgctggagggcaagttagtaaacctcataccactcaaaagcgagttcatcgaaggaatcgcccacttcattattcctccttgacatcgtcatcagcatgttcatctttaagctctgctaatacaaacaccttttattcagtaaagagtagtgttccaaatatcgagagtaaaatctttaacaattggaaagactgtcaagcctatgtcaagcataaaaggggtataaccttcaagaagtttgaagaccaattagctgcggaaaacttcattagtggtatgagtgcgcatgattacaagctcatgaatatatccaaagaaagttttgaatctaagtataagctttctagcaataccatgtacgacaagtctatgaacgtttactgtgatggttcaagttttggaaacggcacgtcatcttcaagggcaggttatggtgcatattttgaaggagcgccagaggaaaatatttcagaacccttattatcgggagctcaaactaataatagagctgaaatcgaagcagtatcagaagctttgaagaaaatctgggaaaagttaactaatgaaaaggaaaaagtaaattatcaaatcaaaactgattcagagtacgtaaccaaattattaaatgacaggtatatgacgtatgataataaaaaacttgaagggctacctaattctgatttaattgttcctttggtgcagaggttcgttaaagtcaaaaagtactatgagttgaataaagagtgcttcaaaaataatggtaaatttcagattgaatgggtaaaaggacacgatggtgatccaggaaatgaaatggcagattttctggcgaagaaaggagcatctagaaggtactcaaatgcggttgtatacgcttggcttcttactggacctgttgtacctgtaatagaaatatatattttatatcttttgcatacatatacatacatcagctatttggttttttaa

SEQ ID NO: 82520 - DNA, 1032 bp, Saccharomyces pastorianus
atgttacacaggcacggttctaagcagaagaacttcgagaatatcgctggaaaagttgtccacgaccttgcaggtctgcaattgctttctaacgacgttcaaaaatccgctgtccaaagtggtcatcaaggatcgaacaatatgagagatacttcgtctcagggcatggctaataagtattcagttccaaaaaagggactacctgctgatttgtcttaccaactgattcataatgaattaacacttgatggtaatccacatttgaaccttgccagtttcgtgaacacttttaccactgatcaggcaagaaaattgattgatgaaaatttgaccaaaaatcttgctgacaatgatgaatatccgcaattaattgagctaactcagcgttgtatttctatgctagctcaattatggcacgccaatcccgatgaagaaccaataggctgtgccaccacaggctctagtgaggcaatcatgttgggtggactcgccatgaaaaaaagatgggaacacagaatgaagaatgctggtaaagatgcttccaagccgaacattataatgtcttctgcgtgccaagtggcattagagaaatttacgagatattttgaggtggaatgccgattggttccggtatcccacagaagccatcatatgcttgacccagagtcgttatgggattatgtagatgagaacactattggctgttttgtaattttaggaaccacctacactggccatttggaaaatgtagagaaggttgcagatgtcttgtcccaaattgaggccaagcatcctgattggagcaatactgatattccaatccatgcggacggcgcttcaggtgggtttattatcccatttggctttgaaaaagagcacatgaaagcttatggcatggaacgttgggggttcaaccatccgcgtgtggttagtatgaacaccagtggtcataagtttggcttaaccactcccggcctgggttgggtgctatggagggatgaatccttactggctgatgaattgagattctga

SEQ ID NO: 82521 - DNA, 198 bp, Saccharomyces pastorianus
atgaagttatctcaagttgttgttcccgccgtcgccttcactggtttagtaagtgctgctaacagttctaacagctcaagctcaaagaatgctgcccaacctattgccggtttaaacaacggtaaggttgcaggcgccgtctggtgttgctctaactggtgcttgggctttttgatttcacttagacttgtttggata

SEQ ID NO: 82522 - DNA, 117 bp, Saccharomyces pastorianus
atgcacgttttttatatgacgataatacttattttggtcaggaagcaaatgcagtccatacatgcgtttctgggtagtttatgcttaccctcccacgtgctagattttcgattgtaa

SEQ ID NO: 82523 - DNA, 792 bp, Saccharomyces pastorianus
  modified_base (781)..(782): a, c, g, t, unknown, or other
atgttacaacggagatttatatcctccagtggtataaagagattacttcacagagaatcaaacaaggttatgcacactgttttctttaaagtacgatattactcaactgagttgatcaaaaaaaagcataaggaagatattgaggattgggttaaagcgcaactaaaagattcttcaacaataagcggtgtgtatgagtctcggaataaactcgattggatggactccattaccaaaagccccagcagcttagatattcttaagaatcaatataatatagtgaaagacaaagattttggaatattgtggaagcaaaaattcgaaagtgcagatccagatattttgatgacaataattagcctttccactaaccaaaaggttttgttttcaatacagcaattactgatcttaataaattctcttcactttttgaaaagggactacgatattggacaaatatacacaacatatgagcaattcacgcccttattagcaagccacactgataaaggcacatatggtcagttcatcgaaattatgttggtagtacagcataatttacatcattttgatgtctgtgaaaccttatttgcagaatatatcaaatattgcaaagtaaagccacaaatgatatctttaggattaaactctttcataaggagtaataacactcaactagccgtggaattttacacgcaagcaattactaatcctgatacatttccaataactgaaaagcagctttttgagtttctccgatgtatggaaagatatctagatnnatgtccagta

SEQ ID NO: 82524 - DNA, 501 bp, Saccharomyces pastorianus
  modified_base (121)..(148): a, c, g, t, unknown, or other
atggctaggccagttaatacaaacgctgaaacggaatcgagaggcagacccactcagggtggtggttacgcaagtaacaacaatggcagctgtaacaacaacaatggcagcaataataacnnnnnnnnnnnnnnnnnnnnnnnnnnnnacagcaataacagcaataacaataacgggcctacctccagcgggagaaccaatgggaagcaaagactcacagctgcacaacagcagtacattaagaatctcatagagacacatatcaccgacaaccaccctgatctgcgccccaagagtcacccaatggatttcgaagagtatacggatgcgttcctgagaaggtataaagaccactttcaattggacgtaccggacaacctgacgctgcagggatacttattgggtccaaattgggcgcgaagacttattcatacaagaggaacacacaggggcagcacgataaaagtatacataagagagacctgccgggatcctctagag

SEQ ID NO: 82525 - DNA, 150 bp, Saccharomyces pastorianus
atggttcttgttagtcaacaatctcgctgcctcttcgtcagttgccaagtaaccaatcaaatattcgtcctcaaggatttcatacgcggagtcgcttgttcatgcacatctgagtctttcatgatctcagtaatgtccttaccagcatag

SEQ ID NO: 82526 - DNA, 309 bp, Saccharomyces pastorianus
atggcctttaaagttggctgtgataactttagttcttcgaacttttccacacaagtagtttgttctccctcaggtgcggtattgttttgttttgaagtgctcttttcatctactacaggttcttctgtagattcagaatctctagaacgtttattcgacggggtagccatacttctcctgttaatattgctcagcttaactaattattatagtatacagttatccaatagctatgtactcaagtaccgtgtatacactataaaatctcatctcatcgctaaagctaatattgaaaaaaaaaaaaaaaaa

SEQ ID NO: 82527 - DNA, 1011 bp, Saccharomyces pastorianus
atgtctacagacaagatcacatttttgttgaactggcaaccaaccccataccatattccaattttcttggctcaaaccaaaggttacttcaaggagcaaggtctagacatggccatcctagaaccaaccaatccttccgatgtcactgagttaattggatctggtaaggtcgacatgggtttgaaagccatgatccacaccttggctgccaaggcccgtggtttcccagtgacctctgttgcctctttgttggacgaaccatttaccggtgtcttgtacttaaagggcagtggtatcactgaagacttccagtccctaaagggtaagaagatcggttacgttggtgaattcggtaagatccaaatcgatgaattgaccaagcactacggtatgaagccagaagactacaccgcagtcagatgtggtatgaatgtcgccaagtacatcatcgaaggtaagattgatgctggtattggtatcgaatgtatgcaacaagtcgaattggaagagtacttggctaagcaaggcagaccagcttctgatgctaagatgttgagaattgacaagttggcttgcttgggttgctgttgcttctgtaccgttctttacatctgcaacgatgaatttttgaagaagaaccctgaaaaggtcagaaagttcttgaaagccatcaagaaggcaaccgactacgttctagccgaccctgtgaaggcttggaaagaatacatcgacttcaagcctcaattgaacaacgatctatcctacaagcaataccaaagatgttacgcttacttctcttcatctttgtacaatgttcaccgtgactggaagaaggttaccggttacggtaagagattagccattctgccaccagactatgtctcgaactacactaatgaatacctgtcctggccagaaccagaagaggtttctgatcctttggaagcccaaagattgatggctattcatcaagcaagaatcagacaggaaggtactttcaggggatcctct

SEQ ID NO: 82528 - DNA, 303 bp, Saccharomyces pastorianus
atgatgcgtcgcacgctattacattcattcgctacgctgctactttctttgtcgttgtggtcagctgcggtcatggcagctgtgacaactcaggttacagtggtaacaaatgtcgcaggggccctggttacggagaccacaatatgggaccctgccaccgctgctgctgctgctacaactaccgctcaaacaggtttcttcactacggtattcactaccactaacgatgtcggaaccaccgtcactcttactcagacagtcaacagagccactatgctaccaaccacgacgacttctacctca

SEQ ID NO: 82529 - DNA, 153 bp, Saccharomyces pastorianus
atgggactttctgagaatgatcaagaatccgatcaagatcaaaaaggaagagataccccttcgggacaagatgagaaatcaccactggaaactaagacagtagatgctcaaacgagaagggactactggctctctaaaggccaggctctttaa

SEQ ID NO: 82530 - DNA, 147 bp, Saccharomyces pastorianus
acattcaaagaccgcgttgttaaaagtatactcggaaacgtgatcatataccgtgggcttaagagagatttcaacgacgaaagagatttagtgcagaataaagccatcattgaaacgagcgctaccacaagaggcgcacgaggatag

SEQ ID NO: 82531 - DNA, 1395 bp, Saccharomyces pastorianus
atgacaaggctcaaagcaaaatattcacctacaaaaggtaaaagaaaagaagataaacatacaaaacgtatgcgtaaatcatccttcacaagaacgcaaaaaatgcttgaagtatttaacgataatcgctcgcatttcaacaagtacgagagcctcgctatcgacgttgaagacgatgacactttcggaaacctagtcttaatggaaaatgataaaagtgatgtcgacatacctgtaatagaagaagtcacatcaagtgaagatgaacaaagggcagaatctagcaaaagaaacaattctctcgaagataatcaagattttattgctttttcggacagctctgaagatgaaacagaacaaataaaggaagatgatgatgaaagaagcagttttctgttgaccgatgaacatgaagtttctaagcttacttcacagcaatctctgaacactgaaagcacttgcaatgtggagtatccttggataagaaatcattgtcattcgaaacaaaggagaatagcagattggctaacttcagaaatcaaagatttcgttcattatatctctccaagcaagaacgaaatcaagtgcagaaatagaacgatcgataaactacgccgggcggtcaaggaactgtggtcggatgcagatttgcatgtgtttggttcttttgccaccgatttatatttgccgggttctgacattgactgtgtcgtaaacagccggaatcgcgataaagaggacagaaattacatttatgaattggcgagacatttgaaaaacaaagggctagctataagaatggaggttattgttaaaacgcgagtgcctattatcaaattcatagagccccaatcacagttacatattgacgtttcatttgaaagaacgaacgggttagaggctgcaaaactcatcagggaatggctaagagactctccagggttacgtgaactggtactgataataaaacaatttttgcattcaagacgattgaacaatgtgcacacaggaggattgggaggtttcacagtaatctgtttggtttattcttttttaaatatgcatccgcgaataaaatcaaacgatatcgacgttctagataacctgggtgttctactgattgacttcttcgaactttacggaaaaaaatttggttatgatgacgttgctataagcatatctgatggttacgcctcttatattcctaaatcgtgttggagaactttggaaccttcaaggagtaaattctcgctagctattcaagatcctggtgatcctaacaataatataagcagaggctcctttaatatgaaggatataaaaaaggcctttgctggtgccttcgaactgttggtcaataaatgctgggaattgattctgctggggatcctctag

SEQ ID NO: 82532 - DNA, 906 bp, Saccharomyces pastorianus
atggaacaccaagcacttcgaaggcttgtactgtactgccccaatttcatccgacgtggtgctcttaggcataatatgactagagtgagctgtagacatatgtcaggcaagggtggagggagagatgagaacggtgattgcaatgaagaaaaggattcttccaaagatttggggagggtaccgtcgaagatgaaacgagcatatgatggtgaaacagttattaaagagggagactcacacgctgagtcgctagcgcagcagggaaagcagcccacagacctcgcatataacagcagatcgaagatatctggttctaatttgcatttactggttcctagagttgcgtctacagactatattccgaataaagaggttcacacggagggcctgtttgccggctatcgacccttgtttctggggaactcaggttttccgtctgatgcaagaaagggtaaaaactttcatgagttagacgacgttcttcccaatatacaggtagtggacgcttccgagaaagatggcaaacttaatgtgcaggagattattgaggacttacaaagaacaagtttgagagaaagcattcatagtatggaacagctaccatcttcgcacaaacgtaaacccgtaataccgtgggacgcatctataagtggcatggtttataatgacatgcctttcaaatatgtgcccaaaaatattattctgaaaatgaagccatttaaacttttgcgtattgagagaaaaagtcaagcgaagaatgcaagaaagcctactatgataaaacttcagtttcacaatcgaagaatcaatgacaccccagagttagtgaatttataccataataaatcccgtttgcacgagtcactttacaatacaaaaccccttcaagaatctggatattcaagt

SEQ ID NO: 82533 - DNA, 1206 bp, Saccharomyces pastorianus
atgagcggttttaaatgctatttgcaattgggtgacaggctctctcaaatatggctaaataagtatactttggttttgctgctagcaatgctgaagcttctgtttttctccaaatccatacaacatgcgatagaagtctcggaaacgtatattttgtccaattgttacagtattgattcactatactccaagatgacagacaacacgccgcactatttaggtatcatggggaattatcttatcgagaaggatatggaggagactgttaaagctacgctagagacgttatcacttatagtatatgcgagcgaggggctggtaaactttgccattgacctgtatttgggcacttatgcctgtttgattgttagtgccgttgatggtaccgtggacgttgctactaacactacagaaaaactgattagcttagtcaatgatacagtttcaagtgtggctaatgaattggatacgggcttgaatgacatctccaaaataatcaataaagtgatcaaggccgcatccaaagtagagaattttttcacaggtgatgacgatgacagtaacatgacgtcgtcaatcaaaagcgtcaacttaaccatatctgcgcttcacaatttatacattccttcctcaatcaacgataagcttgaagagttatcggcaaagacgccggactttgcccaggttaagaatacaaccaagaacctgatctcggttcccttcaatgaagttcggaagaatatcaaggccgtgaatgccagcaatataatcggagatacctccgttttgtacgtacctcccgtgtcccttgacaacagtactgggatttgctcatccaatcaatcagaaattttggccttttattccatcttgggacatgtcctgaaaatagccaccgtagtgtgcattaccgtattgatatgcttcgctgttggtgcgatggcgcccgttgcatggaatgaaatcaagctctggaggcgcctttgcggaatgagagaccattacatgctgagcaggcaagattcgtatacgtccttttccagtgtaaacacgcacgaattgaaagatccatttagagatcctcctatacaaaatggccaatatgatgtcattgcaagctatcagcagtgctttcacacatggaacacaagaatagcaggctggatgacaaatcttgttacctttggaaaatcaccagagaacatt

SEQ ID NO: 82534 - DNA, 3042 bp, Saccharomyces pastorianus
atgcgaattttttcaggtgacaacaaggtagttgattccctcgcctctaaccctggattaatgagtccatcgaattttggcggtgacttcggttcacgactaaaagtaaatgtaacatcaaaaaagaaacttaacgactcatcatcaacttctcccatggaaagttcaccagtttcacctgagttggtgcctattctaacactgctaaatgcacatacacatagaagatatcatgaaggcgtgtttttgattttacaagaccttaacaacaatggcactcatgcagcaaggaaatggaaggacgtatatggggtactgttgggtactcaactagccctttgggacgccaaggaactagcagaattcactgatccgtcttgtccggtctctgaaaagaaactgaaggaagttgcttccaaacccacttatatcaatttgacagatgctacactaagaactttggataactccgataatatcgtaatggagtgtggaaaaaacctcactaatgcattggtggtttctactacgctgaaaaaccgatatttcttacaattcggtaacaaagagtctttcaacgcatggaattctgctatacgattatgtttatacgaatgttcttcgttacaagaggcttacacaggcgcatttatttcaagtagaggcgcaaaattaggtgatatcagaattctccttacgaatagaaaatatgattacaaggattgggtcagcgtcagattcggagcaggtatgccgtggaagcgctgctatgcggtaatctctcaatctagcagtaagaaaaagggtcattttggtgaaataaatctttatgaaaatgacaagaaagtgaagaaaaaccatgcaatggctactattgtagaggcaaaggcgctttatgctgtttacccgtcctcccctaaactaatagattcctctacaatcattaaagtcgtaggttctgtgaaatttgaaaaaaaggagtctgctcaggaaaaggatgtctttattatgcccgagaagcatcaagctgtaccaagttatgacactataataaggtttttaataccggctatggatacttttaaactatatggaagaccagagaaattattgtcaagcaagaacgacccacattcacttttgtttggtttgccagttttgccacatatatactacttggaagtggaggatttacttccattgactaattctgtatcaagcttacactggtcgaataacgaatggaaggaacatatcagtgatattttacaaaggaaaatagcacaaggctactgtgggtgtaattctacttccaatattacttctcctctaccttctcctttccttggttcagcagacttatttgaaagggccgatggtgttttatcaccgaaactttcttacgggtctaaatcttcttcgaataacagctcgaagaacagtttgccaaagagagagcgtgtaaaattgtcatcttcttctgaacaggaccttaataactctgatagtccatctattaaacgtaaaagtcctccactagtgatatctgaaagtccacacaaagtccacacacctactgatgcatccttcagaacaagagtgacagaaggttcaccttatgcgaagcaaagacatcccaagccgtttgcgtcatctgtaaacgattcaccatcagacagagccaagtcgaggacagttccttacaataataacgacaggaaagcgaccactcctgagaaatttgaaagaggagaaacctcttgtggtaagaacgtggacgaaagtttggaaaaggtccggaatatgaagttagaaattcccgagtccaattttgacaagttcatgacagacaaaaatctgttgtctgtggattctaaatgctctaatgagaagaagctctctgtggaatcagatttgtctgcaatctacgaaaaatactccaatggtccctttggtcacactgagggtcttaacggatcttctgatgaaacttaccttcgttttcaacgggcgtcagttcattcagagagcaactacaattcaagaaaatcctttacaccaagtgacttttctaatggtaatgaggaagaacatgccgttttacaagaattaaatagtttaacccaaagaattaatgaactaggcatggaaagtataaattcaaactccgattcggacagaataaacgggtcatattcacaagtggattttggtaacaataacgacgaggacgatatgaacctgttcgacccagattttatggcacaagaccaattgcgtgctgaagaaagagactacaataaggatgatagaacacccttagctaaggtccctgcggcctttcaatcaactggattgggcataactcccgatgacgatatcgagagacaatacataacggaacacagatcacgacatgaagtgccaaagcggtctcccgagaaaccctccaacccgctggaaataggtaacccatacgcgaaacctggcacaaggttgaataccactcacacccacagcaaaactgatcgtagcattacccctcagaggggccagccagtcccatcaggccagcagatttcctcctacgtgcagccagcaaacattaatagtcctaacaaaatgtatggtgcaaacaactcggcaatgggttcgcccaggaatccaaagacgagagcgccaccaggtccatacaatcagggatggaataaccgcccctcgccttcaaatatttaccaacgtcctcatccctcagatacacaaccacaagcatatcatctccccggaaacccatactcaacggggaacaggccaaacatgcaagcgcaatatcacccgcagcaggtgcccatgcctatcccgcagcagcccaatcgcccgtaccaaccttatgcgatgaatacgcacatgggctctcctggcggatatgctgggcagcaccaccatttcagccagctaacgtcaactacaatactaggcctcagcagccatggcctacacctaactcaccatccgcacactaccgtccgccccctaacctga

SEQ ID NO: 82535 - DNA, 660 bp, Saccharomyces pastorianus
atgtcgcatactttaaaatcgaaaacgctccaagagctggacattgaggagattaaggaaactaacccattgctcaaactagttcaagggcagaggattgttcaagttccggaactagtgcttgagtctggcgtggtcataaataatttccctattgcttataagacgtggggtacactgaatgaagctggtgataatgttctggtaatttgtcatgccttgactgggtccgcagatgttgctgactggtggggccctcttctgggtaacgacttagcattcgacccatcaaggttttttatcatatgtttaaactctatgggctctccatatgggtctttttcgccattaacgataaatgaggagacgggcgttagatatggacccgaattcccattatgtactgtgcgcgatgacgttagagctcacagaattgttctggattctctgggagtaaagtcaatagcctgtgttattggtggctctatgggagggatgctgagtttggaatgggctgccatgtatggtaaggaatatgtgaagaatatggttgctctgaccacatcagcaagacattctgcctggtgcatatcgtgttctgaggcccacagacaatcgattactcagatcccaactacttggacgggtactatccggtag

SEQ ID NO: 82536 - DNA, 567 bp, Saccharomyces pastorianus
atgtctgcattgttgacgtacaggacaagaaacagtttcgagaacaaattctccagaagatctccttcaatagcacaacaacaaaaagctcaaagggaggagacacgcaaaccatctactgtcagcgaacactccctacaaatccacaatgatgggtataaaacaaaagccagcactgccattgctggtatttctgggcaaaaacgtcaaagcgtggtgtccaccgcatcttcttcggattcattgaattcttcaacatcgatgacttcggtaagttctgtaacgggtgaagtgaaggacataaagcctgcgcagacgtatttttctgcacaaagttacttgaggtaccagggcacaaagttcatcaataggttcgacgccaattgttacattgccatcacacgtaaactggatacgcacgatttggcaagagacagagtagatgacatcactgaggtcctttctaccatccaacaaccatccctgatcatcggtatccaatctgatggactgttcacatattcagaacaagatttttggctgagcacataccgaagtcgcacttag

SEQ ID NO: 82537 - DNA, 996 bp, Saccharomyces pastorianus
atgagtaagaaaccaattgttttgaaattaggaaaggatgcctttggtgaccaagcctggggggaattggaaaagattgcggatgtaattaccatccctgaatccaccactagagaacagtttttgcgggaggtaaaagacccacaaaataagctctcccaagtacaagtcattactagaacagcaaggagtgtgaaaaacaccggtagatttgatgaagagcttgctcttgctttgccctcctccgtagtggctgtatgtcatactggtgctggttatgaccaaattgatgttgagccattcaagaaaaggcacatccaggttgccaatgttcctgatttagttagcaatgctaccgctgatacgcatgtatttttgctattgggtgccctaagaaacttcggtattggtaacagaaggttgatcgagggaaagtggccggaggcaggacccgcatgtggttctccctttggatacgaccctgaagggaaaacagttggtatactgggtctaggtaggattggtcgttgtattttagagagattgaagccgtttgggttcgagaatttcatatatcataacagacaccagcttccttccgaagaagagcatggttgtgaatatgtaggattcgaggagtttttgaagcgttctgatatagtatctgtaaacgtcccactgaaccacaatactcaccatctaatcaatgcagagactattgaaaaaatgaaagatggtgtagttattgttaacacagcgcgtggtgccgtgatagacgaacaagccatgactgatgctttgcgttctggaaagattagaagtgctggtttggacgttttcgaatatgagccaaaaatatccaaagagttattatcgatgtcccaagtcttaggactgcctcatatgggcacacatagtgtagaaacaagaaagaaaatggaagaactggtcgttgaaaatgcaaagaaatgtgatattgaccgggaacagtcttga

SEQ ID NO: 82538 - DNA, 195 bp, Saccharomyces pastorianus
atggttacaaaaaagacgacattcgcccaacttatcactcgcttgaaccactttttatgccaagcccttaaacgccgcgactcaaaaacatacatactgtgccgcacggcagtttttgacgctatgacacccttttccccaagaaaatcgcatattaacaacaaattacccatgcaacccaggaaaaaaaaatag

SEQ ID NO: 82539 - DNA, 2805 bp, Saccharomyces pastorianus
atgatgtttggcaagaaaaaaaacaacggaggatcttccactgcaagatattcagctggcaacaagtacaacacactctcaaataattatgcgcttagcgcgcaacagctcttaaatgccagtaagatcgatgacatcgattcgatgatgggatttgaaagatacgtaccgccgcaatacaatggcaggtttgatgcgaaggatatagatcagattccaggccgcgtagggtggctgacgaacatgcacgcaacgctggtctctcaggaaaccttatccagtggtagtaatggcggcggcaattcgaatgacggagaacgtgtaacgaccaaccaaggtatttccggagttgacttctactttttagatgaagagggtgggagcttcaagtcgacagttgtctatgacccatacttctttattgcgtgtaacgatgaatcaagagtaaatgatgtggaggaactagtgaaaaaatatctggaatcttgtctcaaaagcttacaaatcattagaaaggaagatcttaccatggacaatcaccttttagggctgcagaagacacttattaagttatcatttgtaaattccaatcagttattcgaggccaggaagctcctgaggccaatcttgcaggataatgccaataataatgtgcaaagaaatatatataacgttgctgcaaatggctcggaaaaagttgacgccaaacatctgatcgaagatatcagggaatatgatgtgccgtatcatgtccgagtatctatagacaaggacattagagtcggtaaatggtataaggtaactcaacaggggttcattgaagatactaggaaaattgcattcgccgaccctgtggtaatggcatttgatatagaaaccacgaagccgcctttaaaattcccggattccgccgtagatcaaataatgatgatttcgtatatgatcgatggggaaggttttttgataacaaatagggagataatctctgaggatattgaagactttgagtatacaccgaaaccggtgtatcctggttttttcaccatatttaacgaaaacgatgaagtggcgcttctacaaaggttttttgaacatataagagatgtacgacccactgttatatccaccttcaatggtgactttttcgattggccttttatacataacagaagtaagattcacggcttggacatgttcgatgaaattggtttcgctccagatgctgaaggtgagtacaagtcctcatactgctctcacatggattgtttccgttgggtgaagcgtgattcttatttaccacaaggttcccagggtttaaaagctgttactcaatctaagctaggttataacccaattgaactggatcccgaattaatgacgccgtatgcatttgaaaagccacagcacctttccgaatattctgtttccgatgcagtcgctacgtattacctttacatgaaatatgttcatccttttatcttttccctttgtactattattcctttgaacccggatgaaacattgagaaagggtaccggtactttgtgtgaaatgttgttgatggttcaagcttatcaacataatattcttctaccaaataagcatacagatcccattgagaggttctatgatggacatcttctagaatccgagacttacgtgggtggacatgtggagtcattagaagctggtgtttttaggagtgatttgaagaatgaattcaagatagatccttctgccattgatgaattattacaagaattaccagaagctttgaaatttagtgtggaagttgaaaataagtccagtgtagataaagtaacgaattttgaggaaataaaaaaccagataacgcagaaattattagagttgaaggaaaacaatataagaaacgaactacctttgatctatcatgtagatgtcgcctctatgtacccaaacatcatgactacaaatagactacaaccagatagtatcaaagcagagcgcgattgtgctagttgcgattttaatagacccggaaaaacctgtgcaagaaagttaaaatgggcttggagaggagaattctttcccagtaagatggatgagtataacatgatcaagcgtgcattacaaaatgagacttttcccaacaaaaacaagttttctaaaaagaaagttttgacatttgatgaactaagttacgcagaccaagttatccacataaaaaaacgtttaactgaatattcaaggaaagtttatcatagggttaaagtatcagaaattgtcgaacgagaagccattgtctgccaaagagaaaatccattctacgtcgataccgtgaaatcctttcgtgataggcgttacgaattcaaaggtttagccaagacttggaagggaaatctgtccaaaattgacccatctgataagcatgcgagagacgaggccaaaaagatgattgtgctttatgactcattacaattagctcacaaagttattttgaattcgttttatgggtatgttgtgaggaaaggctctcgttggtattccatggaaatggcggggattacgtgtttaacaggtgccacaatcattcaaatggcgagagctttagtagaaagggtaggaagaccattagaattagatactgatggtatttggtgtatcttaccaaaatctttccctgaaacttacttttttacattagaaaatggtaaaaagctttatctctcctacccatgttccatgctgaattacagagttcaccaaaagtttacagaatcaccaataccaagaattaaaagacccattgaactatatatatga

SEQ ID NO: 82540 - DNA, 1221 bp, Saccharomyces pastorianus
atgattttgcctacttccaaggaagaaggaaaaggtataaagaaaagatatgctgtctttaatgaagacggctcacttgctgaactgaaaggttttgaattgaagaggcgtggtgaattacaactaataaaaaattttcaaagtgatattttcaaggtctttttggaaggtgatacattagaaggatgttacagtgctgtagcaagcgtatgtaaccgttggttagatgttcttgattcacatggtcttatgttagaagatgaagacttggtcagtttgatttgtgaaaatagaagtatgtcaaaaactttaaaggaatatgaagggcaaaaatctacttctattacgacggcaaggagattgggggattttttgggtgaagatatggtaaaagataaaggtctacaatgtaaatatattattagttcaaaacctttcaatgcacctgttactgaacgagccattccagtcgcaatattttcagcggacattcccatcaaaaggtcttttctgaggcgatggacattagatccatctttggaagatctggatatcagaaccataatcgattggggttattatagagaaagacttggatctgctatacaaaagataattactattccagcagcattacaaggggtttccaatcctgttccaagggttgaacatccagattggctaaaaagaaaaatcgctacaaaggaggataagtttaagcagacttcactaaccaaatttttttcgaagacaaagaatgtaccaacaatgggcaagataaaagatatcgaggatttgtttgaaccaactgtagaagaagataacgccaaaattaaaattgcaagaactactaaaaagaaagccgtatccaagaggaaaagaaatcagcttacaaatgaagaagatccactagtattgccctcggagattccttccatggacgaggactatgttgggtggctaaattatcaaaaaattaaatggaaaatccaagcaagagatagaaagcgtcgagaccaattatttggtaatacaaacagctcccgtgaaagaagtgcactaggaagtatgattaggaagcaagctgaatcatatgcgaactccacttgggaggtcttacaatacaaggattccggtgagccaggggttttggaagtatttgtaacaattaatggcaaagtccagaacatcaccttccatataccaaaaactattatatga

SEQ ID NO: 82541 - DNA, 2451 bp, Saccharomyces pastorianus
atgcttattgaaaaatcttctgcatcgttaccaaataatcccaaaacgtctaatccagcaggcggtcagctattcaaaattactctaccggaatctgtctttctggaagaaaaggaaaactgcactagtatcttcaacgatgaaaatgtacttggtgtatttgagggcactatcactcctcatcaaagagcgatcatggatttgggagcttcggtaacgttccgctcaaaagcaatgggtgcgttaggcaagggaatacagcagggttttgaaatgaaggatctttcaatggcggaaaatgaaaggtatctgagtggattttcaatggacattggctatttactacatttcccaacatcaattgggtatgaatttttttcattattcaaatcatggggagatactattactatattagttttgaaaccatccaaccaggctcaggaaataaatgcctcatcattaggacaaatatacaaacaaatgtttgaaaaaaagaaaggtaaaatagaaacatattcttacttggttgatattaaagaagatatcaattttgagtttgtatattttacagatatctcaaaattgtacagaagactatcacaggaaactactaaattaaaagaagaaagaggtctgcagtttttactcttgttacaatctccgtttatcactaagctcttaggcacaatccggcttctaaaccagatgcccattgttaagctttccttgaatgaagttcttctaccccaattgaactggcaaccgacattattgaagaaacttgttaaccacgttttatccagtggttcgtggatttctcacttgatcaagttatcccagtatagtaacattccaatctgtaatttgaggctggatagtatggattatgttattgatgttctttatgcaagaaaactaaaaaaagagaacatcgtgctttggtggaatgagaaagctccacttccagatcatggaggcattcaaaatgattttgatttaaatacatcatggataatgaatgattcagaatttcccaaaattaataactcaggtgtgtatgacaatgtagttctcgatgttggtgttgataatttaacagtgaacacaattttgacatcagcattaatcaatgatgctgaaggcagtgatctagttaacaataatatgggtatagatgacaaagatgccgttattaactcgccatctgaattcgtgcacgacgccttttctaatgacgctttgaatgttttaagaggtatgttaaaggagtggtgggatgaggccctaaaagaaaattcaaccgcagatttgttggtaaattccctggcaagttgggttcaaaacccgaatgcgaaactattcgacggattactaagatatcacgttcataacttaacaaaaaaagccttacttcaattagtaaatgaatttagtgcacttggctcaactattgtatatgcagacaggaatcaaattctaataaagacaaacaagtactcacctgaaaactgttacgcctacagccaatatatgatgaaggcagttagaacaaatccaatgtttagttatctggacttaaatatcaaacgttattgggatctgctaatatggatggataagtttaattttagtggattagcatgtattgaaatagaggaaaaggaaaatcaggattataccgctgtttcgcaatggcaactaaagaagtttctgtcaccaatatatcagcccgaatttgaggattggatgatgatcatattggatagtatgctaaagacaaagcagagctatctaaaattgaattcagggacgcaaagacctacccaaatagttaatgtaaaaaaacaagataaggaagatagtgttgaaaactcgttgaacggattttctcaccttttttccaaaccactaatgaaaagagtcaaaaagctttttaaaaaccagcaagagttcattttagatcctcagtatgaggcagactatgttattcctgttcttcctggttcccatctgaatgtgaaaaatccccttctagaacttgtcaaatcactctgccatgtcatgttactttcaaagagtacaattttagaaatcaggaccctgagaaaagaactgctgaagatatttgaattgcgtgagtttgctaaagtagcggaattcaaagatccaagtttgagtctcgtggtgccggattttttatgtgaatactgttttttcatttctgatattgacttttgtaaggcagctcctgaatctattttttcatgcgtcagatgtcacaaagcctttaatcaagtattgttgcaagaacacctgattcaaaaactacgttctgatatcgaatcctatttaattccagatttgagatgctccagatgtcataaagtgaaacgtgactatatgagtgcccactgtccatgtgccggcgcgtgggaaggactctcccca

SEQ ID NO: 82542 - DNA, 876 bp, Saccharomyces pastorianus
atgatgaataacaacggcaaccaagtgtcgaatctctccaatgcgctccgtcaagtaaacataggaagcaggaacagtaatacaaccaccgatcaaagtaatataaattttgaattttcaacaggtgtaaataataataataataacaatagcagtagtaataacaataatgttcaaaacaataacagcggccgcaatggtagccaaaataatgataacgagaataatatcaagaataccttagaacaacatcgacaacaacaacaggcattttcggatatgagtcacgtggagtattccagaattacaaaattttttcaagaacaaccactggagggatatacccttttctctcacaggtctgcgcctaatggattcaaagttgctatagtactaagtgaacttggatttcattataacacaatcttcctagatttcaatcttggcgaacatagggcccccgaatttgtgtctgtgaaccctaatgcaagagttccagctttaatcgatcatggtatggacaacttgtctatttgggaatcaggggcgattttattacatttggtaaataaatattacaaagagactggtaatccattactctggtccgatgatttagctgaccaatcacaaatcaacgcatggttgttcttccaaacgtcagggcatgcgccaatgattggacaagctttacatttcagatacttccattcacaaaagatagcaagtgctgtagaaagatatacggatgaggttagaagagtttacggtgtagtggagatggccttggctgaacgtagagaagcgctggtgatggaattagacacggaaaatgcggctgcatacttaggggatcctctagagtcgacctgcagc

SEQ ID NO: 82543 - DNA, 171 bp, Saccharomyces pastorianus
atgaattgcaaggcggtaaccattagtttattactgttgttatttttaacaagagtatatattcagccgacattctcgttaatttcagattgcgatgaaacttttaattattgggaaccattaaatttattggtacgtggatttggtaaacaaacctgggaatatcaccga

SEQ ID NO: 82544 - DNA, 375 bp, Saccharomyces pastorianus
atgagcgtaaagagcataagcaacaagagcaatacggcaactcaaacttcggaggtgctcctcaaggtggacacaacaaccatcaccgtcaggacaataacaacaataacggtggatttggcggtccaggcggccctggcggtcaaggtttcggaagacaaggcccacaaggatttggaggtcctggtccacaagagtttggtggtccaggtggccaaggattcggtggtccaaatcctcaagaattcggcgggccaggtggccaaggattcggtggtccaaaccctcaagaattcgggggccaaggtcgtcaaggattcaatggcggttcacgttggtgaatggctcaacggagtgagtgtcatttttagctaa

SEQ ID NO: 82545 - DNA, 231 bp, Saccharomyces pastorianus
atgcattatacaaatcatacgaagactttaaaggctcggttgttcagccaacgattgaaaacattcaacaaaggaatttgccgaatgatatcaagagatcattcgtgcactttaatgagaagttgcatgaaacgccccatttaccctcgccagttttttcttgttttactgggggagatattctccctccagaattcaattagacatcataagaacatatgcttactttaa

SEQ ID NO: 82546 - DNA, 1632 bp, Saccharomyces pastorianus
atgcaaagttcagtttattttgaccaaacagggtcatttgcgtccagtagcgacaacgttgtgtctagtaccaccaacacacacaacatttctcccagtcatcgttccagtttgaatctgaacactacttctcatccccacgaagcgtcgggtagaggaagcgcaagtggggagttgtatttgaatgacacaaactcacccttagcgatatcttctatgctaaacacacttgcccttggaagtatgccccaagacattgcaagcagcaacattagcaatcacgataacaacattaaggggagctacagcctaaaattgtcaaatgtacccaaggatattactctcagagaatgctatgcaatcttcgctcttgctgaaggtgtgaaaagtatagaattacagaaaaaaaactcttcatcaagcatcacttctgcctcattagaagacgagaatgatatttttatcattgccagatttgagttattgaatctagctattaattatgccgttattttgaattcgaaaaatgaactctttggacccagttttcccaataaaacaaccgttgaaataatagatgacacaacaaaaaacttggtttcattcccatcatctgccattttcaatgacacctcaagattgaataaatcgaactcgggaatgaaaaggccaagtctgttatcacaaagatccaggttttcattcagcgatccattttccaatgattctcctttaagccaacagcaatctcaacagcagcagcaacagccacaacagccacaacaacactctacgcaaaaacattcaccacaacaatgtaatcaacaacaagtgaattcttcaataccgttatcttctcaaggccaggttattgggttacattctaaccattcacatcaagatttgtctgtggaatcaacaattcaaacatctgatattggcaaatcttttcttttgagagataacactgaaattaatgaaaagatatggggcacaagcggtataccttccagcatcaacggttacatgagcactccccaaccttctacgccaactttagaatggggaaatacttctgcatcccaacatggttcttcgttctttttaccctctgcagcatcgacagccattgcacctacgaatagcaacaccagtgccaatgcaaacgccagctccaacaatggagccagcaatactggtgctaaccaggcactctctgccagctcgcaacaaccaatgatgcaaattggtaacacgattaacacttccctaacctcttcaaattcattgcctccatacggtttaatgtcttctcaatcgcagcacatctcaaatatggtaaacacctctgatatgaacattacacctcaaaaacagaacagatttatgcaacaaccccaaccagagcatatgtatcctgtgaatcaaagtaacactcctcaaaaagtaccgcccgcaagattaagttcaagtagaaattcacacaagaataactctactacctcattatcctcaaatattactggatctgcctcgatttctcaggctgatttgtcactactagccagaattccacctcctgccaacctgctgatcaaaatccaccttgtaatacctggggatcctctagag

SEQ ID NO: 82547 - DNA, 786 bp, Saccharomyces pastorianus
atgctgggtttgggccaatctgctcaagcatatgcaagtgatgatgctctcaatatgaaccaggcaaaggataaaacgtacagcgttccagggtgtggcagggcaagcgacctcaaatatcctcatcgtgacggacactcttcatctcacgaacagcgctctggaattttaccaactgaatgcccaggccctactttaaacaccggtgccggtagcatcggtatcccgggatgtggcaaagtcacaaatagagtggtcagtgactataacaaaaacgctaggtctacgctagccaattttgatagtagtaaaatgaccgaggcaagaatgaacagcaagaacgtgccgattggttgtcaagacacctctgatccgcacttcaatgggcctatcgaccaacatgttcccggtgcaggttcacctcaaagtcaacctcatcacatcgacgcgtggaacagcgtttcttctcgccgtgccgataataacaaccaagacatgatggacccccaaacggcttcctcagacaggtacaatgagaaaatgatgagagaagaaaatagcggcgtctctgcttcttcttacaccactaaagtgcagggatatcccgcaagtattccatcattcaatcaggaaactgaggaaaaggaaacctacgcctacggtgtgggtgatcggcacaatgtcccaagaaaccaaattatggatgagactaatccttcggctaacgttctaaacgctactgatcatagtatttcgcaccctgagaataaggtcttgcatgagtag

SEQ ID NO: 82548 - DNA, 3360 bp, Saccharomyces pastorianus
atgagtgatcaaaataatcgatcgagaaatgaatatcactcaaaccgggagaatgaaccttcctatgaactccaaaatgcacatagcgggctatttcactcttctaatgaagaattaacaaacaggaaccaaagatataccaatcaaaatgccagcatgggttcattcactccagtccaatctttgcaatttccagaacaatctcagcaaacaaatatgctttataacggtgacgatggcaataataatactatcaatgataacgaacgagacatatatggaggttttgtcaaccactatcgccagcgtcccccaccagcaactgcagagtacaatgacgtttttaatacgaatagtcaacagctaccgtcggaacatcaatacaataacgtaccttcatatccacttccttcgataaatgtgattcaaaccactccagaactcatacataacggctcacagactatggccacccccatcgaaaggcccttctttaacgaaaacgactactattataataacaggaactctaggacgtcaccgagtattgcttctagtagcgatggttatgcagatcaggaagctaggcccattttggagcaacccaacaataacatgaatagcggtaatattcctcaataccatgaccaaccttttggatacaacaatggttaccatggcctacaggcaaaagattactatgacgatccggagggtggttatattgatcagagaggagatgactatcagattaattcatatttgggtagaaacggtgaaatggttgatccttacgattatgaaaacagtttaagacatatgactcctatggagcgtagagaatatcttcatgatgataacagacccgtaaacgatggaaaagaagaattagacagtgtgaaaagcggttactctcatagagacttgggggaatatgacaaggatgatttttcaagggatgacgagtacgatgatctcgacactattgataaattacagtttcaagctaatggtgtacctgcatcatcctcggtgtcttctatcggatctaaagaatccgacataatagtaagcaatgataacttaaccgcaaatagagcactaaagagaagcggtactgaaattaggaaattcaaactttggaatggtaattttgttttcgattctccaatcagtaagacgctattggaccaatacgctactactacagaaaatgcaaacactttaccaaatgagtttaagtttatgaggtatcaagcagttacttgcgaacctaatcaacttgcagagaagaacttcacagtgaggcagttgaagtatttaactccaagggaaacggaattgatgctagtagtcacaatgtataatgaagaccatattctgttaggaagaactttgaaaggtattatggacaatgtcaaatatatggtgaaaaaaaaaaattcaagcacttgggggccggatgcatggaaaaagattgtcgtttgtatcatttcagatggtagatccaaaattaatgaacgctcgctagcattactaagttcgttaggttgttaccaggacgggtttgctaaggatgaaattaatgaaaaaaaagtggcaatgcatgtctacgaacatacgacaatgatcaacatcacaaatatttcggaatcagaggtttcattagaatgcaatcaaggtaccgttccaatacaacttttgttttgtttgaaagagcaaaatcagaaaaaaattaactcacatagatgggcatttgaaggctttgcagaattattgcgtcctaatatcgttacattgttagatgctggtaccatgccaggtaaagattctatttaccagttatggagagagttcaggaatccaaatgttggtggcgcatgtggtgaaataagaactgatttgggtaagagatttgtaaagcttttaaatcctttagttgcatcacagaatttcgaatacaaaatgtccaatattttagacaaaacaaccgagtctaactttggatttattactgttctaccgggggcattctctgcgtataggtttgaagctgtgagaggccaaccgttacagaagtacttttatggtgaaattatggaaaatgaaggttttcattttttttcttccaatatgtatcttgctgaagatcgtattttatgctttgaagtggtcacaaaaaaaaattgcaattggattttgaaatactgcagaagttcttatgcttcaacagatgtaccggagagggtccctgagtttattcttcagaggaggcgttggttgaatggttcattttttgctagtgtatattccttttgtcatttttacagagtctggagcagtggtcacaatattggtagaaaactccttttgacggttgaatttttttaccttttcttaaatacattgatttcatggttttcattgagttcatttttcctagtctttagaattctcactgtttctattgcactggcataccattcagcatttaatgtgttgtccgtcatattcctgtggctttatgggatttgtaccttatcaacattcatactgtcactgggtaataagcctaaaagtactgagaaattttatgttctaacttgcgtcatttttgcggtgatgatgatttacatgatattctgcagtatattcatgagtgtcaaatcattccagaatatattgaaaaacgataccatcagttttgagggtttgattaccacagaagccttcagggatattgttatctctctgggctccacttactgtttgtacctaatcagttcaattatctatttgcagccatggcatatgttgacaagttttattcagtatattttattgagtccttcttacatcaatgttttgaatatctatgcattttgtaatgtccacgacttatcatggggtacaaagggtgcaatggcaaatccgctgggtaaaattaatactacagaagatggtacgttcaaaatggaagttctggtctctagttcagagattcaagcaaactacgataaatatttgaaagttttgaatgacttcgatccaaaatcagaatctcggcctactgagccatcttatgatgaaaaaaagactggctattatgcaaacgttagatctctcgtgattatcttttgggtcatcacaaatttcatcatcgttgctgttgtcttagaaaccggtgggattgcagattatattgctatgaaatccatatcaactgatgacactttagaaactgcaaagaaggcggaaattcccttaatgaccagtaaggcctcaatttattttaatgtaattttatggttagttgcattatcggcattaataaggtcattggttgctcaatatacatga

SEQ ID NO: 82549 - DNA, 306 bp, Saccharomyces pastorianus
caagtttttcctttttttgttctttttgttttacttttcagtttctcggtagcttttcctattttgctgtttaaagtaagtttaaatagtaccctcactaaacacgtacggccgatccacccatggaccaaagcacgatccttgacccatcattgtattcccaagccttggaacattcactttttttttttccggtctattgcacaagacaatatccagaatattgagttggataggaaatacgagacaggtggcacccacaaagcacacgccgaaatatttattaaatacaatatagtatactaa

SEQ ID NO: 82550 - DNA, 738 bp, Saccharomyces pastorianus
atgaacttccacacggcaagaatatctcaggtcggtgtcatttctagggctctactttcttctgtaagtagacgttggattcatgtaacgccaataagtcttaataattcaggaggatcactattcggaagcattacagaaaataaaccaaaggaaggaaaaaacaggggggatgaagatgcaggcagcttctctaataggttagcgattgcttctgattcttctggagaggctcctgaagttaatagggattcgataactatagaaaacgataaactactacagcaacatatcatatctttacagcaaccggaacaattagcatcacagagcttattatctcctttgaaaagggaaatatatgaagctaattgtaaaattaatggtgggttttacaagaaagatactattgtaaagttaccaaattctagcgaacgttacaagctaaagttaacaaaaagagaaattgaagtactagaaccttccgtatatgttcagtcatatagaattaaatcgtcgatgaaaaaggctacacttttgttaaggttattaggaggtctcgacgttatgaaagctatatctcagtgtcacttttctaataagaaaattgctcgcgaagtagcagaactacttcaaaaaggtgtaaaagatggccaaaaattaggtttgaaaccagaggacttatatatctctcagatttggacagggagtgacgggttttgggagaaaacgtgttga

SEQ ID NO: 82551 - DNA, 936 bp, Saccharomyces pastorianus
atgaactccaatagtaccatcggaaggaccacccttggagaatctgatacgatatccctgtcattcagtgaaccaagtagcagtctgaattcacgatcaacggatgttgtcttcgcatctacttcaactttagtaccccaacaaggaagtctgacctcattaccgcccgtgtctagtacagctactcctacatattattctacaagcttaacatatgatgagactttgcatacatccattgatgtatcttcgacaagtactttagtatcatctaccgacagcagttcatcgagcgagcaagatacgtatagttcccaatatgacccagctacctcctcatactcaataattacaccatccatgtccattttctcatcgacgtcaccaatgtcatcatcgtcgtcaataacgtcggaatggtcatcgttaacatcaacaacaccaacgttatcgccatcagctacatcgctgtcatcatcatggtcgtcgttatcatcaccatcttcgttactggtatcgtcctcgttgtcatcttcatcatattcagacactaaattgttttcgttcgacagcagatcttctattttctcaccatcaacacccaccgtaatatcccctagttacacatacttgtcttccatatctacaacttcatttcaaattagtaccacctcagaactctcttttagttggttctcaacaatttctccttctacaacatcaagtaaagataccacattcccaagttccagtcggaatacttccacatcgttttacagttcatcgctttcatcgacgaacgatttttcaaccataagcaaatcatcgaaactcagtccatcagcttcatcttcgacagtttccataagcacgatttctgtgccaacgtcaagttctgttagctcatccagcagtaaagtatcgggatcctctaga

SEQ ID NO: 82552 - DNA, 351 bp, Saccharomyces pastorianus
atgcaatcgagcctacctcaatttacgttcaaatggcccaaaggacccgaagcagttattctgacaggcacgttcgacgactggaaaggtactttgccgatggtgaaggaccccagtggcgccttcgaaataacgctgccagtaacgtttgatagccctagcagcaagttttatttcaagtttattgttgatggccaatggctgccaagcaaagactacaaggtgaacatcgacaagggagtggaaaacaactctattaccgaggaagacgtaataaagcaacgcgcaaatggctatagcacactggtacctgaaagtgccggattagctgtttcaaagtatgcccctctt

SEQ ID NO: 82553 - DNA, 336 bp, Saccharomyces pastorianus
  modified_base (13)..(13): a, c, g, t, unknown, or other
atgcccaggaatnacactttgggtggtgagaacaagttagacgctgaacttgtattagacagagtgtcttccggtaataaggatctagatatacaaccgcaaaccatagttgtaggaggtgacaatgaatacaaccatgagagcagccgtttagctgatcaaacaccccatgacgataattcagaaaattgtcccaatcgctctggaggaagcactcccttagattctcaaactaaaatttttatccctaaaaagaattctaaagaagatggtaccaaacttggtccttttaactggaaaaatgtgcagtttgtttcgaaaaccatcaccgtatga

SEQ ID NO: 82554 - DNA, 843 bp, Saccharomyces pastorianus
atgtcggcggctatcgaaaaagaaaccggaatgttggatgtaggaaagcactgtgcatattgtagacaactagacttcctacctttccattgttcgttttgcaatgaagatttctgcgcgaaccatagacttaaggaagatcaccactgtaggtggttgctagagcatgaagaagttcataaaactgaaaaaagtcctagcaaaagccgggatggctcaagttctaacgatgaagcatatttcaagagtctgttacctgagagggccagtgttagaatccagagagtaagtgaaacaagagagcctttgagaggttctaacactgccaaagtgagctctactttgaactcaaagacattagacaaaatatttaagttcttccaaaggaatgagaaaagaaagagcaataacaaatcaaaaaagaatttcggttcctcgtcgaataagataattcaattggctaatctcaagaaaattgctaaaggtgaccccaagattcctatgcaaaataggatttacatttggtgttacttggtggatggtgatgagacggatatagccaaggaggatacaagaatgccattatacattaacaaaatgtggcctgtgggtagggccatggactatttgtctatccagctaaacgtgaaatctagcacactaactaattcaagttctaatgacaaatttcaactatgcaaattgaaagagggtaaacaagtttcattttataatattggcgcttccttaagagtcactaatgagatcaaagatcttgatactctgtatttagtacacaataacgccgacgaaaaatctaatcaagaaggacactataaataa

SEQ ID NO: 82555 - DNA, 114 bp, Saccharomyces pastorianus
atgaaacagagcaaagttaccgcacagctcgaaaaagacgcagaacgtctcgacaacaaaatagagactttagaggacaagcaaagagacatgattcccgtcttgatgctctga

SEQ ID NO: 82556 - DNA, 228 bp, Saccharomyces pastorianus
atggaactgttaccacagggacaaaggaacaacactcaggtaacgttcgaagatcagcaaaagatcaacgagttttcgaagttgattatgcgtaaggacgccattgcgcaggaattgagtttacagagggaggagaaggagtacctcgatgatgtgtctctagaaattgaattgattgacgaagatgagcccgtgcaatacaaggtgggcgacctcttatcttcatga

SEQ ID NO: 82557 - DNA, 1827 bp, Saccharomyces pastorianus
atgaagcaggagcagtcccacgaaggcgactcatacagcacggaattcataaatctctttggcaaagataccgcaacacaccctagcagcaacaacggtgctaataataatggcatggggagcacgaactcgttggaccagtttgtggcaacagcctcatcgtcatcttctctggtgaccagcagcgagaataggcgccccctaataggtgacgttaccaataggggcaacactaacctatatgaccacgctgtcacgccagaaatactcttagaacagttggcctacgtggataacttcataccatctctggataacgagttctctaatgtggattggaatgtgaataccacccataataatgcaaacaataatggcgcggacactttcagcagcataaatgcaaatccttttgacttggatgaacaactagccattgagttgagtgcgtttgccgacgattctttcatcttcccagacgaggataagccgagcaataacaataacaacagcaataatggtaatgacgaccatagcaaccacgacgtattgcatgaggacccttctaccaataatagacaaagaaatcctcacttcttgactcaaagaaggaatactttcctaacttcccaatacgaccaatcaaagtctcgattttcgtccaaaaacaaaagaaatggcaataacggcgaaacaaacaactttggcgacaatatgcaaaataaccatccttttgagccaaactttatgggaagcccttctcagtttcccgctgacgcaactaatatgacatcaatcgaccatggcggcttcacaaatgttgacattacatcaactgagaacaatactaccggtgacaatggagtggatgcgctatcaaatctactacataggacaacacacacaccgaaccgctcctcccccctaagcaatgtcacttctgctcaaaattcctctttacaacaacgaaaacattcggaaagcaaagtcgatagtaacagcgataataacagctccaacaaagcccccaatataactgttcctgactattcaattataccaacctctgttttagtaactctattaccgagggtcaacgtgcccaacggcgcatataactcgttgaccagcgcgggatttgacaatgatcaaatagatgctatagccgcaataatggcgtatcatcatcaaaaaaagattagggaaaataacagtaataataataaaaacatcaacaccaatgacagtcaagaggcacccattctaaaaaacatcaacgaacttttaagtgtcttaataccaccctctccggctgaaactgctgcgccaactaccatatcaacgtcgccttcgttcaatgagcacggtgtagtagcagaggcttcttttctaagctccattttggaactgggcataaagcatccaaaaagtaataatattcacaatcaacgacaaccttcacgaaacgatcataaaatatcaagagagagtgacggtaacaatggaaacgataatgtccatcataataacgctgttattaagtcaagtacgacgcgtggagacgaaattgccaagatacgatccgagccaactttaaatgcaagttcttctgatcacaaggaaaatagtttaaaaagatcacactccggagatttgaaaaataaaaaagtacccgtcgaccgcaagtattctgataatgaagacgatgaatatgacgatgcagatttacacggctttgaaaagaagcaactgatcaagaaagagttaggggacgacgatgaagatttattgatacagtcgaaaaaatctcatcaaaaaaaaaactaa

SEQ ID NO: 82558 - DNA, 792 bp, Saccharomyces pastorianus
atgtcttctaaaagtgaaaaattagaaaaattgagaaagctgcaagccgctcgaaatggtgcatccatcgatgattacgaaggtgacgaatcagatggtgacagaatatacgacgaaatcgacgaaaaagaatacagggccagaaagcgccaggaattgctgcatgacgattttgttgtagatgacgatggtgtaggctacgtcgatcgtggtgtcgaagaagattggagggaagttgataacagttcaagtgatgaagacactggaaaccttgctagcaaggattctaaaaggaagaagaatataaaaagggagaaagaccaccagattacagatatgctgcgaactcaacattccaaatcaacactgctagcacatgcaaaaaaatcccaaaaaaaaagtatccccatcgataattttgatgacattcttggtgagtttgaatctggtgaagtagaaaaacccaatattttactgccatccaaaataagggaaaatttaaactcttcgccgactagtgaatttagatcgtcaataaagagagttaacggaaacgatgagtcaagtcatgatgccggtatttctaaaaaagtcaagattgatccagattcaagtactgataaatatttagaaatcgaatcatcaccgttaaaattacaaagcaggaaactgcgctacgcaaatgatgtacaggatttattggatgatgtggaaaattccccagtagtagccacaaagagacagaatgtacttcaagatacgttactagcaatccaccatccgctcaagttg

SEQ ID NO: 82559 - DNA, 1836 bp, Saccharomyces pastorianus
atggtgcacattactctgggtcaagcgatatgggtgtcagttaagccgataatcaagatttatttgattataggagtcggctttctgatggctaaaatgggaattcttacggttgaagcaacaagaattatttctgatatcgtgctaacagttttactgccctgtctgtcattcaacaagattgtcgctaatattgaagataaagacatcaaatctgtgggaattatctgtctgtctgccctcctaatatttggttgtgggttcttttttgcatacgttgttaggctattcctgcctgttcctaaacaatggtacggtggtattcttgccggtggtatgtttccaaatataagtgatttaccaattgcatatttacaatctatggaccaagggcttgtattttcggaagaagaaggtaacaaaggtgtggctaacgtcattatatttctgacaatgtttctaatttgcattttcaatttgggggggtttcgactgattgaaagcgatttcgagtacaacgacgatgaaagcgccgttagggtttcagaaacgacaaagacacagcccgcagtaagtgcaaacacaactaatacagatactagcgagcgtttcttctcaaacgaacaacagcttttcaacaataagtacaccgctcgcgatagtctcactgaagctataggtacaaagggtgaaaacgcagacgtaccaccaatttcaaggagatcaacaaatagtatagctcccctgtcactaccagacacttcttcgaattcaaagattacaaaaccagttcaggcaaaggcaagaaatactattgcgtgcattcaaagcgaagagtcacaggcaactcgtggctcaaatccattagatagccaatcatctgcttcaacaatacattcttataatacgtcagagagttatgagagtagcatagatactatgagagcacgtagaaccgcgagccagccgagagcttacaatactaccacactcctagaagagaactgtttagatgaaaaatgcccaaaaaatatgtctatggcggcattggaacctatccgctccattgatatgcgtgcattaccttctcaaaatatacaccatcttatcagagagtactccaatgttgaccagtatggtcatcaaaggaggaattccagtttacgcggcgctgatatgaatgatgtgcattcaattagctcaaattccactttacagactataaaaactgctaacctaaccaggatcttaacatcagatgccactgtaagtaaaaaggatattgaaacatccggcgaatcattaccacagtggatgagaaaattttcattaactccattacttgtgtttttcctaaagaattgtttgagaccgtgctctatggccgtgatcatcgccctaactgttgcatttatcccatgggtcaaggctttgttcgtgactaccgctaatactcctcacataagccaagctcctgacaatgcaccaccattaagctttttcatggattttacaggttatgtcggtgccgcatgtgttccatttgggttgatattattaggagcaactttaggaagattaaagattggcaacctttatcctggattttggaaagccgctgtgacactcgtcattttgagacaatgtgtcatgccaatttttggtgtcctatggtgtgatcggttagtgaaagctggatgggttaattggcaagatgatagaatgctactatttgttatagcaatcagctggaacttgccaacgatgactacccttatatattttcccgccagtattacgccgacagaaacaactgcgccaatccaaatggagtgt

SEQ ID NO: 82560 - DNA, 1479 bp, Saccharomyces pastorianus
  modified_base (1412)..(1413): a, c, g, t, unknown, or other
atgaatagtcaaggttacgatgaaagctcttcctctacggctgctactagcggtcctacttctggagacccacgaatgggtaagaaacaacggtttatgaatctcataagaaccacaaaggatgtttatattcctaacctgacgtcatccatttctcaaaagacaatggatggcatcaggagcactacgaattccttcgaaggttataatgacttgcctatggaattgccacataataccacgataacatattttccaacgtataccacaactaatttggttgaccctgacggtttgagtgcgcctcggaaagattttgaaactactgtcagatgtgctgtttcttatccaggaaatcctacaagcaggagaaataggtggttgctttctctttgtaaacaatatcttagaactggaacggcggaggccgatgttgcacctgttgttccccctcatctcgaagaggattctggagatttaaacgactcccaatcaagtatagaaagttctttgtcttcaaagagcgaaaataggtattcacatatgggcatccaagaggaagatgttctgaatgagagaattcaaggattcctgtccaaaaaagttcctaatactccagtggtggttgacctattgcccaaagataagctcagaggggatacggcttccttttttggtaccacggactcttatggtaatttactaatcaaggcagaaacagattttttaccgtccaagattaatattacattagatacccctatagaaggccatgcagatccaatatctgaaacatttccggccaattatgtctcgccctacggtattggtttaatcagtgatattgacgacaccatcaagcatactggcgttacgggtgacaggagatcgatgtttcgtaatgttttcatccatgatgttcaatcgtgggtaatagatggtgttcctctttggtacaaaactttacatgatgtcgcagacgttgatttcttttatgtttctaattcacccatccaaacttttactcttttgaaacaatatatttgcgccaattttcctccgggtccaatttttttgaaacaatactctggtaatttcttttccactatcatgacttcaagtgcgaatagaaaaattcagccgattgcaaatatcttaaaggattttcccaaaaaaaaatttattttggtcggtgattctggtgaacatgacttagaagcgtataccactacggctttacaatttccgaaccagattctggctatttatataagatgttgctctaattccatgagtgatgtcccatcgcatgatgaagaagttatgaatgaagtgaacaatatcatcgaattacaacaacgggccatgcaaatgaccaagtctaccgtacataccaggagaaagaccacacnnactccattccttcactcaaaagcatcgttgacaaagagcaaacgaagtatagatgtccgcctataa

SEQ ID NO: 82561 - DNA, 1518 bp, Saccharomyces pastorianus
atgttgagagtgtttatcaataaggctgaaaacttgagaaatccagatagcttaggaaagataagtccatacgccaaagtatccgtcaatggtgtggcaagaggtaggacaaatgaaagaatgaagacattgaatcctatctggaaccaatcaatttatgtgtctgtcacatctcccttacaaaaagtctcaattgactgtttcggtatagatacaaatggcgatgatcataatctcgggagccttaatattcaaactcagaatatatatcataaagacaatgacgataaatataccatttttattgacaacgctccaagaactggcaacttaattggaaagaagggtgtaaaggggaccgttacgtattatttatcattttatccagttgttcctgttttaagcttggaagaggcgaaggaagttgacgagattaatgagaaaaaagataagctagaaaagcagaaaagtacactggatgacaaaaacatctcaaaggaggagaaagaaagaattaaaaaggaagagttcaggctcaccgaaaaatatgacatgtatagttacaaaatgaagcttgacctcgatgaattgctgcaatacaatgctggtgtactaggtgttactgtattaggcggggaactacctcagcctgggctctatgttcaaacattttttgattcctgtggttacgcagcgataactagtgcaaaaaatgctattaggaccattaaaacaggctggtcgggcgatttcatgataaaagagctggaatggtccgtgactacatttagggtaacaaagactaaagacgcgaataaggcggaaatttttatttgcgaagtcaacattccaacaattgaattggtgaggaactgttattacaaaccttccgtattaaatctaatagggaaaaagagtgccaaactattagttcaagtgtcatggttccccgtaactgccacggaattgcctcaatcagacttgataactaactctggtgatttgaaaatcaccgctaaaagtgctgaaaatctaattggtgttaataagaatggttattccgatccatatgtcgaattctttttgaatgaaaagagcacatcacccttctttaaaaccgcagttcaaaaaaagacactaaatcctacctggaacgaaagcaaaactatcgaagtttcaaatcgtgtcaatgactacttgacaattaacgtgaaagactacgaatccactaactccaataggagtattggaaaagccgttgttccattatctactattgatccagagagcgataccacctttaatataccgttagtgggaccaaagggagaagatggcggtgtgctacatcttgaatttgagtttgaaccccgctatactaccaatgtagtcaaacgtgaagccgggcttggaaattttgccacgaaaggattaggtacaggcatcaaagctggttctacagttttcgccttaggaaccaatgttgtaagcaccggattaggaacaatgataaagtaa

SEQ ID NO: 82562 - DNA, 1563 bp, Saccharomyces pastorianus
atgtctccaaactcgtcgaaaactcgaacggagcaggtaagctccatgcctggtattaatgaagccacgaaggtggaaagtaagaatgttgtgaaggatgctgttccaataaaatctgaagttgaaaccaatggtacatcaatagtaagagaaaaacaagacccctcgtacgttggttggaaacaagttggtggttgggaggaaaaggacgagttaacttccgaagaccttttagtggacgtaaacaaggacactttcttggggaaccttttaccagataaattctatggtgattggtatcatgaagtcgctattctcatcatcgctggtttatgttcctttgtgctgggctattttaaatcctctctcgcgtccgtccttatcgtgatgctaaccacaggaatgttatatagaacttcgtccaaaaaatatagggaatcgttaagggatttagcccagaaagaacaaactgtagagaaaattactagtgattatgaatctgtcgaatggttaaacacctttttagataaatactggcccattatcgaaccttctctctcccaacaaattgtcgatggtacaaatactgcattatctgaaaatgtggcaattccaaagtttataaaagccatctggctggatcaatttacgttaggtgtgaagcctccaagaattgatgccataaagacattccaaaatacaaaatctgatgtcgtagtcatggacgtatgtctatcattcactccacacgacatgtctgatcttgatgcaaaacaatgcaggaattacgtaaattccaatgtcgtattaaaggcaaagatattcggaatggacatacctgtttcagttgctgatattttttttcaagtttttgttagatttcgtttccaattgatgacgactttgcctcttgttgaaactataaatattcagttattggaagttcctgaagttgattttattagtcgtttattgggtaactccgtctttaattgggaaatcctggctattccaggcttaatgagattgattcaaaaaatggcatttaaatacttgagccctgttttactcccacctttctctttgcaacttaatataccacaacttctttccaagactggcttacctataggtgttttggaattcaaagtcaaaaatgcccatggattaagaaaacttgtgggcatgatcaagaaaacagttgacccatacttgacatttgagctctctggtaaaatagtcggtaaaactaaggtttttaaaaattctgctaatcctgtttggaatgaatccatttacattctgttgcaatcttttactgatccacttacaatagccgtatatgacaaacgcgaaaccttaagtgacaaaaaaatgggtacagtaattttcaacttgaataagttacatgcaaatcactatcacaaaaatgaaaaggtacatttcctaagaaattctaaacctgtcggtgagttgacatttgatttgcgattttcccccactattgaaccaaaaaaattactgaacggagatgaggagcctttaccggatatgaatacaggt

SEQ ID NO: 82563 - DNA, 981 bp, Saccharomyces pastorianus
atgttccaccacatcgaaaacttgttaattgagacagaaaaaaggtgtaagcaaaaggagcagaggtatatccctgtaaaatatttatttaccatgacacaaattcatcagataaacgatatagatgttcatcgaattacatctggacaagttatcaccgacttaacaactgcagtgaaagaactcgttgataatagtatagatgcgaacgcaaaccagatcgaaataatctttaaagattatggtcttgaatctatcgaatgttctgataatggtgatggcatagacccttcaaattatgagtttttagctttaaaacattacacatcaaaaattgcgaaatttcaagacgttgctaaagtacagacgttagggtttagaggggaggccctatcttctttatgtggcatagctaaactaagtgtcataacaacaacttcaccaccaaaagcggataagttggagtatgatatggtcggtcacattacttcaaagacaacgacatcaagaaataaagggacgaccgtgttagtttcgcagttatttcataacttgcctgttagacagaaagaatttagcaaaacttttaagcgccagtttaccaaatgtctcacagttatacaaggttatgcaatcataaatgctgccatcaaattttcagtttggaatatcacaccaaagggtaaaaaaaatctaattctatcaacaatgagaaattcaagtatgagaaagaatatatcctcagtattcggtgcaggtggtatgcgtgggcttgaagaggttgatatagtgcttgatttgaaccccttcaagaatagaatgcttgggatatacaccgatgatcctgatttcttagacctcgattataaaattcgagtgaagggctatatatcacagaattcgtttggttgtggtagaaatagtaaggataggcaattcatttatgtgaataaaaggccagtggatactctacgcttttaa

SEQ ID NO: 82564 - DNA, 663 bp, Saccharomyces pastorianus
atggacaaaatcagagaaaagctaagcaacttgaagttggaagccgaatcatggcaggagaagtacgaggagttgaaagagaagaacaaggacttggagcaagagaacgtcgaaaaggagaatcagatcaagtctttaaccgtcaaaaaccagcaattggaggatgagatcgagaagctggaagcgggactttctgactctaagcaaacagaacaggataacgttgaaaaagaaaatcagatcaagtccttgacggtgaagaaccaccaattggaggaagagatcgagaagttggaagcagaattggctgaatccaagcaattgtccgaggactctcaccacttgcagtccaacaacgacaatttctccaagaagaaccagcaattggaagaagacttggaggaaagcgacaccaagctaaaggaaaccactgagaaattgagagagtccgacttgaaggcagatcaattggaaagaagagtagctgccttggaagaacaaagagaagaatgggatagaaagaacgaggaattgaccgtcaagtacgaagacgcaaagaaggaactggacgaaattgctgcatctctggaaaactgtgatctactttgtttttgttttctttttcttttccccaacacgctggtctttgttccttgttcttga

SEQ ID NO: 82565 - DNA, 93 bp, Saccharomyces pastorianus
atgcggaatcattggcattttttttctttatttactaatttacctagaaaatccaaatggcacagggcgagcgaatttttttccctcttttaa

SEQ ID NO: 82566 - DNA, 93 bp, Saccharomyces pastorianus
atgtgtaaactcatgtggtgcactggtgttgtttccaagactgcactattaactgggaatttttttttttcttctagtgaattttttttttaa

SEQ ID NO: 82567 - DNA, 537 bp, Saccharomyces pastorianus
atgtggacgttaatgctttcctctatttcatccggtttatcagtggcgccatacaactatcatttggtcattattggtgtgtgttatctacccggtggtattggcggtttaatgggttccttcttcacaggtagaattattgacatgtatttcaagagaaagatcaagaaattcgagcaagacaaagctaacgggttgattccacaagacgcagagattaatatgttcaaagtccgtttagtttgtcttctgccccaaaatttcttggccgtcgtagcctatcttttatttggttggagtatagataagggctggaggatcgaatctattttaattacttcatttgtctgttcatactgtgctatgagtacattatcaacatcaactacgttattggtcgatttgtacccaacgaaatcatctacagcaagtagttgtttcaactttgttaggtgcagtttgagtaccatcttcatgggttgctttgccaaaatgaaagctgcgatgactgtaggtggtacttttacatttttatga

SEQ ID NO: 82568 - DNA, 918 bp, Saccharomyces pastorianus
atgtcacgaagtaacagtatatacacagaagatattgagatgtatcctactcacaatgagcagcatctgacgagagaatacacaaaaccagatggtcaaacgaaaagtgaaaaactaaatttcgaaggcgcttatatcaacagtcacgggactctatccaagaccaccacaagggaaatagaaggcgatttagactctgagacttcttctcactccagtgatgataaagttgatccaacccaacagataactgcagagacaaaagcgccatatactttactaagttacggtcagaagtggggaatggttgcaattctaacaatgtgtggcttttggtcttcattgggatcaccgatctattatcccgctttgaggcagttggaaaagcaattcaatgtggatgaaaatatggttaacgttactgtggttgtgtatctgttgtttcaaggtatatctcccacagttagcggtggtctggcggattgctttggacggagacctataattttagcaggtatgctgatatacgttattgcatccatcgggctagcatgtgctccatcatacggtgttattatcttcttgaggtgtattcagagtattggtatttcccccacaattgcaatcagttctggtgttgtcggggacttcactttgaagcatgaaagaggtacatttgttggcgccacctcagggtttgttttactgggtcaatgttttggtagtcttattggtgccgtcctgactgcaaggtgggattggagagctatcttttggtttttgaccattggttgtggaagttgttttctaattgcctttcttattttgccagaaacaaagcgaaccattgcaggtaacctttccattaagcctaaaagattcatcaacagagcgccgattttctactgggcccagtag

SEQ ID NO: 82569 - DNA, 588 bp, Saccharomyces pastorianus
atgcctcgaatatctacatcattgataagaaaagcttcgagaatacgacctggtttgcatcttttgcttccagaatgtaggactctcgagcaagcgaaactcgagtacaaatggctcaccgaagagctgcctccggataaatcaatccgctgggcttgcttacagagatacaaacacgtcccattacagtacatcttaagatcgcaaccgtttggggccttggacatagtttgcaagcctggtgttcttataccaagatgggaaaccgaggaatgggtgatggccataataagagctctaaacaactctatgctttcaaggcatactataccactgcatatttgtgatacgtttacaggaacagggtgtattgctctcgctttgagtcatggtatagcaaattgcacgttcactgccattgacgtgtcaacaagagcaattaagttggttaaagaaaatatgctgaaaaacaaggtgagtggtggtaagctcgtgcaacataatatattgtcctcaaaagctagcgatgaatatccatcccatatagatatattaaccggtaacccccccctacattcgaaagcgtga

SEQ ID NO: 82570 - DNA, 162 bp, Saccharomyces pastorianus
atgacagaagaagatagaaagctcactgtagagacagaaacagttgaggcacctgtggcaaataatcttttattgtcgaataacagtaatgtagtagcacctaatccttctattccctctgcctccacatctacctcttccgctacacagggaaatagttga

SEQ ID NO: 82571 - DNA, 264 bp, Saccharomyces pastorianus
atgttcttgcttccatttgtcattcgtcattccagctctatttacctgcccacacttcgatttcgaggtttacttactgtaatctcaagaaacatacacatttccacccctcataaaatgttgcctctttcaattgagcagagaagaccttcccgctcccccgaatacgatcagtctactttgtcaaattataaggacttcgcagttcttcacaccgatttaaacctgtctgttttcttcgaaaagtcagccatttcagggagc

SEQ ID NO: 82572 - DNA, 633 bp, Saccharomyces pastorianus
atgtcattcagcaacggaaatatggcttcctacatgactagtagtaatggagaggagcaaagtataaacaacaaaaacgatatagacgataacagcgcttacagacgtaataatttcaggaatagtagcaattcaggatcacatacgttccaattatcggacttggacttagatgtggatatgaggatggattccgccaattcatcggagaaaatatcaaagaacctttcctctggcatcccggactcatttgattctaacgtgaacagcttgctgtctccgtcaagcggttcttattctgcagatttgaattaccaaagtctatacaaaccagatcttccacagcaacagttacaacagcaacagttacaacagcaacagcaacagcaacagcaacagcaacaacaacagcaacagcagaagcaaacaccaactttaaaagtcgaacaatctgatacatttcagtgggacgatatcttaacacctgctgataatcaacatcggccatccctcacaaaccagtttttatctccaagatctaattacgatggtaccactaggagctcgggcattgactccaattatagcgataccgaatcaaactatcaacgcttatttgtatcccaggactag

SEQ ID NO: 82573 - DNA, 246 bp, Saccharomyces pastorianus
atgaactcatcatctggtgttgataatgagatttccttagacagcccgatgccaattttcaatgagagtcctactttaaagccaattagggttgcgggtgtagtaacaacagggacagatcatatcgaccctagcgtactacaggcatacttagatgatactattatgaaatccattactttggggcagctagtgaaaaatgcggatgtgtcaaatacgagattgtgccaccccacattgccttga

SEQ ID NO: 82574 - DNA, 546 bp, Saccharomyces pastorianus
atgaatttctacagggatgcaacatgggtgctagaagatattgagaaggaggctgcaaaagaaaggatttccggctctatgcagacgctggtactgaaaagctgtaaaagatataagctgaaaagtaatccaaaacatatttatgcagttctcgattcgtgttggaaatataaaccatatttggagaaagtgatgaaaaaggcacacatattggaagatatacccaagaaaaagggcaaaccactcttttcaaggctaactttgttattgctttgccatgatttgctgttgtctaagcagaaaagaattcaaatgggcaaacaccccatcaaagattatgttttgaagtttaagagcccattgcatagcgaaatggtcaaattgaaactcaaattgaaagtaagagagctatctgagttggtattaagcgaggatatttccaatgaccttcctcctgttagatggattagaatcaatccattaaaatgccatccaaatggtgagactgagccggtgttagccgaattgaggaagagtttactttaa

SEQ ID NO: 82575 - DNA, 99 bp, Saccharomyces pastorianus
atgctaacaagcctcttcgttcacctcccttgtaacggcagtgggaagggtaagcaaaataaatcacattgccaatgcaaaaaaaagaatggtctctag

SEQ ID NO: 82576 - DNA, 201 bp, Saccharomyces pastorianus
  modified_base (182)..(182): a, c, g, t, unknown, or other
atgtcagattcacaacaatcaatcaccgttctagaagagcttttccgaaagttggaaactgctacttcggaaacaagagagggtatttcttcggagctttcctcatttttaaacgggaatatcatcgagcatgacgttcccgaagttttctttgatgaatttcaaaaagctatccagagtanacaaaaggcgctcaacacg

SEQ ID NO: 82577 - DNA, 114 bp, Saccharomyces pastorianus
atgcaaaaactcctctttgtcttttctgtgttattgacagtagtactagcaacagcaccatttcaggtacaatgtcctagctctccacttattagggaggccaaagtaagttaa

SEQ ID NO: 82578 - DNA, 1041 bp, Saccharomyces pastorianus
atgagtgatgatcatggttatgaaagagacaaccatttgtcccggaggtcaggtaattataacggtaggcgtaagttcgcagatacgtacagaggaagcagagatagaggagaatatagaggaggtagagaaaggtctgattacagagaaagagaaaggttcaataacagagataatcctagatctagagaccgttacgatgataggcgcagaggaagagatgtgactggtcgttatgggaacagacgtgatgactatcctagaagctttaggagtagacacaatacacgtgatgacagtaggagaggcggttttggtagtagtggagcaagaggtgattacggtcctttgttggcacgtgaattggatagtacatacgaagaaaaggtcaatagaaactattccaatagtatattcgtgggtaatttaacatatgacagcacccccgaagatctcactgagtttttttcacagataggaaaagtagtccgcgcggatataattacatcaagagggcaccacagaggtatgggtacagtagagttcactaattcggatgatgttgacagggccatccgccagtacgatggggccttcttcatggatcgtaaaatcttcgtcaggcaagataatccaccaccgtcaaacaatatcaaggaaaggaaagcactcgatagaggagagcttagacataaccgaaaaacacatgaagttattgtaaaaaatttacctgcttccgttaattggcaggctttgaaagacatattcaaggaatgtgggaatgtcgcacacgctgatgtggaattggatggcgatggagtatccactggatctggtacggtgtccttttatgatattaaagatctgcatagagcgattgagaaatacaacggttatagtatagagggtaacgtcttggatgtcaagtctaaggaaagcgtacataaccacagtgatggagacgatgttgatatcccaatggatgattctcccgttaacgaagaagctcgaaaatttaccgaaaacgttgtcggtggaggt

SEQ ID NO: 82579 - DNA, 273 bp, Saccharomyces pastorianus
atgttctttatagcccactgctccacgggctacttacagggcattaatgaagttttgaaaaatccactatatgcttcaaagctgcaagatactaaatactccaaagaaatcatggtgatggatgaatttttgttgcatttaaacaaggatgatgataaagcttggtatggtgaaaaagaggtagttaaagcggctgagtatggcgcaattagttatttactgttaacagataaagttttgcattcagactatattgcactaagagaggaatag

SEQ ID NO: 82580 - DNA, 552 bp, Saccharomyces pastorianus
atgaaggatgaatatttgaaatataaaggtgttactgctacagatgaaagtggagctagtaatgttgacatacctgtcggcaaatatttgagctttacccttgactacgtgtatccctttactatcataaaacaaaactttaataaattcatgcaaaagctcttaaatgaagcctgtaatatcgagtataaatcagacaccgcggcggtcgttttacaggaagggatcgcccatgtttgtttagtgacatcctcctctactattttaaaacaaaaaattgaatatagtatgccaaaaaagaaaaggactactgatgtactgaagtttgatgaaaaaactgagaaattttataaagcaatttacagtgcaatgaagaaagatttgaattttgataaattaaagactattattctttgctctccaggtttctacgctaagatattaatggacaaaattttccagtatgccgaagaggaacacataagaaaatactcgataacaaggaatgttctttatagcccactgctccacgggctacttacagggcattaa

SEQ ID NO: 82581 - DNA, 330 bp, Saccharomyces pastorianus
  modified_base (237)..(295): a, c, g, t, unknown, or other
atgtgtgactcgctgcaccaaataaggaaggatccaaacaatctctcaaatcaattggaaaccttaacaggttcgattagacatcgtttgaaactttgtaaatctttgatatcggaaaacgaagataccaaggatttattaagtaaaagtccatcagaatggcaggatatcatccatcaacgtgaacaagaactgcaaattaagagagacgtcttggatgatctttatcgcaagttnnnnnnnnnnnnnnnnnnnnnnnnnnnnnnnnnnnnnnnnnnnnnnnnnnnnnnnnnnnacatacgcataccacatcttcaaacgtgcatataa

SEQ ID NO: 82582 - DNA, 534 bp, Saccharomyces pastorianus
  modified_base (449)..(449): a, c, g, t, unknown, or other
  modified_base (452)..(491): a, c, g, t, unknown, or other
atgaatctacagaacaacgttttaaatcagatacaccagattctgctgcctacgaatcctactctcgataaacctaatgctgaggctacaaaggaagaattttcgtctgcagaaaatagagatgaaaaagactatcttaccaaccagcagccgaaaaatctgagtactccctccaccagttccaacggtgaatttataccgcatattttttactcgctgcaccaaataaggaaggatccaaacaatctctcaaatcaattggaaaccttaacaggttcgattagacatcgtttgaaactttgtaaatctttgatatcggaaaacgaagataccaaggatttattaagtaaaagtccatcagaatggcaggatatcatccatcaacgtgaacaagaactgcaaattaagagagacgtcttggatgatctttatcgcaagttacaacgatnaannnnnnnnnnnnnnnnnnnnnnnnnnnnnnnnnnnnnnnnatatatatacatacgcataccacatcttcaaacgtgcatataa

SEQ ID NO: 82583 - DNA, 216 bp, Saccharomyces pastorianus
atgtcccatcgtatagcaccttccaaagaacgatcttcatcatttatttcaattttagacgatgaaacaagagacacattgaaagctaatgcagtcatggatggtgaagtagatgtcaaaaaaaccaaaggaaaaagctctcggtatatcccaacatggacaattccatatatactaggtatacgtggtgctccggttccggcaagacaagcttga

SEQ ID NO: 82584 - DNA, 6714 bp, Saccharomyces pastorianus
atgagcgaagaaagcttattcgagtcgtctccacagaagatggagtacgaaattacaaactactcagaaagacatacagaacttccaggtcatttcattggccttaatacagtagataaactagaggagtccccgttaagggattttgttaagagtcacggtggtcacacggtcatatccaagatcctgatagcaaataatggtattgccgccgtgaaagaaattagatccgtcagaaaatgggcatacgagacgttcggcgatgacagaaccgtccaattcgtcgccatggccaccccagaagatctggaggccaacgcagaatatatccgtatggccgatcaatacattgaagtgccaggtggtactaataataacaactacgctaacgtagacttgatcgtagacatcgccgaaagagcagacgtagacgccgtatgggctggctggggtcacgcctccgagaatccactattgcctgaaaaattgtcccagtctaagaggaaagtcatctttattgggcctccaggtaacgccatgaggtctttaggtgataaaatctcctctaccattgtcgctcaaagtgctaaagtcccatgtattccatggtctggtaccggtgttgacaccgttcacgtggacgagaaaaccggtctggtctctgtcgacgatgacatctatcaaaagggttgttgtacctctcctgaagatggtttacaaaaggccaagcgtattggttttcctgtcatgattaaggcatccgaaggtggtggtggtaaaggtatcagacaagttgaacgtgaagaagatttcatcgctttataccaccaggcagccaacgaaattccaggctcccccattttcattatgaagttggccggtagagcgcgtcacttggaagttcaactgctagcagatcagtacggtacaaatatttccttgttcggtagagactgttccgttcagagacgtcatcaaaaaattatcgaagaagcaccagttacaattgccaaggctgaaacatttcacgagatggaaaaggctgccgtcagactggggaaactagtcggttatgtctctgccggtaccgtggagtatctatattctcatgatgatggaaaattctactttttagaattgaacccaagattacaagtcgagcatccaacaacggaaatggtctccggtgttaacttacctgcagctcaattacaaatcgctatgggtatccctatgcatagaataagtgacattagaactttatatggtatgaatcctcattctgcctcagaaatcgatttcgaattcaaaactcaagatgccaccaagaaacaaagaagacctattccaaagggtcattgtaccgcttgtcgtatcacatcagaagatccaaacgatggattcaagccatcgggtggtactttgcatgaactaaacttccgttcttcctctaatgtttggggttacttctccgtgggtaacaatggtaatattcactccttttcggactctcagttcggccatatttttgcttttggtgaaaatagacaagcttccaggaaacacatggttgttgccctgaaggaattgtccattaggggtgatttcagaactactgtggaatacttgatcaaacttttggaaactgaagatttcgaggataacactattaccaccggttggttggacgatttgattactcataaaatgaccgctgaaaagcctgatccgactcttgccgtcatttgcggtgccgctacaaaggctttcttagcatctgaagaagcccgccacaagtatatcgaatccttacaaaagggacaagttctatctaaagacctactgcaaactatgttccctgtagattttatccatgagggtaaaagatacaagttcaccgtagctaaatccggtaatgaccgttacacattatttatcaatggttctaaatgtgatatcatactgcgtcaactatctgatggtggtcttttgattgccataggcggtaaatcgcataccatctattggaaagaagaagttgctgctacaagattatccgttgactctatgactactttgttggaagttgaaaacgatccaacccagttgcgtactccatcccctggtaaattggttaaattcttggtggaaaatggtgaacacattatcaagggccaatcatatgcagaaattgaagttatgaaaatgcaaatgcctttggtttctcaagaaaatggtatcgtccagttattaaagcaacctggttctaccattgttgcaggtgatatcatggctattatgactcttgacgatccatccaaggtcaagcacgctctaccatttgaaggtatgctgccagattttggttctccagttatcgaaggaaccaaacctgcctataaattcaagtcattagtgtctactttggaaaacattttgaagggttatgacaaccaagttattatgaacgcttccttgcaacaattgatagaggttttgagaaatccaaaactgccttactcagaatggaaactacacatctctgctttacattcaagattgcctgctaagctagatgaacaaatggaagagttagttgcacgttctttgagacgtggtgctgttttcccagctagacaattaagtaaattgattgatatggccgtgaagaatcctgaatacaaccccgacaaattgctgggcgccgtcgtggaaccattggcggatattgctcataagtactctaacgggttagaagcccatgaacattctatatttgtccatttcttggaagaatattacgaagttgaaaagttattcaatggtccaaatgttcgtgaggaaaatatcattctgaaattgcgtgatgaaaaccctaaagatctagataaagttgtgctaactgttttgtctcattcgaaagtttcagctaagaataacctgatcctagctatcttgaaacattatcaaccattgtgcaagttatcttctaaagtttctgccattttctctactcctctacaacatattgttgaactagaatctaaggctaccgctaaggtcgctctacaagcaagagaaattttgattcaaggcgctttaccttcggtcaaggaaagaactgaacaaattgaacatatcttaaaatcctctgttgtgaaggttgcctatggctcatccaatccaaagcgctctgaaccagatttgaatatcttgaaggacttgatcgattctaattacgttgtgttcgatgttttacttcaattcctaacccatcaagacccagttgtgactgctgcagctgctcaagtctatattcgtcgtgcttatcgtgcttacaccataggagatattagagttcacgaaggtgtcacagttccaattgttgaatggaaattccaactaccttcagctgcgttctccacctttccaactgttaaatctaaaatgggtatgaacagggctgtttctgtttcagatttgtcatatgttgcaaacagtcagtcatctccgttaagagaaggtattttgatggctgtggatcatttagatgatgttgatgaaattttgtcacaaagtttggaagttattcctcgtcaccaatcttcttctaacggacctgctcctgatcgttcaggtagctccgcatcgttgagtaatgttgctaatgtttgtgttgcttctatagaaggtttcgaatctgaagaggaaattttggtaaggttgagagaaattttggatttgaataagcaggaattaatcaacgctgctatccgtcgtatcacatttatgttcggttttaaagatgggtcttatccaaagtattacacttttaacggtccaaattataacgaaaatgaaacaattcgtcacattgagccggctttggccttccaactggaattaggaagattgtccaacttcaacattaaaccaattttcactgataatagaaacatccatgtctacgaagctgttagtaagacttctccattggataagagattctttacaagaggtattattagaacgggtcatatccgtgatgacatttctattcaagaatatctgacttctgaagctaacagattgatgagtgatatattggataatttagaagtcaccgacacttcaaattctgatttgaatcatatcttcatcaacttcattgctgtgtttgatatctctccagaagatgtcgaagccgccttcggtggtttcttagaaagatttggtaagaggttgttgagattgcgtgtttcttctgccgaaattagaatcatcatcaaagatcctcaaacaggtgccccagtaccattgcgtgccttgatcaataacgtttctggttatgttatcaaaacagaaatgtacaccgaagtcaagaacgcaaaaggtgaatgggtatttaagtctttgggtaaacctggatccatgcatttaagacctattgctactccttaccctgttaaggaatggttgcaaccaaaacgttataaggcacacttgatgggtaccacatatgtctatgacttcccagaattattccgccaagcatcgtcatcccaatggaaaaatttctctgcagatgttaagttaacagatgatttctttatttccaacgagttgattgaagatgaaaacggcgaattaactgaggtggaaagagaacctggtgccaacgctattggtatggttgcctttaagattactgtaaagactcctgaatatccaagaggccgtcaatttgttgttgttgctaacgatatcacattcaagatcggttcctttggtccacaagaagacgaattcttcaataaggttactgaatatgctagaaagcgtggtatcccaagaatttacttggctgcaaactcaggtgccagaattggtatggctgaagagattgttccactatttcaagttgcatggaatgatgctgccaatccggacaagggcttccaatacttatacttaacaagtgaaggtatggaaactttaaagaaatttgacaaagaaaattctgttctcactgaacgtactgttataaacggtgaagaaagatttgtcatcaagacaattattggttctgaagatgggttaggtgtcgaatgtctacgtggatctggtttaattgctggtgcaacgtcaagggcttaccacgatatcttcactatcaccttagtcacttgtagatccgtcggtatcggtgcttatttggttcgtttgggtcaaagagctattcaggtcgaaggccagccaattattttaactggtgctcctgcaatcaacaaaatgctgggtagagaagtttatacttctaacttacaattgggtggtactcaaatcatgtataacaacggtgtttcacatttgactgctgttgacgatttagctggtgtagagaagattgttgaatggatgtcttatgttccagccaagcgtaatatgccagttcctatcttggaaactaaagacacatgggatagaccagttgatttcactccaactaatgatgaaacttacgatgtaagatggatgattgaaggtcgtgagactgaaagtggatttgaatatggtttgtttgataaagggtctttctttgaaactttgtcaggatgggccaaaggtgttgtcgttggtagagcccgtcttggtggtattccactgggtgttattggtgttgaaacaagaactgtcgagaacttgattcctgctgatccagctaatccaaatagtgctgaaacattaattcaagaacctggtcaagtttggcatccaaactccgccttcaagactgctcaagctatcaatgactttaacaacggtgaacaattgccaatgatgattttggccaactggagaggtttctctggtggtcaacgtgatatgttcaacgaagtcttgaagtatggttcgtttattgttgacgcattggtggattacaaacaaccaattattatctatatcccacctaccggtgaactaagaggtggttcatgggttgttgtcgatccaactatcaacgctgaccaaatggaaatgtatgccgacgtcaacgctagagctggtgttttggaaccacaaggtatggttggtatcaagttccgtagagaaaaattgctggacaccatgaacagattggatgacaagtacagagaattgagatctcaattagccaacaagagtttggctccagaagtacatcagcaaatatccaagcaattagctgatcgtgagagagaactattgccaatttacggacaaatcagtcttcaatttgctgatttgcacgataggtcttcacgtatggtggccaagggtgttatttctaaggaactggaatggaccgaggcacgtcgtttcttcttctggagattgagaagaagattgaacgaagaatatttgattaaaaggttgagccatcaggtaggcgaagcatcaagattagaaaagatcgcaagaattagatcgtggtaccctgcttcagtggaccatgaagatgataggcaagtcgcaacatggattgaagaaaactacaaaactttggacgataaactaaagggtttgaaattagagtcattcgctcaagacttagctaaaaagatcagaagcgaccatgacaagctattgatggattatctgaagttatcaagatgttatctaccgatgataaagaaaattgttgaagactttgaaatgagccttgtaaagtaa

SEQ ID NO: 82585 - DNA, 690 bp, Saccharomyces pastorianus
atggacaagaagaaggatctactggagaacgaacaatttctccgcatccaaaagctcaacgctgccgatgcgggcaaaagacaatctataacagtggacgacgagggcgaactatatgggttagacacctccggcaactcaccagccaatgaacacacagctaccacaattacacagaatcacagcgtggtggcctcaaacggagacgtcgcattcatcccaggaactgctaccgaaggcaatacagagattgtaactgaagaagtgattgagaccgatgataacatgttcaagacccatgtgaagactttaagctccaaagagaaggcacggtataggcaagggtcctctaactttatatcgtatttcgatgatatgtcatttgaacacaggcccagtatattagatgggtcagttaacgagcccttcaagaccaaattcgtgggacctactttagaaaaggagatcagaagaagggagaaagagctaatggccatgcgcaaaaatttacaccaccgcaagtcctccccagatgctgtcgactcagtagagaaaaatgatggcgccgccccaactactgttccaactgccgccacctcagaaacggtggtcacggttgaaaccaccatactttcatccaatttctccgggttgtacgtggcgttttggatggtattgcattggtgctgt

SEQ ID NO: 82586 - DNA, 675 bp, Saccharomyces pastorianus
atgaagttcgtgacaagtagttataacgtcgggtatcctgcgtacggtgcaaaatttttgaataacgacacattacttgtggcaggcggtggaggagaaggaaacaatggcataccaaacaagctgacggtcttgcgcgtggatcctaccaaagatactgagaaggaacagtttcatatattgagcgagtttgcattggaagacaacgacgactctcctactgcaattgacgcttccaagggtatcattttggttggctgcaatgaaaatagcactaagattgcccaaggtaaaggtaataagcacttgagaaaatttaaatacgataaagtgaatgatcaattggagttcctcactagtgtagactttgacgcatctacaaatgcggatgactacacgaagctggtttatatttcacgagaaggtaccgttgcagctatcgcatcatctaaagtacctgctataatgagaatcattgacccgagcgacttgacagagaagtttgagatcgagactaggggtgaagtaaaggatttacacttttccactgatggtaaggttgttgcttatatcaccggttctagcttggaagtgatttcaacagtgactggaagttgcattgctaggaaaacagattttgataagaattggagtttatctaaaataacttcatag

SEQ ID NO: 82587 - DNA, 930 bp, Saccharomyces pastorianus
atgaccagtacattacatacgacaaaaaaagtgctctccattcaatcacacgtcatacatggctacgtgggaaacaaggccgctacgttcccacttcaatacagaggttgggatgtggacgtattgaacacagttcagttttctaaccactcggggtacgcccacttcacaggcttcaaatgcagcactgaggagttggtagacattgtagagaagggcttgattgggtctcttagaatcaagtatgatgccgtacttagtggctatttacccaatgttcaagccctgcaaaaggtagcaggaatagtgggtcaattatgtgaggggagtgaaaacgtcaagtggattttagatcctgtactgggcgataatggaaggctgtacgtggatcgagaatgtgttgcggtataccaagacattttacaaaacttcaaaatttttttggccacaccaaatcagtttgaaatggaactgttggtggggatgtcaattcgtaccttagacgacgctaagcaggcatttaaactatttcataaaaagtaccctcgagtaagccgaatagttgtcactagtctggaattatctgaattcctgagcaacgacacttacgtagtagcaggatttgattgctcggccagtgaagagatattcttctatgaaatccccaagatcaacgcaaaatttagtggaagtggtgatttaatcagcgccatgctcactgactcgttactaggcgaccgccgctgcacacagctgtcattaagcgcatccttgggccaagtgctgtggctcgtcaccagtatcctacaaaaaacgtatgatttaaacatagctgagcggggcccacaagattccacgatagatatcaaggatttaaagctgattcagtgtagagacatcctaaagcaagatttcataccctaccattga

SEQ ID NO: 82588 - DNA, 1071 bp, Saccharomyces pastorianus
atggaattggacgaatgtttagaaaggctatacaaggcccagttactacctgaagtgactgtaagggcactctgctttaagctgaaggaaatgctagtgaaggagtcaaacgtgattcacattcagacccctgtcacagtcgtgggggatatgcatggacagtttcacgatatgctggagatcttccaaataggcggccctgttcctgatacgaattatctgttcttgggcgactatgtagacagggggttgtacagtgtggaaacaattatgctattgattgtgcttaagcttcgatatcctagtagaattcatcttttgaggggaaaccacgagtcacgtcaaatcacgcagagctatggtttctacacggagtgcttgaacaagtacggtggcaattcaagagtttggcaatatttgacagatatatttgactatctagtgttatgctgtattatcgacgacgaaattttttgtgttcatggtgggctctcgcccaatgttcaaaccatagatcagatcaagattattgatagatttcgagaaattccacacgatggcgccatggcagacttggtttggtctgatccggaagaaaacaataaccccacgttagatcatccagataactctggacaacattttcaggtgtcacctcgtggagcaggttacactttcggaagaagcgtggtggagaaattcttacgtatgaacgatatgaacagaatatacagagcccatcagttatgtaacgaaggttaccagatatattttgacggattggttactactgtatggtcggcgccaaactattgttatcggtgcggcaataaagcatctattctggagctgtatagtaaagatcaattctacttcaacgttttcgaagaggcacctgaaaataaactgttgaaagagaacagtatgaacgacaatgccttagaagatagcatatctaatccggtagccaacaggaaattgattgcagattatttcgaagacgactctgcctccgcagatggctcacggaccctgaaatgtacatatatcagatgtatacaagccagatct

SEQ ID NO: 82589 - DNA, 2037 bp, Saccharomyces pastorianus
atgttaatgacaggttccgttggcgacggtagtgaattcgattgggaagaccaaaaaactttcatctctagagatggcggtttaacgtggagatttgttcataattcttctgggttatatgctactggtgacctgggaaatattattgtgtatatcccatatgatccagaggaagatggcgattttcaatctgaattttattattctttggaccaaggtagaacatggaatgaatatgagctgaccaatgccataagttctgtccatccctacaaattgataaatccaacaccagatggatctggctcaaaatttatttttaaaggaacgtttaccactaccgattccgaaaccaacagtataacttctttaaaaggtgtcgagtatataattgatttttcagcagcattcgactctagaacgtgtgaggaggaagattttgaagattgggatttggcggatgggaaatgtgttaatggcgccaaatacaagtatagaaggaggaaacaagacgcccagtgtttggtaaaaaaagcattcaaagatttgagtttagatgaaacgccttgtaatagttgtggtgaatccgactacgaatgttcgtttgaatttgttagggacgcaaacggcctgtgtataccagattataatctgattgccttttccaacatatgtgacaaatcgaaggataaatctgtgttagtagagccattacaattaatcaaaggtgataaatgtaaaacacccatgaaaattgaacccgtagatattccgtgtgacgaaattccagaggagggttcgagtgacaaggaaatagtgaccactgaaaacaaatttgacttcgaaattaaattttaccaatacttcgatacagttgccgacgaatctttggtcatgctgaattcgataggagacgcctatatatcccacgatggtggacaaacgataaaaaggtttgacactgacggcgaaaaaattgtcgaagttgtgtttaacccatatttcaattcttcagcatatttgtttggctctaaaggtaacatattcttaacacacgatagaggatattctttcatgatagctaaattacctgaagccaggcaattaggcatgccactagattttagtgctagagcacaggatacttttatttactatggtggcaagaattgtgaatcaatcttaagtccagaatgtcatgcagtagcatacctcaccaaagatggaggtgaaacttttacagaaatgcttgataatgcaattcattgtgagtttgcaggcacactctttgaatatccgtcaaatgaggagatggttatgtgccaagtaaaggaaaagttttcgcaaacaagaagtttagtttcttctactgactttttccaagatgataaaaaaactgtgtttgaaaacattatcggctactcgtctactggtggctatatcattgttgccgtgcctcatgaaaataatgaattgagggcgtatgtaactaatgatggtgctgagtttgccgaggcaaaattcccatatgatgaagatattggtaagcaagacgcattcactattttaggatctgagaaaggatcgatatttttacatttagcaacaaacttagaatcaggacacgattttggaaaccttttgaaatccaactcgaatggtacttcttttgtcactttagagcatgccgttaatagaaacacattcggttatgtcgactttgaaaaagttcaaggtcttgaaggtattattattaccaacatcgtttcgaatagggaaaaggttggagagaacaaggaagacgaacaattgaagacgaaaatcacctttaatgacggttcagattggaactttttgaagcctccaaagaaggattcgggagggaaaaagtttccctgtgattctgtatcattagataaatgttctctacatttgcatggttacactgaacgtaaggatatcagggatacatattcctccggttccgcgttaggaatgatgtttggtgtcggaaatgttggcgataagcttctacca

SEQ ID NO: 82590 - DNA, 1395 bp, Saccharomyces pastorianus
atgcaagaatcaaaagaaccacaaaataaatttgaaggttgtcaaagaatatcttcatcttcatccacactctttggaggagcctccttcgaggaaccgagatgtggaacatcccaaggaaaggaagaagacgctttcgcatgcaataatggagatcacggctcgagcataacgaatgttcaggaagatgactttgtccttccagaactattgccgtcattcgagatgtatgaaaatttgctcagcaatatacctcaatctagtttcgatacatactttccggagaatccacctttttatgaggttgcttccggaaatcagagtattccttcggaaggtgagtctgggaatgatatgcggattcttaccggtgatatcgttggcccagataatcatgaagtgactgttgatggccgccggtttgcttccggccctgctgagtctcaaattcgtaattatgatgatactaaaggtatcccagttgagaatatatacgcattgcctaggattaaaacccccatagcgactgaattgtacgtcacaaagacggctccaaaatttggacagcttcctaaacacgagagcatgctaagggaatacacctctggggatataattcatggttatttcactgtagaaaacaaatcaaccaaacctataaaattcgatatgttttatttaactttggaaggtacgacaagttcaaaaacacagtcaccctttggaatccaaaaaacgacaaaaagaattttgagaatggtagatatggcagcgagtcggtcatataatcatgaagacgtgaacacgggggaagacctttgtggattttttgactccattgataaaacaagctttggattaccgaatagcaggatactaaatccaggtgataaacgtaagaaatttttcacttttaaaattccgaaccagttattagacgtaacctgtaagcacggccacttctctcactctcttttgccccctacattagggtttgatagaccatcgagttctcatccagagctttctactctaaaattttcggagagtttaggttatggtcgtttgtcagaaagaggttcctcactatggttaaacgacagttctagtggcagcttaataaattactcaataaatgctatgatagtaggcaaagacgtagcttctgggcgtgtttgtttaatgagtgaaaaaaagtatagcataaggatagttccatttggctttcaaaacaatccaattagtagggagaagtgcctcaaagacttagaggatttcgatattgaaattgcaaacaggcttggaatgatcgaaaaagtcttttctaaaatagagcgagcgattcccattcataaggaggacatacaggaggcgaatcgctctgatcaactataa

SEQ ID NO: 82591 - DNA, 438 bp, Saccharomyces pastorianus
atgcaatcatccactgaaagtgatagagatattcaggatggtcctgatgctgatattcacgtcgcaccacccgtggaaaaagagtggtcagatggatttgatgacaacgaagtcataaacggggataacgttgagccaccaaaaagagggctcataggttatcttgtcatttacttattgtgttatccaatatccttcgggggtttcctgcctggttgggatagtggtatcacagcaggtttcattaacatggacaactttaaaatgaacttcggttcttacaagcatagcactggtgaatattatttgagcaacgtgcgtatgggtcttcttgtggctatgttcagtattggatgtgccataggtggtcttatttttgcccgtcttgctgatactttaggtagaaggctggcaatagcttatcggaattatgaataa

SEQ ID NO: 82592 - DNA, 585 bp, Saccharomyces pastorianus
atgacaattaacacaaagaacatagttgttgttggtgctggtgtgtttggtgtgtctgtggcaaatcacttgtacagggaactgggtgggacatacgcaataaagctcgtcacagcatctaattatgtgtattttctaccctcagctgtccgtttgacggtttcaaaggattataccaagtcgatcctgccgttaaaaaatgttcttgatagtggtattgaagttatcaaagatacggctgccagctttgatgataaggaggtagttttggggtcagacagggccataaagtttgatatcttggttcttgcaactggctcaaagtgggctgatccaattggttcaacttataccttcggggataactataaagagtattttgaaagagaggcttctcgaatctcagatgcagatcacatactttttcttggcggtggctttgttaattgtgaactagctggtgaattgttattcaagtatttggaggagatcaggtctggcaaaaagcgtatttccattattcataattccgataagctattgccagccttctacctaaagtatcagcaagacgggcaaaaataa

SEQ ID NO: 82593 - DNA, 318 bp, Saccharomyces pastorianus
atgacagttttgtatacacaaacaaaggcgaccaagttttgtatggaaaatatagcattcatttgtcttcagagctgcacaagaggtatatacggctgccaattttatagcgctacattggaaaattatcataacatatcatttccaatatttctattgcagaccaccttatttaatcactgtatctctttaaactggtctaaagctgtgtctaatcgtattaagaggcgaaagtacatgatggaactgaaaaagcactgttacaattaccaggtgagtaggataggaaatcggaaaaaaatgggtgcttctttctaa

SEQ ID NO: 82594 - DNA, 93 bp, Saccharomyces pastorianus
atgttcaatcgctttaataaacttcaagccgctttggctttggtcctttactcccaaagtgcattgggccaatattataccaacagttcctga

SEQ ID NO: 82595 - DNA, 1854 bp, Saccharomyces pastorianus
atggttgaattaagagatttgattttagataatggtcttcgctgtattggcgacgcagaatctgaactatatgccgagttaacgaagaaatcgcaggcggctactccttgggcatatcagaaacagtatggtaagtttgtgacttacctgatcgttgtcgtaatctttgtgtgttttatcaagaagctggtaattaggtattacgattcaagcgaagaatttcttccggataagaacaattcagtggtaactcttcctttatttctatctcgaatcgggaaaaagctcgctgcactcaacagatgtatttgctataggagattcccgacgttcattttttctagcttgggtattccaacctctgtaggcactctcatggttgtgctagctgttactttatatacgcttttgtattgcttcgttccacatccgttttacaggccctgtgctggatttagctcaccgcctctttctattcgtgcaggtattatggcagtgtcgtttgtgccatttttatttgctctttccggaaaagtcaacgttataggttggttggttggtctctcctatgagaaaattaacatataccatcaatggacgtccattctatgtttgtttcttggttgggtgcatgtcattccctttttacgtcaagcccatcatgagggcggtgctgaaggaatgcatcaacaatggaaaacagatgaaatgtggagaactggtgttccgcccctcttatttttgaacttgctgtggttattttcgttgtctgttgtcaggagatacgtttatgagctttttttacaagttcattggattttagccgttggattctacattagtcttttctaccacatttatcctgaattgaatgctcatatgtatttggtcgctacgatcgtagtgtggtttgtacaattgctttacagattggttgtaaagggttatctcaggcctggtagaagctttatggcttctagcactgcaaatgtcactgtggttggtgaaggatgtgtggaattgatcgttaaagatgtggacatggcctattcaccagggcaacatatattcgtaagaacaacggataaggacgttatttcaaatcatccattttctatcttccccagtgcaaaatatcctggtggaataaagatgttgatcagggctcaaaaaggcttcaccagaagcctgtacaaaagccaggatgagaccaaaaaaattcttattgatggcccttatggcggaatcgaaagagatgttagaagcttcaccaatttatatctgatctgttccggttcaggtatatctacatgcttgccattcctgcaacgatacggccccttgttgcataagaccaacttggaaaatatcaggttggactggatagtaagacacagagaagatgtatcatggatcgacgacgaaattcgtactcttttggtcgatttacgcacgttgttcttgagtgggaacgttgtatttagaatttacgtgtgttccagctcagacactatcaaaactcttgcacaacctacgaaaattgccggcagtgaatccgatatggctaaaaaagaagaaggtgttgattttaaccaaaatgacactgagtctgtttcaactttaaacaaatctggcaacgagtttggggagcttattaccgttacctattgcaagcctgaattaaatcaggtcatacatgactatcaaatcggatccaagaattgttttatttgttcaggttctgacagcttaagatgtgccgtgggaaattctgtggcaaggttacaagccaaagtcttctctagcaaaagtgttcaagaatgctatttgcatagtgaaagttttggttattga

SEQ ID NO: 82596 - DNA, 1545 bp, Saccharomyces pastorianus
atgattgaagaaagagatttggttttaagcaatggtatccattgtattgctgacatccactccgaactatacgccaggttaaaaaaagaatcgcaggcagcgacaccatgggtgtaccaaaaacaatacggaaaattcgtcacttactttgtcgctgtgataatttttttgtctttgataaaaaagctggcatttatgtattatgtttccagtgaggaatttcttccagaaaagaagaactcgccgactaccccttctgtattccttgctcgaataatgacgaaacttgtcgcattcaacagatacatttgctacaggaaatttcccacgttgatattttcttatttaggtattccgacatctgtgggtacttttttagtagtaatggctaccaccttatacacacttctatactgctttgttcctcatccattctacagaccttgtgcaggatttggttcgccgcctttgtctgttcgtgcaggcataatggcaatatctttggttccgtttgtattctcactttccgggaagatcaacgttataggttggttggttgggctttcgtatgaaaaaatcaacatataccaccaatgggcatccattctttgtttattctttagctgggttcatgtcattcccttcctacgtcaagcacgacatgagggaggatatgaaagaatgcatcaacggtggaaggcatccgacatgtggaggagtggtgtcccacccatcttatttttgaatctgctatggttatcttcgctgcctattgctagaagacatttttatgagatttttttgcaacttcattggattttagctgttggattttacattagtttgttctatcatgtatatcccgaattgaattcccatatgtatctggttgctacaattgtggtttggtttgcacaactgttttacagactagctgtgaagggttatttaagacgtggtagaagtttcatggcctcgaccattgcaaatgtcagcatagtcggcgaaggatgcgtagaattgatcgtcaaagatgtggaaatggcctattccccaggtcaacacatattcgtgagaactattgataagggcatcatttccaaccatccattttctatctttccgagtgcaaagtatcccggaggaataaaaatgctgattagagcccagaaagggttttctaaaaggctatacgaaagtaatgacgacatgaagaaaattcttattgatgggccttatggtggaatcgagagagatattagaagttttaccaatgtctacttgatttgctctggttcaggtatatctacatgcttacctttcctgcaaaaatatggccccatactccataagacaaacttagaagttattacattggactgggtggtaagacatagggaggatatatcatggattagagatgaaatgtgtaccctctcaaataatttgcgccagttatttttagatgggaaaattgtggttagaatttacgtctgctcggacagtaccgtcctggtattattaaaactttccctcaaacaatag

SEQ ID NO: 82597 - DNA, 837 bp, Saccharomyces pastorianus
atgtcagtttttgtttcaggtgctaacgggttcattgcccaacacattgtcgatctcctattgaaggaagactataaggtcatcggttctgctagaagtcaagaaaaggccgagaatttaacggaggcctttggtaacaatccaaacttctccatggaaattgtcccagacatatctaaactggacgcatttgaccatgttttccaaaagcacggcaaggagatcaagatagttctacatacggcctctccattctgctttgatatcactgacagtgaacgcgatttattaattcctgctgtgaacggtgttaagggaattctccactcaattaaaaaatacgccgctgattctgtagaacgtgtagttctgacctcttcttatgcagctgtgttcgacatggcaaaagaaaacgataaatctttaacatttaacgaagaatcctggaacccagcaacctgggagagttgccaaagtgacccggttagcgcctactgtggttctaagaagtttgctgaaaaagcagcttgggaatttctagaggagaatagagacgctgtaaaattcgaattaactgccgttaacccagtttacgtttttggtccgcaaatgtttgataaagatgtgaaaaaacacttgaacacatcttgcgaactcgtcaacagcttgatgcatttatcaccagaggacaggataccggaactatttggtggatacattgatgttcgtgatgttgcaaaggctcatttagttgccttccaaaagagggaaacaattggtcaaagactaatcgtatcagaggccagatttactatgcaggatgtttcatattcttaa

SEQ ID NO: 82598 - DNA, 150 bp, Saccharomyces pastorianus
atgtctacaaatgtatttagttatagtttgccttcagatttaagaatttgtgaagcggtatcgtctatagtttccttcaaatttctgaacttaaatcccagtagtttctttgttttggtattgtcgagagtggcaccaagagtgttataa

SEQ ID NO: 82599 - DNA, 444 bp, Saccharomyces pastorianus
  modified_base (123)..(147): a, c, g, t, unknown, or other
  modified_base (278)..(372): a, c, g, t, unknown, or other
atgacagcaccattgactccacagcaacagctacttcaaagacaacagcaggccttggagcaacaacagaatggtggagccatgaaaaacgcaaataaacggagtggtaacaatgccaccagnnnnnnnnnnnnnnnnnnnnnnnnngataaaccaaaggttaagcgacctagaaaaaatgcaaaaaaaagcgagagcggtacaccagctcctaaaaagaaaagaatgactaagaagaaacagagcgcaagtagcacgccctcttctactacaatgtnnnnnnnnnnnnnnnnnnnnnnnnnnnnnnnnnnnnnnnnnnnnnnnnnnnnnnnnnnnnnnnnnnnnnnnnnnnnnnnnnnnnnnnnnnnnnnncacttgggcatctcacctctgtgctcaagcaaaagaatcttttggctcattttccagaagatattttattag

SEQ ID NO: 82600 - DNA, 1683 bp, Saccharomyces pastorianus
  modified_base (1653)..(1677): a, c, g, t, unknown, or other
atgagtgccaatagcccgacaggaaacgatccccatgtatttggtattcctgtgaacgcaacaccatccaatatgggctcgccaggcagtccagttaatgtaccacctcctatgaacccagcggtagcaaatgtaaatcatcctgttatgaggacaaacagtaatagtaatgccaatgaaggtactaggactttaaccagggagcaaatacagcaattgcagcaaagacaacgattattactgcagcaaagactactcgaacaacagagaaaacagcaagcactccaaaactatgaggctcaattttatcaaatgcttatgaccttaaacaaaagacctaaaagactttacaattttgtggaagatgcagactcaattttgaaaaaatatgagcaatatttacacagttttgaatttcatatttatgagaataattataagatttgcgctcctgcaaatagcaggttacaacagcagcaaaagcaacccgagctgactagtgacggtttaatattaaccaaaaataacgaaactttgaaagaatttttagagtacgtcgcaagaggaaggattcctgatgctattatggaagtcttaagggactgtaatattcaattttacgaaggaaatcttattttacaggtttatgaccatactaatacagttgatgttacccccaaagagaacaagcctaatttgaacagctcttcttccccttcaaataacaatagcacacaggacaattccaagattcaacaaccatccgaacctaatagtggtgtggcaaatacaggcgcaaacacagcaaataagaaggcatccttcaaacgacctagagtatatcgaacattgttgaagcctaatgatttgacgacgtattatgacatgatgtcttatgcagataatgccaggttttctgatagcatttatcaacagtttgaatctgaaattttaacacttaccaagaggaacttgtcactaagtgtgccattaaatccatatgagcaccgagacatgttggaggaaacagctttttcagaacctcattgggatagtgaaaaaaaatccttcattcacgaacatcgtgctgagtctacgagagaaggcacgaagggcgttgtagggcatatcgaagaacgcgatgaatttccgcaacatagttcaaattatgaacagttgatgttgatcatgaatgaacgcacaacaacgataaccaactccacgtttgctgtttcgttaaccaagaatgcgatggagattgctagctccagttccaacggggtacgtggagcttcgtcctcaacttcgaattccgcatcaaatacaaggaataacagtttggctaatggcaatcaagtagctttggcagcagctgcggctgcggctgcagtgggatctaccatgggtaacgataataatcaatttagcaggctgaaatttattgaacaatggagaataaataaagaaaaaagaaaacagcaggctttaagtgcaaacatcaatccaacccccttcaacgctagaatatcgatgacagcaccattgactccacagcaacagctacttcaaagacaacagcaggccttggagcaacaacagaatggtggagccatgaaaaacgcaaataaacggagtggtaacaatgccaccagnnnnnnnnnnnnnnnnnnnnnnnnngattaa

SEQ ID NO: 82601 - DNA, 414 bp, Saccharomyces pastorianus
atgtgcgatagccatcaaaaggaagaagataacgcaaatacgagcgaaagggcgttattttttaattaccatgagttttcgtattcattctacgaagacctcggttccgaagacgctaaacccacagagcacgacgaagaccacaaattgtgtattacacatttcccgaatgtgtatgctgctcggggctctgccgagttccaggtgacccgggtggtacgagtgccccggcggttcgatgagtctcgtagcagccttgaaacgccacaatttagtacacagcttcccggtagcgagccggcggcaatcgtgggcgacgatggcactagctttgtacggtgcgggcgttacgaaattggggatcacgtgtctggctgtcctccgtctcgcctctgtccgaattctaatggcgga

SEQ ID NO: 82602 - DNA, 420 bp, Saccharomyces pastorianus
atgagtaaggataataggttagcaagtattttactgcagcctgtagcatcatcctctggaaattgtactgaattccatgactcaaagctgcatactctgcaagaggaacttaatttcttgccactagaaggagttgcgtcgaatgtttgcccgccgatgcttagaggtcataagaactacgtgtttgtgttatattgtttgaatcaagtcgatctcgttacgaatttgcaggattctacaaaacgttactacccactgcaaatatttaaagattgtcaattgagttctttggttcagaaggatttttcacactatttccaactcagcaggcaaaaggaaggggaagatcggaacgatagtgataccaccttggttaacgtcgtcaattctggagtatcccgccataaaagtcaatactaa

SEQ ID NO: 82603 - DNA, 282 bp, Saccharomyces pastorianus
atgcagtccatgatcagctcatctgagcacgaaaacctaacctgcaagtactggcctgttagcttcctcgcttcttggtgtgagaatgggtctggcacactgatgcaaaaagatggtagtcttttatatgccgtgaaaaatttttcccatatatttgaaaaaaaatttttcataccaatctatagaaatagtgaggtcaggagacatcgcaacactattgttctattgcattatttttttagtgttaaactacaatttcggattctatatcattgtatataa

SEQ ID NO: 82604 - DNA, 804 bp, Saccharomyces pastorianus
atggtcatttttgctcttaatgactcttttatttttacccggattgcaatttttcacatatcgtctttttattcactacgtattttaatcgtcttcgcgatgatatgtactgctaacgaaagaatgccatacaaaaaaaaaaagctaccacatcgctcgacgacctcaattatgcaacttgtaccgctagaattgaatagatccactctaagtgggatatctgggtccatctccatctcctgctggatcattgtgtttgtccctcaaatttacgagaacttttaccggaagtcgtctgatgggctgtctttattgttcgtggtactttggttggccggcgatgtctttaaccttatgggtgccgttatgcaacatcttttgtctaccatgatcattcttgctgcttactatacggtggcagatatcattttactaggtcaatgtctatggtacgataatgaggaaaaaccagcagtagaccctattcatctctcccctgccaatccaataaacgaaaacgttctgcacgatgtgttcaatgaacaacaaccgcttttgaattcccaaggtcagccaaatcgtattgatgaagaaatggctgctccttcatccgacggaaacgttagtgatgatactctccgtgaagtcaattcaagaaatttgataaaagacatatttattgttagtggtgtagtttttgtaggtttcatctctgtggtatgtaacctactgcgtaaactacacgcaacctcctcccgtggaggatccatcactgcctgttcccgaactgcagatcaattgtga

SEQ ID NO: 82605 - DNA, 744 bp, Saccharomyces pastorianus
atgtcccagcccactaagaataagaagaaagaacacgggaccgattccaagtcatcccgcatgactcggacgttggttaaccatattctttttgaaagaattctcccgatccttccggtggagtctaatctaagtacctattcagaagtggaagagtattcctcattcatttcatgcagatctgtgctcattaacgttaccgtttcccgagatgcaaacgctatggtggaaggcactttggagttgatagaatcgcttcttcaagggcacgaaatcatttcagataagggtagcagtgacgttattgaatcaatactgattatactaagattgttaagtgatgcgctagagtataattggcaaaatcaagaaagccttcattacaacgacatttcgactcacgtagaacatgaccaagaacagaagtacagaccaaagcttcacaatattctgcccgactactcgtcgactcattccaatggcaacaaacactttttccaccagagcaaacctaaggcactgataccggaactggcatcgaaattgcttgagagttgcgcgaagttgaagttcaatacaagaactttgcaaattttacaaaatatgatcagtcatgttcatggaaacattctaacgactttgagttcctcgattcttccccgccacaaatcctatttgacaaggcacaaccatccttctcattgtaaaatgacctgcagcatgcagcttgcactgccgtcttta

SEQ ID NO: 82606 - DNA, 5940 bp, Saccharomyces pastorianus
atgttttggataatgactaggcctgcggaatattatgaactcttcaacttattaaaagataataacaatgaacactcgaaatccttaaacacgttaaaccatacacttttggaggagatccattcgacttttaatgtgaatagcatgataaccaccaatcaaaatgctcatcaaggctcatcttccccttcgtcctcctcgccatcgtcaccacctagctcatcatcatcggataacaacaatcaaaacataatagcaaaatccttaagtcgtcagctttctcaccaccagtcatacattcaacagcagtctgaaagaaaactacattcttcatggactacaaactctcaatcctctacttcactgtcatcttcaacgtctaattcaacaacaactgatttctctactcacactcaaccaggagaatacgacccttccttaccagatactcccacgatgtctaacatcactattagtgcatcttcattattatcccaaactccaactccaacaaaacaattgcaacagcggttgaactcagcagctgcagccgccgctgcagctgcttcaccatcgaattccaccccaactggatacacagcagagcaacaaagtcgagcttcatacgatgcacacaaaactggccatactggtaaggattatgatgaacattttttgtctgtcactcgtttggataatgttttggagttatacacgcactttgatgatactgaggtattaccacacacatccgtactgaagtttttaactactttgacaatgttcgatattgacctttttaatgaattaaacgctacatcattcaaatatattcctgattgtactatgcatcgtccaaaagaaagaacgagttctttcaataatactgcacacgagacaggttccgaaaagacttcgggtataaaacatattacgcaaggcttaaagaaattaacttctttaccttcctcaaccaaaaaaactgtaaaatttatgaagatgttgctaagaaatttaattgggaaccaagctgtatcagacgttgccctcttagatacaatgagggccttactatcattctttacaatgacttctgcggtctttctcgtggataggaacttaccctcagtactttttgccaagagactcatccccataatggggacaaatttaagcgtcggtcaagactggaattcaaaaataaataacagtttgatggtttgtttgaaaaaaaactccaccacgtttgttcaattacaattaatattcttctcttcagctattcaattcgatcatgaattattgctggcacgtctgagcatcgatacaatggccaacaatttaaacatgcagaagctatgcctttatactgaaggattcaggatattcttcgacataccaagtaagaaggaattgcggaaggcaattgcggttaaaatttctaaatttttcaaaacattattctccattatagcagatattcttttacaagaatttccgtattttgatgagcaaatcaccgacatagttgcttccattcttgacggtacaattatcaatgagtatggtacgaagaaacatttcaaggggagctcaccctctttatgttcgacaacccggtcaagatcaggatctacatctcaaagttcaatgacaccagtttctccgctgggactggatactgatatatgtccaatgaacaccctgtctttagttggttcaagtacttcaagaaattctgacaacgttaattcattaaacagttcaccaaagaacttgtcttctgatccatacttgtcacatcttgtggccccaagagcacgtcatgctttaggtgggccatctagtattataaggaataaaataccgactacattgacttcacctccaggaacggaaaaatcttcaccagtacaacgtccgcaaacggaaagcatcagtgccacaccaatggccataacaaattctactccattatcgtcggcagcattcggaattcgatcgcctttgcagaaaataagaacgaggcgttattccgatgaaagtttaggaaaattcatgaaatcaacaaataattacattcaagaacatttgataccaaaagatttgaatgaagcaactcttcaagatgctagaagaataatgattaatattttcagtatttttaagagaccgaatagttacttcatcattcctcacaatataaattcgaatttacaatgggtttcgcaggattttagaaatattatgaaaccgattttcgtcgccatcgtaagtccggatgtagatttacagaatactgctcaatcattcatggataccttattatcgaatgttattacttatggtgaatcagatgagaatatcagtattgaagggtatcatcttctttgcagttacactgtaacattatttgcaatgggccttttcgatttgaaaattaataatgaaaagcgtcaaattctcttggatataactgtcaagtttatgaaggttagatcacatttagcagggatcgcggaggcctcacaccacatggaatacataagtgattctgaaaaactcacctttccgctgattatggggactgttggtagggccctatttgtttcattatactctagtcaacaaaaaattgaaaagactttaaagattgcttacacagagtatctttctgcaatcaattttcatgagaggaatattgatgatgctgataaaacttgggttcataatattgagtttgtagaagcgatgtgtcatgacaactacacaacttctggttcaattgctttccaaaggaggacaagaaataatattttacgatttgctactattcctaacgctatcttacttgattctatgaggatgatctataagaagtggcatacttacacacacagtaaaagtttagaaaaacaagaacggaacgacttcagaaatttcgcgggtattttagcctctttgtcgggtatcctattcatcaataaaaagatattgcaagaaatgtatccatacctactcgacaccgtttcagaattgaaaaaaaatatagacttttttatctcaaaacaatgccaatggttaaactatccggatttattaacgagagaaaattcaagagatattctaagtgtagaactgcatcctttgtcttttaacttactttttaataatttgaggctcaagttaaaagaacttgcttgctcagacttatcaataccagaaaatgaaagttcctatgttttgttagaacaaataatcaaaatgctgcggacaatcctaggtcgtgatgatgacaattatgtaatgatgcttttttccacagagattgtagatcttattgatttattgacagatgaaataaaaaaaattccagcctattgcccaaaatatctcaaggcaattattcaaatgaccaaaatgtttagtgccttgcagcactcagaggttaatttaggtgtcaaaaatcattttcacgttaaaaataaatggttgagacaagtcactgattggtttcaagtgagtattgcgagagagtacgatttcgaaaacttgtcaaaacctctaaaagaaatggatttggtaaaaagagacatggatattctatacatagatacggcaatcgaagcttcaaccgctattgcgtacctcacgagacatactttcttagagattccacctgccgcgtcagatcccgaactatctcgatctaggtctgtgatatttgggttttatttcaacatcttaatgaaaggccttgaaaaaagtagtgatcgtgacaattacccagtattcttgaggcacaaaatgagtgtcctcaacgacaatgtaatactttcattaacaaatctttcaaacaccaatgttgatgcgagtttgcagttcaccttaccgatgggctattccggaaatcgaaacattaggaatgcatttttggaggtcttcattaatatcgttacgaactatcggacatacacggctaaaactgaccttggaaaattagaagcagcagacaaatttttgcgatatacgattgaacatccccagctatcgtcctttggagcagcggtttgtcccgctagcgatattgatgcttatgctgctggcttaataaatgcatttgaaacgagaaatgccacccacattgtagtgtcacagttgattaaaaatgaaattgaaaattcttccagacctacggatatccttagaaggaatagctgtgctacgagatcattatctatgctagccaggtccaagggtagcgaatatttgattcgcactttgcaaccattactaaaaaaaattatccagaacagagatttttttgaaattgagaaattaaaaccggaagatttagatgctgaacgtcaaatagagctttttgttaaatacatgaatgaattattggaatccatatccaactccgtatcttattttccccctcctttattttatatttgtcaaaacatttataaagttgcgtgtgaaaaatttccggatcacgcaattatcgccgctgggtctttcgtatttttacggtttttttgtcctgctttagtcagccctgattctgaaaatatcatagatatttctcacttgagcgaaaagcgtaccttcatcagcttggctaaagttatccaaaatattgccaatggctcagaaaatttctccagatggccagctttgtgttcccaaaaggattttcttaaggaatgtagcgatagaattttcagattcctagctgaactttgtagaacagatcgcacgatagacatccaagtgagaacagacccaacgccaattgcatttgactatcaattccttcattcctttgtttacctttacggtcttgaggtgagaaggaatgtgctaaatgaagcaaaacatgatgatggtgacattgatggtgacgatttctataagaccacgtttttacttattgatgatgttcttggccaattaggccaacctaaaatggaagtttccaatgaaataccaatatacataagagaacatatggacgactatccggaactgtatgagttcatgaataggcacgcgttcagaaacattgagacttcaacagcgtacagcccaagcgttcacgagtccacctcaagtgaaggcattccaattattacgttaacaatgtcaaatttctcagacagacatgtggacattgatacagttgcttacaagttcttgcaaatttatgctcgaatctggaccaccaaacactgtttaataattgactgtacagaattcgacgagggagggcttgatatgaggaaatttatttctttggttatgggactattaccagaagttgcacccaaaaattgtataggctgttactactttaacgtaaacgagacatttatggataattatggaaaatgtttggacaaggacaacgtatatgtttcctcgaaaattcctcattatttcattaatagtaactctgatgaaggacttatgaaatctgtgggtataactggacaagggttgaaggttctgcaagatattcgtgtctctctgcatgatatcacgctttatgacgaaaaaagaaatagatttacgccggtatcgttgaaaataggcgatatttactttcaagtcttgcatgaaactcctaggcaatataaaataagagacatgggtactttattcgacgtaaaattcaatgatgtctacgaaattagccgaatattcgaagtacatgtttcgtcaataactggagtggcagctgaatttacagtaacttttcaggacgagagaaggttgatttttagtagtccgaaataccttgaaattgtgaagatgttctattacgcacagatccggttagaaagtgaatatgaaatggataataattcgagtacctcctccccaaattcaaacaacaaggacaaacagcagaaagagagaacaaaattatag

SEQ ID NO: 82607 - DNA, 642 bp, Saccharomyces pastorianus
atgaaaaacagttcgtataacctaatagctgccactgaggcgtcatttggtttgaactttggctcccattttcatcgctcttccgaggtgtacgtccccgaagatactacaacatttttaggtgttattggaaagtctcttgcagagtctaatccagaactcacagcctatatgtttatctatgttttggaggcattgaagaacaacgtgattcctcatgtttacatccctcataccatttgcggtttgtcttattggatccctaatttataccaacatgtgtatttggctgatgatgaagaaggccccgaaaacatatctcacattttccgaattcttatcaggctctctgtgagagagaccgactttaaagccgtatacatgcaatatgtttggctgctacttttagatgatggccgcttaactgacattatcgttgatgaagttattaatcatgcgttagaaagagactccgaaaaccgcgattggaagaaaacaatatcgttactaactgtcctacccactactgaggttgctaataatattattcaaaaaatattggcaaaaattagatcatttttaccgtcattgaagttagaagctatgacccaaagttggtctgaactaacaatatttagttaa

SEQ ID NO: 82608 - DNA, 864 bp, Saccharomyces pastorianus
atgtataatgaaacttctagcggtacagatgtcttaccagagatcctgtatatcgtatccttattaatagatgtaggtccaagggaactcagatcatcactacaccagctattaatgaatgtatgccattccttggctattaactcagctttaccacaagatcatagaaataatctagatgaaataagtgatatatttgcacatcaaaaggtgaagtttatgtttgggttcagcgaggacaaaggacgaattttacagatttttagcgcttcttcttttgcaagcaagtttaatatcctggatttcttcatcaataatatattattgctgatggaatattcttcaacgtacgaagcaaacgtgtggaagacaagatacaagaaatatgtcttggaatctgtgtttacaagtaattcttttctttcggcacgttcaatcatgattgttggtataatgggtaaatcttacataactgaagggttatgcaaggctatgttaattgaaaccatgaaagttatcgccgaaccaaagattactgacgagcatcttttcttagccatatctcatatttttacttattccaaaattgttgaaggtttggatcccaaccttgacttaatgaagcacttattttggttttcaacactcttccttgaatcacgtcacccgataatttttgagggtgcccttctctttgtgtcaaactgtataaggcgcctatacatggcccagtttgaaaatgaaagtgaaacatcattgataagtactttacttaaggggagaaagtttgctcatacctttttaagcaagatagagatcttagtggtattgtttggaatgaagataattttacacacattctga

SEQ ID NO: 82609 - DNA, 234 bp, Saccharomyces pastorianus
atggcaatgtatttcccaatttctttactcttattactattaatacgagtatcttccgaaatacccacttttactggctctttaatagtagtactagtatttgctttatttgggttgaattcaaacacttttccctcgagcttgtctttctcatgcttactaatctccttgttcatgttatataccatgtccataattttactgccgtttttgcgctttcgaggggcatattga

SEQ ID NO: 82610 - DNA, 3378 bp, Saccharomyces pastorianus
atgtcacagcaggagaatggtgatgtggccactgaattaatcgaaaatagactttccttctcaagaatccctagaataagccttcatgtaagggatttgtcaatcgttgcatccaaaacaaatacgacgctagttaatacgttttccatggacctgcccagtgggtcggtcatggcagttatgggtggttcggggtcagggaagactacgttgctgaatgttctggcatccaagatcagtggtgggttaactcataatggttctatacggtacgtattggaagatacaggttcagaacccaatgaaacagagcctaagagggctcacttggatggccaagaccatcccatccagaaacacgtaataatggcgtacctacctcaacaagatgtactctctcctaggttgacttgtagagaaactcttaagtttgcagctgatttgaaactaaactcttctgagcgaaccaagaaattaatggtcgagcaattaattgaagaattagggctcaaggattgtgccgatactcttgtgggggacaactcgcacaggggtctttctggtggtgaaaagagaagactaagtattggtactcaaatgatttcaaacccttccatcatgttcttagatgagcctaccactggactggatgcatattctgccttcttggttgttaaaactttgaaaaaattagctaaagaagatggcaggacttttatcatgtcaattcatcagccgagatcggatatattgtttttattggaccaggtttgtattttgtcaaagggaaatgtggtatattgtgacaaaatggataatactatcccttattttgagtctattggttatcacgtaccccagctggtaaatccagcagattatttcattgatttatcaagcgtagactctagatctgataaagaagaagctgccacgcaaagtcggctaaattcattgattgatcattggcatgattatgagagaactcatttgcaactacaggcagaatcttatataagcaacgcaacggaaattcaaattcagaatatgactaccagactgccattttggaagcaagttacggtgctaacaaggcgaaatttcaaattaaatttttcagattacgttactttaatatctacttttgcagaaccgttgattattggtactgtttgcggttggatttactataaacctgacaaaagcagtataggtggtttaaggacaacaaccgcatgtctttacgcgtccacaattttgcaatgttacttgtatttgctttttgatacttatcgactttgtgagcaggatattgcgttatatgacagagaaagagcagagggctcggtaacacctttggcattcatcgtagctagaaaaatttcacttttcctctctgacgatttcgcgatgaccatgatttttgtcagtataacatattttatgtttggattggaagcagatgcaaggaagtttttttatcagtttgctgttgtatttttatgtcagctatcctgttccggtttatctatgttatcggtggcggtatcgagagatttttctaaagcttcattagtaggaaatatgacatttacggtattatcgatgggatgtggttttttcgttaatgctaaagtaatgcccgtgtatgttcgttggattaaatatattgcctttacgtggtattcattcggtactctcatgtcaagcacctttacgaattcgtactgtactacagataatctcgatgagtgcttgggtaaccagatattggaagtttacgggtttcctaggaattggataaccgtacctgccgttgtcttactttgctggtctgtgggatattttgtagtaggtgcaattattttatatttgcacaagattgatataactttacaaaatgaagtgaaatcgaagcaaaaaaaaatcaaaaagaaatccccaacaggaatgaaacccgagattcagctgctagatgacgtgtatcatcagaaagatttggaagcggagaaaggaaaaaatatacatattactataaaattagaagatatagacttacgagtcattttttctgcccctttctcaaactggaaagaaggcaacttccaccatgaaacaaaagaaattctacaatcagttaatgccattttcaaacctggaatgattaatgcaattatggggccatcagggtctggaaagtcttctctgttaaacctaatctccggaagattaaaatcttcggtctttgccaaatttgacacttcaggttcaataatgttcaatgatattcaagtttcagagcttatgtttaaaaatgtatgctcgtatgtctcgcaggatgatgaccaccttttggcagctttaaccgttaaagaaaccctgaaatatgccgctgcattaagattgcatcatctgactgaggcagaacgaatggagagaactgacaacctaataaggtctttgggtttaaagcattgtgaaaacaatatcattggtaatgaatttgttaaaggtataagcggtggtgaaaaaagaagagtaactatgggtgtgcaattattaaacgatcctccgatattattgctagatgaaccaacttcagggttagatagcttcacatccgctactatactggaaattttggagaagttatgtagggaacagggcaagacgatcatcattaccattcatcaaccaaggtcagaattattcaagagatttggtaatgttttgctattagctaaatcgggtagaactgctttcaatggatcaccagatgaaatgattgcttatttcactgaattgggatataactgtccttcgtttacgaacgtggcagatttctttcttgatttaatttcagttaatacccagaacgaacagaatgaaataagctcaagggcacgagtagaaaagatacttagtgcatggaaagctaatatggataacgaaagcctttcaccaaccccaatttctgaaaaacaacaatactctcaggagtcatttttcacagaatacagcgagtttgtaagaaaaccagctaatttggttttggcgtacatagtgaacgttaaaaggcaatttactacgacaaggagaagttttgactctttgatggcgcgtattgcacaaattccaggattaggtgttattttcgcattattctttgccccagtcaagcataattatacaagtattagcaatcgtctaggattggcacaagaatctacagcactatattttgtgggcatgctggggaacttggcatgttatccaaccgaaagagattacttttacgaagaatataatgataatgtttatggtatagcaccttttttcttagcttatatgacattagagttgccgctatccgcatag

SEQ ID NO: 82611 - DNA, 1002 bp, Saccharomyces pastorianus
atggacatggccaaccagttgctagatgaattagcacatggaaatttttcccacctaacgctaaacttgtcccaaaatggtcgggaaattgctatcttacagcagcaattgaccggatttgatgataaacagctagaaacgtttgtagaacaacacccggctatgcccaatgatacgagattcaaaatcatgtgtacatcctttttaaattatgcccgggatgtcgacccatggtcagcctggtccagttcggatctaatttttgagttttatcaatgtttaatcaactgtctcatcaacgacaatgctcctcacatagaaatgttgataccagtagcaactagagaaacagaatttatcatcaatctcgctgggaaactagactctttccacttgcaactgcatacgagaagtcaccaatttctatcacatatatcgtccatcctatcaagactatttaacagcatcaaacctccacgaggtaacgcatcttctacaaatatacctggaaaacaacgaatactgctctacctggtcaataaactaaataacatctacttcaggatcgagtcaccgcaattatgttccaatatctttaagaactttcagccaaaaagcatgcttgcacatttcaacgaataccagctcgaccagcaaatagaatacagatatctcttaggaaggtactacttgttgaactctcaagtacataatgccttcgttcaattcaatgaagctttccagtccttattgaacttgccgttaacgaaccaagcgatcactaggaatggcaccagaatactaaattacatgatccctacagggctgatactgggaaagatggtcaaatggggaccgttgcgaccgttcctttcccaagaaacaattgataattggagtgtactctacaaacacgtacgttatgggaatattcaaggcgtgagtctctggctgagacagaacgagcgccatttgtgtgcgagacagttactgatcgtgctc

SEQ ID NO: 82612 - DNA, 1128 bp, Saccharomyces pastorianus
atgagtaggaatcaagatgtgttccccattttggatctacaggaactagttatatgtttgcaaagctgtgattttgcgctagccacacaggaaaatatctctaggcccacctcagactacatggtaaccctttacaaacaaatcatcgagaacttcatgggtatttctgtagagtcgttgctgaatagcagtaaccaagaaacaggggatggtcacttacaggaagagaacgagaacatttattcggacacgttaaatgttttggtattgaacaaaatctgctttaagttctttgagaacataggtgttcaagatttcaatatgacagatttgtacaagcccgaagcccaacggacacagcgcttactgagtgctgtggtgaattacgctcgttttagggaggaacgaatgttcgactgtaattcttttattcttcaaatggaatcgttgctgggtcagcttcgctccaaattcgatgattataacttgatccagcaacagctaaagcaatacgaggacgtagatggggataatatacctgatgagcaagagctccaaaagctggaagagcaaaataaggagctggaaattcagttgaagaaattgaccaagatccaagaaacgttatccatagattataatgactataagatctccaagcagtcaatctttaaagatctggaagctctgagtttccaaatagtggaattagagtccaatcgagataaactgatcaaaatatccaatacagacatggaagagttatccgagggaatcaaagagctaaatgatctgttgatacaaaggaaaaagacgttagacgacttaaccgcacaacagaaaaacttgcaagatacagtgacgacgttcgaaaccataattagtgagctctatgatgtgctgagaataatttccagcgaggtgcaagagtctaatcgaactgaaacggaacttgtgggattaaagcaaaatttaatcaacaataagctgaaattgatgaatgtattggaaacaggtattatgtataaattagaaatcttacaagaacagttagatttgcaactcaagaatttggaaaagctatcgcaagatactaaagaagagtcgcgcctaaatgatactgactct

SEQ ID NO: 82613 - DNA, 1062 bp, Saccharomyces pastorianus
atgaaagcgagggaagtcaccaaagaatacgtagcccgcgtgaagggcgagttccctataggtatagtagaggtagataagcctgtcagatctgttaaccctaaagttgcactaaacgctgtttgcgagatgagcgatgaaaacgctaaacatgccaagaccgttttccaaagggttagctatgatggacagacgagtattgtaaagtgtaaaccattgacaggtagaactcaccaaataagagtccatttgcagtacttgggatttcccatagcaaatgaccctatatactcgaacccagatatctggggtccagatttgggccgcggtggacttcaaaactatgatgacatcgttctgaaactagacgctattggcaagactaagcctgcagagagctggattcatcctcatagcgagggtgaatacttgcttggccgtcagtgcgaagaatgcgaggctgaaatgtacacagatcccggtactaacgatctcgacctctggctgcatgccttccggtacgagtcattggaaagaaactcggatacgcaaaaacctctctggagttatagaacaaaataccctgaatgggccttagagccacatcgccgatatatggaaatggccgttaaggaagctgataagtgtggcccgacaaagactgcttttagtgttggtgccgttcttgttcatggaactcaagtacttgccacaggatattcaagagagctaccaggaaacactcatgcagaacagtgtgctttgataaagtactcgcagttacacccgaactgtcccactatagtccctatgggaacagtgctctatacaaccatggaaccctgttccttcaggctaagtggcaatgagccttgctgcgatagaatcctggccacccaaggtgccattggtactgtcttcgtgggggttatggagcccgatacatttgttaaaaacaatacaagtttgaacaagctggaatcgcacggtgtgaactacatacaaataccaggctacgaggaggagtgcaccatcattgtcttcaaaggccacgattatagt

SEQ ID NO: 82614 - DNA, 726 bp, Saccharomyces pastorianus
atggaggactctaataatgaagccagcgatgacttcaacaacttattaaacaaagaaattgaatctgcaaaggaagtgaagttaagaaaattcgcgaacaggaataataataggaacgaaaacagttccaaagtcaaagatgcgagtggattcagactgagagttattcaaaccgatgggcacaaaactaaaaagacagaccctgattatgaagtgacaattgatggacccttaaggaagattgagccttattttttcacttataaaactttctgtaaggagaggtggagagatcgtaagttggtggatgtattcgtgagcgaattcagggatcgagagcccagctattattccaaaaccattgcagagggaaaagtatacttaaacgatgaacctgcaaaccttgataccatcattcgtgacggtgatctgatcacacataaagtacatcgacatgaaccgccagtcacatctaaaccaatagatattgtgtttgaagacgaagatatccttgtcattgataagcccagcagtattccagtgcacccaacgggcagatacagattcaataccattacaaaaatgctagaaagacagctaggttattcagtacatccatgtaatagactagacaagccaactagtggactaatgttattagccaagactccattaggtgcagatagaatgggagaccaaatgaaagcgagggatgtcccaaagaat

SEQ ID NO: 82615 - DNA, 1155 bp, Saccharomyces pastorianus
atgtctgctgctcctgtccaagacaaagacactctgtccaatgccgagcgtgcgaagaacgtcaacgggttgcttcaggtgctcatggacattaacactctgaacggagggagctccgacactgctgataagataagaattcatgccaaaaacttcgaggcagctttgttcgcaaagagctcttcaaagaaagaatacatggatagcatgaacgaaaaagttgctgtcatgcgcaacacgtacaatacgaggaaaaacgccgttactgctgctgccgctaataacaacattaaccccgtggaacagcaccatattaacaacttgaaaaattctggcaacagcgccaataatatgaatgtcaatatgaatctaaacccacagatgttcttgaatcagcaggctcaggcaaggcaacaggttgcgcaacaattaaggaatcaacaacaacaacaacaacagcaacaacaacaacaacaacaacaacagcagcagcagcaacagaggcgtcaattgactcctcaacaacaacaattagtgaaccagatgaaagtggcacctattcccaaacaattactgcaaagaattcctaacattccacccaatatcaacacctggcagcaggtcactgctttggctcaacaaaagctattgacacctcaggatatggaagctgcgaaggaagtctacaagattcaccagcagttgctattcaaagcaaggctacagcaacaacaagcacaggcacaagcacaagctaataacaacaacaacggcctcccccaaaatggtaatattaacaataacataaatattcctcaacagcagcaaatgcaacctcccaattcaagtgcgaacaacaaccctttgcaacagcaatcatcacaaaataccgtaccaaacgtcctcaaccaaattaaccaaatcttttctccagaggagcaacgcagcttattacaagaagccatcgaaacctgcaagaattttgaaaaaacacaattgggtagtacgatgacggaacctgtcaagcaaagttttattaggaaatacattaaccaaaaggccctgagaaaaatccaagctttgagagatgttaagaacaacaataacgctaacaacaacggctcgaccttcagagagcccaaaatgtccctatga

SEQ ID NO: 82616 - DNA, 627 bp, Saccharomyces pastorianus
atgactttccaacacgatgaaataagcgccattgcgcaaatgttcaaaaacgatagcgttttggataacttgtcaagaccacaattggcagcaatgtcgaagtttatgtcactaaggccatttggtaacgataacatgcttcgttaccaaattcgttccaaactaaaggatataatgaacgacgataaaattattgactacgaaggcgttgaaagtttatcgcaagaagagctgtatcaagcttgtgtgtctcgtggtatgaaagcgtacggtgtatccaaggaggacttggtcgataatctaaaagtttggctagaattgagactgagacaaaaaatcccatccgtcttgatggttttgagttccacgttcacgtttggaggacttccaaaggagaactattcaaaggcattctcgccactagctgaaaaaaaagaaacaaaaagcaaatatgacgaccttttggatctgtactacgacggtatattacaagtgctaagttccattccagatcccgtttacaacgtcgcaaaactagatgtatctgaatcgaaatcatccgctgctgaaactgaagctgaaaagccagttgctgcaaagaagataccgacggaagaaacaccctga

SEQ ID NO: 82617 - DNA, 369 bp, Saccharomyces pastorianus
atgttgaatttggcatcaagagcgtcatgtgtgacaagacgtcaagcaagcttgtattttgttaaaaatcaaggccctagattaatagcttccactattccctcgtgtcattggcctttgagagcgcaaggagtacagcccaactatcctttatctttgagattttattctactgataagtcgaaaagtgttacgaagcccgtagctccaacatccaccgatgctcctgccaagcccaaggagacgcttatggtcaaagtgaagcacgccttgaaacattatgctaatgggacgaaacttttgggttacgaaatccaagtttctactaagcttttgattaaattgctcagggttacgaggggatcctct

SEQ ID NO: 82618 - DNA, 354 bp, Saccharomyces pastorianus
atgtcgaaactatcgtcttatcctcatgccgccgattttataaatatggaagaaccgccaaaatctaaagagtttttcgatgatctttgtgccgtccctaatttactcaaaagacgttttccaaactctcgaagatcgacgcattattgtgaggctttaaattattctaggaaaaagcttcctgttgtgttgtctaaaatgacactgcaagagttgaggcacaatatgtcaacattttttttgcaggaaaaggatcaaataaatatttatgacacctgtaaggtgatagacatgggggaccgtgtcttgctcgaaactatgcctccacagccaagagatttatttgaaaaatag

SEQ ID NO: 82619 - DNA, 507 bp, Saccharomyces pastorianus
atgtcagtttccgctatcgcccccagacggaagagacttgcagatggtttaagcgtcactcagaaggtgtttgtaaggtctcgtaatggaggcgctaccaagatcgtaacagaacactatttaagatcggacatcccatgtctttcgagaagttgtaccaagtgtccgcaaattgtcgtccccgatgctcaaaatgagttgccgaagttcatcttgtcagattctcccttagaattaagcgcacccattggtaagcattacgtcgtcttggataccaacgtggtgttacaggcaattgaccttttagagaatccgaattgttttttcgacgtcattgtcccccagattgtcctagatgaagtgagaaacaagtcatatccggtgtacacgagattaagaactctatgcagagatagcgacgatcataagagattcatcgtgttccataacgaatttagtgaacatacttttgtggaaaggcttccaaatgaaaccgggatcctctag

SEQ ID NO: 82620 - DNA, 132 bp, Saccharomyces pastorianus
atggtggctaaagattgtgataggaattgtgatgatatagagatcttctcagaacccgttaggcaactacaagataattctcgggaaagaagaagcttgaggcgttatgccagtaaacggtctatagtttga

SEQ ID NO: 82621 - DNA, 2031 bp, Saccharomyces pastorianus
atgacagaaattattgatttagacttggtcgatgactttatcaagaaacctatggtcaaacaacagaaaaaccagtcttcaaagcctagggtaaaaagaaggggtcagttgacgtttgatgatttcagaaacatcaaaattgtagaagaacctgttgtactttctcacaatagttcaattgacgaatcactggatgctgctacccaaaatactaataagcgggagaaatatgaaggtacctgtgatgaagaaatgaaaactaaagaaatggaggcaaatatggcaagcaaatattctaatatcaaaacacattcgaacgacactaacaaggtagagtcgatcagtgaacacactgcttctaataatagaccattgaatacattaaactggtcaccaaatattcctttacgatattctgactttgcaaagtttatgagtgatgagacggtaacggaaagcaattgggcgcctcccctttgcacccctctcccatatgcaggcgatgttatgaagatcctttcttttatcgtcaaatttaaatgggtgttcagcgacgatctactgaacctgtcatttcaagatgtggagataggactaaaattagaggtggctggccattctgcgaagaatattcgaatttgtcaggataaaatgaatctactattttgcagccttttgaggttattattctgctccgagaaaagagcagacaaccaaactcatagaaatttcacgctaaaaagatttcttagtttgaaaaatccatatggaaaactggttggcaaactcagaagcttaatccaggagtggggcttaccaaaagaatggcgtggtaatagtgatattttatctactctaaattttaatggaggtggtttgttgacgatggaaccattagatagaataatattattgagatgcatgatcgattggaattgtagctactccgcacttttccataatgaaattcaaaggctcactcacttgaaaggcgatacagggttcaaccatcaaacttttcacgccagcaggtttgctatgtgcggggccaataacatattagatagttgtgaagttttatgctctttgatgagtcaaaagttggaaaatcgaaagaaaaggaagcccagcgacaaaggaaaactgagtaagatcaatagtcagatgaaatttctaaagggtgttcggaaatcattgagcgaaaaagtaactacagacagattacgagctgcagttaaaataaatgaagaatggggtgaatattttgcaaacgaatttacacacacaccaattgatgatcccaccgtagacgaaatttacaagttaagggcatcagagtttatgatagcgagaattccacgagttggagatttctacttaccaccattctggattggcaacgaatgcagttcagtaaacactagttacagtttcaatgacatgtcaacttatcttaattactttgtaaaattcaaagaggagggtacaaaaatactgcctgcaaaaaccgcacaaaatgaaaacaagtgtcaacttaaacttatatataggaacactcctgcatgtatccgtaatttacagttcaatgatgttcactttgccgaggtgccgcattggtttgaagttgcaggagactcgaattctttgagtaacttcattgagtatttggaaagtttatcatcacttactgaaaatgacaccgatgatacaaaaaagggtatagacaatctaattgagtttttgaaaattttcagtatattcataaatgagactattcagcgcataactgctgcccctacagacagtactgaaggacgtcatttgcgaacaagctctcagagaagaaccacggtacattactcgagtgatgtaaatggtgacgtttccgaggaaagtgaaaatgaagttgacattgacgttagcgatgactatgattcagaatatctgagtgaggagaatacattgacaagtaaaggtgaagataggacagataaatctttcgggaaaagagaattacataatggtggctaa

SEQ ID NO: 82622 - DNA, 156 bp, Saccharomyces pastorianus
atgattctcgctttgggcgacttcctgattaacagggagacaaagcatgcgagaggccctgggttcaattcccagctcgcccccttttttactattgaaaatagaagtattcggtcagacgtagctgatcgatgtagcatgtgtacgcatttctag

SEQ ID NO: 82623 - DNA, 1686 bp, Saccharomyces pastorianus
atgcctgcaggtcaacaacatgaggcccaaatgcatgcacaggcacaagctcaggctcaggcacaggcacaggtggaacaacagaagcagcaacagcaattcttgtatccagcttcgggctattacggccatccttctaaccgaggtattccacagcaaaacttgcctcctataggaagcttctcgcctccaacaaacggttcgaccgtacatgaagcctatcaggatcaacagcacatgcaaccaccccacttcatgcccttaccatcgatcgttcaacacgggccaaatatggtacatcaagggatagcgaatgaaaatccacctctatcagatctaagaacgtctctcactgaacagtacgctccttctagtatacaacatcagcagcagcacccgcaaagtattagtcctatagcaaacacgcagtatggtgatatccctgttagaccggaaattgatttagatcctagcattgtgcctgtggtccctgaacccactgagcccatcgaaaacaatatatcgcttaatgaggaagtcactttcttcgaaaaggccaagaggtatatcggcaataaacatttatacactgagtttttgaaaattttaaatttgtactctcaagatatacttgatcttgacgatttagtggaaaaggtagatttctacttgggttccaataaagaactatttacgtggttcaaaaactttgttggctaccaagaaaaaaccaaatgtatcgagaatattgttcatgaaaaacatagattggatttagatttatgtgaggcatttggcccaagttacaagaggctaccaaaaagtgacactttcatgccatgctcaggtagggatgatatgtgttgggaagtcttgaacgatgaatgggttggacatcctgtatgggcttccgaagattcgggatttattgctcatcgtaaaaaccagtatgaggaaacactattcaagatcgaagaggaaagacatgagtatgatttttacattgaatcaaatttaagaactattcaatgtttggaaacaattgtaaataagatcgagaacatgactgagaatgaaaaagccaattttaaactgcctccaggtcttggtcatacttcaatgactatttataaaaaagtgataaggaaagtttatgataaggaaagggggttcgagattattgatgctttgcatgagcaccctgcagtgacagccccagtcgttctgaaaagattaaagcaaaaagacgaagaatggagaagagctcaacgtgaatggaataaagtttggagggagttagaacagaaggtttttttcaagtcattagatcatttaggcttaacatttaaacaggctgacaagaaattattaactacaaagcagttgatatcagagattagcagcatcaaagttgatcaaacaaacaaaaaaattcactggttaactcctaaaccaaagagccagttagattttgatttccctgataaaaacattttctatgatatcttgtgtttggctgacacttttataacccataccacagcctattctaatcccgataaagaaagattgaaagatttactaaaatacttcatctcttcgtttctttctactctcttgggaaaacatcgaagaactcgtcgctactcccataagccaaacgtgtcagaatctacgcggatctga

SEQ ID NO: 82624 - DNA, 1467 bp, Saccharomyces pastorianus
atgtcacaggtttggcataattcgaattcgcaatcaaacgatgtggctacttcaaatgacgctacgggttccaacgaaagaaacgaaaaagaaccgtccctccagggaaataagcccggttttgttcaacagcagcaacggattactttaccctcgctatctgccttgagtactaaggaggaagatagaagagattccaatggccaacaggctctaacttctcatgctgctcacatattaggttatcctcccccacattcaaatgctatgccctcaattgcaactgattcagcattgaaacagccccacgagtatcaccctcgccctaaatcttcgtcctcttctccctctataaacgcttcgcttatgaatgctggtccagctcccctccccacagtgggagccgccagtttttctttgtcgagatttgacaatccattaccgataaaagctcctgttcatacagaggaaccaaaaagttataatggtcttcaggaagaagaaaaggcgacgcaacgacctcaagattgcaaggaagttcccgctggtgtgcagcctgctgatgcccctgaccctagcagcaaccatgcagatgctaacgatgacaataataacaacgaaaattctcacgatgaagatgctgactacagacctctaaacgtgaaggatgccctatcttacctcgaacaggtcaaatttcaatttagttcgcgtccggatatctataatttatttttagatattatgaaggactttaaatctcaggcaatagacacaccgggcgttattgaaagagtatccactttgttcagaggttatccaattttgattcaagggttcaatacttttctaccccaaggctatagaatccaatgctcctctaatccggacgaccccattagagttactacaccaatgggtactacgacagtaaacaataacatcagtccatctggtagaggtacaacggatgcacaggaacttggttcttttccagaaagcgatgggaatggtgttcaacagccctccaatgtgccaatggtgccttcgagtgtgtatcaatcggaacaaaaccaagaccaacaacaatctttgcctcttttagctacttcttctggtttaccttcaattcaacaacctgaaatgcctgcacatcgccaaatcccacaaagtcaatctttagtacctcaagaagatgttaagaaaaacgttgatgtcgaatttagtcaagccataagctacgttaataaaattaaaactagatttgccgaccaacctgatatttacaagcattttctggaaatactacaaacttatcagcgagagcaaaagccaataaacgaagtctacgcacaagtgacgcatcttttccaaaatgctcctgatttactagaagatttcaagaaattcttgcccggactcttcagcttctgccaatcagcaggtgcaaaatgctcagcaacatgc

SEQ ID NO: 82625 - DNA, 426 bp, Saccharomyces pastorianus
atgggaaaaggtaaaaataagatgcacgaacccaaaaatggaagaccacagagaggcgctaatggacacagttccaggcaaaaccataggcgcatggaaatgaagtacgataattcagaaaaaatgaagtttcctgttaaactggctatgtgggattttgatcattgcgatccaaagagatgcagtggtaaaaaacttgaaaggttgggtttaattaaatcattgagagttggacagaaatttcaaggtattgtcgtttcgccaaacggcaaaggtgttgtttgccctgatgatctagaaattgtcgaacaacacggcgcttcggtggtcgagtgttcttgggcacgtttagaagaggtacctttcaataaaataggcggtaagcacgaaaggctgctgccgtatttagtgccgctaatcaagtaa

SEQ ID NO: 82626 - DNA, 219 bp, Saccharomyces pastorianus
atggattgggccagtgaattgttatcacacttctcgtggggaatgggatttttagaattaaacaaagaattgcttgaaatctatcagcagtgcactgactgcgactctgtaaagagggctgaagaggaatggttgcaaaaattagaaaaggaaactcaagaacgaaaatcccgagctaaagaagaagatatatggatgatgggtgtaacattaaattag

SEQ ID NO: 82627 - DNA, 387 bp, Saccharomyces pastorianus
atggcttactctaaaatcacattactagccgctcttgctgctattgcttacgctcaaacccaagcacaaatcaacgaattgaacgttgctttagatgatgttatgaccaacattaacgactacatcaccctatccagcactccaaattcaggtctttccttggaccaaattccagctggtattatggacattgctgggcaattgcttgcaaatccaggtgatgactcctacaccactttgtactctgaagtggacttttctgctgttgagcatatgttgactatgctcccatggtactcttctagactgcttccagaattagaagcaaaggatgcttctctaactacctcgacctgcaggcatgcaagcttgcactgccgtcgttta

SEQ ID NO: 82628 - DNA, 1683 bp, Saccharomyces pastorianus
atggaagagtgctatgacgatgaaacagactctttttcaccaaatttgcaatattatttgagagatacattccaatcatcaccttttctgaatactagaaaagagaacaaatctgaatccagtagttttccaatgagatcctcaaagttgttggaaaagaattctgacatcaaaaaatatttcttggtatccaagaatggaaaaatagtgaggagagactatccaagcacgccagtaattgtcaacgaaacgttgatgataaacaggtttgaaaagaactggataaagttatggcgccaaagaaaactacaaataaatgaaaggctgaatgacaaaaaaaaatggtttacttacccagaacttatcttctctgaagagcgtattaaaccgttatatagaggagatgatagtgcaccatgtacaaaagaacaaaaaagaaagcataaaatacttcaacaaaaggtcggatatcccaataaccctaagacaatagtttgtcacattaacggaaaaaaacatacgtgggttgccctagactggacagtctacaagtttgcacgaaatcttgatcacattgttgtcataactacactgccaaaactgatttctaacaggaaaaaaactgcaaaagatgatacagaatgggcaccgggatatcaaaaagaagtaatagatcaaaaattaaacgacatttttgattatattttacagctagtaaaagtggtcaaaatatccgtcaaaattactttagaaataattgtaggcaaaattaaaaaaagtctggtagatgtcattaatgtctatactccagatttcttagttcttgctactttaaagcacgagcgaaatgagaatcttattacatataaatccaaaaagctgacagatgtctttcctgttagttatccgattcccacatttgttgttccctcgaaacgaatgtattcgttcgaactgaatctacagagagaagtaaatgaacattatgtctcaaaaaatcatatgaagcacgaacatactgacgttgagagcatgagcagttcaatgttcaaaaaaaatacaatatcagatatttcttcacatatttccgtagattcgtacgccgaagatttcaaaaggcaaggttacatcaaaaagcagttcaacacctctaatgattccattccaagaaaattgactggtctcgcccagcattcaagaaggaagatcacgggtgatatagaaaaattacaagacgatgagaaagatagagaatgtactaaggaaaaacttttgttgaagaaaattgatatcataattagagagtcattgaagtcttctttagcgatagaaacgttgcctggtaaaaatgtatcgcagtccagtcacggtgaccaaatttccagctttaagaatgctttgataggcaatgggtcgaaaaacacaaagtttagaaaatctttaataccatattcttcctcagaggaacaaaataccacaacaacgattaaactcagtagctcgcctacgtcccagatcaagtttgcaacctctgtaaaacatagagatggaagagccgcccttggcaaagccagaaatctgcctgatataaggcacagtatgtccttcgacaaagaaaattcctttgatccatctgataaaagcagtagtgttgataatagcattcctttgaggaaagtttaa

SEQ ID NO: 82629 - DNA, 186 bp, Saccharomyces pastorianus
atgatttctgtttgcccacaaaatgacttgcaaaaatgctacagaagcctcacattcgatgttccaggacaacaattcgaagagagaaatgaacaaacccttaaaaacgggccaaaaagaaaggcagtttccaaccatctgttgcctttgacacagtgccttccaccgctggttattcttctatag

SEQ ID NO: 82630 - DNA, 291 bp, Saccharomyces pastorianus
tccttcagagttaatggcgctgtcagtggccctagttcatcacggtccgtagcacgggtcttactgtctgctcttcccgcgtcttccctgctcggtttccctgcggtcctacgctatagcaccagtgccaaagccccggcaggggtttctgtggcgggtatccctcaattgcgggtaacaataagtaactcaacatcacgaacgacgtttaggtttgctgttaccacaaagggtaaaacgtcaataaaagcaagcaatattattcgtgccagagaactatatctggcgtag

SEQ ID NO: 82631 - DNA, 1200 bp, Saccharomyces pastorianus
atgacttcagtatcaccctcgccacctgccagtcgatcgggctcaatgtgctccgacttaccgtcccctttgcagactgagaaactggcacatattataggtcttgatgccgacgatgaagttctccggcgcgtaaccaagcagttgagcagatctaggagaattgcttgtctgactggggcaggcatttcgtgcaacgcgggcattcctgactttcgctcttctgatgggctctacgacctagtgaaaaaggattgttcacagtattggtctatcaagtccggcagggaaatgtttgatatttcgctatttagagatgacttcaaaatatccatttttgctaaatttatggagaggctctattcaaatgttcaattggcaaagccgactaagacgcacaagttcattgcgcatctaaaagataggaacaaactgctgcgctgttacacgcaaaacatcgatgggctcgaagaaagcataggacttactttatcaaataggaaactaccgcttacctcatttagttcacattggaaaaatctggatgtcgttcagttgcacggcgacctgaaaactctttcgtgtacaaagtgcttccagacttttccttggagcaggtactggtctcgttgtctaagaagaggtgagttaccattgtgtccggattgcgaggcacttatcaacaagagattgaatgaaggaaagcgaactcttggttctaatgtgggtattctaagacctaatatcgtcctgtatggtgaaaaccatccatcctgtgaaattattacgcaaggcctaaatcttgacataattaaaggcaatcctgattttttgatcatcatgggtacaagtttgaaagttgatggtgtgaaacaactggtaaaaaaattaagtaagaaaattcacgatcgtggcggcctgatcattctcgtaaacaagacatccattggcgaatcctcctggcacggcattatagactaccaaatccactcagattgtgataattgggtcacctttcttgaatcccaaataccagatttcttcaagacgcaagatcaaattaagaagttgagacagttaaaaagggaggctagcgacttgagaaagcaaatgaaggcccaaaaagactcaatcggacccccccaacaacccctctacgaactgcccaggggattgatattcaaggaaacaacgaattga

SEQ ID NO: 82632 - DNA, 453 bp, Saccharomyces pastorianus
atgttaatgcaaataaaaatggacaatcatccttttaattttcaacctattttagcttcccattcaatgacaagagacagtacaaagccaaaaaaaatgacggacaacgctttcgtgccaagccctcctgtagggtttattaaagaggagaacaaggctgatttgcatacaatttcggtagttgcttcgaatgtgactctaccgcaaattcaactcccaaagattgcaacacttgaagagcctggttatgagagcagaactggctcacttacagatctttctggaagaagaaattctgttaatataggagcattgtgtgaggatgttccaaatactgcgggcccacatattgcaaggccggtgacaataaacaatttgattcctccgtctttaccaagactgaacacataccagcttagaccgcaactaccagatactcatttaaactgtcac

SEQ ID NO: 82633 - DNA, 348 bp, Saccharomyces pastorianus
atgaacacacaagaactatgtaagattttcgtagccagagaatatcctctggtagtggtgctctttatatattttgttctatttttacaccagaagtatcacactactctaaattatgtctggtaccctacgtgttctaaaagaatctgggtgagagaaaaaggaagaaagtgctcctttttttttttttttcaaaggtgcctcggtccgatggcttcgcaaacaatagatgccaaaggaaatgatcttctctttttcgcttctttatttttttttaagttacgacttcgtgcagcctgggatgtaccaagcttgttgttaaacgagcctgacttcttaatcgcttaa

SEQ ID NO: 82634 - DNA, 834 bp, Saccharomyces pastorianus
  modified_base (811)..(811): a, c, g, t, unknown, or other
atgtcggaagacgaattttttggtggtgataatgaagccgtttggaacggttccagattcagtgattcacctgagttccaaacgttgaaagaagaggttgctgcagagttatttgaaataaatgggcaaataagcctgctgcagcagtttaccgcgacacttaagtcatttatagatcggggagatgttagtgcgaaagttgtggaaagaattaataagagatctgtggcaaagatagaagaaataggcgggctcattaaaaaggtcaatacatcagtgaaaaagatggatgcgattgaggaagctagcctggataagactcaaataatagcgagagagaaacttgtgagggatgtccgttactcttttcaagagtttcaaggtattcagcggcagtttacccaagtaatgaaacaagttaatgaaagagcaaaagaatctcttgaagcaagtgagatggcaaatgatgctgctttattagatgaagaacaaaggcagaatagctcaaaaagtactcgaataccaggcagccaaatagtcattgagagagacccgataaataacgaagagtttgcttatcagcaaaatcttatcgagcaaagagaccaggaaatcagcaatattgaaagaggtataacggaactgaacgaagtttttaaagatttgggaagtgttgttcaacagcagggtgtgctagttgacaatattgaagcaaatatttatacaacgtcagataacactcaattggcttcagacgagctaaggaaggccatgcggtaccaaaaacgtacgagcagatggagggtgtatntgttgattgtgcttctcgtaatg

SEQ ID NO: 82635 - DNA, 936 bp, Saccharomyces pastorianus
atggctaaaagacccttaggtttaggtaaacaaagtagagaaaagaaaagaaaggtggaaagtgtcgaaaagaagagcgatgaaccttccagagaatccacacctgtgagaagtcaaatgagtgttgagcttgacgatgatgctgatttagatgatgaattagctcagctgaaaggactgtggtctaaatattttcactctgacagagacgatgaatatgttttaaatggaatcgttcacgaatgtgacagattattgcgtctttctgaagaagataaagagatcaagaagacgctgaacgatattttccatggtatatatgctctggctttatctgaattgactattttcaaggcaggcgatgaggaagccactgaagaaaagagaaaaaaagatgtatcctcattttttgaaaatgctatcgaaagagtcgaattaggtctttcgcatttccctgaatcccaatttctaaaactagttttagcaaagataattttccaaaggattccgttggaatatatttccaatctccatttgaaatcgaaggataaaaaacttgatcttgtaggacagcttgaacatggtaagaagcatttttcaatttatgaaaacgatactgagtttacttttgaaatcctacaaatggtgaatgacttattggacatcgtcgagaattttggtcgcgaacaatctattcaagagggcatagatagcgataatgaagaggaagaggaactcattgatattgagttggaaccagaacaccctgtatatcccctacaacaatcgctagaagccaattatgagtggctaagaaaccattttgataaattgcttgacaacactaatacagatatgaaaatatatgcatcaatagctaacaccctaggggaactatatttaaaaaaagctgaagaaccaagtaaagtttcctaa

SEQ ID NO: 82636 - DNA, 1188 bp, Saccharomyces pastorianus
atgacttcggataaacacctttttgtgctgattcacgggctatggggtaactatactcatatggaatctatgaggacaattttatccactacattaaaaaaggaagatgttaacgatgatatgatatattttttaccaaagcagaatgccatgtttaagacgtttgatggtatcgaaatcattgggtacaggacattgattgaagtttgtgaatttatccgagattataaagacgggaaaatcgccaaactaagcgtaatgggatattcgcaaggcggattagtggcccgatttatgatcggtaagatgttgaccgaatttaaagaactgttcgaggatattgaaccacaattattcattacaatggcaacgcctcatttgggggtagagttttacaatcctacgggcatagcatataaaagtgcgttatatagtgcgctgaggaccttgggatctactattttaggtaaaagtgggagagaaatgtttatcgcaaattctagtaacaatatattggtgaaattgagccagggtgagtaccttgaagcactctcgctatttaaatggaggatagcgtttgcgaatgtcaaaaatgaccgtacggtagccttctatacggcgtttattacggattgcgacccatttatagattttgacaacaaattgaaatatacattcgaagaaaagattccgggatctggctataaaggaatattgcctaagattgtcgacctaaacgctttaaacgttaacagccatgctcctactaaaccgaccaagacttataaaaagtggggacgcactattcttattatactagttgcaacattcttaattctcccaatagccctggttatgaatggcctgggaaccgcttatagttatattgttacttgcaagtaccgcaaaatgctctctaatggcattcttcacaatgaggtcagaggaaaattaggattgacggagcaactgaaaggctatgttacagatgcatacgggtccatcataaattcggctttagatatggatgcgaactatgaagcaagtaatagtaatcttgtaaacgaagaagagcttccttggaaggaatttatccaaaaatacacaactataaatgatggtgtttggaaatctaaatttaaaaaactgccttttgatgaaaaccgaaagttatttgagaatctaaca

SEQ ID NO: 82637 - DNA, 435 bp, Saccharomyces pastorianus
atgaacttaatacaaaacaatgttgtctttgccttattcattcatggactatctgatggaattgcattaggtacgacaacgaacaatgattcactgctcatagtggtgttaattgctatagttattcataaaattcctgccgttctttccctcactagtttgatggtatcgagacaaaacttaatgaaatgggaggtgatctgtaacgttttcttgtttgcgtcatcgactccgatcggatacatagtgttatcccttttgaatttgagtcattcgccaacgatggattggataagtggaaatcttctgcttatgagtggtggcagtttactatatgcgtctttcacagcatttgttggtggagatctcatgatcacgatctcagcgttgaacaggaagtcgttttacctcatgatgaatccgtttatgttttga

SEQ ID NO: 82638 - DNA, 354 bp, Saccharomyces pastorianus
atgaagtttttgggtgtaatactgctagcaagttttcttttgattgctaccttcctcatagggcttatcccattgtattatattgataaacaaaaaagttccattgtcacaaaccaagaaggtgctgactcaatttctgattttactacgaacgcagatactcaaacgatcaatgacgatgttagtagttaccgtgtgaagattgccgttctatcacaattcggtataggaatgttgttaggtacatcatttatgttggtaataccggaaggtatcaaagcgtgtgtcgaacatgatgggaacgttggtgtgaatttattaattgggttttctaggtgtttatgttctcgatag

SEQ ID NO: 82639 - DNA, 1164 bp, Saccharomyces pastorianus
atgtatagtaatagacagaaattggatttgccagaattattacaatacaaccaaggtgttcttgctgtcactgtccttaatggggaattgcccgactctgggctatacgtccaagcgtttttcgatgataatggtcatccaagatttgttagtccgcgtattccatcgagaattgtcaagaatggttggtcaggtgacgtgatcataaaagaattggacaaatccattaccacttttagagttgctaaaaataaaaactacaacagagtggagaaatgcatttgtgaagtagaactacccacacaagagttagttaagaactgttattataagccatcaatattacatctttcaggtgaaggcagtgctaaactaatgctccaaatatcatggttccctattgatacaaaacagttgccggcaaatgacctgatcacaaattctggtgatttaacgattatgtcgaggagtgcagaaaacttgatagcatccgatttaaatggttattcggactcatacttaaagtattacatcaataatgaggaagactgcgcttacaagacgaaggttgttaagaaaactttgaatcctaaatggaatgatgaaggaactattcaaatcaataaccgtttaaatgatgttctaagaatcaaagtcatggactgggatgccacatctgcggatgataccattggtacagcagaaatcccattgaataaggtcaaagtcgagggtactaccgaattagacgtaccggtagaaggattagagaacgctggtcaagacggtggtatgttgcatttagctttcagctttaagccaagatacaccattagcgtgagtaaaagagaaaagaaggtcggagatatagcatccaagggactaggcactggtttgaaagctggtacgaccgtgataggcggcggtgttggtgccattggcaagatcaaagaaggggtattcggtggactaggcagcctcaccaaccataagaagagtcatgagatgggcgaagaagaaactaagtttagcgagaaagagagggacaagatgccctgtgttaaatataaatttcgttttattttcttttatatttttttaaaatctttatctagtataactttccatctctttgttatggtgaaaacaaaaaaaaaaaactga

SEQ ID NO: 82640 - DNA, 2340 bp, Saccharomyces pastorianus
atggccaaagaagatactggggtaacagcaccaaagaagcccgaaacagcccaagtagctaacataaatgggatagataagttagaacctccaaagacgaaagaggaaaccgaatccagtaaaagcgtgtcatctgagaaggcggcacatgctagtgatgaaagcttcaagagaagtatccatgaagcttcttatgtcggctggaaacagattggtggctgggaagacaaagacgaattaactttagatgatgaattgatggatatgagtagagaaaccttcttaaataacatcataccggacagcctttacggtgactggtatcattcggtagccattttctttatcggaggcgtggcatcatttgcacttggtcattataagttttcaatggggtcggccttttttgtcatcgttatcacttcattgttgtatagaacctctgctaaaaagtacagaggttccataagagagttggtccagaaagagttcacggtgcagaaagtggaaaacgactatgaatccctagaatggttgaatgcctttttggataagtactggcccattttagaaccttccgttagtcaattaatcgttcaacaagctaatgaacaaatggctactaatgaggcgattcctaaattcattactcaactatggatcgatgagttgacacttggtgttaaaccccccagagttgatttggtgaagactttccaaaacactgcatccgatgttgttgtgatggactggggtatttcttttactcctcacgatttatgcgacatgagtgctaagcaagtcagaaattacgttaatgaattagcggttgttaaggccaaaatttttggtatcaccatccctgtttctgtgtcagacatcgctttcaaggctcatgctagagtgaaattcaaattgatgactcccttccctcatgtcgaaactgttaatatccagctactgaaggttcctgattttgattttgttgctaccttatttggccgttccatcttcaattgggaaattttagctatcccaggccttatgacactaatacaaaagatggccaagaaatatatgggtccaatcttgttacctccattttctttacaattgaacattccacaactcttatctggttccaacttgtccattggtatattagaaataactgtcaaaaatgcaaaggggttaaaacgtacctcttcaatattgaacgaatcaatcgacccttacttatctttcgaatttaacgatatatctattgccaagacaagaaccgtaagagacacattgaaccccgtttgggacgaaactctgtacgtcttgttaaactcattcactgaccccttgaccattagtgtttatgataagcgtgcaaaattgaaggataaagtcctaggcagaattcagtacaacttgaatactttacatgataaaaccacgcaaagaaacttaaaagctcagtttttaagaaactctaaaccggttggggaattgacttttgatttaagattcttcccaactctagaagagaaaaagttgccggatggatctgtggaggaactaccggatttgaatactggtattgctaaagttgtggtcgaagaaggttctcgttttgctgaagaagaacagaaggttactgcctacgttgaagtttacttgaatgctaaactagtgttaaccactggtaaggcaactgacactggtacattgaagtggaattcagactacgaagcagttatcgcagatcgtcgtaaaacaagatataagtttgtcgtcaaggatggcaaaggagaagaaattggatctaccattcaaaccctgaatgatttaatagatagaagccaagtgaacaaaaatttgattccattaaaaaaccaaaagggtgacataaagattaccacatattggagacctgttagactggagattggttccaactctgtagcttacacgccaccaattggcgccatcagagtattcattgagaaggcaaacgatttgagaaatttggaaaagtttggtaccattgatccatactgtaaggttttggttaatggtttatcgaagggtagaactgatttaaagagccaaactttgaatcctgtctggaatcaagttatttatgttgcagttacttcaccaaaccaaagaattacgcttcaatgtatggatgtagaaacagtcaacaaagatcgttcagttggtgaattcaatgttaacgttcaagatttatttaagaaggatgagaatgataaatatgaggaaactattgatgaaaaagctaaagttggtcgtctagtgatgcctaagaaaaacctaagggcactataa

SEQ ID NO: 82641 - DNA, 132 bp, Saccharomyces pastorianus
atgaacacatcagtcacttccataaagttggtactgttgggtgaggcagcagttggtaaatcgtcaatagtcctaaggtttgtatctaatgatttgacctgcaggcatgcaagcttgcactgccgtcgttta

SEQ ID NO: 82642 - DNA, 606 bp, Saccharomyces pastorianus
atggcgagtgtaccaagtctatgcgacatactgataccgctagaaaagaatagtcgcagcgatggcgatgctgaaagtagcaatacagtcctaattcaactgcgaaaagggcatcacgaacggatgcgttctccttacacaatacaaaagttttacaaatttctaaaaagagctcattgtgaggaaaatttagaatttttcgaaaaagctcatcagttcctccagcttaagcaaaacaggagtattagcgaggagaagctcttggaagtctggaacaagtcgttgttcataaaaaacattgccgtggactcgcccaaagaatgcaacttttcacaggatactagggagatatttgagaagtgctttgctaacaacgaagtacctgccgacgtagacgtcctgtgtgccattagccatgtgatgggcctgttaatggacgggtatcaccgatttgtgagttctgttaatgagaaaaagtactccgccacatatgcccacaatgactctgctatggaacaagatctcaaaaacgagtctacaacttctttttcgtcattaggcgtggaggatatttctgaagatagaaattcgtatgggatcctctag

SEQ ID NO: 82643 - DNA, 2409 bp, Saccharomyces pastorianus
atgattatctttgtttcagaagaacctgagaggaggctagccattgtatccaacttgtatgctcttgttcttaaaccggttgggaaaaagccatctgataaacccctatgtgccattgaacttcttcaaaaaaatgatttgaaaaaatatggcttcaaaagacttacatcacacgaaatttttggtgttatcggactcattgaggttaatggcctgctgtttgttggtgccatcactgggaaatcaaaagttgcacagccatgcccaggagagactgtgaacaaaattttcgctgtcgattttttttgtttaaatgacaacagctgggattttattgaaatcgactcctcaggttatcctgtgttgccggagactgcttcaactgaatatcaagacgccttgccaaaacatccatgctatgaattgaagaaactattatccaatggatctttttattatagttcagattttgatttgacctcaaccttacagcatcgtggatatggtcagcattctttgagtacagatacctacgaagaagaatatatgtggaactctttcctcatgcaagaaatgatcacttacagagatcatttggacacaaatttgaaacaaatcttggatgacgaggggtttttaacaacagttatccgtggatttgcggaaactttcgtctcgtacgttaagaagttgaaagttgctcttaccatcatctcgaaacagagctggaaaagagctggaacaagatttaatgcacgtggtgtggatgatgaggcaaacgttgccaatttcgtagaaacggaattcattatgtattctagccaatactgttatgcttttacacagattagaggcagtatacctgtcttctgggagcaaggtacctctttgatcaatccaagagtacaaattacaagatcatttgaagccactcaaccggtatttgacaaacatatcatgaaatcagtggaaaagtacggacctgtgcatgttgttaatttgttatcaacgaaatcttctgaaattgaactttcaaaacgatacaaggagcatttaactcattcaaaaaaattgaacttcaacaaagatatatttttgacagaattcgatttccataaagaaacttcgcaagaaggcttttccggtgtcagaaaacttattccattaatattggactctcttttatcttctggctattattcttacgatgttagagaaaaaaagaacatatctgaacaacatggcatatttaggaccaactgtttagattgtttggatagaacaaatttagctcagcaaattatttctttggctgcttttagaacttttctcgaagatttccgattgattggttcaaattcgttcatcgacgatgatgatttcgtttctaaacataacaccctgtgggctgatcacggtgatcaaatatcccaaatatatactggtactaatgctttgaagtcctccttttcaagaaaaggtaaaatgtcacttgctggggcattatcagacgccacaaaatcggtcagcagaatatatattaacaatttcatggataaagaaaagcaacaaaatatcgatactttgttgggaaggttaccgtatcagaaagcagtgcaactttatgatcccgtaaacgaatacgtaagtacgaaattacaaagcatgtctgataagttcacatcaacctccaacattaacttgttagtaggatcattcaatgttaatggagcaaccaagaaagttgatttatcaaagtggttatttccaatcggtgaaaaatttaaacccgatattgttgttttaggtcttcaagaagttatagaactatctgcgggttcgattttgaacgctgattactcgaaaagctctttctgggaaaacttagtgggtgattgcttaaaccagtatgatgataaatatctgttgttaagagtagagcaaatgacttctttactaattttattttttgttaaagcagacaaagctaaatacgtcaaacaagtggagggtgctactaaaaaaactggctttaggggtatggccgggaataaaggtgcagtgtctataagatttgagtacggtgccacttcattttgttttgtcaattctcatctcgcagcaggagctacgaatgtcgaagaacgtcgaagtgattacgagagcatagttagaggtattactttcactagaactaagatgattcctcatcacgattccattttctggttaggtgacatgaattatagaataaatctaccgaacgaagacgtcagaagagagttgctcaaccaagaagaaggatatatcgataaactgttgcattttgatcaactttacctaggtattaatcctggcagtgtattcgaaggttcaaagaaccagtctcagttccgtcaacatacagta

SEQ ID NO: 82644 - DNA, 1170 bp, Saccharomyces pastorianus
atgtcatctgaaagcccacaggatcaaccacagaaggagcaaatcagcaataacgtcggcgttaccaccaatagtacaagcaatgaggaaacaagccgctctcaagatgataatgtcaaggaagtcaatggaaatgatgatactaaagaagaggaacaagaagaagacgcagaactagatgatttatttggagatgacaatgatgacgatgatgatgatgatgttaaaaaatcggagactgaaaaaagtgatagtgatagtgatgaagacgacgagggagagaatatcaaccatagaagtcgtcatagagaaagtctcgggttagatgatgatgaagcagaggagcaagccatgtacacccgaaaattttatggtgaggatgctaataacttttctgatcaagatgagactactcacacttttaaagaggaaaatgtagagcttgtcagacatattattccaagtaaagctaatgtgaatgaaacggcgtctcataacgaaattttctatgctagaattcccaactttttaactatcgatccaattcctttcgaccctccaagttttgaggccaaagtaaacgaaagggcaagcaattcagcttctagggaggatcaactagacgaccgcctgattgatgaaaacactgttagatggagatactctcgtgacaaagaccaacatgtctttaaagaatcaaatacacaaatagtgcagtggtcagacggtacatattcgctaaaagttggtgaagagtgtacagatatattggtcaacgatacgagcaacacttttttgacagtatcgcatgaccaacaagagttgatccagtgttacgaagggggtgaaataaaaaagacgttgatgtttattccaacttcgacgaattcaaaaatacatcaaaaactaagtaaagctgttataagaaggaaccaaagacaaagcaagggtcctggaacatacattgtaagtatggatcctgaagtggaaaagaaggagttagagagaaagcaaagccagattttaagagacagaaggagaagacagctcaaagaaaaggagaaacaagaatccccagatgccgcttttgagacgggatttagaaagcaaaattcacccactacctatggagcctcgagaagaactgaatatgaagaagatgacttttag

SEQ ID NO: 82645 - DNA, 624 bp, Saccharomyces pastorianus
atggacatggcgacattgtacgatggtttagagtggattgtcatagatgcttatgtcgtgaaggaagcattgaccaacaggcatcttatcatgcgaaatctagttcaggcacagcagaattcaaaggcgaaacaggaacaagcacgcaggttccggtcaagaagagatattaaccctatgaaaatcgatgaagcactacgtcagttgaaagctgcaactaaaaacgaacaagttttgacccttaagcttcaacgaatcacgtccaacatgattatcgagagaaaacagtggattagctggtatgaagaatggataagaagctcgatcaaagaatttacactaagaaagatagagtatgaaagaaagaagctgacgttactagaacgagtacgttctgatatcagaaaagctgatgaaaacggaggtttgtcacgtctaggacgccatgctgtctcaaacaacaactccgatacttctcaaacccttaaaggggacagttggacgggagagagcaaccgcaaaagtcaaatccccatcacaagatcgctcatactgaatttgatgatgaactattcactgaagacgatgggtacaactctcaggactcagacaccacatcactga

SEQ ID NO: 82646 - DNA, 909 bp, Saccharomyces pastorianus
atgacttcggctgtaccttatgatccatatgatgatctggataacaatccattcgctgagccccaggaggaaggttctgaacctgctgcaacaaccacagatggatcatcttctatgtcagaggagcgtgtaggtaccgagcaaactgctgcttccgttcaggacaacggaactgcaaataacgttcaaaatggtcttggtggggaaggaaacgcaacacgatcaaaaacttcaaacgaacacaatgaaaaccaacaaccatctcaatcatcagaacgtgttatacttcctgaaagaagtgatgagaaaaaaaaatacactctacttgcaaaagtaacaggattggaacgatttggatctgcaaccggtaagaaagagaatccgactattatatttgattgctccacaaatttgccaacatttcgcaaacaacaatacaagaatgtcaaaaaatcatacgaagaattccaccaattgttcaaatatctgaatgttgccattcaggaatcttttgttcctactcttccctctgcgtatactacattcggaattaatagcgaagaagataggatgaaagtaacgcgaaatttccaactttggtttaacaggctatcgcaagaccccttaattattcggaatgaagaagtggcctttttcattgaaagtgactttaatacgtacacacccatcaacaagtccaaatcactcgcatctgggttgaaaagaaaaacattgaaacaattagcacctccatatgatgaaatcacagaattagcagaattccggccattagtcaagtctatatatgttgtttctcagagcttgcaagaaaaactgctaagagtttccagaaatcgcaagatgatggttcaagaagaaaatgccttcggccagatttcgttaatctag

SEQ ID NO: 82647 - DNA, 96 bp, Saccharomyces pastorianus
atggttgctttcactgttgaccaaatgcgttctataatggacaaagttaccaatgtgagtaacatgtccgttatggctcacgtcgatcatggtaag

SEQ ID NO: 82648 - DNA, 1659 bp, Saccharomyces pastorianus
atgagattacattatagaagaagatttaattttttaaggagaatactttttatattatgcattacttcattgtatttatcgagagattcactaaagctacatgcaaaaaatgtattaatggatcataatgtagcagaatatcatggcggaatgatagacgatattcaaatcctgcggtgctaccattggtacaggcaatgtagttctttgtatgccccgaaattacacccctccaatactgctaaaaagatcaaagacaaaaacagcattctgtggaccagagtttctaagaatattactgtagagacattgtattcacttcagtctggaccattctacaacagttacttatatgttcatctgaaagatttccaaagtaatccaaaaaacacaataaaagaactagccatagcaagggactcagcactaatacccctacaagtgctgagagacattaataagttggtgaagtcgagcgacagttctgtcttccacaatcatgtgtatttacgagaaaagcctacttcgtcatggtggaagctgcttttcggcatatccgttgatacagataacatagctgtgttcggtgaggagtgggtatacaaggggagcggcatatggtgtaagtatatccttaatgatgatgataatgacgctcctataactaatttggaaatatatctaggatcatcgtttattgaatcgaggccttcttggaaagaagttatccatgaatttcatagaaataacataccttctctgcccatatcaattacaagaaagcttgaaaccaaaaaccatcatcacaaattttctaatggattgctaggttctttgagaacacccagcaaagacattaatatccaagtggatgcagattacaaaataacatctccccatatacaattttcgaggggacaaagatcgttcaaaattctccaaataactgattttcatttcaaatgtacggataatagcatgaccgtaatcaatgaaataaaaacagtaaattttattgatagggtactcgcatcagaaaaccctgatttagttgtgatcacaggtgatttgttagactcacataatactattgactatcaaacgtgcattatgaaagttgtccaaccaatgatttctaataaaataccctacgcaatttcattgggtgtttctgacgaatccaatttggccacatcggcacaaattagagactttatcaggaatttaccttacacatttaacaacgttgcatcagaagagggtcatatggccatagaaatctcatttaaaaagaagctcacgaagaatactcttttggaaagagacattgataccgaagacgaaacaaacccatcagaggctttatttttcgtctttgattcatttgcgcccgtcaataatttcctacaagattataacgacctgattgggaaaatagactttggcttggcatttcaatattttccattatcggaatataggcctcatggtttatttcctattattgggcagtataatgagaggtctaccttaacagtagatacgccaaggtctagaggacaagtttcaatgacgatcaatggcaaacattacaaaagcttccttgatatcctgagtctttggaatataaaggtgaagagaatgtggattttgatgtaa

SEQ ID NO: 82649 - DNA, 786 bp, Saccharomyces pastorianus
atgagcgaggagtgtattgaaaatcctgaacgtattaaaattggtactgatttaatcaacatccgaaataaaatgaacttaaaagaactaattcatccaaacgaggatgaaaattctaccctactcatacttaatcaaaaaattgacattcctagaccgttgttttacaaaatttggaagctgcatgacttgaaggtctgtgcagatggtgcagccaatagattatatgactacctagatgatgacgaaaccctaaggataaaatatcttcccaattatattattggcgatctggattcactatcagaaaaggtttacaagtattataggaaaaacaaagtaactataataaaacaaactacacaatattcgactgatttcacgaagtgcgttaatttgatctctctacacttcaattcaccagaatttcgctctttaatatcgaataaagacaatcttcagtcaaatcatggaattgaactggaaaagggtattcacacattatacaatactatgaccgagtccctggttttctcgaaagtgactccaattagtctattagcactgggaggaattggtggcagatttgatcaaacggttcactcaataacgcaattgtataccttatccgagaatgcaaactatttcaagctttgttacatgactccaacagacttaatattcttaatcaaaaaaaatggaactttgattgagtatgatccccaatttaggaacacttgtataggaaattgtgggttgttgcctattggagaagcactttggtta

SEQ ID NO: 82650 - DNA, 480 bp, Saccharomyces pastorianus
atggcaacgtacggtttatcgcatacaaggaatacaaaagttggtaacgacatcgtcagaggtgtttccggtggtgaaaggaagcgtgtctccattgctgaagtctccatctgtggatccaaatttcaatgctgggataatgctacaaggggtttggattccgctaccgctttggaatttgttcgtgccttaaagactcaagctgatatttccaatacatctgccacagtggccatctatcaatgttctcaagatgcgtacgacttgttcaataaagtctgtgttttggatgatggttatcagatctactatggccccgccgataaggccaagaagtactttgaagatatggggtatgtttgtccaagcagacaaaccaccgcagattttttgacctcagttacaagtccctctgagagaaccctgaacagagatatgctgagaaaagtattcatataccacagaccccgaaggaaatga

SEQ ID NO: 82651 - DNA, 519 bp, Saccharomyces pastorianus
atgcccgaggccaagcttaacgataacgtcaacgacgttactagctactcctccgcgtcttcttctactgaaaacgctgctgatctacacaattataatgggttcggtgagcatacagaagctcgaatccaaaaactggcaaggactctgaccgcacagagtatgcaaaactccactcaatcggcgcccaacaaaagtgatgctcagtctatattttctagcggtgtggaaggtgtaaacccgatattctctgatcctgaagctccaggctatgacccaaaattggaccccaactccgaaaatttttctagtgccgtctgggttaagaatatggctcacctaagtgcggcagaccctgacttttataaagccttattccttaggttgcgcttggaagaacttaagtgcttctggtgcttccgcagatgttcgctatcagtccattgtggtactattccataccaaattctaaaattggctgagaagttcagcgtgctaagaaccagaattccaatttga

SEQ ID NO: 82652 - DNA, 2085 bp, Saccharomyces pastorianus
  modified_base (1028)..(1059): a, c, g, t, unknown, or other
atggtaatacaaactgctactacgttatcgccagctaaggcaacaccttctttccctcataacgatttgattaaaagtatgtcagacagccctataagtcgccccactcaccctccgattaggaaattaaagtcatccttgaaaatatcacaccctgaacctatttcaagatcaaagtcagaaattttcttcacatcacctgagaaaaatgtacgttttgctattgaattaacaactgttaagagatttgataaaaacgcggagccaagttctatctcaaatgaaaactcacccacattatcccctgttgatagcaataccgctgctgatgacgtccagcttttcaacaatgaggactgctggttcaatgattcttcgttggtcacaaacttgctgaaaaatgaaaagaagtttcgttatatgaattccttaaacaacatgttcaagttggacctttatgattcagaagatgaggatgatattgacgagcacatcaatagccaggccgagtatgggtatacttataattctttatctacccgaggaaaaacttctgaaaataaatctgctacctcttcactggctactcaggcaacaaatatatgtgattggaaacttcactgcacagacttggttcccttcaagatagcccctccactatttaccaaaacattatcggcctccgatttgcaaggtcagctcacaaagtacttaaatggccaaaatgtaaaactgcattctctcactcaattaggcgatgattcaagcaaaattacaggtctagtgtacgtcaaaaacttgagttttgaaaagtatttggaaattaaatttacgttcaactcttggagagatattcattacgttaccgccaactttaatagaacgataaattcgaatgttgatgagtttaaatttacaattgatttgaatagtttgaagtacattttactcatcaaaagaatcattactatggaaaagaatacaagcagctgtccactcaacattgaattatgctgcaggtatgacgnnnnnnnnnnnnnnnnnnnnnnnnnnnnnnnnggtaaaaattatcaccttttcatgactaccttcaagaagggcggtgaaacgaaggaaaagattccagttgtcgtcgagcctgcttctcaaacagatgcagccatgtcgccgaaggaaatgaaagcaaggttcgtctcctcgaatcccactctttcaaggtttttacctcaatcaagaaagttcagcgaggatacagattactataatacatctccattgaaacatctttatcataatgatacgacaagctgggttaagcccaagagattgaacgttgttttagataaacttgaaaatgctacccctcctcctccttcttctgctttggctaacgacaccgccagaactggtaaaataactaaagataagaacaatgtgctcgccccaccaacggccagtaatagtattgacctaccaatattaggatctcaacatcaatcactatattctggttcatcgtcatattcttcatcatcttcctccatttcctcttcattatcctttgcttcttcaaacaattcctccacaaattcttcttccgcctcttgtagtttcccacttactgagctcgataattttgattatgcgaacctatatgaacctaatgataccttcacaacggccaatttgtttaatcattcattaaattccctaatgccggagatttctactccatcattcttcggaggctttagaaatgagaatactattaataacaacgatagtaaaaatttggttacctctttggaggattcatatgaggacaaacaaagtgttattacagatactactatggacgaaaataataaaacttcgactatcaacaattccacagacacgttaatcaaaccctcaaaagaaaatggaacagttaaggagaataaatcatctgcaaacagcaccagtgcaccatcttcatctcagaaccgggccagtacaatactaaacgatcattcgaatgggaagagtgatctcaaatatgtcaactatcgacctgcaggcatgcaagcttgcactgccgtcgtt

SEQ ID NO: 82653 - DNA, 543 bp, Saccharomyces pastorianus
atgagtattgtctattatggttccaacgcttggttaggtggcctttgtgtaaacatgatattagattcttggtctcaccactatttgcatctgcccaatactttgtcctcgaaagttgccatgaccaccaaggaattgatcggcttcattatcttccatatccttaccgcgttctgttactttatgaagccataccatatgaactatattttaatttggtcgtgtgttggtactttcttcgccatgttgggtatggtaatttacttaactaagagcgcacatggtgttggtgacttgttcacttctactcattccacagttactggctctaaaaaggcttgggcttgggtttatacgatctcgtactggtacggttctgtttctccaggctgtaccaatcaaagtgacttctccagatttggttcctctaattgcgctatctggactggtactatagttgctttattaataccagcaaccttgatcccagtattcggtatcattggtgcttctgcttgtgaaaaattatacggtcaaacattt

SEQ ID NO: 82654 - DNA, 153 bp, Saccharomyces pastorianus
atgagtttcggtacgaaaatctccagggctttgagatttttggaaattcctgtcaaaaatagggcctccgtgaattttttaagaaaccctgatttgcaacctatcaagtctgttaatcaaacgtgggtttcggtctatttgcgtagactctag

SEQ ID NO: 82655 - DNA, 1230 bp, Saccharomyces pastorianus
atggctgaactgagcgaacaagtgcaaaatttaagcatcaacgacaacaacgagaatggttatgttcctcctcacttaagaggaaaaccaagaagtgccagaaataacagtagcaactacaataacaacaacggcggctacaacggtggccgtggcggtggcagcttctttagcaacaaccgtcgtggtggttacggcaacggtggtttcttcggtggaaacaacggtggcagcagatctaacggccgttctggtggtagatggatcgatggcaaacatgtcccagctccaagaaacgaaaaggccgagatcgccctatttggtgtccccgaggatccaaatttccaatcttctggtattaacttcgataactacgatgatattccagtggacgcctctggtaaggatgttcctgaaccaatcacagaatttacctcacctccattggacggattgttattggaaaacatcaaattggcccgtttcaccaagccaacacctgtgcaaaaatactccgtccctatcgttgccaacggcagagatttgatggcctgtgcgcagaccggttctggtaagactggtgggtttttattcccagtgttgtccgaatcatttaagactggaccatctcctcaaccagagtctcaaggctccttttaccaaagaaaggcctacccaactgctgtcattatggctccaactagagagttggccacccaaattttcgatgaagccaagaaatttacttatagatcctgggtcaaggcctgcgtcgtctacggtggttctccaattggtaaccaactaagagaaattgaacgtggttgcgatcttttagtcgctactccaggtcgtttgaatgacttgttggaacgtggtaaaatttctttggccaacgtcaagtacttggttctagatgaagctgatagaatgttggatatgggtttcgaacctcaaattagacatattgtcgaagactgtgatatgactcctgttggtgaaagacaaactctgatgttctcagctactttccccgctgatatccaacatttggcccgtgatttcttaagtgactacatctttttgtctgttggtagagtcggttctacttcagaaaacattactcaaaaagtcttatacgttgaaaatcaagataagaagtcagccttatatggatctaatatgtctgcatccactgacggtttgactttgatctttgtcgaaactaag

SEQ ID NO: 82656 - DNA, 387 bp, Saccharomyces pastorianus
atggatcattcaatagaagtcactttcagagtaaaaacacaacaggttataataccggaacaaaacatccggggaaatgaacttcccttgcgtcggtggcaaatggaactcatcatgttagatgcaacaggaaaggaagtggagcctaccatcctctctaaatgcatataccatttgcactctagcttcaaacagcccaaaagacgactgaactcgctgccattttttatcaaggaaaccggttggggagagtttaacttaaaaatagaatgcttttttataggtaacgctggaaagtttagcattgaacatgacttaacgtttgaagataatgcatatgcagttgactataccgttgacctgcagcagcaagctgcactgcctctt

SEQ ID NO: 82657 - DNA, 387 bp, Saccharomyces pastorianus
atgaataaatcatgctttcgttttcctttttttgctaccaccaggtttactggtggcagtcttcctcttcgtaggtttggctttctgcttgataagtttatccttcttcaagtctgtgctactatcttgtgtttcttcatcatctgcgggaactggattgtcatctgcatcaacgacatcttcgaaatcgggggtgctagtactggtgccaccaccaccaccaccaatagtactacctgttctgtaaattgcgactggatgtgtcatactgttgtatttccgcgtgaatccacttttaaccgtagctggtatctttttgataattgctgtggtcacatcaggacctacgaaaaactccataatagaatcccaatcttctttggttaa

SEQ ID NO: 82658 - DNA, 237 bp, Saccharomyces pastorianus
atgttcgccagactcgctaatcctgcccacttcaagcctctcacgggctcccacataacaagagctgccaaaagattttaccatcctaaggtaattgaccactacacaaacccaagaaacgttgggtccatggataagtccttagctaatgtcggcacaggaatcgtgggcgccctgcatgtggtatgtgataaaacttcaaataccgggaaggaaaaccggaatatcgagacgtaa

SEQ ID NO: 82659 - DNA, 1809 bp, Saccharomyces pastorianus
atgagtgaactgcttgccattccacttaagcgaactttagaagtggactttgccacggagttgtcaaaactaattgatactacttcctttcaaacggcatcctttttccaatcagacatactcaaagttgttgatgcaagaaacaatgcgattgcacccgatatctcaatcgacggtctttctgcactgaaggaatactatgtaatattgttgcaattagagaaaaagtttcccaataatcaaatagaatttacatggtttcaaacgctatcacaaaaatctcgtggttctagtcaatactcattacaatgggaaaaattaaccattatttataatattggttgcatgtattcactattggctctaaatagcaacaatgatgcagccgaatccctcaaaacgtcatgtctgtacttccagaatgccgccggatgctttaaacatgttttagaccaccaaaaaaatcttgagacaatcccagtggtagatgacgccacattgaacgctttaacctccctgatgctagcacaagcgcaagaatgcttctggtttaaagccgtgcaagataaacacaaggactccttaatcgcgaagttgtcacaacagatcgtggacttctactgcgaggctattaatgacgcccaaagggggaaacttattagaagtgattggataaaccacttaaaggctaaaaaggcttactttagtgcggtgacttattacagaatagccttatcttttaatgagaagaagcagttcggaaatgtcgtgaaagctctgcaaatgggattgcaatttataaatgaatcaacactatcttcgcaagctaagtttaaaactgttgtcgaatcttctctgaaagaagcccaaagagacaatgaattcatctacttgcaagaagttccttcggaattaccatcaatcaaaccagctctcatggttaaaccatcttcttcagcaacattgttgccttctattaaaaaggatgagactttattcaaagacctaatccctatagaagtgatggaatattgcacagcatacaatgaaaggcaagatgaatacgttgaacaacgtgttaccaatccccttgcttccctaaataaactattgaaggagtccatgactactttccaaataccacaagggcttacaaaggtgagtgaagcagaactgagtcattaccaggcatcactgaataatcttctcattaataataaaaatgtgcaggtacaactcgacaacattgagcaaattttaaatgaagaagcatttactgacaatcagctccgactaaaacacggaaccttaaattggactttacctgaatcttcaactactaacacagcatattatgaaaaactaaaaaagctgagaggataccttgatgaaggtagtgcgattgacaaacaaacaaatgaactatttcaaagcatcgataaaaatttgattggatcagagatcaggttaccggaatctaatgatcctctaacgaataagattaagatgatcatacaggaaagaaatgattatattgataggacgaggcggaaatcttcagaatatagaatacttccaaagatcattacatcgtataaaaaaaatggaacagtcgactttgaaccaattttcatagaccatttaaaatactttgacgaagatttaagatacgttaatagtacaaaggaagaaaatatcaaacttattgaggaagtaaacctaaataagaagaataaccccggcaaaagcgggattgaaccaaagaaaatggtaagaatagatcccagagagctatatattgagatctga

SEQ ID NO: 82660 - DNA, 4806 bp, Saccharomyces pastorianus
atgaacataccacagcgtcaatttagcaacgaagaggtcaaccgctgctatttaagatggcagcatttgagaaatgaacacggaatgaacgctccgagtgtgccggaatttatctatttgactaaagtgttgcaatttgctgccaagcagcgacaagaattacaaatgcaacgccaacagcaaggcatttcaggttctcagcaaaatattgttccaaattcttcagatcaagcagaactgccgaataatgcttcctcgcacatttctgcttctgcttccccgcatttagctccgaatatgcaattgaatggaaatgagacctttagcacttctgctcatcaatcaccaatcatgcaaacacagatgccattaaatagcaatggtggtaataacatgctaccgcaacggcaatcttcggttggttcattaaatgcaactaatttttcaccaacaccagcaaacaatggagaaaatgctgcggagaaaccagataactcaaaccataataacttaaaccttaataattccgagcttcaaccgcaaaatcgatcattacaagaacacaacatacaggattcagatgtgatgccaggttcgcagataaattctcctatgccccagcaggcgcagatgcagcaggcacaattccaagcacaacaggcgcaacaagcgcaacaagcgcaacaggcacagcaggcacaacaagcacaagcgagactgcaacaggggagaagattacccatgacaatgtttactgccgagcaatccgaactgttaaaggcccaaatcacatctctaaaatgtctagtaaatagaaagcctattccgtttgaatttcaggctgttatccaaaaatctattaaccatcctccagatttcaaaagaatgttactgtctttgagtgagtttgcgagaagaagacaacccaccgatcaaaataaccaatcaaatctcaatggcggcaacaatacgcagcaacccggcaccaattcccactacaataacactaacactcacaacgtttctgggcttaccagaaatgcacctttagatagcaaagacgaaaattttgcatctgtttcaccagctggtccatctagtgtacataatgcgaagaatggcaccctcgataaaaattcgcaaactgtaagtggcactccaatcacgcaaacagaatcgaaaaaagaggaaaacgaaaccatttcaaacgtagctaaaacagctcctaatagtaataagacccacaccgagcaaaataacccgccaaaaccgcagaaacccgttcctttaaacgtccttcaagatcaatataaggaaggaataaaagtggtagatatagatgatcctgatatgatggttgattcttttacgatgcccaatatctcacatagtaatatcgattatcagactttattggccaattcggatcatgcaaagtttactattgaacctggcgttctaccggttggtattgacacacataccgctactgacatttaccaaactttaattgcattgaacctagatactacggtaaatgactgtttggataagctactaaatgacgaatgtacggaatcaaccagggaaaatgctctttacgattactacgccttacaattattaccgttacaaaaagccgtaagaggtcatgtattacaatttgaatggcatcaaaattctctattaaccaatacacatccaaattttctttcgaaaataagaaacatcaacgttcaagatgcattgctaacaaaccaactttataaggattatgaattacttaagttagaaaggaagaagactgaggcagtggccagattaaagtcgatgaataaatccgccatcaatcaatataatagaagacaagataaaaagaataaaaggttgaagtttggccatagactcattgctacgcatactaatttagaaagggatgagcaaaagagagctgaaaaaaaggcaaaagaacgtttacaggctttaaaggcgaacgatgaggaagcctatataaaattattagaccaaaccaaagatacaagaattacacatcttctaagacaaacaaacgcatttttagattctttaacaagagccgtgaaagatcaacaaaagtacactaaagaaatgattgattcccacataaaggaagcatcggaggaagtggatgatttgtccatggtccccaagatgaaggatgaagaatatgatgacgacgacgacaattctaacgtcgattattacaatgtcgcacatagaattaaagaagatatcaagaagcagccttcaatattagttggtggtaccttaaaggactatcaaatcaagggtttacagtggatggtttcgcttttcaataatcatttaaatggtattttagcagacgaaatgggtcttggtaagactatccagacgatatccttacttacatatttatatgaaatgaagaatattcgtgggccatatttagtcattgttcctttatctacactgtcaaattggagcagtgaattcgcgaaatgggctcctaccttaagaactatatcatttaaaggttcgccaaatgagaggaaagccaaacaggctaaaataagggcaggtgaatttgatgtagttctgactacctttgagtatattattagagaaagagcacttttatccaaggtcaagtgggtccatatgattattgatgaaggccatagaatgaaaaatgcacaatccaagctttctttaaccttgaacacacattaccatgcagattatagattaattttgacaggtacaccacttcaaaacaacttgccagaattatgggccttattgaattttgtgttacccaagattttcaattccgtgaaatcttttgatgaatggttcaatacaccctttgccaacaccggtgggcaagataaaattgagttgagtgaagaagagacgcttttggttatcaggagattacataaagtcttgagaccctttttattgcgtcgtttgaaaaaggatgtagaaaaagaattaccggataaagttgagaaggtagtgaagtgcaaaatgagcgctttacaacaaattatgtaccaacaaatgttgaaatatcgtcgtctttttatcggtgatcaaaataataagaaaatggtaggtttaagaggtttcaataatcaaatcatgcaactaaagaaaatctgtaatcatccttttgtatttgaagaagttgaggaccaaatcaatccaacaagagaaacgaatgatgatatttggcgtgttgctggtaaatttgaactattagatagaattttgcctaagcttaaggcaactgggcatagagtattaattttttttcaaatgacccaaattatggatattatggaagattttttaaggtacattaatatcaagtacctgaggttagatggtcatacaaaatctgatgaacgtagtgagttgttacgtctatttaacgcccctgattctgaatacttgtgctttatcttatcaactagagcgggtggtttgggtttaaatttacaaactgcagacactgtcattatttttgatactgactggaatcctcatcaagatttgcaagctcaggatagagcgcatagaataggtcagaagaatgaagttagaattctaagattgattactacgaattcagttgaagaagttatcctagagagagcctacaagaagctagatatcgatggtaaagtcattcaagcaggtaaattcgataacaaatctacatcggaggaacaagaagcgttgcttagatctttgctggatgcagaagaggaacgtagaaagaaaagagagtctggtgttgaagaagaagaggagttaaaagactcagaaatcaacgaaattcttgctcgaaatgacgaagaaatggctgttcttacaaggatggatgaagatagatcaaagaaggaggaagaattgggagtaaagagccgtctcttagaaaagagtgaattacctgatatttacagtagagatattggtgccgagcttaaacgtgaagaatcagaatctgctgctgtttacaatggaaggggtgcaagagaacgtaagacggcaacttacaacgataatatgtctgaagaacagtggttaagacaatttgaagttagcgatgatgaaaaaaatgacaagcaggcaagaaaacaacgaacaaagaaggaagataagagcgaggcgattgatgggaatggagaaattaaaggcgaaaacattgacactgataatgacggtcctagaattaataatatatcggccgaagatcgggcagatacggatttggcaatgaatgacgatgatttcttgtctaaaaagagaaaggcaggaaggccccgtggaagacctaagaaagtgaaacttgaaggatctgaaaattctgaaccaccagcgcttgaatcaagtccagttactggcgataactctcccagtgaggattatatggacattccaaaaccacgtacagcgggaaaaacatctgttaaatcagcaagaacttcaacgaggggccgtggtcgcggtcgtggtcgtggtcgatggcgaggacgtggacgaggaaggccgccaaaagcaagaaatgggcttgattatgtccgcacgcccgctgcggcaacgagtcctattgatattagagagaaagttgctaaacaagctctagacttataccactttgctctcaattatgaaaatgaacctggaaggaaactttctgacattttcctctccaaaccttccaaagcactatatcccgattactatatgattattaagtaccctgtcgccttttga

SEQ ID NO: 82661 - DNA, 3945 bp, Saccharomyces pastorianus
atggatattccctcttcaaatcaaattcaacatggccaaaggagtgaaaggaaccgaagaatgccgagggcttctttttcttctacagccactacttctacggcggccacattgacttccgcgatggtactggatcagaacaattcggaaccgtacgcaggtgcaacattcgaagccgtgccaagttctattgtatcattccatcaccctcattcttttcaatcaagcaacctcccaagtccgcattcttcagggaacctagagcagagaggccgccgattgactgaatcagagcctttagtattatcctcggctgaacagtctcgaagctcttctagaaacccttctcattttcgatttttcactcaggagcaaatatccaatgctgaaggcgcttccacgttagaaaatacagattatgacatggcctgggatgccacccccgcctatgaacaagatagaatctatggtacgggcccatcttccaggcgttcttctattcgaagtttttccagagcatcatctctctcaaatgcaaagtcttatggatctttcagtaagaggggtcgctctggttcaagggcaccacaaaggctgggagaaaattctgacactgggttcgtttatcattccgctacacattcatcgtccagtttatcgagatatacgaccagagaaagaattcctattgaactagaaagtcaaacagatgaaatactagaagacgagtcttctacacattctttagaatcttcagatagtaggcggtctgcaagcgaaaataatagaggaagcttttctggtcatgatgatgttcataatcagcatagcgaatatctaaaacctgactatcatgaaaagttttatccacagtatgcaccaaacttgcattaccaaaggttttacattgcggaagaggatttagttattggtatcgctgcttaccagacctcaaaattctggtatattatttacaacctgtgctgcttcttgactttcggattagtttatcttttaacgagatggcttccccatctgaaagttaaattttatggcgtgaaagtgccattggctaaagcagaatgggtcgtgatagaaaacgagtttggtgagtttgtcatacaacctatcgatcgacagtggtataatagaccattaagtactgttttaccttttgaaaattaccctaatccgtcatatgaaccaaatgatatcaatttgagccaccaccatgccaatgaaattaatccaaatgtgcctatcttgatcacatttgaatacagatatattaagttcatatattcaccgctggatgatctctttaaaactaacaataactggatagatcctgactgggtggatttaagtaccgtatcaaatggtttaactaagggggttcaagaagatagagaacttgcgtttggtaaaaatcaaattaatttgagaatgaaaactacttcagaaattttattcaatgaagtgttgcatccgttttatgtctttcaagtattttcgataattttgtggggcattgatgaatactactactacgccgcatgcatttttttgatttctgtactgtctatttttgattcattgaatgaacagaagaaagtatcgagaaacttagctgaaatgtcccactttcattgtgacgttcgtgttttgagggataagttttggacaacgataagctcatcagaactagttccgggcgatatatatgaagtatctgacccaaatataacaatattgccttgtgactctattcttctgtccagtgattgtatagtcaatgaatccatgctaactggtgaatctgtgcccgtttcgaaatttccagctacggaagaaacaatgtaccaattatgtgacgacttccagagcacccaaatatcgagttttgtttccaaatccttcttgtataacggtacaaatataattagagcaagaattgcccccgggcaaaccgctgctttggcgatggttgtaaggacaggattctcaacaacaaagggctccttggttcgttccatggttttcccaaaaccaactggttttaaattctatagagattcctttaaatatattggattcatgtcattaatcgcaattttcggtttttgcgtcagttgcgttcagttcattaaacttggtttagacaaaaagacaatgatattaagagctttagatatcataacaattgtagtgccaccagctctgcccgcaactttaaccattggtaccaattttgctttgagtaggttaaaggagaagggaatattttgtatctctccaacaaggcttaacattagtggtaaaatcgatgttatgtgttttgataaaactggaacacttaccgaagatggcttagatgtacttggagtacaaatatcggagccaaatggggttagaggccagaagtttggagaactattgagtgatattcgccaagtatttcctaaattttctttgaacgattgtagttcgccattagattttaagtccaggaactttttcatgtcattattaacatgtcactcgctgagatcagttgatggaaatttactcggtgacccactagactttaaaatgtttcaatttaccggttggtcattcgaggaggacttccaaaaacaagcattccattcattatacgagggaagacacgaagatgatgttttcccagaaaattcagaaatcattcctgcggtagttcaccctgatagtaataatagagaaaatacgtttactgataatgatcctcataattttctaggggtggtgagaagctttgaatttttatctgagctgagacgtatgagcgtaattgttaaaacgaataatgacgacgtatattggtcgtttactaaaggtgcgcccgaagttatttcagaaatatgtaataaatcaactttacctgcagattttgaagaagtactacgttgttacactcataacggatatagggttattgcatatgctgggaagacacttccaaaaagaacttggttatattcccaaaaagtatctagggaagaggttgagtcaaatttggaatttttgggtttcattatcttccaaaataaactaaaaaaagagacctctgaaactctgaaaagtttacaagatgcaaacatcaggacgataatgtgtacgggtgataacatacttactgctatttccgtaggtagggaagctggtttgatacaatgctctcgcgtttatgttccatccattaatgatacacccttgcacggtgagcccgtaatagtatggagggacgtcaatgagccagataacattttggataccaagactttgaaacctgtcaagctggggaataatagtgttgaaagtctacgtgagtgtaactatactcttgcagttagcggcgatgtatttagactgttgttcagagatgaaaacgagataccagaggaatacttaaacgagattttattgaattcatcaatctacgcaagaatgtcgcctgatgaaaagcatgaattgatgatacagctgcagaagctagattatacagttggattctgtggtgatggtgcaaatgattgtggggcactcaaagcggcagacgtaggtatttccctttcggaggctgaagcttcagttgctgctccgttcacttcaaagatatttaatattagctgcgtacttgatgtcattagggaagggcgtgctgcgttagttacatcttttgcatgtttccagtacatgagtttgtactctgccatccaattcatcactattactatactttacagccgtggttctaatttgggagatttccaattcctgtacattgatttattgctgatcgttccaatcgcaatttgcatgtcatggtccaaatcctatgaaaagatagataaaaagaggccttccgctaacctagtttcactaagattttggttcctcttttga

SEQ ID NO: 82662 - DNA, 378 bp, Saccharomyces pastorianus
atgagctggtacatcaagccaatcgttgggggcgacgacgccgtgcaatcttcagataataccgtattgttcttcgtctcaaattttcaatatattttgactgctatagttttgtctgtgggtccaccatatagagagccgatgtcaaaaaactttgaatttatcgttgatatcactgtctctatcggtgcaagtctactgctaatgactttggatacagaatcataccttggtaagatgttacagctgacccctatatcaaacagttttacaatgtttatcattgtatgggcgatattaaattactatgctcaactgtatataccgccatcgataaaaggttggttaaagaaaaagaagagtagcacaaaagtataa

SEQ ID NO: 82663 - DNA, 99 bp, Saccharomyces pastorianus
atgatgaaattactatttctgaatattatagtcgtgcgccgccatttgcattgtaaaagctacagactatcaccatggtatatatatatatatatatga

SEQ ID NO: 82664 - DNA, 225 bp, Saccharomyces pastorianus
atgaaactcggaagcaaacaggtaaaaattatatccttgttgctgctagacacagtgttcttcgggattgagataactaccgggtacttgtctcactctttggctctaatcgcggactcattccatatgctaaacgatataatttctcttgtggttgcactttgggccgtaaatgttgccaaaaacagaaatccggattcaacgtacacttatggttggaaaagg

SEQ ID NO: 82665 - DNA, 1824 bp, Saccharomyces pastorianus
  modified_base (1662)..(1662): a, c, g, t, unknown, or other
atgccgtacagagtggcgacgggttatagtgaaaaaagtactgacgatgatttgatatggagaaggccaatagtaaaagaggaactcgaggatgctgacaactttttaatggatgatgccgagttgtatgataaagtcaagaacgagagtgcagtatcacacctggataccatagttatgccgatcattttcacggtactgggcatgttcactagaatgtacaagattggtcgtaataatcatgtggtctgggatgaagctcattttggtaagttcggctcttactatctgagacacgaattttaccatgatgttcatccacctttaggtaaaatgcttgttggactgtctggttatttggctggctacaatggttcttgggacttcccatctggtgaggtttatcccgactatatcgattatgtgaaaatgaggttatttcaagcaatgttttcatcattgtgtgtgccactagcctatttcacaggaagggctatcggattttctaggctgagtgtttggctatttaccattctagtaatttttgagaattcgtatgcaacattaggcaagttcattctccttgattcaatgctacttttctttaccgtctcttcttacttttgccttgccaagttccatactatgagaaagtctcccttttcggctaggtggtggctatggttgtgcctcactgggttgaatttgggttgcgctatatctgtgaaaatggtaggtcttttcatcatcagtgtagtaggaatttacaccatcagtgaactatggaatctcctaagtgatagatcggtatcttggaaggtttatgtcaaccattggctagcaagaatattcgggcttatcatcattcctgtttgcgtttttttgttatgcttcaaaatccattttgatctgctgtccaactcagggcccggcgactctaccatgccatcattatttcaagccagtctgaacggtacaaaagttggtaagggaccacgtgatgttgctttgggttcttctattatttccatcaaaaatcaagcgttgggaggcgctttattacattctcatgtccaaccattcccagaaggttctgagcaacagcaagtgactgtctatggttacagtgatgctaacaatgaatggttttttcaaagaatcagaggagtagagccttggactgatgctgagaacaagacaattgagtttgtaaagggtggcgaaatgtatagattaatgcatcgcctaacaggcaagaatctacacacccatgaagtcccagcgcctatatcgaaaagtgaatatgaagtttctgcttacggagatgtagacttaggtgactacaaagataactggattatagaaatcgtggaacaagtaggggaagaagatccaacactactacacccgctatccacatctttccgtattaaaaattctatactgggttgctatttagctcagtcaggtaaacatttaccagaatggggtttcaggcaaggtgaagttgtctgtttaaaacacgcctccaaaagggataagagaacctggtggaatatcgaaacacatgaaaatgaaagattgccacagggagaagatttcgtatatccgaagacttcattcttcaggaatttcatgcagttaaattcagcaatgatggcntccaataatgctttggtaccaaaccctgaaaagtttgatggtatagcttcatctgcctggcaatggccaaccttgaacgtcggggtaagattatgcgaatggagtgaaaaatctataaagtacttcttattaggatctcctgcgtccgtctggccctcaagc

SEQ ID NO: 82666 - DNA, 2994 bp, Saccharomyces pastorianus
atgttgcaagcgccctcaagttcaaactcgggtttgaatcaaggaaatgctgcgccggacggcccacctaacgaaacacagccgtacgaaggcctcgacgcggcagctcaagaagaaataaaagaattggcaagaacgctgacgagccaatcttcccttttatcgcaagaaaagcgtattaccggcactggcgacccgaatacactaactgctgcttcttcatcgtcatcgagccggtcaattttcgctagtgatatcaagggagttaacccaatccttttggacgtcaatgatccagactacgatgagacattggatcctcgatcagaaaatttctcgagtgtcagatgggtacgaaatatggcacaaatatgcgagaatgattcggatttctataaaccgttttcattaggttgcgcctggaaagatttgagtgcctccggtgattctgccgatataacatatcagggaacatttggtaatatgcccatcaaatacttgaaaatgagttggaggtgcatatctcgacgtcttttccaccggacacatggcaagagtgaagataatgactccggtttccaaattttgaagccgatggacggatgcatcaatccgggggaattacttgttgtgcttggacgacccggtgcaggatgtactacgctgctgaaatctatatctgtaaatacacacggattcaagatttctccggacacaatcatcacgtacaatggattctccaacaaagagatcaaaaaccattaccgtggtgaagtggtctacaatgcagaatcagacattcacatcccgcacttgacagtattccaaactttatacacagtggcaagactgaagacaccaaggaaccgaatcaagggtgtcgatagggacacatttgccaaacacatgactgaagtggcaatggcaacttacggactgagtcacactgcagatacaaaagtgggtaatgattttgttcgtggtgtatccgggggagaaaggaaaagagtttccattgctgaagtgtctatatgtggctcgaagtttcagtgctgggataatgccacgaggggcttagattctgctaccgcgctggagttcatcaaggccttgaaaacgcaagccaccatcacaaagtctgcagccactgtggccatttaccaatgttctaaagatgcctatgatttgttcgataaagtctgtgttctttacgatggttaccaaatcttctttggcccaagtaagcaggccaaaaagtactttcaaagaatgggatatgtgtgtcccgaaaggcagaccacagcagattatttgacctctattactagtccttctgaaagaattaaggacaaagacatggtcaaacatggaattatgatcccacaaacggcctatgaaatgaaccagtactggattcaatcagaggaatacaaacaattacaagtgcaggtaaacaaacatttagatacagactcttcccagcaaagagaacaaataaaaaatgcacatattgccaaacaatctaagagagcacggccctcctctccttatacagtaagtttctttttgcaagttaagtatattctaatcagggacatatggaggattaagaatgacccaagcattcaacttttcacggttttgagtcatgcagcaatggctcttatattaggatcaatgttttatgaagtcatgctttccactaccacaacaaccttttattaccgaggcgcggctattttttttgctattttgtttaatgcgttctcatcacttttagagatcttttcactctatgaaacgaggcccattaccgaaaagcacaagacttactcgttatatcgcccaagtgctgatgccttcgcctctacattttctgatgttccaacaaaattagccacggcagtaactttcaacataccatattattttttaatcaatcttaaaagagatgccggtgcttttttcttttactttttaataaacattataacagtttttgctatgtcacatttgttcagatgcattggctcagtgtcgaaaactttacctcaggcaatggttcccgcatctgttcttctgttagcttttgcaatgtacactgggtttgccatcccgagagtccaaatgcttggctggtcaaaatggatttcttatatcaacccattgtcttacctttttgaatcgctaatgattaacgaatttcatggtagaaattttccatgtgctcagtatatacctagtgggccaaattatgccaacgcaacaggtgacgaagtcacctgctccgccctcggttctatcccaggaaataattatgtaagtggtgatgatttcattcaaacgaactacggctatcgacataagaacaaatggcggtctgttggtattggtttagcatacattatttttttcttatttctgtatttattcttttgtgaatacaatgaaggagcaaagcaaaatggtgagatgttagtattcccccatagtgtggttaaaaagatgaagaagaagggtattgtctctgagaagaaaaagaaaaaccaaccaacgttgtcaacatctgatgctgagaaagatgtagagatgaacaacaattcaagtgcgactgattcaagatttttacgcgattctgatgcagctataatgggtaacgataaaactgtcgccaaggagcattattcatctccttcatcttctgcgtctcaaagccatagttttagtaaaagtgatgacattgaattgtccaaatcacaagcgatttttcattggaaaaacttatgctacgatatcccgattaagaatgggaagaggaaaattttggataatgttgatggttgggtcaagcctggtacactaactgccttgattggcgcatctggtgcaggaaaaacaacgttattagattgtcttgccgagagaactacgatgggtttaatcactggtgatgtattcgtagatggtagaccgcgggaccatctttccccagat

SEQ ID NO: 82667 - DNA, 627 bp, Saccharomyces pastorianus
atgctaggtctctatattaatggacagaattggaaaattacctcactgactccgtacaatttgcttactgctttaaaaactgaataccaaagtttactgaaaattacgaaccttttgcaagaactcgagccatcaaaatgcatactagattccaagtttttactcaataagttttctcaattttcattggggaagttgcaaaacttacaaccaatcaaaatggatctccacacaattccagggttctcagaatcagtaatatacttcaatgatatcgaaagcgacccgcaatatgacgaattagtaaatagtgttcaagcattttttgataaatcgaaattcggagagttgcctgaaataaagcaaaactggtcagagatcatattcgttatagatttcgcccgtttagaagatagtgaggtgaaggaggcattgggtgggttggttcgtgccgttaatgttgtctcccagggatatccgcaaagagtcggactattgccatttagttcagatagtgacaagtccgttgttaataaaatttacgagctgaagaactcaactgacaatttaacagaattaaaaagttttttggagacaatgctgcttgcagatgccgggatcctctag

SEQ ID NO: 82668 - DNA, 771 bp, Saccharomyces pastorianus
atgagactacttgcgttggtattgttattgttgtgtgcgccgcttcgtgcatggacttatagcttacgatatggcatacccgaatctgctcaggtctggtctattttagttcatttactgggcgatgttgataatcagctgttaactaatttatatcctttggttaccggtttggatgacgagattgatattcaagaaaatcttgtggcgctaacttccaatgtattaagggagcgatacgataaagaggatgtggctgatttattggaactgtatgctagtctttaccctatgggtatgatacagcacgatatcagttccaatgcagaacaagacgatgcaaatagtagctatttcgttttgaatggtaataggtacgaaaagcccgacgacgtgttctacttgaaatctaaggatttaacaattcaacagaaagtcccagatgttgatgttatacaaccttacgatgttgtcattggtactaactcagaagcgccgatattgatcttgtacggttgtcctaccgttattgactccgacttcgaagaattcaataggaatttatttatggaagcaatgaatggagagggaaaatttagatttatttggagatccacatgttcccttgatgggaaaagcgtggagtatcccttaactcatccgcttgaaattactttacaaaatggttctagaatgagctccatacctcaattaaaaaaaatactatatacttgtacccaaagaaatattggttggagcagacaacgatga

SEQ ID NO: 82669 - DNA, 336 bp, Saccharomyces pastorianus
atggagcatactgcgcatatatttcctattatcatcaagggttccccaccagtaatgtcttctaatccccgacgacaatatcgtttaaatctccggtcaattaagtgcctcaaaaaaccccgtgtgcgggtatggcaagcgccgtggcccctggagccagcactatcagcggctaaaatgcctcgagctgcgcacgcccacgcacgcccacgcacgcccacgcaccccacgcttttgagatccaagcctcagtacctgctggacttcagggcagtgggtatttcgcgccttccgtccgcagcgatctccgtttaccccgctcatttcttttcctaa

SEQ ID NO: 82670 - DNA, 336 bp, Saccharomyces pastorianus
atgacatcaattggtactggttacgatctttccaatagtgttttttcccccgatggtagaaatttccaagtagagtatgccgtcaaagcagtcgaaaacggtaccacatcaatcggtataaagtgtaacgacggtgtagtctttgcagtggaaaagctcattacgtctaaactgctggtcccacaaaaaaatgtcaagattcaagtcgtagaccgtcacatcggttgcgtttattcaggtttgattcctgatggtaggcacctggttaatcgtggtcgtgaagaagccgccagcttcaagacctgcaggcatgcaagctggcactgccgtcgttta

SEQ ID NO: 82671 - DNA, 645 bp, Saccharomyces pastorianus
atggatatggatacgcaggaggcagaactatcgagccagctggagaatcttacaataaattcaccacgaaagctacgctcgaacgcgcacagtaacagtggtaaagtgtttaaggaatatgaaagtaaccacgattttcaagattcaaatttcacttcccaagttgtggaacctgcaatatccgattctgtcaaaaaacctcctacaatgacagttttgaacaactatagcacggtgcatcagaaagtgccgtcaggtttttcaggcacaactgctacatctcatcaagaagctcaatggaagcagtacttccctggtattggtagcggtggtggtaccaactttggtggcgctgttggtactgcaaacaaagttcctgaatcggatctcattgtgagcgacttggttaaggatttatctggagttcttgaaacaaatacatttaaaagacatttagatatgaagaataaaactactactatgcagacccatgaaaaccatgatacgattagtatttcacattctaaagatttctttaacgctgagaaggtctcatcgtcgttttctgatgacagcgattctggcccagcagctgaggcacatgatgtatttgatggcatattacaaagcaaaaatcgatatttg

SEQ ID NO: 82672 - DNA, 1278 bp, Saccharomyces pastorianus
atgtccatcacgaaggtacatgctagaacggtgtatgattctcgcggtaatccgactgttgaggttgaaattacaacagagaatggtctcttcagagcgatcggcccatcaggtgcctccaccggcattcacgaagctgttgaacttagagacgggaacaagtccgaatggatgggaaaaggggtgaccaaggcagtcagtaacgtcaatagtatcatagggcctgctttaatcaagtccgaattatgtgtaaccaatcagaagggcatagacgagctcatgatatcgttaggcggaacttctaacaagtcaaggttgggcgccaatgctatccttggtgtttccttgtgcgttgctcgagctgctgccgcacaaaagggaattactctctacaagtatatagccgagttagcggatgctagacaggacccctttgttattcctgttccttttttcaatgttttgaatggtggagcccacgccggtggctctttagctatacaagaattcaagatcgcgccagtcggggctcagagctttgcagaagccatgaggatgggttcggaagtttaccatcatttgaagatattggcgaaggagcaatatggaccttccgctggaaatgttggtgacgagggtggagttgcccccgatattgacactgccgaagacgccttggacatgattgtggaagccattaacatatgcggttacgagggtagagtgaaagtaggaatcgatagtgctccttctgttttttataaggacgggaaatacgacctaaatttcaaggaaccgaactctgacccatctcactggctcagtccagcccagttagcagaatattactattcattgctaaagaaatacccaatcatttccctggaagatccctacgccgaagatgattggtcctcgtggtctaccttcctaaagactgtcaatgttcagattattgcagatgacctgacatgcaccaacaagaccaggatcgcccgtgctatagaggagaaatgtgcgaatactctgttgctgaaactcaaccagatcggtactctgactgagtctattgaagccgccaatcaggctttcgatgctggatggggtgtaatgatatcgcatagatcaggtgaaaccgaagatccgtttatcgctgatttggtcgttggtttaagatgtggtcaaattaaatcgggcgctttgtcgagatcagaaagactggccaagtataatgaacttttgcgtatcgaagaggaactgggggacgattgtatatga

SEQ ID NO: 82673 - DNA, 456 bp, Saccharomyces pastorianus
atggatatactcaagaggggaaatgaatcggacaagtttacgaaaatagagacagaatctactacgataccaaatgactcggatagatctggttcactgatcagaagaatgaaggattccttcaagcaaagtaacctgcatgtcattccagaagaccttgaaaacagcgaacagacagagcaggaaaaaatccaatggaaactagcttctcagccctatcaaaaagtcttgagccaaaggcacttgaccatgattgccataggtggtactttggggacgggactgttcattggtttaggttattctttggcatctgggccagccgctttgctaatcggttttttgttagttggtacttcaatgttctgtgtcgttcagagtgccgcagagctttcctgccaattcccggtttctggctcagacctgcaggcatgcaagctggcactgccgtcttta

SEQ ID NO: 82674 - DNA, 495 bp, Saccharomyces pastorianus
  modified_base (313)..(379): a, c, g, t, unknown, or other
atgtccaggatggtttcgccctcacagacttcgtacgtcttctgggagccatccttcagaataaaagttatcttcagttcttcgcctggtttcggttttttcaaatggccatggtttaagaacgaagacgtagagaagggcagaaatcttgtggttgtggtggtgcgtgtgagcagagatggagaggtgcgtaaaagatgtgctgcgatgttcgatattctagctgtgtgtccagcccgagtaacaattattcacgcatatggggcgcgggttagagtcatagatacgagacagcgcctatttcgtaatgagnnnnnnnnnnnnnnnnnnnnnnnnnnnnnnnnnnnnnnnnnnnnnnnnnnnnnnnnnnnnnnnnnnntcatttttaaaaaaatgcaactgctacacgctttgaaagattcaatcaaaagtttttccgacgaccagaattggctagcaaaaaaacgaaaatgtaatggagtcatgcaaacatga

SEQ ID NO: 82675 - DNA, 1680 bp, Saccharomyces pastorianus
atgaagctcctgtcttctatcgaacaagcatgcgatatttgccgacttaaaaagctcaagtgctccaaagaaaaaccgaagtgcgccaagtgtctgaagaacaacagggagtgtcgctactctcccaaaaccaaaaggtctccgttgactagggcacatctgacagaagtggaatcaagactagaaagactggaacagctatttctactgatttttcctcgagaagaccttgacatgattttgaaaatggattctttacaggatataaaagcattgttaacacgattatttgtacaagataatgtgaataaagatgccgtcacagatagattggcttcagtggagactgatatgcctctaacattgagacagcatagaataagtgcgacatcatcatcggaagagagtagtaacaaaggtcaaagacagttgactgtatcgattgactcggcagctcatcatgataactccacaattccgttggattttatgcccagggatgctcttcatggatttgattggtctgaagaggatgacatgtcggatggcttgcccttcctgaaaacggaccccaacaataatgggttctttggcgacggttctctcttatgtattcttcgatctattggctttaaaccggaaaattacacgaactctaacgttaacaggctcccgaccatgattacggatagatacacgttggcttctagatccacaacatcccgtttacttcaaagttatctcaataattttcacccctactgccctatcgtgcactcaccgacgctaatgatgttgtataataaccagattgaaatcgcgtcgaaggatcaatggcaaatcctttttaactgcatattagccattggagcctggtgtatagagggggaatctactgatatagatgttttttactatcaaaatgctaaatctcatttgacgagcaaggtcttcgagtcaggttccataattttggtgacagccctacatcttctgtcgcgatatacacagtggaggcagaaaacaaatactagctataattttcacagcttttccataagaatggccatatcattgggcttgaatagggacctcccctcgtccttcagtgatagcagcattctggaacaaagacgccgaatttggtggtctgtctactcttgggagatccaattgtccctgctttatggtcgatccattcagctttctcagaatacaatctccttcccttcttctgtcgacgatgtgcagcgtaccacaacaggtcccaccatatatcatggcatcattgaaacagcaaggctcttacaagttttcacaaaaatctatgaactagacaaaacagtaactgcagaaaaaagtcctatatgtgcaaaaaaatgcttgatgatttgtaatgagattgaggaggtttcgagacaggcaccaaagtttttacaaatggatatttccaccaccgctctaaccaatttgttgaaggaacacccttggctatcctttacaagattcgaactgaagtggagacagttgtctcttatcatttatgtattaagagattttttcactaattttacccagaaaaagtcacaactagaacaggatcaaaatgatcatcaaagttatgaagttaaacgatgctccatcatgttaagcgatgcagcacaaagaactgttatgtct

SEQ ID NO: 82676 - DNA, 402 bp, Saccharomyces pastorianus
atgtcaacgcaactcgcaagtaacatatatgctccattgtacgctccctttttcgggttcgcaggttgtgcagctgccatggtgctttcctgtttgggagctgccattggtacagctaagtcaggtattggtatcgccggtataggtactttcaaaccggaattgatcatgaagtcattgattcctgtggttatgagtggtatcttagccatttatgggcttgttgtggccgttttaattgcaggtaatttatctcctaccgaagactatactctcttcaatgggttcatgcacttgagttgtgggctctgtgtgggatttgcctgtttgagtagtggctacgccattgtatggtcggtgacgttgacctgcaggcatgcaagcttgcactgccgtcgttta

SEQ ID NO: 82677 - DNA, 777 bp, Saccharomyces pastorianus
atgagttataataatccgtaccagttggaaaccccttttgaagagtcatacgagttggacgaaggttcgagcgctatcggtgctgaaggccacgatttcgtgggcttcatgaataagatcagtcaaatcaatcgcgatctcgataagtacgaccataccatcgaccaggtcgattctttgcataagaggctactgaccgaagttaatgaggagcaggcaagccacttaaggcactccctggacaacttcgtcgcacaagccacagacttgcagttcaaactgaaaaatgagattaaaagtgcccaaagggatgggatacatgacaccaacaagcaagctcaggcggaaaactccagacaaagatttttgaagcttatccaggactacagaattgtggattccaactacaaggaggagaataaagagcaagccaagaggcaatatatgatcattcaaccagaagccaccgaagatgaagttgaagcagccataagcgatgtagggggccagcagatcttctcacaagcattgttgaatgcaaacagacgtggggaagccaagactgctcttggggaagtccaggcaaggcaccaagagttattgaaactagaaaaatccatggcagaacttactcaattgtttaatgacatggaagaactggtaatagaacaacaagaaaacgtagacgtcatcgacaagaacgttgaagacgctcaactcgacgtagaacaggtgtcggtcataccgataagccgtcagagtgccagaaaagcggtc

SEQ ID NO: 82678 - DNA, 1200 bp, Saccharomyces pastorianus
atgggtgcaagtggagaaattaattttgattcagaaatggactttgactatgataaacaacatagaaatttactatccaacggatcacctcctatgaatgatggtagtgatgccaatgcgaagttagaaaagccttctgatgattcaattcatcagaatagcaagagtgatgaagaacagagaataccgaaacaaggtaatgaagggaacattgccagcaactatataacccaagtacctctgcaaaagcagaagcaaactgagaagaagatagcgggaaatgcagtaggaagcgtggtcaagaaggaagaagaagcgaatgcagctgtagataatatttttgaagaaaaagctactttacaatcaaaaaagaataatatcaagagagatttggaggttctgaatgaaatatctgcgtcttccaagcccagtaagtacaagaatgttccaatttgggcacaaaaatggaaacctactatcaaagctcttcaaagtataaatgtgaaagatctcaaaattgacccatcttttttaaacattattcccgatgatgacttaacaaagtcagtacaggactgggtttatgctacaatatactcaattgctcctgaactaagatccttcattgagttagaaatgaaatttggtgttattattgatgcgaaaggcccagatcgtgtaaatccaccagtttcttcacaatgtgttttcactgagcttgatgcccatctaacgcctaatattgatgcatctttgttcaaagagttgagcaaatatattcgtggtattagcgaagtcactgaaaatacaggtaaattcagtattattgaatctcagacaagagattccgtctatagagtcggactatccacgcaaagaccaaggtttttgagaatgagtacagatattaagactgggagggtaggacaatttatagagaaaagacatgtagcccagctactattatattcaccaaaagatagttacgacgttaaaatctccttaacttggaattacctgtacctgacaacgatccgccagaaaaatataaatgtcaaagcccaattagtgaaaggacgaaagaccgtgttagttacattcataatgattcctgtaccagaattgatattacaaaagtcgaaaatcataaccaaaattcaaaaagtagacaatcagagaccactcacgaagtggaactag

SEQ ID NO: 82679 - DNA, 1077 bp, Saccharomyces pastorianus
  modified_base (998)..(1063): a, c, g, t, unknown, or other
atgagagcgttgagattcctgattgagaacaaaaacaccgtcttttttacgctcttagtagccttggtgctttcactgtatttattggtctatttattttcgcatacaccaaggccgccatatccagaggagctcaaatacatagctatcgatgaaaaaggtcatgaagttagtcgtgccttacctaacttgaatgaacaccaagatgacgaagaaatatttttatctgttgttatcccaagctataatgagacaggtagaattttactaatgttgacagacgcaatcagctttttaaaggaaaaatatggttccagatgggagattgtcatagtggatgatggttccacagataataccacacaatactgtttgaaaatttgtaaagaacagttcaaattgaactacgaacaattcaggatcatcaagttttctcaaaacagaggcaaaggtggcgcagtgagacaaggttttttacatattagaggtaagtatggtctttttgccgatgctgatggtgctagtaagttcagtgatgtagaaaaactaatagatgctattagcaaaatcgaaacgtctagtacagatctaaaaacgactaaaccagcagtagcaattggttccagagcacatatggtaaataccgaagccgtcataaagagatcaatgataagaaactgcttgatgtacggtttccataccttagttttcatcttcggcatcaggtctatcaaagacacacaatgtggattcaaattgttcaacagagccgctatattgaaaatttttccgtatttgcatacagagggttggatctttgacgttgaaattttgatcttagccatcagaaaaagaatccaaattgaggagataccaatttcctggcatgaggttgatggctctaagatggctttagctattgatagtatcaaaatggcgaaagacttggttattataagaatggcctatttattagggatatatagagatgataagannnnnnnnnnnnnnnnnnnnnnnnnnnnnnnnnnnnnnnnnnnnnnnnnnnnnnnnnnnnnnnnnncagcatttgagtaa

SEQ ID NO: 82680 - DNA, 1458 bp, Saccharomyces pastorianus
atgctacggataagtattgactctatcaagcaattcggttcctttgtgccaggttgttataacaacactagttaccatgctgccgggagggccataagaacatcaaacctgtacagtacaatgatctcagccaacccgagaaggtgcctgcattcttcgaaactgctaaataaagaaggtcaagaagaggactataatgaacagctcatttcaaaaatgtcttcacagaatggatcgaattccagacagaatgaaagtgaaggaaagaaggaaggcaaggcttcctctgtgaagtcgttgttgcaacatactcatagtcacagccacacacatatgcatgacaatcctttattgtcactgaacgtacagcagatcaagaagaatcctggcgtaagaataacatggataggacttgcatcaaatgtggggatggcagtaggaaaatttgtaggaggaatcacttttcattctcaagcattacttgctgattccgtacatgctcttagcgatttggtatctgattttttaacactgttttctgtccaatatgcgtctcgtaaaccaacttcggagtacccatatggctatggtaaagtggaaactgtgggatctttggcagtatccacaatcttagcaatggctggtatatctatcggttggtcgtcgttatgcgctattgtggggcctgtcattcctcatgccattctagaatcgatggctggtttaattggtgaaacgcattcccattctcagtcgctaacacaacaggcaactaatgtaaatgctgtatggatagcagcgggttctatcttggttaaagaatgggtttttcaggcaacaaagaaagttgcaatccaaacaaattctaatgtactaatggcaaacgcctggcatcatcgtgttgactccttgacatcgttggtagcgttggtcgctatcacatctagttattttttcaacattcaatccttagataatttaggtgggcttgtagtgtcaggtttgatcataaaaacaggtggacaaggtatcttatcctcactgaaggagttagttgaccaatctataccacctactgatccgcgttatctagaaatcgaatctgtcataaaagacagcattggcagtttgaaaacagacttagatctcaaacagtcgttacatgttagagaccttactatattagcttccggtcctaatcttcgtgccaccacaactttggaagtgccagtattacattcaggtcaggaagtcgggataagatttttggaaaacgctatttcgactataagagaggatttacgtatgaaggtgccaaacgtggggaaggtggacgtcgagtttgttgatgtaacctctgactctaaaggtgatttggagcactctcatgacactaaatcaacaaattatactcatactcattctgattctgccgatactcacacccataaacattag

SEQ ID NO: 82681 - DNA, 132 bp, Saccharomyces pastorianus
atgcaagtactagtgacgctctggtgtctaatatgcacatgcctggtactaccagtggccgcccaagaaaaggacactgacagcgagttcactggtcacgtgcatggagaactcacagctttcagccaatag

SEQ ID NO: 82682 - DNA, 942 bp, Saccharomyces pastorianus
atgacgggtttactaagtgttgaacaaagtattgcagagaaatttgatggtgtgggtttgcaattgtttagcaacggcactgagcttcatgaagttgccgatcatgaaggcatggatgttgaaagtggagaagaaagtattgaggacgatgaaggaaagagcaagggaagaaccagtttaagaaaaccaagaatttatggtaagccagttcaagaagaagacgcagatattgataatttaccgagtgatgaagaaccttatacaaatgatgacgacgtgcaggactccgaaccaaggatggttgaaatcgatttcaataataccggtgagcagggtgccgaaaaattagctttggaaacagattctgaatttgaagagagtgaagatgagttttcctgggaaagaacagcggcaaacaagctgaagaaaactgaaagtaagaaaaggacctggaatatcggtaagctgatatacatggacaacatttcacctgaagaatgtataagaaggtggaggggcgaggacgacgatagtaaagacgaaagtgacattgaggaagatgttgatgatgacttcttcaggaaaaaagatggtactgttacaaaagagggcaataaagaccatgcagttgatttggaaaagtttgttccatatttcgacaccttcgaaaaattggctaaaaaatggaaaagcgttgatgcaatcaaagagcgattcctcggcgcaggcattttaggtaatgataataaaacgaaaagtgactctaatgaaggtggggaagaactatacggcgattttgaagatctagaagatggaaacccttctgaacaagcagaagacatagtgacaaagaaagtgaggatgaggatgaaaacgaagacactaatggagatgatgataattcattcactaattttgatgcggaggaaaaaaaggacttaa

SEQ ID NO: 82683 - DNA, 144 bp, Saccharomyces pastorianus
atgattttgaacgtgaaaaatgaaagaagaggcaaggctaacggagaaattacaactgcctctacgacgagaagacgtaaaaggttagatgataaagataaattgatatatgctccaatgtccgatatctcagatgtgtgttga

SEQ ID NO: 82684 - DNA, 975 bp, Saccharomyces pastorianus
atggagcagtctaataaacagcaccgtaaggcgaaggagaagaatacagcaaaaaagaagctccatacgcagggtcataatgcaaaggcctttgccgtggcagccccaggtaagatggcgagaactatgcaaaggtcaagtgatgtgaacgaaagaaaactgcatgttcctatggttgatcgtacccctgaagatgatccgcctccatttatcgtcgctgtcgtgggtccacctggaacaggaaagactactttgattcggtccctcgtcaggagaatgacaaaaagcactttgaatgatattcaaggtcctattactgttgtctctggtaaacatagaagactaacttttttggagtgccctgcggacgatctgaatgcgatgattgatattgctaagattgccgacttggttcttttactaattgacggtaatttcggttttgaaatggaaacaatggaattcttaaatattgctcaacatcacggtatgccaagagtacttggtgtagctacacatcttgatctgtttaaatctcagtcaactttgagagcttctaagaaaagattaaagcacagattctggacggaagtttatcaaggtgcaaaattattttacctatctggtgtgattaatggaaggtatcctgatagagagattttaaacctttcacgatttatatctgttatgaaattcagaccattaaaatggaggaacgaacatccctatatgttggctgacagattcacagatttaactcatccggaattaatagagactcaaggagtgcaaatcgaccgcaaagtcgctatctatggttatttgcacggtactcctttgccttctgctccgggcactagggtgcatattgctggtgttggtgatttctcagtagcacaaattgaaaaattaccagatccatgtcccacacctttttaccaacagaaactggatgattttgaacgtgaaaaatga

SEQ ID NO: 82685 - DNA, 3096 bp, Saccharomyces pastorianus
atggttctgcttaacagaaggaaaatacaacctaaggaaataggacagtttgctgattccttctctgaaactccatgggtgattaaagaaagtagcgaacgtataaatgattatgacagtgatttaaaaaagctagatttttacaaaagggatatattcacctgtgagattagtggaaaagatggcctttcgtatttcaaggcgttaaaaagcgaagaacagcaccgtgaaaaggtcagatatcttttaccaaaagaactaaggaaggctatagcaaatttcgcaaacttcagtccgataaggaaggtaggacaccttgtagaaagcgcatttcagcgttttagtaaccgtttctttataggcgatacggtgtgcttgaaaactatccaaaaaaatgcattgattacctataaagaaggagagcctaacttggtagaatcaccaactattgaaaacaatgtcacgttgttccttgtcaaggatgtgtttcaatctaacgggatgatggaaagtgaaaagggagaaatttctgccccaaaattgtcactgtatttaatcacagaatgcctgaatcgagaatctaaaggtgcggccctaattgtaggccagaatgaaattaaaaggccagaatcacacttttctaaattcataattgcgtgttttcttaatgaaatactcataaaagtatcgaataaggagcacgcaccatggagggtgaaacaagaatatatagaaagatatgatgtaaaccctaaatgctctcctaatatgattgattatttgccggatagaatgaactcatcttcttccgagctttacactcctcttactataccaccagagagcgatgttgaacctgctgactggaaggaaacgtcggaaacgtcggaaacgtcactatctaaaataaaagcaattgacgacgagatttcagtctcatttgaccacatttacgataatgtgaactcccttgcctacaatgatttgaagggaaccgtcgacgacaaggagcttccattcactgggccttcgataccatttgaaaatatcagctacttagatagctccttagaatataagaatatcgatcaaaaatggttcaaagagtgcagtcaatttccaacggaacgactattggttgtttatcaattcctgagcttttttggacgttttattggtctatcacattttaattttgatcagttccttactactatcaagtgtactagtccggaggctttagtagatgaatatgtcaaaataaactttcttaaaacttacaacagcaaagggagtttcacaaatgagaagccaagaaacgaaatatataatcaagtgaccagtagtaacgtatcccagcgtgagaaggctaacgtctttaatgcagatgagagtcaacgaatacctagcaatttcaccaggaaccagaaaatgaggaaatttataacggataaaagtactgaatttgtaatgtattccatttttaaagggaagcctctaaaaaatgacgatatggagtttcaatcgtacgaaaaagggaatatactttacattgatatagtttgctcgttaatgtgtctgatgacggataatgaacctgattggaattgtaatctgatggacaattggactgaagaaaagcgaaaggaggaaggaaataaaacagaaattgatatagctatagaaaagtgtttgaactatggagatactagctgggttaaacttttgcacaataaaaactttagcaacggcaattggttgatctgtctccttggaatcttgcaacagaatacacatatgatagcatatagtgatgtcgcagaatgtatcacaaaaaaaatactacctttatccatgaattttgtaaatttaggtgatgagctctgggataactttcgcaagagattatctataaaagataaaattgatgttttatgggttctcgtagattttgcgtccaatttctcgagttatattaaggagttggtagataaagtaccaaaactgtgcaatggaatccgcttaaagttggatagtgcaaaaaaagagtatatcgaattgaaacggcaactaaaaacgttaaccaaaaatcgcgtgaagcttcacagcaacgcttcaatgaaccgatatggatcagatgaatgtaaaggtaaggtcaatgcccttaaagtgaaaattgcatacttaatggaagatatcgccttcctagaggcaaaattgattcagagcgatattaagagactagagattttgggtaaagatagaaatggaaatcgatattattggatggactcaaatggatcgtcatcagccatcagtgaaaaaaatgaggaactttacaactgctgttttttgtgggttcaaggaccctctgaagcggatataaacttttgcttagatgtcgacgtcgaatctttgaaaaaatgggagttgttagctaaagcaaaaggtactgcctacgcgacaaaagaagtcttttcaatatttaggtcgacagacgggtcttactatcaaactgctcaaggtgagaatttcatgataattaattcaaacggtatcttaatgaggccaactattccggcattcatagacaaaaaaattatatcagaaactccagaaaagctcctactctctcatcatcaatgggctttcttcaacgatatagaagatatacatatgttagtagataggttggatgatttaagagaaaatgagggacaattgaagaaagctttgacatccaaaatggaccgtattgaagtatcatacaagcaacagttcaaaattaaaaggcgtattgaatgtgatgaaaccttcaaaaaaaatcacaaacttttgaaaaataacgagttcacgtttcctgaactgaaaagaattgagacaacttgtacatccaacggccaacatttttccaacatggagaaaatttccaaaaaactatcaaggacaaagaatgatctcgttttggaagcgattttaaaagacgtagctcaccttggagaatgtgaaagagcacttctcaaaaagcaacaaaatttgatttatcctttgaattttcatttcgaacaattgaggacgatagacctcgatttatag

SEQ ID NO: 82686 - DNA, 519 bp, Saccharomyces pastorianus
atgagacagctaacagaagaagagaccaaggttgttttcgaaaaactcgccggctatattggtagaaatatttcttttttagtggataataaagaacttcctcatgtcttcagattacaaaaggatagagtatattacgtacccgatcatgttgcaaaattggctactagtgtagcaagacctaacttgatgtctctgggtatttgtttaggtaaattcacgaaaactggaaaattcaggttacatattacttctttgacagtattggctaagcatgccaaatataagatatggattaaacctaatggggagatgccattcttatacggtaatcatgtgttaaaggcacatgtgggtaaaatgtctgatgatataccagaacacgccggtgttattgtgtttgcaatgaatgatgtgccattagggttcggtgtcagtgcgaaaagtacttctgagtcaagaaacatgcaacccactggtatagttgcttacagacaagcagatattggtgagtattag

SEQ ID NO: 82687 - DNA, 411 bp, Saccharomyces pastorianus
atggatggttttcgtgtagctggtgcgttagtagttggtgcgttaaccgctgcatatttatattttggcgggaggttttcgatagcgctggtcattatagtaggttatggtatttattgcaatgaagccagcggtggtagtcaagatagtcaagagaagctcgatttgaacaaacaacagaaaaagccatgttgcagtgataagaagattgcggatggaggaaaaaaaactggcggatgttgttctgataagaagaacggtggtggtaaaggtggaggatgctgttcctcaaaggtggaaagaaaggggggtgttgttcatctaaaggtggaaagaaaggaggatgttgttcctctaaaaagaatattggtgacaatgaaaatactgccactgaagttgagaaagccgtaa

SEQ ID NO: 82688 - DNA, 1191 bp, Saccharomyces pastorianus
atgctgttcctcaaaggtggaaagaaaggggggtgttgttcatctaaaggtggaaagaaaggaggatgttgttcctctaaaaagaatattggtgacaatgaaaatactgccactgaagttgagaaagccgtaaattaccctgttactgtggattttacagaagtttttaggaagcccactaagaaaaggtcgagtacccccaaggttttttcgaaaaatagctcgtctaactctagagtaggtaaaaaattaagtgtttcaaagaagattggtccagatggattgatcaagagcgcgttgactatttcgaatgaaacgcttttgagttcacagatctatgtgttatatagttccctgcaaggtgcagcttcgaaagctgcaaagagcgtttacgacaaactaaaggaattggatgaattgactaatgagccaaaacttttgaaccttgacgatctatccgatttcgatgactattttataaatgttcccgttgaaaatgcattgtatgtgcttgttttaccgtcttatgatatcgattgccctctagattatttcttacaaactcttgaagagaatgcgaatgattttagagtagatagtttcccattacgaaaattggttggctacacagttttggggcttggtgattcagaatcatggcctgaaaagttttgttatcaagccaaaagggccgatcactggatttctcgtttaggtggcaggagaattttccccttaggcaaagtttgtatgaaaacaggaggtagtgccaaaatcgatgagtggacatcattgttagcagagactttgaaagatgatgaaccaattatttatgagtatgatgaaaacgcagactctgaggaagatgaagaagaaggtaatggtagtgatgaattaggcgatgtagaagatattggtggtaagggtagtaatggaaagttttcaggcgcagatgaaatcaaacaaatggtggcgaaagacagtccaacgtacaagaacttgacaaagcaaggttacaaagttattggttcccattcaggcgttaagatctgccgatggactaagaatgaactacgtggtaaagggtcttgttataaaaaatcgctcttcaatatcgcgtccagtagatgcatggaattgactccttctttggcatgttcatccagggatcctctagagtcgacctgcagc

SEQ ID NO: 82689 - DNA, 525 bp, Saccharomyces pastorianus
atggtagaatgcttagagattttgaaaactgtacaaaaccatcaaaggacagttttcaggttaactttagtgaaaggtttcaatatgggtgatgtcagtgcatatgcagatctggtccaacgtggtttaccaggtttcattgaagttaaaggcgccacgtttagtggctcatctgatgggaatggtaatcctttgacaatgcagaatattccattttacgaggaatgtgtaaaatttgtgaaggcgtttaccacggaattacaaagacgtggattacattacgacttggctgccgaacatgcgcattccaactgtttattaattgcagacacgaaattcaaaattaatggagaatggcatacacatatcgattttgataaatttttcgtattgctaaactcgggcaaagacttcacgtacatggactatttagaaaagacacccgaatgggcattgtttggcaatggtgggtttgcaccagggaatacaagagtgtacagaaaagataagaaaaagctagaataa

SEQ ID NO: 82690 - DNA, 636 bp, Saccharomyces pastorianus
atgacctctttatatgcacctggggcggaggatattcggcaaaggttacgtccttttgggtttttctttgagaaatcactaaaggatttgattaagggtattaggtctcacaacgaaacaccagaaaaactggatcaattctttaaacaagtattaagtgaatgccgggaagaagtgaactctccagatctaaattctaagaccaatgccgttcttaaattgacctatttagagatgtacggttttgacatggcttggtgcaactttcatatcttagaggttatgagcagtaataaacttcaacaaaaacgtgtggggtatttggctgcatcacaatctttttacaaagattctgacattttgatgcttgcaactaacttgttgaaaaaagacttaaagtatgacggaaacaatgatgttgttaaagttggcattgctttaagtggtctttccactataattacaccctcattagcaagagatatagctgatgatttgttcactatgctaaacagcacaagaccgtacataagaaagaaggccattaccgcactatttaaagtttttctgcaatatccagaggctttgagagataatttggataagtttgtttcaaagctagacgatgatgatata

SEQ ID NO: 82691 - DNA, 453 bp, Saccharomyces pastorianus
atgctagaagaaggtgattttgaaacagcaatggcatgcctggaaagattgcacacattttgtgattctcaggatccaaatttgagatatattagctgcatattgttttacaagatcggcaaaatcaatactgattttatttctcggttcgaccaactgattatacgcttactctccgatgtcgacgtttctattagatcaaaagcaattgaattggttgaaggtattgttgatgaggataacttaaaggcaattgtccaaacattgatgaagcaatttgtagatgaagatgtggttatcctacaaactggaagcatcgtatacgaaaaatcaaagagaattcccataataattccagaaaattacaagataaaaatggtgaacgtcattatatcgatttgttcagctgacaactattccagtgttaacgactttgaatggtacatgcagtaa

SEQ ID NO: 82692 - DNA, 738 bp, Saccharomyces pastorianus
atggtacatgcagtaataatggacttggcgatgctctgtcaagacatatctgataaaagccttggatcaaaaattggtgaacagtttaggaatttgatgataaaagttccttcaatgagagaagtaaccattgctaatattataaagcttatttcaaatgacaatattaacaaacagttgcctaccgtattgagagaatgcatttggtgtctcggagaattttctaccctagttgaaaatggtaacgacttaataaaaatcatgactgagaatatcagttattattctcatagtgtacaagaagttttaattttagcacttgttaaagtatttagtaattggtgtaataactttcaggaggataaacgctttgaaattaaaatggtgttaaaagagctaattgaattttttgaaaatttatcatattcgagtacattcgaagtccaggaaagaagcgtagaagttttagaatttttaagactaagtttggaggctttagaggaggatacggaaggtctaccaatgctactgagcgaagtcctgcctagtttttttaacgcctatgaactcgcaccaattgcgcgtgggactcaattgaagctagcagtagatgagaatcttgatctagaaactccatttttgacaaaggaggcagctgatgaactcttagatgaacaaaaaagtgaggccctcagtgatttactgtctgatatctcaatggacgagcaagttgactaa

SEQ ID NO: 82693 - DNA, 534 bp, Saccharomyces pastorianus
atgtcagatgaaaaccataacagtgatgttcaagatattccttcacctgaactgtccgtcgatagtaactctaacgagaatgaattgatgaataactcaagcgcagacgatggaatcgaatttgacgccccagaggaagaaagagaagccgaaagggaggaggaaaatgaagaacaacacgaactggaagatgtgaacgatgaagaggaggaagataaggaggaaaaaggagaggaaaacggggaagtaataaacacagaagaagaagaagaagaagaacatcaacaaaaaggcggaaatgatgatgacgatgatgataatgaagaggaagaagaggaagatgacgatgatgatgatgacgacgatgatgatgatgaagaagaagaagaagaagaagaagaagaagaagaagaagaagaagaagaagaagaagaagaagaagaagaagaagaaggtaacgacaacagttcggtaggctcagatagttccgctgaagacggtgaggatgaggaagacttaaaggataagacctaa

SEQ ID NO: 82694 - DNA, 423 bp, Saccharomyces pastorianus
atggaaaatgttaattacgatcttttacaaaagcaagtcaagtacattatggacagtaacatgctaaatttgcctcagtttcaacatttacctcaagaagaaaagatgtctgcgattttaacaatgttaaattcaaattctgacacagctctttccgtacctcctcatgatagtactatctcaacaacagctagcgcctcagccacaagcggcgcaagaagcaatgatcaaagaaaacctccattgtcagatgcccaaagacgtatgagatttcctagggcggatttatctaagccgattaccgaagaagaacacgaccgttatgcagcctatttgcacggtgaaaataaaatcaccgagatgcacaatattcctccgaagtcaagattattcattggtaatttgccgctaaagaacgtttaa

SEQ ID NO: 82695 - DNA, 468 bp, Saccharomyces pastorianus
atgtaccttatctttatcattatgtttggttaccgaagattcatcaaatttgtattcccatttcccgctactggtatttattttcatgggtacaccttcccaattggtaaactccccagcgatcttcaactctggaaagtcttccgccggatgatcaaatacaatggtgaccattatttagttgctttgcctatcttaatgttacaaccaagtatgtatgtatgtacgtacgtatgcaaagaagtggatatagagaaggaaagtaggggagagagggaaagaacaaaaaaattgaagttatttgaaatagtattgtattatttatctgtatgtacaccgtattggtggaacatcactgccaaatttttatcccattttcacatagttccccttaaaagaaactttgttagtatctttaaccctttacactgtgggggtaaaatattaccgcttcggagatttctttga

SEQ ID NO: 82696 - DNA, 609 bp, Saccharomyces pastorianus
  modified_base (62)..(93): a, c, g, t, unknown, or other
atggtggtttcttataacaataacaataataataacaataacaataacaataacaataacannnnnnnnnnnnnnnnnnnnnnnnnnnnnnnnaacatgttccctccttttccttcttccgatgactttgcaatgtatcaacagtccagttcttctggcccttaccaagaaacttatgcgagtggccctcaaaactttggcgatgctgtgtatcctatgaatggtaattttactcttttaccatccgactttacacgagagcctaatgattcgttcttttacgagaatgacggaatttttgattatcagcgtattcaacagcaaccaactcaattccagacaaagcagcgaaatgattcacaacaacaacggttttcacaggaacaaaatttcgaaattgataacgaagttgtccacaataacaatcgttattatgaatatgaaaggtcatctaatgaagtctctccttttgatgatgagaatccaaatgtgttatctgatggcatgtcacccactattatggcaactgcaactgcagttaacaacgcaaatgcgctttaccagttaatgcacaagcaatatcctttgactttacatcgggcccagtag

SEQ ID NO: 82697 - DNA, 1428 bp, Saccharomyces pastorianus
atgaaggacttgtctcattatggtcctgcgctatgtgttaaattttacaatgattatgttctagctggttatgggcctttcatccatgtctatgactatcattcggctacgttgattaacaaatgtaggctatttcactacaataaagttcatggacttagcctttctagtgaagggaaaattttggcctatggtgcaagatcagtaacaatagtggaacttgaagacgttttaaagaaagagtcattggtggatttcgaaaggattaactcagattggattaccggtgctacattcagctttgacaacttgcaaatatatttgttaacatgttataataaagtgctaatttgtgatttaaattgtgaagttctttttaggaagtctcttgggggagaaagatctattctatattccggtataattaaagttttcggtccggataaagtatatgttaacgctggtactgtaatgggcggtgttatcatttgggacctgttctcggagacaaaaattcataacttactgggtcatgaaggttctatcttttatgttaatttaagcaacaacggaagatatgttgccagttgctctgacgacagatcaattagactgtgggatttagaaactggcaagcagctgtctgttggctggagccatacggcaagaatatggaatttaatgttttttgataatgattcaaaactaataagtgtttctgaagattgcacatgccgtgtatggaacattatcgaatcacgagaaaacgttgccgaattatccatatctaacgtttacgaagtacatttaatcaagagtatatggggcgttgatgtgaaagacgacgaaatgatagctgtaacctccgggaatgatggtaggttaaagctgattgatcttcttcaactgaagagacacggcgatgaagaaacatcgttcagtctagatgatatcgcaaagcaatgtggcgatattttcgaaaagaatcaaagtatcaagggatttcaatggttttcattcggtgtaattgctatcacttcattgggtaaaatacttaaatacagtgatgtcacgaaacaatggaagttgttactaacaaatgaaaaattcaactcgtatccaattacaaatgggattcaaacgcaaaatatcgctgtcttttccaataataaaagtgacatccttcttatcaaatttagcaaagatagcgctgacataattgagaccgaagaattccatttagatgagctttctaagacaaataactgtctcgtaacagaatacgatgatgactccttcctattgactttacaatccccaaatcctcgagagaagtttatgtgtctggaaataagccttcagaacttaaaaattaaaagcaagcactgtttcaataagccggaaaatttttcttcctcatgggatcct

SEQ ID NO: 82698 - DNA, 621 bp, Saccharomyces pastorianus
atggttcatcgaggaaggactttgaagtcagacactgatgtaacatctcttaatgcgtcaacagtatcacaccagtcaaagccatttagacagttttcgactaggtcgagagcaaagagtaacgcaagcttcaaaggtttgcgtagagttttaacacatgatggcacgctggataatgattattttaataagcacaacgtttctcagaaatgcaagagttctgatgcacttttcagaaagcgaacgattagtgggttgaatatgacagctttagcaagagtaaagtccaatcaaggaaaaagatcagcatcctttcatagtccggtgcataatacgctgctcagtccaaagaacagcagtcattctaatactggaactgctggtttcggcctgaaaccacgaagaagtaaaagtacccaatctgttctgagtcttcgagatgcgcaagaatctaaaaagagtgaatctactactgacgaggaggtggaatgtttttcggaagacaacattgaagatggaaaggtgaataatgataaagtaatagccgagcatgttatgcctgaagaaaaaaagaatgtgcagcaattaaatcagaatgaattacatccccggattcaatag

SEQ ID NO: 82699 - DNA, 222 bp, Saccharomyces pastorianus
atgaattataactgcgaaatacaaaacaggaacagtaagaatgttgacaatcaagtcagtctaccccctatccaagttctatttaactccatagaaaaacggagtatgtccgagttggcattttcgaacatagaatactcgcatgggaaccttcggtctagtaccgaggaacaaaactatcctgcgcctgtgttacttccacagcatcattcattgcgtatc

SEQ ID NO: 82700 - DNA, 1959 bp, Saccharomyces pastorianus
atgatttccctggcctctgagaaattcgatttgttcttaagtaaaataggtaatgttatggtaatgaggagaatattttacatcatgacgatgtctatcattgcagcgttgattattgcgagtgataggttaccgaatggaaaagctcgaggttcaaatggatcattctcggaccacgatctccttttacagtatgctcggaaatcgatagacctttcaaagatagaaagagatttagagtatattagtagtatgccccacatgtcaggaacaagtggtgatgccgctattagacattatattaaagagtcgttcgacaaaaatggtataaggctagctggggaagaggagttcatggcgtattcgaattacccaggaaatgtctcacttcgtgtatattcaaaggatgatacagaagggtttgatattcccttaaatgaggagaactttaacccaatgagccataatggtcaattgaacaacataccggtgatttatgctaataaagcatcgttggacgatatggcttctatgcaagatcaagggctgttaaacggtgactttattttactagtgcattacggagattatgttttccaacaaatgttgactgctcaagaatatggtgcgaaagcaattatctttatttctgagccttatcaagacaacaaagacgtgatacaaatgaagtcagttgcgttgccgcagtatggtactggtgatgcacttacgcctgaatgggaaggatcaataagagatcctatcgatgctacggaagccaagtgcctacccaaaattccatccataccgatatctgccaatcaaggagagaaaatactagctatattatcagacactggcgtaaagttttctaataatttattcagcgggtcgcttaacgattgtcgacttgacctgctagtgcaaacagcaattagggaacgccacccgcttcacgatatagttggtaaaattgaaggatcggaacaagcgggcagggcaattgttattgccgcaccgaggaactctgttagttatggcgctatgtatccttcttttggaaccgtcgttttgctgtctctgatccaactgtatcaagaaatggtttacaaatttgactggaagcctctaagaaatatatatttcatttcctttgggggctctgaatttaatgaagcgggagccacggagctgatggaaaagagaacagaggcattgaagagtgaaatatacaccattatcgacgtcggccaaatcggtatatgggatgatagtaacaatttagagatacaatgtcatccgctactagtagatctttttcaaaagaacatgacaagccgtaaatttaacattaaagtggataatgttcaccagttcggcgactggacgccatatctagcgcaagggattccagttgcgatcgtttcatctccaggagtcatgaatagagaacatccgatctacacagtagaagacaaattcgatttcatcaaagataaactaagagacaaaaagaagggagaggtactttctgagataatgctatatcttgtcgaaaaatcactcgagctcattgacgatccattcatcccattcagcatatcgaactacgtagatttcctttcaactacgttaaaagacctccaaaaagaatgtcctgatacggtaaactttgacgaagtctttttgggcacaacattgtgggaaaacactaaactgcagttcgaaaaatggaaaagcgaatggacagagcttatgtatggagccggtacatatatagaacccactatcattgccattaatcgttggtcatggaactacctactttccctaataggcgttacccaatgtttggaggaagggttaatggatagaaccttttacaagaacgttatcttcgggccaaaactctgggtcgacaaaggtgacccacttcgtccatggacgttccctgaaatc

SEQ ID NO: 82701 - DNA, 159 bp, Saccharomyces pastorianus
atgcgcaatgcaggtgttcaagttgacacaaatatgcagaatataagcttacaggacacagttctagtcaacgagatgaaggggcggttgaaattcattggggaaactcaatttgcaaaaggcatatggtacggcattgaactagataaaccgttatga

SEQ ID NO: 82702 - DNA, 1845 bp, Saccharomyces pastorianus
  modified_base (1834)..(1834): a, c, g, t, unknown, or other
atgaaaactcatttggataatttcaatcacctattagatgcttcagatagtgtaatggcaccggatctcgacaaaggcacactgttagaaaggagccatcttcttcaaggaatactcgaccaaacaaagttgtcatatgataaagctatgaaggtgcaagaggacctgctcgaggagaatactcagttattagaagaaaatgcagtactatctaaaaaaatatcggatttaggtctgcaattgcaacagactaataatacaatcggcgaccttgccttgcagattgaagctcaaagtaaatcatctaatattgttgataaattgactaatgataatatccaactcacaagtaatataaaggctttaaacaatgagttggaggaactacaggcaaaagaaaaattggatgaaaatttaagaattacctatgagcaactcgagcaagaactgagactgcaattaagtaatttgcaatctgcattggaaaatgaaaaggagatagcagacacatatatcgaagaaaattcaagattaaaagcatcattggaatctattgaagccaaaacatctcacaaatttcaaagtcttgaagtaaaagtgaacactttacaggaggaattatatcaaaataaattgctaaagaaattttaccaaatatatgagccatttgcacaactacatttggcggctctttcctctcaattgcaatatttagccgaagtaatcgaaagtgaaaattttggaaagttggagaatattgaaatccatataattttaaaagtgttgagctctatcagttatgcgcttcatatttacaccataaagaatactcccgatcacctggaaacgacattacaatgtttcaaagtaaatattgctccgatttcaatgtggctaagcgagtttttgcaaaggaagttttcttctaaacaggaaaccgccatctccatttgtcagtttttagaagataataagtttctagataaggatgtgaccttgatactaaaaatacttcatccgatattggaaacaactgttccgaagctgttggcttttcttagaacgaacagcaatttcaatgacaatgataccctatgtcttattggttccctttacgagaaatcactttcacttattgccagaatagataaacttatcggaaaggaagaaatttcgaaacaagacaataggttgtttttatatctttcctgtgatataaccctgtcctctatcttaacgacacttttttcagatgcactgtttttgcgacaagattacaaacgtatttcttctttgaaaaaactagaggtattttttcaaggaatagaaagtctcttagaaaacataactatatttcctgagcaacccagtcaacaaacaagtgattcagaaagtcaatgtaatattaaggagggcaatttttcaaactcgttattaagcgatcgcttgaatgaagagaacattcgactcaaagaagtactggtccaaaaggaaaatatgctaactgaattggaaacaaaaattaaaattattattgggagggatttagagaggaaaacccttgaagagaatatcaaaacactcaaagtagagttaaataacaaaaatgaggaaaattgtggcaaaacagaaattcttaacaagctgaaagaagaaaatttcaacctagtaaaccgtttgaagaatatggagctcaaactatatcaaataaaggataataatacgttgaacaaaatttatttagacagagagaaagtagatagagtaaatttagtttcggaaatcatggaattgagagaaaccataagacgacaaataaaagagcagaaacgangtgagcatgac

SEQ ID NO: 82703 - DNA, 243 bp, Saccharomyces pastorianus
atgaagagagctatgccattcatttctctattgaaacaacgtttagctaatgaaaagccagaggatgtgtttgaaagagagttacaattcagcgaaatcgatactgtcaaggctgctgcaaggaatgttaagaaggcagcacaagctttgaaaattgctgaatttagcgcaatttctttcccatatggcgccaaaccggtaaggatatctttactggtgaagaagttgaaattccacctgtaa

SEQ ID NO: 82704 - DNA, 2793 bp, Saccharomyces pastorianus
atgtcttctggtttggtcttagaaaacacggcacgtagagatgcgttaatcgccatcgaaaagaagtaccaaaaaatatgggctgaagagcaccaatttgaaatcgatgcgccatcaatcgaagatgagcccattacaatggactctgaagagttacatcgcaagtatcctaaattcatgtcgtctatggcctatccttatatgaacggtgttatgcacgccggccattgttttactctctccaaagtcgaattttctattggttttgaaaggatgaacggtaaaagagctttgtttccattgggttttcactgtacaggtatgccaatcttagcatgtgccgataaactaaagagggaagccgaactttttggcaagaacttcgacaatgtaccagcagaagaagaagaaattaaagaagaaacgccggctgagaaagaccacgaggatgttaccaaattcaaagctaaaaaatctaaagccgcagccaagaagggccgtggtaagtaccaattcgaaatcatgttacagcttggtatccctagagaagaaatcattaagttcgccgacgccaagtactggttgacctatttcccacctttgtgtgaaagtgattgtacttcacttggggctcgtatcgattggagacgttcttttgtcaccactgatgccaatccttattacgatgcctttattagatggcaaatgaacaagttaaaggctgctggtaaaatcaaattcggtgaacgttatactatttactctgaaaaagatggtcaagcttgtatggatcacgatagacaatccggtgaaggtgttacaccacaagaatatattggtgtgaaaattgaagctttagagttcaccgatgatgccgcaaaaatcattgattcaagctcagatcttgacaaatccaaaaaattctactttgtcgctgccacgttgagaccggaaactatgtatggacaaacatgttgttttgtttctccaacaattgagtatggtatatttgacgctggtgattcttattttatcactactgaacgtgcattcaagaacatgtcttaccaaaagctaacaccaaagagaggctcctacaagccgatagttactgtcccaggtaaggcatttattggtaccaagattcatgccccacaatctgtatatccagaactaagaatattgcctatggaaactgtcattgctaccaagggtactggtgtcgtcacgtgtgtaccatctaattcaccagatgactacattaccaccaaggacttgttgcacaaacctgaatactacggcattaaacctgaatggattgaccatgaaattgttccaattatgcataccgaaaagtatggtgatttaactgcaaaggctattgttgaagaaaaaaaaattcaatctccaaaggataagaacttgttagcagaagccaagaaaattgcttacaaggaagattactacactggtaccatgatatatggtccttataaaggtgagaaggtcgaacaagccaaaaacaaggttaaggctgatatgattgccgccggtgaagctttcgtctacaacgaaccagaatctcaggtcatgtcacgttctggtgatgactgtatcgtttctttggaagatcaatggtacgttgattacggtgaagaaagttggaagaaacaagcaattgaatgtttggaagggatgcaattatttgctcctgaggtaaaaaacgcatttgaaggtgttttggattggttgaaaaactgggctgtttgccgtacatacgggttaggtaccagattgccttgggatgaaaaatacttagttgagtctttatcagactctactatttatcaatcattttataccattgctcacttactatttaaggattattatggtaacgaaattggaccattaggcatttcagctgatcaaatgacagatgaggttttcgattacattttccaacatcaggatgatgtcaagaacaccaatattcctttgcctgctttacaaaagttgagaagggaatttgagtatttctacccattagacgtctcaatttccgggaaggatttgatccctaaccatttaactttcttcatttacacacatgttgcattattcccaaagaaattctggcctaaaggtatcagagctaacggtcatttgatgttaaacaattctaaaatgtcgaaatctacaggtaattttatgactttagaacaaacggttgaaaagttcggtgctgatgcagctcgtattgcgtttgccgatgcgggagatactgttgaagatgcaaattttgacgaatctaacgctaatgctgctattctgagattattcaatttgaaggagtgggcagaagaaattaccaaggaatctaacttgagaactggggaaattacagatttctttgatatcgcgtttgaacacgaaatgaatgctctgattgaaaagacttatgaacagtatgcattgactaattataagaatgccttgaaatacggtctttttgatttccaagctgctagggattactatcgtgaagctagtggtgtaatgcataaagatttaattgcacgttatattgaaacacaagccttattgctggctccaattgcgcctcatttcgctgagtatatttaccgtgaagttctaggtaaccaaacctctgtacaaaatgccaaatttccacgtgcatccaaaccagtagataagggtgttctggctgctttggattacttgagaaatctacagagaagcataagagaaggcgaagggcaagcactataa

SEQ ID NO: 82705 - DNA, 171 bp, Saccharomyces pastorianus
atggaaaatattacacaacccacacagcaatccacgcaggctactcaaaggtttttgattgagaagttttctcaagaacagatcggcgaaaacattgtgtgcagggtcatttgtaccacgggtcaaattcccatccgagatttgtcagctgatatttcacaagtgcttaag

SEQ ID NO: 82706 - DNA, 585 bp, Saccharomyces pastorianus
atgtcaacaacattagcagcaccagcgaaattaaagagtttgctcctgaatctacatactcactgtattgggctacacgttaacgatgtcacacctaaagtatatttcaagttattgatacggcatcttctacagatatctagatcaaacgctgctcatcctaagctaagaagaagggcccagattttattggtatcgcttttcctatctggtgtcacacttttttctggtgtaacatatagtactttcaaaattattctaaaatgttataaattttacaagtttccatggaagagaaggaataggagacctttaataagaagaacaagatctcaaatgcaattagacagtggtgcaagaataatgtatattcctgaagtggaatcagtcgaccgccagagtcccgatgacaacaaatttatgaatgctacagataaaaaaaaaaggaaaaggatatttattccaccaaaggataacgatgtatatgaacacgataagtttctttttaaaaatgtagaactggaaagagccaagattcgcagtattctactcaaaatttttaaaccaaatgaacgtcttgtctaa

SEQ ID NO: 82707 - DNA, 999 bp, Saccharomyces pastorianus
atggctccaactaatctaaccaagaaaccatctcaatacaaacagtcttcaagaaagggtaagaaagcatggagaaaaaatatcgatttatctgacgtagaacaatatatggaaaagaaaattgatcatgaaattacgcatggtaccagtgatataacctctttgcaaaatgatgctctttttcatgttgatgttgagggtgatgaggtattgaaaaataaattaattaaaaggaaacaaattaagaaggttctaaaaagtaaagagattttagacgccgttaaaacgaattcaaaaattgcagcactaaatcaccataagaatagtagtggaaatcctaataagattcaaggtgtttctaaacacgaattaaagaaattaatggctttggctggcagagtacacggcgaatcgaagatcaagaatagaattgccaaagacggtctagttaaaacaacggctggcgacttatggggtgaagaatccaattcaaagaaacagaaggtcaaattaccttccggtatcaaacttgatgtggaaaaaaaggaccagatacctgaagaactattgaaaaaatccacgacaagttggtctattgcttcagtcagaccaagtactttagatatagagccaattgcagtaaaagaattcacagaaattccacatgctggtaaatcctacaatcccaacaataaagcttggtcagaattgataaacaaagagtataaagaggaaaaggcaagagaagatgaaagaatcgccttggaaaagtacaaagaaagaattagacatttaatggaaactttagatgacaatgaagaggaagagtcttcatcaaacgaagaagaagaagaagaagaagaagaaaatgaaaatgaaaatgaaagtacgcaatgtagtggatctgataaggaaataaaactatcaataaataagcctgtgaagaataaaaagaaaacaaaatatcaaagatacaaggcaaagagacatgaagagtaa

SEQ ID NO: 82708 - DNA, 831 bp, Saccharomyces pastorianus
atgtctcaatacgcaagctcatcctcatggacttctttcttgaagtcaatcgcttcattcaatggtgatctttcttcgttatcggctcctccattcattttatctccaatctcattgaccgagttttctcagtactgggctgaacatccagagctattcttggaaccctcttttatcaatgacgataattacaaagaacactgtttaattgaccctgaagtcgagtcacccgaattggcccgtatgctggccgttactaaatggttcatttccactttaaaatctcaatactgttctcgtaatgaatccttaggttctgagaaaaaacctttgaacccatttctaggtgagttgttcgttggtaaatgggaaaataaagagcatcctgaatttggagaaacggttttgttaagtgagcaagtttctcaccatccacccgtcactgctttttccatcttcaatgataagaacaaggttaagctgcaaggctacaaccaaattaaagccagtttcactaaatccttaatgctgactgttaaacaatttggtcacactatgttggatattaaggatgagagttatttggttaccccacctccattgcatattgaaggtattcttgtcgcttctccctttgttgaattggaaggaaaatcatatatccaatcttcgacaggtctactttgtgttattgaattttcaggtagaggctacttttctggtaaaaagaattcattcaaggcaagaatttacaaagactctaaagatagcaggacaaggaaaaggcattatacacgatatcaggccaatggtctggctcttctaagataa

SEQ ID NO: 82709 - DNA, 1068 bp, Saccharomyces pastorianus
atgagtactttagatattgcagaagacaacaaaataaaaaatgaagaattcaaaatttggaaaaaatcaataccctcattataccaacatatttcaagtttgaagcctatctttggctcaggcgttgatgaatctccatcgacacttaggagtatagttttcactaacgatagctcatgtaataaatccaaaggtgttttgagcgtaccacttttatattctcaagggagtgaaatctttgaggtggattgcatagtgccactcggacttcattacaaaaaacctgaaagcatttcagaaccgttagtacaaccggattataccatggaatctcaaaaggtggagcagactgttttgattccaaaatgggaatttaaaggtgaaacgattgcaaagatgatttacgtggataacagcgaaataaatgtaaaggtgatagccctttctaccaatggttctttggcatggttcagagaaggtgtcaaatcgcccgtttacacaatgatggagccatccacttctctaagttcagcatcgtccggaaatcaaaataaaccctgtgttgattttgcaatttctaacgattcaaaaaccttagcagtaactaaggaaaaacatcttgataatgaaaacgctacaataaaattgatagacaactcaggtaaaataggagaagtgcttcgtacaatacctgttcctggcataaagaatattcaagaaatcaaatttttgaataatcaaatattcgccacttgttctgatgacggtatcataaggttttggggtaatgagatagacaaaaagcccctttggattctaaacgattctttggacggcaaaacaacttgttttgctgcatcaccgtttgttgatacattatttatgaccggaactagtggtggggctctcaaggtttgggatatacgtgcagttatcgctttaggggatgctgatgctgagttaaatatcaaccaaggacataataaagtcaatgaactattcaaagttcatcacttttatagcgagcaagtgtccaaaatagagttttcttccatttcgcctatggaa

SEQ ID NO: 82710 - DNA, 150 bp, Saccharomyces pastorianus
atgaggttgcagatcaaagtcaacgactctactggcgttattgaagatgtcaaattcaagactttaggatgtggctccgccattgcctcctcttcatatatgactgaattggtacaggggatgacctcggacgatgcggcaacacattaa

SEQ ID NO: 82711 - DNA, 120 bp, Saccharomyces pastorianus
atgcttcctgttataacgagatttgcaaggcctgctctgatggccatcagacctgtgaatgccatgggggttttgagagcgaccagcataacgaaaaggctttatcatcccaggtcatag

SEQ ID NO: 82712 - DNA, 858 bp, Saccharomyces pastorianus
atggctttccaaaaagacgctaagtcctctgcttactcctctcgtttccaaactcctttcagaagaagaagagaaggtaagactgattactaccaaagaaagagattggtcacccaacacaaggccaagtacaacactccaaagtacagattggttgttagattcactaacaaggatatcatctgtcaaatcatctcttctaccatcactggtgatgtcgtcttagctgctgcttactcccacgaattgccaagatacggtattacccacggtttgaccaactgggctgctgcttacgctactggtttgttgatcgccagaagaaccttgcaaaagttgggtttggacgaaacttacaagggtgttgaagaagttgaaggtgaatacgaattgaccgaagctgttgaagatggtccacgtccattcaaggtcttcttggatattggtttgcaaagaaccaccactggtgccagagttttcggtgctctaaagggtgcttctgacggtggtttgtacgttcctcactccgaaaacagattcccaggttgggacttcgaaaccgaagaaattgacccagaattattgagatcttacatctttggtggccacgtttcccaatacatggaagaattagctgacgatgatgaagaaagattctccgaattattcaagggttacctagctgatgacattgatgctgactctttggaagacatctacacttctgctcacgaagctatcagagctgacccagctttcaagccaactgaaaagaaattcaccaggaacaatacgctgctgaatccaagaagtacagacaaaccaaatgtccaaggaagaagagctgctcgtggccgg

SEQ ID NO: 82713 - DNA, 531 bp, Saccharomyces pastorianus
atggcacccaagaaatccactaccaagaccacaagtaagggcaagaagcctgcagccagcaaaggcaaggagaaatcaacttccaaggccgctatcaagaaaaccacggcaaaaaaggaggaagcttcctccaagagttacagggagttgatcattgaagggctcacggctttgaaggaacgtaagggatccagtcgtccggcactcaagaagtttatcaaggaaaactacccgatcgtcggatccgcaagcaactttgatttgtacttcaacaatgccataaagaagggtgtggaggccggcgattttgaacagccaaagggacccgctggtgctgtgaaactggccaagaagaaatctccagaagtaaagaaagaaaaagaggtcagtccaaaaccaaagcaagccgccacttctgtgagtgcaaccgcatcaaaagcgaaagccgcatccacgaagctagcgccaaagaaagtagtgaaaaaaaaatcgcctactgttaccgccaagaaggatcttcgccttcttcat

SEQ ID NO: 82714 - DNA, 465 bp, Saccharomyces pastorianus
atggcctcgtctcttaacgagttaaacttggttcaagtacttgaacaagcaagtaacccacaacatattaggtcagatgttcaaaaattagccgaacaacaactaagacaatgggagactcaagcgggatttcattacttattacagtcaatctaccttaatttatctaattctttacaaattagatggttggcggtaattcaatttaagaacggcgtggataaatactggagatccactagaattaacgctatacctaaagatgaaaaagcctcgataagaggtcgtctttttgaaatgatcgatgaacagaataatcaactttgtattcagaatgcccaagcttccgcaaggattgcaaggctagattttcccgtagagtggccaaccttatttgaggatctagaaaacctattgaacgatgagatcatcagaaaaattcagttaagatttacaatatattga

SEQ ID NO: 82715 - DNA, 141 bp, Saccharomyces pastorianus
atgcatccattagtcgatgaattgactctttcacgttacttgacccacggtacttcagtattatcaagttccctttattctgttgctttctttctctttttttttcccaatttcctttttttgcttttgtcccaatcataa

SEQ ID NO: 82716 - DNA, 162 bp, Saccharomyces pastorianus
atggatattttggaagccctttgtttttatagagagggaaaaatacggaatatttttgaaataggtggtctattacttcagagtttttataattcaatcttaaattttgcaatttggaagcaatattcattgccgaagaaggagttattattatacgtgtaa

SEQ ID NO: 82717 - DNA, 942 bp, Saccharomyces pastorianus
atgaatcaacaagggagaccattcaaaggtttggttgtcataagcgcaggtttcgatgcatcagaatttgagcaaacttcaatgcaaaggcatagtgtcaacgttcctacaagtttttatacaacgttcaccaaagatgcattgaaattagcacaaatgcactgtcatggcaaagttttgtctctaatggagggtggatattctgataaagctatatgttctggtgttttcgcacatttgatcggtttacaaaaccaagattgggttaaagaatgggggtctgaacaagtcgttaaagagattgttcgtggttgcaaaccggcttggaaaccctataagacaaaaagagcaaaagatgtcataagaatatgggcagaagaagttatcaggctgggacgagcaatgataccggaattcgatgatatcatttttaaagacgcagttaacagcgcaccttctaattctctactaaaggctactgtcgaaccagcatccacgtcgacaattgctcaaagaataatcagatctcatagaagcaacgcttccccagaaaaagaacttcatgaaaacaagccgagaagcacggaaaaacaggaacaaagggaaattagaagcgataccaaggtcaagcagctctcgtcaaataatagagcagctgaaacccaaattccgtttttgcaacaagaattttccagtgaggatgaagatgaagaatacgtttacgatgaagaattgaacaaaactttcaatcgcacggtggaggatattaccattgatgatatttctagacatttggagaccttagaaattgtaaaaaaaggtgatgaagattcagaccatgagctaaaagaaaaaaattggaaaaactcgcaccaacgccgtctacaaggtaatggaatgttaaattccctccaatacgaaccgcatcgcataagcagcctc

SEQ ID NO: 82718 - DNA, 138 bp, Saccharomyces pastorianus
atgaactctcatgacctaaacatctggaatattcacttatccaaatggacaaccgaagaagaattcaatgtattatacaggacaaaatatagactttatttgctaaagcagatgaatttttcaggagcgcaaaactag

SEQ ID NO: 82719 - DNA, 822 bp, Saccharomyces pastorianus
atgtcttccaaacattcagatccattggagagattttataagcaatttcaagcatttgttcaaaataaccctaatgtcatatcggcagctcgagctgccgcacaaataccggaatttgcaaaagctgttgtagtactatccccatattctttacagcatgtgttcccgagagaatgggtaacaaaatcgtataggaaaactatagtcgaacgaccagaaagattattagcaagctcgatgggtatatcagctgcgattacaatgtatccatcccttttcaccttgaaatcctcgcatcaaaggaaaggttcattgatggcacctcatgtgcttaaggttcatggcagtagctggccggctgagttaattgaactttgccaaatggcagatgctaaattgctaaaaggcgaaatcgaagtcccagatacttggaactcaggtgatatatacttgagctcaaagacaactaaagctctacagggaacaattggggccattgaaactggtgttgactcaattttcaaaggaccatctgcagaacatattagtaacagagcttttgttgctatacggcctcctggtcatcattgccactatggtacaccatccggcttttgtctgttaaacaatgcgcatgtagccatagaatatgcgtatgatacttacaacgtcacgcatgttgtcgtgcttgatttcgatctacaccacggtgatgggacccaagacatttgctggaaacgtgcgggtttcaaacctgaggaggaacctgaagattcatcttatgatgattttggtaagaaatttgccgaggggatcctctag

SEQ ID NO: 82720 - DNA, 612 bp, Saccharomyces pastorianus
atgattacttcaattgacatagcagatgtaacttattctgccaaaccaagaattttggtgccttataaaacacaatgggaagtcgccagtcatcttcctgaatatcgcaaactggcagaaagggtagaattctataaatatgagatgtccacaaaggatgattttgttaaatttttggaaactcatagaataaacggcttttggctcactgaggagtttttcactgtgttaggaaacccttcgagttatattgaattcttccccgcatctttaaaagttatccttgtaccatgggtcggctgtgactttattgacggtaagttattaagatcgaaaggtatcactttatgcaacattggaccacatgctgctgaccatgtcacagaattggctattttcctagcaattagctgctttagaatgacttcattttgggaatattgttttaaatacgtggaaaatggtaatgttgaacagtgtaagaaatatatctctagtgactcgtatgaaattgttacagatagttaccacggtcaggaaatgaaatttccctttcgaacagacaaatgcaagcctaacaaggataggaaagtggtacatttagcagaaaag

SEQ ID NO: 82721 - DNA, 1131 bp, Saccharomyces pastorianus
atgaatcctatcaactctctagcgtttgaccttcacagtgttaaacttgcagacgcgaactcagacactgctgcattatcaaatagcaatactccaaccatgaacaatgcggctcttttgcaaaggccctcctccattatggattctattggcgtccaaagagttccatctccttttgtgccagggagtaaggcgattagtggagccagtactgttcccttcaatgcatatgacgctgaaattactggatctccgctacaaatatctgctaatcaggaaaacaatagtgcatttagtgcagcatcatccaacctgcatatgaacgccagcagcccttccgttctcaataaaccctcgagcacatttccaaatgtagctccttatctctacaacgcaacagggcctgcccccaacgttggtaatcaacccccaccaccggggatagaatctcagtggaaatacattgactctaatggtaacattcaggggccttttggtaccaataatatgtcacagtggtatcaaggaggttattttactccaactttgcaaatctgtagattagcaacatctcctgagccatttggtgtaaatgatcggtttattagactaggtgaattgactactctggtgaataattatcaagacccttttgtcgcctttgatttcattgttattagagctttgaatgctgttccacttgttgcaccaactttatcagaaaagcaaaaagttgagtcaagagatttgatacctgttgctgatgtgcatagtgatgattttacgtatgaagaaatccttggccttaaatttgaagatggaagttactatcatgaaactcaggtttgggttccggttgacggccgtcatatcacaaaggtagatcgcataccaaagatatctgcatataccgcccctctatcaacgacttctagtagatctaataaaaccacttcttcccatgaagagaaggttccttcccacgaggaagattctccagaggagcaagaggttttttcagaagagggcagaactgtttctaacataacgaatgaagaggaatctattgtcgaaaatcctactaagcaggaggaagaatctcgaggaagcgagaaagagcaaatatattgg

SEQ ID NO: 82722 - DNA, 1407 bp, Saccharomyces pastorianus
atgaattttgttacctgccatgttcagatgaggcttcttctccaaaggagactagtgcgtttacgagaatcagagctgtttagaccccagacatcattgtcaactttcaaaagacatgcttcgcaaaagacacgccctatacaaaaatcctcgagaaaatacgcacgtatacttctgttgtcagttttggtaccttacacaggatatgcgttttatgtatcattagctacagtgaagcaaattgatttaagaaacgaaatgtgtcaaagattagaggagaataataacgaggtcacttataagggatccttgctaaaatatagccctttggaagttttaggcagatttgagaacccgttcgaagaatacaggattcagaccgtttttgaattctttgcaaatagagtgttcgaattatttgaaagaaataggggaggtattccacctgatgtacaccaaatgaataagttaatgcctgtacacaagccaacatgggggcctaacttagtggacgtcgaccccgcagaggaaacggcattgccgctagaatgcaaagtgttagacgaattgcacataccgactgcagtagaagaaaatgaagggtcaaagtgcccagtctataacacatggctgggccagtcctgtaactacacggtttataatggattgaggatacttactgatcctctgttcagtgactttcttatccacaagaccctgggtcctaaaagaattactcaaatgccatctcaaattacagaggtgcccaaaccagatatcattcttgtatcccataatcaccccgatcacctggatttagaaagcttggaatactggagtggcaaagactctcccttatggatagtacccaaaggaatgaaatcttatatgacaagtaacggctgtgataatgtcctagaattatcttggtgggaaactttgcaagtaaagaaaaacaatgagatataccacatatcggctactcctgccatgcactggtctgggagatcgctcttagatacgaacaagtctctatggtgctcctttttattaacacaccatggtaatcccatactttttcatgctggtgacactggatatgtgaaagatttattcgttagaattaaagaacgctttggcaaaggttgtaaattagcgctgcttccatgtggtcagtattgccctgagtggcaccaaaaaccacgacatattaatcctcaagaggttctcaagattatgaaagatctagaagctcgaaatgtattaggcgttcattgggggacctttgtattaagcggagagtatttcttagagccaaaggaaaaattagaaatgttggccgagtggggtgggtttaaagaccgctgctactgtccagaagacctgcaggcatgcaagctggcactg

SEQ ID NO: 82723 - DNA, 1413 bp, Saccharomyces pastorianus
atgaaagtattacaattcaatcaagatgcaacgtgctgtgtggtggccgcgtcatcgcatcagatttcgatttttaactgcgacccctttggtaaatgttttgaaattgacactaagaattccaagaagaagacttcaaacaataacggtacagcttcaaactcagaatcacggaataatgaggagagcatattaataactaatggctcccgcgatcgtactgatgcagaagaagaggaagataatgaagataatgccctcgttacaggaaatatactgaaagaaggggagtttgtcattgaaatgttgttttcaactagtcttattgctattgcagatagaggacaaggtctaaacaaaggaaaaaagctgaagattgtcaatacaaagagaaaatctactatttgtgaaatagttttcccacatgaaattgttgatgtggtcatgaatagaaaaagaatgtgcgtacttcttgaaagtgaccagatattcatttatgatatatcttgtatgaaacccttagaaactatcgatctttgggaagatcattataagaggtcccaagccaattcgttctcaaatgcgtcaaacactggtactttggagggagattctgcaaatttgaacagggtggctaccaatttactagcaaatgccactcaaaaaagtgtgaacggatctaatcctagtgtaagaaccagaagaaactctctaagaagtaaaataaggccaagaatggttttaagtaacgatgatagaagtatactgtgttttactgcgtatagctcgcccaagaagaataagcccaattcagaagcactatatgatgtagtgatttatgacacattaaatgtgacgccagttaattacttgaattccgttcataaggggaatgttgcatgtttagcagtaagtcacgatggtaaactgcttgctactgcctcagataaggggaccataataagggtgtttcatacgggggtagattcggactatatgtcttcaaggtcactgtttaaagaatttagacggggtaccagattgtgcaatttgtatcagctagctttcgataagagtatgactatgattggatgtgtaggtgatacggacactattcatcttttcaaacttgatgacgcctctaatagcctccctggagataattctagcaatggccactggaatgaagaggaagatatactagcatcaaattcaaatcccagtatgggaactccaaaggaaatacctctctcgaaaccaagaattgcgaattacttctcgaaaaaaataaaatcttcaataccaaaccagaacctgagccgtaactttgcctatataacagttaacgaatcgaaccaggagttgcttagggtttccagacgaatttcccaaccaagtctatattgcctctga

SEQ ID NO: 82724 - DNA, 1047 bp, Saccharomyces pastorianus
atgctcgaattacgaagttgtagtaatttggtcaatagtagtaggaggcttgtgcctctggtgacttattccggactaagtgcaataacattgcctaaatctcgattttattcacagcctagtgctttagaagtacagggcacatcggattctcgaagcgataatattttagacgaactcaaacaaaggggtctagtgtcccaggtcacacagccagagagtttccttcggacgaagttgaacggtaacgataagatcaaattatactgcggggtggatcccacagctcagtcacttcatttgggaaatctagttccactaatggttttattacacttttacgtaaaaggtcacgacattgtcactgtgataggtggagctacagggaaagttggggacccaagtggtaggaaaacagaaagagacgttatggagaacgatattaggcaaaacaatgtgacatccatctcgcagcaattacaaaggtttttcaaaaatggcctagaatattacagaaaccgatgtgctctcactgaagatgtaccttccggaaaatatacaccaaggaataatttcaactggtggaaagacatcaaaatgttggatttcttagctgattttggtaggcacattcgggtacaatctatgttggcgagggattcaatttcttcgaggcttcaaaccaaaaatggtctgggatttaacgaatttacttaccaagttttacaagcgtacgatttttaccatttgtataaggaagagaatgtgactatacaagtaggtggtaacgaccaatggggaaatataacagcgggtatcgatctcatcaataggatacagcctataaagaataagggtttgccatttggtatcactgtgcccttgttgacgacggctacaggagagaaatttgggaaaagtgcaggcaatgctgtttttattgacccctcaatcaatacggcgtatgacgtttaccagttcttttataatactttggatgctgatgtacccaagttcttgaagatctttacgttctttactcaagtc

SEQ ID NO: 82725 - DNA, 804 bp, Saccharomyces pastorianus
atgggtagacggaagattgaaatccagaggatttctgatgacagaaatagggctgtcacgtttataaaacgtaaagctggcctttttaagaaggcccatgaactatccgttctttgtcaagtagacatagccgtcattatactggggtccaataacacgttctatgagttttcctctgtggatacgaatgatttaatctatcactaccaaaatgacaaaaacttgcttcacgaagtgaaagatccttccgattatggagactttcacaaaagtgcatccgttaacataaatcaagacctactcaggtcgtctatgtcaaataagccttcgaaatcaaatgttaagggaacgaaccagtcagaaaatgatgatgatgagaacaatgatgaggacgacgatgatcatggcaattttgagaggaattcaaatatgcattcgaataaaaaagcctctgataaaaatataccgagtgcacagatgaagttgttatccccgaccgcactcatttcaaagatggatggtagtgagcaaaataaacgtcatcctgagaacgcgctgccgcctttacaacatttgaaaagattgaaaccggatcctttgcaaataagtagaactccgcaacaacaacagcagcaaagtatatcgagatcataccatagtagcatgtacaatcttaaccagccttcatccagttcatcttctccttccacgatggattttccaaaattacctagctttcaaaactcttccttgaatggtcgtcctccacccatttccatttcaccgaacaagttcagtaagcca

SEQ ID NO: 82726 - DNA, 702 bp, Saccharomyces pastorianus
atgggctcttcgcagataatgaaagaaaacaaaacaagtaggtctagcaaaatttctccactatccgcatctgcctcaggccccttaactctccaaaaaggtaataatggcagagtggtaataaaattgccaaatgcaaatgcgcctaacggttctaacaatggtaatggcagtaacaataacaattacccttatcctttcggaagtgggtcttcacctcttttttctgcaacacagccatacattgccactcccttgcaaccatcgaatattcctggcggacctttccaacaaaatacatcttttttagctcaaagacaaacccagcaataccaacaaatgtctttcaaaaaacagagccaaacagtaccattaactacaacattaaccggacgccccccttcaactttttccggccctgaaaccagcaatggccctccaactggttcactgccatcgaagttcgtacatgatttgatgagtaattctccaaatgtttcttctatatcgatatttccagactggtcaatgggacccaacagtgccaagccgggaaacacaaacaatcctggtactttccctcccgtacagacggccgtaaacaacggaaactccagcaatatcaacagcactaacaacactaacaacaacaacaataacaacaacaacaataacaacaacaacagcagcaacaacaacagc

SEQ ID NO: 82727 - DNA, 1716 bp, Saccharomyces pastorianus
atggcttctttgagaagagttagaacagaccagcatacaaacgaaaaggctttgaagagtcagcagattttagagaaaaagtctacggcctacactccacaatttggacagaaccatagcgttccaatggaaaagtctaattcgaatgtgccatctttatttgccgacttccctgctccacccaaacttggaacagtgccgtctaattatgtgtctagtcctgacttagtaagaagggagtctatcatatctaccggatcagaatttcttcctcctcccaaaattggggtacctactaaagctaattcctcgcagggatcgcttatgtactcaccaagtgtggaagctttgcctattgaccctgtcgtcccgcaagttcatgagacgggatacaatgattttggtaacaaacatcctcaaaaaagtatgcctgaagatgaatctcacacatcacatgataatagcaatgctgatcaaaatacattaaaagactctgcagatgttacagatgaaacaatggatgttgaaggacctggcttcaacgatgtgaagaatcctcttcctatggagcccaaccaccagcctacgtctacagtaaatcctatacaaactattggtgacgatatccaaccgattcttcaaactaacgtggaggtccggggtactgatgcatcgaaaatggaaaattcacttccctccattgaaaatgaaagaagtagcgaggagcagccagaaaacatttcaaaatcagcatcatcagcatatttaccatcaactggtggattgtcacccgaaaacagaccactaactcaggatgaaaacagtatctcagagacagttcaatccacatacttgccagcaggaagtatttcaatggaagccaaaccaatttctcaagtgcaagatgttccaagaaatgttaataataaagcatccaaacttgtggagcaacatatggcaccaccaaagccaaaaagtactgacgcaaccaaaatgaactactcaccatacgtgcctcaatcaactgccgctagtgcagatggcgatgaatcaacgattctgaaaacatcgcctgctatatatgcaagaactcaccaagcacatgcatccaatccatcacaatactttcctttggtcaaccaagcaaatgaaactgcttcattcgaattatctgaatcaacatcccaggcacaaagtaatggaaatgttgcttcagagaatagattcagcccaataaagaaagccgaagtcgtcgagaaagacacttttcaacctactattaggaaggcttcaactaaccaatacagggcttttaaaccgttggaatcagatgcggataaatacaatgacgttattgaagatgaatccgatgacgacaatatgtctactgatgaggcaaagaacagaaaggaagaaaaaaagaatgtgaatatgaaaaaggaaacaaaaccaagtaacaaggacatagatgacaagtctaatggttggtttggttggttgaagaaagatactggcgacaaaaaagtgtataaggccaagctaggtcataaaaacacactatactatgatgaaaaattgaaacgttgggtgaataaggacgcaaccgaagaggaaaaacaaaaaattatcgaaagttcggcaccaccacctcctccaatcgtgaaacgtaaagatggcggcccaaaagacaaagccacgttcaggccccatcaataa

SEQ ID NO: 82728 - DNA, 2796 bp, Saccharomyces pastorianus
atgcaggccagtactgagaaaatagctgagcaaaagttttcgtttttggaaaacgacgacgaccttttggacgacgacgacagctttttggcttcttctgaggaagaagacacagtacctaataccgataatacaacgaatttaacctcaaaaccagttgaagaaaaaaaggcttcaagatataaacctattatcgaggaggaagcaggaatgcgtcaagagcaagttcattttaccaatactactggcattgtaacaccgcagcagttccacggtttgactaaaactggactaggcacccccaaccaacaagtcagtgtaccaaatatagttagtcctaagcctcctgtggtaaaagacaatcgttcaatttttaagataaatgaggagaaaaagaagtctgatgcttacgattttccactggaaattatttcagaaagttccaagaagggtcacgcaaagccggttgccgttcctactcaaaggtttggctcagggaattcttttagttctttggacaaaccaattccacagagcaggaaaggctctaataactcaaataggccacccgtgatcccattggggacgcaggtgcctcgatcttcgagaactaactcagcgatctcgcaatctcccgttaattatgctttccctaacccatacaaaattcaacaactacaacaggctcctatccaatcaggtatgcctttaccaaataccaacatacctcccccagcattaaaagtggaaaccaccgtttctgctcctccaattcgggcaagaggggtcagcaatgcctccgtgggaagttcagcgtcttttggtgctagacatgcaacacagtacggcctcaataacggggtacctccggtttcgccatatggtcaagctaccataaatttgccaactgcgaataagtatgcccccgtctctcctacagttcagcagaagcaatatccatcagttgcgcaaaaccttggcgcttcggccgtaaatacccccaattttgtaaagacccatagaggccatacaagctctattagttcgtatacaccaaaccagaatgaacacgcctctagatacgcacccaacaatcaacaatcttatcaggtgccatatacctcacaacctgttggtcctgtagctgggaattcaaactatcaaagccaaacccgaagttcttatgcagttcctatgatgccccaggctcaaacttcagcaagtattcagcctcacacgaacattcaaccgcctactggcattttacctctagcccccttacgacctctagaccccttacaagccgctacgaacttgcaaccccgtgcaagcaacataacggctgcaaattcactacctcttgcaaatttgccacttgctgaaaacatactgccagaaactatcacgcatcgagctacaagtagtgttgcaccaccacgacaggaaaataatccaattaaaatagacaacgaggctttattacgccgtcaatttccgatttttcattggagtgctgcaaacagggtcgtgtacgcagtcccccctatccctgaccaatcgcagtacatgatttcatcaagcattgtacaggaaataaaagtgacaccaattgaccagataattaaaccgaacgatatgctcaaaagcttcccaggtcctttgggtagtgccaaattaaaaaagaaggatttaaccaaatggatggaaaccactattaaatccatatctgaaaatgaatcatccactgatatgactatatggcaactattggaaatgaaactaaacgataaagttaactggaaaaatatttcaaaactactatacaattctgacgaacttttaatgtacctatctcagccctttccaaacggtgacatgattccaaatgcatatagactggatataaattgtcagatgagagtcctggcgttcttacaaacgggaaatcacgatgaggcacttcgcttagctttatgcaagagggattatgccattgcactattggttggcagtttaatgggtaaagacagatggtctgaagtcattcagaaatatttatatgaagggttaactgcggggccaaatgaccaaaaagaattggcacactttctgctccttatctttcaagtatttgttggtaactccaaaatggccataaaaagtttctacactaataatgagaccagtcaatgggcatccgaaaactggaagagtatcgttgcagctgttctgattaatatcccagaaaataatgaagatccactacttataccacctgttgtcctcgaatttttgatagagttcggtatattcctcaccaaaaagggcttgacagccgcagctagtacattatttattattggtaacgtaccactttctaatgagccagtaatggcagattcagacgttatatttgaaagtattggaaacatgaatacttttgaaagcattctatgggatgaaatctacgagtatatattctcgtatgaccctaaattcaaaggattttcatctattttgccccagaagatataccatgcatctcttttacaagaacaaggtttgaacagcctggggacaaagtatactgattacctcagttcctcagttcgaaaactgcctaagaaagatattttaacaataaacctcactcgtgaattgagtgaggtggctagtaggctttccgagtctaatacaggatggattgcaaaaccaaaactaagcagcgtatggggtcaattagataaatccttccatacatatattggtggcgatgatattgatgccttgaagtaa

SEQ ID NO: 82729 - DNA, 1605 bp, Saccharomyces pastorianus
atgacacctgaagccaagaaaaggaaaaaccaaaagaagaagttgaagcaaaagcaaaaaaaagctgctgagaaagctgctagccacagtgaagaaccacttgaattaccagaaagtacgattaacagcagcttcaacgacgactcggtgaaccgtacagaatctgacatagcttcaaaatttgatgttcctccggtctcatcatctaccaatatctctccggctaatgaaacacaactagaaatacctgatactcaagaattgcatcataaactgctcaacgactctgatcaacatgatattaccgcggactcaaatgatttgccagacaactcaatcgttgaacatgactctgttattacccaaacaaaaccagccatgtctgaagaatacgaagagactgccgctcacttatcttcgagaaatccatcgctcgatgtagtcgcgggagaacttcacaataataatgaacatacccagaaaattgccgtatccgctgtggaagaggattctttcaatgaagaagagggtgaaaatcacgacagcataataatttcatcattaaacgatgctaccccttctcaatataatcattttctcccatccgatggcaatcttctttctccagaattatcttctggtgatacgccaactcacaatgttcctctaggcacaaaagacaatgaaataaatgacgatgagtattgtaatgataaggaaattagtttgaacgcaaataatgtgcttcctgatgaactttcaaaggaagaagatgaaagattaaaactagaaacgcatgtatcaaccgaagaaaagaaacaggatatcgctgatcaggaaactgcagaaaacttatttacgtctagtacagaaccatctgagaataaaataagaaattctggtgatgatacctccatgttgtttcaagatgacgaaagtgatcagaaggttccatgggaggaagatgtgaagaaagattttcataatgagaacacaaatgatactcaagaatcggcaccgaacacagatgatcgtgataagggttatgaaggaaacgaagctttgaaaaagtccgaaagttgtacagccgcggacgagaggtcgtactctgaagaaacttcagaagatatctttcacggacacgacaaacaggtagttgaaggccaaaatgattacactgggaaaaatattgagaatgaaagccagaaattaatgggggaagggaatcataagttaccgttgtctgccgaagctgacattatagaacctggtaaggatattcaagatcaagccgaggatttgtttacgcagagcagcggagacttgggagaagttttgccatgggaatctgctgataaaaacgctgatgtaacgagcaaatcccaagagaaacatgaagatttatttgctgcttctggaaacgatgagaaacttccttgggaagtttctgacggtgaagtctcatcgggaaagacggaaaacagcatgcaggccagtactgagaaaatagctgagcaaaagttttcgtttttggaaaacgacgacgaccttttggacgacgacgacagcttccttgggaagtttctgagggagaagacacagtag

SEQ ID NO: 82730 - DNA, 996 bp, Saccharomyces pastorianus
atgacgtcacgagtttcgaggctggaccggcaggtaatattaatagagaccggttccacccaagtagtccggaacatggctgccgatcaaatgggagacttggccaaacagcaccccgaagacattctttcgttgctgtccagagtttacccctttttactagttaagaaatgggaaacgcgtgttactgcagcaagagctgtgggtggcatagttgcccatgctccttcttgggatccgaatgaatctgacttggtaggcggtacaaatgaaggttctccattggataatgctcaggtgaagttggaacatgaaatgaaaataaaattggaagaggctactcagaacaatcagttgaatctcttacaggaggaccatcacctcagttctctatctgattggaaattgaacgaaattttaaagtcaggtaaagtgctcctggcgtcgagtatgaatgattacaatgttcttggtaaggctgacgataatataagaaaacaagctaaaactgatgatataaagcaggaaacatctatgctaaatgcgtctgataaggcgaatgaaaataaaagtaatgctaataagaagtcagcaaggatgcttgctatggcaaggcgaaaaaagaaaatgagtgctaagaatactcccaaacatcctgtagatataacggaaagttcagtttccaagactttattaaatgaaaaaaatatgaccaattctgctgcatcgctagccacttctcccaccagtaaccagctaaatcccaaactggagatcactgaacaagccgatgaaagtaaactaatgatagaatccacagtaaggccattgctagaacaacacgaaattgttgctggcctagtttggcaattccaaggcatttatgaactacttttagataatctaatgagcgaaaattgggaaataaggcatggagctgccgttgggtcttcgagaattggtaaaaaaacatgcttatggagtcagcagggttaa

SEQ ID NO: 82731 - DNA, 1152 bp, Saccharomyces pastorianus
  modified_base (1115)..(1115): a, c, g, t, unknown, or other
  modified_base (1135)..(1135): a, c, g, t, unknown, or other
atggatctattggcaaagttgtgcgaccaccaagaagtactagatattttaaagaacaaggctttagagcatccttcagagtggtcattcaagtcactggtaccgaaattgtatccctttttacgccattcgatttcttctgtgaggagggctgttttgaatctactgattgcattcttatcaataaaggatgattctactaaaaactggttaaacggcaaagtattccgtctagtttttcagaatattttactggagcaaaacccggaactattgcaactgtcttttgatgtttatgttgcgttattggagcattataaagttaaacataccgaaaaaactttagatcatgttttcagtaaacatttgcagccaatactacatcttctaaatacgccagtaggggaaaagggaaagaattatgccatggaatcacaatatattttaaagccttcccagcactatcaattacatccagaaaaaaaacgttctatatctgaaaccacaacagattctgacattccgataccaaaaaataatgaacatatcaatatcgatgcacctatgattgctggagatattactttgctaggattggacgtaatattgaacactagaataatgggagcaaaggcatttgctttgacattgtcaatgtttcaagattccacgcttcaatccttcttcacaaacgttctggttcgttgtttagagctgccattctcaactccacgtatgttggcaggcattattgtttcacagttttgctcctcgtggttacaaaagcatccagaaggggaaaaattaccttcttttgtatcagagattttcagtcctgtgatgaataaacagttactgaatcgcgatgaatttcctgtatttagggagctagtacctagcttaaaagctctgaggactcaatgtcaaagcctactggctacctttgtggatgtaggtatgttacctcagtacaaactacccaacgtagcaattgtggttcaaggcgaaacagaagccggtccacatgcgtttggtgttgaaacagcagaaaaagtgtaccgcgaatactatgatacaatgttcaaatccatgaacaaatcttacaaaatattggncaaaaagacattagaagatnctagcatcgtgtgttga

SEQ ID NO: 82732 - DNA, 2268 bp, Saccharomyces pastorianus
atggacagtgttaaagaagaaaggaatgaaaagttacaaacgatggccggagaatcggtcgtacatttgattcagcaactgttagaaaataataaagttaatgtgtctggtaagatagtcaaaaatctctgcggatttttatgcgttgatacttcagaagttcctgatttctccgtaaatgcagaatataaagaaaaaatattgacgttaataaaagaatctaattcgattgccgcacaagatgacattaatctcgcaaagatgtcggaagaggctcaactaaaaaggaagggtgggttgattacgttaaaaatactatttgaagttcttgggccttctatattacaaaaactacctcagcttagatcgattttatttgattcattatctgatcatgaaaatgaggaagcaagtaaagttgacaacgagcaaggtcaaaaaatagtcgactcatttggtgtactaagagctctattcccatttatgtctgattcgctacgttctagtgaggttttcacccgtttccctgttttattaacgttcttaagatcaaacttatctgtttttcgttattcagctgcaagaacttttgctgatctggctaaaatttcctccgtggaagtaatggcttacaccatacgtgagattttgcctttaatgaatagcgctggttctctatccgatcgtcaagggtccacggagcttatttatcatttatcactttctatggaaaccgatgttctaccttacgtcattttcttaatagttccacttttgggtcgcatgagtgattcgaacgaagatgtgaggaatttagctacaacaacatttgcttctatcatcaaattagttcctttagaagctggtatcgccgatccaaaaggactcccagaagaactagtggcaagcagagagagggagcgtgattttatccaacaaatgatggatccttctaaagctaagccatttaaattacccattgccatcaaggcgactttaagaaaatatcagcaagatggtgttaactggttggcattcctgaacaaatatcatctacatggaatattgtgtgacgatatgggtttgggcaaaacattacaaaccatctgcattatcgcaagcgatcaatatttgaggaaggaagattatgaaaaaacgcgttctgttgaaagtagagccttaccatctctcataatatgccccccatctttaactggtcattgggaaaacgagtttgaccagtatgctccctttttaaaggttgttgtgtatgccggtggcccaactgtcagattaactctgagaccacagttaagtgatgctgatattattgtaacatcatatgacgtagctagaaatgatctcgcagtcctaaacaaaactgaatataattattgtgttttggatgaaggacatataattaaaaactctcaatcaaaacttgctaaggctgttaaagaaattactgcaaaccatagattaattttaaccggaactcccatccaaaacaacgttttagaattgtggtctctgtttgacttcttaatgccgggatttttgggaacggaaaagatgttccaggaaaggttcgcaaagccaatcgctgcgtcaagaaatagtaaaacatcatctaaggagcaggaagcaggtgtactggctttggaggcactacataagcaagttctacctttcatgctgagaagattgaaggaagacgttctatctgatttaccacctaaaattattcaggattactactgtgaattaggtgatttacaaaaacaactatacatggattttactaaaaaacaaaaaaatgtagttgagaaagatattgaaaattctgagattgctgatggcaagcaacatattttccaagctttacaatacatgagaaaattgtgtaatcatccagctttggtcctttcaccaaatcacccgcaattagcgcaagtacaagactatttaaagcaaactggtctagatttacacgatattatcaacgctccaaaactgagcgcattgagaacattactctttgaatgtggtataggtgaagaagatatcgacaaaaaagcaagccaagatcagaattttcctattcaaaatgtcatatcacaacacagagccctgattttctgccaactaaaagatatgctagacatggttgaaaatgacttgtttaaaaagtatatgccctccgtaacctatatgaggctagatggaagcattgacccaagagacagacaaaaagttgttcggaaatta

SEQ ID NO: 82733 - DNA, 1239 bp, Saccharomyces pastorianus
atggtatatgcaaggtacagcagttactacaagcacaatatgtcttggataaaaaatgtaacagaatctccgacttcactgattaaaaaagtttcatgtggtttgataattgctgcttctctatatgccattgcacccagcctaagtgcgctagtctttggggattctaagcagagtattgggaagtacacgacagtgggcttaattaatcgtgggaatgattgcttcataacatcatctttgcaaggcctggctggaatacctcgatttgtagaatatttgaaacggataagaacggtccttctagaattagaaactaagctgtcaaataatgcaaaaggcgacaatcctacagttgataacactacaaggcatagtcgacttgaaaactcgtctaattcacttgcccccttacacgaaagtcttaccagtttaattttggatttgatatctgtaaaagatcgtaagacgtcaatttctccgaaaatagtgataaacacattagagtccatctttaaattaaagatctcatccaaacaaaatgatgcacatgaatttacattaatattactacaaacattacaggaagaacgatcaaaattgatggattacagtaaacagatatgtaatttgaatataccaaagtttccatttgagggcgagacttccaagtttctagtatgccttaaatgcaagggtctatcagaaccatcataccaacagactttcatccgcgaactgtccgtaccacaacaaacatcagagaatctatccaatattctagcacacgatgaaacagaaatcatagacgactattcatgcctgatctgccaaataagagcaatcttaaaccatgaagaatatagaaatttcaaggactgtaccccggatgaaattttaatgttggacagattaaaaaattatgccactaaagccccaattaacgaaaatttaccattcgaagtagaacagtacgtcaagcgttactcaaagggcaatttgcaggtatctaatataaagggaaaggtcatcaaaaaagatgtagtagtacaactgccagacatattaattgttcacttatcgagatccacattcaatggtattacatattctagaaatccctgcaatgtcaaatttggagaaagaataacactttctgaatatacattggctgagagtgggacaataacagaaaacaggcaagtcaaatataatttgaaaagtgttgtgaaacacacc

SEQ ID NO: 82734 - DNA, 1785 bp, Saccharomyces pastorianus
  modified_base (946)..(993): a, c, g, t, unknown, or other
atggctagacaattattcactcctccgataaccaatccaaggtttgaccctaatcaatccatcagggaatcatacaagaacacaactggcggcatgcaatttcaacaaaatctacatgaggatcaaaatgacaatgagagaagtagctgtgatggtgatgaaaactctacaacaggagaaaggctagaaaacaataagtctcctatattgacaaaacaagaaattgacgaagcgttgaacactgtcaccaatttacctccagaattatcaaaattaattgacatttttattgatgacctaaagcagccaaagtacgtacggccactatcagtactgcaattgtctagtcttttccaaagcttttacataaaatttgataaagcatcattccagcacgtcagttcagcgaataataatggctattatttttctggcgggggctctagttcattcttggctgccaaagaaacgttaagtagtggtcttagcggaatttttggcagaagtaggagtagtagtggaaattcacttatgaggccaagaagatcttcatcgcttttcagtaatgagtcaatatcaaattcaactaatgccacacaaatgttgtcacctgaagagataaaaaagcaattgaaaatcaacgaattaaacaacatgaaaatcgaaaaatatatggaactttgtgaaagagatgtttttaagaaaattcttatagtaggcacatccgtatcttcaccgaataaaatgaaaaccttcaaaccacaccaattacaaactttcaaggttggaaatctatttagaaacagtgttgaattcacagaatacaataagttgttgaatgaaaaaatcctctgtttgtccaaactctcaacaatgaataaaatcaatttgataaagtttctgagtcttaataatggcattgatccggaaccaaagtttgaagagnnnnnnnnnnnnnnnnnnnnnnnnnnnnnnnnnnnnnnnnnnnnnnnngaaaagataaaggccctactgaaactacatgaaatcatgacatattcccaagaaatgtctaatgatgattatctttcgttgctaatctactacattattacgattgttccacgggatattttcttgaatgccgaattcatcaggctgttcagatataagaaaaagctggtcgaaacagaatcctttgcattaaccaatctagaagctgcattagtttttgttgaaggcttaaccaaaaatgatttttcaaatgagctacaagataaattgactgtaaatgaaagtaaaattttagaaaattcaatcagcagtagagtctcattgccatcaaaaactgctataatgcataaaaacaacggtaataacggcagtaacctaggtgacatcgtgactcctactatccaaaggccagatgttacaagatcgaattcgtatgatggcttcaggaccgtttttgattcatcattaaaaaatatcatcggaaaaattaggtcatatactccaccacatcctaacaatactagcaataataaccttcacagtagcaacaacttaaacataccacgaagttcgtctcaattatccatggaattgagcaatagagatacaacagagatgtctagggatggctcacgatcaacttcatcatcttcacgatcttcagcatctttagagcacggaaatcgcgaatttaccggcgatttgacagtaaccgctagcattaacggtgctgataaaaaggagtttcagaaatcgtggaaaaatataaaggctataaatttgaagatctga

SEQ ID NO: 82735 - DNA, 474 bp, Saccharomyces pastorianus
atgcatatgcaactcaggaaaagaaaaagggttgactattcagggagaaatcagacgtccgatcctccttcaaccacaacggcagcggtaccatccattattgtccctaagaagcgtaaagtagtcgcacaaaacatggttaatccagctattcgagccacaaccacaacactgggcacctcaaatataataatacctaagcctctgcagcgccctaaattccacaatagcgccagcctatcttcacctgatgatgatcccgaaaagatctctgtattggaagttcagaaaaatttgtccaatctcatcaaaagacaacaaagattattttataaagatatacataagccgactctcgccggcttgaaaaatttcgaaatgttaaggctgcccaatgatctaaaactcctacaaaacatcgtaaacctattatattcattcgagcaattagacagtgactcgggatcctctaga

SEQ ID NO: 82736 - DNA, 1122 bp, Saccharomyces pastorianus
atgacgcacccagttatatcactaaagccaagctacaattctgtaatacggggctgccccggtttacctgatacgttaccacgaatcgaatgccaattaagagtgcgctcaaacaactctttgccattcaaattggttaagatcgaaattgttttaaagacaattgaaatatatttcaacaaaaacctttatagcagcaataacagctctttcatcccatttaatcgtccgtcggacccctctaatggccattctgacaccagtaaccagaatatcagcattcattataagaaaaacatcgtgttatcccaccctacccatgatggcgacgatctcaacaatgatcttattggcatagacatacctttgacgattgggctacctgacgacatcaaagaaacaaactataatccgaaattcggcaaaacgcagactttcctggattgtaccgtgttttatacagaggtcggcggaggaagctcaaataagaaaagaaattttctttacccagtaaacgtcgaaaggtatacatacctaccttcaccgtcatatttcaggccaataaacagatcaaacatcacttctcccgatcaaaagttcttaattagttattccattgagaatccctgtgtttctatgaataatgacacgttgaaactctccatatcaatcaggctgaacccatttcggaacaatgccacaactccctcttcgaatgactttgatgtgtccacgccgacacttttctccacaaagaagaagtttaagtccaagctcaaattgaaatcaattacaacacagatactagaatacttggaaattctgaagaaccaatcagaattttcatccacgcaaacaacaaatattttgcaaacctctgtaagacaagttgatcaagtcatctccatgaattcaatgatttttcaattcaacctaaaaatattcactaaggacaaaattttacaaagctttagatcttctgagtcgagttgtcccgaaactaaattattaatcaacaaaatcgacgacattcctctgcaatatcataattcgataactacgataggtcaacatttaatgttctcactatctttcaataaggttcaattcaataaaagtctg

SEQ ID NO: 82737 - DNA, 1530 bp, Saccharomyces pastorianus
atgctgtccattctaagaaattcggtgagactaaattcaagggctcttagggttgtgccatctgccgccaacaccttaacatcggttcaagcatccagaagacttttaacaagttattcaagttttttacaaaaagaaacaaaagacgacaaacctaaatctattcttacagatgatatgctgttcaaggccggtgttgacgtcgatgagaagggccaaggcaaaaacgaggaaacatcaggagaaggaggagaggacaagaatgaaccttcttccaaaagtgaaaaatctagaagaaaaagaccaacttctacagatattaaaagagaaaagtatgctaactggttttacattttttcgttgtctgcgttgacaggtactgcaatctacatggcaagggattgggagcctcaagagtctgaagaattgaagaaagacatcgataatggctacactttatcacttatgtataaaagattcaaggccaggttcaactcaatgttcacctacttccaagagccacctttccctgatttactacctccaccaccaccaccaccgtaccaaaggccattaactcttgttatcacattggaagattttttggttcattctgagtggtctcaaaagcatggttggagaacggccaaaagacctggtgctgactacttcttgggttacctatcgcagtattacgaaattgttttgttttcatccaactatatgatgtactctgacaaaatcgctgaaaaattagatccaatccatgcattcgtatcttataatttgttcaaggaacactgtgtttacaaagacggtgtgcacattaaggacctgtcaaaattgaatagagatttgagtaaagtaatcattattgacactgaccccaacagttacaaattgcaacctgaaaatgctattccaatggagccatggaatggtgaagctgatgacaaattagtaagattgattccatttttggagtaccttgccactcaacaaaccaaggatgttagaccaatcttgaacagctttgaagacaagaagaacctagcagaagaatttgatcatcgtgtgaaaaaattgaaggataaattttacggagatcataaatctggtggcaactgggcaatgacggcactaggtctcggaaattccctgggcggcagcaccaagttcccgctcgatttgattcatgaagaaggacaaaagaactatttaatgttcatgaagatgattgaggaagaaaaggaaaaaattagaatacagcaggagcaaatgggcgggcaaacatttacgctgaaagactatgttgaaggtaacttgccttcgccagaagaacaaatgaaaatacaattggagaagcagaaggaggtagacgccttatttgaagaggaaaagaaaaagaagaagattgctgaatccaaatatttttcatgtaaaccctcttctcatgtatctacgtatctatgtgtgtatgtaaatgtacctgtacactccccacaccctcattttgttattgtcatgtga

SEQ ID NO: 82738 - DNA, 135 bp, Saccharomyces pastorianus
atgatagaattggattatgtaaaaggtgaagataccatagtagaagcaaccagcacgtcgccgtggctgatgaggtctcctcttgcccgggccgcagaaaagagggggcagtggcctgtttttcgacataaatga

SEQ ID NO: 82739 - DNA, 663 bp, Saccharomyces pastorianus
atgatcaatcttctgcacgtcttcgcttatgatagtagggaattatatgaggttagagaagccgcttctaacactttccattggagtgtcttgttattatgtcatgctgctgttgaaaacttttggtccacactttgtcagtttatgtgtttcatttgctactactggccagctcaattcagtggacgcgcatctcatgcaggtttcttcttcttcttctatgttttaattttcccattatattttgtcacgtatggtctatggatcctgtacatgtctcctgatgttccctcagcttctatgattaattccaatttgtttgctgctatgttactgttctgtggtattttacaaccaagagagaaaatgcctgccttctggagaagattgatgtataatgtatcaccatttacctacgtggttcaagcattggttacaccattagttcacaataaaaaggtcgtttgtaatcctcatgaatacaacatcatggacccaccaagcggaaaaacttgtggtgagtttttatctacctatatggacaataataccggttatttggtaaatccaactgccaccgaaaactgtcaatattgcccatacactgttcaagatcaagttgtggctaaatacaatgtcaaatgggatcacagatggagaaac

SEQ ID NO: 82740 - DNA, 3426 bp, Saccharomyces pastorianus
atgtcttcgactgacgaacatattgagaaagacatttcgtcgagatcgaaccatgacgatgattatgctaattcggtacaatcctacgctgcctccgaaggccaagttgataatgaggatttggcggccacttctcagctatcccgtcacctttcaaacattctttccaatgaagaaggtattgaaaggttggagtctatggcgagagtcatttcacgtaagacaaagaaggaaatggactcttttgaaattaatgacttagattttgatttgcgctcactattacattatttgaggtctcgtcaattggaacaggggattgaacctggtgattctggtattgcctttaaaaacctaacagcagtcggtgttgatgcctctgctgcatatgggcctagtgttgaagagatgtttagaaatattgctagtataccggcacatctcataagtaaatttaccaagaaatctgatgtcccattaaggaatattattcaaaattgtacgggtgtcgttgaatctggtgaaatgttatttgtcgtcggtaggccaggtgcaggttgctccactttcctaaagtgtctatctggtgaaacttcagaattagttgatgtacaaggtgaattctcctatgatggtctggaccaaagcgaaatgatgtctaagtataaaggttacgttatttactgtcccgagcttgatttccatttccctaaaattactgtgaaggaaacaatcgattttgccctaaaatgtaagactcctcgtgttagaattgacaaaatgacgagaaagcaatacgttgataacatcagagatatgtggtgtaccgtttttggtttaagacacacatatgccaccaaagtcggtaacgatttcgtaagaggtgtttctggtggtgaacgtaagcgtgtttccttggttgaagctcaggcaatgaatgcctccatctactcttgggataacgccacaagaggtttggatgcctctactgctttagagtttgcccaagccattagaacggctacaaatatggtaaacaactctgctattgttgctatttaccaagctggtgaaaatatttatgaattatttgataaaactactgttctatataacggtagacagatttacttcggtcctgctgataaagctgttggatatttccaaagaatgggttgggttaaaccaaacagaatgacctctgcggaatttttaacatccgtcacggtcgattttgaaaataggacattggatattaaacctggctatgaagataaagttccaaaatctagttcagagtttgaggaatactggttgaactctgaggattatcaggaacttttaagaacttatgatgattatcaaagtagacaccctgttaatgaaacgagagatagactggatgtggccaagaagcaaagactgcaacaaggccaaagagaaaattctcaatatgttgtcaattattggacacaagtttattattgtatgattcgtggttttcaaagggttaagggtgattcaacgtatactaaggtctacttaagttcttttttgatcaaagctttgattatcggttctatgttccacaaaattgatgacaaaagtcaatccaccacggcaggtgcttattctcgtggtggtatgttattctatgttttattgttcgcttctgttacttccttggccgaaattggtaactctttttctagtagacctgttattgtcaaacacaaatcatattccatgtaccatttgtctgcggaatcgttacaagagattatcactgagttccctactaaatttgtcgctattgtgatactatgtttgattacttactggattccatttatgaaatatgaagctggtgctttcttccagtatattttatatctactgactgtgcaacaatgtacttctttcattttcaagtttgttgctactatgagtaaatctggtgtggatgcccatgccgtcggtggtttatgggtcctgatgctttgtgtttatgctggttttgtcttgccaattggtgaaatgcatcattggattagatggcttcatttcattaatcctttaacttatgcttttgaaagtttagtttccactgaatttcaccacagggaaatgttgtgtagcgccttagtcccatctggtcctggttatgaaggtatttctattgctaaccaagtctgtgatgctgctggtgcggttaagggtaacttgtatgttagtggtgactcttacatcttacaccaatatcatttcgcatataagcatgcttggaggaattggggtgtgaacattgtgtggacttttggttatattgtgttcaatgtcatcttatcagaatatttgaaacctgttgagggaggaggtgacttgctgttatataagagaggtcatatgccggagttaggtaccgaaaatgcagatgcaagaaccgcttccagagaggaaatgatggaggctctgaatggtccaaatgtcgatttagaaaaggtcattgcagaaaaggacgttttcacctggaaccatctggactacaccattccatacgacggagctacaagaaaattattatcggatgtctttggttacgttaagcctggtaagatgaccgccttgatgggtgaatccggtgctggtaaaactaccttgttaaatgttttagcacaaagaatcaatatgggtgtcatcactggtgatatgttagtcaatgccaagcccttgcctgcttctttcaacagatcatgtggttatgttgcgcaagccgataatcatatggccgaattatctgttagggaatccctgagatttgcagccgagttaagacagcaaagttccgttccgttagaggagaaatatgaatatgttgaaaaaattatcacattgctaggtatgcaaaattacgctgaagccttagttggtaagactggtagaggtttgaacgttgaacagaggaagaagttatctattggtgttgaactggttgctaaaccatcattattattgtttttggatgagcctacctctggtctggactctcagtctgcttggtcaattgttcaattcatgagagcattagctgattctggtcaatccattttgtgtacgattcatcaaccctctgctaccttgtttgaacagtttgacagattgttgttgttaaagaaaggtggtaagatggtttactttggtgacattggtccaaattctgaaactttgttgaagtattttgaacgtcaatctggtatgaagtgtggtgtttctgaaaatccagctgaatatattttgaattgtattggtgccggtgccactgctagtgttaactctgattggcacgacttatggcttgcttccacagaatgtgccgctgcagggctgaagttgaagaattacatcgtactttacctgacctgcagc

SEQ ID NO: 82741 - DNA, 1035 bp, Saccharomyces pastorianus
atgagaaaagaattaaaataccttatctgcttcaacatactcctcctgttatctataatatactacacttttgatttgctaacgttgtgtattgacgatactgttaaagatgctatacttgaggaagacttaaatccagatgcacctccaaagcctcaactaatacctaaaatcatacatcagacttataaaacggaagacattcctgagcactggaaagagggtagacaaaaatgtctcgatctacatccagattacaagtacatcctatggacggacgagatggcctatgagtttataaaggaagaatacccgtggtttctcgatacttttgagaactacaaataccccatagaacgtgctgatgccattcgttactttattctctcccattatggtggtgtatacatcgatttagatgacggctgcgaaaggaaactagatcctttgttagctttcccggccttcttaagaaagacttcacctttaggtgtctcaaacgatgtcatgggttctgtgcctagacatcccttctttttaaaggctttaaagtctttgaaacactatgacaagtactggtttatcccttacatgactattatggggtctactggtccgttgtttttaagtgttatttggaagcagtacaaaagatggggcatacctaagaacgggacagtaagaatcctacaacctgcttactacaagatgcatagttattcatttttctccattactaaaggctcttcatggcatttagatgatgcaaaattgatgaaagcactagaaaaccacatcttatcctgcgtcgttaccggatttatttttggcttctttatcctatatggtgaatttacgttctattgctggttgtgttccaagaatttcagtaatctaaccaaaaattggaaacttaacgctataaaagtaaaatttgtcacaatgctaaattcattaggcttaagactaaagttgagtaaaagtaccagtgatactgccagtgccactttgctggcaggcagcagaaacgattga

SEQ ID NO: 82742 - DNA, 399 bp, Saccharomyces pastorianus
atgaagaacgcagcattgtgtgaggctcttcctctgctcgccacgtgctcccacgaaatcccacccacaccacacacggtctgtttcgccttcccccccgcattattactatccccgagcaaactcacacttttgaattcgcgtcgcgtcgcgtcgcgtcgcgctgcgtcattatcattgacccacgcttgctgcgtctcttctcttgctcccggccacaacaactcccccgagataaaaaccaatcttttgctaagccatctttttcttttttttctttcttcttacctcgctattatcgcctttctaaacttccttggccaagcctttcagcggtgcttttttgttctcacgtccactgccaatttccacatttttttcccctcttgttatatataa

SEQ ID NO: 82743 - DNA, 228 bp, Saccharomyces pastorianus
atggatgcttttgagaatatgtctgtatcaaatcatccgggcggtaacgcaagaagaaactcccaatcagcaaacgaaatgcttgcatcgcaaattcaggatttccagaatattccaaggtctttcaatgacagcaatgcaaatgtaaatttgtcaaaaaatcgtactgtcggcaatcaactgcctttctcatcacgtcaacaaaaaattatcatggacatttactga

SEQ ID NO: 82744 - DNA, 1152 bp, Saccharomyces pastorianus
atgcacgtactgctgagcaaaaaaatagcacgctttctgttgatttcgtttgttttcgtgcttgcgctaatggtgacaataaatcatccaaaaactaagcagatgtctgaacagtatgttacaccataccttccgaaatctttgcaacctattgcaaaaattagtgcagaggaacaaaggcgtatacaaagtgaacaggaagaagccgaattgaagcaatctttagagggagaggccattagaaatgccaccgtgaatgccattaaggaaaagatcaaatcttatggtggtaatgaaacgacgctagggttcatggtgccatcgtatatcaatcatagaggatcaccaccaaaggcgtgctttgtctcactaattactgaaagggattccatgacccaaatcttacaatctattgatgaagtgcaggtgaagtttaacaaaaattttgcttatccttgggtttttattagtcagggggagcttgacggaatgaagcaagaaatgattcgtcaagccataactgattctatgaatggtgatcctgagttaattaatattaaatttgctgaaattcctgcagacgaatgggtataccctgaatggattgatgaaaataaagcagcagaatcgctaatttcattggcaaatgtaccggatggtgattctagagctgtaagatatcaagctagatattttgcagggtttttttggaggcatccagttctggatgagtttgattggtactggagagtagaccctggtattaaattgtactgtgatattgatcatgacctttttaggtggatgcaagatgaaggcaaagtatttggtttcacattgagtatgagtgaagctaaggaagccaatgagaagatttgggatgttacgaaaaaatttgcaaaggattttccaaagtttatttccgagaataatttcaagtcatttattacaaaaaaggactctgaagattttaacaactgtgaattcacatcaaattttgaaattggtaatttgaacttttatagatcgccagcttacaggaaattttttaattacatcgacgaagaaggcggtattttctactggaaatggtctgactccatcatccacacattgggttatcgatgttgtgccaaggaggggatcctctag

SEQ ID NO: 82745 - DNA, 237 bp, Saccharomyces pastorianus
atgactgtcatgaatcttttcttcaggccctgtcaactgcagatgggctctggaccgttggagctcatgcttaaaaggccaacgcaattgaccacgtttatgaacaccaggcccggcggatcaacccaaattagattcatatcgggaaatttagatccagtgaaaagaagggaggatagactacgtaaaatatttcccaagtcacgacttttcaccaaggttaaacaagaatcctaa

SEQ ID NO: 82746 - DNA, 696 bp, Saccharomyces pastorianus
atgaagcgctccaggcttgtgcctcaacatatctttagcattattagcaagcgatatctcgccaaacatgcctaccaaaaaacactaaacttgcccaagaccaaattccctaatagatcaaacttagagattacattgagggaattaataccaaaatcttcgcagttagtttacaaggagcagctatgtgatttcttcgaagaattttcaaagcttaatacgactgatgaaaaattagagttcattaaagaaaagttgttcatcttacatgatggaccgccctatgctaacggcgagctccatctcggtcatgctctaaataaaattctgaaagatatcataaatagatatcaactttcacaggggaagtacattttttataagcctggctgggattgtcatggactacccatcgagattaaagctttgaaagatttaagcgcacaacagatcgagtcaatatcgcctttaaaaatcaggtcaatggctttaaaacatgcacaaaaggcaatcaagaggcaaagggaaactttccaacattttgccatcttaacggactgggaaacaccatacctaacaatggataaagactatgaaattaatcagctaaatatttttaaagaaatgtacgaaagaggactgattaagagacagaacaaaccggtttactggggtaagaaactagaacagcgttag

SEQ ID NO: 82747 - DNA, 75 bp, Saccharomyces pastorianus
atggtttgtcgttttgttcatcattcaagggtcatttttatttccatttatgatttcttgagtacaaaaggctaa

SEQ ID NO: 82748 - DNA, 294 bp, Saccharomyces pastorianus
atggcacttgtcaaatacagcacagtttttgtgccactccgaccattgcgactgtttgtgtccatcaagaaagcatattaccacagcgagccgcatagcatcgatctatttcatgataaggattggattgtgaaaagacctaaattcctaaatttacccaaaaatgaacattcaaaattagatatattccagtttaattttaacaagtccgaaagcaataatgtgtatttacaggattcatcattgaaagataacttgataaagcgatgcaatttatctataacgatgggatcc

SEQ ID NO: 82749 - DNA, 1524 bp, Saccharomyces pastorianus
atgtcacttgaagtagataagcaccggaacacactacagtatcataaaaagaacccttactcccctttattctccccaaattctacatataggtgttatcctcgggtattgaacaatccctccgagtctagaagatcagccagttttagtggtatttataaaaaaaggaccaatacgtcaaggttcaattatttaaacgaccgccgtgttttatcaatggaagaatcaatgaaagatgggtcagatagagctagtaaagctggttttataggaggcataagagaaactctttggaactcaggtaagtacttatggcgcacatttgtgaaaaacgaacctcgcaattttgatggttctgaagtagaagcaagtggtaacagcgacgttgagagcagaagttctggaagtaggagcagtgacgtaccatatggtctacgtgaaaattattcctcggatacaagaaaacacaaattcgatacgtcgacgtgggccttaccaaataaaaggagaagaatcgaaagtgaaggtgtggggacaccttcaacctcaccaatcagctttttggcttctcaaaaaagcaattgtgatagtgacaatagcataactttttcgagagatccttttggttggaataagtggaaaacaaatgctattggttctaactcagaaaataacacttctgatcagaaaaatagctacgacaggcgacagtatgggacagcctttattagaaagaaaaaagttgcaaaacagaacattaataatactaaaccggtgtcgagagcacaatctgaggaagtaacatatgtacgacaaatattcaacggagaatataaagttccaaaaatattaaaagaagaaagagaaagacagttaaaattaatggatatggataaggaaaaagacactggcttaaaaaagtctataatcgacttaactgaaaagatcaaaacaattttaattgagaacaacaagaacagactacagacaagaaatgaaaatgatgatgatttagtatttgttaaagaaaaaaagatatcttctttggaaaggaaacataaggattacttaaatcaaaagttgaagtttgatagatctatattagagtttgagaaagacttcaaaagatataacgaaattttaaatgaaagaaagaagattcaagaagatcttaaaaaaaagaaagaacaattggccaagaagaaacttgttcctgaattaaatgaaaaagacgatgatcaagtacaaaaagctttggcatctagagaaaatactcagttaatgaatagagataatatagagataacagtacgtgattttaagaccttggcaccacgaagatggctaaatgacactatcattgagttatttatgaaatacattgaaaaatctacccctaatacagtggcgtttaattcgtttttctataccaatttatcagaaaggggttatcaaggcgtccggaggtggatgaagagaaagaagacacaaattgataaacttgataaatctttacaccaataa

SEQ ID NO: 82750 - DNA, 945 bp, Saccharomyces pastorianus
atgctgctggaaagattgcacaagagactacacgccggctcttctaggcgatctcaagaaaataaggacaagaattgcaaacccgaagacgcgttgcccatccaaccagaagctcaacatcaaactcaggaccctcagccgttgttaaattgtgattacgatgacatgattgcatttgacagaaacttgtctactcccgttttcactccggtaatgactcctataaataatagcagctccaatcaggcgaaaagctcggatgcctcgtattttccaccttacctcaatgctaatagaaccagacagaatagcgcctcttcgctggcgagttccgtttccgatttcgctcagaatttcaaacaacataccttttacaacaataacgctcaattcacttcgttcacaccgcagtttgtcggccttctattagaagtttaccaaaacacgtgcagcgatcctacgataactccgtttgatactacaaaccctccctcaggaatattgaatagagttgccaaagcggctatacagcaatctgagcttcaacaattggatatcggatgtgacagaaatagctggcttttaacattggtaagacagcgcttgttgcaagaggtcagaaaagacggctatctttctcgtaacacttctttaacttctttacccccaccacccccaccacagttttctgaaatgcttagagttccctccccgtttgttaacgcagatattaccgatccaatccccttatcaaacacaaactcgaatccgaatgtaagctctactaccagcctgaccaacacgttgaactggtattccttacaaagatccaacgtctcaatgaagaatagaaatggctcgtcccagtatatttcagaattacaaccacaagctatcttagcccgcacaaattctaacaatagtgttagcaacagtaatgccttt

SEQ ID NO: 82751 - DNA, 366 bp, Saccharomyces pastorianus
atgactacaaataatgacttctattttgctctactacgcatatctattctccaattattgaaggcacaaggatttgacagggcaaggcccagtctggtggatgtcatgaccgatctctatgcaaaattcttgagtttgttagcatcagaggtcagttctatcgctcaggcaagatgtgatcaggacgatacaattgctttacaagatataactctggctctggaaaatctaggtattgttaagcctacgaacgttctggatgtctatgatgaaaactccgaattatcaagttcacgaggaatggaaaagttcaaggactggtgtatttatagtactcaattgaccgacgcgcgggggatcctctag

SEQ ID NO: 82752 - DNA, 1908 bp, Saccharomyces pastorianus
atggactggaacactattgagaaactaattaaaagtgaacaaaaaaaaggcaacagaattgctcagcttttgaacttgcctttgaacttgaaacagaacaaaattagcgtcaagcttgatctctctagcaaggaactcaacacttcttcagacgaggacaatgaatcagaaggcaatactactgatagttctagtgactcagactcagaagacatggagagttcgaaggagaggagtacaaaaagtatgaaaagaaaatctaatgaaaagataaacgttacaattgatcttggtttatcagcttatgccaatgccactgaatatttcaatatcaaaaaaacaagtgctcaaaagcagaaaaaagtcgaaaagaatgtcggcaaggctatgaagaatattgaagtcaaaattgatcaacaattgaaaaaaaagctaaaagattctcacagtgtcttaaaaaagatccgcactccttacttttttgaaaaatatagttggtttatttcaagtgaaggatttttggtcatgatgggtaaaagtccggctgagacagatcaaatctattcaaaatatattgaagatgatgatatttatatgtccaatagttttaactctcatgtatggatcaaaaatccagaaaaaacagaagttccaccgaacactttgatgcaagcgggtatactatgcatgtcctcaagcgaggcttggtcgaagaagatatcttcttctccatggtggtgctttgcaaagaatgttagtaaattcgatggctctgataactccattctgccagaaggtgcctttcggttgaaaaatgagaatgatcaaaaccatttaccccctgctcaacttgtgatgggttttggatttttatggaaagtgaaaaccagtggaaatgaggataatggtgatgatgacgaagaagaagaagaagaagaagaagaagaggaagaagaagaagaagaagaagaaaaagaagatgaagacgaagaagaagaagaaaaagaagaagaagaagaaaaagaagaagagcaacagcaagatgaagacgatagtaacgaggtcaatgggttagagaagggtggagattcaaacgatagcacgaaaaacaacagttttgaacacgataatcttgaaaaagacatcgaaaagcattgcaccatatcatccgataccgactctgattctggaaatgctaaagccaaaaatgacaatagcagtacgcagcgtatccttgatgaaccaggtgttccgatatctttaatcgaaaacataaacagtgacgtccgtggtaaaagaggaaaattgaagaaaattcaaaagaaatacgccgaccaggatgaaactgaacgtctcttgcgtttggaggccttgggtactttgaagggtatcgaaaagcagcaacaaaggaagaaagaagaaataatgaagcgagaagttagagaagatagaaagaataaacgcgagaaacaaaaaagactacaggctttaaaattcaccaaaaaagagaaagcaagagtgaactatgataaacacaagtccgaattaaaaccatctctcgataagggcgatgtggttgatgatattataccagtatttgccccctggcctgcgcttttgaaatataaatacaaagtcaaaatacaaccgggaagtgcgaagaaaactaagactttaactgaaattttacattatttcaagagtagaccactagacggttcttcaactgacaaagaaatggattggccccaagaacatgaaatgattaaaggcttgaaggaacaggacttggttcttctgctctgtgtcgacaagttaaaagtaacaatcgctgggcagaaatccaccaagaacggtggtaactcttcgaagaagggcaaaaaaaaaacgctaaatcatatgagatga

SEQ ID NO: 82753 - DNA, 234 bp, Saccharomyces pastorianus
  modified_base (204)..(204): a, c, g, t, unknown, or other
atgaagcaaagaattagtgccctagatttactgctgttggctagagagctgaaacaggatttggaaggctaccgattgagtaatatatataacattgccgattcctcaaaacaatttttgctgaaatttaataaaccagattctaaactcaacgttgttgtcgattgtggcttaagaatttacttaaccgaacttagtaggccnatacctccaactccttccggcttgtgtcaa

SEQ ID NO: 82754 - DNA, 423 bp, Saccharomyces pastorianus
atgttcgccccactatatcatacttggacaatttctgaacgtgctgttggattagcgtggtatcagacgtaccaaatttacaaccaatcgctgcccaaacttccagaaaatttcagtatgaacaagaaattactgaatggtaatttccctattagtctggatttccaatcatacctcaatgcattaatgaaaagtgaagagatgaggattataatgttcttgaatatgactatcgataaaccgtcaattttgtcatttttggaagccttatatgaatacgctataaacaaaaaatccgaattaacgaatagttttgatttagcttgcgtattatctatagcggcaatacttaaaagagaagcgccaatttacaacggcacgttattgatgaagaacagctttctcgaggaaacgttcatttag

SEQ ID NO: 82755 - DNA, 774 bp, Saccharomyces pastorianus
atggccgtattgagcaataatggtaatgtttctgtgttcaaagataacaaaatgctcacaaatctcgattcaaaaggaaacttaagtagcagaacctaccattgttttgaatggaatcctattaaatcatcaatcgtggttggtaatgaagacggtgagcttcaattctttagcattcgcaaaaattcagaaaatactccagaattttattttgagagtagtattagattaagtgacgcaggctcaaaagactgggtcactcatatagtatggtacgaagacgttcttgtagcggcgctttcaaacaattctgtattttcaatgacactttctgcttcctctcatcaacccgtttctagaatgatacaaaatgcttcgagaagaaaaattactgatttaaaaatagtggattataaggtggttttaacttgtcccggatatgtgcataagatagatttaaaaaattattcaatttctagcttgaaaacaggatctctcgaaaattttcatataatcccattgaatcatgagaaagagagcacgatattattgatgtccaataagactagttataaagttttactagaagacgaacttcatgtgacggctgataatattatcgcgccttacttagagaagaaattcaagaaatggagcacaatttggaatgaattcaataattatgaaacaactcttgtcatacacggaatatctctctctccagacggctattcaatagccatagtatacgatatggaacgggtggctttctaa

SEQ ID NO: 82756 - DNA, 342 bp, Saccharomyces pastorianus
atgaaacagtttggactggcagcctttgacgagttgaaggatggaaagtacaatgacgtaaacaaaaccatacttgaaaagcaatctgtcgaactaagggaccaattaatggtattccaagaacgactggtagaatttgccaagaaacacaatagcgagcttcaagcttcacctgaattccgctcaaaattcatgcatatgtgctcatctattgggattgatcccctatctttatttgatcgagataagcacttatttacagtgaatgatttttattatgaagtatgtcttaaagtcataaaaattagtcggcaaactaacgatctgactggaggcgtcatt

SEQ ID NO: 82757 - DNA, 108 bp, Saccharomyces pastorianus
atggaactttcccagtacctcaactacgcattttcctttgcatattatattatcatccatcttctttgcctctcatatatttacgaaataatacataaaaaatattaa

SEQ ID NO: 82758 - DNA, 1434 bp, Saccharomyces pastorianus
atggagcaacatctcaaatcaattcctctacaggacgacactaagaaaaaaggcatactatcttttttccagaatacaactacggtaaagagtaataagtttctcacgaaagagaaggatgtcatcactctagatgatcctaaagaggacgtcagtgaacctatgatagaaactgttaaacaagaaaccataacaagcatcaataaagagtgtgcagatgaaatgaaaacgacacctaagaaggccaatgctgaagacaagcttttatgctgcaaaaattcacccatagaaagtacaaaatacgatagaaacaccaacaaacaagtacccaatggaaatataatagctatcgagacaaaaagcagaagctcttctccatgctctaggagagaactttcctcatcgaaaaaggaagaagctaaaagagaaaaggaactaaaaaagcagcaacgtgcagaagagaaacacagaaaagagttattacgacaagaagagaaaaagaaaaaagagctaaaggtagaagaggaaagacaaaggcgtgctgagctgaaaaagcaaaaggaagaggaaaagcgtagaaaggaagaagccagattagaagccaaaagaagaaaagaggaggaaagattgaaaaaggaggaggaaatacgtttgaaagaagaagccaaggaaagagcacaatcccgtattggtaacttctttaaaaaactaagcgattctaatacgcctgtggttgaaaagtcggattatgaaaaattttttctacctttctatgctaaagatggagttagagtcagtaataagtggaaactaacaaaagtggagctggaaggtagcaaaagaaaaatagatgatgaattactgaacagtaaagataaaacaagtagtgacgacttattgaattggttacagtctagaagattacctagaggacataaaattaaacgtaaagctgttgacgttttacagcaaatgactttgaaggagaaaacagacgatgagctccaatctttacttgcacaagttccgcacaaatatataaaattctacgaaaacgttagacctccgtttatcggaacctattctatggactttactttgccaccaaacgatcccttttctacggaaggtactggattcaattatgattacgattctgacgttgaatgggttaatgaagaagaagaaggcgaagtcgataacttagaaagtggtgaagaggaggaagaggaagatgatgaagacgtacctagcgaaggagagtttgacgggtttctagacagcgaagaaaacagtgatttggatggcctaccctgcgccaagagaaaatttgtaggcccattgataccaacaatatgcttaaaatccaattttgaaaacttatcagaggaaaataaacgatacttacaacaactcaacgccgaagttatcata

SEQ ID NO: 82759 - DNA, 693 bp, Saccharomyces pastorianus
atggttggtatttacagaatacttgcttcgttcgtcccactcctgggtcttctttttgcattccatgatgatgacatgatagatactgttacaatcattaaaactgtatatgaaacggtgacatcaacttctactgcacctgcacctgccgctacaaaatctgttagtgaaaagaaactggatgacactaaactaacacttcaagtaattcaaactatggtttcatgtttttctgtaggtgaaaatccggccaatatgatatcctgtgggctaggagttgtaatcttaatgttttcattaatcatcgagcttatcaacaagctcgaaaatgatggtatcaatgaaccgcaaaggttatatgacctaattaaaccaaaatacgtcgagctaccttcgaattatgtgaatgaaaaaatcaaaacaacatttgaacctctagacctatacttaggagtaaatatgaatacttcaggaagtgatctaaaccaaaactgtttgattctcaaacttggcgagaagacagctctgcctttcccaggcttggcccagcagatttgttatacaaaaggcgcttcaaatgagttcacaaatgataaattatcggacatacagggatatttaacgaaaacagccaggaattgtaatggcgtttcccagaaaatatcaacattagtaaatatcgggatcctctag

SEQ ID NO: 82760 - DNA, 888 bp, Saccharomyces pastorianus
  modified_base (866)..(866): a, c, g, t, unknown, or other
atgggctcttcgttgagaagctttatcaaagacgttcgtggtgctaaaacactggcagatgaaagggcaattataacgaaacaatctgctaaaattaggacaaaattgagagatgaccatctaccacatgaaaaaaggcgagtaaatatccagaaacttctgtatctatacattctaggggaaaagacacatttcggtcaggtggagtctatcaatttaattgcttctgacgattttgtcgataaaagattaggctatctggccgcaactttattgttggacgaatctgaagatttattgacactcttaacgaacatgttgaacaacgatttgcatcatcccaacaaatatgcagtgtcacttgcactaacctcattaggctttttgagctcccctgaattagccagagatttatacccagacgtcgaaaatatcatcaaaaattcaagagaccctttcctcttgaaaaaagcgcttcaatgtgctgccaaactaattttcaaagacgtttcacttttagaaatcttcaacatcgaagacattactaagatattgtctagtcattcaatatgtactcacggtgtacttttaggtgttacgaaaatcatacaatctattttgttaattggattgaacagaaaaaaagatgaggatgaagatgaagacggtattgattacagcaatgacatcttgtctccattatctttacttttgcgtgattttttcattcgtttggaaaatatgaattctaaaaatattgaacctggatatgatgtccaaggtatttgtgacccatttctgcagtgtgaaataatttacactttaaaactatactttcaagttggtgagctcttaaattcgaacantgttttggactacaaagataat

SEQ ID NO: 82761 - DNA, 471 bp, Saccharomyces pastorianus
atggcagacgctgatgaatatagcactgcacctacccagcaagaaataacaccactgcagacaacagccactatcataaatgcaatatctggagaatgtataactacgaatgttgattttttcgtttccctggacaaatttaaacagttcattgctaggaaatggaagattcctcccgatcagctgttgattctactaccttatggtaacaaactaaaaccgtcgatgtttaaagagctgcttattaataggtcttttactctaaatgatttttacgtttacgacagacgactattctcacttgttagtaaaccgacaccaacaaatcttttaacgtctaaggattctaatcccatgaactcccctaattccaacgacttgacagagactctggaatatttaattaagaatagtcatatatctcaataccaaggtagcgatactattatgatcaagcctatgccctcgcct

SEQ ID NO: 82762 - DNA, 1293 bp, Saccharomyces pastorianus
atgcaggcccaagaacagactttaaatctgaaaaattgtttaaaggaagctaatgagaaaatcaccactgataaaggttctttacaggaattaaatgataataacttgaagtatacaaaaatgattgatgttttagtcaatattgaggagttattacagatacccgaaaaaattgaggagaacattagaaaggaaaatttccatcaggtgcaaattctcctagaaaggggtttcatattaatgaacaacaaatctttgaagacagtggagattttaaagcctataaaccaacaacttgagttacaagaacatttacttttcaacaatctgattgaagaaattcacgacattatgtactccaaatctaacaaaacaaattttactcgagtaaccaataatgatatattcaaaatcataagcatttcacataatggatttacgagtttagaaaattacctgtacaacatagtcaatattgatattatggaacactcaaaaacgataaacaagaaccttgaacaattcattcatgaccaatcgctaaataaaggaaatatcatgctacaagaaaatgctgcgactcaagcaccattggcaccatctagaaaccaagaaaatgaaggatttaacagaatagggttcctactaaaaaccataaataacatcaataaattacctgttgcattcaatataataacagaaagggctaaagaggagattcataatataattgttaaaagtaccgaatcaatacgttcgaagcacccttctctgcttaaaatggctactagtttaaagaatgacaaccattttggcctacccgtacaggatatactatcgatcattttaagggaatgcttttgggaaatatttttgaaattactgtatgctattcagtgccatagggctatttttgaaatgtcaaacattttgcagccaacgtcttccgcaaagccagctttcaagttcaataaaatttggggcaaactgttagatgaaatagaattattacttgtgaggtacatcaatgaccctgaattgatatccagcaataacggtagtattaaaccaattaatggcgcgacaaataacgcacccactttacctaaaaggaaaaatcctaaaattttctctttggagtataacattgaggacaattcttctgtaaagggtcaagcttttgaactaaaggctttgttgaaagatatattgcctggattttctgtctcctcaaacatggatttagactctatttatgtaaaagatgaatccttcgaacagatgagcctctag

SEQ ID NO: 82763 - DNA, 243 bp, Saccharomyces pastorianus
atggattacctaaaaccagcgcagaaggggagaagacgtggtctttccataaacagtctttcggagactcagcaatctgctatgaatagttccctggaccatcttcagaatgacttaaacaggataaatcttcaatggaatagaatactgtcggataacactaatcccttagaactagcgctcgcatttttggatgatacatctgtaggtctgggccaccggtatgaagaattcaatcattaa

SEQ ID NO: 82764 - DNA, 1053 bp, Saccharomyces pastorianus
atgactaataggaggttgattgaaaatggcatggaaagatttaagtccgtggagaagctaatgaagacaaaacagttttcaaaggaggctttaacaaatccagatataatcaaagaccctaaagaactcaaaaaaagagatcaggtcttatttattcacgatggtctagatgagctacaaaagcaattggaacagtatgaggctcaagaaaatgaagaacaaacagaaagacacgaatttcacatcgccaacctagagaatatcttgaaaaaacttcagaataatgaaatggacccagagcccgtagaagaattccaagacgatataaagtactatgtagaaaataacgatgatcccgatttcattgaatacgatacaatttatgaggacatgggttgcgaaatacaaccttcatcaagtaataatgaggctccaaaagaaggaaacaatcaaacttctttatctagcattcgctcatcaaaaaaacaagaacgttctccaaagaaaaaagctccgcagagggatgtttctatatcagacagggcgacgactccaatcgcgccaggtgtagaatcagcctcgcaatctatatcttctacgccaacacctgtgtcaactgatacgccattgcatacagtgaaagatgattcaataaaattcgataattctacccttggtacaccaactacacatgtgtctatgaaaaagaaggaatcggaaaacgactcggagcaacaactaaatttcccaccggatagaactgatgaaattcgaaaaaccatccagcacgatgtagagacgaatgcagcttttcaaaatcccttattcaacgacgaattaaaatactggttagactcgaaaaggtacttaatgcaacctcttcaagaaatgtcaccaaagatggtatcgcaattagaatcttcgctattgaattgtccagattctctagatgccgattcgccatgtctatacaccaaaccattatctttgcctcaaccaaagtcaatcttaaatcccaatgaaccaattcgattagtatatccgtacgatgta

SEQ ID NO: 82765 - DNA, 1101 bp, Saccharomyces pastorianus
atgttgaaacgatcatctctaatatatctatcatgtgtcctaatcattaccataccaatacttttgcatgtatacaacggtccaggactgtcccatgaagccaatgaacatagggcttctcacaagcaaaaaagaacgttagcaaatccggataaacccaaaagcgaaaacgatgaagatctattttgtgcggtaaccaacccagtcaccggatcatacatagatctatcacagctatcttcaactcccaacaaattaagggagggccaaaaacagagttctggcaataacaagcatgaatcctccaagacgaagtggtcagtgagaggttggggctacgatacaaacttcacgttaggcatctgctctagtcctgtcggagaagctgagtcgcaacaactgtccaatctaacgggcgctttttacgtagaccagttgaacgaaaataatttagtatcgattggagacttcagtacaaggcctgcgttagtcggcggctctactgccaagaaattaactctcaaatacgaaaacggctctatgtgcccgaacgggaaggacaagaaggcaactttattgaattttgtctgcgataaagaaattcaatcaaaggcccagatatcatacattggaaacctacacaattgctcgtatttcttcgaagtccgcagcattcatgcgtgccccacctcaaacaaaaataatgaagttaacgttttgggtatcttcatcggtatcttcgctatattctttttagtcgaatttgcggggagaagatggatctatgctaaactaaataggcatttgaaaaacgacgacgagttacacgacatatcgccatctttaaatgagcaaccacactgggacctcatagaggacgggtctcgctggagtaaatttttcaacgggataattaagacgacaagaaggttcacgaaatctttaatgaggtctttagtcagaggtaggaacagccgtcaagggggcataagactacggtcatccccatctgcctcttcgtccagccttgccaacagggagttcttcagagacatggaggctcaaacgaaattattgacagctgagacatcaatagtcata

SEQ ID NO: 82766 - DNA, 510 bp, Saccharomyces pastorianus
atgaagaaaatggtttacgttttggattctatgactaaagaagaactagaatctgatggtagaatgttcattgaagagcctacaagaatggttcgtgtagctaaaggttcaggtacttctgtgttcgaggtagaaatgatattgatgcaacagcagatgatggcaagaatggcacaaaccgcaacccagcaacaaccaggagcccctggtgccaatgctaggatgcctggcatgccaaacatgccgggtatgccaaacatgcctggtatgcccaatatgcctggtatgccaaaagtgactccacaaatgatgcagcaggcacaacaaaagctgaagcaaaatccaggtctaatgcaaaatatgatgaacatgtatggtggcggaatgggcggaggaatgggcggaggaatgcctgatatgaacgaaatgatgaacatgatgcaagatccaacaaatgcaaacaaatggcaaaacaattcggtatgggctaaaggccaccatctgaatata

SEQ ID NO: 82767 - DNA, 408 bp, Saccharomyces pastorianus
atgattgaaatatccaatgtcatcaagcctaatcaaactattatggttttagatgcttccattggtcaagctgcagagcaacaatccaaggctttcaaagaatcgtccgattttggtgccattatattaaccaagatggacggccacgctagagggggtggggcaatttcggccgttgcagccacaaacactccgattatctttattggtacaggtgagcacattcatgatttggaaaagttctcgcctaagtcattcatatctaaactgttgggtattggtgatatagagagtctctttgagcaattacaaaccgtttccaacaaggaagatgcaaaagccacaatggaaaacatccaaaagggtaagttcaccttgctagatttcaagaacagatgcaaacaataa

SEQ ID NO: 82768 - DNA, 477 bp, Saccharomyces pastorianus
atgaacagtgtttgggatgatgctagaatagaggacagaacggtggacaaaccagtaggctcctctcacgctcaggagaaactcgcgctggtaaaatcaactttgtttaaacttgaccaagaagatagaccagaatgcgattcctgggtacaactagtcaaattgatctgcgacgaggaccgtgaagaagaatttactacattcaaggagttattaagggaagtcaaaaacgttaatgataaatccgtcacaggcgttgccttgattcattatatcattgtatttgatcgtgcagactacattgagttactacatgataatccttctggtgcaaaattagatttgaatcttgtcgacgacattgtaggttacacacctttgatgtggagtttcagtctgcagagaaggaactgttgcttggagctgttcaacgcattcgacgaaataaacttcaacatgacgataaggctggattaa

SEQ ID NO: 82769 - DNA, 357 bp, Saccharomyces pastorianus
atggaaaaatacaattacgaattgaatgaaaataaattcaactccaaactgaagaaatttttaaacaacaaaatcaaagatagtaagatgagcaaggcagacgcgtatttacaagaacatgaaataccgtatctagttttaccaactatacccgaaatgacagacttgtattcaaagggtctgattcacattctttccaaccgtttttaccaggcagtatccaagacgatgtttatgaaattcacgatgtcaacttcaaacaaagacaaaatgaaccacagatatctcggactaactcgggtacctcagattttactggagatgaggataaggcgcaatatgaaactgaaggggtag

SEQ ID NO: 82770 - DNA, 1446 bp, Saccharomyces pastorianus
atggttcctccatattcaccactttcggaatttttggaacaaaacaatatgtttcgataccgtaccgaagtaaaacatgaaatacctcaaatttcccaaccgaaagacacctctctcctaatgagtaatgaagactctaccacgaaagaaacttttgataatattgacttacaagtcgccggtttgaccctgtcccctggtgcaaatgacaacatgtttctggattctgatgaaaagaacatgaatcattctcagggagctgcaaccctaatagatcccacatacacagaagactaccacggtacatttgactatgataaactatctccggaccaatacttggaattttccgactttgatataccacaaatcctgaatctattgatatcgctaccacaaaaggaacctcacatgaccacctatccagctggtttaatataccaatgtattagatatgctgatcataagataaagtccaagccactagtagaatcgttaattaacttatctctaactaaaattctgaccagtgtttcttccaacggagctgcaggattggtctccacagaagcttctttacaagcaggtgacattgtattgcaatcgtattggttaagttgtttatcttttctctattactacctctgtagagatgattcatttttcaagaggcatccaagcgtgttacaagagctgattaacaccatccactctattatcatagaactgacatcttccattcattgcaggttgatttctttgatagattcaactttactagcatacacaacaatccaggacgttaaacaaactttatacaaaagagactggaactttttcaaaaagagaaagcaggccaagcttttattgaaggaaaagaacagaaaacaattaaaggaacaacaaaagaaagaacttcatcgaaaaagccaggatcaagaaaatcatgaagaagaggagggtcgacaagatgggaatgattcagatgatagggcatcaacaaatgatgataacaattctagtgtttcactcttttatgataaagaaattttgagacatttatatcctccatcattcgaagagcagatgaaaccctctccactaaagattgttcaaatatttggtgccttgtcttacgttcttaatttacatcaaacgcatccgattttccaacaacaatgtctctctatttcagttaactggtttgccacgaccttattcaataagatcttaaaggacaaaaagaaaagatctttatcaagagcccatgctattcaaatcaggttcaatctttcaactctagaatcatggatacagaacaacgatttctgtgttcctaaaccgatgcttattgatgacttcatgtggcagcgctttccaatgactttaattcgcgacgttggcgagatagatttatcggatccgattctaagaaatgtagcaact

SEQ ID NO: 82771 - DNA, 303 bp, Saccharomyces pastorianus
atggattttatagagggtgaaaaggaccaaaggcaaaaatgtgataccgccaagcaagtaaactgcgagaaataccttcaagctagccattatggtcttttaatgctacttttctcttgctgttctgctcttcgatgtgttcaaaaccctttctcctggttattatacaagagggatttacagagaaaacttaagtgggagaaaactgaaaaatgtgccataccaattaggtgcaaaaatgaaagatctaaagggaagagaaccaagagttatttaaaagggctacatagggtgcaagattag

SEQ ID NO: 82772 - DNA, 237 bp, Saccharomyces pastorianus
atgcaagcggcatcacctgtcatcctggcccttaccgctccaattgccttgacaacaggaccactatcttctttggtggttgcatctgtcagtgggctaaccaatttgttttggctgttgccctggacccataaagttaaagaacaaaggaagaatattgcgaagaaatacgcgggtagtgaattggaagcaaggatgctatattgcgtaaagaatttggcaagtcgcacggattga

SEQ ID NO: 82773 - DNA, 546 bp, Saccharomyces pastorianus
atgagttcgaattcaacaccagaaaaggttactgcaggacacgttctgtggtatattcccaataagatcggttatgttcgtgttatcaccgccgccctttcttttttcgttatgaagaatcatcctacggcctttacatggttgtatagtacatcatgtctactggatgcgctagacggaaccatggcaagaaagtacaatcaggtttccagtctgggtgccgttctggacatggttaccgacagatccagcaccgctggcttgatgtgtttcctttgtgtgcagtatccccaatggtgcgttttcttccaattaatgctgggcttggatattactagtcactacatgcatatgtatgccagtttaagtgctggtaagacttctcataaaagtgtgggcgagggtgagtccagattgtacacctgtactacacgagaagagacgtactgttcactatctgtgcgtttaacgaactattttatgctggattgtacttgcagttgttctcaaattctgcaacctttggtaaatggactacaatcataa

SEQ ID NO: 82774 - DNA, 735 bp, Saccharomyces pastorianus
atgggtttacctaaatcggcatataagaagttactcatagattgtccaatgagagtcattaataaaaactgtgcccaacgagtcaaagatgtttctccgctcattacaaacttcgagaaatggtcggataagcgcaagaagctctatttcaaagatgaagaggagatggtggggcatttccatttggaaaatttcaatttaaaaaataacttatatggtaggcttttagcttctccaatgagagcagaaaaaatctcaaaattaaaatcgtgtagagaattactaattccattgaaagtggtaccatcaactggcaaagatcagcatgctgataaagataaactaaaactggtacctacactagattattccaaatcatacaaaagctcgtacgtattgaattcagcctccattgtacaagacaacttggcggctgcgacgtcatggttcccaatctcggtattgcaaacatcaactccaaagagcctagaagttgattcctctacatttataacggaatacaatgctaacttgcacgcatttataaaagcaagactttcagtgataccgaatgttggaccttcttcgataaatcgtgttttactcatttgtgacaagagaaaaacacccccgattgaaatacaagtagttagtcatggtaaagggctaccaattacacagtctgtctttaaccttggtatctccaagagccaatctagaagctatcgtgagtaa

SEQ ID NO: 82775 - DNA, 774 bp, Saccharomyces pastorianus
atggtttcagttatagacaagcttgtttttgactttggtgggaaaactctggtctctctcgcaccagataataatactttgtgtgtagccaataaaaatggcttaaccaagattctgaagacaaataacccagaagaagagccagagactttagattcttccaaattggtctcgtctataaaatgctattcaaactcgtactttctgatgactacaatgcaaggtgatgctcttaggtataacatcgattctagtcaagaagaattattggctagatttgctttacccctacgtgactgctgtgttattcattcaggtaaaatggccgtatttggaggagacgacttagaactaatccttttggaattggacgatgaaacgcacaaaaaacatgccattaaaatcgatgaacaagtttctcaaatttcttacaattcacagatgaatattttagcagtttcaatgataaatggtaaggtccaaattttttctctgacatctactattccaaacaaagttcatgagttaaatgattacatagtggccaattcatatgatgatacacacagagataagatactctcgaatatgatggatgatatagataaagacaatgacaatgacctgagtgaaacggttgatccagatgagaacaatgtggctgacccagaattctgtgctgctaatagaatttgcacgagagtggcttggcatccgaagggtctgcattttgcgctaccatgtgcagatgatacagtaaaatattctctataa

SEQ ID NO: 82776 - DNA, 483 bp, Saccharomyces pastorianus
atggcttggggtctagaagctcgtgttccattcttagacagagaatttttgcaattgtgtatgaacatcgatccaaatgaaaagatgattaaaccaaaggaaggacgtattgaaaagtacattctaaggaaggcattcgacaccacaggagaaccagatgctaagccatatttaccagaagaaattttatggagacaaaaggtacaattttccgacggtgttggttactcctggatcgacggattaaaagatactgccgaagcagtcatttcagatgaaatgtttgccagtccaaaggccgaatggggtagtgacattccaaccaccaaagaagctttctggtacagactaaaattcgatgctttgttccctcaaaagaccgtggctgacaccgttatgagatggattccaaaggccgactggggttgtgctgaagatcctttggtagatatgcccaaattcatgaaaggggatcctctagag

SEQ ID NO: 82777 - DNA, 1101 bp, Saccharomyces pastorianus
atgtgtggtattttcgccgctttcaggcacgaagacgtgcatagatataagccaaaggctctacaactatcaaaaagaatcagacaccgtggtccagattggtccggtaatgctatcaagaactccactatatttgttcatgaaagactagccattgtcggtgtggaatccggtgctcaaccaattacttcttcagacggagagtacatgctatgtgttaacggtgaaatctacaaccacattcaattaagagaagaatgcgcagactacgagtttggaacgctgagtgactgtgagcctatcatcccaatgtacttaaagcacgatatcgacgctcctaagtacttggatggtatgtttgcttggactctttacgacgctaaacaagatcgtattgtggcagccagagacccaatcggtattacgacattatatatgggacgctcttccgcttctccaaagaccgtttattttgcatccgaactaaaatgtttgactgacgactgtgacactatcactgcattcccaccgggccacgtatacgattctaagactgacaagatcacccgttacttcacaccagattggctggacgaaaaacgcattccttctaccccaatagattacatggcaattagacactccttagaaaaagccgttagaaagagattaatggccgaagtcccatacggtgttctattgtcgggtggtttggactcctctttaatcgcttccattgctgcccgtgaaactgcaaaggccactaacgatgtcgaaccatcaacttacgatagtaaggcaagacatctagcaggtatcgacgatgacggtaagctacacactgctggttggacaagtctccattcctttgccatcggtttaccaaatgctccagatttgcaagccgcaagaaaggttgccaaattcatcggctctattcatcatgaacacacctttacattacaagaaggtttggatgctttggacgacgtgatctaccatttggaaacttacgacgttaccactatcagagcttccactccaatgttcttactatccagaaagattaaggcccaggggtcaagatgttctttccggtga

SEQ ID NO: 82778 - DNA, 486 bp, Saccharomyces pastorianus
atgcagaatatgctatcaatgcatttttttagtgtgatggcaagtttgaatgcaatggcttcgatgagggtaatagtgtttttataccaactctcaattctgggtgactgctcaacaattgacagtttacgagaccttataatctcacaaattgttctcgcatataattgcattagtgtgcatgtaaatatgtatatatctacaaacggaagtgaggcatcgattgcttctcgtatgagtacactggaaagctgcctttttttgataacgatgaataaagggtcagcgtcgtttgggaaacgtcgattttttatagagatttggcttgatgtgcatctaagcgagtattatcggtctgcgcggcttagccgcgggaacaaaaagtggcacagaaacgagctcaagaaaagctcctcagaggtgtcatcagaaacacctcattcatccctacttcatggcacagtcgtaaatgagcaatttgcttga

SEQ ID NO: 82779 - DNA, 642 bp, Saccharomyces pastorianus
atgattttattaaagaggacaaaaattaggggcgtcagcgtctcttttgtaagcttgcaaagaaggactcacagcagactggtgaaccccataaggcagcaacatcaacaaattaccaagcaaaggagttcaaagattttaaagaatgcgcatttctatgactttagatcgctgcccaaagtacctactacacagtatttggaagctagggagctcacccgcgatattctgtatagcggatacaggccagtaatgtacccagtgaaggaaaacccgctattcagagataagaagagaaagtccttgcaaacgttattaacaatgaacgagaaaacaaacgcagaggcgaagacgatcgatgagaaaaagcacaagaacatattgtttggtgaacgtggcactggtggtataatgtcaggtggcgtgaacggtacatggaagtacaatcccaccgtacccaatgagctgttgccattcaattggtggtctacgtccagtatgggtatggaatattttcctgaatggaaaaacgtgcccccatatatgatgagaaagttgaagccgtttgacaaggcactgcaaatgcggttgacacacaaagcaaagacctgcagcatgcaagcttgcactgccgtcgtttac

SEQ ID NO: 82780 - DNA, 585 bp, Saccharomyces pastorianus
atgtctgcttcattgattaatcgttccttaacaaacattaggacagaactggattttctaaaagagtcaaatgtcatttcaaatgacgtttacgatcaaataaataagagcttgccggcaaaatgggatcctgccaatgcaccccgcaacgccagtccagcttccttggaatatgtcgaagctctttatcaatttgatcctcaacaagatggtgatttgggcttaaaaccaggtgacaaggtccaacttttagaaaaattatctccagagtggtacaagggtagctgtaatggccgtaccggtattttcccagcaaactatgtgaagccagctttctctgggtctaacggtccatccaatcttccaccacctccacagtataaagctcaagaattacaacaaatccccacgcaaaatagtgccgcatcatcttatcaacagcagccatttcctccaccttccacaaattattatcagcagcctcaacaacagccgcaacaagctcctcctccccaccaacaacaacaacaacaacaacaacaacaacatcagagctcatatagccactactctagagatcccggt

SEQ ID NO: 82781 - DNA, 876 bp, Saccharomyces pastorianus
atgaacagacaggaatccataaattcgtttaattcagacgaaacatcttcgttgtctgatgtagaaagtcagcagccgcaacaatatatcccttcagagagtggatctaaatccaacatggctcctaatcaactgaagttgacccggacggaaaccgtgaagtcattgcaggacatgggtgtgagctccaaagcccccgttcctgatgttaatgctcctcaatctagcaagaataagatttttcctgaagaatatactttagaaacccctacaggtttagttcctgtcgccactctacattccataggtagaacttctactgcgatttcccgtacgagaactagacagatcgatggcgcttcttcgccttcttctaatgaagatgctttagaaagtgataataacgaaaagggtaaagaaggcgactctagtggtgcgaatgacgaagctccagatctagatccggaaattgaattcgttacctttgtgactggcgatccagaaaacccccataactggcctgcatggatccgttggagttacactgtcctactgtcaatcttagttatttgtgtcgcctacgggtccgcttgtatcagtggtgggttaggaaccgttgaaaagaaataccatgttggtatggaagccgctattttatcatgttctttaatggttattgggttctcgctgggtcctttaatttggtctcctgttagtgatctttacggtagaagagttgcttactttgtttctatgggtctttatgtcatcttcaatatcccttgcgccttagctccaaatctaggttgtcttttagcttgtagatttttatgtggtgtttggtcatcatctggtttgtgtttaggggatcctcta

SEQ ID NO: 82782 - DNA, 1725 bp, Saccharomyces pastorianus
atgccgccagctagtactagtactaccaatgatatgataaccgaagaacctacttctccacaccaaatcccaaggcttacaaggagacttacggggtttcttccccaagaaatcaagtcaattgacacgatgattcctttaaagtcaagagcgttatggaataagcatcaagtcaaaaaatttaacaaggcagaagattttcaagatagattcattgaccatgtggaaactacattagcacgttccctatataattgtgatgacatggctgcttatgaagctgcttcgatgagtattcgtgacaatttggtcattgactggaacaaaactcagcagaaattcaccacaagagacccaaagagagtttactatttgtctttggagtttttgatgggtagggctttggataatgccctgattaatatgaagattgaagatccggaagaccctgctgcctcaaagggagaaccaagagaaatgattaaaggggctttggatgatttaggtttcaagttagaggatgtcttggaccaggaaccggacgcaggtttaggtaatggtggtctaggtcgtcttgcagcttgcttcgtcgactcaatggcaacggaaggcatccctgcctggggttatggtctacgttatgagtatggtatctttgctcaaaagattattgacggttaccaggtggaaactccagattactggttaaattctggtaatccgtgggaaattgaacgtaacgaagtgcaaattcctgtcaccttttatggttatgttgatagaccagaaggcggtaaaactacattgagtgcgtcacaatggatcggtggggaaagagttcttgctgtcgcgtatgatttcccagttccgggtttcaagacttccaatgtaaataacttaagactatggcaagcaaggccaacaacagaatttgattttgcaaaattcaataatggtgactataaaaactctgtggctcagcaacaacgcgcagagtctataaccgctgtgttgtatccaaacgataactttgctcaaggtaaggagttgaggttgaaacagcagtacttctggtgtgctgcatccttacacgacatcttaagaagattcaaaaaatccaagaggccatggactgaatttcctgaccaagtggctattcagttgaatgatactcatccaactttagccatcgttgaattacagagagttttggtcgatctagaaaaactagattggcacgaggcttgggacatcgtgaccaagacttttgcttatactaaccacactgttatgcaagaggccctggaaaaatggcccgtcggcctctttggccatttgctacccagacatttggaaattatatatgatatcaactggttcttcttgcaagatgtggccaaaaaattccccaaggatgttgatcttttgtctcgtatatccatcatcgaagaaaactctccagagagacagatcagaatggcctttttggctattgttggttctcataaagtcaacggtgttgcggaattgcactctgaattaattaagaccaccatcttcaaagatttcgtcaaattctacggtgcatcaaagtttgtcaacgttactaacggtatcacaccaagaagatggttgaagcaagctaaccctaacttggctagattgattagcaaaactcttaacgatcctacagaggactatctactagacatgacaaagttaact

SEQ ID NO: 82783 - DNA, 945 bp, Saccharomyces pastorianus
atggagcgtgttcaaactcttgctaagatctcttgtttatattattcaaagaaagcgttagcttgccgcacaacgtcctcagatcactccaataacgacgtcgaaaagaacatttcacacctggatccaaccggtgtggacaatgtttacgttccgcctgaacagccggaatcgaagcattcccgtttcaggatcgacaaggacactttcagaaaccacaccatcgctgctgtaggtgagttttgtgggacttttatgtttttatggtgcgcttatgttatctgcaacgttgccaaccatgacgttgcactgactgcgcagccggacggttcgcatccgggtcaattgatcatgattgccattggtttcgggttctccgttatgttttccatctggtgcttcgctggtgtctccggtggtgccttgaatcctgctgtgtcgctttccctatgtttggctagaactatctctcccaccagatgtgtggtgatgtggttctcgcaaatcattgccgggatggctgccggtggtgcggctagcgctatgactcctggtaaggttcttttcgccaattctttaggcctgggctgctccagatctagaggcttgtttctagaaatgttcggcactgctgccttgtgtttgaccgttttgatgactgctgttgaaaagcgtgaaaccaacttcatggccgctcttcccatcggtatttctctattcattgtccatgttgccttgaccggctacactggtaccggtgtcaaccctgcaagatctttgggtgccgccgtcgctgctagatatttccccacctaccactggatctattggatcggcccaatattgggtgccttcttggcttggtctgtttggcaattactgcaattcttagactacactacctacgttaatgccgaaaaggctgcaggtcaaaagaaggaataa

SEQ ID NO: 82784 - DNA, 801 bp, Saccharomyces pastorianus
atgtcttcgaacgattcgaacgataccgacaagcaacatacacgtctggatcctaccggtgtggacgacgcctacatccctccggagcagccggaaacaaagcaccatcgctttaaaatctctagggacaccctgagaaaccactttatcgctgcggtcggtgagttctgcggcacattcatgtttttatggtgcgcttacgttatctgcaatgtcgctaaccatgatgtcgcactcgttgcagcgcctgacggttcccatccgggtcaattgattatgattgccatcggtttcggattttccgtcatgttttctatctggtgttttgccggtgtctctggtggggctttgaatcctgctatgtcgctttcgctgtgcttggcgagagccgtctctcctacaagatgtgtcgttatgtgggtttcgcagattgttgccggaatggccgctggaggcgctgcaagcgccatgacacctggtgaagtcctctttgccaattctttgggcctgggctgctctaggacgaggggtctgttcctggagatgttcggcaccgctatcctatgtttaacagtcttaatgacggctgtggagaagcgtgaaaccaactttatggccgcgctgcccatcggcatctccctgtttatcgcacacgtcgctttgactgcatacacaggcacaggtgtcaaccctgcgaggtccttgggtgctgctgtcgcagccagatacttccctcattaccactggatttattggattggcccgctgttaggatccattttagcatggtctgtatggtaa

SEQ ID NO: 82785 - DNA, 25 bp, Saccharomyces pastorianus
gtgtattctgtggtaacgtcgttaa

SEQ ID NO: 82786 - DNA, 25 bp, Saccharomyces pastorianus
acaccatgttgtgtattctgtggta

SEQ ID NO: 82787 - DNA, 25 bp, Saccharomyces pastorianus
tagtagcagtgcttgtagacacaat

SEQ ID NO: 82788 - DNA, 25 bp, Saccharomyces pastorianus
aacgtcgttaatagtagcagtgctt

SEQ ID NO: 82789 - DNA, 25 bp, Saccharomyces pastorianus
ttgtagacacaatggctggagaagc

SEQ ID NO: 82790 - DNA, 25 bp, Saccharomyces pastorianus
gttgcttcgattctgtggtggaaat

SEQ ID NO: 82791 - DNA, 25 bp, Saccharomyces pastorianus
ttcggaacacacaccagattcgcag

SEQ ID NO: 82792 - DNA, 25 bp, Saccharomyces pastorianus
attcgcaggaagtaacagtaactag

SEQ ID NO: 82793 - DNA, 25 bp, Saccharomyces pastorianus
gtagtttcggaacacacaccagatt

SEQ ID NO: 82794 - DNA, 25 bp, Saccharomyces pastorianus
aactagcgtagtttgttgcttcgat

SEQ ID NO: 82795 - DNA, 25 bp, Saccharomyces pastorianus
tagtttgttgcttcgattctgtggt

SEQ ID NO: 82796 - DNA, 25 bp, Saccharomyces pastorianus
ggtgccagggtttacgacccaacag

SEQ ID NO: 82797 - DNA, 25 bp, Saccharomyces pastorianus
ggcactgcagtgaacttggccatgt

SEQ ID NO: 82798 - DNA, 25 bp, Saccharomyces pastorianus
tgcaggttgcaaggacatcgtcgtt

SEQ ID NO: 82799 - DNA, 25 bp, Saccharomyces pastorianus
aaagaaatttccgagctgagcagtc

SEQ ID NO: 82800 - DNA, 25 bp, Saccharomyces pastorianus
acagttttctccgatggacatcaca

SEQ ID NO: 82801 - DNA, 25 bp, Saccharomyces pastorianus
gtgtctcactttcagaggcactgca

SEQ ID NO: 82802 - DNA, 25 bp, Saccharomyces pastorianus
atcgtcgtttcagagcctgccaagg

SEQ ID NO: 82803 - DNA, 25 bp, Saccharomyces pastorianus
agcgcacgctgccaaggagagcatt

SEQ ID NO: 82804 - DNA, 25 bp, Saccharomyces pastorianus
cacacaccacgattttgaggcagta

SEQ ID NO: 82805 - DNA, 25 bp, Saccharomyces pastorianus
ggagacggcttcgattacacatttg

SEQ ID NO: 82806 - DNA, 25 bp, Saccharomyces pastorianus
acacatttgattgctccgggttgga

SEQ ID NO: 82807 - DNA, 25 bp, Saccharomyces pastorianus
gatcggctatgttgtcgaagacttt

SEQ ID NO: 82808 - DNA, 25 bp, Saccharomyces pastorianus
actgggcgttgaggtgttcaatccc

SEQ ID NO: 82809 - DNA, 25 bp, Saccharomyces pastorianus
aatccctccaagcacggtcataaat

SEQ ID NO: 82810 - DNA, 25 bp, Saccharomyces pastorianus
ggacagccaccaacattgcagtttg

SEQ ID NO: 82811 - DNA, 25 bp, Saccharomyces pastorianus
agtcactttcgaaacctctttgaag

SEQ ID NO: 82812 - DNA, 25 bp, Saccharomyces pastorianus
tctgtcacctggcatgctgttaaga

SEQ ID NO: 82813 - DNA, 25 bp, Saccharomyces pastorianus
caacggagacatcgccatggaagat

SEQ ID NO: 82814 - DNA, 25 bp, Saccharomyces pastorianus
tcagtcttagttcttggtgcaggcc

SEQ ID NO: 82815 - DNA, 25 bp, Saccharomyces pastorianus
gggtccaaaacctgtgccattccaa

SEQ ID NO: 82816 - DNA, 25 bp, Saccharomyces pastorianus
gaagaagttgttcgtgccatccaca

SEQ ID NO: 82817 - DNA, 25 bp, Saccharomyces pastorianus
agttatgactggttcgatcggctat

SEQ ID NO: 82818 - DNA, 25 bp, Saccharomyces pastorianus
aaacgatccctgtccatggatgaaa

SEQ ID NO: 82819 - DNA, 25 bp, Saccharomyces pastorianus
agacttggcaattttaccgtccaga

SEQ ID NO: 82820 - DNA, 25 bp, Saccharomyces pastorianus
ttgtcttccagagcctttttattta

SEQ ID NO: 82821 - DNA, 25 bp, Saccharomyces pastorianus
ctttgatattttcttggccatgctt

SEQ ID NO: 82822 - DNA, 25 bp, Saccharomyces pastorianus
atcctttacttctggctcaagagca

SEQ ID NO: 82823 - DNA, 25 bp, Saccharomyces pastorianus
agcaatgcctcattcttggctgctg

SEQ ID NO: 82824 - DNA, 25 bp, Saccharomyces pastorianus
gatatctttgcttccagcaatgcct

SEQ ID NO: 82825 - DNA, 25 bp, Saccharomyces pastorianus
aatcggttttttcagctctaggtag

SEQ ID NO: 82826 - DNA, 25 bp, Saccharomyces pastorianus
ggccatgctttgctttagacgatat

SEQ ID NO: 82827 - DNA, 25 bp, Saccharomyces pastorianus
atagagttggccagtttgtcttcca

SEQ ID NO: 82828 - DNA, 25 bp, Saccharomyces pastorianus
catccgattgtctagcagctcttga

SEQ ID NO: 82829 - DNA, 25 bp, Saccharomyces pastorianus
gatgcgatctataatgcggtcaaat

SEQ ID NO: 82830 - DNA, 25 bp, Saccharomyces pastorianus
aagagaagccgttgtggtgcgatta

SEQ ID NO: 82831 - DNA, 25 bp, Saccharomyces pastorianus
aaactaacacttgtccactatgtaa

SEQ ID NO: 82832 - DNA, 25 bp, Saccharomyces pastorianus
gatttcctagtctgctattcatgaa

SEQ ID NO: 82833 - DNA, 25 bp, Saccharomyces pastorianus
tattcatgaatttgcgttctgtggg

SEQ ID NO: 82834 - DNA, 25 bp, Saccharomyces pastorianus
cagaggttgctctaagatgcgatct

SEQ ID NO: 82835 - DNA, 25 bp, Saccharomyces pastorianus
gttgtttgtagatttcctagtctgc

SEQ ID NO: 82836 - DNA, 25 bp, Saccharomyces pastorianus
tcaagagcacgacggccgcagtaag

SEQ ID NO: 82837 - DNA, 25 bp, Saccharomyces pastorianus
acacaacaaagaaccgacgtcgtca

SEQ ID NO: 82838 - DNA, 25 bp, Saccharomyces pastorianus
gtgcgattattgagaccatgttata

SEQ ID NO: 82839 - DNA, 25 bp, Saccharomyces pastorianus
ggccgcagtaagcacaaatttcaga

SEQ ID NO: 82840 - DNA, 25 bp, Saccharomyces pastorianus
gtgcatattaaactccagggacttc

SEQ ID NO: 82841 - DNA, 25 bp, Saccharomyces pastorianus
ggcacgacctccagagggtgattca

SEQ ID NO: 82842 - DNA, 25 bp, Saccharomyces pastorianus
tagcgatgcggcagttgttcctgaa

SEQ ID NO: 82843 - DNA, 25 bp, Saccharomyces pastorianus
gaagtggttttgctggtacctacga

SEQ ID NO: 82844 - DNA, 25 bp, Saccharomyces pastorianus
agcagtgttggtcacatcctactat

SEQ ID NO: 82845 - DNA, 25 bp, Saccharomyces pastorianus
gattatggtcttgtgtaaaacggct

SEQ ID NO: 82846 - DNA, 25 bp, Saccharomyces pastorianus
gagtacgccgctgatgaagtggttt

SEQ ID NO: 82847 - DNA, 25 bp, Saccharomyces pastorianus
gtacctacgagccacactgatggat

SEQ ID NO: 82848 - DNA, 25 bp, Saccharomyces pastorianus
aagccattgaggatgcctttcgcaa

SEQ ID NO: 82849 - DNA, 25 bp, Saccharomyces pastorianus
acggctaggtaaatttcagtgcata

SEQ ID NO: 82850 - DNA, 25 bp, Saccharomyces pastorianus
gtcgatacaaggactgcccataaag

SEQ ID NO: 82851 - DNA, 25 bp, Saccharomyces pastorianus
agaacttaataccagccacgcagag

SEQ ID NO: 82852 - DNA, 25 bp, Saccharomyces pastorianus
gaggctgctattatcgaagatccaa

SEQ ID NO: 82853 - DNA, 25 bp, Saccharomyces pastorianus
ggccatttgccgcaccaaaattgat

SEQ ID NO: 82854 - DNA, 25 bp, Saccharomyces pastorianus
ccaattgtggccgagtgtgctgttg

SEQ ID NO: 82855 - DNA, 25 bp, Saccharomyces pastorianus
acgatgtggtgaacgtctctggtca

SEQ ID NO: 82856 - DNA, 25 bp, Saccharomyces pastorianus
tggtccaccgcaacagatgatgaat

SEQ ID NO: 82857 - DNA, 25 bp, Saccharomyces pastorianus
gcagttgctgcatttgtggtgttga

SEQ ID NO: 82858 - DNA, 25 bp, Saccharomyces pastorianus
tacattgtcaaaccctggcattgtt

SEQ ID NO: 82859 - DNA, 25 bp, Saccharomyces pastorianus
gacacttatttgaacccttaccctg

SEQ ID NO: 82860 - DNA, 25 bp, Saccharomyces pastorianus
ctggctactatttcactggtgatgg

SEQ ID NO: 82861 - DNA, 25 bp, Saccharomyces pastorianus
gttcttgaccctaacactggtgaag

SEQ ID NO: 82862 - DNA, 25 bp, Saccharomyces pastorianus
tgctagtgctgggtacatggtcttt

SEQ ID NO: 82863 - DNA, 25 bp, Saccharomyces pastorianus
tgtggctcacgggtttgccgcaaga

SEQ ID NO: 82864 - DNA, 25 bp, Saccharomyces pastorianus
aagtttgccgtccaacacattagtg

SEQ ID NO: 82865 - DNA, 25 bp, Saccharomyces pastorianus
caattgatcgtgatgcctggtttca

SEQ ID NO: 82866 - DNA, 25 bp, Saccharomyces pastorianus
agacctcttcagtggtgtggctcac

SEQ ID NO: 82867 - DNA, 25 bp, Saccharomyces pastorianus
aacggccgacaaatttgctagtgct

SEQ ID NO: 82868 - DNA, 25 bp, Saccharomyces pastorianus
catggtctttgttcccgatatttta

SEQ ID NO: 82869 - DNA, 25 bp, Saccharomyces pastorianus
atccatctttcgtcagcatcgagga

SEQ ID NO: 82870 - DNA, 25 bp, Saccharomyces pastorianus
gaagaggatcacatctttccggcaa

SEQ ID NO: 82871 - DNA, 25 bp, Saccharomyces pastorianus
agacattctcctgaagtcaccaaga

SEQ ID NO: 82872 - DNA, 25 bp, Saccharomyces pastorianus
ggataatcacgctacttaccagtta

SEQ ID NO: 82873 - DNA, 25 bp, Saccharomyces pastorianus
accgttggtatttgtagcttctaag

SEQ ID NO: 82874 - DNA, 25 bp, Saccharomyces pastorianus
gaagctgctcttgatcctggaaaaa

SEQ ID NO: 82875 - DNA, 25 bp, Saccharomyces pastorianus
agaatcattctcctacttagtctcg

SEQ ID NO: 82876 - DNA, 25 bp, Saccharomyces pastorianus
gtggcactatgctcttttacgttaa

SEQ ID NO: 82877 - DNA, 25 bp, Saccharomyces pastorianus
taacatacgattccagcgacccaga

SEQ ID NO: 82878 - DNA, 25 bp, Saccharomyces pastorianus
gatggctaagttccctcaatgaatt

SEQ ID NO: 82879 - DNA, 25 bp, Saccharomyces pastorianus
ggagtattctccgacaatcaaacca

SEQ ID NO: 82880 - DNA, 25 bp, Saccharomyces pastorianus
ttcttgggcagatctttctcggagg

SEQ ID NO: 82881 - DNA, 25 bp, Saccharomyces pastorianus
acggctctcatttttgggtccactg

SEQ ID NO: 82882 - DNA, 25 bp, Saccharomyces pastorianus
aaagctctttgctagaggccttctt

SEQ ID NO: 82883 - DNA, 25 bp, Saccharomyces pastorianus
agacgagctatttgtgaaccaccca

SEQ ID NO: 82884 - DNA, 25 bp, Saccharomyces pastorianus
aatcagactggatttacccacccct

SEQ ID NO: 82885 - DNA, 25 bp, Saccharomyces pastorianus
ctgatgggtggcagtacgtcctgta

SEQ ID NO: 82886 - DNA, 25 bp, Saccharomyces pastorianus
ttcatcaccgcaaataactacccga

SEQ ID NO: 82887 - DNA, 25 bp, Saccharomyces pastorianus
cacactagtatttagaagtccgcta

SEQ ID NO: 82888 - DNA, 25 bp, Saccharomyces pastorianus
tgttgttcaacacactagtatttag

SEQ ID NO: 82889 - DNA, 25 bp, Saccharomyces pastorianus
gaagtccgctatttttgttttcaat

SEQ ID NO: 82890 - DNA, 25 bp, Saccharomyces pastorianus
gtcctgtatggtcggtatgaattca

SEQ ID NO: 82891 - DNA, 25 bp, Saccharomyces pastorianus
gcagtacgtcctgtatggtcggtat

SEQ ID NO: 82892 - DNA, 25 bp, Saccharomyces pastorianus
tacccgaatcgtttctttggtcatt

SEQ ID NO: 82893 - DNA, 25 bp, Saccharomyces pastorianus
gtttctttggtcattgtgttgttca

SEQ ID NO: 82894 - DNA, 25 bp, Saccharomyces pastorianus
gaaatctcttggtatactgatgggt

SEQ ID NO: 82895 - DNA, 25 bp, Saccharomyces pastorianus
acgcttcagaagctcgaatcaaggc

SEQ ID NO: 82896 - DNA, 25 bp, Saccharomyces pastorianus
agagcagccacatcaacagggcaat

SEQ ID NO: 82897 - DNA, 25 bp, Saccharomyces pastorianus
atatctcttcactgattgccatgga

SEQ ID NO: 82898 - DNA, 25 bp, Saccharomyces pastorianus
gattgccatggaaaccccagagcag

SEQ ID NO: 82899 - DNA, 25 bp, Saccharomyces pastorianus
gacagtattttcaatattctgcaga

SEQ ID NO: 82900 - DNA, 25 bp, Saccharomyces pastorianus
gggcaatgaactaacggcaactcca

SEQ ID NO: 82901 - DNA, 25 bp, Saccharomyces pastorianus
gttctattgcccaatttgacaggaa

SEQ ID NO: 82902 - DNA, 25 bp, Saccharomyces pastorianus
tcagcccaaactagaatcgctctac

SEQ ID NO: 82903 - DNA, 25 bp, Saccharomyces pastorianus
agaaccttttactacaccttgacag

SEQ ID NO: 82904 - DNA, 25 bp, Saccharomyces pastorianus
acacttttatagagaccgcattaga

SEQ ID NO: 82905 - DNA, 25 bp, Saccharomyces pastorianus
agacggaagctcgatgctaacgctt

SEQ ID NO: 82906 - DNA, 25 bp, Saccharomyces pastorianus
aagacgtttccggtggctgcggatc

SEQ ID NO: 82907 - DNA, 25 bp, Saccharomyces pastorianus
tctgtgaagcatgtccggtggccaa

SEQ ID NO: 82908 - DNA, 25 bp, Saccharomyces pastorianus
gacgggctcaaagctttggtactca

SEQ ID NO: 82909 - DNA, 25 bp, Saccharomyces pastorianus
gtggccaaggattctgacgggctca

SEQ ID NO: 82910 - DNA, 25 bp, Saccharomyces pastorianus
gctgcggatccatgtttgctatcaa

SEQ ID NO: 82911 - DNA, 25 bp, Saccharomyces pastorianus
gagggacgatatttccagatggcat

SEQ ID NO: 82912 - DNA, 25 bp, Saccharomyces pastorianus
gaccatgctacgttctatatctgtg

SEQ ID NO: 82913 - DNA, 25 bp, Saccharomyces pastorianus
cagatggcaatgactccggaggaga

SEQ ID NO: 82914 - DNA, 25 bp, Saccharomyces pastorianus
atgtaaagtgcaagacgtttccggt

SEQ ID NO: 82915 - DNA, 25 bp, Saccharomyces pastorianus
tttggtactcaacgcagatggcaat

SEQ ID NO: 82916 - DNA, 25 bp, Saccharomyces pastorianus
atggcatggcctacaattgatcact

SEQ ID NO: 82917 - DNA, 25 bp, Saccharomyces pastorianus
gttcttgtaatctggaaagccgcat

SEQ ID NO: 82918 - DNA, 25 bp, Saccharomyces pastorianus
caatccggaaatgtgtctcagcaga

SEQ ID NO: 82919 - DNA, 25 bp, Saccharomyces pastorianus
gaggccaaacgcaaagttcttgtaa

SEQ ID NO: 82920 - DNA, 25 bp, Saccharomyces pastorianus
tcagcagaggcatttccctgtacac

SEQ ID NO: 82921 - DNA, 25 bp, Saccharomyces pastorianus
atggcccttatgcttgtgagaatcg

SEQ ID NO: 82922 - DNA, 25 bp, Saccharomyces pastorianus
tttcaggccttcgaactttttactg

SEQ ID NO: 82923 - DNA, 25 bp, Saccharomyces pastorianus
gcattccagtctcttcaggatggta

SEQ ID NO: 82924 - DNA, 25 bp, Saccharomyces pastorianus
atacgatggcgttgtggaagtttca

SEQ ID NO: 82925 - DNA, 25 bp, Saccharomyces pastorianus
atctgtgctcattgctctcttgaac

SEQ ID NO: 82926 - DNA, 25 bp, Saccharomyces pastorianus
ttttactgaccatctcaatccggaa

SEQ ID NO: 82927 - DNA, 25 bp, Saccharomyces pastorianus
aggatggtacgtgccacgggaccat

SEQ ID NO: 82928 - DNA, 25 bp, Saccharomyces pastorianus
aggcgaacggtatccatgctttaca

SEQ ID NO: 82929 - DNA, 25 bp, Saccharomyces pastorianus
tggcacgtaccatcctgaagagact

SEQ ID NO: 82930 - DNA, 25 bp, Saccharomyces pastorianus
tgaaacttccacaacgccatcgtat

SEQ ID NO: 82931 - DNA, 25 bp, Saccharomyces pastorianus
gagcaatgagcacagatggtcccgt

SEQ ID NO: 82932 - DNA, 25 bp, Saccharomyces pastorianus
gattctcacaagcataagggccatg

SEQ ID NO: 82933 - DNA, 25 bp, Saccharomyces pastorianus
gaatgcggctttccagattacaaga

SEQ ID NO: 82934 - DNA, 25 bp, Saccharomyces pastorianus
gattacaagaactttgcgtttggcc

SEQ ID NO: 82935 - DNA, 25 bp, Saccharomyces pastorianus
gctgagacacatttccggattgaga

SEQ ID NO: 82936 - DNA, 25 bp, Saccharomyces pastorianus
tttggcctctacaacgattctcaca

SEQ ID NO: 82937 - DNA, 25 bp, Saccharomyces pastorianus
gggaaatgcctctgctgagacacat

SEQ ID NO: 82938 - DNA, 25 bp, Saccharomyces pastorianus
gtatggtttattccctcttgcaaga

SEQ ID NO: 82939 - DNA, 25 bp, Saccharomyces pastorianus
aactaccatttttgtactcatccca

SEQ ID NO: 82940 - DNA, 25 bp, Saccharomyces pastorianus
acaggtcgagggtctaatgtcctta

SEQ ID NO: 82941 - DNA, 25 bp, Saccharomyces pastorianus
gtgaggtacacttcccaacatgagt

SEQ ID NO: 82942 - DNA, 25 bp, Saccharomyces pastorianus
gacaatgttacgcactactagacta

SEQ ID NO: 82943 - DNA, 25 bp, Saccharomyces pastorianus
agatcctatgggtgacggctggcta

SEQ ID NO: 82944 - DNA, 25 bp, Saccharomyces pastorianus
ggacgctacctatgttgagttgcca

SEQ ID NO: 82945 - DNA, 25 bp, Saccharomyces pastorianus
acaagactgcctttgtcggaattac

SEQ ID NO: 82946 - DNA, 25 bp, Saccharomyces pastorianus
gcctgccgatggtaccgtagaggaa

SEQ ID NO: 82947 - DNA, 25 bp, Saccharomyces pastorianus
aaaatacgccactgatgccttaggg

SEQ ID NO: 82948 - DNA, 25 bp, Saccharomyces pastorianus
gagattgcccaaggtgagtcgctag

SEQ ID NO: 82949 - DNA, 25 bp, Saccharomyces pastorianus
ttgagaaacagctccggcaatgccc

SEQ ID NO: 82950 - DNA, 25 bp, Saccharomyces pastorianus
gaactgcccagtcttcaaagcgatc

SEQ ID NO: 82951 - DNA, 25 bp, Saccharomyces pastorianus
aagtacctctcaaagctgaccaaga

SEQ ID NO: 82952 - DNA, 25 bp, Saccharomyces pastorianus
tcctcgtcatggttacacgtcttaa

SEQ ID NO: 82953 - DNA, 25 bp, Saccharomyces pastorianus
gatccggcaagaagttcccttggtt

SEQ ID NO: 82954 - DNA, 25 bp, Saccharomyces pastorianus
aagaggccagtgacctgattcgtga

SEQ ID NO: 82955 - DNA, 25 bp, Saccharomyces pastorianus
cattatgtttagacctccagtgcag

SEQ ID NO: 82956 - DNA, 25 bp, Saccharomyces pastorianus
agtctctgggtccattccttgaaaa

SEQ ID NO: 82957 - DNA, 25 bp, Saccharomyces pastorianus
aactgtttgaattatccggtcgcca

SEQ ID NO: 82958 - DNA, 25 bp, Saccharomyces pastorianus
attactggacgatgacgactcctcg

SEQ ID NO: 82959 - DNA, 25 bp, Saccharomyces pastorianus
aaagcgatcatcttgaggcactgaa

SEQ ID NO: 82960 - DNA, 25 bp, Saccharomyces pastorianus
tactacccgggcaaaatcttcgtct

SEQ ID NO: 82961 - DNA, 25 bp, Saccharomyces pastorianus
aagctccagctttgcgtgtcggtca

SEQ ID NO: 82962 - DNA, 25 bp, Saccharomyces pastorianus
tgtgttatatcactgtcctactccg

SEQ ID NO: 82963 - DNA, 25 bp, Saccharomyces pastorianus
acagaattgaactgtccccactcgt

SEQ ID NO: 82964 - DNA, 25 bp, Saccharomyces pastorianus
gtacgtcctcttcggtcttagcgaa

SEQ ID NO: 82965 - DNA, 25 bp, Saccharomyces pastorianus
ttagcgaatgcgtccagcgacagca

SEQ ID NO: 82966 - DNA, 25 bp, Saccharomyces pastorianus
aatatcgagattcaccaggtcacat

SEQ ID NO: 82967 - DNA, 25 bp, Saccharomyces pastorianus
acgataaagtgatcagcccgccggc

SEQ ID NO: 82968 - DNA, 25 bp, Saccharomyces pastorianus
atctctccagagtcgtccataatat

SEQ ID NO: 82969 - DNA, 25 bp, Saccharomyces pastorianus
accaccaattgtggccttgttacca

SEQ ID NO: 82970 - DNA, 25 bp, Saccharomyces pastorianus
gtcacatccatattaagctccagct

SEQ ID NO: 82971 - DNA, 25 bp, Saccharomyces pastorianus
aacgtggaccttttcatgatgtcta

SEQ ID NO: 82972 - DNA, 25 bp, Saccharomyces pastorianus
gatccagtcccacagtaagttgtta

SEQ ID NO: 82973 - DNA, 25 bp, Saccharomyces pastorianus
cgtctttttcgaaatgtctccattg

SEQ ID NO: 82974 - DNA, 25 bp, Saccharomyces pastorianus
gattgtccccaccagatatgagtac

SEQ ID NO: 82975 - DNA, 25 bp, Saccharomyces pastorianus
gacctcttgccggtggaagggacaa

SEQ ID NO: 82976 - DNA, 25 bp, Saccharomyces pastorianus
gttgtcattgagaccgcgcagttca

SEQ ID NO: 82977 - DNA, 25 bp, Saccharomyces pastorianus
tatccctggtatgttcgtctttttc

SEQ ID NO: 82978 - DNA, 25 bp, Saccharomyces pastorianus
acaggaacacacactttcaccagtt

SEQ ID NO: 82979 - DNA, 25 bp, Saccharomyces pastorianus
gaatcttcactttgcccctggaaaa

SEQ ID NO: 82980 - DNA, 25 bp, Saccharomyces pastorianus
aaggatcatccaaacacacttcacg

SEQ ID NO: 82981 - DNA, 25 bp, Saccharomyces pastorianus
gacgccaggtgttcccggacaggaa

SEQ ID NO: 82982 - DNA, 25 bp, Saccharomyces pastorianus
acttggtcgggcttcatcttgaatt

SEQ ID NO: 82983 - DNA, 25 bp, Saccharomyces pastorianus
aaaaggtcactgagcatcccacaga

SEQ ID NO: 82984 - DNA, 25 bp, Saccharomyces pastorianus
tcaagttcaatgacgaccccagact

SEQ ID NO: 82985 - DNA, 25 bp, Saccharomyces pastorianus
attcacattcaggttcgttctcttc

SEQ ID NO: 82986 - DNA, 25 bp, Saccharomyces pastorianus
atactatctttgctcagtcctttga

SEQ ID NO: 82987 - DNA, 25 bp, Saccharomyces pastorianus
caaagagcgctacggtttcatctgc

SEQ ID NO: 82988 - DNA, 25 bp, Saccharomyces pastorianus
atttctcggatcacactcatttaag

SEQ ID NO: 82989 - DNA, 25 bp, Saccharomyces pastorianus
ttcaagcattttttggccaagccca

SEQ ID NO: 82990 - DNA, 25 bp, Saccharomyces pastorianus
gagatcaacttcctctgtggattgt

SEQ ID NO: 82991 - DNA, 25 bp, Saccharomyces pastorianus
attatttcctgtgagacccatggcc

SEQ ID NO: 82992 - DNA, 25 bp, Saccharomyces pastorianus
tgcggccacagactatttctcggat

SEQ ID NO: 82993 - DNA, 25 bp, Saccharomyces pastorianus
aaagatagcacttctccaccatttg

SEQ ID NO: 82994 - DNA, 25 bp, Saccharomyces pastorianus
gcggatatcccaaatgctctgtcaa

SEQ ID NO: 82995 - DNA, 25 bp, Saccharomyces pastorianus
ggatctcatagtgggagcagacatg

SEQ ID NO: 82996 - DNA, 25 bp, Saccharomyces pastorianus
tggcagcagtgcacttgtacataat

SEQ ID NO: 82997 - DNA, 25 bp, Saccharomyces pastorianus
tgccaacttatattcaatgcctctt

SEQ ID NO: 82998 - DNA, 25 bp, Saccharomyces pastorianus
caatgcctcttatttaccttttttg

SEQ ID NO: 82999 - DNA, 25 bp, Saccharomyces pastorianus
caacgtgttattactcaacttccta

SEQ ID NO: 83000 - DNA, 25 bp, Saccharomyces pastorianus
caacaagcgagatgggcggatatcc

SEQ ID NO: 83001 - DNA, 25 bp, Saccharomyces pastorianus
tcaacttcctaataaatgccaactt

SEQ ID NO: 83002 - DNA, 25 bp, Saccharomyces pastorianus
acatggttgttttgatcgtcttaac

SEQ ID NO: 83003 - DNA, 25 bp, Saccharomyces pastorianus
gctctgtcaatattgaggtggatct

SEQ ID NO: 83004 - DNA, 25 bp, Saccharomyces pastorianus
tcgtcttaacccagtttcaacgtgt

SEQ ID NO: 83005 - DNA, 25 bp, Saccharomyces pastorianus
tgccaagccggatgcgaggacgcaa

SEQ ID NO: 83006 - DNA, 25 bp, Saccharomyces pastorianus
ggcactactgcagagattgaagacc

SEQ ID NO: 83007 - DNA, 25 bp, Saccharomyces pastorianus
ccctgaagagtatttggacgccaat

SEQ ID NO: 83008 - DNA, 25 bp, Saccharomyces pastorianus
gacgaataatgtcctacgaaaattg

SEQ ID NO: 83009 - DNA, 25 bp, Saccharomyces pastorianus
aaaacagtctgccaagccggatgcg

SEQ ID NO: 83010 - DNA, 25 bp, Saccharomyces pastorianus
gactctactgactgattcattacgt

SEQ ID NO: 83011 - DNA, 25 bp, Saccharomyces pastorianus
aacgtccttcgaatccctgaagagt

SEQ ID NO: 83012 - DNA, 25 bp, Saccharomyces pastorianus
ggatttcagaacacgatatatcgat

SEQ ID NO: 83013 - DNA, 25 bp, Saccharomyces pastorianus
aaggacctggtcattgtagatgaga

SEQ ID NO: 83014 - DNA, 25 bp, Saccharomyces pastorianus
atttggacgccaatgtttttagatt

SEQ ID NO: 83015 - DNA, 25 bp, Saccharomyces pastorianus
gatgacacaatgactctactgactg

SEQ ID NO: 83016 - DNA, 25 bp, Saccharomyces pastorianus
gcatcacagagcatcgcctgcggat

SEQ ID NO: 83017 - DNA, 25 bp, Saccharomyces pastorianus
tagtcaatcatcacacctcagcgat

SEQ ID NO: 83018 - DNA, 25 bp, Saccharomyces pastorianus
atcgcctgcggatgtgtccataaag

SEQ ID NO: 83019 - DNA, 25 bp, Saccharomyces pastorianus
agacatcttgctttcgcatcacaga

SEQ ID NO: 83020 - DNA, 25 bp, Saccharomyces pastorianus
gggtctgcaaaatgtaactctctct

SEQ ID NO: 83021 - DNA, 25 bp, Saccharomyces pastorianus
gattgcgaccttgttatcatggcat

SEQ ID NO: 83022 - DNA, 25 bp, Saccharomyces pastorianus
gatgccatcgagaggattgcgacct

SEQ ID NO: 83023 - DNA, 25 bp, Saccharomyces pastorianus
aaattatattcccacctacagacac

SEQ ID NO: 83024 - DNA, 25 bp, Saccharomyces pastorianus
gtgtccataaagtcgatactccaag

SEQ ID NO: 83025 - DNA, 25 bp, Saccharomyces pastorianus
accaacgttgaggaatctgtgtcga

SEQ ID NO: 83026 - DNA, 25 bp, Saccharomyces pastorianus
aattggcgacgtcgatggactgatc

SEQ ID NO: 83027 - DNA, 25 bp, Saccharomyces pastorianus
aacccactgttcgtccaacaagata

SEQ ID NO: 83028 - DNA, 25 bp, Saccharomyces pastorianus
gaacaaccggatctgcagtacgatt

SEQ ID NO: 83029 - DNA, 25 bp, Saccharomyces pastorianus
aaaagcaaacgagcacagtggccag

SEQ ID NO: 83030 - DNA, 25 bp, Saccharomyces pastorianus
tgaaggtgccagtggttctcacggc

SEQ ID NO: 83031 - DNA, 25 bp, Saccharomyces pastorianus
acgagccagataccacaacgggact

SEQ ID NO: 83032 - DNA, 25 bp, Saccharomyces pastorianus
acgggactccgcagacgggagcaat

SEQ ID NO: 83033 - DNA, 25 bp, Saccharomyces pastorianus
aagcggcttgctatggaacaggaaa

SEQ ID NO: 83034 - DNA, 25 bp, Saccharomyces pastorianus
caaatggttataccgtggccttgga

SEQ ID NO: 83035 - DNA, 25 bp, Saccharomyces pastorianus
gaccaggtttatgacaacccactgt

SEQ ID NO: 83036 - DNA, 25 bp, Saccharomyces pastorianus
aattctgggcgcagcaaagcgttca

SEQ ID NO: 83037 - DNA, 25 bp, Saccharomyces pastorianus
gacgtgtaggtaaagctcttgacaa

SEQ ID NO: 83038 - DNA, 25 bp, Saccharomyces pastorianus
aatggcgaatctggctccgaaacta

SEQ ID NO: 83039 - DNA, 25 bp, Saccharomyces pastorianus
tgagatttgctggtgtaccgccaat

SEQ ID NO: 83040 - DNA, 25 bp, Saccharomyces pastorianus
tacattatacgccaatacctgcttc

SEQ ID NO: 83041 - DNA, 25 bp, Saccharomyces pastorianus
tcgttagcgccttcaccaaaagtat

SEQ ID NO: 83042 - DNA, 25 bp, Saccharomyces pastorianus
ggcaatgatcaagccgctacagcat

SEQ ID NO: 83043 - DNA, 25 bp, Saccharomyces pastorianus
taccatgatgccgtttgggatcgaa

SEQ ID NO: 83044 - DNA, 25 bp, Saccharomyces pastorianus
aatcgtccaagatacagtgcggcat

SEQ ID NO: 83045 - DNA, 25 bp, Saccharomyces pastorianus
cagtataaacaacacctcctcagga

SEQ ID NO: 83046 - DNA, 25 bp, Saccharomyces pastorianus
agaagccggctgtgctacattatac

SEQ ID NO: 83047 - DNA, 25 bp, Saccharomyces pastorianus
ttgcagtcctcaaccatgacgttaa

SEQ ID NO: 83048 - DNA, 25 bp, Saccharomyces pastorianus
aaggtccaattctttgcagtcctca

SEQ ID NO: 83049 - DNA, 25 bp, Saccharomyces pastorianus
tgcactgatcattttggcgtactgt

SEQ ID NO: 83050 - DNA, 25 bp, Saccharomyces pastorianus
tagagtcacctacgttcatcattac

SEQ ID NO: 83051 - DNA, 25 bp, Saccharomyces pastorianus
gtatcatgcggttcgtcctatacgc

SEQ ID NO: 83052 - DNA, 25 bp, Saccharomyces pastorianus
taattggttgcttctggtacttctc

SEQ ID NO: 83053 - DNA, 25 bp, Saccharomyces pastorianus
ataacgctttggtgccagatccaga

SEQ ID NO: 83054 - DNA, 25 bp, Saccharomyces pastorianus
ttgcctgccttgtattttgcactga

SEQ ID NO: 83055 - DNA, 25 bp, Saccharomyces pastorianus
ggtacttctccccaatatcatttgg

SEQ ID NO: 83056 - DNA, 25 bp, Saccharomyces pastorianus
cgccggattcatggcacttgtaatt

SEQ ID NO: 83057 - DNA, 25 bp, Saccharomyces pastorianus
atggccacggtcgttatcttactga

SEQ ID NO: 83058 - DNA, 25 bp, Saccharomyces pastorianus
tgattacttagcttcctcagcatgg

SEQ ID NO: 83059 - DNA, 25 bp, Saccharomyces pastorianus
tggtccagatctaagtgcggccgta

SEQ ID NO: 83060 - DNA, 25 bp, Saccharomyces pastorianus
ttccatattcaccacgtttgtcgta

SEQ ID NO: 83061 - DNA, 25 bp, Saccharomyces pastorianus
gggcacgtcatctctatgagtttca

SEQ ID NO: 83062 - DNA, 25 bp, Saccharomyces pastorianus
aggactagctctgggcagcatcata

SEQ ID NO: 83063 - DNA, 25 bp, Saccharomyces pastorianus
atgctgtggaacctaggcgaccttt

SEQ ID NO: 83064 - DNA, 25 bp, Saccharomyces pastorianus
atacctctcatattcatgctgtgga

SEQ ID NO: 83065 - DNA, 25 bp, Saccharomyces pastorianus
aatggctccgtaatcgttgacttgt

SEQ ID NO: 83066 - DNA, 25 bp, Saccharomyces pastorianus
gccgcaataccactgttcttgatgt

SEQ ID NO: 83067 - DNA, 25 bp, Saccharomyces pastorianus
tcatctactcattgttgcgggtggc

SEQ ID NO: 83068 - DNA, 25 bp, Saccharomyces pastorianus
gcctttcgaggtcttatttgccaaa

SEQ ID NO: 83069 - DNA, 25 bp, Saccharomyces pastorianus
gaagcggccggtggattcactaata

SEQ ID NO: 83070 - DNA, 25 bp, Saccharomyces pastorianus
gtttttcctgtatttgcgtctgcca

SEQ ID NO: 83071 - DNA, 25 bp, Saccharomyces pastorianus
ggttttctacacatgctctaagggt

SEQ ID NO: 83072 - DNA, 25 bp, Saccharomyces pastorianus
tttcacaccgtcattcacagatgtt

SEQ ID NO: 83073 - DNA, 25 bp, Saccharomyces pastorianus
aagaagtttcctgtgctcatttgtg

SEQ ID NO: 83074 - DNA, 25 bp, Saccharomyces pastorianus
gtatcggagaactaccattcaccaa

SEQ ID NO: 83075 - DNA, 25 bp, Saccharomyces pastorianus
gatcatctggaaacgctgctaaagg

SEQ ID NO: 83076 - DNA, 25 bp, Saccharomyces pastorianus
accacgcatttgcactgggatccaa

SEQ ID NO: 83077 - DNA, 25 bp, Saccharomyces pastorianus
agtggcgacaccatatgggcggtca

SEQ ID NO: 83078 - DNA, 25 bp, Saccharomyces pastorianus
gaagtggaccctgaatacgtgagta

SEQ ID NO: 83079 - DNA, 25 bp, Saccharomyces pastorianus
gacaacgttgcactgttcttaaagc

SEQ ID NO: 83080 - DNA, 25 bp, Saccharomyces pastorianus
gtacaggccgtgtccaaatacatca

SEQ ID NO: 83081 - DNA, 25 bp, Saccharomyces pastorianus
agtaggtgtcctgttagatcatctg

SEQ ID NO: 83082 - DNA, 25 bp, Saccharomyces pastorianus
aatactctggaaaacctcgcgtgtt

SEQ ID NO: 83083 - DNA, 25 bp, Saccharomyces pastorianus
gagtgagcacggtattctaactact

SEQ ID NO: 83084 - DNA, 25 bp, Saccharomyces pastorianus
gaaggcaagtctcactgttacaatg

SEQ ID NO: 83085 - DNA, 25 bp, Saccharomyces pastorianus
attgcaagagcccaaatcccgatca

SEQ ID NO: 83086 - DNA, 25 bp, Saccharomyces pastorianus
ataccgggtctgtggccgtagacta

SEQ ID NO: 83087 - DNA, 25 bp, Saccharomyces pastorianus
ggaatacgcgcctcaatacggtgga

SEQ ID NO: 83088 - DNA, 25 bp, Saccharomyces pastorianus
gacttccctattgtcggtgttgcaa

SEQ ID NO: 83089 - DNA, 25 bp, Saccharomyces pastorianus
tggactgcagctcgtgggccaatac

SEQ ID NO: 83090 - DNA, 25 bp, Saccharomyces pastorianus
atcccgatcactgaaagagcccgta

SEQ ID NO: 83091 - DNA, 25 bp, Saccharomyces pastorianus
attgaattccaacgatgggcgcatc

SEQ ID NO: 83092 - DNA, 25 bp, Saccharomyces pastorianus
gcccactgggttcgagctcaaacaa

SEQ ID NO: 83093 - DNA, 25 bp, Saccharomyces pastorianus
gagatggttttgtccaccttagatt

SEQ ID NO: 83094 - DNA, 25 bp, Saccharomyces pastorianus
gattagatggttccacgcaagtgaa

SEQ ID NO: 83095 - DNA, 25 bp, Saccharomyces pastorianus
ttttccttattcactcaagtcctgg

SEQ ID NO: 83096 - DNA, 25 bp, Saccharomyces pastorianus
ggaaaagattcatcaactggccaaa

SEQ ID NO: 83097 - DNA, 25 bp, Saccharomyces pastorianus
aaagttttaacccacatgatgacag

SEQ ID NO: 83098 - DNA, 25 bp, Saccharomyces pastorianus
acagacaagctgctgatagggcaca

SEQ ID NO: 83099 - DNA, 25 bp, Saccharomyces pastorianus
aaggatattcccattttcatcttat

SEQ ID NO: 83100 - DNA, 25 bp, Saccharomyces pastorianus
attcggtattaatttggtgtgcgca

SEQ ID NO: 83101 - DNA, 25 bp, Saccharomyces pastorianus
tcaagtcctggatattctagagatg

SEQ ID NO: 83102 - DNA, 25 bp, Saccharomyces pastorianus
atgctgcaatttcccgaacacgtta

SEQ ID NO: 83103 - DNA, 25 bp, Saccharomyces pastorianus
atagggcacatcgtgtgggacaaac

SEQ ID NO: 83104 - DNA, 25 bp, Saccharomyces pastorianus
aactcgatatatttctgggcttact

SEQ ID NO: 83105 - DNA, 25 bp, Saccharomyces pastorianus
ttgatcgagtccgtgcccattttag

SEQ ID NO: 83106 - DNA, 25 bp, Saccharomyces pastorianus
gaaaatatttatctccacgctggcc

SEQ ID NO: 83107 - DNA, 25 bp, Saccharomyces pastorianus
gggcttactatttcccattcaagtt

SEQ ID NO: 83108 - DNA, 25 bp, Saccharomyces pastorianus
aagtacatgttaggcctgtcggttc

SEQ ID NO: 83109 - DNA, 25 bp, Saccharomyces pastorianus
tggttatatcttttttcccacttat

SEQ ID NO: 83110 - DNA, 25 bp, Saccharomyces pastorianus
taaccttgatcatccaatggtccct

SEQ ID NO: 83111 - DNA, 25 bp, Saccharomyces pastorianus
gcgggctttgccatttctacaaata

SEQ ID NO: 83112 - DNA, 25 bp, Saccharomyces pastorianus
gccctattgggcttttcattgccat

SEQ ID NO: 83113 - DNA, 25 bp, Saccharomyces pastorianus
atatgcctcatttggtttcttggcc

SEQ ID NO: 83114 - DNA, 25 bp, Saccharomyces pastorianus
ggttctttttgtgctgttggttata

SEQ ID NO: 83115 - DNA, 25 bp, Saccharomyces pastorianus
ggaatttgaacagggcctctcggtc

SEQ ID NO: 83116 - DNA, 25 bp, Saccharomyces pastorianus
actgcgtgattattcttgtgctgat

SEQ ID NO: 83117 - DNA, 25 bp, Saccharomyces pastorianus
aaattcctgatacggcggttgacaa

SEQ ID NO: 83118 - DNA, 25 bp, Saccharomyces pastorianus
aatgtgcgcccaatgatgaactgat

SEQ ID NO: 83119 - DNA, 25 bp, Saccharomyces pastorianus
cttcgacgcatactccatacaagga

SEQ ID NO: 83120 - DNA, 25 bp, Saccharomyces pastorianus
gcaatcgcagttacagtcacagtca

SEQ ID NO: 83121 - DNA, 25 bp, Saccharomyces pastorianus
gaacgactcgctgctggttgattta

SEQ ID NO: 83122 - DNA, 25 bp, Saccharomyces pastorianus
tataggttccaacagcaggtggcaa

SEQ ID NO: 83123 - DNA, 25 bp, Saccharomyces pastorianus
tagagcaagattcccacttgggcgc

SEQ ID NO: 83124 - DNA, 25 bp, Saccharomyces pastorianus
ggcgcactgtctcagtctattggga

SEQ ID NO: 83125 - DNA, 25 bp, Saccharomyces pastorianus
aggactcatgacatttcgctggacc

SEQ ID NO: 83126 - DNA, 25 bp, Saccharomyces pastorianus
gttcttagcgtctatggccggtgta

SEQ ID NO: 83127 - DNA, 25 bp, Saccharomyces pastorianus
gtggcaattcactttgttcttagcg

SEQ ID NO: 83128 - DNA, 25 bp, Saccharomyces pastorianus
gaagaactatcgtcattccaagaag

SEQ ID NO: 83129 - DNA, 25 bp, Saccharomyces pastorianus
gatttaagacgccaagctcacgaac

SEQ ID NO: 83130 - DNA, 25 bp, Saccharomyces pastorianus
acgaactttatttcacttcagatta

SEQ ID NO: 83131 - DNA, 25 bp, Saccharomyces pastorianus
cttcagattatgtcaagggcttcca

SEQ ID NO: 83132 - DNA, 25 bp, Saccharomyces pastorianus
gcgcatttaccttctacgaacttta

SEQ ID NO: 83133 - DNA, 25 bp, Saccharomyces pastorianus
agggcttccatagggttattttgca

SEQ ID NO: 83134 - DNA, 25 bp, Saccharomyces pastorianus
atggccggtgtaggcgcatttacct

SEQ ID NO: 83135 - DNA, 25 bp, Saccharomyces pastorianus
tgtgaaattagtcctcaaccccaga

SEQ ID NO: 83136 - DNA, 25 bp, Saccharomyces pastorianus
tcaaccccagagcatttagtgcaga

SEQ ID NO: 83137 - DNA, 25 bp, Saccharomyces pastorianus
tggtggcttttacttgatgaatcgc

SEQ ID NO: 83138 - DNA, 25 bp, Saccharomyces pastorianus
tgtgggcaacagtacggcaattacc

SEQ ID NO: 83139 - DNA, 25 bp, Saccharomyces pastorianus
ttaggaaagcccttaactcgctctg

SEQ ID NO: 83140 - DNA, 25 bp, Saccharomyces pastorianus
tgtcggtattacaagcatgcttctt

SEQ ID NO: 83141 - DNA, 25 bp, Saccharomyces pastorianus
tgctggcatagttgctggtggcttt

SEQ ID NO: 83142 - DNA, 25 bp, Saccharomyces pastorianus
gcagctgtcaaacaagagggtccct

SEQ ID NO: 83143 - DNA, 25 bp, Saccharomyces pastorianus
taactcgctctgtagggttaggcgg

SEQ ID NO: 83144 - DNA, 25 bp, Saccharomyces pastorianus
gagggtcccttggaaccaaatgtgg

SEQ ID NO: 83145 - DNA, 25 bp, Saccharomyces pastorianus
gcttctttgtgaatggttgcggtac

SEQ ID NO: 83146 - DNA, 25 bp, Saccharomyces pastorianus
gtccccttatggaggtttaatgtcg

SEQ ID NO: 83147 - DNA, 25 bp, Saccharomyces pastorianus
gaatcgccagccttctaagttgata

SEQ ID NO: 83148 - DNA, 25 bp, Saccharomyces pastorianus
gattttgatattactgctcctgatg

SEQ ID NO: 83149 - DNA, 25 bp, Saccharomyces pastorianus
atcagtttaccagcattcagcaaag

SEQ ID NO: 83150 - DNA, 25 bp, Saccharomyces pastorianus
gcaccagttgctatcagtttaccag

SEQ ID NO: 83151 - DNA, 25 bp, Saccharomyces pastorianus
attccctggctgtgggttaccaagt

SEQ ID NO: 83152 - DNA, 25 bp, Saccharomyces pastorianus
atcattgccgttataagtattgccc

SEQ ID NO: 83153 - DNA, 25 bp, Saccharomyces pastorianus
taccgtcaattccaccgaatcaagg

SEQ ID NO: 83154 - DNA, 25 bp, Saccharomyces pastorianus
tctaccctctttcttcattgtttta

SEQ ID NO: 83155 - DNA, 25 bp, Saccharomyces pastorianus
agtggctgcatcttccagttatgca

SEQ ID NO: 83156 - DNA, 25 bp, Saccharomyces pastorianus
ggcgttggtcaattcagtggctgca

SEQ ID NO: 83157 - DNA, 25 bp, Saccharomyces pastorianus
ttattgccaataacgccgtggagga

SEQ ID NO: 83158 - DNA, 25 bp, Saccharomyces pastorianus
agtattgcccaagttctacttattc

SEQ ID NO: 83159 - DNA, 25 bp, Saccharomyces pastorianus
aggtggtgctccaggcggtttccca

SEQ ID NO: 83160 - DNA, 25 bp, Saccharomyces pastorianus
actggtaagtctaacaagatcacta

SEQ ID NO: 83161 - DNA, 25 bp, Saccharomyces pastorianus
gagactatttcttggttagacagca

SEQ ID NO: 83162 - DNA, 25 bp, Saccharomyces pastorianus
gatggttgctgaagccgaaaaattc

SEQ ID NO: 83163 - DNA, 25 bp, Saccharomyces pastorianus
ggacaccgtcaccaagaaggctgaa

SEQ ID NO: 83164 - DNA, 25 bp, Saccharomyces pastorianus
agatcactattaccaacgacaaggg

SEQ ID NO: 83165 - DNA, 25 bp, Saccharomyces pastorianus
gaatctcaaagaattgcttccaaga

SEQ ID NO: 83166 - DNA, 25 bp, Saccharomyces pastorianus
gttagacagcaacactactgccagc

SEQ ID NO: 83167 - DNA, 25 bp, Saccharomyces pastorianus
gaacaatctgacaaggacaccgtca

SEQ ID NO: 83168 - DNA, 25 bp, Saccharomyces pastorianus
ctactgccagcaaggaagaattcga

SEQ ID NO: 83169 - DNA, 25 bp, Saccharomyces pastorianus
tattttgaatgtttccgccgtcgaa

SEQ ID NO: 83170 - DNA, 25 bp, Saccharomyces pastorianus
gaaaacggtattcgaaggattcata

SEQ ID NO: 83171 - DNA, 25 bp, Saccharomyces pastorianus
gtaccaccacccaagtcgaaaatca

SEQ ID NO: 83172 - DNA, 25 bp, Saccharomyces pastorianus
aatctttcagtgtcagtgaaagcga

SEQ ID NO: 83173 - DNA, 25 bp, Saccharomyces pastorianus
gaaagcgacaaaagatggagtggtt

SEQ ID NO: 83174 - DNA, 25 bp, Saccharomyces pastorianus
cggtattcgaaggattcatagcagc

SEQ ID NO: 83175 - DNA, 25 bp, Saccharomyces pastorianus
tttcagtgtcagtgaaagcgacaaa

SEQ ID NO: 83176 - DNA, 25 bp, Saccharomyces pastorianus
ttagcgtcgaaaacggtattcgaag

SEQ ID NO: 83177 - DNA, 25 bp, Saccharomyces pastorianus
aggattcatagcagcttgattctta

SEQ ID NO: 83178 - DNA, 25 bp, Saccharomyces pastorianus
ccaccacccaagtcgaaaatcaaga

SEQ ID NO: 83179 - DNA, 25 bp, Saccharomyces pastorianus
cacccaagtcgaaaatcaagacgtg

SEQ ID NO: 83180 - DNA, 25 bp, Saccharomyces pastorianus
aacggtattcgaaggattcatagca

SEQ ID NO: 83181 - DNA, 25 bp, Saccharomyces pastorianus
gtcattgaccttggcacccaagtaa

SEQ ID NO: 83182 - DNA, 25 bp, Saccharomyces pastorianus
ccttcttgtccaaaccgtaagcaat

SEQ ID NO: 83183 - DNA, 25 bp, Saccharomyces pastorianus
accgatcaaacgcttagcgtcgaaa

SEQ ID NO: 83184 - DNA, 25 bp, Saccharomyces pastorianus
catccttggtagcttgtctttgaga

SEQ ID NO: 83185 - DNA, 25 bp, Saccharomyces pastorianus
tacgcaagacattcaaaccagcaat

SEQ ID NO: 83186 - DNA, 25 bp, Saccharomyces pastorianus
gacgacagcgtcattgaccttggca

SEQ ID NO: 83187 - DNA, 25 bp, Saccharomyces pastorianus
aacttgaatttgtggcttaccgtca

SEQ ID NO: 83188 - DNA, 25 bp, Saccharomyces pastorianus
gcagcggcggtaggttcgttaataa

SEQ ID NO: 83189 - DNA, 25 bp, Saccharomyces pastorianus
aatcgttgaagtaagctgggacagt

SEQ ID NO: 83190 - DNA, 25 bp, Saccharomyces pastorianus
atcaagacgtgttcttccttaccct

SEQ ID NO: 83191 - DNA, 25 bp, Saccharomyces pastorianus
cttaccgtcaacatcgatcaacttg

SEQ ID NO: 83192 - DNA, 25 bp, Saccharomyces pastorianus
tcatccttacgctcaaatgtcgtcg

SEQ ID NO: 83193 - DNA, 25 bp, Saccharomyces pastorianus
agtttgatttcaatgttcccgtggt

SEQ ID NO: 83194 - DNA, 25 bp, Saccharomyces pastorianus
aatgtcgtcgtagctgaaacctcac

SEQ ID NO: 83195 - DNA, 25 bp, Saccharomyces pastorianus
aaaatttcaccatctgcgccaagca

SEQ ID NO: 83196 - DNA, 25 bp, Saccharomyces pastorianus
gttcccgtggtgtctaagcagctag

SEQ ID NO: 83197 - DNA, 25 bp, Saccharomyces pastorianus
gaacgcaccatctgcatcatcaaag

SEQ ID NO: 83198 - DNA, 25 bp, Saccharomyces pastorianus
aggtaaacatatcagcgccccaatt

SEQ ID NO: 83199 - DNA, 25 bp, Saccharomyces pastorianus
gcgccccaattgataacgacttttc

SEQ ID NO: 83200 - DNA, 25 bp, Saccharomyces pastorianus
aaatcacggtccaatctttcacaag

SEQ ID NO: 83201 - DNA, 25 bp, Saccharomyces pastorianus
ggaattcaattttaccaacctacag

SEQ ID NO: 83202 - DNA, 25 bp, Saccharomyces pastorianus
cagatctttcggttactcctcaaaa

SEQ ID NO: 83203 - DNA, 25 bp, Saccharomyces pastorianus
gacgcctctgaagctgttaattctc

SEQ ID NO: 83204 - DNA, 25 bp, Saccharomyces pastorianus
gggtaaagccactattgacattcta

SEQ ID NO: 83205 - DNA, 25 bp, Saccharomyces pastorianus
ggtgctgaacgtaagtgcttccaca

SEQ ID NO: 83206 - DNA, 25 bp, Saccharomyces pastorianus
gaagctacctttagagacgcctctg

SEQ ID NO: 83207 - DNA, 25 bp, Saccharomyces pastorianus
aattgttctcgctgttacttgtggc

SEQ ID NO: 83208 - DNA, 25 bp, Saccharomyces pastorianus
tccttgcgtctgattcgggtgaaca

SEQ ID NO: 83209 - DNA, 25 bp, Saccharomyces pastorianus
taaccacctggttgttcatcagaaa

SEQ ID NO: 83210 - DNA, 25 bp, Saccharomyces pastorianus
aaaatctgtattcagcccgaagctg

SEQ ID NO: 83211 - DNA, 25 bp, Saccharomyces pastorianus
taacgtcctaaactccaagatcggc

SEQ ID NO: 83212 - DNA, 25 bp, Saccharomyces pastorianus
tttgcctgctgtctagttttaccag

SEQ ID NO: 83213 - DNA, 25 bp, Saccharomyces pastorianus
gtggtgatttaactttccttgcgtc

SEQ ID NO: 83214 - DNA, 25 bp, Saccharomyces pastorianus
ggtcgatgaggcagaacagcagcaa

SEQ ID NO: 83215 - DNA, 25 bp, Saccharomyces pastorianus
aactctgcggttgagttgaccttag

SEQ ID NO: 83216 - DNA, 25 bp, Saccharomyces pastorianus
actgccgaatacttagtcgcttcta

SEQ ID NO: 83217 - DNA, 25 bp, Saccharomyces pastorianus
atgtgtggtctgttgttattccgcc

SEQ ID NO: 83218 - DNA, 25 bp, Saccharomyces pastorianus
gattagctattaactgctccgatag

SEQ ID NO: 83219 - DNA, 25 bp, Saccharomyces pastorianus
ataacttgcttgtagaacggttcac

SEQ ID NO: 83220 - DNA, 25 bp, Saccharomyces pastorianus
aagtggagtgctttggcgccagatt

SEQ ID NO: 83221 - DNA, 25 bp, Saccharomyces pastorianus
gttattccgccaaagtggagtgctt

SEQ ID NO: 83222 - DNA, 25 bp, Saccharomyces pastorianus
atctgggaacgtgtatgtgtggtct

SEQ ID NO: 83223 - DNA, 25 bp, Saccharomyces pastorianus
agaacggttcacaatccctacagat

SEQ ID NO: 83224 - DNA, 25 bp, Saccharomyces pastorianus
aatagcgatcgatcttcggacgaga

SEQ ID NO: 83225 - DNA, 25 bp, Saccharomyces pastorianus
ttgctaacctacacagcttgaatta

SEQ ID NO: 83226 - DNA, 25 bp, Saccharomyces pastorianus
tttggaacagcctgatggtacctgg

SEQ ID NO: 83227 - DNA, 25 bp, Saccharomyces pastorianus
aacaaaattcattgctcagcgtatt

SEQ ID NO: 83228 - DNA, 25 bp, Saccharomyces pastorianus
gaggaagaccccaacgaattcacaa

SEQ ID NO: 83229 - DNA, 25 bp, Saccharomyces pastorianus
atatcctgcctgttctaatgagaat

SEQ ID NO: 83230 - DNA, 25 bp, Saccharomyces pastorianus
ttacagggctgaagccgactatctt

SEQ ID NO: 83231 - DNA, 25 bp, Saccharomyces pastorianus
gcgtattactattgctagagctcaa

SEQ ID NO: 83232 - DNA, 25 bp, Saccharomyces pastorianus
gtatgattccaagggccgcaacgca

SEQ ID NO: 83233 - DNA, 25 bp, Saccharomyces pastorianus
tatggctcactttatttgacgacca

SEQ ID NO: 83234 - DNA, 25 bp, Saccharomyces pastorianus
gcaacgcaaacttcatcactctaaa

SEQ ID NO: 83235 - DNA, 25 bp, Saccharomyces pastorianus
tatgggtggtcaatcggctgctagc

SEQ ID NO: 83236 - DNA, 25 bp, Saccharomyces pastorianus
agaccgctctctattggttcacaaa

SEQ ID NO: 83237 - DNA, 25 bp, Saccharomyces pastorianus
gttaacggcgtcgaaatgccccaag

SEQ ID NO: 83238 - DNA, 25 bp, Saccharomyces pastorianus
ggctgtaaaactgtactccaagtgc

SEQ ID NO: 83239 - DNA, 25 bp, Saccharomyces pastorianus
ctggaacggtgcctcttataaggta

SEQ ID NO: 83240 - DNA, 25 bp, Saccharomyces pastorianus
acgccagactcctctagattctgga

SEQ ID NO: 83241 - DNA, 25 bp, Saccharomyces pastorianus
tgatgaaaacatctctcctgcccag

SEQ ID NO: 83242 - DNA, 25 bp, Saccharomyces pastorianus
gagaagggcatcatcatcgcagaca

SEQ ID NO: 83243 - DNA, 25 bp, Saccharomyces pastorianus
accccatcgaccaaggctgaacaag

SEQ ID NO: 83244 - DNA, 25 bp, Saccharomyces pastorianus
tgtcgacaggacaagggccaaatat

SEQ ID NO: 83245 - DNA, 25 bp, Saccharomyces pastorianus
aaacgcaactagaagaccgctctct

SEQ ID NO: 83246 - DNA, 25 bp, Saccharomyces pastorianus
tggacgaggtgctaacgccagactc

SEQ ID NO: 83247 - DNA, 25 bp, Saccharomyces pastorianus
ttttgagatgtgttcgttgcacccc

SEQ ID NO: 83248 - DNA, 25 bp, Saccharomyces pastorianus
aaaatcctcgagaagcaagctattg

SEQ ID NO: 83249 - DNA, 25 bp, Saccharomyces pastorianus
aggccttccacttttgaattactgc

SEQ ID NO: 83250 - DNA, 25 bp, Saccharomyces pastorianus
tgtgaacttaagaaccaggccttcc

SEQ ID NO: 83251 - DNA, 25 bp, Saccharomyces pastorianus
ggtacaccatattacatgtcgcctg

SEQ ID NO: 83252 - DNA, 25 bp, Saccharomyces pastorianus
gtgttgatggaccaaccatactccc

SEQ ID NO: 83253 - DNA, 25 bp, Saccharomyces pastorianus
gggttagccaaatctctggaaacta

SEQ ID NO: 83254 - DNA, 25 bp, Saccharomyces pastorianus
ggaaatgtgacaccgtccctgagta

SEQ ID NO: 83255 - DNA, 25 bp, Saccharomyces pastorianus
gaaggaacaatttacccaggcagtg

SEQ ID NO: 83256 - DNA, 25 bp, Saccharomyces pastorianus
atttgccacaacatacgtcggtaca

SEQ ID NO: 83257 - DNA, 25 bp, Saccharomyces pastorianus
atccgacatctggtcactaggttgt

SEQ ID NO: 83258 - DNA, 25 bp, Saccharomyces pastorianus
gatacattcaattcgtaccggagtt

SEQ ID NO: 83259 - DNA, 25 bp, Saccharomyces pastorianus
gaccatgggatatggcatactccgt

SEQ ID NO: 83260 - DNA, 25 bp, Saccharomyces pastorianus
atacgcagtcaaacacaccagcaaa

SEQ ID NO: 83261 - DNA, 25 bp, Saccharomyces pastorianus
tgccttcgtgtctgagaccttgaat

SEQ ID NO: 83262 - DNA, 25 bp, Saccharomyces pastorianus
accagtatctgtttgaccatgggat

SEQ ID NO: 83263 - DNA, 25 bp, Saccharomyces pastorianus
atttctcttatcctctctattatca

SEQ ID NO: 83264 - DNA, 25 bp, Saccharomyces pastorianus
gaaatcgctcgttgtaaaccgctaa

SEQ ID NO: 83265 - DNA, 25 bp, Saccharomyces pastorianus
tatgttcctaatacctgtgtgtttg

SEQ ID NO: 83266 - DNA, 25 bp, Saccharomyces pastorianus
aatgtggctcttccagaggatacat

SEQ ID NO: 83267 - DNA, 25 bp, Saccharomyces pastorianus
gatccagttttagaagcttacctta

SEQ ID NO: 83268 - DNA, 25 bp, Saccharomyces pastorianus
tattgatcggtataactgccttcgt

SEQ ID NO: 83269 - DNA, 25 bp, Saccharomyces pastorianus
gttcttcaccactcttatcaaggaa

SEQ ID NO: 83270 - DNA, 25 bp, Saccharomyces pastorianus
tagtggaggtgatcgcacgcaagcc

SEQ ID NO: 83271 - DNA, 25 bp, Saccharomyces pastorianus
gagactatggtataccccgtactat

SEQ ID NO: 83272 - DNA, 25 bp, Saccharomyces pastorianus
gtgaattctggttcgcactcggatt

SEQ ID NO: 83273 - DNA, 25 bp, Saccharomyces pastorianus
cccgtactatttctatagcggcaag

SEQ ID NO: 83274 - DNA, 25 bp, Saccharomyces pastorianus
actgtgatcttagtgatgtccctta

SEQ ID NO: 83275 - DNA, 25 bp, Saccharomyces pastorianus
gatcagaccctattttgatggcata

SEQ ID NO: 83276 - DNA, 25 bp, Saccharomyces pastorianus
gaagtgccatgagttcttcaccact

SEQ ID NO: 83277 - DNA, 25 bp, Saccharomyces pastorianus
ggattcctcatcgaatagtgccgag

SEQ ID NO: 83278 - DNA, 25 bp, Saccharomyces pastorianus
gtgatgtcccttatagtagcctcca

SEQ ID NO: 83279 - DNA, 25 bp, Saccharomyces pastorianus
gaggatacacaatcacctgtctcag

SEQ ID NO: 83280 - DNA, 25 bp, Saccharomyces pastorianus
caagcaacgctgaggaaaatgtaca

SEQ ID NO: 83281 - DNA, 25 bp, Saccharomyces pastorianus
atggagtactccttactacttttat

SEQ ID NO: 83282 - DNA, 25 bp, Saccharomyces pastorianus
agaagattgccaccgtctttttcta

SEQ ID NO: 83283 - DNA, 25 bp, Saccharomyces pastorianus
gggaagaactttcgagaagccaaca

SEQ ID NO: 83284 - DNA, 25 bp, Saccharomyces pastorianus
tactccttactacttttattgcgaa

SEQ ID NO: 83285 - DNA, 25 bp, Saccharomyces pastorianus
gaagccaacaagcaacgctgaggaa

SEQ ID NO: 83286 - DNA, 25 bp, Saccharomyces pastorianus
ttcacattaaatcccggagaagatt

SEQ ID NO: 83287 - DNA, 25 bp, Saccharomyces pastorianus
tattgcgaagaagattgccaccgtc

SEQ ID NO: 83288 - DNA, 25 bp, Saccharomyces pastorianus
gaatctttcacattaaatcccggag

SEQ ID NO: 83289 - DNA, 25 bp, Saccharomyces pastorianus
acaggagactgaagctggcgaatct

SEQ ID NO: 83290 - DNA, 25 bp, Saccharomyces pastorianus
gaagctggcgaatctttcacattaa

SEQ ID NO: 83291 - DNA, 25 bp, Saccharomyces pastorianus
aagagcttcgggttcgggcctgtca

SEQ ID NO: 83292 - DNA, 25 bp, Saccharomyces pastorianus
ttcaaacggcaacaagctcgcgcag

SEQ ID NO: 83293 - DNA, 25 bp, Saccharomyces pastorianus
tctgtggtggtgtcctcaaggcatc

SEQ ID NO: 83294 - DNA, 25 bp, Saccharomyces pastorianus
ggtttgcgtcgctcatggaaaagtc

SEQ ID NO: 83295 - DNA, 25 bp, Saccharomyces pastorianus
ccaatccaagctctttgtcaagtca

SEQ ID NO: 83296 - DNA, 25 bp, Saccharomyces pastorianus
aggaccgtcacttgtatgcgctcta

SEQ ID NO: 83297 - DNA, 25 bp, Saccharomyces pastorianus
catgaaatacctgttgtccggctac

SEQ ID NO: 83298 - DNA, 25 bp, Saccharomyces pastorianus
ggagatcgaccgcatcttcaaacgg

SEQ ID NO: 83299 - DNA, 25 bp, Saccharomyces pastorianus
gtgtacgagcctgccatgaccaagg

SEQ ID NO: 83300 - DNA, 25 bp, Saccharomyces pastorianus
aaggcatcgccagactgctcggttt

SEQ ID NO: 83301 - DNA, 25 bp, Saccharomyces pastorianus
tctactgcctctggaaccaatggta

SEQ ID NO: 83302 - DNA, 25 bp, Saccharomyces pastorianus
agtcgctgctattatagtagccagc

SEQ ID NO: 83303 - DNA, 25 bp, Saccharomyces pastorianus
atgagattaaattacagtcgctgct

SEQ ID NO: 83304 - DNA, 25 bp, Saccharomyces pastorianus
gattaaattacagtcgctgctatta

SEQ ID NO: 83305 - DNA, 25 bp, Saccharomyces pastorianus
cagtcgctgctattatagtagccag

SEQ ID NO: 83306 - DNA, 25 bp, Saccharomyces pastorianus
tacagtcgctgctattatagtagcc

SEQ ID NO: 83307 - DNA, 25 bp, Saccharomyces pastorianus
tgctattatagtagccagcggcggc

SEQ ID NO: 83308 - DNA, 25 bp, Saccharomyces pastorianus
gctattatagtagccagcggcggcg

SEQ ID NO: 83309 - DNA, 25 bp, Saccharomyces pastorianus
aaattacagtcgctgctattatagt

SEQ ID NO: 83310 - DNA, 25 bp, Saccharomyces pastorianus
gctgctattatagtagccagcggcg

SEQ ID NO: 83311 - DNA, 25 bp, Saccharomyces pastorianus
attacagtcgctgctattatagtag

SEQ ID NO: 83312 - DNA, 25 bp, Saccharomyces pastorianus
gagattaaattacagtcgctgctat

SEQ ID NO: 83313 - DNA, 25 bp, Saccharomyces pastorianus
ttggtgtgtcctaaacggtttccat

SEQ ID NO: 83314 - DNA, 25 bp, Saccharomyces pastorianus
gtgtgtcctaaacggtttccatgca

SEQ ID NO: 83315 - DNA, 25 bp, Saccharomyces pastorianus
gaagcttactgtctaagccatcatt

SEQ ID NO: 83316 - DNA, 25 bp, Saccharomyces pastorianus
gtgtcctaaacggtttccatgcaaa

SEQ ID NO: 83317 - DNA, 25 bp, Saccharomyces pastorianus
gtctaagccatcatttggtgtgtcc

SEQ ID NO: 83318 - DNA, 25 bp, Saccharomyces pastorianus
tcatttggtgtgtcctaaacggttt

SEQ ID NO: 83319 - DNA, 25 bp, Saccharomyces pastorianus
tcctaaacggtttccatgcaaagca

SEQ ID NO: 83320 - DNA, 25 bp, Saccharomyces pastorianus
taagccatcatttggtgtgtcctaa

SEQ ID NO: 83321 - DNA, 25 bp, Saccharomyces pastorianus
cttactgtctaagccatcatttggt

SEQ ID NO: 83322 - DNA, 25 bp, Saccharomyces pastorianus
gccatcatttggtgtgtcctaaacg

SEQ ID NO: 83323 - DNA, 25 bp, Saccharomyces pastorianus
tcagaagcttactgtctaagccatc

SEQ ID NO: 83324 - DNA, 25 bp, Saccharomyces pastorianus
gattactgcggaaccacttatagac

SEQ ID NO: 83325 - DNA, 25 bp, Saccharomyces pastorianus
aacttctacaacagagggcatttta

SEQ ID NO: 83326 - DNA, 25 bp, Saccharomyces pastorianus
ttcatttttgaggtttctaaggcat

SEQ ID NO: 83327 - DNA, 25 bp, Saccharomyces pastorianus
ttttccgaatgatgaaccgtcactt

SEQ ID NO: 83328 - DNA, 25 bp, Saccharomyces pastorianus
agatgtgttgatccaagcttgatag

SEQ ID NO: 83329 - DNA, 25 bp, Saccharomyces pastorianus
ggcaccccaaagcttacttgaaaca

SEQ ID NO: 83330 - DNA, 25 bp, Saccharomyces pastorianus
gataataggcgtacgtttacggcac

SEQ ID NO: 83331 - DNA, 25 bp, Saccharomyces pastorianus
gaattgatccttacgctgcaagaga

SEQ ID NO: 83332 - DNA, 25 bp, Saccharomyces pastorianus
aagaacgagaccgatcagcagtgcg

SEQ ID NO: 83333 - DNA, 25 bp, Saccharomyces pastorianus
gaaccgtcacttactacaatcacag

SEQ ID NO: 83334 - DNA, 25 bp, Saccharomyces pastorianus
agcaagaactatatccgaactggca

SEQ ID NO: 83335 - DNA, 25 bp, Saccharomyces pastorianus
acttgatgagctactgggcggtata

SEQ ID NO: 83336 - DNA, 25 bp, Saccharomyces pastorianus
gataccttgtacaatcctgatttaa

SEQ ID NO: 83337 - DNA, 25 bp, Saccharomyces pastorianus
tccctctaagcgctcaatacgttga

SEQ ID NO: 83338 - DNA, 25 bp, Saccharomyces pastorianus
ttacctcccggtacggaagatcaca

SEQ ID NO: 83339 - DNA, 25 bp, Saccharomyces pastorianus
agtgaattccttacaatgggctaga

SEQ ID NO: 83340 - DNA, 25 bp, Saccharomyces pastorianus
gccaccggaacgaatcatactgctg

SEQ ID NO: 83341 - DNA, 25 bp, Saccharomyces pastorianus
gctcgaggatgcatatcttccagta

SEQ ID NO: 83342 - DNA, 25 bp, Saccharomyces pastorianus
aagtcaaaaatctacgctgcccggt

SEQ ID NO: 83343 - DNA, 25 bp, Saccharomyces pastorianus
gggaaattccaagcctctttgattt

SEQ ID NO: 83344 - DNA, 25 bp, Saccharomyces pastorianus
aatgcagccagaaagttacctcccg

SEQ ID NO: 83345 - DNA, 25 bp, Saccharomyces pastorianus
tgacattgtcattcgcacagggaaa

SEQ ID NO: 83346 - DNA, 25 bp, Saccharomyces pastorianus
gggtgctgctatatcaaatgctact

SEQ ID NO: 83347 - DNA, 25 bp, Saccharomyces pastorianus
cctttcttccgtaacatcaactttg

SEQ ID NO: 83348 - DNA, 25 bp, Saccharomyces pastorianus
tgccctctgttttgacaacgagcca

SEQ ID NO: 83349 - DNA, 25 bp, Saccharomyces pastorianus
gtcccagggacgcagatgaagttat

SEQ ID NO: 83350 - DNA, 25 bp, Saccharomyces pastorianus
gatatcttaaaccttcgcgtgaaac

SEQ ID NO: 83351 - DNA, 25 bp, Saccharomyces pastorianus
taccgatgaacccttatacccaata

SEQ ID NO: 83352 - DNA, 25 bp, Saccharomyces pastorianus
gtttttaacgctatccttaccgatg

SEQ ID NO: 83353 - DNA, 25 bp, Saccharomyces pastorianus
actgtgccaatctccattctcagga

SEQ ID NO: 83354 - DNA, 25 bp, Saccharomyces pastorianus
ggcacaccagaatttatggctccag

SEQ ID NO: 83355 - DNA, 25 bp, Saccharomyces pastorianus
gaacttctacattttgtggcacacc

SEQ ID NO: 83356 - DNA, 25 bp, Saccharomyces pastorianus
ttcgagcaagaattcacctctgcgc

SEQ ID NO: 83357 - DNA, 25 bp, Saccharomyces pastorianus
tatgtcgcagcgttatctcctttta

SEQ ID NO: 83358 - DNA, 25 bp, Saccharomyces pastorianus
gaatatttacaatacctggccgaaa

SEQ ID NO: 83359 - DNA, 25 bp, Saccharomyces pastorianus
aagagagtttcataatgccgtcgaa

SEQ ID NO: 83360 - DNA, 25 bp, Saccharomyces pastorianus
aaggagttcttatcaggcgatttga

SEQ ID NO: 83361 - DNA, 25 bp, Saccharomyces pastorianus
gttggttccaccatctttattgaat

SEQ ID NO: 83362 - DNA, 25 bp, Saccharomyces pastorianus
ttttaccaataaccaccatgccagt

SEQ ID NO: 83363 - DNA, 25 bp, Saccharomyces pastorianus
ggtcggtaaccacaatcatgctggc

SEQ ID NO: 83364 - DNA, 25 bp, Saccharomyces pastorianus
tcatgctggcactatggagagtcat

SEQ ID NO: 83365 - DNA, 25 bp, Saccharomyces pastorianus
tattagatctgtcccaaatgctttg

SEQ ID NO: 83366 - DNA, 25 bp, Saccharomyces pastorianus
aattgggagccaccgttatatgatt

SEQ ID NO: 83367 - DNA, 25 bp, Saccharomyces pastorianus
ggagagtcatccacatacaaacatt

SEQ ID NO: 83368 - DNA, 25 bp, Saccharomyces pastorianus
atcagacgttgcctgtatctagaca

SEQ ID NO: 83369 - DNA, 25 bp, Saccharomyces pastorianus
gggcggattctctcaataccagggc

SEQ ID NO: 83370 - DNA, 25 bp, Saccharomyces pastorianus
gggtccctactatttgttcttgcgt

SEQ ID NO: 83371 - DNA, 25 bp, Saccharomyces pastorianus
tgctatttcatatttcccattcggt

SEQ ID NO: 83372 - DNA, 25 bp, Saccharomyces pastorianus
agtctccgtgactcattgaatcgat

SEQ ID NO: 83373 - DNA, 25 bp, Saccharomyces pastorianus
ttttcttttgggtgcaacagcctgt

SEQ ID NO: 83374 - DNA, 25 bp, Saccharomyces pastorianus
tatgggaccactcgcgtacttaaaa

SEQ ID NO: 83375 - DNA, 25 bp, Saccharomyces pastorianus
ggtgctgactattacatgtgctctt

SEQ ID NO: 83376 - DNA, 25 bp, Saccharomyces pastorianus
gacactgttctcaagctgggcggat

SEQ ID NO: 83377 - DNA, 25 bp, Saccharomyces pastorianus
aacagcctgtttcactctttgtact

SEQ ID NO: 83378 - DNA, 25 bp, Saccharomyces pastorianus
ttatttcgcagccttttccaagaac

SEQ ID NO: 83379 - DNA, 25 bp, Saccharomyces pastorianus
ttgtctcaccgatgggatcacctaa

SEQ ID NO: 83380 - DNA, 25 bp, Saccharomyces pastorianus
ttagtgggccatccggatacagcga

SEQ ID NO: 83381 - DNA, 25 bp, Saccharomyces pastorianus
gatcacctaatatcatggcctcgta

SEQ ID NO: 83382 - DNA, 25 bp, Saccharomyces pastorianus
taaattattgagcactccatcgccc

SEQ ID NO: 83383 - DNA, 25 bp, Saccharomyces pastorianus
tcgcccgtcaatagatctcacaatt

SEQ ID NO: 83384 - DNA, 25 bp, Saccharomyces pastorianus
ggcagtatttcgaattccgcatttg

SEQ ID NO: 83385 - DNA, 25 bp, Saccharomyces pastorianus
ttccgcatttgtttcgggcaatagt

SEQ ID NO: 83386 - DNA, 25 bp, Saccharomyces pastorianus
tacagcgatgatgccggtgtgccaa

SEQ ID NO: 83387 - DNA, 25 bp, Saccharomyces pastorianus
attcgctactctctcatggtaacga

SEQ ID NO: 83388 - DNA, 25 bp, Saccharomyces pastorianus
gtgaggattccaaacgctaccactg

SEQ ID NO: 83389 - DNA, 25 bp, Saccharomyces pastorianus
atggcctcgtatgactctgatttac

SEQ ID NO: 83390 - DNA, 25 bp, Saccharomyces pastorianus
taggcgggaaagtggagaacccttg

SEQ ID NO: 83391 - DNA, 25 bp, Saccharomyces pastorianus
ttagaaatataggcgggaaagtgga

SEQ ID NO: 83392 - DNA, 25 bp, Saccharomyces pastorianus
agaaatataggcgggaaagtggaga

SEQ ID NO: 83393 - DNA, 25 bp, Saccharomyces pastorianus
tagaaatataggcgggaaagtggag

SEQ ID NO: 83394 - DNA, 25 bp, Saccharomyces pastorianus
aattagaaatataggcgggaaagtg

SEQ ID NO: 83395 - DNA, 25 bp, Saccharomyces pastorianus
taacaaaattagaaatataggcggg

SEQ ID NO: 83396 - DNA, 25 bp, Saccharomyces pastorianus
tataggcgggaaagtggagaaccct

SEQ ID NO: 83397 - DNA, 25 bp, Saccharomyces pastorianus
ttaacaaaattagaaatataggcgg

SEQ ID NO: 83398 - DNA, 25 bp, Saccharomyces pastorianus
gaaatataggcgggaaagtggagaa

SEQ ID NO: 83399 - DNA, 25 bp, Saccharomyces pastorianus
attagaaatataggcgggaaagtgg

SEQ ID NO: 83400 - DNA, 25 bp, Saccharomyces pastorianus
ggaaggttctggttctttaactgct

SEQ ID NO: 83401 - DNA, 25 bp, Saccharomyces pastorianus
ttatgccggtgttaatggtcatttg

SEQ ID NO: 83402 - DNA, 25 bp, Saccharomyces pastorianus
caatcacaatgagcttttgaccgaa

SEQ ID NO: 83403 - DNA, 25 bp, Saccharomyces pastorianus
acaggttccattgatttatgccggt

SEQ ID NO: 83404 - DNA, 25 bp, Saccharomyces pastorianus
aacgttggtttgtctgtttctcgtg

SEQ ID NO: 83405 - DNA, 25 bp, Saccharomyces pastorianus
gaattggtgaatttgagtcctcctt

SEQ ID NO: 83406 - DNA, 25 bp, Saccharomyces pastorianus
caatattctcctttggctacagaag

SEQ ID NO: 83407 - DNA, 25 bp, Saccharomyces pastorianus
gagtcctcctttttgtcctatctaa

SEQ ID NO: 83408 - DNA, 25 bp, Saccharomyces pastorianus
aagagccgctaagctttctgaaaag

SEQ ID NO: 83409 - DNA, 25 bp, Saccharomyces pastorianus
gttctttaactgctttgcctgttat

SEQ ID NO: 83410 - DNA, 25 bp, Saccharomyces pastorianus
aacccaaggtggtgatgtctccgct

SEQ ID NO: 83411 - DNA, 25 bp, Saccharomyces pastorianus
gtattctcgttgaacctacttggtt

SEQ ID NO: 83412 - DNA, 25 bp, Saccharomyces pastorianus
gacggtaacgtccataagggcttgt

SEQ ID NO: 83413 - DNA, 25 bp, Saccharomyces pastorianus
agcattgtgctattgtggcttccct

SEQ ID NO: 83414 - DNA, 25 bp, Saccharomyces pastorianus
actgcaaggctgtcgctagagtttt

SEQ ID NO: 83415 - DNA, 25 bp, Saccharomyces pastorianus
gaaattgatcctttggtgttccatg

SEQ ID NO: 83416 - DNA, 25 bp, Saccharomyces pastorianus
tggcttccctttgttgcctagtaaa

SEQ ID NO: 83417 - DNA, 25 bp, Saccharomyces pastorianus
agagggttgacatcctcgctcaaat

SEQ ID NO: 83418 - DNA, 25 bp, Saccharomyces pastorianus
agatgcaccatgtcttattcagtga

SEQ ID NO: 83419 - DNA, 25 bp, Saccharomyces pastorianus
taggacaaggcctcttgttcggcaa

SEQ ID NO: 83420 - DNA, 25 bp, Saccharomyces pastorianus
aagggcttgttgtcattgttgctgg

SEQ ID NO: 83421 - DNA, 25 bp, Saccharomyces pastorianus
atttgccaaggccaactgtattctc

SEQ ID NO: 83422 - DNA, 25 bp, Saccharomyces pastorianus
tcgtagtatctacaggaatgtcctc

SEQ ID NO: 83423 - DNA, 25 bp, Saccharomyces pastorianus
gagaatacagttggccttggcaaat

SEQ ID NO: 83424 - DNA, 25 bp, Saccharomyces pastorianus
tgtccctcaatgatacactttctgc

SEQ ID NO: 83425 - DNA, 25 bp, Saccharomyces pastorianus
actttctgcctttaatctctttgac

SEQ ID NO: 83426 - DNA, 25 bp, Saccharomyces pastorianus
atctctttgacgtttgcttttagta

SEQ ID NO: 83427 - DNA, 25 bp, Saccharomyces pastorianus
agttccaacttctagttccatttcg

SEQ ID NO: 83428 - DNA, 25 bp, Saccharomyces pastorianus
atctcctgcttatggttgaaacccc

SEQ ID NO: 83429 - DNA, 25 bp, Saccharomyces pastorianus
gaatgtcctcaaaaaactctagcga

SEQ ID NO: 83430 - DNA, 25 bp, Saccharomyces pastorianus
ttttttgctatctcctgcttatggt

SEQ ID NO: 83431 - DNA, 25 bp, Saccharomyces pastorianus
ggaaactgttccaagtgtccctcaa

SEQ ID NO: 83432 - DNA, 25 bp, Saccharomyces pastorianus
aaaactctagcgacagccttgcagt

SEQ ID NO: 83433 - DNA, 25 bp, Saccharomyces pastorianus
acgtggatccggaaactacatatac

SEQ ID NO: 83434 - DNA, 25 bp, Saccharomyces pastorianus
agcccaagcgccgtttgatatagac

SEQ ID NO: 83435 - DNA, 25 bp, Saccharomyces pastorianus
tagtggaagttcgatggctacacca

SEQ ID NO: 83436 - DNA, 25 bp, Saccharomyces pastorianus
gacatagcattgtttcagcctccaa

SEQ ID NO: 83437 - DNA, 25 bp, Saccharomyces pastorianus
gatacaaccacctcagcagggtcaa

SEQ ID NO: 83438 - DNA, 25 bp, Saccharomyces pastorianus
gacgacttggcgtttgatctagacg

SEQ ID NO: 83439 - DNA, 25 bp, Saccharomyces pastorianus
cggtgtatggcttggatgacatctc

SEQ ID NO: 83440 - DNA, 25 bp, Saccharomyces pastorianus
ctcttcggtactatcgcagtttgaa

SEQ ID NO: 83441 - DNA, 25 bp, Saccharomyces pastorianus
agccaatccggctcaaattcaggta

SEQ ID NO: 83442 - DNA, 25 bp, Saccharomyces pastorianus
tatacgtaccaacaaccaaatcctc

SEQ ID NO: 83443 - DNA, 25 bp, Saccharomyces pastorianus
cgaacagctgcgcaatagagacata

SEQ ID NO: 83444 - DNA, 25 bp, Saccharomyces pastorianus
tgaaattgctcacaacatctccgct

SEQ ID NO: 83445 - DNA, 25 bp, Saccharomyces pastorianus
gccgctgaaattgctcacaacatct

SEQ ID NO: 83446 - DNA, 25 bp, Saccharomyces pastorianus
gagttgtcattttggctagagctaa

SEQ ID NO: 83447 - DNA, 25 bp, Saccharomyces pastorianus
ttggctagagctaaggctttgggta

SEQ ID NO: 83448 - DNA, 25 bp, Saccharomyces pastorianus
atgcacaccaagacttacgccgctg

SEQ ID NO: 83449 - DNA, 25 bp, Saccharomyces pastorianus
tctccgctaagaacagagttgtcat

SEQ ID NO: 83450 - DNA, 25 bp, Saccharomyces pastorianus
ttgctcacaacatctccgctaagaa

SEQ ID NO: 83451 - DNA, 25 bp, Saccharomyces pastorianus
gactttcttagtcgctaacgttaag

SEQ ID NO: 83452 - DNA, 25 bp, Saccharomyces pastorianus
atctggtcacaagactttcttagtc

SEQ ID NO: 83453 - DNA, 25 bp, Saccharomyces pastorianus
tagtcgctaacgttaaggatttgga

SEQ ID NO: 83454 - DNA, 25 bp, Saccharomyces pastorianus
caccaagacttacgccgctgaaatt

SEQ ID NO: 83455 - DNA, 25 bp, Saccharomyces pastorianus
agcgccatcagcaggtaacgggcaa

SEQ ID NO: 83456 - DNA, 25 bp, Saccharomyces pastorianus
gtccgattggcctaatctggaagag

SEQ ID NO: 83457 - DNA, 25 bp, Saccharomyces pastorianus
gaagatcaaagtatttcactccgtg

SEQ ID NO: 83458 - DNA, 25 bp, Saccharomyces pastorianus
aaaccgtctggaaaccacgatgcag

SEQ ID NO: 83459 - DNA, 25 bp, Saccharomyces pastorianus
tatttcactccgtgttaccgaaaag

SEQ ID NO: 83460 - DNA, 25 bp, Saccharomyces pastorianus
taacgggcaaagtctgagttccaga

SEQ ID NO: 83461 - DNA, 25 bp, Saccharomyces pastorianus
atcccggcagcttaccaaaacgtgg

SEQ ID NO: 83462 - DNA, 25 bp, Saccharomyces pastorianus
cagagcattgcttatcatcgccgtt

SEQ ID NO: 83463 - DNA, 25 bp, Saccharomyces pastorianus
gaatcagcaagagcgccatcagcag

SEQ ID NO: 83464 - DNA, 25 bp, Saccharomyces pastorianus
gcgagctgttgtccgattggcctaa

SEQ ID NO: 83465 - DNA, 25 bp, Saccharomyces pastorianus
ttgatcgttacacttcctatcccgg

SEQ ID NO: 83466 - DNA, 25 bp, Saccharomyces pastorianus
aaaccttgtcgtaatctatgtggcc

SEQ ID NO: 83467 - DNA, 25 bp, Saccharomyces pastorianus
gaacacaccatcttgttgcatgctc

SEQ ID NO: 83468 - DNA, 25 bp, Saccharomyces pastorianus
gagcactttgccattgaaacttttg

SEQ ID NO: 83469 - DNA, 25 bp, Saccharomyces pastorianus
gatacctagacagacttggccaaga

SEQ ID NO: 83470 - DNA, 25 bp, Saccharomyces pastorianus
taaatccgttcccatcgtcaaaaat

SEQ ID NO: 83471 - DNA, 25 bp, Saccharomyces pastorianus
cgatagaccgcaactttgggacttt

SEQ ID NO: 83472 - DNA, 25 bp, Saccharomyces pastorianus
atgtggccacagtatcgcaccatat

SEQ ID NO: 83473 - DNA, 25 bp, Saccharomyces pastorianus
tacgataacctgttagccgctgtaa

SEQ ID NO: 83474 - DNA, 25 bp, Saccharomyces pastorianus
aagaccatcaggtaatgcccacgtt

SEQ ID NO: 83475 - DNA, 25 bp, Saccharomyces pastorianus
accatatcgtatccacggcggtaaa

SEQ ID NO: 83476 - DNA, 25 bp, Saccharomyces pastorianus
taaaggacgctacttacacgggtat

SEQ ID NO: 83477 - DNA, 25 bp, Saccharomyces pastorianus
gatcgtggccaaacctctaaaagca

SEQ ID NO: 83478 - DNA, 25 bp, Saccharomyces pastorianus
ggaagcaacagcgatcgtggccaaa

SEQ ID NO: 83479 - DNA, 25 bp, Saccharomyces pastorianus
gtttgagaacaatattcccggagat

SEQ ID NO: 83480 - DNA, 25 bp, Saccharomyces pastorianus
acaacgatcgattgtttacgccaac

SEQ ID NO: 83481 - DNA, 25 bp, Saccharomyces pastorianus
gacatgatgcaatctgctgggagaa

SEQ ID NO: 83482 - DNA, 25 bp, Saccharomyces pastorianus
gtgaataagaacaaccctgcagaat

SEQ ID NO: 83483 - DNA, 25 bp, Saccharomyces pastorianus
ggctttcaagaatctctctcagaag

SEQ ID NO: 83484 - DNA, 25 bp, Saccharomyces pastorianus
gaagtcaacggttttacatgaagcc

SEQ ID NO: 83485 - DNA, 25 bp, Saccharomyces pastorianus
gtttacgccaacaaaattcggatat

SEQ ID NO: 83486 - DNA, 25 bp, Saccharomyces pastorianus
gaagagcacgctgaggctttcaaga

SEQ ID NO: 83487 - DNA, 25 bp, Saccharomyces pastorianus
agggagcttctatccgaggcggaaa

SEQ ID NO: 83488 - DNA, 25 bp, Saccharomyces pastorianus
actggctatttcaattacgtctcta

SEQ ID NO: 83489 - DNA, 25 bp, Saccharomyces pastorianus
gagctagctttattccattggacaa

SEQ ID NO: 83490 - DNA, 25 bp, Saccharomyces pastorianus
attatcaccctttgtatcttactgt

SEQ ID NO: 83491 - DNA, 25 bp, Saccharomyces pastorianus
atgccatccttgcagatcatcggta

SEQ ID NO: 83492 - DNA, 25 bp, Saccharomyces pastorianus
atttctttcattttgccaggccttt

SEQ ID NO: 83493 - DNA, 25 bp, Saccharomyces pastorianus
acgggatctacgtcgatttctttca

SEQ ID NO: 83494 - DNA, 25 bp, Saccharomyces pastorianus
gaaatatcctcactttatacccgaa

SEQ ID NO: 83495 - DNA, 25 bp, Saccharomyces pastorianus
tactgttctcatatctactggctat

SEQ ID NO: 83496 - DNA, 25 bp, Saccharomyces pastorianus
gcaatagttggtgccacgggatcta

SEQ ID NO: 83497 - DNA, 25 bp, Saccharomyces pastorianus
gccaaatctgcgtagtgagtcttta

SEQ ID NO: 83498 - DNA, 25 bp, Saccharomyces pastorianus
ttaagtttatctctattcatctggg

SEQ ID NO: 83499 - DNA, 25 bp, Saccharomyces pastorianus
aaaattactccccattccagagttg

SEQ ID NO: 83500 - DNA, 25 bp, Saccharomyces pastorianus
gtcacaggcgtggatggcctattca

SEQ ID NO: 83501 - DNA, 25 bp, Saccharomyces pastorianus
aacaatatcctgcttgactgctcaa

SEQ ID NO: 83502 - DNA, 25 bp, Saccharomyces pastorianus
gatccgttggattggtttgaagcta

SEQ ID NO: 83503 - DNA, 25 bp, Saccharomyces pastorianus
tcccctttattcctgggtaatgtca

SEQ ID NO: 83504 - DNA, 25 bp, Saccharomyces pastorianus
tccagagttggtccctttcagatta

SEQ ID NO: 83505 - DNA, 25 bp, Saccharomyces pastorianus
tcgcagctagctctatcgttggata

SEQ ID NO: 83506 - DNA, 25 bp, Saccharomyces pastorianus
ggatacatattaggcctcggtgata

SEQ ID NO: 83507 - DNA, 25 bp, Saccharomyces pastorianus
ttgattcagcaagccacggatccat

SEQ ID NO: 83508 - DNA, 25 bp, Saccharomyces pastorianus
tttgattcctttcccgatccgttgg

SEQ ID NO: 83509 - DNA, 25 bp, Saccharomyces pastorianus
agacctgggaattgcgtttgatcag

SEQ ID NO: 83510 - DNA, 25 bp, Saccharomyces pastorianus
gaaacccggtacaaatgcgacagga

SEQ ID NO: 83511 - DNA, 25 bp, Saccharomyces pastorianus
cctcgaccaggtgaatttacgccaa

SEQ ID NO: 83512 - DNA, 25 bp, Saccharomyces pastorianus
tcgaagacaataaccccacggactt

SEQ ID NO: 83513 - DNA, 25 bp, Saccharomyces pastorianus
gacggctacagcacaatgggcaaaa

SEQ ID NO: 83514 - DNA, 25 bp, Saccharomyces pastorianus
aaattaccgtgggatcctcgaccag

SEQ ID NO: 83515 - DNA, 25 bp, Saccharomyces pastorianus
aattggagtcatatgtcacgagcac

SEQ ID NO: 83516 - DNA, 25 bp, Saccharomyces pastorianus
aacaatatcttcctctatgagccca

SEQ ID NO: 83517 - DNA, 25 bp, Saccharomyces pastorianus
ttaaatcaccgacttctaccaacca

SEQ ID NO: 83518 - DNA, 25 bp, Saccharomyces pastorianus
gagagcttgtaccagaaaacgttta

SEQ ID NO: 83519 - DNA, 25 bp, Saccharomyces pastorianus
tggaacaactgtagcgaaacccggt

SEQ ID NO: 83520 - DNA, 25 bp, Saccharomyces pastorianus
aagccagggctgtcaacaacaatat

SEQ ID NO: 83521 - DNA, 25 bp, Saccharomyces pastorianus
atactgtttcaaattggtccctccg

SEQ ID NO: 83522 - DNA, 25 bp, Saccharomyces pastorianus
agttcatatgccacaccaacgatac

SEQ ID NO: 83523 - DNA, 25 bp, Saccharomyces pastorianus
aaactgcggactgttcaggctggat

SEQ ID NO: 83524 - DNA, 25 bp, Saccharomyces pastorianus
ataggctcatttccttatacgctgc

SEQ ID NO: 83525 - DNA, 25 bp, Saccharomyces pastorianus
tataacggcacatagggtcttacct

SEQ ID NO: 83526 - DNA, 25 bp, Saccharomyces pastorianus
aagcgtccctgtcattagttcatat

SEQ ID NO: 83527 - DNA, 25 bp, Saccharomyces pastorianus
tgatatcgatacaagcgtccctgtc

SEQ ID NO: 83528 - DNA, 25 bp, Saccharomyces pastorianus
tagggtcttacctgccagtgatgat

SEQ ID NO: 83529 - DNA, 25 bp, Saccharomyces pastorianus
gatacctctaagcaaggcacagacg

SEQ ID NO: 83530 - DNA, 25 bp, Saccharomyces pastorianus
acaacggtttttcacacttcatgga

SEQ ID NO: 83531 - DNA, 25 bp, Saccharomyces pastorianus
gatcaatttgagaccagcgattacc

SEQ ID NO: 83532 - DNA, 25 bp, Saccharomyces pastorianus
ggcaaggtcaattaatcccgtcaat

SEQ ID NO: 83533 - DNA, 25 bp, Saccharomyces pastorianus
gaacattcttccaacgattcttcgg

SEQ ID NO: 83534 - DNA, 25 bp, Saccharomyces pastorianus
cgacttcctcgctatccaaatataa

SEQ ID NO: 83535 - DNA, 25 bp, Saccharomyces pastorianus
gacccaaattttgcatacgcgtata

SEQ ID NO: 83536 - DNA, 25 bp, Saccharomyces pastorianus
aaggcgctagcttgtgatcctcagc

SEQ ID NO: 83537 - DNA, 25 bp, Saccharomyces pastorianus
attacggattgggtacgagcgctat

SEQ ID NO: 83538 - DNA, 25 bp, Saccharomyces pastorianus
ttaatctgttgttgcggtggttctt

SEQ ID NO: 83539 - DNA, 25 bp, Saccharomyces pastorianus
taagatgggccagttgctctattcc

SEQ ID NO: 83540 - DNA, 25 bp, Saccharomyces pastorianus
gatgatgccacagcccattatttgc

SEQ ID NO: 83541 - DNA, 25 bp, Saccharomyces pastorianus
tgaaactcgttcctgatgatgccac

SEQ ID NO: 83542 - DNA, 25 bp, Saccharomyces pastorianus
agcatgtcatttgcaaccgacttcc

SEQ ID NO: 83543 - DNA, 25 bp, Saccharomyces pastorianus
ttcgtaccaccagctctatggaaaa

SEQ ID NO: 83544 - DNA, 25 bp, Saccharomyces pastorianus
aatgcccttcttcgttggtccgatt

SEQ ID NO: 83545 - DNA, 25 bp, Saccharomyces pastorianus
ttgaatactgttctgttgcttctat

SEQ ID NO: 83546 - DNA, 25 bp, Saccharomyces pastorianus
aatgcagtgctcaatgccaatcccg

SEQ ID NO: 83547 - DNA, 25 bp, Saccharomyces pastorianus
gcaagcacgctattgttggcattga

SEQ ID NO: 83548 - DNA, 25 bp, Saccharomyces pastorianus
tattggccttgacgcagctatctgg

SEQ ID NO: 83549 - DNA, 25 bp, Saccharomyces pastorianus
gactattccattcgttctaatcgca

SEQ ID NO: 83550 - DNA, 25 bp, Saccharomyces pastorianus
ttcatcggcgtcctattttcaaggt

SEQ ID NO: 83551 - DNA, 25 bp, Saccharomyces pastorianus
gcctatactgatcttttggtcggga

SEQ ID NO: 83552 - DNA, 25 bp, Saccharomyces pastorianus
tggtccgatttggtacgtcttgcac

SEQ ID NO: 83553 - DNA, 25 bp, Saccharomyces pastorianus
ctggtatcactggactttgcctata

SEQ ID NO: 83554 - DNA, 25 bp, Saccharomyces pastorianus
tgataagaggttccacttggccctt

SEQ ID NO: 83555 - DNA, 25 bp, Saccharomyces pastorianus
cctgcattgcgcttttaatttcggc

SEQ ID NO: 83556 - DNA, 25 bp, Saccharomyces pastorianus
tcaccacactgttcgccacaagata

SEQ ID NO: 83557 - DNA, 25 bp, Saccharomyces pastorianus
tggcccttttaatcagccatctgat

SEQ ID NO: 83558 - DNA, 25 bp, Saccharomyces pastorianus
aagtcgcagttgcagtgcccttcct

SEQ ID NO: 83559 - DNA, 25 bp, Saccharomyces pastorianus
atctgatagcgctcaccacactgtt

SEQ ID NO: 83560 - DNA, 25 bp, Saccharomyces pastorianus
gcatcctgcccgatttatggtcttc

SEQ ID NO: 83561 - DNA, 25 bp, Saccharomyces pastorianus
agctttccgcaacagtacctgcatt

SEQ ID NO: 83562 - DNA, 25 bp, Saccharomyces pastorianus
atttcggcaggaagtttatgtacca

SEQ ID NO: 83563 - DNA, 25 bp, Saccharomyces pastorianus
cgatgattgcatggcaagtcgcagt

SEQ ID NO: 83564 - DNA, 25 bp, Saccharomyces pastorianus
tgcccgatttatggtcttccctgtg

SEQ ID NO: 83565 - DNA, 25 bp, Saccharomyces pastorianus
aactgtatctttcctaccagcaagc

SEQ ID NO: 83566 - DNA, 25 bp, Saccharomyces pastorianus
aaccagcatcatcaagaccctttgg

SEQ ID NO: 83567 - DNA, 25 bp, Saccharomyces pastorianus
caccttcgaatacattttgccgtca

SEQ ID NO: 83568 - DNA, 25 bp, Saccharomyces pastorianus
tcgacatccgccgatttaatcaatg

SEQ ID NO: 83569 - DNA, 25 bp, Saccharomyces pastorianus
acatctagctctattggcaccaaca

SEQ ID NO: 83570 - DNA, 25 bp, Saccharomyces pastorianus
agtgaacatgtcttcgtccgcatca

SEQ ID NO: 83571 - DNA, 25 bp, Saccharomyces pastorianus
taatcaatgatttacccgtgggccc

SEQ ID NO: 83572 - DNA, 25 bp, Saccharomyces pastorianus
gaggatttttcgacggcaccagtga

SEQ ID NO: 83573 - DNA, 25 bp, Saccharomyces pastorianus
ggcagcttccacaaatttatcgtcg

SEQ ID NO: 83574 - DNA, 25 bp, Saccharomyces pastorianus
agacgcagttctccacgaggtactt

SEQ ID NO: 83575 - DNA, 25 bp, Saccharomyces pastorianus
agttcgcttatctcggatctacatt

SEQ ID NO: 83576 - DNA, 25 bp, Saccharomyces pastorianus
caagcttgctggtgaacgtagtaac

SEQ ID NO: 83577 - DNA, 25 bp, Saccharomyces pastorianus
gaaggacgccaagattctgacttat

SEQ ID NO: 83578 - DNA, 25 bp, Saccharomyces pastorianus
aggttatatccgcaactagtggtaa

SEQ ID NO: 83579 - DNA, 25 bp, Saccharomyces pastorianus
gcatgcaattaatcaggtcgaccct

SEQ ID NO: 83580 - DNA, 25 bp, Saccharomyces pastorianus
gatgacacttttatacggaacctgg

SEQ ID NO: 83581 - DNA, 25 bp, Saccharomyces pastorianus
agacaccttccgtgaattttccaag

SEQ ID NO: 83582 - DNA, 25 bp, Saccharomyces pastorianus
agatcgtactacttagacaccttcc

SEQ ID NO: 83583 - DNA, 25 bp, Saccharomyces pastorianus
aatcatgaggcgttgagatcgtact

SEQ ID NO: 83584 - DNA, 25 bp, Saccharomyces pastorianus
aactgccaggatttgtctattccag

SEQ ID NO: 83585 - DNA, 25 bp, Saccharomyces pastorianus
cgcccagtttttgaagttattgcat

SEQ ID NO: 83586 - DNA, 25 bp, Saccharomyces pastorianus
ggtcgaccctcaagaattgatggat

SEQ ID NO: 83587 - DNA, 25 bp, Saccharomyces pastorianus
tttgccacctactgcggcgttgatg

SEQ ID NO: 83588 - DNA, 25 bp, Saccharomyces pastorianus
tgagaaggccatcttcatttttgtc

SEQ ID NO: 83589 - DNA, 25 bp, Saccharomyces pastorianus
taagtctgaatatccatttgaaaaa

SEQ ID NO: 83590 - DNA, 25 bp, Saccharomyces pastorianus
aagagaattatgctaccccctgaga

SEQ ID NO: 83591 - DNA, 25 bp, Saccharomyces pastorianus
aatatctagttcctgctgaccttac

SEQ ID NO: 83592 - DNA, 25 bp, Saccharomyces pastorianus
ttgctgacaggttcaagaataggat

SEQ ID NO: 83593 - DNA, 25 bp, Saccharomyces pastorianus
tgaagtctacatttaagtctgaata

SEQ ID NO: 83594 - DNA, 25 bp, Saccharomyces pastorianus
tactgcggcgttgatgtctgccata

SEQ ID NO: 83595 - DNA, 25 bp, Saccharomyces pastorianus
gtcaatgatactttgccacctactg

SEQ ID NO: 83596 - DNA, 25 bp, Saccharomyces pastorianus
gtaaatatctagttcctgctgacct

SEQ ID NO: 83597 - DNA, 25 bp, Saccharomyces pastorianus
tcggagaggattgctgacaggttca

SEQ ID NO: 83598 - DNA, 25 bp, Saccharomyces pastorianus
agccgtcatatttggcaatgtcgga

SEQ ID NO: 83599 - DNA, 25 bp, Saccharomyces pastorianus
gagacagttagcattacatgactct

SEQ ID NO: 83600 - DNA, 25 bp, Saccharomyces pastorianus
aattgggtctatctttgagccgtca

SEQ ID NO: 83601 - DNA, 25 bp, Saccharomyces pastorianus
caaaccacacttctttctcaatttt

SEQ ID NO: 83602 - DNA, 25 bp, Saccharomyces pastorianus
tttttggattctgttgaccagctct

SEQ ID NO: 83603 - DNA, 25 bp, Saccharomyces pastorianus
atacaacattatcggtggagacagt

SEQ ID NO: 83604 - DNA, 25 bp, Saccharomyces pastorianus
ctaaaacatcgtcggtggcttccaa

SEQ ID NO: 83605 - DNA, 25 bp, Saccharomyces pastorianus
gtcggatctacaggtcttgcttaac

SEQ ID NO: 83606 - DNA, 25 bp, Saccharomyces pastorianus
ttcgtactccactaaaacatcgtcg

SEQ ID NO: 83607 - DNA, 25 bp, Saccharomyces pastorianus
aaaatgttctttgacaatggcttca

SEQ ID NO: 83608 - DNA, 25 bp, Saccharomyces pastorianus
atggcttcaaagtcgatagtatctt

SEQ ID NO: 83609 - DNA, 25 bp, Saccharomyces pastorianus
gaaacagcgtctcaggaaaccattg

SEQ ID NO: 83610 - DNA, 25 bp, Saccharomyces pastorianus
aaaggtaggctctcgaaggatgata

SEQ ID NO: 83611 - DNA, 25 bp, Saccharomyces pastorianus
atgcccaactcaggtgctacgggag

SEQ ID NO: 83612 - DNA, 25 bp, Saccharomyces pastorianus
ggtattcttaatgtgtctgctttgg

SEQ ID NO: 83613 - DNA, 25 bp, Saccharomyces pastorianus
gaattaagtggcattccgcctgctc

SEQ ID NO: 83614 - DNA, 25 bp, Saccharomyces pastorianus
aaattttacggtgctggtgccggcg

SEQ ID NO: 83615 - DNA, 25 bp, Saccharomyces pastorianus
ttgatgttacctttgatatcgacgc

SEQ ID NO: 83616 - DNA, 25 bp, Saccharomyces pastorianus
tggttagatgcatcgcaggcagcct

SEQ ID NO: 83617 - DNA, 25 bp, Saccharomyces pastorianus
tgctcccagaggtgtgcctcaaatt

SEQ ID NO: 83618 - DNA, 25 bp, Saccharomyces pastorianus
caggcagcctctacggacgaatata

SEQ ID NO: 83619 - DNA, 25 bp, Saccharomyces pastorianus
gcttgaatcatatgcatttactttg

SEQ ID NO: 83620 - DNA, 25 bp, Saccharomyces pastorianus
gacgaggatgatgagcacaacccta

SEQ ID NO: 83621 - DNA, 25 bp, Saccharomyces pastorianus
tatgttcaagcgctacagtgcctaa

SEQ ID NO: 83622 - DNA, 25 bp, Saccharomyces pastorianus
atatttgtctgtattcgtcatttca

SEQ ID NO: 83623 - DNA, 25 bp, Saccharomyces pastorianus
gatcctgcacattctttaaactata

SEQ ID NO: 83624 - DNA, 25 bp, Saccharomyces pastorianus
aagtcttactacttgaacactgtaa

SEQ ID NO: 83625 - DNA, 25 bp, Saccharomyces pastorianus
ctacgggtcgagtttgcaatggcac

SEQ ID NO: 83626 - DNA, 25 bp, Saccharomyces pastorianus
tgccatgttttttggtaactacggg

SEQ ID NO: 83627 - DNA, 25 bp, Saccharomyces pastorianus
cagtgcctaaacatatgctcgataa

SEQ ID NO: 83628 - DNA, 25 bp, Saccharomyces pastorianus
gagaagccataaggcctggccatga

SEQ ID NO: 83629 - DNA, 25 bp, Saccharomyces pastorianus
gacgacgctcttatttacggtatca

SEQ ID NO: 83630 - DNA, 25 bp, Saccharomyces pastorianus
atggcacgctatgatcgaactgata

SEQ ID NO: 83631 - DNA, 25 bp, Saccharomyces pastorianus
gatgtccttgattccgtgaaatggc

SEQ ID NO: 83632 - DNA, 25 bp, Saccharomyces pastorianus
gatattttgttttttagccccatgt

SEQ ID NO: 83633 - DNA, 25 bp, Saccharomyces pastorianus
ggaggatctttggtgtccattcatc

SEQ ID NO: 83634 - DNA, 25 bp, Saccharomyces pastorianus
cagtattcattgcaggcttccgata

SEQ ID NO: 83635 - DNA, 25 bp, Saccharomyces pastorianus
gaaatattcgtgttcgtgcgtcgcg

SEQ ID NO: 83636 - DNA, 25 bp, Saccharomyces pastorianus
gaaatggctgattctccttgacatt

SEQ ID NO: 83637 - DNA, 25 bp, Saccharomyces pastorianus
ttacctcaatcggagcagatgtgaa

SEQ ID NO: 83638 - DNA, 25 bp, Saccharomyces pastorianus
gtcgcgattttttccgctttcaaga

SEQ ID NO: 83639 - DNA, 25 bp, Saccharomyces pastorianus
gtccattcatctcattaaaccctaa

SEQ ID NO: 83640 - DNA, 25 bp, Saccharomyces pastorianus
agccccatgtcccagcgataaggag

SEQ ID NO: 83641 - DNA, 25 bp, Saccharomyces pastorianus
gatcgatccctatagttacctcaat

SEQ ID NO: 83642 - DNA, 25 bp, Saccharomyces pastorianus
cgttgaatctcaattcagcgccggt

SEQ ID NO: 83643 - DNA, 25 bp, Saccharomyces pastorianus
aagatcgaatcttccgttgaatctc

SEQ ID NO: 83644 - DNA, 25 bp, Saccharomyces pastorianus
aagttcgaattaggccgtcaaccag

SEQ ID NO: 83645 - DNA, 25 bp, Saccharomyces pastorianus
gagaaagttcgaattaggccgtcaa

SEQ ID NO: 83646 - DNA, 25 bp, Saccharomyces pastorianus
cgtcacaaaagatccgctaccggtg

SEQ ID NO: 83647 - DNA, 25 bp, Saccharomyces pastorianus
tcgaattaggccgtcaaccagccaa

SEQ ID NO: 83648 - DNA, 25 bp, Saccharomyces pastorianus
aactgttgccaagagcaagaacgct

SEQ ID NO: 83649 - DNA, 25 bp, Saccharomyces pastorianus
gagctctaagaattgaaaccggtaa

SEQ ID NO: 83650 - DNA, 25 bp, Saccharomyces pastorianus
aaaagatccgctaccggtgccaagc

SEQ ID NO: 83651 - DNA, 25 bp, Saccharomyces pastorianus
atggttcgaagctcactacggtcaa

SEQ ID NO: 83652 - DNA, 25 bp, Saccharomyces pastorianus
cggtgccaagcgtgctcaattcaga

SEQ ID NO: 83653 - DNA, 25 bp, Saccharomyces pastorianus
ttatttacaggcctatcttaaagtt

SEQ ID NO: 83654 - DNA, 25 bp, Saccharomyces pastorianus
acaggcctatcttaaagttatagga

SEQ ID NO: 83655 - DNA, 25 bp, Saccharomyces pastorianus
ttcatatacgttatttacaggccta

SEQ ID NO: 83656 - DNA, 25 bp, Saccharomyces pastorianus
tatacgttatttacaggcctatctt

SEQ ID NO: 83657 - DNA, 25 bp, Saccharomyces pastorianus
catatacgttatttacaggcctatc

SEQ ID NO: 83658 - DNA, 25 bp, Saccharomyces pastorianus
tttacaggcctatcttaaagttata

SEQ ID NO: 83659 - DNA, 25 bp, Saccharomyces pastorianus
atggaactgcttcatatacgttatt

SEQ ID NO: 83660 - DNA, 25 bp, Saccharomyces pastorianus
tacgttatttacaggcctatcttaa

SEQ ID NO: 83661 - DNA, 25 bp, Saccharomyces pastorianus
gcttcatatacgttatttacaggcc

SEQ ID NO: 83662 - DNA, 25 bp, Saccharomyces pastorianus
agttataggaaattacacttgccat

SEQ ID NO: 83663 - DNA, 25 bp, Saccharomyces pastorianus
ggaactgcttcatatacgttattta

SEQ ID NO: 83664 - DNA, 25 bp, Saccharomyces pastorianus
atcaaatgttcacctatccttgtcc

SEQ ID NO: 83665 - DNA, 25 bp, Saccharomyces pastorianus
tatggcgtttgagcctgaaaatcaa

SEQ ID NO: 83666 - DNA, 25 bp, Saccharomyces pastorianus
acctatccttgtccctgtggagata

SEQ ID NO: 83667 - DNA, 25 bp, Saccharomyces pastorianus
gtttgtcccagctgctcactgatga

SEQ ID NO: 83668 - DNA, 25 bp, Saccharomyces pastorianus
ctggatgacatgtttgagggcgaaa

SEQ ID NO: 83669 - DNA, 25 bp, Saccharomyces pastorianus
ggcgaaaaagttgctgtttgtccca

SEQ ID NO: 83670 - DNA, 25 bp, Saccharomyces pastorianus
tgagtactacgaagaggcaggcata

SEQ ID NO: 83671 - DNA, 25 bp, Saccharomyces pastorianus
ttgtccctgtggagataggtttcaa

SEQ ID NO: 83672 - DNA, 25 bp, Saccharomyces pastorianus
taaagaagacttggctgagtactac

SEQ ID NO: 83673 - DNA, 25 bp, Saccharomyces pastorianus
gctgctcactgatgatcgatgtagt

SEQ ID NO: 83674 - DNA, 25 bp, Saccharomyces pastorianus
aaatcgaagatatggcgtttgagcc

SEQ ID NO: 83675 - DNA, 25 bp, Saccharomyces pastorianus
gggaatatacctgagctagctttga

SEQ ID NO: 83676 - DNA, 25 bp, Saccharomyces pastorianus
ttgcctcttggtatggaatgtcgta

SEQ ID NO: 83677 - DNA, 25 bp, Saccharomyces pastorianus
gggtcctggttcttcaaaatatctt

SEQ ID NO: 83678 - DNA, 25 bp, Saccharomyces pastorianus
aatgtcgtatttgtagctttcggaa

SEQ ID NO: 83679 - DNA, 25 bp, Saccharomyces pastorianus
atgggccctgttttagtatggaata

SEQ ID NO: 83680 - DNA, 25 bp, Saccharomyces pastorianus
atcgcttgcaatttagggtcctggt

SEQ ID NO: 83681 - DNA, 25 bp, Saccharomyces pastorianus
aggtctagcgactcttttcaaaaca

SEQ ID NO: 83682 - DNA, 25 bp, Saccharomyces pastorianus
aggcgccgagtgttcaacgatcatc

SEQ ID NO: 83683 - DNA, 25 bp, Saccharomyces pastorianus
caggagcgtccataggtatctcttt

SEQ ID NO: 83684 - DNA, 25 bp, Saccharomyces pastorianus
gtatctctttgggagcaggcgccga

SEQ ID NO: 83685 - DNA, 25 bp, Saccharomyces pastorianus
ttagccattgttcaacgtttgcctc

SEQ ID NO: 83686 - DNA, 25 bp, Saccharomyces pastorianus
aaaactagtgattgtaacgtctgca

SEQ ID NO: 83687 - DNA, 25 bp, Saccharomyces pastorianus
taacgtctgcaaatgggccccaagt

SEQ ID NO: 83688 - DNA, 25 bp, Saccharomyces pastorianus
gcgtacgtaaccactgtaggtgatt

SEQ ID NO: 83689 - DNA, 25 bp, Saccharomyces pastorianus
gattttcatcgattacttaacgtgt

SEQ ID NO: 83690 - DNA, 25 bp, Saccharomyces pastorianus
gaaatttcctgatctggctgatgaa

SEQ ID NO: 83691 - DNA, 25 bp, Saccharomyces pastorianus
attcacggcggtggtgcgtacgtaa

SEQ ID NO: 83692 - DNA, 25 bp, Saccharomyces pastorianus
atgggataacccaagtgccaatgca

SEQ ID NO: 83693 - DNA, 25 bp, Saccharomyces pastorianus
aaatttctcagtatgatccggtcga

SEQ ID NO: 83694 - DNA, 25 bp, Saccharomyces pastorianus
gtaggtgattacgttgccaattata

SEQ ID NO: 83695 - DNA, 25 bp, Saccharomyces pastorianus
gttgtactcgattttgtcggtggtt

SEQ ID NO: 83696 - DNA, 25 bp, Saccharomyces pastorianus
attctagttcattgattcacggcgg

SEQ ID NO: 83697 - DNA, 25 bp, Saccharomyces pastorianus
tatggcggatacttgtggtacgttg

SEQ ID NO: 83698 - DNA, 25 bp, Saccharomyces pastorianus
caatgctattttggtgtcgcctgat

SEQ ID NO: 83699 - DNA, 25 bp, Saccharomyces pastorianus
tgtttgcacaaataccgttccggta

SEQ ID NO: 83700 - DNA, 25 bp, Saccharomyces pastorianus
tagtcccacgttcgctgaagctata

SEQ ID NO: 83701 - DNA, 25 bp, Saccharomyces pastorianus
ggatttacctattgctgaccagatc

SEQ ID NO: 83702 - DNA, 25 bp, Saccharomyces pastorianus
aaactgctggtgctgatcatgtcat

SEQ ID NO: 83703 - DNA, 25 bp, Saccharomyces pastorianus
gtcatcacaatggatctccatgcct

SEQ ID NO: 83704 - DNA, 25 bp, Saccharomyces pastorianus
gagtagctgctttggctgacaagtt

SEQ ID NO: 83705 - DNA, 25 bp, Saccharomyces pastorianus
acggtattttctccggttcagcaag

SEQ ID NO: 83706 - DNA, 25 bp, Saccharomyces pastorianus
ttccatatcccggttgacaacctat

SEQ ID NO: 83707 - DNA, 25 bp, Saccharomyces pastorianus
ccagatcgatattagtcccacgttc

SEQ ID NO: 83708 - DNA, 25 bp, Saccharomyces pastorianus
gttaggtctgttttcgtcatcgatc

SEQ ID NO: 83709 - DNA, 25 bp, Saccharomyces pastorianus
aactctgatgctcctaactttgatg

SEQ ID NO: 83710 - DNA, 25 bp, Saccharomyces pastorianus
aatcgacgccttgcaattgactgac

SEQ ID NO: 83711 - DNA, 25 bp, Saccharomyces pastorianus
ttacgactacttgggtgactcttgg

SEQ ID NO: 83712 - DNA, 25 bp, Saccharomyces pastorianus
gattagactgatttttacctaccct

SEQ ID NO: 83713 - DNA, 25 bp, Saccharomyces pastorianus
gaaacgtggcattcctatatgatat

SEQ ID NO: 83714 - DNA, 25 bp, Saccharomyces pastorianus
gaagtcagcgcattcgccaaattga

SEQ ID NO: 83715 - DNA, 25 bp, Saccharomyces pastorianus
gaagatgttgagtcccacgaaaaat

SEQ ID NO: 83716 - DNA, 25 bp, Saccharomyces pastorianus
ggcagccagctgacgatgtcattat

SEQ ID NO: 83717 - DNA, 25 bp, Saccharomyces pastorianus
tcttgttttctcacccagcagattt

SEQ ID NO: 83718 - DNA, 25 bp, Saccharomyces pastorianus
tttgatgctgacacaacggttggta

SEQ ID NO: 83719 - DNA, 25 bp, Saccharomyces pastorianus
aactcggccaagtccaatagatcaa

SEQ ID NO: 83720 - DNA, 25 bp, Saccharomyces pastorianus
gaaaaaccccttcatgagcatacaa

SEQ ID NO: 83721 - DNA, 25 bp, Saccharomyces pastorianus
tgcctgatcaacctctaccaaaagt

SEQ ID NO: 83722 - DNA, 25 bp, Saccharomyces pastorianus
attttcctctttcacaattcagtcc

SEQ ID NO: 83723 - DNA, 25 bp, Saccharomyces pastorianus
gagaagatttaccaccgagccaata

SEQ ID NO: 83724 - DNA, 25 bp, Saccharomyces pastorianus
aaaaaccccagtgccagtgcctgat

SEQ ID NO: 83725 - DNA, 25 bp, Saccharomyces pastorianus
gacacatctaattctcgtacttgta

SEQ ID NO: 83726 - DNA, 25 bp, Saccharomyces pastorianus
gtatggacattttcactgctcacag

SEQ ID NO: 83727 - DNA, 25 bp, Saccharomyces pastorianus
ggctttacccttattggattatcca

SEQ ID NO: 83728 - DNA, 25 bp, Saccharomyces pastorianus
gaggtactttctgaacattgcgaga

SEQ ID NO: 83729 - DNA, 25 bp, Saccharomyces pastorianus
gcgtcagtaatcaaggctttaccct

SEQ ID NO: 83730 - DNA, 25 bp, Saccharomyces pastorianus
ccttgacattccctttgctgaggaa

SEQ ID NO: 83731 - DNA, 25 bp, Saccharomyces pastorianus
aatttgcaaaccttgtggctcacga

SEQ ID NO: 83732 - DNA, 25 bp, Saccharomyces pastorianus
tttgctgccatcgactgctcagcaa

SEQ ID NO: 83733 - DNA, 25 bp, Saccharomyces pastorianus
ctgcaggaaaatctttacgagtcat

SEQ ID NO: 83734 - DNA, 25 bp, Saccharomyces pastorianus
gaactgcccatatttgatgaactaa

SEQ ID NO: 83735 - DNA, 25 bp, Saccharomyces pastorianus
ttgttcttcaagctcgtaggttttt

SEQ ID NO: 83736 - DNA, 25 bp, Saccharomyces pastorianus
gatgcttgtatcagaacccgtttta

SEQ ID NO: 83737 - DNA, 25 bp, Saccharomyces pastorianus
tacgagtcatgtttgaactgcccat

SEQ ID NO: 83738 - DNA, 25 bp, Saccharomyces pastorianus
tgaactaacttcttgctttgctgcc

SEQ ID NO: 83739 - DNA, 25 bp, Saccharomyces pastorianus
gaagaacttttcctgatgcttgtat

SEQ ID NO: 83740 - DNA, 25 bp, Saccharomyces pastorianus
gtggctcacgatcacgttttgaatt

SEQ ID NO: 83741 - DNA, 25 bp, Saccharomyces pastorianus
atgctggtttgccaaaggcccaatt

SEQ ID NO: 83742 - DNA, 25 bp, Saccharomyces pastorianus
gcatggcaaaggctgtgatcgtaac

SEQ ID NO: 83743 - DNA, 25 bp, Saccharomyces pastorianus
tttcaatgggccttgcgtgcagcta

SEQ ID NO: 83744 - DNA, 25 bp, Saccharomyces pastorianus
gtgatcgtgagccacaaggtttgca

SEQ ID NO: 83745 - DNA, 25 bp, Saccharomyces pastorianus
cactctgggctacttctatgagcat

SEQ ID NO: 83746 - DNA, 25 bp, Saccharomyces pastorianus
gacggtggactagccagcattggta

SEQ ID NO: 83747 - DNA, 25 bp, Saccharomyces pastorianus
taaaacgggttctgatacaagcatc

SEQ ID NO: 83748 - DNA, 25 bp, Saccharomyces pastorianus
gaaaagttcttcctcagcaaaggga

SEQ ID NO: 83749 - DNA, 25 bp, Saccharomyces pastorianus
agctacgctcaagggacggtggact

SEQ ID NO: 83750 - DNA, 25 bp, Saccharomyces pastorianus
atgactcgtaaagattttcctgcag

SEQ ID NO: 83751 - DNA, 25 bp, Saccharomyces pastorianus
atgggcagttcaaacatgactcgta

SEQ ID NO: 83752 - DNA, 25 bp, Saccharomyces pastorianus
gatttctccagttcctttaacacaa

SEQ ID NO: 83753 - DNA, 25 bp, Saccharomyces pastorianus
agtgttgaagaagcccacaagttta

SEQ ID NO: 83754 - DNA, 25 bp, Saccharomyces pastorianus
attgatgaacttcaccagacagctt

SEQ ID NO: 83755 - DNA, 25 bp, Saccharomyces pastorianus
gtttatggactgtatcaacttctgg

SEQ ID NO: 83756 - DNA, 25 bp, Saccharomyces pastorianus
cttctgggcaggtaggatttctcca

SEQ ID NO: 83757 - DNA, 25 bp, Saccharomyces pastorianus
taaactggtcgaaatttggagcttt

SEQ ID NO: 83758 - DNA, 25 bp, Saccharomyces pastorianus
aattcgaagccgtatctaatgcaga

SEQ ID NO: 83759 - DNA, 25 bp, Saccharomyces pastorianus
cacgcttccctcaatcttaaaaata

SEQ ID NO: 83760 - DNA, 25 bp, Saccharomyces pastorianus
ttaccgttagttttccagagaatat

SEQ ID NO: 83761 - DNA, 25 bp, Saccharomyces pastorianus
gaccaaagcttgttctggagttcca

SEQ ID NO: 83762 - DNA, 25 bp, Saccharomyces pastorianus
aagatcttgacagagcacgcttccc

SEQ ID NO: 83763 - DNA, 25 bp, Saccharomyces pastorianus
aggaacaacccacgtcggacaatga

SEQ ID NO: 83764 - DNA, 25 bp, Saccharomyces pastorianus
aggttttcaagtggccgatggtccg

SEQ ID NO: 83765 - DNA, 25 bp, Saccharomyces pastorianus
atggtccgctttatcgctatgatga

SEQ ID NO: 83766 - DNA, 25 bp, Saccharomyces pastorianus
ggagggctccattaaagctcttaga

SEQ ID NO: 83767 - DNA, 25 bp, Saccharomyces pastorianus
acgcctttcctatcaaaccaataag

SEQ ID NO: 83768 - DNA, 25 bp, Saccharomyces pastorianus
atgcgaacactgacccatcgaggaa

SEQ ID NO: 83769 - DNA, 25 bp, Saccharomyces pastorianus
agggccaaaggctagggtctcctat

SEQ ID NO: 83770 - DNA, 25 bp, Saccharomyces pastorianus
gatgatcctgcgaacagtttctatt

SEQ ID NO: 83771 - DNA, 25 bp, Saccharomyces pastorianus
tccaaagaatgagacacccgctgct

SEQ ID NO: 83772 - DNA, 25 bp, Saccharomyces pastorianus
gaagttttgcgctgcaattccacag

SEQ ID NO: 83773 - DNA, 25 bp, Saccharomyces pastorianus
gaatcatcacctgcggaggttccaa

SEQ ID NO: 83774 - DNA, 25 bp, Saccharomyces pastorianus
atatccaaacgtcttttgtccaaag

SEQ ID NO: 83775 - DNA, 25 bp, Saccharomyces pastorianus
agtgctactccctcaaagttatcag

SEQ ID NO: 83776 - DNA, 25 bp, Saccharomyces pastorianus
acttgttttcgttggaggctctatt

SEQ ID NO: 83777 - DNA, 25 bp, Saccharomyces pastorianus
tgttcacccacaactgaaggctcag

SEQ ID NO: 83778 - DNA, 25 bp, Saccharomyces pastorianus
gaactggccctattgacttgttttc

SEQ ID NO: 83779 - DNA, 25 bp, Saccharomyces pastorianus
gaattaggcagcagtgctactccct

SEQ ID NO: 83780 - DNA, 25 bp, Saccharomyces pastorianus
gtatttccattgttgctttactaaa

SEQ ID NO: 83781 - DNA, 25 bp, Saccharomyces pastorianus
ggcatctttaagcaatgcggctgca

SEQ ID NO: 83782 - DNA, 25 bp, Saccharomyces pastorianus
aaataaggcagaggcccagctccga

SEQ ID NO: 83783 - DNA, 25 bp, Saccharomyces pastorianus
tgacggcaacacttcttatttccat

SEQ ID NO: 83784 - DNA, 25 bp, Saccharomyces pastorianus
acaagaccgcttgaatcgtagtaaa

SEQ ID NO: 83785 - DNA, 25 bp, Saccharomyces pastorianus
gaaggttatctacatcgcaatccgt

SEQ ID NO: 83786 - DNA, 25 bp, Saccharomyces pastorianus
agctttcttctatgaccagcgcaaa

SEQ ID NO: 83787 - DNA, 25 bp, Saccharomyces pastorianus
aaatcacgcacacgaggactttctt

SEQ ID NO: 83788 - DNA, 25 bp, Saccharomyces pastorianus
gttagcccgtatatgtcacccagaa

SEQ ID NO: 83789 - DNA, 25 bp, Saccharomyces pastorianus
attcgctaataaacacccgtggtct

SEQ ID NO: 83790 - DNA, 25 bp, Saccharomyces pastorianus
aatccgttcattatcatccacagca

SEQ ID NO: 83791 - DNA, 25 bp, Saccharomyces pastorianus
cgccatcgcagcaatcgcaaaatta

SEQ ID NO: 83792 - DNA, 25 bp, Saccharomyces pastorianus
caaaaccatttgtcgccgctagaaa

SEQ ID NO: 83793 - DNA, 25 bp, Saccharomyces pastorianus
aatactatcttaaccccatagcgtc

SEQ ID NO: 83794 - DNA, 25 bp, Saccharomyces pastorianus
ggaggatgacattgacccactgcac

SEQ ID NO: 83795 - DNA, 25 bp, Saccharomyces pastorianus
agagcttccttggtagttagcccgt

SEQ ID NO: 83796 - DNA, 25 bp, Saccharomyces pastorianus
tattcttcgtcatcctctattagag

SEQ ID NO: 83797 - DNA, 25 bp, Saccharomyces pastorianus
atctacatcgttttctacttcatcc

SEQ ID NO: 83798 - DNA, 25 bp, Saccharomyces pastorianus
ggcgttttcacctacatataattca

SEQ ID NO: 83799 - DNA, 25 bp, Saccharomyces pastorianus
aatatatacccatcgccgcttattc

SEQ ID NO: 83800 - DNA, 25 bp, Saccharomyces pastorianus
ttactatatcgttttcatcctgctc

SEQ ID NO: 83801 - DNA, 25 bp, Saccharomyces pastorianus
cctcctcatcattttcttctgatat

SEQ ID NO: 83802 - DNA, 25 bp, Saccharomyces pastorianus
actgtcttcttcatatgtgtcttcc

SEQ ID NO: 83803 - DNA, 25 bp, Saccharomyces pastorianus
gatatttgctcatcctcaatgtcat

SEQ ID NO: 83804 - DNA, 25 bp, Saccharomyces pastorianus
gtcttcatcttctttggcgttttca

SEQ ID NO: 83805 - DNA, 25 bp, Saccharomyces pastorianus
tcaagggtaaagtcttcgtcttcgt

SEQ ID NO: 83806 - DNA, 25 bp, Saccharomyces pastorianus
ctccttccttatgtggcttactata

SEQ ID NO: 83807 - DNA, 25 bp, Saccharomyces pastorianus
gtgctggaaagcatccatgatcgca

SEQ ID NO: 83808 - DNA, 25 bp, Saccharomyces pastorianus
gacgaagacgaagactttacccttg

SEQ ID NO: 83809 - DNA, 25 bp, Saccharomyces pastorianus
aacaccacttggaaatcatgcagct

SEQ ID NO: 83810 - DNA, 25 bp, Saccharomyces pastorianus
gaaactcattgggagctctgcttca

SEQ ID NO: 83811 - DNA, 25 bp, Saccharomyces pastorianus
ggagctctgcttcaccattaaaaac

SEQ ID NO: 83812 - DNA, 25 bp, Saccharomyces pastorianus
gactttacccttgatgatgacattg

SEQ ID NO: 83813 - DNA, 25 bp, Saccharomyces pastorianus
gtttcctccttaacagagtatatgt

SEQ ID NO: 83814 - DNA, 25 bp, Saccharomyces pastorianus
tccatgatcgcaaagggataccaag

SEQ ID NO: 83815 - DNA, 25 bp, Saccharomyces pastorianus
gaaccggaagtacctgctactgatt

SEQ ID NO: 83816 - DNA, 25 bp, Saccharomyces pastorianus
tcatgcagctaggagaaacgatact

SEQ ID NO: 83817 - DNA, 25 bp, Saccharomyces pastorianus
ttgaagacactgtttcctccttaac

SEQ ID NO: 83818 - DNA, 25 bp, Saccharomyces pastorianus
gattgcgttactccatatatattga

SEQ ID NO: 83819 - DNA, 25 bp, Saccharomyces pastorianus
tgagcttcatcacctacggttgtag

SEQ ID NO: 83820 - DNA, 25 bp, Saccharomyces pastorianus
gttattccactctcagcatcgatcg

SEQ ID NO: 83821 - DNA, 25 bp, Saccharomyces pastorianus
gtgatattctttgtcattggtgcaa

SEQ ID NO: 83822 - DNA, 25 bp, Saccharomyces pastorianus
ggaccggaactgcttatttaatgaa

SEQ ID NO: 83823 - DNA, 25 bp, Saccharomyces pastorianus
tttccagttccttccagattatttc

SEQ ID NO: 83824 - DNA, 25 bp, Saccharomyces pastorianus
ttgcaagacacatctttccagttcc

SEQ ID NO: 83825 - DNA, 25 bp, Saccharomyces pastorianus
ttgaaaatccgttatcttccccatc

SEQ ID NO: 83826 - DNA, 25 bp, Saccharomyces pastorianus
ttccccatcatcatcgtataaatca

SEQ ID NO: 83827 - DNA, 25 bp, Saccharomyces pastorianus
agaatgttgactggcgactacttag

SEQ ID NO: 83828 - DNA, 25 bp, Saccharomyces pastorianus
ggttggaaatacttgcagagcagca

SEQ ID NO: 83829 - DNA, 25 bp, Saccharomyces pastorianus
gttttttcttacagggccattgact

SEQ ID NO: 83830 - DNA, 25 bp, Saccharomyces pastorianus
aagaatctggtctttcttccttcta

SEQ ID NO: 83831 - DNA, 25 bp, Saccharomyces pastorianus
acagataatctcttatgagcctagc

SEQ ID NO: 83832 - DNA, 25 bp, Saccharomyces pastorianus
gtctttcttccttctattttgattg

SEQ ID NO: 83833 - DNA, 25 bp, Saccharomyces pastorianus
gattgggtatatttctattcgtgtt

SEQ ID NO: 83834 - DNA, 25 bp, Saccharomyces pastorianus
tcaagtagcctttattttttcattg

SEQ ID NO: 83835 - DNA, 25 bp, Saccharomyces pastorianus
attcgtgtttcattactggtctggg

SEQ ID NO: 83836 - DNA, 25 bp, Saccharomyces pastorianus
gccattgacttatgccctgaacgag

SEQ ID NO: 83837 - DNA, 25 bp, Saccharomyces pastorianus
ggtccagttgttttcaagtagcctt

SEQ ID NO: 83838 - DNA, 25 bp, Saccharomyces pastorianus
atgagcctagctactttgttttttc

SEQ ID NO: 83839 - DNA, 25 bp, Saccharomyces pastorianus
atgccctgaacgagtcttactttac

SEQ ID NO: 83840 - DNA, 25 bp, Saccharomyces pastorianus
gaaggactgttaccaggtgacgaat

SEQ ID NO: 83841 - DNA, 25 bp, Saccharomyces pastorianus
gcaacgggcaggttctccataatag

SEQ ID NO: 83842 - DNA, 25 bp, Saccharomyces pastorianus
tgatgatcacatgggcagcacagat

SEQ ID NO: 83843 - DNA, 25 bp, Saccharomyces pastorianus
atgagatctcatcgagccaggagga

SEQ ID NO: 83844 - DNA, 25 bp, Saccharomyces pastorianus
gaggaagcccacagatttagataac

SEQ ID NO: 83845 - DNA, 25 bp, Saccharomyces pastorianus
aacatggatctcacgacgccaaaga

SEQ ID NO: 83846 - DNA, 25 bp, Saccharomyces pastorianus
aagaggatgctcgtgaaaaccatga

SEQ ID NO: 83847 - DNA, 25 bp, Saccharomyces pastorianus
tcctcaatgccatggacggcagtaa

SEQ ID NO: 83848 - DNA, 25 bp, Saccharomyces pastorianus
aaatataaacataccgcaacgggca

SEQ ID NO: 83849 - DNA, 25 bp, Saccharomyces pastorianus
gattgctggtattacctaccgtgag

SEQ ID NO: 83850 - DNA, 25 bp, Saccharomyces pastorianus
agtccatcgatgagctcttcacaag

SEQ ID NO: 83851 - DNA, 25 bp, Saccharomyces pastorianus
actctatcctctactgacagtgaag

SEQ ID NO: 83852 - DNA, 25 bp, Saccharomyces pastorianus
ttcacaccgcacctaattatcaata

SEQ ID NO: 83853 - DNA, 25 bp, Saccharomyces pastorianus
agatccagatgctgacactctatcc

SEQ ID NO: 83854 - DNA, 25 bp, Saccharomyces pastorianus
atagttcagcgccaatctttcgtgt

SEQ ID NO: 83855 - DNA, 25 bp, Saccharomyces pastorianus
gtacgattactctggcggtgattat

SEQ ID NO: 83856 - DNA, 25 bp, Saccharomyces pastorianus
acaaactctcattccgagcagacgg

SEQ ID NO: 83857 - DNA, 25 bp, Saccharomyces pastorianus
aggacactgaaacgctcgatgctgt

SEQ ID NO: 83858 - DNA, 25 bp, Saccharomyces pastorianus
gatgaacttgccgaatcaacgccgc

SEQ ID NO: 83859 - DNA, 25 bp, Saccharomyces pastorianus
cgatgtcgacgatggttccgtacca

SEQ ID NO: 83860 - DNA, 25 bp, Saccharomyces pastorianus
tcgtgtgctctctcggcgggtaaat

SEQ ID NO: 83861 - DNA, 25 bp, Saccharomyces pastorianus
atgtactttagttttcacaccgcac

SEQ ID NO: 83862 - DNA, 25 bp, Saccharomyces pastorianus
accattgcgatgtgggtgtttgctg

SEQ ID NO: 83863 - DNA, 25 bp, Saccharomyces pastorianus
ggtctgatttgctcaagtacatttt

SEQ ID NO: 83864 - DNA, 25 bp, Saccharomyces pastorianus
atgtcatcacctacaatcgacttca

SEQ ID NO: 83865 - DNA, 25 bp, Saccharomyces pastorianus
gaataacgagaaaacccagtaccat

SEQ ID NO: 83866 - DNA, 25 bp, Saccharomyces pastorianus
gtcatcacctacaatcgacttcaac

SEQ ID NO: 83867 - DNA, 25 bp, Saccharomyces pastorianus
atccggtaattgaattcttccacag

SEQ ID NO: 83868 - DNA, 25 bp, Saccharomyces pastorianus
atgttcatgtcatcacctacaatcg

SEQ ID NO: 83869 - DNA, 25 bp, Saccharomyces pastorianus
gaaaacccagtaccattgcgatgtg

SEQ ID NO: 83870 - DNA, 25 bp, Saccharomyces pastorianus
gctggtctgatttgctcaagtacat

SEQ ID NO: 83871 - DNA, 25 bp, Saccharomyces pastorianus
gtgtttgctggtctgatttgctcaa

SEQ ID NO: 83872 - DNA, 25 bp, Saccharomyces pastorianus
gaattcttccacagaataacgagaa

SEQ ID NO: 83873 - DNA, 25 bp, Saccharomyces pastorianus
tgctactcaatatcacccagaatac

SEQ ID NO: 83874 - DNA, 25 bp, Saccharomyces pastorianus
gaagttatacggtgacgtctccgaa

SEQ ID NO: 83875 - DNA, 25 bp, Saccharomyces pastorianus
gtgaaaatcacattccattcttagg

SEQ ID NO: 83876 - DNA, 25 bp, Saccharomyces pastorianus
tgacgtctccgaagtccatgaaaga

SEQ ID NO: 83877 - DNA, 25 bp, Saccharomyces pastorianus
taggtttgagaccaacatttttcca

SEQ ID NO: 83878 - DNA, 25 bp, Saccharomyces pastorianus
cacgttgtcgttttcatgcctgaaa

SEQ ID NO: 83879 - DNA, 25 bp, Saccharomyces pastorianus
cggcagaattttatccagacattga

SEQ ID NO: 83880 - DNA, 25 bp, Saccharomyces pastorianus
gaaaagacagtcattcggcagaatt

SEQ ID NO: 83881 - DNA, 25 bp, Saccharomyces pastorianus
ggtcttagatccatccaaaccattt

SEQ ID NO: 83882 - DNA, 25 bp, Saccharomyces pastorianus
gaatcatccatactatattgctact

SEQ ID NO: 83883 - DNA, 25 bp, Saccharomyces pastorianus
catttttgggtttagttgctgcttc

SEQ ID NO: 83884 - DNA, 25 bp, Saccharomyces pastorianus
aacaggtggttaacgttcacgatgt

SEQ ID NO: 83885 - DNA, 25 bp, Saccharomyces pastorianus
acaggtggttaacgttcacgatgtt

SEQ ID NO: 83886 - DNA, 25 bp, Saccharomyces pastorianus
tgaacaggtggttaacgttcacgat

SEQ ID NO: 83887 - DNA, 25 bp, Saccharomyces pastorianus
caggtggttaacgttcacgatgtta

SEQ ID NO: 83888 - DNA, 25 bp, Saccharomyces pastorianus
cctgaacaggtggttaacgttcacg

SEQ ID NO: 83889 - DNA, 25 bp, Saccharomyces pastorianus
gaacaggtggttaacgttcacgatg

SEQ ID NO: 83890 - DNA, 25 bp, Saccharomyces pastorianus
ctgaacaggtggttaacgttcacga

SEQ ID NO: 83891 - DNA, 25 bp, Saccharomyces pastorianus
gcctgaacaggtggttaacgttcac

SEQ ID NO: 83892 - DNA, 25 bp, Saccharomyces pastorianus
gtgccagttcgtacaggtggttcaa

SEQ ID NO: 83893 - DNA, 25 bp, Saccharomyces pastorianus
aaatcctaaagacgacccagtgaag

SEQ ID NO: 83894 - DNA, 25 bp, Saccharomyces pastorianus
gaatatgcgccacgtttcaaaatcg

SEQ ID NO: 83895 - DNA, 25 bp, Saccharomyces pastorianus
aagggatccactttgcaatttggta

SEQ ID NO: 83896 - DNA, 25 bp, Saccharomyces pastorianus
gtcaggcctttaaacaatggtcatt

SEQ ID NO: 83897 - DNA, 25 bp, Saccharomyces pastorianus
gtatccttggattctctggttagag

SEQ ID NO: 83898 - DNA, 25 bp, Saccharomyces pastorianus
aaacgttgctgtatgtatcaagggt

SEQ ID NO: 83899 - DNA, 25 bp, Saccharomyces pastorianus
gtacccacagggaagatccttttcg

SEQ ID NO: 83900 - DNA, 25 bp, Saccharomyces pastorianus
ataacaccactattgctaggagatt

SEQ ID NO: 83901 - DNA, 25 bp, Saccharomyces pastorianus
gatatctgcgcaacagctgaaggaa

SEQ ID NO: 83902 - DNA, 25 bp, Saccharomyces pastorianus
gaaggtattaggatatctgcgcaac

SEQ ID NO: 83903 - DNA, 25 bp, Saccharomyces pastorianus
gatcagaccagtgttcgtagtacat

SEQ ID NO: 83904 - DNA, 25 bp, Saccharomyces pastorianus
cagccgttggaagactttgagcgat

SEQ ID NO: 83905 - DNA, 25 bp, Saccharomyces pastorianus
gacggactcctactattgacgcaaa

SEQ ID NO: 83906 - DNA, 25 bp, Saccharomyces pastorianus
ttagcagcgatgtcaatcctagcat

SEQ ID NO: 83907 - DNA, 25 bp, Saccharomyces pastorianus
atttggcacagttcatcagccgttg

SEQ ID NO: 83908 - DNA, 25 bp, Saccharomyces pastorianus
acattgtttgtctcgggtattattc

SEQ ID NO: 83909 - DNA, 25 bp, Saccharomyces pastorianus
gaatattaatacaccttctactgct

SEQ ID NO: 83910 - DNA, 25 bp, Saccharomyces pastorianus
atcctagcatgcatttgaatttggc

SEQ ID NO: 83911 - DNA, 25 bp, Saccharomyces pastorianus
tgccataggcatgaccacaacacta

SEQ ID NO: 83912 - DNA, 25 bp, Saccharomyces pastorianus
tactgctactattgggccccataaa

SEQ ID NO: 83913 - DNA, 25 bp, Saccharomyces pastorianus
cggtcccctggcgaagtacattgtc

SEQ ID NO: 83914 - DNA, 25 bp, Saccharomyces pastorianus
caaattctttacgaccatggtgtga

SEQ ID NO: 83915 - DNA, 25 bp, Saccharomyces pastorianus
tggcactttattggcggtttgcaaa

SEQ ID NO: 83916 - DNA, 25 bp, Saccharomyces pastorianus
ctctgttgaaacaatcgactccttg

SEQ ID NO: 83917 - DNA, 25 bp, Saccharomyces pastorianus
gttcaaattaatacctcccgtgagg

SEQ ID NO: 83918 - DNA, 25 bp, Saccharomyces pastorianus
aattggtaccgacatttttggtgct

SEQ ID NO: 83919 - DNA, 25 bp, Saccharomyces pastorianus
agagactttgctacgctggttgagt

SEQ ID NO: 83920 - DNA, 25 bp, Saccharomyces pastorianus
aagtcatcgacttcttcttatccga

SEQ ID NO: 83921 - DNA, 25 bp, Saccharomyces pastorianus
attggttcatggaacgtctctcatg

SEQ ID NO: 83922 - DNA, 25 bp, Saccharomyces pastorianus
cgaaattgaaaccagctagcgatat

SEQ ID NO: 83923 - DNA, 25 bp, Saccharomyces pastorianus
aatttcaaccagattgcaacccaat

SEQ ID NO: 83924 - DNA, 25 bp, Saccharomyces pastorianus
accagacgatatcaagtggcacttt

SEQ ID NO: 83925 - DNA, 25 bp, Saccharomyces pastorianus
tggctaatccttcatcttttcaaat

SEQ ID NO: 83926 - DNA, 25 bp, Saccharomyces pastorianus
aaggctttacagctgcctaaaaaga

SEQ ID NO: 83927 - DNA, 25 bp, Saccharomyces pastorianus
gagcatattttacaacagcgcaggt

SEQ ID NO: 83928 - DNA, 25 bp, Saccharomyces pastorianus
acaaattactgtccaatgccctgat

SEQ ID NO: 83929 - DNA, 25 bp, Saccharomyces pastorianus
ggcggtactacctcatcaagatata

SEQ ID NO: 83930 - DNA, 25 bp, Saccharomyces pastorianus
gatatacttcggttgctcaaacgtt

SEQ ID NO: 83931 - DNA, 25 bp, Saccharomyces pastorianus
gagccagtttatctacacaacgtgt

SEQ ID NO: 83932 - DNA, 25 bp, Saccharomyces pastorianus
acaacactttgcaagagtcgtccaa

SEQ ID NO: 83933 - DNA, 25 bp, Saccharomyces pastorianus
gccgcatatccacaagcttctttaa

SEQ ID NO: 83934 - DNA, 25 bp, Saccharomyces pastorianus
ggtattaccccatatttccaggtag

SEQ ID NO: 83935 - DNA, 25 bp, Saccharomyces pastorianus
gtgggttctcgcctgatataatgat

SEQ ID NO: 83936 - DNA, 25 bp, Saccharomyces pastorianus
tagatcatgcgccttaccttaagtg

SEQ ID NO: 83937 - DNA, 25 bp, Saccharomyces pastorianus
ttaatgctgaaacatcccgtggatg

SEQ ID NO: 83938 - DNA, 25 bp, Saccharomyces pastorianus
tgaacgagtgcctatggtacccata

SEQ ID NO: 83939 - DNA, 25 bp, Saccharomyces pastorianus
cggccatggtgttatcgtgtatcta

SEQ ID NO: 83940 - DNA, 25 bp, Saccharomyces pastorianus
taggcttatcgcttgcgaccacgaa

SEQ ID NO: 83941 - DNA, 25 bp, Saccharomyces pastorianus
ggctattttgctggatcttggcatt

SEQ ID NO: 83942 - DNA, 25 bp, Saccharomyces pastorianus
gggtcatttactaacggagcctctg

SEQ ID NO: 83943 - DNA, 25 bp, Saccharomyces pastorianus
agcgcccgttgtgattgtggtgaac

SEQ ID NO: 83944 - DNA, 25 bp, Saccharomyces pastorianus
taacgacacgctggtacggatccat

SEQ ID NO: 83945 - DNA, 25 bp, Saccharomyces pastorianus
atgctagggacttctcgctgggtaa

SEQ ID NO: 83946 - DNA, 25 bp, Saccharomyces pastorianus
aaggcctacaacctgcaagacttag

SEQ ID NO: 83947 - DNA, 25 bp, Saccharomyces pastorianus
aaaccggtagaacgcacgccagttg

SEQ ID NO: 83948 - DNA, 25 bp, Saccharomyces pastorianus
gctcaattccatacactacaccagt

SEQ ID NO: 83949 - DNA, 25 bp, Saccharomyces pastorianus
atgaaaaggtcgagaccgtcccgct

SEQ ID NO: 83950 - DNA, 25 bp, Saccharomyces pastorianus
aaagcccaagccatttatgcacaaa

SEQ ID NO: 83951 - DNA, 25 bp, Saccharomyces pastorianus
gaacaagatcaattccgctcaccgt

SEQ ID NO: 83952 - DNA, 25 bp, Saccharomyces pastorianus
caaactttctaatgcccactacgaa

SEQ ID NO: 83953 - DNA, 25 bp, Saccharomyces pastorianus
gacagcttcatcgataccaagatct

SEQ ID NO: 83954 - DNA, 25 bp, Saccharomyces pastorianus
gaacaacttatcgtcaggaacctct

SEQ ID NO: 83955 - DNA, 25 bp, Saccharomyces pastorianus
ctaggtcgacgtctatgaacaactt

SEQ ID NO: 83956 - DNA, 25 bp, Saccharomyces pastorianus
gttcattgtccagtaaccttaagca

SEQ ID NO: 83957 - DNA, 25 bp, Saccharomyces pastorianus
gaacacaccattgtcaaagcccaag

SEQ ID NO: 83958 - DNA, 25 bp, Saccharomyces pastorianus
gctgctgaaggtgttggttctctat

SEQ ID NO: 83959 - DNA, 25 bp, Saccharomyces pastorianus
ggctgctgactccaagtcctctaaa

SEQ ID NO: 83960 - DNA, 25 bp, Saccharomyces pastorianus
cgccaaatggtttgccggtaacttg

SEQ ID NO: 83961 - DNA, 25 bp, Saccharomyces pastorianus
tcaacggtttgatcgatgtctacaa

SEQ ID NO: 83962 - DNA, 25 bp, Saccharomyces pastorianus
taacttggcatctggtggtgctgct

SEQ ID NO: 83963 - DNA, 25 bp, Saccharomyces pastorianus
ggtgcccgtcaattcaacggtttga

SEQ ID NO: 83964 - DNA, 25 bp, Saccharomyces pastorianus
aggtctatacttcggtatgtacgac

SEQ ID NO: 83965 - DNA, 25 bp, Saccharomyces pastorianus
tcgcaggtgctggtgttatctcaat

SEQ ID NO: 83966 - DNA, 25 bp, Saccharomyces pastorianus
catcttaagaggtgtcgcaggtgct

SEQ ID NO: 83967 - DNA, 25 bp, Saccharomyces pastorianus
ggtatgtacgactctttgaagccta

SEQ ID NO: 83968 - DNA, 25 bp, Saccharomyces pastorianus
ttaaaatctgatggtgttgctggtc

SEQ ID NO: 83969 - DNA, 25 bp, Saccharomyces pastorianus
tcttcatacgataccgttcccggac

SEQ ID NO: 83970 - DNA, 25 bp, Saccharomyces pastorianus
tataccgttggttccggtcttctgg

SEQ ID NO: 83971 - DNA, 25 bp, Saccharomyces pastorianus
gttcccggacatcaaaacctgtatt

SEQ ID NO: 83972 - DNA, 25 bp, Saccharomyces pastorianus
tagtgtcggccccataaaaagaaag

SEQ ID NO: 83973 - DNA, 25 bp, Saccharomyces pastorianus
gtcacaattatagtgtcggccccat

SEQ ID NO: 83974 - DNA, 25 bp, Saccharomyces pastorianus
tgtattgcccgaattgtcacaatta

SEQ ID NO: 83975 - DNA, 25 bp, Saccharomyces pastorianus
actgccccatatgcaattggcgaca

SEQ ID NO: 83976 - DNA, 25 bp, Saccharomyces pastorianus
gacgaacagcttaataaagtcattc

SEQ ID NO: 83977 - DNA, 25 bp, Saccharomyces pastorianus
gggaaaacagttgcactgccccata

SEQ ID NO: 83978 - DNA, 25 bp, Saccharomyces pastorianus
aaaacctgtattgcccgaattgtca

SEQ ID NO: 83979 - DNA, 25 bp, Saccharomyces pastorianus
gtcattcatacctattgtatgtggt

SEQ ID NO: 83980 - DNA, 25 bp, Saccharomyces pastorianus
gattatccgccgaaggtttagccaa

SEQ ID NO: 83981 - DNA, 25 bp, Saccharomyces pastorianus
agtcaacggtctcttccagcaggaa

SEQ ID NO: 83982 - DNA, 25 bp, Saccharomyces pastorianus
atcccgatttcacgataaacgccat

SEQ ID NO: 83983 - DNA, 25 bp, Saccharomyces pastorianus
cagtgacatatttgccgatcctaat

SEQ ID NO: 83984 - DNA, 25 bp, Saccharomyces pastorianus
atgattcctacacacattcttcacg

SEQ ID NO: 83985 - DNA, 25 bp, Saccharomyces pastorianus
aatttccgactcgagattatccgcc

SEQ ID NO: 83986 - DNA, 25 bp, Saccharomyces pastorianus
agtaccccgaatacaaccagtccat

SEQ ID NO: 83987 - DNA, 25 bp, Saccharomyces pastorianus
cacgctcttcctcagagtctaagaa

SEQ ID NO: 83988 - DNA, 25 bp, Saccharomyces pastorianus
gaggaagccctgtcatgattcctac

SEQ ID NO: 83989 - DNA, 25 bp, Saccharomyces pastorianus
gatactatgcccctaacgcaagaac

SEQ ID NO: 83990 - DNA, 25 bp, Saccharomyces pastorianus
tagacgaggcacctactacatgatg

SEQ ID NO: 83991 - DNA, 25 bp, Saccharomyces pastorianus
aatctgtcaaaagacgtggcgtttt

SEQ ID NO: 83992 - DNA, 25 bp, Saccharomyces pastorianus
aaaaatcagcacctctggttggaga

SEQ ID NO: 83993 - DNA, 25 bp, Saccharomyces pastorianus
aatccaatgaagaagctcccagaaa

SEQ ID NO: 83994 - DNA, 25 bp, Saccharomyces pastorianus
ggccaaatcattacgtgctagcagt

SEQ ID NO: 83995 - DNA, 25 bp, Saccharomyces pastorianus
gagagacggtagacatcacacttat

SEQ ID NO: 83996 - DNA, 25 bp, Saccharomyces pastorianus
gacgtggcgttttccaaaaagcagt

SEQ ID NO: 83997 - DNA, 25 bp, Saccharomyces pastorianus
cagcacctctggttggagagacggt

SEQ ID NO: 83998 - DNA, 25 bp, Saccharomyces pastorianus
gaattgacatggatgtcgacgagaa

SEQ ID NO: 83999 - DNA, 25 bp, Saccharomyces pastorianus
gtcatctaaatgctaaatctgtcaa

SEQ ID NO: 84000 - DNA, 25 bp, Saccharomyces pastorianus
agcagtagatgcacgtgaacaaaga

SEQ ID NO: 84001 - DNA, 25 bp, Saccharomyces pastorianus
cattacgtgctagcagtcatctaaa

SEQ ID NO: 84002 - DNA, 25 bp, Saccharomyces pastorianus
aacgcctttgatgagacaagcctta

SEQ ID NO: 84003 - DNA, 25 bp, Saccharomyces pastorianus
gactatctaaccagcatccagacag

SEQ ID NO: 84004 - DNA, 25 bp, Saccharomyces pastorianus
gttgtgtctaaataagtaccctcat

SEQ ID NO: 84005 - DNA, 25 bp, Saccharomyces pastorianus
gaggacatagatgccgacgtggaaa

SEQ ID NO: 84006 - DNA, 25 bp, Saccharomyces pastorianus
tatcgacctacgtgtagtacactac

SEQ ID NO: 84007 - DNA, 25 bp, Saccharomyces pastorianus
atcattcctgatatcgacctacgtg

SEQ ID NO: 84008 - DNA, 25 bp, Saccharomyces pastorianus
gagcgccgatgaagtactcgcagaa

SEQ ID NO: 84009 - DNA, 25 bp, Saccharomyces pastorianus
ggaacacatgtagtgagcgccgatg

SEQ ID NO: 84010 - DNA, 25 bp, Saccharomyces pastorianus
aatgctgttcctataccgttcaaaa

SEQ ID NO: 84011 - DNA, 25 bp, Saccharomyces pastorianus
actacgccacgcagttgtgtctaaa

SEQ ID NO: 84012 - DNA, 25 bp, Saccharomyces pastorianus
taacattgggtttactcatcgaaaa

SEQ ID NO: 84013 - DNA, 25 bp, Saccharomyces pastorianus
gaacggtggaaacgctagctccagc

SEQ ID NO: 84014 - DNA, 25 bp, Saccharomyces pastorianus
gaacatgttagcacaagcccagagg

SEQ ID NO: 84015 - DNA, 25 bp, Saccharomyces pastorianus
atgaagaatactctcccaccgagtg

SEQ ID NO: 84016 - DNA, 25 bp, Saccharomyces pastorianus
agctccagcggcagtttgcagcaaa

SEQ ID NO: 84017 - DNA, 25 bp, Saccharomyces pastorianus
gcacgccttaggattcgagaactat

SEQ ID NO: 84018 - DNA, 25 bp, Saccharomyces pastorianus
gaataccaacgagtccgaacatgtt

SEQ ID NO: 84019 - DNA, 25 bp, Saccharomyces pastorianus
ggtgttgaaaatctacttggctaaa

SEQ ID NO: 84020 - DNA, 25 bp, Saccharomyces pastorianus
ttcttttgtgactagcgaggccagc

SEQ ID NO: 84021 - DNA, 25 bp, Saccharomyces pastorianus
cgatcgatgcgctgctgacaaaaga

SEQ ID NO: 84022 - DNA, 25 bp, Saccharomyces pastorianus
gtgtgtcagtgagctcatttctttt

SEQ ID NO: 84023 - DNA, 25 bp, Saccharomyces pastorianus
agacattctcatatcattgcacgcc

SEQ ID NO: 84024 - DNA, 25 bp, Saccharomyces pastorianus
ggagcgccaaaccatacaatctttt

SEQ ID NO: 84025 - DNA, 25 bp, Saccharomyces pastorianus
gcttttttccagagtgtagccactg

SEQ ID NO: 84026 - DNA, 25 bp, Saccharomyces pastorianus
cttttctggtattttcctgctcaat

SEQ ID NO: 84027 - DNA, 25 bp, Saccharomyces pastorianus
gaaatggtccactacttccgttttg

SEQ ID NO: 84028 - DNA, 25 bp, Saccharomyces pastorianus
attattgctggctcaacgatctgtc

SEQ ID NO: 84029 - DNA, 25 bp, Saccharomyces pastorianus
attgcagttcttgattggctcgaaa

SEQ ID NO: 84030 - DNA, 25 bp, Saccharomyces pastorianus
cgatctgtctacttgactggtggtt

SEQ ID NO: 84031 - DNA, 25 bp, Saccharomyces pastorianus
aagagtctactgcttttacatccca

SEQ ID NO: 84032 - DNA, 25 bp, Saccharomyces pastorianus
ggcctgccaattcatcctttttatt

SEQ ID NO: 84033 - DNA, 25 bp, Saccharomyces pastorianus
tgctcaattcctggcttcttattga

SEQ ID NO: 84034 - DNA, 25 bp, Saccharomyces pastorianus
atgatcattgtatttgggcctgcca

SEQ ID NO: 84035 - DNA, 25 bp, Saccharomyces pastorianus
ttcgaattatggctcacggatagat

SEQ ID NO: 84036 - DNA, 25 bp, Saccharomyces pastorianus
gaatcctctgaaattccacagcaag

SEQ ID NO: 84037 - DNA, 25 bp, Saccharomyces pastorianus
aaaagaatctccacgccaaagttga

SEQ ID NO: 84038 - DNA, 25 bp, Saccharomyces pastorianus
atcgctcgactcatttttccagaag

SEQ ID NO: 84039 - DNA, 25 bp, Saccharomyces pastorianus
attgtcctgtgtattctgatttaga

SEQ ID NO: 84040 - DNA, 25 bp, Saccharomyces pastorianus
caaggatgtcttcggaaagcctccc

SEQ ID NO: 84041 - DNA, 25 bp, Saccharomyces pastorianus
gaaaacttcggccaatccaggtaga

SEQ ID NO: 84042 - DNA, 25 bp, Saccharomyces pastorianus
aaacagctgacattcttccggatat

SEQ ID NO: 84043 - DNA, 25 bp, Saccharomyces pastorianus
gaacctggtacgacacaagttgcca

SEQ ID NO: 84044 - DNA, 25 bp, Saccharomyces pastorianus
ttatcctagtgtccttaaagcttga

SEQ ID NO: 84045 - DNA, 25 bp, Saccharomyces pastorianus
tatattgggctctgaccattgtcct

SEQ ID NO: 84046 - DNA, 25 bp, Saccharomyces pastorianus
ggagaagatgttccctcgagtcaac

SEQ ID NO: 84047 - DNA, 25 bp, Saccharomyces pastorianus
gtcctgcggatgtattctcgctgaa

SEQ ID NO: 84048 - DNA, 25 bp, Saccharomyces pastorianus
aattcagagcccacaggtcagcaaa

SEQ ID NO: 84049 - DNA, 25 bp, Saccharomyces pastorianus
atcattgacgagtcagccgcggaca

SEQ ID NO: 84050 - DNA, 25 bp, Saccharomyces pastorianus
tattcggtatcatcggtacacctca

SEQ ID NO: 84051 - DNA, 25 bp, Saccharomyces pastorianus
gaggcactggagcatccgtatttgc

SEQ ID NO: 84052 - DNA, 25 bp, Saccharomyces pastorianus
gtatgcttgtttttgaccctgcgaa

SEQ ID NO: 84053 - DNA, 25 bp, Saccharomyces pastorianus
gctgaacttttcttaagacggccaa

SEQ ID NO: 84054 - DNA, 25 bp, Saccharomyces pastorianus
gtgtatagagtcacccagggctaga

SEQ ID NO: 84055 - DNA, 25 bp, Saccharomyces pastorianus
gtgatgttaacctctgccaaatatt

SEQ ID NO: 84056 - DNA, 25 bp, Saccharomyces pastorianus
agcttcttcgagtttgatcaccaca

SEQ ID NO: 84057 - DNA, 25 bp, Saccharomyces pastorianus
tcatcgccatgaataccccagtaga

SEQ ID NO: 84058 - DNA, 25 bp, Saccharomyces pastorianus
agaagttgacatttacgcgcacgcc

SEQ ID NO: 84059 - DNA, 25 bp, Saccharomyces pastorianus
ttcctatggcctctcatgtagatca

SEQ ID NO: 84060 - DNA, 25 bp, Saccharomyces pastorianus
aaactgagcatgacctggacatctt

SEQ ID NO: 84061 - DNA, 25 bp, Saccharomyces pastorianus
aagaatgctttcaagttccacacca

SEQ ID NO: 84062 - DNA, 25 bp, Saccharomyces pastorianus
gggtggatctgctgatttcttgaga

SEQ ID NO: 84063 - DNA, 25 bp, Saccharomyces pastorianus
gccactgctacttccatgagattga

SEQ ID NO: 84064 - DNA, 25 bp, Saccharomyces pastorianus
acgcgcacgccaattctacaaatgt

SEQ ID NO: 84065 - DNA, 25 bp, Saccharomyces pastorianus
taaagtagaccctaccggtatctct

SEQ ID NO: 84066 - DNA, 25 bp, Saccharomyces pastorianus
ggtatctctaccattgttcctatgg

SEQ ID NO: 84067 - DNA, 25 bp, Saccharomyces pastorianus
agggtttcgacagagcctttgcaaa

SEQ ID NO: 84068 - DNA, 25 bp, Saccharomyces pastorianus
aaccatcactttttgaaccgattca

SEQ ID NO: 84069 - DNA, 25 bp, Saccharomyces pastorianus
ttttacatgaagacgttccgggctt

SEQ ID NO: 84070 - DNA, 25 bp, Saccharomyces pastorianus
ggcaggcctccatttaatttaaatt

SEQ ID NO: 84071 - DNA, 25 bp, Saccharomyces pastorianus
ccttcctcgcagatatcatttgtga

SEQ ID NO: 84072 - DNA, 25 bp, Saccharomyces pastorianus
caaaacttaagtgtcctgccagatt

SEQ ID NO: 84073 - DNA, 25 bp, Saccharomyces pastorianus
gaacgattcacaaccgcgtaattct

SEQ ID NO: 84074 - DNA, 25 bp, Saccharomyces pastorianus
ggatattatctcctcttgggatatg

SEQ ID NO: 84075 - DNA, 25 bp, Saccharomyces pastorianus
gatagtcaattttcagcacccttta

SEQ ID NO: 84076 - DNA, 25 bp, Saccharomyces pastorianus
gatcactaagtggtccttaccagga

SEQ ID NO: 84077 - DNA, 25 bp, Saccharomyces pastorianus
aaaagctactccgttatcacaatcc

SEQ ID NO: 84078 - DNA, 25 bp, Saccharomyces pastorianus
gttccgggcttggatatcttttaca

SEQ ID NO: 84079 - DNA, 25 bp, Saccharomyces pastorianus
ttagcttcgacatccgttgcacctt

SEQ ID NO: 84080 - DNA, 25 bp, Saccharomyces pastorianus
atagtgacaattccctctctaacat

SEQ ID NO: 84081 - DNA, 25 bp, Saccharomyces pastorianus
gtgacaaccacgatgcctatgaaca

SEQ ID NO: 84082 - DNA, 25 bp, Saccharomyces pastorianus
aagattcgtcatcacctatcatcag

SEQ ID NO: 84083 - DNA, 25 bp, Saccharomyces pastorianus
gtaaaatcgcacaggccgtcttaaa

SEQ ID NO: 84084 - DNA, 25 bp, Saccharomyces pastorianus
aaccaagattccgatggcgtctcat

SEQ ID NO: 84085 - DNA, 25 bp, Saccharomyces pastorianus
gaccactggttttatctcttacatc

SEQ ID NO: 84086 - DNA, 25 bp, Saccharomyces pastorianus
aagtcagagtcttccttagcttcga

SEQ ID NO: 84087 - DNA, 25 bp, Saccharomyces pastorianus
ttattccccgatttcgatagtgccg

SEQ ID NO: 84088 - DNA, 25 bp, Saccharomyces pastorianus
ctcttacatctccaaagggcttgca

SEQ ID NO: 84089 - DNA, 25 bp, Saccharomyces pastorianus
cgatggcgtctcattggtcaatagt

SEQ ID NO: 84090 - DNA, 25 bp, Saccharomyces pastorianus
acatataatattggcgaacattcat

SEQ ID NO: 84091 - DNA, 25 bp, Saccharomyces pastorianus
gactgctactgtaatcgtaagaata

SEQ ID NO: 84092 - DNA, 25 bp, Saccharomyces pastorianus
atcctctgtaagtcgttatttttct

SEQ ID NO: 84093 - DNA, 25 bp, Saccharomyces pastorianus
aggttgactgctactgtaatcgtaa

SEQ ID NO: 84094 - DNA, 25 bp, Saccharomyces pastorianus
atgaacccttgtactgttatcctct

SEQ ID NO: 84095 - DNA, 25 bp, Saccharomyces pastorianus
acccttgtactgttatcctctgtaa

SEQ ID NO: 84096 - DNA, 25 bp, Saccharomyces pastorianus
cgaagttactggtttaggtggcaga

SEQ ID NO: 84097 - DNA, 25 bp, Saccharomyces pastorianus
taattaaggcttaccaacgaagcat

SEQ ID NO: 84098 - DNA, 25 bp, Saccharomyces pastorianus
ttcttttgcctttttcaggttgact

SEQ ID NO: 84099 - DNA, 25 bp, Saccharomyces pastorianus
gtactgttatcctctgtaagtcgtt

SEQ ID NO: 84100 - DNA, 25 bp, Saccharomyces pastorianus
gcctttttcaggttgactgctactg

SEQ ID NO: 84101 - DNA, 25 bp, Saccharomyces pastorianus
gagaagttcgagtttggttgccata

SEQ ID NO: 84102 - DNA, 25 bp, Saccharomyces pastorianus
gcggcatcaagatcgatcgttacaa

SEQ ID NO: 84103 - DNA, 25 bp, Saccharomyces pastorianus
gcgtgagttttttgatacccgctct

SEQ ID NO: 84104 - DNA, 25 bp, Saccharomyces pastorianus
gttatcgtctttgttgaactctgga

SEQ ID NO: 84105 - DNA, 25 bp, Saccharomyces pastorianus
ggtctaagtgaccttttgcgtgagt

SEQ ID NO: 84106 - DNA, 25 bp, Saccharomyces pastorianus
acctcagcagcaaattcaccgttga

SEQ ID NO: 84107 - DNA, 25 bp, Saccharomyces pastorianus
tgatacccgctcttttatttacagg

SEQ ID NO: 84108 - DNA, 25 bp, Saccharomyces pastorianus
atgacagtactgctccttcatacaa

SEQ ID NO: 84109 - DNA, 25 bp, Saccharomyces pastorianus
aacattctgcgcctagccaaataag

SEQ ID NO: 84110 - DNA, 25 bp, Saccharomyces pastorianus
atgttccatgtaatctgcggcatca

SEQ ID NO: 84111 - DNA, 25 bp, Saccharomyces pastorianus
tacaacaatgcttctacctcagcag

SEQ ID NO: 84112 - DNA, 25 bp, Saccharomyces pastorianus
ttaccatcgcccaaggtggtgtttt

SEQ ID NO: 84113 - DNA, 25 bp, Saccharomyces pastorianus
tggtgctccagtctatctaactgct

SEQ ID NO: 84114 - DNA, 25 bp, Saccharomyces pastorianus
tctatctaactgctgtcttagaata

SEQ ID NO: 84115 - DNA, 25 bp, Saccharomyces pastorianus
tctaactgctgtcttagaatatttg

SEQ ID NO: 84116 - DNA, 25 bp, Saccharomyces pastorianus
tcgcccaaggtggtgttttgccaaa

SEQ ID NO: 84117 - DNA, 25 bp, Saccharomyces pastorianus
ggtaatgttaccatcgcccaaggtg

SEQ ID NO: 84118 - DNA, 25 bp, Saccharomyces pastorianus
gaacaagctattgggtaatgttacc

SEQ ID NO: 84119 - DNA, 25 bp, Saccharomyces pastorianus
agctggtttaacattcccagttggt

SEQ ID NO: 84120 - DNA, 25 bp, Saccharomyces pastorianus
atctaactgctgtcttagaatattt

SEQ ID NO: 84121 - DNA, 25 bp, Saccharomyces pastorianus
ccagttggtagagtgcacagattgc

SEQ ID NO: 84122 - DNA, 25 bp, Saccharomyces pastorianus
ctatctaactgctgtcttagaatat

SEQ ID NO: 84123 - DNA, 25 bp, Saccharomyces pastorianus
ccaaacagccgttagattgatctta

SEQ ID NO: 84124 - DNA, 25 bp, Saccharomyces pastorianus
ggagacctattcctcttatatttac

SEQ ID NO: 84125 - DNA, 25 bp, Saccharomyces pastorianus
attggctaaacatgccgtctccgaa

SEQ ID NO: 84126 - DNA, 25 bp, Saccharomyces pastorianus
tgctagagaaatccaaacagccgtt

SEQ ID NO: 84127 - DNA, 25 bp, Saccharomyces pastorianus
atttcccagaagtctatgtctattt

SEQ ID NO: 84128 - DNA, 25 bp, Saccharomyces pastorianus
attggccgcttataacaagaaatcc

SEQ ID NO: 84129 - DNA, 25 bp, Saccharomyces pastorianus
gaaatccactatttctgctagagaa

SEQ ID NO: 84130 - DNA, 25 bp, Saccharomyces pastorianus
aaacatgccgtctccgaaggtacta

SEQ ID NO: 84131 - DNA, 25 bp, Saccharomyces pastorianus
tgccgtctccgaaggtactagggct

SEQ ID NO: 84132 - DNA, 25 bp, Saccharomyces pastorianus
aaaacatcaacctccgtcgatggta

SEQ ID NO: 84133 - DNA, 25 bp, Saccharomyces pastorianus
atcaacctccgtcgatggtaagaag

SEQ ID NO: 84134 - DNA, 25 bp, Saccharomyces pastorianus
gataagcaccaaactgctcaagata

SEQ ID NO: 84135 - DNA, 25 bp, Saccharomyces pastorianus
tctgattttgttgcactcattgaaa

SEQ ID NO: 84136 - DNA, 25 bp, Saccharomyces pastorianus
acgtgtgtatggtccctattggcac

SEQ ID NO: 84137 - DNA, 25 bp, Saccharomyces pastorianus
gttgggactagaactgataagcacc

SEQ ID NO: 84138 - DNA, 25 bp, Saccharomyces pastorianus
gactctgctagtatttctgattttg

SEQ ID NO: 84139 - DNA, 25 bp, Saccharomyces pastorianus
tggcgaaatccatgaatacggtcat

SEQ ID NO: 84140 - DNA, 25 bp, Saccharomyces pastorianus
tgttagagtacacactgatattcgt

SEQ ID NO: 84141 - DNA, 25 bp, Saccharomyces pastorianus
gaacaacaattgaagggccttggga

SEQ ID NO: 84142 - DNA, 25 bp, Saccharomyces pastorianus
gatcttttgtttagcggacgtgtgt

SEQ ID NO: 84143 - DNA, 25 bp, Saccharomyces pastorianus
tattggcaccgactctgctagtatt

SEQ ID NO: 84144 - DNA, 25 bp, Saccharomyces pastorianus
ctttacacagtgcaggaacaacaat

SEQ ID NO: 84145 - DNA, 25 bp, Saccharomyces pastorianus
ggtgctgattttaagggcgtcgcta

SEQ ID NO: 84146 - DNA, 25 bp, Saccharomyces pastorianus
aagagggactgatccgcatcgcgtt

SEQ ID NO: 84147 - DNA, 25 bp, Saccharomyces pastorianus
gcgccgcaccaaatattagcctgga

SEQ ID NO: 84148 - DNA, 25 bp, Saccharomyces pastorianus
attatccttttggttgggcgccgca

SEQ ID NO: 84149 - DNA, 25 bp, Saccharomyces pastorianus
aagaagggctctcgctgcttgtagt

SEQ ID NO: 84150 - DNA, 25 bp, Saccharomyces pastorianus
tagtccaccattgccatttttcaat

SEQ ID NO: 84151 - DNA, 25 bp, Saccharomyces pastorianus
aatgctcggcggactagttgcatgc

SEQ ID NO: 84152 - DNA, 25 bp, Saccharomyces pastorianus
gaaaaagctcttcctcagctagaaa

SEQ ID NO: 84153 - DNA, 25 bp, Saccharomyces pastorianus
gaacgtcttatgagtctgcaacgac

SEQ ID NO: 84154 - DNA, 25 bp, Saccharomyces pastorianus
tttgtgggctggtcttgcaactgaa

SEQ ID NO: 84155 - DNA, 25 bp, Saccharomyces pastorianus
ggcgtcgctacagaaggctttggtt

SEQ ID NO: 84156 - DNA, 25 bp, Saccharomyces pastorianus
actgctccagtcttgtttgcatgga

SEQ ID NO: 84157 - DNA, 25 bp, Saccharomyces pastorianus
gaagacccatctttaggtccactaa

SEQ ID NO: 84158 - DNA, 25 bp, Saccharomyces pastorianus
gacctatctgaagactgctgctttg

SEQ ID NO: 84159 - DNA, 25 bp, Saccharomyces pastorianus
attgacgcggatatcgataccatcg

SEQ ID NO: 84160 - DNA, 25 bp, Saccharomyces pastorianus
taggtccactaatttcacgcaattt

SEQ ID NO: 84161 - DNA, 25 bp, Saccharomyces pastorianus
cataagctacttccggttccttcta

SEQ ID NO: 84162 - DNA, 25 bp, Saccharomyces pastorianus
attctcttcctgaatctgatgctcg

SEQ ID NO: 84163 - DNA, 25 bp, Saccharomyces pastorianus
tgatgctcgttctgccctagagttt

SEQ ID NO: 84164 - DNA, 25 bp, Saccharomyces pastorianus
atcacctgccgttatcgacgaatgc

SEQ ID NO: 84165 - DNA, 25 bp, Saccharomyces pastorianus
tttagggaagccatccggcgcggat

SEQ ID NO: 84166 - DNA, 25 bp, Saccharomyces pastorianus
aaaattaggtattgctactgctcca

SEQ ID NO: 84167 - DNA, 25 bp, Saccharomyces pastorianus
gagtttcaccccaacgataaggctg

SEQ ID NO: 84168 - DNA, 25 bp, Saccharomyces pastorianus
gcgtgctcccattagaggtacggca

SEQ ID NO: 84169 - DNA, 25 bp, Saccharomyces pastorianus
tgactagttactatgggccatcatc

SEQ ID NO: 84170 - DNA, 25 bp, Saccharomyces pastorianus
gctgctgtagttcaccaagctaact

SEQ ID NO: 84171 - DNA, 25 bp, Saccharomyces pastorianus
gtttgtgctgtttgttgccgcaata

SEQ ID NO: 84172 - DNA, 25 bp, Saccharomyces pastorianus
ggcgcgttccagctgtaagtgatac

SEQ ID NO: 84173 - DNA, 25 bp, Saccharomyces pastorianus
atcatcgtcgtcatggcagtcagga

SEQ ID NO: 84174 - DNA, 25 bp, Saccharomyces pastorianus
aatatactgggaccgttcagcaacg

SEQ ID NO: 84175 - DNA, 25 bp, Saccharomyces pastorianus
ttgacaccgccttcatacagacagt

SEQ ID NO: 84176 - DNA, 25 bp, Saccharomyces pastorianus
tttagaaagacctcccgctgctgta

SEQ ID NO: 84177 - DNA, 25 bp, Saccharomyces pastorianus
tacggtttaacaaggcctagcaatg

SEQ ID NO: 84178 - DNA, 25 bp, Saccharomyces pastorianus
aatcctttgctgctgaggttcttga

SEQ ID NO: 84179 - DNA, 25 bp, Saccharomyces pastorianus
gtgcgggaagcttaaatttcaccca

SEQ ID NO: 84180 - DNA, 25 bp, Saccharomyces pastorianus
gaatcttcacacatcggacaggcaa

SEQ ID NO: 84181 - DNA, 25 bp, Saccharomyces pastorianus
gcacctgccttgtatgaatgtggta

SEQ ID NO: 84182 - DNA, 25 bp, Saccharomyces pastorianus
ggacgatatccctgatatagcgcct

SEQ ID NO: 84183 - DNA, 25 bp, Saccharomyces pastorianus
tgaaaaaagcctgcgcgtgcggaaa

SEQ ID NO: 84184 - DNA, 25 bp, Saccharomyces pastorianus
tgttatatggactagccctgcgaca

SEQ ID NO: 84185 - DNA, 25 bp, Saccharomyces pastorianus
ggccatgtagactcaatgtgcttaa

SEQ ID NO: 84186 - DNA, 25 bp, Saccharomyces pastorianus
aaaggatctcgccagagctgctgca

SEQ ID NO: 84187 - DNA, 25 bp, Saccharomyces pastorianus
atggatcatcccgacgagcgaaaag

SEQ ID NO: 84188 - DNA, 25 bp, Saccharomyces pastorianus
aaagctgctctattaggccatgtag

SEQ ID NO: 84189 - DNA, 25 bp, Saccharomyces pastorianus
tggtgtcaagcgtatttctggtttg

SEQ ID NO: 84190 - DNA, 25 bp, Saccharomyces pastorianus
gtgtcaagcgtatttctggtttgat

SEQ ID NO: 84191 - DNA, 25 bp, Saccharomyces pastorianus
agcgtatttctggtttgatctacga

SEQ ID NO: 84192 - DNA, 25 bp, Saccharomyces pastorianus
aagcgtatttctggtttgatctacg

SEQ ID NO: 84193 - DNA, 25 bp, Saccharomyces pastorianus
caagcgtatttctggtttgatctac

SEQ ID NO: 84194 - DNA, 25 bp, Saccharomyces pastorianus
tcaagcgtatttctggtttgatcta

SEQ ID NO: 84195 - DNA, 25 bp, Saccharomyces pastorianus
gtcaagcgtatttctggtttgatct

SEQ ID NO: 84196 - DNA, 25 bp, Saccharomyces pastorianus
gcgtatttctggtttgatctacgaa

SEQ ID NO: 84197 - DNA, 25 bp, Saccharomyces pastorianus
ggtgtcaagcgtatttctggtttga

SEQ ID NO: 84198 - DNA, 25 bp, Saccharomyces pastorianus
tgtcaagcgtatttctggtttgatc

SEQ ID NO: 84199 - DNA, 25 bp, Saccharomyces pastorianus
tgccatcggtgccttgcaagaatct

SEQ ID NO: 84200 - DNA, 25 bp, Saccharomyces pastorianus
gacttgagatttcaatcttctgcca

SEQ ID NO: 84201 - DNA, 25 bp, Saccharomyces pastorianus
tgaagataccaacttggctgccatt

SEQ ID NO: 84202 - DNA, 25 bp, Saccharomyces pastorianus
tagtctctttatttgaagataccaa

SEQ ID NO: 84203 - DNA, 25 bp, Saccharomyces pastorianus
aagataccaacttggctgccattca

SEQ ID NO: 84204 - DNA, 25 bp, Saccharomyces pastorianus
ataccaacttggctgccattcacgc

SEQ ID NO: 84205 - DNA, 25 bp, Saccharomyces pastorianus
gaagataccaacttggctgccattc

SEQ ID NO: 84206 - DNA, 25 bp, Saccharomyces pastorianus
gccaggtactgttgctttgagagaa

SEQ ID NO: 84207 - DNA, 25 bp, Saccharomyces pastorianus
gcaaacagcaagaaagtccactggt

SEQ ID NO: 84208 - DNA, 25 bp, Saccharomyces pastorianus
ttatttgaagataccaacttggctg

SEQ ID NO: 84209 - DNA, 25 bp, Saccharomyces pastorianus
agataccaacttggctgccattcac

SEQ ID NO: 84210 - DNA, 25 bp, Saccharomyces pastorianus
ggaaacacatgactcctggaaacaa

SEQ ID NO: 84211 - DNA, 25 bp, Saccharomyces pastorianus
tgctccaattgacaagtctattgac

SEQ ID NO: 84212 - DNA, 25 bp, Saccharomyces pastorianus
aggctctaggtatcatggctttatt

SEQ ID NO: 84213 - DNA, 25 bp, Saccharomyces pastorianus
gttgagggctactaacgaatggttc

SEQ ID NO: 84214 - DNA, 25 bp, Saccharomyces pastorianus
tttgaccaatgttactttgcctgac

SEQ ID NO: 84215 - DNA, 25 bp, Saccharomyces pastorianus
gaccgattggaaagttattgccatt

SEQ ID NO: 84216 - DNA, 25 bp, Saccharomyces pastorianus
aactatggtgctttcccacaaactt

SEQ ID NO: 84217 - DNA, 25 bp, Saccharomyces pastorianus
taattgctggtaagtcttctgacag

SEQ ID NO: 84218 - DNA, 25 bp, Saccharomyces pastorianus
agccacccagaaactaaggcagttg

SEQ ID NO: 84219 - DNA, 25 bp, Saccharomyces pastorianus
ttcccaggtctgttgagggctacta

SEQ ID NO: 84220 - DNA, 25 bp, Saccharomyces pastorianus
taaggcagttggtgacaacgatcca

SEQ ID NO: 84221 - DNA, 25 bp, Saccharomyces pastorianus
catcctgattcattggtgacgtttg

SEQ ID NO: 84222 - DNA, 25 bp, Saccharomyces pastorianus
ggcactcaccaatctgtccatgata

SEQ ID NO: 84223 - DNA, 25 bp, Saccharomyces pastorianus
tgctagcgtcaacgaaagtattact

SEQ ID NO: 84224 - DNA, 25 bp, Saccharomyces pastorianus
ggacgctgaatttgatgccgctgca

SEQ ID NO: 84225 - DNA, 25 bp, Saccharomyces pastorianus
ggtgacgtttgacaattcaggaaat

SEQ ID NO: 84226 - DNA, 25 bp, Saccharomyces pastorianus
aaggaattcgaatgctagcgtcaac

SEQ ID NO: 84227 - DNA, 25 bp, Saccharomyces pastorianus
tgccgctgcagaatacaacaaaata

SEQ ID NO: 84228 - DNA, 25 bp, Saccharomyces pastorianus
ctcattgttgtgttttttgtgttaa

SEQ ID NO: 84229 - DNA, 25 bp, Saccharomyces pastorianus
aagtattactactcaccatcctgat

SEQ ID NO: 84230 - DNA, 25 bp, Saccharomyces pastorianus
aggaaatgcacctggcactcaccaa

SEQ ID NO: 84231 - DNA, 25 bp, Saccharomyces pastorianus
aactaatttactgctcattgttgtg

SEQ ID NO: 84232 - DNA, 25 bp, Saccharomyces pastorianus
gccgctgcaaacttttatggtctat

SEQ ID NO: 84233 - DNA, 25 bp, Saccharomyces pastorianus
gtgcaggattatggccgttacttaa

SEQ ID NO: 84234 - DNA, 25 bp, Saccharomyces pastorianus
ctgctcgttcatatacggccttaaa

SEQ ID NO: 84235 - DNA, 25 bp, Saccharomyces pastorianus
aaggaaactttcattgccgctgcaa

SEQ ID NO: 84236 - DNA, 25 bp, Saccharomyces pastorianus
gacaggcgttgaaggctaccatgat

SEQ ID NO: 84237 - DNA, 25 bp, Saccharomyces pastorianus
gttacaacacgactttgtgcaggat

SEQ ID NO: 84238 - DNA, 25 bp, Saccharomyces pastorianus
attggcaacaaatacggtggcacta

SEQ ID NO: 84239 - DNA, 25 bp, Saccharomyces pastorianus
ggtggcactaaatcagctgatgcaa

SEQ ID NO: 84240 - DNA, 25 bp, Saccharomyces pastorianus
aagtttgacccatacgatttatcta

SEQ ID NO: 84241 - DNA, 25 bp, Saccharomyces pastorianus
aatatctcgatgaccttttagggca

SEQ ID NO: 84242 - DNA, 25 bp, Saccharomyces pastorianus
gaatggtaaacctgctcgttcatat

SEQ ID NO: 84243 - DNA, 25 bp, Saccharomyces pastorianus
aaactcaggagcgtggatacccacc

SEQ ID NO: 84244 - DNA, 25 bp, Saccharomyces pastorianus
tctggctgcatgtctggctgcatta

SEQ ID NO: 84245 - DNA, 25 bp, Saccharomyces pastorianus
agcatcccggatactataaccaaca

SEQ ID NO: 84246 - DNA, 25 bp, Saccharomyces pastorianus
aacgaaggttgtctggctgcatgtc

SEQ ID NO: 84247 - DNA, 25 bp, Saccharomyces pastorianus
cagcagggctacaatcagcagggat

SEQ ID NO: 84248 - DNA, 25 bp, Saccharomyces pastorianus
gtctgctaacgattactacggcgga

SEQ ID NO: 84249 - DNA, 25 bp, Saccharomyces pastorianus
cttcatccgctcatcagaacaaaac

SEQ ID NO: 84250 - DNA, 25 bp, Saccharomyces pastorianus
gcagggatacaaccaacaaggccat

SEQ ID NO: 84251 - DNA, 25 bp, Saccharomyces pastorianus
gcagggatataaccagcagggatac

SEQ ID NO: 84252 - DNA, 25 bp, Saccharomyces pastorianus
acaaggccatcaacaaccagtctac

SEQ ID NO: 84253 - DNA, 25 bp, Saccharomyces pastorianus
ggcgcgaagagccaatattcccgtc

SEQ ID NO: 84254 - DNA, 25 bp, Saccharomyces pastorianus
gtgatggtactcctgctgtgataaa

SEQ ID NO: 84255 - DNA, 25 bp, Saccharomyces pastorianus
ttttgcgcaagagatctacaccttt

SEQ ID NO: 84256 - DNA, 25 bp, Saccharomyces pastorianus
tagcgcgtacatgggtttcctgaaa

SEQ ID NO: 84257 - DNA, 25 bp, Saccharomyces pastorianus
attatcaatttgaccagcacggagg

SEQ ID NO: 84258 - DNA, 25 bp, Saccharomyces pastorianus
aaatggtgtttgtccgttaacgcat

SEQ ID NO: 84259 - DNA, 25 bp, Saccharomyces pastorianus
tgttacgggcctttcaagcaatgta

SEQ ID NO: 84260 - DNA, 25 bp, Saccharomyces pastorianus
acaaagctgctttgccctgttggga

SEQ ID NO: 84261 - DNA, 25 bp, Saccharomyces pastorianus
gatctacacctttttgatgaaccat

SEQ ID NO: 84262 - DNA, 25 bp, Saccharomyces pastorianus
tcagttctggcgcatttgccaatga

SEQ ID NO: 84263 - DNA, 25 bp, Saccharomyces pastorianus
tctgcaataaatttcacgcccgatg

SEQ ID NO: 84264 - DNA, 25 bp, Saccharomyces pastorianus
aaccattctgcccaaatttctgcaa

SEQ ID NO: 84265 - DNA, 25 bp, Saccharomyces pastorianus
ttgacgatgtcgcacaatccttgaa

SEQ ID NO: 84266 - DNA, 25 bp, Saccharomyces pastorianus
cgagtctcaagcttcttgcgataaa

SEQ ID NO: 84267 - DNA, 25 bp, Saccharomyces pastorianus
atggatcatatggttcccgtttgac

SEQ ID NO: 84268 - DNA, 25 bp, Saccharomyces pastorianus
gccagatatcacaacatttccacac

SEQ ID NO: 84269 - DNA, 25 bp, Saccharomyces pastorianus
aatccttgaattgttctcgcgaaga

SEQ ID NO: 84270 - DNA, 25 bp, Saccharomyces pastorianus
cacaccctggaacggcgatattgaa

SEQ ID NO: 84271 - DNA, 25 bp, Saccharomyces pastorianus
aagtaccctaagatcactgatgctg

SEQ ID NO: 84272 - DNA, 25 bp, Saccharomyces pastorianus
tggttgtactgttcacttggttcca

SEQ ID NO: 84273 - DNA, 25 bp, Saccharomyces pastorianus
tttggtgccttgatgaacgagtctc

SEQ ID NO: 84274 - DNA, 25 bp, Saccharomyces pastorianus
gaagcccttgccaatgagttctaca

SEQ ID NO: 84275 - DNA, 25 bp, Saccharomyces pastorianus
tacagcgagctttactgccgacgaa

SEQ ID NO: 84276 - DNA, 25 bp, Saccharomyces pastorianus
cgctattttccccaagtttatcaat

SEQ ID NO: 84277 - DNA, 25 bp, Saccharomyces pastorianus
atattcccatcaaaagggctctttt

SEQ ID NO: 84278 - DNA, 25 bp, Saccharomyces pastorianus
cgctcccgctataaaggtttctgat

SEQ ID NO: 84279 - DNA, 25 bp, Saccharomyces pastorianus
ggcgctgtgtatttgtccatggaat

SEQ ID NO: 84280 - DNA, 25 bp, Saccharomyces pastorianus
agagctttggctgcatatctatgtg

SEQ ID NO: 84281 - DNA, 25 bp, Saccharomyces pastorianus
acctgggtgccctgttaacaacatt

SEQ ID NO: 84282 - DNA, 25 bp, Saccharomyces pastorianus
ttgcttgcccggtttcatcgcggag

SEQ ID NO: 84283 - DNA, 25 bp, Saccharomyces pastorianus
cattattttgtgcagccatggcgct

SEQ ID NO: 84284 - DNA, 25 bp, Saccharomyces pastorianus
gagtttttcttcttatactgctctg

SEQ ID NO: 84285 - DNA, 25 bp, Saccharomyces pastorianus
tattgccggtgttgtctgctcagat

SEQ ID NO: 84286 - DNA, 25 bp, Saccharomyces pastorianus
tatactgctctgtgttacttcttcc

SEQ ID NO: 84287 - DNA, 25 bp, Saccharomyces pastorianus
tcttgcaactgcaatggctcgtggg

SEQ ID NO: 84288 - DNA, 25 bp, Saccharomyces pastorianus
taaacggccacatcaaatacccaat

SEQ ID NO: 84289 - DNA, 25 bp, Saccharomyces pastorianus
caatcggtgactatttaaacggcca

SEQ ID NO: 84290 - DNA, 25 bp, Saccharomyces pastorianus
aaagtcatatgctaggatcctcatc

SEQ ID NO: 84291 - DNA, 25 bp, Saccharomyces pastorianus
tcaacttgctttgcgctacccaaaa

SEQ ID NO: 84292 - DNA, 25 bp, Saccharomyces pastorianus
aggatcctcatccattcttgcaact

SEQ ID NO: 84293 - DNA, 25 bp, Saccharomyces pastorianus
cagatctgctgatttgttgcttgtt

SEQ ID NO: 84294 - DNA, 25 bp, Saccharomyces pastorianus
gcttgtttacatcatcatttggagg

SEQ ID NO: 84295 - DNA, 25 bp, Saccharomyces pastorianus
ggcaaatgcatattacttcccagtt

SEQ ID NO: 84296 - DNA, 25 bp, Saccharomyces pastorianus
atagtggcatattcggagtcccttg

SEQ ID NO: 84297 - DNA, 25 bp, Saccharomyces pastorianus
tggtgggatcgcttatcaacttgct

SEQ ID NO: 84298 - DNA, 25 bp, Saccharomyces pastorianus
tacggttcagtagcacttggcggtc

SEQ ID NO: 84299 - DNA, 25 bp, Saccharomyces pastorianus
ttggcggtcctttcaatttaacaga

SEQ ID NO: 84300 - DNA, 25 bp, Saccharomyces pastorianus
gtttatctcatgtgatcctgcaaga

SEQ ID NO: 84301 - DNA, 25 bp, Saccharomyces pastorianus
gattttcacccagctatcattggtt

SEQ ID NO: 84302 - DNA, 25 bp, Saccharomyces pastorianus
ttctatttgatcgaccctgaaggac

SEQ ID NO: 84303 - DNA, 25 bp, Saccharomyces pastorianus
tactttggattcagtcattgccccg

SEQ ID NO: 84304 - DNA, 25 bp, Saccharomyces pastorianus
gatgtcaagcccaaccaggattact

SEQ ID NO: 84305 - DNA, 25 bp, Saccharomyces pastorianus
gtggaccattcgatatttttctatt

SEQ ID NO: 84306 - DNA, 25 bp, Saccharomyces pastorianus
tttcaactccacgtgatgtcaagcc

SEQ ID NO: 84307 - DNA, 25 bp, Saccharomyces pastorianus
gggacgtatgcctatttatcaagaa

SEQ ID NO: 84308 - DNA, 25 bp, Saccharomyces pastorianus
gagtacttaagcgattttcacccag

SEQ ID NO: 84309 - DNA, 25 bp, Saccharomyces pastorianus
gtactctccaggtgacttgatcatt

SEQ ID NO: 84310 - DNA, 25 bp, Saccharomyces pastorianus
gttcttgttgactgctaagccatgt

SEQ ID NO: 84311 - DNA, 25 bp, Saccharomyces pastorianus
tttcacctgcggtccagatgaagtt

SEQ ID NO: 84312 - DNA, 25 bp, Saccharomyces pastorianus
gttgctaatcactcctggacttcaa

SEQ ID NO: 84313 - DNA, 25 bp, Saccharomyces pastorianus
aaagctccacaagctgctggtgtta

SEQ ID NO: 84314 - DNA, 25 bp, Saccharomyces pastorianus
tgatcattccattcagtgtttctct

SEQ ID NO: 84315 - DNA, 25 bp, Saccharomyces pastorianus
aaagactatctcatatgtccccaga

SEQ ID NO: 84316 - DNA, 25 bp, Saccharomyces pastorianus
cagacaatatctgccttgccaaaga

SEQ ID NO: 84317 - DNA, 25 bp, Saccharomyces pastorianus
gaaattatcaactccatgttcttgt

SEQ ID NO: 84318 - DNA, 25 bp, Saccharomyces pastorianus
taaggacgattctgccatcaaggcc

SEQ ID NO: 84319 - DNA, 25 bp, Saccharomyces pastorianus
ttgatttcctttttcacctgcggtc

SEQ ID NO: 84320 - DNA, 25 bp, Saccharomyces pastorianus
gaggcttgccttgaattctgttgga

SEQ ID NO: 84321 - DNA, 25 bp, Saccharomyces pastorianus
gaggtaaatccagtgcatcaatagc

SEQ ID NO: 84322 - DNA, 25 bp, Saccharomyces pastorianus
aaaggcttgacatccaaagggtact

SEQ ID NO: 84323 - DNA, 25 bp, Saccharomyces pastorianus
aatggattatccaaaatgccggtac

SEQ ID NO: 84324 - DNA, 25 bp, Saccharomyces pastorianus
aactttaccaacatctctacacatt

SEQ ID NO: 84325 - DNA, 25 bp, Saccharomyces pastorianus
gaaactcttacctggaatactaaca

SEQ ID NO: 84326 - DNA, 25 bp, Saccharomyces pastorianus
ggtgctacgaaggttatttccgaat

SEQ ID NO: 84327 - DNA, 25 bp, Saccharomyces pastorianus
ggtcacattatttcaccaagagatg

SEQ ID NO: 84328 - DNA, 25 bp, Saccharomyces pastorianus
cattaagtgttatacgtgaccgtga

SEQ ID NO: 84329 - DNA, 25 bp, Saccharomyces pastorianus
aatgccggtacatctagtgtatcaa

SEQ ID NO: 84330 - DNA, 25 bp, Saccharomyces pastorianus
ggaaaataatgctttgatgctcact

SEQ ID NO: 84331 - DNA, 25 bp, Saccharomyces pastorianus
aatgccctatactcgattatcggta

SEQ ID NO: 84332 - DNA, 25 bp, Saccharomyces pastorianus
gtaagcctccatatactggtagcaa

SEQ ID NO: 84333 - DNA, 25 bp, Saccharomyces pastorianus
atgacatgttagtaggtaagcctcc

SEQ ID NO: 84334 - DNA, 25 bp, Saccharomyces pastorianus
aggcccaattgttccagttattacg

SEQ ID NO: 84335 - DNA, 25 bp, Saccharomyces pastorianus
gggctgcaagaactagtcttttcac

SEQ ID NO: 84336 - DNA, 25 bp, Saccharomyces pastorianus
aattcggtgagcaagtccccggata

SEQ ID NO: 84337 - DNA, 25 bp, Saccharomyces pastorianus
gcaaaaaaccactctaggcccaatt

SEQ ID NO: 84338 - DNA, 25 bp, Saccharomyces pastorianus
ggtattctttgggatgtctgttgta

SEQ ID NO: 84339 - DNA, 25 bp, Saccharomyces pastorianus
ttatcggtacgcctgaatactgtgc

SEQ ID NO: 84340 - DNA, 25 bp, Saccharomyces pastorianus
gcaaggccccaaaattccattttat

SEQ ID NO: 84341 - DNA, 25 bp, Saccharomyces pastorianus
aacctatacggatagcaagccgatt

SEQ ID NO: 84342 - DNA, 25 bp, Saccharomyces pastorianus
ggtttttcactgctctagctagtat

SEQ ID NO: 84343 - DNA, 25 bp, Saccharomyces pastorianus
ttatacttacttgacgtgccctgtt

SEQ ID NO: 84344 - DNA, 25 bp, Saccharomyces pastorianus
gggttcttttgccaatttgtactat

SEQ ID NO: 84345 - DNA, 25 bp, Saccharomyces pastorianus
gatctccataccaattttttctcta

SEQ ID NO: 84346 - DNA, 25 bp, Saccharomyces pastorianus
ggattctgagcccttatacttactt

SEQ ID NO: 84347 - DNA, 25 bp, Saccharomyces pastorianus
cagacagggttgattgccaattcat

SEQ ID NO: 84348 - DNA, 25 bp, Saccharomyces pastorianus
agttaaagactttggccactccatc

SEQ ID NO: 84349 - DNA, 25 bp, Saccharomyces pastorianus
tggaggctttttcgcatctggtcta

SEQ ID NO: 84350 - DNA, 25 bp, Saccharomyces pastorianus
atcccaggccatggtggtatcacag

SEQ ID NO: 84351 - DNA, 25 bp, Saccharomyces pastorianus
acgtgccctgttgaagatctccata

SEQ ID NO: 84352 - DNA, 25 bp, Saccharomyces pastorianus
aagtttacagacttccacccatctt

SEQ ID NO: 84353 - DNA, 25 bp, Saccharomyces pastorianus
cggacacttgtacaatcggagcata

SEQ ID NO: 84354 - DNA, 25 bp, Saccharomyces pastorianus
ttaacggccgttcaatgggaatcat

SEQ ID NO: 84355 - DNA, 25 bp, Saccharomyces pastorianus
atgctccaaaatgctcggacacttg

SEQ ID NO: 84356 - DNA, 25 bp, Saccharomyces pastorianus
catagactcaagtggcgagccttca

SEQ ID NO: 84357 - DNA, 25 bp, Saccharomyces pastorianus
tgttttccaaaaaggccactcctca

SEQ ID NO: 84358 - DNA, 25 bp, Saccharomyces pastorianus
agtcggtcatggcttgttttcagca

SEQ ID NO: 84359 - DNA, 25 bp, Saccharomyces pastorianus
aagctgcccttcctggccaaaaaag

SEQ ID NO: 84360 - DNA, 25 bp, Saccharomyces pastorianus
aatccccattccaagaaactgcttt

SEQ ID NO: 84361 - DNA, 25 bp, Saccharomyces pastorianus
gctttcccagctttacatagactca

SEQ ID NO: 84362 - DNA, 25 bp, Saccharomyces pastorianus
tgggccttagctaaccttttgactt

SEQ ID NO: 84363 - DNA, 25 bp, Saccharomyces pastorianus
tagcttggaatcatggctttcccag

SEQ ID NO: 84364 - DNA, 25 bp, Saccharomyces pastorianus
tttgacgcggctacgaaactcggtt

SEQ ID NO: 84365 - DNA, 25 bp, Saccharomyces pastorianus
ggttccgctcaattttatctttttg

SEQ ID NO: 84366 - DNA, 25 bp, Saccharomyces pastorianus
cacattgagcaacttactgagggag

SEQ ID NO: 84367 - DNA, 25 bp, Saccharomyces pastorianus
ctgtgcctggaactacttcgtgtag

SEQ ID NO: 84368 - DNA, 25 bp, Saccharomyces pastorianus
ttttatctttttgacgcggctacga

SEQ ID NO: 84369 - DNA, 25 bp, Saccharomyces pastorianus
aaaggagacctgtgcctggaactac

SEQ ID NO: 84370 - DNA, 25 bp, Saccharomyces pastorianus
gagcagtccgttaacttaaactaca

SEQ ID NO: 84371 - DNA, 25 bp, Saccharomyces pastorianus
ggttaaacaacactccatgccagta

SEQ ID NO: 84372 - DNA, 25 bp, Saccharomyces pastorianus
ccaattggtagtatgcaggtgctgc

SEQ ID NO: 84373 - DNA, 25 bp, Saccharomyces pastorianus
ggaatatacccctttgatacttctc

SEQ ID NO: 84374 - DNA, 25 bp, Saccharomyces pastorianus
gaaactcggtttcgagcagtccgtt

SEQ ID NO: 84375 - DNA, 25 bp, Saccharomyces pastorianus
ggcttgagaatcgttccactggaaa

SEQ ID NO: 84376 - DNA, 25 bp, Saccharomyces pastorianus
gaagaactagacgagctgacccaaa

SEQ ID NO: 84377 - DNA, 25 bp, Saccharomyces pastorianus
aggctcatgatattgctaccaaccc

SEQ ID NO: 84378 - DNA, 25 bp, Saccharomyces pastorianus
acccaatcgatcttttcaccaaatg

SEQ ID NO: 84379 - DNA, 25 bp, Saccharomyces pastorianus
aggtagaccctcgagattgcatgat

SEQ ID NO: 84380 - DNA, 25 bp, Saccharomyces pastorianus
aaacaacttactgacgacccaatcg

SEQ ID NO: 84381 - DNA, 25 bp, Saccharomyces pastorianus
aattactttttcatccgcggaactg

SEQ ID NO: 84382 - DNA, 25 bp, Saccharomyces pastorianus
atccaagatcggtgcatgggcttcc

SEQ ID NO: 84383 - DNA, 25 bp, Saccharomyces pastorianus
gagggtgtcgtccagaattcttctt

SEQ ID NO: 84384 - DNA, 25 bp, Saccharomyces pastorianus
aatgcggcaatcgtattcttttgga

SEQ ID NO: 84385 - DNA, 25 bp, Saccharomyces pastorianus
gacgagacctcgtggatccaagatc

SEQ ID NO: 84386 - DNA, 25 bp, Saccharomyces pastorianus
gggtgaactttctgatccattcttg

SEQ ID NO: 84387 - DNA, 25 bp, Saccharomyces pastorianus
ttagagttgaatcgcaaggcccctg

SEQ ID NO: 84388 - DNA, 25 bp, Saccharomyces pastorianus
ttccttgccgagcttgatttcgata

SEQ ID NO: 84389 - DNA, 25 bp, Saccharomyces pastorianus
ggctcgattatctttggttccttgc

SEQ ID NO: 84390 - DNA, 25 bp, Saccharomyces pastorianus
tggttctctctactaggctcgatta

SEQ ID NO: 84391 - DNA, 25 bp, Saccharomyces pastorianus
tgacgacgtgcaacctgggagctat

SEQ ID NO: 84392 - DNA, 25 bp, Saccharomyces pastorianus
aaggcccctgctgagtatttgacga

SEQ ID NO: 84393 - DNA, 25 bp, Saccharomyces pastorianus
ttgaaaggtgctctgatttgcggcc

SEQ ID NO: 84394 - DNA, 25 bp, Saccharomyces pastorianus
gattatgggtccttttgccgtgtta

SEQ ID NO: 84395 - DNA, 25 bp, Saccharomyces pastorianus
tacctgtgacatgcttgccggaaag

SEQ ID NO: 84396 - DNA, 25 bp, Saccharomyces pastorianus
gtggaatccatttcgttgttctata

SEQ ID NO: 84397 - DNA, 25 bp, Saccharomyces pastorianus
atcttcttttatctcatggaccctg

SEQ ID NO: 84398 - DNA, 25 bp, Saccharomyces pastorianus
ggtattactctgcagccattattta

SEQ ID NO: 84399 - DNA, 25 bp, Saccharomyces pastorianus
ttgtgatccagcaagagactcccct

SEQ ID NO: 84400 - DNA, 25 bp, Saccharomyces pastorianus
tggtagaccattccatcttctttta

SEQ ID NO: 84401 - DNA, 25 bp, Saccharomyces pastorianus
agagtatacttttctacgcctccaa

SEQ ID NO: 84402 - DNA, 25 bp, Saccharomyces pastorianus
gggtttagtaactgtcctgacatct

SEQ ID NO: 84403 - DNA, 25 bp, Saccharomyces pastorianus
gagactcccctgctgtattgaaaga

SEQ ID NO: 84404 - DNA, 25 bp, Saccharomyces pastorianus
gtcctgacatctgtcctgatgaact

SEQ ID NO: 84405 - DNA, 25 bp, Saccharomyces pastorianus
tatggcttaatacactctcttcaaa

SEQ ID NO: 84406 - DNA, 25 bp, Saccharomyces pastorianus
tccaaacgtcaaaccgggccaagat

SEQ ID NO: 84407 - DNA, 25 bp, Saccharomyces pastorianus
acgttaagagttatgtgcctgcaga

SEQ ID NO: 84408 - DNA, 25 bp, Saccharomyces pastorianus
ttcccgcctttacatgtactttaca

SEQ ID NO: 84409 - DNA, 25 bp, Saccharomyces pastorianus
agatttttgccttctgtaatacaca

SEQ ID NO: 84410 - DNA, 25 bp, Saccharomyces pastorianus
gcctatactttttctcatcactgat

SEQ ID NO: 84411 - DNA, 25 bp, Saccharomyces pastorianus
attgtccaaggccattgtcgttcaa

SEQ ID NO: 84412 - DNA, 25 bp, Saccharomyces pastorianus
tacaatactttttgacacttcccgc

SEQ ID NO: 84413 - DNA, 25 bp, Saccharomyces pastorianus
atcactgatgtacctggatccttgg

SEQ ID NO: 84414 - DNA, 25 bp, Saccharomyces pastorianus
ttcattttatggtctgtggccgctt

SEQ ID NO: 84415 - DNA, 25 bp, Saccharomyces pastorianus
ggttccatggcctttttgttcatga

SEQ ID NO: 84416 - DNA, 25 bp, Saccharomyces pastorianus
agcggctcatgggaagtctctaaat

SEQ ID NO: 84417 - DNA, 25 bp, Saccharomyces pastorianus
tgtaatacacacgacgtttcctggg

SEQ ID NO: 84418 - DNA, 25 bp, Saccharomyces pastorianus
ctgcctttagggtggttggttccat

SEQ ID NO: 84419 - DNA, 25 bp, Saccharomyces pastorianus
tgaaaaaccgatctttaacgccaag

SEQ ID NO: 84420 - DNA, 25 bp, Saccharomyces pastorianus
cattttctacaatgacccggtgtct

SEQ ID NO: 84421 - DNA, 25 bp, Saccharomyces pastorianus
acaatccccatcattcggcaaattt

SEQ ID NO: 84422 - DNA, 25 bp, Saccharomyces pastorianus
ggcaaatttgagatcgacacggacg

SEQ ID NO: 84423 - DNA, 25 bp, Saccharomyces pastorianus
caagaatctgctttgattgccgata

SEQ ID NO: 84424 - DNA, 25 bp, Saccharomyces pastorianus
gacacggacgcaaacgttccaagag

SEQ ID NO: 84425 - DNA, 25 bp, Saccharomyces pastorianus
gtgtcttccctatcttttgaaccat

SEQ ID NO: 84426 - DNA, 25 bp, Saccharomyces pastorianus
ggttatgctgctgaaatttccgcca

SEQ ID NO: 84427 - DNA, 25 bp, Saccharomyces pastorianus
tgcagctattgagaacccatcctaa

SEQ ID NO: 84428 - DNA, 25 bp, Saccharomyces pastorianus
tgaaggccggcacttacccaaaggt

SEQ ID NO: 84429 - DNA, 25 bp, Saccharomyces pastorianus
ttattgagtgtcatgaaggccggca

SEQ ID NO: 84430 - DNA, 25 bp, Saccharomyces pastorianus
gaaagtcacctgagcgcataactga

SEQ ID NO: 84431 - DNA, 25 bp, Saccharomyces pastorianus
gaaaggtactattccactggatcat

SEQ ID NO: 84432 - DNA, 25 bp, Saccharomyces pastorianus
ggaatccggaggttattgatccaaa

SEQ ID NO: 84433 - DNA, 25 bp, Saccharomyces pastorianus
atgatattacgatcggctactccgg

SEQ ID NO: 84434 - DNA, 25 bp, Saccharomyces pastorianus
attcaagaatgtgctgctgcctcat

SEQ ID NO: 84435 - DNA, 25 bp, Saccharomyces pastorianus
atacaatcttatcctattccctgaa

SEQ ID NO: 84436 - DNA, 25 bp, Saccharomyces pastorianus
gatgtcaaagatattcccttagagg

SEQ ID NO: 84437 - DNA, 25 bp, Saccharomyces pastorianus
accattcagttaccgatagtttcaa

SEQ ID NO: 84438 - DNA, 25 bp, Saccharomyces pastorianus
gtgatcccgaaacaaaccattcagt

SEQ ID NO: 84439 - DNA, 25 bp, Saccharomyces pastorianus
atacccgaagttagtcgatattcac

SEQ ID NO: 84440 - DNA, 25 bp, Saccharomyces pastorianus
tacgggcctgagatactcgttacaa

SEQ ID NO: 84441 - DNA, 25 bp, Saccharomyces pastorianus
tactctgacgagttttttggtctgg

SEQ ID NO: 84442 - DNA, 25 bp, Saccharomyces pastorianus
ggctatatcgccgatcctgaagaat

SEQ ID NO: 84443 - DNA, 25 bp, Saccharomyces pastorianus
acctttgaaatcagcttagccgcac

SEQ ID NO: 84444 - DNA, 25 bp, Saccharomyces pastorianus
agggcgttgatgctagttttgactc

SEQ ID NO: 84445 - DNA, 25 bp, Saccharomyces pastorianus
tatgtattactttttgccgcagcgg

SEQ ID NO: 84446 - DNA, 25 bp, Saccharomyces pastorianus
gcggctggtttattacaagttctca

SEQ ID NO: 84447 - DNA, 25 bp, Saccharomyces pastorianus
gcacatacgattgcagttgcctcaa

SEQ ID NO: 84448 - DNA, 25 bp, Saccharomyces pastorianus
gggattatagaactgcagctgctga

SEQ ID NO: 84449 - DNA, 25 bp, Saccharomyces pastorianus
taatgcatctggtcttatcccgcca

SEQ ID NO: 84450 - DNA, 25 bp, Saccharomyces pastorianus
atacggcgccgaatacttgatcaac

SEQ ID NO: 84451 - DNA, 25 bp, Saccharomyces pastorianus
gactcggtcggaaaggatacctttg

SEQ ID NO: 84452 - DNA, 25 bp, Saccharomyces pastorianus
aatcattcagcacctgatggttgtg

SEQ ID NO: 84453 - DNA, 25 bp, Saccharomyces pastorianus
gaaaagtaacatccctattcatgaa

SEQ ID NO: 84454 - DNA, 25 bp, Saccharomyces pastorianus
agatccggacgagttggtatttcaa

SEQ ID NO: 84455 - DNA, 25 bp, Saccharomyces pastorianus
ggatagtcgttgaccgctatttaga

SEQ ID NO: 84456 - DNA, 25 bp, Saccharomyces pastorianus
tatttgatgtcatgctacaagccaa

SEQ ID NO: 84457 - DNA, 25 bp, Saccharomyces pastorianus
gttactccgagatacacaaatcatt

SEQ ID NO: 84458 - DNA, 25 bp, Saccharomyces pastorianus
gatccgaaccgtaaggcacttttct

SEQ ID NO: 84459 - DNA, 25 bp, Saccharomyces pastorianus
gacgagtaattgttgcacctgcatc

SEQ ID NO: 84460 - DNA, 25 bp, Saccharomyces pastorianus
atccaaggaagtttcgcgacgagta

SEQ ID NO: 84461 - DNA, 25 bp, Saccharomyces pastorianus
aggacactccttcatatttgatgtc

SEQ ID NO: 84462 - DNA, 25 bp, Saccharomyces pastorianus
tgcatcacacttcaaaacctccagt

SEQ ID NO: 84463 - DNA, 25 bp, Saccharomyces pastorianus
gacagacagcaagaacgacagccta

SEQ ID NO: 84464 - DNA, 25 bp, Saccharomyces pastorianus
agtcgcaattactcaaagtcattct

SEQ ID NO: 84465 - DNA, 25 bp, Saccharomyces pastorianus
gcagcggcgggaggatatcccatat

SEQ ID NO: 84466 - DNA, 25 bp, Saccharomyces pastorianus
gatatcccatatcgtttctattcat

SEQ ID NO: 84467 - DNA, 25 bp, Saccharomyces pastorianus
tcttgtttattttccactgtttggc

SEQ ID NO: 84468 - DNA, 25 bp, Saccharomyces pastorianus
gacagcctaagtttcgagacaacgc

SEQ ID NO: 84469 - DNA, 25 bp, Saccharomyces pastorianus
aatacgtaccatttgcagcggcggg

SEQ ID NO: 84470 - DNA, 25 bp, Saccharomyces pastorianus
tattcatcaaagttctgaccgcctc

SEQ ID NO: 84471 - DNA, 25 bp, Saccharomyces pastorianus
aatttactactttcttcttcctctg

SEQ ID NO: 84472 - DNA, 25 bp, Saccharomyces pastorianus
aagtcattctcacacactttcttgt

SEQ ID NO: 84473 - DNA, 25 bp, Saccharomyces pastorianus
tcttcctctggagggtcctggaata

SEQ ID NO: 84474 - DNA, 25 bp, Saccharomyces pastorianus
gccggtttgtttgtttcaggcgcaa

SEQ ID NO: 84475 - DNA, 25 bp, Saccharomyces pastorianus
gacggtggcagacctcccagtttat

SEQ ID NO: 84476 - DNA, 25 bp, Saccharomyces pastorianus
gccgaaagtcgctattttgatttac

SEQ ID NO: 84477 - DNA, 25 bp, Saccharomyces pastorianus
tcgaatactggtgggctttgggcaa

SEQ ID NO: 84478 - DNA, 25 bp, Saccharomyces pastorianus
tgagtactctggtccatcatggtgt

SEQ ID NO: 84479 - DNA, 25 bp, Saccharomyces pastorianus
taagtttggcaacttccccgcggag

SEQ ID NO: 84480 - DNA, 25 bp, Saccharomyces pastorianus
agattttccaagtgccagacgtcag

SEQ ID NO: 84481 - DNA, 25 bp, Saccharomyces pastorianus
gtttatccgagctaagagttcacca

SEQ ID NO: 84482 - DNA, 25 bp, Saccharomyces pastorianus
gcaaagggttctctccatggcaaaa

SEQ ID NO: 84483 - DNA, 25 bp, Saccharomyces pastorianus
tgtgtttctggaatcgacggtggca

SEQ ID NO: 84484 - DNA, 25 bp, Saccharomyces pastorianus
aaaagcttttgggactcgaatactg

SEQ ID NO: 84485 - DNA, 25 bp, Saccharomyces pastorianus
gtaaagatctcttcgtgaccactgc

SEQ ID NO: 84486 - DNA, 25 bp, Saccharomyces pastorianus
ttgccggagcagacaccaagagttt

SEQ ID NO: 84487 - DNA, 25 bp, Saccharomyces pastorianus
gttaattcctaacgcgatccactgg

SEQ ID NO: 84488 - DNA, 25 bp, Saccharomyces pastorianus
tttctgtttatcactgtctggtcca

SEQ ID NO: 84489 - DNA, 25 bp, Saccharomyces pastorianus
gcttcgtgttgacctattagctcac

SEQ ID NO: 84490 - DNA, 25 bp, Saccharomyces pastorianus
aatcttttgagtctcctgaaccaga

SEQ ID NO: 84491 - DNA, 25 bp, Saccharomyces pastorianus
ggtggctgcatctacagaattccaa

SEQ ID NO: 84492 - DNA, 25 bp, Saccharomyces pastorianus
aatgagcgattttccgtttgatttg

SEQ ID NO: 84493 - DNA, 25 bp, Saccharomyces pastorianus
gacgatgtacgtgactgattcttta

SEQ ID NO: 84494 - DNA, 25 bp, Saccharomyces pastorianus
aaatgtcctggtggcgacttgctaa

SEQ ID NO: 84495 - DNA, 25 bp, Saccharomyces pastorianus
acctattgggtgtttgcttcgtgtt

SEQ ID NO: 84496 - DNA, 25 bp, Saccharomyces pastorianus
gaacccgctgaacatgttggtccag

SEQ ID NO: 84497 - DNA, 25 bp, Saccharomyces pastorianus
ctgattctgactctagtaccaagga

SEQ ID NO: 84498 - DNA, 25 bp, Saccharomyces pastorianus
acaactacattcaacctggtcaagg

SEQ ID NO: 84499 - DNA, 25 bp, Saccharomyces pastorianus
taaggatgtctctaacgttttcgtt

SEQ ID NO: 84500 - DNA, 25 bp, Saccharomyces pastorianus
gatcttatctatcttgccagttctt

SEQ ID NO: 84501 - DNA, 25 bp, Saccharomyces pastorianus
gttttcgttactttcatgagtgtca

SEQ ID NO: 84502 - DNA, 25 bp, Saccharomyces pastorianus
accattggtattggtgctgccattg

SEQ ID NO: 84503 - DNA, 25 bp, Saccharomyces pastorianus
gtttttgtggctgattgcttaccca

SEQ ID NO: 84504 - DNA, 25 bp, Saccharomyces pastorianus
ttactgtctgctggttgattgctgc

SEQ ID NO: 84505 - DNA, 25 bp, Saccharomyces pastorianus
caaccagattctgctaccattttct

SEQ ID NO: 84506 - DNA, 25 bp, Saccharomyces pastorianus
ttgattgctgcctgtgtccactcta

SEQ ID NO: 84507 - DNA, 25 bp, Saccharomyces pastorianus
gttactcgtcacacaggcattgcaa

SEQ ID NO: 84508 - DNA, 25 bp, Saccharomyces pastorianus
aatgtgagcctacttacggacccga

SEQ ID NO: 84509 - DNA, 25 bp, Saccharomyces pastorianus
aaagtgctcgcgttacggagataca

SEQ ID NO: 84510 - DNA, 25 bp, Saccharomyces pastorianus
ttagatcaggcggagttactcgtca

SEQ ID NO: 84511 - DNA, 25 bp, Saccharomyces pastorianus
caagcaatgctttactttgggtgga

SEQ ID NO: 84512 - DNA, 25 bp, Saccharomyces pastorianus
gcaaggatactgttgatctctacaa

SEQ ID NO: 84513 - DNA, 25 bp, Saccharomyces pastorianus
atggatagccgcctctaagaacgta

SEQ ID NO: 84514 - DNA, 25 bp, Saccharomyces pastorianus
aggttagtgcccaattgccctttat

SEQ ID NO: 84515 - DNA, 25 bp, Saccharomyces pastorianus
gagtatccttttatgcagaagcgca

SEQ ID NO: 84516 - DNA, 25 bp, Saccharomyces pastorianus
tgccctttattatgggtttccctat

SEQ ID NO: 84517 - DNA, 25 bp, Saccharomyces pastorianus
acgatcatcgcgttcttttggagat

SEQ ID NO: 84518 - DNA, 25 bp, Saccharomyces pastorianus
aaatacgtacaaacccaagcagatg

SEQ ID NO: 84519 - DNA, 25 bp, Saccharomyces pastorianus
aacgtcctcacggtgatgacttaca

SEQ ID NO: 84520 - DNA, 25 bp, Saccharomyces pastorianus
gaagagctgaatacgtttctgtcaa

SEQ ID NO: 84521 - DNA, 25 bp, Saccharomyces pastorianus
ggactttgcagtttgaatacggtga

SEQ ID NO: 84522 - DNA, 25 bp, Saccharomyces pastorianus
ctggcgacagagacgctattgttca

SEQ ID NO: 84523 - DNA, 25 bp, Saccharomyces pastorianus
tagatggcattcatggaagtcgcaa

SEQ ID NO: 84524 - DNA, 25 bp, Saccharomyces pastorianus
gaaggatgccaattccattatcaaa

SEQ ID NO: 84525 - DNA, 25 bp, Saccharomyces pastorianus
gatgccgattatactgttggtgaat

SEQ ID NO: 84526 - DNA, 25 bp, Saccharomyces pastorianus
gaattttcctcatgaagatgccgat

SEQ ID NO: 84527 - DNA, 25 bp, Saccharomyces pastorianus
taatccatgaacacgaggcttattg

SEQ ID NO: 84528 - DNA, 25 bp, Saccharomyces pastorianus
gtattttctcatgtagctagttggg

SEQ ID NO: 84529 - DNA, 25 bp, Saccharomyces pastorianus
gccgccaccaagaaatgattgttgt

SEQ ID NO: 84530 - DNA, 25 bp, Saccharomyces pastorianus
accgatgtattatcaaccacaaccg

SEQ ID NO: 84531 - DNA, 25 bp, Saccharomyces pastorianus
accacaaccgcaacctatatacata

SEQ ID NO: 84532 - DNA, 25 bp, Saccharomyces pastorianus
ttgttgtaactgtggcgattgctgt

SEQ ID NO: 84533 - DNA, 25 bp, Saccharomyces pastorianus
attgcgaacgttttatgttgtctgt

SEQ ID NO: 84534 - DNA, 25 bp, Saccharomyces pastorianus
ttgctgttcagcaattgcgaacgtt

SEQ ID NO: 84535 - DNA, 25 bp, Saccharomyces pastorianus
aactgtggcgattgctgttcagcaa

SEQ ID NO: 84536 - DNA, 25 bp, Saccharomyces pastorianus
atatacatacaacaagggccgccgc

SEQ ID NO: 84537 - DNA, 25 bp, Saccharomyces pastorianus
agggccgccgccaccaagaaatgat

SEQ ID NO: 84538 - DNA, 25 bp, Saccharomyces pastorianus
tttatgttgtctgtgtctaattgat

SEQ ID NO: 84539 - DNA, 25 bp, Saccharomyces pastorianus
aatactatcaaccacaaccgatgta

SEQ ID NO: 84540 - DNA, 25 bp, Saccharomyces pastorianus
gtatgatgcagaatcgattgctcac

SEQ ID NO: 84541 - DNA, 25 bp, Saccharomyces pastorianus
gaaaactgtcatcgtcactgcatgc

SEQ ID NO: 84542 - DNA, 25 bp, Saccharomyces pastorianus
agagacccaaattgaactgcagttg

SEQ ID NO: 84543 - DNA, 25 bp, Saccharomyces pastorianus
gttccttttaatcatgtgacagcgc

SEQ ID NO: 84544 - DNA, 25 bp, Saccharomyces pastorianus
gtgacagcgctctcaatgaataatg

SEQ ID NO: 84545 - DNA, 25 bp, Saccharomyces pastorianus
aaatcgcatctttggaagcccattt

SEQ ID NO: 84546 - DNA, 25 bp, Saccharomyces pastorianus
tgccatataccccaaactttcgaat

SEQ ID NO: 84547 - DNA, 25 bp, Saccharomyces pastorianus
aaactttcgaattgccagcttcctt

SEQ ID NO: 84548 - DNA, 25 bp, Saccharomyces pastorianus
gtcatcgtcactgcatgcaaaggaa

SEQ ID NO: 84549 - DNA, 25 bp, Saccharomyces pastorianus
ccaagatgttagcatatggcagatc

SEQ ID NO: 84550 - DNA, 25 bp, Saccharomyces pastorianus
tcgaattgccagcttccttggaagt

SEQ ID NO: 84551 - DNA, 25 bp, Saccharomyces pastorianus
tactcaaaatgctagcgtgcgcgcc

SEQ ID NO: 84552 - DNA, 25 bp, Saccharomyces pastorianus
tgaggacgaaaaccgtagctctttt

SEQ ID NO: 84553 - DNA, 25 bp, Saccharomyces pastorianus
gctcttttacgccaaaccaatgcag

SEQ ID NO: 84554 - DNA, 25 bp, Saccharomyces pastorianus
gcgctatgaattggctattccagca

SEQ ID NO: 84555 - DNA, 25 bp, Saccharomyces pastorianus
aatgcagtatttctcaattaattga

SEQ ID NO: 84556 - DNA, 25 bp, Saccharomyces pastorianus
gtagctcttttacgccaaaccaatg

SEQ ID NO: 84557 - DNA, 25 bp, Saccharomyces pastorianus
ttttacgccaaaccaatgcagtatt

SEQ ID NO: 84558 - DNA, 25 bp, Saccharomyces pastorianus
gaaatgggctttactcaaaatgcta

SEQ ID NO: 84559 - DNA, 25 bp, Saccharomyces pastorianus
gagagcgctatgaattggctattcc

SEQ ID NO: 84560 - DNA, 25 bp, Saccharomyces pastorianus
aaatgctagcgtgcgcgccctattt

SEQ ID NO: 84561 - DNA, 25 bp, Saccharomyces pastorianus
gccaaaccaatgcagtatttctcaa

SEQ ID NO: 84562 - DNA, 25 bp, Saccharomyces pastorianus
gtgtacatacccaccactaaggaag

SEQ ID NO: 84563 - DNA, 25 bp, Saccharomyces pastorianus
cttttatttaatggcctcttttgat

SEQ ID NO: 84564 - DNA, 25 bp, Saccharomyces pastorianus
aagctcgatggtgtacatacccacc

SEQ ID NO: 84565 - DNA, 25 bp, Saccharomyces pastorianus
caacataaaagctcgatggtgtaca

SEQ ID NO: 84566 - DNA, 25 bp, Saccharomyces pastorianus
gaagaagtggtggaaaagctttatt

SEQ ID NO: 84567 - DNA, 25 bp, Saccharomyces pastorianus
cttcctccatgttttttttctcaca

SEQ ID NO: 84568 - DNA, 25 bp, Saccharomyces pastorianus
gaaggcatactaaatactattgaag

SEQ ID NO: 84569 - DNA, 25 bp, Saccharomyces pastorianus
catacccaccactaaggaagctaaa

SEQ ID NO: 84570 - DNA, 25 bp, Saccharomyces pastorianus
ttttctcacaattttcagtttgagt

SEQ ID NO: 84571 - DNA, 25 bp, Saccharomyces pastorianus
ctcttttgattcattcttcctccat

SEQ ID NO: 84572 - DNA, 25 bp, Saccharomyces pastorianus
gacgtaatgggaaatcagaaggcat

SEQ ID NO: 84573 - DNA, 25 bp, Saccharomyces pastorianus
gtaaatctgtcttcaccaacgttaa

SEQ ID NO: 84574 - DNA, 25 bp, Saccharomyces pastorianus
gtcaacccggtcaaatggcaagcat

SEQ ID NO: 84575 - DNA, 25 bp, Saccharomyces pastorianus
tcgtatagagttccacctcatgctt

SEQ ID NO: 84576 - DNA, 25 bp, Saccharomyces pastorianus
aaccgcggcagtcattggatctgaa

SEQ ID NO: 84577 - DNA, 25 bp, Saccharomyces pastorianus
taagcgccacagtactggtcacgaa

SEQ ID NO: 84578 - DNA, 25 bp, Saccharomyces pastorianus
actcgccagtaccaaattcacatta

SEQ ID NO: 84579 - DNA, 25 bp, Saccharomyces pastorianus
tgagaaaatccttcgctagggcccg

SEQ ID NO: 84580 - DNA, 25 bp, Saccharomyces pastorianus
aagcaaggacttcagcagcgtatca

SEQ ID NO: 84581 - DNA, 25 bp, Saccharomyces pastorianus
attactattagcacctcaactccat

SEQ ID NO: 84582 - DNA, 25 bp, Saccharomyces pastorianus
gggcccgtcaatcgcttgatttgga

SEQ ID NO: 84583 - DNA, 25 bp, Saccharomyces pastorianus
atgcttccaccgcaataactgagaa

SEQ ID NO: 84584 - DNA, 25 bp, Saccharomyces pastorianus
taaacttttcaaccatctctgtgcc

SEQ ID NO: 84585 - DNA, 25 bp, Saccharomyces pastorianus
agacaaatcgccatagtcgcctcta

SEQ ID NO: 84586 - DNA, 25 bp, Saccharomyces pastorianus
gaatctatccgctaacacaggtcct

SEQ ID NO: 84587 - DNA, 25 bp, Saccharomyces pastorianus
gacagtcgagtctacgttccaagat

SEQ ID NO: 84588 - DNA, 25 bp, Saccharomyces pastorianus
tagtcgcctctacagaccacattta

SEQ ID NO: 84589 - DNA, 25 bp, Saccharomyces pastorianus
ttgggtaccctacacgtatgcggaa

SEQ ID NO: 84590 - DNA, 25 bp, Saccharomyces pastorianus
caggtcctaagcgtggtactcaaag

SEQ ID NO: 84591 - DNA, 25 bp, Saccharomyces pastorianus
aggtgcgaaatacgtcttacaatca

SEQ ID NO: 84592 - DNA, 25 bp, Saccharomyces pastorianus
agacgatgctaagcttcctctccgt

SEQ ID NO: 84593 - DNA, 25 bp, Saccharomyces pastorianus
gtgccgctgattttattgcttctaa

SEQ ID NO: 84594 - DNA, 25 bp, Saccharomyces pastorianus
gaattttgaaccgtcgacagtcgag

SEQ ID NO: 84595 - DNA, 25 bp, Saccharomyces pastorianus
agatgccacttatcatgacctacct

SEQ ID NO: 84596 - DNA, 25 bp, Saccharomyces pastorianus
gttactgggctacacgatcttgacg

SEQ ID NO: 84597 - DNA, 25 bp, Saccharomyces pastorianus
tcaaagtttcgactcagatgccact

SEQ ID NO: 84598 - DNA, 25 bp, Saccharomyces pastorianus
tgcaggcacttcatcgtccttagat

SEQ ID NO: 84599 - DNA, 25 bp, Saccharomyces pastorianus
atgagtgcgctgcaacttactgcat

SEQ ID NO: 84600 - DNA, 25 bp, Saccharomyces pastorianus
atgacctaccttcttcagttgcagg

SEQ ID NO: 84601 - DNA, 25 bp, Saccharomyces pastorianus
ttagatcctgttcaaagcccgacga

SEQ ID NO: 84602 - DNA, 25 bp, Saccharomyces pastorianus
atggtgcacctgatgttactgggct

SEQ ID NO: 84603 - DNA, 25 bp, Saccharomyces pastorianus
gaaccctccctacaagaaagctttg

SEQ ID NO: 84604 - DNA, 25 bp, Saccharomyces pastorianus
gatatgctatattcccaattgggct

SEQ ID NO: 84605 - DNA, 25 bp, Saccharomyces pastorianus
gaggtacatctctagaagcgtttat

SEQ ID NO: 84606 - DNA, 25 bp, Saccharomyces pastorianus
gatatcttcttggtcattgtttttt

SEQ ID NO: 84607 - DNA, 25 bp, Saccharomyces pastorianus
atggtttcaccagtcttgaacctac

SEQ ID NO: 84608 - DNA, 25 bp, Saccharomyces pastorianus
ggtgagctcgtaggcattactggaa

SEQ ID NO: 84609 - DNA, 25 bp, Saccharomyces pastorianus
ttcgggagccaatagtgacaacatc

SEQ ID NO: 84610 - DNA, 25 bp, Saccharomyces pastorianus
atacccgataatcacacccagaatt

SEQ ID NO: 84611 - DNA, 25 bp, Saccharomyces pastorianus
ttcgcttcaatctgtaatctctctg

SEQ ID NO: 84612 - DNA, 25 bp, Saccharomyces pastorianus
atatttgtttcgttcttcgtagtat

SEQ ID NO: 84613 - DNA, 25 bp, Saccharomyces pastorianus
gtaatctctctgcaaaatttcggga

SEQ ID NO: 84614 - DNA, 25 bp, Saccharomyces pastorianus
aatcatctgttttaggtgagctcgt

SEQ ID NO: 84615 - DNA, 25 bp, Saccharomyces pastorianus
acatttccgttcttatcattgtaaa

SEQ ID NO: 84616 - DNA, 25 bp, Saccharomyces pastorianus
attgtggatgcccagatatcttctt

SEQ ID NO: 84617 - DNA, 25 bp, Saccharomyces pastorianus
aagtgagacacttgtcacaccaaag

SEQ ID NO: 84618 - DNA, 25 bp, Saccharomyces pastorianus
taatattgatgcctcaatccctgaa

SEQ ID NO: 84619 - DNA, 25 bp, Saccharomyces pastorianus
gtgtggtggcctaagatttcaatct

SEQ ID NO: 84620 - DNA, 25 bp, Saccharomyces pastorianus
gtccgtggacatttctcatattttg

SEQ ID NO: 84621 - DNA, 25 bp, Saccharomyces pastorianus
ggaaaagtacgcgtccgtggacatt

SEQ ID NO: 84622 - DNA, 25 bp, Saccharomyces pastorianus
aatctttatcattccgtggtcgtct

SEQ ID NO: 84623 - DNA, 25 bp, Saccharomyces pastorianus
gagaggagttttacttattgaccgt

SEQ ID NO: 84624 - DNA, 25 bp, Saccharomyces pastorianus
gtcattcggaaccaacactgcagaa

SEQ ID NO: 84625 - DNA, 25 bp, Saccharomyces pastorianus
gagctagggctttcttttcctacaa

SEQ ID NO: 84626 - DNA, 25 bp, Saccharomyces pastorianus
ccctccaccaaatcattttttctgt

SEQ ID NO: 84627 - DNA, 25 bp, Saccharomyces pastorianus
tggcttttcagctgcgtcattcgga

SEQ ID NO: 84628 - DNA, 25 bp, Saccharomyces pastorianus
aactctcatctttctgactacttgg

SEQ ID NO: 84629 - DNA, 25 bp, Saccharomyces pastorianus
gaggctgcatcttcttccgaagcta

SEQ ID NO: 84630 - DNA, 25 bp, Saccharomyces pastorianus
gtcagcacttctacagtcgaaactg

SEQ ID NO: 84631 - DNA, 25 bp, Saccharomyces pastorianus
gaaactgcttccaatgccggtcaaa

SEQ ID NO: 84632 - DNA, 25 bp, Saccharomyces pastorianus
tttcgttttaagtgccattgcctct

SEQ ID NO: 84633 - DNA, 25 bp, Saccharomyces pastorianus
gaattggactttgatgccatcacta

SEQ ID NO: 84634 - DNA, 25 bp, Saccharomyces pastorianus
tgagttctgaaatcgctgctgctct

SEQ ID NO: 84635 - DNA, 25 bp, Saccharomyces pastorianus
ggattccaaattccatctgatgtct

SEQ ID NO: 84636 - DNA, 25 bp, Saccharomyces pastorianus
tatcggtgacatcaactctcatctt

SEQ ID NO: 84637 - DNA, 25 bp, Saccharomyces pastorianus
gcgccgccgaaactgctgaattgca

SEQ ID NO: 84638 - DNA, 25 bp, Saccharomyces pastorianus
atcatctgccgaatcatcttctaag

SEQ ID NO: 84639 - DNA, 25 bp, Saccharomyces pastorianus
tgctgtataatatccctttggttga

SEQ ID NO: 84640 - DNA, 25 bp, Saccharomyces pastorianus
atgaggcttccaggcaaagattcgc

SEQ ID NO: 84641 - DNA, 25 bp, Saccharomyces pastorianus
gatttgctatgtgtggttctcctca

SEQ ID NO: 84642 - DNA, 25 bp, Saccharomyces pastorianus
gattaatactcctagtctgaccgga

SEQ ID NO: 84643 - DNA, 25 bp, Saccharomyces pastorianus
tgggttcctcccatatagtttatgt

SEQ ID NO: 84644 - DNA, 25 bp, Saccharomyces pastorianus
gttctcctcacctgtttttattgaa

SEQ ID NO: 84645 - DNA, 25 bp, Saccharomyces pastorianus
aaagcgactctcctacaaagtgtga

SEQ ID NO: 84646 - DNA, 25 bp, Saccharomyces pastorianus
gatgaattcattgtccagtggcaag

SEQ ID NO: 84647 - DNA, 25 bp, Saccharomyces pastorianus
tactggtgaaatgatccgtcttcta

SEQ ID NO: 84648 - DNA, 25 bp, Saccharomyces pastorianus
gaatgggcctggaacatgctgtata

SEQ ID NO: 84649 - DNA, 25 bp, Saccharomyces pastorianus
aattatggaacttcttttgcccctg

SEQ ID NO: 84650 - DNA, 25 bp, Saccharomyces pastorianus
gttactggacgaaacactgcttaaa

SEQ ID NO: 84651 - DNA, 25 bp, Saccharomyces pastorianus
atcgacgattctaaagctctctttg

SEQ ID NO: 84652 - DNA, 25 bp, Saccharomyces pastorianus
ttaaagactaccactcggccatgag

SEQ ID NO: 84653 - DNA, 25 bp, Saccharomyces pastorianus
gaagcacatctagtcagtcaaagtt

SEQ ID NO: 84654 - DNA, 25 bp, Saccharomyces pastorianus
tcaattcctgtctcctacgaataag

SEQ ID NO: 84655 - DNA, 25 bp, Saccharomyces pastorianus
ggagcgaatcagacgccagtctttc

SEQ ID NO: 84656 - DNA, 25 bp, Saccharomyces pastorianus
caagagctcgatctcttccatattt

SEQ ID NO: 84657 - DNA, 25 bp, Saccharomyces pastorianus
aaagttcgctaatctcgctgactag

SEQ ID NO: 84658 - DNA, 25 bp, Saccharomyces pastorianus
actagcgaatttggccatggacact

SEQ ID NO: 84659 - DNA, 25 bp, Saccharomyces pastorianus
gaaaagctgcggatggctccatcac

SEQ ID NO: 84660 - DNA, 25 bp, Saccharomyces pastorianus
tgttttctgttcaaacgactcctcc

SEQ ID NO: 84661 - DNA, 25 bp, Saccharomyces pastorianus
gaaagtcgtggttcctggtgtcaaa

SEQ ID NO: 84662 - DNA, 25 bp, Saccharomyces pastorianus
aagtgtcgcagttccagttgatatt

SEQ ID NO: 84663 - DNA, 25 bp, Saccharomyces pastorianus
aagagagtcatcactttgccagact

SEQ ID NO: 84664 - DNA, 25 bp, Saccharomyces pastorianus
tttgccagactacccaggtgtggat

SEQ ID NO: 84665 - DNA, 25 bp, Saccharomyces pastorianus
agaggctacgcaccaagacgtcagt

SEQ ID NO: 84666 - DNA, 25 bp, Saccharomyces pastorianus
ggcgctctttattatcccagagatg

SEQ ID NO: 84667 - DNA, 25 bp, Saccharomyces pastorianus
tttcggtttccctagaagtgtcgca

SEQ ID NO: 84668 - DNA, 25 bp, Saccharomyces pastorianus
acacccgcaaaggattctactggca

SEQ ID NO: 84669 - DNA, 25 bp, Saccharomyces pastorianus
ggttcaacaatgacttgtccctgtt

SEQ ID NO: 84670 - DNA, 25 bp, Saccharomyces pastorianus
gtcagttggcaaacacacccgcaaa

SEQ ID NO: 84671 - DNA, 25 bp, Saccharomyces pastorianus
ccaaataactatgctggcgctcttt

SEQ ID NO: 84672 - DNA, 25 bp, Saccharomyces pastorianus
tgttattgaacggaagcatcttctt

SEQ ID NO: 84673 - DNA, 25 bp, Saccharomyces pastorianus
gctacggtgccagatctgcttatgt

SEQ ID NO: 84674 - DNA, 25 bp, Saccharomyces pastorianus
gtacataagggcctcatcttcctct

SEQ ID NO: 84675 - DNA, 25 bp, Saccharomyces pastorianus
ttttattatgctcagagggccctac

SEQ ID NO: 84676 - DNA, 25 bp, Saccharomyces pastorianus
gcgtttcttcgctaggatggtgaat

SEQ ID NO: 84677 - DNA, 25 bp, Saccharomyces pastorianus
gatctgcttatgttcattattttgg

SEQ ID NO: 84678 - DNA, 25 bp, Saccharomyces pastorianus
ttttttccccaatgagctgctacgg

SEQ ID NO: 84679 - DNA, 25 bp, Saccharomyces pastorianus
aatgagctgctacggtgccagatct

SEQ ID NO: 84680 - DNA, 25 bp, Saccharomyces pastorianus
gagggccctacatgacagctttttt

SEQ ID NO: 84681 - DNA, 25 bp, Saccharomyces pastorianus
ccatctacctatcgctgttattgaa

SEQ ID NO: 84682 - DNA, 25 bp, Saccharomyces pastorianus
atgcacgtacataagggcctcatct

SEQ ID NO: 84683 - DNA, 25 bp, Saccharomyces pastorianus
tagcttcccttacggactactggta

SEQ ID NO: 84684 - DNA, 25 bp, Saccharomyces pastorianus
gaagatttacatacctgtgtcgcac

SEQ ID NO: 84685 - DNA, 25 bp, Saccharomyces pastorianus
tcgtctatgattataaccgccacta

SEQ ID NO: 84686 - DNA, 25 bp, Saccharomyces pastorianus
tgcattcggtagacttcaagacatc

SEQ ID NO: 84687 - DNA, 25 bp, Saccharomyces pastorianus
ggtgatgctccattctaaaaacgtt

SEQ ID NO: 84688 - DNA, 25 bp, Saccharomyces pastorianus
gttaccctgtggaaatcgactcctt

SEQ ID NO: 84689 - DNA, 25 bp, Saccharomyces pastorianus
agcactccaatagctgttaccctgt

SEQ ID NO: 84690 - DNA, 25 bp, Saccharomyces pastorianus
gggtatactgtcctatgcgacgtca

SEQ ID NO: 84691 - DNA, 25 bp, Saccharomyces pastorianus
gcgaccttttgctattgttcattgc

SEQ ID NO: 84692 - DNA, 25 bp, Saccharomyces pastorianus
ctgtgtcgcacagatacccaatagc

SEQ ID NO: 84693 - DNA, 25 bp, Saccharomyces pastorianus
gacatcgtctttgcaatcgtctatg

SEQ ID NO: 84694 - DNA, 25 bp, Saccharomyces pastorianus
agggaacctccaagtacaccaagca

SEQ ID NO: 84695 - DNA, 25 bp, Saccharomyces pastorianus
tcaaggagcatgtttcgggcactaa

SEQ ID NO: 84696 - DNA, 25 bp, Saccharomyces pastorianus
aaaattgtcgacgtcgccaaggccg

SEQ ID NO: 84697 - DNA, 25 bp, Saccharomyces pastorianus
aagaactcgctgaggctacccgtaa

SEQ ID NO: 84698 - DNA, 25 bp, Saccharomyces pastorianus
gcgtcgttacgaggaagccattgca

SEQ ID NO: 84699 - DNA, 25 bp, Saccharomyces pastorianus
aagcactctaccaaaggcgaccgtt

SEQ ID NO: 84700 - DNA, 25 bp, Saccharomyces pastorianus
ggtagaacagctggtgggtcctccc

SEQ ID NO: 84701 - DNA, 25 bp, Saccharomyces pastorianus
agaaatcaactccatactctttccg

SEQ ID NO: 84702 - DNA, 25 bp, Saccharomyces pastorianus
caactccatcttctggtccaaagaa

SEQ ID NO: 84703 - DNA, 25 bp, Saccharomyces pastorianus
ggcgaccgtttctccagataaagct

SEQ ID NO: 84704 - DNA, 25 bp, Saccharomyces pastorianus
aaagcgaattagctgccatccgcaa

SEQ ID NO: 84705 - DNA, 25 bp, Saccharomyces pastorianus
gtccggtaaaacagctttagccgct

SEQ ID NO: 84706 - DNA, 25 bp, Saccharomyces pastorianus
caaactttcttgacgatgctggtag

SEQ ID NO: 84707 - DNA, 25 bp, Saccharomyces pastorianus
atctggattcccattcatcaggtta

SEQ ID NO: 84708 - DNA, 25 bp, Saccharomyces pastorianus
atcaggttaatttctcccaacgagt

SEQ ID NO: 84709 - DNA, 25 bp, Saccharomyces pastorianus
cccaacgagttgtcaggcatgtcag

SEQ ID NO: 84710 - DNA, 25 bp, Saccharomyces pastorianus
gatcatgactactacatcagcttat

SEQ ID NO: 84711 - DNA, 25 bp, Saccharomyces pastorianus
aggagctgtcctaacttcaatgtcg

SEQ ID NO: 84712 - DNA, 25 bp, Saccharomyces pastorianus
caagaccgtcgtttattgatcatga

SEQ ID NO: 84713 - DNA, 25 bp, Saccharomyces pastorianus
ggatatcttgagttgcttcgacaat

SEQ ID NO: 84714 - DNA, 25 bp, Saccharomyces pastorianus
catcagcttattcggtacttcaaca

SEQ ID NO: 84715 - DNA, 25 bp, Saccharomyces pastorianus
gttagtatctctattaatccacggc

SEQ ID NO: 84716 - DNA, 25 bp, Saccharomyces pastorianus
ttatattcaaggtctgccccagtac

SEQ ID NO: 84717 - DNA, 25 bp, Saccharomyces pastorianus
aagtgcgttccgtcaaagaggcctc

SEQ ID NO: 84718 - DNA, 25 bp, Saccharomyces pastorianus
gaagtagtcccaagatcagccacag

SEQ ID NO: 84719 - DNA, 25 bp, Saccharomyces pastorianus
ggaaggcccatgtatccaagacctg

SEQ ID NO: 84720 - DNA, 25 bp, Saccharomyces pastorianus
ttcgcagctgttattatcatcaccc

SEQ ID NO: 84721 - DNA, 25 bp, Saccharomyces pastorianus
gccccagtaccaaacatcttatttt

SEQ ID NO: 84722 - DNA, 25 bp, Saccharomyces pastorianus
gcagaccagtgccatactacaagaa

SEQ ID NO: 84723 - DNA, 25 bp, Saccharomyces pastorianus
gaataatggaatgccctactcactc

SEQ ID NO: 84724 - DNA, 25 bp, Saccharomyces pastorianus
gatcgccccaataaggctagctttt

SEQ ID NO: 84725 - DNA, 25 bp, Saccharomyces pastorianus
gcattacgaacattctccacatcaa

SEQ ID NO: 84726 - DNA, 25 bp, Saccharomyces pastorianus
aagacctgctgaagatgcttacaat

SEQ ID NO: 84727 - DNA, 25 bp, Saccharomyces pastorianus
gtttggaataccagtcgttgtagca

SEQ ID NO: 84728 - DNA, 25 bp, Saccharomyces pastorianus
aggttatttatacgcattggctgca

SEQ ID NO: 84729 - DNA, 25 bp, Saccharomyces pastorianus
gaaattcaaaccataccgggtctat

SEQ ID NO: 84730 - DNA, 25 bp, Saccharomyces pastorianus
gcacatgctgtggtagatgcaacga

SEQ ID NO: 84731 - DNA, 25 bp, Saccharomyces pastorianus
gggtctatcgacatatgctggttac

SEQ ID NO: 84732 - DNA, 25 bp, Saccharomyces pastorianus
tgaatgctggcgcatctcatgccgt

SEQ ID NO: 84733 - DNA, 25 bp, Saccharomyces pastorianus
gtacgacgtcaatagctccatcgag

SEQ ID NO: 84734 - DNA, 25 bp, Saccharomyces pastorianus
aagcttaccagcatcgtccaaaaaa

SEQ ID NO: 84735 - DNA, 25 bp, Saccharomyces pastorianus
acatcgattttgttgccaagggtgt

SEQ ID NO: 84736 - DNA, 25 bp, Saccharomyces pastorianus
tagaggttttacgttccccatcagg

SEQ ID NO: 84737 - DNA, 25 bp, Saccharomyces pastorianus
gctccatcgaggacaagcttaccag

SEQ ID NO: 84738 - DNA, 25 bp, Saccharomyces pastorianus
aggtgcctcaacatgttcttatcca

SEQ ID NO: 84739 - DNA, 25 bp, Saccharomyces pastorianus
tgccagaaccagacttgctgctgat

SEQ ID NO: 84740 - DNA, 25 bp, Saccharomyces pastorianus
tagggtcattgttcaaaggctgcgg

SEQ ID NO: 84741 - DNA, 25 bp, Saccharomyces pastorianus
aagccactggtgctaactggttcat

SEQ ID NO: 84742 - DNA, 25 bp, Saccharomyces pastorianus
cggtatgtttgattctctcaagcca

SEQ ID NO: 84743 - DNA, 25 bp, Saccharomyces pastorianus
gcagctggtgctctttcgttactat

SEQ ID NO: 84744 - DNA, 25 bp, Saccharomyces pastorianus
aaagggtggcgctcgccaattcaat

SEQ ID NO: 84745 - DNA, 25 bp, Saccharomyces pastorianus
aggtaatctggcttctggtggtgca

SEQ ID NO: 84746 - DNA, 25 bp, Saccharomyces pastorianus
atgggtggtcactacaggtgcctca

SEQ ID NO: 84747 - DNA, 25 bp, Saccharomyces pastorianus
gttatttccatgtatgaccagttgc

SEQ ID NO: 84748 - DNA, 25 bp, Saccharomyces pastorianus
caacggtgctatagattgtctcaaa

SEQ ID NO: 84749 - DNA, 25 bp, Saccharomyces pastorianus
attcaaacagttttaagcgaggata

SEQ ID NO: 84750 - DNA, 25 bp, Saccharomyces pastorianus
ggttctttcttgcaaagcgcacctg

SEQ ID NO: 84751 - DNA, 25 bp, Saccharomyces pastorianus
aagcgaggataaatcacatggttat

SEQ ID NO: 84752 - DNA, 25 bp, Saccharomyces pastorianus
atcgctaatatcattggtgaggcca

SEQ ID NO: 84753 - DNA, 25 bp, Saccharomyces pastorianus
gcacaaattttactcattctaccgg

SEQ ID NO: 84754 - DNA, 25 bp, Saccharomyces pastorianus
ttctaccggttctttcttgcaaagc

SEQ ID NO: 84755 - DNA, 25 bp, Saccharomyces pastorianus
tgacgacagtcagtgggtaccagga

SEQ ID NO: 84756 - DNA, 25 bp, Saccharomyces pastorianus
aagcgcacctgttgaactgacgaca

SEQ ID NO: 84757 - DNA, 25 bp, Saccharomyces pastorianus
cagtgggtaccaggagtttttgaag

SEQ ID NO: 84758 - DNA, 25 bp, Saccharomyces pastorianus
acatggttatgtgctaaaggacggc

SEQ ID NO: 84759 - DNA, 25 bp, Saccharomyces pastorianus
aaggacggcgaagtcatcgctaata

SEQ ID NO: 84760 - DNA, 25 bp, Saccharomyces pastorianus
aattgctgttactggtggcgaaaat

SEQ ID NO: 84761 - DNA, 25 bp, Saccharomyces pastorianus
caccgccatcgtgatgctggagtga

SEQ ID NO: 84762 - DNA, 25 bp, Saccharomyces pastorianus
caatcgaaggtttcagtggctactg

SEQ ID NO: 84763 - DNA, 25 bp, Saccharomyces pastorianus
taaggattctgcgagaccatctaat

SEQ ID NO: 84764 - DNA, 25 bp, Saccharomyces pastorianus
gacgccgttgatgcactaagtagaa

SEQ ID NO: 84765 - DNA, 25 bp, Saccharomyces pastorianus
gcctgttgtcaacgcagctgttaac

SEQ ID NO: 84766 - DNA, 25 bp, Saccharomyces pastorianus
ctgccactaagactccactaattaa

SEQ ID NO: 84767 - DNA, 25 bp, Saccharomyces pastorianus
tcttcctcttcatcggcggcaaagg

SEQ ID NO: 84768 - DNA, 25 bp, Saccharomyces pastorianus
aagcttttgccagatggtgacgccg

SEQ ID NO: 84769 - DNA, 25 bp, Saccharomyces pastorianus
atctagtgcagaatcttccaacgcc

SEQ ID NO: 84770 - DNA, 25 bp, Saccharomyces pastorianus
gccaaagacgatgctgccactaaga

SEQ ID NO: 84771 - DNA, 25 bp, Saccharomyces pastorianus
ttgtcctgcaccaagcgatagcgaa

SEQ ID NO: 84772 - DNA, 25 bp, Saccharomyces pastorianus
gaatggaaacttgcgagtctcccta

SEQ ID NO: 84773 - DNA, 25 bp, Saccharomyces pastorianus
gcgagtctccctattaatgcttgaa

SEQ ID NO: 84774 - DNA, 25 bp, Saccharomyces pastorianus
agtgcagagctgtcctatacgattt

SEQ ID NO: 84775 - DNA, 25 bp, Saccharomyces pastorianus
tgtctgttgattcgttgtcctgcac

SEQ ID NO: 84776 - DNA, 25 bp, Saccharomyces pastorianus
gagatctgtcaactctttaatcgag

SEQ ID NO: 84777 - DNA, 25 bp, Saccharomyces pastorianus
gttggatgtggaaaccctgaatacc

SEQ ID NO: 84778 - DNA, 25 bp, Saccharomyces pastorianus
ctcctatcaaatcccgttgtctgtt

SEQ ID NO: 84779 - DNA, 25 bp, Saccharomyces pastorianus
tactagctcattgtatacctgccaa

SEQ ID NO: 84780 - DNA, 25 bp, Saccharomyces pastorianus
agctgctttaagacgtaccatggaa

SEQ ID NO: 84781 - DNA, 25 bp, Saccharomyces pastorianus
aatggtctgcgattcgatgtcgcct

SEQ ID NO: 84782 - DNA, 25 bp, Saccharomyces pastorianus
gagttggtatcaggctctccagcga

SEQ ID NO: 84783 - DNA, 25 bp, Saccharomyces pastorianus
tggatcaacctgtcgacttgacgtt

SEQ ID NO: 84784 - DNA, 25 bp, Saccharomyces pastorianus
aagaattacagtacgactccaccct

SEQ ID NO: 84785 - DNA, 25 bp, Saccharomyces pastorianus
gatatcggatcaggttcagtcataa

SEQ ID NO: 84786 - DNA, 25 bp, Saccharomyces pastorianus
cattgccatcttccgaattctctaa

SEQ ID NO: 84787 - DNA, 25 bp, Saccharomyces pastorianus
agatgtgaccatcctgttacgttag

SEQ ID NO: 84788 - DNA, 25 bp, Saccharomyces pastorianus
ttggacatcattaagggctcctccc

SEQ ID NO: 84789 - DNA, 25 bp, Saccharomyces pastorianus
gtatggatctaacctcactaagtaa

SEQ ID NO: 84790 - DNA, 25 bp, Saccharomyces pastorianus
gttcgtgacttgtcccaattgagtg

SEQ ID NO: 84791 - DNA, 25 bp, Saccharomyces pastorianus
gaccgtatagccgaatactctctga

SEQ ID NO: 84792 - DNA, 25 bp, Saccharomyces pastorianus
ggctcctccctttctgatagagttg

SEQ ID NO: 84793 - DNA, 25 bp, Saccharomyces pastorianus
ttgaccaactggacacaatctttga

SEQ ID NO: 84794 - DNA, 25 bp, Saccharomyces pastorianus
gaaggcttcgacacctatttccaag

SEQ ID NO: 84795 - DNA, 25 bp, Saccharomyces pastorianus
gatggtcacatctatattcttggaa

SEQ ID NO: 84796 - DNA, 25 bp, Saccharomyces pastorianus
gatatcaccgtcagctacaaacttt

SEQ ID NO: 84797 - DNA, 25 bp, Saccharomyces pastorianus
agaactcttgagtcatcgacagctt

SEQ ID NO: 84798 - DNA, 25 bp, Saccharomyces pastorianus
gcttgtgcaatgataccatcttctt

SEQ ID NO: 84799 - DNA, 25 bp, Saccharomyces pastorianus
acggtctttcttggtatcctcaaat

SEQ ID NO: 84800 - DNA, 25 bp, Saccharomyces pastorianus
ggagtcgtactgtaattcttcaatc

SEQ ID NO: 84801 - DNA, 25 bp, Saccharomyces pastorianus
ttatgactgaacctgatccgatatc

SEQ ID NO: 84802 - DNA, 25 bp, Saccharomyces pastorianus
ggatgttccatatccacgaatggtt

SEQ ID NO: 84803 - DNA, 25 bp, Saccharomyces pastorianus
gagtattcggctatacggtctttct

SEQ ID NO: 84804 - DNA, 25 bp, Saccharomyces pastorianus
cagcttatatgttctttgctaatga

SEQ ID NO: 84805 - DNA, 25 bp, Saccharomyces pastorianus
gaagaaaagcaaccctatgaatcta

SEQ ID NO: 84806 - DNA, 25 bp, Saccharomyces pastorianus
gtccgttccgagaatcctgacgtaa

SEQ ID NO: 84807 - DNA, 25 bp, Saccharomyces pastorianus
gtaacttttggccaagtaggcagaa

SEQ ID NO: 84808 - DNA, 25 bp, Saccharomyces pastorianus
gagaaagaaggatcctaacgcccct

SEQ ID NO: 84809 - DNA, 25 bp, Saccharomyces pastorianus
gaaggatcctaacgcccctaagagg

SEQ ID NO: 84810 - DNA, 25 bp, Saccharomyces pastorianus
cagagacattgtccgttccgagaat

SEQ ID NO: 84811 - DNA, 25 bp, Saccharomyces pastorianus
aggtggaaggccttaactgctgaag

SEQ ID NO: 84812 - DNA, 25 bp, Saccharomyces pastorianus
gggcttgtcagcttatatgttcttt

SEQ ID NO: 84813 - DNA, 25 bp, Saccharomyces pastorianus
gaatcctgacgtaacttttggccaa

SEQ ID NO: 84814 - DNA, 25 bp, Saccharomyces pastorianus
ctatgaatctaaggctcaagcagac

SEQ ID NO: 84815 - DNA, 25 bp, Saccharomyces pastorianus
agaagctagacgttgcaggagtgca

SEQ ID NO: 84816 - DNA, 25 bp, Saccharomyces pastorianus
gcaattcgatgcgatgtgctcgact

SEQ ID NO: 84817 - DNA, 25 bp, Saccharomyces pastorianus
gtgctcgactttcaacaatatcctc

SEQ ID NO: 84818 - DNA, 25 bp, Saccharomyces pastorianus
gatgcattacagcaatcgcctcatt

SEQ ID NO: 84819 - DNA, 25 bp, Saccharomyces pastorianus
acaatatcctcagtacgtgtcttga

SEQ ID NO: 84820 - DNA, 25 bp, Saccharomyces pastorianus
gctacgacattattcgcgatttgtg

SEQ ID NO: 84821 - DNA, 25 bp, Saccharomyces pastorianus
caaacacgaggtttcgggccagaga

SEQ ID NO: 84822 - DNA, 25 bp, Saccharomyces pastorianus
ggcaaccaggaggtctcgcaagaga

SEQ ID NO: 84823 - DNA, 25 bp, Saccharomyces pastorianus
gggccagagaatcagctacgacatt

SEQ ID NO: 84824 - DNA, 25 bp, Saccharomyces pastorianus
gctttggtgagcctgatctaacgaa

SEQ ID NO: 84825 - DNA, 25 bp, Saccharomyces pastorianus
atgtattccgcatgagggctttggt

SEQ ID NO: 84826 - DNA, 25 bp, Saccharomyces pastorianus
attaccatgaaggtccaggttacga

SEQ ID NO: 84827 - DNA, 25 bp, Saccharomyces pastorianus
gatattatcaagtctgtcggttcca

SEQ ID NO: 84828 - DNA, 25 bp, Saccharomyces pastorianus
actttattctcgtggtgtgcatttg

SEQ ID NO: 84829 - DNA, 25 bp, Saccharomyces pastorianus
gtgaacgccaaaggttacagtgatg

SEQ ID NO: 84830 - DNA, 25 bp, Saccharomyces pastorianus
aacttgttcaatgcctcagtcaaat

SEQ ID NO: 84831 - DNA, 25 bp, Saccharomyces pastorianus
aagacttgcacacctattaccatga

SEQ ID NO: 84832 - DNA, 25 bp, Saccharomyces pastorianus
ggtgtgcatttgaagtgaacgccaa

SEQ ID NO: 84833 - DNA, 25 bp, Saccharomyces pastorianus
caagtctgtcggttccaacttgttc

SEQ ID NO: 84834 - DNA, 25 bp, Saccharomyces pastorianus
ggatgaattagtccattactcctac

SEQ ID NO: 84835 - DNA, 25 bp, Saccharomyces pastorianus
agtgagattcaagaccaaaaggttt

SEQ ID NO: 84836 - DNA, 25 bp, Saccharomyces pastorianus
attactcctactaccaagacttgca

SEQ ID NO: 84837 - DNA, 25 bp, Saccharomyces pastorianus
gatgatattactatcccggtggctc

SEQ ID NO: 84838 - DNA, 25 bp, Saccharomyces pastorianus
ggcaagcgacgaggatgacattaac

SEQ ID NO: 84839 - DNA, 25 bp, Saccharomyces pastorianus
taatgcgctgttatcgttgctgcca

SEQ ID NO: 84840 - DNA, 25 bp, Saccharomyces pastorianus
gacagctgtcgcagattgcactaca

SEQ ID NO: 84841 - DNA, 25 bp, Saccharomyces pastorianus
gaatctaacttgaacctaccatctt

SEQ ID NO: 84842 - DNA, 25 bp, Saccharomyces pastorianus
cccggtggctctacgtgttgtgaag

SEQ ID NO: 84843 - DNA, 25 bp, Saccharomyces pastorianus
ttccggttctgcttctatatcaaca

SEQ ID NO: 84844 - DNA, 25 bp, Saccharomyces pastorianus
gtttgtctactgaagctggtcatat

SEQ ID NO: 84845 - DNA, 25 bp, Saccharomyces pastorianus
ggaaattgagtctgcccgacagctg

SEQ ID NO: 84846 - DNA, 25 bp, Saccharomyces pastorianus
atatcaacattaacagcggccgaac

SEQ ID NO: 84847 - DNA, 25 bp, Saccharomyces pastorianus
aatcacaatttgacccttccagagg

SEQ ID NO: 84848 - DNA, 25 bp, Saccharomyces pastorianus
gtggcttccacgagacagtaccatt

SEQ ID NO: 84849 - DNA, 25 bp, Saccharomyces pastorianus
ggatgctcttgaatactgtggttta

SEQ ID NO: 84850 - DNA, 25 bp, Saccharomyces pastorianus
atagcacctattttgcggaattgga

SEQ ID NO: 84851 - DNA, 25 bp, Saccharomyces pastorianus
gttcttgcctatgtttacagggttt

SEQ ID NO: 84852 - DNA, 25 bp, Saccharomyces pastorianus
gaatatggctgtttctcgtacacca

SEQ ID NO: 84853 - DNA, 25 bp, Saccharomyces pastorianus
tcgtacaccagcctagatacctatg

SEQ ID NO: 84854 - DNA, 25 bp, Saccharomyces pastorianus
aaagtactcggtttcatcaaggatt

SEQ ID NO: 84855 - DNA, 25 bp, Saccharomyces pastorianus
attccagttgcgaacgttttcacta

SEQ ID NO: 84856 - DNA, 25 bp, Saccharomyces pastorianus
ttttaaccgagcgttgtggcttcca

SEQ ID NO: 84857 - DNA, 25 bp, Saccharomyces pastorianus
gttattcaaaacttgttcttgccta

SEQ ID NO: 84858 - DNA, 25 bp, Saccharomyces pastorianus
aaagggcaccgtcttatgctcatta

SEQ ID NO: 84859 - DNA, 25 bp, Saccharomyces pastorianus
atgcgctgttttccaattaatgaca

SEQ ID NO: 84860 - DNA, 25 bp, Saccharomyces pastorianus
ttctaccctagctttgtacttttca

SEQ ID NO: 84861 - DNA, 25 bp, Saccharomyces pastorianus
tatccctaattttccaacttggctt

SEQ ID NO: 84862 - DNA, 25 bp, Saccharomyces pastorianus
acttctcggtcttaaagcttcttct

SEQ ID NO: 84863 - DNA, 25 bp, Saccharomyces pastorianus
ggcttgattttttacttctcggtct

SEQ ID NO: 84864 - DNA, 25 bp, Saccharomyces pastorianus
taatgacactaggttcggcagagaa

SEQ ID NO: 84865 - DNA, 25 bp, Saccharomyces pastorianus
tgacaatcgttgttctaccctagct

SEQ ID NO: 84866 - DNA, 25 bp, Saccharomyces pastorianus
gaagcgcaatcgttgctctaaatca

SEQ ID NO: 84867 - DNA, 25 bp, Saccharomyces pastorianus
taaagcttcttctgttcctgacaat

SEQ ID NO: 84868 - DNA, 25 bp, Saccharomyces pastorianus
gtattttgacatgccattctctatc

SEQ ID NO: 84869 - DNA, 25 bp, Saccharomyces pastorianus
gccattctctatcaatgaagcgcaa

SEQ ID NO: 84870 - DNA, 25 bp, Saccharomyces pastorianus
aaatgggctcgactgcatagcacct

SEQ ID NO: 84871 - DNA, 25 bp, Saccharomyces pastorianus
agagccattgccttattgaccgcat

SEQ ID NO: 84872 - DNA, 25 bp, Saccharomyces pastorianus
gagccattgttggatgttcttgttc

SEQ ID NO: 84873 - DNA, 25 bp, Saccharomyces pastorianus
gtacgattgagtgcttgtctgacga

SEQ ID NO: 84874 - DNA, 25 bp, Saccharomyces pastorianus
tctcacctgatatcttccggaataa

SEQ ID NO: 84875 - DNA, 25 bp, Saccharomyces pastorianus
accgcatatttgtcatctgttaaga

SEQ ID NO: 84876 - DNA, 25 bp, Saccharomyces pastorianus
tgacaagacaaagccactcgacgtg

SEQ ID NO: 84877 - DNA, 25 bp, Saccharomyces pastorianus
gatagagttctgtcttttctctctc

SEQ ID NO: 84878 - DNA, 25 bp, Saccharomyces pastorianus
atacgacaatggtctgcgaagcctt

SEQ ID NO: 84879 - DNA, 25 bp, Saccharomyces pastorianus
atccattattggtacggctgtgcaa

SEQ ID NO: 84880 - DNA, 25 bp, Saccharomyces pastorianus
gaagaactacgtgctgctgctttat

SEQ ID NO: 84881 - DNA, 25 bp, Saccharomyces pastorianus
atttgactcaattggctgttatcag

SEQ ID NO: 84882 - DNA, 25 bp, Saccharomyces pastorianus
gtggacaatcctacgaactatttga

SEQ ID NO: 84883 - DNA, 25 bp, Saccharomyces pastorianus
gcaagctcttgacctattcttacag

SEQ ID NO: 84884 - DNA, 25 bp, Saccharomyces pastorianus
ggccatttctagcaaactttctcag

SEQ ID NO: 84885 - DNA, 25 bp, Saccharomyces pastorianus
gccgtaggtttggattttgtctaca

SEQ ID NO: 84886 - DNA, 25 bp, Saccharomyces pastorianus
aagtgccgtggaaacattattggat

SEQ ID NO: 84887 - DNA, 25 bp, Saccharomyces pastorianus
ccagggtccattaagtcatccagaa

SEQ ID NO: 84888 - DNA, 25 bp, Saccharomyces pastorianus
ggctgttatcaggttccaaaccatt

SEQ ID NO: 84889 - DNA, 25 bp, Saccharomyces pastorianus
cacaattggaggatctttctgaaag

SEQ ID NO: 84890 - DNA, 25 bp, Saccharomyces pastorianus
gggctaagatttcttccatcctagt

SEQ ID NO: 84891 - DNA, 25 bp, Saccharomyces pastorianus
gatgaaatgttatccccagggtcca

SEQ ID NO: 84892 - DNA, 25 bp, Saccharomyces pastorianus
ctgcacaacgtcactcaaaggcggc

SEQ ID NO: 84893 - DNA, 25 bp, Saccharomyces pastorianus
tgcacaacgtcactcaaaggcggcc

SEQ ID NO: 84894 - DNA, 25 bp, Saccharomyces pastorianus
ccgcggcgttttccattgcgaaatt

SEQ ID NO: 84895 - DNA, 25 bp, Saccharomyces pastorianus
tttccattgcgaaatttttcacttt

SEQ ID NO: 84896 - DNA, 25 bp, Saccharomyces pastorianus
aacgtcactcaaaggcggcccgcgg

SEQ ID NO: 84897 - DNA, 25 bp, Saccharomyces pastorianus
gcgttttccattgcgaaatttttca

SEQ ID NO: 84898 - DNA, 25 bp, Saccharomyces pastorianus
cctgcacaacgtcactcaaaggcgg

SEQ ID NO: 84899 - DNA, 25 bp, Saccharomyces pastorianus
gcggcgttttccattgcgaaatttt

SEQ ID NO: 84900 - DNA, 25 bp, Saccharomyces pastorianus
ttcgagattcctgcacaacgtcact

SEQ ID NO: 84901 - DNA, 25 bp, Saccharomyces pastorianus
atgactcttcgagattcctgcacaa

SEQ ID NO: 84902 - DNA, 25 bp, Saccharomyces pastorianus
actcttcgagattcctgcacaacgt

SEQ ID NO: 84903 - DNA, 25 bp, Saccharomyces pastorianus
ttaatggtgcgacattcctgacgtt

SEQ ID NO: 84904 - DNA, 25 bp, Saccharomyces pastorianus
taagaacccgaatatgagctcacag

SEQ ID NO: 84905 - DNA, 25 bp, Saccharomyces pastorianus
agtcaattcattcttggcatcgccc

SEQ ID NO: 84906 - DNA, 25 bp, Saccharomyces pastorianus
gttgacagtatacccattggacgtt

SEQ ID NO: 84907 - DNA, 25 bp, Saccharomyces pastorianus
ccggacatgggcttggtacatattt

SEQ ID NO: 84908 - DNA, 25 bp, Saccharomyces pastorianus
gagctcacaggacgtagatctttca

SEQ ID NO: 84909 - DNA, 25 bp, Saccharomyces pastorianus
tcttgtctacgaagcattggttgcc

SEQ ID NO: 84910 - DNA, 25 bp, Saccharomyces pastorianus
aggtccgcgcccgttaatggtgcga

SEQ ID NO: 84911 - DNA, 25 bp, Saccharomyces pastorianus
gggccaacaatggttaggtccgcgc

SEQ ID NO: 84912 - DNA, 25 bp, Saccharomyces pastorianus
tctttcacgttcaaatactctgcca

SEQ ID NO: 84913 - DNA, 25 bp, Saccharomyces pastorianus
gccactatcccagtactacgtttgt

SEQ ID NO: 84914 - DNA, 25 bp, Saccharomyces pastorianus
aagaagttgcctccacagcagcttc

SEQ ID NO: 84915 - DNA, 25 bp, Saccharomyces pastorianus
aactgacgacaatggcactacaaat

SEQ ID NO: 84916 - DNA, 25 bp, Saccharomyces pastorianus
gctgtcccctcatttatctggattt

SEQ ID NO: 84917 - DNA, 25 bp, Saccharomyces pastorianus
ttttggtaccagatgccctattaat

SEQ ID NO: 84918 - DNA, 25 bp, Saccharomyces pastorianus
gcgcagacgctggtaacatatcaag

SEQ ID NO: 84919 - DNA, 25 bp, Saccharomyces pastorianus
tagggttcttgtcctctagttggaa

SEQ ID NO: 84920 - DNA, 25 bp, Saccharomyces pastorianus
gtacatattttgaagcctacgcggt

SEQ ID NO: 84921 - DNA, 25 bp, Saccharomyces pastorianus
aacggtctcaactcaactgacgaca

SEQ ID NO: 84922 - DNA, 25 bp, Saccharomyces pastorianus
tagacagcttttcctgatgagccaa

SEQ ID NO: 84923 - DNA, 25 bp, Saccharomyces pastorianus
aagaaagattgcacgtcgctgtccc

SEQ ID NO: 84924 - DNA, 25 bp, Saccharomyces pastorianus
atggaaggtgtagacggcgcatctt

SEQ ID NO: 84925 - DNA, 25 bp, Saccharomyces pastorianus
agagaccattcaaggctccatcttt

SEQ ID NO: 84926 - DNA, 25 bp, Saccharomyces pastorianus
gaaactgcaagttactaccgtcaga

SEQ ID NO: 84927 - DNA, 25 bp, Saccharomyces pastorianus
aaaattcacctcttcggtaagcctg

SEQ ID NO: 84928 - DNA, 25 bp, Saccharomyces pastorianus
gttcatgcaatccatttctccagtg

SEQ ID NO: 84929 - DNA, 25 bp, Saccharomyces pastorianus
aacctggtaatgctatgtccggcga

SEQ ID NO: 84930 - DNA, 25 bp, Saccharomyces pastorianus
gttggtcatgatgcaactctcccgt

SEQ ID NO: 84931 - DNA, 25 bp, Saccharomyces pastorianus
gtaagcctgcaaccggcgatttgaa

SEQ ID NO: 84932 - DNA, 25 bp, Saccharomyces pastorianus
aattttatactgttcttccatcggt

SEQ ID NO: 84933 - DNA, 25 bp, Saccharomyces pastorianus
aagtctatctacactggtatggcta

SEQ ID NO: 84934 - DNA, 25 bp, Saccharomyces pastorianus
ggctccatctttgtttggtggtatg

SEQ ID NO: 84935 - DNA, 25 bp, Saccharomyces pastorianus
catcggtatctcttggatcatctac

SEQ ID NO: 84936 - DNA, 25 bp, Saccharomyces pastorianus
tacggtgtcattatgtggccgataa

SEQ ID NO: 84937 - DNA, 25 bp, Saccharomyces pastorianus
aaaccattcgagtacccagtgatcc

SEQ ID NO: 84938 - DNA, 25 bp, Saccharomyces pastorianus
acttccgtcatattggcagggcaca

SEQ ID NO: 84939 - DNA, 25 bp, Saccharomyces pastorianus
gccgctgacgagtatttccgttacg

SEQ ID NO: 84940 - DNA, 25 bp, Saccharomyces pastorianus
gagaatccattgtcacttcaacacg

SEQ ID NO: 84941 - DNA, 25 bp, Saccharomyces pastorianus
ttggctcttggctatggtaatacta

SEQ ID NO: 84942 - DNA, 25 bp, Saccharomyces pastorianus
aggtgccgatgtttctgtgctattg

SEQ ID NO: 84943 - DNA, 25 bp, Saccharomyces pastorianus
cagtgatcctgatggtggtaccgcc

SEQ ID NO: 84944 - DNA, 25 bp, Saccharomyces pastorianus
acgccagcattgtgcacgtgacgaa

SEQ ID NO: 84945 - DNA, 25 bp, Saccharomyces pastorianus
gagggcacttactctaagttcattt

SEQ ID NO: 84946 - DNA, 25 bp, Saccharomyces pastorianus
gaaagattaccgttgacttccgtca

SEQ ID NO: 84947 - DNA, 25 bp, Saccharomyces pastorianus
acggtgatggtttaatctccgccgc

SEQ ID NO: 84948 - DNA, 25 bp, Saccharomyces pastorianus
ctgtgatgaggtcattgggtctttc

SEQ ID NO: 84949 - DNA, 25 bp, Saccharomyces pastorianus
gaaacacgtgctaacatccattggt

SEQ ID NO: 84950 - DNA, 25 bp, Saccharomyces pastorianus
ttcgcccagtgaagcagaagtaaat

SEQ ID NO: 84951 - DNA, 25 bp, Saccharomyces pastorianus
gaagcctttgccctctttgataaag

SEQ ID NO: 84952 - DNA, 25 bp, Saccharomyces pastorianus
gaattggccactgtgatgaggtcat

SEQ ID NO: 84953 - DNA, 25 bp, Saccharomyces pastorianus
taatctccgccgctgagttgaaaca

SEQ ID NO: 84954 - DNA, 25 bp, Saccharomyces pastorianus
gatgtctcgtcaactcaaatcaaat

SEQ ID NO: 84955 - DNA, 25 bp, Saccharomyces pastorianus
acaatggctctatctcatcaagtga

SEQ ID NO: 84956 - DNA, 25 bp, Saccharomyces pastorianus
atttttggctctgatgtctcgtcaa

SEQ ID NO: 84957 - DNA, 25 bp, Saccharomyces pastorianus
gatggtaaccatcaaatcgaattta

SEQ ID NO: 84958 - DNA, 25 bp, Saccharomyces pastorianus
caggtcttcctgttattgcaatgaa

SEQ ID NO: 84959 - DNA, 25 bp, Saccharomyces pastorianus
ggttgtcagcagaggattacccaaa

SEQ ID NO: 84960 - DNA, 25 bp, Saccharomyces pastorianus
agtttccctgcatacttcaagttca

SEQ ID NO: 84961 - DNA, 25 bp, Saccharomyces pastorianus
tatgcgattacggagtttccctgca

SEQ ID NO: 84962 - DNA, 25 bp, Saccharomyces pastorianus
gggagcttcatgaatctctgatttt

SEQ ID NO: 84963 - DNA, 25 bp, Saccharomyces pastorianus
tcaagttcagggttggacctgccaa

SEQ ID NO: 84964 - DNA, 25 bp, Saccharomyces pastorianus
ctggaagcgctgtcaaatcgaattt

SEQ ID NO: 84965 - DNA, 25 bp, Saccharomyces pastorianus
tgacttcaacatcattcactcctga

SEQ ID NO: 84966 - DNA, 25 bp, Saccharomyces pastorianus
gaactatccagtgcttgacgaatta

SEQ ID NO: 84967 - DNA, 25 bp, Saccharomyces pastorianus
aatcgaatttgtgtggttgtcagca

SEQ ID NO: 84968 - DNA, 25 bp, Saccharomyces pastorianus
agatatgtttggctcaggtcttcct

SEQ ID NO: 84969 - DNA, 25 bp, Saccharomyces pastorianus
tgctacaaaagcagtttcgccctcc

SEQ ID NO: 84970 - DNA, 25 bp, Saccharomyces pastorianus
gagttgcacaagtttcctgatgaaa

SEQ ID NO: 84971 - DNA, 25 bp, Saccharomyces pastorianus
tctgtctggttactgtcgaagttgt

SEQ ID NO: 84972 - DNA, 25 bp, Saccharomyces pastorianus
tgtagacggcattggtatcttaacc

SEQ ID NO: 84973 - DNA, 25 bp, Saccharomyces pastorianus
aatgggatagcgcagtccgcaccac

SEQ ID NO: 84974 - DNA, 25 bp, Saccharomyces pastorianus
agtccgcaccactagaagttccggt

SEQ ID NO: 84975 - DNA, 25 bp, Saccharomyces pastorianus
gaatgctttagcgtcgagttgcaca

SEQ ID NO: 84976 - DNA, 25 bp, Saccharomyces pastorianus
gaagatattgacactgctgccttaa

SEQ ID NO: 84977 - DNA, 25 bp, Saccharomyces pastorianus
gctacaagttggatgcacgtgttca

SEQ ID NO: 84978 - DNA, 25 bp, Saccharomyces pastorianus
ctgactgcaagtggatcggtttaca

SEQ ID NO: 84979 - DNA, 25 bp, Saccharomyces pastorianus
ttaacgatcctggtttcacaaacac

SEQ ID NO: 84980 - DNA, 25 bp, Saccharomyces pastorianus
tgcgttatatcctttgctacacatg

SEQ ID NO: 84981 - DNA, 25 bp, Saccharomyces pastorianus
catgttgctcgtgttgttgttgcta

SEQ ID NO: 84982 - DNA, 25 bp, Saccharomyces pastorianus
gaaatcattggaggcgtctgttatt

SEQ ID NO: 84983 - DNA, 25 bp, Saccharomyces pastorianus
aataagtctagttgcttcaggtgct

SEQ ID NO: 84984 - DNA, 25 bp, Saccharomyces pastorianus
atgaattggccgttgctcaagtaac

SEQ ID NO: 84985 - DNA, 25 bp, Saccharomyces pastorianus
gttgttgctacgtctttgaatcctc

SEQ ID NO: 84986 - DNA, 25 bp, Saccharomyces pastorianus
gaaagtaccaaagctccggaactag

SEQ ID NO: 84987 - DNA, 25 bp, Saccharomyces pastorianus
aatgacaaacttccactgccaagta

SEQ ID NO: 84988 - DNA, 25 bp, Saccharomyces pastorianus
gaacgccgtggcatctttaaagaaa

SEQ ID NO: 84989 - DNA, 25 bp, Saccharomyces pastorianus
gttgctcaagtaacgggtcacccaa

SEQ ID NO: 84990 - DNA, 25 bp, Saccharomyces pastorianus
agactacttgtatactttgcacgat

SEQ ID NO: 84991 - DNA, 25 bp, Saccharomyces pastorianus
tgtgcctttgttacgtctatattca

SEQ ID NO: 84992 - DNA, 25 bp, Saccharomyces pastorianus
tcttttttgtgcctttgttacgtct

SEQ ID NO: 84993 - DNA, 25 bp, Saccharomyces pastorianus
tgattattcgattttcttcttgctg

SEQ ID NO: 84994 - DNA, 25 bp, Saccharomyces pastorianus
gtatgtcatatgtacttgttttctt

SEQ ID NO: 84995 - DNA, 25 bp, Saccharomyces pastorianus
agttctttgctatttcacacttcct

SEQ ID NO: 84996 - DNA, 25 bp, Saccharomyces pastorianus
cacttgctgcctgaaatatatatat

SEQ ID NO: 84997 - DNA, 25 bp, Saccharomyces pastorianus
gtaaacagttctttgctatttcaca

SEQ ID NO: 84998 - DNA, 25 bp, Saccharomyces pastorianus
ggaagagctttctaagtctgaagaa

SEQ ID NO: 84999 - DNA, 25 bp, Saccharomyces pastorianus
tgctatttcacacttcctggttgat

SEQ ID NO: 85000 - DNA, 25 bp, Saccharomyces pastorianus
acacttcctggttgatggtcacttg

SEQ ID NO: 85001 - DNA, 25 bp, Saccharomyces pastorianus
gatggtcacttgctgcctgaaatat

SEQ ID NO: 85002 - DNA, 25 bp, Saccharomyces pastorianus
agattggtggtattggtactgtgcc

SEQ ID NO: 85003 - DNA, 25 bp, Saccharomyces pastorianus
tcacattgcttgtagattcgacgaa

SEQ ID NO: 85004 - DNA, 25 bp, Saccharomyces pastorianus
gtcaagttcgttccatctaagccaa

SEQ ID NO: 85005 - DNA, 25 bp, Saccharomyces pastorianus
gctgctttggtcaagttcgttccat

SEQ ID NO: 85006 - DNA, 25 bp, Saccharomyces pastorianus
acgatccaccaaagggttgcgcttc

SEQ ID NO: 85007 - DNA, 25 bp, Saccharomyces pastorianus
caccaaagggttgcgcttctttcaa

SEQ ID NO: 85008 - DNA, 25 bp, Saccharomyces pastorianus
attggtggtattggtactgtgccag

SEQ ID NO: 85009 - DNA, 25 bp, Saccharomyces pastorianus
aaagggttgcgcttctttcaacgct

SEQ ID NO: 85010 - DNA, 25 bp, Saccharomyces pastorianus
tgacgctgctttggtcaagttcgtt

SEQ ID NO: 85011 - DNA, 25 bp, Saccharomyces pastorianus
tgctcacattgcttgtagattcgac

SEQ ID NO: 85012 - DNA, 25 bp, Saccharomyces pastorianus
gctttggtcaagttcgttccatcta

SEQ ID NO: 85013 - DNA, 25 bp, Saccharomyces pastorianus
gttcctagtgtcattgaaccatctt

SEQ ID NO: 85014 - DNA, 25 bp, Saccharomyces pastorianus
gttcctgttactactgaagttgcca

SEQ ID NO: 85015 - DNA, 25 bp, Saccharomyces pastorianus
tggttgctccaacaaaggttctttt

SEQ ID NO: 85016 - DNA, 25 bp, Saccharomyces pastorianus
gctatccgcgatatcacttacaatg

SEQ ID NO: 85017 - DNA, 25 bp, Saccharomyces pastorianus
agatgtcatcaaggctatccgcgat

SEQ ID NO: 85018 - DNA, 25 bp, Saccharomyces pastorianus
aatgccagaagtgttctttccttcc

SEQ ID NO: 85019 - DNA, 25 bp, Saccharomyces pastorianus
aagaccattctgtcactttgagaga

SEQ ID NO: 85020 - DNA, 25 bp, Saccharomyces pastorianus
atctactccgtttttgagcactctt

SEQ ID NO: 85021 - DNA, 25 bp, Saccharomyces pastorianus
agaggttccgtcgaagatgtcatca

SEQ ID NO: 85022 - DNA, 25 bp, Saccharomyces pastorianus
gtcaccattgactttgaatctgcca

SEQ ID NO: 85023 - DNA, 25 bp, Saccharomyces pastorianus
tagttcctctatctaaccacaaaga

SEQ ID NO: 85024 - DNA, 25 bp, Saccharomyces pastorianus
aagctttcctttttgcctcgtgatg

SEQ ID NO: 85025 - DNA, 25 bp, Saccharomyces pastorianus
aattgtcaagacagttggtgaagca

SEQ ID NO: 85026 - DNA, 25 bp, Saccharomyces pastorianus
tcgtgatgttcaagaagctggttct

SEQ ID NO: 85027 - DNA, 25 bp, Saccharomyces pastorianus
agacagttggtgaagcagtcgcttc

SEQ ID NO: 85028 - DNA, 25 bp, Saccharomyces pastorianus
ttgcctcgtgatgttcaagaagctg

SEQ ID NO: 85029 - DNA, 25 bp, Saccharomyces pastorianus
agcagtcgcttcaagaatggtcgat

SEQ ID NO: 85030 - DNA, 25 bp, Saccharomyces pastorianus
cctttttgcctcgtgatgttcaaga

SEQ ID NO: 85031 - DNA, 25 bp, Saccharomyces pastorianus
tttcctttttgcctcgtgatgttca

SEQ ID NO: 85032 - DNA, 25 bp, Saccharomyces pastorianus
atcaagctttcctttttgcctcgtg

SEQ ID NO: 85033 - DNA, 25 bp, Saccharomyces pastorianus
tcgcttcaagaatggtcgataatga

SEQ ID NO: 85034 - DNA, 25 bp, Saccharomyces pastorianus
agacatcaagctttcctttttgcct

SEQ ID NO: 85035 - DNA, 25 bp, Saccharomyces pastorianus
ccccacacatttttatagccttctg

SEQ ID NO: 85036 - DNA, 25 bp, Saccharomyces pastorianus
gggcaggtctaacgtaaattcatct

SEQ ID NO: 85037 - DNA, 25 bp, Saccharomyces pastorianus
cttggtataccttttctgtgttgtc

SEQ ID NO: 85038 - DNA, 25 bp, Saccharomyces pastorianus
tcagttcctgtctttaggatgttat

SEQ ID NO: 85039 - DNA, 25 bp, Saccharomyces pastorianus
ttctgtgttgtctttcagttcctgt

SEQ ID NO: 85040 - DNA, 25 bp, Saccharomyces pastorianus
taaacttggaattctgggcaggtct

SEQ ID NO: 85041 - DNA, 25 bp, Saccharomyces pastorianus
aaagtgtagcaagaggctcctccac

SEQ ID NO: 85042 - DNA, 25 bp, Saccharomyces pastorianus
gcctggtccgcgctagaatctggaa

SEQ ID NO: 85043 - DNA, 25 bp, Saccharomyces pastorianus
atgttatttatcgatctttttcaga

SEQ ID NO: 85044 - DNA, 25 bp, Saccharomyces pastorianus
cctccactggcattttcacgatttg

SEQ ID NO: 85045 - DNA, 25 bp, Saccharomyces pastorianus
gatcaattatgtttttcccttggta

SEQ ID NO: 85046 - DNA, 25 bp, Saccharomyces pastorianus
gtctcgtccactcgtgatggtatga

SEQ ID NO: 85047 - DNA, 25 bp, Saccharomyces pastorianus
tagaatcaacggtcagttcggtact

SEQ ID NO: 85048 - DNA, 25 bp, Saccharomyces pastorianus
gttctggtacaggttgcagtgccaa

SEQ ID NO: 85049 - DNA, 25 bp, Saccharomyces pastorianus
gcctcagaagttgcacgccatggaa

SEQ ID NO: 85050 - DNA, 25 bp, Saccharomyces pastorianus
tgatgccatcaacgaggccttgact

SEQ ID NO: 85051 - DNA, 25 bp, Saccharomyces pastorianus
tctaaatacacttctgccttctggg

SEQ ID NO: 85052 - DNA, 25 bp, Saccharomyces pastorianus
aacaccgatgatctttctgatgcca

SEQ ID NO: 85053 - DNA, 25 bp, Saccharomyces pastorianus
gagtgagttcacaggtgccgcacaa

SEQ ID NO: 85054 - DNA, 25 bp, Saccharomyces pastorianus
ggtatgaacttggtttcctacgaat

SEQ ID NO: 85055 - DNA, 25 bp, Saccharomyces pastorianus
ggccttgactttgcccgatgtaaag

SEQ ID NO: 85056 - DNA, 25 bp, Saccharomyces pastorianus
ggttccttaatcctgagtgagttca

SEQ ID NO: 85057 - DNA, 25 bp, Saccharomyces pastorianus
gctcgactatgctctgatatgcaag

SEQ ID NO: 85058 - DNA, 25 bp, Saccharomyces pastorianus
atcacccctgacaaacagaagaaag

SEQ ID NO: 85059 - DNA, 25 bp, Saccharomyces pastorianus
atgctctgatatgcaagtgtattgc

SEQ ID NO: 85060 - DNA, 25 bp, Saccharomyces pastorianus
accgctcgactatgctctgatatgc

SEQ ID NO: 85061 - DNA, 25 bp, Saccharomyces pastorianus
aacaacagcatcaaccacagaacgg

SEQ ID NO: 85062 - DNA, 25 bp, Saccharomyces pastorianus
ggaccgctcgactatgctctgatat

SEQ ID NO: 85063 - DNA, 25 bp, Saccharomyces pastorianus
gactatgctctgatatgcaagtgta

SEQ ID NO: 85064 - DNA, 25 bp, Saccharomyces pastorianus
acagcatcaaccacagaacggaccg

SEQ ID NO: 85065 - DNA, 25 bp, Saccharomyces pastorianus
agaacggaccgctcgactatgctct

SEQ ID NO: 85066 - DNA, 25 bp, Saccharomyces pastorianus
tggctatcacccctgacaaacagaa

SEQ ID NO: 85067 - DNA, 25 bp, Saccharomyces pastorianus
atcaaccacagaacggaccgctcga

SEQ ID NO: 85068 - DNA, 25 bp, Saccharomyces pastorianus
ggttggacccagaacaaaaagagca

SEQ ID NO: 85069 - DNA, 25 bp, Saccharomyces pastorianus
gtgtattgcaatgttctttgtcgtt

SEQ ID NO: 85070 - DNA, 25 bp, Saccharomyces pastorianus
ggacccagaacaaaaagagcaaatc

SEQ ID NO: 85071 - DNA, 25 bp, Saccharomyces pastorianus
caatgttctttgtcgttgcgggcgt

SEQ ID NO: 85072 - DNA, 25 bp, Saccharomyces pastorianus
agagcaaatcaagcgtctccaccag

SEQ ID NO: 85073 - DNA, 25 bp, Saccharomyces pastorianus
tgcgggcgtggtgctgatgttcttc

SEQ ID NO: 85074 - DNA, 25 bp, Saccharomyces pastorianus
agcaaatcaagcgtctccaccagtt

SEQ ID NO: 85075 - DNA, 25 bp, Saccharomyces pastorianus
gcaagtgtattgcaatgttctttgt

SEQ ID NO: 85076 - DNA, 25 bp, Saccharomyces pastorianus
tcgagaccgggttggacccagaaca

SEQ ID NO: 85077 - DNA, 25 bp, Saccharomyces pastorianus
aaatcaagcgtctccaccagttgga

SEQ ID NO: 85078 - DNA, 25 bp, Saccharomyces pastorianus
tgcaatgttctttgtcgttgcgggc

SEQ ID NO: 85079 - DNA, 25 bp, Saccharomyces pastorianus
taaccaattgtatgccaagtacgcc

SEQ ID NO: 85080 - DNA, 25 bp, Saccharomyces pastorianus
tttatcacacaaggcgcctacgagg

SEQ ID NO: 85081 - DNA, 25 bp, Saccharomyces pastorianus
ttaccgagggtcaaatcttcgttga

SEQ ID NO: 85082 - DNA, 25 bp, Saccharomyces pastorianus
caatcaacgtcttgccttcgttgag

SEQ ID NO: 85083 - DNA, 25 bp, Saccharomyces pastorianus
gctgctgctatgaaggccgttgtcg

SEQ ID NO: 85084 - DNA, 25 bp, Saccharomyces pastorianus
gaagatcccgacacaagaagctccg

SEQ ID NO: 85085 - DNA, 25 bp, Saccharomyces pastorianus
atgatattacgcatccaattccgga

SEQ ID NO: 85086 - DNA, 25 bp, Saccharomyces pastorianus
gaccacggtgacgtttctaaccaat

SEQ ID NO: 85087 - DNA, 25 bp, Saccharomyces pastorianus
tgaagaggcgttatccatcgaagat

SEQ ID NO: 85088 - DNA, 25 bp, Saccharomyces pastorianus
gttgaccgtcaattacataacaagg

SEQ ID NO: 85089 - DNA, 25 bp, Saccharomyces pastorianus
gatgaaatctgccatcggtgaaggt

SEQ ID NO: 85090 - DNA, 25 bp, Saccharomyces pastorianus
acaacccatgtttgagttttccgat

SEQ ID NO: 85091 - DNA, 25 bp, Saccharomyces pastorianus
agaggacatcctgcaaggcggaccg

SEQ ID NO: 85092 - DNA, 25 bp, Saccharomyces pastorianus
ttcgctatagcttttcagccactaa

SEQ ID NO: 85093 - DNA, 25 bp, Saccharomyces pastorianus
gtagacatttgaaactcgtaccttc

SEQ ID NO: 85094 - DNA, 25 bp, Saccharomyces pastorianus
atatcccatggctactggaccagta

SEQ ID NO: 85095 - DNA, 25 bp, Saccharomyces pastorianus
tcgtaccttcaacacccatggatat

SEQ ID NO: 85096 - DNA, 25 bp, Saccharomyces pastorianus
ttccgtgttttacctcttgctataa

SEQ ID NO: 85097 - DNA, 25 bp, Saccharomyces pastorianus
gagttttccgatagcatacagacag

SEQ ID NO: 85098 - DNA, 25 bp, Saccharomyces pastorianus
aatttccaaatacctttcgctatag

SEQ ID NO: 85099 - DNA, 25 bp, Saccharomyces pastorianus
tctcgctatattggacttttgggat

SEQ ID NO: 85100 - DNA, 25 bp, Saccharomyces pastorianus
agcttcttctcagacattcttatga

SEQ ID NO: 85101 - DNA, 25 bp, Saccharomyces pastorianus
aatgacgacactaattttgcgctaa

SEQ ID NO: 85102 - DNA, 25 bp, Saccharomyces pastorianus
aaatgcagagcaccaggtttgttct

SEQ ID NO: 85103 - DNA, 25 bp, Saccharomyces pastorianus
gtggaattgactaatacttcgttca

SEQ ID NO: 85104 - DNA, 25 bp, Saccharomyces pastorianus
ttaaagccgctaacgatcaagatat

SEQ ID NO: 85105 - DNA, 25 bp, Saccharomyces pastorianus
ttcgttcaatttatactctttcaag

SEQ ID NO: 85106 - DNA, 25 bp, Saccharomyces pastorianus
ggatgttcgatccaagaaatgcaga

SEQ ID NO: 85107 - DNA, 25 bp, Saccharomyces pastorianus
atattcaaatttccacgagggcaaa

SEQ ID NO: 85108 - DNA, 25 bp, Saccharomyces pastorianus
agtcctagtggcaacgaaagtgtca

SEQ ID NO: 85109 - DNA, 25 bp, Saccharomyces pastorianus
gaaaaattcctctctagtcctagtg

SEQ ID NO: 85110 - DNA, 25 bp, Saccharomyces pastorianus
ggtttgttctgggattctttacaca

SEQ ID NO: 85111 - DNA, 25 bp, Saccharomyces pastorianus
gagcaactgtctcgtgaagataaag

SEQ ID NO: 85112 - DNA, 25 bp, Saccharomyces pastorianus
agaagtttctatactgcgtcgcctt

SEQ ID NO: 85113 - DNA, 25 bp, Saccharomyces pastorianus
agtgcctcccggtgttacaagaact

SEQ ID NO: 85114 - DNA, 25 bp, Saccharomyces pastorianus
gaactgtttcctccactcataagaa

SEQ ID NO: 85115 - DNA, 25 bp, Saccharomyces pastorianus
aggcgcggtagtacaaaccttgaag

SEQ ID NO: 85116 - DNA, 25 bp, Saccharomyces pastorianus
aagtacatctcccacaatctcagtg

SEQ ID NO: 85117 - DNA, 25 bp, Saccharomyces pastorianus
agataatcactcactctttagatga

SEQ ID NO: 85118 - DNA, 25 bp, Saccharomyces pastorianus
tgctgtcatcgggttctattccaaa

SEQ ID NO: 85119 - DNA, 25 bp, Saccharomyces pastorianus
gcaacaacgctgacgctttgagtag

SEQ ID NO: 85120 - DNA, 25 bp, Saccharomyces pastorianus
gaacacaaacgattcatcctccaat

SEQ ID NO: 85121 - DNA, 25 bp, Saccharomyces pastorianus
tattccaaaatctgcatccccggtt

SEQ ID NO: 85122 - DNA, 25 bp, Saccharomyces pastorianus
gcctggtgttaaaagaactgcctca

SEQ ID NO: 85123 - DNA, 25 bp, Saccharomyces pastorianus
aaagaaatcgactcgtccgttccat

SEQ ID NO: 85124 - DNA, 25 bp, Saccharomyces pastorianus
attatgggtggctcaaatgctatca

SEQ ID NO: 85125 - DNA, 25 bp, Saccharomyces pastorianus
ggaatccttcgcttatgtgatcaga

SEQ ID NO: 85126 - DNA, 25 bp, Saccharomyces pastorianus
tccgttccatttgggtctccaaaat

SEQ ID NO: 85127 - DNA, 25 bp, Saccharomyces pastorianus
gacgtcttacaattcttgactagtt

SEQ ID NO: 85128 - DNA, 25 bp, Saccharomyces pastorianus
aataacggcacgtcaaaggctgcaa

SEQ ID NO: 85129 - DNA, 25 bp, Saccharomyces pastorianus
aattccctatcgcttgctaattgga

SEQ ID NO: 85130 - DNA, 25 bp, Saccharomyces pastorianus
gttttcgttcagattcctctaaggg

SEQ ID NO: 85131 - DNA, 25 bp, Saccharomyces pastorianus
gggacttacaggttgacgtcttaca

SEQ ID NO: 85132 - DNA, 25 bp, Saccharomyces pastorianus
aattgcgataacgtggaatccttcg

SEQ ID NO: 85133 - DNA, 25 bp, Saccharomyces pastorianus
gggtctccaaaatttacttcggatg

SEQ ID NO: 85134 - DNA, 25 bp, Saccharomyces pastorianus
agattcgttacccaagttgccattc

SEQ ID NO: 85135 - DNA, 25 bp, Saccharomyces pastorianus
ggccttgtttcatgttccgcaatga

SEQ ID NO: 85136 - DNA, 25 bp, Saccharomyces pastorianus
tacactgctattatcggccttgttt

SEQ ID NO: 85137 - DNA, 25 bp, Saccharomyces pastorianus
gtgagccttttgcaactgaattcta

SEQ ID NO: 85138 - DNA, 25 bp, Saccharomyces pastorianus
gcttacacttattgctcatccagaa

SEQ ID NO: 85139 - DNA, 25 bp, Saccharomyces pastorianus
ggctacgcgccaaaaatcttcacta

SEQ ID NO: 85140 - DNA, 25 bp, Saccharomyces pastorianus
attttgtcgtcctttgtatcgtcta

SEQ ID NO: 85141 - DNA, 25 bp, Saccharomyces pastorianus
gaagggcttaccatgtccaacaaga

SEQ ID NO: 85142 - DNA, 25 bp, Saccharomyces pastorianus
catttactctgtggccatatctttg

SEQ ID NO: 85143 - DNA, 25 bp, Saccharomyces pastorianus
tgattactgcctctcaattgattaa

SEQ ID NO: 85144 - DNA, 25 bp, Saccharomyces pastorianus
taatacagggctacaccgttttctt

SEQ ID NO: 85145 - DNA, 25 bp, Saccharomyces pastorianus
aattgccaaggcacgaagacctcga

SEQ ID NO: 85146 - DNA, 25 bp, Saccharomyces pastorianus
tactaaagcgcttgaaccctctaac

SEQ ID NO: 85147 - DNA, 25 bp, Saccharomyces pastorianus
tatacttcggcggtaactgctgcaa

SEQ ID NO: 85148 - DNA, 25 bp, Saccharomyces pastorianus
aagatattcacggactcagcaaaac

SEQ ID NO: 85149 - DNA, 25 bp, Saccharomyces pastorianus
agatgactccgaactttctgtgttg

SEQ ID NO: 85150 - DNA, 25 bp, Saccharomyces pastorianus
gttgatgtcacggatacactccaat

SEQ ID NO: 85151 - DNA, 25 bp, Saccharomyces pastorianus
gctgcaagcatgactattccgaggt

SEQ ID NO: 85152 - DNA, 25 bp, Saccharomyces pastorianus
gactagtgtttccacgctacataat

SEQ ID NO: 85153 - DNA, 25 bp, Saccharomyces pastorianus
tcgacattattcagcgactaccaat

SEQ ID NO: 85154 - DNA, 25 bp, Saccharomyces pastorianus
gtggtctccaattatctttcctttg

SEQ ID NO: 85155 - DNA, 25 bp, Saccharomyces pastorianus
accgccaaaccagaccatttagatt

SEQ ID NO: 85156 - DNA, 25 bp, Saccharomyces pastorianus
attctccgcggtactcagacgataa

SEQ ID NO: 85157 - DNA, 25 bp, Saccharomyces pastorianus
cgccttccaaggcagaaagcttact

SEQ ID NO: 85158 - DNA, 25 bp, Saccharomyces pastorianus
gcacgcgtgttggagtttcaagatt

SEQ ID NO: 85159 - DNA, 25 bp, Saccharomyces pastorianus
gggaccctgcgtatattaacagaag

SEQ ID NO: 85160 - DNA, 25 bp, Saccharomyces pastorianus
gaatggagaggcctcggcatcacac

SEQ ID NO: 85161 - DNA, 25 bp, Saccharomyces pastorianus
ggccatgctaaaagttatcccatct

SEQ ID NO: 85162 - DNA, 25 bp, Saccharomyces pastorianus
aacattatgaatgccatgcgccaga

SEQ ID NO: 85163 - DNA, 25 bp, Saccharomyces pastorianus
atcccatctgattacttcaattcgg

SEQ ID NO: 85164 - DNA, 25 bp, Saccharomyces pastorianus
tcaagattccattcactattctccg

SEQ ID NO: 85165 - DNA, 25 bp, Saccharomyces pastorianus
ggcatgtgatgttacctaaggccat

SEQ ID NO: 85166 - DNA, 25 bp, Saccharomyces pastorianus
ctgaccaagaaagagcacgcgtgtt

SEQ ID NO: 85167 - DNA, 25 bp, Saccharomyces pastorianus
atacgctttccatggaggtgctgtc

SEQ ID NO: 85168 - DNA, 25 bp, Saccharomyces pastorianus
aatgggcattgcttgtttcgcacag

SEQ ID NO: 85169 - DNA, 25 bp, Saccharomyces pastorianus
tttcgcacagtgacctacggtggca

SEQ ID NO: 85170 - DNA, 25 bp, Saccharomyces pastorianus
acagcgcttcgatttggtcattcaa

SEQ ID NO: 85171 - DNA, 25 bp, Saccharomyces pastorianus
ggtgctgtcctaatacaatctgaga

SEQ ID NO: 85172 - DNA, 25 bp, Saccharomyces pastorianus
ctacggtggcagtgcattggacaat

SEQ ID NO: 85173 - DNA, 25 bp, Saccharomyces pastorianus
tgatatctccttaccaaatgggcat

SEQ ID NO: 85174 - DNA, 25 bp, Saccharomyces pastorianus
ggcagtcagctctttaattgcattt

SEQ ID NO: 85175 - DNA, 25 bp, Saccharomyces pastorianus
gagagaagtgactacccctatgcct

SEQ ID NO: 85176 - DNA, 25 bp, Saccharomyces pastorianus
acgatgctttttgtctacttttaca

SEQ ID NO: 85177 - DNA, 25 bp, Saccharomyces pastorianus
taaggttcccttagaagagctcgaa

SEQ ID NO: 85178 - DNA, 25 bp, Saccharomyces pastorianus
tttacttccgcatttcttacgcaat

SEQ ID NO: 85179 - DNA, 25 bp, Saccharomyces pastorianus
actgcgagttcgaatcatctatgga

SEQ ID NO: 85180 - DNA, 25 bp, Saccharomyces pastorianus
gcagcggtacttttagtgatcttga

SEQ ID NO: 85181 - DNA, 25 bp, Saccharomyces pastorianus
aaaggacagcttctctaaggaacta

SEQ ID NO: 85182 - DNA, 25 bp, Saccharomyces pastorianus
gaagccgctaaaatctttgagaact

SEQ ID NO: 85183 - DNA, 25 bp, Saccharomyces pastorianus
gatcttgagaattcagcggaaccgt

SEQ ID NO: 85184 - DNA, 25 bp, Saccharomyces pastorianus
aggccctatatgaaattagctcgag

SEQ ID NO: 85185 - DNA, 25 bp, Saccharomyces pastorianus
gatgcaatgggctctaaatcaatga

SEQ ID NO: 85186 - DNA, 25 bp, Saccharomyces pastorianus
ggaaccgtttcatttatcgacagat

SEQ ID NO: 85187 - DNA, 25 bp, Saccharomyces pastorianus
gtgtcatctgcgaaaaggccctata

SEQ ID NO: 85188 - DNA, 25 bp, Saccharomyces pastorianus
ttaaatgttcattcccaactgagga

SEQ ID NO: 85189 - DNA, 25 bp, Saccharomyces pastorianus
aagcctgtgtgacgcactcaagata

SEQ ID NO: 85190 - DNA, 25 bp, Saccharomyces pastorianus
gctctatcgggctcataatgcttaa

SEQ ID NO: 85191 - DNA, 25 bp, Saccharomyces pastorianus
acagggatcgcggtgcaatgtgcca

SEQ ID NO: 85192 - DNA, 25 bp, Saccharomyces pastorianus
agacacgtccaagttgctcgagaaa

SEQ ID NO: 85193 - DNA, 25 bp, Saccharomyces pastorianus
tcaattgcaggtagttccaccgcag

SEQ ID NO: 85194 - DNA, 25 bp, Saccharomyces pastorianus
ggtcaaatttctcaagccgcaaggc

SEQ ID NO: 85195 - DNA, 25 bp, Saccharomyces pastorianus
ttattgttctgccacaagcctgtgt

SEQ ID NO: 85196 - DNA, 25 bp, Saccharomyces pastorianus
aaacactgttacaaaacctcctctg

SEQ ID NO: 85197 - DNA, 25 bp, Saccharomyces pastorianus
attcgacctgatatcatgctctcta

SEQ ID NO: 85198 - DNA, 25 bp, Saccharomyces pastorianus
catatcccgttgtgcactttttaga

SEQ ID NO: 85199 - DNA, 25 bp, Saccharomyces pastorianus
ggttcattaagctccggaaatcgca

SEQ ID NO: 85200 - DNA, 25 bp, Saccharomyces pastorianus
gtaacagtgttttgtcgcagtatct

SEQ ID NO: 85201 - DNA, 25 bp, Saccharomyces pastorianus
agtgttttgtcgcagtatcttgagt

SEQ ID NO: 85202 - DNA, 25 bp, Saccharomyces pastorianus
tgttttgtcgcagtatcttgagtgc

SEQ ID NO: 85203 - DNA, 25 bp, Saccharomyces pastorianus
aacagtgttttgtcgcagtatcttg

SEQ ID NO: 85204 - DNA, 25 bp, Saccharomyces pastorianus
gcagaggaggttttgtaacagtgtt

SEQ ID NO: 85205 - DNA, 25 bp, Saccharomyces pastorianus
acagtgttttgtcgcagtatcttga

SEQ ID NO: 85206 - DNA, 25 bp, Saccharomyces pastorianus
atagagcagaggaggttttgtaaca

SEQ ID NO: 85207 - DNA, 25 bp, Saccharomyces pastorianus
tttgtcgcagtatcttgagtgcgtc

SEQ ID NO: 85208 - DNA, 25 bp, Saccharomyces pastorianus
ttgtaacagtgttttgtcgcagtat

SEQ ID NO: 85209 - DNA, 25 bp, Saccharomyces pastorianus
ggttttgtaacagtgttttgtcgca

SEQ ID NO: 85210 - DNA, 25 bp, Saccharomyces pastorianus
cccgatagagcagaggaggttttgt

SEQ ID NO: 85211 - DNA, 25 bp, Saccharomyces pastorianus
gaggtcataattctatcattggtca

SEQ ID NO: 85212 - DNA, 25 bp, Saccharomyces pastorianus
gaaggtgtctctgccatgatatgct

SEQ ID NO: 85213 - DNA, 25 bp, Saccharomyces pastorianus
gatatgctcacctcaagaatctatg

SEQ ID NO: 85214 - DNA, 25 bp, Saccharomyces pastorianus
aggtattgacgttgattccgacgaa

SEQ ID NO: 85215 - DNA, 25 bp, Saccharomyces pastorianus
aacactgtgcctttgttaccaattg

SEQ ID NO: 85216 - DNA, 25 bp, Saccharomyces pastorianus
tgaaattgcttctaattccctaaga

SEQ ID NO: 85217 - DNA, 25 bp, Saccharomyces pastorianus
accgatatactttcacaactcagag

SEQ ID NO: 85218 - DNA, 25 bp, Saccharomyces pastorianus
gaattgttatcagtgcctatacgta

SEQ ID NO: 85219 - DNA, 25 bp, Saccharomyces pastorianus
gccatgagagctacgttgaacgaat

SEQ ID NO: 85220 - DNA, 25 bp, Saccharomyces pastorianus
attagcaggcgaactggctgatcat

SEQ ID NO: 85221 - DNA, 25 bp, Saccharomyces pastorianus
gtgtttcgacggatttgaactctag

SEQ ID NO: 85222 - DNA, 25 bp, Saccharomyces pastorianus
tattggtgccatgctgcgttacaaa

SEQ ID NO: 85223 - DNA, 25 bp, Saccharomyces pastorianus
tatcgaactttctgccgaagcgttg

SEQ ID NO: 85224 - DNA, 25 bp, Saccharomyces pastorianus
ttgacgaaatttcccaggacactgg

SEQ ID NO: 85225 - DNA, 25 bp, Saccharomyces pastorianus
gcatgtaaggttatttccatcgtgg

SEQ ID NO: 85226 - DNA, 25 bp, Saccharomyces pastorianus
gctattgacaaagctaccggccaag

SEQ ID NO: 85227 - DNA, 25 bp, Saccharomyces pastorianus
gaattattcgatccaagactagcat

SEQ ID NO: 85228 - DNA, 25 bp, Saccharomyces pastorianus
aatcttcagaaggtgcccaatttgt

SEQ ID NO: 85229 - DNA, 25 bp, Saccharomyces pastorianus
ttcggtgctaccttggaattcatca

SEQ ID NO: 85230 - DNA, 25 bp, Saccharomyces pastorianus
atggacgttgtctccgaagaacctt

SEQ ID NO: 85231 - DNA, 25 bp, Saccharomyces pastorianus
ggtgcccaatttgtcacaggttttg

SEQ ID NO: 85232 - DNA, 25 bp, Saccharomyces pastorianus
cggtttcaaccaggctatcgaactt

SEQ ID NO: 85233 - DNA, 25 bp, Saccharomyces pastorianus
gtatgccagctcatgcttactgcaa

SEQ ID NO: 85234 - DNA, 25 bp, Saccharomyces pastorianus
ttctacgaggtattgtaggcccaat

SEQ ID NO: 85235 - DNA, 25 bp, Saccharomyces pastorianus
caatctccatcgttggatcttgtgt

SEQ ID NO: 85236 - DNA, 25 bp, Saccharomyces pastorianus
gatccacttagctggcctatcggac

SEQ ID NO: 85237 - DNA, 25 bp, Saccharomyces pastorianus
ccactaatggcggttctcatggagt

SEQ ID NO: 85238 - DNA, 25 bp, Saccharomyces pastorianus
taggcccaatggtactgtcgtcctg

SEQ ID NO: 85239 - DNA, 25 bp, Saccharomyces pastorianus
agggaggctttagatttcttcgcca

SEQ ID NO: 85240 - DNA, 25 bp, Saccharomyces pastorianus
gcttactgcaattccgatgttttca

SEQ ID NO: 85241 - DNA, 25 bp, Saccharomyces pastorianus
ggtttgatcaaatctccgatccact

SEQ ID NO: 85242 - DNA, 25 bp, Saccharomyces pastorianus
ggcctatcggacgttcctgaaattt

SEQ ID NO: 85243 - DNA, 25 bp, Saccharomyces pastorianus
agcagctatcgaggcttctacgagg

SEQ ID NO: 85244 - DNA, 25 bp, Saccharomyces pastorianus
ggacctacgggtcaggctgaatcaa

SEQ ID NO: 85245 - DNA, 25 bp, Saccharomyces pastorianus
gcctacgcaatatactcagctactg

SEQ ID NO: 85246 - DNA, 25 bp, Saccharomyces pastorianus
aaaagttccactgcgaaagtattcg

SEQ ID NO: 85247 - DNA, 25 bp, Saccharomyces pastorianus
gtacaatatttttgcgacaacgtct

SEQ ID NO: 85248 - DNA, 25 bp, Saccharomyces pastorianus
gcacgccattgcgaaagctttggtt

SEQ ID NO: 85249 - DNA, 25 bp, Saccharomyces pastorianus
gacaacgtctggaggcggacctacg

SEQ ID NO: 85250 - DNA, 25 bp, Saccharomyces pastorianus
agctttggttgtgttcaatccatta

SEQ ID NO: 85251 - DNA, 25 bp, Saccharomyces pastorianus
gactacataaagctggcgtcttaac

SEQ ID NO: 85252 - DNA, 25 bp, Saccharomyces pastorianus
acaagagattacaggcacgtcgaaa

SEQ ID NO: 85253 - DNA, 25 bp, Saccharomyces pastorianus
ggctgaatcaatcatgcacgccatt

SEQ ID NO: 85254 - DNA, 25 bp, Saccharomyces pastorianus
ggatttcttttgatgagtacgcttt

SEQ ID NO: 85255 - DNA, 25 bp, Saccharomyces pastorianus
gcgatactgtacttgggctctagga

SEQ ID NO: 85256 - DNA, 25 bp, Saccharomyces pastorianus
tgttgatcctgtgcatttgtctcca

SEQ ID NO: 85257 - DNA, 25 bp, Saccharomyces pastorianus
tatatatcttactgttccggcctag

SEQ ID NO: 85258 - DNA, 25 bp, Saccharomyces pastorianus
ggatccctcagattgttcttaactt

SEQ ID NO: 85259 - DNA, 25 bp, Saccharomyces pastorianus
gaatatgagccacttttgccaagga

SEQ ID NO: 85260 - DNA, 25 bp, Saccharomyces pastorianus
gctcgcttgagcttggcagaacaat

SEQ ID NO: 85261 - DNA, 25 bp, Saccharomyces pastorianus
tttcataatctcagtgctctcagtc

SEQ ID NO: 85262 - DNA, 25 bp, Saccharomyces pastorianus
agtctcaatggaccccgaatattta

SEQ ID NO: 85263 - DNA, 25 bp, Saccharomyces pastorianus
gatagccaatcgtatagctcgcttg

SEQ ID NO: 85264 - DNA, 25 bp, Saccharomyces pastorianus
gagtctcattcctattctttttatt

SEQ ID NO: 85265 - DNA, 25 bp, Saccharomyces pastorianus
gctggtacgctgttgatggacttca

SEQ ID NO: 85266 - DNA, 25 bp, Saccharomyces pastorianus
acgaccaaatgttgccgttgcacgt

SEQ ID NO: 85267 - DNA, 25 bp, Saccharomyces pastorianus
ttcctgaagaaccaacgttgccgtt

SEQ ID NO: 85268 - DNA, 25 bp, Saccharomyces pastorianus
agatgacgtcgaagcaacgctggat

SEQ ID NO: 85269 - DNA, 25 bp, Saccharomyces pastorianus
taactccaaccatagttccttctat

SEQ ID NO: 85270 - DNA, 25 bp, Saccharomyces pastorianus
atatgttcacatactacgagggata

SEQ ID NO: 85271 - DNA, 25 bp, Saccharomyces pastorianus
aacgctggatggtttagttcctgat

SEQ ID NO: 85272 - DNA, 25 bp, Saccharomyces pastorianus
aaactgtgcagtttcatctttacct

SEQ ID NO: 85273 - DNA, 25 bp, Saccharomyces pastorianus
gttggtggtcacaaatttgctgcaa

SEQ ID NO: 85274 - DNA, 25 bp, Saccharomyces pastorianus
aaattttccaacgtgggcacaggca

SEQ ID NO: 85275 - DNA, 25 bp, Saccharomyces pastorianus
gttgccttacttcatttggctgaac

SEQ ID NO: 85276 - DNA, 25 bp, Saccharomyces pastorianus
aacgatgcgggattacggcacccta

SEQ ID NO: 85277 - DNA, 25 bp, Saccharomyces pastorianus
tagcgacaacagtgattcgagcgat

SEQ ID NO: 85278 - DNA, 25 bp, Saccharomyces pastorianus
ggaatacccaagatgacgcacgagt

SEQ ID NO: 85279 - DNA, 25 bp, Saccharomyces pastorianus
gcgatagtgacgatatgagaccttt

SEQ ID NO: 85280 - DNA, 25 bp, Saccharomyces pastorianus
gatcaagcagtgcatgctcttagat

SEQ ID NO: 85281 - DNA, 25 bp, Saccharomyces pastorianus
gatagatcaaccgtggaatacccaa

SEQ ID NO: 85282 - DNA, 25 bp, Saccharomyces pastorianus
aaatacgacgttatcttggacaagg

SEQ ID NO: 85283 - DNA, 25 bp, Saccharomyces pastorianus
aacaccaattacagcaccaacgaag

SEQ ID NO: 85284 - DNA, 25 bp, Saccharomyces pastorianus
gatgaagctgagacttaacaccaat

SEQ ID NO: 85285 - DNA, 25 bp, Saccharomyces pastorianus
gagacctttaccgaggccattattt

SEQ ID NO: 85286 - DNA, 25 bp, Saccharomyces pastorianus
gatgacgcacgagttctgcaaacaa

SEQ ID NO: 85287 - DNA, 25 bp, Saccharomyces pastorianus
aaatgttgaatttggtgacctaggc

SEQ ID NO: 85288 - DNA, 25 bp, Saccharomyces pastorianus
gtgctagctgataatcctggattga

SEQ ID NO: 85289 - DNA, 25 bp, Saccharomyces pastorianus
aagccgccaatcgttgttgtcacaa

SEQ ID NO: 85290 - DNA, 25 bp, Saccharomyces pastorianus
ctaagggccctggagtgaggactat

SEQ ID NO: 85291 - DNA, 25 bp, Saccharomyces pastorianus
ggagcgatattgtcaacagtcttat

SEQ ID NO: 85292 - DNA, 25 bp, Saccharomyces pastorianus
ggactataatttcacatcccgatac

SEQ ID NO: 85293 - DNA, 25 bp, Saccharomyces pastorianus
ttggatcaacatttctgggtagctc

SEQ ID NO: 85294 - DNA, 25 bp, Saccharomyces pastorianus
tctgggtagctcaggcaccgaagtt

SEQ ID NO: 85295 - DNA, 25 bp, Saccharomyces pastorianus
ttaaacgacagggtaagccgccaat

SEQ ID NO: 85296 - DNA, 25 bp, Saccharomyces pastorianus
tgtagactacgcaatttgtccaata

SEQ ID NO: 85297 - DNA, 25 bp, Saccharomyces pastorianus
acttatgctcaatcgctcgacgcga

SEQ ID NO: 85298 - DNA, 25 bp, Saccharomyces pastorianus
cgacgcgagagtatctaagggccct

SEQ ID NO: 85299 - DNA, 25 bp, Saccharomyces pastorianus
ggaagtcgaattgccattggaagat

SEQ ID NO: 85300 - DNA, 25 bp, Saccharomyces pastorianus
gtattgtgactccatgggcagacca

SEQ ID NO: 85301 - DNA, 25 bp, Saccharomyces pastorianus
gaagctgccttagtggttaatatta

SEQ ID NO: 85302 - DNA, 25 bp, Saccharomyces pastorianus
tgaaggaatcccaattgccaagaat

SEQ ID NO: 85303 - DNA, 25 bp, Saccharomyces pastorianus
gttaatattactcaccacgaattgg

SEQ ID NO: 85304 - DNA, 25 bp, Saccharomyces pastorianus
ccaccagccaccattgaaactttta

SEQ ID NO: 85305 - DNA, 25 bp, Saccharomyces pastorianus
acgtaaaatgatgtccttccaggca

SEQ ID NO: 85306 - DNA, 25 bp, Saccharomyces pastorianus
gaattggttccaaagcatatcagat

SEQ ID NO: 85307 - DNA, 25 bp, Saccharomyces pastorianus
atgagccttccgttggtgtaaagac

SEQ ID NO: 85308 - DNA, 25 bp, Saccharomyces pastorianus
gtccttccaggcaaatccaacagaa

SEQ ID NO: 85309 - DNA, 25 bp, Saccharomyces pastorianus
tcaaagttcccagacatgggctcct

SEQ ID NO: 85310 - DNA, 25 bp, Saccharomyces pastorianus
gcattaattatgtaccccacgcaag

SEQ ID NO: 85311 - DNA, 25 bp, Saccharomyces pastorianus
gggccgcaagaacgcttcaaaaaag

SEQ ID NO: 85312 - DNA, 25 bp, Saccharomyces pastorianus
tcagccgcaacatttgccaatcaaa

SEQ ID NO: 85313 - DNA, 25 bp, Saccharomyces pastorianus
gagtcgccagatgtaccattgttcg

SEQ ID NO: 85314 - DNA, 25 bp, Saccharomyces pastorianus
gacctagttttggaagggccgcaag

SEQ ID NO: 85315 - DNA, 25 bp, Saccharomyces pastorianus
gtgcaagaacttgttgacctagttt

SEQ ID NO: 85316 - DNA, 25 bp, Saccharomyces pastorianus
atcaaaactcactctccagtagagt

SEQ ID NO: 85317 - DNA, 25 bp, Saccharomyces pastorianus
gaaactgacatttcacgatatcttg

SEQ ID NO: 85318 - DNA, 25 bp, Saccharomyces pastorianus
gtaccccacgcaagatgaatttgat

SEQ ID NO: 85319 - DNA, 25 bp, Saccharomyces pastorianus
aaggctagaagacccaatggatttt

SEQ ID NO: 85320 - DNA, 25 bp, Saccharomyces pastorianus
tcaattgatctatcccgcattaatt

SEQ ID NO: 85321 - DNA, 25 bp, Saccharomyces pastorianus
atcggcttacaaaccttcaattact

SEQ ID NO: 85322 - DNA, 25 bp, Saccharomyces pastorianus
gaggctagcgtaactttagcggcat

SEQ ID NO: 85323 - DNA, 25 bp, Saccharomyces pastorianus
gaatctttggctcctttcgataatc

SEQ ID NO: 85324 - DNA, 25 bp, Saccharomyces pastorianus
gatagcctctgtcaatgattcttta

SEQ ID NO: 85325 - DNA, 25 bp, Saccharomyces pastorianus
gtaccgacaatgtattggccacaat

SEQ ID NO: 85326 - DNA, 25 bp, Saccharomyces pastorianus
aatgtgaccccaaagatagcctctg

SEQ ID NO: 85327 - DNA, 25 bp, Saccharomyces pastorianus
atattgctgacatctccaagccaga

SEQ ID NO: 85328 - DNA, 25 bp, Saccharomyces pastorianus
aactatctttggaccaattccgcct

SEQ ID NO: 85329 - DNA, 25 bp, Saccharomyces pastorianus
tgaaattttcccaaatcctaggcta

SEQ ID NO: 85330 - DNA, 25 bp, Saccharomyces pastorianus
cgcctttgcacaccgatgaaatttt

SEQ ID NO: 85331 - DNA, 25 bp, Saccharomyces pastorianus
catgggctaaatccccgtatttgca

SEQ ID NO: 85332 - DNA, 25 bp, Saccharomyces pastorianus
tcactggtcgcgctaggcaaataca

SEQ ID NO: 85333 - DNA, 25 bp, Saccharomyces pastorianus
gaaatttaattaccagtgtctcact

SEQ ID NO: 85334 - DNA, 25 bp, Saccharomyces pastorianus
attcaggtgttgtttgcattgcttt

SEQ ID NO: 85335 - DNA, 25 bp, Saccharomyces pastorianus
tgcattgctttgaattgcccgaaat

SEQ ID NO: 85336 - DNA, 25 bp, Saccharomyces pastorianus
aactcatttccaaatctggctgttt

SEQ ID NO: 85337 - DNA, 25 bp, Saccharomyces pastorianus
gtttgccggttgtgatgttgatgat

SEQ ID NO: 85338 - DNA, 25 bp, Saccharomyces pastorianus
gtcttttgactgattactctctacc

SEQ ID NO: 85339 - DNA, 25 bp, Saccharomyces pastorianus
gattgtctttaaattcctgtcgtct

SEQ ID NO: 85340 - DNA, 25 bp, Saccharomyces pastorianus
aactttttactcagactatcacaga

SEQ ID NO: 85341 - DNA, 25 bp, Saccharomyces pastorianus
acattggcagacataggcgtggaaa

SEQ ID NO: 85342 - DNA, 25 bp, Saccharomyces pastorianus
gaggattaactccttggttgcctta

SEQ ID NO: 85343 - DNA, 25 bp, Saccharomyces pastorianus
aagggtattgcatactgccactcac

SEQ ID NO: 85344 - DNA, 25 bp, Saccharomyces pastorianus
ggaccaaccgttaggagctgatatt

SEQ ID NO: 85345 - DNA, 25 bp, Saccharomyces pastorianus
atttgttggacaaactcctcgcgta

SEQ ID NO: 85346 - DNA, 25 bp, Saccharomyces pastorianus
ttgcctgatttcaagccaagctttc

SEQ ID NO: 85347 - DNA, 25 bp, Saccharomyces pastorianus
tacaggtgtcgatacatggtccatc

SEQ ID NO: 85348 - DNA, 25 bp, Saccharomyces pastorianus
ggtaccaagtctagatccacgcggt

SEQ ID NO: 85349 - DNA, 25 bp, Saccharomyces pastorianus
tagcgcgtgcttttggtgttccgtt

SEQ ID NO: 85350 - DNA, 25 bp, Saccharomyces pastorianus
aactcctcgcgtatgaccctattaa

SEQ ID NO: 85351 - DNA, 25 bp, Saccharomyces pastorianus
actaggtgattttggcttagcgcgt

SEQ ID NO: 85352 - DNA, 25 bp, Saccharomyces pastorianus
cacaccgtattctgcatcgtgattt

SEQ ID NO: 85353 - DNA, 25 bp, Saccharomyces pastorianus
gttccgttgagagcttacacacatg

SEQ ID NO: 85354 - DNA, 25 bp, Saccharomyces pastorianus
agagatggtctaatacggccgaaaa

SEQ ID NO: 85355 - DNA, 25 bp, Saccharomyces pastorianus
aaagaggcggaatcctactcgtcac

SEQ ID NO: 85356 - DNA, 25 bp, Saccharomyces pastorianus
gctgtgctcgggaccatttaacaac

SEQ ID NO: 85357 - DNA, 25 bp, Saccharomyces pastorianus
acattttatacttggctgtgctcgg

SEQ ID NO: 85358 - DNA, 25 bp, Saccharomyces pastorianus
tacgggccccttattcattagtgtg

SEQ ID NO: 85359 - DNA, 25 bp, Saccharomyces pastorianus
tatgacaatcatgggctctacgggc

SEQ ID NO: 85360 - DNA, 25 bp, Saccharomyces pastorianus
aatatctaaaggttcctcctggcat

SEQ ID NO: 85361 - DNA, 25 bp, Saccharomyces pastorianus
ccggattcatttttggctttttcat

SEQ ID NO: 85362 - DNA, 25 bp, Saccharomyces pastorianus
atgtgatgggctctgttccaaggca

SEQ ID NO: 85363 - DNA, 25 bp, Saccharomyces pastorianus
ctacgacagcgttttccttgatata

SEQ ID NO: 85364 - DNA, 25 bp, Saccharomyces pastorianus
aatcatatcttgtcttgcgtggtta

SEQ ID NO: 85365 - DNA, 25 bp, Saccharomyces pastorianus
tccgctcaagcttttggtgatgtca

SEQ ID NO: 85366 - DNA, 25 bp, Saccharomyces pastorianus
attaatctcacacatccatgacggc

SEQ ID NO: 85367 - DNA, 25 bp, Saccharomyces pastorianus
gatggtactttaaaggctgccgtaa

SEQ ID NO: 85368 - DNA, 25 bp, Saccharomyces pastorianus
tatgccaagtgacaccagcggttct

SEQ ID NO: 85369 - DNA, 25 bp, Saccharomyces pastorianus
tcgtcttcgaattttctatgccaag

SEQ ID NO: 85370 - DNA, 25 bp, Saccharomyces pastorianus
gattacttcgagagaccaactgatg

SEQ ID NO: 85371 - DNA, 25 bp, Saccharomyces pastorianus
gttcgaaattttgaccgctggttct

SEQ ID NO: 85372 - DNA, 25 bp, Saccharomyces pastorianus
atctcttttgctgcttcagatggtg

SEQ ID NO: 85373 - DNA, 25 bp, Saccharomyces pastorianus
ggctgccgtaatctttaattcgagt

SEQ ID NO: 85374 - DNA, 25 bp, Saccharomyces pastorianus
cagcggttctgcctacaatcaagat

SEQ ID NO: 85375 - DNA, 25 bp, Saccharomyces pastorianus
gaaggtattcctgcctatcatgggt

SEQ ID NO: 85376 - DNA, 25 bp, Saccharomyces pastorianus
cgcacctgtgatatccaaaacttgg

SEQ ID NO: 85377 - DNA, 25 bp, Saccharomyces pastorianus
gaaaaccgcacctgtgatatccaaa

SEQ ID NO: 85378 - DNA, 25 bp, Saccharomyces pastorianus
gttgggtattcttctgtttcttctc

SEQ ID NO: 85379 - DNA, 25 bp, Saccharomyces pastorianus
ggcaaaactgagaaaaccgcacctg

SEQ ID NO: 85380 - DNA, 25 bp, Saccharomyces pastorianus
ctgtgatatccaaaacttggttggg

SEQ ID NO: 85381 - DNA, 25 bp, Saccharomyces pastorianus
cttggttgggtattcttctgtttct

SEQ ID NO: 85382 - DNA, 25 bp, Saccharomyces pastorianus
accgcacctgtgatatccaaaactt

SEQ ID NO: 85383 - DNA, 25 bp, Saccharomyces pastorianus
aaactgagaaaaccgcacctgtgat

SEQ ID NO: 85384 - DNA, 25 bp, Saccharomyces pastorianus
gggtattcttctgtttcttctcgta

SEQ ID NO: 85385 - DNA, 25 bp, Saccharomyces pastorianus
tattcttctgtttcttctcgtaggt

SEQ ID NO: 85386 - DNA, 25 bp, Saccharomyces pastorianus
tcttctgtttcttctcgtaggtggt

SEQ ID NO: 85387 - DNA, 25 bp, Saccharomyces pastorianus
atatggccgcgttcaatgatttgct

SEQ ID NO: 85388 - DNA, 25 bp, Saccharomyces pastorianus
atgcgcccataaatcctaccaagat

SEQ ID NO: 85389 - DNA, 25 bp, Saccharomyces pastorianus
gataccttgaaactgggaacccatg

SEQ ID NO: 85390 - DNA, 25 bp, Saccharomyces pastorianus
caaacccactcttcgctaatgatgt

SEQ ID NO: 85391 - DNA, 25 bp, Saccharomyces pastorianus
gaacccatgcccatgattctgcaat

SEQ ID NO: 85392 - DNA, 25 bp, Saccharomyces pastorianus
tttgcggcaaggttatcacagatct

SEQ ID NO: 85393 - DNA, 25 bp, Saccharomyces pastorianus
gtgaagaacctcctgtacggactac

SEQ ID NO: 85394 - DNA, 25 bp, Saccharomyces pastorianus
aatttccacaatatcatcttcccat

SEQ ID NO: 85395 - DNA, 25 bp, Saccharomyces pastorianus
gtgactacagacacgtttgttcttg

SEQ ID NO: 85396 - DNA, 25 bp, Saccharomyces pastorianus
agatatgcatccaattgagcctact

SEQ ID NO: 85397 - DNA, 25 bp, Saccharomyces pastorianus
gatagaggtcccacatcttttaacg

SEQ ID NO: 85398 - DNA, 25 bp, Saccharomyces pastorianus
cactgctgcagttattttcgttgtt

SEQ ID NO: 85399 - DNA, 25 bp, Saccharomyces pastorianus
gcgtatattgattctgggtttggat

SEQ ID NO: 85400 - DNA, 25 bp, Saccharomyces pastorianus
tggtctatcgtagcatccagtgcaa

SEQ ID NO: 85401 - DNA, 25 bp, Saccharomyces pastorianus
gtctacagcctctaaggaacttcat

SEQ ID NO: 85402 - DNA, 25 bp, Saccharomyces pastorianus
gcagcactgctggtttttgcaaata

SEQ ID NO: 85403 - DNA, 25 bp, Saccharomyces pastorianus
ggtggtcaaacaagtatcaggccct

SEQ ID NO: 85404 - DNA, 25 bp, Saccharomyces pastorianus
caaattggcgaagtagtcactacaa

SEQ ID NO: 85405 - DNA, 25 bp, Saccharomyces pastorianus
aacgtctgggatcttggtggtcaaa

SEQ ID NO: 85406 - DNA, 25 bp, Saccharomyces pastorianus
atcaggccctactggaggtgttatt

SEQ ID NO: 85407 - DNA, 25 bp, Saccharomyces pastorianus
gaccaaccgggtgcattaagtgcca

SEQ ID NO: 85408 - DNA, 25 bp, Saccharomyces pastorianus
taagtgccagtgaagtctccaaaga

SEQ ID NO: 85409 - DNA, 25 bp, Saccharomyces pastorianus
gaatttatgtcctcttacaatgctc

SEQ ID NO: 85410 - DNA, 25 bp, Saccharomyces pastorianus
gaacggtttcgatgacacacttaaa

SEQ ID NO: 85411 - DNA, 25 bp, Saccharomyces pastorianus
ggatttacttttccacatatggcaa

SEQ ID NO: 85412 - DNA, 25 bp, Saccharomyces pastorianus
tggcaaccgctttttcatattcaag

SEQ ID NO: 85413 - DNA, 25 bp, Saccharomyces pastorianus
ttacaatgctcaaagccacaccttt

SEQ ID NO: 85414 - DNA, 25 bp, Saccharomyces pastorianus
gtattcatccggtcgtaagttctaa

SEQ ID NO: 85415 - DNA, 25 bp, Saccharomyces pastorianus
gcaagaacccttatactaacagtag

SEQ ID NO: 85416 - DNA, 25 bp, Saccharomyces pastorianus
aggtcaagaacgttggcatgtccag

SEQ ID NO: 85417 - DNA, 25 bp, Saccharomyces pastorianus
acttacagtattcaccgtcaacggt

SEQ ID NO: 85418 - DNA, 25 bp, Saccharomyces pastorianus
ggacacatgactacaatgctatcga

SEQ ID NO: 85419 - DNA, 25 bp, Saccharomyces pastorianus
tattttccggaactgataggtacac

SEQ ID NO: 85420 - DNA, 25 bp, Saccharomyces pastorianus
ggagctcggttgtttcttttgccaa

SEQ ID NO: 85421 - DNA, 25 bp, Saccharomyces pastorianus
aaattcttcaatatgcaaccagtgc

SEQ ID NO: 85422 - DNA, 25 bp, Saccharomyces pastorianus
ggcgattgttgattcgtggtttcaa

SEQ ID NO: 85423 - DNA, 25 bp, Saccharomyces pastorianus
gatcatatgatttgttcgacgccat

SEQ ID NO: 85424 - DNA, 25 bp, Saccharomyces pastorianus
aaaccattctgagtcattctagtga

SEQ ID NO: 85425 - DNA, 25 bp, Saccharomyces pastorianus
cagaggctaatctcattggcaacga

SEQ ID NO: 85426 - DNA, 25 bp, Saccharomyces pastorianus
agcatactggtctcttactattgga

SEQ ID NO: 85427 - DNA, 25 bp, Saccharomyces pastorianus
ttcctgggtgtgtccgaatatcttt

SEQ ID NO: 85428 - DNA, 25 bp, Saccharomyces pastorianus
gtgccgaattcacatttatcattgt

SEQ ID NO: 85429 - DNA, 25 bp, Saccharomyces pastorianus
gcaacaattgcaagccagtgccgaa

SEQ ID NO: 85430 - DNA, 25 bp, Saccharomyces pastorianus
taacaaacccaagtgcacatcagca

SEQ ID NO: 85431 - DNA, 25 bp, Saccharomyces pastorianus
gggtgatgaccacattcatattcta

SEQ ID NO: 85432 - DNA, 25 bp, Saccharomyces pastorianus
aaggctactttggaggtttactgct

SEQ ID NO: 85433 - DNA, 25 bp, Saccharomyces pastorianus
ctttatctcaaggacgtgcaatcac

SEQ ID NO: 85434 - DNA, 25 bp, Saccharomyces pastorianus
ttaaccatgaggagttgtttgcccc

SEQ ID NO: 85435 - DNA, 25 bp, Saccharomyces pastorianus
ggtttactgctgttaggaatttcta

SEQ ID NO: 85436 - DNA, 25 bp, Saccharomyces pastorianus
gattttttattattaccggcttgat

SEQ ID NO: 85437 - DNA, 25 bp, Saccharomyces pastorianus
tattctacagcttctacttaatgag

SEQ ID NO: 85438 - DNA, 25 bp, Saccharomyces pastorianus
gtattgcctaaactacttcgggaca

SEQ ID NO: 85439 - DNA, 25 bp, Saccharomyces pastorianus
gtgcaatcacggtgccactggtaga

SEQ ID NO: 85440 - DNA, 25 bp, Saccharomyces pastorianus
gttttcaagctaccttaaggctact

SEQ ID NO: 85441 - DNA, 25 bp, Saccharomyces pastorianus
gtgccactggtagaggtattgccta

SEQ ID NO: 85442 - DNA, 25 bp, Saccharomyces pastorianus
aagggcacgcgctgcaagtgatgat

SEQ ID NO: 85443 - DNA, 25 bp, Saccharomyces pastorianus
ttagttgccgaaaccgaggatcgca

SEQ ID NO: 85444 - DNA, 25 bp, Saccharomyces pastorianus
aacattcgcgctaaacccggttgag

SEQ ID NO: 85445 - DNA, 25 bp, Saccharomyces pastorianus
agagccagtgcctttaccggaagac

SEQ ID NO: 85446 - DNA, 25 bp, Saccharomyces pastorianus
tatatttatacccttcgtgccaaac

SEQ ID NO: 85447 - DNA, 25 bp, Saccharomyces pastorianus
tattacggttcaagagccagtgcct

SEQ ID NO: 85448 - DNA, 25 bp, Saccharomyces pastorianus
ggcttgcatattatcgagaacgctt

SEQ ID NO: 85449 - DNA, 25 bp, Saccharomyces pastorianus
tgaatactccgattttgcgtctgac

SEQ ID NO: 85450 - DNA, 25 bp, Saccharomyces pastorianus
gatgccgagccccagtttaaagaag

SEQ ID NO: 85451 - DNA, 25 bp, Saccharomyces pastorianus
gaagacgcaccagaagatgccgagc

SEQ ID NO: 85452 - DNA, 25 bp, Saccharomyces pastorianus
gtgccaaactcgatgatgaatactc

SEQ ID NO: 85453 - DNA, 25 bp, Saccharomyces pastorianus
tcatgggttcccgaataccgatacg

SEQ ID NO: 85454 - DNA, 25 bp, Saccharomyces pastorianus
gttccaccggatttccatggagcaa

SEQ ID NO: 85455 - DNA, 25 bp, Saccharomyces pastorianus
gcagatactctctccagacgaatgg

SEQ ID NO: 85456 - DNA, 25 bp, Saccharomyces pastorianus
atttcgagctaccaagtatccacag

SEQ ID NO: 85457 - DNA, 25 bp, Saccharomyces pastorianus
tgcgaagcctgcatttccagtagac

SEQ ID NO: 85458 - DNA, 25 bp, Saccharomyces pastorianus
ttagtgacgctgactcatgggttcc

SEQ ID NO: 85459 - DNA, 25 bp, Saccharomyces pastorianus
tcgaaattcgttagttccaccggat

SEQ ID NO: 85460 - DNA, 25 bp, Saccharomyces pastorianus
taaattctctgcagatactctctcc

SEQ ID NO: 85461 - DNA, 25 bp, Saccharomyces pastorianus
tgaacaaggttttttctcttccaag

SEQ ID NO: 85462 - DNA, 25 bp, Saccharomyces pastorianus
taagtgggtccacatttccttcaat

SEQ ID NO: 85463 - DNA, 25 bp, Saccharomyces pastorianus
aaaacttgtctcatcggctggttgg

SEQ ID NO: 85464 - DNA, 25 bp, Saccharomyces pastorianus
tcaagctctctctagacgttatcaa

SEQ ID NO: 85465 - DNA, 25 bp, Saccharomyces pastorianus
atatttgacgaaaacgatgcccatg

SEQ ID NO: 85466 - DNA, 25 bp, Saccharomyces pastorianus
aaggccgctttattgaacagaggag

SEQ ID NO: 85467 - DNA, 25 bp, Saccharomyces pastorianus
cacgagaaggtgttgaaggccgctt

SEQ ID NO: 85468 - DNA, 25 bp, Saccharomyces pastorianus
gagttggctcctcagataaaccttc

SEQ ID NO: 85469 - DNA, 25 bp, Saccharomyces pastorianus
gtgagcaaccatccatatttgacga

SEQ ID NO: 85470 - DNA, 25 bp, Saccharomyces pastorianus
cgatgcccatgatctgtatttccaa

SEQ ID NO: 85471 - DNA, 25 bp, Saccharomyces pastorianus
gtgtcccttgtgatgtttgcttcaa

SEQ ID NO: 85472 - DNA, 25 bp, Saccharomyces pastorianus
ctgaaagattgcaaccgggctgggt

SEQ ID NO: 85473 - DNA, 25 bp, Saccharomyces pastorianus
cgggctgggttcaattgttcgttat

SEQ ID NO: 85474 - DNA, 25 bp, Saccharomyces pastorianus
tatgtctttattctggtggtgtccc

SEQ ID NO: 85475 - DNA, 25 bp, Saccharomyces pastorianus
gtttctccccggcaagaatttatca

SEQ ID NO: 85476 - DNA, 25 bp, Saccharomyces pastorianus
tagcatgaacaatgtttctccccgg

SEQ ID NO: 85477 - DNA, 25 bp, Saccharomyces pastorianus
aaacaagtaaagtccgcaccctctg

SEQ ID NO: 85478 - DNA, 25 bp, Saccharomyces pastorianus
gcatctactaccacatcttcttgga

SEQ ID NO: 85479 - DNA, 25 bp, Saccharomyces pastorianus
aaggttcagagttcttccaaacaag

SEQ ID NO: 85480 - DNA, 25 bp, Saccharomyces pastorianus
caccactacctttgctagcatgaac

SEQ ID NO: 85481 - DNA, 25 bp, Saccharomyces pastorianus
tgatgacgacggctgggaattccaa

SEQ ID NO: 85482 - DNA, 25 bp, Saccharomyces pastorianus
tcttcttggactacggtgacttcta

SEQ ID NO: 85483 - DNA, 25 bp, Saccharomyces pastorianus
tataggaaccgttgtctccccatat

SEQ ID NO: 85484 - DNA, 25 bp, Saccharomyces pastorianus
gaagcgctagctctatcaggcaatg

SEQ ID NO: 85485 - DNA, 25 bp, Saccharomyces pastorianus
gggatgaaagagtcgtctccgttaa

SEQ ID NO: 85486 - DNA, 25 bp, Saccharomyces pastorianus
agtgtttgtgatacagttcgtctgt

SEQ ID NO: 85487 - DNA, 25 bp, Saccharomyces pastorianus
tagctatgcactgtccatctggaga

SEQ ID NO: 85488 - DNA, 25 bp, Saccharomyces pastorianus
taactctgagaaaggcctggcatgt

SEQ ID NO: 85489 - DNA, 25 bp, Saccharomyces pastorianus
atctggagaccagcataactctgag

SEQ ID NO: 85490 - DNA, 25 bp, Saccharomyces pastorianus
aaatcatccgatgcagtagctatgc

SEQ ID NO: 85491 - DNA, 25 bp, Saccharomyces pastorianus
aaattttcgcacaggtagctttcaa

SEQ ID NO: 85492 - DNA, 25 bp, Saccharomyces pastorianus
aggcctggcatgtgatgtgactagt

SEQ ID NO: 85493 - DNA, 25 bp, Saccharomyces pastorianus
actgcccatcaggagaaattttcgc

SEQ ID NO: 85494 - DNA, 25 bp, Saccharomyces pastorianus
agctttcaatccattctgtgtttcc

SEQ ID NO: 85495 - DNA, 25 bp, Saccharomyces pastorianus
gttcgtctgttaatgtcgtatatca

SEQ ID NO: 85496 - DNA, 25 bp, Saccharomyces pastorianus
gctagcatataatggccacttgcaa

SEQ ID NO: 85497 - DNA, 25 bp, Saccharomyces pastorianus
aaaagcctcttacagttgctcgatg

SEQ ID NO: 85498 - DNA, 25 bp, Saccharomyces pastorianus
gggaacttgctgtttacatcctcaa

SEQ ID NO: 85499 - DNA, 25 bp, Saccharomyces pastorianus
atcattcctgcggtatggacttctt

SEQ ID NO: 85500 - DNA, 25 bp, Saccharomyces pastorianus
gggacacactgaacgggtctttgat

SEQ ID NO: 85501 - DNA, 25 bp, Saccharomyces pastorianus
gggttgtgtagttcgtactttccag

SEQ ID NO: 85502 - DNA, 25 bp, Saccharomyces pastorianus
agagacgggccattgtttgaagaca

SEQ ID NO: 85503 - DNA, 25 bp, Saccharomyces pastorianus
tcggtaatataatgtgttcccttgc

SEQ ID NO: 85504 - DNA, 25 bp, Saccharomyces pastorianus
gttgctcgatggttctttatatcat

SEQ ID NO: 85505 - DNA, 25 bp, Saccharomyces pastorianus
aaatggtgtggtacccatctcccaa

SEQ ID NO: 85506 - DNA, 25 bp, Saccharomyces pastorianus
aaaagggcgtactgcatcattcctg

SEQ ID NO: 85507 - DNA, 25 bp, Saccharomyces pastorianus
ttgtgtcggtggacgtacccatgaa

SEQ ID NO: 85508 - DNA, 25 bp, Saccharomyces pastorianus
aaaattggctgttggtctatcctga

SEQ ID NO: 85509 - DNA, 25 bp, Saccharomyces pastorianus
ggtagacatgccattcggtacgttt

SEQ ID NO: 85510 - DNA, 25 bp, Saccharomyces pastorianus
atgcaaggcgattctgtcccaaaat

SEQ ID NO: 85511 - DNA, 25 bp, Saccharomyces pastorianus
gggtatacctgttatggctcatata

SEQ ID NO: 85512 - DNA, 25 bp, Saccharomyces pastorianus
gaatcgggcatatctgatggcttga

SEQ ID NO: 85513 - DNA, 25 bp, Saccharomyces pastorianus
tttattgaagaactgtgctcccggg

SEQ ID NO: 85514 - DNA, 25 bp, Saccharomyces pastorianus
gacagatattgccactcagggcttg

SEQ ID NO: 85515 - DNA, 25 bp, Saccharomyces pastorianus
ggagctgtatgaaaccgccatgcaa

SEQ ID NO: 85516 - DNA, 25 bp, Saccharomyces pastorianus
gtctatcctgattgaatgtgtcccc

SEQ ID NO: 85517 - DNA, 25 bp, Saccharomyces pastorianus
gttgaagtcggttcttacaccaaag

SEQ ID NO: 85518 - DNA, 25 bp, Saccharomyces pastorianus
tatatctgaccttctcgggatgcaa

SEQ ID NO: 85519 - DNA, 25 bp, Saccharomyces pastorianus
gatgaagtgtatactgcgcctgctt

SEQ ID NO: 85520 - DNA, 25 bp, Saccharomyces pastorianus
gctactttgtgcaatccttgggatc

SEQ ID NO: 85521 - DNA, 25 bp, Saccharomyces pastorianus
tccatctttctatatgttcacgcct

SEQ ID NO: 85522 - DNA, 25 bp, Saccharomyces pastorianus
ataaatcacctttatccgcagctgc

SEQ ID NO: 85523 - DNA, 25 bp, Saccharomyces pastorianus
ggatgctcttttggtgctacgatgc

SEQ ID NO: 85524 - DNA, 25 bp, Saccharomyces pastorianus
ctgctttaggcttcccaaatgctat

SEQ ID NO: 85525 - DNA, 25 bp, Saccharomyces pastorianus
ggatgatcctgttgtcggcccagat

SEQ ID NO: 85526 - DNA, 25 bp, Saccharomyces pastorianus
ttcctacccttgttatcaattccag

SEQ ID NO: 85527 - DNA, 25 bp, Saccharomyces pastorianus
agacaacaactcgtgggctaccaag

SEQ ID NO: 85528 - DNA, 25 bp, Saccharomyces pastorianus
gggatcttctcctttcagcaattag

SEQ ID NO: 85529 - DNA, 25 bp, Saccharomyces pastorianus
gatacaattcaggttcctacccttg

SEQ ID NO: 85530 - DNA, 25 bp, Saccharomyces pastorianus
tgtcacagaaccactgccggatata

SEQ ID NO: 85531 - DNA, 25 bp, Saccharomyces pastorianus
atcaaaaattcccactctaacgctg

SEQ ID NO: 85532 - DNA, 25 bp, Saccharomyces pastorianus
agaagttatcagttccggttatagt

SEQ ID NO: 85533 - DNA, 25 bp, Saccharomyces pastorianus
attatcgtcgtggagctcactcaag

SEQ ID NO: 85534 - DNA, 25 bp, Saccharomyces pastorianus
ccccgtgccttaccaatgaatcttt

SEQ ID NO: 85535 - DNA, 25 bp, Saccharomyces pastorianus
tctatacgaaggaaccgtggctcaa

SEQ ID NO: 85536 - DNA, 25 bp, Saccharomyces pastorianus
actctaacgctgtactttctaggaa

SEQ ID NO: 85537 - DNA, 25 bp, Saccharomyces pastorianus
taagctggcagaaacctgtcacaga

SEQ ID NO: 85538 - DNA, 25 bp, Saccharomyces pastorianus
ctaacgagggtcagattggcctaat

SEQ ID NO: 85539 - DNA, 25 bp, Saccharomyces pastorianus
gtgtacctacacgtgaaattctaag

SEQ ID NO: 85540 - DNA, 25 bp, Saccharomyces pastorianus
tacgtatttaatccatgacctcccc

SEQ ID NO: 85541 - DNA, 25 bp, Saccharomyces pastorianus
atgcgttcagtgtcacgttttcgta

SEQ ID NO: 85542 - DNA, 25 bp, Saccharomyces pastorianus
tgttctccagttactatgcgttcag

SEQ ID NO: 85543 - DNA, 25 bp, Saccharomyces pastorianus
tcccggcagagtttcgtttattact

SEQ ID NO: 85544 - DNA, 25 bp, Saccharomyces pastorianus
tctcactgcctttggtatgacctgg

SEQ ID NO: 85545 - DNA, 25 bp, Saccharomyces pastorianus
tacggatgggcaatcttctttcatt

SEQ ID NO: 85546 - DNA, 25 bp, Saccharomyces pastorianus
gctgccattagttccgttatcattt

SEQ ID NO: 85547 - DNA, 25 bp, Saccharomyces pastorianus
gttactccccaaaagagctgctgga

SEQ ID NO: 85548 - DNA, 25 bp, Saccharomyces pastorianus
tgtctgcccaggtgtagccatgtta

SEQ ID NO: 85549 - DNA, 25 bp, Saccharomyces pastorianus
tacagctctgtaacgcaatgggaat

SEQ ID NO: 85550 - DNA, 25 bp, Saccharomyces pastorianus
gctaggtctctgcagttcaatttca

SEQ ID NO: 85551 - DNA, 25 bp, Saccharomyces pastorianus
gtttctttcgaaatgtgggcgctgc

SEQ ID NO: 85552 - DNA, 25 bp, Saccharomyces pastorianus
aaggtccagctccagtgcaggcgat

SEQ ID NO: 85553 - DNA, 25 bp, Saccharomyces pastorianus
attctttctgaaaccgccaattgga

SEQ ID NO: 85554 - DNA, 25 bp, Saccharomyces pastorianus
atctattgtggtttttccttcctcg

SEQ ID NO: 85555 - DNA, 25 bp, Saccharomyces pastorianus
aagatacacccgacagttgctatat

SEQ ID NO: 85556 - DNA, 25 bp, Saccharomyces pastorianus
gcaatttgtacaggttattccggca

SEQ ID NO: 85557 - DNA, 25 bp, Saccharomyces pastorianus
gaggtcgccagcaatgtattcagga

SEQ ID NO: 85558 - DNA, 25 bp, Saccharomyces pastorianus
aggccacaaatgacgcttgccagag

SEQ ID NO: 85559 - DNA, 25 bp, Saccharomyces pastorianus
aaagccttcattgcctgcaagttta

SEQ ID NO: 85560 - DNA, 25 bp, Saccharomyces pastorianus
aaagcccgtcttcatctattgtggt

SEQ ID NO: 85561 - DNA, 25 bp, Saccharomyces pastorianus
gggcaatattccatcctttcaatcg

SEQ ID NO: 85562 - DNA, 25 bp, Saccharomyces pastorianus
ttcctcggtagctagttcaactttg

SEQ ID NO: 85563 - DNA, 25 bp, Saccharomyces pastorianus
gtattttggctttaccacttggtgt

SEQ ID NO: 85564 - DNA, 25 bp, Saccharomyces pastorianus
attcacttgaactatttggcccata

SEQ ID NO: 85565 - DNA, 25 bp, Saccharomyces pastorianus
aatctcaaggcttcaatggcgctcg

SEQ ID NO: 85566 - DNA, 25 bp, Saccharomyces pastorianus
gtcagctgcaattaccagttcatct

SEQ ID NO: 85567 - DNA, 25 bp, Saccharomyces pastorianus
tttaagggtcattacgctcaacgtc

SEQ ID NO: 85568 - DNA, 25 bp, Saccharomyces pastorianus
ggctacatttcgtggctacttgata

SEQ ID NO: 85569 - DNA, 25 bp, Saccharomyces pastorianus
acactattgttcgttctgggtgcac

SEQ ID NO: 85570 - DNA, 25 bp, Saccharomyces pastorianus
gggcgcaaaccctcaacaagatatt

SEQ ID NO: 85571 - DNA, 25 bp, Saccharomyces pastorianus
tgtactgcttgaaccacacggatgg

SEQ ID NO: 85572 - DNA, 25 bp, Saccharomyces pastorianus
ggcgcaattttgttcttatctggct

SEQ ID NO: 85573 - DNA, 25 bp, Saccharomyces pastorianus
atacgtccatgatccactagctaaa

SEQ ID NO: 85574 - DNA, 25 bp, Saccharomyces pastorianus
agaccgtgacgttgtagactatatt

SEQ ID NO: 85575 - DNA, 25 bp, Saccharomyces pastorianus
gattcccggaatgccgttagagcat

SEQ ID NO: 85576 - DNA, 25 bp, Saccharomyces pastorianus
gtcgcattgtttcgttttcaatcag

SEQ ID NO: 85577 - DNA, 25 bp, Saccharomyces pastorianus
cagttcctaaactagtctcagtgca

SEQ ID NO: 85578 - DNA, 25 bp, Saccharomyces pastorianus
tgggttcaggaagctctcgaggcta

SEQ ID NO: 85579 - DNA, 25 bp, Saccharomyces pastorianus
tgcccatcctctcattgttgcaaat

SEQ ID NO: 85580 - DNA, 25 bp, Saccharomyces pastorianus
tgaactctgttcaagtcgcattgtt

SEQ ID NO: 85581 - DNA, 25 bp, Saccharomyces pastorianus
taggtcccgtcaacttccaggtaat

SEQ ID NO: 85582 - DNA, 25 bp, Saccharomyces pastorianus
gtgcaaccaatcatgattcccggaa

SEQ ID NO: 85583 - DNA, 25 bp, Saccharomyces pastorianus
aaacacgtcgtttgctcataaaaat

SEQ ID NO: 85584 - DNA, 25 bp, Saccharomyces pastorianus
agactatattgcctttttgtgtgat

SEQ ID NO: 85585 - DNA, 25 bp, Saccharomyces pastorianus
gattcatctgatggctgctgcaacc

SEQ ID NO: 85586 - DNA, 25 bp, Saccharomyces pastorianus
tgcctcttatttgggttctgttgaa

SEQ ID NO: 85587 - DNA, 25 bp, Saccharomyces pastorianus
aagctgggaaaacatcggtccgaca

SEQ ID NO: 85588 - DNA, 25 bp, Saccharomyces pastorianus
tcggtccgacagtacaagaactctt

SEQ ID NO: 85589 - DNA, 25 bp, Saccharomyces pastorianus
tatccgcacgaagttgtcaggacga

SEQ ID NO: 85590 - DNA, 25 bp, Saccharomyces pastorianus
gtacaaagggttgagtgcctcttat

SEQ ID NO: 85591 - DNA, 25 bp, Saccharomyces pastorianus
atagtgggttgaccccgcatttgat

SEQ ID NO: 85592 - DNA, 25 bp, Saccharomyces pastorianus
agcgctggtcttgcaaaatttgtgg

SEQ ID NO: 85593 - DNA, 25 bp, Saccharomyces pastorianus
caaccgcaggttgggcaacggcgac

SEQ ID NO: 85594 - DNA, 25 bp, Saccharomyces pastorianus
gaaatgagggtttcaccggcttgta

SEQ ID NO: 85595 - DNA, 25 bp, Saccharomyces pastorianus
gctagtatagcaacatatccgcacg

SEQ ID NO: 85596 - DNA, 25 bp, Saccharomyces pastorianus
aattgggcgcgcactacgtttagaa

SEQ ID NO: 85597 - DNA, 25 bp, Saccharomyces pastorianus
ttggtcactacccttttgaggaaga

SEQ ID NO: 85598 - DNA, 25 bp, Saccharomyces pastorianus
aacacgcttcacttctagtacgaga

SEQ ID NO: 85599 - DNA, 25 bp, Saccharomyces pastorianus
tagactctacagtggtttacccttt

SEQ ID NO: 85600 - DNA, 25 bp, Saccharomyces pastorianus
atctggagtaactacagccttgcta

SEQ ID NO: 85601 - DNA, 25 bp, Saccharomyces pastorianus
taaatgtcacattatcccagctcgt

SEQ ID NO: 85602 - DNA, 25 bp, Saccharomyces pastorianus
gtgcgcatgcgtttggctcaattaa

SEQ ID NO: 85603 - DNA, 25 bp, Saccharomyces pastorianus
gaaatgtccaaagccgaactgccac

SEQ ID NO: 85604 - DNA, 25 bp, Saccharomyces pastorianus
gatagcaaaccttcgaaacctttca

SEQ ID NO: 85605 - DNA, 25 bp, Saccharomyces pastorianus
gatgttctaaagttcaccttcacag

SEQ ID NO: 85606 - DNA, 25 bp, Saccharomyces pastorianus
caggctttagatgccgtgcgcatgc

SEQ ID NO: 85607 - DNA, 25 bp, Saccharomyces pastorianus
ctggacactcactgggtcgtgaaaa

SEQ ID NO: 85608 - DNA, 25 bp, Saccharomyces pastorianus
ggcactgcaccatcacattacagaa

SEQ ID NO: 85609 - DNA, 25 bp, Saccharomyces pastorianus
taaagagggacagcttctgcagact

SEQ ID NO: 85610 - DNA, 25 bp, Saccharomyces pastorianus
gaactgaagttcaagccagactagg

SEQ ID NO: 85611 - DNA, 25 bp, Saccharomyces pastorianus
gaaatcaagttgaatcactttctag

SEQ ID NO: 85612 - DNA, 25 bp, Saccharomyces pastorianus
atataccttataatcctgccacttt

SEQ ID NO: 85613 - DNA, 25 bp, Saccharomyces pastorianus
aagagaacggtgaactcggtataag

SEQ ID NO: 85614 - DNA, 25 bp, Saccharomyces pastorianus
ctgccactttcaaaaggcgaactga

SEQ ID NO: 85615 - DNA, 25 bp, Saccharomyces pastorianus
gaagctgattctggacactcactgg

SEQ ID NO: 85616 - DNA, 25 bp, Saccharomyces pastorianus
ttccaaggttcaacgcccaaataag

SEQ ID NO: 85617 - DNA, 25 bp, Saccharomyces pastorianus
ggacagcttctgcagactgtatcaa

SEQ ID NO: 85618 - DNA, 25 bp, Saccharomyces pastorianus
aacgacatttcgtgggacgctcatg

SEQ ID NO: 85619 - DNA, 25 bp, Saccharomyces pastorianus
caaaagcccaatcgctaccatggag

SEQ ID NO: 85620 - DNA, 25 bp, Saccharomyces pastorianus
cctctttgctgcttgtactgaagga

SEQ ID NO: 85621 - DNA, 25 bp, Saccharomyces pastorianus
gggatacctcctgcgaagaaactat

SEQ ID NO: 85622 - DNA, 25 bp, Saccharomyces pastorianus
cgatactgtattggcaacggctggc

SEQ ID NO: 85623 - DNA, 25 bp, Saccharomyces pastorianus
atggagcacggtacttccgtttcaa

SEQ ID NO: 85624 - DNA, 25 bp, Saccharomyces pastorianus
ggacgctcatgacccttggttaatg

SEQ ID NO: 85625 - DNA, 25 bp, Saccharomyces pastorianus
tagtcaagctatgggatacctcctg

SEQ ID NO: 85626 - DNA, 25 bp, Saccharomyces pastorianus
gaaggaaatgcggtctcactattag

SEQ ID NO: 85627 - DNA, 25 bp, Saccharomyces pastorianus
aactctttaattctagcatctgcag

SEQ ID NO: 85628 - DNA, 25 bp, Saccharomyces pastorianus
tacccatggtggtcatatgctcggt

SEQ ID NO: 85629 - DNA, 25 bp, Saccharomyces pastorianus
atcttgtttggtgaaccagctacca

SEQ ID NO: 85630 - DNA, 25 bp, Saccharomyces pastorianus
ggcttcaaacttctttgctcaaacc

SEQ ID NO: 85631 - DNA, 25 bp, Saccharomyces pastorianus
ccagcctacttgcaacaattgtcaa

SEQ ID NO: 85632 - DNA, 25 bp, Saccharomyces pastorianus
tactctactggttctatcttgtttg

SEQ ID NO: 85633 - DNA, 25 bp, Saccharomyces pastorianus
ggtgccatttggaatatcaactctt

SEQ ID NO: 85634 - DNA, 25 bp, Saccharomyces pastorianus
aagtcttggctaaagtcattggcaa

SEQ ID NO: 85635 - DNA, 25 bp, Saccharomyces pastorianus
aacgtgtttactgactactctactg

SEQ ID NO: 85636 - DNA, 25 bp, Saccharomyces pastorianus
aggaattggacaactcctccaccat

SEQ ID NO: 85637 - DNA, 25 bp, Saccharomyces pastorianus
gattccatctgatttcatcttagct

SEQ ID NO: 85638 - DNA, 25 bp, Saccharomyces pastorianus
atcttagctgctcaatctcataacc

SEQ ID NO: 85639 - DNA, 25 bp, Saccharomyces pastorianus
accatttctactcacgatgcttcca

SEQ ID NO: 85640 - DNA, 25 bp, Saccharomyces pastorianus
atgtcccgtgtctatatatatccat

SEQ ID NO: 85641 - DNA, 25 bp, Saccharomyces pastorianus
gtcccgtgtctatatatatccattg

SEQ ID NO: 85642 - DNA, 25 bp, Saccharomyces pastorianus
attttcttgctattgaaatgagcgt

SEQ ID NO: 85643 - DNA, 25 bp, Saccharomyces pastorianus
gacggtattctattttcttgctatt

SEQ ID NO: 85644 - DNA, 25 bp, Saccharomyces pastorianus
tgaaatgagcgttttttgttactac

SEQ ID NO: 85645 - DNA, 25 bp, Saccharomyces pastorianus
cggtattctattttcttgctattga

SEQ ID NO: 85646 - DNA, 25 bp, Saccharomyces pastorianus
ctacgattggttttacagacggaat

SEQ ID NO: 85647 - DNA, 25 bp, Saccharomyces pastorianus
ttgacggtattctattttcttgcta

SEQ ID NO: 85648 - DNA, 25 bp, Saccharomyces pastorianus
gagcgttttttgttactacgattgg

SEQ ID NO: 85649 - DNA, 25 bp, Saccharomyces pastorianus
gtctatatatatccattgacggtat

SEQ ID NO: 85650 - DNA, 25 bp, Saccharomyces pastorianus
tatccattgacggtattctattttc

SEQ ID NO: 85651 - DNA, 25 bp, Saccharomyces pastorianus
ctacgccaagactattttattctca

SEQ ID NO: 85652 - DNA, 25 bp, Saccharomyces pastorianus
tactgaagaaggcatactacgccaa

SEQ ID NO: 85653 - DNA, 25 bp, Saccharomyces pastorianus
atactacgccaagactattttattc

SEQ ID NO: 85654 - DNA, 25 bp, Saccharomyces pastorianus
gcatactacgccaagactattttat

SEQ ID NO: 85655 - DNA, 25 bp, Saccharomyces pastorianus
catactacgccaagactattttatt

SEQ ID NO: 85656 - DNA, 25 bp, Saccharomyces pastorianus
tattactgaagaaggcatactacgc

SEQ ID NO: 85657 - DNA, 25 bp, Saccharomyces pastorianus
gaaggcatactacgccaagactatt

SEQ ID NO: 85658 - DNA, 25 bp, Saccharomyces pastorianus
gaagaaggcatactacgccaagact

SEQ ID NO: 85659 - DNA, 25 bp, Saccharomyces pastorianus
ggcatactacgccaagactatttta

SEQ ID NO: 85660 - DNA, 25 bp, Saccharomyces pastorianus
actacgccaagactattttattctc

SEQ ID NO: 85661 - DNA, 25 bp, Saccharomyces pastorianus
tgaagaaggcatactacgccaagac

SEQ ID NO: 85662 - DNA, 25 bp, Saccharomyces pastorianus
ggcgactcggttaggttatttcttg

SEQ ID NO: 85663 - DNA, 25 bp, Saccharomyces pastorianus
gattgtgtgtcatttcatccgaacg

SEQ ID NO: 85664 - DNA, 25 bp, Saccharomyces pastorianus
atgtgtttacaggatccagcgataa

SEQ ID NO: 85665 - DNA, 25 bp, Saccharomyces pastorianus
gcgcccgtcatttctattgctgttt

SEQ ID NO: 85666 - DNA, 25 bp, Saccharomyces pastorianus
agcgcagaaccagatgagccattta

SEQ ID NO: 85667 - DNA, 25 bp, Saccharomyces pastorianus
atccgaacggttgctatgtgtttac

SEQ ID NO: 85668 - DNA, 25 bp, Saccharomyces pastorianus
acttgggtgacgttactgcatctat

SEQ ID NO: 85669 - DNA, 25 bp, Saccharomyces pastorianus
tggaggtgccgatcacacagtccgt

SEQ ID NO: 85670 - DNA, 25 bp, Saccharomyces pastorianus
ttatttcttggacatactgcgcccg

SEQ ID NO: 85671 - DNA, 25 bp, Saccharomyces pastorianus
ttagtagcgtcgttctacaccaaaa

SEQ ID NO: 85672 - DNA, 25 bp, Saccharomyces pastorianus
atgtgggacgtttctacgggcgact

SEQ ID NO: 85673 - DNA, 25 bp, Saccharomyces pastorianus
gacgatatttttgctttaatgctga

SEQ ID NO: 85674 - DNA, 25 bp, Saccharomyces pastorianus
atggtgcattccttattcgttgttt

SEQ ID NO: 85675 - DNA, 25 bp, Saccharomyces pastorianus
gacccgttccatacgttaccaatag

SEQ ID NO: 85676 - DNA, 25 bp, Saccharomyces pastorianus
ggcagacctagtaaatcttcccgat

SEQ ID NO: 85677 - DNA, 25 bp, Saccharomyces pastorianus
tcttcccgattatatatctcgctca

SEQ ID NO: 85678 - DNA, 25 bp, Saccharomyces pastorianus
gaacttcgtagtaaaatcgctccaa

SEQ ID NO: 85679 - DNA, 25 bp, Saccharomyces pastorianus
gcctcaactaaccaagacaacactt

SEQ ID NO: 85680 - DNA, 25 bp, Saccharomyces pastorianus
gacaacactttaactggcgaagact

SEQ ID NO: 85681 - DNA, 25 bp, Saccharomyces pastorianus
aatgctgaagggtgacacaacctat

SEQ ID NO: 85682 - DNA, 25 bp, Saccharomyces pastorianus
gcaacctttgcaacagcatctcaaa

SEQ ID NO: 85683 - DNA, 25 bp, Saccharomyces pastorianus
gatttatctttatcgggctccaagc

SEQ ID NO: 85684 - DNA, 25 bp, Saccharomyces pastorianus
gataatgtggctccccttcgattta

SEQ ID NO: 85685 - DNA, 25 bp, Saccharomyces pastorianus
cttttgtgcttccatatgtgtcaaa

SEQ ID NO: 85686 - DNA, 25 bp, Saccharomyces pastorianus
taaccgcaacccaaagatactttct

SEQ ID NO: 85687 - DNA, 25 bp, Saccharomyces pastorianus
ggaacactgagcttacgtaaccgca

SEQ ID NO: 85688 - DNA, 25 bp, Saccharomyces pastorianus
cgtagatttcattgtggcgctgttc

SEQ ID NO: 85689 - DNA, 25 bp, Saccharomyces pastorianus
ggcgctgttcttgttggaacactga

SEQ ID NO: 85690 - DNA, 25 bp, Saccharomyces pastorianus
cattgtggcgctgttcttgttggaa

SEQ ID NO: 85691 - DNA, 25 bp, Saccharomyces pastorianus
gaagtggcgtagatttcattgtggc

SEQ ID NO: 85692 - DNA, 25 bp, Saccharomyces pastorianus
tgagcttacgtaaccgcaacccaaa

SEQ ID NO: 85693 - DNA, 25 bp, Saccharomyces pastorianus
aaaggataatgtggctccccttcga

SEQ ID NO: 85694 - DNA, 25 bp, Saccharomyces pastorianus
gtgcttccatatgtgtcaaaggata

SEQ ID NO: 85695 - DNA, 25 bp, Saccharomyces pastorianus
ggctgtcttgtactatcaggtctca

SEQ ID NO: 85696 - DNA, 25 bp, Saccharomyces pastorianus
ctgcagcatcactcggtgtgttatt

SEQ ID NO: 85697 - DNA, 25 bp, Saccharomyces pastorianus
tgaatttcatgccaggtcacgtaat

SEQ ID NO: 85698 - DNA, 25 bp, Saccharomyces pastorianus
gtaatactgaatctcttaggcgaca

SEQ ID NO: 85699 - DNA, 25 bp, Saccharomyces pastorianus
aggcgacattcctttggtcacaaga

SEQ ID NO: 85700 - DNA, 25 bp, Saccharomyces pastorianus
tcaggtctcacaagtctccggattg

SEQ ID NO: 85701 - DNA, 25 bp, Saccharomyces pastorianus
gaacgtacgattcttcggtgtcatt

SEQ ID NO: 85702 - DNA, 25 bp, Saccharomyces pastorianus
aacatctttgtcagcgctaatcact

SEQ ID NO: 85703 - DNA, 25 bp, Saccharomyces pastorianus
atgtttcaccatctatattcccaat

SEQ ID NO: 85704 - DNA, 25 bp, Saccharomyces pastorianus
gcgctaatcacttgtcaactttgga

SEQ ID NO: 85705 - DNA, 25 bp, Saccharomyces pastorianus
cgatattcgattacggcgcatttaa

SEQ ID NO: 85706 - DNA, 25 bp, Saccharomyces pastorianus
agccactccgagaactttactaggt

SEQ ID NO: 85707 - DNA, 25 bp, Saccharomyces pastorianus
gtggtgcaagcttacatcagattaa

SEQ ID NO: 85708 - DNA, 25 bp, Saccharomyces pastorianus
gtccgagtctccaaggaatcattgt

SEQ ID NO: 85709 - DNA, 25 bp, Saccharomyces pastorianus
tggatgacggtaccatggacacaga

SEQ ID NO: 85710 - DNA, 25 bp, Saccharomyces pastorianus
taagattatctcaagcgctagcaaa

SEQ ID NO: 85711 - DNA, 25 bp, Saccharomyces pastorianus
gagggtttaccatgctacaattaag

SEQ ID NO: 85712 - DNA, 25 bp, Saccharomyces pastorianus
caaattttcctttggtcaagccact

SEQ ID NO: 85713 - DNA, 25 bp, Saccharomyces pastorianus
gagagagtacattgcctatgctaag

SEQ ID NO: 85714 - DNA, 25 bp, Saccharomyces pastorianus
atattcttacttaaacgtctggcat

SEQ ID NO: 85715 - DNA, 25 bp, Saccharomyces pastorianus
tcactagtgagcacgcctaaactcg

SEQ ID NO: 85716 - DNA, 25 bp, Saccharomyces pastorianus
gaagccttgaggttggtccgagtct

SEQ ID NO: 85717 - DNA, 25 bp, Saccharomyces pastorianus
aaagccaacttcattttggctcaca

SEQ ID NO: 85718 - DNA, 25 bp, Saccharomyces pastorianus
attgttgccgagacccggatattct

SEQ ID NO: 85719 - DNA, 25 bp, Saccharomyces pastorianus
ggctgatgctacttctgattccaat

SEQ ID NO: 85720 - DNA, 25 bp, Saccharomyces pastorianus
ggctcacaaaagtttccaaagatta

SEQ ID NO: 85721 - DNA, 25 bp, Saccharomyces pastorianus
tttttcctgggcttgtaatgccaaa

SEQ ID NO: 85722 - DNA, 25 bp, Saccharomyces pastorianus
ttccaatcccgaagcagaatcttta

SEQ ID NO: 85723 - DNA, 25 bp, Saccharomyces pastorianus
tgtaatgaggacgtttcgccagcat

SEQ ID NO: 85724 - DNA, 25 bp, Saccharomyces pastorianus
gaaagacacttattcagtttccggg

SEQ ID NO: 85725 - DNA, 25 bp, Saccharomyces pastorianus
ccgggactctggcttggatagaaat

SEQ ID NO: 85726 - DNA, 25 bp, Saccharomyces pastorianus
tgcatgaatttgtcgcattgatggt

SEQ ID NO: 85727 - DNA, 25 bp, Saccharomyces pastorianus
gacgtttcgccagcatttggattat

SEQ ID NO: 85728 - DNA, 25 bp, Saccharomyces pastorianus
attgccatggctatttgacgtttat

SEQ ID NO: 85729 - DNA, 25 bp, Saccharomyces pastorianus
cataatttatgcttcgaccgtccag

SEQ ID NO: 85730 - DNA, 25 bp, Saccharomyces pastorianus
aaaggtctacaaagttccggcatca

SEQ ID NO: 85731 - DNA, 25 bp, Saccharomyces pastorianus
gaaaaagatcctatagctcctattg

SEQ ID NO: 85732 - DNA, 25 bp, Saccharomyces pastorianus
aacatattatccagtgggctctcta

SEQ ID NO: 85733 - DNA, 25 bp, Saccharomyces pastorianus
agcacatatcgagcggctttctaag

SEQ ID NO: 85734 - DNA, 25 bp, Saccharomyces pastorianus
gtgattattttacctgactgttctc

SEQ ID NO: 85735 - DNA, 25 bp, Saccharomyces pastorianus
gggctctctatggtgtgtttaaatt

SEQ ID NO: 85736 - DNA, 25 bp, Saccharomyces pastorianus
gcatgtcatctttacgagcagcaca

SEQ ID NO: 85737 - DNA, 25 bp, Saccharomyces pastorianus
acattctatgggttgttttctggca

SEQ ID NO: 85738 - DNA, 25 bp, Saccharomyces pastorianus
cttcgaccgtccagaattggtgtgt

SEQ ID NO: 85739 - DNA, 25 bp, Saccharomyces pastorianus
tttcgaatgatgatggtgacactta

SEQ ID NO: 85740 - DNA, 25 bp, Saccharomyces pastorianus
gagaatactttgattacttagacag

SEQ ID NO: 85741 - DNA, 25 bp, Saccharomyces pastorianus
ggataccgatatcactttattctgt

SEQ ID NO: 85742 - DNA, 25 bp, Saccharomyces pastorianus
gcacaatcccaaccttgtgggaaac

SEQ ID NO: 85743 - DNA, 25 bp, Saccharomyces pastorianus
ggtccgatgcatacagagaatactt

SEQ ID NO: 85744 - DNA, 25 bp, Saccharomyces pastorianus
ttagacttcttcaggtccgatgcat

SEQ ID NO: 85745 - DNA, 25 bp, Saccharomyces pastorianus
tggagacacccattactggaggagt

SEQ ID NO: 85746 - DNA, 25 bp, Saccharomyces pastorianus
tgtgtcatttctggaccaacttcga

SEQ ID NO: 85747 - DNA, 25 bp, Saccharomyces pastorianus
gacagttctggtggattcttctacg

SEQ ID NO: 85748 - DNA, 25 bp, Saccharomyces pastorianus
atatggattcattctttcggtaagt

SEQ ID NO: 85749 - DNA, 25 bp, Saccharomyces pastorianus
gaatatgagcgcacaatcccaacct

SEQ ID NO: 85750 - DNA, 25 bp, Saccharomyces pastorianus
tgctccgtcaaaacaggtgctaaaa

SEQ ID NO: 85751 - DNA, 25 bp, Saccharomyces pastorianus
atagcgcctgctccgtcaaaacagg

SEQ ID NO: 85752 - DNA, 25 bp, Saccharomyces pastorianus
aaccaaactacaaatagcgcctgct

SEQ ID NO: 85753 - DNA, 25 bp, Saccharomyces pastorianus
tacaaatagcgcctgctccgtcaaa

SEQ ID NO: 85754 - DNA, 25 bp, Saccharomyces pastorianus
gctccgtcaaaacaggtgctaaaac

SEQ ID NO: 85755 - DNA, 25 bp, Saccharomyces pastorianus
aaactacaaatagcgcctgctccgt

SEQ ID NO: 85756 - DNA, 25 bp, Saccharomyces pastorianus
agcgcctgctccgtcaaaacaggtg

SEQ ID NO: 85757 - DNA, 25 bp, Saccharomyces pastorianus
aacaggtgctaaaacgtcaacatgt

SEQ ID NO: 85758 - DNA, 25 bp, Saccharomyces pastorianus
aaatagcgcctgctccgtcaaaaca

SEQ ID NO: 85759 - DNA, 25 bp, Saccharomyces pastorianus
gtcaaaacaggtgctaaaacgtcaa

SEQ ID NO: 85760 - DNA, 25 bp, Saccharomyces pastorianus
gcctgctccgtcaaaacaggtgcta

SEQ ID NO: 85761 - DNA, 25 bp, Saccharomyces pastorianus
gatttcacctcttgtcctatcgaac

SEQ ID NO: 85762 - DNA, 25 bp, Saccharomyces pastorianus
aaggacgtcacctggactcctgact

SEQ ID NO: 85763 - DNA, 25 bp, Saccharomyces pastorianus
gtatctgcgaacctagcaaggacgt

SEQ ID NO: 85764 - DNA, 25 bp, Saccharomyces pastorianus
tggacaagtcagaaatccatttctt

SEQ ID NO: 85765 - DNA, 25 bp, Saccharomyces pastorianus
gattccatcatccagatttcacctc

SEQ ID NO: 85766 - DNA, 25 bp, Saccharomyces pastorianus
gactcctgactacttctgtactaga

SEQ ID NO: 85767 - DNA, 25 bp, Saccharomyces pastorianus
aaacaagtgtatctgcgaacctagc

SEQ ID NO: 85768 - DNA, 25 bp, Saccharomyces pastorianus
gctgcctctttgttcttggacaagt

SEQ ID NO: 85769 - DNA, 25 bp, Saccharomyces pastorianus
gaacctagcaaggacgtcacctgga

SEQ ID NO: 85770 - DNA, 25 bp, Saccharomyces pastorianus
cacctcttgtcctatcgaacagaag

SEQ ID NO: 85771 - DNA, 25 bp, Saccharomyces pastorianus
gaaattacaagcttccaccaggaat

SEQ ID NO: 85772 - DNA, 25 bp, Saccharomyces pastorianus
ggtactcaagttctctttcacttaa

SEQ ID NO: 85773 - DNA, 25 bp, Saccharomyces pastorianus
taagatatgccttgtagtcgccacc

SEQ ID NO: 85774 - DNA, 25 bp, Saccharomyces pastorianus
aatagtgctactgtcggctctgtaa

SEQ ID NO: 85775 - DNA, 25 bp, Saccharomyces pastorianus
actgccatttttggttggacgaata

SEQ ID NO: 85776 - DNA, 25 bp, Saccharomyces pastorianus
gcatcgctcgatctcaaacatcata

SEQ ID NO: 85777 - DNA, 25 bp, Saccharomyces pastorianus
gtccaaagatagttctgtgccccta

SEQ ID NO: 85778 - DNA, 25 bp, Saccharomyces pastorianus
atatatcccatatctacctatcagc

SEQ ID NO: 85779 - DNA, 25 bp, Saccharomyces pastorianus
atggtccttgctactgcaatcagta

SEQ ID NO: 85780 - DNA, 25 bp, Saccharomyces pastorianus
gtaattagctacaacgcctactggt

SEQ ID NO: 85781 - DNA, 25 bp, Saccharomyces pastorianus
gcaatcagtacggtgttcggtattt

SEQ ID NO: 85782 - DNA, 25 bp, Saccharomyces pastorianus
ttcctctacttgatcgcggctggtt

SEQ ID NO: 85783 - DNA, 25 bp, Saccharomyces pastorianus
acttctacagaatggtcacagcgtt

SEQ ID NO: 85784 - DNA, 25 bp, Saccharomyces pastorianus
aagctttcatttctgcgttgtttct

SEQ ID NO: 85785 - DNA, 25 bp, Saccharomyces pastorianus
tcgtatttctcttgaatgtccctgt

SEQ ID NO: 85786 - DNA, 25 bp, Saccharomyces pastorianus
atgtccctgttctagcatataacgc

SEQ ID NO: 85787 - DNA, 25 bp, Saccharomyces pastorianus
gggattttaccttctcatattcttt

SEQ ID NO: 85788 - DNA, 25 bp, Saccharomyces pastorianus
atcgctattcgtgacgggtcttata

SEQ ID NO: 85789 - DNA, 25 bp, Saccharomyces pastorianus
gtaccagaggcaattctacaagctt

SEQ ID NO: 85790 - DNA, 25 bp, Saccharomyces pastorianus
gaaaacacatctactggacgccacg

SEQ ID NO: 85791 - DNA, 25 bp, Saccharomyces pastorianus
aattgtttgaattccatttgccaga

SEQ ID NO: 85792 - DNA, 25 bp, Saccharomyces pastorianus
ggacgccacggatattttcagaaaa

SEQ ID NO: 85793 - DNA, 25 bp, Saccharomyces pastorianus
ggaaccggattatcgctattcgtga

SEQ ID NO: 85794 - DNA, 25 bp, Saccharomyces pastorianus
aactgaagcaggtactggctcgaaa

SEQ ID NO: 85795 - DNA, 25 bp, Saccharomyces pastorianus
gatgatatacccattagacagctat

SEQ ID NO: 85796 - DNA, 25 bp, Saccharomyces pastorianus
atgagccaagatagcgaggacgatt

SEQ ID NO: 85797 - DNA, 25 bp, Saccharomyces pastorianus
gatttgacttctactttgctaggca

SEQ ID NO: 85798 - DNA, 25 bp, Saccharomyces pastorianus
atttcgtagacttgatggatccata

SEQ ID NO: 85799 - DNA, 25 bp, Saccharomyces pastorianus
attctggatattgcacatttcgtag

SEQ ID NO: 85800 - DNA, 25 bp, Saccharomyces pastorianus
ggacgattcaatacgggatgactca

SEQ ID NO: 85801 - DNA, 25 bp, Saccharomyces pastorianus
agctatcatcgtctatcacttctgt

SEQ ID NO: 85802 - DNA, 25 bp, Saccharomyces pastorianus
agccggtaaagactggcatgactta

SEQ ID NO: 85803 - DNA, 25 bp, Saccharomyces pastorianus
gcgactctttcaaacgatatcagac

SEQ ID NO: 85804 - DNA, 25 bp, Saccharomyces pastorianus
gaataatgagctctgttaccaactg

SEQ ID NO: 85805 - DNA, 25 bp, Saccharomyces pastorianus
gatgatgactcctcccttaaatata

SEQ ID NO: 85806 - DNA, 25 bp, Saccharomyces pastorianus
gatgtcaatttctatgcaactgtcc

SEQ ID NO: 85807 - DNA, 25 bp, Saccharomyces pastorianus
gggcaaccaattctccaatgctaat

SEQ ID NO: 85808 - DNA, 25 bp, Saccharomyces pastorianus
agcgacctcgttaatctgcagagat

SEQ ID NO: 85809 - DNA, 25 bp, Saccharomyces pastorianus
acctcaatttgggaacgcgatgtca

SEQ ID NO: 85810 - DNA, 25 bp, Saccharomyces pastorianus
tgcagagatctaatgtcccgtatat

SEQ ID NO: 85811 - DNA, 25 bp, Saccharomyces pastorianus
aagaagacggtgctctgtacccaca

SEQ ID NO: 85812 - DNA, 25 bp, Saccharomyces pastorianus
gaatggcagccatagcgacctcgtt

SEQ ID NO: 85813 - DNA, 25 bp, Saccharomyces pastorianus
acaccaatattcaagtccctcatac

SEQ ID NO: 85814 - DNA, 25 bp, Saccharomyces pastorianus
aggcgactctttttacatcagcagc

SEQ ID NO: 85815 - DNA, 25 bp, Saccharomyces pastorianus
gagcaaatggcgcacaacaactatt

SEQ ID NO: 85816 - DNA, 25 bp, Saccharomyces pastorianus
gagtatatccgcagtgacttcaaag

SEQ ID NO: 85817 - DNA, 25 bp, Saccharomyces pastorianus
atctctgtgacttttatttcggcgc

SEQ ID NO: 85818 - DNA, 25 bp, Saccharomyces pastorianus
cgcgctttggcgctctagtaagaga

SEQ ID NO: 85819 - DNA, 25 bp, Saccharomyces pastorianus
atgtggcggacaaacctgatctctg

SEQ ID NO: 85820 - DNA, 25 bp, Saccharomyces pastorianus
gcactgccacaacatcgacgtaaaa

SEQ ID NO: 85821 - DNA, 25 bp, Saccharomyces pastorianus
aataatgacctgtatacccgaccac

SEQ ID NO: 85822 - DNA, 25 bp, Saccharomyces pastorianus
aggagaccgtctacagattctgatc

SEQ ID NO: 85823 - DNA, 25 bp, Saccharomyces pastorianus
aacgctttatcaatccgaactggga

SEQ ID NO: 85824 - DNA, 25 bp, Saccharomyces pastorianus
aaacgtctgctggatctattcaagg

SEQ ID NO: 85825 - DNA, 25 bp, Saccharomyces pastorianus
gtcaagtaccgcatggattgggcca

SEQ ID NO: 85826 - DNA, 25 bp, Saccharomyces pastorianus
gagatccgtaacttattcacacaaa

SEQ ID NO: 85827 - DNA, 25 bp, Saccharomyces pastorianus
ggaaccctcgatattgattgacgtt

SEQ ID NO: 85828 - DNA, 25 bp, Saccharomyces pastorianus
atccgatcattctaacggctcacta

SEQ ID NO: 85829 - DNA, 25 bp, Saccharomyces pastorianus
taccaccatctctccgaagaagaag

SEQ ID NO: 85830 - DNA, 25 bp, Saccharomyces pastorianus
gacagtcagtccaccaaaaattcta

SEQ ID NO: 85831 - DNA, 25 bp, Saccharomyces pastorianus
aaaaggttagtagccgcaccgacag

SEQ ID NO: 85832 - DNA, 25 bp, Saccharomyces pastorianus
aagtttggagcgtgcaaatggtacc

SEQ ID NO: 85833 - DNA, 25 bp, Saccharomyces pastorianus
aagctgatacaaacgactacctaga

SEQ ID NO: 85834 - DNA, 25 bp, Saccharomyces pastorianus
ctaatactgtaactaccaccatctc

SEQ ID NO: 85835 - DNA, 25 bp, Saccharomyces pastorianus
gtgctgccaccaaggacggtttttt

SEQ ID NO: 85836 - DNA, 25 bp, Saccharomyces pastorianus
ggaggaacagcgtgctgccaccaag

SEQ ID NO: 85837 - DNA, 25 bp, Saccharomyces pastorianus
gaagaagtcgcatcctatgaaaggt

SEQ ID NO: 85838 - DNA, 25 bp, Saccharomyces pastorianus
tgataactttcactcttctcaccag

SEQ ID NO: 85839 - DNA, 25 bp, Saccharomyces pastorianus
gaagaatctttcagtgtttgttaca

SEQ ID NO: 85840 - DNA, 25 bp, Saccharomyces pastorianus
gtattcaggtcaatcagcagttaag

SEQ ID NO: 85841 - DNA, 25 bp, Saccharomyces pastorianus
gaaagctgttcatgactgttgtctg

SEQ ID NO: 85842 - DNA, 25 bp, Saccharomyces pastorianus
gtcgaacctgataaacttccgaagt

SEQ ID NO: 85843 - DNA, 25 bp, Saccharomyces pastorianus
gatgtgcttaagacatctccccttc

SEQ ID NO: 85844 - DNA, 25 bp, Saccharomyces pastorianus
aagattcatttacggcagatgccaa

SEQ ID NO: 85845 - DNA, 25 bp, Saccharomyces pastorianus
gacgcatctccaccaaggataacga

SEQ ID NO: 85846 - DNA, 25 bp, Saccharomyces pastorianus
tccattggctaagacgtccgtatta

SEQ ID NO: 85847 - DNA, 25 bp, Saccharomyces pastorianus
gttgtctgcagactatccaagattc

SEQ ID NO: 85848 - DNA, 25 bp, Saccharomyces pastorianus
aaagacctttcaaggcgacgcatct

SEQ ID NO: 85849 - DNA, 25 bp, Saccharomyces pastorianus
tggtttggcgagtgacatttctgtc

SEQ ID NO: 85850 - DNA, 25 bp, Saccharomyces pastorianus
gaagattcctctagtggcacttatg

SEQ ID NO: 85851 - DNA, 25 bp, Saccharomyces pastorianus
gaactttttagcaggagattgtctc

SEQ ID NO: 85852 - DNA, 25 bp, Saccharomyces pastorianus
attaagatcatctcctcataccgtt

SEQ ID NO: 85853 - DNA, 25 bp, Saccharomyces pastorianus
atgtcacagtcttttgcaatggtta

SEQ ID NO: 85854 - DNA, 25 bp, Saccharomyces pastorianus
aaataattcgtttgcgccaagtccg

SEQ ID NO: 85855 - DNA, 25 bp, Saccharomyces pastorianus
gataaaatttcagcccattggttct

SEQ ID NO: 85856 - DNA, 25 bp, Saccharomyces pastorianus
gacatttctgtcgaccagcaagttg

SEQ ID NO: 85857 - DNA, 25 bp, Saccharomyces pastorianus
gcgccaagtccgcagcaaaatattg

SEQ ID NO: 85858 - DNA, 25 bp, Saccharomyces pastorianus
agattgtctcagcttggtttggcga

SEQ ID NO: 85859 - DNA, 25 bp, Saccharomyces pastorianus
cgaaagctccatcatatccacaaat

SEQ ID NO: 85860 - DNA, 25 bp, Saccharomyces pastorianus
tcgattgctgttttgagtgccatga

SEQ ID NO: 85861 - DNA, 25 bp, Saccharomyces pastorianus
gacttgcagaacagattcggtgata

SEQ ID NO: 85862 - DNA, 25 bp, Saccharomyces pastorianus
acggtgatttatcagttctaccaac

SEQ ID NO: 85863 - DNA, 25 bp, Saccharomyces pastorianus
atcggtgcaccaatggctggtgtta

SEQ ID NO: 85864 - DNA, 25 bp, Saccharomyces pastorianus
gatcagagttgcagacaagtcacaa

SEQ ID NO: 85865 - DNA, 25 bp, Saccharomyces pastorianus
aaatttcctagcaccagcagaacct

SEQ ID NO: 85866 - DNA, 25 bp, Saccharomyces pastorianus
gaatgcgatgttgcttcttacaata

SEQ ID NO: 85867 - DNA, 25 bp, Saccharomyces pastorianus
atccaagggtctatgaagatttcca

SEQ ID NO: 85868 - DNA, 25 bp, Saccharomyces pastorianus
gcatcagatttgttggttgtcctag

SEQ ID NO: 85869 - DNA, 25 bp, Saccharomyces pastorianus
tgctaaaccaaaggctgatgtccac

SEQ ID NO: 85870 - DNA, 25 bp, Saccharomyces pastorianus
tgatgtccacgatactcaccaaatc

SEQ ID NO: 85871 - DNA, 25 bp, Saccharomyces pastorianus
ggttccttcatgaatactgtccagt

SEQ ID NO: 85872 - DNA, 25 bp, Saccharomyces pastorianus
gaatatcggccttccatacaagagt

SEQ ID NO: 85873 - DNA, 25 bp, Saccharomyces pastorianus
gcacgggcactaacaaggtcatcaa

SEQ ID NO: 85874 - DNA, 25 bp, Saccharomyces pastorianus
aaatggagctccgacaaggacccca

SEQ ID NO: 85875 - DNA, 25 bp, Saccharomyces pastorianus
gatgccggcgttttaacaccatggt

SEQ ID NO: 85876 - DNA, 25 bp, Saccharomyces pastorianus
atatccacgggttatttttgtctcg

SEQ ID NO: 85877 - DNA, 25 bp, Saccharomyces pastorianus
gtgatattccagcacctcttaggtt

SEQ ID NO: 85878 - DNA, 25 bp, Saccharomyces pastorianus
tggcagccgcagtcttgggaagtta

SEQ ID NO: 85879 - DNA, 25 bp, Saccharomyces pastorianus
cgtggtgaagcaattccccaaggat

SEQ ID NO: 85880 - DNA, 25 bp, Saccharomyces pastorianus
aaggaccccatgattcgtgacaata

SEQ ID NO: 85881 - DNA, 25 bp, Saccharomyces pastorianus
atacaagagttgcagaccccgtgct

SEQ ID NO: 85882 - DNA, 25 bp, Saccharomyces pastorianus
ggtaccgatatttccattgttacgt

SEQ ID NO: 85883 - DNA, 25 bp, Saccharomyces pastorianus
agaagatttcgctttccctgatact

SEQ ID NO: 85884 - DNA, 25 bp, Saccharomyces pastorianus
ggtgctgaaattgtcgcccaagtta

SEQ ID NO: 85885 - DNA, 25 bp, Saccharomyces pastorianus
gaagaagctttatcccctgatttca

SEQ ID NO: 85886 - DNA, 25 bp, Saccharomyces pastorianus
gctcaacattcacaggacttttctc

SEQ ID NO: 85887 - DNA, 25 bp, Saccharomyces pastorianus
gtcccttattctgctgaagatgcta

SEQ ID NO: 85888 - DNA, 25 bp, Saccharomyces pastorianus
agagttactggtgccgatgttccaa

SEQ ID NO: 85889 - DNA, 25 bp, Saccharomyces pastorianus
cgttcagttttctttggaagccgct

SEQ ID NO: 85890 - DNA, 25 bp, Saccharomyces pastorianus
attactgttgaatccactttcccat

SEQ ID NO: 85891 - DNA, 25 bp, Saccharomyces pastorianus
gatgttccaacaccttacgctaaag

SEQ ID NO: 85892 - DNA, 25 bp, Saccharomyces pastorianus
atcaacttgcgttctattagacctt

SEQ ID NO: 85893 - DNA, 25 bp, Saccharomyces pastorianus
gacgaaaaagaatcagcttaggcat

SEQ ID NO: 85894 - DNA, 25 bp, Saccharomyces pastorianus
ccacttcgaagtctcggaaaacaga

SEQ ID NO: 85895 - DNA, 25 bp, Saccharomyces pastorianus
ttctcccacttcgaagtctcggaaa

SEQ ID NO: 85896 - DNA, 25 bp, Saccharomyces pastorianus
acagaccccggaaacagccgcgacg

SEQ ID NO: 85897 - DNA, 25 bp, Saccharomyces pastorianus
aaacagccgcgacgaaaaagaatca

SEQ ID NO: 85898 - DNA, 25 bp, Saccharomyces pastorianus
tcccacttcgaagtctcggaaaaca

SEQ ID NO: 85899 - DNA, 25 bp, Saccharomyces pastorianus
acgaaaaagaatcagcttaggcatg

SEQ ID NO: 85900 - DNA, 25 bp, Saccharomyces pastorianus
tcgaagtctcggaaaacagaccccg

SEQ ID NO: 85901 - DNA, 25 bp, Saccharomyces pastorianus
cgcgacgaaaaagaatcagcttagg

SEQ ID NO: 85902 - DNA, 25 bp, Saccharomyces pastorianus
gccgcgacgaaaaagaatcagctta

SEQ ID NO: 85903 - DNA, 25 bp, Saccharomyces pastorianus
gcgacgaaaaagaatcagcttaggc

SEQ ID NO: 85904 - DNA, 25 bp, Saccharomyces pastorianus
taaagaagcaccttgcctctttcaa

SEQ ID NO: 85905 - DNA, 25 bp, Saccharomyces pastorianus
gtgaccaaggttatttcgaccctga

SEQ ID NO: 85906 - DNA, 25 bp, Saccharomyces pastorianus
gagtcaccgtcgtcattctagatga

SEQ ID NO: 85907 - DNA, 25 bp, Saccharomyces pastorianus
gaaaacgtcactttgggatatgcta

SEQ ID NO: 85908 - DNA, 25 bp, Saccharomyces pastorianus
aagatttcacccattgagctcgacg

SEQ ID NO: 85909 - DNA, 25 bp, Saccharomyces pastorianus
aaatgacctcaaacaatctgcctcc

SEQ ID NO: 85910 - DNA, 25 bp, Saccharomyces pastorianus
gacggcattatgctatcgcatccaa

SEQ ID NO: 85911 - DNA, 25 bp, Saccharomyces pastorianus
ggtttttggtccttacaggcagaat

SEQ ID NO: 85912 - DNA, 25 bp, Saccharomyces pastorianus
ggccaagtagttcaagccgccattg

SEQ ID NO: 85913 - DNA, 25 bp, Saccharomyces pastorianus
aaagtcggcgaagtttccatcagag

SEQ ID NO: 85914 - DNA, 25 bp, Saccharomyces pastorianus
aaagcctggtactgtgggccagcca

SEQ ID NO: 85915 - DNA, 25 bp, Saccharomyces pastorianus
ggccctgtgatgcatcgcaggtatt

SEQ ID NO: 85916 - DNA, 25 bp, Saccharomyces pastorianus
atcaagccgtacattattttcccca

SEQ ID NO: 85917 - DNA, 25 bp, Saccharomyces pastorianus
gcaagaccctgctatggttactaga

SEQ ID NO: 85918 - DNA, 25 bp, Saccharomyces pastorianus
agagtttgtcaccagtcccttaaag

SEQ ID NO: 85919 - DNA, 25 bp, Saccharomyces pastorianus
accgtagaggctgcgcgggtaatcc

SEQ ID NO: 85920 - DNA, 25 bp, Saccharomyces pastorianus
gaatcatgtcccctccagcaaagga

SEQ ID NO: 85921 - DNA, 25 bp, Saccharomyces pastorianus
taccaggaaggtcacgtgccgtact

SEQ ID NO: 85922 - DNA, 25 bp, Saccharomyces pastorianus
gagtgctttaccatagtcgcaggtt

SEQ ID NO: 85923 - DNA, 25 bp, Saccharomyces pastorianus
gcctttatacttcggcaaacctcag

SEQ ID NO: 85924 - DNA, 25 bp, Saccharomyces pastorianus
tgccgtacttttacacgtgaccgta

SEQ ID NO: 85925 - DNA, 25 bp, Saccharomyces pastorianus
gtcataccatacgacttagctgagg

SEQ ID NO: 85926 - DNA, 25 bp, Saccharomyces pastorianus
cacatgggtgggattacccgcgcag

SEQ ID NO: 85927 - DNA, 25 bp, Saccharomyces pastorianus
gcagcctctacggtcacgtgtaaaa

SEQ ID NO: 85928 - DNA, 25 bp, Saccharomyces pastorianus
cagcctctacggtcacgtgtaaaag

SEQ ID NO: 85929 - DNA, 25 bp, Saccharomyces pastorianus
ggattacccgcgcagcctctacggt

SEQ ID NO: 85930 - DNA, 25 bp, Saccharomyces pastorianus
actggcagcgtgaatggcacggcca

SEQ ID NO: 85931 - DNA, 25 bp, Saccharomyces pastorianus
atgggtgggattacccgcgcagcct

SEQ ID NO: 85932 - DNA, 25 bp, Saccharomyces pastorianus
cgtgtaaaagtacggcacgtgacct

SEQ ID NO: 85933 - DNA, 25 bp, Saccharomyces pastorianus
gcctctacggtcacgtgtaaaagta

SEQ ID NO: 85934 - DNA, 25 bp, Saccharomyces pastorianus
gcacggccacatgggtgggattacc

SEQ ID NO: 85935 - DNA, 25 bp, Saccharomyces pastorianus
tacggtcacgtgtaaaagtacggca

SEQ ID NO: 85936 - DNA, 25 bp, Saccharomyces pastorianus
ggcagcgtgaatggcacggccacat

SEQ ID NO: 85937 - DNA, 25 bp, Saccharomyces pastorianus
attgttactgttgaccggagccata

SEQ ID NO: 85938 - DNA, 25 bp, Saccharomyces pastorianus
atattctccatttcagcactatacc

SEQ ID NO: 85939 - DNA, 25 bp, Saccharomyces pastorianus
tcccctcatttatccactttttata

SEQ ID NO: 85940 - DNA, 25 bp, Saccharomyces pastorianus
gtttctctgcattattttcctcttt

SEQ ID NO: 85941 - DNA, 25 bp, Saccharomyces pastorianus
gttgtgctactttctcggcaacatc

SEQ ID NO: 85942 - DNA, 25 bp, Saccharomyces pastorianus
gtgcggccgccgaaaatacatcaga

SEQ ID NO: 85943 - DNA, 25 bp, Saccharomyces pastorianus
ttatcatcattcttgtctgggctca

SEQ ID NO: 85944 - DNA, 25 bp, Saccharomyces pastorianus
gaaacacgttgttcacttcacctga

SEQ ID NO: 85945 - DNA, 25 bp, Saccharomyces pastorianus
gatccataccaacacttaccaagaa

SEQ ID NO: 85946 - DNA, 25 bp, Saccharomyces pastorianus
ctcttcctcttagttccattcaaat

SEQ ID NO: 85947 - DNA, 25 bp, Saccharomyces pastorianus
atgcagtcgtcgctatcattgttac

SEQ ID NO: 85948 - DNA, 25 bp, Saccharomyces pastorianus
gtcccaattataactgctctgcagc

SEQ ID NO: 85949 - DNA, 25 bp, Saccharomyces pastorianus
gaaagacttctgctaaacgttaatt

SEQ ID NO: 85950 - DNA, 25 bp, Saccharomyces pastorianus
gttgggtcattctgctaacattcat

SEQ ID NO: 85951 - DNA, 25 bp, Saccharomyces pastorianus
gttagctttggtctaattcctgaat

SEQ ID NO: 85952 - DNA, 25 bp, Saccharomyces pastorianus
aagttgctcaatttgctctcaagga

SEQ ID NO: 85953 - DNA, 25 bp, Saccharomyces pastorianus
gcccgggttctaacatagcatacgt

SEQ ID NO: 85954 - DNA, 25 bp, Saccharomyces pastorianus
tctttggcttcccaagtggacgtaa

SEQ ID NO: 85955 - DNA, 25 bp, Saccharomyces pastorianus
gaaacagagcactctttggcttccc

SEQ ID NO: 85956 - DNA, 25 bp, Saccharomyces pastorianus
gtgtgtgctttagacttgaccaccc

SEQ ID NO: 85957 - DNA, 25 bp, Saccharomyces pastorianus
cgttaattatgattgcccgggttct

SEQ ID NO: 85958 - DNA, 25 bp, Saccharomyces pastorianus
gaagctactgtcgactcgttacagg

SEQ ID NO: 85959 - DNA, 25 bp, Saccharomyces pastorianus
ctggacgaccctagtcaagttttcg

SEQ ID NO: 85960 - DNA, 25 bp, Saccharomyces pastorianus
gaagccgtttgtagcgttttgcaat

SEQ ID NO: 85961 - DNA, 25 bp, Saccharomyces pastorianus
gaaattgactacacgtctgaagagc

SEQ ID NO: 85962 - DNA, 25 bp, Saccharomyces pastorianus
actgcgggtctgttaaccacttgaa

SEQ ID NO: 85963 - DNA, 25 bp, Saccharomyces pastorianus
aactgtggatgttctcatggatcat

SEQ ID NO: 85964 - DNA, 25 bp, Saccharomyces pastorianus
acgttttgcgactggacgaccctag

SEQ ID NO: 85965 - DNA, 25 bp, Saccharomyces pastorianus
atgtccgaaatgtgatacgttttgc

SEQ ID NO: 85966 - DNA, 25 bp, Saccharomyces pastorianus
atacctcgaggtgggaaatgtccga

SEQ ID NO: 85967 - DNA, 25 bp, Saccharomyces pastorianus
aagatcgtgtcgtaaagcataaagc

SEQ ID NO: 85968 - DNA, 25 bp, Saccharomyces pastorianus
aatgtcttcacaggtactttctaga

SEQ ID NO: 85969 - DNA, 25 bp, Saccharomyces pastorianus
ggatgaacttgatagtcgacgtttt

SEQ ID NO: 85970 - DNA, 25 bp, Saccharomyces pastorianus
agatcaccattcttaacctatcgct

SEQ ID NO: 85971 - DNA, 25 bp, Saccharomyces pastorianus
agaatatttctgcaccattggataa

SEQ ID NO: 85972 - DNA, 25 bp, Saccharomyces pastorianus
gataggcattcaccacaatactttg

SEQ ID NO: 85973 - DNA, 25 bp, Saccharomyces pastorianus
ttatagcccctgataccgagggacg

SEQ ID NO: 85974 - DNA, 25 bp, Saccharomyces pastorianus
gggacgagccgttggagatctttat

SEQ ID NO: 85975 - DNA, 25 bp, Saccharomyces pastorianus
gaattcgcatctttacactctttta

SEQ ID NO: 85976 - DNA, 25 bp, Saccharomyces pastorianus
gtcacggagcctggccaatcagaaa

SEQ ID NO: 85977 - DNA, 25 bp, Saccharomyces pastorianus
gaaggcggtcacattattactatga

SEQ ID NO: 85978 - DNA, 25 bp, Saccharomyces pastorianus
gtctattagtcaaacctgtcacgga

SEQ ID NO: 85979 - DNA, 25 bp, Saccharomyces pastorianus
tttcccacccggtatattctatgaa

SEQ ID NO: 85980 - DNA, 25 bp, Saccharomyces pastorianus
agttcattgccgactagatcgtcat

SEQ ID NO: 85981 - DNA, 25 bp, Saccharomyces pastorianus
cagatcatttctggcgggctacgac

SEQ ID NO: 85982 - DNA, 25 bp, Saccharomyces pastorianus
acaaggatgggttcttggcccggca

SEQ ID NO: 85983 - DNA, 25 bp, Saccharomyces pastorianus
aaatctcagctggactgggctagtt

SEQ ID NO: 85984 - DNA, 25 bp, Saccharomyces pastorianus
gttaactgttgaatcgatccctgca

SEQ ID NO: 85985 - DNA, 25 bp, Saccharomyces pastorianus
aaccgtcttttgagcagttcaggga

SEQ ID NO: 85986 - DNA, 25 bp, Saccharomyces pastorianus
caacggccgcgcaacaggaggacaa

SEQ ID NO: 85987 - DNA, 25 bp, Saccharomyces pastorianus
gttatgtagaccgtgctggacttaa

SEQ ID NO: 85988 - DNA, 25 bp, Saccharomyces pastorianus
ctgctgctcctgttcaactggaaaa

SEQ ID NO: 85989 - DNA, 25 bp, Saccharomyces pastorianus
ttcagggaaagtcggctctgttctc

SEQ ID NO: 85990 - DNA, 25 bp, Saccharomyces pastorianus
gcaacacttgcggtggccactgaaa

SEQ ID NO: 85991 - DNA, 25 bp, Saccharomyces pastorianus
gttctcgacggttccaaggaggcta

SEQ ID NO: 85992 - DNA, 25 bp, Saccharomyces pastorianus
ttccttttgagcgtgttgggagaaa

SEQ ID NO: 85993 - DNA, 25 bp, Saccharomyces pastorianus
aatcgtggtcgttgtcagagtggct

SEQ ID NO: 85994 - DNA, 25 bp, Saccharomyces pastorianus
gaagcgtgtttgactaagcacagca

SEQ ID NO: 85995 - DNA, 25 bp, Saccharomyces pastorianus
atccttcagggccacgcgtttgatt

SEQ ID NO: 85996 - DNA, 25 bp, Saccharomyces pastorianus
tgatggttttgtagtctctgtggac

SEQ ID NO: 85997 - DNA, 25 bp, Saccharomyces pastorianus
agttgttcctcgctggtgtcttcac

SEQ ID NO: 85998 - DNA, 25 bp, Saccharomyces pastorianus
attctagcagaggtttcggatttta

SEQ ID NO: 85999 - DNA, 25 bp, Saccharomyces pastorianus
gcccttgtgtcctactatcagtgaa

SEQ ID NO: 86000 - DNA, 25 bp, Saccharomyces pastorianus
agagtggctgtctgcatccttcagg

SEQ ID NO: 86001 - DNA, 25 bp, Saccharomyces pastorianus
attctagatatagtggcgcccttgt

SEQ ID NO: 86002 - DNA, 25 bp, Saccharomyces pastorianus
gtttgatttctgcttccagttgttc

SEQ ID NO: 86003 - DNA, 25 bp, Saccharomyces pastorianus
ttgagtatggccacaccgcagtata

SEQ ID NO: 86004 - DNA, 25 bp, Saccharomyces pastorianus
gctatccatattgctactttctaca

SEQ ID NO: 86005 - DNA, 25 bp, Saccharomyces pastorianus
gtatactactgctagcgttgcaaac

SEQ ID NO: 86006 - DNA, 25 bp, Saccharomyces pastorianus
gaaaccaccaatatcatccaagcga

SEQ ID NO: 86007 - DNA, 25 bp, Saccharomyces pastorianus
taatagaccatagccaaccgaacac

SEQ ID NO: 86008 - DNA, 25 bp, Saccharomyces pastorianus
atgtgacagtcttagacggccctgt

SEQ ID NO: 86009 - DNA, 25 bp, Saccharomyces pastorianus
aaccgaacaccattttccatcaaag

SEQ ID NO: 86010 - DNA, 25 bp, Saccharomyces pastorianus
ccgaacttcgttatccctaatgtga

SEQ ID NO: 86011 - DNA, 25 bp, Saccharomyces pastorianus
aactttcagatggaatctccgcaga

SEQ ID NO: 86012 - DNA, 25 bp, Saccharomyces pastorianus
ggcacccggcaaccatttattaatg

SEQ ID NO: 86013 - DNA, 25 bp, Saccharomyces pastorianus
aggtccatatactatcagccaactc

SEQ ID NO: 86014 - DNA, 25 bp, Saccharomyces pastorianus
ctttcacctttacagcaagaagtat

SEQ ID NO: 86015 - DNA, 25 bp, Saccharomyces pastorianus
tattcgcaacacaggcaacagcatt

SEQ ID NO: 86016 - DNA, 25 bp, Saccharomyces pastorianus
gattggtttagttgggacactgcta

SEQ ID NO: 86017 - DNA, 25 bp, Saccharomyces pastorianus
tcgccagatgagatactacaggaga

SEQ ID NO: 86018 - DNA, 25 bp, Saccharomyces pastorianus
agaactaaactattcgcaacacagg

SEQ ID NO: 86019 - DNA, 25 bp, Saccharomyces pastorianus
gcgtgtactcgcttatcttgcaaag

SEQ ID NO: 86020 - DNA, 25 bp, Saccharomyces pastorianus
gatctaaaagctctggatgaaacta

SEQ ID NO: 86021 - DNA, 25 bp, Saccharomyces pastorianus
atacaaacagctttctttagatcta

SEQ ID NO: 86022 - DNA, 25 bp, Saccharomyces pastorianus
caggcaacagcattcacagcaagaa

SEQ ID NO: 86023 - DNA, 25 bp, Saccharomyces pastorianus
tcacagcaagaaactgtatcgccag

SEQ ID NO: 86024 - DNA, 25 bp, Saccharomyces pastorianus
gaacacaatctttcacctttacagc

SEQ ID NO: 86025 - DNA, 25 bp, Saccharomyces pastorianus
gtcaacacagtcgttaagacccgtt

SEQ ID NO: 86026 - DNA, 25 bp, Saccharomyces pastorianus
cgagtaatactttgccgaggacgag

SEQ ID NO: 86027 - DNA, 25 bp, Saccharomyces pastorianus
gatagtttagtcacagcgatgcaaa

SEQ ID NO: 86028 - DNA, 25 bp, Saccharomyces pastorianus
ttacgtcaattcgtgatgccttctc

SEQ ID NO: 86029 - DNA, 25 bp, Saccharomyces pastorianus
gaattatcaccttgtcgttccaaag

SEQ ID NO: 86030 - DNA, 25 bp, Saccharomyces pastorianus
agggcttacctccatgcatgttaat

SEQ ID NO: 86031 - DNA, 25 bp, Saccharomyces pastorianus
tgccgaacctgacctttcaaatggg

SEQ ID NO: 86032 - DNA, 25 bp, Saccharomyces pastorianus
taggtttcaatgatcttcccagcac

SEQ ID NO: 86033 - DNA, 25 bp, Saccharomyces pastorianus
gatttaattttttcaaccctgccag

SEQ ID NO: 86034 - DNA, 25 bp, Saccharomyces pastorianus
gccttctcggcatcgactaatattt

SEQ ID NO: 86035 - DNA, 25 bp, Saccharomyces pastorianus
tgaacagccgacactgatcccaatt

SEQ ID NO: 86036 - DNA, 25 bp, Saccharomyces pastorianus
gtttcgacgcaattttgcttgcatt

SEQ ID NO: 86037 - DNA, 25 bp, Saccharomyces pastorianus
catgtttgcattccgtaaggtaaaa

SEQ ID NO: 86038 - DNA, 25 bp, Saccharomyces pastorianus
cttgcattatgcttttgagaccgaa

SEQ ID NO: 86039 - DNA, 25 bp, Saccharomyces pastorianus
cttcccagactgtagatttccgtgt

SEQ ID NO: 86040 - DNA, 25 bp, Saccharomyces pastorianus
atgttgtgccattcgaaaccttaag

SEQ ID NO: 86041 - DNA, 25 bp, Saccharomyces pastorianus
atgagttcacatcgccttatggtca

SEQ ID NO: 86042 - DNA, 25 bp, Saccharomyces pastorianus
ggagagctttactgaatgtcgccaa

SEQ ID NO: 86043 - DNA, 25 bp, Saccharomyces pastorianus
taggtgttgcagtagagcccttccc

SEQ ID NO: 86044 - DNA, 25 bp, Saccharomyces pastorianus
gaatgtcgccaaatcactcaaaatt

SEQ ID NO: 86045 - DNA, 25 bp, Saccharomyces pastorianus
gatttccgtgtgatatcgtttcgac

SEQ ID NO: 86046 - DNA, 25 bp, Saccharomyces pastorianus
aagcggcatcatatttctataccat

SEQ ID NO: 86047 - DNA, 25 bp, Saccharomyces pastorianus
aacgatgagcctaaactatacttat

SEQ ID NO: 86048 - DNA, 25 bp, Saccharomyces pastorianus
gttcggcggcaaaggactggaaaat

SEQ ID NO: 86049 - DNA, 25 bp, Saccharomyces pastorianus
aaagcttcaaactctctgcaagcaa

SEQ ID NO: 86050 - DNA, 25 bp, Saccharomyces pastorianus
gtcgatcatcttttacgccaaggtt

SEQ ID NO: 86051 - DNA, 25 bp, Saccharomyces pastorianus
atgacagtgagcctgagtcttctgc

SEQ ID NO: 86052 - DNA, 25 bp, Saccharomyces pastorianus
ttctgcgcttattccgagactcaat

SEQ ID NO: 86053 - DNA, 25 bp, Saccharomyces pastorianus
gtctacagacgggtcgatcatcttt

SEQ ID NO: 86054 - DNA, 25 bp, Saccharomyces pastorianus
tgagtgccaagtttgaatccggtat

SEQ ID NO: 86055 - DNA, 25 bp, Saccharomyces pastorianus
ctatacttattgatcgaaggccaag

SEQ ID NO: 86056 - DNA, 25 bp, Saccharomyces pastorianus
atattaatgatttaccccagattgt

SEQ ID NO: 86057 - DNA, 25 bp, Saccharomyces pastorianus
caatccacacgaagggcatgacagt

SEQ ID NO: 86058 - DNA, 25 bp, Saccharomyces pastorianus
tatccagcattgcaagcagcgactg

SEQ ID NO: 86059 - DNA, 25 bp, Saccharomyces pastorianus
gattgggcggccttaagagatgcta

SEQ ID NO: 86060 - DNA, 25 bp, Saccharomyces pastorianus
atggacttctactcttatccagcat

SEQ ID NO: 86061 - DNA, 25 bp, Saccharomyces pastorianus
gatgaatttgctgcggaggctgctt

SEQ ID NO: 86062 - DNA, 25 bp, Saccharomyces pastorianus
ctatgggatctgtcgatgatgcttc

SEQ ID NO: 86063 - DNA, 25 bp, Saccharomyces pastorianus
tgcttcttcttccataccagttgac

SEQ ID NO: 86064 - DNA, 25 bp, Saccharomyces pastorianus
gactgcttctggtgcatttgatgaa

SEQ ID NO: 86065 - DNA, 25 bp, Saccharomyces pastorianus
gatgctactgtaacatggacccaaa

SEQ ID NO: 86066 - DNA, 25 bp, Saccharomyces pastorianus
ttcgccatccttaactccaatggat

SEQ ID NO: 86067 - DNA, 25 bp, Saccharomyces pastorianus
tccagcaccagagcatttgttcaac

SEQ ID NO: 86068 - DNA, 25 bp, Saccharomyces pastorianus
gtgattccagacaactagccagatt

SEQ ID NO: 86069 - DNA, 25 bp, Saccharomyces pastorianus
gaattcatacgcttccttgggaaaa

SEQ ID NO: 86070 - DNA, 25 bp, Saccharomyces pastorianus
gtcggagttacatgtcttggtcacg

SEQ ID NO: 86071 - DNA, 25 bp, Saccharomyces pastorianus
gtgtggtttctccagcaaaagctat

SEQ ID NO: 86072 - DNA, 25 bp, Saccharomyces pastorianus
aagataccacactttcatgttccca

SEQ ID NO: 86073 - DNA, 25 bp, Saccharomyces pastorianus
gaatgccgacttattcgaggatccc

SEQ ID NO: 86074 - DNA, 25 bp, Saccharomyces pastorianus
attttcgatgtatccgctggtcaac

SEQ ID NO: 86075 - DNA, 25 bp, Saccharomyces pastorianus
ggaactcgttgaccacggaattcat

SEQ ID NO: 86076 - DNA, 25 bp, Saccharomyces pastorianus
atatggcctcgtgcctgttcaaaga

SEQ ID NO: 86077 - DNA, 25 bp, Saccharomyces pastorianus
gacgacccggacatcaatatggcct

SEQ ID NO: 86078 - DNA, 25 bp, Saccharomyces pastorianus
gaggatccctatcaggacgagctta

SEQ ID NO: 86079 - DNA, 25 bp, Saccharomyces pastorianus
agagtgcatcgctcgttggagttgt

SEQ ID NO: 86080 - DNA, 25 bp, Saccharomyces pastorianus
aatgtcgttgtcactctagcagcat

SEQ ID NO: 86081 - DNA, 25 bp, Saccharomyces pastorianus
atgggcggctacgtatttgcgatct

SEQ ID NO: 86082 - DNA, 25 bp, Saccharomyces pastorianus
atcgctgccatgtttgctacatatg

SEQ ID NO: 86083 - DNA, 25 bp, Saccharomyces pastorianus
tgccgctacagctcaaagttttggt

SEQ ID NO: 86084 - DNA, 25 bp, Saccharomyces pastorianus
gccacttttgtctatattgccgcat

SEQ ID NO: 86085 - DNA, 25 bp, Saccharomyces pastorianus
atggcaatatgttaccgatccctca

SEQ ID NO: 86086 - DNA, 25 bp, Saccharomyces pastorianus
agattctaccggactactcgattca

SEQ ID NO: 86087 - DNA, 25 bp, Saccharomyces pastorianus
ttgcggcatcaactctattatcttc

SEQ ID NO: 86088 - DNA, 25 bp, Saccharomyces pastorianus
gagcgtatcctttttactggtcacg

SEQ ID NO: 86089 - DNA, 25 bp, Saccharomyces pastorianus
tattgcttgcctcgactacggtgat

SEQ ID NO: 86090 - DNA, 25 bp, Saccharomyces pastorianus
atccccttcttgatcattggtgagc

SEQ ID NO: 86091 - DNA, 25 bp, Saccharomyces pastorianus
aatgtgtccggatcgcattggtgca

SEQ ID NO: 86092 - DNA, 25 bp, Saccharomyces pastorianus
atatcctggcgtttttgaacgtggt

SEQ ID NO: 86093 - DNA, 25 bp, Saccharomyces pastorianus
tgaccttgtcgtgcagcgccaaaaa

SEQ ID NO: 86094 - DNA, 25 bp, Saccharomyces pastorianus
gggttaaccgcgataaatgtgtccg

SEQ ID NO: 86095 - DNA, 25 bp, Saccharomyces pastorianus
gtaatgctctgatcaagccatacaa

SEQ ID NO: 86096 - DNA, 25 bp, Saccharomyces pastorianus
atgtcacctcattggaagctagata

SEQ ID NO: 86097 - DNA, 25 bp, Saccharomyces pastorianus
ttggtgcacgatatcgccgaatctt

SEQ ID NO: 86098 - DNA, 25 bp, Saccharomyces pastorianus
catgctgatcaaggattcgcgggtt

SEQ ID NO: 86099 - DNA, 25 bp, Saccharomyces pastorianus
gcgatattactccagttgaccctat

SEQ ID NO: 86100 - DNA, 25 bp, Saccharomyces pastorianus
gaagaaccggttatcttgacctcgg

SEQ ID NO: 86101 - DNA, 25 bp, Saccharomyces pastorianus
taaaccccatccaaactatatcctg

SEQ ID NO: 86102 - DNA, 25 bp, Saccharomyces pastorianus
aagagactcccataggttttccgct

SEQ ID NO: 86103 - DNA, 25 bp, Saccharomyces pastorianus
gttactatactgtctccatttgatt

SEQ ID NO: 86104 - DNA, 25 bp, Saccharomyces pastorianus
gttttccgctgttttgattatccca

SEQ ID NO: 86105 - DNA, 25 bp, Saccharomyces pastorianus
gtcctcagctattcaaattggtccc

SEQ ID NO: 86106 - DNA, 25 bp, Saccharomyces pastorianus
gaacgatttgctgtacttctcgatg

SEQ ID NO: 86107 - DNA, 25 bp, Saccharomyces pastorianus
aatggtattcgcagtcgttggtata

SEQ ID NO: 86108 - DNA, 25 bp, Saccharomyces pastorianus
gaagacacgctataggcgctatcat

SEQ ID NO: 86109 - DNA, 25 bp, Saccharomyces pastorianus
gacattagtatggtttggccctatg

SEQ ID NO: 86110 - DNA, 25 bp, Saccharomyces pastorianus
ggaaatggaatcgttggcccgccac

SEQ ID NO: 86111 - DNA, 25 bp, Saccharomyces pastorianus
gatgcttttgctattcattcctcaa

SEQ ID NO: 86112 - DNA, 25 bp, Saccharomyces pastorianus
catttttgggtgtatccttggcgct

SEQ ID NO: 86113 - DNA, 25 bp, Saccharomyces pastorianus
aagttcttagttgattccaatggta

SEQ ID NO: 86114 - DNA, 25 bp, Saccharomyces pastorianus
cacgccgcagtataaagaattggaa

SEQ ID NO: 86115 - DNA, 25 bp, Saccharomyces pastorianus
agttctcatagttaatgttgcctcc

SEQ ID NO: 86116 - DNA, 25 bp, Saccharomyces pastorianus
ctccttaacaaaaccatcgtccttg

SEQ ID NO: 86117 - DNA, 25 bp, Saccharomyces pastorianus
gaattatggcgttacattcccaatt

SEQ ID NO: 86118 - DNA, 25 bp, Saccharomyces pastorianus
aattacggaattttgccagttgaat

SEQ ID NO: 86119 - DNA, 25 bp, Saccharomyces pastorianus
aacggaagtaatgctgactctgtct

SEQ ID NO: 86120 - DNA, 25 bp, Saccharomyces pastorianus
gggttcccatgtaatcagttcggga

SEQ ID NO: 86121 - DNA, 25 bp, Saccharomyces pastorianus
gcgaatcttttaagtttgaccaact

SEQ ID NO: 86122 - DNA, 25 bp, Saccharomyces pastorianus
aatgttgcctccaagtgcggcttca

SEQ ID NO: 86123 - DNA, 25 bp, Saccharomyces pastorianus
gctgactctgtctataattatttga

SEQ ID NO: 86124 - DNA, 25 bp, Saccharomyces pastorianus
gctccgatcggcttttagtttgttg

SEQ ID NO: 86125 - DNA, 25 bp, Saccharomyces pastorianus
gcccacgacttacgttccaaagaat

SEQ ID NO: 86126 - DNA, 25 bp, Saccharomyces pastorianus
tttgaaaccccatgaactcgagtgt

SEQ ID NO: 86127 - DNA, 25 bp, Saccharomyces pastorianus
gatctctacagccttttcaagacgt

SEQ ID NO: 86128 - DNA, 25 bp, Saccharomyces pastorianus
aacattcgttctctggatttaagga

SEQ ID NO: 86129 - DNA, 25 bp, Saccharomyces pastorianus
gtgtagtcaacctaactttcgaaat

SEQ ID NO: 86130 - DNA, 25 bp, Saccharomyces pastorianus
tacggtggcgactggtcaaattctt

SEQ ID NO: 86131 - DNA, 25 bp, Saccharomyces pastorianus
ggactgcggaatttggatctctaca

SEQ ID NO: 86132 - DNA, 25 bp, Saccharomyces pastorianus
gattcgaggattatggcccacgact

SEQ ID NO: 86133 - DNA, 25 bp, Saccharomyces pastorianus
gggtgagtccatatttcctggtgaa

SEQ ID NO: 86134 - DNA, 25 bp, Saccharomyces pastorianus
aaattctttgatcgcaacatgctca

SEQ ID NO: 86135 - DNA, 25 bp, Saccharomyces pastorianus
gccagcagggagtttgttgatccac

SEQ ID NO: 86136 - DNA, 25 bp, Saccharomyces pastorianus
gtttccgtgacaatatcgagaccag

SEQ ID NO: 86137 - DNA, 25 bp, Saccharomyces pastorianus
aaactatcatatataccgtgcggtg

SEQ ID NO: 86138 - DNA, 25 bp, Saccharomyces pastorianus
tcaaaggtttcctattcccattggt

SEQ ID NO: 86139 - DNA, 25 bp, Saccharomyces pastorianus
ggccataaagatatcggtcctgaga

SEQ ID NO: 86140 - DNA, 25 bp, Saccharomyces pastorianus
taccagacggtggacgactgcgtgt

SEQ ID NO: 86141 - DNA, 25 bp, Saccharomyces pastorianus
gacgactgcgtgtattactttatga

SEQ ID NO: 86142 - DNA, 25 bp, Saccharomyces pastorianus
aaaatatgctttaccgtaccagacg

SEQ ID NO: 86143 - DNA, 25 bp, Saccharomyces pastorianus
ttacaagaacgatattacccaggat

SEQ ID NO: 86144 - DNA, 25 bp, Saccharomyces pastorianus
ctctccacctacaactgtttttatc

SEQ ID NO: 86145 - DNA, 25 bp, Saccharomyces pastorianus
ggctttcttaacatttgcacaacgt

SEQ ID NO: 86146 - DNA, 25 bp, Saccharomyces pastorianus
agagaattggcctccggtttgtctt

SEQ ID NO: 86147 - DNA, 25 bp, Saccharomyces pastorianus
atcgctaacggtgaaaacgccatta

SEQ ID NO: 86148 - DNA, 25 bp, Saccharomyces pastorianus
cgtcttgaggaaattggctgctgct

SEQ ID NO: 86149 - DNA, 25 bp, Saccharomyces pastorianus
gaacactgcttcgttattctaagag

SEQ ID NO: 86150 - DNA, 25 bp, Saccharomyces pastorianus
tttgtctttcccagttggtttcaag

SEQ ID NO: 86151 - DNA, 25 bp, Saccharomyces pastorianus
tatggtgtttccatcactgatgctt

SEQ ID NO: 86152 - DNA, 25 bp, Saccharomyces pastorianus
aactacgacgctaagtccgttgcag

SEQ ID NO: 86153 - DNA, 25 bp, Saccharomyces pastorianus
ctaatgattgactactctcacggta

SEQ ID NO: 86154 - DNA, 25 bp, Saccharomyces pastorianus
gtaccttaaatgttgctgtggatgc

SEQ ID NO: 86155 - DNA, 25 bp, Saccharomyces pastorianus
gaaggtaaccaaggcatcccagccg

SEQ ID NO: 86156 - DNA, 25 bp, Saccharomyces pastorianus
ctgccggttccaacggtctaatgat

SEQ ID NO: 86157 - DNA, 25 bp, Saccharomyces pastorianus
aacctatgcggatggtctaccgagc

SEQ ID NO: 86158 - DNA, 25 bp, Saccharomyces pastorianus
tttcgattccgacaagaccattttc

SEQ ID NO: 86159 - DNA, 25 bp, Saccharomyces pastorianus
gatgacgttgtcatcccaacctatg

SEQ ID NO: 86160 - DNA, 25 bp, Saccharomyces pastorianus
gaccattttcggattttgctttgat

SEQ ID NO: 86161 - DNA, 25 bp, Saccharomyces pastorianus
atcgtattacggtgaattttccaat

SEQ ID NO: 86162 - DNA, 25 bp, Saccharomyces pastorianus
catgctgccctcaaagtaactcatt

SEQ ID NO: 86163 - DNA, 25 bp, Saccharomyces pastorianus
gaccagctctttgttacccaaatat

SEQ ID NO: 86164 - DNA, 25 bp, Saccharomyces pastorianus
gatagtgatatttcgaccagctctt

SEQ ID NO: 86165 - DNA, 25 bp, Saccharomyces pastorianus
tcattttatcccaatcatgctgccc

SEQ ID NO: 86166 - DNA, 25 bp, Saccharomyces pastorianus
aggaagcttctttggcagttgcaca

SEQ ID NO: 86167 - DNA, 25 bp, Saccharomyces pastorianus
ggtatgcctttccaaatgatattat

SEQ ID NO: 86168 - DNA, 25 bp, Saccharomyces pastorianus
tatgccttggttgtcgttggtgaca

SEQ ID NO: 86169 - DNA, 25 bp, Saccharomyces pastorianus
aagacattggatgaggttgccctgg

SEQ ID NO: 86170 - DNA, 25 bp, Saccharomyces pastorianus
agcgatctttaaagctcattgggat

SEQ ID NO: 86171 - DNA, 25 bp, Saccharomyces pastorianus
ggtgtagatccggattatatcacta

SEQ ID NO: 86172 - DNA, 25 bp, Saccharomyces pastorianus
gaaggtaacattctgcctccaggag

SEQ ID NO: 86173 - DNA, 25 bp, Saccharomyces pastorianus
tccaggagtcagcttaccaaacgat

SEQ ID NO: 86174 - DNA, 25 bp, Saccharomyces pastorianus
acgtgtaaaccatgtaatctttgag

SEQ ID NO: 86175 - DNA, 25 bp, Saccharomyces pastorianus
aaaattgcgtctttctatgccttgg

SEQ ID NO: 86176 - DNA, 25 bp, Saccharomyces pastorianus
aaggtaccatcgaggctttcacgaa

SEQ ID NO: 86177 - DNA, 25 bp, Saccharomyces pastorianus
aagttgactatgaagccgctggtga

SEQ ID NO: 86178 - DNA, 25 bp, Saccharomyces pastorianus
aagcgccgatgtagctgcagggcta

SEQ ID NO: 86179 - DNA, 25 bp, Saccharomyces pastorianus
aagcgctactgtacctaccaaaggt

SEQ ID NO: 86180 - DNA, 25 bp, Saccharomyces pastorianus
tacggtcgtattgcgccaaggtcag

SEQ ID NO: 86181 - DNA, 25 bp, Saccharomyces pastorianus
ttcacagagggatttcgcgatcaaa

SEQ ID NO: 86182 - DNA, 25 bp, Saccharomyces pastorianus
actgccgcgggatacgacatttatg

SEQ ID NO: 86183 - DNA, 25 bp, Saccharomyces pastorianus
gacatatcgttcaccgtacctgttg

SEQ ID NO: 86184 - DNA, 25 bp, Saccharomyces pastorianus
ctcaggatattaccattccggctat

SEQ ID NO: 86185 - DNA, 25 bp, Saccharomyces pastorianus
ttccggctatgggtcaaggtatggt

SEQ ID NO: 86186 - DNA, 25 bp, Saccharomyces pastorianus
tacctgttggtacctacggtcgtat

SEQ ID NO: 86187 - DNA, 25 bp, Saccharomyces pastorianus
gatcgcgtagcccaattgattctgg

SEQ ID NO: 86188 - DNA, 25 bp, Saccharomyces pastorianus
gatgcccagatcgttgttgtagact

SEQ ID NO: 86189 - DNA, 25 bp, Saccharomyces pastorianus
aggtatggtttccaccgacatatcg

SEQ ID NO: 86190 - DNA, 25 bp, Saccharomyces pastorianus
atggctactgaaccaaattcctgta

SEQ ID NO: 86191 - DNA, 25 bp, Saccharomyces pastorianus
gattctgtctgtgaagctggcggaa

SEQ ID NO: 86192 - DNA, 25 bp, Saccharomyces pastorianus
ctgtggccacgaccagtgtgatgat

SEQ ID NO: 86193 - DNA, 25 bp, Saccharomyces pastorianus
gatgacgaggattcattcgcacaag

SEQ ID NO: 86194 - DNA, 25 bp, Saccharomyces pastorianus
ggaacactcaaaagtgactcgtttt

SEQ ID NO: 86195 - DNA, 25 bp, Saccharomyces pastorianus
gaaaattctgagctcgctgtggcca

SEQ ID NO: 86196 - DNA, 25 bp, Saccharomyces pastorianus
gaacaaaccaggacgattctgtctg

SEQ ID NO: 86197 - DNA, 25 bp, Saccharomyces pastorianus
atatgactacgatagccgatagaaa

SEQ ID NO: 86198 - DNA, 25 bp, Saccharomyces pastorianus
gacttgttgatcctgaccagatcga

SEQ ID NO: 86199 - DNA, 25 bp, Saccharomyces pastorianus
gcaaccaggcactatatgagaaact

SEQ ID NO: 86200 - DNA, 25 bp, Saccharomyces pastorianus
ggtgaataaccagaccatgcaattg

SEQ ID NO: 86201 - DNA, 25 bp, Saccharomyces pastorianus
tggcaaattaatccgacttcacagt

SEQ ID NO: 86202 - DNA, 25 bp, Saccharomyces pastorianus
tgggaactcagccaacagtagcgta

SEQ ID NO: 86203 - DNA, 25 bp, Saccharomyces pastorianus
aatccgttcatactgcatgcatcac

SEQ ID NO: 86204 - DNA, 25 bp, Saccharomyces pastorianus
atccaatggcggtggtgggttcctt

SEQ ID NO: 86205 - DNA, 25 bp, Saccharomyces pastorianus
taggagcccggcattcgactcgagg

SEQ ID NO: 86206 - DNA, 25 bp, Saccharomyces pastorianus
aaatccacagggttttcctcaggat

SEQ ID NO: 86207 - DNA, 25 bp, Saccharomyces pastorianus
agggcaatcctgtctatgaaatcga

SEQ ID NO: 86208 - DNA, 25 bp, Saccharomyces pastorianus
gaaatcgagtttaccaatgcagaaa

SEQ ID NO: 86209 - DNA, 25 bp, Saccharomyces pastorianus
ttacagaccctattaggagcccggc

SEQ ID NO: 86210 - DNA, 25 bp, Saccharomyces pastorianus
gggttccttcgatctagagctataa

SEQ ID NO: 86211 - DNA, 25 bp, Saccharomyces pastorianus
atgaggtcattctaccaagaggtac

SEQ ID NO: 86212 - DNA, 25 bp, Saccharomyces pastorianus
tggtttttgttcagcgtcctgagaa

SEQ ID NO: 86213 - DNA, 25 bp, Saccharomyces pastorianus
gactggacatcaaaacttctgaacg

SEQ ID NO: 86214 - DNA, 25 bp, Saccharomyces pastorianus
gaaactttgatatcatctagtgaca

SEQ ID NO: 86215 - DNA, 25 bp, Saccharomyces pastorianus
atatcggttgctggaatttggcatt

SEQ ID NO: 86216 - DNA, 25 bp, Saccharomyces pastorianus
gggagtatttacgaaggtgcgccta

SEQ ID NO: 86217 - DNA, 25 bp, Saccharomyces pastorianus
aagcgattccttacaggttgacgaa

SEQ ID NO: 86218 - DNA, 25 bp, Saccharomyces pastorianus
aaccagtgggattagtaagcgattc

SEQ ID NO: 86219 - DNA, 25 bp, Saccharomyces pastorianus
tactagtcaaggtagcgaaccagtg

SEQ ID NO: 86220 - DNA, 25 bp, Saccharomyces pastorianus
gaagactgcagatgctttgactcag

SEQ ID NO: 86221 - DNA, 25 bp, Saccharomyces pastorianus
gcgtcctgagaagcattcggttcac

SEQ ID NO: 86222 - DNA, 25 bp, Saccharomyces pastorianus
ggtgcgcctagggagaagactacta

SEQ ID NO: 86223 - DNA, 25 bp, Saccharomyces pastorianus
caccgattgtcacgttggagattca

SEQ ID NO: 86224 - DNA, 25 bp, Saccharomyces pastorianus
aaggtggagccttctatattagtat

SEQ ID NO: 86225 - DNA, 25 bp, Saccharomyces pastorianus
ttaggttcggtggtcattatgtaca

SEQ ID NO: 86226 - DNA, 25 bp, Saccharomyces pastorianus
aagtaatgtcgcttcctggattcaa

SEQ ID NO: 86227 - DNA, 25 bp, Saccharomyces pastorianus
gtatgccttactgtgaccgagttta

SEQ ID NO: 86228 - DNA, 25 bp, Saccharomyces pastorianus
aaggttgacccactttcgcaaggtg

SEQ ID NO: 86229 - DNA, 25 bp, Saccharomyces pastorianus
gagcggtatctcaagacgttaggtt

SEQ ID NO: 86230 - DNA, 25 bp, Saccharomyces pastorianus
gatggaacttccttgaccataatca

SEQ ID NO: 86231 - DNA, 25 bp, Saccharomyces pastorianus
gggagtattctcaccgattgtcacg

SEQ ID NO: 86232 - DNA, 25 bp, Saccharomyces pastorianus
gggtcacgtagacactgttgctaat

SEQ ID NO: 86233 - DNA, 25 bp, Saccharomyces pastorianus
ggattcaaggcaccaaggtcaactt

SEQ ID NO: 86234 - DNA, 25 bp, Saccharomyces pastorianus
tacagaagtgtggatcgtgcaggca

SEQ ID NO: 86235 - DNA, 25 bp, Saccharomyces pastorianus
tacgaatcattaccgcagtacgttg

SEQ ID NO: 86236 - DNA, 25 bp, Saccharomyces pastorianus
aggcattgtgatctgggactctcag

SEQ ID NO: 86237 - DNA, 25 bp, Saccharomyces pastorianus
aagactttaataggccttcaaggca

SEQ ID NO: 86238 - DNA, 25 bp, Saccharomyces pastorianus
gggactctcagaaattttttatcat

SEQ ID NO: 86239 - DNA, 25 bp, Saccharomyces pastorianus
tacgttgattttgtaccgatgtata

SEQ ID NO: 86240 - DNA, 25 bp, Saccharomyces pastorianus
aaagggcacagtatttcaatttgaa

SEQ ID NO: 86241 - DNA, 25 bp, Saccharomyces pastorianus
ggaagaccttttacactacatagag

SEQ ID NO: 86242 - DNA, 25 bp, Saccharomyces pastorianus
aatggtgcgctgttacgcgttacaa

SEQ ID NO: 86243 - DNA, 25 bp, Saccharomyces pastorianus
ggagaagcatccaacgatatacgaa

SEQ ID NO: 86244 - DNA, 25 bp, Saccharomyces pastorianus
ggcaggaagttcaaaagtcgtcgtt

SEQ ID NO: 86245 - DNA, 25 bp, Saccharomyces pastorianus
aaaacagagggctaaccagtgcatt

SEQ ID NO: 86246 - DNA, 25 bp, Saccharomyces pastorianus
aagagttgccagtactgttaaagaa

SEQ ID NO: 86247 - DNA, 25 bp, Saccharomyces pastorianus
acttggatgtctatgtacggtctaa

SEQ ID NO: 86248 - DNA, 25 bp, Saccharomyces pastorianus
aaggagggacattttgacaagttga

SEQ ID NO: 86249 - DNA, 25 bp, Saccharomyces pastorianus
aaagggacaacttcaggaaacactg

SEQ ID NO: 86250 - DNA, 25 bp, Saccharomyces pastorianus
gaatcttttgaacaagcgcttagga

SEQ ID NO: 86251 - DNA, 25 bp, Saccharomyces pastorianus
caaggacaactacctaaagctgggt

SEQ ID NO: 86252 - DNA, 25 bp, Saccharomyces pastorianus
gttacaggatcccaaactattggaa

SEQ ID NO: 86253 - DNA, 25 bp, Saccharomyces pastorianus
agaaatattgtctaacccatggaat

SEQ ID NO: 86254 - DNA, 25 bp, Saccharomyces pastorianus
tacggtctaagttacaggatcccaa

SEQ ID NO: 86255 - DNA, 25 bp, Saccharomyces pastorianus
gggctaaccagtgcattgattgaat

SEQ ID NO: 86256 - DNA, 25 bp, Saccharomyces pastorianus
gaaactcgtttccaacatgtgtact

SEQ ID NO: 86257 - DNA, 25 bp, Saccharomyces pastorianus
aatagttggccagatttcgcgaata

SEQ ID NO: 86258 - DNA, 25 bp, Saccharomyces pastorianus
caatgaaccattttggcctaaccaa

SEQ ID NO: 86259 - DNA, 25 bp, Saccharomyces pastorianus
gaaccctctttggtacatgcgataa

SEQ ID NO: 86260 - DNA, 25 bp, Saccharomyces pastorianus
gaaggttgcttggaacggctagtaa

SEQ ID NO: 86261 - DNA, 25 bp, Saccharomyces pastorianus
atctggtgtcattattttgtcctac

SEQ ID NO: 86262 - DNA, 25 bp, Saccharomyces pastorianus
gttgattccttatcattaactagca

SEQ ID NO: 86263 - DNA, 25 bp, Saccharomyces pastorianus
ttggcctaaccaatcaattgcgaat

SEQ ID NO: 86264 - DNA, 25 bp, Saccharomyces pastorianus
gcatttgcattccacctttttgaaa

SEQ ID NO: 86265 - DNA, 25 bp, Saccharomyces pastorianus
acggctagtaatagaatctctccaa

SEQ ID NO: 86266 - DNA, 25 bp, Saccharomyces pastorianus
aatctctccaaattctagaaccctc

SEQ ID NO: 86267 - DNA, 25 bp, Saccharomyces pastorianus
gaaacggattcttcggtcacaaggt

SEQ ID NO: 86268 - DNA, 25 bp, Saccharomyces pastorianus
gatgccggcaagtactggctgatct

SEQ ID NO: 86269 - DNA, 25 bp, Saccharomyces pastorianus
gtagtacccacaatggatgtcctgg

SEQ ID NO: 86270 - DNA, 25 bp, Saccharomyces pastorianus
gtcacaaggtcagatgctaagttca

SEQ ID NO: 86271 - DNA, 25 bp, Saccharomyces pastorianus
agcacgccgctaagatagaccttgt

SEQ ID NO: 86272 - DNA, 25 bp, Saccharomyces pastorianus
ggatgctgcctcaggagaacaacgt

SEQ ID NO: 86273 - DNA, 25 bp, Saccharomyces pastorianus
gggatccaataacttcctgcgtaaa

SEQ ID NO: 86274 - DNA, 25 bp, Saccharomyces pastorianus
tgcacgttgaattggctgagctgaa

SEQ ID NO: 86275 - DNA, 25 bp, Saccharomyces pastorianus
gcctaaagctcatcgccagtgaaag

SEQ ID NO: 86276 - DNA, 25 bp, Saccharomyces pastorianus
ttggtttgcaacctaatgggacaat

SEQ ID NO: 86277 - DNA, 25 bp, Saccharomyces pastorianus
gtgaaagacaacgtggcttaccaag

SEQ ID NO: 86278 - DNA, 25 bp, Saccharomyces pastorianus
ggagaccaggaaccgcaagctagtt

SEQ ID NO: 86279 - DNA, 25 bp, Saccharomyces pastorianus
gtaccgatacagtaacaatggctac

SEQ ID NO: 86280 - DNA, 25 bp, Saccharomyces pastorianus
tctgttttttacctgtaccgataca

SEQ ID NO: 86281 - DNA, 25 bp, Saccharomyces pastorianus
tgatggcactgcatggagtaggacc

SEQ ID NO: 86282 - DNA, 25 bp, Saccharomyces pastorianus
gatcacgatgctacatggttgaaac

SEQ ID NO: 86283 - DNA, 25 bp, Saccharomyces pastorianus
aacaagatcatcaggtacaggacct

SEQ ID NO: 86284 - DNA, 25 bp, Saccharomyces pastorianus
aagctagttgtgacggatgatggca

SEQ ID NO: 86285 - DNA, 25 bp, Saccharomyces pastorianus
tgggtccgttagcaagatctgtgaa

SEQ ID NO: 86286 - DNA, 25 bp, Saccharomyces pastorianus
tctctgtgggagtaatcggttctgt

SEQ ID NO: 86287 - DNA, 25 bp, Saccharomyces pastorianus
gatctgtgaagtggactctctctgt

SEQ ID NO: 86288 - DNA, 25 bp, Saccharomyces pastorianus
aatggctacttctacgatcacgatg

SEQ ID NO: 86289 - DNA, 25 bp, Saccharomyces pastorianus
cagggtctgccgtatgtggccgtaa

SEQ ID NO: 86290 - DNA, 25 bp, Saccharomyces pastorianus
tacaggaccgtgctcagggaacgca

SEQ ID NO: 86291 - DNA, 25 bp, Saccharomyces pastorianus
atcagtttggttcccgaaagtcaat

SEQ ID NO: 86292 - DNA, 25 bp, Saccharomyces pastorianus
ggctacgataggtgcggcgttcatc

SEQ ID NO: 86293 - DNA, 25 bp, Saccharomyces pastorianus
ttctaacgacgcctctacggagaaa

SEQ ID NO: 86294 - DNA, 25 bp, Saccharomyces pastorianus
gacaatcgaggttccttctaacgac

SEQ ID NO: 86295 - DNA, 25 bp, Saccharomyces pastorianus
agtggtactgctaggagattcatca

SEQ ID NO: 86296 - DNA, 25 bp, Saccharomyces pastorianus
gacgtatccagtctgcaatgtgcaa

SEQ ID NO: 86297 - DNA, 25 bp, Saccharomyces pastorianus
cactggtgccaatgtattatcgaga

SEQ ID NO: 86298 - DNA, 25 bp, Saccharomyces pastorianus
ataccggcggagttacagggtctgc

SEQ ID NO: 86299 - DNA, 25 bp, Saccharomyces pastorianus
ggcgttcatcaccaagacaatcgag

SEQ ID NO: 86300 - DNA, 25 bp, Saccharomyces pastorianus
tattcccagtatgcgcctgcaaaag

SEQ ID NO: 86301 - DNA, 25 bp, Saccharomyces pastorianus
gacgaacttccgtatcagttgtgtt

SEQ ID NO: 86302 - DNA, 25 bp, Saccharomyces pastorianus
tggtcgtgccattctacatggttgg

SEQ ID NO: 86303 - DNA, 25 bp, Saccharomyces pastorianus
gcgctttacccatttgtgggctatt

SEQ ID NO: 86304 - DNA, 25 bp, Saccharomyces pastorianus
gtgtcctatcaaacattctggtcgt

SEQ ID NO: 86305 - DNA, 25 bp, Saccharomyces pastorianus
acatggttggctgttcctggtatat

SEQ ID NO: 86306 - DNA, 25 bp, Saccharomyces pastorianus
tggaccttgggctcaccgcaaagaa

SEQ ID NO: 86307 - DNA, 25 bp, Saccharomyces pastorianus
tgtgatatcattgccaagtcgctgg

SEQ ID NO: 86308 - DNA, 25 bp, Saccharomyces pastorianus
gtggcacatcagattgcccttgcag

SEQ ID NO: 86309 - DNA, 25 bp, Saccharomyces pastorianus
acaaagttgatcgaaggcccctcag

SEQ ID NO: 86310 - DNA, 25 bp, Saccharomyces pastorianus
aaaagccgctttgttccgttgcaat

SEQ ID NO: 86311 - DNA, 25 bp, Saccharomyces pastorianus
ccacgggttttatatcccagaacag

SEQ ID NO: 86312 - DNA, 25 bp, Saccharomyces pastorianus
gggcgtgcagactcaacagcgtgtt

SEQ ID NO: 86313 - DNA, 25 bp, Saccharomyces pastorianus
ctacgattttacaagctcatacgca

SEQ ID NO: 86314 - DNA, 25 bp, Saccharomyces pastorianus
gttcttacctgccttcgacaaaaag

SEQ ID NO: 86315 - DNA, 25 bp, Saccharomyces pastorianus
atatctagtcgacaagatcggcttg

SEQ ID NO: 86316 - DNA, 25 bp, Saccharomyces pastorianus
ggagaacgttgaccgctgtaagaca

SEQ ID NO: 86317 - DNA, 25 bp, Saccharomyces pastorianus
ggtatagagctgcatctaccgacag

SEQ ID NO: 86318 - DNA, 25 bp, Saccharomyces pastorianus
gacgacgaagatctgccacaagagt

SEQ ID NO: 86319 - DNA, 25 bp, Saccharomyces pastorianus
gagacgagatcgttcttacctgcct

SEQ ID NO: 86320 - DNA, 25 bp, Saccharomyces pastorianus
accctggtcgctgcagagacgagat

SEQ ID NO: 86321 - DNA, 25 bp, Saccharomyces pastorianus
gagacactgtaaaattccctacgaa

SEQ ID NO: 86322 - DNA, 25 bp, Saccharomyces pastorianus
gcgtagcttttcttgcattactctt

SEQ ID NO: 86323 - DNA, 25 bp, Saccharomyces pastorianus
gttccaggttttcttcaacatcttt

SEQ ID NO: 86324 - DNA, 25 bp, Saccharomyces pastorianus
gcagcagctgcagacactttggagt

SEQ ID NO: 86325 - DNA, 25 bp, Saccharomyces pastorianus
tcttggctcttttgcatgttttcaa

SEQ ID NO: 86326 - DNA, 25 bp, Saccharomyces pastorianus
gacttgctagtactggcagcagctg

SEQ ID NO: 86327 - DNA, 25 bp, Saccharomyces pastorianus
atgttttcaagcatattagccctgg

SEQ ID NO: 86328 - DNA, 25 bp, Saccharomyces pastorianus
ttagccctggcaatttccaacagtt

SEQ ID NO: 86329 - DNA, 25 bp, Saccharomyces pastorianus
agcttgcttaggtcgggagtatctc

SEQ ID NO: 86330 - DNA, 25 bp, Saccharomyces pastorianus
gtaacaggtttctccttttcagcag

SEQ ID NO: 86331 - DNA, 25 bp, Saccharomyces pastorianus
gaatatcgactctgttgcgtagctt

SEQ ID NO: 86332 - DNA, 25 bp, Saccharomyces pastorianus
ctttttcttttcgagcaatgcttgc

SEQ ID NO: 86333 - DNA, 25 bp, Saccharomyces pastorianus
atcgaccagtcgtgtcttatataat

SEQ ID NO: 86334 - DNA, 25 bp, Saccharomyces pastorianus
tgtcgtcgtgtcctgcgggaacatc

SEQ ID NO: 86335 - DNA, 25 bp, Saccharomyces pastorianus
ttaagtcagtggtgtcgtcgtgtcc

SEQ ID NO: 86336 - DNA, 25 bp, Saccharomyces pastorianus
gacccagagggacaggctctcttaa

SEQ ID NO: 86337 - DNA, 25 bp, Saccharomyces pastorianus
atggagcgtattggatagtgatcac

SEQ ID NO: 86338 - DNA, 25 bp, Saccharomyces pastorianus
acaggttgatatcgaccagtcgtgt

SEQ ID NO: 86339 - DNA, 25 bp, Saccharomyces pastorianus
cgggaacatcgcttaacttaaacat

SEQ ID NO: 86340 - DNA, 25 bp, Saccharomyces pastorianus
aagacgcagtggcactcgaggacaa

SEQ ID NO: 86341 - DNA, 25 bp, Saccharomyces pastorianus
tcgaacatgcggctgaggacccaga

SEQ ID NO: 86342 - DNA, 25 bp, Saccharomyces pastorianus
cgcgcagtttgggttacaggttgat

SEQ ID NO: 86343 - DNA, 25 bp, Saccharomyces pastorianus
gatcacgttgtcgaacatgcggctg

SEQ ID NO: 86344 - DNA, 25 bp, Saccharomyces pastorianus
tagagactccatcattcttccgtat

SEQ ID NO: 86345 - DNA, 25 bp, Saccharomyces pastorianus
gaggaattcattaccacttcacttt

SEQ ID NO: 86346 - DNA, 25 bp, Saccharomyces pastorianus
caggtttactacgacatgatggcag

SEQ ID NO: 86347 - DNA, 25 bp, Saccharomyces pastorianus
gaaccttcaaggtacgcaccgtcaa

SEQ ID NO: 86348 - DNA, 25 bp, Saccharomyces pastorianus
gtgttactgcccttcgagaaaagct

SEQ ID NO: 86349 - DNA, 25 bp, Saccharomyces pastorianus
acgctgctgcagtgttttgggatcc

SEQ ID NO: 86350 - DNA, 25 bp, Saccharomyces pastorianus
cgcaccgtcaattgatgtcctttta

SEQ ID NO: 86351 - DNA, 25 bp, Saccharomyces pastorianus
actactggcttgacggatatctatc

SEQ ID NO: 86352 - DNA, 25 bp, Saccharomyces pastorianus
gacggtgccagtaagagttttcaaa

SEQ ID NO: 86353 - DNA, 25 bp, Saccharomyces pastorianus
taacgcactcaaggtttttggccga

SEQ ID NO: 86354 - DNA, 25 bp, Saccharomyces pastorianus
gatattgaccggctgctggaatttt

SEQ ID NO: 86355 - DNA, 25 bp, Saccharomyces pastorianus
agatcacctggattacctacatacc

SEQ ID NO: 86356 - DNA, 25 bp, Saccharomyces pastorianus
gatatattcgcctcagcatccggaa

SEQ ID NO: 86357 - DNA, 25 bp, Saccharomyces pastorianus
atcttcgtgacggatttacccgaga

SEQ ID NO: 86358 - DNA, 25 bp, Saccharomyces pastorianus
gaatttgacgtcatattgatcgccg

SEQ ID NO: 86359 - DNA, 25 bp, Saccharomyces pastorianus
gggacctgtcacctagaaatacctt

SEQ ID NO: 86360 - DNA, 25 bp, Saccharomyces pastorianus
gtaggactttcatgggccttaaaat

SEQ ID NO: 86361 - DNA, 25 bp, Saccharomyces pastorianus
gcgggcactggtttagtaggacttt

SEQ ID NO: 86362 - DNA, 25 bp, Saccharomyces pastorianus
attgatcgccgacccgatatattcg

SEQ ID NO: 86363 - DNA, 25 bp, Saccharomyces pastorianus
gggatcatctttaatactttcacaa

SEQ ID NO: 86364 - DNA, 25 bp, Saccharomyces pastorianus
tagcgaacagcgacatcaaacagat

SEQ ID NO: 86365 - DNA, 25 bp, Saccharomyces pastorianus
tttttggcggcatcagggacctgtc

SEQ ID NO: 86366 - DNA, 25 bp, Saccharomyces pastorianus
gcttcgtcaagctgtttccaataca

SEQ ID NO: 86367 - DNA, 25 bp, Saccharomyces pastorianus
aagggattctctacgtggtggcgca

SEQ ID NO: 86368 - DNA, 25 bp, Saccharomyces pastorianus
gacagatggagactgcccgtactca

SEQ ID NO: 86369 - DNA, 25 bp, Saccharomyces pastorianus
tagcggaaccaggtacccatcggaa

SEQ ID NO: 86370 - DNA, 25 bp, Saccharomyces pastorianus
gaactaactccaaggtcggcattat

SEQ ID NO: 86371 - DNA, 25 bp, Saccharomyces pastorianus
ttctgtctcgccaaatgttttccaa

SEQ ID NO: 86372 - DNA, 25 bp, Saccharomyces pastorianus
tcaccaatgctgacacctagcggaa

SEQ ID NO: 86373 - DNA, 25 bp, Saccharomyces pastorianus
tcaacacctttatctggagctgctt

SEQ ID NO: 86374 - DNA, 25 bp, Saccharomyces pastorianus
gggcattcccagagtgacatttaag

SEQ ID NO: 86375 - DNA, 25 bp, Saccharomyces pastorianus
ttgggccgtctttataagggattct

SEQ ID NO: 86376 - DNA, 25 bp, Saccharomyces pastorianus
ggaaccagttcaatcatctgctcat

SEQ ID NO: 86377 - DNA, 25 bp, Saccharomyces pastorianus
gttctacacgttgcaacctatggat

SEQ ID NO: 86378 - DNA, 25 bp, Saccharomyces pastorianus
aatagcggcacagttatgacacaag

SEQ ID NO: 86379 - DNA, 25 bp, Saccharomyces pastorianus
acttccagaccgtttcgaatacaca

SEQ ID NO: 86380 - DNA, 25 bp, Saccharomyces pastorianus
gggctatgataacgttttcccactt

SEQ ID NO: 86381 - DNA, 25 bp, Saccharomyces pastorianus
acgtgcatttacctcgtatgattca

SEQ ID NO: 86382 - DNA, 25 bp, Saccharomyces pastorianus
aggtacatttctactcagccaattg

SEQ ID NO: 86383 - DNA, 25 bp, Saccharomyces pastorianus
tgcggtagcatttccatcataaaga

SEQ ID NO: 86384 - DNA, 25 bp, Saccharomyces pastorianus
gctgccttacagtttcattctgatg

SEQ ID NO: 86385 - DNA, 25 bp, Saccharomyces pastorianus
tgaacacgactcaatgcacttccag

SEQ ID NO: 86386 - DNA, 25 bp, Saccharomyces pastorianus
gaattggctgagcttgaacacgact

SEQ ID NO: 86387 - DNA, 25 bp, Saccharomyces pastorianus
taagctatgatatcgctgccttaca

SEQ ID NO: 86388 - DNA, 25 bp, Saccharomyces pastorianus
taatgacgattttgtacctgttgaa

SEQ ID NO: 86389 - DNA, 25 bp, Saccharomyces pastorianus
gaagcagatggcgaacctttgttgg

SEQ ID NO: 86390 - DNA, 25 bp, Saccharomyces pastorianus
agattcacctcctcgaatgacagaa

SEQ ID NO: 86391 - DNA, 25 bp, Saccharomyces pastorianus
tgagttaatgccaccagattcacct

SEQ ID NO: 86392 - DNA, 25 bp, Saccharomyces pastorianus
ttaggccaagcccacacagaagcag

SEQ ID NO: 86393 - DNA, 25 bp, Saccharomyces pastorianus
gctacatctagggaagccacacctt

SEQ ID NO: 86394 - DNA, 25 bp, Saccharomyces pastorianus
cgtatacccattttcaattctttga

SEQ ID NO: 86395 - DNA, 25 bp, Saccharomyces pastorianus
gaatggcttagacaccgtaccaaaa

SEQ ID NO: 86396 - DNA, 25 bp, Saccharomyces pastorianus
gaacaacccgaagtcgctgatattt

SEQ ID NO: 86397 - DNA, 25 bp, Saccharomyces pastorianus
ttgagagggttcacaccgggcgact

SEQ ID NO: 86398 - DNA, 25 bp, Saccharomyces pastorianus
cgggcgacttgaacggaatatctgt

SEQ ID NO: 86399 - DNA, 25 bp, Saccharomyces pastorianus
aatcctgccttacttaagtctctag

SEQ ID NO: 86400 - DNA, 25 bp, Saccharomyces pastorianus
gagatatctccagtgtgacctggca

SEQ ID NO: 86401 - DNA, 25 bp, Saccharomyces pastorianus
gatccgcttttccaccaaataaaca

SEQ ID NO: 86402 - DNA, 25 bp, Saccharomyces pastorianus
gtgcattgtatggtcggagtctcca

SEQ ID NO: 86403 - DNA, 25 bp, Saccharomyces pastorianus
ggagtctccagatctgcaacagttt

SEQ ID NO: 86404 - DNA, 25 bp, Saccharomyces pastorianus
ttacgcatatagtttctgtcggtga

SEQ ID NO: 86405 - DNA, 25 bp, Saccharomyces pastorianus
tatggattggcacatcatctgtagg

SEQ ID NO: 86406 - DNA, 25 bp, Saccharomyces pastorianus
gtgacctggcaagtgcgtatttgtt

SEQ ID NO: 86407 - DNA, 25 bp, Saccharomyces pastorianus
aattgctcatcctgtaaggccacat

SEQ ID NO: 86408 - DNA, 25 bp, Saccharomyces pastorianus
tgttcttcgtatatgagctcttcaa

SEQ ID NO: 86409 - DNA, 25 bp, Saccharomyces pastorianus
aggccacatcgtgcaataactatga

SEQ ID NO: 86410 - DNA, 25 bp, Saccharomyces pastorianus
gaatgcggtcgctgatatagctaca

SEQ ID NO: 86411 - DNA, 25 bp, Saccharomyces pastorianus
atgtttagttctctcttcttgtcga

SEQ ID NO: 86412 - DNA, 25 bp, Saccharomyces pastorianus
ttaggcttaatcgtaggcttgtctt

SEQ ID NO: 86413 - DNA, 25 bp, Saccharomyces pastorianus
tgacccttgcttgtttttatctgtt

SEQ ID NO: 86414 - DNA, 25 bp, Saccharomyces pastorianus
gacaggtgctttttctttaactaag

SEQ ID NO: 86415 - DNA, 25 bp, Saccharomyces pastorianus
aatggcatcctctagaaacctgaaa

SEQ ID NO: 86416 - DNA, 25 bp, Saccharomyces pastorianus
tatctcttttttcgacacattcttc

SEQ ID NO: 86417 - DNA, 25 bp, Saccharomyces pastorianus
ggcttgtctttcctttcgaattcag

SEQ ID NO: 86418 - DNA, 25 bp, Saccharomyces pastorianus
ttttttgcaacacggttgacccttg

SEQ ID NO: 86419 - DNA, 25 bp, Saccharomyces pastorianus
tgcgctattcttcttcagttgttta

SEQ ID NO: 86420 - DNA, 25 bp, Saccharomyces pastorianus
aagaccagcgattcttcgacgagat

SEQ ID NO: 86421 - DNA, 25 bp, Saccharomyces pastorianus
gtagctatatcagcgaccgcattcg

SEQ ID NO: 86422 - DNA, 25 bp, Saccharomyces pastorianus
aatccacgcgcagtgtggcaagctt

SEQ ID NO: 86423 - DNA, 25 bp, Saccharomyces pastorianus
gcaagcttgctgtcgagattccagt

SEQ ID NO: 86424 - DNA, 25 bp, Saccharomyces pastorianus
atgcgaccccgaatacgtaattaca

SEQ ID NO: 86425 - DNA, 25 bp, Saccharomyces pastorianus
atctcgtcgaagaatcgctggtctt

SEQ ID NO: 86426 - DNA, 25 bp, Saccharomyces pastorianus
gctggtcttagcacaactgaattcg

SEQ ID NO: 86427 - DNA, 25 bp, Saccharomyces pastorianus
gaactaaacatgcaaccgggtcgga

SEQ ID NO: 86428 - DNA, 25 bp, Saccharomyces pastorianus
taggagaacactccgactcttctga

SEQ ID NO: 86429 - DNA, 25 bp, Saccharomyces pastorianus
agcacctgtctttcctatatctaaa

SEQ ID NO: 86430 - DNA, 25 bp, Saccharomyces pastorianus
gcattcgctgctgagttatttgtac

SEQ ID NO: 86431 - DNA, 25 bp, Saccharomyces pastorianus
gacaagcctacgattaagcctaaat

SEQ ID NO: 86432 - DNA, 25 bp, Saccharomyces pastorianus
gaaacttcagatgctgttcatactg

SEQ ID NO: 86433 - DNA, 25 bp, Saccharomyces pastorianus
tgaaaaccgtgcagctgatacgccc

SEQ ID NO: 86434 - DNA, 25 bp, Saccharomyces pastorianus
gacgaggagcaaccagaagacgtta

SEQ ID NO: 86435 - DNA, 25 bp, Saccharomyces pastorianus
aaacgacatcattaaacctttggtg

SEQ ID NO: 86436 - DNA, 25 bp, Saccharomyces pastorianus
ggactctgccattctggaaaacgaa

SEQ ID NO: 86437 - DNA, 25 bp, Saccharomyces pastorianus
gatcataaggactctgccattctgg

SEQ ID NO: 86438 - DNA, 25 bp, Saccharomyces pastorianus
gatacgcccgaaacttcagatgctg

SEQ ID NO: 86439 - DNA, 25 bp, Saccharomyces pastorianus
gacagagttagctatacgtttgaat

SEQ ID NO: 86440 - DNA, 25 bp, Saccharomyces pastorianus
tgttactttgagaaaccctagcact

SEQ ID NO: 86441 - DNA, 25 bp, Saccharomyces pastorianus
tgaccccataaatttcgccactgta

SEQ ID NO: 86442 - DNA, 25 bp, Saccharomyces pastorianus
aaggacggcatagcttactacaaac

SEQ ID NO: 86443 - DNA, 25 bp, Saccharomyces pastorianus
actccaggattgtcgactttgcatg

SEQ ID NO: 86444 - DNA, 25 bp, Saccharomyces pastorianus
aaccgaacgcggtcatttgtattca

SEQ ID NO: 86445 - DNA, 25 bp, Saccharomyces pastorianus
aatacgagattgtcccgaatacgaa

SEQ ID NO: 86446 - DNA, 25 bp, Saccharomyces pastorianus
agggcgagagctttgcttttgcaaa

SEQ ID NO: 86447 - DNA, 25 bp, Saccharomyces pastorianus
gataactgcgttttcttcattaata

SEQ ID NO: 86448 - DNA, 25 bp, Saccharomyces pastorianus
gaaaatgttatctccgttgcaagtg

SEQ ID NO: 86449 - DNA, 25 bp, Saccharomyces pastorianus
aacgagctacatattggcaattggg

SEQ ID NO: 86450 - DNA, 25 bp, Saccharomyces pastorianus
taggattgggcccttctgaaaaaat

SEQ ID NO: 86451 - DNA, 25 bp, Saccharomyces pastorianus
tcttcaccgatactcactgttatac

SEQ ID NO: 86452 - DNA, 25 bp, Saccharomyces pastorianus
taacgcctgttttgcttcattagtc

SEQ ID NO: 86453 - DNA, 25 bp, Saccharomyces pastorianus
ggtgactatcacacggtggcactaa

SEQ ID NO: 86454 - DNA, 25 bp, Saccharomyces pastorianus
ggacgaaattactactgcatgggac

SEQ ID NO: 86455 - DNA, 25 bp, Saccharomyces pastorianus
gggtatctccatcaggttagtacct

SEQ ID NO: 86456 - DNA, 25 bp, Saccharomyces pastorianus
taccgagcttgcaaatatcgacgaa

SEQ ID NO: 86457 - DNA, 25 bp, Saccharomyces pastorianus
aaaagtgtcaccatgggtatctcca

SEQ ID NO: 86458 - DNA, 25 bp, Saccharomyces pastorianus
aacagtcaagtttagcggtcctggt

SEQ ID NO: 86459 - DNA, 25 bp, Saccharomyces pastorianus
gtttcagaaaattaccgagcttgca

SEQ ID NO: 86460 - DNA, 25 bp, Saccharomyces pastorianus
actaagccttccttgtctatgacaa

SEQ ID NO: 86461 - DNA, 25 bp, Saccharomyces pastorianus
aaagaatattcgacgcgccagctgt

SEQ ID NO: 86462 - DNA, 25 bp, Saccharomyces pastorianus
attaccaactggactaagccttcct

SEQ ID NO: 86463 - DNA, 25 bp, Saccharomyces pastorianus
gcggtcctggtaacataacagttat

SEQ ID NO: 86464 - DNA, 25 bp, Saccharomyces pastorianus
gggacgtagaaccattgctagtaag

SEQ ID NO: 86465 - DNA, 25 bp, Saccharomyces pastorianus
agacctctattaatgctcttaccag

SEQ ID NO: 86466 - DNA, 25 bp, Saccharomyces pastorianus
ttaaagccctacgttaacgcaaatg

SEQ ID NO: 86467 - DNA, 25 bp, Saccharomyces pastorianus
agaacctatgttaccccagatatgg

SEQ ID NO: 86468 - DNA, 25 bp, Saccharomyces pastorianus
ccccagatatggttaatttcgaatt

SEQ ID NO: 86469 - DNA, 25 bp, Saccharomyces pastorianus
aagagtgccgttgaccacaaagcaa

SEQ ID NO: 86470 - DNA, 25 bp, Saccharomyces pastorianus
gttaacgcaaatgtaccacctctaa

SEQ ID NO: 86471 - DNA, 25 bp, Saccharomyces pastorianus
gcccattagatcctcgtttacagtt

SEQ ID NO: 86472 - DNA, 25 bp, Saccharomyces pastorianus
tttaaaggatttagcggcggcccat

SEQ ID NO: 86473 - DNA, 25 bp, Saccharomyces pastorianus
aatgctcttaccaggccttggaaga

SEQ ID NO: 86474 - DNA, 25 bp, Saccharomyces pastorianus
gctcacccatttcgcaatttagtaa

SEQ ID NO: 86475 - DNA, 25 bp, Saccharomyces pastorianus
caaagggacaagagcttcagggatt

SEQ ID NO: 86476 - DNA, 25 bp, Saccharomyces pastorianus
gtggcaagctatttcaggttcctct

SEQ ID NO: 86477 - DNA, 25 bp, Saccharomyces pastorianus
ttcatcacctattcggcctttatat

SEQ ID NO: 86478 - DNA, 25 bp, Saccharomyces pastorianus
gaaccaactcacatcatctgcaaaa

SEQ ID NO: 86479 - DNA, 25 bp, Saccharomyces pastorianus
acatccacatttttgctttcgtttt

SEQ ID NO: 86480 - DNA, 25 bp, Saccharomyces pastorianus
tccgtcttaagtttgatcaccgtta

SEQ ID NO: 86481 - DNA, 25 bp, Saccharomyces pastorianus
cattgctggtgggttttctttgcta

SEQ ID NO: 86482 - DNA, 25 bp, Saccharomyces pastorianus
atacactggctgtttatctgttttg

SEQ ID NO: 86483 - DNA, 25 bp, Saccharomyces pastorianus
ctctgctcgtgatgtagccttggaa

SEQ ID NO: 86484 - DNA, 25 bp, Saccharomyces pastorianus
gtgtcactcaacaacctttaacctt

SEQ ID NO: 86485 - DNA, 25 bp, Saccharomyces pastorianus
aataatcttttagcagtcccaacct

SEQ ID NO: 86486 - DNA, 25 bp, Saccharomyces pastorianus
aagttattccaatcgcagctgttac

SEQ ID NO: 86487 - DNA, 25 bp, Saccharomyces pastorianus
cagacgtcaatatcgcagtagcact

SEQ ID NO: 86488 - DNA, 25 bp, Saccharomyces pastorianus
gtttagagcataacgttccgatcat

SEQ ID NO: 86489 - DNA, 25 bp, Saccharomyces pastorianus
cctagagccctcaaagccttataag

SEQ ID NO: 86490 - DNA, 25 bp, Saccharomyces pastorianus
atcactggtgtatcttttctatcta

SEQ ID NO: 86491 - DNA, 25 bp, Saccharomyces pastorianus
aagaacaaatggctcggcgtttcct

SEQ ID NO: 86492 - DNA, 25 bp, Saccharomyces pastorianus
gctcgcctgtggagggtttctaaat

SEQ ID NO: 86493 - DNA, 25 bp, Saccharomyces pastorianus
aaaatctctggaatgcaccaccatc

SEQ ID NO: 86494 - DNA, 25 bp, Saccharomyces pastorianus
agccagccatgactacttcgtggaa

SEQ ID NO: 86495 - DNA, 25 bp, Saccharomyces pastorianus
ttgtggcgcctttgaattccatagt

SEQ ID NO: 86496 - DNA, 25 bp, Saccharomyces pastorianus
ttaaacaatttcttgctcgcctgtg

SEQ ID NO: 86497 - DNA, 25 bp, Saccharomyces pastorianus
gtcaaattcccatggttgtggcgcc

SEQ ID NO: 86498 - DNA, 25 bp, Saccharomyces pastorianus
gggccttgtcgccaatgaacacaaa

SEQ ID NO: 86499 - DNA, 25 bp, Saccharomyces pastorianus
aaatccttagaaagccccactgacg

SEQ ID NO: 86500 - DNA, 25 bp, Saccharomyces pastorianus
gaatgagctgaaaaagggccttgtc

SEQ ID NO: 86501 - DNA, 25 bp, Saccharomyces pastorianus
gatagtctattctcctttaaaaagc

SEQ ID NO: 86502 - DNA, 25 bp, Saccharomyces pastorianus
agcatggaggcggacatttcagata

SEQ ID NO: 86503 - DNA, 25 bp, Saccharomyces pastorianus
ggcaccagaacacatattcaccaga

SEQ ID NO: 86504 - DNA, 25 bp, Saccharomyces pastorianus
gaaatggctacaatcctgactagaa

SEQ ID NO: 86505 - DNA, 25 bp, Saccharomyces pastorianus
acgataactcaacacggcaccagaa

SEQ ID NO: 86506 - DNA, 25 bp, Saccharomyces pastorianus
aaagccccactgacgatagcatgga

SEQ ID NO: 86507 - DNA, 25 bp, Saccharomyces pastorianus
accatattttctaggttctcatatt

SEQ ID NO: 86508 - DNA, 25 bp, Saccharomyces pastorianus
attcaccagaggattccgtggaatt

SEQ ID NO: 86509 - DNA, 25 bp, Saccharomyces pastorianus
aatgattttaccgtcttgcttcctt

SEQ ID NO: 86510 - DNA, 25 bp, Saccharomyces pastorianus
aacacatttgccgaggctgttacgc

SEQ ID NO: 86511 - DNA, 25 bp, Saccharomyces pastorianus
gttctaacttatatccttctgcgga

SEQ ID NO: 86512 - DNA, 25 bp, Saccharomyces pastorianus
tgatcctggttgtcctcggttctaa

SEQ ID NO: 86513 - DNA, 25 bp, Saccharomyces pastorianus
ttattgatcggctccatcatcggaa

SEQ ID NO: 86514 - DNA, 25 bp, Saccharomyces pastorianus
gggttcagtttctatcccattgatc

SEQ ID NO: 86515 - DNA, 25 bp, Saccharomyces pastorianus
gtacgctgtcttaagtttgcctgta

SEQ ID NO: 86516 - DNA, 25 bp, Saccharomyces pastorianus
gacggttcaccatagcaagttattg

SEQ ID NO: 86517 - DNA, 25 bp, Saccharomyces pastorianus
gatccaattttccttgttgtcggtt

SEQ ID NO: 86518 - DNA, 25 bp, Saccharomyces pastorianus
agagcgaaccttaatcctccgttat

SEQ ID NO: 86519 - DNA, 25 bp, Saccharomyces pastorianus
ttgttgtggcagcaattggtccgtt

SEQ ID NO: 86520 - DNA, 25 bp, Saccharomyces pastorianus
gaagccatcgatattgtatctggat

SEQ ID NO: 86521 - DNA, 25 bp, Saccharomyces pastorianus
gtacctgtactacgtggctgtattg

SEQ ID NO: 86522 - DNA, 25 bp, Saccharomyces pastorianus
cagattgctggagtattccgtcgat

SEQ ID NO: 86523 - DNA, 25 bp, Saccharomyces pastorianus
ggcttgatgtctttacacttccaaa

SEQ ID NO: 86524 - DNA, 25 bp, Saccharomyces pastorianus
attcttacataggacaatcagccag

SEQ ID NO: 86525 - DNA, 25 bp, Saccharomyces pastorianus
gttgatttacaaacagtctccttag

SEQ ID NO: 86526 - DNA, 25 bp, Saccharomyces pastorianus
aatgatggtgtgttttctccctcta

SEQ ID NO: 86527 - DNA, 25 bp, Saccharomyces pastorianus
tattgcgcaatactcatggccgttt

SEQ ID NO: 86528 - DNA, 25 bp, Saccharomyces pastorianus
gtattccgtcgatttaagttctcaa

SEQ ID NO: 86529 - DNA, 25 bp, Saccharomyces pastorianus
aactgccactggaacggtacctgta

SEQ ID NO: 86530 - DNA, 25 bp, Saccharomyces pastorianus
gtgttttctccctctaatataacgt

SEQ ID NO: 86531 - DNA, 25 bp, Saccharomyces pastorianus
gtgacgatatcttcaatcccaaacc

SEQ ID NO: 86532 - DNA, 25 bp, Saccharomyces pastorianus
attattgaccatattccgggacatt

SEQ ID NO: 86533 - DNA, 25 bp, Saccharomyces pastorianus
gtaaatcggtacctacacctagtct

SEQ ID NO: 86534 - DNA, 25 bp, Saccharomyces pastorianus
aggactccagtaccaagcactttaa

SEQ ID NO: 86535 - DNA, 25 bp, Saccharomyces pastorianus
gtaacattcgcgctggtgtgacgat

SEQ ID NO: 86536 - DNA, 25 bp, Saccharomyces pastorianus
tgcttccgagtccagaatcgctgaa

SEQ ID NO: 86537 - DNA, 25 bp, Saccharomyces pastorianus
gtggcaccaatgcaatgcttccgag

SEQ ID NO: 86538 - DNA, 25 bp, Saccharomyces pastorianus
aggcccttctgtggaatcgtacgaa

SEQ ID NO: 86539 - DNA, 25 bp, Saccharomyces pastorianus
gcagcagcgcctaatgacacaagta

SEQ ID NO: 86540 - DNA, 25 bp, Saccharomyces pastorianus
ccagtttcacctccttgttatatta

SEQ ID NO: 86541 - DNA, 25 bp, Saccharomyces pastorianus
ggacattcgctactactttctatta

SEQ ID NO: 86542 - DNA, 25 bp, Saccharomyces pastorianus
atcgtggtgttttgccagtttccat

SEQ ID NO: 86543 - DNA, 25 bp, Saccharomyces pastorianus
gtattgtgacggtctattccaccat

SEQ ID NO: 86544 - DNA, 25 bp, Saccharomyces pastorianus
ctattagaaagtgttgccgcagtga

SEQ ID NO: 86545 - DNA, 25 bp, Saccharomyces pastorianus
aggtgctacgcctagacttgggaga

SEQ ID NO: 86546 - DNA, 25 bp, Saccharomyces pastorianus
ttccatgagacaggccgcaaaccaa

SEQ ID NO: 86547 - DNA, 25 bp, Saccharomyces pastorianus
atgggcgcggtgtagtacgaaacta

SEQ ID NO: 86548 - DNA, 25 bp, Saccharomyces pastorianus
attttctggtctttatcgtggtgtt

SEQ ID NO: 86549 - DNA, 25 bp, Saccharomyces pastorianus
atcatccgggttaaccttcttagtg

SEQ ID NO: 86550 - DNA, 25 bp, Saccharomyces pastorianus
ggccgcaaaccaagccgttagattg

SEQ ID NO: 86551 - DNA, 25 bp, Saccharomyces pastorianus
gccgcagtgactccttttgaagcaa

SEQ ID NO: 86552 - DNA, 25 bp, Saccharomyces pastorianus
accatgccccttgatactgtgaaaa

SEQ ID NO: 86553 - DNA, 25 bp, Saccharomyces pastorianus
ggtgttgcaatttcagctggcgtca

SEQ ID NO: 86554 - DNA, 25 bp, Saccharomyces pastorianus
gtctacattactctctttattggcc

SEQ ID NO: 86555 - DNA, 25 bp, Saccharomyces pastorianus
atttactccggtaggcagtctcata

SEQ ID NO: 86556 - DNA, 25 bp, Saccharomyces pastorianus
gacaaggtatcacttttcctacgac

SEQ ID NO: 86557 - DNA, 25 bp, Saccharomyces pastorianus
tttattggccctgatactctgcatc

SEQ ID NO: 86558 - DNA, 25 bp, Saccharomyces pastorianus
tcagctggcgtcattcaattatctt

SEQ ID NO: 86559 - DNA, 25 bp, Saccharomyces pastorianus
ttcctacgaccttgtttactttcat

SEQ ID NO: 86560 - DNA, 25 bp, Saccharomyces pastorianus
gattacgtcttacgattccttcctt

SEQ ID NO: 86561 - DNA, 25 bp, Saccharomyces pastorianus
gagggctcatctaatgtctacatta

SEQ ID NO: 86562 - DNA, 25 bp, Saccharomyces pastorianus
aaacttctccgaactggttgattgg

SEQ ID NO: 86563 - DNA, 25 bp, Saccharomyces pastorianus
gttcagcttagtgcaaactcctcat

SEQ ID NO: 86564 - DNA, 25 bp, Saccharomyces pastorianus
acttatttgctatccttttggcggc

SEQ ID NO: 86565 - DNA, 25 bp, Saccharomyces pastorianus
atggagccgttcgttctatggcagc

SEQ ID NO: 86566 - DNA, 25 bp, Saccharomyces pastorianus
agatgctgtctccactattaacttg

SEQ ID NO: 86567 - DNA, 25 bp, Saccharomyces pastorianus
tatggcagcccgtcttggaattgaa

SEQ ID NO: 86568 - DNA, 25 bp, Saccharomyces pastorianus
agaggactctttacgggcagatgct

SEQ ID NO: 86569 - DNA, 25 bp, Saccharomyces pastorianus
gctggtgcctttgttgactttcata

SEQ ID NO: 86570 - DNA, 25 bp, Saccharomyces pastorianus
tgaggttgccaagctagctgctgat

SEQ ID NO: 86571 - DNA, 25 bp, Saccharomyces pastorianus
aaagctccaatattcgttctcacgc

SEQ ID NO: 86572 - DNA, 25 bp, Saccharomyces pastorianus
gaactagttagtatcctccctgtaa

SEQ ID NO: 86573 - DNA, 25 bp, Saccharomyces pastorianus
agagggatttcactacacattttat

SEQ ID NO: 86574 - DNA, 25 bp, Saccharomyces pastorianus
gttgactttcatattccaccagagt

SEQ ID NO: 86575 - DNA, 25 bp, Saccharomyces pastorianus
gtcaaagtccgaagttcccgtgtgg

SEQ ID NO: 86576 - DNA, 25 bp, Saccharomyces pastorianus
ttgccttagttattggttgctggac

SEQ ID NO: 86577 - DNA, 25 bp, Saccharomyces pastorianus
aacaacccagatcgccgttggtggt

SEQ ID NO: 86578 - DNA, 25 bp, Saccharomyces pastorianus
ttctggcttatggtggtgttgcctt

SEQ ID NO: 86579 - DNA, 25 bp, Saccharomyces pastorianus
ggactcaagacgtcattcatgctca

SEQ ID NO: 86580 - DNA, 25 bp, Saccharomyces pastorianus
ggagctaatgacgttgccaacgcta

SEQ ID NO: 86581 - DNA, 25 bp, Saccharomyces pastorianus
gatgattttgcagtcgccatcaaga

SEQ ID NO: 86582 - DNA, 25 bp, Saccharomyces pastorianus
tatatctattcggttctccaagcca

SEQ ID NO: 86583 - DNA, 25 bp, Saccharomyces pastorianus
attactactgtcatggctacccaat

SEQ ID NO: 86584 - DNA, 25 bp, Saccharomyces pastorianus
gccactatgtcttttgctcatggag

SEQ ID NO: 86585 - DNA, 25 bp, Saccharomyces pastorianus
gtcctttgtctgctgtgtatgtgat

SEQ ID NO: 86586 - DNA, 25 bp, Saccharomyces pastorianus
aatcacggcaccatttccttgtcaa

SEQ ID NO: 86587 - DNA, 25 bp, Saccharomyces pastorianus
gaagttctcaaaagctgtacacgga

SEQ ID NO: 86588 - DNA, 25 bp, Saccharomyces pastorianus
gttctcaaaagctgtacacggaaac

SEQ ID NO: 86589 - DNA, 25 bp, Saccharomyces pastorianus
agctgtacacggaaacaatcacggc

SEQ ID NO: 86590 - DNA, 25 bp, Saccharomyces pastorianus
ctagatgattggttttcaaggaagt

SEQ ID NO: 86591 - DNA, 25 bp, Saccharomyces pastorianus
aaacaatcacggcaccatttccttg

SEQ ID NO: 86592 - DNA, 25 bp, Saccharomyces pastorianus
cacggaaacaatcacggcaccattt

SEQ ID NO: 86593 - DNA, 25 bp, Saccharomyces pastorianus
gattggttttcaaggaagttctcaa

SEQ ID NO: 86594 - DNA, 25 bp, Saccharomyces pastorianus
acacggaaacaatcacggcaccatt

SEQ ID NO: 86595 - DNA, 25 bp, Saccharomyces pastorianus
cggcaccatttccttgtcaactctg

SEQ ID NO: 86596 - DNA, 25 bp, Saccharomyces pastorianus
tcaaggaagttctcaaaagctgtac

SEQ ID NO: 86597 - DNA, 25 bp, Saccharomyces pastorianus
tgggccgtaattgacctaccagaaa

SEQ ID NO: 86598 - DNA, 25 bp, Saccharomyces pastorianus
tagtgtccgaaataccatcctcaag

SEQ ID NO: 86599 - DNA, 25 bp, Saccharomyces pastorianus
tttgccactctagtttgggccgtaa

SEQ ID NO: 86600 - DNA, 25 bp, Saccharomyces pastorianus
gattattctggctcgtaacgcatat

SEQ ID NO: 86601 - DNA, 25 bp, Saccharomyces pastorianus
tcccgttgtgttttgcttagtgtcc

SEQ ID NO: 86602 - DNA, 25 bp, Saccharomyces pastorianus
tctttccttcttctacaatttgggt

SEQ ID NO: 86603 - DNA, 25 bp, Saccharomyces pastorianus
ggtttgacctttacgcatttggatt

SEQ ID NO: 86604 - DNA, 25 bp, Saccharomyces pastorianus
acaatttgggtattgctcccgttgt

SEQ ID NO: 86605 - DNA, 25 bp, Saccharomyces pastorianus
ggtattgccgcaacatttctttctt

SEQ ID NO: 86606 - DNA, 25 bp, Saccharomyces pastorianus
aacatttctttcttggtgggcttca

SEQ ID NO: 86607 - DNA, 25 bp, Saccharomyces pastorianus
gaggtttgggatgctccgactcgca

SEQ ID NO: 86608 - DNA, 25 bp, Saccharomyces pastorianus
gtttatatcctggtgggcttcaaaa

SEQ ID NO: 86609 - DNA, 25 bp, Saccharomyces pastorianus
gaggattttgtctggccactttagc

SEQ ID NO: 86610 - DNA, 25 bp, Saccharomyces pastorianus
aacctcggtattgcacctgttgttt

SEQ ID NO: 86611 - DNA, 25 bp, Saccharomyces pastorianus
tagcttgggctgttgtcgatttacc

SEQ ID NO: 86612 - DNA, 25 bp, Saccharomyces pastorianus
tcgcgttcttttacaacctcggtat

SEQ ID NO: 86613 - DNA, 25 bp, Saccharomyces pastorianus
gtattgctgcaacgtttatatcctg

SEQ ID NO: 86614 - DNA, 25 bp, Saccharomyces pastorianus
ttgggctggcttttcaggctattat

SEQ ID NO: 86615 - DNA, 25 bp, Saccharomyces pastorianus
aggatgttcagacactcatggcgct

SEQ ID NO: 86616 - DNA, 25 bp, Saccharomyces pastorianus
tgacctttatgcttttgggctggct

SEQ ID NO: 86617 - DNA, 25 bp, Saccharomyces pastorianus
agtggtgctcttctaatggttgtcg

SEQ ID NO: 86618 - DNA, 25 bp, Saccharomyces pastorianus
tgcttagtgtctgaaatgccgtctt

SEQ ID NO: 86619 - DNA, 25 bp, Saccharomyces pastorianus
tatgatgatactgacgtttcctcca

SEQ ID NO: 86620 - DNA, 25 bp, Saccharomyces pastorianus
gatgactcagttctcaatttttgga

SEQ ID NO: 86621 - DNA, 25 bp, Saccharomyces pastorianus
aagggccttgcaagccagaaagaaa

SEQ ID NO: 86622 - DNA, 25 bp, Saccharomyces pastorianus
agcccaatgctggatttactggccc

SEQ ID NO: 86623 - DNA, 25 bp, Saccharomyces pastorianus
tgacgtttcctccagagttttgaaa

SEQ ID NO: 86624 - DNA, 25 bp, Saccharomyces pastorianus
gaatcgccctactttctagagatca

SEQ ID NO: 86625 - DNA, 25 bp, Saccharomyces pastorianus
gagaaggtgcttctttatcttttat

SEQ ID NO: 86626 - DNA, 25 bp, Saccharomyces pastorianus
tgaattcagcctcccaagagaaggt

SEQ ID NO: 86627 - DNA, 25 bp, Saccharomyces pastorianus
gacagtgaccagatctttagcttca

SEQ ID NO: 86628 - DNA, 25 bp, Saccharomyces pastorianus
acaggtacgttgtatgtctatcaag

SEQ ID NO: 86629 - DNA, 25 bp, Saccharomyces pastorianus
agatcattcgagaactcccatgcca

SEQ ID NO: 86630 - DNA, 25 bp, Saccharomyces pastorianus
aacttccctggcacaaacgagttat

SEQ ID NO: 86631 - DNA, 25 bp, Saccharomyces pastorianus
tatgaatgtcttgccaacttccctg

SEQ ID NO: 86632 - DNA, 25 bp, Saccharomyces pastorianus
tattcatattattacggtgcttctg

SEQ ID NO: 86633 - DNA, 25 bp, Saccharomyces pastorianus
tacggtgcttctgtacttgaacgat

SEQ ID NO: 86634 - DNA, 25 bp, Saccharomyces pastorianus
aaacgagttatcatctggcacccat

SEQ ID NO: 86635 - DNA, 25 bp, Saccharomyces pastorianus
acgcttcatagtgcctatacctttt

SEQ ID NO: 86636 - DNA, 25 bp, Saccharomyces pastorianus
gcagctctatttatatgaatgtctt

SEQ ID NO: 86637 - DNA, 25 bp, Saccharomyces pastorianus
tggcacccatctctcacctaaaatg

SEQ ID NO: 86638 - DNA, 25 bp, Saccharomyces pastorianus
gtatacgaggcgcacgcttcatagt

SEQ ID NO: 86639 - DNA, 25 bp, Saccharomyces pastorianus
gaacgatgcgtctttcataggtccc

SEQ ID NO: 86640 - DNA, 25 bp, Saccharomyces pastorianus
gtctttcataggtcccgtatacgag

SEQ ID NO: 86641 - DNA, 25 bp, Saccharomyces pastorianus
tcacttggcccaatactacatgttc

SEQ ID NO: 86642 - DNA, 25 bp, Saccharomyces pastorianus
cagattaaagccagccatctctagt

SEQ ID NO: 86643 - DNA, 25 bp, Saccharomyces pastorianus
catgttccaagccgctcatccaact

SEQ ID NO: 86644 - DNA, 25 bp, Saccharomyces pastorianus
aaagccagccatctctagtgctcta

SEQ ID NO: 86645 - DNA, 25 bp, Saccharomyces pastorianus
accaccatgttgaccggtattgccc

SEQ ID NO: 86646 - DNA, 25 bp, Saccharomyces pastorianus
aagccagccatctctagtgctctat

SEQ ID NO: 86647 - DNA, 25 bp, Saccharomyces pastorianus
cggtattgccccagaccaagtgacc

SEQ ID NO: 86648 - DNA, 25 bp, Saccharomyces pastorianus
tccaactgaaacctacccagtcgaa

SEQ ID NO: 86649 - DNA, 25 bp, Saccharomyces pastorianus
gttccaagccgctcatccaactgaa

SEQ ID NO: 86650 - DNA, 25 bp, Saccharomyces pastorianus
atgttccaagccgctcatccaactg

SEQ ID NO: 86651 - DNA, 25 bp, Saccharomyces pastorianus
ccaagccgctcatccaactgaaacc

SEQ ID NO: 86652 - DNA, 25 bp, Saccharomyces pastorianus
attgctacttctctaggaacggccg

SEQ ID NO: 86653 - DNA, 25 bp, Saccharomyces pastorianus
ataattattgcttgtggcggctcct

SEQ ID NO: 86654 - DNA, 25 bp, Saccharomyces pastorianus
gacactcctgtaatagaagtcgctg

SEQ ID NO: 86655 - DNA, 25 bp, Saccharomyces pastorianus
gaagtcgctgacaatttcatatttc

SEQ ID NO: 86656 - DNA, 25 bp, Saccharomyces pastorianus
ggatgtcatgttttcaatacttctt

SEQ ID NO: 86657 - DNA, 25 bp, Saccharomyces pastorianus
ggaacggccgtgatctctaatcaaa

SEQ ID NO: 86658 - DNA, 25 bp, Saccharomyces pastorianus
gattgaaccggcatgtggcgccgca

SEQ ID NO: 86659 - DNA, 25 bp, Saccharomyces pastorianus
ttgggttacaacactaagatcctag

SEQ ID NO: 86660 - DNA, 25 bp, Saccharomyces pastorianus
tggcggctcctctaatactataaag

SEQ ID NO: 86661 - DNA, 25 bp, Saccharomyces pastorianus
aataggccaaccagttcaattcaag

SEQ ID NO: 86662 - DNA, 25 bp, Saccharomyces pastorianus
agatcctagaaaatgcactgggctc

SEQ ID NO: 86663 - DNA, 25 bp, Saccharomyces pastorianus
aactgttgcagcgacaatggctcct

SEQ ID NO: 86664 - DNA, 25 bp, Saccharomyces pastorianus
gttctaaggcgttgttatcatcatt

SEQ ID NO: 86665 - DNA, 25 bp, Saccharomyces pastorianus
aatggctcctagtcgtaatggtcct

SEQ ID NO: 86666 - DNA, 25 bp, Saccharomyces pastorianus
gactttcgttgaccttctttgatga

SEQ ID NO: 86667 - DNA, 25 bp, Saccharomyces pastorianus
ccttctaagtcgctcaatctgggaa

SEQ ID NO: 86668 - DNA, 25 bp, Saccharomyces pastorianus
taagtacccctccacatgttggtgt

SEQ ID NO: 86669 - DNA, 25 bp, Saccharomyces pastorianus
aatctgggaagtttctccgcctcat

SEQ ID NO: 86670 - DNA, 25 bp, Saccharomyces pastorianus
atggtcctcgtattccaagttctaa

SEQ ID NO: 86671 - DNA, 25 bp, Saccharomyces pastorianus
agtgaactgtcatccaactgttgca

SEQ ID NO: 86672 - DNA, 25 bp, Saccharomyces pastorianus
ttcaagccatctaatccgacgtttg

SEQ ID NO: 86673 - DNA, 25 bp, Saccharomyces pastorianus
tactatctaacaaaccagcaccttc

SEQ ID NO: 86674 - DNA, 25 bp, Saccharomyces pastorianus
tcttgtaggccctaacggtaatact

SEQ ID NO: 86675 - DNA, 25 bp, Saccharomyces pastorianus
gaggtccgtcgagtagtagaagatt

SEQ ID NO: 86676 - DNA, 25 bp, Saccharomyces pastorianus
ttcctttcccgcaagccgttaagat

SEQ ID NO: 86677 - DNA, 25 bp, Saccharomyces pastorianus
agaaggtctatactccatttcctcc

SEQ ID NO: 86678 - DNA, 25 bp, Saccharomyces pastorianus
gaagacaacgtcttgtaggccctaa

SEQ ID NO: 86679 - DNA, 25 bp, Saccharomyces pastorianus
atgacatggcatgcgacgttattaa

SEQ ID NO: 86680 - DNA, 25 bp, Saccharomyces pastorianus
tattcaccctatctatcatatcaag

SEQ ID NO: 86681 - DNA, 25 bp, Saccharomyces pastorianus
tcctgcccaattgcctagaaaggtt

SEQ ID NO: 86682 - DNA, 25 bp, Saccharomyces pastorianus
ccatgggtcccttcaagggcttgaa

SEQ ID NO: 86683 - DNA, 25 bp, Saccharomyces pastorianus
gcaagccgttaagatcctacaagat

SEQ ID NO: 86684 - DNA, 25 bp, Saccharomyces pastorianus
ttcaagggcttgaaggaggtccgtc

SEQ ID NO: 86685 - DNA, 25 bp, Saccharomyces pastorianus
cagcatgctgtcgtttgtttttgat

SEQ ID NO: 86686 - DNA, 25 bp, Saccharomyces pastorianus
gatatcatttcgatctgcttcagca

SEQ ID NO: 86687 - DNA, 25 bp, Saccharomyces pastorianus
ctttcaccactgttccctataagga

SEQ ID NO: 86688 - DNA, 25 bp, Saccharomyces pastorianus
acctttctttttcatgctacacttg

SEQ ID NO: 86689 - DNA, 25 bp, Saccharomyces pastorianus
agctcctcggctttcaaagtagtct

SEQ ID NO: 86690 - DNA, 25 bp, Saccharomyces pastorianus
cagtttagctggctcttgtgtactt

SEQ ID NO: 86691 - DNA, 25 bp, Saccharomyces pastorianus
gaatttgctctcgtaccttggagtc

SEQ ID NO: 86692 - DNA, 25 bp, Saccharomyces pastorianus
gtaccattccgctctatatgtatat

SEQ ID NO: 86693 - DNA, 25 bp, Saccharomyces pastorianus
tggagtccttttcctggtccttgat

SEQ ID NO: 86694 - DNA, 25 bp, Saccharomyces pastorianus
ttttccttgctaaattcccttgagt

SEQ ID NO: 86695 - DNA, 25 bp, Saccharomyces pastorianus
tttgtactttcttgccaacaccaac

SEQ ID NO: 86696 - DNA, 25 bp, Saccharomyces pastorianus
aacaaacgacagcatgctgaagcag

SEQ ID NO: 86697 - DNA, 25 bp, Saccharomyces pastorianus
agctgagactactttgaaagccgag

SEQ ID NO: 86698 - DNA, 25 bp, Saccharomyces pastorianus
aaaggactccaaggtacgagagcaa

SEQ ID NO: 86699 - DNA, 25 bp, Saccharomyces pastorianus
taaggtacaataactcaagggaatt

SEQ ID NO: 86700 - DNA, 25 bp, Saccharomyces pastorianus
gcaagcctgctataataaggtacaa

SEQ ID NO: 86701 - DNA, 25 bp, Saccharomyces pastorianus
gcaagtacacaagagccagctaaac

SEQ ID NO: 86702 - DNA, 25 bp, Saccharomyces pastorianus
tcagcaccgctgaaaggaagagaac

SEQ ID NO: 86703 - DNA, 25 bp, Saccharomyces pastorianus
aaaagaggtcgatcagcaccgctga

SEQ ID NO: 86704 - DNA, 25 bp, Saccharomyces pastorianus
aacaatgataccgacgctgctgcgg

SEQ ID NO: 86705 - DNA, 25 bp, Saccharomyces pastorianus
aagccgaggagctgatcaaggacca

SEQ ID NO: 86706 - DNA, 25 bp, Saccharomyces pastorianus
acgctgctgcgggaggcaagtacac

SEQ ID NO: 86707 - DNA, 25 bp, Saccharomyces pastorianus
ggtgtgttcacctcagtattattct

SEQ ID NO: 86708 - DNA, 25 bp, Saccharomyces pastorianus
gtattattcttcaagcgccgtgcat

SEQ ID NO: 86709 - DNA, 25 bp, Saccharomyces pastorianus
tgtccacgatcctcgacactaagtg

SEQ ID NO: 86710 - DNA, 25 bp, Saccharomyces pastorianus
tgtcctgtccaacatgctggtcaag

SEQ ID NO: 86711 - DNA, 25 bp, Saccharomyces pastorianus
tacgccgagggcgacgccatcttta

SEQ ID NO: 86712 - DNA, 25 bp, Saccharomyces pastorianus
gctggtcaagactgccatgggtttt

SEQ ID NO: 86713 - DNA, 25 bp, Saccharomyces pastorianus
gtgcatttcctgtatggctaggcat

SEQ ID NO: 86714 - DNA, 25 bp, Saccharomyces pastorianus
aagaatggcagctccgtgtccacga

SEQ ID NO: 86715 - DNA, 25 bp, Saccharomyces pastorianus
atttggtgttggaagaggctacgcc

SEQ ID NO: 86716 - DNA, 25 bp, Saccharomyces pastorianus
aagtgggatattgtcctgtccaaca

SEQ ID NO: 86717 - DNA, 25 bp, Saccharomyces pastorianus
aaagcactccctccaaggattctaa

SEQ ID NO: 86718 - DNA, 25 bp, Saccharomyces pastorianus
gggcggaagtctttgcaactgatat

SEQ ID NO: 86719 - DNA, 25 bp, Saccharomyces pastorianus
gcccgtggtggcctttatgatatta

SEQ ID NO: 86720 - DNA, 25 bp, Saccharomyces pastorianus
ttacggttatctatgggcggaagtc

SEQ ID NO: 86721 - DNA, 25 bp, Saccharomyces pastorianus
gaattaatcaacctctcatcgcatt

SEQ ID NO: 86722 - DNA, 25 bp, Saccharomyces pastorianus
gaatcgaggtttaatggccccggat

SEQ ID NO: 86723 - DNA, 25 bp, Saccharomyces pastorianus
agactcttactctgccggttattac

SEQ ID NO: 86724 - DNA, 25 bp, Saccharomyces pastorianus
catggtatccatgacctggtgggac

SEQ ID NO: 86725 - DNA, 25 bp, Saccharomyces pastorianus
ggtgctttattcactctaagacaat

SEQ ID NO: 86726 - DNA, 25 bp, Saccharomyces pastorianus
tatgtatcacaccaaattcgctaag

SEQ ID NO: 86727 - DNA, 25 bp, Saccharomyces pastorianus
ctgtcaatttgcgatacctggaacc

SEQ ID NO: 86728 - DNA, 25 bp, Saccharomyces pastorianus
gaggcaccttcccaaatgttagaat

SEQ ID NO: 86729 - DNA, 25 bp, Saccharomyces pastorianus
gctttactccaagatttgagctatt

SEQ ID NO: 86730 - DNA, 25 bp, Saccharomyces pastorianus
gggctattacggaaagtttggctgt

SEQ ID NO: 86731 - DNA, 25 bp, Saccharomyces pastorianus
gtgttactcatgcatttcagtgata

SEQ ID NO: 86732 - DNA, 25 bp, Saccharomyces pastorianus
tatggagtggtgtaagttcgctgct

SEQ ID NO: 86733 - DNA, 25 bp, Saccharomyces pastorianus
gcttgatttcttcgcagtattggaa

SEQ ID NO: 86734 - DNA, 25 bp, Saccharomyces pastorianus
aagttcgctgcttgatttcttcgca

SEQ ID NO: 86735 - DNA, 25 bp, Saccharomyces pastorianus
attactgctgctttactccaagatt

SEQ ID NO: 86736 - DNA, 25 bp, Saccharomyces pastorianus
gaacatatcagacatattactgctg

SEQ ID NO: 86737 - DNA, 25 bp, Saccharomyces pastorianus
aatggttttaatctatccagggacg

SEQ ID NO: 86738 - DNA, 25 bp, Saccharomyces pastorianus
gaaaacctaggcgtggtcaacgata

SEQ ID NO: 86739 - DNA, 25 bp, Saccharomyces pastorianus
gtttggctgtgttactcatgcattt

SEQ ID NO: 86740 - DNA, 25 bp, Saccharomyces pastorianus
gggttatagtgagcccagatgttat

SEQ ID NO: 86741 - DNA, 25 bp, Saccharomyces pastorianus
gttggataacttctcacccaagaga

SEQ ID NO: 86742 - DNA, 25 bp, Saccharomyces pastorianus
atcccatttgtatcgtattgcagaa

SEQ ID NO: 86743 - DNA, 25 bp, Saccharomyces pastorianus
gacaagaaatcaccgttttatccag

SEQ ID NO: 86744 - DNA, 25 bp, Saccharomyces pastorianus
attgatctccaaaccaggtttcctg

SEQ ID NO: 86745 - DNA, 25 bp, Saccharomyces pastorianus
ctaccgcgactagacgattacatat

SEQ ID NO: 86746 - DNA, 25 bp, Saccharomyces pastorianus
ttgcagaaaacttctctaccgcgac

SEQ ID NO: 86747 - DNA, 25 bp, Saccharomyces pastorianus
gactggttacgagacacccgtcaaa

SEQ ID NO: 86748 - DNA, 25 bp, Saccharomyces pastorianus
taatggtgctgtaccatcccatttg

SEQ ID NO: 86749 - DNA, 25 bp, Saccharomyces pastorianus
aggtttcctgttcatctgggccaat

SEQ ID NO: 86750 - DNA, 25 bp, Saccharomyces pastorianus
acgtagacactgacttgagtatcga

SEQ ID NO: 86751 - DNA, 25 bp, Saccharomyces pastorianus
gtaccaattccaaggcctgacacaa

SEQ ID NO: 86752 - DNA, 25 bp, Saccharomyces pastorianus
aacgccctaaatgcatgtatctaat

SEQ ID NO: 86753 - DNA, 25 bp, Saccharomyces pastorianus
agacgatactacattccaccatttg

SEQ ID NO: 86754 - DNA, 25 bp, Saccharomyces pastorianus
catctccatcatatacattttctcc

SEQ ID NO: 86755 - DNA, 25 bp, Saccharomyces pastorianus
tatcgataaattccaatcctctccc

SEQ ID NO: 86756 - DNA, 25 bp, Saccharomyces pastorianus
taatgcacctgcaattgccgttaga

SEQ ID NO: 86757 - DNA, 25 bp, Saccharomyces pastorianus
gaagttatattagcctgcgacacag

SEQ ID NO: 86758 - DNA, 25 bp, Saccharomyces pastorianus
gaacctatcggtttgcatccaaaaa

SEQ ID NO: 86759 - DNA, 25 bp, Saccharomyces pastorianus
gatatgaatctctctttacagacga

SEQ ID NO: 86760 - DNA, 25 bp, Saccharomyces pastorianus
ggtacgttactatgcttactcatct

SEQ ID NO: 86761 - DNA, 25 bp, Saccharomyces pastorianus
gaactcgacaactcttctagtacca

SEQ ID NO: 86762 - DNA, 25 bp, Saccharomyces pastorianus
ttatcccaggatgatgacgcactga

SEQ ID NO: 86763 - DNA, 25 bp, Saccharomyces pastorianus
ggtgatatggttgatctgtcctctt

SEQ ID NO: 86764 - DNA, 25 bp, Saccharomyces pastorianus
attacgagagcggacgatgcacccc

SEQ ID NO: 86765 - DNA, 25 bp, Saccharomyces pastorianus
gacttagtctttagtttatcccagg

SEQ ID NO: 86766 - DNA, 25 bp, Saccharomyces pastorianus
attaatgcacagtccatgccctttt

SEQ ID NO: 86767 - DNA, 25 bp, Saccharomyces pastorianus
tgaaaacgttccatgcgagcaacag

SEQ ID NO: 86768 - DNA, 25 bp, Saccharomyces pastorianus
tgtcctcttttgtcaacacgcagag

SEQ ID NO: 86769 - DNA, 25 bp, Saccharomyces pastorianus
gtaaggacattctcatgggtgaacc

SEQ ID NO: 86770 - DNA, 25 bp, Saccharomyces pastorianus
atgcaacaccgcaacctgattgata

SEQ ID NO: 86771 - DNA, 25 bp, Saccharomyces pastorianus
tgtggtcaaatcctgtacgcctgat

SEQ ID NO: 86772 - DNA, 25 bp, Saccharomyces pastorianus
tgcccttttcagtcaacggtgtcaa

SEQ ID NO: 86773 - DNA, 25 bp, Saccharomyces pastorianus
taagttgctgtgtgccttggacaat

SEQ ID NO: 86774 - DNA, 25 bp, Saccharomyces pastorianus
ggaatggatctgtgtcgttccacgt

SEQ ID NO: 86775 - DNA, 25 bp, Saccharomyces pastorianus
tcgttcgctcattttgtcttgccaa

SEQ ID NO: 86776 - DNA, 25 bp, Saccharomyces pastorianus
agacctattagctatgtgttacatc

SEQ ID NO: 86777 - DNA, 25 bp, Saccharomyces pastorianus
aggtttcaactccacaggttattgt

SEQ ID NO: 86778 - DNA, 25 bp, Saccharomyces pastorianus
acgttcgaaggccttttctgatgaa

SEQ ID NO: 86779 - DNA, 25 bp, Saccharomyces pastorianus
tgtcttgccaatgccggagtccgaa

SEQ ID NO: 86780 - DNA, 25 bp, Saccharomyces pastorianus
gaacatttcctaccaactttcaata

SEQ ID NO: 86781 - DNA, 25 bp, Saccharomyces pastorianus
aagatgctaaagtctcgttcgctca

SEQ ID NO: 86782 - DNA, 25 bp, Saccharomyces pastorianus
aagttcgtcactttccaagatagac

SEQ ID NO: 86783 - DNA, 25 bp, Saccharomyces pastorianus
tgaccccaaccgatttattgactgc

SEQ ID NO: 86784 - DNA, 25 bp, Saccharomyces pastorianus
tccccatctcggtgccatataattg

SEQ ID NO: 86785 - DNA, 25 bp, Saccharomyces pastorianus
ttaaccagactgtttcccaatccag

SEQ ID NO: 86786 - DNA, 25 bp, Saccharomyces pastorianus
gagaaacgcaactaccctagagcct

SEQ ID NO: 86787 - DNA, 25 bp, Saccharomyces pastorianus
cctgtcgcctcttacatgactaaaa

SEQ ID NO: 86788 - DNA, 25 bp, Saccharomyces pastorianus
tgaggttcagtgtcccaatgagaga

SEQ ID NO: 86789 - DNA, 25 bp, Saccharomyces pastorianus
ctgatttttctttgactttcgagga

SEQ ID NO: 86790 - DNA, 25 bp, Saccharomyces pastorianus
cacctgcctctgagtgcatttggag

SEQ ID NO: 86791 - DNA, 25 bp, Saccharomyces pastorianus
gactggcgaaccgaatgggcacctg

SEQ ID NO: 86792 - DNA, 25 bp, Saccharomyces pastorianus
tcaatgtagcgcttggtccaggtac

SEQ ID NO: 86793 - DNA, 25 bp, Saccharomyces pastorianus
ggtactaccatgttgatgcacctac

SEQ ID NO: 86794 - DNA, 25 bp, Saccharomyces pastorianus
caatgtggtccagctttggtattca

SEQ ID NO: 86795 - DNA, 25 bp, Saccharomyces pastorianus
ggttcgttcaaagatatcatgttcg

SEQ ID NO: 86796 - DNA, 25 bp, Saccharomyces pastorianus
gattggaggtgctattttctttgaa

SEQ ID NO: 86797 - DNA, 25 bp, Saccharomyces pastorianus
aaattcacttgtatttctggtaaga

SEQ ID NO: 86798 - DNA, 25 bp, Saccharomyces pastorianus
gtagcgcttttattaagagttcatc

SEQ ID NO: 86799 - DNA, 25 bp, Saccharomyces pastorianus
acgtaacagacattcaaggtggctt

SEQ ID NO: 86800 - DNA, 25 bp, Saccharomyces pastorianus
tagggacacatcattggtctacctt

SEQ ID NO: 86801 - DNA, 25 bp, Saccharomyces pastorianus
gatattactttcctgccaaacttga

SEQ ID NO: 86802 - DNA, 25 bp, Saccharomyces pastorianus
gatcgccgataacgaatccctcgag

SEQ ID NO: 86803 - DNA, 25 bp, Saccharomyces pastorianus
cattggtctaccttccacaattaac

SEQ ID NO: 86804 - DNA, 25 bp, Saccharomyces pastorianus
aatacgcgaactcagcaaatccaag

SEQ ID NO: 86805 - DNA, 25 bp, Saccharomyces pastorianus
tcaaggtggcttgatgatcgccgat

SEQ ID NO: 86806 - DNA, 25 bp, Saccharomyces pastorianus
gggcgctaggattcatgttatgcaa

SEQ ID NO: 86807 - DNA, 25 bp, Saccharomyces pastorianus
gagagcttcatgtcgggatctcaat

SEQ ID NO: 86808 - DNA, 25 bp, Saccharomyces pastorianus
tgatgtgcttattcgctgactacct

SEQ ID NO: 86809 - DNA, 25 bp, Saccharomyces pastorianus
gatatgctagtgacatccttgaggg

SEQ ID NO: 86810 - DNA, 25 bp, Saccharomyces pastorianus
aatctgtagtatctgtcgggttgac

SEQ ID NO: 86811 - DNA, 25 bp, Saccharomyces pastorianus
agacgagttgccattgtgcatatac

SEQ ID NO: 86812 - DNA, 25 bp, Saccharomyces pastorianus
aggcgattgccatctcagtgctgaa

SEQ ID NO: 86813 - DNA, 25 bp, Saccharomyces pastorianus
aaagacacccgttcgcatgttttat

SEQ ID NO: 86814 - DNA, 25 bp, Saccharomyces pastorianus
ggcatcttttccaactcgtctggaa

SEQ ID NO: 86815 - DNA, 25 bp, Saccharomyces pastorianus
taagttgcctaagccggcatctttt

SEQ ID NO: 86816 - DNA, 25 bp, Saccharomyces pastorianus
gtcgggttgactgttttctcgaaat

SEQ ID NO: 86817 - DNA, 25 bp, Saccharomyces pastorianus
agagtttatggctaccccatacacg

SEQ ID NO: 86818 - DNA, 25 bp, Saccharomyces pastorianus
gcgacaatttttcttatgatccatt

SEQ ID NO: 86819 - DNA, 25 bp, Saccharomyces pastorianus
aggatcacaccttcgggccaatttg

SEQ ID NO: 86820 - DNA, 25 bp, Saccharomyces pastorianus
gagcgtttgtctaactcaagcgaca

SEQ ID NO: 86821 - DNA, 25 bp, Saccharomyces pastorianus
ggtgatcacgtattttatccgtcct

SEQ ID NO: 86822 - DNA, 25 bp, Saccharomyces pastorianus
tacacgccagttatcccaattaatg

SEQ ID NO: 86823 - DNA, 25 bp, Saccharomyces pastorianus
aatcacctacataccaaagctttta

SEQ ID NO: 86824 - DNA, 25 bp, Saccharomyces pastorianus
ctatattcgtcttgttggtgatcac

SEQ ID NO: 86825 - DNA, 25 bp, Saccharomyces pastorianus
tattgccaggatccgattcgcagtt

SEQ ID NO: 86826 - DNA, 25 bp, Saccharomyces pastorianus
agtcactaaccccagatgagcgttt

SEQ ID NO: 86827 - DNA, 25 bp, Saccharomyces pastorianus
agcattatatgtgatctaggccttg

SEQ ID NO: 86828 - DNA, 25 bp, Saccharomyces pastorianus
aaccctgttgcggtctcgagaatca

SEQ ID NO: 86829 - DNA, 25 bp, Saccharomyces pastorianus
acaccaagtctgtacacgttatctt

SEQ ID NO: 86830 - DNA, 25 bp, Saccharomyces pastorianus
aaatgaagacgtacaccaagtctgt

SEQ ID NO: 86831 - DNA, 25 bp, Saccharomyces pastorianus
atgactttctcccaaggacctaagt

SEQ ID NO: 86832 - DNA, 25 bp, Saccharomyces pastorianus
ggacctaagttagccagttgccaat

SEQ ID NO: 86833 - DNA, 25 bp, Saccharomyces pastorianus
acgtttctgaaaagaatctgtccgg

SEQ ID NO: 86834 - DNA, 25 bp, Saccharomyces pastorianus
ataagatgagaaccctgttgcggtc

SEQ ID NO: 86835 - DNA, 25 bp, Saccharomyces pastorianus
gtttcggtagggttcgataagatga

SEQ ID NO: 86836 - DNA, 25 bp, Saccharomyces pastorianus
tggacacaactcgtgtttaggaaga

SEQ ID NO: 86837 - DNA, 25 bp, Saccharomyces pastorianus
gaaaagaatctgtccggaagaaacg

SEQ ID NO: 86838 - DNA, 25 bp, Saccharomyces pastorianus
gaatcagggatgactttctcccaag

SEQ ID NO: 86839 - DNA, 25 bp, Saccharomyces pastorianus
gcatttcttagcatcttcgggagat

SEQ ID NO: 86840 - DNA, 25 bp, Saccharomyces pastorianus
gagattccatttccgcaccagtaaa

SEQ ID NO: 86841 - DNA, 25 bp, Saccharomyces pastorianus
gaaaggcccgcaagatattgatctc

SEQ ID NO: 86842 - DNA, 25 bp, Saccharomyces pastorianus
gttgaggcgcagaatcccattatta

SEQ ID NO: 86843 - DNA, 25 bp, Saccharomyces pastorianus
ggatgctatgaacggtactcctctc

SEQ ID NO: 86844 - DNA, 25 bp, Saccharomyces pastorianus
gaggtcaaacaaagcgtcgctctcg

SEQ ID NO: 86845 - DNA, 25 bp, Saccharomyces pastorianus
tgaactcatcaattccatatcccac

SEQ ID NO: 86846 - DNA, 25 bp, Saccharomyces pastorianus
tcattttgccccatgacacgaaagg

SEQ ID NO: 86847 - DNA, 25 bp, Saccharomyces pastorianus
agtcttcttctactggccttgaagg

SEQ ID NO: 86848 - DNA, 25 bp, Saccharomyces pastorianus
taaagaagagatccagcaccacact

SEQ ID NO: 86849 - DNA, 25 bp, Saccharomyces pastorianus
gccttgaaggtctttccgagtccaa

SEQ ID NO: 86850 - DNA, 25 bp, Saccharomyces pastorianus
gtatctgttttatccggtcattcca

SEQ ID NO: 86851 - DNA, 25 bp, Saccharomyces pastorianus
gaggacgacgaaacctttccacgtg

SEQ ID NO: 86852 - DNA, 25 bp, Saccharomyces pastorianus
tgggttcccctccaaagaggagcta

SEQ ID NO: 86853 - DNA, 25 bp, Saccharomyces pastorianus
tcgcctacggtaataagcttgtcat

SEQ ID NO: 86854 - DNA, 25 bp, Saccharomyces pastorianus
tgacttgtatctcattaccgctaaa

SEQ ID NO: 86855 - DNA, 25 bp, Saccharomyces pastorianus
tttggccagaagcaacagcacttta

SEQ ID NO: 86856 - DNA, 25 bp, Saccharomyces pastorianus
tattatcagatcttgcttcgcctac

SEQ ID NO: 86857 - DNA, 25 bp, Saccharomyces pastorianus
agatgtctacgatttcagtgggttc

SEQ ID NO: 86858 - DNA, 25 bp, Saccharomyces pastorianus
aatgtttgcttctggcggtgatgac

SEQ ID NO: 86859 - DNA, 25 bp, Saccharomyces pastorianus
acccaccagggcgttatagatgtct

SEQ ID NO: 86860 - DNA, 25 bp, Saccharomyces pastorianus
taacacgcatcaaggcttccatagg

SEQ ID NO: 86861 - DNA, 25 bp, Saccharomyces pastorianus
attggtgtcaaattccctggcagag

SEQ ID NO: 86862 - DNA, 25 bp, Saccharomyces pastorianus
atgaaggccatctggaccatacgct

SEQ ID NO: 86863 - DNA, 25 bp, Saccharomyces pastorianus
ctactataccctgcatttgttcatg

SEQ ID NO: 86864 - DNA, 25 bp, Saccharomyces pastorianus
gaaactcccggtgatctagacgtgt

SEQ ID NO: 86865 - DNA, 25 bp, Saccharomyces pastorianus
taaagtggtgcccatgtcgtatgcc

SEQ ID NO: 86866 - DNA, 25 bp, Saccharomyces pastorianus
gatctagacgtgttcatcttggaca

SEQ ID NO: 86867 - DNA, 25 bp, Saccharomyces pastorianus
agggcatttgttggtcatcacgtga

SEQ ID NO: 86868 - DNA, 25 bp, Saccharomyces pastorianus
aagcggcatggacgatgttcttaaa

SEQ ID NO: 86869 - DNA, 25 bp, Saccharomyces pastorianus
atacgctgcttttggctgaaactcc

SEQ ID NO: 86870 - DNA, 25 bp, Saccharomyces pastorianus
atgcgtttctacacaatgccggtaa

SEQ ID NO: 86871 - DNA, 25 bp, Saccharomyces pastorianus
atgccggtaacgatgcctactatac

SEQ ID NO: 86872 - DNA, 25 bp, Saccharomyces pastorianus
acgacgatttgcaggaattgaggga

SEQ ID NO: 86873 - DNA, 25 bp, Saccharomyces pastorianus
aaggaccttattgcagaaaacgaga

SEQ ID NO: 86874 - DNA, 25 bp, Saccharomyces pastorianus
gtcgcatccaaaacgtactgtccat

SEQ ID NO: 86875 - DNA, 25 bp, Saccharomyces pastorianus
cattcaggctgcgttatatgagatt

SEQ ID NO: 86876 - DNA, 25 bp, Saccharomyces pastorianus
gcagccctaaacacgctttttgaaa

SEQ ID NO: 86877 - DNA, 25 bp, Saccharomyces pastorianus
gaaaacgagatcttcgtcgcatcca

SEQ ID NO: 86878 - DNA, 25 bp, Saccharomyces pastorianus
tgtccatactgccatgcagccctaa

SEQ ID NO: 86879 - DNA, 25 bp, Saccharomyces pastorianus
aaactatcaagcacgtcaaggacct

SEQ ID NO: 86880 - DNA, 25 bp, Saccharomyces pastorianus
aaacatattggaggcaacgacgatt

SEQ ID NO: 86881 - DNA, 25 bp, Saccharomyces pastorianus
caggtccaaagttctggttttgcaa

SEQ ID NO: 86882 - DNA, 25 bp, Saccharomyces pastorianus
gaaggaaggcgcagacattcaggct

SEQ ID NO: 86883 - DNA, 25 bp, Saccharomyces pastorianus
tggcggacggtctaacttcatggat

SEQ ID NO: 86884 - DNA, 25 bp, Saccharomyces pastorianus
agagagcttgtcttcttatcagccg

SEQ ID NO: 86885 - DNA, 25 bp, Saccharomyces pastorianus
ggtggctgcgttgactgcatacgac

SEQ ID NO: 86886 - DNA, 25 bp, Saccharomyces pastorianus
aggcacccaggattcggctcataat

SEQ ID NO: 86887 - DNA, 25 bp, Saccharomyces pastorianus
caagggcaagttctccacggacgat

SEQ ID NO: 86888 - DNA, 25 bp, Saccharomyces pastorianus
ttacagaactcgctgatcggactgc

SEQ ID NO: 86889 - DNA, 25 bp, Saccharomyces pastorianus
gatcacggctcgtacgatgacggta

SEQ ID NO: 86890 - DNA, 25 bp, Saccharomyces pastorianus
tccaactcgctgactaatgccgata

SEQ ID NO: 86891 - DNA, 25 bp, Saccharomyces pastorianus
gaggtactcgaagagcagccgttcc

SEQ ID NO: 86892 - DNA, 25 bp, Saccharomyces pastorianus
gttcatccaggcaagggcgatcaga

SEQ ID NO: 86893 - DNA, 25 bp, Saccharomyces pastorianus
tcgcgtctgctgtgtcgttacagaa

SEQ ID NO: 86894 - DNA, 25 bp, Saccharomyces pastorianus
aagctcttctccgattaacacacat

SEQ ID NO: 86895 - DNA, 25 bp, Saccharomyces pastorianus
gggccatcacctaacgaggcgttaa

SEQ ID NO: 86896 - DNA, 25 bp, Saccharomyces pastorianus
agtctttcccactcaaaatctttgc

SEQ ID NO: 86897 - DNA, 25 bp, Saccharomyces pastorianus
atctgccgtttcaacagcgaacaca

SEQ ID NO: 86898 - DNA, 25 bp, Saccharomyces pastorianus
gaagactcctgcgaacggatcttga

SEQ ID NO: 86899 - DNA, 25 bp, Saccharomyces pastorianus
atggagtgtctactacggtaccttc

SEQ ID NO: 86900 - DNA, 25 bp, Saccharomyces pastorianus
acagactatttcgacacagttcata

SEQ ID NO: 86901 - DNA, 25 bp, Saccharomyces pastorianus
agtgacggtgtgtctctttcacaaa

SEQ ID NO: 86902 - DNA, 25 bp, Saccharomyces pastorianus
gcgttaaaacagttgcgtgcatcta

SEQ ID NO: 86903 - DNA, 25 bp, Saccharomyces pastorianus
tttgcatcccgccattatgttaaga

SEQ ID NO: 86904 - DNA, 25 bp, Saccharomyces pastorianus
ggtaatgaagaccagctcaagctct

SEQ ID NO: 86905 - DNA, 25 bp, Saccharomyces pastorianus
aaatactcgaatttgcatgccaagc

SEQ ID NO: 86906 - DNA, 25 bp, Saccharomyces pastorianus
gactccatcattcacaacttttgtt

SEQ ID NO: 86907 - DNA, 25 bp, Saccharomyces pastorianus
cacggcgctattaaaatttgttgat

SEQ ID NO: 86908 - DNA, 25 bp, Saccharomyces pastorianus
aaataactgctggaatgctttgaaa

SEQ ID NO: 86909 - DNA, 25 bp, Saccharomyces pastorianus
taaggccaagccaatttcaaatata

SEQ ID NO: 86910 - DNA, 25 bp, Saccharomyces pastorianus
gacatatacgactccatcattcaca

SEQ ID NO: 86911 - DNA, 25 bp, Saccharomyces pastorianus
gttaacttctacaaaccactggata

SEQ ID NO: 86912 - DNA, 25 bp, Saccharomyces pastorianus
gatttatcagcattgacctccgatc

SEQ ID NO: 86913 - DNA, 25 bp, Saccharomyces pastorianus
gcattgacctccgatctgatgtcct

SEQ ID NO: 86914 - DNA, 25 bp, Saccharomyces pastorianus
acacaccaagaaacacggcgctatt

SEQ ID NO: 86915 - DNA, 25 bp, Saccharomyces pastorianus
tgtcctccactgacgtcaacgagaa

SEQ ID NO: 86916 - DNA, 25 bp, Saccharomyces pastorianus
tgccgctcaaatcaactcgtgggtt

SEQ ID NO: 86917 - DNA, 25 bp, Saccharomyces pastorianus
tgaggcctttggttctgtaatcttc

SEQ ID NO: 86918 - DNA, 25 bp, Saccharomyces pastorianus
agctaaaggctgacttcccagcgta

SEQ ID NO: 86919 - DNA, 25 bp, Saccharomyces pastorianus
aaatccctgagtcttggaccgtaca

SEQ ID NO: 86920 - DNA, 25 bp, Saccharomyces pastorianus
tttaactgctcgtcgtactatttac

SEQ ID NO: 86921 - DNA, 25 bp, Saccharomyces pastorianus
atagaaagccctgccggtcaaaaga

SEQ ID NO: 86922 - DNA, 25 bp, Saccharomyces pastorianus
gggtggtcacctacaacactacaat

SEQ ID NO: 86923 - DNA, 25 bp, Saccharomyces pastorianus
tgtaatcttcttcaccgacgacaag

SEQ ID NO: 86924 - DNA, 25 bp, Saccharomyces pastorianus
tccgtcgtccaaaccatcattaaag

SEQ ID NO: 86925 - DNA, 25 bp, Saccharomyces pastorianus
tacgctttgaaaccggagttacctg

SEQ ID NO: 86926 - DNA, 25 bp, Saccharomyces pastorianus
aaatcgcgctgttatcttgactggt

SEQ ID NO: 86927 - DNA, 25 bp, Saccharomyces pastorianus
gatgttcctattgcgtggactgtac

SEQ ID NO: 86928 - DNA, 25 bp, Saccharomyces pastorianus
atacgccaacagcttttaactcaca

SEQ ID NO: 86929 - DNA, 25 bp, Saccharomyces pastorianus
tgttccaactgccttgccagaagaa

SEQ ID NO: 86930 - DNA, 25 bp, Saccharomyces pastorianus
aagagattttccagccttggcagcc

SEQ ID NO: 86931 - DNA, 25 bp, Saccharomyces pastorianus
aaccgtcgtaccatctacaatttga

SEQ ID NO: 86932 - DNA, 25 bp, Saccharomyces pastorianus
acgtcaaatctgctttgcctcaaga

SEQ ID NO: 86933 - DNA, 25 bp, Saccharomyces pastorianus
aatcgcgctgtcattatcgttggtg

SEQ ID NO: 86934 - DNA, 25 bp, Saccharomyces pastorianus
gaggcttacggttcagtcattttct

SEQ ID NO: 86935 - DNA, 25 bp, Saccharomyces pastorianus
tggactgccctcgaactattgggat

SEQ ID NO: 86936 - DNA, 25 bp, Saccharomyces pastorianus
ttgcgagcgcaatgccaactgctga

SEQ ID NO: 86937 - DNA, 25 bp, Saccharomyces pastorianus
atacgaccggtgctgtgcaaattca

SEQ ID NO: 86938 - DNA, 25 bp, Saccharomyces pastorianus
agtgtttcaccaagcttccatgggc

SEQ ID NO: 86939 - DNA, 25 bp, Saccharomyces pastorianus
gctcatgttgcgcaagttggacctt

SEQ ID NO: 86940 - DNA, 25 bp, Saccharomyces pastorianus
gcctatacacgtttattgcacacta

SEQ ID NO: 86941 - DNA, 25 bp, Saccharomyces pastorianus
atgggtctcggtattcactacagtc

SEQ ID NO: 86942 - DNA, 25 bp, Saccharomyces pastorianus
aagttggaccttgccggtgctacca

SEQ ID NO: 86943 - DNA, 25 bp, Saccharomyces pastorianus
gctattctacgctgttgtatccaaa

SEQ ID NO: 86944 - DNA, 25 bp, Saccharomyces pastorianus
cgtcagcactattatcaagcctata

SEQ ID NO: 86945 - DNA, 25 bp, Saccharomyces pastorianus
gagagcccttttactgagactgcgt

SEQ ID NO: 86946 - DNA, 25 bp, Saccharomyces pastorianus
ggtgctaccaaagcccagtgtttca

SEQ ID NO: 86947 - DNA, 25 bp, Saccharomyces pastorianus
ttccatgggcctatagtactcgatg

SEQ ID NO: 86948 - DNA, 25 bp, Saccharomyces pastorianus
gtactcgatggtttagcagcagaat

SEQ ID NO: 86949 - DNA, 25 bp, Saccharomyces pastorianus
agaactgcgcagtccggttataacg

SEQ ID NO: 86950 - DNA, 25 bp, Saccharomyces pastorianus
aaagttgcatttgccttagccgtgc

SEQ ID NO: 86951 - DNA, 25 bp, Saccharomyces pastorianus
ctgggccggcttgccaagatgcaaa

SEQ ID NO: 86952 - DNA, 25 bp, Saccharomyces pastorianus
cttcagactggcaccgacaaagcaa

SEQ ID NO: 86953 - DNA, 25 bp, Saccharomyces pastorianus
tttggaatccaaccactcaagcgac

SEQ ID NO: 86954 - DNA, 25 bp, Saccharomyces pastorianus
acacgtaccgttaagtctcaagcaa

SEQ ID NO: 86955 - DNA, 25 bp, Saccharomyces pastorianus
gacagagtactttacacgtaccgtt

SEQ ID NO: 86956 - DNA, 25 bp, Saccharomyces pastorianus
gcagtccggttataacgtctgacat

SEQ ID NO: 86957 - DNA, 25 bp, Saccharomyces pastorianus
gtctgacatgtccttttttgatttg

SEQ ID NO: 86958 - DNA, 25 bp, Saccharomyces pastorianus
cgtgctgacaccattggctatttgg

SEQ ID NO: 86959 - DNA, 25 bp, Saccharomyces pastorianus
gtctcaagcaaagggttttcttatt

SEQ ID NO: 86960 - DNA, 25 bp, Saccharomyces pastorianus
agaacaccgcatttggtttgtacga

SEQ ID NO: 86961 - DNA, 25 bp, Saccharomyces pastorianus
acggttctgctccagatttgccaaa

SEQ ID NO: 86962 - DNA, 25 bp, Saccharomyces pastorianus
ggtttgtacgaaccatgccacggtt

SEQ ID NO: 86963 - DNA, 25 bp, Saccharomyces pastorianus
taatgttttggcctcttcaagatta

SEQ ID NO: 86964 - DNA, 25 bp, Saccharomyces pastorianus
tctgccgccatgatcctagttaaga

SEQ ID NO: 86965 - DNA, 25 bp, Saccharomyces pastorianus
gaatcacaagaatggccgctttcat

SEQ ID NO: 86966 - DNA, 25 bp, Saccharomyces pastorianus
tcatctccgatgaagcctccgttat

SEQ ID NO: 86967 - DNA, 25 bp, Saccharomyces pastorianus
atcgccactatcttgtctgctgcaa

SEQ ID NO: 86968 - DNA, 25 bp, Saccharomyces pastorianus
aacatgagccaccattgcctatttg

SEQ ID NO: 86969 - DNA, 25 bp, Saccharomyces pastorianus
gaacgaattccctacattgaaggtt

SEQ ID NO: 86970 - DNA, 25 bp, Saccharomyces pastorianus
gaataaggtcaaccctatcgccact

SEQ ID NO: 86971 - DNA, 25 bp, Saccharomyces pastorianus
gacttccttttcaaagcactgcatg

SEQ ID NO: 86972 - DNA, 25 bp, Saccharomyces pastorianus
gacatgctgcgaggctatcatttca

SEQ ID NO: 86973 - DNA, 25 bp, Saccharomyces pastorianus
agcgcaatggcagaatcactcgatc

SEQ ID NO: 86974 - DNA, 25 bp, Saccharomyces pastorianus
aagcctaccgataagactgtccagt

SEQ ID NO: 86975 - DNA, 25 bp, Saccharomyces pastorianus
cgtggcgcttgagaataccgtttat

SEQ ID NO: 86976 - DNA, 25 bp, Saccharomyces pastorianus
tatagctcagtggtacgggattcaa

SEQ ID NO: 86977 - DNA, 25 bp, Saccharomyces pastorianus
gacgagttcaatccatacacaagag

SEQ ID NO: 86978 - DNA, 25 bp, Saccharomyces pastorianus
gacggtgtgttgtgtattctttcac

SEQ ID NO: 86979 - DNA, 25 bp, Saccharomyces pastorianus
acctttcttcccatgtgacattgac

SEQ ID NO: 86980 - DNA, 25 bp, Saccharomyces pastorianus
atcactcgatctacagcacctgaat

SEQ ID NO: 86981 - DNA, 25 bp, Saccharomyces pastorianus
catcatgaagtatgcccgccgtaaa

SEQ ID NO: 86982 - DNA, 25 bp, Saccharomyces pastorianus
aatgtggtcatgtcttgcgtgccga

SEQ ID NO: 86983 - DNA, 25 bp, Saccharomyces pastorianus
tggtcaaccaactggtgttgctgtt

SEQ ID NO: 86984 - DNA, 25 bp, Saccharomyces pastorianus
gaggtactgaaccaagtcttgcgca

SEQ ID NO: 86985 - DNA, 25 bp, Saccharomyces pastorianus
gtttgggcctatcggcaaaatcaat

SEQ ID NO: 86986 - DNA, 25 bp, Saccharomyces pastorianus
gatttattcgacttgtttgggccta

SEQ ID NO: 86987 - DNA, 25 bp, Saccharomyces pastorianus
tttcaagaggattcggttctgtcat

SEQ ID NO: 86988 - DNA, 25 bp, Saccharomyces pastorianus
ggatgtcgctgtccacattgatgaa

SEQ ID NO: 86989 - DNA, 25 bp, Saccharomyces pastorianus
caagtcttgcgcaggatgtcgctgt

SEQ ID NO: 86990 - DNA, 25 bp, Saccharomyces pastorianus
tagagctatcgatacattcaacggc

SEQ ID NO: 86991 - DNA, 25 bp, Saccharomyces pastorianus
ggttctgtcatttatcctactgagg

SEQ ID NO: 86992 - DNA, 25 bp, Saccharomyces pastorianus
gttcatcatcaatttaccgtactct

SEQ ID NO: 86993 - DNA, 25 bp, Saccharomyces pastorianus
agttggcagatcgtactggaccagc

SEQ ID NO: 86994 - DNA, 25 bp, Saccharomyces pastorianus
gagtgcaccgaatccttgacaatgt

SEQ ID NO: 86995 - DNA, 25 bp, Saccharomyces pastorianus
acacgcatggcattgtcgcagggca

SEQ ID NO: 86996 - DNA, 25 bp, Saccharomyces pastorianus
gcacttgcaggcttcgatttgatgg

SEQ ID NO: 86997 - DNA, 25 bp, Saccharomyces pastorianus
aaagaactactgttgatcccgccag

SEQ ID NO: 86998 - DNA, 25 bp, Saccharomyces pastorianus
atgcacctattttggtgggctcaga

SEQ ID NO: 86999 - DNA, 25 bp, Saccharomyces pastorianus
gcgaatacaacccaaatgcacctat

SEQ ID NO: 87000 - DNA, 25 bp, Saccharomyces pastorianus
aaacgaccactttttatcctgcaat

SEQ ID NO: 87001 - DNA, 25 bp, Saccharomyces pastorianus
gtgagagatcctgaacctgatgaat

SEQ ID NO: 87002 - DNA, 25 bp, Saccharomyces pastorianus
acggaagtgactcgccgtctagtgc

SEQ ID NO: 87003 - DNA, 25 bp, Saccharomyces pastorianus
gtacgttccaatttgtcgttgatgt

SEQ ID NO: 87004 - DNA, 25 bp, Saccharomyces pastorianus
tattgcgccaatacccatgcctaag

SEQ ID NO: 87005 - DNA, 25 bp, Saccharomyces pastorianus
acgtgcttccactagtattgtcaac

SEQ ID NO: 87006 - DNA, 25 bp, Saccharomyces pastorianus
tttgctgtgctttgtgcttttggca

SEQ ID NO: 87007 - DNA, 25 bp, Saccharomyces pastorianus
attgggtgtgttccactcaatctgc

SEQ ID NO: 87008 - DNA, 25 bp, Saccharomyces pastorianus
ttggcagcatcataggactcatctt

SEQ ID NO: 87009 - DNA, 25 bp, Saccharomyces pastorianus
aattccacgatgagcctggagctga

SEQ ID NO: 87010 - DNA, 25 bp, Saccharomyces pastorianus
gggataggtctgacacttaccaaaa

SEQ ID NO: 87011 - DNA, 25 bp, Saccharomyces pastorianus
ggactcatctttgggtttatattgg

SEQ ID NO: 87012 - DNA, 25 bp, Saccharomyces pastorianus
ggaaacggtggtttgctccgatacg

SEQ ID NO: 87013 - DNA, 25 bp, Saccharomyces pastorianus
atacgtacggtccttgaacgtgctt

SEQ ID NO: 87014 - DNA, 25 bp, Saccharomyces pastorianus
tcgctgagccgtttagttgcacaaa

SEQ ID NO: 87015 - DNA, 25 bp, Saccharomyces pastorianus
atggattacgatagctctgatacaa

SEQ ID NO: 87016 - DNA, 25 bp, Saccharomyces pastorianus
ttcaagtaaccccttaatcactaag

SEQ ID NO: 87017 - DNA, 25 bp, Saccharomyces pastorianus
agtcactcctcacgctaaggagagg

SEQ ID NO: 87018 - DNA, 25 bp, Saccharomyces pastorianus
attagagccactgtcatttccctct

SEQ ID NO: 87019 - DNA, 25 bp, Saccharomyces pastorianus
gatattccagtattttggcccatct

SEQ ID NO: 87020 - DNA, 25 bp, Saccharomyces pastorianus
gtgatttgttatggtctaggtctat

SEQ ID NO: 87021 - DNA, 25 bp, Saccharomyces pastorianus
gtccattcatcagaagattaccaga

SEQ ID NO: 87022 - DNA, 25 bp, Saccharomyces pastorianus
atttccctcttgttgtcgctatttt

SEQ ID NO: 87023 - DNA, 25 bp, Saccharomyces pastorianus
gctctgatacaatgaacggtggttc

SEQ ID NO: 87024 - DNA, 25 bp, Saccharomyces pastorianus
tcgtattacaatggccgaaggctgg

SEQ ID NO: 87025 - DNA, 25 bp, Saccharomyces pastorianus
gtcgctattttcaatcttcgatatt

SEQ ID NO: 87026 - DNA, 25 bp, Saccharomyces pastorianus
ttatcttaagttctactgcccttgg

SEQ ID NO: 87027 - DNA, 25 bp, Saccharomyces pastorianus
gtacaaaatgcttggtcatgtcata

SEQ ID NO: 87028 - DNA, 25 bp, Saccharomyces pastorianus
tcccaactccttcggctaatatgaa

SEQ ID NO: 87029 - DNA, 25 bp, Saccharomyces pastorianus
tgtcctttgcttcccattttatatg

SEQ ID NO: 87030 - DNA, 25 bp, Saccharomyces pastorianus
ggtcatgtcataagcttcatcgatt

SEQ ID NO: 87031 - DNA, 25 bp, Saccharomyces pastorianus
gaaattatgtcctttgcttcccatt

SEQ ID NO: 87032 - DNA, 25 bp, Saccharomyces pastorianus
ggaactgtctcgctgtttatttcaa

SEQ ID NO: 87033 - DNA, 25 bp, Saccharomyces pastorianus
atcgatttattgacttcccaactcc

SEQ ID NO: 87034 - DNA, 25 bp, Saccharomyces pastorianus
gagtttgctatggaactgtctcgct

SEQ ID NO: 87035 - DNA, 25 bp, Saccharomyces pastorianus
ctcgctgtttatttcaacgtttcta

SEQ ID NO: 87036 - DNA, 25 bp, Saccharomyces pastorianus
gttctactgcccttggaaattatgt

SEQ ID NO: 87037 - DNA, 25 bp, Saccharomyces pastorianus
attgacagcccaacgtgaaaggttt

SEQ ID NO: 87038 - DNA, 25 bp, Saccharomyces pastorianus
ccgccttgacgttgaagccttgaaa

SEQ ID NO: 87039 - DNA, 25 bp, Saccharomyces pastorianus
aaatgcgaatagtcgttcctcagct

SEQ ID NO: 87040 - DNA, 25 bp, Saccharomyces pastorianus
cattccgtttgcagtggttggttct

SEQ ID NO: 87041 - DNA, 25 bp, Saccharomyces pastorianus
gttagatctatcattccgtttgcag

SEQ ID NO: 87042 - DNA, 25 bp, Saccharomyces pastorianus
gattcgaactcatctccaagactta

SEQ ID NO: 87043 - DNA, 25 bp, Saccharomyces pastorianus
accagttattggcaagtctgataca

SEQ ID NO: 87044 - DNA, 25 bp, Saccharomyces pastorianus
ggaacaacattctcaatacttacgt

SEQ ID NO: 87045 - DNA, 25 bp, Saccharomyces pastorianus
ctcgttggagcgctattaatgttga

SEQ ID NO: 87046 - DNA, 25 bp, Saccharomyces pastorianus
gcaattctttatttcctgcaaccaa

SEQ ID NO: 87047 - DNA, 25 bp, Saccharomyces pastorianus
gaaaggagttgagccgccttgacgt

SEQ ID NO: 87048 - DNA, 25 bp, Saccharomyces pastorianus
ctttacctgatgaagtcctcaccaa

SEQ ID NO: 87049 - DNA, 25 bp, Saccharomyces pastorianus
gagacaaactaaacctgctgcagct

SEQ ID NO: 87050 - DNA, 25 bp, Saccharomyces pastorianus
agaccactacttctgatgcggctaa

SEQ ID NO: 87051 - DNA, 25 bp, Saccharomyces pastorianus
ttgtcttatttagctcatcacggaa

SEQ ID NO: 87052 - DNA, 25 bp, Saccharomyces pastorianus
aagaggtacacggtggctctccatg

SEQ ID NO: 87053 - DNA, 25 bp, Saccharomyces pastorianus
agaactgcgtctcctcttgaattga

SEQ ID NO: 87054 - DNA, 25 bp, Saccharomyces pastorianus
gaagatattcctgttgctactgaga

SEQ ID NO: 87055 - DNA, 25 bp, Saccharomyces pastorianus
gatgaacgctcctcagaaacctgaa

SEQ ID NO: 87056 - DNA, 25 bp, Saccharomyces pastorianus
cacggaattatctttttaccactgg

SEQ ID NO: 87057 - DNA, 25 bp, Saccharomyces pastorianus
ttgcaggacctgacggctcaagaac

SEQ ID NO: 87058 - DNA, 25 bp, Saccharomyces pastorianus
atatgacgcctttttgttcggtgtt

SEQ ID NO: 87059 - DNA, 25 bp, Saccharomyces pastorianus
gatgcaccagcaaatgaggcttcaa

SEQ ID NO: 87060 - DNA, 25 bp, Saccharomyces pastorianus
taaatcatatacgacctacttgctg

SEQ ID NO: 87061 - DNA, 25 bp, Saccharomyces pastorianus
ctacttgctgtacgagatggctcat

SEQ ID NO: 87062 - DNA, 25 bp, Saccharomyces pastorianus
aaaggacgccacaagtacgcagata

SEQ ID NO: 87063 - DNA, 25 bp, Saccharomyces pastorianus
gttctgacccaatattcgaagcata

SEQ ID NO: 87064 - DNA, 25 bp, Saccharomyces pastorianus
ccttcttggcactttcagtttcaat

SEQ ID NO: 87065 - DNA, 25 bp, Saccharomyces pastorianus
aaccgatgatattttccttcttggc

SEQ ID NO: 87066 - DNA, 25 bp, Saccharomyces pastorianus
aatgctttagtttcagttctgaccc

SEQ ID NO: 87067 - DNA, 25 bp, Saccharomyces pastorianus
gtttttcaattttcgtcacttctat

SEQ ID NO: 87068 - DNA, 25 bp, Saccharomyces pastorianus
gaagttatcatccacaggccagcgg

SEQ ID NO: 87069 - DNA, 25 bp, Saccharomyces pastorianus
tttgtttttgtccacgttgattccg

SEQ ID NO: 87070 - DNA, 25 bp, Saccharomyces pastorianus
gatggttacactcgtttagcgcaga

SEQ ID NO: 87071 - DNA, 25 bp, Saccharomyces pastorianus
actgttaagcaattagacgggccct

SEQ ID NO: 87072 - DNA, 25 bp, Saccharomyces pastorianus
ggacaaacctgctaaagatgcctct

SEQ ID NO: 87073 - DNA, 25 bp, Saccharomyces pastorianus
agctaaggttctgtactgatggtta

SEQ ID NO: 87074 - DNA, 25 bp, Saccharomyces pastorianus
atcacagactaccattgccgaggtc

SEQ ID NO: 87075 - DNA, 25 bp, Saccharomyces pastorianus
agatgcctctaaactgccaagggct

SEQ ID NO: 87076 - DNA, 25 bp, Saccharomyces pastorianus
atcaagagacgactatgccaatggg

SEQ ID NO: 87077 - DNA, 25 bp, Saccharomyces pastorianus
taagagtaccttacttcgacccaag

SEQ ID NO: 87078 - DNA, 25 bp, Saccharomyces pastorianus
gaaaccgtactagatccaataacaa

SEQ ID NO: 87079 - DNA, 25 bp, Saccharomyces pastorianus
aagaaacaagacttcgatgctgcga

SEQ ID NO: 87080 - DNA, 25 bp, Saccharomyces pastorianus
gaggtcatctctaacctctatgacg

SEQ ID NO: 87081 - DNA, 25 bp, Saccharomyces pastorianus
gtaccacctatactcttgtcattga

SEQ ID NO: 87082 - DNA, 25 bp, Saccharomyces pastorianus
aatattgaagttccaggcgctacta

SEQ ID NO: 87083 - DNA, 25 bp, Saccharomyces pastorianus
aataactattactcgccacttgcat

SEQ ID NO: 87084 - DNA, 25 bp, Saccharomyces pastorianus
ggaatccttatactgtttaaccttg

SEQ ID NO: 87085 - DNA, 25 bp, Saccharomyces pastorianus
aagcgtgctggtgcttttgggctca

SEQ ID NO: 87086 - DNA, 25 bp, Saccharomyces pastorianus
acaaacgtggccttcaagtacctga

SEQ ID NO: 87087 - DNA, 25 bp, Saccharomyces pastorianus
ttacattcacaggtctcagctcgtt

SEQ ID NO: 87088 - DNA, 25 bp, Saccharomyces pastorianus
gaagtggtcccgctacgtgttgtac

SEQ ID NO: 87089 - DNA, 25 bp, Saccharomyces pastorianus
ggcgctactatcttgagcacatttg

SEQ ID NO: 87090 - DNA, 25 bp, Saccharomyces pastorianus
aagatcctggctctgtttaatgtgg

SEQ ID NO: 87091 - DNA, 25 bp, Saccharomyces pastorianus
agctcgttcgctctggaaaggatca

SEQ ID NO: 87092 - DNA, 25 bp, Saccharomyces pastorianus
aaaagttcgctgctggtactaaggc

SEQ ID NO: 87093 - DNA, 25 bp, Saccharomyces pastorianus
cgctgctggtactaaggctttgtta

SEQ ID NO: 87094 - DNA, 25 bp, Saccharomyces pastorianus
gccagtcgacttcatcattgctgat

SEQ ID NO: 87095 - DNA, 25 bp, Saccharomyces pastorianus
aagagctctgctgctggtaacaccg

SEQ ID NO: 87096 - DNA, 25 bp, Saccharomyces pastorianus
agaaagttgtttgctgctactgttg

SEQ ID NO: 87097 - DNA, 25 bp, Saccharomyces pastorianus
ggtggtgacactgccactgtcgcta

SEQ ID NO: 87098 - DNA, 25 bp, Saccharomyces pastorianus
taaggctttgttagacgaagttgtc

SEQ ID NO: 87099 - DNA, 25 bp, Saccharomyces pastorianus
aagtcgtcttgccagtcgacttcat

SEQ ID NO: 87100 - DNA, 25 bp, Saccharomyces pastorianus
cgaagttgtcaagagctctgctgct

SEQ ID NO: 87101 - DNA, 25 bp, Saccharomyces pastorianus
cactgccactgtcgctaagaagtac

SEQ ID NO: 87102 - DNA, 25 bp, Saccharomyces pastorianus
gctgctggtaacaccgtcatcattg

SEQ ID NO: 87103 - DNA, 25 bp, Saccharomyces pastorianus
atgacggtgttaccagcagcagagc

SEQ ID NO: 87104 - DNA, 25 bp, Saccharomyces pastorianus
gcagcagagctcttgacaacttcgt

SEQ ID NO: 87105 - DNA, 25 bp, Saccharomyces pastorianus
gtgacaccgtacttcttagcgacag

SEQ ID NO: 87106 - DNA, 25 bp, Saccharomyces pastorianus
ggcaattccttaccttccaataatt

SEQ ID NO: 87107 - DNA, 25 bp, Saccharomyces pastorianus
cttagcctttgcaacagtagcagca

SEQ ID NO: 87108 - DNA, 25 bp, Saccharomyces pastorianus
gacaacttcgtctaacaaagcctta

SEQ ID NO: 87109 - DNA, 25 bp, Saccharomyces pastorianus
aaagaagcaccaccaccagtagaga

SEQ ID NO: 87110 - DNA, 25 bp, Saccharomyces pastorianus
tagcgacagtggcagtgtcaccacc

SEQ ID NO: 87111 - DNA, 25 bp, Saccharomyces pastorianus
catgggagatcttgtcagtgacacc

SEQ ID NO: 87112 - DNA, 25 bp, Saccharomyces pastorianus
gaaagcaacacctggcaattcctta

SEQ ID NO: 87113 - DNA, 25 bp, Saccharomyces pastorianus
agccttagtaccagcagcgaacttt

SEQ ID NO: 87114 - DNA, 25 bp, Saccharomyces pastorianus
gaaaacgttcgccagagatcagaat

SEQ ID NO: 87115 - DNA, 25 bp, Saccharomyces pastorianus
gaaggcggtaaaggtgcctaccttg

SEQ ID NO: 87116 - DNA, 25 bp, Saccharomyces pastorianus
aaacgttttgctcttcagttgtcaa

SEQ ID NO: 87117 - DNA, 25 bp, Saccharomyces pastorianus
ggtccagcgtggttacagttttgtg

SEQ ID NO: 87118 - DNA, 25 bp, Saccharomyces pastorianus
gttgtccatattacatccatctact

SEQ ID NO: 87119 - DNA, 25 bp, Saccharomyces pastorianus
gataagatcgactcaggttgcaata

SEQ ID NO: 87120 - DNA, 25 bp, Saccharomyces pastorianus
ggtgtactgctaataaacccgcaag

SEQ ID NO: 87121 - DNA, 25 bp, Saccharomyces pastorianus
agtgagactgacttgttgtccatat

SEQ ID NO: 87122 - DNA, 25 bp, Saccharomyces pastorianus
gcctaccttgtgaaatcctgggact

SEQ ID NO: 87123 - DNA, 25 bp, Saccharomyces pastorianus
ggaaattcttgcagctattggtata

SEQ ID NO: 87124 - DNA, 25 bp, Saccharomyces pastorianus
gtgacaagtgttctcaaagctacaa

SEQ ID NO: 87125 - DNA, 25 bp, Saccharomyces pastorianus
gagacgtacgactagccaagaagca

SEQ ID NO: 87126 - DNA, 25 bp, Saccharomyces pastorianus
agctctttgcacgaaattacaccct

SEQ ID NO: 87127 - DNA, 25 bp, Saccharomyces pastorianus
caatggcgtagtggacccgaccaaa

SEQ ID NO: 87128 - DNA, 25 bp, Saccharomyces pastorianus
gaaggctaccatagttgtgcacaag

SEQ ID NO: 87129 - DNA, 25 bp, Saccharomyces pastorianus
agtgcatgcaattccgagagacgta

SEQ ID NO: 87130 - DNA, 25 bp, Saccharomyces pastorianus
gggaactttgtagtccctgtggact

SEQ ID NO: 87131 - DNA, 25 bp, Saccharomyces pastorianus
tccctgtggactcgcctatggaaaa

SEQ ID NO: 87132 - DNA, 25 bp, Saccharomyces pastorianus
ggaactagtcggtctgccagtatta

SEQ ID NO: 87133 - DNA, 25 bp, Saccharomyces pastorianus
gacaaacaatcctcccaaatggtga

SEQ ID NO: 87134 - DNA, 25 bp, Saccharomyces pastorianus
gaatcgtgtaactagtgcatgcaat

SEQ ID NO: 87135 - DNA, 25 bp, Saccharomyces pastorianus
gacacttggacaattcaatggcgta

SEQ ID NO: 87136 - DNA, 25 bp, Saccharomyces pastorianus
aaggactcctcaattacatggccat

SEQ ID NO: 87137 - DNA, 25 bp, Saccharomyces pastorianus
atccccggcgttgatgcgtatatta

SEQ ID NO: 87138 - DNA, 25 bp, Saccharomyces pastorianus
ttttgacaataaagcgatccccggc

SEQ ID NO: 87139 - DNA, 25 bp, Saccharomyces pastorianus
ccagcttatgggttgccgaggaact

SEQ ID NO: 87140 - DNA, 25 bp, Saccharomyces pastorianus
agagccccagggttgcattggaaat

SEQ ID NO: 87141 - DNA, 25 bp, Saccharomyces pastorianus
caccaactactcacgctttaataac

SEQ ID NO: 87142 - DNA, 25 bp, Saccharomyces pastorianus
gagatgggctcgtgatactcctaga

SEQ ID NO: 87143 - DNA, 25 bp, Saccharomyces pastorianus
tagaattattggcaccatccctcac

SEQ ID NO: 87144 - DNA, 25 bp, Saccharomyces pastorianus
gaagttgacaagtttcccgtcgaag

SEQ ID NO: 87145 - DNA, 25 bp, Saccharomyces pastorianus
attcgctaaggaactatgtgccgga

SEQ ID NO: 87146 - DNA, 25 bp, Saccharomyces pastorianus
ggccatccttagtaaccagcttatg

SEQ ID NO: 87147 - DNA, 25 bp, Saccharomyces pastorianus
caatgaatcctgaaagagcttacaa

SEQ ID NO: 87148 - DNA, 25 bp, Saccharomyces pastorianus
gaaaacatatgcgagttattgaact

SEQ ID NO: 87149 - DNA, 25 bp, Saccharomyces pastorianus
gagcttacaacaatgtaacgctgaa

SEQ ID NO: 87150 - DNA, 25 bp, Saccharomyces pastorianus
tcacagaacaacacaatcagctcaa

SEQ ID NO: 87151 - DNA, 25 bp, Saccharomyces pastorianus
tagaaagtacggaaagacacaatag

SEQ ID NO: 87152 - DNA, 25 bp, Saccharomyces pastorianus
gtattatcaatcctgaaaggcaaag

SEQ ID NO: 87153 - DNA, 25 bp, Saccharomyces pastorianus
aaggcaaaggatgagcttggaagaa

SEQ ID NO: 87154 - DNA, 25 bp, Saccharomyces pastorianus
aacacaatcagctcaatgaatcctg

SEQ ID NO: 87155 - DNA, 25 bp, Saccharomyces pastorianus
gaatcctgaaagagcttacaacaat

SEQ ID NO: 87156 - DNA, 25 bp, Saccharomyces pastorianus
gacacaatagtattatcaatcctga

SEQ ID NO: 87157 - DNA, 25 bp, Saccharomyces pastorianus
atgcgagttattgaacttggtagaa

SEQ ID NO: 87158 - DNA, 25 bp, Saccharomyces pastorianus
gacgatactgttggatgctttgatc

SEQ ID NO: 87159 - DNA, 25 bp, Saccharomyces pastorianus
aaaattccactcctgacgatactgt

SEQ ID NO: 87160 - DNA, 25 bp, Saccharomyces pastorianus
cagttttcgttaccgactatccacg

SEQ ID NO: 87161 - DNA, 25 bp, Saccharomyces pastorianus
ctatccacgtctttgtaaaccattc

SEQ ID NO: 87162 - DNA, 25 bp, Saccharomyces pastorianus
aaggaagtgcaccacacggaggctt

SEQ ID NO: 87163 - DNA, 25 bp, Saccharomyces pastorianus
aataatgcatcgtcagagctatcaa

SEQ ID NO: 87164 - DNA, 25 bp, Saccharomyces pastorianus
gccggagagtattttaagtccccag

SEQ ID NO: 87165 - DNA, 25 bp, Saccharomyces pastorianus
tgctttgatctactggttcctggaa

SEQ ID NO: 87166 - DNA, 25 bp, Saccharomyces pastorianus
aacgccacaatgaagtttcacactt

SEQ ID NO: 87167 - DNA, 25 bp, Saccharomyces pastorianus
tggactggtatgtttctctgagaaa

SEQ ID NO: 87168 - DNA, 25 bp, Saccharomyces pastorianus
cacacggaggctttggtctagggtt

SEQ ID NO: 87169 - DNA, 25 bp, Saccharomyces pastorianus
tattgccattattgctaccattatc

SEQ ID NO: 87170 - DNA, 25 bp, Saccharomyces pastorianus
gcttgtattgccattattgctacca

SEQ ID NO: 87171 - DNA, 25 bp, Saccharomyces pastorianus
gtattgccattattgctaccattat

SEQ ID NO: 87172 - DNA, 25 bp, Saccharomyces pastorianus
ttgccattattgctaccattatcta

SEQ ID NO: 87173 - DNA, 25 bp, Saccharomyces pastorianus
tgccattattgctaccattatctac

SEQ ID NO: 87174 - DNA, 25 bp, Saccharomyces pastorianus
ggcttgtattgccattattgctacc

SEQ ID NO: 87175 - DNA, 25 bp, Saccharomyces pastorianus
ttgtattgccattattgctaccatt

SEQ ID NO: 87176 - DNA, 25 bp, Saccharomyces pastorianus
cttgtattgccattattgctaccat

SEQ ID NO: 87177 - DNA, 25 bp, Saccharomyces pastorianus
tgtattgccattattgctaccatta

SEQ ID NO: 87178 - DNA, 25 bp, Saccharomyces pastorianus
attgccattattgctaccattatct

SEQ ID NO: 87179 - DNA, 25 bp, Saccharomyces pastorianus
ggtttggcttgtattgccattattg

SEQ ID NO: 87180 - DNA, 25 bp, Saccharomyces pastorianus
aacataccaacctcaatccgggtgg

SEQ ID NO: 87181 - DNA, 25 bp, Saccharomyces pastorianus
gaaagccgggaataggtcgcaatcg

SEQ ID NO: 87182 - DNA, 25 bp, Saccharomyces pastorianus
atggccgattcggtatccgcgcgca

SEQ ID NO: 87183 - DNA, 25 bp, Saccharomyces pastorianus
gcgcaaagaggcaacataccaacct

SEQ ID NO: 87184 - DNA, 25 bp, Saccharomyces pastorianus
gttgcattggacaggaattcctttt

SEQ ID NO: 87185 - DNA, 25 bp, Saccharomyces pastorianus
catttggacatcgagcatttttcag

SEQ ID NO: 87186 - DNA, 25 bp, Saccharomyces pastorianus
atttttcagctgttgtcctttacca

SEQ ID NO: 87187 - DNA, 25 bp, Saccharomyces pastorianus
gtgcacccataccatatgatcgtta

SEQ ID NO: 87188 - DNA, 25 bp, Saccharomyces pastorianus
tttctatggctgtcgttgcattgga

SEQ ID NO: 87189 - DNA, 25 bp, Saccharomyces pastorianus
caaccgcggctgtttctatggctgt

SEQ ID NO: 87190 - DNA, 25 bp, Saccharomyces pastorianus
tgtcctttaccagaagaagaaactt

SEQ ID NO: 87191 - DNA, 25 bp, Saccharomyces pastorianus
ccattctctgggacaagctggtaga

SEQ ID NO: 87192 - DNA, 25 bp, Saccharomyces pastorianus
aatacgccactatgtcttcttcgaa

SEQ ID NO: 87193 - DNA, 25 bp, Saccharomyces pastorianus
gtcatgactgtactctggaaattct

SEQ ID NO: 87194 - DNA, 25 bp, Saccharomyces pastorianus
gaagaaacttttatgctccttttga

SEQ ID NO: 87195 - DNA, 25 bp, Saccharomyces pastorianus
gaaactagcttcgacaattggcagt

SEQ ID NO: 87196 - DNA, 25 bp, Saccharomyces pastorianus
accacattaacggttcgcttcgtag

SEQ ID NO: 87197 - DNA, 25 bp, Saccharomyces pastorianus
cgttgaatcctattatcccactatt

SEQ ID NO: 87198 - DNA, 25 bp, Saccharomyces pastorianus
tgacgggcgtacgaggcataatgct

SEQ ID NO: 87199 - DNA, 25 bp, Saccharomyces pastorianus
ggaaattctagatactgcaggccaa

SEQ ID NO: 87200 - DNA, 25 bp, Saccharomyces pastorianus
gtagaatcgcggttcgttgaatcct

SEQ ID NO: 87201 - DNA, 25 bp, Saccharomyces pastorianus
ttcttcgaactccacacataacttt

SEQ ID NO: 87202 - DNA, 25 bp, Saccharomyces pastorianus
gaaccaagcctttattgagcgtgtt

SEQ ID NO: 87203 - DNA, 25 bp, Saccharomyces pastorianus
gatttattacagacggcctggcaca

SEQ ID NO: 87204 - DNA, 25 bp, Saccharomyces pastorianus
gatgtcaccaagcttacccgatgaa

SEQ ID NO: 87205 - DNA, 25 bp, Saccharomyces pastorianus
gagacggataacgtggctctacccc

SEQ ID NO: 87206 - DNA, 25 bp, Saccharomyces pastorianus
aaaggagccgatcgcgcctattgtt

SEQ ID NO: 87207 - DNA, 25 bp, Saccharomyces pastorianus
gacctcgttgtctttgtgaatatcg

SEQ ID NO: 87208 - DNA, 25 bp, Saccharomyces pastorianus
ggcctggcacatgaatccgctaaag

SEQ ID NO: 87209 - DNA, 25 bp, Saccharomyces pastorianus
cctattgttattcatccggtctgga

SEQ ID NO: 87210 - DNA, 25 bp, Saccharomyces pastorianus
ggagccggcagtggaatcaccttga

SEQ ID NO: 87211 - DNA, 25 bp, Saccharomyces pastorianus
gcgctttatcaaaacctcagggctc

SEQ ID NO: 87212 - DNA, 25 bp, Saccharomyces pastorianus
ggtgctaatgcaacaagcgctttat

SEQ ID NO: 87213 - DNA, 25 bp, Saccharomyces pastorianus
taaagcgtgcccacggcggtgttgc

SEQ ID NO: 87214 - DNA, 25 bp, Saccharomyces pastorianus
gtatttcccaattttgccacattgt

SEQ ID NO: 87215 - DNA, 25 bp, Saccharomyces pastorianus
cacctttgcaggttgtgccattatt

SEQ ID NO: 87216 - DNA, 25 bp, Saccharomyces pastorianus
ggcgctactgccttattatgttaca

SEQ ID NO: 87217 - DNA, 25 bp, Saccharomyces pastorianus
ttggctgccagaggcatcagggtct

SEQ ID NO: 87218 - DNA, 25 bp, Saccharomyces pastorianus
gggtccctatttcattgaaccttgg

SEQ ID NO: 87219 - DNA, 25 bp, Saccharomyces pastorianus
gactcaaccgctcgttacattatat

SEQ ID NO: 87220 - DNA, 25 bp, Saccharomyces pastorianus
gactgtgtgggttcaacaactgcca

SEQ ID NO: 87221 - DNA, 25 bp, Saccharomyces pastorianus
gaaccttggtgttcacgtggttatg

SEQ ID NO: 87222 - DNA, 25 bp, Saccharomyces pastorianus
atgggcaccacatctatttcttggg

SEQ ID NO: 87223 - DNA, 25 bp, Saccharomyces pastorianus
aagcagttcacttgtatttcccaat

SEQ ID NO: 87224 - DNA, 25 bp, Saccharomyces pastorianus
tcttagcatccttctttgttcttat

SEQ ID NO: 87225 - DNA, 25 bp, Saccharomyces pastorianus
aacattcaattcttagcatccttct

SEQ ID NO: 87226 - DNA, 25 bp, Saccharomyces pastorianus
attcttagcatccttctttgttctt

SEQ ID NO: 87227 - DNA, 25 bp, Saccharomyces pastorianus
agcatccttctttgttcttatctta

SEQ ID NO: 87228 - DNA, 25 bp, Saccharomyces pastorianus
attcaattcttagcatccttctttg

SEQ ID NO: 87229 - DNA, 25 bp, Saccharomyces pastorianus
gcaaacattcaattcttagcatcct

SEQ ID NO: 87230 - DNA, 25 bp, Saccharomyces pastorianus
ttagcatccttctttgttcttatct

SEQ ID NO: 87231 - DNA, 25 bp, Saccharomyces pastorianus
tccttctttgttcttatcttaacca

SEQ ID NO: 87232 - DNA, 25 bp, Saccharomyces pastorianus
aattcttagcatccttctttgttct

SEQ ID NO: 87233 - DNA, 25 bp, Saccharomyces pastorianus
cttctttgttcttatcttaaccata

SEQ ID NO: 87234 - DNA, 25 bp, Saccharomyces pastorianus
gcatccttctttgttcttatcttaa

SEQ ID NO: 87235 - DNA, 25 bp, Saccharomyces pastorianus
acctgttcttagcttgtaccagagg

SEQ ID NO: 87236 - DNA, 25 bp, Saccharomyces pastorianus
gtaatggtgcatttgtcatccgtcc

SEQ ID NO: 87237 - DNA, 25 bp, Saccharomyces pastorianus
atgaccttgttagggtgatgtacac

SEQ ID NO: 87238 - DNA, 25 bp, Saccharomyces pastorianus
agtcacatcaagatcgtttatggtt

SEQ ID NO: 87239 - DNA, 25 bp, Saccharomyces pastorianus
gtcccatatagccaattcgttcaaa

SEQ ID NO: 87240 - DNA, 25 bp, Saccharomyces pastorianus
gggatgttttgaatttacctgttct

SEQ ID NO: 87241 - DNA, 25 bp, Saccharomyces pastorianus
tagccctttgaagatattactctgg

SEQ ID NO: 87242 - DNA, 25 bp, Saccharomyces pastorianus
gatccaacaacaacctagagtaatg

SEQ ID NO: 87243 - DNA, 25 bp, Saccharomyces pastorianus
gatgtacaccctaatcaacagtttt

SEQ ID NO: 87244 - DNA, 25 bp, Saccharomyces pastorianus
atgtgaaccgcatgggcagtttacc

SEQ ID NO: 87245 - DNA, 25 bp, Saccharomyces pastorianus
taacctctactgtggaggcacccaa

SEQ ID NO: 87246 - DNA, 25 bp, Saccharomyces pastorianus
cacttgatgcttccttattgagaga

SEQ ID NO: 87247 - DNA, 25 bp, Saccharomyces pastorianus
gagtccaagtacgtttaccgatgaa

SEQ ID NO: 87248 - DNA, 25 bp, Saccharomyces pastorianus
gattttgtttactatctggttaata

SEQ ID NO: 87249 - DNA, 25 bp, Saccharomyces pastorianus
atgatcccagctccacttgatgctt

SEQ ID NO: 87250 - DNA, 25 bp, Saccharomyces pastorianus
ggtgtcccagcagcaagaaaagcaa

SEQ ID NO: 87251 - DNA, 25 bp, Saccharomyces pastorianus
gggtcacgtttacgatcatttttgg

SEQ ID NO: 87252 - DNA, 25 bp, Saccharomyces pastorianus
gagagaacatgcattccaaggaact

SEQ ID NO: 87253 - DNA, 25 bp, Saccharomyces pastorianus
gtttaaattggtgtcccagcagcaa

SEQ ID NO: 87254 - DNA, 25 bp, Saccharomyces pastorianus
atacggactcggttatttcaattat

SEQ ID NO: 87255 - DNA, 25 bp, Saccharomyces pastorianus
gatctaagcacagttttgagtccaa

SEQ ID NO: 87256 - DNA, 25 bp, Saccharomyces pastorianus
ggtgttatttctgttgtttcatgat

SEQ ID NO: 87257 - DNA, 25 bp, Saccharomyces pastorianus
gtattgtacgactttttcctcgagg

SEQ ID NO: 87258 - DNA, 25 bp, Saccharomyces pastorianus
gctagattactttttcgcaggttta

SEQ ID NO: 87259 - DNA, 25 bp, Saccharomyces pastorianus
aatctttgccctgcacatcttgaga

SEQ ID NO: 87260 - DNA, 25 bp, Saccharomyces pastorianus
agaatgacttccatgttcctgtacc

SEQ ID NO: 87261 - DNA, 25 bp, Saccharomyces pastorianus
gactctatgttgactggtcgtacac

SEQ ID NO: 87262 - DNA, 25 bp, Saccharomyces pastorianus
gaactacctttacgttactgtggcg

SEQ ID NO: 87263 - DNA, 25 bp, Saccharomyces pastorianus
ctgtgtgtcattccaattcttcttg

SEQ ID NO: 87264 - DNA, 25 bp, Saccharomyces pastorianus
tgcgctatggcatctgtgcacaata

SEQ ID NO: 87265 - DNA, 25 bp, Saccharomyces pastorianus
aatatggccctcgtgggtattgtac

SEQ ID NO: 87266 - DNA, 25 bp, Saccharomyces pastorianus
aagctcggtctttcactgtcgtgat

SEQ ID NO: 87267 - DNA, 25 bp, Saccharomyces pastorianus
gatagcacaagctttcactgcgtca

SEQ ID NO: 87268 - DNA, 25 bp, Saccharomyces pastorianus
gggcctttgatgaccacattgacac

SEQ ID NO: 87269 - DNA, 25 bp, Saccharomyces pastorianus
gcagcgatcctactctcgaagggaa

SEQ ID NO: 87270 - DNA, 25 bp, Saccharomyces pastorianus
gatgtcacactacctcttggtgaga

SEQ ID NO: 87271 - DNA, 25 bp, Saccharomyces pastorianus
tatgacgacgaaacgttccctcgat

SEQ ID NO: 87272 - DNA, 25 bp, Saccharomyces pastorianus
gggaacttcaatttagacgcctact

SEQ ID NO: 87273 - DNA, 25 bp, Saccharomyces pastorianus
atttgtccacgcgtaatgttttcca

SEQ ID NO: 87274 - DNA, 25 bp, Saccharomyces pastorianus
gagtcgctatctcatctgaactaca

SEQ ID NO: 87275 - DNA, 25 bp, Saccharomyces pastorianus
aaggtattgtatttgttgccgcggc

SEQ ID NO: 87276 - DNA, 25 bp, Saccharomyces pastorianus
ccagattctttacaacggcgtcgat

SEQ ID NO: 87277 - DNA, 25 bp, Saccharomyces pastorianus
acaatgccactttacaaactcctat

SEQ ID NO: 87278 - DNA, 25 bp, Saccharomyces pastorianus
tgtgtaaacatctttgccccaggcg

SEQ ID NO: 87279 - DNA, 25 bp, Saccharomyces pastorianus
ccctccactgccatgttgattatgg

SEQ ID NO: 87280 - DNA, 25 bp, Saccharomyces pastorianus
ctagacttagattggccacgcattt

SEQ ID NO: 87281 - DNA, 25 bp, Saccharomyces pastorianus
ctgtgggcgactgacctttgtgcaa

SEQ ID NO: 87282 - DNA, 25 bp, Saccharomyces pastorianus
agattggccacgcattttttaccct

SEQ ID NO: 87283 - DNA, 25 bp, Saccharomyces pastorianus
tgacctttgtgcaatgttccacgat

SEQ ID NO: 87284 - DNA, 25 bp, Saccharomyces pastorianus
gctcctgaaactccctagacttaga

SEQ ID NO: 87285 - DNA, 25 bp, Saccharomyces pastorianus
ggcgactgacctttgtgcaatgttc

SEQ ID NO: 87286 - DNA, 25 bp, Saccharomyces pastorianus
cattttttaccctgtgggcgactga

SEQ ID NO: 87287 - DNA, 25 bp, Saccharomyces pastorianus
ttggccacgcattttttaccctgtg

SEQ ID NO: 87288 - DNA, 25 bp, Saccharomyces pastorianus
actccctagacttagattggccacg

SEQ ID NO: 87289 - DNA, 25 bp, Saccharomyces pastorianus
cctttgtgcaatgttccacgatgaa

SEQ ID NO: 87290 - DNA, 25 bp, Saccharomyces pastorianus
tgttggctacatcctttccatagac

SEQ ID NO: 87291 - DNA, 25 bp, Saccharomyces pastorianus
attagagtgccattgttttcgccgc

SEQ ID NO: 87292 - DNA, 25 bp, Saccharomyces pastorianus
aggaacgtcagattgcttggatcat

SEQ ID NO: 87293 - DNA, 25 bp, Saccharomyces pastorianus
ttttcgccgctggtcgagagaatcg

SEQ ID NO: 87294 - DNA, 25 bp, Saccharomyces pastorianus
aagacggccgtcgagattagagtgc

SEQ ID NO: 87295 - DNA, 25 bp, Saccharomyces pastorianus
aaacaactggtgcaagacgcctcgt

SEQ ID NO: 87296 - DNA, 25 bp, Saccharomyces pastorianus
agcgcatagcttcgtcgcagattat

SEQ ID NO: 87297 - DNA, 25 bp, Saccharomyces pastorianus
aagacgcctcgttgctgttgcggaa

SEQ ID NO: 87298 - DNA, 25 bp, Saccharomyces pastorianus
tcgtacgacacctttgttggctaca

SEQ ID NO: 87299 - DNA, 25 bp, Saccharomyces pastorianus
aaacaggtggccctctcagaaatag

SEQ ID NO: 87300 - DNA, 25 bp, Saccharomyces pastorianus
tccggattgtgtacgactcgtccaa

SEQ ID NO: 87301 - DNA, 25 bp, Saccharomyces pastorianus
atggctgtgcaatgcggacacttcc

SEQ ID NO: 87302 - DNA, 25 bp, Saccharomyces pastorianus
aacgatcctaaacagcggttgatga

SEQ ID NO: 87303 - DNA, 25 bp, Saccharomyces pastorianus
agcatgcttgcgaccggtcttagta

SEQ ID NO: 87304 - DNA, 25 bp, Saccharomyces pastorianus
ttcaacacattgtatgctgcactga

SEQ ID NO: 87305 - DNA, 25 bp, Saccharomyces pastorianus
gcgggctcgtttgacgcggctatta

SEQ ID NO: 87306 - DNA, 25 bp, Saccharomyces pastorianus
caggatatgggcaccgggataccgt

SEQ ID NO: 87307 - DNA, 25 bp, Saccharomyces pastorianus
ggacacttcctacaacgatcctaaa

SEQ ID NO: 87308 - DNA, 25 bp, Saccharomyces pastorianus
atcagtgcgatccaatggctgtgca

SEQ ID NO: 87309 - DNA, 25 bp, Saccharomyces pastorianus
agggcgacttgatgttgcaggatat

SEQ ID NO: 87310 - DNA, 25 bp, Saccharomyces pastorianus
gtttggatatatcgcccagcatgct

SEQ ID NO: 87311 - DNA, 25 bp, Saccharomyces pastorianus
gcggctattagtatcagtgcgatcc

SEQ ID NO: 87312 - DNA, 25 bp, Saccharomyces pastorianus
tccagaatgaaactgcacggctgca

SEQ ID NO: 87313 - DNA, 25 bp, Saccharomyces pastorianus
ggatatgctgcactctggtcgaacc

SEQ ID NO: 87314 - DNA, 25 bp, Saccharomyces pastorianus
gcacggctgcagattcaaaagctcc

SEQ ID NO: 87315 - DNA, 25 bp, Saccharomyces pastorianus
gtcatcttcgcctggatatgctgca

SEQ ID NO: 87316 - DNA, 25 bp, Saccharomyces pastorianus
gggcgatatatccaaaccacaccac

SEQ ID NO: 87317 - DNA, 25 bp, Saccharomyces pastorianus
acccgcacccgatatccagaatgaa

SEQ ID NO: 87318 - DNA, 25 bp, Saccharomyces pastorianus
atggtctccctcctgtgtcaaaatc

SEQ ID NO: 87319 - DNA, 25 bp, Saccharomyces pastorianus
tcagcgtcatcttcgcctggatatg

SEQ ID NO: 87320 - DNA, 25 bp, Saccharomyces pastorianus
tgtgtcaaaatctccccagacagtc

SEQ ID NO: 87321 - DNA, 25 bp, Saccharomyces pastorianus
gattcaaaagctccaacgccctcag

SEQ ID NO: 87322 - DNA, 25 bp, Saccharomyces pastorianus
tcaaaatctccccagacagtccgga

SEQ ID NO: 87323 - DNA, 25 bp, Saccharomyces pastorianus
attcttgcaatctgttttggcgctc

SEQ ID NO: 87324 - DNA, 25 bp, Saccharomyces pastorianus
acttgctagcatcctttcggtggaa

SEQ ID NO: 87325 - DNA, 25 bp, Saccharomyces pastorianus
aggtacttttgcatgtgggcgtcca

SEQ ID NO: 87326 - DNA, 25 bp, Saccharomyces pastorianus
ccgagacttgctcttcaggtgtgaa

SEQ ID NO: 87327 - DNA, 25 bp, Saccharomyces pastorianus
gaaactcttcgtcttgcaacaaatc

SEQ ID NO: 87328 - DNA, 25 bp, Saccharomyces pastorianus
tcctgtggcaggatcacgttatcgt

SEQ ID NO: 87329 - DNA, 25 bp, Saccharomyces pastorianus
aaatccttagtctccgtcattcttg

SEQ ID NO: 87330 - DNA, 25 bp, Saccharomyces pastorianus
aatgccgtttgttgggctctgcgga

SEQ ID NO: 87331 - DNA, 25 bp, Saccharomyces pastorianus
ctgcggaattgagtctgcggatctt

SEQ ID NO: 87332 - DNA, 25 bp, Saccharomyces pastorianus
gaggatcaaaactcacgtccccaaa

SEQ ID NO: 87333 - DNA, 25 bp, Saccharomyces pastorianus
tatcgtacgtgaccgaatgccgttt

SEQ ID NO: 87334 - DNA, 25 bp, Saccharomyces pastorianus
atctgttcatgttccaactgtcgca

SEQ ID NO: 87335 - DNA, 25 bp, Saccharomyces pastorianus
ttagcagaatctggaacgtccccgt

SEQ ID NO: 87336 - DNA, 25 bp, Saccharomyces pastorianus
tcatgatggtcacggcacagttctt

SEQ ID NO: 87337 - DNA, 25 bp, Saccharomyces pastorianus
ctgttctgtacatgctcacgtttta

SEQ ID NO: 87338 - DNA, 25 bp, Saccharomyces pastorianus
agttgaccaggtttgcggacagata

SEQ ID NO: 87339 - DNA, 25 bp, Saccharomyces pastorianus
gcagttgtccaacgttgtcttttcg

SEQ ID NO: 87340 - DNA, 25 bp, Saccharomyces pastorianus
ttcttgagtgccgtgttccacgaaa

SEQ ID NO: 87341 - DNA, 25 bp, Saccharomyces pastorianus
ggccatgttcgccattttcagaagg

SEQ ID NO: 87342 - DNA, 25 bp, Saccharomyces pastorianus
gagcaacaccaagtttctacgggca

SEQ ID NO: 87343 - DNA, 25 bp, Saccharomyces pastorianus
ttcgacatgattccgggcttcactg

SEQ ID NO: 87344 - DNA, 25 bp, Saccharomyces pastorianus
tcttttcgtttggtgtctgttcagg

SEQ ID NO: 87345 - DNA, 25 bp, Saccharomyces pastorianus
ggtgttgctcaaagcagtccacaca

SEQ ID NO: 87346 - DNA, 25 bp, Saccharomyces pastorianus
aatgtagcttggctcttgctcaaat

SEQ ID NO: 87347 - DNA, 25 bp, Saccharomyces pastorianus
ggtcttgcccgtagaaacttggtgt

SEQ ID NO: 87348 - DNA, 25 bp, Saccharomyces pastorianus
tgctcaaatgcaatgcgcccatgga

SEQ ID NO: 87349 - DNA, 25 bp, Saccharomyces pastorianus
gtcataatgacactgggccctgaac

SEQ ID NO: 87350 - DNA, 25 bp, Saccharomyces pastorianus
cggcagttcataaggtcaggtacaa

SEQ ID NO: 87351 - DNA, 25 bp, Saccharomyces pastorianus
cagtccacacaaactgcgacagttg

SEQ ID NO: 87352 - DNA, 25 bp, Saccharomyces pastorianus
gaacatggccatttcgtggaacacg

SEQ ID NO: 87353 - DNA, 25 bp, Saccharomyces pastorianus
gatatcctctaacccttctgaaaat

SEQ ID NO: 87354 - DNA, 25 bp, Saccharomyces pastorianus
ggccctgaacagacaccaaacgaaa

SEQ ID NO: 87355 - DNA, 25 bp, Saccharomyces pastorianus
aacgttggacaactgcggtcttgcc

SEQ ID NO: 87356 - DNA, 25 bp, Saccharomyces pastorianus
taagtccggcgtggccgaagttcac

SEQ ID NO: 87357 - DNA, 25 bp, Saccharomyces pastorianus
gagtggaacatatcctccgcgagag

SEQ ID NO: 87358 - DNA, 25 bp, Saccharomyces pastorianus
cggccacctggatttgctgaagaaa

SEQ ID NO: 87359 - DNA, 25 bp, Saccharomyces pastorianus
ataccccgttgcaccatgtggagga

SEQ ID NO: 87360 - DNA, 25 bp, Saccharomyces pastorianus
ggacattaacggctacactccaatg

SEQ ID NO: 87361 - DNA, 25 bp, Saccharomyces pastorianus
atgcggagggccaaacgccatacga

SEQ ID NO: 87362 - DNA, 25 bp, Saccharomyces pastorianus
aaaggtacatccgtgccatggtcag

SEQ ID NO: 87363 - DNA, 25 bp, Saccharomyces pastorianus
gagctgggtggagacttcactatca

SEQ ID NO: 87364 - DNA, 25 bp, Saccharomyces pastorianus
ggccactgccaggttgatcgtggaa

SEQ ID NO: 87365 - DNA, 25 bp, Saccharomyces pastorianus
tgaccccgcaatccaaggacattaa

SEQ ID NO: 87366 - DNA, 25 bp, Saccharomyces pastorianus
gacgaggccactctgcaacgcagga

SEQ ID NO: 87367 - DNA, 25 bp, Saccharomyces pastorianus
aaacgagcttgtgctgcagggcgac

SEQ ID NO: 87368 - DNA, 25 bp, Saccharomyces pastorianus
acctccccttgatgaatgttgtgca

SEQ ID NO: 87369 - DNA, 25 bp, Saccharomyces pastorianus
aagcttgccttgcagttgaactcta

SEQ ID NO: 87370 - DNA, 25 bp, Saccharomyces pastorianus
tttccacgaattgtctttgcatcca

SEQ ID NO: 87371 - DNA, 25 bp, Saccharomyces pastorianus
ctatggtgctaccaccttggatgta

SEQ ID NO: 87372 - DNA, 25 bp, Saccharomyces pastorianus
atggcgtcgagggaagtactccaaa

SEQ ID NO: 87373 - DNA, 25 bp, Saccharomyces pastorianus
gcagggcgaccaatacttcaatgaa

SEQ ID NO: 87374 - DNA, 25 bp, Saccharomyces pastorianus
caatgacaggtctctaatgggcaat

SEQ ID NO: 87375 - DNA, 25 bp, Saccharomyces pastorianus
atggttccaacgatgccgaagacag

SEQ ID NO: 87376 - DNA, 25 bp, Saccharomyces pastorianus
tattggatacaaacgctgcgcacct

SEQ ID NO: 87377 - DNA, 25 bp, Saccharomyces pastorianus
gaaacgctgactcactacttatggt

SEQ ID NO: 87378 - DNA, 25 bp, Saccharomyces pastorianus
tacatcttagatcctcacacagctg

SEQ ID NO: 87379 - DNA, 25 bp, Saccharomyces pastorianus
aatcgtcaacaattggttccaggaa

SEQ ID NO: 87380 - DNA, 25 bp, Saccharomyces pastorianus
gaaggcgcatcaaaggactttacat

SEQ ID NO: 87381 - DNA, 25 bp, Saccharomyces pastorianus
gctcacccagctaaatttgccgatg

SEQ ID NO: 87382 - DNA, 25 bp, Saccharomyces pastorianus
agtccatccaatacatttctctatc

SEQ ID NO: 87383 - DNA, 25 bp, Saccharomyces pastorianus
gaaagccggtgaaatcgtcaacaat

SEQ ID NO: 87384 - DNA, 25 bp, Saccharomyces pastorianus
agctgtcggtgtttgcgccacagaa

SEQ ID NO: 87385 - DNA, 25 bp, Saccharomyces pastorianus
ctgctactttatccccagcaatgga

SEQ ID NO: 87386 - DNA, 25 bp, Saccharomyces pastorianus
gactactatggtacctagctcgtga

SEQ ID NO: 87387 - DNA, 25 bp, Saccharomyces pastorianus
aacaatgcattgtctggattttcca

SEQ ID NO: 87388 - DNA, 25 bp, Saccharomyces pastorianus
gacaaatccatcattgaaggcgcat

SEQ ID NO: 87389 - DNA, 25 bp, Saccharomyces pastorianus
gacgttgttcaagacgatgcattga

SEQ ID NO: 87390 - DNA, 25 bp, Saccharomyces pastorianus
attagggctgataattttccccatt

SEQ ID NO: 87391 - DNA, 25 bp, Saccharomyces pastorianus
ggtatctctcttggatactttccaa

SEQ ID NO: 87392 - DNA, 25 bp, Saccharomyces pastorianus
attcttaatttcgtatgactctgtg

SEQ ID NO: 87393 - DNA, 25 bp, Saccharomyces pastorianus
attctttccaattgtgtcatcgatg

SEQ ID NO: 87394 - DNA, 25 bp, Saccharomyces pastorianus
gtggtcttgcattaattctttccaa

SEQ ID NO: 87395 - DNA, 25 bp, Saccharomyces pastorianus
ctttactttcttgcctggacataat

SEQ ID NO: 87396 - DNA, 25 bp, Saccharomyces pastorianus
agatctattgtttgcttgaagtttt

SEQ ID NO: 87397 - DNA, 25 bp, Saccharomyces pastorianus
gtgttaataccaacgaatcctttat

SEQ ID NO: 87398 - DNA, 25 bp, Saccharomyces pastorianus
ggacataatttctgacttgtgcaaa

SEQ ID NO: 87399 - DNA, 25 bp, Saccharomyces pastorianus
gtgtatgcacatcctgaaatccaag

SEQ ID NO: 87400 - DNA, 25 bp, Saccharomyces pastorianus
ggatcaaagctctattatctgcgag

SEQ ID NO: 87401 - DNA, 25 bp, Saccharomyces pastorianus
tttgccattgaatcccaacacattg

SEQ ID NO: 87402 - DNA, 25 bp, Saccharomyces pastorianus
gaagttcatcggtgattttgccatt

SEQ ID NO: 87403 - DNA, 25 bp, Saccharomyces pastorianus
cattctactgtagaggcgctacgag

SEQ ID NO: 87404 - DNA, 25 bp, Saccharomyces pastorianus
ttgatctggatgtggacgtcacccc

SEQ ID NO: 87405 - DNA, 25 bp, Saccharomyces pastorianus
gacggctatgaggtcgatacaaaga

SEQ ID NO: 87406 - DNA, 25 bp, Saccharomyces pastorianus
aaatatctcttctcgacggctatga

SEQ ID NO: 87407 - DNA, 25 bp, Saccharomyces pastorianus
tatctgcgagcggtggttacataaa

SEQ ID NO: 87408 - DNA, 25 bp, Saccharomyces pastorianus
ggaaatccccttggttgcaagtaat

SEQ ID NO: 87409 - DNA, 25 bp, Saccharomyces pastorianus
tttggtatcaactgatgggtccatg

SEQ ID NO: 87410 - DNA, 25 bp, Saccharomyces pastorianus
tttaccgaggattctgaagttcatc

SEQ ID NO: 87411 - DNA, 25 bp, Saccharomyces pastorianus
tgcagcacatgttacctccgaggaa

SEQ ID NO: 87412 - DNA, 25 bp, Saccharomyces pastorianus
gcgtttgtcatgctagacctactga

SEQ ID NO: 87413 - DNA, 25 bp, Saccharomyces pastorianus
accgcggatctgtctgtctatttga

SEQ ID NO: 87414 - DNA, 25 bp, Saccharomyces pastorianus
gactttcatggcctttgcagcacat

SEQ ID NO: 87415 - DNA, 25 bp, Saccharomyces pastorianus
aagtgatggactctgttttccaccg

SEQ ID NO: 87416 - DNA, 25 bp, Saccharomyces pastorianus
gtaccttcagcatttgttccaggaa

SEQ ID NO: 87417 - DNA, 25 bp, Saccharomyces pastorianus
gtctatttgacttcctcacagaact

SEQ ID NO: 87418 - DNA, 25 bp, Saccharomyces pastorianus
tagtgtctgcacttctttggctaag

SEQ ID NO: 87419 - DNA, 25 bp, Saccharomyces pastorianus
gaagaccgactccaagatgcgtaag

SEQ ID NO: 87420 - DNA, 25 bp, Saccharomyces pastorianus
agaactcgacggtgtcttgtacgtt

SEQ ID NO: 87421 - DNA, 25 bp, Saccharomyces pastorianus
cggaccccattactgatagaggctc

SEQ ID NO: 87422 - DNA, 25 bp, Saccharomyces pastorianus
acagggcaattctttgttcaaacag

SEQ ID NO: 87423 - DNA, 25 bp, Saccharomyces pastorianus
gcaatatcgtctagagctggcacag

SEQ ID NO: 87424 - DNA, 25 bp, Saccharomyces pastorianus
gaggctgtgcactgttatgaccaac

SEQ ID NO: 87425 - DNA, 25 bp, Saccharomyces pastorianus
aatgtgccagcaaggactgcggtac

SEQ ID NO: 87426 - DNA, 25 bp, Saccharomyces pastorianus
gagcatgtagctatcagatccaaat

SEQ ID NO: 87427 - DNA, 25 bp, Saccharomyces pastorianus
gaccaactaattactgctcaaccgc

SEQ ID NO: 87428 - DNA, 25 bp, Saccharomyces pastorianus
ggtaggttcagtacagatccctgtt

SEQ ID NO: 87429 - DNA, 25 bp, Saccharomyces pastorianus
aaagccatggcgctgatcaaactgg

SEQ ID NO: 87430 - DNA, 25 bp, Saccharomyces pastorianus
ggtcgggtacagcaacaaagccatg

SEQ ID NO: 87431 - DNA, 25 bp, Saccharomyces pastorianus
aacagggcctgtatcgcgaggctgt

SEQ ID NO: 87432 - DNA, 25 bp, Saccharomyces pastorianus
ggtacacctcaacggcagagcatgt

SEQ ID NO: 87433 - DNA, 25 bp, Saccharomyces pastorianus
ggagtccacggatcagtccattgaa

SEQ ID NO: 87434 - DNA, 25 bp, Saccharomyces pastorianus
acctcagtgttggattcgtttcttt

SEQ ID NO: 87435 - DNA, 25 bp, Saccharomyces pastorianus
gtgtcgatcgcgtttatgttcatag

SEQ ID NO: 87436 - DNA, 25 bp, Saccharomyces pastorianus
attgtgcgggctactcacggagtac

SEQ ID NO: 87437 - DNA, 25 bp, Saccharomyces pastorianus
tcgcaattttctactaccattcaca

SEQ ID NO: 87438 - DNA, 25 bp, Saccharomyces pastorianus
atacttgttgtcctatgggtccttc

SEQ ID NO: 87439 - DNA, 25 bp, Saccharomyces pastorianus
aagcctttcacggagttgatcacct

SEQ ID NO: 87440 - DNA, 25 bp, Saccharomyces pastorianus
acagaccgatgtagttgctgccaca

SEQ ID NO: 87441 - DNA, 25 bp, Saccharomyces pastorianus
atcttcttggagcacctggcaggaa

SEQ ID NO: 87442 - DNA, 25 bp, Saccharomyces pastorianus
ttcttccgtctgctaacatttttga

SEQ ID NO: 87443 - DNA, 25 bp, Saccharomyces pastorianus
gagtacaagctcaaccattggcgat

SEQ ID NO: 87444 - DNA, 25 bp, Saccharomyces pastorianus
gagttgcattatctcccagagctgc

SEQ ID NO: 87445 - DNA, 25 bp, Saccharomyces pastorianus
gatcttctggtctttatgcgcggca

SEQ ID NO: 87446 - DNA, 25 bp, Saccharomyces pastorianus
aacccgtcaggtgcaggcttggatc

SEQ ID NO: 87447 - DNA, 25 bp, Saccharomyces pastorianus
agacgacttgtccttttgggcatct

SEQ ID NO: 87448 - DNA, 25 bp, Saccharomyces pastorianus
ggcttgattttttcgaacccgtcag

SEQ ID NO: 87449 - DNA, 25 bp, Saccharomyces pastorianus
aagttcctaccacaacgcgtgtaat

SEQ ID NO: 87450 - DNA, 25 bp, Saccharomyces pastorianus
agctgctcattgaactttgctgcga

SEQ ID NO: 87451 - DNA, 25 bp, Saccharomyces pastorianus
agctttgctagtcttgacggctgta

SEQ ID NO: 87452 - DNA, 25 bp, Saccharomyces pastorianus
ttgctgcgagcttagacgacttgtc

SEQ ID NO: 87453 - DNA, 25 bp, Saccharomyces pastorianus
agagccaacgcagtatcatcgtcaa

SEQ ID NO: 87454 - DNA, 25 bp, Saccharomyces pastorianus
ggcatctctgagttggatttcgaaa

SEQ ID NO: 87455 - DNA, 25 bp, Saccharomyces pastorianus
ggacaagtcgtctaagctcgcagca

SEQ ID NO: 87456 - DNA, 25 bp, Saccharomyces pastorianus
gcagggtgcctcgtgcacagttaga

SEQ ID NO: 87457 - DNA, 25 bp, Saccharomyces pastorianus
accaccagcgctctagatacatata

SEQ ID NO: 87458 - DNA, 25 bp, Saccharomyces pastorianus
tgaaaaactgtgctgtctgcgctgc

SEQ ID NO: 87459 - DNA, 25 bp, Saccharomyces pastorianus
aggccatctccaaagacctttacga

SEQ ID NO: 87460 - DNA, 25 bp, Saccharomyces pastorianus
aagcctgcacctgacgggttcgaaa

SEQ ID NO: 87461 - DNA, 25 bp, Saccharomyces pastorianus
agccaaccctcacagatttcgaaat

SEQ ID NO: 87462 - DNA, 25 bp, Saccharomyces pastorianus
aacggtagcacttgcatctgcaggg

SEQ ID NO: 87463 - DNA, 25 bp, Saccharomyces pastorianus
ggagataatgcaactccaccaccag

SEQ ID NO: 87464 - DNA, 25 bp, Saccharomyces pastorianus
gtctgcgctgcattcaaaagaacga

SEQ ID NO: 87465 - DNA, 25 bp, Saccharomyces pastorianus
acaggtgtccttccatcagtgcgtc

SEQ ID NO: 87466 - DNA, 25 bp, Saccharomyces pastorianus
gaagatttgtactgttctccgctat

SEQ ID NO: 87467 - DNA, 25 bp, Saccharomyces pastorianus
tattctgtttggaagcgcgcaactg

SEQ ID NO: 87468 - DNA, 25 bp, Saccharomyces pastorianus
aagatttatctccacttcgaagtaa

SEQ ID NO: 87469 - DNA, 25 bp, Saccharomyces pastorianus
agatgaggcattccgatggcttaga

SEQ ID NO: 87470 - DNA, 25 bp, Saccharomyces pastorianus
ggctgtttggcgtggatgtttattc

SEQ ID NO: 87471 - DNA, 25 bp, Saccharomyces pastorianus
gatgtcctcacaagcgcaacgaatt

SEQ ID NO: 87472 - DNA, 25 bp, Saccharomyces pastorianus
aaatcttgcgctcatgtcgaaacca

SEQ ID NO: 87473 - DNA, 25 bp, Saccharomyces pastorianus
aacgccatcgcggttgataagcaca

SEQ ID NO: 87474 - DNA, 25 bp, Saccharomyces pastorianus
cctctcatggttcggacttacttaa

SEQ ID NO: 87475 - DNA, 25 bp, Saccharomyces pastorianus
caatcaggtatatcacgacgccggg

SEQ ID NO: 87476 - DNA, 25 bp, Saccharomyces pastorianus
gtattccccattgaagctgtacgat

SEQ ID NO: 87477 - DNA, 25 bp, Saccharomyces pastorianus
caggttcatcggacagttcaggttc

SEQ ID NO: 87478 - DNA, 25 bp, Saccharomyces pastorianus
gaagattcaactgatgctgactcat

SEQ ID NO: 87479 - DNA, 25 bp, Saccharomyces pastorianus
ggatcaggacactgttatcaacgaa

SEQ ID NO: 87480 - DNA, 25 bp, Saccharomyces pastorianus
gttaagctgggatgtttcacacaat

SEQ ID NO: 87481 - DNA, 25 bp, Saccharomyces pastorianus
gaccagggaaccgaggatcagcaaa

SEQ ID NO: 87482 - DNA, 25 bp, Saccharomyces pastorianus
gttcaggttcagtgggacattctaa

SEQ ID NO: 87483 - DNA, 25 bp, Saccharomyces pastorianus
ttttgtgattctctagaacctgttg

SEQ ID NO: 87484 - DNA, 25 bp, Saccharomyces pastorianus
aggattttgctaggcttatcaggga

SEQ ID NO: 87485 - DNA, 25 bp, Saccharomyces pastorianus
acgtctatgactcaatcccaaataa

SEQ ID NO: 87486 - DNA, 25 bp, Saccharomyces pastorianus
aaactgtcatcgttgggactgtcaa

SEQ ID NO: 87487 - DNA, 25 bp, Saccharomyces pastorianus
gactgtcaactaatggtactaggca

SEQ ID NO: 87488 - DNA, 25 bp, Saccharomyces pastorianus
agtagtggtgcttcaattggcgctc

SEQ ID NO: 87489 - DNA, 25 bp, Saccharomyces pastorianus
attggcgctctgtctgatataggca

SEQ ID NO: 87490 - DNA, 25 bp, Saccharomyces pastorianus
tgaagggacttctatggcatctatg

SEQ ID NO: 87491 - DNA, 25 bp, Saccharomyces pastorianus
tgttggtcaatcttccctatcagaa

SEQ ID NO: 87492 - DNA, 25 bp, Saccharomyces pastorianus
atgtaaatactcctgtttcccgaat

SEQ ID NO: 87493 - DNA, 25 bp, Saccharomyces pastorianus
gcaccatcttttgtaagtagccctc

SEQ ID NO: 87494 - DNA, 25 bp, Saccharomyces pastorianus
ttcggaacccactagtgttttcact

SEQ ID NO: 87495 - DNA, 25 bp, Saccharomyces pastorianus
gtagctcagccgatgccaggtgtaa

SEQ ID NO: 87496 - DNA, 25 bp, Saccharomyces pastorianus
gatgttaccgaagacgtctctctat

SEQ ID NO: 87497 - DNA, 25 bp, Saccharomyces pastorianus
gtggagatcacttctttgcctaatc

SEQ ID NO: 87498 - DNA, 25 bp, Saccharomyces pastorianus
ttatccgtggagagcgcgtcaagca

SEQ ID NO: 87499 - DNA, 25 bp, Saccharomyces pastorianus
ttactgggccgcacttttggattgc

SEQ ID NO: 87500 - DNA, 25 bp, Saccharomyces pastorianus
aagtgcgttgaaccagagccctgcg

SEQ ID NO: 87501 - DNA, 25 bp, Saccharomyces pastorianus
agttcaagttgctcactggtgggct

SEQ ID NO: 87502 - DNA, 25 bp, Saccharomyces pastorianus
aagttctccttggatacgagcgggc

SEQ ID NO: 87503 - DNA, 25 bp, Saccharomyces pastorianus
aggcgtcctcaaagaataccccgat

SEQ ID NO: 87504 - DNA, 25 bp, Saccharomyces pastorianus
gagtctgtgtctacgatgtggtcaa

SEQ ID NO: 87505 - DNA, 25 bp, Saccharomyces pastorianus
gagactgggaatcctcatcgaggct

SEQ ID NO: 87506 - DNA, 25 bp, Saccharomyces pastorianus
gaaaccgcgtgccacactggtagag

SEQ ID NO: 87507 - DNA, 25 bp, Saccharomyces pastorianus
ttcatctacctgtgtaggccgcaat

SEQ ID NO: 87508 - DNA, 25 bp, Saccharomyces pastorianus
atttggcactttggtcacaacgcag

SEQ ID NO: 87509 - DNA, 25 bp, Saccharomyces pastorianus
attcgagtcccctggagagctacta

SEQ ID NO: 87510 - DNA, 25 bp, Saccharomyces pastorianus
ggtttaccctaacaagtatatccag

SEQ ID NO: 87511 - DNA, 25 bp, Saccharomyces pastorianus
gtgtttggtcaaataacttctggtc

SEQ ID NO: 87512 - DNA, 25 bp, Saccharomyces pastorianus
atatccagggtggtgtggttgcctc

SEQ ID NO: 87513 - DNA, 25 bp, Saccharomyces pastorianus
tggacctgattctaacacctcggaa

SEQ ID NO: 87514 - DNA, 25 bp, Saccharomyces pastorianus
agcctcagcatgaattacggttcct

SEQ ID NO: 87515 - DNA, 25 bp, Saccharomyces pastorianus
gacaggcctggaagactcgcaatgg

SEQ ID NO: 87516 - DNA, 25 bp, Saccharomyces pastorianus
tttcaccgtctatgggcccaaattt

SEQ ID NO: 87517 - DNA, 25 bp, Saccharomyces pastorianus
acttctggtctagatcaactaatgg

SEQ ID NO: 87518 - DNA, 25 bp, Saccharomyces pastorianus
gttgcctcagatgtgggtcctttca

SEQ ID NO: 87519 - DNA, 25 bp, Saccharomyces pastorianus
gcaatggcctattttggacctgatt

SEQ ID NO: 87520 - DNA, 25 bp, Saccharomyces pastorianus
ggaattcatcatcaccactaaagcc

SEQ ID NO: 87521 - DNA, 25 bp, Saccharomyces pastorianus
agggcctgccactgcctcgatatat

SEQ ID NO: 87522 - DNA, 25 bp, Saccharomyces pastorianus
ctgctgaggcgccaatatttccaaa

SEQ ID NO: 87523 - DNA, 25 bp, Saccharomyces pastorianus
aataaagctgctgaggcgccaatat

SEQ ID NO: 87524 - DNA, 25 bp, Saccharomyces pastorianus
tgaggcgccaatatttccaaagctg

SEQ ID NO: 87525 - DNA, 25 bp, Saccharomyces pastorianus
aagatgtatatccactaattcaaat

SEQ ID NO: 87526 - DNA, 25 bp, Saccharomyces pastorianus
ggtaaatgccttccagggcctgcca

SEQ ID NO: 87527 - DNA, 25 bp, Saccharomyces pastorianus
gttcgtgtgttactagatgttttgg

SEQ ID NO: 87528 - DNA, 25 bp, Saccharomyces pastorianus
tgccactgcctcgatatatcaaacg

SEQ ID NO: 87529 - DNA, 25 bp, Saccharomyces pastorianus
agacgtgaagatgcatgagctcata

SEQ ID NO: 87530 - DNA, 25 bp, Saccharomyces pastorianus
atgatcagttcgtgtgttactagat

SEQ ID NO: 87531 - DNA, 25 bp, Saccharomyces pastorianus
ggcgccaatatttccaaagctggaa

SEQ ID NO: 87532 - DNA, 25 bp, Saccharomyces pastorianus
gatggtaagtttatctccacattta

SEQ ID NO: 87533 - DNA, 25 bp, Saccharomyces pastorianus
ggcatgtagccagcgtataccaggt

SEQ ID NO: 87534 - DNA, 25 bp, Saccharomyces pastorianus
gcgcactgggttaatcacttatctt

SEQ ID NO: 87535 - DNA, 25 bp, Saccharomyces pastorianus
gccgactactggtgtcatgttccaa

SEQ ID NO: 87536 - DNA, 25 bp, Saccharomyces pastorianus
gcgcattggtgcattcgatcataca

SEQ ID NO: 87537 - DNA, 25 bp, Saccharomyces pastorianus
tagtcaatcatgtggcgttcagccc

SEQ ID NO: 87538 - DNA, 25 bp, Saccharomyces pastorianus
gtaggtatattgtctcagcgtcttt

SEQ ID NO: 87539 - DNA, 25 bp, Saccharomyces pastorianus
taccaggttgcgtggtcatcggact

SEQ ID NO: 87540 - DNA, 25 bp, Saccharomyces pastorianus
agtttataccgtcgactggagtgtc

SEQ ID NO: 87541 - DNA, 25 bp, Saccharomyces pastorianus
aacattttgaagtcgcatgcgcact

SEQ ID NO: 87542 - DNA, 25 bp, Saccharomyces pastorianus
tagaaagctttctgttgacctccct

SEQ ID NO: 87543 - DNA, 25 bp, Saccharomyces pastorianus
gtcattgattgacgacccgcaagaa

SEQ ID NO: 87544 - DNA, 25 bp, Saccharomyces pastorianus
aggtgtaccacattgacgagtcatt

SEQ ID NO: 87545 - DNA, 25 bp, Saccharomyces pastorianus
gttgacgacgatgctcttacggacg

SEQ ID NO: 87546 - DNA, 25 bp, Saccharomyces pastorianus
agacgagagacttgtacccttcagc

SEQ ID NO: 87547 - DNA, 25 bp, Saccharomyces pastorianus
aaagatgctaatccgcgggtttgcc

SEQ ID NO: 87548 - DNA, 25 bp, Saccharomyces pastorianus
agaatttcgctgactatacctgtaa

SEQ ID NO: 87549 - DNA, 25 bp, Saccharomyces pastorianus
cacagggttactttcgttgtcgaag

SEQ ID NO: 87550 - DNA, 25 bp, Saccharomyces pastorianus
gtaatctgccattctcacagggtta

SEQ ID NO: 87551 - DNA, 25 bp, Saccharomyces pastorianus
gggcctacctagcagtattgtcaac

SEQ ID NO: 87552 - DNA, 25 bp, Saccharomyces pastorianus
attgtcaacgaaggtgctgctggtc

SEQ ID NO: 87553 - DNA, 25 bp, Saccharomyces pastorianus
agattccgtcaaacttccgatgttc

SEQ ID NO: 87554 - DNA, 25 bp, Saccharomyces pastorianus
gatgagtctgacttgggcaggccca

SEQ ID NO: 87555 - DNA, 25 bp, Saccharomyces pastorianus
gggcaggcccaagttgacgcaattt

SEQ ID NO: 87556 - DNA, 25 bp, Saccharomyces pastorianus
gaactctggcgtattgcaacaattt

SEQ ID NO: 87557 - DNA, 25 bp, Saccharomyces pastorianus
tgtttctagatgtcactggcggtat

SEQ ID NO: 87558 - DNA, 25 bp, Saccharomyces pastorianus
tatggattgtttccccattcagggt

SEQ ID NO: 87559 - DNA, 25 bp, Saccharomyces pastorianus
tgttgtcttattgacccaggtggta

SEQ ID NO: 87560 - DNA, 25 bp, Saccharomyces pastorianus
aaggattttactcgcatcactggcc

SEQ ID NO: 87561 - DNA, 25 bp, Saccharomyces pastorianus
ggtttcagtctggatacgttcgtga

SEQ ID NO: 87562 - DNA, 25 bp, Saccharomyces pastorianus
aatttgatttctggtattgcctgca

SEQ ID NO: 87563 - DNA, 25 bp, Saccharomyces pastorianus
gcagtggtttgtatatcgatctcga

SEQ ID NO: 87564 - DNA, 25 bp, Saccharomyces pastorianus
tcactggccattttttcactgctaa

SEQ ID NO: 87565 - DNA, 25 bp, Saccharomyces pastorianus
gagtctaccggcgtgggcagtcaaa

SEQ ID NO: 87566 - DNA, 25 bp, Saccharomyces pastorianus
gtgatttatcgaaagttacgctgga

SEQ ID NO: 87567 - DNA, 25 bp, Saccharomyces pastorianus
agaaggttttgctcaagttcaagga

SEQ ID NO: 87568 - DNA, 25 bp, Saccharomyces pastorianus
aacaatctgatattaagggaaccat

SEQ ID NO: 87569 - DNA, 25 bp, Saccharomyces pastorianus
gtaacgttatagagtctaccggcgt

SEQ ID NO: 87570 - DNA, 25 bp, Saccharomyces pastorianus
gctttcgatactcacggtaacgtta

SEQ ID NO: 87571 - DNA, 25 bp, Saccharomyces pastorianus
gtacacctgtacaaacgcaatgata

SEQ ID NO: 87572 - DNA, 25 bp, Saccharomyces pastorianus
gggaaccattgctttcgatactcac

SEQ ID NO: 87573 - DNA, 25 bp, Saccharomyces pastorianus
tacgctggatgcagaaggttttgct

SEQ ID NO: 87574 - DNA, 25 bp, Saccharomyces pastorianus
gtgggcagtcaaaggatcgaagata

SEQ ID NO: 87575 - DNA, 25 bp, Saccharomyces pastorianus
aggagattcgctactcgtacacctg

SEQ ID NO: 87576 - DNA, 25 bp, Saccharomyces pastorianus
gaaccatttggtcctggatctggcg

SEQ ID NO: 87577 - DNA, 25 bp, Saccharomyces pastorianus
ggtaactgaaccgagcttcgctaac

SEQ ID NO: 87578 - DNA, 25 bp, Saccharomyces pastorianus
gtgatctgtatcctgttggcacaag

SEQ ID NO: 87579 - DNA, 25 bp, Saccharomyces pastorianus
gatccaaatagaagacctgccccaa

SEQ ID NO: 87580 - DNA, 25 bp, Saccharomyces pastorianus
gaagggttcaacatcgtttctctct

SEQ ID NO: 87581 - DNA, 25 bp, Saccharomyces pastorianus
ggaacagcaccgttgaacccatatc

SEQ ID NO: 87582 - DNA, 25 bp, Saccharomyces pastorianus
acaagccatccggattggtctggag

SEQ ID NO: 87583 - DNA, 25 bp, Saccharomyces pastorianus
aaagcttacctgtggagccagacct

SEQ ID NO: 87584 - DNA, 25 bp, Saccharomyces pastorianus
tttctctctgagctagtggtgattc

SEQ ID NO: 87585 - DNA, 25 bp, Saccharomyces pastorianus
gtacgtcgatcaccatggcatgtgt

SEQ ID NO: 87586 - DNA, 25 bp, Saccharomyces pastorianus
caaggcggtatgattttcgatccaa

SEQ ID NO: 87587 - DNA, 25 bp, Saccharomyces pastorianus
gatcattgtctcgtttttgtctaat

SEQ ID NO: 87588 - DNA, 25 bp, Saccharomyces pastorianus
atcaccattttgatttctcgtgccg

SEQ ID NO: 87589 - DNA, 25 bp, Saccharomyces pastorianus
cgaaattatgggtctgttgctacag

SEQ ID NO: 87590 - DNA, 25 bp, Saccharomyces pastorianus
agatctaatattctttcctctcctg

SEQ ID NO: 87591 - DNA, 25 bp, Saccharomyces pastorianus
ttctcgtgccgcattaatcaagcaa

SEQ ID NO: 87592 - DNA, 25 bp, Saccharomyces pastorianus
gaagcatacatttggcagttcctag

SEQ ID NO: 87593 - DNA, 25 bp, Saccharomyces pastorianus
gggaatataacgaccacatcatgcg

SEQ ID NO: 87594 - DNA, 25 bp, Saccharomyces pastorianus
gttcttgaccacctccaaaattggt

SEQ ID NO: 87595 - DNA, 25 bp, Saccharomyces pastorianus
gaaatctttgccactattaacgagg

SEQ ID NO: 87596 - DNA, 25 bp, Saccharomyces pastorianus
gtaagattcagctgattttccctcc

SEQ ID NO: 87597 - DNA, 25 bp, Saccharomyces pastorianus
ggcagttcctagctagtttagcact

SEQ ID NO: 87598 - DNA, 25 bp, Saccharomyces pastorianus
atcatcctctgcgatcaagacggga

SEQ ID NO: 87599 - DNA, 25 bp, Saccharomyces pastorianus
cttgcgtggtggttaggctttccaa

SEQ ID NO: 87600 - DNA, 25 bp, Saccharomyces pastorianus
attggacccagacgcctttggagag

SEQ ID NO: 87601 - DNA, 25 bp, Saccharomyces pastorianus
ggaaataccttgcatttgccgcgat

SEQ ID NO: 87602 - DNA, 25 bp, Saccharomyces pastorianus
gatattttctcgtttcttgtcggaa

SEQ ID NO: 87603 - DNA, 25 bp, Saccharomyces pastorianus
tgagcatagacccttctcgattgga

SEQ ID NO: 87604 - DNA, 25 bp, Saccharomyces pastorianus
gatgaatgcttcctggcgcttgtca

SEQ ID NO: 87605 - DNA, 25 bp, Saccharomyces pastorianus
gaagctgcccttcaatggtgatgaa

SEQ ID NO: 87606 - DNA, 25 bp, Saccharomyces pastorianus
gctcaaactcattgtcacgcaggtg

SEQ ID NO: 87607 - DNA, 25 bp, Saccharomyces pastorianus
aggcgactcctcaatttgttgcaga

SEQ ID NO: 87608 - DNA, 25 bp, Saccharomyces pastorianus
ggtgggcgactctaagatcatcctc

SEQ ID NO: 87609 - DNA, 25 bp, Saccharomyces pastorianus
taccacttcatctccaactataata

SEQ ID NO: 87610 - DNA, 25 bp, Saccharomyces pastorianus
gaaatcattcgccatctattcatcc

SEQ ID NO: 87611 - DNA, 25 bp, Saccharomyces pastorianus
gattcctgtgtaaacctgagtcttt

SEQ ID NO: 87612 - DNA, 25 bp, Saccharomyces pastorianus
attttcagctttcatcaggattcca

SEQ ID NO: 87613 - DNA, 25 bp, Saccharomyces pastorianus
gataaacccacaagtccattcattg

SEQ ID NO: 87614 - DNA, 25 bp, Saccharomyces pastorianus
attcatccacaattgatgccccagc

SEQ ID NO: 87615 - DNA, 25 bp, Saccharomyces pastorianus
attccaagtgtcctctttcgttaag

SEQ ID NO: 87616 - DNA, 25 bp, Saccharomyces pastorianus
gacacgactgcgtttaacgattcct

SEQ ID NO: 87617 - DNA, 25 bp, Saccharomyces pastorianus
atgtctgcacattttccatggagcc

SEQ ID NO: 87618 - DNA, 25 bp, Saccharomyces pastorianus
aggattccattttccaacgcatcat

SEQ ID NO: 87619 - DNA, 25 bp, Saccharomyces pastorianus
gaaattgctcaacttaccaccattc

SEQ ID NO: 87620 - DNA, 25 bp, Saccharomyces pastorianus
accgagcatcaaaaagactcaggtt

SEQ ID NO: 87621 - DNA, 25 bp, Saccharomyces pastorianus
agtcgtgtcattactgcctgtagcc

SEQ ID NO: 87622 - DNA, 25 bp, Saccharomyces pastorianus
gatttttcctctcaaaccgagcatc

SEQ ID NO: 87623 - DNA, 25 bp, Saccharomyces pastorianus
gactcaggtttacacaggaatcgtt

SEQ ID NO: 87624 - DNA, 25 bp, Saccharomyces pastorianus
ggctccatggaaaatgtgcagacat

SEQ ID NO: 87625 - DNA, 25 bp, Saccharomyces pastorianus
cataaatgagccatttctgttcgtt

SEQ ID NO: 87626 - DNA, 25 bp, Saccharomyces pastorianus
catgtcatctgtgtacttggtatta

SEQ ID NO: 87627 - DNA, 25 bp, Saccharomyces pastorianus
tgatcttttttgtcataaatgagcc

SEQ ID NO: 87628 - DNA, 25 bp, Saccharomyces pastorianus
agatgaagtggtacggctccatgga

SEQ ID NO: 87629 - DNA, 25 bp, Saccharomyces pastorianus
ggaatcgttaaacgcagtcgtgtca

SEQ ID NO: 87630 - DNA, 25 bp, Saccharomyces pastorianus
tgcctgtagccatgtcatctgtgta

SEQ ID NO: 87631 - DNA, 25 bp, Saccharomyces pastorianus
aacgacgacattccccagatagact

SEQ ID NO: 87632 - DNA, 25 bp, Saccharomyces pastorianus
aactgacctgcatcaagatctcgat

SEQ ID NO: 87633 - DNA, 25 bp, Saccharomyces pastorianus
agatctcgattacatcgtactgcaa

SEQ ID NO: 87634 - DNA, 25 bp, Saccharomyces pastorianus
gaatctgtgttctcttttccacaaa

SEQ ID NO: 87635 - DNA, 25 bp, Saccharomyces pastorianus
gcacgatgctgtagccaagtttcaa

SEQ ID NO: 87636 - DNA, 25 bp, Saccharomyces pastorianus
ggattagcaacgacgacattcccca

SEQ ID NO: 87637 - DNA, 25 bp, Saccharomyces pastorianus
gtttgccctagatatcaacgcttat

SEQ ID NO: 87638 - DNA, 25 bp, Saccharomyces pastorianus
accccaaagggaacgcacgatgctg

SEQ ID NO: 87639 - DNA, 25 bp, Saccharomyces pastorianus
gaagaacacagctagagacgcttat

SEQ ID NO: 87640 - DNA, 25 bp, Saccharomyces pastorianus
gatttactgcgagaaattttcactg

SEQ ID NO: 87641 - DNA, 25 bp, Saccharomyces pastorianus
gatagactgggacaagtttgcccta

SEQ ID NO: 87642 - DNA, 25 bp, Saccharomyces pastorianus
attaattcaggcttatccagatgta

SEQ ID NO: 87643 - DNA, 25 bp, Saccharomyces pastorianus
atgctacttggtgtggcccctgtaa

SEQ ID NO: 87644 - DNA, 25 bp, Saccharomyces pastorianus
gaatcaccagatattgccaaagagt

SEQ ID NO: 87645 - DNA, 25 bp, Saccharomyces pastorianus
tatgcccacctttgttcttggcaag

SEQ ID NO: 87646 - DNA, 25 bp, Saccharomyces pastorianus
gagtgtgaagtgacggctatgccca

SEQ ID NO: 87647 - DNA, 25 bp, Saccharomyces pastorianus
ggcaagatcattggagctaacccta

SEQ ID NO: 87648 - DNA, 25 bp, Saccharomyces pastorianus
aggatggccaactcatcggcaagat

SEQ ID NO: 87649 - DNA, 25 bp, Saccharomyces pastorianus
gatgatacaaccacacttaacgaaa

SEQ ID NO: 87650 - DNA, 25 bp, Saccharomyces pastorianus
agtcatcgacttttatgctacttgg

SEQ ID NO: 87651 - DNA, 25 bp, Saccharomyces pastorianus
aagtgcgacgtggacgaatcaccag

SEQ ID NO: 87652 - DNA, 25 bp, Saccharomyces pastorianus
gcataagattccagtcctcatacac

SEQ ID NO: 87653 - DNA, 25 bp, Saccharomyces pastorianus
aaacgaatccggtacaggccacaag

SEQ ID NO: 87654 - DNA, 25 bp, Saccharomyces pastorianus
accgtcgctgtatcaccaggtgatg

SEQ ID NO: 87655 - DNA, 25 bp, Saccharomyces pastorianus
aagactttgtattgtccgtggccac

SEQ ID NO: 87656 - DNA, 25 bp, Saccharomyces pastorianus
atgagtacatcttgtccggttccaa

SEQ ID NO: 87657 - DNA, 25 bp, Saccharomyces pastorianus
atctgtggctgtggcaaacgggtct

SEQ ID NO: 87658 - DNA, 25 bp, Saccharomyces pastorianus
aaactccaaattccggcacttgtga

SEQ ID NO: 87659 - DNA, 25 bp, Saccharomyces pastorianus
ttccaaagatcgtggtgtcctgttt

SEQ ID NO: 87660 - DNA, 25 bp, Saccharomyces pastorianus
actctgtttatagcgttgtcttcac

SEQ ID NO: 87661 - DNA, 25 bp, Saccharomyces pastorianus
aatacatcgctgctggttctctaga

SEQ ID NO: 87662 - DNA, 25 bp, Saccharomyces pastorianus
gacaaagcgttgtatccggctcatt

SEQ ID NO: 87663 - DNA, 25 bp, Saccharomyces pastorianus
gggacttacgtacaggccagtgttc

SEQ ID NO: 87664 - DNA, 25 bp, Saccharomyces pastorianus
tccctcactcaactggcgtcaagag

SEQ ID NO: 87665 - DNA, 25 bp, Saccharomyces pastorianus
gaaacatctgttatgctatcaaaaa

SEQ ID NO: 87666 - DNA, 25 bp, Saccharomyces pastorianus
ataacggtctgatttgcggcctggc

SEQ ID NO: 87667 - DNA, 25 bp, Saccharomyces pastorianus
ttatggctcgccttattctgttcac

SEQ ID NO: 87668 - DNA, 25 bp, Saccharomyces pastorianus
gaggttacaacggataacggtctga

SEQ ID NO: 87669 - DNA, 25 bp, Saccharomyces pastorianus
atatagtattcagtccctcactcaa

SEQ ID NO: 87670 - DNA, 25 bp, Saccharomyces pastorianus
gcgcattgttttatagctgaagagg

SEQ ID NO: 87671 - DNA, 25 bp, Saccharomyces pastorianus
gctatcaaaaacgtcagcgcattgt

SEQ ID NO: 87672 - DNA, 25 bp, Saccharomyces pastorianus
ctctgcgctcttcccgtattatttc

SEQ ID NO: 87673 - DNA, 25 bp, Saccharomyces pastorianus
agaagggcggcctcattatggctcg

SEQ ID NO: 87674 - DNA, 25 bp, Saccharomyces pastorianus
tgcggcctggcaatgcttggtaaaa

SEQ ID NO: 87675 - DNA, 25 bp, Saccharomyces pastorianus
aaacagcgatccaccgaggaactat

SEQ ID NO: 87676 - DNA, 25 bp, Saccharomyces pastorianus
gaggaactatactcgctacagtcga

SEQ ID NO: 87677 - DNA, 25 bp, Saccharomyces pastorianus
gacctttacgagtacctctgtaacg

SEQ ID NO: 87678 - DNA, 25 bp, Saccharomyces pastorianus
attctgggttgtggttcgacatctc

SEQ ID NO: 87679 - DNA, 25 bp, Saccharomyces pastorianus
gtcacagaagtcatctatgcgcccg

SEQ ID NO: 87680 - DNA, 25 bp, Saccharomyces pastorianus
agggccaggcccaagtcacagaagt

SEQ ID NO: 87681 - DNA, 25 bp, Saccharomyces pastorianus
aactcggatttgtcaagggccaggc

SEQ ID NO: 87682 - DNA, 25 bp, Saccharomyces pastorianus
tatgcgcccgttcttaaacagcgat

SEQ ID NO: 87683 - DNA, 25 bp, Saccharomyces pastorianus
gatcgattccgcagacttactagtg

SEQ ID NO: 87684 - DNA, 25 bp, Saccharomyces pastorianus
ctctcgtcgctaaaccaattctata

SEQ ID NO: 87685 - DNA, 25 bp, Saccharomyces pastorianus
agactcagacttcccaacaggcaga

SEQ ID NO: 87686 - DNA, 25 bp, Saccharomyces pastorianus
gatactgtgcccaagaagaataccg

SEQ ID NO: 87687 - DNA, 25 bp, Saccharomyces pastorianus
agccagtggcaactcctgcaaagaa

SEQ ID NO: 87688 - DNA, 25 bp, Saccharomyces pastorianus
aacggaatcgagcttcacaagggca

SEQ ID NO: 87689 - DNA, 25 bp, Saccharomyces pastorianus
gaccttcttgaaaagtctggttgtg

SEQ ID NO: 87690 - DNA, 25 bp, Saccharomyces pastorianus
gaatcacacgtcttgcatcagcgag

SEQ ID NO: 87691 - DNA, 25 bp, Saccharomyces pastorianus
gcatagattgctccaagacgtttga

SEQ ID NO: 87692 - DNA, 25 bp, Saccharomyces pastorianus
gtggaaaagacctcgaacggaatcg

SEQ ID NO: 87693 - DNA, 25 bp, Saccharomyces pastorianus
tcacaagggcaagtcgttgtacaaa

SEQ ID NO: 87694 - DNA, 25 bp, Saccharomyces pastorianus
gtcctaacgcgtactatacatgcat

SEQ ID NO: 87695 - DNA, 25 bp, Saccharomyces pastorianus
aagtggagaagcctgtgatcaagaa

SEQ ID NO: 87696 - DNA, 25 bp, Saccharomyces pastorianus
gttacgttcaactgtgaggtgtgca

SEQ ID NO: 87697 - DNA, 25 bp, Saccharomyces pastorianus
agataacgaactgacctttgtggaa

SEQ ID NO: 87698 - DNA, 25 bp, Saccharomyces pastorianus
ttaccttctagaaactcgatcccag

SEQ ID NO: 87699 - DNA, 25 bp, Saccharomyces pastorianus
atgttgcgtcaggagcaccagtgca

SEQ ID NO: 87700 - DNA, 25 bp, Saccharomyces pastorianus
gaagcacctgaacaagcacctgaag

SEQ ID NO: 87701 - DNA, 25 bp, Saccharomyces pastorianus
gaacaagaagagatcgccccaagct

SEQ ID NO: 87702 - DNA, 25 bp, Saccharomyces pastorianus
tcgatcccagctccaaaacaagaag

SEQ ID NO: 87703 - DNA, 25 bp, Saccharomyces pastorianus
aagaagctgaggaagccgctccaca

SEQ ID NO: 87704 - DNA, 25 bp, Saccharomyces pastorianus
aacctcctttgccttcgaggaatgt

SEQ ID NO: 87705 - DNA, 25 bp, Saccharomyces pastorianus
aggaaaatccttgggccacagcaga

SEQ ID NO: 87706 - DNA, 25 bp, Saccharomyces pastorianus
tattatctcaccaaaatccttctcc

SEQ ID NO: 87707 - DNA, 25 bp, Saccharomyces pastorianus
attacccggtatgcacattgaagcg

SEQ ID NO: 87708 - DNA, 25 bp, Saccharomyces pastorianus
aacgactttcctccagtgggattgc

SEQ ID NO: 87709 - DNA, 25 bp, Saccharomyces pastorianus
aagccaacaactacgacctatgtcg

SEQ ID NO: 87710 - DNA, 25 bp, Saccharomyces pastorianus
ggattgctacttcttttgttgctgc

SEQ ID NO: 87711 - DNA, 25 bp, Saccharomyces pastorianus
actcctccatctacggttactgata

SEQ ID NO: 87712 - DNA, 25 bp, Saccharomyces pastorianus
gcagctgtgatggttactcgtgtac

SEQ ID NO: 87713 - DNA, 25 bp, Saccharomyces pastorianus
ggttcggcgtcaaaatttctctgta

SEQ ID NO: 87714 - DNA, 25 bp, Saccharomyces pastorianus
tacacccattgtcagtacgtatgct

SEQ ID NO: 87715 - DNA, 25 bp, Saccharomyces pastorianus
aagtggccataacttcagcaccaaa

SEQ ID NO: 87716 - DNA, 25 bp, Saccharomyces pastorianus
gatgccaagcttccgctacaagtga

SEQ ID NO: 87717 - DNA, 25 bp, Saccharomyces pastorianus
atgacgtctgtcattaccccaagtg

SEQ ID NO: 87718 - DNA, 25 bp, Saccharomyces pastorianus
gctgctgcatcctcaacttggatta

SEQ ID NO: 87719 - DNA, 25 bp, Saccharomyces pastorianus
aagaatatgctatgccggcatcaaa

SEQ ID NO: 87720 - DNA, 25 bp, Saccharomyces pastorianus
taacctgtgcgcttttgaggatgaa

SEQ ID NO: 87721 - DNA, 25 bp, Saccharomyces pastorianus
atgccgttatttttggttctgaaag

SEQ ID NO: 87722 - DNA, 25 bp, Saccharomyces pastorianus
gtcaaagacgattctttcattcctt

SEQ ID NO: 87723 - DNA, 25 bp, Saccharomyces pastorianus
attcctttaagccttgattgcagag

SEQ ID NO: 87724 - DNA, 25 bp, Saccharomyces pastorianus
aagtaatgtcatgccaactagagga

SEQ ID NO: 87725 - DNA, 25 bp, Saccharomyces pastorianus
tttatcccgacaccataacgtttga

SEQ ID NO: 87726 - DNA, 25 bp, Saccharomyces pastorianus
gaattgtcagttaacctgtgcgctt

SEQ ID NO: 87727 - DNA, 25 bp, Saccharomyces pastorianus
ggcagaatttgccttcgatctacaa

SEQ ID NO: 87728 - DNA, 25 bp, Saccharomyces pastorianus
aaggtaccgcatctttcttgatgaa

SEQ ID NO: 87729 - DNA, 25 bp, Saccharomyces pastorianus
gaagcatggtttatcgaaggtcaaa

SEQ ID NO: 87730 - DNA, 25 bp, Saccharomyces pastorianus
agggaatggccacactgcagcagta

SEQ ID NO: 87731 - DNA, 25 bp, Saccharomyces pastorianus
aggacgtcaaatttccacatgataa

SEQ ID NO: 87732 - DNA, 25 bp, Saccharomyces pastorianus
gaacttccttttatattgtcttgca

SEQ ID NO: 87733 - DNA, 25 bp, Saccharomyces pastorianus
gatgaggctgatccattccatgatt

SEQ ID NO: 87734 - DNA, 25 bp, Saccharomyces pastorianus
agagacatcccttcttcaaaaaagt

SEQ ID NO: 87735 - DNA, 25 bp, Saccharomyces pastorianus
gcttggttccaaatcaggagctgca

SEQ ID NO: 87736 - DNA, 25 bp, Saccharomyces pastorianus
attgtcttgcaataaacacccgaaa

SEQ ID NO: 87737 - DNA, 25 bp, Saccharomyces pastorianus
gatcacaatattttaacctactctg

SEQ ID NO: 87738 - DNA, 25 bp, Saccharomyces pastorianus
atgataacggctgcgaacttccttt

SEQ ID NO: 87739 - DNA, 25 bp, Saccharomyces pastorianus
gatgctatttggctgtactccattt

SEQ ID NO: 87740 - DNA, 25 bp, Saccharomyces pastorianus
aaggcataacagctcacatagaagt

SEQ ID NO: 87741 - DNA, 25 bp, Saccharomyces pastorianus
ttatttactacccattttcccatgc

SEQ ID NO: 87742 - DNA, 25 bp, Saccharomyces pastorianus
aagaggtactggcacacacgatggt

SEQ ID NO: 87743 - DNA, 25 bp, Saccharomyces pastorianus
aaggaatccattaacgaagacgcgt

SEQ ID NO: 87744 - DNA, 25 bp, Saccharomyces pastorianus
tgactgccccttgatattatttact

SEQ ID NO: 87745 - DNA, 25 bp, Saccharomyces pastorianus
aaacgtactcactcgaatcggtgcg

SEQ ID NO: 87746 - DNA, 25 bp, Saccharomyces pastorianus
attggcacgcctggacaaagatatt

SEQ ID NO: 87747 - DNA, 25 bp, Saccharomyces pastorianus
aatggcacagatcggctcatttgtc

SEQ ID NO: 87748 - DNA, 25 bp, Saccharomyces pastorianus
tttctgagttaagtgactgcccctt

SEQ ID NO: 87749 - DNA, 25 bp, Saccharomyces pastorianus
atttgtccccgcagaagagatcaga

SEQ ID NO: 87750 - DNA, 25 bp, Saccharomyces pastorianus
aatcgggcattcagtatttcagaag

SEQ ID NO: 87751 - DNA, 25 bp, Saccharomyces pastorianus
atgcttgatatcctacacatcttga

SEQ ID NO: 87752 - DNA, 25 bp, Saccharomyces pastorianus
ttagacctgccctttgtacaaagtg

SEQ ID NO: 87753 - DNA, 25 bp, Saccharomyces pastorianus
atccacacctattggttcagctttg

SEQ ID NO: 87754 - DNA, 25 bp, Saccharomyces pastorianus
tactaagcgctatttacaaggatac

SEQ ID NO: 87755 - DNA, 25 bp, Saccharomyces pastorianus
aattgcggtatccaaacatccacac

SEQ ID NO: 87756 - DNA, 25 bp, Saccharomyces pastorianus
gagaacttcttcaaatgcggtattt

SEQ ID NO: 87757 - DNA, 25 bp, Saccharomyces pastorianus
aattcgcgctattgtattacatgtg

SEQ ID NO: 87758 - DNA, 25 bp, Saccharomyces pastorianus
acatgtgggcattgaagctggaata

SEQ ID NO: 87759 - DNA, 25 bp, Saccharomyces pastorianus
gcgtaggctacgactttttatctgt

SEQ ID NO: 87760 - DNA, 25 bp, Saccharomyces pastorianus
attaatcttttagacctgccctttg

SEQ ID NO: 87761 - DNA, 25 bp, Saccharomyces pastorianus
tgaacaagatgaccaatccgccacc

SEQ ID NO: 87762 - DNA, 25 bp, Saccharomyces pastorianus
gggtgtttcagttttctttactcag

SEQ ID NO: 87763 - DNA, 25 bp, Saccharomyces pastorianus
ttgttccaccgccaaactggatgaa

SEQ ID NO: 87764 - DNA, 25 bp, Saccharomyces pastorianus
gaatctgcttctttaccgaagggta

SEQ ID NO: 87765 - DNA, 25 bp, Saccharomyces pastorianus
gctttgcgccttatttggcatcatt

SEQ ID NO: 87766 - DNA, 25 bp, Saccharomyces pastorianus
taatgctagcgatattgttccaccg

SEQ ID NO: 87767 - DNA, 25 bp, Saccharomyces pastorianus
gcagcctttcccaagttttacaagt

SEQ ID NO: 87768 - DNA, 25 bp, Saccharomyces pastorianus
atccgatttcactctttggtggcac

SEQ ID NO: 87769 - DNA, 25 bp, Saccharomyces pastorianus
tatccctgtgggttgatcgctaatt

SEQ ID NO: 87770 - DNA, 25 bp, Saccharomyces pastorianus
aatcttcctgatatccatacttggg

SEQ ID NO: 87771 - DNA, 25 bp, Saccharomyces pastorianus
tgtacctcatcgttgcagggctttg

SEQ ID NO: 87772 - DNA, 25 bp, Saccharomyces pastorianus
atggatgaggactgcagcctttccc

SEQ ID NO: 87773 - DNA, 25 bp, Saccharomyces pastorianus
atgtcactaggcgtactgtacctca

SEQ ID NO: 87774 - DNA, 25 bp, Saccharomyces pastorianus
aaaaattgccccttgagaataatag

SEQ ID NO: 87775 - DNA, 25 bp, Saccharomyces pastorianus
attggtagataagaccgcgttggtc

SEQ ID NO: 87776 - DNA, 25 bp, Saccharomyces pastorianus
agagagccagaagtgcctcagcggc

SEQ ID NO: 87777 - DNA, 25 bp, Saccharomyces pastorianus
tgaagaaaacctcttctgaccttgg

SEQ ID NO: 87778 - DNA, 25 bp, Saccharomyces pastorianus
accagattggttcaagtttcaacga

SEQ ID NO: 87779 - DNA, 25 bp, Saccharomyces pastorianus
ggccaattctggcaaacttattaga

SEQ ID NO: 87780 - DNA, 25 bp, Saccharomyces pastorianus
cgcgttggtcattggtatacttcga

SEQ ID NO: 87781 - DNA, 25 bp, Saccharomyces pastorianus
gcctcagcggcttttgacattaata

SEQ ID NO: 87782 - DNA, 25 bp, Saccharomyces pastorianus
gaagatgacctttgcagagagccag

SEQ ID NO: 87783 - DNA, 25 bp, Saccharomyces pastorianus
aataggacgcattcgatagagtata

SEQ ID NO: 87784 - DNA, 25 bp, Saccharomyces pastorianus
ggataccctgtgattctgaattacc

SEQ ID NO: 87785 - DNA, 25 bp, Saccharomyces pastorianus
catttggccttatagagtgtggtcg

SEQ ID NO: 87786 - DNA, 25 bp, Saccharomyces pastorianus
ccttatagagtgtggtcgtggcgga

SEQ ID NO: 87787 - DNA, 25 bp, Saccharomyces pastorianus
aggttgtttatctttcgagtactga

SEQ ID NO: 87788 - DNA, 25 bp, Saccharomyces pastorianus
tgtttatctttcgagtactgaatgt

SEQ ID NO: 87789 - DNA, 25 bp, Saccharomyces pastorianus
gtggcggaggttgtttatctttcga

SEQ ID NO: 87790 - DNA, 25 bp, Saccharomyces pastorianus
tcgtggcggaggttgtttatctttc

SEQ ID NO: 87791 - DNA, 25 bp, Saccharomyces pastorianus
tttggccttatagagtgtggtcgtg

SEQ ID NO: 87792 - DNA, 25 bp, Saccharomyces pastorianus
gttgtttatctttcgagtactgaat

SEQ ID NO: 87793 - DNA, 25 bp, Saccharomyces pastorianus
gcggaggttgtttatctttcgagta

SEQ ID NO: 87794 - DNA, 25 bp, Saccharomyces pastorianus
ggaggttgtttatctttcgagtact

SEQ ID NO: 87795 - DNA, 25 bp, Saccharomyces pastorianus
ggcggaggttgtttatctttcgagt

SEQ ID NO: 87796 - DNA, 25 bp, Saccharomyces pastorianus
ccccttgtttattatcttctacgca

SEQ ID NO: 87797 - DNA, 25 bp, Saccharomyces pastorianus
ggagttttagctgtactgggtgtac

SEQ ID NO: 87798 - DNA, 25 bp, Saccharomyces pastorianus
atctgtccgatcgtattggtcgtaa

SEQ ID NO: 87799 - DNA, 25 bp, Saccharomyces pastorianus
ttgatgtttggtttctctgggtaca

SEQ ID NO: 87800 - DNA, 25 bp, Saccharomyces pastorianus
aatcggttctgtagtaggcgtcgaa

SEQ ID NO: 87801 - DNA, 25 bp, Saccharomyces pastorianus
atggtttatctgctgtgactggtaa

SEQ ID NO: 87802 - DNA, 25 bp, Saccharomyces pastorianus
taccaattggtgcttatctgtccga

SEQ ID NO: 87803 - DNA, 25 bp, Saccharomyces pastorianus
tagtgaagcgtcagcaaccgctgtt

SEQ ID NO: 87804 - DNA, 25 bp, Saccharomyces pastorianus
taggcgtcgaatgtttccaacccat

SEQ ID NO: 87805 - DNA, 25 bp, Saccharomyces pastorianus
gtctaatcattggatgtgcgtacga

SEQ ID NO: 87806 - DNA, 25 bp, Saccharomyces pastorianus
gaatttcacaactatttggtatcca

SEQ ID NO: 87807 - DNA, 25 bp, Saccharomyces pastorianus
atccgactacgaatgctcttctgaa

SEQ ID NO: 87808 - DNA, 25 bp, Saccharomyces pastorianus
tctgctgcatttgactataaaacgt

SEQ ID NO: 87809 - DNA, 25 bp, Saccharomyces pastorianus
gtgacaaagctaatggcgaaactgt

SEQ ID NO: 87810 - DNA, 25 bp, Saccharomyces pastorianus
aatcctgagggagagctcgaatggc

SEQ ID NO: 87811 - DNA, 25 bp, Saccharomyces pastorianus
gaaattgaggccatgaacattccat

SEQ ID NO: 87812 - DNA, 25 bp, Saccharomyces pastorianus
ttcgaagactggaatttggcagatg

SEQ ID NO: 87813 - DNA, 25 bp, Saccharomyces pastorianus
cgaatgctcttctgaatttgttaga

SEQ ID NO: 87814 - DNA, 25 bp, Saccharomyces pastorianus
gcatgaaataccttgtgacagttgt

SEQ ID NO: 87815 - DNA, 25 bp, Saccharomyces pastorianus
attccatgtgaaaaaatcctgaggg

SEQ ID NO: 87816 - DNA, 25 bp, Saccharomyces pastorianus
cagatgggaaatgccttaatggcgc

SEQ ID NO: 87817 - DNA, 25 bp, Saccharomyces pastorianus
gcgaaactgtatcattagagccatt

SEQ ID NO: 87818 - DNA, 25 bp, Saccharomyces pastorianus
gttgtcgaattaactaatttgacag

SEQ ID NO: 87819 - DNA, 25 bp, Saccharomyces pastorianus
caggatgctaccgttgtcgaattaa

SEQ ID NO: 87820 - DNA, 25 bp, Saccharomyces pastorianus
ggatgctaccgttgtcgaattaact

SEQ ID NO: 87821 - DNA, 25 bp, Saccharomyces pastorianus
ctatttgattaccatgatattggcg

SEQ ID NO: 87822 - DNA, 25 bp, Saccharomyces pastorianus
aacaggatgctaccgttgtcgaatt

SEQ ID NO: 87823 - DNA, 25 bp, Saccharomyces pastorianus
gactgtattcaataggcggccatga

SEQ ID NO: 87824 - DNA, 25 bp, Saccharomyces pastorianus
taaacaggatgctaccgttgtcgaa

SEQ ID NO: 87825 - DNA, 25 bp, Saccharomyces pastorianus
atgctaccgttgtcgaattaactaa

SEQ ID NO: 87826 - DNA, 25 bp, Saccharomyces pastorianus
actgtattcaataggcggccatgaa

SEQ ID NO: 87827 - DNA, 25 bp, Saccharomyces pastorianus
aactatttgattaccatgatattgg

SEQ ID NO: 87828 - DNA, 25 bp, Saccharomyces pastorianus
caagactgtattcaataggcggcca

SEQ ID NO: 87829 - DNA, 25 bp, Saccharomyces pastorianus
gtgcggccgataaacaggatgctac

SEQ ID NO: 87830 - DNA, 25 bp, Saccharomyces pastorianus
cagtcgctcatccaattagccaata

SEQ ID NO: 87831 - DNA, 25 bp, Saccharomyces pastorianus
gtgcaactgcagtaggtcagtcgct

SEQ ID NO: 87832 - DNA, 25 bp, Saccharomyces pastorianus
agatcattgttgtggcttctcggaa

SEQ ID NO: 87833 - DNA, 25 bp, Saccharomyces pastorianus
caagtgtacaaatgtgcggccgata

SEQ ID NO: 87834 - DNA, 25 bp, Saccharomyces pastorianus
gggagccatcaaccccacaaagaaa

SEQ ID NO: 87835 - DNA, 25 bp, Saccharomyces pastorianus
tttagtcgactgtgtcgcgaatcaa

SEQ ID NO: 87836 - DNA, 25 bp, Saccharomyces pastorianus
gtaggtcagtcgctcatccaattag

SEQ ID NO: 87837 - DNA, 25 bp, Saccharomyces pastorianus
caatatctcgtatttagtcgactgt

SEQ ID NO: 87838 - DNA, 25 bp, Saccharomyces pastorianus
atacgcttcaacaagtgtacaaatg

SEQ ID NO: 87839 - DNA, 25 bp, Saccharomyces pastorianus
gaatggcttcaccaagatcattgtt

SEQ ID NO: 87840 - DNA, 25 bp, Saccharomyces pastorianus
caaggacatttatgttgtgtgggtt

SEQ ID NO: 87841 - DNA, 25 bp, Saccharomyces pastorianus
aagcattctttacggggagctttcg

SEQ ID NO: 87842 - DNA, 25 bp, Saccharomyces pastorianus
gagctttcgaaattttttatattca

SEQ ID NO: 87843 - DNA, 25 bp, Saccharomyces pastorianus
gaaattttttatattcaaggacatt

SEQ ID NO: 87844 - DNA, 25 bp, Saccharomyces pastorianus
tggagctgattatcaagcattcttt

SEQ ID NO: 87845 - DNA, 25 bp, Saccharomyces pastorianus
aaagtatttctttaatggagctgat

SEQ ID NO: 87846 - DNA, 25 bp, Saccharomyces pastorianus
ctgattatcaagcattctttacggg

SEQ ID NO: 87847 - DNA, 25 bp, Saccharomyces pastorianus
gacatttatgttgtgtgggttatta

SEQ ID NO: 87848 - DNA, 25 bp, Saccharomyces pastorianus
aatggagctgattatcaagcattct

SEQ ID NO: 87849 - DNA, 25 bp, Saccharomyces pastorianus
atttctttaatggagctgattatca

SEQ ID NO: 87850 - DNA, 25 bp, Saccharomyces pastorianus
gagctgattatcaagcattctttac

SEQ ID NO: 87851 - DNA, 25 bp, Saccharomyces pastorianus
caaggacatttatgttgtgtgggtt

SEQ ID NO: 87852 - DNA, 25 bp, Saccharomyces pastorianus
aagcattctttacggggagctttcg

SEQ ID NO: 87853 - DNA, 25 bp, Saccharomyces pastorianus
gagctttcgaaattttttatattca

SEQ ID NO: 87854 - DNA, 25 bp, Saccharomyces pastorianus
gaaattttttatattcaaggacatt

SEQ ID NO: 87855 - DNA, 25 bp, Saccharomyces pastorianus
ctgattatcaagcattctttacggg

SEQ ID NO: 87856 - DNA, 25 bp, Saccharomyces pastorianus
tggagctgattatcaagcattcttt

SEQ ID NO: 87857 - DNA, 25 bp, Saccharomyces pastorianus
aaagtatttctttaatggagctgat

SEQ ID NO: 87858 - DNA, 25 bp, Saccharomyces pastorianus
gacatttatgttgtgtgggttatta

SEQ ID NO: 87859 - DNA, 25 bp, Saccharomyces pastorianus
aatggagctgattatcaagcattct

SEQ ID NO: 87860 - DNA, 25 bp, Saccharomyces pastorianus
atttctttaatggagctgattatca

SEQ ID NO: 87861 - DNA, 25 bp, Saccharomyces pastorianus
gagctgattatcaagcattctttac

SEQ ID NO: 87862 - DNA, 25 bp, Saccharomyces pastorianus
atgcatgtggttttctgcaagggaa

SEQ ID NO: 87863 - DNA, 25 bp, Saccharomyces pastorianus
taatcaaacctatacgccgacagaa

SEQ ID NO: 87864 - DNA, 25 bp, Saccharomyces pastorianus
taatacaaggccttctcattctctc

SEQ ID NO: 87865 - DNA, 25 bp, Saccharomyces pastorianus
gtgtggttcgcatggcttcacaaat

SEQ ID NO: 87866 - DNA, 25 bp, Saccharomyces pastorianus
gggcagcctgctgaaagtcctgaaa

SEQ ID NO: 87867 - DNA, 25 bp, Saccharomyces pastorianus
ttctcattctctcgccaaatttatc

SEQ ID NO: 87868 - DNA, 25 bp, Saccharomyces pastorianus
atgcgagttatgtggcaagcgactt

SEQ ID NO: 87869 - DNA, 25 bp, Saccharomyces pastorianus
caagcgacttttatgcatgtggttt

SEQ ID NO: 87870 - DNA, 25 bp, Saccharomyces pastorianus
aatgctctattgtttaagtgcggta

SEQ ID NO: 87871 - DNA, 25 bp, Saccharomyces pastorianus
atgatacatttctcactgggcagcc

SEQ ID NO: 87872 - DNA, 25 bp, Saccharomyces pastorianus
aacgtttacgtgtggttcgcatggc

SEQ ID NO: 87873 - DNA, 25 bp, Saccharomyces pastorianus
tttgtttacatcttccgtgcccatc

SEQ ID NO: 87874 - DNA, 25 bp, Saccharomyces pastorianus
ttgttttccattttgtttacatctt

SEQ ID NO: 87875 - DNA, 25 bp, Saccharomyces pastorianus
gatcctgttcttatttgttttccat

SEQ ID NO: 87876 - DNA, 25 bp, Saccharomyces pastorianus
tacccggcatactttgaagacgaaa

SEQ ID NO: 87877 - DNA, 25 bp, Saccharomyces pastorianus
gtgcccatcaatacccggcatactt

SEQ ID NO: 87878 - DNA, 25 bp, Saccharomyces pastorianus
atgacgtttcagatcctgttcttat

SEQ ID NO: 87879 - DNA, 25 bp, Saccharomyces pastorianus
gtttcagatcctgttcttatttgtt

SEQ ID NO: 87880 - DNA, 25 bp, Saccharomyces pastorianus
agacgaaaaagatacctacataaag

SEQ ID NO: 87881 - DNA, 25 bp, Saccharomyces pastorianus
tttacatcttccgtgcccatcaata

SEQ ID NO: 87882 - DNA, 25 bp, Saccharomyces pastorianus
ctgttcttatttgttttccattttg

SEQ ID NO: 87883 - DNA, 25 bp, Saccharomyces pastorianus
caatacccggcatactttgaagacg

SEQ ID NO: 87884 - DNA, 25 bp, Saccharomyces pastorianus
gagagccttgaagatttcgcacgat

SEQ ID NO: 87885 - DNA, 25 bp, Saccharomyces pastorianus
ttgattctactttcccgcaaaaggg

SEQ ID NO: 87886 - DNA, 25 bp, Saccharomyces pastorianus
gaggccatcgtactgtggtaagcca

SEQ ID NO: 87887 - DNA, 25 bp, Saccharomyces pastorianus
ggtgcaggctccatgattgaatcat

SEQ ID NO: 87888 - DNA, 25 bp, Saccharomyces pastorianus
aggattctgttcactttgttggtac

SEQ ID NO: 87889 - DNA, 25 bp, Saccharomyces pastorianus
aatctctaggaggtgccgattccag

SEQ ID NO: 87890 - DNA, 25 bp, Saccharomyces pastorianus
ggatacgccgttcgatgcagctaaa

SEQ ID NO: 87891 - DNA, 25 bp, Saccharomyces pastorianus
ggatatacatttcccggtgcaggct

SEQ ID NO: 87892 - DNA, 25 bp, Saccharomyces pastorianus
aacagcatcatatcggcattcaacc

SEQ ID NO: 87893 - DNA, 25 bp, Saccharomyces pastorianus
taggtggcacactactcgttttgag

SEQ ID NO: 87894 - DNA, 25 bp, Saccharomyces pastorianus
accatttttggtgaacggccttgat

SEQ ID NO: 87895 - DNA, 25 bp, Saccharomyces pastorianus
atggaacatttcttccccaacaaga

SEQ ID NO: 87896 - DNA, 25 bp, Saccharomyces pastorianus
accagtctaggttcgagttcaaact

SEQ ID NO: 87897 - DNA, 25 bp, Saccharomyces pastorianus
ggcacaaacaacttttgctcaaatg

SEQ ID NO: 87898 - DNA, 25 bp, Saccharomyces pastorianus
taaagggttcttctgctgcattagg

SEQ ID NO: 87899 - DNA, 25 bp, Saccharomyces pastorianus
gaaaattccatatatctcatcttga

SEQ ID NO: 87900 - DNA, 25 bp, Saccharomyces pastorianus
gcaaaagctttgaaccagtctaggt

SEQ ID NO: 87901 - DNA, 25 bp, Saccharomyces pastorianus
ggcttacaaagaattgcctgggttt

SEQ ID NO: 87902 - DNA, 25 bp, Saccharomyces pastorianus
cgaattagacaatctgggccatttt

SEQ ID NO: 87903 - DNA, 25 bp, Saccharomyces pastorianus
gaattggtcaacactctgagcgata

SEQ ID NO: 87904 - DNA, 25 bp, Saccharomyces pastorianus
tgattccgatttttctaaaggtcta

SEQ ID NO: 87905 - DNA, 25 bp, Saccharomyces pastorianus
atgtctactattccctcagaaatca

SEQ ID NO: 87906 - DNA, 25 bp, Saccharomyces pastorianus
atctctgatgaacagctgaactcct

SEQ ID NO: 87907 - DNA, 25 bp, Saccharomyces pastorianus
cttcggtattgtgatgatgacttta

SEQ ID NO: 87908 - DNA, 25 bp, Saccharomyces pastorianus
tccttggccatcaccttcggtattg

SEQ ID NO: 87909 - DNA, 25 bp, Saccharomyces pastorianus
cttggccatcaccttcggtattgtg

SEQ ID NO: 87910 - DNA, 25 bp, Saccharomyces pastorianus
agctgaactccttggccatcacctt

SEQ ID NO: 87911 - DNA, 25 bp, Saccharomyces pastorianus
gactttaattgtcatttaccatgct

SEQ ID NO: 87912 - DNA, 25 bp, Saccharomyces pastorianus
aactccttggccatcaccttcggta

SEQ ID NO: 87913 - DNA, 25 bp, Saccharomyces pastorianus
cggtattgtgatgatgactttaatt

SEQ ID NO: 87914 - DNA, 25 bp, Saccharomyces pastorianus
ttggccatcaccttcggtattgtga

SEQ ID NO: 87915 - DNA, 25 bp, Saccharomyces pastorianus
tctgatgaacagctgaactccttgg

SEQ ID NO: 87916 - DNA, 25 bp, Saccharomyces pastorianus
tgatgaacagctgaactccttggcc

SEQ ID NO: 87917 - DNA, 25 bp, Saccharomyces pastorianus
gatggtcacgcctctggtagaatac

SEQ ID NO: 87918 - DNA, 25 bp, Saccharomyces pastorianus
gatcgtgttacagttacgctcgcaa

SEQ ID NO: 87919 - DNA, 25 bp, Saccharomyces pastorianus
agttcctatttatctaccatgctgc

SEQ ID NO: 87920 - DNA, 25 bp, Saccharomyces pastorianus
gatatgactcaatttccctctgatt

SEQ ID NO: 87921 - DNA, 25 bp, Saccharomyces pastorianus
gggaaccccattatcgtacactgtt

SEQ ID NO: 87922 - DNA, 25 bp, Saccharomyces pastorianus
ggaccctcttgtaggacctgtcaaa

SEQ ID NO: 87923 - DNA, 25 bp, Saccharomyces pastorianus
cgggcggcgccaatgatatgactca

SEQ ID NO: 87924 - DNA, 25 bp, Saccharomyces pastorianus
gagtacacacgggacttgatcgaac

SEQ ID NO: 87925 - DNA, 25 bp, Saccharomyces pastorianus
acctgtcaaaactgttcaccacttt

SEQ ID NO: 87926 - DNA, 25 bp, Saccharomyces pastorianus
aaggactattatacggtcaccgata

SEQ ID NO: 87927 - DNA, 25 bp, Saccharomyces pastorianus
ggagaagtgctaccagtactggcct

SEQ ID NO: 87928 - DNA, 25 bp, Saccharomyces pastorianus
ggacttggaacctctcttcaattta

SEQ ID NO: 87929 - DNA, 25 bp, Saccharomyces pastorianus
gtagacttttcgacggcagtaacct

SEQ ID NO: 87930 - DNA, 25 bp, Saccharomyces pastorianus
cagttaacacgttcaccttggtaga

SEQ ID NO: 87931 - DNA, 25 bp, Saccharomyces pastorianus
tggcaaaagcttcatcggcagcctt

SEQ ID NO: 87932 - DNA, 25 bp, Saccharomyces pastorianus
tctagcttcgtgcttcttggcaaaa

SEQ ID NO: 87933 - DNA, 25 bp, Saccharomyces pastorianus
gatagcttccaagactggttcacca

SEQ ID NO: 87934 - DNA, 25 bp, Saccharomyces pastorianus
gttcttcaagtcgaattcacccaac

SEQ ID NO: 87935 - DNA, 25 bp, Saccharomyces pastorianus
ggattccaatctttgtctagcttcg

SEQ ID NO: 87936 - DNA, 25 bp, Saccharomyces pastorianus
aacggtgttttggttgtcagcacat

SEQ ID NO: 87937 - DNA, 25 bp, Saccharomyces pastorianus
gaactcttcagcttggttaaccatc

SEQ ID NO: 87938 - DNA, 25 bp, Saccharomyces pastorianus
ggttcaccagctggcatcattggga

SEQ ID NO: 87939 - DNA, 25 bp, Saccharomyces pastorianus
gggaacccgtatatttcagcttcac

SEQ ID NO: 87940 - DNA, 25 bp, Saccharomyces pastorianus
gaaatcatgtcgaggctgctgtgtg

SEQ ID NO: 87941 - DNA, 25 bp, Saccharomyces pastorianus
acaaattcagcggtcatcactgtat

SEQ ID NO: 87942 - DNA, 25 bp, Saccharomyces pastorianus
tgggcttacgatagaaggccataaa

SEQ ID NO: 87943 - DNA, 25 bp, Saccharomyces pastorianus
aatgtggcggaatcttacagtttga

SEQ ID NO: 87944 - DNA, 25 bp, Saccharomyces pastorianus
tttgccagttaaaggaccagagtgt

SEQ ID NO: 87945 - DNA, 25 bp, Saccharomyces pastorianus
cattacgcccgaaggtttgccagtt

SEQ ID NO: 87946 - DNA, 25 bp, Saccharomyces pastorianus
aaacactgtgttgcttgtcccagaa

SEQ ID NO: 87947 - DNA, 25 bp, Saccharomyces pastorianus
tcagcttcacggatgatttccaggg

SEQ ID NO: 87948 - DNA, 25 bp, Saccharomyces pastorianus
ttacagtttgatgctgtccgcgggc

SEQ ID NO: 87949 - DNA, 25 bp, Saccharomyces pastorianus
gagaagttccgccaattataaaaag

SEQ ID NO: 87950 - DNA, 25 bp, Saccharomyces pastorianus
agagcagctgcccagtttggccaaa

SEQ ID NO: 87951 - DNA, 25 bp, Saccharomyces pastorianus
ttattaagcctcacgtccagcaatg

SEQ ID NO: 87952 - DNA, 25 bp, Saccharomyces pastorianus
gggacaccactggagaaccgtcgat

SEQ ID NO: 87953 - DNA, 25 bp, Saccharomyces pastorianus
tctccagcgctgtaaccaaatcgtt

SEQ ID NO: 87954 - DNA, 25 bp, Saccharomyces pastorianus
agggtccagcaatactttgagcctg

SEQ ID NO: 87955 - DNA, 25 bp, Saccharomyces pastorianus
cagggctttggaagtacacccgcaa

SEQ ID NO: 87956 - DNA, 25 bp, Saccharomyces pastorianus
attttcaagctgatcctttgggaac

SEQ ID NO: 87957 - DNA, 25 bp, Saccharomyces pastorianus
gatctgcaacaccagcaaactctag

SEQ ID NO: 87958 - DNA, 25 bp, Saccharomyces pastorianus
aagaacggtctgcagggtccagcaa

SEQ ID NO: 87959 - DNA, 25 bp, Saccharomyces pastorianus
aagcttattttgctgagctgggcaa

SEQ ID NO: 87960 - DNA, 25 bp, Saccharomyces pastorianus
tacgcctggtgttgctcaaagtcga

SEQ ID NO: 87961 - DNA, 25 bp, Saccharomyces pastorianus
gtgaacgccatttggtccactatat

SEQ ID NO: 87962 - DNA, 25 bp, Saccharomyces pastorianus
ggaccacgacatgtatgcccaatat

SEQ ID NO: 87963 - DNA, 25 bp, Saccharomyces pastorianus
atgctgctgatttccctatttttca

SEQ ID NO: 87964 - DNA, 25 bp, Saccharomyces pastorianus
atttttcatcgtactggcgctggta

SEQ ID NO: 87965 - DNA, 25 bp, Saccharomyces pastorianus
agtcctgtactgtgtgttgtcctgg

SEQ ID NO: 87966 - DNA, 25 bp, Saccharomyces pastorianus
tatattggctgcatgcttgtacaca

SEQ ID NO: 87967 - DNA, 25 bp, Saccharomyces pastorianus
ggctggcaatggcaagttctttcaa

SEQ ID NO: 87968 - DNA, 25 bp, Saccharomyces pastorianus
ctggttggcctttttcttcattata

SEQ ID NO: 87969 - DNA, 25 bp, Saccharomyces pastorianus
acttcggtcttcttgatgctcgtga

SEQ ID NO: 87970 - DNA, 25 bp, Saccharomyces pastorianus
tatattcagtgctacccacaaggcc

SEQ ID NO: 87971 - DNA, 25 bp, Saccharomyces pastorianus
aaactttgcgttcatctggacttcg

SEQ ID NO: 87972 - DNA, 25 bp, Saccharomyces pastorianus
gtgacgccattttgcgcggcaagaa

SEQ ID NO: 87973 - DNA, 25 bp, Saccharomyces pastorianus
tgtgaaaacgttccactcccttata

SEQ ID NO: 87974 - DNA, 25 bp, Saccharomyces pastorianus
tgcaaccttcggatgggccagctgt

SEQ ID NO: 87975 - DNA, 25 bp, Saccharomyces pastorianus
aacggctccggcgtcatcgttatta

SEQ ID NO: 87976 - DNA, 25 bp, Saccharomyces pastorianus
tattactccgagacgtcactgcaat

SEQ ID NO: 87977 - DNA, 25 bp, Saccharomyces pastorianus
accagatctggagtgccacggtagt

SEQ ID NO: 87978 - DNA, 25 bp, Saccharomyces pastorianus
ccagctgttgttgcaattcccgaaa

SEQ ID NO: 87979 - DNA, 25 bp, Saccharomyces pastorianus
tcccttatattcagagcacccttaa

SEQ ID NO: 87980 - DNA, 25 bp, Saccharomyces pastorianus
ctcattccagactatccttgtttta

SEQ ID NO: 87981 - DNA, 25 bp, Saccharomyces pastorianus
ctgcgcggatcatgtcttacgaggt

SEQ ID NO: 87982 - DNA, 25 bp, Saccharomyces pastorianus
aaggaagacccttcattggctcttg

SEQ ID NO: 87983 - DNA, 25 bp, Saccharomyces pastorianus
tggtgccgggtttgctgccttttca

SEQ ID NO: 87984 - DNA, 25 bp, Saccharomyces pastorianus
gtcaatggcatatgatacacctctt

SEQ ID NO: 87985 - DNA, 25 bp, Saccharomyces pastorianus
tttttaccggtgctgggctggcata

SEQ ID NO: 87986 - DNA, 25 bp, Saccharomyces pastorianus
ggctggcatacaaagctggaccaca

SEQ ID NO: 87987 - DNA, 25 bp, Saccharomyces pastorianus
aaatatctgatttacctttccggca

SEQ ID NO: 87988 - DNA, 25 bp, Saccharomyces pastorianus
gggtaaaaaatcctactctagtgct

SEQ ID NO: 87989 - DNA, 25 bp, Saccharomyces pastorianus
aggcctgttcatggcgtcaatggca

SEQ ID NO: 87990 - DNA, 25 bp, Saccharomyces pastorianus
ttcatacacctacacctgcaaatac

SEQ ID NO: 87991 - DNA, 25 bp, Saccharomyces pastorianus
cactgggtggtgttttaggcctgtt

SEQ ID NO: 87992 - DNA, 25 bp, Saccharomyces pastorianus
cagcaactgcaactgcgggaaatat

SEQ ID NO: 87993 - DNA, 25 bp, Saccharomyces pastorianus
gacttcctgtcctggaaaatcagtt

SEQ ID NO: 87994 - DNA, 25 bp, Saccharomyces pastorianus
gagggtgccaatctatttataacgc

SEQ ID NO: 87995 - DNA, 25 bp, Saccharomyces pastorianus
ctgggcctcagtccgtattggaaaa

SEQ ID NO: 87996 - DNA, 25 bp, Saccharomyces pastorianus
acgacttcgtgcacaaatttattgg

SEQ ID NO: 87997 - DNA, 25 bp, Saccharomyces pastorianus
ttggcctcactagcgcttaacgata

SEQ ID NO: 87998 - DNA, 25 bp, Saccharomyces pastorianus
gaggtctgcgttgtacaagtcgtac

SEQ ID NO: 87999 - DNA, 25 bp, Saccharomyces pastorianus
gttgcttctcaagagttgtggctca

SEQ ID NO: 88000 - DNA, 25 bp, Saccharomyces pastorianus
gaacgacgatttagttgcttctcaa

SEQ ID NO: 88001 - DNA, 25 bp, Saccharomyces pastorianus
agttcttctgtcgagttacttatca

SEQ ID NO: 88002 - DNA, 25 bp, Saccharomyces pastorianus
tcaaaccaattgtccttcactataa

SEQ ID NO: 88003 - DNA, 25 bp, Saccharomyces pastorianus
attctgattgatgttgctgggcctc

SEQ ID NO: 88004 - DNA, 25 bp, Saccharomyces pastorianus
aaagatgcttctgccaacaaaggtg

SEQ ID NO: 88005 - DNA, 25 bp, Saccharomyces pastorianus
caatgtcgagctaactgttggcgga

SEQ ID NO: 88006 - DNA, 25 bp, Saccharomyces pastorianus
accagatccgtctcagagctgacaa

SEQ ID NO: 88007 - DNA, 25 bp, Saccharomyces pastorianus
tgacaaagatcgcaccggcattcaa

SEQ ID NO: 88008 - DNA, 25 bp, Saccharomyces pastorianus
actgcagctcaaacctctggaacag

SEQ ID NO: 88009 - DNA, 25 bp, Saccharomyces pastorianus
gaaaatcgccaaaactaccgccact

SEQ ID NO: 88010 - DNA, 25 bp, Saccharomyces pastorianus
gcttacctagagacatcactgctgt

SEQ ID NO: 88011 - DNA, 25 bp, Saccharomyces pastorianus
ggacattgccttattacaacatggg

SEQ ID NO: 88012 - DNA, 25 bp, Saccharomyces pastorianus
ttattgtctttgtcggtagcttacc

SEQ ID NO: 88013 - DNA, 25 bp, Saccharomyces pastorianus
aggtggtaacagtcaagagcgtcta

SEQ ID NO: 88014 - DNA, 25 bp, Saccharomyces pastorianus
aagacccaacagtgcagccggaaat

SEQ ID NO: 88015 - DNA, 25 bp, Saccharomyces pastorianus
taaaaatagttcacccgaccagatc

SEQ ID NO: 88016 - DNA, 25 bp, Saccharomyces pastorianus
aagagcatttcgatttggcactaag

SEQ ID NO: 88017 - DNA, 25 bp, Saccharomyces pastorianus
tatcggtacggccatgatcttatcg

SEQ ID NO: 88018 - DNA, 25 bp, Saccharomyces pastorianus
tacgtgttggctatctgtgtgtttc

SEQ ID NO: 88019 - DNA, 25 bp, Saccharomyces pastorianus
tacatgagactccattgccggtgat

SEQ ID NO: 88020 - DNA, 25 bp, Saccharomyces pastorianus
gagaagctgccaatgcctgtaaaaa

SEQ ID NO: 88021 - DNA, 25 bp, Saccharomyces pastorianus
atgtttgccggtgtaatcatcctac

SEQ ID NO: 88022 - DNA, 25 bp, Saccharomyces pastorianus
agatttctgttctatcggtacggcc

SEQ ID NO: 88023 - DNA, 25 bp, Saccharomyces pastorianus
gtatcgactgttctgtgagccataa

SEQ ID NO: 88024 - DNA, 25 bp, Saccharomyces pastorianus
gtttggcagttattgcttcctccaa

SEQ ID NO: 88025 - DNA, 25 bp, Saccharomyces pastorianus
ggccacaacgttcctaatgggtgtt

SEQ ID NO: 88026 - DNA, 25 bp, Saccharomyces pastorianus
ttactttgtgcgttgttgccggaat

SEQ ID NO: 88027 - DNA, 25 bp, Saccharomyces pastorianus
gaaacaagttccagtgcgtctacta

SEQ ID NO: 88028 - DNA, 25 bp, Saccharomyces pastorianus
taggttctacggttggagttgtcat

SEQ ID NO: 88029 - DNA, 25 bp, Saccharomyces pastorianus
cgacaacatttaacactcactttcc

SEQ ID NO: 88030 - DNA, 25 bp, Saccharomyces pastorianus
gaatcaaatcctccgttaactttca

SEQ ID NO: 88031 - DNA, 25 bp, Saccharomyces pastorianus
gggagattttcatacgtatcgtcat

SEQ ID NO: 88032 - DNA, 25 bp, Saccharomyces pastorianus
acagagctagttcctcagatggtat

SEQ ID NO: 88033 - DNA, 25 bp, Saccharomyces pastorianus
ctatctggcgcactaaacactcaag

SEQ ID NO: 88034 - DNA, 25 bp, Saccharomyces pastorianus
actcaagatgcctcagatgccaata

SEQ ID NO: 88035 - DNA, 25 bp, Saccharomyces pastorianus
ttccccaaacatctgtgcttcaaga

SEQ ID NO: 88036 - DNA, 25 bp, Saccharomyces pastorianus
gaaacagaagcaccgccaaatccgt

SEQ ID NO: 88037 - DNA, 25 bp, Saccharomyces pastorianus
tgcgtctactattactcggccaaat

SEQ ID NO: 88038 - DNA, 25 bp, Saccharomyces pastorianus
ggcaaatgaagatccagaccccgct

SEQ ID NO: 88039 - DNA, 25 bp, Saccharomyces pastorianus
ggacatttccagaagcaagtgttga

SEQ ID NO: 88040 - DNA, 25 bp, Saccharomyces pastorianus
agaagccatgagcaatcagacattg

SEQ ID NO: 88041 - DNA, 25 bp, Saccharomyces pastorianus
agaccccgctgcacagaaaagactg

SEQ ID NO: 88042 - DNA, 25 bp, Saccharomyces pastorianus
gtgctggcactgaggttaataataa

SEQ ID NO: 88043 - DNA, 25 bp, Saccharomyces pastorianus
atctgttggtaagcttggtggtccc

SEQ ID NO: 88044 - DNA, 25 bp, Saccharomyces pastorianus
gacattgctgctacccagcgataaa

SEQ ID NO: 88045 - DNA, 25 bp, Saccharomyces pastorianus
gcaagcatttaaagccagctcagat

SEQ ID NO: 88046 - DNA, 25 bp, Saccharomyces pastorianus
agaatttgccaaagaagccatgagc

SEQ ID NO: 88047 - DNA, 25 bp, Saccharomyces pastorianus
aacaataccaatagtgctggcactg

SEQ ID NO: 88048 - DNA, 25 bp, Saccharomyces pastorianus
gatttgtattttctcgattgggtga

SEQ ID NO: 88049 - DNA, 25 bp, Saccharomyces pastorianus
tcagttgtctttatcgtcccaggta

SEQ ID NO: 88050 - DNA, 25 bp, Saccharomyces pastorianus
ttaggtgccgctggcgctacaaaaa

SEQ ID NO: 88051 - DNA, 25 bp, Saccharomyces pastorianus
ggtgacatttctccagctgatgtta

SEQ ID NO: 88052 - DNA, 25 bp, Saccharomyces pastorianus
aaaggtttagtcgtcatcgccggtg

SEQ ID NO: 88053 - DNA, 25 bp, Saccharomyces pastorianus
atgaggccagaatgcctgctgtgtt

SEQ ID NO: 88054 - DNA, 25 bp, Saccharomyces pastorianus
gaaggcttccaaggccaagaatgtt

SEQ ID NO: 88055 - DNA, 25 bp, Saccharomyces pastorianus
attcgctaaaccattggcctctaag

SEQ ID NO: 88056 - DNA, 25 bp, Saccharomyces pastorianus
agctgatgttatttcccacatccca

SEQ ID NO: 88057 - DNA, 25 bp, Saccharomyces pastorianus
tgctgtgttgccattcgctaaacca

SEQ ID NO: 88058 - DNA, 25 bp, Saccharomyces pastorianus
atgtgaagatcactctgtcccatac

SEQ ID NO: 88059 - DNA, 25 bp, Saccharomyces pastorianus
tcccatacatcttcataccttcaaa

SEQ ID NO: 88060 - DNA, 25 bp, Saccharomyces pastorianus
caacgtaacaagagcggcctttcct

SEQ ID NO: 88061 - DNA, 25 bp, Saccharomyces pastorianus
tcctcttctgagtttgacaacatga

SEQ ID NO: 88062 - DNA, 25 bp, Saccharomyces pastorianus
agctactcaacctctatcagtaacg

SEQ ID NO: 88063 - DNA, 25 bp, Saccharomyces pastorianus
gaaagccaatcgattcccatcaaga

SEQ ID NO: 88064 - DNA, 25 bp, Saccharomyces pastorianus
ggaaatccctgatctaatcaccgtt

SEQ ID NO: 88065 - DNA, 25 bp, Saccharomyces pastorianus
aaacaaatcttctacttctcaacgt

SEQ ID NO: 88066 - DNA, 25 bp, Saccharomyces pastorianus
gaacgacatgtcagcctctaaaagt

SEQ ID NO: 88067 - DNA, 25 bp, Saccharomyces pastorianus
attgacaagattatcccaccccaaa

SEQ ID NO: 88068 - DNA, 25 bp, Saccharomyces pastorianus
ttagcagctcatcagcgtgaactgg

SEQ ID NO: 88069 - DNA, 25 bp, Saccharomyces pastorianus
cgagccgaatatccggtttctcaga

SEQ ID NO: 88070 - DNA, 25 bp, Saccharomyces pastorianus
aaagacagctattctacctctcaat

SEQ ID NO: 88071 - DNA, 25 bp, Saccharomyces pastorianus
aaagccggaaatgcagtcgcagtta

SEQ ID NO: 88072 - DNA, 25 bp, Saccharomyces pastorianus
ggaagacgtttctcatcgatacata

SEQ ID NO: 88073 - DNA, 25 bp, Saccharomyces pastorianus
taaagccgctggactcgaggaagac

SEQ ID NO: 88074 - DNA, 25 bp, Saccharomyces pastorianus
caaccctcaacaagtagccaagcta

SEQ ID NO: 88075 - DNA, 25 bp, Saccharomyces pastorianus
gtcgcagttagtcagcgttttgcaa

SEQ ID NO: 88076 - DNA, 25 bp, Saccharomyces pastorianus
tacccgacccatgtggattcgtgaa

SEQ ID NO: 88077 - DNA, 25 bp, Saccharomyces pastorianus
gggtcctacggccacaattacatac

SEQ ID NO: 88078 - DNA, 25 bp, Saccharomyces pastorianus
ttacatacgaagacaccaaccctca

SEQ ID NO: 88079 - DNA, 25 bp, Saccharomyces pastorianus
gaaacaacctgttcgaagtctactt

SEQ ID NO: 88080 - DNA, 25 bp, Saccharomyces pastorianus
gaaggttctgcagtcagcacaagac

SEQ ID NO: 88081 - DNA, 25 bp, Saccharomyces pastorianus
ttgagaaattcgcatctacccgacc

SEQ ID NO: 88082 - DNA, 25 bp, Saccharomyces pastorianus
tttgatggacctgggaaacgggctt

SEQ ID NO: 88083 - DNA, 25 bp, Saccharomyces pastorianus
tatggcacgtctcattcacagtact

SEQ ID NO: 88084 - DNA, 25 bp, Saccharomyces pastorianus
gaaagcctccactcaagcgaagaaa

SEQ ID NO: 88085 - DNA, 25 bp, Saccharomyces pastorianus
aatattttgagcacttctctctccg

SEQ ID NO: 88086 - DNA, 25 bp, Saccharomyces pastorianus
ggtctggaacctgaaactcgatcta

SEQ ID NO: 88087 - DNA, 25 bp, Saccharomyces pastorianus
gcttcctcacattcggatacaactg

SEQ ID NO: 88088 - DNA, 25 bp, Saccharomyces pastorianus
atgcttataacagaggtccaccttc

SEQ ID NO: 88089 - DNA, 25 bp, Saccharomyces pastorianus
gacagataagttctccggtaaccaa

SEQ ID NO: 88090 - DNA, 25 bp, Saccharomyces pastorianus
aaatgggcttggtcttaatacgtat

SEQ ID NO: 88091 - DNA, 25 bp, Saccharomyces pastorianus
tctctctccgtgatggcagatacta

SEQ ID NO: 88092 - DNA, 25 bp, Saccharomyces pastorianus
aacgggcttgccttgaatgcttata

SEQ ID NO: 88093 - DNA, 25 bp, Saccharomyces pastorianus
aattcatattctggtgcgattccga

SEQ ID NO: 88094 - DNA, 25 bp, Saccharomyces pastorianus
attcttcgccatatcttgtgtatcc

SEQ ID NO: 88095 - DNA, 25 bp, Saccharomyces pastorianus
tatagaggccaaagtcgtcggaata

SEQ ID NO: 88096 - DNA, 25 bp, Saccharomyces pastorianus
ataacactcagtatcacagcgggcc

SEQ ID NO: 88097 - DNA, 25 bp, Saccharomyces pastorianus
accaatcgggatattcttcgccata

SEQ ID NO: 88098 - DNA, 25 bp, Saccharomyces pastorianus
atatgaatccccaagggtcctgttc

SEQ ID NO: 88099 - DNA, 25 bp, Saccharomyces pastorianus
aacacagtcttcatgaacccttaca

SEQ ID NO: 88100 - DNA, 25 bp, Saccharomyces pastorianus
ctagtgttgagggttcgccgtcatc

SEQ ID NO: 88101 - DNA, 25 bp, Saccharomyces pastorianus
gttcgccgtcatctagggatactga

SEQ ID NO: 88102 - DNA, 25 bp, Saccharomyces pastorianus
tctaatgtataaccccgctggtcct

SEQ ID NO: 88103 - DNA, 25 bp, Saccharomyces pastorianus
tgccaacctaccctctaatgtataa

SEQ ID NO: 88104 - DNA, 25 bp, Saccharomyces pastorianus
gatgtggtaaccaggccgctattat

SEQ ID NO: 88105 - DNA, 25 bp, Saccharomyces pastorianus
aatacgatccatctgtgagacccgg

SEQ ID NO: 88106 - DNA, 25 bp, Saccharomyces pastorianus
accaggccgctattatggaggtgga

SEQ ID NO: 88107 - DNA, 25 bp, Saccharomyces pastorianus
cccgttactgccttggtggataata

SEQ ID NO: 88108 - DNA, 25 bp, Saccharomyces pastorianus
tgtgagacccggtgaaccaaccgtc

SEQ ID NO: 88109 - DNA, 25 bp, Saccharomyces pastorianus
cgatctattcgattatttccccgtt

SEQ ID NO: 88110 - DNA, 25 bp, Saccharomyces pastorianus
cagtgctccaaattattgttataga

SEQ ID NO: 88111 - DNA, 25 bp, Saccharomyces pastorianus
aatcttctgtttgcatggaggtctc

SEQ ID NO: 88112 - DNA, 25 bp, Saccharomyces pastorianus
tattcgattatttccccgttactgc

SEQ ID NO: 88113 - DNA, 25 bp, Saccharomyces pastorianus
gtggaaaatgtttaccgatctattc

SEQ ID NO: 88114 - DNA, 25 bp, Saccharomyces pastorianus
tggaggtctctcacccatgatagag

SEQ ID NO: 88115 - DNA, 25 bp, Saccharomyces pastorianus
cccatctaaaccatcttctatactt

SEQ ID NO: 88116 - DNA, 25 bp, Saccharomyces pastorianus
gaaatcacgagttgcctcacagagg

SEQ ID NO: 88117 - DNA, 25 bp, Saccharomyces pastorianus
tcctccatttttcccacaaatacat

SEQ ID NO: 88118 - DNA, 25 bp, Saccharomyces pastorianus
ggtggcctccattttacaagtacgt

SEQ ID NO: 88119 - DNA, 25 bp, Saccharomyces pastorianus
gtgttacactgcatatttttctaat

SEQ ID NO: 88120 - DNA, 25 bp, Saccharomyces pastorianus
agcctccgcttcagggctgtaggat

SEQ ID NO: 88121 - DNA, 25 bp, Saccharomyces pastorianus
atatttcttggctatctgtaagcaa

SEQ ID NO: 88122 - DNA, 25 bp, Saccharomyces pastorianus
caaatacattttcttctcttcttct

SEQ ID NO: 88123 - DNA, 25 bp, Saccharomyces pastorianus
ttcttcttctgcttttttgtttcga

SEQ ID NO: 88124 - DNA, 25 bp, Saccharomyces pastorianus
taagaatctgttttgagcctccgct

SEQ ID NO: 88125 - DNA, 25 bp, Saccharomyces pastorianus
agagtccacaagtatattccatata

SEQ ID NO: 88126 - DNA, 25 bp, Saccharomyces pastorianus
tgcatcttcacatcgtggcgcaatt

SEQ ID NO: 88127 - DNA, 25 bp, Saccharomyces pastorianus
taaaatggaggccacctgcatcttc

SEQ ID NO: 88128 - DNA, 25 bp, Saccharomyces pastorianus
tgtttattccaatcctattcctgtc

SEQ ID NO: 88129 - DNA, 25 bp, Saccharomyces pastorianus
gaccaagagttgcagcttttcgaag

SEQ ID NO: 88130 - DNA, 25 bp, Saccharomyces pastorianus
atggcacgcatccatatcagcttag

SEQ ID NO: 88131 - DNA, 25 bp, Saccharomyces pastorianus
gactcttcatcggtatttcaatgct

SEQ ID NO: 88132 - DNA, 25 bp, Saccharomyces pastorianus
ttaaacttgaaccactccatgtctg

SEQ ID NO: 88133 - DNA, 25 bp, Saccharomyces pastorianus
agatgaatccgtgcgttccattgta

SEQ ID NO: 88134 - DNA, 25 bp, Saccharomyces pastorianus
gaagatctcttctcatttcacctaa

SEQ ID NO: 88135 - DNA, 25 bp, Saccharomyces pastorianus
gggacggcgaagaactctctatcta

SEQ ID NO: 88136 - DNA, 25 bp, Saccharomyces pastorianus
tattcctgtcagctacctagatacc

SEQ ID NO: 88137 - DNA, 25 bp, Saccharomyces pastorianus
agaacgactcctgcgttataatctt

SEQ ID NO: 88138 - DNA, 25 bp, Saccharomyces pastorianus
tacgagcgttttcaattgcaccagc

SEQ ID NO: 88139 - DNA, 25 bp, Saccharomyces pastorianus
ttatttccttacgagcgttttcaat

SEQ ID NO: 88140 - DNA, 25 bp, Saccharomyces pastorianus
ttcttttcttctctatttgcttttt

SEQ ID NO: 88141 - DNA, 25 bp, Saccharomyces pastorianus
gagcgttttcaattgcaccagccat

SEQ ID NO: 88142 - DNA, 25 bp, Saccharomyces pastorianus
cgactcctgcgttataatcttagat

SEQ ID NO: 88143 - DNA, 25 bp, Saccharomyces pastorianus
ttttcaattgcaccagccattgttt

SEQ ID NO: 88144 - DNA, 25 bp, Saccharomyces pastorianus
ctcctgcgttataatcttagatatc

SEQ ID NO: 88145 - DNA, 25 bp, Saccharomyces pastorianus
atgaaagaacgactcctgcgttata

SEQ ID NO: 88146 - DNA, 25 bp, Saccharomyces pastorianus
cttagatatctatatgctttgagaa

SEQ ID NO: 88147 - DNA, 25 bp, Saccharomyces pastorianus
gcgttttcaattgcaccagccattg

SEQ ID NO: 88148 - DNA, 25 bp, Saccharomyces pastorianus
gaaagaagagaactagaagacttaa

SEQ ID NO: 88149 - DNA, 25 bp, Saccharomyces pastorianus
atgagagccaagtggagaaagaaga

SEQ ID NO: 88150 - DNA, 25 bp, Saccharomyces pastorianus
gaagagaactagaagacttaagaga

SEQ ID NO: 88151 - DNA, 25 bp, Saccharomyces pastorianus
gagaaagaagagaactagaagactt

SEQ ID NO: 88152 - DNA, 25 bp, Saccharomyces pastorianus
ccaagtggagaaagaagagaactag

SEQ ID NO: 88153 - DNA, 25 bp, Saccharomyces pastorianus
gccaagtggagaaagaagagaacta

SEQ ID NO: 88154 - DNA, 25 bp, Saccharomyces pastorianus
agccaagtggagaaagaagagaact

SEQ ID NO: 88155 - DNA, 25 bp, Saccharomyces pastorianus
ggagaaagaagagaactagaagact

SEQ ID NO: 88156 - DNA, 25 bp, Saccharomyces pastorianus
aaagaagagaactagaagacttaag

SEQ ID NO: 88157 - DNA, 25 bp, Saccharomyces pastorianus
agaagagaactagaagacttaagag

SEQ ID NO: 88158 - DNA, 25 bp, Saccharomyces pastorianus
gagccaagtggagaaagaagagaac

SEQ ID NO: 88159 - DNA, 25 bp, Saccharomyces pastorianus
aaggcagaacaggtcgatactcaac

SEQ ID NO: 88160 - DNA, 25 bp, Saccharomyces pastorianus
ccctggaatttctagccctgatgag

SEQ ID NO: 88161 - DNA, 25 bp, Saccharomyces pastorianus
ataccgcttataccaaatgttccag

SEQ ID NO: 88162 - DNA, 25 bp, Saccharomyces pastorianus
gccctgatgagtgcttgagacaaat

SEQ ID NO: 88163 - DNA, 25 bp, Saccharomyces pastorianus
taaacgtgggaccagcagccgtacg

SEQ ID NO: 88164 - DNA, 25 bp, Saccharomyces pastorianus
atgttccagggttctacctatctta

SEQ ID NO: 88165 - DNA, 25 bp, Saccharomyces pastorianus
cccgctgacaattcctctaatttta

SEQ ID NO: 88166 - DNA, 25 bp, Saccharomyces pastorianus
ggtgcaccagaattactacttaaca

SEQ ID NO: 88167 - DNA, 25 bp, Saccharomyces pastorianus
gaaaacccttcctttgatcttagat

SEQ ID NO: 88168 - DNA, 25 bp, Saccharomyces pastorianus
gatactcaacccttacacgtgtatt

SEQ ID NO: 88169 - DNA, 25 bp, Saccharomyces pastorianus
ttatattgccttttaggtctcccgc

SEQ ID NO: 88170 - DNA, 25 bp, Saccharomyces pastorianus
caacagactaactggctggaacgcc

SEQ ID NO: 88171 - DNA, 25 bp, Saccharomyces pastorianus
agaatgacagcgatgtaccggaact

SEQ ID NO: 88172 - DNA, 25 bp, Saccharomyces pastorianus
gatgttgactctatcatcaagaact

SEQ ID NO: 88173 - DNA, 25 bp, Saccharomyces pastorianus
gaacttccacgcagaggtcagcact

SEQ ID NO: 88174 - DNA, 25 bp, Saccharomyces pastorianus
gccagagtcgaccagttgaacttga

SEQ ID NO: 88175 - DNA, 25 bp, Saccharomyces pastorianus
gccatcaaagccagagtcgaccagt

SEQ ID NO: 88176 - DNA, 25 bp, Saccharomyces pastorianus
gggtgatgtcagatcgctgaatatc

SEQ ID NO: 88177 - DNA, 25 bp, Saccharomyces pastorianus
gttgaacttgaacttgacggatgac

SEQ ID NO: 88178 - DNA, 25 bp, Saccharomyces pastorianus
caccagactatgtcaagtccaaata

SEQ ID NO: 88179 - DNA, 25 bp, Saccharomyces pastorianus
ggtcagcactcctcaagtattatct

SEQ ID NO: 88180 - DNA, 25 bp, Saccharomyces pastorianus
gcgatgtaccggaactggccaccat

SEQ ID NO: 88181 - DNA, 25 bp, Saccharomyces pastorianus
caggctcagaggattcgtttgttaa

SEQ ID NO: 88182 - DNA, 25 bp, Saccharomyces pastorianus
ctgaaggttctaccggcaccccaag

SEQ ID NO: 88183 - DNA, 25 bp, Saccharomyces pastorianus
gtgagaaggagcaactacgccattt

SEQ ID NO: 88184 - DNA, 25 bp, Saccharomyces pastorianus
aattacagcgcggtgtggccgcaag

SEQ ID NO: 88185 - DNA, 25 bp, Saccharomyces pastorianus
accccaagagggtcaggctcagagg

SEQ ID NO: 88186 - DNA, 25 bp, Saccharomyces pastorianus
gacttcttcgttaggcagcgtgaga

SEQ ID NO: 88187 - DNA, 25 bp, Saccharomyces pastorianus
gagcaactacgccatttgaaagaac

SEQ ID NO: 88188 - DNA, 25 bp, Saccharomyces pastorianus
gaaagggccacggatgacttcttcg

SEQ ID NO: 88189 - DNA, 25 bp, Saccharomyces pastorianus
gctcattgcaattacagcgcggtgt

SEQ ID NO: 88190 - DNA, 25 bp, Saccharomyces pastorianus
gcaaggttctactctgaaggttcta

SEQ ID NO: 88191 - DNA, 25 bp, Saccharomyces pastorianus
tgtggccgcaaggttctactctgaa

SEQ ID NO: 88192 - DNA, 25 bp, Saccharomyces pastorianus
gacatccatggcaacagtttcgaca

SEQ ID NO: 88193 - DNA, 25 bp, Saccharomyces pastorianus
gattgattctctttcttacttcctc

SEQ ID NO: 88194 - DNA, 25 bp, Saccharomyces pastorianus
taagcccacaattcaccaacggtta

SEQ ID NO: 88195 - DNA, 25 bp, Saccharomyces pastorianus
gtcccggccaactgaaagaatatat

SEQ ID NO: 88196 - DNA, 25 bp, Saccharomyces pastorianus
tgttgttcaatgcaccaagtcccgg

SEQ ID NO: 88197 - DNA, 25 bp, Saccharomyces pastorianus
caaggtcttctctactggcaaaata

SEQ ID NO: 88198 - DNA, 25 bp, Saccharomyces pastorianus
tatcggttccttcactgacatccat

SEQ ID NO: 88199 - DNA, 25 bp, Saccharomyces pastorianus
ggaagttcaccagtaatgtcgcata

SEQ ID NO: 88200 - DNA, 25 bp, Saccharomyces pastorianus
ttagctgccaaaactctgaacgatt

SEQ ID NO: 88201 - DNA, 25 bp, Saccharomyces pastorianus
gtccctaccgttggtggaatctgac

SEQ ID NO: 88202 - DNA, 25 bp, Saccharomyces pastorianus
aacttcttctgctatatcggttcct

SEQ ID NO: 88203 - DNA, 25 bp, Saccharomyces pastorianus
gaacggccgaggtatcaaataattt

SEQ ID NO: 88204 - DNA, 25 bp, Saccharomyces pastorianus
tcaaggaacataacggtgcagccaa

SEQ ID NO: 88205 - DNA, 25 bp, Saccharomyces pastorianus
aagatgttgcccattacaaaatcaa

SEQ ID NO: 88206 - DNA, 25 bp, Saccharomyces pastorianus
aacaaaagcgtctccaaggcatccc

SEQ ID NO: 88207 - DNA, 25 bp, Saccharomyces pastorianus
acagcgtttattgaccttacttgaa

SEQ ID NO: 88208 - DNA, 25 bp, Saccharomyces pastorianus
ccagatggtatggtggcacgccttt

SEQ ID NO: 88209 - DNA, 25 bp, Saccharomyces pastorianus
gggctcatcaagattcagacacatt

SEQ ID NO: 88210 - DNA, 25 bp, Saccharomyces pastorianus
catgtatgcctggagaacggccgag

SEQ ID NO: 88211 - DNA, 25 bp, Saccharomyces pastorianus
acgcctttgggctcatcaagattca

SEQ ID NO: 88212 - DNA, 25 bp, Saccharomyces pastorianus
aaaggatataccctccatactccaa

SEQ ID NO: 88213 - DNA, 25 bp, Saccharomyces pastorianus
cgaagctggtgctggacagcgttta

SEQ ID NO: 88214 - DNA, 25 bp, Saccharomyces pastorianus
gacgaggtttttgcagactatggaa

SEQ ID NO: 88215 - DNA, 25 bp, Saccharomyces pastorianus
gattcgctggaactacagatactga

SEQ ID NO: 88216 - DNA, 25 bp, Saccharomyces pastorianus
tcatttacggtgtatgcattcaggt

SEQ ID NO: 88217 - DNA, 25 bp, Saccharomyces pastorianus
aacaaattggactcgaagctagaca

SEQ ID NO: 88218 - DNA, 25 bp, Saccharomyces pastorianus
gaaaatttggccaaacgaggctgat

SEQ ID NO: 88219 - DNA, 25 bp, Saccharomyces pastorianus
gcttatggcgctggaacatttggat

SEQ ID NO: 88220 - DNA, 25 bp, Saccharomyces pastorianus
aatagaccctttaattggcatcaac

SEQ ID NO: 88221 - DNA, 25 bp, Saccharomyces pastorianus
agcctattttactactattgggaca

SEQ ID NO: 88222 - DNA, 25 bp, Saccharomyces pastorianus
atcagtgagcatgacctggtccaca

SEQ ID NO: 88223 - DNA, 25 bp, Saccharomyces pastorianus
agacaaggtcatcggaacttttttg

SEQ ID NO: 88224 - DNA, 25 bp, Saccharomyces pastorianus
aaattacaaccttcgcttatggcgc

SEQ ID NO: 88225 - DNA, 25 bp, Saccharomyces pastorianus
aagtcaaggttttgcctggaaccag

SEQ ID NO: 88226 - DNA, 25 bp, Saccharomyces pastorianus
gcacgtcgtatgcaggagcagccat

SEQ ID NO: 88227 - DNA, 25 bp, Saccharomyces pastorianus
ggactccaagacaggcgattacagg

SEQ ID NO: 88228 - DNA, 25 bp, Saccharomyces pastorianus
gatgcacacgaggacaactttgatg

SEQ ID NO: 88229 - DNA, 25 bp, Saccharomyces pastorianus
agcataagctttgtggaggactcca

SEQ ID NO: 88230 - DNA, 25 bp, Saccharomyces pastorianus
atgattggcggcactggcacgtcgt

SEQ ID NO: 88231 - DNA, 25 bp, Saccharomyces pastorianus
atgacgtccactcgaatgaagatag

SEQ ID NO: 88232 - DNA, 25 bp, Saccharomyces pastorianus
gatggccatgaatttccgagagcaa

SEQ ID NO: 88233 - DNA, 25 bp, Saccharomyces pastorianus
aatggataggccacgcaggaaatct

SEQ ID NO: 88234 - DNA, 25 bp, Saccharomyces pastorianus
tggaaccaggacttattcgccacac

SEQ ID NO: 88235 - DNA, 25 bp, Saccharomyces pastorianus
atctgtatgggctcatgacgtccac

SEQ ID NO: 88236 - DNA, 25 bp, Saccharomyces pastorianus
ccgttccagctggtcactggtagag

SEQ ID NO: 88237 - DNA, 25 bp, Saccharomyces pastorianus
atttggctgcgggactgtaggactc

SEQ ID NO: 88238 - DNA, 25 bp, Saccharomyces pastorianus
ggcgataccgttgcagtatttggct

SEQ ID NO: 88239 - DNA, 25 bp, Saccharomyces pastorianus
gcgcttccaagatcattgccattga

SEQ ID NO: 88240 - DNA, 25 bp, Saccharomyces pastorianus
gctgccgctggtggagaaatttcta

SEQ ID NO: 88241 - DNA, 25 bp, Saccharomyces pastorianus
gggcggctcttaagacagctaatgt

SEQ ID NO: 88242 - DNA, 25 bp, Saccharomyces pastorianus
gaaatttctacaaggccgttccagc

SEQ ID NO: 88243 - DNA, 25 bp, Saccharomyces pastorianus
gactctccgttatccaaggtgcaaa

SEQ ID NO: 88244 - DNA, 25 bp, Saccharomyces pastorianus
gaagaatttatcactcacaggagac

SEQ ID NO: 88245 - DNA, 25 bp, Saccharomyces pastorianus
gtgccacggattttgttaatcccaa

SEQ ID NO: 88246 - DNA, 25 bp, Saccharomyces pastorianus
attgttctcaatttggtgccacgga

SEQ ID NO: 88247 - DNA, 25 bp, Saccharomyces pastorianus
agagcctcttttgagacagggaaat

SEQ ID NO: 88248 - DNA, 25 bp, Saccharomyces pastorianus
tgatgagggccgtaaatcgcacatt

SEQ ID NO: 88249 - DNA, 25 bp, Saccharomyces pastorianus
gtgttcccagagaggctgattgact

SEQ ID NO: 88250 - DNA, 25 bp, Saccharomyces pastorianus
gaatcatacgaaccgcacattgtgg

SEQ ID NO: 88251 - DNA, 25 bp, Saccharomyces pastorianus
taacgtatcccgtattgttgcttgg

SEQ ID NO: 88252 - DNA, 25 bp, Saccharomyces pastorianus
ataacatttcggatttcgccaaaga

SEQ ID NO: 88253 - DNA, 25 bp, Saccharomyces pastorianus
gatgcgataactctaacttgtattc

SEQ ID NO: 88254 - DNA, 25 bp, Saccharomyces pastorianus
aactgctggacatgctagagcctct

SEQ ID NO: 88255 - DNA, 25 bp, Saccharomyces pastorianus
aggatgtggcaagtcgtctacgtgt

SEQ ID NO: 88256 - DNA, 25 bp, Saccharomyces pastorianus
tgggtgtcgtcaaacaggatgccgt

SEQ ID NO: 88257 - DNA, 25 bp, Saccharomyces pastorianus
ggcatgtcaatgatgtgttcccaga

SEQ ID NO: 88258 - DNA, 25 bp, Saccharomyces pastorianus
cctggctcaccaaagatcctatgat

SEQ ID NO: 88259 - DNA, 25 bp, Saccharomyces pastorianus
gagtcctcgatacttttcaatcacc

SEQ ID NO: 88260 - DNA, 25 bp, Saccharomyces pastorianus
accatgcttcaattccatccaaaat

SEQ ID NO: 88261 - DNA, 25 bp, Saccharomyces pastorianus
ttccgggcgtattacaatccactgt

SEQ ID NO: 88262 - DNA, 25 bp, Saccharomyces pastorianus
aatcattcaccaatattccgggcgt

SEQ ID NO: 88263 - DNA, 25 bp, Saccharomyces pastorianus
gcgtgttgccctttttcaagatgaa

SEQ ID NO: 88264 - DNA, 25 bp, Saccharomyces pastorianus
catgaccttaggagcggacttatcg

SEQ ID NO: 88265 - DNA, 25 bp, Saccharomyces pastorianus
ttcctcttctataaacaccctggta

SEQ ID NO: 88266 - DNA, 25 bp, Saccharomyces pastorianus
gtacatatgaccattccatgacctt

SEQ ID NO: 88267 - DNA, 25 bp, Saccharomyces pastorianus
gctagtaccgctccttaagctagag

SEQ ID NO: 88268 - DNA, 25 bp, Saccharomyces pastorianus
ggaacctattgtatccgctgatggt

SEQ ID NO: 88269 - DNA, 25 bp, Saccharomyces pastorianus
ttgtttaggcttcttaccggcagag

SEQ ID NO: 88270 - DNA, 25 bp, Saccharomyces pastorianus
acagccgtctgtttcaatttcttgg

SEQ ID NO: 88271 - DNA, 25 bp, Saccharomyces pastorianus
aaggagtaccttctgttggcttatt

SEQ ID NO: 88272 - DNA, 25 bp, Saccharomyces pastorianus
cttctgttggcttatttttcatgga

SEQ ID NO: 88273 - DNA, 25 bp, Saccharomyces pastorianus
attctgtcttccagcatatgtttgg

SEQ ID NO: 88274 - DNA, 25 bp, Saccharomyces pastorianus
aacattatccattctgtcttccagc

SEQ ID NO: 88275 - DNA, 25 bp, Saccharomyces pastorianus
gctacagtatgtgtaacagccgtct

SEQ ID NO: 88276 - DNA, 25 bp, Saccharomyces pastorianus
gagcttggagctgctacagtatgtg

SEQ ID NO: 88277 - DNA, 25 bp, Saccharomyces pastorianus
gccaaagtggcttgtttaggcttct

SEQ ID NO: 88278 - DNA, 25 bp, Saccharomyces pastorianus
tcttgatttcaagggacgtgcagat

SEQ ID NO: 88279 - DNA, 25 bp, Saccharomyces pastorianus
tcaatttcttggtcgcgtattcctc

SEQ ID NO: 88280 - DNA, 25 bp, Saccharomyces pastorianus
agccgctggttctattgctgtttaa

SEQ ID NO: 88281 - DNA, 25 bp, Saccharomyces pastorianus
gtagccacaatttcagacaaccata

SEQ ID NO: 88282 - DNA, 25 bp, Saccharomyces pastorianus
ataggaattcgtactgcagccgctg

SEQ ID NO: 88283 - DNA, 25 bp, Saccharomyces pastorianus
accaaccttccgtaagacttgcaat

SEQ ID NO: 88284 - DNA, 25 bp, Saccharomyces pastorianus
ttctgatcctggcactcatacgaac

SEQ ID NO: 88285 - DNA, 25 bp, Saccharomyces pastorianus
agaaactttcatcattacccggatg

SEQ ID NO: 88286 - DNA, 25 bp, Saccharomyces pastorianus
ggatgattctctatacgtagccaca

SEQ ID NO: 88287 - DNA, 25 bp, Saccharomyces pastorianus
atacgaacggctctttcttctactt

SEQ ID NO: 88288 - DNA, 25 bp, Saccharomyces pastorianus
gtgttcctccacttgagatggctga

SEQ ID NO: 88289 - DNA, 25 bp, Saccharomyces pastorianus
ttttgctcgcttcgatgtgttcctc

SEQ ID NO: 88290 - DNA, 25 bp, Saccharomyces pastorianus
ttaactctgtcatctttttgctcgc

SEQ ID NO: 88291 - DNA, 25 bp, Saccharomyces pastorianus
gcagcaacaggcaatgtccaacaat

SEQ ID NO: 88292 - DNA, 25 bp, Saccharomyces pastorianus
agagctcaagttcaccaaaacggaa

SEQ ID NO: 88293 - DNA, 25 bp, Saccharomyces pastorianus
atggctttggtaaccagtctcaaca

SEQ ID NO: 88294 - DNA, 25 bp, Saccharomyces pastorianus
agcactagcgtcgtaccaacacaaa

SEQ ID NO: 88295 - DNA, 25 bp, Saccharomyces pastorianus
gatgatccaaaccacaatccgtttt

SEQ ID NO: 88296 - DNA, 25 bp, Saccharomyces pastorianus
ggaaccaactagtagcagcttcttc

SEQ ID NO: 88297 - DNA, 25 bp, Saccharomyces pastorianus
gaatcctataacacccgaagaacta

SEQ ID NO: 88298 - DNA, 25 bp, Saccharomyces pastorianus
ggaggctcgtattcctgcccaacat

SEQ ID NO: 88299 - DNA, 25 bp, Saccharomyces pastorianus
acagtacttagcttctatgcaacag

SEQ ID NO: 88300 - DNA, 25 bp, Saccharomyces pastorianus
gagctactagccacaggaacaggta

SEQ ID NO: 88301 - DNA, 25 bp, Saccharomyces pastorianus
tacaggtttaccaagcactagcgtc

SEQ ID NO: 88302 - DNA, 25 bp, Saccharomyces pastorianus
ccgtggtatcgatattcaagccgtt

SEQ ID NO: 88303 - DNA, 25 bp, Saccharomyces pastorianus
ggcactgaaattgcggctattccgg

SEQ ID NO: 88304 - DNA, 25 bp, Saccharomyces pastorianus
tatcaatttcgatttccccaaaacg

SEQ ID NO: 88305 - DNA, 25 bp, Saccharomyces pastorianus
gtagatccggtaggtttggccactt

SEQ ID NO: 88306 - DNA, 25 bp, Saccharomyces pastorianus
gttccattcccgatagagcaacaga

SEQ ID NO: 88307 - DNA, 25 bp, Saccharomyces pastorianus
ttggccacttgggtttagcaatcaa

SEQ ID NO: 88308 - DNA, 25 bp, Saccharomyces pastorianus
aaggttcgtacattggtctgctccg

SEQ ID NO: 88309 - DNA, 25 bp, Saccharomyces pastorianus
ctccgatttattgacccgtggtatc

SEQ ID NO: 88310 - DNA, 25 bp, Saccharomyces pastorianus
tgacgaaacggtacctgttccattc

SEQ ID NO: 88311 - DNA, 25 bp, Saccharomyces pastorianus
ggctattccggctactatcgataag

SEQ ID NO: 88312 - DNA, 25 bp, Saccharomyces pastorianus
ggctattcctgttattactctcatg

SEQ ID NO: 88313 - DNA, 25 bp, Saccharomyces pastorianus
atcgcccattagttctaagattgtg

SEQ ID NO: 88314 - DNA, 25 bp, Saccharomyces pastorianus
tgcaaaccccaatgttacaatcgcc

SEQ ID NO: 88315 - DNA, 25 bp, Saccharomyces pastorianus
gttacaatcgcccattagttctaag

SEQ ID NO: 88316 - DNA, 25 bp, Saccharomyces pastorianus
tgattgtcttttcttgcaaacccca

SEQ ID NO: 88317 - DNA, 25 bp, Saccharomyces pastorianus
ttgtcttttcttgcaaaccccaatg

SEQ ID NO: 88318 - DNA, 25 bp, Saccharomyces pastorianus
gtcttttcttgcaaaccccaatgtt

SEQ ID NO: 88319 - DNA, 25 bp, Saccharomyces pastorianus
aaaccccaatgttacaatcgcccat

SEQ ID NO: 88320 - DNA, 25 bp, Saccharomyces pastorianus
ttattgatgattgtcttttcttgca

SEQ ID NO: 88321 - DNA, 25 bp, Saccharomyces pastorianus
ttttcttgcaaaccccaatgttaca

SEQ ID NO: 88322 - DNA, 25 bp, Saccharomyces pastorianus
gtacaatcagataataaacactttt

SEQ ID NO: 88323 - DNA, 25 bp, Saccharomyces pastorianus
tagttctaagattgtgttgtccttt

SEQ ID NO: 88324 - DNA, 25 bp, Saccharomyces pastorianus
ggcataacgatacacctgatggcat

SEQ ID NO: 88325 - DNA, 25 bp, Saccharomyces pastorianus
ttgtcaacgagccttcaccaagatt

SEQ ID NO: 88326 - DNA, 25 bp, Saccharomyces pastorianus
gtaactggagagtttcccctaggtg

SEQ ID NO: 88327 - DNA, 25 bp, Saccharomyces pastorianus
tatggcgtactaaatggcttggatc

SEQ ID NO: 88328 - DNA, 25 bp, Saccharomyces pastorianus
aagaccgtatctattccaaggaaat

SEQ ID NO: 88329 - DNA, 25 bp, Saccharomyces pastorianus
aatgatcatcgagctggtaactgga

SEQ ID NO: 88330 - DNA, 25 bp, Saccharomyces pastorianus
aaaagagaagccttggaccgtgcca

SEQ ID NO: 88331 - DNA, 25 bp, Saccharomyces pastorianus
ggcttggatcatttgtaccgacaat

SEQ ID NO: 88332 - DNA, 25 bp, Saccharomyces pastorianus
gaacgtccacttatatgtcaccaga

SEQ ID NO: 88333 - DNA, 25 bp, Saccharomyces pastorianus
ggacgtttggtcattgggcttaatg

SEQ ID NO: 88334 - DNA, 25 bp, Saccharomyces pastorianus
ggatttgctgcaacgtattgtcaac

SEQ ID NO: 88335 - DNA, 25 bp, Saccharomyces pastorianus
atgtagtgccttcaccacagttcca

SEQ ID NO: 88336 - DNA, 25 bp, Saccharomyces pastorianus
actaattggttgatgattgtactgt

SEQ ID NO: 88337 - DNA, 25 bp, Saccharomyces pastorianus
tggcaactattttggaatcaggaac

SEQ ID NO: 88338 - DNA, 25 bp, Saccharomyces pastorianus
gggcttaacgtttttgacgatagat

SEQ ID NO: 88339 - DNA, 25 bp, Saccharomyces pastorianus
gattgtactgttattctgttccaca

SEQ ID NO: 88340 - DNA, 25 bp, Saccharomyces pastorianus
ttccacaggaatggtttttttggca

SEQ ID NO: 88341 - DNA, 25 bp, Saccharomyces pastorianus
tgtactgttattctgttccacagga

SEQ ID NO: 88342 - DNA, 25 bp, Saccharomyces pastorianus
aattccctaactaattggttgatga

SEQ ID NO: 88343 - DNA, 25 bp, Saccharomyces pastorianus
gacgatagataattccctaactaat

SEQ ID NO: 88344 - DNA, 25 bp, Saccharomyces pastorianus
aatcaggaacatgtagtgccttcac

SEQ ID NO: 88345 - DNA, 25 bp, Saccharomyces pastorianus
ggaacatgtagtgccttcaccacag

SEQ ID NO: 88346 - DNA, 25 bp, Saccharomyces pastorianus
gaagccaaaagaggcatttctctga

SEQ ID NO: 88347 - DNA, 25 bp, Saccharomyces pastorianus
gagactatggattgcgttccttgtc

SEQ ID NO: 88348 - DNA, 25 bp, Saccharomyces pastorianus
aaccctccaccacaaaggaagctgg

SEQ ID NO: 88349 - DNA, 25 bp, Saccharomyces pastorianus
taatcgccttcggtttcgttagagg

SEQ ID NO: 88350 - DNA, 25 bp, Saccharomyces pastorianus
gttccttgtcaagtcatgagcacta

SEQ ID NO: 88351 - DNA, 25 bp, Saccharomyces pastorianus
gaggcatttctctgactgaatttga

SEQ ID NO: 88352 - DNA, 25 bp, Saccharomyces pastorianus
atctgggaaaccattcaagtatggt

SEQ ID NO: 88353 - DNA, 25 bp, Saccharomyces pastorianus
tggattgcgttccttgtcaagtcat

SEQ ID NO: 88354 - DNA, 25 bp, Saccharomyces pastorianus
ttgtcaagtcatgagcactatgttt

SEQ ID NO: 88355 - DNA, 25 bp, Saccharomyces pastorianus
gcttcggtgggttattaatcgcctt

SEQ ID NO: 88356 - DNA, 25 bp, Saccharomyces pastorianus
atattttggcagtgttcaaccctcc

SEQ ID NO: 88357 - DNA, 25 bp, Saccharomyces pastorianus
agtttcttactcaccgacagatggc

SEQ ID NO: 88358 - DNA, 25 bp, Saccharomyces pastorianus
atcccagtcatgaagttgtctccac

SEQ ID NO: 88359 - DNA, 25 bp, Saccharomyces pastorianus
gattgccaccggatcacttgataga

SEQ ID NO: 88360 - DNA, 25 bp, Saccharomyces pastorianus
tcaagattgagcgtctccgcagttt

SEQ ID NO: 88361 - DNA, 25 bp, Saccharomyces pastorianus
gaattcaccacgtttgacacaagag

SEQ ID NO: 88362 - DNA, 25 bp, Saccharomyces pastorianus
gcaggtggcaattctagcggcaaaa

SEQ ID NO: 88363 - DNA, 25 bp, Saccharomyces pastorianus
atgacgataccatccgcttattcga

SEQ ID NO: 88364 - DNA, 25 bp, Saccharomyces pastorianus
gttgtctccacatatgactcaagat

SEQ ID NO: 88365 - DNA, 25 bp, Saccharomyces pastorianus
gggatcacctttctgcgaagttgga

SEQ ID NO: 88366 - DNA, 25 bp, Saccharomyces pastorianus
tcctatgagaccctacgagattgcc

SEQ ID NO: 88367 - DNA, 25 bp, Saccharomyces pastorianus
gctgtaattagttggcacccgctgc

SEQ ID NO: 88368 - DNA, 25 bp, Saccharomyces pastorianus
gcctggtccgatgtcatttttacga

SEQ ID NO: 88369 - DNA, 25 bp, Saccharomyces pastorianus
aagttccaacttgtgggtgcagcct

SEQ ID NO: 88370 - DNA, 25 bp, Saccharomyces pastorianus
aaactgctactcaaggaacgacctg

SEQ ID NO: 88371 - DNA, 25 bp, Saccharomyces pastorianus
aaattcttccgttggccaccattat

SEQ ID NO: 88372 - DNA, 25 bp, Saccharomyces pastorianus
gcgcacgtctactattccaattata

SEQ ID NO: 88373 - DNA, 25 bp, Saccharomyces pastorianus
acctgaaactctatatctctgcatt

SEQ ID NO: 88374 - DNA, 25 bp, Saccharomyces pastorianus
ttgcattcttcacagatcgtagcga

SEQ ID NO: 88375 - DNA, 25 bp, Saccharomyces pastorianus
cctcactcttcattgctgctaaata

SEQ ID NO: 88376 - DNA, 25 bp, Saccharomyces pastorianus
aaaatcagtggtctctggcgcacgt

SEQ ID NO: 88377 - DNA, 25 bp, Saccharomyces pastorianus
gttagctgctggtgcatactttcta

SEQ ID NO: 88378 - DNA, 25 bp, Saccharomyces pastorianus
atttgaattgggttggcctggtccg

SEQ ID NO: 88379 - DNA, 25 bp, Saccharomyces pastorianus
gatgaatatactctttgggctaacg

SEQ ID NO: 88380 - DNA, 25 bp, Saccharomyces pastorianus
gtgctcagagacattatcgacatca

SEQ ID NO: 88381 - DNA, 25 bp, Saccharomyces pastorianus
atatcaagacgctgacggccaacaa

SEQ ID NO: 88382 - DNA, 25 bp, Saccharomyces pastorianus
gaaaaccacatcatccctaaactaa

SEQ ID NO: 88383 - DNA, 25 bp, Saccharomyces pastorianus
ggacgatggaatttcacggccaatt

SEQ ID NO: 88384 - DNA, 25 bp, Saccharomyces pastorianus
tggatgctgacaacgacactgaaga

SEQ ID NO: 88385 - DNA, 25 bp, Saccharomyces pastorianus
ggagacctcgtagacctgaaaactg

SEQ ID NO: 88386 - DNA, 25 bp, Saccharomyces pastorianus
gttcatcgagtatatccgccaaata

SEQ ID NO: 88387 - DNA, 25 bp, Saccharomyces pastorianus
gattgcaatcctgttcatcgagtat

SEQ ID NO: 88388 - DNA, 25 bp, Saccharomyces pastorianus
atggagcgccacaaactagcagacg

SEQ ID NO: 88389 - DNA, 25 bp, Saccharomyces pastorianus
aatctccatggtgccttaaaaggac

SEQ ID NO: 88390 - DNA, 25 bp, Saccharomyces pastorianus
gccattggaatttcccggtgacaaa

SEQ ID NO: 88391 - DNA, 25 bp, Saccharomyces pastorianus
tacagtgccgtatcaaaattcattg

SEQ ID NO: 88392 - DNA, 25 bp, Saccharomyces pastorianus
gggttgcgatatgtccagtatatca

SEQ ID NO: 88393 - DNA, 25 bp, Saccharomyces pastorianus
ggaaagtgaagcacctagtgggttt

SEQ ID NO: 88394 - DNA, 25 bp, Saccharomyces pastorianus
aagagtctttgggtctaagttcaga

SEQ ID NO: 88395 - DNA, 25 bp, Saccharomyces pastorianus
agtaccgactttagtcaattcgaag

SEQ ID NO: 88396 - DNA, 25 bp, Saccharomyces pastorianus
tatcacatttgatcttaccaacgaa

SEQ ID NO: 88397 - DNA, 25 bp, Saccharomyces pastorianus
atgctcctaataccaagaccaaacc

SEQ ID NO: 88398 - DNA, 25 bp, Saccharomyces pastorianus
acgatcagtataaagtttcagccaa

SEQ ID NO: 88399 - DNA, 25 bp, Saccharomyces pastorianus
gatgataaaactaaccacttgactt

SEQ ID NO: 88400 - DNA, 25 bp, Saccharomyces pastorianus
aagttcagacgtcttgccattggaa

SEQ ID NO: 88401 - DNA, 25 bp, Saccharomyces pastorianus
gaccttctatggtcagaccctgacg

SEQ ID NO: 88402 - DNA, 25 bp, Saccharomyces pastorianus
taaaattttctgtctgcatggagga

SEQ ID NO: 88403 - DNA, 25 bp, Saccharomyces pastorianus
gcagctatcatggaagtggacgaga

SEQ ID NO: 88404 - DNA, 25 bp, Saccharomyces pastorianus
ggactttcccccatgatagaaacca

SEQ ID NO: 88405 - DNA, 25 bp, Saccharomyces pastorianus
gatgtggtaatcaagcagctatcat

SEQ ID NO: 88406 - DNA, 25 bp, Saccharomyces pastorianus
ttctgtctgcatggaggactttccc

SEQ ID NO: 88407 - DNA, 25 bp, Saccharomyces pastorianus
gtgctcctaattactgctacagatg

SEQ ID NO: 88408 - DNA, 25 bp, Saccharomyces pastorianus
atacccacatagaattacgatactg

SEQ ID NO: 88409 - DNA, 25 bp, Saccharomyces pastorianus
aaatgttcacagatcttttcgatta

SEQ ID NO: 88410 - DNA, 25 bp, Saccharomyces pastorianus
gattattttcctataaccgcattag

SEQ ID NO: 88411 - DNA, 25 bp, Saccharomyces pastorianus
gatactgagaggcaatcacgagtct

SEQ ID NO: 88412 - DNA, 25 bp, Saccharomyces pastorianus
agagaactagaagacttaagagaaa

SEQ ID NO: 88413 - DNA, 25 bp, Saccharomyces pastorianus
gaaagaagagaactagaagacttaa

SEQ ID NO: 88414 - DNA, 25 bp, Saccharomyces pastorianus
gaagagaactagaagacttaagaga

SEQ ID NO: 88415 - DNA, 25 bp, Saccharomyces pastorianus
gagaaagaagagaactagaagactt

SEQ ID NO: 88416 - DNA, 25 bp, Saccharomyces pastorianus
aagagaactagaagacttaagagaa

SEQ ID NO: 88417 - DNA, 25 bp, Saccharomyces pastorianus
ggagaaagaagagaactagaagact

SEQ ID NO: 88418 - DNA, 25 bp, Saccharomyces pastorianus
aagaagagaactagaagacttaaga

SEQ ID NO: 88419 - DNA, 25 bp, Saccharomyces pastorianus
aaagaagagaactagaagacttaag

SEQ ID NO: 88420 - DNA, 25 bp, Saccharomyces pastorianus
agaagagaactagaagacttaagag

SEQ ID NO: 88421 - DNA, 25 bp, Saccharomyces pastorianus
gagaactagaagacttaagagaaag

SEQ ID NO: 88422 - DNA, 25 bp, Saccharomyces pastorianus
attgaacttgaatttgacggatgat

SEQ ID NO: 88423 - DNA, 25 bp, Saccharomyces pastorianus
ttccatgcagaattgagcaccccat

SEQ ID NO: 88424 - DNA, 25 bp, Saccharomyces pastorianus
agggtacagatgacgacaatatcga

SEQ ID NO: 88425 - DNA, 25 bp, Saccharomyces pastorianus
gactaactggttggaatgcaatcaa

SEQ ID NO: 88426 - DNA, 25 bp, Saccharomyces pastorianus
agatctaaatacaagctgcacaaga

SEQ ID NO: 88427 - DNA, 25 bp, Saccharomyces pastorianus
gggtgatgtcagaccgctaaatatt

SEQ ID NO: 88428 - DNA, 25 bp, Saccharomyces pastorianus
tccattatcaaggacttccatgcag

SEQ ID NO: 88429 - DNA, 25 bp, Saccharomyces pastorianus
caatatcgatatttccaatgggcat

SEQ ID NO: 88430 - DNA, 25 bp, Saccharomyces pastorianus
ttgagcaccccatttttaaaaccag

SEQ ID NO: 88431 - DNA, 25 bp, Saccharomyces pastorianus
caccagactatgtcagatctaaata

SEQ ID NO: 88432 - DNA, 25 bp, Saccharomyces pastorianus
gcaatcaaatcaagagtcgaccaat

SEQ ID NO: 88433 - DNA, 25 bp, Saccharomyces pastorianus
aaagaggattattatgccagacaac

SEQ ID NO: 88434 - DNA, 25 bp, Saccharomyces pastorianus
accgttgcatttcccgtaataccag

SEQ ID NO: 88435 - DNA, 25 bp, Saccharomyces pastorianus
ctttatcaagagagaacgtgccaaa

SEQ ID NO: 88436 - DNA, 25 bp, Saccharomyces pastorianus
tggtgccggacctggtaatcctcaa

SEQ ID NO: 88437 - DNA, 25 bp, Saccharomyces pastorianus
ggctgccagtaaacctaagaattgt

SEQ ID NO: 88438 - DNA, 25 bp, Saccharomyces pastorianus
gacctggtaatcctcaagatatctt

SEQ ID NO: 88439 - DNA, 25 bp, Saccharomyces pastorianus
tttcccgtaataccaggctgccagt

SEQ ID NO: 88440 - DNA, 25 bp, Saccharomyces pastorianus
acaagagagggaacaattagcacat

SEQ ID NO: 88441 - DNA, 25 bp, Saccharomyces pastorianus
acctaagaattgtctctcgctttta

SEQ ID NO: 88442 - DNA, 25 bp, Saccharomyces pastorianus
ctcgcttttattcagatggtcctct

SEQ ID NO: 88443 - DNA, 25 bp, Saccharomyces pastorianus
attcagatggtcctctcggtggtgc

SEQ ID NO: 88444 - DNA, 25 bp, Saccharomyces pastorianus
gagttaagggccacctcagagggaa

SEQ ID NO: 88445 - DNA, 25 bp, Saccharomyces pastorianus
gcgtaaactgtcattgccaggacta

SEQ ID NO: 88446 - DNA, 25 bp, Saccharomyces pastorianus
aggtgtatcgccgaactcatggaaa

SEQ ID NO: 88447 - DNA, 25 bp, Saccharomyces pastorianus
catctcactggatgttacaggccca

SEQ ID NO: 88448 - DNA, 25 bp, Saccharomyces pastorianus
tatccactggcgctaggctagaagg

SEQ ID NO: 88449 - DNA, 25 bp, Saccharomyces pastorianus
ttacaggcccagctatcggagttaa

SEQ ID NO: 88450 - DNA, 25 bp, Saccharomyces pastorianus
gcaggttccgcagagttgagaccac

SEQ ID NO: 88451 - DNA, 25 bp, Saccharomyces pastorianus
ttgagaccacttcttgaacgacctt

SEQ ID NO: 88452 - DNA, 25 bp, Saccharomyces pastorianus
taacaggtctttagcatccacatct

SEQ ID NO: 88453 - DNA, 25 bp, Saccharomyces pastorianus
ccaggactagcgcaaagaccattat

SEQ ID NO: 88454 - DNA, 25 bp, Saccharomyces pastorianus
gagaacaataaaccgcatccgagga

SEQ ID NO: 88455 - DNA, 25 bp, Saccharomyces pastorianus
atctgggccttgttcatctgatttc

SEQ ID NO: 88456 - DNA, 25 bp, Saccharomyces pastorianus
ttcgaatcgtcctcaaaactcgcag

SEQ ID NO: 88457 - DNA, 25 bp, Saccharomyces pastorianus
gatttcctcctgaatgtattgctaa

SEQ ID NO: 88458 - DNA, 25 bp, Saccharomyces pastorianus
tattgctaacgctactgggattttt

SEQ ID NO: 88459 - DNA, 25 bp, Saccharomyces pastorianus
agctccgctagaaacgtatacccga

SEQ ID NO: 88460 - DNA, 25 bp, Saccharomyces pastorianus
gttgtaccgtttctgactttatact

SEQ ID NO: 88461 - DNA, 25 bp, Saccharomyces pastorianus
gttgctactgtgtttgttgtaccgt

SEQ ID NO: 88462 - DNA, 25 bp, Saccharomyces pastorianus
ggcagctccccatgacaacaaacag

SEQ ID NO: 88463 - DNA, 25 bp, Saccharomyces pastorianus
gatttttgcccggtatgttacacgc

SEQ ID NO: 88464 - DNA, 25 bp, Saccharomyces pastorianus
agctgcagtccttcttcgatctggg

SEQ ID NO: 88465 - DNA, 25 bp, Saccharomyces pastorianus
gagcgttgaaactcctctgttacaa

SEQ ID NO: 88466 - DNA, 25 bp, Saccharomyces pastorianus
gcattgttgccattgttttctggca

SEQ ID NO: 88467 - DNA, 25 bp, Saccharomyces pastorianus
gtctgcaacagcacagtcagcgact

SEQ ID NO: 88468 - DNA, 25 bp, Saccharomyces pastorianus
atgacagtgcaagtgcctcttccgc

SEQ ID NO: 88469 - DNA, 25 bp, Saccharomyces pastorianus
gaaagccttggccatgacagtgcaa

SEQ ID NO: 88470 - DNA, 25 bp, Saccharomyces pastorianus
gattgctttcattgcattgttgcca

SEQ ID NO: 88471 - DNA, 25 bp, Saccharomyces pastorianus
aaaccgaaatcgtctgcaacagcac

SEQ ID NO: 88472 - DNA, 25 bp, Saccharomyces pastorianus
gttttctggcatcggtacattcaaa

SEQ ID NO: 88473 - DNA, 25 bp, Saccharomyces pastorianus
tttcgatttcgatattgatgaccta

SEQ ID NO: 88474 - DNA, 25 bp, Saccharomyces pastorianus
cctcttccgcttccagaaaatttga

SEQ ID NO: 88475 - DNA, 25 bp, Saccharomyces pastorianus
agtcagcgactggtaagcttggtaa

SEQ ID NO: 88476 - DNA, 25 bp, Saccharomyces pastorianus
ggttattttttacttctcattattg

SEQ ID NO: 88477 - DNA, 25 bp, Saccharomyces pastorianus
gttcgagtcagctctgtagtgggca

SEQ ID NO: 88478 - DNA, 25 bp, Saccharomyces pastorianus
cgcaagtttagttcgagtcagctct

SEQ ID NO: 88479 - DNA, 25 bp, Saccharomyces pastorianus
gtccgggcctaacagatttgacctt

SEQ ID NO: 88480 - DNA, 25 bp, Saccharomyces pastorianus
ttaagcggtctctcgcaagtttagt

SEQ ID NO: 88481 - DNA, 25 bp, Saccharomyces pastorianus
gcagatgactacctagaccatttac

SEQ ID NO: 88482 - DNA, 25 bp, Saccharomyces pastorianus
gagaacgtgccagattttgtccagc

SEQ ID NO: 88483 - DNA, 25 bp, Saccharomyces pastorianus
gttgtgcctcaagaagtgttaaact

SEQ ID NO: 88484 - DNA, 25 bp, Saccharomyces pastorianus
atttggttggcatcaccattgtccg

SEQ ID NO: 88485 - DNA, 25 bp, Saccharomyces pastorianus
gatgtagagctaagccatggcgtaa

SEQ ID NO: 88486 - DNA, 25 bp, Saccharomyces pastorianus
gccagattttgtccagctgtaacaa

SEQ ID NO: 88487 - DNA, 25 bp, Saccharomyces pastorianus
gacagatggtcaagttgtgcctcaa

SEQ ID NO: 88488 - DNA, 25 bp, Saccharomyces pastorianus
gcagtagcttaccacgattaacgat

SEQ ID NO: 88489 - DNA, 25 bp, Saccharomyces pastorianus
taacggcaccgttcgacaccataaa

SEQ ID NO: 88490 - DNA, 25 bp, Saccharomyces pastorianus
attactgcccatggtattaccttct

SEQ ID NO: 88491 - DNA, 25 bp, Saccharomyces pastorianus
aaggccttgagtgcaggtattgcgt

SEQ ID NO: 88492 - DNA, 25 bp, Saccharomyces pastorianus
gtaaatacaacaagcgccgtactat

SEQ ID NO: 88493 - DNA, 25 bp, Saccharomyces pastorianus
ggatttactacttatacctctacaa

SEQ ID NO: 88494 - DNA, 25 bp, Saccharomyces pastorianus
gttatataaccatgcctatcaccgt

SEQ ID NO: 88495 - DNA, 25 bp, Saccharomyces pastorianus
agacgctccctatgcaggtttgtat

SEQ ID NO: 88496 - DNA, 25 bp, Saccharomyces pastorianus
ccatcaaaatttaccaactccttca

SEQ ID NO: 88497 - DNA, 25 bp, Saccharomyces pastorianus
gctacttgtttaagagacgctccct

SEQ ID NO: 88498 - DNA, 25 bp, Saccharomyces pastorianus
tatcaccgtcattaaagtccgttat

SEQ ID NO: 88499 - DNA, 25 bp, Saccharomyces pastorianus
aatgtagctttcttgtcttgctgga

SEQ ID NO: 88500 - DNA, 25 bp, Saccharomyces pastorianus
gctcagtcatgtatgctgcttcaca

SEQ ID NO: 88501 - DNA, 25 bp, Saccharomyces pastorianus
taatgaaggcacagcattcctcctc

SEQ ID NO: 88502 - DNA, 25 bp, Saccharomyces pastorianus
taaggcgctgcctattgatgttcgt

SEQ ID NO: 88503 - DNA, 25 bp, Saccharomyces pastorianus
caaattgtgtaccttctagttgttc

SEQ ID NO: 88504 - DNA, 25 bp, Saccharomyces pastorianus
ttggcttagttgcttgctcagtcat

SEQ ID NO: 88505 - DNA, 25 bp, Saccharomyces pastorianus
gcattcctcctctttgccaaagatg

SEQ ID NO: 88506 - DNA, 25 bp, Saccharomyces pastorianus
agggctgtctatctctttcaaattt

SEQ ID NO: 88507 - DNA, 25 bp, Saccharomyces pastorianus
tgctggattctcgtcttcaaaaggt

SEQ ID NO: 88508 - DNA, 25 bp, Saccharomyces pastorianus
aatgcgatgaatttcttggcttagt

SEQ ID NO: 88509 - DNA, 25 bp, Saccharomyces pastorianus
gtaatgtacctctccatagctgtag

SEQ ID NO: 88510 - DNA, 25 bp, Saccharomyces pastorianus
gaactagtcaagagcgatcctcact

SEQ ID NO: 88511 - DNA, 25 bp, Saccharomyces pastorianus
gagtattgccaatatccatccactg

SEQ ID NO: 88512 - DNA, 25 bp, Saccharomyces pastorianus
gaagttattcaaagtccctccgatg

SEQ ID NO: 88513 - DNA, 25 bp, Saccharomyces pastorianus
atggcaataaaatcaccctcgggaa

SEQ ID NO: 88514 - DNA, 25 bp, Saccharomyces pastorianus
ctttagtgatcgctgactctggtat

SEQ ID NO: 88515 - DNA, 25 bp, Saccharomyces pastorianus
gatcctcactttccttatggtacct

SEQ ID NO: 88516 - DNA, 25 bp, Saccharomyces pastorianus
gaatatggaactcgcactgacccaa

SEQ ID NO: 88517 - DNA, 25 bp, Saccharomyces pastorianus
agaagcttcatctgcgtacaggaat

SEQ ID NO: 88518 - DNA, 25 bp, Saccharomyces pastorianus
ttgaagtctttgcatccgtggttat

SEQ ID NO: 88519 - DNA, 25 bp, Saccharomyces pastorianus
ttaaaatcaaagagcccggcgtctg

SEQ ID NO: 88520 - DNA, 25 bp, Saccharomyces pastorianus
gagctatacattgtcgagccacaga

SEQ ID NO: 88521 - DNA, 25 bp, Saccharomyces pastorianus
aattcagggatctaatgggtaccac

SEQ ID NO: 88522 - DNA, 25 bp, Saccharomyces pastorianus
gcccgttcagacgatgaggattcta

SEQ ID NO: 88523 - DNA, 25 bp, Saccharomyces pastorianus
attgcatcactacccagtttagatt

SEQ ID NO: 88524 - DNA, 25 bp, Saccharomyces pastorianus
aaagtgatcccaatgaagcccgttc

SEQ ID NO: 88525 - DNA, 25 bp, Saccharomyces pastorianus
tttccgacggatgttgatgacccat

SEQ ID NO: 88526 - DNA, 25 bp, Saccharomyces pastorianus
ggatgttgatgacccattggcgcat

SEQ ID NO: 88527 - DNA, 25 bp, Saccharomyces pastorianus
gagcaggttttcctcttggaatgac

SEQ ID NO: 88528 - DNA, 25 bp, Saccharomyces pastorianus
agatctattctatttggtagcgaag

SEQ ID NO: 88529 - DNA, 25 bp, Saccharomyces pastorianus
cattggcgcatcatagggacagaat

SEQ ID NO: 88530 - DNA, 25 bp, Saccharomyces pastorianus
gaatttcattgacttggatggccaa

SEQ ID NO: 88531 - DNA, 25 bp, Saccharomyces pastorianus
gggatctttttaacaggcttggagg

SEQ ID NO: 88532 - DNA, 25 bp, Saccharomyces pastorianus
tcttttcccctcatcaattactgaa

SEQ ID NO: 88533 - DNA, 25 bp, Saccharomyces pastorianus
gaattgtcccagatgaacttagtta

SEQ ID NO: 88534 - DNA, 25 bp, Saccharomyces pastorianus
atcaattactgaattgtcccagatg

SEQ ID NO: 88535 - DNA, 25 bp, Saccharomyces pastorianus
tttcccctcatcaattactgaattg

SEQ ID NO: 88536 - DNA, 25 bp, Saccharomyces pastorianus
aattactgaattgtcccagatgaac

SEQ ID NO: 88537 - DNA, 25 bp, Saccharomyces pastorianus
attgtcccagatgaacttagttagt

SEQ ID NO: 88538 - DNA, 25 bp, Saccharomyces pastorianus
ttactgaattgtcccagatgaactt

SEQ ID NO: 88539 - DNA, 25 bp, Saccharomyces pastorianus
gatgaacttagttagtcaaacgcat

SEQ ID NO: 88540 - DNA, 25 bp, Saccharomyces pastorianus
gaacttagttagtcaaacgcatttt

SEQ ID NO: 88541 - DNA, 25 bp, Saccharomyces pastorianus
gtcccagatgaacttagttagtcaa

SEQ ID NO: 88542 - DNA, 25 bp, Saccharomyces pastorianus
cttttcccctcatcaattactgaat

SEQ ID NO: 88543 - DNA, 25 bp, Saccharomyces pastorianus
tctggaacgccctaataataataca

SEQ ID NO: 88544 - DNA, 25 bp, Saccharomyces pastorianus
atggtggcaaactattcaatggatt

SEQ ID NO: 88545 - DNA, 25 bp, Saccharomyces pastorianus
acagttggagaagctggaagcgcaa

SEQ ID NO: 88546 - DNA, 25 bp, Saccharomyces pastorianus
gaacaactgtctgaatcattggaag

SEQ ID NO: 88547 - DNA, 25 bp, Saccharomyces pastorianus
aaacagatccgcataccgcaagtat

SEQ ID NO: 88548 - DNA, 25 bp, Saccharomyces pastorianus
aaatgaccagctacctaaatattct

SEQ ID NO: 88549 - DNA, 25 bp, Saccharomyces pastorianus
ggaggtcatttcaaaagtcatcaaa

SEQ ID NO: 88550 - DNA, 25 bp, Saccharomyces pastorianus
tacaggtagcggtgggaaatcatat

SEQ ID NO: 88551 - DNA, 25 bp, Saccharomyces pastorianus
atgagaaattatgcccgtcaaaatt

SEQ ID NO: 88552 - DNA, 25 bp, Saccharomyces pastorianus
atctgttcatatggcaacttctgca

SEQ ID NO: 88553 - DNA, 25 bp, Saccharomyces pastorianus
aatgagcccttaaatgaatctgttc

SEQ ID NO: 88554 - DNA, 25 bp, Saccharomyces pastorianus
atcacattcacacccagtttcttta

SEQ ID NO: 88555 - DNA, 25 bp, Saccharomyces pastorianus
agcttgacattaatccgcctttagt

SEQ ID NO: 88556 - DNA, 25 bp, Saccharomyces pastorianus
gaaacttatttcagcttttgacgac

SEQ ID NO: 88557 - DNA, 25 bp, Saccharomyces pastorianus
gagtagattcctcaatgttgcaatt

SEQ ID NO: 88558 - DNA, 25 bp, Saccharomyces pastorianus
gttctggtcatttcatcacattcac

SEQ ID NO: 88559 - DNA, 25 bp, Saccharomyces pastorianus
gatgacgcgctggtagtagagacaa

SEQ ID NO: 88560 - DNA, 25 bp, Saccharomyces pastorianus
atggcctaatcatttcctggtctaa

SEQ ID NO: 88561 - DNA, 25 bp, Saccharomyces pastorianus
ggaagaacttcctacgtttcatgat

SEQ ID NO: 88562 - DNA, 25 bp, Saccharomyces pastorianus
ttcagcgttgaactccacataccta

SEQ ID NO: 88563 - DNA, 25 bp, Saccharomyces pastorianus
aatatgctattggaccctgcagcca

SEQ ID NO: 88564 - DNA, 25 bp, Saccharomyces pastorianus
gagacaatcacttctttactgaaca

SEQ ID NO: 88565 - DNA, 25 bp, Saccharomyces pastorianus
agggccctgacgttgacatggacaa

SEQ ID NO: 88566 - DNA, 25 bp, Saccharomyces pastorianus
agggtgctgacgaccgtcttgaagc

SEQ ID NO: 88567 - DNA, 25 bp, Saccharomyces pastorianus
aggacaacaccaacaagggccctga

SEQ ID NO: 88568 - DNA, 25 bp, Saccharomyces pastorianus
gtcttgaagctgacgacagcgacga

SEQ ID NO: 88569 - DNA, 25 bp, Saccharomyces pastorianus
agacctggcgctgtacaaggactct

SEQ ID NO: 88570 - DNA, 25 bp, Saccharomyces pastorianus
gtatatagaaagacgggccatggca

SEQ ID NO: 88571 - DNA, 25 bp, Saccharomyces pastorianus
gcgacgacttggagaacattgattc

SEQ ID NO: 88572 - DNA, 25 bp, Saccharomyces pastorianus
caatcatttgcagaggtctaccgcc

SEQ ID NO: 88573 - DNA, 25 bp, Saccharomyces pastorianus
taagacggcgataagcggcatgtcc

SEQ ID NO: 88574 - DNA, 25 bp, Saccharomyces pastorianus
taccgcccgcttgggtaaatacata

SEQ ID NO: 88575 - DNA, 25 bp, Saccharomyces pastorianus
acattgattcgggagacctggcgct

SEQ ID NO: 88576 - DNA, 25 bp, Saccharomyces pastorianus
agaaaagaatttaccgcctccatca

SEQ ID NO: 88577 - DNA, 25 bp, Saccharomyces pastorianus
gtattgctgaaaccagatgcccaca

SEQ ID NO: 88578 - DNA, 25 bp, Saccharomyces pastorianus
ggaaatcatagcacgacgctggcac

SEQ ID NO: 88579 - DNA, 25 bp, Saccharomyces pastorianus
aggcaaagttcttctcagatcccga

SEQ ID NO: 88580 - DNA, 25 bp, Saccharomyces pastorianus
aaagagatgacccaatcgccttacc

SEQ ID NO: 88581 - DNA, 25 bp, Saccharomyces pastorianus
gatcccgatgcaagggtcgcaacaa

SEQ ID NO: 88582 - DNA, 25 bp, Saccharomyces pastorianus
gaatgcttccgtcatcaaatccatg

SEQ ID NO: 88583 - DNA, 25 bp, Saccharomyces pastorianus
gaaggttttccaacgcttacggctg

SEQ ID NO: 88584 - DNA, 25 bp, Saccharomyces pastorianus
aaacaagttctactcatggctcacc

SEQ ID NO: 88585 - DNA, 25 bp, Saccharomyces pastorianus
ggaatagtctccacagctagccagc

SEQ ID NO: 88586 - DNA, 25 bp, Saccharomyces pastorianus
tgaagtctgtgcttctatcaccatg

SEQ ID NO: 88587 - DNA, 25 bp, Saccharomyces pastorianus
gatcatgatctgttatcgagttcga

SEQ ID NO: 88588 - DNA, 25 bp, Saccharomyces pastorianus
ggatgatacgctcaatttactggat

SEQ ID NO: 88589 - DNA, 25 bp, Saccharomyces pastorianus
gcccctccctttctgaatacaaatt

SEQ ID NO: 88590 - DNA, 25 bp, Saccharomyces pastorianus
cactgctgcagttccacaacagaat

SEQ ID NO: 88591 - DNA, 25 bp, Saccharomyces pastorianus
gtgaactcccaaatactccagattt

SEQ ID NO: 88592 - DNA, 25 bp, Saccharomyces pastorianus
tttaccgactgatagtgaactccca

SEQ ID NO: 88593 - DNA, 25 bp, Saccharomyces pastorianus
atgatcatttgttgtctttaccgac

SEQ ID NO: 88594 - DNA, 25 bp, Saccharomyces pastorianus
ggtccatatgtgatgatttctcaga

SEQ ID NO: 88595 - DNA, 25 bp, Saccharomyces pastorianus
agattctctcttcttcgatcatgat

SEQ ID NO: 88596 - DNA, 25 bp, Saccharomyces pastorianus
agaacatttatccaacgatgctgat

SEQ ID NO: 88597 - DNA, 25 bp, Saccharomyces pastorianus
tggatactaccgtcaacagcaataa

SEQ ID NO: 88598 - DNA, 25 bp, Saccharomyces pastorianus
agcaagaaactacccctgaacaggt

SEQ ID NO: 88599 - DNA, 25 bp, Saccharomyces pastorianus
tcctctttcaaagcgacatctatga

SEQ ID NO: 88600 - DNA, 25 bp, Saccharomyces pastorianus
gagacaaaggcgtcgtgccgctcat

SEQ ID NO: 88601 - DNA, 25 bp, Saccharomyces pastorianus
gtgccgctcatcagaatcacattat

SEQ ID NO: 88602 - DNA, 25 bp, Saccharomyces pastorianus
tcagcattctttaaattccacacag

SEQ ID NO: 88603 - DNA, 25 bp, Saccharomyces pastorianus
gttatctacagcagttttctcacta

SEQ ID NO: 88604 - DNA, 25 bp, Saccharomyces pastorianus
aagccacgagtgttaactcaacgaa

SEQ ID NO: 88605 - DNA, 25 bp, Saccharomyces pastorianus
taaaaatgccccaattaccgaccat

SEQ ID NO: 88606 - DNA, 25 bp, Saccharomyces pastorianus
caaattcattctcgcgatccatcga

SEQ ID NO: 88607 - DNA, 25 bp, Saccharomyces pastorianus
aaagatcaccgctgagaaaatcact

SEQ ID NO: 88608 - DNA, 25 bp, Saccharomyces pastorianus
aggtgctctctacaatactataagt

SEQ ID NO: 88609 - DNA, 25 bp, Saccharomyces pastorianus
taaaactagaaatgcccagtccgtt

SEQ ID NO: 88610 - DNA, 25 bp, Saccharomyces pastorianus
tcctcctatggacctttgtagtgac

SEQ ID NO: 88611 - DNA, 25 bp, Saccharomyces pastorianus
tacaggaatctgttttcgaccatat

SEQ ID NO: 88612 - DNA, 25 bp, Saccharomyces pastorianus
ggcaatggccattgaatgacctatt

SEQ ID NO: 88613 - DNA, 25 bp, Saccharomyces pastorianus
aatgtggcagagagcttggattcaa

SEQ ID NO: 88614 - DNA, 25 bp, Saccharomyces pastorianus
gaacgcgaaatacggtcaattgcat

SEQ ID NO: 88615 - DNA, 25 bp, Saccharomyces pastorianus
tcgttttcagcatttatcacagcat

SEQ ID NO: 88616 - DNA, 25 bp, Saccharomyces pastorianus
aatccaggaactgccagaacgcgaa

SEQ ID NO: 88617 - DNA, 25 bp, Saccharomyces pastorianus
gaagcacgtgctcaagtcacaaccg

SEQ ID NO: 88618 - DNA, 25 bp, Saccharomyces pastorianus
aacatgctttcgttttcgttttcag

SEQ ID NO: 88619 - DNA, 25 bp, Saccharomyces pastorianus
aactctattatgatcggctgggcag

SEQ ID NO: 88620 - DNA, 25 bp, Saccharomyces pastorianus
gtctttgacactgtaccactgaaca

SEQ ID NO: 88621 - DNA, 25 bp, Saccharomyces pastorianus
ggcaagtacactaagcctaccgaac

SEQ ID NO: 88622 - DNA, 25 bp, Saccharomyces pastorianus
aatcctgagaccagcagactagcat

SEQ ID NO: 88623 - DNA, 25 bp, Saccharomyces pastorianus
actagtcgaagtttccagcaaattg

SEQ ID NO: 88624 - DNA, 25 bp, Saccharomyces pastorianus
gaatatgccatatcacattgcgaag

SEQ ID NO: 88625 - DNA, 25 bp, Saccharomyces pastorianus
accactgaacaagtttgggtgctta

SEQ ID NO: 88626 - DNA, 25 bp, Saccharomyces pastorianus
gcaggtgaaaacctatcccagttca

SEQ ID NO: 88627 - DNA, 25 bp, Saccharomyces pastorianus
gatggcttattaaaactacgcgcag

SEQ ID NO: 88628 - DNA, 25 bp, Saccharomyces pastorianus
actacgcgcaggcaacattgtaaat

SEQ ID NO: 88629 - DNA, 25 bp, Saccharomyces pastorianus
cagcttatgatagtgttaccggcaa

SEQ ID NO: 88630 - DNA, 25 bp, Saccharomyces pastorianus
atggcttcgaactggccaccaaagc

SEQ ID NO: 88631 - DNA, 25 bp, Saccharomyces pastorianus
gttaattccatcattgtcaaccaat

SEQ ID NO: 88632 - DNA, 25 bp, Saccharomyces pastorianus
gagaccatcagacaacaattcacgg

SEQ ID NO: 88633 - DNA, 25 bp, Saccharomyces pastorianus
atataaccctattactgatggcaaa

SEQ ID NO: 88634 - DNA, 25 bp, Saccharomyces pastorianus
ggatcctgacctaacgacttttgtt

SEQ ID NO: 88635 - DNA, 25 bp, Saccharomyces pastorianus
ctaaactcttttatgggcgcaggta

SEQ ID NO: 88636 - DNA, 25 bp, Saccharomyces pastorianus
cgacttttgtttgcgtttgtatcag

SEQ ID NO: 88637 - DNA, 25 bp, Saccharomyces pastorianus
aatgccattatgtgctggagaaatc

SEQ ID NO: 88638 - DNA, 25 bp, Saccharomyces pastorianus
gttatttttgacactgctccaactg

SEQ ID NO: 88639 - DNA, 25 bp, Saccharomyces pastorianus
gatttccatgtcgttaaaatgccat

SEQ ID NO: 88640 - DNA, 25 bp, Saccharomyces pastorianus
aagttctcacagttcctaaacaaag

SEQ ID NO: 88641 - DNA, 25 bp, Saccharomyces pastorianus
gctccaactggccacacattaagat

SEQ ID NO: 88642 - DNA, 25 bp, Saccharomyces pastorianus
taatctaactccctcacaatctgta

SEQ ID NO: 88643 - DNA, 25 bp, Saccharomyces pastorianus
agacgatttatttgccaatgacggc

SEQ ID NO: 88644 - DNA, 25 bp, Saccharomyces pastorianus
taccacagcaactcctattcaattt

SEQ ID NO: 88645 - DNA, 25 bp, Saccharomyces pastorianus
gaaactactgtcgatgacctacagg

SEQ ID NO: 88646 - DNA, 25 bp, Saccharomyces pastorianus
aagtggatcgcgttatgctgaacaa

SEQ ID NO: 88647 - DNA, 25 bp, Saccharomyces pastorianus
gaacgtagacatgaccacttggaga

SEQ ID NO: 88648 - DNA, 25 bp, Saccharomyces pastorianus
gaagaatctgactttctcaccacga

SEQ ID NO: 88649 - DNA, 25 bp, Saccharomyces pastorianus
aaatggcgccagtggaacgtagaca

SEQ ID NO: 88650 - DNA, 25 bp, Saccharomyces pastorianus
tgcggatttcaacacttcaagcaat

SEQ ID NO: 88651 - DNA, 25 bp, Saccharomyces pastorianus
aattctggtacgcaggtggcccacg

SEQ ID NO: 88652 - DNA, 25 bp, Saccharomyces pastorianus
gatgccggaaagaccatagaaccac

SEQ ID NO: 88653 - DNA, 25 bp, Saccharomyces pastorianus
ttaaaggctacgctaacaccgattg

SEQ ID NO: 88654 - DNA, 25 bp, Saccharomyces pastorianus
ttgagttgtgctatcataccttgat

SEQ ID NO: 88655 - DNA, 25 bp, Saccharomyces pastorianus
aatgatgacgtaccgcaagaggagt

SEQ ID NO: 88656 - DNA, 25 bp, Saccharomyces pastorianus
gagagcttatcgtctttcaagaggg

SEQ ID NO: 88657 - DNA, 25 bp, Saccharomyces pastorianus
gatcatttaatcaagggctcgctaa

SEQ ID NO: 88658 - DNA, 25 bp, Saccharomyces pastorianus
tgatcatctcaaccacaaggtccat

SEQ ID NO: 88659 - DNA, 25 bp, Saccharomyces pastorianus
aggtgcgttctatggagactcagtc

SEQ ID NO: 88660 - DNA, 25 bp, Saccharomyces pastorianus
ggctactaagccttctattgagagt

SEQ ID NO: 88661 - DNA, 25 bp, Saccharomyces pastorianus
agcggctatgacgatcgatcattaa

SEQ ID NO: 88662 - DNA, 25 bp, Saccharomyces pastorianus
tgctgagcaggctagaagcggctat

SEQ ID NO: 88663 - DNA, 25 bp, Saccharomyces pastorianus
tgcgatatttgtaacctaaccttca

SEQ ID NO: 88664 - DNA, 25 bp, Saccharomyces pastorianus
actggctgtttatcaccaggtgcat

SEQ ID NO: 88665 - DNA, 25 bp, Saccharomyces pastorianus
tcagaatgtcttatggctcgcatga

SEQ ID NO: 88666 - DNA, 25 bp, Saccharomyces pastorianus
gttccagaatttttccagactgcga

SEQ ID NO: 88667 - DNA, 25 bp, Saccharomyces pastorianus
gatctgacagagaatacccactatt

SEQ ID NO: 88668 - DNA, 25 bp, Saccharomyces pastorianus
atttgattctaccaaccatcctgac

SEQ ID NO: 88669 - DNA, 25 bp, Saccharomyces pastorianus
agaacggtaccatcagtaagacagg

SEQ ID NO: 88670 - DNA, 25 bp, Saccharomyces pastorianus
aacacgatcctgtggaagggaatct

SEQ ID NO: 88671 - DNA, 25 bp, Saccharomyces pastorianus
ataactgtgcgtctaacggccaaaa

SEQ ID NO: 88672 - DNA, 25 bp, Saccharomyces pastorianus
ggtgcatttttatcaaaggttccag

SEQ ID NO: 88673 - DNA, 25 bp, Saccharomyces pastorianus
aaagactcatagaacacgatcctgt

SEQ ID NO: 88674 - DNA, 25 bp, Saccharomyces pastorianus
ttggcaagagtattcatctgtattt

SEQ ID NO: 88675 - DNA, 25 bp, Saccharomyces pastorianus
acccgaaccctcttctgataaagat

SEQ ID NO: 88676 - DNA, 25 bp, Saccharomyces pastorianus
ggaggccatattctccaagaattat

SEQ ID NO: 88677 - DNA, 25 bp, Saccharomyces pastorianus
tgatcacgccggtaccaagaagaga

SEQ ID NO: 88678 - DNA, 25 bp, Saccharomyces pastorianus
agcttcaaattgatcacgccggtac

SEQ ID NO: 88679 - DNA, 25 bp, Saccharomyces pastorianus
ggagatatatgccttcgtagaatta

SEQ ID NO: 88680 - DNA, 25 bp, Saccharomyces pastorianus
tacccgtataccaacctgctaatta

SEQ ID NO: 88681 - DNA, 25 bp, Saccharomyces pastorianus
gaagagagcttgatttatctaccaa

SEQ ID NO: 88682 - DNA, 25 bp, Saccharomyces pastorianus
taccaggattccttaagacgtgatc

SEQ ID NO: 88683 - DNA, 25 bp, Saccharomyces pastorianus
gaaggttccatttctaactacaaag

SEQ ID NO: 88684 - DNA, 25 bp, Saccharomyces pastorianus
tatctgacgttagcggcatatatcc

SEQ ID NO: 88685 - DNA, 25 bp, Saccharomyces pastorianus
gaaagtttgacgcatctctaccaac

SEQ ID NO: 88686 - DNA, 25 bp, Saccharomyces pastorianus
gatgaagtcactatgggtatgctac

SEQ ID NO: 88687 - DNA, 25 bp, Saccharomyces pastorianus
agcgcccagcaaaagttacaggttt

SEQ ID NO: 88688 - DNA, 25 bp, Saccharomyces pastorianus
ggaaaatgcccgcagatgcatctta

SEQ ID NO: 88689 - DNA, 25 bp, Saccharomyces pastorianus
tgtcttggacgtgcggataggccta

SEQ ID NO: 88690 - DNA, 25 bp, Saccharomyces pastorianus
taaaacacaccgctgaggaacgaat

SEQ ID NO: 88691 - DNA, 25 bp, Saccharomyces pastorianus
gggtatgctacagtcagtcaaatta

SEQ ID NO: 88692 - DNA, 25 bp, Saccharomyces pastorianus
tgaagattcagcaggttaccgaaga

SEQ ID NO: 88693 - DNA, 25 bp, Saccharomyces pastorianus
atggccagatatccgtagcactaca

SEQ ID NO: 88694 - DNA, 25 bp, Saccharomyces pastorianus
gggcatacctatcgcgtttagatac

SEQ ID NO: 88695 - DNA, 25 bp, Saccharomyces pastorianus
tggccattctatctcggtttgttaa

SEQ ID NO: 88696 - DNA, 25 bp, Saccharomyces pastorianus
taaccggacaactaacgccagcaag

SEQ ID NO: 88697 - DNA, 25 bp, Saccharomyces pastorianus
tttgatcttcggaactgcggacacc

SEQ ID NO: 88698 - DNA, 25 bp, Saccharomyces pastorianus
gcttttagagcgctcctggacaaaa

SEQ ID NO: 88699 - DNA, 25 bp, Saccharomyces pastorianus
ataccacaactttatgggccctgaa

SEQ ID NO: 88700 - DNA, 25 bp, Saccharomyces pastorianus
atcactcaaagttgtctcggcttct

SEQ ID NO: 88701 - DNA, 25 bp, Saccharomyces pastorianus
aaactgtgttgcgatctactcttcc

SEQ ID NO: 88702 - DNA, 25 bp, Saccharomyces pastorianus
tcggcttcttgttcgagcagttcaa

SEQ ID NO: 88703 - DNA, 25 bp, Saccharomyces pastorianus
gaaagaccctcagagaccacggagt

SEQ ID NO: 88704 - DNA, 25 bp, Saccharomyces pastorianus
gcaagggcaggttcgactccgctat

SEQ ID NO: 88705 - DNA, 25 bp, Saccharomyces pastorianus
tgaagcgttgccctatgacgtgcag

SEQ ID NO: 88706 - DNA, 25 bp, Saccharomyces pastorianus
tacgttcttggaaatcctggctgcc

SEQ ID NO: 88707 - DNA, 25 bp, Saccharomyces pastorianus
aaccttaggtcttggccagaacgat

SEQ ID NO: 88708 - DNA, 25 bp, Saccharomyces pastorianus
gtaaactttactccgtggtctctga

SEQ ID NO: 88709 - DNA, 25 bp, Saccharomyces pastorianus
ggtgtccgcagttccgaagatcaaa

SEQ ID NO: 88710 - DNA, 25 bp, Saccharomyces pastorianus
gtccaggagcgctctaaaagccaaa

SEQ ID NO: 88711 - DNA, 25 bp, Saccharomyces pastorianus
gcaggtaacccttttgtccaggagc

SEQ ID NO: 88712 - DNA, 25 bp, Saccharomyces pastorianus
aacacagtttgttgtcctcatcgta

SEQ ID NO: 88713 - DNA, 25 bp, Saccharomyces pastorianus
gctgggcagccaggatttccaagaa

SEQ ID NO: 88714 - DNA, 25 bp, Saccharomyces pastorianus
gggtctttctgattagatcgcggcc

SEQ ID NO: 88715 - DNA, 25 bp, Saccharomyces pastorianus
gagttatcgttctggccaagaccta

SEQ ID NO: 88716 - DNA, 25 bp, Saccharomyces pastorianus
ggaaccaattctcttaccatcgaat

SEQ ID NO: 88717 - DNA, 25 bp, Saccharomyces pastorianus
atgggcacctaaacacattcctgtg

SEQ ID NO: 88718 - DNA, 25 bp, Saccharomyces pastorianus
taacggcttcttgatcttgtactcg

SEQ ID NO: 88719 - DNA, 25 bp, Saccharomyces pastorianus
atttcattcgtttcttcaaaggaag

SEQ ID NO: 88720 - DNA, 25 bp, Saccharomyces pastorianus
taaacgcctctaactttccggctat

SEQ ID NO: 88721 - DNA, 25 bp, Saccharomyces pastorianus
ggctatcaccgttcatggtcatatg

SEQ ID NO: 88722 - DNA, 25 bp, Saccharomyces pastorianus
tcagccacactttctcaagagatta

SEQ ID NO: 88723 - DNA, 25 bp, Saccharomyces pastorianus
gaagctaagctaaccttgcacgggt

SEQ ID NO: 88724 - DNA, 25 bp, Saccharomyces pastorianus
aatcgctgaattcccagaagaaggc

SEQ ID NO: 88725 - DNA, 25 bp, Saccharomyces pastorianus
tgaagctgaccaatatttacatcgt

SEQ ID NO: 88726 - DNA, 25 bp, Saccharomyces pastorianus
gtagacgcttcttacagaatccatt

SEQ ID NO: 88727 - DNA, 25 bp, Saccharomyces pastorianus
gatccaagagcgtttcgatgtcaaa

SEQ ID NO: 88728 - DNA, 25 bp, Saccharomyces pastorianus
ctaagggtttggctatttcattcgt

SEQ ID NO: 88729 - DNA, 25 bp, Saccharomyces pastorianus
aaacgtatttgcgtgtccacagatg

SEQ ID NO: 88730 - DNA, 25 bp, Saccharomyces pastorianus
tttgctaaggctttggacggccaaa

SEQ ID NO: 88731 - DNA, 25 bp, Saccharomyces pastorianus
tgcttggtcttacgccgccttgatt

SEQ ID NO: 88732 - DNA, 25 bp, Saccharomyces pastorianus
gccaatgtcccagttgaaaatatct

SEQ ID NO: 88733 - DNA, 25 bp, Saccharomyces pastorianus
gatttgggctgactctgaaatcgaa

SEQ ID NO: 88734 - DNA, 25 bp, Saccharomyces pastorianus
tctgggctgatatttttgctaaggc

SEQ ID NO: 88735 - DNA, 25 bp, Saccharomyces pastorianus
ttacgccgccttgatttgggctgac

SEQ ID NO: 88736 - DNA, 25 bp, Saccharomyces pastorianus
gactttgactaacgctgccaatgtc

SEQ ID NO: 88737 - DNA, 25 bp, Saccharomyces pastorianus
taacgctgccaatgtcccagttgaa

SEQ ID NO: 88738 - DNA, 25 bp, Saccharomyces pastorianus
tactgaatctgcttggtcttacgcc

SEQ ID NO: 88739 - DNA, 25 bp, Saccharomyces pastorianus
tgctgccccagctggtgtcgctggt

SEQ ID NO: 88740 - DNA, 25 bp, Saccharomyces pastorianus
gaagccggtgaagccgaagctgaaa

SEQ ID NO: 88741 - DNA, 25 bp, Saccharomyces pastorianus
acttgataagcagtacgagcacttc

SEQ ID NO: 88742 - DNA, 25 bp, Saccharomyces pastorianus
gtatccatcgataccagtgttctgg

SEQ ID NO: 88743 - DNA, 25 bp, Saccharomyces pastorianus
gaaacggagtcactttccgcattcg

SEQ ID NO: 88744 - DNA, 25 bp, Saccharomyces pastorianus
gcgcagcaattagttggcgacaact

SEQ ID NO: 88745 - DNA, 25 bp, Saccharomyces pastorianus
gagcacttcattcatagggtccagt

SEQ ID NO: 88746 - DNA, 25 bp, Saccharomyces pastorianus
tccgcattcgtttatttaccaggct

SEQ ID NO: 88747 - DNA, 25 bp, Saccharomyces pastorianus
acaactcgttaatactgcggtcaaa

SEQ ID NO: 88748 - DNA, 25 bp, Saccharomyces pastorianus
tgtccaagctaaacagggcgccggt

SEQ ID NO: 88749 - DNA, 25 bp, Saccharomyces pastorianus
atcaccgacaaatcgctggtatttc

SEQ ID NO: 88750 - DNA, 25 bp, Saccharomyces pastorianus
gacctggtacgtgcagaaacctttt

SEQ ID NO: 88751 - DNA, 25 bp, Saccharomyces pastorianus
tgtgacgaaccttgacctggtacgt

SEQ ID NO: 88752 - DNA, 25 bp, Saccharomyces pastorianus
gccttctggtggctcatttcacaaa

SEQ ID NO: 88753 - DNA, 25 bp, Saccharomyces pastorianus
tgatgactcagacccaatactagtt

SEQ ID NO: 88754 - DNA, 25 bp, Saccharomyces pastorianus
gacaggcacagttttccatacaacc

SEQ ID NO: 88755 - DNA, 25 bp, Saccharomyces pastorianus
tgttacaggtaaccttcccctactg

SEQ ID NO: 88756 - DNA, 25 bp, Saccharomyces pastorianus
gttcaaaattggagcgccttctggt

SEQ ID NO: 88757 - DNA, 25 bp, Saccharomyces pastorianus
gaagactccacaagttactcagaca

SEQ ID NO: 88758 - DNA, 25 bp, Saccharomyces pastorianus
ggaagccaccgttatacacgatgga

SEQ ID NO: 88759 - DNA, 25 bp, Saccharomyces pastorianus
agttgttgtttttgcctactctaca

SEQ ID NO: 88760 - DNA, 25 bp, Saccharomyces pastorianus
acaacctttatgacaacactcttcc

SEQ ID NO: 88761 - DNA, 25 bp, Saccharomyces pastorianus
gaaggcacaccttttgatctagagg

SEQ ID NO: 88762 - DNA, 25 bp, Saccharomyces pastorianus
gagaagaacccctgtaaatgtaact

SEQ ID NO: 88763 - DNA, 25 bp, Saccharomyces pastorianus
tacctatcccttctagataccgtag

SEQ ID NO: 88764 - DNA, 25 bp, Saccharomyces pastorianus
tacaccttgttttttgccattctag

SEQ ID NO: 88765 - DNA, 25 bp, Saccharomyces pastorianus
ggcctctcaccttactgttattaaa

SEQ ID NO: 88766 - DNA, 25 bp, Saccharomyces pastorianus
gttcattcttttgcttttcatcgat

SEQ ID NO: 88767 - DNA, 25 bp, Saccharomyces pastorianus
gcttccaaggatgaccacggcgatg

SEQ ID NO: 88768 - DNA, 25 bp, Saccharomyces pastorianus
gctttctaggaaattctttgcccaa

SEQ ID NO: 88769 - DNA, 25 bp, Saccharomyces pastorianus
aagaacgactctgttactgccgaag

SEQ ID NO: 88770 - DNA, 25 bp, Saccharomyces pastorianus
atatacagagcatcgcctccagtag

SEQ ID NO: 88771 - DNA, 25 bp, Saccharomyces pastorianus
tgacctttgtcgtcgttaggacttt

SEQ ID NO: 88772 - DNA, 25 bp, Saccharomyces pastorianus
ctgcagttaagtagcgcctctcaaa

SEQ ID NO: 88773 - DNA, 25 bp, Saccharomyces pastorianus
gattttcatgttctccattctagcc

SEQ ID NO: 88774 - DNA, 25 bp, Saccharomyces pastorianus
tcccagatattcgagcaacagtagt

SEQ ID NO: 88775 - DNA, 25 bp, Saccharomyces pastorianus
aatgtatttcctgtgctcaagtctc

SEQ ID NO: 88776 - DNA, 25 bp, Saccharomyces pastorianus
agtctccagtcattggtactcgtac

SEQ ID NO: 88777 - DNA, 25 bp, Saccharomyces pastorianus
ttctttagtcggtatgcgttccttt

SEQ ID NO: 88778 - DNA, 25 bp, Saccharomyces pastorianus
ctaatattctttttcgtcaccgtgt

SEQ ID NO: 88779 - DNA, 25 bp, Saccharomyces pastorianus
gtcaccgtgtttatagttctgatgg

SEQ ID NO: 88780 - DNA, 25 bp, Saccharomyces pastorianus
gttcctttcctttatatccgtcagg

SEQ ID NO: 88781 - DNA, 25 bp, Saccharomyces pastorianus
atgagctgttcacccaatttttgta

SEQ ID NO: 88782 - DNA, 25 bp, Saccharomyces pastorianus
cgtaccaacatattcctgcttgtgg

SEQ ID NO: 88783 - DNA, 25 bp, Saccharomyces pastorianus
gaatattcctgcgaatcccagatat

SEQ ID NO: 88784 - DNA, 25 bp, Saccharomyces pastorianus
ggacttcacacagtttttctatctt

SEQ ID NO: 88785 - DNA, 25 bp, Saccharomyces pastorianus
gaagagtcatcatggacatcgtcct

SEQ ID NO: 88786 - DNA, 25 bp, Saccharomyces pastorianus
caagagagagaagttctacgcagag

SEQ ID NO: 88787 - DNA, 25 bp, Saccharomyces pastorianus
gtgtcatggcctcttactggtggtg

SEQ ID NO: 88788 - DNA, 25 bp, Saccharomyces pastorianus
atcatggacatcgtcctcgggttct

SEQ ID NO: 88789 - DNA, 25 bp, Saccharomyces pastorianus
tcatggacatcgtcctcgggttctc

SEQ ID NO: 88790 - DNA, 25 bp, Saccharomyces pastorianus
aacaagagagagaagttctacgcag

SEQ ID NO: 88791 - DNA, 25 bp, Saccharomyces pastorianus
ggtgtcatggcctcttactggtggt

SEQ ID NO: 88792 - DNA, 25 bp, Saccharomyces pastorianus
tggacatcgtcctcgggttctccct

SEQ ID NO: 88793 - DNA, 25 bp, Saccharomyces pastorianus
gagaagagtcatcatggacatcgtc

SEQ ID NO: 88794 - DNA, 25 bp, Saccharomyces pastorianus
caagagaagagtcatcatggacatc

SEQ ID NO: 88795 - DNA, 25 bp, Saccharomyces pastorianus
tcatcatggacatcgtcctcgggtt

SEQ ID NO: 88796 - DNA, 25 bp, Saccharomyces pastorianus
tctgcgtccttgtacaaactcgaaa

SEQ ID NO: 88797 - DNA, 25 bp, Saccharomyces pastorianus
aaagtcgatttctgcgtccttgtac

SEQ ID NO: 88798 - DNA, 25 bp, Saccharomyces pastorianus
gtgcatcctcacaaagaacactgat

SEQ ID NO: 88799 - DNA, 25 bp, Saccharomyces pastorianus
tgcccattcttttctgccctaaaaa

SEQ ID NO: 88800 - DNA, 25 bp, Saccharomyces pastorianus
atacttctatcatttggcaccacac

SEQ ID NO: 88801 - DNA, 25 bp, Saccharomyces pastorianus
gacgaagatgctcttgatcttttct

SEQ ID NO: 88802 - DNA, 25 bp, Saccharomyces pastorianus
ttggcaccacacttgacaaattctg

SEQ ID NO: 88803 - DNA, 25 bp, Saccharomyces pastorianus
aaagttgtctcatatgtgcatcctc

SEQ ID NO: 88804 - DNA, 25 bp, Saccharomyces pastorianus
tgtcatttgacccagctttgcgtag

SEQ ID NO: 88805 - DNA, 25 bp, Saccharomyces pastorianus
caaattctgcaatagcggctggagt

SEQ ID NO: 88806 - DNA, 25 bp, Saccharomyces pastorianus
atcttttctttgatctgcccattct

SEQ ID NO: 88807 - DNA, 25 bp, Saccharomyces pastorianus
gtacgttacatgtttttcagaccag

SEQ ID NO: 88808 - DNA, 25 bp, Saccharomyces pastorianus
gaatggttcaagtctatcccactgt

SEQ ID NO: 88809 - DNA, 25 bp, Saccharomyces pastorianus
cggtcatccattcagattccacaaa

SEQ ID NO: 88810 - DNA, 25 bp, Saccharomyces pastorianus
aaatgcggtagtcaacttctctcta

SEQ ID NO: 88811 - DNA, 25 bp, Saccharomyces pastorianus
ttgccacatgtattgctcccgtaga

SEQ ID NO: 88812 - DNA, 25 bp, Saccharomyces pastorianus
atatgacaaacctgtgccttctcag

SEQ ID NO: 88813 - DNA, 25 bp, Saccharomyces pastorianus
aaagagagccattttgaccggtcat

SEQ ID NO: 88814 - DNA, 25 bp, Saccharomyces pastorianus
ggatgttgttgctatgtccttgtac

SEQ ID NO: 88815 - DNA, 25 bp, Saccharomyces pastorianus
acactattcaacctctattttctca

SEQ ID NO: 88816 - DNA, 25 bp, Saccharomyces pastorianus
gccttctcaggagcctatcgtagta

SEQ ID NO: 88817 - DNA, 25 bp, Saccharomyces pastorianus
gctgtctacggattactacttcatg

SEQ ID NO: 88818 - DNA, 25 bp, Saccharomyces pastorianus
tggaatggaagacctgccagcgctt

SEQ ID NO: 88819 - DNA, 25 bp, Saccharomyces pastorianus
aggatggcaccaacacacagtgtgg

SEQ ID NO: 88820 - DNA, 25 bp, Saccharomyces pastorianus
atgttatagatgttgaggcccggga

SEQ ID NO: 88821 - DNA, 25 bp, Saccharomyces pastorianus
ggtagaattactttgtcctcgagag

SEQ ID NO: 88822 - DNA, 25 bp, Saccharomyces pastorianus
gcatgctctcattcagttcgctaat

SEQ ID NO: 88823 - DNA, 25 bp, Saccharomyces pastorianus
agcccttcaccgcagtaaataatgg

SEQ ID NO: 88824 - DNA, 25 bp, Saccharomyces pastorianus
agaggattgggcttctacagtccaa

SEQ ID NO: 88825 - DNA, 25 bp, Saccharomyces pastorianus
aagctgataccagggcatgctctca

SEQ ID NO: 88826 - DNA, 25 bp, Saccharomyces pastorianus
atgtcgatggcttgtatggctcaaa

SEQ ID NO: 88827 - DNA, 25 bp, Saccharomyces pastorianus
gcgactaatagcaagccgactttta

SEQ ID NO: 88828 - DNA, 25 bp, Saccharomyces pastorianus
aaagaggctgtaggcgatgcgttaa

SEQ ID NO: 88829 - DNA, 25 bp, Saccharomyces pastorianus
aaggcttttcgagggcagacattca

SEQ ID NO: 88830 - DNA, 25 bp, Saccharomyces pastorianus
tagtgccaattagcgcagcctcaaa

SEQ ID NO: 88831 - DNA, 25 bp, Saccharomyces pastorianus
attgaaggtgatcccaacgcgctag

SEQ ID NO: 88832 - DNA, 25 bp, Saccharomyces pastorianus
aattacatgcagctggatctccatt

SEQ ID NO: 88833 - DNA, 25 bp, Saccharomyces pastorianus
tcacctgattaattgcgccggaaga

SEQ ID NO: 88834 - DNA, 25 bp, Saccharomyces pastorianus
atctgacaggtctcttagggtacaa

SEQ ID NO: 88835 - DNA, 25 bp, Saccharomyces pastorianus
gaggacttattgaacgctgcacacg

SEQ ID NO: 88836 - DNA, 25 bp, Saccharomyces pastorianus
gagacttatagtatcgctggcgttt

SEQ ID NO: 88837 - DNA, 25 bp, Saccharomyces pastorianus
agaggatctcttgccatgttcaaat

SEQ ID NO: 88838 - DNA, 25 bp, Saccharomyces pastorianus
ttgcgttccggaatttgccacgata

SEQ ID NO: 88839 - DNA, 25 bp, Saccharomyces pastorianus
gacgctcgctcaggatcttgaagat

SEQ ID NO: 88840 - DNA, 25 bp, Saccharomyces pastorianus
tgttgttttgtgcaactccaccatc

SEQ ID NO: 88841 - DNA, 25 bp, Saccharomyces pastorianus
gtcgaatctaccatcgtaggctgga

SEQ ID NO: 88842 - DNA, 25 bp, Saccharomyces pastorianus
aagaaccactccttggtcgaatcta

SEQ ID NO: 88843 - DNA, 25 bp, Saccharomyces pastorianus
gaattaacgccggtttgtacatctt

SEQ ID NO: 88844 - DNA, 25 bp, Saccharomyces pastorianus
ttcctccactgctaagattggccca

SEQ ID NO: 88845 - DNA, 25 bp, Saccharomyces pastorianus
ttgtctggtaccgttctttacttga

SEQ ID NO: 88846 - DNA, 25 bp, Saccharomyces pastorianus
aggctggaactctaccgttggtcaa

SEQ ID NO: 88847 - DNA, 25 bp, Saccharomyces pastorianus
ttatcggtcctaatgtcaccatcgg

SEQ ID NO: 88848 - DNA, 25 bp, Saccharomyces pastorianus
ggctacaggtgccaacattgttggt

SEQ ID NO: 88849 - DNA, 25 bp, Saccharomyces pastorianus
ggtaatgccttgatcgatccaaccg

SEQ ID NO: 88850 - DNA, 25 bp, Saccharomyces pastorianus
attggcccagacgtggttatcggtc

SEQ ID NO: 88851 - DNA, 25 bp, Saccharomyces pastorianus
atttcagagctataccgctggtgaa

SEQ ID NO: 88852 - DNA, 25 bp, Saccharomyces pastorianus
taccgcgccgcctgctaatataaag

SEQ ID NO: 88853 - DNA, 25 bp, Saccharomyces pastorianus
aaattcaaatggtccaacgcccgct

SEQ ID NO: 88854 - DNA, 25 bp, Saccharomyces pastorianus
aaggctactttatctgcttcaggtc

SEQ ID NO: 88855 - DNA, 25 bp, Saccharomyces pastorianus
agactaaaaccatcgcatctaccgc

SEQ ID NO: 88856 - DNA, 25 bp, Saccharomyces pastorianus
ggcagagtttcaacagccactgact

SEQ ID NO: 88857 - DNA, 25 bp, Saccharomyces pastorianus
agtgtagatggcagaacctcctcga

SEQ ID NO: 88858 - DNA, 25 bp, Saccharomyces pastorianus
aattaacaggttgggtgcaggcagc

SEQ ID NO: 88859 - DNA, 25 bp, Saccharomyces pastorianus
taaagggtagttccaccgccaatgg

SEQ ID NO: 88860 - DNA, 25 bp, Saccharomyces pastorianus
agaacctcctcgactttgaaggcta

SEQ ID NO: 88861 - DNA, 25 bp, Saccharomyces pastorianus
tccgtggctgtacaacctgctaata

SEQ ID NO: 88862 - DNA, 25 bp, Saccharomyces pastorianus
taagatccccattgttccagtggtt

SEQ ID NO: 88863 - DNA, 25 bp, Saccharomyces pastorianus
ccctttctgggttggttcatggctt

SEQ ID NO: 88864 - DNA, 25 bp, Saccharomyces pastorianus
aaggagattggctactctcccgcta

SEQ ID NO: 88865 - DNA, 25 bp, Saccharomyces pastorianus
agggtaccaggtcttacacgagtga

SEQ ID NO: 88866 - DNA, 25 bp, Saccharomyces pastorianus
gccttctgtcagcattagcaacgat

SEQ ID NO: 88867 - DNA, 25 bp, Saccharomyces pastorianus
gtgagctgacaatgttgcctttcaa

SEQ ID NO: 88868 - DNA, 25 bp, Saccharomyces pastorianus
gtctttgaaatacgtcccctttctg

SEQ ID NO: 88869 - DNA, 25 bp, Saccharomyces pastorianus
acaagcgtgctctatgggtttttcc

SEQ ID NO: 88870 - DNA, 25 bp, Saccharomyces pastorianus
caagaagggtgctttccatttggca

SEQ ID NO: 88871 - DNA, 25 bp, Saccharomyces pastorianus
gtatgccgctcttcaacatgacaag

SEQ ID NO: 88872 - DNA, 25 bp, Saccharomyces pastorianus
aagaatgagcctgtgccttctgtca

SEQ ID NO: 88873 - DNA, 25 bp, Saccharomyces pastorianus
gactttggccgtaatgaatttccca

SEQ ID NO: 88874 - DNA, 25 bp, Saccharomyces pastorianus
acatgaggacgttgaagcttcccaa

SEQ ID NO: 88875 - DNA, 25 bp, Saccharomyces pastorianus
tcaagagacgtgttcctttggacct

SEQ ID NO: 88876 - DNA, 25 bp, Saccharomyces pastorianus
caggagaacttggaagcctttttca

SEQ ID NO: 88877 - DNA, 25 bp, Saccharomyces pastorianus
gagagaggcctcgaagtccaaaaac

SEQ ID NO: 88878 - DNA, 25 bp, Saccharomyces pastorianus
gaagcttcccaaattcctgaattgc

SEQ ID NO: 88879 - DNA, 25 bp, Saccharomyces pastorianus
aagatcctttaacggccataagaag

SEQ ID NO: 88880 - DNA, 25 bp, Saccharomyces pastorianus
gaattgagcaaaaccaacggacttt

SEQ ID NO: 88881 - DNA, 25 bp, Saccharomyces pastorianus
ggttatcgaagcactacgtagttct

SEQ ID NO: 88882 - DNA, 25 bp, Saccharomyces pastorianus
taatggtacggtcttggtggaattt

SEQ ID NO: 88883 - DNA, 25 bp, Saccharomyces pastorianus
ctttggacctaactgctgccagaaa

SEQ ID NO: 88884 - DNA, 25 bp, Saccharomyces pastorianus
cggcaatggcagaagagtcctcttt

SEQ ID NO: 88885 - DNA, 25 bp, Saccharomyces pastorianus
aaagcttcacattctggaattgtct

SEQ ID NO: 88886 - DNA, 25 bp, Saccharomyces pastorianus
tcctcatcgtcatcggcaatggcag

SEQ ID NO: 88887 - DNA, 25 bp, Saccharomyces pastorianus
aagaatcactccttgtgctcctcat

SEQ ID NO: 88888 - DNA, 25 bp, Saccharomyces pastorianus
ttgactcttccttgccgtttttctt

SEQ ID NO: 88889 - DNA, 25 bp, Saccharomyces pastorianus
gaggcctctctctgtaaatcaaact

SEQ ID NO: 88890 - DNA, 25 bp, Saccharomyces pastorianus
atttcgttggactcatcgtcattgg

SEQ ID NO: 88891 - DNA, 25 bp, Saccharomyces pastorianus
aaacactcagtttcttaccttcata

SEQ ID NO: 88892 - DNA, 25 bp, Saccharomyces pastorianus
aaggatcttgatctaccgctgaagt

SEQ ID NO: 88893 - DNA, 25 bp, Saccharomyces pastorianus
gcaagtttttcttcttatggccgtt

SEQ ID NO: 88894 - DNA, 25 bp, Saccharomyces pastorianus
agtttttggacttcgaggcctctct

SEQ ID NO: 88895 - DNA, 25 bp, Saccharomyces pastorianus
tacgccaacctatctacgcataaat

SEQ ID NO: 88896 - DNA, 25 bp, Saccharomyces pastorianus
aggacagaccgcataagtgccctat

SEQ ID NO: 88897 - DNA, 25 bp, Saccharomyces pastorianus
agcattgtggactgcaatttccgaa

SEQ ID NO: 88898 - DNA, 25 bp, Saccharomyces pastorianus
gagtccgacaacaatagtggtgctg

SEQ ID NO: 88899 - DNA, 25 bp, Saccharomyces pastorianus
aaatccactcatttaactccggagg

SEQ ID NO: 88900 - DNA, 25 bp, Saccharomyces pastorianus
ggtgtatccacacaagtctatatca

SEQ ID NO: 88901 - DNA, 25 bp, Saccharomyces pastorianus
aagtgtccttacaactctactctga

SEQ ID NO: 88902 - DNA, 25 bp, Saccharomyces pastorianus
atttccgaacgttgacgtctggcta

SEQ ID NO: 88903 - DNA, 25 bp, Saccharomyces pastorianus
tcaacgcggctttgccaggaacaat

SEQ ID NO: 88904 - DNA, 25 bp, Saccharomyces pastorianus
ataagtgccctatctgtcaacgcgg

SEQ ID NO: 88905 - DNA, 25 bp, Saccharomyces pastorianus
aacgggcgttttttcgcgctgtgat

SEQ ID NO: 88906 - DNA, 25 bp, Saccharomyces pastorianus
aagtttttgatttcctgacgctggc

SEQ ID NO: 88907 - DNA, 25 bp, Saccharomyces pastorianus
ttacgggttttacgaggaatgcctg

SEQ ID NO: 88908 - DNA, 25 bp, Saccharomyces pastorianus
ccgggctcaccaactggttatggaa

SEQ ID NO: 88909 - DNA, 25 bp, Saccharomyces pastorianus
atgaggatctggaacctactttcaa

SEQ ID NO: 88910 - DNA, 25 bp, Saccharomyces pastorianus
gtccatggagggttatctcccgaga

SEQ ID NO: 88911 - DNA, 25 bp, Saccharomyces pastorianus
gtggtccgcgccaaattactgttat

SEQ ID NO: 88912 - DNA, 25 bp, Saccharomyces pastorianus
aaattttctccgctgttcccgatga

SEQ ID NO: 88913 - DNA, 25 bp, Saccharomyces pastorianus
gtgcaggatggctctttggcagtaa

SEQ ID NO: 88914 - DNA, 25 bp, Saccharomyces pastorianus
aatggactgaaccttattgcccggg

SEQ ID NO: 88915 - DNA, 25 bp, Saccharomyces pastorianus
gacgctggccgctataattgacggt

SEQ ID NO: 88916 - DNA, 25 bp, Saccharomyces pastorianus
aagtttcccctcgtggtgcaggatg

SEQ ID NO: 88917 - DNA, 25 bp, Saccharomyces pastorianus
aaagctctgtttgccttgctatttc

SEQ ID NO: 88918 - DNA, 25 bp, Saccharomyces pastorianus
gtgattggcatattcaacgcccttc

SEQ ID NO: 88919 - DNA, 25 bp, Saccharomyces pastorianus
caattaacggcgaatctccacttta

SEQ ID NO: 88920 - DNA, 25 bp, Saccharomyces pastorianus
tgctatttctttacacagctgctgt

SEQ ID NO: 88921 - DNA, 25 bp, Saccharomyces pastorianus
catttctgctaacggtgaggtcttt

SEQ ID NO: 88922 - DNA, 25 bp, Saccharomyces pastorianus
atgacccacggcttgaaagctctgt

SEQ ID NO: 88923 - DNA, 25 bp, Saccharomyces pastorianus
gatatcgaaggcttatcctgtccaa

SEQ ID NO: 88924 - DNA, 25 bp, Saccharomyces pastorianus
agttgagatcccaggcgaggttcca

SEQ ID NO: 88925 - DNA, 25 bp, Saccharomyces pastorianus
cagctgctgtcaatgcgggtgtgat

SEQ ID NO: 88926 - DNA, 25 bp, Saccharomyces pastorianus
gactgttatcccagacttttgattt

SEQ ID NO: 88927 - DNA, 25 bp, Saccharomyces pastorianus
ggttccacctggcaaatatgttgtt

SEQ ID NO: 88928 - DNA, 25 bp, Saccharomyces pastorianus
tgccctcggcaaaagaaacaacgtt

SEQ ID NO: 88929 - DNA, 25 bp, Saccharomyces pastorianus
caaatgtcttgttttaatgtcaaac

SEQ ID NO: 88930 - DNA, 25 bp, Saccharomyces pastorianus
gtgctggcttagtaacggaattgaa

SEQ ID NO: 88931 - DNA, 25 bp, Saccharomyces pastorianus
catgaaccctaaatgtgctggctta

SEQ ID NO: 88932 - DNA, 25 bp, Saccharomyces pastorianus
cactagtgaaagtgccctcggcaaa

SEQ ID NO: 88933 - DNA, 25 bp, Saccharomyces pastorianus
ggaattgaaaagttgcactagtgaa

SEQ ID NO: 88934 - DNA, 25 bp, Saccharomyces pastorianus
gtgaagaaacctatcattaggcaag

SEQ ID NO: 88935 - DNA, 25 bp, Saccharomyces pastorianus
attaggcaagaagcgaacaaatgtc

SEQ ID NO: 88936 - DNA, 25 bp, Saccharomyces pastorianus
agagcaatattaactatcacgccgc

SEQ ID NO: 88937 - DNA, 25 bp, Saccharomyces pastorianus
tattaactatcacgccgctaggctg

SEQ ID NO: 88938 - DNA, 25 bp, Saccharomyces pastorianus
aaacttgttacaatgctggtcttca

SEQ ID NO: 88939 - DNA, 25 bp, Saccharomyces pastorianus
ggactccaataatccagccttgcat

SEQ ID NO: 88940 - DNA, 25 bp, Saccharomyces pastorianus
tgacaattactatcctggctggtat

SEQ ID NO: 88941 - DNA, 25 bp, Saccharomyces pastorianus
gggaaatcgttcatgcatttggcaa

SEQ ID NO: 88942 - DNA, 25 bp, Saccharomyces pastorianus
gtaaaggtttcacatcaatcggcgg

SEQ ID NO: 88943 - DNA, 25 bp, Saccharomyces pastorianus
attgcctaacccacacttgagaaag

SEQ ID NO: 88944 - DNA, 25 bp, Saccharomyces pastorianus
caacctctcttacactgggacttaa

SEQ ID NO: 88945 - DNA, 25 bp, Saccharomyces pastorianus
aaggcaatctggtgcatcggtcaat

SEQ ID NO: 88946 - DNA, 25 bp, Saccharomyces pastorianus
tagttccgctataaacacgtcacct

SEQ ID NO: 88947 - DNA, 25 bp, Saccharomyces pastorianus
cagagcgatattgcctttccttata

SEQ ID NO: 88948 - DNA, 25 bp, Saccharomyces pastorianus
gtattagacacacagacccatttgg

SEQ ID NO: 88949 - DNA, 25 bp, Saccharomyces pastorianus
acgtcacctatttccgtggtggata

SEQ ID NO: 88950 - DNA, 25 bp, Saccharomyces pastorianus
agaactaccgaaaccgcttgcaatg

SEQ ID NO: 88951 - DNA, 25 bp, Saccharomyces pastorianus
tcgctacttgagacgtgtggttacc

SEQ ID NO: 88952 - DNA, 25 bp, Saccharomyces pastorianus
gatttctacaatttgctggttcagc

SEQ ID NO: 88953 - DNA, 25 bp, Saccharomyces pastorianus
taggtgactttgatttcccggcaga

SEQ ID NO: 88954 - DNA, 25 bp, Saccharomyces pastorianus
aaccgcttgcaatgactttaccata

SEQ ID NO: 88955 - DNA, 25 bp, Saccharomyces pastorianus
aatgaggatgtctttcttgaagcag

SEQ ID NO: 88956 - DNA, 25 bp, Saccharomyces pastorianus
aggaagtttcgtccagcgcaaataa

SEQ ID NO: 88957 - DNA, 25 bp, Saccharomyces pastorianus
tgtggttaccgagatgagcgttaat

SEQ ID NO: 88958 - DNA, 25 bp, Saccharomyces pastorianus
aaacttccaggagattcgctacttg

SEQ ID NO: 88959 - DNA, 25 bp, Saccharomyces pastorianus
agaaagtacacattgatctcctatg

SEQ ID NO: 88960 - DNA, 25 bp, Saccharomyces pastorianus
atggacgcttcactgtacctaacaa

SEQ ID NO: 88961 - DNA, 25 bp, Saccharomyces pastorianus
gcttaccgggcgatcacatcaaatt

SEQ ID NO: 88962 - DNA, 25 bp, Saccharomyces pastorianus
caatctcggaaaaggcggccaggct

SEQ ID NO: 88963 - DNA, 25 bp, Saccharomyces pastorianus
tgtaaagtgcaaaccgcttaccggg

SEQ ID NO: 88964 - DNA, 25 bp, Saccharomyces pastorianus
tctaaaactgatcgagccaaggctt

SEQ ID NO: 88965 - DNA, 25 bp, Saccharomyces pastorianus
gccaaggcttgctcttaatgcagtt

SEQ ID NO: 88966 - DNA, 25 bp, Saccharomyces pastorianus
ctggccccaatgatcttgatctgtg

SEQ ID NO: 88967 - DNA, 25 bp, Saccharomyces pastorianus
atttacagtacttaggccacccaat

SEQ ID NO: 88968 - DNA, 25 bp, Saccharomyces pastorianus
tgatttgtatactgatcctggcccc

SEQ ID NO: 88969 - DNA, 25 bp, Saccharomyces pastorianus
gtggttacatgcctatctatacgaa

SEQ ID NO: 88970 - DNA, 25 bp, Saccharomyces pastorianus
cggccaggctgacttcgatatagtt

SEQ ID NO: 88971 - DNA, 25 bp, Saccharomyces pastorianus
cacccaattgctaacgatcctattt

SEQ ID NO: 88972 - DNA, 25 bp, Saccharomyces pastorianus
atgcttaataacatcacggccgaag

SEQ ID NO: 88973 - DNA, 25 bp, Saccharomyces pastorianus
ggaggatcattcatcatattccaat

SEQ ID NO: 88974 - DNA, 25 bp, Saccharomyces pastorianus
ttacgctattcagatgctagtgcat

SEQ ID NO: 88975 - DNA, 25 bp, Saccharomyces pastorianus
gaagtgcccttgttttggaggatca

SEQ ID NO: 88976 - DNA, 25 bp, Saccharomyces pastorianus
ctctacccgggttgaaatttgcatt

SEQ ID NO: 88977 - DNA, 25 bp, Saccharomyces pastorianus
acatcaggacgtctcaactaacagt

SEQ ID NO: 88978 - DNA, 25 bp, Saccharomyces pastorianus
gtcaagcccacaataccaggtacga

SEQ ID NO: 88979 - DNA, 25 bp, Saccharomyces pastorianus
ctcccttccatcaaattcacttgaa

SEQ ID NO: 88980 - DNA, 25 bp, Saccharomyces pastorianus
ggtacaataacgaccatttttctct

SEQ ID NO: 88981 - DNA, 25 bp, Saccharomyces pastorianus
ggtacgactcctgatccaataattg

SEQ ID NO: 88982 - DNA, 25 bp, Saccharomyces pastorianus
tggtcaaatccagcttcttttcaag

SEQ ID NO: 88983 - DNA, 25 bp, Saccharomyces pastorianus
tagccgctgtggtctgtacggtgaa

SEQ ID NO: 88984 - DNA, 25 bp, Saccharomyces pastorianus
gattgtgattcagaccagttctgca

SEQ ID NO: 88985 - DNA, 25 bp, Saccharomyces pastorianus
tcgggtatttggaaattctccggca

SEQ ID NO: 88986 - DNA, 25 bp, Saccharomyces pastorianus
ggaatctaccccagatgacattgcc

SEQ ID NO: 88987 - DNA, 25 bp, Saccharomyces pastorianus
agttctgcatatatactcctcgggt

SEQ ID NO: 88988 - DNA, 25 bp, Saccharomyces pastorianus
gccagcattgttatctgacttgaat

SEQ ID NO: 88989 - DNA, 25 bp, Saccharomyces pastorianus
agtgctgccgccacagaggaatcta

SEQ ID NO: 88990 - DNA, 25 bp, Saccharomyces pastorianus
gcactcctccgtcctattaaattta

SEQ ID NO: 88991 - DNA, 25 bp, Saccharomyces pastorianus
cttgccagggtcgtccaaagattgt

SEQ ID NO: 88992 - DNA, 25 bp, Saccharomyces pastorianus
ttgtcaaactttgccggtagccgct

SEQ ID NO: 88993 - DNA, 25 bp, Saccharomyces pastorianus
gatgacattgccactatcacgttgt

SEQ ID NO: 88994 - DNA, 25 bp, Saccharomyces pastorianus
ggaaactttctcctcgatattttgg

SEQ ID NO: 88995 - DNA, 25 bp, Saccharomyces pastorianus
atggtggtcttatttatctgcgcta

SEQ ID NO: 88996 - DNA, 25 bp, Saccharomyces pastorianus
cattttttcctactcatatgtggtt

SEQ ID NO: 88997 - DNA, 25 bp, Saccharomyces pastorianus
atctgcgctaaatcacttttcaaat

SEQ ID NO: 88998 - DNA, 25 bp, Saccharomyces pastorianus
attgagactattgggcgtaacgctg

SEQ ID NO: 88999 - DNA, 25 bp, Saccharomyces pastorianus
actggctaatcccactggaactttg

SEQ ID NO: 89000 - DNA, 25 bp, Saccharomyces pastorianus
aagctcccttgtcctactggctaat

SEQ ID NO: 89001 - DNA, 25 bp, Saccharomyces pastorianus
gtaacgctgttcataagctcccttg

SEQ ID NO: 89002 - DNA, 25 bp, Saccharomyces pastorianus
aaagcccttaatattcctggcaagt

SEQ ID NO: 89003 - DNA, 25 bp, Saccharomyces pastorianus
ggcaagtacatattgaaaccctttc

SEQ ID NO: 89004 - DNA, 25 bp, Saccharomyces pastorianus
atcgccgaaggcactggtttaggaa

SEQ ID NO: 89005 - DNA, 25 bp, Saccharomyces pastorianus
gcttatgattctttggtttttcaac

SEQ ID NO: 89006 - DNA, 25 bp, Saccharomyces pastorianus
ccaaatcgccagatgtagggtcaac

SEQ ID NO: 89007 - DNA, 25 bp, Saccharomyces pastorianus
aaccaaatcgccagatgtagggtca

SEQ ID NO: 89008 - DNA, 25 bp, Saccharomyces pastorianus
tttcaaccaaatcgccagatgtagg

SEQ ID NO: 89009 - DNA, 25 bp, Saccharomyces pastorianus
aatcgccagatgtagggtcaacttc

SEQ ID NO: 89010 - DNA, 25 bp, Saccharomyces pastorianus
atgcttatgattctttggtttttca

SEQ ID NO: 89011 - DNA, 25 bp, Saccharomyces pastorianus
ttttcaaccaaatcgccagatgtag

SEQ ID NO: 89012 - DNA, 25 bp, Saccharomyces pastorianus
aaatcgccagatgtagggtcaactt

SEQ ID NO: 89013 - DNA, 25 bp, Saccharomyces pastorianus
ggtttttcaaccaaatcgccagatg

SEQ ID NO: 89014 - DNA, 25 bp, Saccharomyces pastorianus
atcgccagatgtagggtcaacttca

SEQ ID NO: 89015 - DNA, 25 bp, Saccharomyces pastorianus
gtttttcaaccaaatcgccagatgt

SEQ ID NO: 89016 - DNA, 25 bp, Saccharomyces pastorianus
gaagggctcttctactgggtacgaa

SEQ ID NO: 89017 - DNA, 25 bp, Saccharomyces pastorianus
ttctacctagatcctgaagctgcta

SEQ ID NO: 89018 - DNA, 25 bp, Saccharomyces pastorianus
acttggaggctaaatgaacgtcatt

SEQ ID NO: 89019 - DNA, 25 bp, Saccharomyces pastorianus
aacgtcattacggttcctggcaggg

SEQ ID NO: 89020 - DNA, 25 bp, Saccharomyces pastorianus
aatcttcatgcctgattgtgggcca

SEQ ID NO: 89021 - DNA, 25 bp, Saccharomyces pastorianus
gattacgagggtaagccaccacctg

SEQ ID NO: 89022 - DNA, 25 bp, Saccharomyces pastorianus
agtgagatcgctactgaaaattctg

SEQ ID NO: 89023 - DNA, 25 bp, Saccharomyces pastorianus
aatggtatccccttagtcgttgaat

SEQ ID NO: 89024 - DNA, 25 bp, Saccharomyces pastorianus
tgacattgtattgccggattccgaa

SEQ ID NO: 89025 - DNA, 25 bp, Saccharomyces pastorianus
accacctgtagatcttgaccgtgag

SEQ ID NO: 89026 - DNA, 25 bp, Saccharomyces pastorianus
cagggccagaggaaaccgaatgttt

SEQ ID NO: 89027 - DNA, 25 bp, Saccharomyces pastorianus
tcacaccgtttgttcaacagagcat

SEQ ID NO: 89028 - DNA, 25 bp, Saccharomyces pastorianus
gcttatatacgctaactccggacat

SEQ ID NO: 89029 - DNA, 25 bp, Saccharomyces pastorianus
ttttgctgaggcatcaccgttgaca

SEQ ID NO: 89030 - DNA, 25 bp, Saccharomyces pastorianus
taatcatcggaatgagctgcgctca

SEQ ID NO: 89031 - DNA, 25 bp, Saccharomyces pastorianus
atgctatctgcttttatggtggtaa

SEQ ID NO: 89032 - DNA, 25 bp, Saccharomyces pastorianus
aaccgatcccttgcaagacagtgtg

SEQ ID NO: 89033 - DNA, 25 bp, Saccharomyces pastorianus
tacgaaatatttgctcctgatgaca

SEQ ID NO: 89034 - DNA, 25 bp, Saccharomyces pastorianus
gagagactctaaaaccgatcccttg

SEQ ID NO: 89035 - DNA, 25 bp, Saccharomyces pastorianus
gctgcgctcaaattgccatactgga

SEQ ID NO: 89036 - DNA, 25 bp, Saccharomyces pastorianus
acaccagaaatcatcacaccgtttg

SEQ ID NO: 89037 - DNA, 25 bp, Saccharomyces pastorianus
gctaactccggacattgactgtaca

SEQ ID NO: 89038 - DNA, 25 bp, Saccharomyces pastorianus
tatcgagcaaatctgcctcgcttga

SEQ ID NO: 89039 - DNA, 25 bp, Saccharomyces pastorianus
tgagctgacaacgtcatcttcgtca

SEQ ID NO: 89040 - DNA, 25 bp, Saccharomyces pastorianus
ggagaacatccttatcgagcaaatc

SEQ ID NO: 89041 - DNA, 25 bp, Saccharomyces pastorianus
ggaaattatttcagactagcagtaa

SEQ ID NO: 89042 - DNA, 25 bp, Saccharomyces pastorianus
aacgtcatcttcgtcagtactctcg

SEQ ID NO: 89043 - DNA, 25 bp, Saccharomyces pastorianus
agtactctcgccatccagtaaatat

SEQ ID NO: 89044 - DNA, 25 bp, Saccharomyces pastorianus
aaatctgcctcgcttgagctgacaa

SEQ ID NO: 89045 - DNA, 25 bp, Saccharomyces pastorianus
atgccaccaattatactaaaccgtt

SEQ ID NO: 89046 - DNA, 25 bp, Saccharomyces pastorianus
atcactttgctattcagatattagg

SEQ ID NO: 89047 - DNA, 25 bp, Saccharomyces pastorianus
ctcgccatccagtaaatatgtgttt

SEQ ID NO: 89048 - DNA, 25 bp, Saccharomyces pastorianus
gcagtaatttatcactttgctattc

SEQ ID NO: 89049 - DNA, 25 bp, Saccharomyces pastorianus
gatgaattatttattgccccaggca

SEQ ID NO: 89050 - DNA, 25 bp, Saccharomyces pastorianus
gagacctaatatcatcccaatcatt

SEQ ID NO: 89051 - DNA, 25 bp, Saccharomyces pastorianus
tgccccaggcaagaaagttttatat

SEQ ID NO: 89052 - DNA, 25 bp, Saccharomyces pastorianus
gattctactgtagacgcggaaaccg

SEQ ID NO: 89053 - DNA, 25 bp, Saccharomyces pastorianus
agaaggtgttgtctacgccgtagaa

SEQ ID NO: 89054 - DNA, 25 bp, Saccharomyces pastorianus
gtctacgccgtagaattttctcaca

SEQ ID NO: 89055 - DNA, 25 bp, Saccharomyces pastorianus
gaacccattcagatctaagttggct

SEQ ID NO: 89056 - DNA, 25 bp, Saccharomyces pastorianus
agttttatatttaggtgctgcttcc

SEQ ID NO: 89057 - DNA, 25 bp, Saccharomyces pastorianus
gtcgaataccgtgtatggaacccat

SEQ ID NO: 89058 - DNA, 25 bp, Saccharomyces pastorianus
gcggaaaccgtttttgctagagaag

SEQ ID NO: 89059 - DNA, 25 bp, Saccharomyces pastorianus
gaacaattgactttagagccatatg

SEQ ID NO: 89060 - DNA, 25 bp, Saccharomyces pastorianus
tggccgacaaactatcatcaaccga

SEQ ID NO: 89061 - DNA, 25 bp, Saccharomyces pastorianus
gaagttcgcattttgcgctacgaaa

SEQ ID NO: 89062 - DNA, 25 bp, Saccharomyces pastorianus
tggagtcccaccttctgttttattt

SEQ ID NO: 89063 - DNA, 25 bp, Saccharomyces pastorianus
atcctgcagccatattgtccatatt

SEQ ID NO: 89064 - DNA, 25 bp, Saccharomyces pastorianus
aagtcggcatagcagcatattccct

SEQ ID NO: 89065 - DNA, 25 bp, Saccharomyces pastorianus
agagctccccttattcgtggtagaa

SEQ ID NO: 89066 - DNA, 25 bp, Saccharomyces pastorianus
atctctaccgtcaagaagttcgcat

SEQ ID NO: 89067 - DNA, 25 bp, Saccharomyces pastorianus
tcatcaaccgatgctatgggctgtt

SEQ ID NO: 89068 - DNA, 25 bp, Saccharomyces pastorianus
gaagtttcctcttttatctctaccg

SEQ ID NO: 89069 - DNA, 25 bp, Saccharomyces pastorianus
atattccctggaagatcctgcagcc

SEQ ID NO: 89070 - DNA, 25 bp, Saccharomyces pastorianus
aatttcttcgtctacttcagagctc

SEQ ID NO: 89071 - DNA, 25 bp, Saccharomyces pastorianus
caggcgatcaatgccctttagtgat

SEQ ID NO: 89072 - DNA, 25 bp, Saccharomyces pastorianus
gacgctcatgtccaaaagttcgttg

SEQ ID NO: 89073 - DNA, 25 bp, Saccharomyces pastorianus
gatgtctgtggtatctgtcgtgcca

SEQ ID NO: 89074 - DNA, 25 bp, Saccharomyces pastorianus
gactgtgtccgatgtgtaggcaaac

SEQ ID NO: 89075 - DNA, 25 bp, Saccharomyces pastorianus
atataccgttggctcgatacaccaa

SEQ ID NO: 89076 - DNA, 25 bp, Saccharomyces pastorianus
gcacatccctagcacatctgatgag

SEQ ID NO: 89077 - DNA, 25 bp, Saccharomyces pastorianus
ataacggtacctgtccaagctgtaa

SEQ ID NO: 89078 - DNA, 25 bp, Saccharomyces pastorianus
gacgcagccaataacgatccaaatg

SEQ ID NO: 89079 - DNA, 25 bp, Saccharomyces pastorianus
gggctatgccatcataacttccatg

SEQ ID NO: 89080 - DNA, 25 bp, Saccharomyces pastorianus
gtgtttgcttggtcatggcacatcc

SEQ ID NO: 89081 - DNA, 25 bp, Saccharomyces pastorianus
taggcaaactttccagctacagaag

SEQ ID NO: 89082 - DNA, 25 bp, Saccharomyces pastorianus
ttagggattcacacttccaagatga

SEQ ID NO: 89083 - DNA, 25 bp, Saccharomyces pastorianus
agaagcaggtttgttagcccttaga

SEQ ID NO: 89084 - DNA, 25 bp, Saccharomyces pastorianus
caggcctgggagaattgatcgtaaa

SEQ ID NO: 89085 - DNA, 25 bp, Saccharomyces pastorianus
ccagctggacgggttcgacgacaga

SEQ ID NO: 89086 - DNA, 25 bp, Saccharomyces pastorianus
tcaggcgccgatatccaggcaatgt

SEQ ID NO: 89087 - DNA, 25 bp, Saccharomyces pastorianus
aacatctgccacattcttaaggatt

SEQ ID NO: 89088 - DNA, 25 bp, Saccharomyces pastorianus
atgcaagttacagcggaggatttta

SEQ ID NO: 89089 - DNA, 25 bp, Saccharomyces pastorianus
ggccactaacaaaatcgagactctt

SEQ ID NO: 89090 - DNA, 25 bp, Saccharomyces pastorianus
gtgagaacgcaccaagtattgtatt

SEQ ID NO: 89091 - DNA, 25 bp, Saccharomyces pastorianus
tcgagactcttgacccagcattaat

SEQ ID NO: 89092 - DNA, 25 bp, Saccharomyces pastorianus
aaggatgatttgtcaggcgccgata

SEQ ID NO: 89093 - DNA, 25 bp, Saccharomyces pastorianus
gacaaatttttaatcctagcgtgtg

SEQ ID NO: 89094 - DNA, 25 bp, Saccharomyces pastorianus
atggatttagcccaacaccaaagaa

SEQ ID NO: 89095 - DNA, 25 bp, Saccharomyces pastorianus
atgtactgctgctgtttgcgtatta

SEQ ID NO: 89096 - DNA, 25 bp, Saccharomyces pastorianus
ggagcttccggattcagtttctgat

SEQ ID NO: 89097 - DNA, 25 bp, Saccharomyces pastorianus
cagcccatttaccacgagcgtagaa

SEQ ID NO: 89098 - DNA, 25 bp, Saccharomyces pastorianus
gaacgattcattcctagccattgac

SEQ ID NO: 89099 - DNA, 25 bp, Saccharomyces pastorianus
gatagtttagtagtgggcagcccat

SEQ ID NO: 89100 - DNA, 25 bp, Saccharomyces pastorianus
tatgctggcagtgacgagatcgtta

SEQ ID NO: 89101 - DNA, 25 bp, Saccharomyces pastorianus
gatcataaggcatctgacactttgg

SEQ ID NO: 89102 - DNA, 25 bp, Saccharomyces pastorianus
cagcaaatgttggtgattctcgaat

SEQ ID NO: 89103 - DNA, 25 bp, Saccharomyces pastorianus
ttgcgtattacgttgggagcttccg

SEQ ID NO: 89104 - DNA, 25 bp, Saccharomyces pastorianus
aataatgatttaccaacgaccgttg

SEQ ID NO: 89105 - DNA, 25 bp, Saccharomyces pastorianus
gtggacgaaaccaaaggctttgacg

SEQ ID NO: 89106 - DNA, 25 bp, Saccharomyces pastorianus
tggttttgactccacagccttcaat

SEQ ID NO: 89107 - DNA, 25 bp, Saccharomyces pastorianus
gaccgttgtttccaatcctggagat

SEQ ID NO: 89108 - DNA, 25 bp, Saccharomyces pastorianus
caatagcaccaagaacggcaaggat

SEQ ID NO: 89109 - DNA, 25 bp, Saccharomyces pastorianus
tatcgactggtcgaccactggagat

SEQ ID NO: 89110 - DNA, 25 bp, Saccharomyces pastorianus
tcctccagccgacaacggtgaagaa

SEQ ID NO: 89111 - DNA, 25 bp, Saccharomyces pastorianus
ggctttgacgataatgactcaggta

SEQ ID NO: 89112 - DNA, 25 bp, Saccharomyces pastorianus
aggccttgacagtactggttttgac

SEQ ID NO: 89113 - DNA, 25 bp, Saccharomyces pastorianus
ttcgatgttttcaggccttgacagt

SEQ ID NO: 89114 - DNA, 25 bp, Saccharomyces pastorianus
acagccttcaatgccacggtggacg

SEQ ID NO: 89115 - DNA, 25 bp, Saccharomyces pastorianus
gagatccgaatatgcccaagaggcc

SEQ ID NO: 89116 - DNA, 25 bp, Saccharomyces pastorianus
aaactgtgaggatccattgccgact

SEQ ID NO: 89117 - DNA, 25 bp, Saccharomyces pastorianus
ggcctccttcaaacaggaactattg

SEQ ID NO: 89118 - DNA, 25 bp, Saccharomyces pastorianus
ggaatccaggatagaacttgatcct

SEQ ID NO: 89119 - DNA, 25 bp, Saccharomyces pastorianus
gaacttgatcctgagttaaactgtg

SEQ ID NO: 89120 - DNA, 25 bp, Saccharomyces pastorianus
gtgaggatccattgccgactctggc

SEQ ID NO: 89121 - DNA, 25 bp, Saccharomyces pastorianus
gaatacggtgttttactggagaggt

SEQ ID NO: 89122 - DNA, 25 bp, Saccharomyces pastorianus
ggaactattgacgaaaccatttcga

SEQ ID NO: 89123 - DNA, 25 bp, Saccharomyces pastorianus
agactcaaattagaatacggtgttt

SEQ ID NO: 89124 - DNA, 25 bp, Saccharomyces pastorianus
aatccaaaggtcacgactttcggtg

SEQ ID NO: 89125 - DNA, 25 bp, Saccharomyces pastorianus
gactctggcctccttcaaacaggaa

SEQ ID NO: 89126 - DNA, 25 bp, Saccharomyces pastorianus
ggaagtcctaatatcggtgatcaat

SEQ ID NO: 89127 - DNA, 25 bp, Saccharomyces pastorianus
gactcgaggtcatttcagatcttct

SEQ ID NO: 89128 - DNA, 25 bp, Saccharomyces pastorianus
aacgattttattaccttgagagatg

SEQ ID NO: 89129 - DNA, 25 bp, Saccharomyces pastorianus
gtcagaaccacagttagaacccata

SEQ ID NO: 89130 - DNA, 25 bp, Saccharomyces pastorianus
tagaacccatataccaagcaacaag

SEQ ID NO: 89131 - DNA, 25 bp, Saccharomyces pastorianus
taaaactctctatctctcatgcaat

SEQ ID NO: 89132 - DNA, 25 bp, Saccharomyces pastorianus
acagctgggccattctcatgaagaa

SEQ ID NO: 89133 - DNA, 25 bp, Saccharomyces pastorianus
agagatcaatcagcgcgtttcactt

SEQ ID NO: 89134 - DNA, 25 bp, Saccharomyces pastorianus
tcagcgcgtttcacttttaaatcaa

SEQ ID NO: 89135 - DNA, 25 bp, Saccharomyces pastorianus
aaatttcacttttcgaagagcttgt

SEQ ID NO: 89136 - DNA, 25 bp, Saccharomyces pastorianus
ggatcagttttagactctccggaaa

SEQ ID NO: 89137 - DNA, 25 bp, Saccharomyces pastorianus
gagcgttctcgaggcccaatttcta

SEQ ID NO: 89138 - DNA, 25 bp, Saccharomyces pastorianus
gcattccaccaatatcattctttag

SEQ ID NO: 89139 - DNA, 25 bp, Saccharomyces pastorianus
acgaatccgcaactacattctgggc

SEQ ID NO: 89140 - DNA, 25 bp, Saccharomyces pastorianus
acagatcctcatcgtgttgaagcag

SEQ ID NO: 89141 - DNA, 25 bp, Saccharomyces pastorianus
ttagctgcatgtacggagcgttctc

SEQ ID NO: 89142 - DNA, 25 bp, Saccharomyces pastorianus
gcattatgggctggacttgccacga

SEQ ID NO: 89143 - DNA, 25 bp, Saccharomyces pastorianus
aagagcgcttggtgcttgcattcca

SEQ ID NO: 89144 - DNA, 25 bp, Saccharomyces pastorianus
gaaggcctccgttcttatggttatt

SEQ ID NO: 89145 - DNA, 25 bp, Saccharomyces pastorianus
ggtcaatgccagttacattcttggt

SEQ ID NO: 89146 - DNA, 25 bp, Saccharomyces pastorianus
aaattcttgcttgggaaggcctccg

SEQ ID NO: 89147 - DNA, 25 bp, Saccharomyces pastorianus
atttggttgggcaccccatcaaatt

SEQ ID NO: 89148 - DNA, 25 bp, Saccharomyces pastorianus
gaagataagaaacctgtcgtcgaca

SEQ ID NO: 89149 - DNA, 25 bp, Saccharomyces pastorianus
atcctctgctgtcttctccatgttt

SEQ ID NO: 89150 - DNA, 25 bp, Saccharomyces pastorianus
aaggaagaggctgctccaaagccac

SEQ ID NO: 89151 - DNA, 25 bp, Saccharomyces pastorianus
tgaaccagtggttcacctggaaaag

SEQ ID NO: 89152 - DNA, 25 bp, Saccharomyces pastorianus
gatgatgctccagaatcaccagata

SEQ ID NO: 89153 - DNA, 25 bp, Saccharomyces pastorianus
atagatcttgggtgtatgcttgtac

SEQ ID NO: 89154 - DNA, 25 bp, Saccharomyces pastorianus
agaatcaccagatatccattttgaa

SEQ ID NO: 89155 - DNA, 25 bp, Saccharomyces pastorianus
gcagaagccttcacttttgctatca

SEQ ID NO: 89156 - DNA, 25 bp, Saccharomyces pastorianus
gtatgcttgtacagcagatattgca

SEQ ID NO: 89157 - DNA, 25 bp, Saccharomyces pastorianus
gaccttaaagatttgtgctaaccac

SEQ ID NO: 89158 - DNA, 25 bp, Saccharomyces pastorianus
gaagcctaacgttggttctgataga

SEQ ID NO: 89159 - DNA, 25 bp, Saccharomyces pastorianus
gactgttgaatcttcttcctttgat

SEQ ID NO: 89160 - DNA, 25 bp, Saccharomyces pastorianus
gacttcaatctgctaagacccacta

SEQ ID NO: 89161 - DNA, 25 bp, Saccharomyces pastorianus
ataaagacttacagcgcccagtggc

SEQ ID NO: 89162 - DNA, 25 bp, Saccharomyces pastorianus
agcgccaccgcctttatcagaagaa

SEQ ID NO: 89163 - DNA, 25 bp, Saccharomyces pastorianus
atgatgatccatttagctcttcctc

SEQ ID NO: 89164 - DNA, 25 bp, Saccharomyces pastorianus
gccgtcgtacgaattcctagtgaaa

SEQ ID NO: 89165 - DNA, 25 bp, Saccharomyces pastorianus
gagcagatcgacttcctaatacata

SEQ ID NO: 89166 - DNA, 25 bp, Saccharomyces pastorianus
gaattatgggtcaagctccgattag

SEQ ID NO: 89167 - DNA, 25 bp, Saccharomyces pastorianus
gagcagcattctccgactgttgaat

SEQ ID NO: 89168 - DNA, 25 bp, Saccharomyces pastorianus
gcactccttatacttctgttttcaa

SEQ ID NO: 89169 - DNA, 25 bp, Saccharomyces pastorianus
acacagcgttgcgttgaagactatg

SEQ ID NO: 89170 - DNA, 25 bp, Saccharomyces pastorianus
tcgtttctttgaaagtcgcgattat

SEQ ID NO: 89171 - DNA, 25 bp, Saccharomyces pastorianus
ctttgaaagtcgcgattattccgag

SEQ ID NO: 89172 - DNA, 25 bp, Saccharomyces pastorianus
gaaaatagttataagagtgccgaaa

SEQ ID NO: 89173 - DNA, 25 bp, Saccharomyces pastorianus
tttcgtttctttgaaagtcgcgatt

SEQ ID NO: 89174 - DNA, 25 bp, Saccharomyces pastorianus
ttttcgtttctttgaaagtcgcgat

SEQ ID NO: 89175 - DNA, 25 bp, Saccharomyces pastorianus
acttgcggtatagaaaatagttata

SEQ ID NO: 89176 - DNA, 25 bp, Saccharomyces pastorianus
tttctttgaaagtcgcgattattcc

SEQ ID NO: 89177 - DNA, 25 bp, Saccharomyces pastorianus
ttcgtttctttgaaagtcgcgatta

SEQ ID NO: 89178 - DNA, 25 bp, Saccharomyces pastorianus
cgtttctttgaaagtcgcgattatt

SEQ ID NO: 89179 - DNA, 25 bp, Saccharomyces pastorianus
gtttctttgaaagtcgcgattattc

SEQ ID NO: 89180 - DNA, 25 bp, Saccharomyces pastorianus
ttctttgaaagtcgcgattattccg

SEQ ID NO: 89181 - DNA, 25 bp, Saccharomyces pastorianus
tggtatattccacattcgctaagcc

SEQ ID NO: 89182 - DNA, 25 bp, Saccharomyces pastorianus
tcattatccgttgtggtggctaatc

SEQ ID NO: 89183 - DNA, 25 bp, Saccharomyces pastorianus
gaactcaaccattctttatcggcag

SEQ ID NO: 89184 - DNA, 25 bp, Saccharomyces pastorianus
attcgctaagcctggtcaaattgca

SEQ ID NO: 89185 - DNA, 25 bp, Saccharomyces pastorianus
aggtgattcggcaagcttctggcaa

SEQ ID NO: 89186 - DNA, 25 bp, Saccharomyces pastorianus
gagcgaaattcatcaagtcctatca

SEQ ID NO: 89187 - DNA, 25 bp, Saccharomyces pastorianus
gagaagctccaaatactggcccacg

SEQ ID NO: 89188 - DNA, 25 bp, Saccharomyces pastorianus
actggcccacgattattcattatcc

SEQ ID NO: 89189 - DNA, 25 bp, Saccharomyces pastorianus
gacttggtccaatcacgtttcaaca

SEQ ID NO: 89190 - DNA, 25 bp, Saccharomyces pastorianus
gtgtccccaatctcggtttgacttg

SEQ ID NO: 89191 - DNA, 25 bp, Saccharomyces pastorianus
ggaaatttgactatcgtgtccccaa

SEQ ID NO: 89192 - DNA, 25 bp, Saccharomyces pastorianus
atctaagcgcatcaccaacattttc

SEQ ID NO: 89193 - DNA, 25 bp, Saccharomyces pastorianus
aggcctgcaggcaagtgcacaaaca

SEQ ID NO: 89194 - DNA, 25 bp, Saccharomyces pastorianus
agatcttttatgcttgcttttcaaa

SEQ ID NO: 89195 - DNA, 25 bp, Saccharomyces pastorianus
accaacattttctggcgtcagtcca

SEQ ID NO: 89196 - DNA, 25 bp, Saccharomyces pastorianus
cgtcagtccaccagctaacataaaa

SEQ ID NO: 89197 - DNA, 25 bp, Saccharomyces pastorianus
gtcagaaatcgagttccaatccaaa

SEQ ID NO: 89198 - DNA, 25 bp, Saccharomyces pastorianus
ttgcttttcaaaaggcctgcaggca

SEQ ID NO: 89199 - DNA, 25 bp, Saccharomyces pastorianus
agtcttttacaccatttgtctccac

SEQ ID NO: 89200 - DNA, 25 bp, Saccharomyces pastorianus
aacctatttcttagcatttttgacg

SEQ ID NO: 89201 - DNA, 25 bp, Saccharomyces pastorianus
tccgcttacatcaacaccaataacg

SEQ ID NO: 89202 - DNA, 25 bp, Saccharomyces pastorianus
tgccttccaacccagtcagaaatcg

SEQ ID NO: 89203 - DNA, 25 bp, Saccharomyces pastorianus
gagatgtctcttagcataccaaagg

SEQ ID NO: 89204 - DNA, 25 bp, Saccharomyces pastorianus
tagtgcctccgagcgatgtatttat

SEQ ID NO: 89205 - DNA, 25 bp, Saccharomyces pastorianus
taaggcagtctgatgtagagcgttt

SEQ ID NO: 89206 - DNA, 25 bp, Saccharomyces pastorianus
agactcccagtttttcgtaaggcag

SEQ ID NO: 89207 - DNA, 25 bp, Saccharomyces pastorianus
tgaatacggcgtgtttaaccttatt

SEQ ID NO: 89208 - DNA, 25 bp, Saccharomyces pastorianus
tgatttatccggctctttagtgcct

SEQ ID NO: 89209 - DNA, 25 bp, Saccharomyces pastorianus
aatggtctggacttgatgagtagca

SEQ ID NO: 89210 - DNA, 25 bp, Saccharomyces pastorianus
ggtgacttggtcgatattgatttat

SEQ ID NO: 89211 - DNA, 25 bp, Saccharomyces pastorianus
ggttgaggacagacatactagattc

SEQ ID NO: 89212 - DNA, 25 bp, Saccharomyces pastorianus
aatgccagtatttcgttaccttgtt

SEQ ID NO: 89213 - DNA, 25 bp, Saccharomyces pastorianus
gagtagcattacgtttagccaacaa

SEQ ID NO: 89214 - DNA, 25 bp, Saccharomyces pastorianus
gttctacccgattgaacttgccaaa

SEQ ID NO: 89215 - DNA, 25 bp, Saccharomyces pastorianus
gcctatcggactggctgctagagac

SEQ ID NO: 89216 - DNA, 25 bp, Saccharomyces pastorianus
atcaggtagtgcatctccaacttta

SEQ ID NO: 89217 - DNA, 25 bp, Saccharomyces pastorianus
gtactggttcaatggctatgccaag

SEQ ID NO: 89218 - DNA, 25 bp, Saccharomyces pastorianus
agtttgcggagcaactcctggccaa

SEQ ID NO: 89219 - DNA, 25 bp, Saccharomyces pastorianus
gaggtcggccttgttacatcaggta

SEQ ID NO: 89220 - DNA, 25 bp, Saccharomyces pastorianus
ttcttgcccgatgccgaaacagagg

SEQ ID NO: 89221 - DNA, 25 bp, Saccharomyces pastorianus
gtatcacaccagtagaagctgcgtt

SEQ ID NO: 89222 - DNA, 25 bp, Saccharomyces pastorianus
gctgcgttaaactgggtgatttcaa

SEQ ID NO: 89223 - DNA, 25 bp, Saccharomyces pastorianus
gacggttctttggttcaaattgcta

SEQ ID NO: 89224 - DNA, 25 bp, Saccharomyces pastorianus
gggccagctgccagaaatggtgtca

SEQ ID NO: 89225 - DNA, 25 bp, Saccharomyces pastorianus
attcaacatgattacgaggacccga

SEQ ID NO: 89226 - DNA, 25 bp, Saccharomyces pastorianus
aaagtattcttggatagcgatgcag

SEQ ID NO: 89227 - DNA, 25 bp, Saccharomyces pastorianus
ggagcaattgcactggatttacaaa

SEQ ID NO: 89228 - DNA, 25 bp, Saccharomyces pastorianus
gagcccactagaacttttgcagatt

SEQ ID NO: 89229 - DNA, 25 bp, Saccharomyces pastorianus
tgagtatatggaccatctgcgcccg

SEQ ID NO: 89230 - DNA, 25 bp, Saccharomyces pastorianus
aatgaaaatctagggcgcgcagtcc

SEQ ID NO: 89231 - DNA, 25 bp, Saccharomyces pastorianus
ggagcaatgaacaactagcccagct

SEQ ID NO: 89232 - DNA, 25 bp, Saccharomyces pastorianus
cgcagtcctcgtggacggtatagtt

SEQ ID NO: 89233 - DNA, 25 bp, Saccharomyces pastorianus
gaaaagcacgctgtaacttctcaaa

SEQ ID NO: 89234 - DNA, 25 bp, Saccharomyces pastorianus
tagcccagctgatcactgagtatat

SEQ ID NO: 89235 - DNA, 25 bp, Saccharomyces pastorianus
tatgtggctgttatgcgctatacga

SEQ ID NO: 89236 - DNA, 25 bp, Saccharomyces pastorianus
taggacaaatagtctcagcttggag

SEQ ID NO: 89237 - DNA, 25 bp, Saccharomyces pastorianus
tgaatcaaagagcacggaccgaagt

SEQ ID NO: 89238 - DNA, 25 bp, Saccharomyces pastorianus
agtggactcggacattgagctcgat

SEQ ID NO: 89239 - DNA, 25 bp, Saccharomyces pastorianus
gcgaccaatatgagcttttgtcaca

SEQ ID NO: 89240 - DNA, 25 bp, Saccharomyces pastorianus
tctccttttcttcgcgatttgagtt

SEQ ID NO: 89241 - DNA, 25 bp, Saccharomyces pastorianus
ggatatcacactaatcagcgaccaa

SEQ ID NO: 89242 - DNA, 25 bp, Saccharomyces pastorianus
gtgattatgcaatgtttcccactaa

SEQ ID NO: 89243 - DNA, 25 bp, Saccharomyces pastorianus
acaattttgcgatctgtctcctttt

SEQ ID NO: 89244 - DNA, 25 bp, Saccharomyces pastorianus
aatcgggatctcttgaggatatcac

SEQ ID NO: 89245 - DNA, 25 bp, Saccharomyces pastorianus
gattcaagtgatgctgctttgacag

SEQ ID NO: 89246 - DNA, 25 bp, Saccharomyces pastorianus
aagggtcccagcaacgatgatcaac

SEQ ID NO: 89247 - DNA, 25 bp, Saccharomyces pastorianus
gagaatattgcatgaccatccgaca

SEQ ID NO: 89248 - DNA, 25 bp, Saccharomyces pastorianus
gtgtttctgcctaagtttacgcgga

SEQ ID NO: 89249 - DNA, 25 bp, Saccharomyces pastorianus
tcactcgcttggaccggatgggctt

SEQ ID NO: 89250 - DNA, 25 bp, Saccharomyces pastorianus
aaaattcatactgtctcactcgctt

SEQ ID NO: 89251 - DNA, 25 bp, Saccharomyces pastorianus
agcctttaccaatcgatagtgttca

SEQ ID NO: 89252 - DNA, 25 bp, Saccharomyces pastorianus
attccaggccaacccaagtaagtcg

SEQ ID NO: 89253 - DNA, 25 bp, Saccharomyces pastorianus
acaaatagttccctcataacccaga

SEQ ID NO: 89254 - DNA, 25 bp, Saccharomyces pastorianus
tcaaatattgttccgcgggtacgcg

SEQ ID NO: 89255 - DNA, 25 bp, Saccharomyces pastorianus
ggaaggcttccacaattatgcactt

SEQ ID NO: 89256 - DNA, 25 bp, Saccharomyces pastorianus
agtgttcatcgcacgtaatgttgtt

SEQ ID NO: 89257 - DNA, 25 bp, Saccharomyces pastorianus
cgcgacactattcccagctaataat

SEQ ID NO: 89258 - DNA, 25 bp, Saccharomyces pastorianus
tgcaaaaggcttgtcacacaatctc

SEQ ID NO: 89259 - DNA, 25 bp, Saccharomyces pastorianus
agctttcgtttgaaatcgcgtctcc

SEQ ID NO: 89260 - DNA, 25 bp, Saccharomyces pastorianus
ctatatggtatattctcctgttttc

SEQ ID NO: 89261 - DNA, 25 bp, Saccharomyces pastorianus
gttctgtcttgcaaaaggcttgtca

SEQ ID NO: 89262 - DNA, 25 bp, Saccharomyces pastorianus
aatttcagcgataaccctttctcaa

SEQ ID NO: 89263 - DNA, 25 bp, Saccharomyces pastorianus
atatttgtctattcttcttttatgg

SEQ ID NO: 89264 - DNA, 25 bp, Saccharomyces pastorianus
ctaactctagttgtgatattttctc

SEQ ID NO: 89265 - DNA, 25 bp, Saccharomyces pastorianus
gtgatattttctctttctatttaaa

SEQ ID NO: 89266 - DNA, 25 bp, Saccharomyces pastorianus
tatattctcctgttttctccttttt

SEQ ID NO: 89267 - DNA, 25 bp, Saccharomyces pastorianus
ttcttttatggcttcttgttctcct

SEQ ID NO: 89268 - DNA, 25 bp, Saccharomyces pastorianus
tgttctcctgttctgtcttgcaaaa

SEQ ID NO: 89269 - DNA, 25 bp, Saccharomyces pastorianus
actgtttgttggttgatcgctgcct

SEQ ID NO: 89270 - DNA, 25 bp, Saccharomyces pastorianus
aattgctaaccacttcggtgctgac

SEQ ID NO: 89271 - DNA, 25 bp, Saccharomyces pastorianus
gtctaggtgctgctattgtcgttag

SEQ ID NO: 89272 - DNA, 25 bp, Saccharomyces pastorianus
agtgatggctccaaaagctcctgtt

SEQ ID NO: 89273 - DNA, 25 bp, Saccharomyces pastorianus
ttattgcttacccaacttgtttcgg

SEQ ID NO: 89274 - DNA, 25 bp, Saccharomyces pastorianus
aaatctgtatgctagctggtacccc

SEQ ID NO: 89275 - DNA, 25 bp, Saccharomyces pastorianus
aaagctcctgttgctagtccaagac

SEQ ID NO: 89276 - DNA, 25 bp, Saccharomyces pastorianus
tgggctaccatttcggacctagtga

SEQ ID NO: 89277 - DNA, 25 bp, Saccharomyces pastorianus
acattccttgtcttcttcagcatta

SEQ ID NO: 89278 - DNA, 25 bp, Saccharomyces pastorianus
gactctgccggtattttctatggta

SEQ ID NO: 89279 - DNA, 25 bp, Saccharomyces pastorianus
tggttcttagctttgccatggccaa

SEQ ID NO: 89280 - DNA, 25 bp, Saccharomyces pastorianus
ctcatcatttgtgtcatcttctaac

SEQ ID NO: 89281 - DNA, 25 bp, Saccharomyces pastorianus
tacatgctaatattacgatcattcc

SEQ ID NO: 89282 - DNA, 25 bp, Saccharomyces pastorianus
ccttgcgtttcagtttccactaatt

SEQ ID NO: 89283 - DNA, 25 bp, Saccharomyces pastorianus
gtttccactaatttagatgactatt

SEQ ID NO: 89284 - DNA, 25 bp, Saccharomyces pastorianus
catgctaatattacgatcattcctc

SEQ ID NO: 89285 - DNA, 25 bp, Saccharomyces pastorianus
tctacatgctaatattacgatcatt

SEQ ID NO: 89286 - DNA, 25 bp, Saccharomyces pastorianus
ttctcatcatttgtgtcatcttcta

SEQ ID NO: 89287 - DNA, 25 bp, Saccharomyces pastorianus
tgcgtttcagtttccactaatttag

SEQ ID NO: 89288 - DNA, 25 bp, Saccharomyces pastorianus
ctacatgctaatattacgatcattc

SEQ ID NO: 89289 - DNA, 25 bp, Saccharomyces pastorianus
acatgctaatattacgatcattcct

SEQ ID NO: 89290 - DNA, 25 bp, Saccharomyces pastorianus
gtttcagtttccactaatttagatg

SEQ ID NO: 89291 - DNA, 25 bp, Saccharomyces pastorianus
aacagcctcctcctcggagagaatc

SEQ ID NO: 89292 - DNA, 25 bp, Saccharomyces pastorianus
gagaatccggtggttgctgtagaac

SEQ ID NO: 89293 - DNA, 25 bp, Saccharomyces pastorianus
tgtagaacctgttgtcacttcctat

SEQ ID NO: 89294 - DNA, 25 bp, Saccharomyces pastorianus
gttgctgtagaacctgttgtcactt

SEQ ID NO: 89295 - DNA, 25 bp, Saccharomyces pastorianus
ctgttgtcacttcctatgttgtcta

SEQ ID NO: 89296 - DNA, 25 bp, Saccharomyces pastorianus
atgaggcatcatcaaaatatgcatt

SEQ ID NO: 89297 - DNA, 25 bp, Saccharomyces pastorianus
aacctgttgtcacttcctatgttgt

SEQ ID NO: 89298 - DNA, 25 bp, Saccharomyces pastorianus
atccggtggttgctgtagaacctgt

SEQ ID NO: 89299 - DNA, 25 bp, Saccharomyces pastorianus
tcctcctcggagagaatccggtggt

SEQ ID NO: 89300 - DNA, 25 bp, Saccharomyces pastorianus
tagaacctgttgtcacttcctatgt

SEQ ID NO: 89301 - DNA, 25 bp, Saccharomyces pastorianus
aaatatgcattatgccccacaacaa

SEQ ID NO: 89302 - DNA, 25 bp, Saccharomyces pastorianus
gcctacactgaattgaacgatccat

SEQ ID NO: 89303 - DNA, 25 bp, Saccharomyces pastorianus
gatcaattacatacagctgagactg

SEQ ID NO: 89304 - DNA, 25 bp, Saccharomyces pastorianus
gttcccatctggtgatcaattacat

SEQ ID NO: 89305 - DNA, 25 bp, Saccharomyces pastorianus
gatgaaaccttctgtaatgctctag

SEQ ID NO: 89306 - DNA, 25 bp, Saccharomyces pastorianus
atgttagataagcttgtcggtgaat

SEQ ID NO: 89307 - DNA, 25 bp, Saccharomyces pastorianus
ggaaatttgtaatgcctacactgaa

SEQ ID NO: 89308 - DNA, 25 bp, Saccharomyces pastorianus
ttttggccaccctcaaatgatgtct

SEQ ID NO: 89309 - DNA, 25 bp, Saccharomyces pastorianus
caaattagaatgtccacctccacta

SEQ ID NO: 89310 - DNA, 25 bp, Saccharomyces pastorianus
gcgtttcgaggtctttgtagctaca

SEQ ID NO: 89311 - DNA, 25 bp, Saccharomyces pastorianus
ggtattcaacgttaagttcccatct

SEQ ID NO: 89312 - DNA, 25 bp, Saccharomyces pastorianus
gaagctcaattagtcgatgaaacct

SEQ ID NO: 89313 - DNA, 25 bp, Saccharomyces pastorianus
tgggtatcccattgacaggtcctaa

SEQ ID NO: 89314 - DNA, 25 bp, Saccharomyces pastorianus
tacgaaccccgaagtgctacagatg

SEQ ID NO: 89315 - DNA, 25 bp, Saccharomyces pastorianus
tcctaaacctttgcccacgagaaga

SEQ ID NO: 89316 - DNA, 25 bp, Saccharomyces pastorianus
taaaatcacctttcgtgcacgctaa

SEQ ID NO: 89317 - DNA, 25 bp, Saccharomyces pastorianus
gacgccaatggcctcgaaaaatcac

SEQ ID NO: 89318 - DNA, 25 bp, Saccharomyces pastorianus
gacgcgcccatatcctgtaaatgta

SEQ ID NO: 89319 - DNA, 25 bp, Saccharomyces pastorianus
gaaaacctcgatttttattcagact

SEQ ID NO: 89320 - DNA, 25 bp, Saccharomyces pastorianus
gctcaaactagtgctgtcggacaaa

SEQ ID NO: 89321 - DNA, 25 bp, Saccharomyces pastorianus
gaggcagtctactatgctcctttaa

SEQ ID NO: 89322 - DNA, 25 bp, Saccharomyces pastorianus
aatatcgctggacttgggttcggac

SEQ ID NO: 89323 - DNA, 25 bp, Saccharomyces pastorianus
gaagcactctatggcaggcgtcgga

SEQ ID NO: 89324 - DNA, 25 bp, Saccharomyces pastorianus
cagacgctactaccagttctaacta

SEQ ID NO: 89325 - DNA, 25 bp, Saccharomyces pastorianus
acatcgggtcatttagcaaggcata

SEQ ID NO: 89326 - DNA, 25 bp, Saccharomyces pastorianus
gaagcgtctcttttgacaattcatc

SEQ ID NO: 89327 - DNA, 25 bp, Saccharomyces pastorianus
gaggattcactacatcgggtcattt

SEQ ID NO: 89328 - DNA, 25 bp, Saccharomyces pastorianus
atgcacgcagcgattcagtcgacat

SEQ ID NO: 89329 - DNA, 25 bp, Saccharomyces pastorianus
ttgtccgtataagggatgcacgcag

SEQ ID NO: 89330 - DNA, 25 bp, Saccharomyces pastorianus
agactgcttttgatttccgatacca

SEQ ID NO: 89331 - DNA, 25 bp, Saccharomyces pastorianus
gatactctctgaaaacgcggaagca

SEQ ID NO: 89332 - DNA, 25 bp, Saccharomyces pastorianus
aagctcgctatcacaactaacttgt

SEQ ID NO: 89333 - DNA, 25 bp, Saccharomyces pastorianus
aaatttgcgcaagaggattcactac

SEQ ID NO: 89334 - DNA, 25 bp, Saccharomyces pastorianus
ggagccaaaatacttaataacgcct

SEQ ID NO: 89335 - DNA, 25 bp, Saccharomyces pastorianus
ggatgccttggacaagcacgacact

SEQ ID NO: 89336 - DNA, 25 bp, Saccharomyces pastorianus
gatgagtacttctacattacccacc

SEQ ID NO: 89337 - DNA, 25 bp, Saccharomyces pastorianus
gaagacggtcaattattccaccaac

SEQ ID NO: 89338 - DNA, 25 bp, Saccharomyces pastorianus
ttattccaccaactgcacaaggatg

SEQ ID NO: 89339 - DNA, 25 bp, Saccharomyces pastorianus
ttgccatcctacttgactatcgtca

SEQ ID NO: 89340 - DNA, 25 bp, Saccharomyces pastorianus
acgacactgctttgtacccacgttt

SEQ ID NO: 89341 - DNA, 25 bp, Saccharomyces pastorianus
acgtggtattggtggtatattcttt

SEQ ID NO: 89342 - DNA, 25 bp, Saccharomyces pastorianus
ttcatggttatacaaccaccaccct

SEQ ID NO: 89343 - DNA, 25 bp, Saccharomyces pastorianus
gatgagtttgcctgaacatgcttca

SEQ ID NO: 89344 - DNA, 25 bp, Saccharomyces pastorianus
ttggaaccaagatgggaccccacaa

SEQ ID NO: 89345 - DNA, 25 bp, Saccharomyces pastorianus
gtttcgatgctttcttgccatccta

SEQ ID NO: 89346 - DNA, 25 bp, Saccharomyces pastorianus
gaaaggtgatatgcattctcattta

SEQ ID NO: 89347 - DNA, 25 bp, Saccharomyces pastorianus
attggaagcttgtcaacaggcgtgc

SEQ ID NO: 89348 - DNA, 25 bp, Saccharomyces pastorianus
gaattcagaagttgctcagacaaat

SEQ ID NO: 89349 - DNA, 25 bp, Saccharomyces pastorianus
ggagtcaaagctcatcaatttcaat

SEQ ID NO: 89350 - DNA, 25 bp, Saccharomyces pastorianus
caacttctcgcagtgtggagtcaaa

SEQ ID NO: 89351 - DNA, 25 bp, Saccharomyces pastorianus
agtgagccagtcattttactcgcct

SEQ ID NO: 89352 - DNA, 25 bp, Saccharomyces pastorianus
agatcattcttttttagtgagccag

SEQ ID NO: 89353 - DNA, 25 bp, Saccharomyces pastorianus
atgtcttctctacttcaacttctcg

SEQ ID NO: 89354 - DNA, 25 bp, Saccharomyces pastorianus
aacaggcgtgcagatcttttgaaaa

SEQ ID NO: 89355 - DNA, 25 bp, Saccharomyces pastorianus
accttcatcttttattttcttctat

SEQ ID NO: 89356 - DNA, 25 bp, Saccharomyces pastorianus
attttactcgccttttgtgaattca

SEQ ID NO: 89357 - DNA, 25 bp, Saccharomyces pastorianus
aatctcggagagtctttcactaatt

SEQ ID NO: 89358 - DNA, 25 bp, Saccharomyces pastorianus
atcggtcagccattgagcagagaac

SEQ ID NO: 89359 - DNA, 25 bp, Saccharomyces pastorianus
ggcaccgttattgatatccttctta

SEQ ID NO: 89360 - DNA, 25 bp, Saccharomyces pastorianus
gttaaccaatattccttcaattcag

SEQ ID NO: 89361 - DNA, 25 bp, Saccharomyces pastorianus
cttaacccctaccatgttacattat

SEQ ID NO: 89362 - DNA, 25 bp, Saccharomyces pastorianus
gacgaaactcatatcggtcagccat

SEQ ID NO: 89363 - DNA, 25 bp, Saccharomyces pastorianus
gttacattatgcatcgcagcaaggg

SEQ ID NO: 89364 - DNA, 25 bp, Saccharomyces pastorianus
cagatggcactgattttgctctcaa

SEQ ID NO: 89365 - DNA, 25 bp, Saccharomyces pastorianus
tgaccgatgaacagagacgcagatt

SEQ ID NO: 89366 - DNA, 25 bp, Saccharomyces pastorianus
tgagagtaaatattccttaacccct

SEQ ID NO: 89367 - DNA, 25 bp, Saccharomyces pastorianus
gagacacgcgtttcaaattgcaaga

SEQ ID NO: 89368 - DNA, 25 bp, Saccharomyces pastorianus
gaaaactccgttgaacaaatcaagg

SEQ ID NO: 89369 - DNA, 25 bp, Saccharomyces pastorianus
cattgctgacaagaccaagttcgct

SEQ ID NO: 89370 - DNA, 25 bp, Saccharomyces pastorianus
gttgtcctgggtcactctgaaagaa

SEQ ID NO: 89371 - DNA, 25 bp, Saccharomyces pastorianus
cagtctgggccattggtaccggttt

SEQ ID NO: 89372 - DNA, 25 bp, Saccharomyces pastorianus
atgttggtgctaagtgggttgtcct

SEQ ID NO: 89373 - DNA, 25 bp, Saccharomyces pastorianus
cggtgcccaaaacgcctacttgaag

SEQ ID NO: 89374 - DNA, 25 bp, Saccharomyces pastorianus
acaagtcactgtcggtgcccaaaac

SEQ ID NO: 89375 - DNA, 25 bp, Saccharomyces pastorianus
acttgaaggcttccggtgcttacac

SEQ ID NO: 89376 - DNA, 25 bp, Saccharomyces pastorianus
gtgcttacactggtgaaaactccgt

SEQ ID NO: 89377 - DNA, 25 bp, Saccharomyces pastorianus
agaagccacaagtcactgtcggtgc

SEQ ID NO: 89378 - DNA, 25 bp, Saccharomyces pastorianus
gaagatgacaagttcattgctgaca

SEQ ID NO: 89379 - DNA, 25 bp, Saccharomyces pastorianus
gaagcctggaaaatgttatctgcaa

SEQ ID NO: 89380 - DNA, 25 bp, Saccharomyces pastorianus
taccaatgttcccaacgggagcgta

SEQ ID NO: 89381 - DNA, 25 bp, Saccharomyces pastorianus
tcttcttcagattccctcatggaga

SEQ ID NO: 89382 - DNA, 25 bp, Saccharomyces pastorianus
acccagagatgttgttgtcctagtt

SEQ ID NO: 89383 - DNA, 25 bp, Saccharomyces pastorianus
gttgtcctagttacacatggtattt

SEQ ID NO: 89384 - DNA, 25 bp, Saccharomyces pastorianus
aaacatgcattttggccgagaggac

SEQ ID NO: 89385 - DNA, 25 bp, Saccharomyces pastorianus
tcctgaggaccgtgctacccaaatg

SEQ ID NO: 89386 - DNA, 25 bp, Saccharomyces pastorianus
tccctcatggagaaagtgcggcaga

SEQ ID NO: 89387 - DNA, 25 bp, Saccharomyces pastorianus
gatctacgtatggtcatttcttctt

SEQ ID NO: 89388 - DNA, 25 bp, Saccharomyces pastorianus
gaatccatcaatagatacgtcctga

SEQ ID NO: 89389 - DNA, 25 bp, Saccharomyces pastorianus
tattcaggcacttccatgataggca

SEQ ID NO: 89390 - DNA, 25 bp, Saccharomyces pastorianus
aagtggcccgctgctgtagttgatg

SEQ ID NO: 89391 - DNA, 25 bp, Saccharomyces pastorianus
gcgagaatctcttttcattatcttt

SEQ ID NO: 89392 - DNA, 25 bp, Saccharomyces pastorianus
agacccgtacctttgctgacttgga

SEQ ID NO: 89393 - DNA, 25 bp, Saccharomyces pastorianus
cattccagcaattccttaggcgtaa

SEQ ID NO: 89394 - DNA, 25 bp, Saccharomyces pastorianus
ttaggcgtaacccttggctcgacat

SEQ ID NO: 89395 - DNA, 25 bp, Saccharomyces pastorianus
taacggagaccttattatcattttc

SEQ ID NO: 89396 - DNA, 25 bp, Saccharomyces pastorianus
tggctcgacatttttcagacccgta

SEQ ID NO: 89397 - DNA, 25 bp, Saccharomyces pastorianus
tggcccttttcttttcatgcaaatg

SEQ ID NO: 89398 - DNA, 25 bp, Saccharomyces pastorianus
ttggtatctgtttcctttaacggag

SEQ ID NO: 89399 - DNA, 25 bp, Saccharomyces pastorianus
gttgatgcggcaattccattattat

SEQ ID NO: 89400 - DNA, 25 bp, Saccharomyces pastorianus
gaaaacacattcaagtggcccgctg

SEQ ID NO: 89401 - DNA, 25 bp, Saccharomyces pastorianus
gaacttgtcgttctctaatttgtca

SEQ ID NO: 89402 - DNA, 25 bp, Saccharomyces pastorianus
cctccttgaacctagactctttgaa

SEQ ID NO: 89403 - DNA, 25 bp, Saccharomyces pastorianus
atggtgcatcatccacatctgttaa

SEQ ID NO: 89404 - DNA, 25 bp, Saccharomyces pastorianus
gaagttcacttctggcgatatcaag

SEQ ID NO: 89405 - DNA, 25 bp, Saccharomyces pastorianus
agtgtttctagttctagcgcttcca

SEQ ID NO: 89406 - DNA, 25 bp, Saccharomyces pastorianus
cattggccaaaccttcagtatcgtt

SEQ ID NO: 89407 - DNA, 25 bp, Saccharomyces pastorianus
ggtgctcttgtcgtcgctaataaca

SEQ ID NO: 89408 - DNA, 25 bp, Saccharomyces pastorianus
aaggtttccaagtcatcttctaagg

SEQ ID NO: 89409 - DNA, 25 bp, Saccharomyces pastorianus
attggtggtctcgacaacctaacaa

SEQ ID NO: 89410 - DNA, 25 bp, Saccharomyces pastorianus
ttgttggtaacttcacctccttgaa

SEQ ID NO: 89411 - DNA, 25 bp, Saccharomyces pastorianus
tgttaaactatcgtccacttccaaa

SEQ ID NO: 89412 - DNA, 25 bp, Saccharomyces pastorianus
agatatccagaagcgggacctactg

SEQ ID NO: 89413 - DNA, 25 bp, Saccharomyces pastorianus
gagactaacgatgctattactgcta

SEQ ID NO: 89414 - DNA, 25 bp, Saccharomyces pastorianus
ggtcaaacaagtgtcgctatcctat

SEQ ID NO: 89415 - DNA, 25 bp, Saccharomyces pastorianus
gacctactgcgccagtcactaaatt

SEQ ID NO: 89416 - DNA, 25 bp, Saccharomyces pastorianus
gagaatactgtttgaatgcccagat

SEQ ID NO: 89417 - DNA, 25 bp, Saccharomyces pastorianus
gctggatatgccatgttttagctac

SEQ ID NO: 89418 - DNA, 25 bp, Saccharomyces pastorianus
tgcgaaagacgctatacccctagga

SEQ ID NO: 89419 - DNA, 25 bp, Saccharomyces pastorianus
tttacaattttgttgcgggctcagc

SEQ ID NO: 89420 - DNA, 25 bp, Saccharomyces pastorianus
gttgcgtgtgattttattggccagc

SEQ ID NO: 89421 - DNA, 25 bp, Saccharomyces pastorianus
gctacatgaagctgaggacaccact

SEQ ID NO: 89422 - DNA, 25 bp, Saccharomyces pastorianus
ggccagcatggttttctgtgctgat

SEQ ID NO: 89423 - DNA, 25 bp, Saccharomyces pastorianus
atgtcatcacccgaattacacgcaa

SEQ ID NO: 89424 - DNA, 25 bp, Saccharomyces pastorianus
gcggaacatccccaatcgtggaatt

SEQ ID NO: 89425 - DNA, 25 bp, Saccharomyces pastorianus
aagacgccgatagtgttttatttga

SEQ ID NO: 89426 - DNA, 25 bp, Saccharomyces pastorianus
gcacacgttgccgaagagacaccaa

SEQ ID NO: 89427 - DNA, 25 bp, Saccharomyces pastorianus
gaacagttgtccgtaagtgaccaga

SEQ ID NO: 89428 - DNA, 25 bp, Saccharomyces pastorianus
gaccttattatctttgcttacggcg

SEQ ID NO: 89429 - DNA, 25 bp, Saccharomyces pastorianus
tgaggcgtcctccaacaattaccta

SEQ ID NO: 89430 - DNA, 25 bp, Saccharomyces pastorianus
gagtggcctggaacagtccttgtag

SEQ ID NO: 89431 - DNA, 25 bp, Saccharomyces pastorianus
gcaactggctatcatgaggcgtcct

SEQ ID NO: 89432 - DNA, 25 bp, Saccharomyces pastorianus
ttacctacccatatggaagcgcttg

SEQ ID NO: 89433 - DNA, 25 bp, Saccharomyces pastorianus
taatggcgtcccacgaagaacaggt

SEQ ID NO: 89434 - DNA, 25 bp, Saccharomyces pastorianus
actgtattgtccctcaaagatgccc

SEQ ID NO: 89435 - DNA, 25 bp, Saccharomyces pastorianus
tatagtgagtcaatgccggctcctg

SEQ ID NO: 89436 - DNA, 25 bp, Saccharomyces pastorianus
tgctactccgctgatcgaatcaaga

SEQ ID NO: 89437 - DNA, 25 bp, Saccharomyces pastorianus
gattctgtatgtctgcatctttaac

SEQ ID NO: 89438 - DNA, 25 bp, Saccharomyces pastorianus
tgactcaccagttattcccttacta

SEQ ID NO: 89439 - DNA, 25 bp, Saccharomyces pastorianus
tagtggtgaaatatgtcccggacaa

SEQ ID NO: 89440 - DNA, 25 bp, Saccharomyces pastorianus
aattccggcaaatccagttacgacg

SEQ ID NO: 89441 - DNA, 25 bp, Saccharomyces pastorianus
tagcctttaattcccgttatctacg

SEQ ID NO: 89442 - DNA, 25 bp, Saccharomyces pastorianus
cactaagtcgtttggtgctgctggt

SEQ ID NO: 89443 - DNA, 25 bp, Saccharomyces pastorianus
attgtctacggtgtggctgactcac

SEQ ID NO: 89444 - DNA, 25 bp, Saccharomyces pastorianus
aatgccggctcctgttttagctcaa

SEQ ID NO: 89445 - DNA, 25 bp, Saccharomyces pastorianus
aaccgtcctatgagataattgtcga

SEQ ID NO: 89446 - DNA, 25 bp, Saccharomyces pastorianus
gaattagccgagatcctacctgata

SEQ ID NO: 89447 - DNA, 25 bp, Saccharomyces pastorianus
ggcaagaaccgactccataaaagct

SEQ ID NO: 89448 - DNA, 25 bp, Saccharomyces pastorianus
gatcgaaccaaaaccgtcctatgag

SEQ ID NO: 89449 - DNA, 25 bp, Saccharomyces pastorianus
gatgggttcaaacagactcccttag

SEQ ID NO: 89450 - DNA, 25 bp, Saccharomyces pastorianus
gatcctacctgataactcacctaga

SEQ ID NO: 89451 - DNA, 25 bp, Saccharomyces pastorianus
atgtcgaacctctacaaaattggaa

SEQ ID NO: 89452 - DNA, 25 bp, Saccharomyces pastorianus
gactcccttagttctggtatattgg

SEQ ID NO: 89453 - DNA, 25 bp, Saccharomyces pastorianus
gaagatgctttatgccggcgcatta

SEQ ID NO: 89454 - DNA, 25 bp, Saccharomyces pastorianus
agaggtttcttcaggtttggaggat

SEQ ID NO: 89455 - DNA, 25 bp, Saccharomyces pastorianus
gatttgtactaactgcatatccaac

SEQ ID NO: 89456 - DNA, 25 bp, Saccharomyces pastorianus
caccttctgctaggctgtcatatac

SEQ ID NO: 89457 - DNA, 25 bp, Saccharomyces pastorianus
ttcggtcaccaattaacaagggcag

SEQ ID NO: 89458 - DNA, 25 bp, Saccharomyces pastorianus
aatgtacgccaaacggttgacacta

SEQ ID NO: 89459 - DNA, 25 bp, Saccharomyces pastorianus
gaacatgcgtgcctgaaactatttc

SEQ ID NO: 89460 - DNA, 25 bp, Saccharomyces pastorianus
gaaattaatgctgcttgggcgttac

SEQ ID NO: 89461 - DNA, 25 bp, Saccharomyces pastorianus
tgaaaaatggcccaccttctgctag

SEQ ID NO: 89462 - DNA, 25 bp, Saccharomyces pastorianus
gaacggtggccaactagcatatttt

SEQ ID NO: 89463 - DNA, 25 bp, Saccharomyces pastorianus
atgtaatccttcgagtcaatatcag

SEQ ID NO: 89464 - DNA, 25 bp, Saccharomyces pastorianus
taccgaaatacttggaatacgctgc

SEQ ID NO: 89465 - DNA, 25 bp, Saccharomyces pastorianus
gcttgggcgttacatgaggccattt

SEQ ID NO: 89466 - DNA, 25 bp, Saccharomyces pastorianus
gaatacgctgcaaatatcccaaagt

SEQ ID NO: 89467 - DNA, 25 bp, Saccharomyces pastorianus
gataccgtcaaatcgctgataacga

SEQ ID NO: 89468 - DNA, 25 bp, Saccharomyces pastorianus
gagacagttatcacaaacgcctttg

SEQ ID NO: 89469 - DNA, 25 bp, Saccharomyces pastorianus
gtgggtacccgctatgctataagag

SEQ ID NO: 89470 - DNA, 25 bp, Saccharomyces pastorianus
gaggcgtgcatttaactagttacat

SEQ ID NO: 89471 - DNA, 25 bp, Saccharomyces pastorianus
gaatgagcctttaccattggatgtg

SEQ ID NO: 89472 - DNA, 25 bp, Saccharomyces pastorianus
atctgccatagtttcaatgctcaca

SEQ ID NO: 89473 - DNA, 25 bp, Saccharomyces pastorianus
ggcttctttattcactcaatgtatt

SEQ ID NO: 89474 - DNA, 25 bp, Saccharomyces pastorianus
gatatgtactcggtaagccttttag

SEQ ID NO: 89475 - DNA, 25 bp, Saccharomyces pastorianus
gctactttcaccgatgtcttatatg

SEQ ID NO: 89476 - DNA, 25 bp, Saccharomyces pastorianus
ggatcacaccaattacatgagcaat

SEQ ID NO: 89477 - DNA, 25 bp, Saccharomyces pastorianus
tggaagcccgaatgattgaatctgc

SEQ ID NO: 89478 - DNA, 25 bp, Saccharomyces pastorianus
ttggcctcgccaacaaggatgagag

SEQ ID NO: 89479 - DNA, 25 bp, Saccharomyces pastorianus
atgttagtgaccatgttggcctcgc

SEQ ID NO: 89480 - DNA, 25 bp, Saccharomyces pastorianus
aatggatttgcaactggacccgttt

SEQ ID NO: 89481 - DNA, 25 bp, Saccharomyces pastorianus
gatttctggcacatctatttcttac

SEQ ID NO: 89482 - DNA, 25 bp, Saccharomyces pastorianus
gtggaaagtctagcccagtcatatt

SEQ ID NO: 89483 - DNA, 25 bp, Saccharomyces pastorianus
agtagcttcgataatgctgcagaaa

SEQ ID NO: 89484 - DNA, 25 bp, Saccharomyces pastorianus
tacagggcgacaaagatatctccaa

SEQ ID NO: 89485 - DNA, 25 bp, Saccharomyces pastorianus
ctggacccgtttgatgtggatgaaa

SEQ ID NO: 89486 - DNA, 25 bp, Saccharomyces pastorianus
tttttggtctggcttcagtagcttc

SEQ ID NO: 89487 - DNA, 25 bp, Saccharomyces pastorianus
gatatgttctattttacagggcgac

SEQ ID NO: 89488 - DNA, 25 bp, Saccharomyces pastorianus
aaagttgctgtgtctcaagagggat

SEQ ID NO: 89489 - DNA, 25 bp, Saccharomyces pastorianus
gaacagggtttgtttgatagcaaca

SEQ ID NO: 89490 - DNA, 25 bp, Saccharomyces pastorianus
cgcctttcctcacctaaagaacaat

SEQ ID NO: 89491 - DNA, 25 bp, Saccharomyces pastorianus
cagattataagcaacctggaatgga

SEQ ID NO: 89492 - DNA, 25 bp, Saccharomyces pastorianus
gaacacggcaagaatccagattata

SEQ ID NO: 89493 - DNA, 25 bp, Saccharomyces pastorianus
ttgagaaccacttttttgcgcactc

SEQ ID NO: 89494 - DNA, 25 bp, Saccharomyces pastorianus
gcactccaagacaattgatgcgtaa

SEQ ID NO: 89495 - DNA, 25 bp, Saccharomyces pastorianus
cacttttttgcgcactccaagacaa

SEQ ID NO: 89496 - DNA, 25 bp, Saccharomyces pastorianus
aggttggacactttggaacacggca

SEQ ID NO: 89497 - DNA, 25 bp, Saccharomyces pastorianus
aagggcgtctttctcaatcgtcact

SEQ ID NO: 89498 - DNA, 25 bp, Saccharomyces pastorianus
tcaatcgtcactagggccgcctttc

SEQ ID NO: 89499 - DNA, 25 bp, Saccharomyces pastorianus
tgatgcgtaaatcgccaagggcgtc

SEQ ID NO: 89500 - DNA, 25 bp, Saccharomyces pastorianus
aggagacactaattggtcatattat

SEQ ID NO: 89501 - DNA, 25 bp, Saccharomyces pastorianus
tattgctcacgagccattgatacca

SEQ ID NO: 89502 - DNA, 25 bp, Saccharomyces pastorianus
gaaattatcagctttcgtttgatca

SEQ ID NO: 89503 - DNA, 25 bp, Saccharomyces pastorianus
gaacaccaatgttgctaaggacaaa

SEQ ID NO: 89504 - DNA, 25 bp, Saccharomyces pastorianus
ctggctactttacttttaactgact

SEQ ID NO: 89505 - DNA, 25 bp, Saccharomyces pastorianus
aaaattgtccttattgctcacgagc

SEQ ID NO: 89506 - DNA, 25 bp, Saccharomyces pastorianus
tgttcaggtcttttcatcagagaga

SEQ ID NO: 89507 - DNA, 25 bp, Saccharomyces pastorianus
agcagattttgaacttggaaagcca

SEQ ID NO: 89508 - DNA, 25 bp, Saccharomyces pastorianus
gtaatcatattggtattcactctgt

SEQ ID NO: 89509 - DNA, 25 bp, Saccharomyces pastorianus
aattgtccagagctatgttcaggtc

SEQ ID NO: 89510 - DNA, 25 bp, Saccharomyces pastorianus
attcactctgtagtaatcaagccag

SEQ ID NO: 89511 - DNA, 25 bp, Saccharomyces pastorianus
gtgaaattgcctactcgaatacgaa

SEQ ID NO: 89512 - DNA, 25 bp, Saccharomyces pastorianus
aatgcaactgcagagctgaacctcc

SEQ ID NO: 89513 - DNA, 25 bp, Saccharomyces pastorianus
ctggcgctggcgtagatgtaaatac

SEQ ID NO: 89514 - DNA, 25 bp, Saccharomyces pastorianus
agcaacctccacaggatattctttc

SEQ ID NO: 89515 - DNA, 25 bp, Saccharomyces pastorianus
aaaccaaggagtgccctcagcgaaa

SEQ ID NO: 89516 - DNA, 25 bp, Saccharomyces pastorianus
acctccccacggtcgatgagcaaag

SEQ ID NO: 89517 - DNA, 25 bp, Saccharomyces pastorianus
gcaacttatatctcagtcccttaaa

SEQ ID NO: 89518 - DNA, 25 bp, Saccharomyces pastorianus
tcgaatacgaacaccaacactgaaa

SEQ ID NO: 89519 - DNA, 25 bp, Saccharomyces pastorianus
gagaaccgcaatactggcgctggcg

SEQ ID NO: 89520 - DNA, 25 bp, Saccharomyces pastorianus
aaggtacaactgctattgcatatca

SEQ ID NO: 89521 - DNA, 25 bp, Saccharomyces pastorianus
taaaagggttcatgccaatcttcaa

SEQ ID NO: 89522 - DNA, 25 bp, Saccharomyces pastorianus
cattgaagttcgtccaagattcgtc

SEQ ID NO: 89523 - DNA, 25 bp, Saccharomyces pastorianus
tggtacggtcgacctggattccaga

SEQ ID NO: 89524 - DNA, 25 bp, Saccharomyces pastorianus
gggcaactacggattctatcctgtc

SEQ ID NO: 89525 - DNA, 25 bp, Saccharomyces pastorianus
gtctctctcttccaaagtgctggta

SEQ ID NO: 89526 - DNA, 25 bp, Saccharomyces pastorianus
ttacttgttggtgatgtctctctct

SEQ ID NO: 89527 - DNA, 25 bp, Saccharomyces pastorianus
tatcctgtcactgtgggatctgcat

SEQ ID NO: 89528 - DNA, 25 bp, Saccharomyces pastorianus
gactagtctggcatcaacatggcaa

SEQ ID NO: 89529 - DNA, 25 bp, Saccharomyces pastorianus
gtttgggtgatgacttcactgacga

SEQ ID NO: 89530 - DNA, 25 bp, Saccharomyces pastorianus
ggcattatagacgtaccgttccaga

SEQ ID NO: 89531 - DNA, 25 bp, Saccharomyces pastorianus
aaagtcgctctaacttggcattata

SEQ ID NO: 89532 - DNA, 25 bp, Saccharomyces pastorianus
tttaaccgatcctcagcaagtcctg

SEQ ID NO: 89533 - DNA, 25 bp, Saccharomyces pastorianus
aattgctagagctcatcagttagtg

SEQ ID NO: 89534 - DNA, 25 bp, Saccharomyces pastorianus
attagtgacagtctggtcggcaccg

SEQ ID NO: 89535 - DNA, 25 bp, Saccharomyces pastorianus
taacgtatggaggtactgctgtgaa

SEQ ID NO: 89536 - DNA, 25 bp, Saccharomyces pastorianus
gaggcaatcacgaaacccggcaaat

SEQ ID NO: 89537 - DNA, 25 bp, Saccharomyces pastorianus
caatagcatattctgtgttcatggt

SEQ ID NO: 89538 - DNA, 25 bp, Saccharomyces pastorianus
atcgttgtggtaatgtagcagctgt

SEQ ID NO: 89539 - DNA, 25 bp, Saccharomyces pastorianus
agtctggtcggcaccgaattactgt

SEQ ID NO: 89540 - DNA, 25 bp, Saccharomyces pastorianus
tgacttattatggagcgaccccgaa

SEQ ID NO: 89541 - DNA, 25 bp, Saccharomyces pastorianus
cgaccccgaagacgttgacacatgg

SEQ ID NO: 89542 - DNA, 25 bp, Saccharomyces pastorianus
gattatctccggatatgaccacggt

SEQ ID NO: 89543 - DNA, 25 bp, Saccharomyces pastorianus
aaatgttcgacggtggattagtgac

SEQ ID NO: 89544 - DNA, 25 bp, Saccharomyces pastorianus
actgctaatattgcctcatttccga

SEQ ID NO: 89545 - DNA, 25 bp, Saccharomyces pastorianus
gcagcagttgctcacaagtgtttaa

SEQ ID NO: 89546 - DNA, 25 bp, Saccharomyces pastorianus
attgatctgaaacctgatactgcta

SEQ ID NO: 89547 - DNA, 25 bp, Saccharomyces pastorianus
tgaaggcgccatcctcgcagagtaa

SEQ ID NO: 89548 - DNA, 25 bp, Saccharomyces pastorianus
ttgaaaagcgcgctcgttgccaata

SEQ ID NO: 89549 - DNA, 25 bp, Saccharomyces pastorianus
gctcgttgccaatatcgctatggga

SEQ ID NO: 89550 - DNA, 25 bp, Saccharomyces pastorianus
gcaggatcggcctttttagggattg

SEQ ID NO: 89551 - DNA, 25 bp, Saccharomyces pastorianus
aaagcaacaggtcaactccgcgata

SEQ ID NO: 89552 - DNA, 25 bp, Saccharomyces pastorianus
gaatttatcaacaagcagcagcagt

SEQ ID NO: 89553 - DNA, 25 bp, Saccharomyces pastorianus
gaagcagcgacgatcgtaactatat

SEQ ID NO: 89554 - DNA, 25 bp, Saccharomyces pastorianus
tagacgacggatcaaacttctttgt

SEQ ID NO: 89555 - DNA, 25 bp, Saccharomyces pastorianus
gaatctaagggcactaccaccaaag

SEQ ID NO: 89556 - DNA, 25 bp, Saccharomyces pastorianus
aaccactttgactatcactgactgt

SEQ ID NO: 89557 - DNA, 25 bp, Saccharomyces pastorianus
tgaaaagagcgaagcccctgagtct

SEQ ID NO: 89558 - DNA, 25 bp, Saccharomyces pastorianus
tcttctcattccgttgtcatcaaca

SEQ ID NO: 89559 - DNA, 25 bp, Saccharomyces pastorianus
aacgtcgtcgttccaggtgctttag

SEQ ID NO: 89560 - DNA, 25 bp, Saccharomyces pastorianus
ctgactgtccatgcaccattgagaa

SEQ ID NO: 89561 - DNA, 25 bp, Saccharomyces pastorianus
aagtctaactgtctccacagtcgtc

SEQ ID NO: 89562 - DNA, 25 bp, Saccharomyces pastorianus
tctgtcccagttaccgaatctaagg

SEQ ID NO: 89563 - DNA, 25 bp, Saccharomyces pastorianus
atctactgactacaccactgactac

SEQ ID NO: 89564 - DNA, 25 bp, Saccharomyces pastorianus
acagtaacggtgctaacgtcgtcgt

SEQ ID NO: 89565 - DNA, 25 bp, Saccharomyces pastorianus
aatataccacttactgtccagaacc

SEQ ID NO: 89566 - DNA, 25 bp, Saccharomyces pastorianus
gtgctgaagtttttcactgtgaact

SEQ ID NO: 89567 - DNA, 25 bp, Saccharomyces pastorianus
tcgctcctggagtatcgcttaatag

SEQ ID NO: 89568 - DNA, 25 bp, Saccharomyces pastorianus
gataggtttgcacagctggatcctc

SEQ ID NO: 89569 - DNA, 25 bp, Saccharomyces pastorianus
gctggatcctcatagcttatcaaag

SEQ ID NO: 89570 - DNA, 25 bp, Saccharomyces pastorianus
tttgttgttcgcatctactggcgtt

SEQ ID NO: 89571 - DNA, 25 bp, Saccharomyces pastorianus
tgcttagatcttccataaatgtgct

SEQ ID NO: 89572 - DNA, 25 bp, Saccharomyces pastorianus
tggcgttctccattttgcttagatc

SEQ ID NO: 89573 - DNA, 25 bp, Saccharomyces pastorianus
tagatatcgcacactggttctgctc

SEQ ID NO: 89574 - DNA, 25 bp, Saccharomyces pastorianus
aagggttcatctaattcgctcctgg

SEQ ID NO: 89575 - DNA, 25 bp, Saccharomyces pastorianus
gagcgccaccaatactcgtagatat

SEQ ID NO: 89576 - DNA, 25 bp, Saccharomyces pastorianus
aggatactaatgatggagcgccacc

SEQ ID NO: 89577 - DNA, 25 bp, Saccharomyces pastorianus
agaggagtttggtttagaccttgag

SEQ ID NO: 89578 - DNA, 25 bp, Saccharomyces pastorianus
attttgtttgctagcacctgttgct

SEQ ID NO: 89579 - DNA, 25 bp, Saccharomyces pastorianus
tttggccagatcctgcaacgttgaa

SEQ ID NO: 89580 - DNA, 25 bp, Saccharomyces pastorianus
gaaccaaataccaaaagagccttat

SEQ ID NO: 89581 - DNA, 25 bp, Saccharomyces pastorianus
gatcctgcaacgttgaaccaaatac

SEQ ID NO: 89582 - DNA, 25 bp, Saccharomyces pastorianus
aagagccttatgagattaaagctga

SEQ ID NO: 89583 - DNA, 25 bp, Saccharomyces pastorianus
gccagatcctgcaacgttgaaccaa

SEQ ID NO: 89584 - DNA, 25 bp, Saccharomyces pastorianus
gcgcaactggagatctttagatttt

SEQ ID NO: 89585 - DNA, 25 bp, Saccharomyces pastorianus
ttttcattttgtttgctagcacctg

SEQ ID NO: 89586 - DNA, 25 bp, Saccharomyces pastorianus
agggcgcaactggagatctttagat

SEQ ID NO: 89587 - DNA, 25 bp, Saccharomyces pastorianus
agggttttggccagatcctgcaacg

SEQ ID NO: 89588 - DNA, 25 bp, Saccharomyces pastorianus
gcaagaaagggtgcactggttcaat

SEQ ID NO: 89589 - DNA, 25 bp, Saccharomyces pastorianus
ggtgcactggttcaatgtgatccat

SEQ ID NO: 89590 - DNA, 25 bp, Saccharomyces pastorianus
ctcgaaagtcgaatttgttaagcat

SEQ ID NO: 89591 - DNA, 25 bp, Saccharomyces pastorianus
tccatccatcaaggcgctcatatta

SEQ ID NO: 89592 - DNA, 25 bp, Saccharomyces pastorianus
gcgctcatattacaaattgacgcca

SEQ ID NO: 89593 - DNA, 25 bp, Saccharomyces pastorianus
agcatgagctaaataggctattatc

SEQ ID NO: 89594 - DNA, 25 bp, Saccharomyces pastorianus
gacacccatcttttagtagatccct

SEQ ID NO: 89595 - DNA, 25 bp, Saccharomyces pastorianus
tttagtagatccctcgaaagtcgaa

SEQ ID NO: 89596 - DNA, 25 bp, Saccharomyces pastorianus
aattgacgccaagatgagtgatata

SEQ ID NO: 89597 - DNA, 25 bp, Saccharomyces pastorianus
gaggagttggatgacacccatcttt

SEQ ID NO: 89598 - DNA, 25 bp, Saccharomyces pastorianus
aatgtgatccatccatcaaggcgct

SEQ ID NO: 89599 - DNA, 25 bp, Saccharomyces pastorianus
aaggaatacaccaagattgtcaagg

SEQ ID NO: 89600 - DNA, 25 bp, Saccharomyces pastorianus
ttggccaagtgtaagaaacctgatt

SEQ ID NO: 89601 - DNA, 25 bp, Saccharomyces pastorianus
gaaaaagcagagcaacaaccaggtt

SEQ ID NO: 89602 - DNA, 25 bp, Saccharomyces pastorianus
gcagtcggtatcattggttacgcca

SEQ ID NO: 89603 - DNA, 25 bp, Saccharomyces pastorianus
attgtcaaggctgttggtattggtt

SEQ ID NO: 89604 - DNA, 25 bp, Saccharomyces pastorianus
gtatcattggttacgccatcaagtt

SEQ ID NO: 89605 - DNA, 25 bp, Saccharomyces pastorianus
aacctgatttgaaggaatacaccaa

SEQ ID NO: 89606 - DNA, 25 bp, Saccharomyces pastorianus
gaagcacctgtagaatttgtcagag

SEQ ID NO: 89607 - DNA, 25 bp, Saccharomyces pastorianus
gtattggttttattgcagtcggtat

SEQ ID NO: 89608 - DNA, 25 bp, Saccharomyces pastorianus
aaagctggttgaagcacctgtagaa

SEQ ID NO: 89609 - DNA, 25 bp, Saccharomyces pastorianus
gaaggtactcaattcttggccaagt

SEQ ID NO: 89610 - DNA, 25 bp, Saccharomyces pastorianus
ccgatgttatcgcaattttccaaga

SEQ ID NO: 89611 - DNA, 25 bp, Saccharomyces pastorianus
gggattccaattcatatcgtcgata

SEQ ID NO: 89612 - DNA, 25 bp, Saccharomyces pastorianus
gacacgagacttgtttcctgggata

SEQ ID NO: 89613 - DNA, 25 bp, Saccharomyces pastorianus
gaagacctattcagtgacacgagac

SEQ ID NO: 89614 - DNA, 25 bp, Saccharomyces pastorianus
agggttctggaaggtcatgtgcttt

SEQ ID NO: 89615 - DNA, 25 bp, Saccharomyces pastorianus
agcactgcagatgagttgaccacaa

SEQ ID NO: 89616 - DNA, 25 bp, Saccharomyces pastorianus
gatcctaaggacaatagcactgcag

SEQ ID NO: 89617 - DNA, 25 bp, Saccharomyces pastorianus
aaaacgccactagccgatgttatcg

SEQ ID NO: 89618 - DNA, 25 bp, Saccharomyces pastorianus
ggttacctctgagtggaagtccaaa

SEQ ID NO: 89619 - DNA, 25 bp, Saccharomyces pastorianus
attgaagtatttgcagtccagaaac

SEQ ID NO: 89620 - DNA, 25 bp, Saccharomyces pastorianus
ccaaaggtctacacagggattccaa

SEQ ID NO: 89621 - DNA, 25 bp, Saccharomyces pastorianus
gtacaacacgttttagtcgccaatc

SEQ ID NO: 89622 - DNA, 25 bp, Saccharomyces pastorianus
aagcagcccaagattgtcagcattg

SEQ ID NO: 89623 - DNA, 25 bp, Saccharomyces pastorianus
gttccgcagacatttgacaggtgaa

SEQ ID NO: 89624 - DNA, 25 bp, Saccharomyces pastorianus
gatctcacgctaaggaaatgggtat

SEQ ID NO: 89625 - DNA, 25 bp, Saccharomyces pastorianus
gaaccagtttgctagatctcacgct

SEQ ID NO: 89626 - DNA, 25 bp, Saccharomyces pastorianus
acaaggattccgtaggttcattgaa

SEQ ID NO: 89627 - DNA, 25 bp, Saccharomyces pastorianus
gtacaaaactgaaacactgggtgca

SEQ ID NO: 89628 - DNA, 25 bp, Saccharomyces pastorianus
gataattctcagttgtataggacat

SEQ ID NO: 89629 - DNA, 25 bp, Saccharomyces pastorianus
aaggctgcttacttgaacgacataa

SEQ ID NO: 89630 - DNA, 25 bp, Saccharomyces pastorianus
gaacaagaagaaaccaagcagccca

SEQ ID NO: 89631 - DNA, 25 bp, Saccharomyces pastorianus
gtcgccaatcctactaaatatgaat

SEQ ID NO: 89632 - DNA, 25 bp, Saccharomyces pastorianus
agctcagccccgttacaacaacgaa

SEQ ID NO: 89633 - DNA, 25 bp, Saccharomyces pastorianus
agaagagatgcttgccaaccaccaa

SEQ ID NO: 89634 - DNA, 25 bp, Saccharomyces pastorianus
agatcaatggccagtgcccgcggaa

SEQ ID NO: 89635 - DNA, 25 bp, Saccharomyces pastorianus
tcagaacttcgctggatcgcacaag

SEQ ID NO: 89636 - DNA, 25 bp, Saccharomyces pastorianus
tggatctgccgggtatcaatcatgc

SEQ ID NO: 89637 - DNA, 25 bp, Saccharomyces pastorianus
gtaccgtgtctctaccactctggaa

SEQ ID NO: 89638 - DNA, 25 bp, Saccharomyces pastorianus
ggaaagagcacgtgcctcgctggat

SEQ ID NO: 89639 - DNA, 25 bp, Saccharomyces pastorianus
aatcatgcagagacgctgctcagcc

SEQ ID NO: 89640 - DNA, 25 bp, Saccharomyces pastorianus
aacgaacaacttgcctagaagatca

SEQ ID NO: 89641 - DNA, 25 bp, Saccharomyces pastorianus
actggacacaagatactccgtggaa

SEQ ID NO: 89642 - DNA, 25 bp, Saccharomyces pastorianus
agtgcccgcggaaataagctcagaa

SEQ ID NO: 89643 - DNA, 25 bp, Saccharomyces pastorianus
gttttctccataccccacagggcgg

SEQ ID NO: 89644 - DNA, 25 bp, Saccharomyces pastorianus
cacaatgccgccatagtgcggaaaa

SEQ ID NO: 89645 - DNA, 25 bp, Saccharomyces pastorianus
tactcaaggctctgcgcagcgtttt

SEQ ID NO: 89646 - DNA, 25 bp, Saccharomyces pastorianus
ttttttcatattacgtctccggctt

SEQ ID NO: 89647 - DNA, 25 bp, Saccharomyces pastorianus
tctcttactcttggcgccgggcgga

SEQ ID NO: 89648 - DNA, 25 bp, Saccharomyces pastorianus
tctagtctttctccgtaaagtagtt

SEQ ID NO: 89649 - DNA, 25 bp, Saccharomyces pastorianus
gagccgtgccgggtgatgcacatca

SEQ ID NO: 89650 - DNA, 25 bp, Saccharomyces pastorianus
ggtgatgcacatcatcacatcctat

SEQ ID NO: 89651 - DNA, 25 bp, Saccharomyces pastorianus
gtaaccattttctagtctttctccg

SEQ ID NO: 89652 - DNA, 25 bp, Saccharomyces pastorianus
aagcggtaatagtggcagttgtaac

SEQ ID NO: 89653 - DNA, 25 bp, Saccharomyces pastorianus
aagtagttacgtgccacaatgccgc

SEQ ID NO: 89654 - DNA, 25 bp, Saccharomyces pastorianus
aaatgactatagatctccgttgggt

SEQ ID NO: 89655 - DNA, 25 bp, Saccharomyces pastorianus
attccggtgagaaaccccattcttg

SEQ ID NO: 89656 - DNA, 25 bp, Saccharomyces pastorianus
gtattcttccacaatcaacgattat

SEQ ID NO: 89657 - DNA, 25 bp, Saccharomyces pastorianus
agcacattcttctaagttcggtgaa

SEQ ID NO: 89658 - DNA, 25 bp, Saccharomyces pastorianus
aatagacagttttcctctggtcacc

SEQ ID NO: 89659 - DNA, 25 bp, Saccharomyces pastorianus
gagaagagaccatgttctgcaacat

SEQ ID NO: 89660 - DNA, 25 bp, Saccharomyces pastorianus
aagcaatccactcatgtattcttcc

SEQ ID NO: 89661 - DNA, 25 bp, Saccharomyces pastorianus
aaaagtcagttcattccggtgagaa

SEQ ID NO: 89662 - DNA, 25 bp, Saccharomyces pastorianus
gatctccgttgggtgtaagcaatcc

SEQ ID NO: 89663 - DNA, 25 bp, Saccharomyces pastorianus
ttcctctggtcaccatctaacaaga

SEQ ID NO: 89664 - DNA, 25 bp, Saccharomyces pastorianus
aacagccctatatcttcttttgtaa

SEQ ID NO: 89665 - DNA, 25 bp, Saccharomyces pastorianus
tggcagtttacggactggcactctc

SEQ ID NO: 89666 - DNA, 25 bp, Saccharomyces pastorianus
gtacctatcgtctatctggagttca

SEQ ID NO: 89667 - DNA, 25 bp, Saccharomyces pastorianus
gctgccctttcacaattgacgtata

SEQ ID NO: 89668 - DNA, 25 bp, Saccharomyces pastorianus
agagcacccggctcatctttgtcaa

SEQ ID NO: 89669 - DNA, 25 bp, Saccharomyces pastorianus
taaacgtcttcctcttggcagttta

SEQ ID NO: 89670 - DNA, 25 bp, Saccharomyces pastorianus
atagacattattgctgccctttcac

SEQ ID NO: 89671 - DNA, 25 bp, Saccharomyces pastorianus
acaggtatgcttccttttactttag

SEQ ID NO: 89672 - DNA, 25 bp, Saccharomyces pastorianus
ttcaccaatttaaacgtcttcctct

SEQ ID NO: 89673 - DNA, 25 bp, Saccharomyces pastorianus
cagcttcggcggtatctacaacata

SEQ ID NO: 89674 - DNA, 25 bp, Saccharomyces pastorianus
gtcagttattcctccaaaattcttc

SEQ ID NO: 89675 - DNA, 25 bp, Saccharomyces pastorianus
ggttccgtcaaatctttacaggtat

SEQ ID NO: 89676 - DNA, 25 bp, Saccharomyces pastorianus
caaggaatcgatttctttaccagtt

SEQ ID NO: 89677 - DNA, 25 bp, Saccharomyces pastorianus
cagttgctcgtgaatgtaataccat

SEQ ID NO: 89678 - DNA, 25 bp, Saccharomyces pastorianus
aactggtggttctaagacctgtcaa

SEQ ID NO: 89679 - DNA, 25 bp, Saccharomyces pastorianus
aagacctgtcaaccgagctggattc

SEQ ID NO: 89680 - DNA, 25 bp, Saccharomyces pastorianus
gggcatgagttacctttaccaaaat

SEQ ID NO: 89681 - DNA, 25 bp, Saccharomyces pastorianus
ggatgagtgagatttccaacaacta

SEQ ID NO: 89682 - DNA, 25 bp, Saccharomyces pastorianus
gctggattcactctcagcacgaatt

SEQ ID NO: 89683 - DNA, 25 bp, Saccharomyces pastorianus
ataccatcgtattatgtgactctag

SEQ ID NO: 89684 - DNA, 25 bp, Saccharomyces pastorianus
gatctttcaattagctactttggcc

SEQ ID NO: 89685 - DNA, 25 bp, Saccharomyces pastorianus
aagttatgatgcaacctctacatta

SEQ ID NO: 89686 - DNA, 25 bp, Saccharomyces pastorianus
tatcttctaactttcctttcgttca

SEQ ID NO: 89687 - DNA, 25 bp, Saccharomyces pastorianus
aacgcttcttcttcactcgaaatat

SEQ ID NO: 89688 - DNA, 25 bp, Saccharomyces pastorianus
aatttacattgactgctctttcgtg

SEQ ID NO: 89689 - DNA, 25 bp, Saccharomyces pastorianus
tcttgtcgatgttcaaacaacgtgt

SEQ ID NO: 89690 - DNA, 25 bp, Saccharomyces pastorianus
gtattctgtcagtcacttcgtgaat

SEQ ID NO: 89691 - DNA, 25 bp, Saccharomyces pastorianus
atgactctcctacttcaaaaatgta

SEQ ID NO: 89692 - DNA, 25 bp, Saccharomyces pastorianus
aatcagctgatgtcagtattctgtc

SEQ ID NO: 89693 - DNA, 25 bp, Saccharomyces pastorianus
gaatctgttatatatccctttaaag

SEQ ID NO: 89694 - DNA, 25 bp, Saccharomyces pastorianus
acttctagattttcatcttgtcgat

SEQ ID NO: 89695 - DNA, 25 bp, Saccharomyces pastorianus
aatatttaacgcttcttcttcactc

SEQ ID NO: 89696 - DNA, 25 bp, Saccharomyces pastorianus
gctctttcgtgcaattcatactgta

SEQ ID NO: 89697 - DNA, 25 bp, Saccharomyces pastorianus
gtgttatcagagaaacagctccatg

SEQ ID NO: 89698 - DNA, 25 bp, Saccharomyces pastorianus
ttggacagtggtagccccagcgatt

SEQ ID NO: 89699 - DNA, 25 bp, Saccharomyces pastorianus
accgcttggttagggacatcatctc

SEQ ID NO: 89700 - DNA, 25 bp, Saccharomyces pastorianus
gtacaattacactctgttccacgtt

SEQ ID NO: 89701 - DNA, 25 bp, Saccharomyces pastorianus
atcattttgggctctttatttactt

SEQ ID NO: 89702 - DNA, 25 bp, Saccharomyces pastorianus
cgttatattctttctggcaacccag

SEQ ID NO: 89703 - DNA, 25 bp, Saccharomyces pastorianus
ctaatggtgctatatatctcgggaa

SEQ ID NO: 89704 - DNA, 25 bp, Saccharomyces pastorianus
atcatctcctacaggcgcaatggat

SEQ ID NO: 89705 - DNA, 25 bp, Saccharomyces pastorianus
ggatctttaccggaaagtgccttat

SEQ ID NO: 89706 - DNA, 25 bp, Saccharomyces pastorianus
ttatgccctttacggttggacagtg

SEQ ID NO: 89707 - DNA, 25 bp, Saccharomyces pastorianus
agtgccttatatgataccgcttggt

SEQ ID NO: 89708 - DNA, 25 bp, Saccharomyces pastorianus
tttattgcgattgcctacaccacaa

SEQ ID NO: 89709 - DNA, 25 bp, Saccharomyces pastorianus
ttgttggctgattgtactggcctgc

SEQ ID NO: 89710 - DNA, 25 bp, Saccharomyces pastorianus
gatttgcacacaacaaccacttgac

SEQ ID NO: 89711 - DNA, 25 bp, Saccharomyces pastorianus
agtgattcctcgatacgttgacgct

SEQ ID NO: 89712 - DNA, 25 bp, Saccharomyces pastorianus
acaactttcaactccaagtgcacct

SEQ ID NO: 89713 - DNA, 25 bp, Saccharomyces pastorianus
ggatgcttcattgaccgtgggacag

SEQ ID NO: 89714 - DNA, 25 bp, Saccharomyces pastorianus
tccccacataatctacaactttcaa

SEQ ID NO: 89715 - DNA, 25 bp, Saccharomyces pastorianus
accacttgacaaaacctctgaggaa

SEQ ID NO: 89716 - DNA, 25 bp, Saccharomyces pastorianus
agttgtatttggttctgccttgctt

SEQ ID NO: 89717 - DNA, 25 bp, Saccharomyces pastorianus
aaatggctttgtatccccacataat

SEQ ID NO: 89718 - DNA, 25 bp, Saccharomyces pastorianus
tactggcctgccgatagtgattcct

SEQ ID NO: 89719 - DNA, 25 bp, Saccharomyces pastorianus
ataactattctcttccgatttgcac

SEQ ID NO: 89720 - DNA, 25 bp, Saccharomyces pastorianus
cgtaaacctgtgcaagtactactta

SEQ ID NO: 89721 - DNA, 25 bp, Saccharomyces pastorianus
gaccgaatagagtccaccggcgtgg

SEQ ID NO: 89722 - DNA, 25 bp, Saccharomyces pastorianus
gatgtcaatacttttgcccttgcta

SEQ ID NO: 89723 - DNA, 25 bp, Saccharomyces pastorianus
ggcacatgattcttcagagggcgaa

SEQ ID NO: 89724 - DNA, 25 bp, Saccharomyces pastorianus
ccagaaacttcctactatcaaactt

SEQ ID NO: 89725 - DNA, 25 bp, Saccharomyces pastorianus
gtggcagccccaatgcagggaacag

SEQ ID NO: 89726 - DNA, 25 bp, Saccharomyces pastorianus
ttttgcccttgctaatgaagcggat

SEQ ID NO: 89727 - DNA, 25 bp, Saccharomyces pastorianus
gtgacggtgcatcgcaagtagatca

SEQ ID NO: 89728 - DNA, 25 bp, Saccharomyces pastorianus
ggaaagcctcctcataatgtcgatg

SEQ ID NO: 89729 - DNA, 25 bp, Saccharomyces pastorianus
gaagttccaggtcacaatgccaaat

SEQ ID NO: 89730 - DNA, 25 bp, Saccharomyces pastorianus
atcaaactttggaatcgccgtcaat

SEQ ID NO: 89731 - DNA, 25 bp, Saccharomyces pastorianus
accccagcctggagacgagtcttat

SEQ ID NO: 89732 - DNA, 25 bp, Saccharomyces pastorianus
gcctctttacactccatttctaaag

SEQ ID NO: 89733 - DNA, 25 bp, Saccharomyces pastorianus
aggtatttgtactgtcccagggtct

SEQ ID NO: 89734 - DNA, 25 bp, Saccharomyces pastorianus
gacccgggacttatcatgtgcgaac

SEQ ID NO: 89735 - DNA, 25 bp, Saccharomyces pastorianus
gtgcgaacaacgtttttggctccag

SEQ ID NO: 89736 - DNA, 25 bp, Saccharomyces pastorianus
atatccatatgttctgttgtcacag

SEQ ID NO: 89737 - DNA, 25 bp, Saccharomyces pastorianus
aagcgaacgtcttggcatcgaacct

SEQ ID NO: 89738 - DNA, 25 bp, Saccharomyces pastorianus
attcgataacgttcagctcgcctct

SEQ ID NO: 89739 - DNA, 25 bp, Saccharomyces pastorianus
attgcagcatctttatccaggaaaa

SEQ ID NO: 89740 - DNA, 25 bp, Saccharomyces pastorianus
aatgtatctttttcctaggcttgtt

SEQ ID NO: 89741 - DNA, 25 bp, Saccharomyces pastorianus
aaacctcagggtgcaatgtatcttt

SEQ ID NO: 89742 - DNA, 25 bp, Saccharomyces pastorianus
tttttagtaatcttgccagcgggct

SEQ ID NO: 89743 - DNA, 25 bp, Saccharomyces pastorianus
gaacacacctttcaaatcctgttgg

SEQ ID NO: 89744 - DNA, 25 bp, Saccharomyces pastorianus
agcatattctgccttagtgacacct

SEQ ID NO: 89745 - DNA, 25 bp, Saccharomyces pastorianus
gtgacacctgtattcaaatcttttt

SEQ ID NO: 89746 - DNA, 25 bp, Saccharomyces pastorianus
tttcaattcctcttttagctcgtca

SEQ ID NO: 89747 - DNA, 25 bp, Saccharomyces pastorianus
tgccagcgggcttaaaatccaaatc

SEQ ID NO: 89748 - DNA, 25 bp, Saccharomyces pastorianus
ggaatagctcctcttacagcatatt

SEQ ID NO: 89749 - DNA, 25 bp, Saccharomyces pastorianus
tcctgttggtgtgtcattgtcatgt

SEQ ID NO: 89750 - DNA, 25 bp, Saccharomyces pastorianus
tccaaatcctttgcggtgaacacac

SEQ ID NO: 89751 - DNA, 25 bp, Saccharomyces pastorianus
gctcgtcagctctggtcggaatagc

SEQ ID NO: 89752 - DNA, 25 bp, Saccharomyces pastorianus
ttgtcatgtgttcttacttcttccg

SEQ ID NO: 89753 - DNA, 25 bp, Saccharomyces pastorianus
aggctattccccatttcaacaagaa

SEQ ID NO: 89754 - DNA, 25 bp, Saccharomyces pastorianus
atagcaccacagaggcaggagccgc

SEQ ID NO: 89755 - DNA, 25 bp, Saccharomyces pastorianus
taaaacaggattcctccgacggtga

SEQ ID NO: 89756 - DNA, 25 bp, Saccharomyces pastorianus
aagttgatttactcccactagaaca

SEQ ID NO: 89757 - DNA, 25 bp, Saccharomyces pastorianus
tgagactgagcgcatcactcggaat

SEQ ID NO: 89758 - DNA, 25 bp, Saccharomyces pastorianus
gaagacgaagatgacaccccagata

SEQ ID NO: 89759 - DNA, 25 bp, Saccharomyces pastorianus
gccgtcccaaccatggagttagtgt

SEQ ID NO: 89760 - DNA, 25 bp, Saccharomyces pastorianus
ttcaaagaagttgccgccgtcccaa

SEQ ID NO: 89761 - DNA, 25 bp, Saccharomyces pastorianus
gagccgctaccgtatgtaccagaag

SEQ ID NO: 89762 - DNA, 25 bp, Saccharomyces pastorianus
caaggtggtctgcaacaactcataa

SEQ ID NO: 89763 - DNA, 25 bp, Saccharomyces pastorianus
agcgttaccactgctgtctaagaac

SEQ ID NO: 89764 - DNA, 25 bp, Saccharomyces pastorianus
ggcggagcagatcttgttgccaaaa

SEQ ID NO: 89765 - DNA, 25 bp, Saccharomyces pastorianus
tataggctccctacttcaagaaagt

SEQ ID NO: 89766 - DNA, 25 bp, Saccharomyces pastorianus
aggtggccaggatacttggtcctcg

SEQ ID NO: 89767 - DNA, 25 bp, Saccharomyces pastorianus
gtcggcaaatgctacttcactgatc

SEQ ID NO: 89768 - DNA, 25 bp, Saccharomyces pastorianus
gcaactcctgatattgttccagctt

SEQ ID NO: 89769 - DNA, 25 bp, Saccharomyces pastorianus
gaggtacagcgcctttatccggtag

SEQ ID NO: 89770 - DNA, 25 bp, Saccharomyces pastorianus
ggcagaccgcaatcgcaacagacaa

SEQ ID NO: 89771 - DNA, 25 bp, Saccharomyces pastorianus
ggcactaagatatttacgcgcagca

SEQ ID NO: 89772 - DNA, 25 bp, Saccharomyces pastorianus
gtctaggatctatgcctttcaggca

SEQ ID NO: 89773 - DNA, 25 bp, Saccharomyces pastorianus
agcgtgacatttcctaagcctttga

SEQ ID NO: 89774 - DNA, 25 bp, Saccharomyces pastorianus
tgttccagctttacaatcgcaggtg

SEQ ID NO: 89775 - DNA, 25 bp, Saccharomyces pastorianus
gatactctcttgttcaaggcgccaa

SEQ ID NO: 89776 - DNA, 25 bp, Saccharomyces pastorianus
aggtccacacggtcaatcgatcatt

SEQ ID NO: 89777 - DNA, 25 bp, Saccharomyces pastorianus
tgaagtgcaggttcaaggtccacac

SEQ ID NO: 89778 - DNA, 25 bp, Saccharomyces pastorianus
gaagggttctcttccgcatattaag

SEQ ID NO: 89779 - DNA, 25 bp, Saccharomyces pastorianus
gtactacacctctcaggacattaga

SEQ ID NO: 89780 - DNA, 25 bp, Saccharomyces pastorianus
aagcgcggtttctcagtatatttct

SEQ ID NO: 89781 - DNA, 25 bp, Saccharomyces pastorianus
gaatgcttcacgtatcattgctaga

SEQ ID NO: 89782 - DNA, 25 bp, Saccharomyces pastorianus
ggttaatttggcttctcacacgtac

SEQ ID NO: 89783 - DNA, 25 bp, Saccharomyces pastorianus
agtcgatccagaatcacttgcggct

SEQ ID NO: 89784 - DNA, 25 bp, Saccharomyces pastorianus
ttcactgactctgtataaacccttt

SEQ ID NO: 89785 - DNA, 25 bp, Saccharomyces pastorianus
ggtgaaattttgcatcccttactca

SEQ ID NO: 89786 - DNA, 25 bp, Saccharomyces pastorianus
cggtttgtgccgaatagggtccata

SEQ ID NO: 89787 - DNA, 25 bp, Saccharomyces pastorianus
acagtgctcaagaacctttctcaga

SEQ ID NO: 89788 - DNA, 25 bp, Saccharomyces pastorianus
agggtccatagcttgcttcgggata

SEQ ID NO: 89789 - DNA, 25 bp, Saccharomyces pastorianus
acatagtctacgttgttcaggtaac

SEQ ID NO: 89790 - DNA, 25 bp, Saccharomyces pastorianus
gatggcataatagctattcctgctt

SEQ ID NO: 89791 - DNA, 25 bp, Saccharomyces pastorianus
gattccggcgctattcaagagctat

SEQ ID NO: 89792 - DNA, 25 bp, Saccharomyces pastorianus
gatgatttcatagcatgcaccgcga

SEQ ID NO: 89793 - DNA, 25 bp, Saccharomyces pastorianus
aatcgtcagtcaagattccggcgct

SEQ ID NO: 89794 - DNA, 25 bp, Saccharomyces pastorianus
gaacctagctcaataatcgacgtga

SEQ ID NO: 89795 - DNA, 25 bp, Saccharomyces pastorianus
ataggttgagcagtacacggtttgt

SEQ ID NO: 89796 - DNA, 25 bp, Saccharomyces pastorianus
atagtagccacgtcaccgattatag

SEQ ID NO: 89797 - DNA, 25 bp, Saccharomyces pastorianus
ttcagtcctaaccatattgcgtcgg

SEQ ID NO: 89798 - DNA, 25 bp, Saccharomyces pastorianus
aaattctgcgaagggacataccatt

SEQ ID NO: 89799 - DNA, 25 bp, Saccharomyces pastorianus
gcaggacctctacacaacaaggagt

SEQ ID NO: 89800 - DNA, 25 bp, Saccharomyces pastorianus
gtccctaaagactaacgctccatgg

SEQ ID NO: 89801 - DNA, 25 bp, Saccharomyces pastorianus
gaatccaaatactacgggctataag

SEQ ID NO: 89802 - DNA, 25 bp, Saccharomyces pastorianus
acgctccatgggatgcaatctggta

SEQ ID NO: 89803 - DNA, 25 bp, Saccharomyces pastorianus
gtagtcgcaggcctaggttccctag

SEQ ID NO: 89804 - DNA, 25 bp, Saccharomyces pastorianus
gattcgccattctatttcagtccta

SEQ ID NO: 89805 - DNA, 25 bp, Saccharomyces pastorianus
tgttcattgacacatgcccaaccat

SEQ ID NO: 89806 - DNA, 25 bp, Saccharomyces pastorianus
ggttccctaggctttgaatgttcat

SEQ ID NO: 89807 - DNA, 25 bp, Saccharomyces pastorianus
aaagctgtcgttcgcaccaaatgaa

SEQ ID NO: 89808 - DNA, 25 bp, Saccharomyces pastorianus
cactcggcattgaagggtccggtta

SEQ ID NO: 89809 - DNA, 25 bp, Saccharomyces pastorianus
gaataccaagctgctgttgaacaga

SEQ ID NO: 89810 - DNA, 25 bp, Saccharomyces pastorianus
gagaacattacgattcaggacctgt

SEQ ID NO: 89811 - DNA, 25 bp, Saccharomyces pastorianus
cgcatcactagcgttacagcgtggt

SEQ ID NO: 89812 - DNA, 25 bp, Saccharomyces pastorianus
ttggaccatataggacactcggcat

SEQ ID NO: 89813 - DNA, 25 bp, Saccharomyces pastorianus
gcactattgtgaatttggcacgcga

SEQ ID NO: 89814 - DNA, 25 bp, Saccharomyces pastorianus
gaatgcgcccgtggaaaaggttatt

SEQ ID NO: 89815 - DNA, 25 bp, Saccharomyces pastorianus
gaattaccccactacttcgtatatt

SEQ ID NO: 89816 - DNA, 25 bp, Saccharomyces pastorianus
gatgttctgagtgctttggaccata

SEQ ID NO: 89817 - DNA, 25 bp, Saccharomyces pastorianus
acaaggtgatgcattacaggacgta

SEQ ID NO: 89818 - DNA, 25 bp, Saccharomyces pastorianus
cagcgtggtgctacagtatttgtta

SEQ ID NO: 89819 - DNA, 25 bp, Saccharomyces pastorianus
atgtgccaactgagttcaccacgag

SEQ ID NO: 89820 - DNA, 25 bp, Saccharomyces pastorianus
agcctatcggcaatgaccactacaa

SEQ ID NO: 89821 - DNA, 25 bp, Saccharomyces pastorianus
tgagatacgaatcccagactctgat

SEQ ID NO: 89822 - DNA, 25 bp, Saccharomyces pastorianus
ccagactctgatattccagccaata

SEQ ID NO: 89823 - DNA, 25 bp, Saccharomyces pastorianus
gccaatatcgaggacgaccctgtga

SEQ ID NO: 89824 - DNA, 25 bp, Saccharomyces pastorianus
ttggtctcaagttgtctccttccag

SEQ ID NO: 89825 - DNA, 25 bp, Saccharomyces pastorianus
gccaccgttttcagtacctgagata

SEQ ID NO: 89826 - DNA, 25 bp, Saccharomyces pastorianus
agggaaggacctcatcagcctatcg

SEQ ID NO: 89827 - DNA, 25 bp, Saccharomyces pastorianus
atgggttttgatcaagcgcttggtc

SEQ ID NO: 89828 - DNA, 25 bp, Saccharomyces pastorianus
ggagttacccacaaacacagcagat

SEQ ID NO: 89829 - DNA, 25 bp, Saccharomyces pastorianus
gatatgatgtcttccaacgcttcca

SEQ ID NO: 89830 - DNA, 25 bp, Saccharomyces pastorianus
tatgaatgttctaccgcaatctccc

SEQ ID NO: 89831 - DNA, 25 bp, Saccharomyces pastorianus
ttcagccttgagattttggacgagc

SEQ ID NO: 89832 - DNA, 25 bp, Saccharomyces pastorianus
gagcttacaagagtgaccgccgcaa

SEQ ID NO: 89833 - DNA, 25 bp, Saccharomyces pastorianus
gatccgttattcctcactaaattgg

SEQ ID NO: 89834 - DNA, 25 bp, Saccharomyces pastorianus
gtgacacagagtatttccccaggga

SEQ ID NO: 89835 - DNA, 25 bp, Saccharomyces pastorianus
gggaatatccgaaagaccctgtatc

SEQ ID NO: 89836 - DNA, 25 bp, Saccharomyces pastorianus
tagaacataaagagccggaccacct

SEQ ID NO: 89837 - DNA, 25 bp, Saccharomyces pastorianus
gatgatttaaatgacctagcccaaa

SEQ ID NO: 89838 - DNA, 25 bp, Saccharomyces pastorianus
gaccgccgcaatgaccatttttaag

SEQ ID NO: 89839 - DNA, 25 bp, Saccharomyces pastorianus
aagtggaagcgattcttcaccctcg

SEQ ID NO: 89840 - DNA, 25 bp, Saccharomyces pastorianus
ggaccacctccagaaagcggatcga

SEQ ID NO: 89841 - DNA, 25 bp, Saccharomyces pastorianus
atggcggcatatagccgagtcccat

SEQ ID NO: 89842 - DNA, 25 bp, Saccharomyces pastorianus
gatgtatcctagcaaaggacccctt

SEQ ID NO: 89843 - DNA, 25 bp, Saccharomyces pastorianus
aataataatttccactccaacactc

SEQ ID NO: 89844 - DNA, 25 bp, Saccharomyces pastorianus
tataccggaggttacgacagatatt

SEQ ID NO: 89845 - DNA, 25 bp, Saccharomyces pastorianus
gataatccagaatcgttcaaccaat

SEQ ID NO: 89846 - DNA, 25 bp, Saccharomyces pastorianus
gaccccttgatggattctctgcaat

SEQ ID NO: 89847 - DNA, 25 bp, Saccharomyces pastorianus
tagaaataccttcttccggtcacaa

SEQ ID NO: 89848 - DNA, 25 bp, Saccharomyces pastorianus
gagtcccatcgttggcatacaaaga

SEQ ID NO: 89849 - DNA, 25 bp, Saccharomyces pastorianus
aaactttgcttggtatccccactag

SEQ ID NO: 89850 - DNA, 25 bp, Saccharomyces pastorianus
cactccaacactctttatactatcg

SEQ ID NO: 89851 - DNA, 25 bp, Saccharomyces pastorianus
aaaagccggtatgttcatggtcaaa

SEQ ID NO: 89852 - DNA, 25 bp, Saccharomyces pastorianus
atattctcgatgtgctacgcctttc

SEQ ID NO: 89853 - DNA, 25 bp, Saccharomyces pastorianus
aaccttacacactacatcacgatta

SEQ ID NO: 89854 - DNA, 25 bp, Saccharomyces pastorianus
ctgcgctattttcacgtatcttcaa

SEQ ID NO: 89855 - DNA, 25 bp, Saccharomyces pastorianus
aaagatgacgctgctgaaccactcc

SEQ ID NO: 89856 - DNA, 25 bp, Saccharomyces pastorianus
aatagcacaagtacgctccctagag

SEQ ID NO: 89857 - DNA, 25 bp, Saccharomyces pastorianus
gccgaccatcattgcatctggataa

SEQ ID NO: 89858 - DNA, 25 bp, Saccharomyces pastorianus
gtcaagcctgctagatccaaacatt

SEQ ID NO: 89859 - DNA, 25 bp, Saccharomyces pastorianus
aagtgttcgacatgccggatcgtca

SEQ ID NO: 89860 - DNA, 25 bp, Saccharomyces pastorianus
tagcacgaatgcctacgaccataag

SEQ ID NO: 89861 - DNA, 25 bp, Saccharomyces pastorianus
atgcttcactatcatctgcgctatt

SEQ ID NO: 89862 - DNA, 25 bp, Saccharomyces pastorianus
gacgcgtccgaaattcccaatatat

SEQ ID NO: 89863 - DNA, 25 bp, Saccharomyces pastorianus
gaatgaccttcctcgagctaaattg

SEQ ID NO: 89864 - DNA, 25 bp, Saccharomyces pastorianus
gatacacaaagctagtttccagaaa

SEQ ID NO: 89865 - DNA, 25 bp, Saccharomyces pastorianus
agcagcaacatattctcccatcgga

SEQ ID NO: 89866 - DNA, 25 bp, Saccharomyces pastorianus
atgccaaaagcaacactgacctctg

SEQ ID NO: 89867 - DNA, 25 bp, Saccharomyces pastorianus
gggcccggtttaagaatggactcat

SEQ ID NO: 89868 - DNA, 25 bp, Saccharomyces pastorianus
ggacgccccatttgagaatgacctt

SEQ ID NO: 89869 - DNA, 25 bp, Saccharomyces pastorianus
gaatcccttactaaatcgaacacta

SEQ ID NO: 89870 - DNA, 25 bp, Saccharomyces pastorianus
acactgacctctgttctaatactga

SEQ ID NO: 89871 - DNA, 25 bp, Saccharomyces pastorianus
atggactcatgtcacctgaaaggat

SEQ ID NO: 89872 - DNA, 25 bp, Saccharomyces pastorianus
taatactgagctcaaggacgcccca

SEQ ID NO: 89873 - DNA, 25 bp, Saccharomyces pastorianus
actgaattccatgctggcgaacgaa

SEQ ID NO: 89874 - DNA, 25 bp, Saccharomyces pastorianus
agcgttttgacatacactgcgaact

SEQ ID NO: 89875 - DNA, 25 bp, Saccharomyces pastorianus
gggatgggattctgtacctattgaa

SEQ ID NO: 89876 - DNA, 25 bp, Saccharomyces pastorianus
gataacccactaactcgcttgaatt

SEQ ID NO: 89877 - DNA, 25 bp, Saccharomyces pastorianus
tttctgcccttgttcaacttgcaaa

SEQ ID NO: 89878 - DNA, 25 bp, Saccharomyces pastorianus
gacaacgaatcacctgcgatgggat

SEQ ID NO: 89879 - DNA, 25 bp, Saccharomyces pastorianus
cggttcccctcttctataataatgg

SEQ ID NO: 89880 - DNA, 25 bp, Saccharomyces pastorianus
ctgcgaactgaatcacaggcttttt

SEQ ID NO: 89881 - DNA, 25 bp, Saccharomyces pastorianus
acgagttacaacgatgcgcggttcc

SEQ ID NO: 89882 - DNA, 25 bp, Saccharomyces pastorianus
ttgaatttcgatggtttctgccctt

SEQ ID NO: 89883 - DNA, 25 bp, Saccharomyces pastorianus
tttcgagaacaagatcatgccctat

SEQ ID NO: 89884 - DNA, 25 bp, Saccharomyces pastorianus
ttttttcccatgacagataacccac

SEQ ID NO: 89885 - DNA, 25 bp, Saccharomyces pastorianus
tacttttccgtcaatacagcttcca

SEQ ID NO: 89886 - DNA, 25 bp, Saccharomyces pastorianus
gttaagtacttttccgtcaatacag

SEQ ID NO: 89887 - DNA, 25 bp, Saccharomyces pastorianus
tccgtcaatacagcttccacaaaat

SEQ ID NO: 89888 - DNA, 25 bp, Saccharomyces pastorianus
aagtacttttccgtcaatacagctt

SEQ ID NO: 89889 - DNA, 25 bp, Saccharomyces pastorianus
tactcaaccttttctttaatatatt

SEQ ID NO: 89890 - DNA, 25 bp, Saccharomyces pastorianus
ttttccgtcaatacagcttccacaa

SEQ ID NO: 89891 - DNA, 25 bp, Saccharomyces pastorianus
tgttgtaatttactcaaccttttct

SEQ ID NO: 89892 - DNA, 25 bp, Saccharomyces pastorianus
gtacttttccgtcaatacagcttcc

SEQ ID NO: 89893 - DNA, 25 bp, Saccharomyces pastorianus
tttccgtcaatacagcttccacaaa

SEQ ID NO: 89894 - DNA, 25 bp, Saccharomyces pastorianus
ttccgtcaatacagcttccacaaaa

SEQ ID NO: 89895 - DNA, 25 bp, Saccharomyces pastorianus
gccgctttattgttgtaatttactc

SEQ ID NO: 89896 - DNA, 25 bp, Saccharomyces pastorianus
aaagccaactgaaaagccaactgaa

SEQ ID NO: 89897 - DNA, 25 bp, Saccharomyces pastorianus
gttctagcactcaaactgttacctc

SEQ ID NO: 89898 - DNA, 25 bp, Saccharomyces pastorianus
ttctccagctccaactgaaaagcca

SEQ ID NO: 89899 - DNA, 25 bp, Saccharomyces pastorianus
tcctacactggtgccgctgttaagg

SEQ ID NO: 89900 - DNA, 25 bp, Saccharomyces pastorianus
tagcactcaaactgttacctcctac

SEQ ID NO: 89901 - DNA, 25 bp, Saccharomyces pastorianus
aagccaacccaacaaggttctagca

SEQ ID NO: 89902 - DNA, 25 bp, Saccharomyces pastorianus
aaagaataccacttctccagctcca

SEQ ID NO: 89903 - DNA, 25 bp, Saccharomyces pastorianus
agccaactgaaaagccaacccaaca

SEQ ID NO: 89904 - DNA, 25 bp, Saccharomyces pastorianus
aaactgttacctcctacactggtgc

SEQ ID NO: 89905 - DNA, 25 bp, Saccharomyces pastorianus
cccaacaaggttctagcactcaaac

SEQ ID NO: 89906 - DNA, 25 bp, Saccharomyces pastorianus
gaaaagccaaccgaaaagccaactg

SEQ ID NO: 89907 - DNA, 25 bp, Saccharomyces pastorianus
gaagtttcttcgcaagatcctgaca

SEQ ID NO: 89908 - DNA, 25 bp, Saccharomyces pastorianus
gggagtttgctccacagaatacaac

SEQ ID NO: 89909 - DNA, 25 bp, Saccharomyces pastorianus
gcaacgtataaacagcgcttctcaa

SEQ ID NO: 89910 - DNA, 25 bp, Saccharomyces pastorianus
gataacaatgcagctacttcgaaca

SEQ ID NO: 89911 - DNA, 25 bp, Saccharomyces pastorianus
tcagacaatggcaaactttacggtt

SEQ ID NO: 89912 - DNA, 25 bp, Saccharomyces pastorianus
aagatcctgacagtggtgttgccgg

SEQ ID NO: 89913 - DNA, 25 bp, Saccharomyces pastorianus
acggtttctaagatcgcgatacttg

SEQ ID NO: 89914 - DNA, 25 bp, Saccharomyces pastorianus
aaggtgtctatgaagcagcccaagc

SEQ ID NO: 89915 - DNA, 25 bp, Saccharomyces pastorianus
gatggtttgttcgaggaacccagaa

SEQ ID NO: 89916 - DNA, 25 bp, Saccharomyces pastorianus
ttcttctgaaacttccggtggagaa

SEQ ID NO: 89917 - DNA, 25 bp, Saccharomyces pastorianus
agaagaggcttcgtttcctgaaaga

SEQ ID NO: 89918 - DNA, 25 bp, Saccharomyces pastorianus
gaatgtgtgccagatgtcccaggat

SEQ ID NO: 89919 - DNA, 25 bp, Saccharomyces pastorianus
gatagcttcctcatactggactgtt

SEQ ID NO: 89920 - DNA, 25 bp, Saccharomyces pastorianus
ggtatcgtcacaacatttctaatgc

SEQ ID NO: 89921 - DNA, 25 bp, Saccharomyces pastorianus
gatgtcctaatatttaacccaccat

SEQ ID NO: 89922 - DNA, 25 bp, Saccharomyces pastorianus
gacgggatggcgattactgataaac

SEQ ID NO: 89923 - DNA, 25 bp, Saccharomyces pastorianus
gaaaattccatccacttagctgttg

SEQ ID NO: 89924 - DNA, 25 bp, Saccharomyces pastorianus
aatcgtttggccatcgtttgcgaaa

SEQ ID NO: 89925 - DNA, 25 bp, Saccharomyces pastorianus
ttggttcgggatcaggtatcgtcac

SEQ ID NO: 89926 - DNA, 25 bp, Saccharomyces pastorianus
gaacaaattctttctccagatggtg

SEQ ID NO: 89927 - DNA, 25 bp, Saccharomyces pastorianus
ggcgctcgaagcaactttggatact

SEQ ID NO: 89928 - DNA, 25 bp, Saccharomyces pastorianus
tgatatcaacccatgggcgctcgaa

SEQ ID NO: 89929 - DNA, 25 bp, Saccharomyces pastorianus
aaatctcgtattatcctgttcaggg

SEQ ID NO: 89930 - DNA, 25 bp, Saccharomyces pastorianus
aggttccattttcaatttcacacag

SEQ ID NO: 89931 - DNA, 25 bp, Saccharomyces pastorianus
tatcaagaggactgtgcccggccaa

SEQ ID NO: 89932 - DNA, 25 bp, Saccharomyces pastorianus
tgtggcttcaactgcatgggatgga

SEQ ID NO: 89933 - DNA, 25 bp, Saccharomyces pastorianus
gtcccctcatcattccaatatttta

SEQ ID NO: 89934 - DNA, 25 bp, Saccharomyces pastorianus
tcagaaaagttacctggtcccctca

SEQ ID NO: 89935 - DNA, 25 bp, Saccharomyces pastorianus
ttgacattagactaccttccggcaa

SEQ ID NO: 89936 - DNA, 25 bp, Saccharomyces pastorianus
ggccaacttcacaattcatcatgca

SEQ ID NO: 89937 - DNA, 25 bp, Saccharomyces pastorianus
ctaactctacggatgctactaaagg

SEQ ID NO: 89938 - DNA, 25 bp, Saccharomyces pastorianus
gtgtataccaagcacagttctcgcc

SEQ ID NO: 89939 - DNA, 25 bp, Saccharomyces pastorianus
atgcgcacgggctggcaatcagaaa

SEQ ID NO: 89940 - DNA, 25 bp, Saccharomyces pastorianus
tcctccggtgttgccagttatagaa

SEQ ID NO: 89941 - DNA, 25 bp, Saccharomyces pastorianus
ttgttccaattccacagtccaaatc

SEQ ID NO: 89942 - DNA, 25 bp, Saccharomyces pastorianus
gacgaaaatccctctcaaggccaag

SEQ ID NO: 89943 - DNA, 25 bp, Saccharomyces pastorianus
aacaatcaaagtccgcgctgggttc

SEQ ID NO: 89944 - DNA, 25 bp, Saccharomyces pastorianus
aatgactcatcgtcctctgatacaa

SEQ ID NO: 89945 - DNA, 25 bp, Saccharomyces pastorianus
acgcaacaacaattctgctgccttt

SEQ ID NO: 89946 - DNA, 25 bp, Saccharomyces pastorianus
ggaacttctgatacctctgcaacaa

SEQ ID NO: 89947 - DNA, 25 bp, Saccharomyces pastorianus
tgcctttcctcctacagacgaaaat

SEQ ID NO: 89948 - DNA, 25 bp, Saccharomyces pastorianus
caaggccaaggttcaagcagttcgg

SEQ ID NO: 89949 - DNA, 25 bp, Saccharomyces pastorianus
gatgttactaccgtcgaactacgca

SEQ ID NO: 89950 - DNA, 25 bp, Saccharomyces pastorianus
agcagcgaacggtccaaactcaaat

SEQ ID NO: 89951 - DNA, 25 bp, Saccharomyces pastorianus
gacacaatctgaatcctccattttt

SEQ ID NO: 89952 - DNA, 25 bp, Saccharomyces pastorianus
ggtattgcaccgcagtcagatccga

SEQ ID NO: 89953 - DNA, 25 bp, Saccharomyces pastorianus
gtatatcgtactttgcttccacatc

SEQ ID NO: 89954 - DNA, 25 bp, Saccharomyces pastorianus
aagcacctggttactcaagcacttg

SEQ ID NO: 89955 - DNA, 25 bp, Saccharomyces pastorianus
agcgcggttccaagtgctcttaaag

SEQ ID NO: 89956 - DNA, 25 bp, Saccharomyces pastorianus
aaaatctacctcaagtacttcctca

SEQ ID NO: 89957 - DNA, 25 bp, Saccharomyces pastorianus
atgaaagtattgtctccggcggcaa

SEQ ID NO: 89958 - DNA, 25 bp, Saccharomyces pastorianus
tacgacagctctctctatttcaaaa

SEQ ID NO: 89959 - DNA, 25 bp, Saccharomyces pastorianus
catctcattcggcaacaagttcttc

SEQ ID NO: 89960 - DNA, 25 bp, Saccharomyces pastorianus
aatggctcaggctaacttcagcgac

SEQ ID NO: 89961 - DNA, 25 bp, Saccharomyces pastorianus
gcaacatgttttccacggcagctaa

SEQ ID NO: 89962 - DNA, 25 bp, Saccharomyces pastorianus
gaagacgctttggttgtgcacagaa

SEQ ID NO: 89963 - DNA, 25 bp, Saccharomyces pastorianus
tcctcaattcggcacacacattaag

SEQ ID NO: 89964 - DNA, 25 bp, Saccharomyces pastorianus
aacactgcccagaggttcaatcgat

SEQ ID NO: 89965 - DNA, 25 bp, Saccharomyces pastorianus
catgtccctgtggtaagaaattcaa

SEQ ID NO: 89966 - DNA, 25 bp, Saccharomyces pastorianus
atataccacaaatagtccctcaaaa

SEQ ID NO: 89967 - DNA, 25 bp, Saccharomyces pastorianus
ggaagatcggccatattcctgtgat

SEQ ID NO: 89968 - DNA, 25 bp, Saccharomyces pastorianus
tagaatgatttgcagcggtggtaaa

SEQ ID NO: 89969 - DNA, 25 bp, Saccharomyces pastorianus
gaaaaggcgtatgcatgtccctgtg

SEQ ID NO: 89970 - DNA, 25 bp, Saccharomyces pastorianus
attcctgtgatcaccctggatgtga

SEQ ID NO: 89971 - DNA, 25 bp, Saccharomyces pastorianus
aggaagatctcctcaattcggcaca

SEQ ID NO: 89972 - DNA, 25 bp, Saccharomyces pastorianus
gaacttcaagtgtttctagtagtcc

SEQ ID NO: 89973 - DNA, 25 bp, Saccharomyces pastorianus
gagttatcgacaaagactgcccaga

SEQ ID NO: 89974 - DNA, 25 bp, Saccharomyces pastorianus
ggaggccttgtacacaattattctg

SEQ ID NO: 89975 - DNA, 25 bp, Saccharomyces pastorianus
tctaatcatcgaatggaggccttgt

SEQ ID NO: 89976 - DNA, 25 bp, Saccharomyces pastorianus
aattattctggtgcctttgggctct

SEQ ID NO: 89977 - DNA, 25 bp, Saccharomyces pastorianus
aagcggaaggctaccacaacgacca

SEQ ID NO: 89978 - DNA, 25 bp, Saccharomyces pastorianus
tttgggctcttttgcaaagcggaag

SEQ ID NO: 89979 - DNA, 25 bp, Saccharomyces pastorianus
gatgtgcagtctttcaagtctcata

SEQ ID NO: 89980 - DNA, 25 bp, Saccharomyces pastorianus
gaaccatgtcaaaattgcttctcaa

SEQ ID NO: 89981 - DNA, 25 bp, Saccharomyces pastorianus
ggatgacatctcagtgggcgattta

SEQ ID NO: 89982 - DNA, 25 bp, Saccharomyces pastorianus
ttgactttgagtacgcaggccctaa

SEQ ID NO: 89983 - DNA, 25 bp, Saccharomyces pastorianus
gatgaaacgcaccttatggagcaca

SEQ ID NO: 89984 - DNA, 25 bp, Saccharomyces pastorianus
agatatttctgttgctgtcgccact

SEQ ID NO: 89985 - DNA, 25 bp, Saccharomyces pastorianus
cgaaattgttcgcttgagtcataaa

SEQ ID NO: 89986 - DNA, 25 bp, Saccharomyces pastorianus
gagagacctgtcactgttaatggac

SEQ ID NO: 89987 - DNA, 25 bp, Saccharomyces pastorianus
cggattcatgggtcttttctccaaa

SEQ ID NO: 89988 - DNA, 25 bp, Saccharomyces pastorianus
aaaacactgctgcttccttaaccac

SEQ ID NO: 89989 - DNA, 25 bp, Saccharomyces pastorianus
caaagcatgtaccttggccgccaag

SEQ ID NO: 89990 - DNA, 25 bp, Saccharomyces pastorianus
aaacagccgtcctaggcttgcatgg

SEQ ID NO: 89991 - DNA, 25 bp, Saccharomyces pastorianus
gcgcgtgatggcaaattaaccctag

SEQ ID NO: 89992 - DNA, 25 bp, Saccharomyces pastorianus
gaagctgttaccttcttgaagactg

SEQ ID NO: 89993 - DNA, 25 bp, Saccharomyces pastorianus
ccagtcgttcgtaatgcagagtcat

SEQ ID NO: 89994 - DNA, 25 bp, Saccharomyces pastorianus
atattccagccgtcaatggtgccat

SEQ ID NO: 89995 - DNA, 25 bp, Saccharomyces pastorianus
aactatctcaggtggattctcagtc

SEQ ID NO: 89996 - DNA, 25 bp, Saccharomyces pastorianus
taaggatacggcgttgactccactt

SEQ ID NO: 89997 - DNA, 25 bp, Saccharomyces pastorianus
tggacttccatacacacttccaatt

SEQ ID NO: 89998 - DNA, 25 bp, Saccharomyces pastorianus
ttcattacctctgacagcggagaat

SEQ ID NO: 89999 - DNA, 25 bp, Saccharomyces pastorianus
gagattaaccctacttacacgacaa

SEQ ID NO: 90000 - DNA, 25 bp, Saccharomyces pastorianus
gtagaagggcacctttgcagcttcc

SEQ ID NO: 90001 - DNA, 25 bp, Saccharomyces pastorianus
tgcagcttcctcaattagtcaataa

SEQ ID NO: 90002 - DNA, 25 bp, Saccharomyces pastorianus
gaagttaggctactgtccgtacggt

SEQ ID NO: 90003 - DNA, 25 bp, Saccharomyces pastorianus
gtacggtaagcgttgctgtttcaaa

SEQ ID NO: 90004 - DNA, 25 bp, Saccharomyces pastorianus
aactgagctctgtgaatcttttact

SEQ ID NO: 90005 - DNA, 25 bp, Saccharomyces pastorianus
gattctcagtctactggacttccat

SEQ ID NO: 90006 - DNA, 25 bp, Saccharomyces pastorianus
gaagtagccctcaatgacaacgaag

SEQ ID NO: 90007 - DNA, 25 bp, Saccharomyces pastorianus
gaaccatgcctgatttcattggaag

SEQ ID NO: 90008 - DNA, 25 bp, Saccharomyces pastorianus
ggaagctcaagaagtagccctcaat

SEQ ID NO: 90009 - DNA, 25 bp, Saccharomyces pastorianus
gtgttttgcattgatttcatccata

SEQ ID NO: 90010 - DNA, 25 bp, Saccharomyces pastorianus
taaccgtacaattagaatcgcaaat

SEQ ID NO: 90011 - DNA, 25 bp, Saccharomyces pastorianus
gacgaggttgaatatgacgaccatg

SEQ ID NO: 90012 - DNA, 25 bp, Saccharomyces pastorianus
aaccgatatgttattgggtatgcaa

SEQ ID NO: 90013 - DNA, 25 bp, Saccharomyces pastorianus
agaaaactaccctgacgaaccatgc

SEQ ID NO: 90014 - DNA, 25 bp, Saccharomyces pastorianus
ggtacttgcctgaattaaccgtaca

SEQ ID NO: 90015 - DNA, 25 bp, Saccharomyces pastorianus
aaacctgccagatttaataagcttt

SEQ ID NO: 90016 - DNA, 25 bp, Saccharomyces pastorianus
ataatcgccgaattcaagttaccag

SEQ ID NO: 90017 - DNA, 25 bp, Saccharomyces pastorianus
gacacaacagcacctaaaacttcca

SEQ ID NO: 90018 - DNA, 25 bp, Saccharomyces pastorianus
aaattcgaatactcgcaggcgttct

SEQ ID NO: 90019 - DNA, 25 bp, Saccharomyces pastorianus
tggcgacttccaaagcgaaacgagt

SEQ ID NO: 90020 - DNA, 25 bp, Saccharomyces pastorianus
gatttgcttgactgggatggcccaa

SEQ ID NO: 90021 - DNA, 25 bp, Saccharomyces pastorianus
gaccaacttcaatgttcctgtggaa

SEQ ID NO: 90022 - DNA, 25 bp, Saccharomyces pastorianus
gatttcaacctctgcaagttacgat

SEQ ID NO: 90023 - DNA, 25 bp, Saccharomyces pastorianus
agcatccctgacttaatcgatcttg

SEQ ID NO: 90024 - DNA, 25 bp, Saccharomyces pastorianus
gatgcagatggctttgacagtgaaa

SEQ ID NO: 90025 - DNA, 25 bp, Saccharomyces pastorianus
ggatggcccaaaatcagacacagat

SEQ ID NO: 90026 - DNA, 25 bp, Saccharomyces pastorianus
tgacgatagtactagcaccacgaat

SEQ ID NO: 90027 - DNA, 25 bp, Saccharomyces pastorianus
acatcattgccctttgcggagaaaa

SEQ ID NO: 90028 - DNA, 25 bp, Saccharomyces pastorianus
gaattataaccgctctgcctggaac

SEQ ID NO: 90029 - DNA, 25 bp, Saccharomyces pastorianus
aattgaaacgaactattctctctta

SEQ ID NO: 90030 - DNA, 25 bp, Saccharomyces pastorianus
gaaacgaactattctctcttaaatt

SEQ ID NO: 90031 - DNA, 25 bp, Saccharomyces pastorianus
gaactattctctcttaaattatatg

SEQ ID NO: 90032 - DNA, 25 bp, Saccharomyces pastorianus
aaccgctctgcctggaacaatacag

SEQ ID NO: 90033 - DNA, 25 bp, Saccharomyces pastorianus
gctctgcctggaacaatacagcaaa

SEQ ID NO: 90034 - DNA, 25 bp, Saccharomyces pastorianus
ggtgaattataaccgctctgcctgg

SEQ ID NO: 90035 - DNA, 25 bp, Saccharomyces pastorianus
tataaccgctctgcctggaacaata

SEQ ID NO: 90036 - DNA, 25 bp, Saccharomyces pastorianus
attataaccgctctgcctggaacaa

SEQ ID NO: 90037 - DNA, 25 bp, Saccharomyces pastorianus
aacgaactattctctcttaaattat

SEQ ID NO: 90038 - DNA, 25 bp, Saccharomyces pastorianus
taaccgctctgcctggaacaataca

SEQ ID NO: 90039 - DNA, 25 bp, Saccharomyces pastorianus
gttgtctttggtgaagttgttgacg

SEQ ID NO: 90040 - DNA, 25 bp, Saccharomyces pastorianus
gaaggttgagtccttgggttctcct

SEQ ID NO: 90041 - DNA, 25 bp, Saccharomyces pastorianus
gttgagtccttgggttctccttccg

SEQ ID NO: 90042 - DNA, 25 bp, Saccharomyces pastorianus
tgaagttgttgacggttacgacatc

SEQ ID NO: 90043 - DNA, 25 bp, Saccharomyces pastorianus
ggtccatactcctacggttctcaat

SEQ ID NO: 90044 - DNA, 25 bp, Saccharomyces pastorianus
tagaattgttgttgccaagtccggt

SEQ ID NO: 90045 - DNA, 25 bp, Saccharomyces pastorianus
gccaccaaggctagaattgttgttg

SEQ ID NO: 90046 - DNA, 25 bp, Saccharomyces pastorianus
gctagaattgttgttgccaagtccg

SEQ ID NO: 90047 - DNA, 25 bp, Saccharomyces pastorianus
tggtgaagttgttgacggttacgac

SEQ ID NO: 90048 - DNA, 25 bp, Saccharomyces pastorianus
tccatactcctacggttctcaattc

SEQ ID NO: 90049 - DNA, 25 bp, Saccharomyces pastorianus
tacgacatcgttaagaaggttgagt

SEQ ID NO: 90050 - DNA, 25 bp, Saccharomyces pastorianus
gacgaggttcttcaatttctggaga

SEQ ID NO: 90051 - DNA, 25 bp, Saccharomyces pastorianus
taaacacgcctgtggtcattcatgc

SEQ ID NO: 90052 - DNA, 25 bp, Saccharomyces pastorianus
ccattcaggtctccacgacggagaa

SEQ ID NO: 90053 - DNA, 25 bp, Saccharomyces pastorianus
ctttccagctccatatcgcaattaa

SEQ ID NO: 90054 - DNA, 25 bp, Saccharomyces pastorianus
gtaataacactgctaccacgctaaa

SEQ ID NO: 90055 - DNA, 25 bp, Saccharomyces pastorianus
atgaataccatcagcggcaacgccg

SEQ ID NO: 90056 - DNA, 25 bp, Saccharomyces pastorianus
aacatgtctctactgacgaggttct

SEQ ID NO: 90057 - DNA, 25 bp, Saccharomyces pastorianus
atttctggagagctttatcgatgag

SEQ ID NO: 90058 - DNA, 25 bp, Saccharomyces pastorianus
tgtggctaacaccagcctcaacatc

SEQ ID NO: 90059 - DNA, 25 bp, Saccharomyces pastorianus
agacaagcataggtgtcagtgccac

SEQ ID NO: 90060 - DNA, 25 bp, Saccharomyces pastorianus
gagagacttcaagggtctgccaccc

SEQ ID NO: 90061 - DNA, 25 bp, Saccharomyces pastorianus
gcagcggcctcaaagtacccggttt

SEQ ID NO: 90062 - DNA, 25 bp, Saccharomyces pastorianus
ttcctctgactactaccagttcaaa

SEQ ID NO: 90063 - DNA, 25 bp, Saccharomyces pastorianus
gtagcagcagccttgcccttttaca

SEQ ID NO: 90064 - DNA, 25 bp, Saccharomyces pastorianus
agaatcctgacatctgagcgtcttc

SEQ ID NO: 90065 - DNA, 25 bp, Saccharomyces pastorianus
ttcacatacgccttctgtatactac

SEQ ID NO: 90066 - DNA, 25 bp, Saccharomyces pastorianus
gacatctgagcgtcttcagtgtttt

SEQ ID NO: 90067 - DNA, 25 bp, Saccharomyces pastorianus
ttttctctttctttccagatccaaa

SEQ ID NO: 90068 - DNA, 25 bp, Saccharomyces pastorianus
ttatttgttcattcactttcgagta

SEQ ID NO: 90069 - DNA, 25 bp, Saccharomyces pastorianus
attgattgactcattttcctctgac

SEQ ID NO: 90070 - DNA, 25 bp, Saccharomyces pastorianus
gagtgagacctgtagcagcagcctt

SEQ ID NO: 90071 - DNA, 25 bp, Saccharomyces pastorianus
ttccaaaccatgttgtcaagcattg

SEQ ID NO: 90072 - DNA, 25 bp, Saccharomyces pastorianus
atgaagcattctcacaagcctggaa

SEQ ID NO: 90073 - DNA, 25 bp, Saccharomyces pastorianus
ttggatttatcccacgagccaatct

SEQ ID NO: 90074 - DNA, 25 bp, Saccharomyces pastorianus
ggcggtgctaatgctttactccaag

SEQ ID NO: 90075 - DNA, 25 bp, Saccharomyces pastorianus
gtaagcctgcgtccggaaaatatat

SEQ ID NO: 90076 - DNA, 25 bp, Saccharomyces pastorianus
tggtgacacaactcagaaagctggt

SEQ ID NO: 90077 - DNA, 25 bp, Saccharomyces pastorianus
aagcctggaatttctttgagttgaa

SEQ ID NO: 90078 - DNA, 25 bp, Saccharomyces pastorianus
gaacaatcccgaagtaagcctgcgt

SEQ ID NO: 90079 - DNA, 25 bp, Saccharomyces pastorianus
tagcgctaagtttcgcattgcaagc

SEQ ID NO: 90080 - DNA, 25 bp, Saccharomyces pastorianus
aagtgggagcttacgaagtcgcatt

SEQ ID NO: 90081 - DNA, 25 bp, Saccharomyces pastorianus
gagccaatctcccagttaatctatg

SEQ ID NO: 90082 - DNA, 25 bp, Saccharomyces pastorianus
ggtggtcctctagatccaagtgagt

SEQ ID NO: 90083 - DNA, 25 bp, Saccharomyces pastorianus
gtttgtctcttatatacagccgcaa

SEQ ID NO: 90084 - DNA, 25 bp, Saccharomyces pastorianus
tgattacacagagcgttagtcctaa

SEQ ID NO: 90085 - DNA, 25 bp, Saccharomyces pastorianus
ggtaccggaggagtttgtctcttat

SEQ ID NO: 90086 - DNA, 25 bp, Saccharomyces pastorianus
gctcgacctttctatttgacacatt

SEQ ID NO: 90087 - DNA, 25 bp, Saccharomyces pastorianus
ggtggagaataaggctcgacctttc

SEQ ID NO: 90088 - DNA, 25 bp, Saccharomyces pastorianus
tatgcgtacgcagattcgaatcctc

SEQ ID NO: 90089 - DNA, 25 bp, Saccharomyces pastorianus
ggctgagggtgacatcgtatttatc

SEQ ID NO: 90090 - DNA, 25 bp, Saccharomyces pastorianus
agattcgaatcctctccattatggt

SEQ ID NO: 90091 - DNA, 25 bp, Saccharomyces pastorianus
tttatcagttacaagcatgggcaag

SEQ ID NO: 90092 - DNA, 25 bp, Saccharomyces pastorianus
tacagccgcaagatggtgagaacga

SEQ ID NO: 90093 - DNA, 25 bp, Saccharomyces pastorianus
gtataacactaccagacgactacat

SEQ ID NO: 90094 - DNA, 25 bp, Saccharomyces pastorianus
atcgagcatgccagattactaccag

SEQ ID NO: 90095 - DNA, 25 bp, Saccharomyces pastorianus
aaagcggccgcttatacaccaacag

SEQ ID NO: 90096 - DNA, 25 bp, Saccharomyces pastorianus
gtgggaacctccaagaaacccgcag

SEQ ID NO: 90097 - DNA, 25 bp, Saccharomyces pastorianus
atcagcgtccggatacattaacgat

SEQ ID NO: 90098 - DNA, 25 bp, Saccharomyces pastorianus
gactcgttgcaagagctgctgatta

SEQ ID NO: 90099 - DNA, 25 bp, Saccharomyces pastorianus
tatacaccaacaggcatcgagcatg

SEQ ID NO: 90100 - DNA, 25 bp, Saccharomyces pastorianus
attcgtctaggcgatcgtggagaaa

SEQ ID NO: 90101 - DNA, 25 bp, Saccharomyces pastorianus
gaaacccgcagtgagaaagaccaaa

SEQ ID NO: 90102 - DNA, 25 bp, Saccharomyces pastorianus
gcgtttggacgccataaagtaacca

SEQ ID NO: 90103 - DNA, 25 bp, Saccharomyces pastorianus
atctttagaggaggcagtagtgaac

SEQ ID NO: 90104 - DNA, 25 bp, Saccharomyces pastorianus
tactaccaggacatacaacattaaa

SEQ ID NO: 90105 - DNA, 25 bp, Saccharomyces pastorianus
agatcagcgccagcaagtaaacccg

SEQ ID NO: 90106 - DNA, 25 bp, Saccharomyces pastorianus
gcaggcttagcgaatacctctgcta

SEQ ID NO: 90107 - DNA, 25 bp, Saccharomyces pastorianus
aaagcagcaggttccctcaagtcag

SEQ ID NO: 90108 - DNA, 25 bp, Saccharomyces pastorianus
taaacccgcctgatttccttctaag

SEQ ID NO: 90109 - DNA, 25 bp, Saccharomyces pastorianus
taactcctcctcatccttaaggaat

SEQ ID NO: 90110 - DNA, 25 bp, Saccharomyces pastorianus
gagatatctttattggcagcgacga

SEQ ID NO: 90111 - DNA, 25 bp, Saccharomyces pastorianus
gagcgaacaatacttcccatattta

SEQ ID NO: 90112 - DNA, 25 bp, Saccharomyces pastorianus
acaaccagtctctcatgttcattta

SEQ ID NO: 90113 - DNA, 25 bp, Saccharomyces pastorianus
aaggaatccccgtcacaaggcagct

SEQ ID NO: 90114 - DNA, 25 bp, Saccharomyces pastorianus
ggtacttctagtcccaaagcagcag

SEQ ID NO: 90115 - DNA, 25 bp, Saccharomyces pastorianus
ggtggtatatcaatccccgaaatta

SEQ ID NO: 90116 - DNA, 25 bp, Saccharomyces pastorianus
gatggaatcttcaattttcggtaac

SEQ ID NO: 90117 - DNA, 25 bp, Saccharomyces pastorianus
ggcctcagctcatccataagatttt

SEQ ID NO: 90118 - DNA, 25 bp, Saccharomyces pastorianus
agccttatgttggtaatctttctaa

SEQ ID NO: 90119 - DNA, 25 bp, Saccharomyces pastorianus
aatgattctgatcgtggttcacagt

SEQ ID NO: 90120 - DNA, 25 bp, Saccharomyces pastorianus
gcagtattttgatgacgcattcgag

SEQ ID NO: 90121 - DNA, 25 bp, Saccharomyces pastorianus
gaaacgcagatttttatagccagat

SEQ ID NO: 90122 - DNA, 25 bp, Saccharomyces pastorianus
agaatgtgcattcccaaatattttg

SEQ ID NO: 90123 - DNA, 25 bp, Saccharomyces pastorianus
agtgctttagaattgggcctcagct

SEQ ID NO: 90124 - DNA, 25 bp, Saccharomyces pastorianus
gaaaaggacaccgaggccacattaa

SEQ ID NO: 90125 - DNA, 25 bp, Saccharomyces pastorianus
gggcatgcttacaaaactgtttcca

SEQ ID NO: 90126 - DNA, 25 bp, Saccharomyces pastorianus
tagccagatacctctttgaggcatt

SEQ ID NO: 90127 - DNA, 25 bp, Saccharomyces pastorianus
tcaggtcttccgtagcggtatctaa

SEQ ID NO: 90128 - DNA, 25 bp, Saccharomyces pastorianus
tatcattcccgatgcagtaatagac

SEQ ID NO: 90129 - DNA, 25 bp, Saccharomyces pastorianus
agatgatggacagtactcctcctat

SEQ ID NO: 90130 - DNA, 25 bp, Saccharomyces pastorianus
aaggacagcaacagcctggcgtgca

SEQ ID NO: 90131 - DNA, 25 bp, Saccharomyces pastorianus
acagtcaggcgagagctaggcagct

SEQ ID NO: 90132 - DNA, 25 bp, Saccharomyces pastorianus
tagcgctgttgctgaatacgggctc

SEQ ID NO: 90133 - DNA, 25 bp, Saccharomyces pastorianus
aatattccaggatcaggtcttccgt

SEQ ID NO: 90134 - DNA, 25 bp, Saccharomyces pastorianus
tgaaacgacttttagcacttgctac

SEQ ID NO: 90135 - DNA, 25 bp, Saccharomyces pastorianus
tgaaaatgcatttggtatacccgaa

SEQ ID NO: 90136 - DNA, 25 bp, Saccharomyces pastorianus
gaacgatctcagtagcgctgttgct

SEQ ID NO: 90137 - DNA, 25 bp, Saccharomyces pastorianus
tagaaacaccttttccatcggttgc

SEQ ID NO: 90138 - DNA, 25 bp, Saccharomyces pastorianus
tactgcgacaagtgagccaacttca

SEQ ID NO: 90139 - DNA, 25 bp, Saccharomyces pastorianus
taatggcgtagttagccctaaacct

SEQ ID NO: 90140 - DNA, 25 bp, Saccharomyces pastorianus
tctaaagctacgtcggtttccacct

SEQ ID NO: 90141 - DNA, 25 bp, Saccharomyces pastorianus
atggagatattgagcctcccctaca

SEQ ID NO: 90142 - DNA, 25 bp, Saccharomyces pastorianus
gagtagcttcacaacacctgaatgg

SEQ ID NO: 90143 - DNA, 25 bp, Saccharomyces pastorianus
gaatcaattggtgcagcttctctga

SEQ ID NO: 90144 - DNA, 25 bp, Saccharomyces pastorianus
gtttagcacctaacatagacagcgt

SEQ ID NO: 90145 - DNA, 25 bp, Saccharomyces pastorianus
aagaagagcttctcgtctgtctgta

SEQ ID NO: 90146 - DNA, 25 bp, Saccharomyces pastorianus
gggaatcgtcgccacaacttgttcc

SEQ ID NO: 90147 - DNA, 25 bp, Saccharomyces pastorianus
gtattagatcgacacttttcccaaa

SEQ ID NO: 90148 - DNA, 25 bp, Saccharomyces pastorianus
tcgtcactacaaaccctaactctaa

SEQ ID NO: 90149 - DNA, 25 bp, Saccharomyces pastorianus
caaaaaatcttcatcgttcgctcac

SEQ ID NO: 90150 - DNA, 25 bp, Saccharomyces pastorianus
cgtgctgccacgcattaaggacgaa

SEQ ID NO: 90151 - DNA, 25 bp, Saccharomyces pastorianus
agggctttccacattgattaccatc

SEQ ID NO: 90152 - DNA, 25 bp, Saccharomyces pastorianus
tgataccgaggacacttacgtagtt

SEQ ID NO: 90153 - DNA, 25 bp, Saccharomyces pastorianus
ggaggaatcgtcgagaccaccatta

SEQ ID NO: 90154 - DNA, 25 bp, Saccharomyces pastorianus
atggacttaccattttcaccagaag

SEQ ID NO: 90155 - DNA, 25 bp, Saccharomyces pastorianus
gagaaccgttaaattccccgtgctg

SEQ ID NO: 90156 - DNA, 25 bp, Saccharomyces pastorianus
gattaccatccatcttctcatgaga

SEQ ID NO: 90157 - DNA, 25 bp, Saccharomyces pastorianus
tgacccgttacaagtatccaagcct

SEQ ID NO: 90158 - DNA, 25 bp, Saccharomyces pastorianus
taccaggtgctaactctagggcttt

SEQ ID NO: 90159 - DNA, 25 bp, Saccharomyces pastorianus
aagctacttacaacaacggtctact

SEQ ID NO: 90160 - DNA, 25 bp, Saccharomyces pastorianus
aagatgctattatcgctgctccagt

SEQ ID NO: 90161 - DNA, 25 bp, Saccharomyces pastorianus
gctcggagctggttaaccctattga

SEQ ID NO: 90162 - DNA, 25 bp, Saccharomyces pastorianus
aaacattgacttctggtgtaaacca

SEQ ID NO: 90163 - DNA, 25 bp, Saccharomyces pastorianus
ggaaaacggtccaactcatgcgccg

SEQ ID NO: 90164 - DNA, 25 bp, Saccharomyces pastorianus
cactgactgttttctttgcttactc

SEQ ID NO: 90165 - DNA, 25 bp, Saccharomyces pastorianus
gtgtaaaccacttgcacggcatcag

SEQ ID NO: 90166 - DNA, 25 bp, Saccharomyces pastorianus
taccaccagcttccttggaaaacgg

SEQ ID NO: 90167 - DNA, 25 bp, Saccharomyces pastorianus
ttactctgcgtacgttcgtcaagaa

SEQ ID NO: 90168 - DNA, 25 bp, Saccharomyces pastorianus
ttgccacctttatcgtcaactgaga

SEQ ID NO: 90169 - DNA, 25 bp, Saccharomyces pastorianus
ggaagcaggcttacaacgtcgagtt

SEQ ID NO: 90170 - DNA, 25 bp, Saccharomyces pastorianus
atgctccaaagaagccactgactgt

SEQ ID NO: 90171 - DNA, 25 bp, Saccharomyces pastorianus
aatcgcgataacagtcttagaccgt

SEQ ID NO: 90172 - DNA, 25 bp, Saccharomyces pastorianus
accgctattagctcaatatcgccag

SEQ ID NO: 90173 - DNA, 25 bp, Saccharomyces pastorianus
caagctcaggaattggttgcccaac

SEQ ID NO: 90174 - DNA, 25 bp, Saccharomyces pastorianus
ggaaacgccctgaagatgcaccaaa

SEQ ID NO: 90175 - DNA, 25 bp, Saccharomyces pastorianus
atctccagaaagtcatccggtcact

SEQ ID NO: 90176 - DNA, 25 bp, Saccharomyces pastorianus
agccgcatatgagttaccgctatta

SEQ ID NO: 90177 - DNA, 25 bp, Saccharomyces pastorianus
ggttctataatcgattagccgcata

SEQ ID NO: 90178 - DNA, 25 bp, Saccharomyces pastorianus
gccaggtcgcgttatgatcatacta

SEQ ID NO: 90179 - DNA, 25 bp, Saccharomyces pastorianus
gatgaattgccatcgcaagctcagg

SEQ ID NO: 90180 - DNA, 25 bp, Saccharomyces pastorianus
atgttggcgaagagcatcctaattc

SEQ ID NO: 90181 - DNA, 25 bp, Saccharomyces pastorianus
gattttagcgatgttccccttgaca

SEQ ID NO: 90182 - DNA, 25 bp, Saccharomyces pastorianus
aaatcgctagaagatccttacaaat

SEQ ID NO: 90183 - DNA, 25 bp, Saccharomyces pastorianus
gaaagccatttaattcagctacaga

SEQ ID NO: 90184 - DNA, 25 bp, Saccharomyces pastorianus
tagttcaaaatcttcggagctggga

SEQ ID NO: 90185 - DNA, 25 bp, Saccharomyces pastorianus
aatccgcgagtgacgaaagagtatt

SEQ ID NO: 90186 - DNA, 25 bp, Saccharomyces pastorianus
aatcctaacatcattaatgcgatca

SEQ ID NO: 90187 - DNA, 25 bp, Saccharomyces pastorianus
aagcagagatggattcagtcagtaa

SEQ ID NO: 90188 - DNA, 25 bp, Saccharomyces pastorianus
ggttaaatactaaagatcccgatga

SEQ ID NO: 90189 - DNA, 25 bp, Saccharomyces pastorianus
cgatggtatcatcgaaagccattta

SEQ ID NO: 90190 - DNA, 25 bp, Saccharomyces pastorianus
gactgtagagatgtgtactgtcatg

SEQ ID NO: 90191 - DNA, 25 bp, Saccharomyces pastorianus
aagatcccgatgaacaacaattatt

SEQ ID NO: 90192 - DNA, 25 bp, Saccharomyces pastorianus
ctgactataattgaaaatccgcgag

SEQ ID NO: 90193 - DNA, 25 bp, Saccharomyces pastorianus
ggtggttccattatagtactgctga

SEQ ID NO: 90194 - DNA, 25 bp, Saccharomyces pastorianus
gcaatagtgccctcttgtaacgaaa

SEQ ID NO: 90195 - DNA, 25 bp, Saccharomyces pastorianus
atttcatcttgcactgcatctcaga

SEQ ID NO: 90196 - DNA, 25 bp, Saccharomyces pastorianus
gtactgctgagcgatcatcaatcac

SEQ ID NO: 90197 - DNA, 25 bp, Saccharomyces pastorianus
gcacctttaggttcaatttcatctt

SEQ ID NO: 90198 - DNA, 25 bp, Saccharomyces pastorianus
gcatctcagatttcacaaaggtctt

SEQ ID NO: 90199 - DNA, 25 bp, Saccharomyces pastorianus
atgctgcatctataagtccaactct

SEQ ID NO: 90200 - DNA, 25 bp, Saccharomyces pastorianus
gagagcagcaatgcggtggttccat

SEQ ID NO: 90201 - DNA, 25 bp, Saccharomyces pastorianus
gaaagctcctcgaatatcaacgcaa

SEQ ID NO: 90202 - DNA, 25 bp, Saccharomyces pastorianus
ggaagtcatcccgttaacgatggag

SEQ ID NO: 90203 - DNA, 25 bp, Saccharomyces pastorianus
agccgctccgaaaaccgtatttgat

SEQ ID NO: 90204 - DNA, 25 bp, Saccharomyces pastorianus
tatcacactcatatccgtttcaggg

SEQ ID NO: 90205 - DNA, 25 bp, Saccharomyces pastorianus
tacacgacctgatggtaacacctca

SEQ ID NO: 90206 - DNA, 25 bp, Saccharomyces pastorianus
gagctatgctatatgccagatccct

SEQ ID NO: 90207 - DNA, 25 bp, Saccharomyces pastorianus
ggattattattctctgctgccttta

SEQ ID NO: 90208 - DNA, 25 bp, Saccharomyces pastorianus
tgctgcctttatcgcatacatgcat

SEQ ID NO: 90209 - DNA, 25 bp, Saccharomyces pastorianus
taacacctcagatttgccattacct

SEQ ID NO: 90210 - DNA, 25 bp, Saccharomyces pastorianus
gccggcggagagtatgcatcaaaaa

SEQ ID NO: 90211 - DNA, 25 bp, Saccharomyces pastorianus
gcaattgtcctttttgtttctgtga

SEQ ID NO: 90212 - DNA, 25 bp, Saccharomyces pastorianus
aagggcaccagtaccagacagttat

SEQ ID NO: 90213 - DNA, 25 bp, Saccharomyces pastorianus
gtaggcctgctattcaattgctctc

SEQ ID NO: 90214 - DNA, 25 bp, Saccharomyces pastorianus
cgctgtgaatgatacgcgttcgatc

SEQ ID NO: 90215 - DNA, 25 bp, Saccharomyces pastorianus
tttgtggtccaagctaaaactgcag

SEQ ID NO: 90216 - DNA, 25 bp, Saccharomyces pastorianus
ggactgggcgtaacaccaattactt

SEQ ID NO: 90217 - DNA, 25 bp, Saccharomyces pastorianus
ggtattactatgctcaccaaacagt

SEQ ID NO: 90218 - DNA, 25 bp, Saccharomyces pastorianus
accgggtgtggtattactatgctca

SEQ ID NO: 90219 - DNA, 25 bp, Saccharomyces pastorianus
actatgctcaccaaacagtttgcat

SEQ ID NO: 90220 - DNA, 25 bp, Saccharomyces pastorianus
aacctctactggatttgcattatgt

SEQ ID NO: 90221 - DNA, 25 bp, Saccharomyces pastorianus
cattatgttttgtggtccaagctaa

SEQ ID NO: 90222 - DNA, 25 bp, Saccharomyces pastorianus
agtttgcataacctctactggattt

SEQ ID NO: 90223 - DNA, 25 bp, Saccharomyces pastorianus
aaaactgcaggactgggcgtaacac

SEQ ID NO: 90224 - DNA, 25 bp, Saccharomyces pastorianus
aacaccaattacttcactatacggg

SEQ ID NO: 90225 - DNA, 25 bp, Saccharomyces pastorianus
agatataaattataccgggtgtggt

SEQ ID NO: 90226 - DNA, 25 bp, Saccharomyces pastorianus
gttaaatttagagtcagttctgcta

SEQ ID NO: 90227 - DNA, 25 bp, Saccharomyces pastorianus
acacagtcgcatttttgagtttcat

SEQ ID NO: 90228 - DNA, 25 bp, Saccharomyces pastorianus
gtttatctgcatttattggtttttt

SEQ ID NO: 90229 - DNA, 25 bp, Saccharomyces pastorianus
gtcatcgttattcgtactcaacttt

SEQ ID NO: 90230 - DNA, 25 bp, Saccharomyces pastorianus
tttactacaaagatggtccaatttt

SEQ ID NO: 90231 - DNA, 25 bp, Saccharomyces pastorianus
gtcagttctgctaagtttatctgca

SEQ ID NO: 90232 - DNA, 25 bp, Saccharomyces pastorianus
cctttctcagtcatcgttattcgta

SEQ ID NO: 90233 - DNA, 25 bp, Saccharomyces pastorianus
atatacactacctttctcagtcatc

SEQ ID NO: 90234 - DNA, 25 bp, Saccharomyces pastorianus
taaacattactatacgcatatttcg

SEQ ID NO: 90235 - DNA, 25 bp, Saccharomyces pastorianus
tattcgtactcaacttttattattt

SEQ ID NO: 90236 - DNA, 25 bp, Saccharomyces pastorianus
ttattttaaggaacacagtcgcatt

SEQ ID NO: 90237 - DNA, 25 bp, Saccharomyces pastorianus
aaagggttatactggcaaggcatca

SEQ ID NO: 90238 - DNA, 25 bp, Saccharomyces pastorianus
gatagcctagttggtattgatctcg

SEQ ID NO: 90239 - DNA, 25 bp, Saccharomyces pastorianus
attcacagagcacatttattggttg

SEQ ID NO: 90240 - DNA, 25 bp, Saccharomyces pastorianus
attgtatctgcaacgaagcctgcta

SEQ ID NO: 90241 - DNA, 25 bp, Saccharomyces pastorianus
cttcgttagcttcatccgacgctaa

SEQ ID NO: 90242 - DNA, 25 bp, Saccharomyces pastorianus
gatagataaacccaccatcaagaag

SEQ ID NO: 90243 - DNA, 25 bp, Saccharomyces pastorianus
gttacgcgagatcttgtattcaatt

SEQ ID NO: 90244 - DNA, 25 bp, Saccharomyces pastorianus
ctatcaccttcatcttcgttagctt

SEQ ID NO: 90245 - DNA, 25 bp, Saccharomyces pastorianus
accgattcgagcacacttttggaaa

SEQ ID NO: 90246 - DNA, 25 bp, Saccharomyces pastorianus
cgacgctaatgaatcccacctaaaa

SEQ ID NO: 90247 - DNA, 25 bp, Saccharomyces pastorianus
aagcctgctaagttcacaaatgagt

SEQ ID NO: 90248 - DNA, 25 bp, Saccharomyces pastorianus
tattgcagtcgatgtgctccgcaga

SEQ ID NO: 90249 - DNA, 25 bp, Saccharomyces pastorianus
agaaagtcaccacggcgaactggat

SEQ ID NO: 90250 - DNA, 25 bp, Saccharomyces pastorianus
gaacatggcgatgtacttcttacag

SEQ ID NO: 90251 - DNA, 25 bp, Saccharomyces pastorianus
gcaaagtttctgtctggtgttccga

SEQ ID NO: 90252 - DNA, 25 bp, Saccharomyces pastorianus
tgttccgaccaaaacctttagtgag

SEQ ID NO: 90253 - DNA, 25 bp, Saccharomyces pastorianus
tagcatacgtgcgagaggtctccac

SEQ ID NO: 90254 - DNA, 25 bp, Saccharomyces pastorianus
gaatgtgactcttttcaagcaggat

SEQ ID NO: 90255 - DNA, 25 bp, Saccharomyces pastorianus
agatctccacacacgttattgcagt

SEQ ID NO: 90256 - DNA, 25 bp, Saccharomyces pastorianus
gaaaccgtacgttatgttcctcatc

SEQ ID NO: 90257 - DNA, 25 bp, Saccharomyces pastorianus
ggagttgcaatatgaccttcccgca

SEQ ID NO: 90258 - DNA, 25 bp, Saccharomyces pastorianus
aggtctccaccgttgatcgaaggga

SEQ ID NO: 90259 - DNA, 25 bp, Saccharomyces pastorianus
accgtccttggtcagcttgatgtta

SEQ ID NO: 90260 - DNA, 25 bp, Saccharomyces pastorianus
tatacataatcctttccgtctttcg

SEQ ID NO: 90261 - DNA, 25 bp, Saccharomyces pastorianus
gacggattgtaagccctcagcagat

SEQ ID NO: 90262 - DNA, 25 bp, Saccharomyces pastorianus
gaaacggtgcgcttgtctaagcaat

SEQ ID NO: 90263 - DNA, 25 bp, Saccharomyces pastorianus
gcaatgacatgcttctactctactt

SEQ ID NO: 90264 - DNA, 25 bp, Saccharomyces pastorianus
tggatctgcatctcggtcagcaaca

SEQ ID NO: 90265 - DNA, 25 bp, Saccharomyces pastorianus
tgtgacgttaaccttcaaagccgca

SEQ ID NO: 90266 - DNA, 25 bp, Saccharomyces pastorianus
attataatcttctgcttctcactgc

SEQ ID NO: 90267 - DNA, 25 bp, Saccharomyces pastorianus
ggcccaagttggtctctaggacgga

SEQ ID NO: 90268 - DNA, 25 bp, Saccharomyces pastorianus
attcagccttcggattcagcaattg

SEQ ID NO: 90269 - DNA, 25 bp, Saccharomyces pastorianus
tctttcgttcgtttcttaccagaat

SEQ ID NO: 90270 - DNA, 25 bp, Saccharomyces pastorianus
ttatcaactaatgtgcctctggcga

SEQ ID NO: 90271 - DNA, 25 bp, Saccharomyces pastorianus
gtatgccgcctaagaatgtgctaga

SEQ ID NO: 90272 - DNA, 25 bp, Saccharomyces pastorianus
gcttaagatctactggtgtgggcaa

SEQ ID NO: 90273 - DNA, 25 bp, Saccharomyces pastorianus
gggcaagttgcgtccaagagtaatt

SEQ ID NO: 90274 - DNA, 25 bp, Saccharomyces pastorianus
gcagtttgcggccaaagtccatgca

SEQ ID NO: 90275 - DNA, 25 bp, Saccharomyces pastorianus
tacaatgaggtccaccctgaaggtg

SEQ ID NO: 90276 - DNA, 25 bp, Saccharomyces pastorianus
gattctcggactgaaatcataccgt

SEQ ID NO: 90277 - DNA, 25 bp, Saccharomyces pastorianus
cctgaactgttcaaatgcgacgaca

SEQ ID NO: 90278 - DNA, 25 bp, Saccharomyces pastorianus
gtacacgcagaatattgacggttta

SEQ ID NO: 90279 - DNA, 25 bp, Saccharomyces pastorianus
gcaggctattgagactgtacacgca

SEQ ID NO: 90280 - DNA, 25 bp, Saccharomyces pastorianus
gaagccaatacccagtacagtacaa

SEQ ID NO: 90281 - DNA, 25 bp, Saccharomyces pastorianus
tggtgctccaaatgctgacggttta

SEQ ID NO: 90282 - DNA, 25 bp, Saccharomyces pastorianus
cctgtcattgtgtttgctgttccaa

SEQ ID NO: 90283 - DNA, 25 bp, Saccharomyces pastorianus
ttagccgcattactggtgttcccaa

SEQ ID NO: 90284 - DNA, 25 bp, Saccharomyces pastorianus
agattaggcttagcacccgacgtga

SEQ ID NO: 90285 - DNA, 25 bp, Saccharomyces pastorianus
gccagtattgcctgtattggtacca

SEQ ID NO: 90286 - DNA, 25 bp, Saccharomyces pastorianus
aatgctgaagtggtggttcctcctg

SEQ ID NO: 90287 - DNA, 25 bp, Saccharomyces pastorianus
tgcacttcctcccatgttattggta

SEQ ID NO: 90288 - DNA, 25 bp, Saccharomyces pastorianus
tgggttaccgaaagctgacattaca

SEQ ID NO: 90289 - DNA, 25 bp, Saccharomyces pastorianus
aactaggtcttccaaatgcacttcc

SEQ ID NO: 90290 - DNA, 25 bp, Saccharomyces pastorianus
agttgagtcgttgctcgggtcgaaa

SEQ ID NO: 90291 - DNA, 25 bp, Saccharomyces pastorianus
aagcgctaattgacgtattgccagt

SEQ ID NO: 90292 - DNA, 25 bp, Saccharomyces pastorianus
ggttttctgaaaggcgcatacttcc

SEQ ID NO: 90293 - DNA, 25 bp, Saccharomyces pastorianus
gaaccgtttagacgcagcaacaaca

SEQ ID NO: 90294 - DNA, 25 bp, Saccharomyces pastorianus
ggatcttctgtgctattcatttgta

SEQ ID NO: 90295 - DNA, 25 bp, Saccharomyces pastorianus
gacgctcattctcccgtagtaatga

SEQ ID NO: 90296 - DNA, 25 bp, Saccharomyces pastorianus
ggtgtactgttaaatgatcctcaat

SEQ ID NO: 90297 - DNA, 25 bp, Saccharomyces pastorianus
tacttcctgaaattgcttccactta

SEQ ID NO: 90298 - DNA, 25 bp, Saccharomyces pastorianus
tgacaagtcctacgattatgatgat

SEQ ID NO: 90299 - DNA, 25 bp, Saccharomyces pastorianus
gattccagtatccagaaggttttta

SEQ ID NO: 90300 - DNA, 25 bp, Saccharomyces pastorianus
gagattacgatgacgaaccgtttag

SEQ ID NO: 90301 - DNA, 25 bp, Saccharomyces pastorianus
taaattaggtttgagccgtagtcca

SEQ ID NO: 90302 - DNA, 25 bp, Saccharomyces pastorianus
aatctgaggtcctagaggcagtgac

SEQ ID NO: 90303 - DNA, 25 bp, Saccharomyces pastorianus
gacactttgaggttgctaatttgct

SEQ ID NO: 90304 - DNA, 25 bp, Saccharomyces pastorianus
gcctacttgttattatcagaattgg

SEQ ID NO: 90305 - DNA, 25 bp, Saccharomyces pastorianus
tgaagcatccataagtaaagacact

SEQ ID NO: 90306 - DNA, 25 bp, Saccharomyces pastorianus
atcactccagcctacttgttattat

SEQ ID NO: 90307 - DNA, 25 bp, Saccharomyces pastorianus
gtaaagacactttgaggttgctaat

SEQ ID NO: 90308 - DNA, 25 bp, Saccharomyces pastorianus
aacagtgccatatatcactccagcc

SEQ ID NO: 90309 - DNA, 25 bp, Saccharomyces pastorianus
atatatcactccagcctacttgtta

SEQ ID NO: 90310 - DNA, 25 bp, Saccharomyces pastorianus
aacagatgatgattgaagcatccat

SEQ ID NO: 90311 - DNA, 25 bp, Saccharomyces pastorianus
actccagcctacttgttattatcag

SEQ ID NO: 90312 - DNA, 25 bp, Saccharomyces pastorianus
gaggttgctaatttgctttttcgaa

SEQ ID NO: 90313 - DNA, 25 bp, Saccharomyces pastorianus
tgctttttcgaaataaaacagtgcc

SEQ ID NO: 90314 - DNA, 25 bp, Saccharomyces pastorianus
acagcacattggttgacttatacga

SEQ ID NO: 90315 - DNA, 25 bp, Saccharomyces pastorianus
gcatttaaatcgtgaagccctaggg

SEQ ID NO: 90316 - DNA, 25 bp, Saccharomyces pastorianus
ggatgtgccactcttatttgaagga

SEQ ID NO: 90317 - DNA, 25 bp, Saccharomyces pastorianus
gccgtaagtgccagtagcatcgtca

SEQ ID NO: 90318 - DNA, 25 bp, Saccharomyces pastorianus
atatgcggagtgactgtaagcgtaa

SEQ ID NO: 90319 - DNA, 25 bp, Saccharomyces pastorianus
atgtgtgtattggatgtgccactct

SEQ ID NO: 90320 - DNA, 25 bp, Saccharomyces pastorianus
aattggctactattacttgaaggga

SEQ ID NO: 90321 - DNA, 25 bp, Saccharomyces pastorianus
agcatcgtcatgtccagattactga

SEQ ID NO: 90322 - DNA, 25 bp, Saccharomyces pastorianus
ggtcgaaccaggacagaatgcttat

SEQ ID NO: 90323 - DNA, 25 bp, Saccharomyces pastorianus
gggataacacatcctgcaatcaggt

SEQ ID NO: 90324 - DNA, 25 bp, Saccharomyces pastorianus
gattgctagacaagtggtcgaacca

SEQ ID NO: 90325 - DNA, 25 bp, Saccharomyces pastorianus
gcttgtagtatttttcttctttcga

SEQ ID NO: 90326 - DNA, 25 bp, Saccharomyces pastorianus
tggcaattgcttaacggccgtcgca

SEQ ID NO: 90327 - DNA, 25 bp, Saccharomyces pastorianus
tactaactcttgttttcttgccttc

SEQ ID NO: 90328 - DNA, 25 bp, Saccharomyces pastorianus
gactcctagttcttcagtgcttatt

SEQ ID NO: 90329 - DNA, 25 bp, Saccharomyces pastorianus
agagcattcccttactaactcttgt

SEQ ID NO: 90330 - DNA, 25 bp, Saccharomyces pastorianus
ggccgtcgcaactaaaccgaatgaa

SEQ ID NO: 90331 - DNA, 25 bp, Saccharomyces pastorianus
attaatgtatcttcggtatcctttt

SEQ ID NO: 90332 - DNA, 25 bp, Saccharomyces pastorianus
ggacaagccctgtttttgctttgta

SEQ ID NO: 90333 - DNA, 25 bp, Saccharomyces pastorianus
ggtttttctcatttctacaggacaa

SEQ ID NO: 90334 - DNA, 25 bp, Saccharomyces pastorianus
tcttctttcgagttattgtggcaat

SEQ ID NO: 90335 - DNA, 25 bp, Saccharomyces pastorianus
tactttagcgttattgtcattgtta

SEQ ID NO: 90336 - DNA, 25 bp, Saccharomyces pastorianus
agcacggctttacaaaaaactctat

SEQ ID NO: 90337 - DNA, 25 bp, Saccharomyces pastorianus
ctttgactactgagctgtccttaga

SEQ ID NO: 90338 - DNA, 25 bp, Saccharomyces pastorianus
gcatttactgaaactgagcacggct

SEQ ID NO: 90339 - DNA, 25 bp, Saccharomyces pastorianus
gaattaagagagctgaaccttcaaa

SEQ ID NO: 90340 - DNA, 25 bp, Saccharomyces pastorianus
atgatgcgctactcaaagaatcgga

SEQ ID NO: 90341 - DNA, 25 bp, Saccharomyces pastorianus
aatagttgccatttcattcggttta

SEQ ID NO: 90342 - DNA, 25 bp, Saccharomyces pastorianus
tcaacaattcagcaggtacaagcat

SEQ ID NO: 90343 - DNA, 25 bp, Saccharomyces pastorianus
gctacaggagctcgaaagtgaatta

SEQ ID NO: 90344 - DNA, 25 bp, Saccharomyces pastorianus
gggaatgctctttggaatagttgcc

SEQ ID NO: 90345 - DNA, 25 bp, Saccharomyces pastorianus
aaatctgcatgtagcttgaaggaaa

SEQ ID NO: 90346 - DNA, 25 bp, Saccharomyces pastorianus
gaagaactaggagtcgtcgaaggca

SEQ ID NO: 90347 - DNA, 25 bp, Saccharomyces pastorianus
gaatagtccagacatgggtcaagaa

SEQ ID NO: 90348 - DNA, 25 bp, Saccharomyces pastorianus
atggatgacgatgatgctctgaata

SEQ ID NO: 90349 - DNA, 25 bp, Saccharomyces pastorianus
aaccactggttaggactctgggcga

SEQ ID NO: 90350 - DNA, 25 bp, Saccharomyces pastorianus
ccttgcgttggagggaacagtttca

SEQ ID NO: 90351 - DNA, 25 bp, Saccharomyces pastorianus
tttccgtttagttcccgaatatgat

SEQ ID NO: 90352 - DNA, 25 bp, Saccharomyces pastorianus
tgaaggattctgtggagtctttaaa

SEQ ID NO: 90353 - DNA, 25 bp, Saccharomyces pastorianus
agggaactcgatactttgcagcaaa

SEQ ID NO: 90354 - DNA, 25 bp, Saccharomyces pastorianus
atacgaaggcagagacgcggacgac

SEQ ID NO: 90355 - DNA, 25 bp, Saccharomyces pastorianus
cacgaaccttgcatcgacaatgttg

SEQ ID NO: 90356 - DNA, 25 bp, Saccharomyces pastorianus
ggactctgggcgataagttacgtaa

SEQ ID NO: 90357 - DNA, 25 bp, Saccharomyces pastorianus
ctttggaacagagcgtccttgcgtt

SEQ ID NO: 90358 - DNA, 25 bp, Saccharomyces pastorianus
gatttcttcgatgagccaggagcat

SEQ ID NO: 90359 - DNA, 25 bp, Saccharomyces pastorianus
aattgcggtttgacgatttcttcga

SEQ ID NO: 90360 - DNA, 25 bp, Saccharomyces pastorianus
actctctagcatctctaggcattta

SEQ ID NO: 90361 - DNA, 25 bp, Saccharomyces pastorianus
attggccttgtcttgtgataacacc

SEQ ID NO: 90362 - DNA, 25 bp, Saccharomyces pastorianus
tgataacaccctttaccgtcggaga

SEQ ID NO: 90363 - DNA, 25 bp, Saccharomyces pastorianus
aacactcatattgcttttcgagcac

SEQ ID NO: 90364 - DNA, 25 bp, Saccharomyces pastorianus
taccgtcggagagtcgttttgtttg

SEQ ID NO: 90365 - DNA, 25 bp, Saccharomyces pastorianus
gagcattcttttacggcatccttaa

SEQ ID NO: 90366 - DNA, 25 bp, Saccharomyces pastorianus
tttgaatatttggtcactctctagc

SEQ ID NO: 90367 - DNA, 25 bp, Saccharomyces pastorianus
gttgtcgtatttatcttctgcacca

SEQ ID NO: 90368 - DNA, 25 bp, Saccharomyces pastorianus
ttgttactttcgttgggaataccat

SEQ ID NO: 90369 - DNA, 25 bp, Saccharomyces pastorianus
ttctggcttggcatataccgctgat

SEQ ID NO: 90370 - DNA, 25 bp, Saccharomyces pastorianus
gcgaatagacagacgcctttctgct

SEQ ID NO: 90371 - DNA, 25 bp, Saccharomyces pastorianus
gtctcaaggtacaaggtcccgtact

SEQ ID NO: 90372 - DNA, 25 bp, Saccharomyces pastorianus
gctacttcgccggatttcgctaaat

SEQ ID NO: 90373 - DNA, 25 bp, Saccharomyces pastorianus
aattctcttggcgaatcctcaactt

SEQ ID NO: 90374 - DNA, 25 bp, Saccharomyces pastorianus
agaccgcactgtttcaactgtgaaa

SEQ ID NO: 90375 - DNA, 25 bp, Saccharomyces pastorianus
ggactgtcactatgacgcgttcaaa

SEQ ID NO: 90376 - DNA, 25 bp, Saccharomyces pastorianus
gtctccatctttgaaggcttcttct

SEQ ID NO: 90377 - DNA, 25 bp, Saccharomyces pastorianus
gaataatgctacttcctcaacgtct

SEQ ID NO: 90378 - DNA, 25 bp, Saccharomyces pastorianus
gtaccgaggaaagaccgcactgttt

SEQ ID NO: 90379 - DNA, 25 bp, Saccharomyces pastorianus
ataccgctgattatcctaacgctac

SEQ ID NO: 90380 - DNA, 25 bp, Saccharomyces pastorianus
aataaccttgttgtggtggaccttg

SEQ ID NO: 90381 - DNA, 25 bp, Saccharomyces pastorianus
ggtagtaaccttgttgttggctcat

SEQ ID NO: 90382 - DNA, 25 bp, Saccharomyces pastorianus
tccaacgtaacgatcccatcatatt

SEQ ID NO: 90383 - DNA, 25 bp, Saccharomyces pastorianus
gacatagactggttgctgctgagga

SEQ ID NO: 90384 - DNA, 25 bp, Saccharomyces pastorianus
acgaatcagttatcgcataccaatt

SEQ ID NO: 90385 - DNA, 25 bp, Saccharomyces pastorianus
aaacaactgtccaagcagctttcct

SEQ ID NO: 90386 - DNA, 25 bp, Saccharomyces pastorianus
tgcggtggaccttgttgataataac

SEQ ID NO: 90387 - DNA, 25 bp, Saccharomyces pastorianus
gtaattatatagtctttcgcagcat

SEQ ID NO: 90388 - DNA, 25 bp, Saccharomyces pastorianus
ctcctttggttgaccttgttggaca

SEQ ID NO: 90389 - DNA, 25 bp, Saccharomyces pastorianus
gaggataaccctgttgcggtggacc

SEQ ID NO: 90390 - DNA, 25 bp, Saccharomyces pastorianus
gatggtcaattcttgttccaacgta

SEQ ID NO: 90391 - DNA, 25 bp, Saccharomyces pastorianus
ggtcaaccaaaggaggaaagctgct

SEQ ID NO: 90392 - DNA, 25 bp, Saccharomyces pastorianus
gaaagctgcttggacagttgtttaa

SEQ ID NO: 90393 - DNA, 25 bp, Saccharomyces pastorianus
acaaggttattatcaacaaggtcca

SEQ ID NO: 90394 - DNA, 25 bp, Saccharomyces pastorianus
aggacccccacagcaaggttattat

SEQ ID NO: 90395 - DNA, 25 bp, Saccharomyces pastorianus
caaggtccaccgcaacagggttatc

SEQ ID NO: 90396 - DNA, 25 bp, Saccharomyces pastorianus
gcaacagggttatcctcagcagcaa

SEQ ID NO: 90397 - DNA, 25 bp, Saccharomyces pastorianus
gtctatgtccaacaaggtcaaccaa

SEQ ID NO: 90398 - DNA, 25 bp, Saccharomyces pastorianus
tccaccacaacaaggttattatcaa

SEQ ID NO: 90399 - DNA, 25 bp, Saccharomyces pastorianus
tcctcagcagcaaccagtctatgtc

SEQ ID NO: 90400 - DNA, 25 bp, Saccharomyces pastorianus
gcaaggttattatcaacaaggtcca

SEQ ID NO: 90401 - DNA, 25 bp, Saccharomyces pastorianus
ttatcctcagcagcaaccagtctat

SEQ ID NO: 90402 - DNA, 25 bp, Saccharomyces pastorianus
acagagccattgttaaatgccttag

SEQ ID NO: 90403 - DNA, 25 bp, Saccharomyces pastorianus
ggtaaatctcagatgaagcttctcg

SEQ ID NO: 90404 - DNA, 25 bp, Saccharomyces pastorianus
taccaatacctattaccttcgggtg

SEQ ID NO: 90405 - DNA, 25 bp, Saccharomyces pastorianus
ttcggttatcgttagattctccatc

SEQ ID NO: 90406 - DNA, 25 bp, Saccharomyces pastorianus
atttgcttttgcatgtttgagcgca

SEQ ID NO: 90407 - DNA, 25 bp, Saccharomyces pastorianus
atgccttagattctttagtacccag

SEQ ID NO: 90408 - DNA, 25 bp, Saccharomyces pastorianus
tagtacccagaataggatcagaatt

SEQ ID NO: 90409 - DNA, 25 bp, Saccharomyces pastorianus
agatctgagttggacagttttgtca

SEQ ID NO: 90410 - DNA, 25 bp, Saccharomyces pastorianus
tttgagcgcaggtagaatgcttaca

SEQ ID NO: 90411 - DNA, 25 bp, Saccharomyces pastorianus
acgaggacactggttttcacgatga

SEQ ID NO: 90412 - DNA, 25 bp, Saccharomyces pastorianus
tacacaattcttacgcggatctaat

SEQ ID NO: 90413 - DNA, 25 bp, Saccharomyces pastorianus
gcacctacccagtatttaaccagtt

SEQ ID NO: 90414 - DNA, 25 bp, Saccharomyces pastorianus
acatcttccaacacagtcttcatat

SEQ ID NO: 90415 - DNA, 25 bp, Saccharomyces pastorianus
attattcattttatagccgggtaag

SEQ ID NO: 90416 - DNA, 25 bp, Saccharomyces pastorianus
tgttttgacccaaacaactgtttat

SEQ ID NO: 90417 - DNA, 25 bp, Saccharomyces pastorianus
aatgcagtgtggaagcctctgcttc

SEQ ID NO: 90418 - DNA, 25 bp, Saccharomyces pastorianus
attcctggtgctgtcttcttagaaa

SEQ ID NO: 90419 - DNA, 25 bp, Saccharomyces pastorianus
tctgcttctaccataacatcttcca

SEQ ID NO: 90420 - DNA, 25 bp, Saccharomyces pastorianus
tataaacgtttgtgcacctacccag

SEQ ID NO: 90421 - DNA, 25 bp, Saccharomyces pastorianus
aggcattggcaatacccgttttgtt

SEQ ID NO: 90422 - DNA, 25 bp, Saccharomyces pastorianus
aactgtttatcattattcctggtgc

SEQ ID NO: 90423 - DNA, 25 bp, Saccharomyces pastorianus
taaccagttgggaggagctaacaat

SEQ ID NO: 90424 - DNA, 25 bp, Saccharomyces pastorianus
tactcctcgagatcatgataacgtc

SEQ ID NO: 90425 - DNA, 25 bp, Saccharomyces pastorianus
cattaactgatgttcctgtcgttta

SEQ ID NO: 90426 - DNA, 25 bp, Saccharomyces pastorianus
ctgtcgtttatctggacgctgttca

SEQ ID NO: 90427 - DNA, 25 bp, Saccharomyces pastorianus
cttttgccgaataaagcagccagta

SEQ ID NO: 90428 - DNA, 25 bp, Saccharomyces pastorianus
gtgacgaattcgtttcctcagacaa

SEQ ID NO: 90429 - DNA, 25 bp, Saccharomyces pastorianus
tttgacaaacaaatctcgacgagtg

SEQ ID NO: 90430 - DNA, 25 bp, Saccharomyces pastorianus
aactactctgttttagcaattgaat

SEQ ID NO: 90431 - DNA, 25 bp, Saccharomyces pastorianus
gacatgtttttgtgcccagaggtaa

SEQ ID NO: 90432 - DNA, 25 bp, Saccharomyces pastorianus
acgctgttcaaggtcttttgccgaa

SEQ ID NO: 90433 - DNA, 25 bp, Saccharomyces pastorianus
ggaatttcctatgttttcaaagcga

SEQ ID NO: 90434 - DNA, 25 bp, Saccharomyces pastorianus
gttaccaagcatggtcaggtcgtta

SEQ ID NO: 90435 - DNA, 25 bp, Saccharomyces pastorianus
atttgcaagagcgtttccatgccgc

SEQ ID NO: 90436 - DNA, 25 bp, Saccharomyces pastorianus
acgtcaccggtgaagctttagttca

SEQ ID NO: 90437 - DNA, 25 bp, Saccharomyces pastorianus
gagattagctgcttaccatgctcaa

SEQ ID NO: 90438 - DNA, 25 bp, Saccharomyces pastorianus
caaaaagaccggtatctgggctggt

SEQ ID NO: 90439 - DNA, 25 bp, Saccharomyces pastorianus
gaatgggttcatcttggacggtttc

SEQ ID NO: 90440 - DNA, 25 bp, Saccharomyces pastorianus
tgggctggtgttgatgcttcccaac

SEQ ID NO: 90441 - DNA, 25 bp, Saccharomyces pastorianus
cacttggccactggtgacatgttga

SEQ ID NO: 90442 - DNA, 25 bp, Saccharomyces pastorianus
gatgacaatgcagacgccttgaaga

SEQ ID NO: 90443 - DNA, 25 bp, Saccharomyces pastorianus
gatctcaaatcgcaaagggcactca

SEQ ID NO: 90444 - DNA, 25 bp, Saccharomyces pastorianus
ggtagattaattcacccagcctctg

SEQ ID NO: 90445 - DNA, 25 bp, Saccharomyces pastorianus
accaaggtggtttagtctctgatga

SEQ ID NO: 90446 - DNA, 25 bp, Saccharomyces pastorianus
tttgtctctttagcctacattgctc

SEQ ID NO: 90447 - DNA, 25 bp, Saccharomyces pastorianus
tggagcattggtttttcctttttcg

SEQ ID NO: 90448 - DNA, 25 bp, Saccharomyces pastorianus
acggtttcctttgccaattgtgcga

SEQ ID NO: 90449 - DNA, 25 bp, Saccharomyces pastorianus
ttaaaaggccctgcttctaccttct

SEQ ID NO: 90450 - DNA, 25 bp, Saccharomyces pastorianus
cctggttcttttcaccagaacttgt

SEQ ID NO: 90451 - DNA, 25 bp, Saccharomyces pastorianus
gcgatctggaaacttttttgtctct

SEQ ID NO: 90452 - DNA, 25 bp, Saccharomyces pastorianus
cattgccccggcagagatgggtcat

SEQ ID NO: 90453 - DNA, 25 bp, Saccharomyces pastorianus
gaggcctgagataaattctggttac

SEQ ID NO: 90454 - DNA, 25 bp, Saccharomyces pastorianus
gactctgcttttcatttttggcggc

SEQ ID NO: 90455 - DNA, 25 bp, Saccharomyces pastorianus
gaacttgtaccatttcttctcagag

SEQ ID NO: 90456 - DNA, 25 bp, Saccharomyces pastorianus
tactttgttcaaactgactctgctt

SEQ ID NO: 90457 - DNA, 25 bp, Saccharomyces pastorianus
agaagctgacttcaatcccgtgctt

SEQ ID NO: 90458 - DNA, 25 bp, Saccharomyces pastorianus
gtaaccagaatttatctcaggcctc

SEQ ID NO: 90459 - DNA, 25 bp, Saccharomyces pastorianus
gacttgtccaattctcagttggcca

SEQ ID NO: 90460 - DNA, 25 bp, Saccharomyces pastorianus
tgatcgcgtgctgacaaattactcg

SEQ ID NO: 90461 - DNA, 25 bp, Saccharomyces pastorianus
aattgggcgatgagctccctgatac

SEQ ID NO: 90462 - DNA, 25 bp, Saccharomyces pastorianus
aagtttgccgatgacttgtccaatt

SEQ ID NO: 90463 - DNA, 25 bp, Saccharomyces pastorianus
ctgatactgggctcgattgtcggat

SEQ ID NO: 90464 - DNA, 25 bp, Saccharomyces pastorianus
aatgctccataatgtccctcatgac

SEQ ID NO: 90465 - DNA, 25 bp, Saccharomyces pastorianus
taagagcccgactaaggccacgaat

SEQ ID NO: 90466 - DNA, 25 bp, Saccharomyces pastorianus
ttccagcatgttcttgatgggatct

SEQ ID NO: 90467 - DNA, 25 bp, Saccharomyces pastorianus
ttagaagacactccacccaagtttg

SEQ ID NO: 90468 - DNA, 25 bp, Saccharomyces pastorianus
aagaccgctgttgccttatttctac

SEQ ID NO: 90469 - DNA, 25 bp, Saccharomyces pastorianus
agactgtattcgctcaagtccctaa

SEQ ID NO: 90470 - DNA, 25 bp, Saccharomyces pastorianus
gcactactaagttggccgctgatgt

SEQ ID NO: 90471 - DNA, 25 bp, Saccharomyces pastorianus
agttatctaccattcctacaagcat

SEQ ID NO: 90472 - DNA, 25 bp, Saccharomyces pastorianus
actacacaaattcttctcctggttc

SEQ ID NO: 90473 - DNA, 25 bp, Saccharomyces pastorianus
ggaccatcgtctttgttggtgacat

SEQ ID NO: 90474 - DNA, 25 bp, Saccharomyces pastorianus
tgggcccaatttccaacttggtcaa

SEQ ID NO: 90475 - DNA, 25 bp, Saccharomyces pastorianus
tgatgctactgtcgctcaaggtgta

SEQ ID NO: 90476 - DNA, 25 bp, Saccharomyces pastorianus
gaatgtccaaatatcgccggcttta

SEQ ID NO: 90477 - DNA, 25 bp, Saccharomyces pastorianus
acatttttaccttcactttgccagt

SEQ ID NO: 90478 - DNA, 25 bp, Saccharomyces pastorianus
aaggcttacacatcttcagctcaag

SEQ ID NO: 90479 - DNA, 25 bp, Saccharomyces pastorianus
gctagtgttagcaggtactttctta

SEQ ID NO: 90480 - DNA, 25 bp, Saccharomyces pastorianus
ggtttactttgggtttgctcacatt

SEQ ID NO: 90481 - DNA, 25 bp, Saccharomyces pastorianus
gggccaaggtcaagttcaatatttt

SEQ ID NO: 90482 - DNA, 25 bp, Saccharomyces pastorianus
agacccgaattgaactacactacta

SEQ ID NO: 90483 - DNA, 25 bp, Saccharomyces pastorianus
acttcctatggtactttcagttggg

SEQ ID NO: 90484 - DNA, 25 bp, Saccharomyces pastorianus
attaggactgcgcagactgtccttg

SEQ ID NO: 90485 - DNA, 25 bp, Saccharomyces pastorianus
ttgtatgtggatttggccgcggatc

SEQ ID NO: 90486 - DNA, 25 bp, Saccharomyces pastorianus
ttgggtattcccactgccaatgtac

SEQ ID NO: 90487 - DNA, 25 bp, Saccharomyces pastorianus
atgatttgtccgtacttcctatggt

SEQ ID NO: 90488 - DNA, 25 bp, Saccharomyces pastorianus
ggatccgccgaattgggtattccca

SEQ ID NO: 90489 - DNA, 25 bp, Saccharomyces pastorianus
aagtcgatttgccaatacctgcgca

SEQ ID NO: 90490 - DNA, 25 bp, Saccharomyces pastorianus
gaaatcgtcctaccaagaatcagag

SEQ ID NO: 90491 - DNA, 25 bp, Saccharomyces pastorianus
atcaccgctgcgttacaattacaac

SEQ ID NO: 90492 - DNA, 25 bp, Saccharomyces pastorianus
aattattcacataacgctgcggtgg

SEQ ID NO: 90493 - DNA, 25 bp, Saccharomyces pastorianus
ttggtgggattagtttcggcctgac

SEQ ID NO: 90494 - DNA, 25 bp, Saccharomyces pastorianus
taaacctcatccaattttctccaaa

SEQ ID NO: 90495 - DNA, 25 bp, Saccharomyces pastorianus
aaattcttccctgaaatcgatgcaa

SEQ ID NO: 90496 - DNA, 25 bp, Saccharomyces pastorianus
aaatcagctattggctatcaccgct

SEQ ID NO: 90497 - DNA, 25 bp, Saccharomyces pastorianus
aactacctgacattcatcctatcaa

SEQ ID NO: 90498 - DNA, 25 bp, Saccharomyces pastorianus
gattaccaggcgagaactttgttga

SEQ ID NO: 90499 - DNA, 25 bp, Saccharomyces pastorianus
tcggcctgacggctgaagatatcaa

SEQ ID NO: 90500 - DNA, 25 bp, Saccharomyces pastorianus
gatgcaaaccaggactcatggccta

SEQ ID NO: 90501 - DNA, 25 bp, Saccharomyces pastorianus
cggttctgttgattccgtgtcaaga

SEQ ID NO: 90502 - DNA, 25 bp, Saccharomyces pastorianus
agaacaagccgaagactacctcaag

SEQ ID NO: 90503 - DNA, 25 bp, Saccharomyces pastorianus
aaaagcttcctacacatatctctct

SEQ ID NO: 90504 - DNA, 25 bp, Saccharomyces pastorianus
agatggaaccgctacagggctgaaa

SEQ ID NO: 90505 - DNA, 25 bp, Saccharomyces pastorianus
tacctcaaggacatacccggtgatg

SEQ ID NO: 90506 - DNA, 25 bp, Saccharomyces pastorianus
atataatggcgcctttacgagaaaa

SEQ ID NO: 90507 - DNA, 25 bp, Saccharomyces pastorianus
taatatatcgcgtcagggctctgtc

SEQ ID NO: 90508 - DNA, 25 bp, Saccharomyces pastorianus
agatctaacacggtagtcagctact

SEQ ID NO: 90509 - DNA, 25 bp, Saccharomyces pastorianus
acgaactctgatgtggtagacctca

SEQ ID NO: 90510 - DNA, 25 bp, Saccharomyces pastorianus
ctattctctgggacatggcttgcgt

SEQ ID NO: 90511 - DNA, 25 bp, Saccharomyces pastorianus
gtagacctcagctattctctgggac

SEQ ID NO: 90512 - DNA, 25 bp, Saccharomyces pastorianus
agtaccatccgcgttattagtattg

SEQ ID NO: 90513 - DNA, 25 bp, Saccharomyces pastorianus
gagacacgctgttaataagccatca

SEQ ID NO: 90514 - DNA, 25 bp, Saccharomyces pastorianus
aagacctttatcgaattcgccctct

SEQ ID NO: 90515 - DNA, 25 bp, Saccharomyces pastorianus
gcattggtaccataaaagcttctat

SEQ ID NO: 90516 - DNA, 25 bp, Saccharomyces pastorianus
tgaattcttccaatcgtcattccgg

SEQ ID NO: 90517 - DNA, 25 bp, Saccharomyces pastorianus
aaaccgggttttatgacgcaggatg

SEQ ID NO: 90518 - DNA, 25 bp, Saccharomyces pastorianus
tcaaattcaatttcctcttcccaaa

SEQ ID NO: 90519 - DNA, 25 bp, Saccharomyces pastorianus
gaataatcttcacgagtcacaaatg

SEQ ID NO: 90520 - DNA, 25 bp, Saccharomyces pastorianus
agcaggtgcaacttcatatcaaaca

SEQ ID NO: 90521 - DNA, 25 bp, Saccharomyces pastorianus
gagatcaatttccacgacaacaaag

SEQ ID NO: 90522 - DNA, 25 bp, Saccharomyces pastorianus
attacactatttttgctcaggcgcc

SEQ ID NO: 90523 - DNA, 25 bp, Saccharomyces pastorianus
gcgcgctgaaaattctagctcaaat

SEQ ID NO: 90524 - DNA, 25 bp, Saccharomyces pastorianus
ggaaactgtttctcaacgtcaaact

SEQ ID NO: 90525 - DNA, 25 bp, Saccharomyces pastorianus
gcgatgcgcgctgaaaattctagct

SEQ ID NO: 90526 - DNA, 25 bp, Saccharomyces pastorianus
aatgttttctacactgcgatgcgcg

SEQ ID NO: 90527 - DNA, 25 bp, Saccharomyces pastorianus
atatcatctgtttattagcattcgt

SEQ ID NO: 90528 - DNA, 25 bp, Saccharomyces pastorianus
ggttacaacaaatcagtagcaatca

SEQ ID NO: 90529 - DNA, 25 bp, Saccharomyces pastorianus
aacgtcaaacttctactatagtata

SEQ ID NO: 90530 - DNA, 25 bp, Saccharomyces pastorianus
gtttattagcattcgtgttagtagt

SEQ ID NO: 90531 - DNA, 25 bp, Saccharomyces pastorianus
ttagtcgaagggaaactgtttctca

SEQ ID NO: 90532 - DNA, 25 bp, Saccharomyces pastorianus
tctacactgcgatgcgcgctgaaaa

SEQ ID NO: 90533 - DNA, 25 bp, Saccharomyces pastorianus
gtttctcaacgtcaaacttctacta

SEQ ID NO: 90534 - DNA, 25 bp, Saccharomyces pastorianus
taggcctggtgacatgctaaagaca

SEQ ID NO: 90535 - DNA, 25 bp, Saccharomyces pastorianus
ttcccatcattatctatacctgtag

SEQ ID NO: 90536 - DNA, 25 bp, Saccharomyces pastorianus
gttatcatatctcctacaacgctga

SEQ ID NO: 90537 - DNA, 25 bp, Saccharomyces pastorianus
gttagcccgactttcaatgacaatg

SEQ ID NO: 90538 - DNA, 25 bp, Saccharomyces pastorianus
gatgggtttccaataggcctacaag

SEQ ID NO: 90539 - DNA, 25 bp, Saccharomyces pastorianus
tattacctttctttcccggaatcag

SEQ ID NO: 90540 - DNA, 25 bp, Saccharomyces pastorianus
gaaatttccggagaaccactcctag

SEQ ID NO: 90541 - DNA, 25 bp, Saccharomyces pastorianus
atgggagccttccagtgaactgagc

SEQ ID NO: 90542 - DNA, 25 bp, Saccharomyces pastorianus
ggcctacaagtagttagcccgactt

SEQ ID NO: 90543 - DNA, 25 bp, Saccharomyces pastorianus
aacgctgatgccatttaggcctggt

SEQ ID NO: 90544 - DNA, 25 bp, Saccharomyces pastorianus
taatggataccacttctgcgctcaa

SEQ ID NO: 90545 - DNA, 25 bp, Saccharomyces pastorianus
ggtagtcaatttccagatttccaaa

SEQ ID NO: 90546 - DNA, 25 bp, Saccharomyces pastorianus
tggtagaacaggtcgtgcagcaaat

SEQ ID NO: 90547 - DNA, 25 bp, Saccharomyces pastorianus
gaaacatgatcccttgaatagcaat

SEQ ID NO: 90548 - DNA, 25 bp, Saccharomyces pastorianus
gatatccctaatgtttccttggtag

SEQ ID NO: 90549 - DNA, 25 bp, Saccharomyces pastorianus
aggtgacgattttacatggttctaa

SEQ ID NO: 90550 - DNA, 25 bp, Saccharomyces pastorianus
aaagcctgtttatgcaaccattggg

SEQ ID NO: 90551 - DNA, 25 bp, Saccharomyces pastorianus
tgtctcctttgttagtgccgctgaa

SEQ ID NO: 90552 - DNA, 25 bp, Saccharomyces pastorianus
aaatgagggcactgctgtctccttt

SEQ ID NO: 90553 - DNA, 25 bp, Saccharomyces pastorianus
gggttctgaacctttgattcaacag

SEQ ID NO: 90554 - DNA, 25 bp, Saccharomyces pastorianus
agcaatatcttttccgaagccgtaa

SEQ ID NO: 90555 - DNA, 25 bp, Saccharomyces pastorianus
aattgtcgctaaatatgatccacca

SEQ ID NO: 90556 - DNA, 25 bp, Saccharomyces pastorianus
gaaagtgcgttgagggtgaatccca

SEQ ID NO: 90557 - DNA, 25 bp, Saccharomyces pastorianus
gggtgaatcccaatgacgaactcat

SEQ ID NO: 90558 - DNA, 25 bp, Saccharomyces pastorianus
tagggcactacaactaaaaccttct

SEQ ID NO: 90559 - DNA, 25 bp, Saccharomyces pastorianus
agatcctgaaatacaactatgcttg

SEQ ID NO: 90560 - DNA, 25 bp, Saccharomyces pastorianus
ggcttcactggccaattccaataga

SEQ ID NO: 90561 - DNA, 25 bp, Saccharomyces pastorianus
aactatgcttgggtctcttatttta

SEQ ID NO: 90562 - DNA, 25 bp, Saccharomyces pastorianus
aatctggcggtatcatccatgaata

SEQ ID NO: 90563 - DNA, 25 bp, Saccharomyces pastorianus
gttggatctctcttgaatacgtaca

SEQ ID NO: 90564 - DNA, 25 bp, Saccharomyces pastorianus
gaagcaatccaagcctatcataggg

SEQ ID NO: 90565 - DNA, 25 bp, Saccharomyces pastorianus
ttagagctcgctataatctggcggt

SEQ ID NO: 90566 - DNA, 25 bp, Saccharomyces pastorianus
aagcagcaggctacttattaagtgt

SEQ ID NO: 90567 - DNA, 25 bp, Saccharomyces pastorianus
agcgaatggtctaagctgcttctag

SEQ ID NO: 90568 - DNA, 25 bp, Saccharomyces pastorianus
gtgggaccccgttctgtatgaacaa

SEQ ID NO: 90569 - DNA, 25 bp, Saccharomyces pastorianus
ttctggtggttggacctggatacta

SEQ ID NO: 90570 - DNA, 25 bp, Saccharomyces pastorianus
gcttctagatatgtggtgggacccc

SEQ ID NO: 90571 - DNA, 25 bp, Saccharomyces pastorianus
cataccctatgtcgattattcagag

SEQ ID NO: 90572 - DNA, 25 bp, Saccharomyces pastorianus
gacaggttggaaactctggctgaca

SEQ ID NO: 90573 - DNA, 25 bp, Saccharomyces pastorianus
attcccaccgggagcatgctctgaa

SEQ ID NO: 90574 - DNA, 25 bp, Saccharomyces pastorianus
ggaggcttcaatttgggctcatttt

SEQ ID NO: 90575 - DNA, 25 bp, Saccharomyces pastorianus
aacctaagagacgacataccctatg

SEQ ID NO: 90576 - DNA, 25 bp, Saccharomyces pastorianus
gagacagacgttcagggagtttcct

SEQ ID NO: 90577 - DNA, 25 bp, Saccharomyces pastorianus
gcgagatgcagtactacaccacttt

SEQ ID NO: 90578 - DNA, 25 bp, Saccharomyces pastorianus
tgagtacggaaacaccagttcggga

SEQ ID NO: 90579 - DNA, 25 bp, Saccharomyces pastorianus
tatatcgtcatcttgcttccttttt

SEQ ID NO: 90580 - DNA, 25 bp, Saccharomyces pastorianus
gcagctttcggcacgtgagtacgga

SEQ ID NO: 90581 - DNA, 25 bp, Saccharomyces pastorianus
aatgcactattacgcagctttcggc

SEQ ID NO: 90582 - DNA, 25 bp, Saccharomyces pastorianus
tcatcttgcttcctttttcttactc

SEQ ID NO: 90583 - DNA, 25 bp, Saccharomyces pastorianus
acatcatatcctgccaatgcactat

SEQ ID NO: 90584 - DNA, 25 bp, Saccharomyces pastorianus
gaaacaccatacaatccatcacatc

SEQ ID NO: 90585 - DNA, 25 bp, Saccharomyces pastorianus
ttcctgccctggaaacaccatacaa

SEQ ID NO: 90586 - DNA, 25 bp, Saccharomyces pastorianus
atgcgccgcctatatcgtcatcttg

SEQ ID NO: 90587 - DNA, 25 bp, Saccharomyces pastorianus
tacaatccatcacatcatatcctgc

SEQ ID NO: 90588 - DNA, 25 bp, Saccharomyces pastorianus
tcgggaccgggtacacaatagggat

SEQ ID NO: 90589 - DNA, 25 bp, Saccharomyces pastorianus
ccttttcatgtttgtagatttctgt

SEQ ID NO: 90590 - DNA, 25 bp, Saccharomyces pastorianus
gactttactctaccttttcatgttt

SEQ ID NO: 90591 - DNA, 25 bp, Saccharomyces pastorianus
tctagtctcgagaatggcccacagc

SEQ ID NO: 90592 - DNA, 25 bp, Saccharomyces pastorianus
aaagccacccaagctattattgtac

SEQ ID NO: 90593 - DNA, 25 bp, Saccharomyces pastorianus
gccaatatcacttttcttttctact

SEQ ID NO: 90594 - DNA, 25 bp, Saccharomyces pastorianus
ttcgctatcgtgtatgccaatatca

SEQ ID NO: 90595 - DNA, 25 bp, Saccharomyces pastorianus
aatttcgcgtagagcccattgtgaa

SEQ ID NO: 90596 - DNA, 25 bp, Saccharomyces pastorianus
gaacaacttcgctatcgtgtatgcc

SEQ ID NO: 90597 - DNA, 25 bp, Saccharomyces pastorianus
gggctgcgacaatttcgcgtagagc

SEQ ID NO: 90598 - DNA, 25 bp, Saccharomyces pastorianus
ttctactacttactcgactttactc

SEQ ID NO: 90599 - DNA, 25 bp, Saccharomyces pastorianus
gagcccattgtgaaaaaagccaccc

SEQ ID NO: 90600 - DNA, 25 bp, Saccharomyces pastorianus
cgagtgataaccctgctgctgtaat

SEQ ID NO: 90601 - DNA, 25 bp, Saccharomyces pastorianus
agggtccaccgataacacagcaaaa

SEQ ID NO: 90602 - DNA, 25 bp, Saccharomyces pastorianus
aatattacgcaaccatcaccaattc

SEQ ID NO: 90603 - DNA, 25 bp, Saccharomyces pastorianus
attctgctccgtgcgttaatcaatt

SEQ ID NO: 90604 - DNA, 25 bp, Saccharomyces pastorianus
atcaattgaacagtgactctccgcc

SEQ ID NO: 90605 - DNA, 25 bp, Saccharomyces pastorianus
ctaatataggttacgtcccagggct

SEQ ID NO: 90606 - DNA, 25 bp, Saccharomyces pastorianus
cggtacctcaaaagttcctcagatc

SEQ ID NO: 90607 - DNA, 25 bp, Saccharomyces pastorianus
agtctctatctcaaaacggtacctc

SEQ ID NO: 90608 - DNA, 25 bp, Saccharomyces pastorianus
gaatggtacacaaagccgtctgaat

SEQ ID NO: 90609 - DNA, 25 bp, Saccharomyces pastorianus
tcggaccaactttgctacgagtgat

SEQ ID NO: 90610 - DNA, 25 bp, Saccharomyces pastorianus
tttagatctcaacagggtccaccga

SEQ ID NO: 90611 - DNA, 25 bp, Saccharomyces pastorianus
attagctaagctgcacaagttatca

SEQ ID NO: 90612 - DNA, 25 bp, Saccharomyces pastorianus
gcccctcaatgcaatctcacaatga

SEQ ID NO: 90613 - DNA, 25 bp, Saccharomyces pastorianus
tgcagttgtacagattgcccctcaa

SEQ ID NO: 90614 - DNA, 25 bp, Saccharomyces pastorianus
aatgaacagacggtgctcgaccagc

SEQ ID NO: 90615 - DNA, 25 bp, Saccharomyces pastorianus
gtttggcccataacctagaaaatga

SEQ ID NO: 90616 - DNA, 25 bp, Saccharomyces pastorianus
atgaccattgaaaacgttgccgaag

SEQ ID NO: 90617 - DNA, 25 bp, Saccharomyces pastorianus
gctgaacttcataaactgcatccaa

SEQ ID NO: 90618 - DNA, 25 bp, Saccharomyces pastorianus
tgctcgaccagctgggcgacagatg

SEQ ID NO: 90619 - DNA, 25 bp, Saccharomyces pastorianus
gagcgtagcctctcaattaggtagt

SEQ ID NO: 90620 - DNA, 25 bp, Saccharomyces pastorianus
gagtatttgacaggtttggcccata

SEQ ID NO: 90621 - DNA, 25 bp, Saccharomyces pastorianus
ttaatgggctgtatccgagcgtagc

SEQ ID NO: 90622 - DNA, 25 bp, Saccharomyces pastorianus
gggattacacgaactatgcgataaa

SEQ ID NO: 90623 - DNA, 25 bp, Saccharomyces pastorianus
gggcccatgggaatgttatgctagt

SEQ ID NO: 90624 - DNA, 25 bp, Saccharomyces pastorianus
caaaaagcaccaaggccttactggt

SEQ ID NO: 90625 - DNA, 25 bp, Saccharomyces pastorianus
atgctagtgctaactttgaacggtc

SEQ ID NO: 90626 - DNA, 25 bp, Saccharomyces pastorianus
gatacagttccttagttcctattga

SEQ ID NO: 90627 - DNA, 25 bp, Saccharomyces pastorianus
tcaaaggttcagcaaacggcgtaat

SEQ ID NO: 90628 - DNA, 25 bp, Saccharomyces pastorianus
gaatttaacgaacatgtccacaata

SEQ ID NO: 90629 - DNA, 25 bp, Saccharomyces pastorianus
tgataaagttcctgggtggttggct

SEQ ID NO: 90630 - DNA, 25 bp, Saccharomyces pastorianus
ggtgagccagtgtacatttctagat

SEQ ID NO: 90631 - DNA, 25 bp, Saccharomyces pastorianus
ttgaacggtcaccactacacgacta

SEQ ID NO: 90632 - DNA, 25 bp, Saccharomyces pastorianus
attaggaccttcgagatttgcggag

SEQ ID NO: 90633 - DNA, 25 bp, Saccharomyces pastorianus
gaatccactgaacttcttcgcacag

SEQ ID NO: 90634 - DNA, 25 bp, Saccharomyces pastorianus
tgtagaaggcgcctgtcctcaaata

SEQ ID NO: 90635 - DNA, 25 bp, Saccharomyces pastorianus
acttggcatataacatcggcattca

SEQ ID NO: 90636 - DNA, 25 bp, Saccharomyces pastorianus
tacaggcccgtttgttttcatatgc

SEQ ID NO: 90637 - DNA, 25 bp, Saccharomyces pastorianus
tatggaatgggccagctatccctta

SEQ ID NO: 90638 - DNA, 25 bp, Saccharomyces pastorianus
gtcctcaaatacagcagcgcgttta

SEQ ID NO: 90639 - DNA, 25 bp, Saccharomyces pastorianus
agaaatctctatcgcgttttgggta

SEQ ID NO: 90640 - DNA, 25 bp, Saccharomyces pastorianus
tacccgtaaactgtccatatgcatc

SEQ ID NO: 90641 - DNA, 25 bp, Saccharomyces pastorianus
atgttaacggcaacttcggctcaga

SEQ ID NO: 90642 - DNA, 25 bp, Saccharomyces pastorianus
aaatttttcaatcccgctatcagag

SEQ ID NO: 90643 - DNA, 25 bp, Saccharomyces pastorianus
gctaggtcctaacttccatcaaata

SEQ ID NO: 90644 - DNA, 25 bp, Saccharomyces pastorianus
gcttccacgctgaatatatacgaat

SEQ ID NO: 90645 - DNA, 25 bp, Saccharomyces pastorianus
gagaataaacgcttccacgctgaat

SEQ ID NO: 90646 - DNA, 25 bp, Saccharomyces pastorianus
gatatttgacgatttactagcagaa

SEQ ID NO: 90647 - DNA, 25 bp, Saccharomyces pastorianus
aaatacatcaagaacctcgaacaaa

SEQ ID NO: 90648 - DNA, 25 bp, Saccharomyces pastorianus
gacaacaacattttaatagctcagc

SEQ ID NO: 90649 - DNA, 25 bp, Saccharomyces pastorianus
aaaacagtgctgataccgctaaaaa

SEQ ID NO: 90650 - DNA, 25 bp, Saccharomyces pastorianus
gtgagtatgatgtcttatgtaacga

SEQ ID NO: 90651 - DNA, 25 bp, Saccharomyces pastorianus
aacctgttcctgacaaagacgccca

SEQ ID NO: 90652 - DNA, 25 bp, Saccharomyces pastorianus
aagacgcccaactcataagtagttc

SEQ ID NO: 90653 - DNA, 25 bp, Saccharomyces pastorianus
tgcacctccttcttttcaaaacagt

SEQ ID NO: 90654 - DNA, 25 bp, Saccharomyces pastorianus
gataatgtaaccaaacctgttcctg

SEQ ID NO: 90655 - DNA, 25 bp, Saccharomyces pastorianus
ttaccagcaccacatcacatattat

SEQ ID NO: 90656 - DNA, 25 bp, Saccharomyces pastorianus
ggacaggcgttcgatcattctttaa

SEQ ID NO: 90657 - DNA, 25 bp, Saccharomyces pastorianus
tcaagatatactggcgcttccggac

SEQ ID NO: 90658 - DNA, 25 bp, Saccharomyces pastorianus
gaattctaatgtacgcgagagcgct

SEQ ID NO: 90659 - DNA, 25 bp, Saccharomyces pastorianus
atagcaaccgctactggaactcttt

SEQ ID NO: 90660 - DNA, 25 bp, Saccharomyces pastorianus
agtgacgtttgctggacaggcgttc

SEQ ID NO: 90661 - DNA, 25 bp, Saccharomyces pastorianus
gagagcgctcaaggtaaggcattaa

SEQ ID NO: 90662 - DNA, 25 bp, Saccharomyces pastorianus
ggattcatattttcaataccgccat

SEQ ID NO: 90663 - DNA, 25 bp, Saccharomyces pastorianus
agataatactcgcaccgacgcggag

SEQ ID NO: 90664 - DNA, 25 bp, Saccharomyces pastorianus
aattccaggaacgacggtgccaatg

SEQ ID NO: 90665 - DNA, 25 bp, Saccharomyces pastorianus
gcatcacacaattggcgtacgcaag

SEQ ID NO: 90666 - DNA, 25 bp, Saccharomyces pastorianus
gtcggagaatggtcaggcgctatta

SEQ ID NO: 90667 - DNA, 25 bp, Saccharomyces pastorianus
attaccgtgaccgtgtgagacaatt

SEQ ID NO: 90668 - DNA, 25 bp, Saccharomyces pastorianus
tttgacctggaaagcgagcgtatgc

SEQ ID NO: 90669 - DNA, 25 bp, Saccharomyces pastorianus
tggaagaccgaagacgccgtagaat

SEQ ID NO: 90670 - DNA, 25 bp, Saccharomyces pastorianus
aactttcttttcacccagcagtagt

SEQ ID NO: 90671 - DNA, 25 bp, Saccharomyces pastorianus
gaacaacgtcatcggttttgtcctc

SEQ ID NO: 90672 - DNA, 25 bp, Saccharomyces pastorianus
aaaattctcatcctctttatcagca

SEQ ID NO: 90673 - DNA, 25 bp, Saccharomyces pastorianus
attactgattgtgcaacctggctaa

SEQ ID NO: 90674 - DNA, 25 bp, Saccharomyces pastorianus
gcacagctagccatttattcgtcaa

SEQ ID NO: 90675 - DNA, 25 bp, Saccharomyces pastorianus
tgtttaccaccaacgacaagccagt

SEQ ID NO: 90676 - DNA, 25 bp, Saccharomyces pastorianus
ctaacaacttcgcagctattaccaa

SEQ ID NO: 90677 - DNA, 25 bp, Saccharomyces pastorianus
gggttgcaagtttgatcttcgtcca

SEQ ID NO: 90678 - DNA, 25 bp, Saccharomyces pastorianus
gaaaccacgcacttgttttggcgtt

SEQ ID NO: 90679 - DNA, 25 bp, Saccharomyces pastorianus
atcctaggcgcttcagatctctgtt

SEQ ID NO: 90680 - DNA, 25 bp, Saccharomyces pastorianus
cttcgggctctaaagctttgctcaa

SEQ ID NO: 90681 - DNA, 25 bp, Saccharomyces pastorianus
aggcgaattttgtatcctccttcgg

SEQ ID NO: 90682 - DNA, 25 bp, Saccharomyces pastorianus
gagagtaagtccattggccccgatg

SEQ ID NO: 90683 - DNA, 25 bp, Saccharomyces pastorianus
actccagaaggatttgcgccgtcga

SEQ ID NO: 90684 - DNA, 25 bp, Saccharomyces pastorianus
atgggctttactccaatctatttgg

SEQ ID NO: 90685 - DNA, 25 bp, Saccharomyces pastorianus
ggccccgatgggttatctttcaatg

SEQ ID NO: 90686 - DNA, 25 bp, Saccharomyces pastorianus
atgatactgtactagcgccagtccc

SEQ ID NO: 90687 - DNA, 25 bp, Saccharomyces pastorianus
gatcttcgtccaagcctttcaaata

SEQ ID NO: 90688 - DNA, 25 bp, Saccharomyces pastorianus
gttatgaaatggtaccctgtcctaa

SEQ ID NO: 90689 - DNA, 25 bp, Saccharomyces pastorianus
gcgcgccatgtggacatctattttg

SEQ ID NO: 90690 - DNA, 25 bp, Saccharomyces pastorianus
gatactgaaagtgttgccgcgtttt

SEQ ID NO: 90691 - DNA, 25 bp, Saccharomyces pastorianus
atgccccttgtgcagacaacactgt

SEQ ID NO: 90692 - DNA, 25 bp, Saccharomyces pastorianus
gaaggaatcgcagctgactcatata

SEQ ID NO: 90693 - DNA, 25 bp, Saccharomyces pastorianus
attactaggtcgtctgttggtctac

SEQ ID NO: 90694 - DNA, 25 bp, Saccharomyces pastorianus
gtacacatgaccctcttttatttca

SEQ ID NO: 90695 - DNA, 25 bp, Saccharomyces pastorianus
aagagaggccagaatgccccttgtg

SEQ ID NO: 90696 - DNA, 25 bp, Saccharomyces pastorianus
aacatgagtgatcctagctgcgcgc

SEQ ID NO: 90697 - DNA, 25 bp, Saccharomyces pastorianus
gttggtctacaggagcgttcagaac

SEQ ID NO: 90698 - DNA, 25 bp, Saccharomyces pastorianus
acgctcgggtcctggatttatggga

SEQ ID NO: 90699 - DNA, 25 bp, Saccharomyces pastorianus
agaatcggcggtaacctcgttatcg

SEQ ID NO: 90700 - DNA, 25 bp, Saccharomyces pastorianus
agacccacaggtcataccttgtaca

SEQ ID NO: 90701 - DNA, 25 bp, Saccharomyces pastorianus
tatctcacagtcaaatccacaatcc

SEQ ID NO: 90702 - DNA, 25 bp, Saccharomyces pastorianus
tatcacattttgttacaccctttaa

SEQ ID NO: 90703 - DNA, 25 bp, Saccharomyces pastorianus
caccctttaaagctcgtaactgcgt

SEQ ID NO: 90704 - DNA, 25 bp, Saccharomyces pastorianus
gaatctcttagtatctcacagtcaa

SEQ ID NO: 90705 - DNA, 25 bp, Saccharomyces pastorianus
aggcgctgcatgtcattccatgtac

SEQ ID NO: 90706 - DNA, 25 bp, Saccharomyces pastorianus
gattgtattagtacaggcgctgcat

SEQ ID NO: 90707 - DNA, 25 bp, Saccharomyces pastorianus
taccttgtacactcagtagtccttc

SEQ ID NO: 90708 - DNA, 25 bp, Saccharomyces pastorianus
tcgttatcgtatgtcacctggcact

SEQ ID NO: 90709 - DNA, 25 bp, Saccharomyces pastorianus
ccttccttcgtacttatggctgtaa

SEQ ID NO: 90710 - DNA, 25 bp, Saccharomyces pastorianus
tcggccagtgtcgttctaagttcat

SEQ ID NO: 90711 - DNA, 25 bp, Saccharomyces pastorianus
gccaacgccatcgatatttcactaa

SEQ ID NO: 90712 - DNA, 25 bp, Saccharomyces pastorianus
ttccgattgctatgggtgtgctcat

SEQ ID NO: 90713 - DNA, 25 bp, Saccharomyces pastorianus
gctcccgctttagcactgagtgatc

SEQ ID NO: 90714 - DNA, 25 bp, Saccharomyces pastorianus
aatgctcgccggtttagcgatggca

SEQ ID NO: 90715 - DNA, 25 bp, Saccharomyces pastorianus
gtttgagaggactggccaacgccat

SEQ ID NO: 90716 - DNA, 25 bp, Saccharomyces pastorianus
aagtggactccaccggatattgaat

SEQ ID NO: 90717 - DNA, 25 bp, Saccharomyces pastorianus
tgaatttgttctgggcactttgcta

SEQ ID NO: 90718 - DNA, 25 bp, Saccharomyces pastorianus
gtattgccatttcaacaggtgcgga

SEQ ID NO: 90719 - DNA, 25 bp, Saccharomyces pastorianus
tcaaggcttttttctacgcgggcta

SEQ ID NO: 90720 - DNA, 25 bp, Saccharomyces pastorianus
tgtttacagcgatgtgtcacccaca

SEQ ID NO: 90721 - DNA, 25 bp, Saccharomyces pastorianus
aaaggcgccgctgtgaaagttgttg

SEQ ID NO: 90722 - DNA, 25 bp, Saccharomyces pastorianus
atcgcattcccgtcactgtgaagag

SEQ ID NO: 90723 - DNA, 25 bp, Saccharomyces pastorianus
ggctgttgcagagggccataataca

SEQ ID NO: 90724 - DNA, 25 bp, Saccharomyces pastorianus
gtggtctatttgcagctgacgctaa

SEQ ID NO: 90725 - DNA, 25 bp, Saccharomyces pastorianus
cgacggtggatacaaatctgccttt

SEQ ID NO: 90726 - DNA, 25 bp, Saccharomyces pastorianus
agttctttggccgaacacattggca

SEQ ID NO: 90727 - DNA, 25 bp, Saccharomyces pastorianus
gaggctcagcgtgacagtgcagata

SEQ ID NO: 90728 - DNA, 25 bp, Saccharomyces pastorianus
tctgcctttggcactgatagttgtg

SEQ ID NO: 90729 - DNA, 25 bp, Saccharomyces pastorianus
gtaatactgaagtgccggaggctca

SEQ ID NO: 90730 - DNA, 25 bp, Saccharomyces pastorianus
cgaatcgactaggaacgtggctgtt

SEQ ID NO: 90731 - DNA, 25 bp, Saccharomyces pastorianus
taggttacctgccaaggacgacggt

SEQ ID NO: 90732 - DNA, 25 bp, Saccharomyces pastorianus
gaatctaacttgcatttgtcccggg

SEQ ID NO: 90733 - DNA, 25 bp, Saccharomyces pastorianus
ttcgtttcgtttttcatatgctatc

SEQ ID NO: 90734 - DNA, 25 bp, Saccharomyces pastorianus
tgcatttttcgccatcattcttttc

SEQ ID NO: 90735 - DNA, 25 bp, Saccharomyces pastorianus
taagctctttctgccgtgcaaaagg

SEQ ID NO: 90736 - DNA, 25 bp, Saccharomyces pastorianus
cggcgaaacgcaagaccgagcattc

SEQ ID NO: 90737 - DNA, 25 bp, Saccharomyces pastorianus
gacagctattgcactttggcggcac

SEQ ID NO: 90738 - DNA, 25 bp, Saccharomyces pastorianus
atccatttccttttgggctaactag

SEQ ID NO: 90739 - DNA, 25 bp, Saccharomyces pastorianus
ggtcaataggactcgacaaatcatt

SEQ ID NO: 90740 - DNA, 25 bp, Saccharomyces pastorianus
ttttcttgccttttacattccacac

SEQ ID NO: 90741 - DNA, 25 bp, Saccharomyces pastorianus
aaatcattatttacgcgcgtgcatt

SEQ ID NO: 90742 - DNA, 25 bp, Saccharomyces pastorianus
tttccgcgggttttgtggtcaatag

SEQ ID NO: 90743 - DNA, 25 bp, Saccharomyces pastorianus
tctgccaagatcattaacattatat

SEQ ID NO: 90744 - DNA, 25 bp, Saccharomyces pastorianus
tttggcttggttcccaggtatgcta

SEQ ID NO: 90745 - DNA, 25 bp, Saccharomyces pastorianus
ctgccaagatcattaacattatatt

SEQ ID NO: 90746 - DNA, 25 bp, Saccharomyces pastorianus
tcccttttcttaccaccagtcgccg

SEQ ID NO: 90747 - DNA, 25 bp, Saccharomyces pastorianus
ttctgccaagatcattaacattata

SEQ ID NO: 90748 - DNA, 25 bp, Saccharomyces pastorianus
attctgccaagatcattaacattat

SEQ ID NO: 90749 - DNA, 25 bp, Saccharomyces pastorianus
tttgaccattttggcttggttccca

SEQ ID NO: 90750 - DNA, 25 bp, Saccharomyces pastorianus
tatattatcccttttcttaccacca

SEQ ID NO: 90751 - DNA, 25 bp, Saccharomyces pastorianus
gggtactgactgtatagtggatatc

SEQ ID NO: 90752 - DNA, 25 bp, Saccharomyces pastorianus
tcgccgtttttctagcccgtgggtg

SEQ ID NO: 90753 - DNA, 25 bp, Saccharomyces pastorianus
gattctgccaagatcattaacatta

SEQ ID NO: 90754 - DNA, 25 bp, Saccharomyces pastorianus
acgatgggaataaacagcacaagct

SEQ ID NO: 90755 - DNA, 25 bp, Saccharomyces pastorianus
atgctgattcttttaacgttactgt

SEQ ID NO: 90756 - DNA, 25 bp, Saccharomyces pastorianus
ttttaggtcaaactatcaccaaggt

SEQ ID NO: 90757 - DNA, 25 bp, Saccharomyces pastorianus
tcaccaaggtacaatccgatgtagt

SEQ ID NO: 90758 - DNA, 25 bp, Saccharomyces pastorianus
ttctattgctgtttgcattaccgca

SEQ ID NO: 90759 - DNA, 25 bp, Saccharomyces pastorianus
ttttctagaaaaatccacatgctga

SEQ ID NO: 90760 - DNA, 25 bp, Saccharomyces pastorianus
gcattaccgcaacatacgatgggaa

SEQ ID NO: 90761 - DNA, 25 bp, Saccharomyces pastorianus
gatgctactagtcatattcttctta

SEQ ID NO: 90762 - DNA, 25 bp, Saccharomyces pastorianus
gctgttgtgtacatttttcctcatc

SEQ ID NO: 90763 - DNA, 25 bp, Saccharomyces pastorianus
gtttcactgtgatgctactagtcat

SEQ ID NO: 90764 - DNA, 25 bp, Saccharomyces pastorianus
aacgttactgtttcactgtgatgct

SEQ ID NO: 90765 - DNA, 25 bp, Saccharomyces pastorianus
caagggcggcctaccataatttact

SEQ ID NO: 90766 - DNA, 25 bp, Saccharomyces pastorianus
ggctacaaatcttttagtttccctg

SEQ ID NO: 90767 - DNA, 25 bp, Saccharomyces pastorianus
gtgcgtgattaccatgatttcttaa

SEQ ID NO: 90768 - DNA, 25 bp, Saccharomyces pastorianus
ggcctaaattcgaatggcagcgttt

SEQ ID NO: 90769 - DNA, 25 bp, Saccharomyces pastorianus
tttacttaccttttcacctacaatg

SEQ ID NO: 90770 - DNA, 25 bp, Saccharomyces pastorianus
ggcagcgtttcattgccagtgaaaa

SEQ ID NO: 90771 - DNA, 25 bp, Saccharomyces pastorianus
tagtttccctgattccaagggcggc

SEQ ID NO: 90772 - DNA, 25 bp, Saccharomyces pastorianus
tgagaaatttcttacggtgcgtgat

SEQ ID NO: 90773 - DNA, 25 bp, Saccharomyces pastorianus
aagtcgtctcaagagtggcttagca

SEQ ID NO: 90774 - DNA, 25 bp, Saccharomyces pastorianus
aggaagctggtgacgtctattacaa

SEQ ID NO: 90775 - DNA, 25 bp, Saccharomyces pastorianus
gatagtggttgcctaaatctggata

SEQ ID NO: 90776 - DNA, 25 bp, Saccharomyces pastorianus
aatgttgtcacgaggcttacagcat

SEQ ID NO: 90777 - DNA, 25 bp, Saccharomyces pastorianus
gagagccagttccactaggtatact

SEQ ID NO: 90778 - DNA, 25 bp, Saccharomyces pastorianus
gtccatggcgagcagatcattgttc

SEQ ID NO: 90779 - DNA, 25 bp, Saccharomyces pastorianus
tttaccaatggatgcgttgacgcta

SEQ ID NO: 90780 - DNA, 25 bp, Saccharomyces pastorianus
tgaaaaatctgttaggcggtcgggc

SEQ ID NO: 90781 - DNA, 25 bp, Saccharomyces pastorianus
atgtgtaactttttctttcttcaat

SEQ ID NO: 90782 - DNA, 25 bp, Saccharomyces pastorianus
tttcttcaatcctcaagacaccgag

SEQ ID NO: 90783 - DNA, 25 bp, Saccharomyces pastorianus
gatggtgtattgacggttacgctaa

SEQ ID NO: 90784 - DNA, 25 bp, Saccharomyces pastorianus
gtatcgccgtcatggcaggattgat

SEQ ID NO: 90785 - DNA, 25 bp, Saccharomyces pastorianus
ttattgacgcttcgtgtatcgccgt

SEQ ID NO: 90786 - DNA, 25 bp, Saccharomyces pastorianus
gagagctgatgtacatttcctggat

SEQ ID NO: 90787 - DNA, 25 bp, Saccharomyces pastorianus
aaacagtgttataacgccgttctag

SEQ ID NO: 90788 - DNA, 25 bp, Saccharomyces pastorianus
aagtaataccctcaaacagtgttat

SEQ ID NO: 90789 - DNA, 25 bp, Saccharomyces pastorianus
atttggaagcaggtcttccgcgcca

SEQ ID NO: 90790 - DNA, 25 bp, Saccharomyces pastorianus
gacaggcagagttttctgaggcaca

SEQ ID NO: 90791 - DNA, 25 bp, Saccharomyces pastorianus
gaggaactcatcatcgtcattatta

SEQ ID NO: 90792 - DNA, 25 bp, Saccharomyces pastorianus
gggtttctcgaggaactcatcatcg

SEQ ID NO: 90793 - DNA, 25 bp, Saccharomyces pastorianus
tacctcgaggtgcatcgatgatgta

SEQ ID NO: 90794 - DNA, 25 bp, Saccharomyces pastorianus
gtgttgctgttgtacagtttgacaa

SEQ ID NO: 90795 - DNA, 25 bp, Saccharomyces pastorianus
catcgtcattattattgtgttgctg

SEQ ID NO: 90796 - DNA, 25 bp, Saccharomyces pastorianus
taacgccgttctagggtttctcgag

SEQ ID NO: 90797 - DNA, 25 bp, Saccharomyces pastorianus
tcttccgcgccacgagagtagtgga

SEQ ID NO: 90798 - DNA, 25 bp, Saccharomyces pastorianus
agcagtttcactagagatagtcaac

SEQ ID NO: 90799 - DNA, 25 bp, Saccharomyces pastorianus
aagatcctgcactttcttgaagaag

SEQ ID NO: 90800 - DNA, 25 bp, Saccharomyces pastorianus
gaaattaactttcttctcaaagcct

SEQ ID NO: 90801 - DNA, 25 bp, Saccharomyces pastorianus
aagcctaattgtgggttatgcgatc

SEQ ID NO: 90802 - DNA, 25 bp, Saccharomyces pastorianus
aaagttggtgatcctaagtcgtgca

SEQ ID NO: 90803 - DNA, 25 bp, Saccharomyces pastorianus
ttgcttcgacataccagtacttcat

SEQ ID NO: 90804 - DNA, 25 bp, Saccharomyces pastorianus
cttcgagggtattgttacatgatgc

SEQ ID NO: 90805 - DNA, 25 bp, Saccharomyces pastorianus
ggaatattgcttcgacataccagta

SEQ ID NO: 90806 - DNA, 25 bp, Saccharomyces pastorianus
atgttgagagcgttccgctgttcta

SEQ ID NO: 90807 - DNA, 25 bp, Saccharomyces pastorianus
gctgttctatacatacttcgagggt

SEQ ID NO: 90808 - DNA, 25 bp, Saccharomyces pastorianus
tcctaagtcgtgcaccaagatcctg

SEQ ID NO: 90809 - DNA, 25 bp, Saccharomyces pastorianus
tattctttccacgtttctgccactt

SEQ ID NO: 90810 - DNA, 25 bp, Saccharomyces pastorianus
aaaccttcttcgcttgtacttatat

SEQ ID NO: 90811 - DNA, 25 bp, Saccharomyces pastorianus
ttaatcttggattattgctttcttc

SEQ ID NO: 90812 - DNA, 25 bp, Saccharomyces pastorianus
ggcataccgtctattttaatcttgg

SEQ ID NO: 90813 - DNA, 25 bp, Saccharomyces pastorianus
gattcttgggaatcttccaacgtat

SEQ ID NO: 90814 - DNA, 25 bp, Saccharomyces pastorianus
gaagcaaccactttgaggcactgga

SEQ ID NO: 90815 - DNA, 25 bp, Saccharomyces pastorianus
acgtttctgccactttgggagcatc

SEQ ID NO: 90816 - DNA, 25 bp, Saccharomyces pastorianus
tgggagcatctctatactgtagaag

SEQ ID NO: 90817 - DNA, 25 bp, Saccharomyces pastorianus
atttggttgtgaattgctcagaaga

SEQ ID NO: 90818 - DNA, 25 bp, Saccharomyces pastorianus
gaagagaaaggcataccgtctattt

SEQ ID NO: 90819 - DNA, 25 bp, Saccharomyces pastorianus
tcttcgttaaaaccttcttcgcttg

SEQ ID NO: 90820 - DNA, 25 bp, Saccharomyces pastorianus
gtccaggtggaaaaagctgccgcaa

SEQ ID NO: 90821 - DNA, 25 bp, Saccharomyces pastorianus
gcgatgacagaatctaccaagctac

SEQ ID NO: 90822 - DNA, 25 bp, Saccharomyces pastorianus
ggtccactgactaaattttccacag

SEQ ID NO: 90823 - DNA, 25 bp, Saccharomyces pastorianus
gctgccgcaaatggtacacggttta

SEQ ID NO: 90824 - DNA, 25 bp, Saccharomyces pastorianus
gagggatctgccttaacagacaagt

SEQ ID NO: 90825 - DNA, 25 bp, Saccharomyces pastorianus
gcagagtccgcgcaaacattgaaaa

SEQ ID NO: 90826 - DNA, 25 bp, Saccharomyces pastorianus
gaatgattttcagtcgcttaaagca

SEQ ID NO: 90827 - DNA, 25 bp, Saccharomyces pastorianus
acaaattgccctcgaatactacttc

SEQ ID NO: 90828 - DNA, 25 bp, Saccharomyces pastorianus
gaatcttcaaaagccgcagagtccg

SEQ ID NO: 90829 - DNA, 25 bp, Saccharomyces pastorianus
aagctcaatgatgaactacgttcca

SEQ ID NO: 90830 - DNA, 25 bp, Saccharomyces pastorianus
aagggaactccaacaagcaaatgcg

SEQ ID NO: 90831 - DNA, 25 bp, Saccharomyces pastorianus
caccccaggtatacatctttaggaa

SEQ ID NO: 90832 - DNA, 25 bp, Saccharomyces pastorianus
ataccagaacctctgccggttgaga

SEQ ID NO: 90833 - DNA, 25 bp, Saccharomyces pastorianus
tattctcaatttcccaacttttcgc

SEQ ID NO: 90834 - DNA, 25 bp, Saccharomyces pastorianus
aacttttcgcaaacacaggtggata

SEQ ID NO: 90835 - DNA, 25 bp, Saccharomyces pastorianus
acaaagataattccaccccaggtat

SEQ ID NO: 90836 - DNA, 25 bp, Saccharomyces pastorianus
cagacttgcgggagtccttgttgaa

SEQ ID NO: 90837 - DNA, 25 bp, Saccharomyces pastorianus
agcagagtgtccatctataccagaa

SEQ ID NO: 90838 - DNA, 25 bp, Saccharomyces pastorianus
ggactctaacggacacgtctggtat

SEQ ID NO: 90839 - DNA, 25 bp, Saccharomyces pastorianus
gagatacctccgtgatgtggcacag

SEQ ID NO: 90840 - DNA, 25 bp, Saccharomyces pastorianus
attacgatgtgttcaatgctctggg

SEQ ID NO: 90841 - DNA, 25 bp, Saccharomyces pastorianus
actagctaagctcgaatcacatcct

SEQ ID NO: 90842 - DNA, 25 bp, Saccharomyces pastorianus
gactagtgctgaaccattggatcct

SEQ ID NO: 90843 - DNA, 25 bp, Saccharomyces pastorianus
aattctgtcattgatgccatcgtgg

SEQ ID NO: 90844 - DNA, 25 bp, Saccharomyces pastorianus
ttgcgtctgactttggcgttttaaa

SEQ ID NO: 90845 - DNA, 25 bp, Saccharomyces pastorianus
gaaaaagctttgagcgcctccaaat

SEQ ID NO: 90846 - DNA, 25 bp, Saccharomyces pastorianus
tatcaggccgctgcaaagaactcct

SEQ ID NO: 90847 - DNA, 25 bp, Saccharomyces pastorianus
tactgaatcctgcattgtcattgaa

SEQ ID NO: 90848 - DNA, 25 bp, Saccharomyces pastorianus
taagagctgctgcttccaaagctgc

SEQ ID NO: 90849 - DNA, 25 bp, Saccharomyces pastorianus
aagaactcctctattgatgctgcct

SEQ ID NO: 90850 - DNA, 25 bp, Saccharomyces pastorianus
gagtctttaccaggtcatttgcatc

SEQ ID NO: 90851 - DNA, 25 bp, Saccharomyces pastorianus
gactgttgacttaagcatttctacg

SEQ ID NO: 90852 - DNA, 25 bp, Saccharomyces pastorianus
tacgcaacagctttatatcaggccg

SEQ ID NO: 90853 - DNA, 25 bp, Saccharomyces pastorianus
aattctttgcgggattgttaggtca

SEQ ID NO: 90854 - DNA, 25 bp, Saccharomyces pastorianus
gacattaccgaaaacccatatgttt

SEQ ID NO: 90855 - DNA, 25 bp, Saccharomyces pastorianus
ggatgatgggcttgatatcccgaaa

SEQ ID NO: 90856 - DNA, 25 bp, Saccharomyces pastorianus
agactgtgctaatggcaggctacca

SEQ ID NO: 90857 - DNA, 25 bp, Saccharomyces pastorianus
gcagcaattacaatcacctcaacta

SEQ ID NO: 90858 - DNA, 25 bp, Saccharomyces pastorianus
atcacatccggatacaaatggtcag

SEQ ID NO: 90859 - DNA, 25 bp, Saccharomyces pastorianus
acctcaactaatgctcgttcgaaca

SEQ ID NO: 90860 - DNA, 25 bp, Saccharomyces pastorianus
gatttctcccgttgtcaaagatagt

SEQ ID NO: 90861 - DNA, 25 bp, Saccharomyces pastorianus
tactcagttcaagatccaattgcga

SEQ ID NO: 90862 - DNA, 25 bp, Saccharomyces pastorianus
ggctaccagaattgatttctcccgt

SEQ ID NO: 90863 - DNA, 25 bp, Saccharomyces pastorianus
tatcgatactaaggcttccaagggt

SEQ ID NO: 90864 - DNA, 25 bp, Saccharomyces pastorianus
gaaaagcgatacacctgcgaatata

SEQ ID NO: 90865 - DNA, 25 bp, Saccharomyces pastorianus
gaatgccggtgttcatacgttgatc

SEQ ID NO: 90866 - DNA, 25 bp, Saccharomyces pastorianus
aaaggcgctgttgttatagaccaag

SEQ ID NO: 90867 - DNA, 25 bp, Saccharomyces pastorianus
aaaggctcttaacgttccactacat

SEQ ID NO: 90868 - DNA, 25 bp, Saccharomyces pastorianus
ggtgcgtacgcagccttaacaagga

SEQ ID NO: 90869 - DNA, 25 bp, Saccharomyces pastorianus
ataaggcgggattattgccagcagg

SEQ ID NO: 90870 - DNA, 25 bp, Saccharomyces pastorianus
ttaccagatggcacgttagatccag

SEQ ID NO: 90871 - DNA, 25 bp, Saccharomyces pastorianus
gttccactacatacgaagttcattg

SEQ ID NO: 90872 - DNA, 25 bp, Saccharomyces pastorianus
acggtcttgtctctaaaggcgctgt

SEQ ID NO: 90873 - DNA, 25 bp, Saccharomyces pastorianus
tagatccagattttcccttgcaaac

SEQ ID NO: 90874 - DNA, 25 bp, Saccharomyces pastorianus
ggattttacacggtcttgtctctaa

SEQ ID NO: 90875 - DNA, 25 bp, Saccharomyces pastorianus
ttgcgatcatttaggacaggaacat

SEQ ID NO: 90876 - DNA, 25 bp, Saccharomyces pastorianus
gactctcgttctgggacattctatt

SEQ ID NO: 90877 - DNA, 25 bp, Saccharomyces pastorianus
gaaactaagcctgatggatttgaat

SEQ ID NO: 90878 - DNA, 25 bp, Saccharomyces pastorianus
ataccccagcacgtattgcgatcat

SEQ ID NO: 90879 - DNA, 25 bp, Saccharomyces pastorianus
aatgaagtctcctaaataccccagc

SEQ ID NO: 90880 - DNA, 25 bp, Saccharomyces pastorianus
ggatttgaattaataccgcttagca

SEQ ID NO: 90881 - DNA, 25 bp, Saccharomyces pastorianus
aaaggccatgccattccgaaaattg

SEQ ID NO: 90882 - DNA, 25 bp, Saccharomyces pastorianus
ctgggcaatattagggcgttccatt

SEQ ID NO: 90883 - DNA, 25 bp, Saccharomyces pastorianus
gcgttccattctacctaatgctcaa

SEQ ID NO: 90884 - DNA, 25 bp, Saccharomyces pastorianus
taaagtactactgggactctcgttc

SEQ ID NO: 90885 - DNA, 25 bp, Saccharomyces pastorianus
agcagtccagcttttgaagcagcaa

SEQ ID NO: 90886 - DNA, 25 bp, Saccharomyces pastorianus
ggacccattggacaaaaacttacag

SEQ ID NO: 90887 - DNA, 25 bp, Saccharomyces pastorianus
gaggcactaagtactgttacaatca

SEQ ID NO: 90888 - DNA, 25 bp, Saccharomyces pastorianus
tgagcatctgctactcatgacactc

SEQ ID NO: 90889 - DNA, 25 bp, Saccharomyces pastorianus
gagaatgtactatatttccggttaa

SEQ ID NO: 90890 - DNA, 25 bp, Saccharomyces pastorianus
aacttacagccagttgacatcaagc

SEQ ID NO: 90891 - DNA, 25 bp, Saccharomyces pastorianus
tgctgaaaatgcgttgcacgtgaat

SEQ ID NO: 90892 - DNA, 25 bp, Saccharomyces pastorianus
gctgtcatgcatgagtacttgcgca

SEQ ID NO: 90893 - DNA, 25 bp, Saccharomyces pastorianus
gaacacaactccaataagcgacata

SEQ ID NO: 90894 - DNA, 25 bp, Saccharomyces pastorianus
attactaatgaatccagcacacttg

SEQ ID NO: 90895 - DNA, 25 bp, Saccharomyces pastorianus
ttccggttaagtttaaagctgtcat

SEQ ID NO: 90896 - DNA, 25 bp, Saccharomyces pastorianus
gtaggaactgtactcataatgcatt

SEQ ID NO: 90897 - DNA, 25 bp, Saccharomyces pastorianus
ataagtgggtacgagcttgccttgc

SEQ ID NO: 90898 - DNA, 25 bp, Saccharomyces pastorianus
aagtaccgaaactagctcttcctat

SEQ ID NO: 90899 - DNA, 25 bp, Saccharomyces pastorianus
ctgggttaccgctatttattatcat

SEQ ID NO: 90900 - DNA, 25 bp, Saccharomyces pastorianus
gccttatgggtttcatatgccctgt

SEQ ID NO: 90901 - DNA, 25 bp, Saccharomyces pastorianus
ttcatataccacattctacccaaaa

SEQ ID NO: 90902 - DNA, 25 bp, Saccharomyces pastorianus
tattctttagtttggcttttctgca

SEQ ID NO: 90903 - DNA, 25 bp, Saccharomyces pastorianus
taaccattggcctctgctcaaaaat

SEQ ID NO: 90904 - DNA, 25 bp, Saccharomyces pastorianus
attgtttgcgctgtcctagtaattt

SEQ ID NO: 90905 - DNA, 25 bp, Saccharomyces pastorianus
gatatgtattctctgggttaccgct

SEQ ID NO: 90906 - DNA, 25 bp, Saccharomyces pastorianus
acatcagctgaaaagtgccgtctag

SEQ ID NO: 90907 - DNA, 25 bp, Saccharomyces pastorianus
cacttctgctttcttgtgagtataa

SEQ ID NO: 90908 - DNA, 25 bp, Saccharomyces pastorianus
gctgtagccaagacacatcctgata

SEQ ID NO: 90909 - DNA, 25 bp, Saccharomyces pastorianus
taaaaaatccatgcccgttaagaag

SEQ ID NO: 90910 - DNA, 25 bp, Saccharomyces pastorianus
aaattctccaatttctgttgatagc

SEQ ID NO: 90911 - DNA, 25 bp, Saccharomyces pastorianus
aagaagacaacgacaacctcgcctg

SEQ ID NO: 90912 - DNA, 25 bp, Saccharomyces pastorianus
cagagtccttgtccctggaaaataa

SEQ ID NO: 90913 - DNA, 25 bp, Saccharomyces pastorianus
ataagataccagagtccttgtccct

SEQ ID NO: 90914 - DNA, 25 bp, Saccharomyces pastorianus
tgacattcgtcatctgttagcaaat

SEQ ID NO: 90915 - DNA, 25 bp, Saccharomyces pastorianus
aggcgtgctgagtcttttgaacatt

SEQ ID NO: 90916 - DNA, 25 bp, Saccharomyces pastorianus
tgccaagactttattaatcctcccc

SEQ ID NO: 90917 - DNA, 25 bp, Saccharomyces pastorianus
ggatgtctctatgcaagatttggtt

SEQ ID NO: 90918 - DNA, 25 bp, Saccharomyces pastorianus
gcaaatttatccagcttactaacat

SEQ ID NO: 90919 - DNA, 25 bp, Saccharomyces pastorianus
gagtttgccgatcgtatattccaag

SEQ ID NO: 90920 - DNA, 25 bp, Saccharomyces pastorianus
tttccgccagctatagtcaacttag

SEQ ID NO: 90921 - DNA, 25 bp, Saccharomyces pastorianus
gtgcctattgccaacgtaccaaaga

SEQ ID NO: 90922 - DNA, 25 bp, Saccharomyces pastorianus
tatcctcctgtgaaaccgcaaggtt

SEQ ID NO: 90923 - DNA, 25 bp, Saccharomyces pastorianus
gcgtttctgctgatggccctatgaa

SEQ ID NO: 90924 - DNA, 25 bp, Saccharomyces pastorianus
agtacgatggtattgttcttgctac

SEQ ID NO: 90925 - DNA, 25 bp, Saccharomyces pastorianus
ggtgttcttgtttccttgaatgacc

SEQ ID NO: 90926 - DNA, 25 bp, Saccharomyces pastorianus
gaaattcactactattatcctcctg

SEQ ID NO: 90927 - DNA, 25 bp, Saccharomyces pastorianus
ttttatatgctcaccaagcctttcc

SEQ ID NO: 90928 - DNA, 25 bp, Saccharomyces pastorianus
ccaaatttcctctggttactacatt

SEQ ID NO: 90929 - DNA, 25 bp, Saccharomyces pastorianus
cgcctctggttatctaagccctgaa

SEQ ID NO: 90930 - DNA, 25 bp, Saccharomyces pastorianus
ggtattcagacaacccttaatcgag

SEQ ID NO: 90931 - DNA, 25 bp, Saccharomyces pastorianus
tccatgcgtcccattttcaaaattc

SEQ ID NO: 90932 - DNA, 25 bp, Saccharomyces pastorianus
aatgggatgccaaagtcgccgccgt

SEQ ID NO: 90933 - DNA, 25 bp, Saccharomyces pastorianus
caactctggttccacgggcagaagt

SEQ ID NO: 90934 - DNA, 25 bp, Saccharomyces pastorianus
ggttagaaacgttggctgccattcc

SEQ ID NO: 90935 - DNA, 25 bp, Saccharomyces pastorianus
attcctgatactcttccaactctgg

SEQ ID NO: 90936 - DNA, 25 bp, Saccharomyces pastorianus
atattatcgctgactacttacctcc

SEQ ID NO: 90937 - DNA, 25 bp, Saccharomyces pastorianus
gtcgccgccgtcagagaaaaatatg

SEQ ID NO: 90938 - DNA, 25 bp, Saccharomyces pastorianus
gatagtcaatcctgatgttccagat

SEQ ID NO: 90939 - DNA, 25 bp, Saccharomyces pastorianus
gaatttctatcgtccaatgtcacat

SEQ ID NO: 90940 - DNA, 25 bp, Saccharomyces pastorianus
aatatcaaatttcccttctctactg

SEQ ID NO: 90941 - DNA, 25 bp, Saccharomyces pastorianus
gcctgcgaacgcctcatttaatttg

SEQ ID NO: 90942 - DNA, 25 bp, Saccharomyces pastorianus
aattgaagctggtagaggaggcaaa

SEQ ID NO: 90943 - DNA, 25 bp, Saccharomyces pastorianus
gcgaacgcctcatttaatttggaag

SEQ ID NO: 90944 - DNA, 25 bp, Saccharomyces pastorianus
actcctaaagatgtgcctgcgaacg

SEQ ID NO: 90945 - DNA, 25 bp, Saccharomyces pastorianus
cagttaatgttttgagatactctgc

SEQ ID NO: 90946 - DNA, 25 bp, Saccharomyces pastorianus
gtaactcctaaagatgtgcctgcga

SEQ ID NO: 90947 - DNA, 25 bp, Saccharomyces pastorianus
aaggaatacgccaagctacaccctg

SEQ ID NO: 90948 - DNA, 25 bp, Saccharomyces pastorianus
gctacaccctgtagtaactcctaaa

SEQ ID NO: 90949 - DNA, 25 bp, Saccharomyces pastorianus
gagcaggcacagtacgaggagaaat

SEQ ID NO: 90950 - DNA, 25 bp, Saccharomyces pastorianus
aagaagaaagaggagcaggcacagt

SEQ ID NO: 90951 - DNA, 25 bp, Saccharomyces pastorianus
cgcctcatttaatttggaagatcct

SEQ ID NO: 90952 - DNA, 25 bp, Saccharomyces pastorianus
tgatcatttcagcaaccaccttgca

SEQ ID NO: 90953 - DNA, 25 bp, Saccharomyces pastorianus
ttttgcctatcttgctctgaaatgg

SEQ ID NO: 90954 - DNA, 25 bp, Saccharomyces pastorianus
tcttctaatttcctcgggagacctt

SEQ ID NO: 90955 - DNA, 25 bp, Saccharomyces pastorianus
tgcagccagcgtcaagcaagggctt

SEQ ID NO: 90956 - DNA, 25 bp, Saccharomyces pastorianus
ggactaacgtacacattgcatgaca

SEQ ID NO: 90957 - DNA, 25 bp, Saccharomyces pastorianus
gcatgacagcaagccttgtttgctt

SEQ ID NO: 90958 - DNA, 25 bp, Saccharomyces pastorianus
gaaatggcgcattatcatcggaaga

SEQ ID NO: 90959 - DNA, 25 bp, Saccharomyces pastorianus
agcctcctcctctggagtgaagtcg

SEQ ID NO: 90960 - DNA, 25 bp, Saccharomyces pastorianus
gtttgcttatttttgcctatcttgc

SEQ ID NO: 90961 - DNA, 25 bp, Saccharomyces pastorianus
tcattttcacgcctaatggcagcct

SEQ ID NO: 90962 - DNA, 25 bp, Saccharomyces pastorianus
gtaggctaacggtcttcagcccatt

SEQ ID NO: 90963 - DNA, 25 bp, Saccharomyces pastorianus
gcggagagatccctgctattgaaaa

SEQ ID NO: 90964 - DNA, 25 bp, Saccharomyces pastorianus
cactccagaggaggaggctgccatt

SEQ ID NO: 90965 - DNA, 25 bp, Saccharomyces pastorianus
gtgaacgattcaccgtagacaagaa

SEQ ID NO: 90966 - DNA, 25 bp, Saccharomyces pastorianus
tccgttttgcagaaggttatcgaat

SEQ ID NO: 90967 - DNA, 25 bp, Saccharomyces pastorianus
agagactctaacttccctgacgaag

SEQ ID NO: 90968 - DNA, 25 bp, Saccharomyces pastorianus
gtgacttctaatgttgtcctagtga

SEQ ID NO: 90969 - DNA, 25 bp, Saccharomyces pastorianus
agcccttgcttgacgctggctgcaa

SEQ ID NO: 90970 - DNA, 25 bp, Saccharomyces pastorianus
acgaaattattctggcggcaaacta

SEQ ID NO: 90971 - DNA, 25 bp, Saccharomyces pastorianus
atgacgacgagattgtgatgcccgt

SEQ ID NO: 90972 - DNA, 25 bp, Saccharomyces pastorianus
gacgattccagaaagagtgctcccg

SEQ ID NO: 90973 - DNA, 25 bp, Saccharomyces pastorianus
gaatgggccgagcaccacagagact

SEQ ID NO: 90974 - DNA, 25 bp, Saccharomyces pastorianus
aggagggctaggtatcaatctgact

SEQ ID NO: 90975 - DNA, 25 bp, Saccharomyces pastorianus
gaattgcccgaaaatgcttcaggtg

SEQ ID NO: 90976 - DNA, 25 bp, Saccharomyces pastorianus
ggaaagacttcttgcgcaagcggaa

SEQ ID NO: 90977 - DNA, 25 bp, Saccharomyces pastorianus
gcaaactttcggtgagagatctatt

SEQ ID NO: 90978 - DNA, 25 bp, Saccharomyces pastorianus
gggtgacttcacaacagattatttc

SEQ ID NO: 90979 - DNA, 25 bp, Saccharomyces pastorianus
ggacagactcgagatgtgcatattt

SEQ ID NO: 90980 - DNA, 25 bp, Saccharomyces pastorianus
gcactgcccatgttgacgagtacat

SEQ ID NO: 90981 - DNA, 25 bp, Saccharomyces pastorianus
ttgatgagtatgagggcactgccca

SEQ ID NO: 90982 - DNA, 25 bp, Saccharomyces pastorianus
tggcagccaaagatcacagacaact

SEQ ID NO: 90983 - DNA, 25 bp, Saccharomyces pastorianus
gatctattgggatccgaattgcccg

SEQ ID NO: 90984 - DNA, 25 bp, Saccharomyces pastorianus
taacggtatttatcctatcaagtag

SEQ ID NO: 90985 - DNA, 25 bp, Saccharomyces pastorianus
taactcgcttacgtccagtacatct

SEQ ID NO: 90986 - DNA, 25 bp, Saccharomyces pastorianus
gaaaagtcactttgcagtacctcct

SEQ ID NO: 90987 - DNA, 25 bp, Saccharomyces pastorianus
ttgaacaacataaccacctcgcatg

SEQ ID NO: 90988 - DNA, 25 bp, Saccharomyces pastorianus
atcgattcgcctggttatggcttta

SEQ ID NO: 90989 - DNA, 25 bp, Saccharomyces pastorianus
agacttgtattgactaactcgctta

SEQ ID NO: 90990 - DNA, 25 bp, Saccharomyces pastorianus
gggaagtcctctatcttgaacaaca

SEQ ID NO: 90991 - DNA, 25 bp, Saccharomyces pastorianus
gtacatctcctaaacggttcggtat

SEQ ID NO: 90992 - DNA, 25 bp, Saccharomyces pastorianus
ttaccaactctacccagacttgtat

SEQ ID NO: 90993 - DNA, 25 bp, Saccharomyces pastorianus
gctttctcttactcgctggagataa

SEQ ID NO: 90994 - DNA, 25 bp, Saccharomyces pastorianus
acaacttgtcagatgctttctctta

SEQ ID NO: 90995 - DNA, 25 bp, Saccharomyces pastorianus
gaacacggagttccttttgaagttg

SEQ ID NO: 90996 - DNA, 25 bp, Saccharomyces pastorianus
aagctgttcgcacaagggtacgtac

SEQ ID NO: 90997 - DNA, 25 bp, Saccharomyces pastorianus
ttcctttgatgagcgtaggcggtca

SEQ ID NO: 90998 - DNA, 25 bp, Saccharomyces pastorianus
tgaaactggctcgagatcctagaat

SEQ ID NO: 90999 - DNA, 25 bp, Saccharomyces pastorianus
atgtaacccgttaatcacagattgt

SEQ ID NO: 91000 - DNA, 25 bp, Saccharomyces pastorianus
gatggactgtctactcgcaaaatgt

SEQ ID NO: 91001 - DNA, 25 bp, Saccharomyces pastorianus
actgtttagtgcatcgagtcttaca

SEQ ID NO: 91002 - DNA, 25 bp, Saccharomyces pastorianus
gaaaaatccctggaattcctttgat

SEQ ID NO: 91003 - DNA, 25 bp, Saccharomyces pastorianus
gtagctacaaacgatgccggcctga

SEQ ID NO: 91004 - DNA, 25 bp, Saccharomyces pastorianus
agtgcacttttctttcaatacaatc

SEQ ID NO: 91005 - DNA, 25 bp, Saccharomyces pastorianus
caagtaccgtatcgccttgaaactg

SEQ ID NO: 91006 - DNA, 25 bp, Saccharomyces pastorianus
gtacgtacgcggatgactgtttagt

SEQ ID NO: 91007 - DNA, 25 bp, Saccharomyces pastorianus
agatcagatctggttacattcctta

SEQ ID NO: 91008 - DNA, 25 bp, Saccharomyces pastorianus
attcgacagcttttctgtgtcagcc

SEQ ID NO: 91009 - DNA, 25 bp, Saccharomyces pastorianus
taccgcgtccactatcatcaagaag

SEQ ID NO: 91010 - DNA, 25 bp, Saccharomyces pastorianus
gggccggtcattctatgatacttca

SEQ ID NO: 91011 - DNA, 25 bp, Saccharomyces pastorianus
agcacaagtgctagaccatccagta

SEQ ID NO: 91012 - DNA, 25 bp, Saccharomyces pastorianus
caggcgttcgattgagcagtcctta

SEQ ID NO: 91013 - DNA, 25 bp, Saccharomyces pastorianus
gatccagctggacatgtaactcgta

SEQ ID NO: 91014 - DNA, 25 bp, Saccharomyces pastorianus
gaaacttgactctttatccatccta

SEQ ID NO: 91015 - DNA, 25 bp, Saccharomyces pastorianus
aggctatatgttcactgtcccaggt

SEQ ID NO: 91016 - DNA, 25 bp, Saccharomyces pastorianus
tgacagcagcatactcaaacggtgt

SEQ ID NO: 91017 - DNA, 25 bp, Saccharomyces pastorianus
atgtaactcgtatagcttccttgct

SEQ ID NO: 91018 - DNA, 25 bp, Saccharomyces pastorianus
agttgtcgaagtgtgcctcatacgg

SEQ ID NO: 91019 - DNA, 25 bp, Saccharomyces pastorianus
acaccgccgtgttatattgtttaag

SEQ ID NO: 91020 - DNA, 25 bp, Saccharomyces pastorianus
gacccgacatcgtccgaacttaaat

SEQ ID NO: 91021 - DNA, 25 bp, Saccharomyces pastorianus
ctgttttcaacgtactgggaccact

SEQ ID NO: 91022 - DNA, 25 bp, Saccharomyces pastorianus
ggaatgggccacgtttctaagatac

SEQ ID NO: 91023 - DNA, 25 bp, Saccharomyces pastorianus
taccaccttggcgacaataatccta

SEQ ID NO: 91024 - DNA, 25 bp, Saccharomyces pastorianus
atacgttcatgtttctacttgctcc

SEQ ID NO: 91025 - DNA, 25 bp, Saccharomyces pastorianus
aaggcagccgctttggtatatccag

SEQ ID NO: 91026 - DNA, 25 bp, Saccharomyces pastorianus
actactgtctggcatattgacccga

SEQ ID NO: 91027 - DNA, 25 bp, Saccharomyces pastorianus
tgggaccacttctacatccagttag

SEQ ID NO: 91028 - DNA, 25 bp, Saccharomyces pastorianus
gcaaatttcttggaattccgactgt

SEQ ID NO: 91029 - DNA, 25 bp, Saccharomyces pastorianus
aagttccaattaggtcaccagctcc

SEQ ID NO: 91030 - DNA, 25 bp, Saccharomyces pastorianus
agctccactattggatgtagaagct

SEQ ID NO: 91031 - DNA, 25 bp, Saccharomyces pastorianus
actgtcgatgaattaaccttgaaca

SEQ ID NO: 91032 - DNA, 25 bp, Saccharomyces pastorianus
caaagtttgggcactgtcgatgaat

SEQ ID NO: 91033 - DNA, 25 bp, Saccharomyces pastorianus
gtcaccagctccactattggatgta

SEQ ID NO: 91034 - DNA, 25 bp, Saccharomyces pastorianus
gtattatccggccaaagtttgggca

SEQ ID NO: 91035 - DNA, 25 bp, Saccharomyces pastorianus
tatccggccaaagtttgggcactgt

SEQ ID NO: 91036 - DNA, 25 bp, Saccharomyces pastorianus
atgaacgtattatccggccaaagtt

SEQ ID NO: 91037 - DNA, 25 bp, Saccharomyces pastorianus
atatcacagcctaaagttccaatta

SEQ ID NO: 91038 - DNA, 25 bp, Saccharomyces pastorianus
taaccttgaacatatcacagcctaa

SEQ ID NO: 91039 - DNA, 25 bp, Saccharomyces pastorianus
aattaggtcaccagctccactattg

SEQ ID NO: 91040 - DNA, 25 bp, Saccharomyces pastorianus
cgtggagtttcgcttggatttgata

SEQ ID NO: 91041 - DNA, 25 bp, Saccharomyces pastorianus
atgtgacgcttcgtccatgagtgtt

SEQ ID NO: 91042 - DNA, 25 bp, Saccharomyces pastorianus
agccttgtggagtcaattgtatcat

SEQ ID NO: 91043 - DNA, 25 bp, Saccharomyces pastorianus
caggcgtaaattccatgttcttcaa

SEQ ID NO: 91044 - DNA, 25 bp, Saccharomyces pastorianus
gaagcttcactaaatagccttgtgg

SEQ ID NO: 91045 - DNA, 25 bp, Saccharomyces pastorianus
tgtcttttcttaacagggccttcgt

SEQ ID NO: 91046 - DNA, 25 bp, Saccharomyces pastorianus
gatacaacttgtgtttgcgtggagt

SEQ ID NO: 91047 - DNA, 25 bp, Saccharomyces pastorianus
atgttcttcaagctcccatttggga

SEQ ID NO: 91048 - DNA, 25 bp, Saccharomyces pastorianus
gctgtcatcgaattgtgaagcttca

SEQ ID NO: 91049 - DNA, 25 bp, Saccharomyces pastorianus
gtatcatcaatgcttcttctctgtc

SEQ ID NO: 91050 - DNA, 25 bp, Saccharomyces pastorianus
attggcatttggaaccttagtaggc

SEQ ID NO: 91051 - DNA, 25 bp, Saccharomyces pastorianus
gaactccttgaaaaatgcgatacgt

SEQ ID NO: 91052 - DNA, 25 bp, Saccharomyces pastorianus
gaaagaatcgcagaggccgtaaata

SEQ ID NO: 91053 - DNA, 25 bp, Saccharomyces pastorianus
gaaatgttaaaccaactggcgatga

SEQ ID NO: 91054 - DNA, 25 bp, Saccharomyces pastorianus
tacaattagatactacggagctatg

SEQ ID NO: 91055 - DNA, 25 bp, Saccharomyces pastorianus
gcaagacaactcaagtcattccaga

SEQ ID NO: 91056 - DNA, 25 bp, Saccharomyces pastorianus
atgcgatacgttggaaaatcactat

SEQ ID NO: 91057 - DNA, 25 bp, Saccharomyces pastorianus
gtcgactacgattacttactttata

SEQ ID NO: 91058 - DNA, 25 bp, Saccharomyces pastorianus
ggcgatgataacagatactttcaag

SEQ ID NO: 91059 - DNA, 25 bp, Saccharomyces pastorianus
cttcggctggtgacgatcctcttgg

SEQ ID NO: 91060 - DNA, 25 bp, Saccharomyces pastorianus
gataagttgacagtcgactacgatt

SEQ ID NO: 91061 - DNA, 25 bp, Saccharomyces pastorianus
tcattccagagagtcggcttcggct

SEQ ID NO: 91062 - DNA, 25 bp, Saccharomyces pastorianus
tgtgacatctccaagcaaacctttg

SEQ ID NO: 91063 - DNA, 25 bp, Saccharomyces pastorianus
aaagtaaaaccgctctgtccgcata

SEQ ID NO: 91064 - DNA, 25 bp, Saccharomyces pastorianus
gacggtcactcaaagtcatctggta

SEQ ID NO: 91065 - DNA, 25 bp, Saccharomyces pastorianus
gaaggctaattactgcaccaagggt

SEQ ID NO: 91066 - DNA, 25 bp, Saccharomyces pastorianus
taaccaatcggatcacttacgcatt

SEQ ID NO: 91067 - DNA, 25 bp, Saccharomyces pastorianus
aaaggcacgacattgtctctgcaac

SEQ ID NO: 91068 - DNA, 25 bp, Saccharomyces pastorianus
aactcgattgttctacctaatggtt

SEQ ID NO: 91069 - DNA, 25 bp, Saccharomyces pastorianus
gtaagtttgtcatccccaaagtctc

SEQ ID NO: 91070 - DNA, 25 bp, Saccharomyces pastorianus
aacctttgcaaccttttgacgatct

SEQ ID NO: 91071 - DNA, 25 bp, Saccharomyces pastorianus
ctgtccgcatattctaactcgattg

SEQ ID NO: 91072 - DNA, 25 bp, Saccharomyces pastorianus
caaacagattgcttccatagagggt

SEQ ID NO: 91073 - DNA, 25 bp, Saccharomyces pastorianus
tgagactttccactttcttcaaaac

SEQ ID NO: 91074 - DNA, 25 bp, Saccharomyces pastorianus
gactactttcatgaggaggaccgat

SEQ ID NO: 91075 - DNA, 25 bp, Saccharomyces pastorianus
gacttctatatcatcgtcaccagga

SEQ ID NO: 91076 - DNA, 25 bp, Saccharomyces pastorianus
aaaattgtgctttggttctcagtga

SEQ ID NO: 91077 - DNA, 25 bp, Saccharomyces pastorianus
acggcacttggcgatgacaaacatt

SEQ ID NO: 91078 - DNA, 25 bp, Saccharomyces pastorianus
gtaccaggattcaactaagcagctt

SEQ ID NO: 91079 - DNA, 25 bp, Saccharomyces pastorianus
gatccatactgttttctttcattcg

SEQ ID NO: 91080 - DNA, 25 bp, Saccharomyces pastorianus
attcttgatcacgaaggccttgtca

SEQ ID NO: 91081 - DNA, 25 bp, Saccharomyces pastorianus
cagatttgatcctaggttccccaac

SEQ ID NO: 91082 - DNA, 25 bp, Saccharomyces pastorianus
cactgacgatgataccgattctggt

SEQ ID NO: 91083 - DNA, 25 bp, Saccharomyces pastorianus
gttggaggatgttgccacggcactt

SEQ ID NO: 91084 - DNA, 25 bp, Saccharomyces pastorianus
taattcgctacatatcccacaggat

SEQ ID NO: 91085 - DNA, 25 bp, Saccharomyces pastorianus
aaaacttctgcaagagggtggctct

SEQ ID NO: 91086 - DNA, 25 bp, Saccharomyces pastorianus
gagaatcgctctcatgggtcaagat

SEQ ID NO: 91087 - DNA, 25 bp, Saccharomyces pastorianus
aaatctatgtccatgttaggcgttc

SEQ ID NO: 91088 - DNA, 25 bp, Saccharomyces pastorianus
cacttttatgacttgtaattcgcta

SEQ ID NO: 91089 - DNA, 25 bp, Saccharomyces pastorianus
gaagtctctgatatcgatgttacta

SEQ ID NO: 91090 - DNA, 25 bp, Saccharomyces pastorianus
gaactttgaagcgacactggaatca

SEQ ID NO: 91091 - DNA, 25 bp, Saccharomyces pastorianus
tgttaggcgttcaacaccattttct

SEQ ID NO: 91092 - DNA, 25 bp, Saccharomyces pastorianus
gaagaagctgctttactcataaaag

SEQ ID NO: 91093 - DNA, 25 bp, Saccharomyces pastorianus
agagtccgaatatcgcgagtttgaa

SEQ ID NO: 91094 - DNA, 25 bp, Saccharomyces pastorianus
gagggtggctctttgtcaggaaata

SEQ ID NO: 91095 - DNA, 25 bp, Saccharomyces pastorianus
cacatgggccaatggtgaaacaata

SEQ ID NO: 91096 - DNA, 25 bp, Saccharomyces pastorianus
gaatttgaagatttccccattgaca

SEQ ID NO: 91097 - DNA, 25 bp, Saccharomyces pastorianus
tgacacatgggccaatggtgaaaca

SEQ ID NO: 91098 - DNA, 25 bp, Saccharomyces pastorianus
atgagtacggacgttgctgctgcac

SEQ ID NO: 91099 - DNA, 25 bp, Saccharomyces pastorianus
tgctgtaacgcaaacaaacatatgg

SEQ ID NO: 91100 - DNA, 25 bp, Saccharomyces pastorianus
tgaagatttccccattgacacatgg

SEQ ID NO: 91101 - DNA, 25 bp, Saccharomyces pastorianus
gatttccccattgacacatgggcca

SEQ ID NO: 91102 - DNA, 25 bp, Saccharomyces pastorianus
ttccccattgacacatgggccaatg

SEQ ID NO: 91103 - DNA, 25 bp, Saccharomyces pastorianus
aaaagcaatgctgtaacgcaaacaa

SEQ ID NO: 91104 - DNA, 25 bp, Saccharomyces pastorianus
cacaagcccaaagtaaaatagattt

SEQ ID NO: 91105 - DNA, 25 bp, Saccharomyces pastorianus
gtacggacgttgctgctgcacaagc

SEQ ID NO: 91106 - DNA, 25 bp, Saccharomyces pastorianus
taagattttcactctgcctgaggat

SEQ ID NO: 91107 - DNA, 25 bp, Saccharomyces pastorianus
gagtgctaatgctcctttactaaaa

SEQ ID NO: 91108 - DNA, 25 bp, Saccharomyces pastorianus
agccgttggtgtctctaatttttct

SEQ ID NO: 91109 - DNA, 25 bp, Saccharomyces pastorianus
aagaggctacgttgttctggccaaa

SEQ ID NO: 91110 - DNA, 25 bp, Saccharomyces pastorianus
ggtaacgttctgtgcattccaacat

SEQ ID NO: 91111 - DNA, 25 bp, Saccharomyces pastorianus
aaggtggtaccagctactaatcaaa

SEQ ID NO: 91112 - DNA, 25 bp, Saccharomyces pastorianus
ggtgttgagccagcacagcttatta

SEQ ID NO: 91113 - DNA, 25 bp, Saccharomyces pastorianus
atggcactgttgacatcgatactaa

SEQ ID NO: 91114 - DNA, 25 bp, Saccharomyces pastorianus
ttggccagtgcctttgaaaaccgac

SEQ ID NO: 91115 - DNA, 25 bp, Saccharomyces pastorianus
gtatcgttgttgaagcctactcacc

SEQ ID NO: 91116 - DNA, 25 bp, Saccharomyces pastorianus
gaaattcatccattgctaccacaag

SEQ ID NO: 91117 - DNA, 25 bp, Saccharomyces pastorianus
acgccatcgtcatcactgaacttaa

SEQ ID NO: 91118 - DNA, 25 bp, Saccharomyces pastorianus
cattcaatggtactcaagggactta

SEQ ID NO: 91119 - DNA, 25 bp, Saccharomyces pastorianus
cattcaatcctgtttcggagacaaa

SEQ ID NO: 91120 - DNA, 25 bp, Saccharomyces pastorianus
aatgtcctattttacttcttgtaga

SEQ ID NO: 91121 - DNA, 25 bp, Saccharomyces pastorianus
gaaattcaatcacccaggtctacct

SEQ ID NO: 91122 - DNA, 25 bp, Saccharomyces pastorianus
gggacagtcatagcggtcaattact

SEQ ID NO: 91123 - DNA, 25 bp, Saccharomyces pastorianus
gtatagatactaacaacgccatcgt

SEQ ID NO: 91124 - DNA, 25 bp, Saccharomyces pastorianus
agggtcttttaattcgctgcgaaat

SEQ ID NO: 91125 - DNA, 25 bp, Saccharomyces pastorianus
gtgttttgccccattatcaatgcac

SEQ ID NO: 91126 - DNA, 25 bp, Saccharomyces pastorianus
ggtggaggcaaatatctctgactat

SEQ ID NO: 91127 - DNA, 25 bp, Saccharomyces pastorianus
aagtcgctgatttaactggctctaa

SEQ ID NO: 91128 - DNA, 25 bp, Saccharomyces pastorianus
tacgatccaaaatatgtttcagcat

SEQ ID NO: 91129 - DNA, 25 bp, Saccharomyces pastorianus
cacataacaatttaggcggaggctt

SEQ ID NO: 91130 - DNA, 25 bp, Saccharomyces pastorianus
attagtactgggaatggccgcctac

SEQ ID NO: 91131 - DNA, 25 bp, Saccharomyces pastorianus
attttcaaaggagtgggcaagccca

SEQ ID NO: 91132 - DNA, 25 bp, Saccharomyces pastorianus
actaaggctgaatatgtgacacata

SEQ ID NO: 91133 - DNA, 25 bp, Saccharomyces pastorianus
gggcatctggccttacaaaaattta

SEQ ID NO: 91134 - DNA, 25 bp, Saccharomyces pastorianus
gagtcatgtggtgaagcttatgcaa

SEQ ID NO: 91135 - DNA, 25 bp, Saccharomyces pastorianus
ggccgcctacggaagaagtttccat

SEQ ID NO: 91136 - DNA, 25 bp, Saccharomyces pastorianus
ctttgccatgcattatatgatcgat

SEQ ID NO: 91137 - DNA, 25 bp, Saccharomyces pastorianus
aggatatcacagcaatctattcagt

SEQ ID NO: 91138 - DNA, 25 bp, Saccharomyces pastorianus
gaaggcttgcactttaatgtgtcat

SEQ ID NO: 91139 - DNA, 25 bp, Saccharomyces pastorianus
ctcgatgtccgccattgttaaagtt

SEQ ID NO: 91140 - DNA, 25 bp, Saccharomyces pastorianus
ccgccattgttaaagttgtctctaa

SEQ ID NO: 91141 - DNA, 25 bp, Saccharomyces pastorianus
attactgggaactcgatgtccgcca

SEQ ID NO: 91142 - DNA, 25 bp, Saccharomyces pastorianus
gattttggacattactgggaactcg

SEQ ID NO: 91143 - DNA, 25 bp, Saccharomyces pastorianus
gtccgccattgttaaagttgtctct

SEQ ID NO: 91144 - DNA, 25 bp, Saccharomyces pastorianus
gatgtccgccattgttaaagttgtc

SEQ ID NO: 91145 - DNA, 25 bp, Saccharomyces pastorianus
ttttggacattactgggaactcgat

SEQ ID NO: 91146 - DNA, 25 bp, Saccharomyces pastorianus
tactgggaactcgatgtccgccatt

SEQ ID NO: 91147 - DNA, 25 bp, Saccharomyces pastorianus
atgggttccatgattttggacatta

SEQ ID NO: 91148 - DNA, 25 bp, Saccharomyces pastorianus
ggaactcgatgtccgccattgttaa

SEQ ID NO: 91149 - DNA, 25 bp, Saccharomyces pastorianus
tgttaaagttgtctctaatatcatc

SEQ ID NO: 91150 - DNA, 25 bp, Saccharomyces pastorianus
gaactttagctttaatatgtggatc

SEQ ID NO: 91151 - DNA, 25 bp, Saccharomyces pastorianus
gaatattttccggagacaacatctt

SEQ ID NO: 91152 - DNA, 25 bp, Saccharomyces pastorianus
agccattaagcgcagagtactttct

SEQ ID NO: 91153 - DNA, 25 bp, Saccharomyces pastorianus
gatagaaaacaatcctggtcatgat

SEQ ID NO: 91154 - DNA, 25 bp, Saccharomyces pastorianus
tttcgcaatacccatttgatttaga

SEQ ID NO: 91155 - DNA, 25 bp, Saccharomyces pastorianus
tgaaaaacgacgaacctttgtcaat

SEQ ID NO: 91156 - DNA, 25 bp, Saccharomyces pastorianus
gagaatgtcctgactacgttggaat

SEQ ID NO: 91157 - DNA, 25 bp, Saccharomyces pastorianus
actgagttaggtgtctccgttaatt

SEQ ID NO: 91158 - DNA, 25 bp, Saccharomyces pastorianus
gacgccagctgcaaagaagccatta

SEQ ID NO: 91159 - DNA, 25 bp, Saccharomyces pastorianus
gtactttctgtactcgtatcgagga

SEQ ID NO: 91160 - DNA, 25 bp, Saccharomyces pastorianus
ttttgtttgacatggcgacacaccc

SEQ ID NO: 91161 - DNA, 25 bp, Saccharomyces pastorianus
gttctaaagtcgatccctctattat

SEQ ID NO: 91162 - DNA, 25 bp, Saccharomyces pastorianus
agatggttacattacgctggacgaa

SEQ ID NO: 91163 - DNA, 25 bp, Saccharomyces pastorianus
acagttttgagtacaacgtccagag

SEQ ID NO: 91164 - DNA, 25 bp, Saccharomyces pastorianus
tgagctgggctttcgaactttatga

SEQ ID NO: 91165 - DNA, 25 bp, Saccharomyces pastorianus
ggagccaagacgtcaaagctttcca

SEQ ID NO: 91166 - DNA, 25 bp, Saccharomyces pastorianus
gaaacaatccacctattttgataga

SEQ ID NO: 91167 - DNA, 25 bp, Saccharomyces pastorianus
gaagattttgctaatcaccttttta

SEQ ID NO: 91168 - DNA, 25 bp, Saccharomyces pastorianus
ttaatgaggatgaggcaacgcccga

SEQ ID NO: 91169 - DNA, 25 bp, Saccharomyces pastorianus
atgctaaccattgtggcgagtgttt

SEQ ID NO: 91170 - DNA, 25 bp, Saccharomyces pastorianus
gagggattgccctagtggccaacta

SEQ ID NO: 91171 - DNA, 25 bp, Saccharomyces pastorianus
ttttccatttggttctcctgaagat

SEQ ID NO: 91172 - DNA, 25 bp, Saccharomyces pastorianus
gataacacattccagagatactcaa

SEQ ID NO: 91173 - DNA, 25 bp, Saccharomyces pastorianus
gaagcatgtcaaaaggtcgttttac

SEQ ID NO: 91174 - DNA, 25 bp, Saccharomyces pastorianus
aaaccaaggtatttgcagcagtcaa

SEQ ID NO: 91175 - DNA, 25 bp, Saccharomyces pastorianus
atcaggaagattctgtggcgttgca

SEQ ID NO: 91176 - DNA, 25 bp, Saccharomyces pastorianus
ttctagagactacaaccaatctgat

SEQ ID NO: 91177 - DNA, 25 bp, Saccharomyces pastorianus
gcttaattcgggagccaaagtgttt

SEQ ID NO: 91178 - DNA, 25 bp, Saccharomyces pastorianus
tcgtctactcatttcggcaacaaaa

SEQ ID NO: 91179 - DNA, 25 bp, Saccharomyces pastorianus
ggatttggacaccagtatatgggaa

SEQ ID NO: 91180 - DNA, 25 bp, Saccharomyces pastorianus
ggcgttgcagaaatggtatcggatt

SEQ ID NO: 91181 - DNA, 25 bp, Saccharomyces pastorianus
aagtcctcgtctttgaagcatgtca

SEQ ID NO: 91182 - DNA, 25 bp, Saccharomyces pastorianus
gcaacaaaaggctatctgaggcata

SEQ ID NO: 91183 - DNA, 25 bp, Saccharomyces pastorianus
ggtcgtgttttaacttccagcggag

SEQ ID NO: 91184 - DNA, 25 bp, Saccharomyces pastorianus
atatgcatctggttggatccgtaag

SEQ ID NO: 91185 - DNA, 25 bp, Saccharomyces pastorianus
acttcgttgggatatgcaggcgttc

SEQ ID NO: 91186 - DNA, 25 bp, Saccharomyces pastorianus
gtggatttgctgattacttcgttgg

SEQ ID NO: 91187 - DNA, 25 bp, Saccharomyces pastorianus
taatatcaagcacaccacatggaag

SEQ ID NO: 91188 - DNA, 25 bp, Saccharomyces pastorianus
actataaaaaggctcctcctccaag

SEQ ID NO: 91189 - DNA, 25 bp, Saccharomyces pastorianus
gaattctatcgacctctctaatatc

SEQ ID NO: 91190 - DNA, 25 bp, Saccharomyces pastorianus
aacagtttgcaacccttgaaggacg

SEQ ID NO: 91191 - DNA, 25 bp, Saccharomyces pastorianus
tcagcggagcgctatccttagagaa

SEQ ID NO: 91192 - DNA, 25 bp, Saccharomyces pastorianus
gttcccatgcctgaattctctaagt

SEQ ID NO: 91193 - DNA, 25 bp, Saccharomyces pastorianus
attttggtgcaatcaactctttgag

SEQ ID NO: 91194 - DNA, 25 bp, Saccharomyces pastorianus
ccattgtggcattttgctctaggta

SEQ ID NO: 91195 - DNA, 25 bp, Saccharomyces pastorianus
gctaacactagattggccagataca

SEQ ID NO: 91196 - DNA, 25 bp, Saccharomyces pastorianus
tcctccaaaagttgtgtcttccaag

SEQ ID NO: 91197 - DNA, 25 bp, Saccharomyces pastorianus
ttgcctttggctattccatggaata

SEQ ID NO: 91198 - DNA, 25 bp, Saccharomyces pastorianus
ataagtctttgcctcaaggaccagc

SEQ ID NO: 91199 - DNA, 25 bp, Saccharomyces pastorianus
gctctaggtataattgcctttggct

SEQ ID NO: 91200 - DNA, 25 bp, Saccharomyces pastorianus
gcattgctaatgttgttcactttta

SEQ ID NO: 91201 - DNA, 25 bp, Saccharomyces pastorianus
gtcttccaagaatataggttcggca

SEQ ID NO: 91202 - DNA, 25 bp, Saccharomyces pastorianus
gtatctacattgattcctccaaaag

SEQ ID NO: 91203 - DNA, 25 bp, Saccharomyces pastorianus
ggcaccaaatgccaagcgcattgct

SEQ ID NO: 91204 - DNA, 25 bp, Saccharomyces pastorianus
aaggaccagcaccagccatcaaggc

SEQ ID NO: 91205 - DNA, 25 bp, Saccharomyces pastorianus
aaattttacccgtagagcatcagga

SEQ ID NO: 91206 - DNA, 25 bp, Saccharomyces pastorianus
aaagtattggcagcacatatcggca

SEQ ID NO: 91207 - DNA, 25 bp, Saccharomyces pastorianus
gtcccaaactgaatgctttactgaa

SEQ ID NO: 91208 - DNA, 25 bp, Saccharomyces pastorianus
gagaggctaccattaaacaacgaca

SEQ ID NO: 91209 - DNA, 25 bp, Saccharomyces pastorianus
aatggtgctcaaaagcctacttgaa

SEQ ID NO: 91210 - DNA, 25 bp, Saccharomyces pastorianus
agtcgggctcacagactttggttga

SEQ ID NO: 91211 - DNA, 25 bp, Saccharomyces pastorianus
tttgcaccgagtcttatccacgatt

SEQ ID NO: 91212 - DNA, 25 bp, Saccharomyces pastorianus
tcattttccatatacgatgccttga

SEQ ID NO: 91213 - DNA, 25 bp, Saccharomyces pastorianus
tatccacgattttgacggcgagaaa

SEQ ID NO: 91214 - DNA, 25 bp, Saccharomyces pastorianus
gatattcatgcagtggctagcgtat

SEQ ID NO: 91215 - DNA, 25 bp, Saccharomyces pastorianus
tatcaggtgctgcattgatcgcatt

SEQ ID NO: 91216 - DNA, 25 bp, Saccharomyces pastorianus
gttacaaaaagaagtcttacacctg

SEQ ID NO: 91217 - DNA, 25 bp, Saccharomyces pastorianus
cgaacggctcatacaaaaccaaagg

SEQ ID NO: 91218 - DNA, 25 bp, Saccharomyces pastorianus
agggcttccatacgaacggctcata

SEQ ID NO: 91219 - DNA, 25 bp, Saccharomyces pastorianus
tatagggcttccatacgaacggctc

SEQ ID NO: 91220 - DNA, 25 bp, Saccharomyces pastorianus
gcttccatacgaacggctcatacaa

SEQ ID NO: 91221 - DNA, 25 bp, Saccharomyces pastorianus
gccaagaaaagacttcaccaccatt

SEQ ID NO: 91222 - DNA, 25 bp, Saccharomyces pastorianus
gggaagtatagaaatttgccaagaa

SEQ ID NO: 91223 - DNA, 25 bp, Saccharomyces pastorianus
cttacacctgtatagggcttccata

SEQ ID NO: 91224 - DNA, 25 bp, Saccharomyces pastorianus
cattgaacacttgttacgggtcgga

SEQ ID NO: 91225 - DNA, 25 bp, Saccharomyces pastorianus
caccattgaacacttgttacgggtc

SEQ ID NO: 91226 - DNA, 25 bp, Saccharomyces pastorianus
atgcctaagagattaagtgggttac

SEQ ID NO: 91227 - DNA, 25 bp, Saccharomyces pastorianus
acggtgcagcacagatgacaatcca

SEQ ID NO: 91228 - DNA, 25 bp, Saccharomyces pastorianus
tttccccgaacagctaaagtgcatg

SEQ ID NO: 91229 - DNA, 25 bp, Saccharomyces pastorianus
gccgccctgggtgttggaattgcca

SEQ ID NO: 91230 - DNA, 25 bp, Saccharomyces pastorianus
gaaccctggtgatgttgtcgtttgt

SEQ ID NO: 91231 - DNA, 25 bp, Saccharomyces pastorianus
gatgcctaaatttttgaaccctggt

SEQ ID NO: 91232 - DNA, 25 bp, Saccharomyces pastorianus
taggcgaattggatttccccgaaca

SEQ ID NO: 91233 - DNA, 25 bp, Saccharomyces pastorianus
aatagcactctcattcaatgtccct

SEQ ID NO: 91234 - DNA, 25 bp, Saccharomyces pastorianus
atttcgcatttccttcgcagttaaa

SEQ ID NO: 91235 - DNA, 25 bp, Saccharomyces pastorianus
aattctctgttcgtgatttcgcatt

SEQ ID NO: 91236 - DNA, 25 bp, Saccharomyces pastorianus
gaaacaggctcttttcaattctctg

SEQ ID NO: 91237 - DNA, 25 bp, Saccharomyces pastorianus
aggatttttcctttccattggcatg

SEQ ID NO: 91238 - DNA, 25 bp, Saccharomyces pastorianus
gttcgctactgttccaactggtggt

SEQ ID NO: 91239 - DNA, 25 bp, Saccharomyces pastorianus
ttcgctactgttccaactggtggtg

SEQ ID NO: 91240 - DNA, 25 bp, Saccharomyces pastorianus
ttccaactggtggtgcttcttctgc

SEQ ID NO: 91241 - DNA, 25 bp, Saccharomyces pastorianus
agttcgctactgttccaactggtgg

SEQ ID NO: 91242 - DNA, 25 bp, Saccharomyces pastorianus
aagaagttcgctactgttccaactg

SEQ ID NO: 91243 - DNA, 25 bp, Saccharomyces pastorianus
tgctgctgccggtgctgccggtgct

SEQ ID NO: 91244 - DNA, 25 bp, Saccharomyces pastorianus
aaagaagttcgctactgttccaact

SEQ ID NO: 91245 - DNA, 25 bp, Saccharomyces pastorianus
aagttcgctactgttccaactggtg

SEQ ID NO: 91246 - DNA, 25 bp, Saccharomyces pastorianus
agaagttcgctactgttccaactgg

SEQ ID NO: 91247 - DNA, 25 bp, Saccharomyces pastorianus
gaagttcgctactgttccaactggt

SEQ ID NO: 91248 - DNA, 25 bp, Saccharomyces pastorianus
cgctactgttccaactggtggtgct

SEQ ID NO: 91249 - DNA, 25 bp, Saccharomyces pastorianus
gaaatcatcgctgaaggtcaaaaga

SEQ ID NO: 91250 - DNA, 25 bp, Saccharomyces pastorianus
agctgcttacttattattggttcaa

SEQ ID NO: 91251 - DNA, 25 bp, Saccharomyces pastorianus
attgttgtcctctttggaaggtaag

SEQ ID NO: 91252 - DNA, 25 bp, Saccharomyces pastorianus
cgtcgtcgaatctgtcggtgctgaa

SEQ ID NO: 91253 - DNA, 25 bp, Saccharomyces pastorianus
caacgaattgttgtcctctttggaa

SEQ ID NO: 91254 - DNA, 25 bp, Saccharomyces pastorianus
aaggtggtaacgctgccccatccgc

SEQ ID NO: 91255 - DNA, 25 bp, Saccharomyces pastorianus
atctgtcggtgctgaagtcgatgaa

SEQ ID NO: 91256 - DNA, 25 bp, Saccharomyces pastorianus
tctttggaagaaatcatcgctgaag

SEQ ID NO: 91257 - DNA, 25 bp, Saccharomyces pastorianus
tggttcaaggtggtaacgctgcccc

SEQ ID NO: 91258 - DNA, 25 bp, Saccharomyces pastorianus
gtcgatgaagccagaatcaacgaat

SEQ ID NO: 91259 - DNA, 25 bp, Saccharomyces pastorianus
gaaatacttagctgcttacttatta

SEQ ID NO: 91260 - DNA, 25 bp, Saccharomyces pastorianus
gataacgagtctgaattgagggcca

SEQ ID NO: 91261 - DNA, 25 bp, Saccharomyces pastorianus
agggtgaacctcagagtacatcgat

SEQ ID NO: 91262 - DNA, 25 bp, Saccharomyces pastorianus
aatgatctcaaagttctaagcgaat

SEQ ID NO: 91263 - DNA, 25 bp, Saccharomyces pastorianus
gatgatgatatcagcgagtacttcg

SEQ ID NO: 91264 - DNA, 25 bp, Saccharomyces pastorianus
caaagtactctcttggaagtgaact

SEQ ID NO: 91265 - DNA, 25 bp, Saccharomyces pastorianus
gagtacttcgccacttacaatggga

SEQ ID NO: 91266 - DNA, 25 bp, Saccharomyces pastorianus
aagatgtgttgaaactgccgcagat

SEQ ID NO: 91267 - DNA, 25 bp, Saccharomyces pastorianus
tgagggccagtcaatcgcagcagat

SEQ ID NO: 91268 - DNA, 25 bp, Saccharomyces pastorianus
gaaaacatttggcaattctccggaa

SEQ ID NO: 91269 - DNA, 25 bp, Saccharomyces pastorianus
aatgtcaggctctccaaataggcga

SEQ ID NO: 91270 - DNA, 25 bp, Saccharomyces pastorianus
agtgtgcagattactgaaggctcaa

SEQ ID NO: 91271 - DNA, 25 bp, Saccharomyces pastorianus
gtatcggcaccttcattgacaacaa

SEQ ID NO: 91272 - DNA, 25 bp, Saccharomyces pastorianus
accgttttcaccttcttgatgttga

SEQ ID NO: 91273 - DNA, 25 bp, Saccharomyces pastorianus
cgttcgcggcgtcactgatggtaaa

SEQ ID NO: 91274 - DNA, 25 bp, Saccharomyces pastorianus
tgctgcggttggtattcgctatact

SEQ ID NO: 91275 - DNA, 25 bp, Saccharomyces pastorianus
acatacgccatgactgtgttcagtt

SEQ ID NO: 91276 - DNA, 25 bp, Saccharomyces pastorianus
ttaccttcctactactgtgtatcgg

SEQ ID NO: 91277 - DNA, 25 bp, Saccharomyces pastorianus
gtcatgtctagttctgtcgctaatt

SEQ ID NO: 91278 - DNA, 25 bp, Saccharomyces pastorianus
gcatcgttttctctgtcatgtctag

SEQ ID NO: 91279 - DNA, 25 bp, Saccharomyces pastorianus
ggctataccgatcccacaatgttga

SEQ ID NO: 91280 - DNA, 25 bp, Saccharomyces pastorianus
ggatctgctacggttatgggctaac

SEQ ID NO: 91281 - DNA, 25 bp, Saccharomyces pastorianus
tactgttctgtggtgagtccttcaa

SEQ ID NO: 91282 - DNA, 25 bp, Saccharomyces pastorianus
cacagaggtggtggtcaaatcatcc

SEQ ID NO: 91283 - DNA, 25 bp, Saccharomyces pastorianus
tctggtgtttcggtccagacggtaa

SEQ ID NO: 91284 - DNA, 25 bp, Saccharomyces pastorianus
aggtactccattgtttaccgtcaag

SEQ ID NO: 91285 - DNA, 25 bp, Saccharomyces pastorianus
atcaaggattccgttgttgctgctt

SEQ ID NO: 91286 - DNA, 25 bp, Saccharomyces pastorianus
gctgctttccaatgggctaccaagg

SEQ ID NO: 91287 - DNA, 25 bp, Saccharomyces pastorianus
gtggtatctactccgtcttaaacaa

SEQ ID NO: 91288 - DNA, 25 bp, Saccharomyces pastorianus
caaagaccaggtactccattgttta

SEQ ID NO: 91289 - DNA, 25 bp, Saccharomyces pastorianus
ttacatgccgatgctatccacagag

SEQ ID NO: 91290 - DNA, 25 bp, Saccharomyces pastorianus
aaggctgtccaatacttgcacgaaa

SEQ ID NO: 91291 - DNA, 25 bp, Saccharomyces pastorianus
gtcaaatcatcccaaccatgagaag

SEQ ID NO: 91292 - DNA, 25 bp, Saccharomyces pastorianus
ggtcgaaattcaatgtccagaacaa

SEQ ID NO: 91293 - DNA, 25 bp, Saccharomyces pastorianus
gttaccgcattgtatgactaccaag

SEQ ID NO: 91294 - DNA, 25 bp, Saccharomyces pastorianus
tatccacagtatgctgctgcgcaat

SEQ ID NO: 91295 - DNA, 25 bp, Saccharomyces pastorianus
agctcctggcgttgaaactgttacc

SEQ ID NO: 91296 - DNA, 25 bp, Saccharomyces pastorianus
ggatacggttatggtgccgcagcac

SEQ ID NO: 91297 - DNA, 25 bp, Saccharomyces pastorianus
aagctgctggtgatttgtctttccc

SEQ ID NO: 91298 - DNA, 25 bp, Saccharomyces pastorianus
cagcgtactccggacgtgaacgaat

SEQ ID NO: 91299 - DNA, 25 bp, Saccharomyces pastorianus
tgggtatgatccagcaactgccact

SEQ ID NO: 91300 - DNA, 25 bp, Saccharomyces pastorianus
tgttccgggtacttatccacagtat

SEQ ID NO: 91301 - DNA, 25 bp, Saccharomyces pastorianus
actgggctaggcttccaacaatcac

SEQ ID NO: 91302 - DNA, 25 bp, Saccharomyces pastorianus
tatggtgtagcaaccgccgaaggct

SEQ ID NO: 91303 - DNA, 25 bp, Saccharomyces pastorianus
taatcctctaacatcacctgttgcg

SEQ ID NO: 91304 - DNA, 25 bp, Saccharomyces pastorianus
aaaattgcccagtttgctctaaagt

SEQ ID NO: 91305 - DNA, 25 bp, Saccharomyces pastorianus
gatcttgtagtttcaatacgcgaga

SEQ ID NO: 91306 - DNA, 25 bp, Saccharomyces pastorianus
ggtgacacaatgatccgcaaagcca

SEQ ID NO: 91307 - DNA, 25 bp, Saccharomyces pastorianus
gagaagtactcatatccacaggata

SEQ ID NO: 91308 - DNA, 25 bp, Saccharomyces pastorianus
gatcatcatcgatgctgaaccgatc

SEQ ID NO: 91309 - DNA, 25 bp, Saccharomyces pastorianus
tacttgcagcttaccggacgttgaa

SEQ ID NO: 91310 - DNA, 25 bp, Saccharomyces pastorianus
aggatatttcgcttctggacgcaag

SEQ ID NO: 91311 - DNA, 25 bp, Saccharomyces pastorianus
gatgaactcccatgtaatacttgca

SEQ ID NO: 91312 - DNA, 25 bp, Saccharomyces pastorianus
agttatccagcgattgtttgaacaa

SEQ ID NO: 91313 - DNA, 25 bp, Saccharomyces pastorianus
gatactgagatttctgaggcgccca

SEQ ID NO: 91314 - DNA, 25 bp, Saccharomyces pastorianus
taaaggccaacaatagtccgtcaaa

SEQ ID NO: 91315 - DNA, 25 bp, Saccharomyces pastorianus
acggcaattgcgatccgaatggtga

SEQ ID NO: 91316 - DNA, 25 bp, Saccharomyces pastorianus
attcctctagctgagaaggtgccta

SEQ ID NO: 91317 - DNA, 25 bp, Saccharomyces pastorianus
gtgtgaggtcgactctaacggcaat

SEQ ID NO: 91318 - DNA, 25 bp, Saccharomyces pastorianus
gttaatactttcgatgctgttgcag

SEQ ID NO: 91319 - DNA, 25 bp, Saccharomyces pastorianus
gaaaattgcgccattgtccttgaag

SEQ ID NO: 91320 - DNA, 25 bp, Saccharomyces pastorianus
gtccttgaagctattgccgagcatg

SEQ ID NO: 91321 - DNA, 25 bp, Saccharomyces pastorianus
tatcatatcgccattcctggattca

SEQ ID NO: 91322 - DNA, 25 bp, Saccharomyces pastorianus
gccagcgtttcattttatcagcaag

SEQ ID NO: 91323 - DNA, 25 bp, Saccharomyces pastorianus
tgctgttgcagtgtggagtcttcca

SEQ ID NO: 91324 - DNA, 25 bp, Saccharomyces pastorianus
ttgcttttagtaactcgccagcgtt

SEQ ID NO: 91325 - DNA, 25 bp, Saccharomyces pastorianus
ctcgcgtaaagcaagtcattccaaa

SEQ ID NO: 91326 - DNA, 25 bp, Saccharomyces pastorianus
gaatttgcatcatccacattacata

SEQ ID NO: 91327 - DNA, 25 bp, Saccharomyces pastorianus
tgagattgtctgttctttgacggaa

SEQ ID NO: 91328 - DNA, 25 bp, Saccharomyces pastorianus
ggaagcctggagagtactacaaaca

SEQ ID NO: 91329 - DNA, 25 bp, Saccharomyces pastorianus
ggacaaatcccagcaatctagccaa

SEQ ID NO: 91330 - DNA, 25 bp, Saccharomyces pastorianus
gagtacgtgcattggtccgattgtc

SEQ ID NO: 91331 - DNA, 25 bp, Saccharomyces pastorianus
ttggtccgattgtcgacaggcaagt

SEQ ID NO: 91332 - DNA, 25 bp, Saccharomyces pastorianus
gggaaaccccatgatgatgtgattg

SEQ ID NO: 91333 - DNA, 25 bp, Saccharomyces pastorianus
gaggcatagggctttgaccaacttt

SEQ ID NO: 91334 - DNA, 25 bp, Saccharomyces pastorianus
aaggactggtctggaatttcgcaat

SEQ ID NO: 91335 - DNA, 25 bp, Saccharomyces pastorianus
ttctttgacggaaacagctctgaaa

SEQ ID NO: 91336 - DNA, 25 bp, Saccharomyces pastorianus
agaaatcccaaattaagctgccatg

SEQ ID NO: 91337 - DNA, 25 bp, Saccharomyces pastorianus
aagcgctctcaacgaatatgccaag

SEQ ID NO: 91338 - DNA, 25 bp, Saccharomyces pastorianus
tttgaccaggtaccatgaggaacaa

SEQ ID NO: 91339 - DNA, 25 bp, Saccharomyces pastorianus
aaggcaacacagaaaactcgatcgt

SEQ ID NO: 91340 - DNA, 25 bp, Saccharomyces pastorianus
atcggaagtaacagaccaaggcaac

SEQ ID NO: 91341 - DNA, 25 bp, Saccharomyces pastorianus
agttgcaacggctgagaccactaca

SEQ ID NO: 91342 - DNA, 25 bp, Saccharomyces pastorianus
aaaatccgaagaacatccacctggg

SEQ ID NO: 91343 - DNA, 25 bp, Saccharomyces pastorianus
tcccctagtctttgacaccttagag

SEQ ID NO: 91344 - DNA, 25 bp, Saccharomyces pastorianus
attgttacctggaaaatcatcggaa

SEQ ID NO: 91345 - DNA, 25 bp, Saccharomyces pastorianus
tataggaaacttgacgctcccctag

SEQ ID NO: 91346 - DNA, 25 bp, Saccharomyces pastorianus
aatcgacaggcctgaagttgcaacg

SEQ ID NO: 91347 - DNA, 25 bp, Saccharomyces pastorianus
gacaccttagagttctacttatact

SEQ ID NO: 91348 - DNA, 25 bp, Saccharomyces pastorianus
agacacattggacccagctttgctg

SEQ ID NO: 91349 - DNA, 25 bp, Saccharomyces pastorianus
gtttcgatcaatccaccaacgttaa

SEQ ID NO: 91350 - DNA, 25 bp, Saccharomyces pastorianus
gcgtatcctgattgagttgttgaca

SEQ ID NO: 91351 - DNA, 25 bp, Saccharomyces pastorianus
atgtcatcttacaaagcgatctgga

SEQ ID NO: 91352 - DNA, 25 bp, Saccharomyces pastorianus
ggtccaagaatggttcgtgacgtct

SEQ ID NO: 91353 - DNA, 25 bp, Saccharomyces pastorianus
taacggctccgaatttgttcacaaa

SEQ ID NO: 91354 - DNA, 25 bp, Saccharomyces pastorianus
gcgatcatgcaggaagctggtttaa

SEQ ID NO: 91355 - DNA, 25 bp, Saccharomyces pastorianus
ttagactcgcttattattcgtaacg

SEQ ID NO: 91356 - DNA, 25 bp, Saccharomyces pastorianus
gctgcattcataagagttaacggct

SEQ ID NO: 91357 - DNA, 25 bp, Saccharomyces pastorianus
tggctacaaacagggcagacacatt

SEQ ID NO: 91358 - DNA, 25 bp, Saccharomyces pastorianus
tgagtttccctcacttcgtgatagg

SEQ ID NO: 91359 - DNA, 25 bp, Saccharomyces pastorianus
gaaacagtgctcaataatcgtgacg

SEQ ID NO: 91360 - DNA, 25 bp, Saccharomyces pastorianus
ttgatgtctactctatcgtcgttac

SEQ ID NO: 91361 - DNA, 25 bp, Saccharomyces pastorianus
tatgaagcaggcgacatccactcat

SEQ ID NO: 91362 - DNA, 25 bp, Saccharomyces pastorianus
caaggctactagcactggatgcaag

SEQ ID NO: 91363 - DNA, 25 bp, Saccharomyces pastorianus
gggatactatcttccgtctgaaacc

SEQ ID NO: 91364 - DNA, 25 bp, Saccharomyces pastorianus
gcgttccgacttattaccaaggcta

SEQ ID NO: 91365 - DNA, 25 bp, Saccharomyces pastorianus
gcactggctgtcattctcttagaaa

SEQ ID NO: 91366 - DNA, 25 bp, Saccharomyces pastorianus
gaagcatacctcatctaagcaagat

SEQ ID NO: 91367 - DNA, 25 bp, Saccharomyces pastorianus
gtaattctgtcgcaagcactacaat

SEQ ID NO: 91368 - DNA, 25 bp, Saccharomyces pastorianus
cactcatccgaaccagttgtcgaag

SEQ ID NO: 91369 - DNA, 25 bp, Saccharomyces pastorianus
tcgtcgttacattccaccttgaaaa

SEQ ID NO: 91370 - DNA, 25 bp, Saccharomyces pastorianus
gctaggatcctacgtacgttcctaa

SEQ ID NO: 91371 - DNA, 25 bp, Saccharomyces pastorianus
aagccggacttaatcattgccattg

SEQ ID NO: 91372 - DNA, 25 bp, Saccharomyces pastorianus
tacgttcctaaaggagcccggcgtg

SEQ ID NO: 91373 - DNA, 25 bp, Saccharomyces pastorianus
gacaagaaccgttattttgcagcta

SEQ ID NO: 91374 - DNA, 25 bp, Saccharomyces pastorianus
gatctgcctgccgaaatgttgaatg

SEQ ID NO: 91375 - DNA, 25 bp, Saccharomyces pastorianus
cggcgtgccaaccatcagaattttt

SEQ ID NO: 91376 - DNA, 25 bp, Saccharomyces pastorianus
tggtggtttcattcctgctaggatc

SEQ ID NO: 91377 - DNA, 25 bp, Saccharomyces pastorianus
aactatgtcaagtatccgctgagag

SEQ ID NO: 91378 - DNA, 25 bp, Saccharomyces pastorianus
cttcgggatttttgttctacacgat

SEQ ID NO: 91379 - DNA, 25 bp, Saccharomyces pastorianus
gtaccacacttcattacgctttgag

SEQ ID NO: 91380 - DNA, 25 bp, Saccharomyces pastorianus
gaatctactgacattgttttccata

SEQ ID NO: 91381 - DNA, 25 bp, Saccharomyces pastorianus
caaggatttgaatcgggtccaccta

SEQ ID NO: 91382 - DNA, 25 bp, Saccharomyces pastorianus
ggtggactccatggtctaggaaact

SEQ ID NO: 91383 - DNA, 25 bp, Saccharomyces pastorianus
ggtccacctatacatgatccggtag

SEQ ID NO: 91384 - DNA, 25 bp, Saccharomyces pastorianus
ggattgatcctgacgcagcgaatta

SEQ ID NO: 91385 - DNA, 25 bp, Saccharomyces pastorianus
aattttttgctcatacctacaagga

SEQ ID NO: 91386 - DNA, 25 bp, Saccharomyces pastorianus
ggtagctttgatgccgcttttggaa

SEQ ID NO: 91387 - DNA, 25 bp, Saccharomyces pastorianus
gaattacatattccgtgatcccgat

SEQ ID NO: 91388 - DNA, 25 bp, Saccharomyces pastorianus
aaactgtaacccaaatctttctgct

SEQ ID NO: 91389 - DNA, 25 bp, Saccharomyces pastorianus
ttatgggtgggatccatcgtctgtg

SEQ ID NO: 91390 - DNA, 25 bp, Saccharomyces pastorianus
acaaggccatagctacttacaaggt

SEQ ID NO: 91391 - DNA, 25 bp, Saccharomyces pastorianus
atcgtctgtggttggatttcgctac

SEQ ID NO: 91392 - DNA, 25 bp, Saccharomyces pastorianus
taaaatcatctgctgttgtgcccca

SEQ ID NO: 91393 - DNA, 25 bp, Saccharomyces pastorianus
gccattctccagtttttccttatgg

SEQ ID NO: 91394 - DNA, 25 bp, Saccharomyces pastorianus
cttgcacgttttggtagtacatcta

SEQ ID NO: 91395 - DNA, 25 bp, Saccharomyces pastorianus
gagttaatttttcttcccattcagg

SEQ ID NO: 91396 - DNA, 25 bp, Saccharomyces pastorianus
gttccaaagttgttgtacccgacat

SEQ ID NO: 91397 - DNA, 25 bp, Saccharomyces pastorianus
acagcacatctgtttttcgccattc

SEQ ID NO: 91398 - DNA, 25 bp, Saccharomyces pastorianus
aattctcatttctgttagggctagt

SEQ ID NO: 91399 - DNA, 25 bp, Saccharomyces pastorianus
agggtcaagactccatcgaaactgt

SEQ ID NO: 91400 - DNA, 25 bp, Saccharomyces pastorianus
ggaggatacattcttactacttcga

SEQ ID NO: 91401 - DNA, 25 bp, Saccharomyces pastorianus
gtttcgatatctgaaccccatcttt

SEQ ID NO: 91402 - DNA, 25 bp, Saccharomyces pastorianus
atcagtgatgccgtttacttccttc

SEQ ID NO: 91403 - DNA, 25 bp, Saccharomyces pastorianus
tggccatgaaaacccgcagttgcta

SEQ ID NO: 91404 - DNA, 25 bp, Saccharomyces pastorianus
cagatgtgctgtgactgggttccat

SEQ ID NO: 91405 - DNA, 25 bp, Saccharomyces pastorianus
caagggcgtatatgtcgggtacaac

SEQ ID NO: 91406 - DNA, 25 bp, Saccharomyces pastorianus
acagtttcgatggagtcttgaccct

SEQ ID NO: 91407 - DNA, 25 bp, Saccharomyces pastorianus
aatatcgtcattatccttgtcgctg

SEQ ID NO: 91408 - DNA, 25 bp, Saccharomyces pastorianus
agtaagaatgtatcctcctttgagc

SEQ ID NO: 91409 - DNA, 25 bp, Saccharomyces pastorianus
aacaactttggaacctcacacgatc

SEQ ID NO: 91410 - DNA, 25 bp, Saccharomyces pastorianus
aaatgcttttctcttcgaagtagta

SEQ ID NO: 91411 - DNA, 25 bp, Saccharomyces pastorianus
ggcttagcagatttacccttattaa

SEQ ID NO: 91412 - DNA, 25 bp, Saccharomyces pastorianus
gaagtaaacggcatcactgatccaa

SEQ ID NO: 91413 - DNA, 25 bp, Saccharomyces pastorianus
taatagttcactctaccttctagcc

SEQ ID NO: 91414 - DNA, 25 bp, Saccharomyces pastorianus
ggaattgatattccctcatcatttg

SEQ ID NO: 91415 - DNA, 25 bp, Saccharomyces pastorianus
atctgtcctaagtccgatttgtcga

SEQ ID NO: 91416 - DNA, 25 bp, Saccharomyces pastorianus
gttgaagttgcacactacacaggaa

SEQ ID NO: 91417 - DNA, 25 bp, Saccharomyces pastorianus
aaaagtagtcaaggaggctctcgaa

SEQ ID NO: 91418 - DNA, 25 bp, Saccharomyces pastorianus
gggcttttcacgttttatgatggaa

SEQ ID NO: 91419 - DNA, 25 bp, Saccharomyces pastorianus
gatacagatgcaggtcgtttgagaa

SEQ ID NO: 91420 - DNA, 25 bp, Saccharomyces pastorianus
ttttttacatattcccacaccttgg

SEQ ID NO: 91421 - DNA, 25 bp, Saccharomyces pastorianus
gcgcacattaacagcgggcccaaat

SEQ ID NO: 91422 - DNA, 25 bp, Saccharomyces pastorianus
gaagaccttgatgaacccaaatttg

SEQ ID NO: 91423 - DNA, 25 bp, Saccharomyces pastorianus
aatgacgcgtattcgaacttagtgg

SEQ ID NO: 91424 - DNA, 25 bp, Saccharomyces pastorianus
gtaatctccaacgaacagtgttcta

SEQ ID NO: 91425 - DNA, 25 bp, Saccharomyces pastorianus
ttcaaacccaccatcataccaaagt

SEQ ID NO: 91426 - DNA, 25 bp, Saccharomyces pastorianus
tatttgtgacaaagcatctgatgcc

SEQ ID NO: 91427 - DNA, 25 bp, Saccharomyces pastorianus
atattgcccacagatgggtccgccg

SEQ ID NO: 91428 - DNA, 25 bp, Saccharomyces pastorianus
tctgatgcctcaagatttaaccttt

SEQ ID NO: 91429 - DNA, 25 bp, Saccharomyces pastorianus
gagttctattcacgcaatcggtagt

SEQ ID NO: 91430 - DNA, 25 bp, Saccharomyces pastorianus
tcggtcctcgaatgaagcaatatct

SEQ ID NO: 91431 - DNA, 25 bp, Saccharomyces pastorianus
agtcgtttcatgttctcagcacggg

SEQ ID NO: 91432 - DNA, 25 bp, Saccharomyces pastorianus
caaagttccgaggatgtcatcacca

SEQ ID NO: 91433 - DNA, 25 bp, Saccharomyces pastorianus
gtagtggacggcacagtcgtttcat

SEQ ID NO: 91434 - DNA, 25 bp, Saccharomyces pastorianus
gggtccgccgagttcaacgtgaaat

SEQ ID NO: 91435 - DNA, 25 bp, Saccharomyces pastorianus
gatatattctttgtgtcctagacta

SEQ ID NO: 91436 - DNA, 25 bp, Saccharomyces pastorianus
aaggccaggatcatcctcttgaggc

SEQ ID NO: 91437 - DNA, 25 bp, Saccharomyces pastorianus
cagccttttatacctcgcttcttaa

SEQ ID NO: 91438 - DNA, 25 bp, Saccharomyces pastorianus
caaagtctactttcccaaggccagg

SEQ ID NO: 91439 - DNA, 25 bp, Saccharomyces pastorianus
gaaaactccttctgggacagcacca

SEQ ID NO: 91440 - DNA, 25 bp, Saccharomyces pastorianus
gaagaacccttcatttggcccgaag

SEQ ID NO: 91441 - DNA, 25 bp, Saccharomyces pastorianus
gacttaactgcttgggctcagacgc

SEQ ID NO: 91442 - DNA, 25 bp, Saccharomyces pastorianus
gactatctttatcatatctacggct

SEQ ID NO: 91443 - DNA, 25 bp, Saccharomyces pastorianus
ttacgacgcagctgcttcatgggaa

SEQ ID NO: 91444 - DNA, 25 bp, Saccharomyces pastorianus
gtatgaacctacagacgacgcgatt

SEQ ID NO: 91445 - DNA, 25 bp, Saccharomyces pastorianus
gcgaagcacacaccgtatcaagcaa

SEQ ID NO: 91446 - DNA, 25 bp, Saccharomyces pastorianus
attcatcgtcccaaaatcgttcaac

SEQ ID NO: 91447 - DNA, 25 bp, Saccharomyces pastorianus
tcactttaaccaccatttctttaag

SEQ ID NO: 91448 - DNA, 25 bp, Saccharomyces pastorianus
aatacctactgtttcatactttcac

SEQ ID NO: 91449 - DNA, 25 bp, Saccharomyces pastorianus
ttcgaggaaacataactttcaacat

SEQ ID NO: 91450 - DNA, 25 bp, Saccharomyces pastorianus
acataactttcaacatcaggctctt

SEQ ID NO: 91451 - DNA, 25 bp, Saccharomyces pastorianus
ttaggaacgctaaacatatcattgt

SEQ ID NO: 91452 - DNA, 25 bp, Saccharomyces pastorianus
ctactgtttcatactttcactttaa

SEQ ID NO: 91453 - DNA, 25 bp, Saccharomyces pastorianus
tcatactttcactttaaccaccatt

SEQ ID NO: 91454 - DNA, 25 bp, Saccharomyces pastorianus
tactttcactttaaccaccatttct

SEQ ID NO: 91455 - DNA, 25 bp, Saccharomyces pastorianus
tatcattgtttacttttcgaggaaa

SEQ ID NO: 91456 - DNA, 25 bp, Saccharomyces pastorianus
attatattctattctctctactggg

SEQ ID NO: 91457 - DNA, 25 bp, Saccharomyces pastorianus
taaccaccatttctttaagctaaag

SEQ ID NO: 91458 - DNA, 25 bp, Saccharomyces pastorianus
aaagcctgacgttatcatctgcgcg

SEQ ID NO: 91459 - DNA, 25 bp, Saccharomyces pastorianus
gcaagccttgatcgatgcccaaaag

SEQ ID NO: 91460 - DNA, 25 bp, Saccharomyces pastorianus
aggatgctcatattgtctctgtcac

SEQ ID NO: 91461 - DNA, 25 bp, Saccharomyces pastorianus
ttaatttcgggctcaggttccaact

SEQ ID NO: 91462 - DNA, 25 bp, Saccharomyces pastorianus
gggccaaggcaagatcccagtttga

SEQ ID NO: 91463 - DNA, 25 bp, Saccharomyces pastorianus
atccagcgctaccaggttgtttcga

SEQ ID NO: 91464 - DNA, 25 bp, Saccharomyces pastorianus
ggtttgttcgctatacccatataca

SEQ ID NO: 91465 - DNA, 25 bp, Saccharomyces pastorianus
cgcgggctggttattgatccttgga

SEQ ID NO: 91466 - DNA, 25 bp, Saccharomyces pastorianus
ttgagccaactgcaatctgtgccga

SEQ ID NO: 91467 - DNA, 25 bp, Saccharomyces pastorianus
tcgatggtaccacacacgcaattga

SEQ ID NO: 91468 - DNA, 25 bp, Saccharomyces pastorianus
gatccttggatctactttcttgagc

SEQ ID NO: 91469 - DNA, 25 bp, Saccharomyces pastorianus
actgcttctaaatcccgtatcattg

SEQ ID NO: 91470 - DNA, 25 bp, Saccharomyces pastorianus
agagtcctttcttctgaacaacggc

SEQ ID NO: 91471 - DNA, 25 bp, Saccharomyces pastorianus
actctctagctaccaagctttgtac

SEQ ID NO: 91472 - DNA, 25 bp, Saccharomyces pastorianus
aaactggcgtttactcctggtcaag

SEQ ID NO: 91473 - DNA, 25 bp, Saccharomyces pastorianus
gggacattccttttctcatattgtg

SEQ ID NO: 91474 - DNA, 25 bp, Saccharomyces pastorianus
attgccctgtccttattccattttt

SEQ ID NO: 91475 - DNA, 25 bp, Saccharomyces pastorianus
aactattgctatgcatactgcggga

SEQ ID NO: 91476 - DNA, 25 bp, Saccharomyces pastorianus
gtgggcaattggcactcagctactg

SEQ ID NO: 91477 - DNA, 25 bp, Saccharomyces pastorianus
ggaatgcctcgtagaaagctttctt

SEQ ID NO: 91478 - DNA, 25 bp, Saccharomyces pastorianus
ttaacctctttattattgccctgtc

SEQ ID NO: 91479 - DNA, 25 bp, Saccharomyces pastorianus
ggcacattcctttgctattctggaa

SEQ ID NO: 91480 - DNA, 25 bp, Saccharomyces pastorianus
gtggcccatcgaatttgaaccaatt

SEQ ID NO: 91481 - DNA, 25 bp, Saccharomyces pastorianus
gaagtacttccccttaattcaattg

SEQ ID NO: 91482 - DNA, 25 bp, Saccharomyces pastorianus
cactacggccactacaatcatttat

SEQ ID NO: 91483 - DNA, 25 bp, Saccharomyces pastorianus
tgaaccaatttcaaggccgcggcca

SEQ ID NO: 91484 - DNA, 25 bp, Saccharomyces pastorianus
ggtcgatcgacaatgccaacgtgca

SEQ ID NO: 91485 - DNA, 25 bp, Saccharomyces pastorianus
acgccatggtggtttactagtctat

SEQ ID NO: 91486 - DNA, 25 bp, Saccharomyces pastorianus
aagctgatccaacctacggaatctc

SEQ ID NO: 91487 - DNA, 25 bp, Saccharomyces pastorianus
gggaaattctcaacgccatggtggt

SEQ ID NO: 91488 - DNA, 25 bp, Saccharomyces pastorianus
tcacctctgggttcatatcatgcat

SEQ ID NO: 91489 - DNA, 25 bp, Saccharomyces pastorianus
tgccaatgtgccatcttcgcaaaga

SEQ ID NO: 91490 - DNA, 25 bp, Saccharomyces pastorianus
gtggcacagattcaggcagagcttc

SEQ ID NO: 91491 - DNA, 25 bp, Saccharomyces pastorianus
gcacgggtttgattctgataaagat

SEQ ID NO: 91492 - DNA, 25 bp, Saccharomyces pastorianus
aggattctcgtttggattatctgac

SEQ ID NO: 91493 - DNA, 25 bp, Saccharomyces pastorianus
agatgacggcgataacgacaataat

SEQ ID NO: 91494 - DNA, 25 bp, Saccharomyces pastorianus
atacgcgaagtttctgggcgtggat

SEQ ID NO: 91495 - DNA, 25 bp, Saccharomyces pastorianus
tagagccaccaaatacgcgaagttt

SEQ ID NO: 91496 - DNA, 25 bp, Saccharomyces pastorianus
gtgacgttcgacaaggattctcgtt

SEQ ID NO: 91497 - DNA, 25 bp, Saccharomyces pastorianus
taactttgaatatttagcccagcta

SEQ ID NO: 91498 - DNA, 25 bp, Saccharomyces pastorianus
aagtagcgtaaagcctattttgaag

SEQ ID NO: 91499 - DNA, 25 bp, Saccharomyces pastorianus
tagcccagctaaataatgtcaaatt

SEQ ID NO: 91500 - DNA, 25 bp, Saccharomyces pastorianus
gaatctgatgaatcctggcacgggt

SEQ ID NO: 91501 - DNA, 25 bp, Saccharomyces pastorianus
ggattatctgactggctttcacaag

SEQ ID NO: 91502 - DNA, 25 bp, Saccharomyces pastorianus
actgcattatctcctacgcttgttg

SEQ ID NO: 91503 - DNA, 25 bp, Saccharomyces pastorianus
aaatcctccgtcttatcatttttcg

SEQ ID NO: 91504 - DNA, 25 bp, Saccharomyces pastorianus
tgtcgtttgcctttctttggtttat

SEQ ID NO: 91505 - DNA, 25 bp, Saccharomyces pastorianus
aggctttacgctactttcattattg

SEQ ID NO: 91506 - DNA, 25 bp, Saccharomyces pastorianus
ccgaatcttctgtctttcttcaatt

SEQ ID NO: 91507 - DNA, 25 bp, Saccharomyces pastorianus
gttatcgccgtcatctttatcagaa

SEQ ID NO: 91508 - DNA, 25 bp, Saccharomyces pastorianus
aaacccgtgccaggattcatcagat

SEQ ID NO: 91509 - DNA, 25 bp, Saccharomyces pastorianus
aaacttcgcgtatttggtggctcta

SEQ ID NO: 91510 - DNA, 25 bp, Saccharomyces pastorianus
atctgaacttttttactcttggctt

SEQ ID NO: 91511 - DNA, 25 bp, Saccharomyces pastorianus
tgggttccaatgtctccaattcaac

SEQ ID NO: 91512 - DNA, 25 bp, Saccharomyces pastorianus
gtatatttccgtgattgctcctttc

SEQ ID NO: 91513 - DNA, 25 bp, Saccharomyces pastorianus
gaatttcacttttattccgccgaag

SEQ ID NO: 91514 - DNA, 25 bp, Saccharomyces pastorianus
gacggtgactaatatggaggctctc

SEQ ID NO: 91515 - DNA, 25 bp, Saccharomyces pastorianus
ggacagattaagtctcgctcatatg

SEQ ID NO: 91516 - DNA, 25 bp, Saccharomyces pastorianus
acactactcccgcattaactgattt

SEQ ID NO: 91517 - DNA, 25 bp, Saccharomyces pastorianus
tatcaactcttatctatccattcct

SEQ ID NO: 91518 - DNA, 25 bp, Saccharomyces pastorianus
gaggctctcagattatatacggaaa

SEQ ID NO: 91519 - DNA, 25 bp, Saccharomyces pastorianus
gggagtgccaccagaaacggatttc

SEQ ID NO: 91520 - DNA, 25 bp, Saccharomyces pastorianus
atttccaggctccttcgtgattgaa

SEQ ID NO: 91521 - DNA, 25 bp, Saccharomyces pastorianus
aatggcagctccaggtgcggacgac

SEQ ID NO: 91522 - DNA, 25 bp, Saccharomyces pastorianus
gattctatcaatctgctactgccat

SEQ ID NO: 91523 - DNA, 25 bp, Saccharomyces pastorianus
tgatgtttttacagcttatgccaaa

SEQ ID NO: 91524 - DNA, 25 bp, Saccharomyces pastorianus
gtacaagtacttaacttcatttgga

SEQ ID NO: 91525 - DNA, 25 bp, Saccharomyces pastorianus
ttgatacctttgaattccttggtgg

SEQ ID NO: 91526 - DNA, 25 bp, Saccharomyces pastorianus
aactttggaggcatattgactattg

SEQ ID NO: 91527 - DNA, 25 bp, Saccharomyces pastorianus
cttggtggccttggcgatatcttca

SEQ ID NO: 91528 - DNA, 25 bp, Saccharomyces pastorianus
tacaagtacttaacttcatttggat

SEQ ID NO: 91529 - DNA, 25 bp, Saccharomyces pastorianus
aaactttggaggcatattgactatt

SEQ ID NO: 91530 - DNA, 25 bp, Saccharomyces pastorianus
gatacctttgaattccttggtggcc

SEQ ID NO: 91531 - DNA, 25 bp, Saccharomyces pastorianus
tacctttgaattccttggtggcctt

SEQ ID NO: 91532 - DNA, 25 bp, Saccharomyces pastorianus
tccttggtggccttggcgatatctt

SEQ ID NO: 91533 - DNA, 25 bp, Saccharomyces pastorianus
atacctttgaattccttggtggcct

SEQ ID NO: 91534 - DNA, 25 bp, Saccharomyces pastorianus
ctttggaggcatattgactattgat

SEQ ID NO: 91535 - DNA, 25 bp, Saccharomyces pastorianus
gggataaacccaatggaccgatctt

SEQ ID NO: 91536 - DNA, 25 bp, Saccharomyces pastorianus
tggcgatatcttcaccaaccttctt

SEQ ID NO: 91537 - DNA, 25 bp, Saccharomyces pastorianus
gctatgcttgacgttcttatccttc

SEQ ID NO: 91538 - DNA, 25 bp, Saccharomyces pastorianus
aaggcggcggaagcaccgacttcac

SEQ ID NO: 91539 - DNA, 25 bp, Saccharomyces pastorianus
gtggccttggcgatatcttcaccaa

SEQ ID NO: 91540 - DNA, 25 bp, Saccharomyces pastorianus
caccgacagctctcaagtacaagta

SEQ ID NO: 91541 - DNA, 25 bp, Saccharomyces pastorianus
gactattgatttatccttctattgg

SEQ ID NO: 91542 - DNA, 25 bp, Saccharomyces pastorianus
tacctttgaattccttggtggcctt

SEQ ID NO: 91543 - DNA, 25 bp, Saccharomyces pastorianus
gttaccgctatgcttgacgttctta

SEQ ID NO: 91544 - DNA, 25 bp, Saccharomyces pastorianus
ggacagtaactttgatacctttgaa

SEQ ID NO: 91545 - DNA, 25 bp, Saccharomyces pastorianus
tttggattttcaattggacagtaac

SEQ ID NO: 91546 - DNA, 25 bp, Saccharomyces pastorianus
ttgatttcaagaaccctcatgacat

SEQ ID NO: 91547 - DNA, 25 bp, Saccharomyces pastorianus
tttcaagaaccctcatgacatcatt

SEQ ID NO: 91548 - DNA, 25 bp, Saccharomyces pastorianus
atttcaagaaccctcatgacatcat

SEQ ID NO: 91549 - DNA, 25 bp, Saccharomyces pastorianus
gttgatttcaagaaccctcatgaca

SEQ ID NO: 91550 - DNA, 25 bp, Saccharomyces pastorianus
tgagagctgtcggtggtgaagtcgg

SEQ ID NO: 91551 - DNA, 25 bp, Saccharomyces pastorianus
gagagctgtcggtggtgaagtcggt

SEQ ID NO: 91552 - DNA, 25 bp, Saccharomyces pastorianus
ggttgtcgtgttgatttcaagaacc

SEQ ID NO: 91553 - DNA, 25 bp, Saccharomyces pastorianus
gttgtcgtgttgatttcaagaaccc

SEQ ID NO: 91554 - DNA, 25 bp, Saccharomyces pastorianus
ttgtcgtgttgatttcaagaaccct

SEQ ID NO: 91555 - DNA, 25 bp, Saccharomyces pastorianus
tgatttcaagaaccctcatgacatc

SEQ ID NO: 91556 - DNA, 25 bp, Saccharomyces pastorianus
tgttgatttcaagaaccctcatgac

SEQ ID NO: 91557 - DNA, 25 bp, Saccharomyces pastorianus
ggcaatcaggtccatactttcaaaa

SEQ ID NO: 91558 - DNA, 25 bp, Saccharomyces pastorianus
ggaaaaaactaccagctcgaaagct

SEQ ID NO: 91559 - DNA, 25 bp, Saccharomyces pastorianus
gcattgaaactgtcggaaggcttaa

SEQ ID NO: 91560 - DNA, 25 bp, Saccharomyces pastorianus
acatactgccacacctcagaagaaa

SEQ ID NO: 91561 - DNA, 25 bp, Saccharomyces pastorianus
aatttgtcacggaccttgatattaa

SEQ ID NO: 91562 - DNA, 25 bp, Saccharomyces pastorianus
gagcacgcagactatcatttagcat

SEQ ID NO: 91563 - DNA, 25 bp, Saccharomyces pastorianus
gacttttacagaccagaaggctctt

SEQ ID NO: 91564 - DNA, 25 bp, Saccharomyces pastorianus
atcaggtccagttgcgtacaagggc

SEQ ID NO: 91565 - DNA, 25 bp, Saccharomyces pastorianus
gaatcatccaaaaacctttctttcg

SEQ ID NO: 91566 - DNA, 25 bp, Saccharomyces pastorianus
aagaccaaactcacaacatactgcc

SEQ ID NO: 91567 - DNA, 25 bp, Saccharomyces pastorianus
agggcatcaatttccagagtcacga

SEQ ID NO: 91568 - DNA, 25 bp, Saccharomyces pastorianus
gtgacactgcggttactttaaaaga

SEQ ID NO: 91569 - DNA, 25 bp, Saccharomyces pastorianus
ttagaacgaccacccttattaagag

SEQ ID NO: 91570 - DNA, 25 bp, Saccharomyces pastorianus
aaggtccatctctatctgacgaagt

SEQ ID NO: 91571 - DNA, 25 bp, Saccharomyces pastorianus
agagcaatcgcgaatcctcactgga

SEQ ID NO: 91572 - DNA, 25 bp, Saccharomyces pastorianus
attcgatatcatccgtgacactgcg

SEQ ID NO: 91573 - DNA, 25 bp, Saccharomyces pastorianus
ggtatcgttgatccttttgttgaac

SEQ ID NO: 91574 - DNA, 25 bp, Saccharomyces pastorianus
ttaagagatggcaccactcctctag

SEQ ID NO: 91575 - DNA, 25 bp, Saccharomyces pastorianus
tatcgggcttgaattcgtagaacca

SEQ ID NO: 91576 - DNA, 25 bp, Saccharomyces pastorianus
tgaaccctcggaaaggcctttgacg

SEQ ID NO: 91577 - DNA, 25 bp, Saccharomyces pastorianus
ttacagattggttcggtgctagtga

SEQ ID NO: 91578 - DNA, 25 bp, Saccharomyces pastorianus
acaatgaactcttccaaggtccatc

SEQ ID NO: 91579 - DNA, 25 bp, Saccharomyces pastorianus
aaatgccagatttcagtctcgatct

SEQ ID NO: 91580 - DNA, 25 bp, Saccharomyces pastorianus
ggaaaagcgtcttgctaccacattc

SEQ ID NO: 91581 - DNA, 25 bp, Saccharomyces pastorianus
cataactactttcctcagaactctg

SEQ ID NO: 91582 - DNA, 25 bp, Saccharomyces pastorianus
agatgatactttattccccagcgtg

SEQ ID NO: 91583 - DNA, 25 bp, Saccharomyces pastorianus
agaaatctctagcttcggtgcttcc

SEQ ID NO: 91584 - DNA, 25 bp, Saccharomyces pastorianus
tcctccctaccaaaatattcatcgt

SEQ ID NO: 91585 - DNA, 25 bp, Saccharomyces pastorianus
agaactctgaaagcctgaccgctga

SEQ ID NO: 91586 - DNA, 25 bp, Saccharomyces pastorianus
gaacacattagcagcgccatatcga

SEQ ID NO: 91587 - DNA, 25 bp, Saccharomyces pastorianus
ggtggctgcttctcatactaaaaca

SEQ ID NO: 91588 - DNA, 25 bp, Saccharomyces pastorianus
agtctcgatcttgtctccaatgata

SEQ ID NO: 91589 - DNA, 25 bp, Saccharomyces pastorianus
gtatcgggaccaaatcatgttcaaa

SEQ ID NO: 91590 - DNA, 25 bp, Saccharomyces pastorianus
acctatgatgtaccgttttgcgaca

SEQ ID NO: 91591 - DNA, 25 bp, Saccharomyces pastorianus
gatatcgtctggaacaatgccctgc

SEQ ID NO: 91592 - DNA, 25 bp, Saccharomyces pastorianus
atgtctatcccacgcgaagtatcgg

SEQ ID NO: 91593 - DNA, 25 bp, Saccharomyces pastorianus
aatttcagggcatgtctatcccacg

SEQ ID NO: 91594 - DNA, 25 bp, Saccharomyces pastorianus
atcggcagtcatgttctttggtttc

SEQ ID NO: 91595 - DNA, 25 bp, Saccharomyces pastorianus
aaatttcttcccacaagagcacatg

SEQ ID NO: 91596 - DNA, 25 bp, Saccharomyces pastorianus
ctattgggattaacggagggctcgc

SEQ ID NO: 91597 - DNA, 25 bp, Saccharomyces pastorianus
gggctcgcaagatttgttatcacct

SEQ ID NO: 91598 - DNA, 25 bp, Saccharomyces pastorianus
aatgccgttgaagccaaattcagtc

SEQ ID NO: 91599 - DNA, 25 bp, Saccharomyces pastorianus
caatgccctgcatctaagtaatgaa

SEQ ID NO: 91600 - DNA, 25 bp, Saccharomyces pastorianus
acatgatagctgtgtatttaccttt

SEQ ID NO: 91601 - DNA, 25 bp, Saccharomyces pastorianus
aacttgctgcttgtgatttgaacga

SEQ ID NO: 91602 - DNA, 25 bp, Saccharomyces pastorianus
ggctcagatcattacagttcttgga

SEQ ID NO: 91603 - DNA, 25 bp, Saccharomyces pastorianus
aagtgagattttgcgtacctccctc

SEQ ID NO: 91604 - DNA, 25 bp, Saccharomyces pastorianus
gatatcctacgatccaattggtggt

SEQ ID NO: 91605 - DNA, 25 bp, Saccharomyces pastorianus
atacgcttcgagatggtctgcggct

SEQ ID NO: 91606 - DNA, 25 bp, Saccharomyces pastorianus
cggctcccaacgttattgtcaatga

SEQ ID NO: 91607 - DNA, 25 bp, Saccharomyces pastorianus
aatatctgagtgtcttttgtgctac

SEQ ID NO: 91608 - DNA, 25 bp, Saccharomyces pastorianus
aatgaccgatttggcgccattatgc

SEQ ID NO: 91609 - DNA, 25 bp, Saccharomyces pastorianus
aacccgtttgttagacgtatgcact

SEQ ID NO: 91610 - DNA, 25 bp, Saccharomyces pastorianus
gcactaagcgcgaaatacccactat

SEQ ID NO: 91611 - DNA, 25 bp, Saccharomyces pastorianus
ggtggttctcaaccgaatgaccgat

SEQ ID NO: 91612 - DNA, 25 bp, Saccharomyces pastorianus
atatggtccatcttaccatcatcgc

SEQ ID NO: 91613 - DNA, 25 bp, Saccharomyces pastorianus
gctattggacatcttcccacaaaga

SEQ ID NO: 91614 - DNA, 25 bp, Saccharomyces pastorianus
taatagaggacgacccggacgtatt

SEQ ID NO: 91615 - DNA, 25 bp, Saccharomyces pastorianus
gccgctagattctctatctacagta

SEQ ID NO: 91616 - DNA, 25 bp, Saccharomyces pastorianus
gcagtttatcaacacgctattggac

SEQ ID NO: 91617 - DNA, 25 bp, Saccharomyces pastorianus
tgaagatacattaacaccgccgcta

SEQ ID NO: 91618 - DNA, 25 bp, Saccharomyces pastorianus
aacggatgccggtggtcaacttgta

SEQ ID NO: 91619 - DNA, 25 bp, Saccharomyces pastorianus
tatgcacatacatcggccttctgat

SEQ ID NO: 91620 - DNA, 25 bp, Saccharomyces pastorianus
accatcatcgctgggtgaggctgca

SEQ ID NO: 91621 - DNA, 25 bp, Saccharomyces pastorianus
atgctgatgggcatgctatgcacat

SEQ ID NO: 91622 - DNA, 25 bp, Saccharomyces pastorianus
gtgaggctgcaccaaagcagtttat

SEQ ID NO: 91623 - DNA, 25 bp, Saccharomyces pastorianus
caaggagttctaccgttaatgcaaa

SEQ ID NO: 91624 - DNA, 25 bp, Saccharomyces pastorianus
agctatctagtattggtgactctac

SEQ ID NO: 91625 - DNA, 25 bp, Saccharomyces pastorianus
gaacgacgggattacaaagctgaaa

SEQ ID NO: 91626 - DNA, 25 bp, Saccharomyces pastorianus
gccacgttacccaactcagatgaag

SEQ ID NO: 91627 - DNA, 25 bp, Saccharomyces pastorianus
ggtgactctactgcaatgacatcaa

SEQ ID NO: 91628 - DNA, 25 bp, Saccharomyces pastorianus
aaagcccacaattcatcttctttcg

SEQ ID NO: 91629 - DNA, 25 bp, Saccharomyces pastorianus
atcgccatcaagattatctgcgctg

SEQ ID NO: 91630 - DNA, 25 bp, Saccharomyces pastorianus
aaagcagcgaattgccacgttaccc

SEQ ID NO: 91631 - DNA, 25 bp, Saccharomyces pastorianus
ttatctgcgctgcaaaaatctccag

SEQ ID NO: 91632 - DNA, 25 bp, Saccharomyces pastorianus
ttaacaagttaaccagctctccagt

SEQ ID NO: 91633 - DNA, 25 bp, Saccharomyces pastorianus
ctgactcgcctacatcacaaagaag

SEQ ID NO: 91634 - DNA, 25 bp, Saccharomyces pastorianus
caatttttactctggtgtgcacaag

SEQ ID NO: 91635 - DNA, 25 bp, Saccharomyces pastorianus
aagtagcggtatgcacagtagcggc

SEQ ID NO: 91636 - DNA, 25 bp, Saccharomyces pastorianus
gtatcaccgtcgcattttttgaatt

SEQ ID NO: 91637 - DNA, 25 bp, Saccharomyces pastorianus
atttgatcaaagcaccactcctaat

SEQ ID NO: 91638 - DNA, 25 bp, Saccharomyces pastorianus
atcttcgccatcagagagaccgtac

SEQ ID NO: 91639 - DNA, 25 bp, Saccharomyces pastorianus
cgtaccacacgtttagagcagccag

SEQ ID NO: 91640 - DNA, 25 bp, Saccharomyces pastorianus
gactgcgaatttgtcccaaaccgta

SEQ ID NO: 91641 - DNA, 25 bp, Saccharomyces pastorianus
agcagccaggttgcgaaactcttct

SEQ ID NO: 91642 - DNA, 25 bp, Saccharomyces pastorianus
aactcttctaagatggtttccagca

SEQ ID NO: 91643 - DNA, 25 bp, Saccharomyces pastorianus
ggtttccagcaattgtgtactatca

SEQ ID NO: 91644 - DNA, 25 bp, Saccharomyces pastorianus
gtgtgcacaagagtgttcatcattt

SEQ ID NO: 91645 - DNA, 25 bp, Saccharomyces pastorianus
ttacctccgccgcattatgagaata

SEQ ID NO: 91646 - DNA, 25 bp, Saccharomyces pastorianus
attagtgcagatccagcctgattcc

SEQ ID NO: 91647 - DNA, 25 bp, Saccharomyces pastorianus
gtgtcaacaggattcaagagcgcat

SEQ ID NO: 91648 - DNA, 25 bp, Saccharomyces pastorianus
attatcggtattgacagctgccata

SEQ ID NO: 91649 - DNA, 25 bp, Saccharomyces pastorianus
gcaagcggaccggtcgaatgagtat

SEQ ID NO: 91650 - DNA, 25 bp, Saccharomyces pastorianus
ggagtatatcaaaaacccggctgta

SEQ ID NO: 91651 - DNA, 25 bp, Saccharomyces pastorianus
atacggctatgttgctgtggaacac

SEQ ID NO: 91652 - DNA, 25 bp, Saccharomyces pastorianus
gacagctgccataccagatcaggag

SEQ ID NO: 91653 - DNA, 25 bp, Saccharomyces pastorianus
agtggactttacctcaggccgttat

SEQ ID NO: 91654 - DNA, 25 bp, Saccharomyces pastorianus
aatactgtattgtctgcattatcgg

SEQ ID NO: 91655 - DNA, 25 bp, Saccharomyces pastorianus
gagccaaaccagtcatcgcaagcgg

SEQ ID NO: 91656 - DNA, 25 bp, Saccharomyces pastorianus
gaaaatacatcatccccagctaagg

SEQ ID NO: 91657 - DNA, 25 bp, Saccharomyces pastorianus
ttagacacgtgcctccaggactact

SEQ ID NO: 91658 - DNA, 25 bp, Saccharomyces pastorianus
gtgatagctttgatctttccagaga

SEQ ID NO: 91659 - DNA, 25 bp, Saccharomyces pastorianus
ggactactcgagtatgctaccgtca

SEQ ID NO: 91660 - DNA, 25 bp, Saccharomyces pastorianus
tattgaccaacagttccagctctac

SEQ ID NO: 91661 - DNA, 25 bp, Saccharomyces pastorianus
aacagaacatacagcgtttcagccg

SEQ ID NO: 91662 - DNA, 25 bp, Saccharomyces pastorianus
gatctttccagagacgagaagcctt

SEQ ID NO: 91663 - DNA, 25 bp, Saccharomyces pastorianus
gaaaagcccgatcctttagacacgt

SEQ ID NO: 91664 - DNA, 25 bp, Saccharomyces pastorianus
acgctttcttccgtcacagagatta

SEQ ID NO: 91665 - DNA, 25 bp, Saccharomyces pastorianus
cagcgtagctgattcgacattggag

SEQ ID NO: 91666 - DNA, 25 bp, Saccharomyces pastorianus
agccgctgacaccaatttcgaaaaa

SEQ ID NO: 91667 - DNA, 25 bp, Saccharomyces pastorianus
acctgactatgcactgttgtccaac

SEQ ID NO: 91668 - DNA, 25 bp, Saccharomyces pastorianus
gcgatatacagcatgcacctgacta

SEQ ID NO: 91669 - DNA, 25 bp, Saccharomyces pastorianus
aaccgcataaaaccttttgctcgtg

SEQ ID NO: 91670 - DNA, 25 bp, Saccharomyces pastorianus
ttctacggcggcttcactcagtgag

SEQ ID NO: 91671 - DNA, 25 bp, Saccharomyces pastorianus
gggcaatagccgttataggtcgaat

SEQ ID NO: 91672 - DNA, 25 bp, Saccharomyces pastorianus
taaaccgtatctcgttctaaaggag

SEQ ID NO: 91673 - DNA, 25 bp, Saccharomyces pastorianus
caacgacgagcagcaactttgtatt

SEQ ID NO: 91674 - DNA, 25 bp, Saccharomyces pastorianus
taggtcgaacgcagaatacagccaa

SEQ ID NO: 91675 - DNA, 25 bp, Saccharomyces pastorianus
ataggtcgaattctgcacataggtc

SEQ ID NO: 91676 - DNA, 25 bp, Saccharomyces pastorianus
ttttgctcgtgttatgactgcacag

SEQ ID NO: 91677 - DNA, 25 bp, Saccharomyces pastorianus
gttaaccacgttagaagcaggtctt

SEQ ID NO: 91678 - DNA, 25 bp, Saccharomyces pastorianus
aatgctcggttagctcgtcggaaaa

SEQ ID NO: 91679 - DNA, 25 bp, Saccharomyces pastorianus
gtggcaacaccagccattgcaaagt

SEQ ID NO: 91680 - DNA, 25 bp, Saccharomyces pastorianus
tacctctacgccaacgagtacgaag

SEQ ID NO: 91681 - DNA, 25 bp, Saccharomyces pastorianus
aatacgtcctcgatcttcgaagacc

SEQ ID NO: 91682 - DNA, 25 bp, Saccharomyces pastorianus
atcaaataccggtcatagcgagatt

SEQ ID NO: 91683 - DNA, 25 bp, Saccharomyces pastorianus
gacgctgcgttggaaattacctcta

SEQ ID NO: 91684 - DNA, 25 bp, Saccharomyces pastorianus
ggtcatttgcctttattacacactc

SEQ ID NO: 91685 - DNA, 25 bp, Saccharomyces pastorianus
atgatatcttactcagacgctgcgt

SEQ ID NO: 91686 - DNA, 25 bp, Saccharomyces pastorianus
tgaaaacttcacctgccaatacgtc

SEQ ID NO: 91687 - DNA, 25 bp, Saccharomyces pastorianus
ggcggacagctcaagttccacagga

SEQ ID NO: 91688 - DNA, 25 bp, Saccharomyces pastorianus
acagcatttgacgaatgtcccacgc

SEQ ID NO: 91689 - DNA, 25 bp, Saccharomyces pastorianus
agagactatggcgttttgattgaaa

SEQ ID NO: 91690 - DNA, 25 bp, Saccharomyces pastorianus
gagattgttgcgttttccgatgccg

SEQ ID NO: 91691 - DNA, 25 bp, Saccharomyces pastorianus
tacgttgttctagcttttgtcccat

SEQ ID NO: 91692 - DNA, 25 bp, Saccharomyces pastorianus
ttgtcccattggctttttcatttgt

SEQ ID NO: 91693 - DNA, 25 bp, Saccharomyces pastorianus
taaagttcctttgcttgctgataag

SEQ ID NO: 91694 - DNA, 25 bp, Saccharomyces pastorianus
ggcgcccaagttttatttgcctcca

SEQ ID NO: 91695 - DNA, 25 bp, Saccharomyces pastorianus
gcatggaccaaccttcccagaaaag

SEQ ID NO: 91696 - DNA, 25 bp, Saccharomyces pastorianus
agaatcattccttatccagagacta

SEQ ID NO: 91697 - DNA, 25 bp, Saccharomyces pastorianus
gaaattcgaagatcagggcgcccaa

SEQ ID NO: 91698 - DNA, 25 bp, Saccharomyces pastorianus
gccaccatcaaacctgacgttaaag

SEQ ID NO: 91699 - DNA, 25 bp, Saccharomyces pastorianus
agttttgccatgcaactggacccca

SEQ ID NO: 91700 - DNA, 25 bp, Saccharomyces pastorianus
tcaggatcacctgcaatagggtcat

SEQ ID NO: 91701 - DNA, 25 bp, Saccharomyces pastorianus
gattatcctctgaatttcactgctt

SEQ ID NO: 91702 - DNA, 25 bp, Saccharomyces pastorianus
cactgcttgcaatctatgtttaatc

SEQ ID NO: 91703 - DNA, 25 bp, Saccharomyces pastorianus
tcatatggtatgtactgacagcgat

SEQ ID NO: 91704 - DNA, 25 bp, Saccharomyces pastorianus
atcgtcaggatcaactgctctcttg

SEQ ID NO: 91705 - DNA, 25 bp, Saccharomyces pastorianus
gtggttaacagcaccttgaaagcta

SEQ ID NO: 91706 - DNA, 25 bp, Saccharomyces pastorianus
gggtttaagtctacatcaggatcac

SEQ ID NO: 91707 - DNA, 25 bp, Saccharomyces pastorianus
aactgctctcttggcggtggttaac

SEQ ID NO: 91708 - DNA, 25 bp, Saccharomyces pastorianus
gcaataccttggatagcatttttca

SEQ ID NO: 91709 - DNA, 25 bp, Saccharomyces pastorianus
agttcatcatcatcgtcaggatcaa

SEQ ID NO: 91710 - DNA, 25 bp, Saccharomyces pastorianus
atagggtcatcgctacccgggagat

SEQ ID NO: 91711 - DNA, 25 bp, Saccharomyces pastorianus
acgggatcgacgtggctaagactga

SEQ ID NO: 91712 - DNA, 25 bp, Saccharomyces pastorianus
atttattgcgtctgggttcaacact

SEQ ID NO: 91713 - DNA, 25 bp, Saccharomyces pastorianus
gagactcaaagatgctgtaccgttc

SEQ ID NO: 91714 - DNA, 25 bp, Saccharomyces pastorianus
aaggttcagtatacaatgacccatt

SEQ ID NO: 91715 - DNA, 25 bp, Saccharomyces pastorianus
gaaagaaatcgtcaaccggttgagt

SEQ ID NO: 91716 - DNA, 25 bp, Saccharomyces pastorianus
gttgagtacgaccacccaggatatc

SEQ ID NO: 91717 - DNA, 25 bp, Saccharomyces pastorianus
atgacccattcatcaaagatcttga

SEQ ID NO: 91718 - DNA, 25 bp, Saccharomyces pastorianus
gaagcacacccaaggtttacgttga

SEQ ID NO: 91719 - DNA, 25 bp, Saccharomyces pastorianus
atgctgtaccgttcacgccgtttaa

SEQ ID NO: 91720 - DNA, 25 bp, Saccharomyces pastorianus
gtgaacgtacagaattcgagactca

SEQ ID NO: 91721 - DNA, 25 bp, Saccharomyces pastorianus
gagaaactacgcacctacgaggaat

SEQ ID NO: 91722 - DNA, 25 bp, Saccharomyces pastorianus
ggacaactatattatcaaaggtgtc

SEQ ID NO: 91723 - DNA, 25 bp, Saccharomyces pastorianus
aagaaggacaactatattatcaaag

SEQ ID NO: 91724 - DNA, 25 bp, Saccharomyces pastorianus
cgctaccgccgctccaaaagaaaag

SEQ ID NO: 91725 - DNA, 25 bp, Saccharomyces pastorianus
aggacaactatattatcaaaggtgt

SEQ ID NO: 91726 - DNA, 25 bp, Saccharomyces pastorianus
caaaagaaaagaccagcagtgaaaa

SEQ ID NO: 91727 - DNA, 25 bp, Saccharomyces pastorianus
aaaagaccagcagtgaaaagaagga

SEQ ID NO: 91728 - DNA, 25 bp, Saccharomyces pastorianus
aaggacaactatattatcaaaggtg

SEQ ID NO: 91729 - DNA, 25 bp, Saccharomyces pastorianus
aagaaaagaccagcagtgaaaagaa

SEQ ID NO: 91730 - DNA, 25 bp, Saccharomyces pastorianus
agaaggacaactatattatcaaagg

SEQ ID NO: 91731 - DNA, 25 bp, Saccharomyces pastorianus
gctaccgccgctccaaaagaaaaga

SEQ ID NO: 91732 - DNA, 25 bp, Saccharomyces pastorianus
gaaggacaactatattatcaaaggt

SEQ ID NO: 91733 - DNA, 25 bp, Saccharomyces pastorianus
ggcggacacgtttagctttggtaat

SEQ ID NO: 91734 - DNA, 25 bp, Saccharomyces pastorianus
gaggcactagtccatccaaattcaa

SEQ ID NO: 91735 - DNA, 25 bp, Saccharomyces pastorianus
attcgctgtttgcttttccatcggc

SEQ ID NO: 91736 - DNA, 25 bp, Saccharomyces pastorianus
gaaagctttttaatgcggcggacac

SEQ ID NO: 91737 - DNA, 25 bp, Saccharomyces pastorianus
ttaatgcggcggacacgtttagctt

SEQ ID NO: 91738 - DNA, 25 bp, Saccharomyces pastorianus
gctttggtaatacatctacccgatg

SEQ ID NO: 91739 - DNA, 25 bp, Saccharomyces pastorianus
gtccatccaaattcaaaacctgtct

SEQ ID NO: 91740 - DNA, 25 bp, Saccharomyces pastorianus
atggattcgctgtttgcttttccat

SEQ ID NO: 91741 - DNA, 25 bp, Saccharomyces pastorianus
catctacccgatggaggcactagtc

SEQ ID NO: 91742 - DNA, 25 bp, Saccharomyces pastorianus
ttccatcggcttccggtgcggtagt

SEQ ID NO: 91743 - DNA, 25 bp, Saccharomyces pastorianus
gtagtggcgtcagcagaaagctttt

SEQ ID NO: 91744 - DNA, 25 bp, Saccharomyces pastorianus
tatttcctgatccagaggccactaa

SEQ ID NO: 91745 - DNA, 25 bp, Saccharomyces pastorianus
gatcatcgatacattcatccaagct

SEQ ID NO: 91746 - DNA, 25 bp, Saccharomyces pastorianus
tatttgcgaagctcatccagatgtt

SEQ ID NO: 91747 - DNA, 25 bp, Saccharomyces pastorianus
tagcgagcactaccaagacatgttg

SEQ ID NO: 91748 - DNA, 25 bp, Saccharomyces pastorianus
aaccatatcgtcactatatttgcga

SEQ ID NO: 91749 - DNA, 25 bp, Saccharomyces pastorianus
atttttcaacggattaggcgctgac

SEQ ID NO: 91750 - DNA, 25 bp, Saccharomyces pastorianus
aggcgctgacagatcgttgtgttac

SEQ ID NO: 91751 - DNA, 25 bp, Saccharomyces pastorianus
aggccactaattctgctacgatctt

SEQ ID NO: 91752 - DNA, 25 bp, Saccharomyces pastorianus
ttgcttccgaaaccttatttcctga

SEQ ID NO: 91753 - DNA, 25 bp, Saccharomyces pastorianus
tacaccaggtattctcttgacgagc

SEQ ID NO: 91754 - DNA, 25 bp, Saccharomyces pastorianus
aggcgtgttctcatttttcaacgga

SEQ ID NO: 91755 - DNA, 25 bp, Saccharomyces pastorianus
gatacgaggtcttacatacccttaa

SEQ ID NO: 91756 - DNA, 25 bp, Saccharomyces pastorianus
aggataggcccggtgcaaattccac

SEQ ID NO: 91757 - DNA, 25 bp, Saccharomyces pastorianus
acatcctagggttttgtcaagcaat

SEQ ID NO: 91758 - DNA, 25 bp, Saccharomyces pastorianus
gtgcaccttctaccaatacatatac

SEQ ID NO: 91759 - DNA, 25 bp, Saccharomyces pastorianus
gcaataacgctggtgaaactccgaa

SEQ ID NO: 91760 - DNA, 25 bp, Saccharomyces pastorianus
aaagtattctgctccttctaacatg

SEQ ID NO: 91761 - DNA, 25 bp, Saccharomyces pastorianus
aggatatcgacagccaacaccttca

SEQ ID NO: 91762 - DNA, 25 bp, Saccharomyces pastorianus
ggatcatccgtattttctccttcat

SEQ ID NO: 91763 - DNA, 25 bp, Saccharomyces pastorianus
gttcggtcccagcttttaatcatag

SEQ ID NO: 91764 - DNA, 25 bp, Saccharomyces pastorianus
aagagcggcctctgagtataggaaa

SEQ ID NO: 91765 - DNA, 25 bp, Saccharomyces pastorianus
aaattccactccttcttcaagacat

SEQ ID NO: 91766 - DNA, 25 bp, Saccharomyces pastorianus
cataactcgtcacaatactgctggt

SEQ ID NO: 91767 - DNA, 25 bp, Saccharomyces pastorianus
atggtggtatgtccaatccgtttca

SEQ ID NO: 91768 - DNA, 25 bp, Saccharomyces pastorianus
acaatactgctggtgatgacgatca

SEQ ID NO: 91769 - DNA, 25 bp, Saccharomyces pastorianus
gtataggacttcttattgtcgtctt

SEQ ID NO: 91770 - DNA, 25 bp, Saccharomyces pastorianus
atgctctgaagttgcgttttgatcg

SEQ ID NO: 91771 - DNA, 25 bp, Saccharomyces pastorianus
aggcaattggaatgggtctacgaaa

SEQ ID NO: 91772 - DNA, 25 bp, Saccharomyces pastorianus
ttcaacacttaacaccagcatggct

SEQ ID NO: 91773 - DNA, 25 bp, Saccharomyces pastorianus
gaatacaggaatctactcaaacaac

SEQ ID NO: 91774 - DNA, 25 bp, Saccharomyces pastorianus
aaaacagcaacttgatgctctgaag

SEQ ID NO: 91775 - DNA, 25 bp, Saccharomyces pastorianus
tcaaacaactattcctctagaagag

SEQ ID NO: 91776 - DNA, 25 bp, Saccharomyces pastorianus
acgacgattgttgtataggacttct

SEQ ID NO: 91777 - DNA, 25 bp, Saccharomyces pastorianus
gtcattgaagagtcatctgaaccta

SEQ ID NO: 91778 - DNA, 25 bp, Saccharomyces pastorianus
ttccaatggagcaaattcaacgcga

SEQ ID NO: 91779 - DNA, 25 bp, Saccharomyces pastorianus
gatccgttacgtgttttaggtgaat

SEQ ID NO: 91780 - DNA, 25 bp, Saccharomyces pastorianus
gccgcgacggtaggtggttcacaaa

SEQ ID NO: 91781 - DNA, 25 bp, Saccharomyces pastorianus
gacagtgtaccatcttctgcaacga

SEQ ID NO: 91782 - DNA, 25 bp, Saccharomyces pastorianus
gtgacaccgcatttattagcgggca

SEQ ID NO: 91783 - DNA, 25 bp, Saccharomyces pastorianus
atcgagtagcacaaattcagtcatt

SEQ ID NO: 91784 - DNA, 25 bp, Saccharomyces pastorianus
gaaaatgtgaaccttgccgcgacgg

SEQ ID NO: 91785 - DNA, 25 bp, Saccharomyces pastorianus
acaaccagaagatccgttacgtgtt

SEQ ID NO: 91786 - DNA, 25 bp, Saccharomyces pastorianus
gaaagtgagaatagtccccaacata

SEQ ID NO: 91787 - DNA, 25 bp, Saccharomyces pastorianus
atgaagttacggttcctatggtaga

SEQ ID NO: 91788 - DNA, 25 bp, Saccharomyces pastorianus
gcatctgctttcctttcacaaagtg

SEQ ID NO: 91789 - DNA, 25 bp, Saccharomyces pastorianus
ttagggcttctgtatctcctagttc

SEQ ID NO: 91790 - DNA, 25 bp, Saccharomyces pastorianus
gtgacagcacatcgaatgccccaag

SEQ ID NO: 91791 - DNA, 25 bp, Saccharomyces pastorianus
tatcaaatgcgtcaaattccccggg

SEQ ID NO: 91792 - DNA, 25 bp, Saccharomyces pastorianus
tgaggcgccgtgatctgaaaattct

SEQ ID NO: 91793 - DNA, 25 bp, Saccharomyces pastorianus
gagaacgtttcttgcgagtacttcg

SEQ ID NO: 91794 - DNA, 25 bp, Saccharomyces pastorianus
gggcatgttggctaactccagcaca

SEQ ID NO: 91795 - DNA, 25 bp, Saccharomyces pastorianus
cgagtacttcgtttgcggcattatc

SEQ ID NO: 91796 - DNA, 25 bp, Saccharomyces pastorianus
gatagtagataacttccccacttta

SEQ ID NO: 91797 - DNA, 25 bp, Saccharomyces pastorianus
ggatttccatgtggcgtgacagcac

SEQ ID NO: 91798 - DNA, 25 bp, Saccharomyces pastorianus
ttatccacggtaccctatggtcata

SEQ ID NO: 91799 - DNA, 25 bp, Saccharomyces pastorianus
ctcatcattgttgccgagttcctga

SEQ ID NO: 91800 - DNA, 25 bp, Saccharomyces pastorianus
aatcctgtgggctccatcttagagg

SEQ ID NO: 91801 - DNA, 25 bp, Saccharomyces pastorianus
gatagtgatcttgtgctgcgactca

SEQ ID NO: 91802 - DNA, 25 bp, Saccharomyces pastorianus
gttccttcacacagaaacgggtcag

SEQ ID NO: 91803 - DNA, 25 bp, Saccharomyces pastorianus
aagtactaccgtgttcctggcgagt

SEQ ID NO: 91804 - DNA, 25 bp, Saccharomyces pastorianus
aagaggaagctgtcgctcatccaga

SEQ ID NO: 91805 - DNA, 25 bp, Saccharomyces pastorianus
tacggtcctgcgagacgtctagata

SEQ ID NO: 91806 - DNA, 25 bp, Saccharomyces pastorianus
agacgtccacgtttacgctcaagtt

SEQ ID NO: 91807 - DNA, 25 bp, Saccharomyces pastorianus
ttctaggtctcctcgaaggttacgg

SEQ ID NO: 91808 - DNA, 25 bp, Saccharomyces pastorianus
agatcgacactgttgagtacccctg

SEQ ID NO: 91809 - DNA, 25 bp, Saccharomyces pastorianus
aaggccgtcaagcatgtcagactga

SEQ ID NO: 91810 - DNA, 25 bp, Saccharomyces pastorianus
tgccgaatgggccaagccatctgaa

SEQ ID NO: 91811 - DNA, 25 bp, Saccharomyces pastorianus
tttacctcagatccacagagctaat

SEQ ID NO: 91812 - DNA, 25 bp, Saccharomyces pastorianus
attttgcctacatctttacctcaga

SEQ ID NO: 91813 - DNA, 25 bp, Saccharomyces pastorianus
atgagtactttttcagcctacccat

SEQ ID NO: 91814 - DNA, 25 bp, Saccharomyces pastorianus
ttcagcctacccatttttacattta

SEQ ID NO: 91815 - DNA, 25 bp, Saccharomyces pastorianus
gatggcaagtgctatcactcaacaa

SEQ ID NO: 91816 - DNA, 25 bp, Saccharomyces pastorianus
gtagatcatgaaactgccaagcaac

SEQ ID NO: 91817 - DNA, 25 bp, Saccharomyces pastorianus
agctgcctctaaaatatctcctctt

SEQ ID NO: 91818 - DNA, 25 bp, Saccharomyces pastorianus
atatgttagcacaaggttcgccagc

SEQ ID NO: 91819 - DNA, 25 bp, Saccharomyces pastorianus
tgccttgaagaatttgggtgccgaa

SEQ ID NO: 91820 - DNA, 25 bp, Saccharomyces pastorianus
agactctacagtttccattttgcct

SEQ ID NO: 91821 - DNA, 25 bp, Saccharomyces pastorianus
cattgcgggtgtgtttacgttccta

SEQ ID NO: 91822 - DNA, 25 bp, Saccharomyces pastorianus
gaactcacttacaaaccttttatcg

SEQ ID NO: 91823 - DNA, 25 bp, Saccharomyces pastorianus
taccagcagcgggaaggtttcgtac

SEQ ID NO: 91824 - DNA, 25 bp, Saccharomyces pastorianus
gcgatatcaaatcatgctgccagaa

SEQ ID NO: 91825 - DNA, 25 bp, Saccharomyces pastorianus
gaattccagagcgttatcgggacta

SEQ ID NO: 91826 - DNA, 25 bp, Saccharomyces pastorianus
acaacctactacatgtactgccaac

SEQ ID NO: 91827 - DNA, 25 bp, Saccharomyces pastorianus
gtccgatgatcaatagtaccagcag

SEQ ID NO: 91828 - DNA, 25 bp, Saccharomyces pastorianus
cgagcaaggtgactccgacgaactt

SEQ ID NO: 91829 - DNA, 25 bp, Saccharomyces pastorianus
gtggaaaattttgctcccattgcgg

SEQ ID NO: 91830 - DNA, 25 bp, Saccharomyces pastorianus
gttaacgactaataccgagcaaggt

SEQ ID NO: 91831 - DNA, 25 bp, Saccharomyces pastorianus
aaatctgagctcgttgttccaacat

SEQ ID NO: 91832 - DNA, 25 bp, Saccharomyces pastorianus
tgagggcgcttcacttaacgacgat

SEQ ID NO: 91833 - DNA, 25 bp, Saccharomyces pastorianus
ggatggctcccacgaatcaagatta

SEQ ID NO: 91834 - DNA, 25 bp, Saccharomyces pastorianus
caaacgcacgcatacgaaggctatt

SEQ ID NO: 91835 - DNA, 25 bp, Saccharomyces pastorianus
gttggctggtagatcaccacacttg

SEQ ID NO: 91836 - DNA, 25 bp, Saccharomyces pastorianus
gaaggctattattccccgatgtatc

SEQ ID NO: 91837 - DNA, 25 bp, Saccharomyces pastorianus
agtaccatgctacccatattcttca

SEQ ID NO: 91838 - DNA, 25 bp, Saccharomyces pastorianus
atcccggccccttgtataataatgg

SEQ ID NO: 91839 - DNA, 25 bp, Saccharomyces pastorianus
atattcttcaactccaacacaaacg

SEQ ID NO: 91840 - DNA, 25 bp, Saccharomyces pastorianus
gattatcatccttcagtagccaatt

SEQ ID NO: 91841 - DNA, 25 bp, Saccharomyces pastorianus
ataataccagccgactaccatgcaa

SEQ ID NO: 91842 - DNA, 25 bp, Saccharomyces pastorianus
tatatgacagcaacctacccttatc

SEQ ID NO: 91843 - DNA, 25 bp, Saccharomyces pastorianus
gtcgtacaacggaatagggctcaag

SEQ ID NO: 91844 - DNA, 25 bp, Saccharomyces pastorianus
agttagcgagctacgggaccgactg

SEQ ID NO: 91845 - DNA, 25 bp, Saccharomyces pastorianus
cagggtagtcaacagcagcggcaac

SEQ ID NO: 91846 - DNA, 25 bp, Saccharomyces pastorianus
ggctcaagtcggcaaaagggtcatc

SEQ ID NO: 91847 - DNA, 25 bp, Saccharomyces pastorianus
ataggcgcagaccacagggtagtca

SEQ ID NO: 91848 - DNA, 25 bp, Saccharomyces pastorianus
aacagcagcggatgtcctctttgta

SEQ ID NO: 91849 - DNA, 25 bp, Saccharomyces pastorianus
cacttgctagcaacaataggcgcag

SEQ ID NO: 91850 - DNA, 25 bp, Saccharomyces pastorianus
aagcaggcctcttgctgtgcagaaa

SEQ ID NO: 91851 - DNA, 25 bp, Saccharomyces pastorianus
caaaagggtcatctacgtcgggcca

SEQ ID NO: 91852 - DNA, 25 bp, Saccharomyces pastorianus
acgtgcagcgatcacttgctagcaa

SEQ ID NO: 91853 - DNA, 25 bp, Saccharomyces pastorianus
atgcgatcaaaaaggccagccatga

SEQ ID NO: 91854 - DNA, 25 bp, Saccharomyces pastorianus
gataatgattcaagcgtaccactaa

SEQ ID NO: 91855 - DNA, 25 bp, Saccharomyces pastorianus
aatatgccggcaactcaagcacatc

SEQ ID NO: 91856 - DNA, 25 bp, Saccharomyces pastorianus
tcaagcttcttgacgttggcaataa

SEQ ID NO: 91857 - DNA, 25 bp, Saccharomyces pastorianus
agaggaatgccgtctatgtttgata

SEQ ID NO: 91858 - DNA, 25 bp, Saccharomyces pastorianus
atgactcggatgcacaaaactacaa

SEQ ID NO: 91859 - DNA, 25 bp, Saccharomyces pastorianus
atggcctcgatttcagcaattggtc

SEQ ID NO: 91860 - DNA, 25 bp, Saccharomyces pastorianus
taagtattcgtgtggccaatcaatt

SEQ ID NO: 91861 - DNA, 25 bp, Saccharomyces pastorianus
gcacatccaatagtagccctttgac

SEQ ID NO: 91862 - DNA, 25 bp, Saccharomyces pastorianus
ataacacataagcagtccatagacg

SEQ ID NO: 91863 - DNA, 25 bp, Saccharomyces pastorianus
tgacctcacctcatgagttaactgt

SEQ ID NO: 91864 - DNA, 25 bp, Saccharomyces pastorianus
gacgaaagatctgaacccttataca

SEQ ID NO: 91865 - DNA, 25 bp, Saccharomyces pastorianus
ctggcacaagaggatttcactttgc

SEQ ID NO: 91866 - DNA, 25 bp, Saccharomyces pastorianus
tgcgccaccggcttttattgatgaa

SEQ ID NO: 91867 - DNA, 25 bp, Saccharomyces pastorianus
aggcccaacaatcactatcgaacag

SEQ ID NO: 91868 - DNA, 25 bp, Saccharomyces pastorianus
gttagatactcaaatcgcccagtta

SEQ ID NO: 91869 - DNA, 25 bp, Saccharomyces pastorianus
aacagtggcgagctcgacgacatta

SEQ ID NO: 91870 - DNA, 25 bp, Saccharomyces pastorianus
ttacttactaggtgcgaatgcgcca

SEQ ID NO: 91871 - DNA, 25 bp, Saccharomyces pastorianus
tagattctcaatcctggtccatgac

SEQ ID NO: 91872 - DNA, 25 bp, Saccharomyces pastorianus
tggtccatgacgcaagcccagttaa

SEQ ID NO: 91873 - DNA, 25 bp, Saccharomyces pastorianus
gcccagttaaacttccagctgcaaa

SEQ ID NO: 91874 - DNA, 25 bp, Saccharomyces pastorianus
aacgatatgcccagttacttactag

SEQ ID NO: 91875 - DNA, 25 bp, Saccharomyces pastorianus
atcagtccatgaatcaggcccaaca

SEQ ID NO: 91876 - DNA, 25 bp, Saccharomyces pastorianus
ttgcctttactctgcatggaaactg

SEQ ID NO: 91877 - DNA, 25 bp, Saccharomyces pastorianus
aaattctcactttatttgcgccaat

SEQ ID NO: 91878 - DNA, 25 bp, Saccharomyces pastorianus
gaaaattcgctgatctctcttacag

SEQ ID NO: 91879 - DNA, 25 bp, Saccharomyces pastorianus
ggtaaaccttgctacacggtcacaa

SEQ ID NO: 91880 - DNA, 25 bp, Saccharomyces pastorianus
gaatcgaatatccatgcaatctcaa

SEQ ID NO: 91881 - DNA, 25 bp, Saccharomyces pastorianus
gattctatcctgaaatacatgcccg

SEQ ID NO: 91882 - DNA, 25 bp, Saccharomyces pastorianus
tttatacacgttaacggcccaccag

SEQ ID NO: 91883 - DNA, 25 bp, Saccharomyces pastorianus
acatgatagatgagcccgactggaa

SEQ ID NO: 91884 - DNA, 25 bp, Saccharomyces pastorianus
aaaatgcttctaatgcgaacccgcc

SEQ ID NO: 91885 - DNA, 25 bp, Saccharomyces pastorianus
ccgcctatgcctaacgaatctaaat

SEQ ID NO: 91886 - DNA, 25 bp, Saccharomyces pastorianus
acgcattccctgatctggttgaaac

SEQ ID NO: 91887 - DNA, 25 bp, Saccharomyces pastorianus
gaaggcgcacttcacacaaaacgtc

SEQ ID NO: 91888 - DNA, 25 bp, Saccharomyces pastorianus
gaggactcacctgtaggtcttgaga

SEQ ID NO: 91889 - DNA, 25 bp, Saccharomyces pastorianus
ttaccggaccgttgcatcttaaaga

SEQ ID NO: 91890 - DNA, 25 bp, Saccharomyces pastorianus
gtagtatcgccgaagtcggaccata

SEQ ID NO: 91891 - DNA, 25 bp, Saccharomyces pastorianus
tgaaattgacggttccaggacgatt

SEQ ID NO: 91892 - DNA, 25 bp, Saccharomyces pastorianus
gagaacgtggctctggactacaaga

SEQ ID NO: 91893 - DNA, 25 bp, Saccharomyces pastorianus
aagaaccctcttgatatcgatcctc

SEQ ID NO: 91894 - DNA, 25 bp, Saccharomyces pastorianus
tgcagacccgatcgtcatctaatta

SEQ ID NO: 91895 - DNA, 25 bp, Saccharomyces pastorianus
atcgatcctcctactgatagtgcag

SEQ ID NO: 91896 - DNA, 25 bp, Saccharomyces pastorianus
agaagcctcagcatgtgggaagaac

SEQ ID NO: 91897 - DNA, 25 bp, Saccharomyces pastorianus
ggaatgaccgccaaacctaaagtag

SEQ ID NO: 91898 - DNA, 25 bp, Saccharomyces pastorianus
gaagggtgccaacatgtacgtatat

SEQ ID NO: 91899 - DNA, 25 bp, Saccharomyces pastorianus
ttcttcttttatcttgcttgactca

SEQ ID NO: 91900 - DNA, 25 bp, Saccharomyces pastorianus
aggtttttacgttgattgctgcatc

SEQ ID NO: 91901 - DNA, 25 bp, Saccharomyces pastorianus
gacactatcttggtttcttcttcta

SEQ ID NO: 91902 - DNA, 25 bp, Saccharomyces pastorianus
ggaaaatgggcttgcccgactgtcg

SEQ ID NO: 91903 - DNA, 25 bp, Saccharomyces pastorianus
ggagctccttactgtttcaactgat

SEQ ID NO: 91904 - DNA, 25 bp, Saccharomyces pastorianus
tgctgcatccatcggtcgtgagtat

SEQ ID NO: 91905 - DNA, 25 bp, Saccharomyces pastorianus
gtgtgcgtgtgtatatatgtctgac

SEQ ID NO: 91906 - DNA, 25 bp, Saccharomyces pastorianus
ttaatattgcgcttgcggagctcct

SEQ ID NO: 91907 - DNA, 25 bp, Saccharomyces pastorianus
gttgccttgcagcagacactatctt

SEQ ID NO: 91908 - DNA, 25 bp, Saccharomyces pastorianus
tattgtcaaattgccgatgccctgc

SEQ ID NO: 91909 - DNA, 25 bp, Saccharomyces pastorianus
aacattttcttgatgggcgctttct

SEQ ID NO: 91910 - DNA, 25 bp, Saccharomyces pastorianus
gttcttggttctgtatgccacttga

SEQ ID NO: 91911 - DNA, 25 bp, Saccharomyces pastorianus
acttccacatttcgtccatttaggg

SEQ ID NO: 91912 - DNA, 25 bp, Saccharomyces pastorianus
acgattgttactttagtcctggcaa

SEQ ID NO: 91913 - DNA, 25 bp, Saccharomyces pastorianus
agttcgatttcttcggtagctctca

SEQ ID NO: 91914 - DNA, 25 bp, Saccharomyces pastorianus
atatcctacttcagtcttttcacga

SEQ ID NO: 91915 - DNA, 25 bp, Saccharomyces pastorianus
gatttcctgttctatgatccctata

SEQ ID NO: 91916 - DNA, 25 bp, Saccharomyces pastorianus
attttgtacagtctgtgtcctccac

SEQ ID NO: 91917 - DNA, 25 bp, Saccharomyces pastorianus
gtctcatgtgcagtagctgtttcca

SEQ ID NO: 91918 - DNA, 25 bp, Saccharomyces pastorianus
gtcctccacgacaagtttaacactt

SEQ ID NO: 91919 - DNA, 25 bp, Saccharomyces pastorianus
gatttagtggcttactcccattgac

SEQ ID NO: 91920 - DNA, 25 bp, Saccharomyces pastorianus
gagacgaaacctggttcagggcaaa

SEQ ID NO: 91921 - DNA, 25 bp, Saccharomyces pastorianus
tagccgcgagagctaaaatgcgttc

SEQ ID NO: 91922 - DNA, 25 bp, Saccharomyces pastorianus
gcatggcttaagagcaacccgaata

SEQ ID NO: 91923 - DNA, 25 bp, Saccharomyces pastorianus
cagaccctacggcaagagtgaaaac

SEQ ID NO: 91924 - DNA, 25 bp, Saccharomyces pastorianus
atgcgttcaggaatgttatgtcccc

SEQ ID NO: 91925 - DNA, 25 bp, Saccharomyces pastorianus
atgagacgattgcagaccctacggc

SEQ ID NO: 91926 - DNA, 25 bp, Saccharomyces pastorianus
gatgctgaagtattactagccgcga

SEQ ID NO: 91927 - DNA, 25 bp, Saccharomyces pastorianus
agcacgagaacaaaggccctgaatg

SEQ ID NO: 91928 - DNA, 25 bp, Saccharomyces pastorianus
gagcaacccgaatagctttccggaa

SEQ ID NO: 91929 - DNA, 25 bp, Saccharomyces pastorianus
atagctttccggaatgatgctgaag

SEQ ID NO: 91930 - DNA, 25 bp, Saccharomyces pastorianus
ggagcctaggtaccatttgaacatt

SEQ ID NO: 91931 - DNA, 25 bp, Saccharomyces pastorianus
tagtcaactttaccttagatagctt

SEQ ID NO: 91932 - DNA, 25 bp, Saccharomyces pastorianus
tatactcctcaagtttttccaacaa

SEQ ID NO: 91933 - DNA, 25 bp, Saccharomyces pastorianus
aattaccccatttacagatcgccaa

SEQ ID NO: 91934 - DNA, 25 bp, Saccharomyces pastorianus
ggttatcaagagacctgtcagttca

SEQ ID NO: 91935 - DNA, 25 bp, Saccharomyces pastorianus
atatgtactagaagagcccactcct

SEQ ID NO: 91936 - DNA, 25 bp, Saccharomyces pastorianus
gcccactcctttatctttgttagaa

SEQ ID NO: 91937 - DNA, 25 bp, Saccharomyces pastorianus
acaatctgttgttatgggctccgag

SEQ ID NO: 91938 - DNA, 25 bp, Saccharomyces pastorianus
gtaaatatacaccaggatcctcctt

SEQ ID NO: 91939 - DNA, 25 bp, Saccharomyces pastorianus
ggctcctcaacagcagctacagaag

SEQ ID NO: 91940 - DNA, 25 bp, Saccharomyces pastorianus
ggatcctccttgatttttgccaaag

SEQ ID NO: 91941 - DNA, 25 bp, Saccharomyces pastorianus
atgatttcaccctaaacacgccaaa

SEQ ID NO: 91942 - DNA, 25 bp, Saccharomyces pastorianus
tacattgaactgtccaaagccacct

SEQ ID NO: 91943 - DNA, 25 bp, Saccharomyces pastorianus
gagaatctaggctgtcagttcattg

SEQ ID NO: 91944 - DNA, 25 bp, Saccharomyces pastorianus
aaccgaagaagagcacccaatacat

SEQ ID NO: 91945 - DNA, 25 bp, Saccharomyces pastorianus
ggagttcagagtaaaatcaccgttg

SEQ ID NO: 91946 - DNA, 25 bp, Saccharomyces pastorianus
gaaggcacgaacttttgtcgaaatt

SEQ ID NO: 91947 - DNA, 25 bp, Saccharomyces pastorianus
gtatcaacaggtcttaaacaacatt

SEQ ID NO: 91948 - DNA, 25 bp, Saccharomyces pastorianus
aaagccacctctaagaaggatcctt

SEQ ID NO: 91949 - DNA, 25 bp, Saccharomyces pastorianus
aacgatgagttgtacgcgcagctga

SEQ ID NO: 91950 - DNA, 25 bp, Saccharomyces pastorianus
ctgtcagttcattgccgaagttcta

SEQ ID NO: 91951 - DNA, 25 bp, Saccharomyces pastorianus
ggcttaggcgttccatttgctgaaa

SEQ ID NO: 91952 - DNA, 25 bp, Saccharomyces pastorianus
attattgactcctccaacttgttag

SEQ ID NO: 91953 - DNA, 25 bp, Saccharomyces pastorianus
tatcgtatttgctgcgttctacgct

SEQ ID NO: 91954 - DNA, 25 bp, Saccharomyces pastorianus
gattggcttaccaggcatgaccatg

SEQ ID NO: 91955 - DNA, 25 bp, Saccharomyces pastorianus
gggctggttcactggttattgcatc

SEQ ID NO: 91956 - DNA, 25 bp, Saccharomyces pastorianus
tattaagtttgatggcgctgtcgct

SEQ ID NO: 91957 - DNA, 25 bp, Saccharomyces pastorianus
tatcaaccattttctgctacttctg

SEQ ID NO: 91958 - DNA, 25 bp, Saccharomyces pastorianus
tttcaatcatcgtgtccggtaccaa

SEQ ID NO: 91959 - DNA, 25 bp, Saccharomyces pastorianus
gttctacgctcttggtatcggtact

SEQ ID NO: 91960 - DNA, 25 bp, Saccharomyces pastorianus
gcgggattgtcgtgcttatcaacca

SEQ ID NO: 91961 - DNA, 25 bp, Saccharomyces pastorianus
accatggctttagtcgtgtgctcta

SEQ ID NO: 91962 - DNA, 25 bp, Saccharomyces pastorianus
gtgctctattgctttccattttcta

SEQ ID NO: 91963 - DNA, 25 bp, Saccharomyces pastorianus
gcaggtacatttgcctttttcgcgg

SEQ ID NO: 91964 - DNA, 25 bp, Saccharomyces pastorianus
tgtatcagccgtcagtagtatccag

SEQ ID NO: 91965 - DNA, 25 bp, Saccharomyces pastorianus
ctctgtggaaccattcgcatctgta

SEQ ID NO: 91966 - DNA, 25 bp, Saccharomyces pastorianus
atactcgtcaccctaggtctagtta

SEQ ID NO: 91967 - DNA, 25 bp, Saccharomyces pastorianus
agttacctgttaaactcggcctctg

SEQ ID NO: 91968 - DNA, 25 bp, Saccharomyces pastorianus
gtctatttatcacttgggttcctcc

SEQ ID NO: 91969 - DNA, 25 bp, Saccharomyces pastorianus
tacatcctcagcaacctctgtggaa

SEQ ID NO: 91970 - DNA, 25 bp, Saccharomyces pastorianus
ctatgctgcatctcgtgggttctat

SEQ ID NO: 91971 - DNA, 25 bp, Saccharomyces pastorianus
gacaagcttcaccaaggaacgtcgt

SEQ ID NO: 91972 - DNA, 25 bp, Saccharomyces pastorianus
tgagagcccaaaccaattccttaac

SEQ ID NO: 91973 - DNA, 25 bp, Saccharomyces pastorianus
gttaaaagctatgcgggctcctcgt

SEQ ID NO: 91974 - DNA, 25 bp, Saccharomyces pastorianus
gtcgtcatcgtcaagtttaacatct

SEQ ID NO: 91975 - DNA, 25 bp, Saccharomyces pastorianus
aagaagaatctttcgcagcagttgc

SEQ ID NO: 91976 - DNA, 25 bp, Saccharomyces pastorianus
ggtcttggagactatttcttgcatt

SEQ ID NO: 91977 - DNA, 25 bp, Saccharomyces pastorianus
tacaaccgcgattgtatctcctgca

SEQ ID NO: 91978 - DNA, 25 bp, Saccharomyces pastorianus
aaacatcaattccaacacttcacaa

SEQ ID NO: 91979 - DNA, 25 bp, Saccharomyces pastorianus
gaaatttctcggtcgctctcagaaa

SEQ ID NO: 91980 - DNA, 25 bp, Saccharomyces pastorianus
gtaatcatcttgcattttctaacct

SEQ ID NO: 91981 - DNA, 25 bp, Saccharomyces pastorianus
taaagagctgtcttctacaaccgcg

SEQ ID NO: 91982 - DNA, 25 bp, Saccharomyces pastorianus
gtatctcctgcacaaaaacgtctta

SEQ ID NO: 91983 - DNA, 25 bp, Saccharomyces pastorianus
aaaagatgcgtctggcaagccatta

SEQ ID NO: 91984 - DNA, 25 bp, Saccharomyces pastorianus
tctaaccttcaacaaacgcctttat

SEQ ID NO: 91985 - DNA, 25 bp, Saccharomyces pastorianus
caaacgcctttatcccaattgcaaa

SEQ ID NO: 91986 - DNA, 25 bp, Saccharomyces pastorianus
cgcttcttatggtcacttcactaat

SEQ ID NO: 91987 - DNA, 25 bp, Saccharomyces pastorianus
atatttcatccaaccatccggtaga

SEQ ID NO: 91988 - DNA, 25 bp, Saccharomyces pastorianus
tggtcacttcactaatcaagagtac

SEQ ID NO: 91989 - DNA, 25 bp, Saccharomyces pastorianus
aaggaattagatttggctagaccaa

SEQ ID NO: 91990 - DNA, 25 bp, Saccharomyces pastorianus
taccaaatatttcatccaaccatcc

SEQ ID NO: 91991 - DNA, 25 bp, Saccharomyces pastorianus
ggtacagctacaaaatcagatgacg

SEQ ID NO: 91992 - DNA, 25 bp, Saccharomyces pastorianus
gagagtccaagtccaattttcatat

SEQ ID NO: 91993 - DNA, 25 bp, Saccharomyces pastorianus
cttcgacttgagaccaggtgtgtta

SEQ ID NO: 91994 - DNA, 25 bp, Saccharomyces pastorianus
ggtattgctgaaccattgtctttac

SEQ ID NO: 91995 - DNA, 25 bp, Saccharomyces pastorianus
tggctagaccaatttacttaccaac

SEQ ID NO: 91996 - DNA, 25 bp, Saccharomyces pastorianus
tttcatatgctattggtattgctga

SEQ ID NO: 91997 - DNA, 25 bp, Saccharomyces pastorianus
gattctttggtttttggcttggaca

SEQ ID NO: 91998 - DNA, 25 bp, Saccharomyces pastorianus
tggtgccctttattagctctagtag

SEQ ID NO: 91999 - DNA, 25 bp, Saccharomyces pastorianus
ggcaaagggttttcaccacacgcaa

SEQ ID NO: 92000 - DNA, 25 bp, Saccharomyces pastorianus
acttgaggcctgactttgttgatag

SEQ ID NO: 92001 - DNA, 25 bp, Saccharomyces pastorianus
gatgtatacctgacctccaaaagat

SEQ ID NO: 92002 - DNA, 25 bp, Saccharomyces pastorianus
ctgagtaacatggtcgtcttctgga

SEQ ID NO: 92003 - DNA, 25 bp, Saccharomyces pastorianus
gtctctggagctgttctagcatttt

SEQ ID NO: 92004 - DNA, 25 bp, Saccharomyces pastorianus
tcttctggacctgcatgtttgacaa

SEQ ID NO: 92005 - DNA, 25 bp, Saccharomyces pastorianus
attggtacgatgttgtctctggagc

SEQ ID NO: 92006 - DNA, 25 bp, Saccharomyces pastorianus
gattttcacttcatgcatactagca

SEQ ID NO: 92007 - DNA, 25 bp, Saccharomyces pastorianus
ggccggacggaatctcgaacgattt

SEQ ID NO: 92008 - DNA, 25 bp, Saccharomyces pastorianus
atacgtctcccaatcatggtttcat

SEQ ID NO: 92009 - DNA, 25 bp, Saccharomyces pastorianus
accatttgccattattttgttaaca

SEQ ID NO: 92010 - DNA, 25 bp, Saccharomyces pastorianus
aaagaaaagacaaccatttgccatt

SEQ ID NO: 92011 - DNA, 25 bp, Saccharomyces pastorianus
gttgtttacctattttcctgccaat

SEQ ID NO: 92012 - DNA, 25 bp, Saccharomyces pastorianus
tcccaatcatggtttcatggtcact

SEQ ID NO: 92013 - DNA, 25 bp, Saccharomyces pastorianus
tgttcattattctgtttaactttga

SEQ ID NO: 92014 - DNA, 25 bp, Saccharomyces pastorianus
aattacttatacgtctcccaatcat

SEQ ID NO: 92015 - DNA, 25 bp, Saccharomyces pastorianus
ttttcctgccaattcaatttggtac

SEQ ID NO: 92016 - DNA, 25 bp, Saccharomyces pastorianus
tatcgtttctgttcgttgtttacct

SEQ ID NO: 92017 - DNA, 25 bp, Saccharomyces pastorianus
atgatctgttatttccttgttgtaa

SEQ ID NO: 92018 - DNA, 25 bp, Saccharomyces pastorianus
atttggtactatctttctattatca

SEQ ID NO: 92019 - DNA, 25 bp, Saccharomyces pastorianus
gagttaatcataccatctaaacaag

SEQ ID NO: 92020 - DNA, 25 bp, Saccharomyces pastorianus
aaaagccttgcatattgctcagagt

SEQ ID NO: 92021 - DNA, 25 bp, Saccharomyces pastorianus
caagattttaaacgcagaattccaa

SEQ ID NO: 92022 - DNA, 25 bp, Saccharomyces pastorianus
ggaggtaacaacgaatttgcacaat

SEQ ID NO: 92023 - DNA, 25 bp, Saccharomyces pastorianus
taattttgcacctccgttgaacgaa

SEQ ID NO: 92024 - DNA, 25 bp, Saccharomyces pastorianus
tacaaatgtcagttcttccaataat

SEQ ID NO: 92025 - DNA, 25 bp, Saccharomyces pastorianus
gaatgctgcaacttattcaaagcct

SEQ ID NO: 92026 - DNA, 25 bp, Saccharomyces pastorianus
gtgccatcccgaataatctgtctat

SEQ ID NO: 92027 - DNA, 25 bp, Saccharomyces pastorianus
actcgataactttcagattgctgtg

SEQ ID NO: 92028 - DNA, 25 bp, Saccharomyces pastorianus
ttccaataattttacgaatgctgca

SEQ ID NO: 92029 - DNA, 25 bp, Saccharomyces pastorianus
agaatttggttgtgtgccatcccga

SEQ ID NO: 92030 - DNA, 25 bp, Saccharomyces pastorianus
agcaatctccggtttgtctcaatta

SEQ ID NO: 92031 - DNA, 25 bp, Saccharomyces pastorianus
tgcattctgtgcctcatctaaaaag

SEQ ID NO: 92032 - DNA, 25 bp, Saccharomyces pastorianus
agattggagtttattcattcccgct

SEQ ID NO: 92033 - DNA, 25 bp, Saccharomyces pastorianus
atttggtgtcattgcattctgtgcc

SEQ ID NO: 92034 - DNA, 25 bp, Saccharomyces pastorianus
ggtgttagcgttaatcgcccaattt

SEQ ID NO: 92035 - DNA, 25 bp, Saccharomyces pastorianus
tgccattgccccaattggtggagga

SEQ ID NO: 92036 - DNA, 25 bp, Saccharomyces pastorianus
ggtaatgcacccaaatgtttcgatt

SEQ ID NO: 92037 - DNA, 25 bp, Saccharomyces pastorianus
tataaatctcaagtcggtgtctggg

SEQ ID NO: 92038 - DNA, 25 bp, Saccharomyces pastorianus
gtcggcttacgctgtacttatgatg

SEQ ID NO: 92039 - DNA, 25 bp, Saccharomyces pastorianus
gttttcacctggctgttagcaatct

SEQ ID NO: 92040 - DNA, 25 bp, Saccharomyces pastorianus
aaggtagacctgctgttgctatgct

SEQ ID NO: 92041 - DNA, 25 bp, Saccharomyces pastorianus
gaaggctgatggaagcgttcgctaa

SEQ ID NO: 92042 - DNA, 25 bp, Saccharomyces pastorianus
aaaggtgtccgatggatcttcagaa

SEQ ID NO: 92043 - DNA, 25 bp, Saccharomyces pastorianus
agctaagccagaggtcaagccagaa

SEQ ID NO: 92044 - DNA, 25 bp, Saccharomyces pastorianus
gtcaagcctgagactcacatcaatt

SEQ ID NO: 92045 - DNA, 25 bp, Saccharomyces pastorianus
gtacgacggtattagaattcaagct

SEQ ID NO: 92046 - DNA, 25 bp, Saccharomyces pastorianus
gaaatggactccttaagattcttgt

SEQ ID NO: 92047 - DNA, 25 bp, Saccharomyces pastorianus
gaattcaagctgatcagacccctga

SEQ ID NO: 92048 - DNA, 25 bp, Saccharomyces pastorianus
agaccactcctttaagaaggctgat

SEQ ID NO: 92049 - DNA, 25 bp, Saccharomyces pastorianus
aggtcaagccagaagtcaagcctga

SEQ ID NO: 92050 - DNA, 25 bp, Saccharomyces pastorianus
gaagcgttcgctaaaagacagggta

SEQ ID NO: 92051 - DNA, 25 bp, Saccharomyces pastorianus
cttaagattcttgtacgacggtatt

SEQ ID NO: 92052 - DNA, 25 bp, Saccharomyces pastorianus
agttgctcacgtaaaggatctgatt

SEQ ID NO: 92053 - DNA, 25 bp, Saccharomyces pastorianus
atggctcagagattcaagacgcttt

SEQ ID NO: 92054 - DNA, 25 bp, Saccharomyces pastorianus
acgctttagaagaaatctcgggcca

SEQ ID NO: 92055 - DNA, 25 bp, Saccharomyces pastorianus
ggtatcccaggaaacagttgctcac

SEQ ID NO: 92056 - DNA, 25 bp, Saccharomyces pastorianus
tgtaaagctactttgtctaccctct

SEQ ID NO: 92057 - DNA, 25 bp, Saccharomyces pastorianus
gaccaatttttccttcgactcgaat

SEQ ID NO: 92058 - DNA, 25 bp, Saccharomyces pastorianus
agcaaagacatactgcccttactgt

SEQ ID NO: 92059 - DNA, 25 bp, Saccharomyces pastorianus
tgaacgttcccaaatccaaggccct

SEQ ID NO: 92060 - DNA, 25 bp, Saccharomyces pastorianus
ttgtctaccctcttccaagaattga

SEQ ID NO: 92061 - DNA, 25 bp, Saccharomyces pastorianus
gtacctaacgtatacatcaatggca

SEQ ID NO: 92062 - DNA, 25 bp, Saccharomyces pastorianus
aaggcccttgtgttggaattagatg

SEQ ID NO: 92063 - DNA, 25 bp, Saccharomyces pastorianus
gtgtagagttcattcagtcgttgat

SEQ ID NO: 92064 - DNA, 25 bp, Saccharomyces pastorianus
aagagcgtttgtgggtcatgctata

SEQ ID NO: 92065 - DNA, 25 bp, Saccharomyces pastorianus
agggatcttgtacctcagacggaat

SEQ ID NO: 92066 - DNA, 25 bp, Saccharomyces pastorianus
atttagcgggtctcattggtttcaa

SEQ ID NO: 92067 - DNA, 25 bp, Saccharomyces pastorianus
gatgcatattacacgttgctcctga

SEQ ID NO: 92068 - DNA, 25 bp, Saccharomyces pastorianus
taaggctttttcacttgccacatgc

SEQ ID NO: 92069 - DNA, 25 bp, Saccharomyces pastorianus
tgaggcggacgaacccaaaattttg

SEQ ID NO: 92070 - DNA, 25 bp, Saccharomyces pastorianus
acgttgctcctgatgctgaagttag

SEQ ID NO: 92071 - DNA, 25 bp, Saccharomyces pastorianus
gacggaccaagatacaacctgggaa

SEQ ID NO: 92072 - DNA, 25 bp, Saccharomyces pastorianus
aaattttgccaatgtcgtacgtgct

SEQ ID NO: 92073 - DNA, 25 bp, Saccharomyces pastorianus
gataatgaacttaccaaaccggagg

SEQ ID NO: 92074 - DNA, 25 bp, Saccharomyces pastorianus
attgggctgaatacgttacggaaag

SEQ ID NO: 92075 - DNA, 25 bp, Saccharomyces pastorianus
aattattcttatatgggctatccaa

SEQ ID NO: 92076 - DNA, 25 bp, Saccharomyces pastorianus
tgtcatacatccgtcaacagcagta

SEQ ID NO: 92077 - DNA, 25 bp, Saccharomyces pastorianus
taccgtatggttaatttatctctag

SEQ ID NO: 92078 - DNA, 25 bp, Saccharomyces pastorianus
ggagacccaaatttaattctggcat

SEQ ID NO: 92079 - DNA, 25 bp, Saccharomyces pastorianus
ggcagatgatttcaatccattggaa

SEQ ID NO: 92080 - DNA, 25 bp, Saccharomyces pastorianus
atttatctctaggtggagacccaaa

SEQ ID NO: 92081 - DNA, 25 bp, Saccharomyces pastorianus
gggaccgaacgatttagacaattat

SEQ ID NO: 92082 - DNA, 25 bp, Saccharomyces pastorianus
gccaatgacggatttatccccatga

SEQ ID NO: 92083 - DNA, 25 bp, Saccharomyces pastorianus
ttattaggcgcgaaaattgggctga

SEQ ID NO: 92084 - DNA, 25 bp, Saccharomyces pastorianus
cattgagaaactattgggaccgaac

SEQ ID NO: 92085 - DNA, 25 bp, Saccharomyces pastorianus
gttatgtcatcgaatactatcctgg

SEQ ID NO: 92086 - DNA, 25 bp, Saccharomyces pastorianus
tgcatatctagcagccgttccgatt

SEQ ID NO: 92087 - DNA, 25 bp, Saccharomyces pastorianus
ttgccgccatcctaatcaagacaaa

SEQ ID NO: 92088 - DNA, 25 bp, Saccharomyces pastorianus
gaggctaccgaccacttttgaagaa

SEQ ID NO: 92089 - DNA, 25 bp, Saccharomyces pastorianus
gtaagatacatttgcgtctagccaa

SEQ ID NO: 92090 - DNA, 25 bp, Saccharomyces pastorianus
gtgcagtgaagttctttccaggatt

SEQ ID NO: 92091 - DNA, 25 bp, Saccharomyces pastorianus
gggcttaatcttgggacagtatcgt

SEQ ID NO: 92092 - DNA, 25 bp, Saccharomyces pastorianus
tttctccaaatccaggttaccatct

SEQ ID NO: 92093 - DNA, 25 bp, Saccharomyces pastorianus
taaagactcctttccaattgtgcag

SEQ ID NO: 92094 - DNA, 25 bp, Saccharomyces pastorianus
aacatcctggtggacttgcatgcaa

SEQ ID NO: 92095 - DNA, 25 bp, Saccharomyces pastorianus
tttgcagagtttgaggctaccgacc

SEQ ID NO: 92096 - DNA, 25 bp, Saccharomyces pastorianus
atagcttccactttcacataccata

SEQ ID NO: 92097 - DNA, 25 bp, Saccharomyces pastorianus
acagttcatataggtcccgacggca

SEQ ID NO: 92098 - DNA, 25 bp, Saccharomyces pastorianus
tccaatggacgcctttgatagcttc

SEQ ID NO: 92099 - DNA, 25 bp, Saccharomyces pastorianus
gcaagatgacaaccctgttcctgtt

SEQ ID NO: 92100 - DNA, 25 bp, Saccharomyces pastorianus
cgttggatacgggtttcttcacagg

SEQ ID NO: 92101 - DNA, 25 bp, Saccharomyces pastorianus
gaagactacattatcggctgccaag

SEQ ID NO: 92102 - DNA, 25 bp, Saccharomyces pastorianus
gagacggcttttgtgccatcagcat

SEQ ID NO: 92103 - DNA, 25 bp, Saccharomyces pastorianus
aaaagggtacccagccattggcaat

SEQ ID NO: 92104 - DNA, 25 bp, Saccharomyces pastorianus
agagcaaactacgatctggtccttt

SEQ ID NO: 92105 - DNA, 25 bp, Saccharomyces pastorianus
agataagtcatctaccgctgcgaag

SEQ ID NO: 92106 - DNA, 25 bp, Saccharomyces pastorianus
gatctggtcctttatgtctacaaca

SEQ ID NO: 92107 - DNA, 25 bp, Saccharomyces pastorianus
cagttcccattatttgctatccata

SEQ ID NO: 92108 - DNA, 25 bp, Saccharomyces pastorianus
attgcaccaggccaaggattctgaa

SEQ ID NO: 92109 - DNA, 25 bp, Saccharomyces pastorianus
gacaggatatccaaccattgctttg

SEQ ID NO: 92110 - DNA, 25 bp, Saccharomyces pastorianus
ggtttgcgcctatttacgaagaaat

SEQ ID NO: 92111 - DNA, 25 bp, Saccharomyces pastorianus
ggtacacatcacattgacggccagg

SEQ ID NO: 92112 - DNA, 25 bp, Saccharomyces pastorianus
taccgtgaaggtactgccaagccaa

SEQ ID NO: 92113 - DNA, 25 bp, Saccharomyces pastorianus
gcatctgatgaatctgttcgcgata

SEQ ID NO: 92114 - DNA, 25 bp, Saccharomyces pastorianus
gatgtccttgtcaaatattacgcga

SEQ ID NO: 92115 - DNA, 25 bp, Saccharomyces pastorianus
ctgccggaaataactctaagcctat

SEQ ID NO: 92116 - DNA, 25 bp, Saccharomyces pastorianus
cattgctttgtatcctgccggaaat

SEQ ID NO: 92117 - DNA, 25 bp, Saccharomyces pastorianus
gatatcttaagttttcctgtgacag

SEQ ID NO: 92118 - DNA, 25 bp, Saccharomyces pastorianus
aagtgctgatttggtgtttgatgtc

SEQ ID NO: 92119 - DNA, 25 bp, Saccharomyces pastorianus
ttttttccaccattcttgcaggttc

SEQ ID NO: 92120 - DNA, 25 bp, Saccharomyces pastorianus
gaatcgggaactgtatttgactcaa

SEQ ID NO: 92121 - DNA, 25 bp, Saccharomyces pastorianus
agaataccggtagaagattgcttaa

SEQ ID NO: 92122 - DNA, 25 bp, Saccharomyces pastorianus
agaaagaggtgtcccaggcgtcatt

SEQ ID NO: 92123 - DNA, 25 bp, Saccharomyces pastorianus
attccaagttctttggcctacggag

SEQ ID NO: 92124 - DNA, 25 bp, Saccharomyces pastorianus
atcgcttttgaacttggcgttggca

SEQ ID NO: 92125 - DNA, 25 bp, Saccharomyces pastorianus
gcaggttccctgtcagatttggaaa

SEQ ID NO: 92126 - DNA, 25 bp, Saccharomyces pastorianus
ttgccggcatgtgcgttggcgaaaa

SEQ ID NO: 92127 - DNA, 25 bp, Saccharomyces pastorianus
aagaggctctcctatcgcttttgaa

SEQ ID NO: 92128 - DNA, 25 bp, Saccharomyces pastorianus
aggcgtcattcctccaagtgctgat

SEQ ID NO: 92129 - DNA, 25 bp, Saccharomyces pastorianus
tcgtccaagatcagggccgcattta

SEQ ID NO: 92130 - DNA, 25 bp, Saccharomyces pastorianus
tagattcagcttcgtcctacaataa

SEQ ID NO: 92131 - DNA, 25 bp, Saccharomyces pastorianus
tgatctaaaccatccttccattttt

SEQ ID NO: 92132 - DNA, 25 bp, Saccharomyces pastorianus
aagtttgttatcgacagcaaccaag

SEQ ID NO: 92133 - DNA, 25 bp, Saccharomyces pastorianus
gcaaccaaggcagagaggcttcttt

SEQ ID NO: 92134 - DNA, 25 bp, Saccharomyces pastorianus
gtggagtttgagctccattcctaag

SEQ ID NO: 92135 - DNA, 25 bp, Saccharomyces pastorianus
gatgtacggaacattccaagctgta

SEQ ID NO: 92136 - DNA, 25 bp, Saccharomyces pastorianus
ttgatgtccccaacaaacttattga

SEQ ID NO: 92137 - DNA, 25 bp, Saccharomyces pastorianus
aagctgtaaatacttctcgtccaag

SEQ ID NO: 92138 - DNA, 25 bp, Saccharomyces pastorianus
agggccattgcccaaagtaaatatt

SEQ ID NO: 92139 - DNA, 25 bp, Saccharomyces pastorianus
gattactacgaattggtctccaaag

SEQ ID NO: 92140 - DNA, 25 bp, Saccharomyces pastorianus
tgctgctgcttccaacgctttgggt

SEQ ID NO: 92141 - DNA, 25 bp, Saccharomyces pastorianus
tgctgcttccaacgctttgggtgct

SEQ ID NO: 92142 - DNA, 25 bp, Saccharomyces pastorianus
tttgggtgctggtgtcttcggtgct

SEQ ID NO: 92143 - DNA, 25 bp, Saccharomyces pastorianus
ggtgctgctgcttccaacgctttgg

SEQ ID NO: 92144 - DNA, 25 bp, Saccharomyces pastorianus
ttcgctactgttgccgctgtccaag

SEQ ID NO: 92145 - DNA, 25 bp, Saccharomyces pastorianus
atcgtcgctgccttcgctactgttg

SEQ ID NO: 92146 - DNA, 25 bp, Saccharomyces pastorianus
tgcttccaacgctttgggtgctggt

SEQ ID NO: 92147 - DNA, 25 bp, Saccharomyces pastorianus
aattcaagaccatcgtcgctgcctt

SEQ ID NO: 92148 - DNA, 25 bp, Saccharomyces pastorianus
caacgctttgggtgctggtgtcttc

SEQ ID NO: 92149 - DNA, 25 bp, Saccharomyces pastorianus
ttccaacgctttgggtgctggtgtc

SEQ ID NO: 92150 - DNA, 25 bp, Saccharomyces pastorianus
aacgctttgggtgctggtgtcttcg

SEQ ID NO: 92151 - DNA, 25 bp, Saccharomyces pastorianus
accaaaggttccaacaccactagca

SEQ ID NO: 92152 - DNA, 25 bp, Saccharomyces pastorianus
gtaccaaaggttccaacaccactag

SEQ ID NO: 92153 - DNA, 25 bp, Saccharomyces pastorianus
tctaccaatggttccaacggtacca

SEQ ID NO: 92154 - DNA, 25 bp, Saccharomyces pastorianus
accaagatctccactggtgctgctg

SEQ ID NO: 92155 - DNA, 25 bp, Saccharomyces pastorianus
tggtgctgctgcttccaacgctttg

SEQ ID NO: 92156 - DNA, 25 bp, Saccharomyces pastorianus
tgcaattcaagaccatcgtcgctgc

SEQ ID NO: 92157 - DNA, 25 bp, Saccharomyces pastorianus
caagctgctaacgtttctaccaatg

SEQ ID NO: 92158 - DNA, 25 bp, Saccharomyces pastorianus
caacgctttgggtgctggtgtcttc

SEQ ID NO: 92159 - DNA, 25 bp, Saccharomyces pastorianus
aaaggttccaacaccactagcacca

SEQ ID NO: 92160 - DNA, 25 bp, Saccharomyces pastorianus
gttccaacaccactagcaccaagat

SEQ ID NO: 92161 - DNA, 25 bp, Saccharomyces pastorianus
aggttccaacaccactagcaccaag

SEQ ID NO: 92162 - DNA, 25 bp, Saccharomyces pastorianus
tcgcggtggttttcctggcttttct

SEQ ID NO: 92163 - DNA, 25 bp, Saccharomyces pastorianus
cctggcttttctcctcatatataag

SEQ ID NO: 92164 - DNA, 25 bp, Saccharomyces pastorianus
tcatcgcggtggttttcctggcttt

SEQ ID NO: 92165 - DNA, 25 bp, Saccharomyces pastorianus
tgctgtgtgtcatcgcggtggtttt

SEQ ID NO: 92166 - DNA, 25 bp, Saccharomyces pastorianus
ggaactcgagaaattcttgattttc

SEQ ID NO: 92167 - DNA, 25 bp, Saccharomyces pastorianus
tcctggcttttctcctcatatataa

SEQ ID NO: 92168 - DNA, 25 bp, Saccharomyces pastorianus
ggcttttctcctcatatataaggaa

SEQ ID NO: 92169 - DNA, 25 bp, Saccharomyces pastorianus
gtgtcatcgcggtggttttcctggc

SEQ ID NO: 92170 - DNA, 25 bp, Saccharomyces pastorianus
ttttcctggcttttctcctcatata

SEQ ID NO: 92171 - DNA, 25 bp, Saccharomyces pastorianus
ttctcctcatatataaggaactcga

SEQ ID NO: 92172 - DNA, 25 bp, Saccharomyces pastorianus
tggttttcctggcttttctcctcat

SEQ ID NO: 92173 - DNA, 25 bp, Saccharomyces pastorianus
gaagcggccaaagcggccaatcacg

SEQ ID NO: 92174 - DNA, 25 bp, Saccharomyces pastorianus
caagaatttctcgagttccttatat

SEQ ID NO: 92175 - DNA, 25 bp, Saccharomyces pastorianus
ctctggtcttcgctattttggaaat

SEQ ID NO: 92176 - DNA, 25 bp, Saccharomyces pastorianus
ttctttttctcatttctcaagcgga

SEQ ID NO: 92177 - DNA, 25 bp, Saccharomyces pastorianus
gcacggctcccaacgagtcgttttt

SEQ ID NO: 92178 - DNA, 25 bp, Saccharomyces pastorianus
aagaaaaggcgtggctctggtcttc

SEQ ID NO: 92179 - DNA, 25 bp, Saccharomyces pastorianus
aaagccaggaaaaccaccgcgatga

SEQ ID NO: 92180 - DNA, 25 bp, Saccharomyces pastorianus
gcaccatatctcatgtaacaaacgt

SEQ ID NO: 92181 - DNA, 25 bp, Saccharomyces pastorianus
tgacacacagcaccatatctcatgt

SEQ ID NO: 92182 - DNA, 25 bp, Saccharomyces pastorianus
tctcatttctcaagcggatattccg

SEQ ID NO: 92183 - DNA, 25 bp, Saccharomyces pastorianus
ataaactttggcgtcctacgcccag

SEQ ID NO: 92184 - DNA, 25 bp, Saccharomyces pastorianus
ttattgcaattttcattcctccctt

SEQ ID NO: 92185 - DNA, 25 bp, Saccharomyces pastorianus
attcctcccttagcagtctggctaa

SEQ ID NO: 92186 - DNA, 25 bp, Saccharomyces pastorianus
ttttccctggtctgatccatgcttt

SEQ ID NO: 92187 - DNA, 25 bp, Saccharomyces pastorianus
atccatgctttgtacgtgatcagct

SEQ ID NO: 92188 - DNA, 25 bp, Saccharomyces pastorianus
ggatctgctcattaactttctgtta

SEQ ID NO: 92189 - DNA, 25 bp, Saccharomyces pastorianus
gcagtctggctaaaaagaggttttt

SEQ ID NO: 92190 - DNA, 25 bp, Saccharomyces pastorianus
tatgaggagaacgaggcccggtact

SEQ ID NO: 92191 - DNA, 25 bp, Saccharomyces pastorianus
gtacgtgatcagctgtcatccatat

SEQ ID NO: 92192 - DNA, 25 bp, Saccharomyces pastorianus
ggtttttttaccaaggatctgctca

SEQ ID NO: 92193 - DNA, 25 bp, Saccharomyces pastorianus
atcagctgtcatccatatgaggaga

SEQ ID NO: 92194 - DNA, 25 bp, Saccharomyces pastorianus
tactagggtttttccctggtctgat

SEQ ID NO: 92195 - DNA, 25 bp, Saccharomyces pastorianus
aaatggatgcaaccggttcagcaaa

SEQ ID NO: 92196 - DNA, 25 bp, Saccharomyces pastorianus
atacttccctgatttgcctaaagag

SEQ ID NO: 92197 - DNA, 25 bp, Saccharomyces pastorianus
ccttctcaaaggtgcattgctatac

SEQ ID NO: 92198 - DNA, 25 bp, Saccharomyces pastorianus
aactcgccggttacaccatagtgga

SEQ ID NO: 92199 - DNA, 25 bp, Saccharomyces pastorianus
gacggaaaagtcatcgaatccttag

SEQ ID NO: 92200 - DNA, 25 bp, Saccharomyces pastorianus
ttagcaagatccacttttccttctc

SEQ ID NO: 92201 - DNA, 25 bp, Saccharomyces pastorianus
ttcactcagggttgcaccatcacag

SEQ ID NO: 92202 - DNA, 25 bp, Saccharomyces pastorianus
gaatccttagaaatcgcctctgatg

SEQ ID NO: 92203 - DNA, 25 bp, Saccharomyces pastorianus
aaatagactctaccattcactcagg

SEQ ID NO: 92204 - DNA, 25 bp, Saccharomyces pastorianus
aagctactaccagctagtgccagaa

SEQ ID NO: 92205 - DNA, 25 bp, Saccharomyces pastorianus
ttaatggtgaccttgttccacccac

SEQ ID NO: 92206 - DNA, 25 bp, Saccharomyces pastorianus
tacgtctttattttcttctaggtca

SEQ ID NO: 92207 - DNA, 25 bp, Saccharomyces pastorianus
gaagcaaagctctgttacgtcttta

SEQ ID NO: 92208 - DNA, 25 bp, Saccharomyces pastorianus
gaacctctccacgtatacaacgaaa

SEQ ID NO: 92209 - DNA, 25 bp, Saccharomyces pastorianus
gtcttcttctattcttgactctgag

SEQ ID NO: 92210 - DNA, 25 bp, Saccharomyces pastorianus
agcagcttcaatttccagtctcagg

SEQ ID NO: 92211 - DNA, 25 bp, Saccharomyces pastorianus
gatgacgtcctttatgaccttgaca

SEQ ID NO: 92212 - DNA, 25 bp, Saccharomyces pastorianus
gaaagggttaggttgtcaccacaat

SEQ ID NO: 92213 - DNA, 25 bp, Saccharomyces pastorianus
gatggcaaatctgttagcagcttca

SEQ ID NO: 92214 - DNA, 25 bp, Saccharomyces pastorianus
gaccgagcaacagatccacaaattt

SEQ ID NO: 92215 - DNA, 25 bp, Saccharomyces pastorianus
caaaaatctgctcccattaacaagg

SEQ ID NO: 92216 - DNA, 25 bp, Saccharomyces pastorianus
gtcaccacaatcctcgtcgataaaa

SEQ ID NO: 92217 - DNA, 25 bp, Saccharomyces pastorianus
gtcctctccaagttatgtgttccag

SEQ ID NO: 92218 - DNA, 25 bp, Saccharomyces pastorianus
gccaatcagttcattaacctcgcag

SEQ ID NO: 92219 - DNA, 25 bp, Saccharomyces pastorianus
agaggatgttccttacctgttgcca

SEQ ID NO: 92220 - DNA, 25 bp, Saccharomyces pastorianus
agggctcaccaaaccgagttgactc

SEQ ID NO: 92221 - DNA, 25 bp, Saccharomyces pastorianus
ggaaaatcccatcatgcagaccgct

SEQ ID NO: 92222 - DNA, 25 bp, Saccharomyces pastorianus
gaccgctttaagaagactccctgaa

SEQ ID NO: 92223 - DNA, 25 bp, Saccharomyces pastorianus
gttatgtgttccagttgccaatcag

SEQ ID NO: 92224 - DNA, 25 bp, Saccharomyces pastorianus
gaagatgaatcttatgccagagcat

SEQ ID NO: 92225 - DNA, 25 bp, Saccharomyces pastorianus
gagttgactcatcatttactgccaa

SEQ ID NO: 92226 - DNA, 25 bp, Saccharomyces pastorianus
tgccacagtcttttacgtctattgc

SEQ ID NO: 92227 - DNA, 25 bp, Saccharomyces pastorianus
tatattttgaagtcacccgtcctct

SEQ ID NO: 92228 - DNA, 25 bp, Saccharomyces pastorianus
taaggtttcctttgctcatttcgtc

SEQ ID NO: 92229 - DNA, 25 bp, Saccharomyces pastorianus
agtcgttactgcaatgcggtttccc

SEQ ID NO: 92230 - DNA, 25 bp, Saccharomyces pastorianus
ttataatgtgctctgttctctccaa

SEQ ID NO: 92231 - DNA, 25 bp, Saccharomyces pastorianus
accttttcaggacgtattgtgcaac

SEQ ID NO: 92232 - DNA, 25 bp, Saccharomyces pastorianus
ggaaaggatcattttttgcccacct

SEQ ID NO: 92233 - DNA, 25 bp, Saccharomyces pastorianus
gaagatcttcttgctatgtgttacg

SEQ ID NO: 92234 - DNA, 25 bp, Saccharomyces pastorianus
agaacctcactgaagatcctcatct

SEQ ID NO: 92235 - DNA, 25 bp, Saccharomyces pastorianus
gggtactgtggtatgatcctcgtta

SEQ ID NO: 92236 - DNA, 25 bp, Saccharomyces pastorianus
tagcggttcctcacaagatcacaaa

SEQ ID NO: 92237 - DNA, 25 bp, Saccharomyces pastorianus
aattgtggacctcatagcggttcct

SEQ ID NO: 92238 - DNA, 25 bp, Saccharomyces pastorianus
gtgtagttccaagatcgcatgccaa

SEQ ID NO: 92239 - DNA, 25 bp, Saccharomyces pastorianus
aattggcctaaagtcgtcagctatt

SEQ ID NO: 92240 - DNA, 25 bp, Saccharomyces pastorianus
gagggtgacaattctagcgttgata

SEQ ID NO: 92241 - DNA, 25 bp, Saccharomyces pastorianus
ggatcaaagcaagcgttttttctca

SEQ ID NO: 92242 - DNA, 25 bp, Saccharomyces pastorianus
aatgggtgcttttctaagcgcgtct

SEQ ID NO: 92243 - DNA, 25 bp, Saccharomyces pastorianus
gatcagatgctcgattgggcacaag

SEQ ID NO: 92244 - DNA, 25 bp, Saccharomyces pastorianus
tcgtcagctattgcaagttcatttg

SEQ ID NO: 92245 - DNA, 25 bp, Saccharomyces pastorianus
gtaaaagtcttctattcgccatctc

SEQ ID NO: 92246 - DNA, 25 bp, Saccharomyces pastorianus
tagagtaggcggttcttcactggga

SEQ ID NO: 92247 - DNA, 25 bp, Saccharomyces pastorianus
ggacatttgactaccatgaacactt

SEQ ID NO: 92248 - DNA, 25 bp, Saccharomyces pastorianus
tatactttggcggatcttataccag

SEQ ID NO: 92249 - DNA, 25 bp, Saccharomyces pastorianus
attatcactaattactggcgctcaa

SEQ ID NO: 92250 - DNA, 25 bp, Saccharomyces pastorianus
gttgggattcgctcaatgaactaaa

SEQ ID NO: 92251 - DNA, 25 bp, Saccharomyces pastorianus
gtcacagacattgaagcgaacagta

SEQ ID NO: 92252 - DNA, 25 bp, Saccharomyces pastorianus
aatactaaggtgcaaatctttgagg

SEQ ID NO: 92253 - DNA, 25 bp, Saccharomyces pastorianus
agaggattctggacatttaatggcc

SEQ ID NO: 92254 - DNA, 25 bp, Saccharomyces pastorianus
gaagagacatacacgaattggcaaa

SEQ ID NO: 92255 - DNA, 25 bp, Saccharomyces pastorianus
tatctggaagccactggtgatattg

SEQ ID NO: 92256 - DNA, 25 bp, Saccharomyces pastorianus
gcgggtggcaatatagtcacagaca

SEQ ID NO: 92257 - DNA, 25 bp, Saccharomyces pastorianus
aattgccatatctttaagcgattta

SEQ ID NO: 92258 - DNA, 25 bp, Saccharomyces pastorianus
aaaactactatttttgcagaagcaa

SEQ ID NO: 92259 - DNA, 25 bp, Saccharomyces pastorianus
ttttgaaatctttacccagcttgga

SEQ ID NO: 92260 - DNA, 25 bp, Saccharomyces pastorianus
gcactttttactcaaagggtcaaag

SEQ ID NO: 92261 - DNA, 25 bp, Saccharomyces pastorianus
gttgtagaagccttacatcccttca

SEQ ID NO: 92262 - DNA, 25 bp, Saccharomyces pastorianus
ttttgcatctgcaggtcacggtacc

SEQ ID NO: 92263 - DNA, 25 bp, Saccharomyces pastorianus
gctaagtatttagctccggtcgggc

SEQ ID NO: 92264 - DNA, 25 bp, Saccharomyces pastorianus
gggccctgggatgattactctatta

SEQ ID NO: 92265 - DNA, 25 bp, Saccharomyces pastorianus
aggtgtgaatcctgcttctgcgcac

SEQ ID NO: 92266 - DNA, 25 bp, Saccharomyces pastorianus
gtaagtctatcaccggttttactga

SEQ ID NO: 92267 - DNA, 25 bp, Saccharomyces pastorianus
aagacttgcaggacattgcttccga

SEQ ID NO: 92268 - DNA, 25 bp, Saccharomyces pastorianus
gttgtcgcagctgtttgtcacggtc

SEQ ID NO: 92269 - DNA, 25 bp, Saccharomyces pastorianus
catcccttcaacacattccgaaaag

SEQ ID NO: 92270 - DNA, 25 bp, Saccharomyces pastorianus
gggatgagcattccttagccaaaga

SEQ ID NO: 92271 - DNA, 25 bp, Saccharomyces pastorianus
cacggtaccttatttgactatccta

SEQ ID NO: 92272 - DNA, 25 bp, Saccharomyces pastorianus
atgcattgggctcttatgacgacga

SEQ ID NO: 92273 - DNA, 25 bp, Saccharomyces pastorianus
ggcgatgattcgtctagttcttcaa

SEQ ID NO: 92274 - DNA, 25 bp, Saccharomyces pastorianus
gttgtcatgttcaccccaatattta

SEQ ID NO: 92275 - DNA, 25 bp, Saccharomyces pastorianus
ggagagttgctaaccatttgcccaa

SEQ ID NO: 92276 - DNA, 25 bp, Saccharomyces pastorianus
atttgcccaagttatccctacaaga

SEQ ID NO: 92277 - DNA, 25 bp, Saccharomyces pastorianus
cattctttggtttgtctttgctatc

SEQ ID NO: 92278 - DNA, 25 bp, Saccharomyces pastorianus
cagttatcttctttttctaccctga

SEQ ID NO: 92279 - DNA, 25 bp, Saccharomyces pastorianus
gccgtcggcttatttttgttcatta

SEQ ID NO: 92280 - DNA, 25 bp, Saccharomyces pastorianus
gccacaggtcaagcagtttcattca

SEQ ID NO: 92281 - DNA, 25 bp, Saccharomyces pastorianus
aacgctttctccacatgtactaatt

SEQ ID NO: 92282 - DNA, 25 bp, Saccharomyces pastorianus
gaggaaatcgacatcatctttgcta

SEQ ID NO: 92283 - DNA, 25 bp, Saccharomyces pastorianus
gataccctggttacttcctttgaca

SEQ ID NO: 92284 - DNA, 25 bp, Saccharomyces pastorianus
aacaccagtcgcaccagtaattgca

SEQ ID NO: 92285 - DNA, 25 bp, Saccharomyces pastorianus
agaagtctgattcccagtgcaacac

SEQ ID NO: 92286 - DNA, 25 bp, Saccharomyces pastorianus
tacgctcaactcttttagcacttgt

SEQ ID NO: 92287 - DNA, 25 bp, Saccharomyces pastorianus
caattctctttggtcttggaggcga

SEQ ID NO: 92288 - DNA, 25 bp, Saccharomyces pastorianus
caccaaatgtgtttctacgctcaac

SEQ ID NO: 92289 - DNA, 25 bp, Saccharomyces pastorianus
attgttgctgcaccccattttgaaa

SEQ ID NO: 92290 - DNA, 25 bp, Saccharomyces pastorianus
gcggttcccaatctgtttcatattt

SEQ ID NO: 92291 - DNA, 25 bp, Saccharomyces pastorianus
tatgttttggttgccaaggccgcca

SEQ ID NO: 92292 - DNA, 25 bp, Saccharomyces pastorianus
agggcacaacaatcataccatcatg

SEQ ID NO: 92293 - DNA, 25 bp, Saccharomyces pastorianus
gaaacatcggcagctcttgtaatta

SEQ ID NO: 92294 - DNA, 25 bp, Saccharomyces pastorianus
gattgttgtgccctgttccatgaaa

SEQ ID NO: 92295 - DNA, 25 bp, Saccharomyces pastorianus
cccaagagccttcatgacctattag

SEQ ID NO: 92296 - DNA, 25 bp, Saccharomyces pastorianus
tgacgtggcggccttggcaaccaaa

SEQ ID NO: 92297 - DNA, 25 bp, Saccharomyces pastorianus
caagagctgccgatgtttcgattaa

SEQ ID NO: 92298 - DNA, 25 bp, Saccharomyces pastorianus
tttctgcatgcatttcgtccggatc

SEQ ID NO: 92299 - DNA, 25 bp, Saccharomyces pastorianus
tactctgttcgcgatgtttctgcat

SEQ ID NO: 92300 - DNA, 25 bp, Saccharomyces pastorianus
gcgactggtgttgcactgggaatca

SEQ ID NO: 92301 - DNA, 25 bp, Saccharomyces pastorianus
ctccggtacctgctttttatacaag

SEQ ID NO: 92302 - DNA, 25 bp, Saccharomyces pastorianus
caggatcctagactgctttggcatc

SEQ ID NO: 92303 - DNA, 25 bp, Saccharomyces pastorianus
gtccggatctttccagcatgatggt

SEQ ID NO: 92304 - DNA, 25 bp, Saccharomyces pastorianus
gtaaccagggtatcaacttcgcctc

SEQ ID NO: 92305 - DNA, 25 bp, Saccharomyces pastorianus
tataatgtggaaactcctgcgcctg

SEQ ID NO: 92306 - DNA, 25 bp, Saccharomyces pastorianus
atacggaatctactccattaaggag

SEQ ID NO: 92307 - DNA, 25 bp, Saccharomyces pastorianus
ggttgctcctttcacaaactttaga

SEQ ID NO: 92308 - DNA, 25 bp, Saccharomyces pastorianus
aggaggattataccagtcattttat

SEQ ID NO: 92309 - DNA, 25 bp, Saccharomyces pastorianus
aaacctctcttatcaattgggctgg

SEQ ID NO: 92310 - DNA, 25 bp, Saccharomyces pastorianus
actaaagctatgtggcctgtgtata

SEQ ID NO: 92311 - DNA, 25 bp, Saccharomyces pastorianus
gatagaacaccctctgaaaacctct

SEQ ID NO: 92312 - DNA, 25 bp, Saccharomyces pastorianus
aaactcctgcgcctggttataaatg

SEQ ID NO: 92313 - DNA, 25 bp, Saccharomyces pastorianus
gatgatgagctctttcaagcgggaa

SEQ ID NO: 92314 - DNA, 25 bp, Saccharomyces pastorianus
atggatccatatcaacacggttgct

SEQ ID NO: 92315 - DNA, 25 bp, Saccharomyces pastorianus
gaggccgtaaacgaggtctacaaat

SEQ ID NO: 92316 - DNA, 25 bp, Saccharomyces pastorianus
aaaaggctgcctgggagttcacaaa

SEQ ID NO: 92317 - DNA, 25 bp, Saccharomyces pastorianus
gaacgatcctagtgtggtttttaca

SEQ ID NO: 92318 - DNA, 25 bp, Saccharomyces pastorianus
gtgcatggccatttgaatacttctt

SEQ ID NO: 92319 - DNA, 25 bp, Saccharomyces pastorianus
tcaatggcctaattcataccccagt

SEQ ID NO: 92320 - DNA, 25 bp, Saccharomyces pastorianus
ccagtgttcctgattttcattccat

SEQ ID NO: 92321 - DNA, 25 bp, Saccharomyces pastorianus
ataccccagtaaatgccagtgttcc

SEQ ID NO: 92322 - DNA, 25 bp, Saccharomyces pastorianus
attcctttgggtaagcctggcacag

SEQ ID NO: 92323 - DNA, 25 bp, Saccharomyces pastorianus
atgtggccctagctcatctgtatgc

SEQ ID NO: 92324 - DNA, 25 bp, Saccharomyces pastorianus
acagtcaacccttctcttgtttttg

SEQ ID NO: 92325 - DNA, 25 bp, Saccharomyces pastorianus
gatcaagtcattgaccgcggttcaa

SEQ ID NO: 92326 - DNA, 25 bp, Saccharomyces pastorianus
tttttggtcctcaacttttcgatga

SEQ ID NO: 92327 - DNA, 25 bp, Saccharomyces pastorianus
tcacttggcccaatactacatgttc

SEQ ID NO: 92328 - DNA, 25 bp, Saccharomyces pastorianus
agtcgaagttgctgaagccgttttc

SEQ ID NO: 92329 - DNA, 25 bp, Saccharomyces pastorianus
tgaaacctacccagtcgaagttgct

SEQ ID NO: 92330 - DNA, 25 bp, Saccharomyces pastorianus
cacttggcccaatactacatgttcc

SEQ ID NO: 92331 - DNA, 25 bp, Saccharomyces pastorianus
aagccagccatctccaaggctctat

SEQ ID NO: 92332 - DNA, 25 bp, Saccharomyces pastorianus
aaacctacccagtcgaagttgctga

SEQ ID NO: 92333 - DNA, 25 bp, Saccharomyces pastorianus
gccagccatctccaaggctctatcc

SEQ ID NO: 92334 - DNA, 25 bp, Saccharomyces pastorianus
aaagccagccatctccaaggctcta

SEQ ID NO: 92335 - DNA, 25 bp, Saccharomyces pastorianus
agccagccatctccaaggctctatc

SEQ ID NO: 92336 - DNA, 25 bp, Saccharomyces pastorianus
tggtattgccccagaccaagtgacc

SEQ ID NO: 92337 - DNA, 25 bp, Saccharomyces pastorianus
cttggcccaatactacatgttccaa

SEQ ID NO: 92338 - DNA, 25 bp, Saccharomyces pastorianus
gctaacgttttaaccaacgcgactg

SEQ ID NO: 92339 - DNA, 25 bp, Saccharomyces pastorianus
aggcatcaggatttggcgactacta

SEQ ID NO: 92340 - DNA, 25 bp, Saccharomyces pastorianus
aacgcgactgcagctacgctgagcg

SEQ ID NO: 92341 - DNA, 25 bp, Saccharomyces pastorianus
taactaacccatacgaaacttcagg

SEQ ID NO: 92342 - DNA, 25 bp, Saccharomyces pastorianus
cagttccgttagagacatattttca

SEQ ID NO: 92343 - DNA, 25 bp, Saccharomyces pastorianus
actatttgaatgtatccgtaatctg

SEQ ID NO: 92344 - DNA, 25 bp, Saccharomyces pastorianus
gcgcatggtctaatacagttccgtt

SEQ ID NO: 92345 - DNA, 25 bp, Saccharomyces pastorianus
aatctggatgaatgaaaccctttat

SEQ ID NO: 92346 - DNA, 25 bp, Saccharomyces pastorianus
ctacgctgagcgcatggtctaatac

SEQ ID NO: 92347 - DNA, 25 bp, Saccharomyces pastorianus
caggatttggcgactactatttgaa

SEQ ID NO: 92348 - DNA, 25 bp, Saccharomyces pastorianus
gaaacttcaggttattatgcctttt

SEQ ID NO: 92349 - DNA, 25 bp, Saccharomyces pastorianus
ggagcatgacctattgggttactat

SEQ ID NO: 92350 - DNA, 25 bp, Saccharomyces pastorianus
gactttaccaaagacttccatgtga

SEQ ID NO: 92351 - DNA, 25 bp, Saccharomyces pastorianus
ttgacggaggcattcgattcagaac

SEQ ID NO: 92352 - DNA, 25 bp, Saccharomyces pastorianus
gatcacaggttttacatccatgggt

SEQ ID NO: 92353 - DNA, 25 bp, Saccharomyces pastorianus
tattccgaaggtccagtttttgacg

SEQ ID NO: 92354 - DNA, 25 bp, Saccharomyces pastorianus
tcatagttagccctcgagtgcacag

SEQ ID NO: 92355 - DNA, 25 bp, Saccharomyces pastorianus
aaatgatcctaccttagcataccct

SEQ ID NO: 92356 - DNA, 25 bp, Saccharomyces pastorianus
gagtgcacagccttgagactttatt

SEQ ID NO: 92357 - DNA, 25 bp, Saccharomyces pastorianus
gattcagaacataccctagcaacca

SEQ ID NO: 92358 - DNA, 25 bp, Saccharomyces pastorianus
aagatttatctctgccgacatatta

SEQ ID NO: 92359 - DNA, 25 bp, Saccharomyces pastorianus
gagaaatcctcgctttacttattat

SEQ ID NO: 92360 - DNA, 25 bp, Saccharomyces pastorianus
gaaacatccatttaaatatcgcggt

SEQ ID NO: 92361 - DNA, 25 bp, Saccharomyces pastorianus
cagtgctgagcatgggatcggtttc

SEQ ID NO: 92362 - DNA, 25 bp, Saccharomyces pastorianus
aacgcagccggtttgattggtgatg

SEQ ID NO: 92363 - DNA, 25 bp, Saccharomyces pastorianus
gtcatgtcggtgacggaaacatcca

SEQ ID NO: 92364 - DNA, 25 bp, Saccharomyces pastorianus
gaggacttactagaaccatttgttt

SEQ ID NO: 92365 - DNA, 25 bp, Saccharomyces pastorianus
gttcttattgaaacgtcagggtcca

SEQ ID NO: 92366 - DNA, 25 bp, Saccharomyces pastorianus
tatattccgtatctgcggctgtgac

SEQ ID NO: 92367 - DNA, 25 bp, Saccharomyces pastorianus
gtatgacatgtcacttcaattgaaa

SEQ ID NO: 92368 - DNA, 25 bp, Saccharomyces pastorianus
aagctgactgctttcctcaaagata

SEQ ID NO: 92369 - DNA, 25 bp, Saccharomyces pastorianus
tctggagaaccaacacaacttttat

SEQ ID NO: 92370 - DNA, 25 bp, Saccharomyces pastorianus
atacttgaaggacttgcctttccct

SEQ ID NO: 92371 - DNA, 25 bp, Saccharomyces pastorianus
gcaagttgggacaaaggacctgttc

SEQ ID NO: 92372 - DNA, 25 bp, Saccharomyces pastorianus
aactcgttgacgataaactggcaag

SEQ ID NO: 92373 - DNA, 25 bp, Saccharomyces pastorianus
gaaaattttggcactagccgtcgcc

SEQ ID NO: 92374 - DNA, 25 bp, Saccharomyces pastorianus
aaggcttggcattggtatgctgtac

SEQ ID NO: 92375 - DNA, 25 bp, Saccharomyces pastorianus
cagtgaattggactacttgcggtaa

SEQ ID NO: 92376 - DNA, 25 bp, Saccharomyces pastorianus
tagccgtcgcctttcaaggcttggc

SEQ ID NO: 92377 - DNA, 25 bp, Saccharomyces pastorianus
ggagcgtaaaactaccaccagtgaa

SEQ ID NO: 92378 - DNA, 25 bp, Saccharomyces pastorianus
gacctgttcccgatcgtgaagaatt

SEQ ID NO: 92379 - DNA, 25 bp, Saccharomyces pastorianus
catcgacattgtaccgcatagcgga

SEQ ID NO: 92380 - DNA, 25 bp, Saccharomyces pastorianus
ttttacgcataatacatcgacattg

SEQ ID NO: 92381 - DNA, 25 bp, Saccharomyces pastorianus
ggattactatccactatgacgagat

SEQ ID NO: 92382 - DNA, 25 bp, Saccharomyces pastorianus
gaatttgtatacagccgtgccgatg

SEQ ID NO: 92383 - DNA, 25 bp, Saccharomyces pastorianus
acggttatgcctccggaagtagcca

SEQ ID NO: 92384 - DNA, 25 bp, Saccharomyces pastorianus
atgagctcggtacgcctgcagtgta

SEQ ID NO: 92385 - DNA, 25 bp, Saccharomyces pastorianus
gcaaggtttatagaccctacggtca

SEQ ID NO: 92386 - DNA, 25 bp, Saccharomyces pastorianus
gacttatatgtcactgaacgcgcaa

SEQ ID NO: 92387 - DNA, 25 bp, Saccharomyces pastorianus
atctccaccttttgcaagcacgaag

SEQ ID NO: 92388 - DNA, 25 bp, Saccharomyces pastorianus
ggtgctctagcctttgacaccgaga

SEQ ID NO: 92389 - DNA, 25 bp, Saccharomyces pastorianus
gcagtgtactgggttacggaccatt

SEQ ID NO: 92390 - DNA, 25 bp, Saccharomyces pastorianus
aattggctttgcacactacctgaac

SEQ ID NO: 92391 - DNA, 25 bp, Saccharomyces pastorianus
cgagaccggcgatgcaattggcttt

SEQ ID NO: 92392 - DNA, 25 bp, Saccharomyces pastorianus
actacctgaaccatttgacgtcgtg

SEQ ID NO: 92393 - DNA, 25 bp, Saccharomyces pastorianus
gatcgtctcatttggtttgctggtc

SEQ ID NO: 92394 - DNA, 25 bp, Saccharomyces pastorianus
tcctttgttaggttgcgcattcatg

SEQ ID NO: 92395 - DNA, 25 bp, Saccharomyces pastorianus
tggcatttcttgttggatcgtctca

SEQ ID NO: 92396 - DNA, 25 bp, Saccharomyces pastorianus
tatgtgactcaagcttccatccaag

SEQ ID NO: 92397 - DNA, 25 bp, Saccharomyces pastorianus
gtatcattggctctttgtgtctatt

SEQ ID NO: 92398 - DNA, 25 bp, Saccharomyces pastorianus
agtcatgtcttaccgctatgttcaa

SEQ ID NO: 92399 - DNA, 25 bp, Saccharomyces pastorianus
aagcgtacggttctccatttacatt

SEQ ID NO: 92400 - DNA, 25 bp, Saccharomyces pastorianus
tttgctggtccattaccgtggtgac

SEQ ID NO: 92401 - DNA, 25 bp, Saccharomyces pastorianus
tttggtattctgctttcctttgtta

SEQ ID NO: 92402 - DNA, 25 bp, Saccharomyces pastorianus
agaatttccgatccaaccttagctg

SEQ ID NO: 92403 - DNA, 25 bp, Saccharomyces pastorianus
taacctcattataccttgccactta

SEQ ID NO: 92404 - DNA, 25 bp, Saccharomyces pastorianus
ttgccgccatacacaaatttgttgt

SEQ ID NO: 92405 - DNA, 25 bp, Saccharomyces pastorianus
atgctaaccacattccccatggaaa

SEQ ID NO: 92406 - DNA, 25 bp, Saccharomyces pastorianus
cactacggcatcgactatggcttac

SEQ ID NO: 92407 - DNA, 25 bp, Saccharomyces pastorianus
tatgctgtgcactaatgggatattc

SEQ ID NO: 92408 - DNA, 25 bp, Saccharomyces pastorianus
gataatcagcagcacccaaactatt

SEQ ID NO: 92409 - DNA, 25 bp, Saccharomyces pastorianus
gactatggcttacattttgccgcca

SEQ ID NO: 92410 - DNA, 25 bp, Saccharomyces pastorianus
cagcacgtcgttataacttcttcac

SEQ ID NO: 92411 - DNA, 25 bp, Saccharomyces pastorianus
agccagactctgtttcggatttaac

SEQ ID NO: 92412 - DNA, 25 bp, Saccharomyces pastorianus
ggaaaagcttcctttctatctttgt

SEQ ID NO: 92413 - DNA, 25 bp, Saccharomyces pastorianus
ggatattcgggatttgcagttttca

SEQ ID NO: 92414 - DNA, 25 bp, Saccharomyces pastorianus
tcactagtcttcatcaccatgggta

SEQ ID NO: 92415 - DNA, 25 bp, Saccharomyces pastorianus
ggtggtgttccatacattgcagttt

SEQ ID NO: 92416 - DNA, 25 bp, Saccharomyces pastorianus
agttttcgttactgctgcatttggc

SEQ ID NO: 92417 - DNA, 25 bp, Saccharomyces pastorianus
ggttatttatctcaatctcgcacat

SEQ ID NO: 92418 - DNA, 25 bp, Saccharomyces pastorianus
aagttggctcctaaattcctgtcaa

SEQ ID NO: 92419 - DNA, 25 bp, Saccharomyces pastorianus
ggtttcacggcttttgcaccaaaat

SEQ ID NO: 92420 - DNA, 25 bp, Saccharomyces pastorianus
ggagacatctactggtggtgacaaa

SEQ ID NO: 92421 - DNA, 25 bp, Saccharomyces pastorianus
tctgttttcctgttcttagctgttt

SEQ ID NO: 92422 - DNA, 25 bp, Saccharomyces pastorianus
ggcgctttggcttacatggagacat

SEQ ID NO: 92423 - DNA, 25 bp, Saccharomyces pastorianus
ttctgcggccacatttatgacgatc

SEQ ID NO: 92424 - DNA, 25 bp, Saccharomyces pastorianus
tcaatggtgttagctttgctgccgc

SEQ ID NO: 92425 - DNA, 25 bp, Saccharomyces pastorianus
cttaacaaccattatttctgccgca

SEQ ID NO: 92426 - DNA, 25 bp, Saccharomyces pastorianus
actctttgactcctcagcaattgaa

SEQ ID NO: 92427 - DNA, 25 bp, Saccharomyces pastorianus
gtcaagatttgtccgctttctggaa

SEQ ID NO: 92428 - DNA, 25 bp, Saccharomyces pastorianus
ttttgtctttgcaaccaggttctga

SEQ ID NO: 92429 - DNA, 25 bp, Saccharomyces pastorianus
gaagctggtattcactttgccgtgg

SEQ ID NO: 92430 - DNA, 25 bp, Saccharomyces pastorianus
attggaagtgatgacgccaccgcca

SEQ ID NO: 92431 - DNA, 25 bp, Saccharomyces pastorianus
gacattttgttcgatatccctgaag

SEQ ID NO: 92432 - DNA, 25 bp, Saccharomyces pastorianus
cgttgctggtttgttgacctacttt

SEQ ID NO: 92433 - DNA, 25 bp, Saccharomyces pastorianus
aagtcccattcatctggtttcaagc

SEQ ID NO: 92434 - DNA, 25 bp, Saccharomyces pastorianus
gaattgggccaggactctttgactc

SEQ ID NO: 92435 - DNA, 25 bp, Saccharomyces pastorianus
tttatcgggtacctcaatggcttcc

SEQ ID NO: 92436 - DNA, 25 bp, Saccharomyces pastorianus
tttgccgtggctgctggtaacgaaa

SEQ ID NO: 92437 - DNA, 25 bp, Saccharomyces pastorianus
tcacaaaccaactgccggctgaaag

SEQ ID NO: 92438 - DNA, 25 bp, Saccharomyces pastorianus
ttttgaacactgcattgcacccgac

SEQ ID NO: 92439 - DNA, 25 bp, Saccharomyces pastorianus
gaatacgtctgctcgccttttaaga

SEQ ID NO: 92440 - DNA, 25 bp, Saccharomyces pastorianus
gtctgctcgccttttaagaggcttt

SEQ ID NO: 92441 - DNA, 25 bp, Saccharomyces pastorianus
agggaccaagcgctcgcaccgttag

SEQ ID NO: 92442 - DNA, 25 bp, Saccharomyces pastorianus
gagcttgtgcaatgggagtgccaat

SEQ ID NO: 92443 - DNA, 25 bp, Saccharomyces pastorianus
tagcaacgcttgactcacaaaccaa

SEQ ID NO: 92444 - DNA, 25 bp, Saccharomyces pastorianus
aactgccggctgaaagagcttgtgc

SEQ ID NO: 92445 - DNA, 25 bp, Saccharomyces pastorianus
gctcgcaccgttagcaacgcttgac

SEQ ID NO: 92446 - DNA, 25 bp, Saccharomyces pastorianus
ttcaaaggagccgaatacgtctgct

SEQ ID NO: 92447 - DNA, 25 bp, Saccharomyces pastorianus
ttgcacccgacaaatcagccactaa

SEQ ID NO: 92448 - DNA, 25 bp, Saccharomyces pastorianus
aatggtgatacgttggctttgagaa

SEQ ID NO: 92449 - DNA, 25 bp, Saccharomyces pastorianus
gtggtagccaagtatcccatgggaa

SEQ ID NO: 92450 - DNA, 25 bp, Saccharomyces pastorianus
gtccttgccactttggcgattttga

SEQ ID NO: 92451 - DNA, 25 bp, Saccharomyces pastorianus
tgaagctgccactcagtacgatatt

SEQ ID NO: 92452 - DNA, 25 bp, Saccharomyces pastorianus
aaaaatacgttgcactgtcccgtgt

SEQ ID NO: 92453 - DNA, 25 bp, Saccharomyces pastorianus
atttcagacatgctggctgtccttg

SEQ ID NO: 92454 - DNA, 25 bp, Saccharomyces pastorianus
gaccgtgggagatgctatttcagac

SEQ ID NO: 92455 - DNA, 25 bp, Saccharomyces pastorianus
aaggactcctctaagttaggtcaat

SEQ ID NO: 92456 - DNA, 25 bp, Saccharomyces pastorianus
gctggttaagtgcatcgttcctgat

SEQ ID NO: 92457 - DNA, 25 bp, Saccharomyces pastorianus
gcagttccaccgcttacataaaaaa

SEQ ID NO: 92458 - DNA, 25 bp, Saccharomyces pastorianus
gaagagtatactgatttgcccaaca

SEQ ID NO: 92459 - DNA, 25 bp, Saccharomyces pastorianus
gatactcttcctcattttccaaaaa

SEQ ID NO: 92460 - DNA, 25 bp, Saccharomyces pastorianus
gtttccgtgttaatcaaccgtattg

SEQ ID NO: 92461 - DNA, 25 bp, Saccharomyces pastorianus
tacaagctacactttttcccaatgc

SEQ ID NO: 92462 - DNA, 25 bp, Saccharomyces pastorianus
attacccaacaactagatactcttc

SEQ ID NO: 92463 - DNA, 25 bp, Saccharomyces pastorianus
ctgcaacactgcatgatcaagtttt

SEQ ID NO: 92464 - DNA, 25 bp, Saccharomyces pastorianus
aacaggttcatctcgacaatgccaa

SEQ ID NO: 92465 - DNA, 25 bp, Saccharomyces pastorianus
actctggataatttagctgcaacac

SEQ ID NO: 92466 - DNA, 25 bp, Saccharomyces pastorianus
acttgctaggcatttactccaaaga

SEQ ID NO: 92467 - DNA, 25 bp, Saccharomyces pastorianus
ttcccaatgccatactgaaacaggt

SEQ ID NO: 92468 - DNA, 25 bp, Saccharomyces pastorianus
gaatcggccacatcatccattatgg

SEQ ID NO: 92469 - DNA, 25 bp, Saccharomyces pastorianus
aaccgtattgctttcgaatcggcca

SEQ ID NO: 92470 - DNA, 25 bp, Saccharomyces pastorianus
gatcgatactgtgaaatgcccgcaa

SEQ ID NO: 92471 - DNA, 25 bp, Saccharomyces pastorianus
tgaaccctcaaataccttggttggt

SEQ ID NO: 92472 - DNA, 25 bp, Saccharomyces pastorianus
ccgcaacctttcaacacattagcat

SEQ ID NO: 92473 - DNA, 25 bp, Saccharomyces pastorianus
ggtccacgcaggtcacagaagttca

SEQ ID NO: 92474 - DNA, 25 bp, Saccharomyces pastorianus
gccgcaggtatggactcgtatgttt

SEQ ID NO: 92475 - DNA, 25 bp, Saccharomyces pastorianus
aagacggcgttcctgaattgatcat

SEQ ID NO: 92476 - DNA, 25 bp, Saccharomyces pastorianus
tagtctacccatcgtgggaggtcca

SEQ ID NO: 92477 - DNA, 25 bp, Saccharomyces pastorianus
atttagtcatcattcctcaaacctc

SEQ ID NO: 92478 - DNA, 25 bp, Saccharomyces pastorianus
gccatgttgacggtgtagctgtatc

SEQ ID NO: 92479 - DNA, 25 bp, Saccharomyces pastorianus
tggaagtgttcccatagtctaccca

SEQ ID NO: 92480 - DNA, 25 bp, Saccharomyces pastorianus
aggaaccattacaccatatgtcggg

SEQ ID NO: 92481 - DNA, 25 bp, Saccharomyces pastorianus
cagcatgctgcagtgttttattcaa

SEQ ID NO: 92482 - DNA, 25 bp, Saccharomyces pastorianus
aagctgatgctgacttctaagccag

SEQ ID NO: 92483 - DNA, 25 bp, Saccharomyces pastorianus
gaaatgtgccaatgagactcttgat

SEQ ID NO: 92484 - DNA, 25 bp, Saccharomyces pastorianus
aatgtgttcaaccagctcactgttt

SEQ ID NO: 92485 - DNA, 25 bp, Saccharomyces pastorianus
attatcccaatgctgaaatgtgcca

SEQ ID NO: 92486 - DNA, 25 bp, Saccharomyces pastorianus
ttctaagccaggtcagcatgctgca

SEQ ID NO: 92487 - DNA, 25 bp, Saccharomyces pastorianus
gacatcgagcctatggatttgttga

SEQ ID NO: 92488 - DNA, 25 bp, Saccharomyces pastorianus
caagctcgtttattttattatccca

SEQ ID NO: 92489 - DNA, 25 bp, Saccharomyces pastorianus
gattgacttgtatactgcaactatc

SEQ ID NO: 92490 - DNA, 25 bp, Saccharomyces pastorianus
gaggctcattgagcaagctcgttta

SEQ ID NO: 92491 - DNA, 25 bp, Saccharomyces pastorianus
gagttgtcgacatgttagctgttta

SEQ ID NO: 92492 - DNA, 25 bp, Saccharomyces pastorianus
tattgctaaggccaccaaagaattc

SEQ ID NO: 92493 - DNA, 25 bp, Saccharomyces pastorianus
aatacttgtacctaagagccgttgg

SEQ ID NO: 92494 - DNA, 25 bp, Saccharomyces pastorianus
taaggccaccaaagaattcaagggt

SEQ ID NO: 92495 - DNA, 25 bp, Saccharomyces pastorianus
tgctaaggccaccaaagaattcaag

SEQ ID NO: 92496 - DNA, 25 bp, Saccharomyces pastorianus
tggtcctttaggtctatcgccaaag

SEQ ID NO: 92497 - DNA, 25 bp, Saccharomyces pastorianus
gaagatattgctaaggccaccaaag

SEQ ID NO: 92498 - DNA, 25 bp, Saccharomyces pastorianus
agatattgctaaggccaccaaagaa

SEQ ID NO: 92499 - DNA, 25 bp, Saccharomyces pastorianus
gtgttgacttcaagaatccccatga

SEQ ID NO: 92500 - DNA, 25 bp, Saccharomyces pastorianus
tcaaggttaccgttcaattaaagat

SEQ ID NO: 92501 - DNA, 25 bp, Saccharomyces pastorianus
tttggctccaaagattggtccttta

SEQ ID NO: 92502 - DNA, 25 bp, Saccharomyces pastorianus
gaatccccatgatatcattgaaggc

SEQ ID NO: 92503 - DNA, 25 bp, Saccharomyces pastorianus
agtactccgtcaaaattctctaatg

SEQ ID NO: 92504 - DNA, 25 bp, Saccharomyces pastorianus
attcaattggtgttcctgagttacc

SEQ ID NO: 92505 - DNA, 25 bp, Saccharomyces pastorianus
ggactcccacgaatacaaggttgaa

SEQ ID NO: 92506 - DNA, 25 bp, Saccharomyces pastorianus
aagtgcgcaatgtcgttagttctat

SEQ ID NO: 92507 - DNA, 25 bp, Saccharomyces pastorianus
ttctaaagcattatcagtcaactca

SEQ ID NO: 92508 - DNA, 25 bp, Saccharomyces pastorianus
gagctctctctggagtactattgta

SEQ ID NO: 92509 - DNA, 25 bp, Saccharomyces pastorianus
aagactggttcaagagctctctctg

SEQ ID NO: 92510 - DNA, 25 bp, Saccharomyces pastorianus
gggccactaactttatcgaaactga

SEQ ID NO: 92511 - DNA, 25 bp, Saccharomyces pastorianus
ctaatagaggttttccaatttgcaa

SEQ ID NO: 92512 - DNA, 25 bp, Saccharomyces pastorianus
aggatggaactatttccccatacaa

SEQ ID NO: 92513 - DNA, 25 bp, Saccharomyces pastorianus
gggaggcgataataacggcgttcta

SEQ ID NO: 92514 - DNA, 25 bp, Saccharomyces pastorianus
atatttgtccatttacgttcgtgat

SEQ ID NO: 92515 - DNA, 25 bp, Saccharomyces pastorianus
gattttgagttacgcccaacaacca

SEQ ID NO: 92516 - DNA, 25 bp, Saccharomyces pastorianus
ttggccgcaggagattacttgacat

SEQ ID NO: 92517 - DNA, 25 bp, Saccharomyces pastorianus
gagtcgcgcagtttactttcaagca

SEQ ID NO: 92518 - DNA, 25 bp, Saccharomyces pastorianus
gattctactgattcacacacggtgc

SEQ ID NO: 92519 - DNA, 25 bp, Saccharomyces pastorianus
ttcccacaccgatgattctactgat

SEQ ID NO: 92520 - DNA, 25 bp, Saccharomyces pastorianus
ggtataactatttcgcacaggcttc

SEQ ID NO: 92521 - DNA, 25 bp, Saccharomyces pastorianus
aacctgatagcgtcgatactggtat

SEQ ID NO: 92522 - DNA, 25 bp, Saccharomyces pastorianus
gagagttcaaagtccctaagtgtac

SEQ ID NO: 92523 - DNA, 25 bp, Saccharomyces pastorianus
acgggtgcagcggattttacttcct

SEQ ID NO: 92524 - DNA, 25 bp, Saccharomyces pastorianus
agaaagatttgcctttgcccgtgcc

SEQ ID NO: 92525 - DNA, 25 bp, Saccharomyces pastorianus
gagttatgcaaactgctgccttttc

SEQ ID NO: 92526 - DNA, 25 bp, Saccharomyces pastorianus
agggttaatgctatcgaacacgtta

SEQ ID NO: 92527 - DNA, 25 bp, Saccharomyces pastorianus
acgttagtggtgtgtatttgtctca

SEQ ID NO: 92528 - DNA, 25 bp, Saccharomyces pastorianus
atcgaacacgttattatcccaagaa

SEQ ID NO: 92529 - DNA, 25 bp, Saccharomyces pastorianus
cttggccgaagtttcctatgcaaca

SEQ ID NO: 92530 - DNA, 25 bp, Saccharomyces pastorianus
gaagtagctgctgatgaggaacctc

SEQ ID NO: 92531 - DNA, 25 bp, Saccharomyces pastorianus
gtctcaatttgagtcctacatcgac

SEQ ID NO: 92532 - DNA, 25 bp, Saccharomyces pastorianus
tgctgccttttccttggccgaagtt

SEQ ID NO: 92533 - DNA, 25 bp, Saccharomyces pastorianus
gagtcctacatcgaccctgaaatta

SEQ ID NO: 92534 - DNA, 25 bp, Saccharomyces pastorianus
gaaactttagttgaattagcctctt

SEQ ID NO: 92535 - DNA, 25 bp, Saccharomyces pastorianus
gcaagaaagtgtctctactgcaaga

SEQ ID NO: 92536 - DNA, 25 bp, Saccharomyces pastorianus
ataatcttgcatctttgcctcttgg

SEQ ID NO: 92537 - DNA, 25 bp, Saccharomyces pastorianus
gcggcattgtctacaggctgtgcaa

SEQ ID NO: 92538 - DNA, 25 bp, Saccharomyces pastorianus
ttagcctatttataatcttgcatct

SEQ ID NO: 92539 - DNA, 25 bp, Saccharomyces pastorianus
ttgcctcttggtctgtcttttactt

SEQ ID NO: 92540 - DNA, 25 bp, Saccharomyces pastorianus
gaaaaggtccctatgttgcttcttt

SEQ ID NO: 92541 - DNA, 25 bp, Saccharomyces pastorianus
ttgcatctttgcctcttggtctgtc

SEQ ID NO: 92542 - DNA, 25 bp, Saccharomyces pastorianus
ccctatgttgcttcttttctactaa

SEQ ID NO: 92543 - DNA, 25 bp, Saccharomyces pastorianus
gtctacaggctgtgcaaaattatat

SEQ ID NO: 92544 - DNA, 25 bp, Saccharomyces pastorianus
gataaatgtaaccagaacaacgaag

SEQ ID NO: 92545 - DNA, 25 bp, Saccharomyces pastorianus
acaagcggcattgtctacaggctgt

SEQ ID NO: 92546 - DNA, 25 bp, Saccharomyces pastorianus
gcttcttttctactaaaattagcct

SEQ ID NO: 92547 - DNA, 25 bp, Saccharomyces pastorianus
aatactaccggcgaattgtcttata

SEQ ID NO: 92548 - DNA, 25 bp, Saccharomyces pastorianus
tatttccatgatccccataggtact

SEQ ID NO: 92549 - DNA, 25 bp, Saccharomyces pastorianus
tattgcttgtgatgggttacgccca

SEQ ID NO: 92550 - DNA, 25 bp, Saccharomyces pastorianus
gacccactgttagaggtgttgccat

SEQ ID NO: 92551 - DNA, 25 bp, Saccharomyces pastorianus
atgtgtctttagaggctgtcgctac

SEQ ID NO: 92552 - DNA, 25 bp, Saccharomyces pastorianus
gcgggaaagtagaccctgctatctt

SEQ ID NO: 92553 - DNA, 25 bp, Saccharomyces pastorianus
aaaattctgtcgctctgctggtaca

SEQ ID NO: 92554 - DNA, 25 bp, Saccharomyces pastorianus
acagatctcttggtaaagccggcag

SEQ ID NO: 92555 - DNA, 25 bp, Saccharomyces pastorianus
ggcgatgtggtcgaatccttcagaa

SEQ ID NO: 92556 - DNA, 25 bp, Saccharomyces pastorianus
agaggcaactgtctacctatttcca

SEQ ID NO: 92557 - DNA, 25 bp, Saccharomyces pastorianus
agagtccttgcgaaattacctgaaa

SEQ ID NO: 92558 - DNA, 25 bp, Saccharomyces pastorianus
caattgaagttgctgaggctgtttt

SEQ ID NO: 92559 - DNA, 25 bp, Saccharomyces pastorianus
aattgaagttgctgaggctgttttc

SEQ ID NO: 92560 - DNA, 25 bp, Saccharomyces pastorianus
caatactactctttccaagctgctc

SEQ ID NO: 92561 - DNA, 25 bp, Saccharomyces pastorianus
cccaattgaagttgctgaggctgtt

SEQ ID NO: 92562 - DNA, 25 bp, Saccharomyces pastorianus
ctacccaattgaagttgctgaggct

SEQ ID NO: 92563 - DNA, 25 bp, Saccharomyces pastorianus
acccaattgaagttgctgaggctgt

SEQ ID NO: 92564 - DNA, 25 bp, Saccharomyces pastorianus
atactactctttccaagctgctcac

SEQ ID NO: 92565 - DNA, 25 bp, Saccharomyces pastorianus
attgaagttgctgaggctgttttca

SEQ ID NO: 92566 - DNA, 25 bp, Saccharomyces pastorianus
tcaatactactctttccaagctgct

SEQ ID NO: 92567 - DNA, 25 bp, Saccharomyces pastorianus
tacccaattgaagttgctgaggctg

SEQ ID NO: 92568 - DNA, 25 bp, Saccharomyces pastorianus
ccaattgaagttgctgaggctgttt

SEQ ID NO: 92569 - DNA, 25 bp, Saccharomyces pastorianus
gacgggtctgaagattgtcattgga

SEQ ID NO: 92570 - DNA, 25 bp, Saccharomyces pastorianus
ggcattctttagattccaaacctct

SEQ ID NO: 92571 - DNA, 25 bp, Saccharomyces pastorianus
tatgttgattaagcagacgggtctg

SEQ ID NO: 92572 - DNA, 25 bp, Saccharomyces pastorianus
aatcctttacttgttagcggtgacg

SEQ ID NO: 92573 - DNA, 25 bp, Saccharomyces pastorianus
aagtgctttggttgaatggcattct

SEQ ID NO: 92574 - DNA, 25 bp, Saccharomyces pastorianus
gaaggtgtctctgtatttgctatgt

SEQ ID NO: 92575 - DNA, 25 bp, Saccharomyces pastorianus
gtactcaaatataacgtgctttcta

SEQ ID NO: 92576 - DNA, 25 bp, Saccharomyces pastorianus
tcaatcagattttcgaaaccgtaag

SEQ ID NO: 92577 - DNA, 25 bp, Saccharomyces pastorianus
attgatttacgtccctaatgaggcg

SEQ ID NO: 92578 - DNA, 25 bp, Saccharomyces pastorianus
atacgtgtcaaatgtaatcctttac

SEQ ID NO: 92579 - DNA, 25 bp, Saccharomyces pastorianus
gagcttgaggccttgcttcgtatca

SEQ ID NO: 92580 - DNA, 25 bp, Saccharomyces pastorianus
agagcactattggttatgggcgaaa

SEQ ID NO: 92581 - DNA, 25 bp, Saccharomyces pastorianus
taaaaggcctgtacgcggccggtga

SEQ ID NO: 92582 - DNA, 25 bp, Saccharomyces pastorianus
gatgtagtcactgcagctattcaaa

SEQ ID NO: 92583 - DNA, 25 bp, Saccharomyces pastorianus
gaaattcttggctgccgaatcctta

SEQ ID NO: 92584 - DNA, 25 bp, Saccharomyces pastorianus
tataatttaccaatcactgtcgccc

SEQ ID NO: 92585 - DNA, 25 bp, Saccharomyces pastorianus
tgggacgtaccgttattctcaacga

SEQ ID NO: 92586 - DNA, 25 bp, Saccharomyces pastorianus
taccaaggctgatccgttgggacgt

SEQ ID NO: 92587 - DNA, 25 bp, Saccharomyces pastorianus
gaagtaacaccggttgtccatttca

SEQ ID NO: 92588 - DNA, 25 bp, Saccharomyces pastorianus
tgcaaacatactcttcgttcactac

SEQ ID NO: 92589 - DNA, 25 bp, Saccharomyces pastorianus
aagtttctggcggtgttcatggcgc

SEQ ID NO: 92590 - DNA, 25 bp, Saccharomyces pastorianus
gaatttggctctgacgttactccag

SEQ ID NO: 92591 - DNA, 25 bp, Saccharomyces pastorianus
tagagtctcgttccactatcaagtc

SEQ ID NO: 92592 - DNA, 25 bp, Saccharomyces pastorianus
aagtttgtcaagaaggccacccatt

SEQ ID NO: 92593 - DNA, 25 bp, Saccharomyces pastorianus
aaaagtcaaattggccatctccgag

SEQ ID NO: 92594 - DNA, 25 bp, Saccharomyces pastorianus
ggaagtcccaattgctgtactcgca

SEQ ID NO: 92595 - DNA, 25 bp, Saccharomyces pastorianus
agaatctggaatgccgctgcacaat

SEQ ID NO: 92596 - DNA, 25 bp, Saccharomyces pastorianus
tactcgcactctttggctcatgaat

SEQ ID NO: 92597 - DNA, 25 bp, Saccharomyces pastorianus
attgtgaggcaaagggcatcccgct

SEQ ID NO: 92598 - DNA, 25 bp, Saccharomyces pastorianus
ccgaggccttcgactatgctaaaga

SEQ ID NO: 92599 - DNA, 25 bp, Saccharomyces pastorianus
catctccatttgtctatccaagtct

SEQ ID NO: 92600 - DNA, 25 bp, Saccharomyces pastorianus
aaggccgctagaatggacccagatg

SEQ ID NO: 92601 - DNA, 25 bp, Saccharomyces pastorianus
aagaacatcctttcgactgtaacgg

SEQ ID NO: 92602 - DNA, 25 bp, Saccharomyces pastorianus
tactttagcgtggaagcgccaccgt

SEQ ID NO: 92603 - DNA, 25 bp, Saccharomyces pastorianus
cctctagattcaagtcggcgcatta

SEQ ID NO: 92604 - DNA, 25 bp, Saccharomyces pastorianus
gagagttctactgctgctaggcgac

SEQ ID NO: 92605 - DNA, 25 bp, Saccharomyces pastorianus
ggcgacgagagattgctgtttctaa

SEQ ID NO: 92606 - DNA, 25 bp, Saccharomyces pastorianus
gaggcagttgatctcggacgaaaac

SEQ ID NO: 92607 - DNA, 25 bp, Saccharomyces pastorianus
gcggatcaacgccttgttgaccaag

SEQ ID NO: 92608 - DNA, 25 bp, Saccharomyces pastorianus
cccggcgtcgatcaggagtacttaa

SEQ ID NO: 92609 - DNA, 25 bp, Saccharomyces pastorianus
gttgaccaaggctaacaaggctgca

SEQ ID NO: 92610 - DNA, 25 bp, Saccharomyces pastorianus
gacttgtgcccaaagcgacgtactt

SEQ ID NO: 92611 - DNA, 25 bp, Saccharomyces pastorianus
gaaattggctttccctctagattca

SEQ ID NO: 92612 - DNA, 25 bp, Saccharomyces pastorianus
agggcttctacaagtcgcctacgaa

SEQ ID NO: 92613 - DNA, 25 bp, Saccharomyces pastorianus
atgtgcctgtgggtccaaaggttcc

SEQ ID NO: 92614 - DNA, 25 bp, Saccharomyces pastorianus
tacacgaagatcattccatgcctct

SEQ ID NO: 92615 - DNA, 25 bp, Saccharomyces pastorianus
agcatttcttctgcatggtccaagt

SEQ ID NO: 92616 - DNA, 25 bp, Saccharomyces pastorianus
aatacaaatcaactttctcctccat

SEQ ID NO: 92617 - DNA, 25 bp, Saccharomyces pastorianus
aactccatcaactagtccaagcggt

SEQ ID NO: 92618 - DNA, 25 bp, Saccharomyces pastorianus
attggtgccaaacttgagcccacga

SEQ ID NO: 92619 - DNA, 25 bp, Saccharomyces pastorianus
aggagcagtatcacctcgatgtgcc

SEQ ID NO: 92620 - DNA, 25 bp, Saccharomyces pastorianus
atcacctgctaatgcggacacggat

SEQ ID NO: 92621 - DNA, 25 bp, Saccharomyces pastorianus
gactctcaaacgatgtgcccattgt

SEQ ID NO: 92622 - DNA, 25 bp, Saccharomyces pastorianus
gtacgcagtggttctttctacagtg

SEQ ID NO: 92623 - DNA, 25 bp, Saccharomyces pastorianus
atgaaccatcaaccaacggcggata

SEQ ID NO: 92624 - DNA, 25 bp, Saccharomyces pastorianus
ataccattgactttatagggccgga

SEQ ID NO: 92625 - DNA, 25 bp, Saccharomyces pastorianus
atgcctaccgcctaaagttaatgcc

SEQ ID NO: 92626 - DNA, 25 bp, Saccharomyces pastorianus
gccggacgagccaagtggtgcacaa

SEQ ID NO: 92627 - DNA, 25 bp, Saccharomyces pastorianus
tgactcgcacttctgtttggactta

SEQ ID NO: 92628 - DNA, 25 bp, Saccharomyces pastorianus
acgacagaacccgtccattgggtat

SEQ ID NO: 92629 - DNA, 25 bp, Saccharomyces pastorianus
aatagtgtcttcagtggcattgcgg

SEQ ID NO: 92630 - DNA, 25 bp, Saccharomyces pastorianus
aggtgcgtcattaccattgttgaaa

SEQ ID NO: 92631 - DNA, 25 bp, Saccharomyces pastorianus
taaagatgctcagtgccagtctcca

SEQ ID NO: 92632 - DNA, 25 bp, Saccharomyces pastorianus
gactcatcaattgtcatctccatgc

SEQ ID NO: 92633 - DNA, 25 bp, Saccharomyces pastorianus
attgggtatgcccttgtcctttact

SEQ ID NO: 92634 - DNA, 25 bp, Saccharomyces pastorianus
atattttctcttatttctacgacag

SEQ ID NO: 92635 - DNA, 25 bp, Saccharomyces pastorianus
aatgccatagcggtgacgcctatat

SEQ ID NO: 92636 - DNA, 25 bp, Saccharomyces pastorianus
ggatccacggcgtactcattgagtg

SEQ ID NO: 92637 - DNA, 25 bp, Saccharomyces pastorianus
gacaccataaataatcccctcgaga

SEQ ID NO: 92638 - DNA, 25 bp, Saccharomyces pastorianus
tcccctcgagagttcatgcataagc

SEQ ID NO: 92639 - DNA, 25 bp, Saccharomyces pastorianus
gactatcgagtcatctgccagtgaa

SEQ ID NO: 92640 - DNA, 25 bp, Saccharomyces pastorianus
gacgcctatatgtcctcatactttg

SEQ ID NO: 92641 - DNA, 25 bp, Saccharomyces pastorianus
attgattgttgccacgcctacggga

SEQ ID NO: 92642 - DNA, 25 bp, Saccharomyces pastorianus
aagccatttgcacatattctctcgc

SEQ ID NO: 92643 - DNA, 25 bp, Saccharomyces pastorianus
tgtgataactgcaagcccctattcg

SEQ ID NO: 92644 - DNA, 25 bp, Saccharomyces pastorianus
agctccttgtttatccctattagaa

SEQ ID NO: 92645 - DNA, 25 bp, Saccharomyces pastorianus
ggctctttaatatcgccaagcgtaa

SEQ ID NO: 92646 - DNA, 25 bp, Saccharomyces pastorianus
gagataaggtcgtatcctccgtatc

SEQ ID NO: 92647 - DNA, 25 bp, Saccharomyces pastorianus
ggtggtaattctaccaacgctccag

SEQ ID NO: 92648 - DNA, 25 bp, Saccharomyces pastorianus
gtagtaagactagttccaccgcttc

SEQ ID NO: 92649 - DNA, 25 bp, Saccharomyces pastorianus
aaaagagttcttcctcaactgcaac

SEQ ID NO: 92650 - DNA, 25 bp, Saccharomyces pastorianus
ctaacgtagcggcaaactggcattt

SEQ ID NO: 92651 - DNA, 25 bp, Saccharomyces pastorianus
gttatgatccaccaagcgataccaa

SEQ ID NO: 92652 - DNA, 25 bp, Saccharomyces pastorianus
tgcttatgtgtatacttcgtccagt

SEQ ID NO: 92653 - DNA, 25 bp, Saccharomyces pastorianus
gagggatctggcttggacccacata

SEQ ID NO: 92654 - DNA, 25 bp, Saccharomyces pastorianus
aacgctccaggaaccattgcatggt

SEQ ID NO: 92655 - DNA, 25 bp, Saccharomyces pastorianus
aaaacgtcatccgatcacagcagtt

SEQ ID NO: 92656 - DNA, 25 bp, Saccharomyces pastorianus
gcagcggatatcagcaacccaggat

SEQ ID NO: 92657 - DNA, 25 bp, Saccharomyces pastorianus
tagaagagggtggtcctaacaaagt

SEQ ID NO: 92658 - DNA, 25 bp, Saccharomyces pastorianus
acaaagttggacctaatttacatgg

SEQ ID NO: 92659 - DNA, 25 bp, Saccharomyces pastorianus
aaacgaggtgtcagcagtgtcatac

SEQ ID NO: 92660 - DNA, 25 bp, Saccharomyces pastorianus
aagggttattcttacacagatgcaa

SEQ ID NO: 92661 - DNA, 25 bp, Saccharomyces pastorianus
ggtgtcagcagtgtcatacaataga

SEQ ID NO: 92662 - DNA, 25 bp, Saccharomyces pastorianus
atgaggatagtatgtccgagtactt

SEQ ID NO: 92663 - DNA, 25 bp, Saccharomyces pastorianus
gcaaaaaagggtgctacattgttta

SEQ ID NO: 92664 - DNA, 25 bp, Saccharomyces pastorianus
gcaaacatcaacaagaacgtcaaat

SEQ ID NO: 92665 - DNA, 25 bp, Saccharomyces pastorianus
ggtatttttggtagacattcaggtc

SEQ ID NO: 92666 - DNA, 25 bp, Saccharomyces pastorianus
gtacgggattcaaaccaggctctgc

SEQ ID NO: 92667 - DNA, 25 bp, Saccharomyces pastorianus
cattcaggtcaggtaaagggttatt

SEQ ID NO: 92668 - DNA, 25 bp, Saccharomyces pastorianus
gactttattcccttatttcacgaag

SEQ ID NO: 92669 - DNA, 25 bp, Saccharomyces pastorianus
agcgaggtactgttcttgagcgata

SEQ ID NO: 92670 - DNA, 25 bp, Saccharomyces pastorianus
tctgggctcacggatacgaatctgg

SEQ ID NO: 92671 - DNA, 25 bp, Saccharomyces pastorianus
gggtatgttcaggatcccaacgcgc

SEQ ID NO: 92672 - DNA, 25 bp, Saccharomyces pastorianus
atagctactgggttagcttcccgac

SEQ ID NO: 92673 - DNA, 25 bp, Saccharomyces pastorianus
acatcttgcgggatatcggtgcgaa

SEQ ID NO: 92674 - DNA, 25 bp, Saccharomyces pastorianus
gaaagtgccgcaattggttcaacag

SEQ ID NO: 92675 - DNA, 25 bp, Saccharomyces pastorianus
gcctgcgcatgattcgttggatttg

SEQ ID NO: 92676 - DNA, 25 bp, Saccharomyces pastorianus
gaaacacagtcttacgccaacatct

SEQ ID NO: 92677 - DNA, 25 bp, Saccharomyces pastorianus
ggtttccaacattctgtcgcagttt

SEQ ID NO: 92678 - DNA, 25 bp, Saccharomyces pastorianus
acagttgcaaggctacgtctgggct

SEQ ID NO: 92679 - DNA, 25 bp, Saccharomyces pastorianus
aagacgatcaagctatttcgcgcct

SEQ ID NO: 92680 - DNA, 25 bp, Saccharomyces pastorianus
gaaaatctgcgtcaaccggaaccac

SEQ ID NO: 92681 - DNA, 25 bp, Saccharomyces pastorianus
ttatccaggtgtattttgcgtgcga

SEQ ID NO: 92682 - DNA, 25 bp, Saccharomyces pastorianus
atttgcacaagctgcccaaggcggt

SEQ ID NO: 92683 - DNA, 25 bp, Saccharomyces pastorianus
ccattggcctcactgtagaagattt

SEQ ID NO: 92684 - DNA, 25 bp, Saccharomyces pastorianus
cgcgcctctgtgaattgggctttga

SEQ ID NO: 92685 - DNA, 25 bp, Saccharomyces pastorianus
gtgaaggttctttccaagttgacta

SEQ ID NO: 92686 - DNA, 25 bp, Saccharomyces pastorianus
aagtgtttgtgtccatgttgctaga

SEQ ID NO: 92687 - DNA, 25 bp, Saccharomyces pastorianus
aaggcggtaatgcttcatccggtgc

SEQ ID NO: 92688 - DNA, 25 bp, Saccharomyces pastorianus
agatgctgcgcaaggtggacctcca

SEQ ID NO: 92689 - DNA, 25 bp, Saccharomyces pastorianus
taacccagaagctttagccccattg

SEQ ID NO: 92690 - DNA, 25 bp, Saccharomyces pastorianus
ttagctcctgcggtatgtgcggtgc

SEQ ID NO: 92691 - DNA, 25 bp, Saccharomyces pastorianus
aatggtcaggacttatcgttactta

SEQ ID NO: 92692 - DNA, 25 bp, Saccharomyces pastorianus
ggtgttgcaggattttaccggcctt

SEQ ID NO: 92693 - DNA, 25 bp, Saccharomyces pastorianus
aaatgccaccagaacgaagccaatg

SEQ ID NO: 92694 - DNA, 25 bp, Saccharomyces pastorianus
gttacttatactgttgagccggata

SEQ ID NO: 92695 - DNA, 25 bp, Saccharomyces pastorianus
ggatatatccgctgtgctctaatac

SEQ ID NO: 92696 - DNA, 25 bp, Saccharomyces pastorianus
gcgacggcgtttcttttagctcctg

SEQ ID NO: 92697 - DNA, 25 bp, Saccharomyces pastorianus
gttatactactccaagtcgccgttc

SEQ ID NO: 92698 - DNA, 25 bp, Saccharomyces pastorianus
agcgtccagctacagcgttatacta

SEQ ID NO: 92699 - DNA, 25 bp, Saccharomyces pastorianus
gatatcactgcagcaaggtctgggt

SEQ ID NO: 92700 - DNA, 25 bp, Saccharomyces pastorianus
ttttattaccactgttccttcacct

SEQ ID NO: 92701 - DNA, 25 bp, Saccharomyces pastorianus
catgccatgatgttaaccggtttaa

SEQ ID NO: 92702 - DNA, 25 bp, Saccharomyces pastorianus
gtttgcaaactgtcacccaattcac

SEQ ID NO: 92703 - DNA, 25 bp, Saccharomyces pastorianus
ggagccttgacatcatccttagtgt

SEQ ID NO: 92704 - DNA, 25 bp, Saccharomyces pastorianus
gatatcaatggcaaccaaatggact

SEQ ID NO: 92705 - DNA, 25 bp, Saccharomyces pastorianus
ttctggagccttgacatcatcctta

SEQ ID NO: 92706 - DNA, 25 bp, Saccharomyces pastorianus
atggactttagcgtgaccgtgctta

SEQ ID NO: 92707 - DNA, 25 bp, Saccharomyces pastorianus
ccggtttaatcggttctagcagctt

SEQ ID NO: 92708 - DNA, 25 bp, Saccharomyces pastorianus
aagtccttaccttcatcaaaagcag

SEQ ID NO: 92709 - DNA, 25 bp, Saccharomyces pastorianus
tcacccatagcggagatgatggtaa

SEQ ID NO: 92710 - DNA, 25 bp, Saccharomyces pastorianus
accaaatggactttagcgtgaccgt

SEQ ID NO: 92711 - DNA, 25 bp, Saccharomyces pastorianus
tttttcatttatatcccatgccatg

SEQ ID NO: 92712 - DNA, 25 bp, Saccharomyces pastorianus
cactaaggatgatgtcaaggctcca

SEQ ID NO: 92713 - DNA, 25 bp, Saccharomyces pastorianus
gtcacgctaaagtccatttggttgc

SEQ ID NO: 92714 - DNA, 25 bp, Saccharomyces pastorianus
taaggatgatgtcaaggctccagaa

SEQ ID NO: 92715 - DNA, 25 bp, Saccharomyces pastorianus
gctaaagtccatttggttgccattg

SEQ ID NO: 92716 - DNA, 25 bp, Saccharomyces pastorianus
ttaccatcatctccgctatgggtga

SEQ ID NO: 92717 - DNA, 25 bp, Saccharomyces pastorianus
ggttaccatcatctccgctatgggt

SEQ ID NO: 92718 - DNA, 25 bp, Saccharomyces pastorianus
acgctaaagtccatttggttgccat

SEQ ID NO: 92719 - DNA, 25 bp, Saccharomyces pastorianus
tgatggttaccatcatctccgctat

SEQ ID NO: 92720 - DNA, 25 bp, Saccharomyces pastorianus
taaagtccatttggttgccattgat

SEQ ID NO: 92721 - DNA, 25 bp, Saccharomyces pastorianus
atggttaccatcatctccgctatgg

SEQ ID NO: 92722 - DNA, 25 bp, Saccharomyces pastorianus
aagtccatttggttgccattgatat

SEQ ID NO: 92723 - DNA, 25 bp, Saccharomyces pastorianus
cactaaggatgatgtcaaggctcca

SEQ ID NO: 92724 - DNA, 25 bp, Saccharomyces pastorianus
gtcacgctaaagtccatttggttgc

SEQ ID NO: 92725 - DNA, 25 bp, Saccharomyces pastorianus
taaggatgatgtcaaggctccagaa

SEQ ID NO: 92726 - DNA, 25 bp, Saccharomyces pastorianus
gctaaagtccatttggttgccattg

SEQ ID NO: 92727 - DNA, 25 bp, Saccharomyces pastorianus
ttaccatcatctccgctatgggtga

SEQ ID NO: 92728 - DNA, 25 bp, Saccharomyces pastorianus
tttgaaactgctgacgctggttcct

SEQ ID NO: 92729 - DNA, 25 bp, Saccharomyces pastorianus
tgatggttaccatcatctccgctat

SEQ ID NO: 92730 - DNA, 25 bp, Saccharomyces pastorianus
atggttaccatcatctccgctatgg

SEQ ID NO: 92731 - DNA, 25 bp, Saccharomyces pastorianus
aagtccatttggttgccattgatat

SEQ ID NO: 92732 - DNA, 25 bp, Saccharomyces pastorianus
gtgaattgggtgacagtttgcaaac

SEQ ID NO: 92733 - DNA, 25 bp, Saccharomyces pastorianus
cagtttgcaaactgcttttgatgaa

SEQ ID NO: 92734 - DNA, 25 bp, Saccharomyces pastorianus
ttcatgtgcgcatatctaccggctg

SEQ ID NO: 92735 - DNA, 25 bp, Saccharomyces pastorianus
tgcaagcagccggtcggtggcaaat

SEQ ID NO: 92736 - DNA, 25 bp, Saccharomyces pastorianus
atcacatcatgtactcttcgctgaa

SEQ ID NO: 92737 - DNA, 25 bp, Saccharomyces pastorianus
tgtactcttcgctgaaccgggtttt

SEQ ID NO: 92738 - DNA, 25 bp, Saccharomyces pastorianus
acttttctttttccttatgcaggca

SEQ ID NO: 92739 - DNA, 25 bp, Saccharomyces pastorianus
tatgcaggcagtgtaattcattggg

SEQ ID NO: 92740 - DNA, 25 bp, Saccharomyces pastorianus
gggaggatgattttcatgtgcgcat

SEQ ID NO: 92741 - DNA, 25 bp, Saccharomyces pastorianus
ggtcggtggcaaatccggcgcttcc

SEQ ID NO: 92742 - DNA, 25 bp, Saccharomyces pastorianus
ttctttttccttatgcaggcagtgt

SEQ ID NO: 92743 - DNA, 25 bp, Saccharomyces pastorianus
gcaggccaagggaaatattagtttt

SEQ ID NO: 92744 - DNA, 25 bp, Saccharomyces pastorianus
tttattcgtatttcacacttttctt

SEQ ID NO: 92745 - DNA, 25 bp, Saccharomyces pastorianus
atccccaatcaaatctactccaaga

SEQ ID NO: 92746 - DNA, 25 bp, Saccharomyces pastorianus
gaggtcggtactccaagattaccta

SEQ ID NO: 92747 - DNA, 25 bp, Saccharomyces pastorianus
aatctcaggtattattgcgcgtctg

SEQ ID NO: 92748 - DNA, 25 bp, Saccharomyces pastorianus
gcaggtttgaagatcatgtcggaca

SEQ ID NO: 92749 - DNA, 25 bp, Saccharomyces pastorianus
tgaggaaggttcgtcgggacctctt

SEQ ID NO: 92750 - DNA, 25 bp, Saccharomyces pastorianus
gaaggtcaacggcatcttccgttaa

SEQ ID NO: 92751 - DNA, 25 bp, Saccharomyces pastorianus
aacgatataatgtcaccgcttcctg

SEQ ID NO: 92752 - DNA, 25 bp, Saccharomyces pastorianus
atgtggagcctggtaccatttctac

SEQ ID NO: 92753 - DNA, 25 bp, Saccharomyces pastorianus
gccatcgtcagcacgcagaatatta

SEQ ID NO: 92754 - DNA, 25 bp, Saccharomyces pastorianus
agtaagcaactctggatccccaatc

SEQ ID NO: 92755 - DNA, 25 bp, Saccharomyces pastorianus
gtagagaacatcttcacgcacctga

SEQ ID NO: 92756 - DNA, 25 bp, Saccharomyces pastorianus
ctgcgtcatcttgatcatcgttgta

SEQ ID NO: 92757 - DNA, 25 bp, Saccharomyces pastorianus
atgaggtggacgatgctgctttctt

SEQ ID NO: 92758 - DNA, 25 bp, Saccharomyces pastorianus
gtcgtcatcacctagcaaatctcgt

SEQ ID NO: 92759 - DNA, 25 bp, Saccharomyces pastorianus
ttggccgcgttattgctgttgtaaa

SEQ ID NO: 92760 - DNA, 25 bp, Saccharomyces pastorianus
ttcaagatcatcaccgtcgtcatca

SEQ ID NO: 92761 - DNA, 25 bp, Saccharomyces pastorianus
tggacgatgctgctttcttttcctt

SEQ ID NO: 92762 - DNA, 25 bp, Saccharomyces pastorianus
tttccttttcaagatcatcaccgtc

SEQ ID NO: 92763 - DNA, 25 bp, Saccharomyces pastorianus
tagcaaatctcgttcgtctgcgtca

SEQ ID NO: 92764 - DNA, 25 bp, Saccharomyces pastorianus
gccgcgttattgctgttgtaaactt

SEQ ID NO: 92765 - DNA, 25 bp, Saccharomyces pastorianus
atcatcgttgtagttggccgcgtta

SEQ ID NO: 92766 - DNA, 25 bp, Saccharomyces pastorianus
tcgttcgtctgcgtcatcttgatca

SEQ ID NO: 92767 - DNA, 25 bp, Saccharomyces pastorianus
taattctcggaactttaccttccat

SEQ ID NO: 92768 - DNA, 25 bp, Saccharomyces pastorianus
atgtgctttaaaggctttccatgat

SEQ ID NO: 92769 - DNA, 25 bp, Saccharomyces pastorianus
gagccttctgcattttcgataattc

SEQ ID NO: 92770 - DNA, 25 bp, Saccharomyces pastorianus
cgttctccgtctttagtgaaagcca

SEQ ID NO: 92771 - DNA, 25 bp, Saccharomyces pastorianus
acggattgtcgtttggctggctcac

SEQ ID NO: 92772 - DNA, 25 bp, Saccharomyces pastorianus
catctggaattttggttgactggaa

SEQ ID NO: 92773 - DNA, 25 bp, Saccharomyces pastorianus
gacggagtagttcttgagccttctg

SEQ ID NO: 92774 - DNA, 25 bp, Saccharomyces pastorianus
taccttccataatagctaccgcaga

SEQ ID NO: 92775 - DNA, 25 bp, Saccharomyces pastorianus
agtgaaagccactacagacggagta

SEQ ID NO: 92776 - DNA, 25 bp, Saccharomyces pastorianus
ggctggctcaccaactaaacgttct

SEQ ID NO: 92777 - DNA, 25 bp, Saccharomyces pastorianus
atcaataccgataactgcatctgga

SEQ ID NO: 92778 - DNA, 25 bp, Saccharomyces pastorianus
attggtttctcggattcaagctgga

SEQ ID NO: 92779 - DNA, 25 bp, Saccharomyces pastorianus
caaattttttcaactgcggcatcag

SEQ ID NO: 92780 - DNA, 25 bp, Saccharomyces pastorianus
tgcggcatcaggtcaaacatcggtg

SEQ ID NO: 92781 - DNA, 25 bp, Saccharomyces pastorianus
gaccagctagctaatgacacagaaa

SEQ ID NO: 92782 - DNA, 25 bp, Saccharomyces pastorianus
ggaatgccatcgaaaccgctaacaa

SEQ ID NO: 92783 - DNA, 25 bp, Saccharomyces pastorianus
gagcgtctgggctatctgatacgga

SEQ ID NO: 92784 - DNA, 25 bp, Saccharomyces pastorianus
tttcagcaaaagatctcgccagcca

SEQ ID NO: 92785 - DNA, 25 bp, Saccharomyces pastorianus
gcattcctccagctccaaaaggtat

SEQ ID NO: 92786 - DNA, 25 bp, Saccharomyces pastorianus
gtaattttactcttgcgggcattcc

SEQ ID NO: 92787 - DNA, 25 bp, Saccharomyces pastorianus
cacaaagactcttccatcactgttg

SEQ ID NO: 92788 - DNA, 25 bp, Saccharomyces pastorianus
gaacggcatcatcaacgtttcagca

SEQ ID NO: 92789 - DNA, 25 bp, Saccharomyces pastorianus
cttatcgaaccctacaacaacatta

SEQ ID NO: 92790 - DNA, 25 bp, Saccharomyces pastorianus
ccccattgtttacagagtgccgttt

SEQ ID NO: 92791 - DNA, 25 bp, Saccharomyces pastorianus
agattttatttattgcgtagcttca

SEQ ID NO: 92792 - DNA, 25 bp, Saccharomyces pastorianus
gaaagcaaaaatgggttccgccttg

SEQ ID NO: 92793 - DNA, 25 bp, Saccharomyces pastorianus
gagattacaccaaactatcccagtg

SEQ ID NO: 92794 - DNA, 25 bp, Saccharomyces pastorianus
gaaagctggctttgtctccaaaaca

SEQ ID NO: 92795 - DNA, 25 bp, Saccharomyces pastorianus
cagtgatcattgtcacatcctgtga

SEQ ID NO: 92796 - DNA, 25 bp, Saccharomyces pastorianus
atggatcctgttatgggtgacgaag

SEQ ID NO: 92797 - DNA, 25 bp, Saccharomyces pastorianus
attactaggagctatgcttcaggaa

SEQ ID NO: 92798 - DNA, 25 bp, Saccharomyces pastorianus
tttgtctccaaaacagctagtcgat

SEQ ID NO: 92799 - DNA, 25 bp, Saccharomyces pastorianus
ttctgctttgttattggatcgagtg

SEQ ID NO: 92800 - DNA, 25 bp, Saccharomyces pastorianus
ggaagctaacactaccgctatgacg

SEQ ID NO: 92801 - DNA, 25 bp, Saccharomyces pastorianus
gtacttacaagtgcttggttttcca

SEQ ID NO: 92802 - DNA, 25 bp, Saccharomyces pastorianus
gtgcgggcacactacttcataatgg

SEQ ID NO: 92803 - DNA, 25 bp, Saccharomyces pastorianus
tgcaaatttgccctcattacgtgat

SEQ ID NO: 92804 - DNA, 25 bp, Saccharomyces pastorianus
aaacggctaacaacgcaagaactca

SEQ ID NO: 92805 - DNA, 25 bp, Saccharomyces pastorianus
acaccactctaactgatgctcgtaa

SEQ ID NO: 92806 - DNA, 25 bp, Saccharomyces pastorianus
aatacgactattttcctagtgggat

SEQ ID NO: 92807 - DNA, 25 bp, Saccharomyces pastorianus
ttttcttgtcatgatcgtcgagctc

SEQ ID NO: 92808 - DNA, 25 bp, Saccharomyces pastorianus
catacggacttacctcactttagga

SEQ ID NO: 92809 - DNA, 25 bp, Saccharomyces pastorianus
gggcatagtttctacttcactcatt

SEQ ID NO: 92810 - DNA, 25 bp, Saccharomyces pastorianus
aaaacttggcgatgccaccgtcaac

SEQ ID NO: 92811 - DNA, 25 bp, Saccharomyces pastorianus
gtgttgagaccagacctattattca

SEQ ID NO: 92812 - DNA, 25 bp, Saccharomyces pastorianus
acctcattaggtgctgcttacggta

SEQ ID NO: 92813 - DNA, 25 bp, Saccharomyces pastorianus
tttgggtctatacggtttgattgtt

SEQ ID NO: 92814 - DNA, 25 bp, Saccharomyces pastorianus
tgaagttttgggtctatacggtttg

SEQ ID NO: 92815 - DNA, 25 bp, Saccharomyces pastorianus
ctgcaattatcttcacctcattagg

SEQ ID NO: 92816 - DNA, 25 bp, Saccharomyces pastorianus
ttttgctgaagttttgggtctatac

SEQ ID NO: 92817 - DNA, 25 bp, Saccharomyces pastorianus
ttgttattcgttgggtcaaaagcaa

SEQ ID NO: 92818 - DNA, 25 bp, Saccharomyces pastorianus
gagaccagacctattattcaagaac

SEQ ID NO: 92819 - DNA, 25 bp, Saccharomyces pastorianus
gaccagacctattattcaagaacat

SEQ ID NO: 92820 - DNA, 25 bp, Saccharomyces pastorianus
agacctattattcaagaacattgtt

SEQ ID NO: 92821 - DNA, 25 bp, Saccharomyces pastorianus
ctcattaggtgctgcttacggtact

SEQ ID NO: 92822 - DNA, 25 bp, Saccharomyces pastorianus
ttatggctggtatcattgccattta

SEQ ID NO: 92823 - DNA, 25 bp, Saccharomyces pastorianus
gaggttcctctcaacaaccaagatt

SEQ ID NO: 92824 - DNA, 25 bp, Saccharomyces pastorianus
gtgttggtatctgtgccacttgtgt

SEQ ID NO: 92825 - DNA, 25 bp, Saccharomyces pastorianus
gtgccacttgtgtgttgagaccaga

SEQ ID NO: 92826 - DNA, 25 bp, Saccharomyces pastorianus
acggtttgattgttgctttgttgtt

SEQ ID NO: 92827 - DNA, 25 bp, Saccharomyces pastorianus
tacgcccctttctttggtgccattg

SEQ ID NO: 92828 - DNA, 25 bp, Saccharomyces pastorianus
ttcgtcggtatgattttgattttga

SEQ ID NO: 92829 - DNA, 25 bp, Saccharomyces pastorianus
actgaattgtgtcctgtctacgccc

SEQ ID NO: 92830 - DNA, 25 bp, Saccharomyces pastorianus
tgattttgatttttgctgaagtttt

SEQ ID NO: 92831 - DNA, 25 bp, Saccharomyces pastorianus
acattgttcctgttattatggctgg

SEQ ID NO: 92832 - DNA, 25 bp, Saccharomyces pastorianus
gatgcaggtgttagaggttcctctc

SEQ ID NO: 92833 - DNA, 25 bp, Saccharomyces pastorianus
ggctgctaacttgagacaattgaag

SEQ ID NO: 92834 - DNA, 25 bp, Saccharomyces pastorianus
cttggatgtcgttcaacaggctgct

SEQ ID NO: 92835 - DNA, 25 bp, Saccharomyces pastorianus
tgttccatatgtctttgttccatct

SEQ ID NO: 92836 - DNA, 25 bp, Saccharomyces pastorianus
tgtcgttcaacaggctgctaacttg

SEQ ID NO: 92837 - DNA, 25 bp, Saccharomyces pastorianus
atatgtctttgttccatctagagtt

SEQ ID NO: 92838 - DNA, 25 bp, Saccharomyces pastorianus
acaaatcttggatgtcgttcaacag

SEQ ID NO: 92839 - DNA, 25 bp, Saccharomyces pastorianus
aacaggctgctaacttgagacaatt

SEQ ID NO: 92840 - DNA, 25 bp, Saccharomyces pastorianus
gaatgttccatatgtctttgttcca

SEQ ID NO: 92841 - DNA, 25 bp, Saccharomyces pastorianus
ggatgtcgttcaacaggctgctaac

SEQ ID NO: 92842 - DNA, 25 bp, Saccharomyces pastorianus
gtgaagacaagaatgttccatatgt

SEQ ID NO: 92843 - DNA, 25 bp, Saccharomyces pastorianus
tgtctttgttccatctagagttgct

SEQ ID NO: 92844 - DNA, 25 bp, Saccharomyces pastorianus
gcattaacccaacaaatcttggatg

SEQ ID NO: 92845 - DNA, 25 bp, Saccharomyces pastorianus
ctttaggtagagcttgtggtgtttc

SEQ ID NO: 92846 - DNA, 25 bp, Saccharomyces pastorianus
gagcttgtggtgtttctagaccagt

SEQ ID NO: 92847 - DNA, 25 bp, Saccharomyces pastorianus
tgctgactgtgaacctattgaaatc

SEQ ID NO: 92848 - DNA, 25 bp, Saccharomyces pastorianus
gatgcttctgctatcaagacccaaa

SEQ ID NO: 92849 - DNA, 25 bp, Saccharomyces pastorianus
cagttattgctgcttctattaccac

SEQ ID NO: 92850 - DNA, 25 bp, Saccharomyces pastorianus
atggctgctgactgtgaacctattg

SEQ ID NO: 92851 - DNA, 25 bp, Saccharomyces pastorianus
gatgctgcattaacccaacaaatct

SEQ ID NO: 92852 - DNA, 25 bp, Saccharomyces pastorianus
ctgctatcaagacccaaatctacgc

SEQ ID NO: 92853 - DNA, 25 bp, Saccharomyces pastorianus
gtgtttctagaccagttattgctgc

SEQ ID NO: 92854 - DNA, 25 bp, Saccharomyces pastorianus
aacgatgcttctgctatcaagaccc

SEQ ID NO: 92855 - DNA, 25 bp, Saccharomyces pastorianus
atctgcaggtgccaaatcaaccgta

SEQ ID NO: 92856 - DNA, 25 bp, Saccharomyces pastorianus
gggtatttgtactcacttaggttgt

SEQ ID NO: 92857 - DNA, 25 bp, Saccharomyces pastorianus
atttagcggctatcccattgggtaa

SEQ ID NO: 92858 - DNA, 25 bp, Saccharomyces pastorianus
tatgggtcttttgtcatctgcaggt

SEQ ID NO: 92859 - DNA, 25 bp, Saccharomyces pastorianus
gataaaggccgttcttatgcttact

SEQ ID NO: 92860 - DNA, 25 bp, Saccharomyces pastorianus
tatttcatctatgaccgctactgcc

SEQ ID NO: 92861 - DNA, 25 bp, Saccharomyces pastorianus
cgctactgccgatgttttggctatg

SEQ ID NO: 92862 - DNA, 25 bp, Saccharomyces pastorianus
cgtacaggaccccaaattttgatga

SEQ ID NO: 92863 - DNA, 25 bp, Saccharomyces pastorianus
tatgcttactttatggtcggtgcta

SEQ ID NO: 92864 - DNA, 25 bp, Saccharomyces pastorianus
aagccaacagtgtggatatgtccgc

SEQ ID NO: 92865 - DNA, 25 bp, Saccharomyces pastorianus
tggctagcaaatccacgtacaggac

SEQ ID NO: 92866 - DNA, 25 bp, Saccharomyces pastorianus
gtggtgggtattggaactgctcccc

SEQ ID NO: 92867 - DNA, 25 bp, Saccharomyces pastorianus
gtcagtttacattggtcagtctatt

SEQ ID NO: 92868 - DNA, 25 bp, Saccharomyces pastorianus
gtaaggcaattgttccaagatttgg

SEQ ID NO: 92869 - DNA, 25 bp, Saccharomyces pastorianus
ggcaaaattttcatacacctaacct

SEQ ID NO: 92870 - DNA, 25 bp, Saccharomyces pastorianus
gaactgctccccattggaatacgaa

SEQ ID NO: 92871 - DNA, 25 bp, Saccharomyces pastorianus
gaaggatgcttttactcttaaatgt

SEQ ID NO: 92872 - DNA, 25 bp, Saccharomyces pastorianus
cacctaacctcggaagatctcgtta

SEQ ID NO: 92873 - DNA, 25 bp, Saccharomyces pastorianus
gttatgtacccgaatatgtcagttt

SEQ ID NO: 92874 - DNA, 25 bp, Saccharomyces pastorianus
agggcaggaactccacatgggtcaa

SEQ ID NO: 92875 - DNA, 25 bp, Saccharomyces pastorianus
ggactgggatagtaattcctggaca

SEQ ID NO: 92876 - DNA, 25 bp, Saccharomyces pastorianus
tgatcgtaggtatagaccggacaat

SEQ ID NO: 92877 - DNA, 25 bp, Saccharomyces pastorianus
tgggcccaggtattgttagcggttt

SEQ ID NO: 92878 - DNA, 25 bp, Saccharomyces pastorianus
aagggctccctagctactggagaat

SEQ ID NO: 92879 - DNA, 25 bp, Saccharomyces pastorianus
attgcagtactctgcgggtgtatac

SEQ ID NO: 92880 - DNA, 25 bp, Saccharomyces pastorianus
tagaggccttttgatgttagcagaa

SEQ ID NO: 92881 - DNA, 25 bp, Saccharomyces pastorianus
ctaagggtactgttgacattgcgaa

SEQ ID NO: 92882 - DNA, 25 bp, Saccharomyces pastorianus
gtggtctctacaggatctgacatta

SEQ ID NO: 92883 - DNA, 25 bp, Saccharomyces pastorianus
aacacatgtggatatcttgactgat

SEQ ID NO: 92884 - DNA, 25 bp, Saccharomyces pastorianus
ggcattatccgccaagtacaatttt

SEQ ID NO: 92885 - DNA, 25 bp, Saccharomyces pastorianus
agaattgtcatgcaagggctcccta

SEQ ID NO: 92886 - DNA, 25 bp, Saccharomyces pastorianus
gacattacgaatgcacacggtgtgg

SEQ ID NO: 92887 - DNA, 25 bp, Saccharomyces pastorianus
gaaccgtggatgatgtggtctctac

SEQ ID NO: 92888 - DNA, 25 bp, Saccharomyces pastorianus
gaaacatctttctaccagattagag

SEQ ID NO: 92889 - DNA, 25 bp, Saccharomyces pastorianus
attagagtacaaacgcatgaaatcc

SEQ ID NO: 92890 - DNA, 25 bp, Saccharomyces pastorianus
gatgcatgtttgttccttattggtt

SEQ ID NO: 92891 - DNA, 25 bp, Saccharomyces pastorianus
atgatgcatgtttgttccttattgg

SEQ ID NO: 92892 - DNA, 25 bp, Saccharomyces pastorianus
tattggttagctttgatgttgtgaa

SEQ ID NO: 92893 - DNA, 25 bp, Saccharomyces pastorianus
agtctgtgaaacatctttctaccag

SEQ ID NO: 92894 - DNA, 25 bp, Saccharomyces pastorianus
gttagctttgatgttgtgaagtcat

SEQ ID NO: 92895 - DNA, 25 bp, Saccharomyces pastorianus
tgttgtgaagtcattgacacagtct

SEQ ID NO: 92896 - DNA, 25 bp, Saccharomyces pastorianus
accagattagagtacaaacgcatga

SEQ ID NO: 92897 - DNA, 25 bp, Saccharomyces pastorianus
gcatgtttgttccttattggttagc

SEQ ID NO: 92898 - DNA, 25 bp, Saccharomyces pastorianus
gttccttattggttagctttgatgt

SEQ ID NO: 92899 - DNA, 25 bp, Saccharomyces pastorianus
aacatgcatcatgaagtgctcagaa

SEQ ID NO: 92900 - DNA, 25 bp, Saccharomyces pastorianus
ttcttgaagcatagcgaacgtgtag

SEQ ID NO: 92901 - DNA, 25 bp, Saccharomyces pastorianus
ggatttcatgcgtttgtactctaat

SEQ ID NO: 92902 - DNA, 25 bp, Saccharomyces pastorianus
agcgaacgtgtagggcagcgtttcc

SEQ ID NO: 92903 - DNA, 25 bp, Saccharomyces pastorianus
aagtgctcagaaaagttcttgaagc

SEQ ID NO: 92904 - DNA, 25 bp, Saccharomyces pastorianus
agactgtgtcaatgacttcacaaca

SEQ ID NO: 92905 - DNA, 25 bp, Saccharomyces pastorianus
gacttcacaacatcaaagctaacca

SEQ ID NO: 92906 - DNA, 25 bp, Saccharomyces pastorianus
tgtagggcagcgtttccaagaacaa

SEQ ID NO: 92907 - DNA, 25 bp, Saccharomyces pastorianus
ggtagaaagatgtttcacagactgt

SEQ ID NO: 92908 - DNA, 25 bp, Saccharomyces pastorianus
taaccaataaggaacaaacatgcat

SEQ ID NO: 92909 - DNA, 25 bp, Saccharomyces pastorianus
atgcgtttgtactctaatctggtag

SEQ ID NO: 92910 - DNA, 25 bp, Saccharomyces pastorianus
atatcgtaccggagaactcaccgct

SEQ ID NO: 92911 - DNA, 25 bp, Saccharomyces pastorianus
cagcgtgttctcaagtcgtttcaat

SEQ ID NO: 92912 - DNA, 25 bp, Saccharomyces pastorianus
ttcaaacaatcctcagatgcctgtc

SEQ ID NO: 92913 - DNA, 25 bp, Saccharomyces pastorianus
caaatcgacctttctacctgggata

SEQ ID NO: 92914 - DNA, 25 bp, Saccharomyces pastorianus
aattgacttgtcctatcacctgcaa

SEQ ID NO: 92915 - DNA, 25 bp, Saccharomyces pastorianus
gcaaaccttacgaagcaccattgat

SEQ ID NO: 92916 - DNA, 25 bp, Saccharomyces pastorianus
aaactcctctcgacgtacgaatcgg

SEQ ID NO: 92917 - DNA, 25 bp, Saccharomyces pastorianus
gtcgcagatattactagcacctaca

SEQ ID NO: 92918 - DNA, 25 bp, Saccharomyces pastorianus
aacttgtgtaataccggatctgcaa

SEQ ID NO: 92919 - DNA, 25 bp, Saccharomyces pastorianus
gaatcggaatccaactcatttgacg

SEQ ID NO: 92920 - DNA, 25 bp, Saccharomyces pastorianus
agagattgcccgcaagcagcgtgtt

SEQ ID NO: 92921 - DNA, 25 bp, Saccharomyces pastorianus
agttgcgatgcaccggtctttatac

SEQ ID NO: 92922 - DNA, 25 bp, Saccharomyces pastorianus
gttgtccatcgtttagtgttgttct

SEQ ID NO: 92923 - DNA, 25 bp, Saccharomyces pastorianus
gtacttttcgtcaaggagcttctcg

SEQ ID NO: 92924 - DNA, 25 bp, Saccharomyces pastorianus
gtcaggatatcgttgatgcccagtt

SEQ ID NO: 92925 - DNA, 25 bp, Saccharomyces pastorianus
agtttcctgtttccatttgccacgt

SEQ ID NO: 92926 - DNA, 25 bp, Saccharomyces pastorianus
acgttgctttgccttcttaaatttg

SEQ ID NO: 92927 - DNA, 25 bp, Saccharomyces pastorianus
agatccacttttgccagcatttgca

SEQ ID NO: 92928 - DNA, 25 bp, Saccharomyces pastorianus
gacctgcgttttcttgaatcgatcg

SEQ ID NO: 92929 - DNA, 25 bp, Saccharomyces pastorianus
ataccgttcttcaatatctcatcct

SEQ ID NO: 92930 - DNA, 25 bp, Saccharomyces pastorianus
gatatcatgcatttccaaaccgtgt

SEQ ID NO: 92931 - DNA, 25 bp, Saccharomyces pastorianus
atcatccttatttgttcgacctgcg

SEQ ID NO: 92932 - DNA, 25 bp, Saccharomyces pastorianus
gtgctactataactacgactacgcc

SEQ ID NO: 92933 - DNA, 25 bp, Saccharomyces pastorianus
ggatctgctggtaccagtgctacta

SEQ ID NO: 92934 - DNA, 25 bp, Saccharomyces pastorianus
ataaagaccggtgcatcgcaactgc

SEQ ID NO: 92935 - DNA, 25 bp, Saccharomyces pastorianus
gaagctattcaagagtcccgatggt

SEQ ID NO: 92936 - DNA, 25 bp, Saccharomyces pastorianus
gacaacttagtctacacggtttgga

SEQ ID NO: 92937 - DNA, 25 bp, Saccharomyces pastorianus
gatatcgagaagctccttgacgaaa

SEQ ID NO: 92938 - DNA, 25 bp, Saccharomyces pastorianus
cgaaaggtcattggcacggacgact

SEQ ID NO: 92939 - DNA, 25 bp, Saccharomyces pastorianus
caacgatatcctgaccatagttaag

SEQ ID NO: 92940 - DNA, 25 bp, Saccharomyces pastorianus
gagtcccgatggtagcattatcaag

SEQ ID NO: 92941 - DNA, 25 bp, Saccharomyces pastorianus
agcgttcatgaactgcagctgattc

SEQ ID NO: 92942 - DNA, 25 bp, Saccharomyces pastorianus
acatggcgcattcaatggacccaaa

SEQ ID NO: 92943 - DNA, 25 bp, Saccharomyces pastorianus
gttgatgagcacgttaccaggtggt

SEQ ID NO: 92944 - DNA, 25 bp, Saccharomyces pastorianus
ggtgttatcttagtttttattctag

SEQ ID NO: 92945 - DNA, 25 bp, Saccharomyces pastorianus
gtatcgccatcatttctaccattat

SEQ ID NO: 92946 - DNA, 25 bp, Saccharomyces pastorianus
tatcttagtttttattctagtcggt

SEQ ID NO: 92947 - DNA, 25 bp, Saccharomyces pastorianus
tgatgagcacgttaccaggtggtgt

SEQ ID NO: 92948 - DNA, 25 bp, Saccharomyces pastorianus
cgccatcatttctaccattatctac

SEQ ID NO: 92949 - DNA, 25 bp, Saccharomyces pastorianus
ttgtatcgccatcatttctaccatt

SEQ ID NO: 92950 - DNA, 25 bp, Saccharomyces pastorianus
gatgagcacgttaccaggtggtgtt

SEQ ID NO: 92951 - DNA, 25 bp, Saccharomyces pastorianus
atcgccatcatttctaccattatct

SEQ ID NO: 92952 - DNA, 25 bp, Saccharomyces pastorianus
ggtttggcttgtatcgccatcattt

SEQ ID NO: 92953 - DNA, 25 bp, Saccharomyces pastorianus
ttgatgagcacgttaccaggtggtg

SEQ ID NO: 92954 - DNA, 25 bp, Saccharomyces pastorianus
tggtacctctagtattctccatggt

SEQ ID NO: 92955 - DNA, 25 bp, Saccharomyces pastorianus
gtttaccaatactcacgtggctgct

SEQ ID NO: 92956 - DNA, 25 bp, Saccharomyces pastorianus
tacagtgaaccgttcccttggtatg

SEQ ID NO: 92957 - DNA, 25 bp, Saccharomyces pastorianus
tatttccgccgtcgatacgattttt

SEQ ID NO: 92958 - DNA, 25 bp, Saccharomyces pastorianus
ttggacccgatgactttcaatctca

SEQ ID NO: 92959 - DNA, 25 bp, Saccharomyces pastorianus
ctttcaggaatacctctccgatatt

SEQ ID NO: 92960 - DNA, 25 bp, Saccharomyces pastorianus
gccgttgccgcccataataaatatc

SEQ ID NO: 92961 - DNA, 25 bp, Saccharomyces pastorianus
gtgagaaacatattagccgccgggc

SEQ ID NO: 92962 - DNA, 25 bp, Saccharomyces pastorianus
aggattatctttccactatttccgc

SEQ ID NO: 92963 - DNA, 25 bp, Saccharomyces pastorianus
ccacctctgcgtttactaagttcaa

SEQ ID NO: 92964 - DNA, 25 bp, Saccharomyces pastorianus
tacacgctcgatttctgtttaccaa

SEQ ID NO: 92965 - DNA, 25 bp, Saccharomyces pastorianus
aaaaccctcgagacaagcaatggat

SEQ ID NO: 92966 - DNA, 25 bp, Saccharomyces pastorianus
tgctgatcaaggcaagtgcgctttt

SEQ ID NO: 92967 - DNA, 25 bp, Saccharomyces pastorianus
ggattcgtgacttgattgaagctca

SEQ ID NO: 92968 - DNA, 25 bp, Saccharomyces pastorianus
agaagatttcgacccgagctggaaa

SEQ ID NO: 92969 - DNA, 25 bp, Saccharomyces pastorianus
gaagtcgtacctccatttgaaaaca

SEQ ID NO: 92970 - DNA, 25 bp, Saccharomyces pastorianus
tagggtcggcgatatctggattctc

SEQ ID NO: 92971 - DNA, 25 bp, Saccharomyces pastorianus
atgggcacacatggatacaacttta

SEQ ID NO: 92972 - DNA, 25 bp, Saccharomyces pastorianus
gaccgcatttatatcgcatctttat

SEQ ID NO: 92973 - DNA, 25 bp, Saccharomyces pastorianus
aaatgggtgatgtgcctatcggcat

SEQ ID NO: 92974 - DNA, 25 bp, Saccharomyces pastorianus
ttctcgcagatgaacactacgccat

SEQ ID NO: 92975 - DNA, 25 bp, Saccharomyces pastorianus
ggccgacgcaatgaccgcatttata

SEQ ID NO: 92976 - DNA, 25 bp, Saccharomyces pastorianus
gtgagagccaacacattattgcatt

SEQ ID NO: 92977 - DNA, 25 bp, Saccharomyces pastorianus
tgcattaccgctacagatcccactt

SEQ ID NO: 92978 - DNA, 25 bp, Saccharomyces pastorianus
taagggctcattacccgggaaagag

SEQ ID NO: 92979 - DNA, 25 bp, Saccharomyces pastorianus
gatgttcgcagttttcatatttgtg

SEQ ID NO: 92980 - DNA, 25 bp, Saccharomyces pastorianus
atgacagcactattctgccttgaat

SEQ ID NO: 92981 - DNA, 25 bp, Saccharomyces pastorianus
attattgcattaccgctacagatcc

SEQ ID NO: 92982 - DNA, 25 bp, Saccharomyces pastorianus
accgttaccttatatagatgttcgc

SEQ ID NO: 92983 - DNA, 25 bp, Saccharomyces pastorianus
gcactattctgccttgaattgagaa

SEQ ID NO: 92984 - DNA, 25 bp, Saccharomyces pastorianus
tattatcaattactggaaagggttc

SEQ ID NO: 92985 - DNA, 25 bp, Saccharomyces pastorianus
tcagatttttctgttataccgttac

SEQ ID NO: 92986 - DNA, 25 bp, Saccharomyces pastorianus
gcagttttcatatttgtgagagcca

SEQ ID NO: 92987 - DNA, 25 bp, Saccharomyces pastorianus
aagtttctggtaatgctgctgctgc

SEQ ID NO: 92988 - DNA, 25 bp, Saccharomyces pastorianus
aaggcattcgtggatttctgattag

SEQ ID NO: 92989 - DNA, 25 bp, Saccharomyces pastorianus
agagttcttcgaaagtggtgctgtc

SEQ ID NO: 92990 - DNA, 25 bp, Saccharomyces pastorianus
gatgtctccaaattggatctactgg

SEQ ID NO: 92991 - DNA, 25 bp, Saccharomyces pastorianus
aatccctatgactttttctcagaac

SEQ ID NO: 92992 - DNA, 25 bp, Saccharomyces pastorianus
tccgcatgttttgctattttagccc

SEQ ID NO: 92993 - DNA, 25 bp, Saccharomyces pastorianus
attttagccctagcagatgtctcca

SEQ ID NO: 92994 - DNA, 25 bp, Saccharomyces pastorianus
tatcttagatgctttaatccctatg

SEQ ID NO: 92995 - DNA, 25 bp, Saccharomyces pastorianus
gaactggctctagattcacctgtta

SEQ ID NO: 92996 - DNA, 25 bp, Saccharomyces pastorianus
agatgcgacctttgagcgtttacaa

SEQ ID NO: 92997 - DNA, 25 bp, Saccharomyces pastorianus
ggatctgaacatcaacctgtagagg

SEQ ID NO: 92998 - DNA, 25 bp, Saccharomyces pastorianus
tgagttcggtcatccagaatggttg

SEQ ID NO: 92999 - DNA, 25 bp, Saccharomyces pastorianus
atcgtgttgaactcagatcgtgctg

SEQ ID NO: 93000 - DNA, 25 bp, Saccharomyces pastorianus
tattgaccgtggtattgctctacac

SEQ ID NO: 93001 - DNA, 25 bp, Saccharomyces pastorianus
tgatcccttactgcgttaccagaat

SEQ ID NO: 93002 - DNA, 25 bp, Saccharomyces pastorianus
gggaggcgaggcttatttgaacttc

SEQ ID NO: 93003 - DNA, 25 bp, Saccharomyces pastorianus
ttttcaacttccatcctacaaacag

SEQ ID NO: 93004 - DNA, 25 bp, Saccharomyces pastorianus
aatttggctgatgatcccttactgc

SEQ ID NO: 93005 - DNA, 25 bp, Saccharomyces pastorianus
ggaaccatccatcgttattgaccgt

SEQ ID NO: 93006 - DNA, 25 bp, Saccharomyces pastorianus
atgattaggctgatcactcactcgc

SEQ ID NO: 93007 - DNA, 25 bp, Saccharomyces pastorianus
gaattctttaccaccgatttggaat

SEQ ID NO: 93008 - DNA, 25 bp, Saccharomyces pastorianus
gatgccgctatgtacaccgatatga

SEQ ID NO: 93009 - DNA, 25 bp, Saccharomyces pastorianus
ttcagcacgaaatgtcgagcgatct

SEQ ID NO: 93010 - DNA, 25 bp, Saccharomyces pastorianus
gacgaggcttcgagcttttctatta

SEQ ID NO: 93011 - DNA, 25 bp, Saccharomyces pastorianus
atcactttattatttcttcagcacg

SEQ ID NO: 93012 - DNA, 25 bp, Saccharomyces pastorianus
taatgcggaaagtctcagttgcgag

SEQ ID NO: 93013 - DNA, 25 bp, Saccharomyces pastorianus
gcgagtgattgcagacagttgtatg

SEQ ID NO: 93014 - DNA, 25 bp, Saccharomyces pastorianus
aaagtctcagttgcgagtgattgca

SEQ ID NO: 93015 - DNA, 25 bp, Saccharomyces pastorianus
attcgatatatctggtatcacttta

SEQ ID NO: 93016 - DNA, 25 bp, Saccharomyces pastorianus
caaacggaggttagagacgaggctt

SEQ ID NO: 93017 - DNA, 25 bp, Saccharomyces pastorianus
caggaaccaggaataagtagcgata

SEQ ID NO: 93018 - DNA, 25 bp, Saccharomyces pastorianus
cgagcgatctcgatgcaggaaccag

SEQ ID NO: 93019 - DNA, 25 bp, Saccharomyces pastorianus
tttttctctctttttaataatgcgg

SEQ ID NO: 93020 - DNA, 25 bp, Saccharomyces pastorianus
gcaaacagcgttcgattccactttc

SEQ ID NO: 93021 - DNA, 25 bp, Saccharomyces pastorianus
gttttgccaattccggagctagatg

SEQ ID NO: 93022 - DNA, 25 bp, Saccharomyces pastorianus
aagtctcgacaacttcattcttacc

SEQ ID NO: 93023 - DNA, 25 bp, Saccharomyces pastorianus
ggatcatctaggtgttgttgcttac

SEQ ID NO: 93024 - DNA, 25 bp, Saccharomyces pastorianus
aattgtgcccgaatccagtgatcct

SEQ ID NO: 93025 - DNA, 25 bp, Saccharomyces pastorianus
ttacccacgcctgttctagaagatg

SEQ ID NO: 93026 - DNA, 25 bp, Saccharomyces pastorianus
agtggaatctttcttttcgtcaagc

SEQ ID NO: 93027 - DNA, 25 bp, Saccharomyces pastorianus
agctagatgccgctgtagtggaatc

SEQ ID NO: 93028 - DNA, 25 bp, Saccharomyces pastorianus
gaatggacatccttgtttgacaatg

SEQ ID NO: 93029 - DNA, 25 bp, Saccharomyces pastorianus
accactgacgatgtttcattggctg

SEQ ID NO: 93030 - DNA, 25 bp, Saccharomyces pastorianus
ttctctggtaccatccaatctggaa

SEQ ID NO: 93031 - DNA, 25 bp, Saccharomyces pastorianus
caacgcccggacaaataattctaat

SEQ ID NO: 93032 - DNA, 25 bp, Saccharomyces pastorianus
gcgtggcaagtcgacacagcaacgt

SEQ ID NO: 93033 - DNA, 25 bp, Saccharomyces pastorianus
tgttctccggtaacggaacacggca

SEQ ID NO: 93034 - DNA, 25 bp, Saccharomyces pastorianus
atgggtgctttgtgcgtccatgcat

SEQ ID NO: 93035 - DNA, 25 bp, Saccharomyces pastorianus
gttctacagcttgaatacatgccgt

SEQ ID NO: 93036 - DNA, 25 bp, Saccharomyces pastorianus
ggcatcatcgattgttctccggtaa

SEQ ID NO: 93037 - DNA, 25 bp, Saccharomyces pastorianus
cacggcaatatttctgttctacagc

SEQ ID NO: 93038 - DNA, 25 bp, Saccharomyces pastorianus
acatgccgtggatctgtttatcaaa

SEQ ID NO: 93039 - DNA, 25 bp, Saccharomyces pastorianus
atgcactttattccccgaagatctt

SEQ ID NO: 93040 - DNA, 25 bp, Saccharomyces pastorianus
gaaaggcattgtcaacgcccggaca

SEQ ID NO: 93041 - DNA, 25 bp, Saccharomyces pastorianus
gataatgtcatgtagcgtggcaagt

SEQ ID NO: 93042 - DNA, 25 bp, Saccharomyces pastorianus
taaacagatccacggcatgtattca

SEQ ID NO: 93043 - DNA, 25 bp, Saccharomyces pastorianus
tttgataaacagatccacggcatgt

SEQ ID NO: 93044 - DNA, 25 bp, Saccharomyces pastorianus
acggcatgtattcaagctgtagaac

SEQ ID NO: 93045 - DNA, 25 bp, Saccharomyces pastorianus
gataaacagatccacggcatgtatt

SEQ ID NO: 93046 - DNA, 25 bp, Saccharomyces pastorianus
tctttgataaacagatccacggcat

SEQ ID NO: 93047 - DNA, 25 bp, Saccharomyces pastorianus
acagatccacggcatgtattcaagc

SEQ ID NO: 93048 - DNA, 25 bp, Saccharomyces pastorianus
gcatgtattcaagctgtagaacaga

SEQ ID NO: 93049 - DNA, 25 bp, Saccharomyces pastorianus
tccacggcatgtattcaagctgtag

SEQ ID NO: 93050 - DNA, 25 bp, Saccharomyces pastorianus
gatccacggcatgtattcaagctgt

SEQ ID NO: 93051 - DNA, 25 bp, Saccharomyces pastorianus
agatccacggcatgtattcaagctg

SEQ ID NO: 93052 - DNA, 25 bp, Saccharomyces pastorianus
ccacggcatgtattcaagctgtaga

SEQ ID NO: 93053 - DNA, 25 bp, Saccharomyces pastorianus
tgctaaggctctttatgccggctta

SEQ ID NO: 93054 - DNA, 25 bp, Saccharomyces pastorianus
atattttcccacatagtccgtttct

SEQ ID NO: 93055 - DNA, 25 bp, Saccharomyces pastorianus
gatgtgacgagctcaaactttcaaa

SEQ ID NO: 93056 - DNA, 25 bp, Saccharomyces pastorianus
gtgccatctctacagttgcgacaaa

SEQ ID NO: 93057 - DNA, 25 bp, Saccharomyces pastorianus
cgccatctccttccattgattaaaa

SEQ ID NO: 93058 - DNA, 25 bp, Saccharomyces pastorianus
ggcttttactctgggtttgcaacta

SEQ ID NO: 93059 - DNA, 25 bp, Saccharomyces pastorianus
aatattggcctctatgctatctaaa

SEQ ID NO: 93060 - DNA, 25 bp, Saccharomyces pastorianus
gatcttccaaatactgttcaacgcc

SEQ ID NO: 93061 - DNA, 25 bp, Saccharomyces pastorianus
caaacgcttcttctgcaattactgc

SEQ ID NO: 93062 - DNA, 25 bp, Saccharomyces pastorianus
gacagtacctgctgctgtggtaaca

SEQ ID NO: 93063 - DNA, 25 bp, Saccharomyces pastorianus
tgaacgttgctatacagtttccttt

SEQ ID NO: 93064 - DNA, 25 bp, Saccharomyces pastorianus
attgaatgcaaacctcccgaagaag

SEQ ID NO: 93065 - DNA, 25 bp, Saccharomyces pastorianus
gagtgattctttagctccacttcaa

SEQ ID NO: 93066 - DNA, 25 bp, Saccharomyces pastorianus
atggaaatgatcgtctattggccaa

SEQ ID NO: 93067 - DNA, 25 bp, Saccharomyces pastorianus
ttgcccgaagagtattatcgctact

SEQ ID NO: 93068 - DNA, 25 bp, Saccharomyces pastorianus
gaacacgatgaattaccagcagaga

SEQ ID NO: 93069 - DNA, 25 bp, Saccharomyces pastorianus
gcaaagggcttctactaattgtatc

SEQ ID NO: 93070 - DNA, 25 bp, Saccharomyces pastorianus
ccctctcctcttttagaacacgatg

SEQ ID NO: 93071 - DNA, 25 bp, Saccharomyces pastorianus
ggcacattatccacttctttttgat

SEQ ID NO: 93072 - DNA, 25 bp, Saccharomyces pastorianus
gctccacttcaaactcatgacgata

SEQ ID NO: 93073 - DNA, 25 bp, Saccharomyces pastorianus
aacacaacaagtggcccttcaattg

SEQ ID NO: 93074 - DNA, 25 bp, Saccharomyces pastorianus
atttcctgcataaatcttgcccgaa

SEQ ID NO: 93075 - DNA, 25 bp, Saccharomyces pastorianus
gtctacctagtcttttttggtgcct

SEQ ID NO: 93076 - DNA, 25 bp, Saccharomyces pastorianus
tactgagcgtccgacttttcgataa

SEQ ID NO: 93077 - DNA, 25 bp, Saccharomyces pastorianus
gtagatctcacttttatttttggca

SEQ ID NO: 93078 - DNA, 25 bp, Saccharomyces pastorianus
ggaagattctagtcccgcgagaaga

SEQ ID NO: 93079 - DNA, 25 bp, Saccharomyces pastorianus
gaaactctccttcttttcaatgtgt

SEQ ID NO: 93080 - DNA, 25 bp, Saccharomyces pastorianus
attacctctctttctatttagtcga

SEQ ID NO: 93081 - DNA, 25 bp, Saccharomyces pastorianus
aaagatgctgattttcggtaccaag

SEQ ID NO: 93082 - DNA, 25 bp, Saccharomyces pastorianus
gtgcctttatatactcgctgggatc

SEQ ID NO: 93083 - DNA, 25 bp, Saccharomyces pastorianus
aacgctctgacactttccataacat

SEQ ID NO: 93084 - DNA, 25 bp, Saccharomyces pastorianus
agggtgttaatatcctcgccagtaa

SEQ ID NO: 93085 - DNA, 25 bp, Saccharomyces pastorianus
gggatcaattcaccccaggcaaaat

SEQ ID NO: 93086 - DNA, 25 bp, Saccharomyces pastorianus
gatgttcaaacgagtttgcctattc

SEQ ID NO: 93087 - DNA, 25 bp, Saccharomyces pastorianus
aaaacactgaaagacgctgagccga

SEQ ID NO: 93088 - DNA, 25 bp, Saccharomyces pastorianus
gagtttgcctattcttgaaaccaag

SEQ ID NO: 93089 - DNA, 25 bp, Saccharomyces pastorianus
ggtcatgacaaagatgaacacacta

SEQ ID NO: 93090 - DNA, 25 bp, Saccharomyces pastorianus
ctctgtgtatagtctttcaagcaaa

SEQ ID NO: 93091 - DNA, 25 bp, Saccharomyces pastorianus
ttacaggatgataggtggcgcactt

SEQ ID NO: 93092 - DNA, 25 bp, Saccharomyces pastorianus
agccgacgagaaaatgttacaggat

SEQ ID NO: 93093 - DNA, 25 bp, Saccharomyces pastorianus
gttttctctgtgtatagtctttcaa

SEQ ID NO: 93094 - DNA, 25 bp, Saccharomyces pastorianus
gacgctgagccgacgagaaaatgtt

SEQ ID NO: 93095 - DNA, 25 bp, Saccharomyces pastorianus
gataggtggcgcacttgttgaaagt

SEQ ID NO: 93096 - DNA, 25 bp, Saccharomyces pastorianus
caatctttgtgttttctctgtgtat

SEQ ID NO: 93097 - DNA, 25 bp, Saccharomyces pastorianus
gatactaccgaggagaccgaagtgg

SEQ ID NO: 93098 - DNA, 25 bp, Saccharomyces pastorianus
gcggctaccgtggagctcgatgaaa

SEQ ID NO: 93099 - DNA, 25 bp, Saccharomyces pastorianus
gggactattcactgacaatggcaca

SEQ ID NO: 93100 - DNA, 25 bp, Saccharomyces pastorianus
gatgctgatgaggatgttaacgaaa

SEQ ID NO: 93101 - DNA, 25 bp, Saccharomyces pastorianus
aaatgattataatgcggctaccgtg

SEQ ID NO: 93102 - DNA, 25 bp, Saccharomyces pastorianus
attaacatccagtctaatccgatta

SEQ ID NO: 93103 - DNA, 25 bp, Saccharomyces pastorianus
aattacaaacaccagcaggaggcaa

SEQ ID NO: 93104 - DNA, 25 bp, Saccharomyces pastorianus
gaagaacttgcgtctagaccagtta

SEQ ID NO: 93105 - DNA, 25 bp, Saccharomyces pastorianus
gaacatctaccagcaatctgagggt

SEQ ID NO: 93106 - DNA, 25 bp, Saccharomyces pastorianus
gaattccattaacgaagcctgtgtt

SEQ ID NO: 93107 - DNA, 25 bp, Saccharomyces pastorianus
gtctaatccgattattgcagcaaat

SEQ ID NO: 93108 - DNA, 25 bp, Saccharomyces pastorianus
gaggttgctaggctatccagtttat

SEQ ID NO: 93109 - DNA, 25 bp, Saccharomyces pastorianus
atgaatccgcaggtgctattcaccg

SEQ ID NO: 93110 - DNA, 25 bp, Saccharomyces pastorianus
gcgtgtaccgttctagattccagag

SEQ ID NO: 93111 - DNA, 25 bp, Saccharomyces pastorianus
agcacactataattttacgcccagg

SEQ ID NO: 93112 - DNA, 25 bp, Saccharomyces pastorianus
tattcaccgcactggcaacgacaag

SEQ ID NO: 93113 - DNA, 25 bp, Saccharomyces pastorianus
atttggcgttgaatccttctgggaa

SEQ ID NO: 93114 - DNA, 25 bp, Saccharomyces pastorianus
caaggttcagtttgtctccagcaag

SEQ ID NO: 93115 - DNA, 25 bp, Saccharomyces pastorianus
ttaaacttacaattggcccgggctg

SEQ ID NO: 93116 - DNA, 25 bp, Saccharomyces pastorianus
gatttggcggcaatctgactgctgc

SEQ ID NO: 93117 - DNA, 25 bp, Saccharomyces pastorianus
ggccctctcctaggtgaacggacaa

SEQ ID NO: 93118 - DNA, 25 bp, Saccharomyces pastorianus
aggcaccccagttctctaaggtata

SEQ ID NO: 93119 - DNA, 25 bp, Saccharomyces pastorianus
atgacttcatggtgggtattgcgcc

SEQ ID NO: 93120 - DNA, 25 bp, Saccharomyces pastorianus
tatcgtggacactaggcagaatttt

SEQ ID NO: 93121 - DNA, 25 bp, Saccharomyces pastorianus
acttgatctttcataggtcacacat

SEQ ID NO: 93122 - DNA, 25 bp, Saccharomyces pastorianus
gcaagcaaagttccagcctttctaa

SEQ ID NO: 93123 - DNA, 25 bp, Saccharomyces pastorianus
aatgtcaatgacaggcccttatttc

SEQ ID NO: 93124 - DNA, 25 bp, Saccharomyces pastorianus
cagaattttactttatgcctcaggt

SEQ ID NO: 93125 - DNA, 25 bp, Saccharomyces pastorianus
ggagcctgatcaactacgcaagcaa

SEQ ID NO: 93126 - DNA, 25 bp, Saccharomyces pastorianus
gacgtttttccggtctgtacaacat

SEQ ID NO: 93127 - DNA, 25 bp, Saccharomyces pastorianus
atacctggcaagttactggagcctg

SEQ ID NO: 93128 - DNA, 25 bp, Saccharomyces pastorianus
acgacctgcgttttctatggctgat

SEQ ID NO: 93129 - DNA, 25 bp, Saccharomyces pastorianus
ggtaagagttcagccacaatgcaaa

SEQ ID NO: 93130 - DNA, 25 bp, Saccharomyces pastorianus
aaggcggtattccaaatcttgccag

SEQ ID NO: 93131 - DNA, 25 bp, Saccharomyces pastorianus
gtgctggtctttcggtacttaatga

SEQ ID NO: 93132 - DNA, 25 bp, Saccharomyces pastorianus
atcggcagctgcatctcaacaagat

SEQ ID NO: 93133 - DNA, 25 bp, Saccharomyces pastorianus
gggttttaccaaatgcatcggcagc

SEQ ID NO: 93134 - DNA, 25 bp, Saccharomyces pastorianus
gatccgtatccagctgtcttaatgt

SEQ ID NO: 93135 - DNA, 25 bp, Saccharomyces pastorianus
gaagcaggtgttactacctctctga

SEQ ID NO: 93136 - DNA, 25 bp, Saccharomyces pastorianus
atgaatccaccattgtatccgagtg

SEQ ID NO: 93137 - DNA, 25 bp, Saccharomyces pastorianus
attgtttagctctcttgacaaggcc

SEQ ID NO: 93138 - DNA, 25 bp, Saccharomyces pastorianus
gttgaagattctagattctcctggt

SEQ ID NO: 93139 - DNA, 25 bp, Saccharomyces pastorianus
aattcctcctattcctgctaatgat

SEQ ID NO: 93140 - DNA, 25 bp, Saccharomyces pastorianus
aacatttcttaattcacgtcgctcg

SEQ ID NO: 93141 - DNA, 25 bp, Saccharomyces pastorianus
atatccaccaatcttgagtctgtcc

SEQ ID NO: 93142 - DNA, 25 bp, Saccharomyces pastorianus
gagtctgtccccaatttcataagtc

SEQ ID NO: 93143 - DNA, 25 bp, Saccharomyces pastorianus
tttttaatgatttctttgtccaaag

SEQ ID NO: 93144 - DNA, 25 bp, Saccharomyces pastorianus
caattcgttttgcattttgtatttt

SEQ ID NO: 93145 - DNA, 25 bp, Saccharomyces pastorianus
gtcatgctatctctgcaattcgttt

SEQ ID NO: 93146 - DNA, 25 bp, Saccharomyces pastorianus
atttcataagtcatgctatctctgc

SEQ ID NO: 93147 - DNA, 25 bp, Saccharomyces pastorianus
aacacctatgaatttgatggtgcaa

SEQ ID NO: 93148 - DNA, 25 bp, Saccharomyces pastorianus
tccaccccataagcttttaccgaag

SEQ ID NO: 93149 - DNA, 25 bp, Saccharomyces pastorianus
taccgaaggccacggcttaataaca

SEQ ID NO: 93150 - DNA, 25 bp, Saccharomyces pastorianus
ggccacggcttaataacacctatga

SEQ ID NO: 93151 - DNA, 25 bp, Saccharomyces pastorianus
tttccccggctgtgatcgtcccatt

SEQ ID NO: 93152 - DNA, 25 bp, Saccharomyces pastorianus
gaggctgagatgttttttgtttcca

SEQ ID NO: 93153 - DNA, 25 bp, Saccharomyces pastorianus
taacgtcgaagaacaggctactttt

SEQ ID NO: 93154 - DNA, 25 bp, Saccharomyces pastorianus
ttgagctatgacaccaatctgccgc

SEQ ID NO: 93155 - DNA, 25 bp, Saccharomyces pastorianus
tatccatctgagtggcaacgaattc

SEQ ID NO: 93156 - DNA, 25 bp, Saccharomyces pastorianus
tattgggtccttcccagttttacag

SEQ ID NO: 93157 - DNA, 25 bp, Saccharomyces pastorianus
aagtataattttcgccccatttcag

SEQ ID NO: 93158 - DNA, 25 bp, Saccharomyces pastorianus
tgccgcgttggtcaagcctcataaa

SEQ ID NO: 93159 - DNA, 25 bp, Saccharomyces pastorianus
gaaacacggcaatctcttgtcttaa

SEQ ID NO: 93160 - DNA, 25 bp, Saccharomyces pastorianus
gatattattcatgtttcgtctccag

SEQ ID NO: 93161 - DNA, 25 bp, Saccharomyces pastorianus
tactggctaggtttgatcgtgtgat

SEQ ID NO: 93162 - DNA, 25 bp, Saccharomyces pastorianus
gaataagacatttccctctttgaaa

SEQ ID NO: 93163 - DNA, 25 bp, Saccharomyces pastorianus
gttgagaaattagtatctttgccat

SEQ ID NO: 93164 - DNA, 25 bp, Saccharomyces pastorianus
atgtctctcgactttaacactttgg

SEQ ID NO: 93165 - DNA, 25 bp, Saccharomyces pastorianus
gaaattagtatctttgccatttcaa

SEQ ID NO: 93166 - DNA, 25 bp, Saccharomyces pastorianus
tctcgactttaacactttggcccaa

SEQ ID NO: 93167 - DNA, 25 bp, Saccharomyces pastorianus
tgtctctcgactttaacactttggc

SEQ ID NO: 93168 - DNA, 25 bp, Saccharomyces pastorianus
tgagaaattagtatctttgccattt

SEQ ID NO: 93169 - DNA, 25 bp, Saccharomyces pastorianus
ctctcgactttaacactttggccca

SEQ ID NO: 93170 - DNA, 25 bp, Saccharomyces pastorianus
aaattagtatctttgccatttcaaa

SEQ ID NO: 93171 - DNA, 25 bp, Saccharomyces pastorianus
cactttggcccaaaacttcacccag

SEQ ID NO: 93172 - DNA, 25 bp, Saccharomyces pastorianus
tctctcgactttaacactttggccc

SEQ ID NO: 93173 - DNA, 25 bp, Saccharomyces pastorianus
gtctctcgactttaacactttggcc

SEQ ID NO: 93174 - DNA, 25 bp, Saccharomyces pastorianus
agcgtttctctcaagtgttccattt

SEQ ID NO: 93175 - DNA, 25 bp, Saccharomyces pastorianus
tgatggaaactcttactacgtgttt

SEQ ID NO: 93176 - DNA, 25 bp, Saccharomyces pastorianus
tcgagactagtcaattgcaaggtgc

SEQ ID NO: 93177 - DNA, 25 bp, Saccharomyces pastorianus
gaatctatgctaacattcgagacta

SEQ ID NO: 93178 - DNA, 25 bp, Saccharomyces pastorianus
ggcgatgtcttagtcatgatcactg

SEQ ID NO: 93179 - DNA, 25 bp, Saccharomyces pastorianus
cactggtgatctgttgattgacgaa

SEQ ID NO: 93180 - DNA, 25 bp, Saccharomyces pastorianus
atcactactttggatgcgcaacctg

SEQ ID NO: 93181 - DNA, 25 bp, Saccharomyces pastorianus
atccacagcgtttctctcaagtgtt

SEQ ID NO: 93182 - DNA, 25 bp, Saccharomyces pastorianus
caaggtgcaaaggacattgttgaga

SEQ ID NO: 93183 - DNA, 25 bp, Saccharomyces pastorianus
tttggatgcgcaacctgcttcccca

SEQ ID NO: 93184 - DNA, 25 bp, Saccharomyces pastorianus
aggtccaacatcgtatcactacttt

SEQ ID NO: 93185 - DNA, 25 bp, Saccharomyces pastorianus
taacagcaatttctccaccgcaaaa

SEQ ID NO: 93186 - DNA, 25 bp, Saccharomyces pastorianus
caaagtcagttccacccatttatta

SEQ ID NO: 93187 - DNA, 25 bp, Saccharomyces pastorianus
aaagccgtaggcactaacgtacagt

SEQ ID NO: 93188 - DNA, 25 bp, Saccharomyces pastorianus
ggatgaacaccggactttaaaccat

SEQ ID NO: 93189 - DNA, 25 bp, Saccharomyces pastorianus
catcccgtttttgcttacggtgttg

SEQ ID NO: 93190 - DNA, 25 bp, Saccharomyces pastorianus
acagtactgtttgcacccattgatg

SEQ ID NO: 93191 - DNA, 25 bp, Saccharomyces pastorianus
ttgatgatccaagacctgccgtgaa

SEQ ID NO: 93192 - DNA, 25 bp, Saccharomyces pastorianus
ttgcgctccaaaggctgtcgttaaa

SEQ ID NO: 93193 - DNA, 25 bp, Saccharomyces pastorianus
tggagccccatttgcaaagtcagtt

SEQ ID NO: 93194 - DNA, 25 bp, Saccharomyces pastorianus
gtgaactatatagactctgtccctc

SEQ ID NO: 93195 - DNA, 25 bp, Saccharomyces pastorianus
gggacagtagtctttggacgcataa

SEQ ID NO: 93196 - DNA, 25 bp, Saccharomyces pastorianus
attggaaccagctttaaagtctttg

SEQ ID NO: 93197 - DNA, 25 bp, Saccharomyces pastorianus
aaggctgtttctgagcaaactgaaa

SEQ ID NO: 93198 - DNA, 25 bp, Saccharomyces pastorianus
gaacgatgtcaaatctcacttacaa

SEQ ID NO: 93199 - DNA, 25 bp, Saccharomyces pastorianus
aaagtctttggatggtgatgctact

SEQ ID NO: 93200 - DNA, 25 bp, Saccharomyces pastorianus
taagacaacttctgctgctccaagc

SEQ ID NO: 93201 - DNA, 25 bp, Saccharomyces pastorianus
atccaagctaccaaggctgtttctg

SEQ ID NO: 93202 - DNA, 25 bp, Saccharomyces pastorianus
atatcggtatggctttagcttccgc

SEQ ID NO: 93203 - DNA, 25 bp, Saccharomyces pastorianus
tccaagctccactgaagctaagaca

SEQ ID NO: 93204 - DNA, 25 bp, Saccharomyces pastorianus
caagatccttcctctggattttcct

SEQ ID NO: 93205 - DNA, 25 bp, Saccharomyces pastorianus
gagtttggctcaagatccttcctct

SEQ ID NO: 93206 - DNA, 25 bp, Saccharomyces pastorianus
tggtgccaagacctctgccatctct

SEQ ID NO: 93207 - DNA, 25 bp, Saccharomyces pastorianus
ctctctccacaagcagtatctagtt

SEQ ID NO: 93208 - DNA, 25 bp, Saccharomyces pastorianus
aattatcgccacatacattgatgag

SEQ ID NO: 93209 - DNA, 25 bp, Saccharomyces pastorianus
tggtgacaccgttcaattcgccgag

SEQ ID NO: 93210 - DNA, 25 bp, Saccharomyces pastorianus
cctatggtgctcatggttactcggg

SEQ ID NO: 93211 - DNA, 25 bp, Saccharomyces pastorianus
gccaatggacttcaagggcgtcatt

SEQ ID NO: 93212 - DNA, 25 bp, Saccharomyces pastorianus
gggttttacacattctctttactag

SEQ ID NO: 93213 - DNA, 25 bp, Saccharomyces pastorianus
tcaattcgccgagtacattcaagcc

SEQ ID NO: 93214 - DNA, 25 bp, Saccharomyces pastorianus
attattctgggcatccgtgtacagg

SEQ ID NO: 93215 - DNA, 25 bp, Saccharomyces pastorianus
ctaaagtcgaattaccctatggtgc

SEQ ID NO: 93216 - DNA, 25 bp, Saccharomyces pastorianus
ttatagacctggcatgactactgag

SEQ ID NO: 93217 - DNA, 25 bp, Saccharomyces pastorianus
agattatgagctctctccacaagca

SEQ ID NO: 93218 - DNA, 25 bp, Saccharomyces pastorianus
ccggtgtccctgacgttattgtaga

SEQ ID NO: 93219 - DNA, 25 bp, Saccharomyces pastorianus
tagatgccgatctacaaggctttgg

SEQ ID NO: 93220 - DNA, 25 bp, Saccharomyces pastorianus
aatcttacggccaaacagtttctgt

SEQ ID NO: 93221 - DNA, 25 bp, Saccharomyces pastorianus
tatcgccgatagatgtctgccaaga

SEQ ID NO: 93222 - DNA, 25 bp, Saccharomyces pastorianus
taacacctcccaaaatcgctaaatt

SEQ ID NO: 93223 - DNA, 25 bp, Saccharomyces pastorianus
aaggatgcgctgaacaaccacctcg

SEQ ID NO: 93224 - DNA, 25 bp, Saccharomyces pastorianus
caaggctttggatacttggttccca

SEQ ID NO: 93225 - DNA, 25 bp, Saccharomyces pastorianus
gtcagtgggaattcactatcgccga

SEQ ID NO: 93226 - DNA, 25 bp, Saccharomyces pastorianus
gggaggtaaccattagtgcagtcaa

SEQ ID NO: 93227 - DNA, 25 bp, Saccharomyces pastorianus
aaccacctcggcatcagtaacaagg

SEQ ID NO: 93228 - DNA, 25 bp, Saccharomyces pastorianus
gaacacggtgttcctgtagtgccat

SEQ ID NO: 93229 - DNA, 25 bp, Saccharomyces pastorianus
cgtggcccacaggtttttgaaagat

SEQ ID NO: 93230 - DNA, 25 bp, Saccharomyces pastorianus
gaactttttcaagctagcacatggt

SEQ ID NO: 93231 - DNA, 25 bp, Saccharomyces pastorianus
gatgatgttgtgacgccaactttta

SEQ ID NO: 93232 - DNA, 25 bp, Saccharomyces pastorianus
tgatgcagcgcaaccgattttagct

SEQ ID NO: 93233 - DNA, 25 bp, Saccharomyces pastorianus
gattttagctgccaagcacccagag

SEQ ID NO: 93234 - DNA, 25 bp, Saccharomyces pastorianus
gtgaactgcaaattcgtggcccaca

SEQ ID NO: 93235 - DNA, 25 bp, Saccharomyces pastorianus
aaggtcgcatcagcgtcattgatcg

SEQ ID NO: 93236 - DNA, 25 bp, Saccharomyces pastorianus
atttatttatcatcatgcccctata

SEQ ID NO: 93237 - DNA, 25 bp, Saccharomyces pastorianus
gcacatggtgaatatgttgctccag

SEQ ID NO: 93238 - DNA, 25 bp, Saccharomyces pastorianus
aaatgcaccgatgggctacaaggat

SEQ ID NO: 93239 - DNA, 25 bp, Saccharomyces pastorianus
gacatttttagttggcatcgttggt

SEQ ID NO: 93240 - DNA, 25 bp, Saccharomyces pastorianus
tcgcaggaaacgatcggttcattga

SEQ ID NO: 93241 - DNA, 25 bp, Saccharomyces pastorianus
accagtgttacccaaggtcagttgg

SEQ ID NO: 93242 - DNA, 25 bp, Saccharomyces pastorianus
atcagggcggctatgcgaacagcaa

SEQ ID NO: 93243 - DNA, 25 bp, Saccharomyces pastorianus
aaagaggtcatcaagcacaggcact

SEQ ID NO: 93244 - DNA, 25 bp, Saccharomyces pastorianus
gggagcattattacggttcgtcaag

SEQ ID NO: 93245 - DNA, 25 bp, Saccharomyces pastorianus
ggtccataccactcaagatttaata

SEQ ID NO: 93246 - DNA, 25 bp, Saccharomyces pastorianus
aatgatgagaccatcaccggccatg

SEQ ID NO: 93247 - DNA, 25 bp, Saccharomyces pastorianus
ggtgaacatggaactgtgccgaatc

SEQ ID NO: 93248 - DNA, 25 bp, Saccharomyces pastorianus
gcgacatagaaatcctggtccatac

SEQ ID NO: 93249 - DNA, 25 bp, Saccharomyces pastorianus
gcaacaagacattcttcgctgggaa

SEQ ID NO: 93250 - DNA, 25 bp, Saccharomyces pastorianus
tttacttcaacaaactacgcgacat

SEQ ID NO: 93251 - DNA, 25 bp, Saccharomyces pastorianus
gagctggaccccaagagtcgggcaa

SEQ ID NO: 93252 - DNA, 25 bp, Saccharomyces pastorianus
tctagacggcagtcgaccttagcag

SEQ ID NO: 93253 - DNA, 25 bp, Saccharomyces pastorianus
ttgcagcttcgtgtactacccggag

SEQ ID NO: 93254 - DNA, 25 bp, Saccharomyces pastorianus
gtaacgatgccgcagaggtcgcact

SEQ ID NO: 93255 - DNA, 25 bp, Saccharomyces pastorianus
gggcaacacttgagcacgtgcttac

SEQ ID NO: 93256 - DNA, 25 bp, Saccharomyces pastorianus
gccagcgatgtgcatgacgtacgtt

SEQ ID NO: 93257 - DNA, 25 bp, Saccharomyces pastorianus
gatgattcacgctgctggatcgaag

SEQ ID NO: 93258 - DNA, 25 bp, Saccharomyces pastorianus
gacgtacgtttcgtattcggcgatg

SEQ ID NO: 93259 - DNA, 25 bp, Saccharomyces pastorianus
cggagaccacgtgatcggaaactct

SEQ ID NO: 93260 - DNA, 25 bp, Saccharomyces pastorianus
agagtgtgtccaattacgcgcacgt

SEQ ID NO: 93261 - DNA, 25 bp, Saccharomyces pastorianus
aggtcgcactgtacgaacggctgtt

SEQ ID NO: 93262 - DNA, 25 bp, Saccharomyces pastorianus
tgcgattcgctgctcaacacatgga

SEQ ID NO: 93263 - DNA, 25 bp, Saccharomyces pastorianus
tgggcctcaatacttctcctaatag

SEQ ID NO: 93264 - DNA, 25 bp, Saccharomyces pastorianus
caagggctgtaccacgtgcgattcg

SEQ ID NO: 93265 - DNA, 25 bp, Saccharomyces pastorianus
acagaaatttttccgtggcctacat

SEQ ID NO: 93266 - DNA, 25 bp, Saccharomyces pastorianus
tatcgaccctgatttcttgcaaaca

SEQ ID NO: 93267 - DNA, 25 bp, Saccharomyces pastorianus
gttggattatgctcttatcgaccct

SEQ ID NO: 93268 - DNA, 25 bp, Saccharomyces pastorianus
atcagagccctcatcgaagtcgaac

SEQ ID NO: 93269 - DNA, 25 bp, Saccharomyces pastorianus
gtgtctctgaccattttgcatactc

SEQ ID NO: 93270 - DNA, 25 bp, Saccharomyces pastorianus
gtccttttcgctattgctgtctcaa

SEQ ID NO: 93271 - DNA, 25 bp, Saccharomyces pastorianus
ctcctaatagcgtcgttggtcgtga

SEQ ID NO: 93272 - DNA, 25 bp, Saccharomyces pastorianus
atgcatccacacgtacttgaagaca

SEQ ID NO: 93273 - DNA, 25 bp, Saccharomyces pastorianus
gtattgttcctatctgtcggtttca

SEQ ID NO: 93274 - DNA, 25 bp, Saccharomyces pastorianus
agcaagcaaaacaaacgcccacttc

SEQ ID NO: 93275 - DNA, 25 bp, Saccharomyces pastorianus
ttccaccagacaggctggttacggt

SEQ ID NO: 93276 - DNA, 25 bp, Saccharomyces pastorianus
ggttacggtgggtcttcaagctcaa

SEQ ID NO: 93277 - DNA, 25 bp, Saccharomyces pastorianus
agcttcagttccaccaggaggtcag

SEQ ID NO: 93278 - DNA, 25 bp, Saccharomyces pastorianus
tatacggacgaagccaatggattca

SEQ ID NO: 93279 - DNA, 25 bp, Saccharomyces pastorianus
caggaggtcagcgtatcttgcagaa

SEQ ID NO: 93280 - DNA, 25 bp, Saccharomyces pastorianus
gactcccttgtcgtattgttcctat

SEQ ID NO: 93281 - DNA, 25 bp, Saccharomyces pastorianus
aatggattcagagtcgactcccttg

SEQ ID NO: 93282 - DNA, 25 bp, Saccharomyces pastorianus
tcatcttctccgtgattgctttgca

SEQ ID NO: 93283 - DNA, 25 bp, Saccharomyces pastorianus
gaagagaagacaggcacaatccatt

SEQ ID NO: 93284 - DNA, 25 bp, Saccharomyces pastorianus
cgtctgtcgtactctttctgaataa

SEQ ID NO: 93285 - DNA, 25 bp, Saccharomyces pastorianus
taagattagtatttgccgccatcaa

SEQ ID NO: 93286 - DNA, 25 bp, Saccharomyces pastorianus
gactcgactccttacttcatggaaa

SEQ ID NO: 93287 - DNA, 25 bp, Saccharomyces pastorianus
aacagtagatggttcgcgcgcacgt

SEQ ID NO: 93288 - DNA, 25 bp, Saccharomyces pastorianus
gtcactctggtcatattttgcgttt

SEQ ID NO: 93289 - DNA, 25 bp, Saccharomyces pastorianus
gagtcgctggtgcttttcgataata

SEQ ID NO: 93290 - DNA, 25 bp, Saccharomyces pastorianus
gaaaatttcaccaggatcacttcgc

SEQ ID NO: 93291 - DNA, 25 bp, Saccharomyces pastorianus
taagcatatatcctcacgtgacaca

SEQ ID NO: 93292 - DNA, 25 bp, Saccharomyces pastorianus
ttgcgtttctctatcggagtacgac

SEQ ID NO: 93293 - DNA, 25 bp, Saccharomyces pastorianus
aaggccgccaagtacatactctgga

SEQ ID NO: 93294 - DNA, 25 bp, Saccharomyces pastorianus
gggtcagacatcaacaaggccgcca

SEQ ID NO: 93295 - DNA, 25 bp, Saccharomyces pastorianus
ctggctgctggctggacaattgacc

SEQ ID NO: 93296 - DNA, 25 bp, Saccharomyces pastorianus
cccgcttttgttctcttgatgttag

SEQ ID NO: 93297 - DNA, 25 bp, Saccharomyces pastorianus
ggtgctcatccatccgttttaaagc

SEQ ID NO: 93298 - DNA, 25 bp, Saccharomyces pastorianus
gggtaaatacgttgagcttccagaa

SEQ ID NO: 93299 - DNA, 25 bp, Saccharomyces pastorianus
gaaagctacttatttccctggctgc

SEQ ID NO: 93300 - DNA, 25 bp, Saccharomyces pastorianus
gaacatggatgctgctacggcttta

SEQ ID NO: 93301 - DNA, 25 bp, Saccharomyces pastorianus
ttatgacgaacacacctgccaagta

SEQ ID NO: 93302 - DNA, 25 bp, Saccharomyces pastorianus
atggttgtgcggtggtgtcctactc

SEQ ID NO: 93303 - DNA, 25 bp, Saccharomyces pastorianus
aactattgccgggttgtgcgtaatg

SEQ ID NO: 93304 - DNA, 25 bp, Saccharomyces pastorianus
gtcctactcagctgatgtttccaaa

SEQ ID NO: 93305 - DNA, 25 bp, Saccharomyces pastorianus
aaagcatcaagtttgcacaccaggt

SEQ ID NO: 93306 - DNA, 25 bp, Saccharomyces pastorianus
tcaacgtatttacccacttggctaa

SEQ ID NO: 93307 - DNA, 25 bp, Saccharomyces pastorianus
ggaagctcaacgtatttacccactt

SEQ ID NO: 93308 - DNA, 25 bp, Saccharomyces pastorianus
gcagcatccatgttcttttctggaa

SEQ ID NO: 93309 - DNA, 25 bp, Saccharomyces pastorianus
gctaatcaattcgttgaccagtggc

SEQ ID NO: 93310 - DNA, 25 bp, Saccharomyces pastorianus
gggcctgaaccgactaaagccgtag

SEQ ID NO: 93311 - DNA, 25 bp, Saccharomyces pastorianus
aaagccgtagcagcatccatgttct

SEQ ID NO: 93312 - DNA, 25 bp, Saccharomyces pastorianus
tcaaggattctaacatcaagagaac

SEQ ID NO: 93313 - DNA, 25 bp, Saccharomyces pastorianus
gttcttttctggaagctcaacgtat

SEQ ID NO: 93314 - DNA, 25 bp, Saccharomyces pastorianus
actctcttgtaatgggattcccaat

SEQ ID NO: 93315 - DNA, 25 bp, Saccharomyces pastorianus
tacccacttggctaatcaattcgtt

SEQ ID NO: 93316 - DNA, 25 bp, Saccharomyces pastorianus
gcacattccttactctcttgtaatg

SEQ ID NO: 93317 - DNA, 25 bp, Saccharomyces pastorianus
atggcttgaccatgagcgcagacaa

SEQ ID NO: 93318 - DNA, 25 bp, Saccharomyces pastorianus
tgcagtcaataatcctccgaaacgt

SEQ ID NO: 93319 - DNA, 25 bp, Saccharomyces pastorianus
tgatcattcaagttccgcagtttcc

SEQ ID NO: 93320 - DNA, 25 bp, Saccharomyces pastorianus
gctggcaatgctgatggcacatcct

SEQ ID NO: 93321 - DNA, 25 bp, Saccharomyces pastorianus
gcaaaacatcttcttcatcacaggt

SEQ ID NO: 93322 - DNA, 25 bp, Saccharomyces pastorianus
tcacgcggcacttctcataataaaa

SEQ ID NO: 93323 - DNA, 25 bp, Saccharomyces pastorianus
gcagtttccgttcccacagaaaagg

SEQ ID NO: 93324 - DNA, 25 bp, Saccharomyces pastorianus
ggcgaaattcgttcctactggagga

SEQ ID NO: 93325 - DNA, 25 bp, Saccharomyces pastorianus
tactggaggatgtcacgcggcactt

SEQ ID NO: 93326 - DNA, 25 bp, Saccharomyces pastorianus
gtcatacagtcaatggttcccgcaa

SEQ ID NO: 93327 - DNA, 25 bp, Saccharomyces pastorianus
gaaattttacagatccaaccgcggg

SEQ ID NO: 93328 - DNA, 25 bp, Saccharomyces pastorianus
gacttaaagtttgctgttcccggtg

SEQ ID NO: 93329 - DNA, 25 bp, Saccharomyces pastorianus
tcaacattggttctaccgctacggg

SEQ ID NO: 93330 - DNA, 25 bp, Saccharomyces pastorianus
aagattacagttaacgtcgcccgct

SEQ ID NO: 93331 - DNA, 25 bp, Saccharomyces pastorianus
ttgtcggtcaagtcgtcggtgctaa

SEQ ID NO: 93332 - DNA, 25 bp, Saccharomyces pastorianus
gtcgcccgcttgtactgaaattaac

SEQ ID NO: 93333 - DNA, 25 bp, Saccharomyces pastorianus
tcggtgctaagggtcatttgccaaa

SEQ ID NO: 93334 - DNA, 25 bp, Saccharomyces pastorianus
aactactttttgctacgtcgtctat

SEQ ID NO: 93335 - DNA, 25 bp, Saccharomyces pastorianus
aacattgtctccttatttgccgaac

SEQ ID NO: 93336 - DNA, 25 bp, Saccharomyces pastorianus
tagagctgatcgtcttgtcggtcaa

SEQ ID NO: 93337 - DNA, 25 bp, Saccharomyces pastorianus
gttgatcctaccttgtgtagagctg

SEQ ID NO: 93338 - DNA, 25 bp, Saccharomyces pastorianus
gttgccggtggttctatcttgaatg

SEQ ID NO: 93339 - DNA, 25 bp, Saccharomyces pastorianus
ggaactggactctttggccgacttg

SEQ ID NO: 93340 - DNA, 25 bp, Saccharomyces pastorianus
ggattttctgggttttactctattg

SEQ ID NO: 93341 - DNA, 25 bp, Saccharomyces pastorianus
aataggtcttccttaatgggtcagg

SEQ ID NO: 93342 - DNA, 25 bp, Saccharomyces pastorianus
gccgacttggtttcctttggtgtgg

SEQ ID NO: 93343 - DNA, 25 bp, Saccharomyces pastorianus
gataacatcccattcggcattttta

SEQ ID NO: 93344 - DNA, 25 bp, Saccharomyces pastorianus
actactctagctttggtgttgggta

SEQ ID NO: 93345 - DNA, 25 bp, Saccharomyces pastorianus
attttatctttctttgtcctttgcg

SEQ ID NO: 93346 - DNA, 25 bp, Saccharomyces pastorianus
aagttgtctgagatttacgcttaca

SEQ ID NO: 93347 - DNA, 25 bp, Saccharomyces pastorianus
ggctgcaattgcttttgccattgga

SEQ ID NO: 93348 - DNA, 25 bp, Saccharomyces pastorianus
tgtcctttgcggcttagcgagatta

SEQ ID NO: 93349 - DNA, 25 bp, Saccharomyces pastorianus
ggtttaatgtcaccgttgctcaatt

SEQ ID NO: 93350 - DNA, 25 bp, Saccharomyces pastorianus
gaacagatcctatccacagtggtgg

SEQ ID NO: 93351 - DNA, 25 bp, Saccharomyces pastorianus
agatcgctaaacctaacacggccaa

SEQ ID NO: 93352 - DNA, 25 bp, Saccharomyces pastorianus
acaggtggcacatagcagccgacta

SEQ ID NO: 93353 - DNA, 25 bp, Saccharomyces pastorianus
gagtgttgggactgactatactaag

SEQ ID NO: 93354 - DNA, 25 bp, Saccharomyces pastorianus
gagggtacccaaaactcaactagat

SEQ ID NO: 93355 - DNA, 25 bp, Saccharomyces pastorianus
agatggccgcgtttacatcgggcaa

SEQ ID NO: 93356 - DNA, 25 bp, Saccharomyces pastorianus
gccgactagccaaccttattgatta

SEQ ID NO: 93357 - DNA, 25 bp, Saccharomyces pastorianus
taagccgctactatccaagaaggaa

SEQ ID NO: 93358 - DNA, 25 bp, Saccharomyces pastorianus
gggagattgcccaaccatcgtcgag

SEQ ID NO: 93359 - DNA, 25 bp, Saccharomyces pastorianus
gagggttctcactcaagatggccgc

SEQ ID NO: 93360 - DNA, 25 bp, Saccharomyces pastorianus
gtggtggaggataagccgctactat

SEQ ID NO: 93361 - DNA, 25 bp, Saccharomyces pastorianus
ttcatttactaaacccacaccggag

SEQ ID NO: 93362 - DNA, 25 bp, Saccharomyces pastorianus
ttttcatctgtgtcatcgtctttca

SEQ ID NO: 93363 - DNA, 25 bp, Saccharomyces pastorianus
gttcgttcgccacaacatcaaatat

SEQ ID NO: 93364 - DNA, 25 bp, Saccharomyces pastorianus
gatttcgaccactacgacatcgatg

SEQ ID NO: 93365 - DNA, 25 bp, Saccharomyces pastorianus
agaaccttcaagtgttcgttcgcca

SEQ ID NO: 93366 - DNA, 25 bp, Saccharomyces pastorianus
aagactgtcaccttctttaacagta

SEQ ID NO: 93367 - DNA, 25 bp, Saccharomyces pastorianus
atcgtcgtacactgaaatctccttt

SEQ ID NO: 93368 - DNA, 25 bp, Saccharomyces pastorianus
ttatgactgcaattcactctcccga

SEQ ID NO: 93369 - DNA, 25 bp, Saccharomyces pastorianus
tctcccgaaaaacttcatcccaaat

SEQ ID NO: 93370 - DNA, 25 bp, Saccharomyces pastorianus
gactactcattaagccctattcagg

SEQ ID NO: 93371 - DNA, 25 bp, Saccharomyces pastorianus
aagccctattcaggagacaccatct

SEQ ID NO: 93372 - DNA, 25 bp, Saccharomyces pastorianus
gagaacctagggaacgcacctcgaa

SEQ ID NO: 93373 - DNA, 25 bp, Saccharomyces pastorianus
cgacgcagagtttgcccaatggcaa

SEQ ID NO: 93374 - DNA, 25 bp, Saccharomyces pastorianus
gttaacatagatgccttcctacatg

SEQ ID NO: 93375 - DNA, 25 bp, Saccharomyces pastorianus
gtcacaagggaaagtcctccttccg

SEQ ID NO: 93376 - DNA, 25 bp, Saccharomyces pastorianus
gggttccgagacaaaacattctgca

SEQ ID NO: 93377 - DNA, 25 bp, Saccharomyces pastorianus
aaatattagttccaccgacgcagag

SEQ ID NO: 93378 - DNA, 25 bp, Saccharomyces pastorianus
gatcgattcgaaaccgcacgtagct

SEQ ID NO: 93379 - DNA, 25 bp, Saccharomyces pastorianus
atgcgccccactaaaactcaaatat

SEQ ID NO: 93380 - DNA, 25 bp, Saccharomyces pastorianus
acgtagctggtcatacggcctttgc

SEQ ID NO: 93381 - DNA, 25 bp, Saccharomyces pastorianus
gccggtgcttcgttcacaacagata

SEQ ID NO: 93382 - DNA, 25 bp, Saccharomyces pastorianus
aggcaacgatggtcactgttaacat

SEQ ID NO: 93383 - DNA, 25 bp, Saccharomyces pastorianus
ggttgtcgagctttgcaaatgcctg

SEQ ID NO: 93384 - DNA, 25 bp, Saccharomyces pastorianus
tattgccactacgatagacccatcg

SEQ ID NO: 93385 - DNA, 25 bp, Saccharomyces pastorianus
ttgaagtttaccgtccatcctctat

SEQ ID NO: 93386 - DNA, 25 bp, Saccharomyces pastorianus
aaatgcctggtttattgatgacaac

SEQ ID NO: 93387 - DNA, 25 bp, Saccharomyces pastorianus
aagatatccttgagattccattgat

SEQ ID NO: 93388 - DNA, 25 bp, Saccharomyces pastorianus
gaagctcggcaaatttgacaaacta

SEQ ID NO: 93389 - DNA, 25 bp, Saccharomyces pastorianus
atggctgtttacaaactcgtacaaa

SEQ ID NO: 93390 - DNA, 25 bp, Saccharomyces pastorianus
attcatcgatgattccttacctttg

SEQ ID NO: 93391 - DNA, 25 bp, Saccharomyces pastorianus
gctgatctatttgacggcataacct

SEQ ID NO: 93392 - DNA, 25 bp, Saccharomyces pastorianus
agggagctgctgatcaatttaaaga

SEQ ID NO: 93393 - DNA, 25 bp, Saccharomyces pastorianus
acgtaagcaatgtgcggagcgcgtt

SEQ ID NO: 93394 - DNA, 25 bp, Saccharomyces pastorianus
gatgttgaaatttctatcctgaagg

SEQ ID NO: 93395 - DNA, 25 bp, Saccharomyces pastorianus
ataggctactacaaatcttccctca

SEQ ID NO: 93396 - DNA, 25 bp, Saccharomyces pastorianus
gactgtgttttaaggtcctggaatt

SEQ ID NO: 93397 - DNA, 25 bp, Saccharomyces pastorianus
gagaattctttctgaaagccttcat

SEQ ID NO: 93398 - DNA, 25 bp, Saccharomyces pastorianus
agccttcatatgtttaatcttggat

SEQ ID NO: 93399 - DNA, 25 bp, Saccharomyces pastorianus
aaatcttccctcatttacaaagcgc

SEQ ID NO: 93400 - DNA, 25 bp, Saccharomyces pastorianus
tatgcacaattttccccgttaacaa

SEQ ID NO: 93401 - DNA, 25 bp, Saccharomyces pastorianus
ggaatcggaccatagactgtgtttt

SEQ ID NO: 93402 - DNA, 25 bp, Saccharomyces pastorianus
aggtcggactgaaactatacagcaa

SEQ ID NO: 93403 - DNA, 25 bp, Saccharomyces pastorianus
ttacaaagcgccttgctcaggagac

SEQ ID NO: 93404 - DNA, 25 bp, Saccharomyces pastorianus
cttgctcaggagacgctttagtgaa

SEQ ID NO: 93405 - DNA, 25 bp, Saccharomyces pastorianus
gtacgatatccccacggacatgagc

SEQ ID NO: 93406 - DNA, 25 bp, Saccharomyces pastorianus
gagtcggcggacaagttcacagaca

SEQ ID NO: 93407 - DNA, 25 bp, Saccharomyces pastorianus
aactctttgtggaccaatcttccat

SEQ ID NO: 93408 - DNA, 25 bp, Saccharomyces pastorianus
atgaccattgctgccagtgagtcgg

SEQ ID NO: 93409 - DNA, 25 bp, Saccharomyces pastorianus
gtatctttttctgtttagccacagc

SEQ ID NO: 93410 - DNA, 25 bp, Saccharomyces pastorianus
tagccacagcgtacagcaggccaga

SEQ ID NO: 93411 - DNA, 25 bp, Saccharomyces pastorianus
ggacatgagcccactgatgaccatt

SEQ ID NO: 93412 - DNA, 25 bp, Saccharomyces pastorianus
gctgctagaactttttgctgttgta

SEQ ID NO: 93413 - DNA, 25 bp, Saccharomyces pastorianus
ggaagttacacgaacacaccagccg

SEQ ID NO: 93414 - DNA, 25 bp, Saccharomyces pastorianus
ccgccaacgctatgggcaatttgtt

SEQ ID NO: 93415 - DNA, 25 bp, Saccharomyces pastorianus
acaccagccggaacagtacgatatc

SEQ ID NO: 93416 - DNA, 25 bp, Saccharomyces pastorianus
taagattgccacagttattgaacca

SEQ ID NO: 93417 - DNA, 25 bp, Saccharomyces pastorianus
gaatccatgatcctactacatctaa

SEQ ID NO: 93418 - DNA, 25 bp, Saccharomyces pastorianus
atgtcgtcgcttatttcaaaaacca

SEQ ID NO: 93419 - DNA, 25 bp, Saccharomyces pastorianus
attgttcgcccattcagatgctgat

SEQ ID NO: 93420 - DNA, 25 bp, Saccharomyces pastorianus
gagtctaaaaaggatagcccctcta

SEQ ID NO: 93421 - DNA, 25 bp, Saccharomyces pastorianus
ggtgacacagattttgcggaggttt

SEQ ID NO: 93422 - DNA, 25 bp, Saccharomyces pastorianus
agcccctctagtgtctcttataaga

SEQ ID NO: 93423 - DNA, 25 bp, Saccharomyces pastorianus
ccattaagtatgatccagccaagga

SEQ ID NO: 93424 - DNA, 25 bp, Saccharomyces pastorianus
agtatcgcagtggattgttcgccca

SEQ ID NO: 93425 - DNA, 25 bp, Saccharomyces pastorianus
gcggaggttttacaagtatcctata

SEQ ID NO: 93426 - DNA, 25 bp, Saccharomyces pastorianus
tactacatctaattcacaaggacct

SEQ ID NO: 93427 - DNA, 25 bp, Saccharomyces pastorianus
ggtcaagttttcgttaccaccactg

SEQ ID NO: 93428 - DNA, 25 bp, Saccharomyces pastorianus
acgctttacaagctgccatggaagg

SEQ ID NO: 93429 - DNA, 25 bp, Saccharomyces pastorianus
tccttctctaaccaagtcttagctc

SEQ ID NO: 93430 - DNA, 25 bp, Saccharomyces pastorianus
tggtgtccacgttttgccaaagatc

SEQ ID NO: 93431 - DNA, 25 bp, Saccharomyces pastorianus
gatgcatcccacattggtcaagttt

SEQ ID NO: 93432 - DNA, 25 bp, Saccharomyces pastorianus
ggaaggctaccaagttgttaccatg

SEQ ID NO: 93433 - DNA, 25 bp, Saccharomyces pastorianus
atctttcgttatgtcttgttccttc

SEQ ID NO: 93434 - DNA, 25 bp, Saccharomyces pastorianus
agatcttggatgaagctgtcgctaa

SEQ ID NO: 93435 - DNA, 25 bp, Saccharomyces pastorianus
aggcccattcgaagttggtgtccac

SEQ ID NO: 93436 - DNA, 25 bp, Saccharomyces pastorianus
tgtcgctaagttccacttgggcaac

SEQ ID NO: 93437 - DNA, 25 bp, Saccharomyces pastorianus
gaaattgacccaatcaacgctttac

SEQ ID NO: 93438 - DNA, 25 bp, Saccharomyces pastorianus
gtctcaaccacctctttggtttgga

SEQ ID NO: 93439 - DNA, 25 bp, Saccharomyces pastorianus
gtcttcatgtcttatatggttgccc

SEQ ID NO: 93440 - DNA, 25 bp, Saccharomyces pastorianus
aacccactgaaacaacccatttgag

SEQ ID NO: 93441 - DNA, 25 bp, Saccharomyces pastorianus
tcatgggtccattggttgtctcaac

SEQ ID NO: 93442 - DNA, 25 bp, Saccharomyces pastorianus
atttcctgtgttatcagattctatg

SEQ ID NO: 93443 - DNA, 25 bp, Saccharomyces pastorianus
gtatcagtcttcaattctatccaga

SEQ ID NO: 93444 - DNA, 25 bp, Saccharomyces pastorianus
tttgagtgcaagaactttcggtact

SEQ ID NO: 93445 - DNA, 25 bp, Saccharomyces pastorianus
ggtacttggacctttatttcctgtg

SEQ ID NO: 93446 - DNA, 25 bp, Saccharomyces pastorianus
ttccacttcggctctgaattattga

SEQ ID NO: 93447 - DNA, 25 bp, Saccharomyces pastorianus
aattctatccagacttacgtttctg

SEQ ID NO: 93448 - DNA, 25 bp, Saccharomyces pastorianus
tatatggttgccctattccacttcg

SEQ ID NO: 93449 - DNA, 25 bp, Saccharomyces pastorianus
atatttcaagcagccttccatacga

SEQ ID NO: 93450 - DNA, 25 bp, Saccharomyces pastorianus
gaattgccacttccaagtgtcgaca

SEQ ID NO: 93451 - DNA, 25 bp, Saccharomyces pastorianus
atggcgttaatcaccacactgttaa

SEQ ID NO: 93452 - DNA, 25 bp, Saccharomyces pastorianus
gaaaatttcgaggttgcacatgcaa

SEQ ID NO: 93453 - DNA, 25 bp, Saccharomyces pastorianus
tctcttctatgcacactacagcaac

SEQ ID NO: 93454 - DNA, 25 bp, Saccharomyces pastorianus
cattcttcaatttcccatggcgtta

SEQ ID NO: 93455 - DNA, 25 bp, Saccharomyces pastorianus
ataattcctgccaaaatgccaagtt

SEQ ID NO: 93456 - DNA, 25 bp, Saccharomyces pastorianus
gagaaagacgtacataccgcgccct

SEQ ID NO: 93457 - DNA, 25 bp, Saccharomyces pastorianus
acgaatcgaaatgccctgatgtcaa

SEQ ID NO: 93458 - DNA, 25 bp, Saccharomyces pastorianus
acacatgccaactcaaaaccacaat

SEQ ID NO: 93459 - DNA, 25 bp, Saccharomyces pastorianus
aaggatgccacttctgcactgaaaa

SEQ ID NO: 93460 - DNA, 25 bp, Saccharomyces pastorianus
cgttgacccaccacaatttcaaaga

SEQ ID NO: 93461 - DNA, 25 bp, Saccharomyces pastorianus
gcaggcagtagcagttcacagatga

SEQ ID NO: 93462 - DNA, 25 bp, Saccharomyces pastorianus
tgctttaccggaggacgtactcata

SEQ ID NO: 93463 - DNA, 25 bp, Saccharomyces pastorianus
ttacccactattttctcccaagatt

SEQ ID NO: 93464 - DNA, 25 bp, Saccharomyces pastorianus
aaaatggctcgttgattgccctgtc

SEQ ID NO: 93465 - DNA, 25 bp, Saccharomyces pastorianus
gcataactttacttggttacccact

SEQ ID NO: 93466 - DNA, 25 bp, Saccharomyces pastorianus
gagtactgaacgcactgcaggcagt

SEQ ID NO: 93467 - DNA, 25 bp, Saccharomyces pastorianus
tatcctatcgatctgagtactgaac

SEQ ID NO: 93468 - DNA, 25 bp, Saccharomyces pastorianus
tgaaggatttctctgctttaccgga

SEQ ID NO: 93469 - DNA, 25 bp, Saccharomyces pastorianus
tttctcccaagattttactgcccca

SEQ ID NO: 93470 - DNA, 25 bp, Saccharomyces pastorianus
gattgccctgtcgaaaaatactgta

SEQ ID NO: 93471 - DNA, 25 bp, Saccharomyces pastorianus
gctaagaacgacttaggtgtcttga

SEQ ID NO: 93472 - DNA, 25 bp, Saccharomyces pastorianus
atgcctggatttacagctccaacaa

SEQ ID NO: 93473 - DNA, 25 bp, Saccharomyces pastorianus
gttatttctcagatgtacacatttg

SEQ ID NO: 93474 - DNA, 25 bp, Saccharomyces pastorianus
aagacagtctgttatttctcagatg

SEQ ID NO: 93475 - DNA, 25 bp, Saccharomyces pastorianus
taaaacaaggactactttcagaaat

SEQ ID NO: 93476 - DNA, 25 bp, Saccharomyces pastorianus
gaaggcaggtgttgtctttatacaa

SEQ ID NO: 93477 - DNA, 25 bp, Saccharomyces pastorianus
gtctttatacaaggaattcatcaag

SEQ ID NO: 93478 - DNA, 25 bp, Saccharomyces pastorianus
tcagatgtacacatttgacaggctg

SEQ ID NO: 93479 - DNA, 25 bp, Saccharomyces pastorianus
taattacaacttcagggaatacttt

SEQ ID NO: 93480 - DNA, 25 bp, Saccharomyces pastorianus
gaatcagcaagacccaaaagtgtta

SEQ ID NO: 93481 - DNA, 25 bp, Saccharomyces pastorianus
gttaatgaacctatttaaggaagct

SEQ ID NO: 93482 - DNA, 25 bp, Saccharomyces pastorianus
ttgacaccttctgccggttgggaat

SEQ ID NO: 93483 - DNA, 25 bp, Saccharomyces pastorianus
aggtactttgtgcttgacaccttct

SEQ ID NO: 93484 - DNA, 25 bp, Saccharomyces pastorianus
aaattatctccgatgcttccggaaa

SEQ ID NO: 93485 - DNA, 25 bp, Saccharomyces pastorianus
aatccggagagcttggtggttacga

SEQ ID NO: 93486 - DNA, 25 bp, Saccharomyces pastorianus
attggccaccaaatgtcgctttaat

SEQ ID NO: 93487 - DNA, 25 bp, Saccharomyces pastorianus
atacctagctcttctaacttctttg

SEQ ID NO: 93488 - DNA, 25 bp, Saccharomyces pastorianus
gtacgtcagctggagcgctaaatct

SEQ ID NO: 93489 - DNA, 25 bp, Saccharomyces pastorianus
gtgcccagtcagtgagcaaatcctt

SEQ ID NO: 93490 - DNA, 25 bp, Saccharomyces pastorianus
aagacgcttctgtttatcgtgcgga

SEQ ID NO: 93491 - DNA, 25 bp, Saccharomyces pastorianus
attgattaatgatccacctgcttgg

SEQ ID NO: 93492 - DNA, 25 bp, Saccharomyces pastorianus
gcgttgattgacctagctgtatttc

SEQ ID NO: 93493 - DNA, 25 bp, Saccharomyces pastorianus
atagtgttttcctcggtgatattct

SEQ ID NO: 93494 - DNA, 25 bp, Saccharomyces pastorianus
gatttgtttatgattccagctggat

SEQ ID NO: 93495 - DNA, 25 bp, Saccharomyces pastorianus
tgccggtacctctgtttattataac

SEQ ID NO: 93496 - DNA, 25 bp, Saccharomyces pastorianus
ttattatttccacctacccaatcaa

SEQ ID NO: 93497 - DNA, 25 bp, Saccharomyces pastorianus
ttcatttggattttgccggtacctc

SEQ ID NO: 93498 - DNA, 25 bp, Saccharomyces pastorianus
atgaccccaagccaaaagtgaccaa

SEQ ID NO: 93499 - DNA, 25 bp, Saccharomyces pastorianus
taccttcccgaagtttgatcaagtg

SEQ ID NO: 93500 - DNA, 25 bp, Saccharomyces pastorianus
tatgcgagtatcttgcgcttgataa

SEQ ID NO: 93501 - DNA, 25 bp, Saccharomyces pastorianus
gggatttgctttccaggaccactaa

SEQ ID NO: 93502 - DNA, 25 bp, Saccharomyces pastorianus
gaggcaactttttaaccatccgtga

SEQ ID NO: 93503 - DNA, 25 bp, Saccharomyces pastorianus
ccgtgatttggagacacaccttaaa

SEQ ID NO: 93504 - DNA, 25 bp, Saccharomyces pastorianus
gaaacaatacatcggcattgctggt

SEQ ID NO: 93505 - DNA, 25 bp, Saccharomyces pastorianus
gaatctgactccataaaagcgctac

SEQ ID NO: 93506 - DNA, 25 bp, Saccharomyces pastorianus
atatcctgcgttatcaatgaatctg

SEQ ID NO: 93507 - DNA, 25 bp, Saccharomyces pastorianus
tcatgtttcgatggctttgcccatt

SEQ ID NO: 93508 - DNA, 25 bp, Saccharomyces pastorianus
ggtaccatgtttactactcttgctg

SEQ ID NO: 93509 - DNA, 25 bp, Saccharomyces pastorianus
tatcccatggtttcctagctcaaat

SEQ ID NO: 93510 - DNA, 25 bp, Saccharomyces pastorianus
tttgcccattccagatgcagactca

SEQ ID NO: 93511 - DNA, 25 bp, Saccharomyces pastorianus
gagaacttatcctcatctttctatg

SEQ ID NO: 93512 - DNA, 25 bp, Saccharomyces pastorianus
gagcggacaaatacttcaaaccaat

SEQ ID NO: 93513 - DNA, 25 bp, Saccharomyces pastorianus
gcgctacaatgtattcatgccaagt

SEQ ID NO: 93514 - DNA, 25 bp, Saccharomyces pastorianus
ctagctcaaatattcaccatcctgg

SEQ ID NO: 93515 - DNA, 25 bp, Saccharomyces pastorianus
tcatgttgtgcccatttgaagctat

SEQ ID NO: 93516 - DNA, 25 bp, Saccharomyces pastorianus
gaaaggccaacgagtccatgtctgt

SEQ ID NO: 93517 - DNA, 25 bp, Saccharomyces pastorianus
agtccatgtctgtagcctctaaaag

SEQ ID NO: 93518 - DNA, 25 bp, Saccharomyces pastorianus
gaattcctcgctgatatcatgttgt

SEQ ID NO: 93519 - DNA, 25 bp, Saccharomyces pastorianus
ggtgcagacagattccttacacaat

SEQ ID NO: 93520 - DNA, 25 bp, Saccharomyces pastorianus
ctagttggttaagtcctggtgtcac

SEQ ID NO: 93521 - DNA, 25 bp, Saccharomyces pastorianus
tgtcactgtgtacttgatggcctca

SEQ ID NO: 93522 - DNA, 25 bp, Saccharomyces pastorianus
gaaacagcagactactatgccgccc

SEQ ID NO: 93523 - DNA, 25 bp, Saccharomyces pastorianus
attatgtgctgcagtctcacatcct

SEQ ID NO: 93524 - DNA, 25 bp, Saccharomyces pastorianus
ctcacatcctgcagacgttatggtt

SEQ ID NO: 93525 - DNA, 25 bp, Saccharomyces pastorianus
atgccgcccttttgcaataacgttg

SEQ ID NO: 93526 - DNA, 25 bp, Saccharomyces pastorianus
tttttgagtattttcgctttcattt

SEQ ID NO: 93527 - DNA, 25 bp, Saccharomyces pastorianus
ttcgttttctactttggtgctcata

SEQ ID NO: 93528 - DNA, 25 bp, Saccharomyces pastorianus
ttcgctttcattttcgttttctact

SEQ ID NO: 93529 - DNA, 25 bp, Saccharomyces pastorianus
tcattttcgttttctactttggtgc

SEQ ID NO: 93530 - DNA, 25 bp, Saccharomyces pastorianus
ttcattttcgttttctactttggtg

SEQ ID NO: 93531 - DNA, 25 bp, Saccharomyces pastorianus
tttgagtattttcgctttcattttc

SEQ ID NO: 93532 - DNA, 25 bp, Saccharomyces pastorianus
ggtgctcatagaacagtcatgaaca

SEQ ID NO: 93533 - DNA, 25 bp, Saccharomyces pastorianus
gctttcattttcgttttctactttg

SEQ ID NO: 93534 - DNA, 25 bp, Saccharomyces pastorianus
gagtattttcgctttcattttcgtt

SEQ ID NO: 93535 - DNA, 25 bp, Saccharomyces pastorianus
tgagtattttcgctttcattttcgt

SEQ ID NO: 93536 - DNA, 25 bp, Saccharomyces pastorianus
cattttcgttttctactttggtgct

SEQ ID NO: 93537 - DNA, 25 bp, Saccharomyces pastorianus
aactgttgaaggtgacgcctggccg

SEQ ID NO: 93538 - DNA, 25 bp, Saccharomyces pastorianus
gtttagttgatattgccaccgtcct

SEQ ID NO: 93539 - DNA, 25 bp, Saccharomyces pastorianus
gtaaattgcaggtacaagtccccgt

SEQ ID NO: 93540 - DNA, 25 bp, Saccharomyces pastorianus
gtcagtggttccgtggaggcatcat

SEQ ID NO: 93541 - DNA, 25 bp, Saccharomyces pastorianus
gggttgctgttagttccatgattga

SEQ ID NO: 93542 - DNA, 25 bp, Saccharomyces pastorianus
aagactcggcgcatctgatatcatg

SEQ ID NO: 93543 - DNA, 25 bp, Saccharomyces pastorianus
gtcatgaccgctcaaaggttcgttt

SEQ ID NO: 93544 - DNA, 25 bp, Saccharomyces pastorianus
acaagtccccgtaaatggcgagtat

SEQ ID NO: 93545 - DNA, 25 bp, Saccharomyces pastorianus
atgtatttataacgcacctgaagac

SEQ ID NO: 93546 - DNA, 25 bp, Saccharomyces pastorianus
ggcatcatgtgctctgggaattggt

SEQ ID NO: 93547 - DNA, 25 bp, Saccharomyces pastorianus
aagacaagctgcctgaactgttgaa

SEQ ID NO: 93548 - DNA, 25 bp, Saccharomyces pastorianus
tgcgttgctgttgcagcattgccat

SEQ ID NO: 93549 - DNA, 25 bp, Saccharomyces pastorianus
gctgagtttaactccgtttacgcca

SEQ ID NO: 93550 - DNA, 25 bp, Saccharomyces pastorianus
ggcagatatcaatcactttgctgag

SEQ ID NO: 93551 - DNA, 25 bp, Saccharomyces pastorianus
aaggttccattgctgataaggctga

SEQ ID NO: 93552 - DNA, 25 bp, Saccharomyces pastorianus
gcaattcctcattggacagggtcgt

SEQ ID NO: 93553 - DNA, 25 bp, Saccharomyces pastorianus
tccagtgaccccagacaacaagtta

SEQ ID NO: 93554 - DNA, 25 bp, Saccharomyces pastorianus
ctccgtttacgccaagtacttcaat

SEQ ID NO: 93555 - DNA, 25 bp, Saccharomyces pastorianus
ttcctttctggccaaattccagtga

SEQ ID NO: 93556 - DNA, 25 bp, Saccharomyces pastorianus
aaacctgccagatcatgcgttgctg

SEQ ID NO: 93557 - DNA, 25 bp, Saccharomyces pastorianus
gtacttcaatactcacaaacctgcc

SEQ ID NO: 93558 - DNA, 25 bp, Saccharomyces pastorianus
aactcccgttatttgtgaatccgct

SEQ ID NO: 93559 - DNA, 25 bp, Saccharomyces pastorianus
gaagtatgagactatgcaaccgctt

SEQ ID NO: 93560 - DNA, 25 bp, Saccharomyces pastorianus
tagtgggcgtgcattatgtgcaaga

SEQ ID NO: 93561 - DNA, 25 bp, Saccharomyces pastorianus
accgcttagtggagaagttgtgacc

SEQ ID NO: 93562 - DNA, 25 bp, Saccharomyces pastorianus
tctgataacggcagcgacggtagtg

SEQ ID NO: 93563 - DNA, 25 bp, Saccharomyces pastorianus
gcagcttcctgtctgataacggcag

SEQ ID NO: 93564 - DNA, 25 bp, Saccharomyces pastorianus
gaaagacaaacggagctgcatcatt

SEQ ID NO: 93565 - DNA, 25 bp, Saccharomyces pastorianus
gagactatgcaaccgcttagtggag

SEQ ID NO: 93566 - DNA, 25 bp, Saccharomyces pastorianus
gagctgcatcattagatcccacaaa

SEQ ID NO: 93567 - DNA, 25 bp, Saccharomyces pastorianus
ggtacttcaatatgagtgaacacga

SEQ ID NO: 93568 - DNA, 25 bp, Saccharomyces pastorianus
gagtagggctagcaagataacgttt

SEQ ID NO: 93569 - DNA, 25 bp, Saccharomyces pastorianus
aagataacgtttgcagcttcctgtc

SEQ ID NO: 93570 - DNA, 25 bp, Saccharomyces pastorianus
gatacgcggacttactatacaggtt

SEQ ID NO: 93571 - DNA, 25 bp, Saccharomyces pastorianus
gaactcaaccatttggaactgcagt

SEQ ID NO: 93572 - DNA, 25 bp, Saccharomyces pastorianus
gatgtatttttatcgctcctcgtgt

SEQ ID NO: 93573 - DNA, 25 bp, Saccharomyces pastorianus
tcgctcctcgtgtactttgatagaa

SEQ ID NO: 93574 - DNA, 25 bp, Saccharomyces pastorianus
agtttctgagcgatttcttctatag

SEQ ID NO: 93575 - DNA, 25 bp, Saccharomyces pastorianus
tattgccccacaacgaatgatgtat

SEQ ID NO: 93576 - DNA, 25 bp, Saccharomyces pastorianus
tggtcttgaccaatatttccagagg

SEQ ID NO: 93577 - DNA, 25 bp, Saccharomyces pastorianus
agggctcatcctcaaatgttcgtaa

SEQ ID NO: 93578 - DNA, 25 bp, Saccharomyces pastorianus
gagggaagcacgtaccacaaattgg

SEQ ID NO: 93579 - DNA, 25 bp, Saccharomyces pastorianus
gaggatccagaaatattgccccaca

SEQ ID NO: 93580 - DNA, 25 bp, Saccharomyces pastorianus
caatagtgtcactacgacccctaaa

SEQ ID NO: 93581 - DNA, 25 bp, Saccharomyces pastorianus
tcacggattcggtcagttctgttgc

SEQ ID NO: 93582 - DNA, 25 bp, Saccharomyces pastorianus
cacgtgggaacctcttgcgaaagtc

SEQ ID NO: 93583 - DNA, 25 bp, Saccharomyces pastorianus
gcaatggcagctatcggcgatccag

SEQ ID NO: 93584 - DNA, 25 bp, Saccharomyces pastorianus
tttattaggcaatgcggccgcactg

SEQ ID NO: 93585 - DNA, 25 bp, Saccharomyces pastorianus
tgctactatttttctgccttcatga

SEQ ID NO: 93586 - DNA, 25 bp, Saccharomyces pastorianus
ttctgttgcgtgttattgtctctgt

SEQ ID NO: 93587 - DNA, 25 bp, Saccharomyces pastorianus
tcttgtccctaattctgttcacgga

SEQ ID NO: 93588 - DNA, 25 bp, Saccharomyces pastorianus
tgggtattgccattcctgcctgcta

SEQ ID NO: 93589 - DNA, 25 bp, Saccharomyces pastorianus
tctctgtccactatcgctaataatg

SEQ ID NO: 93590 - DNA, 25 bp, Saccharomyces pastorianus
atccagcctggaagacgtattatga

SEQ ID NO: 93591 - DNA, 25 bp, Saccharomyces pastorianus
attgctttatcggtgcaagccacgt

SEQ ID NO: 93592 - DNA, 25 bp, Saccharomyces pastorianus
aacgggatctctagaccctttgata

SEQ ID NO: 93593 - DNA, 25 bp, Saccharomyces pastorianus
gcagctggcgccgtagaaagtatat

SEQ ID NO: 93594 - DNA, 25 bp, Saccharomyces pastorianus
gaccctttgatacacaacgttctgg

SEQ ID NO: 93595 - DNA, 25 bp, Saccharomyces pastorianus
aacctggacaatgttctgactctag

SEQ ID NO: 93596 - DNA, 25 bp, Saccharomyces pastorianus
gaggccgataagctacatttcataa

SEQ ID NO: 93597 - DNA, 25 bp, Saccharomyces pastorianus
acgttctggattcgtacttggtgaa

SEQ ID NO: 93598 - DNA, 25 bp, Saccharomyces pastorianus
agatgccgcataccttaaacctgga

SEQ ID NO: 93599 - DNA, 25 bp, Saccharomyces pastorianus
aacataatttctgagctcgtgggct

SEQ ID NO: 93600 - DNA, 25 bp, Saccharomyces pastorianus
gttgactacgtcaatgcacatgcta

SEQ ID NO: 93601 - DNA, 25 bp, Saccharomyces pastorianus
gcctcagcactcttaccaggaagat

SEQ ID NO: 93602 - DNA, 25 bp, Saccharomyces pastorianus
agagtgtctggcagtagcctcagca

SEQ ID NO: 93603 - DNA, 25 bp, Saccharomyces pastorianus
aatccatcagagttggcggctacaa

SEQ ID NO: 93604 - DNA, 25 bp, Saccharomyces pastorianus
tgcaacgctttgaacgctctaccaa

SEQ ID NO: 93605 - DNA, 25 bp, Saccharomyces pastorianus
tccagcaggtattgccgccggaaaa

SEQ ID NO: 93606 - DNA, 25 bp, Saccharomyces pastorianus
tattgccactactttcgacttggac

SEQ ID NO: 93607 - DNA, 25 bp, Saccharomyces pastorianus
gaagtcccaggtgcagttaagctgt

SEQ ID NO: 93608 - DNA, 25 bp, Saccharomyces pastorianus
gaccaaagtacttcattaccgctaa

SEQ ID NO: 93609 - DNA, 25 bp, Saccharomyces pastorianus
ttgatgccattgctaagttcgctcc

SEQ ID NO: 93610 - DNA, 25 bp, Saccharomyces pastorianus
gaaatgggctgtggcaacttccggt

SEQ ID NO: 93611 - DNA, 25 bp, Saccharomyces pastorianus
aaagccgccggttgtaagatcattg

SEQ ID NO: 93612 - DNA, 25 bp, Saccharomyces pastorianus
gatcaatgagcaagacccttccaaa

SEQ ID NO: 93613 - DNA, 25 bp, Saccharomyces pastorianus
gaacacgttatccaagtctcgcatg

SEQ ID NO: 93614 - DNA, 25 bp, Saccharomyces pastorianus
gcgatagaagaaccagcctcccaga

SEQ ID NO: 93615 - DNA, 25 bp, Saccharomyces pastorianus
gaaatctgtctgtaggcggattgaa

SEQ ID NO: 93616 - DNA, 25 bp, Saccharomyces pastorianus
aacaagggtcagaacctgcggcgat

SEQ ID NO: 93617 - DNA, 25 bp, Saccharomyces pastorianus
gctcccgctttgtcaccagaagaaa

SEQ ID NO: 93618 - DNA, 25 bp, Saccharomyces pastorianus
ttggctgaagaactgggccttgtca

SEQ ID NO: 93619 - DNA, 25 bp, Saccharomyces pastorianus
ggacgttcaaaagccctctgatgga

SEQ ID NO: 93620 - DNA, 25 bp, Saccharomyces pastorianus
aaatgcaaacaaccgctccagagta

SEQ ID NO: 93621 - DNA, 25 bp, Saccharomyces pastorianus
gaacaagctgctgcttccactgctg

SEQ ID NO: 93622 - DNA, 25 bp, Saccharomyces pastorianus
gaaagtgaagtttctccacaggaac

SEQ ID NO: 93623 - DNA, 25 bp, Saccharomyces pastorianus
ttaaataagaaactgcaccgcgcta

SEQ ID NO: 93624 - DNA, 25 bp, Saccharomyces pastorianus
gaccttctgctactgcttcagagaa

SEQ ID NO: 93625 - DNA, 25 bp, Saccharomyces pastorianus
aagatgcaagcactcccggtaaaga

SEQ ID NO: 93626 - DNA, 25 bp, Saccharomyces pastorianus
ctaatactgggatctcttgtcaaag

SEQ ID NO: 93627 - DNA, 25 bp, Saccharomyces pastorianus
gcttccatttcccttgtggtagaaa

SEQ ID NO: 93628 - DNA, 25 bp, Saccharomyces pastorianus
aactattcgctgacctatcacaaga

SEQ ID NO: 93629 - DNA, 25 bp, Saccharomyces pastorianus
gaacggctgtcatcaatcgaatttt

SEQ ID NO: 93630 - DNA, 25 bp, Saccharomyces pastorianus
gggtttgatgcatctttggcaccaa

SEQ ID NO: 93631 - DNA, 25 bp, Saccharomyces pastorianus
ctgaggtcttgagtgcacattcttc

SEQ ID NO: 93632 - DNA, 25 bp, Saccharomyces pastorianus
aacagcttttcacatttaccgtctt

SEQ ID NO: 93633 - DNA, 25 bp, Saccharomyces pastorianus
gacgaggtcaagcacatcggcagat

SEQ ID NO: 93634 - DNA, 25 bp, Saccharomyces pastorianus
aaaggctatttatgcccgctacacg

SEQ ID NO: 93635 - DNA, 25 bp, Saccharomyces pastorianus
tgacactccatcaatatcccttggt

SEQ ID NO: 93636 - DNA, 25 bp, Saccharomyces pastorianus
aattttcttcgactgggagctacca

SEQ ID NO: 93637 - DNA, 25 bp, Saccharomyces pastorianus
gtctccatcctttaactggccaaaa

SEQ ID NO: 93638 - DNA, 25 bp, Saccharomyces pastorianus
tcacattggccggtttacacactaa

SEQ ID NO: 93639 - DNA, 25 bp, Saccharomyces pastorianus
ggtgatctaggttacatctggcaat

SEQ ID NO: 93640 - DNA, 25 bp, Saccharomyces pastorianus
tggctagcttacaacttgtctccat

SEQ ID NO: 93641 - DNA, 25 bp, Saccharomyces pastorianus
ataacttctctcgtgactttgccaa

SEQ ID NO: 93642 - DNA, 25 bp, Saccharomyces pastorianus
aacgctttagctgtccataacttct

SEQ ID NO: 93643 - DNA, 25 bp, Saccharomyces pastorianus
atgttctatcatgagggcccgtgca

SEQ ID NO: 93644 - DNA, 25 bp, Saccharomyces pastorianus
agctgctatgggaaccggtgtcaca

SEQ ID NO: 93645 - DNA, 25 bp, Saccharomyces pastorianus
gagaaattccctgaccaatggctag

SEQ ID NO: 93646 - DNA, 25 bp, Saccharomyces pastorianus
gaggtgggacgcaatgttctatcat

SEQ ID NO: 93647 - DNA, 25 bp, Saccharomyces pastorianus
ccttcttatccttctttgtcattta

SEQ ID NO: 93648 - DNA, 25 bp, Saccharomyces pastorianus
gcaggtcttcaaaaactttcacggt

SEQ ID NO: 93649 - DNA, 25 bp, Saccharomyces pastorianus
acttgtatttttccacccagcaata

SEQ ID NO: 93650 - DNA, 25 bp, Saccharomyces pastorianus
tttcaccatcctccgtggtaaccgt

SEQ ID NO: 93651 - DNA, 25 bp, Saccharomyces pastorianus
aatgcagaacttgtccctttatgaa

SEQ ID NO: 93652 - DNA, 25 bp, Saccharomyces pastorianus
agcaataccccttaagaacgctgcc

SEQ ID NO: 93653 - DNA, 25 bp, Saccharomyces pastorianus
aagtcaattgccgagagccgtccac

SEQ ID NO: 93654 - DNA, 25 bp, Saccharomyces pastorianus
agtttcaaaaccctgcaggtcttca

SEQ ID NO: 93655 - DNA, 25 bp, Saccharomyces pastorianus
atacgctagaaatcttttgccttat

SEQ ID NO: 93656 - DNA, 25 bp, Saccharomyces pastorianus
taatacccctgattacaggatgcat

SEQ ID NO: 93657 - DNA, 25 bp, Saccharomyces pastorianus
gacgaaaacagtcgatacctaattt

SEQ ID NO: 93658 - DNA, 25 bp, Saccharomyces pastorianus
aaattactacccaccatttgtgcta

SEQ ID NO: 93659 - DNA, 25 bp, Saccharomyces pastorianus
cgtcacctgcaccagcatattgaaa

SEQ ID NO: 93660 - DNA, 25 bp, Saccharomyces pastorianus
taagcaagccgttaggaaacctgag

SEQ ID NO: 93661 - DNA, 25 bp, Saccharomyces pastorianus
gtgatgctgcaaattctcattctaa

SEQ ID NO: 93662 - DNA, 25 bp, Saccharomyces pastorianus
ttctaagaagttcgtgcgtcacctg

SEQ ID NO: 93663 - DNA, 25 bp, Saccharomyces pastorianus
gacctgcagggttttgaaactttca

SEQ ID NO: 93664 - DNA, 25 bp, Saccharomyces pastorianus
gaataccatggtagacctttcaaga

SEQ ID NO: 93665 - DNA, 25 bp, Saccharomyces pastorianus
acgagtcgcacgaggaccctgaaaa

SEQ ID NO: 93666 - DNA, 25 bp, Saccharomyces pastorianus
ttgataaaatcacctggcattacgg

SEQ ID NO: 93667 - DNA, 25 bp, Saccharomyces pastorianus
tgatttcgatcatttgcactgtaaa

SEQ ID NO: 93668 - DNA, 25 bp, Saccharomyces pastorianus
gttcaaacggttaccacggaggatg

SEQ ID NO: 93669 - DNA, 25 bp, Saccharomyces pastorianus
ctaccatggtattcagtttcctcac

SEQ ID NO: 93670 - DNA, 25 bp, Saccharomyces pastorianus
tcaggtttcctaacggcttgcttaa

SEQ ID NO: 93671 - DNA, 25 bp, Saccharomyces pastorianus
gatgcttttcaatatgctggtgcag

SEQ ID NO: 93672 - DNA, 25 bp, Saccharomyces pastorianus
gcgcctacaggatgtgttttgtaat

SEQ ID NO: 93673 - DNA, 25 bp, Saccharomyces pastorianus
tcgacaaataccatagcatcttcat

SEQ ID NO: 93674 - DNA, 25 bp, Saccharomyces pastorianus
agtttcctcaccgtaatgccaggtg

SEQ ID NO: 93675 - DNA, 25 bp, Saccharomyces pastorianus
gtctcttccttcgatttttcgtgaa

SEQ ID NO: 93676 - DNA, 25 bp, Saccharomyces pastorianus
ttttatcaaatgtctcttccttcga

SEQ ID NO: 93677 - DNA, 25 bp, Saccharomyces pastorianus
catcttcatgtgtgcaaactacttg

SEQ ID NO: 93678 - DNA, 25 bp, Saccharomyces pastorianus
aggtgacgcacgaacttcttagaat

SEQ ID NO: 93679 - DNA, 25 bp, Saccharomyces pastorianus
cacaacctttaatttgcgcctacag

SEQ ID NO: 93680 - DNA, 25 bp, Saccharomyces pastorianus
accgggtatctttggtccacaacat

SEQ ID NO: 93681 - DNA, 25 bp, Saccharomyces pastorianus
gaagcgccctatatctatcaaatcc

SEQ ID NO: 93682 - DNA, 25 bp, Saccharomyces pastorianus
cactagggaatgctgttgacttttt

SEQ ID NO: 93683 - DNA, 25 bp, Saccharomyces pastorianus
aagatccttatgacgcactagggaa

SEQ ID NO: 93684 - DNA, 25 bp, Saccharomyces pastorianus
ataaggtgcctattcagcagcaaca

SEQ ID NO: 93685 - DNA, 25 bp, Saccharomyces pastorianus
agaagcaatctcttgctgcagagga

SEQ ID NO: 93686 - DNA, 25 bp, Saccharomyces pastorianus
aaacttgtggagatcctggctataa

SEQ ID NO: 93687 - DNA, 25 bp, Saccharomyces pastorianus
aatgctacaagtcactcccatggta

SEQ ID NO: 93688 - DNA, 25 bp, Saccharomyces pastorianus
gactgcaaaccgtctcacagcaaat

SEQ ID NO: 93689 - DNA, 25 bp, Saccharomyces pastorianus
agactacactgcttctgtcgttcaa

SEQ ID NO: 93690 - DNA, 25 bp, Saccharomyces pastorianus
gtcgttcaattcttgcagagtgtca

SEQ ID NO: 93691 - DNA, 25 bp, Saccharomyces pastorianus
gagctctcaagggtacagatgcaaa

SEQ ID NO: 93692 - DNA, 25 bp, Saccharomyces pastorianus
gttcaacctctctttttgtgctgat

SEQ ID NO: 93693 - DNA, 25 bp, Saccharomyces pastorianus
gatgcagacttatttctcacttcag

SEQ ID NO: 93694 - DNA, 25 bp, Saccharomyces pastorianus
atgcaacggatggtggagctctcaa

SEQ ID NO: 93695 - DNA, 25 bp, Saccharomyces pastorianus
gagtatccgactttctttctcgtaa

SEQ ID NO: 93696 - DNA, 25 bp, Saccharomyces pastorianus
tatttctcacttcagatctctcttt

SEQ ID NO: 93697 - DNA, 25 bp, Saccharomyces pastorianus
cagatgcaaatcctgctatggtgga

SEQ ID NO: 93698 - DNA, 25 bp, Saccharomyces pastorianus
gttcaacagttggatcacagtggat

SEQ ID NO: 93699 - DNA, 25 bp, Saccharomyces pastorianus
cacccaccttgatcacagcaaattg

SEQ ID NO: 93700 - DNA, 25 bp, Saccharomyces pastorianus
ggaagcgttaagtctctttgtcgag

SEQ ID NO: 93701 - DNA, 25 bp, Saccharomyces pastorianus
gaaacatacctctttgagtatccga

SEQ ID NO: 93702 - DNA, 25 bp, Saccharomyces pastorianus
gctgccaaaattgctaatcccggtt

SEQ ID NO: 93703 - DNA, 25 bp, Saccharomyces pastorianus
tctttgaccgtctctattccaataa

SEQ ID NO: 93704 - DNA, 25 bp, Saccharomyces pastorianus
gaaatctcagctcgcattgggcaca

SEQ ID NO: 93705 - DNA, 25 bp, Saccharomyces pastorianus
gccgctactcaatgtctgcaaaata

SEQ ID NO: 93706 - DNA, 25 bp, Saccharomyces pastorianus
gggcagtggtttcaaggtatctctt

SEQ ID NO: 93707 - DNA, 25 bp, Saccharomyces pastorianus
gtcatcgatgatatcccactggtta

SEQ ID NO: 93708 - DNA, 25 bp, Saccharomyces pastorianus
aatcccggttgttatgctactggtt

SEQ ID NO: 93709 - DNA, 25 bp, Saccharomyces pastorianus
taacttacttaaaggcgccgctact

SEQ ID NO: 93710 - DNA, 25 bp, Saccharomyces pastorianus
aatgttgcattcatgccccatgttg

SEQ ID NO: 93711 - DNA, 25 bp, Saccharomyces pastorianus
ttgcgcaaccatcgataacttactt

SEQ ID NO: 93712 - DNA, 25 bp, Saccharomyces pastorianus
ggttcgcaattaactatttctccgt

SEQ ID NO: 93713 - DNA, 25 bp, Saccharomyces pastorianus
agagaggcatctccagctccaacag

SEQ ID NO: 93714 - DNA, 25 bp, Saccharomyces pastorianus
atggcagccgatcgttctgtctata

SEQ ID NO: 93715 - DNA, 25 bp, Saccharomyces pastorianus
gcatctgctgcaattcaatttacta

SEQ ID NO: 93716 - DNA, 25 bp, Saccharomyces pastorianus
atttgagaacccaagctgcatctgc

SEQ ID NO: 93717 - DNA, 25 bp, Saccharomyces pastorianus
gatagctcctcggaagcttcaagag

SEQ ID NO: 93718 - DNA, 25 bp, Saccharomyces pastorianus
caaacgcaactattccatctctaga

SEQ ID NO: 93719 - DNA, 25 bp, Saccharomyces pastorianus
gatatttccaacttgaagcgtccat

SEQ ID NO: 93720 - DNA, 25 bp, Saccharomyces pastorianus
aagcgtccatcatatatgccttcca

SEQ ID NO: 93721 - DNA, 25 bp, Saccharomyces pastorianus
gtacctgccccaactaagaatgaag

SEQ ID NO: 93722 - DNA, 25 bp, Saccharomyces pastorianus
tatatgccttccagtgcaagctacg

SEQ ID NO: 93723 - DNA, 25 bp, Saccharomyces pastorianus
gctccaacaggtagccactcattaa

SEQ ID NO: 93724 - DNA, 25 bp, Saccharomyces pastorianus
tgaagaacgatataggcgcatcctg

SEQ ID NO: 93725 - DNA, 25 bp, Saccharomyces pastorianus
gtataaatatattgcctcggtaacg

SEQ ID NO: 93726 - DNA, 25 bp, Saccharomyces pastorianus
ttatcgaccgaatcaacttccaacc

SEQ ID NO: 93727 - DNA, 25 bp, Saccharomyces pastorianus
atgaaatcaatttatcgaccgaatc

SEQ ID NO: 93728 - DNA, 25 bp, Saccharomyces pastorianus
tattgcctcggtaacgacgttgaac

SEQ ID NO: 93729 - DNA, 25 bp, Saccharomyces pastorianus
gaaggactcaacgaagaaaacgcta

SEQ ID NO: 93730 - DNA, 25 bp, Saccharomyces pastorianus
gaaaacgctaatttctcattgaaga

SEQ ID NO: 93731 - DNA, 25 bp, Saccharomyces pastorianus
tctcctctgcccgaaagaaaactag

SEQ ID NO: 93732 - DNA, 25 bp, Saccharomyces pastorianus
gaaaagcactcttctttgtataaat

SEQ ID NO: 93733 - DNA, 25 bp, Saccharomyces pastorianus
ataggcgcatcctgggaatctaaaa

SEQ ID NO: 93734 - DNA, 25 bp, Saccharomyces pastorianus
gaatcaacttccaaccttcttataa

SEQ ID NO: 93735 - DNA, 25 bp, Saccharomyces pastorianus
gggtcagtgcaggactatttacttt

SEQ ID NO: 93736 - DNA, 25 bp, Saccharomyces pastorianus
ataccactggagagctgctgcgatt

SEQ ID NO: 93737 - DNA, 25 bp, Saccharomyces pastorianus
ggaaaaagatcgctttgcccacacg

SEQ ID NO: 93738 - DNA, 25 bp, Saccharomyces pastorianus
gaggatcaggtccttatgatgacag

SEQ ID NO: 93739 - DNA, 25 bp, Saccharomyces pastorianus
gcccactttgttgtgctttttctta

SEQ ID NO: 93740 - DNA, 25 bp, Saccharomyces pastorianus
gctttttcttattggttgctgtcat

SEQ ID NO: 93741 - DNA, 25 bp, Saccharomyces pastorianus
gagcgtacctttttgtcgtggttga

SEQ ID NO: 93742 - DNA, 25 bp, Saccharomyces pastorianus
ttgcccacacgagttgagccaaaag

SEQ ID NO: 93743 - DNA, 25 bp, Saccharomyces pastorianus
ctttacagttatgctgggaggcctt

SEQ ID NO: 93744 - DNA, 25 bp, Saccharomyces pastorianus
atacgcgcttgtaacataccactgg

SEQ ID NO: 93745 - DNA, 25 bp, Saccharomyces pastorianus
aaaagtgttctttgccaatgagcgt

SEQ ID NO: 93746 - DNA, 25 bp, Saccharomyces pastorianus
ctgtatccaagttttctactgttga

SEQ ID NO: 93747 - DNA, 25 bp, Saccharomyces pastorianus
aagtttgctgcgctggttccagaat

SEQ ID NO: 93748 - DNA, 25 bp, Saccharomyces pastorianus
aaggattacaccgagtcactaaagg

SEQ ID NO: 93749 - DNA, 25 bp, Saccharomyces pastorianus
gtttggtcccattgtaactgtatcc

SEQ ID NO: 93750 - DNA, 25 bp, Saccharomyces pastorianus
gattctcaatatgggttagccgcag

SEQ ID NO: 93751 - DNA, 25 bp, Saccharomyces pastorianus
ggtcggtgacccatttgatgaggaa

SEQ ID NO: 93752 - DNA, 25 bp, Saccharomyces pastorianus
agccaacagtgtttgctgatgtcaa

SEQ ID NO: 93753 - DNA, 25 bp, Saccharomyces pastorianus
ggctgctttaagtaactacactcaa

SEQ ID NO: 93754 - DNA, 25 bp, Saccharomyces pastorianus
cgcaggtattcacactaacgatatt

SEQ ID NO: 93755 - DNA, 25 bp, Saccharomyces pastorianus
caaaatgttcctttcggtggcttcg

SEQ ID NO: 93756 - DNA, 25 bp, Saccharomyces pastorianus
aacaaggctgttgatgtgtccaaaa

SEQ ID NO: 93757 - DNA, 25 bp, Saccharomyces pastorianus
gattccattctatccaatttcgaaa

SEQ ID NO: 93758 - DNA, 25 bp, Saccharomyces pastorianus
gtggaaggactggtactttgtgtac

SEQ ID NO: 93759 - DNA, 25 bp, Saccharomyces pastorianus
tttgggcactttactcaatcctatc

SEQ ID NO: 93760 - DNA, 25 bp, Saccharomyces pastorianus
atgactgcttgctattttactttag

SEQ ID NO: 93761 - DNA, 25 bp, Saccharomyces pastorianus
actcaatcctatctcaatcttacaa

SEQ ID NO: 93762 - DNA, 25 bp, Saccharomyces pastorianus
actgctgctgcttgtgatgatgatg

SEQ ID NO: 93763 - DNA, 25 bp, Saccharomyces pastorianus
tactatcaaaacgaccaacttccta

SEQ ID NO: 93764 - DNA, 25 bp, Saccharomyces pastorianus
ctttgtgtaccattgattccattct

SEQ ID NO: 93765 - DNA, 25 bp, Saccharomyces pastorianus
aaaattggcctgatttgggcacttt

SEQ ID NO: 93766 - DNA, 25 bp, Saccharomyces pastorianus
acccggcaaagttattcgatccaat

SEQ ID NO: 93767 - DNA, 25 bp, Saccharomyces pastorianus
aacttcctaccattttggttcattg

SEQ ID NO: 93768 - DNA, 25 bp, Saccharomyces pastorianus
aaggcaccttttgaggctgaagcaa

SEQ ID NO: 93769 - DNA, 25 bp, Saccharomyces pastorianus
agcgtagaggccacatactcatcaa

SEQ ID NO: 93770 - DNA, 25 bp, Saccharomyces pastorianus
tggaagttcctgtttcctatcgtta

SEQ ID NO: 93771 - DNA, 25 bp, Saccharomyces pastorianus
aatcaagcttccgtcactggacagt

SEQ ID NO: 93772 - DNA, 25 bp, Saccharomyces pastorianus
agcgcatcatggaggacttggccga

SEQ ID NO: 93773 - DNA, 25 bp, Saccharomyces pastorianus
tggtgtacaacgcattccaaagaca

SEQ ID NO: 93774 - DNA, 25 bp, Saccharomyces pastorianus
gaagtttcttgccagaaggcacctt

SEQ ID NO: 93775 - DNA, 25 bp, Saccharomyces pastorianus
aaatgctgaagctactttgcacaag

SEQ ID NO: 93776 - DNA, 25 bp, Saccharomyces pastorianus
agacaaagtctcaaggccgttataa

SEQ ID NO: 93777 - DNA, 25 bp, Saccharomyces pastorianus
gtcggcacaaatctcaataaccagg

SEQ ID NO: 93778 - DNA, 25 bp, Saccharomyces pastorianus
tacaagtaccagtgaagagcgcatc

SEQ ID NO: 93779 - DNA, 25 bp, Saccharomyces pastorianus
agctagcaataactattccctccac

SEQ ID NO: 93780 - DNA, 25 bp, Saccharomyces pastorianus
gagtatcacactcatgaaacaggaa

SEQ ID NO: 93781 - DNA, 25 bp, Saccharomyces pastorianus
gtatccgcactatattggacacaat

SEQ ID NO: 93782 - DNA, 25 bp, Saccharomyces pastorianus
aatggttcttgtagacgccgctggc

SEQ ID NO: 93783 - DNA, 25 bp, Saccharomyces pastorianus
actggttcgaattctttgtgtattc

SEQ ID NO: 93784 - DNA, 25 bp, Saccharomyces pastorianus
tgttcacgatgtgcctaaagtttcc

SEQ ID NO: 93785 - DNA, 25 bp, Saccharomyces pastorianus
ttccctccacgacatccatgaaaag

SEQ ID NO: 93786 - DNA, 25 bp, Saccharomyces pastorianus
ggaatcatttccatcttactttaga

SEQ ID NO: 93787 - DNA, 25 bp, Saccharomyces pastorianus
gatgtttgacgacgaaatggttctt

SEQ ID NO: 93788 - DNA, 25 bp, Saccharomyces pastorianus
agagatctctacgaagctgtattaa

SEQ ID NO: 93789 - DNA, 25 bp, Saccharomyces pastorianus
ttgggcatagataaagtctccggtt

SEQ ID NO: 93790 - DNA, 25 bp, Saccharomyces pastorianus
atatctaccattaccttccagcatt

SEQ ID NO: 93791 - DNA, 25 bp, Saccharomyces pastorianus
ttgtcagaactctctagcttggcga

SEQ ID NO: 93792 - DNA, 25 bp, Saccharomyces pastorianus
ttcttatatctaccattaccttcca

SEQ ID NO: 93793 - DNA, 25 bp, Saccharomyces pastorianus
ccattaccttccagcattttttcaa

SEQ ID NO: 93794 - DNA, 25 bp, Saccharomyces pastorianus
agaactctctagcttggcgattctc

SEQ ID NO: 93795 - DNA, 25 bp, Saccharomyces pastorianus
gtgcggctttcgtatctgcgtctca

SEQ ID NO: 93796 - DNA, 25 bp, Saccharomyces pastorianus
ggcgattctctatcaacctgttatt

SEQ ID NO: 93797 - DNA, 25 bp, Saccharomyces pastorianus
tctagcttggcgattctctatcaac

SEQ ID NO: 93798 - DNA, 25 bp, Saccharomyces pastorianus
cttgccgcttgtcagaactctctag

SEQ ID NO: 93799 - DNA, 25 bp, Saccharomyces pastorianus
tcaacctgttattccaattcttata

SEQ ID NO: 93800 - DNA, 25 bp, Saccharomyces pastorianus
gctttcgtatctgcgtctcatcctt

SEQ ID NO: 93801 - DNA, 25 bp, Saccharomyces pastorianus
tctactacttcgttatcggaccagt

SEQ ID NO: 93802 - DNA, 25 bp, Saccharomyces pastorianus
aatctcacctctgattctactactt

SEQ ID NO: 93803 - DNA, 25 bp, Saccharomyces pastorianus
agacaatgcaaattacccactctcc

SEQ ID NO: 93804 - DNA, 25 bp, Saccharomyces pastorianus
gtgcctccatgattgccacgaagga

SEQ ID NO: 93805 - DNA, 25 bp, Saccharomyces pastorianus
aagtaacgctgattctgctccatta

SEQ ID NO: 93806 - DNA, 25 bp, Saccharomyces pastorianus
ttttacaaactcaacaccacttcca

SEQ ID NO: 93807 - DNA, 25 bp, Saccharomyces pastorianus
agaacgaactcaggttgctccatca

SEQ ID NO: 93808 - DNA, 25 bp, Saccharomyces pastorianus
tccaatattgcctctggtgaagata

SEQ ID NO: 93809 - DNA, 25 bp, Saccharomyces pastorianus
aagatgttgcatctgccatctctct

SEQ ID NO: 93810 - DNA, 25 bp, Saccharomyces pastorianus
catctctctctatgatcagtccatt

SEQ ID NO: 93811 - DNA, 25 bp, Saccharomyces pastorianus
tggaacaaagtctcctaccccgaag

SEQ ID NO: 93812 - DNA, 25 bp, Saccharomyces pastorianus
gaatggccagcaacagtgtacctaa

SEQ ID NO: 93813 - DNA, 25 bp, Saccharomyces pastorianus
ttggtcttcgtattgctgtcttgct

SEQ ID NO: 93814 - DNA, 25 bp, Saccharomyces pastorianus
gataaatctcttggtggcggcgacg

SEQ ID NO: 93815 - DNA, 25 bp, Saccharomyces pastorianus
aacttcgtttggcttattggagata

SEQ ID NO: 93816 - DNA, 25 bp, Saccharomyces pastorianus
gtacctaatcatgcttggtcttcgt

SEQ ID NO: 93817 - DNA, 25 bp, Saccharomyces pastorianus
ttaattgcacccactcttttcgaag

SEQ ID NO: 93818 - DNA, 25 bp, Saccharomyces pastorianus
gccatgagccccacgtatatttgaa

SEQ ID NO: 93819 - DNA, 25 bp, Saccharomyces pastorianus
aggcatctctctttggatcattgtc

SEQ ID NO: 93820 - DNA, 25 bp, Saccharomyces pastorianus
tactacacaccttctggaatggcca

SEQ ID NO: 93821 - DNA, 25 bp, Saccharomyces pastorianus
gatcattgtcattcgttagcttggt

SEQ ID NO: 93822 - DNA, 25 bp, Saccharomyces pastorianus
ggcggcgacggtgatacatttaatt

SEQ ID NO: 93823 - DNA, 25 bp, Saccharomyces pastorianus
cactcaagggtggattcctcaagat

SEQ ID NO: 93824 - DNA, 25 bp, Saccharomyces pastorianus
gaagtttgggacatctttgcccaga

SEQ ID NO: 93825 - DNA, 25 bp, Saccharomyces pastorianus
atcagttcatgtacaagcgcacccg

SEQ ID NO: 93826 - DNA, 25 bp, Saccharomyces pastorianus
gccccacctgttaagctactgagaa

SEQ ID NO: 93827 - DNA, 25 bp, Saccharomyces pastorianus
agcgcacccgtaatcaacatcaatg

SEQ ID NO: 93828 - DNA, 25 bp, Saccharomyces pastorianus
aaattccggcagtattgttaagcaa

SEQ ID NO: 93829 - DNA, 25 bp, Saccharomyces pastorianus
aattaattactgcagttgccccacc

SEQ ID NO: 93830 - DNA, 25 bp, Saccharomyces pastorianus
gatgggcccaagatttatgacttaa

SEQ ID NO: 93831 - DNA, 25 bp, Saccharomyces pastorianus
aattcatcgcctatgatgggcccaa

SEQ ID NO: 93832 - DNA, 25 bp, Saccharomyces pastorianus
tacaccatttgctgccactcaaggg

SEQ ID NO: 93833 - DNA, 25 bp, Saccharomyces pastorianus
ggagcatgcacaaaacctttcattt

SEQ ID NO: 93834 - DNA, 25 bp, Saccharomyces pastorianus
gaagaccgtcaatgatattttatcg

SEQ ID NO: 93835 - DNA, 25 bp, Saccharomyces pastorianus
tccatctttgatccaagccgtgaaa

SEQ ID NO: 93836 - DNA, 25 bp, Saccharomyces pastorianus
atatcatcttgacaccacacattgg

SEQ ID NO: 93837 - DNA, 25 bp, Saccharomyces pastorianus
gtgcgtgtgttatacattcaccaaa

SEQ ID NO: 93838 - DNA, 25 bp, Saccharomyces pastorianus
tcgaaaagcaattttccgattcaaa

SEQ ID NO: 93839 - DNA, 25 bp, Saccharomyces pastorianus
tctcttctgttgaccaaagcgatat

SEQ ID NO: 93840 - DNA, 25 bp, Saccharomyces pastorianus
gatattttatcgaaccataacatcg

SEQ ID NO: 93841 - DNA, 25 bp, Saccharomyces pastorianus
atggctgatatctcttctgttgacc

SEQ ID NO: 93842 - DNA, 25 bp, Saccharomyces pastorianus
gaaattgcttatttaatggctgata

SEQ ID NO: 93843 - DNA, 25 bp, Saccharomyces pastorianus
tttgctgctatgaaggatggcgctt

SEQ ID NO: 93844 - DNA, 25 bp, Saccharomyces pastorianus
ttgatccaagccgtgaaagccaaca

SEQ ID NO: 93845 - DNA, 25 bp, Saccharomyces pastorianus
gaaccctattgaacaaactgccagc

SEQ ID NO: 93846 - DNA, 25 bp, Saccharomyces pastorianus
aggtgtaggccatcaaacgggtatt

SEQ ID NO: 93847 - DNA, 25 bp, Saccharomyces pastorianus
aactgccagcagatacaattacttt

SEQ ID NO: 93848 - DNA, 25 bp, Saccharomyces pastorianus
atgtcacatttgtttgccggaaaca

SEQ ID NO: 93849 - DNA, 25 bp, Saccharomyces pastorianus
acgaatttgattgtacctggtgcag

SEQ ID NO: 93850 - DNA, 25 bp, Saccharomyces pastorianus
aaaaccaacagcgacattccagatg

SEQ ID NO: 93851 - DNA, 25 bp, Saccharomyces pastorianus
gatccgaattccatcggttcagtgg

SEQ ID NO: 93852 - DNA, 25 bp, Saccharomyces pastorianus
gatttggcgcaaactacaatggatg

SEQ ID NO: 93853 - DNA, 25 bp, Saccharomyces pastorianus
gggtccatgggagggaacccacata

SEQ ID NO: 93854 - DNA, 25 bp, Saccharomyces pastorianus
gacagtaaaccgtgcttcgggtcca

SEQ ID NO: 93855 - DNA, 25 bp, Saccharomyces pastorianus
ggtgaagccaattacgatgccttag

SEQ ID NO: 93856 - DNA, 25 bp, Saccharomyces pastorianus
aagttagtttcactggtgcccgagg

SEQ ID NO: 93857 - DNA, 25 bp, Saccharomyces pastorianus
tggccggcctatgcatttactcaat

SEQ ID NO: 93858 - DNA, 25 bp, Saccharomyces pastorianus
actcaatcagcttggtttgcacctt

SEQ ID NO: 93859 - DNA, 25 bp, Saccharomyces pastorianus
gaatttttgccacgtttgagttcct

SEQ ID NO: 93860 - DNA, 25 bp, Saccharomyces pastorianus
aagaccaaattcctctgtgtggccg

SEQ ID NO: 93861 - DNA, 25 bp, Saccharomyces pastorianus
aagcctggaccattcttgtgaagtg

SEQ ID NO: 93862 - DNA, 25 bp, Saccharomyces pastorianus
aatcaagctgctttggactaccatg

SEQ ID NO: 93863 - DNA, 25 bp, Saccharomyces pastorianus
gggaagctaattacccttttgcaat

SEQ ID NO: 93864 - DNA, 25 bp, Saccharomyces pastorianus
ttgagttcctttccatatccatcta

SEQ ID NO: 93865 - DNA, 25 bp, Saccharomyces pastorianus
ggacctattgaaacagctcgctgcc

SEQ ID NO: 93866 - DNA, 25 bp, Saccharomyces pastorianus
tttgcggaacccatcgaatttcact

SEQ ID NO: 93867 - DNA, 25 bp, Saccharomyces pastorianus
ctttcccaaagatatagcgcagaga

SEQ ID NO: 93868 - DNA, 25 bp, Saccharomyces pastorianus
aatccaaggactcattctgtttccc

SEQ ID NO: 93869 - DNA, 25 bp, Saccharomyces pastorianus
gattccgataagattcaaacctatt

SEQ ID NO: 93870 - DNA, 25 bp, Saccharomyces pastorianus
gccttgattgcaaatctttcccaaa

SEQ ID NO: 93871 - DNA, 25 bp, Saccharomyces pastorianus
gagagactgtttagcgagaatccaa

SEQ ID NO: 93872 - DNA, 25 bp, Saccharomyces pastorianus
ttctgtttcccgtatcgtggtggaa

SEQ ID NO: 93873 - DNA, 25 bp, Saccharomyces pastorianus
caaggagccgctagtgaatttttta

SEQ ID NO: 93874 - DNA, 25 bp, Saccharomyces pastorianus
aagcgggtgtttgccttgattgcaa

SEQ ID NO: 93875 - DNA, 25 bp, Saccharomyces pastorianus
caattgcagctgttgcgggaaacaa

SEQ ID NO: 93876 - DNA, 25 bp, Saccharomyces pastorianus
taaactcggcattttcgcataggat

SEQ ID NO: 93877 - DNA, 25 bp, Saccharomyces pastorianus
gaacgaattccaggtgattccgata

SEQ ID NO: 93878 - DNA, 25 bp, Saccharomyces pastorianus
atttacacttctttcagcgtcgttg

SEQ ID NO: 93879 - DNA, 25 bp, Saccharomyces pastorianus
agatttgtttccgaacgtgctgttc

SEQ ID NO: 93880 - DNA, 25 bp, Saccharomyces pastorianus
tactgaattctcttaccgttacaat

SEQ ID NO: 93881 - DNA, 25 bp, Saccharomyces pastorianus
gtgcccaaggcttacatttacactt

SEQ ID NO: 93882 - DNA, 25 bp, Saccharomyces pastorianus
tggtggtgcttctaaggttcctaat

SEQ ID NO: 93883 - DNA, 25 bp, Saccharomyces pastorianus
atgagtcctctagtgaagtgcccaa

SEQ ID NO: 93884 - DNA, 25 bp, Saccharomyces pastorianus
gacgtccctggtgcgttcaagaaaa

SEQ ID NO: 93885 - DNA, 25 bp, Saccharomyces pastorianus
tcatgttagttactttacccgacgt

SEQ ID NO: 93886 - DNA, 25 bp, Saccharomyces pastorianus
ttccttggaggcctaagcgattctt

SEQ ID NO: 93887 - DNA, 25 bp, Saccharomyces pastorianus
aggtgccttgactaggttccttgga

SEQ ID NO: 93888 - DNA, 25 bp, Saccharomyces pastorianus
ttagctggtatttccgttcctccaa

SEQ ID NO: 93889 - DNA, 25 bp, Saccharomyces pastorianus
caatggatttagatggcccgctata

SEQ ID NO: 93890 - DNA, 25 bp, Saccharomyces pastorianus
tgtccatatgggttgctacggcatt

SEQ ID NO: 93891 - DNA, 25 bp, Saccharomyces pastorianus
gaaacatactgttccaatccagcat

SEQ ID NO: 93892 - DNA, 25 bp, Saccharomyces pastorianus
cattatgtgttatcgtgggctcaaa

SEQ ID NO: 93893 - DNA, 25 bp, Saccharomyces pastorianus
agaatgacatccttgaccagttcaa

SEQ ID NO: 93894 - DNA, 25 bp, Saccharomyces pastorianus
atactcgaagccgttaaatgtcaag

SEQ ID NO: 93895 - DNA, 25 bp, Saccharomyces pastorianus
ggcccgctataatggctccatacaa

SEQ ID NO: 93896 - DNA, 25 bp, Saccharomyces pastorianus
agaataaaattatcccatgccatgg

SEQ ID NO: 93897 - DNA, 25 bp, Saccharomyces pastorianus
aaagctgctgaatgatcctaccatg

SEQ ID NO: 93898 - DNA, 25 bp, Saccharomyces pastorianus
actagggcgtgattccaatggattt

SEQ ID NO: 93899 - DNA, 25 bp, Saccharomyces pastorianus
gtaggccacatatttttgctgggta

SEQ ID NO: 93900 - DNA, 25 bp, Saccharomyces pastorianus
catggtaggatcattcagcagcttt

SEQ ID NO: 93901 - DNA, 25 bp, Saccharomyces pastorianus
tatagcgggccatctaaatccattg

SEQ ID NO: 93902 - DNA, 25 bp, Saccharomyces pastorianus
gcacctatacccagtttttcattga

SEQ ID NO: 93903 - DNA, 25 bp, Saccharomyces pastorianus
ggccaactttttgagcccacgataa

SEQ ID NO: 93904 - DNA, 25 bp, Saccharomyces pastorianus
aaatccattggaatcacgccctagt

SEQ ID NO: 93905 - DNA, 25 bp, Saccharomyces pastorianus
gtatgtttctcaattccatgttcat

SEQ ID NO: 93906 - DNA, 25 bp, Saccharomyces pastorianus
tagcaatacgccaatgacttccact

SEQ ID NO: 93907 - DNA, 25 bp, Saccharomyces pastorianus
ggtacacttccattgcagttcgcta

SEQ ID NO: 93908 - DNA, 25 bp, Saccharomyces pastorianus
tttttcaaactgctttctccacagg

SEQ ID NO: 93909 - DNA, 25 bp, Saccharomyces pastorianus
aacatcctgtaacctctgtgagttt

SEQ ID NO: 93910 - DNA, 25 bp, Saccharomyces pastorianus
gaaatggcttgctttgtggctacat

SEQ ID NO: 93911 - DNA, 25 bp, Saccharomyces pastorianus
gctacgggactaagagtagatccct

SEQ ID NO: 93912 - DNA, 25 bp, Saccharomyces pastorianus
ggtttcatcttttctgttgttgcat

SEQ ID NO: 93913 - DNA, 25 bp, Saccharomyces pastorianus
gcggcatccgctccaaagaaaaaca

SEQ ID NO: 93914 - DNA, 25 bp, Saccharomyces pastorianus
gagtagatcccttagttgtgttgtt

SEQ ID NO: 93915 - DNA, 25 bp, Saccharomyces pastorianus
attctgatgaggctacgggactaag

SEQ ID NO: 93916 - DNA, 25 bp, Saccharomyces pastorianus
aaaaagttgcggcatccgctccaaa

SEQ ID NO: 93917 - DNA, 25 bp, Saccharomyces pastorianus
tgtgttgtttctagcggtcggtttc

SEQ ID NO: 93918 - DNA, 25 bp, Saccharomyces pastorianus
gatcccttagttgtgttgtttctag

SEQ ID NO: 93919 - DNA, 25 bp, Saccharomyces pastorianus
cttttctgttgttgcattacatgtt

SEQ ID NO: 93920 - DNA, 25 bp, Saccharomyces pastorianus
gaacagcaataattcgattttgaag

SEQ ID NO: 93921 - DNA, 25 bp, Saccharomyces pastorianus
tagcggtcggtttcatcttttctgt

SEQ ID NO: 93922 - DNA, 25 bp, Saccharomyces pastorianus
attgcaagtgggaacggccggcctt

SEQ ID NO: 93923 - DNA, 25 bp, Saccharomyces pastorianus
ttactgtcattctcgggatgggagg

SEQ ID NO: 93924 - DNA, 25 bp, Saccharomyces pastorianus
gccttgtggtcagtgttactgtcat

SEQ ID NO: 93925 - DNA, 25 bp, Saccharomyces pastorianus
tcatggcctatggtttggagcagtt

SEQ ID NO: 93926 - DNA, 25 bp, Saccharomyces pastorianus
tgttactgtcattctcgggatggga

SEQ ID NO: 93927 - DNA, 25 bp, Saccharomyces pastorianus
aacggccggccttgtggtcagtgtt

SEQ ID NO: 93928 - DNA, 25 bp, Saccharomyces pastorianus
gaagccgggtcatggcctatggttt

SEQ ID NO: 93929 - DNA, 25 bp, Saccharomyces pastorianus
aagatccttcattgcaagtgggaac

SEQ ID NO: 93930 - DNA, 25 bp, Saccharomyces pastorianus
ggatggaagatccttcattgcaagt

SEQ ID NO: 93931 - DNA, 25 bp, Saccharomyces pastorianus
tcagtgttactgtcattctcgggat

SEQ ID NO: 93932 - DNA, 25 bp, Saccharomyces pastorianus
ccggccttgtggtcagtgttactgt

SEQ ID NO: 93933 - DNA, 25 bp, Saccharomyces pastorianus
agagtcattacccatccaattgctg

SEQ ID NO: 93934 - DNA, 25 bp, Saccharomyces pastorianus
gtgttctccgcccagaaaagacaag

SEQ ID NO: 93935 - DNA, 25 bp, Saccharomyces pastorianus
tggctcgttaaaagaccgtgcagaa

SEQ ID NO: 93936 - DNA, 25 bp, Saccharomyces pastorianus
aggcgccgtaggtcattggtcatac

SEQ ID NO: 93937 - DNA, 25 bp, Saccharomyces pastorianus
tagcggaccaattacgtggctcgtt

SEQ ID NO: 93938 - DNA, 25 bp, Saccharomyces pastorianus
agccatggaattgattgccgaacta

SEQ ID NO: 93939 - DNA, 25 bp, Saccharomyces pastorianus
cttacttgcaagctggcggtggtat

SEQ ID NO: 93940 - DNA, 25 bp, Saccharomyces pastorianus
ggtttctcaagtcagcggtgttctc

SEQ ID NO: 93941 - DNA, 25 bp, Saccharomyces pastorianus
tgcaggtactgtcagtggtgctcca

SEQ ID NO: 93942 - DNA, 25 bp, Saccharomyces pastorianus
ttcagatcgattttccctgcaggta

SEQ ID NO: 93943 - DNA, 25 bp, Saccharomyces pastorianus
aattttctcatgtccaacatctggt

SEQ ID NO: 93944 - DNA, 25 bp, Saccharomyces pastorianus
ccacattggtctaggtttattcgat

SEQ ID NO: 93945 - DNA, 25 bp, Saccharomyces pastorianus
gccagctttaagagaaggtttacca

SEQ ID NO: 93946 - DNA, 25 bp, Saccharomyces pastorianus
gtttattcgatattcattctccaag

SEQ ID NO: 93947 - DNA, 25 bp, Saccharomyces pastorianus
gtcaatgatttggaagctgccggta

SEQ ID NO: 93948 - DNA, 25 bp, Saccharomyces pastorianus
aagctgccggtatcaaggttatcca

SEQ ID NO: 93949 - DNA, 25 bp, Saccharomyces pastorianus
caaaggatgaatttatcgccaagat

SEQ ID NO: 93950 - DNA, 25 bp, Saccharomyces pastorianus
gttatccaagttgatgagccagctt

SEQ ID NO: 93951 - DNA, 25 bp, Saccharomyces pastorianus
taaagggtatgttgactggtccaat

SEQ ID NO: 93952 - DNA, 25 bp, Saccharomyces pastorianus
agagctacccagctgaaaagttctg

SEQ ID NO: 93953 - DNA, 25 bp, Saccharomyces pastorianus
accatcttgaagagctacccagctg

SEQ ID NO: 93954 - DNA, 25 bp, Saccharomyces pastorianus
tgagagatctgcttactacacctgg

SEQ ID NO: 93955 - DNA, 25 bp, Saccharomyces pastorianus
ggtagtcatagctcgttctgctcaa

SEQ ID NO: 93956 - DNA, 25 bp, Saccharomyces pastorianus
gtcgcgaacgtgcaaaaggccaata

SEQ ID NO: 93957 - DNA, 25 bp, Saccharomyces pastorianus
gaaacgggactactatcgaactcgt

SEQ ID NO: 93958 - DNA, 25 bp, Saccharomyces pastorianus
atagctcgttctgctcaattgagaa

SEQ ID NO: 93959 - DNA, 25 bp, Saccharomyces pastorianus
agtcatggcagctctttcgctctat

SEQ ID NO: 93960 - DNA, 25 bp, Saccharomyces pastorianus
aaggccaatatttttcgctagagtc

SEQ ID NO: 93961 - DNA, 25 bp, Saccharomyces pastorianus
tcccggtcgcaaaactgtggtagtc

SEQ ID NO: 93962 - DNA, 25 bp, Saccharomyces pastorianus
tagagtcatcgcagtcatggcagct

SEQ ID NO: 93963 - DNA, 25 bp, Saccharomyces pastorianus
atcgaactcgtttagtcgcgaacgt

SEQ ID NO: 93964 - DNA, 25 bp, Saccharomyces pastorianus
tttcgctagagtcatcgcagtcatg

SEQ ID NO: 93965 - DNA, 25 bp, Saccharomyces pastorianus
ttcgctctatctcccggtcgcaaaa

SEQ ID NO: 93966 - DNA, 25 bp, Saccharomyces pastorianus
aagatattgaggttcccgaggagct

SEQ ID NO: 93967 - DNA, 25 bp, Saccharomyces pastorianus
atggatgcttatactctgtacaagg

SEQ ID NO: 93968 - DNA, 25 bp, Saccharomyces pastorianus
gaactcccacgcttaatatctcaag

SEQ ID NO: 93969 - DNA, 25 bp, Saccharomyces pastorianus
gttcccgaggagctaatggatgctt

SEQ ID NO: 93970 - DNA, 25 bp, Saccharomyces pastorianus
aagggaatacactacattattgaga

SEQ ID NO: 93971 - DNA, 25 bp, Saccharomyces pastorianus
agatactggttctgctgaaacggaa

SEQ ID NO: 93972 - DNA, 25 bp, Saccharomyces pastorianus
gcaacagtagagaaagtacccgaat

SEQ ID NO: 93973 - DNA, 25 bp, Saccharomyces pastorianus
tgaaacggaactcccacgcttaata

SEQ ID NO: 93974 - DNA, 25 bp, Saccharomyces pastorianus
gtatcgagcgtgataacggtactga

SEQ ID NO: 93975 - DNA, 25 bp, Saccharomyces pastorianus
gcttatcaaacaggatgggactcta

SEQ ID NO: 93976 - DNA, 25 bp, Saccharomyces pastorianus
aagatccagagagcgttatagacaa

SEQ ID NO: 93977 - DNA, 25 bp, Saccharomyces pastorianus
gtaagtcagctaggcaatcatatcc

SEQ ID NO: 93978 - DNA, 25 bp, Saccharomyces pastorianus
aataccgcaatgacgatgactccat

SEQ ID NO: 93979 - DNA, 25 bp, Saccharomyces pastorianus
aaatgcttacccatcgaatttgatt

SEQ ID NO: 93980 - DNA, 25 bp, Saccharomyces pastorianus
ggaagtttctttgcggactatttat

SEQ ID NO: 93981 - DNA, 25 bp, Saccharomyces pastorianus
ctttcttctccctatgttacacaat

SEQ ID NO: 93982 - DNA, 25 bp, Saccharomyces pastorianus
gtcgaagtatcggtttaagccacat

SEQ ID NO: 93983 - DNA, 25 bp, Saccharomyces pastorianus
tagtcttttcgcaaacgaaggcctt

SEQ ID NO: 93984 - DNA, 25 bp, Saccharomyces pastorianus
caaatggtccgcatttagcgagtat

SEQ ID NO: 93985 - DNA, 25 bp, Saccharomyces pastorianus
tatcgggatcgcactaccaaatagg

SEQ ID NO: 93986 - DNA, 25 bp, Saccharomyces pastorianus
tcatatcctttcaaatcacgcagtg

SEQ ID NO: 93987 - DNA, 25 bp, Saccharomyces pastorianus
agtcaaactatcactgtttcaggtg

SEQ ID NO: 93988 - DNA, 25 bp, Saccharomyces pastorianus
agagcctataatgccgaccatcagt

SEQ ID NO: 93989 - DNA, 25 bp, Saccharomyces pastorianus
atattatggcacattcttccaccac

SEQ ID NO: 93990 - DNA, 25 bp, Saccharomyces pastorianus
ctgttatggctctataccgtacgga

SEQ ID NO: 93991 - DNA, 25 bp, Saccharomyces pastorianus
ttccttgattgtggtcgattctgtt

SEQ ID NO: 93992 - DNA, 25 bp, Saccharomyces pastorianus
agacccggatgatgctttgaacaac

SEQ ID NO: 93993 - DNA, 25 bp, Saccharomyces pastorianus
aaagttgttgactcaccttgcttac

SEQ ID NO: 93994 - DNA, 25 bp, Saccharomyces pastorianus
aagtcccagctatgtcacactttgg

SEQ ID NO: 93995 - DNA, 25 bp, Saccharomyces pastorianus
aatttggtgttgcagtcgtcgttac

SEQ ID NO: 93996 - DNA, 25 bp, Saccharomyces pastorianus
aaaggctggccgaccaatttggtgt

SEQ ID NO: 93997 - DNA, 25 bp, Saccharomyces pastorianus
ttaagacttctggatgctgctgccc

SEQ ID NO: 93998 - DNA, 25 bp, Saccharomyces pastorianus
attggtatccatagctcagcggttc

SEQ ID NO: 93999 - DNA, 25 bp, Saccharomyces pastorianus
atggtcggactgaagcaactgcccc

SEQ ID NO: 94000 - DNA, 25 bp, Saccharomyces pastorianus
atggtcattacgtatgcatttgcag

SEQ ID NO: 94001 - DNA, 25 bp, Saccharomyces pastorianus
cccatattctgtcattgcacctaaa

SEQ ID NO: 94002 - DNA, 25 bp, Saccharomyces pastorianus
ggagcggtccacagcatggtcatta

SEQ ID NO: 94003 - DNA, 25 bp, Saccharomyces pastorianus
gtgttacaattcacaggtcatccag

SEQ ID NO: 94004 - DNA, 25 bp, Saccharomyces pastorianus
ggtcatccaggtgatcaaactacag

SEQ ID NO: 94005 - DNA, 25 bp, Saccharomyces pastorianus
ggatgtttcttccacttttaataca

SEQ ID NO: 94006 - DNA, 25 bp, Saccharomyces pastorianus
actacagcctacgttttattctata

SEQ ID NO: 94007 - DNA, 25 bp, Saccharomyces pastorianus
gactgcagaaaccaagacgccatta

SEQ ID NO: 94008 - DNA, 25 bp, Saccharomyces pastorianus
gatcgtaaattgagggcagctgcaa

SEQ ID NO: 94009 - DNA, 25 bp, Saccharomyces pastorianus
taagcggcgtcgtcatccatatggg

SEQ ID NO: 94010 - DNA, 25 bp, Saccharomyces pastorianus
tcgtgttggacttcatcggtggtta

SEQ ID NO: 94011 - DNA, 25 bp, Saccharomyces pastorianus
ctgtcagaacatttcccggatttga

SEQ ID NO: 94012 - DNA, 25 bp, Saccharomyces pastorianus
tagtaaaccactcagacgtatgttg

SEQ ID NO: 94013 - DNA, 25 bp, Saccharomyces pastorianus
tttcctacatggctacacaacgtgc

SEQ ID NO: 94014 - DNA, 25 bp, Saccharomyces pastorianus
ggttatgatatcttgagtcactcga

SEQ ID NO: 94015 - DNA, 25 bp, Saccharomyces pastorianus
ttgggataaccctagcgccaatgca

SEQ ID NO: 94016 - DNA, 25 bp, Saccharomyces pastorianus
gtcactcgagttctttaattcacgc

SEQ ID NO: 94017 - DNA, 25 bp, Saccharomyces pastorianus
ttctcatttttactttgaccccaat

SEQ ID NO: 94018 - DNA, 25 bp, Saccharomyces pastorianus
acatgaatgcggcaagctgctaaat

SEQ ID NO: 94019 - DNA, 25 bp, Saccharomyces pastorianus
gacgtctttgattcttgggataacc

SEQ ID NO: 94020 - DNA, 25 bp, Saccharomyces pastorianus
aatggtgcagcagtcctgtcagaac

SEQ ID NO: 94021 - DNA, 25 bp, Saccharomyces pastorianus
acagcgtacaggtgtttcttttgac

SEQ ID NO: 94022 - DNA, 25 bp, Saccharomyces pastorianus
acttccccttctgtggtttcagata

SEQ ID NO: 94023 - DNA, 25 bp, Saccharomyces pastorianus
tggcactatgcacattgacacttcc

SEQ ID NO: 94024 - DNA, 25 bp, Saccharomyces pastorianus
cagagatcacggttggagtccatga

SEQ ID NO: 94025 - DNA, 25 bp, Saccharomyces pastorianus
tctaccctctgacatggctgaatat

SEQ ID NO: 94026 - DNA, 25 bp, Saccharomyces pastorianus
gaaggccgcagaactacagcgtaca

SEQ ID NO: 94027 - DNA, 25 bp, Saccharomyces pastorianus
gatgagttgcttgcctttattgaaa

SEQ ID NO: 94028 - DNA, 25 bp, Saccharomyces pastorianus
gaccggagtttaacacctcaatctt

SEQ ID NO: 94029 - DNA, 25 bp, Saccharomyces pastorianus
gacgagatcgttcacaggatttttt

SEQ ID NO: 94030 - DNA, 25 bp, Saccharomyces pastorianus
aatgaccaaagtacgcggtggccta

SEQ ID NO: 94031 - DNA, 25 bp, Saccharomyces pastorianus
ggatgactgttgcttcgattggaat

SEQ ID NO: 94032 - DNA, 25 bp, Saccharomyces pastorianus
tgtgcagacccattagattactacg

SEQ ID NO: 94033 - DNA, 25 bp, Saccharomyces pastorianus
aagggtgctcccattatcagatctc

SEQ ID NO: 94034 - DNA, 25 bp, Saccharomyces pastorianus
aagaatcctttctttcctcgatatc

SEQ ID NO: 94035 - DNA, 25 bp, Saccharomyces pastorianus
atgaaaaatgctccatcgcctgacg

SEQ ID NO: 94036 - DNA, 25 bp, Saccharomyces pastorianus
atatgatccgaataccgatcccgtt

SEQ ID NO: 94037 - DNA, 25 bp, Saccharomyces pastorianus
atgttcaatgttcttgcttgccgga

SEQ ID NO: 94038 - DNA, 25 bp, Saccharomyces pastorianus
gatttacgcggttcaattgcgccag

SEQ ID NO: 94039 - DNA, 25 bp, Saccharomyces pastorianus
gctgctgatggatctgtatgttcaa

SEQ ID NO: 94040 - DNA, 25 bp, Saccharomyces pastorianus
ttcctcgatatccaacacactaatt

SEQ ID NO: 94041 - DNA, 25 bp, Saccharomyces pastorianus
gcttgccggagtttctcatttaaaa

SEQ ID NO: 94042 - DNA, 25 bp, Saccharomyces pastorianus
tacggacgttgttttccctgtacat

SEQ ID NO: 94043 - DNA, 25 bp, Saccharomyces pastorianus
gatttttaaggcaaccacgtcacct

SEQ ID NO: 94044 - DNA, 25 bp, Saccharomyces pastorianus
aatagcattgcatttcatccattat

SEQ ID NO: 94045 - DNA, 25 bp, Saccharomyces pastorianus
agccgatggatatgcgattggttca

SEQ ID NO: 94046 - DNA, 25 bp, Saccharomyces pastorianus
atggcaaactcgatgcgtggcatgt

SEQ ID NO: 94047 - DNA, 25 bp, Saccharomyces pastorianus
gtatccaccgtaatgatgcctgaaa

SEQ ID NO: 94048 - DNA, 25 bp, Saccharomyces pastorianus
ggctactgccgaaagacatatcgct

SEQ ID NO: 94049 - DNA, 25 bp, Saccharomyces pastorianus
atgggcaacagacccgactatccaa

SEQ ID NO: 94050 - DNA, 25 bp, Saccharomyces pastorianus
aacagtctctgttagtagtggctac

SEQ ID NO: 94051 - DNA, 25 bp, Saccharomyces pastorianus
atctctagtgtaccctgtaaatagc

SEQ ID NO: 94052 - DNA, 25 bp, Saccharomyces pastorianus
acggctggtggtgatggtaccttca

SEQ ID NO: 94053 - DNA, 25 bp, Saccharomyces pastorianus
gactatccaaacgtcattaggctac

SEQ ID NO: 94054 - DNA, 25 bp, Saccharomyces pastorianus
gctgaggttgtatttgatcgattaa

SEQ ID NO: 94055 - DNA, 25 bp, Saccharomyces pastorianus
ttcattcgccattgcagtactcgtt

SEQ ID NO: 94056 - DNA, 25 bp, Saccharomyces pastorianus
gagtcctctgctgggctattaatga

SEQ ID NO: 94057 - DNA, 25 bp, Saccharomyces pastorianus
ggtatggtaagcttgcccaattctt

SEQ ID NO: 94058 - DNA, 25 bp, Saccharomyces pastorianus
ttgatcaaggtggatgtgccggaat

SEQ ID NO: 94059 - DNA, 25 bp, Saccharomyces pastorianus
gcttgcccaattcttataagtcagt

SEQ ID NO: 94060 - DNA, 25 bp, Saccharomyces pastorianus
ttcctcttcttacgtatttctttat

SEQ ID NO: 94061 - DNA, 25 bp, Saccharomyces pastorianus
aatatccgatattgagtcctctgct

SEQ ID NO: 94062 - DNA, 25 bp, Saccharomyces pastorianus
gacaatatcattggccaaatccttt

SEQ ID NO: 94063 - DNA, 25 bp, Saccharomyces pastorianus
aaatccttttcattcgccattgcag

SEQ ID NO: 94064 - DNA, 25 bp, Saccharomyces pastorianus
gtactcgttcccaaagctgaggttg

SEQ ID NO: 94065 - DNA, 25 bp, Saccharomyces pastorianus
ttgggtcctcagcaaaccagtacta

SEQ ID NO: 94066 - DNA, 25 bp, Saccharomyces pastorianus
acctcggtctggtgacgctcagaag

SEQ ID NO: 94067 - DNA, 25 bp, Saccharomyces pastorianus
gaccaaggaccggattacgatctca

SEQ ID NO: 94068 - DNA, 25 bp, Saccharomyces pastorianus
ataacacattaattcagccctcatc

SEQ ID NO: 94069 - DNA, 25 bp, Saccharomyces pastorianus
gaaacctctgcatctacaaatagtg

SEQ ID NO: 94070 - DNA, 25 bp, Saccharomyces pastorianus
ttaagcatagcaacacctcggtctg

SEQ ID NO: 94071 - DNA, 25 bp, Saccharomyces pastorianus
gaatgtacactctcagaacttgaag

SEQ ID NO: 94072 - DNA, 25 bp, Saccharomyces pastorianus
aaggatatgattttgacgccctcaa

SEQ ID NO: 94073 - DNA, 25 bp, Saccharomyces pastorianus
gtaacacattatctactccagagga

SEQ ID NO: 94074 - DNA, 25 bp, Saccharomyces pastorianus
caagttctttgttgtttcctaatca

SEQ ID NO: 94075 - DNA, 25 bp, Saccharomyces pastorianus
taaagccgccacatgggttttcaac

SEQ ID NO: 94076 - DNA, 25 bp, Saccharomyces pastorianus
cgaagccaccagagagattattgat

SEQ ID NO: 94077 - DNA, 25 bp, Saccharomyces pastorianus
gaaaatagtcccgttatcacaaacg

SEQ ID NO: 94078 - DNA, 25 bp, Saccharomyces pastorianus
atctcagccgtttatgaacctgttt

SEQ ID NO: 94079 - DNA, 25 bp, Saccharomyces pastorianus
aatgctagtggatgtgtggccagaa

SEQ ID NO: 94080 - DNA, 25 bp, Saccharomyces pastorianus
ttttcagtgctgtgtttaccaaaga

SEQ ID NO: 94081 - DNA, 25 bp, Saccharomyces pastorianus
ttgaaggcgctttatgagttactaa

SEQ ID NO: 94082 - DNA, 25 bp, Saccharomyces pastorianus
tatgcttctatggacatctcagccg

SEQ ID NO: 94083 - DNA, 25 bp, Saccharomyces pastorianus
aaggccttagcagccgaagatgacg

SEQ ID NO: 94084 - DNA, 25 bp, Saccharomyces pastorianus
gagttactaagtgctgctgaccaaa

SEQ ID NO: 94085 - DNA, 25 bp, Saccharomyces pastorianus
gatcatcgagattttcagtgctgtg

SEQ ID NO: 94086 - DNA, 25 bp, Saccharomyces pastorianus
agtgctgctgaccaaaaggccttag

SEQ ID NO: 94087 - DNA, 25 bp, Saccharomyces pastorianus
gggatattgaccaacgtagataact

SEQ ID NO: 94088 - DNA, 25 bp, Saccharomyces pastorianus
ggatgaaccttactttatctaatgt

SEQ ID NO: 94089 - DNA, 25 bp, Saccharomyces pastorianus
aggtgggtccgtccaacatcatttt

SEQ ID NO: 94090 - DNA, 25 bp, Saccharomyces pastorianus
aatgctgagagcagtaaagccgtaa

SEQ ID NO: 94091 - DNA, 25 bp, Saccharomyces pastorianus
gagggacttttatcaagtttatcaa

SEQ ID NO: 94092 - DNA, 25 bp, Saccharomyces pastorianus
ggtcaagcagcaaattaactccaac

SEQ ID NO: 94093 - DNA, 25 bp, Saccharomyces pastorianus
acggccctgggcataaaagatacta

SEQ ID NO: 94094 - DNA, 25 bp, Saccharomyces pastorianus
gtccatactctcaaaaccgtcaata

SEQ ID NO: 94095 - DNA, 25 bp, Saccharomyces pastorianus
tgaacaatggtttaggtgggtccgt

SEQ ID NO: 94096 - DNA, 25 bp, Saccharomyces pastorianus
actctaatagtaacggccctgggca

SEQ ID NO: 94097 - DNA, 25 bp, Saccharomyces pastorianus
gcaacagcagtaacattaacaacag

SEQ ID NO: 94098 - DNA, 25 bp, Saccharomyces pastorianus
gctaataatatacctttgcctcaat

SEQ ID NO: 94099 - DNA, 25 bp, Saccharomyces pastorianus
gagcatttatttcatcgtctgtata

SEQ ID NO: 94100 - DNA, 25 bp, Saccharomyces pastorianus
ttcgcagtgctaaacatccatgggt

SEQ ID NO: 94101 - DNA, 25 bp, Saccharomyces pastorianus
taatgtgcagtttagggcttggcgc

SEQ ID NO: 94102 - DNA, 25 bp, Saccharomyces pastorianus
acgtttacaaatctctctggttgga

SEQ ID NO: 94103 - DNA, 25 bp, Saccharomyces pastorianus
tatgtggtattttccccttgttagt

SEQ ID NO: 94104 - DNA, 25 bp, Saccharomyces pastorianus
ttcaacccgttggtttactgcggca

SEQ ID NO: 94105 - DNA, 25 bp, Saccharomyces pastorianus
gggttttcatctatcttaatttcca

SEQ ID NO: 94106 - DNA, 25 bp, Saccharomyces pastorianus
gtctgtataccactcagcttgtttg

SEQ ID NO: 94107 - DNA, 25 bp, Saccharomyces pastorianus
gggcttggcgcattaagttacttaa

SEQ ID NO: 94108 - DNA, 25 bp, Saccharomyces pastorianus
aaatcacgagccaagttcaacccgt

SEQ ID NO: 94109 - DNA, 25 bp, Saccharomyces pastorianus
aagggcaagctgatcgcacaatatc

SEQ ID NO: 94110 - DNA, 25 bp, Saccharomyces pastorianus
atcagtgccaattatcagttcctat

SEQ ID NO: 94111 - DNA, 25 bp, Saccharomyces pastorianus
gttcttactagcttccggattgtta

SEQ ID NO: 94112 - DNA, 25 bp, Saccharomyces pastorianus
acctcgcacgcactattttgcagta

SEQ ID NO: 94113 - DNA, 25 bp, Saccharomyces pastorianus
ttatcgcctggagtggctcgcaata

SEQ ID NO: 94114 - DNA, 25 bp, Saccharomyces pastorianus
gtttgacatttacacaacctcgcac

SEQ ID NO: 94115 - DNA, 25 bp, Saccharomyces pastorianus
aaactattacctccgcaaccaggat

SEQ ID NO: 94116 - DNA, 25 bp, Saccharomyces pastorianus
atatcagcgtcaacccaacgaactt

SEQ ID NO: 94117 - DNA, 25 bp, Saccharomyces pastorianus
atatctactccgaatttgtcctctg

SEQ ID NO: 94118 - DNA, 25 bp, Saccharomyces pastorianus
tggattttccagtccgttcttacta

SEQ ID NO: 94119 - DNA, 25 bp, Saccharomyces pastorianus
atacaacacctacggtttccttgag

SEQ ID NO: 94120 - DNA, 25 bp, Saccharomyces pastorianus
tatacgagactcaggctacgcgaca

SEQ ID NO: 94121 - DNA, 25 bp, Saccharomyces pastorianus
aagccgttaatcttcacttgaacac

SEQ ID NO: 94122 - DNA, 25 bp, Saccharomyces pastorianus
gtacccatacgacgctgatgacgat

SEQ ID NO: 94123 - DNA, 25 bp, Saccharomyces pastorianus
attaagggtatcaggccttcgccat

SEQ ID NO: 94124 - DNA, 25 bp, Saccharomyces pastorianus
gcagcaaccttctcacacaaattat

SEQ ID NO: 94125 - DNA, 25 bp, Saccharomyces pastorianus
ggccttcgccattagagaattctct

SEQ ID NO: 94126 - DNA, 25 bp, Saccharomyces pastorianus
gaattctcttcatagagctcgtcga

SEQ ID NO: 94127 - DNA, 25 bp, Saccharomyces pastorianus
ggctacgcgacacagtttgatggat

SEQ ID NO: 94128 - DNA, 25 bp, Saccharomyces pastorianus
aactacgatgggagacactttgggt

SEQ ID NO: 94129 - DNA, 25 bp, Saccharomyces pastorianus
tttgggtctgtatagcgatatcggt

SEQ ID NO: 94130 - DNA, 25 bp, Saccharomyces pastorianus
cttctacggcattggctggttttga

SEQ ID NO: 94131 - DNA, 25 bp, Saccharomyces pastorianus
gataagtccagatgtacacccagca

SEQ ID NO: 94132 - DNA, 25 bp, Saccharomyces pastorianus
ggaggtccctgctgaaccggaaact

SEQ ID NO: 94133 - DNA, 25 bp, Saccharomyces pastorianus
gtgccgtgacaagttcctggttatc

SEQ ID NO: 94134 - DNA, 25 bp, Saccharomyces pastorianus
ggtccgacttggaggctgagttcaa

SEQ ID NO: 94135 - DNA, 25 bp, Saccharomyces pastorianus
tgtcgttcagaaaaccgttcctcat

SEQ ID NO: 94136 - DNA, 25 bp, Saccharomyces pastorianus
aagttatcttcctgggtttgactga

SEQ ID NO: 94137 - DNA, 25 bp, Saccharomyces pastorianus
gccgcagttgttgctccaggtgaaa

SEQ ID NO: 94138 - DNA, 25 bp, Saccharomyces pastorianus
gaagtgcctgctgtggtaaacgaaa

SEQ ID NO: 94139 - DNA, 25 bp, Saccharomyces pastorianus
gaaagaagaggtcccacctgtcgtt

SEQ ID NO: 94140 - DNA, 25 bp, Saccharomyces pastorianus
gctgttgcagatgtttggtccgact

SEQ ID NO: 94141 - DNA, 25 bp, Saccharomyces pastorianus
agccccaaagttttactgcgtgaga

SEQ ID NO: 94142 - DNA, 25 bp, Saccharomyces pastorianus
gatgtcgaaaataacttaccttctt

SEQ ID NO: 94143 - DNA, 25 bp, Saccharomyces pastorianus
ttatcgcgctggcacgacatgaatt

SEQ ID NO: 94144 - DNA, 25 bp, Saccharomyces pastorianus
attttcaaccgcttcatacgcacat

SEQ ID NO: 94145 - DNA, 25 bp, Saccharomyces pastorianus
gacatgaattcaaggccagcagagg

SEQ ID NO: 94146 - DNA, 25 bp, Saccharomyces pastorianus
tactacgcccttgcggcaagtgata

SEQ ID NO: 94147 - DNA, 25 bp, Saccharomyces pastorianus
gtttaaatgcaagtgtttctaacga

SEQ ID NO: 94148 - DNA, 25 bp, Saccharomyces pastorianus
tccctatgtggacgatgaagcaatt

SEQ ID NO: 94149 - DNA, 25 bp, Saccharomyces pastorianus
aatgctacctcgtctgcattttcaa

SEQ ID NO: 94150 - DNA, 25 bp, Saccharomyces pastorianus
gggtatagactatccctatgtggac

SEQ ID NO: 94151 - DNA, 25 bp, Saccharomyces pastorianus
aatgaaccaaatgctacctcgtctg

SEQ ID NO: 94152 - DNA, 25 bp, Saccharomyces pastorianus
atgcaacaggatgcgcactactacg

SEQ ID NO: 94153 - DNA, 25 bp, Saccharomyces pastorianus
aatagctcagggaccaagatatacg

SEQ ID NO: 94154 - DNA, 25 bp, Saccharomyces pastorianus
atacccagcctgatgaattcaatga

SEQ ID NO: 94155 - DNA, 25 bp, Saccharomyces pastorianus
tacatcaatttcctcttcttcatat

SEQ ID NO: 94156 - DNA, 25 bp, Saccharomyces pastorianus
atttggtcgtggctcatttgatgaa

SEQ ID NO: 94157 - DNA, 25 bp, Saccharomyces pastorianus
atgcctccgcagatgatgaattgca

SEQ ID NO: 94158 - DNA, 25 bp, Saccharomyces pastorianus
gacacttcaaacagcttcgacacaa

SEQ ID NO: 94159 - DNA, 25 bp, Saccharomyces pastorianus
gatactttaacacccaagtttgcca

SEQ ID NO: 94160 - DNA, 25 bp, Saccharomyces pastorianus
aatcgcggaaaggtacggcacacaa

SEQ ID NO: 94161 - DNA, 25 bp, Saccharomyces pastorianus
gagcaggtaattttgatggccgtaa

SEQ ID NO: 94162 - DNA, 25 bp, Saccharomyces pastorianus
gtggacgaatttggtaatcccatca

SEQ ID NO: 94163 - DNA, 25 bp, Saccharomyces pastorianus
ttcatcgattttaatgcctccgcag

SEQ ID NO: 94164 - DNA, 25 bp, Saccharomyces pastorianus
gtacgactccatcagtcatacacaa

SEQ ID NO: 94165 - DNA, 25 bp, Saccharomyces pastorianus
tcgaacccgcagagctttactaaac

SEQ ID NO: 94166 - DNA, 25 bp, Saccharomyces pastorianus
gagctaacttgcatggttacggaaa

SEQ ID NO: 94167 - DNA, 25 bp, Saccharomyces pastorianus
aatccagaatttcttcgaacccgca

SEQ ID NO: 94168 - DNA, 25 bp, Saccharomyces pastorianus
atgagcacaacttaccaaaccacta

SEQ ID NO: 94169 - DNA, 25 bp, Saccharomyces pastorianus
aacgccagttgcgacacctaagcaa

SEQ ID NO: 94170 - DNA, 25 bp, Saccharomyces pastorianus
aaatgatgcttattctgatgacgag

SEQ ID NO: 94171 - DNA, 25 bp, Saccharomyces pastorianus
ggacactatgactggatggatttga

SEQ ID NO: 94172 - DNA, 25 bp, Saccharomyces pastorianus
aagacacgaaatacaacgccagttg

SEQ ID NO: 94173 - DNA, 25 bp, Saccharomyces pastorianus
tgtaccatattcaagttctaaagct

SEQ ID NO: 94174 - DNA, 25 bp, Saccharomyces pastorianus
ccaagagtcaatggcaatactgcaa

SEQ ID NO: 94175 - DNA, 25 bp, Saccharomyces pastorianus
aaagagcccgtttattgcagttcac

SEQ ID NO: 94176 - DNA, 25 bp, Saccharomyces pastorianus
gagttgatttgccacaatacgttga

SEQ ID NO: 94177 - DNA, 25 bp, Saccharomyces pastorianus
atttgcaaggctctgatggtccaag

SEQ ID NO: 94178 - DNA, 25 bp, Saccharomyces pastorianus
aattgccaaaatctcacacatgttt

SEQ ID NO: 94179 - DNA, 25 bp, Saccharomyces pastorianus
gtcagacgaggtcattcaatggttt

SEQ ID NO: 94180 - DNA, 25 bp, Saccharomyces pastorianus
tctgacgttcagtgccgacgatgaa

SEQ ID NO: 94181 - DNA, 25 bp, Saccharomyces pastorianus
gatggtgtcttggatctgacgttca

SEQ ID NO: 94182 - DNA, 25 bp, Saccharomyces pastorianus
tagaactattgatcggtggtattgc

SEQ ID NO: 94183 - DNA, 25 bp, Saccharomyces pastorianus
acacactgattatcgtggttaccaa

SEQ ID NO: 94184 - DNA, 25 bp, Saccharomyces pastorianus
aactgtgtttgatgagcgtgaacta

SEQ ID NO: 94185 - DNA, 25 bp, Saccharomyces pastorianus
atgtcgaattatatacccaatggag

SEQ ID NO: 94186 - DNA, 25 bp, Saccharomyces pastorianus
gaaggtttcactagaagaccagtta

SEQ ID NO: 94187 - DNA, 25 bp, Saccharomyces pastorianus
aagaatcatcagaccaagtgcgttg

SEQ ID NO: 94188 - DNA, 25 bp, Saccharomyces pastorianus
gatggtgatgctttgccgacatatc

SEQ ID NO: 94189 - DNA, 25 bp, Saccharomyces pastorianus
gtgttttgactaaaggtaccattat

SEQ ID NO: 94190 - DNA, 25 bp, Saccharomyces pastorianus
tcagttccgttaccaaaggttcgtg

SEQ ID NO: 94191 - DNA, 25 bp, Saccharomyces pastorianus
catccggaattaggtgtaactgtct

SEQ ID NO: 94192 - DNA, 25 bp, Saccharomyces pastorianus
aggtcaagggttcatccaaaccatt

SEQ ID NO: 94193 - DNA, 25 bp, Saccharomyces pastorianus
gtaactgtcttcttgccaattttgg

SEQ ID NO: 94194 - DNA, 25 bp, Saccharomyces pastorianus
aaggcaaacgtcactcatccggaat

SEQ ID NO: 94195 - DNA, 25 bp, Saccharomyces pastorianus
gggtaagtatgctcaggtcacaaac

SEQ ID NO: 94196 - DNA, 25 bp, Saccharomyces pastorianus
gctttgccgacatatctattggaca

SEQ ID NO: 94197 - DNA, 25 bp, Saccharomyces pastorianus
gagactggcgtgtataaaccaccaa

SEQ ID NO: 94198 - DNA, 25 bp, Saccharomyces pastorianus
gagagtcatcggaccaaccggactg

SEQ ID NO: 94199 - DNA, 25 bp, Saccharomyces pastorianus
ctaccaccgcaacaaacgcattttg

SEQ ID NO: 94200 - DNA, 25 bp, Saccharomyces pastorianus
atcatagcggcaacgacgatagcga

SEQ ID NO: 94201 - DNA, 25 bp, Saccharomyces pastorianus
caaagattacggctgttctaccacc

SEQ ID NO: 94202 - DNA, 25 bp, Saccharomyces pastorianus
aaatcatcagcatacagggtggagg

SEQ ID NO: 94203 - DNA, 25 bp, Saccharomyces pastorianus
gcatacaggccaaatacctctggaa

SEQ ID NO: 94204 - DNA, 25 bp, Saccharomyces pastorianus
aaccggactggagtgcatctattgg

SEQ ID NO: 94205 - DNA, 25 bp, Saccharomyces pastorianus
ggaacgtagagtcacttcattcgaa

SEQ ID NO: 94206 - DNA, 25 bp, Saccharomyces pastorianus
aggcggtatcaaatcttcgagagac

SEQ ID NO: 94207 - DNA, 25 bp, Saccharomyces pastorianus
ggtgctgacattgtgaaccatggaa

SEQ ID NO: 94208 - DNA, 25 bp, Saccharomyces pastorianus
taactctaaagaccctgatccaact

SEQ ID NO: 94209 - DNA, 25 bp, Saccharomyces pastorianus
gaagccgtggctcaattaaaactag

SEQ ID NO: 94210 - DNA, 25 bp, Saccharomyces pastorianus
gtacgttgccagaaaggtcgctctc

SEQ ID NO: 94211 - DNA, 25 bp, Saccharomyces pastorianus
aaggtcgctctcaaggacatgcaac

SEQ ID NO: 94212 - DNA, 25 bp, Saccharomyces pastorianus
gaattactctaatacggatcctgaa

SEQ ID NO: 94213 - DNA, 25 bp, Saccharomyces pastorianus
ttgtcattcccctctatagtacaga

SEQ ID NO: 94214 - DNA, 25 bp, Saccharomyces pastorianus
gacatcagctcaaacccaattaggg

SEQ ID NO: 94215 - DNA, 25 bp, Saccharomyces pastorianus
gtgcgatctgtagcaaaccatccac

SEQ ID NO: 94216 - DNA, 25 bp, Saccharomyces pastorianus
tacaaccgactctactgatacatct

SEQ ID NO: 94217 - DNA, 25 bp, Saccharomyces pastorianus
aatcgcgaacgatacctcaaggagc

SEQ ID NO: 94218 - DNA, 25 bp, Saccharomyces pastorianus
gatacatctccacaggctaagaacg

SEQ ID NO: 94219 - DNA, 25 bp, Saccharomyces pastorianus
aacaagttgcactactgtgtctcct

SEQ ID NO: 94220 - DNA, 25 bp, Saccharomyces pastorianus
agaatacgccttgccaaagacttac

SEQ ID NO: 94221 - DNA, 25 bp, Saccharomyces pastorianus
gctcctccacaaagaccaagattta

SEQ ID NO: 94222 - DNA, 25 bp, Saccharomyces pastorianus
acaagttgcactactgtgtctcctg

SEQ ID NO: 94223 - DNA, 25 bp, Saccharomyces pastorianus
ttgcactactgtgtctcctgtgcta

SEQ ID NO: 94224 - DNA, 25 bp, Saccharomyces pastorianus
gaagcttctgtctacccagaatacg

SEQ ID NO: 94225 - DNA, 25 bp, Saccharomyces pastorianus
caagttgcactactgtgtctcctgt

SEQ ID NO: 94226 - DNA, 25 bp, Saccharomyces pastorianus
gcactactgtgtctcctgtgctatt

SEQ ID NO: 94227 - DNA, 25 bp, Saccharomyces pastorianus
aagttgcactactgtgtctcctgtg

SEQ ID NO: 94228 - DNA, 25 bp, Saccharomyces pastorianus
acgtcaagccagtgagatgtgttaa

SEQ ID NO: 94229 - DNA, 25 bp, Saccharomyces pastorianus
agttgcactactgtgtctcctgtgc

SEQ ID NO: 94230 - DNA, 25 bp, Saccharomyces pastorianus
gatgtcgcgacaccgttaaaacagc

SEQ ID NO: 94231 - DNA, 25 bp, Saccharomyces pastorianus
attccacatctgctctattcatgaa

SEQ ID NO: 94232 - DNA, 25 bp, Saccharomyces pastorianus
gatttcactgcatctcaacaacgga

SEQ ID NO: 94233 - DNA, 25 bp, Saccharomyces pastorianus
aggacttccgttacagatttcactg

SEQ ID NO: 94234 - DNA, 25 bp, Saccharomyces pastorianus
gacagtaacttgatgacgcgcacga

SEQ ID NO: 94235 - DNA, 25 bp, Saccharomyces pastorianus
aatcgtccatcaaattctcacaggc

SEQ ID NO: 94236 - DNA, 25 bp, Saccharomyces pastorianus
agtaggcagcactctgatgtcgcga

SEQ ID NO: 94237 - DNA, 25 bp, Saccharomyces pastorianus
agtacgcagacgacacattccacat

SEQ ID NO: 94238 - DNA, 25 bp, Saccharomyces pastorianus
attcatgaatcctgcctttatgcct

SEQ ID NO: 94239 - DNA, 25 bp, Saccharomyces pastorianus
aaccaatttttgcacgcggatcttc

SEQ ID NO: 94240 - DNA, 25 bp, Saccharomyces pastorianus
tttatgcctcctgcagtgaatactg

SEQ ID NO: 94241 - DNA, 25 bp, Saccharomyces pastorianus
ttctccccactgaaattcatcgaac

SEQ ID NO: 94242 - DNA, 25 bp, Saccharomyces pastorianus
atgatgctctgtgaactaagtgcgc

SEQ ID NO: 94243 - DNA, 25 bp, Saccharomyces pastorianus
tccgtatttctccacttctttgttt

SEQ ID NO: 94244 - DNA, 25 bp, Saccharomyces pastorianus
taaatggccaattttacttctttct

SEQ ID NO: 94245 - DNA, 25 bp, Saccharomyces pastorianus
aaacctttccactcaggtaatcttg

SEQ ID NO: 94246 - DNA, 25 bp, Saccharomyces pastorianus
taagtgcgcagtccttcaaaccttt

SEQ ID NO: 94247 - DNA, 25 bp, Saccharomyces pastorianus
gtaatgacttcttcttatgctcaga

SEQ ID NO: 94248 - DNA, 25 bp, Saccharomyces pastorianus
aaagtttccaagatggtccattctc

SEQ ID NO: 94249 - DNA, 25 bp, Saccharomyces pastorianus
taaacaaacttcactccgtatttct

SEQ ID NO: 94250 - DNA, 25 bp, Saccharomyces pastorianus
ccattctctgggtctcttacataaa

SEQ ID NO: 94251 - DNA, 25 bp, Saccharomyces pastorianus
tcaaaccgtcccttaaatggccaat

SEQ ID NO: 94252 - DNA, 25 bp, Saccharomyces pastorianus
atttggccctgctattgtgataccc

SEQ ID NO: 94253 - DNA, 25 bp, Saccharomyces pastorianus
cgtcacgaacgtgggcacctgagat

SEQ ID NO: 94254 - DNA, 25 bp, Saccharomyces pastorianus
tgcacggtccctttaagccagttaa

SEQ ID NO: 94255 - DNA, 25 bp, Saccharomyces pastorianus
gatttggactacaccatttggccct

SEQ ID NO: 94256 - DNA, 25 bp, Saccharomyces pastorianus
ggagttaagttaatgaccgcgtcac

SEQ ID NO: 94257 - DNA, 25 bp, Saccharomyces pastorianus
tgactggataccctgacgtggccgc

SEQ ID NO: 94258 - DNA, 25 bp, Saccharomyces pastorianus
attgtgatacccatttgcacggtcc

SEQ ID NO: 94259 - DNA, 25 bp, Saccharomyces pastorianus
gttggccaacctgttcgatgaattt

SEQ ID NO: 94260 - DNA, 25 bp, Saccharomyces pastorianus
caaagatatcccacgtatactaggt

SEQ ID NO: 94261 - DNA, 25 bp, Saccharomyces pastorianus
acgtggccgccttcgatttggacta

SEQ ID NO: 94262 - DNA, 25 bp, Saccharomyces pastorianus
aagtatgctggtgtcgtaaccccgt

SEQ ID NO: 94263 - DNA, 25 bp, Saccharomyces pastorianus
gtactctatactaccgttacatcaa

SEQ ID NO: 94264 - DNA, 25 bp, Saccharomyces pastorianus
taatatgcctcgctagttggaaaga

SEQ ID NO: 94265 - DNA, 25 bp, Saccharomyces pastorianus
actctttttctaatatgcctcgcta

SEQ ID NO: 94266 - DNA, 25 bp, Saccharomyces pastorianus
acaatttggttagcactttctccat

SEQ ID NO: 94267 - DNA, 25 bp, Saccharomyces pastorianus
gaaacaaatttcgtacccattcgca

SEQ ID NO: 94268 - DNA, 25 bp, Saccharomyces pastorianus
agcactttctccatacggtgacatg

SEQ ID NO: 94269 - DNA, 25 bp, Saccharomyces pastorianus
atcggcgaatattataggtactcta

SEQ ID NO: 94270 - DNA, 25 bp, Saccharomyces pastorianus
gaaaaaggtcttggtcgatattaca

SEQ ID NO: 94271 - DNA, 25 bp, Saccharomyces pastorianus
ggtgacatggcgttatttacaagtt

SEQ ID NO: 94272 - DNA, 25 bp, Saccharomyces pastorianus
gtgtgcaacaagctaaattctcctg

SEQ ID NO: 94273 - DNA, 25 bp, Saccharomyces pastorianus
acccattcgcacctcagtgaataag

SEQ ID NO: 94274 - DNA, 25 bp, Saccharomyces pastorianus
ttacttcagagtaacaggccaccca

SEQ ID NO: 94275 - DNA, 25 bp, Saccharomyces pastorianus
tgctgatccaacttattttcccgaa

SEQ ID NO: 94276 - DNA, 25 bp, Saccharomyces pastorianus
agctgggaactttcaaggccccatt

SEQ ID NO: 94277 - DNA, 25 bp, Saccharomyces pastorianus
gtattcttaaccatccagttccgaa

SEQ ID NO: 94278 - DNA, 25 bp, Saccharomyces pastorianus
aggccccattggttattgctgatcc

SEQ ID NO: 94279 - DNA, 25 bp, Saccharomyces pastorianus
ggtacttacatgctagacactccaa

SEQ ID NO: 94280 - DNA, 25 bp, Saccharomyces pastorianus
gagccatctgtattcttaaccatcc

SEQ ID NO: 94281 - DNA, 25 bp, Saccharomyces pastorianus
ttatccagatcatacgacgcatcct

SEQ ID NO: 94282 - DNA, 25 bp, Saccharomyces pastorianus
taacgtttgctccaagggtcactat

SEQ ID NO: 94283 - DNA, 25 bp, Saccharomyces pastorianus
atcctctcatttcgaatccatgact

SEQ ID NO: 94284 - DNA, 25 bp, Saccharomyces pastorianus
agagcctgctttcaaacttctggga

SEQ ID NO: 94285 - DNA, 25 bp, Saccharomyces pastorianus
aatccgtatgcatatttgtcgcact

SEQ ID NO: 94286 - DNA, 25 bp, Saccharomyces pastorianus
agttccattttagatgttcccaatt

SEQ ID NO: 94287 - DNA, 25 bp, Saccharomyces pastorianus
ataggcctattatgtgattcagaat

SEQ ID NO: 94288 - DNA, 25 bp, Saccharomyces pastorianus
gggttcacctatttgaagatcctga

SEQ ID NO: 94289 - DNA, 25 bp, Saccharomyces pastorianus
tgacttatcgaagtggttggcacaa

SEQ ID NO: 94290 - DNA, 25 bp, Saccharomyces pastorianus
atgcggatatcctctttgcggtaaa

SEQ ID NO: 94291 - DNA, 25 bp, Saccharomyces pastorianus
aaatcctgacagtgggactacagaa

SEQ ID NO: 94292 - DNA, 25 bp, Saccharomyces pastorianus
aatatttgggccgatttctcacacc

SEQ ID NO: 94293 - DNA, 25 bp, Saccharomyces pastorianus
gccgatttctcacaccggatatgta

SEQ ID NO: 94294 - DNA, 25 bp, Saccharomyces pastorianus
gtcgcactattgcagtaagttccat

SEQ ID NO: 94295 - DNA, 25 bp, Saccharomyces pastorianus
aaatcattgatatccggtctcaaaa

SEQ ID NO: 94296 - DNA, 25 bp, Saccharomyces pastorianus
gggcatccgtgtttttactagcatt

SEQ ID NO: 94297 - DNA, 25 bp, Saccharomyces pastorianus
tacctgcattcgttgtcctttttat

SEQ ID NO: 94298 - DNA, 25 bp, Saccharomyces pastorianus
ttaactgctgaatgtactcctccta

SEQ ID NO: 94299 - DNA, 25 bp, Saccharomyces pastorianus
agaccaagctctcaataccgttgta

SEQ ID NO: 94300 - DNA, 25 bp, Saccharomyces pastorianus
cgctatttaggatcctcttcatggg

SEQ ID NO: 94301 - DNA, 25 bp, Saccharomyces pastorianus
gattgggattacctttacctgcatt

SEQ ID NO: 94302 - DNA, 25 bp, Saccharomyces pastorianus
agattccaagaatccacgatcgctt

SEQ ID NO: 94303 - DNA, 25 bp, Saccharomyces pastorianus
tgtactcctcctagcctaaatgata

SEQ ID NO: 94304 - DNA, 25 bp, Saccharomyces pastorianus
taaatcatcggaaccttcttacctt

SEQ ID NO: 94305 - DNA, 25 bp, Saccharomyces pastorianus
ggtgaggccaacactttttaaatca

SEQ ID NO: 94306 - DNA, 25 bp, Saccharomyces pastorianus
agaatacgtcccaggtttactctcg

SEQ ID NO: 94307 - DNA, 25 bp, Saccharomyces pastorianus
aacgatggttccctagttctcgtga

SEQ ID NO: 94308 - DNA, 25 bp, Saccharomyces pastorianus
ttagctttgttagcggtgtctttcc

SEQ ID NO: 94309 - DNA, 25 bp, Saccharomyces pastorianus
aggacatgtgcgtacgttgcgttta

SEQ ID NO: 94310 - DNA, 25 bp, Saccharomyces pastorianus
ggttgggtctataacacctggccaa

SEQ ID NO: 94311 - DNA, 25 bp, Saccharomyces pastorianus
gtgtctttccttaccgctatgagtg

SEQ ID NO: 94312 - DNA, 25 bp, Saccharomyces pastorianus
gtacctagtcccaatatcgttagct

SEQ ID NO: 94313 - DNA, 25 bp, Saccharomyces pastorianus
gctgctcatatgtacgctatcaaaa

SEQ ID NO: 94314 - DNA, 25 bp, Saccharomyces pastorianus
agttctttggtgtttgcctctcaat

SEQ ID NO: 94315 - DNA, 25 bp, Saccharomyces pastorianus
gatgggcgtcgttactttacaagca

SEQ ID NO: 94316 - DNA, 25 bp, Saccharomyces pastorianus
aacgcgatgacctctttgcatgtta

SEQ ID NO: 94317 - DNA, 25 bp, Saccharomyces pastorianus
tagataatcccgcaattggcccaat

SEQ ID NO: 94318 - DNA, 25 bp, Saccharomyces pastorianus
ggatatcgaaaagctcttcggtcaa

SEQ ID NO: 94319 - DNA, 25 bp, Saccharomyces pastorianus
agtctcttgctgtctactttactga

SEQ ID NO: 94320 - DNA, 25 bp, Saccharomyces pastorianus
gtataggcccatggagtgccaaaat

SEQ ID NO: 94321 - DNA, 25 bp, Saccharomyces pastorianus
gttgtcagtctttatggcggtgcat

SEQ ID NO: 94322 - DNA, 25 bp, Saccharomyces pastorianus
aacattttctccgtataggtctgtg

SEQ ID NO: 94323 - DNA, 25 bp, Saccharomyces pastorianus
tggcggtgcatttcctgattacaaa

SEQ ID NO: 94324 - DNA, 25 bp, Saccharomyces pastorianus
tgtctcaacagatcagtggccaagc

SEQ ID NO: 94325 - DNA, 25 bp, Saccharomyces pastorianus
ggatgtatttgctcctgaagatcta

SEQ ID NO: 94326 - DNA, 25 bp, Saccharomyces pastorianus
tttcgaagacttcaaagacccagca

SEQ ID NO: 94327 - DNA, 25 bp, Saccharomyces pastorianus
aaatgttcttgatctccggattgaa

SEQ ID NO: 94328 - DNA, 25 bp, Saccharomyces pastorianus
gcatcaaggcaagggttgtcagtct

SEQ ID NO: 94329 - DNA, 25 bp, Saccharomyces pastorianus
caagaaggacttccagcaccaacgt

SEQ ID NO: 94330 - DNA, 25 bp, Saccharomyces pastorianus
aagctcgtggcgtaggaaccggcaa

SEQ ID NO: 94331 - DNA, 25 bp, Saccharomyces pastorianus
attccctagggatgctgtggtaaag

SEQ ID NO: 94332 - DNA, 25 bp, Saccharomyces pastorianus
gactagttcaagtctaccaccacaa

SEQ ID NO: 94333 - DNA, 25 bp, Saccharomyces pastorianus
gaaaactggcctgtcgagaatgatt

SEQ ID NO: 94334 - DNA, 25 bp, Saccharomyces pastorianus
agcaccaacgtcagttacaacttcg

SEQ ID NO: 94335 - DNA, 25 bp, Saccharomyces pastorianus
ggaagaagtacagccggtgctacaa

SEQ ID NO: 94336 - DNA, 25 bp, Saccharomyces pastorianus
attccatgcagttttaccgtcttag

SEQ ID NO: 94337 - DNA, 25 bp, Saccharomyces pastorianus
tacaacttcgtctgataagccccta

SEQ ID NO: 94338 - DNA, 25 bp, Saccharomyces pastorianus
aacgattatgtccaccaggttagcg

SEQ ID NO: 94339 - DNA, 25 bp, Saccharomyces pastorianus
cagcttatggatctaggattcccta

SEQ ID NO: 94340 - DNA, 25 bp, Saccharomyces pastorianus
tgccagtggtggtgatgcttccgaa

SEQ ID NO: 94341 - DNA, 25 bp, Saccharomyces pastorianus
tactatggtgcttcgaaatcctcgc

SEQ ID NO: 94342 - DNA, 25 bp, Saccharomyces pastorianus
ttgtctacttcgatcttgtacctga

SEQ ID NO: 94343 - DNA, 25 bp, Saccharomyces pastorianus
attacagattcaaccttgccagtgg

SEQ ID NO: 94344 - DNA, 25 bp, Saccharomyces pastorianus
gagcaaactaccagtcattcctcgt

SEQ ID NO: 94345 - DNA, 25 bp, Saccharomyces pastorianus
tggatggcagaacaccggctacttg

SEQ ID NO: 94346 - DNA, 25 bp, Saccharomyces pastorianus
agaaaggccgtttaccatgtcaatt

SEQ ID NO: 94347 - DNA, 25 bp, Saccharomyces pastorianus
gtggtcacttgcctttcaccaaaaa

SEQ ID NO: 94348 - DNA, 25 bp, Saccharomyces pastorianus
gctacttgtcatccatgctttgtta

SEQ ID NO: 94349 - DNA, 25 bp, Saccharomyces pastorianus
gtcaattgttgcaacccagaactgg

SEQ ID NO: 94350 - DNA, 25 bp, Saccharomyces pastorianus
gagaactacgaacttcccgagcaaa

SEQ ID NO: 94351 - DNA, 25 bp, Saccharomyces pastorianus
caagtattctgttttgctacccgga

SEQ ID NO: 94352 - DNA, 25 bp, Saccharomyces pastorianus
tccggtagactcattttgcgcgctt

SEQ ID NO: 94353 - DNA, 25 bp, Saccharomyces pastorianus
aaggaagcctttttcgctttctctg

SEQ ID NO: 94354 - DNA, 25 bp, Saccharomyces pastorianus
tcgactgcagcacaatcaacacttt

SEQ ID NO: 94355 - DNA, 25 bp, Saccharomyces pastorianus
tcgtcctcaggatcgataagccact

SEQ ID NO: 94356 - DNA, 25 bp, Saccharomyces pastorianus
aagcattctgccatggtgctgcata

SEQ ID NO: 94357 - DNA, 25 bp, Saccharomyces pastorianus
atacgctatgcttgttgtgagacca

SEQ ID NO: 94358 - DNA, 25 bp, Saccharomyces pastorianus
gtgctgcataactttctcatttctg

SEQ ID NO: 94359 - DNA, 25 bp, Saccharomyces pastorianus
gtgagaccatctatccgccaaggaa

SEQ ID NO: 94360 - DNA, 25 bp, Saccharomyces pastorianus
gacagcgtcttccagtataacgttg

SEQ ID NO: 94361 - DNA, 25 bp, Saccharomyces pastorianus
gcgcgcttctgtgtatgcttgtgag

SEQ ID NO: 94362 - DNA, 25 bp, Saccharomyces pastorianus
acgctgtcgagtggcttatcgatcc

SEQ ID NO: 94363 - DNA, 25 bp, Saccharomyces pastorianus
gcacgttagttggtttcgacgactt

SEQ ID NO: 94364 - DNA, 25 bp, Saccharomyces pastorianus
gaatgcttttaagcggcaacaatat

SEQ ID NO: 94365 - DNA, 25 bp, Saccharomyces pastorianus
gagtggcttatcgatcctgaggacg

SEQ ID NO: 94366 - DNA, 25 bp, Saccharomyces pastorianus
tcgatcctgaggacgagagcagaaa

SEQ ID NO: 94367 - DNA, 25 bp, Saccharomyces pastorianus
gcagcaccatggcagaatgctttta

SEQ ID NO: 94368 - DNA, 25 bp, Saccharomyces pastorianus
gaaagttatgcagcaccatggcaga

SEQ ID NO: 94369 - DNA, 25 bp, Saccharomyces pastorianus
caacaatattgccatccttgtgcca

SEQ ID NO: 94370 - DNA, 25 bp, Saccharomyces pastorianus
gaaatgagaaagttatgcagcacca

SEQ ID NO: 94371 - DNA, 25 bp, Saccharomyces pastorianus
accgcgagttcgagggcacgttagt

SEQ ID NO: 94372 - DNA, 25 bp, Saccharomyces pastorianus
aaagtgttgattgtgctgcagtcga

SEQ ID NO: 94373 - DNA, 25 bp, Saccharomyces pastorianus
actacttaggcggtcgaatgctcga

SEQ ID NO: 94374 - DNA, 25 bp, Saccharomyces pastorianus
agaaacggatctgcagttcaacccc

SEQ ID NO: 94375 - DNA, 25 bp, Saccharomyces pastorianus
gaacccgctgccatgtagtgacaag

SEQ ID NO: 94376 - DNA, 25 bp, Saccharomyces pastorianus
gatatcgcttctgaattgctacaca

SEQ ID NO: 94377 - DNA, 25 bp, Saccharomyces pastorianus
gcggcatgcgcaaggtccaatacgt

SEQ ID NO: 94378 - DNA, 25 bp, Saccharomyces pastorianus
ttttcagccatttcgagccgttcag

SEQ ID NO: 94379 - DNA, 25 bp, Saccharomyces pastorianus
aagcggcttgcacaatctggcggta

SEQ ID NO: 94380 - DNA, 25 bp, Saccharomyces pastorianus
aagtgtttcgatatgtgccgccagc

SEQ ID NO: 94381 - DNA, 25 bp, Saccharomyces pastorianus
gggaaaagacgtcgctctcacgaac

SEQ ID NO: 94382 - DNA, 25 bp, Saccharomyces pastorianus
tagtgacaagcagcgcgccgagtac

SEQ ID NO: 94383 - DNA, 25 bp, Saccharomyces pastorianus
gtaacgatcctatggcttttcagcc

SEQ ID NO: 94384 - DNA, 25 bp, Saccharomyces pastorianus
tggttttcccatacttgtctggtat

SEQ ID NO: 94385 - DNA, 25 bp, Saccharomyces pastorianus
gtcacagttgccacaatgttttgta

SEQ ID NO: 94386 - DNA, 25 bp, Saccharomyces pastorianus
tacgggcatgtagcgcaactgtttt

SEQ ID NO: 94387 - DNA, 25 bp, Saccharomyces pastorianus
gggttatattctgcattacgggcat

SEQ ID NO: 94388 - DNA, 25 bp, Saccharomyces pastorianus
taaacgttcctcatcggccataatt

SEQ ID NO: 94389 - DNA, 25 bp, Saccharomyces pastorianus
ggcagctctttttatgtcctcttca

SEQ ID NO: 94390 - DNA, 25 bp, Saccharomyces pastorianus
aactgttttcagatctaacctgcac

SEQ ID NO: 94391 - DNA, 25 bp, Saccharomyces pastorianus
gttgctggttttgtaccatctcgat

SEQ ID NO: 94392 - DNA, 25 bp, Saccharomyces pastorianus
aagtttctcttgatacacctgttta

SEQ ID NO: 94393 - DNA, 25 bp, Saccharomyces pastorianus
tgtcctcttcactctggaaagtagt

SEQ ID NO: 94394 - DNA, 25 bp, Saccharomyces pastorianus
acactatcttgtttgcctctttaaa

SEQ ID NO: 94395 - DNA, 25 bp, Saccharomyces pastorianus
cacatcaggtattgttccaacacta

SEQ ID NO: 94396 - DNA, 25 bp, Saccharomyces pastorianus
accagcaactactttccagagtgaa

SEQ ID NO: 94397 - DNA, 25 bp, Saccharomyces pastorianus
ctactttccagagtgaagaggacat

SEQ ID NO: 94398 - DNA, 25 bp, Saccharomyces pastorianus
gaatctgaaaaagacacctccgcca

SEQ ID NO: 94399 - DNA, 25 bp, Saccharomyces pastorianus
acctccgccacatcaggtattgttc

SEQ ID NO: 94400 - DNA, 25 bp, Saccharomyces pastorianus
cataaaaagagctgccccagaatct

SEQ ID NO: 94401 - DNA, 25 bp, Saccharomyces pastorianus
acactacaaaacattgtggcaactg

SEQ ID NO: 94402 - DNA, 25 bp, Saccharomyces pastorianus
ggacataaaaagagctgccccagaa

SEQ ID NO: 94403 - DNA, 25 bp, Saccharomyces pastorianus
caaaaccagcaactactttccagag

SEQ ID NO: 94404 - DNA, 25 bp, Saccharomyces pastorianus
ggtattgttccaacactacaaaaca

SEQ ID NO: 94405 - DNA, 25 bp, Saccharomyces pastorianus
gaatcgagatggtacaaaaccagca

SEQ ID NO: 94406 - DNA, 25 bp, Saccharomyces pastorianus
ttttgctgctgtcatcatgcgtatt

SEQ ID NO: 94407 - DNA, 25 bp, Saccharomyces pastorianus
ggttgttaccggtgcaaaaagtgag

SEQ ID NO: 94408 - DNA, 25 bp, Saccharomyces pastorianus
tgaggatgactcaaagctggccagt

SEQ ID NO: 94409 - DNA, 25 bp, Saccharomyces pastorianus
atgcagaatataaccccaagcgttt

SEQ ID NO: 94410 - DNA, 25 bp, Saccharomyces pastorianus
agttgcgctacatgcccgtaatgca

SEQ ID NO: 94411 - DNA, 25 bp, Saccharomyces pastorianus
tgctgctgtcatcatgcgtattaga

SEQ ID NO: 94412 - DNA, 25 bp, Saccharomyces pastorianus
ataaccccaagcgttttgctgctgt

SEQ ID NO: 94413 - DNA, 25 bp, Saccharomyces pastorianus
atgactcaaagctggccagtagaaa

SEQ ID NO: 94414 - DNA, 25 bp, Saccharomyces pastorianus
gctacatgcccgtaatgcagaatat

SEQ ID NO: 94415 - DNA, 25 bp, Saccharomyces pastorianus
aagcgttttgctgctgtcatcatgc

SEQ ID NO: 94416 - DNA, 25 bp, Saccharomyces pastorianus
gaatataaccccaagcgttttgctg

SEQ ID NO: 94417 - DNA, 25 bp, Saccharomyces pastorianus
aagattgttcttactggtgcaaagc

SEQ ID NO: 94418 - DNA, 25 bp, Saccharomyces pastorianus
tggtactttctcctcctatgagcca

SEQ ID NO: 94419 - DNA, 25 bp, Saccharomyces pastorianus
cagaattgtttcctggtttgatcta

SEQ ID NO: 94420 - DNA, 25 bp, Saccharomyces pastorianus
ctcctatgagccagaattgtttcct

SEQ ID NO: 94421 - DNA, 25 bp, Saccharomyces pastorianus
gaaatttaccaagcttttgaagcta

SEQ ID NO: 94422 - DNA, 25 bp, Saccharomyces pastorianus
gtttcctggtttgatctatagaatg

SEQ ID NO: 94423 - DNA, 25 bp, Saccharomyces pastorianus
tttctcctcctatgagccagaattg

SEQ ID NO: 94424 - DNA, 25 bp, Saccharomyces pastorianus
tatacgtctagaagggttagcattc

SEQ ID NO: 94425 - DNA, 25 bp, Saccharomyces pastorianus
gtctagaagggttagcattcagtca

SEQ ID NO: 94426 - DNA, 25 bp, Saccharomyces pastorianus
ggtgaagccgaaaattgtgttgtta

SEQ ID NO: 94427 - DNA, 25 bp, Saccharomyces pastorianus
ttgttcttactggtgcaaagcaaag

SEQ ID NO: 94428 - DNA, 25 bp, Saccharomyces pastorianus
ttaagcgccatcgaggtgtttgcct

SEQ ID NO: 94429 - DNA, 25 bp, Saccharomyces pastorianus
gtgtttgcctctgcatttttcagca

SEQ ID NO: 94430 - DNA, 25 bp, Saccharomyces pastorianus
atcttgtacatattcggcacggtca

SEQ ID NO: 94431 - DNA, 25 bp, Saccharomyces pastorianus
aagttctttattttcctgctccaat

SEQ ID NO: 94432 - DNA, 25 bp, Saccharomyces pastorianus
taattctctgttagtccgcgttagc

SEQ ID NO: 94433 - DNA, 25 bp, Saccharomyces pastorianus
atctggtggatcgtctctattaagc

SEQ ID NO: 94434 - DNA, 25 bp, Saccharomyces pastorianus
gtgaacgtgatccagaaccgcttgt

SEQ ID NO: 94435 - DNA, 25 bp, Saccharomyces pastorianus
cggcgaactcgctggtgatgacatg

SEQ ID NO: 94436 - DNA, 25 bp, Saccharomyces pastorianus
cgcgttagcttctcgatatcttgta

SEQ ID NO: 94437 - DNA, 25 bp, Saccharomyces pastorianus
tgaatctatgttcacgctcatccga

SEQ ID NO: 94438 - DNA, 25 bp, Saccharomyces pastorianus
ggcacggtcattctcgaattgctta

SEQ ID NO: 94439 - DNA, 25 bp, Saccharomyces pastorianus
agaggcaaacacctcgatggcgctt

SEQ ID NO: 94440 - DNA, 25 bp, Saccharomyces pastorianus
aaaatacgtcatcaccacctatttc

SEQ ID NO: 94441 - DNA, 25 bp, Saccharomyces pastorianus
acctaacgccgctgcaattcaagag

SEQ ID NO: 94442 - DNA, 25 bp, Saccharomyces pastorianus
aagcggttctggatcacgttcactt

SEQ ID NO: 94443 - DNA, 25 bp, Saccharomyces pastorianus
ccaagttcaccttcctctgtaggaa

SEQ ID NO: 94444 - DNA, 25 bp, Saccharomyces pastorianus
aatgaccgtgccgaatatgtacaag

SEQ ID NO: 94445 - DNA, 25 bp, Saccharomyces pastorianus
ataatttcggcatgtcatcaccagc

SEQ ID NO: 94446 - DNA, 25 bp, Saccharomyces pastorianus
gaaagggagcttgctttgctgaaaa

SEQ ID NO: 94447 - DNA, 25 bp, Saccharomyces pastorianus
ggatacgtgcgtcagtctagaaaaa

SEQ ID NO: 94448 - DNA, 25 bp, Saccharomyces pastorianus
agttcgccggtgacttgggatccaa

SEQ ID NO: 94449 - DNA, 25 bp, Saccharomyces pastorianus
tgtaggaagccccacaagcggttct

SEQ ID NO: 94450 - DNA, 25 bp, Saccharomyces pastorianus
taagctccttctatcattggccatg

SEQ ID NO: 94451 - DNA, 25 bp, Saccharomyces pastorianus
atggcgctacattcactgttactgc

SEQ ID NO: 94452 - DNA, 25 bp, Saccharomyces pastorianus
attgccggtaacgatacagccacgc

SEQ ID NO: 94453 - DNA, 25 bp, Saccharomyces pastorianus
gaaacatcggtttcttctacacatg

SEQ ID NO: 94454 - DNA, 25 bp, Saccharomyces pastorianus
tgttactgccccaactacgttaata

SEQ ID NO: 94455 - DNA, 25 bp, Saccharomyces pastorianus
taattaccaactgtccttgcactat

SEQ ID NO: 94456 - DNA, 25 bp, Saccharomyces pastorianus
agttcctctgtaatcgtggtaccat

SEQ ID NO: 94457 - DNA, 25 bp, Saccharomyces pastorianus
ctacggctctcggattggtatctaa

SEQ ID NO: 94458 - DNA, 25 bp, Saccharomyces pastorianus
tcaagcgatgctactattgccggta

SEQ ID NO: 94459 - DNA, 25 bp, Saccharomyces pastorianus
tgaattcactacttactgcccagaa

SEQ ID NO: 94460 - DNA, 25 bp, Saccharomyces pastorianus
atattctacaactcgactgctactg

SEQ ID NO: 94461 - DNA, 25 bp, Saccharomyces pastorianus
aattgccgcaagttcttttaatcca

SEQ ID NO: 94462 - DNA, 25 bp, Saccharomyces pastorianus
ttaccgaactagaggacgatgacgt

SEQ ID NO: 94463 - DNA, 25 bp, Saccharomyces pastorianus
taagtcctcgtcagggaatgatgtc

SEQ ID NO: 94464 - DNA, 25 bp, Saccharomyces pastorianus
ggcggtcattacacagcggatgttt

SEQ ID NO: 94465 - DNA, 25 bp, Saccharomyces pastorianus
gatcacgagttaatcatacctgaag

SEQ ID NO: 94466 - DNA, 25 bp, Saccharomyces pastorianus
gcggatgtttatcatagcgagcaca

SEQ ID NO: 94467 - DNA, 25 bp, Saccharomyces pastorianus
agaagcttctgattcgaggactgcc

SEQ ID NO: 94468 - DNA, 25 bp, Saccharomyces pastorianus
tacgaattgctaccctttaagtcct

SEQ ID NO: 94469 - DNA, 25 bp, Saccharomyces pastorianus
ggtaagttccgatggcggtcattac

SEQ ID NO: 94470 - DNA, 25 bp, Saccharomyces pastorianus
aaccggagttatataccatcatggg

SEQ ID NO: 94471 - DNA, 25 bp, Saccharomyces pastorianus
tggacatttcagatgctggcgtgaa

SEQ ID NO: 94472 - DNA, 25 bp, Saccharomyces pastorianus
gacggctccaatttcgaggtcatcg

SEQ ID NO: 94473 - DNA, 25 bp, Saccharomyces pastorianus
gggcggctattttacttggatcact

SEQ ID NO: 94474 - DNA, 25 bp, Saccharomyces pastorianus
gtggtgcaaacgtctctggcggaac

SEQ ID NO: 94475 - DNA, 25 bp, Saccharomyces pastorianus
ggagatatccactattcttgccaag

SEQ ID NO: 94476 - DNA, 25 bp, Saccharomyces pastorianus
ggtcagtcatgctttaggctctcaa

SEQ ID NO: 94477 - DNA, 25 bp, Saccharomyces pastorianus
atagacagaagtacagcgccctccg

SEQ ID NO: 94478 - DNA, 25 bp, Saccharomyces pastorianus
gaatctcgccagacagctatctaaa

SEQ ID NO: 94479 - DNA, 25 bp, Saccharomyces pastorianus
aacgcaactttctccaagctgatcg

SEQ ID NO: 94480 - DNA, 25 bp, Saccharomyces pastorianus
agatccgtatactccgagagggcca

SEQ ID NO: 94481 - DNA, 25 bp, Saccharomyces pastorianus
atacatgcccctaggaaccgagatt

SEQ ID NO: 94482 - DNA, 25 bp, Saccharomyces pastorianus
aatttaatgtcatccttgccgacgg

SEQ ID NO: 94483 - DNA, 25 bp, Saccharomyces pastorianus
gaagcgccgctattcagattcaaat

SEQ ID NO: 94484 - DNA, 25 bp, Saccharomyces pastorianus
ggaacgtacaaatctgctctcgcac

SEQ ID NO: 94485 - DNA, 25 bp, Saccharomyces pastorianus
cctggtatacccgttatgtggcaag

SEQ ID NO: 94486 - DNA, 25 bp, Saccharomyces pastorianus
gatgatgaacgcctgcctggtatac

SEQ ID NO: 94487 - DNA, 25 bp, Saccharomyces pastorianus
tgtatttcattaccgcttgctagca

SEQ ID NO: 94488 - DNA, 25 bp, Saccharomyces pastorianus
gaatcccgcatctgtgaagcaattg

SEQ ID NO: 94489 - DNA, 25 bp, Saccharomyces pastorianus
aacctcgagcttggatggcccttga

SEQ ID NO: 94490 - DNA, 25 bp, Saccharomyces pastorianus
aaatcaatcgagtcgtggccctgct

SEQ ID NO: 94491 - DNA, 25 bp, Saccharomyces pastorianus
gtacgtcagcggatgcctgttacag

SEQ ID NO: 94492 - DNA, 25 bp, Saccharomyces pastorianus
agattcaaatagtctgcccgtgtcc

SEQ ID NO: 94493 - DNA, 25 bp, Saccharomyces pastorianus
aaggatgttcagcatgccatacgaa

SEQ ID NO: 94494 - DNA, 25 bp, Saccharomyces pastorianus
ggacgacagcccctagtgataaaga

SEQ ID NO: 94495 - DNA, 25 bp, Saccharomyces pastorianus
attgtaccaggacaggctcttctta

SEQ ID NO: 94496 - DNA, 25 bp, Saccharomyces pastorianus
gacttcccgcaaatgaccaaggcta

SEQ ID NO: 94497 - DNA, 25 bp, Saccharomyces pastorianus
tgccctggcgttgtttggacgacag

SEQ ID NO: 94498 - DNA, 25 bp, Saccharomyces pastorianus
tactactggctggtgtcctttggca

SEQ ID NO: 94499 - DNA, 25 bp, Saccharomyces pastorianus
aagatgagcaagcagctgccctggc

SEQ ID NO: 94500 - DNA, 25 bp, Saccharomyces pastorianus
agagggccgcctgctatgtgaaatg

SEQ ID NO: 94501 - DNA, 25 bp, Saccharomyces pastorianus
atgccacgccggttgccagtagagg

SEQ ID NO: 94502 - DNA, 25 bp, Saccharomyces pastorianus
gaatggtcactaccgctactactgg

SEQ ID NO: 94503 - DNA, 25 bp, Saccharomyces pastorianus
aagcgtttgcgcgtggcacaatgca

SEQ ID NO: 94504 - DNA, 25 bp, Saccharomyces pastorianus
agatggatacgctaccagggcagcc

SEQ ID NO: 94505 - DNA, 25 bp, Saccharomyces pastorianus
gccgctgtgttcatctcatttacaa

SEQ ID NO: 94506 - DNA, 25 bp, Saccharomyces pastorianus
ttgcaagtaatcactgccgctgtgt

SEQ ID NO: 94507 - DNA, 25 bp, Saccharomyces pastorianus
aatgaacttatcgtccgctgtggtc

SEQ ID NO: 94508 - DNA, 25 bp, Saccharomyces pastorianus
atcgcccttgggtttttcaacgcat

SEQ ID NO: 94509 - DNA, 25 bp, Saccharomyces pastorianus
atttgactcaagcagacccttactt

SEQ ID NO: 94510 - DNA, 25 bp, Saccharomyces pastorianus
aagcgtcttttcactattctaccga

SEQ ID NO: 94511 - DNA, 25 bp, Saccharomyces pastorianus
tggtgctcaacaattcagttctccc

SEQ ID NO: 94512 - DNA, 25 bp, Saccharomyces pastorianus
cgatcatttctataccggccacaat

SEQ ID NO: 94513 - DNA, 25 bp, Saccharomyces pastorianus
gggttcgctaatcaaggtgtcgctt

SEQ ID NO: 94514 - DNA, 25 bp, Saccharomyces pastorianus
gagaacatgggcatcttccaatcat

SEQ ID NO: 94515 - DNA, 25 bp, Saccharomyces pastorianus
ggtcctctactttgcctttaatggt

SEQ ID NO: 94516 - DNA, 25 bp, Saccharomyces pastorianus
tgtacagaattcctggttccatcgg

SEQ ID NO: 94517 - DNA, 25 bp, Saccharomyces pastorianus
cagttcagacaatcctgcaagattt

SEQ ID NO: 94518 - DNA, 25 bp, Saccharomyces pastorianus
ttcctggttccatcggcagtataaa

SEQ ID NO: 94519 - DNA, 25 bp, Saccharomyces pastorianus
ggacgcatcaaacttggctattgta

SEQ ID NO: 94520 - DNA, 25 bp, Saccharomyces pastorianus
gggtccagattaggtgcagttcaga

SEQ ID NO: 94521 - DNA, 25 bp, Saccharomyces pastorianus
aaagttacctacatgctattaccaa

SEQ ID NO: 94522 - DNA, 25 bp, Saccharomyces pastorianus
gattctttattttctcatgctatgg

SEQ ID NO: 94523 - DNA, 25 bp, Saccharomyces pastorianus
gtgaacgactttaccgatttggcga

SEQ ID NO: 94524 - DNA, 25 bp, Saccharomyces pastorianus
ggtgcaacagataattcctttacat

SEQ ID NO: 94525 - DNA, 25 bp, Saccharomyces pastorianus
gagagaataccttgatacctacaat

SEQ ID NO: 94526 - DNA, 25 bp, Saccharomyces pastorianus
gaatgcgatcgcaggctgttttaag

SEQ ID NO: 94527 - DNA, 25 bp, Saccharomyces pastorianus
gacacttccgatgagtcttttgaca

SEQ ID NO: 94528 - DNA, 25 bp, Saccharomyces pastorianus
ggtgcctggagggtatctactgtac

SEQ ID NO: 94529 - DNA, 25 bp, Saccharomyces pastorianus
ttaggagaggtttgccggagccatt

SEQ ID NO: 94530 - DNA, 25 bp, Saccharomyces pastorianus
aggctacggtcaatcgtggttgcca

SEQ ID NO: 94531 - DNA, 25 bp, Saccharomyces pastorianus
gcggtgtgccaggatgtatcttcat

SEQ ID NO: 94532 - DNA, 25 bp, Saccharomyces pastorianus
gcattcccgggattatttcaggtat

SEQ ID NO: 94533 - DNA, 25 bp, Saccharomyces pastorianus
agatgctttgctcgcgcaagtgagt

SEQ ID NO: 94534 - DNA, 25 bp, Saccharomyces pastorianus
aaaatcattgtcttgccccaattct

SEQ ID NO: 94535 - DNA, 25 bp, Saccharomyces pastorianus
aatcgagtttgttcttttcacagac

SEQ ID NO: 94536 - DNA, 25 bp, Saccharomyces pastorianus
gtatcttcattcatgcagcaggttt

SEQ ID NO: 94537 - DNA, 25 bp, Saccharomyces pastorianus
ttcacagactcttcaggtgcctgga

SEQ ID NO: 94538 - DNA, 25 bp, Saccharomyces pastorianus
ctaatttattagacgctgtgcaaga

SEQ ID NO: 94539 - DNA, 25 bp, Saccharomyces pastorianus
acaatatggtggacgcccgtacgga

SEQ ID NO: 94540 - DNA, 25 bp, Saccharomyces pastorianus
gttgatgttacgtgattccatacag

SEQ ID NO: 94541 - DNA, 25 bp, Saccharomyces pastorianus
gtcatcttcaatattgaccctggca

SEQ ID NO: 94542 - DNA, 25 bp, Saccharomyces pastorianus
gcccgtacggaactcatatctgaat

SEQ ID NO: 94543 - DNA, 25 bp, Saccharomyces pastorianus
gtacttggacgtcttcacagatttt

SEQ ID NO: 94544 - DNA, 25 bp, Saccharomyces pastorianus
ttgccaaagaggtggcggatctttt

SEQ ID NO: 94545 - DNA, 25 bp, Saccharomyces pastorianus
agtcgcagacgtaatgtacttggac

SEQ ID NO: 94546 - DNA, 25 bp, Saccharomyces pastorianus
gcacttctttggagcttattgatga

SEQ ID NO: 94547 - DNA, 25 bp, Saccharomyces pastorianus
gaccctggcaagagagctggttcca

SEQ ID NO: 94548 - DNA, 25 bp, Saccharomyces pastorianus
gtttgctaaggatcaagtcgcagac

SEQ ID NO: 94549 - DNA, 25 bp, Saccharomyces pastorianus
gttggtttcccgtggaccaatgcaa

SEQ ID NO: 94550 - DNA, 25 bp, Saccharomyces pastorianus
aatgcaatccatatcttcttctcca

SEQ ID NO: 94551 - DNA, 25 bp, Saccharomyces pastorianus
gtcagtaataatctctcatccacaa

SEQ ID NO: 94552 - DNA, 25 bp, Saccharomyces pastorianus
aaattgcctttgactgcttctgtgc

SEQ ID NO: 94553 - DNA, 25 bp, Saccharomyces pastorianus
atgtaaacgatacgtggtccgccgc

SEQ ID NO: 94554 - DNA, 25 bp, Saccharomyces pastorianus
aactcttccttcataaactcttcaa

SEQ ID NO: 94555 - DNA, 25 bp, Saccharomyces pastorianus
gacattaccaatccttctacttttg

SEQ ID NO: 94556 - DNA, 25 bp, Saccharomyces pastorianus
gccgcggactattgcaggtgtgata

SEQ ID NO: 94557 - DNA, 25 bp, Saccharomyces pastorianus
taaactcttcaatatcatcgccggc

SEQ ID NO: 94558 - DNA, 25 bp, Saccharomyces pastorianus
gagcaccgttttcttaaagcgtttg

SEQ ID NO: 94559 - DNA, 25 bp, Saccharomyces pastorianus
aatgccgtcaaatccttacgctttg

SEQ ID NO: 94560 - DNA, 25 bp, Saccharomyces pastorianus
agtatttcggcggttattctcttgg

SEQ ID NO: 94561 - DNA, 25 bp, Saccharomyces pastorianus
ttttacactaagttacatcgccccg

SEQ ID NO: 94562 - DNA, 25 bp, Saccharomyces pastorianus
tagaccttcccttaagaaatcgaat

SEQ ID NO: 94563 - DNA, 25 bp, Saccharomyces pastorianus
actaagttacatcgccccgttctgc

SEQ ID NO: 94564 - DNA, 25 bp, Saccharomyces pastorianus
tccggttgtgtttggccttcttcta

SEQ ID NO: 94565 - DNA, 25 bp, Saccharomyces pastorianus
tggccttcttctacgcatagacctt

SEQ ID NO: 94566 - DNA, 25 bp, Saccharomyces pastorianus
tacgcatagaccttcccttaagaaa

SEQ ID NO: 94567 - DNA, 25 bp, Saccharomyces pastorianus
attctcttggttccttgtcctcttg

SEQ ID NO: 94568 - DNA, 25 bp, Saccharomyces pastorianus
aggcactctcttcctccggttgtgt

SEQ ID NO: 94569 - DNA, 25 bp, Saccharomyces pastorianus
gcggttattctcttggttccttgtc

SEQ ID NO: 94570 - DNA, 25 bp, Saccharomyces pastorianus
tgtttggccttcttctacgcataga

SEQ ID NO: 94571 - DNA, 25 bp, Saccharomyces pastorianus
gaacatgaggtaccacttgatgctg

SEQ ID NO: 94572 - DNA, 25 bp, Saccharomyces pastorianus
ggagtccagtaggtaacatgggtac

SEQ ID NO: 94573 - DNA, 25 bp, Saccharomyces pastorianus
atagcgggcaggtccctagagtttt

SEQ ID NO: 94574 - DNA, 25 bp, Saccharomyces pastorianus
taccacttgatgctggagggagtcc

SEQ ID NO: 94575 - DNA, 25 bp, Saccharomyces pastorianus
gttacaacacaactaccaccaataa

SEQ ID NO: 94576 - DNA, 25 bp, Saccharomyces pastorianus
gaataacaacaacgagctaggtgat

SEQ ID NO: 94577 - DNA, 25 bp, Saccharomyces pastorianus
agtttcacaagccacgcccgtaata

SEQ ID NO: 94578 - DNA, 25 bp, Saccharomyces pastorianus
atttcttaagggaaggtctatgcgt

SEQ ID NO: 94579 - DNA, 25 bp, Saccharomyces pastorianus
acatgggtaccaactcgaataacaa

SEQ ID NO: 94580 - DNA, 25 bp, Saccharomyces pastorianus
gagctaggtgatgtattcgacagaa

SEQ ID NO: 94581 - DNA, 25 bp, Saccharomyces pastorianus
gcagatcaagtaccagttacaacac

SEQ ID NO: 94582 - DNA, 25 bp, Saccharomyces pastorianus
aaaagaaagcatcccctggcgcaac

SEQ ID NO: 94583 - DNA, 25 bp, Saccharomyces pastorianus
gcgtggagtatcttctggaggcaat

SEQ ID NO: 94584 - DNA, 25 bp, Saccharomyces pastorianus
taagtcatcggaacccgtaactaag

SEQ ID NO: 94585 - DNA, 25 bp, Saccharomyces pastorianus
gtcaagctcaacttgtccacaaatg

SEQ ID NO: 94586 - DNA, 25 bp, Saccharomyces pastorianus
taaggaacgcccacattttaacaag

SEQ ID NO: 94587 - DNA, 25 bp, Saccharomyces pastorianus
acaaatggatttgctcaacctaata

SEQ ID NO: 94588 - DNA, 25 bp, Saccharomyces pastorianus
cgcaacattgcgtggagtatcttct

SEQ ID NO: 94589 - DNA, 25 bp, Saccharomyces pastorianus
taaaatcatcagactcacccaagcc

SEQ ID NO: 94590 - DNA, 25 bp, Saccharomyces pastorianus
cgaaacacagcaatggtcccggata

SEQ ID NO: 94591 - DNA, 25 bp, Saccharomyces pastorianus
atgaaggttaccacagcaaatcgaa

SEQ ID NO: 94592 - DNA, 25 bp, Saccharomyces pastorianus
gaagcggtcagaatacgattacgat

SEQ ID NO: 94593 - DNA, 25 bp, Saccharomyces pastorianus
aagcgctagcgcaaatgcccatcat

SEQ ID NO: 94594 - DNA, 25 bp, Saccharomyces pastorianus
ttgcctcggcacaacaaatcgggta

SEQ ID NO: 94595 - DNA, 25 bp, Saccharomyces pastorianus
gtggccacactaatcccgtatgagg

SEQ ID NO: 94596 - DNA, 25 bp, Saccharomyces pastorianus
gtgaaagtgcacctatccaggatcc

SEQ ID NO: 94597 - DNA, 25 bp, Saccharomyces pastorianus
agataatgaggccttcgtcggacca

SEQ ID NO: 94598 - DNA, 25 bp, Saccharomyces pastorianus
ataattcacggttttgctcgtcggt

SEQ ID NO: 94599 - DNA, 25 bp, Saccharomyces pastorianus
aaacgggtacactctacatgaggtt

SEQ ID NO: 94600 - DNA, 25 bp, Saccharomyces pastorianus
gagcgagggcgtattaccgatcatt

SEQ ID NO: 94601 - DNA, 25 bp, Saccharomyces pastorianus
gggtactacttacttcggtgtacat

SEQ ID NO: 94602 - DNA, 25 bp, Saccharomyces pastorianus
gatcccgacgacttagtcaccatag

SEQ ID NO: 94603 - DNA, 25 bp, Saccharomyces pastorianus
gtcgcatggacctagtggatctaac

SEQ ID NO: 94604 - DNA, 25 bp, Saccharomyces pastorianus
aatggcccgccaagcaaacgtatga

SEQ ID NO: 94605 - DNA, 25 bp, Saccharomyces pastorianus
caacttttggcctgccgacgttaag

SEQ ID NO: 94606 - DNA, 25 bp, Saccharomyces pastorianus
tccctactggtccttccaaaaagag

SEQ ID NO: 94607 - DNA, 25 bp, Saccharomyces pastorianus
aagttctgagcctgcaaatggcccg

SEQ ID NO: 94608 - DNA, 25 bp, Saccharomyces pastorianus
gtacaaggcaatcaagcaaccccag

SEQ ID NO: 94609 - DNA, 25 bp, Saccharomyces pastorianus
atatcgcaagcacctttggtcttac

SEQ ID NO: 94610 - DNA, 25 bp, Saccharomyces pastorianus
tatgaaagccctcccaaaaggtcct

SEQ ID NO: 94611 - DNA, 25 bp, Saccharomyces pastorianus
ggtcctgccgccttaataaataaca

SEQ ID NO: 94612 - DNA, 25 bp, Saccharomyces pastorianus
gagtgcaatacgtacttctttgaag

SEQ ID NO: 94613 - DNA, 25 bp, Saccharomyces pastorianus
gtcccagtgctgacataggctcgaa

SEQ ID NO: 94614 - DNA, 25 bp, Saccharomyces pastorianus
gaggcggcaaaggtcttgatcgtaa

SEQ ID NO: 94615 - DNA, 25 bp, Saccharomyces pastorianus
caattcagaaatggtccggtttacg

SEQ ID NO: 94616 - DNA, 25 bp, Saccharomyces pastorianus
tcaaatgagataccagcaagctact

SEQ ID NO: 94617 - DNA, 25 bp, Saccharomyces pastorianus
caaagaacggcatgccacctcaatt

SEQ ID NO: 94618 - DNA, 25 bp, Saccharomyces pastorianus
aggccattacagaaaagaaccaaca

SEQ ID NO: 94619 - DNA, 25 bp, Saccharomyces pastorianus
ttctgctgcctatgagtctttcaaa

SEQ ID NO: 94620 - DNA, 25 bp, Saccharomyces pastorianus
ggcatgccacctcaattcagaaatg

SEQ ID NO: 94621 - DNA, 25 bp, Saccharomyces pastorianus
gaggaagctactaaggccattacag

SEQ ID NO: 94622 - DNA, 25 bp, Saccharomyces pastorianus
gaattgttcgaacaacactacaaag

SEQ ID NO: 94623 - DNA, 25 bp, Saccharomyces pastorianus
tgtttctcaactccagaggaagcta

SEQ ID NO: 94624 - DNA, 25 bp, Saccharomyces pastorianus
tacaaagaagcttctgctgcctatg

SEQ ID NO: 94625 - DNA, 25 bp, Saccharomyces pastorianus
gaaagtgatgaattgttcgaacaac

SEQ ID NO: 94626 - DNA, 25 bp, Saccharomyces pastorianus
atcattgaagctgacctgtggccgg

SEQ ID NO: 94627 - DNA, 25 bp, Saccharomyces pastorianus
gttgcttgttgcaccatcatcaaaa

SEQ ID NO: 94628 - DNA, 25 bp, Saccharomyces pastorianus
gtgtatcttcattactgctattatc

SEQ ID NO: 94629 - DNA, 25 bp, Saccharomyces pastorianus
ccggctgtatttgttgcttgttgca

SEQ ID NO: 94630 - DNA, 25 bp, Saccharomyces pastorianus
attgtcatattctgtgtcatcgtta

SEQ ID NO: 94631 - DNA, 25 bp, Saccharomyces pastorianus
tcttcaaagggcgacatgggagcat

SEQ ID NO: 94632 - DNA, 25 bp, Saccharomyces pastorianus
gagcatgcccatcgccatgaaaagt

SEQ ID NO: 94633 - DNA, 25 bp, Saccharomyces pastorianus
ggtaggtgcaatatgtgtatcttca

SEQ ID NO: 94634 - DNA, 25 bp, Saccharomyces pastorianus
ataaaggatttctgttacggttgct

SEQ ID NO: 94635 - DNA, 25 bp, Saccharomyces pastorianus
aattcttctgcatcttcacgtttat

SEQ ID NO: 94636 - DNA, 25 bp, Saccharomyces pastorianus
tgcgtttttatttcacttccaggag

SEQ ID NO: 94637 - DNA, 25 bp, Saccharomyces pastorianus
gatgatcgccactaaccaactagat

SEQ ID NO: 94638 - DNA, 25 bp, Saccharomyces pastorianus
gaaggcatagcactttccgacaact

SEQ ID NO: 94639 - DNA, 25 bp, Saccharomyces pastorianus
gagcaccttcattttgggctgtttt

SEQ ID NO: 94640 - DNA, 25 bp, Saccharomyces pastorianus
gcagcgcgtatctatggagcacctt

SEQ ID NO: 94641 - DNA, 25 bp, Saccharomyces pastorianus
gaaacctggatgacttcacccaagg

SEQ ID NO: 94642 - DNA, 25 bp, Saccharomyces pastorianus
tttcagcaggcccaaacgttcggaa

SEQ ID NO: 94643 - DNA, 25 bp, Saccharomyces pastorianus
agaatttttcaaagctgcagcgcgt

SEQ ID NO: 94644 - DNA, 25 bp, Saccharomyces pastorianus
aacatctctagatctaccaggcgta

SEQ ID NO: 94645 - DNA, 25 bp, Saccharomyces pastorianus
ttactaccccgtttcacatatgaca

SEQ ID NO: 94646 - DNA, 25 bp, Saccharomyces pastorianus
atttcgatcattatcctcctggtta

SEQ ID NO: 94647 - DNA, 25 bp, Saccharomyces pastorianus
tagataaccgctactctgtggaaag

SEQ ID NO: 94648 - DNA, 25 bp, Saccharomyces pastorianus
cagcaacagcgccatcaacatgaat

SEQ ID NO: 94649 - DNA, 25 bp, Saccharomyces pastorianus
gcaacgcgaccggaaactactttca

SEQ ID NO: 94650 - DNA, 25 bp, Saccharomyces pastorianus
atggaaacacgcttctcgatcagaa

SEQ ID NO: 94651 - DNA, 25 bp, Saccharomyces pastorianus
agcaactgtttcattaggcgacctg

SEQ ID NO: 94652 - DNA, 25 bp, Saccharomyces pastorianus
cccagagtcgtttttccatgagcaa

SEQ ID NO: 94653 - DNA, 25 bp, Saccharomyces pastorianus
gaacccaagtctgcggatacataca

SEQ ID NO: 94654 - DNA, 25 bp, Saccharomyces pastorianus
aggcgacctgatgggctcaaacgtt

SEQ ID NO: 94655 - DNA, 25 bp, Saccharomyces pastorianus
ttgcaagtgtataccgagttcgatt

SEQ ID NO: 94656 - DNA, 25 bp, Saccharomyces pastorianus
atggtcatactttcgttccacagta

SEQ ID NO: 94657 - DNA, 25 bp, Saccharomyces pastorianus
aaatcgcgtttcttacagtggctca

SEQ ID NO: 94658 - DNA, 25 bp, Saccharomyces pastorianus
atatctccggatacttcagcaactg

SEQ ID NO: 94659 - DNA, 25 bp, Saccharomyces pastorianus
agttattgccaagaccgtagattca

SEQ ID NO: 94660 - DNA, 25 bp, Saccharomyces pastorianus
taacaacctggtttcggtgacagaa

SEQ ID NO: 94661 - DNA, 25 bp, Saccharomyces pastorianus
ggaaacagcacattttgcatctcta

SEQ ID NO: 94662 - DNA, 25 bp, Saccharomyces pastorianus
ttgctaagtttgcagatcgctccca

SEQ ID NO: 94663 - DNA, 25 bp, Saccharomyces pastorianus
tttatattgagtgcgatcctgtccc

SEQ ID NO: 94664 - DNA, 25 bp, Saccharomyces pastorianus
ggtcgttcgccaggatttcagcaaa

SEQ ID NO: 94665 - DNA, 25 bp, Saccharomyces pastorianus
ttgcagatcgctcccagctaaaaaa

SEQ ID NO: 94666 - DNA, 25 bp, Saccharomyces pastorianus
gaagccaggtccatggctgggtaaa

SEQ ID NO: 94667 - DNA, 25 bp, Saccharomyces pastorianus
gagaagcttcctatcttaagggaaa

SEQ ID NO: 94668 - DNA, 25 bp, Saccharomyces pastorianus
ggcagtttgataatcctacagggac

SEQ ID NO: 94669 - DNA, 25 bp, Saccharomyces pastorianus
gatgcgtttttaaagattcccaagc

SEQ ID NO: 94670 - DNA, 25 bp, Saccharomyces pastorianus
aagaaagttctcttctggtcaccat

SEQ ID NO: 94671 - DNA, 25 bp, Saccharomyces pastorianus
gaaacctcattcttgtcccaaatgt

SEQ ID NO: 94672 - DNA, 25 bp, Saccharomyces pastorianus
tgctcgggccactgagtgacacaaa

SEQ ID NO: 94673 - DNA, 25 bp, Saccharomyces pastorianus
agagatcacgttctgcagcacttga

SEQ ID NO: 94674 - DNA, 25 bp, Saccharomyces pastorianus
aaggaatctcctgtcgagacatcaa

SEQ ID NO: 94675 - DNA, 25 bp, Saccharomyces pastorianus
gtgtcaaatctctctacttctgtgc

SEQ ID NO: 94676 - DNA, 25 bp, Saccharomyces pastorianus
aaaatccgtccactctggtgagaaa

SEQ ID NO: 94677 - DNA, 25 bp, Saccharomyces pastorianus
taaactctaagtttgcgcccgaaga

SEQ ID NO: 94678 - DNA, 25 bp, Saccharomyces pastorianus
ataatgaaccctacagtgcaaccgc

SEQ ID NO: 94679 - DNA, 25 bp, Saccharomyces pastorianus
aaggctcttctccattaaactctaa

SEQ ID NO: 94680 - DNA, 25 bp, Saccharomyces pastorianus
aaaggttgcatccactcgccaagag

SEQ ID NO: 94681 - DNA, 25 bp, Saccharomyces pastorianus
attgctcaaggtttgtctgacgccg

SEQ ID NO: 94682 - DNA, 25 bp, Saccharomyces pastorianus
agaaaggcttgctcaaatgggcgtg

SEQ ID NO: 94683 - DNA, 25 bp, Saccharomyces pastorianus
ggtactagcagaccgtaggttttca

SEQ ID NO: 94684 - DNA, 25 bp, Saccharomyces pastorianus
gagactcctgatgctcaagaaactt

SEQ ID NO: 94685 - DNA, 25 bp, Saccharomyces pastorianus
tgaaagctcgcctagaattcatgag

SEQ ID NO: 94686 - DNA, 25 bp, Saccharomyces pastorianus
gagggagaactatcgcatcagagaa

SEQ ID NO: 94687 - DNA, 25 bp, Saccharomyces pastorianus
gagaacaatggcacaacccacagac

SEQ ID NO: 94688 - DNA, 25 bp, Saccharomyces pastorianus
tctgacgccgatttgaacctttcga

SEQ ID NO: 94689 - DNA, 25 bp, Saccharomyces pastorianus
gaacctttcgactgacatggccata

SEQ ID NO: 94690 - DNA, 25 bp, Saccharomyces pastorianus
gctgatgataggtatcccgtttcaa

SEQ ID NO: 94691 - DNA, 25 bp, Saccharomyces pastorianus
ttcgatgcgatgagacatgcagctc

SEQ ID NO: 94692 - DNA, 25 bp, Saccharomyces pastorianus
tccgttgagacagattccacacttc

SEQ ID NO: 94693 - DNA, 25 bp, Saccharomyces pastorianus
gaatttgacactccgacatctggta

SEQ ID NO: 94694 - DNA, 25 bp, Saccharomyces pastorianus
gacggtctatgatataatggccctt

SEQ ID NO: 94695 - DNA, 25 bp, Saccharomyces pastorianus
atttgaatgctactaccgccatgga

SEQ ID NO: 94696 - DNA, 25 bp, Saccharomyces pastorianus
caggtcgccgcgtttgttaacaatt

SEQ ID NO: 94697 - DNA, 25 bp, Saccharomyces pastorianus
gaaattttaacgcttactgattcac

SEQ ID NO: 94698 - DNA, 25 bp, Saccharomyces pastorianus
acagattccacacttcaacaacaaa

SEQ ID NO: 94699 - DNA, 25 bp, Saccharomyces pastorianus
tactgattcacagcttgcgcaggtc

SEQ ID NO: 94700 - DNA, 25 bp, Saccharomyces pastorianus
gtctgtgattcatatcttgacgcag

SEQ ID NO: 94701 - DNA, 25 bp, Saccharomyces pastorianus
tttggcgcagatgttgattcagggt

SEQ ID NO: 94702 - DNA, 25 bp, Saccharomyces pastorianus
gtagtggttgatatcctttcagcaa

SEQ ID NO: 94703 - DNA, 25 bp, Saccharomyces pastorianus
agtaggatcctatgcttggcgttag

SEQ ID NO: 94704 - DNA, 25 bp, Saccharomyces pastorianus
gaagtcggtctagatgagctccatt

SEQ ID NO: 94705 - DNA, 25 bp, Saccharomyces pastorianus
ttatgtatggccacttgctccaaac

SEQ ID NO: 94706 - DNA, 25 bp, Saccharomyces pastorianus
tcttgccttacgaactggcgaagtc

SEQ ID NO: 94707 - DNA, 25 bp, Saccharomyces pastorianus
aagtcattttcagtgcttcttgcct

SEQ ID NO: 94708 - DNA, 25 bp, Saccharomyces pastorianus
cgacgtcgtcgttgatacttgggag

SEQ ID NO: 94709 - DNA, 25 bp, Saccharomyces pastorianus
gggcttgaacttttcgtaccactgt

SEQ ID NO: 94710 - DNA, 25 bp, Saccharomyces pastorianus
atactagacgtatcttgcttggaaa

SEQ ID NO: 94711 - DNA, 25 bp, Saccharomyces pastorianus
atgagctccattttgttatttgcga

SEQ ID NO: 94712 - DNA, 25 bp, Saccharomyces pastorianus
ggcatctaaagcttcttgtacatct

SEQ ID NO: 94713 - DNA, 25 bp, Saccharomyces pastorianus
ttgcgagcccaatgaactgagacta

SEQ ID NO: 94714 - DNA, 25 bp, Saccharomyces pastorianus
gatgatggctaacgacgatcttgaa

SEQ ID NO: 94715 - DNA, 25 bp, Saccharomyces pastorianus
cgcgtaaagcgccagttatcagtga

SEQ ID NO: 94716 - DNA, 25 bp, Saccharomyces pastorianus
gggcctatcgaagcactatctgtgg

SEQ ID NO: 94717 - DNA, 25 bp, Saccharomyces pastorianus
tagaatttggctactacgcacctct

SEQ ID NO: 94718 - DNA, 25 bp, Saccharomyces pastorianus
gaaacttcttttaatgatgacccta

SEQ ID NO: 94719 - DNA, 25 bp, Saccharomyces pastorianus
gtctctatgtgaaattctgtcccag

SEQ ID NO: 94720 - DNA, 25 bp, Saccharomyces pastorianus
tgtcccagagacagccgcgtaaagc

SEQ ID NO: 94721 - DNA, 25 bp, Saccharomyces pastorianus
ttgaagaatcttccgagtggctcct

SEQ ID NO: 94722 - DNA, 25 bp, Saccharomyces pastorianus
acaacgcggtacattctttcaggaa

SEQ ID NO: 94723 - DNA, 25 bp, Saccharomyces pastorianus
atgaccctattgtcgatagcgatag

SEQ ID NO: 94724 - DNA, 25 bp, Saccharomyces pastorianus
aaggcttcgcatgttgattgaccaa

SEQ ID NO: 94725 - DNA, 25 bp, Saccharomyces pastorianus
gccaagggtcctaaatctacgtctg

SEQ ID NO: 94726 - DNA, 25 bp, Saccharomyces pastorianus
gacctttttgagattgcagccgtac

SEQ ID NO: 94727 - DNA, 25 bp, Saccharomyces pastorianus
gacagttagttggtatcctcagaga

SEQ ID NO: 94728 - DNA, 25 bp, Saccharomyces pastorianus
attggcctacttttcctcagttata

SEQ ID NO: 94729 - DNA, 25 bp, Saccharomyces pastorianus
gaggatgtccggtttttatcaatag

SEQ ID NO: 94730 - DNA, 25 bp, Saccharomyces pastorianus
ggaaagcagcgggtcttccgatgat

SEQ ID NO: 94731 - DNA, 25 bp, Saccharomyces pastorianus
aaattctttcgaatgcttctgcctc

SEQ ID NO: 94732 - DNA, 25 bp, Saccharomyces pastorianus
atcaggcgcagatcctaaggagttt

SEQ ID NO: 94733 - DNA, 25 bp, Saccharomyces pastorianus
cgtaccatacttcgtcttcattcaa

SEQ ID NO: 94734 - DNA, 25 bp, Saccharomyces pastorianus
tgcctcactagcgaacaatgccaag

SEQ ID NO: 94735 - DNA, 25 bp, Saccharomyces pastorianus
gtacaagctgcacctgtgatgctat

SEQ ID NO: 94736 - DNA, 25 bp, Saccharomyces pastorianus
ggaagcaaggactgggaccctattg

SEQ ID NO: 94737 - DNA, 25 bp, Saccharomyces pastorianus
gagatctcgccttcgtaatatgctg

SEQ ID NO: 94738 - DNA, 25 bp, Saccharomyces pastorianus
cctggagcgcttaccatcagtggaa

SEQ ID NO: 94739 - DNA, 25 bp, Saccharomyces pastorianus
tagacccagaacttttccatgatat

SEQ ID NO: 94740 - DNA, 25 bp, Saccharomyces pastorianus
tatgcggacccaattttcccggact

SEQ ID NO: 94741 - DNA, 25 bp, Saccharomyces pastorianus
gattatgtcagaacctggagcgctt

SEQ ID NO: 94742 - DNA, 25 bp, Saccharomyces pastorianus
gtcaccctagtggagtttgcagatt

SEQ ID NO: 94743 - DNA, 25 bp, Saccharomyces pastorianus
tcccggactaccctgaatttgatga

SEQ ID NO: 94744 - DNA, 25 bp, Saccharomyces pastorianus
ttcctaggcgcggattcagtagaca

SEQ ID NO: 94745 - DNA, 25 bp, Saccharomyces pastorianus
gaaagactctcacttagacccagaa

SEQ ID NO: 94746 - DNA, 25 bp, Saccharomyces pastorianus
aatttcagcgatctgcttatgccaa

SEQ ID NO: 94747 - DNA, 25 bp, Saccharomyces pastorianus
attctgcaagaaaatccgcggatga

SEQ ID NO: 94748 - DNA, 25 bp, Saccharomyces pastorianus
tattctgcaagaaaatccgcggatg

SEQ ID NO: 94749 - DNA, 25 bp, Saccharomyces pastorianus
tccgcggatgatatttgagaataaa

SEQ ID NO: 94750 - DNA, 25 bp, Saccharomyces pastorianus
tcataatgatattgaggcagggtat

SEQ ID NO: 94751 - DNA, 25 bp, Saccharomyces pastorianus
gagactacataaaacatttatctgt

SEQ ID NO: 94752 - DNA, 25 bp, Saccharomyces pastorianus
ttagtcaaaacaaacgtggttgtag

SEQ ID NO: 94753 - DNA, 25 bp, Saccharomyces pastorianus
acgtggttgtagaaatattctgcaa

SEQ ID NO: 94754 - DNA, 25 bp, Saccharomyces pastorianus
aaatccgcggatgatatttgagaat

SEQ ID NO: 94755 - DNA, 25 bp, Saccharomyces pastorianus
ctgcaagaaaatccgcggatgatat

SEQ ID NO: 94756 - DNA, 25 bp, Saccharomyces pastorianus
aaacgtggttgtagaaatattctgc

SEQ ID NO: 94757 - DNA, 25 bp, Saccharomyces pastorianus
ttctgcaagaaaatccgcggatgat

SEQ ID NO: 94758 - DNA, 25 bp, Saccharomyces pastorianus
accgccggcagtctacaaaacaatg

SEQ ID NO: 94759 - DNA, 25 bp, Saccharomyces pastorianus
tggcgtgcagcatccgttgtttttt

SEQ ID NO: 94760 - DNA, 25 bp, Saccharomyces pastorianus
agcgtgatctgctgtctgacatctt

SEQ ID NO: 94761 - DNA, 25 bp, Saccharomyces pastorianus
cgtagttatcaaccccaaacagatt

SEQ ID NO: 94762 - DNA, 25 bp, Saccharomyces pastorianus
cacggactaattgtggtgggcaaca

SEQ ID NO: 94763 - DNA, 25 bp, Saccharomyces pastorianus
gaaattgagctatttaacgcggctg

SEQ ID NO: 94764 - DNA, 25 bp, Saccharomyces pastorianus
gaaattggtgtcataacgccctatt

SEQ ID NO: 94765 - DNA, 25 bp, Saccharomyces pastorianus
aacgccctattctgcacagcgtgat

SEQ ID NO: 94766 - DNA, 25 bp, Saccharomyces pastorianus
attaacatcatcaacggcctacacg

SEQ ID NO: 94767 - DNA, 25 bp, Saccharomyces pastorianus
gtagactcctttcaaggccacgaaa

SEQ ID NO: 94768 - DNA, 25 bp, Saccharomyces pastorianus
ttaacgcggctggttctcaaggaac

SEQ ID NO: 94769 - DNA, 25 bp, Saccharomyces pastorianus
gtccgagtccggtcaagctgaagac

SEQ ID NO: 94770 - DNA, 25 bp, Saccharomyces pastorianus
ggctgaattttctagtggcgatgct

SEQ ID NO: 94771 - DNA, 25 bp, Saccharomyces pastorianus
cgtgcctcttggagaattgtttctt

SEQ ID NO: 94772 - DNA, 25 bp, Saccharomyces pastorianus
caaacgcctctttagaagcctacaa

SEQ ID NO: 94773 - DNA, 25 bp, Saccharomyces pastorianus
tgacgacgctattgctgagttggac

SEQ ID NO: 94774 - DNA, 25 bp, Saccharomyces pastorianus
gccaagcaagcttttgacgacgcta

SEQ ID NO: 94775 - DNA, 25 bp, Saccharomyces pastorianus
caatccgtctaggtttggctctaaa

SEQ ID NO: 94776 - DNA, 25 bp, Saccharomyces pastorianus
acaagaccgcttctgaaattgccac

SEQ ID NO: 94777 - DNA, 25 bp, Saccharomyces pastorianus
atattttgtccgtgctagactccca

SEQ ID NO: 94778 - DNA, 25 bp, Saccharomyces pastorianus
agtcgagttgattcgttcgtaccgt

SEQ ID NO: 94779 - DNA, 25 bp, Saccharomyces pastorianus
gctctaaacttctctgtcttctatt

SEQ ID NO: 94780 - DNA, 25 bp, Saccharomyces pastorianus
taccggattccccatctatagagaa

SEQ ID NO: 94781 - DNA, 25 bp, Saccharomyces pastorianus
gtacactagcccgttgaggtatctg

SEQ ID NO: 94782 - DNA, 25 bp, Saccharomyces pastorianus
ggtacccttcaattgcgtacactag

SEQ ID NO: 94783 - DNA, 25 bp, Saccharomyces pastorianus
gatgaggagctccaatcatttgatt

SEQ ID NO: 94784 - DNA, 25 bp, Saccharomyces pastorianus
gaagctcgcgctaacttagattcaa

SEQ ID NO: 94785 - DNA, 25 bp, Saccharomyces pastorianus
aggattctattgttgtaacgccaag

SEQ ID NO: 94786 - DNA, 25 bp, Saccharomyces pastorianus
attatgactgtagccctttttaccg

SEQ ID NO: 94787 - DNA, 25 bp, Saccharomyces pastorianus
aattgctggcacatatccgattttc

SEQ ID NO: 94788 - DNA, 25 bp, Saccharomyces pastorianus
agaattgagcccgatgactacgagg

SEQ ID NO: 94789 - DNA, 25 bp, Saccharomyces pastorianus
atctgaaaccgagcagtttaccggg

SEQ ID NO: 94790 - DNA, 25 bp, Saccharomyces pastorianus
ggcaaagcaagtcccagttaaggca

SEQ ID NO: 94791 - DNA, 25 bp, Saccharomyces pastorianus
gcagcaagaggtgtgtgagcaacta

SEQ ID NO: 94792 - DNA, 25 bp, Saccharomyces pastorianus
atcctctgaagttaatcttggcgaa

SEQ ID NO: 94793 - DNA, 25 bp, Saccharomyces pastorianus
gcaagcagccatcctctgaagttaa

SEQ ID NO: 94794 - DNA, 25 bp, Saccharomyces pastorianus
tcttggcgaaagagaagctggaaca

SEQ ID NO: 94795 - DNA, 25 bp, Saccharomyces pastorianus
gatgcgccaaaccaaacttctgaag

SEQ ID NO: 94796 - DNA, 25 bp, Saccharomyces pastorianus
ttagtactggctcgccgacgggcaa

SEQ ID NO: 94797 - DNA, 25 bp, Saccharomyces pastorianus
agagaaccttagtactggctcgccg

SEQ ID NO: 94798 - DNA, 25 bp, Saccharomyces pastorianus
gtggaataaaaccttagagcagcaa

SEQ ID NO: 94799 - DNA, 25 bp, Saccharomyces pastorianus
tgagaggatgatgcgccaaaccaaa

SEQ ID NO: 94800 - DNA, 25 bp, Saccharomyces pastorianus
gatacattagacttgttgtggaata

SEQ ID NO: 94801 - DNA, 25 bp, Saccharomyces pastorianus
gacgggcaagcagccatcctctgaa

SEQ ID NO: 94802 - DNA, 25 bp, Saccharomyces pastorianus
ctgaggtttgtgtgaattttgtgat

SEQ ID NO: 94803 - DNA, 25 bp, Saccharomyces pastorianus
gattatttttcctatcgttttatat

SEQ ID NO: 94804 - DNA, 25 bp, Saccharomyces pastorianus
aagcttcatttcatcttcctagatc

SEQ ID NO: 94805 - DNA, 25 bp, Saccharomyces pastorianus
gaacttctcctcaagggtataggga

SEQ ID NO: 94806 - DNA, 25 bp, Saccharomyces pastorianus
ccattgttgatagaggcttcaatac

SEQ ID NO: 94807 - DNA, 25 bp, Saccharomyces pastorianus
agggatcctcaaatttaatcggtat

SEQ ID NO: 94808 - DNA, 25 bp, Saccharomyces pastorianus
atttcatcttcctagatctcatatg

SEQ ID NO: 94809 - DNA, 25 bp, Saccharomyces pastorianus
ctaactctttctcaagcttcatttc

SEQ ID NO: 94810 - DNA, 25 bp, Saccharomyces pastorianus
gcttccattaaacttgctaactctt

SEQ ID NO: 94811 - DNA, 25 bp, Saccharomyces pastorianus
tcgttttatatgcttcattttccca

SEQ ID NO: 94812 - DNA, 25 bp, Saccharomyces pastorianus
aatactgttacgtttatctgaggtt

SEQ ID NO: 94813 - DNA, 25 bp, Saccharomyces pastorianus
gagtttactacaaccccagtaggcg

SEQ ID NO: 94814 - DNA, 25 bp, Saccharomyces pastorianus
agatatgatgccctacccaagaacg

SEQ ID NO: 94815 - DNA, 25 bp, Saccharomyces pastorianus
gcgtcgctataccaccaagagttta

SEQ ID NO: 94816 - DNA, 25 bp, Saccharomyces pastorianus
ggtcaaagctaatgccacgttttcc

SEQ ID NO: 94817 - DNA, 25 bp, Saccharomyces pastorianus
ctggttatcctttcttaattcacgg

SEQ ID NO: 94818 - DNA, 25 bp, Saccharomyces pastorianus
gttcacggacctactagcttattgg

SEQ ID NO: 94819 - DNA, 25 bp, Saccharomyces pastorianus
ggcgtgaaactgtcgggctatacca

SEQ ID NO: 94820 - DNA, 25 bp, Saccharomyces pastorianus
gtaagaaccaccgatcttcagcaat

SEQ ID NO: 94821 - DNA, 25 bp, Saccharomyces pastorianus
ccccacgttcgctaatcaatttgtt

SEQ ID NO: 94822 - DNA, 25 bp, Saccharomyces pastorianus
ttgagtatctcgtacaagttcccca

SEQ ID NO: 94823 - DNA, 25 bp, Saccharomyces pastorianus
aatacaccaggtggcgtcgctatac

SEQ ID NO: 94824 - DNA, 25 bp, Saccharomyces pastorianus
aaaagcccctcctagttggactatg

SEQ ID NO: 94825 - DNA, 25 bp, Saccharomyces pastorianus
tctagatgtcgtattggtgcctgga

SEQ ID NO: 94826 - DNA, 25 bp, Saccharomyces pastorianus
tggcctctccaattcctttagaaaa

SEQ ID NO: 94827 - DNA, 25 bp, Saccharomyces pastorianus
ggccaggaggtctttctgccaagat

SEQ ID NO: 94828 - DNA, 25 bp, Saccharomyces pastorianus
gatgtactcatacttctgaatcgaa

SEQ ID NO: 94829 - DNA, 25 bp, Saccharomyces pastorianus
tgtcttatggaacaggtggcctctc

SEQ ID NO: 94830 - DNA, 25 bp, Saccharomyces pastorianus
gatattatcgctgcagagtcgcata

SEQ ID NO: 94831 - DNA, 25 bp, Saccharomyces pastorianus
aaatggttcgtgatttgaagcctca

SEQ ID NO: 94832 - DNA, 25 bp, Saccharomyces pastorianus
gagtcgcatactatttctcaagcag

SEQ ID NO: 94833 - DNA, 25 bp, Saccharomyces pastorianus
agcagtacgctcattgatcgcttcc

SEQ ID NO: 94834 - DNA, 25 bp, Saccharomyces pastorianus
gcttccaccaattctaggcgtgtag

SEQ ID NO: 94835 - DNA, 25 bp, Saccharomyces pastorianus
agatgctggtcaagctgcgctggac

SEQ ID NO: 94836 - DNA, 25 bp, Saccharomyces pastorianus
gtgactgcagaatctctaccagacc

SEQ ID NO: 94837 - DNA, 25 bp, Saccharomyces pastorianus
ctaccagaccttctcaatctatttt

SEQ ID NO: 94838 - DNA, 25 bp, Saccharomyces pastorianus
gcatggacttttgtagcctcgaaaa

SEQ ID NO: 94839 - DNA, 25 bp, Saccharomyces pastorianus
gatgtgccacatgatagcctcatac

SEQ ID NO: 94840 - DNA, 25 bp, Saccharomyces pastorianus
gaacagcagtttctttcatcctaac

SEQ ID NO: 94841 - DNA, 25 bp, Saccharomyces pastorianus
gcagcaccagtgtttcagttggcat

SEQ ID NO: 94842 - DNA, 25 bp, Saccharomyces pastorianus
ggcaacaacgccttctctaaaaagt

SEQ ID NO: 94843 - DNA, 25 bp, Saccharomyces pastorianus
tgagaaattgtcacccagcagcacc

SEQ ID NO: 94844 - DNA, 25 bp, Saccharomyces pastorianus
atatggccaggcttgctcagatgct

SEQ ID NO: 94845 - DNA, 25 bp, Saccharomyces pastorianus
gaattttatcgagacccctagaagg

SEQ ID NO: 94846 - DNA, 25 bp, Saccharomyces pastorianus
gatcctactacgttcaattgtccga

SEQ ID NO: 94847 - DNA, 25 bp, Saccharomyces pastorianus
ttgatttctgcacgctttggtacga

SEQ ID NO: 94848 - DNA, 25 bp, Saccharomyces pastorianus
gggagggctctatccagttccaatc

SEQ ID NO: 94849 - DNA, 25 bp, Saccharomyces pastorianus
tagtgtgggatcctttttcggcaac

SEQ ID NO: 94850 - DNA, 25 bp, Saccharomyces pastorianus
tatgtcttcgatgctgtacctatgt

SEQ ID NO: 94851 - DNA, 25 bp, Saccharomyces pastorianus
gaacgaccccatatattatccaatc

SEQ ID NO: 94852 - DNA, 25 bp, Saccharomyces pastorianus
ttacaagctgcaggtggcggactaa

SEQ ID NO: 94853 - DNA, 25 bp, Saccharomyces pastorianus
ggtacgactttctttgttgtgggag

SEQ ID NO: 94854 - DNA, 25 bp, Saccharomyces pastorianus
ggatctttgtgaatgctaccctatt

SEQ ID NO: 94855 - DNA, 25 bp, Saccharomyces pastorianus
ataactgcgggcctttttgtacagg

SEQ ID NO: 94856 - DNA, 25 bp, Saccharomyces pastorianus
tgttcttttattagtcgctccagca

SEQ ID NO: 94857 - DNA, 25 bp, Saccharomyces pastorianus
aaaaaatagacccacctgcaacgct

SEQ ID NO: 94858 - DNA, 25 bp, Saccharomyces pastorianus
tagatcacatgcaaactacctggcc

SEQ ID NO: 94859 - DNA, 25 bp, Saccharomyces pastorianus
aacgctcaacgaagccgcaggtagt

SEQ ID NO: 94860 - DNA, 25 bp, Saccharomyces pastorianus
tatgcaaacaacatcacaaccaagg

SEQ ID NO: 94861 - DNA, 25 bp, Saccharomyces pastorianus
aacatggtgaacttacaagcggaac

SEQ ID NO: 94862 - DNA, 25 bp, Saccharomyces pastorianus
gtcataagctggtttttagctagct

SEQ ID NO: 94863 - DNA, 25 bp, Saccharomyces pastorianus
actacctggcccaattacaagtgga

SEQ ID NO: 94864 - DNA, 25 bp, Saccharomyces pastorianus
gtggcgttcgaaggaaatcaactgt

SEQ ID NO: 94865 - DNA, 25 bp, Saccharomyces pastorianus
gggtactgcttttactagctgtcat

SEQ ID NO: 94866 - DNA, 25 bp, Saccharomyces pastorianus
gggccaaatcagtcatatctagttt

SEQ ID NO: 94867 - DNA, 25 bp, Saccharomyces pastorianus
gagatattgctttatacttaggtga

SEQ ID NO: 94868 - DNA, 25 bp, Saccharomyces pastorianus
gaaacagctgacaccgaacgaaatt

SEQ ID NO: 94869 - DNA, 25 bp, Saccharomyces pastorianus
tctttgccattaaaatccgccgaga

SEQ ID NO: 94870 - DNA, 25 bp, Saccharomyces pastorianus
ttcctatcggtttgaaacggtctca

SEQ ID NO: 94871 - DNA, 25 bp, Saccharomyces pastorianus
aatccgccgagaattcaggtaaaca

SEQ ID NO: 94872 - DNA, 25 bp, Saccharomyces pastorianus
gttggcgcaaacgagtgttactaca

SEQ ID NO: 94873 - DNA, 25 bp, Saccharomyces pastorianus
gttaataccggtttgcagaacatta

SEQ ID NO: 94874 - DNA, 25 bp, Saccharomyces pastorianus
aaacctccatacatttattctcatg

SEQ ID NO: 94875 - DNA, 25 bp, Saccharomyces pastorianus
cacgatgccgtttttgttaataccg

SEQ ID NO: 94876 - DNA, 25 bp, Saccharomyces pastorianus
aacggctgttaagctggacactgaa

SEQ ID NO: 94877 - DNA, 25 bp, Saccharomyces pastorianus
gtacaaggcaggtattcctatcggt

SEQ ID NO: 94878 - DNA, 25 bp, Saccharomyces pastorianus
taatccagtggtggcgacggatccg

SEQ ID NO: 94879 - DNA, 25 bp, Saccharomyces pastorianus
gacaagatggtcctcaggtcgacga

SEQ ID NO: 94880 - DNA, 25 bp, Saccharomyces pastorianus
gataactaaacagctctcttctaag

SEQ ID NO: 94881 - DNA, 25 bp, Saccharomyces pastorianus
ggtccaacaagagctattatcattc

SEQ ID NO: 94882 - DNA, 25 bp, Saccharomyces pastorianus
agggaacgtccaccgatgatgcaat

SEQ ID NO: 94883 - DNA, 25 bp, Saccharomyces pastorianus
gaagattctttgatccctaatgtga

SEQ ID NO: 94884 - DNA, 25 bp, Saccharomyces pastorianus
attcttgcgaacgatatcaatgctt

SEQ ID NO: 94885 - DNA, 25 bp, Saccharomyces pastorianus
gggaagctaccaaacgtcatggaca

SEQ ID NO: 94886 - DNA, 25 bp, Saccharomyces pastorianus
tctcttctaagccaccagctaataa

SEQ ID NO: 94887 - DNA, 25 bp, Saccharomyces pastorianus
gggtcagccaaaactgatcaccaaa

SEQ ID NO: 94888 - DNA, 25 bp, Saccharomyces pastorianus
tcaggtcgacgaaattgccagaaaa

SEQ ID NO: 94889 - DNA, 25 bp, Saccharomyces pastorianus
tacattgaccaacaaaccggcaaag

SEQ ID NO: 94890 - DNA, 25 bp, Saccharomyces pastorianus
gatgtctctgatattcttcgggtgc

SEQ ID NO: 94891 - DNA, 25 bp, Saccharomyces pastorianus
tttatactactctgtcctctctaag

SEQ ID NO: 94892 - DNA, 25 bp, Saccharomyces pastorianus
aacacatcagcttcgaaacctattg

SEQ ID NO: 94893 - DNA, 25 bp, Saccharomyces pastorianus
gacactagacgctattacgactcat

SEQ ID NO: 94894 - DNA, 25 bp, Saccharomyces pastorianus
aagcaccatcgccagtgttgttaaa

SEQ ID NO: 94895 - DNA, 25 bp, Saccharomyces pastorianus
tcatctcccgagaatcagcaggacg

SEQ ID NO: 94896 - DNA, 25 bp, Saccharomyces pastorianus
ccactaattcccaatgatgtctctg

SEQ ID NO: 94897 - DNA, 25 bp, Saccharomyces pastorianus
gagtttaccgtctcaatttcacaag

SEQ ID NO: 94898 - DNA, 25 bp, Saccharomyces pastorianus
ttgcaaaattctacatcatctcccg

SEQ ID NO: 94899 - DNA, 25 bp, Saccharomyces pastorianus
tattcttcgggtgctttaccttgac

SEQ ID NO: 94900 - DNA, 25 bp, Saccharomyces pastorianus
atactttctacgtccaagttggagc

SEQ ID NO: 94901 - DNA, 25 bp, Saccharomyces pastorianus
gcaatggctgataggtgtctgtaca

SEQ ID NO: 94902 - DNA, 25 bp, Saccharomyces pastorianus
tttgctgggcagtgactttgaaact

SEQ ID NO: 94903 - DNA, 25 bp, Saccharomyces pastorianus
caagcgtattgttggattgcctaca

SEQ ID NO: 94904 - DNA, 25 bp, Saccharomyces pastorianus
gcctacaaggcgttgctttcataga

SEQ ID NO: 94905 - DNA, 25 bp, Saccharomyces pastorianus
gaaactgtgcatattcccaatacga

SEQ ID NO: 94906 - DNA, 25 bp, Saccharomyces pastorianus
tcccaatacgaaccactttaaagat

SEQ ID NO: 94907 - DNA, 25 bp, Saccharomyces pastorianus
gaaagtagtcatcacgatctgcaaa

SEQ ID NO: 94908 - DNA, 25 bp, Saccharomyces pastorianus
aacgccggtttcaaacttgatctgt

SEQ ID NO: 94909 - DNA, 25 bp, Saccharomyces pastorianus
taatcatgtttcacaggatctggca

SEQ ID NO: 94910 - DNA, 25 bp, Saccharomyces pastorianus
atagaacgtcctttttgctgggcag

SEQ ID NO: 94911 - DNA, 25 bp, Saccharomyces pastorianus
gacccaacttagctatcaacagcgt

SEQ ID NO: 94912 - DNA, 25 bp, Saccharomyces pastorianus
aagcaattagaacagttaggcccaa

SEQ ID NO: 94913 - DNA, 25 bp, Saccharomyces pastorianus
agcttctcaatccttcatcaactgg

SEQ ID NO: 94914 - DNA, 25 bp, Saccharomyces pastorianus
atacaataaattggccgtcttcatt

SEQ ID NO: 94915 - DNA, 25 bp, Saccharomyces pastorianus
ggaattagcttctcaatccttcatc

SEQ ID NO: 94916 - DNA, 25 bp, Saccharomyces pastorianus
gatatctatctgaaattgacttgcc

SEQ ID NO: 94917 - DNA, 25 bp, Saccharomyces pastorianus
tggtggccaaatctctttcgacgtt

SEQ ID NO: 94918 - DNA, 25 bp, Saccharomyces pastorianus
tcggtggttctgacttaagcaagca

SEQ ID NO: 94919 - DNA, 25 bp, Saccharomyces pastorianus
ggccgtcttcattttgagatatcta

SEQ ID NO: 94920 - DNA, 25 bp, Saccharomyces pastorianus
ttaggcccaaacgtcttagatgaat

SEQ ID NO: 94921 - DNA, 25 bp, Saccharomyces pastorianus
aagtgctgcattggttttgtcggtg

SEQ ID NO: 94922 - DNA, 25 bp, Saccharomyces pastorianus
aaggaacaccaaatcagagctaagt

SEQ ID NO: 94923 - DNA, 25 bp, Saccharomyces pastorianus
gaaaacgtcctatcagtacatcctg

SEQ ID NO: 94924 - DNA, 25 bp, Saccharomyces pastorianus
attggtatcatatccgatgcactcg

SEQ ID NO: 94925 - DNA, 25 bp, Saccharomyces pastorianus
agatggtctctaaggaggtcctcaa

SEQ ID NO: 94926 - DNA, 25 bp, Saccharomyces pastorianus
atccactatgattccttgaccatga

SEQ ID NO: 94927 - DNA, 25 bp, Saccharomyces pastorianus
gatgcactcgcagtagctatttatg

SEQ ID NO: 94928 - DNA, 25 bp, Saccharomyces pastorianus
acttgccaaatgaccttcgtgggtg

SEQ ID NO: 94929 - DNA, 25 bp, Saccharomyces pastorianus
acaactcgtgtctgttccatgctat

SEQ ID NO: 94930 - DNA, 25 bp, Saccharomyces pastorianus
agcagctttgcaactggcctcaaat

SEQ ID NO: 94931 - DNA, 25 bp, Saccharomyces pastorianus
aaggcccagatcaagtgcaacactt

SEQ ID NO: 94932 - DNA, 25 bp, Saccharomyces pastorianus
atagcgttcgtgacctcagggagat

SEQ ID NO: 94933 - DNA, 25 bp, Saccharomyces pastorianus
tcaacaaccccgtcaagttcaatga

SEQ ID NO: 94934 - DNA, 25 bp, Saccharomyces pastorianus
taacgtgtctgttacgggtatcctt

SEQ ID NO: 94935 - DNA, 25 bp, Saccharomyces pastorianus
gcaaggtctcaaggtcaccatggaa

SEQ ID NO: 94936 - DNA, 25 bp, Saccharomyces pastorianus
agagaagcggttgttacggctcccg

SEQ ID NO: 94937 - DNA, 25 bp, Saccharomyces pastorianus
acttgattgtggtcgttttgctatt

SEQ ID NO: 94938 - DNA, 25 bp, Saccharomyces pastorianus
gagcgtattctttccaagttcatca

SEQ ID NO: 94939 - DNA, 25 bp, Saccharomyces pastorianus
ggctcccgcaattgcagagcagcaa

SEQ ID NO: 94940 - DNA, 25 bp, Saccharomyces pastorianus
atacgttcaattgctgtctcattac

SEQ ID NO: 94941 - DNA, 25 bp, Saccharomyces pastorianus
ggcccaagtccacgacatgttatgt

SEQ ID NO: 94942 - DNA, 25 bp, Saccharomyces pastorianus
gcccagtggtggtagtttctcaact

SEQ ID NO: 94943 - DNA, 25 bp, Saccharomyces pastorianus
gaatggtcaattggaggctgcgcaa

SEQ ID NO: 94944 - DNA, 25 bp, Saccharomyces pastorianus
gttatcagtagcatacgcactccga

SEQ ID NO: 94945 - DNA, 25 bp, Saccharomyces pastorianus
attcaagtatgacgatggtgactac

SEQ ID NO: 94946 - DNA, 25 bp, Saccharomyces pastorianus
aatgtggggaccctcccaacgagat

SEQ ID NO: 94947 - DNA, 25 bp, Saccharomyces pastorianus
gtgactactccttggccattgattt

SEQ ID NO: 94948 - DNA, 25 bp, Saccharomyces pastorianus
aatgtctatgagttgattaccgata

SEQ ID NO: 94949 - DNA, 25 bp, Saccharomyces pastorianus
gattccttcagagagattacatata

SEQ ID NO: 94950 - DNA, 25 bp, Saccharomyces pastorianus
gagttgattaccgataggctactgg

SEQ ID NO: 94951 - DNA, 25 bp, Saccharomyces pastorianus
ccaacgagattccttcagagagatt

SEQ ID NO: 94952 - DNA, 25 bp, Saccharomyces pastorianus
atgtctagggattgtattaatgtct

SEQ ID NO: 94953 - DNA, 25 bp, Saccharomyces pastorianus
atgacgatggtgactactccttggc

SEQ ID NO: 94954 - DNA, 25 bp, Saccharomyces pastorianus
ggccattgatttgatgtctagggat

SEQ ID NO: 94955 - DNA, 25 bp, Saccharomyces pastorianus
taccgataggctactggttgatttc

SEQ ID NO: 94956 - DNA, 25 bp, Saccharomyces pastorianus
gcaaagccgctgatattccggtagt

SEQ ID NO: 94957 - DNA, 25 bp, Saccharomyces pastorianus
gattaccaagacaacctgagccatt

SEQ ID NO: 94958 - DNA, 25 bp, Saccharomyces pastorianus
gattctggcagacatccattccatt

SEQ ID NO: 94959 - DNA, 25 bp, Saccharomyces pastorianus
acaaccctggtgtctggtatttcca

SEQ ID NO: 94960 - DNA, 25 bp, Saccharomyces pastorianus
gagcaagatgaaatgaccgtccctt

SEQ ID NO: 94961 - DNA, 25 bp, Saccharomyces pastorianus
ccttataacgaatctgcgccattac

SEQ ID NO: 94962 - DNA, 25 bp, Saccharomyces pastorianus
ttggcttcggtctttattgaggcac

SEQ ID NO: 94963 - DNA, 25 bp, Saccharomyces pastorianus
tagtccaaaagtcgccagggttcca

SEQ ID NO: 94964 - DNA, 25 bp, Saccharomyces pastorianus
gagatttagagctgacaaccctggt

SEQ ID NO: 94965 - DNA, 25 bp, Saccharomyces pastorianus
gggcctatattccattgctcagtat

SEQ ID NO: 94966 - DNA, 25 bp, Saccharomyces pastorianus
ggcacccgctttacttcaggaaagg

SEQ ID NO: 94967 - DNA, 25 bp, Saccharomyces pastorianus
atcacttcatcttactaccgtggtt

SEQ ID NO: 94968 - DNA, 25 bp, Saccharomyces pastorianus
gaggatgcgtttttaaccatggcta

SEQ ID NO: 94969 - DNA, 25 bp, Saccharomyces pastorianus
gttttcggacgacacatataccaac

SEQ ID NO: 94970 - DNA, 25 bp, Saccharomyces pastorianus
gatcggtatgcaacctcaacagtgt

SEQ ID NO: 94971 - DNA, 25 bp, Saccharomyces pastorianus
agagactagtgctttggactccacc

SEQ ID NO: 94972 - DNA, 25 bp, Saccharomyces pastorianus
gactacatctccacaatcggagtgg

SEQ ID NO: 94973 - DNA, 25 bp, Saccharomyces pastorianus
gaacgtttccgtactatcacttcat

SEQ ID NO: 94974 - DNA, 25 bp, Saccharomyces pastorianus
ggttcgcatgggatcattatcgtgt

SEQ ID NO: 94975 - DNA, 25 bp, Saccharomyces pastorianus
gtacgattacctgttcaaactgctg

SEQ ID NO: 94976 - DNA, 25 bp, Saccharomyces pastorianus
gactgtagaactggacggcaagact

SEQ ID NO: 94977 - DNA, 25 bp, Saccharomyces pastorianus
aaactgctgttgatcgggaattccg

SEQ ID NO: 94978 - DNA, 25 bp, Saccharomyces pastorianus
gctacgctccattgacggcaattgg

SEQ ID NO: 94979 - DNA, 25 bp, Saccharomyces pastorianus
acatttcttcatggtcggctacgct

SEQ ID NO: 94980 - DNA, 25 bp, Saccharomyces pastorianus
cgttgcagccttctttagaggtaaa

SEQ ID NO: 94981 - DNA, 25 bp, Saccharomyces pastorianus
ctttgactgtccctgaattaacaca

SEQ ID NO: 94982 - DNA, 25 bp, Saccharomyces pastorianus
agttggctgttaatcttgtcccatt

SEQ ID NO: 94983 - DNA, 25 bp, Saccharomyces pastorianus
atgatggctgctgccgatccaagaa

SEQ ID NO: 94984 - DNA, 25 bp, Saccharomyces pastorianus
gcaaactgctgtgtgttctgtcgct

SEQ ID NO: 94985 - DNA, 25 bp, Saccharomyces pastorianus
tggatccccaacaatgtgcaaactg

SEQ ID NO: 94986 - DNA, 25 bp, Saccharomyces pastorianus
tcattgctaactccacatctattca

SEQ ID NO: 94987 - DNA, 25 bp, Saccharomyces pastorianus
gtagataccttaccgttgcagcctt

SEQ ID NO: 94988 - DNA, 25 bp, Saccharomyces pastorianus
gtcgctcctcaaggtttggacatgg

SEQ ID NO: 94989 - DNA, 25 bp, Saccharomyces pastorianus
aagagatctacggatttggctcaaa

SEQ ID NO: 94990 - DNA, 25 bp, Saccharomyces pastorianus
atgagtgttcttttaccgttgagat

SEQ ID NO: 94991 - DNA, 25 bp, Saccharomyces pastorianus
aactccatgaggtagatctggtttt

SEQ ID NO: 94992 - DNA, 25 bp, Saccharomyces pastorianus
gagattacctgaaatcccacctaaa

SEQ ID NO: 94993 - DNA, 25 bp, Saccharomyces pastorianus
accgaacttcatccattcgctggat

SEQ ID NO: 94994 - DNA, 25 bp, Saccharomyces pastorianus
gctggatgcttcacatatgttgcta

SEQ ID NO: 94995 - DNA, 25 bp, Saccharomyces pastorianus
ggcaaaaggcaggtcttccaccgaa

SEQ ID NO: 94996 - DNA, 25 bp, Saccharomyces pastorianus
gggaacagtttatcaaactccatga

SEQ ID NO: 94997 - DNA, 25 bp, Saccharomyces pastorianus
cactgacttggacgcacttgaacta

SEQ ID NO: 94998 - DNA, 25 bp, Saccharomyces pastorianus
tcgctgtcaaccctgttaatgcaag

SEQ ID NO: 94999 - DNA, 25 bp, Saccharomyces pastorianus
ggattagattttgcatcagttcatg

SEQ ID NO: 95000 - DNA, 25 bp, Saccharomyces pastorianus
gccccagaagtgctttttggagtaa

SEQ ID NO: 95001 - DNA, 25 bp, Saccharomyces pastorianus
aaagttgggcataccgtccattcag

SEQ ID NO: 95002 - DNA, 25 bp, Saccharomyces pastorianus
gcacgttccggccatgattgatgac

SEQ ID NO: 95003 - DNA, 25 bp, Saccharomyces pastorianus
aacaagtgcggaacccatggacagc

SEQ ID NO: 95004 - DNA, 25 bp, Saccharomyces pastorianus
gcaccgtatccccaaagttgtacat

SEQ ID NO: 95005 - DNA, 25 bp, Saccharomyces pastorianus
acaggaatttacaaggccccagaag

SEQ ID NO: 95006 - DNA, 25 bp, Saccharomyces pastorianus
tttggcatctcttatgacatggcaa

SEQ ID NO: 95007 - DNA, 25 bp, Saccharomyces pastorianus
cggcagcgacgacatgaactcagat

SEQ ID NO: 95008 - DNA, 25 bp, Saccharomyces pastorianus
gggatggtctcattttcaccaaacg

SEQ ID NO: 95009 - DNA, 25 bp, Saccharomyces pastorianus
gataattatttctcagtggttccag

SEQ ID NO: 95010 - DNA, 25 bp, Saccharomyces pastorianus
aacacggctcggttgatgcatttgt

SEQ ID NO: 95011 - DNA, 25 bp, Saccharomyces pastorianus
gagttctctgaagtagtcaatgcta

SEQ ID NO: 95012 - DNA, 25 bp, Saccharomyces pastorianus
gatctcgatgttattgccagagcaa

SEQ ID NO: 95013 - DNA, 25 bp, Saccharomyces pastorianus
acacatatttttgacggcttggcca

SEQ ID NO: 95014 - DNA, 25 bp, Saccharomyces pastorianus
tatctaggtacggaatggtgccata

SEQ ID NO: 95015 - DNA, 25 bp, Saccharomyces pastorianus
gggctcttgaaaccttggagagttt

SEQ ID NO: 95016 - DNA, 25 bp, Saccharomyces pastorianus
ggcctaaccaagtataccatatgaa

SEQ ID NO: 95017 - DNA, 25 bp, Saccharomyces pastorianus
gaggtcactgtggatctcgatgtta

SEQ ID NO: 95018 - DNA, 25 bp, Saccharomyces pastorianus
agggatatcggcgtcttggaactat

SEQ ID NO: 95019 - DNA, 25 bp, Saccharomyces pastorianus
tggacatcgatgtacgttggagaat

SEQ ID NO: 95020 - DNA, 25 bp, Saccharomyces pastorianus
gattggtcagaatcctggacatcga

SEQ ID NO: 95021 - DNA, 25 bp, Saccharomyces pastorianus
gagttttactacttgatgaggtcac

SEQ ID NO: 95022 - DNA, 25 bp, Saccharomyces pastorianus
gagaacgattttgacctgcgccatg

SEQ ID NO: 95023 - DNA, 25 bp, Saccharomyces pastorianus
gggattgtagctatcctgtaccaat

SEQ ID NO: 95024 - DNA, 25 bp, Saccharomyces pastorianus
aaaagtatcatggtgtcgccgccag

SEQ ID NO: 95025 - DNA, 25 bp, Saccharomyces pastorianus
tctacgttacatgatctccacaaag

SEQ ID NO: 95026 - DNA, 25 bp, Saccharomyces pastorianus
agtcacatctgggtggatccgatta

SEQ ID NO: 95027 - DNA, 25 bp, Saccharomyces pastorianus
gcgttggtccaaagacttggccatt

SEQ ID NO: 95028 - DNA, 25 bp, Saccharomyces pastorianus
gcaaaatttctttacttatcgggat

SEQ ID NO: 95029 - DNA, 25 bp, Saccharomyces pastorianus
aagatgcgactactgccagcaagaa

SEQ ID NO: 95030 - DNA, 25 bp, Saccharomyces pastorianus
gagcaccattatcttctatttgagc

SEQ ID NO: 95031 - DNA, 25 bp, Saccharomyces pastorianus
gcgccatggtgctatacaaacagtt

SEQ ID NO: 95032 - DNA, 25 bp, Saccharomyces pastorianus
aaatttgcaccacgttagtcacatc

SEQ ID NO: 95033 - DNA, 25 bp, Saccharomyces pastorianus
gacatgtacactcccgatacggcag

SEQ ID NO: 95034 - DNA, 25 bp, Saccharomyces pastorianus
gaagttgaacccgtcgacatgtaca

SEQ ID NO: 95035 - DNA, 25 bp, Saccharomyces pastorianus
tgtcaatctttgttggttccatcga

SEQ ID NO: 95036 - DNA, 25 bp, Saccharomyces pastorianus
gtgggccacggctgctaataatgca

SEQ ID NO: 95037 - DNA, 25 bp, Saccharomyces pastorianus
gataggttttatccaggcacgctgt

SEQ ID NO: 95038 - DNA, 25 bp, Saccharomyces pastorianus
gcacgctgtctagctttcaaactga

SEQ ID NO: 95039 - DNA, 25 bp, Saccharomyces pastorianus
ggatgtcttgactactgttgcaaca

SEQ ID NO: 95040 - DNA, 25 bp, Saccharomyces pastorianus
ttgcccacacctacgagttcaaaaa

SEQ ID NO: 95041 - DNA, 25 bp, Saccharomyces pastorianus
gtctcaagcagttcgatagtttcca

SEQ ID NO: 95042 - DNA, 25 bp, Saccharomyces pastorianus
aggataggaccgtttgctgatgcaa

SEQ ID NO: 95043 - DNA, 25 bp, Saccharomyces pastorianus
gataatattcatcctcgcatacagt

SEQ ID NO: 95044 - DNA, 25 bp, Saccharomyces pastorianus
ggcatctgtgcttttattactgttg

SEQ ID NO: 95045 - DNA, 25 bp, Saccharomyces pastorianus
gttttcctgcataatgttgccatca

SEQ ID NO: 95046 - DNA, 25 bp, Saccharomyces pastorianus
gtaatccaaattgctacctgcatta

SEQ ID NO: 95047 - DNA, 25 bp, Saccharomyces pastorianus
gaaacttcatttagatcccatcaca

SEQ ID NO: 95048 - DNA, 25 bp, Saccharomyces pastorianus
aatatgacgttgcttctgcttttat

SEQ ID NO: 95049 - DNA, 25 bp, Saccharomyces pastorianus
acctgcattagagtagcgctgttga

SEQ ID NO: 95050 - DNA, 25 bp, Saccharomyces pastorianus
atctgtactggatacaccacttggt

SEQ ID NO: 95051 - DNA, 25 bp, Saccharomyces pastorianus
aaatgccaaacagcgtacctttaga

SEQ ID NO: 95052 - DNA, 25 bp, Saccharomyces pastorianus
gtgccattaacatccctatcattat

SEQ ID NO: 95053 - DNA, 25 bp, Saccharomyces pastorianus
tatttgtgtacttaaccgttttcag

SEQ ID NO: 95054 - DNA, 25 bp, Saccharomyces pastorianus
accagatggcgtttgttatctcatt

SEQ ID NO: 95055 - DNA, 25 bp, Saccharomyces pastorianus
tcttgccgactacaacattactctg

SEQ ID NO: 95056 - DNA, 25 bp, Saccharomyces pastorianus
atttggccgaattccaccaggtgga

SEQ ID NO: 95057 - DNA, 25 bp, Saccharomyces pastorianus
gggtcgaaatcggtaactctggtat

SEQ ID NO: 95058 - DNA, 25 bp, Saccharomyces pastorianus
ggaaatcttttcttggcacgaaggt

SEQ ID NO: 95059 - DNA, 25 bp, Saccharomyces pastorianus
atggacaatatcaaagccgttcacg

SEQ ID NO: 95060 - DNA, 25 bp, Saccharomyces pastorianus
tttgagattcaagcctacctacaat

SEQ ID NO: 95061 - DNA, 25 bp, Saccharomyces pastorianus
gtaacgaagcagttgacgccaccca

SEQ ID NO: 95062 - DNA, 25 bp, Saccharomyces pastorianus
agcccaccagattgttttctatcga

SEQ ID NO: 95063 - DNA, 25 bp, Saccharomyces pastorianus
agaatgctgcacgatttggccaaag

SEQ ID NO: 95064 - DNA, 25 bp, Saccharomyces pastorianus
gattcgggtccatcggttatcgtta

SEQ ID NO: 95065 - DNA, 25 bp, Saccharomyces pastorianus
ttggtcttgagaactcactccacag

SEQ ID NO: 95066 - DNA, 25 bp, Saccharomyces pastorianus
gattgattccaagaccgagcgtatt

SEQ ID NO: 95067 - DNA, 25 bp, Saccharomyces pastorianus
ggccaattcaagagccaagaccaat

SEQ ID NO: 95068 - DNA, 25 bp, Saccharomyces pastorianus
atttaattccaagttcccacacatt

SEQ ID NO: 95069 - DNA, 25 bp, Saccharomyces pastorianus
gaaagaagccggcatcgactataaa

SEQ ID NO: 95070 - DNA, 25 bp, Saccharomyces pastorianus
agttttgctggttgctgttggtaga

SEQ ID NO: 95071 - DNA, 25 bp, Saccharomyces pastorianus
acattccttcggtcatgtattctca

SEQ ID NO: 95072 - DNA, 25 bp, Saccharomyces pastorianus
aactggtcacggtcatgtcaactat

SEQ ID NO: 95073 - DNA, 25 bp, Saccharomyces pastorianus
gccttagaatatggcgcttccgcag

SEQ ID NO: 95074 - DNA, 25 bp, Saccharomyces pastorianus
aagatgttgctagggtctgccatgc

SEQ ID NO: 95075 - DNA, 25 bp, Saccharomyces pastorianus
tggtaagttcccctttgcggccaat

SEQ ID NO: 95076 - DNA, 25 bp, Saccharomyces pastorianus
gattgctgaagctggcttagcctta

SEQ ID NO: 95077 - DNA, 25 bp, Saccharomyces pastorianus
ctgagacgctaaaggttttgaccac

SEQ ID NO: 95078 - DNA, 25 bp, Saccharomyces pastorianus
tgtggacaagcgcaccgagacgatt

SEQ ID NO: 95079 - DNA, 25 bp, Saccharomyces pastorianus
gtttgggcaagctcttgattgacca

SEQ ID NO: 95080 - DNA, 25 bp, Saccharomyces pastorianus
gttttgaccaccgtgggcactatta

SEQ ID NO: 95081 - DNA, 25 bp, Saccharomyces pastorianus
ctatcggctttgactacggttgtta

SEQ ID NO: 95082 - DNA, 25 bp, Saccharomyces pastorianus
tgaccaattggtaactatcggcttt

SEQ ID NO: 95083 - DNA, 25 bp, Saccharomyces pastorianus
cccgaatccttcagcaaactcataa

SEQ ID NO: 95084 - DNA, 25 bp, Saccharomyces pastorianus
ataaccccatggtgattgtggacaa

SEQ ID NO: 95085 - DNA, 25 bp, Saccharomyces pastorianus
atttggaacaggtcactgagacgct

SEQ ID NO: 95086 - DNA, 25 bp, Saccharomyces pastorianus
aactccaagtatcagggccaaggtt

SEQ ID NO: 95087 - DNA, 25 bp, Saccharomyces pastorianus
gaggacattgcagtaaactccaagt

SEQ ID NO: 95088 - DNA, 25 bp, Saccharomyces pastorianus
ttcgtgtcgacaaggatcccaactt

SEQ ID NO: 95089 - DNA, 25 bp, Saccharomyces pastorianus
tcataccctgacatcgctgtagagg

SEQ ID NO: 95090 - DNA, 25 bp, Saccharomyces pastorianus
agctgcacttggtggtactgtcact

SEQ ID NO: 95091 - DNA, 25 bp, Saccharomyces pastorianus
tactgtcactatccctactgtggag

SEQ ID NO: 95092 - DNA, 25 bp, Saccharomyces pastorianus
aaacatcaaccattcgcggtgatat

SEQ ID NO: 95093 - DNA, 25 bp, Saccharomyces pastorianus
acagccgcgggtacagccattaatg

SEQ ID NO: 95094 - DNA, 25 bp, Saccharomyces pastorianus
ggagattcctataaccacagctgca

SEQ ID NO: 95095 - DNA, 25 bp, Saccharomyces pastorianus
cacatggattacaggacggcgacgt

SEQ ID NO: 95096 - DNA, 25 bp, Saccharomyces pastorianus
gataaaggtcgctccagggactcaa

SEQ ID NO: 95097 - DNA, 25 bp, Saccharomyces pastorianus
ggcactggcagatgtcaccaacgat

SEQ ID NO: 95098 - DNA, 25 bp, Saccharomyces pastorianus
aagaaaccgcagtcgctggcagaaa

SEQ ID NO: 95099 - DNA, 25 bp, Saccharomyces pastorianus
gaatcttcttcacccatgacattga

SEQ ID NO: 95100 - DNA, 25 bp, Saccharomyces pastorianus
gactagatcacttttgacgcctacg

SEQ ID NO: 95101 - DNA, 25 bp, Saccharomyces pastorianus
atttcatgaaaaatctcggcgcttc

SEQ ID NO: 95102 - DNA, 25 bp, Saccharomyces pastorianus
agaagaagaaatcacctccgctgct

SEQ ID NO: 95103 - DNA, 25 bp, Saccharomyces pastorianus
gaatttgaagacatccccgtagcgt

SEQ ID NO: 95104 - DNA, 25 bp, Saccharomyces pastorianus
aatcccaggtgccaaacaggttgaa

SEQ ID NO: 95105 - DNA, 25 bp, Saccharomyces pastorianus
gtcagtgcttgggattcgcggtaaa

SEQ ID NO: 95106 - DNA, 25 bp, Saccharomyces pastorianus
aaagtaacgccagcagcaccaacag

SEQ ID NO: 95107 - DNA, 25 bp, Saccharomyces pastorianus
acctccgctgctatcattgacaaaa

SEQ ID NO: 95108 - DNA, 25 bp, Saccharomyces pastorianus
aaaagcccagtatcggtggtgacaa

SEQ ID NO: 95109 - DNA, 25 bp, Saccharomyces pastorianus
aagaggagtttctcgccgatttgaa

SEQ ID NO: 95110 - DNA, 25 bp, Saccharomyces pastorianus
gaattggatcgtatactctcttccc

SEQ ID NO: 95111 - DNA, 25 bp, Saccharomyces pastorianus
gtttccaataccatatcagcattca

SEQ ID NO: 95112 - DNA, 25 bp, Saccharomyces pastorianus
taacctgtttttcgttgtacacgat

SEQ ID NO: 95113 - DNA, 25 bp, Saccharomyces pastorianus
gtgatcccgattttacagattgcat

SEQ ID NO: 95114 - DNA, 25 bp, Saccharomyces pastorianus
gtttcgtcagaattgtcttctcgta

SEQ ID NO: 95115 - DNA, 25 bp, Saccharomyces pastorianus
tagagtgtcgcctttatttagcttt

SEQ ID NO: 95116 - DNA, 25 bp, Saccharomyces pastorianus
ttacttacttgtaccgttaccgcat

SEQ ID NO: 95117 - DNA, 25 bp, Saccharomyces pastorianus
ggagaatctgcttttgtttcgtcag

SEQ ID NO: 95118 - DNA, 25 bp, Saccharomyces pastorianus
actctcttccccatctttaattaga

SEQ ID NO: 95119 - DNA, 25 bp, Saccharomyces pastorianus
taccgcattcgagggtaacctgttt

SEQ ID NO: 95120 - DNA, 25 bp, Saccharomyces pastorianus
ttcattgggcgttctttacttactt

SEQ ID NO: 95121 - DNA, 25 bp, Saccharomyces pastorianus
tattgcccttcaaatgttcttgtag

SEQ ID NO: 95122 - DNA, 25 bp, Saccharomyces pastorianus
tggaactcgtatcacacattgtcat

SEQ ID NO: 95123 - DNA, 25 bp, Saccharomyces pastorianus
gagatcgaaatcctttcccatggaa

SEQ ID NO: 95124 - DNA, 25 bp, Saccharomyces pastorianus
gaagttcacctttccaaaatgatgg

SEQ ID NO: 95125 - DNA, 25 bp, Saccharomyces pastorianus
aactttctagcacagataggatacg

SEQ ID NO: 95126 - DNA, 25 bp, Saccharomyces pastorianus
aaaaaggaccattgcgtcttcctcg

SEQ ID NO: 95127 - DNA, 25 bp, Saccharomyces pastorianus
tcgtcagttttttatggaagttcac

SEQ ID NO: 95128 - DNA, 25 bp, Saccharomyces pastorianus
aaataaatcattcacctaccgcaac

SEQ ID NO: 95129 - DNA, 25 bp, Saccharomyces pastorianus
ttcacctaccgcaacaacggatgaa

SEQ ID NO: 95130 - DNA, 25 bp, Saccharomyces pastorianus
attgatgaggattattgcccttcaa

SEQ ID NO: 95131 - DNA, 25 bp, Saccharomyces pastorianus
gaaccagtttgtaacctcaagaagt

SEQ ID NO: 95132 - DNA, 25 bp, Saccharomyces pastorianus
gctcctatcgcctatgtcattgtgg

SEQ ID NO: 95133 - DNA, 25 bp, Saccharomyces pastorianus
gggctgttaattttgcttctacatt

SEQ ID NO: 95134 - DNA, 25 bp, Saccharomyces pastorianus
atggccattgcggttggtgcgaact

SEQ ID NO: 95135 - DNA, 25 bp, Saccharomyces pastorianus
catgggttgcttaatcttttcgtac

SEQ ID NO: 95136 - DNA, 25 bp, Saccharomyces pastorianus
gagttaaaaatcgtgccatggccat

SEQ ID NO: 95137 - DNA, 25 bp, Saccharomyces pastorianus
ccaccgttggcgtcactagattatg

SEQ ID NO: 95138 - DNA, 25 bp, Saccharomyces pastorianus
aaagaccaaccttcttcgcaaagtg

SEQ ID NO: 95139 - DNA, 25 bp, Saccharomyces pastorianus
tttcgagacttccattgtccttggg

SEQ ID NO: 95140 - DNA, 25 bp, Saccharomyces pastorianus
aatttgtttcgtcatattcgccacc

SEQ ID NO: 95141 - DNA, 25 bp, Saccharomyces pastorianus
cttgattggatttttcacacccttt

SEQ ID NO: 95142 - DNA, 25 bp, Saccharomyces pastorianus
gaagtccggaggttggattcccagt

SEQ ID NO: 95143 - DNA, 25 bp, Saccharomyces pastorianus
tttaacccgtcatttatcaccacca

SEQ ID NO: 95144 - DNA, 25 bp, Saccharomyces pastorianus
ataccattcatcgagtccagtgcta

SEQ ID NO: 95145 - DNA, 25 bp, Saccharomyces pastorianus
ataaagactgtcgatatcaacggta

SEQ ID NO: 95146 - DNA, 25 bp, Saccharomyces pastorianus
gcacagctactgttggttggtaaca

SEQ ID NO: 95147 - DNA, 25 bp, Saccharomyces pastorianus
tgtttctgcttcatccggtaatgga

SEQ ID NO: 95148 - DNA, 25 bp, Saccharomyces pastorianus
gcatgcgaacgatgaagcacagcta

SEQ ID NO: 95149 - DNA, 25 bp, Saccharomyces pastorianus
aacaagcttgttggcgtcggtaacg

SEQ ID NO: 95150 - DNA, 25 bp, Saccharomyces pastorianus
aagctgcaactttgggataccgctg

SEQ ID NO: 95151 - DNA, 25 bp, Saccharomyces pastorianus
taaaaccgttaatgagcatgcgaac

SEQ ID NO: 95152 - DNA, 25 bp, Saccharomyces pastorianus
gacgagagtggtaacagctgatcaa

SEQ ID NO: 95153 - DNA, 25 bp, Saccharomyces pastorianus
tccagtgctaagaacgatgacaatg

SEQ ID NO: 95154 - DNA, 25 bp, Saccharomyces pastorianus
gccattcttttcttagttggtcaat

SEQ ID NO: 95155 - DNA, 25 bp, Saccharomyces pastorianus
agttcgttgcatgatggccattctt

SEQ ID NO: 95156 - DNA, 25 bp, Saccharomyces pastorianus
agctcaaaaattcttcccctttctg

SEQ ID NO: 95157 - DNA, 25 bp, Saccharomyces pastorianus
gtgccggaaattgtcttgcgtctga

SEQ ID NO: 95158 - DNA, 25 bp, Saccharomyces pastorianus
tttaaagatgttttgcccacagcaa

SEQ ID NO: 95159 - DNA, 25 bp, Saccharomyces pastorianus
attgttttgatctcattggttcagc

SEQ ID NO: 95160 - DNA, 25 bp, Saccharomyces pastorianus
gaagcgttatggaacctgtcgaagt

SEQ ID NO: 95161 - DNA, 25 bp, Saccharomyces pastorianus
gctactgaagcattgacgttacact

SEQ ID NO: 95162 - DNA, 25 bp, Saccharomyces pastorianus
gttacactacgaacttaaggccgca

SEQ ID NO: 95163 - DNA, 25 bp, Saccharomyces pastorianus
tgagaaaacccctcaaaggcctgtt

SEQ ID NO: 95164 - DNA, 25 bp, Saccharomyces pastorianus
ggattggcaagaacctactgtagat

SEQ ID NO: 95165 - DNA, 25 bp, Saccharomyces pastorianus
attcattgctgataacgacactctg

SEQ ID NO: 95166 - DNA, 25 bp, Saccharomyces pastorianus
gtcttctgtcgcaaggactatacgt

SEQ ID NO: 95167 - DNA, 25 bp, Saccharomyces pastorianus
ctttggctagactttatggtgcgaa

SEQ ID NO: 95168 - DNA, 25 bp, Saccharomyces pastorianus
ggtgtttcaagattcacaagctagg

SEQ ID NO: 95169 - DNA, 25 bp, Saccharomyces pastorianus
gaaaaatctgcccagcgtaagcctt

SEQ ID NO: 95170 - DNA, 25 bp, Saccharomyces pastorianus
aactagcgaatgttcctcatcttac

SEQ ID NO: 95171 - DNA, 25 bp, Saccharomyces pastorianus
tcaatagagctatcgttccgggtgt

SEQ ID NO: 95172 - DNA, 25 bp, Saccharomyces pastorianus
agaagtcgcaccagaggtgtttcaa

SEQ ID NO: 95173 - DNA, 25 bp, Saccharomyces pastorianus
caagtacgacgatatagctgagagt

SEQ ID NO: 95174 - DNA, 25 bp, Saccharomyces pastorianus
ataacgacactctgactttaaaccg

SEQ ID NO: 95175 - DNA, 25 bp, Saccharomyces pastorianus
gaatattccaacactcaatagagct

SEQ ID NO: 95176 - DNA, 25 bp, Saccharomyces pastorianus
gatatttaagaatccgccgtccttt

SEQ ID NO: 95177 - DNA, 25 bp, Saccharomyces pastorianus
gaaccaggttgctactttaatcaat

SEQ ID NO: 95178 - DNA, 25 bp, Saccharomyces pastorianus
gggacgatttacatgcactgacaca

SEQ ID NO: 95179 - DNA, 25 bp, Saccharomyces pastorianus
aactggtattacttctgaccctgat

SEQ ID NO: 95180 - DNA, 25 bp, Saccharomyces pastorianus
aaacctggtgctaaatgggacgatt

SEQ ID NO: 95181 - DNA, 25 bp, Saccharomyces pastorianus
gaagatgatatccttgttaccaaag

SEQ ID NO: 95182 - DNA, 25 bp, Saccharomyces pastorianus
aagaagagcttcttgcgctttttat

SEQ ID NO: 95183 - DNA, 25 bp, Saccharomyces pastorianus
tatccccatggactagggcatatgt

SEQ ID NO: 95184 - DNA, 25 bp, Saccharomyces pastorianus
gtaacccaaactatgacgacccaga

SEQ ID NO: 95185 - DNA, 25 bp, Saccharomyces pastorianus
tacgaaaccgttcttgacatgcaaa

SEQ ID NO: 95186 - DNA, 25 bp, Saccharomyces pastorianus
gcactgacacacaaggtccttatta

SEQ ID NO: 95187 - DNA, 25 bp, Saccharomyces pastorianus
gttccaggatttaaccatgcactaa

SEQ ID NO: 95188 - DNA, 25 bp, Saccharomyces pastorianus
gacatagactatgaggccaccgaag

SEQ ID NO: 95189 - DNA, 25 bp, Saccharomyces pastorianus
taaattttactccacgtcaagcgtt

SEQ ID NO: 95190 - DNA, 25 bp, Saccharomyces pastorianus
aaattctagccaagacgtccctatg

SEQ ID NO: 95191 - DNA, 25 bp, Saccharomyces pastorianus
ttgcaatcagggttagtcacgacta

SEQ ID NO: 95192 - DNA, 25 bp, Saccharomyces pastorianus
gttcgccctcaacgtttgacagtaa

SEQ ID NO: 95193 - DNA, 25 bp, Saccharomyces pastorianus
gtaaggtctcctcacatcataaatt

SEQ ID NO: 95194 - DNA, 25 bp, Saccharomyces pastorianus
ggatggttttcacttatctcgcaga

SEQ ID NO: 95195 - DNA, 25 bp, Saccharomyces pastorianus
ttatctcgcagatgtctagacctat

SEQ ID NO: 95196 - DNA, 25 bp, Saccharomyces pastorianus
agacccaactccagatcagtactgt

SEQ ID NO: 95197 - DNA, 25 bp, Saccharomyces pastorianus
gatacgggagcacttcttgtttata

SEQ ID NO: 95198 - DNA, 25 bp, Saccharomyces pastorianus
tacattgtcgcccaattaagaggaa

SEQ ID NO: 95199 - DNA, 25 bp, Saccharomyces pastorianus
attgacagacatatctcacacttac

SEQ ID NO: 95200 - DNA, 25 bp, Saccharomyces pastorianus
gcagcaagtctatatgtctcctcaa

SEQ ID NO: 95201 - DNA, 25 bp, Saccharomyces pastorianus
gagcaactaagcaacaatctggatg

SEQ ID NO: 95202 - DNA, 25 bp, Saccharomyces pastorianus
tattgtcttactccgaagactcttt

SEQ ID NO: 95203 - DNA, 25 bp, Saccharomyces pastorianus
acatagacatattatccggaagctt

SEQ ID NO: 95204 - DNA, 25 bp, Saccharomyces pastorianus
aagcaggtaacccttgaatccatgg

SEQ ID NO: 95205 - DNA, 25 bp, Saccharomyces pastorianus
gagggaaagctcctattactgagaa

SEQ ID NO: 95206 - DNA, 25 bp, Saccharomyces pastorianus
gcgccaaaattcaatgctccggaaa

SEQ ID NO: 95207 - DNA, 25 bp, Saccharomyces pastorianus
gaagaacctcacgataccacggaaa

SEQ ID NO: 95208 - DNA, 25 bp, Saccharomyces pastorianus
gacggagacaattcccctcgaagat

SEQ ID NO: 95209 - DNA, 25 bp, Saccharomyces pastorianus
acgtgagtatgataaccaaatggtt

SEQ ID NO: 95210 - DNA, 25 bp, Saccharomyces pastorianus
attgcccgttttggagccacctgaa

SEQ ID NO: 95211 - DNA, 25 bp, Saccharomyces pastorianus
gcacttgcaagagtttattgacaaa

SEQ ID NO: 95212 - DNA, 25 bp, Saccharomyces pastorianus
gttttggagccacctgaacaagaca

SEQ ID NO: 95213 - DNA, 25 bp, Saccharomyces pastorianus
tggagccacctgaacaagacaaaac

SEQ ID NO: 95214 - DNA, 25 bp, Saccharomyces pastorianus
ccaattatccaattgcaagacgttt

SEQ ID NO: 95215 - DNA, 25 bp, Saccharomyces pastorianus
gaatgtgataaattgtctccaccaa

SEQ ID NO: 95216 - DNA, 25 bp, Saccharomyces pastorianus
aaattgcccgttttggagccacctg

SEQ ID NO: 95217 - DNA, 25 bp, Saccharomyces pastorianus
gtctccaccaattatccaattgcaa

SEQ ID NO: 95218 - DNA, 25 bp, Saccharomyces pastorianus
gccacctgaacaagacaaaaccatt

SEQ ID NO: 95219 - DNA, 25 bp, Saccharomyces pastorianus
attgtctccaccaattatccaattg

SEQ ID NO: 95220 - DNA, 25 bp, Saccharomyces pastorianus
ttcccatttcaattagatgttgcag

SEQ ID NO: 95221 - DNA, 25 bp, Saccharomyces pastorianus
atttgacccatcatccagtgaaaat

SEQ ID NO: 95222 - DNA, 25 bp, Saccharomyces pastorianus
gctttcataagggacgaactggacg

SEQ ID NO: 95223 - DNA, 25 bp, Saccharomyces pastorianus
actgttcagtacgttagatttttct

SEQ ID NO: 95224 - DNA, 25 bp, Saccharomyces pastorianus
ttaccccagaatacgcagcagagaa

SEQ ID NO: 95225 - DNA, 25 bp, Saccharomyces pastorianus
cgccaattccatctatagcgtcgaa

SEQ ID NO: 95226 - DNA, 25 bp, Saccharomyces pastorianus
atgttgcagacatgcttaccccaga

SEQ ID NO: 95227 - DNA, 25 bp, Saccharomyces pastorianus
taagaaacattttcctccaaacttg

SEQ ID NO: 95228 - DNA, 25 bp, Saccharomyces pastorianus
gagtctggacactatcaagctttca

SEQ ID NO: 95229 - DNA, 25 bp, Saccharomyces pastorianus
gacacaagtggctcttaacgaaagt

SEQ ID NO: 95230 - DNA, 25 bp, Saccharomyces pastorianus
aggtgaaaacccatcttgtgtttat

SEQ ID NO: 95231 - DNA, 25 bp, Saccharomyces pastorianus
aatggcttgcccttattggccaaaa

SEQ ID NO: 95232 - DNA, 25 bp, Saccharomyces pastorianus
tcttccatctcttcgtaacaattca

SEQ ID NO: 95233 - DNA, 25 bp, Saccharomyces pastorianus
acgagcttcttgaattcttccatct

SEQ ID NO: 95234 - DNA, 25 bp, Saccharomyces pastorianus
gcccttattggccaaaagacactca

SEQ ID NO: 95235 - DNA, 25 bp, Saccharomyces pastorianus
cccataacgagcttcttgaattctt

SEQ ID NO: 95236 - DNA, 25 bp, Saccharomyces pastorianus
aattcttccatctcttcgtaacaat

SEQ ID NO: 95237 - DNA, 25 bp, Saccharomyces pastorianus
tttgcctttatagaaatgctgccgt

SEQ ID NO: 95238 - DNA, 25 bp, Saccharomyces pastorianus
gaaatgctgccgttgtcggtttttt

SEQ ID NO: 95239 - DNA, 25 bp, Saccharomyces pastorianus
agacactcagtcaattttgccttta

SEQ ID NO: 95240 - DNA, 25 bp, Saccharomyces pastorianus
gtaacaattcaatggcttgccctta

SEQ ID NO: 95241 - DNA, 25 bp, Saccharomyces pastorianus
tcttgaattcttccatctcttcgta

SEQ ID NO: 95242 - DNA, 25 bp, Saccharomyces pastorianus
agacgacgacaaggatgccgttgat

SEQ ID NO: 95243 - DNA, 25 bp, Saccharomyces pastorianus
gtctttggtttctcaattggattca

SEQ ID NO: 95244 - DNA, 25 bp, Saccharomyces pastorianus
aaccgacaacggcagcatttctata

SEQ ID NO: 95245 - DNA, 25 bp, Saccharomyces pastorianus
gactatgtcaccaagcaaaatgcag

SEQ ID NO: 95246 - DNA, 25 bp, Saccharomyces pastorianus
gaaggtttcacaaaggctatctaac

SEQ ID NO: 95247 - DNA, 25 bp, Saccharomyces pastorianus
cacttccaaagtgggtgctggtgca

SEQ ID NO: 95248 - DNA, 25 bp, Saccharomyces pastorianus
aattcactattatcagacgacgaca

SEQ ID NO: 95249 - DNA, 25 bp, Saccharomyces pastorianus
gggcaagccattgaattgttacgaa

SEQ ID NO: 95250 - DNA, 25 bp, Saccharomyces pastorianus
ctgagtgtcttttggccaataaggg

SEQ ID NO: 95251 - DNA, 25 bp, Saccharomyces pastorianus
gatcgatttttcacagtctttggtt

SEQ ID NO: 95252 - DNA, 25 bp, Saccharomyces pastorianus
acaagtctatactccgctaacacag

SEQ ID NO: 95253 - DNA, 25 bp, Saccharomyces pastorianus
gagttcttggagttcttggactata

SEQ ID NO: 95254 - DNA, 25 bp, Saccharomyces pastorianus
gaagcgcgcatattggagcagaaat

SEQ ID NO: 95255 - DNA, 25 bp, Saccharomyces pastorianus
tccataaatacaaacccgctaccaa

SEQ ID NO: 95256 - DNA, 25 bp, Saccharomyces pastorianus
tggacaatcgatgagtgcccaattc

SEQ ID NO: 95257 - DNA, 25 bp, Saccharomyces pastorianus
tgttttaccatgacacaccatcgtt

SEQ ID NO: 95258 - DNA, 25 bp, Saccharomyces pastorianus
gaatacaacgcttttacactgtttg

SEQ ID NO: 95259 - DNA, 25 bp, Saccharomyces pastorianus
ctaccactgataataatccctccat

SEQ ID NO: 95260 - DNA, 25 bp, Saccharomyces pastorianus
tatgccacgattcagcaacactgct

SEQ ID NO: 95261 - DNA, 25 bp, Saccharomyces pastorianus
ttggcgcatgatgttgcacgaggca

SEQ ID NO: 95262 - DNA, 25 bp, Saccharomyces pastorianus
gcaacactgctggagttcttggagt

SEQ ID NO: 95263 - DNA, 25 bp, Saccharomyces pastorianus
tgacacaccatcgttggcgcatgat

SEQ ID NO: 95264 - DNA, 25 bp, Saccharomyces pastorianus
gatttccttgacgaatgcacaactg

SEQ ID NO: 95265 - DNA, 25 bp, Saccharomyces pastorianus
tgtagttctgatagcgatctccctg

SEQ ID NO: 95266 - DNA, 25 bp, Saccharomyces pastorianus
gacgcacaatttattgcctgggtta

SEQ ID NO: 95267 - DNA, 25 bp, Saccharomyces pastorianus
gatgctcgtcaaaagttccgtaatt

SEQ ID NO: 95268 - DNA, 25 bp, Saccharomyces pastorianus
gttaacacagtgcttgccgaaaagg

SEQ ID NO: 95269 - DNA, 25 bp, Saccharomyces pastorianus
gaagtccgagttaaccagcgaagct

SEQ ID NO: 95270 - DNA, 25 bp, Saccharomyces pastorianus
aacggttcagttcctccattgaaag

SEQ ID NO: 95271 - DNA, 25 bp, Saccharomyces pastorianus
tgggattccgtttccaataaagcaa

SEQ ID NO: 95272 - DNA, 25 bp, Saccharomyces pastorianus
gatccttcaaagagaccgaccaccg

SEQ ID NO: 95273 - DNA, 25 bp, Saccharomyces pastorianus
gaccaccgcagaactcttggaagat

SEQ ID NO: 95274 - DNA, 25 bp, Saccharomyces pastorianus
aaagcaacggataccagtcaactat

SEQ ID NO: 95275 - DNA, 25 bp, Saccharomyces pastorianus
gacgaaccgccctgtgcacaggaaa

SEQ ID NO: 95276 - DNA, 25 bp, Saccharomyces pastorianus
ctagtgtttctacattcaacctccc

SEQ ID NO: 95277 - DNA, 25 bp, Saccharomyces pastorianus
acggctctcgtccacagttgggcac

SEQ ID NO: 95278 - DNA, 25 bp, Saccharomyces pastorianus
aagtgtagacaagccagtccccatg

SEQ ID NO: 95279 - DNA, 25 bp, Saccharomyces pastorianus
gagcacgtcacccacatttgaaaga

SEQ ID NO: 95280 - DNA, 25 bp, Saccharomyces pastorianus
agacaagccagtccccatgattaga

SEQ ID NO: 95281 - DNA, 25 bp, Saccharomyces pastorianus
ttgaacacgccccaagtgagcacgt

SEQ ID NO: 95282 - DNA, 25 bp, Saccharomyces pastorianus
aagcgctcccgctcaaagtgtagac

SEQ ID NO: 95283 - DNA, 25 bp, Saccharomyces pastorianus
tttgaaagatcacaggacttcctca

SEQ ID NO: 95284 - DNA, 25 bp, Saccharomyces pastorianus
agtccccatgattagacggcggtct

SEQ ID NO: 95285 - DNA, 25 bp, Saccharomyces pastorianus
ctgtgcacaggaaacacctagtgtt

SEQ ID NO: 95286 - DNA, 25 bp, Saccharomyces pastorianus
tcatgctctgctcaacgaggcaatt

SEQ ID NO: 95287 - DNA, 25 bp, Saccharomyces pastorianus
cgaagatcttcctgatttgctgtca

SEQ ID NO: 95288 - DNA, 25 bp, Saccharomyces pastorianus
tttacctggtttgctggcgccaagt

SEQ ID NO: 95289 - DNA, 25 bp, Saccharomyces pastorianus
tgtatagatataccggaccgctcat

SEQ ID NO: 95290 - DNA, 25 bp, Saccharomyces pastorianus
atatattttttccatgtcgaccgtg

SEQ ID NO: 95291 - DNA, 25 bp, Saccharomyces pastorianus
tgatggttggaactcgcgtctttac

SEQ ID NO: 95292 - DNA, 25 bp, Saccharomyces pastorianus
gattcggactccacgttaattgaca

SEQ ID NO: 95293 - DNA, 25 bp, Saccharomyces pastorianus
gtactgatttgatgacacccgaaga

SEQ ID NO: 95294 - DNA, 25 bp, Saccharomyces pastorianus
tgggatattcctttcagtttcttga

SEQ ID NO: 95295 - DNA, 25 bp, Saccharomyces pastorianus
acagaaacgggctcggattcggact

SEQ ID NO: 95296 - DNA, 25 bp, Saccharomyces pastorianus
ggtaccgacggaatagctgtcccag

SEQ ID NO: 95297 - DNA, 25 bp, Saccharomyces pastorianus
gttactaaacgttccagcaccagag

SEQ ID NO: 95298 - DNA, 25 bp, Saccharomyces pastorianus
tataccaactagctttcattcctct

SEQ ID NO: 95299 - DNA, 25 bp, Saccharomyces pastorianus
tgttttactttcaagatccccagcc

SEQ ID NO: 95300 - DNA, 25 bp, Saccharomyces pastorianus
tgccctcgggcttaaattatccaga

SEQ ID NO: 95301 - DNA, 25 bp, Saccharomyces pastorianus
ctcagagtactcttggtcccaatgg

SEQ ID NO: 95302 - DNA, 25 bp, Saccharomyces pastorianus
ctgcttcccctatttccataattaa

SEQ ID NO: 95303 - DNA, 25 bp, Saccharomyces pastorianus
agatcgctatctccgttactaaacg

SEQ ID NO: 95304 - DNA, 25 bp, Saccharomyces pastorianus
gagggctacttctttagctgggttt

SEQ ID NO: 95305 - DNA, 25 bp, Saccharomyces pastorianus
tacattccaggaactcttcgacaac

SEQ ID NO: 95306 - DNA, 25 bp, Saccharomyces pastorianus
atgaagtattaccagtgccctcggg

SEQ ID NO: 95307 - DNA, 25 bp, Saccharomyces pastorianus
tggctctgtgccaggagtacatagt

SEQ ID NO: 95308 - DNA, 25 bp, Saccharomyces pastorianus
gtccgcattaagaaagggcctcgag

SEQ ID NO: 95309 - DNA, 25 bp, Saccharomyces pastorianus
agattttcttctgtcttacttccaa

SEQ ID NO: 95310 - DNA, 25 bp, Saccharomyces pastorianus
gggatcgctattgatttcgaccaac

SEQ ID NO: 95311 - DNA, 25 bp, Saccharomyces pastorianus
tgtagcttcactggacgtcatcagt

SEQ ID NO: 95312 - DNA, 25 bp, Saccharomyces pastorianus
ggtacaattcattgcattccttcaa

SEQ ID NO: 95313 - DNA, 25 bp, Saccharomyces pastorianus
gaaaccggagttcctgtagcttcac

SEQ ID NO: 95314 - DNA, 25 bp, Saccharomyces pastorianus
gttcggtccatcacgtcaacgggat

SEQ ID NO: 95315 - DNA, 25 bp, Saccharomyces pastorianus
gtgggtcacttcgacctttacaaat

SEQ ID NO: 95316 - DNA, 25 bp, Saccharomyces pastorianus
atttttgcccaatgacatgctagta

SEQ ID NO: 95317 - DNA, 25 bp, Saccharomyces pastorianus
gagtacatttgctaccttgaggaaa

SEQ ID NO: 95318 - DNA, 25 bp, Saccharomyces pastorianus
tatagactcctatggcggcgcaatt

SEQ ID NO: 95319 - DNA, 25 bp, Saccharomyces pastorianus
actggctagcaaatacaacggcatt

SEQ ID NO: 95320 - DNA, 25 bp, Saccharomyces pastorianus
gatcgacagggacaataacgccatt

SEQ ID NO: 95321 - DNA, 25 bp, Saccharomyces pastorianus
gttattcctaggtaccaggtagcat

SEQ ID NO: 95322 - DNA, 25 bp, Saccharomyces pastorianus
ggtaaaacatctagtcgtggacgat

SEQ ID NO: 95323 - DNA, 25 bp, Saccharomyces pastorianus
aagtcgaatggtgaagtccgagcca

SEQ ID NO: 95324 - DNA, 25 bp, Saccharomyces pastorianus
aaacaacgagctgaatgcgccacac

SEQ ID NO: 95325 - DNA, 25 bp, Saccharomyces pastorianus
aggtagcatggtcgcaacccacaga

SEQ ID NO: 95326 - DNA, 25 bp, Saccharomyces pastorianus
agtatacaccgagcgaaaccattca

SEQ ID NO: 95327 - DNA, 25 bp, Saccharomyces pastorianus
gacagtgcatctatcaagatcgaca

SEQ ID NO: 95328 - DNA, 25 bp, Saccharomyces pastorianus
aaagtagtccgtctattacccatca

SEQ ID NO: 95329 - DNA, 25 bp, Saccharomyces pastorianus
gccattgaactcgtcacctttgaaa

SEQ ID NO: 95330 - DNA, 25 bp, Saccharomyces pastorianus
gaccgcaacggatcagtttacatca

SEQ ID NO: 95331 - DNA, 25 bp, Saccharomyces pastorianus
aagactttgcatatggcttgcccca

SEQ ID NO: 95332 - DNA, 25 bp, Saccharomyces pastorianus
gtggcacaaccatccatgcttataa

SEQ ID NO: 95333 - DNA, 25 bp, Saccharomyces pastorianus
cggtccatagacacttccttagaat

SEQ ID NO: 95334 - DNA, 25 bp, Saccharomyces pastorianus
attcaattcatctccactggtcata

SEQ ID NO: 95335 - DNA, 25 bp, Saccharomyces pastorianus
aagaaacgacgcaattgccttcctc

SEQ ID NO: 95336 - DNA, 25 bp, Saccharomyces pastorianus
ggacaatcctcgttgaaaccgtggc

SEQ ID NO: 95337 - DNA, 25 bp, Saccharomyces pastorianus
aagtatctgacatgttcgaccgcgc

SEQ ID NO: 95338 - DNA, 25 bp, Saccharomyces pastorianus
atcagctactttgcggtttaaccca

SEQ ID NO: 95339 - DNA, 25 bp, Saccharomyces pastorianus
gggcaacaagctttatattctcgac

SEQ ID NO: 95340 - DNA, 25 bp, Saccharomyces pastorianus
gagtcgcggttcttgatcatatctt

SEQ ID NO: 95341 - DNA, 25 bp, Saccharomyces pastorianus
taggtactggtttggcaccattcaa

SEQ ID NO: 95342 - DNA, 25 bp, Saccharomyces pastorianus
tgaaattaccaccatctccaaagca

SEQ ID NO: 95343 - DNA, 25 bp, Saccharomyces pastorianus
ggttcagaattggtcgttagcgtta

SEQ ID NO: 95344 - DNA, 25 bp, Saccharomyces pastorianus
tatcggcgctgctttctcaagagac

SEQ ID NO: 95345 - DNA, 25 bp, Saccharomyces pastorianus
gtcgttagcgttaaaccatctgtta

SEQ ID NO: 95346 - DNA, 25 bp, Saccharomyces pastorianus
tcaaagtcgacttggatgccgcaat

SEQ ID NO: 95347 - DNA, 25 bp, Saccharomyces pastorianus
tcagaccttgctgtcggttcagaat

SEQ ID NO: 95348 - DNA, 25 bp, Saccharomyces pastorianus
gtattatcacacatatcggcgctgc

SEQ ID NO: 95349 - DNA, 25 bp, Saccharomyces pastorianus
gaagtcttcctatatctaggttcaa

SEQ ID NO: 95350 - DNA, 25 bp, Saccharomyces pastorianus
ggttcattttacttgtgtggcccta

SEQ ID NO: 95351 - DNA, 25 bp, Saccharomyces pastorianus
gacattctggctaaagacgccgagg

SEQ ID NO: 95352 - DNA, 25 bp, Saccharomyces pastorianus
ggacaacttaaccaatgcgcgcgac

SEQ ID NO: 95353 - DNA, 25 bp, Saccharomyces pastorianus
agactctactccagacacggatgta

SEQ ID NO: 95354 - DNA, 25 bp, Saccharomyces pastorianus
ctctactcgcctcaagaaatctgga

SEQ ID NO: 95355 - DNA, 25 bp, Saccharomyces pastorianus
gatacggtttactgtcacgacctgc

SEQ ID NO: 95356 - DNA, 25 bp, Saccharomyces pastorianus
gacagtgtggccaagacagctactt

SEQ ID NO: 95357 - DNA, 25 bp, Saccharomyces pastorianus
gaagacaccagagactgccgcggat

SEQ ID NO: 95358 - DNA, 25 bp, Saccharomyces pastorianus
tagtgaagcccgcttacgtctctaa

SEQ ID NO: 95359 - DNA, 25 bp, Saccharomyces pastorianus
aaattactgccgctttggtcacttt

SEQ ID NO: 95360 - DNA, 25 bp, Saccharomyces pastorianus
aagttacacgttccttacgaggcag

SEQ ID NO: 95361 - DNA, 25 bp, Saccharomyces pastorianus
gtgagatccgtgagttgttccagct

SEQ ID NO: 95362 - DNA, 25 bp, Saccharomyces pastorianus
gaaagtgtattccttttgcaccaca

SEQ ID NO: 95363 - DNA, 25 bp, Saccharomyces pastorianus
gctaagtctaagaaccataccgctc

SEQ ID NO: 95364 - DNA, 25 bp, Saccharomyces pastorianus
agtctaagaaccataccgctcacaa

SEQ ID NO: 95365 - DNA, 25 bp, Saccharomyces pastorianus
ggctcacagaaacggtatcaagaag

SEQ ID NO: 95366 - DNA, 25 bp, Saccharomyces pastorianus
tcaagaagccaaagacctacaagta

SEQ ID NO: 95367 - DNA, 25 bp, Saccharomyces pastorianus
cggtatcaagaagccaaagacctac

SEQ ID NO: 95368 - DNA, 25 bp, Saccharomyces pastorianus
aagtctaagaaccataccgctcaca

SEQ ID NO: 95369 - DNA, 25 bp, Saccharomyces pastorianus
taagtctaagaaccataccgctcac

SEQ ID NO: 95370 - DNA, 25 bp, Saccharomyces pastorianus
aaggctcacagaaacggtatcaaga

SEQ ID NO: 95371 - DNA, 25 bp, Saccharomyces pastorianus
gaaacggtatcaagaagccaaagac

SEQ ID NO: 95372 - DNA, 25 bp, Saccharomyces pastorianus
taagaaccataccgctcacaaccaa

SEQ ID NO: 95373 - DNA, 25 bp, Saccharomyces pastorianus
gtctaagaaccataccgctcacaac

SEQ ID NO: 95374 - DNA, 25 bp, Saccharomyces pastorianus
atgtaggaagtctaccattttccct

SEQ ID NO: 95375 - DNA, 25 bp, Saccharomyces pastorianus
cattttccctttaggctttgccata

SEQ ID NO: 95376 - DNA, 25 bp, Saccharomyces pastorianus
atattatcatgaagtccccatttcg

SEQ ID NO: 95377 - DNA, 25 bp, Saccharomyces pastorianus
tcgctagccgcgctcgggaaaacca

SEQ ID NO: 95378 - DNA, 25 bp, Saccharomyces pastorianus
ttcaatattcaagaaccccggaaca

SEQ ID NO: 95379 - DNA, 25 bp, Saccharomyces pastorianus
ctggatacatacaatttcagaatat

SEQ ID NO: 95380 - DNA, 25 bp, Saccharomyces pastorianus
gccgcgctcgggaaaaccagcgata

SEQ ID NO: 95381 - DNA, 25 bp, Saccharomyces pastorianus
ggctttgccataatctctggataca

SEQ ID NO: 95382 - DNA, 25 bp, Saccharomyces pastorianus
actgcatatttcaagattcaaccca

SEQ ID NO: 95383 - DNA, 25 bp, Saccharomyces pastorianus
aaccagcgatattctcaatgtagga

SEQ ID NO: 95384 - DNA, 25 bp, Saccharomyces pastorianus
caagattcaacccattattttataa

SEQ ID NO: 95385 - DNA, 25 bp, Saccharomyces pastorianus
gaactagttggtgagtactgggaac

SEQ ID NO: 95386 - DNA, 25 bp, Saccharomyces pastorianus
tggccgcggccgaagatgacgataa

SEQ ID NO: 95387 - DNA, 25 bp, Saccharomyces pastorianus
gatacagcaacaacaacccggctac

SEQ ID NO: 95388 - DNA, 25 bp, Saccharomyces pastorianus
gatgacgataacgagcagcatgaag

SEQ ID NO: 95389 - DNA, 25 bp, Saccharomyces pastorianus
ccttgtgcaccactacgaggagtgt

SEQ ID NO: 95390 - DNA, 25 bp, Saccharomyces pastorianus
catttcaagaacacggaggagggta

SEQ ID NO: 95391 - DNA, 25 bp, Saccharomyces pastorianus
agataaccgttgtgcctgttgtggc

SEQ ID NO: 95392 - DNA, 25 bp, Saccharomyces pastorianus
gagtttttccatctacagcactatt

SEQ ID NO: 95393 - DNA, 25 bp, Saccharomyces pastorianus
agggtaaggcccttgtgcaccacta

SEQ ID NO: 95394 - DNA, 25 bp, Saccharomyces pastorianus
acagcactatttggacactaccacg

SEQ ID NO: 95395 - DNA, 25 bp, Saccharomyces pastorianus
cggctacgcggatcttgaacacaag

SEQ ID NO: 95396 - DNA, 25 bp, Saccharomyces pastorianus
ttatattcgccgctaatacacacgc

SEQ ID NO: 95397 - DNA, 25 bp, Saccharomyces pastorianus
gcaaagtgcggttcccgtaaccatt

SEQ ID NO: 95398 - DNA, 25 bp, Saccharomyces pastorianus
atttcgccgaacttggtcgctactg

SEQ ID NO: 95399 - DNA, 25 bp, Saccharomyces pastorianus
aacagcaaaatgtgtcggccgcgcc

SEQ ID NO: 95400 - DNA, 25 bp, Saccharomyces pastorianus
gaattgcccgacagcgttatcccaa

SEQ ID NO: 95401 - DNA, 25 bp, Saccharomyces pastorianus
agcgcgaatcacacaagcatgcaga

SEQ ID NO: 95402 - DNA, 25 bp, Saccharomyces pastorianus
gttattctgccgtcgaacagcacaa

SEQ ID NO: 95403 - DNA, 25 bp, Saccharomyces pastorianus
ggtcgtagcaagtgagtctcctgta

SEQ ID NO: 95404 - DNA, 25 bp, Saccharomyces pastorianus
actgctacaatcaagccgcggctat

SEQ ID NO: 95405 - DNA, 25 bp, Saccharomyces pastorianus
ggcgtaatcgattagcggtcgcgct

SEQ ID NO: 95406 - DNA, 25 bp, Saccharomyces pastorianus
gcgctgcacgaactggcgtctttaa

SEQ ID NO: 95407 - DNA, 25 bp, Saccharomyces pastorianus
ctaccacatattaggcgaggcaaaa

SEQ ID NO: 95408 - DNA, 25 bp, Saccharomyces pastorianus
atttgccaaatatttccgtgcgagc

SEQ ID NO: 95409 - DNA, 25 bp, Saccharomyces pastorianus
acaccgtacgcaaagaaggcaaggc

SEQ ID NO: 95410 - DNA, 25 bp, Saccharomyces pastorianus
tatggtcaagactcatttgccaaat

SEQ ID NO: 95411 - DNA, 25 bp, Saccharomyces pastorianus
ataggaaatacttgcacacagacat

SEQ ID NO: 95412 - DNA, 25 bp, Saccharomyces pastorianus
agcctttcgcctaccacatattagg

SEQ ID NO: 95413 - DNA, 25 bp, Saccharomyces pastorianus
aaatatttccgtgcgagcggccggg

SEQ ID NO: 95414 - DNA, 25 bp, Saccharomyces pastorianus
atacatttttctatggtcaagactc

SEQ ID NO: 95415 - DNA, 25 bp, Saccharomyces pastorianus
atgacttcttccctggttatataca

SEQ ID NO: 95416 - DNA, 25 bp, Saccharomyces pastorianus
atacacatacacaccgtacgcaaag

SEQ ID NO: 95417 - DNA, 25 bp, Saccharomyces pastorianus
gaaaatcgcacttgcagcataggaa

SEQ ID NO: 95418 - DNA, 25 bp, Saccharomyces pastorianus
gtatgtctgtgtgcaagtatttcct

SEQ ID NO: 95419 - DNA, 25 bp, Saccharomyces pastorianus
aagctttcttgaacactttctcgaa

SEQ ID NO: 95420 - DNA, 25 bp, Saccharomyces pastorianus
tgctgcaagtgcgattttctcgttt

SEQ ID NO: 95421 - DNA, 25 bp, Saccharomyces pastorianus
caagtatttcctatgctgcaagtgc

SEQ ID NO: 95422 - DNA, 25 bp, Saccharomyces pastorianus
ggcgccgtaggtacgttcatttcta

SEQ ID NO: 95423 - DNA, 25 bp, Saccharomyces pastorianus
gaaccacaactttcgtaatcacacc

SEQ ID NO: 95424 - DNA, 25 bp, Saccharomyces pastorianus
gtgccaattccctgtgtaaagcttt

SEQ ID NO: 95425 - DNA, 25 bp, Saccharomyces pastorianus
acccgccttccgtgagagagacgat

SEQ ID NO: 95426 - DNA, 25 bp, Saccharomyces pastorianus
tcatttctacgttcccacagttttt

SEQ ID NO: 95427 - DNA, 25 bp, Saccharomyces pastorianus
atgagcaggacatcgcgaaccacaa

SEQ ID NO: 95428 - DNA, 25 bp, Saccharomyces pastorianus
ccttctttgcgtacggtgtgtatgt

SEQ ID NO: 95429 - DNA, 25 bp, Saccharomyces pastorianus
gtagcgcacaccagagtcctcaatt

SEQ ID NO: 95430 - DNA, 25 bp, Saccharomyces pastorianus
aaaaatggcggatcgctgcactcca

SEQ ID NO: 95431 - DNA, 25 bp, Saccharomyces pastorianus
ttgcatctgtccaccgacagcaata

SEQ ID NO: 95432 - DNA, 25 bp, Saccharomyces pastorianus
atcgctgcactccaatacagacttt

SEQ ID NO: 95433 - DNA, 25 bp, Saccharomyces pastorianus
tgacgacatgtcatcttacaacgac

SEQ ID NO: 95434 - DNA, 25 bp, Saccharomyces pastorianus
ttgcagctcagtcacgacgacgtaa

SEQ ID NO: 95435 - DNA, 25 bp, Saccharomyces pastorianus
gcccacgagacgtccaatgcaaacg

SEQ ID NO: 95436 - DNA, 25 bp, Saccharomyces pastorianus
gacaaagcagcctcggtagcgcaca

SEQ ID NO: 95437 - DNA, 25 bp, Saccharomyces pastorianus
agagtcctcaattccttgcatctgt

SEQ ID NO: 95438 - DNA, 25 bp, Saccharomyces pastorianus
taacctctctgatcgatgacctgaa

SEQ ID NO: 95439 - DNA, 25 bp, Saccharomyces pastorianus
acagactttcaggacacatcgcaga

SEQ ID NO: 95440 - DNA, 25 bp, Saccharomyces pastorianus
gtaggcgaaggcgactccattgcaa

SEQ ID NO: 95441 - DNA, 25 bp, Saccharomyces pastorianus
gacgctactgcaaggcgacgacaaa

SEQ ID NO: 95442 - DNA, 25 bp, Saccharomyces pastorianus
cgacagccgcgatggtagtgtgtcc

SEQ ID NO: 95443 - DNA, 25 bp, Saccharomyces pastorianus
caagtttacaaagctgtgcgatcta

SEQ ID NO: 95444 - DNA, 25 bp, Saccharomyces pastorianus
gaatgatgctgtccagacgctactg

SEQ ID NO: 95445 - DNA, 25 bp, Saccharomyces pastorianus
gattcttgacctgaacaagtcgctg

SEQ ID NO: 95446 - DNA, 25 bp, Saccharomyces pastorianus
gtagtgtgtccggttcgaagttgat

SEQ ID NO: 95447 - DNA, 25 bp, Saccharomyces pastorianus
aaaattcctaagcttaccgatcgag

SEQ ID NO: 95448 - DNA, 25 bp, Saccharomyces pastorianus
gaagacggcaatacggccacaggac

SEQ ID NO: 95449 - DNA, 25 bp, Saccharomyces pastorianus
tagactcgggcatacaactagtgga

SEQ ID NO: 95450 - DNA, 25 bp, Saccharomyces pastorianus
gatgctgaacgaccgattatcactg

SEQ ID NO: 95451 - DNA, 25 bp, Saccharomyces pastorianus
attctaccccgactttggacataat

SEQ ID NO: 95452 - DNA, 25 bp, Saccharomyces pastorianus
cagggtggttttactagcatacttc

SEQ ID NO: 95453 - DNA, 25 bp, Saccharomyces pastorianus
ggttgcttagattccacgggttcaa

SEQ ID NO: 95454 - DNA, 25 bp, Saccharomyces pastorianus
atgagcatgcattgatcctgaagaa

SEQ ID NO: 95455 - DNA, 25 bp, Saccharomyces pastorianus
ttacgttgccaattctctacctgag

SEQ ID NO: 95456 - DNA, 25 bp, Saccharomyces pastorianus
gctgcattattgatacggtggctga

SEQ ID NO: 95457 - DNA, 25 bp, Saccharomyces pastorianus
taccgggaggaatccacgaattctt

SEQ ID NO: 95458 - DNA, 25 bp, Saccharomyces pastorianus
tttccttatctttatcacaggcata

SEQ ID NO: 95459 - DNA, 25 bp, Saccharomyces pastorianus
taatgccactggtagggtctcggtt

SEQ ID NO: 95460 - DNA, 25 bp, Saccharomyces pastorianus
tagtcagcgtgatccatttttatga

SEQ ID NO: 95461 - DNA, 25 bp, Saccharomyces pastorianus
gccacaagctttttgtatgctgcat

SEQ ID NO: 95462 - DNA, 25 bp, Saccharomyces pastorianus
ggacatccggcaaacaaaacctcaa

SEQ ID NO: 95463 - DNA, 25 bp, Saccharomyces pastorianus
ggagcaatgcctttacaaacgtcat

SEQ ID NO: 95464 - DNA, 25 bp, Saccharomyces pastorianus
aatactttcgttgtgttggtcaatg

SEQ ID NO: 95465 - DNA, 25 bp, Saccharomyces pastorianus
attcctaatgaaatgcccctcgaac

SEQ ID NO: 95466 - DNA, 25 bp, Saccharomyces pastorianus
gaaccgcttagaaatgtcatggcag

SEQ ID NO: 95467 - DNA, 25 bp, Saccharomyces pastorianus
ataacgcctgaatgtgaaccgctta

SEQ ID NO: 95468 - DNA, 25 bp, Saccharomyces pastorianus
ggagattatagatacccacgactgg

SEQ ID NO: 95469 - DNA, 25 bp, Saccharomyces pastorianus
tgtttcattgctctagcacgggcat

SEQ ID NO: 95470 - DNA, 25 bp, Saccharomyces pastorianus
gatagctgcccatcgaaatactttc

SEQ ID NO: 95471 - DNA, 25 bp, Saccharomyces pastorianus
gaactgctgcaccaattcatgatag

SEQ ID NO: 95472 - DNA, 25 bp, Saccharomyces pastorianus
aattgtgaagttctaccggctacta

SEQ ID NO: 95473 - DNA, 25 bp, Saccharomyces pastorianus
aacgcccaatttactgctgctaaaa

SEQ ID NO: 95474 - DNA, 25 bp, Saccharomyces pastorianus
gaggtatccttcgttgtccattcat

SEQ ID NO: 95475 - DNA, 25 bp, Saccharomyces pastorianus
aactggtctatggtgtcgatcctga

SEQ ID NO: 95476 - DNA, 25 bp, Saccharomyces pastorianus
tcaagtccttgaactctccaaacaa

SEQ ID NO: 95477 - DNA, 25 bp, Saccharomyces pastorianus
gtcattccagctaaggtcttcggta

SEQ ID NO: 95478 - DNA, 25 bp, Saccharomyces pastorianus
gaaactgacctctttggtgcagaag

SEQ ID NO: 95479 - DNA, 25 bp, Saccharomyces pastorianus
aacactagtgtcttattgctgccaa

SEQ ID NO: 95480 - DNA, 25 bp, Saccharomyces pastorianus
actttgactttccaagatgccttga

SEQ ID NO: 95481 - DNA, 25 bp, Saccharomyces pastorianus
attgggtttctgatccattcaacgc

SEQ ID NO: 95482 - DNA, 25 bp, Saccharomyces pastorianus
gaaggtggttccattcctatcactt

SEQ ID NO: 95483 - DNA, 25 bp, Saccharomyces pastorianus
gaattgaacgctgcaactggctcta

SEQ ID NO: 95484 - DNA, 25 bp, Saccharomyces pastorianus
gactcagcccattgacgtcgtaaaa

SEQ ID NO: 95485 - DNA, 25 bp, Saccharomyces pastorianus
gtatcgagaaactacttccagcggt

SEQ ID NO: 95486 - DNA, 25 bp, Saccharomyces pastorianus
ggttagccacatcttttacactcgt

SEQ ID NO: 95487 - DNA, 25 bp, Saccharomyces pastorianus
gaaggcatggccacattctggaagg

SEQ ID NO: 95488 - DNA, 25 bp, Saccharomyces pastorianus
atgtggcgactaaatctactcctgt

SEQ ID NO: 95489 - DNA, 25 bp, Saccharomyces pastorianus
aaaggcaacctttcacaatgtggcg

SEQ ID NO: 95490 - DNA, 25 bp, Saccharomyces pastorianus
aggaggcttaacgttcactgtttat

SEQ ID NO: 95491 - DNA, 25 bp, Saccharomyces pastorianus
atgtatcaaacaagaggccctgctg

SEQ ID NO: 95492 - DNA, 25 bp, Saccharomyces pastorianus
tgctgcgttcgtccagggaacaaca

SEQ ID NO: 95493 - DNA, 25 bp, Saccharomyces pastorianus
ggaagggctccatctttaggtttat

SEQ ID NO: 95494 - DNA, 25 bp, Saccharomyces pastorianus
ctactcctgtggctcgtatcgagaa

SEQ ID NO: 95495 - DNA, 25 bp, Saccharomyces pastorianus
gatgatatgtttgagctcgcgcacg

SEQ ID NO: 95496 - DNA, 25 bp, Saccharomyces pastorianus
ttgccgaaacaaacgtggtctacta

SEQ ID NO: 95497 - DNA, 25 bp, Saccharomyces pastorianus
acgtgatccggtaccaatttccata

SEQ ID NO: 95498 - DNA, 25 bp, Saccharomyces pastorianus
aatgtccctgcggtgagacgttctt

SEQ ID NO: 95499 - DNA, 25 bp, Saccharomyces pastorianus
gcacgaattgcttcccttagaactt

SEQ ID NO: 95500 - DNA, 25 bp, Saccharomyces pastorianus
gatcctatccgtttaaatgtccctg

SEQ ID NO: 95501 - DNA, 25 bp, Saccharomyces pastorianus
tctatggaagttttgcgcacgtcgc

SEQ ID NO: 95502 - DNA, 25 bp, Saccharomyces pastorianus
agatgttcccacgataggacacgag

SEQ ID NO: 95503 - DNA, 25 bp, Saccharomyces pastorianus
gaattgacagtgcactctccagata

SEQ ID NO: 95504 - DNA, 25 bp, Saccharomyces pastorianus
agatgaaccgccagtacgtgatccg

SEQ ID NO: 95505 - DNA, 25 bp, Saccharomyces pastorianus
gacgttcttctataaaaccgctgca

SEQ ID NO: 95506 - DNA, 25 bp, Saccharomyces pastorianus
gtagcattcatcaaggcacaccagt

SEQ ID NO: 95507 - DNA, 25 bp, Saccharomyces pastorianus
gataatcagtttggcgcgttcgact

SEQ ID NO: 95508 - DNA, 25 bp, Saccharomyces pastorianus
ttgccaccgcctcacataagataat

SEQ ID NO: 95509 - DNA, 25 bp, Saccharomyces pastorianus
aacgcagttaagaacgccagggccg

SEQ ID NO: 95510 - DNA, 25 bp, Saccharomyces pastorianus
attccatgcttgtaggtggctgcga

SEQ ID NO: 95511 - DNA, 25 bp, Saccharomyces pastorianus
aaccgccttgaacatccttagtaga

SEQ ID NO: 95512 - DNA, 25 bp, Saccharomyces pastorianus
aaatgtgcgcccaaagtcttaagaa

SEQ ID NO: 95513 - DNA, 25 bp, Saccharomyces pastorianus
tgcgacacgcacagatacgaccttt

SEQ ID NO: 95514 - DNA, 25 bp, Saccharomyces pastorianus
atatttgggctactggttctataac

SEQ ID NO: 95515 - DNA, 25 bp, Saccharomyces pastorianus
aagctggtgcagacgttatcatgtt

SEQ ID NO: 95516 - DNA, 25 bp, Saccharomyces pastorianus
ttactgggcccgctaaaaacattct

SEQ ID NO: 95517 - DNA, 25 bp, Saccharomyces pastorianus
cacattacgttcaggtgaccacatt

SEQ ID NO: 95518 - DNA, 25 bp, Saccharomyces pastorianus
agcattatatggtacccttgggtta

SEQ ID NO: 95519 - DNA, 25 bp, Saccharomyces pastorianus
atatgcgttgactctgttgctgaaa

SEQ ID NO: 95520 - DNA, 25 bp, Saccharomyces pastorianus
gtcgttcgaaccaagtttgcatcca

SEQ ID NO: 95521 - DNA, 25 bp, Saccharomyces pastorianus
tccggccgctggatgaacaggatat

SEQ ID NO: 95522 - DNA, 25 bp, Saccharomyces pastorianus
gaccacattatcgagctgacactat

SEQ ID NO: 95523 - DNA, 25 bp, Saccharomyces pastorianus
ggataccgagagaccgagaattttc

SEQ ID NO: 95524 - DNA, 25 bp, Saccharomyces pastorianus
aagaatttaatgatccggccgctgg

SEQ ID NO: 95525 - DNA, 25 bp, Saccharomyces pastorianus
gattgcgcaatcttcgaaattatca

SEQ ID NO: 95526 - DNA, 25 bp, Saccharomyces pastorianus
ccaccatattggatacacccgagtt

SEQ ID NO: 95527 - DNA, 25 bp, Saccharomyces pastorianus
ggtttgaatccagaatttcgccgat

SEQ ID NO: 95528 - DNA, 25 bp, Saccharomyces pastorianus
gagctacctgctaggtttcggtaca

SEQ ID NO: 95529 - DNA, 25 bp, Saccharomyces pastorianus
caacggaatgttacctggcagcaaa

SEQ ID NO: 95530 - DNA, 25 bp, Saccharomyces pastorianus
ttcatccttgcgctaccaacggaat

SEQ ID NO: 95531 - DNA, 25 bp, Saccharomyces pastorianus
gcaactgaggtcgttgttcatcctt

SEQ ID NO: 95532 - DNA, 25 bp, Saccharomyces pastorianus
gctcgtcaaagacctctgtattcgt

SEQ ID NO: 95533 - DNA, 25 bp, Saccharomyces pastorianus
aaaccattccgtgtagtgccaataa

SEQ ID NO: 95534 - DNA, 25 bp, Saccharomyces pastorianus
gtattcgttaacaggccattgcaaa

SEQ ID NO: 95535 - DNA, 25 bp, Saccharomyces pastorianus
catagcgctaatgctggtctcagct

SEQ ID NO: 95536 - DNA, 25 bp, Saccharomyces pastorianus
gatgagcttgcttccattttcgagc

SEQ ID NO: 95537 - DNA, 25 bp, Saccharomyces pastorianus
aattcgtcggtacaaggcatccctt

SEQ ID NO: 95538 - DNA, 25 bp, Saccharomyces pastorianus
atcccttagtgaagcatgcaactga

SEQ ID NO: 95539 - DNA, 25 bp, Saccharomyces pastorianus
aggcttattcccgtgggtgataaca

SEQ ID NO: 95540 - DNA, 25 bp, Saccharomyces pastorianus
aggttcatatggctctcttctaaga

SEQ ID NO: 95541 - DNA, 25 bp, Saccharomyces pastorianus
tgaatatctagctaccgtcatgtac

SEQ ID NO: 95542 - DNA, 25 bp, Saccharomyces pastorianus
taggtgttacgtattcgtctcccac

SEQ ID NO: 95543 - DNA, 25 bp, Saccharomyces pastorianus
atagagatgcccgttcttctagaaa

SEQ ID NO: 95544 - DNA, 25 bp, Saccharomyces pastorianus
tgaagaagcgctcgaacccagctat

SEQ ID NO: 95545 - DNA, 25 bp, Saccharomyces pastorianus
taacaccgttgtgggcatttcaggt

SEQ ID NO: 95546 - DNA, 25 bp, Saccharomyces pastorianus
atgcgtatgacaatcctctagcgga

SEQ ID NO: 95547 - DNA, 25 bp, Saccharomyces pastorianus
ggcacacatggcaaacccactgtta

SEQ ID NO: 95548 - DNA, 25 bp, Saccharomyces pastorianus
atgccatcattgttgctggtgtaca

SEQ ID NO: 95549 - DNA, 25 bp, Saccharomyces pastorianus
ctagaaacttctcactggccataat

SEQ ID NO: 95550 - DNA, 25 bp, Saccharomyces pastorianus
cgctcccgcagaagatgactcatta

SEQ ID NO: 95551 - DNA, 25 bp, Saccharomyces pastorianus
gtcttctacatgctctgacgctgaa

SEQ ID NO: 95552 - DNA, 25 bp, Saccharomyces pastorianus
agaactcgctgatgtgatcttcacc

SEQ ID NO: 95553 - DNA, 25 bp, Saccharomyces pastorianus
aagatggcgtaaagtcgctcccgca

SEQ ID NO: 95554 - DNA, 25 bp, Saccharomyces pastorianus
agttttccctcaggagccagtagac

SEQ ID NO: 95555 - DNA, 25 bp, Saccharomyces pastorianus
gtgcgctagcattcactatcgaagc

SEQ ID NO: 95556 - DNA, 25 bp, Saccharomyces pastorianus
tgacgttcgcgataaatccttccag

SEQ ID NO: 95557 - DNA, 25 bp, Saccharomyces pastorianus
agagtttcaccggtatggccataca

SEQ ID NO: 95558 - DNA, 25 bp, Saccharomyces pastorianus
tttccttccaagagtccacgaggga

SEQ ID NO: 95559 - DNA, 25 bp, Saccharomyces pastorianus
actaaacttatctccctgcgtgata

SEQ ID NO: 95560 - DNA, 25 bp, Saccharomyces pastorianus
aatgaccacgatcaagagctccctt

SEQ ID NO: 95561 - DNA, 25 bp, Saccharomyces pastorianus
acgattcacttttgtcttaccctat

SEQ ID NO: 95562 - DNA, 25 bp, Saccharomyces pastorianus
tccctctctccaacataaaggcttt

SEQ ID NO: 95563 - DNA, 25 bp, Saccharomyces pastorianus
gaaactggcctattgtcaactcgaa

SEQ ID NO: 95564 - DNA, 25 bp, Saccharomyces pastorianus
gtgcccttgctagcatccaaacttt

SEQ ID NO: 95565 - DNA, 25 bp, Saccharomyces pastorianus
aagcatgggatcttctgcaatcggg

SEQ ID NO: 95566 - DNA, 25 bp, Saccharomyces pastorianus
aaaaataccgagctatcctacgact

SEQ ID NO: 95567 - DNA, 25 bp, Saccharomyces pastorianus
taacacaaccaagtttcactcggaa

SEQ ID NO: 95568 - DNA, 25 bp, Saccharomyces pastorianus
tcgactcttttaccgatatcctaaa

SEQ ID NO: 95569 - DNA, 25 bp, Saccharomyces pastorianus
gacagcttcgagaattacttcaacc

SEQ ID NO: 95570 - DNA, 25 bp, Saccharomyces pastorianus
gaagccttactactttagcaacaat

SEQ ID NO: 95571 - DNA, 25 bp, Saccharomyces pastorianus
aaggctttgctctttttcaacaacg

SEQ ID NO: 95572 - DNA, 25 bp, Saccharomyces pastorianus
gtgacgcaagcaacgatccaattac

SEQ ID NO: 95573 - DNA, 25 bp, Saccharomyces pastorianus
gcaagcaacgatccaattacgattg

SEQ ID NO: 95574 - DNA, 25 bp, Saccharomyces pastorianus
attgctgcattgtccgaaaaaagaa

SEQ ID NO: 95575 - DNA, 25 bp, Saccharomyces pastorianus
cgattgttccagctgaggatggttc

SEQ ID NO: 95576 - DNA, 25 bp, Saccharomyces pastorianus
gatggactggtgacgcaagcaacga

SEQ ID NO: 95577 - DNA, 25 bp, Saccharomyces pastorianus
gatccaattacgattgttccagctg

SEQ ID NO: 95578 - DNA, 25 bp, Saccharomyces pastorianus
cattgtccgaaaaaagaattgccga

SEQ ID NO: 95579 - DNA, 25 bp, Saccharomyces pastorianus
caattacgattgttccagctgagga

SEQ ID NO: 95580 - DNA, 25 bp, Saccharomyces pastorianus
ctgttattgctgcattgtccgaaaa

SEQ ID NO: 95581 - DNA, 25 bp, Saccharomyces pastorianus
gactggtgacgcaagcaacgatcca

SEQ ID NO: 95582 - DNA, 25 bp, Saccharomyces pastorianus
gttattgctgcattgtccgaaaaaa

SEQ ID NO: 95583 - DNA, 25 bp, Saccharomyces pastorianus
gccgctgacggttctgtctataaca

SEQ ID NO: 95584 - DNA, 25 bp, Saccharomyces pastorianus
tgtcaagaccactctgccagaacgt

SEQ ID NO: 95585 - DNA, 25 bp, Saccharomyces pastorianus
gattagctgtttgtggtattgccgc

SEQ ID NO: 95586 - DNA, 25 bp, Saccharomyces pastorianus
agatgacctccggttactacttggg

SEQ ID NO: 95587 - DNA, 25 bp, Saccharomyces pastorianus
ccgccgctaagggtttgagagatat

SEQ ID NO: 95588 - DNA, 25 bp, Saccharomyces pastorianus
acaagactggtcacattgccgctga

SEQ ID NO: 95589 - DNA, 25 bp, Saccharomyces pastorianus
tggatacctcctacccagcaagaat

SEQ ID NO: 95590 - DNA, 25 bp, Saccharomyces pastorianus
aagacctggtcaacaagcttttgaa

SEQ ID NO: 95591 - DNA, 25 bp, Saccharomyces pastorianus
aattgttgcgtctagtgttacttga

SEQ ID NO: 95592 - DNA, 25 bp, Saccharomyces pastorianus
caggtttcaaggaagccgccgctaa

SEQ ID NO: 95593 - DNA, 25 bp, Saccharomyces pastorianus
gatcggtaccagagctgctagatta

SEQ ID NO: 95594 - DNA, 25 bp, Saccharomyces pastorianus
gcccctcaatgcatacctgatatta

SEQ ID NO: 95595 - DNA, 25 bp, Saccharomyces pastorianus
tattcctcgcaaccatctgattata

SEQ ID NO: 95596 - DNA, 25 bp, Saccharomyces pastorianus
tgatgaccaacctgtggctgaacct

SEQ ID NO: 95597 - DNA, 25 bp, Saccharomyces pastorianus
gaatgcatcttccagattcgtcaca

SEQ ID NO: 95598 - DNA, 25 bp, Saccharomyces pastorianus
tgattatattgcatgctccctcagt

SEQ ID NO: 95599 - DNA, 25 bp, Saccharomyces pastorianus
taatctcgagccgtttttcaagtag

SEQ ID NO: 95600 - DNA, 25 bp, Saccharomyces pastorianus
aggtgcctctctaattgtttctttg

SEQ ID NO: 95601 - DNA, 25 bp, Saccharomyces pastorianus
ataacgaacatgtaggtgcctctct

SEQ ID NO: 95602 - DNA, 25 bp, Saccharomyces pastorianus
gaaccttctggatacacacctgttg

SEQ ID NO: 95603 - DNA, 25 bp, Saccharomyces pastorianus
gcttccattccgtgacactgagagt

SEQ ID NO: 95604 - DNA, 25 bp, Saccharomyces pastorianus
tagtagtttcaaggcgcttccattc

SEQ ID NO: 95605 - DNA, 25 bp, Saccharomyces pastorianus
tctttttatatgtccttgtcttcta

SEQ ID NO: 95606 - DNA, 25 bp, Saccharomyces pastorianus
gtatttcttcattgtggtgtcccaa

SEQ ID NO: 95607 - DNA, 25 bp, Saccharomyces pastorianus
aactcggtacgatcaatcattgtag

SEQ ID NO: 95608 - DNA, 25 bp, Saccharomyces pastorianus
gagcaaattggcactttcaacatta

SEQ ID NO: 95609 - DNA, 25 bp, Saccharomyces pastorianus
aacattatttggatgctatggcgcc

SEQ ID NO: 95610 - DNA, 25 bp, Saccharomyces pastorianus
gctatggcgccttacaattgagttg

SEQ ID NO: 95611 - DNA, 25 bp, Saccharomyces pastorianus
tacgtccaataacagacagttgcgt

SEQ ID NO: 95612 - DNA, 25 bp, Saccharomyces pastorianus
gtgtcccaacactagagcagtcttt

SEQ ID NO: 95613 - DNA, 25 bp, Saccharomyces pastorianus
gttgcgtagtaataccaaacttcga

SEQ ID NO: 95614 - DNA, 25 bp, Saccharomyces pastorianus
atggttgaccccttatacaaaggtg

SEQ ID NO: 95615 - DNA, 25 bp, Saccharomyces pastorianus
aaagccactttgttcatctggatta

SEQ ID NO: 95616 - DNA, 25 bp, Saccharomyces pastorianus
tcacttggcccaatactacatgttc

SEQ ID NO: 95617 - DNA, 25 bp, Saccharomyces pastorianus
cagattaaagccagccatctccagt

SEQ ID NO: 95618 - DNA, 25 bp, Saccharomyces pastorianus
aaagccagccatctccagtgctcta

SEQ ID NO: 95619 - DNA, 25 bp, Saccharomyces pastorianus
agattaaagccagccatctccagtg

SEQ ID NO: 95620 - DNA, 25 bp, Saccharomyces pastorianus
attaaagccagccatctccagtgct

SEQ ID NO: 95621 - DNA, 25 bp, Saccharomyces pastorianus
ggaaacctacccagttgaagttgct

SEQ ID NO: 95622 - DNA, 25 bp, Saccharomyces pastorianus
taaagccagccatctccagtgctct

SEQ ID NO: 95623 - DNA, 25 bp, Saccharomyces pastorianus
tgttccaagccgcccacccaacgga

SEQ ID NO: 95624 - DNA, 25 bp, Saccharomyces pastorianus
cgccgctggtgtcgctgccatcgct

SEQ ID NO: 95625 - DNA, 25 bp, Saccharomyces pastorianus
ttaaagccagccatctccagtgctc

SEQ ID NO: 95626 - DNA, 25 bp, Saccharomyces pastorianus
agtgaccagaatgatcaccggtgtt

SEQ ID NO: 95627 - DNA, 25 bp, Saccharomyces pastorianus
ttattgtaccgccattcagctaaag

SEQ ID NO: 95628 - DNA, 25 bp, Saccharomyces pastorianus
atttgatttgactaatgttacctgt

SEQ ID NO: 95629 - DNA, 25 bp, Saccharomyces pastorianus
taaggatgacacattaccagattat

SEQ ID NO: 95630 - DNA, 25 bp, Saccharomyces pastorianus
tggcgccgacgtcttgactgaaagc

SEQ ID NO: 95631 - DNA, 25 bp, Saccharomyces pastorianus
ggcctacatggacctcattgtggta

SEQ ID NO: 95632 - DNA, 25 bp, Saccharomyces pastorianus
atctacgtttgttggcgccgacgtc

SEQ ID NO: 95633 - DNA, 25 bp, Saccharomyces pastorianus
cccaaattttgcttctgttatctta

SEQ ID NO: 95634 - DNA, 25 bp, Saccharomyces pastorianus
gttcaactctaccaattatggcgtt

SEQ ID NO: 95635 - DNA, 25 bp, Saccharomyces pastorianus
cccaactgtgaatattttcggtaag

SEQ ID NO: 95636 - DNA, 25 bp, Saccharomyces pastorianus
gactactattgctagtaacgagaca

SEQ ID NO: 95637 - DNA, 25 bp, Saccharomyces pastorianus
aatgttacctgtaagggcctacatg

SEQ ID NO: 95638 - DNA, 25 bp, Saccharomyces pastorianus
gatttgttctgtgcaactatctcat

SEQ ID NO: 95639 - DNA, 25 bp, Saccharomyces pastorianus
gacgggtccttgctatggctaaacg

SEQ ID NO: 95640 - DNA, 25 bp, Saccharomyces pastorianus
ggtcagttgggcaatgtagtttcaa

SEQ ID NO: 95641 - DNA, 25 bp, Saccharomyces pastorianus
ggctgggcgaattactttcgaacaa

SEQ ID NO: 95642 - DNA, 25 bp, Saccharomyces pastorianus
taaaggaaagcatctcttcagtatg

SEQ ID NO: 95643 - DNA, 25 bp, Saccharomyces pastorianus
ggatgcatcaaacattggtcagttg

SEQ ID NO: 95644 - DNA, 25 bp, Saccharomyces pastorianus
tacgttccatcctgtggatgcatca

SEQ ID NO: 95645 - DNA, 25 bp, Saccharomyces pastorianus
ttcgaacaatcgctttacgttccat

SEQ ID NO: 95646 - DNA, 25 bp, Saccharomyces pastorianus
actcaggagagtgttttttgttcaa

SEQ ID NO: 95647 - DNA, 25 bp, Saccharomyces pastorianus
gagtaccggtgagttttaccagatt

SEQ ID NO: 95648 - DNA, 25 bp, Saccharomyces pastorianus
tctcatacagacagggacgggtcct

SEQ ID NO: 95649 - DNA, 25 bp, Saccharomyces pastorianus
agaggccaacatgcaatgtccaaag

SEQ ID NO: 95650 - DNA, 25 bp, Saccharomyces pastorianus
tcaaggctttgcacgttttaaacag

SEQ ID NO: 95651 - DNA, 25 bp, Saccharomyces pastorianus
ttttggctgaacacgccatgcatga

SEQ ID NO: 95652 - DNA, 25 bp, Saccharomyces pastorianus
aaattgctttgcatttcggtgcttc

SEQ ID NO: 95653 - DNA, 25 bp, Saccharomyces pastorianus
taggttatgttcatgcccttgctca

SEQ ID NO: 95654 - DNA, 25 bp, Saccharomyces pastorianus
atgcatgatgcctgccatttgacta

SEQ ID NO: 95655 - DNA, 25 bp, Saccharomyces pastorianus
agaactgacatgtgttacgctgaat

SEQ ID NO: 95656 - DNA, 25 bp, Saccharomyces pastorianus
ctgccatttgactaacccagttcaa

SEQ ID NO: 95657 - DNA, 25 bp, Saccharomyces pastorianus
aaagcttagtcgctgcatacaaaga

SEQ ID NO: 95658 - DNA, 25 bp, Saccharomyces pastorianus
tgtcttgttgcctcatgttcaagag

SEQ ID NO: 95659 - DNA, 25 bp, Saccharomyces pastorianus
aatcaccgatgcctgtgctttgaag

SEQ ID NO: 95660 - DNA, 25 bp, Saccharomyces pastorianus
actgcccttgttatctctggtgttt

SEQ ID NO: 95661 - DNA, 25 bp, Saccharomyces pastorianus
gtaccagatacgtcagcggttctta

SEQ ID NO: 95662 - DNA, 25 bp, Saccharomyces pastorianus
actggtaaagagttcgccaccctat

SEQ ID NO: 95663 - DNA, 25 bp, Saccharomyces pastorianus
accaatctgtgtggccatcggtttg

SEQ ID NO: 95664 - DNA, 25 bp, Saccharomyces pastorianus
gatcagacgctacatccgtggatgt

SEQ ID NO: 95665 - DNA, 25 bp, Saccharomyces pastorianus
gattgtcagccattgaattccctag

SEQ ID NO: 95666 - DNA, 25 bp, Saccharomyces pastorianus
gtccttcaacgttatatgcactctt

SEQ ID NO: 95667 - DNA, 25 bp, Saccharomyces pastorianus
ataccctgtcttagtgttccatcaa

SEQ ID NO: 95668 - DNA, 25 bp, Saccharomyces pastorianus
ggatgccatttctgctggtatctta

SEQ ID NO: 95669 - DNA, 25 bp, Saccharomyces pastorianus
gccatgggccctatgtgttgcgtat

SEQ ID NO: 95670 - DNA, 25 bp, Saccharomyces pastorianus
tttggtgtgattttccactccgtta

SEQ ID NO: 95671 - DNA, 25 bp, Saccharomyces pastorianus
tgagaaatccagcagcaccgacact

SEQ ID NO: 95672 - DNA, 25 bp, Saccharomyces pastorianus
aagcgttgatagcactacggcacaa

SEQ ID NO: 95673 - DNA, 25 bp, Saccharomyces pastorianus
aagagcttagtccattcgcatctgt

SEQ ID NO: 95674 - DNA, 25 bp, Saccharomyces pastorianus
gtaagcttgttgtaccatctggaga

SEQ ID NO: 95675 - DNA, 25 bp, Saccharomyces pastorianus
catccattccacaactttcatttag

SEQ ID NO: 95676 - DNA, 25 bp, Saccharomyces pastorianus
gatctcattgaccactatgaccaca

SEQ ID NO: 95677 - DNA, 25 bp, Saccharomyces pastorianus
ccttcattcctgagacgctggtaaa

SEQ ID NO: 95678 - DNA, 25 bp, Saccharomyces pastorianus
gaattctcgcaaggtcatttgcctg

SEQ ID NO: 95679 - DNA, 25 bp, Saccharomyces pastorianus
ttccggctctccaatgtgtggtgaa

SEQ ID NO: 95680 - DNA, 25 bp, Saccharomyces pastorianus
gaatcgcttccaacctctgagaaat

SEQ ID NO: 95681 - DNA, 25 bp, Saccharomyces pastorianus
gttactggtcggataaccggtgcaa

SEQ ID NO: 95682 - DNA, 25 bp, Saccharomyces pastorianus
tagagctgctagattgtccgtttgt

SEQ ID NO: 95683 - DNA, 25 bp, Saccharomyces pastorianus
acaagaccggtcacattgctgcaga

SEQ ID NO: 95684 - DNA, 25 bp, Saccharomyces pastorianus
gataccgatgacttgttccagagtg

SEQ ID NO: 95685 - DNA, 25 bp, Saccharomyces pastorianus
tgaagaatctccaagaccaggccaa

SEQ ID NO: 95686 - DNA, 25 bp, Saccharomyces pastorianus
ttcttacccagccagaatcgaggaa

SEQ ID NO: 95687 - DNA, 25 bp, Saccharomyces pastorianus
tggactcaaacctcactagacgact

SEQ ID NO: 95688 - DNA, 25 bp, Saccharomyces pastorianus
tgttattgctgctttggcccaaaaa

SEQ ID NO: 95689 - DNA, 25 bp, Saccharomyces pastorianus
aaattttgcgtttggccttgatgga

SEQ ID NO: 95690 - DNA, 25 bp, Saccharomyces pastorianus
agttcgacaagcctttcgtcatgga

SEQ ID NO: 95691 - DNA, 25 bp, Saccharomyces pastorianus
gaaggacatttacggctggactcaa

SEQ ID NO: 95692 - DNA, 25 bp, Saccharomyces pastorianus
gtggtattgctgctatctgtcaaaa

SEQ ID NO: 95693 - DNA, 25 bp, Saccharomyces pastorianus
gttcgttccagaattatcacgctac

SEQ ID NO: 95694 - DNA, 25 bp, Saccharomyces pastorianus
aaacaagtgcttccgttcgttccag

SEQ ID NO: 95695 - DNA, 25 bp, Saccharomyces pastorianus
tgatttccatgtttctaagcgtagt

SEQ ID NO: 95696 - DNA, 25 bp, Saccharomyces pastorianus
gtaacctagcatttgttcatgcctc

SEQ ID NO: 95697 - DNA, 25 bp, Saccharomyces pastorianus
gggcggcaacattccggaatctgaa

SEQ ID NO: 95698 - DNA, 25 bp, Saccharomyces pastorianus
ttatctcacagagctagagcgctga

SEQ ID NO: 95699 - DNA, 25 bp, Saccharomyces pastorianus
attgctcctgctttatgtaacctag

SEQ ID NO: 95700 - DNA, 25 bp, Saccharomyces pastorianus
tttgcggtgttcatccaggtggtaa

SEQ ID NO: 95701 - DNA, 25 bp, Saccharomyces pastorianus
gttcatgcctcttatccaaaggagt

SEQ ID NO: 95702 - DNA, 25 bp, Saccharomyces pastorianus
aggagttacaaccaacagctgcatt

SEQ ID NO: 95703 - DNA, 25 bp, Saccharomyces pastorianus
atagccggctgtcatggattatctc

SEQ ID NO: 95704 - DNA, 25 bp, Saccharomyces pastorianus
aaggccaagatttgtctctcggtac

SEQ ID NO: 95705 - DNA, 25 bp, Saccharomyces pastorianus
ggacgcccatatacgcaacgtggca

SEQ ID NO: 95706 - DNA, 25 bp, Saccharomyces pastorianus
ttggcaggttggcttttgctacgaa

SEQ ID NO: 95707 - DNA, 25 bp, Saccharomyces pastorianus
ggaggaacaaccatcggacgcccat

SEQ ID NO: 95708 - DNA, 25 bp, Saccharomyces pastorianus
aagcgaattgcccaaagtcaccgtg

SEQ ID NO: 95709 - DNA, 25 bp, Saccharomyces pastorianus
catttctgttgttcacgtcggatga

SEQ ID NO: 95710 - DNA, 25 bp, Saccharomyces pastorianus
gaaaagcctcgatttgaccttgttc

SEQ ID NO: 95711 - DNA, 25 bp, Saccharomyces pastorianus
ataccgacgcacttggctattgaat

SEQ ID NO: 95712 - DNA, 25 bp, Saccharomyces pastorianus
aaagctgctctttatcagcgaccca

SEQ ID NO: 95713 - DNA, 25 bp, Saccharomyces pastorianus
gatgaaacgcatcccttaattgtgg

SEQ ID NO: 95714 - DNA, 25 bp, Saccharomyces pastorianus
ctctcggtacaacgccttggttgaa

SEQ ID NO: 95715 - DNA, 25 bp, Saccharomyces pastorianus
ggatttaacatcctcttagtacgga

SEQ ID NO: 95716 - DNA, 25 bp, Saccharomyces pastorianus
gagactactgacttttttattgatt

SEQ ID NO: 95717 - DNA, 25 bp, Saccharomyces pastorianus
ataacggctcattgcattacgataa

SEQ ID NO: 95718 - DNA, 25 bp, Saccharomyces pastorianus
ctagaccttatcgaacaaccttact

SEQ ID NO: 95719 - DNA, 25 bp, Saccharomyces pastorianus
ttcaggcgagccgatttatgcaact

SEQ ID NO: 95720 - DNA, 25 bp, Saccharomyces pastorianus
aaatgcttacggtttcacaaatgac

SEQ ID NO: 95721 - DNA, 25 bp, Saccharomyces pastorianus
gtaaaaactcccatctagaccttat

SEQ ID NO: 95722 - DNA, 25 bp, Saccharomyces pastorianus
gacgttgatcctgatcttttctgga

SEQ ID NO: 95723 - DNA, 25 bp, Saccharomyces pastorianus
gcaaaatgggccttttcatataacg

SEQ ID NO: 95724 - DNA, 25 bp, Saccharomyces pastorianus
gcaaatgccgatattcttctagatt

SEQ ID NO: 95725 - DNA, 25 bp, Saccharomyces pastorianus
accttactttggagaatgcgatttc

SEQ ID NO: 95726 - DNA, 25 bp, Saccharomyces pastorianus
gaattttggtcttacgttgctgaaa

SEQ ID NO: 95727 - DNA, 25 bp, Saccharomyces pastorianus
acagcaccttctatatcttcagaga

SEQ ID NO: 95728 - DNA, 25 bp, Saccharomyces pastorianus
aatgttcatgcccattatcttccaa

SEQ ID NO: 95729 - DNA, 25 bp, Saccharomyces pastorianus
aagtgcactatctttccttgggatg

SEQ ID NO: 95730 - DNA, 25 bp, Saccharomyces pastorianus
taccgttcaaagttcatcatgggat

SEQ ID NO: 95731 - DNA, 25 bp, Saccharomyces pastorianus
ctcacgttaagtcaacacctgctaa

SEQ ID NO: 95732 - DNA, 25 bp, Saccharomyces pastorianus
agcggtttgaatgttatcgttactc

SEQ ID NO: 95733 - DNA, 25 bp, Saccharomyces pastorianus
agacccaagactaaccatactcgaa

SEQ ID NO: 95734 - DNA, 25 bp, Saccharomyces pastorianus
gttgctgaaaatataccgcttgtgc

SEQ ID NO: 95735 - DNA, 25 bp, Saccharomyces pastorianus
aagcccgagcaattgtatggtcatc

SEQ ID NO: 95736 - DNA, 25 bp, Saccharomyces pastorianus
taccgcttgtgcatctcaagggtat

SEQ ID NO: 95737 - DNA, 25 bp, Saccharomyces pastorianus
taaagcatgggctcgtactctggcg

SEQ ID NO: 95738 - DNA, 25 bp, Saccharomyces pastorianus
agattagcccgacaaagcatttggt

SEQ ID NO: 95739 - DNA, 25 bp, Saccharomyces pastorianus
gaaaaccagtgcgaacctcatatga

SEQ ID NO: 95740 - DNA, 25 bp, Saccharomyces pastorianus
ggactgtctcttgctattaaattca

SEQ ID NO: 95741 - DNA, 25 bp, Saccharomyces pastorianus
ggagtatatacagcttttcttcaat

SEQ ID NO: 95742 - DNA, 25 bp, Saccharomyces pastorianus
ggaaatagtgtctggctccgattac

SEQ ID NO: 95743 - DNA, 25 bp, Saccharomyces pastorianus
acgagtttcggatcatacagggttt

SEQ ID NO: 95744 - DNA, 25 bp, Saccharomyces pastorianus
tagtttttctagacagcctgatggc

SEQ ID NO: 95745 - DNA, 25 bp, Saccharomyces pastorianus
gtatacgatctttccttttcatttt

SEQ ID NO: 95746 - DNA, 25 bp, Saccharomyces pastorianus
atggcatacttgctaccccaagatt

SEQ ID NO: 95747 - DNA, 25 bp, Saccharomyces pastorianus
ctggctccgattaccaatgggctaa

SEQ ID NO: 95748 - DNA, 25 bp, Saccharomyces pastorianus
gcagcaagttgcgaacatatcggat

SEQ ID NO: 95749 - DNA, 25 bp, Saccharomyces pastorianus
gttgcagtatacaccccgtgaagtg

SEQ ID NO: 95750 - DNA, 25 bp, Saccharomyces pastorianus
gagttttcaacggaggaagtacctg

SEQ ID NO: 95751 - DNA, 25 bp, Saccharomyces pastorianus
gttaattcttggtgctgaggtggat

SEQ ID NO: 95752 - DNA, 25 bp, Saccharomyces pastorianus
atatcggatacgcataagtttgagc

SEQ ID NO: 95753 - DNA, 25 bp, Saccharomyces pastorianus
gaggatcctcattctcaaataagag

SEQ ID NO: 95754 - DNA, 25 bp, Saccharomyces pastorianus
ttgagcgtaaactgttccggacctg

SEQ ID NO: 95755 - DNA, 25 bp, Saccharomyces pastorianus
aatgcttcttagttgggatcccaag

SEQ ID NO: 95756 - DNA, 25 bp, Saccharomyces pastorianus
tgagaactggtgtaggtaactgcaa

SEQ ID NO: 95757 - DNA, 25 bp, Saccharomyces pastorianus
ggacctggctgcaatgcttcttagt

SEQ ID NO: 95758 - DNA, 25 bp, Saccharomyces pastorianus
tatggtctccttactgagtggcttt

SEQ ID NO: 95759 - DNA, 25 bp, Saccharomyces pastorianus
gaaggtcattgatccaattgctcca

SEQ ID NO: 95760 - DNA, 25 bp, Saccharomyces pastorianus
cacggatgccattgctgacttgaat

SEQ ID NO: 95761 - DNA, 25 bp, Saccharomyces pastorianus
ggaaggctccgaagctccacaagaa

SEQ ID NO: 95762 - DNA, 25 bp, Saccharomyces pastorianus
agccatatgtcttttttaccatccc

SEQ ID NO: 95763 - DNA, 25 bp, Saccharomyces pastorianus
aattgctccaagacacactgctatc

SEQ ID NO: 95764 - DNA, 25 bp, Saccharomyces pastorianus
gggctactacagattggatgcttta

SEQ ID NO: 95765 - DNA, 25 bp, Saccharomyces pastorianus
aagatgtcgtccctgttgatttagt

SEQ ID NO: 95766 - DNA, 25 bp, Saccharomyces pastorianus
gaagatttcttgactcctcaaacag

SEQ ID NO: 95767 - DNA, 25 bp, Saccharomyces pastorianus
gttgacttcgaccatttgattacca

SEQ ID NO: 95768 - DNA, 25 bp, Saccharomyces pastorianus
gacgatggctctatggttgccaaat

SEQ ID NO: 95769 - DNA, 25 bp, Saccharomyces pastorianus
cactgctatcgtcaacccagttaaa

SEQ ID NO: 95770 - DNA, 25 bp, Saccharomyces pastorianus
aaagagcgatcctttcagcaggcta

SEQ ID NO: 95771 - DNA, 25 bp, Saccharomyces pastorianus
aactacagatgaggttgttcgccat

SEQ ID NO: 95772 - DNA, 25 bp, Saccharomyces pastorianus
tatctggtacgaatgcagtcttgga

SEQ ID NO: 95773 - DNA, 25 bp, Saccharomyces pastorianus
aaccaggaccaaagtttactatcag

SEQ ID NO: 95774 - DNA, 25 bp, Saccharomyces pastorianus
gagaaagagctacttgtggcacaat

SEQ ID NO: 95775 - DNA, 25 bp, Saccharomyces pastorianus
tttcagcaggctaaaaaccaggacc

SEQ ID NO: 95776 - DNA, 25 bp, Saccharomyces pastorianus
ggacattgcaaaatactctgctcag

SEQ ID NO: 95777 - DNA, 25 bp, Saccharomyces pastorianus
aaactaggcgagttgacctctaaga

SEQ ID NO: 95778 - DNA, 25 bp, Saccharomyces pastorianus
ggttgttcgccataggatgcaattc

SEQ ID NO: 95779 - DNA, 25 bp, Saccharomyces pastorianus
gaggttatggattttgtcaatacac

SEQ ID NO: 95780 - DNA, 25 bp, Saccharomyces pastorianus
gtggcacaattcaggcgccttggtg

SEQ ID NO: 95781 - DNA, 25 bp, Saccharomyces pastorianus
gagcaatcatttcacactcgtctac

SEQ ID NO: 95782 - DNA, 25 bp, Saccharomyces pastorianus
gtgtagtgtcaagctctttatggat

SEQ ID NO: 95783 - DNA, 25 bp, Saccharomyces pastorianus
cacactcgtctaccgaatctagata

SEQ ID NO: 95784 - DNA, 25 bp, Saccharomyces pastorianus
gatgactttagcaccgaagaagcga

SEQ ID NO: 95785 - DNA, 25 bp, Saccharomyces pastorianus
aaattcctgaattgcctcaaaccat

SEQ ID NO: 95786 - DNA, 25 bp, Saccharomyces pastorianus
gaacattttatctcccgatggttgg

SEQ ID NO: 95787 - DNA, 25 bp, Saccharomyces pastorianus
gaggatgttcctggtctaatgtgta

SEQ ID NO: 95788 - DNA, 25 bp, Saccharomyces pastorianus
taagccggtttgcacaatgggaact

SEQ ID NO: 95789 - DNA, 25 bp, Saccharomyces pastorianus
actgtcaatcgcaagtaagccggtt

SEQ ID NO: 95790 - DNA, 25 bp, Saccharomyces pastorianus
gaagcgattcttaatggcgtgagga

SEQ ID NO: 95791 - DNA, 25 bp, Saccharomyces pastorianus
caacggtcgtcggtactgaattgtt

SEQ ID NO: 95792 - DNA, 25 bp, Saccharomyces pastorianus
ggaacctgagcatggaacttttatt

SEQ ID NO: 95793 - DNA, 25 bp, Saccharomyces pastorianus
aaagccagttgatttggttcatggt

SEQ ID NO: 95794 - DNA, 25 bp, Saccharomyces pastorianus
gccgagttagcgattgatagtacca

SEQ ID NO: 95795 - DNA, 25 bp, Saccharomyces pastorianus
gacaagattctcgatcaagacggtg

SEQ ID NO: 95796 - DNA, 25 bp, Saccharomyces pastorianus
aattgaccttttgcagggtgccgag

SEQ ID NO: 95797 - DNA, 25 bp, Saccharomyces pastorianus
ggatcctgggaagttctcgacaaga

SEQ ID NO: 95798 - DNA, 25 bp, Saccharomyces pastorianus
caatctggatcttttggagaccgta

SEQ ID NO: 95799 - DNA, 25 bp, Saccharomyces pastorianus
gtgcggatcctagggtgagaaacta

SEQ ID NO: 95800 - DNA, 25 bp, Saccharomyces pastorianus
gcgacactccgttacatgttactgt

SEQ ID NO: 95801 - DNA, 25 bp, Saccharomyces pastorianus
gaaatagacccacaaaacgacgttg

SEQ ID NO: 95802 - DNA, 25 bp, Saccharomyces pastorianus
aaacgacgttgatggcgacactccg

SEQ ID NO: 95803 - DNA, 25 bp, Saccharomyces pastorianus
tttacgagactctatccgacagtga

SEQ ID NO: 95804 - DNA, 25 bp, Saccharomyces pastorianus
ttgtttctgagttaagcttccaaag

SEQ ID NO: 95805 - DNA, 25 bp, Saccharomyces pastorianus
gagtggcttccattgtatttacgag

SEQ ID NO: 95806 - DNA, 25 bp, Saccharomyces pastorianus
acaagttccactttataccaagatc

SEQ ID NO: 95807 - DNA, 25 bp, Saccharomyces pastorianus
gtaaacaaccgaatccagaacaatt

SEQ ID NO: 95808 - DNA, 25 bp, Saccharomyces pastorianus
gccagacaggtatgtacaagttcca

SEQ ID NO: 95809 - DNA, 25 bp, Saccharomyces pastorianus
gaagcagacgacgattcagacgata

SEQ ID NO: 95810 - DNA, 25 bp, Saccharomyces pastorianus
actgatgctttgacattggtgatgc

SEQ ID NO: 95811 - DNA, 25 bp, Saccharomyces pastorianus
gaatctgttgttcagctactggtaa

SEQ ID NO: 95812 - DNA, 25 bp, Saccharomyces pastorianus
tcagacgatataacgggactcatgg

SEQ ID NO: 95813 - DNA, 25 bp, Saccharomyces pastorianus
tttgagcaaccttttcttcctgaac

SEQ ID NO: 95814 - DNA, 25 bp, Saccharomyces pastorianus
gagggcaaccacaccaattggacat

SEQ ID NO: 95815 - DNA, 25 bp, Saccharomyces pastorianus
aggcttttgtttccagtcaaccatg

SEQ ID NO: 95816 - DNA, 25 bp, Saccharomyces pastorianus
gtgtcatggcaatattcttttcgat

SEQ ID NO: 95817 - DNA, 25 bp, Saccharomyces pastorianus
atagggaggacgaccagctgctgaa

SEQ ID NO: 95818 - DNA, 25 bp, Saccharomyces pastorianus
acgtgacacatttagcgctttggaa

SEQ ID NO: 95819 - DNA, 25 bp, Saccharomyces pastorianus
gagtcctatgctccaagcttagtga

SEQ ID NO: 95820 - DNA, 25 bp, Saccharomyces pastorianus
aagatctctacgtgaatgggttcca

SEQ ID NO: 95821 - DNA, 25 bp, Saccharomyces pastorianus
tcctacaccggagaacttgcaacat

SEQ ID NO: 95822 - DNA, 25 bp, Saccharomyces pastorianus
gaatcctgtggactttgctctagat

SEQ ID NO: 95823 - DNA, 25 bp, Saccharomyces pastorianus
gcaacatatgttccaccaaggtatt

SEQ ID NO: 95824 - DNA, 25 bp, Saccharomyces pastorianus
gggcatagtccttctgatgcgaggt

SEQ ID NO: 95825 - DNA, 25 bp, Saccharomyces pastorianus
gaagtgcaagatgggctttttcaac

SEQ ID NO: 95826 - DNA, 25 bp, Saccharomyces pastorianus
gagacagcatcatcacaaagtattg

SEQ ID NO: 95827 - DNA, 25 bp, Saccharomyces pastorianus
gatcctttgcctgaaatcgatgtca

SEQ ID NO: 95828 - DNA, 25 bp, Saccharomyces pastorianus
aaatctccacgtttggttctcattt

SEQ ID NO: 95829 - DNA, 25 bp, Saccharomyces pastorianus
ggttctcatttcagtaagttggtta

SEQ ID NO: 95830 - DNA, 25 bp, Saccharomyces pastorianus
ataccattttgcctcaattgaccca

SEQ ID NO: 95831 - DNA, 25 bp, Saccharomyces pastorianus
gaaccgcttgagaccatatattaaa

SEQ ID NO: 95832 - DNA, 25 bp, Saccharomyces pastorianus
ggctctgattttttgatccacttta

SEQ ID NO: 95833 - DNA, 25 bp, Saccharomyces pastorianus
gaaaaaccattcgatcctttgcctg

SEQ ID NO: 95834 - DNA, 25 bp, Saccharomyces pastorianus
aatataatgctatctctgggaatac

SEQ ID NO: 95835 - DNA, 25 bp, Saccharomyces pastorianus
tattggtaacctgctagatcgtaaa

SEQ ID NO: 95836 - DNA, 25 bp, Saccharomyces pastorianus
atacatcttccagtgtcagtacgat

SEQ ID NO: 95837 - DNA, 25 bp, Saccharomyces pastorianus
atgccaagcagtactaccgaatttt

SEQ ID NO: 95838 - DNA, 25 bp, Saccharomyces pastorianus
aattggtggttcaagcccagtacac

SEQ ID NO: 95839 - DNA, 25 bp, Saccharomyces pastorianus
gggctagcgatgatcctgacgatag

SEQ ID NO: 95840 - DNA, 25 bp, Saccharomyces pastorianus
aagccatacttacacgaatctcgac

SEQ ID NO: 95841 - DNA, 25 bp, Saccharomyces pastorianus
tttctctgcagtgactactttaccg

SEQ ID NO: 95842 - DNA, 25 bp, Saccharomyces pastorianus
gagttatcgactccttggaaccaca

SEQ ID NO: 95843 - DNA, 25 bp, Saccharomyces pastorianus
gatggaaccatctgccgactttact

SEQ ID NO: 95844 - DNA, 25 bp, Saccharomyces pastorianus
gaggttcttgacagccgctgagatc

SEQ ID NO: 95845 - DNA, 25 bp, Saccharomyces pastorianus
gccgactttactagtttctctgcag

SEQ ID NO: 95846 - DNA, 25 bp, Saccharomyces pastorianus
atgcgatgcgaagacctcgtggtga

SEQ ID NO: 95847 - DNA, 25 bp, Saccharomyces pastorianus
agaagatatggtcaaccgcctcctg

SEQ ID NO: 95848 - DNA, 25 bp, Saccharomyces pastorianus
gatgaccacgacctgtgtcttggtt

SEQ ID NO: 95849 - DNA, 25 bp, Saccharomyces pastorianus
gagagcgtcgatttcctttacaagg

SEQ ID NO: 95850 - DNA, 25 bp, Saccharomyces pastorianus
tagatggcgcagctgcagcttcgca

SEQ ID NO: 95851 - DNA, 25 bp, Saccharomyces pastorianus
gggttgcacgaacacttaccaatat

SEQ ID NO: 95852 - DNA, 25 bp, Saccharomyces pastorianus
agcgagatcagttactttgcccatc

SEQ ID NO: 95853 - DNA, 25 bp, Saccharomyces pastorianus
atataactctctgtctatctgggct

SEQ ID NO: 95854 - DNA, 25 bp, Saccharomyces pastorianus
cattttgaattgcactccagcgaga

SEQ ID NO: 95855 - DNA, 25 bp, Saccharomyces pastorianus
tgagagtagtatgcgcaccagtcct

SEQ ID NO: 95856 - DNA, 25 bp, Saccharomyces pastorianus
gttccctttgcatgtatttcttata

SEQ ID NO: 95857 - DNA, 25 bp, Saccharomyces pastorianus
gtcagcaactttgttctgcagcaga

SEQ ID NO: 95858 - DNA, 25 bp, Saccharomyces pastorianus
gtaccccgtgtcttcaaatggtttg

SEQ ID NO: 95859 - DNA, 25 bp, Saccharomyces pastorianus
tgtagcattaccatgggacgctcca

SEQ ID NO: 95860 - DNA, 25 bp, Saccharomyces pastorianus
atatcccaagagctattccagacca

SEQ ID NO: 95861 - DNA, 25 bp, Saccharomyces pastorianus
aaatggccgcaggagatgttcttct

SEQ ID NO: 95862 - DNA, 25 bp, Saccharomyces pastorianus
gcctctagcggtgttcattctaatg

SEQ ID NO: 95863 - DNA, 25 bp, Saccharomyces pastorianus
taagggtaccgctgttggtgctgta

SEQ ID NO: 95864 - DNA, 25 bp, Saccharomyces pastorianus
tatttgggagcttggttctttgcaa

SEQ ID NO: 95865 - DNA, 25 bp, Saccharomyces pastorianus
ctacaggcccgcgttgatatgtcaa

SEQ ID NO: 95866 - DNA, 25 bp, Saccharomyces pastorianus
gcaggtaatgttccacacgatgaca

SEQ ID NO: 95867 - DNA, 25 bp, Saccharomyces pastorianus
ggacgctccatgtccatgggatgaa

SEQ ID NO: 95868 - DNA, 25 bp, Saccharomyces pastorianus
atgtcaacctgggaagtaccccgtg

SEQ ID NO: 95869 - DNA, 25 bp, Saccharomyces pastorianus
gagcaagattcagcacttcgtctca

SEQ ID NO: 95870 - DNA, 25 bp, Saccharomyces pastorianus
aatgccaacggtgttgacgcaccaa

SEQ ID NO: 95871 - DNA, 25 bp, Saccharomyces pastorianus
aatgatgtttgccagcacgctacaa

SEQ ID NO: 95872 - DNA, 25 bp, Saccharomyces pastorianus
aatggataccagtcgccaatgaccc

SEQ ID NO: 95873 - DNA, 25 bp, Saccharomyces pastorianus
ttaccatacagcgtccaaacattat

SEQ ID NO: 95874 - DNA, 25 bp, Saccharomyces pastorianus
agcattattcccagaattttcccct

SEQ ID NO: 95875 - DNA, 25 bp, Saccharomyces pastorianus
ttttccgtgaatttgactccttgac

SEQ ID NO: 95876 - DNA, 25 bp, Saccharomyces pastorianus
gaatcagcgagtgtcattgactcta

SEQ ID NO: 95877 - DNA, 25 bp, Saccharomyces pastorianus
cggcgatgacactagcgtaatggat

SEQ ID NO: 95878 - DNA, 25 bp, Saccharomyces pastorianus
aagatgcggctcttttgttgagcaa

SEQ ID NO: 95879 - DNA, 25 bp, Saccharomyces pastorianus
ggatctattattgcatgacacacca

SEQ ID NO: 95880 - DNA, 25 bp, Saccharomyces pastorianus
gctaccctgggaacgaattgctcat

SEQ ID NO: 95881 - DNA, 25 bp, Saccharomyces pastorianus
gtatatgtccggtacatccttacaa

SEQ ID NO: 95882 - DNA, 25 bp, Saccharomyces pastorianus
gatgctacatctcaaactacttctt

SEQ ID NO: 95883 - DNA, 25 bp, Saccharomyces pastorianus
aatgggtctcattcctaacgctaag

SEQ ID NO: 95884 - DNA, 25 bp, Saccharomyces pastorianus
gttacaaccagccaaatctattccg

SEQ ID NO: 95885 - DNA, 25 bp, Saccharomyces pastorianus
atgtatatcgtattccaaggcgtct

SEQ ID NO: 95886 - DNA, 25 bp, Saccharomyces pastorianus
attcctataatgactgccctcatgc

SEQ ID NO: 95887 - DNA, 25 bp, Saccharomyces pastorianus
caaggagtgcattcaaaccagtgtt

SEQ ID NO: 95888 - DNA, 25 bp, Saccharomyces pastorianus
aatgggctaaacacctattggacac

SEQ ID NO: 95889 - DNA, 25 bp, Saccharomyces pastorianus
attaccttcaccaccaggatttgaa

SEQ ID NO: 95890 - DNA, 25 bp, Saccharomyces pastorianus
atgctactctctggacccattaaag

SEQ ID NO: 95891 - DNA, 25 bp, Saccharomyces pastorianus
ggccagttctgtgccgaaagcgatg

SEQ ID NO: 95892 - DNA, 25 bp, Saccharomyces pastorianus
ttgctccagatatatatgccttctt

SEQ ID NO: 95893 - DNA, 25 bp, Saccharomyces pastorianus
gacttccatattatctctgatttca

SEQ ID NO: 95894 - DNA, 25 bp, Saccharomyces pastorianus
tctgatttcattttacaaggccaca

SEQ ID NO: 95895 - DNA, 25 bp, Saccharomyces pastorianus
gttcaataattcttggtggaggcca

SEQ ID NO: 95896 - DNA, 25 bp, Saccharomyces pastorianus
tgagtaaaccagctcatccatccac

SEQ ID NO: 95897 - DNA, 25 bp, Saccharomyces pastorianus
aaagttgccgagctcatagatgaat

SEQ ID NO: 95898 - DNA, 25 bp, Saccharomyces pastorianus
caaaacctttgtacggcagcaacca

SEQ ID NO: 95899 - DNA, 25 bp, Saccharomyces pastorianus
ataagaccgatctaattgctccaga

SEQ ID NO: 95900 - DNA, 25 bp, Saccharomyces pastorianus
aaggccacaaggattcgtttgaatt

SEQ ID NO: 95901 - DNA, 25 bp, Saccharomyces pastorianus
ggcagcaaccaaaagttacctgtta

SEQ ID NO: 95902 - DNA, 25 bp, Saccharomyces pastorianus
gcagatgatgacactacgcttgatg

SEQ ID NO: 95903 - DNA, 25 bp, Saccharomyces pastorianus
gtgagtacttcaacgagacgcgctc

SEQ ID NO: 95904 - DNA, 25 bp, Saccharomyces pastorianus
gatattatcgttcactcaagagagt

SEQ ID NO: 95905 - DNA, 25 bp, Saccharomyces pastorianus
tgttatcaacgctcacatgggtgca

SEQ ID NO: 95906 - DNA, 25 bp, Saccharomyces pastorianus
tctagagacaagctggctcaccatt

SEQ ID NO: 95907 - DNA, 25 bp, Saccharomyces pastorianus
gaagaagacgtatcctacacctcta

SEQ ID NO: 95908 - DNA, 25 bp, Saccharomyces pastorianus
tgacttatcccgtgttaacgcgttt

SEQ ID NO: 95909 - DNA, 25 bp, Saccharomyces pastorianus
aagcaaagtcttctgttaactggaa

SEQ ID NO: 95910 - DNA, 25 bp, Saccharomyces pastorianus
gcagcaggagctattactacaacag

SEQ ID NO: 95911 - DNA, 25 bp, Saccharomyces pastorianus
aagatcgaaagccaacctgcaattt

SEQ ID NO: 95912 - DNA, 25 bp, Saccharomyces pastorianus
agacgcgctcgacgttagacgaact

SEQ ID NO: 95913 - DNA, 25 bp, Saccharomyces pastorianus
attggagacatataccgctggagga

SEQ ID NO: 95914 - DNA, 25 bp, Saccharomyces pastorianus
tttatttggcggtgcagcgactgca

SEQ ID NO: 95915 - DNA, 25 bp, Saccharomyces pastorianus
atgcggatggtgttcaaccttgttt

SEQ ID NO: 95916 - DNA, 25 bp, Saccharomyces pastorianus
atcagccaccggtagtagagattac

SEQ ID NO: 95917 - DNA, 25 bp, Saccharomyces pastorianus
ggaggagaccaaagcagcgtatttc

SEQ ID NO: 95918 - DNA, 25 bp, Saccharomyces pastorianus
agatctttcagcacttatcagccac

SEQ ID NO: 95919 - DNA, 25 bp, Saccharomyces pastorianus
tataacgaagttatggcccactcta

SEQ ID NO: 95920 - DNA, 25 bp, Saccharomyces pastorianus
atggaccctgtggtggcagatccaa

SEQ ID NO: 95921 - DNA, 25 bp, Saccharomyces pastorianus
gcccactctacgacctgaagttagg

SEQ ID NO: 95922 - DNA, 25 bp, Saccharomyces pastorianus
gcgtatttcttatcttatggaccct

SEQ ID NO: 95923 - DNA, 25 bp, Saccharomyces pastorianus
aacggtattcggctagcactgaaaa

SEQ ID NO: 95924 - DNA, 25 bp, Saccharomyces pastorianus
atcacttctgcattattcgttctta

SEQ ID NO: 95925 - DNA, 25 bp, Saccharomyces pastorianus
ctattgctgttttctttctgtgtgg

SEQ ID NO: 95926 - DNA, 25 bp, Saccharomyces pastorianus
tgttgcctcctttaacccaggttat

SEQ ID NO: 95927 - DNA, 25 bp, Saccharomyces pastorianus
atgttcaccaactgtatcacttctg

SEQ ID NO: 95928 - DNA, 25 bp, Saccharomyces pastorianus
atggtcctttcttctgtcgttgcaa

SEQ ID NO: 95929 - DNA, 25 bp, Saccharomyces pastorianus
aagctgccaattgccttgtctggtt

SEQ ID NO: 95930 - DNA, 25 bp, Saccharomyces pastorianus
ggtgtgttcgtgttacttcgtctac

SEQ ID NO: 95931 - DNA, 25 bp, Saccharomyces pastorianus
caatgttttggctctacctattcta

SEQ ID NO: 95932 - DNA, 25 bp, Saccharomyces pastorianus
aaacttcttatctattctctccatt

SEQ ID NO: 95933 - DNA, 25 bp, Saccharomyces pastorianus
tatttcttactgttccggttggtgt

SEQ ID NO: 95934 - DNA, 25 bp, Saccharomyces pastorianus
gatcatcagtggtgttgcatccgtc

SEQ ID NO: 95935 - DNA, 25 bp, Saccharomyces pastorianus
gagaattcacgatcttatgcaacaa

SEQ ID NO: 95936 - DNA, 25 bp, Saccharomyces pastorianus
ataaccggcttgtggatgattcctt

SEQ ID NO: 95937 - DNA, 25 bp, Saccharomyces pastorianus
tatcacctgaagatgctcacgtttt

SEQ ID NO: 95938 - DNA, 25 bp, Saccharomyces pastorianus
ggcaaacaccagaaggcgctattgt

SEQ ID NO: 95939 - DNA, 25 bp, Saccharomyces pastorianus
tgacatattgtgactactctaggac

SEQ ID NO: 95940 - DNA, 25 bp, Saccharomyces pastorianus
actgaggttctttcaaacacacttg

SEQ ID NO: 95941 - DNA, 25 bp, Saccharomyces pastorianus
aaaccacgcaatacgttgcctgaga

SEQ ID NO: 95942 - DNA, 25 bp, Saccharomyces pastorianus
gaacgcactggaatataaccggctt

SEQ ID NO: 95943 - DNA, 25 bp, Saccharomyces pastorianus
gatacgctggtctgcaaaccacatg

SEQ ID NO: 95944 - DNA, 25 bp, Saccharomyces pastorianus
ggatgattccttaccactacaagat

SEQ ID NO: 95945 - DNA, 25 bp, Saccharomyces pastorianus
gtggcttttcaccaacgcttataaa

SEQ ID NO: 95946 - DNA, 25 bp, Saccharomyces pastorianus
tatatcacagatataccacctcctc

SEQ ID NO: 95947 - DNA, 25 bp, Saccharomyces pastorianus
tgaaccagaaacaatccccgcatgg

SEQ ID NO: 95948 - DNA, 25 bp, Saccharomyces pastorianus
tgttgccatcggctggcaggaacaa

SEQ ID NO: 95949 - DNA, 25 bp, Saccharomyces pastorianus
ctcaaactcttcctaacggtcagaa

SEQ ID NO: 95950 - DNA, 25 bp, Saccharomyces pastorianus
ccgcatggctctcaagggataatac

SEQ ID NO: 95951 - DNA, 25 bp, Saccharomyces pastorianus
gaaacgccacgacagaacaacaaag

SEQ ID NO: 95952 - DNA, 25 bp, Saccharomyces pastorianus
aaactcagtcactcttatgcaggct

SEQ ID NO: 95953 - DNA, 25 bp, Saccharomyces pastorianus
ggtcagaaacctaacttcggccatt

SEQ ID NO: 95954 - DNA, 25 bp, Saccharomyces pastorianus
gggaaatgctgctaagaacgccaat

SEQ ID NO: 95955 - DNA, 25 bp, Saccharomyces pastorianus
ccatgtatttcaacagctccaggct

SEQ ID NO: 95956 - DNA, 25 bp, Saccharomyces pastorianus
actttcgccactaatggtccaaggg

SEQ ID NO: 95957 - DNA, 25 bp, Saccharomyces pastorianus
acgtcgcaaagtcttatgccttgga

SEQ ID NO: 95958 - DNA, 25 bp, Saccharomyces pastorianus
ttacgggttccctatgtacaagtag

SEQ ID NO: 95959 - DNA, 25 bp, Saccharomyces pastorianus
gtacaagtagcatctcttgctgctc

SEQ ID NO: 95960 - DNA, 25 bp, Saccharomyces pastorianus
aaaaaagtcgctgtctgtgccggga

SEQ ID NO: 95961 - DNA, 25 bp, Saccharomyces pastorianus
ggaacagattaagcccacatacaaa

SEQ ID NO: 95962 - DNA, 25 bp, Saccharomyces pastorianus
tagatgccgctcgtggcggtgtaaa

SEQ ID NO: 95963 - DNA, 25 bp, Saccharomyces pastorianus
acggaatatccgtatactgccctca

SEQ ID NO: 95964 - DNA, 25 bp, Saccharomyces pastorianus
gaccgttattgtttgcaaccactca

SEQ ID NO: 95965 - DNA, 25 bp, Saccharomyces pastorianus
actgacgacttgattggctacggta

SEQ ID NO: 95966 - DNA, 25 bp, Saccharomyces pastorianus
gagcgtggattccttcaagacgtta

SEQ ID NO: 95967 - DNA, 25 bp, Saccharomyces pastorianus
agcggttctggcgtgtttaagcaac

SEQ ID NO: 95968 - DNA, 25 bp, Saccharomyces pastorianus
cattgtgacggatctttcgtacggt

SEQ ID NO: 95969 - DNA, 25 bp, Saccharomyces pastorianus
gacactataagatgcccgttactga

SEQ ID NO: 95970 - DNA, 25 bp, Saccharomyces pastorianus
gtggtcagcgacttctttcaaggta

SEQ ID NO: 95971 - DNA, 25 bp, Saccharomyces pastorianus
ttactgaacagggactccgcgagag

SEQ ID NO: 95972 - DNA, 25 bp, Saccharomyces pastorianus
ttcgtacggttgtggtcagtcgttt

SEQ ID NO: 95973 - DNA, 25 bp, Saccharomyces pastorianus
aaatcacatttcctaacaactcagt

SEQ ID NO: 95974 - DNA, 25 bp, Saccharomyces pastorianus
gaggatagaatcagccataccgcaa

SEQ ID NO: 95975 - DNA, 25 bp, Saccharomyces pastorianus
atgcctttagctgcaagtgctacac

SEQ ID NO: 95976 - DNA, 25 bp, Saccharomyces pastorianus
gccataccgcaagtttaccatatca

SEQ ID NO: 95977 - DNA, 25 bp, Saccharomyces pastorianus
gagttgcaggagattcatgccttta

SEQ ID NO: 95978 - DNA, 25 bp, Saccharomyces pastorianus
gaaacaaagcgccaacgacactata

SEQ ID NO: 95979 - DNA, 25 bp, Saccharomyces pastorianus
ggatgccctctttaaacaattacta

SEQ ID NO: 95980 - DNA, 25 bp, Saccharomyces pastorianus
gctatacctggttgcttggaaagac

SEQ ID NO: 95981 - DNA, 25 bp, Saccharomyces pastorianus
ttgaaacagttacgtccacaccggt

SEQ ID NO: 95982 - DNA, 25 bp, Saccharomyces pastorianus
gattcagtctcgacttttcgatagg

SEQ ID NO: 95983 - DNA, 25 bp, Saccharomyces pastorianus
ggtaaagccattctactgttcccac

SEQ ID NO: 95984 - DNA, 25 bp, Saccharomyces pastorianus
ctgttcccacaatctattacctaaa

SEQ ID NO: 95985 - DNA, 25 bp, Saccharomyces pastorianus
caaacaccgatacccgagcttgaag

SEQ ID NO: 95986 - DNA, 25 bp, Saccharomyces pastorianus
tcgcaatcatttccacaaccaaagt

SEQ ID NO: 95987 - DNA, 25 bp, Saccharomyces pastorianus
gtgttagattccagccagtacgatt

SEQ ID NO: 95988 - DNA, 25 bp, Saccharomyces pastorianus
gtgatgaattctctttccgctatac

SEQ ID NO: 95989 - DNA, 25 bp, Saccharomyces pastorianus
attactactcttcgcaatcatttcc

SEQ ID NO: 95990 - DNA, 25 bp, Saccharomyces pastorianus
atgcatggactcttttagccttctc

SEQ ID NO: 95991 - DNA, 25 bp, Saccharomyces pastorianus
atgaaatcttgcaaatccccttggc

SEQ ID NO: 95992 - DNA, 25 bp, Saccharomyces pastorianus
taacttttcccgtattcgttcattg

SEQ ID NO: 95993 - DNA, 25 bp, Saccharomyces pastorianus
aagctgggtgtatcctgttcgttaa

SEQ ID NO: 95994 - DNA, 25 bp, Saccharomyces pastorianus
ggatatcccaattccagggttcttt

SEQ ID NO: 95995 - DNA, 25 bp, Saccharomyces pastorianus
gactctatgactgtctgtatccgca

SEQ ID NO: 95996 - DNA, 25 bp, Saccharomyces pastorianus
agccttctctcaatggtgctttgga

SEQ ID NO: 95997 - DNA, 25 bp, Saccharomyces pastorianus
gttatcaccaaacacagcttcgttg

SEQ ID NO: 95998 - DNA, 25 bp, Saccharomyces pastorianus
tctgtaccttaattccgcttttcaa

SEQ ID NO: 95999 - DNA, 25 bp, Saccharomyces pastorianus
gatggcttctagctcgatggaactg

SEQ ID NO: 96000 - DNA, 25 bp, Saccharomyces pastorianus
tatccgcaacatagcatccttacat

SEQ ID NO: 96001 - DNA, 25 bp, Saccharomyces pastorianus
gggaaagttagcttctgcaccacta

SEQ ID NO: 96002 - DNA, 25 bp, Saccharomyces pastorianus
agggccttactcttatagctacgac

SEQ ID NO: 96003 - DNA, 25 bp, Saccharomyces pastorianus
agcgtctatgtctatatcggagtcg

SEQ ID NO: 96004 - DNA, 25 bp, Saccharomyces pastorianus
tgagcattctatcatccacacaatc

SEQ ID NO: 96005 - DNA, 25 bp, Saccharomyces pastorianus
gtagaaccttcttcagcgtctatgt

SEQ ID NO: 96006 - DNA, 25 bp, Saccharomyces pastorianus
gaggattgtcttgtttcaggcacgt

SEQ ID NO: 96007 - DNA, 25 bp, Saccharomyces pastorianus
tcaggcacgttcatgttagtgtcaa

SEQ ID NO: 96008 - DNA, 25 bp, Saccharomyces pastorianus
tgcaccactagcttcattgaccaat

SEQ ID NO: 96009 - DNA, 25 bp, Saccharomyces pastorianus
tccacaattttacgtataccctccg

SEQ ID NO: 96010 - DNA, 25 bp, Saccharomyces pastorianus
aagctatttcttttgctccgcgtag

SEQ ID NO: 96011 - DNA, 25 bp, Saccharomyces pastorianus
gtctaattacttttctcctcagcaa

SEQ ID NO: 96012 - DNA, 25 bp, Saccharomyces pastorianus
caacttgaagcctacttccacaaac

SEQ ID NO: 96013 - DNA, 25 bp, Saccharomyces pastorianus
aaacaacactcacttttacctgccg

SEQ ID NO: 96014 - DNA, 25 bp, Saccharomyces pastorianus
actcagtttgattacgacttctaca

SEQ ID NO: 96015 - DNA, 25 bp, Saccharomyces pastorianus
atgttttcatcaccatcttatcaga

SEQ ID NO: 96016 - DNA, 25 bp, Saccharomyces pastorianus
gctgatgccgcataacatgttttca

SEQ ID NO: 96017 - DNA, 25 bp, Saccharomyces pastorianus
ttacggtcatcatcttggctggaag

SEQ ID NO: 96018 - DNA, 25 bp, Saccharomyces pastorianus
gcttttctttattttgagttcgtca

SEQ ID NO: 96019 - DNA, 25 bp, Saccharomyces pastorianus
aaatcaactcaaacctgctgtagcg

SEQ ID NO: 96020 - DNA, 25 bp, Saccharomyces pastorianus
cggttcctacgttattatctccaat

SEQ ID NO: 96021 - DNA, 25 bp, Saccharomyces pastorianus
gtccataatcagtcttacggtcatc

SEQ ID NO: 96022 - DNA, 25 bp, Saccharomyces pastorianus
ttccacaaacaacctattatctcca

SEQ ID NO: 96023 - DNA, 25 bp, Saccharomyces pastorianus
gccacttctgtggatatctctgaac

SEQ ID NO: 96024 - DNA, 25 bp, Saccharomyces pastorianus
aatttgcacattctagctgggtcat

SEQ ID NO: 96025 - DNA, 25 bp, Saccharomyces pastorianus
tagctcgcaggcaagtctgggtgaa

SEQ ID NO: 96026 - DNA, 25 bp, Saccharomyces pastorianus
agaactatctacattacgcccgttg

SEQ ID NO: 96027 - DNA, 25 bp, Saccharomyces pastorianus
acgaggactaattgccacaggtttt

SEQ ID NO: 96028 - DNA, 25 bp, Saccharomyces pastorianus
aattcatttggttgcatcactctat

SEQ ID NO: 96029 - DNA, 25 bp, Saccharomyces pastorianus
gattctttagctgaacctggtgtct

SEQ ID NO: 96030 - DNA, 25 bp, Saccharomyces pastorianus
aagaataggctccttatccgtacca

SEQ ID NO: 96031 - DNA, 25 bp, Saccharomyces pastorianus
aaggatccttattagccattgctca

SEQ ID NO: 96032 - DNA, 25 bp, Saccharomyces pastorianus
gctgggtcatgagtctatcgtttaa

SEQ ID NO: 96033 - DNA, 25 bp, Saccharomyces pastorianus
gatcggtgaaattttctcctcaagg

SEQ ID NO: 96034 - DNA, 25 bp, Saccharomyces pastorianus
aagcacggaagtgactcgtcgcgcc

SEQ ID NO: 96035 - DNA, 25 bp, Saccharomyces pastorianus
cagtgacaactcttcaaccacggaa

SEQ ID NO: 96036 - DNA, 25 bp, Saccharomyces pastorianus
atagcgcaagacttcctgcagttgt

SEQ ID NO: 96037 - DNA, 25 bp, Saccharomyces pastorianus
gaatgagctacttacagcacttgaa

SEQ ID NO: 96038 - DNA, 25 bp, Saccharomyces pastorianus
gctctattgaggtccttgctcaagg

SEQ ID NO: 96039 - DNA, 25 bp, Saccharomyces pastorianus
gatgacgtcgataacactggtagga

SEQ ID NO: 96040 - DNA, 25 bp, Saccharomyces pastorianus
taagggcacgtacgaagctccacaa

SEQ ID NO: 96041 - DNA, 25 bp, Saccharomyces pastorianus
acatagctcaggaccgtggacgact

SEQ ID NO: 96042 - DNA, 25 bp, Saccharomyces pastorianus
acaagagttggttgcactgcaccga

SEQ ID NO: 96043 - DNA, 25 bp, Saccharomyces pastorianus
gcaccgaattatccaggcacaacgt

SEQ ID NO: 96044 - DNA, 25 bp, Saccharomyces pastorianus
gcacaacgtggattggccttagaga

SEQ ID NO: 96045 - DNA, 25 bp, Saccharomyces pastorianus
agaactgatcgtagccatcttccaa

SEQ ID NO: 96046 - DNA, 25 bp, Saccharomyces pastorianus
agagcagtaccaaccgatgaagcga

SEQ ID NO: 96047 - DNA, 25 bp, Saccharomyces pastorianus
ggtcaagaacgttacagggccatca

SEQ ID NO: 96048 - DNA, 25 bp, Saccharomyces pastorianus
aaagcacagatttgggacacggcag

SEQ ID NO: 96049 - DNA, 25 bp, Saccharomyces pastorianus
gcgactccggtgtgggtaaatctaa

SEQ ID NO: 96050 - DNA, 25 bp, Saccharomyces pastorianus
aacatgggctctaatggcgctccaa

SEQ ID NO: 96051 - DNA, 25 bp, Saccharomyces pastorianus
agatagttcttatcggcgactccgg

SEQ ID NO: 96052 - DNA, 25 bp, Saccharomyces pastorianus
aaagggtcctaccatcagcttaaca

SEQ ID NO: 96053 - DNA, 25 bp, Saccharomyces pastorianus
aaccactggcttaccgaactgagag

SEQ ID NO: 96054 - DNA, 25 bp, Saccharomyces pastorianus
taagcgggtcgggtaccaacaacat

SEQ ID NO: 96055 - DNA, 25 bp, Saccharomyces pastorianus
gtctgcgtactaccgtggtgctgta

SEQ ID NO: 96056 - DNA, 25 bp, Saccharomyces pastorianus
atatcccacagcagtatcagcatca

SEQ ID NO: 96057 - DNA, 25 bp, Saccharomyces pastorianus
cttgcatctgcattatctaccttac

SEQ ID NO: 96058 - DNA, 25 bp, Saccharomyces pastorianus
ggccaaagaacttgagtccgtctat

SEQ ID NO: 96059 - DNA, 25 bp, Saccharomyces pastorianus
tctgtgccaaactctccgaatgatg

SEQ ID NO: 96060 - DNA, 25 bp, Saccharomyces pastorianus
aagtgattccagtcatacctctgca

SEQ ID NO: 96061 - DNA, 25 bp, Saccharomyces pastorianus
agctctattggctccatacagtcaa

SEQ ID NO: 96062 - DNA, 25 bp, Saccharomyces pastorianus
tgaatgttcgcgtaaacactccacg

SEQ ID NO: 96063 - DNA, 25 bp, Saccharomyces pastorianus
acttttgcacattctcttgcatctg

SEQ ID NO: 96064 - DNA, 25 bp, Saccharomyces pastorianus
tatctctttgcctttcagcaatgct

SEQ ID NO: 96065 - DNA, 25 bp, Saccharomyces pastorianus
gccgcctgtacgtaacctactgaaa

SEQ ID NO: 96066 - DNA, 25 bp, Saccharomyces pastorianus
tatagaatcaccatcctcaccaagt

SEQ ID NO: 96067 - DNA, 25 bp, Saccharomyces pastorianus
gtgtagcctccatcgttcgatataa

SEQ ID NO: 96068 - DNA, 25 bp, Saccharomyces pastorianus
aggaagcatattccatgcgacctcc

SEQ ID NO: 96069 - DNA, 25 bp, Saccharomyces pastorianus
aatatacaacagacattcccgccgt

SEQ ID NO: 96070 - DNA, 25 bp, Saccharomyces pastorianus
aggctgcttccaggcacacatagat

SEQ ID NO: 96071 - DNA, 25 bp, Saccharomyces pastorianus
acaatacgctttgtgtagcctccat

SEQ ID NO: 96072 - DNA, 25 bp, Saccharomyces pastorianus
gatcgatcctcaattgctctacaaa

SEQ ID NO: 96073 - DNA, 25 bp, Saccharomyces pastorianus
tactgacccgtctgtcatggaacga

SEQ ID NO: 96074 - DNA, 25 bp, Saccharomyces pastorianus
gccacgcaagaccagttcaacgaga

SEQ ID NO: 96075 - DNA, 25 bp, Saccharomyces pastorianus
aacgagaacaactcaggcgctctgc

SEQ ID NO: 96076 - DNA, 25 bp, Saccharomyces pastorianus
tcatgaagatctttcacccagacct

SEQ ID NO: 96077 - DNA, 25 bp, Saccharomyces pastorianus
agagtaagtgatttcctgcccacag

SEQ ID NO: 96078 - DNA, 25 bp, Saccharomyces pastorianus
gagatttgggcttccaaggtgtccc

SEQ ID NO: 96079 - DNA, 25 bp, Saccharomyces pastorianus
ggtgtcccaaatagatcggcagttt

SEQ ID NO: 96080 - DNA, 25 bp, Saccharomyces pastorianus
tggatattccttacactgtctcaac

SEQ ID NO: 96081 - DNA, 25 bp, Saccharomyces pastorianus
ggcagttttctgtatgccaactaca

SEQ ID NO: 96082 - DNA, 25 bp, Saccharomyces pastorianus
aaacccgtcactcatatcaatacag

SEQ ID NO: 96083 - DNA, 25 bp, Saccharomyces pastorianus
atgaaagcgcattctctgaagatga

SEQ ID NO: 96084 - DNA, 25 bp, Saccharomyces pastorianus
atacagttccgatcgaatctttaga

SEQ ID NO: 96085 - DNA, 25 bp, Saccharomyces pastorianus
gctggaattttctggctactggttc

SEQ ID NO: 96086 - DNA, 25 bp, Saccharomyces pastorianus
gatgatccatatcagtttttcttag

SEQ ID NO: 96087 - DNA, 25 bp, Saccharomyces pastorianus
tcaattgattgaaccaccatttttg

SEQ ID NO: 96088 - DNA, 25 bp, Saccharomyces pastorianus
agatttcaataaacccgtcactcat

SEQ ID NO: 96089 - DNA, 25 bp, Saccharomyces pastorianus
tctcgaaatccgacaacttgccttt

SEQ ID NO: 96090 - DNA, 25 bp, Saccharomyces pastorianus
atggccaacccttgatgctgatgaa

SEQ ID NO: 96091 - DNA, 25 bp, Saccharomyces pastorianus
gttgctttgctatatgctgcttaca

SEQ ID NO: 96092 - DNA, 25 bp, Saccharomyces pastorianus
gaggctctactcacatatttcgttg

SEQ ID NO: 96093 - DNA, 25 bp, Saccharomyces pastorianus
atagcagccctgttataccgtagaa

SEQ ID NO: 96094 - DNA, 25 bp, Saccharomyces pastorianus
ggaggactacattaagccatttgaa

SEQ ID NO: 96095 - DNA, 25 bp, Saccharomyces pastorianus
attggcatctcgtttggaatctcat

SEQ ID NO: 96096 - DNA, 25 bp, Saccharomyces pastorianus
aagctttgcaagacgctgttgattc

SEQ ID NO: 96097 - DNA, 25 bp, Saccharomyces pastorianus
ggcagcaatctctcaggatccaaag

SEQ ID NO: 96098 - DNA, 25 bp, Saccharomyces pastorianus
aagcctaccacgatctgatgattga

SEQ ID NO: 96099 - DNA, 25 bp, Saccharomyces pastorianus
aagcctttcttgatcaatgtcttac

SEQ ID NO: 96100 - DNA, 25 bp, Saccharomyces pastorianus
gacgcgatgttaaattctcctatag

SEQ ID NO: 96101 - DNA, 25 bp, Saccharomyces pastorianus
agatctctaaagttgtgcagccaca

SEQ ID NO: 96102 - DNA, 25 bp, Saccharomyces pastorianus
gtatccaaatttcatgccttgcgct

SEQ ID NO: 96103 - DNA, 25 bp, Saccharomyces pastorianus
gccacaactattggctcttttgcca

SEQ ID NO: 96104 - DNA, 25 bp, Saccharomyces pastorianus
tcaagatcttcactcctgatcagat

SEQ ID NO: 96105 - DNA, 25 bp, Saccharomyces pastorianus
caagttaaactctcgtgattcacat

SEQ ID NO: 96106 - DNA, 25 bp, Saccharomyces pastorianus
gactcctttgaattacctgacgcga

SEQ ID NO: 96107 - DNA, 25 bp, Saccharomyces pastorianus
gcagcatgctcggtagaggtttcga

SEQ ID NO: 96108 - DNA, 25 bp, Saccharomyces pastorianus
ccttgcgctgcatgttgaaaaccta

SEQ ID NO: 96109 - DNA, 25 bp, Saccharomyces pastorianus
aagccttcttatcatgcgctgttga

SEQ ID NO: 96110 - DNA, 25 bp, Saccharomyces pastorianus
aagtttgccgcaataatccagtgga

SEQ ID NO: 96111 - DNA, 25 bp, Saccharomyces pastorianus
acttataacagcatgccctctgttt

SEQ ID NO: 96112 - DNA, 25 bp, Saccharomyces pastorianus
ggtatcttgccaccatagttatgta

SEQ ID NO: 96113 - DNA, 25 bp, Saccharomyces pastorianus
agcatgccctctgtttgtattagga

SEQ ID NO: 96114 - DNA, 25 bp, Saccharomyces pastorianus
attagttgcatggtatcttgccacc

SEQ ID NO: 96115 - DNA, 25 bp, Saccharomyces pastorianus
tatccttcgttttttgcaatcttcc

SEQ ID NO: 96116 - DNA, 25 bp, Saccharomyces pastorianus
aatggaactgatatccttcgttttt

SEQ ID NO: 96117 - DNA, 25 bp, Saccharomyces pastorianus
gccaccatagttatgtatattgcta

SEQ ID NO: 96118 - DNA, 25 bp, Saccharomyces pastorianus
gccctctgtttgtattaggactatt

SEQ ID NO: 96119 - DNA, 25 bp, Saccharomyces pastorianus
aaatgtggaaatatgcctttgctgt

SEQ ID NO: 96120 - DNA, 25 bp, Saccharomyces pastorianus
gaaatatgcctttgctgtttcgcta

SEQ ID NO: 96121 - DNA, 25 bp, Saccharomyces pastorianus
gtcattgcggcaaagttattagttg

SEQ ID NO: 96122 - DNA, 25 bp, Saccharomyces pastorianus
aagttttggtcaacgctacgctatc

SEQ ID NO: 96123 - DNA, 25 bp, Saccharomyces pastorianus
cagacccttaccagctagaacagag

SEQ ID NO: 96124 - DNA, 25 bp, Saccharomyces pastorianus
gccccagcaggttttacacaagttt

SEQ ID NO: 96125 - DNA, 25 bp, Saccharomyces pastorianus
gatgccctttacaagtatctaccac

SEQ ID NO: 96126 - DNA, 25 bp, Saccharomyces pastorianus
ttggcctgcgtcatgaatacacttt

SEQ ID NO: 96127 - DNA, 25 bp, Saccharomyces pastorianus
tatgcagctgtctctcctgagaaac

SEQ ID NO: 96128 - DNA, 25 bp, Saccharomyces pastorianus
tgaaacgtgactgtgccatcgatgc

SEQ ID NO: 96129 - DNA, 25 bp, Saccharomyces pastorianus
gaaatgacgattcaagccccagcag

SEQ ID NO: 96130 - DNA, 25 bp, Saccharomyces pastorianus
catctgtccaccctgagtttaaaac

SEQ ID NO: 96131 - DNA, 25 bp, Saccharomyces pastorianus
gatgctttcgtgatcaatcctccaa

SEQ ID NO: 96132 - DNA, 25 bp, Saccharomyces pastorianus
tggttcccggttcttggttcaagag

SEQ ID NO: 96133 - DNA, 25 bp, Saccharomyces pastorianus
aaaatgatttgggttcgttagcaga

SEQ ID NO: 96134 - DNA, 25 bp, Saccharomyces pastorianus
ttacgagtgagccaccagcagatat

SEQ ID NO: 96135 - DNA, 25 bp, Saccharomyces pastorianus
gactgggtcaggtgtaattacgagt

SEQ ID NO: 96136 - DNA, 25 bp, Saccharomyces pastorianus
tagagagtcaaagtcacgccgcttc

SEQ ID NO: 96137 - DNA, 25 bp, Saccharomyces pastorianus
atgttattcatccaaactgtgaggt

SEQ ID NO: 96138 - DNA, 25 bp, Saccharomyces pastorianus
ttcattgcagaagcttacgatcttt

SEQ ID NO: 96139 - DNA, 25 bp, Saccharomyces pastorianus
gtcacgccgcttctggaaacaatga

SEQ ID NO: 96140 - DNA, 25 bp, Saccharomyces pastorianus
gaaattactccatcattcattgcag

SEQ ID NO: 96141 - DNA, 25 bp, Saccharomyces pastorianus
gaagctacagctcgtccaggtacaa

SEQ ID NO: 96142 - DNA, 25 bp, Saccharomyces pastorianus
aagctattgcgagggctaattgtgt

SEQ ID NO: 96143 - DNA, 25 bp, Saccharomyces pastorianus
ggagattcatggtaccagacacaat

SEQ ID NO: 96144 - DNA, 25 bp, Saccharomyces pastorianus
taagtttgtcattgcttgcttcctg

SEQ ID NO: 96145 - DNA, 25 bp, Saccharomyces pastorianus
ttatggccgtagatgcttcttcgaa

SEQ ID NO: 96146 - DNA, 25 bp, Saccharomyces pastorianus
ataatgtccttcttccagcttatgg

SEQ ID NO: 96147 - DNA, 25 bp, Saccharomyces pastorianus
gaaatcacattgtctgctccataca

SEQ ID NO: 96148 - DNA, 25 bp, Saccharomyces pastorianus
tagaaaccctcaatccagtagccag

SEQ ID NO: 96149 - DNA, 25 bp, Saccharomyces pastorianus
atggtggtccatcttccaattgggc

SEQ ID NO: 96150 - DNA, 25 bp, Saccharomyces pastorianus
gtaagggtgacgagctctccatttc

SEQ ID NO: 96151 - DNA, 25 bp, Saccharomyces pastorianus
tgactttatcatctacgggccggaa

SEQ ID NO: 96152 - DNA, 25 bp, Saccharomyces pastorianus
atggcctcatttgctactaagtttg

SEQ ID NO: 96153 - DNA, 25 bp, Saccharomyces pastorianus
tccatttcgttccagttcggtgata

SEQ ID NO: 96154 - DNA, 25 bp, Saccharomyces pastorianus
tgggcgtcgttattgcaaactctct

SEQ ID NO: 96155 - DNA, 25 bp, Saccharomyces pastorianus
agtgtttgcagcacagtctcgtcga

SEQ ID NO: 96156 - DNA, 25 bp, Saccharomyces pastorianus
gcccacaggtcgcaattggctgaaa

SEQ ID NO: 96157 - DNA, 25 bp, Saccharomyces pastorianus
atagttccgcctatgttgtcagcaa

SEQ ID NO: 96158 - DNA, 25 bp, Saccharomyces pastorianus
atgtacgaaatcagcgacaccctct

SEQ ID NO: 96159 - DNA, 25 bp, Saccharomyces pastorianus
gcgggtataccacttgtttcagtct

SEQ ID NO: 96160 - DNA, 25 bp, Saccharomyces pastorianus
atctggttctatgaagtcgggctca

SEQ ID NO: 96161 - DNA, 25 bp, Saccharomyces pastorianus
agtcgggctcaatcgtagtgtcttc

SEQ ID NO: 96162 - DNA, 25 bp, Saccharomyces pastorianus
tctgctgcctgaattctgcatagtt

SEQ ID NO: 96163 - DNA, 25 bp, Saccharomyces pastorianus
accacatctcgctttagtgtttgca

SEQ ID NO: 96164 - DNA, 25 bp, Saccharomyces pastorianus
gcagccaaaggtgcatctggttcta

SEQ ID NO: 96165 - DNA, 25 bp, Saccharomyces pastorianus
tgaaatgtcgttatcagccgcccct

SEQ ID NO: 96166 - DNA, 25 bp, Saccharomyces pastorianus
aagccattcagggacaatcgttcat

SEQ ID NO: 96167 - DNA, 25 bp, Saccharomyces pastorianus
aatatggcgtctgcaaatgccctac

SEQ ID NO: 96168 - DNA, 25 bp, Saccharomyces pastorianus
gattctgctgagatcttagacgcaa

SEQ ID NO: 96169 - DNA, 25 bp, Saccharomyces pastorianus
gaaacgcaattacttaccgcatgaa

SEQ ID NO: 96170 - DNA, 25 bp, Saccharomyces pastorianus
agtcccattcgagcatacgggtcta

SEQ ID NO: 96171 - DNA, 25 bp, Saccharomyces pastorianus
gtttgggaatgctttcgctcaataa

SEQ ID NO: 96172 - DNA, 25 bp, Saccharomyces pastorianus
cagactaatggttcgttgcatggat

SEQ ID NO: 96173 - DNA, 25 bp, Saccharomyces pastorianus
atttaaatcatctgctttccctcaa

SEQ ID NO: 96174 - DNA, 25 bp, Saccharomyces pastorianus
ctacctcccgttgattatgtcataa

SEQ ID NO: 96175 - DNA, 25 bp, Saccharomyces pastorianus
gtggacgattctgtagaccctttat

SEQ ID NO: 96176 - DNA, 25 bp, Saccharomyces pastorianus
gtagttcggcttctggaaagccatt

SEQ ID NO: 96177 - DNA, 25 bp, Saccharomyces pastorianus
atctgtattttcttgcttgcgtgat

SEQ ID NO: 96178 - DNA, 25 bp, Saccharomyces pastorianus
ttgagcaaagctgtcttacaaccag

SEQ ID NO: 96179 - DNA, 25 bp, Saccharomyces pastorianus
gttatcccaattaagctcgcagcag

SEQ ID NO: 96180 - DNA, 25 bp, Saccharomyces pastorianus
gttcccctgatgtttacttcggaga

SEQ ID NO: 96181 - DNA, 25 bp, Saccharomyces pastorianus
ttgcgtgatcctgttatcccaatta

SEQ ID NO: 96182 - DNA, 25 bp, Saccharomyces pastorianus
gatgacatgcatactttcaacgagt

SEQ ID NO: 96183 - DNA, 25 bp, Saccharomyces pastorianus
aaggatgctgcagaaccgttcaaaa

SEQ ID NO: 96184 - DNA, 25 bp, Saccharomyces pastorianus
ggtaccacaattcaattacggtctg

SEQ ID NO: 96185 - DNA, 25 bp, Saccharomyces pastorianus
taaaatttcagatcgcggtagcagc

SEQ ID NO: 96186 - DNA, 25 bp, Saccharomyces pastorianus
acaaccagccagtaattctacggat

SEQ ID NO: 96187 - DNA, 25 bp, Saccharomyces pastorianus
ggtagcagcatcgaaactgtcacag

SEQ ID NO: 96188 - DNA, 25 bp, Saccharomyces pastorianus
gatcgcttaggatgcttcaatttaa

SEQ ID NO: 96189 - DNA, 25 bp, Saccharomyces pastorianus
ggattccttaggtcatgatcgctta

SEQ ID NO: 96190 - DNA, 25 bp, Saccharomyces pastorianus
aatgtacccctagaagatggcatag

SEQ ID NO: 96191 - DNA, 25 bp, Saccharomyces pastorianus
attcgggccggattattcactttat

SEQ ID NO: 96192 - DNA, 25 bp, Saccharomyces pastorianus
tgctgaatgcataccgacacaagat

SEQ ID NO: 96193 - DNA, 25 bp, Saccharomyces pastorianus
gtagatcctctaataatgactttca

SEQ ID NO: 96194 - DNA, 25 bp, Saccharomyces pastorianus
atgtatcacggctttggacctacga

SEQ ID NO: 96195 - DNA, 25 bp, Saccharomyces pastorianus
ccaacaatgcggtgcggattcctta

SEQ ID NO: 96196 - DNA, 25 bp, Saccharomyces pastorianus
ttgctaccagaagacatccccgaag

SEQ ID NO: 96197 - DNA, 25 bp, Saccharomyces pastorianus
caagatataagtgccctgacagaag

SEQ ID NO: 96198 - DNA, 25 bp, Saccharomyces pastorianus
gaagatatcccattccgggactcat

SEQ ID NO: 96199 - DNA, 25 bp, Saccharomyces pastorianus
ctggaaccagccacactggtactaa

SEQ ID NO: 96200 - DNA, 25 bp, Saccharomyces pastorianus
aagggatcacaatacgcggcctggc

SEQ ID NO: 96201 - DNA, 25 bp, Saccharomyces pastorianus
tagcagaacggttggcaggcaccca

SEQ ID NO: 96202 - DNA, 25 bp, Saccharomyces pastorianus
gcaaccttcaaaattacagcagcag

SEQ ID NO: 96203 - DNA, 25 bp, Saccharomyces pastorianus
acatactccctttgtatccaaacag

SEQ ID NO: 96204 - DNA, 25 bp, Saccharomyces pastorianus
aaacatattgacgtcgatttgatcg

SEQ ID NO: 96205 - DNA, 25 bp, Saccharomyces pastorianus
gctgaggccaagcagaatcctatga

SEQ ID NO: 96206 - DNA, 25 bp, Saccharomyces pastorianus
ggcctggctggtttaccatcggaaa

SEQ ID NO: 96207 - DNA, 25 bp, Saccharomyces pastorianus
acgggtcattggttaaatcattcta

SEQ ID NO: 96208 - DNA, 25 bp, Saccharomyces pastorianus
ggcaggcacccatgccagaaaacta

SEQ ID NO: 96209 - DNA, 25 bp, Saccharomyces pastorianus
aattgttacaggtcgtacgggtcat

SEQ ID NO: 96210 - DNA, 25 bp, Saccharomyces pastorianus
gtcgccctaccagcaattgctttaa

SEQ ID NO: 96211 - DNA, 25 bp, Saccharomyces pastorianus
tatcaggtctaagccttttttctgg

SEQ ID NO: 96212 - DNA, 25 bp, Saccharomyces pastorianus
tgctttaacagctgtgaacacatac

SEQ ID NO: 96213 - DNA, 25 bp, Saccharomyces pastorianus
taaaatctcagtttgggtcgcccta

SEQ ID NO: 96214 - DNA, 25 bp, Saccharomyces pastorianus
actccgaatggccaagggattacga

SEQ ID NO: 96215 - DNA, 25 bp, Saccharomyces pastorianus
atttgaaacatgtgccagactccga

SEQ ID NO: 96216 - DNA, 25 bp, Saccharomyces pastorianus
ccgcatttggcccaccagataaagt

SEQ ID NO: 96217 - DNA, 25 bp, Saccharomyces pastorianus
aatgctttgaaacccgcatttggcc

SEQ ID NO: 96218 - DNA, 25 bp, Saccharomyces pastorianus
aaagcatgcgaaggacacatctaat

SEQ ID NO: 96219 - DNA, 25 bp, Saccharomyces pastorianus
gcatgctgagcatcgtgaacatttg

SEQ ID NO: 96220 - DNA, 25 bp, Saccharomyces pastorianus
taagacattattctggaatcctgtt

SEQ ID NO: 96221 - DNA, 25 bp, Saccharomyces pastorianus
gattctagtagtaatggcaacagcc

SEQ ID NO: 96222 - DNA, 25 bp, Saccharomyces pastorianus
atcctaatgtagtaacttctggtga

SEQ ID NO: 96223 - DNA, 25 bp, Saccharomyces pastorianus
caaaaggtacggttcgctagcgcaa

SEQ ID NO: 96224 - DNA, 25 bp, Saccharomyces pastorianus
ggttcgctagcgcaaaggtctgcaa

SEQ ID NO: 96225 - DNA, 25 bp, Saccharomyces pastorianus
ggcaacagccacaagcgtaggagta

SEQ ID NO: 96226 - DNA, 25 bp, Saccharomyces pastorianus
gaaatcgtgttacaagctgacaaaa

SEQ ID NO: 96227 - DNA, 25 bp, Saccharomyces pastorianus
atgaacacaacgcacccaatagcaa

SEQ ID NO: 96228 - DNA, 25 bp, Saccharomyces pastorianus
tttacatttctcatggcatccaaga

SEQ ID NO: 96229 - DNA, 25 bp, Saccharomyces pastorianus
catatccggaggattcgggaaccga

SEQ ID NO: 96230 - DNA, 25 bp, Saccharomyces pastorianus
gtaacggacgcaacacaggcatggt

SEQ ID NO: 96231 - DNA, 25 bp, Saccharomyces pastorianus
gtgatacctatgaaaacgatgcgat

SEQ ID NO: 96232 - DNA, 25 bp, Saccharomyces pastorianus
gacagaaagaacagagctccacctc

SEQ ID NO: 96233 - DNA, 25 bp, Saccharomyces pastorianus
gaattgtcagagtcagatccagaga

SEQ ID NO: 96234 - DNA, 25 bp, Saccharomyces pastorianus
gaaacattgttgaagccgctgccgt

SEQ ID NO: 96235 - DNA, 25 bp, Saccharomyces pastorianus
cgctgccgtcagagatttgtccgaa

SEQ ID NO: 96236 - DNA, 25 bp, Saccharomyces pastorianus
tttgtccgaagcttctgtctaccct

SEQ ID NO: 96237 - DNA, 25 bp, Saccharomyces pastorianus
gctttgccaaagacttacaacaagt

SEQ ID NO: 96238 - DNA, 25 bp, Saccharomyces pastorianus
gctccacctcaaagaccaagattca

SEQ ID NO: 96239 - DNA, 25 bp, Saccharomyces pastorianus
accagtcagatgtgtcaactgttcc

SEQ ID NO: 96240 - DNA, 25 bp, Saccharomyces pastorianus
tacactactgtgtttcttgtgctat

SEQ ID NO: 96241 - DNA, 25 bp, Saccharomyces pastorianus
tctaccctgaatacgctttgccaaa

SEQ ID NO: 96242 - DNA, 25 bp, Saccharomyces pastorianus
acgtcaaaccagtcagatgtgtcaa

SEQ ID NO: 96243 - DNA, 25 bp, Saccharomyces pastorianus
gttaacgacacaaaagtgtgaaagt

SEQ ID NO: 96244 - DNA, 25 bp, Saccharomyces pastorianus
agatattattaaaacatggcaaatg

SEQ ID NO: 96245 - DNA, 25 bp, Saccharomyces pastorianus
gacaagatattattaaaacatggca

SEQ ID NO: 96246 - DNA, 25 bp, Saccharomyces pastorianus
agaacgatgagatctttgaattggg

SEQ ID NO: 96247 - DNA, 25 bp, Saccharomyces pastorianus
cgatgagatctttgaattgggagaa

SEQ ID NO: 96248 - DNA, 25 bp, Saccharomyces pastorianus
tagagaagggaagaacgatgagatc

SEQ ID NO: 96249 - DNA, 25 bp, Saccharomyces pastorianus
gggaagaacgatgagatctttgaat

SEQ ID NO: 96250 - DNA, 25 bp, Saccharomyces pastorianus
aacgatgagatctttgaattgggag

SEQ ID NO: 96251 - DNA, 25 bp, Saccharomyces pastorianus
gatgagatctttgaattgggagaaa

SEQ ID NO: 96252 - DNA, 25 bp, Saccharomyces pastorianus
tgggagaaagtaatagtgacaagat

SEQ ID NO: 96253 - DNA, 25 bp, Saccharomyces pastorianus
gagatctttgaattgggagaaagta

SEQ ID NO: 96254 - DNA, 25 bp, Saccharomyces pastorianus
gcatactatttctatctctgtcaga

SEQ ID NO: 96255 - DNA, 25 bp, Saccharomyces pastorianus
gaagagccaaaaaatacataaccaa

SEQ ID NO: 96256 - DNA, 25 bp, Saccharomyces pastorianus
agtactattcatgtcataatggcat

SEQ ID NO: 96257 - DNA, 25 bp, Saccharomyces pastorianus
taatggcatactatttctatctctg

SEQ ID NO: 96258 - DNA, 25 bp, Saccharomyces pastorianus
actattcatgtcataatggcatact

SEQ ID NO: 96259 - DNA, 25 bp, Saccharomyces pastorianus
atactatttctatctctgtcagaga

SEQ ID NO: 96260 - DNA, 25 bp, Saccharomyces pastorianus
ggcatactatttctatctctgtcag

SEQ ID NO: 96261 - DNA, 25 bp, Saccharomyces pastorianus
gaaaaggtcgagatatatttttatt

SEQ ID NO: 96262 - DNA, 25 bp, Saccharomyces pastorianus
atcaatattagtactattcatgtca

SEQ ID NO: 96263 - DNA, 25 bp, Saccharomyces pastorianus
atggcatactatttctatctctgtc

SEQ ID NO: 96264 - DNA, 25 bp, Saccharomyces pastorianus
tctctgtcagagatggctagctaga

SEQ ID NO: 96265 - DNA, 25 bp, Saccharomyces pastorianus
tatgtcggttgtacgggttctcccg

SEQ ID NO: 96266 - DNA, 25 bp, Saccharomyces pastorianus
ataagatttttcaagccagccacaa

SEQ ID NO: 96267 - DNA, 25 bp, Saccharomyces pastorianus
gagggtaccgttccaacagacctag

SEQ ID NO: 96268 - DNA, 25 bp, Saccharomyces pastorianus
tcccgctggttcacatactattatg

SEQ ID NO: 96269 - DNA, 25 bp, Saccharomyces pastorianus
acaccaaaccattagattcgtccag

SEQ ID NO: 96270 - DNA, 25 bp, Saccharomyces pastorianus
aactttgattggtcctggtgctaaa

SEQ ID NO: 96271 - DNA, 25 bp, Saccharomyces pastorianus
gagggtatcgatgttttcgacacca

SEQ ID NO: 96272 - DNA, 25 bp, Saccharomyces pastorianus
attcgtccaggaagggtaccatgaa

SEQ ID NO: 96273 - DNA, 25 bp, Saccharomyces pastorianus
gtagctctagatatctgcttcagca

SEQ ID NO: 96274 - DNA, 25 bp, Saccharomyces pastorianus
atgctttcactacgtcaatctataa

SEQ ID NO: 96275 - DNA, 25 bp, Saccharomyces pastorianus
ctgcttcagcaaaaacccgtggtga

SEQ ID NO: 96276 - DNA, 25 bp, Saccharomyces pastorianus
actataccagtttcatgcaatcgtg

SEQ ID NO: 96277 - DNA, 25 bp, Saccharomyces pastorianus
ttctgacgccttggtaacgggacga

SEQ ID NO: 96278 - DNA, 25 bp, Saccharomyces pastorianus
cgggaactccacaaacagaacattt

SEQ ID NO: 96279 - DNA, 25 bp, Saccharomyces pastorianus
agcggatttgcttttggccatgaac

SEQ ID NO: 96280 - DNA, 25 bp, Saccharomyces pastorianus
gcctacaagttgcaatacgggctag

SEQ ID NO: 96281 - DNA, 25 bp, Saccharomyces pastorianus
aatcgtggtcacattgccgggaact

SEQ ID NO: 96282 - DNA, 25 bp, Saccharomyces pastorianus
aattttggacttgcgggctgtttct

SEQ ID NO: 96283 - DNA, 25 bp, Saccharomyces pastorianus
ggaacactgcaatccaggcctaatt

SEQ ID NO: 96284 - DNA, 25 bp, Saccharomyces pastorianus
ccatctcggtttagacgtctttaat

SEQ ID NO: 96285 - DNA, 25 bp, Saccharomyces pastorianus
acgggacgaatcaaccatctcggtt

SEQ ID NO: 96286 - DNA, 25 bp, Saccharomyces pastorianus
agacttacttcaattactccgcatt

SEQ ID NO: 96287 - DNA, 25 bp, Saccharomyces pastorianus
aattcatgcggattcaaacctacca

SEQ ID NO: 96288 - DNA, 25 bp, Saccharomyces pastorianus
atatgggctgtgacggtatctttcg

SEQ ID NO: 96289 - DNA, 25 bp, Saccharomyces pastorianus
ccaacccggatttcaagctgcataa

SEQ ID NO: 96290 - DNA, 25 bp, Saccharomyces pastorianus
ttcgcttctatctatgccttgcaaa

SEQ ID NO: 96291 - DNA, 25 bp, Saccharomyces pastorianus
ctttcgggtgtgtaaattcgcttct

SEQ ID NO: 96292 - DNA, 25 bp, Saccharomyces pastorianus
catgcttccattgatcccgaattaa

SEQ ID NO: 96293 - DNA, 25 bp, Saccharomyces pastorianus
aggtgccgtgttatccttcgaaacg

SEQ ID NO: 96294 - DNA, 25 bp, Saccharomyces pastorianus
gttcgtctttgctgcggtatcgaaa

SEQ ID NO: 96295 - DNA, 25 bp, Saccharomyces pastorianus
aatcgttcaataatggcccaggtgc

SEQ ID NO: 96296 - DNA, 25 bp, Saccharomyces pastorianus
atcgatgacctgcataagcctttaa

SEQ ID NO: 96297 - DNA, 25 bp, Saccharomyces pastorianus
agctgtgaacactaccatcgatgac

SEQ ID NO: 96298 - DNA, 25 bp, Saccharomyces pastorianus
gtgtcttgccataatttcagcatca

SEQ ID NO: 96299 - DNA, 25 bp, Saccharomyces pastorianus
tctttcctgcttttttatgcgtcga

SEQ ID NO: 96300 - DNA, 25 bp, Saccharomyces pastorianus
tcagcatcatcgtctcaacctaagc

SEQ ID NO: 96301 - DNA, 25 bp, Saccharomyces pastorianus
atataaaaggcgatctcccgtccca

SEQ ID NO: 96302 - DNA, 25 bp, Saccharomyces pastorianus
aataaccgcccagatcacgaaattg

SEQ ID NO: 96303 - DNA, 25 bp, Saccharomyces pastorianus
tcccaccgttattctttgcgatata

SEQ ID NO: 96304 - DNA, 25 bp, Saccharomyces pastorianus
atctttctggctctaaaaatcttga

SEQ ID NO: 96305 - DNA, 25 bp, Saccharomyces pastorianus
aggcacgctcaaatatctttctggc

SEQ ID NO: 96306 - DNA, 25 bp, Saccharomyces pastorianus
gaagaattcgtgtcttgccataatt

SEQ ID NO: 96307 - DNA, 25 bp, Saccharomyces pastorianus
gaaccgaatttaccatctttcctgc

SEQ ID NO: 96308 - DNA, 25 bp, Saccharomyces pastorianus
taagcctcttctcacgaaggcacgc

SEQ ID NO: 96309 - DNA, 25 bp, Saccharomyces pastorianus
aacagcttgctgtcgcacaggctca

SEQ ID NO: 96310 - DNA, 25 bp, Saccharomyces pastorianus
gtgtatcggcagcagcgacaacatc

SEQ ID NO: 96311 - DNA, 25 bp, Saccharomyces pastorianus
gagacgtgcgacaacaagtggccca

SEQ ID NO: 96312 - DNA, 25 bp, Saccharomyces pastorianus
ggcccacagccagctatttttgatg

SEQ ID NO: 96313 - DNA, 25 bp, Saccharomyces pastorianus
gtaatcacgccagattttacttcaa

SEQ ID NO: 96314 - DNA, 25 bp, Saccharomyces pastorianus
agcagttttcgatggtacccttcaa

SEQ ID NO: 96315 - DNA, 25 bp, Saccharomyces pastorianus
aggctcaagcacagcagatccagat

SEQ ID NO: 96316 - DNA, 25 bp, Saccharomyces pastorianus
aacagtattacgatcctgctaccgg

SEQ ID NO: 96317 - DNA, 25 bp, Saccharomyces pastorianus
tacgccatggctatgcaacagcagc

SEQ ID NO: 96318 - DNA, 25 bp, Saccharomyces pastorianus
gcaacaggcgccattatcttttcag

SEQ ID NO: 96319 - DNA, 25 bp, Saccharomyces pastorianus
gtagatcagcagcaatacgccatgg

SEQ ID NO: 96320 - DNA, 25 bp, Saccharomyces pastorianus
taccacgttcggaaatgatccttct

SEQ ID NO: 96321 - DNA, 25 bp, Saccharomyces pastorianus
ctaagatggccgcacatatggaatt

SEQ ID NO: 96322 - DNA, 25 bp, Saccharomyces pastorianus
gaatgcctatggtgactaccctttt

SEQ ID NO: 96323 - DNA, 25 bp, Saccharomyces pastorianus
gatccttctatgtaatgaggccatt

SEQ ID NO: 96324 - DNA, 25 bp, Saccharomyces pastorianus
caagcatgcttctgaggtagctgaa

SEQ ID NO: 96325 - DNA, 25 bp, Saccharomyces pastorianus
gaaggcattatccattttatcaaaa

SEQ ID NO: 96326 - DNA, 25 bp, Saccharomyces pastorianus
tccaactggtggtatgaatctcaag

SEQ ID NO: 96327 - DNA, 25 bp, Saccharomyces pastorianus
gaaacttctctggacgatgatgatt

SEQ ID NO: 96328 - DNA, 25 bp, Saccharomyces pastorianus
tctatgcaggtaacgtccaactggt

SEQ ID NO: 96329 - DNA, 25 bp, Saccharomyces pastorianus
gttaacgtgttggtacagtggctaa

SEQ ID NO: 96330 - DNA, 25 bp, Saccharomyces pastorianus
gcttatgcaacttcactttggatgt

SEQ ID NO: 96331 - DNA, 25 bp, Saccharomyces pastorianus
tagagagtcatcctattcgtccttt

SEQ ID NO: 96332 - DNA, 25 bp, Saccharomyces pastorianus
aagtttgagctctactcttacgcct

SEQ ID NO: 96333 - DNA, 25 bp, Saccharomyces pastorianus
ggtcagcctaccagtgaattcatca

SEQ ID NO: 96334 - DNA, 25 bp, Saccharomyces pastorianus
gaattcatcattcgcctctttagat

SEQ ID NO: 96335 - DNA, 25 bp, Saccharomyces pastorianus
tgagttgaaagtttcaccgccctct

SEQ ID NO: 96336 - DNA, 25 bp, Saccharomyces pastorianus
accgcttttgcatctcagatcagta

SEQ ID NO: 96337 - DNA, 25 bp, Saccharomyces pastorianus
gaagcagacgcatcacttgtatttg

SEQ ID NO: 96338 - DNA, 25 bp, Saccharomyces pastorianus
agatcagtattcaggatgccccagc

SEQ ID NO: 96339 - DNA, 25 bp, Saccharomyces pastorianus
gcagcatccgtatcgaccaatttgg

SEQ ID NO: 96340 - DNA, 25 bp, Saccharomyces pastorianus
tacgcctgtcggtaatgtacctcaa

SEQ ID NO: 96341 - DNA, 25 bp, Saccharomyces pastorianus
atgccccagcaatcggtgatcaaca

SEQ ID NO: 96342 - DNA, 25 bp, Saccharomyces pastorianus
tgacgatggatgtttcttctggagt

SEQ ID NO: 96343 - DNA, 25 bp, Saccharomyces pastorianus
ataacaagatcccaccgtacgagag

SEQ ID NO: 96344 - DNA, 25 bp, Saccharomyces pastorianus
ccaaatgaagatatcgccccggtta

SEQ ID NO: 96345 - DNA, 25 bp, Saccharomyces pastorianus
aaccctgaatctacatcgccaaatt

SEQ ID NO: 96346 - DNA, 25 bp, Saccharomyces pastorianus
attgctctgatactgtaatccacga

SEQ ID NO: 96347 - DNA, 25 bp, Saccharomyces pastorianus
ggagcgattttatgcccaagttgga

SEQ ID NO: 96348 - DNA, 25 bp, Saccharomyces pastorianus
gagcctggattctcgaagactttag

SEQ ID NO: 96349 - DNA, 25 bp, Saccharomyces pastorianus
tgtttgacttcaatacgaacccttt

SEQ ID NO: 96350 - DNA, 25 bp, Saccharomyces pastorianus
ggaatagagctcgagaaccctgaat

SEQ ID NO: 96351 - DNA, 25 bp, Saccharomyces pastorianus
aatggcctcaacaacttaagcgatt

SEQ ID NO: 96352 - DNA, 25 bp, Saccharomyces pastorianus
tggaagactggattttccctccact

SEQ ID NO: 96353 - DNA, 25 bp, Saccharomyces pastorianus
gacgattctagttttagtcgatcta

SEQ ID NO: 96354 - DNA, 25 bp, Saccharomyces pastorianus
aagagccacttgtcacagtagcaga

SEQ ID NO: 96355 - DNA, 25 bp, Saccharomyces pastorianus
aggtttgccattatgcctgggtcaa

SEQ ID NO: 96356 - DNA, 25 bp, Saccharomyces pastorianus
tactgggccgcaagctttatgataa

SEQ ID NO: 96357 - DNA, 25 bp, Saccharomyces pastorianus
gacggtgtccacagatcaaatggct

SEQ ID NO: 96358 - DNA, 25 bp, Saccharomyces pastorianus
aaaacatctttactgggccgcaagc

SEQ ID NO: 96359 - DNA, 25 bp, Saccharomyces pastorianus
aaacaaacgagctttcccatgcaat

SEQ ID NO: 96360 - DNA, 25 bp, Saccharomyces pastorianus
ctgacgatagaagaccctgcaataa

SEQ ID NO: 96361 - DNA, 25 bp, Saccharomyces pastorianus
gagacgctcaaggtcacaagattca

SEQ ID NO: 96362 - DNA, 25 bp, Saccharomyces pastorianus
ttccgcatcgtcaattgctggcaac

SEQ ID NO: 96363 - DNA, 25 bp, Saccharomyces pastorianus
atcaaactgcctcaagtctgacgat

SEQ ID NO: 96364 - DNA, 25 bp, Saccharomyces pastorianus
accagatgccttaccctaatatgaa

SEQ ID NO: 96365 - DNA, 25 bp, Saccharomyces pastorianus
ctccacctcctatgacaaatgtttc

SEQ ID NO: 96366 - DNA, 25 bp, Saccharomyces pastorianus
accagcaccacatgggtttggacaa

SEQ ID NO: 96367 - DNA, 25 bp, Saccharomyces pastorianus
gggtcctattcctggagcgaatgat

SEQ ID NO: 96368 - DNA, 25 bp, Saccharomyces pastorianus
aagcaccgcttgataatccaactgt

SEQ ID NO: 96369 - DNA, 25 bp, Saccharomyces pastorianus
gctggatctattttcaatgccgttg

SEQ ID NO: 96370 - DNA, 25 bp, Saccharomyces pastorianus
acagcacagcaatggttcaactatt

SEQ ID NO: 96371 - DNA, 25 bp, Saccharomyces pastorianus
aatggaatgtctattccgccaccag

SEQ ID NO: 96372 - DNA, 25 bp, Saccharomyces pastorianus
caggttttatgacccatcctaatgg

SEQ ID NO: 96373 - DNA, 25 bp, Saccharomyces pastorianus
gcagatgttggtttgccgtacaata

SEQ ID NO: 96374 - DNA, 25 bp, Saccharomyces pastorianus
gagattaaaccttcttctggcacaa

SEQ ID NO: 96375 - DNA, 25 bp, Saccharomyces pastorianus
tactgccgtattctctctgatatag

SEQ ID NO: 96376 - DNA, 25 bp, Saccharomyces pastorianus
ttagctgccatagtctctactgtca

SEQ ID NO: 96377 - DNA, 25 bp, Saccharomyces pastorianus
attcctcgtgatgttgcatacctac

SEQ ID NO: 96378 - DNA, 25 bp, Saccharomyces pastorianus
gatctcgcaccatttgaaggccgat

SEQ ID NO: 96379 - DNA, 25 bp, Saccharomyces pastorianus
gatgaggaccttctagacacgcaaa

SEQ ID NO: 96380 - DNA, 25 bp, Saccharomyces pastorianus
tacagcaactattaactccgggaag

SEQ ID NO: 96381 - DNA, 25 bp, Saccharomyces pastorianus
gatacagatttatttggcgccccaa

SEQ ID NO: 96382 - DNA, 25 bp, Saccharomyces pastorianus
ggatttccgaattaccacctcaaat

SEQ ID NO: 96383 - DNA, 25 bp, Saccharomyces pastorianus
gcagatctaggttcatccgaagcag

SEQ ID NO: 96384 - DNA, 25 bp, Saccharomyces pastorianus
gaattgatagattccattcctcgtg

SEQ ID NO: 96385 - DNA, 25 bp, Saccharomyces pastorianus
caaactttttcggtgctcttacagc

SEQ ID NO: 96386 - DNA, 25 bp, Saccharomyces pastorianus
aaattacgtgattccgacttacaat

SEQ ID NO: 96387 - DNA, 25 bp, Saccharomyces pastorianus
gcgacctggcggttttacatatgaa

SEQ ID NO: 96388 - DNA, 25 bp, Saccharomyces pastorianus
ttcctcattgcgaaggcgatggcat

SEQ ID NO: 96389 - DNA, 25 bp, Saccharomyces pastorianus
aagtatagacactattccccttcag

SEQ ID NO: 96390 - DNA, 25 bp, Saccharomyces pastorianus
cagactaacttgtttgcagctttaa

SEQ ID NO: 96391 - DNA, 25 bp, Saccharomyces pastorianus
ttcatcatcgaaagacttggccagt

SEQ ID NO: 96392 - DNA, 25 bp, Saccharomyces pastorianus
ataattcttgatggcggagcgtgca

SEQ ID NO: 96393 - DNA, 25 bp, Saccharomyces pastorianus
actattccccttcagctaaagttgt

SEQ ID NO: 96394 - DNA, 25 bp, Saccharomyces pastorianus
gttgttttactagttcctcattgcg

SEQ ID NO: 96395 - DNA, 25 bp, Saccharomyces pastorianus
atgtaatcctcctatgctactgcga

SEQ ID NO: 96396 - DNA, 25 bp, Saccharomyces pastorianus
gatggcattcttaagggcgctgaca

SEQ ID NO: 96397 - DNA, 25 bp, Saccharomyces pastorianus
tctttttcctcgtccacaattttct

SEQ ID NO: 96398 - DNA, 25 bp, Saccharomyces pastorianus
gataccaagtttctcagttttaaag

SEQ ID NO: 96399 - DNA, 25 bp, Saccharomyces pastorianus
cgtccacaattttctcagttcatca

SEQ ID NO: 96400 - DNA, 25 bp, Saccharomyces pastorianus
aacgctactgctgatgagcaataac

SEQ ID NO: 96401 - DNA, 25 bp, Saccharomyces pastorianus
tgttcccattaattagtacatttac

SEQ ID NO: 96402 - DNA, 25 bp, Saccharomyces pastorianus
atacatctacatatgttcccattaa

SEQ ID NO: 96403 - DNA, 25 bp, Saccharomyces pastorianus
caacgatgaaaacgctactgctgat

SEQ ID NO: 96404 - DNA, 25 bp, Saccharomyces pastorianus
atacgttgagtcttcttcattcttt

SEQ ID NO: 96405 - DNA, 25 bp, Saccharomyces pastorianus
gtacatttacctcaatagggttggg

SEQ ID NO: 96406 - DNA, 25 bp, Saccharomyces pastorianus
atgtttatcttagtatccgttgtaa

SEQ ID NO: 96407 - DNA, 25 bp, Saccharomyces pastorianus
gaaatacgttgagtcttcttcattc

SEQ ID NO: 96408 - DNA, 25 bp, Saccharomyces pastorianus
gactgccagcttgccgggagaacaa

SEQ ID NO: 96409 - DNA, 25 bp, Saccharomyces pastorianus
aggtggcttcaaactcggcaatgtg

SEQ ID NO: 96410 - DNA, 25 bp, Saccharomyces pastorianus
tgcgcttcctgtttcattgatacta

SEQ ID NO: 96411 - DNA, 25 bp, Saccharomyces pastorianus
gtatcctgtgcagccttggacaaat

SEQ ID NO: 96412 - DNA, 25 bp, Saccharomyces pastorianus
ggttgtcatgtctacatccgacgag

SEQ ID NO: 96413 - DNA, 25 bp, Saccharomyces pastorianus
agatctgcaacaccgagaccattga

SEQ ID NO: 96414 - DNA, 25 bp, Saccharomyces pastorianus
aagattgtcaatgctgtcggcctta

SEQ ID NO: 96415 - DNA, 25 bp, Saccharomyces pastorianus
gttcgtagttgtatatgcgcttcct

SEQ ID NO: 96416 - DNA, 25 bp, Saccharomyces pastorianus
ggccttaatttctccgttttgcaga

SEQ ID NO: 96417 - DNA, 25 bp, Saccharomyces pastorianus
agaccattgacatgcgctgcttcat

SEQ ID NO: 96418 - DNA, 25 bp, Saccharomyces pastorianus
acgagcgaccatttaggcccaaaag

SEQ ID NO: 96419 - DNA, 25 bp, Saccharomyces pastorianus
gctgtttttcagtgtttccggtaag

SEQ ID NO: 96420 - DNA, 25 bp, Saccharomyces pastorianus
ggctgacgtccttacaaagtaacga

SEQ ID NO: 96421 - DNA, 25 bp, Saccharomyces pastorianus
gacaagggattactcgatgacatta

SEQ ID NO: 96422 - DNA, 25 bp, Saccharomyces pastorianus
ttccggtaagcttctccgattagaa

SEQ ID NO: 96423 - DNA, 25 bp, Saccharomyces pastorianus
gattcgtcgatcacactactggagt

SEQ ID NO: 96424 - DNA, 25 bp, Saccharomyces pastorianus
gaacaagacttcaatgacggtagat

SEQ ID NO: 96425 - DNA, 25 bp, Saccharomyces pastorianus
gaagattgaccggagcgatgacaaa

SEQ ID NO: 96426 - DNA, 25 bp, Saccharomyces pastorianus
tggagtacatcattcggctgacgtc

SEQ ID NO: 96427 - DNA, 25 bp, Saccharomyces pastorianus
aagacacaccacaggaacttgccat

SEQ ID NO: 96428 - DNA, 25 bp, Saccharomyces pastorianus
gaacttgccatagatctgaaccata

SEQ ID NO: 96429 - DNA, 25 bp, Saccharomyces pastorianus
gaacaggattctccagtgttggtat

SEQ ID NO: 96430 - DNA, 25 bp, Saccharomyces pastorianus
atgcgtcatgcactcaaatgtctat

SEQ ID NO: 96431 - DNA, 25 bp, Saccharomyces pastorianus
ctcacaccttgtttaccatgcatta

SEQ ID NO: 96432 - DNA, 25 bp, Saccharomyces pastorianus
gggtacaggctcacgcaagttgatt

SEQ ID NO: 96433 - DNA, 25 bp, Saccharomyces pastorianus
gataagttggttttgctcacacctt

SEQ ID NO: 96434 - DNA, 25 bp, Saccharomyces pastorianus
acaagttgcggtacgtcttgactcc

SEQ ID NO: 96435 - DNA, 25 bp, Saccharomyces pastorianus
aatgtctataatttcgcgctcaacg

SEQ ID NO: 96436 - DNA, 25 bp, Saccharomyces pastorianus
tgcccttgcttccatggtcaatgaa

SEQ ID NO: 96437 - DNA, 25 bp, Saccharomyces pastorianus
atattcggctatatcgaggcacgct

SEQ ID NO: 96438 - DNA, 25 bp, Saccharomyces pastorianus
tcttgactcctgacgatattcggct

SEQ ID NO: 96439 - DNA, 25 bp, Saccharomyces pastorianus
gtttgagtatcatcctcatgccctt

SEQ ID NO: 96440 - DNA, 25 bp, Saccharomyces pastorianus
cacgctgttgcggaatattgccata

SEQ ID NO: 96441 - DNA, 25 bp, Saccharomyces pastorianus
actcaaattcttatgccagcgtgca

SEQ ID NO: 96442 - DNA, 25 bp, Saccharomyces pastorianus
agatgacaccgagttttccagaagt

SEQ ID NO: 96443 - DNA, 25 bp, Saccharomyces pastorianus
gattacgaattcttggcgccatggt

SEQ ID NO: 96444 - DNA, 25 bp, Saccharomyces pastorianus
gtgtggatatcctccgttttacgaa

SEQ ID NO: 96445 - DNA, 25 bp, Saccharomyces pastorianus
gaagtattcacctccaaacgatatt

SEQ ID NO: 96446 - DNA, 25 bp, Saccharomyces pastorianus
ggagtattggctgcgtactattcac

SEQ ID NO: 96447 - DNA, 25 bp, Saccharomyces pastorianus
aatgatccttggttaaattcctacg

SEQ ID NO: 96448 - DNA, 25 bp, Saccharomyces pastorianus
gagcagagaccctacattgtgcatt

SEQ ID NO: 96449 - DNA, 25 bp, Saccharomyces pastorianus
gagtgttttaccttagaccttgcaa

SEQ ID NO: 96450 - DNA, 25 bp, Saccharomyces pastorianus
agaacgcagttacccatcttttgga

SEQ ID NO: 96451 - DNA, 25 bp, Saccharomyces pastorianus
ttgtgcattaagctgccaatctgaa

SEQ ID NO: 96452 - DNA, 25 bp, Saccharomyces pastorianus
gagtttgacagcaacgcgagacgaa

SEQ ID NO: 96453 - DNA, 25 bp, Saccharomyces pastorianus
aaaggctccggatgcgcatgctgat

SEQ ID NO: 96454 - DNA, 25 bp, Saccharomyces pastorianus
agtgctgtcaagtccaactattcat

SEQ ID NO: 96455 - DNA, 25 bp, Saccharomyces pastorianus
gacgtcgctaaatttgaggtttgcc

SEQ ID NO: 96456 - DNA, 25 bp, Saccharomyces pastorianus
gggaatcttttgcttcactaaatac

SEQ ID NO: 96457 - DNA, 25 bp, Saccharomyces pastorianus
attaagatcaccaaaggctccggat

SEQ ID NO: 96458 - DNA, 25 bp, Saccharomyces pastorianus
gatgacatcataagcatttccggag

SEQ ID NO: 96459 - DNA, 25 bp, Saccharomyces pastorianus
tgcgcatgctgatatgggtactcat

SEQ ID NO: 96460 - DNA, 25 bp, Saccharomyces pastorianus
gacactgttaagctcgctcacgaat

SEQ ID NO: 96461 - DNA, 25 bp, Saccharomyces pastorianus
ggagcactatcaagcgacactgtta

SEQ ID NO: 96462 - DNA, 25 bp, Saccharomyces pastorianus
ggtttgccatcacaaatttgctgat

SEQ ID NO: 96463 - DNA, 25 bp, Saccharomyces pastorianus
taagttcgctgatacgtgttacgca

SEQ ID NO: 96464 - DNA, 25 bp, Saccharomyces pastorianus
tgaaccacactcagggtacacatct

SEQ ID NO: 96465 - DNA, 25 bp, Saccharomyces pastorianus
ggtgcttaaattcactacacttact

SEQ ID NO: 96466 - DNA, 25 bp, Saccharomyces pastorianus
ggagcgctgcgttagcattaattga

SEQ ID NO: 96467 - DNA, 25 bp, Saccharomyces pastorianus
atatcacagctgtctagggagcgct

SEQ ID NO: 96468 - DNA, 25 bp, Saccharomyces pastorianus
gtctacgttagctttactctctagt

SEQ ID NO: 96469 - DNA, 25 bp, Saccharomyces pastorianus
ggagctttcggtgcccacaatgaac

SEQ ID NO: 96470 - DNA, 25 bp, Saccharomyces pastorianus
gacaccataacctggctattacata

SEQ ID NO: 96471 - DNA, 25 bp, Saccharomyces pastorianus
gctacatcgcagttgccattctgta

SEQ ID NO: 96472 - DNA, 25 bp, Saccharomyces pastorianus
ttctgtacatatgcggatgccgatc

SEQ ID NO: 96473 - DNA, 25 bp, Saccharomyces pastorianus
acatcttgtgcgctgtctacgttag

SEQ ID NO: 96474 - DNA, 25 bp, Saccharomyces pastorianus
aagtctatgtaaccagctgctgcag

SEQ ID NO: 96475 - DNA, 25 bp, Saccharomyces pastorianus
ttggctgctctatagtaacgggctt

SEQ ID NO: 96476 - DNA, 25 bp, Saccharomyces pastorianus
caatatgtagctatgttcctcgtaa

SEQ ID NO: 96477 - DNA, 25 bp, Saccharomyces pastorianus
ggaactggccttaacacagacttgt

SEQ ID NO: 96478 - DNA, 25 bp, Saccharomyces pastorianus
gattttggcgctatcagcttttttc

SEQ ID NO: 96479 - DNA, 25 bp, Saccharomyces pastorianus
gaaagcgtctgatccatgcacaata

SEQ ID NO: 96480 - DNA, 25 bp, Saccharomyces pastorianus
agggcagcttcggtaagccattatt

SEQ ID NO: 96481 - DNA, 25 bp, Saccharomyces pastorianus
tgagggagcttctatgtgcataact

SEQ ID NO: 96482 - DNA, 25 bp, Saccharomyces pastorianus
gttttcttccatttagcatgaccat

SEQ ID NO: 96483 - DNA, 25 bp, Saccharomyces pastorianus
gaagttccattgattttccattctc

SEQ ID NO: 96484 - DNA, 25 bp, Saccharomyces pastorianus
gaattgatatcgcttctccgtgcaa

SEQ ID NO: 96485 - DNA, 25 bp, Saccharomyces pastorianus
accacctcgagcttaactattctaa

SEQ ID NO: 96486 - DNA, 25 bp, Saccharomyces pastorianus
acactgatctcattggcggcggtat

SEQ ID NO: 96487 - DNA, 25 bp, Saccharomyces pastorianus
aagcgcctgtttcagttcagcaatc

SEQ ID NO: 96488 - DNA, 25 bp, Saccharomyces pastorianus
tttcctttttcctaaactcagcttg

SEQ ID NO: 96489 - DNA, 25 bp, Saccharomyces pastorianus
ataatctattgtcctgcgcattacc

SEQ ID NO: 96490 - DNA, 25 bp, Saccharomyces pastorianus
tctcttgcttttttccacgctggaa

SEQ ID NO: 96491 - DNA, 25 bp, Saccharomyces pastorianus
tgggatggagtcttcgacctgtcca

SEQ ID NO: 96492 - DNA, 25 bp, Saccharomyces pastorianus
gtcatctttattagcatcgctgccg

SEQ ID NO: 96493 - DNA, 25 bp, Saccharomyces pastorianus
gtattttgcatattgaccacctcga

SEQ ID NO: 96494 - DNA, 25 bp, Saccharomyces pastorianus
atttaactcttgcatgccgtcatta

SEQ ID NO: 96495 - DNA, 25 bp, Saccharomyces pastorianus
tctttatcactttcttcttgcatgc

SEQ ID NO: 96496 - DNA, 25 bp, Saccharomyces pastorianus
gtctcggtgagccatgctttgacaa

SEQ ID NO: 96497 - DNA, 25 bp, Saccharomyces pastorianus
aggactctatcggtggtgtcgtcac

SEQ ID NO: 96498 - DNA, 25 bp, Saccharomyces pastorianus
gtgtcgtgagaaacttgcctaccgg

SEQ ID NO: 96499 - DNA, 25 bp, Saccharomyces pastorianus
tattgtggaagccatgaccgctctg

SEQ ID NO: 96500 - DNA, 25 bp, Saccharomyces pastorianus
aatgggtcccatcagatgtccagac

SEQ ID NO: 96501 - DNA, 25 bp, Saccharomyces pastorianus
gttggctcatgctatgttgtccatt

SEQ ID NO: 96502 - DNA, 25 bp, Saccharomyces pastorianus
agaacatctatttctctgtcccatt

SEQ ID NO: 96503 - DNA, 25 bp, Saccharomyces pastorianus
agggtgtctctgttccagggtctaa

SEQ ID NO: 96504 - DNA, 25 bp, Saccharomyces pastorianus
agacgcctccattgctggtttgatg

SEQ ID NO: 96505 - DNA, 25 bp, Saccharomyces pastorianus
tggctgacgcgcttttgatccaaaa

SEQ ID NO: 96506 - DNA, 25 bp, Saccharomyces pastorianus
aattggctcaggttttcagggtgtc

SEQ ID NO: 96507 - DNA, 25 bp, Saccharomyces pastorianus
cttcaccaaggtcaacaaccaattg

SEQ ID NO: 96508 - DNA, 25 bp, Saccharomyces pastorianus
ggtcaacaaccaattgatcaaggtt

SEQ ID NO: 96509 - DNA, 25 bp, Saccharomyces pastorianus
gatgttaccttcaccaaggtcaaca

SEQ ID NO: 96510 - DNA, 25 bp, Saccharomyces pastorianus
aaggtcaacaaccaattgatcaagg

SEQ ID NO: 96511 - DNA, 25 bp, Saccharomyces pastorianus
ttcccaatcaacgtcaacattgttg

SEQ ID NO: 96512 - DNA, 25 bp, Saccharomyces pastorianus
attgatgttaccttcaccaaggtca

SEQ ID NO: 96513 - DNA, 25 bp, Saccharomyces pastorianus
tcaacattgttgaaaaggatggtgc

SEQ ID NO: 96514 - DNA, 25 bp, Saccharomyces pastorianus
gttagagatggtgttactatcgaat

SEQ ID NO: 96515 - DNA, 25 bp, Saccharomyces pastorianus
tgttaccttcaccaaggtcaacaac

SEQ ID NO: 96516 - DNA, 25 bp, Saccharomyces pastorianus
cattgaagtcagaaactttttgggt

SEQ ID NO: 96517 - DNA, 25 bp, Saccharomyces pastorianus
ccagttagagatggtgttactatcg

SEQ ID NO: 96518 - DNA, 25 bp, Saccharomyces pastorianus
gcacattgatgttaccttcaccaag

SEQ ID NO: 96519 - DNA, 25 bp, Saccharomyces pastorianus
tactatcgaattttccaccaacgtt

SEQ ID NO: 96520 - DNA, 25 bp, Saccharomyces pastorianus
gttactatcgaattttccaccaacg

SEQ ID NO: 96521 - DNA, 25 bp, Saccharomyces pastorianus
tgtcaggtaactctgtcgaagacgt

SEQ ID NO: 96522 - DNA, 25 bp, Saccharomyces pastorianus
gaaattgtcttgtcaggtaactctg

SEQ ID NO: 96523 - DNA, 25 bp, Saccharomyces pastorianus
gttgctgctttgagaaccgtcaagt

SEQ ID NO: 96524 - DNA, 25 bp, Saccharomyces pastorianus
tatcgaattttccaccaacgttaag

SEQ ID NO: 96525 - DNA, 25 bp, Saccharomyces pastorianus
agaatcgtcaaggttgttggtccaa

SEQ ID NO: 96526 - DNA, 25 bp, Saccharomyces pastorianus
aatcgaagtcccagaaggtgtcact

SEQ ID NO: 96527 - DNA, 25 bp, Saccharomyces pastorianus
gtcactgtcagcatcaagtccagaa

SEQ ID NO: 96528 - DNA, 25 bp, Saccharomyces pastorianus
aaggtgtcactgtcagcatcaagtc

SEQ ID NO: 96529 - DNA, 25 bp, Saccharomyces pastorianus
aaagcattgaataccgtctctgacg

SEQ ID NO: 96530 - DNA, 25 bp, Saccharomyces pastorianus
gtctatgacggatcgtggagctcga

SEQ ID NO: 96531 - DNA, 25 bp, Saccharomyces pastorianus
tgggaggcaatcactgggcttcagt

SEQ ID NO: 96532 - DNA, 25 bp, Saccharomyces pastorianus
ggtagcacagctgatatccaatatt

SEQ ID NO: 96533 - DNA, 25 bp, Saccharomyces pastorianus
gagcgataccacacttcttcaaatg

SEQ ID NO: 96534 - DNA, 25 bp, Saccharomyces pastorianus
aagaaacagactccagcaggttcgg

SEQ ID NO: 96535 - DNA, 25 bp, Saccharomyces pastorianus
gtctctgacggtcttttccagatag

SEQ ID NO: 96536 - DNA, 25 bp, Saccharomyces pastorianus
aagctcgatcctgacatgttgttgc

SEQ ID NO: 96537 - DNA, 25 bp, Saccharomyces pastorianus
gcgttctgtaccgtgtttaatgcag

SEQ ID NO: 96538 - DNA, 25 bp, Saccharomyces pastorianus
aatgcaggcatgaatgacgcgtcta

SEQ ID NO: 96539 - DNA, 25 bp, Saccharomyces pastorianus
agcgggacgtcggtcatcgaagtta

SEQ ID NO: 96540 - DNA, 25 bp, Saccharomyces pastorianus
caacattagagatgtctgtcgacga

SEQ ID NO: 96541 - DNA, 25 bp, Saccharomyces pastorianus
gtcgtccgtaccaagcgctgagttg

SEQ ID NO: 96542 - DNA, 25 bp, Saccharomyces pastorianus
tctgtcgacgaaaatatcgggccgt

SEQ ID NO: 96543 - DNA, 25 bp, Saccharomyces pastorianus
cttaccgtcacatgctaccaattat

SEQ ID NO: 96544 - DNA, 25 bp, Saccharomyces pastorianus
aagatttcaacttggtcaacattag

SEQ ID NO: 96545 - DNA, 25 bp, Saccharomyces pastorianus
gcagcattttgagcttaccgtcaca

SEQ ID NO: 96546 - DNA, 25 bp, Saccharomyces pastorianus
gaagcttattccattaagtacttga

SEQ ID NO: 96547 - DNA, 25 bp, Saccharomyces pastorianus
gtatgatccaaacaatcagcagttt

SEQ ID NO: 96548 - DNA, 25 bp, Saccharomyces pastorianus
agcgctgagttggtcaattcaatta

SEQ ID NO: 96549 - DNA, 25 bp, Saccharomyces pastorianus
tatgcaaaactccattgtacacagg

SEQ ID NO: 96550 - DNA, 25 bp, Saccharomyces pastorianus
ggatatcccactagctatttcatta

SEQ ID NO: 96551 - DNA, 25 bp, Saccharomyces pastorianus
tgttccattcgtgtcggtgttcatc

SEQ ID NO: 96552 - DNA, 25 bp, Saccharomyces pastorianus
gagacccagaggcttactccaaact

SEQ ID NO: 96553 - DNA, 25 bp, Saccharomyces pastorianus
ggtgttcatcgcattacttttggac

SEQ ID NO: 96554 - DNA, 25 bp, Saccharomyces pastorianus
gtggtcgattacttgtaaccctcca

SEQ ID NO: 96555 - DNA, 25 bp, Saccharomyces pastorianus
catcatttggccttttgagacttga

SEQ ID NO: 96556 - DNA, 25 bp, Saccharomyces pastorianus
aatagattcttcaactctcttgcgc

SEQ ID NO: 96557 - DNA, 25 bp, Saccharomyces pastorianus
gtcaaagctatttacaccgcagtga

SEQ ID NO: 96558 - DNA, 25 bp, Saccharomyces pastorianus
aaaatctttactctggcttgttcca

SEQ ID NO: 96559 - DNA, 25 bp, Saccharomyces pastorianus
aactctcttgcgcactgggattcaa

SEQ ID NO: 96560 - DNA, 25 bp, Saccharomyces pastorianus
tccaccgccttttcgtaaggatcta

SEQ ID NO: 96561 - DNA, 25 bp, Saccharomyces pastorianus
cattgcatttacttggagacccaga

SEQ ID NO: 96562 - DNA, 25 bp, Saccharomyces pastorianus
gaacatgaccactgacgagatcaag

SEQ ID NO: 96563 - DNA, 25 bp, Saccharomyces pastorianus
agatgagcctgaaagttccgcaaaa

SEQ ID NO: 96564 - DNA, 25 bp, Saccharomyces pastorianus
agctcctctgcaaggcttcaaggca

SEQ ID NO: 96565 - DNA, 25 bp, Saccharomyces pastorianus
gttgttgacttaattccgaatggtt

SEQ ID NO: 96566 - DNA, 25 bp, Saccharomyces pastorianus
tttgaaatttgtcacgtccgttccg

SEQ ID NO: 96567 - DNA, 25 bp, Saccharomyces pastorianus
ttcaaaccagtttcggcattccatg

SEQ ID NO: 96568 - DNA, 25 bp, Saccharomyces pastorianus
gaaatacaggctgcctacggcatct

SEQ ID NO: 96569 - DNA, 25 bp, Saccharomyces pastorianus
tcagtgttatcattgccccacattg

SEQ ID NO: 96570 - DNA, 25 bp, Saccharomyces pastorianus
gataatgtgttgctctacgttacta

SEQ ID NO: 96571 - DNA, 25 bp, Saccharomyces pastorianus
gcattccatggagggctcagtgtta

SEQ ID NO: 96572 - DNA, 25 bp, Saccharomyces pastorianus
ctacggcatctacctgtgttaattt

SEQ ID NO: 96573 - DNA, 25 bp, Saccharomyces pastorianus
gatgctctgagagttgaagctccaa

SEQ ID NO: 96574 - DNA, 25 bp, Saccharomyces pastorianus
ttaggctctaaaccttatccaggac

SEQ ID NO: 96575 - DNA, 25 bp, Saccharomyces pastorianus
atgcgcataatggactgatcaattc

SEQ ID NO: 96576 - DNA, 25 bp, Saccharomyces pastorianus
gttcaaataccgatccatttcacga

SEQ ID NO: 96577 - DNA, 25 bp, Saccharomyces pastorianus
acaagatcacagtctgatgcgcata

SEQ ID NO: 96578 - DNA, 25 bp, Saccharomyces pastorianus
gataacaagcctacgttttcagaga

SEQ ID NO: 96579 - DNA, 25 bp, Saccharomyces pastorianus
gaaaacgcaagcacagatgctctga

SEQ ID NO: 96580 - DNA, 25 bp, Saccharomyces pastorianus
gaacgagttgcttgcgttgggcaat

SEQ ID NO: 96581 - DNA, 25 bp, Saccharomyces pastorianus
gtttcctcacaacttaacgaatctt

SEQ ID NO: 96582 - DNA, 25 bp, Saccharomyces pastorianus
ggacgatagaacttctttccaaagg

SEQ ID NO: 96583 - DNA, 25 bp, Saccharomyces pastorianus
tttagatacctcaagttcggacgga

SEQ ID NO: 96584 - DNA, 25 bp, Saccharomyces pastorianus
ggtggtaccttatctacattcgtta

SEQ ID NO: 96585 - DNA, 25 bp, Saccharomyces pastorianus
agctcagtatgtttcaagtttgcaa

SEQ ID NO: 96586 - DNA, 25 bp, Saccharomyces pastorianus
tgcaattcttcaaagacgcatcccc

SEQ ID NO: 96587 - DNA, 25 bp, Saccharomyces pastorianus
tgcactaataagagcgatagccgca

SEQ ID NO: 96588 - DNA, 25 bp, Saccharomyces pastorianus
attcgttaagtattcctatgtccaa

SEQ ID NO: 96589 - DNA, 25 bp, Saccharomyces pastorianus
gatagccgcacataatagaaactct

SEQ ID NO: 96590 - DNA, 25 bp, Saccharomyces pastorianus
gcaatatgatagctctgggaatgaa

SEQ ID NO: 96591 - DNA, 25 bp, Saccharomyces pastorianus
tgttggattcgtatttgtttgcaat

SEQ ID NO: 96592 - DNA, 25 bp, Saccharomyces pastorianus
tagaaaggcctcatgatgcactaat

SEQ ID NO: 96593 - DNA, 25 bp, Saccharomyces pastorianus
tacacagcgtaatgtaaccctttac

SEQ ID NO: 96594 - DNA, 25 bp, Saccharomyces pastorianus
gaaactattccattaacgcctatca

SEQ ID NO: 96595 - DNA, 25 bp, Saccharomyces pastorianus
gttcataagttcaagcctgacgctt

SEQ ID NO: 96596 - DNA, 25 bp, Saccharomyces pastorianus
atggctaatacatctggtgtcagta

SEQ ID NO: 96597 - DNA, 25 bp, Saccharomyces pastorianus
ttatgtgacgcagccttagttacgg

SEQ ID NO: 96598 - DNA, 25 bp, Saccharomyces pastorianus
gtgaaattttcacctctgatgacat

SEQ ID NO: 96599 - DNA, 25 bp, Saccharomyces pastorianus
aagcctgacgcttctagagacgaat

SEQ ID NO: 96600 - DNA, 25 bp, Saccharomyces pastorianus
tttgcataaggaccatggctatttc

SEQ ID NO: 96601 - DNA, 25 bp, Saccharomyces pastorianus
atgtatgaaccctggccccaaacaa

SEQ ID NO: 96602 - DNA, 25 bp, Saccharomyces pastorianus
gaactcatgatcttatacggctctt

SEQ ID NO: 96603 - DNA, 25 bp, Saccharomyces pastorianus
ggctatttccagaacatgctcgagg

SEQ ID NO: 96604 - DNA, 25 bp, Saccharomyces pastorianus
gcaggcagttttcactaacgttcat

SEQ ID NO: 96605 - DNA, 25 bp, Saccharomyces pastorianus
tacggccattaggttcgtttgtttg

SEQ ID NO: 96606 - DNA, 25 bp, Saccharomyces pastorianus
ttgacgctatgtccgtcgatgactt

SEQ ID NO: 96607 - DNA, 25 bp, Saccharomyces pastorianus
tgaaatggaagaagacgttttggtt

SEQ ID NO: 96608 - DNA, 25 bp, Saccharomyces pastorianus
tgacagagctaagtcttgcggtgtt

SEQ ID NO: 96609 - DNA, 25 bp, Saccharomyces pastorianus
cgttttggttaaccaaatcttgatg

SEQ ID NO: 96610 - DNA, 25 bp, Saccharomyces pastorianus
ctaagtcttgcggtgttgacgctat

SEQ ID NO: 96611 - DNA, 25 bp, Saccharomyces pastorianus
acatgtccatctgtatcttcggtga

SEQ ID NO: 96612 - DNA, 25 bp, Saccharomyces pastorianus
aagaccaaacatgtccatctgtatc

SEQ ID NO: 96613 - DNA, 25 bp, Saccharomyces pastorianus
catgtccatctgtatcttcggtgat

SEQ ID NO: 96614 - DNA, 25 bp, Saccharomyces pastorianus
agtcttgcggtgttgacgctatgtc

SEQ ID NO: 96615 - DNA, 25 bp, Saccharomyces pastorianus
ccaaacatgtccatctgtatcttcg

SEQ ID NO: 96616 - DNA, 25 bp, Saccharomyces pastorianus
gtgttgacgctatgtccgtcgatga

SEQ ID NO: 96617 - DNA, 25 bp, Saccharomyces pastorianus
accggttgatgtagaagtgccccac

SEQ ID NO: 96618 - DNA, 25 bp, Saccharomyces pastorianus
gaaattagccgcctccaaattactt

SEQ ID NO: 96619 - DNA, 25 bp, Saccharomyces pastorianus
aagtgccccacatatcggttgatga

SEQ ID NO: 96620 - DNA, 25 bp, Saccharomyces pastorianus
ggaagatttcgttcactcacatgaa

SEQ ID NO: 96621 - DNA, 25 bp, Saccharomyces pastorianus
tgagtaccagccaactgtttacctt

SEQ ID NO: 96622 - DNA, 25 bp, Saccharomyces pastorianus
gaagctctggcgaatttcaaggaaa

SEQ ID NO: 96623 - DNA, 25 bp, Saccharomyces pastorianus
gaaaacccgttgctacatggcatac

SEQ ID NO: 96624 - DNA, 25 bp, Saccharomyces pastorianus
aagtgtaccggtttcaatactggag

SEQ ID NO: 96625 - DNA, 25 bp, Saccharomyces pastorianus
taaacccaccttatcatcagcagat

SEQ ID NO: 96626 - DNA, 25 bp, Saccharomyces pastorianus
atatcagtctaccacacgatgaaga

SEQ ID NO: 96627 - DNA, 25 bp, Saccharomyces pastorianus
gtatgcggtatttcgaaacggcttt

SEQ ID NO: 96628 - DNA, 25 bp, Saccharomyces pastorianus
gtacaggttgatgccgaagagaaga

SEQ ID NO: 96629 - DNA, 25 bp, Saccharomyces pastorianus
ttgcgcgaccatgcactgtcactga

SEQ ID NO: 96630 - DNA, 25 bp, Saccharomyces pastorianus
tgtgatagcttggaaaaacgtttta

SEQ ID NO: 96631 - DNA, 25 bp, Saccharomyces pastorianus
actgtcactgacagcattcaccaaa

SEQ ID NO: 96632 - DNA, 25 bp, Saccharomyces pastorianus
aaacgttttagcaaattcgatatgg

SEQ ID NO: 96633 - DNA, 25 bp, Saccharomyces pastorianus
gcgaggattttagcccgttcagaaa

SEQ ID NO: 96634 - DNA, 25 bp, Saccharomyces pastorianus
tggaggtgattgcagacgaactcat

SEQ ID NO: 96635 - DNA, 25 bp, Saccharomyces pastorianus
caaaatctcccgtggtaataaggtg

SEQ ID NO: 96636 - DNA, 25 bp, Saccharomyces pastorianus
tgatagctcgaaaacacgtaatgtt

SEQ ID NO: 96637 - DNA, 25 bp, Saccharomyces pastorianus
tgcagacgaactcatgaagctagat

SEQ ID NO: 96638 - DNA, 25 bp, Saccharomyces pastorianus
taaattcgcagaggccaggcgcgag

SEQ ID NO: 96639 - DNA, 25 bp, Saccharomyces pastorianus
gggcacctgatctcaaattgcaaga

SEQ ID NO: 96640 - DNA, 25 bp, Saccharomyces pastorianus
aaacatagctggctcaattccttcc

SEQ ID NO: 96641 - DNA, 25 bp, Saccharomyces pastorianus
aaatcgagttcttgggcacctgatc

SEQ ID NO: 96642 - DNA, 25 bp, Saccharomyces pastorianus
ggtaactatcacttactggcttgat

SEQ ID NO: 96643 - DNA, 25 bp, Saccharomyces pastorianus
caattccttccatcaatttctgggt

SEQ ID NO: 96644 - DNA, 25 bp, Saccharomyces pastorianus
tttttgtcggtaccagcttctgaaa

SEQ ID NO: 96645 - DNA, 25 bp, Saccharomyces pastorianus
gcagatgcgctatcaaaatcgagtt

SEQ ID NO: 96646 - DNA, 25 bp, Saccharomyces pastorianus
ggaccatactttctatctaaggtaa

SEQ ID NO: 96647 - DNA, 25 bp, Saccharomyces pastorianus
gactggtaaaccgttatcgttagag

SEQ ID NO: 96648 - DNA, 25 bp, Saccharomyces pastorianus
agccgcgcaagattggaccatactt

SEQ ID NO: 96649 - DNA, 25 bp, Saccharomyces pastorianus
aaataacacaacaaagccgcgcaag

SEQ ID NO: 96650 - DNA, 25 bp, Saccharomyces pastorianus
tatatgtctggcaaggcggagctga

SEQ ID NO: 96651 - DNA, 25 bp, Saccharomyces pastorianus
aaatttgcagagttgagcgtttcag

SEQ ID NO: 96652 - DNA, 25 bp, Saccharomyces pastorianus
gcggagctgatgtcaattcacgttt

SEQ ID NO: 96653 - DNA, 25 bp, Saccharomyces pastorianus
aaatgcgacattatctacctctaag

SEQ ID NO: 96654 - DNA, 25 bp, Saccharomyces pastorianus
gaccactaccgtctcaaagtcaaaa

SEQ ID NO: 96655 - DNA, 25 bp, Saccharomyces pastorianus
tacctctaagccagttcattcacag

SEQ ID NO: 96656 - DNA, 25 bp, Saccharomyces pastorianus
ggtggaagatccttctttgcctaaa

SEQ ID NO: 96657 - DNA, 25 bp, Saccharomyces pastorianus
aaacatttcgaccagcctttcgata

SEQ ID NO: 96658 - DNA, 25 bp, Saccharomyces pastorianus
aacaccgtggacttcaaattgattt

SEQ ID NO: 96659 - DNA, 25 bp, Saccharomyces pastorianus
ttcagtttcattggaggacctcgag

SEQ ID NO: 96660 - DNA, 25 bp, Saccharomyces pastorianus
ggtaatcatacatcggtggtccaga

SEQ ID NO: 96661 - DNA, 25 bp, Saccharomyces pastorianus
gagctcgaatttgtccagtcactgg

SEQ ID NO: 96662 - DNA, 25 bp, Saccharomyces pastorianus
gatcattcaattacaaggcccgcaa

SEQ ID NO: 96663 - DNA, 25 bp, Saccharomyces pastorianus
gtgtatccaaactgtctcttcattt

SEQ ID NO: 96664 - DNA, 25 bp, Saccharomyces pastorianus
catggagtcggcgatcgttaacgaa

SEQ ID NO: 96665 - DNA, 25 bp, Saccharomyces pastorianus
gtcactggcaaacatccaatacgta

SEQ ID NO: 96666 - DNA, 25 bp, Saccharomyces pastorianus
aatggaaacgcaccagcgacacctt

SEQ ID NO: 96667 - DNA, 25 bp, Saccharomyces pastorianus
agcagatctggaagtctcctaactt

SEQ ID NO: 96668 - DNA, 25 bp, Saccharomyces pastorianus
ccccttattcgcaatgcattgtgta

SEQ ID NO: 96669 - DNA, 25 bp, Saccharomyces pastorianus
agcgacaccttcctcggatcaaaat

SEQ ID NO: 96670 - DNA, 25 bp, Saccharomyces pastorianus
gtacttactcactcaacagcagatc

SEQ ID NO: 96671 - DNA, 25 bp, Saccharomyces pastorianus
cgttaacgaagatggcctgctggaa

SEQ ID NO: 96672 - DNA, 25 bp, Saccharomyces pastorianus
ttggtcacgtggttatggcagctgc

SEQ ID NO: 96673 - DNA, 25 bp, Saccharomyces pastorianus
tggcagcttgtacgattggtgaccc

SEQ ID NO: 96674 - DNA, 25 bp, Saccharomyces pastorianus
tgttcttggccaccttgatgtgcat

SEQ ID NO: 96675 - DNA, 25 bp, Saccharomyces pastorianus
ttttcgacactggaccgctatggac

SEQ ID NO: 96676 - DNA, 25 bp, Saccharomyces pastorianus
cacagtgcagacgttttggaggcca

SEQ ID NO: 96677 - DNA, 25 bp, Saccharomyces pastorianus
tgctccgtttgacgcgatgcatagc

SEQ ID NO: 96678 - DNA, 25 bp, Saccharomyces pastorianus
tgccgctgccatcaatacttttatt

SEQ ID NO: 96679 - DNA, 25 bp, Saccharomyces pastorianus
acatgtctggattgctagccgcgta

SEQ ID NO: 96680 - DNA, 25 bp, Saccharomyces pastorianus
gtaatcatactgctgacgctattgg

SEQ ID NO: 96681 - DNA, 25 bp, Saccharomyces pastorianus
actggttcacttgtacgcgcagaaa

SEQ ID NO: 96682 - DNA, 25 bp, Saccharomyces pastorianus
gtgcatgtttcttctaggtgagcta

SEQ ID NO: 96683 - DNA, 25 bp, Saccharomyces pastorianus
gccttcttggtcatcaactacttga

SEQ ID NO: 96684 - DNA, 25 bp, Saccharomyces pastorianus
aggtgacctgctaagtaatcatcca

SEQ ID NO: 96685 - DNA, 25 bp, Saccharomyces pastorianus
gtttaccttggagtgatatccccat

SEQ ID NO: 96686 - DNA, 25 bp, Saccharomyces pastorianus
atagtgcccaattcattcagtcctt

SEQ ID NO: 96687 - DNA, 25 bp, Saccharomyces pastorianus
atcatcactataaactctcaacctc

SEQ ID NO: 96688 - DNA, 25 bp, Saccharomyces pastorianus
gacaatgactacatttctccagatg

SEQ ID NO: 96689 - DNA, 25 bp, Saccharomyces pastorianus
aattcttcaacctaccattgtcgag

SEQ ID NO: 96690 - DNA, 25 bp, Saccharomyces pastorianus
gaaaatctcgttcttagcgtggaag

SEQ ID NO: 96691 - DNA, 25 bp, Saccharomyces pastorianus
gcacacttgattgagctgaaccaac

SEQ ID NO: 96692 - DNA, 25 bp, Saccharomyces pastorianus
gacgattactgcctggtcaatattg

SEQ ID NO: 96693 - DNA, 25 bp, Saccharomyces pastorianus
agttgcccaagttgattgacacctt

SEQ ID NO: 96694 - DNA, 25 bp, Saccharomyces pastorianus
caacagttacatggcacggtagtga

SEQ ID NO: 96695 - DNA, 25 bp, Saccharomyces pastorianus
gaggacttggcgatggacgaaacac

SEQ ID NO: 96696 - DNA, 25 bp, Saccharomyces pastorianus
gcaccaatggttcatcatttcatat

SEQ ID NO: 96697 - DNA, 25 bp, Saccharomyces pastorianus
gcgatataccagcaccaatggttca

SEQ ID NO: 96698 - DNA, 25 bp, Saccharomyces pastorianus
ggatgcattcttttcattgaagtcg

SEQ ID NO: 96699 - DNA, 25 bp, Saccharomyces pastorianus
aatggcaatttgttaagtaggtcta

SEQ ID NO: 96700 - DNA, 25 bp, Saccharomyces pastorianus
gaagacatactaccaacagttacat

SEQ ID NO: 96701 - DNA, 25 bp, Saccharomyces pastorianus
atgttatgccgcacttcgaagtcaa

SEQ ID NO: 96702 - DNA, 25 bp, Saccharomyces pastorianus
acatcgcactggattcttcacaggg

SEQ ID NO: 96703 - DNA, 25 bp, Saccharomyces pastorianus
tcgaagtcaacagtaacatcgcact

SEQ ID NO: 96704 - DNA, 25 bp, Saccharomyces pastorianus
aagggttcaagcttagcgatatacc

SEQ ID NO: 96705 - DNA, 25 bp, Saccharomyces pastorianus
attgacactttgttgccaggtttgc

SEQ ID NO: 96706 - DNA, 25 bp, Saccharomyces pastorianus
ccgccaaggaagttgctggtgccat

SEQ ID NO: 96707 - DNA, 25 bp, Saccharomyces pastorianus
tgctttcgttgctattggtaacaca

SEQ ID NO: 96708 - DNA, 25 bp, Saccharomyces pastorianus
tgcactctttgccagtcaaggaatt

SEQ ID NO: 96709 - DNA, 25 bp, Saccharomyces pastorianus
gccaggtttgcaagacgaagtcatg

SEQ ID NO: 96710 - DNA, 25 bp, Saccharomyces pastorianus
tatcaagaccgccaaggaagttgct

SEQ ID NO: 96711 - DNA, 25 bp, Saccharomyces pastorianus
aggaattccaaatcattgacacttt

SEQ ID NO: 96712 - DNA, 25 bp, Saccharomyces pastorianus
tattgccaagttgtccgttatccca

SEQ ID NO: 96713 - DNA, 25 bp, Saccharomyces pastorianus
tattggtaacacatacggtttcttg

SEQ ID NO: 96714 - DNA, 25 bp, Saccharomyces pastorianus
aagaaatcttcttgcactctttgcc

SEQ ID NO: 96715 - DNA, 25 bp, Saccharomyces pastorianus
ctctttgccagtcaaggaattccaa

SEQ ID NO: 96716 - DNA, 25 bp, Saccharomyces pastorianus
gccttgactaatctacctagtttgg

SEQ ID NO: 96717 - DNA, 25 bp, Saccharomyces pastorianus
ttggtcctcttctgtttggacggcc

SEQ ID NO: 96718 - DNA, 25 bp, Saccharomyces pastorianus
ttttcttcagtgtttcttggtcctc

SEQ ID NO: 96719 - DNA, 25 bp, Saccharomyces pastorianus
agtgtttcttggtcctcttctgttt

SEQ ID NO: 96720 - DNA, 25 bp, Saccharomyces pastorianus
atcccttttcttcagtgtttcttgg

SEQ ID NO: 96721 - DNA, 25 bp, Saccharomyces pastorianus
tcttcagtgtttcttggtcctcttc

SEQ ID NO: 96722 - DNA, 25 bp, Saccharomyces pastorianus
tcttctgtttggacggcctctgtta

SEQ ID NO: 96723 - DNA, 25 bp, Saccharomyces pastorianus
gtttcttggtcctcttctgtttgga

SEQ ID NO: 96724 - DNA, 25 bp, Saccharomyces pastorianus
taatctacctagtttggtaactgga

SEQ ID NO: 96725 - DNA, 25 bp, Saccharomyces pastorianus
accagccttgactaatctacctagt

SEQ ID NO: 96726 - DNA, 25 bp, Saccharomyces pastorianus
tggaacccatcccttttcttcagtg

SEQ ID NO: 96727 - DNA, 25 bp, Saccharomyces pastorianus
gaaaggcccactcttcattgtcgaa

SEQ ID NO: 96728 - DNA, 25 bp, Saccharomyces pastorianus
ttgaaaatgctcctccgcaaaccag

SEQ ID NO: 96729 - DNA, 25 bp, Saccharomyces pastorianus
tattcagacatcctccaggcagagt

SEQ ID NO: 96730 - DNA, 25 bp, Saccharomyces pastorianus
atgtaagttcggtacgcactgcacc

SEQ ID NO: 96731 - DNA, 25 bp, Saccharomyces pastorianus
tagacatgctcgttctcatattatg

SEQ ID NO: 96732 - DNA, 25 bp, Saccharomyces pastorianus
gaaaggccatttgcattgccagaaa

SEQ ID NO: 96733 - DNA, 25 bp, Saccharomyces pastorianus
gtcatgcccatttggtcatccaaca

SEQ ID NO: 96734 - DNA, 25 bp, Saccharomyces pastorianus
accggtacaaactggtatcgttctg

SEQ ID NO: 96735 - DNA, 25 bp, Saccharomyces pastorianus
gcagctccacctccggttgaaaagt

SEQ ID NO: 96736 - DNA, 25 bp, Saccharomyces pastorianus
gggctctgtgttccaatccgtcatg

SEQ ID NO: 96737 - DNA, 25 bp, Saccharomyces pastorianus
aaagaaaggcgctgcacccaattca

SEQ ID NO: 96738 - DNA, 25 bp, Saccharomyces pastorianus
gaactggactgggacatcgacgatt

SEQ ID NO: 96739 - DNA, 25 bp, Saccharomyces pastorianus
aaggaaccaggcgagacgcttatat

SEQ ID NO: 96740 - DNA, 25 bp, Saccharomyces pastorianus
gagagttgcacacacttaccgatcg

SEQ ID NO: 96741 - DNA, 25 bp, Saccharomyces pastorianus
acaacactgccatctttgttagcac

SEQ ID NO: 96742 - DNA, 25 bp, Saccharomyces pastorianus
gggctgaaccaacttataatttctg

SEQ ID NO: 96743 - DNA, 25 bp, Saccharomyces pastorianus
tcgtcaccgttgtcggagagttgca

SEQ ID NO: 96744 - DNA, 25 bp, Saccharomyces pastorianus
ggaagttttgttattctccaatact

SEQ ID NO: 96745 - DNA, 25 bp, Saccharomyces pastorianus
agggaagttactgccacaacactgc

SEQ ID NO: 96746 - DNA, 25 bp, Saccharomyces pastorianus
atactcaagaaaacctcgtcaccgt

SEQ ID NO: 96747 - DNA, 25 bp, Saccharomyces pastorianus
ttaccgatcgtgtggttcattacaa

SEQ ID NO: 96748 - DNA, 25 bp, Saccharomyces pastorianus
gacgcttatatagggatgtgctttc

SEQ ID NO: 96749 - DNA, 25 bp, Saccharomyces pastorianus
gcaaacggatcctaattgggcaaat

SEQ ID NO: 96750 - DNA, 25 bp, Saccharomyces pastorianus
gacgcgcacgtcgatagtgtactta

SEQ ID NO: 96751 - DNA, 25 bp, Saccharomyces pastorianus
actgggctatctcacaggcttagaa

SEQ ID NO: 96752 - DNA, 25 bp, Saccharomyces pastorianus
acaggcttagaatcgcagtccatga

SEQ ID NO: 96753 - DNA, 25 bp, Saccharomyces pastorianus
gtgtacttacacttggtgaaccttt

SEQ ID NO: 96754 - DNA, 25 bp, Saccharomyces pastorianus
tgggcaaatttcctctataacggta

SEQ ID NO: 96755 - DNA, 25 bp, Saccharomyces pastorianus
tgaaagactatgtccgccaccagaa

SEQ ID NO: 96756 - DNA, 25 bp, Saccharomyces pastorianus
ggatttcggtgcatctagacctttt

SEQ ID NO: 96757 - DNA, 25 bp, Saccharomyces pastorianus
agtggcatttttcttttgtgtgcaa

SEQ ID NO: 96758 - DNA, 25 bp, Saccharomyces pastorianus
aatgtctgtacaactgggctatctc

SEQ ID NO: 96759 - DNA, 25 bp, Saccharomyces pastorianus
aacttttaacttacgccacattgag

SEQ ID NO: 96760 - DNA, 25 bp, Saccharomyces pastorianus
caactccttgcggtttttgaatgat

SEQ ID NO: 96761 - DNA, 25 bp, Saccharomyces pastorianus
gataccatattattccacaagcgca

SEQ ID NO: 96762 - DNA, 25 bp, Saccharomyces pastorianus
agacactgttaatcggttcatccac

SEQ ID NO: 96763 - DNA, 25 bp, Saccharomyces pastorianus
gaaaatctcattcacttgtaccatt

SEQ ID NO: 96764 - DNA, 25 bp, Saccharomyces pastorianus
atcctccacgggtatgttactattg

SEQ ID NO: 96765 - DNA, 25 bp, Saccharomyces pastorianus
aaacttttgggtgatctggtcagtc

SEQ ID NO: 96766 - DNA, 25 bp, Saccharomyces pastorianus
atacacaattccaacgcttacacag

SEQ ID NO: 96767 - DNA, 25 bp, Saccharomyces pastorianus
aatttcatgcttgatatcctccacg

SEQ ID NO: 96768 - DNA, 25 bp, Saccharomyces pastorianus
acactctgctttgtttcctttgata

SEQ ID NO: 96769 - DNA, 25 bp, Saccharomyces pastorianus
catcttcattgggtgttggacactc

SEQ ID NO: 96770 - DNA, 25 bp, Saccharomyces pastorianus
gcaattaccaacaccactggtcgat

SEQ ID NO: 96771 - DNA, 25 bp, Saccharomyces pastorianus
agaagacgcatagtgctgctgtaaa

SEQ ID NO: 96772 - DNA, 25 bp, Saccharomyces pastorianus
tattcgccaaatattctagcctctg

SEQ ID NO: 96773 - DNA, 25 bp, Saccharomyces pastorianus
taagctggtgtccatattcgccaaa

SEQ ID NO: 96774 - DNA, 25 bp, Saccharomyces pastorianus
gaatatgctgttctcaattgtcccc

SEQ ID NO: 96775 - DNA, 25 bp, Saccharomyces pastorianus
atcacaggtgcacgagttggctcaa

SEQ ID NO: 96776 - DNA, 25 bp, Saccharomyces pastorianus
gattgttgccacaggaggtaatcca

SEQ ID NO: 96777 - DNA, 25 bp, Saccharomyces pastorianus
aattgtcccctgacggaaccacatt

SEQ ID NO: 96778 - DNA, 25 bp, Saccharomyces pastorianus
tttgggataccagaacgtccttgcc

SEQ ID NO: 96779 - DNA, 25 bp, Saccharomyces pastorianus
gttggctcaatcaataccggatccc

SEQ ID NO: 96780 - DNA, 25 bp, Saccharomyces pastorianus
cgtccttgcctcaattttccaagaa

SEQ ID NO: 96781 - DNA, 25 bp, Saccharomyces pastorianus
gggccaaagtcatacgtcaaccaat

SEQ ID NO: 96782 - DNA, 25 bp, Saccharomyces pastorianus
gcatacgatgtcctaggcttgataa

SEQ ID NO: 96783 - DNA, 25 bp, Saccharomyces pastorianus
ttctttgtagttgatgacgtcggac

SEQ ID NO: 96784 - DNA, 25 bp, Saccharomyces pastorianus
ggaggcatctacaacgacctgtcat

SEQ ID NO: 96785 - DNA, 25 bp, Saccharomyces pastorianus
tttcttccgtccctattattgacga

SEQ ID NO: 96786 - DNA, 25 bp, Saccharomyces pastorianus
gacgtcattcagatgcttacccaag

SEQ ID NO: 96787 - DNA, 25 bp, Saccharomyces pastorianus
gaccactccggtcatagacgtcatt

SEQ ID NO: 96788 - DNA, 25 bp, Saccharomyces pastorianus
agatacagcttcaattcatccttct

SEQ ID NO: 96789 - DNA, 25 bp, Saccharomyces pastorianus
gatgcttacccaaggtcgggtttct

SEQ ID NO: 96790 - DNA, 25 bp, Saccharomyces pastorianus
aattgtcgttagtgttcttacgcaa

SEQ ID NO: 96791 - DNA, 25 bp, Saccharomyces pastorianus
cattgagcgtcggagaagcccttat

SEQ ID NO: 96792 - DNA, 25 bp, Saccharomyces pastorianus
cgggctctcggtgttgatcaactag

SEQ ID NO: 96793 - DNA, 25 bp, Saccharomyces pastorianus
aagagctcagttctgtgcccaattg

SEQ ID NO: 96794 - DNA, 25 bp, Saccharomyces pastorianus
aagggctccctgataaggccttgga

SEQ ID NO: 96795 - DNA, 25 bp, Saccharomyces pastorianus
gtattcagttcagggttggtcttag

SEQ ID NO: 96796 - DNA, 25 bp, Saccharomyces pastorianus
caattgcaagattcatcggcgggtg

SEQ ID NO: 96797 - DNA, 25 bp, Saccharomyces pastorianus
attctcccagttttacaattgcaag

SEQ ID NO: 96798 - DNA, 25 bp, Saccharomyces pastorianus
gcaattcagggtaccgacagcagta

SEQ ID NO: 96799 - DNA, 25 bp, Saccharomyces pastorianus
aggtattgcagaagcctctgcccaa

SEQ ID NO: 96800 - DNA, 25 bp, Saccharomyces pastorianus
cttggagtgctccatgattctcgga

SEQ ID NO: 96801 - DNA, 25 bp, Saccharomyces pastorianus
tatattccgtctggtgtagcggtcg

SEQ ID NO: 96802 - DNA, 25 bp, Saccharomyces pastorianus
ggagtcatatttgccgttttatcat

SEQ ID NO: 96803 - DNA, 25 bp, Saccharomyces pastorianus
attcaatcccgagtgagcaattcag

SEQ ID NO: 96804 - DNA, 25 bp, Saccharomyces pastorianus
gcagaaaatctatagcttcgcccac

SEQ ID NO: 96805 - DNA, 25 bp, Saccharomyces pastorianus
ttcaagccactcctgctgtgaaaaa

SEQ ID NO: 96806 - DNA, 25 bp, Saccharomyces pastorianus
agcatcattgaatcgccgctaaatt

SEQ ID NO: 96807 - DNA, 25 bp, Saccharomyces pastorianus
ggtggacgctaatttgttcagcaga

SEQ ID NO: 96808 - DNA, 25 bp, Saccharomyces pastorianus
accgaattcatcaactatcacactc

SEQ ID NO: 96809 - DNA, 25 bp, Saccharomyces pastorianus
taaagcgcccttcacaattgggaag

SEQ ID NO: 96810 - DNA, 25 bp, Saccharomyces pastorianus
aaaacggcagttttctgtctctgac

SEQ ID NO: 96811 - DNA, 25 bp, Saccharomyces pastorianus
cctttctcgcactcaactattaatg

SEQ ID NO: 96812 - DNA, 25 bp, Saccharomyces pastorianus
aaggcgcaacttcaaagcatcattg

SEQ ID NO: 96813 - DNA, 25 bp, Saccharomyces pastorianus
tattacctctactcccactaataag

SEQ ID NO: 96814 - DNA, 25 bp, Saccharomyces pastorianus
aacgatacgcctacatgaacgtgta

SEQ ID NO: 96815 - DNA, 25 bp, Saccharomyces pastorianus
ttttgggacttactatgggtgctta

SEQ ID NO: 96816 - DNA, 25 bp, Saccharomyces pastorianus
gtggtgtcactattggatttcacat

SEQ ID NO: 96817 - DNA, 25 bp, Saccharomyces pastorianus
attttgccgcatctttgttggacta

SEQ ID NO: 96818 - DNA, 25 bp, Saccharomyces pastorianus
gtgcttaaagggtgtatcggtacta

SEQ ID NO: 96819 - DNA, 25 bp, Saccharomyces pastorianus
tattcattcgttaatgccttccatt

SEQ ID NO: 96820 - DNA, 25 bp, Saccharomyces pastorianus
gccttccattttaaccttgctatta

SEQ ID NO: 96821 - DNA, 25 bp, Saccharomyces pastorianus
aagcatacaaatccctgaagccaag

SEQ ID NO: 96822 - DNA, 25 bp, Saccharomyces pastorianus
gaaacctaaataattgggcgcgctt

SEQ ID NO: 96823 - DNA, 25 bp, Saccharomyces pastorianus
attgggcgcgcttggtattcaatga

SEQ ID NO: 96824 - DNA, 25 bp, Saccharomyces pastorianus
ttgaacgatgactccaatccaacta

SEQ ID NO: 96825 - DNA, 25 bp, Saccharomyces pastorianus
ggacactgctaaagacatttttgga

SEQ ID NO: 96826 - DNA, 25 bp, Saccharomyces pastorianus
aaatcgagatgccactaagtccaag

SEQ ID NO: 96827 - DNA, 25 bp, Saccharomyces pastorianus
gaactgaatgtgattactactgact

SEQ ID NO: 96828 - DNA, 25 bp, Saccharomyces pastorianus
gatttattacctaaccgtgaaccat

SEQ ID NO: 96829 - DNA, 25 bp, Saccharomyces pastorianus
gaactaccagtttgcagccataacc

SEQ ID NO: 96830 - DNA, 25 bp, Saccharomyces pastorianus
tgaaggtttatgttgggtcccgtat

SEQ ID NO: 96831 - DNA, 25 bp, Saccharomyces pastorianus
gaaaaccgttcgctcagatagattt

SEQ ID NO: 96832 - DNA, 25 bp, Saccharomyces pastorianus
taaccgtgaaccattatctcagatg

SEQ ID NO: 96833 - DNA, 25 bp, Saccharomyces pastorianus
ggttcgtcaacctatattcatgtac

SEQ ID NO: 96834 - DNA, 25 bp, Saccharomyces pastorianus
gatgatatcactggttcgtcaacct

SEQ ID NO: 96835 - DNA, 25 bp, Saccharomyces pastorianus
aagtccaagtgcgaaagctgccaaa

SEQ ID NO: 96836 - DNA, 25 bp, Saccharomyces pastorianus
gataggtatgttcgcatcttcgata

SEQ ID NO: 96837 - DNA, 25 bp, Saccharomyces pastorianus
aagaaatgacttcatggtcggatga

SEQ ID NO: 96838 - DNA, 25 bp, Saccharomyces pastorianus
gaagccgatgtgaaccggtccgatc

SEQ ID NO: 96839 - DNA, 25 bp, Saccharomyces pastorianus
tgaaccggtccgatccttcgaaaag

SEQ ID NO: 96840 - DNA, 25 bp, Saccharomyces pastorianus
tatgttcataatcgtgatagccaaa

SEQ ID NO: 96841 - DNA, 25 bp, Saccharomyces pastorianus
gaaacttttatacgaggctgatgaa

SEQ ID NO: 96842 - DNA, 25 bp, Saccharomyces pastorianus
gaagtgcgacaagatcataactatc

SEQ ID NO: 96843 - DNA, 25 bp, Saccharomyces pastorianus
acagggaaaacgtcttatgttcata

SEQ ID NO: 96844 - DNA, 25 bp, Saccharomyces pastorianus
gaaacatgaacctcaatctactgaa

SEQ ID NO: 96845 - DNA, 25 bp, Saccharomyces pastorianus
gaagcttacttgtggaatctattga

SEQ ID NO: 96846 - DNA, 25 bp, Saccharomyces pastorianus
gggccagagctaaccataaccgtaa

SEQ ID NO: 96847 - DNA, 25 bp, Saccharomyces pastorianus
gatctcctacacgagcaagactttt

SEQ ID NO: 96848 - DNA, 25 bp, Saccharomyces pastorianus
aactgatacaagtgatccgagcaaa

SEQ ID NO: 96849 - DNA, 25 bp, Saccharomyces pastorianus
aggccgcaaggttagctgctgagaa

SEQ ID NO: 96850 - DNA, 25 bp, Saccharomyces pastorianus
aagttagcccaaaggaggccgcaag

SEQ ID NO: 96851 - DNA, 25 bp, Saccharomyces pastorianus
aatcgtgatacagtcaagtcaaagc

SEQ ID NO: 96852 - DNA, 25 bp, Saccharomyces pastorianus
gccaagtctcataagactcgcttaa

SEQ ID NO: 96853 - DNA, 25 bp, Saccharomyces pastorianus
gaacaaagccaattaatcgtgatac

SEQ ID NO: 96854 - DNA, 25 bp, Saccharomyces pastorianus
agactcgcttaatggaagaggccga

SEQ ID NO: 96855 - DNA, 25 bp, Saccharomyces pastorianus
actgtcccggttgtgcaaaagaaag

SEQ ID NO: 96856 - DNA, 25 bp, Saccharomyces pastorianus
tgctcaagagcgtgccaagtctcat

SEQ ID NO: 96857 - DNA, 25 bp, Saccharomyces pastorianus
caatgccttcacaaactacgacggt

SEQ ID NO: 96858 - DNA, 25 bp, Saccharomyces pastorianus
agagtacaactgtcccggttgtgca

SEQ ID NO: 96859 - DNA, 25 bp, Saccharomyces pastorianus
agagcatctatctggcacgaacgca

SEQ ID NO: 96860 - DNA, 25 bp, Saccharomyces pastorianus
ggatgcgcagagtcatacccaatat

SEQ ID NO: 96861 - DNA, 25 bp, Saccharomyces pastorianus
gacgacataaaagttccgaagccat

SEQ ID NO: 96862 - DNA, 25 bp, Saccharomyces pastorianus
actttcgcgctaccaagcaagtata

SEQ ID NO: 96863 - DNA, 25 bp, Saccharomyces pastorianus
gacttgagtgccgaggacattcctg

SEQ ID NO: 96864 - DNA, 25 bp, Saccharomyces pastorianus
aaggaacaccagcaacggcaacgac

SEQ ID NO: 96865 - DNA, 25 bp, Saccharomyces pastorianus
tatagccaatgctgatctgtccgct

SEQ ID NO: 96866 - DNA, 25 bp, Saccharomyces pastorianus
aagatatacgccctactttcgcgct

SEQ ID NO: 96867 - DNA, 25 bp, Saccharomyces pastorianus
gtatctgagcggttattctgacttg

SEQ ID NO: 96868 - DNA, 25 bp, Saccharomyces pastorianus
ggatgccactgtcgtatggtcacaa

SEQ ID NO: 96869 - DNA, 25 bp, Saccharomyces pastorianus
atctgtccgctttgagggatgccac

SEQ ID NO: 96870 - DNA, 25 bp, Saccharomyces pastorianus
caggcaaggtatccgttggtgactt

SEQ ID NO: 96871 - DNA, 25 bp, Saccharomyces pastorianus
aggcgccattgccaaggattccttg

SEQ ID NO: 96872 - DNA, 25 bp, Saccharomyces pastorianus
gacgctggaccagattacaggccta

SEQ ID NO: 96873 - DNA, 25 bp, Saccharomyces pastorianus
aaggcattccaggtcttcgacaagg

SEQ ID NO: 96874 - DNA, 25 bp, Saccharomyces pastorianus
caaccagctcgtacaggacatcata

SEQ ID NO: 96875 - DNA, 25 bp, Saccharomyces pastorianus
ggacatcataaacgcggattcgagc

SEQ ID NO: 96876 - DNA, 25 bp, Saccharomyces pastorianus
gagacgcctctagcttgacgctgga

SEQ ID NO: 96877 - DNA, 25 bp, Saccharomyces pastorianus
gtacatgctaactggcttgggtgaa

SEQ ID NO: 96878 - DNA, 25 bp, Saccharomyces pastorianus
gaattggatgcaaccaccaaggcaa

SEQ ID NO: 96879 - DNA, 25 bp, Saccharomyces pastorianus
gacagaagacttcgtcaaggcattc

SEQ ID NO: 96880 - DNA, 25 bp, Saccharomyces pastorianus
gattcgagcttgagagacgcctcta

SEQ ID NO: 96881 - DNA, 25 bp, Saccharomyces pastorianus
tccaccgtcttagtttctgttaccg

SEQ ID NO: 96882 - DNA, 25 bp, Saccharomyces pastorianus
gctaattcatagtttgccacgtaaa

SEQ ID NO: 96883 - DNA, 25 bp, Saccharomyces pastorianus
tctgttaccgccttcattatgggaa

SEQ ID NO: 96884 - DNA, 25 bp, Saccharomyces pastorianus
tatcattgcatataccttccctatt

SEQ ID NO: 96885 - DNA, 25 bp, Saccharomyces pastorianus
ttagtcaactgtatcctcagcacgc

SEQ ID NO: 96886 - DNA, 25 bp, Saccharomyces pastorianus
gttatttggccaacaattctgcggt

SEQ ID NO: 96887 - DNA, 25 bp, Saccharomyces pastorianus
gcatgctcaataagcgcctttatct

SEQ ID NO: 96888 - DNA, 25 bp, Saccharomyces pastorianus
aagtctcgccatgttatcactgtat

SEQ ID NO: 96889 - DNA, 25 bp, Saccharomyces pastorianus
gtcaccatactagtttctctgctaa

SEQ ID NO: 96890 - DNA, 25 bp, Saccharomyces pastorianus
aggatatggtccttgcgcaaagata

SEQ ID NO: 96891 - DNA, 25 bp, Saccharomyces pastorianus
gtaaaccgcttctgatgacgtccac

SEQ ID NO: 96892 - DNA, 25 bp, Saccharomyces pastorianus
gtccaagttcaagactggcttccag

SEQ ID NO: 96893 - DNA, 25 bp, Saccharomyces pastorianus
tggaattctacccttacccaagatc

SEQ ID NO: 96894 - DNA, 25 bp, Saccharomyces pastorianus
gggtgctttctgtgcttaccgatac

SEQ ID NO: 96895 - DNA, 25 bp, Saccharomyces pastorianus
aactggagcagtttccttggaagca

SEQ ID NO: 96896 - DNA, 25 bp, Saccharomyces pastorianus
tgtggtgatgttgaccaccggccat

SEQ ID NO: 96897 - DNA, 25 bp, Saccharomyces pastorianus
accaccagcagctctgattttttct

SEQ ID NO: 96898 - DNA, 25 bp, Saccharomyces pastorianus
gatttcaggtattggtctctcttgt

SEQ ID NO: 96899 - DNA, 25 bp, Saccharomyces pastorianus
gattttttcttcagccaacttggag

SEQ ID NO: 96900 - DNA, 25 bp, Saccharomyces pastorianus
gtctctcttgtcttctgggatcaat

SEQ ID NO: 96901 - DNA, 25 bp, Saccharomyces pastorianus
aagatcttaccgtaaccggcagcca

SEQ ID NO: 96902 - DNA, 25 bp, Saccharomyces pastorianus
aagtatctcataccaaccttaccga

SEQ ID NO: 96903 - DNA, 25 bp, Saccharomyces pastorianus
aatggcgaagtttggtccgtgtctt

SEQ ID NO: 96904 - DNA, 25 bp, Saccharomyces pastorianus
gaaggtacgtttatggaaagccact

SEQ ID NO: 96905 - DNA, 25 bp, Saccharomyces pastorianus
tgcacagggcagatcagactcaaat

SEQ ID NO: 96906 - DNA, 25 bp, Saccharomyces pastorianus
ggtcatggacactgacttctgagat

SEQ ID NO: 96907 - DNA, 25 bp, Saccharomyces pastorianus
gacggtaaacttcacgttgcagcaa

SEQ ID NO: 96908 - DNA, 25 bp, Saccharomyces pastorianus
ggcctcagaggagtctttaactaac

SEQ ID NO: 96909 - DNA, 25 bp, Saccharomyces pastorianus
gaaaaactaagtcccctggcctcag

SEQ ID NO: 96910 - DNA, 25 bp, Saccharomyces pastorianus
gttgcagcaaaacttcccggtcata

SEQ ID NO: 96911 - DNA, 25 bp, Saccharomyces pastorianus
gtagatggtatcaactcattgcaac

SEQ ID NO: 96912 - DNA, 25 bp, Saccharomyces pastorianus
gcaagttgaacttctaagcgagcat

SEQ ID NO: 96913 - DNA, 25 bp, Saccharomyces pastorianus
aaagctcgcagtctctgcattggaa

SEQ ID NO: 96914 - DNA, 25 bp, Saccharomyces pastorianus
ggatgatacaccttacactagagaa

SEQ ID NO: 96915 - DNA, 25 bp, Saccharomyces pastorianus
gaagccaaatctgttacgcacggtg

SEQ ID NO: 96916 - DNA, 25 bp, Saccharomyces pastorianus
caaggttacggttctgctgatgaac

SEQ ID NO: 96917 - DNA, 25 bp, Saccharomyces pastorianus
aagaattgttagtcgcatacgccag

SEQ ID NO: 96918 - DNA, 25 bp, Saccharomyces pastorianus
gtacaatgccgctgaggacttggat

SEQ ID NO: 96919 - DNA, 25 bp, Saccharomyces pastorianus
gcatacgccagagctcgtggttata

SEQ ID NO: 96920 - DNA, 25 bp, Saccharomyces pastorianus
gaaattactgtatgtcaaccctccg

SEQ ID NO: 96921 - DNA, 25 bp, Saccharomyces pastorianus
gttcgacagattaccggacaccaga

SEQ ID NO: 96922 - DNA, 25 bp, Saccharomyces pastorianus
gggatataccaactgctcaagaatt

SEQ ID NO: 96923 - DNA, 25 bp, Saccharomyces pastorianus
aacattttcagctcacactggtggt

SEQ ID NO: 96924 - DNA, 25 bp, Saccharomyces pastorianus
ctccgccccatctagaggatgatac

SEQ ID NO: 96925 - DNA, 25 bp, Saccharomyces pastorianus
tcatttttatgattctcggactggt

SEQ ID NO: 96926 - DNA, 25 bp, Saccharomyces pastorianus
aatggagtcacagtacgaacagtac

SEQ ID NO: 96927 - DNA, 25 bp, Saccharomyces pastorianus
ggatatgagcaaacttgtgggcagt

SEQ ID NO: 96928 - DNA, 25 bp, Saccharomyces pastorianus
gcaaggagctgtggcatttcaatca

SEQ ID NO: 96929 - DNA, 25 bp, Saccharomyces pastorianus
atctgcaaacaaaacatgacgccca

SEQ ID NO: 96930 - DNA, 25 bp, Saccharomyces pastorianus
gcaagttcttggagctgcagagata

SEQ ID NO: 96931 - DNA, 25 bp, Saccharomyces pastorianus
ggtattcaagttgcttctcaaggtt

SEQ ID NO: 96932 - DNA, 25 bp, Saccharomyces pastorianus
gttgacacggaatcgcaaacagaat

SEQ ID NO: 96933 - DNA, 25 bp, Saccharomyces pastorianus
gattctcggactggtatttacattt

SEQ ID NO: 96934 - DNA, 25 bp, Saccharomyces pastorianus
tgaggaccaggacacgttgcaacag

SEQ ID NO: 96935 - DNA, 25 bp, Saccharomyces pastorianus
gattctgtagatgcagttgacacgg

SEQ ID NO: 96936 - DNA, 25 bp, Saccharomyces pastorianus
gttatccagggatcgtttcaaagaa

SEQ ID NO: 96937 - DNA, 25 bp, Saccharomyces pastorianus
tcgtcattactaacagatctctcta

SEQ ID NO: 96938 - DNA, 25 bp, Saccharomyces pastorianus
tagccgccaggataaaatgactcaa

SEQ ID NO: 96939 - DNA, 25 bp, Saccharomyces pastorianus
gagattctgtctcaacaacttcctc

SEQ ID NO: 96940 - DNA, 25 bp, Saccharomyces pastorianus
gagcaacaccgctgaaaacgtctat

SEQ ID NO: 96941 - DNA, 25 bp, Saccharomyces pastorianus
ggacgatatattaaccgaactagca

SEQ ID NO: 96942 - DNA, 25 bp, Saccharomyces pastorianus
tcctccagaggacgtcaactttttc

SEQ ID NO: 96943 - DNA, 25 bp, Saccharomyces pastorianus
aggcaaggctagtccatgatttcaa

SEQ ID NO: 96944 - DNA, 25 bp, Saccharomyces pastorianus
aatctatcagcacacgatgccaatg

SEQ ID NO: 96945 - DNA, 25 bp, Saccharomyces pastorianus
gaggcacctctatactttcaactaa

SEQ ID NO: 96946 - DNA, 25 bp, Saccharomyces pastorianus
tttaaatcgctttttagccgccagg

SEQ ID NO: 96947 - DNA, 25 bp, Saccharomyces pastorianus
gatatctttcattgcgttatctggc

SEQ ID NO: 96948 - DNA, 25 bp, Saccharomyces pastorianus
attgaagatgcccatactgccttga

SEQ ID NO: 96949 - DNA, 25 bp, Saccharomyces pastorianus
agctcggatgcgtatttgttggtca

SEQ ID NO: 96950 - DNA, 25 bp, Saccharomyces pastorianus
ttcctggtgacttggaccctgaaaa

SEQ ID NO: 96951 - DNA, 25 bp, Saccharomyces pastorianus
attgatgccgaatttgtctcattac

SEQ ID NO: 96952 - DNA, 25 bp, Saccharomyces pastorianus
gacctaaaagaactgctttggccag

SEQ ID NO: 96953 - DNA, 25 bp, Saccharomyces pastorianus
atagtgggattcttcctggtgactt

SEQ ID NO: 96954 - DNA, 25 bp, Saccharomyces pastorianus
gtctggcttttaatgcagctcggat

SEQ ID NO: 96955 - DNA, 25 bp, Saccharomyces pastorianus
tatggagtaccatttgtcgatgatt

SEQ ID NO: 96956 - DNA, 25 bp, Saccharomyces pastorianus
cgcgacactgccatatattttctac

SEQ ID NO: 96957 - DNA, 25 bp, Saccharomyces pastorianus
gcgttatctggcatatgtgttgtta

SEQ ID NO: 96958 - DNA, 25 bp, Saccharomyces pastorianus
ggaagcgcttttgcagttcaaggat

SEQ ID NO: 96959 - DNA, 25 bp, Saccharomyces pastorianus
gatagcatgctttcgaacctttttt

SEQ ID NO: 96960 - DNA, 25 bp, Saccharomyces pastorianus
gatcagtggagttcttccttcattt

SEQ ID NO: 96961 - DNA, 25 bp, Saccharomyces pastorianus
gggtacgctttctgaaattctcaaa

SEQ ID NO: 96962 - DNA, 25 bp, Saccharomyces pastorianus
acgggaagtcctctctgacaggata

SEQ ID NO: 96963 - DNA, 25 bp, Saccharomyces pastorianus
tacgttatatcccttgtctcatttg

SEQ ID NO: 96964 - DNA, 25 bp, Saccharomyces pastorianus
gagttaccacttattcacaatgttg

SEQ ID NO: 96965 - DNA, 25 bp, Saccharomyces pastorianus
acaagattgctcaccgtcacgggaa

SEQ ID NO: 96966 - DNA, 25 bp, Saccharomyces pastorianus
ctgttcacacggtttgacttgccaa

SEQ ID NO: 96967 - DNA, 25 bp, Saccharomyces pastorianus
tactaaagctcttgttcccggtgaa

SEQ ID NO: 96968 - DNA, 25 bp, Saccharomyces pastorianus
tttgctcagggcgtattctcggaaa

SEQ ID NO: 96969 - DNA, 25 bp, Saccharomyces pastorianus
ttggacacctgtctatgtgactgat

SEQ ID NO: 96970 - DNA, 25 bp, Saccharomyces pastorianus
ggtctgttccgttagatccgaggat

SEQ ID NO: 96971 - DNA, 25 bp, Saccharomyces pastorianus
attacttggtaatcgacacaccgcc

SEQ ID NO: 96972 - DNA, 25 bp, Saccharomyces pastorianus
acaccgcccggaacatctgatgagc

SEQ ID NO: 96973 - DNA, 25 bp, Saccharomyces pastorianus
tggataactatcctgacagcccagc

SEQ ID NO: 96974 - DNA, 25 bp, Saccharomyces pastorianus
gaaaccgtccatgaatcgaactccg

SEQ ID NO: 96975 - DNA, 25 bp, Saccharomyces pastorianus
gtggtcaccacacctcaggaagtag

SEQ ID NO: 96976 - DNA, 25 bp, Saccharomyces pastorianus
ttccagaagacgattccgccattat

SEQ ID NO: 96977 - DNA, 25 bp, Saccharomyces pastorianus
gataatttagccaccatgtctattc

SEQ ID NO: 96978 - DNA, 25 bp, Saccharomyces pastorianus
gagtcccaaatattcaaggctacca

SEQ ID NO: 96979 - DNA, 25 bp, Saccharomyces pastorianus
gcttcgagtgctgtacttaacgttg

SEQ ID NO: 96980 - DNA, 25 bp, Saccharomyces pastorianus
gagagcttcatgagattctgcgaca

SEQ ID NO: 96981 - DNA, 25 bp, Saccharomyces pastorianus
gatgactttcaatttttcggacttt

SEQ ID NO: 96982 - DNA, 25 bp, Saccharomyces pastorianus
tagattctgcgcttattaatacgga

SEQ ID NO: 96983 - DNA, 25 bp, Saccharomyces pastorianus
gaagacgacgattttgatgactttc

SEQ ID NO: 96984 - DNA, 25 bp, Saccharomyces pastorianus
ttacctcttttggagatgacacaca

SEQ ID NO: 96985 - DNA, 25 bp, Saccharomyces pastorianus
ggttctgaatctgagactgatgcaa

SEQ ID NO: 96986 - DNA, 25 bp, Saccharomyces pastorianus
aaaggccaattattactgctaaaga

SEQ ID NO: 96987 - DNA, 25 bp, Saccharomyces pastorianus
tacggagacatttctggttctgaat

SEQ ID NO: 96988 - DNA, 25 bp, Saccharomyces pastorianus
taatgatagggaaccttgcttgcag

SEQ ID NO: 96989 - DNA, 25 bp, Saccharomyces pastorianus
gaaagacggtagtagagcctcaaaa

SEQ ID NO: 96990 - DNA, 25 bp, Saccharomyces pastorianus
gtgcaaaagccaatttctgagttaa

SEQ ID NO: 96991 - DNA, 25 bp, Saccharomyces pastorianus
aaacttgagaccaggccaaccaatg

SEQ ID NO: 96992 - DNA, 25 bp, Saccharomyces pastorianus
agagagaggccaacgctgatgcttg

SEQ ID NO: 96993 - DNA, 25 bp, Saccharomyces pastorianus
aaattcatttctacctttctcactt

SEQ ID NO: 96994 - DNA, 25 bp, Saccharomyces pastorianus
gaagatatcgctcaggtgccagctg

SEQ ID NO: 96995 - DNA, 25 bp, Saccharomyces pastorianus
aaagagaggctgttgccgacgcttg

SEQ ID NO: 96996 - DNA, 25 bp, Saccharomyces pastorianus
ttctcacttttattttagcggccgt

SEQ ID NO: 96997 - DNA, 25 bp, Saccharomyces pastorianus
gacatagcttttttaccattcagta

SEQ ID NO: 96998 - DNA, 25 bp, Saccharomyces pastorianus
acaccactattgctgaggcggctga

SEQ ID NO: 96999 - DNA, 25 bp, Saccharomyces pastorianus
gctaccgctagtgggctattgttta

SEQ ID NO: 97000 - DNA, 25 bp, Saccharomyces pastorianus
gacgcttggcactggttaaacttga

SEQ ID NO: 97001 - DNA, 25 bp, Saccharomyces pastorianus
ttctgtcactgctagttccgatgaa

SEQ ID NO: 97002 - DNA, 25 bp, Saccharomyces pastorianus
taacccagctcaaccgtttggtaat

SEQ ID NO: 97003 - DNA, 25 bp, Saccharomyces pastorianus
tcgagtgtcatactgggactggttt

SEQ ID NO: 97004 - DNA, 25 bp, Saccharomyces pastorianus
tggattatgcatgggaggtccacca

SEQ ID NO: 97005 - DNA, 25 bp, Saccharomyces pastorianus
gggtcaagcctttatctatagatca

SEQ ID NO: 97006 - DNA, 25 bp, Saccharomyces pastorianus
tggttacgacccgtcccacaaatga

SEQ ID NO: 97007 - DNA, 25 bp, Saccharomyces pastorianus
gctaaaagccagttcttgaagctaa

SEQ ID NO: 97008 - DNA, 25 bp, Saccharomyces pastorianus
aaccgttgtgtagctcgagtgtcat

SEQ ID NO: 97009 - DNA, 25 bp, Saccharomyces pastorianus
ttcatttctttcacatgccaggtgg

SEQ ID NO: 97010 - DNA, 25 bp, Saccharomyces pastorianus
aagattatgtggaatcgatgcccca

SEQ ID NO: 97011 - DNA, 25 bp, Saccharomyces pastorianus
aaacctgccaactattcctataaga

SEQ ID NO: 97012 - DNA, 25 bp, Saccharomyces pastorianus
tctatagatcagtacaaccgttgtg

SEQ ID NO: 97013 - DNA, 25 bp, Saccharomyces pastorianus
cgctgtcggtgctgttttcaacata

SEQ ID NO: 97014 - DNA, 25 bp, Saccharomyces pastorianus
cgttagtttattcatcgcagtacaa

SEQ ID NO: 97015 - DNA, 25 bp, Saccharomyces pastorianus
attttctctcattataccgacgcag

SEQ ID NO: 97016 - DNA, 25 bp, Saccharomyces pastorianus
atctttttggattctgcttgggctc

SEQ ID NO: 97017 - DNA, 25 bp, Saccharomyces pastorianus
tgtgggctttgctagacggaatcga

SEQ ID NO: 97018 - DNA, 25 bp, Saccharomyces pastorianus
cagtcttttccttcgtagctatatg

SEQ ID NO: 97019 - DNA, 25 bp, Saccharomyces pastorianus
actactgattccgtggaggctgttt

SEQ ID NO: 97020 - DNA, 25 bp, Saccharomyces pastorianus
acacctttccagatttccatgattg

SEQ ID NO: 97021 - DNA, 25 bp, Saccharomyces pastorianus
tgcttgggctctgacggtactaaaa

SEQ ID NO: 97022 - DNA, 25 bp, Saccharomyces pastorianus
tatatattcctctaggtggctcaaa

SEQ ID NO: 97023 - DNA, 25 bp, Saccharomyces pastorianus
taatagttttgttcctcttaccaga

SEQ ID NO: 97024 - DNA, 25 bp, Saccharomyces pastorianus
ggttctcgatatccttgcaaccaaa

SEQ ID NO: 97025 - DNA, 25 bp, Saccharomyces pastorianus
aaaggtggctccaacgacgcttcga

SEQ ID NO: 97026 - DNA, 25 bp, Saccharomyces pastorianus
gtcttcagacatccaaaggcaccat

SEQ ID NO: 97027 - DNA, 25 bp, Saccharomyces pastorianus
gcaagtagtaccaatttaccgcctg

SEQ ID NO: 97028 - DNA, 25 bp, Saccharomyces pastorianus
gagacctcaccacaatccaaaagta

SEQ ID NO: 97029 - DNA, 25 bp, Saccharomyces pastorianus
attggcgaagatgcctttcacaaag

SEQ ID NO: 97030 - DNA, 25 bp, Saccharomyces pastorianus
acgacgcttcgagcactaaggtgga

SEQ ID NO: 97031 - DNA, 25 bp, Saccharomyces pastorianus
agtagcagccatgcaaccagttaaa

SEQ ID NO: 97032 - DNA, 25 bp, Saccharomyces pastorianus
ggaccctgagacagttgcagctaaa

SEQ ID NO: 97033 - DNA, 25 bp, Saccharomyces pastorianus
aaaggatggttcttctgatattccc

SEQ ID NO: 97034 - DNA, 25 bp, Saccharomyces pastorianus
aatgcccttgcaactagaggctttc

SEQ ID NO: 97035 - DNA, 25 bp, Saccharomyces pastorianus
aacagaaactactgctaccgggcaa

SEQ ID NO: 97036 - DNA, 25 bp, Saccharomyces pastorianus
taaactggcagtcgcttaaatccgt

SEQ ID NO: 97037 - DNA, 25 bp, Saccharomyces pastorianus
tggcgaattgtttactttggtcacg

SEQ ID NO: 97038 - DNA, 25 bp, Saccharomyces pastorianus
tgagtcctacatttctaacccattc

SEQ ID NO: 97039 - DNA, 25 bp, Saccharomyces pastorianus
gaatatggtctaactcatctcagag

SEQ ID NO: 97040 - DNA, 25 bp, Saccharomyces pastorianus
tttggtcacggatcctacttacaga

SEQ ID NO: 97041 - DNA, 25 bp, Saccharomyces pastorianus
gtttctggcaagatctgccactcaa

SEQ ID NO: 97042 - DNA, 25 bp, Saccharomyces pastorianus
gcaggattcttactacacgggcaac

SEQ ID NO: 97043 - DNA, 25 bp, Saccharomyces pastorianus
gatcgtatgccgtgctttttagaaa

SEQ ID NO: 97044 - DNA, 25 bp, Saccharomyces pastorianus
gtggagcaagcggtgttcaacaaat

SEQ ID NO: 97045 - DNA, 25 bp, Saccharomyces pastorianus
atccaatctgatgcaccttacttaa

SEQ ID NO: 97046 - DNA, 25 bp, Saccharomyces pastorianus
tagccgccaagttaattttccgaat

SEQ ID NO: 97047 - DNA, 25 bp, Saccharomyces pastorianus
atacagtgtcatctttccctattta

SEQ ID NO: 97048 - DNA, 25 bp, Saccharomyces pastorianus
aacgaacaccatattgactcgaggt

SEQ ID NO: 97049 - DNA, 25 bp, Saccharomyces pastorianus
aagaaaattatcacccctcagcact

SEQ ID NO: 97050 - DNA, 25 bp, Saccharomyces pastorianus
gaagtttgcaccgacacagacacca

SEQ ID NO: 97051 - DNA, 25 bp, Saccharomyces pastorianus
ttccctatttattctgcaacatcca

SEQ ID NO: 97052 - DNA, 25 bp, Saccharomyces pastorianus
aaaaaagacgcttacctgcttctcg

SEQ ID NO: 97053 - DNA, 25 bp, Saccharomyces pastorianus
gataaccatcatttagccgccaagt

SEQ ID NO: 97054 - DNA, 25 bp, Saccharomyces pastorianus
aatcatccttttcgcgataaccatc

SEQ ID NO: 97055 - DNA, 25 bp, Saccharomyces pastorianus
gtaggttttctatcctttcgttgag

SEQ ID NO: 97056 - DNA, 25 bp, Saccharomyces pastorianus
gactcgaggtggtaggttttctatc

SEQ ID NO: 97057 - DNA, 25 bp, Saccharomyces pastorianus
tatgctcttgcagtatcacccaaaa

SEQ ID NO: 97058 - DNA, 25 bp, Saccharomyces pastorianus
agctcaaggctataggtttctcaaa

SEQ ID NO: 97059 - DNA, 25 bp, Saccharomyces pastorianus
aatctctggcccaatgacttttgct

SEQ ID NO: 97060 - DNA, 25 bp, Saccharomyces pastorianus
tcaaccggttcaacgtgctgcagca

SEQ ID NO: 97061 - DNA, 25 bp, Saccharomyces pastorianus
ttcggtatcccaattgctgctatat

SEQ ID NO: 97062 - DNA, 25 bp, Saccharomyces pastorianus
aaaagaccctacactaatctctggc

SEQ ID NO: 97063 - DNA, 25 bp, Saccharomyces pastorianus
actacttactgtttggatgccacct

SEQ ID NO: 97064 - DNA, 25 bp, Saccharomyces pastorianus
tatattttcacaacacacttctggg

SEQ ID NO: 97065 - DNA, 25 bp, Saccharomyces pastorianus
gacttttgctttagttacctattca

SEQ ID NO: 97066 - DNA, 25 bp, Saccharomyces pastorianus
agcacgctcattccttcaaaaatac

SEQ ID NO: 97067 - DNA, 25 bp, Saccharomyces pastorianus
ggatgccaccttattaatgaaactg

SEQ ID NO: 97068 - DNA, 25 bp, Saccharomyces pastorianus
gtgccaatcaacctgttcctgaaga

SEQ ID NO: 97069 - DNA, 25 bp, Saccharomyces pastorianus
gtaacacggaccaactaactgctaa

SEQ ID NO: 97070 - DNA, 25 bp, Saccharomyces pastorianus
gcatttggctggtggactggttaac

SEQ ID NO: 97071 - DNA, 25 bp, Saccharomyces pastorianus
aagtctaacttgttactggccaccg

SEQ ID NO: 97072 - DNA, 25 bp, Saccharomyces pastorianus
atagcgcttatggttcattctttaa

SEQ ID NO: 97073 - DNA, 25 bp, Saccharomyces pastorianus
agcacacactctgttcactgaacaa

SEQ ID NO: 97074 - DNA, 25 bp, Saccharomyces pastorianus
ctggccaccgacgttgcagcaagag

SEQ ID NO: 97075 - DNA, 25 bp, Saccharomyces pastorianus
cagattgtcgaagtggtggacccac

SEQ ID NO: 97076 - DNA, 25 bp, Saccharomyces pastorianus
acgggtataacgtcgcagctatcca

SEQ ID NO: 97077 - DNA, 25 bp, Saccharomyces pastorianus
ttaactttcccattgactgtggagg

SEQ ID NO: 97078 - DNA, 25 bp, Saccharomyces pastorianus
agctatccatggtgatttgtcccag

SEQ ID NO: 97079 - DNA, 25 bp, Saccharomyces pastorianus
ttggactgtcttttctgtggtcttt

SEQ ID NO: 97080 - DNA, 25 bp, Saccharomyces pastorianus
aatggtcttccattatcccgtttat

SEQ ID NO: 97081 - DNA, 25 bp, Saccharomyces pastorianus
gcaagttaacccacacactggtgta

SEQ ID NO: 97082 - DNA, 25 bp, Saccharomyces pastorianus
actggtgtacctttgaacgctcatt

SEQ ID NO: 97083 - DNA, 25 bp, Saccharomyces pastorianus
aatgtcatgcgcttggataaccctc

SEQ ID NO: 97084 - DNA, 25 bp, Saccharomyces pastorianus
gtaacatagctcatggtccattctg

SEQ ID NO: 97085 - DNA, 25 bp, Saccharomyces pastorianus
cagtacggcttttcagtccttaatt

SEQ ID NO: 97086 - DNA, 25 bp, Saccharomyces pastorianus
tggcctactttatttggcttccagt

SEQ ID NO: 97087 - DNA, 25 bp, Saccharomyces pastorianus
gttgcgtcattgcttgtcacacttg

SEQ ID NO: 97088 - DNA, 25 bp, Saccharomyces pastorianus
gttatcctacatcattccggttata

SEQ ID NO: 97089 - DNA, 25 bp, Saccharomyces pastorianus
agtcgagaattttccgttgcggcct

SEQ ID NO: 97090 - DNA, 25 bp, Saccharomyces pastorianus
tgaataccgttcaaatgccaatgtg

SEQ ID NO: 97091 - DNA, 25 bp, Saccharomyces pastorianus
atagctccagaacatctgacccagg

SEQ ID NO: 97092 - DNA, 25 bp, Saccharomyces pastorianus
tatgcttccatacaacagcggttca

SEQ ID NO: 97093 - DNA, 25 bp, Saccharomyces pastorianus
tacgtatatgctcatgacacaccat

SEQ ID NO: 97094 - DNA, 25 bp, Saccharomyces pastorianus
acagacaccatatctttcctaaagg

SEQ ID NO: 97095 - DNA, 25 bp, Saccharomyces pastorianus
tatagtctgtttcgctttactggca

SEQ ID NO: 97096 - DNA, 25 bp, Saccharomyces pastorianus
caggatcacctctggtaacgggaat

SEQ ID NO: 97097 - DNA, 25 bp, Saccharomyces pastorianus
gcggttccctccaacatatgggtaa

SEQ ID NO: 97098 - DNA, 25 bp, Saccharomyces pastorianus
aacagcggttcagcgacttacagaa

SEQ ID NO: 97099 - DNA, 25 bp, Saccharomyces pastorianus
ggcaggtgtcctaccatacattaga

SEQ ID NO: 97100 - DNA, 25 bp, Saccharomyces pastorianus
accactgatggtgatgggactttca

SEQ ID NO: 97101 - DNA, 25 bp, Saccharomyces pastorianus
ggtatttcctccacaaatcttttct

SEQ ID NO: 97102 - DNA, 25 bp, Saccharomyces pastorianus
atttcttagctcgtttgggcaggcg

SEQ ID NO: 97103 - DNA, 25 bp, Saccharomyces pastorianus
tactctgtcgggtcctgtatttcga

SEQ ID NO: 97104 - DNA, 25 bp, Saccharomyces pastorianus
caaatcttttcttagcgttctcggg

SEQ ID NO: 97105 - DNA, 25 bp, Saccharomyces pastorianus
tgtatttcgactatagccggttccg

SEQ ID NO: 97106 - DNA, 25 bp, Saccharomyces pastorianus
gccttacgcgatcagcttcgagaac

SEQ ID NO: 97107 - DNA, 25 bp, Saccharomyces pastorianus
cttgccctgtgtactatttcttagc

SEQ ID NO: 97108 - DNA, 25 bp, Saccharomyces pastorianus
agcttggcaggttatcactcacttt

SEQ ID NO: 97109 - DNA, 25 bp, Saccharomyces pastorianus
actttagtgttttcagtggcgctga

SEQ ID NO: 97110 - DNA, 25 bp, Saccharomyces pastorianus
tacgctatttaatgaccttgccctg

SEQ ID NO: 97111 - DNA, 25 bp, Saccharomyces pastorianus
aggcggtgatcgttgtactctgtcg

SEQ ID NO: 97112 - DNA, 25 bp, Saccharomyces pastorianus
gaatgcagaacatgctcgtatgtag

SEQ ID NO: 97113 - DNA, 25 bp, Saccharomyces pastorianus
tggtctacaggcatgaattgattac

SEQ ID NO: 97114 - DNA, 25 bp, Saccharomyces pastorianus
cgatcccactcttccgagatctgat

SEQ ID NO: 97115 - DNA, 25 bp, Saccharomyces pastorianus
agaatgtcccaaatgtcactctcgg

SEQ ID NO: 97116 - DNA, 25 bp, Saccharomyces pastorianus
ccaacattggtgaaactgcgggagt

SEQ ID NO: 97117 - DNA, 25 bp, Saccharomyces pastorianus
aaccggttgttatttgaatgcagaa

SEQ ID NO: 97118 - DNA, 25 bp, Saccharomyces pastorianus
cgtatgtagaagaagcgggcagtcc

SEQ ID NO: 97119 - DNA, 25 bp, Saccharomyces pastorianus
gcaagatattggttccgatcccact

SEQ ID NO: 97120 - DNA, 25 bp, Saccharomyces pastorianus
tcttgctcacacatatttacttcag

SEQ ID NO: 97121 - DNA, 25 bp, Saccharomyces pastorianus
gaatgtgttttttcagtcacaacaa

SEQ ID NO: 97122 - DNA, 25 bp, Saccharomyces pastorianus
ttctttgtgtgcttatcttgctcac

SEQ ID NO: 97123 - DNA, 25 bp, Saccharomyces pastorianus
taccagcttcaccagtggagctagg

SEQ ID NO: 97124 - DNA, 25 bp, Saccharomyces pastorianus
gttcaatacggttttcagctcgttg

SEQ ID NO: 97125 - DNA, 25 bp, Saccharomyces pastorianus
gagtcaattgtgaaatgtcctgtac

SEQ ID NO: 97126 - DNA, 25 bp, Saccharomyces pastorianus
aactggccttacatcatccttatgt

SEQ ID NO: 97127 - DNA, 25 bp, Saccharomyces pastorianus
gagctaggtacattaccagcacctg

SEQ ID NO: 97128 - DNA, 25 bp, Saccharomyces pastorianus
atgaatccgcccataggcatggaaa

SEQ ID NO: 97129 - DNA, 25 bp, Saccharomyces pastorianus
gatggtgctgttgtagtcgtagaat

SEQ ID NO: 97130 - DNA, 25 bp, Saccharomyces pastorianus
gagtccaacttcaccgtaaacacgg

SEQ ID NO: 97131 - DNA, 25 bp, Saccharomyces pastorianus
gtaaacacggtctttgcctcaggct

SEQ ID NO: 97132 - DNA, 25 bp, Saccharomyces pastorianus
tagccttagtcttagtgtcgaacga

SEQ ID NO: 97133 - DNA, 25 bp, Saccharomyces pastorianus
attagcgctggtgtaacgcgcgttt

SEQ ID NO: 97134 - DNA, 25 bp, Saccharomyces pastorianus
aatgtacctagctccactggtgaag

SEQ ID NO: 97135 - DNA, 25 bp, Saccharomyces pastorianus
attctacgactacaacagcaccatc

SEQ ID NO: 97136 - DNA, 25 bp, Saccharomyces pastorianus
ctattactatcacaacccgtttcaa

SEQ ID NO: 97137 - DNA, 25 bp, Saccharomyces pastorianus
tcgttgaagctgcaccaaaggtctt

SEQ ID NO: 97138 - DNA, 25 bp, Saccharomyces pastorianus
ggactcgttcgacactaagactaag

SEQ ID NO: 97139 - DNA, 25 bp, Saccharomyces pastorianus
ggccagttgatcctaaaatttctaa

SEQ ID NO: 97140 - DNA, 25 bp, Saccharomyces pastorianus
taagcctgaggcaaagaccgtgttt

SEQ ID NO: 97141 - DNA, 25 bp, Saccharomyces pastorianus
ttacaccagcgctaatttctcctat

SEQ ID NO: 97142 - DNA, 25 bp, Saccharomyces pastorianus
ggcgcaggtgctggtaatgtaccta

SEQ ID NO: 97143 - DNA, 25 bp, Saccharomyces pastorianus
atgtcgccaaggatgatgctgaaaa

SEQ ID NO: 97144 - DNA, 25 bp, Saccharomyces pastorianus
gaacattccagaaatttccatgcct

SEQ ID NO: 97145 - DNA, 25 bp, Saccharomyces pastorianus
tattgatatagtccggtcacagccc

SEQ ID NO: 97146 - DNA, 25 bp, Saccharomyces pastorianus
agccttgaccaattcggattactct

SEQ ID NO: 97147 - DNA, 25 bp, Saccharomyces pastorianus
gtttgcttcccaagaactgatccaa

SEQ ID NO: 97148 - DNA, 25 bp, Saccharomyces pastorianus
tacaaattctgtcccggttgtgggt

SEQ ID NO: 97149 - DNA, 25 bp, Saccharomyces pastorianus
agtactaccattgccttccaattaa

SEQ ID NO: 97150 - DNA, 25 bp, Saccharomyces pastorianus
gccttacccttgcagtttgatgatt

SEQ ID NO: 97151 - DNA, 25 bp, Saccharomyces pastorianus
gtctccgttattcccagtagaggca

SEQ ID NO: 97152 - DNA, 25 bp, Saccharomyces pastorianus
ggctgtttaggcatagttcaattca

SEQ ID NO: 97153 - DNA, 25 bp, Saccharomyces pastorianus
gcgggtatcgtgttccattcaaaaa

SEQ ID NO: 97154 - DNA, 25 bp, Saccharomyces pastorianus
attactctaagtgttgtctggcaag

SEQ ID NO: 97155 - DNA, 25 bp, Saccharomyces pastorianus
gatccaacggtcattatagccttga

SEQ ID NO: 97156 - DNA, 25 bp, Saccharomyces pastorianus
gacgatgaaagcctccataagctct

SEQ ID NO: 97157 - DNA, 25 bp, Saccharomyces pastorianus
aagctgctgcttcatatttagccaa

SEQ ID NO: 97158 - DNA, 25 bp, Saccharomyces pastorianus
ctaccggtattaatgtctctggcaa

SEQ ID NO: 97159 - DNA, 25 bp, Saccharomyces pastorianus
ggtctcacgccgctggagatacaat

SEQ ID NO: 97160 - DNA, 25 bp, Saccharomyces pastorianus
agtgtcaacagcgtcaatggctccg

SEQ ID NO: 97161 - DNA, 25 bp, Saccharomyces pastorianus
cctactcaaggtatggtgcccaatc

SEQ ID NO: 97162 - DNA, 25 bp, Saccharomyces pastorianus
agatagccatttatctggcacccac

SEQ ID NO: 97163 - DNA, 25 bp, Saccharomyces pastorianus
agagagctctacaggctcagcttct

SEQ ID NO: 97164 - DNA, 25 bp, Saccharomyces pastorianus
ggctcagcttctttctcaacaacag

SEQ ID NO: 97165 - DNA, 25 bp, Saccharomyces pastorianus
ataagctctcccaatactagcgtaa

SEQ ID NO: 97166 - DNA, 25 bp, Saccharomyces pastorianus
atggctccgggcaaggtgtatctac

SEQ ID NO: 97167 - DNA, 25 bp, Saccharomyces pastorianus
ccttcctatttatggccacttttat

SEQ ID NO: 97168 - DNA, 25 bp, Saccharomyces pastorianus
gaatggcccgctaagagtcaagaaa

SEQ ID NO: 97169 - DNA, 25 bp, Saccharomyces pastorianus
acaatggaggtcctttggagactat

SEQ ID NO: 97170 - DNA, 25 bp, Saccharomyces pastorianus
gactatcaaatcttacgttgctggt

SEQ ID NO: 97171 - DNA, 25 bp, Saccharomyces pastorianus
aattctacccaataatccatggccc

SEQ ID NO: 97172 - DNA, 25 bp, Saccharomyces pastorianus
gtatacaccagcatatgagcacttt

SEQ ID NO: 97173 - DNA, 25 bp, Saccharomyces pastorianus
ggtattgttcctttagaagccatga

SEQ ID NO: 97174 - DNA, 25 bp, Saccharomyces pastorianus
gaactttgagaggaatggcccgcta

SEQ ID NO: 97175 - DNA, 25 bp, Saccharomyces pastorianus
aaatgaaagttctgccactgggtgg

SEQ ID NO: 97176 - DNA, 25 bp, Saccharomyces pastorianus
cactgggtggctaaaacctgccgtc

SEQ ID NO: 97177 - DNA, 25 bp, Saccharomyces pastorianus
tgccgtccctattcaatgggctact

SEQ ID NO: 97178 - DNA, 25 bp, Saccharomyces pastorianus
aagtctttgcatgtactcgtaacca

SEQ ID NO: 97179 - DNA, 25 bp, Saccharomyces pastorianus
aaattctgccttaagtcctttcaag

SEQ ID NO: 97180 - DNA, 25 bp, Saccharomyces pastorianus
aattatgccctttttatcaccaccg

SEQ ID NO: 97181 - DNA, 25 bp, Saccharomyces pastorianus
aattcggtcataatgccatcggttt

SEQ ID NO: 97182 - DNA, 25 bp, Saccharomyces pastorianus
gtggttgctcagagtacttcacctc

SEQ ID NO: 97183 - DNA, 25 bp, Saccharomyces pastorianus
aatagacctgatacaccgagtgggc

SEQ ID NO: 97184 - DNA, 25 bp, Saccharomyces pastorianus
gtaaccaccgacctcatggcaagag

SEQ ID NO: 97185 - DNA, 25 bp, Saccharomyces pastorianus
aattctaatggtaccgcacccagta

SEQ ID NO: 97186 - DNA, 25 bp, Saccharomyces pastorianus
gcggccgcgtatttatgctaactga

SEQ ID NO: 97187 - DNA, 25 bp, Saccharomyces pastorianus
gaatgttgttctctacgatgtaccc

SEQ ID NO: 97188 - DNA, 25 bp, Saccharomyces pastorianus
ttccaacatcgtcatcggcaaattg

SEQ ID NO: 97189 - DNA, 25 bp, Saccharomyces pastorianus
aattgccgcctaatattgtacgtaa

SEQ ID NO: 97190 - DNA, 25 bp, Saccharomyces pastorianus
gggatcctagtgctcagcgccatat

SEQ ID NO: 97191 - DNA, 25 bp, Saccharomyces pastorianus
atttgctgtattgcgaaatccgccc

SEQ ID NO: 97192 - DNA, 25 bp, Saccharomyces pastorianus
gaaatacattccgagggcgcccgca

SEQ ID NO: 97193 - DNA, 25 bp, Saccharomyces pastorianus
cgcccggacgatatcactattgagc

SEQ ID NO: 97194 - DNA, 25 bp, Saccharomyces pastorianus
acgggcagtcgtttatgctgcatca

SEQ ID NO: 97195 - DNA, 25 bp, Saccharomyces pastorianus
gaatggtagcgcttgccgtacttgc

SEQ ID NO: 97196 - DNA, 25 bp, Saccharomyces pastorianus
tattgagcgcatgtgccgtttccga

SEQ ID NO: 97197 - DNA, 25 bp, Saccharomyces pastorianus
taacgccgggcctaggaaatacatt

SEQ ID NO: 97198 - DNA, 25 bp, Saccharomyces pastorianus
atatgtgtgcggatccacgggcagt

SEQ ID NO: 97199 - DNA, 25 bp, Saccharomyces pastorianus
aaggttgtagtgtcgcaggcctcac

SEQ ID NO: 97200 - DNA, 25 bp, Saccharomyces pastorianus
gcgcaacttagtgttatacccgtca

SEQ ID NO: 97201 - DNA, 25 bp, Saccharomyces pastorianus
aataataggccttgtgcgggcgccc

SEQ ID NO: 97202 - DNA, 25 bp, Saccharomyces pastorianus
ggcggatttcgcaatacagcaaatt

SEQ ID NO: 97203 - DNA, 25 bp, Saccharomyces pastorianus
gtcaaacacaggtccctctaataat

SEQ ID NO: 97204 - DNA, 25 bp, Saccharomyces pastorianus
aggtccctctaataataggccttgt

SEQ ID NO: 97205 - DNA, 25 bp, Saccharomyces pastorianus
cgctcaatagtgatatcgtccgggc

SEQ ID NO: 97206 - DNA, 25 bp, Saccharomyces pastorianus
tcgtccgggcggatttcgcaataca

SEQ ID NO: 97207 - DNA, 25 bp, Saccharomyces pastorianus
aatagtgatatcgtccgggcggatt

SEQ ID NO: 97208 - DNA, 25 bp, Saccharomyces pastorianus
aataggccttgtgcgggcgccctcg

SEQ ID NO: 97209 - DNA, 25 bp, Saccharomyces pastorianus
cagcaaattgcgcaacttagtgtta

SEQ ID NO: 97210 - DNA, 25 bp, Saccharomyces pastorianus
tgttatacccgtcaaacacaggtcc

SEQ ID NO: 97211 - DNA, 25 bp, Saccharomyces pastorianus
gctacaggctgtgggtgatttgaac

SEQ ID NO: 97212 - DNA, 25 bp, Saccharomyces pastorianus
aaagaagggccagcctgtagccgta

SEQ ID NO: 97213 - DNA, 25 bp, Saccharomyces pastorianus
aaattcgtgttgctgacagatcaca

SEQ ID NO: 97214 - DNA, 25 bp, Saccharomyces pastorianus
gatccattacacattggtgcaccaa

SEQ ID NO: 97215 - DNA, 25 bp, Saccharomyces pastorianus
gattatatcttctccatctgatgga

SEQ ID NO: 97216 - DNA, 25 bp, Saccharomyces pastorianus
ggtgatttatctgtattgccaacaa

SEQ ID NO: 97217 - DNA, 25 bp, Saccharomyces pastorianus
ggaactagagccatttgatctcgaa

SEQ ID NO: 97218 - DNA, 25 bp, Saccharomyces pastorianus
agaagctttttgtctccactagaga

SEQ ID NO: 97219 - DNA, 25 bp, Saccharomyces pastorianus
aatgtggactcttctgatttattag

SEQ ID NO: 97220 - DNA, 25 bp, Saccharomyces pastorianus
gtagccgtattaagcgccatgaaaa

SEQ ID NO: 97221 - DNA, 25 bp, Saccharomyces pastorianus
gaatgcgacgttgcttcttataaca

SEQ ID NO: 97222 - DNA, 25 bp, Saccharomyces pastorianus
gacactcaactaagcttttactttt

SEQ ID NO: 97223 - DNA, 25 bp, Saccharomyces pastorianus
aacggcgacctttcattgcattcaa

SEQ ID NO: 97224 - DNA, 25 bp, Saccharomyces pastorianus
gggagatccttcgaaatacttacga

SEQ ID NO: 97225 - DNA, 25 bp, Saccharomyces pastorianus
agccggaaccaatcatagtaactgt

SEQ ID NO: 97226 - DNA, 25 bp, Saccharomyces pastorianus
tatgaaactcccctaattgaattgt

SEQ ID NO: 97227 - DNA, 25 bp, Saccharomyces pastorianus
acaagcttgggattgggttagccat

SEQ ID NO: 97228 - DNA, 25 bp, Saccharomyces pastorianus
tttactttttgcctacacatttgaa

SEQ ID NO: 97229 - DNA, 25 bp, Saccharomyces pastorianus
caatgcctggatatggtaccgatgt

SEQ ID NO: 97230 - DNA, 25 bp, Saccharomyces pastorianus
gacgaagtacattcccatactaaat

SEQ ID NO: 97231 - DNA, 25 bp, Saccharomyces pastorianus
gtacatgcacacgtcgctagaacca

SEQ ID NO: 97232 - DNA, 25 bp, Saccharomyces pastorianus
gggcgtcctccatgatgatgaaaat

SEQ ID NO: 97233 - DNA, 25 bp, Saccharomyces pastorianus
gaacgccatgattatcgggccagcc

SEQ ID NO: 97234 - DNA, 25 bp, Saccharomyces pastorianus
aagccaccgcatgtcaaatttttga

SEQ ID NO: 97235 - DNA, 25 bp, Saccharomyces pastorianus
gaaatgtttcatcccaatgtctatg

SEQ ID NO: 97236 - DNA, 25 bp, Saccharomyces pastorianus
tccagcttcgccagcaaacgttgaa

SEQ ID NO: 97237 - DNA, 25 bp, Saccharomyces pastorianus
tgtatctgcttcaccattacctgat

SEQ ID NO: 97238 - DNA, 25 bp, Saccharomyces pastorianus
tattttgcagaacagatggactcca

SEQ ID NO: 97239 - DNA, 25 bp, Saccharomyces pastorianus
ggactccaacatatgatgtcgcatc

SEQ ID NO: 97240 - DNA, 25 bp, Saccharomyces pastorianus
ggccagccgatactccatatgaaga

SEQ ID NO: 97241 - DNA, 25 bp, Saccharomyces pastorianus
ttcaacgatccaaatccagcttcgc

SEQ ID NO: 97242 - DNA, 25 bp, Saccharomyces pastorianus
gataacgtcatggtatggaacgcca

SEQ ID NO: 97243 - DNA, 25 bp, Saccharomyces pastorianus
aagaatatcccaataagccaccgca

SEQ ID NO: 97244 - DNA, 25 bp, Saccharomyces pastorianus
cgtcacttaggtcccaattcttgaa

SEQ ID NO: 97245 - DNA, 25 bp, Saccharomyces pastorianus
caaatatactacctgctgatgtgca

SEQ ID NO: 97246 - DNA, 25 bp, Saccharomyces pastorianus
aaacgtggtcaaggtgtttcatctt

SEQ ID NO: 97247 - DNA, 25 bp, Saccharomyces pastorianus
aagagcatagatccattcagcaaag

SEQ ID NO: 97248 - DNA, 25 bp, Saccharomyces pastorianus
acaacggcgagcttggtgtcattat

SEQ ID NO: 97249 - DNA, 25 bp, Saccharomyces pastorianus
ttcattcgtcgtttttgtttccata

SEQ ID NO: 97250 - DNA, 25 bp, Saccharomyces pastorianus
tgacaaactcttctccgtcacttag

SEQ ID NO: 97251 - DNA, 25 bp, Saccharomyces pastorianus
acctcgaactcaatttgtcctgaca

SEQ ID NO: 97252 - DNA, 25 bp, Saccharomyces pastorianus
tcatttggctttcttggacctcgaa

SEQ ID NO: 97253 - DNA, 25 bp, Saccharomyces pastorianus
acaaattcttcaatccgtcttcgac

SEQ ID NO: 97254 - DNA, 25 bp, Saccharomyces pastorianus
gcagccaagtgcaccagatctagat

SEQ ID NO: 97255 - DNA, 25 bp, Saccharomyces pastorianus
acgtttgccaaattggtcgctacca

SEQ ID NO: 97256 - DNA, 25 bp, Saccharomyces pastorianus
gtcaaacacgtcaccagaacttcac

SEQ ID NO: 97257 - DNA, 25 bp, Saccharomyces pastorianus
ggactcatttcctattttccatgtg

SEQ ID NO: 97258 - DNA, 25 bp, Saccharomyces pastorianus
tcgtcattttgtctcggttattttg

SEQ ID NO: 97259 - DNA, 25 bp, Saccharomyces pastorianus
taacgacattgccatcgcttgcgtc

SEQ ID NO: 97260 - DNA, 25 bp, Saccharomyces pastorianus
aagtccaagtaattgtcccgcatct

SEQ ID NO: 97261 - DNA, 25 bp, Saccharomyces pastorianus
atggccaactctcctgttctaaaat

SEQ ID NO: 97262 - DNA, 25 bp, Saccharomyces pastorianus
ttgcgtcgtcataccattcgaacac

SEQ ID NO: 97263 - DNA, 25 bp, Saccharomyces pastorianus
atataaatttgagcggtccctcacc

SEQ ID NO: 97264 - DNA, 25 bp, Saccharomyces pastorianus
gaacacgcaatcttccaggatggcc

SEQ ID NO: 97265 - DNA, 25 bp, Saccharomyces pastorianus
tcttccgaaaaatcctcatctccat

SEQ ID NO: 97266 - DNA, 25 bp, Saccharomyces pastorianus
cttcttctacttgtacagaatgatc

SEQ ID NO: 97267 - DNA, 25 bp, Saccharomyces pastorianus
aatattcagaactttaggcaaacat

SEQ ID NO: 97268 - DNA, 25 bp, Saccharomyces pastorianus
ctatacgctgatttagaagctgact

SEQ ID NO: 97269 - DNA, 25 bp, Saccharomyces pastorianus
gaagctgactatatcaatccaattg

SEQ ID NO: 97270 - DNA, 25 bp, Saccharomyces pastorianus
atttgtttggccaagtgcatttcac

SEQ ID NO: 97271 - DNA, 25 bp, Saccharomyces pastorianus
gttaattacccctgaagccgccttg

SEQ ID NO: 97272 - DNA, 25 bp, Saccharomyces pastorianus
gaagccgccttgcatggtgccttgt

SEQ ID NO: 97273 - DNA, 25 bp, Saccharomyces pastorianus
gttgttgtcaactgtatcaatttgt

SEQ ID NO: 97274 - DNA, 25 bp, Saccharomyces pastorianus
gtgcatttcacaatactatacgctg

SEQ ID NO: 97275 - DNA, 25 bp, Saccharomyces pastorianus
actattcttactgaacggttactgg

SEQ ID NO: 97276 - DNA, 25 bp, Saccharomyces pastorianus
aacttaccagttctagcttacaatc

SEQ ID NO: 97277 - DNA, 25 bp, Saccharomyces pastorianus
agaactcataaattgtgcgccggat

SEQ ID NO: 97278 - DNA, 25 bp, Saccharomyces pastorianus
tgagcctttcatattgcacgttaaa

SEQ ID NO: 97279 - DNA, 25 bp, Saccharomyces pastorianus
attgtgcgccggatgtaaattctaa

SEQ ID NO: 97280 - DNA, 25 bp, Saccharomyces pastorianus
acagccatgtcttgtggtttcagag

SEQ ID NO: 97281 - DNA, 25 bp, Saccharomyces pastorianus
gttttcttttgaactatctggcaag

SEQ ID NO: 97282 - DNA, 25 bp, Saccharomyces pastorianus
aatggctttacgtcactcataatcg

SEQ ID NO: 97283 - DNA, 25 bp, Saccharomyces pastorianus
aatatcaagctggacgtaccgctcg

SEQ ID NO: 97284 - DNA, 25 bp, Saccharomyces pastorianus
gcagagactttcaagcagcatccaa

SEQ ID NO: 97285 - DNA, 25 bp, Saccharomyces pastorianus
gtaccgctcggttatttagatgaga

SEQ ID NO: 97286 - DNA, 25 bp, Saccharomyces pastorianus
atacgtaagcgttctggattcttta

SEQ ID NO: 97287 - DNA, 25 bp, Saccharomyces pastorianus
attggttcgaacaatctggtcgcaa

SEQ ID NO: 97288 - DNA, 25 bp, Saccharomyces pastorianus
ggcaactcttgaaggttcggtacta

SEQ ID NO: 97289 - DNA, 25 bp, Saccharomyces pastorianus
agaagtttctcaagctccaagagct

SEQ ID NO: 97290 - DNA, 25 bp, Saccharomyces pastorianus
aaagagatagttttgcttccacgaa

SEQ ID NO: 97291 - DNA, 25 bp, Saccharomyces pastorianus
gatgtttgagtgcttccggagatta

SEQ ID NO: 97292 - DNA, 25 bp, Saccharomyces pastorianus
ttgcttccacgaaaacaggttcttt

SEQ ID NO: 97293 - DNA, 25 bp, Saccharomyces pastorianus
tgataaatttgttacgccccaggca

SEQ ID NO: 97294 - DNA, 25 bp, Saccharomyces pastorianus
aacatatcattgacggtggcaccat

SEQ ID NO: 97295 - DNA, 25 bp, Saccharomyces pastorianus
aacaacgatccatccgaggagacgt

SEQ ID NO: 97296 - DNA, 25 bp, Saccharomyces pastorianus
acggtggcaccatatcgaacagaat

SEQ ID NO: 97297 - DNA, 25 bp, Saccharomyces pastorianus
ggtactactcgacaatctatttatg

SEQ ID NO: 97298 - DNA, 25 bp, Saccharomyces pastorianus
gacgccggaccaaagacaattcaac

SEQ ID NO: 97299 - DNA, 25 bp, Saccharomyces pastorianus
tagatccagcacttttgagacccgg

SEQ ID NO: 97300 - DNA, 25 bp, Saccharomyces pastorianus
aagacttcgaactcgctgtgggtaa

SEQ ID NO: 97301 - DNA, 25 bp, Saccharomyces pastorianus
gaagattgaatttccacctccaagt

SEQ ID NO: 97302 - DNA, 25 bp, Saccharomyces pastorianus
gtccgtgagctgtttgtgatggcta

SEQ ID NO: 97303 - DNA, 25 bp, Saccharomyces pastorianus
gattctattggctctactcgtgtag

SEQ ID NO: 97304 - DNA, 25 bp, Saccharomyces pastorianus
attggcaagagctgtcgcacatcac

SEQ ID NO: 97305 - DNA, 25 bp, Saccharomyces pastorianus
gaaggttcccgtatggtccgtgagc

SEQ ID NO: 97306 - DNA, 25 bp, Saccharomyces pastorianus
gaacatgctccctcaattatcttta

SEQ ID NO: 97307 - DNA, 25 bp, Saccharomyces pastorianus
aattcatcagggtcagtggtgcgga

SEQ ID NO: 97308 - DNA, 25 bp, Saccharomyces pastorianus
gctgtcgcacatcacactgattgta

SEQ ID NO: 97309 - DNA, 25 bp, Saccharomyces pastorianus
gtgctgatgtcaaaggtgtctgtac

SEQ ID NO: 97310 - DNA, 25 bp, Saccharomyces pastorianus
gatcgggtttgacttttcgaccaag

SEQ ID NO: 97311 - DNA, 25 bp, Saccharomyces pastorianus
gaacgggctctatactagattctct

SEQ ID NO: 97312 - DNA, 25 bp, Saccharomyces pastorianus
gtggcgacaccgcaagacagtatgt

SEQ ID NO: 97313 - DNA, 25 bp, Saccharomyces pastorianus
tcttgtgcacccactgaaacaggtt

SEQ ID NO: 97314 - DNA, 25 bp, Saccharomyces pastorianus
aaagctcgtctcatgtgtgctaagc

SEQ ID NO: 97315 - DNA, 25 bp, Saccharomyces pastorianus
ttgggctacgtatggtcttgtgcac

SEQ ID NO: 97316 - DNA, 25 bp, Saccharomyces pastorianus
aattgaccagtttggctgtggcgac

SEQ ID NO: 97317 - DNA, 25 bp, Saccharomyces pastorianus
atagctggtttacgtgcatctcaaa

SEQ ID NO: 97318 - DNA, 25 bp, Saccharomyces pastorianus
tcaaaccattcccagtttctcataa

SEQ ID NO: 97319 - DNA, 25 bp, Saccharomyces pastorianus
gggcaacggtgccatttccaaagct

SEQ ID NO: 97320 - DNA, 25 bp, Saccharomyces pastorianus
gtgctaagcgacgaattctgccaag

SEQ ID NO: 97321 - DNA, 25 bp, Saccharomyces pastorianus
gaatggacaagagcgcatcctgaag

SEQ ID NO: 97322 - DNA, 25 bp, Saccharomyces pastorianus
aatgggccggactttcaaaacagcg

SEQ ID NO: 97323 - DNA, 25 bp, Saccharomyces pastorianus
atgaccacccctgctatgatgatat

SEQ ID NO: 97324 - DNA, 25 bp, Saccharomyces pastorianus
gcaagaagaggcatcggctacgaat

SEQ ID NO: 97325 - DNA, 25 bp, Saccharomyces pastorianus
gtttcgctattagagctgtgtccac

SEQ ID NO: 97326 - DNA, 25 bp, Saccharomyces pastorianus
gccaaatttctatcttgcccgatga

SEQ ID NO: 97327 - DNA, 25 bp, Saccharomyces pastorianus
gtggtggatccagctgtgcttaaca

SEQ ID NO: 97328 - DNA, 25 bp, Saccharomyces pastorianus
tgatttgatcccgttagcttccagg

SEQ ID NO: 97329 - DNA, 25 bp, Saccharomyces pastorianus
catcctgaagatgctgtttcgctat

SEQ ID NO: 97330 - DNA, 25 bp, Saccharomyces pastorianus
atatatcgggagtttcacaacagca

SEQ ID NO: 97331 - DNA, 25 bp, Saccharomyces pastorianus
agaattgccctctggtatcgacgtt

SEQ ID NO: 97332 - DNA, 25 bp, Saccharomyces pastorianus
acgagtgactctggaactatgcttc

SEQ ID NO: 97333 - DNA, 25 bp, Saccharomyces pastorianus
atctactttctgcttcttgtgttta

SEQ ID NO: 97334 - DNA, 25 bp, Saccharomyces pastorianus
gtagtatctactttctgcttcttgt

SEQ ID NO: 97335 - DNA, 25 bp, Saccharomyces pastorianus
ttattcgtcggttttgttacatctt

SEQ ID NO: 97336 - DNA, 25 bp, Saccharomyces pastorianus
gcttcttgtgtttattctaactttt

SEQ ID NO: 97337 - DNA, 25 bp, Saccharomyces pastorianus
gttctatcgaacgagtgactctgga

SEQ ID NO: 97338 - DNA, 25 bp, Saccharomyces pastorianus
tcgtcggttttgttacatcttaaat

SEQ ID NO: 97339 - DNA, 25 bp, Saccharomyces pastorianus
cattatgtgtggctgtagtatctac

SEQ ID NO: 97340 - DNA, 25 bp, Saccharomyces pastorianus
ctttctgcttcttgtgtttattcta

SEQ ID NO: 97341 - DNA, 25 bp, Saccharomyces pastorianus
ataactcttagcattatgtgtggct

SEQ ID NO: 97342 - DNA, 25 bp, Saccharomyces pastorianus
ggaactatgcttccatataactctt

SEQ ID NO: 97343 - DNA, 25 bp, Saccharomyces pastorianus
tattgttaagccttccactttctac

SEQ ID NO: 97344 - DNA, 25 bp, Saccharomyces pastorianus
gtgtggctcccagtgatatgatcga

SEQ ID NO: 97345 - DNA, 25 bp, Saccharomyces pastorianus
aagaccttcgtgttatcctatgcag

SEQ ID NO: 97346 - DNA, 25 bp, Saccharomyces pastorianus
ttgttcagctccttcgaatggtgat

SEQ ID NO: 97347 - DNA, 25 bp, Saccharomyces pastorianus
tatatgggccattccgtgatgctgc

SEQ ID NO: 97348 - DNA, 25 bp, Saccharomyces pastorianus
gcgcatatcacgtgtcgggcgaata

SEQ ID NO: 97349 - DNA, 25 bp, Saccharomyces pastorianus
agacttaccaatctgcgcatatcac

SEQ ID NO: 97350 - DNA, 25 bp, Saccharomyces pastorianus
aagctggtgcgcactgtgtggctcc

SEQ ID NO: 97351 - DNA, 25 bp, Saccharomyces pastorianus
gcagctgtggcagttaactacgcta

SEQ ID NO: 97352 - DNA, 25 bp, Saccharomyces pastorianus
gtagtgtctctagattagcagctgt

SEQ ID NO: 97353 - DNA, 25 bp, Saccharomyces pastorianus
tgaatacacttctcatggccattgc

SEQ ID NO: 97354 - DNA, 25 bp, Saccharomyces pastorianus
gtagcggctcaacctttttgacaaa

SEQ ID NO: 97355 - DNA, 25 bp, Saccharomyces pastorianus
gttttgctctcaagaagcgctggat

SEQ ID NO: 97356 - DNA, 25 bp, Saccharomyces pastorianus
agttgtcaagctaacgcggtttccg

SEQ ID NO: 97357 - DNA, 25 bp, Saccharomyces pastorianus
acgttcgcgatgtttcaaaagctca

SEQ ID NO: 97358 - DNA, 25 bp, Saccharomyces pastorianus
gtttccgcatactgtggttccaaga

SEQ ID NO: 97359 - DNA, 25 bp, Saccharomyces pastorianus
aggatttgtttttggccctcagcta

SEQ ID NO: 97360 - DNA, 25 bp, Saccharomyces pastorianus
agctatttgccgactctcttagaaa

SEQ ID NO: 97361 - DNA, 25 bp, Saccharomyces pastorianus
aaactgcttgggattttctcgagga

SEQ ID NO: 97362 - DNA, 25 bp, Saccharomyces pastorianus
ctatcaaccatcaacccaggatttg

SEQ ID NO: 97363 - DNA, 25 bp, Saccharomyces pastorianus
tagcaactggcgaacctggtagcgg

SEQ ID NO: 97364 - DNA, 25 bp, Saccharomyces pastorianus
aatgcgctggccaaagactattctt

SEQ ID NO: 97365 - DNA, 25 bp, Saccharomyces pastorianus
taaagcacatgtttagcgggagctg

SEQ ID NO: 97366 - DNA, 25 bp, Saccharomyces pastorianus
atatcagagtctttgcaatcgtcaa

SEQ ID NO: 97367 - DNA, 25 bp, Saccharomyces pastorianus
gggcgcccagtcgagtgacgacaaa

SEQ ID NO: 97368 - DNA, 25 bp, Saccharomyces pastorianus
ggtagtgagagtgccaccacaccag

SEQ ID NO: 97369 - DNA, 25 bp, Saccharomyces pastorianus
gttgataacgatacgctgtccaaat

SEQ ID NO: 97370 - DNA, 25 bp, Saccharomyces pastorianus
gatgagacctacaaacactccgaat

SEQ ID NO: 97371 - DNA, 25 bp, Saccharomyces pastorianus
tcgtcaaattcaatgccctgggaat

SEQ ID NO: 97372 - DNA, 25 bp, Saccharomyces pastorianus
agcgatatcttgttaatcaacccaa

SEQ ID NO: 97373 - DNA, 25 bp, Saccharomyces pastorianus
attactgcaacgactttggcgagcg

SEQ ID NO: 97374 - DNA, 25 bp, Saccharomyces pastorianus
aatgtgctccgatacaatagcgata

SEQ ID NO: 97375 - DNA, 25 bp, Saccharomyces pastorianus
ggcgagcgtacaaaacccaggagtt

SEQ ID NO: 97376 - DNA, 25 bp, Saccharomyces pastorianus
tggttaccagagattggcacccttc

SEQ ID NO: 97377 - DNA, 25 bp, Saccharomyces pastorianus
cattgtcggtgtagctttggagtat

SEQ ID NO: 97378 - DNA, 25 bp, Saccharomyces pastorianus
ccttccagacatatttcgttcgcaa

SEQ ID NO: 97379 - DNA, 25 bp, Saccharomyces pastorianus
ccatcagcgatgatcccgaagtcat

SEQ ID NO: 97380 - DNA, 25 bp, Saccharomyces pastorianus
ggattacacaagacccatcagcgat

SEQ ID NO: 97381 - DNA, 25 bp, Saccharomyces pastorianus
gccatttccgctgcagaactaggtt

SEQ ID NO: 97382 - DNA, 25 bp, Saccharomyces pastorianus
gagggtattttgtggcccgtacact

SEQ ID NO: 97383 - DNA, 25 bp, Saccharomyces pastorianus
ttaggttccttgactgttccaaaag

SEQ ID NO: 97384 - DNA, 25 bp, Saccharomyces pastorianus
aaggccaggcgatgattccacgcaa

SEQ ID NO: 97385 - DNA, 25 bp, Saccharomyces pastorianus
gagtattgtgtcaaagccaccgcca

SEQ ID NO: 97386 - DNA, 25 bp, Saccharomyces pastorianus
ataagaccactgtcctgctggatta

SEQ ID NO: 97387 - DNA, 25 bp, Saccharomyces pastorianus
ctgactctgattttactactggtgg

SEQ ID NO: 97388 - DNA, 25 bp, Saccharomyces pastorianus
caaccccgttattattgtcaccaag

SEQ ID NO: 97389 - DNA, 25 bp, Saccharomyces pastorianus
cacgcccacgacaatgctaagtaga

SEQ ID NO: 97390 - DNA, 25 bp, Saccharomyces pastorianus
ggacccgtctaactctagtatcgat

SEQ ID NO: 97391 - DNA, 25 bp, Saccharomyces pastorianus
aacataccctactgcaatcacaaaa

SEQ ID NO: 97392 - DNA, 25 bp, Saccharomyces pastorianus
ctcatcatctcctgatttccaaaag

SEQ ID NO: 97393 - DNA, 25 bp, Saccharomyces pastorianus
gatggcttccagtagttcgttaagt

SEQ ID NO: 97394 - DNA, 25 bp, Saccharomyces pastorianus
cccatttctcagtcggattcacaag

SEQ ID NO: 97395 - DNA, 25 bp, Saccharomyces pastorianus
attaatactgctatatccacccaac

SEQ ID NO: 97396 - DNA, 25 bp, Saccharomyces pastorianus
ttgaacgacttgttggttggccaaa

SEQ ID NO: 97397 - DNA, 25 bp, Saccharomyces pastorianus
aagaaatctaagacttccacgccca

SEQ ID NO: 97398 - DNA, 25 bp, Saccharomyces pastorianus
gcttgttgcctttgatttcgcgaga

SEQ ID NO: 97399 - DNA, 25 bp, Saccharomyces pastorianus
atggtaaaggccctgcggcgctttc

SEQ ID NO: 97400 - DNA, 25 bp, Saccharomyces pastorianus
atttcgcgagagactgcggactgcc

SEQ ID NO: 97401 - DNA, 25 bp, Saccharomyces pastorianus
tcaggaaacctgtagcggccgggcc

SEQ ID NO: 97402 - DNA, 25 bp, Saccharomyces pastorianus
tgcggcgctttctttcggaaaaact

SEQ ID NO: 97403 - DNA, 25 bp, Saccharomyces pastorianus
tgctagcatgcttgttcgagctcat

SEQ ID NO: 97404 - DNA, 25 bp, Saccharomyces pastorianus
aaactccagagtggcgtaggccggc

SEQ ID NO: 97405 - DNA, 25 bp, Saccharomyces pastorianus
ttttctccacgtgtctgcttgttgc

SEQ ID NO: 97406 - DNA, 25 bp, Saccharomyces pastorianus
gagctcatgagttctcctggctttt

SEQ ID NO: 97407 - DNA, 25 bp, Saccharomyces pastorianus
gttgccattataatagcttctcagg

SEQ ID NO: 97408 - DNA, 25 bp, Saccharomyces pastorianus
aggccggcttgtttagttgctagca

SEQ ID NO: 97409 - DNA, 25 bp, Saccharomyces pastorianus
ttgtcagtaattgcggttctcaccc

SEQ ID NO: 97410 - DNA, 25 bp, Saccharomyces pastorianus
aatattttctgttattgcttcagtt

SEQ ID NO: 97411 - DNA, 25 bp, Saccharomyces pastorianus
gtcaacgactactattttggccaac

SEQ ID NO: 97412 - DNA, 25 bp, Saccharomyces pastorianus
atgcagttacttcgctgtttttcaa

SEQ ID NO: 97413 - DNA, 25 bp, Saccharomyces pastorianus
actatatgcgagcaaatcccctcac

SEQ ID NO: 97414 - DNA, 25 bp, Saccharomyces pastorianus
gacgccgtactctttgtcaacgact

SEQ ID NO: 97415 - DNA, 25 bp, Saccharomyces pastorianus
aactttagaatcgacgccgtactct

SEQ ID NO: 97416 - DNA, 25 bp, Saccharomyces pastorianus
ggaactgacaactatatgcgagcaa

SEQ ID NO: 97417 - DNA, 25 bp, Saccharomyces pastorianus
atcccctcaccaactttagaatcga

SEQ ID NO: 97418 - DNA, 25 bp, Saccharomyces pastorianus
tttggccaacgggaaggcaatgcaa

SEQ ID NO: 97419 - DNA, 25 bp, Saccharomyces pastorianus
attgcttcagttttagcacaggaac

SEQ ID NO: 97420 - DNA, 25 bp, Saccharomyces pastorianus
ctgctggtactcaaagttctaagtt

SEQ ID NO: 97421 - DNA, 25 bp, Saccharomyces pastorianus
taagtctgctggtactcaaagttct

SEQ ID NO: 97422 - DNA, 25 bp, Saccharomyces pastorianus
gctggtactcaaagttctaagttct

SEQ ID NO: 97423 - DNA, 25 bp, Saccharomyces pastorianus
gtctgctggtactcaaagttctaag

SEQ ID NO: 97424 - DNA, 25 bp, Saccharomyces pastorianus
ctggtactcaaagttctaagttctc

SEQ ID NO: 97425 - DNA, 25 bp, Saccharomyces pastorianus
aagtctgctggtactcaaagttcta

SEQ ID NO: 97426 - DNA, 25 bp, Saccharomyces pastorianus
ttcaggtgccaaaatctacccaggc

SEQ ID NO: 97427 - DNA, 25 bp, Saccharomyces pastorianus
ggtgccaaaatctacccaggcagag

SEQ ID NO: 97428 - DNA, 25 bp, Saccharomyces pastorianus
agtctgctggtactcaaagttctaa

SEQ ID NO: 97429 - DNA, 25 bp, Saccharomyces pastorianus
aggtgccaaaatctacccaggcaga

SEQ ID NO: 97430 - DNA, 25 bp, Saccharomyces pastorianus
tgccaaaatctacccaggcagaggt

SEQ ID NO: 97431 - DNA, 25 bp, Saccharomyces pastorianus
taagtctgctggtactcaaagttct

SEQ ID NO: 97432 - DNA, 25 bp, Saccharomyces pastorianus
gctggtactcaaagttctaagttct

SEQ ID NO: 97433 - DNA, 25 bp, Saccharomyces pastorianus
gtctgctggtactcaaagttctaag

SEQ ID NO: 97434 - DNA, 25 bp, Saccharomyces pastorianus
ctggtactcaaagttctaagttctc

SEQ ID NO: 97435 - DNA, 25 bp, Saccharomyces pastorianus
aagtctgctggtactcaaagttcta

SEQ ID NO: 97436 - DNA, 25 bp, Saccharomyces pastorianus
ttcaggtgccaaaatctacccaggc

SEQ ID NO: 97437 - DNA, 25 bp, Saccharomyces pastorianus
atcgattctttttcaggtgccaaaa

SEQ ID NO: 97438 - DNA, 25 bp, Saccharomyces pastorianus
aggtgccaaaatctacccaggcaga

SEQ ID NO: 97439 - DNA, 25 bp, Saccharomyces pastorianus
tgccaaaatctacccaggcagaggt

SEQ ID NO: 97440 - DNA, 25 bp, Saccharomyces pastorianus
aaatcgattctttttcaggtgccaa

SEQ ID NO: 97441 - DNA, 25 bp, Saccharomyces pastorianus
ctgctggtactcaaagttctaagtt

SEQ ID NO: 97442 - DNA, 25 bp, Saccharomyces pastorianus
acaggagaaagtcaaaaagcggcaa

SEQ ID NO: 97443 - DNA, 25 bp, Saccharomyces pastorianus
gaacaagaagttaacatcatgggag

SEQ ID NO: 97444 - DNA, 25 bp, Saccharomyces pastorianus
tatggaaggcagaaaagacaccgct

SEQ ID NO: 97445 - DNA, 25 bp, Saccharomyces pastorianus
gtttggctgctaagatgcatgctaa

SEQ ID NO: 97446 - DNA, 25 bp, Saccharomyces pastorianus
gctcgtcaagctaaaataaccatgt

SEQ ID NO: 97447 - DNA, 25 bp, Saccharomyces pastorianus
agatacgaacgtttggctgctaaga

SEQ ID NO: 97448 - DNA, 25 bp, Saccharomyces pastorianus
tgagaaggaagaagctcgtcaagct

SEQ ID NO: 97449 - DNA, 25 bp, Saccharomyces pastorianus
gaaaagacaccgctgagggccaaaa

SEQ ID NO: 97450 - DNA, 25 bp, Saccharomyces pastorianus
ggcactccagttagtgggaaggtat

SEQ ID NO: 97451 - DNA, 25 bp, Saccharomyces pastorianus
tgagggccaaaagcagagtcgttaa

SEQ ID NO: 97452 - DNA, 25 bp, Saccharomyces pastorianus
aaagcggcaaaaggcactccagtta

SEQ ID NO: 97453 - DNA, 25 bp, Saccharomyces pastorianus
ggtcatggtactggtgctgagcatt

SEQ ID NO: 97454 - DNA, 25 bp, Saccharomyces pastorianus
gacaagatgactatttcggcaagga

SEQ ID NO: 97455 - DNA, 25 bp, Saccharomyces pastorianus
ctccttattgccctttgcattgaag

SEQ ID NO: 97456 - DNA, 25 bp, Saccharomyces pastorianus
gaagcaaatcgctcacgtgttaaag

SEQ ID NO: 97457 - DNA, 25 bp, Saccharomyces pastorianus
attaattacttgtgtcttgacgcaa

SEQ ID NO: 97458 - DNA, 25 bp, Saccharomyces pastorianus
tatggactgttatcactatcgagac

SEQ ID NO: 97459 - DNA, 25 bp, Saccharomyces pastorianus
gtcatgagggttacgtctccttatt

SEQ ID NO: 97460 - DNA, 25 bp, Saccharomyces pastorianus
gtgctgagcatttcacaggctggac

SEQ ID NO: 97461 - DNA, 25 bp, Saccharomyces pastorianus
gagaatctggatttgttacactgga

SEQ ID NO: 97462 - DNA, 25 bp, Saccharomyces pastorianus
actacccagaggtgattctcgacgt

SEQ ID NO: 97463 - DNA, 25 bp, Saccharomyces pastorianus
tagttgctttgatgagtgacccaga

SEQ ID NO: 97464 - DNA, 25 bp, Saccharomyces pastorianus
gtgctcaattcgttgcagctactga

SEQ ID NO: 97465 - DNA, 25 bp, Saccharomyces pastorianus
tctaactgccggtagacctggtgtc

SEQ ID NO: 97466 - DNA, 25 bp, Saccharomyces pastorianus
tactcattctgtttctgctgggtta

SEQ ID NO: 97467 - DNA, 25 bp, Saccharomyces pastorianus
ggaacagtttgctgccatgaacaat

SEQ ID NO: 97468 - DNA, 25 bp, Saccharomyces pastorianus
aagtgtcgctgaagtcttgccgaaa

SEQ ID NO: 97469 - DNA, 25 bp, Saccharomyces pastorianus
ctcaggctctgcttggctttaaatt

SEQ ID NO: 97470 - DNA, 25 bp, Saccharomyces pastorianus
attacctgacgcagttgttgcatgt

SEQ ID NO: 97471 - DNA, 25 bp, Saccharomyces pastorianus
tattcccgctttggaatcttctcat

SEQ ID NO: 97472 - DNA, 25 bp, Saccharomyces pastorianus
ttcaccatttgagcacgatacttcc

SEQ ID NO: 97473 - DNA, 25 bp, Saccharomyces pastorianus
ggtggttccaactctacaggtatgt

SEQ ID NO: 97474 - DNA, 25 bp, Saccharomyces pastorianus
tattggaaatctactggccgtgctc

SEQ ID NO: 97475 - DNA, 25 bp, Saccharomyces pastorianus
cacaaatgttatgggcacgccgctg

SEQ ID NO: 97476 - DNA, 25 bp, Saccharomyces pastorianus
gtcacaattcaatggcagcggcaat

SEQ ID NO: 97477 - DNA, 25 bp, Saccharomyces pastorianus
agaactggattctctagacctgaac

SEQ ID NO: 97478 - DNA, 25 bp, Saccharomyces pastorianus
aataacagcatcgatggcagccgcg

SEQ ID NO: 97479 - DNA, 25 bp, Saccharomyces pastorianus
gaataacgatttccagcagcagcag

SEQ ID NO: 97480 - DNA, 25 bp, Saccharomyces pastorianus
ctaacccctgctaatatcctaaata

SEQ ID NO: 97481 - DNA, 25 bp, Saccharomyces pastorianus
atgattaacagcgtttcgcccacaa

SEQ ID NO: 97482 - DNA, 25 bp, Saccharomyces pastorianus
gcagcctcaaccacagtacaatatg

SEQ ID NO: 97483 - DNA, 25 bp, Saccharomyces pastorianus
ggcaaaggctcaagctcaggctcaa

SEQ ID NO: 97484 - DNA, 25 bp, Saccharomyces pastorianus
ataatagcactgcagctgcaccgat

SEQ ID NO: 97485 - DNA, 25 bp, Saccharomyces pastorianus
tgggaactccaaccgtacataatag

SEQ ID NO: 97486 - DNA, 25 bp, Saccharomyces pastorianus
aaagaagggcgcttcgtcccaagag

SEQ ID NO: 97487 - DNA, 25 bp, Saccharomyces pastorianus
gaggaattcttgtcgttactgccat

SEQ ID NO: 97488 - DNA, 25 bp, Saccharomyces pastorianus
gatgaacgctcttttcagaccaaag

SEQ ID NO: 97489 - DNA, 25 bp, Saccharomyces pastorianus
gagcatgccacggttgatcgagaca

SEQ ID NO: 97490 - DNA, 25 bp, Saccharomyces pastorianus
ggcggtggcactctctgtaaaatat

SEQ ID NO: 97491 - DNA, 25 bp, Saccharomyces pastorianus
ttttgtcaagaccatttgcgccatt

SEQ ID NO: 97492 - DNA, 25 bp, Saccharomyces pastorianus
gccataagccttttaccctgtggga

SEQ ID NO: 97493 - DNA, 25 bp, Saccharomyces pastorianus
gcccatccaggtgaagtcgaacgat

SEQ ID NO: 97494 - DNA, 25 bp, Saccharomyces pastorianus
ttgcgccattggctgtacctggact

SEQ ID NO: 97495 - DNA, 25 bp, Saccharomyces pastorianus
ttttgggcagtgttatcggctctgt

SEQ ID NO: 97496 - DNA, 25 bp, Saccharomyces pastorianus
gagtacgagaacctttcaaccacga

SEQ ID NO: 97497 - DNA, 25 bp, Saccharomyces pastorianus
gtaccccaatttcgttaatctcact

SEQ ID NO: 97498 - DNA, 25 bp, Saccharomyces pastorianus
gattttttggtcttgtgctggtata

SEQ ID NO: 97499 - DNA, 25 bp, Saccharomyces pastorianus
gctagatcatccactcttttttcta

SEQ ID NO: 97500 - DNA, 25 bp, Saccharomyces pastorianus
atcttgttgaacatggacgcgtcag

SEQ ID NO: 97501 - DNA, 25 bp, Saccharomyces pastorianus
tattcaaagatcacggtaccccaat

SEQ ID NO: 97502 - DNA, 25 bp, Saccharomyces pastorianus
ggttatattacctgtcacgcgtttt

SEQ ID NO: 97503 - DNA, 25 bp, Saccharomyces pastorianus
tacctgtcacgcgttttactaaagt

SEQ ID NO: 97504 - DNA, 25 bp, Saccharomyces pastorianus
gatgatgttttatatctacggctag

SEQ ID NO: 97505 - DNA, 25 bp, Saccharomyces pastorianus
gacgcgtcagcttttgagcccatga

SEQ ID NO: 97506 - DNA, 25 bp, Saccharomyces pastorianus
gaacatcgtaatcttactttggata

SEQ ID NO: 97507 - DNA, 25 bp, Saccharomyces pastorianus
gcagtagattgcaaactcctcaaga

SEQ ID NO: 97508 - DNA, 25 bp, Saccharomyces pastorianus
gtctcaaggctggttatatgttctc

SEQ ID NO: 97509 - DNA, 25 bp, Saccharomyces pastorianus
ggatctctaaatttgcaccaggaaa

SEQ ID NO: 97510 - DNA, 25 bp, Saccharomyces pastorianus
tgacggtgccattttttgtgtttaa

SEQ ID NO: 97511 - DNA, 25 bp, Saccharomyces pastorianus
gatgaatgtcatcaacggcgtggaa

SEQ ID NO: 97512 - DNA, 25 bp, Saccharomyces pastorianus
ggaagcacctgcatctgtagagact

SEQ ID NO: 97513 - DNA, 25 bp, Saccharomyces pastorianus
tatgttctcttgcatcctctaagga

SEQ ID NO: 97514 - DNA, 25 bp, Saccharomyces pastorianus
aagttgagttcctcgactagcacct

SEQ ID NO: 97515 - DNA, 25 bp, Saccharomyces pastorianus
gcccatcttcacaaactcaggttat

SEQ ID NO: 97516 - DNA, 25 bp, Saccharomyces pastorianus
gagtgtctctttgggaatctgggtt

SEQ ID NO: 97517 - DNA, 25 bp, Saccharomyces pastorianus
ctccgcccaggataattatgccaaa

SEQ ID NO: 97518 - DNA, 25 bp, Saccharomyces pastorianus
tagcaccttgttccctacgtttgta

SEQ ID NO: 97519 - DNA, 25 bp, Saccharomyces pastorianus
gtactgtcccagttgtcaggacttg

SEQ ID NO: 97520 - DNA, 25 bp, Saccharomyces pastorianus
tgtcaggacttgtatcttccccaat

SEQ ID NO: 97521 - DNA, 25 bp, Saccharomyces pastorianus
tgcaagatttattctgaccaagcca

SEQ ID NO: 97522 - DNA, 25 bp, Saccharomyces pastorianus
gaaacaagtcgccagtggtgaacaa

SEQ ID NO: 97523 - DNA, 25 bp, Saccharomyces pastorianus
gagtattatcgagcacgcagcagaa

SEQ ID NO: 97524 - DNA, 25 bp, Saccharomyces pastorianus
aatggcatgcagttgctgccttgtg

SEQ ID NO: 97525 - DNA, 25 bp, Saccharomyces pastorianus
gctgccttgtgggttgagcgataca

SEQ ID NO: 97526 - DNA, 25 bp, Saccharomyces pastorianus
gatgaggcagtatctggtcctagaa

SEQ ID NO: 97527 - DNA, 25 bp, Saccharomyces pastorianus
ttccccaatcatctagattcctgtg

SEQ ID NO: 97528 - DNA, 25 bp, Saccharomyces pastorianus
acaccgtaaggttgtactgtcccag

SEQ ID NO: 97529 - DNA, 25 bp, Saccharomyces pastorianus
gatacagttgggaaacacaccgtaa

SEQ ID NO: 97530 - DNA, 25 bp, Saccharomyces pastorianus
gaattatcccagatggacgacgaag

SEQ ID NO: 97531 - DNA, 25 bp, Saccharomyces pastorianus
catactctcaaagatccccttagaa

SEQ ID NO: 97532 - DNA, 25 bp, Saccharomyces pastorianus
tttacgagctgttcccaaagacctt

SEQ ID NO: 97533 - DNA, 25 bp, Saccharomyces pastorianus
acttggttcaacgaagattcacttc

SEQ ID NO: 97534 - DNA, 25 bp, Saccharomyces pastorianus
aagctacccatttggactatcgatc

SEQ ID NO: 97535 - DNA, 25 bp, Saccharomyces pastorianus
gattcacttctacattttacgagct

SEQ ID NO: 97536 - DNA, 25 bp, Saccharomyces pastorianus
ttaatcaagcttaccatactctcaa

SEQ ID NO: 97537 - DNA, 25 bp, Saccharomyces pastorianus
ggtagtgaacagtcatcaactctta

SEQ ID NO: 97538 - DNA, 25 bp, Saccharomyces pastorianus
gtaactaccagtgatccacagctat

SEQ ID NO: 97539 - DNA, 25 bp, Saccharomyces pastorianus
aattacaagcacagcaccatccaga

SEQ ID NO: 97540 - DNA, 25 bp, Saccharomyces pastorianus
gacatggcccaacaaggtagtgaac

SEQ ID NO: 97541 - DNA, 25 bp, Saccharomyces pastorianus
attcctaatgtggtgccgggattgc

SEQ ID NO: 97542 - DNA, 25 bp, Saccharomyces pastorianus
gttactaaggagctctacctcgttg

SEQ ID NO: 97543 - DNA, 25 bp, Saccharomyces pastorianus
atatcccattgaaacccattcagga

SEQ ID NO: 97544 - DNA, 25 bp, Saccharomyces pastorianus
tacctcgttgactctgaaaccggaa

SEQ ID NO: 97545 - DNA, 25 bp, Saccharomyces pastorianus
aatctggcaagatcactgacctgga

SEQ ID NO: 97546 - DNA, 25 bp, Saccharomyces pastorianus
gattgctcccgctatgggaattgct

SEQ ID NO: 97547 - DNA, 25 bp, Saccharomyces pastorianus
gacgtgatacggttatttggcttcg

SEQ ID NO: 97548 - DNA, 25 bp, Saccharomyces pastorianus
gcggaagtactggatgtgtgtcaca

SEQ ID NO: 97549 - DNA, 25 bp, Saccharomyces pastorianus
tatagcgaacctccgaatgtcaaga

SEQ ID NO: 97550 - DNA, 25 bp, Saccharomyces pastorianus
gaacacaatggccatgctccaaatg

SEQ ID NO: 97551 - DNA, 25 bp, Saccharomyces pastorianus
ggagggatttcccactgataatgtt

SEQ ID NO: 97552 - DNA, 25 bp, Saccharomyces pastorianus
gttttggacgtgaagccaggcttag

SEQ ID NO: 97553 - DNA, 25 bp, Saccharomyces pastorianus
ggaggagaccttgtgtaccaaatta

SEQ ID NO: 97554 - DNA, 25 bp, Saccharomyces pastorianus
ccaggcttagctattggcagtaaac

SEQ ID NO: 97555 - DNA, 25 bp, Saccharomyces pastorianus
tcgttgctgttttgccccaaatatg

SEQ ID NO: 97556 - DNA, 25 bp, Saccharomyces pastorianus
tccggaccttttacaaatgacaata

SEQ ID NO: 97557 - DNA, 25 bp, Saccharomyces pastorianus
gaagaactcacaactgttaggcaac

SEQ ID NO: 97558 - DNA, 25 bp, Saccharomyces pastorianus
aggcaacaagtttcctctataggag

SEQ ID NO: 97559 - DNA, 25 bp, Saccharomyces pastorianus
ggacatcatttattttacctcaatt

SEQ ID NO: 97560 - DNA, 25 bp, Saccharomyces pastorianus
aaggtccgatctgaatagttacaca

SEQ ID NO: 97561 - DNA, 25 bp, Saccharomyces pastorianus
caagagagtggctcgttgctgtttt

SEQ ID NO: 97562 - DNA, 25 bp, Saccharomyces pastorianus
aagttcacaattgttgcggtggcaa

SEQ ID NO: 97563 - DNA, 25 bp, Saccharomyces pastorianus
ccagagaaaggattcaccattttag

SEQ ID NO: 97564 - DNA, 25 bp, Saccharomyces pastorianus
aagggatcacacatttccagagaaa

SEQ ID NO: 97565 - DNA, 25 bp, Saccharomyces pastorianus
aataagaccgaatcactttcagaaa

SEQ ID NO: 97566 - DNA, 25 bp, Saccharomyces pastorianus
agaaaaccatttgaagcctcctcct

SEQ ID NO: 97567 - DNA, 25 bp, Saccharomyces pastorianus
tcagtaactgctttcaacctgacgc

SEQ ID NO: 97568 - DNA, 25 bp, Saccharomyces pastorianus
gacgtcgactctctatgtttcagta

SEQ ID NO: 97569 - DNA, 25 bp, Saccharomyces pastorianus
gggcccataaaccttcttgagacaa

SEQ ID NO: 97570 - DNA, 25 bp, Saccharomyces pastorianus
agatatcgagaccagcgggcccata

SEQ ID NO: 97571 - DNA, 25 bp, Saccharomyces pastorianus
gtccattaaattacgcagatatcga

SEQ ID NO: 97572 - DNA, 25 bp, Saccharomyces pastorianus
ggagacacgatacgtccattaaatt

SEQ ID NO: 97573 - DNA, 25 bp, Saccharomyces pastorianus
gacgccctgtctggaaatgtatttt

SEQ ID NO: 97574 - DNA, 25 bp, Saccharomyces pastorianus
gataagttgctagcccttgttgata

SEQ ID NO: 97575 - DNA, 25 bp, Saccharomyces pastorianus
gtttatctttgacgcaatctctgat

SEQ ID NO: 97576 - DNA, 25 bp, Saccharomyces pastorianus
gggccccataagaaatacacctcat

SEQ ID NO: 97577 - DNA, 25 bp, Saccharomyces pastorianus
ttgcaacgttgtctagatcatggga

SEQ ID NO: 97578 - DNA, 25 bp, Saccharomyces pastorianus
ggaaattacgttttacagacagcat

SEQ ID NO: 97579 - DNA, 25 bp, Saccharomyces pastorianus
gagccatcgaactttctatccataa

SEQ ID NO: 97580 - DNA, 25 bp, Saccharomyces pastorianus
agacagctattgtttcggagccaat

SEQ ID NO: 97581 - DNA, 25 bp, Saccharomyces pastorianus
actatcagagattgtggcgccttta

SEQ ID NO: 97582 - DNA, 25 bp, Saccharomyces pastorianus
tagacacgggtgttgcgttttgcaa

SEQ ID NO: 97583 - DNA, 25 bp, Saccharomyces pastorianus
gtggcgagacgggtattcaatcatt

SEQ ID NO: 97584 - DNA, 25 bp, Saccharomyces pastorianus
aattgtccacctgttgaaaccaaga

SEQ ID NO: 97585 - DNA, 25 bp, Saccharomyces pastorianus
gagtaaggcatgaagcccattccac

SEQ ID NO: 97586 - DNA, 25 bp, Saccharomyces pastorianus
cattccacccatcatttgtggatgt

SEQ ID NO: 97587 - DNA, 25 bp, Saccharomyces pastorianus
gcaaattgagaatcttgagaaactt

SEQ ID NO: 97588 - DNA, 25 bp, Saccharomyces pastorianus
gggccattagcaaattgagaatctt

SEQ ID NO: 97589 - DNA, 25 bp, Saccharomyces pastorianus
ccacccatcatttgtggatgtggaa

SEQ ID NO: 97590 - DNA, 25 bp, Saccharomyces pastorianus
gagaaactttattcgcaaatgcatt

SEQ ID NO: 97591 - DNA, 25 bp, Saccharomyces pastorianus
gaaacatttgcgacggagggccatt

SEQ ID NO: 97592 - DNA, 25 bp, Saccharomyces pastorianus
cgacggagggccattagcaaattga

SEQ ID NO: 97593 - DNA, 25 bp, Saccharomyces pastorianus
acatttgcgacggagggccattagc

SEQ ID NO: 97594 - DNA, 25 bp, Saccharomyces pastorianus
ttgtggatgtggaaacatttgcgac

SEQ ID NO: 97595 - DNA, 25 bp, Saccharomyces pastorianus
cggagggccattagcaaattgagaa

SEQ ID NO: 97596 - DNA, 25 bp, Saccharomyces pastorianus
gcacaattgccttcatttaggtcat

SEQ ID NO: 97597 - DNA, 25 bp, Saccharomyces pastorianus
tgaatccggatctcccaagtcttaa

SEQ ID NO: 97598 - DNA, 25 bp, Saccharomyces pastorianus
tcagcagcaaatacccacttcagta

SEQ ID NO: 97599 - DNA, 25 bp, Saccharomyces pastorianus
atgatcaatcccgattacgcgcaac

SEQ ID NO: 97600 - DNA, 25 bp, Saccharomyces pastorianus
cactaccggagtttgcacaattgcc

SEQ ID NO: 97601 - DNA, 25 bp, Saccharomyces pastorianus
agcaccttccccagtgagaaacaac

SEQ ID NO: 97602 - DNA, 25 bp, Saccharomyces pastorianus
ggattccatttaacggtctcacaaa

SEQ ID NO: 97603 - DNA, 25 bp, Saccharomyces pastorianus
aagacgggcacttcatgcttactaa

SEQ ID NO: 97604 - DNA, 25 bp, Saccharomyces pastorianus
ttgccattcaatggtcgctcagcac

SEQ ID NO: 97605 - DNA, 25 bp, Saccharomyces pastorianus
atttaggtcattatccgtgtctgat

SEQ ID NO: 97606 - DNA, 25 bp, Saccharomyces pastorianus
gcattgaatcgcctcaattgccatt

SEQ ID NO: 97607 - DNA, 25 bp, Saccharomyces pastorianus
tattcttccttgttgtcctgattca

SEQ ID NO: 97608 - DNA, 25 bp, Saccharomyces pastorianus
ggaagactttcccatttttgccata

SEQ ID NO: 97609 - DNA, 25 bp, Saccharomyces pastorianus
attggactcaatctctcgtttgggc

SEQ ID NO: 97610 - DNA, 25 bp, Saccharomyces pastorianus
tattatgcgcctactacttctttga

SEQ ID NO: 97611 - DNA, 25 bp, Saccharomyces pastorianus
gaatatcactggtctacactgtaca

SEQ ID NO: 97612 - DNA, 25 bp, Saccharomyces pastorianus
aaattcactacactgccgattggac

SEQ ID NO: 97613 - DNA, 25 bp, Saccharomyces pastorianus
tatttgtactaccatgacccatctg

SEQ ID NO: 97614 - DNA, 25 bp, Saccharomyces pastorianus
gattcacagagccttcagagaccaa

SEQ ID NO: 97615 - DNA, 25 bp, Saccharomyces pastorianus
caatgtttcgctgtacgttgttcta

SEQ ID NO: 97616 - DNA, 25 bp, Saccharomyces pastorianus
agctcattggttgtacgcgaacgca

SEQ ID NO: 97617 - DNA, 25 bp, Saccharomyces pastorianus
gaattgattgttccaacctgggaca

SEQ ID NO: 97618 - DNA, 25 bp, Saccharomyces pastorianus
ggtgttatactcacatttgtttcgg

SEQ ID NO: 97619 - DNA, 25 bp, Saccharomyces pastorianus
gtagatgaagaattgggtccctcca

SEQ ID NO: 97620 - DNA, 25 bp, Saccharomyces pastorianus
tgggtccctccatttacaaaactga

SEQ ID NO: 97621 - DNA, 25 bp, Saccharomyces pastorianus
gaccctgcaggttattacgttggct

SEQ ID NO: 97622 - DNA, 25 bp, Saccharomyces pastorianus
gaatggctaacctttcccaaatcta

SEQ ID NO: 97623 - DNA, 25 bp, Saccharomyces pastorianus
tcatatgattgacgcactgggtacc

SEQ ID NO: 97624 - DNA, 25 bp, Saccharomyces pastorianus
gttggatccaactactgtttcgtat

SEQ ID NO: 97625 - DNA, 25 bp, Saccharomyces pastorianus
gttggctacaaagctactgcgacag

SEQ ID NO: 97626 - DNA, 25 bp, Saccharomyces pastorianus
atgcggccctaagagccaaggctga

SEQ ID NO: 97627 - DNA, 25 bp, Saccharomyces pastorianus
ctttaccttgagtgctgagaacatc

SEQ ID NO: 97628 - DNA, 25 bp, Saccharomyces pastorianus
acttggaagtcggtgtcgctacaaa

SEQ ID NO: 97629 - DNA, 25 bp, Saccharomyces pastorianus
ggaggccagcgttaattgacaatct

SEQ ID NO: 97630 - DNA, 25 bp, Saccharomyces pastorianus
tttgatccattccatatttgtcccc

SEQ ID NO: 97631 - DNA, 25 bp, Saccharomyces pastorianus
aatttgttggccatggtgtctttga

SEQ ID NO: 97632 - DNA, 25 bp, Saccharomyces pastorianus
ttacaagttttaccaccacaatcct

SEQ ID NO: 97633 - DNA, 25 bp, Saccharomyces pastorianus
caggagctctcttgcttttgttaaa

SEQ ID NO: 97634 - DNA, 25 bp, Saccharomyces pastorianus
gtatttcattgactgctgtgctaag

SEQ ID NO: 97635 - DNA, 25 bp, Saccharomyces pastorianus
atttgtccccacaatcctatttagt

SEQ ID NO: 97636 - DNA, 25 bp, Saccharomyces pastorianus
aaatcttgcactcatcgatcacagg

SEQ ID NO: 97637 - DNA, 25 bp, Saccharomyces pastorianus
gctgtgctaagcgttttattttcca

SEQ ID NO: 97638 - DNA, 25 bp, Saccharomyces pastorianus
ggtagctgtatgctccacagagtca

SEQ ID NO: 97639 - DNA, 25 bp, Saccharomyces pastorianus
agttcagagcttggtgctggcacca

SEQ ID NO: 97640 - DNA, 25 bp, Saccharomyces pastorianus
gcactgcctagttaacggtcttgat

SEQ ID NO: 97641 - DNA, 25 bp, Saccharomyces pastorianus
gaacacgcaccatgggctctaaaag

SEQ ID NO: 97642 - DNA, 25 bp, Saccharomyces pastorianus
aagctctgcgtcgatttaccaaatc

SEQ ID NO: 97643 - DNA, 25 bp, Saccharomyces pastorianus
gcaatgtgctcgttgatcattttga

SEQ ID NO: 97644 - DNA, 25 bp, Saccharomyces pastorianus
aataagggtggtaagctctgcgtcg

SEQ ID NO: 97645 - DNA, 25 bp, Saccharomyces pastorianus
tttcggatgtggttcttccagagaa

SEQ ID NO: 97646 - DNA, 25 bp, Saccharomyces pastorianus
gaacggcttattacctattagattg

SEQ ID NO: 97647 - DNA, 25 bp, Saccharomyces pastorianus
acatttccagatacgaagctttgag

SEQ ID NO: 97648 - DNA, 25 bp, Saccharomyces pastorianus
tttggattccgatggcaatgtgctc

SEQ ID NO: 97649 - DNA, 25 bp, Saccharomyces pastorianus
tgacaaattgatccctattgctaat

SEQ ID NO: 97650 - DNA, 25 bp, Saccharomyces pastorianus
aaaatccatcattgcaccttcttac

SEQ ID NO: 97651 - DNA, 25 bp, Saccharomyces pastorianus
tgctcccctccattagtttcgatta

SEQ ID NO: 97652 - DNA, 25 bp, Saccharomyces pastorianus
gctcccctccattagtttcgattat

SEQ ID NO: 97653 - DNA, 25 bp, Saccharomyces pastorianus
tcccctccattagtttcgattatat

SEQ ID NO: 97654 - DNA, 25 bp, Saccharomyces pastorianus
taaaaaggccaaatattgtgttatt

SEQ ID NO: 97655 - DNA, 25 bp, Saccharomyces pastorianus
ccctccattagtttcgattatataa

SEQ ID NO: 97656 - DNA, 25 bp, Saccharomyces pastorianus
atgctcccctccattagtttcgatt

SEQ ID NO: 97657 - DNA, 25 bp, Saccharomyces pastorianus
cccctccattagtttcgattatata

SEQ ID NO: 97658 - DNA, 25 bp, Saccharomyces pastorianus
tagtttcgattatataaaaaggcca

SEQ ID NO: 97659 - DNA, 25 bp, Saccharomyces pastorianus
ctccattagtttcgattatataaaa

SEQ ID NO: 97660 - DNA, 25 bp, Saccharomyces pastorianus
cctccattagtttcgattatataaa

SEQ ID NO: 97661 - DNA, 25 bp, Saccharomyces pastorianus
ctcccctccattagtttcgattata

SEQ ID NO: 97662 - DNA, 25 bp, Saccharomyces pastorianus
gtttctccgtttcaggaagcttgtt

SEQ ID NO: 97663 - DNA, 25 bp, Saccharomyces pastorianus
atgtgcggctggttctacgtctcgt

SEQ ID NO: 97664 - DNA, 25 bp, Saccharomyces pastorianus
ggatctccgcttcgagaccgggttt

SEQ ID NO: 97665 - DNA, 25 bp, Saccharomyces pastorianus
atgtcagaggtctcgaggcctggaa

SEQ ID NO: 97666 - DNA, 25 bp, Saccharomyces pastorianus
gcaatgcgcgcgagtttacgaaatt

SEQ ID NO: 97667 - DNA, 25 bp, Saccharomyces pastorianus
caatgcctgtttatgtttctccgtt

SEQ ID NO: 97668 - DNA, 25 bp, Saccharomyces pastorianus
tatgggtgatcccagcaatgcctgt

SEQ ID NO: 97669 - DNA, 25 bp, Saccharomyces pastorianus
gaaattctcgcaggagtttctccgg

SEQ ID NO: 97670 - DNA, 25 bp, Saccharomyces pastorianus
gtctattcctgtcaaaagcatgtca

SEQ ID NO: 97671 - DNA, 25 bp, Saccharomyces pastorianus
tctgcggtaattatcgccggatctc

SEQ ID NO: 97672 - DNA, 25 bp, Saccharomyces pastorianus
cgtgtatgggtttatttctgcggta

SEQ ID NO: 97673 - DNA, 25 bp, Saccharomyces pastorianus
attgcatttaatgggcgccttccaa

SEQ ID NO: 97674 - DNA, 25 bp, Saccharomyces pastorianus
attatcatcgccacctggcattgca

SEQ ID NO: 97675 - DNA, 25 bp, Saccharomyces pastorianus
ctggcattgcatttaatgggcgcct

SEQ ID NO: 97676 - DNA, 25 bp, Saccharomyces pastorianus
aatcttcataattcattatcatcgc

SEQ ID NO: 97677 - DNA, 25 bp, Saccharomyces pastorianus
gcattgcatttaatgggcgccttcc

SEQ ID NO: 97678 - DNA, 25 bp, Saccharomyces pastorianus
atcgccacctggcattgcatttaat

SEQ ID NO: 97679 - DNA, 25 bp, Saccharomyces pastorianus
tttaatgggcgccttccaaaaacat

SEQ ID NO: 97680 - DNA, 25 bp, Saccharomyces pastorianus
gcgccttccaaaaacattcaaatag

SEQ ID NO: 97681 - DNA, 25 bp, Saccharomyces pastorianus
gccacctggcattgcatttaatggg

SEQ ID NO: 97682 - DNA, 25 bp, Saccharomyces pastorianus
aatgggcgccttccaaaaacattca

SEQ ID NO: 97683 - DNA, 25 bp, Saccharomyces pastorianus
gggcgccttccaaaaacattcaaat

SEQ ID NO: 97684 - DNA, 25 bp, Saccharomyces pastorianus
gatgaatctttaagctctgcgattg

SEQ ID NO: 97685 - DNA, 25 bp, Saccharomyces pastorianus
ataccaatgtgaggcaacaactgca

SEQ ID NO: 97686 - DNA, 25 bp, Saccharomyces pastorianus
tctgcgattgataacgaggctaaag

SEQ ID NO: 97687 - DNA, 25 bp, Saccharomyces pastorianus
atctcaaacgttaccaagaacttgg

SEQ ID NO: 97688 - DNA, 25 bp, Saccharomyces pastorianus
gaaggtcttgtttaaaggcctggat

SEQ ID NO: 97689 - DNA, 25 bp, Saccharomyces pastorianus
gggacagatctttcgataacagatt

SEQ ID NO: 97690 - DNA, 25 bp, Saccharomyces pastorianus
gaagcagaacagaacgattcctcat

SEQ ID NO: 97691 - DNA, 25 bp, Saccharomyces pastorianus
aacttggacatcttctaggtatcac

SEQ ID NO: 97692 - DNA, 25 bp, Saccharomyces pastorianus
aacgattcctcattgtattctactg

SEQ ID NO: 97693 - DNA, 25 bp, Saccharomyces pastorianus
gaacatcactgaaagcattagagga

SEQ ID NO: 97694 - DNA, 25 bp, Saccharomyces pastorianus
cttagatacgttggcaagtgctgta

SEQ ID NO: 97695 - DNA, 25 bp, Saccharomyces pastorianus
aaggtcatagtttcagggttctgca

SEQ ID NO: 97696 - DNA, 25 bp, Saccharomyces pastorianus
ggtctccccataaacgaggtgtgct

SEQ ID NO: 97697 - DNA, 25 bp, Saccharomyces pastorianus
gataacgtcgtccatgtttacgaag

SEQ ID NO: 97698 - DNA, 25 bp, Saccharomyces pastorianus
gatgccagatcccttttttgaaact

SEQ ID NO: 97699 - DNA, 25 bp, Saccharomyces pastorianus
agatagcggctctcaaatatgtaat

SEQ ID NO: 97700 - DNA, 25 bp, Saccharomyces pastorianus
agaatcgcacactcaggaagtctgt

SEQ ID NO: 97701 - DNA, 25 bp, Saccharomyces pastorianus
gtcgaaatctccaatcttgacgttt

SEQ ID NO: 97702 - DNA, 25 bp, Saccharomyces pastorianus
gggttctgcatttaacgttatccaa

SEQ ID NO: 97703 - DNA, 25 bp, Saccharomyces pastorianus
gacaacaaacttgcctcaggtggta

SEQ ID NO: 97704 - DNA, 25 bp, Saccharomyces pastorianus
aaccttgtgggactgtaactctatg

SEQ ID NO: 97705 - DNA, 25 bp, Saccharomyces pastorianus
atactaacgagcttgtgacatcaca

SEQ ID NO: 97706 - DNA, 25 bp, Saccharomyces pastorianus
gtgacttcagctttctagctttgga

SEQ ID NO: 97707 - DNA, 25 bp, Saccharomyces pastorianus
atgcgcttcccagttataatgacta

SEQ ID NO: 97708 - DNA, 25 bp, Saccharomyces pastorianus
ttccgcgttttacttctatggttat

SEQ ID NO: 97709 - DNA, 25 bp, Saccharomyces pastorianus
agtctgtgaattctcgcgcaatgtg

SEQ ID NO: 97710 - DNA, 25 bp, Saccharomyces pastorianus
atagggtagtccaccaacagggctc

SEQ ID NO: 97711 - DNA, 25 bp, Saccharomyces pastorianus
aagttggcagattatgcgcttccca

SEQ ID NO: 97712 - DNA, 25 bp, Saccharomyces pastorianus
attaccattcagagtttccgcgttt

SEQ ID NO: 97713 - DNA, 25 bp, Saccharomyces pastorianus
gtaactcaagttactcttctcatta

SEQ ID NO: 97714 - DNA, 25 bp, Saccharomyces pastorianus
gcgcaatgtggtggacggtaactca

SEQ ID NO: 97715 - DNA, 25 bp, Saccharomyces pastorianus
ggaactgtccaaagacactctttta

SEQ ID NO: 97716 - DNA, 25 bp, Saccharomyces pastorianus
gaatcctttagagacatatccgagt

SEQ ID NO: 97717 - DNA, 25 bp, Saccharomyces pastorianus
gagccaggtttgactccattcagag

SEQ ID NO: 97718 - DNA, 25 bp, Saccharomyces pastorianus
agaactgctgtctcgggtgaaactt

SEQ ID NO: 97719 - DNA, 25 bp, Saccharomyces pastorianus
gtgatttctatactgttgctcttcg

SEQ ID NO: 97720 - DNA, 25 bp, Saccharomyces pastorianus
gctgcacagaaacttctcgatccaa

SEQ ID NO: 97721 - DNA, 25 bp, Saccharomyces pastorianus
tgagactaaagctatcgccgaagat

SEQ ID NO: 97722 - DNA, 25 bp, Saccharomyces pastorianus
tatgctggaaatgttgctgacgcgc

SEQ ID NO: 97723 - DNA, 25 bp, Saccharomyces pastorianus
gttgctaggctacacaccaagagtt

SEQ ID NO: 97724 - DNA, 25 bp, Saccharomyces pastorianus
tcttcgtccagctggtatttttggc

SEQ ID NO: 97725 - DNA, 25 bp, Saccharomyces pastorianus
cttggcccgtactgtgtggaaggca

SEQ ID NO: 97726 - DNA, 25 bp, Saccharomyces pastorianus
agttcctatggatgcgtacaatgag

SEQ ID NO: 97727 - DNA, 25 bp, Saccharomyces pastorianus
gacgcgcatgtgttagctgcacaga

SEQ ID NO: 97728 - DNA, 25 bp, Saccharomyces pastorianus
agagaatcattactccgactgttgg

SEQ ID NO: 97729 - DNA, 25 bp, Saccharomyces pastorianus
aattatcaaccttcaaacctgcgct

SEQ ID NO: 97730 - DNA, 25 bp, Saccharomyces pastorianus
ttggactcgccacattcagatcaga

SEQ ID NO: 97731 - DNA, 25 bp, Saccharomyces pastorianus
aattacacaataccttacctctcag

SEQ ID NO: 97732 - DNA, 25 bp, Saccharomyces pastorianus
cctgtgatgccctcatttgatgtaa

SEQ ID NO: 97733 - DNA, 25 bp, Saccharomyces pastorianus
gaagcacgatttgaacatccctgaa

SEQ ID NO: 97734 - DNA, 25 bp, Saccharomyces pastorianus
gaacaaaattctcgccattcttcaa

SEQ ID NO: 97735 - DNA, 25 bp, Saccharomyces pastorianus
ttacctctcagggaatgtctcagtt

SEQ ID NO: 97736 - DNA, 25 bp, Saccharomyces pastorianus
agctatcgccgggtgtatacttaag

SEQ ID NO: 97737 - DNA, 25 bp, Saccharomyces pastorianus
agaattatcgttaccttctcgccct

SEQ ID NO: 97738 - DNA, 25 bp, Saccharomyces pastorianus
gtctcagttatataacgcgcttcta

SEQ ID NO: 97739 - DNA, 25 bp, Saccharomyces pastorianus
tctgtttgaaaaccagcgccgctgg

SEQ ID NO: 97740 - DNA, 25 bp, Saccharomyces pastorianus
aacgtatgacgatgagcccactgta

SEQ ID NO: 97741 - DNA, 25 bp, Saccharomyces pastorianus
aagtgtttactttaccagaggagca

SEQ ID NO: 97742 - DNA, 25 bp, Saccharomyces pastorianus
ttatgagcgcgcatcttggacagat

SEQ ID NO: 97743 - DNA, 25 bp, Saccharomyces pastorianus
gactgtacttttcaaggttgctctg

SEQ ID NO: 97744 - DNA, 25 bp, Saccharomyces pastorianus
gatgggatcattcaacttcctgctt

SEQ ID NO: 97745 - DNA, 25 bp, Saccharomyces pastorianus
aagtgcatatcataccttcctcgga

SEQ ID NO: 97746 - DNA, 25 bp, Saccharomyces pastorianus
tacaccgaattctcatgctctgaag

SEQ ID NO: 97747 - DNA, 25 bp, Saccharomyces pastorianus
accttcctcggacagtagcaaatta

SEQ ID NO: 97748 - DNA, 25 bp, Saccharomyces pastorianus
gcttggcatcgggtggacatcaact

SEQ ID NO: 97749 - DNA, 25 bp, Saccharomyces pastorianus
tggaataatccctctgcaacggaca

SEQ ID NO: 97750 - DNA, 25 bp, Saccharomyces pastorianus
gtatcatattggcacggctgtcctc

SEQ ID NO: 97751 - DNA, 25 bp, Saccharomyces pastorianus
tttgccaccgactcatcctgattat

SEQ ID NO: 97752 - DNA, 25 bp, Saccharomyces pastorianus
gtcctcactgctgccggaaaattca

SEQ ID NO: 97753 - DNA, 25 bp, Saccharomyces pastorianus
gtattaccacaagcgattactcgag

SEQ ID NO: 97754 - DNA, 25 bp, Saccharomyces pastorianus
aattgagtttctattctgtcgccca

SEQ ID NO: 97755 - DNA, 25 bp, Saccharomyces pastorianus
cgcgtcttgagcgttttaagttgta

SEQ ID NO: 97756 - DNA, 25 bp, Saccharomyces pastorianus
atcccaccacccaggaattgagttt

SEQ ID NO: 97757 - DNA, 25 bp, Saccharomyces pastorianus
tgtcgcccaagatgccgtttcaaaa

SEQ ID NO: 97758 - DNA, 25 bp, Saccharomyces pastorianus
gttattatcgatgctgacgccacct

SEQ ID NO: 97759 - DNA, 25 bp, Saccharomyces pastorianus
gccacctcaatgtctcagtataact

SEQ ID NO: 97760 - DNA, 25 bp, Saccharomyces pastorianus
gaaaatggatcttcaccccgataag

SEQ ID NO: 97761 - DNA, 25 bp, Saccharomyces pastorianus
accgaacgtgaaggaaaggctgatc

SEQ ID NO: 97762 - DNA, 25 bp, Saccharomyces pastorianus
catcaagaagcaaggttccggcaag

SEQ ID NO: 97763 - DNA, 25 bp, Saccharomyces pastorianus
tgagattgatgacttaatcgatagt

SEQ ID NO: 97764 - DNA, 25 bp, Saccharomyces pastorianus
gatccaaagtacttttcgcacactg

SEQ ID NO: 97765 - DNA, 25 bp, Saccharomyces pastorianus
aaggctgatccaaagtacttttcgc

SEQ ID NO: 97766 - DNA, 25 bp, Saccharomyces pastorianus
caagaagcaaggttccggcaagggt

SEQ ID NO: 97767 - DNA, 25 bp, Saccharomyces pastorianus
ttaatcgatagtggtgaaatacccc

SEQ ID NO: 97768 - DNA, 25 bp, Saccharomyces pastorianus
tagtggtgaaatacccccagtgttc

SEQ ID NO: 97769 - DNA, 25 bp, Saccharomyces pastorianus
aagaggctcaaatttgcaatcgcat

SEQ ID NO: 97770 - DNA, 25 bp, Saccharomyces pastorianus
taagccaggcgatgagattgatgac

SEQ ID NO: 97771 - DNA, 25 bp, Saccharomyces pastorianus
gagaacaaacaagtggaccgaacgt

SEQ ID NO: 97772 - DNA, 25 bp, Saccharomyces pastorianus
tgacgatctagatatcaatctccat

SEQ ID NO: 97773 - DNA, 25 bp, Saccharomyces pastorianus
tgtttctaatccgtttaattccaag

SEQ ID NO: 97774 - DNA, 25 bp, Saccharomyces pastorianus
gaatttggaccagattcagcaggtt

SEQ ID NO: 97775 - DNA, 25 bp, Saccharomyces pastorianus
tgctgggtcatcaaagtgaacaatt

SEQ ID NO: 97776 - DNA, 25 bp, Saccharomyces pastorianus
cattgaggaaagcactgacgatcta

SEQ ID NO: 97777 - DNA, 25 bp, Saccharomyces pastorianus
aacaattgtctcagtccactcaaag

SEQ ID NO: 97778 - DNA, 25 bp, Saccharomyces pastorianus
aacacattgggtatgctgggtcatc

SEQ ID NO: 97779 - DNA, 25 bp, Saccharomyces pastorianus
gattcagcaggttagcaacagattg

SEQ ID NO: 97780 - DNA, 25 bp, Saccharomyces pastorianus
aatggccttgaccactggtaaagaa

SEQ ID NO: 97781 - DNA, 25 bp, Saccharomyces pastorianus
attggctgtccatgtttctaatccg

SEQ ID NO: 97782 - DNA, 25 bp, Saccharomyces pastorianus
gaaccgtagtatattggctgtccat

SEQ ID NO: 97783 - DNA, 25 bp, Saccharomyces pastorianus
gatcgtggaaaggactggttctgat

SEQ ID NO: 97784 - DNA, 25 bp, Saccharomyces pastorianus
tgcgaattagcatgcgagcggacat

SEQ ID NO: 97785 - DNA, 25 bp, Saccharomyces pastorianus
tgtgtgggctgattcagacctgcac

SEQ ID NO: 97786 - DNA, 25 bp, Saccharomyces pastorianus
tatcgaatccatgggcgagcctcat

SEQ ID NO: 97787 - DNA, 25 bp, Saccharomyces pastorianus
ctatcaaaagcgagggttagcccca

SEQ ID NO: 97788 - DNA, 25 bp, Saccharomyces pastorianus
gcgagcggacatcatcttggttaat

SEQ ID NO: 97789 - DNA, 25 bp, Saccharomyces pastorianus
ggttagccccagcttatcatcgtgt

SEQ ID NO: 97790 - DNA, 25 bp, Saccharomyces pastorianus
aatcaagttatacgaggacagcaaa

SEQ ID NO: 97791 - DNA, 25 bp, Saccharomyces pastorianus
ggttggtggctatttttctccagta

SEQ ID NO: 97792 - DNA, 25 bp, Saccharomyces pastorianus
aaaatcatgttattggcaggcggtg

SEQ ID NO: 97793 - DNA, 25 bp, Saccharomyces pastorianus
gcaggcggtgatcttatcgaatcca

SEQ ID NO: 97794 - DNA, 25 bp, Saccharomyces pastorianus
taccactttcctcttcaaggtgcat

SEQ ID NO: 97795 - DNA, 25 bp, Saccharomyces pastorianus
ctgcagcagttcaaatttaccactt

SEQ ID NO: 97796 - DNA, 25 bp, Saccharomyces pastorianus
tacaactttgatactgcagcagttc

SEQ ID NO: 97797 - DNA, 25 bp, Saccharomyces pastorianus
agcagttcaaatttaccactttcct

SEQ ID NO: 97798 - DNA, 25 bp, Saccharomyces pastorianus
cagttcaaatttaccactttcctct

SEQ ID NO: 97799 - DNA, 25 bp, Saccharomyces pastorianus
tagcaaagagtgagtttattacaac

SEQ ID NO: 97800 - DNA, 25 bp, Saccharomyces pastorianus
gcagcagttcaaatttaccactttc

SEQ ID NO: 97801 - DNA, 25 bp, Saccharomyces pastorianus
attacaactttgatactgcagcagt

SEQ ID NO: 97802 - DNA, 25 bp, Saccharomyces pastorianus
acaactttgatactgcagcagttca

SEQ ID NO: 97803 - DNA, 25 bp, Saccharomyces pastorianus
tactgcagcagttcaaatttaccac

SEQ ID NO: 97804 - DNA, 25 bp, Saccharomyces pastorianus
gtttattacaactttgatactgcag

SEQ ID NO: 97805 - DNA, 25 bp, Saccharomyces pastorianus
ccttcttgctttcccatgatatcat

SEQ ID NO: 97806 - DNA, 25 bp, Saccharomyces pastorianus
ttaatcaaagtgaaccggtcaagca

SEQ ID NO: 97807 - DNA, 25 bp, Saccharomyces pastorianus
gaaagtgcggcttttcatcagacgt

SEQ ID NO: 97808 - DNA, 25 bp, Saccharomyces pastorianus
atttcctctacgaaagtgcggcttt

SEQ ID NO: 97809 - DNA, 25 bp, Saccharomyces pastorianus
gaaccggtcaagcaggtcttggata

SEQ ID NO: 97810 - DNA, 25 bp, Saccharomyces pastorianus
aatgtcagttcaatatcttcttcca

SEQ ID NO: 97811 - DNA, 25 bp, Saccharomyces pastorianus
gacgtggaatgtcagttcaatatct

SEQ ID NO: 97812 - DNA, 25 bp, Saccharomyces pastorianus
ttccaaactctgtcatccgttacat

SEQ ID NO: 97813 - DNA, 25 bp, Saccharomyces pastorianus
tgtcatccgttacatccaagagtat

SEQ ID NO: 97814 - DNA, 25 bp, Saccharomyces pastorianus
ttaggtccttcttgctttcccatga

SEQ ID NO: 97815 - DNA, 25 bp, Saccharomyces pastorianus
tacaatgatatttcctctacgaaag

SEQ ID NO: 97816 - DNA, 25 bp, Saccharomyces pastorianus
aagataccttgccatgtcgttctag

SEQ ID NO: 97817 - DNA, 25 bp, Saccharomyces pastorianus
cttcctcacggctcaaacattgtga

SEQ ID NO: 97818 - DNA, 25 bp, Saccharomyces pastorianus
ttaccagaccacaggcccagaaatt

SEQ ID NO: 97819 - DNA, 25 bp, Saccharomyces pastorianus
tgcgacagcggttcaagacacctaa

SEQ ID NO: 97820 - DNA, 25 bp, Saccharomyces pastorianus
tattgacgcattcattgctggttgc

SEQ ID NO: 97821 - DNA, 25 bp, Saccharomyces pastorianus
agagcagtttttgccgatcagttcg

SEQ ID NO: 97822 - DNA, 25 bp, Saccharomyces pastorianus
ggttgcggtactggtggcaccataa

SEQ ID NO: 97823 - DNA, 25 bp, Saccharomyces pastorianus
gtcgttctagcggatccacaaggat

SEQ ID NO: 97824 - DNA, 25 bp, Saccharomyces pastorianus
gcggtagccgctattcaggttgcaa

SEQ ID NO: 97825 - DNA, 25 bp, Saccharomyces pastorianus
tacctatcggtaaacgacgggctat

SEQ ID NO: 97826 - DNA, 25 bp, Saccharomyces pastorianus
aggttgcaaaaacgcttcctcacgg

SEQ ID NO: 97827 - DNA, 25 bp, Saccharomyces pastorianus
actggcgcctatacaactatcggat

SEQ ID NO: 97828 - DNA, 25 bp, Saccharomyces pastorianus
gaaggctattgatcactcagttgaa

SEQ ID NO: 97829 - DNA, 25 bp, Saccharomyces pastorianus
gaaccagagcaaacaggccctttta

SEQ ID NO: 97830 - DNA, 25 bp, Saccharomyces pastorianus
agagagagcgagctacctccaacaa

SEQ ID NO: 97831 - DNA, 25 bp, Saccharomyces pastorianus
aggaatcgcgctacgtggacgaact

SEQ ID NO: 97832 - DNA, 25 bp, Saccharomyces pastorianus
acgttcattacgaccaccatagatc

SEQ ID NO: 97833 - DNA, 25 bp, Saccharomyces pastorianus
aggagctattacaccttgccaacga

SEQ ID NO: 97834 - DNA, 25 bp, Saccharomyces pastorianus
gaactggtgcgtgaattcctcggcg

SEQ ID NO: 97835 - DNA, 25 bp, Saccharomyces pastorianus
tcttgagaacatccgcgtgaaccag

SEQ ID NO: 97836 - DNA, 25 bp, Saccharomyces pastorianus
cagaggaccgtttgccatttacagc

SEQ ID NO: 97837 - DNA, 25 bp, Saccharomyces pastorianus
atatctgcagggaaggctgccgcca

SEQ ID NO: 97838 - DNA, 25 bp, Saccharomyces pastorianus
aacaatgattattccctcctgaggt

SEQ ID NO: 97839 - DNA, 25 bp, Saccharomyces pastorianus
ggcaccgccagtcgtaaagttttat

SEQ ID NO: 97840 - DNA, 25 bp, Saccharomyces pastorianus
atgtggtggagctgtggcactctac

SEQ ID NO: 97841 - DNA, 25 bp, Saccharomyces pastorianus
ataaattactcaatgcctctctcca

SEQ ID NO: 97842 - DNA, 25 bp, Saccharomyces pastorianus
aaatggccggatctatcgaaccaaa

SEQ ID NO: 97843 - DNA, 25 bp, Saccharomyces pastorianus
tccctgtgctgatgttcgagaattt

SEQ ID NO: 97844 - DNA, 25 bp, Saccharomyces pastorianus
gaaaggcctgcagtctaactttatt

SEQ ID NO: 97845 - DNA, 25 bp, Saccharomyces pastorianus
gaaaccccagaattagatcccatga

SEQ ID NO: 97846 - DNA, 25 bp, Saccharomyces pastorianus
cagcatgccgaacctgttggatgaa

SEQ ID NO: 97847 - DNA, 25 bp, Saccharomyces pastorianus
ggcactctactttgccaacggtttt

SEQ ID NO: 97848 - DNA, 25 bp, Saccharomyces pastorianus
gaggtataactttccctgtgctgat

SEQ ID NO: 97849 - DNA, 25 bp, Saccharomyces pastorianus
agctgtacataaacctgttaagcat

SEQ ID NO: 97850 - DNA, 25 bp, Saccharomyces pastorianus
gtatttgctatatggcggactgcta

SEQ ID NO: 97851 - DNA, 25 bp, Saccharomyces pastorianus
attttgctagtacttatggcttgga

SEQ ID NO: 97852 - DNA, 25 bp, Saccharomyces pastorianus
gttctgactacactcatgacggtga

SEQ ID NO: 97853 - DNA, 25 bp, Saccharomyces pastorianus
gagactaatgctcacatcacaaata

SEQ ID NO: 97854 - DNA, 25 bp, Saccharomyces pastorianus
gaagatgtatccatattaccattag

SEQ ID NO: 97855 - DNA, 25 bp, Saccharomyces pastorianus
ttaccattagatacagaagagcagg

SEQ ID NO: 97856 - DNA, 25 bp, Saccharomyces pastorianus
gcgagggtatattaagttagcactt

SEQ ID NO: 97857 - DNA, 25 bp, Saccharomyces pastorianus
gatcttaagcttgagttctgactac

SEQ ID NO: 97858 - DNA, 25 bp, Saccharomyces pastorianus
ggcggactgctaatgatactcgtaa

SEQ ID NO: 97859 - DNA, 25 bp, Saccharomyces pastorianus
cactcatgacggtgaatctgatcaa

SEQ ID NO: 97860 - DNA, 25 bp, Saccharomyces pastorianus
ggagcagtatcgcttcagtggccaa

SEQ ID NO: 97861 - DNA, 25 bp, Saccharomyces pastorianus
agaggacgctggactggaaaacttt

SEQ ID NO: 97862 - DNA, 25 bp, Saccharomyces pastorianus
gtctgtctttgtgttgattctgttg

SEQ ID NO: 97863 - DNA, 25 bp, Saccharomyces pastorianus
cattgtataggaagccagccccggg

SEQ ID NO: 97864 - DNA, 25 bp, Saccharomyces pastorianus
aatggtcctctctatcaaggcatac

SEQ ID NO: 97865 - DNA, 25 bp, Saccharomyces pastorianus
gatactccaattaacgacgacgacg

SEQ ID NO: 97866 - DNA, 25 bp, Saccharomyces pastorianus
atgaagacgattactaccctcaacc

SEQ ID NO: 97867 - DNA, 25 bp, Saccharomyces pastorianus
ataccggctgagattgtaaccaagt

SEQ ID NO: 97868 - DNA, 25 bp, Saccharomyces pastorianus
cagtggccaatgctttacaatatct

SEQ ID NO: 97869 - DNA, 25 bp, Saccharomyces pastorianus
tttcaccgcggttttcagagacaaa

SEQ ID NO: 97870 - DNA, 25 bp, Saccharomyces pastorianus
gaaaactttggtattgtctgtcttt

SEQ ID NO: 97871 - DNA, 25 bp, Saccharomyces pastorianus
aatgacttggtatgccttgatagag

SEQ ID NO: 97872 - DNA, 25 bp, Saccharomyces pastorianus
ctcctctatggagtttgtccagttg

SEQ ID NO: 97873 - DNA, 25 bp, Saccharomyces pastorianus
ttcagaggtaagtttctggcccggg

SEQ ID NO: 97874 - DNA, 25 bp, Saccharomyces pastorianus
tgtccagttgtttgctagtttcaga

SEQ ID NO: 97875 - DNA, 25 bp, Saccharomyces pastorianus
tgccgtcggttttctggaaaatcca

SEQ ID NO: 97876 - DNA, 25 bp, Saccharomyces pastorianus
acagatcttcgtctttgccgtcggt

SEQ ID NO: 97877 - DNA, 25 bp, Saccharomyces pastorianus
ttagcaccgtcaactcctctatgga

SEQ ID NO: 97878 - DNA, 25 bp, Saccharomyces pastorianus
ggctggcttcctatacaatgacttg

SEQ ID NO: 97879 - DNA, 25 bp, Saccharomyces pastorianus
gattgacatttctcacggacacact

SEQ ID NO: 97880 - DNA, 25 bp, Saccharomyces pastorianus
taccaaagttttccagtccagcgtc

SEQ ID NO: 97881 - DNA, 25 bp, Saccharomyces pastorianus
atttctcacggacacacttcttgtt

SEQ ID NO: 97882 - DNA, 25 bp, Saccharomyces pastorianus
caacgttggtggatgtgcagtccat

SEQ ID NO: 97883 - DNA, 25 bp, Saccharomyces pastorianus
gaagcatgctgatatctttattgaa

SEQ ID NO: 97884 - DNA, 25 bp, Saccharomyces pastorianus
gtggatttagtgaccttttccaaga

SEQ ID NO: 97885 - DNA, 25 bp, Saccharomyces pastorianus
aacaggtgtcggagccaccggtaag

SEQ ID NO: 97886 - DNA, 25 bp, Saccharomyces pastorianus
acattcattgcctgggatttgccta

SEQ ID NO: 97887 - DNA, 25 bp, Saccharomyces pastorianus
gaagtataacgttgtctacatcata

SEQ ID NO: 97888 - DNA, 25 bp, Saccharomyces pastorianus
gagggaggtgataaccacgcttcta

SEQ ID NO: 97889 - DNA, 25 bp, Saccharomyces pastorianus
cctgggatttgcctactggtgagaa

SEQ ID NO: 97890 - DNA, 25 bp, Saccharomyces pastorianus
gagccaccggtaagctatggtgtca

SEQ ID NO: 97891 - DNA, 25 bp, Saccharomyces pastorianus
ctatggtgtcatgagtacgccgata

SEQ ID NO: 97892 - DNA, 25 bp, Saccharomyces pastorianus
tgagtacgccgatattcaaccacct

SEQ ID NO: 97893 - DNA, 25 bp, Saccharomyces pastorianus
gctgacgaagatactacaactggtt

SEQ ID NO: 97894 - DNA, 25 bp, Saccharomyces pastorianus
agatcatccctacgaccctgaaaag

SEQ ID NO: 97895 - DNA, 25 bp, Saccharomyces pastorianus
ttctaatcaaccaacatatcgcgga

SEQ ID NO: 97896 - DNA, 25 bp, Saccharomyces pastorianus
ccaatgcgttccctgctattttaga

SEQ ID NO: 97897 - DNA, 25 bp, Saccharomyces pastorianus
actggtttattgttagccgggattg

SEQ ID NO: 97898 - DNA, 25 bp, Saccharomyces pastorianus
gccgggattggacaaatcactcctg

SEQ ID NO: 97899 - DNA, 25 bp, Saccharomyces pastorianus
gactactaaggaggaaatcactgac

SEQ ID NO: 97900 - DNA, 25 bp, Saccharomyces pastorianus
atatcgcggaaaacataagagctag

SEQ ID NO: 97901 - DNA, 25 bp, Saccharomyces pastorianus
gagagacgatattgccatccttcta

SEQ ID NO: 97902 - DNA, 25 bp, Saccharomyces pastorianus
tattgccatccttctaatcaaccaa

SEQ ID NO: 97903 - DNA, 25 bp, Saccharomyces pastorianus
tccatctaaagatcatccctacgac

SEQ ID NO: 97904 - DNA, 25 bp, Saccharomyces pastorianus
cttctggaagcagcgcatcgggcaa

SEQ ID NO: 97905 - DNA, 25 bp, Saccharomyces pastorianus
agagacttgggcatcggctacaatg

SEQ ID NO: 97906 - DNA, 25 bp, Saccharomyces pastorianus
gatacgttacaatggtacctccgaa

SEQ ID NO: 97907 - DNA, 25 bp, Saccharomyces pastorianus
atcgaagacattgcgcctgtgcagg

SEQ ID NO: 97908 - DNA, 25 bp, Saccharomyces pastorianus
tcgggcaaggactcaaacgcttctg

SEQ ID NO: 97909 - DNA, 25 bp, Saccharomyces pastorianus
acgcttctgagctatgtgtatacga

SEQ ID NO: 97910 - DNA, 25 bp, Saccharomyces pastorianus
tgactccaacgttgtttttcttcga

SEQ ID NO: 97911 - DNA, 25 bp, Saccharomyces pastorianus
gcgtggtttccacatcagagacttg

SEQ ID NO: 97912 - DNA, 25 bp, Saccharomyces pastorianus
aacgccatccggaaagcttctggaa

SEQ ID NO: 97913 - DNA, 25 bp, Saccharomyces pastorianus
gataccaataaggtggccgccctac

SEQ ID NO: 97914 - DNA, 25 bp, Saccharomyces pastorianus
ggtgatggaacctgccgataccaat

SEQ ID NO: 97915 - DNA, 25 bp, Saccharomyces pastorianus
gatgttgtgctattagccggaacca

SEQ ID NO: 97916 - DNA, 25 bp, Saccharomyces pastorianus
taaatgactcaactgcggaaagcga

SEQ ID NO: 97917 - DNA, 25 bp, Saccharomyces pastorianus
ctcgttgcatcggtactggacgtaa

SEQ ID NO: 97918 - DNA, 25 bp, Saccharomyces pastorianus
acacttagcggtagagttgttaacg

SEQ ID NO: 97919 - DNA, 25 bp, Saccharomyces pastorianus
gccggaaccaactcctgcgaaagaa

SEQ ID NO: 97920 - DNA, 25 bp, Saccharomyces pastorianus
gagctgtgctcgatgttgtgctatt

SEQ ID NO: 97921 - DNA, 25 bp, Saccharomyces pastorianus
atcgttctccacatagataggcttg

SEQ ID NO: 97922 - DNA, 25 bp, Saccharomyces pastorianus
gataaacttgcgctgctcgttgcat

SEQ ID NO: 97923 - DNA, 25 bp, Saccharomyces pastorianus
gttaacgccatgagaatcgttctcc

SEQ ID NO: 97924 - DNA, 25 bp, Saccharomyces pastorianus
gatattgaagctatactcggcgttg

SEQ ID NO: 97925 - DNA, 25 bp, Saccharomyces pastorianus
tatactcggcgttgataaacttgcg

SEQ ID NO: 97926 - DNA, 25 bp, Saccharomyces pastorianus
taaagtgtggcttaactccccagga

SEQ ID NO: 97927 - DNA, 25 bp, Saccharomyces pastorianus
ttaactccccaggaatccgagaaga

SEQ ID NO: 97928 - DNA, 25 bp, Saccharomyces pastorianus
ttacgtcgcattatgggccaagttt

SEQ ID NO: 97929 - DNA, 25 bp, Saccharomyces pastorianus
caagcatttgccatatttcgattca

SEQ ID NO: 97930 - DNA, 25 bp, Saccharomyces pastorianus
ttttcccagaaaagccgttgaatat

SEQ ID NO: 97931 - DNA, 25 bp, Saccharomyces pastorianus
gattcaaggtgtgtagcatacccta

SEQ ID NO: 97932 - DNA, 25 bp, Saccharomyces pastorianus
aagttctacgagtttgccaagccaa

SEQ ID NO: 97933 - DNA, 25 bp, Saccharomyces pastorianus
agcttgcgactttatttggttcttt

SEQ ID NO: 97934 - DNA, 25 bp, Saccharomyces pastorianus
ttttttcacgtccaattacgtcgca

SEQ ID NO: 97935 - DNA, 25 bp, Saccharomyces pastorianus
gcatgtgctaagaaccttgtcctca

SEQ ID NO: 97936 - DNA, 25 bp, Saccharomyces pastorianus
tatcctggagatatgtcgatacaca

SEQ ID NO: 97937 - DNA, 25 bp, Saccharomyces pastorianus
caattggctgtgcttcttcaaaaaa

SEQ ID NO: 97938 - DNA, 25 bp, Saccharomyces pastorianus
ttgcacggcgtcaaagtactcaatt

SEQ ID NO: 97939 - DNA, 25 bp, Saccharomyces pastorianus
gcaggacaagggatacttacgccaa

SEQ ID NO: 97940 - DNA, 25 bp, Saccharomyces pastorianus
gtcttcaattaattctccatcagtg

SEQ ID NO: 97941 - DNA, 25 bp, Saccharomyces pastorianus
taagtttttctctatccgcatgtct

SEQ ID NO: 97942 - DNA, 25 bp, Saccharomyces pastorianus
ttctctatccgcatgtcttcaatta

SEQ ID NO: 97943 - DNA, 25 bp, Saccharomyces pastorianus
gaccatgtccattctattataggat

SEQ ID NO: 97944 - DNA, 25 bp, Saccharomyces pastorianus
ttataggatacccacttgcacggcg

SEQ ID NO: 97945 - DNA, 25 bp, Saccharomyces pastorianus
ggctatgagccctttaagtttttct

SEQ ID NO: 97946 - DNA, 25 bp, Saccharomyces pastorianus
ttacgccaaaaaagaccatgtccat

SEQ ID NO: 97947 - DNA, 25 bp, Saccharomyces pastorianus
gtactcaattggctgtgcttcttca

SEQ ID NO: 97948 - DNA, 25 bp, Saccharomyces pastorianus
tggaatgaccttttgtcctctgaga

SEQ ID NO: 97949 - DNA, 25 bp, Saccharomyces pastorianus
aatgctacacttacttgcgtactct

SEQ ID NO: 97950 - DNA, 25 bp, Saccharomyces pastorianus
tcctctgagaactttcatacccttt

SEQ ID NO: 97951 - DNA, 25 bp, Saccharomyces pastorianus
atacccttttgattgcctgtttatg

SEQ ID NO: 97952 - DNA, 25 bp, Saccharomyces pastorianus
tggacttaaccctacttggaatgac

SEQ ID NO: 97953 - DNA, 25 bp, Saccharomyces pastorianus
gaaacttttgagttggagcccacag

SEQ ID NO: 97954 - DNA, 25 bp, Saccharomyces pastorianus
gtctgagtccgtcacaatgcaacag

SEQ ID NO: 97955 - DNA, 25 bp, Saccharomyces pastorianus
tctccatacgcacaagtggctgttt

SEQ ID NO: 97956 - DNA, 25 bp, Saccharomyces pastorianus
gggtacatccggatttatgctcgtt

SEQ ID NO: 97957 - DNA, 25 bp, Saccharomyces pastorianus
gaattacttgttatcttagcgctaa

SEQ ID NO: 97958 - DNA, 25 bp, Saccharomyces pastorianus
ggttgaggttgaacttctctccata

SEQ ID NO: 97959 - DNA, 25 bp, Saccharomyces pastorianus
tttagaccaagagaagtacgacaga

SEQ ID NO: 97960 - DNA, 25 bp, Saccharomyces pastorianus
gtctctgttttggtcgacagattaa

SEQ ID NO: 97961 - DNA, 25 bp, Saccharomyces pastorianus
gtttctgtctctgttttggtcgaca

SEQ ID NO: 97962 - DNA, 25 bp, Saccharomyces pastorianus
ttttagaccaagagaagtacgacag

SEQ ID NO: 97963 - DNA, 25 bp, Saccharomyces pastorianus
ctgtcattttagaccaagagaagta

SEQ ID NO: 97964 - DNA, 25 bp, Saccharomyces pastorianus
acttacagatacgtttctgtctctg

SEQ ID NO: 97965 - DNA, 25 bp, Saccharomyces pastorianus
cgctgtcattttagaccaagagaag

SEQ ID NO: 97966 - DNA, 25 bp, Saccharomyces pastorianus
gaccaagagaagtacgacagaatct

SEQ ID NO: 97967 - DNA, 25 bp, Saccharomyces pastorianus
gctgtcattttagaccaagagaagt

SEQ ID NO: 97968 - DNA, 25 bp, Saccharomyces pastorianus
gtcattttagaccaagagaagtacg

SEQ ID NO: 97969 - DNA, 25 bp, Saccharomyces pastorianus
cattttagaccaagagaagtacgac

SEQ ID NO: 97970 - DNA, 25 bp, Saccharomyces pastorianus
gaggcagctcattgatagtggtaca

SEQ ID NO: 97971 - DNA, 25 bp, Saccharomyces pastorianus
caaaggattttctgggtcggacctg

SEQ ID NO: 97972 - DNA, 25 bp, Saccharomyces pastorianus
attgcctggttctgatcaacgttac

SEQ ID NO: 97973 - DNA, 25 bp, Saccharomyces pastorianus
agaacggtcttctacagatcatgaa

SEQ ID NO: 97974 - DNA, 25 bp, Saccharomyces pastorianus
gacgaattcgacttgcaactgattg

SEQ ID NO: 97975 - DNA, 25 bp, Saccharomyces pastorianus
gggttatgattatcggtgctactaa

SEQ ID NO: 97976 - DNA, 25 bp, Saccharomyces pastorianus
gattcattccttagagaacggtctt

SEQ ID NO: 97977 - DNA, 25 bp, Saccharomyces pastorianus
atgttaatgatacttcttccttgaa

SEQ ID NO: 97978 - DNA, 25 bp, Saccharomyces pastorianus
gggtcggacctgaaagagctttgca

SEQ ID NO: 97979 - DNA, 25 bp, Saccharomyces pastorianus
aaggtttcttgtttcattgcctggt

SEQ ID NO: 97980 - DNA, 25 bp, Saccharomyces pastorianus
gaagttacggcaaccttaaaagctg

SEQ ID NO: 97981 - DNA, 25 bp, Saccharomyces pastorianus
atcaatacagtatcatggcatatcg

SEQ ID NO: 97982 - DNA, 25 bp, Saccharomyces pastorianus
gtttgtatattctcttacggtccac

SEQ ID NO: 97983 - DNA, 25 bp, Saccharomyces pastorianus
agaagtttgggtctacaacaagtag

SEQ ID NO: 97984 - DNA, 25 bp, Saccharomyces pastorianus
cactcaatgtcttcggtttctcaaa

SEQ ID NO: 97985 - DNA, 25 bp, Saccharomyces pastorianus
ggtaacaacagtacatcaatacagt

SEQ ID NO: 97986 - DNA, 25 bp, Saccharomyces pastorianus
attctcttacggtccacatattcaa

SEQ ID NO: 97987 - DNA, 25 bp, Saccharomyces pastorianus
gaagaaaggctcaaggttccaattt

SEQ ID NO: 97988 - DNA, 25 bp, Saccharomyces pastorianus
cacccttgtttctgactcagagatc

SEQ ID NO: 97989 - DNA, 25 bp, Saccharomyces pastorianus
tccaattttggtcacccttgtttct

SEQ ID NO: 97990 - DNA, 25 bp, Saccharomyces pastorianus
agagatttggatatctcttcctcca

SEQ ID NO: 97991 - DNA, 25 bp, Saccharomyces pastorianus
gaaacagttataccatccttagcaa

SEQ ID NO: 97992 - DNA, 25 bp, Saccharomyces pastorianus
tgcgctattcatcagggctactcaa

SEQ ID NO: 97993 - DNA, 25 bp, Saccharomyces pastorianus
gcgccctaacgctgagtttgtcgaa

SEQ ID NO: 97994 - DNA, 25 bp, Saccharomyces pastorianus
gggctactcaatcgcattatgtggt

SEQ ID NO: 97995 - DNA, 25 bp, Saccharomyces pastorianus
agacgagtatcttccgatcatcggc

SEQ ID NO: 97996 - DNA, 25 bp, Saccharomyces pastorianus
cctagatcctgctcgtgaacgatgg

SEQ ID NO: 97997 - DNA, 25 bp, Saccharomyces pastorianus
gttctttccacgctttgaaacacgt

SEQ ID NO: 97998 - DNA, 25 bp, Saccharomyces pastorianus
agggcaaaactatccgcacgctgaa

SEQ ID NO: 97999 - DNA, 25 bp, Saccharomyces pastorianus
attcccctcgcaacactgaaagatg

SEQ ID NO: 98000 - DNA, 25 bp, Saccharomyces pastorianus
attcatcgtttgtgtcgtcatatac

SEQ ID NO: 98001 - DNA, 25 bp, Saccharomyces pastorianus
gaaaaacccgcaactttgttcgatg

SEQ ID NO: 98002 - DNA, 25 bp, Saccharomyces pastorianus
gctagtaaggcggtttctcctaacg

SEQ ID NO: 98003 - DNA, 25 bp, Saccharomyces pastorianus
ttgacgatttccatcagcgctttga

SEQ ID NO: 98004 - DNA, 25 bp, Saccharomyces pastorianus
atcagcctgtttcagcgtgcggata

SEQ ID NO: 98005 - DNA, 25 bp, Saccharomyces pastorianus
tcttgaccttttttagcgccgttag

SEQ ID NO: 98006 - DNA, 25 bp, Saccharomyces pastorianus
cgcggcaatttcacctttgacaatg

SEQ ID NO: 98007 - DNA, 25 bp, Saccharomyces pastorianus
atagttttgcccttgtcgttgacga

SEQ ID NO: 98008 - DNA, 25 bp, Saccharomyces pastorianus
aggagaaaccgccttactagctcat

SEQ ID NO: 98009 - DNA, 25 bp, Saccharomyces pastorianus
gttgcgggtttttcaggaccagcat

SEQ ID NO: 98010 - DNA, 25 bp, Saccharomyces pastorianus
gatcctctctgcaaggtgttcatca

SEQ ID NO: 98011 - DNA, 25 bp, Saccharomyces pastorianus
ggcctccattggtgtttaattcgtg

SEQ ID NO: 98012 - DNA, 25 bp, Saccharomyces pastorianus
accggagcgttctctatacagacta

SEQ ID NO: 98013 - DNA, 25 bp, Saccharomyces pastorianus
agcgttagggcgcaaactcaccgga

SEQ ID NO: 98014 - DNA, 25 bp, Saccharomyces pastorianus
gatacagggttccagatgtctactt

SEQ ID NO: 98015 - DNA, 25 bp, Saccharomyces pastorianus
gataagtttcactccatcatgttat

SEQ ID NO: 98016 - DNA, 25 bp, Saccharomyces pastorianus
tgatcacgctaatactgccttttgg

SEQ ID NO: 98017 - DNA, 25 bp, Saccharomyces pastorianus
gtcattgagctttccgagtttgcag

SEQ ID NO: 98018 - DNA, 25 bp, Saccharomyces pastorianus
gtcctcctatttactctttgaaaca

SEQ ID NO: 98019 - DNA, 25 bp, Saccharomyces pastorianus
gccgttgcttcagcacatgtttcaa

SEQ ID NO: 98020 - DNA, 25 bp, Saccharomyces pastorianus
gttgctgacccgtgagttcaagaat

SEQ ID NO: 98021 - DNA, 25 bp, Saccharomyces pastorianus
gtatgactgtactgttgctgacccg

SEQ ID NO: 98022 - DNA, 25 bp, Saccharomyces pastorianus
atattcgcgggatgcatcgttggcc

SEQ ID NO: 98023 - DNA, 25 bp, Saccharomyces pastorianus
atatggcatggacccaaccgacaag

SEQ ID NO: 98024 - DNA, 25 bp, Saccharomyces pastorianus
gatcttccaactaccagtcatttgt

SEQ ID NO: 98025 - DNA, 25 bp, Saccharomyces pastorianus
aagtttgttacagtgcgacgatggc

SEQ ID NO: 98026 - DNA, 25 bp, Saccharomyces pastorianus
acatgtacgttgatgttcccggaga

SEQ ID NO: 98027 - DNA, 25 bp, Saccharomyces pastorianus
ggtgatacacagcttttcaacagag

SEQ ID NO: 98028 - DNA, 25 bp, Saccharomyces pastorianus
tgttcccggagagaagcgttactat

SEQ ID NO: 98029 - DNA, 25 bp, Saccharomyces pastorianus
ggcctcaagtaaaatccgcttctac

SEQ ID NO: 98030 - DNA, 25 bp, Saccharomyces pastorianus
tacgttcaccttttctggcatactt

SEQ ID NO: 98031 - DNA, 25 bp, Saccharomyces pastorianus
attgcatccggtttctaattcgaag

SEQ ID NO: 98032 - DNA, 25 bp, Saccharomyces pastorianus
aaatagcgttggttcacttagaggc

SEQ ID NO: 98033 - DNA, 25 bp, Saccharomyces pastorianus
atggcactggcgcaacatcaggaaa

SEQ ID NO: 98034 - DNA, 25 bp, Saccharomyces pastorianus
gaaacaggcctatagtatctaccaa

SEQ ID NO: 98035 - DNA, 25 bp, Saccharomyces pastorianus
gtaataactcatacgtcactgctta

SEQ ID NO: 98036 - DNA, 25 bp, Saccharomyces pastorianus
tatgatttaatcaaagctgctgctg

SEQ ID NO: 98037 - DNA, 25 bp, Saccharomyces pastorianus
tagctctccgagtaaaatcacaaga

SEQ ID NO: 98038 - DNA, 25 bp, Saccharomyces pastorianus
ggaagactcagcaaactcaacagat

SEQ ID NO: 98039 - DNA, 25 bp, Saccharomyces pastorianus
agtcacatgcagacaaagttcccat

SEQ ID NO: 98040 - DNA, 25 bp, Saccharomyces pastorianus
atgttactcacaccagccaagacta

SEQ ID NO: 98041 - DNA, 25 bp, Saccharomyces pastorianus
agaaatttttgtggccaatactgct

SEQ ID NO: 98042 - DNA, 25 bp, Saccharomyces pastorianus
taagcccataacatctctgactaat

SEQ ID NO: 98043 - DNA, 25 bp, Saccharomyces pastorianus
acaaagttcccatcacaatagctct

SEQ ID NO: 98044 - DNA, 25 bp, Saccharomyces pastorianus
atgcgtgccatagtttcttccctta

SEQ ID NO: 98045 - DNA, 25 bp, Saccharomyces pastorianus
tttcttcccttatggttaagcccat

SEQ ID NO: 98046 - DNA, 25 bp, Saccharomyces pastorianus
gcagtaattcattcatgcgtgccat

SEQ ID NO: 98047 - DNA, 25 bp, Saccharomyces pastorianus
atcgttcggtgcgtcgttccaaaat

SEQ ID NO: 98048 - DNA, 25 bp, Saccharomyces pastorianus
ctagctttctatttgtcgtggttta

SEQ ID NO: 98049 - DNA, 25 bp, Saccharomyces pastorianus
gggcactgactggatcactttattt

SEQ ID NO: 98050 - DNA, 25 bp, Saccharomyces pastorianus
gattcttacaatctggcgcctttga

SEQ ID NO: 98051 - DNA, 25 bp, Saccharomyces pastorianus
atataataaaacagccacgccccgt

SEQ ID NO: 98052 - DNA, 25 bp, Saccharomyces pastorianus
tagaagcctgcattgtagcctttgg

SEQ ID NO: 98053 - DNA, 25 bp, Saccharomyces pastorianus
agtgcatatttctcgctgatgccca

SEQ ID NO: 98054 - DNA, 25 bp, Saccharomyces pastorianus
ttgcgtttgcttttccagagtttac

SEQ ID NO: 98055 - DNA, 25 bp, Saccharomyces pastorianus
taagatccggttacgggatgcccag

SEQ ID NO: 98056 - DNA, 25 bp, Saccharomyces pastorianus
ggtgcattggctttattatcgtttt

SEQ ID NO: 98057 - DNA, 25 bp, Saccharomyces pastorianus
tgatgcccatcctagtgctagcttt

SEQ ID NO: 98058 - DNA, 25 bp, Saccharomyces pastorianus
gccctccactgatgaattattagaa

SEQ ID NO: 98059 - DNA, 25 bp, Saccharomyces pastorianus
gtacaagcaagccactgtaggtgac

SEQ ID NO: 98060 - DNA, 25 bp, Saccharomyces pastorianus
taaatcccaggaagatgccgaaaag

SEQ ID NO: 98061 - DNA, 25 bp, Saccharomyces pastorianus
attattagaattgtatgctctgtac

SEQ ID NO: 98062 - DNA, 25 bp, Saccharomyces pastorianus
agctaaagccgtcaacgagctacca

SEQ ID NO: 98063 - DNA, 25 bp, Saccharomyces pastorianus
gaagccctccactgatgaattatta

SEQ ID NO: 98064 - DNA, 25 bp, Saccharomyces pastorianus
gaaaaagctaaagccgtcaacgagc

SEQ ID NO: 98065 - DNA, 25 bp, Saccharomyces pastorianus
aacgaagccctccactgatgaatta

SEQ ID NO: 98066 - DNA, 25 bp, Saccharomyces pastorianus
agccactgtaggtgacaacgacaag

SEQ ID NO: 98067 - DNA, 25 bp, Saccharomyces pastorianus
ggtgacaacgacaaggaaaagcctg

SEQ ID NO: 98068 - DNA, 25 bp, Saccharomyces pastorianus
gtatgctctgtacaagcaagccact

SEQ ID NO: 98069 - DNA, 25 bp, Saccharomyces pastorianus
gcaggcagtgcatcttcatcaatta

SEQ ID NO: 98070 - DNA, 25 bp, Saccharomyces pastorianus
gggtcctatgtcatgttccatctga

SEQ ID NO: 98071 - DNA, 25 bp, Saccharomyces pastorianus
gtggtgcttatgacaacttgacgat

SEQ ID NO: 98072 - DNA, 25 bp, Saccharomyces pastorianus
ccgatcgccctattcttagttagta

SEQ ID NO: 98073 - DNA, 25 bp, Saccharomyces pastorianus
gaatggtcgtggactctgactaata

SEQ ID NO: 98074 - DNA, 25 bp, Saccharomyces pastorianus
acaacctttggtgctgttgtcccaa

SEQ ID NO: 98075 - DNA, 25 bp, Saccharomyces pastorianus
gcgttcttccagcataatttcacat

SEQ ID NO: 98076 - DNA, 25 bp, Saccharomyces pastorianus
ggtacccctttcgatttcaatggtg

SEQ ID NO: 98077 - DNA, 25 bp, Saccharomyces pastorianus
aacgcggcgcttggattattcatgt

SEQ ID NO: 98078 - DNA, 25 bp, Saccharomyces pastorianus
atttttgattagtgtcccgatcgcc

SEQ ID NO: 98079 - DNA, 25 bp, Saccharomyces pastorianus
gttccatctgattaagggtacccct

SEQ ID NO: 98080 - DNA, 25 bp, Saccharomyces pastorianus
ttaccttgaattcctcaaccgtttg

SEQ ID NO: 98081 - DNA, 25 bp, Saccharomyces pastorianus
gattttttcacattcaaaacgcgct

SEQ ID NO: 98082 - DNA, 25 bp, Saccharomyces pastorianus
actttttgaacatctttcctccaca

SEQ ID NO: 98083 - DNA, 25 bp, Saccharomyces pastorianus
agcagtatgctcttcaaattcgaac

SEQ ID NO: 98084 - DNA, 25 bp, Saccharomyces pastorianus
ttcctccacattcctgattttttca

SEQ ID NO: 98085 - DNA, 25 bp, Saccharomyces pastorianus
tttaccggcttagtaatactgagct

SEQ ID NO: 98086 - DNA, 25 bp, Saccharomyces pastorianus
aaaacgcgctgtgaagctgttagaa

SEQ ID NO: 98087 - DNA, 25 bp, Saccharomyces pastorianus
gtatgaagcctcagattaccttgaa

SEQ ID NO: 98088 - DNA, 25 bp, Saccharomyces pastorianus
atactgagctacttacttgagggaa

SEQ ID NO: 98089 - DNA, 25 bp, Saccharomyces pastorianus
acagatcgaggcatatttctatata

SEQ ID NO: 98090 - DNA, 25 bp, Saccharomyces pastorianus
gacacccaaagtacttccaatctgt

SEQ ID NO: 98091 - DNA, 25 bp, Saccharomyces pastorianus
gctgaaatggtctccgggaagcctt

SEQ ID NO: 98092 - DNA, 25 bp, Saccharomyces pastorianus
ttgccatgggagaccgtctggtcaa

SEQ ID NO: 98093 - DNA, 25 bp, Saccharomyces pastorianus
caggcagagactatcatcatcaatt

SEQ ID NO: 98094 - DNA, 25 bp, Saccharomyces pastorianus
gggcacccgagataatgctaacttt

SEQ ID NO: 98095 - DNA, 25 bp, Saccharomyces pastorianus
ggcaatgtaccatgacccaagtgat

SEQ ID NO: 98096 - DNA, 25 bp, Saccharomyces pastorianus
aaacttacctatgaggccacccttg

SEQ ID NO: 98097 - DNA, 25 bp, Saccharomyces pastorianus
catgcggatgcattttggctgaaat

SEQ ID NO: 98098 - DNA, 25 bp, Saccharomyces pastorianus
ttgggaactccatctttcgaagact

SEQ ID NO: 98099 - DNA, 25 bp, Saccharomyces pastorianus
taagacacccttacctggcaatgta

SEQ ID NO: 98100 - DNA, 25 bp, Saccharomyces pastorianus
tgatgagccggaatatcctccactt

SEQ ID NO: 98101 - DNA, 25 bp, Saccharomyces pastorianus
tgcaacgcgatggtacagggcaccc

SEQ ID NO: 98102 - DNA, 25 bp, Saccharomyces pastorianus
ctccatacgttcatttgattcccga

SEQ ID NO: 98103 - DNA, 25 bp, Saccharomyces pastorianus
ataactacactgtgcatctgccttt

SEQ ID NO: 98104 - DNA, 25 bp, Saccharomyces pastorianus
aagtccctcttggtatcgcaatgga

SEQ ID NO: 98105 - DNA, 25 bp, Saccharomyces pastorianus
gaaaattcctaatcctcaagtccct

SEQ ID NO: 98106 - DNA, 25 bp, Saccharomyces pastorianus
aaaggatagattcctcctccatacg

SEQ ID NO: 98107 - DNA, 25 bp, Saccharomyces pastorianus
gaaacctctggaactcgaatgcaag

SEQ ID NO: 98108 - DNA, 25 bp, Saccharomyces pastorianus
gattcccgaatatatggcttctccg

SEQ ID NO: 98109 - DNA, 25 bp, Saccharomyces pastorianus
gaatcggcctcctcaaagggtttga

SEQ ID NO: 98110 - DNA, 25 bp, Saccharomyces pastorianus
gcttctccgagatttatagtattcc

SEQ ID NO: 98111 - DNA, 25 bp, Saccharomyces pastorianus
ggacaccatgcgtagtccaaaccaa

SEQ ID NO: 98112 - DNA, 25 bp, Saccharomyces pastorianus
atggttcaggacattgtgctttgta

SEQ ID NO: 98113 - DNA, 25 bp, Saccharomyces pastorianus
ggaagtgacaccacaactacacgaa

SEQ ID NO: 98114 - DNA, 25 bp, Saccharomyces pastorianus
ttatctcagacaatgcaccaagttt

SEQ ID NO: 98115 - DNA, 25 bp, Saccharomyces pastorianus
gacaatgccaccaagggaggattca

SEQ ID NO: 98116 - DNA, 25 bp, Saccharomyces pastorianus
gtttgaatcatatctcaactgcgag

SEQ ID NO: 98117 - DNA, 25 bp, Saccharomyces pastorianus
tcggtgcaaaaacaacgccctctta

SEQ ID NO: 98118 - DNA, 25 bp, Saccharomyces pastorianus
ggcagcaacgcatgttagggcatat

SEQ ID NO: 98119 - DNA, 25 bp, Saccharomyces pastorianus
ataaaagtcacaactcccaatcgca

SEQ ID NO: 98120 - DNA, 25 bp, Saccharomyces pastorianus
aattacgccacgattaccgaagaat

SEQ ID NO: 98121 - DNA, 25 bp, Saccharomyces pastorianus
gtctataagcctttcaagaagccca

SEQ ID NO: 98122 - DNA, 25 bp, Saccharomyces pastorianus
agggcatatccttcaaatttgtcgg

SEQ ID NO: 98123 - DNA, 25 bp, Saccharomyces pastorianus
agcaaacgtactctgaaggtctata

SEQ ID NO: 98124 - DNA, 25 bp, Saccharomyces pastorianus
tatactgcagaaactgatcccggtg

SEQ ID NO: 98125 - DNA, 25 bp, Saccharomyces pastorianus
gacgagcctcatttcagatatgttt

SEQ ID NO: 98126 - DNA, 25 bp, Saccharomyces pastorianus
gatctccccatttgttggaaggatt

SEQ ID NO: 98127 - DNA, 25 bp, Saccharomyces pastorianus
gatcccggtgttctttctgttaaga

SEQ ID NO: 98128 - DNA, 25 bp, Saccharomyces pastorianus
atggacttttacaaggccctttcag

SEQ ID NO: 98129 - DNA, 25 bp, Saccharomyces pastorianus
ggcaaatgtcacattgatctcccca

SEQ ID NO: 98130 - DNA, 25 bp, Saccharomyces pastorianus
gtctcttttatcaacgacgagcctc

SEQ ID NO: 98131 - DNA, 25 bp, Saccharomyces pastorianus
aatggcggcttctttcaggaattta

SEQ ID NO: 98132 - DNA, 25 bp, Saccharomyces pastorianus
gacattactgttttcctttacgcaa

SEQ ID NO: 98133 - DNA, 25 bp, Saccharomyces pastorianus
gcaactgaggtaatggcggcttctt

SEQ ID NO: 98134 - DNA, 25 bp, Saccharomyces pastorianus
tcctttacgcaagcagtagcctgtg

SEQ ID NO: 98135 - DNA, 25 bp, Saccharomyces pastorianus
tatccaggactgaattgcccatttc

SEQ ID NO: 98136 - DNA, 25 bp, Saccharomyces pastorianus
agcacctcaattacggccggatgaa

SEQ ID NO: 98137 - DNA, 25 bp, Saccharomyces pastorianus
agtgtcccatagagcaatgtccctg

SEQ ID NO: 98138 - DNA, 25 bp, Saccharomyces pastorianus
tgccgcgcacttagacgaattcaac

SEQ ID NO: 98139 - DNA, 25 bp, Saccharomyces pastorianus
tgtggccatggtgcataacaacgct

SEQ ID NO: 98140 - DNA, 25 bp, Saccharomyces pastorianus
ttgcccatttcctatctgtcagaaa

SEQ ID NO: 98141 - DNA, 25 bp, Saccharomyces pastorianus
gacattgtgcttcccaacatatagg

SEQ ID NO: 98142 - DNA, 25 bp, Saccharomyces pastorianus
aacgttagttgagtttgccgcgcac

SEQ ID NO: 98143 - DNA, 25 bp, Saccharomyces pastorianus
agtactcagcacaatttccgaaggg

SEQ ID NO: 98144 - DNA, 25 bp, Saccharomyces pastorianus
gttaccactgttctcattgttctga

SEQ ID NO: 98145 - DNA, 25 bp, Saccharomyces pastorianus
acagtgtattctaggctatccccaa

SEQ ID NO: 98146 - DNA, 25 bp, Saccharomyces pastorianus
gccgatttacaaagaagtggtccta

SEQ ID NO: 98147 - DNA, 25 bp, Saccharomyces pastorianus
tgctcagccgtattagtaaatcaag

SEQ ID NO: 98148 - DNA, 25 bp, Saccharomyces pastorianus
gcgcaggcgtatattttaatccatt

SEQ ID NO: 98149 - DNA, 25 bp, Saccharomyces pastorianus
cattctatttagcaggacgactaca

SEQ ID NO: 98150 - DNA, 25 bp, Saccharomyces pastorianus
actttggccaagcattacaccttag

SEQ ID NO: 98151 - DNA, 25 bp, Saccharomyces pastorianus
ttcggttccgagttcgtgtctaaat

SEQ ID NO: 98152 - DNA, 25 bp, Saccharomyces pastorianus
ggagatcactgccttaagttatgca

SEQ ID NO: 98153 - DNA, 25 bp, Saccharomyces pastorianus
aaatttcaacagatcggcgcaggcg

SEQ ID NO: 98154 - DNA, 25 bp, Saccharomyces pastorianus
gatttcaagagtattacaagccgat

SEQ ID NO: 98155 - DNA, 25 bp, Saccharomyces pastorianus
tactcagagacttttgctcagccgt

SEQ ID NO: 98156 - DNA, 25 bp, Saccharomyces pastorianus
aggtgttttcacagctggaatcaca

SEQ ID NO: 98157 - DNA, 25 bp, Saccharomyces pastorianus
aaatgggcaagcttcaattacgaac

SEQ ID NO: 98158 - DNA, 25 bp, Saccharomyces pastorianus
gggtctgtcacatattcatcgtgct

SEQ ID NO: 98159 - DNA, 25 bp, Saccharomyces pastorianus
gcgtgctttccatttaatcggtctg

SEQ ID NO: 98160 - DNA, 25 bp, Saccharomyces pastorianus
aaagtcgtcgccatatttgtactat

SEQ ID NO: 98161 - DNA, 25 bp, Saccharomyces pastorianus
atgctgttcttctctattccagtag

SEQ ID NO: 98162 - DNA, 25 bp, Saccharomyces pastorianus
tttctttcagccctacagtatttaa

SEQ ID NO: 98163 - DNA, 25 bp, Saccharomyces pastorianus
gaccctcttccctgaatattttgag

SEQ ID NO: 98164 - DNA, 25 bp, Saccharomyces pastorianus
gatggtcaatcttttaatgggtctg

SEQ ID NO: 98165 - DNA, 25 bp, Saccharomyces pastorianus
atatcccagatgacccgatggtcaa

SEQ ID NO: 98166 - DNA, 25 bp, Saccharomyces pastorianus
acaacttagggcgtgctttccattt

SEQ ID NO: 98167 - DNA, 25 bp, Saccharomyces pastorianus
tgtattctctatgtcgaggaccctc

SEQ ID NO: 98168 - DNA, 25 bp, Saccharomyces pastorianus
gtgaccatgattcgtccaagtccaa

SEQ ID NO: 98169 - DNA, 25 bp, Saccharomyces pastorianus
ccgccaagctagatctgcctgaagg

SEQ ID NO: 98170 - DNA, 25 bp, Saccharomyces pastorianus
aagaatcgactatgcgggtatcgct

SEQ ID NO: 98171 - DNA, 25 bp, Saccharomyces pastorianus
cagattttgctccacctgtaggata

SEQ ID NO: 98172 - DNA, 25 bp, Saccharomyces pastorianus
gtggaaccggattacaaagcgctga

SEQ ID NO: 98173 - DNA, 25 bp, Saccharomyces pastorianus
aaggccaagggatctcactaaggaa

SEQ ID NO: 98174 - DNA, 25 bp, Saccharomyces pastorianus
ataacgtttgatggcgagcccgcca

SEQ ID NO: 98175 - DNA, 25 bp, Saccharomyces pastorianus
gaaagtgccgctggtagcaaatcca

SEQ ID NO: 98176 - DNA, 25 bp, Saccharomyces pastorianus
tccgaaagcggagcccaagcaagat

SEQ ID NO: 98177 - DNA, 25 bp, Saccharomyces pastorianus
tattctttggtttcccaatggtcct

SEQ ID NO: 98178 - DNA, 25 bp, Saccharomyces pastorianus
gggccaagttttggatccctcggtg

SEQ ID NO: 98179 - DNA, 25 bp, Saccharomyces pastorianus
aagctagccccaaaatgcacacgtg

SEQ ID NO: 98180 - DNA, 25 bp, Saccharomyces pastorianus
tcactgttcaatcacaagctagccc

SEQ ID NO: 98181 - DNA, 25 bp, Saccharomyces pastorianus
ctgcagcctacctatacttagtatc

SEQ ID NO: 98182 - DNA, 25 bp, Saccharomyces pastorianus
gaccaaactaccttttgtgcggact

SEQ ID NO: 98183 - DNA, 25 bp, Saccharomyces pastorianus
gtgatttctattaccaccccaataa

SEQ ID NO: 98184 - DNA, 25 bp, Saccharomyces pastorianus
taggtggtttagctactggtgcctt

SEQ ID NO: 98185 - DNA, 25 bp, Saccharomyces pastorianus
aagtctccccagctattgtaaaagg

SEQ ID NO: 98186 - DNA, 25 bp, Saccharomyces pastorianus
gctactatctagctgcaccaggaga

SEQ ID NO: 98187 - DNA, 25 bp, Saccharomyces pastorianus
tggtgcctttggactcagctactat

SEQ ID NO: 98188 - DNA, 25 bp, Saccharomyces pastorianus
gctgcatgcccattctcaaagatga

SEQ ID NO: 98189 - DNA, 25 bp, Saccharomyces pastorianus
atgtcactcctacatgtcattgcac

SEQ ID NO: 98190 - DNA, 25 bp, Saccharomyces pastorianus
tggcaagatctacccgacatttatg

SEQ ID NO: 98191 - DNA, 25 bp, Saccharomyces pastorianus
agaagacctacacgttagcctgcag

SEQ ID NO: 98192 - DNA, 25 bp, Saccharomyces pastorianus
aatacgtagtaccaaggctctcctg

SEQ ID NO: 98193 - DNA, 25 bp, Saccharomyces pastorianus
acagctgcttctcgtaccaaaataa

SEQ ID NO: 98194 - DNA, 25 bp, Saccharomyces pastorianus
aaggctctcctgtggttacaatgat

SEQ ID NO: 98195 - DNA, 25 bp, Saccharomyces pastorianus
ttacagggcgccagaaactttctct

SEQ ID NO: 98196 - DNA, 25 bp, Saccharomyces pastorianus
ggcgattgcctttttagagtctcca

SEQ ID NO: 98197 - DNA, 25 bp, Saccharomyces pastorianus
tggccgcgttagtaactcttgtttt

SEQ ID NO: 98198 - DNA, 25 bp, Saccharomyces pastorianus
atcggtcatcggctccattgtataa

SEQ ID NO: 98199 - DNA, 25 bp, Saccharomyces pastorianus
aacgacttccagattggtaccgata

SEQ ID NO: 98200 - DNA, 25 bp, Saccharomyces pastorianus
tgggtgccaccatattttatctgat

SEQ ID NO: 98201 - DNA, 25 bp, Saccharomyces pastorianus
tggtgcaggcggttcattttcaatg

SEQ ID NO: 98202 - DNA, 25 bp, Saccharomyces pastorianus
accaaagtgttatctctgagtacct

SEQ ID NO: 98203 - DNA, 25 bp, Saccharomyces pastorianus
gggcgatgaatgtcgcttgcatata

SEQ ID NO: 98204 - DNA, 25 bp, Saccharomyces pastorianus
aaaagagattatcccggctgattaa

SEQ ID NO: 98205 - DNA, 25 bp, Saccharomyces pastorianus
gtaaagattctaacatcgacatcgc

SEQ ID NO: 98206 - DNA, 25 bp, Saccharomyces pastorianus
gcaaagctgcataccggaagaccat

SEQ ID NO: 98207 - DNA, 25 bp, Saccharomyces pastorianus
gatgttgaactgatccattacgaga

SEQ ID NO: 98208 - DNA, 25 bp, Saccharomyces pastorianus
tttacatcctacagccaataatttg

SEQ ID NO: 98209 - DNA, 25 bp, Saccharomyces pastorianus
gagtaccttgaaaatgcagctgaaa

SEQ ID NO: 98210 - DNA, 25 bp, Saccharomyces pastorianus
atgaggtcggtaccagtcatagact

SEQ ID NO: 98211 - DNA, 25 bp, Saccharomyces pastorianus
acatggcttctttgaatgcaatgcg

SEQ ID NO: 98212 - DNA, 25 bp, Saccharomyces pastorianus
gtgccaacaaggacgccaacatcaa

SEQ ID NO: 98213 - DNA, 25 bp, Saccharomyces pastorianus
gtgaaacgtcacctgattctactcc

SEQ ID NO: 98214 - DNA, 25 bp, Saccharomyces pastorianus
caaagaagaccatcccagggctagt

SEQ ID NO: 98215 - DNA, 25 bp, Saccharomyces pastorianus
tgattcgaccacatcttcacttgat

SEQ ID NO: 98216 - DNA, 25 bp, Saccharomyces pastorianus
tagttccgggcatgagtgccaacaa

SEQ ID NO: 98217 - DNA, 25 bp, Saccharomyces pastorianus
agctggaggcgcttataaaccacct

SEQ ID NO: 98218 - DNA, 25 bp, Saccharomyces pastorianus
gagttcctcctggtgcagcaaagaa

SEQ ID NO: 98219 - DNA, 25 bp, Saccharomyces pastorianus
tggacgtattgtccccggagttcct

SEQ ID NO: 98220 - DNA, 25 bp, Saccharomyces pastorianus
ataaaccacctcacgcaagaagaac

SEQ ID NO: 98221 - DNA, 25 bp, Saccharomyces pastorianus
gaaagacaggccgtcggtgacaaat

SEQ ID NO: 98222 - DNA, 25 bp, Saccharomyces pastorianus
aataactgggaaccgctacctgatt

SEQ ID NO: 98223 - DNA, 25 bp, Saccharomyces pastorianus
tgtgttgcccttttctaatttcttt

SEQ ID NO: 98224 - DNA, 25 bp, Saccharomyces pastorianus
aatggcgagtcggtgtattcaagca

SEQ ID NO: 98225 - DNA, 25 bp, Saccharomyces pastorianus
tttgtacagtaaccatcttagcccc

SEQ ID NO: 98226 - DNA, 25 bp, Saccharomyces pastorianus
ctggatccactgtgtaattgcttgg

SEQ ID NO: 98227 - DNA, 25 bp, Saccharomyces pastorianus
tacctgattattgctccttacgttc

SEQ ID NO: 98228 - DNA, 25 bp, Saccharomyces pastorianus
actaggacgtgaaggtgtgttgccc

SEQ ID NO: 98229 - DNA, 25 bp, Saccharomyces pastorianus
gttgtttgggcccaattattgccaa

SEQ ID NO: 98230 - DNA, 25 bp, Saccharomyces pastorianus
cacctccaggtgatgcatatttgct

SEQ ID NO: 98231 - DNA, 25 bp, Saccharomyces pastorianus
taatttctttgcctcttctaagcca

SEQ ID NO: 98232 - DNA, 25 bp, Saccharomyces pastorianus
tacgttccaccttcaaatggcgagt

SEQ ID NO: 98233 - DNA, 25 bp, Saccharomyces pastorianus
acactattggcgatgtcgatacaca

SEQ ID NO: 98234 - DNA, 25 bp, Saccharomyces pastorianus
tcctccgccgagcttgaatttagat

SEQ ID NO: 98235 - DNA, 25 bp, Saccharomyces pastorianus
aatatttttaatcctccgccgagct

SEQ ID NO: 98236 - DNA, 25 bp, Saccharomyces pastorianus
gaaccatccaatcgacagaacgttt

SEQ ID NO: 98237 - DNA, 25 bp, Saccharomyces pastorianus
ccgggtgcatttgtggttcctgtac

SEQ ID NO: 98238 - DNA, 25 bp, Saccharomyces pastorianus
gaaattgaagatatcccgaccacgt

SEQ ID NO: 98239 - DNA, 25 bp, Saccharomyces pastorianus
gcccatcctcgaataactcttctaa

SEQ ID NO: 98240 - DNA, 25 bp, Saccharomyces pastorianus
ggaaccaccaaatgacttcagcgaa

SEQ ID NO: 98241 - DNA, 25 bp, Saccharomyces pastorianus
gatttaaatctaagcccatcctcga

SEQ ID NO: 98242 - DNA, 25 bp, Saccharomyces pastorianus
atattgttattgaagccccgggtgc

SEQ ID NO: 98243 - DNA, 25 bp, Saccharomyces pastorianus
ccgaccacgtctgcttttggcttaa

SEQ ID NO: 98244 - DNA, 25 bp, Saccharomyces pastorianus
aacgctcaaaatctcggtaatactg

SEQ ID NO: 98245 - DNA, 25 bp, Saccharomyces pastorianus
ggatgataaatttctcttcgtgcga

SEQ ID NO: 98246 - DNA, 25 bp, Saccharomyces pastorianus
ggtgcttcatcgaagatgttccgtt

SEQ ID NO: 98247 - DNA, 25 bp, Saccharomyces pastorianus
gaagccatgacgattctatgaaaat

SEQ ID NO: 98248 - DNA, 25 bp, Saccharomyces pastorianus
tcggctgtaatttggtgtctctgac

SEQ ID NO: 98249 - DNA, 25 bp, Saccharomyces pastorianus
ttaacagtcgattccagaagccatg

SEQ ID NO: 98250 - DNA, 25 bp, Saccharomyces pastorianus
ataataacgctttcattggctcata

SEQ ID NO: 98251 - DNA, 25 bp, Saccharomyces pastorianus
tggctcatatttacgtgcaaacaaa

SEQ ID NO: 98252 - DNA, 25 bp, Saccharomyces pastorianus
actggaactttatcatcggtggatt

SEQ ID NO: 98253 - DNA, 25 bp, Saccharomyces pastorianus
actagtgcctgattatccaactgaa

SEQ ID NO: 98254 - DNA, 25 bp, Saccharomyces pastorianus
atattgcgaatcatgtcttttacag

SEQ ID NO: 98255 - DNA, 25 bp, Saccharomyces pastorianus
caactagatcgatgcggtgcttcat

SEQ ID NO: 98256 - DNA, 25 bp, Saccharomyces pastorianus
acgacgacaactcccatttttgtat

SEQ ID NO: 98257 - DNA, 25 bp, Saccharomyces pastorianus
taattcacaatcaagcagtgcctgc

SEQ ID NO: 98258 - DNA, 25 bp, Saccharomyces pastorianus
gccacacagctatttcataaccatg

SEQ ID NO: 98259 - DNA, 25 bp, Saccharomyces pastorianus
gggcaaaaaccgactgacagctgag

SEQ ID NO: 98260 - DNA, 25 bp, Saccharomyces pastorianus
gtacgagacatgcaagtggccacac

SEQ ID NO: 98261 - DNA, 25 bp, Saccharomyces pastorianus
gaattcatcgccctatacaaaagag

SEQ ID NO: 98262 - DNA, 25 bp, Saccharomyces pastorianus
tgatatcaacggatcgctcaccatt

SEQ ID NO: 98263 - DNA, 25 bp, Saccharomyces pastorianus
agaaagttgcacctgcttcgttcga

SEQ ID NO: 98264 - DNA, 25 bp, Saccharomyces pastorianus
gaggaactacagaacttactacaaa

SEQ ID NO: 98265 - DNA, 25 bp, Saccharomyces pastorianus
cagtgcctgcacaactcttgaagaa

SEQ ID NO: 98266 - DNA, 25 bp, Saccharomyces pastorianus
ttcgttgaggcgttagtttggctaa

SEQ ID NO: 98267 - DNA, 25 bp, Saccharomyces pastorianus
acttcattggtaactacgcttcctc

SEQ ID NO: 98268 - DNA, 25 bp, Saccharomyces pastorianus
ggtctttctgctgaatatgctcatc

SEQ ID NO: 98269 - DNA, 25 bp, Saccharomyces pastorianus
gatcaccctaagattattccaagct

SEQ ID NO: 98270 - DNA, 25 bp, Saccharomyces pastorianus
attctttacgtcatgtacactggta

SEQ ID NO: 98271 - DNA, 25 bp, Saccharomyces pastorianus
atttcttggtcgaggccatccctat

SEQ ID NO: 98272 - DNA, 25 bp, Saccharomyces pastorianus
cgaagttccattcccatctttgaaa

SEQ ID NO: 98273 - DNA, 25 bp, Saccharomyces pastorianus
ttctggttatgacttcccatggtct

SEQ ID NO: 98274 - DNA, 25 bp, Saccharomyces pastorianus
atgctcatcctgctgaaactttgtc

SEQ ID NO: 98275 - DNA, 25 bp, Saccharomyces pastorianus
aatctggtccagaagctaaggcctc

SEQ ID NO: 98276 - DNA, 25 bp, Saccharomyces pastorianus
agatacgctgctccattcggtcttt

SEQ ID NO: 98277 - DNA, 25 bp, Saccharomyces pastorianus
tgggctggcgctgaacaccacgatt

SEQ ID NO: 98278 - DNA, 25 bp, Saccharomyces pastorianus
aggtatgtggacaactacggtaacg

SEQ ID NO: 98279 - DNA, 25 bp, Saccharomyces pastorianus
gtatcacgaaggtgtgcgctcgcaa

SEQ ID NO: 98280 - DNA, 25 bp, Saccharomyces pastorianus
tagcgaggaatctgttttcttgaat

SEQ ID NO: 98281 - DNA, 25 bp, Saccharomyces pastorianus
gtgcgctcgcaattttctaagttct

SEQ ID NO: 98282 - DNA, 25 bp, Saccharomyces pastorianus
tagagtgcttgccatgatgccacat

SEQ ID NO: 98283 - DNA, 25 bp, Saccharomyces pastorianus
ggaggccaattcctggtatccagag

SEQ ID NO: 98284 - DNA, 25 bp, Saccharomyces pastorianus
gggttgggctaaatccgtattgtat

SEQ ID NO: 98285 - DNA, 25 bp, Saccharomyces pastorianus
accccaatgggtcgaccaatggtat

SEQ ID NO: 98286 - DNA, 25 bp, Saccharomyces pastorianus
tttcttgaatggcatggcaggatcc

SEQ ID NO: 98287 - DNA, 25 bp, Saccharomyces pastorianus
aggatccaaattgccaattgctgtc

SEQ ID NO: 98288 - DNA, 25 bp, Saccharomyces pastorianus
gatgccacatcctgaaagagtttgc

SEQ ID NO: 98289 - DNA, 25 bp, Saccharomyces pastorianus
aatggccgactgatgtttagctcaa

SEQ ID NO: 98290 - DNA, 25 bp, Saccharomyces pastorianus
actgggtttcagttcctttgatcta

SEQ ID NO: 98291 - DNA, 25 bp, Saccharomyces pastorianus
ccttctttcgctctattggatatca

SEQ ID NO: 98292 - DNA, 25 bp, Saccharomyces pastorianus
aaattcctctttgggtcacagtctc

SEQ ID NO: 98293 - DNA, 25 bp, Saccharomyces pastorianus
gatctaagctcaccgctagtagcaa

SEQ ID NO: 98294 - DNA, 25 bp, Saccharomyces pastorianus
actgccaatggtgcaaattcctctt

SEQ ID NO: 98295 - DNA, 25 bp, Saccharomyces pastorianus
aattagctccaacggttctttcatg

SEQ ID NO: 98296 - DNA, 25 bp, Saccharomyces pastorianus
actcggttgtgtcgttatgctagca

SEQ ID NO: 98297 - DNA, 25 bp, Saccharomyces pastorianus
gtcacagtctccatgggcatcagga

SEQ ID NO: 98298 - DNA, 25 bp, Saccharomyces pastorianus
cagctattctccctggtgcaaaata

SEQ ID NO: 98299 - DNA, 25 bp, Saccharomyces pastorianus
gaaatgccgccagaattagctccaa

SEQ ID NO: 98300 - DNA, 25 bp, Saccharomyces pastorianus
aaagagcctgtatgctgtgtggcat

SEQ ID NO: 98301 - DNA, 25 bp, Saccharomyces pastorianus
ttcgagggcctcgtaggaatgtgta

SEQ ID NO: 98302 - DNA, 25 bp, Saccharomyces pastorianus
atagtgcagaccacaaatgcgttta

SEQ ID NO: 98303 - DNA, 25 bp, Saccharomyces pastorianus
agactaccagctgaggttgtggagc

SEQ ID NO: 98304 - DNA, 25 bp, Saccharomyces pastorianus
agctggtatgtacgccatcaaggtc

SEQ ID NO: 98305 - DNA, 25 bp, Saccharomyces pastorianus
aatggaatgtacgtcgccttctttc

SEQ ID NO: 98306 - DNA, 25 bp, Saccharomyces pastorianus
gatggttgtcccaactgtcagggta

SEQ ID NO: 98307 - DNA, 25 bp, Saccharomyces pastorianus
catcaaggtcgatggtagactacca

SEQ ID NO: 98308 - DNA, 25 bp, Saccharomyces pastorianus
gtgtaagcctactaagtcgtgggta

SEQ ID NO: 98309 - DNA, 25 bp, Saccharomyces pastorianus
gaggcaggtgtttctacaatggaat

SEQ ID NO: 98310 - DNA, 25 bp, Saccharomyces pastorianus
agtggctgagcgtagatcatagtat

SEQ ID NO: 98311 - DNA, 25 bp, Saccharomyces pastorianus
gaaggcgacgtacattccattgtag

SEQ ID NO: 98312 - DNA, 25 bp, Saccharomyces pastorianus
tcactttttcactcgatttcactca

SEQ ID NO: 98313 - DNA, 25 bp, Saccharomyces pastorianus
ttgtagaaacacctgcctcttcaaa

SEQ ID NO: 98314 - DNA, 25 bp, Saccharomyces pastorianus
tcgagccctttcttaaatttcactt

SEQ ID NO: 98315 - DNA, 25 bp, Saccharomyces pastorianus
taggcttacacattcctacgaggcc

SEQ ID NO: 98316 - DNA, 25 bp, Saccharomyces pastorianus
tattacacagtacatccttcgagcc

SEQ ID NO: 98317 - DNA, 25 bp, Saccharomyces pastorianus
ttgctacccacgacttagtaggctt

SEQ ID NO: 98318 - DNA, 25 bp, Saccharomyces pastorianus
ctcgttcgcttttgccaaactgaat

SEQ ID NO: 98319 - DNA, 25 bp, Saccharomyces pastorianus
gggacaaccatctctattaaacgca

SEQ ID NO: 98320 - DNA, 25 bp, Saccharomyces pastorianus
aaacgcatttgtggtctgcactatg

SEQ ID NO: 98321 - DNA, 25 bp, Saccharomyces pastorianus
gcatacaggctctttcactagacat

SEQ ID NO: 98322 - DNA, 25 bp, Saccharomyces pastorianus
cgcatcgccttgtctatggtcgttt

SEQ ID NO: 98323 - DNA, 25 bp, Saccharomyces pastorianus
ataccgtttcttgtgccttacttat

SEQ ID NO: 98324 - DNA, 25 bp, Saccharomyces pastorianus
ggatattcatggtttttgctgctat

SEQ ID NO: 98325 - DNA, 25 bp, Saccharomyces pastorianus
acaaagtactccattgcccaagtga

SEQ ID NO: 98326 - DNA, 25 bp, Saccharomyces pastorianus
acgtatttcagtgtggccgcatcgc

SEQ ID NO: 98327 - DNA, 25 bp, Saccharomyces pastorianus
atttattccttctctcaatccactt

SEQ ID NO: 98328 - DNA, 25 bp, Saccharomyces pastorianus
aagactggttacaccgtgagcttaa

SEQ ID NO: 98329 - DNA, 25 bp, Saccharomyces pastorianus
acctgagtgttatacccgcatgttt

SEQ ID NO: 98330 - DNA, 25 bp, Saccharomyces pastorianus
tttttgtgcctttggtgccgattta

SEQ ID NO: 98331 - DNA, 25 bp, Saccharomyces pastorianus
tggattcctaccttggcgtggccta

SEQ ID NO: 98332 - DNA, 25 bp, Saccharomyces pastorianus
taaatggtacgctttcttcaccacg

SEQ ID NO: 98333 - DNA, 25 bp, Saccharomyces pastorianus
aatcatcatctggaaggcgcgtcat

SEQ ID NO: 98334 - DNA, 25 bp, Saccharomyces pastorianus
tcatcccgcttgtgaattgtttcaa

SEQ ID NO: 98335 - DNA, 25 bp, Saccharomyces pastorianus
attgataccgtaaacttgccacttt

SEQ ID NO: 98336 - DNA, 25 bp, Saccharomyces pastorianus
caaggattcgcgttctttggacccg

SEQ ID NO: 98337 - DNA, 25 bp, Saccharomyces pastorianus
aggcgcgtcatttgagggattttac

SEQ ID NO: 98338 - DNA, 25 bp, Saccharomyces pastorianus
attcccgttatgttcactgcattgg

SEQ ID NO: 98339 - DNA, 25 bp, Saccharomyces pastorianus
attggcccgctgaggagacgctcga

SEQ ID NO: 98340 - DNA, 25 bp, Saccharomyces pastorianus
gatttggcggttcgcaatcgtcaaa

SEQ ID NO: 98341 - DNA, 25 bp, Saccharomyces pastorianus
tcgacccttatatggctcagagaga

SEQ ID NO: 98342 - DNA, 25 bp, Saccharomyces pastorianus
gcatgtcacaggtactttcactatt

SEQ ID NO: 98343 - DNA, 25 bp, Saccharomyces pastorianus
gtggaaggctactactatcatcccg

SEQ ID NO: 98344 - DNA, 25 bp, Saccharomyces pastorianus
gcagggtctgactccaggcgttgaa

SEQ ID NO: 98345 - DNA, 25 bp, Saccharomyces pastorianus
gttattatttatttcgccgcatctg

SEQ ID NO: 98346 - DNA, 25 bp, Saccharomyces pastorianus
ggcgttgaactgaactccactacaa

SEQ ID NO: 98347 - DNA, 25 bp, Saccharomyces pastorianus
actgacagtgccgtcatacgagcag

SEQ ID NO: 98348 - DNA, 25 bp, Saccharomyces pastorianus
caggcatcggcatcgtcttacgtga

SEQ ID NO: 98349 - DNA, 25 bp, Saccharomyces pastorianus
gagagcaccaacgatcatctcatgc

SEQ ID NO: 98350 - DNA, 25 bp, Saccharomyces pastorianus
aattactcatctagcggacttcggc

SEQ ID NO: 98351 - DNA, 25 bp, Saccharomyces pastorianus
tgacgtcgattgtccctttacaatt

SEQ ID NO: 98352 - DNA, 25 bp, Saccharomyces pastorianus
aaaggccgtctagtgttgtttgata

SEQ ID NO: 98353 - DNA, 25 bp, Saccharomyces pastorianus
aaccgccaccgaattatcacgagag

SEQ ID NO: 98354 - DNA, 25 bp, Saccharomyces pastorianus
ggacagcagcgcacaaatttatgat

SEQ ID NO: 98355 - DNA, 25 bp, Saccharomyces pastorianus
agtccctcgattgtttcgcacactt

SEQ ID NO: 98356 - DNA, 25 bp, Saccharomyces pastorianus
taccactttgtagtccctcgattgt

SEQ ID NO: 98357 - DNA, 25 bp, Saccharomyces pastorianus
tgtagtccctcgattgtttcgcaca

SEQ ID NO: 98358 - DNA, 25 bp, Saccharomyces pastorianus
cctcgattgtttcgcacacttctgg

SEQ ID NO: 98359 - DNA, 25 bp, Saccharomyces pastorianus
actttgtagtccctcgattgtttcg

SEQ ID NO: 98360 - DNA, 25 bp, Saccharomyces pastorianus
atgctaccactttgtagtccctcga

SEQ ID NO: 98361 - DNA, 25 bp, Saccharomyces pastorianus
ccactttgtagtccctcgattgttt

SEQ ID NO: 98362 - DNA, 25 bp, Saccharomyces pastorianus
tttgtagtccctcgattgtttcgca

SEQ ID NO: 98363 - DNA, 25 bp, Saccharomyces pastorianus
agtatgctaccactttgtagtccct

SEQ ID NO: 98364 - DNA, 25 bp, Saccharomyces pastorianus
aggaatacagtatgctaccactttg

SEQ ID NO: 98365 - DNA, 25 bp, Saccharomyces pastorianus
gaatacagtatgctaccactttgta

SEQ ID NO: 98366 - DNA, 25 bp, Saccharomyces pastorianus
tgaacctctgtccttttcttttttg

SEQ ID NO: 98367 - DNA, 25 bp, Saccharomyces pastorianus
gtgttcctacccttatattgtggca

SEQ ID NO: 98368 - DNA, 25 bp, Saccharomyces pastorianus
aacttttgcatgttttccagaactc

SEQ ID NO: 98369 - DNA, 25 bp, Saccharomyces pastorianus
gaacttgtccgctgtgtacttggaa

SEQ ID NO: 98370 - DNA, 25 bp, Saccharomyces pastorianus
aaccagaacagttcgcgtgttccta

SEQ ID NO: 98371 - DNA, 25 bp, Saccharomyces pastorianus
agaactctgcttttttctcaataag

SEQ ID NO: 98372 - DNA, 25 bp, Saccharomyces pastorianus
aaacctaaaggcaggcttggtagat

SEQ ID NO: 98373 - DNA, 25 bp, Saccharomyces pastorianus
gagggagcttttaaatctacatgat

SEQ ID NO: 98374 - DNA, 25 bp, Saccharomyces pastorianus
ttagcgttgattctgaacctctgtc

SEQ ID NO: 98375 - DNA, 25 bp, Saccharomyces pastorianus
caaagtagtttccatgtttccgata

SEQ ID NO: 98376 - DNA, 25 bp, Saccharomyces pastorianus
atcattttttgcacaccgtacaatt

SEQ ID NO: 98377 - DNA, 25 bp, Saccharomyces pastorianus
tgcaaacttgctatgttgtcacttg

SEQ ID NO: 98378 - DNA, 25 bp, Saccharomyces pastorianus
gatactgactgcagtgtgccccaaa

SEQ ID NO: 98379 - DNA, 25 bp, Saccharomyces pastorianus
agttctatggtaacctgctcattgc

SEQ ID NO: 98380 - DNA, 25 bp, Saccharomyces pastorianus
aacttcataatctttttctcgacga

SEQ ID NO: 98381 - DNA, 25 bp, Saccharomyces pastorianus
tagggtcaacttcacgtcagttaag

SEQ ID NO: 98382 - DNA, 25 bp, Saccharomyces pastorianus
gtcacttgcagtaggttgctgtcct

SEQ ID NO: 98383 - DNA, 25 bp, Saccharomyces pastorianus
tgctcattgcgcagcttttttaaaa

SEQ ID NO: 98384 - DNA, 25 bp, Saccharomyces pastorianus
gatacttggagtcatctttcttcat

SEQ ID NO: 98385 - DNA, 25 bp, Saccharomyces pastorianus
gtcaagtacagactagccatcgcaa

SEQ ID NO: 98386 - DNA, 25 bp, Saccharomyces pastorianus
gccatcgcaataccattactgttca

SEQ ID NO: 98387 - DNA, 25 bp, Saccharomyces pastorianus
gttgctgtcctccagtcaagtacag

SEQ ID NO: 98388 - DNA, 25 bp, Saccharomyces pastorianus
ttggccacacaggaccatatctggg

SEQ ID NO: 98389 - DNA, 25 bp, Saccharomyces pastorianus
ggtttatgcgcggttacagtattat

SEQ ID NO: 98390 - DNA, 25 bp, Saccharomyces pastorianus
acacatgatggttctcggtggcatt

SEQ ID NO: 98391 - DNA, 25 bp, Saccharomyces pastorianus
agaacggttttgactcgaaatatat

SEQ ID NO: 98392 - DNA, 25 bp, Saccharomyces pastorianus
tagtcgattggttggccacacagga

SEQ ID NO: 98393 - DNA, 25 bp, Saccharomyces pastorianus
aatcagaccgaatttccagcagttg

SEQ ID NO: 98394 - DNA, 25 bp, Saccharomyces pastorianus
atgattggcgcatttggtaccataa

SEQ ID NO: 98395 - DNA, 25 bp, Saccharomyces pastorianus
gcaacgaatctttgagaggcaatac

SEQ ID NO: 98396 - DNA, 25 bp, Saccharomyces pastorianus
gctttgctcactcctataacgaaga

SEQ ID NO: 98397 - DNA, 25 bp, Saccharomyces pastorianus
attgctttgcttctggtttatgcgc

SEQ ID NO: 98398 - DNA, 25 bp, Saccharomyces pastorianus
tacaagtagactgctttgctcactc

SEQ ID NO: 98399 - DNA, 25 bp, Saccharomyces pastorianus
agttggcactgcgttatggagtaga

SEQ ID NO: 98400 - DNA, 25 bp, Saccharomyces pastorianus
cttgcccaagggtcataagcatgaa

SEQ ID NO: 98401 - DNA, 25 bp, Saccharomyces pastorianus
taaagccattaatgccaaccctttc

SEQ ID NO: 98402 - DNA, 25 bp, Saccharomyces pastorianus
atgaaaggtgttctcttgcccaagg

SEQ ID NO: 98403 - DNA, 25 bp, Saccharomyces pastorianus
ggtagatgagttgattgcttccaag

SEQ ID NO: 98404 - DNA, 25 bp, Saccharomyces pastorianus
aaacatccggtcacacaacgatttc

SEQ ID NO: 98405 - DNA, 25 bp, Saccharomyces pastorianus
tagaagagtttttaccaccgatcga

SEQ ID NO: 98406 - DNA, 25 bp, Saccharomyces pastorianus
gtgtctacatctactaaagccatta

SEQ ID NO: 98407 - DNA, 25 bp, Saccharomyces pastorianus
cagtattttgatagtttgcctttga

SEQ ID NO: 98408 - DNA, 25 bp, Saccharomyces pastorianus
gaagggttcgaagtatgccaagaga

SEQ ID NO: 98409 - DNA, 25 bp, Saccharomyces pastorianus
agtattctccagtgtctacatctac

SEQ ID NO: 98410 - DNA, 25 bp, Saccharomyces pastorianus
gcaatcattctttttcggcgacaat

SEQ ID NO: 98411 - DNA, 25 bp, Saccharomyces pastorianus
gcgagagcagtatctttctaccaca

SEQ ID NO: 98412 - DNA, 25 bp, Saccharomyces pastorianus
cgctcatcctctgcaatttctaaaa

SEQ ID NO: 98413 - DNA, 25 bp, Saccharomyces pastorianus
cagtgctgaagccatggaaccctcc

SEQ ID NO: 98414 - DNA, 25 bp, Saccharomyces pastorianus
gtgcggacaatgaactacccatgga

SEQ ID NO: 98415 - DNA, 25 bp, Saccharomyces pastorianus
gtgacgcaaataatacggacttctg

SEQ ID NO: 98416 - DNA, 25 bp, Saccharomyces pastorianus
atcttcctcccttcttgataatttg

SEQ ID NO: 98417 - DNA, 25 bp, Saccharomyces pastorianus
taatttccacgatagcagcgagagc

SEQ ID NO: 98418 - DNA, 25 bp, Saccharomyces pastorianus
aggccatttgcctgcaggagacaag

SEQ ID NO: 98419 - DNA, 25 bp, Saccharomyces pastorianus
gtttttgaagaattccctgcgctca

SEQ ID NO: 98420 - DNA, 25 bp, Saccharomyces pastorianus
aaagaaaatgctccctcgtggctct

SEQ ID NO: 98421 - DNA, 25 bp, Saccharomyces pastorianus
atgtccctccgtagatgaactgtac

SEQ ID NO: 98422 - DNA, 25 bp, Saccharomyces pastorianus
aacacatccgtcaagttggtttctc

SEQ ID NO: 98423 - DNA, 25 bp, Saccharomyces pastorianus
tcgtgcaatctgatacatgtccctc

SEQ ID NO: 98424 - DNA, 25 bp, Saccharomyces pastorianus
aaaattttgatagtgcccgtcctgc

SEQ ID NO: 98425 - DNA, 25 bp, Saccharomyces pastorianus
gaagacagcctcgatcatggatcca

SEQ ID NO: 98426 - DNA, 25 bp, Saccharomyces pastorianus
cttcgcctttatcgttaactttcag

SEQ ID NO: 98427 - DNA, 25 bp, Saccharomyces pastorianus
tgcccgggccaagttacacgatttt

SEQ ID NO: 98428 - DNA, 25 bp, Saccharomyces pastorianus
agtttctttatctactcttgtccct

SEQ ID NO: 98429 - DNA, 25 bp, Saccharomyces pastorianus
tgaactgtacattgacttgcccggg

SEQ ID NO: 98430 - DNA, 25 bp, Saccharomyces pastorianus
ttggtttctcaggacagtgcttcgc

SEQ ID NO: 98431 - DNA, 25 bp, Saccharomyces pastorianus
ttgtccctctggcagcaaagtcaaa

SEQ ID NO: 98432 - DNA, 25 bp, Saccharomyces pastorianus
ggcattggctgctaacgaaactgca

SEQ ID NO: 98433 - DNA, 25 bp, Saccharomyces pastorianus
gatgatgacatcgacatgaattcta

SEQ ID NO: 98434 - DNA, 25 bp, Saccharomyces pastorianus
ggctgctaacgaaactgcaagattc

SEQ ID NO: 98435 - DNA, 25 bp, Saccharomyces pastorianus
gaatcagccaaatatcaggaaccaa

SEQ ID NO: 98436 - DNA, 25 bp, Saccharomyces pastorianus
gatctgctcacttctttggagcaag

SEQ ID NO: 98437 - DNA, 25 bp, Saccharomyces pastorianus
tagaacctggttctgttaggataaa

SEQ ID NO: 98438 - DNA, 25 bp, Saccharomyces pastorianus
tctaaaataaggtttgtggacacaa

SEQ ID NO: 98439 - DNA, 25 bp, Saccharomyces pastorianus
gaatgcaagatctgctcacttcttt

SEQ ID NO: 98440 - DNA, 25 bp, Saccharomyces pastorianus
gcaagattcaatcaggtcctaacca

SEQ ID NO: 98441 - DNA, 25 bp, Saccharomyces pastorianus
caggtcctaaccaatcaagatttcc

SEQ ID NO: 98442 - DNA, 25 bp, Saccharomyces pastorianus
aaagggtgcaaaggcattggctgct

SEQ ID NO: 98443 - DNA, 25 bp, Saccharomyces pastorianus
tctatcctatctaatgggttcctat

SEQ ID NO: 98444 - DNA, 25 bp, Saccharomyces pastorianus
atggttggcaagagttaccttcgtt

SEQ ID NO: 98445 - DNA, 25 bp, Saccharomyces pastorianus
agtgatcactgaattcggcgctttg

SEQ ID NO: 98446 - DNA, 25 bp, Saccharomyces pastorianus
aggagcccattctatcctatctaat

SEQ ID NO: 98447 - DNA, 25 bp, Saccharomyces pastorianus
gacagcaatgttggctatgagcgct

SEQ ID NO: 98448 - DNA, 25 bp, Saccharomyces pastorianus
actggcagatccaaatgacctggtt

SEQ ID NO: 98449 - DNA, 25 bp, Saccharomyces pastorianus
atacctgtattagtctgctgcgaaa

SEQ ID NO: 98450 - DNA, 25 bp, Saccharomyces pastorianus
ggactatgtgtttttaggagcccat

SEQ ID NO: 98451 - DNA, 25 bp, Saccharomyces pastorianus
tgggttcctatattcaagagctggg

SEQ ID NO: 98452 - DNA, 25 bp, Saccharomyces pastorianus
aaatccagtcgagagacgcggtaat

SEQ ID NO: 98453 - DNA, 25 bp, Saccharomyces pastorianus
atcttatacgatttaacaccaccag

SEQ ID NO: 98454 - DNA, 25 bp, Saccharomyces pastorianus
caattcatcaagtggcgcggaacta

SEQ ID NO: 98455 - DNA, 25 bp, Saccharomyces pastorianus
gatgttgactgcgtcatttttcaaa

SEQ ID NO: 98456 - DNA, 25 bp, Saccharomyces pastorianus
tcaaagcgcaaaatccatccgtatt

SEQ ID NO: 98457 - DNA, 25 bp, Saccharomyces pastorianus
gcgctatttggacatacatctcacc

SEQ ID NO: 98458 - DNA, 25 bp, Saccharomyces pastorianus
gacgggcttgcaacctgtagatatt

SEQ ID NO: 98459 - DNA, 25 bp, Saccharomyces pastorianus
agtgaatccagcgatccatacgaca

SEQ ID NO: 98460 - DNA, 25 bp, Saccharomyces pastorianus
tatgcgcacatggtaggactcttat

SEQ ID NO: 98461 - DNA, 25 bp, Saccharomyces pastorianus
agattggatttaccccagagctgac

SEQ ID NO: 98462 - DNA, 25 bp, Saccharomyces pastorianus
agtttaccagatatccccaattcat

SEQ ID NO: 98463 - DNA, 25 bp, Saccharomyces pastorianus
ttgggactgttggaaacaccacctc

SEQ ID NO: 98464 - DNA, 25 bp, Saccharomyces pastorianus
ggacatcgatcaacacaatgctcaa

SEQ ID NO: 98465 - DNA, 25 bp, Saccharomyces pastorianus
attggtgcgtgctgaggctgaatct

SEQ ID NO: 98466 - DNA, 25 bp, Saccharomyces pastorianus
aaaccaggcctgcttacgatgggta

SEQ ID NO: 98467 - DNA, 25 bp, Saccharomyces pastorianus
taaggctctcttggaactattggac

SEQ ID NO: 98468 - DNA, 25 bp, Saccharomyces pastorianus
gctgctttcaactaccaatttgact

SEQ ID NO: 98469 - DNA, 25 bp, Saccharomyces pastorianus
gaaagcgcactgaatgaatggacac

SEQ ID NO: 98470 - DNA, 25 bp, Saccharomyces pastorianus
acgatgggtatgaagcctctaaaca

SEQ ID NO: 98471 - DNA, 25 bp, Saccharomyces pastorianus
aatcgctggttatggtaaggctctc

SEQ ID NO: 98472 - DNA, 25 bp, Saccharomyces pastorianus
tctgcccaagtcaagcctactttaa

SEQ ID NO: 98473 - DNA, 25 bp, Saccharomyces pastorianus
tttgactccatcatcgaacattcag

SEQ ID NO: 98474 - DNA, 25 bp, Saccharomyces pastorianus
gaatggacactagactctgcccaag

SEQ ID NO: 98475 - DNA, 25 bp, Saccharomyces pastorianus
tgaggctgaatctttggtcgctgaa

SEQ ID NO: 98476 - DNA, 25 bp, Saccharomyces pastorianus
gttccttgggaacctgttgaccttg

SEQ ID NO: 98477 - DNA, 25 bp, Saccharomyces pastorianus
cattgcagaaggcttgggagttcct

SEQ ID NO: 98478 - DNA, 25 bp, Saccharomyces pastorianus
cggtcctgagccaaattatatttct

SEQ ID NO: 98479 - DNA, 25 bp, Saccharomyces pastorianus
caacgtcatagattgggagccaact

SEQ ID NO: 98480 - DNA, 25 bp, Saccharomyces pastorianus
gttactacaatttcggtcctgagcc

SEQ ID NO: 98481 - DNA, 25 bp, Saccharomyces pastorianus
gagccaactatcaccaattgcctgt

SEQ ID NO: 98482 - DNA, 25 bp, Saccharomyces pastorianus
gggatgtccatactccaaaggtgat

SEQ ID NO: 98483 - DNA, 25 bp, Saccharomyces pastorianus
aggtgattcccaatacactgccgaa

SEQ ID NO: 98484 - DNA, 25 bp, Saccharomyces pastorianus
agtccactagacttcgaacagccaa

SEQ ID NO: 98485 - DNA, 25 bp, Saccharomyces pastorianus
gaacagtgtccatttaaagcagtga

SEQ ID NO: 98486 - DNA, 25 bp, Saccharomyces pastorianus
tgaacttccaaagggacggcccaat

SEQ ID NO: 98487 - DNA, 25 bp, Saccharomyces pastorianus
gatctgctggtaatcaagccaagct

SEQ ID NO: 98488 - DNA, 25 bp, Saccharomyces pastorianus
aaagtatcactagccgcaagagttg

SEQ ID NO: 98489 - DNA, 25 bp, Saccharomyces pastorianus
gaaagctatcagaagccccgagcat

SEQ ID NO: 98490 - DNA, 25 bp, Saccharomyces pastorianus
gaaggctctacctattccggaggac

SEQ ID NO: 98491 - DNA, 25 bp, Saccharomyces pastorianus
cagaaatttcccgtttctgtccata

SEQ ID NO: 98492 - DNA, 25 bp, Saccharomyces pastorianus
aaactgttcttgattcctatggtga

SEQ ID NO: 98493 - DNA, 25 bp, Saccharomyces pastorianus
gcaagctgacgaattcctaatctcc

SEQ ID NO: 98494 - DNA, 25 bp, Saccharomyces pastorianus
agagcaaccgaatctgtcgccagag

SEQ ID NO: 98495 - DNA, 25 bp, Saccharomyces pastorianus
aagccccgagcatttctgaaacgaa

SEQ ID NO: 98496 - DNA, 25 bp, Saccharomyces pastorianus
gtaggagctacatcaggttccagaa

SEQ ID NO: 98497 - DNA, 25 bp, Saccharomyces pastorianus
gaattcctaatctccttgggtcata

SEQ ID NO: 98498 - DNA, 25 bp, Saccharomyces pastorianus
gatgatgtcaaatcggccaatgctt

SEQ ID NO: 98499 - DNA, 25 bp, Saccharomyces pastorianus
aaagcttcttatccagtttacgtat

SEQ ID NO: 98500 - DNA, 25 bp, Saccharomyces pastorianus
attgtctcgttgatcaaggccatcg

SEQ ID NO: 98501 - DNA, 25 bp, Saccharomyces pastorianus
tgcgtattgcaatctgttaacccag

SEQ ID NO: 98502 - DNA, 25 bp, Saccharomyces pastorianus
ggccatcgacgaagtcactgttgtt

SEQ ID NO: 98503 - DNA, 25 bp, Saccharomyces pastorianus
gccaatgcttacgacttggtcttga

SEQ ID NO: 98504 - DNA, 25 bp, Saccharomyces pastorianus
aagaagctcgttccttgttatctga

SEQ ID NO: 98505 - DNA, 25 bp, Saccharomyces pastorianus
gttcgtgatgcttccgaaattccag

SEQ ID NO: 98506 - DNA, 25 bp, Saccharomyces pastorianus
aagctggataacactgttgccgaaa

SEQ ID NO: 98507 - DNA, 25 bp, Saccharomyces pastorianus
acatcttctcgtcaagggacacgtt

SEQ ID NO: 98508 - DNA, 25 bp, Saccharomyces pastorianus
aagcgttccactgagaaggctgcct

SEQ ID NO: 98509 - DNA, 25 bp, Saccharomyces pastorianus
gtatcatatactcttgcgctaaccc

SEQ ID NO: 98510 - DNA, 25 bp, Saccharomyces pastorianus
gtcaagcccaagtttgattttccaa

SEQ ID NO: 98511 - DNA, 25 bp, Saccharomyces pastorianus
tatactggtctattcttctatccgc

SEQ ID NO: 98512 - DNA, 25 bp, Saccharomyces pastorianus
taacccggtccacgattttgaatct

SEQ ID NO: 98513 - DNA, 25 bp, Saccharomyces pastorianus
aaggatgtcactattgtcggctctg

SEQ ID NO: 98514 - DNA, 25 bp, Saccharomyces pastorianus
atccgctagcacacggttggcttaa

SEQ ID NO: 98515 - DNA, 25 bp, Saccharomyces pastorianus
gatgaaccgcttttcgagcagtgga

SEQ ID NO: 98516 - DNA, 25 bp, Saccharomyces pastorianus
tgtcggctctgggtctttctgcaag

SEQ ID NO: 98517 - DNA, 25 bp, Saccharomyces pastorianus
gctctaacaagcatactggtcgtcc

SEQ ID NO: 98518 - DNA, 25 bp, Saccharomyces pastorianus
gatgatcctactattgtcaagccca

SEQ ID NO: 98519 - DNA, 25 bp, Saccharomyces pastorianus
aggcacgtacaatcagctttttaag

SEQ ID NO: 98520 - DNA, 25 bp, Saccharomyces pastorianus
agcatccaattttttctccttatat

SEQ ID NO: 98521 - DNA, 25 bp, Saccharomyces pastorianus
gggtcatttgattacgctgcgcatt

SEQ ID NO: 98522 - DNA, 25 bp, Saccharomyces pastorianus
tagccattgtcggacctagcttggg

SEQ ID NO: 98523 - DNA, 25 bp, Saccharomyces pastorianus
gtttttcatatctattcccacacgc

SEQ ID NO: 98524 - DNA, 25 bp, Saccharomyces pastorianus
ggactatggcagctacccaaatgct

SEQ ID NO: 98525 - DNA, 25 bp, Saccharomyces pastorianus
gaacatgctagcgttgtggtccttt

SEQ ID NO: 98526 - DNA, 25 bp, Saccharomyces pastorianus
tggtatccaaaactggcacgcctag

SEQ ID NO: 98527 - DNA, 25 bp, Saccharomyces pastorianus
gtgccattgcaggttctttgttttc

SEQ ID NO: 98528 - DNA, 25 bp, Saccharomyces pastorianus
tggtacttcactcgcaacaatgttg

SEQ ID NO: 98529 - DNA, 25 bp, Saccharomyces pastorianus
tagcattcttggcttcagtggcatg

SEQ ID NO: 98530 - DNA, 25 bp, Saccharomyces pastorianus
acgctgcgcatttaggtggctctat

SEQ ID NO: 98531 - DNA, 25 bp, Saccharomyces pastorianus
gccaccgtctgctgaagctgtaaaa

SEQ ID NO: 98532 - DNA, 25 bp, Saccharomyces pastorianus
ggaaaaactagagccaccgtctgct

SEQ ID NO: 98533 - DNA, 25 bp, Saccharomyces pastorianus
aactccataacatacctgtcgaagg

SEQ ID NO: 98534 - DNA, 25 bp, Saccharomyces pastorianus
aggcatcagccaccataagcaggat

SEQ ID NO: 98535 - DNA, 25 bp, Saccharomyces pastorianus
attgttgcggttatcaggtcttccc

SEQ ID NO: 98536 - DNA, 25 bp, Saccharomyces pastorianus
ggtccgtccacgaatatttaggcat

SEQ ID NO: 98537 - DNA, 25 bp, Saccharomyces pastorianus
aacatggcgtctatgcagaacacat

SEQ ID NO: 98538 - DNA, 25 bp, Saccharomyces pastorianus
gaagtcatcggttcgtatctacggg

SEQ ID NO: 98539 - DNA, 25 bp, Saccharomyces pastorianus
gccgcggaatccaaaaatgcatatt

SEQ ID NO: 98540 - DNA, 25 bp, Saccharomyces pastorianus
atcaagacctgtatggtccgtccac

SEQ ID NO: 98541 - DNA, 25 bp, Saccharomyces pastorianus
aaagcaactggacttgccgcggaat

SEQ ID NO: 98542 - DNA, 25 bp, Saccharomyces pastorianus
tagcgttccgcgaggatactgaaga

SEQ ID NO: 98543 - DNA, 25 bp, Saccharomyces pastorianus
ctgtttactgcagcgatggtggtac

SEQ ID NO: 98544 - DNA, 25 bp, Saccharomyces pastorianus
tagatgttcctcgtgcggtgattaa

SEQ ID NO: 98545 - DNA, 25 bp, Saccharomyces pastorianus
gcccgtactcacttttttcattatt

SEQ ID NO: 98546 - DNA, 25 bp, Saccharomyces pastorianus
agcgatggtggtactgcccgtactc

SEQ ID NO: 98547 - DNA, 25 bp, Saccharomyces pastorianus
ttcattattcagcaatttacgccaa

SEQ ID NO: 98548 - DNA, 25 bp, Saccharomyces pastorianus
ttacattgttgtagcgttccgcgag

SEQ ID NO: 98549 - DNA, 25 bp, Saccharomyces pastorianus
tttacgccaaataccttaattagtg

SEQ ID NO: 98550 - DNA, 25 bp, Saccharomyces pastorianus
tcctcgtgcggtgattaataaactt

SEQ ID NO: 98551 - DNA, 25 bp, Saccharomyces pastorianus
gttgttctaatcgtttacattgttg

SEQ ID NO: 98552 - DNA, 25 bp, Saccharomyces pastorianus
atggctgtagatgttcctcgtgcgg

SEQ ID NO: 98553 - DNA, 25 bp, Saccharomyces pastorianus
gattcgcctttgaacatctctcaat

SEQ ID NO: 98554 - DNA, 25 bp, Saccharomyces pastorianus
gaattacctgaaagtgcctctgact

SEQ ID NO: 98555 - DNA, 25 bp, Saccharomyces pastorianus
ttaactctcttggttgggcttttga

SEQ ID NO: 98556 - DNA, 25 bp, Saccharomyces pastorianus
aaatctggcgaccatttgactgtgg

SEQ ID NO: 98557 - DNA, 25 bp, Saccharomyces pastorianus
ttaactgttcatgacgattcgcctt

SEQ ID NO: 98558 - DNA, 25 bp, Saccharomyces pastorianus
acctcgaatgcctacgatttgaaaa

SEQ ID NO: 98559 - DNA, 25 bp, Saccharomyces pastorianus
atctctcaatcattatctcccatta

SEQ ID NO: 98560 - DNA, 25 bp, Saccharomyces pastorianus
gatattttaagctccatctggactg

SEQ ID NO: 98561 - DNA, 25 bp, Saccharomyces pastorianus
gcatcgttttgttcaagtttacctc

SEQ ID NO: 98562 - DNA, 25 bp, Saccharomyces pastorianus
tagtttctgcgttgctattgttcat

SEQ ID NO: 98563 - DNA, 25 bp, Saccharomyces pastorianus
tccgttgacagtgctatcgctgttt

SEQ ID NO: 98564 - DNA, 25 bp, Saccharomyces pastorianus
acttgcctgttcattgcctgtaaat

SEQ ID NO: 98565 - DNA, 25 bp, Saccharomyces pastorianus
gaagccatcatatttagctgcaatg

SEQ ID NO: 98566 - DNA, 25 bp, Saccharomyces pastorianus
gcaatgtccatgtatatcgccagaa

SEQ ID NO: 98567 - DNA, 25 bp, Saccharomyces pastorianus
ggtgctgccactgtcgaaggaatta

SEQ ID NO: 98568 - DNA, 25 bp, Saccharomyces pastorianus
cttttattcattatagtggcggcat

SEQ ID NO: 98569 - DNA, 25 bp, Saccharomyces pastorianus
aataaattcgtccacctgaagccat

SEQ ID NO: 98570 - DNA, 25 bp, Saccharomyces pastorianus
gctgagctattcgttctaagttctt

SEQ ID NO: 98571 - DNA, 25 bp, Saccharomyces pastorianus
gcgtatgtgactgacggtgctgcca

SEQ ID NO: 98572 - DNA, 25 bp, Saccharomyces pastorianus
ttataacatatctctaccaaacccc

SEQ ID NO: 98573 - DNA, 25 bp, Saccharomyces pastorianus
acaactactatgcatcacttgcctg

SEQ ID NO: 98574 - DNA, 25 bp, Saccharomyces pastorianus
gaagatattgctgtacctgatacga

SEQ ID NO: 98575 - DNA, 25 bp, Saccharomyces pastorianus
gaagagcccagcaagatctgttttt

SEQ ID NO: 98576 - DNA, 25 bp, Saccharomyces pastorianus
ggtttcagtatcgtgatctttttat

SEQ ID NO: 98577 - DNA, 25 bp, Saccharomyces pastorianus
gttgcgccagactttgacattttca

SEQ ID NO: 98578 - DNA, 25 bp, Saccharomyces pastorianus
ctcagaaaacggttccatcagtgct

SEQ ID NO: 98579 - DNA, 25 bp, Saccharomyces pastorianus
gacattttcacatggtttcagtatc

SEQ ID NO: 98580 - DNA, 25 bp, Saccharomyces pastorianus
gatctgttttttggatacgcgttga

SEQ ID NO: 98581 - DNA, 25 bp, Saccharomyces pastorianus
tttgtttttaccgttgcgccagact

SEQ ID NO: 98582 - DNA, 25 bp, Saccharomyces pastorianus
caattggaacggtgattctctgatt

SEQ ID NO: 98583 - DNA, 25 bp, Saccharomyces pastorianus
gaacttactgagagatactgtggag

SEQ ID NO: 98584 - DNA, 25 bp, Saccharomyces pastorianus
gtaggactacatgagacacagttca

SEQ ID NO: 98585 - DNA, 25 bp, Saccharomyces pastorianus
caaaggatatacagccgagcaggta

SEQ ID NO: 98586 - DNA, 25 bp, Saccharomyces pastorianus
atcgaagcctcgttctaggcaggaa

SEQ ID NO: 98587 - DNA, 25 bp, Saccharomyces pastorianus
acctctagcctgtggaagttctgga

SEQ ID NO: 98588 - DNA, 25 bp, Saccharomyces pastorianus
cgaggcttcacaaaacaattccacc

SEQ ID NO: 98589 - DNA, 25 bp, Saccharomyces pastorianus
gggtgcacgcccattcaatttcaag

SEQ ID NO: 98590 - DNA, 25 bp, Saccharomyces pastorianus
aatcttcctcattgtggctcttagg

SEQ ID NO: 98591 - DNA, 25 bp, Saccharomyces pastorianus
tttacaccatttgtcgttgcctcaa

SEQ ID NO: 98592 - DNA, 25 bp, Saccharomyces pastorianus
ggcgttgtgtcccaagaccaactaa

SEQ ID NO: 98593 - DNA, 25 bp, Saccharomyces pastorianus
ggccggaagcccactattgatttaa

SEQ ID NO: 98594 - DNA, 25 bp, Saccharomyces pastorianus
ggaaacgagaacctacgactgctgt

SEQ ID NO: 98595 - DNA, 25 bp, Saccharomyces pastorianus
ggcaggtgccagacatatatgacat

SEQ ID NO: 98596 - DNA, 25 bp, Saccharomyces pastorianus
gtatggcctttcgtttttgagcaca

SEQ ID NO: 98597 - DNA, 25 bp, Saccharomyces pastorianus
gataggattatcacccagtaccatg

SEQ ID NO: 98598 - DNA, 25 bp, Saccharomyces pastorianus
atcacccagtaccatgctagttgta

SEQ ID NO: 98599 - DNA, 25 bp, Saccharomyces pastorianus
aatagtttctctgtgtttcttacca

SEQ ID NO: 98600 - DNA, 25 bp, Saccharomyces pastorianus
atattcctggtgaggcaaactcctt

SEQ ID NO: 98601 - DNA, 25 bp, Saccharomyces pastorianus
gcggaatttagcacgtacgctttca

SEQ ID NO: 98602 - DNA, 25 bp, Saccharomyces pastorianus
gctagttgtagccacgtcacataaa

SEQ ID NO: 98603 - DNA, 25 bp, Saccharomyces pastorianus
cgtacgctttcaacattcgagacgt

SEQ ID NO: 98604 - DNA, 25 bp, Saccharomyces pastorianus
ggcaaactccttgcacgacaggata

SEQ ID NO: 98605 - DNA, 25 bp, Saccharomyces pastorianus
gatttctcattaccaattctcggca

SEQ ID NO: 98606 - DNA, 25 bp, Saccharomyces pastorianus
tggtcgctggaacgtctactaagtc

SEQ ID NO: 98607 - DNA, 25 bp, Saccharomyces pastorianus
ctggtgattccaggcttttaaatat

SEQ ID NO: 98608 - DNA, 25 bp, Saccharomyces pastorianus
ttctgacgaatcaacaacgcggtat

SEQ ID NO: 98609 - DNA, 25 bp, Saccharomyces pastorianus
taatggttttcaacgacgatacaaa

SEQ ID NO: 98610 - DNA, 25 bp, Saccharomyces pastorianus
cagactgaaaatgtagcccaagcta

SEQ ID NO: 98611 - DNA, 25 bp, Saccharomyces pastorianus
ccctcagacaattcccattcaaata

SEQ ID NO: 98612 - DNA, 25 bp, Saccharomyces pastorianus
attgggcacacaattggcaaccctg

SEQ ID NO: 98613 - DNA, 25 bp, Saccharomyces pastorianus
ccaaactttactacagcggagcgaa

SEQ ID NO: 98614 - DNA, 25 bp, Saccharomyces pastorianus
gacagcatgtccaaaggcaccggtg

SEQ ID NO: 98615 - DNA, 25 bp, Saccharomyces pastorianus
gcggagcgaagatcctgcaggttta

SEQ ID NO: 98616 - DNA, 25 bp, Saccharomyces pastorianus
atgtggtcgcaattccaaactttac

SEQ ID NO: 98617 - DNA, 25 bp, Saccharomyces pastorianus
tagaggactgccattgggtattgca

SEQ ID NO: 98618 - DNA, 25 bp, Saccharomyces pastorianus
ggacactgcgtccagaattttgaag

SEQ ID NO: 98619 - DNA, 25 bp, Saccharomyces pastorianus
agatgagatttacggctctctgcgt

SEQ ID NO: 98620 - DNA, 25 bp, Saccharomyces pastorianus
aagaaatttgctctggcctgattga

SEQ ID NO: 98621 - DNA, 25 bp, Saccharomyces pastorianus
ctctctgcgtaaccattcacaattg

SEQ ID NO: 98622 - DNA, 25 bp, Saccharomyces pastorianus
tgacagaagcgctctcacttggaaa

SEQ ID NO: 98623 - DNA, 25 bp, Saccharomyces pastorianus
acgacgactatctgactttttccaa

SEQ ID NO: 98624 - DNA, 25 bp, Saccharomyces pastorianus
gcatcacgtcgaatattggagtctt

SEQ ID NO: 98625 - DNA, 25 bp, Saccharomyces pastorianus
aaatctctccatgaaatgtgcggta

SEQ ID NO: 98626 - DNA, 25 bp, Saccharomyces pastorianus
ggagtcttgtgctgattccaattca

SEQ ID NO: 98627 - DNA, 25 bp, Saccharomyces pastorianus
ttcctctcgattcccttattagaga

SEQ ID NO: 98628 - DNA, 25 bp, Saccharomyces pastorianus
aatgactatcaagaccttctgcaag

SEQ ID NO: 98629 - DNA, 25 bp, Saccharomyces pastorianus
attcaccatatattcatcatctgcg

SEQ ID NO: 98630 - DNA, 25 bp, Saccharomyces pastorianus
agggcggctgggtaactcacaatta

SEQ ID NO: 98631 - DNA, 25 bp, Saccharomyces pastorianus
aataatctgctttgtgctcggctac

SEQ ID NO: 98632 - DNA, 25 bp, Saccharomyces pastorianus
gctcaggctgtataaccctttacgg

SEQ ID NO: 98633 - DNA, 25 bp, Saccharomyces pastorianus
gatgccatggacattctagctgagc

SEQ ID NO: 98634 - DNA, 25 bp, Saccharomyces pastorianus
atcaccgggtgaacaacgctcattt

SEQ ID NO: 98635 - DNA, 25 bp, Saccharomyces pastorianus
gactgattttcaatgccctttttgg

SEQ ID NO: 98636 - DNA, 25 bp, Saccharomyces pastorianus
tacattgccgcatccattgggtaca

SEQ ID NO: 98637 - DNA, 25 bp, Saccharomyces pastorianus
tcatttggccgctgaacgtagcagt

SEQ ID NO: 98638 - DNA, 25 bp, Saccharomyces pastorianus
gtagcggtactaatagttcctcgga

SEQ ID NO: 98639 - DNA, 25 bp, Saccharomyces pastorianus
gacgaagattcacaacgctctgatg

SEQ ID NO: 98640 - DNA, 25 bp, Saccharomyces pastorianus
gggtacactgctgctgtaactgcaa

SEQ ID NO: 98641 - DNA, 25 bp, Saccharomyces pastorianus
atgctcccttttgtgcttcagaggt

SEQ ID NO: 98642 - DNA, 25 bp, Saccharomyces pastorianus
gtcaagacacaagtacaagttatgg

SEQ ID NO: 98643 - DNA, 25 bp, Saccharomyces pastorianus
ttgtgcttcagaggttcttgatcaa

SEQ ID NO: 98644 - DNA, 25 bp, Saccharomyces pastorianus
atggatgtgcatcgcaaagggaaaa

SEQ ID NO: 98645 - DNA, 25 bp, Saccharomyces pastorianus
tcccttttgtgcttcagaggttctt

SEQ ID NO: 98646 - DNA, 25 bp, Saccharomyces pastorianus
atacgtttgtccctaagtgctctta

SEQ ID NO: 98647 - DNA, 25 bp, Saccharomyces pastorianus
gtttgtccctaagtgctcttatgct

SEQ ID NO: 98648 - DNA, 25 bp, Saccharomyces pastorianus
taagtgctcttatgctcccttttgt

SEQ ID NO: 98649 - DNA, 25 bp, Saccharomyces pastorianus
gtacaagttatggatgtgcatcgca

SEQ ID NO: 98650 - DNA, 25 bp, Saccharomyces pastorianus
gaaatacgtttgtccctaagtgctc

SEQ ID NO: 98651 - DNA, 25 bp, Saccharomyces pastorianus
ttatgctcccttttgtgcttcagag

SEQ ID NO: 98652 - DNA, 25 bp, Saccharomyces pastorianus
tatctcttcctatcaatcaaccaat

SEQ ID NO: 98653 - DNA, 25 bp, Saccharomyces pastorianus
tgaaggcactgtatggagtttccaa

SEQ ID NO: 98654 - DNA, 25 bp, Saccharomyces pastorianus
cattagacgattttgttaccccact

SEQ ID NO: 98655 - DNA, 25 bp, Saccharomyces pastorianus
atccaaagcgtacatgatgccgtta

SEQ ID NO: 98656 - DNA, 25 bp, Saccharomyces pastorianus
gcggaattgccattgggatgctcca

SEQ ID NO: 98657 - DNA, 25 bp, Saccharomyces pastorianus
gcaagtccagtgtcttttacgctaa

SEQ ID NO: 98658 - DNA, 25 bp, Saccharomyces pastorianus
ggccgtatagtggacgcattattta

SEQ ID NO: 98659 - DNA, 25 bp, Saccharomyces pastorianus
atagcactgcttcgcaatgccaagg

SEQ ID NO: 98660 - DNA, 25 bp, Saccharomyces pastorianus
gagttggacattttatcctcaaccg

SEQ ID NO: 98661 - DNA, 25 bp, Saccharomyces pastorianus
gatggacatcttacatttgcagact

SEQ ID NO: 98662 - DNA, 25 bp, Saccharomyces pastorianus
gtattggatcttatagcactgcttc

SEQ ID NO: 98663 - DNA, 25 bp, Saccharomyces pastorianus
ttggacccgacattacagatagatt

SEQ ID NO: 98664 - DNA, 25 bp, Saccharomyces pastorianus
aaccacctagagatggcgcctttat

SEQ ID NO: 98665 - DNA, 25 bp, Saccharomyces pastorianus
ttaggacatgcttttggacccgaca

SEQ ID NO: 98666 - DNA, 25 bp, Saccharomyces pastorianus
gatggcgcctttatggaacttctat

SEQ ID NO: 98667 - DNA, 25 bp, Saccharomyces pastorianus
accaggccatggtattttacaggct

SEQ ID NO: 98668 - DNA, 25 bp, Saccharomyces pastorianus
gtgttattcatgttgtaccaggcca

SEQ ID NO: 98669 - DNA, 25 bp, Saccharomyces pastorianus
atggaacttctatgggcggacccac

SEQ ID NO: 98670 - DNA, 25 bp, Saccharomyces pastorianus
gatgggtccttctcagcgtggttta

SEQ ID NO: 98671 - DNA, 25 bp, Saccharomyces pastorianus
acaggctggcaggaatgacgaccaa

SEQ ID NO: 98672 - DNA, 25 bp, Saccharomyces pastorianus
gagagccttccattggttaccttaa

SEQ ID NO: 98673 - DNA, 25 bp, Saccharomyces pastorianus
attgatagatttgcccaaccaccta

SEQ ID NO: 98674 - DNA, 25 bp, Saccharomyces pastorianus
gaagtttgatgcttggtttcctcaa

SEQ ID NO: 98675 - DNA, 25 bp, Saccharomyces pastorianus
gctcgtgttcccttcttagacaaag

SEQ ID NO: 98676 - DNA, 25 bp, Saccharomyces pastorianus
gctactcatggattgacggcctaag

SEQ ID NO: 98677 - DNA, 25 bp, Saccharomyces pastorianus
gaaagggtcatttctgacgccatgt

SEQ ID NO: 98678 - DNA, 25 bp, Saccharomyces pastorianus
gatgttaagccatacctacctgaag

SEQ ID NO: 98679 - DNA, 25 bp, Saccharomyces pastorianus
aagactgcggcagacactgtcatga

SEQ ID NO: 98680 - DNA, 25 bp, Saccharomyces pastorianus
tctgctgcagaatttcacaccgaat

SEQ ID NO: 98681 - DNA, 25 bp, Saccharomyces pastorianus
tgacggcctaagagacactgctgaa

SEQ ID NO: 98682 - DNA, 25 bp, Saccharomyces pastorianus
tctttctggtgaaggctcggacgaa

SEQ ID NO: 98683 - DNA, 25 bp, Saccharomyces pastorianus
gacgccatgtttgccaatccaaagg

SEQ ID NO: 98684 - DNA, 25 bp, Saccharomyces pastorianus
ggcgacgatgttccaaccaccaaag

SEQ ID NO: 98685 - DNA, 25 bp, Saccharomyces pastorianus
tgaagctccagaacagcctctttta

SEQ ID NO: 98686 - DNA, 25 bp, Saccharomyces pastorianus
aaactcagctcacgatgctgcattt

SEQ ID NO: 98687 - DNA, 25 bp, Saccharomyces pastorianus
gtagatgatcaacaccgtcattcag

SEQ ID NO: 98688 - DNA, 25 bp, Saccharomyces pastorianus
tattaccgccccagtaacaaactca

SEQ ID NO: 98689 - DNA, 25 bp, Saccharomyces pastorianus
aagaaagctcttccggatattaccg

SEQ ID NO: 98690 - DNA, 25 bp, Saccharomyces pastorianus
aagagggaggactctcgcgtatcct

SEQ ID NO: 98691 - DNA, 25 bp, Saccharomyces pastorianus
ggttactacaaattctcaaggttct

SEQ ID NO: 98692 - DNA, 25 bp, Saccharomyces pastorianus
accgtcattcagatgtgcattctca

SEQ ID NO: 98693 - DNA, 25 bp, Saccharomyces pastorianus
tatgcattcgacacgatccaaggtt

SEQ ID NO: 98694 - DNA, 25 bp, Saccharomyces pastorianus
actctcgcgtatcctcaactaaaaa

SEQ ID NO: 98695 - DNA, 25 bp, Saccharomyces pastorianus
gatggttacccacaatgctttagag

SEQ ID NO: 98696 - DNA, 25 bp, Saccharomyces pastorianus
tgattactacggaactcgctctcaa

SEQ ID NO: 98697 - DNA, 25 bp, Saccharomyces pastorianus
gaataccatatacgtaccaccttta

SEQ ID NO: 98698 - DNA, 25 bp, Saccharomyces pastorianus
tatgacagctccagtataccagggc

SEQ ID NO: 98699 - DNA, 25 bp, Saccharomyces pastorianus
gatgtgttgagttctacctgtagga

SEQ ID NO: 98700 - DNA, 25 bp, Saccharomyces pastorianus
cgtgcgcaagtattcggtaacctca

SEQ ID NO: 98701 - DNA, 25 bp, Saccharomyces pastorianus
ttcccttccaagcactatttcaaac

SEQ ID NO: 98702 - DNA, 25 bp, Saccharomyces pastorianus
aagttgctttcaactcgcctcgaag

SEQ ID NO: 98703 - DNA, 25 bp, Saccharomyces pastorianus
gatcttgattcttacatggttgttt

SEQ ID NO: 98704 - DNA, 25 bp, Saccharomyces pastorianus
agaaagggtcctttatagctcagat

SEQ ID NO: 98705 - DNA, 25 bp, Saccharomyces pastorianus
ttcaaacccagatgtcttgcagatg

SEQ ID NO: 98706 - DNA, 25 bp, Saccharomyces pastorianus
ggtgcctcaattcctgatggtgatt

SEQ ID NO: 98707 - DNA, 25 bp, Saccharomyces pastorianus
agcacgcagctatttcaactcttgt

SEQ ID NO: 98708 - DNA, 25 bp, Saccharomyces pastorianus
gcaggatttcaccagagactctatt

SEQ ID NO: 98709 - DNA, 25 bp, Saccharomyces pastorianus
gaacttctcagaagcgagccttacc

SEQ ID NO: 98710 - DNA, 25 bp, Saccharomyces pastorianus
acccattgtttccattgtgtcgtac

SEQ ID NO: 98711 - DNA, 25 bp, Saccharomyces pastorianus
ttgtcccttgtgctagattctatcg

SEQ ID NO: 98712 - DNA, 25 bp, Saccharomyces pastorianus
aagacagctcaccagaatgcttcaa

SEQ ID NO: 98713 - DNA, 25 bp, Saccharomyces pastorianus
ttgtgtcgtacacgcaacttgctat

SEQ ID NO: 98714 - DNA, 25 bp, Saccharomyces pastorianus
gtttgctagctcaacctctgataac

SEQ ID NO: 98715 - DNA, 25 bp, Saccharomyces pastorianus
gcaacttgctatccttactaagaga

SEQ ID NO: 98716 - DNA, 25 bp, Saccharomyces pastorianus
cgaaaggttttcagcatgggtttgc

SEQ ID NO: 98717 - DNA, 25 bp, Saccharomyces pastorianus
aacgtttttattgacacacccattg

SEQ ID NO: 98718 - DNA, 25 bp, Saccharomyces pastorianus
gcatcctcaagggaagactgggcaa

SEQ ID NO: 98719 - DNA, 25 bp, Saccharomyces pastorianus
tgcgtgggaacgtaggcatcctcaa

SEQ ID NO: 98720 - DNA, 25 bp, Saccharomyces pastorianus
gcagatgacgacaagctagttaata

SEQ ID NO: 98721 - DNA, 25 bp, Saccharomyces pastorianus
gagcaaacaggatagttccgccgat

SEQ ID NO: 98722 - DNA, 25 bp, Saccharomyces pastorianus
gaaagcatttcattacacagtccaa

SEQ ID NO: 98723 - DNA, 25 bp, Saccharomyces pastorianus
ggaatttcctatgatcaacttgcaa

SEQ ID NO: 98724 - DNA, 25 bp, Saccharomyces pastorianus
ggaatctcgctacgcaaacacagaa

SEQ ID NO: 98725 - DNA, 25 bp, Saccharomyces pastorianus
gccgtttctttgcaatctgagtcga

SEQ ID NO: 98726 - DNA, 25 bp, Saccharomyces pastorianus
tgagaagaccttgcggaatctcgct

SEQ ID NO: 98727 - DNA, 25 bp, Saccharomyces pastorianus
aatcggcaaggtacagaaggacact

SEQ ID NO: 98728 - DNA, 25 bp, Saccharomyces pastorianus
ataagttggccgtttctttgcaatc

SEQ ID NO: 98729 - DNA, 25 bp, Saccharomyces pastorianus
cgcggtttatggtctggttacggat

SEQ ID NO: 98730 - DNA, 25 bp, Saccharomyces pastorianus
atgtcatcaatctcaggctgctgtt

SEQ ID NO: 98731 - DNA, 25 bp, Saccharomyces pastorianus
atcagcggcctgataggtacacaga

SEQ ID NO: 98732 - DNA, 25 bp, Saccharomyces pastorianus
ccaccgctttggctgtaggtataag

SEQ ID NO: 98733 - DNA, 25 bp, Saccharomyces pastorianus
atatccataggtctaatcagcggcc

SEQ ID NO: 98734 - DNA, 25 bp, Saccharomyces pastorianus
ggatttggctctaataccggattca

SEQ ID NO: 98735 - DNA, 25 bp, Saccharomyces pastorianus
cttttgtatgtttgccgcggtttat

SEQ ID NO: 98736 - DNA, 25 bp, Saccharomyces pastorianus
tatttacgtttgtagcagccaccgc

SEQ ID NO: 98737 - DNA, 25 bp, Saccharomyces pastorianus
tttcctgttttctattcctcatcaa

SEQ ID NO: 98738 - DNA, 25 bp, Saccharomyces pastorianus
ggtttttggctaatttctggacatc

SEQ ID NO: 98739 - DNA, 25 bp, Saccharomyces pastorianus
ggacatcattaacatacccagcaat

SEQ ID NO: 98740 - DNA, 25 bp, Saccharomyces pastorianus
agaccagaggtcttacagctacccg

SEQ ID NO: 98741 - DNA, 25 bp, Saccharomyces pastorianus
gagtgttaccatctatcggcaatga

SEQ ID NO: 98742 - DNA, 25 bp, Saccharomyces pastorianus
aagagctttctacgagggccaacga

SEQ ID NO: 98743 - DNA, 25 bp, Saccharomyces pastorianus
acagctacccgcaatataccaaaat

SEQ ID NO: 98744 - DNA, 25 bp, Saccharomyces pastorianus
ggaagatgtctctatcactcatatg

SEQ ID NO: 98745 - DNA, 25 bp, Saccharomyces pastorianus
caagtcaacattctggtggtggtaa

SEQ ID NO: 98746 - DNA, 25 bp, Saccharomyces pastorianus
gaaagagccaaattccttgtcgaaa

SEQ ID NO: 98747 - DNA, 25 bp, Saccharomyces pastorianus
gcttctaaggacatcgctcaaacat

SEQ ID NO: 98748 - DNA, 25 bp, Saccharomyces pastorianus
taacagcgagtcttcgggatcacca

SEQ ID NO: 98749 - DNA, 25 bp, Saccharomyces pastorianus
gtttggtcccgaattcacgaaagca

SEQ ID NO: 98750 - DNA, 25 bp, Saccharomyces pastorianus
gcaaactcatctaacgttgtctatt

SEQ ID NO: 98751 - DNA, 25 bp, Saccharomyces pastorianus
agttttatcgctgattactccttcg

SEQ ID NO: 98752 - DNA, 25 bp, Saccharomyces pastorianus
atagttcccctattaacacgttgcg

SEQ ID NO: 98753 - DNA, 25 bp, Saccharomyces pastorianus
taagatcaagacaaggctcgccatg

SEQ ID NO: 98754 - DNA, 25 bp, Saccharomyces pastorianus
gtttccctcaaagcctgcaaacaaa

SEQ ID NO: 98755 - DNA, 25 bp, Saccharomyces pastorianus
agaaaatctccttgtactcccttgg

SEQ ID NO: 98756 - DNA, 25 bp, Saccharomyces pastorianus
aagattttgccattgcccaaagccg

SEQ ID NO: 98757 - DNA, 25 bp, Saccharomyces pastorianus
ggatagtgccgatactatgcagcat

SEQ ID NO: 98758 - DNA, 25 bp, Saccharomyces pastorianus
taagcctatcccacttcatgaatat

SEQ ID NO: 98759 - DNA, 25 bp, Saccharomyces pastorianus
gacatggattggcatccttcctgaa

SEQ ID NO: 98760 - DNA, 25 bp, Saccharomyces pastorianus
aacgctaagccagcttctgaactga

SEQ ID NO: 98761 - DNA, 25 bp, Saccharomyces pastorianus
attactccttcgacacccaggtgaa

SEQ ID NO: 98762 - DNA, 25 bp, Saccharomyces pastorianus
tacggctagaattcacgctcaaaat

SEQ ID NO: 98763 - DNA, 25 bp, Saccharomyces pastorianus
accatttggtgtgtccttcatctac

SEQ ID NO: 98764 - DNA, 25 bp, Saccharomyces pastorianus
tcatctacgccggttatgacgatag

SEQ ID NO: 98765 - DNA, 25 bp, Saccharomyces pastorianus
attgtatacatctaatccatcggga

SEQ ID NO: 98766 - DNA, 25 bp, Saccharomyces pastorianus
tagaacaagacacctctaccgaaaa

SEQ ID NO: 98767 - DNA, 25 bp, Saccharomyces pastorianus
gttgctggactgactgcagatgcag

SEQ ID NO: 98768 - DNA, 25 bp, Saccharomyces pastorianus
aaactatacagggtggaaggccatt

SEQ ID NO: 98769 - DNA, 25 bp, Saccharomyces pastorianus
gacaggttggaatttgctactatca

SEQ ID NO: 98770 - DNA, 25 bp, Saccharomyces pastorianus
aggccattagtgttggcgctaacac

SEQ ID NO: 98771 - DNA, 25 bp, Saccharomyces pastorianus
gtagcgcgctgacttatgacaggtt

SEQ ID NO: 98772 - DNA, 25 bp, Saccharomyces pastorianus
aaaattgcggttgccgttgctggac

SEQ ID NO: 98773 - DNA, 25 bp, Saccharomyces pastorianus
gaaccagccgcatcacagtatcctt

SEQ ID NO: 98774 - DNA, 25 bp, Saccharomyces pastorianus
gcaggtttcagcaccttatgcacct

SEQ ID NO: 98775 - DNA, 25 bp, Saccharomyces pastorianus
gagatcagcctcacctaaatctgcg

SEQ ID NO: 98776 - DNA, 25 bp, Saccharomyces pastorianus
tcacctaaatctgcggaagctgctt

SEQ ID NO: 98777 - DNA, 25 bp, Saccharomyces pastorianus
gatcgccccaaaatgcagatacaga

SEQ ID NO: 98778 - DNA, 25 bp, Saccharomyces pastorianus
agtgttccacctccatcatacgaac

SEQ ID NO: 98779 - DNA, 25 bp, Saccharomyces pastorianus
gactgtttctcgtcccagtgttcca

SEQ ID NO: 98780 - DNA, 25 bp, Saccharomyces pastorianus
gaagctgcttcaagctcgactgttt

SEQ ID NO: 98781 - DNA, 25 bp, Saccharomyces pastorianus
ggatggaaaccaaagatcgccccaa

SEQ ID NO: 98782 - DNA, 25 bp, Saccharomyces pastorianus
gtatccttcacagcaggtttcagca

SEQ ID NO: 98783 - DNA, 25 bp, Saccharomyces pastorianus
gaaacctgctttcacgagatcagcc

SEQ ID NO: 98784 - DNA, 25 bp, Saccharomyces pastorianus
ttacccaatgattttcgtagcttga

SEQ ID NO: 98785 - DNA, 25 bp, Saccharomyces pastorianus
gtattctgtcacgaaatatttgttt

SEQ ID NO: 98786 - DNA, 25 bp, Saccharomyces pastorianus
gcattttttagtattctgtcacgaa

SEQ ID NO: 98787 - DNA, 25 bp, Saccharomyces pastorianus
gtcaacagcattttttagtattctg

SEQ ID NO: 98788 - DNA, 25 bp, Saccharomyces pastorianus
gattttcgtagcttgaaagagagaa

SEQ ID NO: 98789 - DNA, 25 bp, Saccharomyces pastorianus
gaacttacccaatgattttcgtagc

SEQ ID NO: 98790 - DNA, 25 bp, Saccharomyces pastorianus
ctgtcacgaaatatttgtttcagtg

SEQ ID NO: 98791 - DNA, 25 bp, Saccharomyces pastorianus
acccaatgattttcgtagcttgaaa

SEQ ID NO: 98792 - DNA, 25 bp, Saccharomyces pastorianus
gtgatttgaacttacccaatgattt

SEQ ID NO: 98793 - DNA, 25 bp, Saccharomyces pastorianus
tcagtgatttgaacttacccaatga

SEQ ID NO: 98794 - DNA, 25 bp, Saccharomyces pastorianus
gtttcagtgatttgaacttacccaa

SEQ ID NO: 98795 - DNA, 25 bp, Saccharomyces pastorianus
catatcctccacctttcactaatta

SEQ ID NO: 98796 - DNA, 25 bp, Saccharomyces pastorianus
atcaacagcctcagcaacagtacgc

SEQ ID NO: 98797 - DNA, 25 bp, Saccharomyces pastorianus
gccttcaagagttttggtagcaaat

SEQ ID NO: 98798 - DNA, 25 bp, Saccharomyces pastorianus
ttatatgcaagctccgcctccacag

SEQ ID NO: 98799 - DNA, 25 bp, Saccharomyces pastorianus
aacagcaggcgcctttaccatatcc

SEQ ID NO: 98800 - DNA, 25 bp, Saccharomyces pastorianus
tggttctgctattggtagtgatatt

SEQ ID NO: 98801 - DNA, 25 bp, Saccharomyces pastorianus
gcaagcaccggtggaagcacaacca

SEQ ID NO: 98802 - DNA, 25 bp, Saccharomyces pastorianus
aattactatcaacagcctcagcaac

SEQ ID NO: 98803 - DNA, 25 bp, Saccharomyces pastorianus
acctccagccggttatatgcaagct

SEQ ID NO: 98804 - DNA, 25 bp, Saccharomyces pastorianus
ctccacctttcactaattactatca

SEQ ID NO: 98805 - DNA, 25 bp, Saccharomyces pastorianus
ggtagtgatattgtcaacagcattt

SEQ ID NO: 98806 - DNA, 25 bp, Saccharomyces pastorianus
ttcgcgcttggcaaagttcctaagg

SEQ ID NO: 98807 - DNA, 25 bp, Saccharomyces pastorianus
ttgaatggttcaccccaaacgctaa

SEQ ID NO: 98808 - DNA, 25 bp, Saccharomyces pastorianus
gagtctcgacagatacaaagcagtt

SEQ ID NO: 98809 - DNA, 25 bp, Saccharomyces pastorianus
agcaaaaacttggttcacacacggg

SEQ ID NO: 98810 - DNA, 25 bp, Saccharomyces pastorianus
atcgccgtctcctgagcaagatcaa

SEQ ID NO: 98811 - DNA, 25 bp, Saccharomyces pastorianus
tcaggtaacaagtcgtggagagcta

SEQ ID NO: 98812 - DNA, 25 bp, Saccharomyces pastorianus
gaccagtggtaagtacgcagagact

SEQ ID NO: 98813 - DNA, 25 bp, Saccharomyces pastorianus
gtacgccaaccaatgcgtgcattca

SEQ ID NO: 98814 - DNA, 25 bp, Saccharomyces pastorianus
tcaagccatgtcaactactgcatcg

SEQ ID NO: 98815 - DNA, 25 bp, Saccharomyces pastorianus
gaaggttcattttcgcgcttggcaa

SEQ ID NO: 98816 - DNA, 25 bp, Saccharomyces pastorianus
gaggccacaactatacatgacggaa

SEQ ID NO: 98817 - DNA, 25 bp, Saccharomyces pastorianus
aaagtggctgcgtagcatactccgt

SEQ ID NO: 98818 - DNA, 25 bp, Saccharomyces pastorianus
agaatggctatcgttcaaaggcgct

SEQ ID NO: 98819 - DNA, 25 bp, Saccharomyces pastorianus
caattaagacctagggatcccagac

SEQ ID NO: 98820 - DNA, 25 bp, Saccharomyces pastorianus
aaaaatgacaccatgcggcgctgaa

SEQ ID NO: 98821 - DNA, 25 bp, Saccharomyces pastorianus
gtgactttactgatagagggccatt

SEQ ID NO: 98822 - DNA, 25 bp, Saccharomyces pastorianus
ggctgcccggcaagaagatatataa

SEQ ID NO: 98823 - DNA, 25 bp, Saccharomyces pastorianus
gacaattgtggtatcttgctgtaca

SEQ ID NO: 98824 - DNA, 25 bp, Saccharomyces pastorianus
agtcggtcaacatgcgcacgatgtt

SEQ ID NO: 98825 - DNA, 25 bp, Saccharomyces pastorianus
gcacattatgcatcagtcggtcaac

SEQ ID NO: 98826 - DNA, 25 bp, Saccharomyces pastorianus
ctattatgcctatacagtgactgtg

SEQ ID NO: 98827 - DNA, 25 bp, Saccharomyces pastorianus
agcatactccgttttttgacgtgga

SEQ ID NO: 98828 - DNA, 25 bp, Saccharomyces pastorianus
aatcattgcctatctctgagattga

SEQ ID NO: 98829 - DNA, 25 bp, Saccharomyces pastorianus
aataatagcaattctggttcagcag

SEQ ID NO: 98830 - DNA, 25 bp, Saccharomyces pastorianus
atttccgaaggtggcatcaacgaac

SEQ ID NO: 98831 - DNA, 25 bp, Saccharomyces pastorianus
atctctgagattgaggccagcaata

SEQ ID NO: 98832 - DNA, 25 bp, Saccharomyces pastorianus
gcaaaaaaccaagaggtcccagcaa

SEQ ID NO: 98833 - DNA, 25 bp, Saccharomyces pastorianus
aacatgtctgaatctttgaaggagg

SEQ ID NO: 98834 - DNA, 25 bp, Saccharomyces pastorianus
ctttggatttctctgtgtctggtaa

SEQ ID NO: 98835 - DNA, 25 bp, Saccharomyces pastorianus
gtgattctgatacgactttggattt

SEQ ID NO: 98836 - DNA, 25 bp, Saccharomyces pastorianus
gacgagtctcacgatgatgttaaca

SEQ ID NO: 98837 - DNA, 25 bp, Saccharomyces pastorianus
atacaacgagttcctaagcagatct

SEQ ID NO: 98838 - DNA, 25 bp, Saccharomyces pastorianus
aaacacgcttcacccgtattagaag

SEQ ID NO: 98839 - DNA, 25 bp, Saccharomyces pastorianus
atgccgctttgttcatctctactgt

SEQ ID NO: 98840 - DNA, 25 bp, Saccharomyces pastorianus
gtgcatacgccggtgttgacaacat

SEQ ID NO: 98841 - DNA, 25 bp, Saccharomyces pastorianus
acgatgtcgttattcactctggtgc

SEQ ID NO: 98842 - DNA, 25 bp, Saccharomyces pastorianus
ctgcgccaagagaatcgtcgacatt

SEQ ID NO: 98843 - DNA, 25 bp, Saccharomyces pastorianus
tgatggtccatttggtgctttctgc

SEQ ID NO: 98844 - DNA, 25 bp, Saccharomyces pastorianus
tatgttgtcgttaagcatgccgctt

SEQ ID NO: 98845 - DNA, 25 bp, Saccharomyces pastorianus
gttaaactgttcaatgctacctgtg

SEQ ID NO: 98846 - DNA, 25 bp, Saccharomyces pastorianus
tgttgtcaccaactggacgttagtt

SEQ ID NO: 98847 - DNA, 25 bp, Saccharomyces pastorianus
tgtcattttatccactaccggtcat

SEQ ID NO: 98848 - DNA, 25 bp, Saccharomyces pastorianus
ggacgttagttacccaagctcacgg

SEQ ID NO: 98849 - DNA, 25 bp, Saccharomyces pastorianus
ccaagctcacggtactcaatgttgc

SEQ ID NO: 98850 - DNA, 25 bp, Saccharomyces pastorianus
gagtgtaatttaacgtgtgctttct

SEQ ID NO: 98851 - DNA, 25 bp, Saccharomyces pastorianus
tcctccctgagtgtaatttaacgtg

SEQ ID NO: 98852 - DNA, 25 bp, Saccharomyces pastorianus
gctttcttattgcattcgtttacat

SEQ ID NO: 98853 - DNA, 25 bp, Saccharomyces pastorianus
gtgtgctttcttattgcattcgttt

SEQ ID NO: 98854 - DNA, 25 bp, Saccharomyces pastorianus
tcattgcccttctttcagttgggca

SEQ ID NO: 98855 - DNA, 25 bp, Saccharomyces pastorianus
gcccttctttcagttgggcattttt

SEQ ID NO: 98856 - DNA, 25 bp, Saccharomyces pastorianus
aacgtgtgctttcttattgcattcg

SEQ ID NO: 98857 - DNA, 25 bp, Saccharomyces pastorianus
aatttaacgtgtgctttcttattgc

SEQ ID NO: 98858 - DNA, 25 bp, Saccharomyces pastorianus
gttcctccctgagtgtaatttaacg

SEQ ID NO: 98859 - DNA, 25 bp, Saccharomyces pastorianus
ccctgagtgtaatttaacgtgtgct

SEQ ID NO: 98860 - DNA, 25 bp, Saccharomyces pastorianus
attgcccttctttcagttgggcatt

SEQ ID NO: 98861 - DNA, 25 bp, Saccharomyces pastorianus
gagtgtaatttaacgtgtgctttct

SEQ ID NO: 98862 - DNA, 25 bp, Saccharomyces pastorianus
gctttcttattgcattcgtttacat

SEQ ID NO: 98863 - DNA, 25 bp, Saccharomyces pastorianus
gtgtgctttcttattgcattcgttt

SEQ ID NO: 98864 - DNA, 25 bp, Saccharomyces pastorianus
tcattgcccttctttcagttgggca

SEQ ID NO: 98865 - DNA, 25 bp, Saccharomyces pastorianus
gcccttctttcagttgggcattttt

SEQ ID NO: 98866 - DNA, 25 bp, Saccharomyces pastorianus
cctccctgagtgtaatttaacgtgt

SEQ ID NO: 98867 - DNA, 25 bp, Saccharomyces pastorianus
gtttacattccctattgctcattgc

SEQ ID NO: 98868 - DNA, 25 bp, Saccharomyces pastorianus
aacgtgtgctttcttattgcattcg

SEQ ID NO: 98869 - DNA, 25 bp, Saccharomyces pastorianus
aatttaacgtgtgctttcttattgc

SEQ ID NO: 98870 - DNA, 25 bp, Saccharomyces pastorianus
gttcctccctgagtgtaatttaacg

SEQ ID NO: 98871 - DNA, 25 bp, Saccharomyces pastorianus
attgcccttctttcagttgggcatt

SEQ ID NO: 98872 - DNA, 25 bp, Saccharomyces pastorianus
atccttcgtcaagcttctgcagagg

SEQ ID NO: 98873 - DNA, 25 bp, Saccharomyces pastorianus
aaacaggctcatcgcgaagcagtgc

SEQ ID NO: 98874 - DNA, 25 bp, Saccharomyces pastorianus
tgatcatcgttagagtacccctgac

SEQ ID NO: 98875 - DNA, 25 bp, Saccharomyces pastorianus
tatgttttctgggagtccactcact

SEQ ID NO: 98876 - DNA, 25 bp, Saccharomyces pastorianus
tgttggccgaattgctaattgcgta

SEQ ID NO: 98877 - DNA, 25 bp, Saccharomyces pastorianus
gaaggacagcacgttgttggccgaa

SEQ ID NO: 98878 - DNA, 25 bp, Saccharomyces pastorianus
agggcacagcgctcgacattacaaa

SEQ ID NO: 98879 - DNA, 25 bp, Saccharomyces pastorianus
agtatggttattctgcactgatcgt

SEQ ID NO: 98880 - DNA, 25 bp, Saccharomyces pastorianus
atcgtatatatcctcttaacttgtg

SEQ ID NO: 98881 - DNA, 25 bp, Saccharomyces pastorianus
ttctgcagaggtttggcatcgactt

SEQ ID NO: 98882 - DNA, 25 bp, Saccharomyces pastorianus
ggtattccaaacgatggcctctggt

SEQ ID NO: 98883 - DNA, 25 bp, Saccharomyces pastorianus
acaaaaagtcacacgcaaaggccct

SEQ ID NO: 98884 - DNA, 25 bp, Saccharomyces pastorianus
gaagctatctcagtatccaaacctg

SEQ ID NO: 98885 - DNA, 25 bp, Saccharomyces pastorianus
gagaccacggaggacctcaacttaa

SEQ ID NO: 98886 - DNA, 25 bp, Saccharomyces pastorianus
gtcccatacgcgtgaccaaaattca

SEQ ID NO: 98887 - DNA, 25 bp, Saccharomyces pastorianus
taggacgactgtaccgtttctgaaa

SEQ ID NO: 98888 - DNA, 25 bp, Saccharomyces pastorianus
gtattcggacgcaatagctatcata

SEQ ID NO: 98889 - DNA, 25 bp, Saccharomyces pastorianus
aattcttgcgaaggttgacgttctt

SEQ ID NO: 98890 - DNA, 25 bp, Saccharomyces pastorianus
gttcttcactttccaacaacacgaa

SEQ ID NO: 98891 - DNA, 25 bp, Saccharomyces pastorianus
ataccgtaatattccttcgtcccat

SEQ ID NO: 98892 - DNA, 25 bp, Saccharomyces pastorianus
aaatcgcttcaattggacttattcc

SEQ ID NO: 98893 - DNA, 25 bp, Saccharomyces pastorianus
gatggacaccacgttatatgagctg

SEQ ID NO: 98894 - DNA, 25 bp, Saccharomyces pastorianus
aaagcacaaaccgtcacatgccgtt

SEQ ID NO: 98895 - DNA, 25 bp, Saccharomyces pastorianus
ggacaggaattagcgctacttcaca

SEQ ID NO: 98896 - DNA, 25 bp, Saccharomyces pastorianus
aaatcttcacaaggacaagctaaag

SEQ ID NO: 98897 - DNA, 25 bp, Saccharomyces pastorianus
aaatcgagtctccatcaaccaggct

SEQ ID NO: 98898 - DNA, 25 bp, Saccharomyces pastorianus
attagcgctacttcacaacaaaaga

SEQ ID NO: 98899 - DNA, 25 bp, Saccharomyces pastorianus
gttaaacaatctactccggttaatg

SEQ ID NO: 98900 - DNA, 25 bp, Saccharomyces pastorianus
tctggttctagcaacaggacaggaa

SEQ ID NO: 98901 - DNA, 25 bp, Saccharomyces pastorianus
aatttagcaaaatcgagtctccatc

SEQ ID NO: 98902 - DNA, 25 bp, Saccharomyces pastorianus
atgccgttccgaaatctggttctag

SEQ ID NO: 98903 - DNA, 25 bp, Saccharomyces pastorianus
tctactccggttaatgaaaagcaca

SEQ ID NO: 98904 - DNA, 25 bp, Saccharomyces pastorianus
aggctccctagttctgcgaaacagg

SEQ ID NO: 98905 - DNA, 25 bp, Saccharomyces pastorianus
tttagttaggcaaatcattcggaat

SEQ ID NO: 98906 - DNA, 25 bp, Saccharomyces pastorianus
taagagaacaggtccttaggatcaa

SEQ ID NO: 98907 - DNA, 25 bp, Saccharomyces pastorianus
gggttcctgttggtatattcagtaa

SEQ ID NO: 98908 - DNA, 25 bp, Saccharomyces pastorianus
gtatattcagtaacagatcggcaat

SEQ ID NO: 98909 - DNA, 25 bp, Saccharomyces pastorianus
gatcgcgttccaatggttctaatag

SEQ ID NO: 98910 - DNA, 25 bp, Saccharomyces pastorianus
aagtgttcgttgatttagttaggca

SEQ ID NO: 98911 - DNA, 25 bp, Saccharomyces pastorianus
ggatcaaagattccgatcgcgttcc

SEQ ID NO: 98912 - DNA, 25 bp, Saccharomyces pastorianus
aggtaacaaggctgatctaatcaat

SEQ ID NO: 98913 - DNA, 25 bp, Saccharomyces pastorianus
gtagagttcccttttatgaaacaag

SEQ ID NO: 98914 - DNA, 25 bp, Saccharomyces pastorianus
acagatcggcaatctttggaagaat

SEQ ID NO: 98915 - DNA, 25 bp, Saccharomyces pastorianus
gaaacaagcgctttgttgaggagca

SEQ ID NO: 98916 - DNA, 25 bp, Saccharomyces pastorianus
aaccattttttgactggaggcatga

SEQ ID NO: 98917 - DNA, 25 bp, Saccharomyces pastorianus
gagggtggcagtactacctgagaat

SEQ ID NO: 98918 - DNA, 25 bp, Saccharomyces pastorianus
gaagtctgtgttccgtctatacacg

SEQ ID NO: 98919 - DNA, 25 bp, Saccharomyces pastorianus
aagggtccaacgtgagcatacggtt

SEQ ID NO: 98920 - DNA, 25 bp, Saccharomyces pastorianus
gcatacggttattttccttggactt

SEQ ID NO: 98921 - DNA, 25 bp, Saccharomyces pastorianus
agaagtcggcacttacgaatgtgag

SEQ ID NO: 98922 - DNA, 25 bp, Saccharomyces pastorianus
aaccgtgtggttgtcataaatcgag

SEQ ID NO: 98923 - DNA, 25 bp, Saccharomyces pastorianus
gtagggaatacagtcaaccattttt

SEQ ID NO: 98924 - DNA, 25 bp, Saccharomyces pastorianus
ctgtgaaatttaccattccgccaaa

SEQ ID NO: 98925 - DNA, 25 bp, Saccharomyces pastorianus
gatagtttcacgtttgaagggtcca

SEQ ID NO: 98926 - DNA, 25 bp, Saccharomyces pastorianus
tcattttttacctctctctcagata

SEQ ID NO: 98927 - DNA, 25 bp, Saccharomyces pastorianus
ttaagctcttttacatcaggatgga

SEQ ID NO: 98928 - DNA, 25 bp, Saccharomyces pastorianus
aagggatgatttcccgtaccttcat

SEQ ID NO: 98929 - DNA, 25 bp, Saccharomyces pastorianus
gtacgtgcagcacttcaaatgcaat

SEQ ID NO: 98930 - DNA, 25 bp, Saccharomyces pastorianus
gaggagcaattcagtggtaacaaac

SEQ ID NO: 98931 - DNA, 25 bp, Saccharomyces pastorianus
acatcaaatgggttcatccgaagat

SEQ ID NO: 98932 - DNA, 25 bp, Saccharomyces pastorianus
tttgacgtcgtgtacgtgcagcact

SEQ ID NO: 98933 - DNA, 25 bp, Saccharomyces pastorianus
ttcccgtaccttcatttgtggttga

SEQ ID NO: 98934 - DNA, 25 bp, Saccharomyces pastorianus
aatcttggtgtctataaagtcggat

SEQ ID NO: 98935 - DNA, 25 bp, Saccharomyces pastorianus
cagtggcgtgtttgatgaatttatc

SEQ ID NO: 98936 - DNA, 25 bp, Saccharomyces pastorianus
agttccgcatgatttgatagacgag

SEQ ID NO: 98937 - DNA, 25 bp, Saccharomyces pastorianus
aacgtaatcgatctagttccgcatg

SEQ ID NO: 98938 - DNA, 25 bp, Saccharomyces pastorianus
atgccactgaacgtagctatgccaa

SEQ ID NO: 98939 - DNA, 25 bp, Saccharomyces pastorianus
ccatgggacagcctgtgttggcaaa

SEQ ID NO: 98940 - DNA, 25 bp, Saccharomyces pastorianus
aaatcccaagttggcgaggccccat

SEQ ID NO: 98941 - DNA, 25 bp, Saccharomyces pastorianus
gtgacccaagccctactagaaatgg

SEQ ID NO: 98942 - DNA, 25 bp, Saccharomyces pastorianus
agctatgccaatgcctatgtcgaca

SEQ ID NO: 98943 - DNA, 25 bp, Saccharomyces pastorianus
gcgaaactgcaattactacctgaaa

SEQ ID NO: 98944 - DNA, 25 bp, Saccharomyces pastorianus
gccccatctttgctttcgagtaata

SEQ ID NO: 98945 - DNA, 25 bp, Saccharomyces pastorianus
aataacactccgttgcatgtacctt

SEQ ID NO: 98946 - DNA, 25 bp, Saccharomyces pastorianus
gaaggaccctctaacgcgaataaag

SEQ ID NO: 98947 - DNA, 25 bp, Saccharomyces pastorianus
actcggccaggtccagcaacaaaat

SEQ ID NO: 98948 - DNA, 25 bp, Saccharomyces pastorianus
atttatccctttacctctgcaacaa

SEQ ID NO: 98949 - DNA, 25 bp, Saccharomyces pastorianus
gatgccggcatcgaattagtggata

SEQ ID NO: 98950 - DNA, 25 bp, Saccharomyces pastorianus
taacgctagccttagctgatgccgg

SEQ ID NO: 98951 - DNA, 25 bp, Saccharomyces pastorianus
ttaggacaccaaacatcgctcatta

SEQ ID NO: 98952 - DNA, 25 bp, Saccharomyces pastorianus
aatcctcaggacgacgattcgcaaa

SEQ ID NO: 98953 - DNA, 25 bp, Saccharomyces pastorianus
gaggatccttcacatctcaaggtac

SEQ ID NO: 98954 - DNA, 25 bp, Saccharomyces pastorianus
aagtccggcatcgatatcttcgttt

SEQ ID NO: 98955 - DNA, 25 bp, Saccharomyces pastorianus
acaggaactttctctacataccggt

SEQ ID NO: 98956 - DNA, 25 bp, Saccharomyces pastorianus
tcattaccgctgtctatggaccaca

SEQ ID NO: 98957 - DNA, 25 bp, Saccharomyces pastorianus
gaccacactccattagaggatcctt

SEQ ID NO: 98958 - DNA, 25 bp, Saccharomyces pastorianus
atatcatctctcataccacattgta

SEQ ID NO: 98959 - DNA, 25 bp, Saccharomyces pastorianus
gaggccaatggcactgtcgtatcat

SEQ ID NO: 98960 - DNA, 25 bp, Saccharomyces pastorianus
gaaattcggtgataccccatctgaa

SEQ ID NO: 98961 - DNA, 25 bp, Saccharomyces pastorianus
tcgaattattcgctaaacacggtga

SEQ ID NO: 98962 - DNA, 25 bp, Saccharomyces pastorianus
catctggttctggtgctaatactgc

SEQ ID NO: 98963 - DNA, 25 bp, Saccharomyces pastorianus
ggtgctaatactgctccattgggca

SEQ ID NO: 98964 - DNA, 25 bp, Saccharomyces pastorianus
gacagagacgctattttcgaattat

SEQ ID NO: 98965 - DNA, 25 bp, Saccharomyces pastorianus
gttcttgggtaacttatctttcaat

SEQ ID NO: 98966 - DNA, 25 bp, Saccharomyces pastorianus
gtggcggtttcagaccatctggttc

SEQ ID NO: 98967 - DNA, 25 bp, Saccharomyces pastorianus
tgatatgtccacaagcaagccagct

SEQ ID NO: 98968 - DNA, 25 bp, Saccharomyces pastorianus
gtttcggttatgttcaattctccaa

SEQ ID NO: 98969 - DNA, 25 bp, Saccharomyces pastorianus
aagccagctggtaacaacgatcgtg

SEQ ID NO: 98970 - DNA, 25 bp, Saccharomyces pastorianus
tagattagacttctcttctccaaga

SEQ ID NO: 98971 - DNA, 25 bp, Saccharomyces pastorianus
agctttttcttctttggcttgtttg

SEQ ID NO: 98972 - DNA, 25 bp, Saccharomyces pastorianus
gacaccaccgatgtgttcgaattcc

SEQ ID NO: 98973 - DNA, 25 bp, Saccharomyces pastorianus
ccttttcgctttcgctatcagaaga

SEQ ID NO: 98974 - DNA, 25 bp, Saccharomyces pastorianus
tttgattcttccttcttggtttctt

SEQ ID NO: 98975 - DNA, 25 bp, Saccharomyces pastorianus
ggcgtcctcagatttacgtttctta

SEQ ID NO: 98976 - DNA, 25 bp, Saccharomyces pastorianus
ttccttcttggtttcagcttcactt

SEQ ID NO: 98977 - DNA, 25 bp, Saccharomyces pastorianus
aatagtagctggttcttcggtttct

SEQ ID NO: 98978 - DNA, 25 bp, Saccharomyces pastorianus
cagcttcactttcgctgtcagaaga

SEQ ID NO: 98979 - DNA, 25 bp, Saccharomyces pastorianus
gaatccttggattcttccttcttgg

SEQ ID NO: 98980 - DNA, 25 bp, Saccharomyces pastorianus
gtttcttatcgttagactcttcctt

SEQ ID NO: 98981 - DNA, 25 bp, Saccharomyces pastorianus
gaagaggcggccttagctttttctt

SEQ ID NO: 98982 - DNA, 25 bp, Saccharomyces pastorianus
gataaatcctcgtaatgagctacag

SEQ ID NO: 98983 - DNA, 25 bp, Saccharomyces pastorianus
gtatcacaattagctaatggcgtca

SEQ ID NO: 98984 - DNA, 25 bp, Saccharomyces pastorianus
aaactgataccggagctgtcttttc

SEQ ID NO: 98985 - DNA, 25 bp, Saccharomyces pastorianus
accggagctgtcttttctggagaat

SEQ ID NO: 98986 - DNA, 25 bp, Saccharomyces pastorianus
gatatttgggcaaacgcaagagcca

SEQ ID NO: 98987 - DNA, 25 bp, Saccharomyces pastorianus
gctccgagttcatagatgtgacgat

SEQ ID NO: 98988 - DNA, 25 bp, Saccharomyces pastorianus
gatttatataaagcgcctgttctaa

SEQ ID NO: 98989 - DNA, 25 bp, Saccharomyces pastorianus
atgtatgaggtatgctccgagttca

SEQ ID NO: 98990 - DNA, 25 bp, Saccharomyces pastorianus
gatggtgttcaggtttctttttatt

SEQ ID NO: 98991 - DNA, 25 bp, Saccharomyces pastorianus
gcttaacggtcgcagattacaatat

SEQ ID NO: 98992 - DNA, 25 bp, Saccharomyces pastorianus
ggcttggcattggtggcgattataa

SEQ ID NO: 98993 - DNA, 25 bp, Saccharomyces pastorianus
agtcagaaccttttgggcctgttga

SEQ ID NO: 98994 - DNA, 25 bp, Saccharomyces pastorianus
ttaagcgaaattcctgttccgcaaa

SEQ ID NO: 98995 - DNA, 25 bp, Saccharomyces pastorianus
gacgaattacgtattaagcccgcaa

SEQ ID NO: 98996 - DNA, 25 bp, Saccharomyces pastorianus
ttagagcctgctgtagagaccttaa

SEQ ID NO: 98997 - DNA, 25 bp, Saccharomyces pastorianus
gggaacattctagtggccatcaaca

SEQ ID NO: 98998 - DNA, 25 bp, Saccharomyces pastorianus
gatttctcaccattgcagagtcaga

SEQ ID NO: 98999 - DNA, 25 bp, Saccharomyces pastorianus
gactttggcgtcaagatttctcacc

SEQ ID NO: 99000 - DNA, 25 bp, Saccharomyces pastorianus
gtggaaggactttctacccaacaag

SEQ ID NO: 99001 - DNA, 25 bp, Saccharomyces pastorianus
gttgatgcagcccatgttttagaat

SEQ ID NO: 99002 - DNA, 25 bp, Saccharomyces pastorianus
gactcagatgcctcttttaaacggg

SEQ ID NO: 99003 - DNA, 25 bp, Saccharomyces pastorianus
tatagaatgtttcccgtcttcgact

SEQ ID NO: 99004 - DNA, 25 bp, Saccharomyces pastorianus
gtagtgctactgtacctagtggtaa

SEQ ID NO: 99005 - DNA, 25 bp, Saccharomyces pastorianus
aggtgcgcctgccaatcagagtaca

SEQ ID NO: 99006 - DNA, 25 bp, Saccharomyces pastorianus
gtcaagacaatacgacctgggatcg

SEQ ID NO: 99007 - DNA, 25 bp, Saccharomyces pastorianus
acctgggatcgtgcacttcaattaa

SEQ ID NO: 99008 - DNA, 25 bp, Saccharomyces pastorianus
tttttccacattcgaaggtgcgcct

SEQ ID NO: 99009 - DNA, 25 bp, Saccharomyces pastorianus
gacatattggaaacggaggcttccc

SEQ ID NO: 99010 - DNA, 25 bp, Saccharomyces pastorianus
gcgaggcagatgatgatttttccac

SEQ ID NO: 99011 - DNA, 25 bp, Saccharomyces pastorianus
gcaatttccagatatcaactccgca

SEQ ID NO: 99012 - DNA, 25 bp, Saccharomyces pastorianus
attgacgatttttacgattcttaca

SEQ ID NO: 99013 - DNA, 25 bp, Saccharomyces pastorianus
aatggcgcggtctcgagcgatcaaa

SEQ ID NO: 99014 - DNA, 25 bp, Saccharomyces pastorianus
aacaacgtcgtgctgtagagattca

SEQ ID NO: 99015 - DNA, 25 bp, Saccharomyces pastorianus
atcaatgccattttcacagttttgg

SEQ ID NO: 99016 - DNA, 25 bp, Saccharomyces pastorianus
atgtcggcggccatgaagtcaggaa

SEQ ID NO: 99017 - DNA, 25 bp, Saccharomyces pastorianus
cacagttttggcagtatatcacaga

SEQ ID NO: 99018 - DNA, 25 bp, Saccharomyces pastorianus
aaaggcgcagattaatgggcaacaa

SEQ ID NO: 99019 - DNA, 25 bp, Saccharomyces pastorianus
ttgaccataggccatttttaataga

SEQ ID NO: 99020 - DNA, 25 bp, Saccharomyces pastorianus
tgatgcttcttacattcaccttcgt

SEQ ID NO: 99021 - DNA, 25 bp, Saccharomyces pastorianus
cattccgtgtgctttttgaccatag

SEQ ID NO: 99022 - DNA, 25 bp, Saccharomyces pastorianus
attctttgcgaagtccttggttaat

SEQ ID NO: 99023 - DNA, 25 bp, Saccharomyces pastorianus
caaattgcgatgcatcgtgatgctt

SEQ ID NO: 99024 - DNA, 25 bp, Saccharomyces pastorianus
acaggagttcgttaccattccgtgt

SEQ ID NO: 99025 - DNA, 25 bp, Saccharomyces pastorianus
cattcaccttcgtggatccaacaag

SEQ ID NO: 99026 - DNA, 25 bp, Saccharomyces pastorianus
ttgtcctgaatgtcatactgttgat

SEQ ID NO: 99027 - DNA, 25 bp, Saccharomyces pastorianus
aagatacttctctcatgctgatgaa

SEQ ID NO: 99028 - DNA, 25 bp, Saccharomyces pastorianus
gaagatttcctcactccgaattgat

SEQ ID NO: 99029 - DNA, 25 bp, Saccharomyces pastorianus
gacacccatatattctatcgatcca

SEQ ID NO: 99030 - DNA, 25 bp, Saccharomyces pastorianus
cgatccaaagagacagtttccagtt

SEQ ID NO: 99031 - DNA, 25 bp, Saccharomyces pastorianus
gaaacgacttttgaggacacttcca

SEQ ID NO: 99032 - DNA, 25 bp, Saccharomyces pastorianus
gaatccatttagctaggctcggtca

SEQ ID NO: 99033 - DNA, 25 bp, Saccharomyces pastorianus
gtttccagttggtttatcggcatcg

SEQ ID NO: 99034 - DNA, 25 bp, Saccharomyces pastorianus
gggatcctgtgctatcagacctaga

SEQ ID NO: 99035 - DNA, 25 bp, Saccharomyces pastorianus
tcggtcatcccatcgtcaacgatag

SEQ ID NO: 99036 - DNA, 25 bp, Saccharomyces pastorianus
gctgatgaaactgtcgtcgcttgta

SEQ ID NO: 99037 - DNA, 25 bp, Saccharomyces pastorianus
agcgcgatgcgttgctagccgcaga

SEQ ID NO: 99038 - DNA, 25 bp, Saccharomyces pastorianus
aagagcacaaatggagcagctagaa

SEQ ID NO: 99039 - DNA, 25 bp, Saccharomyces pastorianus
tgctagccgcagaggaggagcaact

SEQ ID NO: 99040 - DNA, 25 bp, Saccharomyces pastorianus
aaagattttcagaatccgccgcaaa

SEQ ID NO: 99041 - DNA, 25 bp, Saccharomyces pastorianus
caaggttcgaggaaagagaatgcca

SEQ ID NO: 99042 - DNA, 25 bp, Saccharomyces pastorianus
gattttcagaatccgccgcaaagaa

SEQ ID NO: 99043 - DNA, 25 bp, Saccharomyces pastorianus
gaaagcagctggcttagcaagaaaa

SEQ ID NO: 99044 - DNA, 25 bp, Saccharomyces pastorianus
aaaggagcgcgatgcgttgctagcc

SEQ ID NO: 99045 - DNA, 25 bp, Saccharomyces pastorianus
gcttctaaatgggaacaaggttcga

SEQ ID NO: 99046 - DNA, 25 bp, Saccharomyces pastorianus
agaaaaagagatcaggcacatgcta

SEQ ID NO: 99047 - DNA, 25 bp, Saccharomyces pastorianus
tccgccgcaaagaaagcagctggct

SEQ ID NO: 99048 - DNA, 25 bp, Saccharomyces pastorianus
ggaaacgtctagaatcctctccatt

SEQ ID NO: 99049 - DNA, 25 bp, Saccharomyces pastorianus
atgccaatccattataccatctctc

SEQ ID NO: 99050 - DNA, 25 bp, Saccharomyces pastorianus
gacggcgattttcaagaagccaaat

SEQ ID NO: 99051 - DNA, 25 bp, Saccharomyces pastorianus
atagccatattccagtatcctcaac

SEQ ID NO: 99052 - DNA, 25 bp, Saccharomyces pastorianus
gtatcctcaactgctaaggcatgtt

SEQ ID NO: 99053 - DNA, 25 bp, Saccharomyces pastorianus
tataccatctctctcacaaagtttc

SEQ ID NO: 99054 - DNA, 25 bp, Saccharomyces pastorianus
agaatcctctccattttatgccaat

SEQ ID NO: 99055 - DNA, 25 bp, Saccharomyces pastorianus
gaatctggctaaactactcaacaaa

SEQ ID NO: 99056 - DNA, 25 bp, Saccharomyces pastorianus
atgaaccaatagtctccgaacgaat

SEQ ID NO: 99057 - DNA, 25 bp, Saccharomyces pastorianus
caacagatgttgtggctcgaaatcc

SEQ ID NO: 99058 - DNA, 25 bp, Saccharomyces pastorianus
aattatgctagattgggttccgata

SEQ ID NO: 99059 - DNA, 25 bp, Saccharomyces pastorianus
gggatatgcacatgaacctccatta

SEQ ID NO: 99060 - DNA, 25 bp, Saccharomyces pastorianus
actgggcattttccatggtttgaac

SEQ ID NO: 99061 - DNA, 25 bp, Saccharomyces pastorianus
ggtattttacatgctctttcaacta

SEQ ID NO: 99062 - DNA, 25 bp, Saccharomyces pastorianus
ttgcctacccactgttgattttcta

SEQ ID NO: 99063 - DNA, 25 bp, Saccharomyces pastorianus
tttcaatacagcgtccatcttagga

SEQ ID NO: 99064 - DNA, 25 bp, Saccharomyces pastorianus
gtgtcgctttgtttggtaccatttc

SEQ ID NO: 99065 - DNA, 25 bp, Saccharomyces pastorianus
ttaggatactgctttttgcctctgt

SEQ ID NO: 99066 - DNA, 25 bp, Saccharomyces pastorianus
aagattgctaattgcctacccactg

SEQ ID NO: 99067 - DNA, 25 bp, Saccharomyces pastorianus
attcggactttttctattgatggct

SEQ ID NO: 99068 - DNA, 25 bp, Saccharomyces pastorianus
gctgggcctttgatattctttttgt

SEQ ID NO: 99069 - DNA, 25 bp, Saccharomyces pastorianus
tacttggacctcgtctggattttta

SEQ ID NO: 99070 - DNA, 25 bp, Saccharomyces pastorianus
gtgacttatgtcatggtatccacag

SEQ ID NO: 99071 - DNA, 25 bp, Saccharomyces pastorianus
ttgccagagagccaaacaccgttgt

SEQ ID NO: 99072 - DNA, 25 bp, Saccharomyces pastorianus
agaccaatttaaccgaacaggcaat

SEQ ID NO: 99073 - DNA, 25 bp, Saccharomyces pastorianus
gaaataattccactattggtgactt

SEQ ID NO: 99074 - DNA, 25 bp, Saccharomyces pastorianus
gtgcggcttaaaccacaggattgat

SEQ ID NO: 99075 - DNA, 25 bp, Saccharomyces pastorianus
acattctcctcagaagtgcggctta

SEQ ID NO: 99076 - DNA, 25 bp, Saccharomyces pastorianus
aatttggtaccagctgaacttgagt

SEQ ID NO: 99077 - DNA, 25 bp, Saccharomyces pastorianus
gctgaacttgagtcgtgtgtataca

SEQ ID NO: 99078 - DNA, 25 bp, Saccharomyces pastorianus
gggttcttctgccaaacattctcct

SEQ ID NO: 99079 - DNA, 25 bp, Saccharomyces pastorianus
gaccagtatttgatgatcctctagt

SEQ ID NO: 99080 - DNA, 25 bp, Saccharomyces pastorianus
ggaaaatgtaggcatcaggcttaat

SEQ ID NO: 99081 - DNA, 25 bp, Saccharomyces pastorianus
aaaaactacgtcagtcggagcagca

SEQ ID NO: 99082 - DNA, 25 bp, Saccharomyces pastorianus
cagtgcgcgataactcccagagagg

SEQ ID NO: 99083 - DNA, 25 bp, Saccharomyces pastorianus
ggatcagaaatgaactgtctcagct

SEQ ID NO: 99084 - DNA, 25 bp, Saccharomyces pastorianus
gccagctttccccagaattacgttt

SEQ ID NO: 99085 - DNA, 25 bp, Saccharomyces pastorianus
gcgggtttctgcttttcaagtacac

SEQ ID NO: 99086 - DNA, 25 bp, Saccharomyces pastorianus
gtcggagcagcaggctttgatgaaa

SEQ ID NO: 99087 - DNA, 25 bp, Saccharomyces pastorianus
gatcaacagttaatcagccagcttt

SEQ ID NO: 99088 - DNA, 25 bp, Saccharomyces pastorianus
tgatccaatttggaagacgggcccc

SEQ ID NO: 99089 - DNA, 25 bp, Saccharomyces pastorianus
agcagagatcactttgctaaggtga

SEQ ID NO: 99090 - DNA, 25 bp, Saccharomyces pastorianus
ggtctatgcaattggtggcgctatt

SEQ ID NO: 99091 - DNA, 25 bp, Saccharomyces pastorianus
gtacacaacgccaacagatcaacag

SEQ ID NO: 99092 - DNA, 25 bp, Saccharomyces pastorianus
gagctatacgaaggcccgctacggc

SEQ ID NO: 99093 - DNA, 25 bp, Saccharomyces pastorianus
tttgtggagcaaacgtttaggccga

SEQ ID NO: 99094 - DNA, 25 bp, Saccharomyces pastorianus
agagcttgcagaacgattcccattc

SEQ ID NO: 99095 - DNA, 25 bp, Saccharomyces pastorianus
taaatcccgaacgtagtacggcttg

SEQ ID NO: 99096 - DNA, 25 bp, Saccharomyces pastorianus
gaaccacgctcatgtccatgttcat

SEQ ID NO: 99097 - DNA, 25 bp, Saccharomyces pastorianus
gtttaggccgaacgcaaatctcaag

SEQ ID NO: 99098 - DNA, 25 bp, Saccharomyces pastorianus
tcaaggcgcctgcagactgcgagaa

SEQ ID NO: 99099 - DNA, 25 bp, Saccharomyces pastorianus
agcgacgcaaattcgccgatggttt

SEQ ID NO: 99100 - DNA, 25 bp, Saccharomyces pastorianus
gatacactgcttgccttttgtacga

SEQ ID NO: 99101 - DNA, 25 bp, Saccharomyces pastorianus
ccgctacggcagtatcgcattaaag

SEQ ID NO: 99102 - DNA, 25 bp, Saccharomyces pastorianus
gtccatgttcataccattcacgttt

SEQ ID NO: 99103 - DNA, 25 bp, Saccharomyces pastorianus
gaggcggtgcaatcatcagtaatac

SEQ ID NO: 99104 - DNA, 25 bp, Saccharomyces pastorianus
aagcgtgctttcttgtagccctgta

SEQ ID NO: 99105 - DNA, 25 bp, Saccharomyces pastorianus
aagtctcttctcgagtatgggttcg

SEQ ID NO: 99106 - DNA, 25 bp, Saccharomyces pastorianus
gatgtggctattccaagcaacgcaa

SEQ ID NO: 99107 - DNA, 25 bp, Saccharomyces pastorianus
tatctaatctcctcattcgacattc

SEQ ID NO: 99108 - DNA, 25 bp, Saccharomyces pastorianus
ggaggttcgcattacgcctatctaa

SEQ ID NO: 99109 - DNA, 25 bp, Saccharomyces pastorianus
gaccgctttttagaatcgtacgaca

SEQ ID NO: 99110 - DNA, 25 bp, Saccharomyces pastorianus
tgccaactcttatttgcaccagcaa

SEQ ID NO: 99111 - DNA, 25 bp, Saccharomyces pastorianus
gatttaatcttctcgcagtctgcag

SEQ ID NO: 99112 - DNA, 25 bp, Saccharomyces pastorianus
atgggaatcgttctgcaagctcttc

SEQ ID NO: 99113 - DNA, 25 bp, Saccharomyces pastorianus
aatatagacagccttcttgccaact

SEQ ID NO: 99114 - DNA, 25 bp, Saccharomyces pastorianus
ggcaatgcacagtcatggccatagt

SEQ ID NO: 99115 - DNA, 25 bp, Saccharomyces pastorianus
aatgttttatcacccatctatgcct

SEQ ID NO: 99116 - DNA, 25 bp, Saccharomyces pastorianus
actaggttccaacaacgccaattga

SEQ ID NO: 99117 - DNA, 25 bp, Saccharomyces pastorianus
aaattaccatcaaactagccaccat

SEQ ID NO: 99118 - DNA, 25 bp, Saccharomyces pastorianus
atgaatggctttgctgctgggtcaa

SEQ ID NO: 99119 - DNA, 25 bp, Saccharomyces pastorianus
ttttactgcgccaacctggttaaat

SEQ ID NO: 99120 - DNA, 25 bp, Saccharomyces pastorianus
atgtacatgccatttcaacctcagc

SEQ ID NO: 99121 - DNA, 25 bp, Saccharomyces pastorianus
gcaatgctgtgcctggtatgaatcc

SEQ ID NO: 99122 - DNA, 25 bp, Saccharomyces pastorianus
atgggaggtccatcggcatcaccaa

SEQ ID NO: 99123 - DNA, 25 bp, Saccharomyces pastorianus
ggaggaaatatttcgccccatgtcc

SEQ ID NO: 99124 - DNA, 25 bp, Saccharomyces pastorianus
tgcaggttttatggcagctggccct

SEQ ID NO: 99125 - DNA, 25 bp, Saccharomyces pastorianus
gggtcaaatgatttcggattcacat

SEQ ID NO: 99126 - DNA, 25 bp, Saccharomyces pastorianus
gaacctgatgttgaacgaccccata

SEQ ID NO: 99127 - DNA, 25 bp, Saccharomyces pastorianus
ggaagcaattctttcacgtgaacaa

SEQ ID NO: 99128 - DNA, 25 bp, Saccharomyces pastorianus
ctgatggcccagtaacttttagaaa

SEQ ID NO: 99129 - DNA, 25 bp, Saccharomyces pastorianus
aagaggtttttgtaccgcaccatga

SEQ ID NO: 99130 - DNA, 25 bp, Saccharomyces pastorianus
gatagccacgaattgaacctgatgt

SEQ ID NO: 99131 - DNA, 25 bp, Saccharomyces pastorianus
cgaccccataaaaagtacagccgat

SEQ ID NO: 99132 - DNA, 25 bp, Saccharomyces pastorianus
gatctgcatccagtacttaacaaag

SEQ ID NO: 99133 - DNA, 25 bp, Saccharomyces pastorianus
gatttatgcatcctgatggcccagt

SEQ ID NO: 99134 - DNA, 25 bp, Saccharomyces pastorianus
tactgtcgttgttaccttctttgaa

SEQ ID NO: 99135 - DNA, 25 bp, Saccharomyces pastorianus
aagacaggccaaatttccctctagg

SEQ ID NO: 99136 - DNA, 25 bp, Saccharomyces pastorianus
cagtgacatgtctaagtccgctacc

SEQ ID NO: 99137 - DNA, 25 bp, Saccharomyces pastorianus
actatgcttctatgttctggttgac

SEQ ID NO: 99138 - DNA, 25 bp, Saccharomyces pastorianus
gaatactactcaaactctttgccag

SEQ ID NO: 99139 - DNA, 25 bp, Saccharomyces pastorianus
tcatgcttgctatttgcccatttga

SEQ ID NO: 99140 - DNA, 25 bp, Saccharomyces pastorianus
ataaggctgctttcatcgagagatg

SEQ ID NO: 99141 - DNA, 25 bp, Saccharomyces pastorianus
gaaattgccaatttgcctgaagtca

SEQ ID NO: 99142 - DNA, 25 bp, Saccharomyces pastorianus
aatcattaccgaagccgtggaaatt

SEQ ID NO: 99143 - DNA, 25 bp, Saccharomyces pastorianus
aatttgtcgctgacggtctattaca

SEQ ID NO: 99144 - DNA, 25 bp, Saccharomyces pastorianus
tggatttccaacgatggcagcttgt

SEQ ID NO: 99145 - DNA, 25 bp, Saccharomyces pastorianus
agaggtgcctacactgacttttcat

SEQ ID NO: 99146 - DNA, 25 bp, Saccharomyces pastorianus
aaggaccctaagaacatccctctat

SEQ ID NO: 99147 - DNA, 25 bp, Saccharomyces pastorianus
acgatgcgtgcattgaccagtgttt

SEQ ID NO: 99148 - DNA, 25 bp, Saccharomyces pastorianus
gtgcattgaccagtgtttggctaaa

SEQ ID NO: 99149 - DNA, 25 bp, Saccharomyces pastorianus
ttcgccatacgctaccagaaacgat

SEQ ID NO: 99150 - DNA, 25 bp, Saccharomyces pastorianus
aattgctcaagaactggctgtggct

SEQ ID NO: 99151 - DNA, 25 bp, Saccharomyces pastorianus
gtctatcatctatctttggcggtgg

SEQ ID NO: 99152 - DNA, 25 bp, Saccharomyces pastorianus
ggcggtggtgcaccatcacaacaaa

SEQ ID NO: 99153 - DNA, 25 bp, Saccharomyces pastorianus
aaatgcttaacttcgccatacgcta

SEQ ID NO: 99154 - DNA, 25 bp, Saccharomyces pastorianus
aaaccctatagccaaggagctgaaa

SEQ ID NO: 99155 - DNA, 25 bp, Saccharomyces pastorianus
catatcaaaggcttacatctccaga

SEQ ID NO: 99156 - DNA, 25 bp, Saccharomyces pastorianus
tggctgtggctaatgcgactgaatt

SEQ ID NO: 99157 - DNA, 25 bp, Saccharomyces pastorianus
ggaagcagccactactgcaaagaca

SEQ ID NO: 99158 - DNA, 25 bp, Saccharomyces pastorianus
ttatccagttgccacaccacaaaag

SEQ ID NO: 99159 - DNA, 25 bp, Saccharomyces pastorianus
taaaatgtctgcctctgatccgaat

SEQ ID NO: 99160 - DNA, 25 bp, Saccharomyces pastorianus
gaatggtttactgtcatttgtccaa

SEQ ID NO: 99161 - DNA, 25 bp, Saccharomyces pastorianus
gtccaattacctacaaatccttcga

SEQ ID NO: 99162 - DNA, 25 bp, Saccharomyces pastorianus
gaaccctatggttccaggtttggct

SEQ ID NO: 99163 - DNA, 25 bp, Saccharomyces pastorianus
aggcgctactaagaccaacgagatt

SEQ ID NO: 99164 - DNA, 25 bp, Saccharomyces pastorianus
ttgtagccccggtaacgtcgaagag

SEQ ID NO: 99165 - DNA, 25 bp, Saccharomyces pastorianus
gaggcctccgaaaagggttatccag

SEQ ID NO: 99166 - DNA, 25 bp, Saccharomyces pastorianus
ggtacaaatcacttcgaattcttca

SEQ ID NO: 99167 - DNA, 25 bp, Saccharomyces pastorianus
gtactaagtacccaggcgctactaa

SEQ ID NO: 99168 - DNA, 25 bp, Saccharomyces pastorianus
aaattggtgttgctgacgctatcaa

SEQ ID NO: 99169 - DNA, 25 bp, Saccharomyces pastorianus
gagacaagtccgtttatccactagt

SEQ ID NO: 99170 - DNA, 25 bp, Saccharomyces pastorianus
tatccactagtgagggagctgcata

SEQ ID NO: 99171 - DNA, 25 bp, Saccharomyces pastorianus
gaagatatgttcaatttaccagatg

SEQ ID NO: 99172 - DNA, 25 bp, Saccharomyces pastorianus
ttttgcggatatctcgaggtttaaa

SEQ ID NO: 99173 - DNA, 25 bp, Saccharomyces pastorianus
atcctgctacctattgctagtgcta

SEQ ID NO: 99174 - DNA, 25 bp, Saccharomyces pastorianus
tttgctatgtacaacgcatgctgga

SEQ ID NO: 99175 - DNA, 25 bp, Saccharomyces pastorianus
agagacccgattcctgcaattatat

SEQ ID NO: 99176 - DNA, 25 bp, Saccharomyces pastorianus
aatacgatggagttgttcctatttc

SEQ ID NO: 99177 - DNA, 25 bp, Saccharomyces pastorianus
gatgaacttcaattattaccagagg

SEQ ID NO: 99178 - DNA, 25 bp, Saccharomyces pastorianus
aaacttgttaccttacatcctgcta

SEQ ID NO: 99179 - DNA, 25 bp, Saccharomyces pastorianus
aattccctatttgattctgaaactc

SEQ ID NO: 99180 - DNA, 25 bp, Saccharomyces pastorianus
tgcgggcaagccatggagttatgaa

SEQ ID NO: 99181 - DNA, 25 bp, Saccharomyces pastorianus
gatatgacactgttaccacctggaa

SEQ ID NO: 99182 - DNA, 25 bp, Saccharomyces pastorianus
gaacccctgggtgctcattatatgc

SEQ ID NO: 99183 - DNA, 25 bp, Saccharomyces pastorianus
gaaagccatctggaacagcacgcag

SEQ ID NO: 99184 - DNA, 25 bp, Saccharomyces pastorianus
gaacagcacgcagaaaatcacttaa

SEQ ID NO: 99185 - DNA, 25 bp, Saccharomyces pastorianus
atagaaacaatccagctgcagaatg

SEQ ID NO: 99186 - DNA, 25 bp, Saccharomyces pastorianus
tatggattagcaggcgtcatacatt

SEQ ID NO: 99187 - DNA, 25 bp, Saccharomyces pastorianus
gggcgttatatttgatttactgtta

SEQ ID NO: 99188 - DNA, 25 bp, Saccharomyces pastorianus
aatagcggtcaagcttccaatcaag

SEQ ID NO: 99189 - DNA, 25 bp, Saccharomyces pastorianus
agcaagattgctgggaaatgcgtgc

SEQ ID NO: 99190 - DNA, 25 bp, Saccharomyces pastorianus
caatcaagctttgccgatgactgaa

SEQ ID NO: 99191 - DNA, 25 bp, Saccharomyces pastorianus
gtagtagattctttttcattctcga

SEQ ID NO: 99192 - DNA, 25 bp, Saccharomyces pastorianus
ggcttgaatccgtcaactacatctg

SEQ ID NO: 99193 - DNA, 25 bp, Saccharomyces pastorianus
tattcctttttcaatgggtttctag

SEQ ID NO: 99194 - DNA, 25 bp, Saccharomyces pastorianus
gctctgtgtcttcattacgacggaa

SEQ ID NO: 99195 - DNA, 25 bp, Saccharomyces pastorianus
atgtcttcctgctctgtgtcttcat

SEQ ID NO: 99196 - DNA, 25 bp, Saccharomyces pastorianus
ggtgaatccttgctacttaatggaa

SEQ ID NO: 99197 - DNA, 25 bp, Saccharomyces pastorianus
actacatctgcccaatattcctttt

SEQ ID NO: 99198 - DNA, 25 bp, Saccharomyces pastorianus
tacgacggaagcgatctgaagaggt

SEQ ID NO: 99199 - DNA, 25 bp, Saccharomyces pastorianus
tatcgtttgtggtttggtttatgcc

SEQ ID NO: 99200 - DNA, 25 bp, Saccharomyces pastorianus
gaagtagccggcttgaatccgtcaa

SEQ ID NO: 99201 - DNA, 25 bp, Saccharomyces pastorianus
ggtttatgccaggtgaatccttgct

SEQ ID NO: 99202 - DNA, 25 bp, Saccharomyces pastorianus
gacttctctgttcccattaggtggt

SEQ ID NO: 99203 - DNA, 25 bp, Saccharomyces pastorianus
attacccttcatttctcaaactggc

SEQ ID NO: 99204 - DNA, 25 bp, Saccharomyces pastorianus
aggagccagcgcagaatcattcttt

SEQ ID NO: 99205 - DNA, 25 bp, Saccharomyces pastorianus
gagtgccttatctggtttatcgaca

SEQ ID NO: 99206 - DNA, 25 bp, Saccharomyces pastorianus
cttatagcatcgttttggacttctc

SEQ ID NO: 99207 - DNA, 25 bp, Saccharomyces pastorianus
ggtagaccaatgaacgctatcttgt

SEQ ID NO: 99208 - DNA, 25 bp, Saccharomyces pastorianus
atcctggtatggttttatcgttcta

SEQ ID NO: 99209 - DNA, 25 bp, Saccharomyces pastorianus
tggccattaatctttcccatattag

SEQ ID NO: 99210 - DNA, 25 bp, Saccharomyces pastorianus
ttatcgttctatttctggttcttat

SEQ ID NO: 99211 - DNA, 25 bp, Saccharomyces pastorianus
caaactggcgttaagggatcctggt

SEQ ID NO: 99212 - DNA, 25 bp, Saccharomyces pastorianus
ggtcgccatggctcatattggtaat

SEQ ID NO: 99213 - DNA, 25 bp, Saccharomyces pastorianus
gccgacaagccaaagattactcctg

SEQ ID NO: 99214 - DNA, 25 bp, Saccharomyces pastorianus
attttcgaggaccttgtcaccttga

SEQ ID NO: 99215 - DNA, 25 bp, Saccharomyces pastorianus
tgagcccaagagagccaagatttaa

SEQ ID NO: 99216 - DNA, 25 bp, Saccharomyces pastorianus
tgcctcatcagtaagacccgttgaa

SEQ ID NO: 99217 - DNA, 25 bp, Saccharomyces pastorianus
ttctcacacggaacaccactaatgg

SEQ ID NO: 99218 - DNA, 25 bp, Saccharomyces pastorianus
aagaagcttaccagttctcacacgg

SEQ ID NO: 99219 - DNA, 25 bp, Saccharomyces pastorianus
taacatgcaagacacgtacggtcaa

SEQ ID NO: 99220 - DNA, 25 bp, Saccharomyces pastorianus
agcaattagtgttccatgctcccgc

SEQ ID NO: 99221 - DNA, 25 bp, Saccharomyces pastorianus
ttaacaggttcagacgcgactgcct

SEQ ID NO: 99222 - DNA, 25 bp, Saccharomyces pastorianus
gaaatactttgaccctattttcgag

SEQ ID NO: 99223 - DNA, 25 bp, Saccharomyces pastorianus
cgcctctattccgtttgacaaactg

SEQ ID NO: 99224 - DNA, 25 bp, Saccharomyces pastorianus
tatccgtcgggctgtacgatactac

SEQ ID NO: 99225 - DNA, 25 bp, Saccharomyces pastorianus
taatcaacggtattaccctcgcttt

SEQ ID NO: 99226 - DNA, 25 bp, Saccharomyces pastorianus
tagagaacgttcttgccatcggcat

SEQ ID NO: 99227 - DNA, 25 bp, Saccharomyces pastorianus
gacggttcatcctacatggaacaag

SEQ ID NO: 99228 - DNA, 25 bp, Saccharomyces pastorianus
gatgccggtatatcaatgttcgatt

SEQ ID NO: 99229 - DNA, 25 bp, Saccharomyces pastorianus
gtcatgctgaatatctaccccagaa

SEQ ID NO: 99230 - DNA, 25 bp, Saccharomyces pastorianus
ttaccctcgctttaatagatgccgg

SEQ ID NO: 99231 - DNA, 25 bp, Saccharomyces pastorianus
ttgagatacaaacctccctggtgag

SEQ ID NO: 99232 - DNA, 25 bp, Saccharomyces pastorianus
gctgtacgatactaccccattatta

SEQ ID NO: 99233 - DNA, 25 bp, Saccharomyces pastorianus
atcggcatcgcaggtgctcataggg

SEQ ID NO: 99234 - DNA, 25 bp, Saccharomyces pastorianus
atcgagatccatgtccttgagcaag

SEQ ID NO: 99235 - DNA, 25 bp, Saccharomyces pastorianus
taagcagcatagtcacgttagggaa

SEQ ID NO: 99236 - DNA, 25 bp, Saccharomyces pastorianus
taccgatggacgcacaggaacaatt

SEQ ID NO: 99237 - DNA, 25 bp, Saccharomyces pastorianus
gggcagcagaataacttaccgaaat

SEQ ID NO: 99238 - DNA, 25 bp, Saccharomyces pastorianus
atactgtcattaatacggttgctag

SEQ ID NO: 99239 - DNA, 25 bp, Saccharomyces pastorianus
gaacagtaagacttcgcacgccggt

SEQ ID NO: 99240 - DNA, 25 bp, Saccharomyces pastorianus
aatgatttggcagcgcgcagtgcat

SEQ ID NO: 99241 - DNA, 25 bp, Saccharomyces pastorianus
atgcgaacgcggacgatttgagtaa

SEQ ID NO: 99242 - DNA, 25 bp, Saccharomyces pastorianus
agcgtccatgaacccagtactgaag

SEQ ID NO: 99243 - DNA, 25 bp, Saccharomyces pastorianus
agcgcgcagtgcatctttcaaaagt

SEQ ID NO: 99244 - DNA, 25 bp, Saccharomyces pastorianus
tcgcacgccggtaagatagaacagt

SEQ ID NO: 99245 - DNA, 25 bp, Saccharomyces pastorianus
aatcaaatttgccacctctaccgat

SEQ ID NO: 99246 - DNA, 25 bp, Saccharomyces pastorianus
tggtggtgccaatgaaaacgttctc

SEQ ID NO: 99247 - DNA, 25 bp, Saccharomyces pastorianus
tgccctccatacctgagtatttggt

SEQ ID NO: 99248 - DNA, 25 bp, Saccharomyces pastorianus
acggtattctcgtggcatgggttgc

SEQ ID NO: 99249 - DNA, 25 bp, Saccharomyces pastorianus
ttagttatagcttactgccctccat

SEQ ID NO: 99250 - DNA, 25 bp, Saccharomyces pastorianus
gcaatttttaggatcgatttcaccc

SEQ ID NO: 99251 - DNA, 25 bp, Saccharomyces pastorianus
atatttctgcttcattctacccaat

SEQ ID NO: 99252 - DNA, 25 bp, Saccharomyces pastorianus
ggttgccctcaatacatccttgatg

SEQ ID NO: 99253 - DNA, 25 bp, Saccharomyces pastorianus
tttccattggattctgtaccgtatc

SEQ ID NO: 99254 - DNA, 25 bp, Saccharomyces pastorianus
ataatgccaatccataatgccgtgg

SEQ ID NO: 99255 - DNA, 25 bp, Saccharomyces pastorianus
gggcaacttattttcttctttccat

SEQ ID NO: 99256 - DNA, 25 bp, Saccharomyces pastorianus
aggcttctaatttcctgggcaactt

SEQ ID NO: 99257 - DNA, 25 bp, Saccharomyces pastorianus
ggaagctaatcagggaggcctctcc

SEQ ID NO: 99258 - DNA, 25 bp, Saccharomyces pastorianus
aacgcctcccagtgaagatgacgac

SEQ ID NO: 99259 - DNA, 25 bp, Saccharomyces pastorianus
gattcaaacactaactcaacgcctc

SEQ ID NO: 99260 - DNA, 25 bp, Saccharomyces pastorianus
agacaggagctgaacgtttcttggt

SEQ ID NO: 99261 - DNA, 25 bp, Saccharomyces pastorianus
atacaagttccgattcagattcaaa

SEQ ID NO: 99262 - DNA, 25 bp, Saccharomyces pastorianus
cttcgaagtccgtgaaatcttgcta

SEQ ID NO: 99263 - DNA, 25 bp, Saccharomyces pastorianus
taccgctaagtcaccggatgacaat

SEQ ID NO: 99264 - DNA, 25 bp, Saccharomyces pastorianus
tacgggcgaaaactctaccgctaag

SEQ ID NO: 99265 - DNA, 25 bp, Saccharomyces pastorianus
cgcctccagagacttgtacttcgaa

SEQ ID NO: 99266 - DNA, 25 bp, Saccharomyces pastorianus
gaaccgatggtgtctctacaagtga

SEQ ID NO: 99267 - DNA, 25 bp, Saccharomyces pastorianus
ctccggctacagagtttgccaacga

SEQ ID NO: 99268 - DNA, 25 bp, Saccharomyces pastorianus
gagcgctgaacgtgattttccattg

SEQ ID NO: 99269 - DNA, 25 bp, Saccharomyces pastorianus
tacgctgagggagcctttccaggta

SEQ ID NO: 99270 - DNA, 25 bp, Saccharomyces pastorianus
attcgcgccttaagcaggatccgga

SEQ ID NO: 99271 - DNA, 25 bp, Saccharomyces pastorianus
gcttcggtcgcttgacacggcggaa

SEQ ID NO: 99272 - DNA, 25 bp, Saccharomyces pastorianus
ggatccggagtacttacgtgagcta

SEQ ID NO: 99273 - DNA, 25 bp, Saccharomyces pastorianus
gtaaagtacctggacccgactgaat

SEQ ID NO: 99274 - DNA, 25 bp, Saccharomyces pastorianus
aactttctcgctgtcgtctatgggt

SEQ ID NO: 99275 - DNA, 25 bp, Saccharomyces pastorianus
agaaggacacactactacgctgagg

SEQ ID NO: 99276 - DNA, 25 bp, Saccharomyces pastorianus
tcgcgctggcaatccgtatacggtg

SEQ ID NO: 99277 - DNA, 25 bp, Saccharomyces pastorianus
ttccattgtatgttatcgcagcagc

SEQ ID NO: 99278 - DNA, 25 bp, Saccharomyces pastorianus
aaggacggatggcactacgcctatt

SEQ ID NO: 99279 - DNA, 25 bp, Saccharomyces pastorianus
tgctggatacttatacgctcttgcc

SEQ ID NO: 99280 - DNA, 25 bp, Saccharomyces pastorianus
aaaggtgccgcaaacatgtgtaaac

SEQ ID NO: 99281 - DNA, 25 bp, Saccharomyces pastorianus
tatgacgttaactcctccgttgaag

SEQ ID NO: 99282 - DNA, 25 bp, Saccharomyces pastorianus
gaagccgtaacctctaaccattggg

SEQ ID NO: 99283 - DNA, 25 bp, Saccharomyces pastorianus
ttggccaaggccgtcatcgaagctt

SEQ ID NO: 99284 - DNA, 25 bp, Saccharomyces pastorianus
gaagcttccaaccaaccagtggact

SEQ ID NO: 99285 - DNA, 25 bp, Saccharomyces pastorianus
tccccgtcgttgtcgcaattaacaa

SEQ ID NO: 99286 - DNA, 25 bp, Saccharomyces pastorianus
gtggacttccatttcctatatgacg

SEQ ID NO: 99287 - DNA, 25 bp, Saccharomyces pastorianus
gtaacttgccaatttgtatcgccaa

SEQ ID NO: 99288 - DNA, 25 bp, Saccharomyces pastorianus
aaccattcctggtttggctacctat

SEQ ID NO: 99289 - DNA, 25 bp, Saccharomyces pastorianus
aaagccgctttggaagctggtgcat

SEQ ID NO: 99290 - DNA, 25 bp, Saccharomyces pastorianus
cctttgtgtcttatgtatatcttcg

SEQ ID NO: 99291 - DNA, 25 bp, Saccharomyces pastorianus
tcgttccgcccaaatattgtgctag

SEQ ID NO: 99292 - DNA, 25 bp, Saccharomyces pastorianus
gtgtcttatgtatatcttcgttatt

SEQ ID NO: 99293 - DNA, 25 bp, Saccharomyces pastorianus
gtatatcttcgttattttatttcgt

SEQ ID NO: 99294 - DNA, 25 bp, Saccharomyces pastorianus
atggaacgctttttcctttgtgtct

SEQ ID NO: 99295 - DNA, 25 bp, Saccharomyces pastorianus
ttgtgtcttatgtatatcttcgtta

SEQ ID NO: 99296 - DNA, 25 bp, Saccharomyces pastorianus
tgcgatggaacgctttttcctttgt

SEQ ID NO: 99297 - DNA, 25 bp, Saccharomyces pastorianus
tttcgttccgcccaaatattgtgct

SEQ ID NO: 99298 - DNA, 25 bp, Saccharomyces pastorianus
tttcctttgtgtcttatgtatatct

SEQ ID NO: 99299 - DNA, 25 bp, Saccharomyces pastorianus
gatggaacgctttttcctttgtgtc

SEQ ID NO: 99300 - DNA, 25 bp, Saccharomyces pastorianus
gttccgcccaaatattgtgctagcc

SEQ ID NO: 99301 - DNA, 25 bp, Saccharomyces pastorianus
ttgaagaactcctacggcgtattcc

SEQ ID NO: 99302 - DNA, 25 bp, Saccharomyces pastorianus
gggacttattatgcccttggtacga

SEQ ID NO: 99303 - DNA, 25 bp, Saccharomyces pastorianus
atgcccttggtacgaagaatgtgac

SEQ ID NO: 99304 - DNA, 25 bp, Saccharomyces pastorianus
agcgctacaaccaacaagggactta

SEQ ID NO: 99305 - DNA, 25 bp, Saccharomyces pastorianus
cgtattcccctctacaacaaatatg

SEQ ID NO: 99306 - DNA, 25 bp, Saccharomyces pastorianus
caatatcaccaaagtctgtcagtta

SEQ ID NO: 99307 - DNA, 25 bp, Saccharomyces pastorianus
gtctgtcagttacatgattcttcta

SEQ ID NO: 99308 - DNA, 25 bp, Saccharomyces pastorianus
tgaatttaagttaccagcgctacaa

SEQ ID NO: 99309 - DNA, 25 bp, Saccharomyces pastorianus
tcgaccagtggtacaaggagcaata

SEQ ID NO: 99310 - DNA, 25 bp, Saccharomyces pastorianus
ggattttccacaagaaacagtgact

SEQ ID NO: 99311 - DNA, 25 bp, Saccharomyces pastorianus
agtgactaggtttcagatgcctgaa

SEQ ID NO: 99312 - DNA, 25 bp, Saccharomyces pastorianus
gagtgaaacccttctgcaactatgt

SEQ ID NO: 99313 - DNA, 25 bp, Saccharomyces pastorianus
ggatcgcatggaacgccaagccaaa

SEQ ID NO: 99314 - DNA, 25 bp, Saccharomyces pastorianus
aaaattgcaagctcgctgttttaag

SEQ ID NO: 99315 - DNA, 25 bp, Saccharomyces pastorianus
gaggtcatcgaattgattgccgctt

SEQ ID NO: 99316 - DNA, 25 bp, Saccharomyces pastorianus
taagcggtggttttattcagtttgc

SEQ ID NO: 99317 - DNA, 25 bp, Saccharomyces pastorianus
aacactgggtcctattgtagacgga

SEQ ID NO: 99318 - DNA, 25 bp, Saccharomyces pastorianus
ctaccgccgggtttgggatcgcatg

SEQ ID NO: 99319 - DNA, 25 bp, Saccharomyces pastorianus
aaggcctccaagtcgatacactata

SEQ ID NO: 99320 - DNA, 25 bp, Saccharomyces pastorianus
gattgccgcttatgctggtgttgaa

SEQ ID NO: 99321 - DNA, 25 bp, Saccharomyces pastorianus
ttcagtttgccggttttatcaagga

SEQ ID NO: 99322 - DNA, 25 bp, Saccharomyces pastorianus
gtgacggtggtaacgacctgccagc

SEQ ID NO: 99323 - DNA, 25 bp, Saccharomyces pastorianus
atgcctaccctgatcttctacaagg

SEQ ID NO: 99324 - DNA, 25 bp, Saccharomyces pastorianus
gaacaatattctgatgctgcttttt

SEQ ID NO: 99325 - DNA, 25 bp, Saccharomyces pastorianus
gatgaagtctcagatgttgctcaaa

SEQ ID NO: 99326 - DNA, 25 bp, Saccharomyces pastorianus
aggttaccagagtcgtcggtgccaa

SEQ ID NO: 99327 - DNA, 25 bp, Saccharomyces pastorianus
atccgcttctgaatacgacagtgct

SEQ ID NO: 99328 - DNA, 25 bp, Saccharomyces pastorianus
cctgatcttctacaagggcggtaag

SEQ ID NO: 99329 - DNA, 25 bp, Saccharomyces pastorianus
tggcgacaagttagtcgttgttgac

SEQ ID NO: 99330 - DNA, 25 bp, Saccharomyces pastorianus
agtcgttgttgacttttttgccaca

SEQ ID NO: 99331 - DNA, 25 bp, Saccharomyces pastorianus
gatgctgctttttacaagttggatg

SEQ ID NO: 99332 - DNA, 25 bp, Saccharomyces pastorianus
cagtgctttagcatctggcgacaag

SEQ ID NO: 99333 - DNA, 25 bp, Saccharomyces pastorianus
aagctgaagtttcttccatgcctac

SEQ ID NO: 99334 - DNA, 25 bp, Saccharomyces pastorianus
tgaccaccctgacgccgataaaaat

SEQ ID NO: 99335 - DNA, 25 bp, Saccharomyces pastorianus
gcagcaacggacattcttggtctaa

SEQ ID NO: 99336 - DNA, 25 bp, Saccharomyces pastorianus
acatccagacttttacgggtggcaa

SEQ ID NO: 99337 - DNA, 25 bp, Saccharomyces pastorianus
atcactcgagtggtcaagtccttta

SEQ ID NO: 99338 - DNA, 25 bp, Saccharomyces pastorianus
gcgaggaacccctgttggcaaagtt

SEQ ID NO: 99339 - DNA, 25 bp, Saccharomyces pastorianus
gttgacacatttgaggacgagccag

SEQ ID NO: 99340 - DNA, 25 bp, Saccharomyces pastorianus
gaagaaagtcttgttgagcccggta

SEQ ID NO: 99341 - DNA, 25 bp, Saccharomyces pastorianus
ggcgaggtcaccattgcaagcattg

SEQ ID NO: 99342 - DNA, 25 bp, Saccharomyces pastorianus
ctacgggtgttgttcaggttctgca

SEQ ID NO: 99343 - DNA, 25 bp, Saccharomyces pastorianus
gagggcacggaatttgttgacacat

SEQ ID NO: 99344 - DNA, 25 bp, Saccharomyces pastorianus
gtatcctgacaccaaagctgtactg

SEQ ID NO: 99345 - DNA, 25 bp, Saccharomyces pastorianus
gttggccgggtcgtacatacaaaat

SEQ ID NO: 99346 - DNA, 25 bp, Saccharomyces pastorianus
gaagcaacgaaagcccgctgggtag

SEQ ID NO: 99347 - DNA, 25 bp, Saccharomyces pastorianus
ggccatcgctgggaaagtcaagttc

SEQ ID NO: 99348 - DNA, 25 bp, Saccharomyces pastorianus
actagaatcccgtattttcactcaa

SEQ ID NO: 99349 - DNA, 25 bp, Saccharomyces pastorianus
gatgcagctgacttgtcccgtgata

SEQ ID NO: 99350 - DNA, 25 bp, Saccharomyces pastorianus
gacggtctgcgatcattgtggttat

SEQ ID NO: 99351 - DNA, 25 bp, Saccharomyces pastorianus
ttcactcaaacttcggattccatgg

SEQ ID NO: 99352 - DNA, 25 bp, Saccharomyces pastorianus
gaagccagtaaatatcccacacttt

SEQ ID NO: 99353 - DNA, 25 bp, Saccharomyces pastorianus
gtcattatcatgtcgacggtctgcg

SEQ ID NO: 99354 - DNA, 25 bp, Saccharomyces pastorianus
gtggtgccatccctgacaaaggaag

SEQ ID NO: 99355 - DNA, 25 bp, Saccharomyces pastorianus
gacgccaccgacatcgaaaacttta

SEQ ID NO: 99356 - DNA, 25 bp, Saccharomyces pastorianus
agctcgccgtgggaaattttattgc

SEQ ID NO: 99357 - DNA, 25 bp, Saccharomyces pastorianus
ggaggttatttcttctcaacaatac

SEQ ID NO: 99358 - DNA, 25 bp, Saccharomyces pastorianus
taacggaccttcttccacatttgaa

SEQ ID NO: 99359 - DNA, 25 bp, Saccharomyces pastorianus
ttgacttcccttttaggtgccctgg

SEQ ID NO: 99360 - DNA, 25 bp, Saccharomyces pastorianus
aagcgtaatctctactcctggtaac

SEQ ID NO: 99361 - DNA, 25 bp, Saccharomyces pastorianus
gaaagccttttgaacgagtcttgaa

SEQ ID NO: 99362 - DNA, 25 bp, Saccharomyces pastorianus
ggatgctacattcaacgagccgcaa

SEQ ID NO: 99363 - DNA, 25 bp, Saccharomyces pastorianus
taccttcagatgataagctcgccgt

SEQ ID NO: 99364 - DNA, 25 bp, Saccharomyces pastorianus
ggaatatgggatatcgcttctcaaa

SEQ ID NO: 99365 - DNA, 25 bp, Saccharomyces pastorianus
atagctgcacatgagtataccggat

SEQ ID NO: 99366 - DNA, 25 bp, Saccharomyces pastorianus
gatgcatgcaacaccagtttaccgt

SEQ ID NO: 99367 - DNA, 25 bp, Saccharomyces pastorianus
caattggtggtgctatgatgtctaa

SEQ ID NO: 99368 - DNA, 25 bp, Saccharomyces pastorianus
ggtgacaagtgcatcttctggttct

SEQ ID NO: 99369 - DNA, 25 bp, Saccharomyces pastorianus
tcagcaagatttgacggcaccgact

SEQ ID NO: 99370 - DNA, 25 bp, Saccharomyces pastorianus
tgcctcgcacgagtggtatctttat

SEQ ID NO: 99371 - DNA, 25 bp, Saccharomyces pastorianus
ggcaccgactatcctgacgttgagg

SEQ ID NO: 99372 - DNA, 25 bp, Saccharomyces pastorianus
tagaatggctactctgctgttcgca

SEQ ID NO: 99373 - DNA, 25 bp, Saccharomyces pastorianus
gtggcgttcccactaattaacattt

SEQ ID NO: 99374 - DNA, 25 bp, Saccharomyces pastorianus
atcttctggttctcatctcgttaca

SEQ ID NO: 99375 - DNA, 25 bp, Saccharomyces pastorianus
gatggtttaccaatgtttttactcg

SEQ ID NO: 99376 - DNA, 25 bp, Saccharomyces pastorianus
ttaggtcgatcgtcagagctgttga

SEQ ID NO: 99377 - DNA, 25 bp, Saccharomyces pastorianus
ggcgatgtaggcagtcttctattac

SEQ ID NO: 99378 - DNA, 25 bp, Saccharomyces pastorianus
gaggagcaatatcgattatctatgg

SEQ ID NO: 99379 - DNA, 25 bp, Saccharomyces pastorianus
aggcgagactcctaaaagtagcaga

SEQ ID NO: 99380 - DNA, 25 bp, Saccharomyces pastorianus
ggcaatccggatatcctgaagttca

SEQ ID NO: 99381 - DNA, 25 bp, Saccharomyces pastorianus
attgaatttgtagaccttgaggagc

SEQ ID NO: 99382 - DNA, 25 bp, Saccharomyces pastorianus
aggtgctcctaagaagatgaagaag

SEQ ID NO: 99383 - DNA, 25 bp, Saccharomyces pastorianus
gatcaaaatttcaacccatcaggta

SEQ ID NO: 99384 - DNA, 25 bp, Saccharomyces pastorianus
aatgagcgattaaagggcccttctg

SEQ ID NO: 99385 - DNA, 25 bp, Saccharomyces pastorianus
taaagggcccttctgtggcaagcta

SEQ ID NO: 99386 - DNA, 25 bp, Saccharomyces pastorianus
gtggcaagctactacggcaatccgg

SEQ ID NO: 99387 - DNA, 25 bp, Saccharomyces pastorianus
gaacgtaccaaaggcgagactccta

SEQ ID NO: 99388 - DNA, 25 bp, Saccharomyces pastorianus
accggttctaagattctaaatgagc

SEQ ID NO: 99389 - DNA, 25 bp, Saccharomyces pastorianus
tattctagtgttcttgactcccaca

SEQ ID NO: 99390 - DNA, 25 bp, Saccharomyces pastorianus
ggctagtctttttaacctgttctgc

SEQ ID NO: 99391 - DNA, 25 bp, Saccharomyces pastorianus
gatcctaaacgtctacccggtggca

SEQ ID NO: 99392 - DNA, 25 bp, Saccharomyces pastorianus
aattgagctcaaaaccacggtttct

SEQ ID NO: 99393 - DNA, 25 bp, Saccharomyces pastorianus
aaccattttccattgttcgcattat

SEQ ID NO: 99394 - DNA, 25 bp, Saccharomyces pastorianus
atgttctttattcttcactgcctag

SEQ ID NO: 99395 - DNA, 25 bp, Saccharomyces pastorianus
atttctcgtttgctactgtacgaaa

SEQ ID NO: 99396 - DNA, 25 bp, Saccharomyces pastorianus
gactcccacagtgatggcattctat

SEQ ID NO: 99397 - DNA, 25 bp, Saccharomyces pastorianus
tctcggaggctgtgattgcactcat

SEQ ID NO: 99398 - DNA, 25 bp, Saccharomyces pastorianus
acccggtggcatttcaattgagctc

SEQ ID NO: 99399 - DNA, 25 bp, Saccharomyces pastorianus
ttcactgcctagtaagccattgagt

SEQ ID NO: 99400 - DNA, 25 bp, Saccharomyces pastorianus
gtttcccatatgaccaggcatcttt

SEQ ID NO: 99401 - DNA, 25 bp, Saccharomyces pastorianus
aggcatctttcttcctggcagtacc

SEQ ID NO: 99402 - DNA, 25 bp, Saccharomyces pastorianus
gttttgaccataagaaccaccgtgt

SEQ ID NO: 99403 - DNA, 25 bp, Saccharomyces pastorianus
gaaccaccgtgtctatgcataatag

SEQ ID NO: 99404 - DNA, 25 bp, Saccharomyces pastorianus
aacattattttcatcgtcgactttc

SEQ ID NO: 99405 - DNA, 25 bp, Saccharomyces pastorianus
gatagtaacatgctcgtttcccata

SEQ ID NO: 99406 - DNA, 25 bp, Saccharomyces pastorianus
gaaactgtttttgggcccagccaca

SEQ ID NO: 99407 - DNA, 25 bp, Saccharomyces pastorianus
tcaaacccttgaatccatacctttt

SEQ ID NO: 99408 - DNA, 25 bp, Saccharomyces pastorianus
gccacagagcctttaacccaaataa

SEQ ID NO: 99409 - DNA, 25 bp, Saccharomyces pastorianus
ctacctgggtcttggttttgaccat

SEQ ID NO: 99410 - DNA, 25 bp, Saccharomyces pastorianus
aatacttatacgttttatgctcaag

SEQ ID NO: 99411 - DNA, 25 bp, Saccharomyces pastorianus
gaaatgttttacagttcgcctacga

SEQ ID NO: 99412 - DNA, 25 bp, Saccharomyces pastorianus
acaaccgccgtcaacgttatcaaat

SEQ ID NO: 99413 - DNA, 25 bp, Saccharomyces pastorianus
ttcgcattccttgacgtcattcaaa

SEQ ID NO: 99414 - DNA, 25 bp, Saccharomyces pastorianus
tgaccaacccatcagaactttctat

SEQ ID NO: 99415 - DNA, 25 bp, Saccharomyces pastorianus
gaaacctcgctataagcctgcagga

SEQ ID NO: 99416 - DNA, 25 bp, Saccharomyces pastorianus
aattcatttattccacctcttcgca

SEQ ID NO: 99417 - DNA, 25 bp, Saccharomyces pastorianus
ggatgacactgacatcttgcagcct

SEQ ID NO: 99418 - DNA, 25 bp, Saccharomyces pastorianus
aacatcatcttctttatcacaaccg

SEQ ID NO: 99419 - DNA, 25 bp, Saccharomyces pastorianus
taaaggcccaatatctccctggtaa

SEQ ID NO: 99420 - DNA, 25 bp, Saccharomyces pastorianus
tggtaactcatccactacaacatca

SEQ ID NO: 99421 - DNA, 25 bp, Saccharomyces pastorianus
gaacatcggagatttgcctacgcct

SEQ ID NO: 99422 - DNA, 25 bp, Saccharomyces pastorianus
gggaccctaaatacttccagttcag

SEQ ID NO: 99423 - DNA, 25 bp, Saccharomyces pastorianus
gcatgacgcctaccgctttaaaaga

SEQ ID NO: 99424 - DNA, 25 bp, Saccharomyces pastorianus
gaattcactaccaatcagttacgga

SEQ ID NO: 99425 - DNA, 25 bp, Saccharomyces pastorianus
gatgcagctgactattcgctcgaaa

SEQ ID NO: 99426 - DNA, 25 bp, Saccharomyces pastorianus
ggctaaagagctattgaccctgtca

SEQ ID NO: 99427 - DNA, 25 bp, Saccharomyces pastorianus
ccagttcagggatcagtattacgtg

SEQ ID NO: 99428 - DNA, 25 bp, Saccharomyces pastorianus
tacggagtatccttgattcggtgga

SEQ ID NO: 99429 - DNA, 25 bp, Saccharomyces pastorianus
aacgcattccgatcatctgagcaat

SEQ ID NO: 99430 - DNA, 25 bp, Saccharomyces pastorianus
aatgagcttgactttcagttgatga

SEQ ID NO: 99431 - DNA, 25 bp, Saccharomyces pastorianus
atacccactaaattacggtcgcacg

SEQ ID NO: 99432 - DNA, 25 bp, Saccharomyces pastorianus
tctttcgaaaactcgcatgacgcct

SEQ ID NO: 99433 - DNA, 25 bp, Saccharomyces pastorianus
gagatgagtttcagccccaatggta

SEQ ID NO: 99434 - DNA, 25 bp, Saccharomyces pastorianus
agaattggctggtgtcaagactcta

SEQ ID NO: 99435 - DNA, 25 bp, Saccharomyces pastorianus
ctgtgtggtcgatatgcaatgctca

SEQ ID NO: 99436 - DNA, 25 bp, Saccharomyces pastorianus
ggttcgagccatcccttgaaaaatt

SEQ ID NO: 99437 - DNA, 25 bp, Saccharomyces pastorianus
gaccactctcgtgccaatggttcga

SEQ ID NO: 99438 - DNA, 25 bp, Saccharomyces pastorianus
atggtagtaagttggccgtattgtc

SEQ ID NO: 99439 - DNA, 25 bp, Saccharomyces pastorianus
agaacccaatctttgacgctcatag

SEQ ID NO: 99440 - DNA, 25 bp, Saccharomyces pastorianus
cagaaacgaatacgccagaccactc

SEQ ID NO: 99441 - DNA, 25 bp, Saccharomyces pastorianus
gttccgtccagggtacacttataag

SEQ ID NO: 99442 - DNA, 25 bp, Saccharomyces pastorianus
aaatcagcgggtgagcccaccagat

SEQ ID NO: 99443 - DNA, 25 bp, Saccharomyces pastorianus
aagaatcttcagtacgcataacggt

SEQ ID NO: 99444 - DNA, 25 bp, Saccharomyces pastorianus
tatctctcatttttgctgtttctgc

SEQ ID NO: 99445 - DNA, 25 bp, Saccharomyces pastorianus
gctcacatcggccttttgatattac

SEQ ID NO: 99446 - DNA, 25 bp, Saccharomyces pastorianus
agaccaatttcgatggctctcattc

SEQ ID NO: 99447 - DNA, 25 bp, Saccharomyces pastorianus
aatttacaatgattccgcctggaga

SEQ ID NO: 99448 - DNA, 25 bp, Saccharomyces pastorianus
gaagagcccaacttttcgatcagat

SEQ ID NO: 99449 - DNA, 25 bp, Saccharomyces pastorianus
gaatctctcactgacgtcttttata

SEQ ID NO: 99450 - DNA, 25 bp, Saccharomyces pastorianus
taatgccaataactctgctcacatc

SEQ ID NO: 99451 - DNA, 25 bp, Saccharomyces pastorianus
ctgttttcagtgctgctgctatcaa

SEQ ID NO: 99452 - DNA, 25 bp, Saccharomyces pastorianus
ggaggtgtcatctctaacactgttt

SEQ ID NO: 99453 - DNA, 25 bp, Saccharomyces pastorianus
ggttgcttgcattatttctacagtc

SEQ ID NO: 99454 - DNA, 25 bp, Saccharomyces pastorianus
ttggcacaaagttccatgctcgctt

SEQ ID NO: 99455 - DNA, 25 bp, Saccharomyces pastorianus
tatattgccctatttcttttggaga

SEQ ID NO: 99456 - DNA, 25 bp, Saccharomyces pastorianus
aatctatcatttctccactttcgca

SEQ ID NO: 99457 - DNA, 25 bp, Saccharomyces pastorianus
cctgcagctgcgaacctttgataaa

SEQ ID NO: 99458 - DNA, 25 bp, Saccharomyces pastorianus
ggttcatgctcttcaatgtcgttac

SEQ ID NO: 99459 - DNA, 25 bp, Saccharomyces pastorianus
tacacgttctacctcttcagaagat

SEQ ID NO: 99460 - DNA, 25 bp, Saccharomyces pastorianus
ggccttaataacgtgcaccatggta

SEQ ID NO: 99461 - DNA, 25 bp, Saccharomyces pastorianus
ttgaagtgatgagacccaaccagct

SEQ ID NO: 99462 - DNA, 25 bp, Saccharomyces pastorianus
gaacctcgttactatatattgccct

SEQ ID NO: 99463 - DNA, 25 bp, Saccharomyces pastorianus
taactatcgttccatcacccttatt

SEQ ID NO: 99464 - DNA, 25 bp, Saccharomyces pastorianus
gttatcttttccaaggtctcatttc

SEQ ID NO: 99465 - DNA, 25 bp, Saccharomyces pastorianus
gacacatgtatcgtggacggcctta

SEQ ID NO: 99466 - DNA, 25 bp, Saccharomyces pastorianus
gtcgccgtcagacaatttgctttca

SEQ ID NO: 99467 - DNA, 25 bp, Saccharomyces pastorianus
gacatgtgcaaagcattgccttcat

SEQ ID NO: 99468 - DNA, 25 bp, Saccharomyces pastorianus
atacgtctgtgtcttgcaccaagag

SEQ ID NO: 99469 - DNA, 25 bp, Saccharomyces pastorianus
aggcaaaaatttgcgtcgccgtcag

SEQ ID NO: 99470 - DNA, 25 bp, Saccharomyces pastorianus
attggcatcccaagatatagtgaca

SEQ ID NO: 99471 - DNA, 25 bp, Saccharomyces pastorianus
aacttgaacacgcaacttaggcaaa

SEQ ID NO: 99472 - DNA, 25 bp, Saccharomyces pastorianus
ttgccttcatcgacaggtattcaag

SEQ ID NO: 99473 - DNA, 25 bp, Saccharomyces pastorianus
gagtcttaaagttgcgcataacacg

SEQ ID NO: 99474 - DNA, 25 bp, Saccharomyces pastorianus
tcatacggcggattggcatcccaag

SEQ ID NO: 99475 - DNA, 25 bp, Saccharomyces pastorianus
aatcgcaacccaaaacactggagtt

SEQ ID NO: 99476 - DNA, 25 bp, Saccharomyces pastorianus
aaacttttctcagccaaatcgcaac

SEQ ID NO: 99477 - DNA, 25 bp, Saccharomyces pastorianus
ggaaaagtcacctgcgcatgccgat

SEQ ID NO: 99478 - DNA, 25 bp, Saccharomyces pastorianus
gttccattggtgttactatcgtctg

SEQ ID NO: 99479 - DNA, 25 bp, Saccharomyces pastorianus
acgacgctttaagacactactctct

SEQ ID NO: 99480 - DNA, 25 bp, Saccharomyces pastorianus
ggccaatttactggattcaatcttc

SEQ ID NO: 99481 - DNA, 25 bp, Saccharomyces pastorianus
gttacaccacttttagctatgttag

SEQ ID NO: 99482 - DNA, 25 bp, Saccharomyces pastorianus
ttttcctgcaggattagtctctgaa

SEQ ID NO: 99483 - DNA, 25 bp, Saccharomyces pastorianus
aaattaagcttagtgctccggctgg

SEQ ID NO: 99484 - DNA, 25 bp, Saccharomyces pastorianus
actctctttgttctgcttcaactaa

SEQ ID NO: 99485 - DNA, 25 bp, Saccharomyces pastorianus
acacttgcggctctgtagcttttat

SEQ ID NO: 99486 - DNA, 25 bp, Saccharomyces pastorianus
ctgaaccactgattgatgctgcatt

SEQ ID NO: 99487 - DNA, 25 bp, Saccharomyces pastorianus
ctccggctggtgatttcgcaataaa

SEQ ID NO: 99488 - DNA, 25 bp, Saccharomyces pastorianus
tagtaaaatgctgtactccaccgcc

SEQ ID NO: 99489 - DNA, 25 bp, Saccharomyces pastorianus
aagacgcttcgacagcaacgccaag

SEQ ID NO: 99490 - DNA, 25 bp, Saccharomyces pastorianus
gttccgcagttctcgtctatgaaga

SEQ ID NO: 99491 - DNA, 25 bp, Saccharomyces pastorianus
aattacgagtcacagcagcgcctga

SEQ ID NO: 99492 - DNA, 25 bp, Saccharomyces pastorianus
cgagttattctcgtccaacaacggg

SEQ ID NO: 99493 - DNA, 25 bp, Saccharomyces pastorianus
gattccagtgattgggttccgcagt

SEQ ID NO: 99494 - DNA, 25 bp, Saccharomyces pastorianus
ggtacgagcccataacacgtcggga

SEQ ID NO: 99495 - DNA, 25 bp, Saccharomyces pastorianus
tttcctcctctgtcgaatcaaaact

SEQ ID NO: 99496 - DNA, 25 bp, Saccharomyces pastorianus
gtttcaattcgacgcggagttccaa

SEQ ID NO: 99497 - DNA, 25 bp, Saccharomyces pastorianus
aaagacaagttgcacttacccacct

SEQ ID NO: 99498 - DNA, 25 bp, Saccharomyces pastorianus
gggacaacccaacggatgcgtttca

SEQ ID NO: 99499 - DNA, 25 bp, Saccharomyces pastorianus
attgttggctgacatcatctctgaa

SEQ ID NO: 99500 - DNA, 25 bp, Saccharomyces pastorianus
aatgaagcttctccaaacactgacg

SEQ ID NO: 99501 - DNA, 25 bp, Saccharomyces pastorianus
aagcttctagcgtatatagcactca

SEQ ID NO: 99502 - DNA, 25 bp, Saccharomyces pastorianus
gattcaagttcgatactcacggtga

SEQ ID NO: 99503 - DNA, 25 bp, Saccharomyces pastorianus
gtgacatcctgtccggtagattaaa

SEQ ID NO: 99504 - DNA, 25 bp, Saccharomyces pastorianus
accgcttccagatttgctgtcaaat

SEQ ID NO: 99505 - DNA, 25 bp, Saccharomyces pastorianus
atcttctaaagaccgtgtcaccgct

SEQ ID NO: 99506 - DNA, 25 bp, Saccharomyces pastorianus
gtaccaactgttgagcacgaagatg

SEQ ID NO: 99507 - DNA, 25 bp, Saccharomyces pastorianus
gggttttgaagttcactgggctgaa

SEQ ID NO: 99508 - DNA, 25 bp, Saccharomyces pastorianus
gtttaatcactggtgctgtttccgt

SEQ ID NO: 99509 - DNA, 25 bp, Saccharomyces pastorianus
tgctgtttccgtgtacactccagaa

SEQ ID NO: 99510 - DNA, 25 bp, Saccharomyces pastorianus
gcatgcctggtacaatctacgggtt

SEQ ID NO: 99511 - DNA, 25 bp, Saccharomyces pastorianus
gtaccatacatataacctcatctat

SEQ ID NO: 99512 - DNA, 25 bp, Saccharomyces pastorianus
gaaaaacatatcgagattcctcaat

SEQ ID NO: 99513 - DNA, 25 bp, Saccharomyces pastorianus
ctttggcatgcctggtacaatctac

SEQ ID NO: 99514 - DNA, 25 bp, Saccharomyces pastorianus
aatctacgggttacagccatcgttg

SEQ ID NO: 99515 - DNA, 25 bp, Saccharomyces pastorianus
gatctaactaactttggcatgcctg

SEQ ID NO: 99516 - DNA, 25 bp, Saccharomyces pastorianus
gggttacagccatcgttgaaaacga

SEQ ID NO: 99517 - DNA, 25 bp, Saccharomyces pastorianus
tttaccctgatctaactaactttgg

SEQ ID NO: 99518 - DNA, 25 bp, Saccharomyces pastorianus
aacctcatctataatttttaccctg

SEQ ID NO: 99519 - DNA, 25 bp, Saccharomyces pastorianus
gatactatccaaacatgtaaatttt

SEQ ID NO: 99520 - DNA, 25 bp, Saccharomyces pastorianus
gattcctcaatccatacaccattat

SEQ ID NO: 99521 - DNA, 25 bp, Saccharomyces pastorianus
ggtctaacaacccattttcgctaga

SEQ ID NO: 99522 - DNA, 25 bp, Saccharomyces pastorianus
gtggccggtcaacttcagtatgcct

SEQ ID NO: 99523 - DNA, 25 bp, Saccharomyces pastorianus
taatcccttcttgataccgcaacaa

SEQ ID NO: 99524 - DNA, 25 bp, Saccharomyces pastorianus
ggtaatccatttcaggctcaaaacg

SEQ ID NO: 99525 - DNA, 25 bp, Saccharomyces pastorianus
gatgaccggcactttagatccaaca

SEQ ID NO: 99526 - DNA, 25 bp, Saccharomyces pastorianus
ggcacatacatgacgagtcccgtgg

SEQ ID NO: 99527 - DNA, 25 bp, Saccharomyces pastorianus
gtttgtccccatcaatcaacaacag

SEQ ID NO: 99528 - DNA, 25 bp, Saccharomyces pastorianus
ggtatgttatggttcccactgcgtt

SEQ ID NO: 99529 - DNA, 25 bp, Saccharomyces pastorianus
gggatgtatgcttctaaccttcaat

SEQ ID NO: 99530 - DNA, 25 bp, Saccharomyces pastorianus
gttgacatctgcgtctacaatgcca

SEQ ID NO: 99531 - DNA, 25 bp, Saccharomyces pastorianus
agtatgcctctactggtgcgcagca

SEQ ID NO: 99532 - DNA, 25 bp, Saccharomyces pastorianus
cacaaacacgcctctatatctatta

SEQ ID NO: 99533 - DNA, 25 bp, Saccharomyces pastorianus
ccaatgcgtgggtaatctcttgcaa

SEQ ID NO: 99534 - DNA, 25 bp, Saccharomyces pastorianus
atgcttgatattgttactctcgtag

SEQ ID NO: 99535 - DNA, 25 bp, Saccharomyces pastorianus
atagggtccacatatttttgctttg

SEQ ID NO: 99536 - DNA, 25 bp, Saccharomyces pastorianus
ttgcaatcctcttgcgctcgaagtg

SEQ ID NO: 99537 - DNA, 25 bp, Saccharomyces pastorianus
gtccaggctgtatcagacaacctta

SEQ ID NO: 99538 - DNA, 25 bp, Saccharomyces pastorianus
cagtcgcgcttgtatgcttgatatt

SEQ ID NO: 99539 - DNA, 25 bp, Saccharomyces pastorianus
ggccatctttattttggtcgcccct

SEQ ID NO: 99540 - DNA, 25 bp, Saccharomyces pastorianus
gacaaccttatatccaatgcgtggg

SEQ ID NO: 99541 - DNA, 25 bp, Saccharomyces pastorianus
actctcgtagatgttagcaagcgta

SEQ ID NO: 99542 - DNA, 25 bp, Saccharomyces pastorianus
ggtagccgagacagtcgcgcttgta

SEQ ID NO: 99543 - DNA, 25 bp, Saccharomyces pastorianus
gaactatctgttagcttccgtcaat

SEQ ID NO: 99544 - DNA, 25 bp, Saccharomyces pastorianus
gcgacggcactgatttggacgcgtt

SEQ ID NO: 99545 - DNA, 25 bp, Saccharomyces pastorianus
aatttatctttattagcgacggcac

SEQ ID NO: 99546 - DNA, 25 bp, Saccharomyces pastorianus
ggttgcactgcaggctatcatctaa

SEQ ID NO: 99547 - DNA, 25 bp, Saccharomyces pastorianus
gctggtcttcgcagggctaaatgat

SEQ ID NO: 99548 - DNA, 25 bp, Saccharomyces pastorianus
tgcagccgtcgcagcaaagcaaact

SEQ ID NO: 99549 - DNA, 25 bp, Saccharomyces pastorianus
gtcatcaagcccaagaactatctgt

SEQ ID NO: 99550 - DNA, 25 bp, Saccharomyces pastorianus
taaaacagtacacttctgggcccca

SEQ ID NO: 99551 - DNA, 25 bp, Saccharomyces pastorianus
tccgtcaattttttcctgggttgca

SEQ ID NO: 99552 - DNA, 25 bp, Saccharomyces pastorianus
aagcaaactgcatccacatcgatga

SEQ ID NO: 99553 - DNA, 25 bp, Saccharomyces pastorianus
catcagcttttaattttgcctttag

SEQ ID NO: 99554 - DNA, 25 bp, Saccharomyces pastorianus
gaaggccgcgacattatcaataagt

SEQ ID NO: 99555 - DNA, 25 bp, Saccharomyces pastorianus
attgtggcacgtttgcaaggtacca

SEQ ID NO: 99556 - DNA, 25 bp, Saccharomyces pastorianus
agaagttagggtccccattgtggca

SEQ ID NO: 99557 - DNA, 25 bp, Saccharomyces pastorianus
tattcctggagggacttatcacaag

SEQ ID NO: 99558 - DNA, 25 bp, Saccharomyces pastorianus
tcgtcaatattttcggcggtatcgt

SEQ ID NO: 99559 - DNA, 25 bp, Saccharomyces pastorianus
aatggaggcgatcctgcgaactttt

SEQ ID NO: 99560 - DNA, 25 bp, Saccharomyces pastorianus
atggtgctggtttggctatggctac

SEQ ID NO: 99561 - DNA, 25 bp, Saccharomyces pastorianus
atcatgtgtacagacgccaaatttg

SEQ ID NO: 99562 - DNA, 25 bp, Saccharomyces pastorianus
aaggtttcgaattgatcttatccaa

SEQ ID NO: 99563 - DNA, 25 bp, Saccharomyces pastorianus
taagatgtgactatgttgccctggg

SEQ ID NO: 99564 - DNA, 25 bp, Saccharomyces pastorianus
gaagccgccagagaactagaagtta

SEQ ID NO: 99565 - DNA, 25 bp, Saccharomyces pastorianus
caacggacacatacctttcgaaagt

SEQ ID NO: 99566 - DNA, 25 bp, Saccharomyces pastorianus
agtctggtttacacgctgcattgaa

SEQ ID NO: 99567 - DNA, 25 bp, Saccharomyces pastorianus
tgaggagttaaacgcgcacctatta

SEQ ID NO: 99568 - DNA, 25 bp, Saccharomyces pastorianus
ttacacttgttacccacaacggaca

SEQ ID NO: 99569 - DNA, 25 bp, Saccharomyces pastorianus
gatgcagcagcagctatcggattga

SEQ ID NO: 99570 - DNA, 25 bp, Saccharomyces pastorianus
gatattgccacaggtaacacatcag

SEQ ID NO: 99571 - DNA, 25 bp, Saccharomyces pastorianus
agacccatattgtcctcgcaattta

SEQ ID NO: 99572 - DNA, 25 bp, Saccharomyces pastorianus
ggttactctctagaaacagacccat

SEQ ID NO: 99573 - DNA, 25 bp, Saccharomyces pastorianus
gtctgaacgcagatttcttacttga

SEQ ID NO: 99574 - DNA, 25 bp, Saccharomyces pastorianus
gaaagttagtgacgacccagataat

SEQ ID NO: 99575 - DNA, 25 bp, Saccharomyces pastorianus
tggtgatttcacaactgctgatagt

SEQ ID NO: 99576 - DNA, 25 bp, Saccharomyces pastorianus
aagggacaggcatcccatactgttg

SEQ ID NO: 99577 - DNA, 25 bp, Saccharomyces pastorianus
gacgtatcttcatcgctatcttgga

SEQ ID NO: 99578 - DNA, 25 bp, Saccharomyces pastorianus
gggtgcacgaggaattccatccgca

SEQ ID NO: 99579 - DNA, 25 bp, Saccharomyces pastorianus
ggtaacgtcccatttggtgtgcaat

SEQ ID NO: 99580 - DNA, 25 bp, Saccharomyces pastorianus
aaaattttgacctcctgtgttgctg

SEQ ID NO: 99581 - DNA, 25 bp, Saccharomyces pastorianus
attcatccggtaagtcaggcgtcat

SEQ ID NO: 99582 - DNA, 25 bp, Saccharomyces pastorianus
gctcccttggtatctttcaatggat

SEQ ID NO: 99583 - DNA, 25 bp, Saccharomyces pastorianus
aggcgtcattgcgagtagttcaaca

SEQ ID NO: 99584 - DNA, 25 bp, Saccharomyces pastorianus
gattcaccagtttttgaacctcatg

SEQ ID NO: 99585 - DNA, 25 bp, Saccharomyces pastorianus
gttccggaaacgctgatgggtccaa

SEQ ID NO: 99586 - DNA, 25 bp, Saccharomyces pastorianus
acgtctcattgctttattcggatat

SEQ ID NO: 99587 - DNA, 25 bp, Saccharomyces pastorianus
acaggatcacctttacattagcagt

SEQ ID NO: 99588 - DNA, 25 bp, Saccharomyces pastorianus
tgcatcattcgacctaatcttactc

SEQ ID NO: 99589 - DNA, 25 bp, Saccharomyces pastorianus
gcgaactacctagtgtgctggttaa

SEQ ID NO: 99590 - DNA, 25 bp, Saccharomyces pastorianus
gattggttccatttgaggatccgca

SEQ ID NO: 99591 - DNA, 25 bp, Saccharomyces pastorianus
aaacagttttggacccgctagtgca

SEQ ID NO: 99592 - DNA, 25 bp, Saccharomyces pastorianus
tggagaatcttcttctgtgacgaaa

SEQ ID NO: 99593 - DNA, 25 bp, Saccharomyces pastorianus
gaagaatacgcttccttgctgcctg

SEQ ID NO: 99594 - DNA, 25 bp, Saccharomyces pastorianus
agtaacatggtttctcgacgacgaa

SEQ ID NO: 99595 - DNA, 25 bp, Saccharomyces pastorianus
aaccaattgaacttaggccccactg

SEQ ID NO: 99596 - DNA, 25 bp, Saccharomyces pastorianus
taggccccactgtatacactatcaa

SEQ ID NO: 99597 - DNA, 25 bp, Saccharomyces pastorianus
tggacatacatgctcgttgtttccc

SEQ ID NO: 99598 - DNA, 25 bp, Saccharomyces pastorianus
tacggtcccgccatatagcagttac

SEQ ID NO: 99599 - DNA, 25 bp, Saccharomyces pastorianus
ttaacttctctgacgtccagcataa

SEQ ID NO: 99600 - DNA, 25 bp, Saccharomyces pastorianus
aaaacatattaacagcgcatcgcaa

SEQ ID NO: 99601 - DNA, 25 bp, Saccharomyces pastorianus
ggagcttttgcccagcagcagcagc

SEQ ID NO: 99602 - DNA, 25 bp, Saccharomyces pastorianus
gcttctaactcacctgctttaggag

SEQ ID NO: 99603 - DNA, 25 bp, Saccharomyces pastorianus
atatagcagttactccactccattt

SEQ ID NO: 99604 - DNA, 25 bp, Saccharomyces pastorianus
aatacatcatcgaccttaacttctc

SEQ ID NO: 99605 - DNA, 25 bp, Saccharomyces pastorianus
agaccttcgaacaagcttatcccta

SEQ ID NO: 99606 - DNA, 25 bp, Saccharomyces pastorianus
gacgtccagcataattcccaagagt

SEQ ID NO: 99607 - DNA, 25 bp, Saccharomyces pastorianus
aatgccgtatcatcctggagctttt

SEQ ID NO: 99608 - DNA, 25 bp, Saccharomyces pastorianus
tgatgaactctctttcgaactctgc

SEQ ID NO: 99609 - DNA, 25 bp, Saccharomyces pastorianus
ggttttgtttcttctgaaagtccat

SEQ ID NO: 99610 - DNA, 25 bp, Saccharomyces pastorianus
ggtgccgccagtgccctatataata

SEQ ID NO: 99611 - DNA, 25 bp, Saccharomyces pastorianus
tcagataatgatctcccagtgggat

SEQ ID NO: 99612 - DNA, 25 bp, Saccharomyces pastorianus
ttatttcataccactgcagtaccct

SEQ ID NO: 99613 - DNA, 25 bp, Saccharomyces pastorianus
aaagtccattggatgctgctaaggc

SEQ ID NO: 99614 - DNA, 25 bp, Saccharomyces pastorianus
aatcctgcagcaaatcatattccta

SEQ ID NO: 99615 - DNA, 25 bp, Saccharomyces pastorianus
aatgccttgatgactcagaaccaat

SEQ ID NO: 99616 - DNA, 25 bp, Saccharomyces pastorianus
gatgccaatgttcccatcatttggg

SEQ ID NO: 99617 - DNA, 25 bp, Saccharomyces pastorianus
aagtgttatctgtttcttttgctca

SEQ ID NO: 99618 - DNA, 25 bp, Saccharomyces pastorianus
tttgggtttattccacaggtgccgc

SEQ ID NO: 99619 - DNA, 25 bp, Saccharomyces pastorianus
tatataatacctccgcagaatcctg

SEQ ID NO: 99620 - DNA, 25 bp, Saccharomyces pastorianus
gagcatagcaaaagcagcgtttcga

SEQ ID NO: 99621 - DNA, 25 bp, Saccharomyces pastorianus
ttgcagattggatcgggcctacact

SEQ ID NO: 99622 - DNA, 25 bp, Saccharomyces pastorianus
acaagatgacgcttccgccaaagaa

SEQ ID NO: 99623 - DNA, 25 bp, Saccharomyces pastorianus
gtaacaatactgctgccgttttgga

SEQ ID NO: 99624 - DNA, 25 bp, Saccharomyces pastorianus
agcgtttcgaactcatatagtgcca

SEQ ID NO: 99625 - DNA, 25 bp, Saccharomyces pastorianus
gaaggcatttttcaagcttcccgtt

SEQ ID NO: 99626 - DNA, 25 bp, Saccharomyces pastorianus
aagcttcccgttttgcagattggat

SEQ ID NO: 99627 - DNA, 25 bp, Saccharomyces pastorianus
tacacttccgcacacaagatgacgc

SEQ ID NO: 99628 - DNA, 25 bp, Saccharomyces pastorianus
gcgaaactccagtctactttcagta

SEQ ID NO: 99629 - DNA, 25 bp, Saccharomyces pastorianus
gtgacccagggttgcaacgaaataa

SEQ ID NO: 99630 - DNA, 25 bp, Saccharomyces pastorianus
ctgccgttttggactggctgaaaga

SEQ ID NO: 99631 - DNA, 25 bp, Saccharomyces pastorianus
atcaaggctgctcaagactctttcg

SEQ ID NO: 99632 - DNA, 25 bp, Saccharomyces pastorianus
gaaccaattgttgagaatcgaagaa

SEQ ID NO: 99633 - DNA, 25 bp, Saccharomyces pastorianus
aagacactttcattgctgacttggt

SEQ ID NO: 99634 - DNA, 25 bp, Saccharomyces pastorianus
ggtcaaatcaagactggtgctccag

SEQ ID NO: 99635 - DNA, 25 bp, Saccharomyces pastorianus
ggtgctccagctagatccgaaagat

SEQ ID NO: 99636 - DNA, 25 bp, Saccharomyces pastorianus
atggtttcccacagatctggtgaaa

SEQ ID NO: 99637 - DNA, 25 bp, Saccharomyces pastorianus
aaccaaatcggtaccttgtctgaat

SEQ ID NO: 99638 - DNA, 25 bp, Saccharomyces pastorianus
aattgttgctgatgacttgactgtc

SEQ ID NO: 99639 - DNA, 25 bp, Saccharomyces pastorianus
gatctggtgaaactgaagacacttt

SEQ ID NO: 99640 - DNA, 25 bp, Saccharomyces pastorianus
tgatgacttgactgtcaccaaccca

SEQ ID NO: 99641 - DNA, 25 bp, Saccharomyces pastorianus
gtcggtttgagaactggtcaaatca

SEQ ID NO: 99642 - DNA, 25 bp, Saccharomyces pastorianus
tgaaatttacccaccaagagtcgtt

SEQ ID NO: 99643 - DNA, 25 bp, Saccharomyces pastorianus
gttgtcattacctccagaatcattc

SEQ ID NO: 99644 - DNA, 25 bp, Saccharomyces pastorianus
atcaatgctgcttttgtcttggaag

SEQ ID NO: 99645 - DNA, 25 bp, Saccharomyces pastorianus
gaagatggctctatggacaccgata

SEQ ID NO: 99646 - DNA, 25 bp, Saccharomyces pastorianus
gatatccgtcgaacaacgttctatt

SEQ ID NO: 99647 - DNA, 25 bp, Saccharomyces pastorianus
tttcctcctgtggtagccctaagaa

SEQ ID NO: 99648 - DNA, 25 bp, Saccharomyces pastorianus
agaatcattcactgcacttatcaat

SEQ ID NO: 99649 - DNA, 25 bp, Saccharomyces pastorianus
cattgagcttagaacccttttgggc

SEQ ID NO: 99650 - DNA, 25 bp, Saccharomyces pastorianus
ttatatcacactaattttcctcctg

SEQ ID NO: 99651 - DNA, 25 bp, Saccharomyces pastorianus
ttatcgaggcttttgttgtcattac

SEQ ID NO: 99652 - DNA, 25 bp, Saccharomyces pastorianus
ggtttagacattggctcttcattga

SEQ ID NO: 99653 - DNA, 25 bp, Saccharomyces pastorianus
tgctcaaggtttcatgctgatccgc

SEQ ID NO: 99654 - DNA, 25 bp, Saccharomyces pastorianus
agaagaactattgcccttgctgcta

SEQ ID NO: 99655 - DNA, 25 bp, Saccharomyces pastorianus
agagcttcgaaacttctggcagcac

SEQ ID NO: 99656 - DNA, 25 bp, Saccharomyces pastorianus
tgctgctacttacggtattccaact

SEQ ID NO: 99657 - DNA, 25 bp, Saccharomyces pastorianus
atgctgatccgcgaagctgccagat

SEQ ID NO: 99658 - DNA, 25 bp, Saccharomyces pastorianus
gaggctaccagcaaacttgttacaa

SEQ ID NO: 99659 - DNA, 25 bp, Saccharomyces pastorianus
gcaacgtgattattttggcgctcat

SEQ ID NO: 99660 - DNA, 25 bp, Saccharomyces pastorianus
agttcttcgcttctgcagttaccaa

SEQ ID NO: 99661 - DNA, 25 bp, Saccharomyces pastorianus
ttctgcccatttgccagtagacaag

SEQ ID NO: 99662 - DNA, 25 bp, Saccharomyces pastorianus
ttcgctcgttgtttgtcagccataa

SEQ ID NO: 99663 - DNA, 25 bp, Saccharomyces pastorianus
actgcgttagcgttttacgacggct

SEQ ID NO: 99664 - DNA, 25 bp, Saccharomyces pastorianus
gacgcaaactgggtccattttataa

SEQ ID NO: 99665 - DNA, 25 bp, Saccharomyces pastorianus
gtacagaaggtcttgcggccctcta

SEQ ID NO: 99666 - DNA, 25 bp, Saccharomyces pastorianus
atcactctgtggagagacgttccgt

SEQ ID NO: 99667 - DNA, 25 bp, Saccharomyces pastorianus
gatagctgctatatgcacacaccct

SEQ ID NO: 99668 - DNA, 25 bp, Saccharomyces pastorianus
agacgttccgtttagtgcaatatat

SEQ ID NO: 99669 - DNA, 25 bp, Saccharomyces pastorianus
gttcctagagactatatggcgtaca

SEQ ID NO: 99670 - DNA, 25 bp, Saccharomyces pastorianus
tcgggccctcttcaaaggtttggag

SEQ ID NO: 99671 - DNA, 25 bp, Saccharomyces pastorianus
gcacacacccttttgatgtcggtaa

SEQ ID NO: 99672 - DNA, 25 bp, Saccharomyces pastorianus
ttgcgccatcatgatatctagttat

SEQ ID NO: 99673 - DNA, 25 bp, Saccharomyces pastorianus
ggctagattctactcgatttgcatc

SEQ ID NO: 99674 - DNA, 25 bp, Saccharomyces pastorianus
cccctcttttgtggtgcaattgcga

SEQ ID NO: 99675 - DNA, 25 bp, Saccharomyces pastorianus
aatgggcagtttgataagcgtaagc

SEQ ID NO: 99676 - DNA, 25 bp, Saccharomyces pastorianus
gatgattttcctagcgtcatggttt

SEQ ID NO: 99677 - DNA, 25 bp, Saccharomyces pastorianus
gaatatgattgagttggcacagctt

SEQ ID NO: 99678 - DNA, 25 bp, Saccharomyces pastorianus
gggagcgattacacgaatggattga

SEQ ID NO: 99679 - DNA, 25 bp, Saccharomyces pastorianus
atctcgatatgcttcgttcattcat

SEQ ID NO: 99680 - DNA, 25 bp, Saccharomyces pastorianus
atcacgataccacgccgtttgtttg

SEQ ID NO: 99681 - DNA, 25 bp, Saccharomyces pastorianus
gaaattctcattcccttaattagag

SEQ ID NO: 99682 - DNA, 25 bp, Saccharomyces pastorianus
tgagaccagaagtcgatcacgatac

SEQ ID NO: 99683 - DNA, 25 bp, Saccharomyces pastorianus
gactcaactaggttggccacacgaa

SEQ ID NO: 99684 - DNA, 25 bp, Saccharomyces pastorianus
tatgggccccgtttcaagcattgaa

SEQ ID NO: 99685 - DNA, 25 bp, Saccharomyces pastorianus
ttggcacagcttttagggagcgatt

SEQ ID NO: 99686 - DNA, 25 bp, Saccharomyces pastorianus
atgccgtcatcatccgtggtagtag

SEQ ID NO: 99687 - DNA, 25 bp, Saccharomyces pastorianus
gtatatatccattttgcgcaagaca

SEQ ID NO: 99688 - DNA, 25 bp, Saccharomyces pastorianus
agacacgcttttccattggatggga

SEQ ID NO: 99689 - DNA, 25 bp, Saccharomyces pastorianus
cgacttcttgtcatggctgcgatta

SEQ ID NO: 99690 - DNA, 25 bp, Saccharomyces pastorianus
ggatagacctgcaacttctgcgtta

SEQ ID NO: 99691 - DNA, 25 bp, Saccharomyces pastorianus
atggccttcatcttcctggaacgtg

SEQ ID NO: 99692 - DNA, 25 bp, Saccharomyces pastorianus
ctggaacgtgacttccgtaggcttt

SEQ ID NO: 99693 - DNA, 25 bp, Saccharomyces pastorianus
ttatgcaagctagcgtcatggcctt

SEQ ID NO: 99694 - DNA, 25 bp, Saccharomyces pastorianus
acacatgtgttatattgcgttccta

SEQ ID NO: 99695 - DNA, 25 bp, Saccharomyces pastorianus
gtagtagccataatttcccgttcgg

SEQ ID NO: 99696 - DNA, 25 bp, Saccharomyces pastorianus
gtaggcttttcttctgatccatcat

SEQ ID NO: 99697 - DNA, 25 bp, Saccharomyces pastorianus
tgtgccgtttggtctgatcgtataa

SEQ ID NO: 99698 - DNA, 25 bp, Saccharomyces pastorianus
taatgctgcctgtaactgtttatgg

SEQ ID NO: 99699 - DNA, 25 bp, Saccharomyces pastorianus
attacttcaagagagccaccgcttt

SEQ ID NO: 99700 - DNA, 25 bp, Saccharomyces pastorianus
gttcagggttggtctctggtcaaat

SEQ ID NO: 99701 - DNA, 25 bp, Saccharomyces pastorianus
atcctgggtgcttgtctgacgactt

SEQ ID NO: 99702 - DNA, 25 bp, Saccharomyces pastorianus
ttggtctaacagtcttcttgccgat

SEQ ID NO: 99703 - DNA, 25 bp, Saccharomyces pastorianus
gctgtcgattagtctggcctttcaa

SEQ ID NO: 99704 - DNA, 25 bp, Saccharomyces pastorianus
cccatctatttccttacagcaattg

SEQ ID NO: 99705 - DNA, 25 bp, Saccharomyces pastorianus
gggagagcctattccatacgacgaa

SEQ ID NO: 99706 - DNA, 25 bp, Saccharomyces pastorianus
atagctatcgtccttggttctcaag

SEQ ID NO: 99707 - DNA, 25 bp, Saccharomyces pastorianus
agttgagatctccattcatcctggg

SEQ ID NO: 99708 - DNA, 25 bp, Saccharomyces pastorianus
agaacttcctttggatgcatgacca

SEQ ID NO: 99709 - DNA, 25 bp, Saccharomyces pastorianus
gaatgagtcgcgtttattggccaaa

SEQ ID NO: 99710 - DNA, 25 bp, Saccharomyces pastorianus
tgttgcactggaatgactactgtca

SEQ ID NO: 99711 - DNA, 25 bp, Saccharomyces pastorianus
gagatggacgcctcatttgattgat

SEQ ID NO: 99712 - DNA, 25 bp, Saccharomyces pastorianus
agttctaacattgttctcgtgcgag

SEQ ID NO: 99713 - DNA, 25 bp, Saccharomyces pastorianus
gtgtccctcaactgatagcgtgtga

SEQ ID NO: 99714 - DNA, 25 bp, Saccharomyces pastorianus
gcgccaaattgggttgttgcactgg

SEQ ID NO: 99715 - DNA, 25 bp, Saccharomyces pastorianus
gtctgggctcagtttcaaacctggt

SEQ ID NO: 99716 - DNA, 25 bp, Saccharomyces pastorianus
tatacttgattccagggctatgtgt

SEQ ID NO: 99717 - DNA, 25 bp, Saccharomyces pastorianus
taggccaccaaagcgttatagacat

SEQ ID NO: 99718 - DNA, 25 bp, Saccharomyces pastorianus
tggagaagatcttcccggagggcac

SEQ ID NO: 99719 - DNA, 25 bp, Saccharomyces pastorianus
accaaggttatcatacgggcccaat

SEQ ID NO: 99720 - DNA, 25 bp, Saccharomyces pastorianus
actctcgtaatatggatcgctggac

SEQ ID NO: 99721 - DNA, 25 bp, Saccharomyces pastorianus
tcgattttaccagcgacccttttgt

SEQ ID NO: 99722 - DNA, 25 bp, Saccharomyces pastorianus
atgtgctggtcgaacaccaaggtta

SEQ ID NO: 99723 - DNA, 25 bp, Saccharomyces pastorianus
gagggatgtaaccactttaccgcca

SEQ ID NO: 99724 - DNA, 25 bp, Saccharomyces pastorianus
gattctgctggtggcaatgctgttt

SEQ ID NO: 99725 - DNA, 25 bp, Saccharomyces pastorianus
atgaccagtcgaaaaagtaccctct

SEQ ID NO: 99726 - DNA, 25 bp, Saccharomyces pastorianus
tgtaggaaacaacccaaacgtcgat

SEQ ID NO: 99727 - DNA, 25 bp, Saccharomyces pastorianus
gggcccaatattaaactactctcgt

SEQ ID NO: 99728 - DNA, 25 bp, Saccharomyces pastorianus
atgtggccatttttgattacgttgt

SEQ ID NO: 99729 - DNA, 25 bp, Saccharomyces pastorianus
aatgccactttcttccacgagggag

SEQ ID NO: 99730 - DNA, 25 bp, Saccharomyces pastorianus
atgggatgactttgttgctagaaac

SEQ ID NO: 99731 - DNA, 25 bp, Saccharomyces pastorianus
tacgctgttagctctattatcacac

SEQ ID NO: 99732 - DNA, 25 bp, Saccharomyces pastorianus
gatagattccatttggcaatcctag

SEQ ID NO: 99733 - DNA, 25 bp, Saccharomyces pastorianus
agtgattctcatttctcatgggatg

SEQ ID NO: 99734 - DNA, 25 bp, Saccharomyces pastorianus
atgctgttgtcgcagttggtttgaa

SEQ ID NO: 99735 - DNA, 25 bp, Saccharomyces pastorianus
gaccccaagaaggtttccaattatg

SEQ ID NO: 99736 - DNA, 25 bp, Saccharomyces pastorianus
tgttgttccaaaattcgaccccaag

SEQ ID NO: 99737 - DNA, 25 bp, Saccharomyces pastorianus
agtgctcgtggtaaccagtttttgc

SEQ ID NO: 99738 - DNA, 25 bp, Saccharomyces pastorianus
aataccttgttttcacagtccccag

SEQ ID NO: 99739 - DNA, 25 bp, Saccharomyces pastorianus
tattatcacaccatatatgccagaa

SEQ ID NO: 99740 - DNA, 25 bp, Saccharomyces pastorianus
attgccatgtcgttaagtgctcgtg

SEQ ID NO: 99741 - DNA, 25 bp, Saccharomyces pastorianus
gaaattttttctgcctccgaaatca

SEQ ID NO: 99742 - DNA, 25 bp, Saccharomyces pastorianus
tatcattgtcaacttcaggctttaa

SEQ ID NO: 99743 - DNA, 25 bp, Saccharomyces pastorianus
gttttctctttcgataagttgcgta

SEQ ID NO: 99744 - DNA, 25 bp, Saccharomyces pastorianus
gaaaggttcctttgtattgcgcaat

SEQ ID NO: 99745 - DNA, 25 bp, Saccharomyces pastorianus
atgggcaggatgtttcttcgattta

SEQ ID NO: 99746 - DNA, 25 bp, Saccharomyces pastorianus
ttgcgcaattccatggcagcattat

SEQ ID NO: 99747 - DNA, 25 bp, Saccharomyces pastorianus
gttttattcctccacaaagatgcat

SEQ ID NO: 99748 - DNA, 25 bp, Saccharomyces pastorianus
agggcaatcttcaaattgttcgcta

SEQ ID NO: 99749 - DNA, 25 bp, Saccharomyces pastorianus
gacatgcttgttgtaaatttccgct

SEQ ID NO: 99750 - DNA, 25 bp, Saccharomyces pastorianus
attgttcgctaactgcaaatgggca

SEQ ID NO: 99751 - DNA, 25 bp, Saccharomyces pastorianus
caggctttaaatttttgcttgcata

SEQ ID NO: 99752 - DNA, 25 bp, Saccharomyces pastorianus
agttacctgcgaacggttgtctcac

SEQ ID NO: 99753 - DNA, 25 bp, Saccharomyces pastorianus
actgtgagctactgtttacccattc

SEQ ID NO: 99754 - DNA, 25 bp, Saccharomyces pastorianus
tatagtcattcctggtatcatcaca

SEQ ID NO: 99755 - DNA, 25 bp, Saccharomyces pastorianus
gacaccatctcatcatgtctgagga

SEQ ID NO: 99756 - DNA, 25 bp, Saccharomyces pastorianus
aatggccacgctattgcaaaaaaga

SEQ ID NO: 99757 - DNA, 25 bp, Saccharomyces pastorianus
cagtaacttctggtggcttgtttac

SEQ ID NO: 99758 - DNA, 25 bp, Saccharomyces pastorianus
tttaatatcattgctagcgccatag

SEQ ID NO: 99759 - DNA, 25 bp, Saccharomyces pastorianus
tagcgccatagtaaataccccaccg

SEQ ID NO: 99760 - DNA, 25 bp, Saccharomyces pastorianus
atgtcgcttgcatcatttcgatttg

SEQ ID NO: 99761 - DNA, 25 bp, Saccharomyces pastorianus
gtttacccattccagagttaacagt

SEQ ID NO: 99762 - DNA, 25 bp, Saccharomyces pastorianus
gcttgtttaccaccattcatgttga

SEQ ID NO: 99763 - DNA, 25 bp, Saccharomyces pastorianus
aacagaatcctagcttgccctggac

SEQ ID NO: 99764 - DNA, 25 bp, Saccharomyces pastorianus
ctcccaggttttactgttccaagtg

SEQ ID NO: 99765 - DNA, 25 bp, Saccharomyces pastorianus
tcacactcttatacgcctacaagtt

SEQ ID NO: 99766 - DNA, 25 bp, Saccharomyces pastorianus
gaatgcagagggtccggacgcacca

SEQ ID NO: 99767 - DNA, 25 bp, Saccharomyces pastorianus
gacgcaccagattcctgttggacga

SEQ ID NO: 99768 - DNA, 25 bp, Saccharomyces pastorianus
catgatgatgaactgccgagctacg

SEQ ID NO: 99769 - DNA, 25 bp, Saccharomyces pastorianus
taataggcccttgtacgttcaacca

SEQ ID NO: 99770 - DNA, 25 bp, Saccharomyces pastorianus
ataacgttgtttctgcaccgacata

SEQ ID NO: 99771 - DNA, 25 bp, Saccharomyces pastorianus
aaggccctctacaataccagcaatg

SEQ ID NO: 99772 - DNA, 25 bp, Saccharomyces pastorianus
gatatatgtcctctttgtcatggtg

SEQ ID NO: 99773 - DNA, 25 bp, Saccharomyces pastorianus
aagaccagcagctaacttggcgcaa

SEQ ID NO: 99774 - DNA, 25 bp, Saccharomyces pastorianus
gttcttgacttgaagcctctttatt

SEQ ID NO: 99775 - DNA, 25 bp, Saccharomyces pastorianus
gaggcggaggctataccgtagaaaa

SEQ ID NO: 99776 - DNA, 25 bp, Saccharomyces pastorianus
tatgtttgtatgttctgctctcttc

SEQ ID NO: 99777 - DNA, 25 bp, Saccharomyces pastorianus
tatggtttatactcgttttatgggt

SEQ ID NO: 99778 - DNA, 25 bp, Saccharomyces pastorianus
ctgctctcttccctctattaaaagg

SEQ ID NO: 99779 - DNA, 25 bp, Saccharomyces pastorianus
tcccttgatggaagtgtcactatta

SEQ ID NO: 99780 - DNA, 25 bp, Saccharomyces pastorianus
aaagcatcagataggcaggcaggag

SEQ ID NO: 99781 - DNA, 25 bp, Saccharomyces pastorianus
tatgggtattttttgggactgctta

SEQ ID NO: 99782 - DNA, 25 bp, Saccharomyces pastorianus
acactcttgtggtggcaaagcatca

SEQ ID NO: 99783 - DNA, 25 bp, Saccharomyces pastorianus
gggactgcttagttcttgacttgaa

SEQ ID NO: 99784 - DNA, 25 bp, Saccharomyces pastorianus
taagccatagggaaaacactcttgt

SEQ ID NO: 99785 - DNA, 25 bp, Saccharomyces pastorianus
aggagcttattttgacgcccgaaca

SEQ ID NO: 99786 - DNA, 25 bp, Saccharomyces pastorianus
aaggagattcctgcggcaattccat

SEQ ID NO: 99787 - DNA, 25 bp, Saccharomyces pastorianus
gaagactctttgcaaacgcaggtta

SEQ ID NO: 99788 - DNA, 25 bp, Saccharomyces pastorianus
gcatgcttaatcgaacactgtcaga

SEQ ID NO: 99789 - DNA, 25 bp, Saccharomyces pastorianus
gaagatgttcattcgtccgttgcaa

SEQ ID NO: 99790 - DNA, 25 bp, Saccharomyces pastorianus
gatacaggccacatggacgtcagag

SEQ ID NO: 99791 - DNA, 25 bp, Saccharomyces pastorianus
gttaataacagcgaggtccctcaac

SEQ ID NO: 99792 - DNA, 25 bp, Saccharomyces pastorianus
gacgtcagagataaccaccgatgat

SEQ ID NO: 99793 - DNA, 25 bp, Saccharomyces pastorianus
gcggcaattccatctgcagtagata

SEQ ID NO: 99794 - DNA, 25 bp, Saccharomyces pastorianus
gaaaaagcggtcatccctgaggata

SEQ ID NO: 99795 - DNA, 25 bp, Saccharomyces pastorianus
tatcaatacagcctctatcgttaat

SEQ ID NO: 99796 - DNA, 25 bp, Saccharomyces pastorianus
aatctgtgtttcatacccaaccttt

SEQ ID NO: 99797 - DNA, 25 bp, Saccharomyces pastorianus
atgccattttcgtctttaatctgtg

SEQ ID NO: 99798 - DNA, 25 bp, Saccharomyces pastorianus
actagtaacctcaacgggcgtctca

SEQ ID NO: 99799 - DNA, 25 bp, Saccharomyces pastorianus
gatgttcatcactagtaacctcaac

SEQ ID NO: 99800 - DNA, 25 bp, Saccharomyces pastorianus
gcgagttgttgtatggattatgcca

SEQ ID NO: 99801 - DNA, 25 bp, Saccharomyces pastorianus
aacgggcgtctcatctttgtccatg

SEQ ID NO: 99802 - DNA, 25 bp, Saccharomyces pastorianus
ttctgcgtagtttatttttctcaaa

SEQ ID NO: 99803 - DNA, 25 bp, Saccharomyces pastorianus
tcatacccaacctttgcgttgcttg

SEQ ID NO: 99804 - DNA, 25 bp, Saccharomyces pastorianus
catgacctggtcatcttccaaaaaa

SEQ ID NO: 99805 - DNA, 25 bp, Saccharomyces pastorianus
aaacactttctcaatttctgcgtag

SEQ ID NO: 99806 - DNA, 25 bp, Saccharomyces pastorianus
tcatctttgtccatgacctggtcat

SEQ ID NO: 99807 - DNA, 25 bp, Saccharomyces pastorianus
agacgatcctgttagtgtacttcca

SEQ ID NO: 99808 - DNA, 25 bp, Saccharomyces pastorianus
ggcgaagaattgcaattttccctta

SEQ ID NO: 99809 - DNA, 25 bp, Saccharomyces pastorianus
aaaacgtttcgtcagtgtctgccaa

SEQ ID NO: 99810 - DNA, 25 bp, Saccharomyces pastorianus
aagattacacttttagcgagcaggg

SEQ ID NO: 99811 - DNA, 25 bp, Saccharomyces pastorianus
aaaggcgatgaactgctgatgatta

SEQ ID NO: 99812 - DNA, 25 bp, Saccharomyces pastorianus
gtgtctgccaaagattaccggtttt

SEQ ID NO: 99813 - DNA, 25 bp, Saccharomyces pastorianus
tagcaagcacctttctagtaagcat

SEQ ID NO: 99814 - DNA, 25 bp, Saccharomyces pastorianus
ttttcccttattaatgacgctttag

SEQ ID NO: 99815 - DNA, 25 bp, Saccharomyces pastorianus
gttcattgaaatgacgccgcagcaa

SEQ ID NO: 99816 - DNA, 25 bp, Saccharomyces pastorianus
gtgtacttccaggattacaactgag

SEQ ID NO: 99817 - DNA, 25 bp, Saccharomyces pastorianus
cattgtgatctatttattcccgaag

SEQ ID NO: 99818 - DNA, 25 bp, Saccharomyces pastorianus
ttaaacctagacctggatttgccgt

SEQ ID NO: 99819 - DNA, 25 bp, Saccharomyces pastorianus
aaggccattggatgcaatacgtgga

SEQ ID NO: 99820 - DNA, 25 bp, Saccharomyces pastorianus
tccaatcctcgaggctgttcaagaa

SEQ ID NO: 99821 - DNA, 25 bp, Saccharomyces pastorianus
aatcaagactcacaggcttcaataa

SEQ ID NO: 99822 - DNA, 25 bp, Saccharomyces pastorianus
gaagaagccactttctctaacttac

SEQ ID NO: 99823 - DNA, 25 bp, Saccharomyces pastorianus
gaagcccagccttttgaagaagcca

SEQ ID NO: 99824 - DNA, 25 bp, Saccharomyces pastorianus
ttaaattacgctcttcttctttggc

SEQ ID NO: 99825 - DNA, 25 bp, Saccharomyces pastorianus
gaaaactcaacttgcaatggttatg

SEQ ID NO: 99826 - DNA, 25 bp, Saccharomyces pastorianus
ggatttgccgtcattaatcaagact

SEQ ID NO: 99827 - DNA, 25 bp, Saccharomyces pastorianus
tactccataacaaaagatccccgct

SEQ ID NO: 99828 - DNA, 25 bp, Saccharomyces pastorianus
atccccgctggttgcaagagctaga

SEQ ID NO: 99829 - DNA, 25 bp, Saccharomyces pastorianus
tacatgcggacaaatcgggcacatt

SEQ ID NO: 99830 - DNA, 25 bp, Saccharomyces pastorianus
gaccttgccggtgtaactgacggga

SEQ ID NO: 99831 - DNA, 25 bp, Saccharomyces pastorianus
aaactctgtggataatggtagcgac

SEQ ID NO: 99832 - DNA, 25 bp, Saccharomyces pastorianus
caaggagatgtgctacatgcggaca

SEQ ID NO: 99833 - DNA, 25 bp, Saccharomyces pastorianus
gcgaagacctggtatacacatacaa

SEQ ID NO: 99834 - DNA, 25 bp, Saccharomyces pastorianus
atcgttgagcataagcaatcctttt

SEQ ID NO: 99835 - DNA, 25 bp, Saccharomyces pastorianus
gattaatcagaccaacaagcatgtt

SEQ ID NO: 99836 - DNA, 25 bp, Saccharomyces pastorianus
aatcacagcaacgtagagcagcaag

SEQ ID NO: 99837 - DNA, 25 bp, Saccharomyces pastorianus
ggaaatgaccaatcctgatgagatt

SEQ ID NO: 99838 - DNA, 25 bp, Saccharomyces pastorianus
aatggtagcgaccttgccggtgtaa

SEQ ID NO: 99839 - DNA, 25 bp, Saccharomyces pastorianus
ggtggtgccacgagaacagaaaact

SEQ ID NO: 99840 - DNA, 25 bp, Saccharomyces pastorianus
gcaggcacgtacatcaattcatcaa

SEQ ID NO: 99841 - DNA, 25 bp, Saccharomyces pastorianus
aattacgtgcgatgagctcttgcaa

SEQ ID NO: 99842 - DNA, 25 bp, Saccharomyces pastorianus
gttcgaccacattcacgatggacat

SEQ ID NO: 99843 - DNA, 25 bp, Saccharomyces pastorianus
aatcagacgcctacttaagtcctct

SEQ ID NO: 99844 - DNA, 25 bp, Saccharomyces pastorianus
aaatttcatgtcaccgcattgggcg

SEQ ID NO: 99845 - DNA, 25 bp, Saccharomyces pastorianus
ttaagggacgtgtgcggccccacag

SEQ ID NO: 99846 - DNA, 25 bp, Saccharomyces pastorianus
aaggcatgagcccattggtagtaca

SEQ ID NO: 99847 - DNA, 25 bp, Saccharomyces pastorianus
ttgagcgtctctacattcatcacgt

SEQ ID NO: 99848 - DNA, 25 bp, Saccharomyces pastorianus
gcattgggcggaacgttcgaccaca

SEQ ID NO: 99849 - DNA, 25 bp, Saccharomyces pastorianus
ggttttattgccacaggaatccact

SEQ ID NO: 99850 - DNA, 25 bp, Saccharomyces pastorianus
ggatctctccgtagaactagttccc

SEQ ID NO: 99851 - DNA, 25 bp, Saccharomyces pastorianus
atggctgttaatgcccatgcttact

SEQ ID NO: 99852 - DNA, 25 bp, Saccharomyces pastorianus
attgactctggtagatctgccttga

SEQ ID NO: 99853 - DNA, 25 bp, Saccharomyces pastorianus
ggtgctgataccttcttattcactg

SEQ ID NO: 99854 - DNA, 25 bp, Saccharomyces pastorianus
gttatcactgaatctggttggccat

SEQ ID NO: 99855 - DNA, 25 bp, Saccharomyces pastorianus
tcaaaaggacgctgtttccgccatt

SEQ ID NO: 99856 - DNA, 25 bp, Saccharomyces pastorianus
gactactccgactacatggctgtta

SEQ ID NO: 99857 - DNA, 25 bp, Saccharomyces pastorianus
agacttacggtgttgctgttccatc

SEQ ID NO: 99858 - DNA, 25 bp, Saccharomyces pastorianus
gtctgctgttgaatcttacggttct

SEQ ID NO: 99859 - DNA, 25 bp, Saccharomyces pastorianus
attaccagctcctgtggtgctgata

SEQ ID NO: 99860 - DNA, 25 bp, Saccharomyces pastorianus
aaccctgaattgtgtgactactccg

SEQ ID NO: 99861 - DNA, 25 bp, Saccharomyces pastorianus
gaaggctgccgattacactggtcca

SEQ ID NO: 99862 - DNA, 25 bp, Saccharomyces pastorianus
ggatgtcttccagcgaattcttggt

SEQ ID NO: 99863 - DNA, 25 bp, Saccharomyces pastorianus
tccccgatgcggtaaacacaagact

SEQ ID NO: 99864 - DNA, 25 bp, Saccharomyces pastorianus
acacaagactatcggtgcgctccaa

SEQ ID NO: 99865 - DNA, 25 bp, Saccharomyces pastorianus
gaatgcgcagggttggatgtcttcc

SEQ ID NO: 99866 - DNA, 25 bp, Saccharomyces pastorianus
gttttagcaagcacgtgggatccaa

SEQ ID NO: 99867 - DNA, 25 bp, Saccharomyces pastorianus
cgaattcttggtaggctgaacggaa

SEQ ID NO: 99868 - DNA, 25 bp, Saccharomyces pastorianus
tgggatccaaagactcacaagttaa

SEQ ID NO: 99869 - DNA, 25 bp, Saccharomyces pastorianus
agagggccgcgttgatggactccaa

SEQ ID NO: 99870 - DNA, 25 bp, Saccharomyces pastorianus
ttaagaaattactccaacgcgaaga

SEQ ID NO: 99871 - DNA, 25 bp, Saccharomyces pastorianus
acaacgttgggctcggtgctaaatt

SEQ ID NO: 99872 - DNA, 25 bp, Saccharomyces pastorianus
tagtgaatctgcatccaatatcccc

SEQ ID NO: 99873 - DNA, 25 bp, Saccharomyces pastorianus
cgatacaccatggacgttgtttagt

SEQ ID NO: 99874 - DNA, 25 bp, Saccharomyces pastorianus
tggtgctatcgccaaggatgacttg

SEQ ID NO: 99875 - DNA, 25 bp, Saccharomyces pastorianus
ttaacaagggcattggtccgccaat

SEQ ID NO: 99876 - DNA, 25 bp, Saccharomyces pastorianus
gtattgctcacagactgaagaccat

SEQ ID NO: 99877 - DNA, 25 bp, Saccharomyces pastorianus
gatccatttaatgagcgtacagatg

SEQ ID NO: 99878 - DNA, 25 bp, Saccharomyces pastorianus
ttagccatcattccacaagatccag

SEQ ID NO: 99879 - DNA, 25 bp, Saccharomyces pastorianus
aagcatgtgttctagatctggtatt

SEQ ID NO: 99880 - DNA, 25 bp, Saccharomyces pastorianus
gtcagctgggacttttcgatttaag

SEQ ID NO: 99881 - DNA, 25 bp, Saccharomyces pastorianus
gaagtcgcagaattcgatacaccat

SEQ ID NO: 99882 - DNA, 25 bp, Saccharomyces pastorianus
gggtacgattcgcaagaacttagat

SEQ ID NO: 99883 - DNA, 25 bp, Saccharomyces pastorianus
ggctacatcctcagtggactacgaa

SEQ ID NO: 99884 - DNA, 25 bp, Saccharomyces pastorianus
gaaggtatctgttccatgagagctt

SEQ ID NO: 99885 - DNA, 25 bp, Saccharomyces pastorianus
aagtcggtactgtcgattcctggaa

SEQ ID NO: 99886 - DNA, 25 bp, Saccharomyces pastorianus
ttgttatggctaacgcgttctccta

SEQ ID NO: 99887 - DNA, 25 bp, Saccharomyces pastorianus
taatgacgtccgtagtgtcgttgct

SEQ ID NO: 99888 - DNA, 25 bp, Saccharomyces pastorianus
ggctctgaagccttataccgtaacg

SEQ ID NO: 99889 - DNA, 25 bp, Saccharomyces pastorianus
gttgctgacatttccgattctgacg

SEQ ID NO: 99890 - DNA, 25 bp, Saccharomyces pastorianus
ggttctaccgatattaccttctggg

SEQ ID NO: 99891 - DNA, 25 bp, Saccharomyces pastorianus
aaagaatccactgttgctggtttct

SEQ ID NO: 99892 - DNA, 25 bp, Saccharomyces pastorianus
gttgctggttacaattctgccgtta

SEQ ID NO: 99893 - DNA, 25 bp, Saccharomyces pastorianus
atgcaagctctacaggttatccaat

SEQ ID NO: 99894 - DNA, 25 bp, Saccharomyces pastorianus
gtaacgatttgactgcctctcaatt

SEQ ID NO: 99895 - DNA, 25 bp, Saccharomyces pastorianus
gtagtgtcacccatagattcttaca

SEQ ID NO: 99896 - DNA, 25 bp, Saccharomyces pastorianus
ttttctggtcaactgcaattccctg

SEQ ID NO: 99897 - DNA, 25 bp, Saccharomyces pastorianus
gagatctgacttagaatcctcttct

SEQ ID NO: 99898 - DNA, 25 bp, Saccharomyces pastorianus
aaaccactcggctatcatgttcgaa

SEQ ID NO: 99899 - DNA, 25 bp, Saccharomyces pastorianus
gaaaaaccctgtaatatcctgctta

SEQ ID NO: 99900 - DNA, 25 bp, Saccharomyces pastorianus
ggtgacttccactacgacgaagagt

SEQ ID NO: 99901 - DNA, 25 bp, Saccharomyces pastorianus
atattcccaatactgcgcgtgtaac

SEQ ID NO: 99902 - DNA, 25 bp, Saccharomyces pastorianus
aggaaggcttatcaatcgcacgaga

SEQ ID NO: 99903 - DNA, 25 bp, Saccharomyces pastorianus
tacctttccgccattgaagcagcta

SEQ ID NO: 99904 - DNA, 25 bp, Saccharomyces pastorianus
gcagctaccttttatgaacgcatct

SEQ ID NO: 99905 - DNA, 25 bp, Saccharomyces pastorianus
tatacccattcaagatagcctaccc

SEQ ID NO: 99906 - DNA, 25 bp, Saccharomyces pastorianus
gtcgttgtgtttctagtggttgtta

SEQ ID NO: 99907 - DNA, 25 bp, Saccharomyces pastorianus
gttgttaccgtttccatgttgattg

SEQ ID NO: 99908 - DNA, 25 bp, Saccharomyces pastorianus
gaagggttacctgttgtttgctggt

SEQ ID NO: 99909 - DNA, 25 bp, Saccharomyces pastorianus
accggtgtgttatgtgcttgcgtta

SEQ ID NO: 99910 - DNA, 25 bp, Saccharomyces pastorianus
gattggcgccagtttgttagtttta

SEQ ID NO: 99911 - DNA, 25 bp, Saccharomyces pastorianus
tagttactaatactggcgctggtga

SEQ ID NO: 99912 - DNA, 25 bp, Saccharomyces pastorianus
ttggtgggcttctattagttactaa

SEQ ID NO: 99913 - DNA, 25 bp, Saccharomyces pastorianus
tatgggttgtttacgggttcatcat

SEQ ID NO: 99914 - DNA, 25 bp, Saccharomyces pastorianus
agcattacccatacttctttgtcgt

SEQ ID NO: 99915 - DNA, 25 bp, Saccharomyces pastorianus
gggttgttaattgcattcagcgatt

SEQ ID NO: 99916 - DNA, 25 bp, Saccharomyces pastorianus
tactgttgttttgaccattatcggc

SEQ ID NO: 99917 - DNA, 25 bp, Saccharomyces pastorianus
aagccggtgccagagctgaagctga

SEQ ID NO: 99918 - DNA, 25 bp, Saccharomyces pastorianus
gagccatccgtaactctgctaagga

SEQ ID NO: 99919 - DNA, 25 bp, Saccharomyces pastorianus
aaggccgccacgattgacgaacaag

SEQ ID NO: 99920 - DNA, 25 bp, Saccharomyces pastorianus
ggcacagatttgactcctggagaac

SEQ ID NO: 99921 - DNA, 25 bp, Saccharomyces pastorianus
taaggaagctgctaaggccgccaag

SEQ ID NO: 99922 - DNA, 25 bp, Saccharomyces pastorianus
gtgtccaccgccgataagatcaagg

SEQ ID NO: 99923 - DNA, 25 bp, Saccharomyces pastorianus
acgaagagttagtgtccaccgccga

SEQ ID NO: 99924 - DNA, 25 bp, Saccharomyces pastorianus
taacgcctccgcaaaagctgacaaa

SEQ ID NO: 99925 - DNA, 25 bp, Saccharomyces pastorianus
gatgtcccagatgactcttctaaca

SEQ ID NO: 99926 - DNA, 25 bp, Saccharomyces pastorianus
tcaaggccaatgctgctggtgccaa

SEQ ID NO: 99927 - DNA, 25 bp, Saccharomyces pastorianus
gtcagtgaagatccccgtattaaaa

SEQ ID NO: 99928 - DNA, 25 bp, Saccharomyces pastorianus
cagaagcttatgtttaagcccatat

SEQ ID NO: 99929 - DNA, 25 bp, Saccharomyces pastorianus
gtttaagcccatattcaatttgctg

SEQ ID NO: 99930 - DNA, 25 bp, Saccharomyces pastorianus
tattatccctctcctgatagtttaa

SEQ ID NO: 99931 - DNA, 25 bp, Saccharomyces pastorianus
tccctctcctgatagtttaattaaa

SEQ ID NO: 99932 - DNA, 25 bp, Saccharomyces pastorianus
taaacggcctccaatggaagaggta

SEQ ID NO: 99933 - DNA, 25 bp, Saccharomyces pastorianus
atttgctgtaaacggcctccaatgg

SEQ ID NO: 99934 - DNA, 25 bp, Saccharomyces pastorianus
gctatattatccctctcctgatagt

SEQ ID NO: 99935 - DNA, 25 bp, Saccharomyces pastorianus
taatgctatattatccctctcctga

SEQ ID NO: 99936 - DNA, 25 bp, Saccharomyces pastorianus
gctgtaaacggcctccaatggaaga

SEQ ID NO: 99937 - DNA, 25 bp, Saccharomyces pastorianus
ggtaatgctatattatccctctcct

SEQ ID NO: 99938 - DNA, 25 bp, Saccharomyces pastorianus
ttcaatttgctgtaaacggcctcca

SEQ ID NO: 99939 - DNA, 25 bp, Saccharomyces pastorianus
tactcctcttaccttacttaaactg

SEQ ID NO: 99940 - DNA, 25 bp, Saccharomyces pastorianus
tatgaccgtcgtatatgtgcagata

SEQ ID NO: 99941 - DNA, 25 bp, Saccharomyces pastorianus
ccataatcttaaaccgcctggcatt

SEQ ID NO: 99942 - DNA, 25 bp, Saccharomyces pastorianus
ggcagttcttgctatcaggttttta

SEQ ID NO: 99943 - DNA, 25 bp, Saccharomyces pastorianus
cctggcattatctgcacacggtaat

SEQ ID NO: 99944 - DNA, 25 bp, Saccharomyces pastorianus
gagcacatgggaccgtattgcatat

SEQ ID NO: 99945 - DNA, 25 bp, Saccharomyces pastorianus
gatcttttttctacgatggcagttc

SEQ ID NO: 99946 - DNA, 25 bp, Saccharomyces pastorianus
agcattggccgttttcaggaactct

SEQ ID NO: 99947 - DNA, 25 bp, Saccharomyces pastorianus
caatttcactattccttttactcct

SEQ ID NO: 99948 - DNA, 25 bp, Saccharomyces pastorianus
ttgattgttatcttagcggctttac

SEQ ID NO: 99949 - DNA, 25 bp, Saccharomyces pastorianus
ctaccccgtatcttgtgaattccaa

SEQ ID NO: 99950 - DNA, 25 bp, Saccharomyces pastorianus
tagaattggttctgctgtcggttcc

SEQ ID NO: 99951 - DNA, 25 bp, Saccharomyces pastorianus
atgggtgatgttgctctagccacaa

SEQ ID NO: 99952 - DNA, 25 bp, Saccharomyces pastorianus
gtgtgggcactactttgttcactta

SEQ ID NO: 99953 - DNA, 25 bp, Saccharomyces pastorianus
ataatgtttggatgcgcgctatgga

SEQ ID NO: 99954 - DNA, 25 bp, Saccharomyces pastorianus
aactgcctacgaatctccatatact

SEQ ID NO: 99955 - DNA, 25 bp, Saccharomyces pastorianus
ggtgccatttggactcagactttgt

SEQ ID NO: 99956 - DNA, 25 bp, Saccharomyces pastorianus
gtgttccattaattgcattctcctt

SEQ ID NO: 99957 - DNA, 25 bp, Saccharomyces pastorianus
gtggaagtcagtcccattcaggtat

SEQ ID NO: 99958 - DNA, 25 bp, Saccharomyces pastorianus
atccgccgtctctcatgaaaacatg

SEQ ID NO: 99959 - DNA, 25 bp, Saccharomyces pastorianus
gactgatactgttgctgtggaatac

SEQ ID NO: 99960 - DNA, 25 bp, Saccharomyces pastorianus
acatggcgacagttacagctttaaa

SEQ ID NO: 99961 - DNA, 25 bp, Saccharomyces pastorianus
ttgccaattctctcttactggtatt

SEQ ID NO: 99962 - DNA, 25 bp, Saccharomyces pastorianus
gtagtatcccagagattgctgtttt

SEQ ID NO: 99963 - DNA, 25 bp, Saccharomyces pastorianus
aggagttttctctgtcattcaagac

SEQ ID NO: 99964 - DNA, 25 bp, Saccharomyces pastorianus
acgcattgttgctctggatagtcaa

SEQ ID NO: 99965 - DNA, 25 bp, Saccharomyces pastorianus
aagacagttcattgtggcagatact

SEQ ID NO: 99966 - DNA, 25 bp, Saccharomyces pastorianus
gccactactgagaaattgtccgttt

SEQ ID NO: 99967 - DNA, 25 bp, Saccharomyces pastorianus
aaaaattctgaacgccactactgag

SEQ ID NO: 99968 - DNA, 25 bp, Saccharomyces pastorianus
gttatggagtttttgccgttctata

SEQ ID NO: 99969 - DNA, 25 bp, Saccharomyces pastorianus
attacgccctcatgttattaaacta

SEQ ID NO: 99970 - DNA, 25 bp, Saccharomyces pastorianus
aatacttccctaatttatcggagag

SEQ ID NO: 99971 - DNA, 25 bp, Saccharomyces pastorianus
tcttcgactcaaaaattacgccctc

SEQ ID NO: 99972 - DNA, 25 bp, Saccharomyces pastorianus
ttttcggacccagagttggtggcaa

SEQ ID NO: 99973 - DNA, 25 bp, Saccharomyces pastorianus
agcatctaatattctggtcgtcatt

SEQ ID NO: 99974 - DNA, 25 bp, Saccharomyces pastorianus
aattggccatttgatgcacctctac

SEQ ID NO: 99975 - DNA, 25 bp, Saccharomyces pastorianus
gaagtcccagagattcgtgcatcta

SEQ ID NO: 99976 - DNA, 25 bp, Saccharomyces pastorianus
tgttgatggcaccattctttgccga

SEQ ID NO: 99977 - DNA, 25 bp, Saccharomyces pastorianus
gcacctctaccatctatttctttat

SEQ ID NO: 99978 - DNA, 25 bp, Saccharomyces pastorianus
gccgaccctagcctaaacagagttg

SEQ ID NO: 99979 - DNA, 25 bp, Saccharomyces pastorianus
tatcgccatttctgcagcatctaat

SEQ ID NO: 99980 - DNA, 25 bp, Saccharomyces pastorianus
tagttgcatgcttctttttctggtt

SEQ ID NO: 99981 - DNA, 25 bp, Saccharomyces pastorianus
attattggtcgctattgggctcttt

SEQ ID NO: 99982 - DNA, 25 bp, Saccharomyces pastorianus
gcaaattcattgctttttctatcgc

SEQ ID NO: 99983 - DNA, 25 bp, Saccharomyces pastorianus
accttgcctttaaattcttcagctt

SEQ ID NO: 99984 - DNA, 25 bp, Saccharomyces pastorianus
gaaaaattcagcgacctcctctttg

SEQ ID NO: 99985 - DNA, 25 bp, Saccharomyces pastorianus
agcttcaatatcaacgttttcacca

SEQ ID NO: 99986 - DNA, 25 bp, Saccharomyces pastorianus
ttaactccctgtcatcgaaaacctt

SEQ ID NO: 99987 - DNA, 25 bp, Saccharomyces pastorianus
gtgacaaatgccatacctctattag

SEQ ID NO: 99988 - DNA, 25 bp, Saccharomyces pastorianus
gatgtgaagatcctaccagtgtgtt

SEQ ID NO: 99989 - DNA, 25 bp, Saccharomyces pastorianus
tttttgtccattgaaaccacctctg

SEQ ID NO: 99990 - DNA, 25 bp, Saccharomyces pastorianus
cctcctctttggtagctttgaatgg

SEQ ID NO: 99991 - DNA, 25 bp, Saccharomyces pastorianus
gaaccagtttcttgctcaatttctt

SEQ ID NO: 99992 - DNA, 25 bp, Saccharomyces pastorianus
ggtctctcatttttctcattggcaa

SEQ ID NO: 99993 - DNA, 25 bp, Saccharomyces pastorianus
ttcttcttcatcattttctggtcta

SEQ ID NO: 99994 - DNA, 25 bp, Saccharomyces pastorianus
aacttcagaggtagaggcggcgcca

SEQ ID NO: 99995 - DNA, 25 bp, Saccharomyces pastorianus
agagagctagaactccaggccaaat

SEQ ID NO: 99996 - DNA, 25 bp, Saccharomyces pastorianus
ctgtagatgttgctgttattagacc

SEQ ID NO: 99997 - DNA, 25 bp, Saccharomyces pastorianus
taataacgtcccattcaaagctacc

SEQ ID NO: 99998 - DNA, 25 bp, Saccharomyces pastorianus
ggaggtcgctgaatttttcggtact

SEQ ID NO: 99999 - DNA, 25 bp, Saccharomyces pastorianus
aaagctaccaaagaggaggtcgctg

SEQ ID NO: 100000 - DNA, 25 bp, Saccharomyces pastorianus
gcgccagaggtggtttcaatggaca

SEQ ID NO: 100001 - DNA, 25 bp, Saccharomyces pastorianus
gaatttttcggtactgacgccgact

SEQ ID NO: 100002 - DNA, 25 bp, Saccharomyces pastorianus
ggatcttcacatccgattctgctaa

SEQ ID NO: 100003 - DNA, 25 bp, Saccharomyces pastorianus
aacacactggtaggatcttcacatc

SEQ ID NO: 100004 - DNA, 25 bp, Saccharomyces pastorianus
gtatggcatttgtcactttcagtgg

SEQ ID NO: 100005 - DNA, 25 bp, Saccharomyces pastorianus
tgtctttttgccagctttgtgtaag

SEQ ID NO: 100006 - DNA, 25 bp, Saccharomyces pastorianus
ctctgccgttgccgctttgactgaa

SEQ ID NO: 100007 - DNA, 25 bp, Saccharomyces pastorianus
ttgtctttttgccagctttgtgtaa

SEQ ID NO: 100008 - DNA, 25 bp, Saccharomyces pastorianus
gacctctgccgttgccgctttgact

SEQ ID NO: 100009 - DNA, 25 bp, Saccharomyces pastorianus
aattggttgtctttttgccagcttt

SEQ ID NO: 100010 - DNA, 25 bp, Saccharomyces pastorianus
attggttgtctttttgccagctttg

SEQ ID NO: 100011 - DNA, 25 bp, Saccharomyces pastorianus
gaattggttgtctttttgccagctt

SEQ ID NO: 100012 - DNA, 25 bp, Saccharomyces pastorianus
tgaattggttgtctttttgccagct

SEQ ID NO: 100013 - DNA, 25 bp, Saccharomyces pastorianus
ggttgtctttttgccagctttgtgt

SEQ ID NO: 100014 - DNA, 25 bp, Saccharomyces pastorianus
ttgaattggttgtctttttgccagc

SEQ ID NO: 100015 - DNA, 25 bp, Saccharomyces pastorianus
aattgaattggttgtctttttgcca

SEQ ID NO: 100016 - DNA, 25 bp, Saccharomyces pastorianus
cttctccaaagccatacgctgttaa

SEQ ID NO: 100017 - DNA, 25 bp, Saccharomyces pastorianus
cgctatcgctgaaggtaagtctaag

SEQ ID NO: 100018 - DNA, 25 bp, Saccharomyces pastorianus
gccatacgctgttaagtacggtttg

SEQ ID NO: 100019 - DNA, 25 bp, Saccharomyces pastorianus
tctccaaagccatacgctgttaagt

SEQ ID NO: 100020 - DNA, 25 bp, Saccharomyces pastorianus
catacgctgttaagtacggtttgaa

SEQ ID NO: 100021 - DNA, 25 bp, Saccharomyces pastorianus
cgctgaaggtaagtctaagcaagac

SEQ ID NO: 100022 - DNA, 25 bp, Saccharomyces pastorianus
agctgccgctatcgctgaaggtaag

SEQ ID NO: 100023 - DNA, 25 bp, Saccharomyces pastorianus
ctgccgctatcgctgaaggtaagtc

SEQ ID NO: 100024 - DNA, 25 bp, Saccharomyces pastorianus
gccgctatcgctgaaggtaagtcta

SEQ ID NO: 100025 - DNA, 25 bp, Saccharomyces pastorianus
aagccatacgctgttaagtacggtt

SEQ ID NO: 100026 - DNA, 25 bp, Saccharomyces pastorianus
tatcgctgaaggtaagtctaagcaa

SEQ ID NO: 100027 - DNA, 25 bp, Saccharomyces pastorianus
aagccgatatcttaggtccctgtgt

SEQ ID NO: 100028 - DNA, 25 bp, Saccharomyces pastorianus
agaagtcaatccgacgatgctgaaa

SEQ ID NO: 100029 - DNA, 25 bp, Saccharomyces pastorianus
ggatgtgaacgagcgcccattatgg

SEQ ID NO: 100030 - DNA, 25 bp, Saccharomyces pastorianus
gggatgtctcaattcactactgcct

SEQ ID NO: 100031 - DNA, 25 bp, Saccharomyces pastorianus
tattgggacccagatgccagagcca

SEQ ID NO: 100032 - DNA, 25 bp, Saccharomyces pastorianus
catatgaaaagtcgccgctgtcggt

SEQ ID NO: 100033 - DNA, 25 bp, Saccharomyces pastorianus
gtgtttgctttcaagccagggctat

SEQ ID NO: 100034 - DNA, 25 bp, Saccharomyces pastorianus
gaggaaatttccgacgtcacatatg

SEQ ID NO: 100035 - DNA, 25 bp, Saccharomyces pastorianus
agtcagaaggtctccgacagcggaa

SEQ ID NO: 100036 - DNA, 25 bp, Saccharomyces pastorianus
gaaggcaatgagttctgacgcgttt

SEQ ID NO: 100037 - DNA, 25 bp, Saccharomyces pastorianus
accagaggctcatccaaaccttaag

SEQ ID NO: 100038 - DNA, 25 bp, Saccharomyces pastorianus
ttcaccgactacttctacaatggcg

SEQ ID NO: 100039 - DNA, 25 bp, Saccharomyces pastorianus
gtttcttaataacgttcctctgcta

SEQ ID NO: 100040 - DNA, 25 bp, Saccharomyces pastorianus
agcataaccagtttgccttcttcac

SEQ ID NO: 100041 - DNA, 25 bp, Saccharomyces pastorianus
ggacaacacagtaccatctcctggt

SEQ ID NO: 100042 - DNA, 25 bp, Saccharomyces pastorianus
atgctaaggcttcccattgttttga

SEQ ID NO: 100043 - DNA, 25 bp, Saccharomyces pastorianus
agttccaattcgagtgcccatatct

SEQ ID NO: 100044 - DNA, 25 bp, Saccharomyces pastorianus
taatgatccgttttggttccccgat

SEQ ID NO: 100045 - DNA, 25 bp, Saccharomyces pastorianus
cattttcatcgcgattttgcagttt

SEQ ID NO: 100046 - DNA, 25 bp, Saccharomyces pastorianus
gttccccgatctggatagcatggca

SEQ ID NO: 100047 - DNA, 25 bp, Saccharomyces pastorianus
gcgtcattacaatccagttccaatt

SEQ ID NO: 100048 - DNA, 25 bp, Saccharomyces pastorianus
gcccatatctcgaactatcacatgt

SEQ ID NO: 100049 - DNA, 25 bp, Saccharomyces pastorianus
gccttcaccatcttcaaattcaact

SEQ ID NO: 100050 - DNA, 25 bp, Saccharomyces pastorianus
aaaccactctaccatttcgttatca

SEQ ID NO: 100051 - DNA, 25 bp, Saccharomyces pastorianus
gatactgggattcgcccgggaaaat

SEQ ID NO: 100052 - DNA, 25 bp, Saccharomyces pastorianus
tgaagttaccactaccacgttacac

SEQ ID NO: 100053 - DNA, 25 bp, Saccharomyces pastorianus
agacccgctcggaaggctcaagatt

SEQ ID NO: 100054 - DNA, 25 bp, Saccharomyces pastorianus
aaaatagccgctactttcgtcgtgg

SEQ ID NO: 100055 - DNA, 25 bp, Saccharomyces pastorianus
attatgtctgaatcaccatctccac

SEQ ID NO: 100056 - DNA, 25 bp, Saccharomyces pastorianus
atctacgtattccttgactgcaggc

SEQ ID NO: 100057 - DNA, 25 bp, Saccharomyces pastorianus
gaacttctacttttcttcattcgcc

SEQ ID NO: 100058 - DNA, 25 bp, Saccharomyces pastorianus
aattcaactttctcgaccccaagat

SEQ ID NO: 100059 - DNA, 25 bp, Saccharomyces pastorianus
aaacacgttggcaagcccatttcac

SEQ ID NO: 100060 - DNA, 25 bp, Saccharomyces pastorianus
ggagattattccaatgagccgttca

SEQ ID NO: 100061 - DNA, 25 bp, Saccharomyces pastorianus
gcggactactggacgcatgcttata

SEQ ID NO: 100062 - DNA, 25 bp, Saccharomyces pastorianus
atgttttggcgcaataccacgaggc

SEQ ID NO: 100063 - DNA, 25 bp, Saccharomyces pastorianus
tcgcaaagtcctcatgcaactgcaa

SEQ ID NO: 100064 - DNA, 25 bp, Saccharomyces pastorianus
aagagaagcctctgacgccgcttaa

SEQ ID NO: 100065 - DNA, 25 bp, Saccharomyces pastorianus
tcatttgaggtaccagccggacggc

SEQ ID NO: 100066 - DNA, 25 bp, Saccharomyces pastorianus
agtagtgactacagttgcctcgcaa

SEQ ID NO: 100067 - DNA, 25 bp, Saccharomyces pastorianus
ggaaaaggagccagtacccgccgtg

SEQ ID NO: 100068 - DNA, 25 bp, Saccharomyces pastorianus
gctagtgggtaaactccgcggagat

SEQ ID NO: 100069 - DNA, 25 bp, Saccharomyces pastorianus
atgagccgttcaacaccaatttcga

SEQ ID NO: 100070 - DNA, 25 bp, Saccharomyces pastorianus
acatcgtgacgatccagcgctagtg

SEQ ID NO: 100071 - DNA, 25 bp, Saccharomyces pastorianus
atgatccctcctccaataaatgtgg

SEQ ID NO: 100072 - DNA, 25 bp, Saccharomyces pastorianus
caaggaggtcaagctacggatacaa

SEQ ID NO: 100073 - DNA, 25 bp, Saccharomyces pastorianus
acctccgccttctgggttagatgga

SEQ ID NO: 100074 - DNA, 25 bp, Saccharomyces pastorianus
gtcatccccttcttcaaagagtgtg

SEQ ID NO: 100075 - DNA, 25 bp, Saccharomyces pastorianus
gagaattccgaattgccttccgaaa

SEQ ID NO: 100076 - DNA, 25 bp, Saccharomyces pastorianus
cccaagttactccacgtttatgaag

SEQ ID NO: 100077 - DNA, 25 bp, Saccharomyces pastorianus
atgatggtttatcccatgtcaccac

SEQ ID NO: 100078 - DNA, 25 bp, Saccharomyces pastorianus
atctatgcccaattcttggtcatcc

SEQ ID NO: 100079 - DNA, 25 bp, Saccharomyces pastorianus
atccttctcaaggttctgctggaaa

SEQ ID NO: 100080 - DNA, 25 bp, Saccharomyces pastorianus
atggcagtacccatgttcatgcgaa

SEQ ID NO: 100081 - DNA, 25 bp, Saccharomyces pastorianus
tgggccaatcacatgctgctaatca

SEQ ID NO: 100082 - DNA, 25 bp, Saccharomyces pastorianus
atagatgtatttatggtcagccttc

SEQ ID NO: 100083 - DNA, 25 bp, Saccharomyces pastorianus
gactaatactgctagaaggcccagc

SEQ ID NO: 100084 - DNA, 25 bp, Saccharomyces pastorianus
gaaggcccagcatggactacaaaaa

SEQ ID NO: 100085 - DNA, 25 bp, Saccharomyces pastorianus
gtccccatggaattggttatcatca

SEQ ID NO: 100086 - DNA, 25 bp, Saccharomyces pastorianus
ggaacctgaaagagccactgcgatt

SEQ ID NO: 100087 - DNA, 25 bp, Saccharomyces pastorianus
gtagagatgcaaacgccagcgaagc

SEQ ID NO: 100088 - DNA, 25 bp, Saccharomyces pastorianus
aacgcgttagcgtggttaatacagt

SEQ ID NO: 100089 - DNA, 25 bp, Saccharomyces pastorianus
gccagcgaagcgtgttcaggaaaga

SEQ ID NO: 100090 - DNA, 25 bp, Saccharomyces pastorianus
atggtcagccttcagatatccagat

SEQ ID NO: 100091 - DNA, 25 bp, Saccharomyces pastorianus
atgaaggcatgcagtccaacgacaa

SEQ ID NO: 100092 - DNA, 25 bp, Saccharomyces pastorianus
agttgctcaagtacttcaatggaaa

SEQ ID NO: 100093 - DNA, 25 bp, Saccharomyces pastorianus
tgcggacccctatgggattagcata

SEQ ID NO: 100094 - DNA, 25 bp, Saccharomyces pastorianus
gaagctgtcttcaccaaattagtaa

SEQ ID NO: 100095 - DNA, 25 bp, Saccharomyces pastorianus
caacgcttatatttgcacgatggca

SEQ ID NO: 100096 - DNA, 25 bp, Saccharomyces pastorianus
aagggatttccagatttcttgacaa

SEQ ID NO: 100097 - DNA, 25 bp, Saccharomyces pastorianus
cattttcccaagatgatgcggtcat

SEQ ID NO: 100098 - DNA, 25 bp, Saccharomyces pastorianus
tgttctatatttaccgatgcggacc

SEQ ID NO: 100099 - DNA, 25 bp, Saccharomyces pastorianus
gcgactactccttagccaagaattt

SEQ ID NO: 100100 - DNA, 25 bp, Saccharomyces pastorianus
gggatattgcaacttcaccattaaa

SEQ ID NO: 100101 - DNA, 25 bp, Saccharomyces pastorianus
gtaagccctgtctaattccattttc

SEQ ID NO: 100102 - DNA, 25 bp, Saccharomyces pastorianus
ttgagtttgaatcagcgcgactact

SEQ ID NO: 100103 - DNA, 25 bp, Saccharomyces pastorianus
tgatagcatctctgactgccaacag

SEQ ID NO: 100104 - DNA, 25 bp, Saccharomyces pastorianus
ggaatttatgataagccctcagatc

SEQ ID NO: 100105 - DNA, 25 bp, Saccharomyces pastorianus
ttctgggtaattatgaggccttgat

SEQ ID NO: 100106 - DNA, 25 bp, Saccharomyces pastorianus
ttgcccgaaaactgttgtgttatct

SEQ ID NO: 100107 - DNA, 25 bp, Saccharomyces pastorianus
ccatgaattacttcgtggacgcatt

SEQ ID NO: 100108 - DNA, 25 bp, Saccharomyces pastorianus
gattctacaatctctacctgctaca

SEQ ID NO: 100109 - DNA, 25 bp, Saccharomyces pastorianus
gacgcattttatgctacccgtaatg

SEQ ID NO: 100110 - DNA, 25 bp, Saccharomyces pastorianus
gaacttgttcgagagtcatatcaat

SEQ ID NO: 100111 - DNA, 25 bp, Saccharomyces pastorianus
taaatgcattaactactctccacca

SEQ ID NO: 100112 - DNA, 25 bp, Saccharomyces pastorianus
cttgaatttaattaccaccccagca

SEQ ID NO: 100113 - DNA, 25 bp, Saccharomyces pastorianus
aacgaggacaatactcttctgggta

SEQ ID NO: 100114 - DNA, 25 bp, Saccharomyces pastorianus
agggttgctatttcgattctgatac

SEQ ID NO: 100115 - DNA, 25 bp, Saccharomyces pastorianus
gatgcctcagagcaggtcaacgcca

SEQ ID NO: 100116 - DNA, 25 bp, Saccharomyces pastorianus
aaattggttcgacagcgtccacagt

SEQ ID NO: 100117 - DNA, 25 bp, Saccharomyces pastorianus
atcagggagcgtttcttgcaacagc

SEQ ID NO: 100118 - DNA, 25 bp, Saccharomyces pastorianus
aatgtcatgggcgtagtcgactcca

SEQ ID NO: 100119 - DNA, 25 bp, Saccharomyces pastorianus
catgcgtcgtttcattatgccaact

SEQ ID NO: 100120 - DNA, 25 bp, Saccharomyces pastorianus
ggagcccgcaagatctcaggttcgg

SEQ ID NO: 100121 - DNA, 25 bp, Saccharomyces pastorianus
acaaggatggcgacgactcagcctc

SEQ ID NO: 100122 - DNA, 25 bp, Saccharomyces pastorianus
gtggtcggcacagtcaagaaagtct

SEQ ID NO: 100123 - DNA, 25 bp, Saccharomyces pastorianus
tcaacgccagcgagcagtctattgt

SEQ ID NO: 100124 - DNA, 25 bp, Saccharomyces pastorianus
gggaaagtactcattctcgccaaag

SEQ ID NO: 100125 - DNA, 25 bp, Saccharomyces pastorianus
tcctcctccgtaactgcgaatggga

SEQ ID NO: 100126 - DNA, 25 bp, Saccharomyces pastorianus
gaggttttcatttcttcttgcaggc

SEQ ID NO: 100127 - DNA, 25 bp, Saccharomyces pastorianus
aagtactcaactttcaggccactgc

SEQ ID NO: 100128 - DNA, 25 bp, Saccharomyces pastorianus
tgttgaccaacttatctcgaggagt

SEQ ID NO: 100129 - DNA, 25 bp, Saccharomyces pastorianus
tgttggtcgtgcacttgtctatata

SEQ ID NO: 100130 - DNA, 25 bp, Saccharomyces pastorianus
gccaccatggatgcacacgtatttg

SEQ ID NO: 100131 - DNA, 25 bp, Saccharomyces pastorianus
tggatcatcttcgtcactgttgtac

SEQ ID NO: 100132 - DNA, 25 bp, Saccharomyces pastorianus
tgtctatatagttcttccagcctgg

SEQ ID NO: 100133 - DNA, 25 bp, Saccharomyces pastorianus
actgttgtactgtgagctcttgttt

SEQ ID NO: 100134 - DNA, 25 bp, Saccharomyces pastorianus
aatatatgcgtactcttcgtcgctg

SEQ ID NO: 100135 - DNA, 25 bp, Saccharomyces pastorianus
cttgccgatgtttgccttgaatcta

SEQ ID NO: 100136 - DNA, 25 bp, Saccharomyces pastorianus
aagttaaacacgaccttgccgatgt

SEQ ID NO: 100137 - DNA, 25 bp, Saccharomyces pastorianus
ggactacgaaaccacatgggccttt

SEQ ID NO: 100138 - DNA, 25 bp, Saccharomyces pastorianus
tcgagaagctaaaacccttgacccg

SEQ ID NO: 100139 - DNA, 25 bp, Saccharomyces pastorianus
gttcacacaagttacacctgggtca

SEQ ID NO: 100140 - DNA, 25 bp, Saccharomyces pastorianus
ggctcacagccagcttagcgatata

SEQ ID NO: 100141 - DNA, 25 bp, Saccharomyces pastorianus
gactcgtgtatcgatgagatctcat

SEQ ID NO: 100142 - DNA, 25 bp, Saccharomyces pastorianus
ccttgacccgttgggaagttcaatg

SEQ ID NO: 100143 - DNA, 25 bp, Saccharomyces pastorianus
acctgggtcaagctggaacttcata

SEQ ID NO: 100144 - DNA, 25 bp, Saccharomyces pastorianus
gcgatatagacgtccggatggccaa

SEQ ID NO: 100145 - DNA, 25 bp, Saccharomyces pastorianus
gttagaatcgcgtccagtgcactca

SEQ ID NO: 100146 - DNA, 25 bp, Saccharomyces pastorianus
ttcatacgcatgacatagacccgaa

SEQ ID NO: 100147 - DNA, 25 bp, Saccharomyces pastorianus
acatgggcctttttgactcgtgtat

SEQ ID NO: 100148 - DNA, 25 bp, Saccharomyces pastorianus
agaaacaaattctctggtctcagat

SEQ ID NO: 100149 - DNA, 25 bp, Saccharomyces pastorianus
ttttcgctttggcatttttggtagt

SEQ ID NO: 100150 - DNA, 25 bp, Saccharomyces pastorianus
gtatatataccactttgcgaggcct

SEQ ID NO: 100151 - DNA, 25 bp, Saccharomyces pastorianus
ctgggatctatctggtcaaacttat

SEQ ID NO: 100152 - DNA, 25 bp, Saccharomyces pastorianus
ttgagcctaacctcggtgttgtgat

SEQ ID NO: 100153 - DNA, 25 bp, Saccharomyces pastorianus
ttgcgaggcctttactgggatctat

SEQ ID NO: 100154 - DNA, 25 bp, Saccharomyces pastorianus
gatcatctggcttttcttcagtgca

SEQ ID NO: 100155 - DNA, 25 bp, Saccharomyces pastorianus
gaccctgatatccagctttacgatg

SEQ ID NO: 100156 - DNA, 25 bp, Saccharomyces pastorianus
taccggttgggttgttgtgatgatc

SEQ ID NO: 100157 - DNA, 25 bp, Saccharomyces pastorianus
gtgcgagagcacatagacaatcatc

SEQ ID NO: 100158 - DNA, 25 bp, Saccharomyces pastorianus
tgcagagttagttcaggctgaccct

SEQ ID NO: 100159 - DNA, 25 bp, Saccharomyces pastorianus
gtctcttccaacattgtcaagaacg

SEQ ID NO: 100160 - DNA, 25 bp, Saccharomyces pastorianus
gaaagcgtctcttccaacattgtca

SEQ ID NO: 100161 - DNA, 25 bp, Saccharomyces pastorianus
aattggaaagcgtctcttccaacat

SEQ ID NO: 100162 - DNA, 25 bp, Saccharomyces pastorianus
aagcaattggaaagcgtctcttcca

SEQ ID NO: 100163 - DNA, 25 bp, Saccharomyces pastorianus
aaagcgtctcttccaacattgtcaa

SEQ ID NO: 100164 - DNA, 25 bp, Saccharomyces pastorianus
ttaagcaattggaaagcgtctcttc

SEQ ID NO: 100165 - DNA, 25 bp, Saccharomyces pastorianus
aagcgtctcttccaacattgtcaag

SEQ ID NO: 100166 - DNA, 25 bp, Saccharomyces pastorianus
gcgtctcttccaacattgtcaagaa

SEQ ID NO: 100167 - DNA, 25 bp, Saccharomyces pastorianus
tggaaagcgtctcttccaacattgt

SEQ ID NO: 100168 - DNA, 25 bp, Saccharomyces pastorianus
agcgtctcttccaacattgtcaaga

SEQ ID NO: 100169 - DNA, 25 bp, Saccharomyces pastorianus
ctcttccaacattgtcaagaacgct

SEQ ID NO: 100170 - DNA, 25 bp, Saccharomyces pastorianus
atgtctgactttcaaaaggaaaagg

SEQ ID NO: 100171 - DNA, 25 bp, Saccharomyces pastorianus
aacttggtcaagaagggtccagtca

SEQ ID NO: 100172 - DNA, 25 bp, Saccharomyces pastorianus
gtcaagaacgctgaacaacacaact

SEQ ID NO: 100173 - DNA, 25 bp, Saccharomyces pastorianus
gaaagactccaaatggtgaaggttc

SEQ ID NO: 100174 - DNA, 25 bp, Saccharomyces pastorianus
agagatacatcgacttggaagctcc

SEQ ID NO: 100175 - DNA, 25 bp, Saccharomyces pastorianus
tacgaaatgagaatccacaagagat

SEQ ID NO: 100176 - DNA, 25 bp, Saccharomyces pastorianus
cttggtcaagaagggtccagtcaga

SEQ ID NO: 100177 - DNA, 25 bp, Saccharomyces pastorianus
gctgaacaacacaacttggtcaaga

SEQ ID NO: 100178 - DNA, 25 bp, Saccharomyces pastorianus
tcatcaagattagaatcactttgac

SEQ ID NO: 100179 - DNA, 25 bp, Saccharomyces pastorianus
gaacgctgaacaacacaacttggtc

SEQ ID NO: 100180 - DNA, 25 bp, Saccharomyces pastorianus
gaatccacaagagatacatcgactt

SEQ ID NO: 100181 - DNA, 25 bp, Saccharomyces pastorianus
gtctcttccaacattgtcaagaacg

SEQ ID NO: 100182 - DNA, 25 bp, Saccharomyces pastorianus
ggaagctcctgttcaaatcgttaag

SEQ ID NO: 100183 - DNA, 25 bp, Saccharomyces pastorianus
aagcaattggaaagcgtctcttcca

SEQ ID NO: 100184 - DNA, 25 bp, Saccharomyces pastorianus
aaagcgtctcttccaacattgtcaa

SEQ ID NO: 100185 - DNA, 25 bp, Saccharomyces pastorianus
gattagaatcactttgacctccacc

SEQ ID NO: 100186 - DNA, 25 bp, Saccharomyces pastorianus
ttaagcaattggaaagcgtctcttc

SEQ ID NO: 100187 - DNA, 25 bp, Saccharomyces pastorianus
gcgtctcttccaacattgtcaagaa

SEQ ID NO: 100188 - DNA, 25 bp, Saccharomyces pastorianus
gatacatcgacttggaagctcctgt

SEQ ID NO: 100189 - DNA, 25 bp, Saccharomyces pastorianus
ggaaagcgtctcttccaacattgtc

SEQ ID NO: 100190 - DNA, 25 bp, Saccharomyces pastorianus
agcgtctcttccaacattgtcaaga

SEQ ID NO: 100191 - DNA, 25 bp, Saccharomyces pastorianus
ctcttccaacattgtcaagaacgct

SEQ ID NO: 100192 - DNA, 25 bp, Saccharomyces pastorianus
acagttagtttctgcgataccgcaa

SEQ ID NO: 100193 - DNA, 25 bp, Saccharomyces pastorianus
tggaaccaccgctaaatgagtcttt

SEQ ID NO: 100194 - DNA, 25 bp, Saccharomyces pastorianus
aagaggccgcgggtgtaatccatag

SEQ ID NO: 100195 - DNA, 25 bp, Saccharomyces pastorianus
taattagcttctttacatgcggccc

SEQ ID NO: 100196 - DNA, 25 bp, Saccharomyces pastorianus
taagggagggaaccaccgctcaaga

SEQ ID NO: 100197 - DNA, 25 bp, Saccharomyces pastorianus
gataaattcctacttttcagtgcag

SEQ ID NO: 100198 - DNA, 25 bp, Saccharomyces pastorianus
gtaatccatagcgacttgcgtgaaa

SEQ ID NO: 100199 - DNA, 25 bp, Saccharomyces pastorianus
ggattaacgaattttcaccaggaga

SEQ ID NO: 100200 - DNA, 25 bp, Saccharomyces pastorianus
gggacttatcaaacgtgcaggcaaa

SEQ ID NO: 100201 - DNA, 25 bp, Saccharomyces pastorianus
ttgcgtgaaacatttatcagcgctg

SEQ ID NO: 100202 - DNA, 25 bp, Saccharomyces pastorianus
atgtttcacctcaagattacgttag

SEQ ID NO: 100203 - DNA, 25 bp, Saccharomyces pastorianus
agattttggctctctctcacgtttt

SEQ ID NO: 100204 - DNA, 25 bp, Saccharomyces pastorianus
gtggaagacctattcaagtgtacaa

SEQ ID NO: 100205 - DNA, 25 bp, Saccharomyces pastorianus
gccactgtctctttgcatctatatt

SEQ ID NO: 100206 - DNA, 25 bp, Saccharomyces pastorianus
gaagcatccaaacaaccggacttga

SEQ ID NO: 100207 - DNA, 25 bp, Saccharomyces pastorianus
gagcacagggatgatttcattccat

SEQ ID NO: 100208 - DNA, 25 bp, Saccharomyces pastorianus
gactgccccattagcattctgatga

SEQ ID NO: 100209 - DNA, 25 bp, Saccharomyces pastorianus
gtaattacgtacaggagcacaggga

SEQ ID NO: 100210 - DNA, 25 bp, Saccharomyces pastorianus
gagtctatagatcagttatgcgagt

SEQ ID NO: 100211 - DNA, 25 bp, Saccharomyces pastorianus
gaatgttcccgttcaacaacagcaa

SEQ ID NO: 100212 - DNA, 25 bp, Saccharomyces pastorianus
aagaggctgctttagaagcatccaa

SEQ ID NO: 100213 - DNA, 25 bp, Saccharomyces pastorianus
attcgatatacaacccgatggccac

SEQ ID NO: 100214 - DNA, 25 bp, Saccharomyces pastorianus
gttcttcgacgtcccagtagataat

SEQ ID NO: 100215 - DNA, 25 bp, Saccharomyces pastorianus
aaatctgttattgctattgtcacgc

SEQ ID NO: 100216 - DNA, 25 bp, Saccharomyces pastorianus
ggccgatacttgtggtactttagct

SEQ ID NO: 100217 - DNA, 25 bp, Saccharomyces pastorianus
attcaagggttcttcgacgtcccag

SEQ ID NO: 100218 - DNA, 25 bp, Saccharomyces pastorianus
caacagccgggtgtgatcatgttat

SEQ ID NO: 100219 - DNA, 25 bp, Saccharomyces pastorianus
tattgctattgtcacgcacggtgtt

SEQ ID NO: 100220 - DNA, 25 bp, Saccharomyces pastorianus
tgatggccgatatgttaacaacagc

SEQ ID NO: 100221 - DNA, 25 bp, Saccharomyces pastorianus
ccaagcgtagttaggtatatcaagg

SEQ ID NO: 100222 - DNA, 25 bp, Saccharomyces pastorianus
cacggtgttttatcaggcagagcta

SEQ ID NO: 100223 - DNA, 25 bp, Saccharomyces pastorianus
gaagtgcccaaaactggcagtcatt

SEQ ID NO: 100224 - DNA, 25 bp, Saccharomyces pastorianus
cattgacatcagtagtgtgctggct

SEQ ID NO: 100225 - DNA, 25 bp, Saccharomyces pastorianus
aaggcatagggagtatcatctagaa

SEQ ID NO: 100226 - DNA, 25 bp, Saccharomyces pastorianus
aatggcccagaaatctaagcttgag

SEQ ID NO: 100227 - DNA, 25 bp, Saccharomyces pastorianus
gagctggcggcaaattttttaaggc

SEQ ID NO: 100228 - DNA, 25 bp, Saccharomyces pastorianus
gatataggcaactccgatgaactac

SEQ ID NO: 100229 - DNA, 25 bp, Saccharomyces pastorianus
gggcagcacaggcatccaaaagcaa

SEQ ID NO: 100230 - DNA, 25 bp, Saccharomyces pastorianus
gaaggtaccatcctaatacagcaac

SEQ ID NO: 100231 - DNA, 25 bp, Saccharomyces pastorianus
gactacaagcgaacctagatcactt

SEQ ID NO: 100232 - DNA, 25 bp, Saccharomyces pastorianus
tatgtgcaagtcctaatatctcaat

SEQ ID NO: 100233 - DNA, 25 bp, Saccharomyces pastorianus
aaactgcgtctgattcgtcgaatgt

SEQ ID NO: 100234 - DNA, 25 bp, Saccharomyces pastorianus
aaactccaatttcaggtcactcaaa

SEQ ID NO: 100235 - DNA, 25 bp, Saccharomyces pastorianus
ggacctaatgttttatctagattct

SEQ ID NO: 100236 - DNA, 25 bp, Saccharomyces pastorianus
cagattgctactgcggagtggtaat

SEQ ID NO: 100237 - DNA, 25 bp, Saccharomyces pastorianus
ggactccctcagttgctcataatga

SEQ ID NO: 100238 - DNA, 25 bp, Saccharomyces pastorianus
agagccgcccaaaaagccttcagag

SEQ ID NO: 100239 - DNA, 25 bp, Saccharomyces pastorianus
atatctccaagttcgaggactccct

SEQ ID NO: 100240 - DNA, 25 bp, Saccharomyces pastorianus
gaattttttacctctatggtcctgg

SEQ ID NO: 100241 - DNA, 25 bp, Saccharomyces pastorianus
atggtcctggaaagcaaactgaatc

SEQ ID NO: 100242 - DNA, 25 bp, Saccharomyces pastorianus
aatagcggtatatctccaagttcga

SEQ ID NO: 100243 - DNA, 25 bp, Saccharomyces pastorianus
gaatgttccagatgactctaaggca

SEQ ID NO: 100244 - DNA, 25 bp, Saccharomyces pastorianus
aatgttgtcatacccatggacctgc

SEQ ID NO: 100245 - DNA, 25 bp, Saccharomyces pastorianus
gatagggactttgatgtgacatacg

SEQ ID NO: 100246 - DNA, 25 bp, Saccharomyces pastorianus
gacctgcgtatccaagaagtttaat

SEQ ID NO: 100247 - DNA, 25 bp, Saccharomyces pastorianus
ttggtaatcgtaatccatcgccgcc

SEQ ID NO: 100248 - DNA, 25 bp, Saccharomyces pastorianus
ggatttgtatccaccagcttcatgg

SEQ ID NO: 100249 - DNA, 25 bp, Saccharomyces pastorianus
gggcagcattagtgcctttttgtaa

SEQ ID NO: 100250 - DNA, 25 bp, Saccharomyces pastorianus
gttccgatacagcagatggatcatt

SEQ ID NO: 100251 - DNA, 25 bp, Saccharomyces pastorianus
gtccttgtctggtagttccgataca

SEQ ID NO: 100252 - DNA, 25 bp, Saccharomyces pastorianus
gacgttcaaagttccagtggtcctt

SEQ ID NO: 100253 - DNA, 25 bp, Saccharomyces pastorianus
acctcgctctaattgtacgtacgga

SEQ ID NO: 100254 - DNA, 25 bp, Saccharomyces pastorianus
attgctcatttcttgtattagtcga

SEQ ID NO: 100255 - DNA, 25 bp, Saccharomyces pastorianus
aagtttgggttgcttgctacctcgc

SEQ ID NO: 100256 - DNA, 25 bp, Saccharomyces pastorianus
gataccgttatcaagactgtccttg

SEQ ID NO: 100257 - DNA, 25 bp, Saccharomyces pastorianus
ggccctttcattgtcattgctgata

SEQ ID NO: 100258 - DNA, 25 bp, Saccharomyces pastorianus
atagcagtgacctacgacatacaaa

SEQ ID NO: 100259 - DNA, 25 bp, Saccharomyces pastorianus
aggctctcgagcgtatgtacacttg

SEQ ID NO: 100260 - DNA, 25 bp, Saccharomyces pastorianus
tcgaatcacctgtatttgtgccccg

SEQ ID NO: 100261 - DNA, 25 bp, Saccharomyces pastorianus
gacatacaaatttcatctctcggat

SEQ ID NO: 100262 - DNA, 25 bp, Saccharomyces pastorianus
tcatctctcggattcacttaccgaa

SEQ ID NO: 100263 - DNA, 25 bp, Saccharomyces pastorianus
gtatgtacacttgccagaactgatt

SEQ ID NO: 100264 - DNA, 25 bp, Saccharomyces pastorianus
ttgtgccccgcgataatcaggctct

SEQ ID NO: 100265 - DNA, 25 bp, Saccharomyces pastorianus
ttttttcttgcactcttttctgacc

SEQ ID NO: 100266 - DNA, 25 bp, Saccharomyces pastorianus
gcacggccttttcttaccgagataa

SEQ ID NO: 100267 - DNA, 25 bp, Saccharomyces pastorianus
agcgggtgagtattcgtttcattac

SEQ ID NO: 100268 - DNA, 25 bp, Saccharomyces pastorianus
tctcactttttatttctcgaatcac

SEQ ID NO: 100269 - DNA, 25 bp, Saccharomyces pastorianus
ggtcagtcttaacagaattccgtca

SEQ ID NO: 100270 - DNA, 25 bp, Saccharomyces pastorianus
acaggcttgtgttcttgttctacaa

SEQ ID NO: 100271 - DNA, 25 bp, Saccharomyces pastorianus
cattttgggcgcaacaggcttgtgt

SEQ ID NO: 100272 - DNA, 25 bp, Saccharomyces pastorianus
ggatttcgttgccaattgtatttgt

SEQ ID NO: 100273 - DNA, 25 bp, Saccharomyces pastorianus
gcttgttcgtgttcttttggatcta

SEQ ID NO: 100274 - DNA, 25 bp, Saccharomyces pastorianus
gatataaccaatccgttcttgttta

SEQ ID NO: 100275 - DNA, 25 bp, Saccharomyces pastorianus
gaattctgtatttactccctttgtg

SEQ ID NO: 100276 - DNA, 25 bp, Saccharomyces pastorianus
atctatctgcgccatgtcgtgaata

SEQ ID NO: 100277 - DNA, 25 bp, Saccharomyces pastorianus
attttacttgggtcaagcggcattt

SEQ ID NO: 100278 - DNA, 25 bp, Saccharomyces pastorianus
gtatttgtactaattgctgcgttac

SEQ ID NO: 100279 - DNA, 25 bp, Saccharomyces pastorianus
ggaattggtttttcatcacattgtg

SEQ ID NO: 100280 - DNA, 25 bp, Saccharomyces pastorianus
gccttcaacagtgcattccttattt

SEQ ID NO: 100281 - DNA, 25 bp, Saccharomyces pastorianus
ggagcctttcttttaattttgtcat

SEQ ID NO: 100282 - DNA, 25 bp, Saccharomyces pastorianus
tgtccattatcttcgggatcttcct

SEQ ID NO: 100283 - DNA, 25 bp, Saccharomyces pastorianus
tgacaacatcagtcaccgctttttt

SEQ ID NO: 100284 - DNA, 25 bp, Saccharomyces pastorianus
agatcacgttagcatcctgttgttc

SEQ ID NO: 100285 - DNA, 25 bp, Saccharomyces pastorianus
ttgccagttatcacttctcaacttg

SEQ ID NO: 100286 - DNA, 25 bp, Saccharomyces pastorianus
atgcttctctggtacattaggctgt

SEQ ID NO: 100287 - DNA, 25 bp, Saccharomyces pastorianus
atatagatctcccatggcgcgtaat

SEQ ID NO: 100288 - DNA, 25 bp, Saccharomyces pastorianus
ggatcttccttcaccaaatcgcaaa

SEQ ID NO: 100289 - DNA, 25 bp, Saccharomyces pastorianus
aacttgggatctgttgccttcaaca

SEQ ID NO: 100290 - DNA, 25 bp, Saccharomyces pastorianus
gagacataacctcttgtccattatc

SEQ ID NO: 100291 - DNA, 25 bp, Saccharomyces pastorianus
ttacccttctaatttgccaatccaa

SEQ ID NO: 100292 - DNA, 25 bp, Saccharomyces pastorianus
taatactccagtaatgccacctcag

SEQ ID NO: 100293 - DNA, 25 bp, Saccharomyces pastorianus
tcaactaatggatcgtgcagctaac

SEQ ID NO: 100294 - DNA, 25 bp, Saccharomyces pastorianus
gcactctacgcaggaatgactcatg

SEQ ID NO: 100295 - DNA, 25 bp, Saccharomyces pastorianus
agcaatgagtactcaccttaccctt

SEQ ID NO: 100296 - DNA, 25 bp, Saccharomyces pastorianus
aaggaagccatagtattctctcaaa

SEQ ID NO: 100297 - DNA, 25 bp, Saccharomyces pastorianus
attcgcttaatgcagcttctaaaac

SEQ ID NO: 100298 - DNA, 25 bp, Saccharomyces pastorianus
gaagacatgttatccctgcgtcaag

SEQ ID NO: 100299 - DNA, 25 bp, Saccharomyces pastorianus
tacggatctgtaacgcctttgaggc

SEQ ID NO: 100300 - DNA, 25 bp, Saccharomyces pastorianus
tgccaatccaacatcctacgaatag

SEQ ID NO: 100301 - DNA, 25 bp, Saccharomyces pastorianus
gtaacaccgattgttgagccatcga

SEQ ID NO: 100302 - DNA, 25 bp, Saccharomyces pastorianus
aaaggctttatttctggtacctatg

SEQ ID NO: 100303 - DNA, 25 bp, Saccharomyces pastorianus
taaagtccgcccattggaggaacag

SEQ ID NO: 100304 - DNA, 25 bp, Saccharomyces pastorianus
gatcacatggtcattatgggtccta

SEQ ID NO: 100305 - DNA, 25 bp, Saccharomyces pastorianus
tgcgctggctgtacgtgaccatgaa

SEQ ID NO: 100306 - DNA, 25 bp, Saccharomyces pastorianus
atttacaagcacatccctgaaggga

SEQ ID NO: 100307 - DNA, 25 bp, Saccharomyces pastorianus
gagcattttggaaactgccccgatt

SEQ ID NO: 100308 - DNA, 25 bp, Saccharomyces pastorianus
tgccccgattttaccaggacagaca

SEQ ID NO: 100309 - DNA, 25 bp, Saccharomyces pastorianus
agcattttcctctagctcctaaagt

SEQ ID NO: 100310 - DNA, 25 bp, Saccharomyces pastorianus
cgaagacggcgttgaatttcattca

SEQ ID NO: 100311 - DNA, 25 bp, Saccharomyces pastorianus
aaggttacggatgcgctggctgtac

SEQ ID NO: 100312 - DNA, 25 bp, Saccharomyces pastorianus
agactgttctcttcgatactcatca

SEQ ID NO: 100313 - DNA, 25 bp, Saccharomyces pastorianus
gtgcactgtcaccaaaaactatgta

SEQ ID NO: 100314 - DNA, 25 bp, Saccharomyces pastorianus
tgtttccttttttgctcacgattta

SEQ ID NO: 100315 - DNA, 25 bp, Saccharomyces pastorianus
gattatattcctaactggttttgtc

SEQ ID NO: 100316 - DNA, 25 bp, Saccharomyces pastorianus
atataaggaaccagcttcagccacg

SEQ ID NO: 100317 - DNA, 25 bp, Saccharomyces pastorianus
ggttatgttccaactgtacttggca

SEQ ID NO: 100318 - DNA, 25 bp, Saccharomyces pastorianus
gaattgatctctggtggtctagctg

SEQ ID NO: 100319 - DNA, 25 bp, Saccharomyces pastorianus
aaacggcagcatatccatttgaaat

SEQ ID NO: 100320 - DNA, 25 bp, Saccharomyces pastorianus
catatccgttagatctcgtgagggt

SEQ ID NO: 100321 - DNA, 25 bp, Saccharomyces pastorianus
ggtctagctggtatggcctcccaaa

SEQ ID NO: 100322 - DNA, 25 bp, Saccharomyces pastorianus
gataccatatgcaggtgtttccttt

SEQ ID NO: 100323 - DNA, 25 bp, Saccharomyces pastorianus
ttctttgccccttattcagtattag

SEQ ID NO: 100324 - DNA, 25 bp, Saccharomyces pastorianus
gatacggacttactgaacctgttac

SEQ ID NO: 100325 - DNA, 25 bp, Saccharomyces pastorianus
aaggcagctcctcttctttggatga

SEQ ID NO: 100326 - DNA, 25 bp, Saccharomyces pastorianus
gtaattcttctcagggtcacttggt

SEQ ID NO: 100327 - DNA, 25 bp, Saccharomyces pastorianus
ggcttctcgaagtacaacgcatagt

SEQ ID NO: 100328 - DNA, 25 bp, Saccharomyces pastorianus
gattggttagaaagctccttcccat

SEQ ID NO: 100329 - DNA, 25 bp, Saccharomyces pastorianus
attaccgttctgattgcgttctaag

SEQ ID NO: 100330 - DNA, 25 bp, Saccharomyces pastorianus
ggattgagcggaattcgtacactat

SEQ ID NO: 100331 - DNA, 25 bp, Saccharomyces pastorianus
tgagaccttaattcactcggcttct

SEQ ID NO: 100332 - DNA, 25 bp, Saccharomyces pastorianus
gaacctgttacctttcttggaggct

SEQ ID NO: 100333 - DNA, 25 bp, Saccharomyces pastorianus
gaagctgatacctaaatccgtactt

SEQ ID NO: 100334 - DNA, 25 bp, Saccharomyces pastorianus
ataacagcccggtaagttacgcaat

SEQ ID NO: 100335 - DNA, 25 bp, Saccharomyces pastorianus
ttgagaccaatgttcaagtcggtga

SEQ ID NO: 100336 - DNA, 25 bp, Saccharomyces pastorianus
attcaagctgcggaagctgaactag

SEQ ID NO: 100337 - DNA, 25 bp, Saccharomyces pastorianus
aagaatgaatcttcgtgcctagaca

SEQ ID NO: 100338 - DNA, 25 bp, Saccharomyces pastorianus
tcttcgtgcctagacagatgtgtgg

SEQ ID NO: 100339 - DNA, 25 bp, Saccharomyces pastorianus
gaagctgaactagatttggtcacag

SEQ ID NO: 100340 - DNA, 25 bp, Saccharomyces pastorianus
tcttaggtttcggtggtggtcagcc

SEQ ID NO: 100341 - DNA, 25 bp, Saccharomyces pastorianus
ttggtcacagacatgttcaataaat

SEQ ID NO: 100342 - DNA, 25 bp, Saccharomyces pastorianus
gtggtcagcctcaattatcatctca

SEQ ID NO: 100343 - DNA, 25 bp, Saccharomyces pastorianus
gtgtggccaaatattttgagaccaa

SEQ ID NO: 100344 - DNA, 25 bp, Saccharomyces pastorianus
aatacttcttattccgagggtgagc

SEQ ID NO: 100345 - DNA, 25 bp, Saccharomyces pastorianus
tcaagtcggtgaaaacatgcagaaa

SEQ ID NO: 100346 - DNA, 25 bp, Saccharomyces pastorianus
tagttgccattgacgcctgggaaca

SEQ ID NO: 100347 - DNA, 25 bp, Saccharomyces pastorianus
attggaaccttatatctccggtcaa

SEQ ID NO: 100348 - DNA, 25 bp, Saccharomyces pastorianus
ggagaaccaaagtcaccttgccaga

SEQ ID NO: 100349 - DNA, 25 bp, Saccharomyces pastorianus
aggataccgtcacaggcccactagt

SEQ ID NO: 100350 - DNA, 25 bp, Saccharomyces pastorianus
gaaagccgactacttcaaagccatt

SEQ ID NO: 100351 - DNA, 25 bp, Saccharomyces pastorianus
ggcaatcgacgagcagtttggcagt

SEQ ID NO: 100352 - DNA, 25 bp, Saccharomyces pastorianus
agttccatggcggtggtttcacaaa

SEQ ID NO: 100353 - DNA, 25 bp, Saccharomyces pastorianus
gatgggccttcattgtgaaaaacct

SEQ ID NO: 100354 - DNA, 25 bp, Saccharomyces pastorianus
gtttcacaaaccactgtctattctg

SEQ ID NO: 100355 - DNA, 25 bp, Saccharomyces pastorianus
gtttggcagtctggacgagctgatt

SEQ ID NO: 100356 - DNA, 25 bp, Saccharomyces pastorianus
tagttcctctagttgccattgacgc

SEQ ID NO: 100357 - DNA, 25 bp, Saccharomyces pastorianus
tatcgcgttcatgagtttactaaag

SEQ ID NO: 100358 - DNA, 25 bp, Saccharomyces pastorianus
atttacgctcttcaagacaccaatt

SEQ ID NO: 100359 - DNA, 25 bp, Saccharomyces pastorianus
gataagtagtgcctccaattgtacc

SEQ ID NO: 100360 - DNA, 25 bp, Saccharomyces pastorianus
gaatatgtgcacacgctgaatggca

SEQ ID NO: 100361 - DNA, 25 bp, Saccharomyces pastorianus
gcaccggtaagatatctgttcctga

SEQ ID NO: 100362 - DNA, 25 bp, Saccharomyces pastorianus
atggcacagcaatggctatcccaag

SEQ ID NO: 100363 - DNA, 25 bp, Saccharomyces pastorianus
atttaggattggtggctaccgcgga

SEQ ID NO: 100364 - DNA, 25 bp, Saccharomyces pastorianus
gccagaaaccagtgcaaaagtcctt

SEQ ID NO: 100365 - DNA, 25 bp, Saccharomyces pastorianus
acgaaaggtctctatcgcgttcatg

SEQ ID NO: 100366 - DNA, 25 bp, Saccharomyces pastorianus
gctaccgcggagatacctttggcag

SEQ ID NO: 100367 - DNA, 25 bp, Saccharomyces pastorianus
aaaatttctatgacccaagcaccgg

SEQ ID NO: 100368 - DNA, 25 bp, Saccharomyces pastorianus
aaattagttggatacgttctcgtga

SEQ ID NO: 100369 - DNA, 25 bp, Saccharomyces pastorianus
gagcagctttacacttgtacaggga

SEQ ID NO: 100370 - DNA, 25 bp, Saccharomyces pastorianus
gaggcttcgtttgttgctactacca

SEQ ID NO: 100371 - DNA, 25 bp, Saccharomyces pastorianus
caacatacttggctccgggcgaaaa

SEQ ID NO: 100372 - DNA, 25 bp, Saccharomyces pastorianus
gaatatgtttccttgcatgtgagac

SEQ ID NO: 100373 - DNA, 25 bp, Saccharomyces pastorianus
tactaccaccactttggactgtgaa

SEQ ID NO: 100374 - DNA, 25 bp, Saccharomyces pastorianus
gtacagggacacattggcgtttgag

SEQ ID NO: 100375 - DNA, 25 bp, Saccharomyces pastorianus
gaccagcaaaacgagccaccaaatg

SEQ ID NO: 100376 - DNA, 25 bp, Saccharomyces pastorianus
cacccatcgccgtttgaaagagaat

SEQ ID NO: 100377 - DNA, 25 bp, Saccharomyces pastorianus
tatgtatcatattctctcgtggccg

SEQ ID NO: 100378 - DNA, 25 bp, Saccharomyces pastorianus
tgcagataagcaacttcacccatcg

SEQ ID NO: 100379 - DNA, 25 bp, Saccharomyces pastorianus
caaaatctacttcaacgccggttct

SEQ ID NO: 100380 - DNA, 25 bp, Saccharomyces pastorianus
tattgctccttctcctatgtataat

SEQ ID NO: 100381 - DNA, 25 bp, Saccharomyces pastorianus
gttaacgtatacgattcgccattgt

SEQ ID NO: 100382 - DNA, 25 bp, Saccharomyces pastorianus
agagaagcacccatgtttccagttc

SEQ ID NO: 100383 - DNA, 25 bp, Saccharomyces pastorianus
aagagacaccaagggcagcaccaaa

SEQ ID NO: 100384 - DNA, 25 bp, Saccharomyces pastorianus
atagagcgcccctcatttgataatt

SEQ ID NO: 100385 - DNA, 25 bp, Saccharomyces pastorianus
acggccggagttgctttatccgaat

SEQ ID NO: 100386 - DNA, 25 bp, Saccharomyces pastorianus
caacgttcctgacgccaagtcataa

SEQ ID NO: 100387 - DNA, 25 bp, Saccharomyces pastorianus
agttccttactatattgctccttct

SEQ ID NO: 100388 - DNA, 25 bp, Saccharomyces pastorianus
aagactgccccatcagaccaaaagt

SEQ ID NO: 100389 - DNA, 25 bp, Saccharomyces pastorianus
tatcttccaatatatccggtctcga

SEQ ID NO: 100390 - DNA, 25 bp, Saccharomyces pastorianus
ttcaacaagtagtttccccattctc

SEQ ID NO: 100391 - DNA, 25 bp, Saccharomyces pastorianus
attagttccatgatgcgtttccgca

SEQ ID NO: 100392 - DNA, 25 bp, Saccharomyces pastorianus
aaatctgcgcagcatttccgagttt

SEQ ID NO: 100393 - DNA, 25 bp, Saccharomyces pastorianus
tgcgtttccgcacacaagagttatc

SEQ ID NO: 100394 - DNA, 25 bp, Saccharomyces pastorianus
gcatgactcagaaaggctatcgcac

SEQ ID NO: 100395 - DNA, 25 bp, Saccharomyces pastorianus
ttgacgtattttgggagcatgactc

SEQ ID NO: 100396 - DNA, 25 bp, Saccharomyces pastorianus
ggctatcgcactttttattaatgac

SEQ ID NO: 100397 - DNA, 25 bp, Saccharomyces pastorianus
gaaacctcatccagcatttaattta

SEQ ID NO: 100398 - DNA, 25 bp, Saccharomyces pastorianus
gggattaacgtcacagtttcaacaa

SEQ ID NO: 100399 - DNA, 25 bp, Saccharomyces pastorianus
aaacatgaactctctcgtagctacg

SEQ ID NO: 100400 - DNA, 25 bp, Saccharomyces pastorianus
cgtagctacgccgatgaaacctcat

SEQ ID NO: 100401 - DNA, 25 bp, Saccharomyces pastorianus
gctccaaaggctccattcatgagat

SEQ ID NO: 100402 - DNA, 25 bp, Saccharomyces pastorianus
cactgtcagagactgttccttgtat

SEQ ID NO: 100403 - DNA, 25 bp, Saccharomyces pastorianus
aattggccttcttgactttcgacga

SEQ ID NO: 100404 - DNA, 25 bp, Saccharomyces pastorianus
atcggcgtcccaatctttttgacga

SEQ ID NO: 100405 - DNA, 25 bp, Saccharomyces pastorianus
catgaaacgttgttctgacgacccc

SEQ ID NO: 100406 - DNA, 25 bp, Saccharomyces pastorianus
aatccgttgacgttttgatgccaaa

SEQ ID NO: 100407 - DNA, 25 bp, Saccharomyces pastorianus
tgctggcccactcgtaaaacaattg

SEQ ID NO: 100408 - DNA, 25 bp, Saccharomyces pastorianus
acggtacttgcccacatggtggtta

SEQ ID NO: 100409 - DNA, 25 bp, Saccharomyces pastorianus
ttacctggttgaacgagcacgacat

SEQ ID NO: 100410 - DNA, 25 bp, Saccharomyces pastorianus
taccgaacgtattttggcctggttg

SEQ ID NO: 100411 - DNA, 25 bp, Saccharomyces pastorianus
ttggaagacccaattgctggcccac

SEQ ID NO: 100412 - DNA, 25 bp, Saccharomyces pastorianus
tattttcacattaagcagcaggcta

SEQ ID NO: 100413 - DNA, 25 bp, Saccharomyces pastorianus
gtggtagcgttttcagccaagcacg

SEQ ID NO: 100414 - DNA, 25 bp, Saccharomyces pastorianus
gaacagatcttttcactttctaata

SEQ ID NO: 100415 - DNA, 25 bp, Saccharomyces pastorianus
gatacatcttgcttataaacccttg

SEQ ID NO: 100416 - DNA, 25 bp, Saccharomyces pastorianus
caagcacgttttcgttggcgtttgt

SEQ ID NO: 100417 - DNA, 25 bp, Saccharomyces pastorianus
ggctttcgaagcttgtattacctcc

SEQ ID NO: 100418 - DNA, 25 bp, Saccharomyces pastorianus
aacccttgcaaaagtttcctgcgat

SEQ ID NO: 100419 - DNA, 25 bp, Saccharomyces pastorianus
ggtcttccctttgtcacgtaagaga

SEQ ID NO: 100420 - DNA, 25 bp, Saccharomyces pastorianus
gaggcgaattctccagcggatacat

SEQ ID NO: 100421 - DNA, 25 bp, Saccharomyces pastorianus
ggactttcatttgaccttcgagtgg

SEQ ID NO: 100422 - DNA, 25 bp, Saccharomyces pastorianus
tcctccagtttcaataacaccggtc

SEQ ID NO: 100423 - DNA, 25 bp, Saccharomyces pastorianus
gctcgattttcagcgaccttttctt

SEQ ID NO: 100424 - DNA, 25 bp, Saccharomyces pastorianus
tcgattttcagcgaccttttctttt

SEQ ID NO: 100425 - DNA, 25 bp, Saccharomyces pastorianus
ggctcgattttcagcgaccttttct

SEQ ID NO: 100426 - DNA, 25 bp, Saccharomyces pastorianus
cgattttcagcgaccttttcttttg

SEQ ID NO: 100427 - DNA, 25 bp, Saccharomyces pastorianus
gattttcagcgaccttttcttttga

SEQ ID NO: 100428 - DNA, 25 bp, Saccharomyces pastorianus
attttcagcgaccttttcttttgat

SEQ ID NO: 100429 - DNA, 25 bp, Saccharomyces pastorianus
cagcgaccttttcttttgataagta

SEQ ID NO: 100430 - DNA, 25 bp, Saccharomyces pastorianus
aatcaaattctcaagaggggctcga

SEQ ID NO: 100431 - DNA, 25 bp, Saccharomyces pastorianus
ttcagcgaccttttcttttgataag

SEQ ID NO: 100432 - DNA, 25 bp, Saccharomyces pastorianus
ttttcagcgaccttttcttttgata

SEQ ID NO: 100433 - DNA, 25 bp, Saccharomyces pastorianus
gggctcgattttcagcgaccttttc

SEQ ID NO: 100434 - DNA, 25 bp, Saccharomyces pastorianus
gaggctcaaatctctgacttagaaa

SEQ ID NO: 100435 - DNA, 25 bp, Saccharomyces pastorianus
ttcttaccgcgacaaagtgcaggaa

SEQ ID NO: 100436 - DNA, 25 bp, Saccharomyces pastorianus
ataattcttcttaccgcgacaaagt

SEQ ID NO: 100437 - DNA, 25 bp, Saccharomyces pastorianus
aacaccgacttacagcttcaactaa

SEQ ID NO: 100438 - DNA, 25 bp, Saccharomyces pastorianus
agtacatttctcaacaagagcttga

SEQ ID NO: 100439 - DNA, 25 bp, Saccharomyces pastorianus
cattacaggccagctgcaatggata

SEQ ID NO: 100440 - DNA, 25 bp, Saccharomyces pastorianus
ggttaagacattacaggccagctgc

SEQ ID NO: 100441 - DNA, 25 bp, Saccharomyces pastorianus
actttacaaaagctcaacaccgact

SEQ ID NO: 100442 - DNA, 25 bp, Saccharomyces pastorianus
ctaagaactcccaacaaacagatgt

SEQ ID NO: 100443 - DNA, 25 bp, Saccharomyces pastorianus
tatggtaagcctagaaacggacttg

SEQ ID NO: 100444 - DNA, 25 bp, Saccharomyces pastorianus
ggaggaaacactacaactgcaaatg

SEQ ID NO: 100445 - DNA, 25 bp, Saccharomyces pastorianus
atggtcgcaaaatcccagtcaacga

SEQ ID NO: 100446 - DNA, 25 bp, Saccharomyces pastorianus
agatgatatctcacgtgttgccgaa

SEQ ID NO: 100447 - DNA, 25 bp, Saccharomyces pastorianus
ttacttggaggtggtggttctttca

SEQ ID NO: 100448 - DNA, 25 bp, Saccharomyces pastorianus
atggattgggtaacagctcctcctc

SEQ ID NO: 100449 - DNA, 25 bp, Saccharomyces pastorianus
gacaagttctcatgcatggtcgcaa

SEQ ID NO: 100450 - DNA, 25 bp, Saccharomyces pastorianus
tgtatacccacgttttgaaccagta

SEQ ID NO: 100451 - DNA, 25 bp, Saccharomyces pastorianus
gcaggcagctcctcaagcggttgag

SEQ ID NO: 100452 - DNA, 25 bp, Saccharomyces pastorianus
gatgtattctcgtttgtatacccac

SEQ ID NO: 100453 - DNA, 25 bp, Saccharomyces pastorianus
attcggattctggtattttcggtat

SEQ ID NO: 100454 - DNA, 25 bp, Saccharomyces pastorianus
attatcttgtataccgcaggcagct

SEQ ID NO: 100455 - DNA, 25 bp, Saccharomyces pastorianus
gttgcgttcaaccattcttattcgg

SEQ ID NO: 100456 - DNA, 25 bp, Saccharomyces pastorianus
ttttgcggttcattcctaagggact

SEQ ID NO: 100457 - DNA, 25 bp, Saccharomyces pastorianus
atcatcccacagttcgagttgtcca

SEQ ID NO: 100458 - DNA, 25 bp, Saccharomyces pastorianus
aaacggcatcaagtgctcctggaaa

SEQ ID NO: 100459 - DNA, 25 bp, Saccharomyces pastorianus
taatgccgacttaatctaccctgct

SEQ ID NO: 100460 - DNA, 25 bp, Saccharomyces pastorianus
ataaccgctgctatgatgggaggct

SEQ ID NO: 100461 - DNA, 25 bp, Saccharomyces pastorianus
tgctatgcaagatcgtgtccaccaa

SEQ ID NO: 100462 - DNA, 25 bp, Saccharomyces pastorianus
gatcccaggtctcacggaaatctta

SEQ ID NO: 100463 - DNA, 25 bp, Saccharomyces pastorianus
ggaaatcttatcatgtgtcacccca

SEQ ID NO: 100464 - DNA, 25 bp, Saccharomyces pastorianus
aaagattggccgtcttgaccacagc

SEQ ID NO: 100465 - DNA, 25 bp, Saccharomyces pastorianus
ggctttggccactgagaatttcgaa

SEQ ID NO: 100466 - DNA, 25 bp, Saccharomyces pastorianus
agattccattggctgaggtgcttcc

SEQ ID NO: 100467 - DNA, 25 bp, Saccharomyces pastorianus
aagtggttgccatttacggtctgat

SEQ ID NO: 100468 - DNA, 25 bp, Saccharomyces pastorianus
gctactgctgagaacatgtactcga

SEQ ID NO: 100469 - DNA, 25 bp, Saccharomyces pastorianus
cgaaattgactgtggctactgctga

SEQ ID NO: 100470 - DNA, 25 bp, Saccharomyces pastorianus
gggtattttcattactggttcatcc

SEQ ID NO: 100471 - DNA, 25 bp, Saccharomyces pastorianus
tcatccatgattggtgccggtgtgc

SEQ ID NO: 100472 - DNA, 25 bp, Saccharomyces pastorianus
gccggtgtgcgtgctccaaggatta

SEQ ID NO: 100473 - DNA, 25 bp, Saccharomyces pastorianus
gctgattccgcattgtttgttaaaa

SEQ ID NO: 100474 - DNA, 25 bp, Saccharomyces pastorianus
acggtctgattattgccattgtctt

SEQ ID NO: 100475 - DNA, 25 bp, Saccharomyces pastorianus
ctgtacactggttattctcttttct

SEQ ID NO: 100476 - DNA, 25 bp, Saccharomyces pastorianus
atcgctgtcggtatcaccggtgcga

SEQ ID NO: 100477 - DNA, 25 bp, Saccharomyces pastorianus
gctccaaggattaccaccaagaatt

SEQ ID NO: 100478 - DNA, 25 bp, Saccharomyces pastorianus
caagacgctttgtttatcaccagat

SEQ ID NO: 100479 - DNA, 25 bp, Saccharomyces pastorianus
aactcgtttttcacatgacgccgat

SEQ ID NO: 100480 - DNA, 25 bp, Saccharomyces pastorianus
gaaggtgttcgataccttaactcgt

SEQ ID NO: 100481 - DNA, 25 bp, Saccharomyces pastorianus
aagattactggctggattacgcaat

SEQ ID NO: 100482 - DNA, 25 bp, Saccharomyces pastorianus
catgacgccgatttagaagtttcaa

SEQ ID NO: 100483 - DNA, 25 bp, Saccharomyces pastorianus
actaccgcagttggtttagtatcgc

SEQ ID NO: 100484 - DNA, 25 bp, Saccharomyces pastorianus
gcaatccactcctgttttactaaat

SEQ ID NO: 100485 - DNA, 25 bp, Saccharomyces pastorianus
aaactgtcggccaagcaggcagacc

SEQ ID NO: 100486 - DNA, 25 bp, Saccharomyces pastorianus
ttttcgctatgggtctatgtggtgc

SEQ ID NO: 100487 - DNA, 25 bp, Saccharomyces pastorianus
taaggccaaagtttattctagcatt

SEQ ID NO: 100488 - DNA, 25 bp, Saccharomyces pastorianus
aaaggttaatgtgcgcgttggtcaa

SEQ ID NO: 100489 - DNA, 25 bp, Saccharomyces pastorianus
gaagccgccatcaaaaactcctacg

SEQ ID NO: 100490 - DNA, 25 bp, Saccharomyces pastorianus
gagttcaccaaaaacaccactgcga

SEQ ID NO: 100491 - DNA, 25 bp, Saccharomyces pastorianus
gggaattatcctagcaggccctaaa

SEQ ID NO: 100492 - DNA, 25 bp, Saccharomyces pastorianus
cgacttctctcgtccaggaatgtaa

SEQ ID NO: 100493 - DNA, 25 bp, Saccharomyces pastorianus
ataaagcctcctgctcttttacata

SEQ ID NO: 100494 - DNA, 25 bp, Saccharomyces pastorianus
tagcttcaaagctccgatggctgat

SEQ ID NO: 100495 - DNA, 25 bp, Saccharomyces pastorianus
aaccacggatattaccatttctgag

SEQ ID NO: 100496 - DNA, 25 bp, Saccharomyces pastorianus
attttgctatgcttgcacaccagac

SEQ ID NO: 100497 - DNA, 25 bp, Saccharomyces pastorianus
aaatgagggcgtttgctccggtgat

SEQ ID NO: 100498 - DNA, 25 bp, Saccharomyces pastorianus
aagatcctgtttgtggtagtggttc

SEQ ID NO: 100499 - DNA, 25 bp, Saccharomyces pastorianus
tagtggttctgtagcccttgcaaga

SEQ ID NO: 100500 - DNA, 25 bp, Saccharomyces pastorianus
ggctgtttgtgagacaaccgctatt

SEQ ID NO: 100501 - DNA, 25 bp, Saccharomyces pastorianus
ggagatgagacctgccactggaaat

SEQ ID NO: 100502 - DNA, 25 bp, Saccharomyces pastorianus
aaggcatgatgcagatttcccacct

SEQ ID NO: 100503 - DNA, 25 bp, Saccharomyces pastorianus
gaaataccgcagatattccgcctca

SEQ ID NO: 100504 - DNA, 25 bp, Saccharomyces pastorianus
agatggccacgtctaattctgttgc

SEQ ID NO: 100505 - DNA, 25 bp, Saccharomyces pastorianus
attaccgtggatgaggccctggagc

SEQ ID NO: 100506 - DNA, 25 bp, Saccharomyces pastorianus
gcaacagcagccttcagatgtggat

SEQ ID NO: 100507 - DNA, 25 bp, Saccharomyces pastorianus
gtggataatggcaacgccgcagcga

SEQ ID NO: 100508 - DNA, 25 bp, Saccharomyces pastorianus
attccgcctcagaatgataacggca

SEQ ID NO: 100509 - DNA, 25 bp, Saccharomyces pastorianus
gcatccttacttgtccatatggcat

SEQ ID NO: 100510 - DNA, 25 bp, Saccharomyces pastorianus
taacggcacgcttctagaccttgaa

SEQ ID NO: 100511 - DNA, 25 bp, Saccharomyces pastorianus
atgcgtccgctccaattatacgagt

SEQ ID NO: 100512 - DNA, 25 bp, Saccharomyces pastorianus
gggcgccattatcatcgacgagaac

SEQ ID NO: 100513 - DNA, 25 bp, Saccharomyces pastorianus
caaaataggccagcggttacccaat

SEQ ID NO: 100514 - DNA, 25 bp, Saccharomyces pastorianus
gagtacgtcccgaagatcgttgact

SEQ ID NO: 100515 - DNA, 25 bp, Saccharomyces pastorianus
cagcagtttctcgatcttcaggata

SEQ ID NO: 100516 - DNA, 25 bp, Saccharomyces pastorianus
aacgccgtgatcgaagtccgagaca

SEQ ID NO: 100517 - DNA, 25 bp, Saccharomyces pastorianus
agagctcgaacagttgcgtcgctac

SEQ ID NO: 100518 - DNA, 25 bp, Saccharomyces pastorianus
ggactcattaccaagggcgccatta

SEQ ID NO: 100519 - DNA, 25 bp, Saccharomyces pastorianus
ctctaatgccggtatcgagactatt

SEQ ID NO: 100520 - DNA, 25 bp, Saccharomyces pastorianus
aattttggattctgcacggactcat

SEQ ID NO: 100521 - DNA, 25 bp, Saccharomyces pastorianus
gattcagtctgttggatgcgtccgc

SEQ ID NO: 100522 - DNA, 25 bp, Saccharomyces pastorianus
taacgatatctttttccgtgcaaga

SEQ ID NO: 100523 - DNA, 25 bp, Saccharomyces pastorianus
attcacatccggcatcaagagcgtc

SEQ ID NO: 100524 - DNA, 25 bp, Saccharomyces pastorianus
aaatcgttgtaaccagacgcctggc

SEQ ID NO: 100525 - DNA, 25 bp, Saccharomyces pastorianus
ggtgtttcagttcgaatttcttact

SEQ ID NO: 100526 - DNA, 25 bp, Saccharomyces pastorianus
gaagctttcaagttgcctaaaccat

SEQ ID NO: 100527 - DNA, 25 bp, Saccharomyces pastorianus
agagcgtcatatgccctaatgtcat

SEQ ID NO: 100528 - DNA, 25 bp, Saccharomyces pastorianus
gagcagtacctcacaaatcgttgta

SEQ ID NO: 100529 - DNA, 25 bp, Saccharomyces pastorianus
taaaccatggtcacccaattcacat

SEQ ID NO: 100530 - DNA, 25 bp, Saccharomyces pastorianus
tactctcatttatcatagcgcttca

SEQ ID NO: 100531 - DNA, 25 bp, Saccharomyces pastorianus
atcaaaacatatcccttgccatctt

SEQ ID NO: 100532 - DNA, 25 bp, Saccharomyces pastorianus
cggctctgggcgaacaatgtgctat

SEQ ID NO: 100533 - DNA, 25 bp, Saccharomyces pastorianus
gtgtttggcccaattttagtcatga

SEQ ID NO: 100534 - DNA, 25 bp, Saccharomyces pastorianus
ttcaaggtggttcccgcttcaaaca

SEQ ID NO: 100535 - DNA, 25 bp, Saccharomyces pastorianus
ggttctgtgtttggtgcggatatca

SEQ ID NO: 100536 - DNA, 25 bp, Saccharomyces pastorianus
gagcttatacgaattccacatggca

SEQ ID NO: 100537 - DNA, 25 bp, Saccharomyces pastorianus
caactcttttggtggatgtcactcc

SEQ ID NO: 100538 - DNA, 25 bp, Saccharomyces pastorianus
aggtcttttgggtttgtgcaatgcc

SEQ ID NO: 100539 - DNA, 25 bp, Saccharomyces pastorianus
tagactaccctattcgtaacaatgc

SEQ ID NO: 100540 - DNA, 25 bp, Saccharomyces pastorianus
ttgtgtacaactagccaactctgcg

SEQ ID NO: 100541 - DNA, 25 bp, Saccharomyces pastorianus
gcaattacgtcgcaaatagcctaca

SEQ ID NO: 100542 - DNA, 25 bp, Saccharomyces pastorianus
agggagctcgtttacttcaaggtgg

SEQ ID NO: 100543 - DNA, 25 bp, Saccharomyces pastorianus
tgcgccatttggtctaggtggttct

SEQ ID NO: 100544 - DNA, 25 bp, Saccharomyces pastorianus
aaccgcattggttggcatcttatcc

SEQ ID NO: 100545 - DNA, 25 bp, Saccharomyces pastorianus
tggcccacgtaaacttttcgccaat

SEQ ID NO: 100546 - DNA, 25 bp, Saccharomyces pastorianus
gtcgcgttcctcgaatcacaaaaga

SEQ ID NO: 100547 - DNA, 25 bp, Saccharomyces pastorianus
aacattgccgaaactaacctacctg

SEQ ID NO: 100548 - DNA, 25 bp, Saccharomyces pastorianus
cggtgcatttatctacgtctgtggt

SEQ ID NO: 100549 - DNA, 25 bp, Saccharomyces pastorianus
gatgatttcttgtaccaggacgaat

SEQ ID NO: 100550 - DNA, 25 bp, Saccharomyces pastorianus
ggatcccgtaacactgatgatttct

SEQ ID NO: 100551 - DNA, 25 bp, Saccharomyces pastorianus
gttcactacgatttaaatggcccac

SEQ ID NO: 100552 - DNA, 25 bp, Saccharomyces pastorianus
gttcgttcgaaatggtcgtggccca

SEQ ID NO: 100553 - DNA, 25 bp, Saccharomyces pastorianus
gttctaacttcagattgccttccaa

SEQ ID NO: 100554 - DNA, 25 bp, Saccharomyces pastorianus
ttatcagagagcgtgtcgcgttcct

SEQ ID NO: 100555 - DNA, 25 bp, Saccharomyces pastorianus
tcacaagaggttttgagaaggtttt

SEQ ID NO: 100556 - DNA, 25 bp, Saccharomyces pastorianus
ttgctcatagttacttggacacagt

SEQ ID NO: 100557 - DNA, 25 bp, Saccharomyces pastorianus
tcatagttacttggacacagtaagc

SEQ ID NO: 100558 - DNA, 25 bp, Saccharomyces pastorianus
gatccttccgagttatttaagcatt

SEQ ID NO: 100559 - DNA, 25 bp, Saccharomyces pastorianus
cttgctctagaaaaagatattgctc

SEQ ID NO: 100560 - DNA, 25 bp, Saccharomyces pastorianus
gcaagatcacaagaggttttgagaa

SEQ ID NO: 100561 - DNA, 25 bp, Saccharomyces pastorianus
agatattgctcatagttacttggac

SEQ ID NO: 100562 - DNA, 25 bp, Saccharomyces pastorianus
cgagttatttaagcattctcatggt

SEQ ID NO: 100563 - DNA, 25 bp, Saccharomyces pastorianus
tgatacagacaataaaggtgttctt

SEQ ID NO: 100564 - DNA, 25 bp, Saccharomyces pastorianus
aaaggtgttcttgctctagaaaaag

SEQ ID NO: 100565 - DNA, 25 bp, Saccharomyces pastorianus
ttccctaaattggatgatacagaca

SEQ ID NO: 100566 - DNA, 25 bp, Saccharomyces pastorianus
aagcccaaagttttcattactggat

SEQ ID NO: 100567 - DNA, 25 bp, Saccharomyces pastorianus
actgtgggtataacatcctcgtatg

SEQ ID NO: 100568 - DNA, 25 bp, Saccharomyces pastorianus
tgtctttgaagatgcacccgtgggc

SEQ ID NO: 100569 - DNA, 25 bp, Saccharomyces pastorianus
gaacggtaagcctgatcccgagggt

SEQ ID NO: 100570 - DNA, 25 bp, Saccharomyces pastorianus
ggttctccatatttggcattttcat

SEQ ID NO: 100571 - DNA, 25 bp, Saccharomyces pastorianus
gatcccgagggttactcaagagctc

SEQ ID NO: 100572 - DNA, 25 bp, Saccharomyces pastorianus
tatcgttacctctggttctccatat

SEQ ID NO: 100573 - DNA, 25 bp, Saccharomyces pastorianus
cacccgtgggcataaaggccggcaa

SEQ ID NO: 100574 - DNA, 25 bp, Saccharomyces pastorianus
aagagctcgtgatttattgcgtcaa

SEQ ID NO: 100575 - DNA, 25 bp, Saccharomyces pastorianus
gcaatgggcgcaattactgtgggta

SEQ ID NO: 100576 - DNA, 25 bp, Saccharomyces pastorianus
ggcattttcatggttcgagacaata

SEQ ID NO: 100577 - DNA, 25 bp, Saccharomyces pastorianus
cagaatcgagccacattctcttgaa

SEQ ID NO: 100578 - DNA, 25 bp, Saccharomyces pastorianus
gaatcaccccaagtactgaacaatt

SEQ ID NO: 100579 - DNA, 25 bp, Saccharomyces pastorianus
gaaaattgccagaatcgagccacat

SEQ ID NO: 100580 - DNA, 25 bp, Saccharomyces pastorianus
aagatgcgtttatttggcagataat

SEQ ID NO: 100581 - DNA, 25 bp, Saccharomyces pastorianus
taagagcccaattaggatcccgtgt

SEQ ID NO: 100582 - DNA, 25 bp, Saccharomyces pastorianus
ggccacgaacttactgagcgagggt

SEQ ID NO: 100583 - DNA, 25 bp, Saccharomyces pastorianus
aaatctacttatcctgggccacgaa

SEQ ID NO: 100584 - DNA, 25 bp, Saccharomyces pastorianus
gtgggctgctgaataaaatctactt

SEQ ID NO: 100585 - DNA, 25 bp, Saccharomyces pastorianus
tctaattctagaagtgggctgctga

SEQ ID NO: 100586 - DNA, 25 bp, Saccharomyces pastorianus
agactaaccggagaatcaccccaag

SEQ ID NO: 100587 - DNA, 25 bp, Saccharomyces pastorianus
gaggttatttcgacatttcctgaaa

SEQ ID NO: 100588 - DNA, 25 bp, Saccharomyces pastorianus
ctcacattaatcttctggtatccgc

SEQ ID NO: 100589 - DNA, 25 bp, Saccharomyces pastorianus
gatttcccatttagctgtacctctc

SEQ ID NO: 100590 - DNA, 25 bp, Saccharomyces pastorianus
ggcgttatatataatcctcacatta

SEQ ID NO: 100591 - DNA, 25 bp, Saccharomyces pastorianus
tacaaactttgttcatgatttccca

SEQ ID NO: 100592 - DNA, 25 bp, Saccharomyces pastorianus
aatctatgggttctctaatactaaa

SEQ ID NO: 100593 - DNA, 25 bp, Saccharomyces pastorianus
ctatcatgtgattacggttttgttc

SEQ ID NO: 100594 - DNA, 25 bp, Saccharomyces pastorianus
atcttctggtatccgcttctaaagg

SEQ ID NO: 100595 - DNA, 25 bp, Saccharomyces pastorianus
tgtacctctcttgggctcacagtaa

SEQ ID NO: 100596 - DNA, 25 bp, Saccharomyces pastorianus
attacagccaggttccgctagagag

SEQ ID NO: 100597 - DNA, 25 bp, Saccharomyces pastorianus
caaagagcccgtagtaggcgttata

SEQ ID NO: 100598 - DNA, 25 bp, Saccharomyces pastorianus
atccgtagtggcattacagccaggt

SEQ ID NO: 100599 - DNA, 25 bp, Saccharomyces pastorianus
agttgggctcttcatttttgcattc

SEQ ID NO: 100600 - DNA, 25 bp, Saccharomyces pastorianus
ctgtcccatttctgtttaccaagta

SEQ ID NO: 100601 - DNA, 25 bp, Saccharomyces pastorianus
gtagcgtttccttacgtgttcaaga

SEQ ID NO: 100602 - DNA, 25 bp, Saccharomyces pastorianus
gctcctacttgcttgttattccaaa

SEQ ID NO: 100603 - DNA, 25 bp, Saccharomyces pastorianus
aatggtgaccgtagcgatgattcct

SEQ ID NO: 100604 - DNA, 25 bp, Saccharomyces pastorianus
gaaactttacaactttgggcccatg

SEQ ID NO: 100605 - DNA, 25 bp, Saccharomyces pastorianus
gtgtgctttgcttctatactggatt

SEQ ID NO: 100606 - DNA, 25 bp, Saccharomyces pastorianus
gagattgcatgctcctatatcggta

SEQ ID NO: 100607 - DNA, 25 bp, Saccharomyces pastorianus
atgcggcttctggaatggcttgtaa

SEQ ID NO: 100608 - DNA, 25 bp, Saccharomyces pastorianus
ttatggtcggcatgatactctcggc

SEQ ID NO: 100609 - DNA, 25 bp, Saccharomyces pastorianus
aatgagattcgagcctctgttctac

SEQ ID NO: 100610 - DNA, 25 bp, Saccharomyces pastorianus
caagccaccctagatgcggatgtta

SEQ ID NO: 100611 - DNA, 25 bp, Saccharomyces pastorianus
tcagagttagttccagaccatccac

SEQ ID NO: 100612 - DNA, 25 bp, Saccharomyces pastorianus
atattgatgcaccagtccttttaga

SEQ ID NO: 100613 - DNA, 25 bp, Saccharomyces pastorianus
aagtgtagtcatttccggctattcc

SEQ ID NO: 100614 - DNA, 25 bp, Saccharomyces pastorianus
gttggcttacgaacaccctggtgga

SEQ ID NO: 100615 - DNA, 25 bp, Saccharomyces pastorianus
tgtcctctatcatcaccaacaagat

SEQ ID NO: 100616 - DNA, 25 bp, Saccharomyces pastorianus
cagagcctggttctatcacagcgaa

SEQ ID NO: 100617 - DNA, 25 bp, Saccharomyces pastorianus
atcacagcgaaatctctcacgaatt

SEQ ID NO: 100618 - DNA, 25 bp, Saccharomyces pastorianus
aggccaatggtccatacgacggcat

SEQ ID NO: 100619 - DNA, 25 bp, Saccharomyces pastorianus
acggcattgtcggtttctctcaagg

SEQ ID NO: 100620 - DNA, 25 bp, Saccharomyces pastorianus
gatcttcatctatggtgcttctgac

SEQ ID NO: 100621 - DNA, 25 bp, Saccharomyces pastorianus
gattatgcgtgtacagcttaaccgt

SEQ ID NO: 100622 - DNA, 25 bp, Saccharomyces pastorianus
cagagtgccggtatcgtgtgtacgt

SEQ ID NO: 100623 - DNA, 25 bp, Saccharomyces pastorianus
ccgtgctcgcaatcatagtatggtt

SEQ ID NO: 100624 - DNA, 25 bp, Saccharomyces pastorianus
aatggaatgatcgtcaccgtgctcg

SEQ ID NO: 100625 - DNA, 25 bp, Saccharomyces pastorianus
aaattggactgtttctccggcattg

SEQ ID NO: 100626 - DNA, 25 bp, Saccharomyces pastorianus
actctgtagtactctttccaaggga

SEQ ID NO: 100627 - DNA, 25 bp, Saccharomyces pastorianus
tagcggcctctctggtgcactaaat

SEQ ID NO: 100628 - DNA, 25 bp, Saccharomyces pastorianus
tagtttctcctgctccagaatacaa

SEQ ID NO: 100629 - DNA, 25 bp, Saccharomyces pastorianus
cgtggccgaccgaaccgaagatgat

SEQ ID NO: 100630 - DNA, 25 bp, Saccharomyces pastorianus
gattatctccggactgaacttttat

SEQ ID NO: 100631 - DNA, 25 bp, Saccharomyces pastorianus
gtttctgcacctttactttacttca

SEQ ID NO: 100632 - DNA, 25 bp, Saccharomyces pastorianus
ggttacctcatttctttacatttca

SEQ ID NO: 100633 - DNA, 25 bp, Saccharomyces pastorianus
gtgccagatctcaaggttacctcat

SEQ ID NO: 100634 - DNA, 25 bp, Saccharomyces pastorianus
attgctcttgcttatcaaggtgcca

SEQ ID NO: 100635 - DNA, 25 bp, Saccharomyces pastorianus
ccacattttagcacacttatttatt

SEQ ID NO: 100636 - DNA, 25 bp, Saccharomyces pastorianus
ggtccggtcaaagcattaataaaga

SEQ ID NO: 100637 - DNA, 25 bp, Saccharomyces pastorianus
cctcatttctttacatttcatccac

SEQ ID NO: 100638 - DNA, 25 bp, Saccharomyces pastorianus
ctaattggtccggtcaaagcattaa

SEQ ID NO: 100639 - DNA, 25 bp, Saccharomyces pastorianus
agatcaacaattgctcttgcttatc

SEQ ID NO: 100640 - DNA, 25 bp, Saccharomyces pastorianus
tgcttatcaaggtgccagatctcaa

SEQ ID NO: 100641 - DNA, 25 bp, Saccharomyces pastorianus
tacatttcatccacattttagcaca

SEQ ID NO: 100642 - DNA, 25 bp, Saccharomyces pastorianus
ttcatccacattttagcacacttat

SEQ ID NO: 100643 - DNA, 25 bp, Saccharomyces pastorianus
gaagtattctgacgcacatgatgaa

SEQ ID NO: 100644 - DNA, 25 bp, Saccharomyces pastorianus
gaagcctatgatttgtttgaagtgc

SEQ ID NO: 100645 - DNA, 25 bp, Saccharomyces pastorianus
ttcctgctcctgctgttattgagaa

SEQ ID NO: 100646 - DNA, 25 bp, Saccharomyces pastorianus
gagtgctcaacaactgtttttccta

SEQ ID NO: 100647 - DNA, 25 bp, Saccharomyces pastorianus
gtgcttatcatgcaactagattgac

SEQ ID NO: 100648 - DNA, 25 bp, Saccharomyces pastorianus
acctaccgcaattagagtatttgag

SEQ ID NO: 100649 - DNA, 25 bp, Saccharomyces pastorianus
gccagacctggtgcttatcatgcaa

SEQ ID NO: 100650 - DNA, 25 bp, Saccharomyces pastorianus
tcagacaagaattgggcgttccctt

SEQ ID NO: 100651 - DNA, 25 bp, Saccharomyces pastorianus
ttcctatgatttagttcctgctcct

SEQ ID NO: 100652 - DNA, 25 bp, Saccharomyces pastorianus
gagaaagctttgagggccgccagaa

SEQ ID NO: 100653 - DNA, 25 bp, Saccharomyces pastorianus
gaactttattgagagccagacctgg

SEQ ID NO: 100654 - DNA, 25 bp, Saccharomyces pastorianus
gttttctttgattttggctgacgac

SEQ ID NO: 100655 - DNA, 25 bp, Saccharomyces pastorianus
atacatgaatcagttgcccgttaaa

SEQ ID NO: 100656 - DNA, 25 bp, Saccharomyces pastorianus
gaggtaccacgttgaatgtccattt

SEQ ID NO: 100657 - DNA, 25 bp, Saccharomyces pastorianus
tcaagaccaataagtcgcccgtatt

SEQ ID NO: 100658 - DNA, 25 bp, Saccharomyces pastorianus
ggctagaaacgcttttatatctcag

SEQ ID NO: 100659 - DNA, 25 bp, Saccharomyces pastorianus
aaagagatcttctagcgagcttgaa

SEQ ID NO: 100660 - DNA, 25 bp, Saccharomyces pastorianus
tataaccaggacgttcttgatgaac

SEQ ID NO: 100661 - DNA, 25 bp, Saccharomyces pastorianus
caatccttccgaattgggttcaatt

SEQ ID NO: 100662 - DNA, 25 bp, Saccharomyces pastorianus
gtcgcccgtattgccattatactat

SEQ ID NO: 100663 - DNA, 25 bp, Saccharomyces pastorianus
caagttcatttgtctaccttcaaca

SEQ ID NO: 100664 - DNA, 25 bp, Saccharomyces pastorianus
gatggaaatcgccaatccttccgaa

SEQ ID NO: 100665 - DNA, 25 bp, Saccharomyces pastorianus
gggcagctacatgatttttggcatt

SEQ ID NO: 100666 - DNA, 25 bp, Saccharomyces pastorianus
tgttacaccccgttgggcagctaca

SEQ ID NO: 100667 - DNA, 25 bp, Saccharomyces pastorianus
ttggtttcttcagacttgttaccgc

SEQ ID NO: 100668 - DNA, 25 bp, Saccharomyces pastorianus
accccgttgggcagctacatgattt

SEQ ID NO: 100669 - DNA, 25 bp, Saccharomyces pastorianus
atttgtcgtcgctgttacaccccgt

SEQ ID NO: 100670 - DNA, 25 bp, Saccharomyces pastorianus
ggcattgttcattatttttgcagct

SEQ ID NO: 100671 - DNA, 25 bp, Saccharomyces pastorianus
tttttgcagctaccacattggcatt

SEQ ID NO: 100672 - DNA, 25 bp, Saccharomyces pastorianus
gttcattatttttgcagctaccaca

SEQ ID NO: 100673 - DNA, 25 bp, Saccharomyces pastorianus
gctacatgatttttggcattgttca

SEQ ID NO: 100674 - DNA, 25 bp, Saccharomyces pastorianus
tttcttcagacttgttaccgcaggg

SEQ ID NO: 100675 - DNA, 25 bp, Saccharomyces pastorianus
gggcatttgtcgtcgctgttacacc

SEQ ID NO: 100676 - DNA, 25 bp, Saccharomyces pastorianus
gaaggtcatgagtgccaatgccaat

SEQ ID NO: 100677 - DNA, 25 bp, Saccharomyces pastorianus
ggtcatgagtgccaatgccaatgtg

SEQ ID NO: 100678 - DNA, 25 bp, Saccharomyces pastorianus
gttcagcgaattaattaacttccaa

SEQ ID NO: 100679 - DNA, 25 bp, Saccharomyces pastorianus
gccaatgtggtagctgcaaaaataa

SEQ ID NO: 100680 - DNA, 25 bp, Saccharomyces pastorianus
aaaaatcatgtagctgcccaacggg

SEQ ID NO: 100681 - DNA, 25 bp, Saccharomyces pastorianus
attaacttccaaaatgaaggtcatg

SEQ ID NO: 100682 - DNA, 25 bp, Saccharomyces pastorianus
agcgacgacaaatgcccctgcggta

SEQ ID NO: 100683 - DNA, 25 bp, Saccharomyces pastorianus
tgtaacagcgacgacaaatgcccct

SEQ ID NO: 100684 - DNA, 25 bp, Saccharomyces pastorianus
gccaatgccaatgtggtagctgcaa

SEQ ID NO: 100685 - DNA, 25 bp, Saccharomyces pastorianus
tgccaaaaatcatgtagctgcccaa

SEQ ID NO: 100686 - DNA, 25 bp, Saccharomyces pastorianus
cgacaaatgcccctgcggtaacaag

SEQ ID NO: 100687 - DNA, 25 bp, Saccharomyces pastorianus
gaactacatacagcacgtgtccaga

SEQ ID NO: 100688 - DNA, 25 bp, Saccharomyces pastorianus
atgacaaacctctcgaggcggtcaa

SEQ ID NO: 100689 - DNA, 25 bp, Saccharomyces pastorianus
gggtgattcccaacttcatggtaca

SEQ ID NO: 100690 - DNA, 25 bp, Saccharomyces pastorianus
aagcgtcgtggctcgatggaaagca

SEQ ID NO: 100691 - DNA, 25 bp, Saccharomyces pastorianus
atggagatactttccctgacgaaaa

SEQ ID NO: 100692 - DNA, 25 bp, Saccharomyces pastorianus
ttaagcaccaccactaattccaaaa

SEQ ID NO: 100693 - DNA, 25 bp, Saccharomyces pastorianus
gcaagggcagactatcgatggctaa

SEQ ID NO: 100694 - DNA, 25 bp, Saccharomyces pastorianus
tggttgttattattccttagcgtta

SEQ ID NO: 100695 - DNA, 25 bp, Saccharomyces pastorianus
atcgggtccactttccatagggtga

SEQ ID NO: 100696 - DNA, 25 bp, Saccharomyces pastorianus
aatggatctcagttcttcatcacca

SEQ ID NO: 100697 - DNA, 25 bp, Saccharomyces pastorianus
acggcactggcgttggtggcaaatc

SEQ ID NO: 100698 - DNA, 25 bp, Saccharomyces pastorianus
agatcggtcgaaattgcaacgaatt

SEQ ID NO: 100699 - DNA, 25 bp, Saccharomyces pastorianus
taccttcccggattagccacaaatt

SEQ ID NO: 100700 - DNA, 25 bp, Saccharomyces pastorianus
aaagctgcctatcgtttcagttcga

SEQ ID NO: 100701 - DNA, 25 bp, Saccharomyces pastorianus
tatcgtaacaataggccaattcatg

SEQ ID NO: 100702 - DNA, 25 bp, Saccharomyces pastorianus
caggtacctgacgtagatgcatttc

SEQ ID NO: 100703 - DNA, 25 bp, Saccharomyces pastorianus
tatcgtttcagttcgaccatcccca

SEQ ID NO: 100704 - DNA, 25 bp, Saccharomyces pastorianus
gatgcatttctaaacaagatcggtc

SEQ ID NO: 100705 - DNA, 25 bp, Saccharomyces pastorianus
gccacaaatttcctctattcttaag

SEQ ID NO: 100706 - DNA, 25 bp, Saccharomyces pastorianus
atccccaaaccaagcgatcaggtac

SEQ ID NO: 100707 - DNA, 25 bp, Saccharomyces pastorianus
ctggaacaaccttttccaatgggat

SEQ ID NO: 100708 - DNA, 25 bp, Saccharomyces pastorianus
tattcttaaggagctcgctggccgc

SEQ ID NO: 100709 - DNA, 25 bp, Saccharomyces pastorianus
agtgcgctacatacgcccgaattag

SEQ ID NO: 100710 - DNA, 25 bp, Saccharomyces pastorianus
agtcgctaaattcccctggtaacag

SEQ ID NO: 100711 - DNA, 25 bp, Saccharomyces pastorianus
agtcaaattcacgtctttggcaccg

SEQ ID NO: 100712 - DNA, 25 bp, Saccharomyces pastorianus
gagacatgggtctgccaaaaccgca

SEQ ID NO: 100713 - DNA, 25 bp, Saccharomyces pastorianus
agcagaatagtgtcttcctccacaa

SEQ ID NO: 100714 - DNA, 25 bp, Saccharomyces pastorianus
aacgatggattctcaccacgatgat

SEQ ID NO: 100715 - DNA, 25 bp, Saccharomyces pastorianus
atacatttccttctgttcttggaga

SEQ ID NO: 100716 - DNA, 25 bp, Saccharomyces pastorianus
agaatatctgtggacgacgtgctaa

SEQ ID NO: 100717 - DNA, 25 bp, Saccharomyces pastorianus
cctctgtttcatcattttctggcaa

SEQ ID NO: 100718 - DNA, 25 bp, Saccharomyces pastorianus
gggaagacaaccctcttgagtcgca

SEQ ID NO: 100719 - DNA, 25 bp, Saccharomyces pastorianus
gattttcaccatatttcgcatgcta

SEQ ID NO: 100720 - DNA, 25 bp, Saccharomyces pastorianus
atggctatgctttgcgtgacgtaca

SEQ ID NO: 100721 - DNA, 25 bp, Saccharomyces pastorianus
aaggccatgggagacctagcttcac

SEQ ID NO: 100722 - DNA, 25 bp, Saccharomyces pastorianus
aagctcggaggcagttcgtatccaa

SEQ ID NO: 100723 - DNA, 25 bp, Saccharomyces pastorianus
gacgacgtccagaccatcaaggtag

SEQ ID NO: 100724 - DNA, 25 bp, Saccharomyces pastorianus
gcctgcctactttccttaagcataa

SEQ ID NO: 100725 - DNA, 25 bp, Saccharomyces pastorianus
atgttcaaggcatcgacgacgtcca

SEQ ID NO: 100726 - DNA, 25 bp, Saccharomyces pastorianus
attgacttgttgacctttcagtacg

SEQ ID NO: 100727 - DNA, 25 bp, Saccharomyces pastorianus
gtccagaggcattgttatcggcagt

SEQ ID NO: 100728 - DNA, 25 bp, Saccharomyces pastorianus
gaagggacagtctctttccaagata

SEQ ID NO: 100729 - DNA, 25 bp, Saccharomyces pastorianus
gggccttactttatcaactaccaat

SEQ ID NO: 100730 - DNA, 25 bp, Saccharomyces pastorianus
taggtcttccgagcgataggtgttc

SEQ ID NO: 100731 - DNA, 25 bp, Saccharomyces pastorianus
acggctattctagattgtgtcaatg

SEQ ID NO: 100732 - DNA, 25 bp, Saccharomyces pastorianus
ggacgatgcagccaataactcatta

SEQ ID NO: 100733 - DNA, 25 bp, Saccharomyces pastorianus
atgcatgaatccagttacggctatt

SEQ ID NO: 100734 - DNA, 25 bp, Saccharomyces pastorianus
gataacatggtctccgaagtcacta

SEQ ID NO: 100735 - DNA, 25 bp, Saccharomyces pastorianus
aatgcagtactgacaaccgataaca

SEQ ID NO: 100736 - DNA, 25 bp, Saccharomyces pastorianus
gagttgcttataggccattgtttca

SEQ ID NO: 100737 - DNA, 25 bp, Saccharomyces pastorianus
gatgaaggccagttgcggtccagtt

SEQ ID NO: 100738 - DNA, 25 bp, Saccharomyces pastorianus
tatcggagaattggccactatgaga

SEQ ID NO: 100739 - DNA, 25 bp, Saccharomyces pastorianus
gcggtccagttttcacatctattat

SEQ ID NO: 100740 - DNA, 25 bp, Saccharomyces pastorianus
agacccaaactgctgcaaggttaat

SEQ ID NO: 100741 - DNA, 25 bp, Saccharomyces pastorianus
aatggctatgtcgtcaaattggctg

SEQ ID NO: 100742 - DNA, 25 bp, Saccharomyces pastorianus
gtatagtttttctctgacgacttca

SEQ ID NO: 100743 - DNA, 25 bp, Saccharomyces pastorianus
gacttcaggttcatcgtcggaccat

SEQ ID NO: 100744 - DNA, 25 bp, Saccharomyces pastorianus
agagcgctctataattcacccttta

SEQ ID NO: 100745 - DNA, 25 bp, Saccharomyces pastorianus
gtcctcttcagcattttcttctttt

SEQ ID NO: 100746 - DNA, 25 bp, Saccharomyces pastorianus
aaatctctagcggtgactcttaaag

SEQ ID NO: 100747 - DNA, 25 bp, Saccharomyces pastorianus
gtgactcttaaagcaccgtctttgt

SEQ ID NO: 100748 - DNA, 25 bp, Saccharomyces pastorianus
ttaccagttttcaaatctctagcgg

SEQ ID NO: 100749 - DNA, 25 bp, Saccharomyces pastorianus
tcaccctttacagcattaccagttt

SEQ ID NO: 100750 - DNA, 25 bp, Saccharomyces pastorianus
agggctgtatagttccatcatgtat

SEQ ID NO: 100751 - DNA, 25 bp, Saccharomyces pastorianus
aattccatcaacttggtacccaaag

SEQ ID NO: 100752 - DNA, 25 bp, Saccharomyces pastorianus
cataccgtttttcttagagcgctct

SEQ ID NO: 100753 - DNA, 25 bp, Saccharomyces pastorianus
gttatcgtcaatactccacatttaa

SEQ ID NO: 100754 - DNA, 25 bp, Saccharomyces pastorianus
gctttaagagtcaccgctagagatt

SEQ ID NO: 100755 - DNA, 25 bp, Saccharomyces pastorianus
tgaaacttcgttccctgtacaaaag

SEQ ID NO: 100756 - DNA, 25 bp, Saccharomyces pastorianus
attacgatgctgacgaattggctga

SEQ ID NO: 100757 - DNA, 25 bp, Saccharomyces pastorianus
atcagtcgaaattcttggtccacag

SEQ ID NO: 100758 - DNA, 25 bp, Saccharomyces pastorianus
attgttggctgaaacttcgttccct

SEQ ID NO: 100759 - DNA, 25 bp, Saccharomyces pastorianus
atggtccgacgatgaacctgaagtc

SEQ ID NO: 100760 - DNA, 25 bp, Saccharomyces pastorianus
gtgctaagggcgaattccacccagt

SEQ ID NO: 100761 - DNA, 25 bp, Saccharomyces pastorianus
gcctattggtttgattggtgctaag

SEQ ID NO: 100762 - DNA, 25 bp, Saccharomyces pastorianus
gaattccacccagtattgttggctg

SEQ ID NO: 100763 - DNA, 25 bp, Saccharomyces pastorianus
gaatacactttaccagaatcagtcg

SEQ ID NO: 100764 - DNA, 25 bp, Saccharomyces pastorianus
tgatggtcgttccaggtggtcttaa

SEQ ID NO: 100765 - DNA, 25 bp, Saccharomyces pastorianus
attccaagtcctacattcatcgtgt

SEQ ID NO: 100766 - DNA, 25 bp, Saccharomyces pastorianus
cgtggctacagatgtcgctgcgaga

SEQ ID NO: 100767 - DNA, 25 bp, Saccharomyces pastorianus
aagagattccgtcgataaggctaat

SEQ ID NO: 100768 - DNA, 25 bp, Saccharomyces pastorianus
atttgctggagtttagtgccactgc

SEQ ID NO: 100769 - DNA, 25 bp, Saccharomyces pastorianus
gtgccactgcgctacatggtgattt

SEQ ID NO: 100770 - DNA, 25 bp, Saccharomyces pastorianus
gggagctttggatcttttcaaggca

SEQ ID NO: 100771 - DNA, 25 bp, Saccharomyces pastorianus
acgatattcctgtggattccaagtc

SEQ ID NO: 100772 - DNA, 25 bp, Saccharomyces pastorianus
gtggtcttaagaacacatacctaat

SEQ ID NO: 100773 - DNA, 25 bp, Saccharomyces pastorianus
agaggtctattctcgtggctacaga

SEQ ID NO: 100774 - DNA, 25 bp, Saccharomyces pastorianus
tacaagaaccaaggccaacgcggaa

SEQ ID NO: 100775 - DNA, 25 bp, Saccharomyces pastorianus
atgcgatgagcgatgatgagtcttc

SEQ ID NO: 100776 - DNA, 25 bp, Saccharomyces pastorianus
ttatggtagcgtaccagaggatcta

SEQ ID NO: 100777 - DNA, 25 bp, Saccharomyces pastorianus
gcattctcaaagtttgaagtcccaa

SEQ ID NO: 100778 - DNA, 25 bp, Saccharomyces pastorianus
tcaaagtttgaagtcccaaagaaca

SEQ ID NO: 100779 - DNA, 25 bp, Saccharomyces pastorianus
cccacgtaagaaagctatcaaacta

SEQ ID NO: 100780 - DNA, 25 bp, Saccharomyces pastorianus
atgagtcttcatcaagtgacagcga

SEQ ID NO: 100781 - DNA, 25 bp, Saccharomyces pastorianus
acagcgaacattatggtagcgtacc

SEQ ID NO: 100782 - DNA, 25 bp, Saccharomyces pastorianus
gtcttcatcaagtgacagcgaacat

SEQ ID NO: 100783 - DNA, 25 bp, Saccharomyces pastorianus
gaagatgtggaaatggaggaaccta

SEQ ID NO: 100784 - DNA, 25 bp, Saccharomyces pastorianus
tgaaggcaaagcattctcaaagttt

SEQ ID NO: 100785 - DNA, 25 bp, Saccharomyces pastorianus
tgcaaccaaccccacgtaagaaagc

SEQ ID NO: 100786 - DNA, 25 bp, Saccharomyces pastorianus
atgcgatgagcgatgatgagtcttc

SEQ ID NO: 100787 - DNA, 25 bp, Saccharomyces pastorianus
ttatggtagcgtaccagaggatcta

SEQ ID NO: 100788 - DNA, 25 bp, Saccharomyces pastorianus
gcattctcaaagtttgaagtcccaa

SEQ ID NO: 100789 - DNA, 25 bp, Saccharomyces pastorianus
cccacgtaagaaagctatcaaacta

SEQ ID NO: 100790 - DNA, 25 bp, Saccharomyces pastorianus
atgagtcttcatcaagtgacagcga

SEQ ID NO: 100791 - DNA, 25 bp, Saccharomyces pastorianus
acagcgaacattatggtagcgtacc

SEQ ID NO: 100792 - DNA, 25 bp, Saccharomyces pastorianus
tagatcacgacttaggcgcctatac

SEQ ID NO: 100793 - DNA, 25 bp, Saccharomyces pastorianus
gtcttcatcaagtgacagcgaacat

SEQ ID NO: 100794 - DNA, 25 bp, Saccharomyces pastorianus
tgaagtcccaaagaacaccggtcga

SEQ ID NO: 100795 - DNA, 25 bp, Saccharomyces pastorianus
tgaaggcaaagcattctcaaagttt

SEQ ID NO: 100796 - DNA, 25 bp, Saccharomyces pastorianus
tgcaaccaaccccacgtaagaaagc

SEQ ID NO: 100797 - DNA, 25 bp, Saccharomyces pastorianus
cggtgacatgttgtttttccatact

SEQ ID NO: 100798 - DNA, 25 bp, Saccharomyces pastorianus
tacgatggttccgatgcaggtgcaa

SEQ ID NO: 100799 - DNA, 25 bp, Saccharomyces pastorianus
ggctgaagccaaatccgtcaaactt

SEQ ID NO: 100800 - DNA, 25 bp, Saccharomyces pastorianus
catggtgctgactgtttagaggcta

SEQ ID NO: 100801 - DNA, 25 bp, Saccharomyces pastorianus
ggtttgatcaagcaccacattgcca

SEQ ID NO: 100802 - DNA, 25 bp, Saccharomyces pastorianus
caatctggaccccatctaagatgat

SEQ ID NO: 100803 - DNA, 25 bp, Saccharomyces pastorianus
gttcttccattgattgttgctgcta

SEQ ID NO: 100804 - DNA, 25 bp, Saccharomyces pastorianus
agacgtggattcaccaatctggacc

SEQ ID NO: 100805 - DNA, 25 bp, Saccharomyces pastorianus
aatcaattcaatgtccatggccgct

SEQ ID NO: 100806 - DNA, 25 bp, Saccharomyces pastorianus
gacgaatcctccgtattgtactggg

SEQ ID NO: 100807 - DNA, 25 bp, Saccharomyces pastorianus
ggtgcaagacctgacgaagctgtgt

SEQ ID NO: 100808 - DNA, 25 bp, Saccharomyces pastorianus
caaagcgttagcgttctgtgaaata

SEQ ID NO: 100809 - DNA, 25 bp, Saccharomyces pastorianus
aatccataggcagtgacattcttac

SEQ ID NO: 100810 - DNA, 25 bp, Saccharomyces pastorianus
caattaaatcaactgggcccactgg

SEQ ID NO: 100811 - DNA, 25 bp, Saccharomyces pastorianus
gttttgccaagtcccgagttcatta

SEQ ID NO: 100812 - DNA, 25 bp, Saccharomyces pastorianus
gggcccactggtgcggtatcattaa

SEQ ID NO: 100813 - DNA, 25 bp, Saccharomyces pastorianus
gagggatacgccgtctgcaaataac

SEQ ID NO: 100814 - DNA, 25 bp, Saccharomyces pastorianus
gtgcctctttacatacaaggtctct

SEQ ID NO: 100815 - DNA, 25 bp, Saccharomyces pastorianus
tagttctcggagtcaatggttacat

SEQ ID NO: 100816 - DNA, 25 bp, Saccharomyces pastorianus
atttgcccggcaacataaccgtagt

SEQ ID NO: 100817 - DNA, 25 bp, Saccharomyces pastorianus
ggaaggtgacctcctgaatgcagaa

SEQ ID NO: 100818 - DNA, 25 bp, Saccharomyces pastorianus
ttgccggtatgcgaacgtgatcaaa

SEQ ID NO: 100819 - DNA, 25 bp, Saccharomyces pastorianus
ctatacattgaaaaaggtcaccgaa

SEQ ID NO: 100820 - DNA, 25 bp, Saccharomyces pastorianus
cccagctagattttctccagacgac

SEQ ID NO: 100821 - DNA, 25 bp, Saccharomyces pastorianus
gaaatcacgaagtctgctcacccag

SEQ ID NO: 100822 - DNA, 25 bp, Saccharomyces pastorianus
cggcaagagaatctatacattgaaa

SEQ ID NO: 100823 - DNA, 25 bp, Saccharomyces pastorianus
tgaaatcacgaagtctgctcaccca

SEQ ID NO: 100824 - DNA, 25 bp, Saccharomyces pastorianus
acgaagtctgctcacccagctagat

SEQ ID NO: 100825 - DNA, 25 bp, Saccharomyces pastorianus
cattgaaaaaggtcaccgaaagtgg

SEQ ID NO: 100826 - DNA, 25 bp, Saccharomyces pastorianus
gtggtgaaatcacgaagtctgctca

SEQ ID NO: 100827 - DNA, 25 bp, Saccharomyces pastorianus
gaagtctgctcacccagctagattt

SEQ ID NO: 100828 - DNA, 25 bp, Saccharomyces pastorianus
tcacccagctagattttctccagac

SEQ ID NO: 100829 - DNA, 25 bp, Saccharomyces pastorianus
acccagctagattttctccagacga

SEQ ID NO: 100830 - DNA, 25 bp, Saccharomyces pastorianus
tttgatgtacactttgggcccagac

SEQ ID NO: 100831 - DNA, 25 bp, Saccharomyces pastorianus
cccagctagattttctccagacgac

SEQ ID NO: 100832 - DNA, 25 bp, Saccharomyces pastorianus
gaaatcacgaagtctgctcacccag

SEQ ID NO: 100833 - DNA, 25 bp, Saccharomyces pastorianus
cggcaagagaatctatacattgaaa

SEQ ID NO: 100834 - DNA, 25 bp, Saccharomyces pastorianus
tgaaatcacgaagtctgctcaccca

SEQ ID NO: 100835 - DNA, 25 bp, Saccharomyces pastorianus
tatacattgaaaaaggtcaccgaaa

SEQ ID NO: 100836 - DNA, 25 bp, Saccharomyces pastorianus
acgaagtctgctcacccagctagat

SEQ ID NO: 100837 - DNA, 25 bp, Saccharomyces pastorianus
gtggtgaaatcacgaagtctgctca

SEQ ID NO: 100838 - DNA, 25 bp, Saccharomyces pastorianus
gaagtctgctcacccagctagattt

SEQ ID NO: 100839 - DNA, 25 bp, Saccharomyces pastorianus
tcacccagctagattttctccagac

SEQ ID NO: 100840 - DNA, 25 bp, Saccharomyces pastorianus
acccagctagattttctccagacga

SEQ ID NO: 100841 - DNA, 25 bp, Saccharomyces pastorianus
tggacgcaaccaacaactattttaa

SEQ ID NO: 100842 - DNA, 25 bp, Saccharomyces pastorianus
gaaggaaactctagctggtaaatgg

SEQ ID NO: 100843 - DNA, 25 bp, Saccharomyces pastorianus
tgaaaagggcaatttaccacctacg

SEQ ID NO: 100844 - DNA, 25 bp, Saccharomyces pastorianus
tcacacatcctgttcgataaggcag

SEQ ID NO: 100845 - DNA, 25 bp, Saccharomyces pastorianus
gaccagatattagagcttacgagga

SEQ ID NO: 100846 - DNA, 25 bp, Saccharomyces pastorianus
gggagacaaatcacacatcctgttc

SEQ ID NO: 100847 - DNA, 25 bp, Saccharomyces pastorianus
taccacctacggactcaagattaag

SEQ ID NO: 100848 - DNA, 25 bp, Saccharomyces pastorianus
gatgtggagcctaaatatttcgaaa

SEQ ID NO: 100849 - DNA, 25 bp, Saccharomyces pastorianus
atatatggagcctgtcaacgaattc

SEQ ID NO: 100850 - DNA, 25 bp, Saccharomyces pastorianus
taaggtttcgataatcccaccacct

SEQ ID NO: 100851 - DNA, 25 bp, Saccharomyces pastorianus
aagtacattcttcgaagggagacaa

SEQ ID NO: 100852 - DNA, 25 bp, Saccharomyces pastorianus
ttcttcactgtccattagcggcata

SEQ ID NO: 100853 - DNA, 25 bp, Saccharomyces pastorianus
cactgtccattagcggcatacagca

SEQ ID NO: 100854 - DNA, 25 bp, Saccharomyces pastorianus
tcatattcttcactgtccattagcg

SEQ ID NO: 100855 - DNA, 25 bp, Saccharomyces pastorianus
gcgtcaggattcactttggtcaaga

SEQ ID NO: 100856 - DNA, 25 bp, Saccharomyces pastorianus
tacgtgaaaaactctctgcgtcagg

SEQ ID NO: 100857 - DNA, 25 bp, Saccharomyces pastorianus
tggtcaagagggtcggcaacgtttc

SEQ ID NO: 100858 - DNA, 25 bp, Saccharomyces pastorianus
ttcactttggtcaagagggtcggca

SEQ ID NO: 100859 - DNA, 25 bp, Saccharomyces pastorianus
tctgcgtcaggattcactttggtca

SEQ ID NO: 100860 - DNA, 25 bp, Saccharomyces pastorianus
aaactctctgcgtcaggattcactt

SEQ ID NO: 100861 - DNA, 25 bp, Saccharomyces pastorianus
agcagcaatcccaggaaatacccct

SEQ ID NO: 100862 - DNA, 25 bp, Saccharomyces pastorianus
atacccctacgtgaaaaactctctg

SEQ ID NO: 100863 - DNA, 25 bp, Saccharomyces pastorianus
gagtgctcacgtgggtatctaacaa

SEQ ID NO: 100864 - DNA, 25 bp, Saccharomyces pastorianus
tgactttttaaacgctacaccaact

SEQ ID NO: 100865 - DNA, 25 bp, Saccharomyces pastorianus
tgacttacgtcctttcttaatcaac

SEQ ID NO: 100866 - DNA, 25 bp, Saccharomyces pastorianus
gattgttagtacttggtagcgcaaa

SEQ ID NO: 100867 - DNA, 25 bp, Saccharomyces pastorianus
gaaaagattcattgcctacgcatca

SEQ ID NO: 100868 - DNA, 25 bp, Saccharomyces pastorianus
gtggtatcccaaactcgggtggatt

SEQ ID NO: 100869 - DNA, 25 bp, Saccharomyces pastorianus
ctccgcagatatcaaccctattggg

SEQ ID NO: 100870 - DNA, 25 bp, Saccharomyces pastorianus
gcaaactgttttaactcctagctat

SEQ ID NO: 100871 - DNA, 25 bp, Saccharomyces pastorianus
taacaaaatatgactgctcctccgc

SEQ ID NO: 100872 - DNA, 25 bp, Saccharomyces pastorianus
atttttcttcttctatgccatcaac

SEQ ID NO: 100873 - DNA, 25 bp, Saccharomyces pastorianus
gtggtccttattctatgttcttaaa

SEQ ID NO: 100874 - DNA, 25 bp, Saccharomyces pastorianus
tgcgcaagagatttccaagctaact

SEQ ID NO: 100875 - DNA, 25 bp, Saccharomyces pastorianus
attaccccagtgtttttgcgcaaga

SEQ ID NO: 100876 - DNA, 25 bp, Saccharomyces pastorianus
gaagttgccaacttgggtgattctt

SEQ ID NO: 100877 - DNA, 25 bp, Saccharomyces pastorianus
ggtgattcttggtgtggagtcttca

SEQ ID NO: 100878 - DNA, 25 bp, Saccharomyces pastorianus
agaaaattattggtgctgcatacgc

SEQ ID NO: 100879 - DNA, 25 bp, Saccharomyces pastorianus
gtcagtttaagcaaggaccccaatt

SEQ ID NO: 100880 - DNA, 25 bp, Saccharomyces pastorianus
gagttacagctattatcccagaagt

SEQ ID NO: 100881 - DNA, 25 bp, Saccharomyces pastorianus
tggctcacttcccatctaatggaaa

SEQ ID NO: 100882 - DNA, 25 bp, Saccharomyces pastorianus
ctttttctgaaggataacgctgcga

SEQ ID NO: 100883 - DNA, 25 bp, Saccharomyces pastorianus
ggatttaatgctccttaccaattgt

SEQ ID NO: 100884 - DNA, 25 bp, Saccharomyces pastorianus
attggctaccgatggtgtaaccgat

SEQ ID NO: 100885 - DNA, 25 bp, Saccharomyces pastorianus
tgctgtctttctgctgtcaatacca

SEQ ID NO: 100886 - DNA, 25 bp, Saccharomyces pastorianus
gtcccatctcccttttgaagtatca

SEQ ID NO: 100887 - DNA, 25 bp, Saccharomyces pastorianus
actggcgtctacgttttggctacaa

SEQ ID NO: 100888 - DNA, 25 bp, Saccharomyces pastorianus
acgcttttgcatgtgtgtttacctt

SEQ ID NO: 100889 - DNA, 25 bp, Saccharomyces pastorianus
gaaaatgcagcatccgatcctttag

SEQ ID NO: 100890 - DNA, 25 bp, Saccharomyces pastorianus
agttccagattcttgcacttttcgc

SEQ ID NO: 100891 - DNA, 25 bp, Saccharomyces pastorianus
gttgtgacccttttgcccataaagt

SEQ ID NO: 100892 - DNA, 25 bp, Saccharomyces pastorianus
taccactcgctcaaatatccagatg

SEQ ID NO: 100893 - DNA, 25 bp, Saccharomyces pastorianus
gttcaattaccagcacgatctcgat

SEQ ID NO: 100894 - DNA, 25 bp, Saccharomyces pastorianus
agtttaccgtcccaaacattgtcat

SEQ ID NO: 100895 - DNA, 25 bp, Saccharomyces pastorianus
aatttctctctttctttgctgtctt

SEQ ID NO: 100896 - DNA, 25 bp, Saccharomyces pastorianus
agatatgtctcctatactcggcgaa

SEQ ID NO: 100897 - DNA, 25 bp, Saccharomyces pastorianus
gaactggcagagagtacaacgacta

SEQ ID NO: 100898 - DNA, 25 bp, Saccharomyces pastorianus
aattcgagccctctataagcaggag

SEQ ID NO: 100899 - DNA, 25 bp, Saccharomyces pastorianus
gagttctctgatgtttgctaatatg

SEQ ID NO: 100900 - DNA, 25 bp, Saccharomyces pastorianus
agaactaattaatcgttacgcgtat

SEQ ID NO: 100901 - DNA, 25 bp, Saccharomyces pastorianus
caggagcaactttcaagggaagcat

SEQ ID NO: 100902 - DNA, 25 bp, Saccharomyces pastorianus
gaaactaacgtcgaagtcactggat

SEQ ID NO: 100903 - DNA, 25 bp, Saccharomyces pastorianus
agctgttgctattatctgatgagag

SEQ ID NO: 100904 - DNA, 25 bp, Saccharomyces pastorianus
gtcctaggcgtcaaagatatgtctc

SEQ ID NO: 100905 - DNA, 25 bp, Saccharomyces pastorianus
tacgcgtatgtattgagttctctga

SEQ ID NO: 100906 - DNA, 25 bp, Saccharomyces pastorianus
gtcactggatgaacagctgttgcta

SEQ ID NO: 100907 - DNA, 25 bp, Saccharomyces pastorianus
gtgacgaagattctgctcatcctga

SEQ ID NO: 100908 - DNA, 25 bp, Saccharomyces pastorianus
atcctcctagcacattttattctca

SEQ ID NO: 100909 - DNA, 25 bp, Saccharomyces pastorianus
agaaatttcgatgcctactccggat

SEQ ID NO: 100910 - DNA, 25 bp, Saccharomyces pastorianus
gttcgagagcaccatctacaactgc

SEQ ID NO: 100911 - DNA, 25 bp, Saccharomyces pastorianus
gctgtatccacaaactgcaacttca

SEQ ID NO: 100912 - DNA, 25 bp, Saccharomyces pastorianus
ctgctgtttcaccttatagttcgag

SEQ ID NO: 100913 - DNA, 25 bp, Saccharomyces pastorianus
tgggagaccatacacaccgaattat

SEQ ID NO: 100914 - DNA, 25 bp, Saccharomyces pastorianus
tatagatcgacaccaggttccgcga

SEQ ID NO: 100915 - DNA, 25 bp, Saccharomyces pastorianus
ttccgcgatgttcccatacatgcaa

SEQ ID NO: 100916 - DNA, 25 bp, Saccharomyces pastorianus
tatggcgcggacgattttttctttc

SEQ ID NO: 100917 - DNA, 25 bp, Saccharomyces pastorianus
gatggtgctcattcacttgaggtag

SEQ ID NO: 100918 - DNA, 25 bp, Saccharomyces pastorianus
tactaaatttctctctcatctgttg

SEQ ID NO: 100919 - DNA, 25 bp, Saccharomyces pastorianus
ttaatcccagattatccgcagccgt

SEQ ID NO: 100920 - DNA, 25 bp, Saccharomyces pastorianus
gtaaatgccacactactgtcattgg

SEQ ID NO: 100921 - DNA, 25 bp, Saccharomyces pastorianus
ggcaacacaggatatcgatactcga

SEQ ID NO: 100922 - DNA, 25 bp, Saccharomyces pastorianus
aacaattcctgcctatagtacgtaa

SEQ ID NO: 100923 - DNA, 25 bp, Saccharomyces pastorianus
aatgctctgtacactcttgttgaat

SEQ ID NO: 100924 - DNA, 25 bp, Saccharomyces pastorianus
gtcactattcatctcaatgctctgt

SEQ ID NO: 100925 - DNA, 25 bp, Saccharomyces pastorianus
aacggtgtctttggagtgctcggtt

SEQ ID NO: 100926 - DNA, 25 bp, Saccharomyces pastorianus
gaaagttcaggatgctacctccagt

SEQ ID NO: 100927 - DNA, 25 bp, Saccharomyces pastorianus
agcggtacgctacgaaacccatatt

SEQ ID NO: 100928 - DNA, 25 bp, Saccharomyces pastorianus
tccgcagccgtttgagcacttgaaa

SEQ ID NO: 100929 - DNA, 25 bp, Saccharomyces pastorianus
tgaggctgccattgctgggatgcaa

SEQ ID NO: 100930 - DNA, 25 bp, Saccharomyces pastorianus
gcacgggtggccaacaagttatcat

SEQ ID NO: 100931 - DNA, 25 bp, Saccharomyces pastorianus
gatacattccatccagtacgtgtga

SEQ ID NO: 100932 - DNA, 25 bp, Saccharomyces pastorianus
aaaggttgcgggtttgtccagtatg

SEQ ID NO: 100933 - DNA, 25 bp, Saccharomyces pastorianus
atgcttcctggatgtcaaattctga

SEQ ID NO: 100934 - DNA, 25 bp, Saccharomyces pastorianus
tgaagcacctgttctgccagataat

SEQ ID NO: 100935 - DNA, 25 bp, Saccharomyces pastorianus
atgttgatcggctatcggctgaggc

SEQ ID NO: 100936 - DNA, 25 bp, Saccharomyces pastorianus
agacgaattacgtgcttatttccaa

SEQ ID NO: 100937 - DNA, 25 bp, Saccharomyces pastorianus
gcgaagcggttgttaacagcactaa

SEQ ID NO: 100938 - DNA, 25 bp, Saccharomyces pastorianus
aagggttccccattgcaaattcaag

SEQ ID NO: 100939 - DNA, 25 bp, Saccharomyces pastorianus
gtttactggctgacactagctctat

SEQ ID NO: 100940 - DNA, 25 bp, Saccharomyces pastorianus
atctttacaccaaatttggcccatt

SEQ ID NO: 100941 - DNA, 25 bp, Saccharomyces pastorianus
ctcttctcctatatctttacaccaa

SEQ ID NO: 100942 - DNA, 25 bp, Saccharomyces pastorianus
gggcacggcgaattcctactccgtg

SEQ ID NO: 100943 - DNA, 25 bp, Saccharomyces pastorianus
gtctctctattcatgttgtctctgt

SEQ ID NO: 100944 - DNA, 25 bp, Saccharomyces pastorianus
tacaccaaatttggcccattttcat

SEQ ID NO: 100945 - DNA, 25 bp, Saccharomyces pastorianus
tcattcccctttacgtagtagcggt

SEQ ID NO: 100946 - DNA, 25 bp, Saccharomyces pastorianus
ctattcatgttgtctctgtataggg

SEQ ID NO: 100947 - DNA, 25 bp, Saccharomyces pastorianus
gtgtctcttctcctatatctttaca

SEQ ID NO: 100948 - DNA, 25 bp, Saccharomyces pastorianus
cgtttgtctctctattcatgttgtc

SEQ ID NO: 100949 - DNA, 25 bp, Saccharomyces pastorianus
tttcattcccctttacgtagtagcg

SEQ ID NO: 100950 - DNA, 25 bp, Saccharomyces pastorianus
ggcgaattcctactccgtgtctctt

SEQ ID NO: 100951 - DNA, 25 bp, Saccharomyces pastorianus
tcttcgaagttttcactcctcagga

SEQ ID NO: 100952 - DNA, 25 bp, Saccharomyces pastorianus
agatttgattgtcttcgctgcatcc

SEQ ID NO: 100953 - DNA, 25 bp, Saccharomyces pastorianus
gattgtcttcgctgcatccgaagag

SEQ ID NO: 100954 - DNA, 25 bp, Saccharomyces pastorianus
gcatccgaagagcttgtagacgaat

SEQ ID NO: 100955 - DNA, 25 bp, Saccharomyces pastorianus
gaagttgtcgaactcttcgaagttt

SEQ ID NO: 100956 - DNA, 25 bp, Saccharomyces pastorianus
taccacctctagtctcaaaaccaaa

SEQ ID NO: 100957 - DNA, 25 bp, Saccharomyces pastorianus
gtaagctatctgaagttgtcgaact

SEQ ID NO: 100958 - DNA, 25 bp, Saccharomyces pastorianus
gagcttgtagacgaatatttgaaaa

SEQ ID NO: 100959 - DNA, 25 bp, Saccharomyces pastorianus
atccatcaattggtaagctatctga

SEQ ID NO: 100960 - DNA, 25 bp, Saccharomyces pastorianus
atggtaagccaaactctaccacctc

SEQ ID NO: 100961 - DNA, 25 bp, Saccharomyces pastorianus
gttttcactcctcaggacggtaggg

SEQ ID NO: 100962 - DNA, 25 bp, Saccharomyces pastorianus
taatttccagaccagattgggtcaa

SEQ ID NO: 100963 - DNA, 25 bp, Saccharomyces pastorianus
ggtccacaatttaccctcaagttga

SEQ ID NO: 100964 - DNA, 25 bp, Saccharomyces pastorianus
gaccaactagccatattccagaatt

SEQ ID NO: 100965 - DNA, 25 bp, Saccharomyces pastorianus
actggcctaacattcatacatctgc

SEQ ID NO: 100966 - DNA, 25 bp, Saccharomyces pastorianus
taatgagccaccaaagatctttctg

SEQ ID NO: 100967 - DNA, 25 bp, Saccharomyces pastorianus
aaggcatcggtatgtcttcaaagat

SEQ ID NO: 100968 - DNA, 25 bp, Saccharomyces pastorianus
aattgtcggtcatggtagaccaact

SEQ ID NO: 100969 - DNA, 25 bp, Saccharomyces pastorianus
tcgaaattttaccaaacgtcacatt

SEQ ID NO: 100970 - DNA, 25 bp, Saccharomyces pastorianus
gtaggtaggttgtttcagtccattt

SEQ ID NO: 100971 - DNA, 25 bp, Saccharomyces pastorianus
agtccattttacctcagaatcctga

SEQ ID NO: 100972 - DNA, 25 bp, Saccharomyces pastorianus
ggtcgacaagttatcaccctacata

SEQ ID NO: 100973 - DNA, 25 bp, Saccharomyces pastorianus
ggtggatctcgtggcggatcattta

SEQ ID NO: 100974 - DNA, 25 bp, Saccharomyces pastorianus
tgtttcccgttctatcaacactaag

SEQ ID NO: 100975 - DNA, 25 bp, Saccharomyces pastorianus
gatttttgcctaagcctaaggtggt

SEQ ID NO: 100976 - DNA, 25 bp, Saccharomyces pastorianus
tagttctttcagaggaggccgtggt

SEQ ID NO: 100977 - DNA, 25 bp, Saccharomyces pastorianus
gtgacggtgtccaagcaaccagttt

SEQ ID NO: 100978 - DNA, 25 bp, Saccharomyces pastorianus
gataaattctacattgccgctgaca

SEQ ID NO: 100979 - DNA, 25 bp, Saccharomyces pastorianus
agggtgatattgtttcccgttctat

SEQ ID NO: 100980 - DNA, 25 bp, Saccharomyces pastorianus
gccgctgacaaactattgcctattg

SEQ ID NO: 100981 - DNA, 25 bp, Saccharomyces pastorianus
gtacaggcggtgctagatcatttca

SEQ ID NO: 100982 - DNA, 25 bp, Saccharomyces pastorianus
tgggagcttttctacatccatgtga

SEQ ID NO: 100983 - DNA, 25 bp, Saccharomyces pastorianus
ggcagttctttcagaggtggatctc

SEQ ID NO: 100984 - DNA, 25 bp, Saccharomyces pastorianus
tgcatcaagctcaggatccgttcca

SEQ ID NO: 100985 - DNA, 25 bp, Saccharomyces pastorianus
aaatggttgcatgtgatggacccaa

SEQ ID NO: 100986 - DNA, 25 bp, Saccharomyces pastorianus
acactgccttgtttctaattgctag

SEQ ID NO: 100987 - DNA, 25 bp, Saccharomyces pastorianus
gaggacaaaactttatactgcttct

SEQ ID NO: 100988 - DNA, 25 bp, Saccharomyces pastorianus
aaggaacatggtactgtcccgaatg

SEQ ID NO: 100989 - DNA, 25 bp, Saccharomyces pastorianus
aaagtctgttactccagtgagccca

SEQ ID NO: 100990 - DNA, 25 bp, Saccharomyces pastorianus
aaaatgcgttctggcgaacactgcc

SEQ ID NO: 100991 - DNA, 25 bp, Saccharomyces pastorianus
atggagacatggatagcgctgctga

SEQ ID NO: 100992 - DNA, 25 bp, Saccharomyces pastorianus
actgcttctgtcaaagagtttcgtt

SEQ ID NO: 100993 - DNA, 25 bp, Saccharomyces pastorianus
atagcgctgctgaagcctctagaga

SEQ ID NO: 100994 - DNA, 25 bp, Saccharomyces pastorianus
tggaggaagatggtgttctagcccc

SEQ ID NO: 100995 - DNA, 25 bp, Saccharomyces pastorianus
ttcaaagtttgccatcaggtctcct

SEQ ID NO: 100996 - DNA, 25 bp, Saccharomyces pastorianus
gaaggtgacacagggccctatttac

SEQ ID NO: 100997 - DNA, 25 bp, Saccharomyces pastorianus
gagccggccacgattgtaacatatt

SEQ ID NO: 100998 - DNA, 25 bp, Saccharomyces pastorianus
tggcgtatctgctatcattattcaa

SEQ ID NO: 100999 - DNA, 25 bp, Saccharomyces pastorianus
gcgactcgccgtatattcagcaagt

SEQ ID NO: 101000 - DNA, 25 bp, Saccharomyces pastorianus
gttgctagcgcagtatccagatgtc

SEQ ID NO: 101001 - DNA, 25 bp, Saccharomyces pastorianus
gcgactttacgacggacatgctaat

SEQ ID NO: 101002 - DNA, 25 bp, Saccharomyces pastorianus
tcaggtctcctcgtgctataaaaaa

SEQ ID NO: 101003 - DNA, 25 bp, Saccharomyces pastorianus
tagaaaggacctccagcgactttac

SEQ ID NO: 101004 - DNA, 25 bp, Saccharomyces pastorianus
ggataatccacagcgtgttgcagat

SEQ ID NO: 101005 - DNA, 25 bp, Saccharomyces pastorianus
tgcagatattgccataccgcgactc

SEQ ID NO: 101006 - DNA, 25 bp, Saccharomyces pastorianus
gaaatggttccggtttgggcattat

SEQ ID NO: 101007 - DNA, 25 bp, Saccharomyces pastorianus
agctgactcggatatttttcttcct

SEQ ID NO: 101008 - DNA, 25 bp, Saccharomyces pastorianus
ctttacgaaggccaagcgtttcttg

SEQ ID NO: 101009 - DNA, 25 bp, Saccharomyces pastorianus
cgctatgctgctgcaagtgacttta

SEQ ID NO: 101010 - DNA, 25 bp, Saccharomyces pastorianus
aaaaatcccggaaccagctgactcg

SEQ ID NO: 101011 - DNA, 25 bp, Saccharomyces pastorianus
agagcttcttgaccgtttttatccg

SEQ ID NO: 101012 - DNA, 25 bp, Saccharomyces pastorianus
tactgggtttcgttggaggcccagc

SEQ ID NO: 101013 - DNA, 25 bp, Saccharomyces pastorianus
tttccccaagttttcctgcaggcgg

SEQ ID NO: 101014 - DNA, 25 bp, Saccharomyces pastorianus
tgggcattatttttcctattgggca

SEQ ID NO: 101015 - DNA, 25 bp, Saccharomyces pastorianus
ttttcttccttgtttccgctatgct

SEQ ID NO: 101016 - DNA, 25 bp, Saccharomyces pastorianus
gaaggtggcactaaatcgtcgaaga

SEQ ID NO: 101017 - DNA, 25 bp, Saccharomyces pastorianus
gccgttagtcttgttgaggcctaat

SEQ ID NO: 101018 - DNA, 25 bp, Saccharomyces pastorianus
gagcctcacactctaatttcattaa

SEQ ID NO: 101019 - DNA, 25 bp, Saccharomyces pastorianus
gtcaacaagtcatcattgccgttag

SEQ ID NO: 101020 - DNA, 25 bp, Saccharomyces pastorianus
ggaacattgcctgagacgggcacta

SEQ ID NO: 101021 - DNA, 25 bp, Saccharomyces pastorianus
acggcggttgctacttgattttcca

SEQ ID NO: 101022 - DNA, 25 bp, Saccharomyces pastorianus
gcccgtcagccaaatttcgttattt

SEQ ID NO: 101023 - DNA, 25 bp, Saccharomyces pastorianus
tcattaaagtctcgactgccgcaac

SEQ ID NO: 101024 - DNA, 25 bp, Saccharomyces pastorianus
agaatgctcttgcaagacctgctgt

SEQ ID NO: 101025 - DNA, 25 bp, Saccharomyces pastorianus
agtggatgaatccttgcccgtcagc

SEQ ID NO: 101026 - DNA, 25 bp, Saccharomyces pastorianus
attgctttgcgaggacaagaccgtc

SEQ ID NO: 101027 - DNA, 25 bp, Saccharomyces pastorianus
actgatctgaccttttacgatgcta

SEQ ID NO: 101028 - DNA, 25 bp, Saccharomyces pastorianus
taacccatcattgtgtaaacctagt

SEQ ID NO: 101029 - DNA, 25 bp, Saccharomyces pastorianus
ataccgccggttccaattctgataa

SEQ ID NO: 101030 - DNA, 25 bp, Saccharomyces pastorianus
aggtatacctgttttgcggcactct

SEQ ID NO: 101031 - DNA, 25 bp, Saccharomyces pastorianus
gctccggttgctttataacccatca

SEQ ID NO: 101032 - DNA, 25 bp, Saccharomyces pastorianus
cgattctataaaggccgtggtcttg

SEQ ID NO: 101033 - DNA, 25 bp, Saccharomyces pastorianus
gatcttcctataccaatccacgatt

SEQ ID NO: 101034 - DNA, 25 bp, Saccharomyces pastorianus
ttgattgttagcaataccgccggtt

SEQ ID NO: 101035 - DNA, 25 bp, Saccharomyces pastorianus
atcgccttccctcatgatgacaaaa

SEQ ID NO: 101036 - DNA, 25 bp, Saccharomyces pastorianus
agtggcaccttaaatacgctccggt

SEQ ID NO: 101037 - DNA, 25 bp, Saccharomyces pastorianus
atatggccagattacttgcaacact

SEQ ID NO: 101038 - DNA, 25 bp, Saccharomyces pastorianus
aggctttttactgacatcttgatgg

SEQ ID NO: 101039 - DNA, 25 bp, Saccharomyces pastorianus
gtctcacaaaaccatccaggcagta

SEQ ID NO: 101040 - DNA, 25 bp, Saccharomyces pastorianus
gaacaccatccttatttgactcaag

SEQ ID NO: 101041 - DNA, 25 bp, Saccharomyces pastorianus
gaaaggtcacatcaccgaagcacat

SEQ ID NO: 101042 - DNA, 25 bp, Saccharomyces pastorianus
gtaccacttcccaagtattgcttag

SEQ ID NO: 101043 - DNA, 25 bp, Saccharomyces pastorianus
tggttgtagaatcaagcccgtggct

SEQ ID NO: 101044 - DNA, 25 bp, Saccharomyces pastorianus
aagtagttgcttactcctccttcgg

SEQ ID NO: 101045 - DNA, 25 bp, Saccharomyces pastorianus
agcccgtggctttgcaaattgaaca

SEQ ID NO: 101046 - DNA, 25 bp, Saccharomyces pastorianus
catagatacgtaccgggctctggaa

SEQ ID NO: 101047 - DNA, 25 bp, Saccharomyces pastorianus
tccttcggtcctcaatcattcattg

SEQ ID NO: 101048 - DNA, 25 bp, Saccharomyces pastorianus
tccaggattctatacgggcgcagat

SEQ ID NO: 101049 - DNA, 25 bp, Saccharomyces pastorianus
aaccacgccaactctgttcgagaat

SEQ ID NO: 101050 - DNA, 25 bp, Saccharomyces pastorianus
gaacccatccaactacttgacgaag

SEQ ID NO: 101051 - DNA, 25 bp, Saccharomyces pastorianus
gaacccaacttgaaggcttttgcgg

SEQ ID NO: 101052 - DNA, 25 bp, Saccharomyces pastorianus
ggagcctgaactcgacattgactca

SEQ ID NO: 101053 - DNA, 25 bp, Saccharomyces pastorianus
aggctcatgtcagcgattgcaccat

SEQ ID NO: 101054 - DNA, 25 bp, Saccharomyces pastorianus
acagcagcctcgtagaaatgaccaa

SEQ ID NO: 101055 - DNA, 25 bp, Saccharomyces pastorianus
tcaatcacatcatccttaacagcag

SEQ ID NO: 101056 - DNA, 25 bp, Saccharomyces pastorianus
ccttcagtgcagtggtacagttctt

SEQ ID NO: 101057 - DNA, 25 bp, Saccharomyces pastorianus
taactgtttgcagattccacacctt

SEQ ID NO: 101058 - DNA, 25 bp, Saccharomyces pastorianus
gattgcggtgccacaattaccagaa

SEQ ID NO: 101059 - DNA, 25 bp, Saccharomyces pastorianus
gatactccgatttcgtcagattacg

SEQ ID NO: 101060 - DNA, 25 bp, Saccharomyces pastorianus
atgagggacccatcagtgcgtcaaa

SEQ ID NO: 101061 - DNA, 25 bp, Saccharomyces pastorianus
cacagccctgccacagatatagtta

SEQ ID NO: 101062 - DNA, 25 bp, Saccharomyces pastorianus
atggtgcagtccctatctttagaaa

SEQ ID NO: 101063 - DNA, 25 bp, Saccharomyces pastorianus
ttccggatgcattgctgctttggat

SEQ ID NO: 101064 - DNA, 25 bp, Saccharomyces pastorianus
aaaaactgtgcctggatcgtctctg

SEQ ID NO: 101065 - DNA, 25 bp, Saccharomyces pastorianus
ggtgacgttcaggactctaggtata

SEQ ID NO: 101066 - DNA, 25 bp, Saccharomyces pastorianus
gaatatctgcctgtgctgtatgtga

SEQ ID NO: 101067 - DNA, 25 bp, Saccharomyces pastorianus
agttacttctgctggttccggatgc

SEQ ID NO: 101068 - DNA, 25 bp, Saccharomyces pastorianus
tataatcttggccacgggtgcttcc

SEQ ID NO: 101069 - DNA, 25 bp, Saccharomyces pastorianus
atcgtctctgacttctgtgccaggt

SEQ ID NO: 101070 - DNA, 25 bp, Saccharomyces pastorianus
aggatcattttcgtgcatctgtaat

SEQ ID NO: 101071 - DNA, 25 bp, Saccharomyces pastorianus
ttttacgcaataggtcacagccctg

SEQ ID NO: 101072 - DNA, 25 bp, Saccharomyces pastorianus
cagtaattcagattctgccgctgtt

SEQ ID NO: 101073 - DNA, 25 bp, Saccharomyces pastorianus
gattctgccgctgttgaacatgcaa

SEQ ID NO: 101074 - DNA, 25 bp, Saccharomyces pastorianus
gaagtatttcactgaccaagtcaaa

SEQ ID NO: 101075 - DNA, 25 bp, Saccharomyces pastorianus
gacttgaaggtcacgagaacaccgg

SEQ ID NO: 101076 - DNA, 25 bp, Saccharomyces pastorianus
cagagccctgttactgaggacttat

SEQ ID NO: 101077 - DNA, 25 bp, Saccharomyces pastorianus
cgattctcattgtgatttccgtaag

SEQ ID NO: 101078 - DNA, 25 bp, Saccharomyces pastorianus
gcaccagcaaggaaattgtcacaca

SEQ ID NO: 101079 - DNA, 25 bp, Saccharomyces pastorianus
tttcacgcctccattagacgctgat

SEQ ID NO: 101080 - DNA, 25 bp, Saccharomyces pastorianus
gaatcagactgaacggtgacttgga

SEQ ID NO: 101081 - DNA, 25 bp, Saccharomyces pastorianus
agatttgatttctaccacccaagaa

SEQ ID NO: 101082 - DNA, 25 bp, Saccharomyces pastorianus
aaggcactcaggtagttgcaaggaa

SEQ ID NO: 101083 - DNA, 25 bp, Saccharomyces pastorianus
ttgaaaatgcgccagctaacccttc

SEQ ID NO: 101084 - DNA, 25 bp, Saccharomyces pastorianus
agaaccctagtcaatcagtctccta

SEQ ID NO: 101085 - DNA, 25 bp, Saccharomyces pastorianus
tttgggactttcaactcctcaatcg

SEQ ID NO: 101086 - DNA, 25 bp, Saccharomyces pastorianus
ttgggcgatttgaccgatttatcta

SEQ ID NO: 101087 - DNA, 25 bp, Saccharomyces pastorianus
gatttatctatttcgaacccttcaa

SEQ ID NO: 101088 - DNA, 25 bp, Saccharomyces pastorianus
cttagtgttcttattagcagtccct

SEQ ID NO: 101089 - DNA, 25 bp, Saccharomyces pastorianus
ttgcaaccccaatcgagtaacttta

SEQ ID NO: 101090 - DNA, 25 bp, Saccharomyces pastorianus
gtcaccgatctccaacttagtgttc

SEQ ID NO: 101091 - DNA, 25 bp, Saccharomyces pastorianus
gcagtccctaagtcaatgtctttga

SEQ ID NO: 101092 - DNA, 25 bp, Saccharomyces pastorianus
aagcatcctttggtctgggaggcga

SEQ ID NO: 101093 - DNA, 25 bp, Saccharomyces pastorianus
aggtcaactattctgtcaactccac

SEQ ID NO: 101094 - DNA, 25 bp, Saccharomyces pastorianus
ttaggcctaccagtgattcaaaagt

SEQ ID NO: 101095 - DNA, 25 bp, Saccharomyces pastorianus
gataaatcccgaggccaacgaacat

SEQ ID NO: 101096 - DNA, 25 bp, Saccharomyces pastorianus
ggatctttcttattatacacccagc

SEQ ID NO: 101097 - DNA, 25 bp, Saccharomyces pastorianus
gaaaactaccgctctctcattaaag

SEQ ID NO: 101098 - DNA, 25 bp, Saccharomyces pastorianus
ggataagcaggagccaagcccaatt

SEQ ID NO: 101099 - DNA, 25 bp, Saccharomyces pastorianus
gctatcgatagcagctctaccattt

SEQ ID NO: 101100 - DNA, 25 bp, Saccharomyces pastorianus
ttcataaatttaccgccactagctt

SEQ ID NO: 101101 - DNA, 25 bp, Saccharomyces pastorianus
agatgcggtcgctgtacttaaacaa

SEQ ID NO: 101102 - DNA, 25 bp, Saccharomyces pastorianus
agcccaatttgtgaggatctttctt

SEQ ID NO: 101103 - DNA, 25 bp, Saccharomyces pastorianus
tacacccagcaggtttactgatttt

SEQ ID NO: 101104 - DNA, 25 bp, Saccharomyces pastorianus
ccactagcttggtcattgcgttaca

SEQ ID NO: 101105 - DNA, 25 bp, Saccharomyces pastorianus
gttccaacttctcatattgctgggc

SEQ ID NO: 101106 - DNA, 25 bp, Saccharomyces pastorianus
tgcttctatgaacacttatcccggg

SEQ ID NO: 101107 - DNA, 25 bp, Saccharomyces pastorianus
tcaaaggctatcttctattcgtaag

SEQ ID NO: 101108 - DNA, 25 bp, Saccharomyces pastorianus
ttcgataacgaccatcgtgtcctaa

SEQ ID NO: 101109 - DNA, 25 bp, Saccharomyces pastorianus
gggctgtccatttttatgcgaagtc

SEQ ID NO: 101110 - DNA, 25 bp, Saccharomyces pastorianus
gaggaccctgaatccagtctgacaa

SEQ ID NO: 101111 - DNA, 25 bp, Saccharomyces pastorianus
catagattttgcttcactccattct

SEQ ID NO: 101112 - DNA, 25 bp, Saccharomyces pastorianus
ggcaatgttgaagcgcttgacagca

SEQ ID NO: 101113 - DNA, 25 bp, Saccharomyces pastorianus
aatgacgtggtctgtgttccaactt

SEQ ID NO: 101114 - DNA, 25 bp, Saccharomyces pastorianus
tatttgctattacccaagctgtagg

SEQ ID NO: 101115 - DNA, 25 bp, Saccharomyces pastorianus
ggtaggccagttgactcaaaggcta

SEQ ID NO: 101116 - DNA, 25 bp, Saccharomyces pastorianus
agagcctgcgcactttcaaaatgag

SEQ ID NO: 101117 - DNA, 25 bp, Saccharomyces pastorianus
tacgaactgttttgtggcgcacgaa

SEQ ID NO: 101118 - DNA, 25 bp, Saccharomyces pastorianus
tacggtaacgactctcagctagcta

SEQ ID NO: 101119 - DNA, 25 bp, Saccharomyces pastorianus
gaatcagtgtggacgcatttcagcg

SEQ ID NO: 101120 - DNA, 25 bp, Saccharomyces pastorianus
gaaactttgaagcttatcctaggaa

SEQ ID NO: 101121 - DNA, 25 bp, Saccharomyces pastorianus
gaaactataatgtatgcgagcctga

SEQ ID NO: 101122 - DNA, 25 bp, Saccharomyces pastorianus
atatagtgattctttgccgctacgg

SEQ ID NO: 101123 - DNA, 25 bp, Saccharomyces pastorianus
ggaccttgcattggactagttggaa

SEQ ID NO: 101124 - DNA, 25 bp, Saccharomyces pastorianus
gagatatctcatttccctgaagcag

SEQ ID NO: 101125 - DNA, 25 bp, Saccharomyces pastorianus
taggccatcccatcattacgagata

SEQ ID NO: 101126 - DNA, 25 bp, Saccharomyces pastorianus
gttatattcaggtttcccacagcag

SEQ ID NO: 101127 - DNA, 25 bp, Saccharomyces pastorianus
aagtttcatgttgttgcgatccctg

SEQ ID NO: 101128 - DNA, 25 bp, Saccharomyces pastorianus
ttgcgatccctgagaacctacgaaa

SEQ ID NO: 101129 - DNA, 25 bp, Saccharomyces pastorianus
taagtactttggtggtcattctgac

SEQ ID NO: 101130 - DNA, 25 bp, Saccharomyces pastorianus
atcatgcgacctcactgggtggaat

SEQ ID NO: 101131 - DNA, 25 bp, Saccharomyces pastorianus
gacgatttaccactcttctttacaa

SEQ ID NO: 101132 - DNA, 25 bp, Saccharomyces pastorianus
gactgacccatatatcgaccaaact

SEQ ID NO: 101133 - DNA, 25 bp, Saccharomyces pastorianus
atctgtgggctgtgaatccgctaat

SEQ ID NO: 101134 - DNA, 25 bp, Saccharomyces pastorianus
tagtggattccacattcgcatctcc

SEQ ID NO: 101135 - DNA, 25 bp, Saccharomyces pastorianus
gatattgtcctatactctgctacta

SEQ ID NO: 101136 - DNA, 25 bp, Saccharomyces pastorianus
gttaagtggcgtccttgtagtcaaa

SEQ ID NO: 101137 - DNA, 25 bp, Saccharomyces pastorianus
tatggtcccgtttttgctatcactt

SEQ ID NO: 101138 - DNA, 25 bp, Saccharomyces pastorianus
gatagaggccctgcaccagaagtac

SEQ ID NO: 101139 - DNA, 25 bp, Saccharomyces pastorianus
gtaatggcaacggaggacccttgca

SEQ ID NO: 101140 - DNA, 25 bp, Saccharomyces pastorianus
acgcgatacgggttctggatggact

SEQ ID NO: 101141 - DNA, 25 bp, Saccharomyces pastorianus
aaatctctttggttgcacgcgatac

SEQ ID NO: 101142 - DNA, 25 bp, Saccharomyces pastorianus
gacgaaatcaccattacgccaggag

SEQ ID NO: 101143 - DNA, 25 bp, Saccharomyces pastorianus
atatattcgcatatctagcgcggct

SEQ ID NO: 101144 - DNA, 25 bp, Saccharomyces pastorianus
gaagaactaggctaggctctgcccc

SEQ ID NO: 101145 - DNA, 25 bp, Saccharomyces pastorianus
gaaggagtacactacctgttaggac

SEQ ID NO: 101146 - DNA, 25 bp, Saccharomyces pastorianus
aacatcttgaacgtcgactcgaagc

SEQ ID NO: 101147 - DNA, 25 bp, Saccharomyces pastorianus
tgcccctaacaacgctggtgaagat

SEQ ID NO: 101148 - DNA, 25 bp, Saccharomyces pastorianus
aattctatacgcaccactagtacca

SEQ ID NO: 101149 - DNA, 25 bp, Saccharomyces pastorianus
gtgatatccaggacccatgggtgtt

SEQ ID NO: 101150 - DNA, 25 bp, Saccharomyces pastorianus
caattcatgtgtccgaactgtagga

SEQ ID NO: 101151 - DNA, 25 bp, Saccharomyces pastorianus
gatgtcaagtcttccagtgggacct

SEQ ID NO: 101152 - DNA, 25 bp, Saccharomyces pastorianus
tatatcaccatgtgcccatagttgg

SEQ ID NO: 101153 - DNA, 25 bp, Saccharomyces pastorianus
ggactaccttttacatgacggagat

SEQ ID NO: 101154 - DNA, 25 bp, Saccharomyces pastorianus
tgggacctttttgaaccaccagcgt

SEQ ID NO: 101155 - DNA, 25 bp, Saccharomyces pastorianus
gacggagatatcatacagctgggta

SEQ ID NO: 101156 - DNA, 25 bp, Saccharomyces pastorianus
gtatcatcccgtagtgttcaaatca

SEQ ID NO: 101157 - DNA, 25 bp, Saccharomyces pastorianus
gactaccttggaatccgaatctgaa

SEQ ID NO: 101158 - DNA, 25 bp, Saccharomyces pastorianus
aactgtgatttggagactaccttgg

SEQ ID NO: 101159 - DNA, 25 bp, Saccharomyces pastorianus
tgcgtctaccacttctaaggactac

SEQ ID NO: 101160 - DNA, 25 bp, Saccharomyces pastorianus
attacgaccgatccaagtgccaaga

SEQ ID NO: 101161 - DNA, 25 bp, Saccharomyces pastorianus
taccaacagtggctctacaagcagc

SEQ ID NO: 101162 - DNA, 25 bp, Saccharomyces pastorianus
agcagcaacaattcacaaccatctt

SEQ ID NO: 101163 - DNA, 25 bp, Saccharomyces pastorianus
gacagtcagtactatgatccttgtg

SEQ ID NO: 101164 - DNA, 25 bp, Saccharomyces pastorianus
aagaatattttgacgcataccgcga

SEQ ID NO: 101165 - DNA, 25 bp, Saccharomyces pastorianus
cggtatgaccatgaccaacgataat

SEQ ID NO: 101166 - DNA, 25 bp, Saccharomyces pastorianus
acgatccgtcgtcatttcaatacta

SEQ ID NO: 101167 - DNA, 25 bp, Saccharomyces pastorianus
tgaggagtcctccaagctcagtttt

SEQ ID NO: 101168 - DNA, 25 bp, Saccharomyces pastorianus
aattcgcgttaaaggctgacagtca

SEQ ID NO: 101169 - DNA, 25 bp, Saccharomyces pastorianus
ggcaaactagtagtctctccactat

SEQ ID NO: 101170 - DNA, 25 bp, Saccharomyces pastorianus
tatgtaccaaagagcgacgatccgt

SEQ ID NO: 101171 - DNA, 25 bp, Saccharomyces pastorianus
gcaaggatccaagaattgaccattt

SEQ ID NO: 101172 - DNA, 25 bp, Saccharomyces pastorianus
agatgtgcagcttgatgttgacgtc

SEQ ID NO: 101173 - DNA, 25 bp, Saccharomyces pastorianus
aaggcagttggaaaaccgcaatcag

SEQ ID NO: 101174 - DNA, 25 bp, Saccharomyces pastorianus
gggcagaataccaaattctttgtta

SEQ ID NO: 101175 - DNA, 25 bp, Saccharomyces pastorianus
ttaggtatgatgactttgatggcat

SEQ ID NO: 101176 - DNA, 25 bp, Saccharomyces pastorianus
gaggaagagccattaggtgtgcaaa

SEQ ID NO: 101177 - DNA, 25 bp, Saccharomyces pastorianus
tttgcccatggcaattagtgtgtgg

SEQ ID NO: 101178 - DNA, 25 bp, Saccharomyces pastorianus
gaagacggcaaaagccctgaggaaa

SEQ ID NO: 101179 - DNA, 25 bp, Saccharomyces pastorianus
gtcacagacgaccagtacaatattt

SEQ ID NO: 101180 - DNA, 25 bp, Saccharomyces pastorianus
taatacggctttgcaacgattttga

SEQ ID NO: 101181 - DNA, 25 bp, Saccharomyces pastorianus
gggatcgatgttacaaaccaccaat

SEQ ID NO: 101182 - DNA, 25 bp, Saccharomyces pastorianus
gagtacacacctgaactttgtcaaa

SEQ ID NO: 101183 - DNA, 25 bp, Saccharomyces pastorianus
cactgcgtgatatcgcggcaagcga

SEQ ID NO: 101184 - DNA, 25 bp, Saccharomyces pastorianus
gttcctcaagaagtttcatcctcta

SEQ ID NO: 101185 - DNA, 25 bp, Saccharomyces pastorianus
gaaccttcagactcagttcctcaag

SEQ ID NO: 101186 - DNA, 25 bp, Saccharomyces pastorianus
ggtatagcccgtttcattaatcatt

SEQ ID NO: 101187 - DNA, 25 bp, Saccharomyces pastorianus
gaattgttatctatgcactgcgtga

SEQ ID NO: 101188 - DNA, 25 bp, Saccharomyces pastorianus
gggtttatatgctctagactctatc

SEQ ID NO: 101189 - DNA, 25 bp, Saccharomyces pastorianus
cgctcgttcagcaattcacaactgg

SEQ ID NO: 101190 - DNA, 25 bp, Saccharomyces pastorianus
acggaatctgagctgctatcactaa

SEQ ID NO: 101191 - DNA, 25 bp, Saccharomyces pastorianus
gattggatccagttacctttttagg

SEQ ID NO: 101192 - DNA, 25 bp, Saccharomyces pastorianus
aagccagttatgttcgctcgttcag

SEQ ID NO: 101193 - DNA, 25 bp, Saccharomyces pastorianus
gaagtcattggtgataagccctcgt

SEQ ID NO: 101194 - DNA, 25 bp, Saccharomyces pastorianus
gataagccctcgtttaactcattca

SEQ ID NO: 101195 - DNA, 25 bp, Saccharomyces pastorianus
aacaacactcttactatccaaacaa

SEQ ID NO: 101196 - DNA, 25 bp, Saccharomyces pastorianus
tcgttcaattcatccaacaacactc

SEQ ID NO: 101197 - DNA, 25 bp, Saccharomyces pastorianus
gtcgaagatatcaaagtgctacatg

SEQ ID NO: 101198 - DNA, 25 bp, Saccharomyces pastorianus
gagggtcagttcattttcgatcaaa

SEQ ID NO: 101199 - DNA, 25 bp, Saccharomyces pastorianus
gacgttaaggtgcaatctccataca

SEQ ID NO: 101200 - DNA, 25 bp, Saccharomyces pastorianus
gggtggctaaggacatcattattct

SEQ ID NO: 101201 - DNA, 25 bp, Saccharomyces pastorianus
gaatcaatctccacaaaatttcaag

SEQ ID NO: 101202 - DNA, 25 bp, Saccharomyces pastorianus
ggtgcaatctccatacaaggtcgaa

SEQ ID NO: 101203 - DNA, 25 bp, Saccharomyces pastorianus
caaaccctcatatgtcaacgtggaa

SEQ ID NO: 101204 - DNA, 25 bp, Saccharomyces pastorianus
aggaccttctgttaggcgggttcag

SEQ ID NO: 101205 - DNA, 25 bp, Saccharomyces pastorianus
aattacccattgttctctggcaacg

SEQ ID NO: 101206 - DNA, 25 bp, Saccharomyces pastorianus
ttctttccattcgaattccaccaga

SEQ ID NO: 101207 - DNA, 25 bp, Saccharomyces pastorianus
agcctgatctcattgatgctcaaga

SEQ ID NO: 101208 - DNA, 25 bp, Saccharomyces pastorianus
gcgggttcagcaacgaagctacgct

SEQ ID NO: 101209 - DNA, 25 bp, Saccharomyces pastorianus
tttgatagctcatatttccgaccct

SEQ ID NO: 101210 - DNA, 25 bp, Saccharomyces pastorianus
ataaggaacgtgtagcagctgcatg

SEQ ID NO: 101211 - DNA, 25 bp, Saccharomyces pastorianus
gaggtcttagacaagcttctttcca

SEQ ID NO: 101212 - DNA, 25 bp, Saccharomyces pastorianus
ctgagcacccgttaagtctgggaca

SEQ ID NO: 101213 - DNA, 25 bp, Saccharomyces pastorianus
ttccaccagaactgacttccgatga

SEQ ID NO: 101214 - DNA, 25 bp, Saccharomyces pastorianus
gtctgggacaactctctgttgtaaa

SEQ ID NO: 101215 - DNA, 25 bp, Saccharomyces pastorianus
gataggctcacgttctgaatgcaaa

SEQ ID NO: 101216 - DNA, 25 bp, Saccharomyces pastorianus
atatccgagttcatcttcaagaggt

SEQ ID NO: 101217 - DNA, 25 bp, Saccharomyces pastorianus
tatggtaacgaactctccctttcaa

SEQ ID NO: 101218 - DNA, 25 bp, Saccharomyces pastorianus
aagcggtactctaccatctggtata

SEQ ID NO: 101219 - DNA, 25 bp, Saccharomyces pastorianus
gagactcttgaacatatccagaaca

SEQ ID NO: 101220 - DNA, 25 bp, Saccharomyces pastorianus
agttgattgcaagcggtactctacc

SEQ ID NO: 101221 - DNA, 25 bp, Saccharomyces pastorianus
ttctctatactacctaattcagcag

SEQ ID NO: 101222 - DNA, 25 bp, Saccharomyces pastorianus
atcaatgtccagattcctctctgaa

SEQ ID NO: 101223 - DNA, 25 bp, Saccharomyces pastorianus
aaatcgaactgaaaccggcacgctc

SEQ ID NO: 101224 - DNA, 25 bp, Saccharomyces pastorianus
tgcacttttcccagctacggaagag

SEQ ID NO: 101225 - DNA, 25 bp, Saccharomyces pastorianus
accggcacgctcttttgaacatgag

SEQ ID NO: 101226 - DNA, 25 bp, Saccharomyces pastorianus
gaacatcatcatccatcaactagta

SEQ ID NO: 101227 - DNA, 25 bp, Saccharomyces pastorianus
attatcttcaattcggcttcagtac

SEQ ID NO: 101228 - DNA, 25 bp, Saccharomyces pastorianus
aaacgtcaaacgtggcgcacattaa

SEQ ID NO: 101229 - DNA, 25 bp, Saccharomyces pastorianus
atacgatgtatgcatttggcttgac

SEQ ID NO: 101230 - DNA, 25 bp, Saccharomyces pastorianus
gtactgcatgaaatactcgctaata

SEQ ID NO: 101231 - DNA, 25 bp, Saccharomyces pastorianus
gatactatcctctgtaatatttcta

SEQ ID NO: 101232 - DNA, 25 bp, Saccharomyces pastorianus
tagcacagtgacacttaaacgtcaa

SEQ ID NO: 101233 - DNA, 25 bp, Saccharomyces pastorianus
gcatttggcttgacactgctgtaat

SEQ ID NO: 101234 - DNA, 25 bp, Saccharomyces pastorianus
ggtagttgccaaacatttgatacta

SEQ ID NO: 101235 - DNA, 25 bp, Saccharomyces pastorianus
tcacagcaacgttcaattatcttca

SEQ ID NO: 101236 - DNA, 25 bp, Saccharomyces pastorianus
aattcggcttcagtactgcatgaaa

SEQ ID NO: 101237 - DNA, 25 bp, Saccharomyces pastorianus
gaacagggccaagaactctcagaat

SEQ ID NO: 101238 - DNA, 25 bp, Saccharomyces pastorianus
catttctcaggtgcagatagctcaa

SEQ ID NO: 101239 - DNA, 25 bp, Saccharomyces pastorianus
gaaaactgtttcatggcgctctagt

SEQ ID NO: 101240 - DNA, 25 bp, Saccharomyces pastorianus
ggcaatgcccacagaggaaccgatt

SEQ ID NO: 101241 - DNA, 25 bp, Saccharomyces pastorianus
gctaaggtccgtctggcatatccta

SEQ ID NO: 101242 - DNA, 25 bp, Saccharomyces pastorianus
tggcatatcctacaacacagtcttt

SEQ ID NO: 101243 - DNA, 25 bp, Saccharomyces pastorianus
taagcagcaatgacgtcggtgtact

SEQ ID NO: 101244 - DNA, 25 bp, Saccharomyces pastorianus
aattgcagcgacaacattttggcga

SEQ ID NO: 101245 - DNA, 25 bp, Saccharomyces pastorianus
ggttagagacctgccttcaggatct

SEQ ID NO: 101246 - DNA, 25 bp, Saccharomyces pastorianus
ggtggcagccagcttgtgatatcta

SEQ ID NO: 101247 - DNA, 25 bp, Saccharomyces pastorianus
atgctattcaacctaactttgggag

SEQ ID NO: 101248 - DNA, 25 bp, Saccharomyces pastorianus
agaattgttactggtgccctcgaca

SEQ ID NO: 101249 - DNA, 25 bp, Saccharomyces pastorianus
gttgtaggtctgtgcgtatcggtaa

SEQ ID NO: 101250 - DNA, 25 bp, Saccharomyces pastorianus
tattagacccaatgctggccaccgg

SEQ ID NO: 101251 - DNA, 25 bp, Saccharomyces pastorianus
aggtatgtcttcctattagacccaa

SEQ ID NO: 101252 - DNA, 25 bp, Saccharomyces pastorianus
gggtttgtacaccatcatcagaaat

SEQ ID NO: 101253 - DNA, 25 bp, Saccharomyces pastorianus
tggccaccggtggtagtgctatcat

SEQ ID NO: 101254 - DNA, 25 bp, Saccharomyces pastorianus
aagggacgaggagactgctttacca

SEQ ID NO: 101255 - DNA, 25 bp, Saccharomyces pastorianus
caagtatctagttccagggttgggt

SEQ ID NO: 101256 - DNA, 25 bp, Saccharomyces pastorianus
cgaaggtgtctcattcatgggtaaa

SEQ ID NO: 101257 - DNA, 25 bp, Saccharomyces pastorianus
tggtgccctcgacagaggtctagat

SEQ ID NO: 101258 - DNA, 25 bp, Saccharomyces pastorianus
cgccttcccagaggtcagaattgtt

SEQ ID NO: 101259 - DNA, 25 bp, Saccharomyces pastorianus
taagtggcggaactacaacgcttaa

SEQ ID NO: 101260 - DNA, 25 bp, Saccharomyces pastorianus
ggagcagatatcacagagcagttac

SEQ ID NO: 101261 - DNA, 25 bp, Saccharomyces pastorianus
aaggaaacctttactgtcatcgata

SEQ ID NO: 101262 - DNA, 25 bp, Saccharomyces pastorianus
aaaggctttggagaccgaatgctat

SEQ ID NO: 101263 - DNA, 25 bp, Saccharomyces pastorianus
gataaagattatagccccttcagaa

SEQ ID NO: 101264 - DNA, 25 bp, Saccharomyces pastorianus
ttttcacctcaaatcatcggcttag

SEQ ID NO: 101265 - DNA, 25 bp, Saccharomyces pastorianus
atggttttgcattacctgcgtctat

SEQ ID NO: 101266 - DNA, 25 bp, Saccharomyces pastorianus
aatcagctggtgtttcgttgttttc

SEQ ID NO: 101267 - DNA, 25 bp, Saccharomyces pastorianus
tgtcatcgataatcctaagtggcgg

SEQ ID NO: 101268 - DNA, 25 bp, Saccharomyces pastorianus
gtttcgttgttttccagcagtgaac

SEQ ID NO: 101269 - DNA, 25 bp, Saccharomyces pastorianus
cggcttagggtacgatggattatct

SEQ ID NO: 101270 - DNA, 25 bp, Saccharomyces pastorianus
attttgacaccgatgtttacataaa

SEQ ID NO: 101271 - DNA, 25 bp, Saccharomyces pastorianus
atattttgcattttctcgaattgag

SEQ ID NO: 101272 - DNA, 25 bp, Saccharomyces pastorianus
ttgcacttaagtttcttttcaacat

SEQ ID NO: 101273 - DNA, 25 bp, Saccharomyces pastorianus
gctacatgatgaggagtttttctat

SEQ ID NO: 101274 - DNA, 25 bp, Saccharomyces pastorianus
tgttaaagcatttccgattggcatc

SEQ ID NO: 101275 - DNA, 25 bp, Saccharomyces pastorianus
atttccgattggcatcattgatgta

SEQ ID NO: 101276 - DNA, 25 bp, Saccharomyces pastorianus
atttcattctatacactttggattg

SEQ ID NO: 101277 - DNA, 25 bp, Saccharomyces pastorianus
attatcatcggatatatgctacatg

SEQ ID NO: 101278 - DNA, 25 bp, Saccharomyces pastorianus
tatatttcacgattttgacaccgat

SEQ ID NO: 101279 - DNA, 25 bp, Saccharomyces pastorianus
ggattgtgttttttcttttgcactt

SEQ ID NO: 101280 - DNA, 25 bp, Saccharomyces pastorianus
aacattatcattcggtatatttcac

SEQ ID NO: 101281 - DNA, 25 bp, Saccharomyces pastorianus
aggttctgcgttggacttcatgtac

SEQ ID NO: 101282 - DNA, 25 bp, Saccharomyces pastorianus
ttatccaaggccatccgttcaaaat

SEQ ID NO: 101283 - DNA, 25 bp, Saccharomyces pastorianus
ggactcatgttcctcaatgtcttgg

SEQ ID NO: 101284 - DNA, 25 bp, Saccharomyces pastorianus
atacgcatatacgtggtcgcatgac

SEQ ID NO: 101285 - DNA, 25 bp, Saccharomyces pastorianus
gatgccttgcccagagacttagaaa

SEQ ID NO: 101286 - DNA, 25 bp, Saccharomyces pastorianus
tacgcatactcgtgtgatgccttgc

SEQ ID NO: 101287 - DNA, 25 bp, Saccharomyces pastorianus
ggagattttatatccctacgcatac

SEQ ID NO: 101288 - DNA, 25 bp, Saccharomyces pastorianus
acagagcacattgggcattccagtt

SEQ ID NO: 101289 - DNA, 25 bp, Saccharomyces pastorianus
gggaaccatggatttttattgcctc

SEQ ID NO: 101290 - DNA, 25 bp, Saccharomyces pastorianus
aaactacgacgtaatctccgcatgt

SEQ ID NO: 101291 - DNA, 25 bp, Saccharomyces pastorianus
ttgatcattcctttggtttccagtg

SEQ ID NO: 101292 - DNA, 25 bp, Saccharomyces pastorianus
ggatttatcgaagctgtcaccacaa

SEQ ID NO: 101293 - DNA, 25 bp, Saccharomyces pastorianus
gaagctgtcaccacaagaactaaaa

SEQ ID NO: 101294 - DNA, 25 bp, Saccharomyces pastorianus
agcagcagggtggatttgagcaatc

SEQ ID NO: 101295 - DNA, 25 bp, Saccharomyces pastorianus
aggccggagtcattaagtcggatga

SEQ ID NO: 101296 - DNA, 25 bp, Saccharomyces pastorianus
tgagcaatcctcatgggtttaccaa

SEQ ID NO: 101297 - DNA, 25 bp, Saccharomyces pastorianus
tgacagcggagattatgcattgaaa

SEQ ID NO: 101298 - DNA, 25 bp, Saccharomyces pastorianus
ttatgcattgaaaaaggccggagtc

SEQ ID NO: 101299 - DNA, 25 bp, Saccharomyces pastorianus
gatctttcacctacaagcagcaggg

SEQ ID NO: 101300 - DNA, 25 bp, Saccharomyces pastorianus
aaatgtatgggaagcttccatccaa

SEQ ID NO: 101301 - DNA, 25 bp, Saccharomyces pastorianus
agatgcaggatcgtcaatattttga

SEQ ID NO: 101302 - DNA, 25 bp, Saccharomyces pastorianus
ggaagcttccatccaaaaaagatct

SEQ ID NO: 101303 - DNA, 25 bp, Saccharomyces pastorianus
tattgctgcattttttattctattc

SEQ ID NO: 101304 - DNA, 25 bp, Saccharomyces pastorianus
attaagaacaagatcgtcgcggaac

SEQ ID NO: 101305 - DNA, 25 bp, Saccharomyces pastorianus
gtaccattcattgactctttcgttc

SEQ ID NO: 101306 - DNA, 25 bp, Saccharomyces pastorianus
tagcaggaatactcttccccatgat

SEQ ID NO: 101307 - DNA, 25 bp, Saccharomyces pastorianus
tttcgttcgttatcaacaccagcca

SEQ ID NO: 101308 - DNA, 25 bp, Saccharomyces pastorianus
tccgcgactgcgagacacgaaaggt

SEQ ID NO: 101309 - DNA, 25 bp, Saccharomyces pastorianus
gatgttccaatactcttttgggctt

SEQ ID NO: 101310 - DNA, 25 bp, Saccharomyces pastorianus
aaacaccctaggatcatttataaga

SEQ ID NO: 101311 - DNA, 25 bp, Saccharomyces pastorianus
gcctgattgggctgtatttggtact

SEQ ID NO: 101312 - DNA, 25 bp, Saccharomyces pastorianus
aaggtgttatctttggttccatagt

SEQ ID NO: 101313 - DNA, 25 bp, Saccharomyces pastorianus
gcggaacgtgacatggtgcctgatt

SEQ ID NO: 101314 - DNA, 25 bp, Saccharomyces pastorianus
gagatcgcttctctattgaggctca

SEQ ID NO: 101315 - DNA, 25 bp, Saccharomyces pastorianus
ggaggctcaatcctgctagttacta

SEQ ID NO: 101316 - DNA, 25 bp, Saccharomyces pastorianus
gctagttactatactccacgtagaa

SEQ ID NO: 101317 - DNA, 25 bp, Saccharomyces pastorianus
acaatctctcagtggatcaactttt

SEQ ID NO: 101318 - DNA, 25 bp, Saccharomyces pastorianus
tagaacatcgcagtcacaatctctc

SEQ ID NO: 101319 - DNA, 25 bp, Saccharomyces pastorianus
aacgctgccgccgttttaagcaagc

SEQ ID NO: 101320 - DNA, 25 bp, Saccharomyces pastorianus
aagattcaagtagagcgcagcgtca

SEQ ID NO: 101321 - DNA, 25 bp, Saccharomyces pastorianus
gacagatgtctccacgcggcaaaat

SEQ ID NO: 101322 - DNA, 25 bp, Saccharomyces pastorianus
aagctcgcccatgacttttgggaga

SEQ ID NO: 101323 - DNA, 25 bp, Saccharomyces pastorianus
ggagaacgactgtgtcattgacgaa

SEQ ID NO: 101324 - DNA, 25 bp, Saccharomyces pastorianus
aacaacttaaagatggtcaccagca

SEQ ID NO: 101325 - DNA, 25 bp, Saccharomyces pastorianus
agattttctaagactcaccatcgcc

SEQ ID NO: 101326 - DNA, 25 bp, Saccharomyces pastorianus
gtggtacctcacaagctattgttta

SEQ ID NO: 101327 - DNA, 25 bp, Saccharomyces pastorianus
ttatcgtcctctctttctatgaaag

SEQ ID NO: 101328 - DNA, 25 bp, Saccharomyces pastorianus
atgcccgtgtcatccgtttggagac

SEQ ID NO: 101329 - DNA, 25 bp, Saccharomyces pastorianus
aaatggctgtttgcccaaattattc

SEQ ID NO: 101330 - DNA, 25 bp, Saccharomyces pastorianus
taaggttatccttcatcgttgctaa

SEQ ID NO: 101331 - DNA, 25 bp, Saccharomyces pastorianus
aaatcttggatttggccgacattac

SEQ ID NO: 101332 - DNA, 25 bp, Saccharomyces pastorianus
ttaccaagctggtcagtttaccgtt

SEQ ID NO: 101333 - DNA, 25 bp, Saccharomyces pastorianus
gatagacctgacgatttgccgcaac

SEQ ID NO: 101334 - DNA, 25 bp, Saccharomyces pastorianus
ctccgcgggtatgttcatcattatt

SEQ ID NO: 101335 - DNA, 25 bp, Saccharomyces pastorianus
atggctgagtccaacttatcgtcct

SEQ ID NO: 101336 - DNA, 25 bp, Saccharomyces pastorianus
aaaaatctctcgtttggcattccac

SEQ ID NO: 101337 - DNA, 25 bp, Saccharomyces pastorianus
ggctgggcgattaattctggacaca

SEQ ID NO: 101338 - DNA, 25 bp, Saccharomyces pastorianus
accagctagctcaatgacgtcatct

SEQ ID NO: 101339 - DNA, 25 bp, Saccharomyces pastorianus
taaacccttggtttctgcgtattgg

SEQ ID NO: 101340 - DNA, 25 bp, Saccharomyces pastorianus
aacattgaatcgttggacccgccag

SEQ ID NO: 101341 - DNA, 25 bp, Saccharomyces pastorianus
gggatgacttttgctcctgtagcct

SEQ ID NO: 101342 - DNA, 25 bp, Saccharomyces pastorianus
gactctctgtcgaaggtcaggttca

SEQ ID NO: 101343 - DNA, 25 bp, Saccharomyces pastorianus
ggatgacatcccagttagactccgt

SEQ ID NO: 101344 - DNA, 25 bp, Saccharomyces pastorianus
gatctattttctactcttctggaga

SEQ ID NO: 101345 - DNA, 25 bp, Saccharomyces pastorianus
atcacagtggtcgattcgtcgcaaa

SEQ ID NO: 101346 - DNA, 25 bp, Saccharomyces pastorianus
attcgacatcaataccctgggactc

SEQ ID NO: 101347 - DNA, 25 bp, Saccharomyces pastorianus
aagggctttacagtggacttacctg

SEQ ID NO: 101348 - DNA, 25 bp, Saccharomyces pastorianus
ggctacggaccagaatagcattatt

SEQ ID NO: 101349 - DNA, 25 bp, Saccharomyces pastorianus
tttcattagcatattctccatggca

SEQ ID NO: 101350 - DNA, 25 bp, Saccharomyces pastorianus
gccagttacttagttttgattttca

SEQ ID NO: 101351 - DNA, 25 bp, Saccharomyces pastorianus
aagacggataatatggctacggacc

SEQ ID NO: 101352 - DNA, 25 bp, Saccharomyces pastorianus
aggcatcttccttatcatcatacat

SEQ ID NO: 101353 - DNA, 25 bp, Saccharomyces pastorianus
ggacttacctgatagcgaccaaatt

SEQ ID NO: 101354 - DNA, 25 bp, Saccharomyces pastorianus
cggtctgaaagaacgtttgagctat

SEQ ID NO: 101355 - DNA, 25 bp, Saccharomyces pastorianus
gcgaccaaattttggacggtctgaa

SEQ ID NO: 101356 - DNA, 25 bp, Saccharomyces pastorianus
tcatacatcgtaactttccccaaga

SEQ ID NO: 101357 - DNA, 25 bp, Saccharomyces pastorianus
gcgagtacggtgctaaatgcaattt

SEQ ID NO: 101358 - DNA, 25 bp, Saccharomyces pastorianus
aatggttctttgatgcctgtgagcc

SEQ ID NO: 101359 - DNA, 25 bp, Saccharomyces pastorianus
ctgtgggcgttttgtctggtcagaa

SEQ ID NO: 101360 - DNA, 25 bp, Saccharomyces pastorianus
aactttgttgtctattgctatccat

SEQ ID NO: 101361 - DNA, 25 bp, Saccharomyces pastorianus
atgttgtgtattctggtgttttccc

SEQ ID NO: 101362 - DNA, 25 bp, Saccharomyces pastorianus
gacttccctgtcgtttatgcaagtg

SEQ ID NO: 101363 - DNA, 25 bp, Saccharomyces pastorianus
gtgagccaactctgattgccagcaa

SEQ ID NO: 101364 - DNA, 25 bp, Saccharomyces pastorianus
aatttctgctgggtacttgtcacca

SEQ ID NO: 101365 - DNA, 25 bp, Saccharomyces pastorianus
tggcatcatggacatcggtcgactt

SEQ ID NO: 101366 - DNA, 25 bp, Saccharomyces pastorianus
cacaaatatcttctaatgcctcctc

SEQ ID NO: 101367 - DNA, 25 bp, Saccharomyces pastorianus
gtcagctctggtacaagtcacaaca

SEQ ID NO: 101368 - DNA, 25 bp, Saccharomyces pastorianus
ttgtcaccaatccaagcgcaaactt

SEQ ID NO: 101369 - DNA, 25 bp, Saccharomyces pastorianus
gcatttgttcaaatagatggacgct

SEQ ID NO: 101370 - DNA, 25 bp, Saccharomyces pastorianus
acctcttatagaatttgtatcccca

SEQ ID NO: 101371 - DNA, 25 bp, Saccharomyces pastorianus
gacattcacgtcagaaaagaggcca

SEQ ID NO: 101372 - DNA, 25 bp, Saccharomyces pastorianus
taatccgcggatcttgtcaaattta

SEQ ID NO: 101373 - DNA, 25 bp, Saccharomyces pastorianus
gttaacatgtgacattcacgtcaga

SEQ ID NO: 101374 - DNA, 25 bp, Saccharomyces pastorianus
atatgtcacttctgcatgcgtttca

SEQ ID NO: 101375 - DNA, 25 bp, Saccharomyces pastorianus
tagatggacgctatttgacaaaaat

SEQ ID NO: 101376 - DNA, 25 bp, Saccharomyces pastorianus
aagcgcagacttctctaatccgcgg

SEQ ID NO: 101377 - DNA, 25 bp, Saccharomyces pastorianus
gatgctgcaaacaggaacctcttat

SEQ ID NO: 101378 - DNA, 25 bp, Saccharomyces pastorianus
cacgctctgtttttagatgctgcaa

SEQ ID NO: 101379 - DNA, 25 bp, Saccharomyces pastorianus
tgcgtttcacgctctgtttttagat

SEQ ID NO: 101380 - DNA, 25 bp, Saccharomyces pastorianus
gaacgagccgtacaagtctattata

SEQ ID NO: 101381 - DNA, 25 bp, Saccharomyces pastorianus
tggccgcttagattgttttttgtca

SEQ ID NO: 101382 - DNA, 25 bp, Saccharomyces pastorianus
tatccatacccgtttctagacgtga

SEQ ID NO: 101383 - DNA, 25 bp, Saccharomyces pastorianus
caaagacaccttttcctatgacagt

SEQ ID NO: 101384 - DNA, 25 bp, Saccharomyces pastorianus
ggcaatccacttatatcctatttta

SEQ ID NO: 101385 - DNA, 25 bp, Saccharomyces pastorianus
attgttgctaccgtttattggccgc

SEQ ID NO: 101386 - DNA, 25 bp, Saccharomyces pastorianus
gttgctactattacgtgggcttatt

SEQ ID NO: 101387 - DNA, 25 bp, Saccharomyces pastorianus
agcatgcatggctcattgtaaccag

SEQ ID NO: 101388 - DNA, 25 bp, Saccharomyces pastorianus
tgtagtcttgcctccaagtttgagt

SEQ ID NO: 101389 - DNA, 25 bp, Saccharomyces pastorianus
agacatgtcactttgccagtttctt

SEQ ID NO: 101390 - DNA, 25 bp, Saccharomyces pastorianus
actacttatcgggatctggcacgaa

SEQ ID NO: 101391 - DNA, 25 bp, Saccharomyces pastorianus
tgctgctgggccttattgataatcg

SEQ ID NO: 101392 - DNA, 25 bp, Saccharomyces pastorianus
actggtatccctattggtagttcga

SEQ ID NO: 101393 - DNA, 25 bp, Saccharomyces pastorianus
tatttttctttgtagcaggccaggt

SEQ ID NO: 101394 - DNA, 25 bp, Saccharomyces pastorianus
ttggtttatgccttctctacacaaa

SEQ ID NO: 101395 - DNA, 25 bp, Saccharomyces pastorianus
gggtcatatccatacttcgtggcta

SEQ ID NO: 101396 - DNA, 25 bp, Saccharomyces pastorianus
atatgactaccgacgacgacttgga

SEQ ID NO: 101397 - DNA, 25 bp, Saccharomyces pastorianus
tcaagcactacttagatggcctctt

SEQ ID NO: 101398 - DNA, 25 bp, Saccharomyces pastorianus
acaaagtccatgctgttggtccgtg

SEQ ID NO: 101399 - DNA, 25 bp, Saccharomyces pastorianus
atggcctcttttttggaagcatctg

SEQ ID NO: 101400 - DNA, 25 bp, Saccharomyces pastorianus
gtggtagactgtggtgtatctcccc

SEQ ID NO: 101401 - DNA, 25 bp, Saccharomyces pastorianus
tatgggtcacaggagctatcttttt

SEQ ID NO: 101402 - DNA, 25 bp, Saccharomyces pastorianus
tgtctacttaactaacccgtctcaa

SEQ ID NO: 101403 - DNA, 25 bp, Saccharomyces pastorianus
agctcggatggcacttgttacgttt

SEQ ID NO: 101404 - DNA, 25 bp, Saccharomyces pastorianus
gcagttgagtcatcccaaacagggt

SEQ ID NO: 101405 - DNA, 25 bp, Saccharomyces pastorianus
ttgtttcatctattgcacctttctc

SEQ ID NO: 101406 - DNA, 25 bp, Saccharomyces pastorianus
gagcaacgacatccatgccattaga

SEQ ID NO: 101407 - DNA, 25 bp, Saccharomyces pastorianus
ggtaccctcttctagcgtagataca

SEQ ID NO: 101408 - DNA, 25 bp, Saccharomyces pastorianus
gaatcgtcaggtacatcttccgcta

SEQ ID NO: 101409 - DNA, 25 bp, Saccharomyces pastorianus
gacttctagttctgcttttgtttca

SEQ ID NO: 101410 - DNA, 25 bp, Saccharomyces pastorianus
tcaactaactttggcgtcatcgtct

SEQ ID NO: 101411 - DNA, 25 bp, Saccharomyces pastorianus
gtcttcaggttttcgtttgacttct

SEQ ID NO: 101412 - DNA, 25 bp, Saccharomyces pastorianus
cactattattaccttggcaccatcg

SEQ ID NO: 101413 - DNA, 25 bp, Saccharomyces pastorianus
ggtacttctcaagctagaacggcaa

SEQ ID NO: 101414 - DNA, 25 bp, Saccharomyces pastorianus
agctagaacggcaactttgaagtat

SEQ ID NO: 101415 - DNA, 25 bp, Saccharomyces pastorianus
gtaaattatctttatccagaactga

SEQ ID NO: 101416 - DNA, 25 bp, Saccharomyces pastorianus
gctgcaggtacttctcaagctagaa

SEQ ID NO: 101417 - DNA, 25 bp, Saccharomyces pastorianus
ggtcatagaatcctgttgaaggcta

SEQ ID NO: 101418 - DNA, 25 bp, Saccharomyces pastorianus
atccagaactgatgcagtccgttgt

SEQ ID NO: 101419 - DNA, 25 bp, Saccharomyces pastorianus
gcagctgcaggtacttctcaagcta

SEQ ID NO: 101420 - DNA, 25 bp, Saccharomyces pastorianus
gactgtggtcatagaatcctgttga

SEQ ID NO: 101421 - DNA, 25 bp, Saccharomyces pastorianus
aactttgaagtatatttgtgctgaa

SEQ ID NO: 101422 - DNA, 25 bp, Saccharomyces pastorianus
tccaacaaatttagacgccgcagct

SEQ ID NO: 101423 - DNA, 25 bp, Saccharomyces pastorianus
atttagacgccgcagctgcaggtac

SEQ ID NO: 101424 - DNA, 25 bp, Saccharomyces pastorianus
gaaatctgcacacttgcttatgctt

SEQ ID NO: 101425 - DNA, 25 bp, Saccharomyces pastorianus
ctggcagggatcgtgtaggtcaaaa

SEQ ID NO: 101426 - DNA, 25 bp, Saccharomyces pastorianus
ttgcccttgcttaacatgttctgta

SEQ ID NO: 101427 - DNA, 25 bp, Saccharomyces pastorianus
ttatactgtgatacttgcccttgct

SEQ ID NO: 101428 - DNA, 25 bp, Saccharomyces pastorianus
agcatctcgttccaattgcatgaaa

SEQ ID NO: 101429 - DNA, 25 bp, Saccharomyces pastorianus
tgcccacgttgcaatgacggtgatt

SEQ ID NO: 101430 - DNA, 25 bp, Saccharomyces pastorianus
gatcaacatgactttcagcctgaag

SEQ ID NO: 101431 - DNA, 25 bp, Saccharomyces pastorianus
gggaataaccgtccggcaattcagc

SEQ ID NO: 101432 - DNA, 25 bp, Saccharomyces pastorianus
gttagcgacactagcagcatctcgt

SEQ ID NO: 101433 - DNA, 25 bp, Saccharomyces pastorianus
gaattgtttcaatggcggttgccca

SEQ ID NO: 101434 - DNA, 25 bp, Saccharomyces pastorianus
atgggactcctcgacatttaacgaa

SEQ ID NO: 101435 - DNA, 25 bp, Saccharomyces pastorianus
ggcatcttgctgtccttagatttgt

SEQ ID NO: 101436 - DNA, 25 bp, Saccharomyces pastorianus
gctcccacgtctctgattattgaag

SEQ ID NO: 101437 - DNA, 25 bp, Saccharomyces pastorianus
aaggtgggtgcatctatcaaacaag

SEQ ID NO: 101438 - DNA, 25 bp, Saccharomyces pastorianus
gtgaattgtccgtggaggtccccga

SEQ ID NO: 101439 - DNA, 25 bp, Saccharomyces pastorianus
aaatgcattatccatgcccaggatt

SEQ ID NO: 101440 - DNA, 25 bp, Saccharomyces pastorianus
aaacactttttctgcgctctcaagt

SEQ ID NO: 101441 - DNA, 25 bp, Saccharomyces pastorianus
tgcaataagcagcaggtccttcttt

SEQ ID NO: 101442 - DNA, 25 bp, Saccharomyces pastorianus
aggtccttctttttgctgccaaatt

SEQ ID NO: 101443 - DNA, 25 bp, Saccharomyces pastorianus
gggtctttaccactttatatatctc

SEQ ID NO: 101444 - DNA, 25 bp, Saccharomyces pastorianus
gaggtccccgattttttgcacttgg

SEQ ID NO: 101445 - DNA, 25 bp, Saccharomyces pastorianus
tgagaaaattccatccaccagagcc

SEQ ID NO: 101446 - DNA, 25 bp, Saccharomyces pastorianus
gtgccatctgtaggaggcgattacc

SEQ ID NO: 101447 - DNA, 25 bp, Saccharomyces pastorianus
tacttgggtggacaactctaagatc

SEQ ID NO: 101448 - DNA, 25 bp, Saccharomyces pastorianus
acaagggcatgttcgcgtgggtcca

SEQ ID NO: 101449 - DNA, 25 bp, Saccharomyces pastorianus
gtgatattcgtcgtcttgccaataa

SEQ ID NO: 101450 - DNA, 25 bp, Saccharomyces pastorianus
aaattatcattattacctcccaccg

SEQ ID NO: 101451 - DNA, 25 bp, Saccharomyces pastorianus
aaagttactgttagtgccatctgta

SEQ ID NO: 101452 - DNA, 25 bp, Saccharomyces pastorianus
aaggccaccgggacactcaggtcat

SEQ ID NO: 101453 - DNA, 25 bp, Saccharomyces pastorianus
agctatacgctatgggtgtcctgac

SEQ ID NO: 101454 - DNA, 25 bp, Saccharomyces pastorianus
ccgatccatttcgtcgcaaacatga

SEQ ID NO: 101455 - DNA, 25 bp, Saccharomyces pastorianus
gatccagcctacctcgtaacgagaa

SEQ ID NO: 101456 - DNA, 25 bp, Saccharomyces pastorianus
gggtccaaatttgatcaacgatcca

SEQ ID NO: 101457 - DNA, 25 bp, Saccharomyces pastorianus
gagacagatgttgtacagccaccaa

SEQ ID NO: 101458 - DNA, 25 bp, Saccharomyces pastorianus
tggtaatgaccaacccttcggattt

SEQ ID NO: 101459 - DNA, 25 bp, Saccharomyces pastorianus
aaacgatgcctattatgctccacag

SEQ ID NO: 101460 - DNA, 25 bp, Saccharomyces pastorianus
tttagctcaatcagcttcttcgcat

SEQ ID NO: 101461 - DNA, 25 bp, Saccharomyces pastorianus
gaactgcgttaaatccggtcgatca

SEQ ID NO: 101462 - DNA, 25 bp, Saccharomyces pastorianus
ggttccttcaccttatcaacttaga

SEQ ID NO: 101463 - DNA, 25 bp, Saccharomyces pastorianus
taagccagcaggttctttcagaagt

SEQ ID NO: 101464 - DNA, 25 bp, Saccharomyces pastorianus
ataatcatcctcagaccctggaaac

SEQ ID NO: 101465 - DNA, 25 bp, Saccharomyces pastorianus
aagtgtaagcgcaaccaattcaaga

SEQ ID NO: 101466 - DNA, 25 bp, Saccharomyces pastorianus
tcttcgcattcattgacctctttta

SEQ ID NO: 101467 - DNA, 25 bp, Saccharomyces pastorianus
gaattaccaactcccgcatatttag

SEQ ID NO: 101468 - DNA, 25 bp, Saccharomyces pastorianus
tagaagagcacagcaattcccaccg

SEQ ID NO: 101469 - DNA, 25 bp, Saccharomyces pastorianus
attcccaccgggagtagattctttg

SEQ ID NO: 101470 - DNA, 25 bp, Saccharomyces pastorianus
accggcgaattcttatttgatccaa

SEQ ID NO: 101471 - DNA, 25 bp, Saccharomyces pastorianus
acaggatttcttttgattgctttct

SEQ ID NO: 101472 - DNA, 25 bp, Saccharomyces pastorianus
gaggcaatcaatagttttcttcgta

SEQ ID NO: 101473 - DNA, 25 bp, Saccharomyces pastorianus
ccacaggctggtcatttgatcctaa

SEQ ID NO: 101474 - DNA, 25 bp, Saccharomyces pastorianus
ggccttactgccgaacgactggaag

SEQ ID NO: 101475 - DNA, 25 bp, Saccharomyces pastorianus
tgaatctgccaattaccggcgaatt

SEQ ID NO: 101476 - DNA, 25 bp, Saccharomyces pastorianus
gaattttcgatcctcaagatccgta

SEQ ID NO: 101477 - DNA, 25 bp, Saccharomyces pastorianus
tattcgcctggtgcttactgatata

SEQ ID NO: 101478 - DNA, 25 bp, Saccharomyces pastorianus
gaagagtgctccactaaacgttttt

SEQ ID NO: 101479 - DNA, 25 bp, Saccharomyces pastorianus
gtggtccttatgctagttgcccata

SEQ ID NO: 101480 - DNA, 25 bp, Saccharomyces pastorianus
gggatagcgaccaaccttcagttac

SEQ ID NO: 101481 - DNA, 25 bp, Saccharomyces pastorianus
attgttgggtcagtggtggtcctta

SEQ ID NO: 101482 - DNA, 25 bp, Saccharomyces pastorianus
gtcaacttctaaatctggcagctca

SEQ ID NO: 101483 - DNA, 25 bp, Saccharomyces pastorianus
tcatccgggaccttagaggcttaca

SEQ ID NO: 101484 - DNA, 25 bp, Saccharomyces pastorianus
aattgcgttctcttgtactactttg

SEQ ID NO: 101485 - DNA, 25 bp, Saccharomyces pastorianus
atgaggaattcctccttctctgaca

SEQ ID NO: 101486 - DNA, 25 bp, Saccharomyces pastorianus
tttgtaacaatgatggtccccgcgt

SEQ ID NO: 101487 - DNA, 25 bp, Saccharomyces pastorianus
cttgagtgtattgagggtccccatt

SEQ ID NO: 101488 - DNA, 25 bp, Saccharomyces pastorianus
gaagcccattggaccagagatcgtt

SEQ ID NO: 101489 - DNA, 25 bp, Saccharomyces pastorianus
tttgccctactgtgtattgtcgttt

SEQ ID NO: 101490 - DNA, 25 bp, Saccharomyces pastorianus
tgcatcaccgactgacaggctggta

SEQ ID NO: 101491 - DNA, 25 bp, Saccharomyces pastorianus
acacaatcaccagaagcagcagcag

SEQ ID NO: 101492 - DNA, 25 bp, Saccharomyces pastorianus
ggatccgaagaggaaactccaacta

SEQ ID NO: 101493 - DNA, 25 bp, Saccharomyces pastorianus
gagattgcggcctttcgaattttta

SEQ ID NO: 101494 - DNA, 25 bp, Saccharomyces pastorianus
ggcttccatcctcaagactgatatt

SEQ ID NO: 101495 - DNA, 25 bp, Saccharomyces pastorianus
tcgtcacacaccactagcaatttgg

SEQ ID NO: 101496 - DNA, 25 bp, Saccharomyces pastorianus
gcagcaacaacgacaactaccatca

SEQ ID NO: 101497 - DNA, 25 bp, Saccharomyces pastorianus
aaacttgaagtcgtcacacaccact

SEQ ID NO: 101498 - DNA, 25 bp, Saccharomyces pastorianus
ggctggtatcaccatgctcattgaa

SEQ ID NO: 101499 - DNA, 25 bp, Saccharomyces pastorianus
agtgaccaatcagcacgcacggctt

SEQ ID NO: 101500 - DNA, 25 bp, Saccharomyces pastorianus
aaccttgctgccgattcagaggatg

SEQ ID NO: 101501 - DNA, 25 bp, Saccharomyces pastorianus
gaagccattttatcaaggtttcata

SEQ ID NO: 101502 - DNA, 25 bp, Saccharomyces pastorianus
atgtctgaattcttttgggatgtac

SEQ ID NO: 101503 - DNA, 25 bp, Saccharomyces pastorianus
attgttacacagctgcaattactga

SEQ ID NO: 101504 - DNA, 25 bp, Saccharomyces pastorianus
tacagaaaggccctggagttcccgc

SEQ ID NO: 101505 - DNA, 25 bp, Saccharomyces pastorianus
gcaaataattttcgacctcttcaaa

SEQ ID NO: 101506 - DNA, 25 bp, Saccharomyces pastorianus
ggtgcccgctactttattacagagg

SEQ ID NO: 101507 - DNA, 25 bp, Saccharomyces pastorianus
cgagcaggttaatttcgcagcttaa

SEQ ID NO: 101508 - DNA, 25 bp, Saccharomyces pastorianus
cccgcacatcgttctctgatgataa

SEQ ID NO: 101509 - DNA, 25 bp, Saccharomyces pastorianus
aagctaaccagcgtttgacacggaa

SEQ ID NO: 101510 - DNA, 25 bp, Saccharomyces pastorianus
ggaccatcgaaaacgggtgcccgct

SEQ ID NO: 101511 - DNA, 25 bp, Saccharomyces pastorianus
ttcacgcgcttgaaattctcaatag

SEQ ID NO: 101512 - DNA, 25 bp, Saccharomyces pastorianus
tagtcaatgatataccgggtggtgt

SEQ ID NO: 101513 - DNA, 25 bp, Saccharomyces pastorianus
ttttgaaccgttaaaattcgcattg

SEQ ID NO: 101514 - DNA, 25 bp, Saccharomyces pastorianus
gtacttatcgtcaccaaagcttcac

SEQ ID NO: 101515 - DNA, 25 bp, Saccharomyces pastorianus
aatcccaaatgacgtttctaagcag

SEQ ID NO: 101516 - DNA, 25 bp, Saccharomyces pastorianus
ggcatttttaaatacgtacttatcg

SEQ ID NO: 101517 - DNA, 25 bp, Saccharomyces pastorianus
gaatcaatttttcatctcaatgttg

SEQ ID NO: 101518 - DNA, 25 bp, Saccharomyces pastorianus
ggctctgttctaaaggcacatggta

SEQ ID NO: 101519 - DNA, 25 bp, Saccharomyces pastorianus
atgcacatttgaagacataatccca

SEQ ID NO: 101520 - DNA, 25 bp, Saccharomyces pastorianus
tctaagcaggaaaacggaggcattt

SEQ ID NO: 101521 - DNA, 25 bp, Saccharomyces pastorianus
ggtgtagatacaataggctctgttc

SEQ ID NO: 101522 - DNA, 25 bp, Saccharomyces pastorianus
atcgtcaccaaagcttcacaggtta

SEQ ID NO: 101523 - DNA, 25 bp, Saccharomyces pastorianus
atgatacctgtcttctgtatagcga

SEQ ID NO: 101524 - DNA, 25 bp, Saccharomyces pastorianus
gacgacccagtatgcatgccgaaga

SEQ ID NO: 101525 - DNA, 25 bp, Saccharomyces pastorianus
agactttcttcaccaatactttgta

SEQ ID NO: 101526 - DNA, 25 bp, Saccharomyces pastorianus
aaatcagacccatatcttcgtccag

SEQ ID NO: 101527 - DNA, 25 bp, Saccharomyces pastorianus
cttccgtttatcttagacgacccag

SEQ ID NO: 101528 - DNA, 25 bp, Saccharomyces pastorianus
ggacaaactatcctaagcctgggtt

SEQ ID NO: 101529 - DNA, 25 bp, Saccharomyces pastorianus
aatctgcaacagtatctcttccgtt

SEQ ID NO: 101530 - DNA, 25 bp, Saccharomyces pastorianus
gcaccgtccaaatactgcaatcgga

SEQ ID NO: 101531 - DNA, 25 bp, Saccharomyces pastorianus
atcacatgtacgcaagactttcttc

SEQ ID NO: 101532 - DNA, 25 bp, Saccharomyces pastorianus
gaacagcttcaacgtacctcttaag

SEQ ID NO: 101533 - DNA, 25 bp, Saccharomyces pastorianus
tgcaatcggactattctgcgctgat

SEQ ID NO: 101534 - DNA, 25 bp, Saccharomyces pastorianus
gtcgtcaccaccgtgtagtaattaa

SEQ ID NO: 101535 - DNA, 25 bp, Saccharomyces pastorianus
aactatcttctgaataccatgcttt

SEQ ID NO: 101536 - DNA, 25 bp, Saccharomyces pastorianus
tcagaagcaccgaggagagttccaa

SEQ ID NO: 101537 - DNA, 25 bp, Saccharomyces pastorianus
ggaacacagctcattaagtcaagat

SEQ ID NO: 101538 - DNA, 25 bp, Saccharomyces pastorianus
gtaaggcactaatggtttcacaaag

SEQ ID NO: 101539 - DNA, 25 bp, Saccharomyces pastorianus
gtatcagttctatggacagtgcaag

SEQ ID NO: 101540 - DNA, 25 bp, Saccharomyces pastorianus
gaaccctatggtgatcaaagtcgtc

SEQ ID NO: 101541 - DNA, 25 bp, Saccharomyces pastorianus
agattggacgatttgctggagagaa

SEQ ID NO: 101542 - DNA, 25 bp, Saccharomyces pastorianus
gaagttcaaaaatggcgtctgcagt

SEQ ID NO: 101543 - DNA, 25 bp, Saccharomyces pastorianus
gaaaactgtcggtgaaccctatggt

SEQ ID NO: 101544 - DNA, 25 bp, Saccharomyces pastorianus
gaaagcggaactcttcatcactaat

SEQ ID NO: 101545 - DNA, 25 bp, Saccharomyces pastorianus
gaactctgaattgggatgactctct

SEQ ID NO: 101546 - DNA, 25 bp, Saccharomyces pastorianus
caggtcgctttggagctttgttagc

SEQ ID NO: 101547 - DNA, 25 bp, Saccharomyces pastorianus
tagcgatgtcaaggccggattactc

SEQ ID NO: 101548 - DNA, 25 bp, Saccharomyces pastorianus
ggagcaaaccattagctctgtttaa

SEQ ID NO: 101549 - DNA, 25 bp, Saccharomyces pastorianus
agtggcgacgattctagtttaaaca

SEQ ID NO: 101550 - DNA, 25 bp, Saccharomyces pastorianus
gtccgcgcaacagtacgataatgaa

SEQ ID NO: 101551 - DNA, 25 bp, Saccharomyces pastorianus
taatgaagcacctggagctcgccaa

SEQ ID NO: 101552 - DNA, 25 bp, Saccharomyces pastorianus
atgactctctttcaggtacgcctga

SEQ ID NO: 101553 - DNA, 25 bp, Saccharomyces pastorianus
tagtaatagcgagtcgtccgcgcaa

SEQ ID NO: 101554 - DNA, 25 bp, Saccharomyces pastorianus
gggacgactcgtcagattcatccaa

SEQ ID NO: 101555 - DNA, 25 bp, Saccharomyces pastorianus
gcaaggatcagtctccaggtcgctt

SEQ ID NO: 101556 - DNA, 25 bp, Saccharomyces pastorianus
taagaatgttgaaccgcccatcgca

SEQ ID NO: 101557 - DNA, 25 bp, Saccharomyces pastorianus
gacaatgaaacttcttgggccaagg

SEQ ID NO: 101558 - DNA, 25 bp, Saccharomyces pastorianus
gggcagcattagtgacggttctata

SEQ ID NO: 101559 - DNA, 25 bp, Saccharomyces pastorianus
aactttaacattgcttccttccctg

SEQ ID NO: 101560 - DNA, 25 bp, Saccharomyces pastorianus
ctcagacagattttcccttaggctt

SEQ ID NO: 101561 - DNA, 25 bp, Saccharomyces pastorianus
tttcccttaggcttttattcacaga

SEQ ID NO: 101562 - DNA, 25 bp, Saccharomyces pastorianus
aacgggctacggacatctcagacag

SEQ ID NO: 101563 - DNA, 25 bp, Saccharomyces pastorianus
cttccctgtggttgaccatcagata

SEQ ID NO: 101564 - DNA, 25 bp, Saccharomyces pastorianus
tagaacatcctatcaacagccacat

SEQ ID NO: 101565 - DNA, 25 bp, Saccharomyces pastorianus
gaaaggtttggcttccgatataatt

SEQ ID NO: 101566 - DNA, 25 bp, Saccharomyces pastorianus
gaattcaggaaactgggctggtctt

SEQ ID NO: 101567 - DNA, 25 bp, Saccharomyces pastorianus
ggaggatactccgtttcacaggata

SEQ ID NO: 101568 - DNA, 25 bp, Saccharomyces pastorianus
ggagccaaccctgttacaaatataa

SEQ ID NO: 101569 - DNA, 25 bp, Saccharomyces pastorianus
aaaaatgcctttgagctcgatcaat

SEQ ID NO: 101570 - DNA, 25 bp, Saccharomyces pastorianus
tggttctaacaacccgttcacattg

SEQ ID NO: 101571 - DNA, 25 bp, Saccharomyces pastorianus
atagcgttatgacaacccctactag

SEQ ID NO: 101572 - DNA, 25 bp, Saccharomyces pastorianus
gacagttcaacctcaaaatttccct

SEQ ID NO: 101573 - DNA, 25 bp, Saccharomyces pastorianus
tggaatttcaggctcactacactca

SEQ ID NO: 101574 - DNA, 25 bp, Saccharomyces pastorianus
aaatttccctttctatccacaacag

SEQ ID NO: 101575 - DNA, 25 bp, Saccharomyces pastorianus
acaggatacaactgccgcttctaat

SEQ ID NO: 101576 - DNA, 25 bp, Saccharomyces pastorianus
gatcgatgaatattcctcagcgttt

SEQ ID NO: 101577 - DNA, 25 bp, Saccharomyces pastorianus
cagggaatcctgcacacgaaaatgt

SEQ ID NO: 101578 - DNA, 25 bp, Saccharomyces pastorianus
tcatccgtacgttttgcatttaggc

SEQ ID NO: 101579 - DNA, 25 bp, Saccharomyces pastorianus
gaaacatcttgttggcttctgtcaa

SEQ ID NO: 101580 - DNA, 25 bp, Saccharomyces pastorianus
aactcgtttctttgtctgaccgctg

SEQ ID NO: 101581 - DNA, 25 bp, Saccharomyces pastorianus
tgcatttaggcggttctggcaaagt

SEQ ID NO: 101582 - DNA, 25 bp, Saccharomyces pastorianus
gtagctatattctcagcggcgccga

SEQ ID NO: 101583 - DNA, 25 bp, Saccharomyces pastorianus
tgagacaggccccaagacggtgcat

SEQ ID NO: 101584 - DNA, 25 bp, Saccharomyces pastorianus
acaggatacggaatggcgactctat

SEQ ID NO: 101585 - DNA, 25 bp, Saccharomyces pastorianus
ctgctatctactgcgctgatttgga

SEQ ID NO: 101586 - DNA, 25 bp, Saccharomyces pastorianus
tggtcctttgtcatcaagccaagaa

SEQ ID NO: 101587 - DNA, 25 bp, Saccharomyces pastorianus
gctcaaaatttgtcgctgctatcta

SEQ ID NO: 101588 - DNA, 25 bp, Saccharomyces pastorianus
ctgaccgctggctatcaattgggta

SEQ ID NO: 101589 - DNA, 25 bp, Saccharomyces pastorianus
gaagcacagcttttggaggatacaa

SEQ ID NO: 101590 - DNA, 25 bp, Saccharomyces pastorianus
gatcagatcaaaatggcacgtgcca

SEQ ID NO: 101591 - DNA, 25 bp, Saccharomyces pastorianus
gaaacttcagggtattctcgagcag

SEQ ID NO: 101592 - DNA, 25 bp, Saccharomyces pastorianus
gtattctcgagcagtactgtgcgcc

SEQ ID NO: 101593 - DNA, 25 bp, Saccharomyces pastorianus
actgtgcgcctgatactgatatacg

SEQ ID NO: 101594 - DNA, 25 bp, Saccharomyces pastorianus
gtggtgtagacgctcaaatcaagaa

SEQ ID NO: 101595 - DNA, 25 bp, Saccharomyces pastorianus
ggaagtgtctgatccatcagtgaca

SEQ ID NO: 101596 - DNA, 25 bp, Saccharomyces pastorianus
aagcggctttctgttgatttggcaa

SEQ ID NO: 101597 - DNA, 25 bp, Saccharomyces pastorianus
aatgggttccatctgagaaacttca

SEQ ID NO: 101598 - DNA, 25 bp, Saccharomyces pastorianus
ggaaagactctccactttgacaaag

SEQ ID NO: 101599 - DNA, 25 bp, Saccharomyces pastorianus
tgataaatagttccatccgcctgcg

SEQ ID NO: 101600 - DNA, 25 bp, Saccharomyces pastorianus
ggatgaagacgctccacaaatcaat

SEQ ID NO: 101601 - DNA, 25 bp, Saccharomyces pastorianus
gatatcgatgcatccttagattaca

SEQ ID NO: 101602 - DNA, 25 bp, Saccharomyces pastorianus
agttcattgttctggacgtggattc

SEQ ID NO: 101603 - DNA, 25 bp, Saccharomyces pastorianus
ttatgtgcctgatgtagttcttgtg

SEQ ID NO: 101604 - DNA, 25 bp, Saccharomyces pastorianus
gggttatttcattgcaaactcgaat

SEQ ID NO: 101605 - DNA, 25 bp, Saccharomyces pastorianus
gttgctagaacatctgacttgggtg

SEQ ID NO: 101606 - DNA, 25 bp, Saccharomyces pastorianus
gatgtgacccagttggtggagttca

SEQ ID NO: 101607 - DNA, 25 bp, Saccharomyces pastorianus
gtgtcttagctgacattactgttgc

SEQ ID NO: 101608 - DNA, 25 bp, Saccharomyces pastorianus
gtctcatctcggtggtatttgtcat

SEQ ID NO: 101609 - DNA, 25 bp, Saccharomyces pastorianus
aaccgcgaagcaaatgtacctcctg

SEQ ID NO: 101610 - DNA, 25 bp, Saccharomyces pastorianus
aagtctactacgtcaggtctcatct

SEQ ID NO: 101611 - DNA, 25 bp, Saccharomyces pastorianus
gagtacagtcactttgagaaccttc

SEQ ID NO: 101612 - DNA, 25 bp, Saccharomyces pastorianus
agaccctgcctggactgattttaag

SEQ ID NO: 101613 - DNA, 25 bp, Saccharomyces pastorianus
tgaccaagatcaaccaagccgacaa

SEQ ID NO: 101614 - DNA, 25 bp, Saccharomyces pastorianus
atgctattttcgtggtcatacaaga

SEQ ID NO: 101615 - DNA, 25 bp, Saccharomyces pastorianus
acgtgtgtcgtctttgaatggtggc

SEQ ID NO: 101616 - DNA, 25 bp, Saccharomyces pastorianus
agcaatttttggtctagcctacctc

SEQ ID NO: 101617 - DNA, 25 bp, Saccharomyces pastorianus
gctggcgtacttcgtatagtcctga

SEQ ID NO: 101618 - DNA, 25 bp, Saccharomyces pastorianus
ccttcaatcagctggtaacgtctac

SEQ ID NO: 101619 - DNA, 25 bp, Saccharomyces pastorianus
gtctagcctacctctatgagtactt

SEQ ID NO: 101620 - DNA, 25 bp, Saccharomyces pastorianus
gtttgcaagtgggattctcattcat

SEQ ID NO: 101621 - DNA, 25 bp, Saccharomyces pastorianus
atgcgggccacgaccacagtgatat

SEQ ID NO: 101622 - DNA, 25 bp, Saccharomyces pastorianus
gtacgttactagtctttgacacaag

SEQ ID NO: 101623 - DNA, 25 bp, Saccharomyces pastorianus
gttatcgtttattggctacagcctc

SEQ ID NO: 101624 - DNA, 25 bp, Saccharomyces pastorianus
gttactagtctttgacacaagttta

SEQ ID NO: 101625 - DNA, 25 bp, Saccharomyces pastorianus
taaactacgttaacattacatgtat

SEQ ID NO: 101626 - DNA, 25 bp, Saccharomyces pastorianus
gtttattggctacagcctcagtaat

SEQ ID NO: 101627 - DNA, 25 bp, Saccharomyces pastorianus
tgacacaagtttatatatccccccc

SEQ ID NO: 101628 - DNA, 25 bp, Saccharomyces pastorianus
tatatccccccctttatgttatcgt

SEQ ID NO: 101629 - DNA, 25 bp, Saccharomyces pastorianus
gcactcgtacgttactagtctttga

SEQ ID NO: 101630 - DNA, 25 bp, Saccharomyces pastorianus
gtataatatttagcactcgtacgtt

SEQ ID NO: 101631 - DNA, 25 bp, Saccharomyces pastorianus
ctcgtacgttactagtctttgacac

SEQ ID NO: 101632 - DNA, 25 bp, Saccharomyces pastorianus
atttagcactcgtacgttactagtc

SEQ ID NO: 101633 - DNA, 25 bp, Saccharomyces pastorianus
gaatacccttcttcttcaattcttc

SEQ ID NO: 101634 - DNA, 25 bp, Saccharomyces pastorianus
cttcttcaattcttcgtaacgtcta

SEQ ID NO: 101635 - DNA, 25 bp, Saccharomyces pastorianus
aaccgtggtcagcagcgttcaagat

SEQ ID NO: 101636 - DNA, 25 bp, Saccharomyces pastorianus
aatggtcgaccttggattgagttct

SEQ ID NO: 101637 - DNA, 25 bp, Saccharomyces pastorianus
tgggaagtgagagttaccaccatcg

SEQ ID NO: 101638 - DNA, 25 bp, Saccharomyces pastorianus
ttgcccttagcttcattggccaaga

SEQ ID NO: 101639 - DNA, 25 bp, Saccharomyces pastorianus
gatgataatatcacccttttccaaa

SEQ ID NO: 101640 - DNA, 25 bp, Saccharomyces pastorianus
gattgagttctgttgtaagcacaaa

SEQ ID NO: 101641 - DNA, 25 bp, Saccharomyces pastorianus
aagcttcttcagaaccacctggcat

SEQ ID NO: 101642 - DNA, 25 bp, Saccharomyces pastorianus
caccgatgatagatttgcccttagc

SEQ ID NO: 101643 - DNA, 25 bp, Saccharomyces pastorianus
atcaaattttgacccatgacggcca

SEQ ID NO: 101644 - DNA, 25 bp, Saccharomyces pastorianus
atgtgcttctgacaacttgccagta

SEQ ID NO: 101645 - DNA, 25 bp, Saccharomyces pastorianus
cgctttgtctttctacgatgggtac

SEQ ID NO: 101646 - DNA, 25 bp, Saccharomyces pastorianus
caacaagttcttcgctgatgccgtc

SEQ ID NO: 101647 - DNA, 25 bp, Saccharomyces pastorianus
gatctgttttcttgggtcaaatcac

SEQ ID NO: 101648 - DNA, 25 bp, Saccharomyces pastorianus
aaagtcaattgcgttggctaccacc

SEQ ID NO: 101649 - DNA, 25 bp, Saccharomyces pastorianus
tgatgccgtcaccaaggctcaatct

SEQ ID NO: 101650 - DNA, 25 bp, Saccharomyces pastorianus
actactttggtgctcacactttcag

SEQ ID NO: 101651 - DNA, 25 bp, Saccharomyces pastorianus
attagagcctccaaggtcttaccag

SEQ ID NO: 101652 - DNA, 25 bp, Saccharomyces pastorianus
gttgatccgtgaagctgctgctact

SEQ ID NO: 101653 - DNA, 25 bp, Saccharomyces pastorianus
tgctgctacttatggctggaaacta

SEQ ID NO: 101654 - DNA, 25 bp, Saccharomyces pastorianus
cagagtgtcgccagaatgtgcttct

SEQ ID NO: 101655 - DNA, 25 bp, Saccharomyces pastorianus
ttttctggaggcacaaagctttgga

SEQ ID NO: 101656 - DNA, 25 bp, Saccharomyces pastorianus
aggtttttgtctgagatcgcctctc

SEQ ID NO: 101657 - DNA, 25 bp, Saccharomyces pastorianus
gtggtattaacaggcactctcgata

SEQ ID NO: 101658 - DNA, 25 bp, Saccharomyces pastorianus
gactttactgcagtttatggccact

SEQ ID NO: 101659 - DNA, 25 bp, Saccharomyces pastorianus
aaagtccggcaggtcattggaatac

SEQ ID NO: 101660 - DNA, 25 bp, Saccharomyces pastorianus
ctgcacgatggttgcgacttatcat

SEQ ID NO: 101661 - DNA, 25 bp, Saccharomyces pastorianus
aagcacatggtcattatcgattcat

SEQ ID NO: 101662 - DNA, 25 bp, Saccharomyces pastorianus
gtagtaacggactggagacacccga

SEQ ID NO: 101663 - DNA, 25 bp, Saccharomyces pastorianus
gaagctggccaaagatcaagtcgca

SEQ ID NO: 101664 - DNA, 25 bp, Saccharomyces pastorianus
tcaagtcgcattgccttttctggag

SEQ ID NO: 101665 - DNA, 25 bp, Saccharomyces pastorianus
gagacacccgaaatgttgcaaggat

SEQ ID NO: 101666 - DNA, 25 bp, Saccharomyces pastorianus
aatccagagcctcagtacgctggta

SEQ ID NO: 101667 - DNA, 25 bp, Saccharomyces pastorianus
aagcccgacacgttgttattcatga

SEQ ID NO: 101668 - DNA, 25 bp, Saccharomyces pastorianus
ggagaacttattcccctgtgcctaa

SEQ ID NO: 101669 - DNA, 25 bp, Saccharomyces pastorianus
aatggagactagtgctgaccgggat

SEQ ID NO: 101670 - DNA, 25 bp, Saccharomyces pastorianus
aaatgcagtggaggccgtgtaccct

SEQ ID NO: 101671 - DNA, 25 bp, Saccharomyces pastorianus
ggaactacaaaccttgcttacacag

SEQ ID NO: 101672 - DNA, 25 bp, Saccharomyces pastorianus
gctggagctgctacgaaagcggctt

SEQ ID NO: 101673 - DNA, 25 bp, Saccharomyces pastorianus
gggctgcgaagcctgctaaaatgca

SEQ ID NO: 101674 - DNA, 25 bp, Saccharomyces pastorianus
gggagctctaactccgcaggaacta

SEQ ID NO: 101675 - DNA, 25 bp, Saccharomyces pastorianus
acgctggtacccgtcacaatgtagg

SEQ ID NO: 101676 - DNA, 25 bp, Saccharomyces pastorianus
gagaacctgggtcccgctctagaga

SEQ ID NO: 101677 - DNA, 25 bp, Saccharomyces pastorianus
cgagcaatccactttccaattttgt

SEQ ID NO: 101678 - DNA, 25 bp, Saccharomyces pastorianus
gcaaccttggctttggtattcaaca

SEQ ID NO: 101679 - DNA, 25 bp, Saccharomyces pastorianus
ggactgtataaaccacctcgtctta

SEQ ID NO: 101680 - DNA, 25 bp, Saccharomyces pastorianus
aacaaccgtgaagtgctacatggca

SEQ ID NO: 101681 - DNA, 25 bp, Saccharomyces pastorianus
taaattacctcctaacgtgaagcca

SEQ ID NO: 101682 - DNA, 25 bp, Saccharomyces pastorianus
ttatttggccagtatccacgagcaa

SEQ ID NO: 101683 - DNA, 25 bp, Saccharomyces pastorianus
actttgcgtggctgtgtcgagattt

SEQ ID NO: 101684 - DNA, 25 bp, Saccharomyces pastorianus
gggtactacctgctatttaattttg

SEQ ID NO: 101685 - DNA, 25 bp, Saccharomyces pastorianus
ttatctatcatcttgtccgttcttc

SEQ ID NO: 101686 - DNA, 25 bp, Saccharomyces pastorianus
gtcacaatacgctcctcagttgaag

SEQ ID NO: 101687 - DNA, 25 bp, Saccharomyces pastorianus
aattttgtgccattccccaagttat

SEQ ID NO: 101688 - DNA, 25 bp, Saccharomyces pastorianus
cgatttgggtcgttacagattgacg

SEQ ID NO: 101689 - DNA, 25 bp, Saccharomyces pastorianus
cagattgacggagagagggccacat

SEQ ID NO: 101690 - DNA, 25 bp, Saccharomyces pastorianus
cgtcgctggcgaggagagattctcc

SEQ ID NO: 101691 - DNA, 25 bp, Saccharomyces pastorianus
gtaccgatgggtataatgcatttca

SEQ ID NO: 101692 - DNA, 25 bp, Saccharomyces pastorianus
gagttgcctaaggactttgcgtcgc

SEQ ID NO: 101693 - DNA, 25 bp, Saccharomyces pastorianus
gaaaagcagaccacggtgataacac

SEQ ID NO: 101694 - DNA, 25 bp, Saccharomyces pastorianus
aacaccgcttgggatgatgatgctg

SEQ ID NO: 101695 - DNA, 25 bp, Saccharomyces pastorianus
gacggcgaaactttaatacgatttg

SEQ ID NO: 101696 - DNA, 25 bp, Saccharomyces pastorianus
agggccacattgtttgtcggcaaga

SEQ ID NO: 101697 - DNA, 25 bp, Saccharomyces pastorianus
ggttcagtgaacaggacggcgaaac

SEQ ID NO: 101698 - DNA, 25 bp, Saccharomyces pastorianus
gtgacaaagctagacgtaccgatgg

SEQ ID NO: 101699 - DNA, 25 bp, Saccharomyces pastorianus
tgcgctactatgcataggctcgcta

SEQ ID NO: 101700 - DNA, 25 bp, Saccharomyces pastorianus
gtaagccaatcatctttatctgtcc

SEQ ID NO: 101701 - DNA, 25 bp, Saccharomyces pastorianus
ggaagagacccactataatgctaca

SEQ ID NO: 101702 - DNA, 25 bp, Saccharomyces pastorianus
gcaagttggcaaaactccgtgcaat

SEQ ID NO: 101703 - DNA, 25 bp, Saccharomyces pastorianus
ataccttgtggtgactgcgctacta

SEQ ID NO: 101704 - DNA, 25 bp, Saccharomyces pastorianus
taggctcgctaatcttgttcaaatg

SEQ ID NO: 101705 - DNA, 25 bp, Saccharomyces pastorianus
tcatccaacggttttcttccggtga

SEQ ID NO: 101706 - DNA, 25 bp, Saccharomyces pastorianus
ttatctgtcctcactgtaaccacaa

SEQ ID NO: 101707 - DNA, 25 bp, Saccharomyces pastorianus
aatcatcagcgtactggcaggcggt

SEQ ID NO: 101708 - DNA, 25 bp, Saccharomyces pastorianus
attggactcaacaagttcgctctct

SEQ ID NO: 101709 - DNA, 25 bp, Saccharomyces pastorianus
acgacgatgccatggtacttctaga

SEQ ID NO: 101710 - DNA, 25 bp, Saccharomyces pastorianus
aaagtactgcagagcctgactctct

SEQ ID NO: 101711 - DNA, 25 bp, Saccharomyces pastorianus
aaaccagccttcatcattgttgcat

SEQ ID NO: 101712 - DNA, 25 bp, Saccharomyces pastorianus
gggaacatgagtttacctccaaaga

SEQ ID NO: 101713 - DNA, 25 bp, Saccharomyces pastorianus
gaacaacctcttcccttaaatcaag

SEQ ID NO: 101714 - DNA, 25 bp, Saccharomyces pastorianus
agggctcgatagaccttaagtcgtt

SEQ ID NO: 101715 - DNA, 25 bp, Saccharomyces pastorianus
gaggaacacagtaacagccatttga

SEQ ID NO: 101716 - DNA, 25 bp, Saccharomyces pastorianus
cggtgatcgcgagaccacgctagaa

SEQ ID NO: 101717 - DNA, 25 bp, Saccharomyces pastorianus
tctctctcacgggataccagaacaa

SEQ ID NO: 101718 - DNA, 25 bp, Saccharomyces pastorianus
tacatcattccccatatcattcaag

SEQ ID NO: 101719 - DNA, 25 bp, Saccharomyces pastorianus
gattgcagctccagttcagaagttg

SEQ ID NO: 101720 - DNA, 25 bp, Saccharomyces pastorianus
aacatttgttaggttgtcacctgga

SEQ ID NO: 101721 - DNA, 25 bp, Saccharomyces pastorianus
gagaggatcttgcacaactatctat

SEQ ID NO: 101722 - DNA, 25 bp, Saccharomyces pastorianus
gaaattgctaatattctctcatcgc

SEQ ID NO: 101723 - DNA, 25 bp, Saccharomyces pastorianus
gatgtctggaagttggacagaacca

SEQ ID NO: 101724 - DNA, 25 bp, Saccharomyces pastorianus
acaactatctatgcaagagggtgaa

SEQ ID NO: 101725 - DNA, 25 bp, Saccharomyces pastorianus
ctgttgaaaagcttgaaccagattc

SEQ ID NO: 101726 - DNA, 25 bp, Saccharomyces pastorianus
gaaccagattcaattgtttatgcaa

SEQ ID NO: 101727 - DNA, 25 bp, Saccharomyces pastorianus
tctctcatcgcatttagaagctaat

SEQ ID NO: 101728 - DNA, 25 bp, Saccharomyces pastorianus
tgaagaaaatttacttccgttgtgg

SEQ ID NO: 101729 - DNA, 25 bp, Saccharomyces pastorianus
ttgcctgttctactcggtatacaag

SEQ ID NO: 101730 - DNA, 25 bp, Saccharomyces pastorianus
agaggagatcttgcctgttctactc

SEQ ID NO: 101731 - DNA, 25 bp, Saccharomyces pastorianus
caggatcaagcatcgcctgttgaaa

SEQ ID NO: 101732 - DNA, 25 bp, Saccharomyces pastorianus
tggcgaaaaatctccttctccacaa

SEQ ID NO: 101733 - DNA, 25 bp, Saccharomyces pastorianus
atgccttgggtctttatctagctga

SEQ ID NO: 101734 - DNA, 25 bp, Saccharomyces pastorianus
ggatatggtcaaaggcacgtcacgt

SEQ ID NO: 101735 - DNA, 25 bp, Saccharomyces pastorianus
tcatcgaattattagccaacggcgc

SEQ ID NO: 101736 - DNA, 25 bp, Saccharomyces pastorianus
atgccttttcacgtaagggatccgt

SEQ ID NO: 101737 - DNA, 25 bp, Saccharomyces pastorianus
aatgctagccaagataactcccgta

SEQ ID NO: 101738 - DNA, 25 bp, Saccharomyces pastorianus
ggcacgtcacgtttttgaggttcaa

SEQ ID NO: 101739 - DNA, 25 bp, Saccharomyces pastorianus
aacatcccgatgtggccaataataa

SEQ ID NO: 101740 - DNA, 25 bp, Saccharomyces pastorianus
ccaacggcgctttacaattttcata

SEQ ID NO: 101741 - DNA, 25 bp, Saccharomyces pastorianus
gaaaaccttgtttcagacactctaa

SEQ ID NO: 101742 - DNA, 25 bp, Saccharomyces pastorianus
agcatcttaaggagggcctggtcaa

SEQ ID NO: 101743 - DNA, 25 bp, Saccharomyces pastorianus
gtctcatcgatcactttcaaagcat

SEQ ID NO: 101744 - DNA, 25 bp, Saccharomyces pastorianus
gtgcggctttgaacgatcctgctaa

SEQ ID NO: 101745 - DNA, 25 bp, Saccharomyces pastorianus
aagagcgtcctaaagaacccagatt

SEQ ID NO: 101746 - DNA, 25 bp, Saccharomyces pastorianus
tcaggcgttcatcgacactgcggca

SEQ ID NO: 101747 - DNA, 25 bp, Saccharomyces pastorianus
aagcaggttccttcaagttattgat

SEQ ID NO: 101748 - DNA, 25 bp, Saccharomyces pastorianus
aagggtgtacgttgtgtctcatcga

SEQ ID NO: 101749 - DNA, 25 bp, Saccharomyces pastorianus
catcaggataatttgcgtgcggctt

SEQ ID NO: 101750 - DNA, 25 bp, Saccharomyces pastorianus
aacatctggtctctgaagtgctgga

SEQ ID NO: 101751 - DNA, 25 bp, Saccharomyces pastorianus
tggaaagctcttatttgcccactac

SEQ ID NO: 101752 - DNA, 25 bp, Saccharomyces pastorianus
gaacccagattctcagtctcaagac

SEQ ID NO: 101753 - DNA, 25 bp, Saccharomyces pastorianus
tgtggccgctgaagacaaacatctg

SEQ ID NO: 101754 - DNA, 25 bp, Saccharomyces pastorianus
agcagatttcgtcaaccaatgcaga

SEQ ID NO: 101755 - DNA, 25 bp, Saccharomyces pastorianus
tgaacattgcaccacttttgatggg

SEQ ID NO: 101756 - DNA, 25 bp, Saccharomyces pastorianus
ttgggagactctaacgtggtacgtg

SEQ ID NO: 101757 - DNA, 25 bp, Saccharomyces pastorianus
gggttagcgacaagctccaacttca

SEQ ID NO: 101758 - DNA, 25 bp, Saccharomyces pastorianus
gaacgtcgaggccaccagaaagcaa

SEQ ID NO: 101759 - DNA, 25 bp, Saccharomyces pastorianus
ggctcgatgtattggttctgttgac

SEQ ID NO: 101760 - DNA, 25 bp, Saccharomyces pastorianus
ctatcgagagatgccaagctgttct

SEQ ID NO: 101761 - DNA, 25 bp, Saccharomyces pastorianus
gggccatcttaatagacacttcaaa

SEQ ID NO: 101762 - DNA, 25 bp, Saccharomyces pastorianus
aatgaagtgtctgcgcaaggtttag

SEQ ID NO: 101763 - DNA, 25 bp, Saccharomyces pastorianus
aagctgttcttagtggtgcggttaa

SEQ ID NO: 101764 - DNA, 25 bp, Saccharomyces pastorianus
cagaaagcaagtcgtcccctattta

SEQ ID NO: 101765 - DNA, 25 bp, Saccharomyces pastorianus
ttggtcgttgcctccagggtggaaa

SEQ ID NO: 101766 - DNA, 25 bp, Saccharomyces pastorianus
ggccctgtcattgcctcattaggaa

SEQ ID NO: 101767 - DNA, 25 bp, Saccharomyces pastorianus
gaaccttcgatgagtcgtttcattt

SEQ ID NO: 101768 - DNA, 25 bp, Saccharomyces pastorianus
ttggcggttttcagaagtgtccctt

SEQ ID NO: 101769 - DNA, 25 bp, Saccharomyces pastorianus
ggctctgtcaggtacgatctttaca

SEQ ID NO: 101770 - DNA, 25 bp, Saccharomyces pastorianus
gagaacttgaccaccaatgactgct

SEQ ID NO: 101771 - DNA, 25 bp, Saccharomyces pastorianus
taggaataccatcatcgtctcatca

SEQ ID NO: 101772 - DNA, 25 bp, Saccharomyces pastorianus
aatgattggcgcttcatcacagttc

SEQ ID NO: 101773 - DNA, 25 bp, Saccharomyces pastorianus
gatatccccaatgtagtgcaatgta

SEQ ID NO: 101774 - DNA, 25 bp, Saccharomyces pastorianus
ggttcatgttatcttctattccttt

SEQ ID NO: 101775 - DNA, 25 bp, Saccharomyces pastorianus
gtgtcccttcatcaataatccaaat

SEQ ID NO: 101776 - DNA, 25 bp, Saccharomyces pastorianus
ggagacttaatcactgcatcgacat

SEQ ID NO: 101777 - DNA, 25 bp, Saccharomyces pastorianus
tattgcctcgccatggaagtgtaca

SEQ ID NO: 101778 - DNA, 25 bp, Saccharomyces pastorianus
tactattcgaccttcctggatatca

SEQ ID NO: 101779 - DNA, 25 bp, Saccharomyces pastorianus
ttattcgagattgactcccggttcg

SEQ ID NO: 101780 - DNA, 25 bp, Saccharomyces pastorianus
atgaccattcccaactcatgttaga

SEQ ID NO: 101781 - DNA, 25 bp, Saccharomyces pastorianus
tgcagtggcaagcttgtattctccc

SEQ ID NO: 101782 - DNA, 25 bp, Saccharomyces pastorianus
gtattctcccacttatctttacaga

SEQ ID NO: 101783 - DNA, 25 bp, Saccharomyces pastorianus
aggtggtccaatccgcaatttagca

SEQ ID NO: 101784 - DNA, 25 bp, Saccharomyces pastorianus
agacgtctcccgcaaggatattttc

SEQ ID NO: 101785 - DNA, 25 bp, Saccharomyces pastorianus
gtagtagccatcaacggacgcatat

SEQ ID NO: 101786 - DNA, 25 bp, Saccharomyces pastorianus
agaaacatagtcctgtgctcacttc

SEQ ID NO: 101787 - DNA, 25 bp, Saccharomyces pastorianus
cagtcgttagccatgttaccacaag

SEQ ID NO: 101788 - DNA, 25 bp, Saccharomyces pastorianus
aggtgcctctatatcttctgcacag

SEQ ID NO: 101789 - DNA, 25 bp, Saccharomyces pastorianus
ggaccgtattcctttatgcgaacag

SEQ ID NO: 101790 - DNA, 25 bp, Saccharomyces pastorianus
gtaccacattcctcaatgggttcca

SEQ ID NO: 101791 - DNA, 25 bp, Saccharomyces pastorianus
gtcagacgtagccataccgaatttg

SEQ ID NO: 101792 - DNA, 25 bp, Saccharomyces pastorianus
tagatggtgccacagcgacatccat

SEQ ID NO: 101793 - DNA, 25 bp, Saccharomyces pastorianus
caagataatccgtcaactactaccc

SEQ ID NO: 101794 - DNA, 25 bp, Saccharomyces pastorianus
aacgccattgctaatgctaggtcag

SEQ ID NO: 101795 - DNA, 25 bp, Saccharomyces pastorianus
ttggccaaaccattcacgagggatg

SEQ ID NO: 101796 - DNA, 25 bp, Saccharomyces pastorianus
ttctgcacagcatgttcaacaaggt

SEQ ID NO: 101797 - DNA, 25 bp, Saccharomyces pastorianus
aattttccatgctcagcagcagcag

SEQ ID NO: 101798 - DNA, 25 bp, Saccharomyces pastorianus
aaagaataccctacactactcaaag

SEQ ID NO: 101799 - DNA, 25 bp, Saccharomyces pastorianus
ttcaactggaaagcccgtcaattgg

SEQ ID NO: 101800 - DNA, 25 bp, Saccharomyces pastorianus
gcacgttacctcatatggctatcga

SEQ ID NO: 101801 - DNA, 25 bp, Saccharomyces pastorianus
ttggattatccaaaggccccaataa

SEQ ID NO: 101802 - DNA, 25 bp, Saccharomyces pastorianus
gacaccgtgatagcgaatttcaact

SEQ ID NO: 101803 - DNA, 25 bp, Saccharomyces pastorianus
gaaatcgaacaatgcattcacacct

SEQ ID NO: 101804 - DNA, 25 bp, Saccharomyces pastorianus
gacagactccggtaagatttctttg

SEQ ID NO: 101805 - DNA, 25 bp, Saccharomyces pastorianus
gcattcacaccttatccgattttaa

SEQ ID NO: 101806 - DNA, 25 bp, Saccharomyces pastorianus
agattcctcttacatggacaccgtg

SEQ ID NO: 101807 - DNA, 25 bp, Saccharomyces pastorianus
acctcatatggctatcgaatctccc

SEQ ID NO: 101808 - DNA, 25 bp, Saccharomyces pastorianus
aatgaacctaaacctgtgactggag

SEQ ID NO: 101809 - DNA, 25 bp, Saccharomyces pastorianus
aagcatcaggcctgcctttatcaaa

SEQ ID NO: 101810 - DNA, 25 bp, Saccharomyces pastorianus
gggttcctcctgaaatcatgggtgt

SEQ ID NO: 101811 - DNA, 25 bp, Saccharomyces pastorianus
catcccttgggttgtactagcgcaa

SEQ ID NO: 101812 - DNA, 25 bp, Saccharomyces pastorianus
taaatgaagcattcgcggcccaagc

SEQ ID NO: 101813 - DNA, 25 bp, Saccharomyces pastorianus
taaatctgcctgtgctaggtcgcta

SEQ ID NO: 101814 - DNA, 25 bp, Saccharomyces pastorianus
aagtcctggaagctactggcttgca

SEQ ID NO: 101815 - DNA, 25 bp, Saccharomyces pastorianus
caggtccgtagccaaccagttaaat

SEQ ID NO: 101816 - DNA, 25 bp, Saccharomyces pastorianus
gaggaaccacaactgcgggcaatgc

SEQ ID NO: 101817 - DNA, 25 bp, Saccharomyces pastorianus
aacgtcactgcggagtcgctttcaa

SEQ ID NO: 101818 - DNA, 25 bp, Saccharomyces pastorianus
ggcccaagcattatactgcatccat

SEQ ID NO: 101819 - DNA, 25 bp, Saccharomyces pastorianus
gcaggtgtcttgttagcccgcaggt

SEQ ID NO: 101820 - DNA, 25 bp, Saccharomyces pastorianus
gaagatttagttactcagtttcaag

SEQ ID NO: 101821 - DNA, 25 bp, Saccharomyces pastorianus
tattacggtgaagatcccaacgata

SEQ ID NO: 101822 - DNA, 25 bp, Saccharomyces pastorianus
cacgttgaatcagagtgtcatgaat

SEQ ID NO: 101823 - DNA, 25 bp, Saccharomyces pastorianus
acagggatgctgttgatctactcat

SEQ ID NO: 101824 - DNA, 25 bp, Saccharomyces pastorianus
gatctactcatatctaaattacgcg

SEQ ID NO: 101825 - DNA, 25 bp, Saccharomyces pastorianus
ttacgcgaagtaaagaaggacccag

SEQ ID NO: 101826 - DNA, 25 bp, Saccharomyces pastorianus
agccatgtttaagaaatgtgccaag

SEQ ID NO: 101827 - DNA, 25 bp, Saccharomyces pastorianus
gtcaagtttaagattaatcgggcca

SEQ ID NO: 101828 - DNA, 25 bp, Saccharomyces pastorianus
gaaggacccagaacctctaagaaga

SEQ ID NO: 101829 - DNA, 25 bp, Saccharomyces pastorianus
gatgaagatcacgttttactagaga

SEQ ID NO: 101830 - DNA, 25 bp, Saccharomyces pastorianus
ggagaacttagaccccagagatcaa

SEQ ID NO: 101831 - DNA, 25 bp, Saccharomyces pastorianus
ttcatgaatggagcgtcactgccgc

SEQ ID NO: 101832 - DNA, 25 bp, Saccharomyces pastorianus
gttttctgtggccattgggtccgca

SEQ ID NO: 101833 - DNA, 25 bp, Saccharomyces pastorianus
ccattatctccaacacgctgtatta

SEQ ID NO: 101834 - DNA, 25 bp, Saccharomyces pastorianus
gaaagtgacaccttctgtagctaag

SEQ ID NO: 101835 - DNA, 25 bp, Saccharomyces pastorianus
aattgcctgacccaaccacggagag

SEQ ID NO: 101836 - DNA, 25 bp, Saccharomyces pastorianus
taagacggtctccagcaactaaaaa

SEQ ID NO: 101837 - DNA, 25 bp, Saccharomyces pastorianus
taaggctgtgctagtgcgtggttcc

SEQ ID NO: 101838 - DNA, 25 bp, Saccharomyces pastorianus
ggtccgcactatctttgatcttcaa

SEQ ID NO: 101839 - DNA, 25 bp, Saccharomyces pastorianus
cattctctaccagcgctagattcaa

SEQ ID NO: 101840 - DNA, 25 bp, Saccharomyces pastorianus
gtcactgccgctggccaaaagattg

SEQ ID NO: 101841 - DNA, 25 bp, Saccharomyces pastorianus
tcatcccttgggtttacggtgaact

SEQ ID NO: 101842 - DNA, 25 bp, Saccharomyces pastorianus
gacaagaaggcgctttctttctctc

SEQ ID NO: 101843 - DNA, 25 bp, Saccharomyces pastorianus
cttttacttttatgtcgtggactgg

SEQ ID NO: 101844 - DNA, 25 bp, Saccharomyces pastorianus
gcctcatcttcagcgacactattat

SEQ ID NO: 101845 - DNA, 25 bp, Saccharomyces pastorianus
aatggcctgttcttgtctttcaaaa

SEQ ID NO: 101846 - DNA, 25 bp, Saccharomyces pastorianus
tcggcaaccctttagttactagtct

SEQ ID NO: 101847 - DNA, 25 bp, Saccharomyces pastorianus
ctttctttctctccacaatgatcaa

SEQ ID NO: 101848 - DNA, 25 bp, Saccharomyces pastorianus
ggttgggtcaggcaattctctgtca

SEQ ID NO: 101849 - DNA, 25 bp, Saccharomyces pastorianus
agaaggtgtcactttcggcaaccct

SEQ ID NO: 101850 - DNA, 25 bp, Saccharomyces pastorianus
agcaaggaaccacgcactagcacag

SEQ ID NO: 101851 - DNA, 25 bp, Saccharomyces pastorianus
ttctctgtcaattctcaatggcctg

SEQ ID NO: 101852 - DNA, 25 bp, Saccharomyces pastorianus
ttcaaaacgatcttggcctcatctt

SEQ ID NO: 101853 - DNA, 25 bp, Saccharomyces pastorianus
caggcacattaatcagtggccatta

SEQ ID NO: 101854 - DNA, 25 bp, Saccharomyces pastorianus
aacaccgtcgtaacatatccattga

SEQ ID NO: 101855 - DNA, 25 bp, Saccharomyces pastorianus
aagaggtccagttccagtacaccgt

SEQ ID NO: 101856 - DNA, 25 bp, Saccharomyces pastorianus
gagacggtattactgagggccataa

SEQ ID NO: 101857 - DNA, 25 bp, Saccharomyces pastorianus
tattgggcgttctaaatggtactat

SEQ ID NO: 101858 - DNA, 25 bp, Saccharomyces pastorianus
atacaggaaccaagcgtcgtcatct

SEQ ID NO: 101859 - DNA, 25 bp, Saccharomyces pastorianus
gaaaggtccagatcacccttcagga

SEQ ID NO: 101860 - DNA, 25 bp, Saccharomyces pastorianus
agtggttaaccatacaggcacatta

SEQ ID NO: 101861 - DNA, 25 bp, Saccharomyces pastorianus
gtcggttttttacattacatacagg

SEQ ID NO: 101862 - DNA, 25 bp, Saccharomyces pastorianus
gtggccattacacgtcactggtaaa

SEQ ID NO: 101863 - DNA, 25 bp, Saccharomyces pastorianus
gtacaccgttcagtactggtggtaa

SEQ ID NO: 101864 - DNA, 25 bp, Saccharomyces pastorianus
aaactatgtggctttattggctcaa

SEQ ID NO: 101865 - DNA, 25 bp, Saccharomyces pastorianus
gaatattgtagaactcccttggact

SEQ ID NO: 101866 - DNA, 25 bp, Saccharomyces pastorianus
ccgttcctctatcatttgcgaattt

SEQ ID NO: 101867 - DNA, 25 bp, Saccharomyces pastorianus
aataaactgcctttgtccttagccg

SEQ ID NO: 101868 - DNA, 25 bp, Saccharomyces pastorianus
ggcctaattactattgcaggtggta

SEQ ID NO: 101869 - DNA, 25 bp, Saccharomyces pastorianus
ccacttcttgttcacttcggataat

SEQ ID NO: 101870 - DNA, 25 bp, Saccharomyces pastorianus
ggcggattccataacctgaaacctt

SEQ ID NO: 101871 - DNA, 25 bp, Saccharomyces pastorianus
tcagatatccattcacaatcggtga

SEQ ID NO: 101872 - DNA, 25 bp, Saccharomyces pastorianus
ataacgtaatctactctagcgagga

SEQ ID NO: 101873 - DNA, 25 bp, Saccharomyces pastorianus
gtgcatgccaccgtcaaagttatgg

SEQ ID NO: 101874 - DNA, 25 bp, Saccharomyces pastorianus
aagttgtcgaagttggcggattcca

SEQ ID NO: 101875 - DNA, 25 bp, Saccharomyces pastorianus
atttccacttggtgtacatcctggg

SEQ ID NO: 101876 - DNA, 25 bp, Saccharomyces pastorianus
ggatcgcccggtcgagaacagactt

SEQ ID NO: 101877 - DNA, 25 bp, Saccharomyces pastorianus
tctttccctgggtcaacattcaaaa

SEQ ID NO: 101878 - DNA, 25 bp, Saccharomyces pastorianus
ggcactgatcttccagtctttgaag

SEQ ID NO: 101879 - DNA, 25 bp, Saccharomyces pastorianus
tactggataagtctctggtgcgcga

SEQ ID NO: 101880 - DNA, 25 bp, Saccharomyces pastorianus
atcctatacgatattgccgtcaccg

SEQ ID NO: 101881 - DNA, 25 bp, Saccharomyces pastorianus
gaacagacttcaacacgattcccaa

SEQ ID NO: 101882 - DNA, 25 bp, Saccharomyces pastorianus
gcgttccgccgtcaggtaacaatat

SEQ ID NO: 101883 - DNA, 25 bp, Saccharomyces pastorianus
gtaccacgctggtccaaagtgtgta

SEQ ID NO: 101884 - DNA, 25 bp, Saccharomyces pastorianus
tctgaagaagttccccgtggtgcaa

SEQ ID NO: 101885 - DNA, 25 bp, Saccharomyces pastorianus
cgtggtgcaacatttctggttcggc

SEQ ID NO: 101886 - DNA, 25 bp, Saccharomyces pastorianus
gcagtggacgagctccgcaagtaat

SEQ ID NO: 101887 - DNA, 25 bp, Saccharomyces pastorianus
agtgcctcgttagtgatcgattcaa

SEQ ID NO: 101888 - DNA, 25 bp, Saccharomyces pastorianus
aattattcgcgatttctctcaagca

SEQ ID NO: 101889 - DNA, 25 bp, Saccharomyces pastorianus
tttctcaactgcatagctccgtgaa

SEQ ID NO: 101890 - DNA, 25 bp, Saccharomyces pastorianus
atgcccatttcattgctagttctga

SEQ ID NO: 101891 - DNA, 25 bp, Saccharomyces pastorianus
gagttactcatcaaacttccgaagg

SEQ ID NO: 101892 - DNA, 25 bp, Saccharomyces pastorianus
agatcttttctaaccttgtgtaaca

SEQ ID NO: 101893 - DNA, 25 bp, Saccharomyces pastorianus
agctccgtgaaggacctggatgcca

SEQ ID NO: 101894 - DNA, 25 bp, Saccharomyces pastorianus
aaagcagccgcaaacattctacaac

SEQ ID NO: 101895 - DNA, 25 bp, Saccharomyces pastorianus
aggttaatgaccctagtgcctcgtt

SEQ ID NO: 101896 - DNA, 25 bp, Saccharomyces pastorianus
gcagcgccagaatatccgatcacaa

SEQ ID NO: 101897 - DNA, 25 bp, Saccharomyces pastorianus
gccaacaacaacttgagcctgcatt

SEQ ID NO: 101898 - DNA, 25 bp, Saccharomyces pastorianus
gatgctatcgccaaactgaaccaaa

SEQ ID NO: 101899 - DNA, 25 bp, Saccharomyces pastorianus
attgccgccgcgtctaaaggcagtg

SEQ ID NO: 101900 - DNA, 25 bp, Saccharomyces pastorianus
aattacttggaagacgcacgtcgat

SEQ ID NO: 101901 - DNA, 25 bp, Saccharomyces pastorianus
attttgtcatcgatgctacctcatg

SEQ ID NO: 101902 - DNA, 25 bp, Saccharomyces pastorianus
aaggtcggtaatcactattcgccag

SEQ ID NO: 101903 - DNA, 25 bp, Saccharomyces pastorianus
aaatttgcgatttgtctgaccacat

SEQ ID NO: 101904 - DNA, 25 bp, Saccharomyces pastorianus
gatactgtcgtcgaagcagcaacaa

SEQ ID NO: 101905 - DNA, 25 bp, Saccharomyces pastorianus
aattgtacgctttattttgtcatcg

SEQ ID NO: 101906 - DNA, 25 bp, Saccharomyces pastorianus
ctacctcatggttaagacactttgc

SEQ ID NO: 101907 - DNA, 25 bp, Saccharomyces pastorianus
attcttcgataaaattgccgccgcg

SEQ ID NO: 101908 - DNA, 25 bp, Saccharomyces pastorianus
gaaatcgacagcactgagccgcgaa

SEQ ID NO: 101909 - DNA, 25 bp, Saccharomyces pastorianus
gaaagtgccctccagacagggctta

SEQ ID NO: 101910 - DNA, 25 bp, Saccharomyces pastorianus
gtggactctcaaccaagcctatata

SEQ ID NO: 101911 - DNA, 25 bp, Saccharomyces pastorianus
gtcttctgtatcagggagcgaacct

SEQ ID NO: 101912 - DNA, 25 bp, Saccharomyces pastorianus
gaaaaagtcattctcgcaccttcaa

SEQ ID NO: 101913 - DNA, 25 bp, Saccharomyces pastorianus
aaggtactcgtaagcgcctgtcaga

SEQ ID NO: 101914 - DNA, 25 bp, Saccharomyces pastorianus
gcctaggatttgatcccactcatgg

SEQ ID NO: 101915 - DNA, 25 bp, Saccharomyces pastorianus
atttcccaagtactcaagtcttctg

SEQ ID NO: 101916 - DNA, 25 bp, Saccharomyces pastorianus
aattctgccaaagcatttttcgacg

SEQ ID NO: 101917 - DNA, 25 bp, Saccharomyces pastorianus
gttataaacgatctcttgcattaca

SEQ ID NO: 101918 - DNA, 25 bp, Saccharomyces pastorianus
acagggcttatccaacgcctaggat

SEQ ID NO: 101919 - DNA, 25 bp, Saccharomyces pastorianus
ggaagtacatctaaacggccaattg

SEQ ID NO: 101920 - DNA, 25 bp, Saccharomyces pastorianus
gtcggctgtcactggctttataaat

SEQ ID NO: 101921 - DNA, 25 bp, Saccharomyces pastorianus
gttttcagaacccattcacagcatc

SEQ ID NO: 101922 - DNA, 25 bp, Saccharomyces pastorianus
attcttctcctctaatacatcatct

SEQ ID NO: 101923 - DNA, 25 bp, Saccharomyces pastorianus
agagcggtacatcttctgatccaga

SEQ ID NO: 101924 - DNA, 25 bp, Saccharomyces pastorianus
cgcgggaagcttaacgtttcttgat

SEQ ID NO: 101925 - DNA, 25 bp, Saccharomyces pastorianus
gtcaaagcggcgattaacttttcca

SEQ ID NO: 101926 - DNA, 25 bp, Saccharomyces pastorianus
agcgctgctggtaacaaggccattc

SEQ ID NO: 101927 - DNA, 25 bp, Saccharomyces pastorianus
gacgtttccttcaatgacagccagt

SEQ ID NO: 101928 - DNA, 25 bp, Saccharomyces pastorianus
aatatcgtggatagtagcgctgctg

SEQ ID NO: 101929 - DNA, 25 bp, Saccharomyces pastorianus
tcacagcatcccaatctaatatcaa

SEQ ID NO: 101930 - DNA, 25 bp, Saccharomyces pastorianus
ggtctaggttctgtcaatcttgata

SEQ ID NO: 101931 - DNA, 25 bp, Saccharomyces pastorianus
gagtagaaacatccccacagtcaaa

SEQ ID NO: 101932 - DNA, 25 bp, Saccharomyces pastorianus
ctggtacagccacatcgagtagaaa

SEQ ID NO: 101933 - DNA, 25 bp, Saccharomyces pastorianus
aaggcgcgatttaggttatacctca

SEQ ID NO: 101934 - DNA, 25 bp, Saccharomyces pastorianus
tggagggcttgaacaactgcaggaa

SEQ ID NO: 101935 - DNA, 25 bp, Saccharomyces pastorianus
gctctaaccgcttttgctgacgata

SEQ ID NO: 101936 - DNA, 25 bp, Saccharomyces pastorianus
gcatcgttctcgacatgaaggtcta

SEQ ID NO: 101937 - DNA, 25 bp, Saccharomyces pastorianus
ttaggttatacctcacccattgtcg

SEQ ID NO: 101938 - DNA, 25 bp, Saccharomyces pastorianus
gcgatggccaagaagcattcgacaa

SEQ ID NO: 101939 - DNA, 25 bp, Saccharomyces pastorianus
cttctatatgtcttacaggtgctga

SEQ ID NO: 101940 - DNA, 25 bp, Saccharomyces pastorianus
attccttgtcttctaagcatcgttc

SEQ ID NO: 101941 - DNA, 25 bp, Saccharomyces pastorianus
tgcatctccttcttcaactgagcag

SEQ ID NO: 101942 - DNA, 25 bp, Saccharomyces pastorianus
gaagttcttcacaagctggttcact

SEQ ID NO: 101943 - DNA, 25 bp, Saccharomyces pastorianus
agtctcggtcctattgtcgtaacaa

SEQ ID NO: 101944 - DNA, 25 bp, Saccharomyces pastorianus
gctatacatacaaagtctcggtcct

SEQ ID NO: 101945 - DNA, 25 bp, Saccharomyces pastorianus
gacatactttgttactgcagcatac

SEQ ID NO: 101946 - DNA, 25 bp, Saccharomyces pastorianus
aaagctctgaattttccattgatga

SEQ ID NO: 101947 - DNA, 25 bp, Saccharomyces pastorianus
gaatacttttgtcttgcatgctctt

SEQ ID NO: 101948 - DNA, 25 bp, Saccharomyces pastorianus
ttggcctctttactttccttagatt

SEQ ID NO: 101949 - DNA, 25 bp, Saccharomyces pastorianus
agtctttaagtttgcggccctccat

SEQ ID NO: 101950 - DNA, 25 bp, Saccharomyces pastorianus
tagattcctctagcgacacaatcaa

SEQ ID NO: 101951 - DNA, 25 bp, Saccharomyces pastorianus
cttcagataaacttccactccgatg

SEQ ID NO: 101952 - DNA, 25 bp, Saccharomyces pastorianus
ggcccttttgttagtgttcttggat

SEQ ID NO: 101953 - DNA, 25 bp, Saccharomyces pastorianus
aatatctttgtccagagtctttaaa

SEQ ID NO: 101954 - DNA, 25 bp, Saccharomyces pastorianus
agatctctgaaaacctttaccgcgg

SEQ ID NO: 101955 - DNA, 25 bp, Saccharomyces pastorianus
gggcgtggcaactgtcgtgactaaa

SEQ ID NO: 101956 - DNA, 25 bp, Saccharomyces pastorianus
aagactcttgatgaactctccgatg

SEQ ID NO: 101957 - DNA, 25 bp, Saccharomyces pastorianus
aaatcgactatgtttccttagcaga

SEQ ID NO: 101958 - DNA, 25 bp, Saccharomyces pastorianus
tcaaatatgggcaccctacgttgat

SEQ ID NO: 101959 - DNA, 25 bp, Saccharomyces pastorianus
aaaacaccagcgaacagcagccaat

SEQ ID NO: 101960 - DNA, 25 bp, Saccharomyces pastorianus
gggacgtctctccagatcagaaatc

SEQ ID NO: 101961 - DNA, 25 bp, Saccharomyces pastorianus
tgtatccacagggaattccgctcga

SEQ ID NO: 101962 - DNA, 25 bp, Saccharomyces pastorianus
gactgaccgcgaaaaacccgatacg

SEQ ID NO: 101963 - DNA, 25 bp, Saccharomyces pastorianus
gaattggaattatccgaagcgaatt

SEQ ID NO: 101964 - DNA, 25 bp, Saccharomyces pastorianus
tgaggaattggtaacttcaacggaa

SEQ ID NO: 101965 - DNA, 25 bp, Saccharomyces pastorianus
gagcaattgtttccaaagggatctg

SEQ ID NO: 101966 - DNA, 25 bp, Saccharomyces pastorianus
agggatctggaattaacgagtctat

SEQ ID NO: 101967 - DNA, 25 bp, Saccharomyces pastorianus
gcgaattccaaatttgagctctcta

SEQ ID NO: 101968 - DNA, 25 bp, Saccharomyces pastorianus
attccagagaacttattagacagag

SEQ ID NO: 101969 - DNA, 25 bp, Saccharomyces pastorianus
atctcctacgagcaattgtttccaa

SEQ ID NO: 101970 - DNA, 25 bp, Saccharomyces pastorianus
tcaatcgtcattggaaaactctgaa

SEQ ID NO: 101971 - DNA, 25 bp, Saccharomyces pastorianus
gaaacgatacaagctacaccaacaa

SEQ ID NO: 101972 - DNA, 25 bp, Saccharomyces pastorianus
acgaacgattattagtagcccaaag

SEQ ID NO: 101973 - DNA, 25 bp, Saccharomyces pastorianus
gattttcatgaaggtatctcctacg

SEQ ID NO: 101974 - DNA, 25 bp, Saccharomyces pastorianus
caatgcgttcttttattctctggtt

SEQ ID NO: 101975 - DNA, 25 bp, Saccharomyces pastorianus
gttggtgatacttccatcgatttac

SEQ ID NO: 101976 - DNA, 25 bp, Saccharomyces pastorianus
aagagcgtatgaacattctgcaaaa

SEQ ID NO: 101977 - DNA, 25 bp, Saccharomyces pastorianus
gagacaagcgtttttggtagatcaa

SEQ ID NO: 101978 - DNA, 25 bp, Saccharomyces pastorianus
tcgatttaccagaagctacctgttt

SEQ ID NO: 101979 - DNA, 25 bp, Saccharomyces pastorianus
aggttcattgtctggtcttgctggc

SEQ ID NO: 101980 - DNA, 25 bp, Saccharomyces pastorianus
atgacgaaggtttcaatgcgttctt

SEQ ID NO: 101981 - DNA, 25 bp, Saccharomyces pastorianus
aggtcggtgatgacgctgacaattc

SEQ ID NO: 101982 - DNA, 25 bp, Saccharomyces pastorianus
atttggcatatgcttcacccagaga

SEQ ID NO: 101983 - DNA, 25 bp, Saccharomyces pastorianus
gggagaggttcaaatggccacaaaa

SEQ ID NO: 101984 - DNA, 25 bp, Saccharomyces pastorianus
ttctctggtttctaaggatacgcaa

SEQ ID NO: 101985 - DNA, 25 bp, Saccharomyces pastorianus
agctttgtacgactgactcttcttg

SEQ ID NO: 101986 - DNA, 25 bp, Saccharomyces pastorianus
taatttatccatcccttttgggcct

SEQ ID NO: 101987 - DNA, 25 bp, Saccharomyces pastorianus
cctggtctccaaatatctgtacact

SEQ ID NO: 101988 - DNA, 25 bp, Saccharomyces pastorianus
ttggctgccggattatccagcggaa

SEQ ID NO: 101989 - DNA, 25 bp, Saccharomyces pastorianus
ctgtacactcatcctgaatcttttg

SEQ ID NO: 101990 - DNA, 25 bp, Saccharomyces pastorianus
tttcttctgtaacctggtctccaaa

SEQ ID NO: 101991 - DNA, 25 bp, Saccharomyces pastorianus
ttgacttcagaatcgtagcaccatc

SEQ ID NO: 101992 - DNA, 25 bp, Saccharomyces pastorianus
agcaccatcgtttgttaccatgcaa

SEQ ID NO: 101993 - DNA, 25 bp, Saccharomyces pastorianus
gggcctaatgtgcttttcaccaaat

SEQ ID NO: 101994 - DNA, 25 bp, Saccharomyces pastorianus
atgttcaccaacactttggctgccg

SEQ ID NO: 101995 - DNA, 25 bp, Saccharomyces pastorianus
agtgttactggacgcactttgcaat

SEQ ID NO: 101996 - DNA, 25 bp, Saccharomyces pastorianus
tctgaagccgctgaagttctactaa

SEQ ID NO: 101997 - DNA, 25 bp, Saccharomyces pastorianus
gtgctctgagacaactgccaaccat

SEQ ID NO: 101998 - DNA, 25 bp, Saccharomyces pastorianus
ggtatctccacctcaggtttagatc

SEQ ID NO: 101999 - DNA, 25 bp, Saccharomyces pastorianus
aagaactgttcttggcggcggttgc

SEQ ID NO: 102000 - DNA, 25 bp, Saccharomyces pastorianus
gtagtcagctctgcatctgaagccg

SEQ ID NO: 102001 - DNA, 25 bp, Saccharomyces pastorianus
ggaaccattgccgacatgagacagt

SEQ ID NO: 102002 - DNA, 25 bp, Saccharomyces pastorianus
aaagaagtcccttgccgtggaggct

SEQ ID NO: 102003 - DNA, 25 bp, Saccharomyces pastorianus
gaagctgagagatccctgcatgacg

SEQ ID NO: 102004 - DNA, 25 bp, Saccharomyces pastorianus
atgacgcattgtccgtgttgtcaca

SEQ ID NO: 102005 - DNA, 25 bp, Saccharomyces pastorianus
gaagcttgtaccgtcgtcctaagag

SEQ ID NO: 102006 - DNA, 25 bp, Saccharomyces pastorianus
gtgctaccgaccaaacgcttgatga

SEQ ID NO: 102007 - DNA, 25 bp, Saccharomyces pastorianus
gcaacagccaccatcactagaagaa

SEQ ID NO: 102008 - DNA, 25 bp, Saccharomyces pastorianus
agatagcatctccacaacctcaaag

SEQ ID NO: 102009 - DNA, 25 bp, Saccharomyces pastorianus
tcctgcttccaacatctacgtatat

SEQ ID NO: 102010 - DNA, 25 bp, Saccharomyces pastorianus
agtcgccctcctttgtcgagtaatt

SEQ ID NO: 102011 - DNA, 25 bp, Saccharomyces pastorianus
gagcagtactcgagccctgtctcaa

SEQ ID NO: 102012 - DNA, 25 bp, Saccharomyces pastorianus
tttcttattctttactctcacatcc

SEQ ID NO: 102013 - DNA, 25 bp, Saccharomyces pastorianus
gtgattgacactgcaacagccacca

SEQ ID NO: 102014 - DNA, 25 bp, Saccharomyces pastorianus
tttctcgaaacgatttcctgcttcc

SEQ ID NO: 102015 - DNA, 25 bp, Saccharomyces pastorianus
gcattcacttaccatgacacagctt

SEQ ID NO: 102016 - DNA, 25 bp, Saccharomyces pastorianus
ctcaaagctccttgccgagagtcgc

SEQ ID NO: 102017 - DNA, 25 bp, Saccharomyces pastorianus
tactctcacatcctgtagtgattga

SEQ ID NO: 102018 - DNA, 25 bp, Saccharomyces pastorianus
tctgacgattttgttccggttaaag

SEQ ID NO: 102019 - DNA, 25 bp, Saccharomyces pastorianus
aacgaagcatcgtaaccgccactta

SEQ ID NO: 102020 - DNA, 25 bp, Saccharomyces pastorianus
agtacagccttcagagagcccgttc

SEQ ID NO: 102021 - DNA, 25 bp, Saccharomyces pastorianus
ggaacagcaatattagcccttctcc

SEQ ID NO: 102022 - DNA, 25 bp, Saccharomyces pastorianus
gggatgtcactatgtcttcactgga

SEQ ID NO: 102023 - DNA, 25 bp, Saccharomyces pastorianus
aatcctggcgatatactggcaacct

SEQ ID NO: 102024 - DNA, 25 bp, Saccharomyces pastorianus
ttcactggacccttggaacagcaat

SEQ ID NO: 102025 - DNA, 25 bp, Saccharomyces pastorianus
gaataggtcttcttctgtgtatatg

SEQ ID NO: 102026 - DNA, 25 bp, Saccharomyces pastorianus
agcccttctcccgtaagaaaatcag

SEQ ID NO: 102027 - DNA, 25 bp, Saccharomyces pastorianus
cggaattactcccacaacaatgtca

SEQ ID NO: 102028 - DNA, 25 bp, Saccharomyces pastorianus
aacctgtcaccagtctctgatattg

SEQ ID NO: 102029 - DNA, 25 bp, Saccharomyces pastorianus
aatgcgatcgaattggaactaggac

SEQ ID NO: 102030 - DNA, 25 bp, Saccharomyces pastorianus
ttaacgcacgtttacagattttcca

SEQ ID NO: 102031 - DNA, 25 bp, Saccharomyces pastorianus
tcgttcccattaataggcatcctgc

SEQ ID NO: 102032 - DNA, 25 bp, Saccharomyces pastorianus
gaaactgaagtgttcgacgaattcc

SEQ ID NO: 102033 - DNA, 25 bp, Saccharomyces pastorianus
aacttatactggatgttctttctaa

SEQ ID NO: 102034 - DNA, 25 bp, Saccharomyces pastorianus
gacgaattccgatcttccttaaata

SEQ ID NO: 102035 - DNA, 25 bp, Saccharomyces pastorianus
gggcctttgattattcatcagttta

SEQ ID NO: 102036 - DNA, 25 bp, Saccharomyces pastorianus
gacagtaatggttttcaacctccta

SEQ ID NO: 102037 - DNA, 25 bp, Saccharomyces pastorianus
aggcatcctgctttaattgactata

SEQ ID NO: 102038 - DNA, 25 bp, Saccharomyces pastorianus
aactcacttctttagtcggttctga

SEQ ID NO: 102039 - DNA, 25 bp, Saccharomyces pastorianus
gtcattcaacttgccgcagttcgtt

SEQ ID NO: 102040 - DNA, 25 bp, Saccharomyces pastorianus
attagaatctgagtcatggcaagaa

SEQ ID NO: 102041 - DNA, 25 bp, Saccharomyces pastorianus
gtctgatacaaagcaattggctgaa

SEQ ID NO: 102042 - DNA, 25 bp, Saccharomyces pastorianus
gtgaagccaaactgaaggaagcaat

SEQ ID NO: 102043 - DNA, 25 bp, Saccharomyces pastorianus
agttagagagtcaattgtctgatac

SEQ ID NO: 102044 - DNA, 25 bp, Saccharomyces pastorianus
ggctgaagactccaataacttgaga

SEQ ID NO: 102045 - DNA, 25 bp, Saccharomyces pastorianus
aaaaccaggatctagaacaacagct

SEQ ID NO: 102046 - DNA, 25 bp, Saccharomyces pastorianus
agaggccgatttgaactctgagcaa

SEQ ID NO: 102047 - DNA, 25 bp, Saccharomyces pastorianus
cgagattaaatctttgtccgctaaa

SEQ ID NO: 102048 - DNA, 25 bp, Saccharomyces pastorianus
acgagcaactcgacagtgaagtgga

SEQ ID NO: 102049 - DNA, 25 bp, Saccharomyces pastorianus
ttgtccgctaaaaacgagcaactcg

SEQ ID NO: 102050 - DNA, 25 bp, Saccharomyces pastorianus
aatgggtagaaggatcgttgctttg

SEQ ID NO: 102051 - DNA, 25 bp, Saccharomyces pastorianus
gggatcatctacacaaggcgttaag

SEQ ID NO: 102052 - DNA, 25 bp, Saccharomyces pastorianus
ttgtcgtcgtattgcaacattgtgc

SEQ ID NO: 102053 - DNA, 25 bp, Saccharomyces pastorianus
gaaacctcaagaccaagtcgttcgt

SEQ ID NO: 102054 - DNA, 25 bp, Saccharomyces pastorianus
acgcagttcctgtactggtatcaca

SEQ ID NO: 102055 - DNA, 25 bp, Saccharomyces pastorianus
ttcgatttggtgaaacgcagttcct

SEQ ID NO: 102056 - DNA, 25 bp, Saccharomyces pastorianus
agtgaactcaatccttgtcgtcgta

SEQ ID NO: 102057 - DNA, 25 bp, Saccharomyces pastorianus
tagcgaaaccgccatgttgattcaa

SEQ ID NO: 102058 - DNA, 25 bp, Saccharomyces pastorianus
aggagtatttccctgataatctttc

SEQ ID NO: 102059 - DNA, 25 bp, Saccharomyces pastorianus
tgggcctctgtccagcaagatgaag

SEQ ID NO: 102060 - DNA, 25 bp, Saccharomyces pastorianus
ttatctttggacgacatctgggcct

SEQ ID NO: 102061 - DNA, 25 bp, Saccharomyces pastorianus
atgtttgtagcagacgagccacaga

SEQ ID NO: 102062 - DNA, 25 bp, Saccharomyces pastorianus
gatgccatggactcgttatctaagg

SEQ ID NO: 102063 - DNA, 25 bp, Saccharomyces pastorianus
gaagccgctgcaagaagtgtccaag

SEQ ID NO: 102064 - DNA, 25 bp, Saccharomyces pastorianus
agccgctcaactttccaaggacgaa

SEQ ID NO: 102065 - DNA, 25 bp, Saccharomyces pastorianus
gcgaggcgcaaaaacgtcttgacga

SEQ ID NO: 102066 - DNA, 25 bp, Saccharomyces pastorianus
acaagaacgtgtccgatgccatgga

SEQ ID NO: 102067 - DNA, 25 bp, Saccharomyces pastorianus
acacgggtgacgctaatactgaaga

SEQ ID NO: 102068 - DNA, 25 bp, Saccharomyces pastorianus
agtaatcctttgaaacgcctgttga

SEQ ID NO: 102069 - DNA, 25 bp, Saccharomyces pastorianus
gatggacttccaaggtcgacaatga

SEQ ID NO: 102070 - DNA, 25 bp, Saccharomyces pastorianus
gacttgaaacagtacggcagccact

SEQ ID NO: 102071 - DNA, 25 bp, Saccharomyces pastorianus
ttgctgaacgggtagccagaggttt

SEQ ID NO: 102072 - DNA, 25 bp, Saccharomyces pastorianus
gaaatgcttcttcagagccaagcga

SEQ ID NO: 102073 - DNA, 25 bp, Saccharomyces pastorianus
agcgaatttaacaacactgcagatg

SEQ ID NO: 102074 - DNA, 25 bp, Saccharomyces pastorianus
cactgcagatgtagatgtcgtagct

SEQ ID NO: 102075 - DNA, 25 bp, Saccharomyces pastorianus
ttgttattaagcaacgccttgttag

SEQ ID NO: 102076 - DNA, 25 bp, Saccharomyces pastorianus
gaatgctgactattttgttattaag

SEQ ID NO: 102077 - DNA, 25 bp, Saccharomyces pastorianus
atggttgttggcagcgaatttaaca

SEQ ID NO: 102078 - DNA, 25 bp, Saccharomyces pastorianus
acgccttgttagtgcttgttttaca

SEQ ID NO: 102079 - DNA, 25 bp, Saccharomyces pastorianus
ggtattttatttatgctatcgcttt

SEQ ID NO: 102080 - DNA, 25 bp, Saccharomyces pastorianus
atgctatcgctttattatctttatt

SEQ ID NO: 102081 - DNA, 25 bp, Saccharomyces pastorianus
gtagatgtcgtagctatccttctca

SEQ ID NO: 102082 - DNA, 25 bp, Saccharomyces pastorianus
cttctcacgttgttgaatgctgact

SEQ ID NO: 102083 - DNA, 25 bp, Saccharomyces pastorianus
tagctatccttctcacgttgttgaa

SEQ ID NO: 102084 - DNA, 25 bp, Saccharomyces pastorianus
tatggaagggccttgtacccgcact

SEQ ID NO: 102085 - DNA, 25 bp, Saccharomyces pastorianus
acccgcactgtttggtgtttcgcaa

SEQ ID NO: 102086 - DNA, 25 bp, Saccharomyces pastorianus
aagggcctatctgcaaacttagtac

SEQ ID NO: 102087 - DNA, 25 bp, Saccharomyces pastorianus
cttccagtgggttgatgacagctat

SEQ ID NO: 102088 - DNA, 25 bp, Saccharomyces pastorianus
aggtgccttctattttgcagtttac

SEQ ID NO: 102089 - DNA, 25 bp, Saccharomyces pastorianus
tgtacaacggtgtccaacaactgtt

SEQ ID NO: 102090 - DNA, 25 bp, Saccharomyces pastorianus
tgacagctatcctaacaaaccctat

SEQ ID NO: 102091 - DNA, 25 bp, Saccharomyces pastorianus
gcccaaggagcgtacacttctatgt

SEQ ID NO: 102092 - DNA, 25 bp, Saccharomyces pastorianus
gaactgatggcttccagggcctatg

SEQ ID NO: 102093 - DNA, 25 bp, Saccharomyces pastorianus
aatgatctccgtcactttggtttac

SEQ ID NO: 102094 - DNA, 25 bp, Saccharomyces pastorianus
ttatttatttgtctgccggtgcttc

SEQ ID NO: 102095 - DNA, 25 bp, Saccharomyces pastorianus
gggatacattgctcaagttacgtgt

SEQ ID NO: 102096 - DNA, 25 bp, Saccharomyces pastorianus
acgctgtgacagaacccctaaagat

SEQ ID NO: 102097 - DNA, 25 bp, Saccharomyces pastorianus
aagaacgtcatctgtgcgtagcaag

SEQ ID NO: 102098 - DNA, 25 bp, Saccharomyces pastorianus
tgattaccatttggtcttccccgac

SEQ ID NO: 102099 - DNA, 25 bp, Saccharomyces pastorianus
ttattgatgccacaagctcattccc

SEQ ID NO: 102100 - DNA, 25 bp, Saccharomyces pastorianus
gaagaactcagtgccataacggtga

SEQ ID NO: 102101 - DNA, 25 bp, Saccharomyces pastorianus
gaacactgctagaattccctaagga

SEQ ID NO: 102102 - DNA, 25 bp, Saccharomyces pastorianus
tcccctcaaaggtcacacgaactgt

SEQ ID NO: 102103 - DNA, 25 bp, Saccharomyces pastorianus
atcaacacttgccttgatctcgaag

SEQ ID NO: 102104 - DNA, 25 bp, Saccharomyces pastorianus
gaaggagcatgttgttacccagtta

SEQ ID NO: 102105 - DNA, 25 bp, Saccharomyces pastorianus
gccaacccttccagaaaacgtcaga

SEQ ID NO: 102106 - DNA, 25 bp, Saccharomyces pastorianus
aatttctactacgacatccatggac

SEQ ID NO: 102107 - DNA, 25 bp, Saccharomyces pastorianus
ttatgcatcgatgatcacccaggcc

SEQ ID NO: 102108 - DNA, 25 bp, Saccharomyces pastorianus
gacgaggtgcttctgtgacaagaca

SEQ ID NO: 102109 - DNA, 25 bp, Saccharomyces pastorianus
gtccctaacgataatgtaccccata

SEQ ID NO: 102110 - DNA, 25 bp, Saccharomyces pastorianus
aactccgtgaggcataatctgtccc

SEQ ID NO: 102111 - DNA, 25 bp, Saccharomyces pastorianus
gatatatcaaaccaccgcagtctta

SEQ ID NO: 102112 - DNA, 25 bp, Saccharomyces pastorianus
agaactcaactcactggccaaattt

SEQ ID NO: 102113 - DNA, 25 bp, Saccharomyces pastorianus
gattttaggtgaaagcgccccgcaa

SEQ ID NO: 102114 - DNA, 25 bp, Saccharomyces pastorianus
tagcaacaatgctgtccctaacgat

SEQ ID NO: 102115 - DNA, 25 bp, Saccharomyces pastorianus
gaatcttcatcaattgacccgaggg

SEQ ID NO: 102116 - DNA, 25 bp, Saccharomyces pastorianus
gaaatacctgctcctgaatcttcat

SEQ ID NO: 102117 - DNA, 25 bp, Saccharomyces pastorianus
aacaattcaccgtcttatgaagggt

SEQ ID NO: 102118 - DNA, 25 bp, Saccharomyces pastorianus
gtatcccaaggaacgactaacatgt

SEQ ID NO: 102119 - DNA, 25 bp, Saccharomyces pastorianus
gatccgaacaatttcttatctactg

SEQ ID NO: 102120 - DNA, 25 bp, Saccharomyces pastorianus
aggaatgacggcgacatccctacta

SEQ ID NO: 102121 - DNA, 25 bp, Saccharomyces pastorianus
attcgatcagttagatgctcagcta

SEQ ID NO: 102122 - DNA, 25 bp, Saccharomyces pastorianus
gactgactcaaacgatattcttgga

SEQ ID NO: 102123 - DNA, 25 bp, Saccharomyces pastorianus
tcttgatgccacagatgacgtcttt

SEQ ID NO: 102124 - DNA, 25 bp, Saccharomyces pastorianus
aatgcatcaaataactccaacccag

SEQ ID NO: 102125 - DNA, 25 bp, Saccharomyces pastorianus
acatccctactaacagtgcattcga

SEQ ID NO: 102126 - DNA, 25 bp, Saccharomyces pastorianus
tccaacccagataccattaacaaca

SEQ ID NO: 102127 - DNA, 25 bp, Saccharomyces pastorianus
tccccagttacaaataccgctttca

SEQ ID NO: 102128 - DNA, 25 bp, Saccharomyces pastorianus
gatggtgactatgaactcggcagaa

SEQ ID NO: 102129 - DNA, 25 bp, Saccharomyces pastorianus
gagtctgctccacagttgtatgaca

SEQ ID NO: 102130 - DNA, 25 bp, Saccharomyces pastorianus
aaatgtgccaaatatctcctctaaa

SEQ ID NO: 102131 - DNA, 25 bp, Saccharomyces pastorianus
aatgacggcggctacgacaaggcat

SEQ ID NO: 102132 - DNA, 25 bp, Saccharomyces pastorianus
gagcttatctagaacaccgtccaat

SEQ ID NO: 102133 - DNA, 25 bp, Saccharomyces pastorianus
gaaaccactcgcacagatcaaactt

SEQ ID NO: 102134 - DNA, 25 bp, Saccharomyces pastorianus
tgaagtatctgctcacggatcggat

SEQ ID NO: 102135 - DNA, 25 bp, Saccharomyces pastorianus
aatgctaccactaccttgtttggtt

SEQ ID NO: 102136 - DNA, 25 bp, Saccharomyces pastorianus
ggcataacgttcacgcagtttttat

SEQ ID NO: 102137 - DNA, 25 bp, Saccharomyces pastorianus
attccacatggacgttctgattcga

SEQ ID NO: 102138 - DNA, 25 bp, Saccharomyces pastorianus
acaaacgattccatttctgttgcgg

SEQ ID NO: 102139 - DNA, 25 bp, Saccharomyces pastorianus
gttccattattactatctctttcgc

SEQ ID NO: 102140 - DNA, 25 bp, Saccharomyces pastorianus
gaagcatactccaagccaatcggtt

SEQ ID NO: 102141 - DNA, 25 bp, Saccharomyces pastorianus
aggacgatgttctaagcgctttaat

SEQ ID NO: 102142 - DNA, 25 bp, Saccharomyces pastorianus
gaaactctgaaggacactacggata

SEQ ID NO: 102143 - DNA, 25 bp, Saccharomyces pastorianus
gattacgactgtagtacctctaaac

SEQ ID NO: 102144 - DNA, 25 bp, Saccharomyces pastorianus
gccaatcggttggtccttttatcaa

SEQ ID NO: 102145 - DNA, 25 bp, Saccharomyces pastorianus
atcaacgatttattcccgcttttat

SEQ ID NO: 102146 - DNA, 25 bp, Saccharomyces pastorianus
atctctttcgcttccgcaaaaatat

SEQ ID NO: 102147 - DNA, 25 bp, Saccharomyces pastorianus
ggttaatagccttacagcttctaga

SEQ ID NO: 102148 - DNA, 25 bp, Saccharomyces pastorianus
gattggctcacttgtatcgaagcta

SEQ ID NO: 102149 - DNA, 25 bp, Saccharomyces pastorianus
cccgcttttattgcaggctttggat

SEQ ID NO: 102150 - DNA, 25 bp, Saccharomyces pastorianus
gactgctatcaaaccttttgcctgg

SEQ ID NO: 102151 - DNA, 25 bp, Saccharomyces pastorianus
caccgggtttggcacctgtaggact

SEQ ID NO: 102152 - DNA, 25 bp, Saccharomyces pastorianus
atgtcatcttcgctgagccaaacat

SEQ ID NO: 102153 - DNA, 25 bp, Saccharomyces pastorianus
gaaggatacagtttccactgcgaac

SEQ ID NO: 102154 - DNA, 25 bp, Saccharomyces pastorianus
gaagacattcagcaatccatcttga

SEQ ID NO: 102155 - DNA, 25 bp, Saccharomyces pastorianus
ttgcctggcgttcccaaaatcagag

SEQ ID NO: 102156 - DNA, 25 bp, Saccharomyces pastorianus
atgagggcacattaacggaccatga

SEQ ID NO: 102157 - DNA, 25 bp, Saccharomyces pastorianus
aaacatctaaataccaggccacctc

SEQ ID NO: 102158 - DNA, 25 bp, Saccharomyces pastorianus
tagatatcctggtctgacaccgggt

SEQ ID NO: 102159 - DNA, 25 bp, Saccharomyces pastorianus
atgggtcaaaagctcagttaatcga

SEQ ID NO: 102160 - DNA, 25 bp, Saccharomyces pastorianus
aggccacctcggttgttaatggact

SEQ ID NO: 102161 - DNA, 25 bp, Saccharomyces pastorianus
aaggcaagccttacaaacgatgttt

SEQ ID NO: 102162 - DNA, 25 bp, Saccharomyces pastorianus
agaaaccgaaactgaccgtcaagat

SEQ ID NO: 102163 - DNA, 25 bp, Saccharomyces pastorianus
tcctgggtttacgttgatgctgaca

SEQ ID NO: 102164 - DNA, 25 bp, Saccharomyces pastorianus
aaagccagagagtaaatcgcccgcg

SEQ ID NO: 102165 - DNA, 25 bp, Saccharomyces pastorianus
gtaattgaaaaacccatggccattg

SEQ ID NO: 102166 - DNA, 25 bp, Saccharomyces pastorianus
ggaccattagcgttgttacggcaga

SEQ ID NO: 102167 - DNA, 25 bp, Saccharomyces pastorianus
aatcgcccgcgaagaagactgcagc

SEQ ID NO: 102168 - DNA, 25 bp, Saccharomyces pastorianus
caagtcgcttgggatttttcccacg

SEQ ID NO: 102169 - DNA, 25 bp, Saccharomyces pastorianus
tgaaaagcttccttcgaaacgcgac

SEQ ID NO: 102170 - DNA, 25 bp, Saccharomyces pastorianus
gaaacgcgactatccggactatttt

SEQ ID NO: 102171 - DNA, 25 bp, Saccharomyces pastorianus
atgaggtagactcccatccaaggac

SEQ ID NO: 102172 - DNA, 25 bp, Saccharomyces pastorianus
acgcctgctaatttattccacattc

SEQ ID NO: 102173 - DNA, 25 bp, Saccharomyces pastorianus
agatcatctctttccgaattcactg

SEQ ID NO: 102174 - DNA, 25 bp, Saccharomyces pastorianus
attcttttctaaacagctgctgcgt

SEQ ID NO: 102175 - DNA, 25 bp, Saccharomyces pastorianus
ggtgctgttgctgccggtagcaaat

SEQ ID NO: 102176 - DNA, 25 bp, Saccharomyces pastorianus
aagattgaagagctgcacccattcc

SEQ ID NO: 102177 - DNA, 25 bp, Saccharomyces pastorianus
attcccatttgctcagctacgtgat

SEQ ID NO: 102178 - DNA, 25 bp, Saccharomyces pastorianus
ttgtttatccaactacgcctgctaa

SEQ ID NO: 102179 - DNA, 25 bp, Saccharomyces pastorianus
gagtggccaagtgtacactgcccta

SEQ ID NO: 102180 - DNA, 25 bp, Saccharomyces pastorianus
gtcaattccgtaaaccattggcgtt

SEQ ID NO: 102181 - DNA, 25 bp, Saccharomyces pastorianus
gggcatacacagaaccacgcttaca

SEQ ID NO: 102182 - DNA, 25 bp, Saccharomyces pastorianus
tgggtgataagaccactgctttctt

SEQ ID NO: 102183 - DNA, 25 bp, Saccharomyces pastorianus
ggtagcatttattccgcttctaaag

SEQ ID NO: 102184 - DNA, 25 bp, Saccharomyces pastorianus
gatatttgttccttactggctattg

SEQ ID NO: 102185 - DNA, 25 bp, Saccharomyces pastorianus
gagttgtacattccctgcattggat

SEQ ID NO: 102186 - DNA, 25 bp, Saccharomyces pastorianus
gtgtggctactgatatcgctgataa

SEQ ID NO: 102187 - DNA, 25 bp, Saccharomyces pastorianus
gttcgccaacatcatgcgttttgtc

SEQ ID NO: 102188 - DNA, 25 bp, Saccharomyces pastorianus
atgaagcccttcaacgtgagagtga

SEQ ID NO: 102189 - DNA, 25 bp, Saccharomyces pastorianus
attgtcttcactggttccttggcag

SEQ ID NO: 102190 - DNA, 25 bp, Saccharomyces pastorianus
gagcactagtgaccctgtagatgtt

SEQ ID NO: 102191 - DNA, 25 bp, Saccharomyces pastorianus
tgccgtgaattgtcggagttcctta

SEQ ID NO: 102192 - DNA, 25 bp, Saccharomyces pastorianus
ataagcccatgccagctgatgcgta

SEQ ID NO: 102193 - DNA, 25 bp, Saccharomyces pastorianus
tgtcattcccctttggtagcattta

SEQ ID NO: 102194 - DNA, 25 bp, Saccharomyces pastorianus
gtaccgttctaacactgacgcggat

SEQ ID NO: 102195 - DNA, 25 bp, Saccharomyces pastorianus
gccattgaccgttgttgaccaagat

SEQ ID NO: 102196 - DNA, 25 bp, Saccharomyces pastorianus
attaaactttggtgctggctccact

SEQ ID NO: 102197 - DNA, 25 bp, Saccharomyces pastorianus
aacgccggcgtctcagttgaagatg

SEQ ID NO: 102198 - DNA, 25 bp, Saccharomyces pastorianus
atccgatcaaccatctgacggtaga

SEQ ID NO: 102199 - DNA, 25 bp, Saccharomyces pastorianus
caagggtgtcgccatttgcagaacc

SEQ ID NO: 102200 - DNA, 25 bp, Saccharomyces pastorianus
ggatctggtattggtaactgggcac

SEQ ID NO: 102201 - DNA, 25 bp, Saccharomyces pastorianus
cgaggctgcctatgttgtttctaaa

SEQ ID NO: 102202 - DNA, 25 bp, Saccharomyces pastorianus
aaaatggtgagttctctggcggtgc

SEQ ID NO: 102203 - DNA, 25 bp, Saccharomyces pastorianus
gactacccgggcactgaaaacatgg

SEQ ID NO: 102204 - DNA, 25 bp, Saccharomyces pastorianus
atagttgctgctgatgattcatcca

SEQ ID NO: 102205 - DNA, 25 bp, Saccharomyces pastorianus
gaacttgcaagtccacgaggccata

SEQ ID NO: 102206 - DNA, 25 bp, Saccharomyces pastorianus
agtttctttccttgaaccagcatgg

SEQ ID NO: 102207 - DNA, 25 bp, Saccharomyces pastorianus
aagataaacgcctccgaacttgcaa

SEQ ID NO: 102208 - DNA, 25 bp, Saccharomyces pastorianus
gggatgggaccacaagctcagcttc

SEQ ID NO: 102209 - DNA, 25 bp, Saccharomyces pastorianus
atgagctcaaactcggagtcccaga

SEQ ID NO: 102210 - DNA, 25 bp, Saccharomyces pastorianus
atccggtaatgagtatgggcccaca

SEQ ID NO: 102211 - DNA, 25 bp, Saccharomyces pastorianus
tgatgagctcacagtttctttcctt

SEQ ID NO: 102212 - DNA, 25 bp, Saccharomyces pastorianus
atgccgcagtatttatatccaccag

SEQ ID NO: 102213 - DNA, 25 bp, Saccharomyces pastorianus
gcaaattttaggtcgcccatgcgaa

SEQ ID NO: 102214 - DNA, 25 bp, Saccharomyces pastorianus
ttacgataccgtctccgataacgac

SEQ ID NO: 102215 - DNA, 25 bp, Saccharomyces pastorianus
atatactttacctatgcctgcaaat

SEQ ID NO: 102216 - DNA, 25 bp, Saccharomyces pastorianus
tttagatgtctcctatccgcaattt

SEQ ID NO: 102217 - DNA, 25 bp, Saccharomyces pastorianus
gtgacacttcttctcagtagcattg

SEQ ID NO: 102218 - DNA, 25 bp, Saccharomyces pastorianus
caagtattatctctgctggtcggta

SEQ ID NO: 102219 - DNA, 25 bp, Saccharomyces pastorianus
atcccttttattattctatctcctg

SEQ ID NO: 102220 - DNA, 25 bp, Saccharomyces pastorianus
aaaacaccgcttgctgctgtattat

SEQ ID NO: 102221 - DNA, 25 bp, Saccharomyces pastorianus
attttgaccttctctactactttga

SEQ ID NO: 102222 - DNA, 25 bp, Saccharomyces pastorianus
agtagcattggctttactgcctttg

SEQ ID NO: 102223 - DNA, 25 bp, Saccharomyces pastorianus
gaggcaaggttgcatccagcatttg

SEQ ID NO: 102224 - DNA, 25 bp, Saccharomyces pastorianus
ctaaggcttctaccgcaacaggttg

SEQ ID NO: 102225 - DNA, 25 bp, Saccharomyces pastorianus
agatctctttccgtctaaggcttct

SEQ ID NO: 102226 - DNA, 25 bp, Saccharomyces pastorianus
tataacttcatcttcatccctttta

SEQ ID NO: 102227 - DNA, 25 bp, Saccharomyces pastorianus
gacaatctaatcctgcaaactccac

SEQ ID NO: 102228 - DNA, 25 bp, Saccharomyces pastorianus
gctcaattttcccttttgtcatcag

SEQ ID NO: 102229 - DNA, 25 bp, Saccharomyces pastorianus
agtacaccagagcatattcagtcaa

SEQ ID NO: 102230 - DNA, 25 bp, Saccharomyces pastorianus
catcgccatttttccagcaaacaat

SEQ ID NO: 102231 - DNA, 25 bp, Saccharomyces pastorianus
tattcagtcaagtatcaacctcgat

SEQ ID NO: 102232 - DNA, 25 bp, Saccharomyces pastorianus
gaatctttgccagctttggatacca

SEQ ID NO: 102233 - DNA, 25 bp, Saccharomyces pastorianus
aacaatgcctatacagctaccgcgc

SEQ ID NO: 102234 - DNA, 25 bp, Saccharomyces pastorianus
aaaggagaaccatcctccattagcc

SEQ ID NO: 102235 - DNA, 25 bp, Saccharomyces pastorianus
gctaccgcgcgatgcacaacaagaa

SEQ ID NO: 102236 - DNA, 25 bp, Saccharomyces pastorianus
catcagcaccggcagacaatctaat

SEQ ID NO: 102237 - DNA, 25 bp, Saccharomyces pastorianus
aatttccccagttttctctacagat

SEQ ID NO: 102238 - DNA, 25 bp, Saccharomyces pastorianus
gggcccagtagcaaccgaagtgaaa

SEQ ID NO: 102239 - DNA, 25 bp, Saccharomyces pastorianus
agagttgctttaaccgcgggcccag

SEQ ID NO: 102240 - DNA, 25 bp, Saccharomyces pastorianus
atatccatgatattttcgttgacag

SEQ ID NO: 102241 - DNA, 25 bp, Saccharomyces pastorianus
tattttcccgaagtttatgagccta

SEQ ID NO: 102242 - DNA, 25 bp, Saccharomyces pastorianus
gatcggtgcgctacgttatttggaa

SEQ ID NO: 102243 - DNA, 25 bp, Saccharomyces pastorianus
aaggtgtcaacgaagctttcacaga

SEQ ID NO: 102244 - DNA, 25 bp, Saccharomyces pastorianus
tgaatctaacgcaatcacaccgaac

SEQ ID NO: 102245 - DNA, 25 bp, Saccharomyces pastorianus
agtattgattcacgcgattctttag

SEQ ID NO: 102246 - DNA, 25 bp, Saccharomyces pastorianus
tgctgaatgttttcaccagaggtta

SEQ ID NO: 102247 - DNA, 25 bp, Saccharomyces pastorianus
gtgcctgtggtaaaacttcgttgct

SEQ ID NO: 102248 - DNA, 25 bp, Saccharomyces pastorianus
ggcgtcaagttagtcttagttgcac

SEQ ID NO: 102249 - DNA, 25 bp, Saccharomyces pastorianus
cgcatcgtcgctcgataacggtaat

SEQ ID NO: 102250 - DNA, 25 bp, Saccharomyces pastorianus
gtaatttcgaaaggccgctatcctc

SEQ ID NO: 102251 - DNA, 25 bp, Saccharomyces pastorianus
agttttacggcgattccccatatat

SEQ ID NO: 102252 - DNA, 25 bp, Saccharomyces pastorianus
tggtgtctacaatctcttcatcatc

SEQ ID NO: 102253 - DNA, 25 bp, Saccharomyces pastorianus
gaaaacctacaccttcgacttatct

SEQ ID NO: 102254 - DNA, 25 bp, Saccharomyces pastorianus
aattgcatcttcaccaagtcgaaag

SEQ ID NO: 102255 - DNA, 25 bp, Saccharomyces pastorianus
ttttccacacaacatacccagtttt

SEQ ID NO: 102256 - DNA, 25 bp, Saccharomyces pastorianus
atcaggtccatatcagcgagtccga

SEQ ID NO: 102257 - DNA, 25 bp, Saccharomyces pastorianus
gtatctacaaattctctggtgtcta

SEQ ID NO: 102258 - DNA, 25 bp, Saccharomyces pastorianus
tatcctctcttgtatccgaatccaa

SEQ ID NO: 102259 - DNA, 25 bp, Saccharomyces pastorianus
attcacttttcatttcaccaacagg

SEQ ID NO: 102260 - DNA, 25 bp, Saccharomyces pastorianus
gatttttgtggtggctctacagctc

SEQ ID NO: 102261 - DNA, 25 bp, Saccharomyces pastorianus
tatccaagtcattcggtttagccgg

SEQ ID NO: 102262 - DNA, 25 bp, Saccharomyces pastorianus
aattaggctgttccggatgtttgag

SEQ ID NO: 102263 - DNA, 25 bp, Saccharomyces pastorianus
ggttactttgcaaactctatccaag

SEQ ID NO: 102264 - DNA, 25 bp, Saccharomyces pastorianus
tgagaattaccgttggaacccatga

SEQ ID NO: 102265 - DNA, 25 bp, Saccharomyces pastorianus
actgctttggattacgttgatgacc

SEQ ID NO: 102266 - DNA, 25 bp, Saccharomyces pastorianus
ggcgccttataatatttcctcccta

SEQ ID NO: 102267 - DNA, 25 bp, Saccharomyces pastorianus
ggaacccatgaggagaacacacatt

SEQ ID NO: 102268 - DNA, 25 bp, Saccharomyces pastorianus
tttaaatgcaatgaaggcgccttat

SEQ ID NO: 102269 - DNA, 25 bp, Saccharomyces pastorianus
ttaccaattggctactcaatctggg

SEQ ID NO: 102270 - DNA, 25 bp, Saccharomyces pastorianus
tccctagcctctgaatatgcactaa

SEQ ID NO: 102271 - DNA, 25 bp, Saccharomyces pastorianus
aatcctttcatgtcctttgttattg

SEQ ID NO: 102272 - DNA, 25 bp, Saccharomyces pastorianus
tacctttctcctccaattgtaacct

SEQ ID NO: 102273 - DNA, 25 bp, Saccharomyces pastorianus
ttcttttagtaaaccgtcacgtgca

SEQ ID NO: 102274 - DNA, 25 bp, Saccharomyces pastorianus
aaatcaccaatttgctttttcgtat

SEQ ID NO: 102275 - DNA, 25 bp, Saccharomyces pastorianus
aaccgtcacgtgcaagagattcttt

SEQ ID NO: 102276 - DNA, 25 bp, Saccharomyces pastorianus
gttttgccactaatggattatcgtc

SEQ ID NO: 102277 - DNA, 25 bp, Saccharomyces pastorianus
aatatcactattttgccatgttcaa

SEQ ID NO: 102278 - DNA, 25 bp, Saccharomyces pastorianus
tttttcgtattcatggccaacccaa

SEQ ID NO: 102279 - DNA, 25 bp, Saccharomyces pastorianus
gtccaatctcttattctttacagtg

SEQ ID NO: 102280 - DNA, 25 bp, Saccharomyces pastorianus
aattgtaacctactcacttgctcac

SEQ ID NO: 102281 - DNA, 25 bp, Saccharomyces pastorianus
gatgcatcgaacgacgaagcctttt

SEQ ID NO: 102282 - DNA, 25 bp, Saccharomyces pastorianus
aagatctcagcacgcatcaatttag

SEQ ID NO: 102283 - DNA, 25 bp, Saccharomyces pastorianus
gtgtccgccaaaattaatcatactg

SEQ ID NO: 102284 - DNA, 25 bp, Saccharomyces pastorianus
gatgatgcttcgagtggatacgtta

SEQ ID NO: 102285 - DNA, 25 bp, Saccharomyces pastorianus
aaaaaggcttcgtcgttcgatgcat

SEQ ID NO: 102286 - DNA, 25 bp, Saccharomyces pastorianus
aagaatctcttgcacgtgacggttt

SEQ ID NO: 102287 - DNA, 25 bp, Saccharomyces pastorianus
gttcgatgcatcctcttcaataaca

SEQ ID NO: 102288 - DNA, 25 bp, Saccharomyces pastorianus
ttgggttggccatgaatacgaaaaa

SEQ ID NO: 102289 - DNA, 25 bp, Saccharomyces pastorianus
ggacgataatccattagtggcaaaa

SEQ ID NO: 102290 - DNA, 25 bp, Saccharomyces pastorianus
agtgcggtctatcaataatctgtat

SEQ ID NO: 102291 - DNA, 25 bp, Saccharomyces pastorianus
aaaagctattcgatgtgtccgccaa

SEQ ID NO: 102292 - DNA, 25 bp, Saccharomyces pastorianus
gaggagtatctgtttttaatgcatt

SEQ ID NO: 102293 - DNA, 25 bp, Saccharomyces pastorianus
gagctacgcccaaaaatcgtttgca

SEQ ID NO: 102294 - DNA, 25 bp, Saccharomyces pastorianus
atgtcaacgcatttttgactcccca

SEQ ID NO: 102295 - DNA, 25 bp, Saccharomyces pastorianus
gcatatgacacagctgcgggtttat

SEQ ID NO: 102296 - DNA, 25 bp, Saccharomyces pastorianus
gtcaatcgggtatcttgccagagaa

SEQ ID NO: 102297 - DNA, 25 bp, Saccharomyces pastorianus
gatacgtaccagattctatttcgca

SEQ ID NO: 102298 - DNA, 25 bp, Saccharomyces pastorianus
aaacgttaaccgctatttgcaagtg

SEQ ID NO: 102299 - DNA, 25 bp, Saccharomyces pastorianus
aggcaatgcgcaactgcttcatttt

SEQ ID NO: 102300 - DNA, 25 bp, Saccharomyces pastorianus
tgcacgctatgctatgtcaatcggg

SEQ ID NO: 102301 - DNA, 25 bp, Saccharomyces pastorianus
gattcaggcctgactacattgtcgt

SEQ ID NO: 102302 - DNA, 25 bp, Saccharomyces pastorianus
ggaagtgttactttgggccaccgcg

SEQ ID NO: 102303 - DNA, 25 bp, Saccharomyces pastorianus
gggtatgtctttcaatgcgctacaa

SEQ ID NO: 102304 - DNA, 25 bp, Saccharomyces pastorianus
aggttcctgctgtcgagtaccatca

SEQ ID NO: 102305 - DNA, 25 bp, Saccharomyces pastorianus
ggacgtgcgcagaatctacccaaaa

SEQ ID NO: 102306 - DNA, 25 bp, Saccharomyces pastorianus
gatgtggtcatcaacgttgctgaag

SEQ ID NO: 102307 - DNA, 25 bp, Saccharomyces pastorianus
aagactgtgaattcgtgccttgttc

SEQ ID NO: 102308 - DNA, 25 bp, Saccharomyces pastorianus
agatctacctttattcagagcccac

SEQ ID NO: 102309 - DNA, 25 bp, Saccharomyces pastorianus
aatgggaggttgctcttaacgcgaa

SEQ ID NO: 102310 - DNA, 25 bp, Saccharomyces pastorianus
aatgtgggctgtcgagatccgcaac

SEQ ID NO: 102311 - DNA, 25 bp, Saccharomyces pastorianus
gcagattgcgttggacttgccatca

SEQ ID NO: 102312 - DNA, 25 bp, Saccharomyces pastorianus
gcatcatacacgcagctacgactaa

SEQ ID NO: 102313 - DNA, 25 bp, Saccharomyces pastorianus
cttccatagggcttattttccagtt

SEQ ID NO: 102314 - DNA, 25 bp, Saccharomyces pastorianus
gagcttttaccctttgatgtggtca

SEQ ID NO: 102315 - DNA, 25 bp, Saccharomyces pastorianus
aaacgaatttgcacgatggagaaac

SEQ ID NO: 102316 - DNA, 25 bp, Saccharomyces pastorianus
atttttgccgctatattattttgta

SEQ ID NO: 102317 - DNA, 25 bp, Saccharomyces pastorianus
ggatatcgacttgctctcaaaggac

SEQ ID NO: 102318 - DNA, 25 bp, Saccharomyces pastorianus
aacaccgtatgagcatatcctccgt

SEQ ID NO: 102319 - DNA, 25 bp, Saccharomyces pastorianus
tgaacaaagcgcagcagccgacgcg

SEQ ID NO: 102320 - DNA, 25 bp, Saccharomyces pastorianus
aacttctgagaagattcccgtcgat

SEQ ID NO: 102321 - DNA, 25 bp, Saccharomyces pastorianus
aaatttgtgctcgacttgcaagtaa

SEQ ID NO: 102322 - DNA, 25 bp, Saccharomyces pastorianus
aaatttgttagtttgcccatggcgt

SEQ ID NO: 102323 - DNA, 25 bp, Saccharomyces pastorianus
aacagcgttctctaaaaatacctcg

SEQ ID NO: 102324 - DNA, 25 bp, Saccharomyces pastorianus
agggacttatatccgttaggactga

SEQ ID NO: 102325 - DNA, 25 bp, Saccharomyces pastorianus
tcgcacctgactccattgtggaata

SEQ ID NO: 102326 - DNA, 25 bp, Saccharomyces pastorianus
agcgtcactcttatatcaggatcgt

SEQ ID NO: 102327 - DNA, 25 bp, Saccharomyces pastorianus
gcaggaatatcagcgtcactcttat

SEQ ID NO: 102328 - DNA, 25 bp, Saccharomyces pastorianus
aaaagtcctttcattatcctcagaa

SEQ ID NO: 102329 - DNA, 25 bp, Saccharomyces pastorianus
ttttcagatctgctcttctacggaa

SEQ ID NO: 102330 - DNA, 25 bp, Saccharomyces pastorianus
ggaacaatggtacgccttacagaaa

SEQ ID NO: 102331 - DNA, 25 bp, Saccharomyces pastorianus
gatgtcaaaacttacgtagccgcaa

SEQ ID NO: 102332 - DNA, 25 bp, Saccharomyces pastorianus
actccgaacatctaccaattcattc

SEQ ID NO: 102333 - DNA, 25 bp, Saccharomyces pastorianus
tagctgccttttacgacgatgtaca

SEQ ID NO: 102334 - DNA, 25 bp, Saccharomyces pastorianus
aggaactgcttcttacctcaaagct

SEQ ID NO: 102335 - DNA, 25 bp, Saccharomyces pastorianus
tatcaacctgacaatttgcccgtta

SEQ ID NO: 102336 - DNA, 25 bp, Saccharomyces pastorianus
gatccatgaagtactctcaggtagc

SEQ ID NO: 102337 - DNA, 25 bp, Saccharomyces pastorianus
ttgagcgagcccgttaaccatgcat

SEQ ID NO: 102338 - DNA, 25 bp, Saccharomyces pastorianus
tgaagctactggcacaattgttttg

SEQ ID NO: 102339 - DNA, 25 bp, Saccharomyces pastorianus
gcctcggccttgaacaacttagaat

SEQ ID NO: 102340 - DNA, 25 bp, Saccharomyces pastorianus
atcaatgctacctcttcgttgtttg

SEQ ID NO: 102341 - DNA, 25 bp, Saccharomyces pastorianus
ggtattgtcccaagtgaccatcgcg

SEQ ID NO: 102342 - DNA, 25 bp, Saccharomyces pastorianus
aagactatgggcttctagcacctta

SEQ ID NO: 102343 - DNA, 25 bp, Saccharomyces pastorianus
gctgtaccagcgctagtattcgatg

SEQ ID NO: 102344 - DNA, 25 bp, Saccharomyces pastorianus
tggaacacaggatatctttgacatt

SEQ ID NO: 102345 - DNA, 25 bp, Saccharomyces pastorianus
tgaggctgggttaccagtgcaaact

SEQ ID NO: 102346 - DNA, 25 bp, Saccharomyces pastorianus
tctaccctgatgtttattcgctgca

SEQ ID NO: 102347 - DNA, 25 bp, Saccharomyces pastorianus
aattgttttgcctcaacccatcaat

SEQ ID NO: 102348 - DNA, 25 bp, Saccharomyces pastorianus
gatgttcagccattagacatgtcga

SEQ ID NO: 102349 - DNA, 25 bp, Saccharomyces pastorianus
atatatcctaggtgtgactggcaga

SEQ ID NO: 102350 - DNA, 25 bp, Saccharomyces pastorianus
actggaacaaaggatgctcccgcat

SEQ ID NO: 102351 - DNA, 25 bp, Saccharomyces pastorianus
ttctgttaatgcaccggaaaccgag

SEQ ID NO: 102352 - DNA, 25 bp, Saccharomyces pastorianus
ggttcgctgaattgcagccacctaa

SEQ ID NO: 102353 - DNA, 25 bp, Saccharomyces pastorianus
gcgtcgtcgcttttgatgttagatt

SEQ ID NO: 102354 - DNA, 25 bp, Saccharomyces pastorianus
ggatgctacactagaaccgggtgaa

SEQ ID NO: 102355 - DNA, 25 bp, Saccharomyces pastorianus
gttcgacaagttcccatctttgtta

SEQ ID NO: 102356 - DNA, 25 bp, Saccharomyces pastorianus
gcggagcttgggttgatgctatcca

SEQ ID NO: 102357 - DNA, 25 bp, Saccharomyces pastorianus
cattgggtttaatctgaggtgcgga

SEQ ID NO: 102358 - DNA, 25 bp, Saccharomyces pastorianus
aatcaccactttatggtcgcagcga

SEQ ID NO: 102359 - DNA, 25 bp, Saccharomyces pastorianus
tagcgttagtgctcaaactggcagc

SEQ ID NO: 102360 - DNA, 25 bp, Saccharomyces pastorianus
aagcggcttctaatgtacctaatgt

SEQ ID NO: 102361 - DNA, 25 bp, Saccharomyces pastorianus
gaataccattatttgcaccacttat

SEQ ID NO: 102362 - DNA, 25 bp, Saccharomyces pastorianus
ctgcatcttcatcccagagtgaatt

SEQ ID NO: 102363 - DNA, 25 bp, Saccharomyces pastorianus
ataccactctcattgggagcaactt

SEQ ID NO: 102364 - DNA, 25 bp, Saccharomyces pastorianus
gtggaggtacctcaatttcgataca

SEQ ID NO: 102365 - DNA, 25 bp, Saccharomyces pastorianus
accacttatggccactaatacttct

SEQ ID NO: 102366 - DNA, 25 bp, Saccharomyces pastorianus
aagtcagcggctacaccaaggcaaa

SEQ ID NO: 102367 - DNA, 25 bp, Saccharomyces pastorianus
caacgtgaatcctcttttggctaac

SEQ ID NO: 102368 - DNA, 25 bp, Saccharomyces pastorianus
gatctaatcctacttctgcatcttc

SEQ ID NO: 102369 - DNA, 25 bp, Saccharomyces pastorianus
tcgtcccagggttgttccaaatcaa

SEQ ID NO: 102370 - DNA, 25 bp, Saccharomyces pastorianus
gctaagtttgtgttgcatgctaagc

SEQ ID NO: 102371 - DNA, 25 bp, Saccharomyces pastorianus
tcacaattgggtttttaaagccgat

SEQ ID NO: 102372 - DNA, 25 bp, Saccharomyces pastorianus
acatgaattcaagaccgcggacaga

SEQ ID NO: 102373 - DNA, 25 bp, Saccharomyces pastorianus
tacatccatgtcttcattacctgat

SEQ ID NO: 102374 - DNA, 25 bp, Saccharomyces pastorianus
gaaacccaagctaaccaataaccat

SEQ ID NO: 102375 - DNA, 25 bp, Saccharomyces pastorianus
agtatcagctgagtaatgccaatag

SEQ ID NO: 102376 - DNA, 25 bp, Saccharomyces pastorianus
agatttagtaccagtgatgtcgtta

SEQ ID NO: 102377 - DNA, 25 bp, Saccharomyces pastorianus
gtgctgacaccgaactttttacatg

SEQ ID NO: 102378 - DNA, 25 bp, Saccharomyces pastorianus
gtactgtgacggaacattcccggaa

SEQ ID NO: 102379 - DNA, 25 bp, Saccharomyces pastorianus
aagggtattatgtgctgacaccgaa

SEQ ID NO: 102380 - DNA, 25 bp, Saccharomyces pastorianus
gatcttaacatctacttcgaatata

SEQ ID NO: 102381 - DNA, 25 bp, Saccharomyces pastorianus
ggaccccacataattactatttata

SEQ ID NO: 102382 - DNA, 25 bp, Saccharomyces pastorianus
aagacatggatgtattcgtatttgt

SEQ ID NO: 102383 - DNA, 25 bp, Saccharomyces pastorianus
tttggtgttaccgtggaccccacat

SEQ ID NO: 102384 - DNA, 25 bp, Saccharomyces pastorianus
cgtggaccccacataattactattt

SEQ ID NO: 102385 - DNA, 25 bp, Saccharomyces pastorianus
actatttatatcatcgttttcatca

SEQ ID NO: 102386 - DNA, 25 bp, Saccharomyces pastorianus
gtattcgtatttgtttgattgtcca

SEQ ID NO: 102387 - DNA, 25 bp, Saccharomyces pastorianus
gattgtccaattttggtgttaccgt

SEQ ID NO: 102388 - DNA, 25 bp, Saccharomyces pastorianus
attcgtatttgtttgattgtccaat

SEQ ID NO: 102389 - DNA, 25 bp, Saccharomyces pastorianus
atatcatcgttttcatcattttcta

SEQ ID NO: 102390 - DNA, 25 bp, Saccharomyces pastorianus
gtgttaccgtggaccccacataatt

SEQ ID NO: 102391 - DNA, 25 bp, Saccharomyces pastorianus
atcatcgttttcatcattttctacc

SEQ ID NO: 102392 - DNA, 25 bp, Saccharomyces pastorianus
gtttccatgatgtttactacgtcta

SEQ ID NO: 102393 - DNA, 25 bp, Saccharomyces pastorianus
actgcgtggttcatttctcagggta

SEQ ID NO: 102394 - DNA, 25 bp, Saccharomyces pastorianus
aagggcgcttttggacattcatgaa

SEQ ID NO: 102395 - DNA, 25 bp, Saccharomyces pastorianus
ttgtgccctcaaatatcattcttag

SEQ ID NO: 102396 - DNA, 25 bp, Saccharomyces pastorianus
gttctcttggatgatctgactgcgt

SEQ ID NO: 102397 - DNA, 25 bp, Saccharomyces pastorianus
cacagagagtgcttggaccatggga

SEQ ID NO: 102398 - DNA, 25 bp, Saccharomyces pastorianus
gacagctctctcatcaagattgcaa

SEQ ID NO: 102399 - DNA, 25 bp, Saccharomyces pastorianus
gagagccctgagttatccactacat

SEQ ID NO: 102400 - DNA, 25 bp, Saccharomyces pastorianus
tacgtctacgacaaagttctcttgg

SEQ ID NO: 102401 - DNA, 25 bp, Saccharomyces pastorianus
atgtcactatactcagcgttctttt

SEQ ID NO: 102402 - DNA, 25 bp, Saccharomyces pastorianus
gcaagagtcactttccaagcaggat

SEQ ID NO: 102403 - DNA, 25 bp, Saccharomyces pastorianus
attgatgtttttgttcaggtcgcat

SEQ ID NO: 102404 - DNA, 25 bp, Saccharomyces pastorianus
atccggaaattcctgcattcaagta

SEQ ID NO: 102405 - DNA, 25 bp, Saccharomyces pastorianus
acacatgctgtatattattccacca

SEQ ID NO: 102406 - DNA, 25 bp, Saccharomyces pastorianus
cagaggccattgaagtcgctcggaa

SEQ ID NO: 102407 - DNA, 25 bp, Saccharomyces pastorianus
gagtctgcaatgatacataatccgg

SEQ ID NO: 102408 - DNA, 25 bp, Saccharomyces pastorianus
ggtagatttcatttggagtctgcaa

SEQ ID NO: 102409 - DNA, 25 bp, Saccharomyces pastorianus
caccacaaatcaagcctctatcgag

SEQ ID NO: 102410 - DNA, 25 bp, Saccharomyces pastorianus
gatgccatggtattcatcggtgatg

SEQ ID NO: 102411 - DNA, 25 bp, Saccharomyces pastorianus
gtttttggtctgatcttaggtgcat

SEQ ID NO: 102412 - DNA, 25 bp, Saccharomyces pastorianus
tttccccaaaagctcgcaatgttcg

SEQ ID NO: 102413 - DNA, 25 bp, Saccharomyces pastorianus
aggtcgcatgtcctagactgtccat

SEQ ID NO: 102414 - DNA, 25 bp, Saccharomyces pastorianus
gaaatattcctgcagtataacaact

SEQ ID NO: 102415 - DNA, 25 bp, Saccharomyces pastorianus
ttacacaactaaccctatcgcaggt

SEQ ID NO: 102416 - DNA, 25 bp, Saccharomyces pastorianus
tgagcaatggttcagcaagcttgtt

SEQ ID NO: 102417 - DNA, 25 bp, Saccharomyces pastorianus
ggtcactgttttacctcttacacaa

SEQ ID NO: 102418 - DNA, 25 bp, Saccharomyces pastorianus
gaagcgattcgaggtctattattgt

SEQ ID NO: 102419 - DNA, 25 bp, Saccharomyces pastorianus
gggaagaattaacacctggtcactg

SEQ ID NO: 102420 - DNA, 25 bp, Saccharomyces pastorianus
gactatggtttgaatgcatcagcaa

SEQ ID NO: 102421 - DNA, 25 bp, Saccharomyces pastorianus
ccctatcgcaggtgactatggtttg

SEQ ID NO: 102422 - DNA, 25 bp, Saccharomyces pastorianus
agcaagcttgttgatgaactgggaa

SEQ ID NO: 102423 - DNA, 25 bp, Saccharomyces pastorianus
atcagcaatagacggccacacggaa

SEQ ID NO: 102424 - DNA, 25 bp, Saccharomyces pastorianus
cacggaagagttagtggcgacccac

SEQ ID NO: 102425 - DNA, 25 bp, Saccharomyces pastorianus
caacatcttctccaatagggccaag

SEQ ID NO: 102426 - DNA, 25 bp, Saccharomyces pastorianus
aaacttgttattgaggacgccttgc

SEQ ID NO: 102427 - DNA, 25 bp, Saccharomyces pastorianus
aacttgggcctttcctcaaatgata

SEQ ID NO: 102428 - DNA, 25 bp, Saccharomyces pastorianus
tttgtcaaacctagcatccttctac

SEQ ID NO: 102429 - DNA, 25 bp, Saccharomyces pastorianus
aatatggacagctcttcttcgccaa

SEQ ID NO: 102430 - DNA, 25 bp, Saccharomyces pastorianus
aaagatctacttccatgtcccattc

SEQ ID NO: 102431 - DNA, 25 bp, Saccharomyces pastorianus
actttccctcaaccttatggtgatg

SEQ ID NO: 102432 - DNA, 25 bp, Saccharomyces pastorianus
acaaaaccaacgaccagctcataat

SEQ ID NO: 102433 - DNA, 25 bp, Saccharomyces pastorianus
tagggccaagagatccaacggtgca

SEQ ID NO: 102434 - DNA, 25 bp, Saccharomyces pastorianus
acagcggcagctaaactatacttac

SEQ ID NO: 102435 - DNA, 25 bp, Saccharomyces pastorianus
tgccctcattcgactcatttgtaga

SEQ ID NO: 102436 - DNA, 25 bp, Saccharomyces pastorianus
ttgcacatgcgttcgatatacccca

SEQ ID NO: 102437 - DNA, 25 bp, Saccharomyces pastorianus
tatggctttggcgagggaaatccct

SEQ ID NO: 102438 - DNA, 25 bp, Saccharomyces pastorianus
gagcagcatgacttggttgtcccaa

SEQ ID NO: 102439 - DNA, 25 bp, Saccharomyces pastorianus
aatgcaacgggtattgccctgggcc

SEQ ID NO: 102440 - DNA, 25 bp, Saccharomyces pastorianus
acagggtttatgcagggtgcccaac

SEQ ID NO: 102441 - DNA, 25 bp, Saccharomyces pastorianus
ttacctggtcctatacttcattctg

SEQ ID NO: 102442 - DNA, 25 bp, Saccharomyces pastorianus
ggacatatccactttattagctgcg

SEQ ID NO: 102443 - DNA, 25 bp, Saccharomyces pastorianus
tttggagttcaatacacctgccttc

SEQ ID NO: 102444 - DNA, 25 bp, Saccharomyces pastorianus
cctgaacacgttgcaccatttgatg

SEQ ID NO: 102445 - DNA, 25 bp, Saccharomyces pastorianus
gtgtgccgcttcaacaacgctttat

SEQ ID NO: 102446 - DNA, 25 bp, Saccharomyces pastorianus
tcttccgttcgatatcaatgaccct

SEQ ID NO: 102447 - DNA, 25 bp, Saccharomyces pastorianus
atacaatcctggcaacaagttgaca

SEQ ID NO: 102448 - DNA, 25 bp, Saccharomyces pastorianus
gactctaagtcattacgttccatat

SEQ ID NO: 102449 - DNA, 25 bp, Saccharomyces pastorianus
cattacgcacatatagaggactcat

SEQ ID NO: 102450 - DNA, 25 bp, Saccharomyces pastorianus
ggagctggtcgacagatacaatcct

SEQ ID NO: 102451 - DNA, 25 bp, Saccharomyces pastorianus
gagagactcgcatgagaacatcaac

SEQ ID NO: 102452 - DNA, 25 bp, Saccharomyces pastorianus
gaatttgtttattgccgactctaag

SEQ ID NO: 102453 - DNA, 25 bp, Saccharomyces pastorianus
ggacatcatcaagttcttggacaac

SEQ ID NO: 102454 - DNA, 25 bp, Saccharomyces pastorianus
ggatagaccaagaacattacgcaca

SEQ ID NO: 102455 - DNA, 25 bp, Saccharomyces pastorianus
gatattcgaacacgctttggacatc

SEQ ID NO: 102456 - DNA, 25 bp, Saccharomyces pastorianus
gaggactcataagagccattctgaa

SEQ ID NO: 102457 - DNA, 25 bp, Saccharomyces pastorianus
atccggtaagcgacagatctttgaa

SEQ ID NO: 102458 - DNA, 25 bp, Saccharomyces pastorianus
gtcccgtttgcagtgagactttcaa

SEQ ID NO: 102459 - DNA, 25 bp, Saccharomyces pastorianus
ttacaactctttacgctacattcac

SEQ ID NO: 102460 - DNA, 25 bp, Saccharomyces pastorianus
gaagacaagagattgcctgcaccct

SEQ ID NO: 102461 - DNA, 25 bp, Saccharomyces pastorianus
agagacggaaactgccacaacagca

SEQ ID NO: 102462 - DNA, 25 bp, Saccharomyces pastorianus
tagaattacctccaaacctgcggtg

SEQ ID NO: 102463 - DNA, 25 bp, Saccharomyces pastorianus
acaggcattaccatttgctcatcac

SEQ ID NO: 102464 - DNA, 25 bp, Saccharomyces pastorianus
gagcgacttttattccatgtatggc

SEQ ID NO: 102465 - DNA, 25 bp, Saccharomyces pastorianus
tgctcatcacattcagtctcaatta

SEQ ID NO: 102466 - DNA, 25 bp, Saccharomyces pastorianus
aaatgacttattcttgagcgacttt

SEQ ID NO: 102467 - DNA, 25 bp, Saccharomyces pastorianus
aatgaccctttattgatatacctgt

SEQ ID NO: 102468 - DNA, 25 bp, Saccharomyces pastorianus
aggaaaaattgtcccgtttgcagtg

SEQ ID NO: 102469 - DNA, 25 bp, Saccharomyces pastorianus
attttccaggatatcatcaccggag

SEQ ID NO: 102470 - DNA, 25 bp, Saccharomyces pastorianus
gagcagatcgagcaaattccaatgg

SEQ ID NO: 102471 - DNA, 25 bp, Saccharomyces pastorianus
ttgaccgccgaaggttatggtaaca

SEQ ID NO: 102472 - DNA, 25 bp, Saccharomyces pastorianus
tggtaacatcatactgtcccttttc

SEQ ID NO: 102473 - DNA, 25 bp, Saccharomyces pastorianus
taatgaggatactccccaggctaaa

SEQ ID NO: 102474 - DNA, 25 bp, Saccharomyces pastorianus
tgtcccttttcgatggagagcccta

SEQ ID NO: 102475 - DNA, 25 bp, Saccharomyces pastorianus
gaacgtgatgctaggttctacatct

SEQ ID NO: 102476 - DNA, 25 bp, Saccharomyces pastorianus
tattccgatatttttccagattgac

SEQ ID NO: 102477 - DNA, 25 bp, Saccharomyces pastorianus
aaatgatactcttcgttatacgcaa

SEQ ID NO: 102478 - DNA, 25 bp, Saccharomyces pastorianus
atcaacaggcttagcgatcatcgtt

SEQ ID NO: 102479 - DNA, 25 bp, Saccharomyces pastorianus
gagagccctatgattcatggcaaat

SEQ ID NO: 102480 - DNA, 25 bp, Saccharomyces pastorianus
aaagcctactttgataccagataat

SEQ ID NO: 102481 - DNA, 25 bp, Saccharomyces pastorianus
gagttctgatgatccggtaacgtat

SEQ ID NO: 102482 - DNA, 25 bp, Saccharomyces pastorianus
gtaacgtataaatccgcatccgggt

SEQ ID NO: 102483 - DNA, 25 bp, Saccharomyces pastorianus
ttatcagattttgaccagcatgaga

SEQ ID NO: 102484 - DNA, 25 bp, Saccharomyces pastorianus
gtatgcctccttcaattttatcaga

SEQ ID NO: 102485 - DNA, 25 bp, Saccharomyces pastorianus
atccgcatccgggtatggtaaatat

SEQ ID NO: 102486 - DNA, 25 bp, Saccharomyces pastorianus
gaaacttccaatcggcattcaagtg

SEQ ID NO: 102487 - DNA, 25 bp, Saccharomyces pastorianus
gaaaaacgtcgcagtatgcctcctt

SEQ ID NO: 102488 - DNA, 25 bp, Saccharomyces pastorianus
ttcgagaactggatcaagggactat

SEQ ID NO: 102489 - DNA, 25 bp, Saccharomyces pastorianus
attacaggtctcattctccagtgaa

SEQ ID NO: 102490 - DNA, 25 bp, Saccharomyces pastorianus
aaagaatttccagcgaagccacaga

SEQ ID NO: 102491 - DNA, 25 bp, Saccharomyces pastorianus
tatattatctgacggtgctgctgct

SEQ ID NO: 102492 - DNA, 25 bp, Saccharomyces pastorianus
tgctgctgctttagtcggttcatta

SEQ ID NO: 102493 - DNA, 25 bp, Saccharomyces pastorianus
ggtacaagagttgctgatgccacaa

SEQ ID NO: 102494 - DNA, 25 bp, Saccharomyces pastorianus
gagggttctatcaagacaccagatt

SEQ ID NO: 102495 - DNA, 25 bp, Saccharomyces pastorianus
cattaggtgttgttccaagcgccaa

SEQ ID NO: 102496 - DNA, 25 bp, Saccharomyces pastorianus
ttgctaacccaattgccactataag

SEQ ID NO: 102497 - DNA, 25 bp, Saccharomyces pastorianus
caagcgccaacgtaggtccagaaat

SEQ ID NO: 102498 - DNA, 25 bp, Saccharomyces pastorianus
gattccatggtttataggctgttca

SEQ ID NO: 102499 - DNA, 25 bp, Saccharomyces pastorianus
gatagtggcaccaaacctatacggg

SEQ ID NO: 102500 - DNA, 25 bp, Saccharomyces pastorianus
gaagctgcccaagatatctacaagg

SEQ ID NO: 102501 - DNA, 25 bp, Saccharomyces pastorianus
agaggccaagccactttgacagtga

SEQ ID NO: 102502 - DNA, 25 bp, Saccharomyces pastorianus
gacaagacccaactcgagcgacaaa

SEQ ID NO: 102503 - DNA, 25 bp, Saccharomyces pastorianus
aagcggagatgttcggatccctctt

SEQ ID NO: 102504 - DNA, 25 bp, Saccharomyces pastorianus
gtaacagaacaaccgcatgccaaca

SEQ ID NO: 102505 - DNA, 25 bp, Saccharomyces pastorianus
caaggacaagtaaccctgcagggtc

SEQ ID NO: 102506 - DNA, 25 bp, Saccharomyces pastorianus
gacgacactacattgaatacggcgc

SEQ ID NO: 102507 - DNA, 25 bp, Saccharomyces pastorianus
gtcgaagcatatgaccatgccagat

SEQ ID NO: 102508 - DNA, 25 bp, Saccharomyces pastorianus
gatccctctttggagtttctgccat

SEQ ID NO: 102509 - DNA, 25 bp, Saccharomyces pastorianus
gtgttatccagcgaactatgtactt

SEQ ID NO: 102510 - DNA, 25 bp, Saccharomyces pastorianus
gaaaaggctgtacaggccacctaaa

SEQ ID NO: 102511 - DNA, 25 bp, Saccharomyces pastorianus
acatccatgggagttgtcgagacct

SEQ ID NO: 102512 - DNA, 25 bp, Saccharomyces pastorianus
ataggctcagatcgctcttttacaa

SEQ ID NO: 102513 - DNA, 25 bp, Saccharomyces pastorianus
tatcgcgggcctcagaaatattcca

SEQ ID NO: 102514 - DNA, 25 bp, Saccharomyces pastorianus
gactctcagatcacgtgcaagcttt

SEQ ID NO: 102515 - DNA, 25 bp, Saccharomyces pastorianus
atatcgaatagcttctcctcaacag

SEQ ID NO: 102516 - DNA, 25 bp, Saccharomyces pastorianus
gcccacaagctctgcgacagttagt

SEQ ID NO: 102517 - DNA, 25 bp, Saccharomyces pastorianus
gcttcaaaagccctggagtgtctat

SEQ ID NO: 102518 - DNA, 25 bp, Saccharomyces pastorianus
gcataactttgctgtgcgcacgagg

SEQ ID NO: 102519 - DNA, 25 bp, Saccharomyces pastorianus
gaaagtgctacccactgcataactt

SEQ ID NO: 102520 - DNA, 25 bp, Saccharomyces pastorianus
aacagagtatatgtttccgcccaca

SEQ ID NO: 102521 - DNA, 25 bp, Saccharomyces pastorianus
gccaggttaaagatattgcccagtt

SEQ ID NO: 102522 - DNA, 25 bp, Saccharomyces pastorianus
attgcccagtttaatccgttcatga

SEQ ID NO: 102523 - DNA, 25 bp, Saccharomyces pastorianus
taaatagcctaagccgtatcgcggg

SEQ ID NO: 102524 - DNA, 25 bp, Saccharomyces pastorianus
aactccagtattgggcaatccggtt

SEQ ID NO: 102525 - DNA, 25 bp, Saccharomyces pastorianus
gatttacattcctgattacactgac

SEQ ID NO: 102526 - DNA, 25 bp, Saccharomyces pastorianus
gagcgtcgttttttataagcctcca

SEQ ID NO: 102527 - DNA, 25 bp, Saccharomyces pastorianus
aagtgtcattattcctggtattgtc

SEQ ID NO: 102528 - DNA, 25 bp, Saccharomyces pastorianus
gcaagcttgatggtctttcactcga

SEQ ID NO: 102529 - DNA, 25 bp, Saccharomyces pastorianus
atcaagggtgtcaagagcgtcgttt

SEQ ID NO: 102530 - DNA, 25 bp, Saccharomyces pastorianus
taagcctccaaacaatcctgaattt

SEQ ID NO: 102531 - DNA, 25 bp, Saccharomyces pastorianus
gtatacggaaagactgcaccattat

SEQ ID NO: 102532 - DNA, 25 bp, Saccharomyces pastorianus
gtattgtcaaatccaccgggtatga

SEQ ID NO: 102533 - DNA, 25 bp, Saccharomyces pastorianus
gaacgcctttctaggtaataccgat

SEQ ID NO: 102534 - DNA, 25 bp, Saccharomyces pastorianus
gagtactctagccaaagacagctca

SEQ ID NO: 102535 - DNA, 25 bp, Saccharomyces pastorianus
gaatttcacctttagtgttccgcta

SEQ ID NO: 102536 - DNA, 25 bp, Saccharomyces pastorianus
gttctgatgttttactcggcaacga

SEQ ID NO: 102537 - DNA, 25 bp, Saccharomyces pastorianus
tagtgttccgctatccattaatgaa

SEQ ID NO: 102538 - DNA, 25 bp, Saccharomyces pastorianus
agatggcaagcgaatcagtttcccc

SEQ ID NO: 102539 - DNA, 25 bp, Saccharomyces pastorianus
gtattggtacagtccttgcatatta

SEQ ID NO: 102540 - DNA, 25 bp, Saccharomyces pastorianus
atcagtttccccagctatagtaatc

SEQ ID NO: 102541 - DNA, 25 bp, Saccharomyces pastorianus
gaggattattccagcattacaaaga

SEQ ID NO: 102542 - DNA, 25 bp, Saccharomyces pastorianus
atccttgatatctaaaccattttgg

SEQ ID NO: 102543 - DNA, 25 bp, Saccharomyces pastorianus
aattgctatgtatactcacctgatt

SEQ ID NO: 102544 - DNA, 25 bp, Saccharomyces pastorianus
aagaaatctgcccacagctgacaat

SEQ ID NO: 102545 - DNA, 25 bp, Saccharomyces pastorianus
gacaatcttttgtgctactttcata

SEQ ID NO: 102546 - DNA, 25 bp, Saccharomyces pastorianus
ggtgcagcttattgctagtcttcta

SEQ ID NO: 102547 - DNA, 25 bp, Saccharomyces pastorianus
aagtttcggaatacactcgtgcttc

SEQ ID NO: 102548 - DNA, 25 bp, Saccharomyces pastorianus
atcatgcgccatttgttaagtctag

SEQ ID NO: 102549 - DNA, 25 bp, Saccharomyces pastorianus
cgtgcttccaacctaagaccaatta

SEQ ID NO: 102550 - DNA, 25 bp, Saccharomyces pastorianus
gtctatttcattcactttacctgga

SEQ ID NO: 102551 - DNA, 25 bp, Saccharomyces pastorianus
gtgatgcactagacgcaacttctta

SEQ ID NO: 102552 - DNA, 25 bp, Saccharomyces pastorianus
ggcgttgtctgtccagtcatttgca

SEQ ID NO: 102553 - DNA, 25 bp, Saccharomyces pastorianus
aagcatgtataccttggcgttgtct

SEQ ID NO: 102554 - DNA, 25 bp, Saccharomyces pastorianus
ggctcggattctttggctattggga

SEQ ID NO: 102555 - DNA, 25 bp, Saccharomyces pastorianus
gggctacaggttcaacgtctatttc

SEQ ID NO: 102556 - DNA, 25 bp, Saccharomyces pastorianus
tcttctacggactatctgtgatgtt

SEQ ID NO: 102557 - DNA, 25 bp, Saccharomyces pastorianus
acatggtccgccttatatttgattg

SEQ ID NO: 102558 - DNA, 25 bp, Saccharomyces pastorianus
ggctggcttcattgctacatggtcc

SEQ ID NO: 102559 - DNA, 25 bp, Saccharomyces pastorianus
acccgctactgacgatgccaaagat

SEQ ID NO: 102560 - DNA, 25 bp, Saccharomyces pastorianus
gatgaacttctatcaccatttcgcc

SEQ ID NO: 102561 - DNA, 25 bp, Saccharomyces pastorianus
tttaaagtgcctccaacgcaatctc

SEQ ID NO: 102562 - DNA, 25 bp, Saccharomyces pastorianus
gggtattctctaaatcttctactgc

SEQ ID NO: 102563 - DNA, 25 bp, Saccharomyces pastorianus
ggtgctatccccaagctttaaagtg

SEQ ID NO: 102564 - DNA, 25 bp, Saccharomyces pastorianus
ttgacaaggacaccttatcctgcgc

SEQ ID NO: 102565 - DNA, 25 bp, Saccharomyces pastorianus
tgctatcctcggtttcattggccaa

SEQ ID NO: 102566 - DNA, 25 bp, Saccharomyces pastorianus
catttcgccggctatatgcattgac

SEQ ID NO: 102567 - DNA, 25 bp, Saccharomyces pastorianus
aaacgcagcactattagcatccact

SEQ ID NO: 102568 - DNA, 25 bp, Saccharomyces pastorianus
ggttgggattcttcgtccaacgaat

SEQ ID NO: 102569 - DNA, 25 bp, Saccharomyces pastorianus
atggatgtggccaatgtgcactcct

SEQ ID NO: 102570 - DNA, 25 bp, Saccharomyces pastorianus
agcaccacctttacagtctttgaaa

SEQ ID NO: 102571 - DNA, 25 bp, Saccharomyces pastorianus
aaccgtggtgctcaacgatattcta

SEQ ID NO: 102572 - DNA, 25 bp, Saccharomyces pastorianus
actctgactcagattttctacaagg

SEQ ID NO: 102573 - DNA, 25 bp, Saccharomyces pastorianus
agtgctactgacacgggagctggaa

SEQ ID NO: 102574 - DNA, 25 bp, Saccharomyces pastorianus
atggccatggttctagacaagggtc

SEQ ID NO: 102575 - DNA, 25 bp, Saccharomyces pastorianus
ggtactgatctatatgcatttttgt

SEQ ID NO: 102576 - DNA, 25 bp, Saccharomyces pastorianus
caatgtgcactcctatgccatgaat

SEQ ID NO: 102577 - DNA, 25 bp, Saccharomyces pastorianus
gatattctaccaaaacagcaccacc

SEQ ID NO: 102578 - DNA, 25 bp, Saccharomyces pastorianus
tagcagaccgcaataccagaagaac

SEQ ID NO: 102579 - DNA, 25 bp, Saccharomyces pastorianus
acttagctgctgctgtcagtgattt

SEQ ID NO: 102580 - DNA, 25 bp, Saccharomyces pastorianus
gttccatattcaagactacctcagc

SEQ ID NO: 102581 - DNA, 25 bp, Saccharomyces pastorianus
tgaccctgtccctaagtttttgaga

SEQ ID NO: 102582 - DNA, 25 bp, Saccharomyces pastorianus
actgatgaatccatgctgctttaca

SEQ ID NO: 102583 - DNA, 25 bp, Saccharomyces pastorianus
aagcgatgatcgtttcgttcaaatt

SEQ ID NO: 102584 - DNA, 25 bp, Saccharomyces pastorianus
caaatgtacacaagccctggataga

SEQ ID NO: 102585 - DNA, 25 bp, Saccharomyces pastorianus
gtggttgcttgttttacttagctgc

SEQ ID NO: 102586 - DNA, 25 bp, Saccharomyces pastorianus
ggactacgcctgatggtaaactgat

SEQ ID NO: 102587 - DNA, 25 bp, Saccharomyces pastorianus
gaagtcatcgcacgccatgacaaat

SEQ ID NO: 102588 - DNA, 25 bp, Saccharomyces pastorianus
gaggagaaactacttttactaccat

SEQ ID NO: 102589 - DNA, 25 bp, Saccharomyces pastorianus
tgattgtgaatcttgaccctgtccc

SEQ ID NO: 102590 - DNA, 25 bp, Saccharomyces pastorianus
gtgaagcttcacaaaggcaacactt

SEQ ID NO: 102591 - DNA, 25 bp, Saccharomyces pastorianus
tataactgtgggaatgccggtcatt

SEQ ID NO: 102592 - DNA, 25 bp, Saccharomyces pastorianus
tataacgacgatgcatacgacctcc

SEQ ID NO: 102593 - DNA, 25 bp, Saccharomyces pastorianus
agaagtcaccatttagcgcacagaa

SEQ ID NO: 102594 - DNA, 25 bp, Saccharomyces pastorianus
acctccctggctcaaggacttatag

SEQ ID NO: 102595 - DNA, 25 bp, Saccharomyces pastorianus
aaggtcatcgagagtgccgaacact

SEQ ID NO: 102596 - DNA, 25 bp, Saccharomyces pastorianus
cattttggcgatgactgtgctgaaa

SEQ ID NO: 102597 - DNA, 25 bp, Saccharomyces pastorianus
tagatttccccagaagtagccaaaa

SEQ ID NO: 102598 - DNA, 25 bp, Saccharomyces pastorianus
aaaagagttcagacacaccccttag

SEQ ID NO: 102599 - DNA, 25 bp, Saccharomyces pastorianus
gcattttgcggtgataacttagcca

SEQ ID NO: 102600 - DNA, 25 bp, Saccharomyces pastorianus
gattattcgagccagttcagctata

SEQ ID NO: 102601 - DNA, 25 bp, Saccharomyces pastorianus
ttggttatcaccacgtcaagttttg

SEQ ID NO: 102602 - DNA, 25 bp, Saccharomyces pastorianus
ttctatgccgatgtcgatttgaccg

SEQ ID NO: 102603 - DNA, 25 bp, Saccharomyces pastorianus
ttgaccgagcattttgctggtaaat

SEQ ID NO: 102604 - DNA, 25 bp, Saccharomyces pastorianus
gtaaaaatgctactgtttctgttga

SEQ ID NO: 102605 - DNA, 25 bp, Saccharomyces pastorianus
ttttggttgtgccagttggtgtcaa

SEQ ID NO: 102606 - DNA, 25 bp, Saccharomyces pastorianus
cgatttgaccggtaacactctgcaa

SEQ ID NO: 102607 - DNA, 25 bp, Saccharomyces pastorianus
gggtatgctgaagacgtccgtaaca

SEQ ID NO: 102608 - DNA, 25 bp, Saccharomyces pastorianus
gaaagaccggtcatgatccatcgtg

SEQ ID NO: 102609 - DNA, 25 bp, Saccharomyces pastorianus
aattgcacgatgctggcttctatgc

SEQ ID NO: 102610 - DNA, 25 bp, Saccharomyces pastorianus
aaatggccattttggttatcaccac

SEQ ID NO: 102611 - DNA, 25 bp, Saccharomyces pastorianus
atccatcgtgccattttagggtctg

SEQ ID NO: 102612 - DNA, 25 bp, Saccharomyces pastorianus
aggaacggcgacaacagctcgtctt

SEQ ID NO: 102613 - DNA, 25 bp, Saccharomyces pastorianus
ccctcaaggtggtcgatgtactttt

SEQ ID NO: 102614 - DNA, 25 bp, Saccharomyces pastorianus
tcctgttctgtcttcctgggaaaaa

SEQ ID NO: 102615 - DNA, 25 bp, Saccharomyces pastorianus
gaacgtgaccccacaggtgttttga

SEQ ID NO: 102616 - DNA, 25 bp, Saccharomyces pastorianus
ttgctggtaggtccatgtatacacg

SEQ ID NO: 102617 - DNA, 25 bp, Saccharomyces pastorianus
gagaagattgccagacccgaaagtc

SEQ ID NO: 102618 - DNA, 25 bp, Saccharomyces pastorianus
atgcgcttattagattcaggctccc

SEQ ID NO: 102619 - DNA, 25 bp, Saccharomyces pastorianus
gtagaaaatctcctgacccaattga

SEQ ID NO: 102620 - DNA, 25 bp, Saccharomyces pastorianus
gacaacgactttggagcctttcaac

SEQ ID NO: 102621 - DNA, 25 bp, Saccharomyces pastorianus
atgctaccgataattcctcttctga

SEQ ID NO: 102622 - DNA, 25 bp, Saccharomyces pastorianus
taacggctcgccctttatgaaccaa

SEQ ID NO: 102623 - DNA, 25 bp, Saccharomyces pastorianus
caactgtcattggtattcgtggtag

SEQ ID NO: 102624 - DNA, 25 bp, Saccharomyces pastorianus
aatatgacccgtatactaccacaac

SEQ ID NO: 102625 - DNA, 25 bp, Saccharomyces pastorianus
tccctttcttttacaccaacaactg

SEQ ID NO: 102626 - DNA, 25 bp, Saccharomyces pastorianus
agtgatcaagctatacccaaatttc

SEQ ID NO: 102627 - DNA, 25 bp, Saccharomyces pastorianus
tactaccacaacaatcgagatatat

SEQ ID NO: 102628 - DNA, 25 bp, Saccharomyces pastorianus
ggaacctgtagcactaattgaaact

SEQ ID NO: 102629 - DNA, 25 bp, Saccharomyces pastorianus
gttctttccacgacagcaagggcaa

SEQ ID NO: 102630 - DNA, 25 bp, Saccharomyces pastorianus
ggtagcaacagctgttctttccacg

SEQ ID NO: 102631 - DNA, 25 bp, Saccharomyces pastorianus
gatagggaacccaaggaacctgtag

SEQ ID NO: 102632 - DNA, 25 bp, Saccharomyces pastorianus
gaagatgcattcagttatccgaaga

SEQ ID NO: 102633 - DNA, 25 bp, Saccharomyces pastorianus
gcaaatgaaagatgttaacgctcca

SEQ ID NO: 102634 - DNA, 25 bp, Saccharomyces pastorianus
tcgcttatctaatggcagacatctc

SEQ ID NO: 102635 - DNA, 25 bp, Saccharomyces pastorianus
aacagttttctgattctcacggcga

SEQ ID NO: 102636 - DNA, 25 bp, Saccharomyces pastorianus
cccagaagtcagtttgaagtctttg

SEQ ID NO: 102637 - DNA, 25 bp, Saccharomyces pastorianus
atataatcctgacaccacatattgg

SEQ ID NO: 102638 - DNA, 25 bp, Saccharomyces pastorianus
ttctcacggcgagatcgcttatcta

SEQ ID NO: 102639 - DNA, 25 bp, Saccharomyces pastorianus
acaattcgctgctatgaaggacggg

SEQ ID NO: 102640 - DNA, 25 bp, Saccharomyces pastorianus
cagctggacttctgagttggtttca

SEQ ID NO: 102641 - DNA, 25 bp, Saccharomyces pastorianus
gaccgttaatgatatcttatccgat

SEQ ID NO: 102642 - DNA, 25 bp, Saccharomyces pastorianus
atctctgatccaagccgtcaaggcc

SEQ ID NO: 102643 - DNA, 25 bp, Saccharomyces pastorianus
taacgatgaacttaacagctggact

SEQ ID NO: 102644 - DNA, 25 bp, Saccharomyces pastorianus
gaagtctttggactacgatcaagag

SEQ ID NO: 102645 - DNA, 25 bp, Saccharomyces pastorianus
gaaactatagccacttactgctgga

SEQ ID NO: 102646 - DNA, 25 bp, Saccharomyces pastorianus
gaaagcgccttaatcatgcctgatc

SEQ ID NO: 102647 - DNA, 25 bp, Saccharomyces pastorianus
tactgctggaatatcggcgtcaatt

SEQ ID NO: 102648 - DNA, 25 bp, Saccharomyces pastorianus
gaatgttttctggaggcgttgacta

SEQ ID NO: 102649 - DNA, 25 bp, Saccharomyces pastorianus
gaggtcgaactacgcatattggata

SEQ ID NO: 102650 - DNA, 25 bp, Saccharomyces pastorianus
gcgctacttattgatatctcgtcga

SEQ ID NO: 102651 - DNA, 25 bp, Saccharomyces pastorianus
acacagatggtgtccttcaaacaga

SEQ ID NO: 102652 - DNA, 25 bp, Saccharomyces pastorianus
ttgactatacatctggaaagcgcct

SEQ ID NO: 102653 - DNA, 25 bp, Saccharomyces pastorianus
agctggctgcgaattttactggaaa

SEQ ID NO: 102654 - DNA, 25 bp, Saccharomyces pastorianus
aagatagccgcgtggatgcgctact

SEQ ID NO: 102655 - DNA, 25 bp, Saccharomyces pastorianus
gaacgggaactctgtagctggctgc

SEQ ID NO: 102656 - DNA, 25 bp, Saccharomyces pastorianus
ggatttccggcctctataacagaac

SEQ ID NO: 102657 - DNA, 25 bp, Saccharomyces pastorianus
agtctattctgaagctctttctccg

SEQ ID NO: 102658 - DNA, 25 bp, Saccharomyces pastorianus
agtcgagtcgtggttacaggatatc

SEQ ID NO: 102659 - DNA, 25 bp, Saccharomyces pastorianus
gagagttgcattcgccttatttgta

SEQ ID NO: 102660 - DNA, 25 bp, Saccharomyces pastorianus
gttcccctaaatccgagagcttcta

SEQ ID NO: 102661 - DNA, 25 bp, Saccharomyces pastorianus
taggtacgttacgagctctgtactc

SEQ ID NO: 102662 - DNA, 25 bp, Saccharomyces pastorianus
ttgatcttaactcaagcttgcccac

SEQ ID NO: 102663 - DNA, 25 bp, Saccharomyces pastorianus
gagcttctatcaagaggttctgcct

SEQ ID NO: 102664 - DNA, 25 bp, Saccharomyces pastorianus
gtcgtcaaccctacaggagcttgat

SEQ ID NO: 102665 - DNA, 25 bp, Saccharomyces pastorianus
taaatggcactttaccaccagttcc

SEQ ID NO: 102666 - DNA, 25 bp, Saccharomyces pastorianus
agatgaaacactatgcctcgataat

SEQ ID NO: 102667 - DNA, 25 bp, Saccharomyces pastorianus
aatttcgaaatttaactgccctgat

SEQ ID NO: 102668 - DNA, 25 bp, Saccharomyces pastorianus
aaagtgtatcacgtccccgtcaatt

SEQ ID NO: 102669 - DNA, 25 bp, Saccharomyces pastorianus
aagagtgatcgctccgtaaatctag

SEQ ID NO: 102670 - DNA, 25 bp, Saccharomyces pastorianus
gccatttctgctaatttcgttaaca

SEQ ID NO: 102671 - DNA, 25 bp, Saccharomyces pastorianus
ttttctgcctgtcatggtctgtcat

SEQ ID NO: 102672 - DNA, 25 bp, Saccharomyces pastorianus
atatcgcttctatcgttaacttcat

SEQ ID NO: 102673 - DNA, 25 bp, Saccharomyces pastorianus
aaacctccctctgaatcactaatat

SEQ ID NO: 102674 - DNA, 25 bp, Saccharomyces pastorianus
atagttgctgtattgtttccaccgc

SEQ ID NO: 102675 - DNA, 25 bp, Saccharomyces pastorianus
ataacctcgtttatcatggtgccat

SEQ ID NO: 102676 - DNA, 25 bp, Saccharomyces pastorianus
taatgtctttcaaatccgtgttttc

SEQ ID NO: 102677 - DNA, 25 bp, Saccharomyces pastorianus
tgtttccaccgctatacatcagtga

SEQ ID NO: 102678 - DNA, 25 bp, Saccharomyces pastorianus
gaggatagttccattttacaaagta

SEQ ID NO: 102679 - DNA, 25 bp, Saccharomyces pastorianus
tcgtcggctgctgttatcatgaggt

SEQ ID NO: 102680 - DNA, 25 bp, Saccharomyces pastorianus
tttttcagatgacacccttattggt

SEQ ID NO: 102681 - DNA, 25 bp, Saccharomyces pastorianus
cattatccaaggtaattcactgatg

SEQ ID NO: 102682 - DNA, 25 bp, Saccharomyces pastorianus
gttttcttatttatcatctacacta

SEQ ID NO: 102683 - DNA, 25 bp, Saccharomyces pastorianus
gttaattgtctcgaactgttgataa

SEQ ID NO: 102684 - DNA, 25 bp, Saccharomyces pastorianus
tttttggaacctagctggtcgtcgt

SEQ ID NO: 102685 - DNA, 25 bp, Saccharomyces pastorianus
gcggtggaaacaatacagcaactat

SEQ ID NO: 102686 - DNA, 25 bp, Saccharomyces pastorianus
atatcagggcagttaaatttcgaaa

SEQ ID NO: 102687 - DNA, 25 bp, Saccharomyces pastorianus
gaaattagcagaaatggcaccatga

SEQ ID NO: 102688 - DNA, 25 bp, Saccharomyces pastorianus
cacccttattggttaattgtctcga

SEQ ID NO: 102689 - DNA, 25 bp, Saccharomyces pastorianus
ctcattagtagagacacccggtaag

SEQ ID NO: 102690 - DNA, 25 bp, Saccharomyces pastorianus
catggcccacctttttcaaacttgg

SEQ ID NO: 102691 - DNA, 25 bp, Saccharomyces pastorianus
gttaccagagtcaacgtcgttagac

SEQ ID NO: 102692 - DNA, 25 bp, Saccharomyces pastorianus
gattgctaatctgccttacaacaac

SEQ ID NO: 102693 - DNA, 25 bp, Saccharomyces pastorianus
gaaagcgcaagcgaacctgcagtct

SEQ ID NO: 102694 - DNA, 25 bp, Saccharomyces pastorianus
atcagtctgctgaggccgaaataac

SEQ ID NO: 102695 - DNA, 25 bp, Saccharomyces pastorianus
gcgaacctgcagtctcatttgaatt

SEQ ID NO: 102696 - DNA, 25 bp, Saccharomyces pastorianus
aggtgtcaatgaagagctagcctct

SEQ ID NO: 102697 - DNA, 25 bp, Saccharomyces pastorianus
gaattggtataccatggcccacctt

SEQ ID NO: 102698 - DNA, 25 bp, Saccharomyces pastorianus
atgttgatagtgctactccataccc

SEQ ID NO: 102699 - DNA, 25 bp, Saccharomyces pastorianus
atcagacaactttgccaacgttaat

SEQ ID NO: 102700 - DNA, 25 bp, Saccharomyces pastorianus
gtagcctgttgtacgatcttctttc

SEQ ID NO: 102701 - DNA, 25 bp, Saccharomyces pastorianus
taatatgctatctatcggctcacag

SEQ ID NO: 102702 - DNA, 25 bp, Saccharomyces pastorianus
tcacatctttcctacacttcaatat

SEQ ID NO: 102703 - DNA, 25 bp, Saccharomyces pastorianus
gaattctaatacaaaccgcctcatc

SEQ ID NO: 102704 - DNA, 25 bp, Saccharomyces pastorianus
aagtaggttcgcgatctacaccgtt

SEQ ID NO: 102705 - DNA, 25 bp, Saccharomyces pastorianus
cagtaaatctatgcgcgagtcccag

SEQ ID NO: 102706 - DNA, 25 bp, Saccharomyces pastorianus
ttcatgtaacatttccgtagcctgt

SEQ ID NO: 102707 - DNA, 25 bp, Saccharomyces pastorianus
cggctcacagcttaggtccatgaag

SEQ ID NO: 102708 - DNA, 25 bp, Saccharomyces pastorianus
gcgagtcccagtatacttcaagata

SEQ ID NO: 102709 - DNA, 25 bp, Saccharomyces pastorianus
atcttctttctttctgagctactca

SEQ ID NO: 102710 - DNA, 25 bp, Saccharomyces pastorianus
gcctccatgttacggcggtattcat

SEQ ID NO: 102711 - DNA, 25 bp, Saccharomyces pastorianus
gaattctgtgctgttcgtgaacttc

SEQ ID NO: 102712 - DNA, 25 bp, Saccharomyces pastorianus
aatggagttcttcatggacctaagc

SEQ ID NO: 102713 - DNA, 25 bp, Saccharomyces pastorianus
gaaatgttacatgaataccgccgta

SEQ ID NO: 102714 - DNA, 25 bp, Saccharomyces pastorianus
gatgatctgagaaaaccctaccaag

SEQ ID NO: 102715 - DNA, 25 bp, Saccharomyces pastorianus
taccgccgtaacatggaggccaacg

SEQ ID NO: 102716 - DNA, 25 bp, Saccharomyces pastorianus
ggactcgcgcatagatttactggta

SEQ ID NO: 102717 - DNA, 25 bp, Saccharomyces pastorianus
ttttatcagctctttgtcaaggtgc

SEQ ID NO: 102718 - DNA, 25 bp, Saccharomyces pastorianus
gaggccaacggtgtagatcgcgaac

SEQ ID NO: 102719 - DNA, 25 bp, Saccharomyces pastorianus
gaagtatactgggactcgcgcatag

SEQ ID NO: 102720 - DNA, 25 bp, Saccharomyces pastorianus
ggacctaagctgtgagccgatagat

SEQ ID NO: 102721 - DNA, 25 bp, Saccharomyces pastorianus
atttttgactgctttatcgttcgag

SEQ ID NO: 102722 - DNA, 25 bp, Saccharomyces pastorianus
gatcatctgcatatctgttccaagg

SEQ ID NO: 102723 - DNA, 25 bp, Saccharomyces pastorianus
agtcgggttaattctgtctggtgta

SEQ ID NO: 102724 - DNA, 25 bp, Saccharomyces pastorianus
gaggatacatcactacatcttaggt

SEQ ID NO: 102725 - DNA, 25 bp, Saccharomyces pastorianus
tgcaggagttttacagtggccgaac

SEQ ID NO: 102726 - DNA, 25 bp, Saccharomyces pastorianus
gatgctcttgatgcctctaacggga

SEQ ID NO: 102727 - DNA, 25 bp, Saccharomyces pastorianus
atagctttgggatctttgccgggac

SEQ ID NO: 102728 - DNA, 25 bp, Saccharomyces pastorianus
cttaggttctatactggttccaggc

SEQ ID NO: 102729 - DNA, 25 bp, Saccharomyces pastorianus
aaaaccattctctgtcgtggcatct

SEQ ID NO: 102730 - DNA, 25 bp, Saccharomyces pastorianus
aggctgtgccacgagaggatcatct

SEQ ID NO: 102731 - DNA, 25 bp, Saccharomyces pastorianus
gatggagaatccagcacttgctcaa

SEQ ID NO: 102732 - DNA, 25 bp, Saccharomyces pastorianus
ctctgtacggtctccaacgaataga

SEQ ID NO: 102733 - DNA, 25 bp, Saccharomyces pastorianus
ttttgacttactgttttctctccct

SEQ ID NO: 102734 - DNA, 25 bp, Saccharomyces pastorianus
ggtgctgtccatcgcaatcacttga

SEQ ID NO: 102735 - DNA, 25 bp, Saccharomyces pastorianus
taggcggttcatcacttggctcaac

SEQ ID NO: 102736 - DNA, 25 bp, Saccharomyces pastorianus
cagccatccccaacgtttaggaaag

SEQ ID NO: 102737 - DNA, 25 bp, Saccharomyces pastorianus
ggcttcccacgttgtgttagcatta

SEQ ID NO: 102738 - DNA, 25 bp, Saccharomyces pastorianus
aatcacttgaaacgccagggtctgt

SEQ ID NO: 102739 - DNA, 25 bp, Saccharomyces pastorianus
atagactcagtcacacggtgctgtc

SEQ ID NO: 102740 - DNA, 25 bp, Saccharomyces pastorianus
atcaagcatactttccatgtctgta

SEQ ID NO: 102741 - DNA, 25 bp, Saccharomyces pastorianus
tagttttgaatctagtctgcggaaa

SEQ ID NO: 102742 - DNA, 25 bp, Saccharomyces pastorianus
aaatcatctatcttcttcagccatc

SEQ ID NO: 102743 - DNA, 25 bp, Saccharomyces pastorianus
gcaacagtcgtatcaacttacttgg

SEQ ID NO: 102744 - DNA, 25 bp, Saccharomyces pastorianus
gtaatatagccgaggccaccggtgt

SEQ ID NO: 102745 - DNA, 25 bp, Saccharomyces pastorianus
acattggtgcgtacagaatttctga

SEQ ID NO: 102746 - DNA, 25 bp, Saccharomyces pastorianus
ggactgttggtttagcgatagcgat

SEQ ID NO: 102747 - DNA, 25 bp, Saccharomyces pastorianus
aggccaccggtgttgacaatttcat

SEQ ID NO: 102748 - DNA, 25 bp, Saccharomyces pastorianus
aatgcttctgttgtagacctcggta

SEQ ID NO: 102749 - DNA, 25 bp, Saccharomyces pastorianus
gaactgcatcaaacggaattccaag

SEQ ID NO: 102750 - DNA, 25 bp, Saccharomyces pastorianus
aatttcatcagtttccagcaagcag

SEQ ID NO: 102751 - DNA, 25 bp, Saccharomyces pastorianus
gtatgccctggagctggagaatttc

SEQ ID NO: 102752 - DNA, 25 bp, Saccharomyces pastorianus
acatctttagtggtgactggaaccc

SEQ ID NO: 102753 - DNA, 25 bp, Saccharomyces pastorianus
tgtagtcgatgtatacgccggagta

SEQ ID NO: 102754 - DNA, 25 bp, Saccharomyces pastorianus
aaagggaccctagatgccatttcat

SEQ ID NO: 102755 - DNA, 25 bp, Saccharomyces pastorianus
gatgataacggtgatcctgcacagt

SEQ ID NO: 102756 - DNA, 25 bp, Saccharomyces pastorianus
gcagcggcttcaacatactgaaaaa

SEQ ID NO: 102757 - DNA, 25 bp, Saccharomyces pastorianus
gacgcgtattgttatgaggtctcgt

SEQ ID NO: 102758 - DNA, 25 bp, Saccharomyces pastorianus
gatcctgcacagtacgccataaaga

SEQ ID NO: 102759 - DNA, 25 bp, Saccharomyces pastorianus
ggatttacaggttctttgcaaagcg

SEQ ID NO: 102760 - DNA, 25 bp, Saccharomyces pastorianus
gtcattttaaacatccaactggtca

SEQ ID NO: 102761 - DNA, 25 bp, Saccharomyces pastorianus
tgaaagtttaccagcctctgacagc

SEQ ID NO: 102762 - DNA, 25 bp, Saccharomyces pastorianus
atgaggtctcgtggtatcttaaaag

SEQ ID NO: 102763 - DNA, 25 bp, Saccharomyces pastorianus
gaaacccctcaaattgcagaaacag

SEQ ID NO: 102764 - DNA, 25 bp, Saccharomyces pastorianus
gatccgaacaactagcgaatgcctc

SEQ ID NO: 102765 - DNA, 25 bp, Saccharomyces pastorianus
gaagctgtaccaactttccaacata

SEQ ID NO: 102766 - DNA, 25 bp, Saccharomyces pastorianus
gacgtgctggtaaagtatctctaca

SEQ ID NO: 102767 - DNA, 25 bp, Saccharomyces pastorianus
ttgacacaagtcaggcaagccgata

SEQ ID NO: 102768 - DNA, 25 bp, Saccharomyces pastorianus
gatcctccatacagtgcagatgctc

SEQ ID NO: 102769 - DNA, 25 bp, Saccharomyces pastorianus
tggtaccaccatacgaaactactgt

SEQ ID NO: 102770 - DNA, 25 bp, Saccharomyces pastorianus
agtggtgattctttgggagccgttc

SEQ ID NO: 102771 - DNA, 25 bp, Saccharomyces pastorianus
ggagccgttcaattacttacaaccg

SEQ ID NO: 102772 - DNA, 25 bp, Saccharomyces pastorianus
aattgcgctcgcttgccacaagtgg

SEQ ID NO: 102773 - DNA, 25 bp, Saccharomyces pastorianus
tactcaagtcagtggtgtcacacct

SEQ ID NO: 102774 - DNA, 25 bp, Saccharomyces pastorianus
gacatcgatgcatttgatccagaga

SEQ ID NO: 102775 - DNA, 25 bp, Saccharomyces pastorianus
agactaaccgctgccgatctggtac

SEQ ID NO: 102776 - DNA, 25 bp, Saccharomyces pastorianus
tgtcttgcttgcgtggctggaaaga

SEQ ID NO: 102777 - DNA, 25 bp, Saccharomyces pastorianus
cttccaggaaggtttgcaagcgcaa

SEQ ID NO: 102778 - DNA, 25 bp, Saccharomyces pastorianus
aagtacatcaaatcccgccgaaaga

SEQ ID NO: 102779 - DNA, 25 bp, Saccharomyces pastorianus
ggtaccgtggaaacaggcccttgct

SEQ ID NO: 102780 - DNA, 25 bp, Saccharomyces pastorianus
agggaaacttcttcctccgcatata

SEQ ID NO: 102781 - DNA, 25 bp, Saccharomyces pastorianus
ttccaacagagacagcaggcttcca

SEQ ID NO: 102782 - DNA, 25 bp, Saccharomyces pastorianus
aagaaattatgctcccaggctgcca

SEQ ID NO: 102783 - DNA, 25 bp, Saccharomyces pastorianus
ctactgctgctgttacttctgtata

SEQ ID NO: 102784 - DNA, 25 bp, Saccharomyces pastorianus
attggaatcctaacgttgaccctca

SEQ ID NO: 102785 - DNA, 25 bp, Saccharomyces pastorianus
gggaggttaccatacgatcttgacg

SEQ ID NO: 102786 - DNA, 25 bp, Saccharomyces pastorianus
aggctacgccttcatagttttcaaa

SEQ ID NO: 102787 - DNA, 25 bp, Saccharomyces pastorianus
tagatacggcagttccacattggac

SEQ ID NO: 102788 - DNA, 25 bp, Saccharomyces pastorianus
attcctatgtcccatgtggttggtt

SEQ ID NO: 102789 - DNA, 25 bp, Saccharomyces pastorianus
gaaggttgcattatatccctggcag

SEQ ID NO: 102790 - DNA, 25 bp, Saccharomyces pastorianus
tatccctggcagttttcccggcaat

SEQ ID NO: 102791 - DNA, 25 bp, Saccharomyces pastorianus
gagaaaaccactcattcctatgtcc

SEQ ID NO: 102792 - DNA, 25 bp, Saccharomyces pastorianus
tacgacttggctgtagagagatcta

SEQ ID NO: 102793 - DNA, 25 bp, Saccharomyces pastorianus
gagatctacgtaggatgtgcccact

SEQ ID NO: 102794 - DNA, 25 bp, Saccharomyces pastorianus
gctgctatatatacgacttggctgt

SEQ ID NO: 102795 - DNA, 25 bp, Saccharomyces pastorianus
ttcccggccgcttataatagtcatg

SEQ ID NO: 102796 - DNA, 25 bp, Saccharomyces pastorianus
tacgtaggatgtgcccactatcaag

SEQ ID NO: 102797 - DNA, 25 bp, Saccharomyces pastorianus
gtggttggttgcaatttgctgctat

SEQ ID NO: 102798 - DNA, 25 bp, Saccharomyces pastorianus
atggacggccacgttcagggtctga

SEQ ID NO: 102799 - DNA, 25 bp, Saccharomyces pastorianus
aggacatcaaaaccgctatcaacaa

SEQ ID NO: 102800 - DNA, 25 bp, Saccharomyces pastorianus
ttcgccatttacaccagcatgttga

SEQ ID NO: 102801 - DNA, 25 bp, Saccharomyces pastorianus
gcaggaatcctttgaccggattgtt

SEQ ID NO: 102802 - DNA, 25 bp, Saccharomyces pastorianus
aactgaagtactatccaccctttgt

SEQ ID NO: 102803 - DNA, 25 bp, Saccharomyces pastorianus
gaccatgtccattgccaactgaagt

SEQ ID NO: 102804 - DNA, 25 bp, Saccharomyces pastorianus
accctttgtcctgcatgatgcgcat

SEQ ID NO: 102805 - DNA, 25 bp, Saccharomyces pastorianus
aaggtgtctgtcgaagttgtatgta

SEQ ID NO: 102806 - DNA, 25 bp, Saccharomyces pastorianus
agatcaagagttcgaccatgtccat

SEQ ID NO: 102807 - DNA, 25 bp, Saccharomyces pastorianus
gcactctaagaagtttgttcgccat

SEQ ID NO: 102808 - DNA, 25 bp, Saccharomyces pastorianus
aaagggtcctaagatgtccaccatc

SEQ ID NO: 102809 - DNA, 25 bp, Saccharomyces pastorianus
catgatgcgcatgatgatccggaaa

SEQ ID NO: 102810 - DNA, 25 bp, Saccharomyces pastorianus
tatgccttctattccattggtacca

SEQ ID NO: 102811 - DNA, 25 bp, Saccharomyces pastorianus
atttccaccattccactacaagatg

SEQ ID NO: 102812 - DNA, 25 bp, Saccharomyces pastorianus
accacccacggtgtctgaagttttg

SEQ ID NO: 102813 - DNA, 25 bp, Saccharomyces pastorianus
agttgagcaatggaccacccacggt

SEQ ID NO: 102814 - DNA, 25 bp, Saccharomyces pastorianus
gcgaaattcgtctcgtaatcaagga

SEQ ID NO: 102815 - DNA, 25 bp, Saccharomyces pastorianus
tgtgccagcgccatacgttacaaag

SEQ ID NO: 102816 - DNA, 25 bp, Saccharomyces pastorianus
aaaaataccagtgcccattacgttg

SEQ ID NO: 102817 - DNA, 25 bp, Saccharomyces pastorianus
gttatttgattccttttccacgagc

SEQ ID NO: 102818 - DNA, 25 bp, Saccharomyces pastorianus
atgaccacaacgagtctgtgccagc

SEQ ID NO: 102819 - DNA, 25 bp, Saccharomyces pastorianus
cctttactttccaccagttgagcaa

SEQ ID NO: 102820 - DNA, 25 bp, Saccharomyces pastorianus
aggtgaaaacccctctatgccttct

SEQ ID NO: 102821 - DNA, 25 bp, Saccharomyces pastorianus
gcgggcctcgaacatctatcaataa

SEQ ID NO: 102822 - DNA, 25 bp, Saccharomyces pastorianus
gggttccacgataaagagctgtctg

SEQ ID NO: 102823 - DNA, 25 bp, Saccharomyces pastorianus
ataatgccattgttgggttccacga

SEQ ID NO: 102824 - DNA, 25 bp, Saccharomyces pastorianus
gaaacgtctctgactccgaaggtga

SEQ ID NO: 102825 - DNA, 25 bp, Saccharomyces pastorianus
aattcaggtaatggaactgccacca

SEQ ID NO: 102826 - DNA, 25 bp, Saccharomyces pastorianus
tttggcaggctaagatggacagttc

SEQ ID NO: 102827 - DNA, 25 bp, Saccharomyces pastorianus
ctcaatgaatctatggacgctctaa

SEQ ID NO: 102828 - DNA, 25 bp, Saccharomyces pastorianus
gagctgtctgatttgacgttcgaat

SEQ ID NO: 102829 - DNA, 25 bp, Saccharomyces pastorianus
gaaatttgccaactacttttgcaca

SEQ ID NO: 102830 - DNA, 25 bp, Saccharomyces pastorianus
gcacatacacaaatggcgggcctcg

SEQ ID NO: 102831 - DNA, 25 bp, Saccharomyces pastorianus
gaaatgccccaagctattaagacta

SEQ ID NO: 102832 - DNA, 25 bp, Saccharomyces pastorianus
tcaccattatcactgttactcttgc

SEQ ID NO: 102833 - DNA, 25 bp, Saccharomyces pastorianus
accccgccacgcgttaatagtgaga

SEQ ID NO: 102834 - DNA, 25 bp, Saccharomyces pastorianus
ggaaatccgtatcattttctcgcat

SEQ ID NO: 102835 - DNA, 25 bp, Saccharomyces pastorianus
cttactcaccttttcctttgtgtct

SEQ ID NO: 102836 - DNA, 25 bp, Saccharomyces pastorianus
ttaacgctgtttgatgatggtatgt

SEQ ID NO: 102837 - DNA, 25 bp, Saccharomyces pastorianus
tttgtctgtcttccttgggtcttac

SEQ ID NO: 102838 - DNA, 25 bp, Saccharomyces pastorianus
gatggtatgtgcttttattgttcct

SEQ ID NO: 102839 - DNA, 25 bp, Saccharomyces pastorianus
actgttactcttgcgatcatcatca

SEQ ID NO: 102840 - DNA, 25 bp, Saccharomyces pastorianus
tgcaggattctcattgtccggtttt

SEQ ID NO: 102841 - DNA, 25 bp, Saccharomyces pastorianus
tgcttttattgttccttactcacct

SEQ ID NO: 102842 - DNA, 25 bp, Saccharomyces pastorianus
ttttctcgcatacacgaacccgcgt

SEQ ID NO: 102843 - DNA, 25 bp, Saccharomyces pastorianus
gacccatccaaatctaaggttgttg

SEQ ID NO: 102844 - DNA, 25 bp, Saccharomyces pastorianus
cgctccagactttgctgatgaagaa

SEQ ID NO: 102845 - DNA, 25 bp, Saccharomyces pastorianus
ggctgctggctgtaaaatcgttggt

SEQ ID NO: 102846 - DNA, 25 bp, Saccharomyces pastorianus
aatcgttggtattgctaccactttc

SEQ ID NO: 102847 - DNA, 25 bp, Saccharomyces pastorianus
ttaatgaacaagacccatccaaatc

SEQ ID NO: 102848 - DNA, 25 bp, Saccharomyces pastorianus
caagttgtgtaatgctttgaacgcc

SEQ ID NO: 102849 - DNA, 25 bp, Saccharomyces pastorianus
atggttcgacattttgaagatcaag

SEQ ID NO: 102850 - DNA, 25 bp, Saccharomyces pastorianus
ttgggtttcccaattaatgaacaag

SEQ ID NO: 102851 - DNA, 25 bp, Saccharomyces pastorianus
ttacgatgccattgccaagttcgct

SEQ ID NO: 102852 - DNA, 25 bp, Saccharomyces pastorianus
ggagaacttacgatgccattgccaa

SEQ ID NO: 102853 - DNA, 25 bp, Saccharomyces pastorianus
tgctggtaaggctgctggctgtaaa

SEQ ID NO: 102854 - DNA, 25 bp, Saccharomyces pastorianus
aagatcctgtgttggtgttgcttcc

SEQ ID NO: 102855 - DNA, 25 bp, Saccharomyces pastorianus
gttttgagaacagcaccagtcttga

SEQ ID NO: 102856 - DNA, 25 bp, Saccharomyces pastorianus
tcaactctgtatacgccaagcactt

SEQ ID NO: 102857 - DNA, 25 bp, Saccharomyces pastorianus
gtataacaacattgactccggtcag

SEQ ID NO: 102858 - DNA, 25 bp, Saccharomyces pastorianus
ccataagcctgcaagatcctgtgtt

SEQ ID NO: 102859 - DNA, 25 bp, Saccharomyces pastorianus
gcctcttactcccaagctatgaagg

SEQ ID NO: 102860 - DNA, 25 bp, Saccharomyces pastorianus
tcaacgtattcttggctgacatgaa

SEQ ID NO: 102861 - DNA, 25 bp, Saccharomyces pastorianus
caattttgtgtacgtgtctggtcaa

SEQ ID NO: 102862 - DNA, 25 bp, Saccharomyces pastorianus
gttgcttccttacctttgaatgttg

SEQ ID NO: 102863 - DNA, 25 bp, Saccharomyces pastorianus
aaaactttgccgaattcaactctgt

SEQ ID NO: 102864 - DNA, 25 bp, Saccharomyces pastorianus
ggtcaaatcccttatactccagata

SEQ ID NO: 102865 - DNA, 25 bp, Saccharomyces pastorianus
ggtgtcacaatttgcacgaagttct

SEQ ID NO: 102866 - DNA, 25 bp, Saccharomyces pastorianus
aattatgggcattcttctgagcgta

SEQ ID NO: 102867 - DNA, 25 bp, Saccharomyces pastorianus
tgatatttttctttctctccttgta

SEQ ID NO: 102868 - DNA, 25 bp, Saccharomyces pastorianus
aaacatagcagactttcccacagat

SEQ ID NO: 102869 - DNA, 25 bp, Saccharomyces pastorianus
cagatgtctcacaacaagtgtcgga

SEQ ID NO: 102870 - DNA, 25 bp, Saccharomyces pastorianus
tagattgctcataacaggtgtcaca

SEQ ID NO: 102871 - DNA, 25 bp, Saccharomyces pastorianus
gtaactctcgatacgccaaggttgg

SEQ ID NO: 102872 - DNA, 25 bp, Saccharomyces pastorianus
tggactccgggaacattcatagatt

SEQ ID NO: 102873 - DNA, 25 bp, Saccharomyces pastorianus
aactccaatccttgctttctatgga

SEQ ID NO: 102874 - DNA, 25 bp, Saccharomyces pastorianus
aagacgaactcttaactccaatcct

SEQ ID NO: 102875 - DNA, 25 bp, Saccharomyces pastorianus
gcaaaaacgcatagcctggacgagg

SEQ ID NO: 102876 - DNA, 25 bp, Saccharomyces pastorianus
tggctacttttctatccttagtcac

SEQ ID NO: 102877 - DNA, 25 bp, Saccharomyces pastorianus
ttgcgccgactttatgaaacgcttt

SEQ ID NO: 102878 - DNA, 25 bp, Saccharomyces pastorianus
tattcgctgccaacaggaaggcttt

SEQ ID NO: 102879 - DNA, 25 bp, Saccharomyces pastorianus
atatttggacactcattgcgccgac

SEQ ID NO: 102880 - DNA, 25 bp, Saccharomyces pastorianus
aagtttgactatatccgcattggaa

SEQ ID NO: 102881 - DNA, 25 bp, Saccharomyces pastorianus
aatcatttattctaccctgttgccc

SEQ ID NO: 102882 - DNA, 25 bp, Saccharomyces pastorianus
atgctgtcctcattatctcgatgaa

SEQ ID NO: 102883 - DNA, 25 bp, Saccharomyces pastorianus
ttccccatcgtttggatcatatttg

SEQ ID NO: 102884 - DNA, 25 bp, Saccharomyces pastorianus
tattactatcctaaattccccatcg

SEQ ID NO: 102885 - DNA, 25 bp, Saccharomyces pastorianus
aatcatgttattctggccaatctgg

SEQ ID NO: 102886 - DNA, 25 bp, Saccharomyces pastorianus
tttcaggttggtatgctgtcctcat

SEQ ID NO: 102887 - DNA, 25 bp, Saccharomyces pastorianus
actggctttcacaacatggttataa

SEQ ID NO: 102888 - DNA, 25 bp, Saccharomyces pastorianus
aatgcgtgtatttttctaatgccaa

SEQ ID NO: 102889 - DNA, 25 bp, Saccharomyces pastorianus
tgctaaatcaggagccaacttgttt

SEQ ID NO: 102890 - DNA, 25 bp, Saccharomyces pastorianus
ggcgttgatcgttctaggaaggaat

SEQ ID NO: 102891 - DNA, 25 bp, Saccharomyces pastorianus
atttttaagttctccattgatgata

SEQ ID NO: 102892 - DNA, 25 bp, Saccharomyces pastorianus
agggcccacaacagacgtcaatgat

SEQ ID NO: 102893 - DNA, 25 bp, Saccharomyces pastorianus
catgggatgcatggagaacttttca

SEQ ID NO: 102894 - DNA, 25 bp, Saccharomyces pastorianus
ttctgaatctttcccgtggaaggcc

SEQ ID NO: 102895 - DNA, 25 bp, Saccharomyces pastorianus
attacgctactaactggctttcaca

SEQ ID NO: 102896 - DNA, 25 bp, Saccharomyces pastorianus
gaatgaaacgaggacagggcccaca

SEQ ID NO: 102897 - DNA, 25 bp, Saccharomyces pastorianus
atgccaatggcatcttaccaggaag

SEQ ID NO: 102898 - DNA, 25 bp, Saccharomyces pastorianus
tgtaatactccgtcaccattcgtga

SEQ ID NO: 102899 - DNA, 25 bp, Saccharomyces pastorianus
ttatactcaaaaccttctgcccaga

SEQ ID NO: 102900 - DNA, 25 bp, Saccharomyces pastorianus
gaaccagttctgcataaaccgtctg

SEQ ID NO: 102901 - DNA, 25 bp, Saccharomyces pastorianus
gaacactggaattaccgctacaaat

SEQ ID NO: 102902 - DNA, 25 bp, Saccharomyces pastorianus
ttcgttgcctgcttcgaatgcaaga

SEQ ID NO: 102903 - DNA, 25 bp, Saccharomyces pastorianus
aacctacaggtttcatcgctttcta

SEQ ID NO: 102904 - DNA, 25 bp, Saccharomyces pastorianus
tactacgaagctactttggctgatg

SEQ ID NO: 102905 - DNA, 25 bp, Saccharomyces pastorianus
ggtgctgctaataccaagactggca

SEQ ID NO: 102906 - DNA, 25 bp, Saccharomyces pastorianus
ggaccagagctcaaattcattacaa

SEQ ID NO: 102907 - DNA, 25 bp, Saccharomyces pastorianus
aaaccgtctgcgaatcattcgttgc

SEQ ID NO: 102908 - DNA, 25 bp, Saccharomyces pastorianus
gattggtgacctctccagtattgaa

SEQ ID NO: 102909 - DNA, 25 bp, Saccharomyces pastorianus
ttcaactactcttactctacacata

SEQ ID NO: 102910 - DNA, 25 bp, Saccharomyces pastorianus
tgagtctacagatctgcccggcgag

SEQ ID NO: 102911 - DNA, 25 bp, Saccharomyces pastorianus
gctgtacttacggatacgggaccat

SEQ ID NO: 102912 - DNA, 25 bp, Saccharomyces pastorianus
atgattggaatcttgcaccgggacc

SEQ ID NO: 102913 - DNA, 25 bp, Saccharomyces pastorianus
cggcatgggctttggtctaccaatg

SEQ ID NO: 102914 - DNA, 25 bp, Saccharomyces pastorianus
cattccgcccattctggagtatatt

SEQ ID NO: 102915 - DNA, 25 bp, Saccharomyces pastorianus
gtgcaagacgtacctagaactgttt

SEQ ID NO: 102916 - DNA, 25 bp, Saccharomyces pastorianus
ggcacggacgtgtacatcaagctca

SEQ ID NO: 102917 - DNA, 25 bp, Saccharomyces pastorianus
gaagctgcttgtgacgcactatttg

SEQ ID NO: 102918 - DNA, 25 bp, Saccharomyces pastorianus
agacatcacattcacgtgcattccg

SEQ ID NO: 102919 - DNA, 25 bp, Saccharomyces pastorianus
ggtagaggccctcatgttcaactac

SEQ ID NO: 102920 - DNA, 25 bp, Saccharomyces pastorianus
gaggaacaacccttggcttcggcac

SEQ ID NO: 102921 - DNA, 25 bp, Saccharomyces pastorianus
aagtgccgcaaggatgtccattcca

SEQ ID NO: 102922 - DNA, 25 bp, Saccharomyces pastorianus
gaaaggctctcttttgagatcggta

SEQ ID NO: 102923 - DNA, 25 bp, Saccharomyces pastorianus
ggaagaccagtttgctcaagtcact

SEQ ID NO: 102924 - DNA, 25 bp, Saccharomyces pastorianus
ggttatttctcacgctaacttcagt

SEQ ID NO: 102925 - DNA, 25 bp, Saccharomyces pastorianus
gtggctttgaactccagtgaatgtt

SEQ ID NO: 102926 - DNA, 25 bp, Saccharomyces pastorianus
ttcggcactcttgcaattcagtgat

SEQ ID NO: 102927 - DNA, 25 bp, Saccharomyces pastorianus
tattttgaaacctcggctggcctaa

SEQ ID NO: 102928 - DNA, 25 bp, Saccharomyces pastorianus
aagacgttgaactacgccctcagta

SEQ ID NO: 102929 - DNA, 25 bp, Saccharomyces pastorianus
caaaacatcttagttgctccaggcc

SEQ ID NO: 102930 - DNA, 25 bp, Saccharomyces pastorianus
agttcctatccaactcatttgcgga

SEQ ID NO: 102931 - DNA, 25 bp, Saccharomyces pastorianus
gaatttctacaatttcgtcatgtca

SEQ ID NO: 102932 - DNA, 25 bp, Saccharomyces pastorianus
taaagtctgccattgacgtcatcca

SEQ ID NO: 102933 - DNA, 25 bp, Saccharomyces pastorianus
ctatccgtagtcacacaatgcctaa

SEQ ID NO: 102934 - DNA, 25 bp, Saccharomyces pastorianus
catccaatggttgattcctactatt

SEQ ID NO: 102935 - DNA, 25 bp, Saccharomyces pastorianus
taagttcagccaatcacacccgtta

SEQ ID NO: 102936 - DNA, 25 bp, Saccharomyces pastorianus
tactcaaccgcaatacgaactatcc

SEQ ID NO: 102937 - DNA, 25 bp, Saccharomyces pastorianus
gactgtggacctgttgaatttctac

SEQ ID NO: 102938 - DNA, 25 bp, Saccharomyces pastorianus
atcggtatttatatgcgtggttcgc

SEQ ID NO: 102939 - DNA, 25 bp, Saccharomyces pastorianus
tcacacccgttagttttccaactat

SEQ ID NO: 102940 - DNA, 25 bp, Saccharomyces pastorianus
agattcctgtatttgacgttggtag

SEQ ID NO: 102941 - DNA, 25 bp, Saccharomyces pastorianus
atactctgtttattaatgccctgga

SEQ ID NO: 102942 - DNA, 25 bp, Saccharomyces pastorianus
ggttatgcgttgatggcccagacac

SEQ ID NO: 102943 - DNA, 25 bp, Saccharomyces pastorianus
tgcccatgccccagaatcatataaa

SEQ ID NO: 102944 - DNA, 25 bp, Saccharomyces pastorianus
gtggttcgctaaagtgtccctgctc

SEQ ID NO: 102945 - DNA, 25 bp, Saccharomyces pastorianus
aacactacccatccttggagaattg

SEQ ID NO: 102946 - DNA, 25 bp, Saccharomyces pastorianus
aagctacttggatcttcttaaacca

SEQ ID NO: 102947 - DNA, 25 bp, Saccharomyces pastorianus
tagaaggtcccgctttacaaccaga

SEQ ID NO: 102948 - DNA, 25 bp, Saccharomyces pastorianus
tggtagtactgttttgttgacgcat

SEQ ID NO: 102949 - DNA, 25 bp, Saccharomyces pastorianus
gatcttttactagaaggtcccgctt

SEQ ID NO: 102950 - DNA, 25 bp, Saccharomyces pastorianus
gttacaggacacttcaacacagatt

SEQ ID NO: 102951 - DNA, 25 bp, Saccharomyces pastorianus
aatctgggcttttgagatcccaaaa

SEQ ID NO: 102952 - DNA, 25 bp, Saccharomyces pastorianus
aaatctgcatctacttgggaagcga

SEQ ID NO: 102953 - DNA, 25 bp, Saccharomyces pastorianus
gcgtgatattattataggctccgaa

SEQ ID NO: 102954 - DNA, 25 bp, Saccharomyces pastorianus
atttccaggctggtcgaagtaccgc

SEQ ID NO: 102955 - DNA, 25 bp, Saccharomyces pastorianus
gtaccgcaaggagttaatccaccat

SEQ ID NO: 102956 - DNA, 25 bp, Saccharomyces pastorianus
agccaccggtagatacagcgtctga

SEQ ID NO: 102957 - DNA, 25 bp, Saccharomyces pastorianus
aaaggtctcgtgatatgtgtgaaat

SEQ ID NO: 102958 - DNA, 25 bp, Saccharomyces pastorianus
agaaatttctcacggcaagcagctc

SEQ ID NO: 102959 - DNA, 25 bp, Saccharomyces pastorianus
ttatgcgttgttcgttgcgtgatat

SEQ ID NO: 102960 - DNA, 25 bp, Saccharomyces pastorianus
gatctactcaacagtgggacgttat

SEQ ID NO: 102961 - DNA, 25 bp, Saccharomyces pastorianus
ttattcatttttgcagccaccggta

SEQ ID NO: 102962 - DNA, 25 bp, Saccharomyces pastorianus
gaagattcatcgtcaatttatgcca

SEQ ID NO: 102963 - DNA, 25 bp, Saccharomyces pastorianus
atacagcgtctgaggtccgtgatat

SEQ ID NO: 102964 - DNA, 25 bp, Saccharomyces pastorianus
aaagtgcaatcaacggacatcctaa

SEQ ID NO: 102965 - DNA, 25 bp, Saccharomyces pastorianus
gggacttttagcagtttgcctgact

SEQ ID NO: 102966 - DNA, 25 bp, Saccharomyces pastorianus
gcctctgttaggcagcgattcaatt

SEQ ID NO: 102967 - DNA, 25 bp, Saccharomyces pastorianus
aaacctgcaggttgagcctctgtta

SEQ ID NO: 102968 - DNA, 25 bp, Saccharomyces pastorianus
gagttcctgggtcagtatttcctac

SEQ ID NO: 102969 - DNA, 25 bp, Saccharomyces pastorianus
aagagcgggaccttcgctatacaaa

SEQ ID NO: 102970 - DNA, 25 bp, Saccharomyces pastorianus
tgaagtacccagtttgcctacattc

SEQ ID NO: 102971 - DNA, 25 bp, Saccharomyces pastorianus
tagcggcattgtcttcactgtcaaa

SEQ ID NO: 102972 - DNA, 25 bp, Saccharomyces pastorianus
taaccaacgcatcggtagcggcatt

SEQ ID NO: 102973 - DNA, 25 bp, Saccharomyces pastorianus
aattcttcatttgcactggacattc

SEQ ID NO: 102974 - DNA, 25 bp, Saccharomyces pastorianus
gatttaagccttcaaactgacccca

SEQ ID NO: 102975 - DNA, 25 bp, Saccharomyces pastorianus
ctctaatcctagcttcacttcaaaa

SEQ ID NO: 102976 - DNA, 25 bp, Saccharomyces pastorianus
gggcaaatctgcacttagggaatct

SEQ ID NO: 102977 - DNA, 25 bp, Saccharomyces pastorianus
atagccatcaagcacgagccatact

SEQ ID NO: 102978 - DNA, 25 bp, Saccharomyces pastorianus
ggatctcatttaaatttagcggcga

SEQ ID NO: 102979 - DNA, 25 bp, Saccharomyces pastorianus
gaaatccaatccctggtactacggc

SEQ ID NO: 102980 - DNA, 25 bp, Saccharomyces pastorianus
gatatagatctcaagcccgtagaag

SEQ ID NO: 102981 - DNA, 25 bp, Saccharomyces pastorianus
gggaatctcactctaatcctagctt

SEQ ID NO: 102982 - DNA, 25 bp, Saccharomyces pastorianus
ttagcggcgaacacacagggaaatc

SEQ ID NO: 102983 - DNA, 25 bp, Saccharomyces pastorianus
agccatactctcaacgtttcggaag

SEQ ID NO: 102984 - DNA, 25 bp, Saccharomyces pastorianus
gcagctgcagctccaaaaggaattt

SEQ ID NO: 102985 - DNA, 25 bp, Saccharomyces pastorianus
aaaaaggttgcgcagctgcagctcc

SEQ ID NO: 102986 - DNA, 25 bp, Saccharomyces pastorianus
ttgaccttattgacaatcttttgag

SEQ ID NO: 102987 - DNA, 25 bp, Saccharomyces pastorianus
tagacttgtggtcgtttgggacaat

SEQ ID NO: 102988 - DNA, 25 bp, Saccharomyces pastorianus
aaggccttagactattgtcattcaa

SEQ ID NO: 102989 - DNA, 25 bp, Saccharomyces pastorianus
ggacaatgttggcttctatgatctt

SEQ ID NO: 102990 - DNA, 25 bp, Saccharomyces pastorianus
gctaaggaagcgatgggacacccgt

SEQ ID NO: 102991 - DNA, 25 bp, Saccharomyces pastorianus
aagatcgtcaaagtacttggtacaa

SEQ ID NO: 102992 - DNA, 25 bp, Saccharomyces pastorianus
ggaacgagtaacacagaccagcttg

SEQ ID NO: 102993 - DNA, 25 bp, Saccharomyces pastorianus
tttaagggtcctgaactactagttg

SEQ ID NO: 102994 - DNA, 25 bp, Saccharomyces pastorianus
cagaccagcttgtcaagatcgtcaa

SEQ ID NO: 102995 - DNA, 25 bp, Saccharomyces pastorianus
tatgaaattaccttaccgagagaat

SEQ ID NO: 102996 - DNA, 25 bp, Saccharomyces pastorianus
acaatgttcgtgttgcgtcgaggtt

SEQ ID NO: 102997 - DNA, 25 bp, Saccharomyces pastorianus
ttattacccagaactatccccaaag

SEQ ID NO: 102998 - DNA, 25 bp, Saccharomyces pastorianus
gaagttacaacatctccttcttctc

SEQ ID NO: 102999 - DNA, 25 bp, Saccharomyces pastorianus
gatatgtcccgtccattagatgtta

SEQ ID NO: 103000 - DNA, 25 bp, Saccharomyces pastorianus
aaagaacgcagccattgcttcctct

SEQ ID NO: 103001 - DNA, 25 bp, Saccharomyces pastorianus
gtgtacctctgggacctcaatgaag

SEQ ID NO: 103002 - DNA, 25 bp, Saccharomyces pastorianus
tgttatccgggaacctgacaagaca

SEQ ID NO: 103003 - DNA, 25 bp, Saccharomyces pastorianus
acatgtcgctaatttgggttcctta

SEQ ID NO: 103004 - DNA, 25 bp, Saccharomyces pastorianus
aaggatctacaagacagcccctttc

SEQ ID NO: 103005 - DNA, 25 bp, Saccharomyces pastorianus
tatgaaggcggtatctccagcgtgt

SEQ ID NO: 103006 - DNA, 25 bp, Saccharomyces pastorianus
agccaatgactctttcgacgtttac

SEQ ID NO: 103007 - DNA, 25 bp, Saccharomyces pastorianus
tcttctcccgacagtttcaactata

SEQ ID NO: 103008 - DNA, 25 bp, Saccharomyces pastorianus
aacaaggtcaactcttccgggccag

SEQ ID NO: 103009 - DNA, 25 bp, Saccharomyces pastorianus
gccaaacttgccgatgcactggata

SEQ ID NO: 103010 - DNA, 25 bp, Saccharomyces pastorianus
gggactacttctatgtcgtcgaaaa

SEQ ID NO: 103011 - DNA, 25 bp, Saccharomyces pastorianus
ttgtagcaacctccgactgtttgtt

SEQ ID NO: 103012 - DNA, 25 bp, Saccharomyces pastorianus
aagggtactgttgacttctacgtca

SEQ ID NO: 103013 - DNA, 25 bp, Saccharomyces pastorianus
gggaacttgctcttatgtacaacag

SEQ ID NO: 103014 - DNA, 25 bp, Saccharomyces pastorianus
ttttcaacgtttactgggtcctgca

SEQ ID NO: 103015 - DNA, 25 bp, Saccharomyces pastorianus
tttgactacgtacgaccgtgccaaa

SEQ ID NO: 103016 - DNA, 25 bp, Saccharomyces pastorianus
agtacggagctgtggacgtctctaa

SEQ ID NO: 103017 - DNA, 25 bp, Saccharomyces pastorianus
ttgttgtgggctctagacaggctca

SEQ ID NO: 103018 - DNA, 25 bp, Saccharomyces pastorianus
accaagatctaccagccgggtgaaa

SEQ ID NO: 103019 - DNA, 25 bp, Saccharomyces pastorianus
actcagcttttttctatctttcaaa

SEQ ID NO: 103020 - DNA, 25 bp, Saccharomyces pastorianus
tgaaacaagccatacgtgagaaagt

SEQ ID NO: 103021 - DNA, 25 bp, Saccharomyces pastorianus
ccgccacttttgttctgtctgataa

SEQ ID NO: 103022 - DNA, 25 bp, Saccharomyces pastorianus
catgccaccacgacgagcggaaaaa

SEQ ID NO: 103023 - DNA, 25 bp, Saccharomyces pastorianus
gccgacgattttacttactcagctt

SEQ ID NO: 103024 - DNA, 25 bp, Saccharomyces pastorianus
ggcggctaatcttcacccaagaaaa

SEQ ID NO: 103025 - DNA, 25 bp, Saccharomyces pastorianus
tatacttttcagattagccgccgac

SEQ ID NO: 103026 - DNA, 25 bp, Saccharomyces pastorianus
aaaacaaaagcacccaatcaccact

SEQ ID NO: 103027 - DNA, 25 bp, Saccharomyces pastorianus
aaaaaagcgcatgccaccacgacga

SEQ ID NO: 103028 - DNA, 25 bp, Saccharomyces pastorianus
ctcttccttctttcttcatgttata

SEQ ID NO: 103029 - DNA, 25 bp, Saccharomyces pastorianus
ttcttcatgttatacccgccacttt

SEQ ID NO: 103030 - DNA, 25 bp, Saccharomyces pastorianus
atgatattatgatgccgtcgcctaa

SEQ ID NO: 103031 - DNA, 25 bp, Saccharomyces pastorianus
ctaagcagtttgaaggcgtttcgtc

SEQ ID NO: 103032 - DNA, 25 bp, Saccharomyces pastorianus
gatgccgtcgcctaaacctaaaagg

SEQ ID NO: 103033 - DNA, 25 bp, Saccharomyces pastorianus
gaacgccaatctagtcccaataata

SEQ ID NO: 103034 - DNA, 25 bp, Saccharomyces pastorianus
ctgtcatccacccatgatattatga

SEQ ID NO: 103035 - DNA, 25 bp, Saccharomyces pastorianus
aaaaaacgatcaagccctgtcatcc

SEQ ID NO: 103036 - DNA, 25 bp, Saccharomyces pastorianus
tgttaacagggatgactcggacgtc

SEQ ID NO: 103037 - DNA, 25 bp, Saccharomyces pastorianus
gcatgttcaatctctatcgactgat

SEQ ID NO: 103038 - DNA, 25 bp, Saccharomyces pastorianus
aaaaatcccacaactttcctcgcat

SEQ ID NO: 103039 - DNA, 25 bp, Saccharomyces pastorianus
gtagttcactacctaatgtagcgga

SEQ ID NO: 103040 - DNA, 25 bp, Saccharomyces pastorianus
atcgactgattctatggaacgccaa

SEQ ID NO: 103041 - DNA, 25 bp, Saccharomyces pastorianus
tggtctaatccacgtcaagctgttt

SEQ ID NO: 103042 - DNA, 25 bp, Saccharomyces pastorianus
taaaagtatgcagcgcagccgtgac

SEQ ID NO: 103043 - DNA, 25 bp, Saccharomyces pastorianus
tgacctcccggatagttgccaattg

SEQ ID NO: 103044 - DNA, 25 bp, Saccharomyces pastorianus
aagggtttttactcgctagcaacag

SEQ ID NO: 103045 - DNA, 25 bp, Saccharomyces pastorianus
acgcgttgtttgtatgccatttcca

SEQ ID NO: 103046 - DNA, 25 bp, Saccharomyces pastorianus
atggccagtatgttttccaaacgta

SEQ ID NO: 103047 - DNA, 25 bp, Saccharomyces pastorianus
aacggtcactgatgggtttacggtg

SEQ ID NO: 103048 - DNA, 25 bp, Saccharomyces pastorianus
attgcagctttgacgttatacttac

SEQ ID NO: 103049 - DNA, 25 bp, Saccharomyces pastorianus
atacgggttttctctattcacctga

SEQ ID NO: 103050 - DNA, 25 bp, Saccharomyces pastorianus
gagattctacagttgattgcagctt

SEQ ID NO: 103051 - DNA, 25 bp, Saccharomyces pastorianus
tatacttacaccttggataatggcc

SEQ ID NO: 103052 - DNA, 25 bp, Saccharomyces pastorianus
ccaagctttgttgacgttcatatga

SEQ ID NO: 103053 - DNA, 25 bp, Saccharomyces pastorianus
gatcatatttactccaagctttgtt

SEQ ID NO: 103054 - DNA, 25 bp, Saccharomyces pastorianus
gaagtaaccctaatggtgagatcat

SEQ ID NO: 103055 - DNA, 25 bp, Saccharomyces pastorianus
caagctatgagtttcatcacttatt

SEQ ID NO: 103056 - DNA, 25 bp, Saccharomyces pastorianus
tgcagtgttcacttcgttcgagaaa

SEQ ID NO: 103057 - DNA, 25 bp, Saccharomyces pastorianus
cagtctctgcattggtgttatttca

SEQ ID NO: 103058 - DNA, 25 bp, Saccharomyces pastorianus
ggattgatactctttgttcttgcag

SEQ ID NO: 103059 - DNA, 25 bp, Saccharomyces pastorianus
gttatttcattctggtttctcaagc

SEQ ID NO: 103060 - DNA, 25 bp, Saccharomyces pastorianus
aagcttctctatacagtctctgcat

SEQ ID NO: 103061 - DNA, 25 bp, Saccharomyces pastorianus
atgtcgtttgtttccaagcttctct

SEQ ID NO: 103062 - DNA, 25 bp, Saccharomyces pastorianus
gtgcaatcagcaagttacctaaaga

SEQ ID NO: 103063 - DNA, 25 bp, Saccharomyces pastorianus
agatgaacgatttgcttcccgtgtg

SEQ ID NO: 103064 - DNA, 25 bp, Saccharomyces pastorianus
gacgccaacctaaatgatttgccgg

SEQ ID NO: 103065 - DNA, 25 bp, Saccharomyces pastorianus
caatttccattttaccttcacgata

SEQ ID NO: 103066 - DNA, 25 bp, Saccharomyces pastorianus
ttgaggaacacccaaccgtggtaga

SEQ ID NO: 103067 - DNA, 25 bp, Saccharomyces pastorianus
atttgagctcaaattgcctgcagac

SEQ ID NO: 103068 - DNA, 25 bp, Saccharomyces pastorianus
aaagcgcctttacaacccaacagtg

SEQ ID NO: 103069 - DNA, 25 bp, Saccharomyces pastorianus
ttttcgctaagcaagttgacgtcca

SEQ ID NO: 103070 - DNA, 25 bp, Saccharomyces pastorianus
gatattcccatgacaatcgatctag

SEQ ID NO: 103071 - DNA, 25 bp, Saccharomyces pastorianus
gcctgcagacgctacaacatggaga

SEQ ID NO: 103072 - DNA, 25 bp, Saccharomyces pastorianus
gagaaaccgaccatgcaaatactga

SEQ ID NO: 103073 - DNA, 25 bp, Saccharomyces pastorianus
aaagaaaagcttggcccgctgttca

SEQ ID NO: 103074 - DNA, 25 bp, Saccharomyces pastorianus
aagcatttattgtctatcctcatca

SEQ ID NO: 103075 - DNA, 25 bp, Saccharomyces pastorianus
ctcatcctacgaagctctgttttta

SEQ ID NO: 103076 - DNA, 25 bp, Saccharomyces pastorianus
aaacgtctaatcgactcatcctacg

SEQ ID NO: 103077 - DNA, 25 bp, Saccharomyces pastorianus
gcgtattggtacattgcaagcaact

SEQ ID NO: 103078 - DNA, 25 bp, Saccharomyces pastorianus
gaggtacacaggctccaacagacaa

SEQ ID NO: 103079 - DNA, 25 bp, Saccharomyces pastorianus
agatctggcattattactacttatg

SEQ ID NO: 103080 - DNA, 25 bp, Saccharomyces pastorianus
gtgagcatctcatttcgtggaataa

SEQ ID NO: 103081 - DNA, 25 bp, Saccharomyces pastorianus
gatttattccttttcacttatatca

SEQ ID NO: 103082 - DNA, 25 bp, Saccharomyces pastorianus
aattttctcttttctatctagctat

SEQ ID NO: 103083 - DNA, 25 bp, Saccharomyces pastorianus
gtctatcctcatcaaagcaaagttt

SEQ ID NO: 103084 - DNA, 25 bp, Saccharomyces pastorianus
gaataatcatcgctgttagccgccg

SEQ ID NO: 103085 - DNA, 25 bp, Saccharomyces pastorianus
gtgatttccatcaggcgttcaatag

SEQ ID NO: 103086 - DNA, 25 bp, Saccharomyces pastorianus
gaagacgtgatcaagggctgctcca

SEQ ID NO: 103087 - DNA, 25 bp, Saccharomyces pastorianus
gaaagggccaacgtagcaccatgtt

SEQ ID NO: 103088 - DNA, 25 bp, Saccharomyces pastorianus
gacattccgattatgttctgcagta

SEQ ID NO: 103089 - DNA, 25 bp, Saccharomyces pastorianus
gatgcaaccatccagtgtgatttcc

SEQ ID NO: 103090 - DNA, 25 bp, Saccharomyces pastorianus
tggatatacctctatcaccacatac

SEQ ID NO: 103091 - DNA, 25 bp, Saccharomyces pastorianus
aattttctacttgtgatccctgaag

SEQ ID NO: 103092 - DNA, 25 bp, Saccharomyces pastorianus
gaggccagtcaactcatggatatac

SEQ ID NO: 103093 - DNA, 25 bp, Saccharomyces pastorianus
atgacggcagcacacagaactacag

SEQ ID NO: 103094 - DNA, 25 bp, Saccharomyces pastorianus
aaaaatgggtcactctcaactactt

SEQ ID NO: 103095 - DNA, 25 bp, Saccharomyces pastorianus
atgattatgtcaacttgtcgtcaca

SEQ ID NO: 103096 - DNA, 25 bp, Saccharomyces pastorianus
ggtttacgttcccacaagcgataag

SEQ ID NO: 103097 - DNA, 25 bp, Saccharomyces pastorianus
aagaagtgggccttgcagctagtct

SEQ ID NO: 103098 - DNA, 25 bp, Saccharomyces pastorianus
atccgcgaacgcatctgaacttatg

SEQ ID NO: 103099 - DNA, 25 bp, Saccharomyces pastorianus
atgagctaggtgacttcgccattct

SEQ ID NO: 103100 - DNA, 25 bp, Saccharomyces pastorianus
tgacggcagcatacattctcattct

SEQ ID NO: 103101 - DNA, 25 bp, Saccharomyces pastorianus
aaacgatgcgtattctgtcagggac

SEQ ID NO: 103102 - DNA, 25 bp, Saccharomyces pastorianus
agcatagctgtcactttccatgaga

SEQ ID NO: 103103 - DNA, 25 bp, Saccharomyces pastorianus
ataaagcaacgtcttcatccgcgaa

SEQ ID NO: 103104 - DNA, 25 bp, Saccharomyces pastorianus
tagcgctggctacgtcattctatag

SEQ ID NO: 103105 - DNA, 25 bp, Saccharomyces pastorianus
gggctttaacatgtctgcgtatctg

SEQ ID NO: 103106 - DNA, 25 bp, Saccharomyces pastorianus
atagccactactagcgttgtaccgc

SEQ ID NO: 103107 - DNA, 25 bp, Saccharomyces pastorianus
ctttgcagaaacagaatcctcccgt

SEQ ID NO: 103108 - DNA, 25 bp, Saccharomyces pastorianus
aatcctcccgtgtttacagtcaatt

SEQ ID NO: 103109 - DNA, 25 bp, Saccharomyces pastorianus
tttacgccgcccaacagaaaatctt

SEQ ID NO: 103110 - DNA, 25 bp, Saccharomyces pastorianus
gccgatggccgtatcctagatatca

SEQ ID NO: 103111 - DNA, 25 bp, Saccharomyces pastorianus
aaagttattggctccccaagacatc

SEQ ID NO: 103112 - DNA, 25 bp, Saccharomyces pastorianus
gtggttggccgttctatacaatctt

SEQ ID NO: 103113 - DNA, 25 bp, Saccharomyces pastorianus
tcagcgaggcgccattcaatgttta

SEQ ID NO: 103114 - DNA, 25 bp, Saccharomyces pastorianus
gaatacattgttcccgagattctcg

SEQ ID NO: 103115 - DNA, 25 bp, Saccharomyces pastorianus
cttgatgagctcttatgccatggtt

SEQ ID NO: 103116 - DNA, 25 bp, Saccharomyces pastorianus
gaacaggatgtttacgccgatggcc

SEQ ID NO: 103117 - DNA, 25 bp, Saccharomyces pastorianus
gaaaaccccttaattgttgtcatga

SEQ ID NO: 103118 - DNA, 25 bp, Saccharomyces pastorianus
ttatcataccctcctgatccagtat

SEQ ID NO: 103119 - DNA, 25 bp, Saccharomyces pastorianus
attacccatttgagatgcattggag

SEQ ID NO: 103120 - DNA, 25 bp, Saccharomyces pastorianus
caagcattatcataccctcctgatc

SEQ ID NO: 103121 - DNA, 25 bp, Saccharomyces pastorianus
gcccacttgagaactaccaagcatt

SEQ ID NO: 103122 - DNA, 25 bp, Saccharomyces pastorianus
ggagtaaggatcttgctcagcgccc

SEQ ID NO: 103123 - DNA, 25 bp, Saccharomyces pastorianus
gcaaggttagcccttcctttcattt

SEQ ID NO: 103124 - DNA, 25 bp, Saccharomyces pastorianus
aaggatcttgctcagcgcccgtcat

SEQ ID NO: 103125 - DNA, 25 bp, Saccharomyces pastorianus
gcccgtcatcattacgtcttcgtta

SEQ ID NO: 103126 - DNA, 25 bp, Saccharomyces pastorianus
tattacgcccacttgagaactacca

SEQ ID NO: 103127 - DNA, 25 bp, Saccharomyces pastorianus
tctcttattattttcggttcgttca

SEQ ID NO: 103128 - DNA, 25 bp, Saccharomyces pastorianus
tcttcgttacttcccggcatatttg

SEQ ID NO: 103129 - DNA, 25 bp, Saccharomyces pastorianus
ttatcataccctcctgatccagtat

SEQ ID NO: 103130 - DNA, 25 bp, Saccharomyces pastorianus
attacccatttgagatgcattggag

SEQ ID NO: 103131 - DNA, 25 bp, Saccharomyces pastorianus
caagcattatcataccctcctgatc

SEQ ID NO: 103132 - DNA, 25 bp, Saccharomyces pastorianus
gcccacttgagaactaccaagcatt

SEQ ID NO: 103133 - DNA, 25 bp, Saccharomyces pastorianus
ggagtaaggatcttgctcagcgccc

SEQ ID NO: 103134 - DNA, 25 bp, Saccharomyces pastorianus
gcaaggttagcccttcctttcattt

SEQ ID NO: 103135 - DNA, 25 bp, Saccharomyces pastorianus
aaggatcttgctcagcgcccgtcat

SEQ ID NO: 103136 - DNA, 25 bp, Saccharomyces pastorianus
gcccgtcatcattacgtcttcgtta

SEQ ID NO: 103137 - DNA, 25 bp, Saccharomyces pastorianus
tattacgcccacttgagaactacca

SEQ ID NO: 103138 - DNA, 25 bp, Saccharomyces pastorianus
tctcttattattttcggttcgttca

SEQ ID NO: 103139 - DNA, 25 bp, Saccharomyces pastorianus
tcttcgttacttcccggcatatttg

SEQ ID NO: 103140 - DNA, 25 bp, Saccharomyces pastorianus
gatcttgagcttaatgctgacactt

SEQ ID NO: 103141 - DNA, 25 bp, Saccharomyces pastorianus
gggacctaacaatgacgacgctgca

SEQ ID NO: 103142 - DNA, 25 bp, Saccharomyces pastorianus
aatggcaaactctaactgatcttga

SEQ ID NO: 103143 - DNA, 25 bp, Saccharomyces pastorianus
acaatttctacaagtgggcggagga

SEQ ID NO: 103144 - DNA, 25 bp, Saccharomyces pastorianus
gatgtccaaggatgtcatgttatca

SEQ ID NO: 103145 - DNA, 25 bp, Saccharomyces pastorianus
gagtttctaattcacgctgcagacg

SEQ ID NO: 103146 - DNA, 25 bp, Saccharomyces pastorianus
gtcatgttatcaagttgggacctaa

SEQ ID NO: 103147 - DNA, 25 bp, Saccharomyces pastorianus
gggaaagaccgcattgttgtagact

SEQ ID NO: 103148 - DNA, 25 bp, Saccharomyces pastorianus
cgctgcagacgttgaaggtttgtgt

SEQ ID NO: 103149 - DNA, 25 bp, Saccharomyces pastorianus
gaggcactccaagagtcaccacaat

SEQ ID NO: 103150 - DNA, 25 bp, Saccharomyces pastorianus
acggtcgttggattgtggccatgaa

SEQ ID NO: 103151 - DNA, 25 bp, Saccharomyces pastorianus
aaaaagcagctagtcatcgaacaag

SEQ ID NO: 103152 - DNA, 25 bp, Saccharomyces pastorianus
aatattggtagaaacaacgactgat

SEQ ID NO: 103153 - DNA, 25 bp, Saccharomyces pastorianus
aatgtacaagtaacacgtgccacgg

SEQ ID NO: 103154 - DNA, 25 bp, Saccharomyces pastorianus
tattatcgtgaatctagcggcagtc

SEQ ID NO: 103155 - DNA, 25 bp, Saccharomyces pastorianus
gtacaagtaacacgtgccacggtgg

SEQ ID NO: 103156 - DNA, 25 bp, Saccharomyces pastorianus
aacaacgactgatagttcaagttat

SEQ ID NO: 103157 - DNA, 25 bp, Saccharomyces pastorianus
gcagctagtcatcgaacaagacgaa

SEQ ID NO: 103158 - DNA, 25 bp, Saccharomyces pastorianus
ggaaggcatcctatatattatcgtg

SEQ ID NO: 103159 - DNA, 25 bp, Saccharomyces pastorianus
caatcgggtataatgaatcagtggc

SEQ ID NO: 103160 - DNA, 25 bp, Saccharomyces pastorianus
gaatctagcggcagtcaatgagaat

SEQ ID NO: 103161 - DNA, 25 bp, Saccharomyces pastorianus
gttcaagttatggtaatgacagcaa

SEQ ID NO: 103162 - DNA, 25 bp, Saccharomyces pastorianus
gaggtaggattatacgatctggtta

SEQ ID NO: 103163 - DNA, 25 bp, Saccharomyces pastorianus
atgcctctgggtactcaataactta

SEQ ID NO: 103164 - DNA, 25 bp, Saccharomyces pastorianus
ggtctggaaccagggcattcaccaa

SEQ ID NO: 103165 - DNA, 25 bp, Saccharomyces pastorianus
ggaaccagggcattcaccaagtgat

SEQ ID NO: 103166 - DNA, 25 bp, Saccharomyces pastorianus
caatctacggtgacaatcgggtata

SEQ ID NO: 103167 - DNA, 25 bp, Saccharomyces pastorianus
accaagtgattcagaaaaccctcaa

SEQ ID NO: 103168 - DNA, 25 bp, Saccharomyces pastorianus
aaaccctcaatctacggtgacaatc

SEQ ID NO: 103169 - DNA, 25 bp, Saccharomyces pastorianus
gcaatctgaaattggcatgcctctg

SEQ ID NO: 103170 - DNA, 25 bp, Saccharomyces pastorianus
aattggcatgcctctgggtactcaa

SEQ ID NO: 103171 - DNA, 25 bp, Saccharomyces pastorianus
aagatgtagaaaactcgtggaggta

SEQ ID NO: 103172 - DNA, 25 bp, Saccharomyces pastorianus
gtactcaataacttactttggaatt

SEQ ID NO: 103173 - DNA, 25 bp, Saccharomyces pastorianus
aatgtgtccgctataaatggctgca

SEQ ID NO: 103174 - DNA, 25 bp, Saccharomyces pastorianus
agcaactcatctagtgccaactttg

SEQ ID NO: 103175 - DNA, 25 bp, Saccharomyces pastorianus
gaatgccacgcctgatattagctat

SEQ ID NO: 103176 - DNA, 25 bp, Saccharomyces pastorianus
actatgttttaaatgtgtccgctat

SEQ ID NO: 103177 - DNA, 25 bp, Saccharomyces pastorianus
gggacaattattcctttactgatga

SEQ ID NO: 103178 - DNA, 25 bp, Saccharomyces pastorianus
gaactatcccagtataactactttg

SEQ ID NO: 103179 - DNA, 25 bp, Saccharomyces pastorianus
gccaactttggagaatgcaacccag

SEQ ID NO: 103180 - DNA, 25 bp, Saccharomyces pastorianus
gacattgacatgaactatcccagta

SEQ ID NO: 103181 - DNA, 25 bp, Saccharomyces pastorianus
aatggctgcacggaggaattaatag

SEQ ID NO: 103182 - DNA, 25 bp, Saccharomyces pastorianus
gattatttgggagaatgccacgcct

SEQ ID NO: 103183 - DNA, 25 bp, Saccharomyces pastorianus
caacccagtgggtttatgatgcggg

SEQ ID NO: 103184 - DNA, 25 bp, Saccharomyces pastorianus
ttgtgcatatgctacgggtgacgga

SEQ ID NO: 103185 - DNA, 25 bp, Saccharomyces pastorianus
gggcaattatatgctggccaggatt

SEQ ID NO: 103186 - DNA, 25 bp, Saccharomyces pastorianus
ggatatatgatgcttcgttgaacgt

SEQ ID NO: 103187 - DNA, 25 bp, Saccharomyces pastorianus
gttctacgcagattgcacacagtga

SEQ ID NO: 103188 - DNA, 25 bp, Saccharomyces pastorianus
tgacgtttctgttcatccatggatg

SEQ ID NO: 103189 - DNA, 25 bp, Saccharomyces pastorianus
gaaggtcgtctaatcacgtttactg

SEQ ID NO: 103190 - DNA, 25 bp, Saccharomyces pastorianus
ggacctgttaatgaagagcctgaaa

SEQ ID NO: 103191 - DNA, 25 bp, Saccharomyces pastorianus
tgacggacacacaaactctgaactt

SEQ ID NO: 103192 - DNA, 25 bp, Saccharomyces pastorianus
gagggactaatcgttcctgacgttt

SEQ ID NO: 103193 - DNA, 25 bp, Saccharomyces pastorianus
gatgtactacatttgttctacgcag

SEQ ID NO: 103194 - DNA, 25 bp, Saccharomyces pastorianus
aatcccgttgatggcagtattattg

SEQ ID NO: 103195 - DNA, 25 bp, Saccharomyces pastorianus
aatttggccttctgtgattgatggt

SEQ ID NO: 103196 - DNA, 25 bp, Saccharomyces pastorianus
tatgcaaccatactcgttattccca

SEQ ID NO: 103197 - DNA, 25 bp, Saccharomyces pastorianus
gtcatttgggttgtggcttctatat

SEQ ID NO: 103198 - DNA, 25 bp, Saccharomyces pastorianus
gtatcccatcaatgaggcggtccaa

SEQ ID NO: 103199 - DNA, 25 bp, Saccharomyces pastorianus
gtaagcttacttctccatgacaggg

SEQ ID NO: 103200 - DNA, 25 bp, Saccharomyces pastorianus
cgatttacaaactgccgctgtcttt

SEQ ID NO: 103201 - DNA, 25 bp, Saccharomyces pastorianus
ttcgtttgctttaacattgccgcca

SEQ ID NO: 103202 - DNA, 25 bp, Saccharomyces pastorianus
gttgccttcctctatagtttcacag

SEQ ID NO: 103203 - DNA, 25 bp, Saccharomyces pastorianus
atcaataacacatacaccgtctgcg

SEQ ID NO: 103204 - DNA, 25 bp, Saccharomyces pastorianus
aatgggtcaaacctgcggtcagttt

SEQ ID NO: 103205 - DNA, 25 bp, Saccharomyces pastorianus
gcttctacctaacctacatcaaaaa

SEQ ID NO: 103206 - DNA, 25 bp, Saccharomyces pastorianus
attcctacaccagttatttcaccga

SEQ ID NO: 103207 - DNA, 25 bp, Saccharomyces pastorianus
taggtcaatccgtttccgaatctgg

SEQ ID NO: 103208 - DNA, 25 bp, Saccharomyces pastorianus
gcagctatggacatgggcttcttct

SEQ ID NO: 103209 - DNA, 25 bp, Saccharomyces pastorianus
gtttaccaacatatgaccactgcca

SEQ ID NO: 103210 - DNA, 25 bp, Saccharomyces pastorianus
aaaatctactaatagctcctcctct

SEQ ID NO: 103211 - DNA, 25 bp, Saccharomyces pastorianus
tcaagtgccttggtactcttctaga

SEQ ID NO: 103212 - DNA, 25 bp, Saccharomyces pastorianus
gaatctggttccgaatctgccactg

SEQ ID NO: 103213 - DNA, 25 bp, Saccharomyces pastorianus
gtatcagtgttacctccttaggtca

SEQ ID NO: 103214 - DNA, 25 bp, Saccharomyces pastorianus
ggaacctgaaatcatcgctgcttta

SEQ ID NO: 103215 - DNA, 25 bp, Saccharomyces pastorianus
aaggcctcctcttctgcagaaaaat

SEQ ID NO: 103216 - DNA, 25 bp, Saccharomyces pastorianus
gaagctgctaagtcttctagctctg

SEQ ID NO: 103217 - DNA, 25 bp, Saccharomyces pastorianus
gaaatatgctgctgtctttggactg

SEQ ID NO: 103218 - DNA, 25 bp, Saccharomyces pastorianus
gataatgactctatctccttgaaga

SEQ ID NO: 103219 - DNA, 25 bp, Saccharomyces pastorianus
taggcgatcctattcctgatttgag

SEQ ID NO: 103220 - DNA, 25 bp, Saccharomyces pastorianus
aaacgccactttctggttctattag

SEQ ID NO: 103221 - DNA, 25 bp, Saccharomyces pastorianus
gaggaagagtccaaactggccccta

SEQ ID NO: 103222 - DNA, 25 bp, Saccharomyces pastorianus
caagcacgcctggttgtactagaca

SEQ ID NO: 103223 - DNA, 25 bp, Saccharomyces pastorianus
gtgcagattctgtgacatcccagaa

SEQ ID NO: 103224 - DNA, 25 bp, Saccharomyces pastorianus
gtgttttttgtgtatcccagggcaa

SEQ ID NO: 103225 - DNA, 25 bp, Saccharomyces pastorianus
gacaggcctgtggatttcgtgacaa

SEQ ID NO: 103226 - DNA, 25 bp, Saccharomyces pastorianus
gacaggtcctaaacataacgctaaa

SEQ ID NO: 103227 - DNA, 25 bp, Saccharomyces pastorianus
atttcgacaccggaagtgcctaaga

SEQ ID NO: 103228 - DNA, 25 bp, Saccharomyces pastorianus
ggtgatattgttgaatggactccca

SEQ ID NO: 103229 - DNA, 25 bp, Saccharomyces pastorianus
aagagatgatcgcaacagccaaatc

SEQ ID NO: 103230 - DNA, 25 bp, Saccharomyces pastorianus
tggctggtttcgtactggtgatatt

SEQ ID NO: 103231 - DNA, 25 bp, Saccharomyces pastorianus
atagaaacggcggtctctttcactt

SEQ ID NO: 103232 - DNA, 25 bp, Saccharomyces pastorianus
aattgcttctaaagggtgcgccggt

SEQ ID NO: 103233 - DNA, 25 bp, Saccharomyces pastorianus
aatggcttagtcacatctgctcaaa

SEQ ID NO: 103234 - DNA, 25 bp, Saccharomyces pastorianus
gtttacaggtcaaactcctatgtga

SEQ ID NO: 103235 - DNA, 25 bp, Saccharomyces pastorianus
tgcgccggtctgttctgaatattat

SEQ ID NO: 103236 - DNA, 25 bp, Saccharomyces pastorianus
gaagagaaatcttagccgctgttaa

SEQ ID NO: 103237 - DNA, 25 bp, Saccharomyces pastorianus
ctctttcacttacgatggctggttt

SEQ ID NO: 103238 - DNA, 25 bp, Saccharomyces pastorianus
ggacccctatctaaatttgctgtca

SEQ ID NO: 103239 - DNA, 25 bp, Saccharomyces pastorianus
gaagatcctgtcacagtgggcgatt

SEQ ID NO: 103240 - DNA, 25 bp, Saccharomyces pastorianus
ggtggacttgatgctatttttggaa

SEQ ID NO: 103241 - DNA, 25 bp, Saccharomyces pastorianus
gggcgatttgattgaccacattgta

SEQ ID NO: 103242 - DNA, 25 bp, Saccharomyces pastorianus
gacccggtatcatcacattaatcaa

SEQ ID NO: 103243 - DNA, 25 bp, Saccharomyces pastorianus
gagtttctaggtggacttgatgcta

SEQ ID NO: 103244 - DNA, 25 bp, Saccharomyces pastorianus
catattggaagacggtgacatcatc

SEQ ID NO: 103245 - DNA, 25 bp, Saccharomyces pastorianus
aatgacgttagtatcttcatcgaag

SEQ ID NO: 103246 - DNA, 25 bp, Saccharomyces pastorianus
agatgattctataagacccggtatc

SEQ ID NO: 103247 - DNA, 25 bp, Saccharomyces pastorianus
gctcgaaggcgaaaaagactacata

SEQ ID NO: 103248 - DNA, 25 bp, Saccharomyces pastorianus
tatgatcaataaccctaatgacgtt

SEQ ID NO: 103249 - DNA, 25 bp, Saccharomyces pastorianus
gaccacattgtatctactatgatca

SEQ ID NO: 103250 - DNA, 25 bp, Saccharomyces pastorianus
gatcacacgtcttactaaaccagca

SEQ ID NO: 103251 - DNA, 25 bp, Saccharomyces pastorianus
tagtacccggtagcccttcagataa

SEQ ID NO: 103252 - DNA, 25 bp, Saccharomyces pastorianus
accatcccttttgcatttatcagtg

SEQ ID NO: 103253 - DNA, 25 bp, Saccharomyces pastorianus
aggcgtatttcagtgtgcttgagca

SEQ ID NO: 103254 - DNA, 25 bp, Saccharomyces pastorianus
agctattcagtataccatccctttt

SEQ ID NO: 103255 - DNA, 25 bp, Saccharomyces pastorianus
tgtgcatgcggcaaaccactctaaa

SEQ ID NO: 103256 - DNA, 25 bp, Saccharomyces pastorianus
agatagatccgagcctaacatcaag

SEQ ID NO: 103257 - DNA, 25 bp, Saccharomyces pastorianus
gatgtcgatgtattgcaagtcacta

SEQ ID NO: 103258 - DNA, 25 bp, Saccharomyces pastorianus
aaggcatcggcatggactctgcgtt

SEQ ID NO: 103259 - DNA, 25 bp, Saccharomyces pastorianus
agacgggtatcctcgttcggatgtc

SEQ ID NO: 103260 - DNA, 25 bp, Saccharomyces pastorianus
aagacatcgctaacaccttcgagaa

SEQ ID NO: 103261 - DNA, 25 bp, Saccharomyces pastorianus
ttttgttgctcagtcatgtgctgca

SEQ ID NO: 103262 - DNA, 25 bp, Saccharomyces pastorianus
atttcactgctattctcgggagaac

SEQ ID NO: 103263 - DNA, 25 bp, Saccharomyces pastorianus
ataccagattccattcaacgacgtc

SEQ ID NO: 103264 - DNA, 25 bp, Saccharomyces pastorianus
gcaacggttgatcatggcatcgtcc

SEQ ID NO: 103265 - DNA, 25 bp, Saccharomyces pastorianus
tatgctgcaatcaaaccttggtgag

SEQ ID NO: 103266 - DNA, 25 bp, Saccharomyces pastorianus
gtgagcaccccacacattacaaagg

SEQ ID NO: 103267 - DNA, 25 bp, Saccharomyces pastorianus
ggcatcttcccacagtttgattttg

SEQ ID NO: 103268 - DNA, 25 bp, Saccharomyces pastorianus
ggcatcgtccgtctctaagatgatt

SEQ ID NO: 103269 - DNA, 25 bp, Saccharomyces pastorianus
gctggtcccctcattattagggcta

SEQ ID NO: 103270 - DNA, 25 bp, Saccharomyces pastorianus
aaaggcactttcgatgcattcagaa

SEQ ID NO: 103271 - DNA, 25 bp, Saccharomyces pastorianus
agggctatttcatgtggctatccat

SEQ ID NO: 103272 - DNA, 25 bp, Saccharomyces pastorianus
taccccacagagtgttgcaacagct

SEQ ID NO: 103273 - DNA, 25 bp, Saccharomyces pastorianus
aagacactacaacccctgttgtgga

SEQ ID NO: 103274 - DNA, 25 bp, Saccharomyces pastorianus
acatgtcagggtttgtatgcccgca

SEQ ID NO: 103275 - DNA, 25 bp, Saccharomyces pastorianus
aaaacaattcatctctgacgtcgcc

SEQ ID NO: 103276 - DNA, 25 bp, Saccharomyces pastorianus
gtcgatttaaagatcctcggtataa

SEQ ID NO: 103277 - DNA, 25 bp, Saccharomyces pastorianus
gagaatcatctctttgtcccatttt

SEQ ID NO: 103278 - DNA, 25 bp, Saccharomyces pastorianus
cataccttggtaacgttcctataga

SEQ ID NO: 103279 - DNA, 25 bp, Saccharomyces pastorianus
gattacttactgatcgatacccctc

SEQ ID NO: 103280 - DNA, 25 bp, Saccharomyces pastorianus
actctactggctctcttagtgtaat

SEQ ID NO: 103281 - DNA, 25 bp, Saccharomyces pastorianus
tatgcccgcattgtgctgagtgtac

SEQ ID NO: 103282 - DNA, 25 bp, Saccharomyces pastorianus
ggagcaattttctgtcccatacctt

SEQ ID NO: 103283 - DNA, 25 bp, Saccharomyces pastorianus
tacacccgaagatgtcagtactgca

SEQ ID NO: 103284 - DNA, 25 bp, Saccharomyces pastorianus
aagatgtcagtactgcaggcgcaaa

SEQ ID NO: 103285 - DNA, 25 bp, Saccharomyces pastorianus
cgtgatacacccgaagatgtcagta

SEQ ID NO: 103286 - DNA, 25 bp, Saccharomyces pastorianus
gatattttagatgttttgaacctac

SEQ ID NO: 103287 - DNA, 25 bp, Saccharomyces pastorianus
gagaaaatctcggaagtcgaactta

SEQ ID NO: 103288 - DNA, 25 bp, Saccharomyces pastorianus
actgcaggcgcaaaggatattttag

SEQ ID NO: 103289 - DNA, 25 bp, Saccharomyces pastorianus
agaagatctacacagggacaacaat

SEQ ID NO: 103290 - DNA, 25 bp, Saccharomyces pastorianus
actctctgttagttcagttagaaga

SEQ ID NO: 103291 - DNA, 25 bp, Saccharomyces pastorianus
tgtcagtactgcaggcgcaaaggat

SEQ ID NO: 103292 - DNA, 25 bp, Saccharomyces pastorianus
ctcggaagtcgaacttaagttggat

SEQ ID NO: 103293 - DNA, 25 bp, Saccharomyces pastorianus
gttagaagatctacacagggacaac

SEQ ID NO: 103294 - DNA, 25 bp, Saccharomyces pastorianus
ggtgagtcttttccatatttccatg

SEQ ID NO: 103295 - DNA, 25 bp, Saccharomyces pastorianus
catcggcccgtatatgccatattta

SEQ ID NO: 103296 - DNA, 25 bp, Saccharomyces pastorianus
gatatactattttccgatcatcggc

SEQ ID NO: 103297 - DNA, 25 bp, Saccharomyces pastorianus
ctttgggtacgcaaatctacgagaa

SEQ ID NO: 103298 - DNA, 25 bp, Saccharomyces pastorianus
gtagttcttgacgtagacccggccg

SEQ ID NO: 103299 - DNA, 25 bp, Saccharomyces pastorianus
gacccggccgtttacatgattaatc

SEQ ID NO: 103300 - DNA, 25 bp, Saccharomyces pastorianus
aaatgatcgcaggtgagtcttttcc

SEQ ID NO: 103301 - DNA, 25 bp, Saccharomyces pastorianus
caccaattcccgagcccaaaagagg

SEQ ID NO: 103302 - DNA, 25 bp, Saccharomyces pastorianus
aagagatcccaatccattcgttgag

SEQ ID NO: 103303 - DNA, 25 bp, Saccharomyces pastorianus
aaatggcgattgatttcccacctac

SEQ ID NO: 103304 - DNA, 25 bp, Saccharomyces pastorianus
agtgattcgatagctggccctacgc

SEQ ID NO: 103305 - DNA, 25 bp, Saccharomyces pastorianus
gagttcacaacgaatttctctccgc

SEQ ID NO: 103306 - DNA, 25 bp, Saccharomyces pastorianus
gctgacactacccaattgtgagttt

SEQ ID NO: 103307 - DNA, 25 bp, Saccharomyces pastorianus
aaagccaagcacgttacaggaaagt

SEQ ID NO: 103308 - DNA, 25 bp, Saccharomyces pastorianus
aatcgtatcattccacagctgacac

SEQ ID NO: 103309 - DNA, 25 bp, Saccharomyces pastorianus
ggttgccgaaattattctccgctac

SEQ ID NO: 103310 - DNA, 25 bp, Saccharomyces pastorianus
gaccgcttaaaaactatcgcttcta

SEQ ID NO: 103311 - DNA, 25 bp, Saccharomyces pastorianus
atttctctccgccaggaaactgata

SEQ ID NO: 103312 - DNA, 25 bp, Saccharomyces pastorianus
gtgatgttcacaaacgacttcaagg

SEQ ID NO: 103313 - DNA, 25 bp, Saccharomyces pastorianus
attattctccgctacttatatgcag

SEQ ID NO: 103314 - DNA, 25 bp, Saccharomyces pastorianus
gacattaggtactatttgctccgaa

SEQ ID NO: 103315 - DNA, 25 bp, Saccharomyces pastorianus
atattccttggatgtatgccgtcga

SEQ ID NO: 103316 - DNA, 25 bp, Saccharomyces pastorianus
aaaaacctgttgtcatgccgtctga

SEQ ID NO: 103317 - DNA, 25 bp, Saccharomyces pastorianus
ggcactccacaggtgtcgcaaaagc

SEQ ID NO: 103318 - DNA, 25 bp, Saccharomyces pastorianus
gaccatttcaaagactgtggccaga

SEQ ID NO: 103319 - DNA, 25 bp, Saccharomyces pastorianus
tggaattatcccttaatggcctacc

SEQ ID NO: 103320 - DNA, 25 bp, Saccharomyces pastorianus
ttagatctacttcccaaaaacctgt

SEQ ID NO: 103321 - DNA, 25 bp, Saccharomyces pastorianus
tttgtcggtaacatcactccggatg

SEQ ID NO: 103322 - DNA, 25 bp, Saccharomyces pastorianus
aacttgaagctgactcgcgttctat

SEQ ID NO: 103323 - DNA, 25 bp, Saccharomyces pastorianus
gggaacaccaaaaggctacggctat

SEQ ID NO: 103324 - DNA, 25 bp, Saccharomyces pastorianus
ggatgtcaccccagagcaaatagaa

SEQ ID NO: 103325 - DNA, 25 bp, Saccharomyces pastorianus
actcgcgttctatctttgtcggtaa

SEQ ID NO: 103326 - DNA, 25 bp, Saccharomyces pastorianus
ataggcattacaactcgcaaaacca

SEQ ID NO: 103327 - DNA, 25 bp, Saccharomyces pastorianus
acagtgtcaaccatgattcatccca

SEQ ID NO: 103328 - DNA, 25 bp, Saccharomyces pastorianus
gctatatcccagaaggtgtttcctt

SEQ ID NO: 103329 - DNA, 25 bp, Saccharomyces pastorianus
attcatcccaatcttttaccttatc

SEQ ID NO: 103330 - DNA, 25 bp, Saccharomyces pastorianus
agttccgcattgtcacaaagtttca

SEQ ID NO: 103331 - DNA, 25 bp, Saccharomyces pastorianus
gtgtttccttcgatgtggagcccaa

SEQ ID NO: 103332 - DNA, 25 bp, Saccharomyces pastorianus
ttttttcagaaaccgctatatccca

SEQ ID NO: 103333 - DNA, 25 bp, Saccharomyces pastorianus
ccaatcttttaccttatcgaacgca

SEQ ID NO: 103334 - DNA, 25 bp, Saccharomyces pastorianus
gtggagcccaattttgtacaataca

SEQ ID NO: 103335 - DNA, 25 bp, Saccharomyces pastorianus
atgtttggcgagaggcatgttacga

SEQ ID NO: 103336 - DNA, 25 bp, Saccharomyces pastorianus
agtcaagtcgataacaacagtgtca

SEQ ID NO: 103337 - DNA, 25 bp, Saccharomyces pastorianus
atccgaggaaatcaacacaaccttg

SEQ ID NO: 103338 - DNA, 25 bp, Saccharomyces pastorianus
tagcacgaataatgagcctttgttt

SEQ ID NO: 103339 - DNA, 25 bp, Saccharomyces pastorianus
aaccactgaggaactggcgcagcaa

SEQ ID NO: 103340 - DNA, 25 bp, Saccharomyces pastorianus
aactggcgcagcaagagcagctatt

SEQ ID NO: 103341 - DNA, 25 bp, Saccharomyces pastorianus
gatacactaagaactgtttcggcag

SEQ ID NO: 103342 - DNA, 25 bp, Saccharomyces pastorianus
ttacacacaataggcgacgtttact

SEQ ID NO: 103343 - DNA, 25 bp, Saccharomyces pastorianus
aacatccactttacgtggcgtttgt

SEQ ID NO: 103344 - DNA, 25 bp, Saccharomyces pastorianus
gatggaatcatttggtctggacata

SEQ ID NO: 103345 - DNA, 25 bp, Saccharomyces pastorianus
ttcggcagccatagacgctcagaat

SEQ ID NO: 103346 - DNA, 25 bp, Saccharomyces pastorianus
gaaatttttcttgcatcccagaacc

SEQ ID NO: 103347 - DNA, 25 bp, Saccharomyces pastorianus
ttgcatcccagaacctgttcggaat

SEQ ID NO: 103348 - DNA, 25 bp, Saccharomyces pastorianus
gatgggcaaagtattgtcggctgct

SEQ ID NO: 103349 - DNA, 25 bp, Saccharomyces pastorianus
aattggcggtagagccctcaaaatt

SEQ ID NO: 103350 - DNA, 25 bp, Saccharomyces pastorianus
gaggatcaacggtcaacgattctag

SEQ ID NO: 103351 - DNA, 25 bp, Saccharomyces pastorianus
acacaggagaatcgcaaggttttgc

SEQ ID NO: 103352 - DNA, 25 bp, Saccharomyces pastorianus
ggtcaacgattctagcagtcgataa

SEQ ID NO: 103353 - DNA, 25 bp, Saccharomyces pastorianus
ggtgacatattgacagtcttttctg

SEQ ID NO: 103354 - DNA, 25 bp, Saccharomyces pastorianus
ttgatcatactttttataggccaaa

SEQ ID NO: 103355 - DNA, 25 bp, Saccharomyces pastorianus
gtcttttctgaatatggagtccctg

SEQ ID NO: 103356 - DNA, 25 bp, Saccharomyces pastorianus
atatggagtccctgtagatgtaatt

SEQ ID NO: 103357 - DNA, 25 bp, Saccharomyces pastorianus
agcccgcatcaatcatggcataatg

SEQ ID NO: 103358 - DNA, 25 bp, Saccharomyces pastorianus
ggtagagccctcaaaattgatcata

SEQ ID NO: 103359 - DNA, 25 bp, Saccharomyces pastorianus
tagatgtaattcttagcagggatga

SEQ ID NO: 103360 - DNA, 25 bp, Saccharomyces pastorianus
tacaccaagccggttgtcaattcgt

SEQ ID NO: 103361 - DNA, 25 bp, Saccharomyces pastorianus
gtcaattcgttcatcatcaggtcat

SEQ ID NO: 103362 - DNA, 25 bp, Saccharomyces pastorianus
gagcctggccatcagttcattgaaa

SEQ ID NO: 103363 - DNA, 25 bp, Saccharomyces pastorianus
ttataccacggcactattttacacc

SEQ ID NO: 103364 - DNA, 25 bp, Saccharomyces pastorianus
cgacttgtcagggttcagagctctt

SEQ ID NO: 103365 - DNA, 25 bp, Saccharomyces pastorianus
ttcggtatccacttctacatctaaa

SEQ ID NO: 103366 - DNA, 25 bp, Saccharomyces pastorianus
taaatcgggttcttcacaaccacca

SEQ ID NO: 103367 - DNA, 25 bp, Saccharomyces pastorianus
gatttttcgatttggtccccggatg

SEQ ID NO: 103368 - DNA, 25 bp, Saccharomyces pastorianus
ggatgacaaaccactctatcacgat

SEQ ID NO: 103369 - DNA, 25 bp, Saccharomyces pastorianus
gatagtccctcgtgcactttaaaga

SEQ ID NO: 103370 - DNA, 25 bp, Saccharomyces pastorianus
ttgaatggtttcacgagcctggcca

SEQ ID NO: 103371 - DNA, 25 bp, Saccharomyces pastorianus
tggctttgaagaggccttatcaccc

SEQ ID NO: 103372 - DNA, 25 bp, Saccharomyces pastorianus
cttcaaaggccccaagcaagactct

SEQ ID NO: 103373 - DNA, 25 bp, Saccharomyces pastorianus
tgatgaatcctttgcacctgaaaaa

SEQ ID NO: 103374 - DNA, 25 bp, Saccharomyces pastorianus
gatcagatagctacatcgctcttca

SEQ ID NO: 103375 - DNA, 25 bp, Saccharomyces pastorianus
gcacctaagctaattgatcttcaaa

SEQ ID NO: 103376 - DNA, 25 bp, Saccharomyces pastorianus
tgatgactctttatccgaagctgga

SEQ ID NO: 103377 - DNA, 25 bp, Saccharomyces pastorianus
gatgaccaacatgctatccaaactt

SEQ ID NO: 103378 - DNA, 25 bp, Saccharomyces pastorianus
tgtctgtgtgcctattgatgaatcc

SEQ ID NO: 103379 - DNA, 25 bp, Saccharomyces pastorianus
aggaagatctcgtattgatgactct

SEQ ID NO: 103380 - DNA, 25 bp, Saccharomyces pastorianus
aaggcccctttttgtattcatcctg

SEQ ID NO: 103381 - DNA, 25 bp, Saccharomyces pastorianus
accctcatcttgctcgttctttgga

SEQ ID NO: 103382 - DNA, 25 bp, Saccharomyces pastorianus
atcaccatgagaaccatcgaccagg

SEQ ID NO: 103383 - DNA, 25 bp, Saccharomyces pastorianus
gtctggcccagatttcattaaacgg

SEQ ID NO: 103384 - DNA, 25 bp, Saccharomyces pastorianus
aatacgctgtacgtgagccagctta

SEQ ID NO: 103385 - DNA, 25 bp, Saccharomyces pastorianus
tgatcacgatactcatcacgctgtg

SEQ ID NO: 103386 - DNA, 25 bp, Saccharomyces pastorianus
ggccaagcctttatcaccatgagaa

SEQ ID NO: 103387 - DNA, 25 bp, Saccharomyces pastorianus
taaacggcgagcgattctttggtaa

SEQ ID NO: 103388 - DNA, 25 bp, Saccharomyces pastorianus
gcgattctttggtaagcctttgaaa

SEQ ID NO: 103389 - DNA, 25 bp, Saccharomyces pastorianus
gcaacgactgcgagtaaaccttttt

SEQ ID NO: 103390 - DNA, 25 bp, Saccharomyces pastorianus
gaggtactgaaggttagcatgaatt

SEQ ID NO: 103391 - DNA, 25 bp, Saccharomyces pastorianus
ttttactctttgctacgtttggaga

SEQ ID NO: 103392 - DNA, 25 bp, Saccharomyces pastorianus
atcacgctgtggctgaaccagtaac

SEQ ID NO: 103393 - DNA, 25 bp, Saccharomyces pastorianus
accactggaaccgttgtcggataca

SEQ ID NO: 103394 - DNA, 25 bp, Saccharomyces pastorianus
agtgattaatcctcaacagctgttg

SEQ ID NO: 103395 - DNA, 25 bp, Saccharomyces pastorianus
gacgatgaggtggactactcggaaa

SEQ ID NO: 103396 - DNA, 25 bp, Saccharomyces pastorianus
aagagccagaccttgcgattgcaga

SEQ ID NO: 103397 - DNA, 25 bp, Saccharomyces pastorianus
atcattctcatcacaaccactggaa

SEQ ID NO: 103398 - DNA, 25 bp, Saccharomyces pastorianus
tgacacggaactgcgacaactgttt

SEQ ID NO: 103399 - DNA, 25 bp, Saccharomyces pastorianus
aacggacgatgaccactcacaagtg

SEQ ID NO: 103400 - DNA, 25 bp, Saccharomyces pastorianus
gatgagctaaggtaccagtcgcata

SEQ ID NO: 103401 - DNA, 25 bp, Saccharomyces pastorianus
ttagacacttcgagaccagatcttg

SEQ ID NO: 103402 - DNA, 25 bp, Saccharomyces pastorianus
gaatgggcagtcactttagacactt

SEQ ID NO: 103403 - DNA, 25 bp, Saccharomyces pastorianus
atattaaactcgcactcactagcct

SEQ ID NO: 103404 - DNA, 25 bp, Saccharomyces pastorianus
tggataacattccaccacgtttgga

SEQ ID NO: 103405 - DNA, 25 bp, Saccharomyces pastorianus
aaactgtttggtggatttcatactg

SEQ ID NO: 103406 - DNA, 25 bp, Saccharomyces pastorianus
atatgggtagcccttcagcagcatc

SEQ ID NO: 103407 - DNA, 25 bp, Saccharomyces pastorianus
tcagcagcatcgtcatcaacattat

SEQ ID NO: 103408 - DNA, 25 bp, Saccharomyces pastorianus
attgcccagatttgaattagctagt

SEQ ID NO: 103409 - DNA, 25 bp, Saccharomyces pastorianus
atgggttattggaacgcccactcca

SEQ ID NO: 103410 - DNA, 25 bp, Saccharomyces pastorianus
gcagataatagctccgtctggaaaa

SEQ ID NO: 103411 - DNA, 25 bp, Saccharomyces pastorianus
tattgaacatattgcccgtgacagg

SEQ ID NO: 103412 - DNA, 25 bp, Saccharomyces pastorianus
ccactccagctgttcaaatctttag

SEQ ID NO: 103413 - DNA, 25 bp, Saccharomyces pastorianus
tagatgactatgctttcgtgagaat

SEQ ID NO: 103414 - DNA, 25 bp, Saccharomyces pastorianus
gtctcacgtatggtgtacgcttatt

SEQ ID NO: 103415 - DNA, 25 bp, Saccharomyces pastorianus
atgcctccattgaatccatttcttg

SEQ ID NO: 103416 - DNA, 25 bp, Saccharomyces pastorianus
gtgtcgtggcatgtgggtccaacaa

SEQ ID NO: 103417 - DNA, 25 bp, Saccharomyces pastorianus
attagctccggcaactttgaccaag

SEQ ID NO: 103418 - DNA, 25 bp, Saccharomyces pastorianus
ggtccaacaatggtcttctggcagt

SEQ ID NO: 103419 - DNA, 25 bp, Saccharomyces pastorianus
aacaagacgaactagatgcctccat

SEQ ID NO: 103420 - DNA, 25 bp, Saccharomyces pastorianus
ggcatggaattgcttcactggccaa

SEQ ID NO: 103421 - DNA, 25 bp, Saccharomyces pastorianus
ttggtcatccaaattctcccttatg

SEQ ID NO: 103422 - DNA, 25 bp, Saccharomyces pastorianus
tgacttattcgcatcgtgtatcaat

SEQ ID NO: 103423 - DNA, 25 bp, Saccharomyces pastorianus
atggcggtgcgattttacatttatc

SEQ ID NO: 103424 - DNA, 25 bp, Saccharomyces pastorianus
agaagctccatggatttccctatca

SEQ ID NO: 103425 - DNA, 25 bp, Saccharomyces pastorianus
tgcatcctgtggcaaataccggcac

SEQ ID NO: 103426 - DNA, 25 bp, Saccharomyces pastorianus
atgtccactaagttgcctattgtga

SEQ ID NO: 103427 - DNA, 25 bp, Saccharomyces pastorianus
ggcattactaggacatgtgggcaat

SEQ ID NO: 103428 - DNA, 25 bp, Saccharomyces pastorianus
ttcattacaatggagggagggccct

SEQ ID NO: 103429 - DNA, 25 bp, Saccharomyces pastorianus
tgtgatttcaaacggaacagccttc

SEQ ID NO: 103430 - DNA, 25 bp, Saccharomyces pastorianus
atagcggatcagaggcacaacatgg

SEQ ID NO: 103431 - DNA, 25 bp, Saccharomyces pastorianus
taacggtgctgcttgcctgtgtaat

SEQ ID NO: 103432 - DNA, 25 bp, Saccharomyces pastorianus
aaaagtccccgttcaattgctgttg

SEQ ID NO: 103433 - DNA, 25 bp, Saccharomyces pastorianus
aacatggcctccctaggaacgctga

SEQ ID NO: 103434 - DNA, 25 bp, Saccharomyces pastorianus
cctgtgtaatgcttgtgggttgttt

SEQ ID NO: 103435 - DNA, 25 bp, Saccharomyces pastorianus
aaaattgattctgcgcttcggtaga

SEQ ID NO: 103436 - DNA, 25 bp, Saccharomyces pastorianus
agcctgctcgaccaagaacgggcat

SEQ ID NO: 103437 - DNA, 25 bp, Saccharomyces pastorianus
aactacttagaggtgggccgcgaca

SEQ ID NO: 103438 - DNA, 25 bp, Saccharomyces pastorianus
gacatatgtcccaaaccgtacggat

SEQ ID NO: 103439 - DNA, 25 bp, Saccharomyces pastorianus
caagctacttctggtactactcgat

SEQ ID NO: 103440 - DNA, 25 bp, Saccharomyces pastorianus
cgcagggtttcctagcaagctactt

SEQ ID NO: 103441 - DNA, 25 bp, Saccharomyces pastorianus
tctcaaacttaatacctggcgcatg

SEQ ID NO: 103442 - DNA, 25 bp, Saccharomyces pastorianus
aagagggcgcactcaacattctcaa

SEQ ID NO: 103443 - DNA, 25 bp, Saccharomyces pastorianus
acggctcactgagttcgagtcttca

SEQ ID NO: 103444 - DNA, 25 bp, Saccharomyces pastorianus
caaccggaccggaactcatagtact

SEQ ID NO: 103445 - DNA, 25 bp, Saccharomyces pastorianus
tgacaagtcgattcctcaacaggca

SEQ ID NO: 103446 - DNA, 25 bp, Saccharomyces pastorianus
gtggataatttcatcgctctgtgat

SEQ ID NO: 103447 - DNA, 25 bp, Saccharomyces pastorianus
gaatttacttgtccggtacccgcag

SEQ ID NO: 103448 - DNA, 25 bp, Saccharomyces pastorianus
gatcgacgaaaatggtactctgcta

SEQ ID NO: 103449 - DNA, 25 bp, Saccharomyces pastorianus
aggacgattgcgaaccaggaccatt

SEQ ID NO: 103450 - DNA, 25 bp, Saccharomyces pastorianus
gcgaaccaggaccatttccatagat

SEQ ID NO: 103451 - DNA, 25 bp, Saccharomyces pastorianus
aatggtactctgctagtaccgccac

SEQ ID NO: 103452 - DNA, 25 bp, Saccharomyces pastorianus
tatccgcttaccaaacaagagcaag

SEQ ID NO: 103453 - DNA, 25 bp, Saccharomyces pastorianus
gcaagaaagcacacggaggaaagat

SEQ ID NO: 103454 - DNA, 25 bp, Saccharomyces pastorianus
aagaacagacgcacatacgcctttg

SEQ ID NO: 103455 - DNA, 25 bp, Saccharomyces pastorianus
tacgcctttggcacgcaattatatc

SEQ ID NO: 103456 - DNA, 25 bp, Saccharomyces pastorianus
ctctaccaaatatccgcttaccaaa

SEQ ID NO: 103457 - DNA, 25 bp, Saccharomyces pastorianus
aaagatgaaacctgagatcgacgaa

SEQ ID NO: 103458 - DNA, 25 bp, Saccharomyces pastorianus
tagtaccgccaccaaggacgattgc

SEQ ID NO: 103459 - DNA, 25 bp, Saccharomyces pastorianus
agccgcccagattccgagagattta

SEQ ID NO: 103460 - DNA, 25 bp, Saccharomyces pastorianus
aagacgctcagtacgctcgagttat

SEQ ID NO: 103461 - DNA, 25 bp, Saccharomyces pastorianus
aagcctcgagtattttctttcgaag

SEQ ID NO: 103462 - DNA, 25 bp, Saccharomyces pastorianus
tataggatggtgctctcccagcgag

SEQ ID NO: 103463 - DNA, 25 bp, Saccharomyces pastorianus
gaaggaacagtatgcccagagacaa

SEQ ID NO: 103464 - DNA, 25 bp, Saccharomyces pastorianus
gacagttccatgtcgcgagacctat

SEQ ID NO: 103465 - DNA, 25 bp, Saccharomyces pastorianus
gacgcctcaaggaacgacgacgacg

SEQ ID NO: 103466 - DNA, 25 bp, Saccharomyces pastorianus
atccatgctccgtcattagtcgaag

SEQ ID NO: 103467 - DNA, 25 bp, Saccharomyces pastorianus
agatttatcgtcacatctgcagccg

SEQ ID NO: 103468 - DNA, 25 bp, Saccharomyces pastorianus
tttgcgccgccaacaacaactggaa

SEQ ID NO: 103469 - DNA, 25 bp, Saccharomyces pastorianus
atacacattcagtatgtcccgctag

SEQ ID NO: 103470 - DNA, 25 bp, Saccharomyces pastorianus
gaactgtctagctctgtcaaatgcg

SEQ ID NO: 103471 - DNA, 25 bp, Saccharomyces pastorianus
taacgacaacactacttgcgtttgt

SEQ ID NO: 103472 - DNA, 25 bp, Saccharomyces pastorianus
aagtgacgacggtgtggccacagaa

SEQ ID NO: 103473 - DNA, 25 bp, Saccharomyces pastorianus
aattggagacccttactctgaaaca

SEQ ID NO: 103474 - DNA, 25 bp, Saccharomyces pastorianus
aaccgcctccaaaatgaacttcaag

SEQ ID NO: 103475 - DNA, 25 bp, Saccharomyces pastorianus
gataaccccaatgggctctgtagta

SEQ ID NO: 103476 - DNA, 25 bp, Saccharomyces pastorianus
gaatcggaaaatcatgcccttaaac

SEQ ID NO: 103477 - DNA, 25 bp, Saccharomyces pastorianus
ggaccctatcctgcagaatttgatc

SEQ ID NO: 103478 - DNA, 25 bp, Saccharomyces pastorianus
gtacaataccgctatcaagcgccac

SEQ ID NO: 103479 - DNA, 25 bp, Saccharomyces pastorianus
tatgtcgatgccacatgcagagtgc

SEQ ID NO: 103480 - DNA, 25 bp, Saccharomyces pastorianus
tgaaacaagcctctgtgcctgctca

SEQ ID NO: 103481 - DNA, 25 bp, Saccharomyces pastorianus
gggattccgtaattaggtgcaacaa

SEQ ID NO: 103482 - DNA, 25 bp, Saccharomyces pastorianus
atcgcatgccttgggattccgtaat

SEQ ID NO: 103483 - DNA, 25 bp, Saccharomyces pastorianus
attgcctatcggtggtgtgattaac

SEQ ID NO: 103484 - DNA, 25 bp, Saccharomyces pastorianus
gacagaacttctattgcctatcggt

SEQ ID NO: 103485 - DNA, 25 bp, Saccharomyces pastorianus
gatcgtactgggacatcgcatgcct

SEQ ID NO: 103486 - DNA, 25 bp, Saccharomyces pastorianus
aacaatacgggcacaactcattctg

SEQ ID NO: 103487 - DNA, 25 bp, Saccharomyces pastorianus
tgttgtctttttaacgatcgtactg

SEQ ID NO: 103488 - DNA, 25 bp, Saccharomyces pastorianus
gtcaggcattgcacaaactttttta

SEQ ID NO: 103489 - DNA, 25 bp, Saccharomyces pastorianus
cagatcagtcattcatgttgtcttt

SEQ ID NO: 103490 - DNA, 25 bp, Saccharomyces pastorianus
tgcgctatcttcacggacagaactt

SEQ ID NO: 103491 - DNA, 25 bp, Saccharomyces pastorianus
ttatttctgcctatactcttaaaca

SEQ ID NO: 103492 - DNA, 25 bp, Saccharomyces pastorianus
aacaagttgactttgccatcttcaa

SEQ ID NO: 103493 - DNA, 25 bp, Saccharomyces pastorianus
tttgccatcttcaacgagacgaccc

SEQ ID NO: 103494 - DNA, 25 bp, Saccharomyces pastorianus
gtcaggaaaacactaaacaagttga

SEQ ID NO: 103495 - DNA, 25 bp, Saccharomyces pastorianus
actttgccatcttcaacgagacgac

SEQ ID NO: 103496 - DNA, 25 bp, Saccharomyces pastorianus
gatattctgtcttctgtcagtggca

SEQ ID NO: 103497 - DNA, 25 bp, Saccharomyces pastorianus
gctcgaaaatgccacatcgagagac

SEQ ID NO: 103498 - DNA, 25 bp, Saccharomyces pastorianus
gagacgacccctcaactgctcgaaa

SEQ ID NO: 103499 - DNA, 25 bp, Saccharomyces pastorianus
tgactttgccatcttcaacgagacg

SEQ ID NO: 103500 - DNA, 25 bp, Saccharomyces pastorianus
ctcaactgctcgaaaatgccacatc

SEQ ID NO: 103501 - DNA, 25 bp, Saccharomyces pastorianus
gagtcgtttgtcaggaaaacactaa

SEQ ID NO: 103502 - DNA, 25 bp, Saccharomyces pastorianus
gaaaatgagtcgtttgtcaggaaaa

SEQ ID NO: 103503 - DNA, 25 bp, Saccharomyces pastorianus
ggcgtctttttagtgtcataccatt

SEQ ID NO: 103504 - DNA, 25 bp, Saccharomyces pastorianus
ataccaacctatacttccattgctg

SEQ ID NO: 103505 - DNA, 25 bp, Saccharomyces pastorianus
ttactacctaggatcatcgacaatg

SEQ ID NO: 103506 - DNA, 25 bp, Saccharomyces pastorianus
gtaaccacagatattcaataccaac

SEQ ID NO: 103507 - DNA, 25 bp, Saccharomyces pastorianus
ttctcaatggcgtctttttagtgtc

SEQ ID NO: 103508 - DNA, 25 bp, Saccharomyces pastorianus
gtcataccattcttttttactacct

SEQ ID NO: 103509 - DNA, 25 bp, Saccharomyces pastorianus
tacaaatctatagccgggatcaccg

SEQ ID NO: 103510 - DNA, 25 bp, Saccharomyces pastorianus
ggagacatctttagagtaaccacag

SEQ ID NO: 103511 - DNA, 25 bp, Saccharomyces pastorianus
gggatcaccgaccttgttatattct

SEQ ID NO: 103512 - DNA, 25 bp, Saccharomyces pastorianus
gagttttaaaatttgctttgcggca

SEQ ID NO: 103513 - DNA, 25 bp, Saccharomyces pastorianus
gaccttgttatattcttcggagaca

SEQ ID NO: 103514 - DNA, 25 bp, Saccharomyces pastorianus
ttcttcgtacgtatagcaacctcgc

SEQ ID NO: 103515 - DNA, 25 bp, Saccharomyces pastorianus
caatctacaacattttcaggccggt

SEQ ID NO: 103516 - DNA, 25 bp, Saccharomyces pastorianus
gacccgctaatgtgtcttcatttgg

SEQ ID NO: 103517 - DNA, 25 bp, Saccharomyces pastorianus
gcaacctcgctgatattgtgatgaa

SEQ ID NO: 103518 - DNA, 25 bp, Saccharomyces pastorianus
gaaggattgtctttccctggacaca

SEQ ID NO: 103519 - DNA, 25 bp, Saccharomyces pastorianus
gacagaggtgtttctcgctactatg

SEQ ID NO: 103520 - DNA, 25 bp, Saccharomyces pastorianus
tgcgatccgccttcgataatgacat

SEQ ID NO: 103521 - DNA, 25 bp, Saccharomyces pastorianus
gggcctaaacttctccctgaaggat

SEQ ID NO: 103522 - DNA, 25 bp, Saccharomyces pastorianus
ggtaggttggactcaggcgtcctaa

SEQ ID NO: 103523 - DNA, 25 bp, Saccharomyces pastorianus
atactatcctcgacaacgggcctaa

SEQ ID NO: 103524 - DNA, 25 bp, Saccharomyces pastorianus
gaggttgtcaccaagcgattgctgc

SEQ ID NO: 103525 - DNA, 25 bp, Saccharomyces pastorianus
atacgtatacttttttccattggca

SEQ ID NO: 103526 - DNA, 25 bp, Saccharomyces pastorianus
aatggtgcagaaacaatatactaca

SEQ ID NO: 103527 - DNA, 25 bp, Saccharomyces pastorianus
ctgttgctcttattattattaccat

SEQ ID NO: 103528 - DNA, 25 bp, Saccharomyces pastorianus
ttccattggcaaaagcgatttcaaa

SEQ ID NO: 103529 - DNA, 25 bp, Saccharomyces pastorianus
gctggtatcttctatttcagagagc

SEQ ID NO: 103530 - DNA, 25 bp, Saccharomyces pastorianus
tttttccattggcaaaagcgatttc

SEQ ID NO: 103531 - DNA, 25 bp, Saccharomyces pastorianus
tgctggtatcttctatttcagagag

SEQ ID NO: 103532 - DNA, 25 bp, Saccharomyces pastorianus
tacgtatacttttttccattggcaa

SEQ ID NO: 103533 - DNA, 25 bp, Saccharomyces pastorianus
ttaccatacgtatacttttttccat

SEQ ID NO: 103534 - DNA, 25 bp, Saccharomyces pastorianus
gtatacttttttccattggcaaaag

SEQ ID NO: 103535 - DNA, 25 bp, Saccharomyces pastorianus
accatacgtatacttttttccattg

SEQ ID NO: 103536 - DNA, 25 bp, Saccharomyces pastorianus
atacgtatacttttttccattggca

SEQ ID NO: 103537 - DNA, 25 bp, Saccharomyces pastorianus
aatggtgcagaaacaatatactaca

SEQ ID NO: 103538 - DNA, 25 bp, Saccharomyces pastorianus
ctgttgctcttattattattaccat

SEQ ID NO: 103539 - DNA, 25 bp, Saccharomyces pastorianus
ttccattggcaaaagcgatttcaaa

SEQ ID NO: 103540 - DNA, 25 bp, Saccharomyces pastorianus
gctggtatcttctatttcagagagc

SEQ ID NO: 103541 - DNA, 25 bp, Saccharomyces pastorianus
tttttccattggcaaaagcgatttc

SEQ ID NO: 103542 - DNA, 25 bp, Saccharomyces pastorianus
tgctggtatcttctatttcagagag

SEQ ID NO: 103543 - DNA, 25 bp, Saccharomyces pastorianus
tacgtatacttttttccattggcaa

SEQ ID NO: 103544 - DNA, 25 bp, Saccharomyces pastorianus
ttaccatacgtatacttttttccat

SEQ ID NO: 103545 - DNA, 25 bp, Saccharomyces pastorianus
gtatacttttttccattggcaaaag

SEQ ID NO: 103546 - DNA, 25 bp, Saccharomyces pastorianus
accatacgtatacttttttccattg

SEQ ID NO: 103547 - DNA, 25 bp, Saccharomyces pastorianus
tccacaactagggtacattacgatt

SEQ ID NO: 103548 - DNA, 25 bp, Saccharomyces pastorianus
tactttccacaactagggtacatta

SEQ ID NO: 103549 - DNA, 25 bp, Saccharomyces pastorianus
tggattagcgagaacaaatatgcca

SEQ ID NO: 103550 - DNA, 25 bp, Saccharomyces pastorianus
ttacttgaacaagtcaaaggagatt

SEQ ID NO: 103551 - DNA, 25 bp, Saccharomyces pastorianus
tttccacaactagggtacattacga

SEQ ID NO: 103552 - DNA, 25 bp, Saccharomyces pastorianus
caaatatgccaagtttgcattgtta

SEQ ID NO: 103553 - DNA, 25 bp, Saccharomyces pastorianus
tcaagggttactttccacaactagg

SEQ ID NO: 103554 - DNA, 25 bp, Saccharomyces pastorianus
gaacaaatatgccaagtttgcattg

SEQ ID NO: 103555 - DNA, 25 bp, Saccharomyces pastorianus
gagttttgagacaacataacaatca

SEQ ID NO: 103556 - DNA, 25 bp, Saccharomyces pastorianus
ttactttccacaactagggtacatt

SEQ ID NO: 103557 - DNA, 25 bp, Saccharomyces pastorianus
gttactttccacaactagggtacat

SEQ ID NO: 103558 - DNA, 25 bp, Saccharomyces pastorianus
acgcctttaccatttgcgccaaata

SEQ ID NO: 103559 - DNA, 25 bp, Saccharomyces pastorianus
cttcaccaagagtcaattccagcac

SEQ ID NO: 103560 - DNA, 25 bp, Saccharomyces pastorianus
gtcaggtgtacaatcgcaaatccca

SEQ ID NO: 103561 - DNA, 25 bp, Saccharomyces pastorianus
tcttgcaacaactaaactcctttcc

SEQ ID NO: 103562 - DNA, 25 bp, Saccharomyces pastorianus
acaatcttcaccaaatgttacgccc

SEQ ID NO: 103563 - DNA, 25 bp, Saccharomyces pastorianus
gaatcgcagggaagtccagccataa

SEQ ID NO: 103564 - DNA, 25 bp, Saccharomyces pastorianus
gaatctgccccaggaaatcttgcaa

SEQ ID NO: 103565 - DNA, 25 bp, Saccharomyces pastorianus
tttaacgtgggatcacctgccatga

SEQ ID NO: 103566 - DNA, 25 bp, Saccharomyces pastorianus
tgttacgccctctcatatgagcaga

SEQ ID NO: 103567 - DNA, 25 bp, Saccharomyces pastorianus
taatagcaacaacacgcctttacca

SEQ ID NO: 103568 - DNA, 25 bp, Saccharomyces pastorianus
catgaccgagcaaggatctccttta

SEQ ID NO: 103569 - DNA, 25 bp, Saccharomyces pastorianus
gacatttgtgctggaattgactctt

SEQ ID NO: 103570 - DNA, 25 bp, Saccharomyces pastorianus
ggttcgagtttggattatcgtcctt

SEQ ID NO: 103571 - DNA, 25 bp, Saccharomyces pastorianus
gtctggtttcgttaattgaggtcaa

SEQ ID NO: 103572 - DNA, 25 bp, Saccharomyces pastorianus
agttgcgcttgtttcctggttcgag

SEQ ID NO: 103573 - DNA, 25 bp, Saccharomyces pastorianus
ctgactcttgtctggtttcgttaat

SEQ ID NO: 103574 - DNA, 25 bp, Saccharomyces pastorianus
tttctcttcctgctgttttttcatc

SEQ ID NO: 103575 - DNA, 25 bp, Saccharomyces pastorianus
ttttttcatctgcagcgtcacctga

SEQ ID NO: 103576 - DNA, 25 bp, Saccharomyces pastorianus
tagtttggttaccagttgcgcttgt

SEQ ID NO: 103577 - DNA, 25 bp, Saccharomyces pastorianus
ttgagttccgttgatgattcctcgt

SEQ ID NO: 103578 - DNA, 25 bp, Saccharomyces pastorianus
atgattcctcgttggcggttctttc

SEQ ID NO: 103579 - DNA, 25 bp, Saccharomyces pastorianus
tatcgtccttgagttccgttgatga

SEQ ID NO: 103580 - DNA, 25 bp, Saccharomyces pastorianus
aaaactccagatgctggcgttaaga

SEQ ID NO: 103581 - DNA, 25 bp, Saccharomyces pastorianus
tgttgcatcagcaaatgcgggcatt

SEQ ID NO: 103582 - DNA, 25 bp, Saccharomyces pastorianus
aaaggtagacttcgacgcaggtgat

SEQ ID NO: 103583 - DNA, 25 bp, Saccharomyces pastorianus
gataaccgctagaactgttgcatca

SEQ ID NO: 103584 - DNA, 25 bp, Saccharomyces pastorianus
gaatttgcgtttaggaatcgtcggc

SEQ ID NO: 103585 - DNA, 25 bp, Saccharomyces pastorianus
gagactgatattgtggttcctaagg

SEQ ID NO: 103586 - DNA, 25 bp, Saccharomyces pastorianus
atttgggtcgatattaaacgcagta

SEQ ID NO: 103587 - DNA, 25 bp, Saccharomyces pastorianus
ggtttacctaagtggtgatgtccat

SEQ ID NO: 103588 - DNA, 25 bp, Saccharomyces pastorianus
agaagccttgctcccataaagataa

SEQ ID NO: 103589 - DNA, 25 bp, Saccharomyces pastorianus
aatcgtcggcaagaacgcaactggg

SEQ ID NO: 103590 - DNA, 25 bp, Saccharomyces pastorianus
gtccatatgatgatgaaccaaccag

SEQ ID NO: 103591 - DNA, 25 bp, Saccharomyces pastorianus
gggattacacctgatctagcgagta

SEQ ID NO: 103592 - DNA, 25 bp, Saccharomyces pastorianus
gaattgtgccggatgacttattaat

SEQ ID NO: 103593 - DNA, 25 bp, Saccharomyces pastorianus
agcgaatacagccaagagccgactt

SEQ ID NO: 103594 - DNA, 25 bp, Saccharomyces pastorianus
tacaggattgcgtagcatgccaaat

SEQ ID NO: 103595 - DNA, 25 bp, Saccharomyces pastorianus
aatggctctataggacgcgtgatac

SEQ ID NO: 103596 - DNA, 25 bp, Saccharomyces pastorianus
acagtttgtggaagaggctcatcat

SEQ ID NO: 103597 - DNA, 25 bp, Saccharomyces pastorianus
gcgtgatactgcctcatattctaca

SEQ ID NO: 103598 - DNA, 25 bp, Saccharomyces pastorianus
gtatggccatacttgcgaataacag

SEQ ID NO: 103599 - DNA, 25 bp, Saccharomyces pastorianus
gagccgacttcttatggtgggatta

SEQ ID NO: 103600 - DNA, 25 bp, Saccharomyces pastorianus
tcacgctccctacaacagtttgtgg

SEQ ID NO: 103601 - DNA, 25 bp, Saccharomyces pastorianus
ttaatgagacccacttcactgtcac

SEQ ID NO: 103602 - DNA, 25 bp, Saccharomyces pastorianus
gatcaatttcccttacaatccactg

SEQ ID NO: 103603 - DNA, 25 bp, Saccharomyces pastorianus
atcgggcagcgaattggtctccaat

SEQ ID NO: 103604 - DNA, 25 bp, Saccharomyces pastorianus
tatcaagttagatccatcgggcagc

SEQ ID NO: 103605 - DNA, 25 bp, Saccharomyces pastorianus
aagagcaaggtcaccgcagtcagat

SEQ ID NO: 103606 - DNA, 25 bp, Saccharomyces pastorianus
acaaccccgcctataagcagtggaa

SEQ ID NO: 103607 - DNA, 25 bp, Saccharomyces pastorianus
ttggcgttatctacatctttcatcg

SEQ ID NO: 103608 - DNA, 25 bp, Saccharomyces pastorianus
cgccaactcccatcgtattattgat

SEQ ID NO: 103609 - DNA, 25 bp, Saccharomyces pastorianus
gaagttttcatgtccaggctgttca

SEQ ID NO: 103610 - DNA, 25 bp, Saccharomyces pastorianus
tgtggtaagtgggtcatccccgcta

SEQ ID NO: 103611 - DNA, 25 bp, Saccharomyces pastorianus
ttgctctcattttttcatcgaacct

SEQ ID NO: 103612 - DNA, 25 bp, Saccharomyces pastorianus
gagggacacttcatcaagcgggccg

SEQ ID NO: 103613 - DNA, 25 bp, Saccharomyces pastorianus
gagccacccactttaaatgttgtcc

SEQ ID NO: 103614 - DNA, 25 bp, Saccharomyces pastorianus
gccatgcacccctgagttgaagaac

SEQ ID NO: 103615 - DNA, 25 bp, Saccharomyces pastorianus
cattgatgtttacccaaggctgctc

SEQ ID NO: 103616 - DNA, 25 bp, Saccharomyces pastorianus
gtcagggctaccagtcacaacagag

SEQ ID NO: 103617 - DNA, 25 bp, Saccharomyces pastorianus
atcgccaaggcctatgggacgcttt

SEQ ID NO: 103618 - DNA, 25 bp, Saccharomyces pastorianus
ccgtcggactaggtttgccattgat

SEQ ID NO: 103619 - DNA, 25 bp, Saccharomyces pastorianus
ggatgacggtcaagggcacagtttt

SEQ ID NO: 103620 - DNA, 25 bp, Saccharomyces pastorianus
atccgctctgagtctaatcgccaag

SEQ ID NO: 103621 - DNA, 25 bp, Saccharomyces pastorianus
aaggctgctctttggtcgatatcgt

SEQ ID NO: 103622 - DNA, 25 bp, Saccharomyces pastorianus
aattgactgcctacaacgggatgac

SEQ ID NO: 103623 - DNA, 25 bp, Saccharomyces pastorianus
agaaaggcacgtgcgtcagggctac

SEQ ID NO: 103624 - DNA, 25 bp, Saccharomyces pastorianus
gagggcctttgttgcgtatatttgc

SEQ ID NO: 103625 - DNA, 25 bp, Saccharomyces pastorianus
actcccgtaaccaattttctgacag

SEQ ID NO: 103626 - DNA, 25 bp, Saccharomyces pastorianus
gttcaagtaagttcaccagcgcttt

SEQ ID NO: 103627 - DNA, 25 bp, Saccharomyces pastorianus
aatttggtgccaattggagggcctt

SEQ ID NO: 103628 - DNA, 25 bp, Saccharomyces pastorianus
tgtccgtggaacttaatggccagtt

SEQ ID NO: 103629 - DNA, 25 bp, Saccharomyces pastorianus
cagcgctttgggtgcttatgcaatt

SEQ ID NO: 103630 - DNA, 25 bp, Saccharomyces pastorianus
gtatcgctccaaatttaccaggttt

SEQ ID NO: 103631 - DNA, 25 bp, Saccharomyces pastorianus
gtcatttgcgcggattatttcgtag

SEQ ID NO: 103632 - DNA, 25 bp, Saccharomyces pastorianus
attcctggcacagaagggttccttt

SEQ ID NO: 103633 - DNA, 25 bp, Saccharomyces pastorianus
ttatgttacttttttcctgtccctg

SEQ ID NO: 103634 - DNA, 25 bp, Saccharomyces pastorianus
gtagggatgatctctgcgatgacac

SEQ ID NO: 103635 - DNA, 25 bp, Saccharomyces pastorianus
gagtgtggtccttcgcaaaggcatc

SEQ ID NO: 103636 - DNA, 25 bp, Saccharomyces pastorianus
gataatttgctactaccaggacgag

SEQ ID NO: 103637 - DNA, 25 bp, Saccharomyces pastorianus
agaaaggtttactcacatcaagctg

SEQ ID NO: 103638 - DNA, 25 bp, Saccharomyces pastorianus
acttccctcagttcattaccgtgga

SEQ ID NO: 103639 - DNA, 25 bp, Saccharomyces pastorianus
aactgggcagggagtcttctttcat

SEQ ID NO: 103640 - DNA, 25 bp, Saccharomyces pastorianus
gtattctgatcaacacttcggttca

SEQ ID NO: 103641 - DNA, 25 bp, Saccharomyces pastorianus
aaaggcatcttttcgttagaggcaa

SEQ ID NO: 103642 - DNA, 25 bp, Saccharomyces pastorianus
gagtctcccatgtcaaattaacgat

SEQ ID NO: 103643 - DNA, 25 bp, Saccharomyces pastorianus
accaggtcatactgattgggcggta

SEQ ID NO: 103644 - DNA, 25 bp, Saccharomyces pastorianus
gcaatggtgctgtcgctttaaagta

SEQ ID NO: 103645 - DNA, 25 bp, Saccharomyces pastorianus
gaagagttgttcctccagaactcaa

SEQ ID NO: 103646 - DNA, 25 bp, Saccharomyces pastorianus
agaagttctctattattacctcaaa

SEQ ID NO: 103647 - DNA, 25 bp, Saccharomyces pastorianus
gcacgctgtttctggacacgattga

SEQ ID NO: 103648 - DNA, 25 bp, Saccharomyces pastorianus
gattgagatcggcttacagattcta

SEQ ID NO: 103649 - DNA, 25 bp, Saccharomyces pastorianus
tttcagatcatcctttggtagcaaa

SEQ ID NO: 103650 - DNA, 25 bp, Saccharomyces pastorianus
taggttgtgcaggattctcgggatt

SEQ ID NO: 103651 - DNA, 25 bp, Saccharomyces pastorianus
ttaaaagtatggaggcctgccttcc

SEQ ID NO: 103652 - DNA, 25 bp, Saccharomyces pastorianus
attccaaagggatggcacgctgttt

SEQ ID NO: 103653 - DNA, 25 bp, Saccharomyces pastorianus
gaaacgtcgccaccacaaattgatg

SEQ ID NO: 103654 - DNA, 25 bp, Saccharomyces pastorianus
ttcccctcttaattgatgaccagga

SEQ ID NO: 103655 - DNA, 25 bp, Saccharomyces pastorianus
atcagttatttcacagggccagaaa

SEQ ID NO: 103656 - DNA, 25 bp, Saccharomyces pastorianus
gatttacaggtcctcgacttacata

SEQ ID NO: 103657 - DNA, 25 bp, Saccharomyces pastorianus
acagcgcctaaaattcttcgaatat

SEQ ID NO: 103658 - DNA, 25 bp, Saccharomyces pastorianus
atatcttagcggtcaattctggagt

SEQ ID NO: 103659 - DNA, 25 bp, Saccharomyces pastorianus
ttgttcttttcacccagcggacttg

SEQ ID NO: 103660 - DNA, 25 bp, Saccharomyces pastorianus
ggctgccaaggcaaacttgttcttt

SEQ ID NO: 103661 - DNA, 25 bp, Saccharomyces pastorianus
agcggacttgctgaagccaattttg

SEQ ID NO: 103662 - DNA, 25 bp, Saccharomyces pastorianus
gccaattttgcagtctcttcattta

SEQ ID NO: 103663 - DNA, 25 bp, Saccharomyces pastorianus
ggagttactttgtcaccggtatcac

SEQ ID NO: 103664 - DNA, 25 bp, Saccharomyces pastorianus
atcaggccttatcagctcaaatttg

SEQ ID NO: 103665 - DNA, 25 bp, Saccharomyces pastorianus
agattttaccagtgacttcaggcaa

SEQ ID NO: 103666 - DNA, 25 bp, Saccharomyces pastorianus
tcaatttgtcataccttatcaggcc

SEQ ID NO: 103667 - DNA, 25 bp, Saccharomyces pastorianus
caactggtttggcacttggcttaat

SEQ ID NO: 103668 - DNA, 25 bp, Saccharomyces pastorianus
ttttgtcccggatgtacatgttaca

SEQ ID NO: 103669 - DNA, 25 bp, Saccharomyces pastorianus
gataccggtgacaaagtaactccag

SEQ ID NO: 103670 - DNA, 25 bp, Saccharomyces pastorianus
actgcggaagtatcacgttgtcaat

SEQ ID NO: 103671 - DNA, 25 bp, Saccharomyces pastorianus
gtgttgtcttaagtgataccggtga

SEQ ID NO: 103672 - DNA, 25 bp, Saccharomyces pastorianus
ttgatggaagatgccgctactgcgg

SEQ ID NO: 103673 - DNA, 25 bp, Saccharomyces pastorianus
aattggcttcagcaagtccgctggg

SEQ ID NO: 103674 - DNA, 25 bp, Saccharomyces pastorianus
gcgacttcttgaccactttattgta

SEQ ID NO: 103675 - DNA, 25 bp, Saccharomyces pastorianus
gtaactccagaattgaccgctaaga

SEQ ID NO: 103676 - DNA, 25 bp, Saccharomyces pastorianus
gtattttttgcctgaagtcactggt

SEQ ID NO: 103677 - DNA, 25 bp, Saccharomyces pastorianus
gattcaagatgctcaagtcactact

SEQ ID NO: 103678 - DNA, 25 bp, Saccharomyces pastorianus
gaacaagtttgccttggcagccaag

SEQ ID NO: 103679 - DNA, 25 bp, Saccharomyces pastorianus
atgcgcccatgatagtacttggcaa

SEQ ID NO: 103680 - DNA, 25 bp, Saccharomyces pastorianus
aatcaggccgttacctatggcttag

SEQ ID NO: 103681 - DNA, 25 bp, Saccharomyces pastorianus
ggcgatttctcattctatcaaagtc

SEQ ID NO: 103682 - DNA, 25 bp, Saccharomyces pastorianus
gtagtacgcagacgtttgtgcctat

SEQ ID NO: 103683 - DNA, 25 bp, Saccharomyces pastorianus
agtcctcgaaaagcatccgtgtagt

SEQ ID NO: 103684 - DNA, 25 bp, Saccharomyces pastorianus
aaggctccaatcaggcgatttctca

SEQ ID NO: 103685 - DNA, 25 bp, Saccharomyces pastorianus
tatggcttaggtacctggcatgcgc

SEQ ID NO: 103686 - DNA, 25 bp, Saccharomyces pastorianus
gacttgtctacgttgagggctttta

SEQ ID NO: 103687 - DNA, 25 bp, Saccharomyces pastorianus
agagtattcactcaaggctccaatc

SEQ ID NO: 103688 - DNA, 25 bp, Saccharomyces pastorianus
ttaatctacgaaagtctggaccctg

SEQ ID NO: 103689 - DNA, 25 bp, Saccharomyces pastorianus
ttggaacctattccgttgctttcca

SEQ ID NO: 103690 - DNA, 25 bp, Saccharomyces pastorianus
ggaacaaagcgaactccttgatatt

SEQ ID NO: 103691 - DNA, 25 bp, Saccharomyces pastorianus
ccttgatattggatctagcgccaac

SEQ ID NO: 103692 - DNA, 25 bp, Saccharomyces pastorianus
gatgaagatctgttcgtcactgacg

SEQ ID NO: 103693 - DNA, 25 bp, Saccharomyces pastorianus
aaaaaccaggtgttgcatgcaggga

SEQ ID NO: 103694 - DNA, 25 bp, Saccharomyces pastorianus
ttctggatacccttaacactactac

SEQ ID NO: 103695 - DNA, 25 bp, Saccharomyces pastorianus
tattgtggagcagtcagcatctaat

SEQ ID NO: 103696 - DNA, 25 bp, Saccharomyces pastorianus
tagcgccaacgaacccgaagaggat

SEQ ID NO: 103697 - DNA, 25 bp, Saccharomyces pastorianus
atggtagtacatctctctggaatag

SEQ ID NO: 103698 - DNA, 25 bp, Saccharomyces pastorianus
atatgaggatctgttcccgttgtct

SEQ ID NO: 103699 - DNA, 25 bp, Saccharomyces pastorianus
acactactacttttgacatggttca

SEQ ID NO: 103700 - DNA, 25 bp, Saccharomyces pastorianus
tggcaaccaagatagttccatcaat

SEQ ID NO: 103701 - DNA, 25 bp, Saccharomyces pastorianus
gtggacgtatcagcagacactacca

SEQ ID NO: 103702 - DNA, 25 bp, Saccharomyces pastorianus
gcgccagaaagccaaccgtgttaat

SEQ ID NO: 103703 - DNA, 25 bp, Saccharomyces pastorianus
aggaagatgtggttccggtgccatc

SEQ ID NO: 103704 - DNA, 25 bp, Saccharomyces pastorianus
cggtgccatcgatctgttgcacaaa

SEQ ID NO: 103705 - DNA, 25 bp, Saccharomyces pastorianus
tatcgaagccaattgctcctttcac

SEQ ID NO: 103706 - DNA, 25 bp, Saccharomyces pastorianus
cttttaccatctttagagctcctac

SEQ ID NO: 103707 - DNA, 25 bp, Saccharomyces pastorianus
agtgtcgccttaccccaatgaaaag

SEQ ID NO: 103708 - DNA, 25 bp, Saccharomyces pastorianus
ccgtgttaatcattggtgcgctagg

SEQ ID NO: 103709 - DNA, 25 bp, Saccharomyces pastorianus
gtcatctctattgatcacttgcctt

SEQ ID NO: 103710 - DNA, 25 bp, Saccharomyces pastorianus
acttgccttctttgctgccaagaga

SEQ ID NO: 103711 - DNA, 25 bp, Saccharomyces pastorianus
agaaaaactgctcctgtctgggtta

SEQ ID NO: 103712 - DNA, 25 bp, Saccharomyces pastorianus
gtcgccccaggtattgtggacacag

SEQ ID NO: 103713 - DNA, 25 bp, Saccharomyces pastorianus
gtatgacatcaacttcttcagcatt

SEQ ID NO: 103714 - DNA, 25 bp, Saccharomyces pastorianus
gtgccagctacagtttatgccaaat

SEQ ID NO: 103715 - DNA, 25 bp, Saccharomyces pastorianus
gttcggacgcctgtaacatgtactt

SEQ ID NO: 103716 - DNA, 25 bp, Saccharomyces pastorianus
aaattggcccttcatggtattcctg

SEQ ID NO: 103717 - DNA, 25 bp, Saccharomyces pastorianus
gttggcattgcgttacctgaattga

SEQ ID NO: 103718 - DNA, 25 bp, Saccharomyces pastorianus
aagatcgactccttggttgccaacg

SEQ ID NO: 103719 - DNA, 25 bp, Saccharomyces pastorianus
ttcagcattgtttccttggttggca

SEQ ID NO: 103720 - DNA, 25 bp, Saccharomyces pastorianus
tggtgtcctagagcccgtgcaaaat

SEQ ID NO: 103721 - DNA, 25 bp, Saccharomyces pastorianus
acggttcttcaaaagccgctctgaa

SEQ ID NO: 103722 - DNA, 25 bp, Saccharomyces pastorianus
aacgctgctgttaagggccacggca

SEQ ID NO: 103723 - DNA, 25 bp, Saccharomyces pastorianus
ctagcgcaactcgtcctgaaaggta

SEQ ID NO: 103724 - DNA, 25 bp, Saccharomyces pastorianus
aacattgggtcctcagggcatgaca

SEQ ID NO: 103725 - DNA, 25 bp, Saccharomyces pastorianus
gaagagctcgccatttgtaggcaac

SEQ ID NO: 103726 - DNA, 25 bp, Saccharomyces pastorianus
tgtgtttacccctcttgaagagctc

SEQ ID NO: 103727 - DNA, 25 bp, Saccharomyces pastorianus
acattgccagtgaagagcccagtga

SEQ ID NO: 103728 - DNA, 25 bp, Saccharomyces pastorianus
ttcagcattgtctctttggtggcac

SEQ ID NO: 103729 - DNA, 25 bp, Saccharomyces pastorianus
gctagaaccggtgaagtccatctcc

SEQ ID NO: 103730 - DNA, 25 bp, Saccharomyces pastorianus
aaaccactttgccatggacattgcc

SEQ ID NO: 103731 - DNA, 25 bp, Saccharomyces pastorianus
gtaggcaacattgtcttcgtcagct

SEQ ID NO: 103732 - DNA, 25 bp, Saccharomyces pastorianus
tgacacccaaggctctcgagaggtt

SEQ ID NO: 103733 - DNA, 25 bp, Saccharomyces pastorianus
gtattcccgactctttgaacggtca

SEQ ID NO: 103734 - DNA, 25 bp, Saccharomyces pastorianus
aatcccacgggaggcacctgtaatc

SEQ ID NO: 103735 - DNA, 25 bp, Saccharomyces pastorianus
cgtcctcttcgataacagttttcac

SEQ ID NO: 103736 - DNA, 25 bp, Saccharomyces pastorianus
cagttttcaccaattgcaggccaat

SEQ ID NO: 103737 - DNA, 25 bp, Saccharomyces pastorianus
cccatatcccttctttgacagatta

SEQ ID NO: 103738 - DNA, 25 bp, Saccharomyces pastorianus
gcattatcatttttagccactttac

SEQ ID NO: 103739 - DNA, 25 bp, Saccharomyces pastorianus
gctacgccgtagacgatgcattcat

SEQ ID NO: 103740 - DNA, 25 bp, Saccharomyces pastorianus
aaatttgtctgcaccgtattctctt

SEQ ID NO: 103741 - DNA, 25 bp, Saccharomyces pastorianus
attcgagacctgtccgtgatgtcga

SEQ ID NO: 103742 - DNA, 25 bp, Saccharomyces pastorianus
agttgtttctcttgttgctgttcgc

SEQ ID NO: 103743 - DNA, 25 bp, Saccharomyces pastorianus
aaagactgcagaccagcttccgttc

SEQ ID NO: 103744 - DNA, 25 bp, Saccharomyces pastorianus
ttatttcctgtattccttcttcttt

SEQ ID NO: 103745 - DNA, 25 bp, Saccharomyces pastorianus
gtggcaatgaggaccctgtttacaa

SEQ ID NO: 103746 - DNA, 25 bp, Saccharomyces pastorianus
tggcgtgactttccccattatgaaa

SEQ ID NO: 103747 - DNA, 25 bp, Saccharomyces pastorianus
aggatttaccatcatcgggttccca

SEQ ID NO: 103748 - DNA, 25 bp, Saccharomyces pastorianus
atgtggattcactcctcaatacaaa

SEQ ID NO: 103749 - DNA, 25 bp, Saccharomyces pastorianus
atgcaaccagtttggccaccaagaa

SEQ ID NO: 103750 - DNA, 25 bp, Saccharomyces pastorianus
gaactagaggccttgtacaaacgtt

SEQ ID NO: 103751 - DNA, 25 bp, Saccharomyces pastorianus
gaagaaattgcccagttctgccaac

SEQ ID NO: 103752 - DNA, 25 bp, Saccharomyces pastorianus
tataagctagcacctgttgacaaga

SEQ ID NO: 103753 - DNA, 25 bp, Saccharomyces pastorianus
ggtgcttatcgttaatgttgcctcc

SEQ ID NO: 103754 - DNA, 25 bp, Saccharomyces pastorianus
agatactcttcactaaccaaaccct

SEQ ID NO: 103755 - DNA, 25 bp, Saccharomyces pastorianus
aaaatccggtatgttgggcttgaga

SEQ ID NO: 103756 - DNA, 25 bp, Saccharomyces pastorianus
gatcagtcaggcatactctagtggt

SEQ ID NO: 103757 - DNA, 25 bp, Saccharomyces pastorianus
agtccggtttcatcttccaatatgt

SEQ ID NO: 103758 - DNA, 25 bp, Saccharomyces pastorianus
aagagatgctaacttccgtgctcca

SEQ ID NO: 103759 - DNA, 25 bp, Saccharomyces pastorianus
gaggattatcctgccatttccaaat

SEQ ID NO: 103760 - DNA, 25 bp, Saccharomyces pastorianus
cttccctatttcgtacttggcaaga

SEQ ID NO: 103761 - DNA, 25 bp, Saccharomyces pastorianus
tgcagcattttgaccattcacacgt

SEQ ID NO: 103762 - DNA, 25 bp, Saccharomyces pastorianus
cagaggagtcgtatgctgcttctaa

SEQ ID NO: 103763 - DNA, 25 bp, Saccharomyces pastorianus
gagcggtgccgatatcttgatgtct

SEQ ID NO: 103764 - DNA, 25 bp, Saccharomyces pastorianus
gttccttgcaaccacctttaatgat

SEQ ID NO: 103765 - DNA, 25 bp, Saccharomyces pastorianus
tgatgtctttccctttgcagatggc

SEQ ID NO: 103766 - DNA, 25 bp, Saccharomyces pastorianus
aagtttgccgcaccagaggattatc

SEQ ID NO: 103767 - DNA, 25 bp, Saccharomyces pastorianus
gaacgatactttactgtccgtcgac

SEQ ID NO: 103768 - DNA, 25 bp, Saccharomyces pastorianus
atataagcccggtagtcccatcgga

SEQ ID NO: 103769 - DNA, 25 bp, Saccharomyces pastorianus
atccgagtccacttatatgctggga

SEQ ID NO: 103770 - DNA, 25 bp, Saccharomyces pastorianus
gacgaccaaggctacatctttgatt

SEQ ID NO: 103771 - DNA, 25 bp, Saccharomyces pastorianus
tacaaataccgttcttctttctcct

SEQ ID NO: 103772 - DNA, 25 bp, Saccharomyces pastorianus
ttgaggttatctccgatactgtccc

SEQ ID NO: 103773 - DNA, 25 bp, Saccharomyces pastorianus
ctgctcccggatactttagtacatg

SEQ ID NO: 103774 - DNA, 25 bp, Saccharomyces pastorianus
ttctttctcaagtagtggcggctct

SEQ ID NO: 103775 - DNA, 25 bp, Saccharomyces pastorianus
agtacaaatcattgcttgccaccgc

SEQ ID NO: 103776 - DNA, 25 bp, Saccharomyces pastorianus
cagctggacctcgtattcggaattt

SEQ ID NO: 103777 - DNA, 25 bp, Saccharomyces pastorianus
tcctatttacccaccgaaattgcag

SEQ ID NO: 103778 - DNA, 25 bp, Saccharomyces pastorianus
ccttttctgtgcctgtgacatttcc

SEQ ID NO: 103779 - DNA, 25 bp, Saccharomyces pastorianus
gtgcctgtgacatttcctttttcgg

SEQ ID NO: 103780 - DNA, 25 bp, Saccharomyces pastorianus
tttctgtgcctgtgacatttccttt

SEQ ID NO: 103781 - DNA, 25 bp, Saccharomyces pastorianus
tgtgcctgtgacatttcctttttcg

SEQ ID NO: 103782 - DNA, 25 bp, Saccharomyces pastorianus
ttctgtgcctgtgacatttcctttt

SEQ ID NO: 103783 - DNA, 25 bp, Saccharomyces pastorianus
cttttctgtgcctgtgacatttcct

SEQ ID NO: 103784 - DNA, 25 bp, Saccharomyces pastorianus
tctgtgcctgtgacatttccttttt

SEQ ID NO: 103785 - DNA, 25 bp, Saccharomyces pastorianus
ctgtgcctgtgacatttcctttttc

SEQ ID NO: 103786 - DNA, 25 bp, Saccharomyces pastorianus
aaacccttttctgtgcctgtgacat

SEQ ID NO: 103787 - DNA, 25 bp, Saccharomyces pastorianus
ttttctgtgcctgtgacatttcctt

SEQ ID NO: 103788 - DNA, 25 bp, Saccharomyces pastorianus
tgtgacatttcctttttcggtcaaa

SEQ ID NO: 103789 - DNA, 25 bp, Saccharomyces pastorianus
aaatagtcattgtacgttgctttct

SEQ ID NO: 103790 - DNA, 25 bp, Saccharomyces pastorianus
tagtcattgtacgttgctttctttt

SEQ ID NO: 103791 - DNA, 25 bp, Saccharomyces pastorianus
gattgtggcctctttccaccacttg

SEQ ID NO: 103792 - DNA, 25 bp, Saccharomyces pastorianus
gaagaaatagtcattgtacgttgct

SEQ ID NO: 103793 - DNA, 25 bp, Saccharomyces pastorianus
agaaatagtcattgtacgttgcttt

SEQ ID NO: 103794 - DNA, 25 bp, Saccharomyces pastorianus
ctggatgtgcagaagaaatagtcat

SEQ ID NO: 103795 - DNA, 25 bp, Saccharomyces pastorianus
aatagtcattgtacgttgctttctt

SEQ ID NO: 103796 - DNA, 25 bp, Saccharomyces pastorianus
atagtcattgtacgttgctttcttt

SEQ ID NO: 103797 - DNA, 25 bp, Saccharomyces pastorianus
attgtggcctctttccaccacttgg

SEQ ID NO: 103798 - DNA, 25 bp, Saccharomyces pastorianus
tgtggcctctttccaccacttgggt

SEQ ID NO: 103799 - DNA, 25 bp, Saccharomyces pastorianus
agattgtggcctctttccaccactt

SEQ ID NO: 103800 - DNA, 25 bp, Saccharomyces pastorianus
gaaatcggcctcatgggtgccaccg

SEQ ID NO: 103801 - DNA, 25 bp, Saccharomyces pastorianus
tatgattgtgtttactatgttcttc

SEQ ID NO: 103802 - DNA, 25 bp, Saccharomyces pastorianus
tttttctcttcattcatagcggtat

SEQ ID NO: 103803 - DNA, 25 bp, Saccharomyces pastorianus
gtgccagcatggaaatcggcctcat

SEQ ID NO: 103804 - DNA, 25 bp, Saccharomyces pastorianus
gtattcttaggctgtctggtttttg

SEQ ID NO: 103805 - DNA, 25 bp, Saccharomyces pastorianus
gtcaccaagacattacttctcaggg

SEQ ID NO: 103806 - DNA, 25 bp, Saccharomyces pastorianus
ccgcagattacgatgctgatgcaat

SEQ ID NO: 103807 - DNA, 25 bp, Saccharomyces pastorianus
gctgtctggtttttgcatactttta

SEQ ID NO: 103808 - DNA, 25 bp, Saccharomyces pastorianus
atactatgtggctggaaggtgtgcc

SEQ ID NO: 103809 - DNA, 25 bp, Saccharomyces pastorianus
gaatggcaatcgcaacagctgcaaa

SEQ ID NO: 103810 - DNA, 25 bp, Saccharomyces pastorianus
tagcggtatacaccattgagaggtt

SEQ ID NO: 103811 - DNA, 25 bp, Saccharomyces pastorianus
ggagacaacttttacgccaatcaca

SEQ ID NO: 103812 - DNA, 25 bp, Saccharomyces pastorianus
tagagtatgccatgcctgtgaccat

SEQ ID NO: 103813 - DNA, 25 bp, Saccharomyces pastorianus
attgccgccggtagtgttgtgattc

SEQ ID NO: 103814 - DNA, 25 bp, Saccharomyces pastorianus
ggtaaaaactccgtgattgccgccg

SEQ ID NO: 103815 - DNA, 25 bp, Saccharomyces pastorianus
gtacctggtgagctttatgatgcga

SEQ ID NO: 103816 - DNA, 25 bp, Saccharomyces pastorianus
gtgacaacgtatttatcgcccctaa

SEQ ID NO: 103817 - DNA, 25 bp, Saccharomyces pastorianus
aacacccttagtcccgctgatgaga

SEQ ID NO: 103818 - DNA, 25 bp, Saccharomyces pastorianus
gataactttataattgaaccgccgt

SEQ ID NO: 103819 - DNA, 25 bp, Saccharomyces pastorianus
tgaaccgccgttttactgtgattac

SEQ ID NO: 103820 - DNA, 25 bp, Saccharomyces pastorianus
gtatttatacggcaggtcatccaat

SEQ ID NO: 103821 - DNA, 25 bp, Saccharomyces pastorianus
gatgcgaactatgatccagatcttt

SEQ ID NO: 103822 - DNA, 25 bp, Saccharomyces pastorianus
atttctgatggccacgcaatgctaa

SEQ ID NO: 103823 - DNA, 25 bp, Saccharomyces pastorianus
aaatgctcgcgatttctggcttcgt

SEQ ID NO: 103824 - DNA, 25 bp, Saccharomyces pastorianus
gcacacctgagcgtggcggattgaa

SEQ ID NO: 103825 - DNA, 25 bp, Saccharomyces pastorianus
ttggaccaatggcttgcacacctga

SEQ ID NO: 103826 - DNA, 25 bp, Saccharomyces pastorianus
gaggcttcaggtgtcttttgataaa

SEQ ID NO: 103827 - DNA, 25 bp, Saccharomyces pastorianus
atcaggctggtatcatggttcgtat

SEQ ID NO: 103828 - DNA, 25 bp, Saccharomyces pastorianus
ttactgcacaagtccgtgttcaggg

SEQ ID NO: 103829 - DNA, 25 bp, Saccharomyces pastorianus
gttagtacgtttggctccatttcca

SEQ ID NO: 103830 - DNA, 25 bp, Saccharomyces pastorianus
ttctggcttcgtgttactgttgaaa

SEQ ID NO: 103831 - DNA, 25 bp, Saccharomyces pastorianus
ctgaccattaccttgttggaccaat

SEQ ID NO: 103832 - DNA, 25 bp, Saccharomyces pastorianus
ggatttacccgtgatagcggtcatt

SEQ ID NO: 103833 - DNA, 25 bp, Saccharomyces pastorianus
atgcttccattatctggtctttgcc

SEQ ID NO: 103834 - DNA, 25 bp, Saccharomyces pastorianus
aagtatcttttctcatcagggcgca

SEQ ID NO: 103835 - DNA, 25 bp, Saccharomyces pastorianus
gggcgcatttataatccgctgatgt

SEQ ID NO: 103836 - DNA, 25 bp, Saccharomyces pastorianus
aaccaaatggcttcacttgtgctaa

SEQ ID NO: 103837 - DNA, 25 bp, Saccharomyces pastorianus
atggtcgcacggttttcaatgcttc

SEQ ID NO: 103838 - DNA, 25 bp, Saccharomyces pastorianus
gatggcttatgtaccaccgatcaac

SEQ ID NO: 103839 - DNA, 25 bp, Saccharomyces pastorianus
ttgaagcaggcgtggcaatctccgt

SEQ ID NO: 103840 - DNA, 25 bp, Saccharomyces pastorianus
ttgattggtttgctattcccactag

SEQ ID NO: 103841 - DNA, 25 bp, Saccharomyces pastorianus
tgtatttttcacaggcccaggcaat

SEQ ID NO: 103842 - DNA, 25 bp, Saccharomyces pastorianus
gtcatcatcttcttgtgtgtacagt

SEQ ID NO: 103843 - DNA, 25 bp, Saccharomyces pastorianus
ccactagccgtttatgctgttcaat

SEQ ID NO: 103844 - DNA, 25 bp, Saccharomyces pastorianus
tacgtcttctcagttatctcggcaa

SEQ ID NO: 103845 - DNA, 25 bp, Saccharomyces pastorianus
tttcccaccaaccttatcgatagaa

SEQ ID NO: 103846 - DNA, 25 bp, Saccharomyces pastorianus
cttcactcatcccttataatgcgtt

SEQ ID NO: 103847 - DNA, 25 bp, Saccharomyces pastorianus
gaatgctgcattgaactcggaccaa

SEQ ID NO: 103848 - DNA, 25 bp, Saccharomyces pastorianus
atagtgtggcaggaacctcgtcgcg

SEQ ID NO: 103849 - DNA, 25 bp, Saccharomyces pastorianus
attcctctttgtgttcactcgtatt

SEQ ID NO: 103850 - DNA, 25 bp, Saccharomyces pastorianus
tatcaagcgctatcgagtcgagctg

SEQ ID NO: 103851 - DNA, 25 bp, Saccharomyces pastorianus
gacatgctgcgttgcctttagatta

SEQ ID NO: 103852 - DNA, 25 bp, Saccharomyces pastorianus
tgtgcaactcgagacatgctgcgtt

SEQ ID NO: 103853 - DNA, 25 bp, Saccharomyces pastorianus
gtgcggatccatacgtacagctaga

SEQ ID NO: 103854 - DNA, 25 bp, Saccharomyces pastorianus
gaaaagccacgccactgagtgcgga

SEQ ID NO: 103855 - DNA, 25 bp, Saccharomyces pastorianus
gatggttctgcaattgcctctgaat

SEQ ID NO: 103856 - DNA, 25 bp, Saccharomyces pastorianus
gaactctgtattcgctgggttagaa

SEQ ID NO: 103857 - DNA, 25 bp, Saccharomyces pastorianus
ttaatgggccgcactgtgggaacca

SEQ ID NO: 103858 - DNA, 25 bp, Saccharomyces pastorianus
taccgggcttttaatgtccattcca

SEQ ID NO: 103859 - DNA, 25 bp, Saccharomyces pastorianus
actcttttccaatacactacttacg

SEQ ID NO: 103860 - DNA, 25 bp, Saccharomyces pastorianus
ttgtatgtcgtcactgtcttggcag

SEQ ID NO: 103861 - DNA, 25 bp, Saccharomyces pastorianus
aacttcctgaggtttctagcagcgg

SEQ ID NO: 103862 - DNA, 25 bp, Saccharomyces pastorianus
cataccagatcgcttgttgtcgtgc

SEQ ID NO: 103863 - DNA, 25 bp, Saccharomyces pastorianus
aaggtctcgttctacgactacttat

SEQ ID NO: 103864 - DNA, 25 bp, Saccharomyces pastorianus
tgcgaactactgttacgtgtgcgtt

SEQ ID NO: 103865 - DNA, 25 bp, Saccharomyces pastorianus
ggctgtgatgtaaccaacttcctga

SEQ ID NO: 103866 - DNA, 25 bp, Saccharomyces pastorianus
gttgacgaaggcacatgattttgat

SEQ ID NO: 103867 - DNA, 25 bp, Saccharomyces pastorianus
gtcaaattactcgatactatacccc

SEQ ID NO: 103868 - DNA, 25 bp, Saccharomyces pastorianus
tgatcctaaccacagaaactctctt

SEQ ID NO: 103869 - DNA, 25 bp, Saccharomyces pastorianus
cagacatttttctttgggcgtgcgc

SEQ ID NO: 103870 - DNA, 25 bp, Saccharomyces pastorianus
aactgtaacccattcattgcatcct

SEQ ID NO: 103871 - DNA, 25 bp, Saccharomyces pastorianus
caagcaatgttagcctatgggtcaa

SEQ ID NO: 103872 - DNA, 25 bp, Saccharomyces pastorianus
ggaatgtggtttccgctttatacat

SEQ ID NO: 103873 - DNA, 25 bp, Saccharomyces pastorianus
ggtaaatttgttgccaatgccaagg

SEQ ID NO: 103874 - DNA, 25 bp, Saccharomyces pastorianus
gatggcacttgtaaacgatttgttg

SEQ ID NO: 103875 - DNA, 25 bp, Saccharomyces pastorianus
atcctccccatgtgatgtcaaatta

SEQ ID NO: 103876 - DNA, 25 bp, Saccharomyces pastorianus
gggcgtgcgcagaattataccagaa

SEQ ID NO: 103877 - DNA, 25 bp, Saccharomyces pastorianus
gaagttattggcaatccacccagta

SEQ ID NO: 103878 - DNA, 25 bp, Saccharomyces pastorianus
gagagatttctctaacgcggcgatc

SEQ ID NO: 103879 - DNA, 25 bp, Saccharomyces pastorianus
gactggtccattgtatctacccaaa

SEQ ID NO: 103880 - DNA, 25 bp, Saccharomyces pastorianus
aagtactgggctagaacttctgcaa

SEQ ID NO: 103881 - DNA, 25 bp, Saccharomyces pastorianus
gtcgggctatgatcgaggccatcaa

SEQ ID NO: 103882 - DNA, 25 bp, Saccharomyces pastorianus
ggccatggatgatacattctactta

SEQ ID NO: 103883 - DNA, 25 bp, Saccharomyces pastorianus
accaacagccaatcctgctagagag

SEQ ID NO: 103884 - DNA, 25 bp, Saccharomyces pastorianus
aaattttctcaacaggccatggatg

SEQ ID NO: 103885 - DNA, 25 bp, Saccharomyces pastorianus
gtgtaagaatcgtgactggtccatt

SEQ ID NO: 103886 - DNA, 25 bp, Saccharomyces pastorianus
agaggatattgctgtcgcggcattt

SEQ ID NO: 103887 - DNA, 25 bp, Saccharomyces pastorianus
ctacttatccaatatgtgtcctcaa

SEQ ID NO: 103888 - DNA, 25 bp, Saccharomyces pastorianus
gagtcttcgttccattctgaatctt

SEQ ID NO: 103889 - DNA, 25 bp, Saccharomyces pastorianus
ttagtgccccagttgcagacaaata

SEQ ID NO: 103890 - DNA, 25 bp, Saccharomyces pastorianus
agagtattacctgatgtcatcgatt

SEQ ID NO: 103891 - DNA, 25 bp, Saccharomyces pastorianus
atcttttttagtgttgcttgcctca

SEQ ID NO: 103892 - DNA, 25 bp, Saccharomyces pastorianus
ggccaagattcttctgccaacaatc

SEQ ID NO: 103893 - DNA, 25 bp, Saccharomyces pastorianus
atttttcagcactaattggccaaga

SEQ ID NO: 103894 - DNA, 25 bp, Saccharomyces pastorianus
agtagtggagctttagtgccccagt

SEQ ID NO: 103895 - DNA, 25 bp, Saccharomyces pastorianus
aagggtgcttcaaatgcgagtaaac

SEQ ID NO: 103896 - DNA, 25 bp, Saccharomyces pastorianus
tttataacgctacgcagcttggcag

SEQ ID NO: 103897 - DNA, 25 bp, Saccharomyces pastorianus
gccatacaacgacagctgcacaaga

SEQ ID NO: 103898 - DNA, 25 bp, Saccharomyces pastorianus
gcttgcctcaaattttatgtctacc

SEQ ID NO: 103899 - DNA, 25 bp, Saccharomyces pastorianus
atcagggtagtcgagttactttcta

SEQ ID NO: 103900 - DNA, 25 bp, Saccharomyces pastorianus
tggtgccacagacaagggtactatt

SEQ ID NO: 103901 - DNA, 25 bp, Saccharomyces pastorianus
ccaccctctaggaattctccaataa

SEQ ID NO: 103902 - DNA, 25 bp, Saccharomyces pastorianus
aagactcttcaattgcctgacgatt

SEQ ID NO: 103903 - DNA, 25 bp, Saccharomyces pastorianus
cgatgattttgtagccgaaggttta

SEQ ID NO: 103904 - DNA, 25 bp, Saccharomyces pastorianus
gaagtgcttcatatctacggagggc

SEQ ID NO: 103905 - DNA, 25 bp, Saccharomyces pastorianus
tacggagggcgcaatttggttaatc

SEQ ID NO: 103906 - DNA, 25 bp, Saccharomyces pastorianus
tgggcttaagtctattggccagtta

SEQ ID NO: 103907 - DNA, 25 bp, Saccharomyces pastorianus
tacatcatttcaggcaaggactcga

SEQ ID NO: 103908 - DNA, 25 bp, Saccharomyces pastorianus
tgttgttccctattttgttgggctt

SEQ ID NO: 103909 - DNA, 25 bp, Saccharomyces pastorianus
attgctttctactgactggtgccac

SEQ ID NO: 103910 - DNA, 25 bp, Saccharomyces pastorianus
aactttatgaacagctcacatccgc

SEQ ID NO: 103911 - DNA, 25 bp, Saccharomyces pastorianus
gcgagtatattcttttactggtcaa

SEQ ID NO: 103912 - DNA, 25 bp, Saccharomyces pastorianus
ttgacagcacgctactatgcaaagg

SEQ ID NO: 103913 - DNA, 25 bp, Saccharomyces pastorianus
gtggcaaaattttctatccctgaag

SEQ ID NO: 103914 - DNA, 25 bp, Saccharomyces pastorianus
cagaaatcttcgaaggctctctaga

SEQ ID NO: 103915 - DNA, 25 bp, Saccharomyces pastorianus
gacattcactgattttgtcgcccag

SEQ ID NO: 103916 - DNA, 25 bp, Saccharomyces pastorianus
atacaatttgcagccattccatggg

SEQ ID NO: 103917 - DNA, 25 bp, Saccharomyces pastorianus
atagcaaggccaccggattttctgt

SEQ ID NO: 103918 - DNA, 25 bp, Saccharomyces pastorianus
aaaccgggaacatgataagctcgta

SEQ ID NO: 103919 - DNA, 25 bp, Saccharomyces pastorianus
gattttctgttctctcaatacgata

SEQ ID NO: 103920 - DNA, 25 bp, Saccharomyces pastorianus
gctcacatccgctacataagacatt

SEQ ID NO: 103921 - DNA, 25 bp, Saccharomyces pastorianus
tttacgctttttgcccttactatct

SEQ ID NO: 103922 - DNA, 25 bp, Saccharomyces pastorianus
taataccagtttgtactcttcgcag

SEQ ID NO: 103923 - DNA, 25 bp, Saccharomyces pastorianus
atgtgctcaattacggtccatcatc

SEQ ID NO: 103924 - DNA, 25 bp, Saccharomyces pastorianus
gcttaccttggtcggatactatctt

SEQ ID NO: 103925 - DNA, 25 bp, Saccharomyces pastorianus
tacgtacgccgttaatagtgataca

SEQ ID NO: 103926 - DNA, 25 bp, Saccharomyces pastorianus
tagagagccttcgaagatttctgtg

SEQ ID NO: 103927 - DNA, 25 bp, Saccharomyces pastorianus
ttcttcttcatttgtcggcttgata

SEQ ID NO: 103928 - DNA, 25 bp, Saccharomyces pastorianus
tgtctctcccacagctctaatttta

SEQ ID NO: 103929 - DNA, 25 bp, Saccharomyces pastorianus
gtccatcatcaacctttacatactt

SEQ ID NO: 103930 - DNA, 25 bp, Saccharomyces pastorianus
cgcagcctcatctgttctaaatcta

SEQ ID NO: 103931 - DNA, 25 bp, Saccharomyces pastorianus
ttactatctcctcctttttgcttac

SEQ ID NO: 103932 - DNA, 25 bp, Saccharomyces pastorianus
agcatgctgctttgtcaccaagatt

SEQ ID NO: 103933 - DNA, 25 bp, Saccharomyces pastorianus
ggcttatgaccttgacggaactgaa

SEQ ID NO: 103934 - DNA, 25 bp, Saccharomyces pastorianus
aacagatcatatttccgctgcgggc

SEQ ID NO: 103935 - DNA, 25 bp, Saccharomyces pastorianus
gctgcgggcgtctggttgaaatata

SEQ ID NO: 103936 - DNA, 25 bp, Saccharomyces pastorianus
gaaacgttgaacctagttgacatga

SEQ ID NO: 103937 - DNA, 25 bp, Saccharomyces pastorianus
gtgtgttgccattgacttttgccaa

SEQ ID NO: 103938 - DNA, 25 bp, Saccharomyces pastorianus
gacttttgccaacgaatctgactat

SEQ ID NO: 103939 - DNA, 25 bp, Saccharomyces pastorianus
aaccggtgaagtcaacaaggcttat

SEQ ID NO: 103940 - DNA, 25 bp, Saccharomyces pastorianus
caccaagatttttaggcggagagat

SEQ ID NO: 103941 - DNA, 25 bp, Saccharomyces pastorianus
gtgaatcgttcaccatcaaggcaaa

SEQ ID NO: 103942 - DNA, 25 bp, Saccharomyces pastorianus
ggttccgcaagagagcatgctgctt

SEQ ID NO: 103943 - DNA, 25 bp, Saccharomyces pastorianus
acagcttacgatttacttaacagag

SEQ ID NO: 103944 - DNA, 25 bp, Saccharomyces pastorianus
ttactcgtgacgcagctttaacagc

SEQ ID NO: 103945 - DNA, 25 bp, Saccharomyces pastorianus
tactaggaactatctttttaccata

SEQ ID NO: 103946 - DNA, 25 bp, Saccharomyces pastorianus
tcagctttccgggagccactattca

SEQ ID NO: 103947 - DNA, 25 bp, Saccharomyces pastorianus
gtatgactcgtcttctactaggaac

SEQ ID NO: 103948 - DNA, 25 bp, Saccharomyces pastorianus
aagtacgctttacgtcttgatagag

SEQ ID NO: 103949 - DNA, 25 bp, Saccharomyces pastorianus
tccagcggtgcttgtttacgagtat

SEQ ID NO: 103950 - DNA, 25 bp, Saccharomyces pastorianus
aagtacagcgatcagaggccaaact

SEQ ID NO: 103951 - DNA, 25 bp, Saccharomyces pastorianus
gaggtggcgagttcacaactctcag

SEQ ID NO: 103952 - DNA, 25 bp, Saccharomyces pastorianus
atagagaagagtatccagcggtgct

SEQ ID NO: 103953 - DNA, 25 bp, Saccharomyces pastorianus
caaactggcagctcattactcgtga

SEQ ID NO: 103954 - DNA, 25 bp, Saccharomyces pastorianus
agtatccgctattatcatcattccc

SEQ ID NO: 103955 - DNA, 25 bp, Saccharomyces pastorianus
ggtactttcgtctcgcatacagtat

SEQ ID NO: 103956 - DNA, 25 bp, Saccharomyces pastorianus
gatttaaatgcctttccgtggtcaa

SEQ ID NO: 103957 - DNA, 25 bp, Saccharomyces pastorianus
ggctttcctatgtgtcattactcta

SEQ ID NO: 103958 - DNA, 25 bp, Saccharomyces pastorianus
gaaggtgcttttgggtcatcaggtc

SEQ ID NO: 103959 - DNA, 25 bp, Saccharomyces pastorianus
ctatccttgttttcggttgtgcatt

SEQ ID NO: 103960 - DNA, 25 bp, Saccharomyces pastorianus
gtcactgtggccactattttgttgt

SEQ ID NO: 103961 - DNA, 25 bp, Saccharomyces pastorianus
aatgtcactgccatctctaaagtag

SEQ ID NO: 103962 - DNA, 25 bp, Saccharomyces pastorianus
aagggcgatcgctatttaagtgtca

SEQ ID NO: 103963 - DNA, 25 bp, Saccharomyces pastorianus
cctgtggtatgggactagcttcttc

SEQ ID NO: 103964 - DNA, 25 bp, Saccharomyces pastorianus
gcaatcattcccatcgttttgtttt

SEQ ID NO: 103965 - DNA, 25 bp, Saccharomyces pastorianus
tgtaatgaagatgtgcaggcccctg

SEQ ID NO: 103966 - DNA, 25 bp, Saccharomyces pastorianus
attcaggcttgggttcatcgagtac

SEQ ID NO: 103967 - DNA, 25 bp, Saccharomyces pastorianus
gatggcaatggattaggcagctcta

SEQ ID NO: 103968 - DNA, 25 bp, Saccharomyces pastorianus
gtgggcactataccgcgtacgtaaa

SEQ ID NO: 103969 - DNA, 25 bp, Saccharomyces pastorianus
gtatagctggatcggcttatttgct

SEQ ID NO: 103970 - DNA, 25 bp, Saccharomyces pastorianus
aaaagtcacgccacggatatgatga

SEQ ID NO: 103971 - DNA, 25 bp, Saccharomyces pastorianus
aactcaggactgcaacgacgaagat

SEQ ID NO: 103972 - DNA, 25 bp, Saccharomyces pastorianus
gtttaatctatgacctgtatgcagt

SEQ ID NO: 103973 - DNA, 25 bp, Saccharomyces pastorianus
gcaggcccctgaatatagtaatcgt

SEQ ID NO: 103974 - DNA, 25 bp, Saccharomyces pastorianus
gggatgcccagaaaacgaagtcgct

SEQ ID NO: 103975 - DNA, 25 bp, Saccharomyces pastorianus
gtctgaaatatctgagggatgccca

SEQ ID NO: 103976 - DNA, 25 bp, Saccharomyces pastorianus
tattgttcaaattcaacatctggat

SEQ ID NO: 103977 - DNA, 25 bp, Saccharomyces pastorianus
ggacaaacctgttttgcaatttcat

SEQ ID NO: 103978 - DNA, 25 bp, Saccharomyces pastorianus
atcggttcgatttcctacaggttca

SEQ ID NO: 103979 - DNA, 25 bp, Saccharomyces pastorianus
aaaagcatcagcaaaatcggttcga

SEQ ID NO: 103980 - DNA, 25 bp, Saccharomyces pastorianus
aacatctggatatttttctactaat

SEQ ID NO: 103981 - DNA, 25 bp, Saccharomyces pastorianus
gatttatccttgtcagtcaccttaa

SEQ ID NO: 103982 - DNA, 25 bp, Saccharomyces pastorianus
gcacctggattattcaattcatctt

SEQ ID NO: 103983 - DNA, 25 bp, Saccharomyces pastorianus
ttcaattcatcttcttttaacgtaa

SEQ ID NO: 103984 - DNA, 25 bp, Saccharomyces pastorianus
aatttcattcttattgcacctggat

SEQ ID NO: 103985 - DNA, 25 bp, Saccharomyces pastorianus
gggatatacccaccacttaaatgga

SEQ ID NO: 103986 - DNA, 25 bp, Saccharomyces pastorianus
tcaccttaatagacgtatactgtag

SEQ ID NO: 103987 - DNA, 25 bp, Saccharomyces pastorianus
aaaatgcttgtactccacagtgtga

SEQ ID NO: 103988 - DNA, 25 bp, Saccharomyces pastorianus
gttcatgcttgatctcattgtcgtt

SEQ ID NO: 103989 - DNA, 25 bp, Saccharomyces pastorianus
atcgccatgggctgtattttgctgt

SEQ ID NO: 103990 - DNA, 25 bp, Saccharomyces pastorianus
ttacacagcagttacatgggttcct

SEQ ID NO: 103991 - DNA, 25 bp, Saccharomyces pastorianus
gttgactttcctacatacataccat

SEQ ID NO: 103992 - DNA, 25 bp, Saccharomyces pastorianus
ttgtggagttcgcagacactgtctt

SEQ ID NO: 103993 - DNA, 25 bp, Saccharomyces pastorianus
agccattcttacatcctacttgttt

SEQ ID NO: 103994 - DNA, 25 bp, Saccharomyces pastorianus
acttagctgttcacgttcttatgta

SEQ ID NO: 103995 - DNA, 25 bp, Saccharomyces pastorianus
agatgctacccatagtgtatcgcca

SEQ ID NO: 103996 - DNA, 25 bp, Saccharomyces pastorianus
tgggttcctgtcaccttaaacttag

SEQ ID NO: 103997 - DNA, 25 bp, Saccharomyces pastorianus
ttcaatgacggctattgctgctggt

SEQ ID NO: 103998 - DNA, 25 bp, Saccharomyces pastorianus
ttaatactggttaccgccacggatt

SEQ ID NO: 103999 - DNA, 25 bp, Saccharomyces pastorianus
gaggcgttgctggagcatcgtcaaa

SEQ ID NO: 104000 - DNA, 25 bp, Saccharomyces pastorianus
gatttcttctgatacgcttagttgg

SEQ ID NO: 104001 - DNA, 25 bp, Saccharomyces pastorianus
gtgttcagaaattgccttcgccaaa

SEQ ID NO: 104002 - DNA, 25 bp, Saccharomyces pastorianus
tcataacttgttcgtactctgctgt

SEQ ID NO: 104003 - DNA, 25 bp, Saccharomyces pastorianus
cttccgtcgggcaattcaaaccagg

SEQ ID NO: 104004 - DNA, 25 bp, Saccharomyces pastorianus
gcaaaagtgcctttgtcctcaaaaa

SEQ ID NO: 104005 - DNA, 25 bp, Saccharomyces pastorianus
gtaacatctgtgaactgcaactttt

SEQ ID NO: 104006 - DNA, 25 bp, Saccharomyces pastorianus
ggcggacccgtgatgtacagtgaat

SEQ ID NO: 104007 - DNA, 25 bp, Saccharomyces pastorianus
accatcgctgctattcaagttgact

SEQ ID NO: 104008 - DNA, 25 bp, Saccharomyces pastorianus
aagttcggattcgtatgtctcagta

SEQ ID NO: 104009 - DNA, 25 bp, Saccharomyces pastorianus
tgtgctggaaatacgggtgaccttc

SEQ ID NO: 104010 - DNA, 25 bp, Saccharomyces pastorianus
gacgccaactacttctccggtaaag

SEQ ID NO: 104011 - DNA, 25 bp, Saccharomyces pastorianus
gtgtagtctgcccactattatcttc

SEQ ID NO: 104012 - DNA, 25 bp, Saccharomyces pastorianus
gaggatcattgaactctgcgcaagt

SEQ ID NO: 104013 - DNA, 25 bp, Saccharomyces pastorianus
tattatcttccaaccgatggccatc

SEQ ID NO: 104014 - DNA, 25 bp, Saccharomyces pastorianus
tgcgcaagttcctttgacgccaact

SEQ ID NO: 104015 - DNA, 25 bp, Saccharomyces pastorianus
gaactacatagccaaggtcttctca

SEQ ID NO: 104016 - DNA, 25 bp, Saccharomyces pastorianus
gatggccatcaaattcgcagcaaag

SEQ ID NO: 104017 - DNA, 25 bp, Saccharomyces pastorianus
ggtttctgctttcaccaacaagagg

SEQ ID NO: 104018 - DNA, 25 bp, Saccharomyces pastorianus
aacttgtgggctggtttcaatcaaa

SEQ ID NO: 104019 - DNA, 25 bp, Saccharomyces pastorianus
aaactgatactttagcaccattgca

SEQ ID NO: 104020 - DNA, 25 bp, Saccharomyces pastorianus
atcgtttggctggtttatcactcta

SEQ ID NO: 104021 - DNA, 25 bp, Saccharomyces pastorianus
caaattaacagctcttctacagtaa

SEQ ID NO: 104022 - DNA, 25 bp, Saccharomyces pastorianus
gagaattctctaaatacggcgtaat

SEQ ID NO: 104023 - DNA, 25 bp, Saccharomyces pastorianus
ggcaagaatcacctttacccttata

SEQ ID NO: 104024 - DNA, 25 bp, Saccharomyces pastorianus
tcatttactgggtgaggtctcaact

SEQ ID NO: 104025 - DNA, 25 bp, Saccharomyces pastorianus
gcgctttgccattattgcggttagt

SEQ ID NO: 104026 - DNA, 25 bp, Saccharomyces pastorianus
gaatctgatgaagcgctttgccatt

SEQ ID NO: 104027 - DNA, 25 bp, Saccharomyces pastorianus
aatgatttatatttcccttgttgga

SEQ ID NO: 104028 - DNA, 25 bp, Saccharomyces pastorianus
gtttatcactctagaatttcctgta

SEQ ID NO: 104029 - DNA, 25 bp, Saccharomyces pastorianus
ggacattccacttcattcaggcaat

SEQ ID NO: 104030 - DNA, 25 bp, Saccharomyces pastorianus
tatatggcaagaccgtgttcacgta

SEQ ID NO: 104031 - DNA, 25 bp, Saccharomyces pastorianus
aactcacgttggaaactggcgggcg

SEQ ID NO: 104032 - DNA, 25 bp, Saccharomyces pastorianus
gtacccagcatctatggacttcaat

SEQ ID NO: 104033 - DNA, 25 bp, Saccharomyces pastorianus
gttattaccttaattgcccttgtcg

SEQ ID NO: 104034 - DNA, 25 bp, Saccharomyces pastorianus
gcaactttgaattcgctaatctccc

SEQ ID NO: 104035 - DNA, 25 bp, Saccharomyces pastorianus
gaatggcaccttacaattgaacgcg

SEQ ID NO: 104036 - DNA, 25 bp, Saccharomyces pastorianus
aaggtgcacccttatattacagtgg

SEQ ID NO: 104037 - DNA, 25 bp, Saccharomyces pastorianus
aggccccgattagatcttatttaca

SEQ ID NO: 104038 - DNA, 25 bp, Saccharomyces pastorianus
gaatatccttacacatctacgacca

SEQ ID NO: 104039 - DNA, 25 bp, Saccharomyces pastorianus
aagggtcgcttagacttagcagcaa

SEQ ID NO: 104040 - DNA, 25 bp, Saccharomyces pastorianus
gctaatctccctttaaacgacggtg

SEQ ID NO: 104041 - DNA, 25 bp, Saccharomyces pastorianus
aaacgtcagtatcttttctacaggt

SEQ ID NO: 104042 - DNA, 25 bp, Saccharomyces pastorianus
gattgaacaagtgtggtgttatttc

SEQ ID NO: 104043 - DNA, 25 bp, Saccharomyces pastorianus
agaccatcctccaaggtcattatca

SEQ ID NO: 104044 - DNA, 25 bp, Saccharomyces pastorianus
agctgatgctttgaatgccattaac

SEQ ID NO: 104045 - DNA, 25 bp, Saccharomyces pastorianus
aattcggttacgtcatcttgaccac

SEQ ID NO: 104046 - DNA, 25 bp, Saccharomyces pastorianus
tgatgctttgaatgccattaacaac

SEQ ID NO: 104047 - DNA, 25 bp, Saccharomyces pastorianus
ggtcattatcaagtttttgcaagtt

SEQ ID NO: 104048 - DNA, 25 bp, Saccharomyces pastorianus
cagccagacaattcggttacgtcat

SEQ ID NO: 104049 - DNA, 25 bp, Saccharomyces pastorianus
atcctccaaggtcattatcaagttt

SEQ ID NO: 104050 - DNA, 25 bp, Saccharomyces pastorianus
gttttagctgatgctttgaatgcca

SEQ ID NO: 104051 - DNA, 25 bp, Saccharomyces pastorianus
tcggttacgtcatcttgaccacctc

SEQ ID NO: 104052 - DNA, 25 bp, Saccharomyces pastorianus
gacaattcggttacgtcatcttgac

SEQ ID NO: 104053 - DNA, 25 bp, Saccharomyces pastorianus
cagatatcttttccctgggcctgat

SEQ ID NO: 104054 - DNA, 25 bp, Saccharomyces pastorianus
ggcccacggcaaatcaaatcttaca

SEQ ID NO: 104055 - DNA, 25 bp, Saccharomyces pastorianus
gtgttacctgacaatggcaacgcat

SEQ ID NO: 104056 - DNA, 25 bp, Saccharomyces pastorianus
tggcacctccactgttcataacaat

SEQ ID NO: 104057 - DNA, 25 bp, Saccharomyces pastorianus
tgccgctaccaagaatcgtcttatt

SEQ ID NO: 104058 - DNA, 25 bp, Saccharomyces pastorianus
ggtaatagtaccaacgctggcacct

SEQ ID NO: 104059 - DNA, 25 bp, Saccharomyces pastorianus
ccctgggcctgatgattgttgaaat

SEQ ID NO: 104060 - DNA, 25 bp, Saccharomyces pastorianus
caatgcaggtgctattatccaagaa

SEQ ID NO: 104061 - DNA, 25 bp, Saccharomyces pastorianus
aattgcagcgaacgttgtgttacct

SEQ ID NO: 104062 - DNA, 25 bp, Saccharomyces pastorianus
ataatgtcaatactgccgctaccaa

SEQ ID NO: 104063 - DNA, 25 bp, Saccharomyces pastorianus
taaaagttctaaaattcccgcatgg

SEQ ID NO: 104064 - DNA, 25 bp, Saccharomyces pastorianus
agatgatttctcaaggcactgccgg

SEQ ID NO: 104065 - DNA, 25 bp, Saccharomyces pastorianus
gttcattcatgccagtttctacaag

SEQ ID NO: 104066 - DNA, 25 bp, Saccharomyces pastorianus
gatttatcggtccaaatggcgaaca

SEQ ID NO: 104067 - DNA, 25 bp, Saccharomyces pastorianus
ggcagatccatggactctttatcat

SEQ ID NO: 104068 - DNA, 25 bp, Saccharomyces pastorianus
ttctgtaccactccgaaaagccaag

SEQ ID NO: 104069 - DNA, 25 bp, Saccharomyces pastorianus
cgccttgctccagcatgattttgaa

SEQ ID NO: 104070 - DNA, 25 bp, Saccharomyces pastorianus
aaagatgattacaagggtctcgcct

SEQ ID NO: 104071 - DNA, 25 bp, Saccharomyces pastorianus
tcaggaagccgcatcgctatggaat

SEQ ID NO: 104072 - DNA, 25 bp, Saccharomyces pastorianus
tgcccatgccttgaatatgccatac

SEQ ID NO: 104073 - DNA, 25 bp, Saccharomyces pastorianus
aaggcactgccggtgaaggtgacaa

SEQ ID NO: 104074 - DNA, 25 bp, Saccharomyces pastorianus
tgacaaagacactttcgtcgctgct

SEQ ID NO: 104075 - DNA, 25 bp, Saccharomyces pastorianus
aatgtccctcaatcaagcgacggtg

SEQ ID NO: 104076 - DNA, 25 bp, Saccharomyces pastorianus
gccttcgaagttccttctgacgaaa

SEQ ID NO: 104077 - DNA, 25 bp, Saccharomyces pastorianus
agcaataaaaattctccgccctcag

SEQ ID NO: 104078 - DNA, 25 bp, Saccharomyces pastorianus
gagaactttatacctctgcgaaatt

SEQ ID NO: 104079 - DNA, 25 bp, Saccharomyces pastorianus
gcagcgtcttcgtcgttggaaaaca

SEQ ID NO: 104080 - DNA, 25 bp, Saccharomyces pastorianus
agcgacggtgtcaatcatggatttc

SEQ ID NO: 104081 - DNA, 25 bp, Saccharomyces pastorianus
tgacgatataccatcttttttcccc

SEQ ID NO: 104082 - DNA, 25 bp, Saccharomyces pastorianus
tctagtaactctgaccggatcgatg

SEQ ID NO: 104083 - DNA, 25 bp, Saccharomyces pastorianus
gatatagattcgtcatcgcggtcac

SEQ ID NO: 104084 - DNA, 25 bp, Saccharomyces pastorianus
acacatcttggtttggctggacttt

SEQ ID NO: 104085 - DNA, 25 bp, Saccharomyces pastorianus
aattactactcgatgcctcttgaat

SEQ ID NO: 104086 - DNA, 25 bp, Saccharomyces pastorianus
gttttgcaccaatacgcgatgaccc

SEQ ID NO: 104087 - DNA, 25 bp, Saccharomyces pastorianus
atacttaggccagctgcgcacgcag

SEQ ID NO: 104088 - DNA, 25 bp, Saccharomyces pastorianus
aactgggcccagtgaccatgtgcta

SEQ ID NO: 104089 - DNA, 25 bp, Saccharomyces pastorianus
aaactaccggtagcacagtacagtg

SEQ ID NO: 104090 - DNA, 25 bp, Saccharomyces pastorianus
cacagtacagtgcaccagatggtgt

SEQ ID NO: 104091 - DNA, 25 bp, Saccharomyces pastorianus
atgaccctcgatacatgaccacaga

SEQ ID NO: 104092 - DNA, 25 bp, Saccharomyces pastorianus
ggaacgcacgaaagatggctcacaa

SEQ ID NO: 104093 - DNA, 25 bp, Saccharomyces pastorianus
gagacaaaccttcagaaccggaacg

SEQ ID NO: 104094 - DNA, 25 bp, Saccharomyces pastorianus
gatggctcacaactgacatacttag

SEQ ID NO: 104095 - DNA, 25 bp, Saccharomyces pastorianus
aacgctggccaaatcgatagagaca

SEQ ID NO: 104096 - DNA, 25 bp, Saccharomyces pastorianus
gaccatgtgctaaacgctggccaaa

SEQ ID NO: 104097 - DNA, 25 bp, Saccharomyces pastorianus
gtcagtacgatgcatccttggatca

SEQ ID NO: 104098 - DNA, 25 bp, Saccharomyces pastorianus
gatccgttactgagaaatttcccat

SEQ ID NO: 104099 - DNA, 25 bp, Saccharomyces pastorianus
aaagaacgtccctgttgtggcgaat

SEQ ID NO: 104100 - DNA, 25 bp, Saccharomyces pastorianus
agtggcatcctacattactgggtaa

SEQ ID NO: 104101 - DNA, 25 bp, Saccharomyces pastorianus
gatgcgtcctcatttgttattgcca

SEQ ID NO: 104102 - DNA, 25 bp, Saccharomyces pastorianus
ttggctgcctccttcaagggatgta

SEQ ID NO: 104103 - DNA, 25 bp, Saccharomyces pastorianus
gtgagtctggaaacggtgcttctaa

SEQ ID NO: 104104 - DNA, 25 bp, Saccharomyces pastorianus
cggtgcttctaatggcgatgtttac

SEQ ID NO: 104105 - DNA, 25 bp, Saccharomyces pastorianus
gatgaatctcgatctttctttacaa

SEQ ID NO: 104106 - DNA, 25 bp, Saccharomyces pastorianus
aagttgagtgctgctatcggtcata

SEQ ID NO: 104107 - DNA, 25 bp, Saccharomyces pastorianus
atcggtcatattttacagtggcatc

SEQ ID NO: 104108 - DNA, 25 bp, Saccharomyces pastorianus
taagcttttataccactgaccacac

SEQ ID NO: 104109 - DNA, 25 bp, Saccharomyces pastorianus
gtctctattatccaactgcgcatgg

SEQ ID NO: 104110 - DNA, 25 bp, Saccharomyces pastorianus
gacgctgacaagttacttcgggtat

SEQ ID NO: 104111 - DNA, 25 bp, Saccharomyces pastorianus
tcaaggtgctactgcaagtccactt

SEQ ID NO: 104112 - DNA, 25 bp, Saccharomyces pastorianus
atacaaatacgtgtcccgctcggag

SEQ ID NO: 104113 - DNA, 25 bp, Saccharomyces pastorianus
acacggaagctgtatcgcactcaaa

SEQ ID NO: 104114 - DNA, 25 bp, Saccharomyces pastorianus
aagtccactttcgtcagtttcatca

SEQ ID NO: 104115 - DNA, 25 bp, Saccharomyces pastorianus
caaccagtcacctcattatttttca

SEQ ID NO: 104116 - DNA, 25 bp, Saccharomyces pastorianus
atgtgcagcgtcactggtatcttga

SEQ ID NO: 104117 - DNA, 25 bp, Saccharomyces pastorianus
tgttcctctacaataatgccccaag

SEQ ID NO: 104118 - DNA, 25 bp, Saccharomyces pastorianus
gtcggtggtcaaattactcatggca

SEQ ID NO: 104119 - DNA, 25 bp, Saccharomyces pastorianus
ttacgcaacttttcatccgagtcta

SEQ ID NO: 104120 - DNA, 25 bp, Saccharomyces pastorianus
ggtaatcagcagtcggatatcgtta

SEQ ID NO: 104121 - DNA, 25 bp, Saccharomyces pastorianus
ggataatattgtacgtgccgccacc

SEQ ID NO: 104122 - DNA, 25 bp, Saccharomyces pastorianus
tattggtcttttcccctatgaatga

SEQ ID NO: 104123 - DNA, 25 bp, Saccharomyces pastorianus
attttagatgccgacatccatgggt

SEQ ID NO: 104124 - DNA, 25 bp, Saccharomyces pastorianus
tactgcgaacttaattcctgccttg

SEQ ID NO: 104125 - DNA, 25 bp, Saccharomyces pastorianus
gtgccgccaccttagaaacaatctt

SEQ ID NO: 104126 - DNA, 25 bp, Saccharomyces pastorianus
gacaaatgagcctggctgtgaccct

SEQ ID NO: 104127 - DNA, 25 bp, Saccharomyces pastorianus
ggctgtgaccctcaattagttgcaa

SEQ ID NO: 104128 - DNA, 25 bp, Saccharomyces pastorianus
caccatgggatcttgcaattcttga

SEQ ID NO: 104129 - DNA, 25 bp, Saccharomyces pastorianus
aaagtccttcatttgcggcgtgcta

SEQ ID NO: 104130 - DNA, 25 bp, Saccharomyces pastorianus
gtgagcttaagaaacgccaggacgc

SEQ ID NO: 104131 - DNA, 25 bp, Saccharomyces pastorianus
gcggtaaatcgtttatcttacagga

SEQ ID NO: 104132 - DNA, 25 bp, Saccharomyces pastorianus
gaaacgccaggacgcaattggatat

SEQ ID NO: 104133 - DNA, 25 bp, Saccharomyces pastorianus
ggagatcttgcggtaaatcgtttat

SEQ ID NO: 104134 - DNA, 25 bp, Saccharomyces pastorianus
gacgaaactgttcttctggatcaaa

SEQ ID NO: 104135 - DNA, 25 bp, Saccharomyces pastorianus
gatttatcacatgacgaaactgttc

SEQ ID NO: 104136 - DNA, 25 bp, Saccharomyces pastorianus
ctagagtcttatccaacggacaaaa

SEQ ID NO: 104137 - DNA, 25 bp, Saccharomyces pastorianus
aatcagcagctagcatatttggaca

SEQ ID NO: 104138 - DNA, 25 bp, Saccharomyces pastorianus
gaaaagcttgctgaattgacaaaga

SEQ ID NO: 104139 - DNA, 25 bp, Saccharomyces pastorianus
acaggataaatccaaatacgttaat

SEQ ID NO: 104140 - DNA, 25 bp, Saccharomyces pastorianus
gatatggtcaatcagcagctagcat

SEQ ID NO: 104141 - DNA, 25 bp, Saccharomyces pastorianus
ccatgggcggtgttacggcttatac

SEQ ID NO: 104142 - DNA, 25 bp, Saccharomyces pastorianus
aacattgactgtgtggccgtacttg

SEQ ID NO: 104143 - DNA, 25 bp, Saccharomyces pastorianus
aactcctggctggtcttatacgata

SEQ ID NO: 104144 - DNA, 25 bp, Saccharomyces pastorianus
gacggtcaaggttacactatccatt

SEQ ID NO: 104145 - DNA, 25 bp, Saccharomyces pastorianus
aagtgaccgctaccacatggacaag

SEQ ID NO: 104146 - DNA, 25 bp, Saccharomyces pastorianus
gaaatttgccactagtgctgtgaca

SEQ ID NO: 104147 - DNA, 25 bp, Saccharomyces pastorianus
gcgtttcgctccaatgcaaatgcag

SEQ ID NO: 104148 - DNA, 25 bp, Saccharomyces pastorianus
cagctgagtttgcttcgactttaac

SEQ ID NO: 104149 - DNA, 25 bp, Saccharomyces pastorianus
aagcagactggtacgtcgcgtttcg

SEQ ID NO: 104150 - DNA, 25 bp, Saccharomyces pastorianus
gtgacatattactctacctttgggt

SEQ ID NO: 104151 - DNA, 25 bp, Saccharomyces pastorianus
attcaagtttttgcccaggtggacg

SEQ ID NO: 104152 - DNA, 25 bp, Saccharomyces pastorianus
aaatcacaacccactgaatctcagt

SEQ ID NO: 104153 - DNA, 25 bp, Saccharomyces pastorianus
gattctagacgctgtactatgcaaa

SEQ ID NO: 104154 - DNA, 25 bp, Saccharomyces pastorianus
caacgtcaatgctcctgtgtttagg

SEQ ID NO: 104155 - DNA, 25 bp, Saccharomyces pastorianus
gaaacaccaagagttgaccccacag

SEQ ID NO: 104156 - DNA, 25 bp, Saccharomyces pastorianus
gagttgaccccacagaaatctccaa

SEQ ID NO: 104157 - DNA, 25 bp, Saccharomyces pastorianus
gcaggaacaatgatgacggcgagct

SEQ ID NO: 104158 - DNA, 25 bp, Saccharomyces pastorianus
gcttaaacggtgtggttgctttaca

SEQ ID NO: 104159 - DNA, 25 bp, Saccharomyces pastorianus
acggcgagctaggatttttgattct

SEQ ID NO: 104160 - DNA, 25 bp, Saccharomyces pastorianus
aaacatttgagatcgactcgtggta

SEQ ID NO: 104161 - DNA, 25 bp, Saccharomyces pastorianus
agaaatctccaacgtcaatgctcct

SEQ ID NO: 104162 - DNA, 25 bp, Saccharomyces pastorianus
ttttacaatcgccaaccatatcatc

SEQ ID NO: 104163 - DNA, 25 bp, Saccharomyces pastorianus
ctgcccgaaactaccagattcttga

SEQ ID NO: 104164 - DNA, 25 bp, Saccharomyces pastorianus
ggtcacattgacattactctcttga

SEQ ID NO: 104165 - DNA, 25 bp, Saccharomyces pastorianus
ggtgacgattacattatccctgaaa

SEQ ID NO: 104166 - DNA, 25 bp, Saccharomyces pastorianus
gacaagcttgttgagtacatttcca

SEQ ID NO: 104167 - DNA, 25 bp, Saccharomyces pastorianus
aacacgtggatgtcccaggtcattt

SEQ ID NO: 104168 - DNA, 25 bp, Saccharomyces pastorianus
gggacattttggcaggtactattca

SEQ ID NO: 104169 - DNA, 25 bp, Saccharomyces pastorianus
gttaaagctaatgctctgcccgaaa

SEQ ID NO: 104170 - DNA, 25 bp, Saccharomyces pastorianus
tttccaaccaatcacatttgcgcag

SEQ ID NO: 104171 - DNA, 25 bp, Saccharomyces pastorianus
aggtttgttggctctatcattgata

SEQ ID NO: 104172 - DNA, 25 bp, Saccharomyces pastorianus
aggtcatttatctgccattgccttt

SEQ ID NO: 104173 - DNA, 25 bp, Saccharomyces pastorianus
taatttacattcttctgtggctgaa

SEQ ID NO: 104174 - DNA, 25 bp, Saccharomyces pastorianus
gaagacatccttgttgatgctgatg

SEQ ID NO: 104175 - DNA, 25 bp, Saccharomyces pastorianus
tgccttttttctttggttaagtcat

SEQ ID NO: 104176 - DNA, 25 bp, Saccharomyces pastorianus
gtacaagacttcctttgggacagaa

SEQ ID NO: 104177 - DNA, 25 bp, Saccharomyces pastorianus
tgatgataatgccaacgcctttttt

SEQ ID NO: 104178 - DNA, 25 bp, Saccharomyces pastorianus
aaacgtgaaacaagccccaactatg

SEQ ID NO: 104179 - DNA, 25 bp, Saccharomyces pastorianus
agccccaactatgcatgtctggtta

SEQ ID NO: 104180 - DNA, 25 bp, Saccharomyces pastorianus
ttggttaagtcatcaggcggcgctc

SEQ ID NO: 104181 - DNA, 25 bp, Saccharomyces pastorianus
gatgctgatgataatgccaacgcct

SEQ ID NO: 104182 - DNA, 25 bp, Saccharomyces pastorianus
tgaattctttaactttatgcctttt

SEQ ID NO: 104183 - DNA, 25 bp, Saccharomyces pastorianus
tttttgcttcttcttgaggataatc

SEQ ID NO: 104184 - DNA, 25 bp, Saccharomyces pastorianus
ggcggcgctcttgaagaatcttttt

SEQ ID NO: 104185 - DNA, 25 bp, Saccharomyces pastorianus
cgccgcctgatgacttaaccaaaga

SEQ ID NO: 104186 - DNA, 25 bp, Saccharomyces pastorianus
gaggacattatagcggaggccaaca

SEQ ID NO: 104187 - DNA, 25 bp, Saccharomyces pastorianus
gacatcgtgaaaatcctaactacaa

SEQ ID NO: 104188 - DNA, 25 bp, Saccharomyces pastorianus
gcatcttttgtacccaacttaataa

SEQ ID NO: 104189 - DNA, 25 bp, Saccharomyces pastorianus
gtctcccagtcccaaagactagagc

SEQ ID NO: 104190 - DNA, 25 bp, Saccharomyces pastorianus
ggcattatcatcagcatcaacaagg

SEQ ID NO: 104191 - DNA, 25 bp, Saccharomyces pastorianus
aaattctttgcatcttttgtaccca

SEQ ID NO: 104192 - DNA, 25 bp, Saccharomyces pastorianus
cgcctggcgctttagactctaagaa

SEQ ID NO: 104193 - DNA, 25 bp, Saccharomyces pastorianus
aaagattcttcaagagcgccgcctg

SEQ ID NO: 104194 - DNA, 25 bp, Saccharomyces pastorianus
gaaaaagcgttttggaggacattat

SEQ ID NO: 104195 - DNA, 25 bp, Saccharomyces pastorianus
ggaataccaaaaacgcctggcgctt

SEQ ID NO: 104196 - DNA, 25 bp, Saccharomyces pastorianus
agttctccctaaagaagcactcctt

SEQ ID NO: 104197 - DNA, 25 bp, Saccharomyces pastorianus
ggtcgatgagtctcgtggcttcaaa

SEQ ID NO: 104198 - DNA, 25 bp, Saccharomyces pastorianus
gactgcttactattctttctacttg

SEQ ID NO: 104199 - DNA, 25 bp, Saccharomyces pastorianus
gctatgtacgttgccggtatcacag

SEQ ID NO: 104200 - DNA, 25 bp, Saccharomyces pastorianus
aggccaaaatttctcaggtcgatga

SEQ ID NO: 104201 - DNA, 25 bp, Saccharomyces pastorianus
gtcgacttgagtaagttctccctaa

SEQ ID NO: 104202 - DNA, 25 bp, Saccharomyces pastorianus
gaaggactcagtcgcagaagccaaa

SEQ ID NO: 104203 - DNA, 25 bp, Saccharomyces pastorianus
aagccagagatgtcttgattccatt

SEQ ID NO: 104204 - DNA, 25 bp, Saccharomyces pastorianus
aggcattagaacttgcttccgcaga

SEQ ID NO: 104205 - DNA, 25 bp, Saccharomyces pastorianus
ttgcctgtcgcattggctatgtacg

SEQ ID NO: 104206 - DNA, 25 bp, Saccharomyces pastorianus
tgaagtcaccttccaaaccgaattg

SEQ ID NO: 104207 - DNA, 25 bp, Saccharomyces pastorianus
tatgtattaatacctgcgggaattt

SEQ ID NO: 104208 - DNA, 25 bp, Saccharomyces pastorianus
aagccattacaaggtattttccata

SEQ ID NO: 104209 - DNA, 25 bp, Saccharomyces pastorianus
atgctgtgtctccatatgctcaaaa

SEQ ID NO: 104210 - DNA, 25 bp, Saccharomyces pastorianus
gatttaagtctcaatttctatatgt

SEQ ID NO: 104211 - DNA, 25 bp, Saccharomyces pastorianus
cctgcgggaatttattggtactggt

SEQ ID NO: 104212 - DNA, 25 bp, Saccharomyces pastorianus
gtctccatatgctcaaaagccatta

SEQ ID NO: 104213 - DNA, 25 bp, Saccharomyces pastorianus
aaggtataacctcatatgctgtgtc

SEQ ID NO: 104214 - DNA, 25 bp, Saccharomyces pastorianus
aacgctgtattcaatagttttagaa

SEQ ID NO: 104215 - DNA, 25 bp, Saccharomyces pastorianus
ataacctcatatgctgtgtctccat

SEQ ID NO: 104216 - DNA, 25 bp, Saccharomyces pastorianus
gtattttccataacgctgtattcaa

SEQ ID NO: 104217 - DNA, 25 bp, Saccharomyces pastorianus
gagtataatgaatttctgtacagca

SEQ ID NO: 104218 - DNA, 25 bp, Saccharomyces pastorianus
gaaggttctgggagtccattgcacc

SEQ ID NO: 104219 - DNA, 25 bp, Saccharomyces pastorianus
tggagccatgggttcagagccatat

SEQ ID NO: 104220 - DNA, 25 bp, Saccharomyces pastorianus
gcacccattagaggcagactgtttt

SEQ ID NO: 104221 - DNA, 25 bp, Saccharomyces pastorianus
aattactacaaagctcctggatgag

SEQ ID NO: 104222 - DNA, 25 bp, Saccharomyces pastorianus
gagaaacacgtccacttccagagtg

SEQ ID NO: 104223 - DNA, 25 bp, Saccharomyces pastorianus
gaccccacgaagagaatcaccattg

SEQ ID NO: 104224 - DNA, 25 bp, Saccharomyces pastorianus
gcatgatcatggtatagcacactgt

SEQ ID NO: 104225 - DNA, 25 bp, Saccharomyces pastorianus
catatgtggcgcctgaagaatttat

SEQ ID NO: 104226 - DNA, 25 bp, Saccharomyces pastorianus
agcacactgtgatctgaaacccgaa

SEQ ID NO: 104227 - DNA, 25 bp, Saccharomyces pastorianus
atacgatccgcgtctggtagattgt

SEQ ID NO: 104228 - DNA, 25 bp, Saccharomyces pastorianus
tagttcagttttccagactgcctgg

SEQ ID NO: 104229 - DNA, 25 bp, Saccharomyces pastorianus
ggtggagtttcggtattctgattta

SEQ ID NO: 104230 - DNA, 25 bp, Saccharomyces pastorianus
gtatgaaccgcccattcaacaggga

SEQ ID NO: 104231 - DNA, 25 bp, Saccharomyces pastorianus
gaaaccggaaaatatcttgcttgat

SEQ ID NO: 104232 - DNA, 25 bp, Saccharomyces pastorianus
gtgacacctcacagttcgataagta

SEQ ID NO: 104233 - DNA, 25 bp, Saccharomyces pastorianus
gttcctgacgtcacatatacattat

SEQ ID NO: 104234 - DNA, 25 bp, Saccharomyces pastorianus
atacattatgcggtactcccgacta

SEQ ID NO: 104235 - DNA, 25 bp, Saccharomyces pastorianus
tgccgaattgagatttccaccattt

SEQ ID NO: 104236 - DNA, 25 bp, Saccharomyces pastorianus
agaagacatcaactacggtgttcaa

SEQ ID NO: 104237 - DNA, 25 bp, Saccharomyces pastorianus
atagcacccgaggtcgttagtacta

SEQ ID NO: 104238 - DNA, 25 bp, Saccharomyces pastorianus
atgctagcaggatacacgccatttt

SEQ ID NO: 104239 - DNA, 25 bp, Saccharomyces pastorianus
gggtttgccaaatacgttcctgacg

SEQ ID NO: 104240 - DNA, 25 bp, Saccharomyces pastorianus
tagtaccccggcataccgtaatatt

SEQ ID NO: 104241 - DNA, 25 bp, Saccharomyces pastorianus
gccatcttgttgacattcttcctaa

SEQ ID NO: 104242 - DNA, 25 bp, Saccharomyces pastorianus
acactgagtctctttgtcatgatac

SEQ ID NO: 104243 - DNA, 25 bp, Saccharomyces pastorianus
gtctccgttaatcctagtctgttta

SEQ ID NO: 104244 - DNA, 25 bp, Saccharomyces pastorianus
gagaaaactcccacatccatgataa

SEQ ID NO: 104245 - DNA, 25 bp, Saccharomyces pastorianus
aaggtcctgtgttatgcttgtcatc

SEQ ID NO: 104246 - DNA, 25 bp, Saccharomyces pastorianus
atattcgcccttttacaggcattga

SEQ ID NO: 104247 - DNA, 25 bp, Saccharomyces pastorianus
gcattgagcgcgttttgttcaccaa

SEQ ID NO: 104248 - DNA, 25 bp, Saccharomyces pastorianus
ggaacgacatcgtgtatgccagcat

SEQ ID NO: 104249 - DNA, 25 bp, Saccharomyces pastorianus
gtgttactggtcgtatcacctacat

SEQ ID NO: 104250 - DNA, 25 bp, Saccharomyces pastorianus
gatatactatttgtctgcggaacga

SEQ ID NO: 104251 - DNA, 25 bp, Saccharomyces pastorianus
gtccatgacgctcccaatagaatat

SEQ ID NO: 104252 - DNA, 25 bp, Saccharomyces pastorianus
agggtttccaccgttgatttatatg

SEQ ID NO: 104253 - DNA, 25 bp, Saccharomyces pastorianus
gggtttctcattcaactttcgagcc

SEQ ID NO: 104254 - DNA, 25 bp, Saccharomyces pastorianus
agagcaagaagatccccatgccatc

SEQ ID NO: 104255 - DNA, 25 bp, Saccharomyces pastorianus
aataggcaattccaccttaggcaaa

SEQ ID NO: 104256 - DNA, 25 bp, Saccharomyces pastorianus
atgccatcgcagaagacgacattgt

SEQ ID NO: 104257 - DNA, 25 bp, Saccharomyces pastorianus
ttacgtcacaactcacaattcacca

SEQ ID NO: 104258 - DNA, 25 bp, Saccharomyces pastorianus
gagtgacctccataaagtacttcat

SEQ ID NO: 104259 - DNA, 25 bp, Saccharomyces pastorianus
atgggacaggtctggcatgcctata

SEQ ID NO: 104260 - DNA, 25 bp, Saccharomyces pastorianus
ttcaccaagttttcaggcacatcgc

SEQ ID NO: 104261 - DNA, 25 bp, Saccharomyces pastorianus
gacgtacagtgatgtctctcaattt

SEQ ID NO: 104262 - DNA, 25 bp, Saccharomyces pastorianus
gtgacagtgacgttttctacccatg

SEQ ID NO: 104263 - DNA, 25 bp, Saccharomyces pastorianus
atctcttgtggtgctgccgaataca

SEQ ID NO: 104264 - DNA, 25 bp, Saccharomyces pastorianus
atctactaatgccacatcatcttct

SEQ ID NO: 104265 - DNA, 25 bp, Saccharomyces pastorianus
gctgttcaagctattacctcttcaa

SEQ ID NO: 104266 - DNA, 25 bp, Saccharomyces pastorianus
ttgtatgatcaaaacgtcgccgaac

SEQ ID NO: 104267 - DNA, 25 bp, Saccharomyces pastorianus
gtctatccggcaatttctacaactt

SEQ ID NO: 104268 - DNA, 25 bp, Saccharomyces pastorianus
gcttctgctgaaggttacactccag

SEQ ID NO: 104269 - DNA, 25 bp, Saccharomyces pastorianus
aaaagatctcttcctctgcatctaa

SEQ ID NO: 104270 - DNA, 25 bp, Saccharomyces pastorianus
aaggacggtgttttgactgatgcca

SEQ ID NO: 104271 - DNA, 25 bp, Saccharomyces pastorianus
accacctttggtattgctgttcaag

SEQ ID NO: 104272 - DNA, 25 bp, Saccharomyces pastorianus
agatggttacttggctttgggtgac

SEQ ID NO: 104273 - DNA, 25 bp, Saccharomyces pastorianus
aggcctttgaccagttatcttacca

SEQ ID NO: 104274 - DNA, 25 bp, Saccharomyces pastorianus
tacgaaatttcgcaacgccgcatga

SEQ ID NO: 104275 - DNA, 25 bp, Saccharomyces pastorianus
gcatgactccattgaacgctagcat

SEQ ID NO: 104276 - DNA, 25 bp, Saccharomyces pastorianus
ggagctgcacactaagcgttatcta

SEQ ID NO: 104277 - DNA, 25 bp, Saccharomyces pastorianus
gatccggtgtagtaggcccatttgg

SEQ ID NO: 104278 - DNA, 25 bp, Saccharomyces pastorianus
agatgtaactcttcgtctaccacaa

SEQ ID NO: 104279 - DNA, 25 bp, Saccharomyces pastorianus
aagcaaatcttggtcctcaacggga

SEQ ID NO: 104280 - DNA, 25 bp, Saccharomyces pastorianus
gatgaacacccgcattctagtttga

SEQ ID NO: 104281 - DNA, 25 bp, Saccharomyces pastorianus
gaccatattgcaactggatacgcca

SEQ ID NO: 104282 - DNA, 25 bp, Saccharomyces pastorianus
tggttaatccaaacgtcttccgcga

SEQ ID NO: 104283 - DNA, 25 bp, Saccharomyces pastorianus
catttggcaccttcatcggaatgat

SEQ ID NO: 104284 - DNA, 25 bp, Saccharomyces pastorianus
gaaagaggctttcagtacgctaaaa

SEQ ID NO: 104285 - DNA, 25 bp, Saccharomyces pastorianus
caaacggcaaattatcttccctata

SEQ ID NO: 104286 - DNA, 25 bp, Saccharomyces pastorianus
tagacgctggcgtttgtgacggaat

SEQ ID NO: 104287 - DNA, 25 bp, Saccharomyces pastorianus
gtaaatttgaccgtgtggacttcca

SEQ ID NO: 104288 - DNA, 25 bp, Saccharomyces pastorianus
aaacatccctgcagtgagtacatat

SEQ ID NO: 104289 - DNA, 25 bp, Saccharomyces pastorianus
gatcaagctggaacctagggcctat

SEQ ID NO: 104290 - DNA, 25 bp, Saccharomyces pastorianus
gggcctatggcacaaaggtcaccaa

SEQ ID NO: 104291 - DNA, 25 bp, Saccharomyces pastorianus
gttccacaggaggaatccccttgga

SEQ ID NO: 104292 - DNA, 25 bp, Saccharomyces pastorianus
atcccactacacacattgatcaagc

SEQ ID NO: 104293 - DNA, 25 bp, Saccharomyces pastorianus
gcatattttatgaacgttccacagg

SEQ ID NO: 104294 - DNA, 25 bp, Saccharomyces pastorianus
ataactcatcaagccgtacttcggt

SEQ ID NO: 104295 - DNA, 25 bp, Saccharomyces pastorianus
ggtatcacagacaacttctacagag

SEQ ID NO: 104296 - DNA, 25 bp, Saccharomyces pastorianus
agtaatgctgacgatggctctgtaa

SEQ ID NO: 104297 - DNA, 25 bp, Saccharomyces pastorianus
gaatgtctacaaaggtctctccgtg

SEQ ID NO: 104298 - DNA, 25 bp, Saccharomyces pastorianus
ccgtgtggcggattctataatggat

SEQ ID NO: 104299 - DNA, 25 bp, Saccharomyces pastorianus
tgtttatttatgctcccacctctgg

SEQ ID NO: 104300 - DNA, 25 bp, Saccharomyces pastorianus
ggtcgtagcaactgcttcaggtagt

SEQ ID NO: 104301 - DNA, 25 bp, Saccharomyces pastorianus
atcagtgatttgcacatcaccggag

SEQ ID NO: 104302 - DNA, 25 bp, Saccharomyces pastorianus
atgcctctactattttattcacggg

SEQ ID NO: 104303 - DNA, 25 bp, Saccharomyces pastorianus
agcagtgcctctatgattaccaact

SEQ ID NO: 104304 - DNA, 25 bp, Saccharomyces pastorianus
gaagtatatcccgatccaccatttt

SEQ ID NO: 104305 - DNA, 25 bp, Saccharomyces pastorianus
actgaacggatcttccacgctaata

SEQ ID NO: 104306 - DNA, 25 bp, Saccharomyces pastorianus
gttcaccagagtattctttctcatt

SEQ ID NO: 104307 - DNA, 25 bp, Saccharomyces pastorianus
tctcaaaatgcacctgttcaccaga

SEQ ID NO: 104308 - DNA, 25 bp, Saccharomyces pastorianus
tagttcctatttccctctcaaaatg

SEQ ID NO: 104309 - DNA, 25 bp, Saccharomyces pastorianus
tctacttgtttttcttagttcctat

SEQ ID NO: 104310 - DNA, 25 bp, Saccharomyces pastorianus
agctcatattcatatcatgccattt

SEQ ID NO: 104311 - DNA, 25 bp, Saccharomyces pastorianus
acagtgcttacaactcagctcatat

SEQ ID NO: 104312 - DNA, 25 bp, Saccharomyces pastorianus
tccaggacgtctatacacagtgctt

SEQ ID NO: 104313 - DNA, 25 bp, Saccharomyces pastorianus
tggagatctgatttccgtgcaaaat

SEQ ID NO: 104314 - DNA, 25 bp, Saccharomyces pastorianus
atgcaacgctttactgcactgcact

SEQ ID NO: 104315 - DNA, 25 bp, Saccharomyces pastorianus
tattaccctactttatcgtcccaca

SEQ ID NO: 104316 - DNA, 25 bp, Saccharomyces pastorianus
tttctcattgcaagtattaccctac

SEQ ID NO: 104317 - DNA, 25 bp, Saccharomyces pastorianus
tgtgttatcacgctcttatccatca

SEQ ID NO: 104318 - DNA, 25 bp, Saccharomyces pastorianus
actgacctggaacttcctcatgaat

SEQ ID NO: 104319 - DNA, 25 bp, Saccharomyces pastorianus
gaaatacctatctttgttaccatac

SEQ ID NO: 104320 - DNA, 25 bp, Saccharomyces pastorianus
ttctaaatcccagttggtgcccaaa

SEQ ID NO: 104321 - DNA, 25 bp, Saccharomyces pastorianus
gatgaaattaatgcggccatccctc

SEQ ID NO: 104322 - DNA, 25 bp, Saccharomyces pastorianus
aagatgaaccgcaaccttttggaat

SEQ ID NO: 104323 - DNA, 25 bp, Saccharomyces pastorianus
ggccatccctccaagtagtgatgac

SEQ ID NO: 104324 - DNA, 25 bp, Saccharomyces pastorianus
ctcttatccatcacttcaagtcgat

SEQ ID NO: 104325 - DNA, 25 bp, Saccharomyces pastorianus
gatgcttatccgagcgttagaacac

SEQ ID NO: 104326 - DNA, 25 bp, Saccharomyces pastorianus
gttaccatactctaaagcttgtgat

SEQ ID NO: 104327 - DNA, 25 bp, Saccharomyces pastorianus
atgacacggcagctacaatttccac

SEQ ID NO: 104328 - DNA, 25 bp, Saccharomyces pastorianus
aaaccaaatcctgcttgttcgtatt

SEQ ID NO: 104329 - DNA, 25 bp, Saccharomyces pastorianus
tcctctgcgacgtcttttgtggaga

SEQ ID NO: 104330 - DNA, 25 bp, Saccharomyces pastorianus
gtccgactacagtgatctaccgttt

SEQ ID NO: 104331 - DNA, 25 bp, Saccharomyces pastorianus
acgagcctcgttggttgtccgacta

SEQ ID NO: 104332 - DNA, 25 bp, Saccharomyces pastorianus
agatgatggtttctctttcacccaa

SEQ ID NO: 104333 - DNA, 25 bp, Saccharomyces pastorianus
attgcctgatttaacggtcctgaac

SEQ ID NO: 104334 - DNA, 25 bp, Saccharomyces pastorianus
cattacattaagcttttaggcgcaa

SEQ ID NO: 104335 - DNA, 25 bp, Saccharomyces pastorianus
tacggagtatccatcggacgtgcca

SEQ ID NO: 104336 - DNA, 25 bp, Saccharomyces pastorianus
ggacgtgccaggataaactaatctt

SEQ ID NO: 104337 - DNA, 25 bp, Saccharomyces pastorianus
aatgctggagtcaccgaagaaaccg

SEQ ID NO: 104338 - DNA, 25 bp, Saccharomyces pastorianus
gaagaaaccgtccacaccaataatg

SEQ ID NO: 104339 - DNA, 25 bp, Saccharomyces pastorianus
gctgccggtcaacatcgagaatcta

SEQ ID NO: 104340 - DNA, 25 bp, Saccharomyces pastorianus
gatactgtgctgttcccatagctag

SEQ ID NO: 104341 - DNA, 25 bp, Saccharomyces pastorianus
agttcgcaatcgaccgaaaccaagg

SEQ ID NO: 104342 - DNA, 25 bp, Saccharomyces pastorianus
tgacgaccctcaaattattatactg

SEQ ID NO: 104343 - DNA, 25 bp, Saccharomyces pastorianus
tgaaccaagaccaatcttccgctga

SEQ ID NO: 104344 - DNA, 25 bp, Saccharomyces pastorianus
ccctacatgcctggtactgcaaaat

SEQ ID NO: 104345 - DNA, 25 bp, Saccharomyces pastorianus
gagcactgaagtatctgacgagatt

SEQ ID NO: 104346 - DNA, 25 bp, Saccharomyces pastorianus
acaaaactacattgctgccggtcaa

SEQ ID NO: 104347 - DNA, 25 bp, Saccharomyces pastorianus
gaagatctcgttagcgtgaaccaag

SEQ ID NO: 104348 - DNA, 25 bp, Saccharomyces pastorianus
attgatttgctatttatcccctaca

SEQ ID NO: 104349 - DNA, 25 bp, Saccharomyces pastorianus
catagctagcgtgccagcggataga

SEQ ID NO: 104350 - DNA, 25 bp, Saccharomyces pastorianus
aacccattgagttgtgcctacaagg

SEQ ID NO: 104351 - DNA, 25 bp, Saccharomyces pastorianus
ttattagatttcaccagctccgaca

SEQ ID NO: 104352 - DNA, 25 bp, Saccharomyces pastorianus
aagttcgtggtattgaccgacggca

SEQ ID NO: 104353 - DNA, 25 bp, Saccharomyces pastorianus
gctccgacaacaactatatgaccca

SEQ ID NO: 104354 - DNA, 25 bp, Saccharomyces pastorianus
accgacggcagcaagttgggtcaat

SEQ ID NO: 104355 - DNA, 25 bp, Saccharomyces pastorianus
tgtccatccaacagaatacggcctt

SEQ ID NO: 104356 - DNA, 25 bp, Saccharomyces pastorianus
gacattcgatgcaaacggcgacgca

SEQ ID NO: 104357 - DNA, 25 bp, Saccharomyces pastorianus
atgacccaagtccacgattataaag

SEQ ID NO: 104358 - DNA, 25 bp, Saccharomyces pastorianus
tataaaggcgtctccgtgtggcgaa

SEQ ID NO: 104359 - DNA, 25 bp, Saccharomyces pastorianus
ggctgtcacttggaacttatacggc

SEQ ID NO: 104360 - DNA, 25 bp, Saccharomyces pastorianus
tacgctacagaatcgggctcatgga

SEQ ID NO: 104361 - DNA, 25 bp, Saccharomyces pastorianus
gtatactcaggagccagcgggacca

SEQ ID NO: 104362 - DNA, 25 bp, Saccharomyces pastorianus
aggcatacaggaaaacacaagcagt

SEQ ID NO: 104363 - DNA, 25 bp, Saccharomyces pastorianus
aggagtctcccatgggcgatttcgg

SEQ ID NO: 104364 - DNA, 25 bp, Saccharomyces pastorianus
gatttcgggatcaataaccagccta

SEQ ID NO: 104365 - DNA, 25 bp, Saccharomyces pastorianus
gggaccagactagagtggattcctt

SEQ ID NO: 104366 - DNA, 25 bp, Saccharomyces pastorianus
gcaacagtagtatactcaggagcca

SEQ ID NO: 104367 - DNA, 25 bp, Saccharomyces pastorianus
gaactgactaatttaggcatacagg

SEQ ID NO: 104368 - DNA, 25 bp, Saccharomyces pastorianus
aaaacggcagtcgatacggccgcgg

SEQ ID NO: 104369 - DNA, 25 bp, Saccharomyces pastorianus
acagcctggcgtgatatactacttt

SEQ ID NO: 104370 - DNA, 25 bp, Saccharomyces pastorianus
gattccttggtagaggagtctccca

SEQ ID NO: 104371 - DNA, 25 bp, Saccharomyces pastorianus
ataaccagcctacacagcctggcgt

SEQ ID NO: 104372 - DNA, 25 bp, Saccharomyces pastorianus
gagaggacccatggaatgctatcat

SEQ ID NO: 104373 - DNA, 25 bp, Saccharomyces pastorianus
gattgcgctgtgaaggccgttagaa

SEQ ID NO: 104374 - DNA, 25 bp, Saccharomyces pastorianus
ggaggcatacaaggaacagttcgat

SEQ ID NO: 104375 - DNA, 25 bp, Saccharomyces pastorianus
cactggtggcgctttagctgtaaga

SEQ ID NO: 104376 - DNA, 25 bp, Saccharomyces pastorianus
gatccatgtcctatagtcatattaa

SEQ ID NO: 104377 - DNA, 25 bp, Saccharomyces pastorianus
cattgcagggtttttcactggtggc

SEQ ID NO: 104378 - DNA, 25 bp, Saccharomyces pastorianus
atgtcagccgatcattcgagagatc

SEQ ID NO: 104379 - DNA, 25 bp, Saccharomyces pastorianus
attaaagcgcgtgctcccgtactgg

SEQ ID NO: 104380 - DNA, 25 bp, Saccharomyces pastorianus
tgctcccgtactgggtggtaatttt

SEQ ID NO: 104381 - DNA, 25 bp, Saccharomyces pastorianus
ggttcaggagctatgagcgccatta

SEQ ID NO: 104382 - DNA, 25 bp, Saccharomyces pastorianus
gaaggtgtgggactaatgtttcaaa

SEQ ID NO: 104383 - DNA, 25 bp, Saccharomyces pastorianus
gggcagttatacagcttctgaaaag

SEQ ID NO: 104384 - DNA, 25 bp, Saccharomyces pastorianus
gttggagtctatcgacgttctgtta

SEQ ID NO: 104385 - DNA, 25 bp, Saccharomyces pastorianus
agatgacgtcaacgctgatgatgat

SEQ ID NO: 104386 - DNA, 25 bp, Saccharomyces pastorianus
agctactctacaactgggccaggaa

SEQ ID NO: 104387 - DNA, 25 bp, Saccharomyces pastorianus
acatccttttgaagtggcacaacta

SEQ ID NO: 104388 - DNA, 25 bp, Saccharomyces pastorianus
ggcacaactaggttctttggcctgt

SEQ ID NO: 104389 - DNA, 25 bp, Saccharomyces pastorianus
gcctgtgacacagctgatgaagcaa

SEQ ID NO: 104390 - DNA, 25 bp, Saccharomyces pastorianus
aagcactgggttacatccttttgaa

SEQ ID NO: 104391 - DNA, 25 bp, Saccharomyces pastorianus
aatttctcccgatttagagaccaag

SEQ ID NO: 104392 - DNA, 25 bp, Saccharomyces pastorianus
tgggccaggaattccagctgaaaca

SEQ ID NO: 104393 - DNA, 25 bp, Saccharomyces pastorianus
ggaattgattgccttgaacctaagt

SEQ ID NO: 104394 - DNA, 25 bp, Saccharomyces pastorianus
gtttaagccatggtcccgtaataca

SEQ ID NO: 104395 - DNA, 25 bp, Saccharomyces pastorianus
tatgacgaccactattaccagctgt

SEQ ID NO: 104396 - DNA, 25 bp, Saccharomyces pastorianus
gatggtgctgatcaaggaatcttca

SEQ ID NO: 104397 - DNA, 25 bp, Saccharomyces pastorianus
gcacgttgacctggatataacctca

SEQ ID NO: 104398 - DNA, 25 bp, Saccharomyces pastorianus
ctacttcacacacttgcaattgggc

SEQ ID NO: 104399 - DNA, 25 bp, Saccharomyces pastorianus
tcatggaatggatacgcctcccctt

SEQ ID NO: 104400 - DNA, 25 bp, Saccharomyces pastorianus
gaacctccttgtcttcaagacctgt

SEQ ID NO: 104401 - DNA, 25 bp, Saccharomyces pastorianus
gcataaggtgtctccactcatggaa

SEQ ID NO: 104402 - DNA, 25 bp, Saccharomyces pastorianus
aactacggataccagtcttcaccag

SEQ ID NO: 104403 - DNA, 25 bp, Saccharomyces pastorianus
gagaaaccgacatctaagccgcaat

SEQ ID NO: 104404 - DNA, 25 bp, Saccharomyces pastorianus
agccgcaatctgcttttaaatttga

SEQ ID NO: 104405 - DNA, 25 bp, Saccharomyces pastorianus
aaaatgcttttggaggtggatgcgc

SEQ ID NO: 104406 - DNA, 25 bp, Saccharomyces pastorianus
atgcttttggaggtggatgcgctat

SEQ ID NO: 104407 - DNA, 25 bp, Saccharomyces pastorianus
atgacacgatgtataagtaaaaaaa

SEQ ID NO: 104408 - DNA, 25 bp, Saccharomyces pastorianus
tgacacgatgtataagtaaaaaaat

SEQ ID NO: 104409 - DNA, 25 bp, Saccharomyces pastorianus
tgcttttggaggtggatgcgctatc

SEQ ID NO: 104410 - DNA, 25 bp, Saccharomyces pastorianus
aaaaatgcttttggaggtggatgcg

SEQ ID NO: 104411 - DNA, 25 bp, Saccharomyces pastorianus
aatgcttttggaggtggatgcgcta

SEQ ID NO: 104412 - DNA, 25 bp, Saccharomyces pastorianus
aaatgcttttggaggtggatgcgct

SEQ ID NO: 104413 - DNA, 25 bp, Saccharomyces pastorianus
gcttttggaggtggatgcgctatcc

SEQ ID NO: 104414 - DNA, 25 bp, Saccharomyces pastorianus
gacacgatgtataagtaaaaaaatg

SEQ ID NO: 104415 - DNA, 25 bp, Saccharomyces pastorianus
acacgatgtataagtaaaaaaatgc

SEQ ID NO: 104416 - DNA, 25 bp, Saccharomyces pastorianus
atatcgccagatattcatttcacga

SEQ ID NO: 104417 - DNA, 25 bp, Saccharomyces pastorianus
atgtgactgaactacgcttggctgt

SEQ ID NO: 104418 - DNA, 25 bp, Saccharomyces pastorianus
gttcaaccagctattgttggaacca

SEQ ID NO: 104419 - DNA, 25 bp, Saccharomyces pastorianus
gtttacatacaaccatcacgtagag

SEQ ID NO: 104420 - DNA, 25 bp, Saccharomyces pastorianus
cttgcgctaaagttgtcgtcacatt

SEQ ID NO: 104421 - DNA, 25 bp, Saccharomyces pastorianus
ttttccctcaccttgcgctaaagtt

SEQ ID NO: 104422 - DNA, 25 bp, Saccharomyces pastorianus
gttgtcgtcacattataagggcagt

SEQ ID NO: 104423 - DNA, 25 bp, Saccharomyces pastorianus
actactgcctttatcatgtgactga

SEQ ID NO: 104424 - DNA, 25 bp, Saccharomyces pastorianus
aattcttcaaacctaccagaccagc

SEQ ID NO: 104425 - DNA, 25 bp, Saccharomyces pastorianus
gtaccaaattgaactactgccttta

SEQ ID NO: 104426 - DNA, 25 bp, Saccharomyces pastorianus
gcttggctgttttgtttttccctca

SEQ ID NO: 104427 - DNA, 25 bp, Saccharomyces pastorianus
atatggtcccttgagtgcctcacta

SEQ ID NO: 104428 - DNA, 25 bp, Saccharomyces pastorianus
cttgagtgcctcactagctaccaga

SEQ ID NO: 104429 - DNA, 25 bp, Saccharomyces pastorianus
ctcgttcaactcttttaaggaatat

SEQ ID NO: 104430 - DNA, 25 bp, Saccharomyces pastorianus
aagacatatggtcccttgagtgcct

SEQ ID NO: 104431 - DNA, 25 bp, Saccharomyces pastorianus
gagtctcaaggatagccgctagcgc

SEQ ID NO: 104432 - DNA, 25 bp, Saccharomyces pastorianus
gaaaatgccaagacatatggtccct

SEQ ID NO: 104433 - DNA, 25 bp, Saccharomyces pastorianus
gggcaactcgttcaactcttttaag

SEQ ID NO: 104434 - DNA, 25 bp, Saccharomyces pastorianus
gcctccgcgggagtctcaaggatag

SEQ ID NO: 104435 - DNA, 25 bp, Saccharomyces pastorianus
ggccagcactattttcaagagatct

SEQ ID NO: 104436 - DNA, 25 bp, Saccharomyces pastorianus
aggatagccgctagcgccatggcca

SEQ ID NO: 104437 - DNA, 25 bp, Saccharomyces pastorianus
gccatggccagcactattttcaaga

SEQ ID NO: 104438 - DNA, 25 bp, Saccharomyces pastorianus
gctggaccgctctcaaaaaggtgaa

SEQ ID NO: 104439 - DNA, 25 bp, Saccharomyces pastorianus
gatcctgttctgctaggtaacatga

SEQ ID NO: 104440 - DNA, 25 bp, Saccharomyces pastorianus
gttggactcagtattgttaatgtag

SEQ ID NO: 104441 - DNA, 25 bp, Saccharomyces pastorianus
gaaaattttgaggagctggaccgct

SEQ ID NO: 104442 - DNA, 25 bp, Saccharomyces pastorianus
aggcagaaggctcacgaaatagttt

SEQ ID NO: 104443 - DNA, 25 bp, Saccharomyces pastorianus
aaattccacttgttaagatagtcga

SEQ ID NO: 104444 - DNA, 25 bp, Saccharomyces pastorianus
aggctaccagaatcagttttccaga

SEQ ID NO: 104445 - DNA, 25 bp, Saccharomyces pastorianus
gatagtcgaaagtcgtgtagcctta

SEQ ID NO: 104446 - DNA, 25 bp, Saccharomyces pastorianus
aaaagagctgctgtcttggagacat

SEQ ID NO: 104447 - DNA, 25 bp, Saccharomyces pastorianus
atatgctaatgatcctgttctgcta

SEQ ID NO: 104448 - DNA, 25 bp, Saccharomyces pastorianus
aaaggtgaaccacccaggctaccag

SEQ ID NO: 104449 - DNA, 25 bp, Saccharomyces pastorianus
gaagacctacatacgcagctttaac

SEQ ID NO: 104450 - DNA, 25 bp, Saccharomyces pastorianus
gcagctttaacagagcatccttggt

SEQ ID NO: 104451 - DNA, 25 bp, Saccharomyces pastorianus
ccgtaaagctgtgcgatttcggtgt

SEQ ID NO: 104452 - DNA, 25 bp, Saccharomyces pastorianus
agcgctattgttgatgggccgccac

SEQ ID NO: 104453 - DNA, 25 bp, Saccharomyces pastorianus
aattcagttctgacgcacaagattt

SEQ ID NO: 104454 - DNA, 25 bp, Saccharomyces pastorianus
cctcagctagcgtttattgccaatg

SEQ ID NO: 104455 - DNA, 25 bp, Saccharomyces pastorianus
gatatccgtatccaccagaaacata

SEQ ID NO: 104456 - DNA, 25 bp, Saccharomyces pastorianus
gatagagccacctataccgtacagt

SEQ ID NO: 104457 - DNA, 25 bp, Saccharomyces pastorianus
tgttcagccaaccaaggcaccgtaa

SEQ ID NO: 104458 - DNA, 25 bp, Saccharomyces pastorianus
gccaccgagattaccttcagataaa

SEQ ID NO: 104459 - DNA, 25 bp, Saccharomyces pastorianus
agtcatacatggcacctgaacgaat

SEQ ID NO: 104460 - DNA, 25 bp, Saccharomyces pastorianus
acaatagcagctacccttgtcttct

SEQ ID NO: 104461 - DNA, 25 bp, Saccharomyces pastorianus
gtagttctgtgaaacgtgtacccac

SEQ ID NO: 104462 - DNA, 25 bp, Saccharomyces pastorianus
agtagttctgtgaaacgtgtaccca

SEQ ID NO: 104463 - DNA, 25 bp, Saccharomyces pastorianus
tacccacaatagcagctacccttgt

SEQ ID NO: 104464 - DNA, 25 bp, Saccharomyces pastorianus
acgttgatgtctggagaaggacaag

SEQ ID NO: 104465 - DNA, 25 bp, Saccharomyces pastorianus
agcagctacccttgtcttctttttt

SEQ ID NO: 104466 - DNA, 25 bp, Saccharomyces pastorianus
gtgtacccacaatagcagctaccct

SEQ ID NO: 104467 - DNA, 25 bp, Saccharomyces pastorianus
atagcagctacccttgtcttctttt

SEQ ID NO: 104468 - DNA, 25 bp, Saccharomyces pastorianus
aacgtgtacccacaatagcagctac

SEQ ID NO: 104469 - DNA, 25 bp, Saccharomyces pastorianus
gaaacgtgtacccacaatagcagct

SEQ ID NO: 104470 - DNA, 25 bp, Saccharomyces pastorianus
gttctgtgaaacgtgtacccacaat

SEQ ID NO: 104471 - DNA, 25 bp, Saccharomyces pastorianus
aatatttacagctttgcatacgcca

SEQ ID NO: 104472 - DNA, 25 bp, Saccharomyces pastorianus
tttccaattcttaggctatttgggt

SEQ ID NO: 104473 - DNA, 25 bp, Saccharomyces pastorianus
accagatccgttcaatatttacagc

SEQ ID NO: 104474 - DNA, 25 bp, Saccharomyces pastorianus
tttgcatacgccaactcaacagatc

SEQ ID NO: 104475 - DNA, 25 bp, Saccharomyces pastorianus
gatccgttcaatatttacagctttg

SEQ ID NO: 104476 - DNA, 25 bp, Saccharomyces pastorianus
acgccaactcaacagatccaattat

SEQ ID NO: 104477 - DNA, 25 bp, Saccharomyces pastorianus
tttttcaaccagatccgttcaatat

SEQ ID NO: 104478 - DNA, 25 bp, Saccharomyces pastorianus
atacgccaactcaacagatccaatt

SEQ ID NO: 104479 - DNA, 25 bp, Saccharomyces pastorianus
tttcaaccagatccgttcaatattt

SEQ ID NO: 104480 - DNA, 25 bp, Saccharomyces pastorianus
ctatttgggtagttgtgttgtgatt

SEQ ID NO: 104481 - DNA, 25 bp, Saccharomyces pastorianus
gatccaattatcaagaagggccttt

SEQ ID NO: 104482 - DNA, 25 bp, Saccharomyces pastorianus
aagatccgagtttctttcctcaata

SEQ ID NO: 104483 - DNA, 25 bp, Saccharomyces pastorianus
gaatagtcccgcaacaacagctgaa

SEQ ID NO: 104484 - DNA, 25 bp, Saccharomyces pastorianus
ggccgctctagaaatggtccaaaag

SEQ ID NO: 104485 - DNA, 25 bp, Saccharomyces pastorianus
gatgtgactggccaacaaatcgatt

SEQ ID NO: 104486 - DNA, 25 bp, Saccharomyces pastorianus
gaagataacgtcatggccgctctag

SEQ ID NO: 104487 - DNA, 25 bp, Saccharomyces pastorianus
agagcacgccactattggacgacga

SEQ ID NO: 104488 - DNA, 25 bp, Saccharomyces pastorianus
taatatcgtacaacccacattccag

SEQ ID NO: 104489 - DNA, 25 bp, Saccharomyces pastorianus
ggatgttgcctccaacggaattgta

SEQ ID NO: 104490 - DNA, 25 bp, Saccharomyces pastorianus
gatgtggagggtgaacccactccgc

SEQ ID NO: 104491 - DNA, 25 bp, Saccharomyces pastorianus
aaccattcagttcccgatttagata

SEQ ID NO: 104492 - DNA, 25 bp, Saccharomyces pastorianus
gaaccccgtcaaccgtgatgaacga

SEQ ID NO: 104493 - DNA, 25 bp, Saccharomyces pastorianus
atcttatgttttcccagtgcgttca

SEQ ID NO: 104494 - DNA, 25 bp, Saccharomyces pastorianus
ttggaccacaactaattctcgctga

SEQ ID NO: 104495 - DNA, 25 bp, Saccharomyces pastorianus
aaataatagcgcatgccgatccctc

SEQ ID NO: 104496 - DNA, 25 bp, Saccharomyces pastorianus
gaatgcacgatctcagtgatccaga

SEQ ID NO: 104497 - DNA, 25 bp, Saccharomyces pastorianus
atgctatgtgctcatgccagggcag

SEQ ID NO: 104498 - DNA, 25 bp, Saccharomyces pastorianus
tttgttatgatattcgctttcccga

SEQ ID NO: 104499 - DNA, 25 bp, Saccharomyces pastorianus
tgacgtagacgtgccaaatggaccg

SEQ ID NO: 104500 - DNA, 25 bp, Saccharomyces pastorianus
aacaatcacatatgagcgctctcga

SEQ ID NO: 104501 - DNA, 25 bp, Saccharomyces pastorianus
gaatcaaaatctgtccagcctggca

SEQ ID NO: 104502 - DNA, 25 bp, Saccharomyces pastorianus
ctggcaaagccattcctgacattat

SEQ ID NO: 104503 - DNA, 25 bp, Saccharomyces pastorianus
aattctcgctgatttggatcgtaag

SEQ ID NO: 104504 - DNA, 25 bp, Saccharomyces pastorianus
gtagtgtttttagatctgccggctc

SEQ ID NO: 104505 - DNA, 25 bp, Saccharomyces pastorianus
cttttggcaagggttctcgaatcaa

SEQ ID NO: 104506 - DNA, 25 bp, Saccharomyces pastorianus
aaggtcggattgtgttgcttctccc

SEQ ID NO: 104507 - DNA, 25 bp, Saccharomyces pastorianus
agaggcacaaactccagggtgtaga

SEQ ID NO: 104508 - DNA, 25 bp, Saccharomyces pastorianus
atctcatacctcatatttgactttg

SEQ ID NO: 104509 - DNA, 25 bp, Saccharomyces pastorianus
gacactacatcttacgaatttggca

SEQ ID NO: 104510 - DNA, 25 bp, Saccharomyces pastorianus
gctatacctcatctggattctgtta

SEQ ID NO: 104511 - DNA, 25 bp, Saccharomyces pastorianus
gattctgttattgccgtagacgaaa

SEQ ID NO: 104512 - DNA, 25 bp, Saccharomyces pastorianus
gtcagatcactcaatgatgccctgg

SEQ ID NO: 104513 - DNA, 25 bp, Saccharomyces pastorianus
cttctccccatgcattgagcaagta

SEQ ID NO: 104514 - DNA, 25 bp, Saccharomyces pastorianus
gaaaccgccgcttcattgaatgcaa

SEQ ID NO: 104515 - DNA, 25 bp, Saccharomyces pastorianus
gctcagtagaccgtaaaatcttcgt

SEQ ID NO: 104516 - DNA, 25 bp, Saccharomyces pastorianus
tgaggccatggaacgcataccattt

SEQ ID NO: 104517 - DNA, 25 bp, Saccharomyces pastorianus
gaggccgatttatatctcgaccagt

SEQ ID NO: 104518 - DNA, 25 bp, Saccharomyces pastorianus
taccaccgctgctattgtaagctca

SEQ ID NO: 104519 - DNA, 25 bp, Saccharomyces pastorianus
ggaagaatgctattcggtgtactaa

SEQ ID NO: 104520 - DNA, 25 bp, Saccharomyces pastorianus
gaaatcagtccaatcaggatgcgaa

SEQ ID NO: 104521 - DNA, 25 bp, Saccharomyces pastorianus
catttaaggaggcttggctgaccaa

SEQ ID NO: 104522 - DNA, 25 bp, Saccharomyces pastorianus
aaatcttcgttcttttgcgtgatgg

SEQ ID NO: 104523 - DNA, 25 bp, Saccharomyces pastorianus
ggtgtactaagaacctttgaccaat

SEQ ID NO: 104524 - DNA, 25 bp, Saccharomyces pastorianus
gacaacagcagaatttcccaaagaa

SEQ ID NO: 104525 - DNA, 25 bp, Saccharomyces pastorianus
tcgaccagtataacttcactaccac

SEQ ID NO: 104526 - DNA, 25 bp, Saccharomyces pastorianus
ccgactccaatacgccaggcaattt

SEQ ID NO: 104527 - DNA, 25 bp, Saccharomyces pastorianus
ggaaaatgcagtcaaactcttcaat

SEQ ID NO: 104528 - DNA, 25 bp, Saccharomyces pastorianus
actcttcaatactgcacatgaggaa

SEQ ID NO: 104529 - DNA, 25 bp, Saccharomyces pastorianus
atcttaccaattgccattccgcaaa

SEQ ID NO: 104530 - DNA, 25 bp, Saccharomyces pastorianus
aaaagccttcagttgcagacggtga

SEQ ID NO: 104531 - DNA, 25 bp, Saccharomyces pastorianus
gacggtgagaaactggcatttgcaa

SEQ ID NO: 104532 - DNA, 25 bp, Saccharomyces pastorianus
agaggctgatgccactccagatgac

SEQ ID NO: 104533 - DNA, 25 bp, Saccharomyces pastorianus
aaggattccctgtcaaatgggtcaa

SEQ ID NO: 104534 - DNA, 25 bp, Saccharomyces pastorianus
tacagtttaatctattcgacggcaa

SEQ ID NO: 104535 - DNA, 25 bp, Saccharomyces pastorianus
agatgccgacggtgactttcaagtg

SEQ ID NO: 104536 - DNA, 25 bp, Saccharomyces pastorianus
gtgactttcaagtgaccgactccaa

SEQ ID NO: 104537 - DNA, 25 bp, Saccharomyces pastorianus
caacgttattgtcgctggtaccagt

SEQ ID NO: 104538 - DNA, 25 bp, Saccharomyces pastorianus
aaagccggtgccaacgttattgtcg

SEQ ID NO: 104539 - DNA, 25 bp, Saccharomyces pastorianus
agagccaagtttccccatttgaata

SEQ ID NO: 104540 - DNA, 25 bp, Saccharomyces pastorianus
gctcctcatttggatatggctcttg

SEQ ID NO: 104541 - DNA, 25 bp, Saccharomyces pastorianus
gtggtgctgaccaatttacgttcca

SEQ ID NO: 104542 - DNA, 25 bp, Saccharomyces pastorianus
ccacacaagaccctttgcatttagt

SEQ ID NO: 104543 - DNA, 25 bp, Saccharomyces pastorianus
ggacggccattttgttccaaacatt

SEQ ID NO: 104544 - DNA, 25 bp, Saccharomyces pastorianus
caaacctggtacttctgttgacgtt

SEQ ID NO: 104545 - DNA, 25 bp, Saccharomyces pastorianus
agggcatcaaagctgcatgcgccat

SEQ ID NO: 104546 - DNA, 25 bp, Saccharomyces pastorianus
gaaaagaagcccactgcgttcttcg

SEQ ID NO: 104547 - DNA, 25 bp, Saccharomyces pastorianus
atggctcttgttatgactgtggaac

SEQ ID NO: 104548 - DNA, 25 bp, Saccharomyces pastorianus
ttggaattagcaaatggccttcttg

SEQ ID NO: 104549 - DNA, 25 bp, Saccharomyces pastorianus
ctcgacttggatagctgttcttgtt

SEQ ID NO: 104550 - DNA, 25 bp, Saccharomyces pastorianus
agaagttccagcttacggatcaaga

SEQ ID NO: 104551 - DNA, 25 bp, Saccharomyces pastorianus
attctttctattctggctttcctat

SEQ ID NO: 104552 - DNA, 25 bp, Saccharomyces pastorianus
ggccttcttgcatgaaattgtatcg

SEQ ID NO: 104553 - DNA, 25 bp, Saccharomyces pastorianus
ggtttgaccattttttcttgtgtgt

SEQ ID NO: 104554 - DNA, 25 bp, Saccharomyces pastorianus
aaatctgattactttcccagctcga

SEQ ID NO: 104555 - DNA, 25 bp, Saccharomyces pastorianus
acccaagttggcgaagtcagaagca

SEQ ID NO: 104556 - DNA, 25 bp, Saccharomyces pastorianus
ggctttcctataacagagatcatga

SEQ ID NO: 104557 - DNA, 25 bp, Saccharomyces pastorianus
tttacgggcggattctttctattct

SEQ ID NO: 104558 - DNA, 25 bp, Saccharomyces pastorianus
gtgtttacctcgctcttggaattag

SEQ ID NO: 104559 - DNA, 25 bp, Saccharomyces pastorianus
gtctattcattcgatagcacgctta

SEQ ID NO: 104560 - DNA, 25 bp, Saccharomyces pastorianus
ggatccagtggtgaacaatacgcat

SEQ ID NO: 104561 - DNA, 25 bp, Saccharomyces pastorianus
ttctctcacgtgtatctgattcgta

SEQ ID NO: 104562 - DNA, 25 bp, Saccharomyces pastorianus
gcattgatttcgttagcccctaaca

SEQ ID NO: 104563 - DNA, 25 bp, Saccharomyces pastorianus
tcgtcctcagcggtttagtgttcac

SEQ ID NO: 104564 - DNA, 25 bp, Saccharomyces pastorianus
ataagaaggtcgtcctcagcggttt

SEQ ID NO: 104565 - DNA, 25 bp, Saccharomyces pastorianus
gattgattgggctatgctacactcc

SEQ ID NO: 104566 - DNA, 25 bp, Saccharomyces pastorianus
tactactgtgggttgtcgtcgtgta

SEQ ID NO: 104567 - DNA, 25 bp, Saccharomyces pastorianus
ggagaccatgaaactcttgattgat

SEQ ID NO: 104568 - DNA, 25 bp, Saccharomyces pastorianus
ggttctaccagctggctcgtattaa

SEQ ID NO: 104569 - DNA, 25 bp, Saccharomyces pastorianus
gttagcccctaacatgacattaagt

SEQ ID NO: 104570 - DNA, 25 bp, Saccharomyces pastorianus
gtacttctggttcggatgtcggcaa

SEQ ID NO: 104571 - DNA, 25 bp, Saccharomyces pastorianus
gataccagcgatttatgttctacgg

SEQ ID NO: 104572 - DNA, 25 bp, Saccharomyces pastorianus
cggcaactgggctccattagtgtta

SEQ ID NO: 104573 - DNA, 25 bp, Saccharomyces pastorianus
aatctgttggtggtctttactgtaa

SEQ ID NO: 104574 - DNA, 25 bp, Saccharomyces pastorianus
ttccgatggttgcacagtttctgtt

SEQ ID NO: 104575 - DNA, 25 bp, Saccharomyces pastorianus
taacaacgccggtgtatctgcagaa

SEQ ID NO: 104576 - DNA, 25 bp, Saccharomyces pastorianus
tgaagatggctctttcaccggagat

SEQ ID NO: 104577 - DNA, 25 bp, Saccharomyces pastorianus
atccgatggcgctaacgttcagggc

SEQ ID NO: 104578 - DNA, 25 bp, Saccharomyces pastorianus
agtgttaggtgctggttccactaat

SEQ ID NO: 104579 - DNA, 25 bp, Saccharomyces pastorianus
aaaagtctgactccattgctctatg

SEQ ID NO: 104580 - DNA, 25 bp, Saccharomyces pastorianus
aaacatggtgattcccacagtggtt

SEQ ID NO: 104581 - DNA, 25 bp, Saccharomyces pastorianus
agtttcatgcgtacagtgcgccagt

SEQ ID NO: 104582 - DNA, 25 bp, Saccharomyces pastorianus
cttgcaaaccattgatctgagcttt

SEQ ID NO: 104583 - DNA, 25 bp, Saccharomyces pastorianus
gatcctagtttcttggtgagtggtt

SEQ ID NO: 104584 - DNA, 25 bp, Saccharomyces pastorianus
tgaaagctggtcttgtgtcgaacaa

SEQ ID NO: 104585 - DNA, 25 bp, Saccharomyces pastorianus
tacgttccgggaagtgcttgcaaac

SEQ ID NO: 104586 - DNA, 25 bp, Saccharomyces pastorianus
agaacgctgcagtcgttgtcgcaga

SEQ ID NO: 104587 - DNA, 25 bp, Saccharomyces pastorianus
gcctggtcacaggttcatacgacag

SEQ ID NO: 104588 - DNA, 25 bp, Saccharomyces pastorianus
gatgcagcgctagcaacgggtacaa

SEQ ID NO: 104589 - DNA, 25 bp, Saccharomyces pastorianus
gttctttcgttagatctcttccaag

SEQ ID NO: 104590 - DNA, 25 bp, Saccharomyces pastorianus
ttaggcaatgggacttacgttccgg

SEQ ID NO: 104591 - DNA, 25 bp, Saccharomyces pastorianus
ttaaaatttgattccgcgtgcctgg

SEQ ID NO: 104592 - DNA, 25 bp, Saccharomyces pastorianus
aaccagagcatttgggtacttgtgc

SEQ ID NO: 104593 - DNA, 25 bp, Saccharomyces pastorianus
aaatgctgggtttgatgctatagaa

SEQ ID NO: 104594 - DNA, 25 bp, Saccharomyces pastorianus
aatgcaaatcgggtcagaacgctac

SEQ ID NO: 104595 - DNA, 25 bp, Saccharomyces pastorianus
gttgagagatcattgcacgatgcaa

SEQ ID NO: 104596 - DNA, 25 bp, Saccharomyces pastorianus
gccaaattcgtatgggaacctgctt

SEQ ID NO: 104597 - DNA, 25 bp, Saccharomyces pastorianus
ggtacttgtgctttgtttgaggaaa

SEQ ID NO: 104598 - DNA, 25 bp, Saccharomyces pastorianus
atgataatcaatgccttcgctaagg

SEQ ID NO: 104599 - DNA, 25 bp, Saccharomyces pastorianus
agaacgctacaatttattccaaggt

SEQ ID NO: 104600 - DNA, 25 bp, Saccharomyces pastorianus
ttttatctgttgacgagacgatcat

SEQ ID NO: 104601 - DNA, 25 bp, Saccharomyces pastorianus
tcaatgctttgaacagtgccacaga

SEQ ID NO: 104602 - DNA, 25 bp, Saccharomyces pastorianus
tattccaaggcaactctgtgaaaat

SEQ ID NO: 104603 - DNA, 25 bp, Saccharomyces pastorianus
taatatctgctaatcgtaacgaccc

SEQ ID NO: 104604 - DNA, 25 bp, Saccharomyces pastorianus
taatccatccgaggtaccgaatcaa

SEQ ID NO: 104605 - DNA, 25 bp, Saccharomyces pastorianus
ttagatcgacgatgtcttccccaga

SEQ ID NO: 104606 - DNA, 25 bp, Saccharomyces pastorianus
ggcttctattaacgacatgcttgag

SEQ ID NO: 104607 - DNA, 25 bp, Saccharomyces pastorianus
ataccgtttctacaatcttctaaag

SEQ ID NO: 104608 - DNA, 25 bp, Saccharomyces pastorianus
aataatggtattgcctctaccgccg

SEQ ID NO: 104609 - DNA, 25 bp, Saccharomyces pastorianus
ttctagttctgatgtttctggacga

SEQ ID NO: 104610 - DNA, 25 bp, Saccharomyces pastorianus
ctttatctttccacatggcttctat

SEQ ID NO: 104611 - DNA, 25 bp, Saccharomyces pastorianus
tcttctaaagctccctgtatatcca

SEQ ID NO: 104612 - DNA, 25 bp, Saccharomyces pastorianus
ttcttcacggacgactgactctaat

SEQ ID NO: 104613 - DNA, 25 bp, Saccharomyces pastorianus
gggaaatgtcgagctcttgaggaac

SEQ ID NO: 104614 - DNA, 25 bp, Saccharomyces pastorianus
ggtataattacttcctatttcacgt

SEQ ID NO: 104615 - DNA, 25 bp, Saccharomyces pastorianus
cgagttaatttctgtatccttggtc

SEQ ID NO: 104616 - DNA, 25 bp, Saccharomyces pastorianus
actctctaacctcttcgctaaagtt

SEQ ID NO: 104617 - DNA, 25 bp, Saccharomyces pastorianus
gttagttctattgccacagctcgtt

SEQ ID NO: 104618 - DNA, 25 bp, Saccharomyces pastorianus
aacagtggcgttgatgagcataacc

SEQ ID NO: 104619 - DNA, 25 bp, Saccharomyces pastorianus
gacgtttggtaatcaactctctaac

SEQ ID NO: 104620 - DNA, 25 bp, Saccharomyces pastorianus
tggcgctctggcttctaacaacagt

SEQ ID NO: 104621 - DNA, 25 bp, Saccharomyces pastorianus
ttcccgtcatcgctgagttattgga

SEQ ID NO: 104622 - DNA, 25 bp, Saccharomyces pastorianus
gtatccttggtcaatcaactatcta

SEQ ID NO: 104623 - DNA, 25 bp, Saccharomyces pastorianus
aaagcttcctgttcctccaatgaaa

SEQ ID NO: 104624 - DNA, 25 bp, Saccharomyces pastorianus
acctggtcaaggcaattggcgctct

SEQ ID NO: 104625 - DNA, 25 bp, Saccharomyces pastorianus
tggaaaagcattcgccgaggcgtat

SEQ ID NO: 104626 - DNA, 25 bp, Saccharomyces pastorianus
ggtggaagcttctacttacagagca

SEQ ID NO: 104627 - DNA, 25 bp, Saccharomyces pastorianus
acaatcagtgaaacaaggtgctaca

SEQ ID NO: 104628 - DNA, 25 bp, Saccharomyces pastorianus
cgaggcgtatagacaagcggcttca

SEQ ID NO: 104629 - DNA, 25 bp, Saccharomyces pastorianus
gaaacctcctccgaattcaacaaat

SEQ ID NO: 104630 - DNA, 25 bp, Saccharomyces pastorianus
aaggtgctacaaatgcatctagaag

SEQ ID NO: 104631 - DNA, 25 bp, Saccharomyces pastorianus
caagggcgatttaaacatggacaag

SEQ ID NO: 104632 - DNA, 25 bp, Saccharomyces pastorianus
aacaggtttaactatctatttgagg

SEQ ID NO: 104633 - DNA, 25 bp, Saccharomyces pastorianus
cgaatatggtggtattacgttggat

SEQ ID NO: 104634 - DNA, 25 bp, Saccharomyces pastorianus
gctcacagggctttcatacaggtta

SEQ ID NO: 104635 - DNA, 25 bp, Saccharomyces pastorianus
ggacgcttcaacagcgaaacctcct

SEQ ID NO: 104636 - DNA, 25 bp, Saccharomyces pastorianus
aatttactattagaccgcacctcct

SEQ ID NO: 104637 - DNA, 25 bp, Saccharomyces pastorianus
gcatgttcttctacctcgtcaaaaa

SEQ ID NO: 104638 - DNA, 25 bp, Saccharomyces pastorianus
gacgaacacagtacccaaaagcata

SEQ ID NO: 104639 - DNA, 25 bp, Saccharomyces pastorianus
gtaagctgcacaccgatgtgcatct

SEQ ID NO: 104640 - DNA, 25 bp, Saccharomyces pastorianus
atatttaacgaattgctggcatttg

SEQ ID NO: 104641 - DNA, 25 bp, Saccharomyces pastorianus
caggcgagatttgttttgtcagtaa

SEQ ID NO: 104642 - DNA, 25 bp, Saccharomyces pastorianus
atctggatcataaaagcgtttcgaa

SEQ ID NO: 104643 - DNA, 25 bp, Saccharomyces pastorianus
gactcgtttaatatcccaattctcg

SEQ ID NO: 104644 - DNA, 25 bp, Saccharomyces pastorianus
gaccgcacctcctttatttttgaat

SEQ ID NO: 104645 - DNA, 25 bp, Saccharomyces pastorianus
gaagttaccttgcaaagggctttat

SEQ ID NO: 104646 - DNA, 25 bp, Saccharomyces pastorianus
ttatttgaagtgtgcctgttgttgg

SEQ ID NO: 104647 - DNA, 25 bp, Saccharomyces pastorianus
aaatacaaccttctggaacccatca

SEQ ID NO: 104648 - DNA, 25 bp, Saccharomyces pastorianus
tgatctaacaatccctcaatctgat

SEQ ID NO: 104649 - DNA, 25 bp, Saccharomyces pastorianus
gcaagttgcattgtgggacttcaaa

SEQ ID NO: 104650 - DNA, 25 bp, Saccharomyces pastorianus
agctaactttcccttatatgcatgc

SEQ ID NO: 104651 - DNA, 25 bp, Saccharomyces pastorianus
aatagcgattggtcagtcccacctg

SEQ ID NO: 104652 - DNA, 25 bp, Saccharomyces pastorianus
aagcgtgtcaaattctggcgcatcc

SEQ ID NO: 104653 - DNA, 25 bp, Saccharomyces pastorianus
tgatgctgttacaaccctacacgca

SEQ ID NO: 104654 - DNA, 25 bp, Saccharomyces pastorianus
gatatatattccctctgatgctgtt

SEQ ID NO: 104655 - DNA, 25 bp, Saccharomyces pastorianus
ggaacccatcatgaatcttgatcta

SEQ ID NO: 104656 - DNA, 25 bp, Saccharomyces pastorianus
tggcgcatccacttgtaattctcca

SEQ ID NO: 104657 - DNA, 25 bp, Saccharomyces pastorianus
gaaattaccacctacaccaataagc

SEQ ID NO: 104658 - DNA, 25 bp, Saccharomyces pastorianus
gaattcacctatgtttcaacaccag

SEQ ID NO: 104659 - DNA, 25 bp, Saccharomyces pastorianus
agcgaagttttacggatgcatgcaa

SEQ ID NO: 104660 - DNA, 25 bp, Saccharomyces pastorianus
attccgccgcatatgcattgtgtag

SEQ ID NO: 104661 - DNA, 25 bp, Saccharomyces pastorianus
atagccccaccgatgaatttggagg

SEQ ID NO: 104662 - DNA, 25 bp, Saccharomyces pastorianus
taaacttcaatcctggttctgacgc

SEQ ID NO: 104663 - DNA, 25 bp, Saccharomyces pastorianus
taattctatacccaagcgtgcttct

SEQ ID NO: 104664 - DNA, 25 bp, Saccharomyces pastorianus
tttggattatgctgattccgccgca

SEQ ID NO: 104665 - DNA, 25 bp, Saccharomyces pastorianus
gcgcggaaggccatgactacgacat

SEQ ID NO: 104666 - DNA, 25 bp, Saccharomyces pastorianus
ggcaaacgtgaccaagagcagcttt

SEQ ID NO: 104667 - DNA, 25 bp, Saccharomyces pastorianus
ggttctgacgccacggaacaagttc

SEQ ID NO: 104668 - DNA, 25 bp, Saccharomyces pastorianus
ggagtcatcaccttctaattctata

SEQ ID NO: 104669 - DNA, 25 bp, Saccharomyces pastorianus
agttggacagccagcattcttctac

SEQ ID NO: 104670 - DNA, 25 bp, Saccharomyces pastorianus
tatttgctttacttggtcatctcct

SEQ ID NO: 104671 - DNA, 25 bp, Saccharomyces pastorianus
taatagcggccatgctcgcttatat

SEQ ID NO: 104672 - DNA, 25 bp, Saccharomyces pastorianus
ttaggagttgtacgttccccattgc

SEQ ID NO: 104673 - DNA, 25 bp, Saccharomyces pastorianus
gtgttgccagcgaactacgcattat

SEQ ID NO: 104674 - DNA, 25 bp, Saccharomyces pastorianus
cattgctgaccactgttgcacaagt

SEQ ID NO: 104675 - DNA, 25 bp, Saccharomyces pastorianus
gtcatctccttgtacccaaaagttg

SEQ ID NO: 104676 - DNA, 25 bp, Saccharomyces pastorianus
aatgctcttcctacacatggtagca

SEQ ID NO: 104677 - DNA, 25 bp, Saccharomyces pastorianus
tacccctttataatttgctttctgc

SEQ ID NO: 104678 - DNA, 25 bp, Saccharomyces pastorianus
ttgttctggattttgtaccccactg

SEQ ID NO: 104679 - DNA, 25 bp, Saccharomyces pastorianus
aaaaatgtcgctacccttgttcaat

SEQ ID NO: 104680 - DNA, 25 bp, Saccharomyces pastorianus
attgaggagtacacacgcggacccg

SEQ ID NO: 104681 - DNA, 25 bp, Saccharomyces pastorianus
gtttcttctgctgaatatgcactac

SEQ ID NO: 104682 - DNA, 25 bp, Saccharomyces pastorianus
tttggatatcacctgatacgcccct

SEQ ID NO: 104683 - DNA, 25 bp, Saccharomyces pastorianus
tacacacttagtttttccgactggt

SEQ ID NO: 104684 - DNA, 25 bp, Saccharomyces pastorianus
aatgattctggagtgacatcccctc

SEQ ID NO: 104685 - DNA, 25 bp, Saccharomyces pastorianus
cacgcggacccgaattttggatatc

SEQ ID NO: 104686 - DNA, 25 bp, Saccharomyces pastorianus
gaacctcattttgcttttatgatgc

SEQ ID NO: 104687 - DNA, 25 bp, Saccharomyces pastorianus
aatacaacgagctcacaatccagtc

SEQ ID NO: 104688 - DNA, 25 bp, Saccharomyces pastorianus
caaaagcatctagcccagagggaat

SEQ ID NO: 104689 - DNA, 25 bp, Saccharomyces pastorianus
tccgactggtcgtacattcataaac

SEQ ID NO: 104690 - DNA, 25 bp, Saccharomyces pastorianus
actacatcggatatgtctggcggat

SEQ ID NO: 104691 - DNA, 25 bp, Saccharomyces pastorianus
ccggtagttactccagcatttattt

SEQ ID NO: 104692 - DNA, 25 bp, Saccharomyces pastorianus
ggatcaagttggagtcactgccaaa

SEQ ID NO: 104693 - DNA, 25 bp, Saccharomyces pastorianus
aaaagcgtagtgtctcatcgagtat

SEQ ID NO: 104694 - DNA, 25 bp, Saccharomyces pastorianus
gtattatctgcccaagaggacacaa

SEQ ID NO: 104695 - DNA, 25 bp, Saccharomyces pastorianus
actcaagttacctatggctccattc

SEQ ID NO: 104696 - DNA, 25 bp, Saccharomyces pastorianus
aattcctcattatcggagcactcta

SEQ ID NO: 104697 - DNA, 25 bp, Saccharomyces pastorianus
gcagccgactgcaatttctaatcca

SEQ ID NO: 104698 - DNA, 25 bp, Saccharomyces pastorianus
gataagaaacgtactgcctctttag

SEQ ID NO: 104699 - DNA, 25 bp, Saccharomyces pastorianus
gtatcatggatgtttcttcagagag

SEQ ID NO: 104700 - DNA, 25 bp, Saccharomyces pastorianus
attattgtccgctgcatctggagaa

SEQ ID NO: 104701 - DNA, 25 bp, Saccharomyces pastorianus
aaatgtgcctacagagcagccgact

SEQ ID NO: 104702 - DNA, 25 bp, Saccharomyces pastorianus
aattacttccttttgagacaatcca

SEQ ID NO: 104703 - DNA, 25 bp, Saccharomyces pastorianus
gatgcgtcaccatacgattttaata

SEQ ID NO: 104704 - DNA, 25 bp, Saccharomyces pastorianus
aaatttaaaccctgattcgccatca

SEQ ID NO: 104705 - DNA, 25 bp, Saccharomyces pastorianus
ggtcaatacccagctgaaccttttg

SEQ ID NO: 104706 - DNA, 25 bp, Saccharomyces pastorianus
aactccaatttcctagatgcgtcac

SEQ ID NO: 104707 - DNA, 25 bp, Saccharomyces pastorianus
cgccatcagttacgtcttctaagaa

SEQ ID NO: 104708 - DNA, 25 bp, Saccharomyces pastorianus
gtcgaatttcgcgtctaaggtcaat

SEQ ID NO: 104709 - DNA, 25 bp, Saccharomyces pastorianus
atcgttagcaaccatgactccagta

SEQ ID NO: 104710 - DNA, 25 bp, Saccharomyces pastorianus
gatgccgtatcgagctttaattcaa

SEQ ID NO: 104711 - DNA, 25 bp, Saccharomyces pastorianus
gcaattcggtagatttcaacacaga

SEQ ID NO: 104712 - DNA, 25 bp, Saccharomyces pastorianus
gctgaaccttttgcaacactcgagt

SEQ ID NO: 104713 - DNA, 25 bp, Saccharomyces pastorianus
gaactggtcaagaggtgtattgcta

SEQ ID NO: 104714 - DNA, 25 bp, Saccharomyces pastorianus
tattgctagcgatgcagagctgact

SEQ ID NO: 104715 - DNA, 25 bp, Saccharomyces pastorianus
aagtgctgaaattggacaactcgaa

SEQ ID NO: 104716 - DNA, 25 bp, Saccharomyces pastorianus
gaaaatgcacaaggctctggtaata

SEQ ID NO: 104717 - DNA, 25 bp, Saccharomyces pastorianus
aaattcctcatattacgctgtgcaa

SEQ ID NO: 104718 - DNA, 25 bp, Saccharomyces pastorianus
taaacctacatatatctcagctaaa

SEQ ID NO: 104719 - DNA, 25 bp, Saccharomyces pastorianus
tacactgaccagataacggagtaca

SEQ ID NO: 104720 - DNA, 25 bp, Saccharomyces pastorianus
ggagtacaataacaaccgcatagaa

SEQ ID NO: 104721 - DNA, 25 bp, Saccharomyces pastorianus
aaggctgtttattccaatgttctat

SEQ ID NO: 104722 - DNA, 25 bp, Saccharomyces pastorianus
tcatgtcatgtcgtcccgtgaaaaa

SEQ ID NO: 104723 - DNA, 25 bp, Saccharomyces pastorianus
gacaaactgaattttaggctcgaaa

SEQ ID NO: 104724 - DNA, 25 bp, Saccharomyces pastorianus
ggccgcgtacttttccattgataaa

SEQ ID NO: 104725 - DNA, 25 bp, Saccharomyces pastorianus
ttctgttgagaattgcttcgagcaa

SEQ ID NO: 104726 - DNA, 25 bp, Saccharomyces pastorianus
gagcatctaattcattccattctgt

SEQ ID NO: 104727 - DNA, 25 bp, Saccharomyces pastorianus
atgtcaatttcagcgggcatttcta

SEQ ID NO: 104728 - DNA, 25 bp, Saccharomyces pastorianus
aattatctttatgttccagcgggcc

SEQ ID NO: 104729 - DNA, 25 bp, Saccharomyces pastorianus
taatggacctttgctattcactgcc

SEQ ID NO: 104730 - DNA, 25 bp, Saccharomyces pastorianus
gctattcactgccagcactttaagg

SEQ ID NO: 104731 - DNA, 25 bp, Saccharomyces pastorianus
gcactttaagggtacattcaccttg

SEQ ID NO: 104732 - DNA, 25 bp, Saccharomyces pastorianus
atttgcatagtctttctttctttga

SEQ ID NO: 104733 - DNA, 25 bp, Saccharomyces pastorianus
aatacgtttaagcacactgtttcag

SEQ ID NO: 104734 - DNA, 25 bp, Saccharomyces pastorianus
atttcactatgagtttatcccaaag

SEQ ID NO: 104735 - DNA, 25 bp, Saccharomyces pastorianus
gttcaagataatttaccgtccacaa

SEQ ID NO: 104736 - DNA, 25 bp, Saccharomyces pastorianus
acgattgatatcactgcgccgtacg

SEQ ID NO: 104737 - DNA, 25 bp, Saccharomyces pastorianus
aatgacattttcacacagggctcag

SEQ ID NO: 104738 - DNA, 25 bp, Saccharomyces pastorianus
ctctgcttggcatcctttacaaaac

SEQ ID NO: 104739 - DNA, 25 bp, Saccharomyces pastorianus
tcttcacccgagaaagtactgatta

SEQ ID NO: 104740 - DNA, 25 bp, Saccharomyces pastorianus
acgttgatctacttgaaccctcagt

SEQ ID NO: 104741 - DNA, 25 bp, Saccharomyces pastorianus
gacacgataatccttttttcacaga

SEQ ID NO: 104742 - DNA, 25 bp, Saccharomyces pastorianus
acacagggctcaggattaacggaaa

SEQ ID NO: 104743 - DNA, 25 bp, Saccharomyces pastorianus
gtacgctagaaattcctctgcttgg

SEQ ID NO: 104744 - DNA, 25 bp, Saccharomyces pastorianus
gctagatcctcttttgactattcag

SEQ ID NO: 104745 - DNA, 25 bp, Saccharomyces pastorianus
acaatcagttttctccacttttggg

SEQ ID NO: 104746 - DNA, 25 bp, Saccharomyces pastorianus
ggtacatcctctattcctggattaa

SEQ ID NO: 104747 - DNA, 25 bp, Saccharomyces pastorianus
agcggatcttgtttattcgtctata

SEQ ID NO: 104748 - DNA, 25 bp, Saccharomyces pastorianus
aattggcctcgctcgaactctggag

SEQ ID NO: 104749 - DNA, 25 bp, Saccharomyces pastorianus
gtaagcaaatctacttctccggctg

SEQ ID NO: 104750 - DNA, 25 bp, Saccharomyces pastorianus
cagggcacactatcgaaaggcaata

SEQ ID NO: 104751 - DNA, 25 bp, Saccharomyces pastorianus
gatgacatcccagcaaattggcctc

SEQ ID NO: 104752 - DNA, 25 bp, Saccharomyces pastorianus
gcaaatagcgcagacactccaaatg

SEQ ID NO: 104753 - DNA, 25 bp, Saccharomyces pastorianus
gcggaatgattacgtgccactaaaa

SEQ ID NO: 104754 - DNA, 25 bp, Saccharomyces pastorianus
gtctgggaacatttcaccaactgtg

SEQ ID NO: 104755 - DNA, 25 bp, Saccharomyces pastorianus
gcaataccagtcatggcttggcggt

SEQ ID NO: 104756 - DNA, 25 bp, Saccharomyces pastorianus
aatgttgtccttacaggcggtacat

SEQ ID NO: 104757 - DNA, 25 bp, Saccharomyces pastorianus
gtaacactggccactttactcaagt

SEQ ID NO: 104758 - DNA, 25 bp, Saccharomyces pastorianus
acgaccacgttgacatcttctgaat

SEQ ID NO: 104759 - DNA, 25 bp, Saccharomyces pastorianus
tgacaactatgattgctccggcact

SEQ ID NO: 104760 - DNA, 25 bp, Saccharomyces pastorianus
ttggctcaagctactacgacttcta

SEQ ID NO: 104761 - DNA, 25 bp, Saccharomyces pastorianus
atctacatcgcaatcgttggctcaa

SEQ ID NO: 104762 - DNA, 25 bp, Saccharomyces pastorianus
tagctcagcatcgtcttcggatagt

SEQ ID NO: 104763 - DNA, 25 bp, Saccharomyces pastorianus
gacttctcgaatccaggcttttcaa

SEQ ID NO: 104764 - DNA, 25 bp, Saccharomyces pastorianus
agtgacctgtcagattttgcctctt

SEQ ID NO: 104765 - DNA, 25 bp, Saccharomyces pastorianus
ttgtggcatcaaaacctgtggcggt

SEQ ID NO: 104766 - DNA, 25 bp, Saccharomyces pastorianus
gaaatttccaactacgacttctcga

SEQ ID NO: 104767 - DNA, 25 bp, Saccharomyces pastorianus
tgccgtcgacgcttggtacaatgaa

SEQ ID NO: 104768 - DNA, 25 bp, Saccharomyces pastorianus
ttgtagcactttgaacggcgcctca

SEQ ID NO: 104769 - DNA, 25 bp, Saccharomyces pastorianus
tccgctgcttcttctacagatgaga

SEQ ID NO: 104770 - DNA, 25 bp, Saccharomyces pastorianus
acaagacgggtctgccatgcatcag

SEQ ID NO: 104771 - DNA, 25 bp, Saccharomyces pastorianus
gatgagacggccttcactagaacaa

SEQ ID NO: 104772 - DNA, 25 bp, Saccharomyces pastorianus
actactggtagcaacggtcgttcaa

SEQ ID NO: 104773 - DNA, 25 bp, Saccharomyces pastorianus
acctctttctattttccagtgcaat

SEQ ID NO: 104774 - DNA, 25 bp, Saccharomyces pastorianus
tgagctaaccacatcgcctatgaaa

SEQ ID NO: 104775 - DNA, 25 bp, Saccharomyces pastorianus
atagtctagctggaacgattgccgc

SEQ ID NO: 104776 - DNA, 25 bp, Saccharomyces pastorianus
tatctacactgaagtcaacgccgca

SEQ ID NO: 104777 - DNA, 25 bp, Saccharomyces pastorianus
agactgttgctacactgtatgccaa

SEQ ID NO: 104778 - DNA, 25 bp, Saccharomyces pastorianus
gacactgccttttctagtatctaca

SEQ ID NO: 104779 - DNA, 25 bp, Saccharomyces pastorianus
acagtggcaaggaacgactatttct

SEQ ID NO: 104780 - DNA, 25 bp, Saccharomyces pastorianus
gtattgccttaaccatgcttttcct

SEQ ID NO: 104781 - DNA, 25 bp, Saccharomyces pastorianus
gtacacgtacatatcaaataggctt

SEQ ID NO: 104782 - DNA, 25 bp, Saccharomyces pastorianus
aatcttattttcgaatacgtacacg

SEQ ID NO: 104783 - DNA, 25 bp, Saccharomyces pastorianus
gtatcgctccctacgagaaacaaat

SEQ ID NO: 104784 - DNA, 25 bp, Saccharomyces pastorianus
aacgctatccctggcatgtatctga

SEQ ID NO: 104785 - DNA, 25 bp, Saccharomyces pastorianus
gtgactctttaccaatcagggacat

SEQ ID NO: 104786 - DNA, 25 bp, Saccharomyces pastorianus
atgcttttcctcttgaacgctatcc

SEQ ID NO: 104787 - DNA, 25 bp, Saccharomyces pastorianus
gtatctgataattgctttccctcgt

SEQ ID NO: 104788 - DNA, 25 bp, Saccharomyces pastorianus
taaagttcaggtcgtacagtggcaa

SEQ ID NO: 104789 - DNA, 25 bp, Saccharomyces pastorianus
taggcttatatcattgtgactcttt

SEQ ID NO: 104790 - DNA, 25 bp, Saccharomyces pastorianus
gccagggatagcgttcaagaggaaa

SEQ ID NO: 104791 - DNA, 25 bp, Saccharomyces pastorianus
agcgttcaagaggaaaagcatggtt

SEQ ID NO: 104792 - DNA, 25 bp, Saccharomyces pastorianus
ccagggatagcgttcaagaggaaaa

SEQ ID NO: 104793 - DNA, 25 bp, Saccharomyces pastorianus
gcatggttaaggcaatacagttttt

SEQ ID NO: 104794 - DNA, 25 bp, Saccharomyces pastorianus
gttcaagaggaaaagcatggttaag

SEQ ID NO: 104795 - DNA, 25 bp, Saccharomyces pastorianus
aaagcatggttaaggcaatacagtt

SEQ ID NO: 104796 - DNA, 25 bp, Saccharomyces pastorianus
catggttaaggcaatacagttttta

SEQ ID NO: 104797 - DNA, 25 bp, Saccharomyces pastorianus
ggatagcgttcaagaggaaaagcat

SEQ ID NO: 104798 - DNA, 25 bp, Saccharomyces pastorianus
gaaaagcatggttaaggcaatacag

SEQ ID NO: 104799 - DNA, 25 bp, Saccharomyces pastorianus
aagcatggttaaggcaatacagttt

SEQ ID NO: 104800 - DNA, 25 bp, Saccharomyces pastorianus
atgccagggatagcgttcaagagga

SEQ ID NO: 104801 - DNA, 25 bp, Saccharomyces pastorianus
ataaaactttttccatcatcagatg

SEQ ID NO: 104802 - DNA, 25 bp, Saccharomyces pastorianus
tagaagttttttcctttacatctgg

SEQ ID NO: 104803 - DNA, 25 bp, Saccharomyces pastorianus
cttggcttcttcttcttacctaaag

SEQ ID NO: 104804 - DNA, 25 bp, Saccharomyces pastorianus
gaatctgaactggaatccgatacgg

SEQ ID NO: 104805 - DNA, 25 bp, Saccharomyces pastorianus
gactttctggtatcattttttcttg

SEQ ID NO: 104806 - DNA, 25 bp, Saccharomyces pastorianus
taaagcagcactagcggatttcgca

SEQ ID NO: 104807 - DNA, 25 bp, Saccharomyces pastorianus
agatgaatcccctgagtcatccgaa

SEQ ID NO: 104808 - DNA, 25 bp, Saccharomyces pastorianus
tacatctgggatgcctcttgaaaca

SEQ ID NO: 104809 - DNA, 25 bp, Saccharomyces pastorianus
ggcttttgtttgtgacttctcattc

SEQ ID NO: 104810 - DNA, 25 bp, Saccharomyces pastorianus
atgatgcaaatccaccacttggctt

SEQ ID NO: 104811 - DNA, 25 bp, Saccharomyces pastorianus
agctagattcatcatcactgcttga

SEQ ID NO: 104812 - DNA, 25 bp, Saccharomyces pastorianus
actgctaagttgattattcaccgta

SEQ ID NO: 104813 - DNA, 25 bp, Saccharomyces pastorianus
gatgcagaatccaatgaaagccaaa

SEQ ID NO: 104814 - DNA, 25 bp, Saccharomyces pastorianus
tagttcccagaggtactgctaagtt

SEQ ID NO: 104815 - DNA, 25 bp, Saccharomyces pastorianus
gttgcagacaaatttttccgtgtta

SEQ ID NO: 104816 - DNA, 25 bp, Saccharomyces pastorianus
gttgctacacttctaaaagaactgt

SEQ ID NO: 104817 - DNA, 25 bp, Saccharomyces pastorianus
agatttccacggttattgaggtcaa

SEQ ID NO: 104818 - DNA, 25 bp, Saccharomyces pastorianus
ataacgctaacgaccatgatgaaag

SEQ ID NO: 104819 - DNA, 25 bp, Saccharomyces pastorianus
gattctactttccaaaaggtttctg

SEQ ID NO: 104820 - DNA, 25 bp, Saccharomyces pastorianus
ggtttctgaaaactttgaagctgtt

SEQ ID NO: 104821 - DNA, 25 bp, Saccharomyces pastorianus
gctgtttttgaaagattagttccca

SEQ ID NO: 104822 - DNA, 25 bp, Saccharomyces pastorianus
tgcccagtttatttgtacgacgttc

SEQ ID NO: 104823 - DNA, 25 bp, Saccharomyces pastorianus
gagttgaggccgttcattactgaaa

SEQ ID NO: 104824 - DNA, 25 bp, Saccharomyces pastorianus
tatggtagccatgcgttctacagaa

SEQ ID NO: 104825 - DNA, 25 bp, Saccharomyces pastorianus
agaagtggttctttggatcgcccta

SEQ ID NO: 104826 - DNA, 25 bp, Saccharomyces pastorianus
tgagttgccgtggaactggcttgtc

SEQ ID NO: 104827 - DNA, 25 bp, Saccharomyces pastorianus
cacccgctggcaacttattactaca

SEQ ID NO: 104828 - DNA, 25 bp, Saccharomyces pastorianus
gatcgccctattactgaagcaacaa

SEQ ID NO: 104829 - DNA, 25 bp, Saccharomyces pastorianus
ggatgattttcatgaccccattcac

SEQ ID NO: 104830 - DNA, 25 bp, Saccharomyces pastorianus
gaggaactggaaaccacacccgctg

SEQ ID NO: 104831 - DNA, 25 bp, Saccharomyces pastorianus
gaaattcacacagcatctcttaccg

SEQ ID NO: 104832 - DNA, 25 bp, Saccharomyces pastorianus
tttgcagcagactttctcaccagaa

SEQ ID NO: 104833 - DNA, 25 bp, Saccharomyces pastorianus
aactggcttgtcttggcacgtatac

SEQ ID NO: 104834 - DNA, 25 bp, Saccharomyces pastorianus
gttctaccacacttgaaaggctcgc

SEQ ID NO: 104835 - DNA, 25 bp, Saccharomyces pastorianus
gacgctgactcaattcaactcaatt

SEQ ID NO: 104836 - DNA, 25 bp, Saccharomyces pastorianus
gatctttggatttgcatgactacat

SEQ ID NO: 104837 - DNA, 25 bp, Saccharomyces pastorianus
gaaaggctcgctgggtatatctgat

SEQ ID NO: 104838 - DNA, 25 bp, Saccharomyces pastorianus
gaaggcattgcaattcttacctatg

SEQ ID NO: 104839 - DNA, 25 bp, Saccharomyces pastorianus
tacggtaaccctcaatacgctaaga

SEQ ID NO: 104840 - DNA, 25 bp, Saccharomyces pastorianus
acttagaccccgaacactgtgatga

SEQ ID NO: 104841 - DNA, 25 bp, Saccharomyces pastorianus
gcaaaaccctcgagcaatagtccaa

SEQ ID NO: 104842 - DNA, 25 bp, Saccharomyces pastorianus
gggcttccaaaggagttccacgtat

SEQ ID NO: 104843 - DNA, 25 bp, Saccharomyces pastorianus
gtttatctcgataagttcgccgttc

SEQ ID NO: 104844 - DNA, 25 bp, Saccharomyces pastorianus
aaatccatcatcgaccagagcttta

SEQ ID NO: 104845 - DNA, 25 bp, Saccharomyces pastorianus
gtatcgattatcaacctatttcacg

SEQ ID NO: 104846 - DNA, 25 bp, Saccharomyces pastorianus
attttacattccacttccggactat

SEQ ID NO: 104847 - DNA, 25 bp, Saccharomyces pastorianus
gaaataatgctatgacctcgtcgac

SEQ ID NO: 104848 - DNA, 25 bp, Saccharomyces pastorianus
gaccagctaacaactaccatttcta

SEQ ID NO: 104849 - DNA, 25 bp, Saccharomyces pastorianus
atctacaattttcccctgatggtca

SEQ ID NO: 104850 - DNA, 25 bp, Saccharomyces pastorianus
tgtagcgtgttcagcaactggccta

SEQ ID NO: 104851 - DNA, 25 bp, Saccharomyces pastorianus
aaagttaccagtgtcgcattttcgc

SEQ ID NO: 104852 - DNA, 25 bp, Saccharomyces pastorianus
ctacttgtccggctcttcaaataag

SEQ ID NO: 104853 - DNA, 25 bp, Saccharomyces pastorianus
caaatactgtgcatggcatcccgtg

SEQ ID NO: 104854 - DNA, 25 bp, Saccharomyces pastorianus
ttgagactagttcatctgccttctt

SEQ ID NO: 104855 - DNA, 25 bp, Saccharomyces pastorianus
ggctactggccgtgggtaacgaaca

SEQ ID NO: 104856 - DNA, 25 bp, Saccharomyces pastorianus
ggaagcgtacgacccatgtttatta

SEQ ID NO: 104857 - DNA, 25 bp, Saccharomyces pastorianus
ctgagggctcctgggattttggaca

SEQ ID NO: 104858 - DNA, 25 bp, Saccharomyces pastorianus
atgttgccatcacaggtcattcgat

SEQ ID NO: 104859 - DNA, 25 bp, Saccharomyces pastorianus
ggagactccgatccctttttggaag

SEQ ID NO: 104860 - DNA, 25 bp, Saccharomyces pastorianus
gatcactcctattactttgtcagca

SEQ ID NO: 104861 - DNA, 25 bp, Saccharomyces pastorianus
gggcgacgacagaattttgatccat

SEQ ID NO: 104862 - DNA, 25 bp, Saccharomyces pastorianus
aaagttcacggctttgatcactcct

SEQ ID NO: 104863 - DNA, 25 bp, Saccharomyces pastorianus
gatacaaatcttgttctgccttcgc

SEQ ID NO: 104864 - DNA, 25 bp, Saccharomyces pastorianus
gctggacttcttggacaatgttgcc

SEQ ID NO: 104865 - DNA, 25 bp, Saccharomyces pastorianus
ggattctatctaaatgccacccaag

SEQ ID NO: 104866 - DNA, 25 bp, Saccharomyces pastorianus
ttgtcagcactttcgttccagaaca

SEQ ID NO: 104867 - DNA, 25 bp, Saccharomyces pastorianus
gagttctagccagaggctctacggc

SEQ ID NO: 104868 - DNA, 25 bp, Saccharomyces pastorianus
tgtgcccttccaacaattttcttgg

SEQ ID NO: 104869 - DNA, 25 bp, Saccharomyces pastorianus
acatgaggtcttctggagttctagc

SEQ ID NO: 104870 - DNA, 25 bp, Saccharomyces pastorianus
tcttggatccatctgcagaagcata

SEQ ID NO: 104871 - DNA, 25 bp, Saccharomyces pastorianus
tcattggaatccttcgtggtactaa

SEQ ID NO: 104872 - DNA, 25 bp, Saccharomyces pastorianus
gcaagtcgtcccaattcaacatgag

SEQ ID NO: 104873 - DNA, 25 bp, Saccharomyces pastorianus
gtggtactaatggactgtgcccttc

SEQ ID NO: 104874 - DNA, 25 bp, Saccharomyces pastorianus
tgacggtgctgggttttgcatcatt

SEQ ID NO: 104875 - DNA, 25 bp, Saccharomyces pastorianus
taattgtcttcgtcaacactcacca

SEQ ID NO: 104876 - DNA, 25 bp, Saccharomyces pastorianus
tagtaatgtctaccgtgccatcgtc

SEQ ID NO: 104877 - DNA, 25 bp, Saccharomyces pastorianus
aagcatattcagcatcgttgcccag

SEQ ID NO: 104878 - DNA, 25 bp, Saccharomyces pastorianus
actgcccttcaatttcaacttcaga

SEQ ID NO: 104879 - DNA, 25 bp, Saccharomyces pastorianus
ttaagggccagtctgcatggaccac

SEQ ID NO: 104880 - DNA, 25 bp, Saccharomyces pastorianus
ggctagaactccagaagacctcatg

SEQ ID NO: 104881 - DNA, 25 bp, Saccharomyces pastorianus
gaatccctacggtgaagcagtttga

SEQ ID NO: 104882 - DNA, 25 bp, Saccharomyces pastorianus
atatgcttctgcagatggatccaag

SEQ ID NO: 104883 - DNA, 25 bp, Saccharomyces pastorianus
ggcacagtccattagtaccacgaag

SEQ ID NO: 104884 - DNA, 25 bp, Saccharomyces pastorianus
ggacgacttgcatctgggcaacgat

SEQ ID NO: 104885 - DNA, 25 bp, Saccharomyces pastorianus
caagggttccagtccccaggtgaag

SEQ ID NO: 104886 - DNA, 25 bp, Saccharomyces pastorianus
gcactctcatgggttgttcttcaat

SEQ ID NO: 104887 - DNA, 25 bp, Saccharomyces pastorianus
gagatagtgcacttgccatggcgtc

SEQ ID NO: 104888 - DNA, 25 bp, Saccharomyces pastorianus
aaatctactttgacgatggcacggt

SEQ ID NO: 104889 - DNA, 25 bp, Saccharomyces pastorianus
taaagaaacggcgtctgcacctctg

SEQ ID NO: 104890 - DNA, 25 bp, Saccharomyces pastorianus
ctgacggccatctgcagtttttgaa

SEQ ID NO: 104891 - DNA, 25 bp, Saccharomyces pastorianus
tcccagatgaactcacgctgtcgta

SEQ ID NO: 104892 - DNA, 25 bp, Saccharomyces pastorianus
tacgatgacatctctgccgcaattg

SEQ ID NO: 104893 - DNA, 25 bp, Saccharomyces pastorianus
agaattcttcgtccaggtgctgaca

SEQ ID NO: 104894 - DNA, 25 bp, Saccharomyces pastorianus
ggtgctgacacatgagtccctacat

SEQ ID NO: 104895 - DNA, 25 bp, Saccharomyces pastorianus
atatatggacacttcggatgacgca

SEQ ID NO: 104896 - DNA, 25 bp, Saccharomyces pastorianus
tatgtggtgaacgatacggctccga

SEQ ID NO: 104897 - DNA, 25 bp, Saccharomyces pastorianus
aatgaagtttactccgcctatgtgg

SEQ ID NO: 104898 - DNA, 25 bp, Saccharomyces pastorianus
aattgtgcactcttctgacggccat

SEQ ID NO: 104899 - DNA, 25 bp, Saccharomyces pastorianus
gtgttcgcccaagttacctgtagaa

SEQ ID NO: 104900 - DNA, 25 bp, Saccharomyces pastorianus
tgcgtcatccgaagtgtccatatat

SEQ ID NO: 104901 - DNA, 25 bp, Saccharomyces pastorianus
gatggccgtcagaagagtgcacaat

SEQ ID NO: 104902 - DNA, 25 bp, Saccharomyces pastorianus
gaagcctcaaattctttgttgtcgg

SEQ ID NO: 104903 - DNA, 25 bp, Saccharomyces pastorianus
ttggctattctctgcactttttcta

SEQ ID NO: 104904 - DNA, 25 bp, Saccharomyces pastorianus
tctacaggtaacttgggcgaacaca

SEQ ID NO: 104905 - DNA, 25 bp, Saccharomyces pastorianus
atatctaactcggttttcttccact

SEQ ID NO: 104906 - DNA, 25 bp, Saccharomyces pastorianus
ttgttgtcggtatcacatcattcaa

SEQ ID NO: 104907 - DNA, 25 bp, Saccharomyces pastorianus
tagggactcatgtgtcagcacctgg

SEQ ID NO: 104908 - DNA, 25 bp, Saccharomyces pastorianus
aacacagaggtgcagacgccgtttc

SEQ ID NO: 104909 - DNA, 25 bp, Saccharomyces pastorianus
gctgctgctgttgcctatgtaggga

SEQ ID NO: 104910 - DNA, 25 bp, Saccharomyces pastorianus
agttcatctgggagcggcggtacct

SEQ ID NO: 104911 - DNA, 25 bp, Saccharomyces pastorianus
ttggaactagtcgactctcccgtga

SEQ ID NO: 104912 - DNA, 25 bp, Saccharomyces pastorianus
gaatctatagtgtcaacgcatgcca

SEQ ID NO: 104913 - DNA, 25 bp, Saccharomyces pastorianus
gaaatgtcccttccctatgatgagg

SEQ ID NO: 104914 - DNA, 25 bp, Saccharomyces pastorianus
agagcggatcattacctggacaaag

SEQ ID NO: 104915 - DNA, 25 bp, Saccharomyces pastorianus
aaggaggtctactcttcgtcattgc

SEQ ID NO: 104916 - DNA, 25 bp, Saccharomyces pastorianus
tagggctaacgactcagcgctgcaa

SEQ ID NO: 104917 - DNA, 25 bp, Saccharomyces pastorianus
gcgctgcaatccgtcttggaactag

SEQ ID NO: 104918 - DNA, 25 bp, Saccharomyces pastorianus
gatcgcaccgcggtacttggaaagg

SEQ ID NO: 104919 - DNA, 25 bp, Saccharomyces pastorianus
tgctgcggttagagcctagggctaa

SEQ ID NO: 104920 - DNA, 25 bp, Saccharomyces pastorianus
taacccactcacattgcagaatctt

SEQ ID NO: 104921 - DNA, 25 bp, Saccharomyces pastorianus
aaagaggcttccagggtcgcagagc

SEQ ID NO: 104922 - DNA, 25 bp, Saccharomyces pastorianus
tctttcactagaattgccacactct

SEQ ID NO: 104923 - DNA, 25 bp, Saccharomyces pastorianus
attttgtcctcgttgatttctctaa

SEQ ID NO: 104924 - DNA, 25 bp, Saccharomyces pastorianus
aggactatccctacccagaggagat

SEQ ID NO: 104925 - DNA, 25 bp, Saccharomyces pastorianus
ggactcccatatacagctccagagg

SEQ ID NO: 104926 - DNA, 25 bp, Saccharomyces pastorianus
ttaggtgtggttgccattccaccaa

SEQ ID NO: 104927 - DNA, 25 bp, Saccharomyces pastorianus
aagattttcgcatttctcactggtt

SEQ ID NO: 104928 - DNA, 25 bp, Saccharomyces pastorianus
agaatttgttttgcatctccatccc

SEQ ID NO: 104929 - DNA, 25 bp, Saccharomyces pastorianus
gttgggtcttatccttgaacgcaga

SEQ ID NO: 104930 - DNA, 25 bp, Saccharomyces pastorianus
acctttacttcactgattctttcac

SEQ ID NO: 104931 - DNA, 25 bp, Saccharomyces pastorianus
gatctttgatgaattgggactccca

SEQ ID NO: 104932 - DNA, 25 bp, Saccharomyces pastorianus
tctgccggtaaatcgtttgctgcta

SEQ ID NO: 104933 - DNA, 25 bp, Saccharomyces pastorianus
catggttttatgtcacacgttcgcc

SEQ ID NO: 104934 - DNA, 25 bp, Saccharomyces pastorianus
tgtgtccatcgctgattcgtttggc

SEQ ID NO: 104935 - DNA, 25 bp, Saccharomyces pastorianus
cttcgcaatccctgtattctacaag

SEQ ID NO: 104936 - DNA, 25 bp, Saccharomyces pastorianus
gctccgaccctattatttccgatta

SEQ ID NO: 104937 - DNA, 25 bp, Saccharomyces pastorianus
atgaaacagagttcgccatgggtgc

SEQ ID NO: 104938 - DNA, 25 bp, Saccharomyces pastorianus
atacatggttccattgaccaccgtc

SEQ ID NO: 104939 - DNA, 25 bp, Saccharomyces pastorianus
gaccaccgtctacttattcgaatat

SEQ ID NO: 104940 - DNA, 25 bp, Saccharomyces pastorianus
tttacacataccaacgcttcgcaat

SEQ ID NO: 104941 - DNA, 25 bp, Saccharomyces pastorianus
ggaacgctctaccaattaggtgtct

SEQ ID NO: 104942 - DNA, 25 bp, Saccharomyces pastorianus
gtcgatgccatttttcttccataaa

SEQ ID NO: 104943 - DNA, 25 bp, Saccharomyces pastorianus
gcataacggtactgcaatcatggtt

SEQ ID NO: 104944 - DNA, 25 bp, Saccharomyces pastorianus
gaaagtcggactcacattaatggta

SEQ ID NO: 104945 - DNA, 25 bp, Saccharomyces pastorianus
gattcaatagtcttaccttgttatg

SEQ ID NO: 104946 - DNA, 25 bp, Saccharomyces pastorianus
gacattactgcagtgttttggcata

SEQ ID NO: 104947 - DNA, 25 bp, Saccharomyces pastorianus
attaccgttggatcagagtatcaga

SEQ ID NO: 104948 - DNA, 25 bp, Saccharomyces pastorianus
ttctacggttttaaagtcaggcaat

SEQ ID NO: 104949 - DNA, 25 bp, Saccharomyces pastorianus
tggttagttccctatacaatttaga

SEQ ID NO: 104950 - DNA, 25 bp, Saccharomyces pastorianus
tccaagagtcacacatagcggcatg

SEQ ID NO: 104951 - DNA, 25 bp, Saccharomyces pastorianus
agattaggcgttatatggcggatat

SEQ ID NO: 104952 - DNA, 25 bp, Saccharomyces pastorianus
agccgctgtgttattaccgttggat

SEQ ID NO: 104953 - DNA, 25 bp, Saccharomyces pastorianus
attccattgggtttcttttgcttat

SEQ ID NO: 104954 - DNA, 25 bp, Saccharomyces pastorianus
gtatattatgatttagccgctgtgt

SEQ ID NO: 104955 - DNA, 25 bp, Saccharomyces pastorianus
ggagcccttttccataagctgggat

SEQ ID NO: 104956 - DNA, 25 bp, Saccharomyces pastorianus
tccagagggccgtttcaatttgaat

SEQ ID NO: 104957 - DNA, 25 bp, Saccharomyces pastorianus
gaaatcattcaagttgcctccactc

SEQ ID NO: 104958 - DNA, 25 bp, Saccharomyces pastorianus
ctatgcctggtggatacgggacttt

SEQ ID NO: 104959 - DNA, 25 bp, Saccharomyces pastorianus
gaagtacgtcgttccagagggccgt

SEQ ID NO: 104960 - DNA, 25 bp, Saccharomyces pastorianus
ctccactccgcaggaagttgttgat

SEQ ID NO: 104961 - DNA, 25 bp, Saccharomyces pastorianus
agcggacaggttcacggtatcattc

SEQ ID NO: 104962 - DNA, 25 bp, Saccharomyces pastorianus
ggcgccactcctatttctgaagagt

SEQ ID NO: 104963 - DNA, 25 bp, Saccharomyces pastorianus
gaatgtatcacgtggtcgcaactgg

SEQ ID NO: 104964 - DNA, 25 bp, Saccharomyces pastorianus
gaggcactactggtttgatgggcaa

SEQ ID NO: 104965 - DNA, 25 bp, Saccharomyces pastorianus
gagtgacgcgtttgttgctatgcct

SEQ ID NO: 104966 - DNA, 25 bp, Saccharomyces pastorianus
taatcagccgttattggtcattcca

SEQ ID NO: 104967 - DNA, 25 bp, Saccharomyces pastorianus
tgacctgcaaatcgcttcggaatta

SEQ ID NO: 104968 - DNA, 25 bp, Saccharomyces pastorianus
gataggttttactaccattccaagg

SEQ ID NO: 104969 - DNA, 25 bp, Saccharomyces pastorianus
tggtcattccaatacctaacttgat

SEQ ID NO: 104970 - DNA, 25 bp, Saccharomyces pastorianus
gattggccacagaactgggtcaaac

SEQ ID NO: 104971 - DNA, 25 bp, Saccharomyces pastorianus
ttaactgtgttcgacaaacccgtat

SEQ ID NO: 104972 - DNA, 25 bp, Saccharomyces pastorianus
aaatatcccgcttctgattaatcag

SEQ ID NO: 104973 - DNA, 25 bp, Saccharomyces pastorianus
aagccatttatttcttcagaccaat

SEQ ID NO: 104974 - DNA, 25 bp, Saccharomyces pastorianus
gaaaccccaatacaaatatcccgct

SEQ ID NO: 104975 - DNA, 25 bp, Saccharomyces pastorianus
aggatccactgagcctaagatgact

SEQ ID NO: 104976 - DNA, 25 bp, Saccharomyces pastorianus
atacatcgtttttaccagaagcgtt

SEQ ID NO: 104977 - DNA, 25 bp, Saccharomyces pastorianus
tatgccaaatcccagtacagcttaa

SEQ ID NO: 104978 - DNA, 25 bp, Saccharomyces pastorianus
ataatgagcccaagcctgttagatt

SEQ ID NO: 104979 - DNA, 25 bp, Saccharomyces pastorianus
aagattattcttgagcggctatgac

SEQ ID NO: 104980 - DNA, 25 bp, Saccharomyces pastorianus
gctatgacctgacgcccaatatgag

SEQ ID NO: 104981 - DNA, 25 bp, Saccharomyces pastorianus
agtgtaactactgcgccaaataccc

SEQ ID NO: 104982 - DNA, 25 bp, Saccharomyces pastorianus
agattccactgctatccgatacgaa

SEQ ID NO: 104983 - DNA, 25 bp, Saccharomyces pastorianus
gagctgcaactacttcaacgtcaag

SEQ ID NO: 104984 - DNA, 25 bp, Saccharomyces pastorianus
acattgctggtggtaactatgctgc

SEQ ID NO: 104985 - DNA, 25 bp, Saccharomyces pastorianus
ccaaataccctttccgcaaatgaga

SEQ ID NO: 104986 - DNA, 25 bp, Saccharomyces pastorianus
acaagagaatcttccggcctacaaa

SEQ ID NO: 104987 - DNA, 25 bp, Saccharomyces pastorianus
tcaagttttgccgatatcacattca

SEQ ID NO: 104988 - DNA, 25 bp, Saccharomyces pastorianus
tctgcgaccactccgaaggtcgaaa

SEQ ID NO: 104989 - DNA, 25 bp, Saccharomyces pastorianus
ggcttgccttactgtattgtaaaga

SEQ ID NO: 104990 - DNA, 25 bp, Saccharomyces pastorianus
cagatggtggcttgccttactgtat

SEQ ID NO: 104991 - DNA, 25 bp, Saccharomyces pastorianus
gaagcagatggtggcttgccttact

SEQ ID NO: 104992 - DNA, 25 bp, Saccharomyces pastorianus
gccttactgtattgtaaagatccag

SEQ ID NO: 104993 - DNA, 25 bp, Saccharomyces pastorianus
gtggcttgccttactgtattgtaaa

SEQ ID NO: 104994 - DNA, 25 bp, Saccharomyces pastorianus
ggtggcttgccttactgtattgtaa

SEQ ID NO: 104995 - DNA, 25 bp, Saccharomyces pastorianus
agcagatggtggcttgccttactgt

SEQ ID NO: 104996 - DNA, 25 bp, Saccharomyces pastorianus
atggtggcttgccttactgtattgt

SEQ ID NO: 104997 - DNA, 25 bp, Saccharomyces pastorianus
agatctgcgaccactccgaaggtcg

SEQ ID NO: 104998 - DNA, 25 bp, Saccharomyces pastorianus
tccagatctgcgaccactccgaagg

SEQ ID NO: 104999 - DNA, 25 bp, Saccharomyces pastorianus
aagatgccgttgtctcctctgattt

SEQ ID NO: 105000 - DNA, 25 bp, Saccharomyces pastorianus
gctacttacgaccaaatcaagaagg

SEQ ID NO: 105001 - DNA, 25 bp, Saccharomyces pastorianus
gactgtcaagttggcaaaggaagct

SEQ ID NO: 105002 - DNA, 25 bp, Saccharomyces pastorianus
taaatacactccagacaagaagatt

SEQ ID NO: 105003 - DNA, 25 bp, Saccharomyces pastorianus
cgaagatgccgttgtctcctctgat

SEQ ID NO: 105004 - DNA, 25 bp, Saccharomyces pastorianus
tgccgttgtctcctctgatttcttg

SEQ ID NO: 105005 - DNA, 25 bp, Saccharomyces pastorianus
gaagctacttacgaccaaatcaaga

SEQ ID NO: 105006 - DNA, 25 bp, Saccharomyces pastorianus
accacactaaatacactccagacaa

SEQ ID NO: 105007 - DNA, 25 bp, Saccharomyces pastorianus
aggaagctacttacgaccaaatcaa

SEQ ID NO: 105008 - DNA, 25 bp, Saccharomyces pastorianus
ggcaaaggaagctacttacgaccaa

SEQ ID NO: 105009 - DNA, 25 bp, Saccharomyces pastorianus
gttggcaaaggaagctacttacgac

SEQ ID NO: 105010 - DNA, 25 bp, Saccharomyces pastorianus
cattcatctccaaccaagtcgttga

SEQ ID NO: 105011 - DNA, 25 bp, Saccharomyces pastorianus
atcggcgggatctggttctggctat

SEQ ID NO: 105012 - DNA, 25 bp, Saccharomyces pastorianus
aaactactcgtttggccatggtcac

SEQ ID NO: 105013 - DNA, 25 bp, Saccharomyces pastorianus
atcaacctcgggaaattctcgtcgg

SEQ ID NO: 105014 - DNA, 25 bp, Saccharomyces pastorianus
gagccagttctggacacaccacaat

SEQ ID NO: 105015 - DNA, 25 bp, Saccharomyces pastorianus
gagcgcttagaactgcaagtacatt

SEQ ID NO: 105016 - DNA, 25 bp, Saccharomyces pastorianus
agctattacagggttcttcttctaa

SEQ ID NO: 105017 - DNA, 25 bp, Saccharomyces pastorianus
acagtcatcatcaagcggttctgag

SEQ ID NO: 105018 - DNA, 25 bp, Saccharomyces pastorianus
gtacattattctatctccagcacaa

SEQ ID NO: 105019 - DNA, 25 bp, Saccharomyces pastorianus
tttgcaaagcagtcattcacctaca

SEQ ID NO: 105020 - DNA, 25 bp, Saccharomyces pastorianus
ttctcgtcgggattctttaaacaat

SEQ ID NO: 105021 - DNA, 25 bp, Saccharomyces pastorianus
ggtgattcaatgactccttcagcat

SEQ ID NO: 105022 - DNA, 25 bp, Saccharomyces pastorianus
taatggtacttctcaattgcgacaa

SEQ ID NO: 105023 - DNA, 25 bp, Saccharomyces pastorianus
cttcagcatatactaccccaaggat

SEQ ID NO: 105024 - DNA, 25 bp, Saccharomyces pastorianus
ggaacaatcttctcttctacacaag

SEQ ID NO: 105025 - DNA, 25 bp, Saccharomyces pastorianus
gcaagagttggatctgttgcccaga

SEQ ID NO: 105026 - DNA, 25 bp, Saccharomyces pastorianus
gatgatggaactccttaccttttcc

SEQ ID NO: 105027 - DNA, 25 bp, Saccharomyces pastorianus
actgcccaatggttacacaatctct

SEQ ID NO: 105028 - DNA, 25 bp, Saccharomyces pastorianus
cagcgccaactactctttacaaaaa

SEQ ID NO: 105029 - DNA, 25 bp, Saccharomyces pastorianus
gtgtctgaactaaacttgtcttcca

SEQ ID NO: 105030 - DNA, 25 bp, Saccharomyces pastorianus
caggtttgacatctttttgggcgaa

SEQ ID NO: 105031 - DNA, 25 bp, Saccharomyces pastorianus
gactcttatcttagaaccgctggaa

SEQ ID NO: 105032 - DNA, 25 bp, Saccharomyces pastorianus
agtggagtcgccttatatcatacag

SEQ ID NO: 105033 - DNA, 25 bp, Saccharomyces pastorianus
gagctatatccgatgtggaacttgc

SEQ ID NO: 105034 - DNA, 25 bp, Saccharomyces pastorianus
gagacattgacaacacatacagtat

SEQ ID NO: 105035 - DNA, 25 bp, Saccharomyces pastorianus
gtggaacttgcaccactgcgaagtg

SEQ ID NO: 105036 - DNA, 25 bp, Saccharomyces pastorianus
gtatcaacgagagcttcaaacctga

SEQ ID NO: 105037 - DNA, 25 bp, Saccharomyces pastorianus
gaaagcgatcatttgaccttgcaag

SEQ ID NO: 105038 - DNA, 25 bp, Saccharomyces pastorianus
gcgtacaaagacttagcgctagttt

SEQ ID NO: 105039 - DNA, 25 bp, Saccharomyces pastorianus
atgtgtgctgactttattcaacgaa

SEQ ID NO: 105040 - DNA, 25 bp, Saccharomyces pastorianus
gacccttttccaaacatgtgtgctg

SEQ ID NO: 105041 - DNA, 25 bp, Saccharomyces pastorianus
tagttttaaaatccttctgcaatta

SEQ ID NO: 105042 - DNA, 25 bp, Saccharomyces pastorianus
ggatggaactaacctaatatttgaa

SEQ ID NO: 105043 - DNA, 25 bp, Saccharomyces pastorianus
atcacccttttgttatccatttacg

SEQ ID NO: 105044 - DNA, 25 bp, Saccharomyces pastorianus
tgctaatcatttgggaccacgtcct

SEQ ID NO: 105045 - DNA, 25 bp, Saccharomyces pastorianus
gtgagccaaggtgactatgaacata

SEQ ID NO: 105046 - DNA, 25 bp, Saccharomyces pastorianus
gatttgcttgccagacttgttttca

SEQ ID NO: 105047 - DNA, 25 bp, Saccharomyces pastorianus
tgattcactccaacctaatctggct

SEQ ID NO: 105048 - DNA, 25 bp, Saccharomyces pastorianus
attgcatgcactatcatcacccttt

SEQ ID NO: 105049 - DNA, 25 bp, Saccharomyces pastorianus
tatccatttacgatgagcttcacga

SEQ ID NO: 105050 - DNA, 25 bp, Saccharomyces pastorianus
cctgacgttcaattatcccttggat

SEQ ID NO: 105051 - DNA, 25 bp, Saccharomyces pastorianus
taatctggctcatccgatggacaag

SEQ ID NO: 105052 - DNA, 25 bp, Saccharomyces pastorianus
aacgtagaccatctgattcactcca

SEQ ID NO: 105053 - DNA, 25 bp, Saccharomyces pastorianus
gagcttcacgaactagtgagccaag

SEQ ID NO: 105054 - DNA, 25 bp, Saccharomyces pastorianus
tactttggacgtcgtcaccggagtt

SEQ ID NO: 105055 - DNA, 25 bp, Saccharomyces pastorianus
acaccgcatgttgacgactacgaca

SEQ ID NO: 105056 - DNA, 25 bp, Saccharomyces pastorianus
atgctaggctcttggatgactggtc

SEQ ID NO: 105057 - DNA, 25 bp, Saccharomyces pastorianus
tggagatttccctggcaacagtcac

SEQ ID NO: 105058 - DNA, 25 bp, Saccharomyces pastorianus
tcatccccatgctgtttattggcga

SEQ ID NO: 105059 - DNA, 25 bp, Saccharomyces pastorianus
tgtatcgacctcctgcagaaatgca

SEQ ID NO: 105060 - DNA, 25 bp, Saccharomyces pastorianus
gcaacaccataatacccatcgagat

SEQ ID NO: 105061 - DNA, 25 bp, Saccharomyces pastorianus
aagactttgctagtggccgtactgc

SEQ ID NO: 105062 - DNA, 25 bp, Saccharomyces pastorianus
gtttgctatggcgatgaccctacac

SEQ ID NO: 105063 - DNA, 25 bp, Saccharomyces pastorianus
ggacctaaggtctgtgctgcatgat

SEQ ID NO: 105064 - DNA, 25 bp, Saccharomyces pastorianus
tcgcgctacgggtctgattacaaca

SEQ ID NO: 105065 - DNA, 25 bp, Saccharomyces pastorianus
agggtaccacttgcatcatattttc

SEQ ID NO: 105066 - DNA, 25 bp, Saccharomyces pastorianus
cgaccgatgcgcctggatttgataa

SEQ ID NO: 105067 - DNA, 25 bp, Saccharomyces pastorianus
agtcctcccaatccaatgattcaag

SEQ ID NO: 105068 - DNA, 25 bp, Saccharomyces pastorianus
agaatgacgtctctactatccttgg

SEQ ID NO: 105069 - DNA, 25 bp, Saccharomyces pastorianus
actatccttggcgtcattgatgaac

SEQ ID NO: 105070 - DNA, 25 bp, Saccharomyces pastorianus
tgattcaagtgctaatgcgtcccct

SEQ ID NO: 105071 - DNA, 25 bp, Saccharomyces pastorianus
ggaaaatgccattgacgctgcttat

SEQ ID NO: 105072 - DNA, 25 bp, Saccharomyces pastorianus
gaaatcttaaatcgtgccgcacaat

SEQ ID NO: 105073 - DNA, 25 bp, Saccharomyces pastorianus
tccacaggctccaatacttctagaa

SEQ ID NO: 105074 - DNA, 25 bp, Saccharomyces pastorianus
acgataatgctcatattcctccgac

SEQ ID NO: 105075 - DNA, 25 bp, Saccharomyces pastorianus
gaactgcatagccaagggtaccact

SEQ ID NO: 105076 - DNA, 25 bp, Saccharomyces pastorianus
gacagttggaagcatcggtttcata

SEQ ID NO: 105077 - DNA, 25 bp, Saccharomyces pastorianus
gaagtctccagggacaaggtagtta

SEQ ID NO: 105078 - DNA, 25 bp, Saccharomyces pastorianus
gaaggtgcctattatcgagggacaa

SEQ ID NO: 105079 - DNA, 25 bp, Saccharomyces pastorianus
accattgttgtgattgcaggaacta

SEQ ID NO: 105080 - DNA, 25 bp, Saccharomyces pastorianus
agtagcaccttttgcgtgtcttctt

SEQ ID NO: 105081 - DNA, 25 bp, Saccharomyces pastorianus
gcgggcgataggttaatcacatcat

SEQ ID NO: 105082 - DNA, 25 bp, Saccharomyces pastorianus
gagaatcctaactgtaagtctgtta

SEQ ID NO: 105083 - DNA, 25 bp, Saccharomyces pastorianus
caacagttcagcgatgcgggcgata

SEQ ID NO: 105084 - DNA, 25 bp, Saccharomyces pastorianus
gtctagctcaaggagtggccgattt

SEQ ID NO: 105085 - DNA, 25 bp, Saccharomyces pastorianus
gatgcggctttgaatgtttcaccat

SEQ ID NO: 105086 - DNA, 25 bp, Saccharomyces pastorianus
tggccgatttatgtgcagtagcacc

SEQ ID NO: 105087 - DNA, 25 bp, Saccharomyces pastorianus
gataaaaacacgtttccgcctatgg

SEQ ID NO: 105088 - DNA, 25 bp, Saccharomyces pastorianus
cattaactggagtagcacatgctga

SEQ ID NO: 105089 - DNA, 25 bp, Saccharomyces pastorianus
ctcccgaggagttgttgacgtgttc

SEQ ID NO: 105090 - DNA, 25 bp, Saccharomyces pastorianus
gattacaggacttgttttgcgaata

SEQ ID NO: 105091 - DNA, 25 bp, Saccharomyces pastorianus
gatttgtccagtaatagcgtcgatt

SEQ ID NO: 105092 - DNA, 25 bp, Saccharomyces pastorianus
ggcgccaaagccacggtccaagagt

SEQ ID NO: 105093 - DNA, 25 bp, Saccharomyces pastorianus
ggaggcaacggtactgtcttgtcag

SEQ ID NO: 105094 - DNA, 25 bp, Saccharomyces pastorianus
gatcaaggcgatgttgggctcccga

SEQ ID NO: 105095 - DNA, 25 bp, Saccharomyces pastorianus
aatgtgtgcatctgctctcaagcaa

SEQ ID NO: 105096 - DNA, 25 bp, Saccharomyces pastorianus
gatacgtgtacattagtgcccaaga

SEQ ID NO: 105097 - DNA, 25 bp, Saccharomyces pastorianus
ggatttgattgactcccaccaagat

SEQ ID NO: 105098 - DNA, 25 bp, Saccharomyces pastorianus
gacgatttcatttctgtcaagcgta

SEQ ID NO: 105099 - DNA, 25 bp, Saccharomyces pastorianus
aggcgaagcccatccagtttatgaa

SEQ ID NO: 105100 - DNA, 25 bp, Saccharomyces pastorianus
agctgagttaccagctctaactctt

SEQ ID NO: 105101 - DNA, 25 bp, Saccharomyces pastorianus
aaagaaggcatctctggcctccaag

SEQ ID NO: 105102 - DNA, 25 bp, Saccharomyces pastorianus
taactcttccaacttcaaggcgagc

SEQ ID NO: 105103 - DNA, 25 bp, Saccharomyces pastorianus
gagcgacggtgatatgtctgactcg

SEQ ID NO: 105104 - DNA, 25 bp, Saccharomyces pastorianus
tggcctccaagggtaacgctagcaa

SEQ ID NO: 105105 - DNA, 25 bp, Saccharomyces pastorianus
tagaactgttgactattcccacggc

SEQ ID NO: 105106 - DNA, 25 bp, Saccharomyces pastorianus
gtctgactcggaaggccacttgaaa

SEQ ID NO: 105107 - DNA, 25 bp, Saccharomyces pastorianus
gccacaatccatccaattcagttga

SEQ ID NO: 105108 - DNA, 25 bp, Saccharomyces pastorianus
gcgagcacagaagaaagcgctttca

SEQ ID NO: 105109 - DNA, 25 bp, Saccharomyces pastorianus
gagcttctttccgttagagcttcct

SEQ ID NO: 105110 - DNA, 25 bp, Saccharomyces pastorianus
gctgctccaggagatgtaggtatct

SEQ ID NO: 105111 - DNA, 25 bp, Saccharomyces pastorianus
taacggatccgcatctattaattgg

SEQ ID NO: 105112 - DNA, 25 bp, Saccharomyces pastorianus
agagcttccttttcttccagaatat

SEQ ID NO: 105113 - DNA, 25 bp, Saccharomyces pastorianus
tgcttcccggaaaattcaatttcgt

SEQ ID NO: 105114 - DNA, 25 bp, Saccharomyces pastorianus
tttaaggtactcttgttcgtccaga

SEQ ID NO: 105115 - DNA, 25 bp, Saccharomyces pastorianus
atatcatcacttatgctgctccagg

SEQ ID NO: 105116 - DNA, 25 bp, Saccharomyces pastorianus
gaatgttttctctcaagtctttcaa

SEQ ID NO: 105117 - DNA, 25 bp, Saccharomyces pastorianus
gcaccaaatattttgcttcccggaa

SEQ ID NO: 105118 - DNA, 25 bp, Saccharomyces pastorianus
aaatattgttccgagcttctttccg

SEQ ID NO: 105119 - DNA, 25 bp, Saccharomyces pastorianus
gtaggtatctattctttcttaacgg

SEQ ID NO: 105120 - DNA, 25 bp, Saccharomyces pastorianus
gttcccctaaagtgtggcaaactga

SEQ ID NO: 105121 - DNA, 25 bp, Saccharomyces pastorianus
attaccacggatggcattaccgcag

SEQ ID NO: 105122 - DNA, 25 bp, Saccharomyces pastorianus
aaactgaacttgctgtcgtgaataa

SEQ ID NO: 105123 - DNA, 25 bp, Saccharomyces pastorianus
aacgctatgtttaccgacgccgaag

SEQ ID NO: 105124 - DNA, 25 bp, Saccharomyces pastorianus
ggcattaccgcagaatagttgttgg

SEQ ID NO: 105125 - DNA, 25 bp, Saccharomyces pastorianus
cgacgccgaagaccaatccgtatgg

SEQ ID NO: 105126 - DNA, 25 bp, Saccharomyces pastorianus
tttcaaattattctgcatggcacca

SEQ ID NO: 105127 - DNA, 25 bp, Saccharomyces pastorianus
ccaattaatagatgcggatccgtta

SEQ ID NO: 105128 - DNA, 25 bp, Saccharomyces pastorianus
gaagctcggaacaatatttggtcca

SEQ ID NO: 105129 - DNA, 25 bp, Saccharomyces pastorianus
atccgtatggttttatatcaagtgg

SEQ ID NO: 105130 - DNA, 25 bp, Saccharomyces pastorianus
tggcaccaaagagtacagatcataa

SEQ ID NO: 105131 - DNA, 25 bp, Saccharomyces pastorianus
gaatgggccgactccaatagtaaag

SEQ ID NO: 105132 - DNA, 25 bp, Saccharomyces pastorianus
ttcacaggtggcttcttggtggaaa

SEQ ID NO: 105133 - DNA, 25 bp, Saccharomyces pastorianus
tcaagcgttacctttctgcccgaac

SEQ ID NO: 105134 - DNA, 25 bp, Saccharomyces pastorianus
agatggtccttcaatgtgcaacaca

SEQ ID NO: 105135 - DNA, 25 bp, Saccharomyces pastorianus
gtgggtacacattcacagtacttgc

SEQ ID NO: 105136 - DNA, 25 bp, Saccharomyces pastorianus
tcgagtacagcattaattccatttt

SEQ ID NO: 105137 - DNA, 25 bp, Saccharomyces pastorianus
gtacttgcatatacagacgcggatg

SEQ ID NO: 105138 - DNA, 25 bp, Saccharomyces pastorianus
aggcgtatacccagcagaagatttc

SEQ ID NO: 105139 - DNA, 25 bp, Saccharomyces pastorianus
acatttctggcaatagcaacgggca

SEQ ID NO: 105140 - DNA, 25 bp, Saccharomyces pastorianus
ttcttctacaagttcacaggtggct

SEQ ID NO: 105141 - DNA, 25 bp, Saccharomyces pastorianus
caaaacattttctaccaacgatcat

SEQ ID NO: 105142 - DNA, 25 bp, Saccharomyces pastorianus
ctctggattccgctgatgactatta

SEQ ID NO: 105143 - DNA, 25 bp, Saccharomyces pastorianus
tatggtcttttgtcctcgctttaaa

SEQ ID NO: 105144 - DNA, 25 bp, Saccharomyces pastorianus
aaccctgattcagcggtatggtctt

SEQ ID NO: 105145 - DNA, 25 bp, Saccharomyces pastorianus
aaagctatggagtgcctacaactta

SEQ ID NO: 105146 - DNA, 25 bp, Saccharomyces pastorianus
cgagcagcttctccttgatttagaa

SEQ ID NO: 105147 - DNA, 25 bp, Saccharomyces pastorianus
aagtaaccattctgacttgcgagaa

SEQ ID NO: 105148 - DNA, 25 bp, Saccharomyces pastorianus
tattaaacttctagtggcgcctctg

SEQ ID NO: 105149 - DNA, 25 bp, Saccharomyces pastorianus
gagacctactccaaattgaccaata

SEQ ID NO: 105150 - DNA, 25 bp, Saccharomyces pastorianus
aggagatttttcacactttaccaga

SEQ ID NO: 105151 - DNA, 25 bp, Saccharomyces pastorianus
aggccagacagtaatcgcgatcttt

SEQ ID NO: 105152 - DNA, 25 bp, Saccharomyces pastorianus
agaggatagtatccacccctcaaat

SEQ ID NO: 105153 - DNA, 25 bp, Saccharomyces pastorianus
tcccctcctttgctttgctaagaaa

SEQ ID NO: 105154 - DNA, 25 bp, Saccharomyces pastorianus
gtaacgcgcaaacactaccgctata

SEQ ID NO: 105155 - DNA, 25 bp, Saccharomyces pastorianus
tgtgcgacctcgttgccatggcgat

SEQ ID NO: 105156 - DNA, 25 bp, Saccharomyces pastorianus
tacaaaactctcattctctcatttc

SEQ ID NO: 105157 - DNA, 25 bp, Saccharomyces pastorianus
atcgcgcgtgggtgtggtctttccc

SEQ ID NO: 105158 - DNA, 25 bp, Saccharomyces pastorianus
ctgtgctacgaagtggtctctgtgg

SEQ ID NO: 105159 - DNA, 25 bp, Saccharomyces pastorianus
gggtatggtacggtgctatctgccc

SEQ ID NO: 105160 - DNA, 25 bp, Saccharomyces pastorianus
tacgctctgcgctgtgctacgaagt

SEQ ID NO: 105161 - DNA, 25 bp, Saccharomyces pastorianus
tcatttcctgcttcgttcatttcga

SEQ ID NO: 105162 - DNA, 25 bp, Saccharomyces pastorianus
gttcatttcgagtttccaagggtat

SEQ ID NO: 105163 - DNA, 25 bp, Saccharomyces pastorianus
ttgctccggatttcgcatagttgtc

SEQ ID NO: 105164 - DNA, 25 bp, Saccharomyces pastorianus
gacgctgacgccttgtttggtgaaa

SEQ ID NO: 105165 - DNA, 25 bp, Saccharomyces pastorianus
gaaagactagttgcctttgcctcca

SEQ ID NO: 105166 - DNA, 25 bp, Saccharomyces pastorianus
gagagtttctgactaccaaaaggct

SEQ ID NO: 105167 - DNA, 25 bp, Saccharomyces pastorianus
tcgccgacagactgttggttgcttt

SEQ ID NO: 105168 - DNA, 25 bp, Saccharomyces pastorianus
aaaccagacccagccattgttgaaa

SEQ ID NO: 105169 - DNA, 25 bp, Saccharomyces pastorianus
aagatacttcttggacgccttacca

SEQ ID NO: 105170 - DNA, 25 bp, Saccharomyces pastorianus
gccttaccagttgctttgctaggta

SEQ ID NO: 105171 - DNA, 25 bp, Saccharomyces pastorianus
gatggattcaagacgctgacgcctt

SEQ ID NO: 105172 - DNA, 25 bp, Saccharomyces pastorianus
gctggtgttatgtccaagtcgacta

SEQ ID NO: 105173 - DNA, 25 bp, Saccharomyces pastorianus
cattgaaggtgtctttttctccggt

SEQ ID NO: 105174 - DNA, 25 bp, Saccharomyces pastorianus
aatacgttgagttcgtcgccgacag

SEQ ID NO: 105175 - DNA, 25 bp, Saccharomyces pastorianus
gtctctacagatcaattcgttggaa

SEQ ID NO: 105176 - DNA, 25 bp, Saccharomyces pastorianus
ctctacagatcaattcgttggaaaa

SEQ ID NO: 105177 - DNA, 25 bp, Saccharomyces pastorianus
gacaccttcaatggaggcaaaggca

SEQ ID NO: 105178 - DNA, 25 bp, Saccharomyces pastorianus
ccagaaaatggaggcaaaggaaccg

SEQ ID NO: 105179 - DNA, 25 bp, Saccharomyces pastorianus
accttcaatggaggcaaaggcaact

SEQ ID NO: 105180 - DNA, 25 bp, Saccharomyces pastorianus
accggagaaaaagacaccttcaatg

SEQ ID NO: 105181 - DNA, 25 bp, Saccharomyces pastorianus
aaaagacaccttcaatggaggcaaa

SEQ ID NO: 105182 - DNA, 25 bp, Saccharomyces pastorianus
gaaaaagacaccttcaatggaggca

SEQ ID NO: 105183 - DNA, 25 bp, Saccharomyces pastorianus
aaagacaccttcaatggaggcaaag

SEQ ID NO: 105184 - DNA, 25 bp, Saccharomyces pastorianus
ggagaaaaagacaccttcaatggag

SEQ ID NO: 105185 - DNA, 25 bp, Saccharomyces pastorianus
tggaaaaggttaaaccgggcatcat

SEQ ID NO: 105186 - DNA, 25 bp, Saccharomyces pastorianus
gtctctacagatcaattcgttggaa

SEQ ID NO: 105187 - DNA, 25 bp, Saccharomyces pastorianus
ggtgtgcaaaccttcgtctctacag

SEQ ID NO: 105188 - DNA, 25 bp, Saccharomyces pastorianus
ctctacagatcaattcgttggaaaa

SEQ ID NO: 105189 - DNA, 25 bp, Saccharomyces pastorianus
gacaccttcaatggaggcaaaggca

SEQ ID NO: 105190 - DNA, 25 bp, Saccharomyces pastorianus
gctgggtctggtttgttcttcaaat

SEQ ID NO: 105191 - DNA, 25 bp, Saccharomyces pastorianus
ccagaaaatggaggcaaaggaaccg

SEQ ID NO: 105192 - DNA, 25 bp, Saccharomyces pastorianus
accttcaatggaggcaaaggcaact

SEQ ID NO: 105193 - DNA, 25 bp, Saccharomyces pastorianus
accggagaaaaagacaccttcaatg

SEQ ID NO: 105194 - DNA, 25 bp, Saccharomyces pastorianus
catacctctctttttcaaccagaaa

SEQ ID NO: 105195 - DNA, 25 bp, Saccharomyces pastorianus
aaaagacaccttcaatggaggcaaa

SEQ ID NO: 105196 - DNA, 25 bp, Saccharomyces pastorianus
tggaaaaggttaaaccgggcatcat

SEQ ID NO: 105197 - DNA, 25 bp, Saccharomyces pastorianus
acattgttagcatatttcctgataa

SEQ ID NO: 105198 - DNA, 25 bp, Saccharomyces pastorianus
aaggccattcgagagtacgttaatc

SEQ ID NO: 105199 - DNA, 25 bp, Saccharomyces pastorianus
gatactcgagatcaacaagtttcca

SEQ ID NO: 105200 - DNA, 25 bp, Saccharomyces pastorianus
aatcctgctagcatgaagggcaagc

SEQ ID NO: 105201 - DNA, 25 bp, Saccharomyces pastorianus
gtagaagtactgtgggaaccgcaaa

SEQ ID NO: 105202 - DNA, 25 bp, Saccharomyces pastorianus
attccctctgaatttgcgtacttga

SEQ ID NO: 105203 - DNA, 25 bp, Saccharomyces pastorianus
gcaaaggacggctattatttataca

SEQ ID NO: 105204 - DNA, 25 bp, Saccharomyces pastorianus
gatctccaaatattaatcctgctag

SEQ ID NO: 105205 - DNA, 25 bp, Saccharomyces pastorianus
aacagcgatgacacggcttacaaat

SEQ ID NO: 105206 - DNA, 25 bp, Saccharomyces pastorianus
gaagcgttcaaaaggttgccaattt

SEQ ID NO: 105207 - DNA, 25 bp, Saccharomyces pastorianus
gattgggatgggttcttgaccccaa

SEQ ID NO: 105208 - DNA, 25 bp, Saccharomyces pastorianus
ttgcctttaggtttttgcgataaga

SEQ ID NO: 105209 - DNA, 25 bp, Saccharomyces pastorianus
gaaaagggatcactactatgtatag

SEQ ID NO: 105210 - DNA, 25 bp, Saccharomyces pastorianus
actggatcccagtttctttcttctt

SEQ ID NO: 105211 - DNA, 25 bp, Saccharomyces pastorianus
aaagaggctcggtattcttcgtcac

SEQ ID NO: 105212 - DNA, 25 bp, Saccharomyces pastorianus
ctatgtatagtggttgatggtcgaa

SEQ ID NO: 105213 - DNA, 25 bp, Saccharomyces pastorianus
gctcggtattcttcgtcactataaa

SEQ ID NO: 105214 - DNA, 25 bp, Saccharomyces pastorianus
aagcacacagctgaatttcctgaat

SEQ ID NO: 105215 - DNA, 25 bp, Saccharomyces pastorianus
attacacctcgaagtttaccagcaa

SEQ ID NO: 105216 - DNA, 25 bp, Saccharomyces pastorianus
gtattttcagcatttaagcacacag

SEQ ID NO: 105217 - DNA, 25 bp, Saccharomyces pastorianus
ggtcgaattaccagtttgcctttag

SEQ ID NO: 105218 - DNA, 25 bp, Saccharomyces pastorianus
gaatcgctttttcgaaggtcaccaa

SEQ ID NO: 105219 - DNA, 25 bp, Saccharomyces pastorianus
tccaactccagaagccataccgaag

SEQ ID NO: 105220 - DNA, 25 bp, Saccharomyces pastorianus
atggcacgaggtagttcttggagct

SEQ ID NO: 105221 - DNA, 25 bp, Saccharomyces pastorianus
tttttcggctcttctgatggtttat

SEQ ID NO: 105222 - DNA, 25 bp, Saccharomyces pastorianus
gatggtttatttccaactccagaag

SEQ ID NO: 105223 - DNA, 25 bp, Saccharomyces pastorianus
agttcttggagctgttcaggttcct

SEQ ID NO: 105224 - DNA, 25 bp, Saccharomyces pastorianus
gagcaccgaatctactagcgccaga

SEQ ID NO: 105225 - DNA, 25 bp, Saccharomyces pastorianus
tcttcactatcttcctcttcttttt

SEQ ID NO: 105226 - DNA, 25 bp, Saccharomyces pastorianus
tatgctgtttctttttcggctcttc

SEQ ID NO: 105227 - DNA, 25 bp, Saccharomyces pastorianus
tagcgccagatagtttagccattct

SEQ ID NO: 105228 - DNA, 25 bp, Saccharomyces pastorianus
gttaaaaccaacaggagcaccgaat

SEQ ID NO: 105229 - DNA, 25 bp, Saccharomyces pastorianus
ttagccattctttctctcaatgcgg

SEQ ID NO: 105230 - DNA, 25 bp, Saccharomyces pastorianus
gagttccctgttttactgggtgaca

SEQ ID NO: 105231 - DNA, 25 bp, Saccharomyces pastorianus
gaaagttctcctatcaaagcctcct

SEQ ID NO: 105232 - DNA, 25 bp, Saccharomyces pastorianus
tactagtaccaagtttcatcccgct

SEQ ID NO: 105233 - DNA, 25 bp, Saccharomyces pastorianus
ggagtgacaccgcaggatttgcaaa

SEQ ID NO: 105234 - DNA, 25 bp, Saccharomyces pastorianus
tttcgtacatgcatggccgttttac

SEQ ID NO: 105235 - DNA, 25 bp, Saccharomyces pastorianus
aaatcaatacggtttcgggcagcat

SEQ ID NO: 105236 - DNA, 25 bp, Saccharomyces pastorianus
caacaaatgtatctggccccatggt

SEQ ID NO: 105237 - DNA, 25 bp, Saccharomyces pastorianus
ttacgcgtcttcatctactagtacc

SEQ ID NO: 105238 - DNA, 25 bp, Saccharomyces pastorianus
gtacgctcaattgtctttcaagtgg

SEQ ID NO: 105239 - DNA, 25 bp, Saccharomyces pastorianus
gaacctgggtgttcatgggccataa

SEQ ID NO: 105240 - DNA, 25 bp, Saccharomyces pastorianus
gttaaaaccactcgtacgctcaatt

SEQ ID NO: 105241 - DNA, 25 bp, Saccharomyces pastorianus
aaaagtttggctgcgctgaagaaaa

SEQ ID NO: 105242 - DNA, 25 bp, Saccharomyces pastorianus
tggtccacctttactccatagtgga

SEQ ID NO: 105243 - DNA, 25 bp, Saccharomyces pastorianus
ggctgaaaaactgcagattgtcaat

SEQ ID NO: 105244 - DNA, 25 bp, Saccharomyces pastorianus
aggtaagcagaataggccctacaat

SEQ ID NO: 105245 - DNA, 25 bp, Saccharomyces pastorianus
taggccctacaatcatcctgaattg

SEQ ID NO: 105246 - DNA, 25 bp, Saccharomyces pastorianus
gaaaagtcgctcgaaaggtaagcag

SEQ ID NO: 105247 - DNA, 25 bp, Saccharomyces pastorianus
tgagcgatgaaagctttgctgagtt

SEQ ID NO: 105248 - DNA, 25 bp, Saccharomyces pastorianus
cgcaatgtggttaactatctcagta

SEQ ID NO: 105249 - DNA, 25 bp, Saccharomyces pastorianus
tcaacttcctgccaatatggtccac

SEQ ID NO: 105250 - DNA, 25 bp, Saccharomyces pastorianus
gaagtcttgaagttcctaacagatc

SEQ ID NO: 105251 - DNA, 25 bp, Saccharomyces pastorianus
gcaaggtattactcgcaatgtggtt

SEQ ID NO: 105252 - DNA, 25 bp, Saccharomyces pastorianus
agcatgttggctctgcctgaggaaa

SEQ ID NO: 105253 - DNA, 25 bp, Saccharomyces pastorianus
gtgttaccatggagtattttcgcat

SEQ ID NO: 105254 - DNA, 25 bp, Saccharomyces pastorianus
gttgcctgttgttgagtgcatcgac

SEQ ID NO: 105255 - DNA, 25 bp, Saccharomyces pastorianus
tattaccattgacagcatgttggct

SEQ ID NO: 105256 - DNA, 25 bp, Saccharomyces pastorianus
gagcacgtactacaaactactaggg

SEQ ID NO: 105257 - DNA, 25 bp, Saccharomyces pastorianus
gaagacgatcagttttcttggaaca

SEQ ID NO: 105258 - DNA, 25 bp, Saccharomyces pastorianus
gtgcatcgactttgggcaataccag

SEQ ID NO: 105259 - DNA, 25 bp, Saccharomyces pastorianus
ttttcgcatgttgttgagcacgtac

SEQ ID NO: 105260 - DNA, 25 bp, Saccharomyces pastorianus
ttggcatgcaatgtgtatggctctc

SEQ ID NO: 105261 - DNA, 25 bp, Saccharomyces pastorianus
gagatgactggccaacagcagaaga

SEQ ID NO: 105262 - DNA, 25 bp, Saccharomyces pastorianus
ttccaaattctaaaccgctacagcc

SEQ ID NO: 105263 - DNA, 25 bp, Saccharomyces pastorianus
aaaaattgaggtgggcacagccaaa

SEQ ID NO: 105264 - DNA, 25 bp, Saccharomyces pastorianus
agcgtgtatattgggatttgcacaa

SEQ ID NO: 105265 - DNA, 25 bp, Saccharomyces pastorianus
gatcggagctttggtagcgtgtata

SEQ ID NO: 105266 - DNA, 25 bp, Saccharomyces pastorianus
ggatttgcacaacagtccctgaaag

SEQ ID NO: 105267 - DNA, 25 bp, Saccharomyces pastorianus
tactgactgcgtatggcattagttg

SEQ ID NO: 105268 - DNA, 25 bp, Saccharomyces pastorianus
tggtttttccaatagattttcccag

SEQ ID NO: 105269 - DNA, 25 bp, Saccharomyces pastorianus
ttaatatgtgttttgccagcttacc

SEQ ID NO: 105270 - DNA, 25 bp, Saccharomyces pastorianus
agctatcgctcatgatcggagcttt

SEQ ID NO: 105271 - DNA, 25 bp, Saccharomyces pastorianus
tccctgaaagttttactgactgcgt

SEQ ID NO: 105272 - DNA, 25 bp, Saccharomyces pastorianus
aaatttcaacagctatcgctcatga

SEQ ID NO: 105273 - DNA, 25 bp, Saccharomyces pastorianus
ggcattagttgtgtgattactttaa

SEQ ID NO: 105274 - DNA, 25 bp, Saccharomyces pastorianus
gacaggattccgcttattattggat

SEQ ID NO: 105275 - DNA, 25 bp, Saccharomyces pastorianus
atgtatgtcttgtattatctggctc

SEQ ID NO: 105276 - DNA, 25 bp, Saccharomyces pastorianus
gttagatcactttgaaactcctgga

SEQ ID NO: 105277 - DNA, 25 bp, Saccharomyces pastorianus
gaaactcctggaaaatgccggcatt

SEQ ID NO: 105278 - DNA, 25 bp, Saccharomyces pastorianus
gtaaactatttaacgagctctctaa

SEQ ID NO: 105279 - DNA, 25 bp, Saccharomyces pastorianus
gaaggttctagtcacctccatttat

SEQ ID NO: 105280 - DNA, 25 bp, Saccharomyces pastorianus
aaccattctggcacatttatttcac

SEQ ID NO: 105281 - DNA, 25 bp, Saccharomyces pastorianus
atttttgaacaagatccctatgagt

SEQ ID NO: 105282 - DNA, 25 bp, Saccharomyces pastorianus
atcaggattcgttaatctctacaaa

SEQ ID NO: 105283 - DNA, 25 bp, Saccharomyces pastorianus
agctctctaaggataagggcctgat

SEQ ID NO: 105284 - DNA, 25 bp, Saccharomyces pastorianus
tgccggcatttgatcgagaaggttc

SEQ ID NO: 105285 - DNA, 25 bp, Saccharomyces pastorianus
tcgccagtcatctttcaactttatc

SEQ ID NO: 105286 - DNA, 25 bp, Saccharomyces pastorianus
agcatggcagcaggtggtgaactta

SEQ ID NO: 105287 - DNA, 25 bp, Saccharomyces pastorianus
ttatcaccttttaccttgcttgtca

SEQ ID NO: 105288 - DNA, 25 bp, Saccharomyces pastorianus
ggcatgacctcattaacaaggctgt

SEQ ID NO: 105289 - DNA, 25 bp, Saccharomyces pastorianus
gctgcagcatcaatctcgtcaagga

SEQ ID NO: 105290 - DNA, 25 bp, Saccharomyces pastorianus
ggaggtgcccaatgttacgctggat

SEQ ID NO: 105291 - DNA, 25 bp, Saccharomyces pastorianus
aaagagctccacatgtttcggttta

SEQ ID NO: 105292 - DNA, 25 bp, Saccharomyces pastorianus
gaggccaagacctaggccctgggaa

SEQ ID NO: 105293 - DNA, 25 bp, Saccharomyces pastorianus
gagggtttagctagtactccttcat

SEQ ID NO: 105294 - DNA, 25 bp, Saccharomyces pastorianus
gccctgggaaggtcagctgcagcat

SEQ ID NO: 105295 - DNA, 25 bp, Saccharomyces pastorianus
gtactccttcattgaggccaagacc

SEQ ID NO: 105296 - DNA, 25 bp, Saccharomyces pastorianus
tacccaccagagtactgcgagtttt

SEQ ID NO: 105297 - DNA, 25 bp, Saccharomyces pastorianus
ctattgtggaatttgctcctaccca

SEQ ID NO: 105298 - DNA, 25 bp, Saccharomyces pastorianus
cacagggtgctcagtctcgaaaaat

SEQ ID NO: 105299 - DNA, 25 bp, Saccharomyces pastorianus
gaaaaccacgcagacctttatgcaa

SEQ ID NO: 105300 - DNA, 25 bp, Saccharomyces pastorianus
tatctctgggctggaagttttcgac

SEQ ID NO: 105301 - DNA, 25 bp, Saccharomyces pastorianus
ggtggaagccgtgaccaacaaactg

SEQ ID NO: 105302 - DNA, 25 bp, Saccharomyces pastorianus
ggctgaatccagtattggcgaagct

SEQ ID NO: 105303 - DNA, 25 bp, Saccharomyces pastorianus
aaacttacatacattccttgctgga

SEQ ID NO: 105304 - DNA, 25 bp, Saccharomyces pastorianus
gaagctgtcatcgaaagtgatcatt

SEQ ID NO: 105305 - DNA, 25 bp, Saccharomyces pastorianus
gaaagtttatcgtcgctatctctgg

SEQ ID NO: 105306 - DNA, 25 bp, Saccharomyces pastorianus
ttatgcaaagctatacggtactgac

SEQ ID NO: 105307 - DNA, 25 bp, Saccharomyces pastorianus
aagatgcctgcacattctcatcaag

SEQ ID NO: 105308 - DNA, 25 bp, Saccharomyces pastorianus
tgacgactctaagacgaactccttc

SEQ ID NO: 105309 - DNA, 25 bp, Saccharomyces pastorianus
agcctagctttgaagacgctgcctt

SEQ ID NO: 105310 - DNA, 25 bp, Saccharomyces pastorianus
tgagggcaccaacaaggaccagcta

SEQ ID NO: 105311 - DNA, 25 bp, Saccharomyces pastorianus
ttccagctcaaggtcggcgaggtaa

SEQ ID NO: 105312 - DNA, 25 bp, Saccharomyces pastorianus
atctgacgtagcatcgagcaccggg

SEQ ID NO: 105313 - DNA, 25 bp, Saccharomyces pastorianus
ggattcaagaagacccgcatcgcat

SEQ ID NO: 105314 - DNA, 25 bp, Saccharomyces pastorianus
ttaagagaccatccagtgcgtgtaa

SEQ ID NO: 105315 - DNA, 25 bp, Saccharomyces pastorianus
gagatcagattgctcttcatacaag

SEQ ID NO: 105316 - DNA, 25 bp, Saccharomyces pastorianus
attgtggtacttattcccacgcata

SEQ ID NO: 105317 - DNA, 25 bp, Saccharomyces pastorianus
cgaggccctggctaaagagagatca

SEQ ID NO: 105318 - DNA, 25 bp, Saccharomyces pastorianus
gatctatgcgatgcgggtcttcttg

SEQ ID NO: 105319 - DNA, 25 bp, Saccharomyces pastorianus
gagtgcttcgtctctggattgaaaa

SEQ ID NO: 105320 - DNA, 25 bp, Saccharomyces pastorianus
gacttactatacctgacggtccacg

SEQ ID NO: 105321 - DNA, 25 bp, Saccharomyces pastorianus
taagtgcttgtgtagctggtccttg

SEQ ID NO: 105322 - DNA, 25 bp, Saccharomyces pastorianus
agaatgtgcaggcatcttacacgca

SEQ ID NO: 105323 - DNA, 25 bp, Saccharomyces pastorianus
ccgtagtcggttatgcgtgggaata

SEQ ID NO: 105324 - DNA, 25 bp, Saccharomyces pastorianus
tcagatggcattggtgcgtcgttgt

SEQ ID NO: 105325 - DNA, 25 bp, Saccharomyces pastorianus
ttacacgcactggatggtctcttaa

SEQ ID NO: 105326 - DNA, 25 bp, Saccharomyces pastorianus
ggtcttcttgaatccttgtgcttga

SEQ ID NO: 105327 - DNA, 25 bp, Saccharomyces pastorianus
ggtgctcgatgctacgtcagatggc

SEQ ID NO: 105328 - DNA, 25 bp, Saccharomyces pastorianus
aatactctcttttcttggacttact

SEQ ID NO: 105329 - DNA, 25 bp, Saccharomyces pastorianus
tcatggcaagcgtctctcaggaggg

SEQ ID NO: 105330 - DNA, 25 bp, Saccharomyces pastorianus
gacacaccgacgagctggattattt

SEQ ID NO: 105331 - DNA, 25 bp, Saccharomyces pastorianus
ggagtcatggagtaccaattcccca

SEQ ID NO: 105332 - DNA, 25 bp, Saccharomyces pastorianus
ggatcccgaagagcattactcctga

SEQ ID NO: 105333 - DNA, 25 bp, Saccharomyces pastorianus
attccccaaggacatgttctactcg

SEQ ID NO: 105334 - DNA, 25 bp, Saccharomyces pastorianus
gatttactttcaccagttgcctcat

SEQ ID NO: 105335 - DNA, 25 bp, Saccharomyces pastorianus
gggcgacgagtcttctttacacaaa

SEQ ID NO: 105336 - DNA, 25 bp, Saccharomyces pastorianus
ggccacttcgcttttccagaaagaa

SEQ ID NO: 105337 - DNA, 25 bp, Saccharomyces pastorianus
ttaagatttcgaatcccaggtccca

SEQ ID NO: 105338 - DNA, 25 bp, Saccharomyces pastorianus
agggcaagtatttcgacacacagtc

SEQ ID NO: 105339 - DNA, 25 bp, Saccharomyces pastorianus
gagcaggtatgcctcattgtccgac

SEQ ID NO: 105340 - DNA, 25 bp, Saccharomyces pastorianus
ggaaccagttccaatattttctcta

SEQ ID NO: 105341 - DNA, 25 bp, Saccharomyces pastorianus
gaagaagttcaatggcacagtatgc

SEQ ID NO: 105342 - DNA, 25 bp, Saccharomyces pastorianus
accacccttgatgaaatacgaatgt

SEQ ID NO: 105343 - DNA, 25 bp, Saccharomyces pastorianus
cagcgattgtgataccagcgttcca

SEQ ID NO: 105344 - DNA, 25 bp, Saccharomyces pastorianus
gcgcggcaggcagatactttgtgac

SEQ ID NO: 105345 - DNA, 25 bp, Saccharomyces pastorianus
agcgttccaccaaaagtgcccttag

SEQ ID NO: 105346 - DNA, 25 bp, Saccharomyces pastorianus
attttctctaggttggacatggcca

SEQ ID NO: 105347 - DNA, 25 bp, Saccharomyces pastorianus
tggccattttggaagcactcatttt

SEQ ID NO: 105348 - DNA, 25 bp, Saccharomyces pastorianus
ccgtttctcagattctgcacatggt

SEQ ID NO: 105349 - DNA, 25 bp, Saccharomyces pastorianus
atgcaatgacgccagcagcgattgt

SEQ ID NO: 105350 - DNA, 25 bp, Saccharomyces pastorianus
cactcatttttatgcaatcttgtct

SEQ ID NO: 105351 - DNA, 25 bp, Saccharomyces pastorianus
agagagacataaccctcaagaatgt

SEQ ID NO: 105352 - DNA, 25 bp, Saccharomyces pastorianus
tatgtttgcagagatcgccctgtgt

SEQ ID NO: 105353 - DNA, 25 bp, Saccharomyces pastorianus
gattgtaagcgaggaatcgtcgaca

SEQ ID NO: 105354 - DNA, 25 bp, Saccharomyces pastorianus
agatcgccctgtgtcatgatagaga

SEQ ID NO: 105355 - DNA, 25 bp, Saccharomyces pastorianus
gaatgtcttgacaatccagagctga

SEQ ID NO: 105356 - DNA, 25 bp, Saccharomyces pastorianus
taagcggttcacaggtaacgcacct

SEQ ID NO: 105357 - DNA, 25 bp, Saccharomyces pastorianus
acctctgtcgactggcaagtacgat

SEQ ID NO: 105358 - DNA, 25 bp, Saccharomyces pastorianus
agaaggctgtcgctatatgtttgca

SEQ ID NO: 105359 - DNA, 25 bp, Saccharomyces pastorianus
atctgcccgaactttgtattgctca

SEQ ID NO: 105360 - DNA, 25 bp, Saccharomyces pastorianus
gagctgaataaggatctgcccgaac

SEQ ID NO: 105361 - DNA, 25 bp, Saccharomyces pastorianus
atcgtcgacatgactaagcggttca

SEQ ID NO: 105362 - DNA, 25 bp, Saccharomyces pastorianus
tgacaagcggtatagcactccctgt

SEQ ID NO: 105363 - DNA, 25 bp, Saccharomyces pastorianus
ggccatttgagttgtatcatgtgca

SEQ ID NO: 105364 - DNA, 25 bp, Saccharomyces pastorianus
gtccgattcatcaaacactggccaa

SEQ ID NO: 105365 - DNA, 25 bp, Saccharomyces pastorianus
atctggctcacttccttacaggaat

SEQ ID NO: 105366 - DNA, 25 bp, Saccharomyces pastorianus
ttactacccactattcgatattttg

SEQ ID NO: 105367 - DNA, 25 bp, Saccharomyces pastorianus
tttgatctttttgcttgccccaata

SEQ ID NO: 105368 - DNA, 25 bp, Saccharomyces pastorianus
tccctgttgttttctatcattgcca

SEQ ID NO: 105369 - DNA, 25 bp, Saccharomyces pastorianus
ctcgcattgggattccttttggtca

SEQ ID NO: 105370 - DNA, 25 bp, Saccharomyces pastorianus
tatttctctgtcaggattcctcgca

SEQ ID NO: 105371 - DNA, 25 bp, Saccharomyces pastorianus
tgccccaataccaaacacaattttc

SEQ ID NO: 105372 - DNA, 25 bp, Saccharomyces pastorianus
atcacacatctgacttcatgtccga

SEQ ID NO: 105373 - DNA, 25 bp, Saccharomyces pastorianus
ggccgcattgctttctcaaaggcaa

SEQ ID NO: 105374 - DNA, 25 bp, Saccharomyces pastorianus
gtctaggactttggcattcgtggaa

SEQ ID NO: 105375 - DNA, 25 bp, Saccharomyces pastorianus
agagagagacgttcggccgcattgc

SEQ ID NO: 105376 - DNA, 25 bp, Saccharomyces pastorianus
gattatgactgatgtacccgctttc

SEQ ID NO: 105377 - DNA, 25 bp, Saccharomyces pastorianus
gagacatatctaagctcgctaatcg

SEQ ID NO: 105378 - DNA, 25 bp, Saccharomyces pastorianus
caaaccttatggacagactgcgtga

SEQ ID NO: 105379 - DNA, 25 bp, Saccharomyces pastorianus
gaaggtccagctctaattctaaaac

SEQ ID NO: 105380 - DNA, 25 bp, Saccharomyces pastorianus
gaagatgcctgattcgcaagcaaac

SEQ ID NO: 105381 - DNA, 25 bp, Saccharomyces pastorianus
tagctgggctacaaggtatcctacc

SEQ ID NO: 105382 - DNA, 25 bp, Saccharomyces pastorianus
aacgttaccagcagtttctagcgat

SEQ ID NO: 105383 - DNA, 25 bp, Saccharomyces pastorianus
agagctctaatgctaatgccttgaa

SEQ ID NO: 105384 - DNA, 25 bp, Saccharomyces pastorianus
aatggctcaagcagtctcaaaggca

SEQ ID NO: 105385 - DNA, 25 bp, Saccharomyces pastorianus
gtggcacattgaccatacacttatg

SEQ ID NO: 105386 - DNA, 25 bp, Saccharomyces pastorianus
gaatttgaggctaactggacatcca

SEQ ID NO: 105387 - DNA, 25 bp, Saccharomyces pastorianus
ttaccatggcaaagtcacagccgcc

SEQ ID NO: 105388 - DNA, 25 bp, Saccharomyces pastorianus
aagagccctggaattgcctgaagta

SEQ ID NO: 105389 - DNA, 25 bp, Saccharomyces pastorianus
gattgcggaacttaacgacgaactt

SEQ ID NO: 105390 - DNA, 25 bp, Saccharomyces pastorianus
gaaatccatgtaccaactctggcag

SEQ ID NO: 105391 - DNA, 25 bp, Saccharomyces pastorianus
accagaggcccaggaacgtgtctaa

SEQ ID NO: 105392 - DNA, 25 bp, Saccharomyces pastorianus
tggacatccattttgaaagcacatt

SEQ ID NO: 105393 - DNA, 25 bp, Saccharomyces pastorianus
ggattattcacgttaccagaggccc

SEQ ID NO: 105394 - DNA, 25 bp, Saccharomyces pastorianus
acagccgccttaaccgaatttgagg

SEQ ID NO: 105395 - DNA, 25 bp, Saccharomyces pastorianus
gatctgatccgacaatatgacctac

SEQ ID NO: 105396 - DNA, 25 bp, Saccharomyces pastorianus
tatgacctacaaactacagcttctg

SEQ ID NO: 105397 - DNA, 25 bp, Saccharomyces pastorianus
gggaagttacaccagttgttcattt

SEQ ID NO: 105398 - DNA, 25 bp, Saccharomyces pastorianus
acagcttctgaactggtgactgaac

SEQ ID NO: 105399 - DNA, 25 bp, Saccharomyces pastorianus
gagcacttttggtaatgagcgacaa

SEQ ID NO: 105400 - DNA, 25 bp, Saccharomyces pastorianus
ggatacgtttgataggccattgatt

SEQ ID NO: 105401 - DNA, 25 bp, Saccharomyces pastorianus
atttgctgctggtgaagtttcgggt

SEQ ID NO: 105402 - DNA, 25 bp, Saccharomyces pastorianus
tattgcatcccaccactggaagaag

SEQ ID NO: 105403 - DNA, 25 bp, Saccharomyces pastorianus
ttcgggtggtgttcatggagccaac

SEQ ID NO: 105404 - DNA, 25 bp, Saccharomyces pastorianus
gtttaggcggcatcttattgcatcc

SEQ ID NO: 105405 - DNA, 25 bp, Saccharomyces pastorianus
cggaaagcgttctatctaatgggat

SEQ ID NO: 105406 - DNA, 25 bp, Saccharomyces pastorianus
gaacccatatatttgtgccacatcc

SEQ ID NO: 105407 - DNA, 25 bp, Saccharomyces pastorianus
tacacagttcggatcctcagcgtag

SEQ ID NO: 105408 - DNA, 25 bp, Saccharomyces pastorianus
tgagatggttcgatgtacacagttc

SEQ ID NO: 105409 - DNA, 25 bp, Saccharomyces pastorianus
caatgtctgtgaactggatatcgta

SEQ ID NO: 105410 - DNA, 25 bp, Saccharomyces pastorianus
gactcatatcttccagagaccataa

SEQ ID NO: 105411 - DNA, 25 bp, Saccharomyces pastorianus
gaggtatgcgggtctgtattttgtc

SEQ ID NO: 105412 - DNA, 25 bp, Saccharomyces pastorianus
cttcgtagagttttccgattcgacg

SEQ ID NO: 105413 - DNA, 25 bp, Saccharomyces pastorianus
tcagcgtagccaggatgccattgcg

SEQ ID NO: 105414 - DNA, 25 bp, Saccharomyces pastorianus
atttgtgccacatccatctgtttgt

SEQ ID NO: 105415 - DNA, 25 bp, Saccharomyces pastorianus
tgccattgcgcagatttatagactc

SEQ ID NO: 105416 - DNA, 25 bp, Saccharomyces pastorianus
ggacttacttaacgatgaacccata

SEQ ID NO: 105417 - DNA, 25 bp, Saccharomyces pastorianus
gacctcctgcccgtgagagaatcaa

SEQ ID NO: 105418 - DNA, 25 bp, Saccharomyces pastorianus
atgatgacgctgacattgatctcaa

SEQ ID NO: 105419 - DNA, 25 bp, Saccharomyces pastorianus
aatcaacgttttaagcgacctcctg

SEQ ID NO: 105420 - DNA, 25 bp, Saccharomyces pastorianus
aatattggcgcgtgccgctgaatac

SEQ ID NO: 105421 - DNA, 25 bp, Saccharomyces pastorianus
aaacctactactttggccacaacag

SEQ ID NO: 105422 - DNA, 25 bp, Saccharomyces pastorianus
ataccattggcagaacacgatcgtg

SEQ ID NO: 105423 - DNA, 25 bp, Saccharomyces pastorianus
gatcgtgggccagaacaccaacagg

SEQ ID NO: 105424 - DNA, 25 bp, Saccharomyces pastorianus
ggaatgacgtcttcaccaatggaat

SEQ ID NO: 105425 - DNA, 25 bp, Saccharomyces pastorianus
gtcgccgcgaaaacatcaacactgc

SEQ ID NO: 105426 - DNA, 25 bp, Saccharomyces pastorianus
aacgcatcgcaattagccagtgcaa

SEQ ID NO: 105427 - DNA, 25 bp, Saccharomyces pastorianus
atataagcatgcagccgggtcgtcg

SEQ ID NO: 105428 - DNA, 25 bp, Saccharomyces pastorianus
agggcttaaatctctttggtgataa

SEQ ID NO: 105429 - DNA, 25 bp, Saccharomyces pastorianus
aagagtttgttgaacggtcccagca

SEQ ID NO: 105430 - DNA, 25 bp, Saccharomyces pastorianus
aagaaactttgacggcttcagactt

SEQ ID NO: 105431 - DNA, 25 bp, Saccharomyces pastorianus
agacttcccgatggcggcaacagta

SEQ ID NO: 105432 - DNA, 25 bp, Saccharomyces pastorianus
agcgacataagcctactgataacaa

SEQ ID NO: 105433 - DNA, 25 bp, Saccharomyces pastorianus
ctccgtatttgccagcttatttaat

SEQ ID NO: 105434 - DNA, 25 bp, Saccharomyces pastorianus
gaacggtcccagcaagtatatgaaa

SEQ ID NO: 105435 - DNA, 25 bp, Saccharomyces pastorianus
gtactgtttacagactcaaagagct

SEQ ID NO: 105436 - DNA, 25 bp, Saccharomyces pastorianus
acagtatgatcctagcttgagtgag

SEQ ID NO: 105437 - DNA, 25 bp, Saccharomyces pastorianus
aaatgtgggtttcactccgtatttg

SEQ ID NO: 105438 - DNA, 25 bp, Saccharomyces pastorianus
agatactggttctcgtttgcagaca

SEQ ID NO: 105439 - DNA, 25 bp, Saccharomyces pastorianus
gtttccatcttctcttagagccaag

SEQ ID NO: 105440 - DNA, 25 bp, Saccharomyces pastorianus
taatgccgtattaggctctaacgtt

SEQ ID NO: 105441 - DNA, 25 bp, Saccharomyces pastorianus
gatctcctggaaaatcctaatgccg

SEQ ID NO: 105442 - DNA, 25 bp, Saccharomyces pastorianus
ttaaaagtcgtcaccacgacggcag

SEQ ID NO: 105443 - DNA, 25 bp, Saccharomyces pastorianus
aagacggcgctactatcaaggaaaa

SEQ ID NO: 105444 - DNA, 25 bp, Saccharomyces pastorianus
gaacgaactgaaagacggcgctact

SEQ ID NO: 105445 - DNA, 25 bp, Saccharomyces pastorianus
acgacggcagacgatgcgtttccat

SEQ ID NO: 105446 - DNA, 25 bp, Saccharomyces pastorianus
tactgtcttctatacatgcacttcc

SEQ ID NO: 105447 - DNA, 25 bp, Saccharomyces pastorianus
ggaaaagtgtcctcaatgtggaaat

SEQ ID NO: 105448 - DNA, 25 bp, Saccharomyces pastorianus
tgtaggatcgttaattttttgcttg

SEQ ID NO: 105449 - DNA, 25 bp, Saccharomyces pastorianus
ctctaacgttgaatgcagccaatgt

SEQ ID NO: 105450 - DNA, 25 bp, Saccharomyces pastorianus
gaaaaacatccgctcataacaaaat

SEQ ID NO: 105451 - DNA, 25 bp, Saccharomyces pastorianus
atgtcgaatacttgggacgatgtat

SEQ ID NO: 105452 - DNA, 25 bp, Saccharomyces pastorianus
gatgtcgaaactgaacgatctccag

SEQ ID NO: 105453 - DNA, 25 bp, Saccharomyces pastorianus
acttagtaagtccatatttgatcca

SEQ ID NO: 105454 - DNA, 25 bp, Saccharomyces pastorianus
atttgatccaaactttgacttgcaa

SEQ ID NO: 105455 - DNA, 25 bp, Saccharomyces pastorianus
ggtttcaatgatggtttcccaacgg

SEQ ID NO: 105456 - DNA, 25 bp, Saccharomyces pastorianus
tacttggcctacgaacacgttttgg

SEQ ID NO: 105457 - DNA, 25 bp, Saccharomyces pastorianus
aaatggactgatattgtcaatacct

SEQ ID NO: 105458 - DNA, 25 bp, Saccharomyces pastorianus
cgatctccagatttagtgaagttaa

SEQ ID NO: 105459 - DNA, 25 bp, Saccharomyces pastorianus
gatggtttcccaacgggcgctaaat

SEQ ID NO: 105460 - DNA, 25 bp, Saccharomyces pastorianus
agatgaggacctcagtaaggcatat

SEQ ID NO: 105461 - DNA, 25 bp, Saccharomyces pastorianus
gtggtacctcatgacattctaatag

SEQ ID NO: 105462 - DNA, 25 bp, Saccharomyces pastorianus
tattacaatccgcttccaagagggc

SEQ ID NO: 105463 - DNA, 25 bp, Saccharomyces pastorianus
gattcaaagccctagacgcaagtaa

SEQ ID NO: 105464 - DNA, 25 bp, Saccharomyces pastorianus
aagtaatgccattgaccgtttgagg

SEQ ID NO: 105465 - DNA, 25 bp, Saccharomyces pastorianus
ctgctgcgtcagtagttaaccaact

SEQ ID NO: 105466 - DNA, 25 bp, Saccharomyces pastorianus
gatcttggacatttcggcaggtgac

SEQ ID NO: 105467 - DNA, 25 bp, Saccharomyces pastorianus
tagcgtcccgttgttccaaatttag

SEQ ID NO: 105468 - DNA, 25 bp, Saccharomyces pastorianus
aagaattattgacccgctagcgtcc

SEQ ID NO: 105469 - DNA, 25 bp, Saccharomyces pastorianus
gaacgaacgagcacatccaattatt

SEQ ID NO: 105470 - DNA, 25 bp, Saccharomyces pastorianus
gaaaagcggttggtctgctgcgtca

SEQ ID NO: 105471 - DNA, 25 bp, Saccharomyces pastorianus
ttggttgctgtttactacggattcc

SEQ ID NO: 105472 - DNA, 25 bp, Saccharomyces pastorianus
gaatttaacggtctaccaggtgctt

SEQ ID NO: 105473 - DNA, 25 bp, Saccharomyces pastorianus
tttctcatcgtggtaaagccttcgc

SEQ ID NO: 105474 - DNA, 25 bp, Saccharomyces pastorianus
acgctgaagcagttaccaccatttg

SEQ ID NO: 105475 - DNA, 25 bp, Saccharomyces pastorianus
gcaggacacggatctgaatgccatt

SEQ ID NO: 105476 - DNA, 25 bp, Saccharomyces pastorianus
agaggcaagatcgttccaagccggg

SEQ ID NO: 105477 - DNA, 25 bp, Saccharomyces pastorianus
accaccatttgttttgctgattctc

SEQ ID NO: 105478 - DNA, 25 bp, Saccharomyces pastorianus
ggaagtgcagtcgattttgactcaa

SEQ ID NO: 105479 - DNA, 25 bp, Saccharomyces pastorianus
aatgccattgcgttagctaagggaa

SEQ ID NO: 105480 - DNA, 25 bp, Saccharomyces pastorianus
gggtgaatatcacttctttcaagga

SEQ ID NO: 105481 - DNA, 25 bp, Saccharomyces pastorianus
aatcaatgaggccttagacctggaa

SEQ ID NO: 105482 - DNA, 25 bp, Saccharomyces pastorianus
gtcatggactgacttacgcagagat

SEQ ID NO: 105483 - DNA, 25 bp, Saccharomyces pastorianus
gaatgatcctaagcaacctttgttc

SEQ ID NO: 105484 - DNA, 25 bp, Saccharomyces pastorianus
gagaaacctgtgaactggccattaa

SEQ ID NO: 105485 - DNA, 25 bp, Saccharomyces pastorianus
catcccagaactacaggccttattg

SEQ ID NO: 105486 - DNA, 25 bp, Saccharomyces pastorianus
aaatcgcctacgtcttcggtcaaat

SEQ ID NO: 105487 - DNA, 25 bp, Saccharomyces pastorianus
aggaggatccacacgttgctgtgag

SEQ ID NO: 105488 - DNA, 25 bp, Saccharomyces pastorianus
tcaaataggtagtccggctgctgtc

SEQ ID NO: 105489 - DNA, 25 bp, Saccharomyces pastorianus
tgatgaagcaatcctggccttggcc

SEQ ID NO: 105490 - DNA, 25 bp, Saccharomyces pastorianus
gtgccattgcttctccagaagttgt

SEQ ID NO: 105491 - DNA, 25 bp, Saccharomyces pastorianus
agttgtcgacgtcttgaaatcttac

SEQ ID NO: 105492 - DNA, 25 bp, Saccharomyces pastorianus
gcatgaagctgctgaagccttgggt

SEQ ID NO: 105493 - DNA, 25 bp, Saccharomyces pastorianus
tggtttcagtgcagaatcctccctt

SEQ ID NO: 105494 - DNA, 25 bp, Saccharomyces pastorianus
gagtcagtccaagagatcatccagc

SEQ ID NO: 105495 - DNA, 25 bp, Saccharomyces pastorianus
attttcgctaggtatcgtcagagac

SEQ ID NO: 105496 - DNA, 25 bp, Saccharomyces pastorianus
actttgtccttcttgggcatagcgc

SEQ ID NO: 105497 - DNA, 25 bp, Saccharomyces pastorianus
ggaagaaccttttactgccatgatc

SEQ ID NO: 105498 - DNA, 25 bp, Saccharomyces pastorianus
gatttacagtcttccaagttccagc

SEQ ID NO: 105499 - DNA, 25 bp, Saccharomyces pastorianus
gttgtttctgccgtagtttacttca

SEQ ID NO: 105500 - DNA, 25 bp, Saccharomyces pastorianus
ggcaagtgcttgttttgagttccat

SEQ ID NO: 105501 - DNA, 25 bp, Saccharomyces pastorianus
ggctgttacatgttggcggcgacca

SEQ ID NO: 105502 - DNA, 25 bp, Saccharomyces pastorianus
ttgggtgactatttcggcatcctga

SEQ ID NO: 105503 - DNA, 25 bp, Saccharomyces pastorianus
ataccacaagcattctctaaccaag

SEQ ID NO: 105504 - DNA, 25 bp, Saccharomyces pastorianus
ttccagctggccattgtgtgcacga

SEQ ID NO: 105505 - DNA, 25 bp, Saccharomyces pastorianus
gtcatcggcgtagcgttgatcagat

SEQ ID NO: 105506 - DNA, 25 bp, Saccharomyces pastorianus
aagtcgaattatacggcggcgccat

SEQ ID NO: 105507 - DNA, 25 bp, Saccharomyces pastorianus
tgaaggaggcttggcagttccacgt

SEQ ID NO: 105508 - DNA, 25 bp, Saccharomyces pastorianus
gttgcctgcaagatgtcatgctgtt

SEQ ID NO: 105509 - DNA, 25 bp, Saccharomyces pastorianus
cgtcaattcccgtcgcgatgaagaa

SEQ ID NO: 105510 - DNA, 25 bp, Saccharomyces pastorianus
acacctaccctggtcatcaaggaag

SEQ ID NO: 105511 - DNA, 25 bp, Saccharomyces pastorianus
ccacctgggtttatagacgcttcta

SEQ ID NO: 105512 - DNA, 25 bp, Saccharomyces pastorianus
gtggtcatctccattaatgtacctt

SEQ ID NO: 105513 - DNA, 25 bp, Saccharomyces pastorianus
caagttcaccggactcgttatggaa

SEQ ID NO: 105514 - DNA, 25 bp, Saccharomyces pastorianus
tgacggagttgaacgggaccaccaa

SEQ ID NO: 105515 - DNA, 25 bp, Saccharomyces pastorianus
gaagtccccgatacacaggaggtgt

SEQ ID NO: 105516 - DNA, 25 bp, Saccharomyces pastorianus
accttgacctccttgcaatttggta

SEQ ID NO: 105517 - DNA, 25 bp, Saccharomyces pastorianus
gaaaaattgtcctctacttccacta

SEQ ID NO: 105518 - DNA, 25 bp, Saccharomyces pastorianus
atcggctctttctacagtgggttca

SEQ ID NO: 105519 - DNA, 25 bp, Saccharomyces pastorianus
catagtcggtttgttggctcagttg

SEQ ID NO: 105520 - DNA, 25 bp, Saccharomyces pastorianus
agaatcagattggtctcccaaccac

SEQ ID NO: 105521 - DNA, 25 bp, Saccharomyces pastorianus
taaagagcactttgggttgcccacc

SEQ ID NO: 105522 - DNA, 25 bp, Saccharomyces pastorianus
cctctcgctacaagaactctgttta

SEQ ID NO: 105523 - DNA, 25 bp, Saccharomyces pastorianus
aagaaggctcctggccaatccatag

SEQ ID NO: 105524 - DNA, 25 bp, Saccharomyces pastorianus
ttgtgtcccctagaagccactagaa

SEQ ID NO: 105525 - DNA, 25 bp, Saccharomyces pastorianus
actctgtttacatgggttctgctgc

SEQ ID NO: 105526 - DNA, 25 bp, Saccharomyces pastorianus
gacaacttgggttacgataccgcct

SEQ ID NO: 105527 - DNA, 25 bp, Saccharomyces pastorianus
gaaccaaacgctaaaatctgcttac

SEQ ID NO: 105528 - DNA, 25 bp, Saccharomyces pastorianus
aagggccacgttaagaagagcaccg

SEQ ID NO: 105529 - DNA, 25 bp, Saccharomyces pastorianus
agaccctcactgtttattgcgaccg

SEQ ID NO: 105530 - DNA, 25 bp, Saccharomyces pastorianus
tacggtggcacctaaattcattaag

SEQ ID NO: 105531 - DNA, 25 bp, Saccharomyces pastorianus
gaatgcgcagttggatccgtaacca

SEQ ID NO: 105532 - DNA, 25 bp, Saccharomyces pastorianus
gaaggcgcgtacgtcggagattcaa

SEQ ID NO: 105533 - DNA, 25 bp, Saccharomyces pastorianus
ggtgtcgactcgtactttatgaaga

SEQ ID NO: 105534 - DNA, 25 bp, Saccharomyces pastorianus
aatctgcttacggacatactgttca

SEQ ID NO: 105535 - DNA, 25 bp, Saccharomyces pastorianus
gatacatttatggtgtcgactcgta

SEQ ID NO: 105536 - DNA, 25 bp, Saccharomyces pastorianus
attgcgaccgtctcgcaagatggga

SEQ ID NO: 105537 - DNA, 25 bp, Saccharomyces pastorianus
gatcattgagcttgccaacagaccc

SEQ ID NO: 105538 - DNA, 25 bp, Saccharomyces pastorianus
gcctaatcggtcacaacgtatgcaa

SEQ ID NO: 105539 - DNA, 25 bp, Saccharomyces pastorianus
tcaaagatacactgccccgaaatgg

SEQ ID NO: 105540 - DNA, 25 bp, Saccharomyces pastorianus
ggacgaattcgatgaccttttggaa

SEQ ID NO: 105541 - DNA, 25 bp, Saccharomyces pastorianus
agaatcaactccaacatcgggtcct

SEQ ID NO: 105542 - DNA, 25 bp, Saccharomyces pastorianus
gaatgctaatacaacggcaactggt

SEQ ID NO: 105543 - DNA, 25 bp, Saccharomyces pastorianus
gggagaacacaccattcttacaaag

SEQ ID NO: 105544 - DNA, 25 bp, Saccharomyces pastorianus
gtaaccagaacccaagtgaatacct

SEQ ID NO: 105545 - DNA, 25 bp, Saccharomyces pastorianus
gaattcaacagacatttgtggacgt

SEQ ID NO: 105546 - DNA, 25 bp, Saccharomyces pastorianus
gtgaatacctctctacttttactaa

SEQ ID NO: 105547 - DNA, 25 bp, Saccharomyces pastorianus
ttgctccaagccgtagttcagaatc

SEQ ID NO: 105548 - DNA, 25 bp, Saccharomyces pastorianus
taacactctacccaatcgtaaaccg

SEQ ID NO: 105549 - DNA, 25 bp, Saccharomyces pastorianus
agccggtggccttatgggatactac

SEQ ID NO: 105550 - DNA, 25 bp, Saccharomyces pastorianus
taaacctgtccctgtcgttttgaca

SEQ ID NO: 105551 - DNA, 25 bp, Saccharomyces pastorianus
aagggctccattccatctctagtat

SEQ ID NO: 105552 - DNA, 25 bp, Saccharomyces pastorianus
gggtgcatcgaccttactacttggt

SEQ ID NO: 105553 - DNA, 25 bp, Saccharomyces pastorianus
ttactacttggtgctggtgtcataa

SEQ ID NO: 105554 - DNA, 25 bp, Saccharomyces pastorianus
ggattgccggttacttgctacatat

SEQ ID NO: 105555 - DNA, 25 bp, Saccharomyces pastorianus
gggatactaccgtaagggctccatt

SEQ ID NO: 105556 - DNA, 25 bp, Saccharomyces pastorianus
gtatctggcttagtattcggtagtg

SEQ ID NO: 105557 - DNA, 25 bp, Saccharomyces pastorianus
cgttttgacagctttgggtgggctc

SEQ ID NO: 105558 - DNA, 25 bp, Saccharomyces pastorianus
ctttgggtgggctcggcagttacta

SEQ ID NO: 105559 - DNA, 25 bp, Saccharomyces pastorianus
gagtcttttgactacagccggtggc

SEQ ID NO: 105560 - DNA, 25 bp, Saccharomyces pastorianus
gacatcagttcaaaactctccacgc

SEQ ID NO: 105561 - DNA, 25 bp, Saccharomyces pastorianus
ccccgtagcaggatcaaatcatttt

SEQ ID NO: 105562 - DNA, 25 bp, Saccharomyces pastorianus
ataaactatacctcgaatacaaaag

SEQ ID NO: 105563 - DNA, 25 bp, Saccharomyces pastorianus
gaattactgcttcaaatgcatgtct

SEQ ID NO: 105564 - DNA, 25 bp, Saccharomyces pastorianus
gggctaccccgtagcaggatcaaat

SEQ ID NO: 105565 - DNA, 25 bp, Saccharomyces pastorianus
agttcaaaactctccacgcttacaa

SEQ ID NO: 105566 - DNA, 25 bp, Saccharomyces pastorianus
ggaaagaactcagccgtgaaagaat

SEQ ID NO: 105567 - DNA, 25 bp, Saccharomyces pastorianus
gcttcaaatgcatgtcttacaataa

SEQ ID NO: 105568 - DNA, 25 bp, Saccharomyces pastorianus
agattatacattaccagaactatgg

SEQ ID NO: 105569 - DNA, 25 bp, Saccharomyces pastorianus
tccacgcttacaacaacctcaggaa

SEQ ID NO: 105570 - DNA, 25 bp, Saccharomyces pastorianus
aacagcaacagctttccttaaagat

SEQ ID NO: 105571 - DNA, 25 bp, Saccharomyces pastorianus
tacatgctttttcatatcctctctc

SEQ ID NO: 105572 - DNA, 25 bp, Saccharomyces pastorianus
tgcccacccttttaggtatagttcg

SEQ ID NO: 105573 - DNA, 25 bp, Saccharomyces pastorianus
atagttcgctaagttcaacgctcct

SEQ ID NO: 105574 - DNA, 25 bp, Saccharomyces pastorianus
gaaatttcatttagcttcgatgcag

SEQ ID NO: 105575 - DNA, 25 bp, Saccharomyces pastorianus
ggctccgttcatatcttattcaaaa

SEQ ID NO: 105576 - DNA, 25 bp, Saccharomyces pastorianus
tattacgtcccagttcgcgagaaat

SEQ ID NO: 105577 - DNA, 25 bp, Saccharomyces pastorianus
aattcagcggtaatcttatctttat

SEQ ID NO: 105578 - DNA, 25 bp, Saccharomyces pastorianus
agtcatttggtttattacgtcccag

SEQ ID NO: 105579 - DNA, 25 bp, Saccharomyces pastorianus
aatgatgttaaccaatgcccaccct

SEQ ID NO: 105580 - DNA, 25 bp, Saccharomyces pastorianus
tttcttctaattttggctccgttca

SEQ ID NO: 105581 - DNA, 25 bp, Saccharomyces pastorianus
caacgctcctcaaagcattctttaa

SEQ ID NO: 105582 - DNA, 25 bp, Saccharomyces pastorianus
ctccaaatgggacttcgtaatcaga

SEQ ID NO: 105583 - DNA, 25 bp, Saccharomyces pastorianus
aaacggttcaggaatcgggcaacat

SEQ ID NO: 105584 - DNA, 25 bp, Saccharomyces pastorianus
acctgaccagatgaggaatctccaa

SEQ ID NO: 105585 - DNA, 25 bp, Saccharomyces pastorianus
taatgacaatgacgccaaccggaac

SEQ ID NO: 105586 - DNA, 25 bp, Saccharomyces pastorianus
tgacgaatcaatgcctgacactgcc

SEQ ID NO: 105587 - DNA, 25 bp, Saccharomyces pastorianus
aagctctccaccgttgttttgagac

SEQ ID NO: 105588 - DNA, 25 bp, Saccharomyces pastorianus
aaccggaacgccaacaacatagtga

SEQ ID NO: 105589 - DNA, 25 bp, Saccharomyces pastorianus
taatagcccaccaaagatcagcatg

SEQ ID NO: 105590 - DNA, 25 bp, Saccharomyces pastorianus
tctggcgtcagtttggcaatagaat

SEQ ID NO: 105591 - DNA, 25 bp, Saccharomyces pastorianus
ggttcagaagtacaagctctccacc

SEQ ID NO: 105592 - DNA, 25 bp, Saccharomyces pastorianus
gaaaatccaaatttctggcgtcagt

SEQ ID NO: 105593 - DNA, 25 bp, Saccharomyces pastorianus
gtatccaataccatcacaaagacat

SEQ ID NO: 105594 - DNA, 25 bp, Saccharomyces pastorianus
tatgtttggtagctttccaccattc

SEQ ID NO: 105595 - DNA, 25 bp, Saccharomyces pastorianus
ccacccttacctatgtttggtagct

SEQ ID NO: 105596 - DNA, 25 bp, Saccharomyces pastorianus
gatacagactcaaacctcggtaata

SEQ ID NO: 105597 - DNA, 25 bp, Saccharomyces pastorianus
gaatctttgatagtgttggcataac

SEQ ID NO: 105598 - DNA, 25 bp, Saccharomyces pastorianus
tgtaccgaaagcaatgactggttct

SEQ ID NO: 105599 - DNA, 25 bp, Saccharomyces pastorianus
gaattccgcgaatgatacagactca

SEQ ID NO: 105600 - DNA, 25 bp, Saccharomyces pastorianus
ttttaacgaatttacctggatggag

SEQ ID NO: 105601 - DNA, 25 bp, Saccharomyces pastorianus
gcctattatccctccaacagcaagg

SEQ ID NO: 105602 - DNA, 25 bp, Saccharomyces pastorianus
ggaggatcctaatgggcctattatc

SEQ ID NO: 105603 - DNA, 25 bp, Saccharomyces pastorianus
gactggttctatagacctggataaa

SEQ ID NO: 105604 - DNA, 25 bp, Saccharomyces pastorianus
tataacaacgccattcatgcagcct

SEQ ID NO: 105605 - DNA, 25 bp, Saccharomyces pastorianus
gggctggtatcaccgaagctgttct

SEQ ID NO: 105606 - DNA, 25 bp, Saccharomyces pastorianus
aagctcagcatttaactccgagtga

SEQ ID NO: 105607 - DNA, 25 bp, Saccharomyces pastorianus
gagtgagccaaatgctggtcctaaa

SEQ ID NO: 105608 - DNA, 25 bp, Saccharomyces pastorianus
agaggcgtttccttaactgcggcaa

SEQ ID NO: 105609 - DNA, 25 bp, Saccharomyces pastorianus
aagctgttcttgtcgtgaacccgat

SEQ ID NO: 105610 - DNA, 25 bp, Saccharomyces pastorianus
gtttgatttcgggtgctattgggcc

SEQ ID NO: 105611 - DNA, 25 bp, Saccharomyces pastorianus
ggctgtcacctttaccgtttatgaa

SEQ ID NO: 105612 - DNA, 25 bp, Saccharomyces pastorianus
attcatgcagcctacactattgtca

SEQ ID NO: 105613 - DNA, 25 bp, Saccharomyces pastorianus
taaccattggtgctcaactactgaa

SEQ ID NO: 105614 - DNA, 25 bp, Saccharomyces pastorianus
gatggatgtcctaccttcatgggaa

SEQ ID NO: 105615 - DNA, 25 bp, Saccharomyces pastorianus
atgtagcgcatgcagcttatggctg

SEQ ID NO: 105616 - DNA, 25 bp, Saccharomyces pastorianus
tactaaatacgcaccccgataaact

SEQ ID NO: 105617 - DNA, 25 bp, Saccharomyces pastorianus
aattattaacccaatgtagcgcatg

SEQ ID NO: 105618 - DNA, 25 bp, Saccharomyces pastorianus
ggtgaattcgttaacacactatgaa

SEQ ID NO: 105619 - DNA, 25 bp, Saccharomyces pastorianus
gaattttccttagacgatttctcat

SEQ ID NO: 105620 - DNA, 25 bp, Saccharomyces pastorianus
actcgtcgcgaatatgataggttga

SEQ ID NO: 105621 - DNA, 25 bp, Saccharomyces pastorianus
acggagtcattctggttatcaatta

SEQ ID NO: 105622 - DNA, 25 bp, Saccharomyces pastorianus
tgtcctcgctgtcaatttgttggtg

SEQ ID NO: 105623 - DNA, 25 bp, Saccharomyces pastorianus
gatacggttagcaacgtcacaatca

SEQ ID NO: 105624 - DNA, 25 bp, Saccharomyces pastorianus
gaattccatcggatgcaacacaaga

SEQ ID NO: 105625 - DNA, 25 bp, Saccharomyces pastorianus
gacgctatggaacggagtcattctg

SEQ ID NO: 105626 - DNA, 25 bp, Saccharomyces pastorianus
gagagtcgcctcatatatggaaaat

SEQ ID NO: 105627 - DNA, 25 bp, Saccharomyces pastorianus
aaggccattgtactgctatttccga

SEQ ID NO: 105628 - DNA, 25 bp, Saccharomyces pastorianus
gggcgtatttcgatatctatagctt

SEQ ID NO: 105629 - DNA, 25 bp, Saccharomyces pastorianus
tagcattcttaccaaggccagtgaa

SEQ ID NO: 105630 - DNA, 25 bp, Saccharomyces pastorianus
gagcggacccctctatttgggaaag

SEQ ID NO: 105631 - DNA, 25 bp, Saccharomyces pastorianus
gaaggaatttgagcggacccctcta

SEQ ID NO: 105632 - DNA, 25 bp, Saccharomyces pastorianus
gatgatgttactaccgaccaattcg

SEQ ID NO: 105633 - DNA, 25 bp, Saccharomyces pastorianus
cagagccagagttactagcattctt

SEQ ID NO: 105634 - DNA, 25 bp, Saccharomyces pastorianus
acccaactgccaccgatttgattga

SEQ ID NO: 105635 - DNA, 25 bp, Saccharomyces pastorianus
atgcaattcttcattctttgagcaa

SEQ ID NO: 105636 - DNA, 25 bp, Saccharomyces pastorianus
taaccagtcattgttggagcccggc

SEQ ID NO: 105637 - DNA, 25 bp, Saccharomyces pastorianus
gaacattctaccttctgctgttgaa

SEQ ID NO: 105638 - DNA, 25 bp, Saccharomyces pastorianus
atggtactaactcgaacgccgttgt

SEQ ID NO: 105639 - DNA, 25 bp, Saccharomyces pastorianus
gcgtcctctatccataataaccatt

SEQ ID NO: 105640 - DNA, 25 bp, Saccharomyces pastorianus
actggaccatgcctataatctgtgt

SEQ ID NO: 105641 - DNA, 25 bp, Saccharomyces pastorianus
attttcccaggaaccagtcatttga

SEQ ID NO: 105642 - DNA, 25 bp, Saccharomyces pastorianus
atccatcgatgaatttgctaccttg

SEQ ID NO: 105643 - DNA, 25 bp, Saccharomyces pastorianus
gattatggcgttggtaaccggtcca

SEQ ID NO: 105644 - DNA, 25 bp, Saccharomyces pastorianus
aatctgtgtcaatctgtgggatcat

SEQ ID NO: 105645 - DNA, 25 bp, Saccharomyces pastorianus
gggacaaggctggttatttctagtt

SEQ ID NO: 105646 - DNA, 25 bp, Saccharomyces pastorianus
aaagattcattcaacggcagcgatt

SEQ ID NO: 105647 - DNA, 25 bp, Saccharomyces pastorianus
aacatcttcaatttggcgtcctcta

SEQ ID NO: 105648 - DNA, 25 bp, Saccharomyces pastorianus
gaatgaccagttagcccaggagttg

SEQ ID NO: 105649 - DNA, 25 bp, Saccharomyces pastorianus
atgcttcccgcaatatgtgaatagc

SEQ ID NO: 105650 - DNA, 25 bp, Saccharomyces pastorianus
ggacaaggtcagttcatgcttcccg

SEQ ID NO: 105651 - DNA, 25 bp, Saccharomyces pastorianus
gctgctggtacagagcctcaatgat

SEQ ID NO: 105652 - DNA, 25 bp, Saccharomyces pastorianus
aaccggtcaacgtgctgctggtaca

SEQ ID NO: 105653 - DNA, 25 bp, Saccharomyces pastorianus
tacagccaacggatgcatgccatac

SEQ ID NO: 105654 - DNA, 25 bp, Saccharomyces pastorianus
aattctggacggagctttgtcaacg

SEQ ID NO: 105655 - DNA, 25 bp, Saccharomyces pastorianus
atgtacgatgagtacctgggctccc

SEQ ID NO: 105656 - DNA, 25 bp, Saccharomyces pastorianus
tgtcagcgccaattaacggaattct

SEQ ID NO: 105657 - DNA, 25 bp, Saccharomyces pastorianus
aaagggcccgcgatcgatgagctct

SEQ ID NO: 105658 - DNA, 25 bp, Saccharomyces pastorianus
aatacggtacattcggttgaagcag

SEQ ID NO: 105659 - DNA, 25 bp, Saccharomyces pastorianus
ggacgactactgagtttgaagttct

SEQ ID NO: 105660 - DNA, 25 bp, Saccharomyces pastorianus
ggtgggccacaccaatattctggac

SEQ ID NO: 105661 - DNA, 25 bp, Saccharomyces pastorianus
aggtagtactgtgtgacgctgccga

SEQ ID NO: 105662 - DNA, 25 bp, Saccharomyces pastorianus
tgccgatggttcttctactgcagaa

SEQ ID NO: 105663 - DNA, 25 bp, Saccharomyces pastorianus
gtaaggtcatgaacacacacacaca

SEQ ID NO: 105664 - DNA, 25 bp, Saccharomyces pastorianus
aagcaagatacgttccaagctgtct

SEQ ID NO: 105665 - DNA, 25 bp, Saccharomyces pastorianus
gatctacgaaaaatggtgggccaca

SEQ ID NO: 105666 - DNA, 25 bp, Saccharomyces pastorianus
tcgacaccaccacagagaacttgat

SEQ ID NO: 105667 - DNA, 25 bp, Saccharomyces pastorianus
cgcttaacagcatgtctccgtacat

SEQ ID NO: 105668 - DNA, 25 bp, Saccharomyces pastorianus
tattctggacaggatcctcgacgaa

SEQ ID NO: 105669 - DNA, 25 bp, Saccharomyces pastorianus
cgtacatgaccatacctcagcaata

SEQ ID NO: 105670 - DNA, 25 bp, Saccharomyces pastorianus
gatgatccaggctgtcgtctcgaac

SEQ ID NO: 105671 - DNA, 25 bp, Saccharomyces pastorianus
acgccattggctccgtatatgtgat

SEQ ID NO: 105672 - DNA, 25 bp, Saccharomyces pastorianus
acagttcaatggtatcttccctcag

SEQ ID NO: 105673 - DNA, 25 bp, Saccharomyces pastorianus
gatgctgttgtccttaagaccgttc

SEQ ID NO: 105674 - DNA, 25 bp, Saccharomyces pastorianus
aagctttatggtctcgagttcacgg

SEQ ID NO: 105675 - DNA, 25 bp, Saccharomyces pastorianus
atccctctgtggtttaatgtcgtca

SEQ ID NO: 105676 - DNA, 25 bp, Saccharomyces pastorianus
gagttacccaagttttctgctgtca

SEQ ID NO: 105677 - DNA, 25 bp, Saccharomyces pastorianus
tgtgcgtgcgttacttcaagcttta

SEQ ID NO: 105678 - DNA, 25 bp, Saccharomyces pastorianus
atctgggacttgactatgtgcgtgc

SEQ ID NO: 105679 - DNA, 25 bp, Saccharomyces pastorianus
aatgtcgtcaatggccttttgctca

SEQ ID NO: 105680 - DNA, 25 bp, Saccharomyces pastorianus
atccgctctcttattcaggcagatg

SEQ ID NO: 105681 - DNA, 25 bp, Saccharomyces pastorianus
tacatcattttacaacaccttcggc

SEQ ID NO: 105682 - DNA, 25 bp, Saccharomyces pastorianus
ttcttagagaagtccactggcagtt

SEQ ID NO: 105683 - DNA, 25 bp, Saccharomyces pastorianus
tgaaattacggctgttttggcccat

SEQ ID NO: 105684 - DNA, 25 bp, Saccharomyces pastorianus
tctagctatcattattcccatccaa

SEQ ID NO: 105685 - DNA, 25 bp, Saccharomyces pastorianus
tttagtcaattgcacaccttcctca

SEQ ID NO: 105686 - DNA, 25 bp, Saccharomyces pastorianus
actggcagttttgttgatcccgtta

SEQ ID NO: 105687 - DNA, 25 bp, Saccharomyces pastorianus
gtagatcctctgtattctagctatc

SEQ ID NO: 105688 - DNA, 25 bp, Saccharomyces pastorianus
gtttgccattcacctccaagagaat

SEQ ID NO: 105689 - DNA, 25 bp, Saccharomyces pastorianus
gacttattaactccactcgaatgtg

SEQ ID NO: 105690 - DNA, 25 bp, Saccharomyces pastorianus
caacaccttcggctttttcttagag

SEQ ID NO: 105691 - DNA, 25 bp, Saccharomyces pastorianus
gacggctcaaaaagatcttctcatt

SEQ ID NO: 105692 - DNA, 25 bp, Saccharomyces pastorianus
cttccaatctgttgtgccagttaga

SEQ ID NO: 105693 - DNA, 25 bp, Saccharomyces pastorianus
ttaccgcagttaacactttcacgtt

SEQ ID NO: 105694 - DNA, 25 bp, Saccharomyces pastorianus
aagtatctcgtacctctgggagtca

SEQ ID NO: 105695 - DNA, 25 bp, Saccharomyces pastorianus
tcacgatcgccttcttttgtttaaa

SEQ ID NO: 105696 - DNA, 25 bp, Saccharomyces pastorianus
ccccaaccatttaccgtgaagactg

SEQ ID NO: 105697 - DNA, 25 bp, Saccharomyces pastorianus
aagccttgaactccaccaatattgc

SEQ ID NO: 105698 - DNA, 25 bp, Saccharomyces pastorianus
ttttcgctcttctgtttactcttaa

SEQ ID NO: 105699 - DNA, 25 bp, Saccharomyces pastorianus
tttcatagtcttaacgcaagcgatg

SEQ ID NO: 105700 - DNA, 25 bp, Saccharomyces pastorianus
tgttcatgatctaattcccctgtta

SEQ ID NO: 105701 - DNA, 25 bp, Saccharomyces pastorianus
gtggtcaattgggtcttttcgctct

SEQ ID NO: 105702 - DNA, 25 bp, Saccharomyces pastorianus
ggagtcaaacttttacgttcacaat

SEQ ID NO: 105703 - DNA, 25 bp, Saccharomyces pastorianus
gttcccaatgtaagactatatgttc

SEQ ID NO: 105704 - DNA, 25 bp, Saccharomyces pastorianus
aaattcaggccattgtaccacggac

SEQ ID NO: 105705 - DNA, 25 bp, Saccharomyces pastorianus
gaatgaactatccacgacggacagt

SEQ ID NO: 105706 - DNA, 25 bp, Saccharomyces pastorianus
aatacgatatattttgttcccaatg

SEQ ID NO: 105707 - DNA, 25 bp, Saccharomyces pastorianus
taccacggacaactcttttggaggt

SEQ ID NO: 105708 - DNA, 25 bp, Saccharomyces pastorianus
gttcaatagcctttgtattgcgaaa

SEQ ID NO: 105709 - DNA, 25 bp, Saccharomyces pastorianus
ggcaatgttactcttcattgatcgt

SEQ ID NO: 105710 - DNA, 25 bp, Saccharomyces pastorianus
tttactatagatttctggctaccat

SEQ ID NO: 105711 - DNA, 25 bp, Saccharomyces pastorianus
taaagtgagtatcctgtgtacgcag

SEQ ID NO: 105712 - DNA, 25 bp, Saccharomyces pastorianus
gaggtgcatactgatccaaacgatg

SEQ ID NO: 105713 - DNA, 25 bp, Saccharomyces pastorianus
aaacttgaacaatagcgacggtgaa

SEQ ID NO: 105714 - DNA, 25 bp, Saccharomyces pastorianus
atattcccatcttcgagctcttaga

SEQ ID NO: 105715 - DNA, 25 bp, Saccharomyces pastorianus
agcagcgcaaggatattcccatctt

SEQ ID NO: 105716 - DNA, 25 bp, Saccharomyces pastorianus
ctttatctctccaggacaggccaat

SEQ ID NO: 105717 - DNA, 25 bp, Saccharomyces pastorianus
attcgcgatatatagcggccaatca

SEQ ID NO: 105718 - DNA, 25 bp, Saccharomyces pastorianus
gagctcttagatacaacgcttataa

SEQ ID NO: 105719 - DNA, 25 bp, Saccharomyces pastorianus
ttatacgcaattagccgcccatatg

SEQ ID NO: 105720 - DNA, 25 bp, Saccharomyces pastorianus
taaactttctttatctctccaggac

SEQ ID NO: 105721 - DNA, 25 bp, Saccharomyces pastorianus
gggtgttatcatcttatacgcaatt

SEQ ID NO: 105722 - DNA, 25 bp, Saccharomyces pastorianus
gcattaacctcttttttgtattaca

SEQ ID NO: 105723 - DNA, 25 bp, Saccharomyces pastorianus
cgcactttttgcattaacctctttt

SEQ ID NO: 105724 - DNA, 25 bp, Saccharomyces pastorianus
aatcaacggcgacctccaagcgcgt

SEQ ID NO: 105725 - DNA, 25 bp, Saccharomyces pastorianus
ccgccgttgtcggtcaagaacatta

SEQ ID NO: 105726 - DNA, 25 bp, Saccharomyces pastorianus
tcgcctccaaggttcaagaaacttt

SEQ ID NO: 105727 - DNA, 25 bp, Saccharomyces pastorianus
atcaaggttattggatgccgccgtt

SEQ ID NO: 105728 - DNA, 25 bp, Saccharomyces pastorianus
ctgtcacttctgtgcaagccgttta

SEQ ID NO: 105729 - DNA, 25 bp, Saccharomyces pastorianus
gattaaaggacaccgttgcctcgtt

SEQ ID NO: 105730 - DNA, 25 bp, Saccharomyces pastorianus
ctttggccactgatatgggtctctt

SEQ ID NO: 105731 - DNA, 25 bp, Saccharomyces pastorianus
ttgcctcgttcaaagccgttttgga

SEQ ID NO: 105732 - DNA, 25 bp, Saccharomyces pastorianus
tctcaaccatttgctgtcgccgaag

SEQ ID NO: 105733 - DNA, 25 bp, Saccharomyces pastorianus
gaagggttctgtcacttctgtgcaa

SEQ ID NO: 105734 - DNA, 25 bp, Saccharomyces pastorianus
acattatgacgtcgcctccaaggtt

SEQ ID NO: 105735 - DNA, 25 bp, Saccharomyces pastorianus
tgtcgccgaagtctttactggtatc

SEQ ID NO: 105736 - DNA, 25 bp, Saccharomyces pastorianus
gctacaggcattctacggaaacgtt

SEQ ID NO: 105737 - DNA, 25 bp, Saccharomyces pastorianus
aaagagcttccgttcaagttagaga

SEQ ID NO: 105738 - DNA, 25 bp, Saccharomyces pastorianus
gaacagagcatttctctgctgcctt

SEQ ID NO: 105739 - DNA, 25 bp, Saccharomyces pastorianus
catatctgagactttgctacctttg

SEQ ID NO: 105740 - DNA, 25 bp, Saccharomyces pastorianus
gcagaattccatatcgacaacgttg

SEQ ID NO: 105741 - DNA, 25 bp, Saccharomyces pastorianus
gtggatgatctgtctaagctattta

SEQ ID NO: 105742 - DNA, 25 bp, Saccharomyces pastorianus
caaccctcaatccatttaccaataa

SEQ ID NO: 105743 - DNA, 25 bp, Saccharomyces pastorianus
gggctgtatggcgtagctttactta

SEQ ID NO: 105744 - DNA, 25 bp, Saccharomyces pastorianus
gagccttgcagagaacgagccaacc

SEQ ID NO: 105745 - DNA, 25 bp, Saccharomyces pastorianus
aggccggcaggcttattgatttcta

SEQ ID NO: 105746 - DNA, 25 bp, Saccharomyces pastorianus
gaaacgtttggtcccagttaagctg

SEQ ID NO: 105747 - DNA, 25 bp, Saccharomyces pastorianus
acggcggatctaatactggcatgca

SEQ ID NO: 105748 - DNA, 25 bp, Saccharomyces pastorianus
gttggtccaatattcacgggtatac

SEQ ID NO: 105749 - DNA, 25 bp, Saccharomyces pastorianus
aactggttatggcatcttccaccat

SEQ ID NO: 105750 - DNA, 25 bp, Saccharomyces pastorianus
agtaatcttcatggtcgactctctc

SEQ ID NO: 105751 - DNA, 25 bp, Saccharomyces pastorianus
atctctggcgttgggtactttattt

SEQ ID NO: 105752 - DNA, 25 bp, Saccharomyces pastorianus
gaattacttgcccttatctattttg

SEQ ID NO: 105753 - DNA, 25 bp, Saccharomyces pastorianus
agccacactattggtccagattcca

SEQ ID NO: 105754 - DNA, 25 bp, Saccharomyces pastorianus
tgcaacaactgccatggacgtcaca

SEQ ID NO: 105755 - DNA, 25 bp, Saccharomyces pastorianus
acatttgctcggtgtgttggtccaa

SEQ ID NO: 105756 - DNA, 25 bp, Saccharomyces pastorianus
ctattctcatccctatggccaagaa

SEQ ID NO: 105757 - DNA, 25 bp, Saccharomyces pastorianus
tctcgggtccgggtttatgacaagt

SEQ ID NO: 105758 - DNA, 25 bp, Saccharomyces pastorianus
tgcctttttataacagctccactac

SEQ ID NO: 105759 - DNA, 25 bp, Saccharomyces pastorianus
aagatcaccccagctattgcggaac

SEQ ID NO: 105760 - DNA, 25 bp, Saccharomyces pastorianus
gaaccagaggactttgttgactttt

SEQ ID NO: 105761 - DNA, 25 bp, Saccharomyces pastorianus
tgttaccaaccctgctaattcgttt

SEQ ID NO: 105762 - DNA, 25 bp, Saccharomyces pastorianus
aagtagatccttttagctctctctt

SEQ ID NO: 105763 - DNA, 25 bp, Saccharomyces pastorianus
gataatgcctcgagagccacatcta

SEQ ID NO: 105764 - DNA, 25 bp, Saccharomyces pastorianus
gccacatctactcctgggcaaggaa

SEQ ID NO: 105765 - DNA, 25 bp, Saccharomyces pastorianus
agctctctcttttcaactgcaaagg

SEQ ID NO: 105766 - DNA, 25 bp, Saccharomyces pastorianus
gctgcctctaatcctgtatctaata

SEQ ID NO: 105767 - DNA, 25 bp, Saccharomyces pastorianus
tagtgctcctaaagcatcccaagcg

SEQ ID NO: 105768 - DNA, 25 bp, Saccharomyces pastorianus
ggcatctgcagaagcacctagtgct

SEQ ID NO: 105769 - DNA, 25 bp, Saccharomyces pastorianus
gcaaacaacgagatccgcgcgatga

SEQ ID NO: 105770 - DNA, 25 bp, Saccharomyces pastorianus
tgtaccatagtcaccagcacagagt

SEQ ID NO: 105771 - DNA, 25 bp, Saccharomyces pastorianus
tagaagcgaatccactgtccaactg

SEQ ID NO: 105772 - DNA, 25 bp, Saccharomyces pastorianus
ggcagatgttacgtatgacccaact

SEQ ID NO: 105773 - DNA, 25 bp, Saccharomyces pastorianus
aaatgttcttgaggtcggcgctggc

SEQ ID NO: 105774 - DNA, 25 bp, Saccharomyces pastorianus
aagtgtctggccgaatgtcttgctt

SEQ ID NO: 105775 - DNA, 25 bp, Saccharomyces pastorianus
ggacatgggaagctgccttatacat

SEQ ID NO: 105776 - DNA, 25 bp, Saccharomyces pastorianus
gcccttacaagagttggcaccggta

SEQ ID NO: 105777 - DNA, 25 bp, Saccharomyces pastorianus
gaccgatgcaaactgtgtctcctat

SEQ ID NO: 105778 - DNA, 25 bp, Saccharomyces pastorianus
aactatccttcctgatctatgcaag

SEQ ID NO: 105779 - DNA, 25 bp, Saccharomyces pastorianus
aagccctgcaattcaaacctttgat

SEQ ID NO: 105780 - DNA, 25 bp, Saccharomyces pastorianus
gtgcgaagatgcgttatgcctggaa
